United States Patent Application Publication US 2022/0090207 A1 - sequence listing, part 2

SEQ ID NO: 8637 - DNA, 30 bp, Homo sapiens
  chr12:25347648-25347678
  hyper
tactaaaacatttccgccaagttgcaataa

SEQ ID NO: 8638 - DNA, 30 bp, Homo sapiens
  chr12:25348086-25348116
  hyper
cggacgacaggccccgcccacttgagctcc

SEQ ID NO: 8639 - DNA, 30 bp, Homo sapiens
  chr12:25368388-25368418
  hyper
attttttaattttcacacagccaggagtct

SEQ ID NO: 8640 - DNA, 136 bp, Homo sapiens
  chr12:25378545-25378681
  hyper
acctgtcttgtctttgctgatgtttcaataaaaggaattccataacttcttgctaagtcctgagcctgttttgtgtctactgttctagaaggcaaatcacatttatttcctactaggaccataggtacatcttcag

SEQ ID NO: 8641 - DNA, 95 bp, Homo sapiens
  chr12:25380228-25380323
  hyper
cctccccagtcctcatgtactggtccctcattgcactgtactcctcttgacctgctgtgtcgagaatatccaagagacaggtttctccatcaatt

SEQ ID NO: 8642 - DNA, 87 bp, Homo sapiens
  chr12:25398213-25398300
  hyper
tgttggatcatattcgtccacaaaatgattctgaattagctgtatcgtcaaggcactcttgcctacgccaccagctccaactaccac

SEQ ID NO: 8643 - DNA, 148 bp, Homo sapiens
  chr12:25404450-25404598
  hyper
ggggacttagggagaccgggcggacgatttcccacaccggggctgtctgatcgccgccccgattattatcagcctcagcacttgggctgggaatttagccccaggcccaaacaaacacgacagaccctttcaacgctaatcttctcgg

SEQ ID NO: 8644 - DNA, 45 bp, Homo sapiens
  chr12:26111917-26111962
  hyper
cagccggtgcggggcgcgcggcgcggggagcgccggggagtgccg

SEQ ID NO: 8645 - DNA, 379 bp, Homo sapiens
  chr12:26379707-26380086
  hyper
aggaggcccctgggctgcttgcggcagcctcctcccgagcagtgcgctgcagaagggcccttcccgttcaggccaccggggaaggtaattaaattggagcagaaacaccctcctcccgaggtcaccgaacgtgaaagctgcaggccgggtaccaattaaaggcagcgagcgagcggagacgcgcccgggcgctgctgttacataagcgcccggggccaccgcgcctccgcccgctgcgcagcgccgggctgatgggctgacacccgcaagacagatgcctcccgcgccgggcttttatcaagatatatttgctcggattctcaaggtcatcgtaaacactcttccttatagtgtattcgtgccatgtaggtaaaacaag

SEQ ID NO: 8646 - DNA, 30 bp, Homo sapiens
  chr12:26986790-26986820
  hyper
tgtccaggtggacgcgagcctccaaggagg

SEQ ID NO: 8647 - DNA, 47 bp, Homo sapiens
  chr12:27038032-27038079
  hyper
agcgcctctttcctcccgcagtgtctctttatcgccctctgctggca

SEQ ID NO: 8648 - DNA, 31 bp, Homo sapiens
  chr12:27485803-27485834
  hyper
agtagctgctgccggccgggctgcggggcgg

SEQ ID NO: 8649 - DNA, 1278 bp, Homo sapiens
  chr12:28127869-28129147
  hyper
tcttaggctccatgggaacttcgggggtctcggggcccgtgagcggatctagctactacttcccctaggttctcctcgggcttcagtccctaagagtctggactccggactgccgcacagaatccttcttgcccggagcggtattattgaggtctttgcgttctgccccgccctgtcccgccggcttgggtgcttggtttctaacccgagtatactcggagtctctggtcctgcgcgcccccctcctcccgggagagccccgtatctggctgcgggtaagggaaaacttcgggaaccccgagacccaaggacagggtcggagggagcgcgcgaacttcctctgagcagggctcttcctcccctcccctctccctccaggtcaatttatgactcaaacatgagataagccctaggcagacggtgacgctgacttccccgtgggggcgcggggagagaaggatgaggcagacgtaccccctccctggcctggccctgtccggggccgcgtcggggtgtggaggggcgactcccttcctccgggagccccgactcgctctctcccagcgcgcctcccctgcgcccgtaaagctcggccctgccggagccccgggacccgtctgttttatttcacttaaagcgatctgcaaagtcaaggccgggtgaggtgcggcgcgggagaggagaggatatgaacggacgtggaacgaagttctgtctgccaactccctccgtctgattcttggaatccggtggcatcttaaaggacggaattgagggcaaggagaagattattaatccccgaagcccgctctgtctatatataactgctcagtggttacagttggcgatcgcagggtgggggttgggggtgtagaccgtgggccatggaacacgtggcatctctccagggcataaaaatcaatctagctggtggctcctatggagtttgtaaattgcgcagagctggctgggggaagccagtgagctgtccatggtggttaaggctcgttgatgtgcgtcctcgggctgtcctggtgaggcacagacccccctaccccaggggccgcaacgccccagagccccagcctgccagcgatccagccggtgtgcgcccgacacgaggctggacgtgtgtttgcacaactccaggacgcgctcttgcacagaggccgaattccagagatagacggaaaaatctcccgattccaaattgtgggtttccttttagttccttcctgaacgtgtctttccccactcaggcaacgtttcacatgcttt

SEQ ID NO: 8650 - DNA, 165 bp, Homo sapiens
  chr12:29302135-29302300
  hyper
agcggcggagccggggaaggtcggagggagggtggtttcctcccgccccacacccagtctccgagccggatatatagagtgtcacgtttgggagccgaaagactggagccgtttccttgtggctggagcgcttcccgtagcctcggggaaggagcaggatttaga

SEQ ID NO: 8651 - DNA, 30 bp, Homo sapiens
  chr12:29534235-29534265
  hyper
taagataaaagaggcgtgcctacagggaaa

SEQ ID NO: 8652 - DNA, 420 bp, Homo sapiens
  chr12:29935902-29936322
  hyper
cgtctcatctgaacgaaacccttaaggggctgatacacttctcatctgcaaagctgcccaacagcctccgagaaattctctacttggaagcatcgccaccaccgccacccctccggaaccctctgggtccgcgctagtcccacttggtcacgatccggcaggcgaaggggtgcggaggcggtttcaccagcccgctcccagccctgcctcgagagagaagcccgctgagagggcagacagttgagaaactcgatcccaactccccagccggcgcctcccgaaccgccccgagagcccagattagccgggcagtggatcccggagcaaagtgccatgcacatcctggagaggagggaggcgtggagggaaagggcggcaaaaatgaaatgcccccaagtcagtcccgcaacttctcccggt

SEQ ID NO: 8653 - DNA, 120 bp, Homo sapiens
  chr12:29936395-29936515
  hyper
cgcagagcggccggtaggacttgtggctggtgttctcggccatgcccttgccccagaagtcgttggtgaagatgccccagcggagcggggcgccgggccgcacgtcggggttgttcacga

SEQ ID NO: 8654 - DNA, 100 bp, Homo sapiens
  chr12:29936542-29936642
  hyper
cgccctgcagggagcggccgtagcacaggcagcttgccccggccagcagcgccgcggccccggccggcgctagcccgcagccccgccgccgggagggtgt

SEQ ID NO: 8655 - DNA, 170 bp, Homo sapiens
  chr12:29936661-29936831
  hyper
cgggcagaggtggtcaccaccatcgcgccgccgccgccgctgctgccctggcctctcccgggcgtctggcatcctcccctaccggggccccggcggcgcgcggcgtctgcccggaggggggctcgggcatggtgctgcggcagctggacccgccgcgagctccccgcgct

SEQ ID NO: 8656 - DNA, 425 bp, Homo sapiens
  chr12:29936976-29937401
  hyper
cggttcccccgcacagcccggcgccctctgcccccggcccgccttgcttgcaggtggaccggggttcgcggcgcgcggctgcccgggagctgcggggaaggacaccccaggttcccacttgcggtgtccggctgtgctcacccccacgcccccgcccccatccttctcccccgaatggggctgggaaggggcacatctggcggacccctcccgggggacccaggagggtttagcaggtgcgcagtctggaacccccacacccaccttccagggagaaaagtgccgctgcttcccgggaagttcccggcttttcagcacccgggacaacagcagcggcgcccggagagacgctctccacccgccccgcgctcgcgtccagtcgccggctctgtgctctcctgcccgggctttctctcacccgcccg

SEQ ID NO: 8657 - DNA, 14 bp, Homo sapiens
  chr12:30322910-30322924
  hyper
agcgaggcgctggg

SEQ ID NO: 8658 - DNA, 425 bp, Homo sapiens
  chr12:30323014-30323439
  hyper
cggccccggctatcaacacctcctcctccccactgcgaatgccccgatcgtgctccccaaaacccaatacatccacgcccccaaaaaactgggaacccacgcgggtgccttctgtttaccgcagcgctctcactgcaggcgcttgagtaccagatggcgagagttcgcgcgcaggtggagtggggatcctggcgctaggctacccaggagaggaggggaagggcaacccgcggtcccgcctgtggtgcccggctgtgctcatccccacgccccagaccccaaaaggggctggggaggggcacatctggcggacccctcgcgggggaccaagcgggtttagcaggtgcgccgcctggaacccctacgcccaccttccagggagaaaagtgcctctgcttctcgggaagttcccggcttttcagcac

SEQ ID NO: 8659 - DNA, 32 bp, Homo sapiens
  chr12:30948777-30948809
  hyper
gggtgtgtagggcacgcgacttggagccaggt

SEQ ID NO: 8660 - DNA, 53 bp, Homo sapiens
  chr12:30949035-30949088
  hyper
agttcccaccgctccgggtgtcctccccagtgcgccgcgatttttgtgtccaa

SEQ ID NO: 8661 - DNA, 30 bp, Homo sapiens
  chr12:30975734-30975764
  hyper
cacccgtttgctctcgggtccttttggtga

SEQ ID NO: 8662 - DNA, 27 bp, Homo sapiens
  chr12:31079340-31079367
  hyper
cgccccccttagggatccccccggcaa

SEQ ID NO: 8663 - DNA, 246 bp, Homo sapiens
  chr12:31079417-31079663
  hyper
cgcagagaggcaaacccccaaacaaagagccggcagctcgcgtgcggggctcccgggcgcgtcctgccggctgggctgggagagccggcgccggggcgtcgcggccgagcgctgggcaggcggggactagagggccggcaggaagcctcagtgggcgcaggggcgcgggccgggctgcccacacgctgaccttcccgggctgggagggaggagcgctggctgcgggcggtgggcggctgggcggcc

SEQ ID NO: 8664 - DNA, 141 bp, Homo sapiens
  chr12:31079693-31079834
  hyper
cgcagctcccttcgccgcttccggagcccctggcagggtaagtgcagaagcgcgcccgaggagtgggggcgccgcgggagggggctgggggtccaggagaggcgcctccacctccgctgcccgccccgccggcagtcccga

SEQ ID NO: 8665 - DNA, 30 bp, Homo sapiens
  chr12:31479303-31479333
  hyper
gagggaaacgggggcggggactgcttacta

SEQ ID NO: 8666 - DNA, 30 bp, Homo sapiens
  chr12:31743352-31743382
  hyper
gccggcgcgccaggcggggtccgtgccctt

SEQ ID NO: 8667 - DNA, 30 bp, Homo sapiens
  chr12:32552264-32552294
  hyper
cggctccggggccgcgcccagggcgctccg

SEQ ID NO: 8668 - DNA, 30 bp, Homo sapiens
  chr12:32553018-32553048
  hyper
attgtggaaggctgcgctcggccacccact

SEQ ID NO: 8669 - DNA, 30 bp, Homo sapiens
  chr12:32908756-32908786
  hyper
gggtaccagaccaccggccccaggaaaagg

SEQ ID NO: 8670 - DNA, 30 bp, Homo sapiens
  chr12:33048898-33048928
  hyper
cacacagggtggagcgccccgaagtacttg

SEQ ID NO: 8671 - DNA, 297 bp, Homo sapiens
  chr12:33049326-33049623
  hyper
caggtgggcagaacacggggtcccgcactcccagcacgcggggtgagggcgggataggaggaggtgaccgggtgtggggcagggggcggcgccggggagcggcgggctccactcaccgttgcccacggagctgcggcccttccgggcgagggtctgctgcacctgctcctggatccgcaggctcttgactgtctggccgccgcggccgctgctccccgccagcttcagcttggcctcggagggcagcgccaggctggagctgtccagttgtcccaggatctgctggcccaggacggt

SEQ ID NO: 8672 - DNA, 683 bp, Homo sapiens
  chr12:33049652-33050335
  hyper
cgggggctgccatggggccggtgggggcgaccgagctgctcgcctgcctctggactcgcgggcgaagccgccacggagctgggggcgctggcgcgagccccgccccgctcgagtccggccccgcccctggcccgccccccgcgccggtgagaggcccgggccgggggggagctcggcctcgtgggccggacgcccggccttccctgaggagggggcgcggctccggccgggcacgcgcagtcgggcccgggggcgggggcgggggcgggccggacccgctgagcgcgcggacacctggagacttgtacccgcccgcggggaggtggggagaggggcgcggttcgcctggggtcgcgcacgttgtcggagtcccagcggataccgcctgccggggccgcgccccgctctgcccacgccccgcgctggacaggatggatttccgctcgatgcagggaggggctgccctgcaggcaggtgagccctcgagagtcactcctgttcttggactgaggcttgcctccgggatccccgagcgagtagtatgtctggttagtcaggctttgtcgcactgttggaaacgtttcctggttttcctggacctgagggtgagaaagggctatttggtcaggcggaaagggcaatatgagggaaatgtgccaagaagataacgtgtgaaataaaag

SEQ ID NO: 8673 - DNA, 270 bp, Homo sapiens
  chr12:33591742-33592012
  hyper
ctttagaaattgtcaggtgcccgacaggttgcagccgcgggttacctcggaggccaaggcagccacctctgcaagggagttctgcgtccaagcatggcttgtccgtcccgcctggcccccatcaacaaggccgggaccagcggccggtggaacgagcgagagcagccctagtcccacaggtgagccgcccccacaagcagccaagccgcgagccgtcccggcgccgtcaccgcccgcactcacttctccactccgggagggagatgggag

SEQ ID NO: 8674 - DNA, 196 bp, Homo sapiens
  chr12:33592057-33592253
  hyper
cggcgccgggaggcgggaagcggaccagagaatgggagaagcccggcaggtggacaggaggaaacaaaacccaaacgccccaccctcgaagtcgtcaggagctgagcgaaggaaggagcgaggtaggaaagcgtggcgccccaaatatgccgcgggagcggcgcgggaggcgcagaaccccggagcttgcagccta

SEQ ID NO: 8675 - DNA, 563 bp, Homo sapiens
  chr12:33592284-33592847
  hyper
cgagcggagccctcccggttacctgtgctgcttccgccctggctgcccctgtcccgagggaagatgcccgagcacttctcccactccacctggccggcgaagcacagctcggtgacgatgtgcagagccttctggcacagactgttcactccgtcctccttgtggaaactcatcgtttggcttttctttcgttttctctttttttcccagttagccgtcttttcctcttcccgtacctctaacccctctggcgccctaagccatagtccgcccgcggtgactttggctggagattgcgccgctgagagccggcaactcttaggagccccacgttggccccatggcgggagcggagggcgtaggggaaggagaggcgcgcgaggaggctgcggctgccgcgaggtttgcgccaactctcccgccgcgcgagcgagccgaggcgcgctggaactagagacccggcatggagtgctgaggggaggggggagccgtaaaaaagccaaagcaagccctcgactcgcaagcacgcccccctcctctccccagcgcactggtgtttctgg

SEQ ID NO: 8676 - DNA, 101 bp, Homo sapiens
  chr12:33592932-33593033
  hyper
cgtcctctgaagaagggactcgcgagggagggagggagggagggcgggcggcccggcgcccctgccgaggccggggatgctcatcgttgcccagagttggc

SEQ ID NO: 8677 - DNA, 71 bp, Homo sapiens
  chr12:34260769-34260840
  hyper
ccgcctggctaggggcaggggcgccgccctcccgcggctccggagctggccaggggaagcgcccgcggggt

SEQ ID NO: 8678 - DNA, 157 bp, Homo sapiens
  chr12:34260905-34261062
  hyper
cgctccgccggaccctgtcctccagcgtggctgcggccccatggcctgcgacagccgccccgtccggaattcggcgccctccccggggcagaggccgcggcgtcctcaggctgtagcgccggcctgcgacccccacgcctggcttgggacccagagg

SEQ ID NO: 8679 - DNA, 1185 bp, Homo sapiens
  chr12:39298556-39299741
  hyper
tgtactgagccactgcgcccggccgagagtcagtttttacaagcactcagatgtgggcccgaaaacaaatcaaaacaaaagtcgtgacttcccagatcttaggtaaggcatagattcgtctgcaaggagggccgaaatctctacctatcaggcaaaaggcaaaaagcccggaagggtcggggagaagcaagctggaaggctccaggaagtgggtggggaggaagctgccggggttggagccaaccctagcaacagcaggtttgcacacgcctagcagaggaagtcccgggcctaagcgtgcagcggtcacaagagcttttggcagtgctgtccccttcgattccggtcatcacccaaccatccagcccgggtttggggcggaaaaccggcttgtaaagtgggcggcggccggtgttcccacagctgagtcacagcccagccaacttttacagcgtttcccagaaagaaaatacaaagtctcagtcccggagcccaccgcttctaattcccgctcccctgtgtcacctgacccggggtaactccagccccactactgagatatttcccactcatggcgcaacttcttgcctgcgcaaagcctcgtggtaccccgagcgctctccaagtgctaccaaccccacagatgagagggcaggagagaggggaagggctgcgtcctcacctgcaggacacggacacctccacccgcgtggccgggatggcagcgctcagctggttcaagtccccgatgcccgcagtgctgttgtagcggctgtccatattgggaggaggcgccttggacttgtccggcgcccacaaccacagctcgggcggactgagggctagctcccgtcaggcggggatgggggttgagggtggaggcagaagaaggaggcggaggcagcgcgcgggatgggggagggaagggaggaggcggacctccgcgcagagccacgagggaaccgctagccagtcctgggtgaaactgacgctgccaggcaagtggcgcgcggggatcccggtttcccagcccccttccggcaggcagcagcccgggcgggggacacactccgtgatcccctcctggctggaggggtcaggcttggtggacccagcaagcagcctgatggagaaggtggcaccagacgcagacccctaccgtccaggaccgcaagccctcgccgg

SEQ ID NO: 8680 - DNA, 30 bp, Homo sapiens
  chr12:39837347-39837377
  hyper
gcgaccagcctgtgcgcccttccaggctct

SEQ ID NO: 8681 - DNA, 30 bp, Homo sapiens
  chr12:39837645-39837675
  hyper
gttctacagttcatcgcccgtttaccagct

SEQ ID NO: 8682 - DNA, 708 bp, Homo sapiens
  chr12:40618340-40619048
  hyper
agttcccagaccttccgtggggccgcaggatccccggctggcgggtcgcggagggtggccggccgggctgcgcactgcgcgcctccgctgcggggctccgggcctgtggactcagcggagtccgctgagtcagtttcttcccgcgcgactcccggccgcgccgccgctgcggtggaatctggtcccaggaggcggcgtccgcccggggtccggtctaggcgtgcgtgggggccacggtcacggtcatcccagccaggcccggctccagcagccccacggccgccgccagagttctgcgcggcccgtcgcctcggcggagcctctggcaggcccctgagctcgtttttggggcctgagtgggggaggaggaagccgagcaggagggctccggagagggagggcaacgcggggcggggagctgcctccttcctcataaacaggcgggcgtgggcgccgatggggcccgcggggagcgctggctgcgggcggtgagctgagctcgcccccggggagctgtggccggcgcccctgccggttccctgagcagcggacgttcatgctgggagggcggcgggttggaagcaggtgccaccatggctagtggcagctgtcaggggtgcgaagaggacgaggaaactctgaagaagttgatagtcaggctgaacaatgtccaggaaggaaaacagatagaaacgctggtccaaatcc

SEQ ID NO: 8683 - DNA, 80 bp, Homo sapiens
  chr12:41086212-41086292
  hyper
gctgccccaataaccgccctaaaaggccgggcttctgctgtcaagtagccagggtgggctccgccgaggcgaggaggggc

SEQ ID NO: 8684 - DNA, 424 bp, Homo sapiens
  chr12:41086692-41087116
  hyper
cgccagcgccgggaactcgccccagggatgccatatcgcctcggcaggggaggggtggggaagcagagaggtcggcagcccggggcctgcaggtctttttctcccgacgccggcccgcacctgctcatctttcccatcccacctgggcgcctggctagcgcatcccggaaaacctgggagcggttgcggagaggggaggaagcgacttgtttgtcccctgacccctctgttaagatctagctcccttcaggagatgggggtggggaagaatccctgcaactcgaagggcacgttccgattaattacgtctccgttgagaaggcaccggcccttctccacgatctgcggcaggtgggagggagagaccgcggagccacggccccttccctcctagcctggcgctgtctacgggaaccaccttcac

SEQ ID NO: 8685 - DNA, 33 bp, Homo sapiens
  chr12:41582173-41582206
  hyper
gccccgggggtggcccggggaaggcaggggggc

SEQ ID NO: 8686 - DNA, 165 bp, Homo sapiens
  chr12:41582398-41582563
  hyper
cggaggcgccggtgcccgctgcagtgccagcccttggcgcccggcgagctgtaccgggtgctgccgctgcgcagcctcatccagaagctgcgagtccagtgcgactaccgcgcccgcggctgcggccactcggtcaggctgcacgagctggaggcgcacgtcgag

SEQ ID NO: 8687 - DNA, 164 bp, Homo sapiens
  chr12:41582780-41582944
  hyper
tggcgcagctctgggcgctgcagggcgaggtgcagctcacggcgcgcaggtaccaggagaagttcacccaatacatggctcacgtccgcaacttcgtcggcgacctcggtggcggccaccgcagggtaagcaaaggggggtgggcaccgcgggcatggtcgatt

SEQ ID NO: 8688 - DNA, 30 bp, Homo sapiens
  chr12:41699787-41699817
  hyper
tttcaaaaacacaatagtgggacaggcata

SEQ ID NO: 8689 - DNA, 30 bp, Homo sapiens
  chr12:43946269-43946299
  hyper
caagcacccgcgtacgtgaaaggtgcctag

SEQ ID NO: 8690 - DNA, 76 bp, Homo sapiens
  chr12:45268984-45269060
  hyper
gggatgcagcacgccgggcataccttgaaagagaaaggctttcgtcccattatgcagccccgggacctgacgcact

SEQ ID NO: 8691 - DNA, 615 bp, Homo sapiens
  chr12:45270296-45270911
  hyper
cctctctcgatgacccgggcaatgccaacctcctttcgggattgaaagctctaaatccaaggtgctaagttgatgggcggtctttgctctcacccctcgatttcgggcgcgtgtcttgaaagacaggagagaaaaaagaccacccagctgcaggaggcaaggctggagcgagtagcgctcgcctgccctttaagcaaaggagggaagcccatgtgcactcgtgcactgggctccggagcagccccggggtgcagggcactccccctccagggcgtgcggaggaaggccaccaaaacacgctgcactgccgaggtggagctgggcaaagtaggtagagactggtggggacggatggcgagcctgggaagccccgggtgtcctggtggagaggttccctgccgggggcggggcgctggagagcttccccggcgcggagagcttcccgggcgcggagagcgcagagaacttggccaggaggtgctggacagctccggaacccgcgcgccccctgccaaataaagcgtggagacccggactcgggctctctgggaccagcatacagcagaaggcaaggggaactgagccagggcgtctgttcacgccgaaatatctacc

SEQ ID NO: 8692 - DNA, 569 bp, Homo sapiens
  chr12:45444112-45444681
  hyper
tcacagaaagtggtgtgcctccgcctgggccccctactcccgaagtggcatctccactaaagctcgagatgctccaggaagttcccaaaccggctctccctgggcgcagtgcgcaccgccggcgctcccagatccctggaccacccggcctgggggcgcgggcgcggctggggagggaggggagagctggctcacctggcgctgaaggctggaaggtacagtctcggtcccccggagcccggcccggcagcctcgcactgtccgcagagggactgagcacttgaaaagcccaccgcgttccgtagggcgccccggcggggctaacttgttcggctgcggggcacagctttaggggaactgggctagcaggcaggggccggagctgcgcgcccgcggtggccagggcggtcgccgggtcgtggggcgcgggcggctgcagcctgggcgttggggcgcccccgacccgcagcaaattctcgatcaggaaactcttgcccaggttgccaaagccgggcgcagcggggaggttgaggagcgcggaggaagccacaacgtcccagtacgcaccg

SEQ ID NO: 8693 - DNA, 692 bp, Homo sapiens
  chr12:45444714-45445406
  hyper
cggcgccaaccggtctgctgcgcgcccgccttgcgcccgcctgtcgcccgggcgccccgcaccgcacccagagccgcagcttctcgccgccgcctcccgcagggctggagcgcgcggagccaggcagggaggaaaggccacccgggacggcggcggacttggaacgatattatttatttgcgttgggcgtttttttaagggatgggaggagtgagtgtgggagggggaagctgtgagtttctctggccgacagcgtaggctctgggagcgcaggggggagtctttccccctctctatgcagatctggacgggttttttttttgttttttgtttttttctggacggacggaaggtgtgtccagcccatccattcatgtcaccagccccacaaagtgacagacgcggccaacaataagggtagtgctgtggcaaggggaggggactcgtagtgggaggaggtgggcgtggaggcgacgtgaatcgggcgcgctcgccacctccccgctgccgtgcagagccgtggcactctcgctagagcccaagcagtcccccaggcgtggggtctggtggacgctggcctggagcgcccggagggcggggtgggggtgggggggacgcgctgtcgtctggggtgtctccgcgtactcctgttgggcgaaccctggctctccggtgttggttgtcacttgagc

SEQ ID NO: 8694 - DNA, 30 bp, Homo sapiens
  chr12:46124283-46124313
  hyper
gtcagctctgccgccgctgccgctctagca

SEQ ID NO: 8695 - DNA, 30 bp, Homo sapiens
  chr12:46385510-46385540
  hyper
ctagtttctcttctcgtcgactgcagcaag

SEQ ID NO: 8696 - DNA, 30 bp, Homo sapiens
  chr12:46663392-46663422
  hyper
ggcggcggggagctcgggcacctttaaaaa

SEQ ID NO: 8697 - DNA, 466 bp, Homo sapiens
  chr12:46766924-46767390
  hyper
agcagtccttgctttcgggggacacatcaaggcttttgggggacaccaccctcccaccaaacactttcttgattgttatttttgtgatttacagtgaagttttgtctcacaaacttgggccaaggcagcaaggttgtcctgatggtttgttgttctttcttttccacctagacctgctttcactcttcaaaactagccggaggtcggcgagcagctccttttcgggatgtgctttttgtacggccatggaaactggactagcggaaaggctaccttttggccagcaagccaggccccttagaaagaggccccagtggggagcccggcgctcctaaggccgtttgggagtccccagttttccactcgctgacacgttgcttctcttatcccaccaccgccgccccgggcaaaggcactgccttgtctgaatgcgggtctgaggcgctttctgcggagcctggtcctt

SEQ ID NO: 8698 - DNA, 34 bp, Homo sapiens
  chr12:47224939-47224973
  hyper
gccctggcccagagcgcagcgtccacctgtacca

SEQ ID NO: 8699 - DNA, 275 bp, Homo sapiens
  chr12:47225027-47225302
  hyper
cgcgctcgccacctctcctggactcaagggtgctcccggcttacgcttctcggggcttcccgggtccgggttccctctcccccgtctcactttcttccttcattcgctcttctctcaatttttcctccatcagctctaacctgtaatcaattcccgccttctgcccctcctccctaggcttctcttagctcggttgccgcgaccccactatccgtccccgttcgcatttctgcaccgccctgcccttcactccagcgcgcagcaggccgggcaat

SEQ ID NO: 8700 - DNA, 157 bp, Homo sapiens
  chr12:47225319-47225476
  hyper
cgccctcggaaccgctggcgcagttttcagactcgcccaccgcccagagaccaggggcccacatccagctctgctctcgccttctcccttgaaagagactccttgggggctccccaggtcagagtaccccgcccggggaatcatgctggtctctggg

SEQ ID NO: 8701 - DNA, 9 bp, Homo sapiens
  chr12:47225550-47225559
  hyper
cgggtccag

SEQ ID NO: 8702 - DNA, 30 bp, Homo sapiens
  chr12:48099379-48099409
  hyper
acccgctgtcccggcgaacaccgcacaccc

SEQ ID NO: 8703 - DNA, 30 bp, Homo sapiens
  chr12:48397040-48397070
  hyper
atagttgtagcaaccgtagcaatcgaccag

SEQ ID NO: 8704 - DNA, 895 bp, Homo sapiens
  chr12:48397850-48398745
  hyper
actcttcttggtgaacttctgcgtgtcctgtgcctaagtcggcgcgctacgaccccgggagccgttttagcccggagccgcgggctccagagctggagcgggccggggagaaggatgctgagggacgcatggaaagcaggcaggcaggcaggggcgggggaagacttacggacatcctggccctgacaccgaaggacagcggcgacgagcagcgtcagcagcaccagcgtctggggagccccgaggcgaatcatggctcaccgcggggcctggctgagccgggcccgggcggagcgcagcgaaacggcaggagcacggcgcgggtccgggtctctaccgcgccctcatgcaggaggcccttggagcaggagggggaagcgggagacccggcagcccagcagcgctctgcgtcttctccccgccgcggcgcccgttatatgcgcccggcccctttcgaggctggcgaactcgcccaaaccgcgggccgccccctgccccccgctgggctgtaacctgaaccgcccgcccccggagcccgcctgggccctgccagtgcccgcacctgcccaagccggacccccctctctgggagtcacgcttcccgccctccacccctagtgcgccgagtggcctgatcgggcggggcgcagagatggcccctgccccccaaacccggggctgcggcgctgcccccctctgaccacaggcgggaagggtggcctccggcccctcccctcggagttctgccggagttggaggggagggggtgtttgcagaggcgcaggccgagagccctagaccaaggacggaaaagacatgggagggaggagggaaagcggtagaaaggagcagcggagggcgagggggcaccgcgtcaggcgtttgggagtgggga

SEQ ID NO: 8705 - DNA, 30 bp, Homo sapiens
  chr12:48551579-48551609
  hyper
tatggttgcacctgcgtggaccaggccagc

SEQ ID NO: 8706 - DNA, 969 bp, Homo sapiens
  chr12:48576841-48577810
  hyper
tccttcccccgctccggtgatttctatagctagagggctgatttactgcagaaacctccgtagcgccctcctcctgcctctgcaccgtcaggcccggtgggtccggctccagagcgccaccgtgccccagctcaactctgggatcattagcaacagcctctctaccctctccgctttcctgcgcatcgctggaggacagggaggcaggactcgactttagcgccatcctctgagaaaggaatgcgggctggaaaaatctttccagggcagtctcgctgggtctcataccccggctaggggagggacgatctctcccggacttggaggtttctgcagcagacggctctctcatacttccctattaaacattgcgaccacacgctctttccagccttggccgaagccactgtagcgtcccctctcctccccccaccccgctagtccagactccagagccccactgcagcttccagccatcctccctttttcttcgccacttcctggttaccatggagacacacgtcatttacgtgccgtgcgtcgccttggaaacagaggagcatccgcgacacccccgggagacccaccccagctgctgctgccacactcgcgggcgctgcccggtaatggcctgggggagtcccgagtccgacgcgccgctggcctcagcctggacgcggacccctccgcgagcgcgtctgtgacccacggaaccggcaggcgctctctgcttgtggcgcccagagggcggcgctgacacgggcgcgatccgggaggcgaggcagggcagggcactttcgtcccggggcgatcccaagagacgccggctctgggaccctcgccgggtcctcgtcccgcagcctcttctcggcctcccgcgatcctgcctgcgccctctgcccaggactcgtctctcacgtcggctccccgccagtctcgggagcctccgcttccctcggctcccgctag

SEQ ID NO: 8707 - DNA, 30 bp, Homo sapiens
  chr12:48591658-48591688
  hyper
tcaacggagggaagcggattcaacaattat

SEQ ID NO: 8708 - DNA, 30 bp, Homo sapiens
  chr12:48591979-48592009
  hyper
caattcggcgcgggcgaggcggccaaagag

SEQ ID NO: 8709 - DNA, 30 bp, Homo sapiens
  chr12:48592255-48592285
  hyper
ccttcccatattttcggtctttgggctgcg

SEQ ID NO: 8710 - DNA, 30 bp, Homo sapiens
  chr12:48744932-48744962
  hyper
gcgggcgccggaatcgcagcctgctgtggc

SEQ ID NO: 8711 - DNA, 336 bp, Homo sapiens
  chr12:49182446-49182782
  hyper
ggagggaggcaggcggcgggcgacgggggtggcgagcgccggacctaggagtcctcgatcccactgcctccatgacttccctttgccaaccccaactccctcgggcaacactgccgagacgacccgtccaaggcttcggcgcccccacccacaaactcttgtcgagagccgctcgggtgcgttccaatcctggcgcaccgggagcccgagcggccacttcccctagccctcagcgcgctcacctgccggcccggctccgcgcctgccctgggcccccgccccgccgcccccgcgggctccggccggccggccggccgtcccgcggtcctccgagcc

SEQ ID NO: 8712 - DNA, 135 bp, Homo sapiens
  chr12:49183195-49183330
  hyper
tctcccgccctcaccccgggggtccccgagcgcgcccgcaaacccacccctcacggctacatcccccgccccgcccaccgagggtcgccttccttcctgtcagggtcccaggggttgggccggcgccccgcgccc

SEQ ID NO: 8713 - DNA, 30 bp, Homo sapiens
  chr12:49259400-49259430
  hyper
agccggccagcgggcgggcgggcagctcac

SEQ ID NO: 8714 - DNA, 60 bp, Homo sapiens
  chr12:49351295-49351355
  hyper
atacttcccacctccccgatcgcgcgatagctgcgcggtagctagcggcagttctcgcga

SEQ ID NO: 8715 - DNA, 30 bp, Homo sapiens
  chr12:49351693-49351723
  hyper
ctgaaagccctcaccgcaccattgttgttg

SEQ ID NO: 8716 - DNA, 233 bp, Homo sapiens
  chr12:49363882-49364115
  hyper
atggcgctgtggtgcggcaggcggccgccgccctcaagcgcggagcagttccagcgctggtcgcgcagctggtgctgacactcgtggaccgcgatgtgcagaccctgaagcgcggacgccgtcacgtcggggttgcgcaggcacaggcctagctgccgcttgctcaggccggacagcgtcaagcacacggtgttggccgtcagcggcggctcgccaggcaacttcaggcccag

SEQ ID NO: 8717 - DNA, 30 bp, Homo sapiens
  chr12:49366523-49366553
  hyper
cggctggccccacgcgccccaggcacattg

SEQ ID NO: 8718 - DNA, 153 bp, Homo sapiens
  chr12:49371613-49371766
  hyper
aggtttctctccaccgctaggctccttttggttagctcacccccacaactcatccccgggatttccctgaccacagccgcactcacgcccccgtctcccctttttccttctctgtccagccatcgggggttcctgggcggttaagcatctccc

SEQ ID NO: 8719 - DNA, 204 bp, Homo sapiens
  chr12:49374822-49375026
  hyper
gcctgggcctttgctgaggtccggcccccgtggcgtccgggagagggcagtgtctgggagggtgactctggcccggtgccctgggacactctttcttcccctatccccgcagaccgtattctccgagatgcgccaggagtgcaagtgccacgggatgtccggctcatgcacggtgcgcacgtgctggatgcggctgcccacgct

SEQ ID NO: 8720 - DNA, 455 bp, Homo sapiens
  chr12:49375115-49375570
  hyper
cggagctgctgcgcctggagccggaagacccggcccacaaaccgccctccccccacgacctcgtctacttcgagaaatcgcccaacttctgcacgtacagcggacgcctgggcacagcaggcacggcagggcgcgcctgtaacagctcgtcgcccgcgctggacggctgcgagctgctctgctgcggcaggggccaccgcacgcgcacgcagcgcgtcaccgagcgctgcaactgcaccttccactggtgctgccacgtcagctgccgcaactgcacgcacacgcgcgtactgcacgagtgtctgtgaggcgctgcgcggactcgcccccaggaacgctctcctcgagccctcccccaaacagactcgctagcactcaagacccggttattcgcccacccgagtacctccagtcacactccccgcggttcatacgcatcccatctctcccacttc

SEQ ID NO: 8721 - DNA, 156 bp, Homo sapiens
  chr12:49390948-49391104
  hyper
gtgctctgggctacctggctgcgtgggggcgtcccgcaggtttacttcgggggccgggagccccaagatgcggaaagtgcgctcctccagtgtggagtcccccggcctcccgccctcagcttcgcccccgcggcccccgccgggctggtgtaaaag

SEQ ID NO: 8722 - DNA, 1440 bp, Homo sapiens
  chr12:49391146-49392586
  hyper
cgtggccccttcaccctcctccttgccgggcttcgattggctgggggaatcccccaccacgcgtgtcaccccagagggcaaaagctgcacctgctgggttcggggggttggaacatattgggatcgtatcactacgcacgtggcgtcaatgacaaagacgccttccccacgggacaggccctgggaactgcggggcaaggtgtgggcacggcgggtcgccttccaaccctccagggtctccggtcctgccccctctccaagacccagagattctctccatccggtgcctccgggagcccagggtctggggagtgtctggctatggcggggcggctgctttttaggggagggaatccagcatttgggaaaccagatctgttctccttctttcccttccctcgagcccttgaggtggtgcctggatctgggagcgggatgcggggcacagggagccgcagttgcagaccccgcaggagctatctcggtgcctgcgctccctgtagctttggcttggggatggctgtcgctaccactgttcaggtcagcagcagccagccccaggcttttctccacgacccccttgccgggctctggccttgctctggccgctccacagcctggggatccccccaagagaccttgcccctgtcggagaccccaagccccgaggacgtcccggtagatccgaggatccagcctcttctttgtgcgccctccgtctgtcctggctggagtcgcagctggggctgatgaagtgggcacctgagagttcccggggcctctcttagtccccaaggtcctatgggggccttcgtaagaaggtggagccacgtagggtggcggccggtcccagcggcgtcgtggggcggtcccggcagaacctctcagcagcaggtgagcctcgtagcttgggggcccgggccgccgacctccccagggccccgcccacgccgaccctgggtcgctctgcggctgcgcggatggacggggcgctcgccccacaggcgccaggcgctccggccgcaagggagcagggagccctgccagctgggccacccgaggggcgttgcggggctccgggcggggtcgacccggggggctccgtcgggccccaccagccttgcgcctttttcgctcggtctccttggcctcccgctcctgcgacgccgctttccttttctcttgctcccgagctcggacctcggccaggggccccgcccgccagttggtcgcctcctgcagcaccctggaggcccagggccggcggggcggcggctgtggggatcccgggcgcggcccacacctgggacaatgagcaggaacccaggtgagcagtttgtgggggaagggagccgaggtccggggagctgggagcactggagaccacttggggcagccatgtgaaggggtgtgtgtgagtgtgtgcgcgtgtgcacgtgc

SEQ ID NO: 8723 - DNA, 30 bp, Homo sapiens
  chr12:49392792-49392822
  hyper
gcctgcggggaggtccggaccccactcccc

SEQ ID NO: 8724 - DNA, 30 bp, Homo sapiens
  chr12:49393393-49393423
  hyper
agtgccccctcccccgcccctatttcttca

SEQ ID NO: 8725 - DNA, 30 bp, Homo sapiens
  chr12:49412407-49412437
  hyper
ttgctagacaccagcgccagcccctgcccg

SEQ ID NO: 8726 - DNA, 30 bp, Homo sapiens
  chr12:49524763-49524793
  hyper
gggactcgagggaccgcacccaggacacag

SEQ ID NO: 8727 - DNA, 30 bp, Homo sapiens
  chr12:49658698-49658728
  hyper
aatccgccaatcagcgccgcgcgcccccac

SEQ ID NO: 8728 - DNA, 219 bp, Homo sapiens
  chr12:49659029-49659248
  hyper
actactgcctgcacctcgggccgcgcccaggacagctccagactaccccgggcccctccggttaacctggcttgtggcggccgggctggaaggtcgagttcacttggcagacaccagttcgggccggaaaacctggcccgggtgcggccatcagtggaaatggaaagccctcttgatcctagtgagggctttccccgcagggcccgctactgccctagg

SEQ ID NO: 8729 - DNA, 30 bp, Homo sapiens
  chr12:49690847-49690877
  hyper
gccgggagggcctgcgaggcgggacgctgg

SEQ ID NO: 8730 - DNA, 394 bp, Homo sapiens
  chr12:49729892-49730286
  hyper
taaccctcgtggggccgccgcaggcccgcgtagaaagcaatgcgaggcacgtagccggcagcgggcgccaccccgcccggacctggaccgggagggcccggggggcctggcctgccgggttctcctgggggccctcttggacctggtggtccagggggcccccgcaggcctgctttcccgcgccggcccacctctcccttggcgcctggcgggaaggggggcacggaagcaggcgcgccgtcgggaccagggccacggggcccatgcgggtcgcacaccatgcggcagcgacccagcatctcgtagtgcgctggcccgcgggagctgtgcaccagcagcgggatggccaccagcagcagcagcaccatggccactccgacggccgcgcccgcca

SEQ ID NO: 8731 - DNA, 735 bp, Homo sapiens
  chr12:49735887-49736622
  hyper
ctccctcctgcactccctccccggcggccgcggcctttattagggattccgcggctgtcggtcccgccatccatcctgtccgccggcaattaggcggccagacaaagagcagcttcggatggatgagggtcccagcggatcggaaatgtgaagggtcagcgctgccgcccgcggcgcaccccgctcccccttccgcataatcaccggccgcccgtcactcagccggccgcccagggagctcctgggcccggcccgggagagggcggggtgcggctgcagcctaggcgcccaggacagggcgagggcggacctgcggcaggagcgcctcctgcggggcagtggaggactgtggcctgaggcattggccgaagggtgggggattatggccccgggcactccccgaagggaaactggggctagcggcttggggcctcccagtggggaagagggaacaaaagctgcggagaccggaggcccggggtccagggcgccccctgctgggaagctgggaaccaagccttagaggtccggcaggtacagatggaaccaggcccagggcgacccctcctagggaaaccaagggtttctagcctggcgcgcctcctgccggctttgaatgacactgcgcttctatgcccgctccgttcagtgaaatccaaccaatccgcatccgctcaaaaaaggctccaagtcctggcgaacccgaggggagccgagagggagttcaaggagtcc

SEQ ID NO: 8732 - DNA, 302 bp, Homo sapiens
  chr12:49761540-49761842
  hyper
cctggggtctgtggggcgggtgaaacacccgcgtcggagttggggagtttccagacggataggccggggaaacaatggagtgtgggggggactctggcgtgagcgtgtgtggggtattggattttaagaaacaacgagcgagatagaacgaaagaataggatcatttgggatgagaagtacaatgaattaggaatgcagtagggatgcgtaaggtcacctccgtggctgtgcgaggtccttagcattcgggggcaataatgagatttgaaaataagggagagaagggcgttcttggaattga

SEQ ID NO: 8733 - DNA, 31 bp, Homo sapiens
  chr12:49961129-49961160
  hyper
ccatgagataccatctcgtggaaaccaaaaa

SEQ ID NO: 8734 - DNA, 31 bp, Homo sapiens
  chr12:49961429-49961460
  hyper
cggaccctccgcccctcgttctcccaagagt

SEQ ID NO: 8735 - DNA, 30 bp, Homo sapiens
  chr12:49961735-49961765
  hyper
acttggggggtggtcgtccccggcggcact

SEQ ID NO: 8736 - DNA, 105 bp, Homo sapiens
  chr12:50202841-50202946
  hyper
ttcaggcagccagggccgaggaaggaggaaacttgctcaggggtctctgggtaacctgggcgaccaccatctcttcagccaagtcagtcacggagggccccagct

SEQ ID NO: 8737 - DNA, 30 bp, Homo sapiens
  chr12:50221544-50221574
  hyper
ttctctaggagacccggtctttccgcctct

SEQ ID NO: 8738 - DNA, 35 bp, Homo sapiens
  chr12:50297973-50298008
  hyper
gtgaaaccagagccgggcatcagggcctcatctcc

SEQ ID NO: 8739 - DNA, 100 bp, Homo sapiens
  chr12:50339468-50339568
  hyper
aactgtcagacagcgctgctccgaatcccatcacagtgctccagcagggggcgtcctcaccggccgcggccacagccacggctcaacccggcctagctcc

SEQ ID NO: 8740 - DNA, 181 bp, Homo sapiens
  chr12:50355598-50355779
  hyper
ggccccgcgcccggccgcccgccccctatatagcgcgccccagcagggcccgcgccaggccgccagcctcggagtgggcgcgggacagtgcgcggcgccccgcagccaggcccccgcccccgccgcatccacctcctccgccgcctgcgacccaacgggcgccccccgccgcggcagctgc

SEQ ID NO: 8741 - DNA, 30 bp, Homo sapiens
  chr12:50419369-50419399
  hyper
cgggaatgagcatgcgcattctgacaaagc

SEQ ID NO: 8742 - DNA, 30 bp, Homo sapiens
  chr12:50444507-50444537
  hyper
ggagaggattaagccgctggagtctgaaat

SEQ ID NO: 8743 - DNA, 30 bp, Homo sapiens
  chr12:50450985-50451015
  hyper
agtcaagtgtgactcggagcgtgtgtgtgt

SEQ ID NO: 8744 - DNA, 208 bp, Homo sapiens
  chr12:51157761-51157969
  hyper
gacggcggcccgcgcggaggcagcgccatagcctaccccaaacgcacactagtgctcagttttgcccccctcccctcccccgcccccgcccccgcccccaggcttgtgtagatcatgccgccagtagcggccctgactgccgaggaaacggtagcttaggacagttggctgttaagtgacactgattctccccgccccgcctgacccc

SEQ ID NO: 8745 - DNA, 30 bp, Homo sapiens
  chr12:51318472-51318502
  hyper
gtgtaagtacactgcgcttataaaactcta

SEQ ID NO: 8746 - DNA, 30 bp, Homo sapiens
  chr12:51611856-51611886
  hyper
gccgcatgctgcaccgcccgcgccagccgc

SEQ ID NO: 8747 - DNA, 30 bp, Homo sapiens
  chr12:51785148-51785178
  hyper
gctacaggccaccgcgaccagcagagagcg

SEQ ID NO: 8748 - DNA, 233 bp, Homo sapiens
  chr12:51818418-51818651
  hyper
tggaaggaccttcacgcccagaggcccctgaagggagggaggcggtttccaaggcaaccgggcccgggagcggttggctccccggctcctccccctccccgcggtagcccagggtaccgccggacagcgtcctcccgtgctccgcgccctgattggctgcgcaggcctctcgctgattggttgcggcggatgcctcgcgggccggtggctatggaggcggcggcggttgatgg

SEQ ID NO: 8749 - DNA, 30 bp, Homo sapiens
  chr12:52262950-52262980
  hyper
ctggtgggtgctctcggttcacccccgcac

SEQ ID NO: 8750 - DNA, 30 bp, Homo sapiens
  chr12:52294236-52294266
  hyper
gcaagttcgaaccccgctcctgctccgctt

SEQ ID NO: 8751 - DNA, 31 bp, Homo sapiens
  chr12:52300898-52300929
  hyper
cacccactactccggccgccagacgttgcct

SEQ ID NO: 8752 - DNA, 157 bp, Homo sapiens
  chr12:52301148-52301305
  hyper
tcctgcagccccagcgaggggcgagcggcggccagtcggcgagctgggcaataaggaaacggtttattaggagggagtggtggagctgggccaggcaggaagacgctggaataagaaacatttttgctccagcccccatcccagtcccgggaggctg

SEQ ID NO: 8753 - DNA, 634 bp, Homo sapiens
  chr12:52400891-52401525
  hyper
tcgcgcccgccgctccggtcccgaccccgggaccccctgccgcagccgccacccctgggcccccagcggacgagctgtacgcggcgctggaggactatcaccctgccgagctgtaccgcgcgctcgccgtgtccgggggcaccctgccccgccgaaaggtgcgtcccccgcccgccttcaggatctgctcagcccctctccgactccctacagggcctgctgactccgcagtgccctctcctcggcgtccgcggagtcccccaccttcttccccggcccgctgggtgcctcgactccccgcgttccccgctgctgcgaaggccgtggccctcgcctgcacaccgcgcccaggctcggtggctcttaactccgcgccccatgcacgccccctctctccctccttgactcctcccagcaccccccttctcctacccgctccatctggctttctgccccccatgccccgcctccccgtggccaggtgtcctgggtccccaggagcccctcgcccgagggacagagacagccccaggcaagttgaaggtccgagagcccccggtgggagaagcgggccggtggctgcgccgcgtgcgttctcactctgaggaagtgcgtggggagccgctgactccgg

SEQ ID NO: 8754 - DNA, 30 bp, Homo sapiens
  chr12:52463648-52463678
  hyper
gcggatgttgtgggcggctacatgcgtgcg

SEQ ID NO: 8755 - DNA, 20 bp, Homo sapiens
  chr12:52626726-52626746
  hyper
ccctctccaagcatcctcct

SEQ ID NO: 8756 - DNA, 216 bp, Homo sapiens
  chr12:52626830-52627046
  hyper
cgctcctgcctactccggaccatccctgcttggactgaaagcctgggcttcggcggggcgggcgggcagagggcggagggcggccccaggaggggcctggcagcagagaaaggtggcccgcggcagccccgcccctacctgtggaagcccagccgcccgctcccgcggataaaaggcgcggagtgtccccgaggtcagcgagtgcgcgctcctcct

SEQ ID NO: 8757 - DNA, 105 bp, Homo sapiens
  chr12:52627272-52627377
  hyper
gaggtcaccattaaccagagcctgctggccccgctgcggctggacgccgacccctccctccagcgggtgcgccaggaggagagcgagcagatcaagaccctcaac

SEQ ID NO: 8758 - DNA, 5 bp, Homo sapiens
  chr12:52652599-52652604
  hyper
gagtg

SEQ ID NO: 8759 - DNA, 30 bp, Homo sapiens
  chr12:53108150-53108180
  hyper
tttgttctctctggcggcgctgctgccgcc

SEQ ID NO: 8760 - DNA, 31 bp, Homo sapiens
  chr12:53135225-53135256
  hyper
atgcccaaatgcaaatcgtcagagctgaagc

SEQ ID NO: 8761 - DNA, 31 bp, Homo sapiens
  chr12:53135508-53135539
  hyper
tgacaagcatggactccggggctcaattgcc

SEQ ID NO: 8762 - DNA, 41 bp, Homo sapiens
  chr12:53268251-53268292
  hyper
agcctggcctgccttccgcccccttcgcgtcctcccccggg

SEQ ID NO: 8763 - DNA, 156 bp, Homo sapiens
  chr12:53342669-53342825
  hyper
aacaacacctgctgtccgtgtccatgcccggttggccaccccgtttctggggggtgagcggggcttggcagggctgcgcggagggcgcgggggtggggcccggggcggagcggcccggggcggagggcgcgggctccgagccgtccacctgtggct

SEQ ID NO: 8764 - DNA, 30 bp, Homo sapiens
  chr12:53614269-53614299
  hyper
cgctccgcggcgcgcgcgcttgcttagaca

SEQ ID NO: 8765 - DNA, 30 bp, Homo sapiens
  chr12:53645462-53645492
  hyper
tctttacaccacaccgcctccctcaggtgt

SEQ ID NO: 8766 - DNA, 30 bp, Homo sapiens
  chr12:53715133-53715163
  hyper
cggaagtcggggggcgggctctcatagcta

SEQ ID NO: 8767 - DNA, 238 bp, Homo sapiens
  chr12:53719554-53719792
  hyper
tggggggcgggggccgcacaaagccctattgtggctcggggatgctgccacagagtggtttttgttcttcggctaactccgtggcgggcacgactgattgcagacccagggcagggggcgggttacgtgccaggcccagtctgcccgccgggagccgcaccaccgcccgactggggccgcgcaggagtccgcactgcaaccgcggtgcccgcgctcgggtcgcgtcactgccctgacc

SEQ ID NO: 8768 - DNA, 31 bp, Homo sapiens
  chr12:53765076-53765107
  hyper
tcgagggagggagggcgcgcaaagccggaag

SEQ ID NO: 8769 - DNA, 30 bp, Homo sapiens
  chr12:53894745-53894775
  hyper
ttctgtagttttctcgcgatccaaaaggct

SEQ ID NO: 8770 - DNA, 30 bp, Homo sapiens
  chr12:54089225-54089255
  hyper
atcggcggctggcgcgtgttcagatttaaa

SEQ ID NO: 8771 - DNA, 41 bp, Homo sapiens
  chr12:54089471-54089512
  hyper
ctgcacagaggggtcggatgtggggcgagttgggcagagga

SEQ ID NO: 8772 - DNA, 240 bp, Homo sapiens
  chr12:54090239-54090479
  hyper
tgggattggctactcgcagtatgcttatcccaagttttcattggctgacggccacctgtatggaaataagaattacccgggactctcaggcccttctcagccgtaccgacctgtggcttagtgcgctgaaacctgcaaggtcggagccgaaactcctgggcttgcttgttgtcctgccttctcttcctcaaaggagatctcttgaatattgccttttccctctgcgccctgcctaaggcc

SEQ ID NO: 8773 - DNA, 31 bp, Homo sapiens
  chr12:54120887-54120918
  hyper
acgtcttgcctgggagcgaataagcagattt

SEQ ID NO: 8774 - DNA, 30 bp, Homo sapiens
  chr12:54132553-54132583
  hyper
taggcaggtttccccggccaccctcttcct

SEQ ID NO: 8775 - DNA, 30 bp, Homo sapiens
  chr12:54133603-54133633
  hyper
tcgtccatctgatgcgcggggcccagcact

SEQ ID NO: 8776 - DNA, 431 bp, Homo sapiens
  chr12:54145124-54145555
  hyper
ttggcagtgggaaggggtgtgcgtgggtgtcctctccttcactctttccccagccctgtcgcctcccaccccccttccggccgcggcagtttccgaaatcgcccggcggccgcgaattcattagtggggggcggatgtaaacgcagcgcggtggaacgttttaattaggcctgaacaataaacaagctaaacgaggcgcgcaggactccctggtgggccctcagcctcctccgcgcggcgcggactcattacggctgcagccaatttcatgccagcgccgagcactggctgggccgggagtggggtcgggggtgcgtgcgggtgcgatccgggcctgcagggtgcggagcgggggcgtcccggggcgagggcagcgggccggttcccgcccgcccggggccgcggcttccgcatttctgcaccatccacct

SEQ ID NO: 8777 - DNA, 30 bp, Homo sapiens
  chr12:54145826-54145856
  hyper
ccccggatgccgagcgtggtagactctgca

SEQ ID NO: 8778 - DNA, 30 bp, Homo sapiens
  chr12:54320917-54320947
  hyper
tgttaactatattcccggcctctaggtcgc

SEQ ID NO: 8779 - DNA, 611 bp, Homo sapiens
  chr12:54321295-54321906
  hyper
taaaatcgcctttggcgtgtgcagctcgagcgttacaacgatgcaaagtgcggtctttggaggatgcgggagtcggtaacccctcaattcactctcgccgttccttctctccagtctgcgcgaaagccaggtccgagggcttcgaagatctgggggacccgagctgcgcacagtggcgggaaacgagcgggctcagctggccgggccgcgtcccctagccaccgcccgcccgcccgctgctttggcctccggagaagcctggagaggggcctgcgcctcttgaaaaatggcttttgggggcggtaggtctcgggagggcgactggggaaagtgacttgccgcggcttcgagtagagacgttggtgcgggacccaactcctggggaaggcggggagcgctgggcggatgcctggccctagtgcggcgccaacacatacaagttccgctgtgaatgtttgaaagtgtaagtttctctcggattgatttttttttcctttaaatgtatccccttcaaaaaaaaaaaaaaacaaacaaacaaaaaaaaaaaaaacaaagacgtggacaggcaggcgccacccggtctgggagctgaggttcgtgactgctgccga

SEQ ID NO: 8780 - DNA, 30 bp, Homo sapiens
  chr12:54324532-54324562
  hyper
aggtagtgtcgcgggcgcttcctagtgcgg

SEQ ID NO: 8781 - DNA, 30 bp, Homo sapiens
  chr12:54324819-54324849
  hyper
tcgccatccaggcgccggaaacgacccgaa

SEQ ID NO: 8782 - DNA, 216 bp, Homo sapiens
  chr12:54329262-54329478
  hyper
aagcgcacgcgcacacgcacatacacagacgcttcccgtgaaaaagcatattaaatatctcctttctgtgttggatcatttaaaagaaaacatttcagagttgaacttagccgagagcttggttcatgagctgtagctgagggcagagtggcttctgccgctccgcggttgtagaagtccctttgaaaaagcagccgagagcagagccggggcttc

SEQ ID NO: 8783 - DNA, 308 bp, Homo sapiens
  chr12:54329604-54329912
  hyper
cgaaggccggcggggcgcgcccgggtgagcaccgcagccgagggtttcagcgccaggccctggaaaggctttctagggcgagatcgccttggagatgtaattactacgtttctagtggtgcatattctcctggagtgtttaatttgattttacttgtgtctcagcgagatccacatttttttttcgggggagggggaagaaaccaccccaggcttaaagttaattaaccagcaaggctttactttccaccgccctcctgcaggctcttgcctcggcgcctcccttcccgatcccggctcgccccagac

SEQ ID NO: 8784 - DNA, 52 bp, Homo sapiens
  chr12:54333550-54333602
  hyper
tggagccggccgggcgagctgcactgaggaatgcgccggggaagaaatctgc

SEQ ID NO: 8785 - DNA, 157 bp, Homo sapiens
  chr12:54338660-54338817
  hyper
tgcagtgcaatcctctggccccgttgagcccctgccagaactctgtgcctaggcagcctcgggtcctctatctcagtccagccgcttgcctcacttcttcccgcttgccttatctccccgcagacgtggttcccctgcagcccgaggtgagcagcta

SEQ ID NO: 8786 - DNA, 325 bp, Homo sapiens
  chr12:54338978-54339303
  hyper
ggcgggtcaaagagaagaaggtggtcagcaaatcgaaagcgcctcatctccactccacctgaccacccacccgctgcttgccccatctatttatgtctccgctttgtaccataaccgaacccacggaaagacgctgcgcgggtgcagaagagtatttaatgttaaggaaagagaagaaccgcgccgcccggaggcagagaggctccatggccgtgctgctgggccatccccaactccctatcccatccccagcctccacccccatccagatgggactcacgtggcttcaacagctttggaaatgggtcccgagtgggccgtgcga

SEQ ID NO: 8787 - DNA, 338 bp, Homo sapiens
  chr12:54343491-54343829
  hyper
cttttagccttgaccgtgactaggtctttctgaccttgacatcacagggagcacagggaaggggggggaggggtggaaaaggccttgatcttccggtggccagcgaaggggagggctgcttgcccccttgacgcgccatcccccttcccgcaggagcccgccgcctctgtttacacacagaggaggtgtcgtctccagtctagacaagggcgctaataacgcccataaaaggcggcctctccagagatgctctggcaactccgctcccgcgcgcctgccgctggccgctttctccacctccccccgccccgcccttctctgataccttggcgaggccg

SEQ ID NO: 8788 - DNA, 337 bp, Homo sapiens
  chr12:54346834-54347171
  hyper
aagttccgacaagtgcgcctaacgcggggccggctcctgggggcgggaggggctggaccaggccgggcagctaggcaagcaggggcggggaaggggaaccggccaagcagggcaagggacaggcaccgagctgcgagcttcgaactgctccgggcagggcggcgcccgcggggacacatttctgtcggagtgagcagctacggtttgggatatgaaatcgcccggggagcggtggaattcaaagaatctgcgtttctctctgccgcgtcctgcagaggagagaggggagggagaggaaaaaaagggagaatcttctctgcttcgatctgcttttgca

SEQ ID NO: 8789 - DNA, 272 bp, Homo sapiens
  chr12:54354814-54355086
  hyper
cggaaggttccggtgtaattcagcgggaggtggaaggcaggccccgatcccacagcgcgcctatgctcagcctttggtccgagcggccgccctcctgcgtgtgcctcggtccagacggcgctgccgattttccaaggagaggccgtggcccgcgtccgccgctgcaggactccccagcttcgccctccgctccgcgctgcagccctgcgcggtgctctcggttgccactctagccgaggcctcgagacaaagacgcgccgggcactggtgga

SEQ ID NO: 8790 - DNA, 16 bp, Homo sapiens
  chr12:54357603-54357619
  hyper
cgttcatgtggcgagc

SEQ ID NO: 8791 - DNA, 30 bp, Homo sapiens
  chr12:54359782-54359812
  hyper
tttctctgccaggacgcggccgtggcattt

SEQ ID NO: 8792 - DNA, 245 bp, Homo sapiens
  chr12:54367129-54367374
  hyper
cagttgcacttactacatgcccgagttctccacggtctcctccttcctgccccaggccccctctcgtcagatctcctatccctactcggcccaagtgcccccggtccgggaggtctcctacggcctggagccatccggcaagtggcaccatcggaacagctactcctcctgctatgcggcggccgacgagcttatgcaccgggagtgcctgcctccttccaccgtcaccgagatcctcatgaaaa

SEQ ID NO: 8793 - DNA, 414 bp, Homo sapiens
  chr12:54367429-54367843
  hyper
cggcttctactcctcagtcaacaagaacagcgtcctgcctcaagccttcgaccgtttcttcgacaacgcctactgcggtggcggcgacccgcccgccgagcccccctgctccggcaagggcgaggccaagggggagcccgaggcacccccggcctcgggactggcgtcccgggctgaggcgggtgccgaggcggaggctgaggaggagaacacaaatcccagctcgtccggttcagcccactccgtggccaaggagccggccaaaggagccgcccccagtaggtagcagcggccggggaacgggcgggcagcgagggagggagcgagagagggagggcgagagaaggggggaggcaaggggagcggggacggcctcgtgttttgggtcagtccgattttatgtggagttttata

SEQ ID NO: 8794 - DNA, 30 bp, Homo sapiens
  chr12:54378485-54378515
  hyper
agaagtacctgattcgtgtctcgacctttt

SEQ ID NO: 8795 - DNA, 1209 bp, Homo sapiens
  chr12:54378721-54379930
  hyper
gcggggaagggctccggtgcccctaccccgaggcagctgctagatggcgctgttactccactctgcgcgctccgcctgccgacaacttgaccccgctgacgtcacggccgtctgaatcatcaaggccattttcaaatcccattggtctagccgtcacatggtgagaaccgaatgcgcggataattacggagctgatatttccccccctccccttctttttcctccctcccctccaaccgcgccccccctcccggatggggaaaaaaaaagatgtcagctcctccgctgtagtattgctccttaaaaacccctctctctgaaaatgacatgccctcgcaatgtaactccgaactcgtacgcggagcccttggctgcgcccggcggaggagagcgctatagccggagcgcaggcatgtatatgcagtctgggagtgacttcaattgcggggtgatgaggggctgcgggctcgcgccctcgctctccaagagggacgagggcagcagccccagcctcgccctcaacacctatccgtcctacctctcgcagctggactcctggggcgaccccaaagccgcctatcgcctggaacaacctgttggcaggccgctgtcctcctgctcctacccacctagtgtcaaggaggagaatgtctgctgcatgtacagcgcagagaagcgggcgaaaagtggccccgaggcagctctctactcccaccccttgccggagtcctgccttggggagcacgaggtacccgtgcccagctactaccgcgccagcccgagctactccgcgctggacaagacgccccactgttctggggccaacgacttcgaagcccctttcgagcagcgggccagtctcaacccgcgcgccgaacatctggaatcgcctcagctggggggcaaagtgagtttccctgagacccccaagtccgacagccagacccccagccccaatgaaatcaagacggagcagagcctggcgggccctaaagggagcccctcggagagcgaaaaggagagggccaaagctgccgactccagcccagacacctcggataacgaagcgaaaggtaaggccgcctgggccgcgggcgccactgggacgttccggcacttggtcttcgcggccggggaggggggcaggggagagggttgggcccaggaggccccagaccatttcgggaatgcgaccctggctttcgacta

SEQ ID NO: 8796 - DNA, 508 bp, Homo sapiens
  chr12:54379958-54380466
  hyper
cgtcacttagctggggaaggtaagcggcgacgtggaggtgtcggccctgccccggccatgggtgctaaggcgggggcggtgcgcaccgcgggccgcctgcaggcgcagtgtgctgcaccggacgggtggctgctcccaggcgcgtgctggctgtggtttgctttctcaatgctggtgtcctggggagctgacgtcccccagctcaggtcaggggcttgcaaaaagcctaaaatggcgatcttgggccagggactagggaaggctggggagatggggggagttctctttactgcgttttcccagttgaaaattgtttcctgcgaaacgcgatttgttgtttgtgggtctgatttgtgcgtgcggcttgggctcctgcggcttttggctcggccgggggccttgggcagcgaggctggagccggaagaggtggaggtgaagggctgcccgccacgtccctccctcctccagatgcctggcttggatggcgttggaacagggcatttggaa

SEQ ID NO: 8797 - DNA, 472 bp, Homo sapiens
  chr12:54387780-54388252
  hyper
tgtatgaatgtttgagacttgcgggaggaagaaaaggcaagagctcgccaaggcgagccttggtctctgagatctctcgtcggctgctggggctccggctcagcctggcagatccgctgtggcctctctgggacctcgccccggcccacggcctgacttcggctcggagatgcagcccttcccgagaacaggtgaagaagacggcggcagcggggactgggggcttcgggtgggaacgccagggctcagggctttgtgtgggtcgtgcagggggcgaggttcgaagtcctgggctggaccgcagcacgagtgtggcccggacggctgcgtggccagaaggggtgttcgggcagggtgcgagagcaccggcaaggtggattgtgtatggactttggccgcagacagagcagagcgggctcccgggctgtggccggcggcgaggcgggcaaccgcatgttgagtctatagaaag

SEQ ID NO: 8798 - DNA, 744 bp, Homo sapiens
  chr12:54388896-54389640
  hyper
ctgcctcaggagatgcggtttgcctttctgtctgagacgccccaaaccctgagctctccttcccaaggctggaaaaaaaatcgggaaaaacggcggaatttgcactttcattcattgggttatctgcaactgagaggggctggttaaggcgtccccaagttggaagggcgctttgcttctgttttctggatgcagagtcctctgactccctctgccacgggctgagtttccggctccaggttcgcgtgtcgccctgaggtttgaggccagacagctcgcagtcgggcagggagggcgggggagagacgagcggctctggccccttaattgtacttcgggctcgtattgtctctcctttcgccacctccgcttcctcagtctgggctccaaagtcactgcaaatttccttgcgacacatacatcacacaaaagatcaggtaacaaggcgctcagggccactggggctccgggcagggcagggagcggctctagctctggggcggctccccctccagccactcccaggctggaaaaccagaccgcgttgggggagccggaaatagccccgcttgctgcggagcgtcagggcgggggcgccggcgggaatgcaggcccggcaggccgtggctttgagagagccacgttcacaggccctggggatttcactcctgctgggcctcgggacctgactcctggtgtgtagggatcccagatacccaccttgggtgggggcaggacgcgggt

SEQ ID NO: 8799 - DNA, 30 bp, Homo sapiens
  chr12:54392868-54392898
  hyper
ctcttttgccttgcccgctctcaccctggc

SEQ ID NO: 8800 - DNA, 370 bp, Homo sapiens
  chr12:54393353-54393723
  hyper
tacatacacactatttaaaaacgcatttttaaaagccacgttccgaactgacaatcgctgatctcggctcgcgcagagactgcgggagcgtcggggccgacagagacggattacgtcaagaaatagttcctccacctacctcggtcggcctccccgcccctgcggggctcccgcgcccagctcggccctgggggtccgagaaccctggcttcggggactggcattttcaccccattaaaaaatcctcatggttggggggaggccatctgcttatgggtggacatgggcacaggggcttctcagatgagctaggagccgtcctgagggggtgaccggtgccttgggtccagagttccggacccccaggaaa

SEQ ID NO: 8801 - DNA, 620 bp, Homo sapiens
  chr12:54393798-54394418
  hyper
cgcattgatccgcgccgtatttttgggtaaatacgatcacgtgggggccggggagccaatgagctgtggggaaaaggctggaaaaataattacctgacttgattgttctgtgagcagataaaaagtacatatacagttcatacaataatcttatgtatgtaaaaccccgttacgatgtcggcgacggggcccatcagtaactattacgtggactcgctcatctctcacgacaatgaagacctcctagcgtccaggtttccggccaccggggctcatcccgccgccgccagacccagcggtttggtgccggactgtagcgattttccgtcctgtagcttcgcgcccaagccggcagtgttcagcacgtcgtgggcgcccgtgccctctcagtcgtccgtggtatatcacccgtacggcccccagccccacctcggcgccgacacgcgctacatgcggacttggctcgagccgctgtccggcgccgtctccttccccagcttcccggccgggggccgtcactacgccctcaagccggacgcctaccccgggcgccgcgcggactgcggcccaggggagggccgcagctacccggactacatgtacggctcgcccggggagct

SEQ ID NO: 8802 - DNA, 89 bp, Homo sapiens
  chr12:54394466-54394555
  hyper
cgccggcagcaagcacaaagaggagaaggccgacctggaccccagtaagttgggagcaattttcctttacaaccggcgcgggaggggag

SEQ ID NO: 8803 - DNA, 82 bp, Homo sapiens
  chr12:54398703-54398785
  hyper
gacacccctctctcccctggtcgggagcgctgggatgcgggcttctctcccagaccgagagcggcgtttccgggcttccacc

SEQ ID NO: 8804 - DNA, 24 bp, Homo sapiens
  chr12:54398888-54398912
  hyper
cgcgggcttggaggaccctgagga

SEQ ID NO: 8805 - DNA, 221 bp, Homo sapiens
  chr12:54399453-54399674
  hyper
agcctggagaagtccgagtcccaccccaaagtcctgcaggcggcggcggaatagtcggtgcggggccagcatcagggtaagaggagggaggactttagggtgcgcgccgcgggcaagccgtcgtgggagcctcggagcgtgcatccgcgttcgcggagatgttccaagcccagaaatgcgcctgaatggggggagatcgcggcagttgctttgcttagagt

SEQ ID NO: 8806 - DNA, 30 bp, Homo sapiens
  chr12:54404955-54404985
  hyper
ttgacacgaaaacgtcggattgaagtctct

SEQ ID NO: 8807 - DNA, 368 bp, Homo sapiens
  chr12:54408316-54408684
  hyper
ggcccagtagcctagcggaatgaacccagcattaaatggctccgaagggcctcgccgccttttccccacaccaaatgtgccatttatcccttgtcctgttcagcaatgtccgtggccccaagcccggcgcgtcggagggcggggtgcgtctggcgcccggctttactcgagatgccaggcatggagagggctaagccgagggagccccagccaccccctcatgcagtacccgctcccccacccctcctgcccaccgcctctgttttctcgtttggaaagaaatggaggtaaaaacccgttttatgggggaacgtaattgtgagcgggatgcgctctctttagaatcgcgtcctcccaaatgctcccgc

SEQ ID NO: 8808 - DNA, 84 bp, Homo sapiens
  chr12:54410511-54410595
  hyper
ctacacaaatgcatcgcattcccggttgtttgcagaaaatttacagctgagtaataaaagtttacgatcgactcacaagttgga

SEQ ID NO: 8809 - DNA, 30 bp, Homo sapiens
  chr12:54411738-54411768
  hyper
tgtgggcccagggccgggccgccgagcagg

SEQ ID NO: 8810 - DNA, 201 bp, Homo sapiens
  chr12:54422144-54422345
  hyper
ctgacatctggcttgcgattggctgggagggggtcagctgactttgtcattttgtctgtcctggattggagccgtccctataaccatctagttccgagtacaaactggagacagaaataaatattaaagaaatcatagaccgaccaggtaaaggcaaagggatgaattcctacttcactaacccttccttatcctgccacc

SEQ ID NO: 8811 - DNA, 574 bp, Homo sapiens
  chr12:54422376-54422950
  hyper
cgccctcaattccaccgcctatgatccagtgaggcatttctcgacctatggagcggccgttgcccagaaccggatctactcgactcccttttattcgccacaggagaatgtcgtgttcagttccagccgggggccgtatgactatggatctaattccttttaccaggagaaagacatgctctcaaactgcagacaaaacaccttaggacataacacacagacctcaatcgctcaggattttagttctgagcagggcaggactgcgccccaggaccagaaagccagtatccagatttacccctggatgcagcgaatgaattcgcacagtggtgagttttacagctccgagatataaattaaataaactgaactggctttatgaccggcttccctagaagaacgggcggagagagttttttatggccccataaaaacaatcacgctcgtctcctcaccgagacagggccccctcttctgccccctcagctcgcctctcgctcgcttgcaggggcctggcccccttggcccctgacggattggagggccccaaggcgggctgagggggcaggaacag

SEQ ID NO: 8812 - DNA, 8 bp, Homo sapiens
  chr12:54423449-54423457
  hyper
ggagcgga

SEQ ID NO: 8813 - DNA, 67 bp, Homo sapiens
  chr12:54423615-54423682
  hyper
ggatgaagtggaaaaaagaatctaatctcacatccactctctcggggggcggcggaggggccaccgc

SEQ ID NO: 8814 - DNA, 265 bp, Homo sapiens
  chr12:54426522-54426787
  hyper
taggcaccaggtgtcgctgtgggcttgttgtcccggctacccccaattccaagaacctttttttttttttccctcccccttccctctttctctctctcactccctctcccccttggttgggctttgccaacatatcgagatgcttttcgccggcttccatcactaacctcccggaggtcatcaagccaaatttatgagtggccgctcgagtcacgtgactctatttaaggctcccttatttgggaagagcgcataggataaagaa

SEQ ID NO: 8815 - DNA, 45 bp, Homo sapiens
  chr12:54427061-54427106
  hyper
tgcgccttccaactctctccacggggtagacatggctgccaaccc

SEQ ID NO: 8816 - DNA, 286 bp, Homo sapiens
  chr12:54427293-54427579
  hyper
ggactgagccagccaccggccccgccacagatttacccgtggatgaccaaactgcacatgagccacggtaaactttaggacttcattttgcgctctcgggtccgcctgggttttataggccatgcggggcaaataaagaaaaaaaacctgcggccataaattttacgatccaggcatcaatggctcgtaaaactgtccactaaaaggcttagaggctgtgtgcgcccaaatttacgacgacataattggatcataggaacaaaacgtgtataaaaggcaatattca

SEQ ID NO: 8817 - DNA, 58 bp, Homo sapiens
  chr12:54427974-54428032
  hyper
cgggtgggggcctgggctggggtggggacgggggaacgctgcaagctattcacccctt

SEQ ID NO: 8818 - DNA, 220 bp, Homo sapiens
  chr12:54446878-54447098
  hyper
gggtagcaggggaaggcgagacttctgaactctgcttttgccaaccacttcctgtctctcttcagcgggggctcaacccccagacctccagaaatgacgtcagaatcatttgcatcccgctgcctctacctgcctggtccagctgggaccctgcctcgccggccgcatggccagagggttgggtgagtgtgtatggggaagaggggctggactctggtat

SEQ ID NO: 8819 - DNA, 233 bp, Homo sapiens
  chr12:54447599-54447832
  hyper
ggagtcacatggtgaaagtaactttacagggtcgctagctagtaggagggctttatggagcagaaaaacgacaaagcgagaaaaattattttccactccagaaattaatgatcatgagctcgtatttgatggactctaactacatcgatccgaaatttcctccatgcgaagaatattcgcaaaatagctacatccctgaacacagtccggaatattacggccggaccagggaa

SEQ ID NO: 8820 - DNA, 22 bp, Homo sapiens
  chr12:54447898-54447920
  hyper
cgccagtatagctgcaccagtc

SEQ ID NO: 8821 - DNA, 383 bp, Homo sapiens
  chr12:54519810-54520193
  hyper
tcgtaccaatcgatcgaattctagtcgcaattctctgtctgtccctcggctctggggagaaagggggggctgtggcgtgggggctgaggaggggctaaggcgggaggggcgcctcatcccttcaccctcccttttcgccatgtgggggccctgagcgccgccccagaagaggtcgagggaatgttgtgggctggggcacaccagcacggcagaaactggagaaagcgagagacgtcgccagggacccagggacctctccctccagttccccgggcccgcccggccctgatggccactcacgctatagcgcccactctgtcctgggccatcccgcgccagcagtgtagcccccagcccgggcgcctgaatgctctccctccgga

SEQ ID NO: 8822 - DNA, 182 bp, Homo sapiens
  chr12:54520221-54520403
  hyper
cgtgcccccgagtcctgcttccccggggcctgctctgtatcaggcgcctgcgccttcaagggtacccggcccgcctgccctccccaagagccgagtttgcgctcctcccggaatcgtttgagagaaggacaaacttttggcaggatggaaatctagatgagcctgtccggagcaggtaagct

SEQ ID NO: 8823 - DNA, 30 bp, Homo sapiens
  chr12:54608667-54608697
  hyper
ggcgcaataggaggcgggccgcacccgaag

SEQ ID NO: 8824 - DNA, 42 bp, Homo sapiens
  chr12:54686413-54686455
  hyper
tccagcttcctcttgcggcagttctgggctgccaccttgttt

SEQ ID NO: 8825 - DNA, 30 bp, Homo sapiens
  chr12:54812070-54812100
  hyper
agtgccagggtccccgcactcgcccccagt

SEQ ID NO: 8826 - DNA, 30 bp, Homo sapiens
  chr12:54982004-54982034
  hyper
agatgtggctccgacggtgggggaggggac

SEQ ID NO: 8827 - DNA, 30 bp, Homo sapiens
  chr12:56101313-56101343
  hyper
gaggctgcctggctcgccctccttgcgcaa

SEQ ID NO: 8828 - DNA, 31 bp, Homo sapiens
  chr12:56121857-56121888
  hyper
ccaggatggccattctcggtggaaacaagcc

SEQ ID NO: 8829 - DNA, 30 bp, Homo sapiens
  chr12:56211121-56211151
  hyper
gagggaccaactgacgtaatgcagccctga

SEQ ID NO: 8830 - DNA, 152 bp, Homo sapiens
  chr12:56390555-56390707
  hyper
tatcattcctggaatacgagaactaagcgattgactttgctttccctaaaagataaacagggtagttgtagttgcaacagagtagatagaggtaggtctaccctgggtttaaagtggagatcacagccggggaaaaccggactggatcccga

SEQ ID NO: 8831 - DNA, 88 bp, Homo sapiens
  chr12:56472731-56472819
  hyper
aaggctcaactgttttcgaagtcttcaggcttgaagttctggagaaaacaactaggctctccgggcgagatcccgaataccagtttaa

SEQ ID NO: 8832 - DNA, 30 bp, Homo sapiens
  chr12:56497905-56497935
  hyper
ccgacccagggatccgaagaagggcgcacc

SEQ ID NO: 8833 - DNA, 78 bp, Homo sapiens
  chr12:56521402-56521480
  hyper
ggtaggggattagggacgggatagacggggttagttttcaaacactttcattccaaatacgatcgtatcctttccttt

SEQ ID NO: 8834 - DNA, 30 bp, Homo sapiens
  chr12:56552004-56552034
  hyper
ggaacagcggaccccgcccaagtcattact

SEQ ID NO: 8835 - DNA, 30 bp, Homo sapiens
  chr12:56583475-56583505
  hyper
tccggggagaaggacgcttcctggaggggg

SEQ ID NO: 8836 - DNA, 30 bp, Homo sapiens
  chr12:56618226-56618256
  hyper
tgggtggtgggctgcgggtaggggagggga

SEQ ID NO: 8837 - DNA, 40 bp, Homo sapiens
  chr12:56882299-56882339
  hyper
cttgcgacagtctgcggatgcttccgcgtgggcccggcga

SEQ ID NO: 8838 - DNA, 31 bp, Homo sapiens
  chr12:56958137-56958168
  hyper
tgagctcatgtccctacgcttttttttcttt

SEQ ID NO: 8839 - DNA, 30 bp, Homo sapiens
  chr12:57022641-57022671
  hyper
tcacttacatagagcgtaccccgctggtag

SEQ ID NO: 8840 - DNA, 30 bp, Homo sapiens
  chr12:57026396-57026426
  hyper
attccagccaggagcggttaggaagagggg

SEQ ID NO: 8841 - DNA, 30 bp, Homo sapiens
  chr12:57081310-57081340
  hyper
tctcccaggagctccgccaggcacctggcg

SEQ ID NO: 8842 - DNA, 99 bp, Homo sapiens
  chr12:57504303-57504402
  hyper
tgagttgcccaatgcgtgaatgtggcggtgggggcaggcggggaggtggagccagttcagcacgaggagggttaactcggcgccgccgctgggaaatct

SEQ ID NO: 8843 - DNA, 70 bp, Homo sapiens
  chr12:57504933-57505003
  hyper
tctccctttctcagcgggcacttccaggccccataggtctgtagctctgtccagcgagttcaaggctggc

SEQ ID NO: 8844 - DNA, 30 bp, Homo sapiens
  chr12:57505514-57505544
  hyper
ccctctggactctgcgctccctccagtgga

SEQ ID NO: 8845 - DNA, 30 bp, Homo sapiens
  chr12:57522303-57522333
  hyper
atgcactgaggaggcggaaacaaggggagc

SEQ ID NO: 8846 - DNA, 30 bp, Homo sapiens
  chr12:57614167-57614197
  hyper
agtgaggcgcggggcggggggcgggggggc

SEQ ID NO: 8847 - DNA, 20 bp, Homo sapiens
  chr12:57618690-57618710
  hyper
aggccgcagtacctggggct

SEQ ID NO: 8848 - DNA, 89 bp, Homo sapiens
  chr12:57619110-57619199
  hyper
gggcctgtcccccaccctctgcagtctacgctcgccctggagggggtgcttcctgggctggggcccccgctggggatggcagcagcagc

SEQ ID NO: 8849 - DNA, 30 bp, Homo sapiens
  chr12:57632105-57632135
  hyper
tctccgcctcactccggcggataatgagat

SEQ ID NO: 8850 - DNA, 246 bp, Homo sapiens
  chr12:57634395-57634641
  hyper
gatacacgccgccgcgcggctcacacccaggcacacgcctacgcactgtcactgagacacacatacctgcaggcggagacgcgatggcaacacacactccccgctggctcttcctgattttcacacatacacagacctgcaggcggagacgcacggaaacgcccccacgcggaggcacacccgggcaaaatcacccagatgggagctggggacggggaagtggacaaacccgacagatatagacac

SEQ ID NO: 8851 - DNA, 170 bp, Homo sapiens
  chr12:57635324-57635494
  hyper
taccggcccttcctcggatctgttttcaattcagtctgctccttggcccagacttatgacctttgcagcatgcggcagtatcatccatcacccaggcgccgtttagggggatggagggcgctgggagctcacatagggtcgctgtcacgcctgccgccctctctggggac

SEQ ID NO: 8852 - DNA, 122 bp, Homo sapiens
  chr12:57861191-57861313
  hyper
catacatgtgtgagcacgagggctgcagtaaagccttcagcaatgccagtgaccgagccaagcaccagaatcggacccattccaatgaggtgaatgccctaactaagcgaccctcccctctt

SEQ ID NO: 8853 - DNA, 30 bp, Homo sapiens
  chr12:57917374-57917404
  hyper
tggtaccaccccagcgggcagttgggcaat

SEQ ID NO: 8854 - DNA, 189 bp, Homo sapiens
  chr12:57941135-57941324
  hyper
tactggagcttgggcggggagcgacaataacgaaccttggggagctatttcatacagccttttctctcacttttacagcaagtcagtgaaagaacatttataattcctgtttggggctcccaggaataaaatgactagattaaatgatacaggtagtcatactgtgacacagccggggtttcaaaaaca

SEQ ID NO: 8855 - DNA, 30 bp, Homo sapiens
  chr12:57944044-57944074
  hyper
ggctaccaccatggcggagaccaacaacga

SEQ ID NO: 8856 - DNA, 30 bp, Homo sapiens
  chr12:57984806-57984836
  hyper
ggggcctcgcgggccgcttgcttcgtcagc

SEQ ID NO: 8857 - DNA, 134 bp, Homo sapiens
  chr12:58021324-58021458
  hyper
gaggagaggcgcgtgaccgtgcgccagctccccgtggggctcctgccagggtcgaccgggagggggtgccactcacccagatgagccacgcggctgaggcgggggtcgaaaccgacctcgcgcaccttgtcagt

SEQ ID NO: 8858 - DNA, 57 bp, Homo sapiens
  chr12:58021713-58021770
  hyper
ggtgccttcgggggtacccctgccccatcctcttccgcttcacccctgcaggaccca

SEQ ID NO: 8859 - DNA, 67 bp, Homo sapiens
  chr12:58025666-58025733
  hyper
gctgcgctgcgccgccgcggtcggcactcaccccactacttgctccttgatcctgaccgggatgtgt

SEQ ID NO: 8860 - DNA, 17 bp, Homo sapiens
  chr12:58025869-58025886
  hyper
cgagcagaaggaccaga

SEQ ID NO: 8861 - DNA, 107 bp, Homo sapiens
  chr12:58025901-58026008
  hyper
cggcccagccacatcctaggtgggggtagggtggggagtgagaaagggagggaagaagggagggcaagggatggggcccttggcccccgcgtcctcagaggctcctg

SEQ ID NO: 8862 - DNA, 15 bp, Homo sapiens
  chr12:58026065-58026080
  hyper
cgcggttttcccggt

SEQ ID NO: 8863 - DNA, 459 bp, Homo sapiens
  chr12:58158887-58159346
  hyper
cgtggacacaaacaccgagcccacagcgcggatgaaggtctccgtgtcgggtggcacttgagcctccaggcagcccaagcgcgagccgagcagaaccgcggcgatgccttgtcgggagggggcgccgtcagggttccgggaggctctggtagggcgcccccgacgcctgcccagctctgtcctgggactcaccttccagtccgaacttgtaaaattcccccgccacgtcccgaaccagggcgggcggccccgtgccacgtccccgctggcgcctcagacgccgcacaaggtcgcagactacgttgttcagggttccggcgtagcgggcggccgcttgaggccggaggaggagcggggccaggagactgcggagcctttgccattcttcgccttccctgcagggttgaggagagagtgcgcatcgggaaggtggggacggctcgacgggactggctgcag

SEQ ID NO: 8864 - DNA, 30 bp, Homo sapiens
  chr12:58166378-58166408
  hyper
caaactcagggaggcggggctcgttccaca

SEQ ID NO: 8865 - DNA, 191 bp, Homo sapiens
  chr12:58166618-58166809
  hyper
catgtgctgaccatcacgcagaactttgggtcccgcctcggggtggcggcgcgcgtgtgggacgcggtgaggaatgggctgcgccgggtgagggtccgtgggaggtccagatcccggactccgcctctcccatatggagccatcctcacgactgtctttttctctgtcttttctcccgtaggccctgagcc

SEQ ID NO: 8866 - DNA, 30 bp, Homo sapiens
  chr12:58176215-58176245
  hyper
cttggacaaattctcgaacccattcaccaa

SEQ ID NO: 8867 - DNA, 30 bp, Homo sapiens
  chr12:58241024-58241054
  hyper
cttttctcggagggcgcactcggggaaggt

SEQ ID NO: 8868 - DNA, 78 bp, Homo sapiens
  chr12:58259122-58259200
  hyper
cgaagtttgcggccaccgccggccgtgcagtctcccgcgcttcccccgccggagcgccggccccgcattcctccgggt

SEQ ID NO: 8869 - DNA, 30 bp, Homo sapiens
  chr12:59313473-59313503
  hyper
tggctagcttagggcgcaggacttcatccc

SEQ ID NO: 8870 - DNA, 42 bp, Homo sapiens
  chr12:59314238-59314280
  hyper
gttgcagcttgagcagcgtcggctcgccgaagccccttcttg

SEQ ID NO: 8871 - DNA, 678 bp, Homo sapiens
  chr12:59989789-59990467
  hyper
ggcccccacccctggcgcgcgctcctccgcacccacaagggcgttcagcagccgcgcctccccttcccgccaccgcctccttctccgctggctgtggcgggcgaggacacgtcaggggccataaataaataaataattccattcacccgttgacagcgaggcgaatcggctgcggtttgctgggaacggagggctgcagcgcccaccctgcgccagagaccagataaagtaagtacagctggggagggaggggagaggaggaggaggaggaggaggtgccggctaagaggagggcgagcctgcgtctgcgacccgagctgcccgcggagccgcacgcgtgtgtgcaaataatggccagcctgtgacaaacgtgccaacgcagagttggccagcgagcccttatatagacaaaaaaatcccgaagcggccgcgggagcagagctcgcgtcagccagtgcgcgccgacagctgcccgggaactgagggggcgcgcggggtcctgggcaaggagcgcctcgcgtgctttcggccaggaggtgctcacgctctcggcttttacaccgagactcagcgtggcgcggtgcaccccagtctccctggctcacgggactccgagggctgcttccagtgcggcgtgtctctagtgcgcgccccgccagcatccggcccccgagcccc

SEQ ID NO: 8872 - DNA, 130 bp, Homo sapiens
  chr12:59990779-59990909
  hyper
gcccggtcaggtggcgccacaggctgcgagcccgctcacgtgcgaactgcctgttttctcagcggatgctgcatcgcggcgcccttctccacccccttttctcctctacttccgcgaaaaggattgcaga

SEQ ID NO: 8873 - DNA, 301 bp, Homo sapiens
  chr12:62584711-62585012
  hyper
atcctcgacctggtcgtttgctgttattaggagaaatggggcagagagggagggcaccgctcacggagcctcatttcgcatgctccgatcccctctcggcgtccctctactccgcccctaccctgaccgcccgcgagggagacgccggccgatggacccgcatctgccctcacctctcgccttccccgggcgatccctctacagtcccggacccccgagaaaggggaagggagacgtgtgcacacgggggcttccgggaccgcggtcctgcagttgccgctccggtccccagcgctggccg

SEQ ID NO: 8874 - DNA, 1483 bp, Homo sapiens
  chr12:62585030-62586513
  hyper
cgcacctacctgcagccccgcttcccggtggcggcaacacctagcgatgctcctgcagcttttgcgggccggcgccagccttatcgctctcgcatcgcttccaagatgccaatccgccgtcaccatccaggggcatagggaaccgaagtctggtgctgtgtgatcgtggagggcggcgtgtgagtgtggccctgagcgtgcgagtgtgcgcgcgcgtgtgtggatgtgtttcctcctccgatggcaaagacggttcaggaatctgacatccaagctggaatccccctgaagcgggtgaaggtgagcctgatccttctccccgcttctttattccacagtgtcaaagtaatcaaaagatttgtttactgaggaaaagccaaagtcccgcagcccttggcagcgcccgcggtcgcctcctgtcctcgccggatgcgcgcggtgcgctcagctccctggactgcaagaatcaaggcggtcttgctgcaattaccgctcttattccatctctgatttgtttgcttttaaggccgactaaagacttttcctctcgcctcacgtcgtctctccctctcacacacacacacactcacacatcctccgttccctctctcccgccctccctcttgttctctggggaaaggcaattggacagaatgattcaccttcaggaaagcagcctcggccacgcacttctcgagttccctggctctcgcaggtaccgggtctccaacgtggcggagttgctgggaagctcgggacaggaaggaggagaggctctgagctcagccgatgtcccccctccagacgcccgcgttcctccgtccaggtgcccctgttcccactgctcgcagataggtccccgctggtgccctcgcggagacttggcgccttccactcgaatccacttagcagcaactcctggccagcttcagcccctcaatcccgcctcgaagtgctgcgggcagagccccacgcagcccacccgctgcccttctaggcatcgtgggctggaaggaagggaaacccgccgatgtccccctggtagcagtgccctggcaccgtcaccaccgaggaggtgcgagttccaacatcgaacacaagcgagcaggtgtcgcctgtgtcactttgctaaaggcgggaggggagaaagaaaggagcggggggagggggccgaggaaacaaatccagatcaccggcggagaaagaagccgtttagcaagcaaagcctcctctccgcgtcccaccccagatgctatactgtcaaaagacactgatgctaatcttttagaaagtcgccataaagggcagagcccctgctccactctagaaccctattccacccagcctggctgtccagtgagtacagagtgacttggctcccccgtatagtgcagcgagaatgcaggagaataggtcctgacactccaggttgagttaagcagtaaaatggaatggcagggccgggcggcgttgcctcgcctct

SEQ ID NO: 8875 - DNA, 30 bp, Homo sapiens
  chr12:62860384-62860414
  hyper
gaagcgaatcttgacgccttaaaccctgtc

SEQ ID NO: 8876 - DNA, 823 bp, Homo sapiens
  chr12:63025615-63026438
  hyper
ctgagattattctgtcggccgcactcggcccccaaggagtagcactgcgagggtggagggtcctccagcgcgggggcgggggtgtaggccccgagtgatttcctgccacagtgccggagcgggactggcgctgcctcccgggtccaggttccagccgctcccagctgttggcggcgctgctgagatgatggcctggatcccccaggttccgggactccccaggtggctccccgaggctatttacagctgaggttcggccggtgattgctgggacggaaaactcatttctcagcctggcttttatttacactcttattaaggaggctttcattcgtgttggaatggcagcgagaggctgcgggccaggcggccgaatgggtcgtgcccgagcgacagcggccgcctgcgccgcgaccttgagggcagaggagcgtgggcggcgtgcggggacaaaggcgcgcggggagcctgggtcacggctctgcagcagacacgggacctccacgtttctaccaccccggaaagttgagcgccttgggggctgcatttctccctttattggtagctggttcggctcgcccctttgcccgaccacacgctctttgtaaatacagaataggacaaaacggaaagagtgatgtgctgtcccctccgtctaaaaccctaagtaaatacccagtcctcccccagactcttctccacctgtggttcaggtgtctgggaagaaggccctgcacgcccgtccgcgcctcccctgcccgggggagccccgggtaggcagtggccaaagactctgtagaacaactcccgggagggcaggctc

SEQ ID NO: 8877 - DNA, 30 bp, Homo sapiens
  chr12:63138854-63138884
  hyper
ctgtttggttcattgtcctaactgaccacc

SEQ ID NO: 8878 - DNA, 65 bp, Homo sapiens
  chr12:63327157-63327222
  hyper
ggtcagcatcaaggcgcccaggcattggaagagctgattggttcccggacgaaccaatcaaccag

SEQ ID NO: 8879 - DNA, 734 bp, Homo sapiens
  chr12:63327935-63328669
  hyper
aaacttcagagcttttctgcccgttttttttccccaagtgacagagaccccggattcacagacctgtctcaccttagctttcccacgctccagcgctgccacccacccctccaccacccataccggggctggagacgccgcgtccttgggctgggggaagagggagtggggagaagagggaaatggccagtgtaagtaaagagctccccgccgaggcctggacgccggcagctagtgagagccctgaggccgagaagcagggagagaagagggctggaaccgtgcggggaagggccgcgaggagagcaggggcgccgccggtgtcgctgcactcactctgcgtagccagtggcccagggcagccgccgagtctccttgaggatgaggatggggcgggcgatgtggtcggcgctgcactccacctcgtcctgagacagccccaggaactctggccgcccgtaggggaaacgcaggggcaggtccgagcctccgcagctgccgccgccgtgctcggagcctgagctgccagccatgatgccgcccatgaaattggccacggcagatttcactcgagtgagcatattactccggcgcccggctgcagcggtgcgagcaggaggcggcgggggccgggcaaggcgcagcgcggggcatgcaggctgcggtgggcgccgggcgcacggcgagtcgggccactgggacgcgccgcgcgcggctcccagagcctagtgctg

SEQ ID NO: 8880 - DNA, 630 bp, Homo sapiens
  chr12:63544908-63545538
  hyper
ctcaagtatttatgcggtgcttgtttccttgggacgcgctccctcccgccctattgccggaagactgctggttgcctactccccgctccctggagttttattttttcctctccctacgtcggtgtttgtcctctgcatcactgtggagggggtggagctgggagactcgcagattcctcctcacagtaggtgggatcgtggcgctttcccgcttttcccttccaaaaacttggacaactggacgagtcatgccttttctgggctcgtagccgtttccacaagcttccctcactagccttcctcgctagcctccttaaccatgcatttgacttcaacaggcacgctaagcgcggtacctggaaacctccagtccacgcaccggcgtccacgcatctagctcctgcacctgaacctggctctcgacctcacctcctccagtccgggtttcttccttctcaccgagctcacccgtgcagcagtctggcaaattttattccccaggcaaattttcccggggcaaacatttctccccgctcgtgacttaaagagctatctcttcctagtaacgtctttgatgcatgctatttattaccctatgtttgcgacgggaagaacgcactcatcactttg

SEQ ID NO: 8881 - DNA, 989 bp, Homo sapiens
  chr12:64062076-64063065
  hyper
cctccggctcccgggcgagggaggccccgcgccgccccttagactggctgcggccggaagattgcagccgctttgagcttactccttgttttctcataatcaaggagtatggtggagctgggtcaatttcaggcacagcccagccgagtcaggcgaggtccagagagacctgactcgcctggcagcctcaacggacttgtccccgcagccgttgcggacctcccggtcgtcatggcgactgtgaaatgtggggtggggcgcatgcgttggaagccattcgcgcgggcagtccctgagtgtcccctcacgtgctccccagcgcgagcagcacccccgcctctgcgcttcccagagcgtgcagcttccggtgagggcagccccacgcacagccccccacaccctccccagcgcctgcagcctccggtgcgcgcaggccccaagcccacatgcgcagtcctcaccttgcgcgcagccccatgtacagccccggacgggctcccagccccactggcgcagaacccatcaccgcttgcccttcacgcgcttcattgggagtgcagcccccaccccgagcgcgcagctccacgcagcctctccacactctccccagcgcctgcagcacccccagtgcgcacagctctgccagtcgcttccccgggcgccgcccctgcaccacttcggcccataaccttgcggcgactgtctgaagaacttcccgtggtttcattcttttcttcgggtttagtcttagctgtgacattttaaccaaaagattacacgttaattaacgaggtattaaagggaaagatctcagctgaaagaaatgactgtaggaagtgtgtcagggaagccaacggaaccgccggcccgccggcggtgcgcccggcattaggaacgtctctactcccctacgatcgctgaggtatcggacagtcagtgcccgttgccaacgcagagggaacgggccgagactgcgggcaacaagtggc

SEQ ID NO: 8882 - DNA, 330 bp, Homo sapiens
  chr12:64237614-64237944
  hyper
ggcacaggccggagcgcggtccgctcccgcgagcctggccccgcctggcggagccccgaggagccaccgcccgcagatcgctagccgggcgcccgcgaggcgcgagccgtgtgcgcaccctcaactttgctgccgccgggggcgcggctcccgcgtgcgtgtgcgagtgtgcctgtcactagcggcctcctgggggcagcagcggaaagggggacgcagagaaaggcagcctcggcgcaccgcggccagggaggcagaggcccctcgcggcgccggctctggagacctaaactccgccggggctgtgcccagggcgcgtctgagcgtcgc

SEQ ID NO: 8883 - DNA, 111 bp, Homo sapiens
  chr12:64238194-64238305
  hyper
gtctcgaacaatggtgcggagcgccggcgcgagccccgcgcccgcccagcggccgtagaggaagtggccgggctcccggcgaggtgggcagggagacgtcccccgccactc

SEQ ID NO: 8884 - DNA, 30 bp, Homo sapiens
  chr12:64238523-64238553
  hyper
ctctccaaggagaacgggttgtgaccactg

SEQ ID NO: 8885 - DNA, 112 bp, Homo sapiens
  chr12:64799098-64799210
  hyper
cctgtaaccagaaaaacgagtactttttgaaagtgctaattagttgtggcgggcgggggttgggggagagttacgttttattaaaccgacttgtcagcgtggtgttaaaagg

SEQ ID NO: 8886 - DNA, 396 bp, Homo sapiens
  chr12:64845174-64845570
  hyper
ggcctgttgtgctgtccgtgggcagaagggaccccttcagaaagctattccttattgggaatagcggcttgagattttgactgcacgaatattgcaggacctaattttagtatttaagttttagttcttaaattcttaagtttagagttagatactccaatacggccgttttccaaaataccgagagggaattaaatgaacatttttacattaagaatttaatgtatttctgggtgatgggaaaatgaaaaaaacaatgtaaagtctgaattactgcgagacgataatctggctccactgcagccaaagtgggcccttaaaacatagaatccatccctcccagctctgccggccgtctgtgcctgccccccacgtgtcccacgttctgcacacctg

SEQ ID NO: 8887 - DNA, 30 bp, Homo sapiens
  chr12:64845921-64845951
  hyper
aggccgcgggagcccgccggcggtggcgcg

SEQ ID NO: 8888 - DNA, 59 bp, Homo sapiens
  chr12:65002988-65003047
  hyper
agggtatgtgaccacgttcagatcaacagaacgcaaagcagaacggtccgagtactgcc

SEQ ID NO: 8889 - DNA, 31 bp, Homo sapiens
  chr12:65174384-65174415
  hyper
tccttctcgcccggtccggagcggaggggag

SEQ ID NO: 8890 - DNA, 231 bp, Homo sapiens
  chr12:65218319-65218550
  hyper
tgcgcacggcggtgccgggattgggggcgggcacgccgcctccgtctcccacgcgctcgctcgctcgctcgctcccgccctccccgcctcgagcgatctcctgcctcagccttgcaggctccgcactgcagatgcctgctggcttccctgcgctcggcggctcccgcggtgccccgtaagtccccgtgaccctccagcaccagccggctgtgcgctccctgctcccacggg

SEQ ID NO: 8891 - DNA, 627 bp, Homo sapiens
  chr12:65218900-65219527
  hyper
ggggagctctggggaaagtccgcgtgccacctggtgcggggcaccgcgttggcacctgcagggagcgattggtctggaagggtagagggcagacgggggcctgggtggggcagcggccaccccaggcgcggagaacccgctgcttccaccctctccccgcggacccccaccctgcggcctgtgtgctcggctttctccgcgtggcggggaagtgcgggtggctgcccgggccctcagaggccgcaccacctattgtgttccaggctcgcaggaagccagaccttgcgagaggtgtgtgggggcggagagtggcacaggtttgacactgcaggtcggaggaggaagacagtggctgcaaaggcaaaatcgggtgttattttcccaagagtcccttcagcgtgagtgccggggtcagctcgaactggagcctgtaatttgtgagtgcgagtggggagcagcaggagatccttttcataggtgaggtccaggaacgagcctggtcgtgctaggcaaggcccttcccactgtcagcctgtgtttacccatccctgcttctccagactgcataactccgtgtcggctccatcacccggcatccctccccgggattttaagagcctggcccta

SEQ ID NO: 8892 - DNA, 186 bp, Homo sapiens
  chr12:65219605-65219791
  hyper
cgctcacctgttccctggagtggcaccggctgcgttccaggcgggttcacggtccccggcccccgccccccagcgccagcgccttggggacctgctgtagagccgcaggagaatcgagctgcagagtcccaaagggtgggatgcggcactgcctttcccaacctcgtggtttctttgttgttctcc

SEQ ID NO: 8893 - DNA, 275 bp, Homo sapiens
  chr12:65220199-65220474
  hyper
agtgtggcaagaataagtcagcgcgggaccgaatttcctggtctttgttatcaagcaaacgtcatgattatacgctcctccattcagcacctcgcgtccggacagcaacctcacttgttttcagcgtgccttaaagcgtgcgctgggctggaaacactcccgtggccgttgttatcaccgttctatgtttgggcaggacttcgtttaaaccacctcagagagaggcggatccatgtggtacttaatattccttcggagaaaaaaaaaacttatct

SEQ ID NO: 8894 - DNA, 30 bp, Homo sapiens
  chr12:66122482-66122512
  hyper
attaactccataatcgctctgagattgaat

SEQ ID NO: 8895 - DNA, 228 bp, Homo sapiens
  chr12:66122767-66122995
  hyper
gaaagtccaatctcccttcctcgagaggtgtctgggcgcaatactctccggcccgaagcaaggggacgtttgcgaggagggagaaatttaaacccccttcgctccgcgccacctgggagcactttggcgccgcagactcaggagccgacgccatctccaggacggcctcggtggcctcggcaggaggcaccttcggggagcggtcccgcactcctccttcctcagtcc

SEQ ID NO: 8896 - DNA, 15 bp, Homo sapiens
  chr12:66123380-66123395
  hyper
gggaggtggagcacg

SEQ ID NO: 8897 - DNA, 888 bp, Homo sapiens
  chr12:66135221-66136109
  hyper
tgccgcgacctgccgcggcggccggagcccgggagcttcccattggctcacgggccgacgccatgcagtctgggggggcgtggccgggcggcggggcgtggccaggcggtgcggggaactgcggagagaggagaggagaggagaggaggggaggggaggggagaggagtggagaggagaggaggggaggggagggcaggggcggggcggggccgggcggcgggggcgcacaccccaatctccctagcgctgtgggggtggctgcagctccccgcgcgctccctcctttgggggggtttctgggctcgtgacttttttttaaataaagaatgagcggatgcccgtgacaagttaatagctctcgccgcgctctaaagttaagttgtatctccttcccgccgcgagtctccttccacagacccgccggagctgccgggacgggcgctgcgcgggactgggcgttaggtgctcccggctggttccggcgagcagcccccacccctcgcccacgctcggggttagagaccccagcaccccacgcagacggcccgggcttagacctctccacgtcgctgtggcgcgcgccccgccaacacccccaccccacgcgcagcccgtgtcttctttacccccgcgcacttaacgcagggcgcacgcacgcatcccggccccctcacactcacactgcgtcttctgtcacaccccctgtcgcacacacactgttctctgactcccaccatctcctgtctcacacccactccagtttcgtgttgagcggccgccagttctccctcggtcgcgccggcgcacgctcgtccccttctgccccggagcccgcccgcgccgcacggtggccccttgcgctggcctgatcgtgggaaccaggcgg

SEQ ID NO: 8898 - DNA, 165 bp, Homo sapiens
  chr12:66216844-66217009
  hyper
gaaatggatttaaaatggcaacgcggaccaatcagcgctgccgcgccaaagcagacatttacacgcgcctcctccacatgcacagcggaacctggcggtgcctaactcctgcttagggctgcaaagtaggcgtttttattccacggtggtctgtatctttgaaaa

SEQ ID NO: 8899 - DNA, 1125 bp, Homo sapiens
  chr12:66217365-66218490
  hyper
atggggagggaacttcggttgcctctagtctttcctggagaaaaaagttcaatgaagaagctggggcgctctgtgtgtgcacattgtttgcatgtgtctgcgaatgtgcatgtctatctgcgtgcctgtgtgtatgtgtgtgtgtgtaaatgcgggtgtttaccagcgcatgaatgcccccgtgtccacgtgtatctgcgtgcatgtgcttacacgcgtgttcgtgtgtatctgcatgcatgtctccgtgtatgtgcgcgctcgcccgcccgcaggctctgtggtgagggcattccgaggcggagtacggctgtcaggggacctctcccactccactgcagtcccttcccactcacagtgaaccggtgcgctgcctgaggtgcagcctagacgcttcctgcaaagtgttggctcggcacggtagaggcgcaggtaaaggccaagccccgaaacgtggctccgggacagtcacgttcccgcgccttcccaggacaactgcccaggggtgacctcgagaggcgggtggagctaggcccacggcgagccagcccgggatccccggcctgtccctttaaccccgccgccgggcgggagcacgtgagcggggctccgggtggcacccgggcgccgccgccgccgaggcagttgtatttcgaacgctgcctctggctagcagccaggcgccttggctcggcggtccgcctggcctccctcctcctcatacttttcttcctgcgcaaccccctcccctttatccgcccacgattagaggtgggcactccccccaccaccaccccctccccaagcgcaagcgcgtgcacgcacacacaccacacacactcacactcacacacactcacacacactcatcccacttgaatcttggggcaggaactcagaaaacttccagcccgggcagcgcgcgcttggtgcaagactcaggagctagcagcccgtccccctccgactctccggtgccgccgctgcctgctcccgccaccctaggaggcgcggtgccacccactactctgtcctctgcctgtgctccgtgcccgaccctatcccggcggagtctccccatcctcctttgctttccgactgcccaaggcactttcaatctcaatc

SEQ ID NO: 8900 - DNA, 897 bp, Homo sapiens
  chr12:66218549-66219446
  hyper
gcagggtggggggaagaggaggaggaattctttccccgcctaacatttcaagggacacaattcactccaagtctcttccctttccaagccgcttccgaagtgctcccggtgcccgcaactcctgatcccaacccgcgagaggagcctctgcgacctcaaagcctctcttccttctccctcgcttccctcctcctcttgctacctccacctccaccgccacctccacctccggcacccacccaccgccgccgccgccaccggcagcgcctcctcctctcctcctcctcctcccctcttctctttttggcagccgctggacgtccggtgttgatggtggcagcggcggcagcctaagcaacagcagccctcgcagcccgccagctcgcgctcgccccgccggcgtccccagccctatcacctcatctcccgaaaggtgctgggcagctccggggcggtcgaggcgaagcggctgcagcggcggtagcggcggcgggaggcaggatgagcgcacgcggtgagggcgcggggcagccgtccacttcagcccagggacaacctgccgccccagcgcctcagaagagaggacgcggccgccccaggaagcagcagcaagtcagtacgagggcgcggtgggggcaccagcccaccccgtccccactgccggggcccagacacgcgcggggcggccggagtgcgggagcccagtcgccgcggccgtcgcacactgcccgccggccggccggggggagcggcgcagaccccacgagtgcgccgcgcggccccggggcgccagcaaccctccgggcggggaggtggggagccgcggcgggcggcccggggaaggcgggaggtggggtcgggcgaagcgcgtcctcggactttcgctattgtgcacgg

SEQ ID NO: 8901 - DNA, 640 bp, Homo sapiens
  chr12:66219659-66220299
  hyper
ctggcgcgccgcagccgcccccttggcgccctcctccaagctctcggtggcccaagactcgcgccctcccgacaaagaacgcatggagacccggctgcctggtcctttttgggctctttaaatatgcggcggccgccggagggagcccggggcaggggctacggggagcctggttccccgcaggacggggttaactcgcccagctaagggcgcgttgaaaggagtgtccaagagagtgcagggtagccagggtcgcttccttgtcaggggcccggtcccccttttgcccctggatctcgcgcctcagagctgcagccattaaatgctcttctccaaggccagtggccgggggttgagtaggggacgatcgaggggcgcccgggaccctgcggagtggagggttttgtctgcggatgcaaccaattaagcgtgcagccggcgcttgcagagctgcgctcagcgcgcagggctgggggttttgttcgctgtaatttccaagccgcggcgggcagagttggagcgggatatgtctattgagaacatttaaactccactttctcgggctttaaaacttgctctctgcttagtcttaaatcgcttccttcatggcaaacacgccgattagaaaataatcctagag

SEQ ID NO: 8902 - DNA, 101 bp, Homo sapiens
  chr12:66300831-66300932
  hyper
tccctgtacctgaaaacgagtgggagccaagcatgtgaactgttaacttcaattaaaaggggttgctgggtgcggtggctcacacctgtaatcccagcact

SEQ ID NO: 8903 - DNA, 560 bp, Homo sapiens
  chr12:66582758-66583318
  hyper
agctctgggctttctccagttcgcactctgcttgtctcggcagctccgtccccaccgcagaggtgtgaaggggcgcaaagccagcgaagggagaacccgggtcgggtaacccccaggcctggccaggcggacgcaggggcatctcgggcgaggcgcgccttgcgtcacgtgggcaccgcccctgcagtgaccggagaacggcgtgttcctagggctctgctgccgtcgtggaagcaggatttccgcggttgtgtaacggcctgtcgcaggcgtgcagggacctggactccgcctcgtccccggggctcgggcagccgagccatggcggggaactgtggggcccgcggcgcgctgtcggcgcacacgctgctgttcgacctgccgcccgcgctgctcggagagctctgcgctgttctggacagctgcgacggcgcgctgggctggcgcggcctgggtgagtcggcggggaccggccgggggcggcgggggagcccagcgcgccgcggggcccgctcggcgtcgccctgcatggctggggtccctcgcggggctggcgcggc

SEQ ID NO: 8904 - DNA, 342 bp, Homo sapiens
  chr12:66629082-66629424
  hyper
cggcgggcgcgggcgcggggcagcctgggcgcggggcagcctcgccgcgagggggaggacgcaaggagggggccggccgggccccgggccgaggcagctttgggaactccctctcgccgcgcggcggcggccggcgggggctgcagctccgcgctgacttcccctccgcactcgtctaaaagtgcggcgcggcgcggggcgagactcgagcagctcgggcagccgccgctctgcgtgccatggacgggagttcgcgcgcggagctggcggcgtcgccgactctcccggcggcagcggaggagcagcgccgccgcgtcctccgatattattaagttatgtttt

SEQ ID NO: 8905 - DNA, 34 bp, Homo sapiens
  chr12:68617123-68617157
  hyper
caacaaccaaccagagcggcgccacactgtccca

SEQ ID NO: 8906 - DNA, 30 bp, Homo sapiens
  chr12:68726213-68726243
  hyper
gaccaatagagactcgcagagtgccttacc

SEQ ID NO: 8907 - DNA, 498 bp, Homo sapiens
  chr12:68758755-68759253
  hyper
acattcttttaagatttctatcgcctcagtattgtcgatttccacatccacagcctaacaacgtggtgcaatcgccctttgcgacgccgcagaccaacagacggatgctgccctgctgcagtttcacagcacaccgggtctttccgcttcagctggacagaggcccagccaggccgtagggaggattccgaaggtctctctgcagaggaccggcctctcagaccgagaaggctccacccaggcaggaaaggacactgtatgtggggcagtcggcctgggccccatggctcgtgtttgttgctgaattgggcaacgtgggctgcggttcacagggcaacagagacttcaccacctaacacatcggggctggtgcagctgaggagggctgcttctgcctcttggtgaccacgccctttcccaggctgggcccacaggaagtctggccgggaagggaggaggcactgcaagctgtgggaaccacaccggctccttcactgc

SEQ ID NO: 8908 - DNA, 30 bp, Homo sapiens
  chr12:68933051-68933081
  hyper
acaagtggttttccacgtttgctcaaagtg

SEQ ID NO: 8909 - DNA, 30 bp, Homo sapiens
  chr12:69005423-69005453
  hyper
tgctccatttgttgcgggaagtggcaggag

SEQ ID NO: 8910 - DNA, 30 bp, Homo sapiens
  chr12:69201648-69201678
  hyper
gtttccaccgcgggcgggaagtgtaaacac

SEQ ID NO: 8911 - DNA, 605 bp, Homo sapiens
  chr12:69326684-69327289
  hyper
tacgtctcggtactccggtctcagggtctcccgacactgacgctccctgcctcctaaggaggcaaaagctggaagcaacaccttcgggagtgagccgtgcaaccagagaccgggagcacgggcagcctcggtgccctcgacccagccgcccgcgcctccctctcctcctcctcctggcgcctccgccgtccggcagctgccacagctgcgcccggccccgcgcacccccagcctcaccaggtcccaggcgcgcacctctacccacccgcggccgcccggcggggccgggtgttatagcccggtcagagggcgggcgcgcccgggccccgcccccggacgtccctccggcccactccggagccgcgcgggtgcctcccgggcggggcctcagccgccttcgcacctaggagagacggcgcccgcgcggtgcgccctttcgtggcgcggctgctggtgcccgcggccgggcggctgagctgggcggagggctgcgggcatggagtcgccgctcgcggacagtctttgctggagccccaggtcagaagtgtgtcctcgcctcggccacggctgtagcctgggcagccacagggcgctccaccgaggga

SEQ ID NO: 8912 - DNA, 30 bp, Homo sapiens
  chr12:70637716-70637746
  hyper
gagcccgctttagacggctctgccgccttc

SEQ ID NO: 8913 - DNA, 518 bp, Homo sapiens
  chr12:70760475-70760993
  hyper
gggcggggggagcacgccagccgccgagagtggggggcgatggcgaagctccgggtggcttacgagtacacggaagccgaggacaagagcatccggctcggcttgtttctcatcatctccggcgtcgtgtcgctcttcatcttcggcttctgctggctgagtcccgcgctgcaggatctgcaagccacggaggccaattgcacggtgctgtcggtgcagcagatcggcgaggtgttcgagtgcaccttcacctgtggcgccgactgcaggggcacctcgcagtacccctgcgtccaggtctacgtgaacaactctgagtccaactctagggcgctgctgcacagcgacgagcaccagctcctgaccaaccccaaggtaagaacgccccgcgcacccaggggctccccgcgagggaggtttggaggcagcgtcggtgttagactccgcgcggggagggttcggcgtgtgctcgcattgctaggaggagaccaggtggcgcaggctgtgctcaaaccagg

SEQ ID NO: 8914 - DNA, 588 bp, Homo sapiens
  chr12:71003554-71004142
  hyper
gtgtgatccacaaggccaacccggctccatggctcagcattgcgctcagtagttaagatccagaggagaccgagggggctggacgtgggacggcccgagggccggggcagggggtcacctgttgcgcgcgctcagcgcgccccgtgggcgcagcgcgcttccctcggggctggcgacgcgcaggggccactgcggccaccgctgctgctgctgctcctgccgccccgggcgggctgcggacgcgagaggcggcggggacaggcagcgcgccgcccttcccacgctgccattctgacccgcgctgcctcgccccagccccgtccgctgacttccgcaatcaaaaggcaatttcctcgtctcccggcaaaggaacaatgcgccggcgagggagggagccccgaggagccaacgcctgagcctgccaaggggcccgatgtgggccaagctgcccccgctgccccgcgccgataccttcccggccaggggtccggtccggctccgcggggctctgcctcctcctcctcccgtactctcccttttccccagtctgtggttctcgacccagtcgccttagccacaattagtgct

SEQ ID NO: 8915 - DNA, 44 bp, Homo sapiens
  chr12:71833002-71833046
  hyper
ttttagggcaaaagcgagccagacagtgcggcagacgtaaggat

SEQ ID NO: 8916 - DNA, 484 bp, Homo sapiens
  chr12:71833457-71833941
  hyper
caagtggagggaaagtggggccgggcggggggtgcctgggaagccaggctgcgctgacgtcactgggcgcgcaattcgggctggagcgctttaaaaaacgagcgtgcaagcagagatgctgctccacaccgctcaggccgcgagcagcagcaaggcgcaccgccactgtcgccgctgcagccagggctgctccgaaggccggcgtggcggcaaccggcacctctgtccccgccgcgcttctcctcgccgcccacgccgtggggtcaggaacgcggcgtctggcgctgcagacgcccgctgagttgcagaagcccacggagcggcgcccggcgcgccacggcccgtagcagtccggtgctgctctccgcccgcgtccggctcgtggccccctacttcgggcaccatggacacctcccggctcggtgtgctcctgtccttgcctgtgctgctgcagctggcgaccgggggcagctctcccaggtct

SEQ ID NO: 8917 - DNA, 639 bp, Homo sapiens
  chr12:71834451-71835090
  hyper
caaccgcctctctgcgtctagtcgcattccacgaaaagatggtctgtagaaagtttccccaaaggagaaacaacttgcccagctccaaagggtttttagtctgcatcccttgcactgtgacgtgatgtaacctttttggggttttttcctcttttcctcccttccttcctcccttcttccttccttccctccctcctttctttttattttctttcttttttaacggcgtgattaaaatgtggcaaccacaaaccccgattagagctgccagaacgttatctttacctttggctgcccgcgccgccctttgaagtgcccgcggccgctgtgtaatctttaaccatctcttcccccggggaggaaaggggaagtgggctgaaggctgttgggctggtaaacagcggcaccgacacccaaagggagacctgaagctctctatcatccctgggggattctcccaccccttctctccccactgcaacttccaaagccctgaggcggcggctcattgcgtaattttttctgtggaaaacccaggcccgaaggtaacaggtagttgggtgaacgcggtgacccaggaggaaccctattctcggagaccaaggcgactactctctccacccccgtgcaaagcatctg

SEQ ID NO: 8918 - DNA, 30 bp, Homo sapiens
  chr12:72080236-72080266
  hyper
cttttgcggtgaggcgttgaccacgcccat

SEQ ID NO: 8919 - DNA, 181 bp, Homo sapiens
  chr12:72332592-72332773
  hyper
tcatataaaggagcccggggatgggaggattcgcattgctcttcagcaccagggttctggacagcgccccaagcaggcagctgatcgcacgccccttcctctcaatctccgccagcgctgctactgcccctctagtaccccctgctgcagagaaagaatattacaccgggatccatgcagc

SEQ ID NO: 8920 - DNA, 765 bp, Homo sapiens
  chr12:72665266-72666031
  hyper
tgtacttcttgcaggcggctcagcaaccccctctgtggctgtgggtgtctggtgtgacagagcggagaaaagctctctaatctcccagtgcctgcctctgccgctcagtcgctcccctccctcccgcctttcctgcctcctcgcgcgctccctctcctttgcctttctctgggagtttcagtccctcaatgcagctggagtagccctggcaatctaaacccgaagcctgtgtatatacacacacgcacacacgcgcacacacatgcacacgcgctcggacatacgcacttcggctctcccccttgggatatggagcaaacccagagcttcatctacctgaaggggatggcccggccggacacttctttctcacttgtcatctccggagggcagagcaagactggaatgagggagtctcgctgtcgggtctgcaacctcctgccgtttgccgccaccgccgcttaaagtgcccagggtggagaaggcttttccaggacggatctccgtcgtagcttcgcggccctgggacttcctcctgctggttcactctagtctctcccacctcggccatccttttctctccagctgcagggtgtatggctcgggtgcctcccgtgctgtggccgccgtcactgctgctgcgagcacattccacccagaggaccgaacgccgccgctggagtggggggagaaagcgaaagccctaacttccctctctacaccctcgctcttcccaccgctcccgtccttctccctagccgagaa

SEQ ID NO: 8921 - DNA, 465 bp, Homo sapiens
  chr12:72666342-72666807
  hyper
gatgcctgctctggctgtggcccgggtggcccgcccgcggggggtgccagagggggcgggggaggaggaggaggcggtgtgatggccctggacggcgagctgggggagcaagaggaggagaagaaaaagaagaagaaaaagaagaggaagaagaagaaggaggaggaggaggaggaggagggggccgagaagagcagctcacccttcgcagccgcgatgggggaagacgacgccgcgcttcgggctggcagcagggggctctccgacccgtgggcagactcagtgggagtgcgaccccgcaccacggagcgccacatcgccgtacacaagcggcttgtgctggccttcgctgtgtccctcgtggcattgctcgcggtcacaatgctcgctgtgctgctcagcctgcgcttcgacgagtgcggggcgagtgccacgccaggcgccgacggtggcccctcaggcttt

SEQ ID NO: 8922 - DNA, 725 bp, Homo sapiens
  chr12:72666997-72667722
  hyper
cgctgcactacaatctgatgctcaccgccttcatggagaacttcaccttctccggggaggtcaacgtggagatcgcgtgccggaacgccacccgctacgtagtgctgcacgcttcccgagtggcggtggagaaagtgcagctggccgaggaccgggcgttcggggctgtccctgtagccggttttttcctctacccgcaaacccaggtcttagtggtggtgctgaataggacactggacgcgcagaggaattacaatctgaagattatctacaacgcgctcatcgagaatgagctcctgggcttcttccgcagctcctatgtgctccacggggagagaaggtatggagggaggcggtgccccgcgctgccccaccccggcgcgcggctcgaacctctgggcggcctgcgaccccggggacccagctggcttccaatacccgggaagccaggggtggggggaaggaaacgaaagcggagtagggcagtcagaactccggggtctcccagatgcctcggggtctcgctgccgccaacttcgcaaactgactcaccggtgccaaaagatgaatgctgccccctcctctagtcgggacctctcctcttcctgtcagagttccttagccatcgaaacgcagggctctttttctgaagggtagctgataatctgagcgatgccagagtgacatgaaaagcttgccaagttactgtcgagggaaaatacgtg

SEQ ID NO: 8923 - DNA, 143 bp, Homo sapiens
  chr12:75601696-75601839
  hyper
ggtaggtttcgtgccgggtgcccccgacattgaggatcaccctctcgttgttctcgatcttgcccatctctgtgactcagacatgactagggggaggcaaacacagcgccgagttaaagatcttagccgtcaaagacacacca

SEQ ID NO: 8924 - DNA, 503 bp, Homo sapiens
  chr12:75602928-75603431
  hyper
aacatgccctttccaggaaatcgcccctttcaccacccccgcccccatttccagataccttaacgagaccgagagaaaagtggttctgctttggtttccgagtggacgaggttctctgggcagcgggactgagtcttggcgcccaggtgagccgcccttctccgacgagaaactacttgttggcgttttccggattcaggtggttgagccgcttccctgggcgctggggtgggggagaaagcccccgccggccgccggccgcgctccccgccttcattctgtgatctgcggatttgccagtcgccaacctccgcgcccagagtcaccatcgcgcagggttgggcaaaccatggagctcggggcgggtccagccggcactgcccgacccctccgggagcgggcagatcggctggccgtgaatggagtggagactggccgcaggtcaggagagctcaccacttgaaggtgaagtcgccctgctcggattccatctgcagattttg

SEQ ID NO: 8925 - DNA, 443 bp, Homo sapiens
  chr12:75728067-75728510
  hyper
aataaaaatctatacacggaagctgcgtctaagaaacgaatatatagtgctttgcactcgactggcccattgtcagcatcccgcacttgttctttacctaacttgtgtggcttgcatattgcaatctgtattacaatccagacgcgctctgcagattacagattggatccacagaaagcagtttggatggttgaaattccctccaccagagggcgactcagagctttcccctgtagctcagagctttgtggaaggggaaccctgctgcctgttcttccccacagcgacactgacaagttgatccagccgcgctgggctcgagcctgtgcggcaggatggagccaagggagagcgtggtgcgggggcgtggggaaatcgggttgccccagccgttactggtccgcgcagtcagggcatcctccgcatcctccacatccttccat

SEQ ID NO: 8926 - DNA, 30 bp, Homo sapiens
  chr12:76424958-76424988
  hyper
tgcagctgcttgggcgggataagcagcagc

SEQ ID NO: 8927 - DNA, 31 bp, Homo sapiens
  chr12:76954093-76954124
  hyper
tttttttttgaggaaacggtgtatttcaatc

SEQ ID NO: 8928 - DNA, 43 bp, Homo sapiens
  chr12:77272815-77272858
  hyper
ggtgccttttaaagagcgctcggtgggcgcggcctgtgtccgc

SEQ ID NO: 8929 - DNA, 40 bp, Homo sapiens
  chr12:77718730-77718770
  hyper
cgcggggcggggaggcgcggcccggcggaggagggaagaa

SEQ ID NO: 8930 - DNA, 30 bp, Homo sapiens
  chr12:77719020-77719050
  hyper
attgcaaaccgctgcgctccttgcaaagtt

SEQ ID NO: 8931 - DNA, 30 bp, Homo sapiens
  chr12:77719393-77719423
  hyper
gggagggctgtcagcgccagggcggcggaa

SEQ ID NO: 8932 - DNA, 30 bp, Homo sapiens
  chr12:77928810-77928840
  hyper
agcttctgcagggaatgcttagctagagat

SEQ ID NO: 8933 - DNA, 30 bp, Homo sapiens
  chr12:79257684-79257714
  hyper
cagtgcactctccacggcctggcagccgcc

SEQ ID NO: 8934 - DNA, 507 bp, Homo sapiens
  chr12:79258371-79258878
  hyper
cgatgttggctgaacggatccacctattattagtgcgcggggattggctccttggcgcagcgtacccgaggtggagccaatcaggatgctggggctcggagatgatgggcggccgcctcctcactggagggattcctggagaagctgcagtgtggggatgctctagaccgagtactgcccccagtgtctttccacctcctcctgcagcagcggcagcggcagcagcagttagcagcggcaacttgaggctgcaccccgggcaagtccccagggtggtgctcagccgagaggggggcttggcgccccgaaggggtgtgtgtagggtgggggcgaccacgtgggaccagctggtggccctggaaaacctcccacacacccacacccacacaccccttttgtgttgcaggctgcccctccaagagcggaggcagcgagagtacgcgtgtgcctcgcgccggtccacgcggggagagcactggggaccgagacccggcaccacctcccggt

SEQ ID NO: 8935 - DNA, 31 bp, Homo sapiens
  chr12:80083437-80083468
  hyper
cccaggaggaagacaccgggaggcagctgcc

SEQ ID NO: 8936 - DNA, 433 bp, Homo sapiens
  chr12:80084656-80085089
  hyper
aggagcttgtaggggacgaggcgtagggctgggatccggctcccaggtgtgccgaagctggcgcgcgctcttccgccgcgcggaaagtgccgcggcaaactcgcggtgcggagctccaggcaatcccaggacaggagggagggagaagaaggagggagggagggagggagggagccaggggcgggaagggagccgagcggcgccgaagcacgagcggaaaaggccgaggcggcgcgcgaggggcgcggcgcgcggtgggaagggtcgtggccgctgacgccccgcccccggcgctcaggtgcgcggcgtcgcgtccggcccgccgctgcagcctgccctgcgccagccgtcctctgccccgctcccgccgcagaccacagcgcgcccgccgcgctccgcccgcggcctgcgagttagacggcacattcctggg

SEQ ID NO: 8937 - DNA, 1480 bp, Homo sapiens
  chr12:81330380-81331860
  hyper
gccgtaggactcgagcgccttcatcactggacgctggagccaggaaggaaacccacacactcagggacaggtataaccccacaggggtgcaccagtgaggccccgatcgcagcggaggactccatccctgagcttgtgagggcgtcctggggaggaagcgaacactttccccgttcaagtcagagagcaggactcactgggtggcaggtcagaagttgaattttaacccgacctgcgctttgtccccgcgccttccgcagcctgggcgccgcggtggcaccgagctgggagaggacacgagaggctggcgcgggagaagccgagagttgctatcgaccgggagctgccggcggcgggagcagacgcgaccctcgccgctttcgatctcgaagccgcggagagccgatctcggctgctggggctcggctccccgcgctctgccttgccctttcggcagagggcagctccctgcctgctgcagccccgccactgtgcgcccggcagcccaggggtgcgcccagcccgccccccgagtggccgccgggactccagcagttggaccgaccctcgccctccggcgcctggacaaacttccttcctcccgggcccctgcgccaagcaagctgacaggcggctccctcgccggtctcctctgggctctggccgggcgagcttgctctctgcccctctccaaccccgagcccctggcgcctatagccgtccccgcgcagcggctccaacaaagccagaggaccggagacgacccggcgaggggctgggagtggcagcggggaccccagagccagaaggaggcgtcccctcggcggggcgagtacagtgggaaggggcagcgggaacgtagcggggagagaaaggggaagaaagtgttctgttctcggcgcgaacgccttcctggctcgtcctcgttccccttctcctcctgcctgagcgcgtcccatgtcccgttgggaattggcaggcggggaagggaggaggggagaggggacgcggtggcctggcgagcgagccgctcccttacctctgtccagggtgagcggctggaccactgtcaatgtcgccatgtctgccgtgggagccgaagtgacgctcggcttcagcatcagcaaccgctcgtagtgagaaaaaaaggaggagattgggggcgggggtggagagggaagacggaaaggagggggaggagggggaaggaaggaaggtggtggtggtggagaagaaagcttgggtgggttggtagccagatggagacgcaactgttccgcggcggcagatcttcagttgcggtgcggagctgagcaggtatccgagagcgactgcatcgccgggctctgggagggaaggctctgccctagaactttgctattccacccccaggagcgctgggtgggtgtagctggcgggttgcttcctttcaactttccactctaataaaatggtcagaatatacgtgtgtgcatgcggg

SEQ ID NO: 8938 - DNA, 318 bp, Homo sapiens
  chr12:81471296-81471614
  hyper
tggtcaggaaatcccggagcagtccttgccctggagctgcttgtgtttttagtaaccagggactgagctgattttgaaaaatcaatcaatcaataaataacaatcaaagagccttgcctcaacgcaccgagttgctggtttcctgcaggtcagaggcgatgccacctccaccaacgaccttccaaagattaaaccagccgtgtacaaactgctggattgaaaattgagagatgggccgttggcctcctcctaggagtacttgtgtgttgaaatcggaaggacgttctggagtttgagcgcgatttttcccggaaggct

SEQ ID NO: 8939 - DNA, 305 bp, Homo sapiens
  chr12:81471753-81472058
  hyper
cggcgactctagtgtggcttccaaacttctgggctctgggctcacttcggaatttgcccccgccccctactcccttccctcaggccccaggaagttgcaagagtaccatttgtcgcacactcggggaccgcgggtggccggaggagatgaaaccgtcttggctgcagtgtcgtaaagtcaccagcgccggggggctcggagggcccttgcctgggtcctctccggcccggggagccggtgcggccctcagggctttagtggtcccgggcccgcggggcggtctcgggggccggggatgcagggca

SEQ ID NO: 8940 - DNA, 226 bp, Homo sapiens
  chr12:82152214-82152440
  hyper
tgatcaatgacaaccgcagtctccggcttgaggagaagggaggctcacacccagcactcctggaccatttccctagcaacgggaggagaaaggcagctcagacacacgcgtgccccggcgccctcccggaacgtgccccggcccggtggcgtggcaggagctcggcatcttcccgtggctccgtcagcagccaaaaggagaagcgtccatcggaaaaatggcatat

SEQ ID NO: 8941 - DNA, 199 bp, Homo sapiens
  chr12:82153055-82153254
  hyper
aacctgctggcagccggtgaggacgctacagcatcttctctcctcacttgcctcgtgcggtggctgctactcctcctcctccgtctcctcccctcctcctccttggcagccaccacctcctcttcctctggaacaagggcttcccctggaagctgctgcagtggtttccaccggcccttaaataaattctgaagtaatc

SEQ ID NO: 8942 - DNA, 196 bp, Homo sapiens
  chr12:82153283-82153479
  hyper
cgcccgcggatacactcgtctcccccagagccgctcccgggctgccgaggctcgctctgctcccagtgccccctgcgaaggcgagggccagggatgggcaaagtgggaagggggcacacgcttccccgcctgggcttctttcacacaatgggctctacagccttcgcttgtgtcagcctgcgctggtggggatggg

SEQ ID NO: 8943 - DNA, 15 bp, Homo sapiens
  chr12:83080925-83080940
  hyper
agctggtcccagagc

SEQ ID NO: 8944 - DNA, 232 bp, Homo sapiens
  chr12:83080990-83081222
  hyper
cgagtcccactcctcacctaggacgccccaaactgccatgggttagggtggggatcgcgacccgcgcgaaagaccagccctgcgcttccgccgggggacgcggagcccaaacgccgctcaccgcttgcgggcgccgggcatggggagtgtggtgtgagcccgcacccggggaggacgcaggagctgcggagacgggcgcgaggaggaggagaggagtcgtggattggaagga

SEQ ID NO: 8945 - DNA, 30 bp, Homo sapiens
  chr12:85305204-85305234
  hyper
actgcgccggagtccggaccccgccccgtc

SEQ ID NO: 8946 - DNA, 374 bp, Homo sapiens
  chr12:85305662-85306036
  hyper
acgtgcctttcgtacggcgaaaggccccctttcgggccatttatcacaggatacctcaagcaaaggggaactgtggtcacgtgaaaacactctgtcctcggtagtcgccttctgcctttgctaaagcgaacggaagcgaatgaggaataaagctctctgctctccccgccccatcgcccacctgcacgaggtttagcttccaattcacctcgcgtctctctctgccccaaccctcccaactttcctcttggactttcccgtgttggaccccacccttcaaccaaccccgacttggcttggaaacgagtaggtctctggggatgctgtgggcaatttccacgacgggaagaaaggatggcggcacgtttcaaccc

SEQ ID NO: 8947 - DNA, 236 bp, Homo sapiens
  chr12:85306322-85306558
  hyper
cgcctcttgctgcttccacgtccgggcagcagcagcagcagtcgcgaaagggtagggtccaggtggctgtgacggaggccgaagaggagctgttggcagagaagcagcttcttgcctaggttgggacccggagctgggttttgggggtcgccgccctgcaggctggcaaggagagactcgtgagcgcctgtgtgtctgccagggaaacagcacgggatacaggcgcgcgggtgcgg

SEQ ID NO: 8948 - DNA, 174 bp, Homo sapiens
  chr12:85306789-85306963
  hyper
cgagcggcgtcttcccagagcccggggctgtgcccgcccgatgcaggatgcaactgaggaagcccgctccaaagcaaaacaaaacaaattcctccagccatgccgtctttctccaacccactcaagcgaaagaatggacaccagttaccagccgctgacttttgtctcagtgag

SEQ ID NO: 8949 - DNA, 30 bp, Homo sapiens
  chr12:85667338-85667368
  hyper
ttgaagtggagagccggtcctcattccaga

SEQ ID NO: 8950 - DNA, 272 bp, Homo sapiens
  chr12:85673287-85673559
  hyper
agctggcccggaccccgagctcctcccggttagaagccgaagcggcccctctactacggcggctgcgattaacagttgccaatgcatctggttccttgggcttcggattaatgtgaatcttccacgtaaacgatttacggatgaaataaaagccttttagagcaatatttcctttcaagttcttaagacgcctctaaatctttctggtagtgagtggccggcatgggggcggggtggggacgggtggctcaggaaggcgcaggcagtaggga

SEQ ID NO: 8951 - DNA, 31 bp, Homo sapiens
  chr12:85673868-85673899
  hyper
cttttccagccgggacgtattaaagggaccg

SEQ ID NO: 8952 - DNA, 30 bp, Homo sapiens
  chr12:85674125-85674155
  hyper
gcacgttatggagacgctggacaatgagtc

SEQ ID NO: 8953 - DNA, 193 bp, Homo sapiens
  chr12:85674516-85674709
  hyper
ggtctggtcgcctacggatccctgagtccttctgtaatattggttcctggagtaaactgatagggcgctaaatagagcgtaattgagtcaagacagaacgcttcctctgcgagcccgccttgcagtccgggcggtaggaactgaaatcgatcacagctcgttagagtacgtcactgtcgtcacgagtagggaa

SEQ ID NO: 8954 - DNA, 30 bp, Homo sapiens
  chr12:85918797-85918827
  hyper
tcatggatcctccaaatttctcattctttc

SEQ ID NO: 8955 - DNA, 1284 bp, Homo sapiens
  chr12:88973444-88974728
  hyper
caaactaggcagacaccgccgagagccaagtttcccgggcaggcgggcaggttcccgccccgccgagagctgccgcttaggagttccgcgttggcttcgctcccgcggctgcacccgcgttcgcgccgctcctggtgcccggcgcccacctcggggctacacaaataaatctgagtgagagagctagtgagggtggcgcgtggggtgctgtttcataatctcctggaatccacgggaaaaccgtctcctatgcaaagacatgccttcccgtgataacttaacattccatggcccaaaagccaatctttccaccagacgggaattacggtttccgactgacagctcaaaacttaactgctgaggctccaaacttgacactggctccctctcagcactcccactccttttctccctggctcacccggctcggctcgggatcacacaccacgccggcctcccccgcatcctcttgtctcacccggcaggcacagccctgcacgccccagctgcaagtcccagggagcgccggcttccccggggcaccgggcgcgatttttcctggagagcctgggagctcccgggcgcgccctactcacttgtgtcttcttcataaggaaaggcagcgctgcgatccagcacaaacagtggtgtggcgactccgtttagctgttctggagctccagcatattgcacgaacagcggcggcagatagtccacgcattgggtagcccgagcgcagcgccctctccactgtccctgcttcccgcagcgcttctagtctcggcgcgaggcggcgagcgaagcccggctgctgagccgccggcgcttttatacagttcccgcccgcctgctccggacacgcctccttcccttccggagcccggggtaggcgagaagcaggcaagggcgcggagggaagaatcgggagggcggccagagcacggtaaatgccccagaagtttggcagattaggccaaccttgtccgctcgcctgggggccccggacctgcactggcgggagaccgcgaaggcgcggggacgcagagggcgaagcttggtaccctgcagctactgctcgcgaggagtcccagcttaccctcccggatccgctggggctcacctggcacccccggggacagacgaaatacctcgcgcgccagagagggctcggagctccctctgttatacaaagtcggagagggagaggagtccgggaggttcggagcaaagaattcaccctgcctgccttagagaaataaagtttaattgcgatctgtagttagg

SEQ ID NO: 8956 - DNA, 30 bp, Homo sapiens
  chr12:89744862-89744892
  hyper
taagaaccgcagcccggcgcaagaaacacc

SEQ ID NO: 8957 - DNA, 450 bp, Homo sapiens
  chr12:89747141-89747591
  hyper
gccccaccaccaccatcgcctgctgggaggtcgcgctggttaatgatttctgggcaaggagctcggcttctgacgggggagccggtctggcggggctgcctgagcgaggtgtgctgggacgcgccgggccgggccagcagtccccgccatgggcgaggcgtgaggaagtcctcccgcaagacctgcaggctgcgggggctcggcaggggggctcgacgattggttacagttggcagggaggcatgtcagagggggcctccccagccctctcctgccgccgcctcctccctttgtccagcgccgggcactccggggagcaccagccgcgcctgcgcgctgcgctccctgccaccgccccgccgtccccgtctccccgcttgggcacggggctgtgcgcgacgcagtggacgggtgcggggctcagcgagggactcccgggtccatagagat

SEQ ID NO: 8958 - DNA, 386 bp, Homo sapiens
  chr12:90101373-90101759
  hyper
taaatatcagcctgtcgaggagggtcgagccctccaagtacctgcagacccctttaacccacccggacgccctgccctcccctccgagccaagcagcgcacagggtgcgagcactcccagcgctgcgagtcccgcagaaaactggtgaatgaaatgcgcacagagaccaacctggctggtgaccgcggcgcagaaccaggggtcgctaaccagcttagccacaggattctcccgcaggatgggataaagagagcacagcccccaccccacacccctgccactggaacgcggtcctcctacagactccttcctcaaaaagggaggtgggggcgcaggcttttttctcttaaactaagtgaataaacacgaatcggaaacaactgtga

SEQ ID NO: 8959 - DNA, 30 bp, Homo sapiens
  chr12:93963381-93963411
  hyper
aatgcccccctccccgactcatctgcttat

SEQ ID NO: 8960 - DNA, 1186 bp, Homo sapiens
  chr12:93966029-93967215
  hyper
ggggccctcgggctgcgccaggtgtgagaccggaatgccaatttggggaatctctcctgttctttcctttttaattttttctacttgtccttgacaagggcctattcccactggatctgcaggtgactatttgctcttcctaggtcgccagtctttgatttcagctagtgaccctgggcgggaagacaccctgttcaccctcctcctgacctccgccccccacctcttcagccaactttatcttggatctctgctctctttatcttttctctagagctgggccagggcgctaactggaagcttggggttaaatggtgcaggaacgtagaggcggaggagtccctgggattttccacgtctatttccccacccccaccccagccgcaggggtccagtttggactgacccaacctcccgctttctctttgtaggcgatcagtgggtgaccgcggctgcgagggactttgtcatccgtcctccaggatctggggagaaagagccccatcccttctctctctgccaccatttcggacaccccgcagggactcgttttgggattcgcactgacttcaaggaaggacgcgaacccttctctgaccccagctcgggcggccacctgtctttgccgcggtgacccttctctcatgaccctgcggtgccttgagccctccgggaatggcggggaagggacgcggagccagtgggggaccgcggggtcggcggaggagccatccccgcaggcggcgcgtctggcgaaggccctgcgggagctcggtcagacaggtagggagccgatcggccgcgacgcgtgcgggagggagcgcctccccaaggaagcagctaggaagcggggtcgaggtgggaagcaaagaataagatggaaatacgtcccttgcttccaagggaccgcggagagcacgctcgcagggtcctgggtccttgggaatgcgtaaggaaagtggttctccagggactcaggcctggcggagcgcagagcgcgggaagagcttcttggaaatagcttcttagcacgctggaagatttactgttttccgcagctgctcagggttaggctcccgggctcgaaccccggccggggaaagcgtcgggcgcctccctttgcacggggtgcaatcagcaagtcggtgccgcgggccccgcaggcccagcagcatctggctcccgg

SEQ ID NO: 8961 - DNA, 529 bp, Homo sapiens
  chr12:93985155-93985684
  hyper
ggagaatgaacaagatgggagcgaggagaaagcgtgtgtgcgttcgtgtgtggctgtctgtctgtctgtctgcggcaagaggaatctcagagtttcggttatttctccttgaagaattttcaaacggagttcctgcaggggctggctctagcgtctacgatgtgcacacactgtctctcaagagggaagtgatcctggcgccacggggtgatgcagcagaagttctttttgtctgtggccagggtagagtgcggagccccacggagctgtggcgtggcggctcctcccagacgcgtccggggcgccgctcgggtctcccaggaccttatgtaacccagcgtcggcagcaaggagccggtcacaggctgaccaacgtcaaggcgtttcactttggaagcgcaccagatgagtgtggtattgagagcagacggctgggtgcaatgtttttgccgcatatctcatgggttattttaatcttttcacgtagtcttaagggtctcactagaccgtatatgagaatgtggccagg

SEQ ID NO: 8962 - DNA, 1264 bp, Homo sapiens
  chr12:94542856-94544120
  hyper
agcccgtgtggcggtcggagcaagccatcggagccatcgcggcgagccaggaggacggcgtgtttgtggcgagcggcagctgcctggaccagctggactacagcctggagcacagcctctcgcgcctgtaccgggaccaagcgggcaactgcacagagccggtctcgctggcgccccccgcgcggccccggcccgggagcagcttcagcaagctgctgctgccctaccgcgagggggcggccggcctcggggggctgctgctcaccggctggaccttcgaccggggcgcctgcgaggtgcggcccctgggcaacctgagccgcaactccctgcgcaacggcaccgaggtggtgtcgtgccacccgcagggctcgacggccggcgtggtgtaccgcgcgggccggaacaaccgctggtacctggcggtggccgccacctacgtgctgcctgagccggagacggcgagccgctgcaaccccgcggcatccgaccacgacacggccatcgcgctcaaggacacggaggggcgcagcctggccacgcaggagctggggcgcctcaagctgtgcgagggcgcgggcagcctgcacttcgtggacgcctttctctggaacggcagcatctacttcccctactacccctacaactacacgagcggcgctgccaccggctggcccagcatggcgcgcatcgcgcagagcaccgaggtgctgttccagggccaggcatccctcgactgcggccacggccaccccgacggccgccgcctgctcctctcctccagcctagtggaggccctggacgtctgggcgggagtgttcagcgcggccgctggagagggccaggagcggcgctcccccaccaccacggcgctctgcctcttcagaatgagtgagatccaggcgcgcgccaagagggtcagctgggacttcaagacggccgagagccactgcgtaagtcctgcccccggggcgccgcggagagcgctgctgccggggagccgccgccgccgccgaggcagaacgagctgggggcgagcggcggggcgggggtacagccgggtgacatttaccaggtctcaggttcacaccgcgggcggccgtccgaaggctcctctcggacggtccccgagacctggagcacggcctgaggtccccaaagggagagtgtaaaaaggggggcggggagggttggagttagactcaaaactctagtggctgcatcccattgccatccttccctgtccaaacggggacgcttgttt

SEQ ID NO: 8963 - DNA, 30 bp, Homo sapiens
  chr12:94544421-94544451
  hyper
tggcgtgagccggtgcgagggggcggtgcc

SEQ ID NO: 8964 - DNA, 30 bp, Homo sapiens
  chr12:95397471-95397501
  hyper
ccgcctcccgggtgcgccgagcaaaaccca

SEQ ID NO: 8965 - DNA, 30 bp, Homo sapiens
  chr12:95610976-95611006
  hyper
ggcagcgcgagcgccgtcacttaccggctg

SEQ ID NO: 8966 - DNA, 89 bp, Homo sapiens
  chr12:96183451-96183540
  hyper
gctcaatgcaagcccggggtgatcaccacctatcgtccaagccaggagtcccactgcgttccagtcactgctccggggagagggcgctc

SEQ ID NO: 8967 - DNA, 30 bp, Homo sapiens
  chr12:96184005-96184035
  hyper
tgggggccccgccgcgtcaccacccacctg

SEQ ID NO: 8968 - DNA, 376 bp, Homo sapiens
  chr12:96184964-96185340
  hyper
cgcgaaacaggctagcgcctacttcccacatcccccagcgaaacaagccctccctcctcctccagccaccccctctcggggagtcccacgacccggggacggaacaccccaacccagccccgcgtcacccgcactgagagcgcgccaactgctaagcggcgttcgccgcttctctgctgccttttgcgggggtagggggatgtctcggctaaacaatcgctgcctacatgatccgaaggtgtgcccactttggtgtaagaggtattgcctaactcaaactcaaggtgctgaaagaaaagggtcacaggattagctagtcggcagtgtaagaacatcgttgtccagaggcagggcaagggcacgacaaagggaactc

SEQ ID NO: 8969 - DNA, 30 bp, Homo sapiens
  chr12:96252323-96252353
  hyper
gtagaaagggcctgcggcagaggcgccccc

SEQ ID NO: 8970 - DNA, 30 bp, Homo sapiens
  chr12:96336231-96336261
  hyper
cctttccaacctatcgttcgggaaggcgtt

SEQ ID NO: 8971 - DNA, 30 bp, Homo sapiens
  chr12:96336989-96337019
  hyper
cttgcaatgattaccgcccccgttgctgtg

SEQ ID NO: 8972 - DNA, 542 bp, Homo sapiens
  chr12:96883172-96883714
  hyper
agaacattctctgttcgcatttcatacagcggtgccagcgcacaaccaggcaacgccctcaggagcatcattgttttctggacctggttctttctcgctctgccctccaggggccgctgtgtttctcggaatgcgcgcgggatgcccggttgccacgagaccgtcgccaggcaaccgcgtgtacacatactccaggcgggccggggcgcgtcaatatggcggcgcagggctccccctcgagctctccgtcagacgactctaccacctcggggtctctgccagaactgccgccgacctccaccgcgacttcgaggtcgcccccagagtcgaaggggagctcccggagctcgctgcttcagtggacctgccccgaggactcattgcccctagccgtgttttatgggccgctggacgcgaaaaacccgctcctggcctcttgtgagaaggagatccaggagttgttaggctttatgaggaaaaagaaggctttagccaccacggaggaagagaagcacgaattccgccggcgttggtaagcgctg

SEQ ID NO: 8973 - DNA, 933 bp, Homo sapiens
  chr12:99287474-99288407
  hyper
acataagcagcaccgcgactgaatttcaagtcttctcaaactcacacctcagttgctcagagaggagaaatgcagcgaggactcgccttcctggccagtctctgaaaacgcgaaaccttcctgagctgtccatttgttttaggggctgtttataaacggctggttttcttggaggaaaaataaacaaataaatacggggcgatggcagcatcctgataaacacaggaccttgtttggcttttggcaagttgtaacctggagtaaaatcacatccaagttacaagcacgcaaattggaatttcgctggaaacactgacccgaccttcaccgaagcagcaaatcgcagtctctgctgctctgctcctgctctccaaggcttaacattggaaagtccatgcccacgtccccctctaattaatcaatgtagaaagaaatacgagggaagagagagggagcacactccacaccaaccttgccagcttctattcttcctgctattccttaaaggcgatgcacagcgcacctggaaattacgtggacttggcatggctttttaatattaaagacaaacgacctttggaaaatatacactgttaaagtcaaaccatttggagagacacccagcaatttacctcctcaaactcctcggaaccccaagaatgaggaaaggaaatggaaaatgcgcttaacccgggggtggtgggggaatcgataaccagaacaggtttgaaaaaaaaagcccccctcccgccccctccgtagagaccgctagctgaggctgcaacacctgccccggcaaagcgtctccgcagccttcccggcttgcccgactcggcttcctccgcctctgccccggctgcggcaccacttcttggagccacgtctcggcgagcgggggccgcggagcgagggggccgctgtgccgctactcac

SEQ ID NO: 8974 - DNA, 315 bp, Homo sapiens
  chr12:99288621-99288936
  hyper
cgagcgccgggctctccccgcgagctccccgggcccgcgcgcgcgccccccactgcccccgccccccgcgcggcgcgtgccccccaccccccgccgcgcgccctcgcacccgcccggctccacgcggcgcgcgcctgccctggcggcagcggcggcggcggcggcgcgtcctcccccgaacgccgtctccagggctgctggctgcgctctccattgttccgcggctgctgcccggggtgggcggcgaggcgggggggaggtgtcggcttggccgccggggagggcttaccgctcgggcggaccctcactgcgaga

SEQ ID NO: 8975 - DNA, 314 bp, Homo sapiens
  chr12:99289161-99289475
  hyper
ggctcggcagcggcagagcagtggcagcagccgccactgccgctgttactgcggtcgccgccgctggagagaggaggacgaggagggcaaggggcagaagcaggtcctgctctgtctgccccagaggccacctcgggtttcttctcactaaccaagcgacttcgtgtttacctcgcaggagacgcctcggcagtcctcaacttgtgtgcgccggtggccctctcctgtgggacttgcgttccagctgttctcagagcgggtatgatcggcctccagtagacttggagggtcacgggtgagattttgataaggtt

SEQ ID NO: 8976 - DNA, 30 bp, Homo sapiens
  chr12:100593408-100593438
  hyper
gaggggcagcgggtcgtgggggttcttgaa

SEQ ID NO: 8977 - DNA, 30 bp, Homo sapiens
  chr12:100594371-100594401
  hyper
gttaaaaacaaatacgaaatgagcgagaaa

SEQ ID NO: 8978 - DNA, 63 bp, Homo sapiens
  chr12:100967385-100967448
  hyper
cctcagaccacgcccccgccttatgattggtcccttcgaaacaggcggcggccagcggctact

SEQ ID NO: 8979 - DNA, 151 bp, Homo sapiens
  chr12:100967799-100967950
  hyper
cctgtccacccaagtgcggagagaggggcgacaggtgtgcggggcggttggggctgctggtgtgggcgagctcagctggggaggagggatccagccgctactcgccctgctttaaatccagagcggtatcagagcccgaaggtactgtggg

SEQ ID NO: 8980 - DNA, 31 bp, Homo sapiens
  chr12:101762739-101762770
  hyper
ctgaactagctgatcccggtgctttcaaagg

SEQ ID NO: 8981 - DNA, 30 bp, Homo sapiens
  chr12:102091039-102091069
  hyper
ggggccgtcacccccgtgacccgagccctg

SEQ ID NO: 8982 - DNA, 604 bp, Homo sapiens
  chr12:102455399-102456003
  hyper
ataagaggtagggctagctatcgcaaccggcgtgtgtcgccggcggcagagagacaagcgagatgggaagcgacagttgggagatgcacaccgtctccttaatcagctcaggagggaccccatttcaaggtggactgtggggctctccctcctgaggccccacaggcctgtcacaagggcccgaggccgtgacagggtggggactcggaaggtgggtgtctccccggaaagctgcgtcttccccatcctcctcccggctcgtcgggagtctagcaccgtcttttacaaaccttggtcaggtctatgcctgaccccatgagaggaagcccgtcctcatccatctcctcagcgggcggtggaccccgagttcacccacaaacccctcccagatggggcccgcccaacccggtaatcacgtctcaactttccccccaagtgcccgcctccggggcccttcccgccggaagaaagcttctccgctcactaatcactcggcggcttccggagagcccgcctcctcgctcggcattctgggattggtagttttagtccagattgtgacgtcaatttcggggtggcgcgcggtggtgcaaggatgcagtta

SEQ ID NO: 8983 - DNA, 170 bp, Homo sapiens
  chr12:103218426-103218596
  hyper
tccgtggttctggccggcgtcgacccgtgggtatttaagggttggggcagcccgcctaccttctgctaaaccgcagggaggagtcgggggctgcagaacctggattggttttaattaacccacgcgcaggcaaggtctgagagccgcgtttctgcgccctttgcagcgca

SEQ ID NO: 8984 - DNA, 476 bp, Homo sapiens
  chr12:103311038-103311514
  hyper
tgcgtggtgcatctccgcacagtaacgcccctcgtgggcgttgtcctgacgcaggaggccagggcagcctgccggatgctccaggtcacctgcccaggacgggccggaggggaggggctgagggagggtgtgggggacgcaggaggcaccacttcgctgcccgccctgggtaaagggaagaagccagggagcgacgggccacccaagccccgtcgattagacaggtttaggcacttccgggactctcagaagcctgggaagcgagttctctgcaattggactaagcctgcgaccgtctggtataacaattatatgaataatccgccccccttacccccagctgaaacagtcaggattctcatttagatttttgttgttgttgttttcccttctgttaacctctaagcacactgccttgctgtgcgctgacttcagaaaactacagctagagggcacgtgaacgctgagcacagcag

SEQ ID NO: 8985 - DNA, 78 bp, Homo sapiens
  chr12:103351143-103351221
  hyper
gcagcccgccccgagcgcgccgcctgtttattcagccgggagtccggcacgcgccaggcgcacgcactgcaacaacaa

SEQ ID NO: 8986 - DNA, 564 bp, Homo sapiens
  chr12:103351421-103351985
  hyper
attgaaaaggcggacgcactccggcagcccagcactctctcacttctggccagggaacgtggaaggcgcaccgacagggatccggccagggagggcgagtgaaagaaggaaatcagaaaggaagggagttaacaaaataataaaaacagcctgagccacggctggagagaccgagacccggcgcaagagagcgcagccttagtaggagaggaacgcgagacgcggcagagcgcgttcagcactgacttttgctgctgcttctgcttttttttttcttagaaacaagaaggcgccagcggcagcctcacacgcgagcgccacgcgaggctcccgaagccaacccgcgaagggaggaggggagggaggaggaggcggcgtgcagggaggagaaaaagcattttcactttttttgctcccactctaagaagtctcccggggattttgtatatattttttaacttccgtcagggctcccgcttcatatttccttttctttccctctctgttcctgcacccaagttctctctgtgtccccctcgcgggccccgcacctcgcgtcccgga

SEQ ID NO: 8987 - DNA, 103 bp, Homo sapiens
  chr12:103352051-103352154
  hyper
cggcgccggccagcagccccagccgcagccccagcagcccttcctgccgcccgcagcctgtttctttgccacggccgcagccgcggcggccgcagccgccgca

SEQ ID NO: 8988 - DNA, 112 bp, Homo sapiens
  chr12:103352170-103352282
  hyper
cgcagcagcagcagcagcagcagcagcagcagcagcaggcgccgcagctgagaccggcggccgacggccagccctcagggggcggtcacaagtcagcgcccaagcaagtcaa

SEQ ID NO: 8989 - DNA, 469 bp, Homo sapiens
  chr12:103352313-103352782
  hyper
cgctgcaaacgccggctcaacttcagcggctttggctacagcctgccgcagcagcagccggccgccgtggcgcgccgcaacgagcgcgagcgcaaccgcgtcaagttggtcaacctgggctttgccacccttcgggagcacgtccccaacggcgcggccaacaagaagatgagtaaggtggagacactgcgctcggcggtcgagtacatccgcgcgctgcagcagctgctggacgagcatgacgcggtgagcgccgccttccaggcaggcgtcctgtcgcccaccatctcccccaactactccaacgacttgaactccatggccggctcgccggtctcatcctactcgtcggacgagggctcttacgacccgctcagccccgaggagcaggagcttctcgacttcaccaactggttctgaggggctcggcctggtcaggccctggtgcgaatggactttggaagcaggt

SEQ ID NO: 8990 - DNA, 213 bp, Homo sapiens
  chr12:103355122-103355335
  hyper
cggctcctcgctcgccgcctgcattacttgcagattcagtttgcgtgtctccagccaagcggaaagccgagcgcaaaatgcatcttacaaaacccaacaaagaacgggtagccagcacgtcttccagagttaaaaatctagtctgtgttggtacatctataccatttagtggcacagaataatcattttttaaagccacgatgcgcggagcac

SEQ ID NO: 8991 - DNA, 210 bp, Homo sapiens
  chr12:103358686-103358896
  hyper
tggcttggatctagcgcaggtcgaagttatattccttcttcctttgtatgcaagattaggttgttacaaaagagggtgtgtaggttaatggcaggaagcaagttgcagcgcggagcgcgggccctgagcgcgtgtcaggcttaatgatttattcaagctgcagcgcatccgggcgttgattggctgcaggcatgcgtccgctgtcagctg

SEQ ID NO: 8992 - DNA, 329 bp, Homo sapiens
  chr12:103359258-103359587
  hyper
gaacgtcccgcgtgcgcccccctctaggcagccagcgggcggccgcttacaaagccgcctttgatgctctggctaccagggctattttggggacgagatgggggaaagccgccaacccacactccttggagggagtcactttctgcaaagtgcgttggagaggactgggccctgggtccgggctgtcgaagcaggaagtggatgtaggggacaaaagctccgcacctgccaaatgcgagaccttagagagagcctccccctcgccgctccctgctcccccgcgggcccgggaagcttgcactaccgggctcagcgcagccagccccacc

SEQ ID NO: 8993 - DNA, 575 bp, Homo sapiens
  chr12:103889138-103889713
  hyper
aagagcaaggcggggcgtgccctccaccgcccccaaccgctccgcccggcccctcccccgctccctcccccacccctcccccttcctgtattagcatgcgggcggcggcgagccggccgggtggggagggcggcggtggcatcgctgcgcggggcgcattgtgggccgcgctcgcctccgcgggggaccatctgctcgctgtcaatgcatcacctgctcgtctgggccgtcgccggggcaacggggggcgggggattaaggagcgtgtgcgtctcggtccgggccgaggcggcgaggtgggggttggggcgggggaggagagctccttggccccccacccccctgccccgagacgggtcgacccgctcgggggccggcgaccaccgcgacgggttccgccgcttgcctccgctccttggcctttgctgccgtgctgcctcttctcacgggcgcggctggagtcccggggagcagcagagagcaaacggtccggctctacctcaccctgccagggggcgagtcccgcgctccctgcgtctacctggagctgcagggtccctatcccggggcgccgc

SEQ ID NO: 8994 - DNA, 192 bp, Homo sapiens
  chr12:103889788-103889980
  hyper
cgcagtcgccgggcaaccacaatggggctgccttgccgtgagaccctcccccgcgactgccaccaaagtcacagaaaactttcacacctctcatctgacactgtggcctgtgcacgactccaagcactggggaagccttcgacatcagaatatgaatggcacctgttcttccgggggcggcaagggggatcc

SEQ ID NO: 8995 - DNA, 30 bp, Homo sapiens
  chr12:104235311-104235341
  hyper
ctccgccgcaccttcgtcctgccttctggg

SEQ ID NO: 8996 - DNA, 31 bp, Homo sapiens
  chr12:104359126-104359157
  hyper
tatatccaaagtaatgcggagagtggtttat

SEQ ID NO: 8997 - DNA, 30 bp, Homo sapiens
  chr12:104443996-104444026
  hyper
tcggctggccggctcggatgcgccagactt

SEQ ID NO: 8998 - DNA, 30 bp, Homo sapiens
  chr12:104459091-104459121
  hyper
tctggactggccctcggaaagaggactgtc

SEQ ID NO: 8999 - DNA, 420 bp, Homo sapiens
  chr12:104609376-104609796
  hyper
cattttccaatttacctttagcgaccgttctttcctgttaaaaaaaaaaaattcacgaccttgaagaagatacacgggctatgacttcgctgttgtcaccgagcgccccgcccaccgcgttctccgacccgcggccggcagggggctcgcggcctccgccaggcgtccttcggctccgtcagttcccacagggccttgtgcgacatgggctgcgccgagggcaaggcagtggcggcggccgccccaacggagctgcagacgaaaggcaagaacggcgatggccgccgtaggtcaggtacgaccgagggcgaaggcctggtccccaggtcgacgggccgaagcgggccttccggccggggttggggataaagtgccccggagccctggccttgaagcccctcactggagtcagtgactgac

SEQ ID NO: 9000 - DNA, 675 bp, Homo sapiens
  chr12:104682380-104683055
  hyper
gaattcgggatttaccgggaaagtaggacgtttaattttagcggagtagtgcaatgatttaaccctgactagaactctgacgtttacagctagccttgaggccatgttttcagccagtgtgcggatttgccggggtcagactccaagcttgattgtgagttctagcctttgtcagaaatgcagcaagtcatgctaacttgcaagggagtcaacagagggcacgcggtgcctgcggggccgggacggaagccccgcccccggcgcagttcccgcctgttagcgggggagaagcaccttacacgctccgctctgcttttgtgccacacagaggacggtcgggccctggaaggaacgctctcggaattggccgcggaaaccgatctgcccgttgtgtttgtgaaacagagaaagataggcggccatggtccaaccttgaaggtaggagagagtaacgtatctttttaaacgggggatgagctcgttgagctcagcgtggtcacagcctgccttttaaagccagcgtggatgtgaccctccaaacgggacgcagcgctgggaaatgacgaaaaacgctcgtgggctagcgcatgtgttaatcgaagttgatgagacgttggacaaatttcacatctcgggaaacttgaaatttctaacgctttttatcttttaaaatag

SEQ ID NO: 9001 - DNA, 226 bp, Homo sapiens
  chr12:104850310-104850536
  hyper
gcaacttccccgctacgtcgcccagggattttaaataattgccagccaccagaaaccccctaacccttaattcttccctccgagacccagcccgctgcttgccacttccctctccaaacgctggcgggggtgggtggcagcaccgaggcgattttcttcgtctttttttcctccgggttttgtcatggaaacgctgacacaacctccagacggcggccgagcccgg

SEQ ID NO: 9002 - DNA, 2190 bp, Homo sapiens
  chr12:104850577-104852767
  hyper
cgcacaccgcactccccgggcaacagctggacgcgaccatatcccgggtaggggcggggggagcgcgacgctccgccccggcgctagggtccctccctcctcccggctctccgcaggcgccctcccctcgccgggggccgcgagttgcatttggtaaaacccagccccggaatatatagatcgttggagcgcaatgaagtagcctttggagagaagggagagggcccgtcggacagccacagcggccagcgcagcggcagcggcggcggcaccaccatcaccgctcgcaccccagccgcccggcccgcgaccaggcagcggcggccgccggcgggatcggaggaggcggcggagcggcgaggaggaggagcaggagcgcgcagccagcgggtccacgcatctcagcacttccagaccaactccggcaccttccacacccctgcccgggctgggggctccgagagcggccgcgaagcgactccgatcctccctctgagccttgctcagctctgccccgcgcctcccgggctccggtccgcgcggcggggtccctgctcctgcgccccgggcgcgcttcccggacaccccggtccccgcagccaggacaaagccatgaagccagcgctgctggaagtgatgaggatgaacagaatctgccggatggtgctggccacttgcttgggatcctttatcctggtcatcttctatttccaaagtatgttgcacccaggtagggggcgcgttagcgtggttttgttggatattttcttctctctcgcgctctagctcgctccgcctgatttctgcctcttccaaccctacctctccgccttcggcctcttcggggctcctggctgcccagagctcctggctgcccagatctacccgggtcaccgcgtcgggatggggaggagaagggaaggtgtgcttcgccctcttcttcctaccggctccgggctggaggatgggaccaggaggggcggtagtttttttttttttttttttcttcttctttttttctttgtgtcccttgtctgtctgtctgcgaggtagcagggaaacggagaggtgtgggaagcaaccgggggtgaggggctggtttgaggagaacgaaactccctccctgctgctgccgaggtcggaggatgaaagagttacccggagccggctgctctgcgcccgggcgagccgcctcttcctggttgccgggccgggggcgaagggtgtacgccccggcgaggttgcgagtccctgcagcaggctgggagcccgggactgggctcccacgtgtcccgggctccgcgcagagctgagcaggtgtggagagtggtcgggtgcccagcgttgcccctccaccacgcgccggccgtttgcccccggggtccgggtccgcagtgaccttgcggctggtgccccggggcctgctccagcccccagccctgagctggaaactccgagctcctgggtcacgccttgaccactgcagttttggaggaaactttggccaggtcctgggctgaccgtccgtttgcatcccccacttctgggatccgagcaacgggaatcccccgggcggcgtgggaatgaaccccattcctccggtcccttgtggctcaggcaaagttccacgtccgaaatctggactgggggagggacgaggctcgtcgcttcctaggggtgcgagggaaagtttgggttctggagagggaggggcgccctcgagcgcggcggccgggggtgagcagctcggctgcgaagcccaacaggtagaacgttccgagaagccttccgggtaacgcgggtctccccgccaagccgtggctcccctgctcccttttaccctcccttagcagccccctgccgggccacgttggctcagaaatccattttctacgcctccgagttgcctttctcagcgtagtcacagcaataatttgcttttctaattgcaaggaggagggaggtggaaacgcatttccttccagggaagtggggttggtgtttttcatttttgcctcccgccttctcctttcactgtgtatctaacactttaaacagacgcagtcccgaattcatcaagcctgcgtttgggtcgatggcagaggaataaagctgttctttccatcaaacaggcagggctgcaggctgcagattccttgacagcgcagggacagacggcccctttgcccc

SEQ ID NO: 9003 - DNA, 31 bp, Homo sapiens
  chr12:105110247-105110278
  hyper
ggcacattgccatgcacgtagtaagtacaga

SEQ ID NO: 9004 - DNA, 30 bp, Homo sapiens
  chr12:105380156-105380186
  hyper
tagcccgagttgttcgtcgcccacccggga

SEQ ID NO: 9005 - DNA, 396 bp, Homo sapiens
  chr12:105477919-105478315
  hyper
cctcagccccctcccggcagaagacaatggcctgcgtgccagttcccatccgggaccctccccaagccctcctctgaggtctctctgtttttgtttgtttgtttgtttgttttaaacgctgtcttggtgtttagcaaagtctaagcatcgctgctcatccccagccccaccgccccggccctcccgccccggagtctggaaaccaggacagggtgacagccgggacgctcgcccgggccggactcacccggccagtggagaagcgccggagcgcctggctgccccgccgcagcatgctggagaggagcgctagcactggcgacgcggcagcgcgggaggcaggcgggcggcgcagcctgggcgcggcctgggcgcggcctgcagtctggatgcccc

SEQ ID NO: 9006 - DNA, 89 bp, Homo sapiens
  chr12:106641038-106641127
  hyper
gggcctgggcaggcagcgctaggggccggtcgggaagcacgaaggagcccggccgtgggtccggaggccgcagtcgatggggacagttg

SEQ ID NO: 9007 - DNA, 55 bp, Homo sapiens
  chr12:106641514-106641569
  hyper
ccggcggcggcttcttcgccacgtcatccgcgccgcccgacgggtgggcaccctt

SEQ ID NO: 9008 - DNA, 133 bp, Homo sapiens
  chr12:106974817-106974950
  hyper
ctccagaaataaaccgggtaatgagcccggcagcggccggggcaggaagggaccttcgcagagagtggtcaggcacagcccctccgaggaggcgacgctcagctgagaccagggtgacgcaaaggtgtcggcc

SEQ ID NO: 9009 - DNA, 212 bp, Homo sapiens
  chr12:106975474-106975686
  hyper
ccgcctttctcttccgcccgccgggccccattcatattctaatcacagcgcggccgacccgcgaacggccactttatcggggcccgcaggagacgcagcttgctccccctcacttccacttccagcaccccccggccctcgcccccctctttctgcactttcaactccgccgaggagggggtccctgggaaaaccgcgtccccacttggatg

SEQ ID NO: 9010 - DNA, 30 bp, Homo sapiens
  chr12:106976181-106976211
  hyper
cgcttcactccccacgcgtgtctgcggatc

SEQ ID NO: 9011 - DNA, 170 bp, Homo sapiens
  chr12:106976609-106976779
  hyper
ccccttttcggaggcggcttttcttattcaaaacaggcccacaatgggcttcacagtgcgcctcgccacggccccatctgacgagcggccattcatcaggccggctggcctatcaatgacattgctcccatcggggctcctataaaatgatgctttttcccatgaaacat

SEQ ID NO: 9012 - DNA, 16 bp, Homo sapiens
  chr12:106976842-106976858
  hyper
cgctttttctctctcc

SEQ ID NO: 9013 - DNA, 30 bp, Homo sapiens
  chr12:106977374-106977404
  hyper
cgcgcgcgaaggagcgcgctttcgcttgcc

SEQ ID NO: 9014 - DNA, 30 bp, Homo sapiens
  chr12:106977626-106977656
  hyper
ggggaccgaggctccggctggtagagacgc

SEQ ID NO: 9015 - DNA, 44 bp, Homo sapiens
  chr12:107167935-107167979
  hyper
cccagcatgcccttggcgggaattctttccggctggatgactac

SEQ ID NO: 9016 - DNA, 1520 bp, Homo sapiens
  chr12:107486364-107487884
  hyper
ctcactgatgaagaccgagtgtttcaggtcgtcagtactctttggccagagaagtattaagtcaattctatttaatacttagggcacctaaaattcgtaagcggtataagcaagacagtcccacgtctaaattcacagatttggcggatcgcatggaattcattaacatcagactcattaaacacccaaatccatttcccacgggcttgtgactcaccgccacctgttgatgcccacattggaggagccggcgaaccaggggtccaggatgtagacgcagcggatggtgtcggcgccctgaatgcactccttcagggcggggttgtcgtggagccggagcccctttcggaaccagtgcacggcgttcacccccatgccggggggcgcggcgggtcctccacggagaaattcaaggaaggaggctccggctcatagccgacaccttcgcttccaagagaattgcctcacccggggcgtgaggaaagggcggcagagggggaacaggaaaaaatgactccgaggaggggaccggagaaggcgggggcgccggaggcgcagtggaaagatgaatggaggttgcctagtcggcggagtccgggtgtgacgccctttaggagcccgcgcccgccgcaaccgcctggaggcgacgcataacttcgagggcctcggacctccggagcctgagcaagttccaggagctcgagccgccacgacggcccgagccggcacggacggccccaggagattcgtcacggaaacctcgccccaccaaggcggcccctaaagacaaaacggcccgcccgaggtgagtcaccgaggagaaccggaggggaatgagcccctgtcggcgacgctgtctctcggcccgggagaaaggaccgggaacggaggctagaggcggtggtcgaggccgctggacggttgccggccggtgaccggtcccgaggctgcccgggtgactctgccgccgccgccgcgtcagcggcctcggccccgcccccggctcctcattggagggcgcgctcccctcgtgaccaccggcacctcacgtttctgaagtgtgtttactacactggctcggaggggtaatctgctcgcgcttcggtcgcttttggaggagcggcagccgcttgatcccaaacttgttgaccctcgtccacacgctgaactcactgcctctgcccctttcctgtgccgactggtggccgtcccttggaagcaaatcgcgttgaccacaggccccttgtgagggaaggcttagccccgcccccaagggccatgagcggccaccattggccgaggctcgctgagacccggatgagcacggggatgcggggagcttgcgggcgcgcgcgctgctccgttaggcgcgcgtgcgctctcgctgcgttccagagggtaagggggcggggccggcgggcaggagcgcgctcggcgattcctcccgtgggatttggggagggcctggaaattgtccggtttccttcaggagccagtggtggagtcgggcggagagtgag

SEQ ID NO: 9017 - DNA, 2296 bp, Homo sapiens
  chr12:107712124-107714420
  hyper
ccactggctctccgccgcccctgctttgcatacgcccgtcccactggctgcccggggtttgctggggttcggcaaggtttgcagccgccacggccgctgctgcgctccggtgcagggcaggctggcgccgagcgaaccagggccgggaactgggagccgggagccgggagccagctgcccgcggagctgcggcggcggcggcatctggggtggtctcagtcccacgaacaccgtggccggcgcccggtggctactgcgcccagcggggctcagggaagagcggtctagacactttttattttggaagaaaggggcaagccccggcgggagcttccttcccggcctggctcgctccccattgcgcccagctccggcccggactctggaagatgactccagggtctgctctgtatattccagcggcggcagttccgggaggcagccgaaagtactaacagttggtagcagcggctagtggaaaagtgagccaaggcggcgcggactcggctctccccgcgccccgcggcactcgctgctcctcgccgctccttccctttggctcccaggcggctgcagcatgaagtggcgcagcgatggccaggagaggtaagaagcccgtggtgagaacgctggaggatctgacgctggactcgggttatggtggcgcggcggactcggtgcgctcctccaacttgtctttgtgctgttccgactcgcacccggcgtccccgtatggcgggagctgctggccgcctctagctgactccatgcacagccggcacaacagctttgacactgtcaacactgccctggtggaagactccgaggggctggactgcgccggccagcactgctcgcggctgctgccggacctagacgaggtcccctggactctccaggagctggaggcgctgctgctgcgttcgcgggatccccgggcaggcccggcggtccccggcggcctgcccaaggacgcgctggccaagctgtcgacgctggtgagccgggcgctggtgcgcatagccaaagaggcgcagcgcctgagcctgcgcttcgccaagtgcaccaagtacgagatccagagcgccatggagatcgtgctgtcctggggcctggccgcgcactgtacggcggctgcgctggccgcactgtccctctacaacatgagcagcgccggcggcgaccgcctgggccgcggcaagtcggcccgctgcggcctcaccttctccgtgggccgcgtgtatcgctggatggtggacagccgcgtggcgctgcgcatccacgagcacgccgccatctacctgacagcctgcatggagagcctcttccgggacatctactcgcgggtcgtggcctccggggtgccccggagctgcagtggccctgggtcaggctcgggctccggcccaggcccgagctcgggccctggtgcggcccccgcggcggataaagagcgggaggcgcccgggggaggagcggcgagcggcggcgcctgcagcgcagccagcagcgccagcgggggcagcagctgttgcgccccgccggccgccgcggccgccgcagtcccgccggcagccgccgccaaccaccaccatcaccaccaccatgcgctccacgaggcgcccaagttcaccgtggagaccctggagcacacggtcaacaacgactcggagatctggggtctcctgcagccctaccagcacctgatctgcgggaagaacgccagcggtaagtgtctgcgcgggtgccactccctctcacctaacctggccaactcttggcgcaagtttgcctcgcgtccccctcccgcgtcttcccagccacgcgctgctgtcccaagccgctgaggaggcggccgggctggaggtagccagaacaagaggttgcctgtttgctcctgcactcgggtgcgcgtatttcacgctgctggtgctgtcccaggtccgggagcgcgaggttccgcccccggtgcggggcggggcgacagctgcctccagcaggcagtgagcaaaacccagcaccattttttggagcagggttgagatcatttgcgcttagtacatatactccacccctgcactgtttgttttgaccttgaagatgccacttccctgggcgcatgaattgggctccctaggacttgggaggaggcgcgttccgctctccgcaatccagtgctcccacttccccactccctcggggggcacgcagtgcacgggggaaggaggggcctggcggccgtaccggctgaatggttgaaagcttgcacggcctagacagtcgtaaaggtgtgtgt

SEQ ID NO: 9018 - DNA, 228 bp, Homo sapiens
  chr12:107714735-107714963
  hyper
ggtaggtttgaacccgcagttctgtccttgaagggggtggggccggggcgcttgttttcgagagctcgcgctggcggtgctgcccgtctgcgaaagccggagctagacacttcaaagcttcaattttccacaggaaatggtagaaacgtaactggagactctaaaggcgaaataaaactttgttacatattcggcggtttggccagaggttgcgcggttggagctgaa

SEQ ID NO: 9019 - DNA, 378 bp, Homo sapiens
  chr12:108169035-108169413
  hyper
actcgctgcgcaccgcgcccctgggcgttccggggaccctgcccggactcccgcggagggaccccctcagggtcgccctgcgtctggacgccgcgtgctgggagtgggcgcgcagcggctgcgcacggggatggcagtacttgcccgtgccgctggacagcgccttcgagcccgccttcctccgcaagcgcaacgagcgcgagcggcagcgggtgcgctgcgtgaacgagggctatgcgcgcctccgagaccacctgccccgggagctggcagacaagcgcctcagcaaagtggagacgctccgcgctgccatcgactacatcaagcacctgcaggagctgctggagcgccaggcctgggggctcgagggcgcggccg

SEQ ID NO: 9020 - DNA, 358 bp, Homo sapiens
  chr12:108297405-108297763
  hyper
ggtagctgattcctagaaactcgcagggcggcacagcacggcggctcgtggcagcagaagaggaagatgccgcggtggaaggcgtcttcgcggccgggcagcgacgcgtacacctgccgccggaagaagagcgacggtcgcacagctctcaggccgggggccggagccccggcagcccggccgcgcccatccacgcccagccacgcccagccacgttggccgcccgcccagcctgctgggaaactgctcgctgcgcattcgcccgccggcgccgacttggcgatggccagctacacaggtccggcgggggcggcagccatgtggggcgcgggctggcgtggggagcagcccacagctg

SEQ ID NO: 9021 - DNA, 30 bp, Homo sapiens
  chr12:108523873-108523903
  hyper
acagcccagctctgcgtagatgacaaactt

SEQ ID NO: 9022 - DNA, 30 bp, Homo sapiens
  chr12:108594027-108594057
  hyper
gtccatattttcctttcagcttcatatcag

SEQ ID NO: 9023 - DNA, 30 bp, Homo sapiens
  chr12:108956082-108956112
  hyper
ccgcattcccgcagcgggatttgtgaaagc

SEQ ID NO: 9024 - DNA, 30 bp, Homo sapiens
  chr12:109125490-109125520
  hyper
aggcggtgcccaagcgcacgccccgctctc

SEQ ID NO: 9025 - DNA, 137 bp, Homo sapiens
  chr12:109162626-109162763
  hyper
agtggcgcagtgggcgtctgcatcggcccgaaggcacttgcgcagaggtccggcaggcagcagagcaccttgtgggcgtggtcgctggaggcagcgcctggcacccccatctggcacagagcgtccctgccctgccc

SEQ ID NO: 9026 - DNA, 30 bp, Homo sapiens
  chr12:109250886-109250916
  hyper
gatgtgggtcacagcgcacacacagtatcc

SEQ ID NO: 9027 - DNA, 37 bp, Homo sapiens
  chr12:109535376-109535413
  hyper
gagcatgcgcgggccgcttggcgccaattgctgaccg

SEQ ID NO: 9028 - DNA, 38 bp, Homo sapiens
  chr12:109592370-109592408
  hyper
ggggcggggctccgtccggaaggcggggccctcctggg

SEQ ID NO: 9029 - DNA, 30 bp, Homo sapiens
  chr12:109747076-109747106
  hyper
cagctcagagcatgcgcagtagccgtgcgg

SEQ ID NO: 9030 - DNA, 30 bp, Homo sapiens
  chr12:110011227-110011257
  hyper
cgcgcaggccaagacggctccccaggccaa

SEQ ID NO: 9031 - DNA, 31 bp, Homo sapiens
  chr12:110719374-110719405
  hyper
cccgccctgcggagctcggggccgcgcgagg

SEQ ID NO: 9032 - DNA, 30 bp, Homo sapiens
  chr12:111020656-111020686
  hyper
gtccccgtagcacgcgcccttcttgaggag

SEQ ID NO: 9033 - DNA, 30 bp, Homo sapiens
  chr12:111021176-111021206
  hyper
ccgccccgattcaccgctcaggcccaagcc

SEQ ID NO: 9034 - DNA, 66 bp, Homo sapiens
  chr12:111052027-111052093
  hyper
tgggctgctgggcctccgtgagcgcccagaccgatgccaccccggcggtgacgacagagggcctca

SEQ ID NO: 9035 - DNA, 794 bp, Homo sapiens
  chr12:111471165-111471959
  hyper
tggtgacatttcccacgactcagtggcgcccccgggcggctcccaccctccctccggccggcgcgtctacgcagccccaagtgctggctgcgaccctcggatcccaagcatatctggcgatggagcggcggcagcccgaggcacgtgttgtgtgtgctccgattgcaaaagaaaaaaaaatgcatttcaaactattaacttttttttaagcgtgcaatgccgggagctgggggtagacaggtgcaagcgggggtaggcgccccgcgcgcccgcctcccgcagcgccccctcccaaacttccctttgcattgatcagcacgttacgtcagtattgataagtttgcaaaaagccaaagtcaagtgcaatcgcgcggcacaccgaccccggacttgggggggagatgcagcgagcgctccgcgggcccgggagccggcggcaggcagggcagcggcggcgccggcgcctctcggagaggctgcctccccccaacccctcccctcccaccccatccccggctgcctcccccgggcgggcgccgagctccccgcccggcgcgctccgcccgcgccctccgggggtcgggggggcgcacggctcccgggcccgttggcggcggcggcggcggcggcgcggcggcggcgaggggcagcgggtggcaggaggccggagggcgcccgaggggccccgggccgcggcgctcagggcccgggcggccggcggcggccccggggctggggggagtccagcccggatattgagtgcagccattgagaaaagccaaactcttgtgtgt

SEQ ID NO: 9036 - DNA, 137 bp, Homo sapiens
  chr12:111472058-111472195
  hyper
cgccggccgcgcggccgtgaggagcccccgggcgcgccctgggcgcattggggaggtccccgggcgggcaggcggacgccctggggcggcgggcggcggctgccggggctcgccggggctcggccgcccgctgccca

SEQ ID NO: 9037 - DNA, 315 bp, Homo sapiens
  chr12:111472356-111472671
  hyper
cgggcagggggctgctggcgggaacccccggcggtcccccctgagccgcactttgcgcgcctcccaacttcgcggcgcccggggaggccgcggagcgcgccgcttgccagtccgcacccggctggggctccggcgagggagggagggagctggcgggcagggaggaggaggaggagaggaggaggaggaggagagaggaggagggagccggggttggcgaggaggcggctccgcgccccgccgctcgccggcacctcagccttcgccgcccgcctggctgcgcagcccggacgcgccgccacccgggggccgccg

SEQ ID NO: 9038 - DNA, 84 bp, Homo sapiens
  chr12:111472851-111472935
  hyper
cgctcctgcctccagggcggtggagagccgggagcggcgcagagcaggtgactcccagccctcgggcccaagggaacttttaaa

SEQ ID NO: 9039 - DNA, 30 bp, Homo sapiens
  chr12:111473179-111473209
  hyper
tggaatctcagagaacgcaccgtggaggcg

SEQ ID NO: 9040 - DNA, 447 bp, Homo sapiens
  chr12:111844352-111844799
  hyper
cccccagcccaccctacggtagcctcgccggttgggggcggccctcccctcaacttgtgcctggggaggagcggtcaggggtcacccattgctaccctgaaagtgaaagtagtcaaactgaggctgtgagcacagatgagcccttgggtgtgggggcagcgggggaggatgcgccggcccctccccactccccattccgggccatgtggctaagagggtagcgccctgattcaggaagcccctctccccagttcctgcactgccgaggtcgaccgggccaggcccccgcatgctgctgaattgggcggttcaccagggctaggcgtcccagagacaggtttctggtattgatcctctcacacctcttgcctggggttccctgggaatcccccgaccaaaaaacgtctggagtgggtgttggtcttctagatccgcacggtagggatg

SEQ ID NO: 9041 - DNA, 30 bp, Homo sapiens
  chr12:112213516-112213546
  hyper
tgtgttatgtaagtcgagcttcgggtttct

SEQ ID NO: 9042 - DNA, 30 bp, Homo sapiens
  chr12:112842259-112842289
  hyper
caaaatgtgggggtttcaggtggaagccag

SEQ ID NO: 9043 - DNA, 36 bp, Homo sapiens
  chr12:112884176-112884212
  hyper
cctggagacttcacactttccgttaggtaagttgga

SEQ ID NO: 9044 - DNA, 197 bp, Homo sapiens
  chr12:112888120-112888317
  hyper
gaagaaatggagctgtcacccacatcaagattcagaacactggtgattactatgacctgtatggaggggagaaatttgccactttggctgagttggtccagtattacatggaacatcacgggcaattaaaagagaagaatggagatgtcattgagcttaaatatcctctgaactgtgcagatcctacctctgaaagg

SEQ ID NO: 9045 - DNA, 30 bp, Homo sapiens
  chr12:112891142-112891172
  hyper
gagcaatgacggcaagtctaaagtgaccca

SEQ ID NO: 9046 - DNA, 87 bp, Homo sapiens
  chr12:112915450-112915537
  hyper
ctagttgatcataccagggttgtcctacacgatggtgatcccaatgagcctgtttcagattacatcaatgcaaatatcatcatggta

SEQ ID NO: 9047 - DNA, 117 bp, Homo sapiens
  chr12:112924320-112924437
  hyper
tggccggaccacggcgtgcccagcgaccctgggggcgtgctggacttcctggaggaggtgcaccataagcaggagagcatcatggatgcagggccggtcgtggtgcactgcaggtga

SEQ ID NO: 9048 - DNA, 153 bp, Homo sapiens
  chr12:112926826-112926979
  hyper
ggtgttgactgcgatattgacgttcccaaaaccatccagatggtgcggtctcagaggtcagggatggtccagacagaagcacagtaccgatttatctatatggcggtccagcattatattgaaacactacagcgcaggattgaagaagagcag

SEQ ID NO: 9049 - DNA, 30 bp, Homo sapiens
  chr12:113013033-113013063
  hyper
gcgggtggctttgccgcggtggtggcagcg

SEQ ID NO: 9050 - DNA, 177 bp, Homo sapiens
  chr12:113229230-113229407
  hyper
atgtcgagaagtcccgtcccccacccctccggactccccccttctctgctttaaccatccaattacttaacttctctgcctaggggttcgcttcccacccatcccctcctccaaggcatcttagcgctgtccgtggtgctgaccgccaatcccctggttgccgtttcgaccagctgg

SEQ ID NO: 9051 - DNA, 2 bp, Homo sapiens
  chr12:113494413-113494415
  hyper
gg

SEQ ID NO: 9052 - DNA, 759 bp, Homo sapiens
  chr12:113494430-113495189
  hyper
cgtgtcagcgccggtggcgctcagggccgagatctgtctcctccccttcctcctcctccgccccctcccctctccctcccggagcacggccgaggcctcctcccacccgcgagatcccggcggccgccagccggctcctgcgtccgtccgtcggccgggcagtctgtccacgcgcggaaagctcggcgcggcggccgaggggcctgggagggaacgggcgcggaggcgggaccgcggctccctcccactccggggggagcccaggaggcggcggtgctggagcgcgagccggagccggagccggagacgaagagaggcggtgagaacgcgggtgcttagggaccccacccccggctcccgctgggggcccgcgagcggctcggggacgtctgggctggggaagcggggctgttacccccagggcgggaggcagagacgatccagctcctggcttcgccccctccgcgacgcgacccccgaggggccctgggccgcgcctgcagcgccgcgcatccccgtgcttcccggcgcaccccagcgcacccggcatccccccggcagggcgagggccccgggggaagggaaggctccgggagccaaggagggcgccccccaggcggagagtctcggaaaaccgcgcccccggcccctgccttccctccaggcctgccccaagggaaagcgggcggggcgaccccgtacgccccccttgctgtcccccttcggttccccattgttctcagccgaatgctctcctgg

SEQ ID NO: 9053 - DNA, 405 bp, Homo sapiens
  chr12:113541676-113542081
  hyper
cccaggcggaagtgggacacccgctgattgacgggtggggagggcggagcctgcagtccgccctgccccctcacctgagcgctcagcctggaggcagcaggtccagcgcgcgctgcggaaggcaccggggtggcaggcggccagcttgttcgggttgggggcgctggccttgcgcaaggccgagagccactggttgagctcattcacattctgcagcgggtgggaggcgatcagggggcgggtgggaacagagggacgccccccgctccccatcgcggtggggtctcaccttgcactggaggtaggtggtgtgcagcgcccccgtgccgtcctgcgtcaccacctgcatcacgtggggcagttggaaggcgccctcgtctacgcgctccacggcgcggatgtgag

SEQ ID NO: 9054 - DNA, 507 bp, Homo sapiens
  chr12:113592182-113592689
  hyper
ggcccatgtgagtcccttccccgcccccgactctagttccaagaggttccggagctggtggcgcgcttcgacggcctggccgagacgcaggcggcgctgaggctcagggagcgcgagcagctcgcggagctggaggcggcgcgagcgcggctgcagcagctgcgggacgcctggccggacgaggtgctcgcacagggccagcggcgggcacagctgcaggagcgcctggaggctgccagggagcgtacgctgcagtgggtacgacccgccctaggtggggggcgctccggaccccaggcttccacagccgggcggggaggaacgccagggctgatgaggaccgatggggcaatgcttaccccagagggtccgctgcactaaggaggggaatctcaggcatcaccgagccgtttcgggcatgaggccccgccccatccgcctgcacaaggctcctgcaccccactcccgagagcacctgactgcctgactggcagaggtggatgggaa

SEQ ID NO: 9055 - DNA, 31 bp, Homo sapiens
  chr12:113772605-113772636
  hyper
gtgggccgatgcccagcgctcggatggtcgc

SEQ ID NO: 9056 - DNA, 398 bp, Homo sapiens
  chr12:113796496-113796894
  hyper
tcgggccgttcctgagcggcctggcgggggcgatcccagcgccggggggccgctgggcgcgcgatgggcaggtccctccagcctcccgcagccgctcggtgctcctggacgtctcggcgggccagctgcttatggtggacggacgccaccctgacgccgtggcctgggccaacctcaccaacgccatccgcgagactgggtaagggttggcttatccccacgcggggccatcgggggagggggatgcgtgggcgccggacctcgcctgttcccgggaccggcctcttgccgggtgggaacgcccgtttctctgggggtcagctactcccgaggctgcagcaccgccctgcgggccaagtaccctgtttgggagctggctactgcggcatccctcacct

SEQ ID NO: 9057 - DNA, 469 bp, Homo sapiens
  chr12:113900208-113900677
  hyper
gtgcgtgttcgagtccggcctgctccctcgggctcaacataaacgtcaaagtaaggaagagcgggagctggacccggctggccacttcctgacccacagccctattcctagagaagctgaccttgagcctcaagattggccaccagggagcgccagcgtgcaggtggctcggtctccctctcggtggctcccggttcacgcgagttcctcgctcgctctccgtcttctccctctggctgacgctgtctctccatctcctcctcatcttgccccctttcctctccctctctttcaatctctctccttttcttatcatctttttttttaaagacggggaaagcacagcgagaaataagattacaaaatgccactcggattgcagagagagggaaaaacaccgtctccgccccttggcctcaccctctctcagtccaaagaggtggcggtggctgggtgggtgggtgggggc

SEQ ID NO: 9058 - DNA, 210 bp, Homo sapiens
  chr12:113900752-113900962
  hyper
cggttgctgggagagtactggcggtgggctgaggctcctggagagcccgcggggtggagatgggggtcggccccccctcggcgcccagccgaggagcagctgccagttgagtgcggacccgagagagaacccccgagggacacccacgtctcccaccgcgtctgcgtcgggcgttttggtttcaggaggctgcttcggggcggggccccc

SEQ ID NO: 9059 - DNA, 610 bp, Homo sapiens
  chr12:113901407-113902017
  hyper
cgaagtaggcgggggacccgggacccggggaggggacccgggcgggcgagagaggggagcgcgcgacaccgacccaaggttagagagacctgcggaggccggcgccccttgagacggtggacgtcgcaggctcacggggagggttggggagagagacaatgagagatctcgaaagggcaagagactcagactgccagagaccacacacagagacgggagagactccgagaccgtgggggacacacgcggcaaaaactcggagacttcagtcacaggttccctgacacctagagatggagagagacagaggcggccagagacgcagagacagacaatgattcctaagtgtcttagggtcggtgagagacacagagatgcgggacagcgagagacagacggagagatcggcagaggggcagagagaaaggcggaaaagagacccagagacgcggagtccgcggctgagacccgaaagcccgagacatcggagggtcgcggaggagtcgaggagacgcagagagaggaaagacggccgcggttagagacacgcgtggaaacccccgggggcggcagcgagggagtcaggagtgagcccgaagatggagagaag

SEQ ID NO: 9060 - DNA, 458 bp, Homo sapiens
  chr12:113902041-113902499
  hyper
cggtggatcagagatgagtcccaggaacctccagagaagcggaggctgacaggcccggggagaggaaccgggcagggacaaaccagcggacagagcagagcgcgaaatggttgagaccgggaagcgacctggccgggggaaactggatccgggccgcggcaggagcgactggtgggttgggccgggcggggcggccttggcgccctaaactcggtccctgcgccctaccaacccagtccaagtccttcgcctcgccaagtacggccgccgcgtcgatcccggtgagaccatttgtaccggcctagcctagcctgagaaagagaaaactgagctccagcgacttgggagagggggaggaggacacgaagattctctgggtcatggccagagctccgcgggctccttggggtagaagctcggtcctccagccttgccccgggttggttttgccagcaccc

SEQ ID NO: 9061 - DNA, 30 bp, Homo sapiens
  chr12:113904833-113904863
  hyper
gtgtcactgtatctcgtgtgtgcttctgtg

SEQ ID NO: 9062 - DNA, 30 bp, Homo sapiens
  chr12:113905100-113905130
  hyper
ctcgtccaagcggccgcccagcggacgcat

SEQ ID NO: 9063 - DNA, 19 bp, Homo sapiens
  chr12:113913883-113913902
  hyper
cggcggcgttacaaattgt

SEQ ID NO: 9064 - DNA, 16 bp, Homo sapiens
  chr12:113914207-113914223
  hyper
ctggtgtggcgctccg

SEQ ID NO: 9065 - DNA, 30 bp, Homo sapiens
  chr12:113917606-113917636
  hyper
tctgggggtccttgcgtgtccacagccccg

SEQ ID NO: 9066 - DNA, 30 bp, Homo sapiens
  chr12:113917979-113918009
  hyper
ctaagcaggtttgccggagaaggcaggggt

SEQ ID NO: 9067 - DNA, 458 bp, Homo sapiens
  chr12:114029352-114029810
  hyper
cagaggctagagtgtccctagcgtcacgccctgtcgccctcccctgagctcccggaagcccatggggccgcggccaagtttccccgcctcccgaggagagacagagaagccacgagtcgccgggtgggcgcggcgctcctgggctcaccggggcgcattggcactggcggcggctgcgcgggctcggccggccccaccatcaattaagcgaccgcggggtccggcgagcggcagcgtgtgtggaaattaccttttgatttcttaattacattgtcctcacctgcagctcaacccgcctaggagaggcgctcgccgagctcgattctccgggtgccataaattaggacgccagtcgccggcgaacgctgggggcttccagtataccttccagcgcagcccgcaggctatttttatctccctcagcacctcggcacctcggaggagcttctgctaattca

SEQ ID NO: 9068 - DNA, 68 bp, Homo sapiens
  chr12:114833897-114833965
  hyper
ccaaccctggagtccggccccgatcgagtggaggtagttgggggaggcgagccgcggccgggggcggg

SEQ ID NO: 9069 - DNA, 8 bp, Homo sapiens
  chr12:114834208-114834216
  hyper
cgatctaa

SEQ ID NO: 9070 - DNA, 265 bp, Homo sapiens
  chr12:114838757-114839022
  hyper
ttgggcctaccgttcgcctgctccacacgcctgctcggggcatcctctggctttttgctttgcgggacgcggaagacccgtccagcacgggtagggatgtggccaggacgtccccaggcctgggcgcgcgcgtgcacatgctcacacactcacactgacatacagagctgcaccactctccttcctcctcccccagaagtctagcatttctagctaaaactctgcgagcttttaaggggaactccggggcgagtgtcttggcgaa

SEQ ID NO: 9071 - DNA, 30 bp, Homo sapiens
  chr12:114841187-114841217
  hyper
aagatgctgggggccgattctacacatagt

SEQ ID NO: 9072 - DNA, 30 bp, Homo sapiens
  chr12:114841521-114841551
  hyper
tctgcaaagggacccgaagcgcgaggtctc

SEQ ID NO: 9073 - DNA, 40 bp, Homo sapiens
  chr12:114841855-114841895
  hyper
gctaccagcacctccgttcccagccgaaggtgactgcaga

SEQ ID NO: 9074 - DNA, 185 bp, Homo sapiens
  chr12:114843001-114843186
  hyper
tgacttgcaagcagctttcttcgcctcgttctcggggcttcagggaggcggcgactggagccccgctgcctactcacaacaaaagaaagcagggctggcgcccctacacgcgctcccattcactgccggccgcggggagaatcctaccccgcgccctcgccagggtcccggggagctctgggctg

SEQ ID NO: 9075 - DNA, 338 bp, Homo sapiens
  chr12:114843260-114843598
  hyper
cggcggcctcccagactccatttgccggggagctccgagccgcgcaaaatctctgcaagctgtgctctgcagaatgcaaagccgggctggaatccgccattcccgccgccccagccgactcggccgacgagctccctcctgagcctcccgggccatctgccgggacggttacctcgttcggtgaagccggtgcattcaccacatcctctgctgctcctagcagggaagccggcggtgaggcgggggagcaggcatggtggctccggggtttatgcggggtttactgcttacccagaatagcggctactgctgcctactagggcgcacctaccgctgga

SEQ ID NO: 9076 - DNA, 30 bp, Homo sapiens
  chr12:114846298-114846328
  hyper
gggcaaatgaataccgaggcgccgctctag

SEQ ID NO: 9077 - DNA, 16 bp, Homo sapiens
  chr12:114847042-114847058
  hyper
cgggcagcttccagcg

SEQ ID NO: 9078 - DNA, 16 bp, Homo sapiens
  chr12:114847577-114847593
  hyper
cgggcagtaaactccg

SEQ ID NO: 9079 - DNA, 30 bp, Homo sapiens
  chr12:114852012-114852042
  hyper
aggctgctccccggcgtgctggagcggctg

SEQ ID NO: 9080 - DNA, 30 bp, Homo sapiens
  chr12:114852344-114852374
  hyper
tgctctgggcgcagcgctggctgccacact

SEQ ID NO: 9081 - DNA, 203 bp, Homo sapiens
  chr12:114877706-114877909
  hyper
ctgctacaaataatcgcgtggaagacggccaagaataaccagaaaataaacacagctcccccggccctctgaacgcaggccgcgggtccctccaggccccacctggctcttctccggcctaggggaggcgaggaggccgcgccacgatctctgtactcattgttcccatggcgctgcccttaaccctcgaaggactgctcccg

SEQ ID NO: 9082 - DNA, 59 bp, Homo sapiens
  chr12:114878129-114878188
  hyper
cacccttaggtctgcgcctgcgggtgggggccacgggctgtgccggagcgcatagccgc

SEQ ID NO: 9083 - DNA, 113 bp, Homo sapiens
  chr12:114878472-114878585
  hyper
gtcagtgattgcaccgctgaaaacaattctgtagatgtgtcgatgcctttagaagaaagggctccaaagaatcgtgtctcgatggttggtcagcgcgcgcatctgcggcactg

SEQ ID NO: 9084 - DNA, 107 bp, Homo sapiens
  chr12:114878862-114878969
  hyper
cgccacagagcggccggatcctaccagggtttcccagtgcccgggtacctgcaagaatcttcccaggacgggagcagtgggcactgagcagcgctgccgggagaaag

SEQ ID NO: 9085 - DNA, 30 bp, Homo sapiens
  chr12:114881661-114881691
  hyper
tgggcgcgcgcgcgcggagcaaatttgccc

SEQ ID NO: 9086 - DNA, 30 bp, Homo sapiens
  chr12:114882053-114882083
  hyper
gcattaaggagcggcgcgggcaagaatttg

SEQ ID NO: 9087 - DNA, 30 bp, Homo sapiens
  chr12:114882588-114882618
  hyper
gttgctacagggcacgatgaatgttgagcc

SEQ ID NO: 9088 - DNA, 30 bp, Homo sapiens
  chr12:114883301-114883331
  hyper
ctgacagagaagcgcggttgctgcaagatg

SEQ ID NO: 9089 - DNA, 37 bp, Homo sapiens
  chr12:114885146-114885183
  hyper
tggccagagcctggcgggttccgtgcttggctagcca

SEQ ID NO: 9090 - DNA, 16 bp, Homo sapiens
  chr12:114885371-114885387
  hyper
cgctggaagaaacgaa

SEQ ID NO: 9091 - DNA, 30 bp, Homo sapiens
  chr12:114885606-114885636
  hyper
cgggtctccttctgcgggaacatacgcccc

SEQ ID NO: 9092 - DNA, 16 bp, Homo sapiens
  chr12:114886560-114886576
  hyper
cgagatgcctgcctag

SEQ ID NO: 9093 - DNA, 30 bp, Homo sapiens
  chr12:114917950-114917980
  hyper
gaaattttgatgcccgcctgcctctggctc

SEQ ID NO: 9094 - DNA, 30 bp, Homo sapiens
  chr12:114939152-114939182
  hyper
aaggaaccgggaggcgcgccctggaagcag

SEQ ID NO: 9095 - DNA, 30 bp, Homo sapiens
  chr12:115106771-115106801
  hyper
tgtaggggtccccacgtgcctggccagaga

SEQ ID NO: 9096 - DNA, 2285 bp, Homo sapiens
  chr12:115120680-115122965
  hyper
cctccaggtgcaccttggggtcgtcctccacctcttcttcgggctccatggtcttcaaaggcctcagatgcgcctggggccccagggaggagaacgggatgccggtctcggccgcccccaccaattgatccatgatcggcttggccagggcgcccggcagcgagagcgccgccgcgccgttgggaggcagcgtcagcgcggggaagaacggcggctggtgacccagcaccgcgctcatggcgaagtccggcgcccggtgaggtaggaacggatggtaggccatgcttgtcccaggaatgaccggatctctcatggagaggctcatccactccaggcggggcgctgggctccagccggggacaagtccgcagctgctgtgttttgttgtttttttgttgttgtttaacagcagcacataattcaaaaggggggaaaaagcaaaacaaaaaagaaagaaaaaagaaaaggaggcagaaatcacaactaatgcacttcaaagggaggaggggaagtgtcttttggagaatgggaggccgcttttaaagagggcaaggcgaaaaatcagcaaacatagtcgcgcgggtgaccgtccttgtgccttgcgtttttaaaaagccgctcctgaacgtcggtttcagaagcgagaggagcgagcagggtctcgactcgcgcccgagccctgccgctgagctcgaaatagacactccagccctgcgtcccaggaatctctctccagcccctaggtcttttgttgcaaatgtgaaaggttctcctagaagactttttacctttctttttcttcttcccccgccccctatctgtcttcctctccctctttctcgctggtggcgtctgcagctgtgctagacccggctttaacagggagcgagagagcggaaaaagtctctctcctttaaaaaaaaaaaaatctgatttaaacccccttctaccagcgctatcaaaacttgaattgcaaactggcttccgttcgccgccctcctcctccttcctctgctccgagcctccggagggtgtctcggtttcaatccaaatcttgctgggctcttctcccgtgcctctctctcttccttgtcctaaaacgtgagcgaattcgcttcctaaatctgtgtccaggcgcgcagggcagggaggatttagagggggaaaaaatggaacagagggaaagagagggaggggagagagagagagagagagagagacggagtcggagagggagggagcgagagaaagcgagagctcctcgccaccctccgccgcctctagaattcaccgggcgtctgctcggcggctctagaaggtcgggctgcgctgtgggctgcggggagccggaggcctcttgattggctctttgacgctttcggaccaattgtgttgctgcataggcgtggttttcacaggtcgagtgctgggggatagagctgagttataaaaagaaggtgtcggaaactgtaacgtcgcagcgccgcatcggtactactgcctgtcctgtgaatatgtcaacatgatcagagggcgggcgggagccactggggagcgcgcgcgcacagagtcgcctctaggtggcttatcgagagatcgctgcagcccctgagctcgctcgctcgctctggttcagcccacgtctgaaatgcctcagtcatccagccggggatcgagggaggaggcagggccaaggaggaagggggagggagagagggagggagccagcgagcaggcgagccgggcggggaaggcggagagcgcgcccgggcgccgggcaggggcgctcgcctctcttgcactccgctcgcctctccgaccgccgcggccggttctctctccagctctccttcttctccccgccccgggcgagccgggcgggtggccgagcctccccgcgagctgccatccggccactcggttctacaaaagccggcggcagccgagaagcgagcgccgagactccaggcttgcgtgctctccagccccacgtggagccaagctccgcccggccgccgctgaagggctcccgagctcgggtgtctcggtgctggtctcccctgcgtctgggctgggggagcacaaggatgcggccatatctcagcacacgcatgtgtgggcttcctctccactgcgccccacccgcagccatgtgcgggtacccaaacacccccggtgtatctgtactcgaacacgcgccaacacactgggactgaaacacacaccgaaaaacacgtacacacaaacacgtacacagcctgcgcggctggccctgcctgagctcc

SEQ ID NO: 9097 - DNA, 30 bp, Homo sapiens
  chr12:116354934-116354964
  hyper
gccccgactcagcgcggtcctggcctcacc

SEQ ID NO: 9098 - DNA, 91 bp, Homo sapiens
  chr12:116946108-116946199
  hyper
agcgttttcaaggagcggggtcaaggtcaaagggcccctcccaggctgcccgggcggggctgtagtgggatgctggtccccaggctgcgcc

SEQ ID NO: 9099 - DNA, 377 bp, Homo sapiens
  chr12:116946250-116946627
  hyper
cgccgccggagagggtcccagcgcgcccaggcctcccgcaggcgggacgcggcgtcggggggctgctgcgctgctcggccccagcgggcccgccgcgccgccgcggctctggctgcctcctgcatgccaattaggccctaatttgatttctgttctatctgtgcgaaccccattaaaacccaattccgcttattaccaacagctttcttgcaacgcgacgcctctccctcccagggccgctgctcaggcgcgccgaggagccaggctccgcgcaccaggctggcggggacaccttccccgttccccctgccctgggacgtgcagggtccccgctgattcccgccccggggctccccgggtccaggctggggcccagg

SEQ ID NO: 9100 - DNA, 30 bp, Homo sapiens
  chr12:116971101-116971131
  hyper
aaaggagcccctaacgctctttcttctgtg

SEQ ID NO: 9101 - DNA, 30 bp, Homo sapiens
  chr12:117146994-117147024
  hyper
ccttgaaatcgcaccgcaagtgtcatttga

SEQ ID NO: 9102 - DNA, 30 bp, Homo sapiens
  chr12:117176098-117176128
  hyper
tgctgcccaggctgcgcgggtgattggctt

SEQ ID NO: 9103 - DNA, 30 bp, Homo sapiens
  chr12:117316650-117316680
  hyper
aggcgagggcggggcgggggaaataaactc

SEQ ID NO: 9104 - DNA, 30 bp, Homo sapiens
  chr12:117349181-117349211
  hyper
cccgcccatgcctgcgccggcccccgcccc

SEQ ID NO: 9105 - DNA, 268 bp, Homo sapiens
  chr12:117536861-117537129
  hyper
cccgcgaggtggccagcggggacccatttgaaagaggaggagactgaggcgcagagagggcccgccactggcccaaggtcacacagcgcggcggcgggccggggtccccaacagtggccgttcggaggtcccgccccggtccccgcgccgccccccgcgggtactcacagccggtcttgccctcgagctcccgcacctcctcagacgcggagtgggcagcgcccatggtgcccgcggcgggggccccggggcgcgcgtccctctcagg

SEQ ID NO: 9106 - DNA, 30 bp, Homo sapiens
  chr12:117537369-117537399
  hyper
cgctctggagtccccgttcgtgcagcagtg

SEQ ID NO: 9107 - DNA, 30 bp, Homo sapiens
  chr12:117628454-117628484
  hyper
cttggagccggcagcgcaagccgcctctag

SEQ ID NO: 9108 - DNA, 399 bp, Homo sapiens
  chr12:117798055-117798454
  hyper
acagtgccctgggggtgggggcgagcgtctggcgtcctctggggcgcagtcccgagagagccccttccgggacctcggacgcaaggcccctgagtggccctggaagttggatcccccggggaccctgctccgaaccctggccacctggaagcaacctcatcgagcgctccttccactgcccagccccgaaccgtggcggaacgcgcccctcggcctccctagagcctcctttgcgggagaagcacaactttcccaggttttggagacggcgctcttacaccccaatctcgcccagacggaagaagtgagaggtgcgggcggccccgccatgaccgcgggaggagagcgcaaggaggctcctcgcaaagttggaggccaggccggagcgatgttccggga

SEQ ID NO: 9109 - DNA, 21 bp, Homo sapiens
  chr12:117799086-117799107
  hyper
ggttgcacccactcgcctcct

SEQ ID NO: 9110 - DNA, 30 bp, Homo sapiens
  chr12:117799355-117799385
  hyper
cggaggagccgcggcgctaagtagctcctc

SEQ ID NO: 9111 - DNA, 38 bp, Homo sapiens
  chr12:118313952-118313990
  hyper
agccagcagccccgacgccttcccgccgttgccagggc

SEQ ID NO: 9112 - DNA, 158 bp, Homo sapiens
  chr12:119418661-119418819
  hyper
atgcacagatgtaacgctgcgccccttggcgggcgggggccctgctcggcagatggcgagaagccgaattggtgagggattgtctatcaaatggcactttctgggtggtggagacctcgctaacccccggcgcaaagaggaacgcagggcaccctctg

SEQ ID NO: 9113 - DNA, 195 bp, Homo sapiens
  chr12:119419128-119419323
  hyper
gccctggtgacaggcgcacgccccgccctttctcctcccaagacctgcgggcttttgttatgcagatggcggcaggaggctgagcctgaggaggagggggttggtggggaggaggagagacggagaggggggaggaaagtgcagctcgcgcgaccagcctcctcttccaacgtcacattgtgcgagagacaaaac

SEQ ID NO: 9114 - DNA, 462 bp, Homo sapiens
  chr12:119419368-119419830
  hyper
cgtcgcctcttctctcctggtgctgcccagaaagccagccctcccttcccttcttggggcgcagaggctcagccagctcagagcgcagcctggagccgacccagaagggcgaagaaagcccagcggacgagcctcctttctctgctgcctgcccgggctggggcgtcccatcccccgccctgaactccgatctctcccaccccacccctctctgggtttcacccggacagagccgggagctgggtgtcgcccccgtttggaatccacgtttcagcactttggacagcgccccggacgccccggcccctttgggttggcgatggcgagcgttcagcaaggcgagaagcagctttttgagaagttctggcgaggaaccttcaaagcggtggccaccccccgtcccgagagcatcattgtcgccagtatcacggcccgcaagccgctgccaaggtaatgatctcc

SEQ ID NO: 9115 - DNA, 130 bp, Homo sapiens
  chr12:119499107-119499237
  hyper
aaaggtgtagccctgcgtgtgcacttgggtgtgttggcagaacttccgctcaaatccaggggctttgctgattcatgtttcctagagcctgacggcggttcagcaccagggacagcgaccactgattaaa

SEQ ID NO: 9116 - DNA, 30 bp, Homo sapiens
  chr12:119616603-119616633
  hyper
agctgttccctccgcggattctccggggct

SEQ ID NO: 9117 - DNA, 47 bp, Homo sapiens
  chr12:119772544-119772591
  hyper
aacccctcgttggggccgccttagttctcggccgctctcggaggatg

SEQ ID NO: 9118 - DNA, 30 bp, Homo sapiens
  chr12:120031719-120031749
  hyper
gaagatgacaagaccgaggaggacgtgccc

SEQ ID NO: 9119 - DNA, 30 bp, Homo sapiens
  chr12:120032359-120032389
  hyper
gcgcccaagggcaccgcttccgccactctc

SEQ ID NO: 9120 - DNA, 30 bp, Homo sapiens
  chr12:120032608-120032638
  hyper
cagcaaagtgggtgcgcctctcttactctt

SEQ ID NO: 9121 - DNA, 30 bp, Homo sapiens
  chr12:120427167-120427197
  hyper
ctgcagagagcggccgccggcaacagcagc

SEQ ID NO: 9122 - DNA, 30 bp, Homo sapiens
  chr12:120525323-120525353
  hyper
gcggcctctgcaggcggatcctctagctgc

SEQ ID NO: 9123 - DNA, 30 bp, Homo sapiens
  chr12:120807603-120807633
  hyper
cactcagtgcctcgcgtcccgagtggggaa

SEQ ID NO: 9124 - DNA, 30 bp, Homo sapiens
  chr12:120875883-120875913
  hyper
caattttccacttccgcttccggcgctgcg

SEQ ID NO: 9125 - DNA, 30 bp, Homo sapiens
  chr12:121124596-121124626
  hyper
accggaagtgctggcgacatgtcagtgcgc

SEQ ID NO: 9126 - DNA, 30 bp, Homo sapiens
  chr12:121124878-121124908
  hyper
ctgattggctgcagcgtcgtggccgggggc

SEQ ID NO: 9127 - DNA, 30 bp, Homo sapiens
  chr12:121163872-121163902
  hyper
tctgctgctccttgcgccgacccagcccgg

SEQ ID NO: 9128 - DNA, 30 bp, Homo sapiens
  chr12:121409658-121409688
  hyper
tatctactatgccccgggacacagcagact

SEQ ID NO: 9129 - DNA, 30 bp, Homo sapiens
  chr12:121454257-121454287
  hyper
gtgccactgggcgccgccatcttgaaccac

SEQ ID NO: 9130 - DNA, 201 bp, Homo sapiens
  chr12:121476534-121476735
  hyper
tgggttttgtcttgcgtgggggctggaggagcccagtcttaccttgactaccttcagcacccgcacatcctggtccagcccacgcttcccctggaaatgctcctgcctcagaaactcctccacggtccgcacagcgtctagcacctcttccttccactcccggtggggctgcagccactgagccacgaaggagtccagcct

SEQ ID NO: 9131 - DNA, 31 bp, Homo sapiens
  chr12:122214279-122214310
  hyper
gttcccgtctgtgcttcggggttccctgacc

SEQ ID NO: 9132 - DNA, 30 bp, Homo sapiens
  chr12:122231022-122231052
  hyper
gaccctcgggccccccggcgcgcaggcgca

SEQ ID NO: 9133 - DNA, 131 bp, Homo sapiens
  chr12:122231553-122231684
  hyper
agcactggcggcggcgcgccgggcactagcggagccaagaggtcgggggcggggcggggccggaaccagccccgcccactcggagcagcgccgcctccgccaggcagcctcccggccgacctcccagcctc

SEQ ID NO: 9134 - DNA, 224 bp, Homo sapiens
  chr12:122232040-122232264
  hyper
tggcttggcacatgtccgcctctggcctcagcttccccacaggaggtagcggcggtggcaccagggaagatgctgacgcgagagtcatgtctgcccacctcgcctgggccagggacgccagcgtgcacgcgggttcggggtgagggactgggctccgcttacccgcaccccgaccctgggctgcagggtggacgtctgacgccctctgccgggcaatcgcctcg

SEQ ID NO: 9135 - DNA, 76 bp, Homo sapiens
  chr12:122237446-122237522
  hyper
cccagggccctccccccgccgaagaacacacaactgggaaatacttgcaagtggatcctctcgtatgctgctatat

SEQ ID NO: 9136 - DNA, 268 bp, Homo sapiens
  chr12:122461112-122461380
  hyper
gttgttgaaaactccccgctgcctgatttcaactttattatttttttcccacgccttcactggggtcccggagggagaggagccgccgcaacgctggctctgagtgtcagcgcccgcgggctcgtctcgaccctttatttcgagcctggaagctgggcaggccctgtggcaggggatgtttacgtttgggggtgtcgtttctcgagtagcgcctcggtctctaaaagccactgggggcgagcctccggtgtggcggtgtcacaagtta

SEQ ID NO: 9137 - DNA, 31 bp, Homo sapiens
  chr12:122478893-122478924
  hyper
ttctcaagggagaaatcggggagcacacatc

SEQ ID NO: 9138 - DNA, 30 bp, Homo sapiens
  chr12:122907626-122907656
  hyper
aacaggctgcaaggcgcttccgaagcaggt

SEQ ID NO: 9139 - DNA, 63 bp, Homo sapiens
  chr12:123380318-123380381
  hyper
tgcctaagcaccagtcgcggttccctggctcccgcaccccgccccaagcgcccccatttctag

SEQ ID NO: 9140 - DNA, 66 bp, Homo sapiens
  chr12:123380754-123380820
  hyper
acgtgacgtaagtgtcgcggctcgcttggagtggaatgtgtcagggacagtcgggacttctaaagg

SEQ ID NO: 9141 - DNA, 31 bp, Homo sapiens
  chr12:123414419-123414450
  hyper
gggtcctctgccccaccgggagaagcagggg

SEQ ID NO: 9142 - DNA, 30 bp, Homo sapiens
  chr12:123451176-123451206
  hyper
cctccgggtggggacgggcctcctgggggc

SEQ ID NO: 9143 - DNA, 119 bp, Homo sapiens
  chr12:123459137-123459256
  hyper
tcatttgttggctgcggtgagaccacgccccgtcgccctcccacacctgaccccgccctcccgcgtccattgggaacgccaccggaagtaatgcgagacggagcgttttggtggagaca

SEQ ID NO: 9144 - DNA, 31 bp, Homo sapiens
  chr12:123754991-123755022
  hyper
agagccagcgtggcaccggtgaccaacgggg

SEQ ID NO: 9145 - DNA, 30 bp, Homo sapiens
  chr12:124018978-124019008
  hyper
agggcgcgcctccccgagccacatccatca

SEQ ID NO: 9146 - DNA, 31 bp, Homo sapiens
  chr12:124156317-124156348
  hyper
gacagacggacaggttcgaagaaagcctgaa

SEQ ID NO: 9147 - DNA, 489 bp, Homo sapiens
  chr12:124246516-124247005
  hyper
ttgcaaaccggtcggcgtggggtggggtcgcaccctcggctgcagcggcccgagggcggctcctggcggcgagggtcccgctccgcatccaggggcgtgcgcgctgccggggccagggagcaaccagcctacctcggcggcccgggggcctggtgcgcgcctccgagatcccggggccggggcgtgggctgcggctcgcgggttcgggatcgaggggccgggcgcggggcactgccgagcttgcagcccccagcgccggcgccgtcggcggggcgagctgcggccgtttccggggcgcccattgctagggccgccgttgccacggacgcccgccctgcgcccggctccctctgcactgcgcggcgccatggacgacctgcgggtgctgtggatgcgcgaccgcgtgtatgcggctttcggcatcaccgacccccagcttttcgaggacctgctcaaccgcgacgacggccagggcgaggacctcatctt

SEQ ID NO: 9148 - DNA, 63 bp, Homo sapiens
  chr12:124779760-124779823
  hyper
cggcgctggcaggagcgcggcccacggcggcgagcaggctgcaggcccgcggggatccggggc

SEQ ID NO: 9149 - DNA, 31 bp, Homo sapiens
  chr12:124870576-124870607
  hyper
agacagtgatgggccacgtgtcccctagcgg

SEQ ID NO: 9150 - DNA, 30 bp, Homo sapiens
  chr12:125051052-125051082
  hyper
gtgccctcactccccgcaggcctctgagga

SEQ ID NO: 9151 - DNA, 196 bp, Homo sapiens
  chr12:125093637-125093833
  hyper
ttaactacacgtatacgagactgaactgtgtgtgtacattttaaaataaaacaaaacgtgcttcctgttctgcggcctctgcccctcccctcggcagccctgaggcttggccagggtccaggaggaaggcgcggggaacaggttggcccagtcagctggctgggacttcaaaggaaagcgccgctggggcccacct

SEQ ID NO: 9152 - DNA, 100 bp, Homo sapiens
  chr12:125198343-125198443
  hyper
agtctattcaaaatgaaagtgcggcgggaaggaaggaaattctgactcaggctctaacgtaaatgaactttgaagacacgatgctaagtgaaagtagcca

SEQ ID NO: 9153 - DNA, 30 bp, Homo sapiens
  chr12:125398614-125398644
  hyper
ggagaaaagcctaccgcacacctaccggca

SEQ ID NO: 9154 - DNA, 30 bp, Homo sapiens
  chr12:125670498-125670528
  hyper
ggacctcctgtccgcgctcagtcttgcagt

SEQ ID NO: 9155 - DNA, 30 bp, Homo sapiens
  chr12:127509692-127509722
  hyper
atgggccacattcatttagccaacaacact

SEQ ID NO: 9156 - DNA, 30 bp, Homo sapiens
  chr12:127765316-127765346
  hyper
tgcatccccaggtgcgcgccacgcccctgc

SEQ ID NO: 9157 - DNA, 153 bp, Homo sapiens
  chr12:127865688-127865841
  hyper
aggtcctgaggacgcggcgagttcacggagaggacctgccgggcaggggctctgggagcctccgcggggaggggagggcgcgcggccggcgcggccacaacccggtctgcggcgccatctagcgggcgcgccgggaccgtcgcccactaggcc

SEQ ID NO: 9158 - DNA, 31 bp, Homo sapiens
  chr12:128024229-128024260
  hyper
tcccctccgctttccccgcctctccagccta

SEQ ID NO: 9159 - DNA, 30 bp, Homo sapiens
  chr12:128751027-128751057
  hyper
tttcttcccctctgcgttctcgtccccttc

SEQ ID NO: 9160 - DNA, 30 bp, Homo sapiens
  chr12:128752341-128752371
  hyper
ccctgagttccgtgcggacctgccccagcc

SEQ ID NO: 9161 - DNA, 600 bp, Homo sapiens
  chr12:128752571-128753171
  hyper
acgctcactcatcgcgcagctcaccagggaccccagcttggcagaaaccaggggctctctgcgggttctctcaaatgagtcctttgcggtgggggagcgcggatggggaggtgggtgcgtccctcgcgacgggaactacctcaccagcggtcctgtccggggctccttcacctcagtgtcctcttctctacaatgggagtgacggccctgctttgggttggaggaatttaaaggagttaacgtatggcgcccgcagggctcacgaaaggtagccgtgtggtttttccgaccttttttattatgtgcgtgtgcggccgagtggccgcgcggatgcggcggcgggaagggcggggagaggcggtctccagccccaggagccgcggggcaggcggggagcaaggcctaggctctgccagggcagcagctgcccgagtcccggggcgcgcccagggcgtagaaaaaggagagcgtcgctttcctgctccccgcgccctggcgaaggtctcgggttcatttggttaaacggaggtgcgcacatgggtgccctgagccttcgcgcggcgccgcgggtccagtatcggccccaggctctgagcagag

SEQ ID NO: 9162 - DNA, 247 bp, Homo sapiens
  chr12:128850528-128850775
  hyper
tgctgtaaactcagctggatccgcgggccgtgattaaacacattgcccgctttgttgccgagatggtgtttcggaaggcgctgtgaatgcacttccctttgcggggctcacacagacaagatgtgtgttgcaaggatgaggcgcctgctcggcctccagcccagggccgggaagggagaaggtgctgtgcgtcgctgcctgtgtcgcccgcggctctcctcccagcgacagactccagacctctatg

SEQ ID NO: 9163 - DNA, 238 bp, Homo sapiens
  chr12:129338587-129338825
  hyper
cggtgccagccctgccctcgcggatcgggtctcggctgtgtgccggcgtccggggtcctgtccccgaagtccctttcccacctcccctctgccctgtctattctcgtcttcctggctggttagctccttcacactcatctttttctgcctttgtcttatttgtttacttgttggtctgtgttctggtcgctggaacgcaagcccggcgggggcccggggaggggccgccgcgttaatc

SEQ ID NO: 9164 - DNA, 31 bp, Homo sapiens
  chr12:130136921-130136952
  hyper
taagccctggaacctgcgaatgtattatgtt

SEQ ID NO: 9165 - DNA, 30 bp, Homo sapiens
  chr12:130387116-130387146
  hyper
tcaagtcagggctccgctgggaaaattcgg

SEQ ID NO: 9166 - DNA, 221 bp, Homo sapiens
  chr12:130387796-130388017
  hyper
cgtcctcacctttggaaaacagggcggccaggctgatgagtaccggcgaccagtggtgccacagcgtccccatctcagacgggcacatcctggagacccggagcgcagatcctccgctccccggcgccgtccaggcgaacaagagaccgtctcagtcccctagaggcccgcagcggggccggtggcgagggagcgcccggctaggggcccgagcagcccgg

SEQ ID NO: 9167 - DNA, 30 bp, Homo sapiens
  chr12:130589237-130589267
  hyper
gcacgttgctatcccggatgaagggccatt

SEQ ID NO: 9168 - DNA, 1245 bp, Homo sapiens
  chr12:130645408-130646653
  hyper
gagcgccgccaacgcgggaagccccagcactgcctccaaagatgtccgcacactccaccctgctccctggaactatcctcaaacgggcagggggcaagcgaggccggtggacgcgggactcgctcctctgacctctccccggccccccgggaggtagcgggagattgcacacgcgatcctgcgagtttccgaactttggaagatcgtgacccggagagaccctgggaggagagggccggccacctcctaggggtgctgtttttttaagggtcaacccaggacgctacgggaagcacctggcgcatccttgggaacagtggggcttggcggtgggcgcccaccgcgaacgccctgggcgggggaagggaatggcggggggacgtcgtgtcctaagtgaccccgtcacagacccgccccaatccgaggggggatgagctcagaggacctgcccaggacgctccttctccactttccaggaaaaccgagcggcgtgcgcgcctccgtgtcctcgcgggagctgggggtccccgggcaggcgctgacgcgctcctcccacgacccactccatcccaccctactccgggtcctcctgcggggctgcagccaaggagggcgctggccgggcacatcactcgccaaatcacataaataccccacgagcgaatgacttcctataataaataaactcagccgccaagaaggcatctccagccctgctggcgcgaggccccggctctgcggcttcggagggggcgggggtcaccgcggtacaaaccaagcccgcacttcccgcggggtgggaggcggtgttcaaagtcccgggacgcttcccgcccctcccccttcccgccttcttagaggagacctcggatgagcggccctaaaatccggattctcgagcccctccccctccccttagctcgtctctttgaaatttcaaagaaaatccctcctcggagcccggagcccggggctggtagcacctccccagcctcaggaagatgcgggcaggtttacaagcaagggcctactttatggcccaggctataaaacgcaaatcccacctccctttgaaagcgccctccgcccgggactcaccataaaaggaagagaagatgcaccccgcgcccctcgccgcggaccacccccaaaccccttctcccgccagtccccgaacttcccgtaacctcggcgtcctcggggtgccggggaccatcccggggaccgccgggaaagggggcgccg

SEQ ID NO: 9169 - DNA, 170 bp, Homo sapiens
  chr12:130646945-130647115
  hyper
gcggcccgggggcggggcctgtcagcgctcggcttttctgcccccctttgcctttttgcgagtcttctcatcccgggacgcaaacctcgaaacagctgccggctggtcccggccgaggccggcgcagggagggaggagccgcccgggctgtgggggcgccgcgagctggg

SEQ ID NO: 9170 - DNA, 31 bp, Homo sapiens
  chr12:130709678-130709709
  hyper
ccttcaaagctcaacacgccctccatcacac

SEQ ID NO: 9171 - DNA, 47 bp, Homo sapiens
  chr12:131438508-131438555
  hyper
aaggagctcgagagcggccgcaggacaagcccgaggagcaggcgggc

SEQ ID NO: 9172 - DNA, 33 bp, Homo sapiens
  chr12:132312726-132312759
  hyper
atcccgcgcgtccccgccgccccaagagcgtcc

SEQ ID NO: 9173 - DNA, 315 bp, Homo sapiens
  chr12:132313394-132313709
  hyper
tcctggggaggcgccggctgccgtcccggctccgtgcgctgggagcgcgccgcagccgcaggagcccgtggagttgtgagggggtcgcccacccggagcccgggtcgccggcttgcagcagccccggagcagccgggctgggcgagagcaggcatcgcggccgccccgagctctgcgcgctgcgtgcgttccgggtgggagtggcgggggcaggagcacgcacccacaaagcgaggaagggcaggggctacggagtgggggcaccccgaaagccttgagcccccgagtttgctcggttgagggtgttgggggcac

SEQ ID NO: 9174 - DNA, 38 bp, Homo sapiens
  chr12:132380561-132380599
  hyper
gagggggtgtctgggccgcagggcgccccagggcaggg

SEQ ID NO: 9175 - DNA, 38 bp, Homo sapiens
  chr12:132380827-132380865
  hyper
cgggccggggcacaggcggctgccgctggctggccaag

SEQ ID NO: 9176 - DNA, 30 bp, Homo sapiens
  chr12:132414834-132414864
  hyper
ctgctcctgctgcacgcgagctcctgctgc

SEQ ID NO: 9177 - DNA, 31 bp, Homo sapiens
  chr12:132982486-132982517
  hyper
acagcagaggcagcctcggggcctggggctc

SEQ ID NO: 9178 - DNA, 30 bp, Homo sapiens
  chr12:133067719-133067749
  hyper
tctgacagcaccgtcggccttttatcagtt

SEQ ID NO: 9179 - DNA, 31 bp, Homo sapiens
  chr12:133175116-133175147
  hyper
gtcccctcctctccgcgcgcccctgctcctc

SEQ ID NO: 9180 - DNA, 30 bp, Homo sapiens
  chr12:133263931-133263961
  hyper
ggagaaatttggcgcgctcccacccagact

SEQ ID NO: 9181 - DNA, 123 bp, Homo sapiens
  chr12:133443617-133443740
  hyper
tcaaaaaaacagaaaataaagagcactctgctgctgaggagctgggctcatccaaaggagcctctgaagaaggaaggagcggatgcaacaaggcctcaagaacatcaacgaacaggagaggtg

SEQ ID NO: 9182 - DNA, 128 bp, Homo sapiens
  chr12:133463768-133463896
  hyper
ctcagccccgcacctcgtctccgcccgatggtccactcccgcttcctcaggaggacgtgcggctcgccctcctccgcgcccagacgcaggagccgtccccagggctgcggcggcggcgactgcttgcc

SEQ ID NO: 9183 - DNA, 591 bp, Homo sapiens
  chr12:133464151-133464742
  hyper
cggaaccggctgcgccgccgccgctgtcaagagacattgcggctccctcagctgatccgcggggcggggccagaggcctctgcgccccgcgattggctggcggcggcgctcaccaagagcggcagctaaagcggagccgggagtggcccgcgagagtaggcgcgtggagggcgctcggccatctttgatcctgaccaggcgacttcgtcgcctgcggatcacggaagtggctgcggtcggcgccatgttatgttggggcagaagggacggggaacttccggattggaagccccaaggattctgagagccccgctaatctggggatgactcctaggagtagaagacggtccatcttagttgtcacgaggtagtgcacgtggggaccctttcgggtacagttgcacacagtggatcacacagatccgaagtctgaggcacagggcgcggtccgcgagtgggagcggctgcttgtgggcagggtggacgcggggccacgtcttggccggcgttttgcggggtcttcctgttctgaacgcgcgtaacttttgcctcagtatctcacttcttggaatccggcggcgttcacgtgtg

SEQ ID NO: 9184 - DNA, 8 bp, Homo sapiens
  chr12:133481374-133481382
  hyper
tttcctca

SEQ ID NO: 9185 - DNA, 173 bp, Homo sapiens
  chr12:133481489-133481662
  hyper
cgccacgagccacaatcgtagggttgggcgcgccctgccggccaccaggggcagcgcaggagctgagcgcaccccatcagcgaaagaagcgcgcctccccgctcttttctgaaccgtatctcctaaactataattttggagatcaaaagtgcggtggagcctcctcttctgtg

SEQ ID NO: 9186 - DNA, 252 bp, Homo sapiens
  chr12:133484600-133484852
  hyper
cgtttttctctaggtaaagccgcgggatgaaccagcccctgtggaaatttagaagtaacgacgtccgtcaatttctgtatgaaaaatatacagatcgtgtgacacgtcttctgggaatgaaagtctgctaaactcgccgtcacgagtagatgaacacatttaaagtttgtagttaagaggaaaacaacgccaacgacacaaatgccccaagcgctggatgaagcagcgacctaggatggggctggcctggaa

SEQ ID NO: 9187 - DNA, 186 bp, Homo sapiens
  chr12:133485161-133485347
  hyper
ggcaacgtagaggcggggaattcgccaacgtgtctgaaacagacaacaattttagccaacggctgcgtgggccttgggcgtcctggccaatgggaatagtgaggggcctgtcactaagaaacctgtccctgagcaacgcataggaggggtggaacccagcagcgctgactgagccgccgcgaagtg

SEQ ID NO: 9188 - DNA, 250 bp, Homo sapiens
  chr12:133485439-133485689
  hyper
cgcctcgggccgtccccgcccagacgcttgtccccgcgagaagctgagcgcactgaagtgagcccggcggctgccgccggaggaggagcccggctctggacacggccgtcaggaagctcagaggctgcagcaccgcttctgcgttgatttccgcttgacttttactcttttcttgggttaaaaatcaaacgccgacccgaggcgtcagagatgggcggtcgttaggcgcagtggcggcccccggatgttt

SEQ ID NO: 9189 - DNA, 62 bp, Homo sapiens
  chr12:133485815-133485877
  hyper
cgtcatctggggtcttacgtgtcagtgatgtggggtctgccgggtcagtgagggggtctgtg

SEQ ID NO: 9190 - DNA, 55 bp, Homo sapiens
  chr12:133706913-133706968
  hyper
cctggtctgtgcgtcacggacgcgctctgggccgaaggcccgcagggtccggcac

SEQ ID NO: 9191 - DNA, 31 bp, Homo sapiens
  chr13:19918627-19918658
  hyper
ggggacaggggtgagccgagagcaggaaagg

SEQ ID NO: 9192 - DNA, 30 bp, Homo sapiens
  chr13:20436972-20437002
  hyper
ggtaacgggcggcgcgcatcacctctgggc

SEQ ID NO: 9193 - DNA, 78 bp, Homo sapiens
  chr13:20702907-20702985
  hyper
ctgcagccaggtggcgccgattccggacgcccagaactctgtgggaatgcagctgtactgtgcggcgtgtaaaccacc

SEQ ID NO: 9194 - DNA, 663 bp, Homo sapiens
  chr13:20735460-20736123
  hyper
cggggcatgcccgcgcgggacgtgagaggagagccgagggctgttggggcgggcccgacccgcttgcggggcgcccaccgcacgcagatgcgccagcccgcgccccgctcgcgcctgtcctgggcttcgcaggcccggcgaggtagctgctctccgggcgctcccacggtcggaggcgcgtgggcgtcgggcacctaggtctcgcccgcctgcagccgcctggggacgcgggttccggacggctggcgcggggcggggcggggaccaccgagcaggaagtccccgcggaagcgccgccgggcacagcgtgggtgctgtcgaggagtggcgcccgggcggggcgggaggttataaatagcggccgccatcctgcttctcttcagacacacttaatttagccggcaggcacacggatgcttatttttaaaaaaagaacttgttttattgcgctcgaggtgaccgggaaggtgtccccgcgggtcactcgctccatctggtcctggagacgagatgccagggcgaggcctaacctgcctgctggcgcccaacgaagattttaacgttttctgttcccttcggggtggttttaccacgcttgagagggacgcctaccgcggaaggccgcggaccgagggcggcatcgcgtccttgtctgctgtctgg

SEQ ID NO: 9195 - DNA, 87 bp, Homo sapiens
  chr13:20766767-20766854
  hyper
tccagaaggcggcccccgccccccggcccaaggacgtgtgttggtccagccccccggttccccgagacccacgcggccgggcaaccg

SEQ ID NO: 9196 - DNA, 63 bp, Homo sapiens
  chr13:20767134-20767197
  hyper
gagactgggaaagttacggagggggcggcgccgcgggcggagcgcgcccggcctctgggtcct

SEQ ID NO: 9197 - DNA, 30 bp, Homo sapiens
  chr13:20805880-20805910
  hyper
cgcagcaaatgaaacgggggaaaggggcac

SEQ ID NO: 9198 - DNA, 30 bp, Homo sapiens
  chr13:20806261-20806291
  hyper
ctccgctggggggccgaggtggcaccgccc

SEQ ID NO: 9199 - DNA, 68 bp, Homo sapiens
  chr13:21099552-21099620
  hyper
cttctatgtggacctgcgggcagacgcggcgacattcaacagagtccaggaaccgcaggccccgcggc

SEQ ID NO: 9200 - DNA, 31 bp, Homo sapiens
  chr13:21345744-21345775
  hyper
ctgcaattttaggaatcgtagaagtttccta

SEQ ID NO: 9201 - DNA, 30 bp, Homo sapiens
  chr13:21347997-21348027
  hyper
agtccaaaacgcctcggcggcgcgcagcca

SEQ ID NO: 9202 - DNA, 623 bp, Homo sapiens
  chr13:21635132-21635755
  hyper
tgccccgccgggatcccggccgccccggtcgccgcacaacaaagcggcgcagccccgctgcccccgcccgacgccggcctccaacttccccggctcctctggaaccggctccgcgggctccgtacggcctggactacgagccgccgggcgggggcggctccgggcgggcgcggaccgtgggggcagggcgcagggctccgtccggacaaacttcctcggccgccccgccgggcgcccttcccggagcctcggcaccacagtaggtgcgcggagccgcagggctcgaccgcttcgcggaaactctcgccaccctccgagctgccgccccgaccccagctcccagccccctcacctccaggggcgcggtctacaccctcgggggcgtcctggccggcggctcccgggcctctcgcgccgggagaccgggcactggtggctggagctgctgctggccccgcagggacgggggagccccgggcggcggcggtggcgtggacggcgactgctccatcttcccggggcgctcacgccgcggttccaaagcgcagacccaagtgggacattcgctacattgttggcattccacgggcgtcacgtgaccccgcctcccgcgtcactctcgg

SEQ ID NO: 9203 - DNA, 228 bp, Homo sapiens
  chr13:21635777-21636005
  hyper
cgcctgcggcccctgctcctccgcggccgctccgcccagccccgcccggccgtgcttcctgcctccggcctcgaccgccacctgcccacggcctccctgctggcctgcggtagctcgccagggcctctcggacctatttgactggctgctatctgcccccaaacttgagtatttgccctctcgactgcatttgtattaaaagttggtaactgtcgttaaagccactat

SEQ ID NO: 9204 - DNA, 30 bp, Homo sapiens
  chr13:21872204-21872234
  hyper
aagcgtgggagcgacgctcttgctctggac

SEQ ID NO: 9205 - DNA, 30 bp, Homo sapiens
  chr13:22243377-22243407
  hyper
cttcttgtatctgccgccgagcagttaacg

SEQ ID NO: 9206 - DNA, 88 bp, Homo sapiens
  chr13:22243707-22243795
  hyper
aggcgaagccctcccgtccggagtagggccagccccagttatgcatctccagcctttagctgactactaaggcggatccgacttctcc

SEQ ID NO: 9207 - DNA, 558 bp, Homo sapiens
  chr13:22244072-22244630
  hyper
ccgccgccactggggatccgggcgcaggcaggctgtcccgggcgcagagcgcgccgcctccagtctctctggcgggcccggcccggcagggcccctggcggcccccggaggcgggtttctttgtccctgactcccgctgggcgcgaaggccgccggcggctaacagaaacccgagcccgcgcaacggagctcaggcttccacgtgcggccccgcagggcagagcaggaaggagcggctgcagccccggggcgccccgcaagcatccagtgcccggccctcccagctccgcggcgggcttcggacggtggagtgagacaccagaactcgcctttcgcttccccgagccgatgcacggcttgggatggcgccgctcgtcctaagcagcgtggtttgagggcgagaagacgcctactggagcgctcccctccacccagactcccgaagacgcgcgcccgagtcgaagtcggggacagagaaggttctctggcgcccccctgccgactgctttgcggccgccgggacccgagcagcggggcgggacctaaacatagccccaa

SEQ ID NO: 9208 - DNA, 187 bp, Homo sapiens
  chr13:22245212-22245399
  hyper
ccactctgcgcgccggcgggggctgcgcaggaggagcgctccgcccggctacaacgctccgcgagccggcgcggcaacacctgttcgcggcagcctgggcggcacgcgagctcccggacgcggctctcctcgctcgccgctcgccacccgttctaagccaatggacatctgccgagcctctggagaa

SEQ ID NO: 9209 - DNA, 30 bp, Homo sapiens
  chr13:22247199-22247229
  hyper
acacacgtgcttgccggggcaccctgagcc

SEQ ID NO: 9210 - DNA, 97 bp, Homo sapiens
  chr13:22247844-22247941
  hyper
ggcgagcgagcgtgtccggggccgcggcggccacccgcagggtgtcggggccgcgccgaccgaagcgagcggcgtgggcggccggcctaggtgtgcc

SEQ ID NO: 9211 - DNA, 31 bp, Homo sapiens
  chr13:22553926-22553957
  hyper
tgacaccatgtacatccggtctgtgtgtagg

SEQ ID NO: 9212 - DNA, 30 bp, Homo sapiens
  chr13:23489925-23489955
  hyper
cgcggtcctagcgccgctcggcttcacgct

SEQ ID NO: 9213 - DNA, 330 bp, Homo sapiens
  chr13:23733697-23734027
  hyper
accctttctgacagtaaaggacgagggccagaagtgtaaagattgtggtcccgcgctccaagcccaagatgcgttcagcaggagtagttgggttggaaagaaggcacccagcgtctgcagcgaaggactcgcgtgggagcgagaaatgtccctgcccagtgccccgcgcgctggatcgcgggggcgagtctgagggtggagaggccgccgggtggaggcgcgcaggggtgcgtgggtgggtgcggaaggagtgcagggtatggaggggaatcttggggcggcgcgaaggaggagcgcttggaaaggcgcggtgtttggtcacagaggggc

SEQ ID NO: 9214 - DNA, 70 bp, Homo sapiens
  chr13:23734227-23734297
  hyper
gggggatgctggagaggcacacggtgatggacatggaaggacccgggaggtgtggagtggtgggcccggc

SEQ ID NO: 9215 - DNA, 7 bp, Homo sapiens
  chr13:23734814-23734821
  hyper
cgccttc

SEQ ID NO: 9216 - DNA, 224 bp, Homo sapiens
  chr13:23949730-23949954
  hyper
gccgcccgcggggacacgcccacccgccgggaccgttagctggggatccgccccgcccctcccgccaggccccgcccccagggaacgcccatccaggccccgcccagtcaagttctgtcttgcccaatccggacagttagcgaaggagccgccccgccccactcgcccaccaggctccgcctgccaggccccgccccgcctgcagaggcgcctctgccagaagg

SEQ ID NO: 9217 - DNA, 30 bp, Homo sapiens
  chr13:24553696-24553726
  hyper
caccgtcctacccacgaagaacagcaaaca

SEQ ID NO: 9218 - DNA, 824 bp, Homo sapiens
  chr13:24734727-24735551
  hyper
tgtgggggcgtggccgagggtgtggcctgagggagtgagctaaccgggggcgtggcctgatatggggcggggggaagagccgggctgggggcgtggcctggtggggagcggggctggggcgtggcttggctgagtgtgctgccgcggcgcgggaggagagtgtgcgttgcgctttctcccgcgatcgccctgccggtcgctagctccgagggcgcgcactggatcccaggctcctccgagagtgcggcgacctcggggctccgccggcaccggaggtggctctgagggcagggacgtgttggacacgctgactttgtaggctccgccaagaggcgccgcaggaggtaagacggcttcgggcgcgcggctctgccgggcgggcgcgggcatgggctgttaggtagaatatcgggaggatttgagtcccagtggactgcctcggggcttcgggatgtccagctcccagctgcttggcctctgcttcccccgccggtggaggctaccgggtgctcacctgttaggtccgtgcgcccgctccctgcccggcggtggctctgcgccctctgggccacccggcaccatcgcttttgggaggacatgcacgtggtgttctcgcaaaaggccgtttccagccggaagcctgcagggaggtcgccttgtaacttcacccgcgctcccagctcgcggggcctggcctacaggggcggccgtgggggtggcagagtctggggagcctggcgcggcggagccctgtaacgctctgctccatcgggtggcgtggctggtgcctccggggacccggagcgatgcggttggagagctta

SEQ ID NO: 9219 - DNA, 152 bp, Homo sapiens
  chr13:25320387-25320539
  hyper
cgcagctcctgatgccaagttcacttggaccccggctgagattagagaggcctggcgaggtgtgggggtgcgcagggagaatgggctgtggtcgccatggtgcgtgttggtcttgtggagatggatgctcctccgggtcaatctctgccttc

SEQ ID NO: 9220 - DNA, 415 bp, Homo sapiens
  chr13:25320613-25321028
  hyper
cgcgttctccttgaggggccggcgggcgttggcgaaggtggtggggactgtcgtgaggatcatcatgggcagggaagggcgcgcggcagtggcctcgagccctgggtcttctccttcctgaatttgcaaagccaggcgaaggccctcgtgctctcccagagagctgcgctccacccgcgggcctgcctgcgcgtggggagagcggggaggcggggacaggagacctgagcccctgggcgcccctaccacgtgtcccccgtcccaacactggacctcttcagattccttgccgagaggggcctcgtcccaaggctggatgcgccgcgcagcggtgaaagccgccctcgcagcccgcaggcgaccagtgggtgctgttggctttcgccccggggagggaacgggcttgggggcactg

SEQ ID NO: 9221 - DNA, 1081 bp, Homo sapiens
  chr13:25321112-25322193
  hyper
cgagctgaggagaccggagtttttccccaggagggagccgcgcaggccggcgacctcttcccaaggctctactgctggaccgcgcccgcggcgccgctcccgccccccttcagcgcactctgcgcctctcgctgggtatggccagctcgcagtgcgcgtttatgctgcggtaaacgcattgaaggaacgcacagcttatctaatagggttttgaaataattttcggtatgccagctggggtgtggtttgcccaattctgatcctgtttccagagaacacagctgcttagacaatctgttatcttcgcgtcctgtcttccttttgacgccagaacatcctagggatcaggggcctctcccatgccctggaaccatcctctcacggtgctgctcttcactggtgccaataacagagctcccgcaggcaggcctggatcagtggggactggggccctgaagtgagatggagcaagacagagcggcccttgggagaggggcatggggcggccctgtgctttagactcggcaccctatggcttgaggaggtgacactgtgtcgacgtgcgtttgaagggaggacggctgaaggtacatgcagtctcccggacgtcacaaactccgcggacgcgggtcacacccgcgcgcacgcgcagcaggggtcttagccacacaggcgcacggcggggcacggcggggcacgggccctgctgcaaacgggcgcgctcccttctgggcaagcaggtgcgaggcgcgcgccatggaacagcccttagctgagtttcggtttgcgcgcaaacggccggcctggccgcccaacgcagcatttccagccagggcgcacaaacctcgggagagaaggtggaagccgcaggggctctaaaggcagccccaggttggctaaagcggttcctggtacggacaccaaggcccccgtgctcgggccctacccagcctggttcaggtgagaggaggcaagcctcggcccggtaccggcgtcggaaccacagtcgggcctggccctgctgccggggcggggctgctggacttccctcccgctccgggctggacctgacatctgtctc

SEQ ID NO: 9222 - DNA, 191 bp, Homo sapiens
  chr13:25497657-25497848
  hyper
tttttttgttttgtttcgttttaactgccacggccctttaatctaggaagttacagcaccgtgagttaccacagtactacatacctggcttccatgtctgattaaacagcaggccaagtaaaatgtttaaagaaatcaaatgaagtgccatttataaccgttataactgaaacaaacgactgctaaagaca

SEQ ID NO: 9223 - DNA, 312 bp, Homo sapiens
  chr13:25620893-25621205
  hyper
gatgacattgagaaagagacccgggtccagtgaagcatcagacacgctggcgcatggggacgaggagccctggagactcagggcccgtctggtgcggcccgggctttgctccgcgctcgccccctgcagctgccggggccgccgcaacttttcaaacctcaccgcaccgacagctctgtcccttcttttatctggagacgctgagcctcatcaactctcacctgcgtttcaggaaaaataataataataataaatgttccacggacacaggatttcggccaaatgctgcttagctctaccttccccaaaagg

SEQ ID NO: 9224 - DNA, 311 bp, Homo sapiens
  chr13:25621263-25621574
  hyper
cgtccgcaggaggccttgcggggatccgagcatcccgctccgagatggaagtggtaggacagtccgggagaagccgacgggaaactgtcctgggcgcgcaccgcccccgtgccctgcgccctcctcatttgctcggccagcgcgggacctcccagccgctgggcccgcgaccgcggcgaatcagtctccgcttccccgcccagcagagctcagatctgctctggagggctctcgggatgtcgcctttccctggagatgagcagttctgcgtcaccctccgtggccagcgcggcttccagggctgggctggt

SEQ ID NO: 9225 - DNA, 18 bp, Homo sapiens
  chr13:25744716-25744734
  hyper
gtctggggcggcgggcgc

SEQ ID NO: 9226 - DNA, 294 bp, Homo sapiens
  chr13:25745300-25745594
  hyper
cgagggagcccccgccgggccctgcggctctggggggccccgggttcggccgccccccgccgcccccgccgctgtcgcccccgccgcgcggctcctccttcctgccgctctccagcaccagcacctcggcaagtccgtcgtgggtcctgctcctcaccagccccgtcggacccgagcttttcccgtcccctttgtttttgaccccaaaaatgctgggcatggtgccacccgatttcctcttcttgaataatttgaaggcagctttattaatcttccccgacggcggctcggcgg

SEQ ID NO: 9227 - DNA, 354 bp, Homo sapiens
  chr13:25745726-25746080
  hyper
cgccgccgccgcggctccggctcgtctccatggaaaccgcgcgggataagccgctttcgtcagcagtgggctcgcgccaggccactgtcacccgtattctaaatcaacctgagccgcgctcgccgccgccgctgcaaaagaaacacacataaaagaccatcttccctcccgcaagggcttatataataccctaacccacttccatccgacttggctcggcgctgcatggcgtttttgtggcaggagcaggcaacacagccgcgagctgattgcagaaattcgagtcgtaattatggaattcaaattccctcaactctcacccaccttcggattccttctctagactcgctcttc

SEQ ID NO: 9228 - DNA, 30 bp, Homo sapiens
  chr13:25861518-25861548
  hyper
ggtggcgtcaacggcgcaggtgcagccggt

SEQ ID NO: 9229 - DNA, 373 bp, Homo sapiens
  chr13:25946300-25946673
  hyper
cgtagcctccgtctctcgcccggggccgccgagcccccgacacgggcgagatgctgaacggcgcaggcctggacaaagctcttaagatgtccctgccgcggaggtcgaggatccgctcgtccgtgggtgagctgggaggggcgcggcgagggagggtgggcccggggcgggggcggcgcggggcgcgcctgcggttatgcgacactgccccgcccgcgccccgctcccctccctgggctccctgggctctctgggctgcaggatccgccgacgcggcgcgctggccgcacgggggctgggcgtcgctgcacctgcggggccaaaaggctccaggccggggcgaggtgagcggcgggcgtcagagacccccggc

SEQ ID NO: 9230 - DNA, 112 bp, Homo sapiens
  chr13:25946801-25946913
  hyper
cggcgcagagaagatgcagccttccctgccggcggccggcaccgctgtgctgcagagctcaaaagcagagggggaaaaaggcatccgaagggtccctcgagtgattctcacc

SEQ ID NO: 9231 - DNA, 119 bp, Homo sapiens
  chr13:26043051-26043170
  hyper
agcctcccgcctggcggttgacttctttgtgtcgtattctctgcctgcgccctgtctctgcaggacctgttcgttcttctttgggctataagaaggcagaggatgagatgtcccgggcc

SEQ ID NO: 9232 - DNA, 30 bp, Homo sapiens
  chr13:26594656-26594686
  hyper
cacaaaattctctatcggggtggtcaacct

SEQ ID NO: 9233 - DNA, 429 bp, Homo sapiens
  chr13:26624768-26625197
  hyper
ggccgccctacctgccgagccgtcggggccgtctttgtccgcccggccaggctcgccagcgccctgctggcggtcattgtcgcagccgccctggtccaggcgcgcctcggcgctggagcagcagtagcgcaacgcgcagctgccgcagcagatggtggcgtcgccgccgtcgaagcgctcgggacactggaagccgatgcgccagacgccctgcgcgtccagccagccgtggcagtactcgccgctggccctcgcccccgccgccagcagcgcagccagcagcagctgcaggagcgaagcggcgttccaggatgaggagacggacgagcggcgagcgccccacatggcaccaccctgggcgcggacagcgcgtctccagagagcgcaggacggtctccgagaagtcgtggccccggcgacccccgggcc

SEQ ID NO: 9234 - DNA, 390 bp, Homo sapiens
  chr13:26625266-26625656
  hyper
cgacgccgggccctaggtccaggagctcctaagccatccccgtcctcagccggtggcccggtccccttagggactgccttatgagttgcactcgctgatggaaatctcgggatgcagtcagaaggcccccggggctgtcgtccggaagcctctggaggtttcactggcaaccggaccctccctgagcatccccgaagggatgctcactcgagccgaatgaccgctgggcgcgccgccgcggacctggagccagggctctgcgcagggtttaagcctcagggtcccgcgcgcgaatcagggcccgtctcccctcctttattccctcctcgggcgggtagaaggggcgaaggcgggcagtgcacgcaaggctctgggcagcaagtgacgcag

SEQ ID NO: 9235 - DNA, 124 bp, Homo sapiens
  chr13:26626239-26626363
  hyper
gacctcagggacgcccgcgggcgccgggcagcccctcactttcctaccccgggcaaggagaaaggtgtggccaagggcggggtctgcctgctggaataggcgcgggaggaaacccaacctaagc

SEQ ID NO: 9236 - DNA, 30 bp, Homo sapiens
  chr13:27131469-27131499
  hyper
gattaggatataagcgcaaactcaaaggta

SEQ ID NO: 9237 - DNA, 987 bp, Homo sapiens
  chr13:27334232-27335219
  hyper
cgaggcaggcacacacggactcgcggcggtctgtttgcaacagcgctgggaatgcacattggaaaatcacatcttgcatgctgaaaacgaacaactgtttgacatctgggctgctgccgagaaaaccacgcggcagcggcaggtctcgagccaggggccgccatcctcgatggaatatttaaatcgcctatttccatcgaactcccaccctccaaacgcatcccccgcgcgcgtgcacatcctcaaacgcacccccgaccggaacaaagaggggctccagactccccccgtgcgcacggggcagtcgggagggccacgagagggaggtgtgtgcaatggaagtaccgagacagacagacagacagatgcccatgcactgctgccgattccctggcggcggggacgggagtcggacgcgagggggacagacagggtgcggggacaggcggcccgcgggggcgggggggtcatcgagggggtcaccttggctcgcccaggccgagggggctcctccggtgcttccgaagcgcgtgggctactcgtgtcgcatgtcggcgcagttgcccgctgtggcaaggggggggcggccgggctccggagcgggccgggagggcgcggggcgcgcactccgcggcaggtgagcggcgcggctgcaggtgagcagcagcctcggctcgcgcgcccagctttccccgccgcgcccgcccggcccacacgctccccgcgcgcgcgccgcccccgccccgcgcgcgcccggccgcccgcccgcccgcgggatccccgcgaggccgcgcgcccccacgggtcagggctgctctagggtgcgggcaggcgagggcggcccaggggcgcggggcgaggggcgaaggagccaggaggctgagaactgcatggtagccctgcctgcctgccgcgctgcgcgccccaccccagccggcggccccgggcttgcaccgggcggggcaggggagcgctgcctggagccct

SEQ ID NO: 9238 - DNA, 133 bp, Homo sapiens
  chr13:27744843-27744976
  hyper
ccatcgccttggcaggcggtccccgcacagacagacctagctccagccacatacagatgtgtctggtgggctgaagtaaacaaatgacaggaaagctaatgctgcttttcaagattaacgtgcattcccagag

SEQ ID NO: 9239 - DNA, 30 bp, Homo sapiens
  chr13:27825511-27825541
  hyper
cagcttgtgttggccggttgcctttctttc

SEQ ID NO: 9240 - DNA, 30 bp, Homo sapiens
  chr13:27868706-27868736
  hyper
gtgtccccctccagaatcacattttggagt

SEQ ID NO: 9241 - DNA, 30 bp, Homo sapiens
  chr13:27949036-27949066
  hyper
acacttggatgaaacggccacgtcaccaca

SEQ ID NO: 9242 - DNA, 86 bp, Homo sapiens
  chr13:28024611-28024697
  hyper
cgcaccgctccgcacgcctcatatttagcattacctgtgctggggcaagcgattgacatactgtagcggacgcaagtacagcggat

SEQ ID NO: 9243 - DNA, 30 bp, Homo sapiens
  chr13:28179804-28179834
  hyper
ttaaatgaaaaatatcgaccttacagggtt

SEQ ID NO: 9244 - DNA, 30 bp, Homo sapiens
  chr13:28365572-28365602
  hyper
ggggagagcggaggcgggtcagggtgggca

SEQ ID NO: 9245 - DNA, 73 bp, Homo sapiens
  chr13:28366528-28366601
  hyper
aaaaaccctattgagaggccccggccgctcctggcgtagtccatcacatggcaatagtcctatttaagccgcg

SEQ ID NO: 9246 - DNA, 374 bp, Homo sapiens
  chr13:28366664-28367038
  hyper
cggcagcagaggctactgtttcagcctaggtctcagccgcgcgttcagcctcctgggcagaggcagctgcgggataccgcggccagggaaagcgcgtggagagccgaaaggtgcggtgggcgcagagggcgggctggctgcggggcgaccgcgcgccggggccatgccgcgctccttcctggtggactcgctagtgctgcgcgaggcgggcgagaagaaggcgcccgagggcagcccgccgccgctcttcccctacgctgtgcccccgccgcacgcgctgcacggtctctcgcctggcgcctgccacgcgcgcaaggctgggctgctgtgcgtgtgcccgctctgcgtcaccgcctcgcagctgcatgggcccc

SEQ ID NO: 9247 - DNA, 5 bp, Homo sapiens
  chr13:28369065-28369070
  hyper
ccgag

SEQ ID NO: 9248 - DNA, 30 bp, Homo sapiens
  chr13:28370985-28371015
  hyper
gatttgggggcgggcggcagcacgattttc

SEQ ID NO: 9249 - DNA, 337 bp, Homo sapiens
  chr13:28371360-28371697
  hyper
ttcccaggagtgcacgtttcctcctctcggcttcccagggattcatttccggaagaccaagctttcagctttctagtctgccttagcgagcagcgggaggaaaaaagcaagcctccttgtggcgatcccagttgttgccaaggtggtgacgggagcgcagcgctggggacctggaggcggctgcggcgcaccagagctctcaagcatcccgccgccagcagagactgcgttcaagtcccagcacactttcgctcaaacactcctcaccctgcaacctctgacctgaatgcagaaacagtttgcgtcttgtgctgagctggccgggaggcctccgctc

SEQ ID NO: 9250 - DNA, 258 bp, Homo sapiens
  chr13:28394723-28394981
  hyper
ctcccctcccacccacggccccaggcagagagggccggaaaggcagcccattcctgcccgcgcattcgggcgcacaagcgcattgcgcatgtactgtggagggggcaccctggtctccacctggaatgcgcttctagccaagtaattgcgtcgcctttgcgcgcagctggcctggggaacctgggcccatcagagccagttactcttggtccccgctttactggagggtcgcaggagactttcgcttccaaaagcaca

SEQ ID NO: 9251 - DNA, 30 bp, Homo sapiens
  chr13:28395474-28395504
  hyper
acggctagaagtgaacgggacgagtggctt

SEQ ID NO: 9252 - DNA, 1018 bp, Homo sapiens
  chr13:28491503-28492521
  hyper
ctaatggctcggtatcgctgccgggcctgttgtgggcgaggcggcttggagggggcgcaggcgtcagcggggattcagagcggaaacgcatttcgcctgtaatggactcggcgattttacgataccaggagctagatccacggggaagtacaacacacgaccttactaagcggagggttccgcttgatgcgttttttatacggctgtacgtgataaaattccagataactttgtttcatctaataataataataacaataataaatggttgtttgacctttgctccctgggtcccttctataggtcgcaggcagcagaaaatgctaattgtgaaagtgagaacgcgcctccatggaatacccccggcgatcccctcctcctcccccacagccgcgggtacccgggtttttgccggcgaccgcaaccggcggatttgctttctgctgagagcctcttttctttctgcagggccgagcaaaaatattaaatggaagcaaatgaagcatcgaaatggagaccaatttacagaaatgtgcaattagttgagaagtgcaaagtaaacactccgggggtggcaggcgaggcagggagcaggggagggagagtggggcgcagactgagtccagagtgggtgtaggggtgcccagggaggaggggaagggggaggaaaaggagggggaggggaaaagtggccgatctttgtcctgagcggagcttgccgtccgctcataaccgcgtcgccaagtcaaccctcggcgactcggcagattatctccaagggtcaacacgccgcggccaggcaaccccctccagcctgccctcctgatcgatgtggtcactcgcggccagggtgatagggtagagttctccgcggccgcagacaatggactcattgacgcgggcgcacagagattaggtgcccgggccccacggcctttcactctctgcccccaccaaaactgcaggtggcacttttccctgaagaaatcaccgaaactctccccgcccgccgccgtgc

SEQ ID NO: 9253 - DNA, 205 bp, Homo sapiens
  chr13:28493987-28494192
  hyper
caaaagcaggtgctcgcgggtacctgggcctagcctcttagtgcggccagccaggccaatcacggcccccggctgaaccacgtggggccccgcggagcctatggtgcggcggccggcccgccggtccgcgctggctgtgggttccctctgagatcagtgcggagctgtcaaagcgagcaggggtggcgccgggagtgggaacgcc

SEQ ID NO: 9254 - DNA, 1827 bp, Homo sapiens
  chr13:28527189-28529016
  hyper
gctttggaaccagcgcggcttctgtgtggcagctactgagtgcacgctcgacctttgccaccctccgcgctgatggaaactggaggaggatgtggtttagacacaatgtggcccaagcgtccttgtttcctgaatataccccaaagtacaagtcccatctccagttttgaaagaattccccgaggaaaggggcttgagtggagtgggtggaggtgagaggggaagatgaggtgttggagaagcccggcgcacggggcctctattaatattaacttttattaagagttggcctttccccggggcttcacaaagcaggaagtcaagggcagtggaacagggaagggaactggcaggaagagaagaccttgagtaaattatttagctgtgacacgagattaagagtgaccccaccctcctccctgccccacacaccataaagtgggcccaggttggggagcagcgctccagctgccactaatcatggaagcccagaggcgaaatcagcttcccggggacccagaaaattgctggagtctggcgaggggcaaatcaggaagtgtctttgtcggagatgggacggaacccggcttcggggcgcaaccgggctctgggggagaccgcgtttgtccaggtggcaggccgcgccttctgatggctgtgaagagaaggagcgggggttttaagagccacagcgccaccgagagagtggaaaggagtagattagctcgcgcctgctatgcgaggcgactccccccgagacccacccgcagcccagcgcccttggccaggaggcccggaaagccaccgaggcggccgaaaggggccgcggggcacccctcagcccctcctgcggcggctccggctgcccctgctcagcctcccgctccccgcccggagtcccagctctcagatcggccgcagagctgggaacagaggccgcggggtccaggccgttccgcccgctcagccggagcagcagcgccgcctgccgggggcctcgcgcaggcgagacaggccagacgccggaggccgcgggcggctgcagctttgacgggccgaacacaccagcgctcccgttccgccttttgaaaatcaaatcccttgggcctggtgccaccatcgctcagcccaggtcttcgacgacgggtcgaaggccagtgctccaggccttcttcaccgagtggcttcggcgcttgcggcccaggttccccgcacctccgcgccgtagttgcgcgcaccttttgaaaagcttggcgtcttcaggtataaggacaaaaacaaccgcggacatcacaccattccaaagaagaaaaagaaagtgcccggaatctcagggcgcgacttccggggcgacgggcggcggcggagaggcgctccccgggcttcctacccggcaggaggccgcggcgccgggacctcgcctgccctcaccgcgcgccacctctcgggagacgccgcgaatctctccagggaatcccgggcagcggcgcagacccagcaaggaccggcagcaggccgagaccggccgtcttgggcgagagcagcgggacacgagcccccgggcgcccgctgggagcgcggggaggctctgggctcagggaagctgcgctccgagtggccttggaggacggtcaaggagcccgggccccgcggcggccgggagtggacgcgactggtccgcgccggccgcaggggaaggggcgggtcggcgctgcctgagctctatctgctctaatggctggggtagatccgcggagatacttgaataccaggccgaacgcttccccaaggcgtgttgtagacaacgggcccatttgagcatgtgca

SEQ ID NO: 9255 - DNA, 30 bp, Homo sapiens
  chr13:28535544-28535574
  hyper
aaagttcagctcggcggcctccaggatcaa

SEQ ID NO: 9256 - DNA, 644 bp, Homo sapiens
  chr13:28540455-28541099
  hyper
tatgaaagtaaagggaactaacgcgactttctccgcggtggacgctcggacacgcgtgaccgcctcaaacccactccaggctgccattggtactcgcccctttttacagatgaggaaatggagaatcagaccgggtcacgcagatagtatcaggcggggttggcaccggagcctggctggagccacagaggacacctccggagctgaggcgcagggcagttccctcagccgaacaccccgggagggagactcgcctggaagtgtctcggagcgacccttgctcgggtgctgccccttcagtgtcccggacgtgccgggcaacgcgatgaccagaccctgagcgctcttcgacccatgccccaagggccttggaggcgccccacaccccctgggaacctaggagcggggctatggaggggagggatgagagggacttgtcagaattcattattgactgcgaaagtcaccaccctctttccgggccctaaaagagacaatggcagggctgggaaggtgtatatcaaagcaagccaggccgcgtccccccctccacccccacaccttgacagatgacgctccgcagaggagcccggctccggcccgcgggctgcggccaccccacattaacatcacaagggcacccg

SEQ ID NO: 9257 - DNA, 120 bp, Homo sapiens
  chr13:28541179-28541299
  hyper
cggcttccctcccgcccccttcccggccctcaccccgcggccgctctcccgggacacgcaaaggtcttccttagggcgtgcgccacccccgccaaccgcgccccagacaggggctgtaga

SEQ ID NO: 9258 - DNA, 1263 bp, Homo sapiens
  chr13:28542272-28543535
  hyper
cgcgattctgccggcgtccagcagtgctcacgccgacattccccggagcttcccgaaggtgtcccggggttgcgaatgaggagctcttggaaagaggacgcctgaacacggtgttgagactcagaatattcactcccaggctcagtaggtcagagaagccccgacgggccagaggcccccgaatttgtctccgggccgtgcccctcctggcgccgagctcccagacagcccgggacgcccctgtgcgcactggacgcgcgacgcgcagcagccactggctcgacccgcgccttcccaagcaccctccgaaggggcgcagcctctgcttaccttggctgccgagggactgctgcgccggcttccgcatccactcgcacaggttccgccgctggccgccgggagacagctgctcggcggcagcggtggcggcgggcccaggagggccggggttgagcgtttgcagcagcccagaagcgcaggaaggcgcggcggccgggtggtgcgggtggtgatgcgggtggtggtgcggatggtagtctgcggggctgctgtagcccatggctgcggccggggagccaccgttgaggccgtgagccacggcgttggcggcggccgcggcgcctccgggcgcgtagccattccagtcctcccggagtggggcgccatacgctgccggccaggatggccccggggactgcgcgctgtccaagttcgctgccgctgcagctgcggccgccacgtggtaaccgccgtagtccgggtactgcggggggctgacgaagttctgcggcgccaggttgaggccgccagagtggcgcacggagctagggtacatgctcacgtccttgtccaggaggtagctcacgtacatggtggcgagggtccgggagcagacctcaccatgctgcctggggaccgacgctggaggctgccggggggcacgaagggaaaggggcgaggggactcgaggagcggcgggtggctgcgccccagcccgcggtgctccgctggctcctcgcggctcttctgcctccgaggcggtccctccctctggcctgcctcctccctccctccctttcttccttctttcctcccacctccttcccactaggctgcagaggcggggaagacccgccacaggctggcgtgcggagccccaggccggcggccttccgtgattaacgagtgtttacaagactctattagtaatgacacagacaccaatggttggagacgtcgaggcgcagcgcgcactctacgcac

SEQ ID NO: 9259 - DNA, 81 bp, Homo sapiens
  chr13:28544503-28544584
  hyper
gatctctcttggtttgggaagcgctgcggccaaggggcctagggctggaagtggccgtcttggggaccgaagccgcgcagc

SEQ ID NO: 9260 - DNA, 176 bp, Homo sapiens
  chr13:28544665-28544841
  hyper
cgcgtggagtgggcctgcggccgccgttcacctcctaatacaagcctttgacagcgctgccagattcgggaatgaggatcactgcggcgaggcccggcgggctgggcagcctgactcggcggctttgagcgctctcagaacccgcgggcgctcgcggcactcctggagacctgcac

SEQ ID NO: 9261 - DNA, 30 bp, Homo sapiens
  chr13:28550385-28550415
  hyper
ggagacaccggggtcgtgtctgggagattc

SEQ ID NO: 9262 - DNA, 391 bp, Homo sapiens
  chr13:28551993-28552384
  hyper
aagcagtgagctggataaatccggggcaaagcactaaacaatatggatattttggcaacgcgtgcgcgtgtgggtgggcggacaaaaggactcattactcgtatgattgcctcaattctccacttcctttgtgcacgtgtgtggacgctgttccaggcccgagtccgcctcccgcccaggacgcacagctccgggccgtggcccccgcgcgtccggttgtgcgtcccgggtccctggcccgcgcggcagctacagcttggcggggtctgcgcggaggaggtcggccaggcgcaggctgccgatcttcttcacctcgcccagagcagtgcgcagctcctgcgcggacgggcagagcagccggcgcgccagctcgcgcggcaccgccgtccgg

SEQ ID NO: 9263 - DNA, 334 bp, Homo sapiens
  chr13:28552659-28552993
  hyper
cgcgtaggccgcgcccggcccccctgccccgccccgccccgcccggccccaaagaaggctgcgggagggtgaagtagagtacccaggcggtgatgtcctggcggaacaggggcgcccttggcgcgcccctctaacaagtcctggaccttgcgcttctcggtccccactacattcggtcgggaccaggatccaggggcggggcgggaagtgacacgtttgtcttttgagaccttgggtcaagaagagcggaggagagagagggcggccgctgaggctcggaatttacgactaggtcgggagggagcagagacgcgataaggatcctgagcttttc

SEQ ID NO: 9264 - DNA, 30 bp, Homo sapiens
  chr13:28578210-28578240
  hyper
tgcggagagagtagccccaaatccatctct

SEQ ID NO: 9265 - DNA, 67 bp, Homo sapiens
  chr13:28592625-28592692
  hyper
gaatcactcatgatatctcgagccaatccaaagtcacatatcttcaccactttcccgtgggtgacaa

SEQ ID NO: 9266 - DNA, 30 bp, Homo sapiens
  chr13:28599040-28599070
  hyper
cgagtccgggtgtatctgaacttctcttga

SEQ ID NO: 9267 - DNA, 30 bp, Homo sapiens
  chr13:28602387-28602417
  hyper
tgacatgagtgcctctctttcagagctgtc

SEQ ID NO: 9268 - DNA, 500 bp, Homo sapiens
  chr13:28608022-28608522
  hyper
cctttcagcattttgacggcaacctggattgagactcctgttttgctaattccataagctgttgcgttcatcacttttccaaaagcacctgatcctagtaccttccctgcaaagacaaatggtgagtacgtgcattttaaagattttccaatggaaaagaaatgctgcagaaacatttggcacattccattcttaccaaactctaaattttctcttggaaactcccatttgagatcatattcatattctctgaaatcaacgtagaagtactcattatctgaggagccggtcacctgtaccatctgtagctggctttcatacctaaattgcttcagagatgaaatgatgagtcagttaggaataggcagttctgcagatagaggaaagaataatgaatttttacctttgcttttacctttttgtacttgtgacaaattagcagggttaaaacgacaatgaagaggagacaaacaccaattgttgcatagaatgagatgttg

SEQ ID NO: 9269 - DNA, 30 bp, Homo sapiens
  chr13:28610100-28610130
  hyper
ggtccaagatggtaatgggtatccatccga

SEQ ID NO: 9270 - DNA, 30 bp, Homo sapiens
  chr13:28611397-28611427
  hyper
gtgcttatgattgcaaaacttggatatgct

SEQ ID NO: 9271 - DNA, 30 bp, Homo sapiens
  chr13:28622462-28622492
  hyper
aaggtccacgtacatctgatttgtgggtag

SEQ ID NO: 9272 - DNA, 30 bp, Homo sapiens
  chr13:28623585-28623615
  hyper
tcgtttcttgccactgatgatacaaaagca

SEQ ID NO: 9273 - DNA, 107 bp, Homo sapiens
  chr13:28636039-28636146
  hyper
gagctgtgcttaaagacccagagacaggaaatgttccctggggcgtcgaccagcacttgcagtgtgatggaagcagatacatccacttccacagcggcagcttcgta

SEQ ID NO: 9274 - DNA, 30 bp, Homo sapiens
  chr13:28644712-28644742
  hyper
tttgtaatagtcccaaatatcattgcagaa

SEQ ID NO: 9275 - DNA, 170 bp, Homo sapiens
  chr13:28674056-28674226
  hyper
ggggctggggggtatcgttattgaggatgactcgctctaggggagaacgcggacgcattttcccatcagagttccctccataaatcaaaacctcaaaagaagagttaaagacgacacccaggtgtctacagtatccaagggccgggccaggagaggtccttggccacctg

SEQ ID NO: 9276 - DNA, 470 bp, Homo sapiens
  chr13:28674720-28675190
  hyper
gctgcaggtggctctcttaaggatgcgcgtcaccgaccgcaaattccctcggactggtgcaaagtggaaggggggaggaaccctctccccagaggcagggaccgaggcgggagcggagaggttgggcagagccgagcagccggtgcctggcgcagcgctgcagccgagcccacgtgcccgccgcggtccgcagcctgtgctcggcggcccccggggctccccgactgcggcggggaagattgggcgcggtcccgccggagaagttgcactggctccgcggctctgccgccttgctgcccctgtgagtccccgaactctgtcgtttggatccggggcgtggggactgcagggagccacaaaccaccctcctagtgcgctgggatctttgaggccctgagaaaggcgctgaatccgctcggcacgctggcaactcccgccagcgcacaggcgagcattccattaagaaccat

SEQ ID NO: 9277 - DNA, 1002 bp, Homo sapiens
  chr13:29067983-29068985
  hyper
ggctgacttaggtggcgggcggacctcatcgattcctcaaaccacatcgtttggtcaaaatcgcccgccctctcttcgctcggattttaaaggctaggcttgtaagtcagtaagttaacggtatttgggccctgggctgcccttgtgggtcagggtcactgatgtccgcgacacggactggaccgcgcaccacgcctgctcccggcagaggccccacccgggtggctgagcgcagcgcactggggccccgcggtccgagagcggcggggaggagcgggcgctcgccgagcgttccccgggacagtccggcttggggactcaagcgggtcatgggatgccggcgctggccctctcctgagatcctcctgctcccccgcaggcacgagtcccctccaaatcggctcccctcctacactctcgtgacgcgaggtcgcggccagtgcccaatatcaccaaagtcccggcctcagcccagccccgggcagcctggcaggctttcaggagcctctgctcccggctccgggggaccctgcgtacctgccccaggtcctctgggaatgggctctgggtgccaggcaggtcccggtgcgtgctgctcctagtgcccagggcctcggcagtgagaccccaacccgacagctggataagggatcagcgatcctgtcgcaaacggacagccccagcgcggacccggtctgagcgctgatgctcgcgggtccaggccagccactcctcgaggcgctccctcggagaaagggcgcagcggccccaagcgtgcccgctgcaactagtgtcccaggttctcgccgtagccagcttctccgggctacagcctcgtctccccgcgtgcaccccgccctggcctcggaggctctgccctccggccgccccatcgcagcccgcctcaggccccggcccccagccgcgcctcacctgtgagaagcagacagctgagcagcgcgcacagcaggaccccggtgtcccagtagctgaccatggtga

SEQ ID NO: 9278 - DNA, 916 bp, Homo sapiens
  chr13:29068993-29069909
  hyper
cggcctgctcgcccggtgcccgcgctccccgcggccaacgacccggccgccagagtccgtcctctcgttcgccgccgccggccccgcgccctgagcgcccgtctcgcggctccagccaggagacaaccacttccccgggtaatcctcgccgccaggcgcccgctggccgctgcacccgagccccggagcccgctccgagccgccgccgctgccggggaggagccgagaggagtgtccgcctggcgcgctccgagcctcccgcggacctcgatgaagagcagccgagggcgggggcgatttataacctttccccagcccacttcctaccccggcacctccttctggtgacgtcaaggggtcccccacccctcatccgcctccccacctaccctcttcttcctcccaggctcgcttccctgcggctacggagaggggcgggggccgacgagggcgggtggcccggggccgagcgcgcgtggggaggtgctggcgacgcgggcccgggagcgcggccccggcaggttcagggtctttgctccgcgccctcttgcccttgcccctcctcctgcccatcgcgctcaggaaatccttgcagactccctccacccggcttactcagctctgggggccgcccgaaactggggaagggacaaggctgaagctccgccgcctggccctaggggcggaaagtccgatccaagggaagctggccgcgcctccgcgacggtgttcttggcacggaggactgaggcgcagtccggctgtctccccttgcctgctcttcccgcgctgtcccgccgctcctgaccccttcagactgtcccgagaagtctaggaaggcaccggagaccctcggcacaaggcactgaacctggagcgcctgaggggaactgacgcttgcttggcacctttggga

SEQ ID NO: 9279 - DNA, 456 bp, Homo sapiens
  chr13:29106358-29106814
  hyper
tactcgaaagtgccacgcctctcgtccaccctgcgccgcgtccagtccacccccttcatcccgcgccccatgtccacccgcccgctgtccaccctgcgccccatgtccatgcgccccctgtccacccgctcactgtccaacccgcgccccatgtccacccgcctgctgcccaccccgcgcccccagtgcacccgcccagccccgagcgcccgcggagccgagtggagagcagcggccgcagcgcggcgccaggctcgggctgggctggccggcgcgaacccccgggggcgtctgggcggccaggccgggtggcggctgcgcacgtaggagtaccccctgagcccagccgctcggccggcctgacccgcgggtgaccggatacgagtaacgcgtgcgccccgatctgtgccctgcgcggggtcgggcggggaccggccgggggcgccgcgcgcccgg

SEQ ID NO: 9280 - DNA, 165 bp, Homo sapiens
  chr13:29106898-29107063
  hyper
cgccctgaggtcagggccggggcctgaggacacggcgctgggctccgggggacgcgggttcacgccggcgcccgagcgccacctccccgccctccgccggctcacgtagtcccggggttcggtacgtgaagtgccggcgcgaggctgctcaggccaccgcatggg

SEQ ID NO: 9281 - DNA, 57 bp, Homo sapiens
  chr13:29107252-29107309
  hyper
cggagaaaatcagatgcagtctccttccctttggtgactatccgtgggggtttctcc

SEQ ID NO: 9282 - DNA, 30 bp, Homo sapiens
  chr13:29233061-29233091
  hyper
cctcaggcacgtctcgtcccgacccctccc

SEQ ID NO: 9283 - DNA, 30 bp, Homo sapiens
  chr13:29283831-29283861
  hyper
tatatgacttggactttcttgctggcccga

SEQ ID NO: 9284 - DNA, 1128 bp, Homo sapiens
  chr13:29292470-29293598
  hyper
gtatattgccaactgatttttcgtaagttcaacaatgaggttccttttgggaagcgacagttgcacaattgttattgttattttgctgcgtattaaaaacggacagggagggggcgttttaaaaagcagctcccaatcgaaagggccttatttttaactcaccccacgattacagtcttcctgccaggctgggtacaggtcgggccgtgccaggggctgtcgcctcggatgccctgcgctcgtgcgcgcccgggttcaagggcagcctctggactggggcaacagaggacgcgccggggacagtaacctcggactacgcggccggcgctggggtggggagagtactttcccgtcgaactcgaccaaattacgcttgtcggggagtctcaagcgtattgtaaagcaaacctcggcaagcgcacttccgcgtcccgagtgacacctgcagggttctccggcagccctcggcttccccgcggccctgcggacctcggcctcagcgcggcgcggcggggcgcggagcagctgctccttctgcgcagtggacaatcggccaatcggcgcctccgtcggtcggtcagcggccctgccagcgctaggcgatgactcggccgcagccagctgagcatcgctgtccgccgaggaggcggggtcggctgccgcggcgctgtcactgttctacccggctctcctgcgattgggcccagcggtcggtgccccagcggcgattggtccacccggacgtcactctcccctggagagtggctagtggatcgtgcacccaccctcggaggcccggagtggatcccgcgcgaccgagcagccactcagcaccgctgttgagtggtgggccgcgccgcaggctcaacagctctggagttgcaaagcatttctgaatccgaatatcctttctcatagaaacacataaaacaacagttggaaaagtaacatgtttgggctgtagcccccagcaggatcccggtcggcccgcagaagaggggaatgggcgcaggtggagggcataggaaagagagtgctcaatgcagagttagcggagggttggaatgtggtcgctggcttttcctggggaggggaggggggacttgggcaaatcgttaaattttcatg

SEQ ID NO: 9285 - DNA, 166 bp, Homo sapiens
  chr13:29394546-29394712
  hyper
cggctctcagggcaagtttatctccccccttctgcggaaacccttgaccgcttagcggagtacagacctgtcggtaaatagaaaactcgagctggagaggaggaggaagcagcgtggcggaacccggcccgagatgagcgtctccgtgagggcagtggtggcctct

SEQ ID NO: 9286 - DNA, 328 bp, Homo sapiens
  chr13:30982477-30982805
  hyper
tgcaaaggagaagcgcgtgcagtcccggcgcggcccgctctgctcagttctccagggcgggccttggcctggactgcgtgtcgggaggactcgcgggccccgcattgccgcatgccaccggcaggtgtctctttcctggcttgggaacctattgtgagttcaccaaatggaggcgcgaggaggagggggcgggcaggggaggggcgccgagagccggagcgggcaccgccccctgcctgcccgctccccgagcgcaccgcggcccagccacgaggctgccggtcctcacctttgaaacgccggcagctgcgcgcgctgcggcaggcgc

SEQ ID NO: 9287 - DNA, 19 bp, Homo sapiens
  chr13:31019964-31019983
  hyper
cagctggctggcttcccgg

SEQ ID NO: 9288 - DNA, 223 bp, Homo sapiens
  chr13:32605101-32605324
  hyper
aaaaatgcagataccaccatgcgtgtggaaggcagggaagaaaaagcccagacaagcgtcctcttgttgagtctctttactgcaacgaggctgacggatggggtttttcaaaacgtcgctgcaaccagatgcaaggctgcagctttgcttaccgcagcgtgctgcagttgtgtttatttcagggacagacacaaggggaagcagcagccagagcacacccggg

SEQ ID NO: 9289 - DNA, 181 bp, Homo sapiens
  chr13:32605442-32605623
  hyper
cggcgctcccggcccatcccttagccccgcggcggccgtgtgggccggaggctgcctgcaccgcgtcagggaggccggcctagaaaccctccctcccagaagaaagccgatcccagttcaggtggggtcttcctcggttgcgtacctggctggagccgagctggtgggcggccggcagccg

SEQ ID NO: 9290 - DNA, 299 bp, Homo sapiens
  chr13:32605674-32605973
  hyper
cgagggctgcagggagatcagcgtccagcaaataagaagcaagtcctggacccggaggaggaggagcggccgagcatctctctctgctccgccgtgtcctttagatgagcactcccggccggagccggaggtggatccgcagagctgcctctgggcgcctgaccccgcgctgacatcacaacctgtgacaggcgcatcacgcccggtacctgctcccggccgctgcccgtcctcccagcctctttgtatgccgcagacatggccagccagcaggattcgggcttctttgagatcagtat

SEQ ID NO: 9291 - DNA, 31 bp, Homo sapiens
  chr13:33162267-33162298
  hyper
acatgtctgagatgttcgcatctttagggac

SEQ ID NO: 9292 - DNA, 382 bp, Homo sapiens
  chr13:33591066-33591448
  hyper
cgtccccaaccgcgaggggctgcgctactaccggcgcctgctggagcggctgcgggagctgggcgtgcagcccgtggtcaccctgtaccactgggacctgccccagcgcctgcaggacgcctacggcggctgggccaaccgcgccctggccgaccacttcagggattacgcggagctctgcttccgccacttcggcggtcaggtcaagtactggatcaccatcgacaacccctacgtggtggcctggcacggctacgccaccgggcgcctggcccccggcatccggggcagcccgcggctcgggtacctggtggcgcacaacctcctcctggtgagtgcgaggggccaggcggagggccacgcaggggagacagagggcctc

SEQ ID NO: 9293 - DNA, 408 bp, Homo sapiens
  chr13:33924393-33924801
  hyper
ccccgtgggtcgcggcgtctccggggcactgacctgccagccgcctctcccggacgttcttccacagcagatcccaggctctggccgtggagtcccgcaactgctcactgatggatctcctgagctgcgtttggcaaggtttccgtttgctggtcattttagatccgtcctcataacgaccggcgggctctccaccgccactcccgcgtggcccgcgactcagactcccggcgactggaaaggacggacgcggcactcccgccggggtcccgggacccaatgcgggcgcgacatgggtcggtccggcgctgggaggctgcgccacgcgcgaggaccgggatgcctggccaccagaaacgccgcgctaggttattaacctctgcgctcgccaactcctctactcctttc

SEQ ID NO: 9294 - DNA, 30 bp, Homo sapiens
  chr13:35517139-35517169
  hyper
taacccttcggtgccgatccgcaacatccg

SEQ ID NO: 9295 - DNA, 16 bp, Homo sapiens
  chr13:35517409-35517425
  hyper
cgcgctgctagagcca

SEQ ID NO: 9296 - DNA, 30 bp, Homo sapiens
  chr13:36704694-36704724
  hyper
acatgaggcagcctcgctgtccctgaagga

SEQ ID NO: 9297 - DNA, 116 bp, Homo sapiens
  chr13:36704940-36705056
  hyper
atctccactaacaacgcgaaaagcctgggagggcccgctcgcctgactccaggtttaaagccccatggcaccaaacaaaagaggcaggtgccagcagccccggggccgcccgcacg

SEQ ID NO: 9298 - DNA, 16 bp, Homo sapiens
  chr13:36705621-36705637
  hyper
cgcccttcttggcagg

SEQ ID NO: 9299 - DNA, 333 bp, Homo sapiens
  chr13:36919890-36920223
  hyper
taaccgcagttgttcgtgggccttcttgcagagaaaggctgcccaaccttgacggggccatgggcgctgcgggagggcaaaagaccacagagatctgcgaagccaaagtaaacaacggggttggggcggcgagaatgatcaatagcgatgctccgaaaggactccgcgataggaatcgagcgggaaggattccctccatcctaacagtccatgggttaagaggccgaagcttccctaaataccacactcccgcgagagaagggactgagaacaacttctcaaactattctctctcgaaatcgctcccttcctcgaaaattccatctctgagac

SEQ ID NO: 9300 - DNA, 120 bp, Homo sapiens
  chr13:36920266-36920386
  hyper
cgcccgctcagcctcccagccgagtccgcggggcctggggcgcccaccccgcccacccaagggaccgcgcaggggtgaactcccccgcgccccacctgcgccttccagacctcgggcgcc

SEQ ID NO: 9301 - DNA, 560 bp, Homo sapiens
  chr13:36920464-36921024
  hyper
cgctcgccgggggccggtcccgaggttcccaaggcctcgcgcgcgcgcttgccgtggcaaccaagacgttccacgacgcgcgctctcgaacgcttcgcgtcacgcggccgcgcggccccgcccgtcggcctcgctcccgccacagagcccgcagcacgccgccgccgcagcctaggtcacgtgagtacccacgcgcgcgtcttgccagcggattcatcaccggcctgctcagactaggttctgcccactctgaccttctaaatggtacgtgggaggacgtccgtccccttcggacccaagagtcaccgtaacactctagaaggggagaaaaggagcgagggcggcaggcgacagagaacctcgcgagtcagcggccccgcgcagacccccccaggcacggtcccctgcggccacgtcggctgctcggcgcctgcgcaatctctttctctccagcgaaaccgaggcctccggagagcctagtagagagtgtgggcagtgagcgcttgtagccgctagagggagcgctgggcacagtgcacgagagacaataaaggctgatt

SEQ ID NO: 9302 - DNA, 34 bp, Homo sapiens
  chr13:37004838-37004872
  hyper
caggtgggggagggcgcccgggaagatatccaat

SEQ ID NO: 9303 - DNA, 150 bp, Homo sapiens
  chr13:37005430-37005580
  hyper
tatttttaaaaaaataaagttcgattatttcacctggcttgtcagtcacctatgcaggcgtctgagcccccgggtttccaggagccccccgtataaggaccccagggactcctctccccacgcggccgggccgcccgcccggcccccagc

SEQ ID NO: 9304 - DNA, 163 bp, Homo sapiens
  chr13:37005899-37006062
  hyper
ggcaggaagcgtaggtgtgtgagccgacccggagcgagccgcgccctcgggccagcgtgggcagggcgccgcagcctgcgcagccccgaggaccccgcgtcgctctcccgagccagggttctcaggagcgggccgcgcaggagacgttagagggggttgttag

SEQ ID NO: 9305 - DNA, 224 bp, Homo sapiens
  chr13:37006433-37006657
  hyper
cgcatcgctaagcccggccgcctcccaggctggaatccctcgacacttggtccttcccgccccgcccttccgtgccctgcccttccctgcccttccccgccctgccccgcccggcccggcccggccctgcccaaccctgccccgccctgccccgcccagccggccacctcttaaccgcgatcctccagtgcacttgccagttgttccggacacatagaaagata

SEQ ID NO: 9306 - DNA, 30 bp, Homo sapiens
  chr13:37248408-37248438
  hyper
tcgggtcctggaggcgagccgcctcccaga

SEQ ID NO: 9307 - DNA, 254 bp, Homo sapiens
  chr13:37393237-37393491
  hyper
gccgcggccgcacatgcgcagtcagtcccgttggttgtgcgctcagccccgcccccagaggcgccgcgctccctgacagcccgcgggcgtacacacgctgacgcgcaggctgcggtcgcgcaggcgcagtcggggcgccttcccggtataggcgccttttaccccagcgtgtcctgagtctttggttcgcgaagtgccgttaggccaagcaggtgctaaaagcccggggtcgtggaccccggccaggtcttagc

SEQ ID NO: 9308 - DNA, 662 bp, Homo sapiens
  chr13:39261087-39261749
  hyper
ttactacccaaccctcagctccgcacctcctcccccgaccaacgattggccacctgggaggactggagtaaggggtgcgagcggagggatttccctcaaagcccagggtccggggacctggaaagtagaagtggagggattcaattctccgcgcgattgaggcgctagcggcggagctggacggcctgggaaggcttcggctcctcggctgcggctccagcccggacggcgccgcgcaactttgccatccttctggcccagccccggctacaggaggaccccgcgggcaacgcgcggagttcctggcacttcccggcggtgtctcttgttgtctgcccggggaccgacttcgcatgctctcaggctgacctgtccaagcccgaacaccgggaccatgcactcagccgggactcccgggttatcctcgcgccggacaggcaactccaccagctttcaaccaggaccgccaccgccgccccggctgctgctgctgctgctgcttctcctgtcactggtaagccgcgtcccggcacagcccgctgccttcggcagggcgttgctgtcccctggtctcgcgggggctgcaggggtccctgctgaggaggccatagtgctggcgaaccgcggactccgggtgcctttcggccgtgaagtctggctgg

SEQ ID NO: 9309 - DNA, 30 bp, Homo sapiens
  chr13:39610563-39610593
  hyper
gaaagaataattgcccggaaggccgaagga

SEQ ID NO: 9310 - DNA, 346 bp, Homo sapiens
  chr13:39610816-39611162
  hyper
gccaattcctaagaacgtgactttaaacttaatgccacacttaccatcaggacacgaattttgcatggccaacgcaacaaatatactctaccttatgcttagatttgaaaaccccatcataataactaccataaaagaaactttctgcgtattacctctcgttttcagtcactcttgtgttactgaaagatgaggcaataaactcaaaaatattaaaccccttacccaaaaagtacagagctattacggatttgtaaagccggctttggaaccgagggctttacaaatgtaattcccacgacaccgtgctgagtctcaaatttggcgttaacgtaacttaatttct

SEQ ID NO: 9311 - DNA, 34 bp, Homo sapiens
  chr13:39612008-39612042
  hyper
gcttccgggagcgggccggcggctggggagcacc

SEQ ID NO: 9312 - DNA, 30 bp, Homo sapiens
  chr13:41345331-41345361
  hyper
cgtccccgccctctcttccgcttccggcct

SEQ ID NO: 9313 - DNA, 158 bp, Homo sapiens
  chr13:41364042-41364200
  hyper
ttggctgcggggctccgcgcctcaggggcgccagtgctgggcagcatggagccgcttgtgaatggagacttgctggctgcccaggagtgggcggctgggcaggggcggtgaacgtttagggtccggccaagaaagttggaagtcgtctccctgacctg

SEQ ID NO: 9314 - DNA, 30 bp, Homo sapiens
  chr13:41635845-41635875
  hyper
ttgtttctctgggccgccctttctcgcccg

SEQ ID NO: 9315 - DNA, 30 bp, Homo sapiens
  chr13:41706961-41706991
  hyper
cccaggttgcctttcgcgccccgagggctg

SEQ ID NO: 9316 - DNA, 57 bp, Homo sapiens
  chr13:42615948-42616005
  hyper
tctgaaaagccccgtccgaaatttctggcctcacccatgttccggtcaacgtgttcg

SEQ ID NO: 9317 - DNA, 160 bp, Homo sapiens
  chr13:42621977-42622137
  hyper
ttagacacttcttgtgcgttctgtcgtcttgggctgcgtgtagtctcttgtttctgcgctttctccacgcccttcccagtttcctgttagccgaaggggatcgctctttctgaacgaaaagttctcagagcggagctgaacctcccggaaaatgctcttc

SEQ ID NO: 9318 - DNA, 30 bp, Homo sapiens
  chr13:43148669-43148699
  hyper
ccttcccaggggatcgcggctgagagcgcc

SEQ ID NO: 9319 - DNA, 158 bp, Homo sapiens
  chr13:43149028-43149186
  hyper
tcaacttctgttcacgtaggaaaaaagatgagcgccttcacttgggcatctacctttcccttcccgcccaccacccggcgggtttcggttcctgcgcctggctgctctgcaggtgtgctggggccacggtgctggagggctgcgcggagcgggaggtc

SEQ ID NO: 9320 - DNA, 598 bp, Homo sapiens
  chr13:43566053-43566651
  hyper
tgagtgagtatgtttggggcccgggctcccgccccgaagccaggttgttaaaatactcaccgcctctggcccgcgtgcacgacgctctcccgcgaagggcccttaggggctgcctccaaaccctctctctggtcttccacggggctcagctccccttgccgcccagaagggtcctggggatcccgggtcgggcgggaggcaggggaggcgccgagcccggagttcaccactctattgcgggtgttcatggttcacagcccgcgggtcccgggccgccgtcgctgcgggagggatgcggctgggacgcttagcgagtctcaagatgggattccaaagtgcagaggcagcggttttaacagctgagtttcggtttctcagaatcagcagcagactgcgcccgccccagagaacttccccacgtattctccactgaggccccgtccgaccttatcgcgggttaacagcccaggatgttgacttgagctggcttggtcggctacaggtgagacggtttaaagtctcacaatcaccttagaggttaatcagaataactgggatcagccacggacacctggtgagcgattagcccgcagagtga

SEQ ID NO: 9321 - DNA, 92 bp, Homo sapiens
  chr13:44359887-44359979
  hyper
gaaccaccccccttccgaaagagggcggggttacgccttcagccaatcaggacccgcgagccccgggtgtccaacctatggggtggctgtgg

SEQ ID NO: 9322 - DNA, 235 bp, Homo sapiens
  chr13:44360043-44360278
  hyper
cgggtccggagaggcggggaggcggccggcgtccagcggccgaggcgcgggctctgcaccctggcagcggccgagtccggctgccccagtgcctcctttacctcgcgttgggccaggcagggcgcgctcccgccgacgaagacctgtccaaggtgtccgagctccccgcgagaggggacagtcacgaataacaacagtacccagcgcagactaggcggggaggaaagtttccggc

SEQ ID NO: 9323 - DNA, 326 bp, Homo sapiens
  chr13:44360467-44360793
  hyper
cgcggagcccggagctgacactggctggcgggcggaggggagagcggggaacagctgtctggggcgctgggcacccccgggcgcgtaaaagtgagggagcttgagacggggcacggcggggaagggcgtgggggctgcaccgaagcccccacgcgtccacgcacccctcctcaccagcctcacctctagctccactcccctcccccctcgcccactcccctctcagtctagatccaggtgccgtggcgggggtgagaccagaggaccccggctcggagcccggacgccccagggaggctgcgggccccggagctgcttacctgggg

SEQ ID NO: 9324 - DNA, 657 bp, Homo sapiens
  chr13:44360995-44361652
  hyper
cggctggaagcctgtgtgagtagcggcgcccgggagagcggggatctgctgaggggcgctggagactccgcggctggaggcgcgcgggcgtgcgcacgcgcgcctgcgagtgtgagtgtatgggtgcgcgcgcgcccacggggtgggggagtcgcgaggggagggggagagaggccgagagatgctcgtagggaccgaggcaaaattctacgaccccggaaatccgtaaacgcggggaaggaggatcgaacgcgtgtctcgcttggagaagctgcccacggggcggcagcagaggaggaggggaagtcagcgaggcgcgctagggctccggatcccagcccggcagagccgagcggagcgcgcagccaccgatgcagcagaggcggcgcccgcagcccacggtcgcgctgccccctctcgggaggggccgaggccgctcgctcccgccaccgccgccgcggtcgggactgctctactgggagcgggggaaccgagagagggaccgcacggttgctacggcgaccttggaggggccgggcccgctgaagggccaagagaagaacccgggcgcacgtggccgactccaggctggagcgggcgtgttacaggattgtgggcttggggtagacggtggaattgggccgcgtggcctgggca

SEQ ID NO: 9325 - DNA, 30 bp, Homo sapiens
  chr13:44453344-44453374
  hyper
cccctcacggtgcccgccgttcccgccgcc

SEQ ID NO: 9326 - DNA, 553 bp, Homo sapiens
  chr13:44947823-44948376
  hyper
ctgcgcgctgcgctccggccgctcggcgcgggaggacgtgcggtcgcgcctgcctcggtggccgcgcggggtaggtggctgcggggaccggaaggatggcgaggaagtcggaaagggtttcctgagatgagagattacttccgtccgggctgcggcctctctctggagtcggctagccggggctcggggagcggggtgcgcagggctcggggccacgccttgccacctgcagcgcccgggtgggccgcgggggcctcggcgggacgcgctcggccctgtcgcaggagctaacgcagggggaatccttgcaggtgggagcatttcagagcgcacaagccatggtggccaaacagcggatccggatggctaacgagaagcacagcaaaaacatcacccagagggggaacgtagccaaaaccctggtaaggcggggtcggcgccggccaggcagagccctgcagcccggcggggtggggcggaaggtgggggcggggccgggcgggtagcggcgcagggtccggcctcccggctcccggcccgccccttctgcggg

SEQ ID NO: 9327 - DNA, 58 bp, Homo sapiens
  chr13:45009737-45009795
  hyper
ggacccgtttgtgcaccgtctagaagacccttatccaggatcccgacttctggggccc

SEQ ID NO: 9328 - DNA, 31 bp, Homo sapiens
  chr13:45149890-45149921
  hyper
tttttcatttgagttccgcctggcgcaagag

SEQ ID NO: 9329 - DNA, 104 bp, Homo sapiens
  chr13:45150766-45150870
  hyper
cggccctccccccgcgccccgcagaccctttcaaaccccctgggctcgcggcggctgctcggtgaggaaacgctggccgcggctggggccggggcgacgcggct

SEQ ID NO: 9330 - DNA, 30 bp, Homo sapiens
  chr13:45915195-45915225
  hyper
gataatcatgatggcgactgaagggagacg

SEQ ID NO: 9331 - DNA, 27 bp, Homo sapiens
  chr13:45991118-45991145
  hyper
gttcgtacttttgaacgctttccaagt

SEQ ID NO: 9332 - DNA, 5 bp, Homo sapiens
  chr13:45991444-45991449
  hyper
cgttt

SEQ ID NO: 9333 - DNA, 30 bp, Homo sapiens
  chr13:46189868-46189898
  hyper
tttgtggcagctctcggttaccatgggaac

SEQ ID NO: 9334 - DNA, 159 bp, Homo sapiens
  chr13:46425364-46425523
  hyper
caggttgacagcgtcggggaaagacatcagaccatcaatccagcttttcctgccagctggggaaacaacactcggtcactaacagcacccaatcacctagagagcgagagtgagccgaggcaaacacgccgggttccagacaccgtcccagcccccgag

SEQ ID NO: 9335 - DNA, 30 bp, Homo sapiens
  chr13:46626731-46626761
  hyper
accaacccgcccgccgcctctccagggtca

SEQ ID NO: 9336 - DNA, 30 bp, Homo sapiens
  chr13:46785408-46785438
  hyper
tctccagagaaacacgcacatttttgcaaa

SEQ ID NO: 9337 - DNA, 522 bp, Homo sapiens
  chr13:46785697-46786219
  hyper
attagccccgggacccggctgcacaaaagtgcagccttaaagaatgccagcccatattctagacacccaagtaaagcatcctgtaatcgagagaaaataataaataatagtggtcattgccattaagcataaaaatagtaataacaattgtcaccacggcgttccgtacagcagctgcgcgtggagccggcttctcctccggcccccacggcccgcagcttcccctgcagccccacagtgcgtcggaggaaggcgagggctccgcgcgcgctgcaccgtgggctgggcctgcccctcccggcgcccgcctcgcctcgcctgtcccgcgcccgcctcgcctgtcccgcccccgcgcctgcgcgtcaagtggctgggctggcttagcggaccccggttgctagggtgtgtctccttggcctcctagagggtggggatccgtggtgcttcttcgggaacagcctcctgcaggaagaccctcgctggacctttacctcgctgcctagattccgaggaaaaggagat

SEQ ID NO: 9338 - DNA, 753 bp, Homo sapiens
  chr13:46960937-46961690
  hyper
gtagtctctgagaatcgccctgcgtaaaagtgtcctgaggtcccgcttctgcgcccttcccggcccaagccgaacacagggtcaacctcactctacaaagtcaaccggatagaaatccgccaccccgcgaggagccccttcctactgtctccaaggggtccccgacactgctctgagcgaccctaagatacctgggtgtctctgctgggcacaaacctctctggcgccacttccaccatccaacctctcccgcggccctcccttccctttctccaaccaccctctccaccccgcgccgctcccatctcgcccccggccccgccagcctcacccagccaaacccgagcggtggaacgctgcgctgggtaaacgccgcgcgtcgggtcctccctcgcgcggctccgggcagcgttccgtggccaccgcgctcccggtaacagcagaaaggggagggaggagagctaccgaggaggggacagcgacgccccgacgccgccacgccccccgcctcccacacgggggccaccgtagctctctagaagctcctcagggaagcaaagcgccgttcccgccgcaggcaccgagacgtcgcccagatggaagaaactctggagatgcgcgctcctacaccggtgccgcggcgcccgggcccagcaccacgcacctatgcgcgcctctgccggtcctcctagaaatcccgccctgcctacccgcggcgcgagacgcaacgacgctttcaggggtcaaagacct

SEQ ID NO: 9339 - DNA, 30 bp, Homo sapiens
  chr13:49821935-49821965
  hyper
ctcggtgcttaactcggtcaccggccgagg

SEQ ID NO: 9340 - DNA, 301 bp, Homo sapiens
  chr13:50070356-50070657
  hyper
tagacgccggggcggcgctggacgaacttggctcaccactcgcgtgcctgttggtgggggagggggccagaggacagggcgcggcccaggccagttccacaggtggctctgactgcccatggtttcgcgcgagtggtgggcacgcttcggtttacctcccccgcgggtgacagcccagtgcttccaccacaaccgatgtcaactctcctagcgcccctccgctcaccggtaaaccaggacagtggaggggcgccctgatgcggtgaggcagggggcggccctgagggaagagctgggtctc

SEQ ID NO: 9341 - DNA, 49 bp, Homo sapiens
  chr13:50070684-50070733
  hyper
cgtctccccttctccagtcgttccagtcctccccggccctctacttgag

SEQ ID NO: 9342 - DNA, 160 bp, Homo sapiens
  chr13:50265730-50265890
  hyper
gccagagcgaggattccgtgcccgcctcgcaccctggccagcctgctgagtccggtggttttgccaggtgccgcccatggaggttccgtagaaggaacgtgctcaccaacttgcgcaaccgcctcgaccaaacctgttcccaaaccgagcccaaaggatt

SEQ ID NO: 9343 - DNA, 30 bp, Homo sapiens
  chr13:50367045-50367075
  hyper
caggcgcggggcggcggtcgtcaactacag

SEQ ID NO: 9344 - DNA, 210 bp, Homo sapiens
  chr13:50570751-50570961
  hyper
cgctgcccagcctctgcgggggggctttgggcgggcgcaggactctggaagggagaaaagcccgcagcccggccctccccgtcccaggcggcccgcgcgggtggacggcgggagcaggcggcggttggagacgccggaaggaacgcggtctcaccacccggctccctccgccaaggcgaggcgcggccggggaggcgggacacaggcgaa

SEQ ID NO: 9345 - DNA, 501 bp, Homo sapiens
  chr13:50571241-50571742
  hyper
cgcgcggcctttcccactagccggaggtcggagataagtacccgccgcccggctcctctcgggaaagcggggtggtcctcgaaccttcagcgagggtggggagttgcccaggtcagcagggatctgcgtgggttgggggggctggcgaaggccgtctgagctccagtccggcagcgcggcagaaaccagcggggcactgtcatgggcctggggaggagcggcctgcggagggcgccggggcagtgtgtctgtggtccagaaaacctgctccgtccggagccttcctggccccgctaccagcgtctccacatcccctagaaaagaaaagacgggtgtgggccttaggttacagcgcgccgccagcgtttggttgcatggcgccgggggagggcgccctaaccgagaagctgcttaatacaaagagctccaggctcctggcggttcaccaggtctaaacagccgggctttatttgtgggggcgattgaaaaaattgagggtca

SEQ ID NO: 9346 - DNA, 30 bp, Homo sapiens
  chr13:51086820-51086850
  hyper
ctctgcaatttggccgctcctggacttgtt

SEQ ID NO: 9347 - DNA, 30 bp, Homo sapiens
  chr13:51483842-51483872
  hyper
gtgcagccacagagcgcggggccccggcga

SEQ ID NO: 9348 - DNA, 30 bp, Homo sapiens
  chr13:52027306-52027336
  hyper
aaacagctcaggggcgggggaagcttgtag

SEQ ID NO: 9349 - DNA, 31 bp, Homo sapiens
  chr13:52703086-52703117
  hyper
ctttcccccaccctgccgagctcccgaagcc

SEQ ID NO: 9350 - DNA, 13 bp, Homo sapiens
  chr13:52980501-52980514
  hyper
gcggccccggcag

SEQ ID NO: 9351 - DNA, 30 bp, Homo sapiens
  chr13:53029423-53029453
  hyper
tccaggatgaagagcgctgtttaggtttga

SEQ ID NO: 9352 - DNA, 30 bp, Homo sapiens
  chr13:53226635-53226665
  hyper
aacagacatacaaacgcccctaaccgccac

SEQ ID NO: 9353 - DNA, 341 bp, Homo sapiens
  chr13:53312972-53313313
  hyper
ccttcacttgcttttctacaacgttgacctaaggcggaaagccgcgtgccagagtgggatgggagaggggagctcacgctgggcccgaggggcccgccggcagccgcgcgcccctcgccggcccgcgctcgggctccccctaggggcaccatgggcgacacgggggtccccgcgcgccgccctctggacttacgtgactgtcgctccccttccagaagtagaaggccccgatggccccaaagagcagcagcacagctcccgaaatgaggaccacggctcccaccttgagcagccgcgcggggctggagggcttcaccgtcagcgtagcgtacgcctgcggg

SEQ ID NO: 9354 - DNA, 100 bp, Homo sapiens
  chr13:53313512-53313612
  hyper
cgcagcacagggccttcgccccaggacctgcaccctctaccggccacgggacgtccctccgcacccgcctgtggatgccgtgacccctgcacactcatac

SEQ ID NO: 9355 - DNA, 189 bp, Homo sapiens
  chr13:53313677-53313866
  hyper
cggtggcacgcacccctgagtccgaactgtggaacctgatactcacacaacccaggccctgcgtgtggaatccctggcggtactcaccggggggctgcagaattccacgtcatcaggtcccaccagggcaatgggaactttgtcggagttctctgtcatgtttgcggcgggaggagtgaggcacttgga

SEQ ID NO: 9356 - DNA, 144 bp, Homo sapiens
  chr13:53419876-53420020
  hyper
tctcccttcccccagcctgtccgcggagctcggaggggggcgcccagccgaaggaaggcctcacctcggcgtgcgcgccgcggagccgctgctgcccctcgaagtgacaggcgctttccccagtggcgctgccgccctctgagc

SEQ ID NO: 9357 - DNA, 359 bp, Homo sapiens
  chr13:53422533-53422892
  hyper
aaaaggcaggggctgccccaacgcctcacaggactcatgcctccagcctcaagtgcgatccgaaaggctaaggaagtcttctctggtttccaggtcgggcgtcagtctcaggctctcggaatcacgctctttgcgagccctgtgcgggagaagtctgcgggtagcagctccgagcctccagcgggctctgaggacgcgcggacccgccctcactctgcgcctctccgtctcttacagaagctgcgccgcctcgcgccgcctttgcctttatagccgccgatatgctaatcacccgagccgggtagccaatggccgcctccccctcgcgtcgcccctccgcctgcctctgacaatccctt

SEQ ID NO: 9358 - DNA, 160 bp, Homo sapiens
  chr13:53423117-53423277
  hyper
gtggctcctgattccgccttcccccagcccctgccaacacacacactctgcattttgcacctctgacgcttccaaacccttgcagccccctacccacagacttgctctgctgaatgaggctctgctttccttctctcctagctacggtgcctggaatagc

SEQ ID NO: 9359 - DNA, 30 bp, Homo sapiens
  chr13:53424034-53424064
  hyper
atcctggggctggccgggcgctgcgctgcc

SEQ ID NO: 9360 - DNA, 946 bp, Homo sapiens
  chr13:53424834-53425780
  hyper
gggctggctggtgacctttagcgcccctaggctaacgtcatctctcctcacccctcttcccccggagacccagacgggaacaggttcagaacttggctggtggacagcggcctcagcgcttccgctggcgtacccagggcaaggtcaggcccgcctggcgctgctgctgccgggcggaggacccggaaggtggggaaagtgggtggaaatggggccggagtcccaaaggaagggatttcagcggtttccgcgagcacagcccggccgcgaatggctgggacccggacctcgcgccagcgccccctgcgcatctgcaccccgcagttctgggctggactcgggagccccgccacgcgctaagtttgggtttttcgcttggccagagattcggaactacttgcaatttctactcaaagtgcttccgcgtcagcatgctcattctcaaggctgaaataaaccaaggcgtgcttgaaagtgggaaaaggaaaggggagtaggggcaggcaaaagccaggaggcgggaggaggggtgtagggtggctggtagcaggtctaaagtgttttttccgcggccaggccctcgtcgatcggaagtagccacgacggcggcggcgccgggaggctgagagctgggagccggggagcccgggaagggagccgcgagcctccagccgccaccggcgcgcacaggtctttccgtgccggcggtggaggtgtgaaggcacgcgaacaccgtgagctccgggccggcagcggacagccactcgattatggaaatacgatttaaaatagcacatcaacgtccgcagcaactccccgggaaggaaaatatgtccggggaggtggcgctggagaggagtaggggaaagggaggggagctcgcccgcccgggtgctgatcaggcctcacaaaagccgctcgaatcgccttgttatcataccaaaag

SEQ ID NO: 9361 - DNA, 887 bp, Homo sapiens
  chr13:58203565-58204452
  hyper
tacatattgattgctgttgctcgcggcatgttcgtaccagcgcgggcagaaacgggctcacgagcgccctcgaattcacacacactcaccgaaatacacatctcagcccgtggaagcgcattcacacacacccacgtacactcctccgcacctcattcagatgggtccacgcggagtcagggctgcgcttcccttggcatgggcgtgtgtgcggcgagggcgtgtgtgcgtgcgtgtgtgagagtgtgtgtagagaaaccctttaggcagaccgcagctacgttattctgcaagcatactgcgattcccgattccgtgtatgtaggaccacaaaaaaattaaatcgctgttaaacttttttttgtaaattctcttttccgaaggaaggcgctggaagagctactcccggtggttaaaggcccgggagacctggtggcgaatcctggggcgcgtccgctttggcggagcgctgggctccgctagccggactggttccccatctaactgatctaatcaatgactccgaagagccggggctcctggccccgcccccgccatcctcttctccgcctcccattggacgcgggccgagaaggcagggccttgctcctcgctcggattggctgacagggaatcagtatcaatgtttaagcggcggcgtgaggtgaatagagtcagtcagcaagagacgctggggagagagcagggatcgcgagcccggcggatgcggcagcggcggaaggcggctggggagacgctactccaactgttgaattgaattttcacctttcctttcatccgctgctttgcttgcggagatggatttatttgctttgaaatccgcatatctttctcagactgtggggtgatcccggcagacaccagac

SEQ ID NO: 9362 - DNA, 45 bp, Homo sapiens
  chr13:58204954-58204999
  hyper
agagtgaatacgattcgttccgctgcttctgactcatccggcaga

SEQ ID NO: 9363 - DNA, 114 bp, Homo sapiens
  chr13:58205044-58205158
  hyper
cgcctccagaacccgaaataatgtgtagacagacctgtgtctaacatcccctcggagggagctccccggggtaggagcccctggctggaccgccgcggccgcagctctgcaccc

SEQ ID NO: 9364 - DNA, 210 bp, Homo sapiens
  chr13:58205442-58205652
  hyper
ctgtttcccttctagcgagagacagggagagtgtgtgtgcaaggactgggagggaggctcccccttcctttttattcggcctcccccctcctcctttaaatgtgcacgtccaaccatgagttgcctgttgatttcccttcgcctgggaagaaaagcaaactggaattaaactgcttggagagaagtccttgctcgcggggagaggatggg

SEQ ID NO: 9365 - DNA, 295 bp, Homo sapiens
  chr13:58205858-58206153
  hyper
gacactagttctttacgctgcatttcctcccctccctttggctgctcggaaaggagagagaggaaaaaaaaaatacgcttggctggtagatgcagtccgccgccgccgctgcctcagccagcaatgcaagattagatctctaaatgcagcaaaacactgcctgaaaacagaccggcccgcgcagcaagcagacatttcacggtgcgctggggaagcttcaaaatatatctgtgactctgtcttcgttgctcttcatccccatcaatttcatcacgggaggcgagcagcaagtaag

SEQ ID NO: 9366 - DNA, 30 bp, Homo sapiens
  chr13:60970461-60970491
  hyper
gcgcctcttgggcccgcgtacccttccgcc

SEQ ID NO: 9367 - DNA, 4 bp, Homo sapiens
  chr13:61989188-61989192
  hyper
tggg

SEQ ID NO: 9368 - DNA, 30 bp, Homo sapiens
  chr13:61989582-61989612
  hyper
gcctccttccttgccgcaccagtcagatgc

SEQ ID NO: 9369 - DNA, 222 bp, Homo sapiens
  chr13:67804308-67804530
  hyper
tctctgacagctatccgggtgacagttgcccgaaaaattcctaatcggttatctcttgcgtgcttcagagactctgaggcgctcctttccgtctcgcgtgctctccctctctcccttcccctctgcccctctctccttctccctctcctctctctgaactgaatttcttgatataactctcaataagcccagagggagggcgtgactgcccaggccccgccc

SEQ ID NO: 9370 - DNA, 123 bp, Homo sapiens
  chr13:67804644-67804767
  hyper
cggcagcagcgaaaacccggaaatctgatcctggccccaggagagccgggttccatgaggtgcactgagcatgctctgcagggtccggcgtgggagggacgcgctggcgctccccaggcccgg

SEQ ID NO: 9371 - DNA, 422 bp, Homo sapiens
  chr13:67804863-67805285
  hyper
cgcggatccggggaaccagggccaccgctgcgggcggatgggggtcaccgaggcggctcgtctccaggcgcacacttcgcacatctctttgctaagtgaaggggccaaaatgcacagatgggggagtctacccaggaacagaggcgcgagacgtatagccacccctgggttgggagcacgagccagcagatccccggagcgcgttaaacggacaacatgcccggtgctgcaaatagaggcttttgctggcagggacattggaaagaagggcggagagggagtacagcgaaaggtggggaccgcagaatttggaatctctgcggagaccggaaagaaaattaatcggagcacttcctacatgcagagccacggaaactgccttggaaagagaaagtggcagcgtctgggtcccctcggtcagc

SEQ ID NO: 9372 - DNA, 223 bp, Homo sapiens
  chr13:67805379-67805602
  hyper
cgcgcctggaaacctgagcccggactcgcggctgctgcaaaacccgcttccagcccacctcactgcgaactttgcttccgaggggctggaaggagtcccaggcagctgtttcccaagctgtggaacacttcctttcccctaggcactttctgctgattccaactttctttcctgtgattttcgtcttttcccgtgcatttcatttctccgactccagctctgt

SEQ ID NO: 9373 - DNA, 30 bp, Homo sapiens
  chr13:70682112-70682142
  hyper
atcctcgatgcccgcgcgagagccccgtgt

SEQ ID NO: 9374 - DNA, 30 bp, Homo sapiens
  chr13:72966642-72966672
  hyper
tatacaatagcaccctttctggtagctcaa

SEQ ID NO: 9375 - DNA, 1470 bp, Homo sapiens
  chr13:74707124-74708594
  hyper
ggctctgcgggttcccggcccgggtggacgtacaaagttgccccttgtcaactccggccaggtcccccgtaattgaaaataacagccaccggccagcccctggctacttgcatggaccaggcactgtagcaagtgacagttacacatcattacgaccagagacaataatgaatgtagcaccaggagcactattcatgccagcagtgtcatctccgccttaaccccttcccctccactctctccagcgcgcacacacagcccacacggtcccggtgcggagctattcatccaccccgctcgaggccggggggccaactacttccacgagccccccctcccccccaagttcagccctggggttttatttcacatccttggcaactgtcaggcaaacactgcaaccaacaattccactaggggtagaaaaacacttgcttaattcacgttacttgataacttcttctggaaaaaaaaaattaggggaggtggggaagaaacctccttctttcttctccacgaatccgaccgacgctacttgctttgcaacagcatcgcccttccccggccccctcccgcttcccagcactttccccctttaagaacacagaccaaccaaaatgatttaacttgagcagatgacagaaggaaaataaaacacgttaagagaatacggtctgatttgggatggcaaaaaaaaaaaaaaaagaggagggggttgtttattttgataagaaacggaatcggcacagacctgaacagaagctgcagagcaggagaaattgttttctttccctcacacagagtccccctctctctctccctttctctctctcacacgcgcgcgcgcacacacacacacacactcgcacacacacggcgtcacccgcgcacacgcacacgcagagcctctcagcggctctctgcagttctcaggaaatgaatggggggcaacccggggaactgttgtacttgcaaatgacttacccggatcacatgatgcgctaaatgtagggtgggccggtgggtggaggctgccgagttgcgagccccggtctagtgtggggagcctcgccaggcccgcatcgaattaccccggggcccagccgagggggttgcaggacgccgcttctcctccctcgcagcccgcagctcaggaaaccggagaggcgcttggggtggggtggggtggggtgctgtgagggggggggccgaaaacaagaaacccccaaacaaaagagctccgggtcctcctccccagaaacaaagccccgccgctgccggcgagccccggggtggggccgagggcgggggcggcggcggggaggggctcgctcagcaggcgctaagtcgctttattgccataaaatggggcccccgagccgctccgcccgaggattaggaggcgggctctgagtgtgatggttgaaatcccctgtgggaaactaacccctccccgctcgcagaggtaga

SEQ ID NO: 9376 - DNA, 185 bp, Homo sapiens
  chr13:74709333-74709518
  hyper
gatgcgcgcctggcctcgccaccccagcgaaggggcccctgcctgcgccagttctgtgggaaagcacgcaaacttggaggactggggcagaggaagcgggatctgcagacccccgcggggcccgggggcggcggggaagggagtccagctccactgccccacgcccagagcggagccccaagaag

SEQ ID NO: 9377 - DNA, 36 bp, Homo sapiens
  chr13:75794020-75794056
  hyper
gacggctgagcgggggcggagcgccatctactggtt

SEQ ID NO: 9378 - DNA, 47 bp, Homo sapiens
  chr13:76054891-76054938
  hyper
ctgctgcgaagatgacgcgaccagccaaaccggttaaggatttgact

SEQ ID NO: 9379 - DNA, 946 bp, Homo sapiens
  chr13:76055017-76055963
  hyper
cacacacacacacacacacacacacggcaagcaagccatctccggtcacaccccagacaccgccgtcctcccgggacgggcgctcctccacgcgtgctccttggacgcgccagctccccctccatcccgggaccgttgtccttttccctccgggtccctgctgtagccggccggccgctcccgccgctcgcccagcccccgaacgccttctctcccactcccaaggtccagggaaggggccagccggcgcttgagcgcgccacgtggagcgcgcgcgcctgcagccaaacctcagtcggtccttaaagtggggtccccgcccctcccgccctgctccccgatcccccaaggccgagcccgcccccgcgcctccgagcccctgtcttgcctggctggggtctgtggcgcggaaaacgtggcaggccatctgcgactcggggtcgtcgggctgcgccttgatcaggtaggcaaagtaggtgaggtcgtggctgttgtggatgaagcgcgagatatgctgcgccttgtgctcgaagatgaataccgccgggttgggctgcgtggccgacggactagtgccccccgaggccccagcgcccggcgcggggacgcaacgcaggaagggcgcgctgagcaccaggatcacctctcgggccgccggcgccccgcagccgcccgcctcgggcttctggctgcgcctgcggatctcggccatgagccagggcagcataggcagcgtggtcctgtggtccaggcacgaccccccaacgtaccacagccggaaccgcttatcgcttggcttcccggggccgggctgagctgagacgcccggctcgggctccagggggtgcgggaacggctcatcctgaatgcagctgggcggctccataactctcgcctcaccagggcaccgcggaggccggccgggcgcaccgcgccccccactccc

SEQ ID NO: 9380 - DNA, 44 bp, Homo sapiens
  chr13:76450745-76450789
  hyper
gcttctgtagctcacacgagggtaaataacgaaaagttttaata

SEQ ID NO: 9381 - DNA, 30 bp, Homo sapiens
  chr13:77901217-77901247
  hyper
caatgggaagctgccggcctcacagagcat

SEQ ID NO: 9382 - DNA, 30 bp, Homo sapiens
  chr13:78272624-78272654
  hyper
ctggatctggagagcgtagccgcctggcgg

SEQ ID NO: 9383 - DNA, 987 bp, Homo sapiens
  chr13:78492906-78493893
  hyper
ctcatgactcgccagcgcgggtcgaaactccttcctgatgccctctcagctgtttttcttcccccgcgtggccaggaggggtaaataatatgcagtggggcggggcgttctggaaggggtgtgccagggagggaatgatgggggtcccaggcaaagctccgaactctttcacgtaacgggaggaatacagacacgtcttagttaagcgtgcgtgggaaccgcggaattaaggcacctagaggccaagggcttgtgtcaagctctgcattttgccccgcaggggaacctctataccccgcgattgaactcgaaagactcctcccggcggatgaaagccgctactccctggctggctgagctacagctcccgcagcgcgcccaggagtgcgccggagattcggaaacccgcagagacttctcaagtcagcaggaacttggaaaccgctgttccctccaaacggcttcaaacactcgcgctccttcctttacccaacctaattttaatttgccctctctataggcttaatttttatttttttaaaatcccaaactagtaagccaaaccgaagccccagaataaggttcaatcaatgattttaattcaacaccaagcccgaatgtttacctctcggatctgacaaaccagatgcagagcgacgaatggagaccaccttcccgggaggcggaacccagctgggttccagcctgctctgggagaggagcacgcctcccttgagctgcaggcgggtccggctctgacgaaacgctgcgagaatgccagacagtgtagcctccaccgtttgctcggggtctctgctgccatcagacaagtacttttattcattcatcccttcccatcaatcaccgccagactcctcccgcgccttccgaccccgctgcaacctttccccttgggcgatgcctggacagcatcagtagtagttgcccgagggaggggggcagtcctcgtccggggacaggtcccaa

SEQ ID NO: 9384 - DNA, 264 bp, Homo sapiens
  chr13:79169849-79170113
  hyper
cgccccgggtataaatccctgccggataaattcaaatctgtagcagggttttggtaatatgcatcttagcaacaaaacaaaaaccaacctcgtatgccttccagttctttttaaaacgtgtacggcagttgtgaaagttttgtggtgcttgagactgttgacttatgcaactggggagagggtttttttaaccgctttgagatattggtccatcccttttctctcagaacgtcctcaagggcacgtaagagttggaggtgacct

SEQ ID NO: 9385 - DNA, 36 bp, Homo sapiens
  chr13:79170347-79170383
  hyper
cggtagctgtcctgcagtccgagcggagctgcgacc

SEQ ID NO: 9386 - DNA, 778 bp, Homo sapiens
  chr13:79170467-79171245
  hyper
cgccacccggagaaccgcggctggtgcccttgaaggccctgggatgcctgggttgggtgggtgagtgaacgagaaccctgagtgagtgaggggagggcgggtcccctcctggcttcaaattcaacccaatcagctctgccgatggtttgaaactgcacacgccgacccacccgccccgaagtctgaaagttatgccctggagacctgcgagctgcggagtgcagctggagagggagctgccccacgaggaggcctccagaataactcccggagtcggaacagcgctgggctgctgaagtttgcagcctccggatccgcgccccgccctgcagatccaccggatttcggggagggaatcggggggctgcccgtcctcccgtaaagctgacttgacaacaattacgaaagtttttaattagctccttgttataattcattttatttccagaactctccgaccataaattattcaaagagtaagccaacccgagcggggcggccgcgcgccttccccacgcgcgccgggctggctctggccgctcagctcacccgatgccccgtgagccagccccgcgccagaagccgcggtggcaggaaggtttgatcaaacattaaataacgtaatgtttgcgacaaggcttatctcacaagtggaaaagaggacctcgcgagaattagaattcggctgctattttaaaaaatcaattaagcttgcggtcttttttgaaacagctcgaaaggactgcgtggctatcatcgtggcgctaagactgagatg

SEQ ID NO: 9387 - DNA, 144 bp, Homo sapiens
  chr13:79176276-79176420
  hyper
gggccgccgccgccgccccccgggccgccaccgccgcctcccccggggccgccgcccgggccgccgccgccgcccgggccgccaccgccccccgggccgtcgtgggcgccgccgccgccggccgccgcgcccgcgccgcccgcg

SEQ ID NO: 9388 - DNA, 576 bp, Homo sapiens
  chr13:79176608-79177184
  hyper
ggcgatgtccacggccgccagcgcctcggcccgcgccagcagcgtctcgtccaggctggcgaagaggttgctctgcagctgcaggcgacacaaaccaaaccaaaaaaaccacaaaaccaaaagagcaaaacaaaacaacagaagaaacacacacacaggccggaaagcacagcatgcgaagggcaaacacaaagcaaccaaaataacaacgggtttgggggcagtggagagcgggaaagacggagagggggcacattgacgaccagggagggggcagacgagaagggatgggagcgtggagagggggacagaagtagggagaaagggggacacaagaacacattccggaaacgggcgtgggagacgaaaaagagggaaaagaagaaatggaaatgtaactcgcagctggggacccgtgtcacacacccgagcacgcacagagactgcctttctgaggcgtgaaattaacagagaaagtagagggaagtcgagagtcctggccccagcgctccctactccgatcgcaggcgcctgacgcggaggcagaggcagacaggaacacgacattaagggccg

SEQ ID NO: 9389 - DNA, 317 bp, Homo sapiens
  chr13:79177305-79177622
  hyper
cgcgggccggggccgcgggcgtggggcgcttaccggcggcgtgggcaggcaggcccgccggatggcctcggagctggagtgcagcgacgggtacttgtgctcagggagggtgggatgcatggcaaagtgaggctgcttgctgttcatggacatcatcgtggcggcttggcatgtatatccacaaacactccgaaagtccgcgggaaagtgcgtacgccggctcacccggcctcccttcggaggctgcagccgcggcggtcgcggcggctggcggcggccccgccgcgggctgctgctgctgctcctgctgctgccag

SEQ ID NO: 9390 - DNA, 120 bp, Homo sapiens
  chr13:79177885-79178005
  hyper
cgtgggagccgctcttatagtgaccaccagcaaggacagcgcaggtgatgcacctgtagctacccgggcatgcgcactgcccgcctcacctttcccaccgtggtctggaaagatcagaag

SEQ ID NO: 9391 - DNA, 31 bp, Homo sapiens
  chr13:79979539-79979570
  hyper
tttcactaaaataaaccgattttgaggcccc

SEQ ID NO: 9392 - DNA, 30 bp, Homo sapiens
  chr13:79980691-79980721
  hyper
gacaccaggcggcccgtaggttccaggtgc

SEQ ID NO: 9393 - DNA, 243 bp, Homo sapiens
  chr13:80914138-80914381
  hyper
ccggcgccaggcagggcgacgctcccacccgctccgggctagactgtccacacggagcagaggcgggcactccctccacccggcaccctgcctttttctcaccctggaagtctcctgcccccgaggcgggcaacctgtgtcccccagccccaccagcgccccgcctagggacagcctctccctggactttgccttccaccaagaggaagaacaggttagaaatgcgggcgcctgcaaaggcaa

SEQ ID NO: 9394 - DNA, 111 bp, Homo sapiens
  chr13:80914864-80914975
  hyper
gctttagaccaacttccgagcaatcggcgggagaaaaaaagagaattcggagccagattccccgctgatgaacactccggggttcggagctggagacgactccccttctac

SEQ ID NO: 9395 - DNA, 48 bp, Homo sapiens
  chr13:80915615-80915663
  hyper
cccaggccggtcctgccgcccgagcgccgtcacgcggggcgcccgcgg

SEQ ID NO: 9396 - DNA, 368 bp, Homo sapiens
  chr13:80916946-80917314
  hyper
caagggaagtggcatgcgttatttccgggcgctggcctacgtcccccgacccctaaggtgagggtggacgaggctacaacggcctgctcccgagcgtcccgggactgcgggcgcaaaacagctgggcctctctggccacagccgctcgccggacgcccgaatccattgagccgacggtgaacgcaggcgccgctgcgctcgcggcccctctggccaccagggggcgcccgcccggcgcggggctaaggctgctttcttctccgggacacgacgcggacaggctgggttaccttccaaaacgtgtgtgcattaggccggctggtttaaaatgaatacaaagatattaatataaacgacacagaagatag

SEQ ID NO: 9397 - DNA, 389 bp, Homo sapiens
  chr13:84456112-84456501
  hyper
tgtgcatggctgtgcgtcggactgaccttgcctctctgatacaaagcagggttttccgcggcttctgttgttgaggctgctggtggagttcttgctgtggttgcgggttgcccagaagtccccccgaggtgctgtccagttcccccggtgctgaaatcacgcccgaccgaaggactcacgctgcccagccaatggcgctggaaaatttccgcaatcgctgcgttttgtggttgtccatccttttcctttcctccccttcggtcctcttaaggcttttttttttcttttctgtgctctcgctctcgcttactagctcttcttttcctgttctccttctctttcttctgctctttcggaattacgtggaggggggcggagggcggggggcg

SEQ ID NO: 9398 - DNA, 450 bp, Homo sapiens
  chr13:88323380-88323830
  hyper
caggaggaaggcaggcgatcagcacagggctggaatcatctgttcctgaccaccagcaagcctggcactgccggggttatttccactcctccctttcccaatccgagaattgcacagtcccacgctcgaattacacacatggtccaagacttctctctcttcctacgaatgtgacatccaagggggccccggttgcgccgccctagcccagggacgccttcgccctcggctgccatctatcggccaccgagcgcccgcttcgccccgggcccatcatgtctgctgcagcttggctcgcaccagaggcgcgacaataaacaagtgcactggactgggccctgcacccgctccggagcagctgtctcagagacccggtgttgcttaccgcgttgccacctcctcggcgcccgggaggaagacgcaactttctcggagttttttttagagcca

SEQ ID NO: 9399 - DNA, 651 bp, Homo sapiens
  chr13:88323867-88324518
  hyper
cggttgctgcccgccccccccttcccccagaaaccccaaaggatgtcggtgatagagagttccaactaatgacgattgtgcgccgcatctggggaagggatacagaaaaaaaccctgcaaacaccgtgaggatgaaactgccaaagggatgcaagagcctctcaaatactaattaggggccgcggcggcggcgggctcggcgcggagacagcgtcggcgggatcccagcgcggtggtcgccgctgcgctggggggcggaggacagcgcaggagctgcagccgccgccttcgctggagcagccgaggggccggtgccacctttgctcgccccctcactaccatgtacagtgtgcgctgcaagaagaaggcgggagatgcatgcacacccccgcgacccgctccctctggctcgtcccccggcgtgcgccactgaccaggggggaatgtggtgaagacggcgaggaggagagccgaggggggaggggagggccggccggcgcgaacccaggccggagggtgcgaggagccagaggaggctggagggggcggcggccacagctgggtcggagaaagttgccccctatgcagatggcaactgtgagtacccctgtgggggggagggtgcagcgaaggctgccagggaccccgcga

SEQ ID NO: 9400 - DNA, 64 bp, Homo sapiens
  chr13:88324920-88324984
  hyper
gggcgcctctttcctccagcctctgggactgcgctgctcgcagtctcctcgccctgcctgggct

SEQ ID NO: 9401 - DNA, 971 bp, Homo sapiens
  chr13:88325192-88326163
  hyper
tcctccctccccttcttcctccgttttcccttccttctctttggggcggggtgggggagggggagcctcgcgtcctggaactccgggtgcttctgcctgggctgctgcttgagcagctgtgcccggagcctccggtgcggcctgggtgctgggctccagtccgagaggctccatgctgcttactgcagggacgtacagggcggtgatccagtatctaaattctttgggagaaaatgaatagttcccccgcccccgccctccaggaaaaaaaaaaatctgagaatctgagaatgttcagcgcacccgcgaatttgcatcggaggtgcgtttccccgtcagaatgtcagcctccccaggctcattcaactttattttctcaaatttttggtctcctttgctagcaaggaggagggggaagggagtgggttgagaggaagctcttcgacccttgctaactagaactgaattaaagttgtaaacgctggagtttaatactggctggactgaatttgcaatgggctttcagatggggtgggaggtgaatgggggcggggaagcacagggagggagggggaggggacccaacctcgctgaatggatgtgcggatttgatccagcggagaactgaaatttcaaggtaaacgttttgctttcactggggtggggatgtttttgccgcttttaagccgggagacgtttaccgttgcgttgggaggtcggggatacttgcgaggtttatgcactgtggttccaattcatctcgacacgtctgggtggccacacgtgaatgattcgcaggcacactgatacatgtgcgtttgaatgcaggggcgtttaataacgcgggctggagtcgacttggggatcaggagcaaggtctccaggcttgaacccgctgtctcggaaacatcttggctttagtttggagttgcaattcgatattagacttcggtagtgaggcaaaggcaagg

SEQ ID NO: 9402 - DNA, 14 bp, Homo sapiens
  chr13:88326693-88326707
  hyper
ctgattcccggtaa

SEQ ID NO: 9403 - DNA, 31 bp, Homo sapiens
  chr13:90384876-90384907
  hyper
tttcttttttttgagacgggagtctctcttt

SEQ ID NO: 9404 - DNA, 30 bp, Homo sapiens
  chr13:92001749-92001779
  hyper
actttattctcttacgtatttttcaactgt

SEQ ID NO: 9405 - DNA, 763 bp, Homo sapiens
  chr13:92050715-92051478
  hyper
gcatcgatgtcgctccgagtcttcagcactgggccgcgtatgacagcatcttagtgggtgcggagcgggacagcgcgccgggggcgtggcaggggcgtggcctgtccgcggggcggggagtgcggggcggggcttccgcggagcgcagcgagcgggcacatcccaggttagctgctgcgagccgagccgggcggcggaggcggcggcggcggcggcagtggcggcagtggcggcagtggcggcagcggcagcagttgcagcagtggtggccagagcggatgcttgcgggctccctgcggctccactagttttcttcgccccgcccagccgcccactcttctcggctagggaagaagaccagagggtgctcagctggaaaactctggtgtctcagcttagggcctcctccgggaagagctaactgctcccaggtgaagccggtgcccgcgggcggtccgtacaccccgcagccggctcgcaccgctcgagagcctcggccgctgtgtcttccacgtctgcagctcagccagggcgcgcagggcgagtggggtccactggcgggtaaaggggaccaggacggcgaggatggacgcacagacctggcccgtgggctttcgctgcctcctccttctggccctggttgggtccgcccgcagcgagggcgtgcagacctgcgaagaagttcggaaacttttccagtggcggctgctgggagctgtcagggggctgccggattcgccgcgggcaggtaaggggcaatgag

SEQ ID NO: 9406 - DNA, 30 bp, Homo sapiens
  chr13:93152311-93152341
  hyper
aaagtttctccagcctggactcaagttagc

SEQ ID NO: 9407 - DNA, 30 bp, Homo sapiens
  chr13:93878954-93878984
  hyper
tttcccctttctaccgactaggaagagatc

SEQ ID NO: 9408 - DNA, 130 bp, Homo sapiens
  chr13:93879246-93879376
  hyper
gcgcgcatacacactcgctctcgcttgtccatctccctcccgggggagccggcgcgcgctcccacctttgccgcacactccggcgagccgagcccgcagcgctccaggattctgcggctcggaactcgga

SEQ ID NO: 9409 - DNA, 173 bp, Homo sapiens
  chr13:93879602-93879775
  hyper
cagcggcgaggagcgcgccgctgcctctggcgggctttcggcttgaggggcaaggtgaagagcgcaccggccgtggggtttaccgagctggatttgtatgttgcaccatgccttcttggatcggggctgtgattcttcccctcttggggctgctgctctccctccccgccggg

SEQ ID NO: 9410 - DNA, 298 bp, Homo sapiens
  chr13:93879918-93880216
  hyper
cgtcccactggccgcccggcgtccccttccttccccctgttgctgagttggtgctcactttctgccaccgctatgggactccgcgtctccgtgttgggcggcggatgctcctgcggcttcttcggcgggggaaggtgtgcgtctccgccgcctcattgtgtgcacacgcgggagcaccctggctcccgcctcccgctgctctcgcgcccttctaccccttagttgatggctcaggcccggctggccagggagcccgggtcactccggggcggctgcaaggcgcagacggagagccgag

SEQ ID NO: 9411 - DNA, 204 bp, Homo sapiens
  chr13:93880533-93880737
  hyper
cgttagggttcctcagtgcttccccagttgctgttggccactcagggcccggggacaccctgccacccggtctggagccggcctcgtctgccagcgaacagccaactttagcgggtggctcagctggggattcgggtccgggttcgggggccccgtgtcccccgcatgcccggccactggcattgctccaccaagagcttgaga

SEQ ID NO: 9412 - DNA, 332 bp, Homo sapiens
  chr13:93880793-93881125
  hyper
cgcggcagtctgggtgcttgttttccggctcttagctccaaccgaatccgagcttctctggggctctgtgaatgaaacgtgtcggggagagataatcctttggctgctaaagaacagaactgagagaggccgagggaggccaggagatgctgcgagggcgcgggctgctcaaaccgggcagctgaagtccttagtgacctcagatcgtcaagtcaaaacgctgaatttccaccagcctctgtctgctttttgccaaataactggtggatggatgaaaagcattttgcagatatcttagaacatcacagtttcgatacgttgaggaattacta

SEQ ID NO: 9413 - DNA, 819 bp, Homo sapiens
  chr13:95201108-95201927
  hyper
aggaacgtctagacccgtggcttgtttaaacacccgctgctaggccccactgccagagctgcctatccagggccgagaatgtgcatttctaagtagttctcaggcggtgctgatgctgcggatctggggactgtactttgagaaccaccggtgcagaccctggccaacgttctttagtctgatgcgtcggggagctgtaaagctgccatccttcaccggtgggcaagtaacctggtggcgccaccccagggccagacccagggccggcctcggtgcgcctctagccagaaataaccagcactgggttccgctcaccggcaacgccaggtgggggccatctgaccactcaacagttttgctttttcttcaaattcggatacttagaaggaatgcgatgaaattgggatgaaggtgttttgctggccccgtggacagaccagacctcctcccatcggagcctcgggtctcacaccagccccccaggcggcgcgcggccccgtctcgccaccgcggcccgggtcgttcgcgtcttccggcgccgagggtgcctctgggtcccagcaccaggctccgtggcgcgcacgcgcggcagcttcttctagccccgccaggagacggcccagaagggctatgcggcgcggcctcgctcctgggggtggttaggaacgactgtttcatttcctccttcacccttcaaatctcagtttttgcttgggcttgaaggaatgggccagggtatcgtggacggagagtcttacaaaatttgagtttttgaggtcagaatttaaaagtagctgccgaaacccgggatcgaaccag

SEQ ID NO: 9414 - DNA, 421 bp, Homo sapiens
  chr13:95202013-95202434
  hyper
cgctttgcgtccaactggcttgcttgtcttttcctggtgatcatgtacagcatttcttccttgtcctgttaaacggtgtcgtcggaattcttccacctccctccttctacgctgccactgggcgctgcacacgcgccttactttcttagattgctctcggcgcgcgcagcccgcacggtccaggagctgggtccaggcccccgatggcggctcctcgggatgctggttccgtcctcccagggccggtccccgcgagatccgaagcagcggggtcgcctcggggagctcctgcccaggcctggtagccccttcccttcgatctgcccctgcctgtgactatccacattcgtcaccttgctccccgaaaagttccaggccccaggtgaggagccgtgtaggcccaatacgattggatgaagga

SEQ ID NO: 9415 - DNA, 30 bp, Homo sapiens
  chr13:95355493-95355523
  hyper
aggggttaaattagcggggggagaggccgc

SEQ ID NO: 9416 - DNA, 194 bp, Homo sapiens
  chr13:95357040-95357234
  hyper
gcgtgagtgatggggcggccgcgcaagggcaacggagtccagcggacaaagcttgcagagaggggcagtggcccggaggcaagggtggcggtggggggggtggggggatgggtcacaaaagtagagcaactgagcttgctgcctagcggtgccacttccctgctctgcgctaaggctatcgtcgaaggcccaga

SEQ ID NO: 9417 - DNA, 30 bp, Homo sapiens
  chr13:95357450-95357480
  hyper
aatatgcaaggcttccgtgcggccccgaca

SEQ ID NO: 9418 - DNA, 221 bp, Homo sapiens
  chr13:95357682-95357903
  hyper
attccattaagttaggagcagcgctgataacgactggaaagttcgacggctgggtgggcccgcgacccgcaggcctggcgagcaaccatcgaaaataaaacaattgctgtccttggcggcaaaggcctctatggacgcctccagggcagcgcagggaaccaaagggcaccccagatctctgcgggttcgcgccttgcctcgtgggggacaggaggttctct

SEQ ID NO: 9419 - DNA, 274 bp, Homo sapiens
  chr13:95359620-95359894
  hyper
gagagattaataaagtttggacggctccctcggcctccgctgggccgcgggcgcaagaaagacgcggaccctcgaggcggacgagttgcgggaacttcgcttgcctggaggacacggcggcccaggcggccgggagcgccggcgccgagccgcgctctgattggctggcgcgaccgtccctatctgctccggggagagtggaatcttctctccatcttctgcgccccgagcctggggtgagagggagatccgcggtgctttctcctatcttctt

SEQ ID NO: 9420 - DNA, 459 bp, Homo sapiens
  chr13:95362992-95363451
  hyper
tcacatttgaacagcgtgcatgcaacacggaccgggagggggttgggggttggggggctgaggggcgaggaagaagaatgagaaacaaaaacaaaaccgaccatgaaacttccaacaaaactggaaaggccaacatgtcaaaaagttactcctccacctccgtgggtcaaaacgcaacaggttccgaagtgcaaagcaaacgccaactgctgccgcacacaaccgcctgctttcgagttggctgccgaagtgcgggtctgaaatgatcctgcgaattcacaggcctgctcgcccgcgcccttgcgcgcttggccactcctgccccgcctggcctctctgcctctacctggcacctatacattctatgtacatacaaaccgggcccccggtcgcgggagggcgcacggggaggccgcagcgctcgtacctatacatatgtacacgtgtgcacaccggtcc

SEQ ID NO: 9421 - DNA, 466 bp, Homo sapiens
  chr13:95363493-95363959
  hyper
cgcggggtaggggtccagctggggcttgcccatgcccggcagcaggatgtaggcgagcggcggctgcagcccggggctgggccacgcgctgcagttgcacgggatcatgtagcccgggttgcccgggctggggtgcgagtgcgtgtgccccccggcggcggcggccgccgctgcagccgccgccgccgcgccgtggaaggcgcccgcgcccgcggtcgggtagcccagcgacgacgcgtacgggaggccggacgaggacgacgagatctctgccattttggagcccaggtcgagcagcgagtaggggctgcccgcggcggcggcggcggcggcagcggcggcggcagcggccgactgcgggaagaagacgcgtgcggcggcagcggcggcggccgcggccgccttctcgggattggcgagcagcgactcaggcaccaggccgccgcccgcccccgcgtgcagcccg

SEQ ID NO: 9422 - DNA, 226 bp, Homo sapiens
  chr13:95364064-95364290
  hyper
cgcggccggtacttgtagtcggggtgctccttcatgtgcatggcgcgtagacgcttggcctcgtcgatgaacggccgcttctccgactctgtgagcagtttccactcggcgcccaagcgcttgctgatctccgagttgtgcatcttggggttctcctgggccatcttgcgccgctgagcccgcgaccacaccatgaaggcgttcatgggccgcttgacgtggtcca

SEQ ID NO: 9423 - DNA, 1127 bp, Homo sapiens
  chr13:95364329-95365456
  hyper
cgccgcctcccgggccctcgccctcggcccggaggaaatcaatgttggctgcccgcggagacccgctcggccggccggggctcgtcgcgccccggcgtcgctcccgccccggaggagggggctgggggaccagcccagggccacgccgcgccccgggccgccttagtgtctccggccgagcgctcgagcaggttgtctctgggacactctaacttctcggcggtgccccctccccgcggcggcagtttgccctttacgttctttgggtccttcgtctgcagtggcgtttgctggtgagctccccgcaggtagcggcggccgggcagagcgctcctcctcctcggtcgttctctcttaaatgcaaagcgtccccaaaagttgcgtcgcggagactcctcgaagttgagccgaggagcccgccgccgcgtgctgccaagtgccaaagggggctctcagcggctggagtgtttgggttctcctcggtgactttctcatttgacagaagcagatgggggtggggaaggcggggaggtggccctggaggaggaagaggagggggaggcggaggagtgtccaggcgtgccacgagaacgcagagcgcagcaatggatataaatacaaatacagcagcaccagcctgtcttcttggctccgggcagggtgcgccgatgggaaacccccaatcggctgggtgattttttttttttggaggggggagctgtcccccgcagcacctgcctctcgagtcttcctctcccgctgctggactgacgggtggggcgaggaaggagggtggatgaggcttgagcaagcgttggtcgcccggcctcagaggaagttctcccggctcgccgaggagccgcgtccggccgtcccctgggccatgccggctctgttcgctccgagccccttcaggcgcgcctgccgacttagggctcccggagctcgccggccgcggagggcagcgcagcctccacgcggcgccgcaggcctggcaccggccgcgtccccgcctcgctcttctcggcagccgcctggcacttgcaactaacttcgcccaagtttcctgcgccgcggcgcccctctcggcgcgctcctgggagcgtgcgcccgcgagtccgccgcgc

SEQ ID NO: 9424 - DNA, 191 bp, Homo sapiens
  chr13:95365497-95365688
  hyper
cggcgcaggggcggaggtgctgcaggagagttaaggaaaacgggccatcacctcagttcgcaggtccgcgctgtggcacctcccgctctccccactcccgcggcgcagggggccccttcccagcccaggccgccctctgcaccggctcaggtgagtgtggctacctgcatgtgtgcgcgcccggagccggc

SEQ ID NO: 9425 - DNA, 612 bp, Homo sapiens
  chr13:95619807-95620419
  hyper
tgggttttgctcgggcgacttgattgtctttcaagttggcgttaagagttttcaacaggtctccttccctgccagccgggaccccgggggtccctcggagcagggcgggtgggaccgctcggcctccttctctcgcccgcacgggcgccgccgcagacccggagcaggcacccggcggccgccgcgtgggctgcagcttagcctcctctgcgggcgcccggcagggctgcgcggccgagactcggggcgccggcgccggggcggccgggagctctgtcatttggcaactccctgcagactgatgacacggcgctttccatggtcgagccccacaaagtgtagggctgcggggcgcacctggctgggctcctaattacccggcctgggacgcacggggcagccgcggagggtggcgcctggggtcgggccggggtccccttcgccgcagtcccgcccacccgcagcctccgaggggtcccggccagggcgttctccacacgctcggctacctgcaggggttcgccactgcaagccgggccagtagaagtttgggggcgaaggcagagagcatttccttctcggcttttggcgcctccacgctgcacagaggca

SEQ ID NO: 9426 - DNA, 134 bp, Homo sapiens
  chr13:95620647-95620781
  hyper
gagcgaggctgctgccgtccccggggaaagggcgacttcggcggggataccccgtgccaggccctgcaactcccgggccctcgggaatgggatgggggaggcgcggggtgcgcgcagctcccggtgatgttaag

SEQ ID NO: 9427 - DNA, 159 bp, Homo sapiens
  chr13:95620853-95621012
  hyper
cgctgcggccgctgtgtgcccgaggggcggctctgtaacccggctccaggcatttcttaggtttcccatccccgccctccaagctcccgggagcgcctgctccgctgcccgcagacaggcgtcgttcaaacctcagctctgctcggtctgcattcatgg

SEQ ID NO: 9428 - DNA, 30 bp, Homo sapiens
  chr13:96056222-96056252
  hyper
gacaggagatttgggcggggtcgcacatcc

SEQ ID NO: 9429 - DNA, 30 bp, Homo sapiens
  chr13:96056473-96056503
  hyper
ctcaagcgatcctcccgagtgcggagatta

SEQ ID NO: 9430 - DNA, 510 bp, Homo sapiens
  chr13:96204922-96205432
  hyper
cgggaggcggagccccggggttgggagtgcgggggtcgcggcgcagagtgggagccggagagcgagcgcggctgcagccggcggcatggctagcacggcttcggagatcatcgccttcatggtctccatctcaggctgggtactggtgtcctccacgctgcccaccgactactggaaggtgtctaccatcgacggcacggtcatcacaaccgccacctattgggccaacctgtggaaggcgtgcgttaccgactccacgggcgtctccaactgcaaggacttcccctccatgctggcgctggacggtctgcatccccgcggcccccgccctcagccctccttccttgatggccagcccgctaggcgccctctcgcccccaatacccccagcgggacccctagactggactcctctgaggcccgacccgtctctcccaacagggccttagggagccagggacgctcctggtgcccgccctctcctgatggctgtctcgcggggcgcctgtt

SEQ ID NO: 9431 - DNA, 112 bp, Homo sapiens
  chr13:96296233-96296345
  hyper
cgtggggcgtcgtgccgctgaccacccctttccccttgcgtggatctcggtcacaagatggccggaacaggaaagaagggggcatgctttcccgttccctccctcccccatc

SEQ ID NO: 9432 - DNA, 183 bp, Homo sapiens
  chr13:96296372-96296555
  hyper
cgcctcaagtcccaggcgcatggcaccgccgggcagccgaaccagcagacaaaagccgagagacgcgggttccaggggaacctcggcgcccttccttggaaggcaaacaggcagtgggggcagcggcggctactccagctggatctgcagaggctcggctcgcagcctggagaggcaggaggg

SEQ ID NO: 9433 - DNA, 109 bp, Homo sapiens
  chr13:96296840-96296949
  hyper
cgccgctctagggccttccagactccggaccacggacgactcaggataccccacccccctcccgccccctcccctccgcgatctccctccggcctcttccctcggtgtc

SEQ ID NO: 9434 - DNA, 146 bp, Homo sapiens
  chr13:96296991-96297137
  hyper
cgcagcgctaaaatgcgctcagccaatccggcagctggcgcagacacgtggttcgggggcgcgctccgttgctggccctggatgctaaccctaggaaggcttttcaaagagaaaccagattcgctcctacccggttgttggtctgg

SEQ ID NO: 9435 - DNA, 351 bp, Homo sapiens
  chr13:96705466-96705817
  hyper
acttggacgcggcgaccgtcccggagccgagctgcgaaagccacagcgctgtggagcctagtagcagccgcaccacgttcgtggctttcgctggcgccatggcacggagagaaaagcgcgagtccctcggacccggtacccacagtctgtggccgccacgcttcggccggctcttcccgctgcgcggctgcccacttccggtgggaggagctcgagtccgttactgggtgccgggtccagaccggcgcatgcgtgtcccgctccggcgcggtttagtgggtgcggcctggagagcccacgccagccggacactgggccacgtcggagccgccggggcggcgccgggttgct

SEQ ID NO: 9436 - DNA, 30 bp, Homo sapiens
  chr13:96742406-96742436
  hyper
tgtctgcgtgcctgcgcctgggcggacagc

SEQ ID NO: 9437 - DNA, 30 bp, Homo sapiens
  chr13:96743739-96743769
  hyper
gcacgccgactggacggagctcaccaactg

SEQ ID NO: 9438 - DNA, 246 bp, Homo sapiens
  chr13:98085204-98085450
  hyper
gtccctgtctccatcccgccggcctcggtggcaaggggctcgcgagctctggttggcttggccgaagcttccgtcactcgccagctcacctacgattggttggcagagcgtgcgcgaagagccccgcctggcaaggcactgggaggtgggcttgcggatcctacgactagcgtttttctcgattggttgaaggagtaaaggcacgtggtatgggggcgctctcttattggtcgtgaatggtacctt

SEQ ID NO: 9439 - DNA, 34 bp, Homo sapiens
  chr13:98795714-98795748
  hyper
agggagccgccgcagccgccggcgctgtggaggt

SEQ ID NO: 9440 - DNA, 31 bp, Homo sapiens
  chr13:99064433-99064464
  hyper
agttaaatcctacatgcgttcagatctcatt

SEQ ID NO: 9441 - DNA, 330 bp, Homo sapiens
  chr13:99229763-99230093
  hyper
cccctgagggcaggatcggagtcgggggcacctggggaaggagagcgccccgtggggcctcggccggtggcctgtgccaaaaggccgggcagagctgcttcggtgtctgggtgaagtttccagccaacccaagaaggaaaccgaaagggaagaggccgagagagaggttaattcctagtgctttggttaccgaaaacagcccggctgggactgctgggctgggaacttagctaagcagtgcggaggctgaaccccaccatctctgggatccgcagcaaatcagaagcccccacccacgataaggggaaaatggggcgcagagggcaggga

SEQ ID NO: 9442 - DNA, 30 bp, Homo sapiens
  chr13:99404491-99404521
  hyper
gacggtgtttctgccgcccctgccgtcacc

SEQ ID NO: 9443 - DNA, 355 bp, Homo sapiens
  chr13:99739097-99739452
  hyper
ggggaaggtggggggtcggggccgcctccgccccgggccgcacgtccgaagaccggaggaggggactgcgcacgccaccaagagggcgcacagccgaggctggacgatgcgcggtttcggagcagggtttcctgcccagggagcccggctgcgctcgaggggaccccgaagtcaccggcagggtcggagctcggtgcaccacgccccccctctgcgcccggggcctctgcggggacagaggtctcaggaaagtagcctttatttatgtggcaccgatcggaacccgcggccggccaggcggacctggacggagcgtccctgctcggaacctggcgcggggcgccgcgcgctcgtg

SEQ ID NO: 9444 - DNA, 39 bp, Homo sapiens
  chr13:99740139-99740178
  hyper
tgggagaatacctgccgcgcctcccgcccaaatacccag

SEQ ID NO: 9445 - DNA, 30 bp, Homo sapiens
  chr13:99853794-99853824
  hyper
tcctggcgtgttagcggtggtcagcaggta

SEQ ID NO: 9446 - DNA, 67 bp, Homo sapiens
  chr13:100620552-100620619
  hyper
ccgcagggacccccacgctccaccgggtggggcccacgcggccgccgggagggggcaggaaatgcaa

SEQ ID NO: 9447 - DNA, 1399 bp, Homo sapiens
  chr13:100620631-100622030
  hyper
cgcagagccaaaaacccaaatgaccgcgggtcccctcgccgcctggggtcccccgcgccccccccgaccccacgcacgcgcgcgtgccccgggaagccaccggggacagtgcgcagggcgtggcctgtcccgccgggggcccggatcggcttctgcgcccgcagctcccggcagccgcctagggaaggccgctcccctcgcgaggcctgggcaggcgggaagggccctaggccgcgcgcggccccgcgcttgggagttccctttcggggccgggctggggagcggcttcacggtccctggatcctgccctgccgagaagtgctgggcacaggagcgagcagccggcttagcgggccagggcgtttttacgagagcctcctgggaagtttcttcctggaaaaatcattaaggcggactgatcccgattagagagaaaaggggctcctgggaaaacgtgctccccaccggccatcaggcggcccgcaggagccaagccaaggctcccgcctcgggccaccccgacgctgctgcccccgcagagccccgagcgcccccggcccgagcgtgggacccggcggctacctcctggccgcagcagcgccgataaatctgccaagtgattactgaacgtaaactccagttacttaagtgtcctccgaggggtaatcgtatctgtccctataaatcccgactgcgttcgcgctcatcagcgcttccgcccgacgcgctggtccgctcaaagggggcacacgacccacaggagccatccaccgcctcgcgccgcagccgccctcctcagcgctgtgggatccccagaggcagggcttgaggtggggtgggagggtccccacgacgccggtggctccccaccaattccacgacagggtaggcctcaccgatggtgggaggctcgggtcctcctacaactagaaccttctctagaaaggcagatgtcaactccagcaccctccagggcgagtgtgatactgcgtgtgagagggcgcgtggggcgtgtaaatgatgtgagtgtgaggacacacaggtgtcgcgggaatggggtgcacgcgcaggaggatatgagtgtgtaaagttgtgggagacgcacgcagaagaaggtgtgcgtgaagagtgtgtcacggtgggcgagtgcgagtggtctccggggttccgaaagcgcattcctgtcttcccggaggggtcccttcccctcccggaaggcctgcctcgggcggcccaaatccggcagcaaatcccacgcccggtcctcggagcgcggagactgcgcggggcctacgacccggtgggaagagaggcgcttgccggggcggcccggcctctctttccatcgccctcccagacttcccagggccgggcgggtggggactgccgaccgtcctgg

SEQ ID NO: 9448 - DNA, 348 bp, Homo sapiens
  chr13:100622155-100622503
  hyper
cgcggggcctgtgtgtgctatcgaattacttattcatagaaaaaaaaaagggggggagagaaaaaaaaagaagtcacatgtccgggttatacgtatgcgaagagaagcagcagaaggagaaaaaaattaaggcgagcaggaggaggaggagaagcagcggcggaagcggcggcggcgcaggagctggtggcggcggcggcggcgcggccggggacagacacccacctgtatgagtacgcttgtggatcttgaggttctcggagcgcgcgaagaccttgccgcagccggggaaagggcagggaaagggcttctcgccggtgtgcacgcggatgtggttgatgagcttgt

SEQ ID NO: 9449 - DNA, 73 bp, Homo sapiens
  chr13:100631530-100631603
  hyper
aacctgcagagactcgcttaagccgggagaggctgcctgagccggcgcaagagagcccgggttctgccagcca

SEQ ID NO: 9450 - DNA, 321 bp, Homo sapiens
  chr13:100632438-100632759
  hyper
gccccccgccgctccttgtggcgcgctcccggcgaggccccgggcctgaaatgtccccgcgcgcagagcctcctgccaggcgacccagctgttagccacctctcgagcggcctggagtgctcgggccaggcgtccccggggttttcggtgtccgctgggagctgctcagatcccggggaagtcggtggcctacgcagaaagactggagcgctgggttgcctcccattcctgacccggctgagggcgccctgaccccgcggcccgggcccgcgtccgagccacgctggacgcccggctcccgggagcgccgcggtcggccag

SEQ ID NO: 9451 - DNA, 379 bp, Homo sapiens
  chr13:100633419-100633798
  hyper
acaacttaaagaaagggggagcggcgcggctgctgccttcatctggggaaattcgtggccactgcaagtttactacgcgaggcgcagccaatgccaagcgccgaggccgaggagggctaaacactgcggccgcggctccgaacaataaccgccgcgcgcggggcggcgcgagtagggccgcgggggagggagctgtcgccgcagagcgccgcggagaggacgcctggactccgcctgccgccccggcgcccccgccgcggtcaggtggagccgctggtgcgctggccccgggtgccgagcgcggagctcgcctcggtcctctcctcgcccgtctgcctggcgtgcgcacggccgccgcggttgtgactgcattctaccg

SEQ ID NO: 9452 - DNA, 397 bp, Homo sapiens
  chr13:100634347-100634744
  hyper
ggccatcggggtgggcagcttcgcgcgccaccatcaccactccgccgcggcggcggcggcggctgccgccgagatgcaggaccgtgaactgagcctggcggcggcgcagaacggcttcgttgactccgccgccgcgcacatgggagccttcaagctcaacccgggcgcgcacgagctgtccccgggccagagctcggcgttcacgtcgcagggccccggcgcctaccccggctccgctgcggctgccgctgcggccgcagcgctcgggccccacgccgcgcacgttggctcctactctgggccgcccttcaactccacccgggacttcctgttccgcagccgcggcttcggggactcggcgccgggcggcgggcagcacgggctgttcgggccgggc

SEQ ID NO: 9453 - DNA, 41 bp, Homo sapiens
  chr13:100634940-100634981
  hyper
cgcaactccacaaccagtacggccccatgaatatgaacatg

SEQ ID NO: 9454 - DNA, 30 bp, Homo sapiens
  chr13:100636168-100636198
  hyper
aaaatcgtgccagacgatttcctaaaagaa

SEQ ID NO: 9455 - DNA, 30 bp, Homo sapiens
  chr13:100642760-100642790
  hyper
gctactaggtccagcgagtccaggcctcgc

SEQ ID NO: 9456 - DNA, 30 bp, Homo sapiens
  chr13:101422012-101422042
  hyper
acacacatagccatttgcccctcagtttct

SEQ ID NO: 9457 - DNA, 31 bp, Homo sapiens
  chr13:101717570-101717601
  hyper
aatgttcactggaggacggcaggaaagggca

SEQ ID NO: 9458 - DNA, 50 bp, Homo sapiens
  chr13:102068307-102068357
  hyper
ggcccgaggtgtcgccggccctgggcttcccaagccagcccaggggcatc

SEQ ID NO: 9459 - DNA, 228 bp, Homo sapiens
  chr13:102068417-102068645
  hyper
cgccccggccaggccggcaaggaccccaccgccccgctctcgggtggaggcgcccctccccacccctcccccgcgcggggcccccgcccgcagcccctctagcagcccctctcgcagccccagcgcccctgagccgtcctggcccggaccggccaaggaactaacgagcgcgcatcgcgggcctcgggcgcagggcacggagccggccgcgccgcagcctcccgggca

SEQ ID NO: 9460 - DNA, 259 bp, Homo sapiens
  chr13:102068811-102069070
  hyper
cgctcggcccggctggggccgcggctcacgctcgccgtgtcactcactgagcgccgccgccgccgggcaggctgggggaggggtgggagccggagttttcgggcctttaaaaaattattattttatttaaatttttaaagttagctttgctacagggactgcagtgatgccgaagggcgggcaccgcagaggaggctgcgccgcagttggtggggagcgccagggtcggtactggcagttccttcttgccggctgccac

SEQ ID NO: 9461 - DNA, 118 bp, Homo sapiens
  chr13:102568454-102568572
  hyper
ggaaggggtgccccgcgttccagagccagtgccagtccctatcctcccgggaagccgagactcagggggaacaggtttcccagagcccagcctgcagggacgcggagggcaggagccg

SEQ ID NO: 9462 - DNA, 108 bp, Homo sapiens
  chr13:102568659-102568767
  hyper
cgacggcacccagagtgctcagaagggaggccggggccggggtgggccgggaaaaccgagggagggaaggagcctggagaagctccgtttaggcggggagggggcgac

SEQ ID NO: 9463 - DNA, 263 bp, Homo sapiens
  chr13:102569312-102569575
  hyper
gctcgtcgcaggaaccccggcgggggtcgccaccgccactcgcgctgccttctcgccctgcccggctcccgggcgggaggtagagccggccggcggctccccgggcgccggctggagggcgggtcccggcagggtctctgcgcgtccgtcggtccgggtcgcgctgggcaggactcagcgccgggctccagctgcccgcgggccggtgccgccgccggcgccgcccgctctcggcttctgccggtgattgtcaagtgctttgg

SEQ ID NO: 9464 - DNA, 109 bp, Homo sapiens
  chr13:102569800-102569909
  hyper
aaggaacatcggggcgctttttcttagatgcaactcgctggttcccgagccttccgcggcttggttggggcttctcggtcttaacgtggttaccggtgcactgaaactc

SEQ ID NO: 9465 - DNA, 679 bp, Homo sapiens
  chr13:103046558-103047237
  hyper
ccttcagatgggtctcgggtccagagctggcgcccgctagcgggaggccagaccgggagggccaaggcagccacctgtggctttcccatccctcaggtccagcagtgcacatggggtgcccccgcgtcaacgccggaggagtgaccttgcaaacccgcgccccgcgggcggcagagccggccgctcactgcccggtccccggccaccacggaagagcgaagatctctgccagggcaggagccctagccccgacccgcgccccaagtctctcccgcgcggcggcttccggccgccatggtttccatagcaacaacagcacaagctgccgggtcccagagacgccctagggtcagaggtcatctccgtggcaacggaaacttcccgcgctacggcggctccaacgggccgcttccgccgcattgcgtagcgaagcccccggcgagccgaggctgggagcgcggtgatggccggtccccgtgagcagagggcagcggcggcgggaccggggactctgggccaatgggtaaagccaggaggaagcccgtgcctggcccgttgggctccctcctcctcagagccgaagcagtccacactcggaacccagcttcacccggattaccgaggggttccacgcctggaggcagagctgcagcgtgggcccgctcgcggctttgcagaa

SEQ ID NO: 9466 - DNA, 1128 bp, Homo sapiens
  chr13:103052308-103053436
  hyper
cttttagactgtctaacaactcgcagtttctcctttgctgcaggaatggtggccgcaaacggtctcagcctccgcacccaccgcctccgtccccgcccacccgcacctcctcctcctctgcctcgcgctgcacccgcaggcggcagacccctcggagcgcgccaccccagctacgttgcattggcaaggttcggaggctggagggcagcagccacttgctgccccagtcgctggggctctgggtgccagtgcggcccccggcagagcccagggcgtcagggaggccgtggagagccatgatctactgcaccgcagtgccagcgtcaggagcttccagagcccgggctgccactgcgggacggccgatctgcccgctccctccttcagacacaaccccagacaaaaacagccggccccgggtccctctccaccctgaacggagctaggggacgccacacactcccggctgccagcgtgagcggttccgggaaaggctgcgcccagcctcctcgccagcgccgccgccaccaccatgcagccctccagcctgcctcccctgggttgctcgcccacagctccgcggccgcccccaatcgcctcggactgagacgcggggacgggaacccctgggatccgactccccaaatcagatgcatttgcatttcttatgtaatgtactgcaagttcccttgttggagccctttggaatcggggcgcatgatcaccagtaggcttaaaagcaggaactcacggcctggctcatccccacccctggccctgtgggaccccgacgcagggctttgacaccgctttctaaagggggggacttcaattacaaatattagaggggctgggcttgtcctctcagtctggggttccctcccggcgcaagccttgctcaagtattcccggtggcaggatgtgtcagaggcagacagggggaatgagttaatgctcgggcacccggagctggacgggggagggacgcgggggctgacggaggagcggggccgcgagggagggggcctcttttactttggtaaaggtgatcgtggtggcgaatattgtgcaagctaatcagaaagtctagagcaggttctcggaacccagctacgtccctcgaacctg

SEQ ID NO: 9467 - DNA, 31 bp, Homo sapiens
  chr13:103258072-103258103
  hyper
tttttcttttttttttcgagacatagagtct

SEQ ID NO: 9468 - DNA, 861 bp, Homo sapiens
  chr13:103451012-103451873
  hyper
ccaaacatttacaagacggactctcgaaatgatccaccgataaatgaagaagtgtaagaggtggacagaagcagccgagccttcggcagggacccgccggccgatcgcagcagccaacgcgactgcaaaggttgccgcccggcgtgcagggcaggcgcgcgggtctccgcgaccccaggacaatcaaagcccgtgccccggcgcgcccaggtgagggtcccctggcgttctgctgtcccggccgagaaccgcgctgctcctctctctcaggacaatgatgaacttgagttgctcctgccactggagcatcatttgggagcgaatccgtctcaggttccagccaaggtgtagggcgaggggattggcccgtgcgtcgggccaggctcagtaacgccttctccaagtggatggcggggtggacacgcgtcccggcgccccgggctccctgggatatgtagttcgcgacaggacgagcggaaatactgccaggattttaccacctctcgcccatttatttacttctcggtcaccgctttcgggggacagataaacaccacagatgcccatcaaaggggcgcacgggtctggaggcgcagctcaggtttttgcgttggtcaccctgccctccgcacgtggagagggcaggcataaagcaccttgaaaggaaggtgctgtcaatgctatccgacgacctgtcgccgggcaccgcagcatcctcgctcgctccgatgggacgagggacgccggccccagggtaacaggaggcgcctcgccggccgcgcgctggatgctgtgatccaggtccggagccgggttccgccgcggccgcagcgacccgaccccacccgacaggccagaggt

SEQ ID NO: 9469 - DNA, 138 bp, Homo sapiens
  chr13:103452807-103452945
  hyper
cgggctgggttggccacgggcagggagcgcagccgcgctccttcctctctgcccgcgtcgcctccgcgcgcactggttctgcgcggcggggcttggcctgcgcgactgtctactccgtcccggcggcctcggagcccg

SEQ ID NO: 9470 - DNA, 30 bp, Homo sapiens
  chr13:103454353-103454383
  hyper
gatctagggaccatcaggagttggcctttt

SEQ ID NO: 9471 - DNA, 154 bp, Homo sapiens
  chr13:107001523-107001677
  hyper
ttgcagggatggcccgacactccccgcagagcctgagagcgagtggcgagccaagataccagcggcacaatgtttcacctgcgctgccagatactcagacagagaaaacacacgacagtttgtcaaaacagccatcagcgcggcgcgctcgttt

SEQ ID NO: 9472 - DNA, 2699 bp, Homo sapiens
  chr13:107186447-107189146
  hyper
ggaagtgcattacaatcaggtcggccatcgagaccgcatactccggggctaccggcttatgaacgaagcgggaggccgaggtgcggcgggccctcagggagaagcctaaggcccgtctccccggcgcggaggaaagggctcgacgcccgagttctcctgcgaagcaggcgagctccccgcgcaccctcgggctggcggcgcggtgccaaggcgccccggctccagggctctgcgggcagcgtagcgactccaggctcccctctccagaacgcgcttcgctgccagcgtcctgccaccccggtcgcccgcccgcgggccccggaccacgccgcccgcgctccccgcgaatgcagcatctccgcctctctccagagcccaccagtccccgcgtgccggccagcctagattgtggccatgtccttcgtcctcgaaaacaggagagggtcaggtatcgccatcggacaccttcccggacttgacacccgagccgatagtagcttttagcgcctgggagcgttcgggggaggaaaggcggagagaccgtccgttccagcggggctcgggttggaaagccgagcgaggagtctccacctagtgaaatggggcgggggttgggggtgggggacggggaaccgaggttccagaaacaggctccgaggccccgcggactgacccctcctcccgcccggacggcgcggcggaccccggggcggggacatagggggatcgcggacgccacttacttggagttcgaggaattccaatagataggctctaaaactatcgatttggaaatcgcagttctgcataaaaccatcaaaacaccccagcagtacttccacacggagtcccttctcacagccatggcgaagccactcccagctccgcgcactccgggccaagaagggactgacgggacgcaggctgggacccccaatcctccggggcagactggcggggaagacggcgtgcgcccgcaggcagctccgaggcgcgctgcgcagctccagcggtcgccgggccaggtgcgctcgctctccggggccctcagggcgcggggcgggagcgcacgcgcggggcgcggcggcgcggcggactcggggttccggggcgccgcgccggacgcagctcggacggccgactcccgtgcggctccagggtgccgggccggccgcggctggcgggtgggcgcggggcgggtgcgggctgggacacaaagacccggagcggagacgaccggcgcgggcggcgggcgctgcgccccgagcggggccgcctgtgactatagatccagtgcagcgggcagcggcccgagcgcgcgggcgccgcgtcggcgcggttccatgtcccggagcacggagcggagtagggcgcctccgggcgcgcaggagccttctcagtccgcgcggctcccggcccccagggcaggaaagagggagctcggtccccgccgcgggctccggacgcgcgcgggcctttgtgtgcggggagggcgccgggacccgctgcgtgcgcagctcctcgctccggccggcgccgcggtccccgccgaggagagtcagcgcggccgccgcgctgtcagagcgctataaacgcggggccccgccccgccgcgcgaagcccattggcccgcggctccgcggccgcgcgctggttggacggccggtccgtccgtccgccatcccctcccgacattgggtgccgcgaggcggggctcgggctgacaggtgagccccgcccctggctcccgcgggcggcgggagcggagcagaagccgggcaggagaagcgctcagcgcgtgcacagggcgcccccggggcggcgagaggccttctgggcgcggtgcagacgtggaaacagcgacggccgagtagcgggccacctgtctccgcgcccgggggcgccttccccctcggcggaatcagagggcgcggctttccctcgagcagtgcggaaggcagcaggctccgctcggcgtcccttctccgcagatgcggcgctgccccgcgtgcaagacttgcactccgcgcgcacccttagagctcccggcttctgcgcgcttctcccgacgcctctcggcgagggcttctcacttgattttggtaccaatcgcctacggctcagtttcagtcagtggggccgggaattgcaagacgattcctgcgacgcggcgccggaatttgcagctctaatcagggcctgagcatcgtcgcctcccgccttctctgcgggcgtctcccttccctcctggccccccgggaaggtggcgcccctggagctttccccgcgtgtcgccggcacaggcacgacgcggggaccgtctcactagcctctaggagacacgcgcgcttcccaaagtgaccagagatttagagggtgtgagatggaaaagtcaaggcatgtgcttctcactcggcgtctgcaagaccccagagcagagctggcaggaactcctcgctactttcccggtcgagcgccggtgctgacgctcgtccgtgacttccacggagccacagcgcccactagcggccagctttgcttctccgcatctcgagcgctctgcggtccaccgacccggatccagcatactgcagcatctaatcaagtcacagttccaaggaaaatctttttatatgtccaacagtaggaagaacacggtagaaataaggcacagtgcaaatgtacgattcagtatgaaa

SEQ ID NO: 9473 - DNA, 30 bp, Homo sapiens
  chr13:107220221-107220251
  hyper
tggtgtgcttggagcgggacgagctccggc

SEQ ID NO: 9474 - DNA, 138 bp, Homo sapiens
  chr13:108518215-108518353
  hyper
agtgttgggactggacaaccccgagaacaactcccaaagtgtgtaggaattacaaaacgaaaggtaaaaatccgacaagttccagagcggagtgggatgcttgctcctcacctcctgcccgtcccccccggccgcccc

SEQ ID NO: 9475 - DNA, 256 bp, Homo sapiens
  chr13:108518444-108518700
  hyper
cgccacacgggcttggcagagtttcctagaaaaagagccttgccccggtcgtctttgcctcggttgcccttgccgccgccgccgccgccgtctcccggggaggggggcagggtgggggacgaggaggcggagaggagtctgtgtgcctgggcggcgggcgaggactcccccatgctcgccaggagcgcgggccaggagggctcctgctgccgccgctgctgctgctgctgctgccgctgcctctgctgctgctgct

SEQ ID NO: 9476 - DNA, 262 bp, Homo sapiens
  chr13:108518708-108518970
  hyper
tgctgccgctgctgctgctggtgctccttgtcccgggcccgggtcagcttggcctcggcgcagaaccacaagtgatcagagagcaggactgtgaaaaacaagagagatgccagagacagtcgccatttctgagccctctcggaatcgatgaacggtttctcgttctctcggggtgctgccaaccagatttttaagccgtcgtcatactgccgacacatccaagcacccctggtcatattttgggaacgcacagccctggccg

SEQ ID NO: 9477 - DNA, 465 bp, Homo sapiens
  chr13:108519280-108519745
  hyper
ggtgctggtggccggcggcgaggctgggtgcagggggcgatggtggaggtgacagggtggctggcgcggctccggtcacccaggcattgtcagcgcgcgggtccccatggccccgcggagcccagcccgctctcccctgccaggggcatgccgcgcctccgctgcccactgacggcgcccggagcgcctcccctcctcctcctcctcctcctcttcttctcctcctcttcctcctccttcctttccttctccttcttcttctcctccgcctcccgctcctgctccgcgctggctctcccagagtccggagcctgggctgcctccggcggggcgctccctcccccccaccccccaccccgcgctctaagtgctgccgccgccgccgccgccgccgccgctgccgcagggccgcccgcgggcgccgccgccggggctccgactgctgacgccgcctcccgcggagct

SEQ ID NO: 9478 - DNA, 195 bp, Homo sapiens
  chr13:108519901-108520096
  hyper
cgcagtggcgccggctcggcccgggaggagggagaaggcgcgcgggggcgggcggcggcggggccgcggggcccgggggcccccgcccggctccccgggctcaggcgcctgctctttcctttctgtccccctgtccacgatattttgttttaatcactgaagagaaaaataaaagtcagactgcggacggcatgg

SEQ ID NO: 9479 - DNA, 225 bp, Homo sapiens
  chr13:108520309-108520534
  hyper
cgtctcggatcccggaccgcgagatccatcgctcccagtgcgtgcagttattccgtcctgctgtgtgacacgggagaatggcgcgcacgcctgtgcacctgcatcgaccgtgtagctgcctgggtgacagccacccatttgtctatgttttctttcctattctaaagtaaacgattagaagtggcctcatagagtcttaggaagaaacagtaagccctgtgccac

SEQ ID NO: 9480 - DNA, 13 bp, Homo sapiens
  chr13:108520812-108520825
  hyper
ggtcacctcgatt

SEQ ID NO: 9481 - DNA, 30 bp, Homo sapiens
  chr13:108521047-108521077
  hyper
cctcatgccccgcccgggtgcacattcacc

SEQ ID NO: 9482 - DNA, 84 bp, Homo sapiens
  chr13:109147713-109147797
  hyper
ttcaggagtgagctgcgttcttagaattgtagcagagagagaggagggagagagcagaggatcggagggcaggagtggagagag

SEQ ID NO: 9483 - DNA, 124 bp, Homo sapiens
  chr13:109148154-109148278
  hyper
cgggcacaggggcaactgccgacccctctcacccgccgcgcggggctggtttccgagccgagtcccggccatcgccgcgtcgcctggcgcccggctccggcggacccttctccggcaggtaggg

SEQ ID NO: 9484 - DNA, 166 bp, Homo sapiens
  chr13:109148477-109148643
  hyper
cgtggagaggaggcttgtcggtcccttcctgggaaaggaatcgcggggacttcccaaccgctaggacgcgtaagccgaggctgggagtagaagccttctgaactctggacctaccccagaaggagggggcgaaactggccatttcgagggacgcggaagccccgtt

SEQ ID NO: 9485 - DNA, 301 bp, Homo sapiens
  chr13:109148885-109149186
  hyper
gtctcacccggggggcgtcgagcctcagcgcatcgccccgtcttccctggctgcagaaaaccactaggccggtggaagtgctccgtttaattggtccctagtacgcccccgaaaggaaatggagacgatttccgtcaagttctcttagtatttctgtcatttacagaaaagcagtagctactcacatgtggctcagatgtctgtgtgggggttgtgagccagggcattaaaattgggtgttaaccgtttgccactcagaagaattattagccattggaggaggagcggtttctcttgctaa

SEQ ID NO: 9486 - DNA, 2107 bp, Homo sapiens
  chr13:110434418-110436525
  hyper
gggacaagaagtcaatgctggcgtaggtgttggcagggggcagggcaccgggacccggccccccgcacccgccgccggtgctgccgacgcccacagcgctgatgagacccccgaggcttcgggtccggccccaggagctcttgtctcccggctgaggaagcggcggcggcggcggctgcggctggggtggcagcccgggctcctccctcacgtcgatggcgatgtagttgagaccattctggaagccggcagaggtctctctgcgcatgggcgatccaccgctcccaggacaaccgaccaagcccccgggctgacccggggtccacggccggccctgcggtgccaaagggggcgccggctgcaactgtcgtggggaggtgggcggctcgtcgccccctccagggccgacacccacgccgccctcgctgcttttcctgagagagacattttccacggaggccgagttgtggcgcttggggttgtgggcgaaggacggggacacgggggtgaccgtcgtggtggaggagaaggtctcggaactgtggcggcggcggcccccctgcgggtctgcgcggatgaccttggcgccgcggtgggggtccgggggctggctggcctgcaggaaggcctcgactcccgacacctgctccatgaggctcagcctcttcacgcccgacgtcgggctggccacgcgggcagcttctggcttcgggggggccgcgataggttgcggcggggtggcggccacaccaaaagccatctcggtgtagtcaccattgtccccggtgtccgaggacaacgatgaggcggcgcccgggccctgggcggtggcaacggccgaggcggggggcaggcggtacagctcccccggggccggcggcggtggcggcggctgcagagacgacgacggggacgcggacggacgcgggggcaacggcggatacggggaggaggcctcgggggacaggaggccgtccaaggagcccacggggtggccgctcggggcgcccggcttaggagacttgggggagctgaagtcgaggttcatgtagtcggagagcggagaccgctgccggctgtcgctgctggtgcccggggtgcctgagcccagcgacgaggccgggctgctggcggacaagagcgaggaggacgaggccgccgacgccagcaggggaggcgcgggcggcgacaggcgggccccgggctcgccaaagtcgatgttgatgtactcgccggggctcttgggctccggtggcagtgggtactcgtgcatgctgggcaggctgggcagcccctccagggacaggcgcgtgggcctcaccgcccggccgcgctggcccaagaagccctccgggcggccgccgctaggccgcacgggcgaaggcactacagggtgagggggctgcgtggggccggccccgaaggcgctggccgcctggctgggccctggcgtggcctgaggctccagacgctcctcctccaggatgcgccccacgggggagctcatgagcacgtactggtcgctgtccccgccacaggtgtagggggccttgtaggagcggggcaaggagctgtagcagcagccgggaacgcccctgagcggctccccgccggggtgcagggctgcggagaagaagtcgggcggggtgcccgtggtgaccgcgtcgctgggggacacgttgaggtagtccccgttgggcagcagcttgccatctgcatgctccatggacagcttggaaccgcaccacatgcgcatgtacccactgtcctcgggggagctctcggcgggcgagctggccttgtagccgcccccgctcgccgggaatgtcctgcccgccgcagaggtgggtgctggccccgcaggccccgcagaaggcacggcggcggcggcggcggcggcggccctgggctgcaagatctgcttgggggcggacacgctggcggggctcatgggcatgtagtcgtcgctcctgcagctgccgctcccactgcccgcgagggccgcgccgggcgtcatgggcatgtagccgtcgtctgcccccaggttgctgctggagctcctgtgggagccgatctcgatgtctccgtagtcctctgggtaggggtg

SEQ ID NO: 9487 - DNA, 91 bp, Homo sapiens
  chr13:110958962-110959053
  hyper
ctgccgagcatacccgcgacgcgggttcaaatcccgccggctcccaggcaccctcaccccgccacagcgcgggctgtttctcctcccttcc

SEQ ID NO: 9488 - DNA, 131 bp, Homo sapiens
  chr13:110959517-110959648
  hyper
cgagctccccaatttgttggcgctgccccctcccccccggcggtgcgcgggcggcgcctcaaaggggaggaccctgcggcgcgggtaagaggcggcgggagcgcgcggcccgggagtgtggctgcagtgcg

SEQ ID NO: 9489 - DNA, 390 bp, Homo sapiens
  chr13:110959752-110960142
  hyper
cgagcccccggggccggcgcccagagagcccagcaaggccggccgccctgccggtgtgccgccggcgggtgcttctggaagggccaatgcgttcgggcagcagcccctgaagccgagcccgaggtgagagcgacccccgagcggcgcccagaccctggcccgagagcaccgacttggagcgccttgtgcaggctagggctgcacgctctcctgcttgggagtagaaagggggagggtgggagagcgaagaccgagctcctcggccaaggagcacccacaggggcctaacgggaggctctccttctttccgggtcgtgggggggacggccctccggtcacccctgcatgcgggccgcgcaccgcgctgtccccgcgtctcgcggaccgaga

SEQ ID NO: 9490 - DNA, 442 bp, Homo sapiens
  chr13:110960344-110960786
  hyper
cggtgtaactctcggggactgacaagccgggcccgcacgttcacgtctctcttcctccctttcccatgcaggtggctgctgctggggacagtgaccgtggggttcctcgcccagagcgtcttggcggtaagtcctggctcccgcgcttggacttgcgcgcccgagagtggttgggacgtttgagtggccttggagaaggcagctcgtccgtgcgctcccgagtgtgtgtgtgcgtgtggatgttcgccaggctgcccaccaaggttctgagaaagcttgctcttccctcatcatgctttccacctttccttccccttgggttcccagcgtcaatcctgtgttttgcaagcgtcggcctttcacgggaactgggaacttaaaatgtagcctgaggcaccgttttcgttgctttgggcaaagctgcagccgtagaggccaggaa

SEQ ID NO: 9491 - DNA, 31 bp, Homo sapiens
  chr13:111158610-111158641
  hyper
ctctctctctctctctcgggctgcaggtgca

SEQ ID NO: 9492 - DNA, 375 bp, Homo sapiens
  chr13:111213573-111213948
  hyper
ggaggcatttgctgtccgaggccgggaccctgtgcgcggccgggtgccctgctggaagccccgcgccccccgtccccggcggagccccagggcggtgtggctcatgcggcgccggcctcacctgcggtgtcccagatggagatgttgtaggagcgccactgcttcaggtagaaggcgccgcccaccgtgctgaccgtgtccgggaagcgccgctccatataccgctgcagcagcgacgtcttccccacgttcatgtcccccaggagcacgatcttgctgtcgggcttcctcatcttcccgtaagaacccccagcgcccccgcgccctctccccgaggctggccggctcgtgcgccctgggcgcagctggaggagc

SEQ ID NO: 9493 - DNA, 72 bp, Homo sapiens
  chr13:111214282-111214354
  hyper
gcaccttccgcccctccgcttctgcacagccggggctgcggtgcgaggagcttggccgcggggcccgaacga

SEQ ID NO: 9494 - DNA, 172 bp, Homo sapiens
  chr13:111268136-111268308
  hyper
ccgcctctgctggctcgcgggggggaagcgccgccgaggggcagcccgcgcgcggggccggggcgccgtgtggcctgcggggcggagtagggagaggacggaggcctcctggaacggcgcggcgacggctgggcgcggcttgggtgatgggagcctccgtgcggggtgacag

SEQ ID NO: 9495 - DNA, 31 bp, Homo sapiens
  chr13:111305635-111305666
  hyper
ccgtctgtccatctcccgggtgctccttccc

SEQ ID NO: 9496 - DNA, 30 bp, Homo sapiens
  chr13:111358909-111358939
  hyper
caccccagaacacacgtcagcaccccaata

SEQ ID NO: 9497 - DNA, 30 bp, Homo sapiens
  chr13:111364909-111364939
  hyper
aggcaacgggctcgcgtggcgtccaggctt

SEQ ID NO: 9498 - DNA, 30 bp, Homo sapiens
  chr13:112710413-112710443
  hyper
ggaccgggtggacacgggacgggagggggg

SEQ ID NO: 9499 - DNA, 30 bp, Homo sapiens
  chr13:112710808-112710838
  hyper
gcgtcccagctgctcgcaaaccaactgctc

SEQ ID NO: 9500 - DNA, 850 bp, Homo sapiens
  chr13:112711800-112712650
  hyper
cgagaactaaatccgcgggctgaaattacgttttaaaaattaacatgttgaagcgtgtgccatttagtgagaggtgttttgggcaaagaatcaatttaactgtgactgaccgacgggcttgactgtattaattctgctaccgaaaaaaaaaaaaaaaaaaaagcaatgagccgcaagccttggactcgcagagctgccggtgcccgtccgagagccccaccagcgcggctcacgcctcagtctcgccgccccaaggtgggatccgacgcccaaaggagggcgccccaaggtgggatccgagcgggccgccctaggaggagtgaaccccgcccgggcgcacagctccgtgcgcctgtcctccctcctccagcgaaatcacacccgctttgcctcctcttgcagcaccgcgcgtgcctaggttctcggtctgcgcagctgggagtctcccccaccagcgccgcggagccgcccgcttccgctccctctttccgcgggtttgagcctcccgtggagaggaaaggtcacgaagtttcaaaggtgaaatggattttcggcggtggctggtgcgggagtcaatgggcagggcggggcaagcctggcagtcatcgacccgagcagggacccggctggccgcctccccttgcaggaaacaggtgtttgaacgcgatagcggccgccagtcaactaaggcattaaaagctcgctttataacatcgatttcctggagtgcggtggggcctgcgttctggaagctcgtttgtgaaaggcggggttgggggaattgccctgatggtaccccagttggcgcagaagatccccaaaagtccctgtcaccgcagcggcggacagc

SEQ ID NO: 9501 - DNA, 30 bp, Homo sapiens
  chr13:112715613-112715643
  hyper
gagaagcggcccggcggtttaattgccaat

SEQ ID NO: 9502 - DNA, 30 bp, Homo sapiens
  chr13:112716010-112716040
  hyper
ctcccgtgccggggcgtacagggcaggtag

SEQ ID NO: 9503 - DNA, 368 bp, Homo sapiens
  chr13:112717608-112717976
  hyper
tcttgtctctttcaaaagctccgcctggaaactagcggcttcctcttcatctgcctcctttaactgtggcctcggccctctggggcgacaccagagcgcggaagcctgagcccctcggagatccggggaggcacctacacatggcctcaatcctccaaccggccccagaagccgtaggagctgaacccaggagggcaaccggttgtggtgcggccacatgtccctggagagtgtcagcaagacgggtcgacttcaccaggaccacgaaagacagggcagagtttctgtcttctttcactgtcccgtagaactcctagcttgtccatcgtgctccttgcttgggactcgggactgacactgggccagaa

SEQ ID NO: 9504 - DNA, 30 bp, Homo sapiens
  chr13:112720167-112720197
  hyper
cggcggctgagacccgtcctgaggccccgc

SEQ ID NO: 9505 - DNA, 30 bp, Homo sapiens
  chr13:112726647-112726677
  hyper
ggctccagaggcgtcggcggcagaatttaa

SEQ ID NO: 9506 - DNA, 30 bp, Homo sapiens
  chr13:112727145-112727175
  hyper
tggccgggcctcctcggggcctcgggcctc

SEQ ID NO: 9507 - DNA, 8 bp, Homo sapiens
  chr13:112758364-112758372
  hyper
ccattcag

SEQ ID NO: 9508 - DNA, 119 bp, Homo sapiens
  chr13:112758495-112758614
  hyper
cgagggagccccttatcccggtgacagaatgggacaagctgggaaaggcttagaccacacaagtccaaggctcaccaggccgcagaaagcctgccttgggaaccgggggtcattatccg

SEQ ID NO: 9509 - DNA, 92 bp, Homo sapiens
  chr13:112759688-112759780
  hyper
tcccgagatgagcgtcgctgcaatccgcagcgaacgcgggtagggacctggagacgcctcccgggcgctggcggggccggtgtgggccagct

SEQ ID NO: 9510 - DNA, 97 bp, Homo sapiens
  chr13:112760006-112760103
  hyper
cggggcctgggggggcccaggcgccggaggagccgtcggtgccggaatgcagcgtgtttcacttgggagaaacgttgccctcggtcccttgcctccc

SEQ ID NO: 9511 - DNA, 30 bp, Homo sapiens
  chr13:112760392-112760422
  hyper
cgctccgtttggcggcggtggaggggccgc

SEQ ID NO: 9512 - DNA, 410 bp, Homo sapiens
  chr13:112760789-112761199
  hyper
gatgagtgctttaagagcaaacgagcaaatcccacctcgagaatcaacaaacccaagctctggccaaggctctccccgcgttttcttctcgtgacctggggaatgtcccgccccatcgctcacctggctcttgtcatctcgctcatcttgaagtgacccgtggacaatgctgctccctgccgcagctccgccggtcactcaggcagaacggggtatgcaaatggcctggagaggccgaggccgaacactgcgcccattgtcccgggcgctcaaagcgccgagcagctgcgcagactttctgggctcggaccctcggccgccacgctaatgtcatcattgcaaaacatcagattttgagaactatgcagtctgaattcattagcagccttctcggcgaaggttcttttccc

SEQ ID NO: 9513 - DNA, 216 bp, Homo sapiens
  chr13:113547115-113547331
  hyper
ccccagtggagccactccctgcgggtctgagtggggcccggggtctctgcacggtcaccgatgctgctgctgctccagggagcgggcttgcaggagcaaggatccagtccctgaacgcacgtgctccccccgggagaaattctgcagccaggcttggtccacgcaccgtcctcccggcccacacaccctcctcccggacctcagtctgtctctgtg

SEQ ID NO: 9514 - DNA, 31 bp, Homo sapiens
  chr13:113548353-113548384
  hyper
ccattaggcacgaccccgccccgctgcccgc

SEQ ID NO: 9515 - DNA, 31 bp, Homo sapiens
  chr13:113548669-113548700
  hyper
ggaggcgtcaggacgcgcggacacctgcggg

SEQ ID NO: 9516 - DNA, 189 bp, Homo sapiens
  chr13:113597655-113597844
  hyper
gccgcagagcccaggcgcggggagggcggcggctcccagctcccggtccccggctccgcgccgcaggcgtgaacgcccaacggagggcgccggcgcccgggagaggcgccgccttggttgcaggggccggggcgcggcggcccgggctttgagagacgggccgctcttcccggcgcggtgccttccagg

SEQ ID NO: 9517 - DNA, 1128 bp, Homo sapiens
  chr13:113622875-113624003
  hyper
catccccggccagccacggacccacgcatggacccagcgacccacggacctgcttacctgggcgcggcgcgggtggcatgcggccacacggaaggggcgcgctgggctgctgcggcctctgcagcttctacacctgccacggggcggccggaggtaaagggaggcggcggccaggcgcggccccgcggaggcagctgcactcgctcggtccactcgcggcttcgcggctgcccgcaaaccaggagggcgtggagacccggaaccggggggaagggcgggggcacttgtgcggcacccgcggggctcccaggggacctcggcggtgacacgaatttctaggtgaccttggcggtgacacgaatttctaggtgacctgtgtgatacactaggtgacctagtgacacaggtgacacttccaggtgaccgcggcggtgacccgcggggctcccaggtgacctcgttggtgagccccggggctccccgacgaccgcggcggtgacacgcggggctcccaggtgaccccggcggtgcactcacaggactcccaggtgacccgcggtggtgacacaccggggcgggcgcgcgccgcttccgcttccgccgagccgccccccgccccccgcggcgcagcgcgcgcccccctcccggtggcgcggaaccaatcctgggcagggaggcggcggctggaggctgaaagcgctgccgtggccccctccccgcctccgccgcgccccctccgcactcgcacggccccacccgcaggcgccccccgtgcggaggaagcggatctgccaggatcatttttgttgtgtcggaggatgaggttttggctgaggactgaagagatggccttggaagaaatggtgcagagattaaatgcggtttccaagcacacgggtaggaggagctgctggccgtcagtgatctgtgcttaagcttgacatcatgggctgaaatgtggggaaatgcgtctgatttttgtaagccgccctcgtgttcctttctagccgtggtagctgtgacatggggggcactggttggcagctggtgtgttttcagaggctgtcggcgatcgtatgctgcccgggatagtcaaaatgactgcacgttggtgacactggctctctc

SEQ ID NO: 9518 - DNA, 30 bp, Homo sapiens
  chr13:113862956-113862986
  hyper
cgccgaacggagagcgccaccccctacgcc

SEQ ID NO: 9519 - DNA, 30 bp, Homo sapiens
  chr13:113864394-113864424
  hyper
tctaccaggtgaggcggcggccggggctgg

SEQ ID NO: 9520 - DNA, 88 bp, Homo sapiens
  chr13:113951224-113951312
  hyper
tgccctttctcccctcgcgggcttcctctttcctcactttctcccgccactactcttcctcttccttttccgcgaacccagcccactt

SEQ ID NO: 9521 - DNA, 77 bp, Homo sapiens
  chr13:114017867-114017944
  hyper
gggtctccttcgcgtccgacccgccggcccatctcaaagcgggaaaaccggtccctgcggctgccctagctcggagc

SEQ ID NO: 9522 - DNA, 454 bp, Homo sapiens
  chr13:114017991-114018445
  hyper
cgctccgggagcccggactttgcccggcccgtcccagcccaacccacctgcgccctcgggacccacctgcgcccccgggacccacctgtccggctcctggggacgcccccgccctgcagcagccgggaccatttgatcgccctgcgggtgagcgtgaccaggtagctggagaaaaacttctcgtaggcggcgtcgtcgaagtcctcaggccgctcgaatccgtacgggtcgatcctgcaaaaccgagagaaggaggccggcgtccccgaagtttcctctggggggtcgcgggcccgcgcggggaccgcagccgccggggacgcccgcaccccgcgccacacacctggggacccgcgagcgctcggcgggctgcatgcggggagggaggcgcgcaccgagcgaggccagcgggtcccaagttcgcctcccggctccggggcgcttaagtccttcc

SEQ ID NO: 9523 - DNA, 31 bp, Homo sapiens
  chr13:114048391-114048422
  hyper
gatgtggcagcagctcgcgggccggggcttc

SEQ ID NO: 9524 - DNA, 689 bp, Homo sapiens
  chr13:114285597-114286286
  hyper
aaacttgaccgttagcgccttgtgtgcggtttgggggtcacgctctgccctgtcctgttcttgcttgcttgggtcgtccgaagtttcttgttgcttttgtctaattggagaagatgcctgtgactgacaagaggaagatgagccacattcagaaccggtggggtgatgccgtcaccgtgacaaaagcgtccaccgctggacgtttttcctgctccgtcatggctgctcactgtggttaaggaaattcagcagtggctgcggatagcgaacagatggtgggcatggcaccctcgccgtgtgggaggggactgactgtctgaattgtctttttcgactgtaggtaattggtacgcctcagagaccggcagcgtcaaacaccctggtggtaggaagcccacacacccccagcactcactttgcctctcagaaccagccttccgactcctcaccttggtctgccgggtgagcacttccctctggacccttagagttgtaggactgcttgcggttcgcacctccacgttctcctgggccacgtgtgtcacacagtcgtgcgatggggctcccacgcgcgttgacgccagcctccgaatcacactcacccatcatcgtggcctgcacaggtgtgcagccgaggcgcactgcctcggtcatggagaagtcgggctgggcaccgcccaccccgcttt

SEQ ID NO: 9525 - DNA, 301 bp, Homo sapiens
  chr13:114565969-114566270
  hyper
cggggccagcaccgtcgggctcctgaaagcacccgctgcctccaggagagcacctggcagaacggggccgcggagccgccctcccctcccgcatgcggccccgctcgattcctggaatcttatttttggacctgctgccgcaagcagttcccgccctcggccctttcaattcctctttcgggaggggactgctctccacccctctcaggaggacgaggcgcggcccgggggttcctcacctccagcccagcagagggagggccgcggggaagcggtttgggttttaaccattgtgtttctc

SEQ ID NO: 9526 - DNA, 79 bp, Homo sapiens
  chr13:114566409-114566488
  hyper
cgggccggggctcctgggaccctgaggccaggcctcgccgcgcggagctggggggcggcagcagcgctgcctctcggga

SEQ ID NO: 9527 - DNA, 43 bp, Homo sapiens
  chr13:114776306-114776349
  hyper
gcctccagcaccgcaacgcccaggaggcgccaggttaggccat

SEQ ID NO: 9528 - DNA, 30 bp, Homo sapiens
  chr13:114776875-114776905
  hyper
ctggagggggtgggcgtcccacagtctcag

SEQ ID NO: 9529 - DNA, 31 bp, Homo sapiens
  chr14:19403466-19403497
  hyper
tggcagagggcctaggcgcaggtctgctcag

SEQ ID NO: 9530 - DNA, 30 bp, Homo sapiens
  chr14:20773920-20773950
  hyper
agtaaccacacagacgcacgcagcttcgcg

SEQ ID NO: 9531 - DNA, 30 bp, Homo sapiens
  chr14:20811548-20811578
  hyper
gatgagcttccctccgccctatgggaaaaa

SEQ ID NO: 9532 - DNA, 63 bp, Homo sapiens
  chr14:21093066-21093129
  hyper
gtttcctttgaacgcggtgacaggcttacaggtctgtgaacgaaagggcgcctaataagtgac

SEQ ID NO: 9533 - DNA, 139 bp, Homo sapiens
  chr14:21093454-21093593
  hyper
aattttgcacttgtacgctggggcaaaatgctgacagaatgaagaaggtaattgcaaactcctataacgtgtgtggtagtgtggccgagcggtctaaggcgctggatttaggctccagtctcttcgggggcgtgggttc

SEQ ID NO: 9534 - DNA, 344 bp, Homo sapiens
  chr14:21098931-21099275
  hyper
ctgcgagccagttttcgccccaggagcgcaggaagggaccaccaggcaggctacaagtggagaagtgcgcaggactccgggagtcatggctatcagcagattagattagatctgttccccacaaacacagaggtatggaccaagtgtaacatttttctcccagagacgtgaacagtctagtttcttcctcgcttactgcagcgtacaaacacctattttcccagtatcgttcataggatcccgacgctgtactttttcgtctcaaatccaggatctggctttcatggaaagatcataaaatgcttcctttcttcactagtttgtttcagcgttgaaaaggctaa

SEQ ID NO: 9535 - DNA, 291 bp, Homo sapiens
  chr14:21100047-21100338
  hyper
acaggacgtacccctcggaccttcagagtttgggggtggacgcagtgagggcgccaaggcttccagatctcccccagcctttcagcggagtccggcttggtcacagattcctctaagttacctgaagcagaggtggctagaaggggtccagcccttttcttggtcctttaacactcctcttcctagcatctcggagtcggaaggcagctccttctctttgggcctccaggcttttctaagcgccaacttgaagtccagaaagaataaaagtggcgtcgtcgcatgggaagg

SEQ ID NO: 9536 - DNA, 285 bp, Homo sapiens
  chr14:21100725-21101010
  hyper
tggccaaagcacccacgtggagtgctgggtgctgtaggcgagaggtctgaggtagtggcttttagagctcaacatcttggtaatgttggttcgaccttttcccctgccagtcccgcggtgacctttatctttcggtgagtgaaatcggtcgttcgtgtttttcgtgggtcttccaaccacaggccgcctgagatggttctagtccctttgagtatacagacccttcctgtgcattgaccgacacagctcggcccggatcccgaaatgaacgtttctaccttcgga

SEQ ID NO: 9537 - DNA, 138 bp, Homo sapiens
  chr14:21101037-21101175
  hyper
cgcacgttgactttcctggagtctggagaaaatcactagattctaaaggaatcaaaactgttcaagtgttgtgctacaactaaaaaaataaatgaacactcttaaagaatagaatctctccagttctggctcgttggt

SEQ ID NO: 9538 - DNA, 88 bp, Homo sapiens
  chr14:21101234-21101322
  hyper
ccctttactttcctttccgtttcatctttctctctttaaagtcagtagttaacaaatactgcaatcggcgctacggctaggtcaccta

SEQ ID NO: 9539 - DNA, 31 bp, Homo sapiens
  chr14:21151765-21151796
  hyper
cgttaagtccaaaggccggcagatatatacg

SEQ ID NO: 9540 - DNA, 31 bp, Homo sapiens
  chr14:21152111-21152142
  hyper
ccttcagaacagcaggcggaaaagagaaatt

SEQ ID NO: 9541 - DNA, 30 bp, Homo sapiens
  chr14:21152720-21152750
  hyper
cacgcccccatctccgtccgtgtacacaca

SEQ ID NO: 9542 - DNA, 863 bp, Homo sapiens
  chr14:21439058-21439921
  hyper
cacatccagccacctccgcaatggaaagctcgtggcatacagcaggcgctcattatttgaagcctcttcattctcctgcttcctcggtggttaaggaggcttttggaagttcaagtccgtctcagctaagaaccaggagacacggctttggtgcctctcggcccgctgggtctcggcggcgcagcgtcccctgccggccactgtggcggcggctggaatcagcctcagcacttaaggggccgcgcgggaggagttgccccacctccaggcagctctttccagagcagtgagggcaagtctggggattatctccataaaggaagcgaggtggctcggtggaggggcttcagatccccttcccaggaccctgtgacccgccatcggaagagagtggacctcattctatttcaatgtctgcatagtacagacatttgctgtgggcaaatcggacccatgagcccagagagcatcatcccgggaaagctttcccgaagcacaggcttccctgcaccaccatacacgcgcacacccgcacgcgctcactcccccagccctcctcccctccctcactcccgccctggaagaagcggggagctgaggggagaggtggaaccagcagagaaacgggccgggcaggagcccgcaccagcccggcttgggacaccgcagccgctcctgccctctgctggctggaaggcgcacttacacattgcggtcatcgcggatcgccgagggccgctggtgccgctctgccgccaaggacgctcagccattggagtagaagtgagagaggccgcgggctgagtagagaggggtgaggattccggaaaggaagcatcgtcaggaagcgctgaagttcctac

SEQ ID NO: 9543 - DNA, 30 bp, Homo sapiens
  chr14:21492721-21492751
  hyper
acaaagattggtgccgtcgcttctctcctc

SEQ ID NO: 9544 - DNA, 215 bp, Homo sapiens
  chr14:21492960-21493175
  hyper
tggccggtgccaagcgccccggaccttgcacacaacctcgcgcgcaccccaaacacgccctgcagctcttggagcctcagcctttgtgcgcagcaaccgagcgcccgctccgtgctggccctttcccccgagcctccagctccaggggacgcggatcaatcacaccgcccgccggcccggctggcgccttccaggccctacggcccctcgcctgc

SEQ ID NO: 9545 - DNA, 65 bp, Homo sapiens
  chr14:21539065-21539130
  hyper
acagctgtggctgggccgggtcccggggcatggccaaagagggaaattcccgcagagaaaaagag

SEQ ID NO: 9546 - DNA, 31 bp, Homo sapiens
  chr14:21553686-21553717
  hyper
tgttacgaagactaaacgtagagcacttggc

SEQ ID NO: 9547 - DNA, 30 bp, Homo sapiens
  chr14:21566069-21566099
  hyper
catccactcaggctcgcggctctgccgccc

SEQ ID NO: 9548 - DNA, 30 bp, Homo sapiens
  chr14:21851939-21851969
  hyper
agaaaaaagggcgccgagaaacagggttat

SEQ ID NO: 9549 - DNA, 30 bp, Homo sapiens
  chr14:21853022-21853052
  hyper
ttcccccaaataaccgttacttcagttaat

SEQ ID NO: 9550 - DNA, 30 bp, Homo sapiens
  chr14:21905537-21905567
  hyper
ccttccccctcccccgcaggttaggttgag

SEQ ID NO: 9551 - DNA, 30 bp, Homo sapiens
  chr14:21979658-21979688
  hyper
atgttgcttatagacgcgcatgcggccatg

SEQ ID NO: 9552 - DNA, 125 bp, Homo sapiens
  chr14:22005030-22005155
  hyper
gtttccgctgctttcgccgagacattcccgggtagagagttgggagagggaggggcaacgctcacttggtcttaaccggggtgacctggtctcgtctcccccttgggtccgaagccaattgatgc

SEQ ID NO: 9553 - DNA, 30 bp, Homo sapiens
  chr14:22694049-22694079
  hyper
ctctgccttacatgatctttgaggaactga

SEQ ID NO: 9554 - DNA, 30 bp, Homo sapiens
  chr14:23291882-23291912
  hyper
ggagtctgggcgagcgccccaacccctgac

SEQ ID NO: 9555 - DNA, 222 bp, Homo sapiens
  chr14:23356044-23356266
  hyper
ccaacctggtgccgcgcaacgccaagttcttcaagcagcgctccaggtcgtgtcacgacctctcggtgctctgagccgcggtcgccatggccactgcggtcgccatggtcaccgcgccctccgctcgccccccctcgccccgccccgcccccgtccggcttccttggtggaggccgtctaggaaaccaaaaactcccaggatgccccggtgtgaccgccggg

SEQ ID NO: 9556 - DNA, 65 bp, Homo sapiens
  chr14:23450507-23450572
  hyper
gcccgggcggcctccggaacgaaaggacctggtggctcctccagacccgacggctcaatccccga

SEQ ID NO: 9557 - DNA, 538 bp, Homo sapiens
  chr14:23450867-23451405
  hyper
gcggacgggacccctccgggagaatagcctgccggtgctccggccaggggtgggccaaacaggcacggccccgctggcaaggggctcccgtggcgctggtcgtagcccatgctgatgccgctggtgcgattgctgcagggccggctacctccagctccgccagcccccgccccgtccagcagcaggctgccccgggggctggacggcttgctcgcgtcgctggccgagctactggcgaagctagagcgggggctgagggccggggccgtgggctccagccgaaaatcggggggcaacgactgaggtagaggcaaggcccgggtgggcggcggccccgcgggaaaagagccttcgtagcgcggcgcctcaaaggagccgcgctgatttcgctcagcgtccagggaaccttgctcccgggccggctccaacggctcatccccaggtcccccagtagctcctcggggccctgacttcctaggtccccccaacccacttaggcgccccttgcccggcccgggggtcccgtcagacccagacc

SEQ ID NO: 9558 - DNA, 222 bp, Homo sapiens
  chr14:23451948-23452170
  hyper
tggatgtggagacccgcggactggacgtgagaggcgggcaggggcagttggggcagctgcccctacaacactgaagaattggaataggaaagagtgtgggggtaggggacggggactctttgtctgcagttggaatgcgcggaggggcatggtggaatgtgtcgcgtcccgggaccggacgacaggaggcatgttctgcgctagcaccgtgactttgttccc

SEQ ID NO: 9559 - DNA, 31 bp, Homo sapiens
  chr14:23775833-23775864
  hyper
gcccagcccagcccaccgtgccctctcagcc

SEQ ID NO: 9560 - DNA, 189 bp, Homo sapiens
  chr14:23776070-23776259
  hyper
gaaacggcccggatcccggcagcggcctgacccgtgagatccctaacctggcaggcgggcggggttggagactggctgaggtgggggtaagggaggagctgggcctttgggctgcactagggggaaccgggaatagagatggtgtcggcaggaagcccttggccttgggtttcccgggaggacagtcat

SEQ ID NO: 9561 - DNA, 30 bp, Homo sapiens
  chr14:23821420-23821450
  hyper
catgcccagagccacgaagagcaccggcag

SEQ ID NO: 9562 - DNA, 453 bp, Homo sapiens
  chr14:23834334-23834787
  hyper
tgtggcgcctgagtcgtggcctccgccaaggttggaggaggagaaagaaaacccacaaaacttcccaaatgagaggcaggctagccaggcaggaggaggagcggggcgggccggggcgtcgctgcgggacggcatccaagggcgcgcgctgcgtgctgtccccgcggcctcccgggcgccaccggctcggccaggccccgggagctgcccgccctaggccgcgggggcgccccgggctcgcaggatccgaaaattcccttcccgggccggggcgggtgagcaggcgggcgctgggctgcgctcgacgcctctccaggccgctcaggagagcctcgagggctgggagaagccgccggggcggttgggctggacgagcgagtttaggggccaaccgtctccacccgccggccgcgctgcagagcggtgctcccagggctggggtctgcggcgacc

SEQ ID NO: 9563 - DNA, 31 bp, Homo sapiens
  chr14:24036950-24036981
  hyper
gcttctgcctcaactccgctcctctgccccc

SEQ ID NO: 9564 - DNA, 30 bp, Homo sapiens
  chr14:24682901-24682931
  hyper
acgtgcttgttctccggaaggaaatgtgca

SEQ ID NO: 9565 - DNA, 30 bp, Homo sapiens
  chr14:24685344-24685374
  hyper
gaagaggattgcagcgaggtaccaacacga

SEQ ID NO: 9566 - DNA, 30 bp, Homo sapiens
  chr14:24803664-24803694
  hyper
ggtagagaccctcccgcagcagaggctcgg

SEQ ID NO: 9567 - DNA, 30 bp, Homo sapiens
  chr14:24868067-24868097
  hyper
cgccctctcctccgcgcccctttaagctat

SEQ ID NO: 9568 - DNA, 30 bp, Homo sapiens
  chr14:25518609-25518639
  hyper
aagatgccagagttcgcgaagatcggagtg

SEQ ID NO: 9569 - DNA, 31 bp, Homo sapiens
  chr14:26892909-26892940
  hyper
tacaggcatgggctaccgtgacaggccacat

SEQ ID NO: 9570 - DNA, 224 bp, Homo sapiens
  chr14:27066562-27066786
  hyper
ttccgcgagtccggcgggtccaggtctatgggaaccccagtgtgggtcccgttctgctggatgggagctgccgccatcatgtttgcagttcctgccgctgctaccgggagaaggttctcccttttgttttggctttttcttttcttttttcttttttttttttttttttttttgcgtttggggtttcttaaggttttttttttttaatcggatcaatataaatc

SEQ ID NO: 9571 - DNA, 140 bp, Homo sapiens
  chr14:27067016-27067156
  hyper
gagcgcgagggctggcggggcgcggggagaagccgaggaggaggggagagtgagggaaagagtgaatgagcaggaggaggggaaggaggtggatgccgagagaggagcgagcggcagaggagggcaggagccgggaagga

SEQ ID NO: 9572 - DNA, 412 bp, Homo sapiens
  chr14:27067372-27067784
  hyper
gtagactcccacacacttcgcgctcgggtccctgcctctcagcagcgccgccgcctcccagcgccgatgcttcagccggcggggcggctgaggggtgagggggaactccgcgggcgggggcgagggagcgtgtgtgcgcgagcgtgtgcgcgcgcgaggggagcgcgtgcgcggtgaggacgcgcgccggcggttggggcgggggcgggggccggggcgctcctgtgggaagggaggggtgaaaggtcgctggtccccggcaacacggctcaggcaaacgtaagcggcttgtcgcagaaaccaaggggtccacgaaacgcgctaggctagaaggcgggaaggagagattactgacagccgtgccagccaataaaatagaaatgtgagaaaggttcttcgggccccttcccaa

SEQ ID NO: 9573 - DNA, 30 bp, Homo sapiens
  chr14:27068101-27068131
  hyper
acttagagtgtcactcgccgccttaaatcc

SEQ ID NO: 9574 - DNA, 30 bp, Homo sapiens
  chr14:29225834-29225864
  hyper
agtttcttgaaactcggaggctcagctcag

SEQ ID NO: 9575 - DNA, 410 bp, Homo sapiens
  chr14:29226083-29226493
  hyper
agtcgggaatagccccgcggtacctggggatcccagttgttttttctaagaaagcccggggttaaaaaatgcattggaatgtggcgatgcctccatcagccgtcactttataagttcccaagtcacgctgctctagaccattgtggatgaaagtggattgtctctccagaaccaaatattccctgacctgcttccccaacgcgccctcacgctttcctgggagagcacagcgctgccggagacgcggcgcttctgtcaattgtgcagagcaattactaagaaaatattgtgacgatgttgtagggcgaaaggggacgtgaggaggaaagggagggggagttagtttggagagcaatttgcaaaggaatattaactttgattcccgaggtcaccgcgggaaaaggggttct

SEQ ID NO: 9576 - DNA, 482 bp, Homo sapiens
  chr14:29234656-29235138
  hyper
ttcccaaggctccccggtgctttccagcagcactcagggttggcaagagctggcttcagtatactgttatttcaggaatgaggcccgcacaaaataaaagcatttgagaaacggaaaggaaaaaaaaggagtgaaaataggaaggcttaaaaaaaaaaccggaaagaaatagacgcccacccttattttccctccaatgtcaacaagcaaaacgaaaatatttccagggtgatcgctcgcagctacccgcttccaattcggattagaagctgaggctggagcggcgaggagaaaacgacatcgagtcaccccgcgcgtgagcgacgctctggagcaggagagaaggaaaaggaagagacacacgtatatagcatgtgttacctgatttatttcgagattgtttggtactgttttctctctgggcacctctcatttcggaaggccatcagaggcgcccactactgagcggccccggccgccgc

SEQ ID NO: 9577 - DNA, 123 bp, Homo sapiens
  chr14:29235361-29235484
  hyper
cttatccaaagctgcgctagactattacctacaaagggcacaattttcctgctggctcagaaatgccagacactggcctgcaaggccgactcggaaaagtagtgcctcgcctctacctcctcc

SEQ ID NO: 9578 - DNA, 30 bp, Homo sapiens
  chr14:29236206-29236236
  hyper
cttcacccccggggcggtggttgtttcttt

SEQ ID NO: 9579 - DNA, 30 bp, Homo sapiens
  chr14:29254665-29254695
  hyper
gcgctccgcattagcggggcagttcagcaa

SEQ ID NO: 9580 - DNA, 30 bp, Homo sapiens
  chr14:30396138-30396168
  hyper
aaggaggggcgcggcgaggaaagggcaaga

SEQ ID NO: 9581 - DNA, 101 bp, Homo sapiens
  chr14:30396429-30396530
  hyper
ggctggcagcggtgcggcgacttaccttctggtcgacaatggagcaagccatctcgcggacgtgcgccaggctgtagtccccggacgagtcctgcagcagc

SEQ ID NO: 9582 - DNA, 30 bp, Homo sapiens
  chr14:30397154-30397184
  hyper
gcgggcgcgggagtcgcaggagcagcggcc

SEQ ID NO: 9583 - DNA, 31 bp, Homo sapiens
  chr14:31028138-31028169
  hyper
acaatgaccccgcgcccggagtttttctgag

SEQ ID NO: 9584 - DNA, 30 bp, Homo sapiens
  chr14:31091324-31091354
  hyper
aaactcttagtattcgcctaacattacggg

SEQ ID NO: 9585 - DNA, 30 bp, Homo sapiens
  chr14:32670300-32670330
  hyper
gggaggtataaggacgtacaagaatgcttc

SEQ ID NO: 9586 - DNA, 557 bp, Homo sapiens
  chr14:33402367-33402924
  hyper
cggcctgtgtcactcttggccttggcaacttctggccaatccgccctgcccctctgggtcccggcgggccggctgcgccctaggctcaaagggttaagcaggtgcctctccgggcgaggcgctattggccgagggctggggcggcgcggccgcggtcaccacgcttcgccgatcccaacttgggttcctgcggaaggcaaggcggccactcgtcccctggctgcggctgcggggcccaggccttggcgcgcagggagtgggaaggagaaaaggacgagaaggggcaagcaccagccgcaccagcaaagggggcgagggtggcgcgcgcaagatgaggggagctgaagccctgcatcccgaaggaggctgcgcccaccgcccgcaactccactccaggctcgccagccggaagaaagaggaggaagtgggacaacgggggtcctgggcaggggtaggggaaacgatcaactcccactgcccccacccactagtcgagttggaatgcaagtcgtcacttaaaaaggctcacccaaaccgcaggcatacctcctcacccc

SEQ ID NO: 9587 - DNA, 30 bp, Homo sapiens
  chr14:33403211-33403241
  hyper
ccattgcacaaaagcggcttctttttttct

SEQ ID NO: 9588 - DNA, 94 bp, Homo sapiens
  chr14:33404165-33404259
  hyper
ggcaccccgcagaacgtccagggcatcacctcctaccagcagcggtgagtagtcccgcctgggctgggatagtgcccccgccccggggtgctgg

SEQ ID NO: 9589 - DNA, 30 bp, Homo sapiens
  chr14:34126415-34126445
  hyper
ctgtaacaagcccctaaagttctgaatctc

SEQ ID NO: 9590 - DNA, 436 bp, Homo sapiens
  chr14:34419301-34419737
  hyper
cctcgtcttaaaatcggaccacagccacagcttgtctggcttttgtcacccacaagagccaatatttcaaagtcaacagaaggtcatcatcatggttcacctgagccccttaacgttgactttcgctcagaggagctggggcgaggggtggggggaagcagcgagtagagacaaaccaggctgacttcttggttaaaaaacaaagttcgcttacggccctgggaagtcgacatacaacggactccgagtgcctcccgtccccgcgggagcagctgcggcagggcgccgagcgcgtcctaccttagacctctccttgacgtagtatttgcccagccggctcccgcagtagaggaccagcctgtcgatgagggacaggaggaagctgatggcctcgcagccctcctcgttgcccccgatccacgtgatctggtcgccc

SEQ ID NO: 9591 - DNA, 102 bp, Homo sapiens
  chr14:34419820-34419922
  hyper
gcgctccaggacgcagtcgcccaccacctcgcccaggaagttgtccaggtagcagaagcccacctcgtgcagacagggcacgatgtactccagggcaatttt

SEQ ID NO: 9592 - DNA, 177 bp, Homo sapiens
  chr14:34420251-34420428
  hyper
gaagccaccactgccgcgactgcggccagactccgggagacgctgaggtccggcccttaagccggccgactccgcgcgtcacgggctccgccccgggaccgcctccgggaccgccctttcccccgccccgctgccagtcacccccgcctgctctgcccctccgcgaaggatcccaga

SEQ ID NO: 9593 - DNA, 30 bp, Homo sapiens
  chr14:35008735-35008765
  hyper
gggccagggtggggcgggagcccacctgct

SEQ ID NO: 9594 - DNA, 30 bp, Homo sapiens
  chr14:35452095-35452125
  hyper
tgtttcaggagccgcgtagaaggaacgcgg

SEQ ID NO: 9595 - DNA, 573 bp, Homo sapiens
  chr14:36003383-36003956
  hyper
agttcatctgctggccggctctcagtccccgtggcgccccctttcctcttgtcccagagcgctctcgactccaccatgccaaggggattcctggtgaagcgaactaaacggacaggcggcttgtaccgagttcgccttgcggagcgtgtcttccctctgctggggccccagggggcgccgcccttcttggaggaggctcccagcgcctccttgcccggcgcggagcgggcgacaccccccacccgagaggaaccaggaaaggggttgacggcggaggcggcccgggaacagtcggggtcgccatgtcgggcggctggggtgagcccggggacgggcgggcgggaaggcgcggagtggcgggcgggtggcagggaaggtcccgggcccagccccagccccagccccagtccagcgaagccggcaggcgcagagctgcgtcgggcgttcctggagcgctgcctcagctcgcccgtctccgccgagtctttccccgggggcgccgccgccgtggccgctttctcctgctccgtggcgccagcagccgcaccgaccccgggggagcagtttctgctg

SEQ ID NO: 9596 - DNA, 654 bp, Homo sapiens
  chr14:36004080-36004734
  hyper
cgtctggacccgcggccgcgggaatcaagaagccaaaggccatgaggaagttgagctttgccgatgaggtgaccacatcccctgtcctgggcctgaagatcaaggaggaggagcccggagcgccgtcccggggcttggggggcagccgcacgccactgggggagttcatctgccagctgtgcaaggagcagtacgcagaccccttcgcgctggcccagcaccgctgctcccgcatcgtgcgcgtagagtaccgctgccctgagtgcgacaaggtgttcagctgtcctgcgaacctggcctcccatcgccgctggcataagccgcgtcctgcggctgcaaacgccgccacagtctcctccgccgacgggaagccgccttcttcgtcgtcttcgtcctcccgggactccggggccattgcatcttttctggcggagggaaaggagaacagccgaatagagcggactgcggatcagcacccgcaggccagggacagctccggggcggatcagcacccggacagcgccccgaggcagggcctccaggtgctgacgcatccagagccaccgctgcctcagggcccctacacggagggggtgttggggcgccgggtacctgtgccgggcagtaccagtggtggcaggggatccgagattt

SEQ ID NO: 9597 - DNA, 100 bp, Homo sapiens
  chr14:36004821-36004921
  hyper
cgctagcgccgggctttggctccgaacgcggtgccccacttgccttcgcttgcccattgtgcggagcgcacttccctacagcagatatcagggagaagca

SEQ ID NO: 9598 - DNA, 197 bp, Homo sapiens
  chr14:36789448-36789645
  hyper
ggaggacagctgcaaggtaaacgactctgcaaccggtaccgccgtcctcctcactccgaccgaggaggctgggcccgggctccttccacacctcggcttcgggaccgcatcccacacctctgcaggcctagctgcccccggcctctgctagagaaaaagaatggcgaggagggaccggatggtttccatattcccag

SEQ ID NO: 9599 - DNA, 299 bp, Homo sapiens
  chr14:36973454-36973753
  hyper
ggaacgcaggctgaggtcaggctgaccacgccgcctcctcagtcgccgtatcgcggggctggcggccagcgccttagaagagcctgctccgccgcaggaagaaagacgcccgacaggcgcccactgcccgaacccacgcgggggccagtcagccagcgggccgtgttgggaaagctccgcgcggcggcgggacataggatccccatcggggacctgggcgacggcctgagcttgggcgcccctccagctgggcgtcatctccacacagttcttcccttgcgccgcgaattcagcccctg

SEQ ID NO: 9600 - DNA, 426 bp, Homo sapiens
  chr14:36974501-36974927
  hyper
tcaagagagatgaaacaaattcgcccaaaagatagaaatctttgcctcggaaattatcggagaatattaacggagagggaggggagcgcgcgggtcgccgaggaaggacgcgggtacggccccttgctttggggtggcagagccgggctcaggagccagccaagctgacttcgcgaggtggcgcctgggcctttcgggggaaagccccgacggcggagccgcggctgggcggggactcaaatgctggcggcctctgggctggggccgagcagggggtgccgaccgcgggaagtctgggcggccgccctcccacccagacgagccgatgctgggccgcggtccctctcagctacctcgcttgcccgcctcggggcccctggagaggggtctgtgcctcccaggcagggaagcgtcttgatgtgcacc

SEQ ID NO: 9601 - DNA, 261 bp, Homo sapiens
  chr14:36974967-36975228
  hyper
cgatgtcatgctgggtattaaaagggttgtgctgcagctaaaatatctcacagtgtgtgtgaacctcataaaagggaggacccggattccaagcccctcgaagtccccaagcagcctggagggtgggggactcccctctccttctctccacactgagcccccgggcaagcccaggcctcctcctgcgccggggtccccgggctccgaaactgcgagagccctgcggagcccggccagaggggcagagggtgggggctgggg

SEQ ID NO: 9602 - DNA, 142 bp, Homo sapiens
  chr14:36975280-36975422
  hyper
cggggagccgggatccgccttccatcctgggaaacgactcgggttagggaagcgggatgggctccgctcggagttcccaggcagctggggcgccctccaagtgacgcctttgtccaggctgcgctcgcggagaataaagggg

SEQ ID NO: 9603 - DNA, 30 bp, Homo sapiens
  chr14:36977504-36977534
  hyper
gaggggttgggggccgcgtcctcagggggc

SEQ ID NO: 9604 - DNA, 99 bp, Homo sapiens
  chr14:36977803-36977902
  hyper
ccaaactttcgtagcgagagaccctaagacagctcgagatttcaagtgtccacacttctagtttagacatttggcaaccaattcggaacagccgggccg

SEQ ID NO: 9605 - DNA, 30 bp, Homo sapiens
  chr14:36979743-36979773
  hyper
ggtctcctgggttgcggcagagcgtgcagt

SEQ ID NO: 9606 - DNA, 30 bp, Homo sapiens
  chr14:36983114-36983144
  hyper
cgaagccactagagcggctctccaaggctc

SEQ ID NO: 9607 - DNA, 96 bp, Homo sapiens
  chr14:36983503-36983599
  hyper
tgcactgctcccagcgcgcacctatttccctaatgaaacgcttcagattgcgttctaggtctcttcccgcagctgcgacaattcccccagccggga

SEQ ID NO: 9608 - DNA, 36 bp, Homo sapiens
  chr14:36983673-36983709
  hyper
cgattgagttcacctttccccgggacaagtaaacag

SEQ ID NO: 9609 - DNA, 83 bp, Homo sapiens
  chr14:36986388-36986471
  hyper
aagcgcgtggagcagcggtggatggtggtctgtgtggcgggcaggagggaagcggtgaggcagagcgctgggctagggccggc

SEQ ID NO: 9610 - DNA, 122 bp, Homo sapiens
  chr14:36987301-36987423
  hyper
gcccggcccgccccaaccgacggcgccctcctgacccaggcagcctagcgctggggcccaagaggcccatccgcggggaactgccagcgcctgccccaggccgtaccgtcgagggggctgta

SEQ ID NO: 9611 - DNA, 196 bp, Homo sapiens
  chr14:36987839-36988035
  hyper
ggtctagcctctccgcgctctgctcgcccctgctccttgagctcggggtcgcttcccttggctccccgaggtcttctgcgccgagcagagctgccagtccaccgcgcctaggagacgccgagtacccgcatctgaccgcaggaccccagcgctaccaagtgcctgttcttggacccccagccgagcagggggaagc

SEQ ID NO: 9612 - DNA, 148 bp, Homo sapiens
  chr14:36989192-36989340
  hyper
ggggttccccgggcacggacaggtctttaggaggagggggctgagggacagggtgggggtttcacctgagcctgccggggctgctcctccctcccgccgcggcctcccagccccgcgccttcccactgcctccggaccacatcgggct

SEQ ID NO: 9613 - DNA, 642 bp, Homo sapiens
  chr14:36989403-36990045
  hyper
cgcactgttggtctacgtgtctgtcagtctgtctgcctctcttctgccgccgtcagagggacacctctgctccccgccccctttccccctaccggagagaatccgagcgggcggagggggcgctgagtaggggatcgactgcctcccggaggctgtcccggatccccgagccacaacccgcccccgcagctcaggggtttttcagtgggccacccccgctaacacgcctcccccaaggtcttccccccccccccccacccccggccgagcaaacacagcactggcccccagagctgggaggatgggaaggggtctcacgggagggtccgtcactgaagttgccccacctcgaacaaacctggtgtccctgaccctcgcccatctcccagacacgcggggatctggggctggagctgactttccgaggacatcacagccccagcacccgagcccagagccacgctgttttcccctctgatgcttcagggagcgcgcgagcagggagcggcgtgagtgcccgtctgtctgttgccgggcggaactgagcctgaaccccggcggctggagcgctggccaggagggggcgaatgccgaggtgcgggcagctcagcgggcgggaggctgggccgaggctcgcctccg

SEQ ID NO: 9614 - DNA, 134 bp, Homo sapiens
  chr14:36990415-36990549
  hyper
tttgagaccgactccggtttttgtccttggattttaaacgtttttatcattgtttttgttttgctttctccttagctgttttagtctcctctgcgcgccaggggctgggagggcggagcgctccccggccggcc

SEQ ID NO: 9615 - DNA, 13 bp, Homo sapiens
  chr14:36991019-36991032
  hyper
gcttctctggggg

SEQ ID NO: 9616 - DNA, 55 bp, Homo sapiens
  chr14:36991094-36991149
  hyper
cgacgccgggcttaagcgaaccacagaggagaactggcaacgctgaatacagacc

SEQ ID NO: 9617 - DNA, 131 bp, Homo sapiens
  chr14:36991646-36991777
  hyper
caggcctgcagttctcgaggaaacccccagccccccacgtctcgttctggaccaggaaccccctccccaacaaccgcgcagcaagtggcgactctgggagctgaactggagtggagctcgaagtggctggg

SEQ ID NO: 9618 - DNA, 175 bp, Homo sapiens
  chr14:36991988-36992163
  hyper
cgaaaataagcccggagactaacgcaccttgtagggaagagaaggacatctgtatctccaagcttatccaagcaaaggcctccagagtccctcccatggcccgaaacacctccctctgaccgaagagcgtcctttctttccgccgcctcctggactcatcctaaatagggcagac

SEQ ID NO: 9619 - DNA, 243 bp, Homo sapiens
  chr14:36992221-36992464
  hyper
cgaagtctgcgcgtattcctttatcccgcaactagcttgctcccgggtggagtgggcacagtggggagcggtcagggcagggcagggcccaacgctggcccctcgcggagctttccctggcgcgacctcacacggtcgctgcctctattccgaccacgctctgcttcgctggctgcggctccgccaggaatccgagggggcgcaggcccaggctcggccctagatgcgcggaatcgccatcag

SEQ ID NO: 9620 - DNA, 30 bp, Homo sapiens
  chr14:36993816-36993846
  hyper
agcttttctcaattcgtggcctgtgggcag

SEQ ID NO: 9621 - DNA, 896 bp, Homo sapiens
  chr14:36994184-36995080
  hyper
gggaacctgagggagcgggttacaaagcagagaacagcgggagctcagcagctccctttgaattgcgaggaaaccaagacggagacgggaggtaggagcacgggcctgaagcggtcagccgaccctgtgaggcccgcgctgccgtgctacgccgcgaatccgccagacgcccccgtcggaaggggcagggacaccctcgggggcgctctagggttcgtgctgcgctaaggtaagtttcgcagctgctcctgataattaaaggacagattcccgaagcatccttgtggcggcgcggctgttttcgccccaggacctgtgcagcctcattcagctttaggtagtcgaaacctatagctctttctgccctctgttccccaacaaatctcagtcccaacagtgggagcccgtgggccttgggtgttcgagtttcccgcgggcttgccagcagcgctggggttccctcctccgctcctttcctcctctccaacctcccaccacagcccgtctcccccacatccccaacacttgtcccaggcagtttccggtggccgcagtatcgaccccaggccattggggtgggtgtgagggaagggtggagggggaatctccgaggcccaatgttttctgggacttgagggaggctgaattctccctcgctgcctaggacttggggtctgaaggttgcagaccgaggcgatccgcagcgccctcttccggcggccgtctggagaactgcagctttagagcggtctcggggaagctttgctactagtttccggctagggaaaactggtggtggtcggagactggtagtacatcatccacgcattcgctcattctaactgtccgcccgaccatacgtcaggctgtctatcggtccacccaaagccaatata

SEQ ID NO: 9622 - DNA, 435 bp, Homo sapiens
  chr14:37050375-37050810
  hyper
gcgactccgccgcccctggagcgcgagcgcgcttcagcttgtagcgatgattctggaaccagatcttgacctgcgtgggcgtgaggcgaagcaggctcgccagctgctcgcgctcgggcgcagacaggtaccgctgctgccggaagcgccgctccaactccagcgtctgcgccttggagaatagcacccgccgcttcttccttttctcggcgtccgagcccggagacgcgggcctagcggacggccgctgcgacgagtctggcgggctggtctccaggctgctctcgtccgaggctagggacagcaaaggagacacgggtgggtgagacgccggaccctacgagggcctgctgcccttctggcgcgggcgtggaggcactggccagagggcacgcccactagcccgagactttcgggatgaggccatttcctgag

SEQ ID NO: 9623 - DNA, 30 bp, Homo sapiens
  chr14:37051762-37051792
  hyper
gccgctttgaaagccgaggtccgggtctcc

SEQ ID NO: 9624 - DNA, 188 bp, Homo sapiens
  chr14:37116106-37116294
  hyper
tggagacttggggacgtgaagggggggttctgtgatcccggaaaaaaagtaacttctcttggtaggtgatactaggcagttgcgtcccggggagtccccgcctttctgcgcttcccctgacgggggcacaggggccggcgtgcgtgtgtgggtacgtagctcatcccggggagctgggatcctctttt

SEQ ID NO: 9625 - DNA, 124 bp, Homo sapiens
  chr14:37116909-37117033
  hyper
cggggttgcggccacgcaccataagagcaccttcaggtctgagctctttaggggtgggagtaggcagttcgtgagtccgggaaggcctgcggggtttcccgcctgctgcggacttagcgtgggg

SEQ ID NO: 9626 - DNA, 465 bp, Homo sapiens
  chr14:37123728-37124193
  hyper
cgcagttctggccctcgggcccgcctcggaggcgcacccccaatccccacggaacgaattccgcggctaaaatgcattttcccaaggcagtaaaagtgacccctgcacctaacaacctttgggctttctcttctcctgactaccacctctcgcagggtgcgctgaaatctctttatcgttatcgttttttataaatgaaatgatttatttattcgctgtttgcagggaatgaaaggagttgatcctgactccaagatgcattccaaagaaagaaaacgcaactgtagcccggactccgcggaggaaggccaactgactccactacgtgcacttccgagccacttgggcccagctagctgtgttaattatgggttctaattttattgcaactcggcacctcctggtttgttcccactatagtggtcttaaaaagaaacacacacaggcataccccagaatgaatcc

SEQ ID NO: 9627 - DNA, 98 bp, Homo sapiens
  chr14:37124481-37124579
  hyper
cgtggactcttggccagcagtgaggaggacaaggttgcagatcctctttgctgcgggttctgggtccggccttgggcggcattctgtcttctaaagtg

SEQ ID NO: 9628 - DNA, 518 bp, Homo sapiens
  chr14:37125133-37125651
  hyper
gaaagggggaaccaaaaatatcgggctttgaaattctgtggattttcaaaggcggttcccaaccttgtcaaaaactacagtgggtgcgcgatctaatctggctcctataggtggcgctgtgacaaggtgcggtggccgggagaggcggctgggggactcgaagactgcgggaaattttctgcgactccgacgctaacccgctgctcccagcctccgcttcctgttttcgagggattagctaggactgtgcaacaccagtctccgctctcggagtcggcacgggggctggtgggtggcgggatgaactcggggaaggcgacaggctggaaacgcagctcctcgactttgcagcgcaccaaccccctatcgccccgtccgctgctcaggtgcgaggattcgccagacgccacaggactgggggcgactcgcaagggcatcatgccacctagaggaaacgcgcagtgagtgagccctgggtcactgaaaatgggagaacgttcgagtcggtcaagatgact

SEQ ID NO: 9629 - DNA, 46 bp, Homo sapiens
  chr14:37125763-37125809
  hyper
cgtccggctctgatcagagtacagcgggctgggcctggcagcctgc

SEQ ID NO: 9630 - DNA, 146 bp, Homo sapiens
  chr14:37126567-37126713
  hyper
aataccagcaatcccgctcgccttcaacgcgtggggtaagggggggtggggaacaattactgagtgacgctaatatggggaaactgaaaagaaatgtcgattgtttttattgtaatagaaggagtgagcaaacagaaaaaccaacc

SEQ ID NO: 9631 - DNA, 248 bp, Homo sapiens
  chr14:37126964-37127212
  hyper
cgtgaggctccttgatgagaaggtggagaggctgccgggctattctccgagcatcttccggccgagctctgctcctctccgtgcgcttgcggcttctccttgggctagcgcgtccgcagtccctccaagtccaggccgcaggtcagtgtgcgggcgcctcctgtcctcctctcccaccagaggacccctgagggctgtctccatccccaatccccgcgactgctccttttagccgccatcccctcccg

SEQ ID NO: 9632 - DNA, 242 bp, Homo sapiens
  chr14:37127537-37127779
  hyper
cgagtggacaagaggcgggcaccgtcgcctgggcctcgcttggggggggggggtcctgtccccagcagggggcaagttggaggaatcagctccttaatattttctgctagctctgcttgtcataactgcaactcggaatagaacaacctctctcccgtgcatacgcacccccaactctcgccctatcctcccatccacagtcatcactgacctgtagacccggaggagcaggcttccggggg

SEQ ID NO: 9633 - DNA, 196 bp, Homo sapiens
  chr14:37128139-37128335
  hyper
ggccagcgccgagtgtactggttcctcccacccagtgtagccccctccttcacactctcggcccggcttccagtctcccactgagtaaatatttatccagagagcgagtcgcccctcggaggaggcctcgacgcggctagggaaaggctttttggcttctccctggcctgagccagctgcaggccttactggtgtt

SEQ ID NO: 9634 - DNA, 412 bp, Homo sapiens
  chr14:37130071-37130483
  hyper
aaaattcagaagtaggcagaacgacagggcctctggagcttaatggaagacgagggaattacatccatgtgcagcgtcggtgtccactgtcttgggactaagtctctttcatatttaaacaaaactctttcgagagggctcgctggtttggagaaccctcacaaacgctgccaccgagggccaggggcccaggacagtggctgaatgtggcagagccttgggctccgtagtgagtgccccacgcactggcaattggtcgacttggggctgtgcgctagcgttagccgcctgtggttcagttccccgcacacggcgtggcccgtgcctcgagcctgtgtggctagtggttggccggtccacctggactggggggtcgccgcaggaagctggcggtaggaggaacctccctggc

SEQ ID NO: 9635 - DNA, 30 bp, Homo sapiens
  chr14:37130731-37130761
  hyper
atgtccatcgttccccggaggaggtctcct

SEQ ID NO: 9636 - DNA, 85 bp, Homo sapiens
  chr14:37131976-37132061
  hyper
gccccagtagttagtaggggacgggtgcgttcgcccagtccccggatgcgtagggaggcccagtggcaggcagctgtcccaagca

SEQ ID NO: 9637 - DNA, 263 bp, Homo sapiens
  chr14:37132290-37132553
  hyper
cgatcttgccaggagccatcgggggcagcaagccccgggtcactacccccaccgtggtgaaacacatccggacctacaagcagagagaccccggcatcttcgcctgggagatccgggaccgcctgctggcggacggcgtgtgcgacaagtacaatgtgccctccgtgagctccatcagccgcattctgcgcaacaagatcggcaacttggcccagcagggtcattacgactcatacaagcagcaccagccgacgccgcagcca

SEQ ID NO: 9638 - DNA, 203 bp, Homo sapiens
  chr14:37132602-37132805
  hyper
cggccgccaaggtgcccacgccacccggggtgcctgccatccccggttcggtggccatgccgcgcacctggccctcctcgcactccgtcaccgacatcctgggcatccgctccatcaccgaccaaggtaggggctcagaggctgggcgtgtggatgtgcagcgtctgcccccgcactctcgcggaggtcccagtatctgcagc

SEQ ID NO: 9639 - DNA, 30 bp, Homo sapiens
  chr14:37133153-37133183
  hyper
gggatcactacggccgggagaagtctggcc

SEQ ID NO: 9640 - DNA, 47 bp, Homo sapiens
  chr14:37135588-37135635
  hyper
cgcgggtttgggtcccgtctcaagagtggggcgcgcgggctgggcct

SEQ ID NO: 9641 - DNA, 278 bp, Homo sapiens
  chr14:37135739-37136017
  hyper
cgccgccccgcacgcggtgaacgggttggagaagggagccctggagcaggaagccaagtacggtcaggtgaggaggcgagggtcaggccaggtgggccgcgtggcggcggggatttaggcgatggaacactttgtgatgggtccctttctgagcttcccgcgagagaagcccaggctggcgtccctttgctgctacgagccagatccttcgtggactggggcgaagcagaggcctgagccttggaaggcggagctggggcctcgacccccgccagggg

SEQ ID NO: 9642 - DNA, 272 bp, Homo sapiens
  chr14:37136294-37136566
  hyper
gttcggactttctctccggtggctctcggacaaacacgcttggccaatcctgcggagaggggcacccagataaacgtaacaaagctaccattttctcgactaaaggtcacattgtaatctcccaaggaagttagtgagaaaacctcaaattatacggactggctgtggaccgtttaatttttctttccctccgtccctccctcatgtctccaaaggaaaatttaaaacactcgtgtttttattttccccccgagaaaagctaaacaaccacc

SEQ ID NO: 9643 - DNA, 30 bp, Homo sapiens
  chr14:37641949-37641979
  hyper
acccaggcctggagcgccaagtacaaagcg

SEQ ID NO: 9644 - DNA, 30 bp, Homo sapiens
  chr14:37666979-37667009
  hyper
cagcagactaagttcgactactttctctcc

SEQ ID NO: 9645 - DNA, 797 bp, Homo sapiens
  chr14:38052532-38053329
  hyper
cacacacacgaggtcaagacccgcagtgtcttagtgggttttcacctccacctccgtacaatcaagagggcagagaaggcgggggctggaggtggctgaaagggcagggatggcggtgaaacccgggaggaggcgacattcgtgtcaggtggcggtcccaggcagtgtccacaggcccggaagccgaggggaccaggcatcaagccccgcgtccagatccctgcacccgggggcgggacctggtgtcccgcggtccccgcccaggttcctggggcgcttttccgcaatggctggcgtggaagcgagagggggcccagtttttccttgccaggttgcgggtacagccagctccgcgccggggttgggcggcgcggccgggatgctgagagccctgcgtgctcagccaggggcgcagggcggcccttctgcccagcgcgccccgggcaccagggatggcttcccagctggaggccgggagggaggagagtaaatacccattctgcgggggcagccctcgggggatggttgcgaagggagaaacgaaaaataaatcagacaagagagccgtcccgcccctcctcgcccggtcctggcgggcggcgccactggtcctgcagcctcgggcgtgcccgcgcccccccgagcccagggggcgtcgcagcgggccgggcgggccaggactgcgcctgtgtgcgggtccccaggagcactgctcgcctgccagccccgcccggccgggcccctccggcgggatagagccctgctttgctcttttcgttggccaagcacaattgtgt

SEQ ID NO: 9646 - DNA, 392 bp, Homo sapiens
  chr14:38056998-38057390
  hyper
ttttttgtaaaaatgtttgctcggtagcgttggtgggtccgagcgccaccggagctgtacacttgggtcaggaggaaggctttccctcctcgcccctcttcgccccctccctcccctccccggggacccctcccccatctcgggcgaaattcctaagaccagcgagcaggagcaccgcggcgggacggtcagcagcccctttccggccctggtcttcgggagctggcgaggtgaagaaatgtggaaacacccagacgaaaaggggatggggtgggggtcgcaggaaggcggcgccctcaggcagggtctccgcactccctcggaaccacagatgttttcttcctgacccaggggcgcggcgccccagcccgggcgcccgggtgtttgtgtgt

SEQ ID NO: 9647 - DNA, 351 bp, Homo sapiens
  chr14:38057503-38057854
  hyper
gggctcaacaggagatttattcgctaggaagggaaaatgcccaaacaatgaagaactatctgcacttgtcacctcgagacgcttgctgtcctgctctgtccgccttccctggcaaccagctgtcctggccgccaacccgcgcgcgtcctaacgcgcgggtggcaggtcgcatcacccagaggtggcggagtgtgcggtctgagaactgcgagaagcccacaaagcaggggctgggcctgcaggctccccgcggtccagctcccgaggcaggtctccaaagtgcccccgtcccccgcataactagaaaatgtctccggcaagtaacagagcgagagctaaggccaacttaag

SEQ ID NO: 9648 - DNA, 30 bp, Homo sapiens
  chr14:38058266-38058296
  hyper
tctttttatcttgtccgcggtgtggagtgg

SEQ ID NO: 9649 - DNA, 84 bp, Homo sapiens
  chr14:38058595-38058679
  hyper
tcttcacaaaatgcaaaatagcggctaccctaaaatgtcctgtcggtacaacgcttcccctgcgagagtgaattaactcccctc

SEQ ID NO: 9650 - DNA, 374 bp, Homo sapiens
  chr14:38060542-38060916
  hyper
gccagacaaaccccccagtcccgggagctaggaagtgtttaggacgggtctggaatacacaccttggtagtacgccggctccagggctgagggctcgatggggctcctggtggtcaccgaggcgctgcctagaggcaggctggcgggcaacgtagagccgtaaggcgagtattgcagtgcctgttcgtatgccttgaagtccagcttatgctgctgctccgaggaggacatgaggttgttgatggagaacgggtggttgaaggagtagtgggggtcccctttcaggtgcagctgggactcgtggggtgccaagccgtgtgccgggtgagaggcgggcacagaggccagcgccccgggcccggagcttatggggg

SEQ ID NO: 9651 - DNA, 12 bp, Homo sapiens
  chr14:38061159-38061171
  hyper
cgccgccggccc

SEQ ID NO: 9652 - DNA, 989 bp, Homo sapiens
  chr14:38061332-38062321
  hyper
cggatggagttctgccagcgctgctggttctgccggtaataggggaagaggtccatgatccactggtagatctcgctcagcgtgagcatcttgctgggcgcctgctggatggccatggtgatgagcgagatgtacgagtagggcggcttggcgtgcgggtagctgcgcttgaacgtcttggcgtcgccgccgccgcccgcgcggctgcggcccaggttggacggcgcgtacgccatggggctcatgcacgggttcatggcggccgcgtaggggcccaggccattcatggaggccgcctgctgcgcacccatggcgcccatgccgctcgggctcagcgccgtacccatggccgtcacgccggccgcagtcatgctgttcatggcgcccgccgagccccccggcatgccggctactgcgccgggactcaggccggcccctaggcccgggttggcataggacatgttgaaggacgccggggtcatgttgccgctcgtagtcatggtgttcatggtcatgtaggtgttcatggagttcatggagcccaggcctgagttcatgttgctgaccgggacggaggagtaggcctggagtggagacagcgagtgaagaagccccggagggcggggttagtggtgggcactggagggcggccgtccgggacctaacccgggggcaagtgcagagcactttgcagaacacgggacgcccccacccggggcaaatggctaagcgccctccccagaccgagcaaagatgtcttgcacggcagggggaaaatcctagcgcggcaggcatgaaagataaacgctcacagaaaatatgaccccaggaagatgtgtaatcgccttacacgccaggctcaggggctggcttccagggccccctcatcgcctcctccatccacgccaggcggtatcccaagtctccaccccaaccagcctcggcaaagcgccctttggggggaaatcgttgatagagcaaatcaccta

SEQ ID NO: 9653 - DNA, 53 bp, Homo sapiens
  chr14:38063798-38063851
  hyper
ccggctcctgctcccgctcgctgctgggaagaggcaagcgcttcctagagccg

SEQ ID NO: 9654 - DNA, 165 bp, Homo sapiens
  chr14:38064382-38064547
  hyper
gccgggggcaggcggctgccgcggagcgcggcgccggggagcgcctccgcgggaagtgagcgggctgcctctgcgaggcaagtgcagttgagctgatgtggatcttacgtcgcttgagtgcccacctcctcgtcctctccccatttgtccgccgcacaaagacgc

SEQ ID NO: 9655 - DNA, 30 bp, Homo sapiens
  chr14:38064834-38064864
  hyper
gagaaggccgggggcggtggcgtcggagac

SEQ ID NO: 9656 - DNA, 566 bp, Homo sapiens
  chr14:38065112-38065678
  hyper
tcatctgagtcagccgagccaagtgacgttaggccgacccgggccccgggctagcagagcggaggcgctgccacgaaactcgtacctgcggctaagagcaggtgagtcacagcaccggtttatatctttatgacataactttttttttttgttccgcctcggtccgctcctctccccttgtcatctgtagcgaccacaaagaggaagaaactgagagcagatgtctgtgtgatagggcaggcggacccaagtcgggccgtcctccccctgccgggctcctcctcccgccccccttcagccgcttcagggagtgagctggagacgaccgtctggtttctgataggaaaaggtcagggggaggggacatctcccataacacgcgcgttagctgggagagcaagggcctgggcgcgggaacgcatctgcactgcgaaagagatgccaggcagaagcccgagactgcccgcagcggcgcttggtcctgtctgtgacccggagggtccgggctgagatctcaggggctcgcttggttcctaatcggtcctggacgtcggtgggagagtctt

SEQ ID NO: 9657 - DNA, 792 bp, Homo sapiens
  chr14:38677133-38677925
  hyper
agctgacatcctagctcttcccggaaaaactcgaatgtcgccctgccgttcctggggttggtgacaggtctggtcatcgcacggcggcagctcctcacctggatttagaagagctggcgtccccgcccgcccaagcctttaaactctcgtctgccagaacccgccaactctccagggtacaaagtacagcagggacgcgggtggagcccttccaagcggcgcagccttatctttcccgagtgaacacctaggtggattcccaacaccgcgcctggcacgtttctggagggagtctcaagctcctccagagctcccagctgcgcgtcctcgtttctgcagtcgatattcctgtgggagacacggggggctctgagcgctacgagctttattaagagatttgcgaatggttcactcaggtccctgaacactcccaatagcctaagctgcctgctgtgttatagcgcagaagcccctaacgcacggtggttgtcctttcttctcataacgctcgcagcttagggccagtttccgcgattctaagagtaattgcgtgggcacctgtgctggggccaggcgcaaagaagggagttggtctgcgcgaagatcgtcaacctgctaacagaccgcacatgcactttgcaccgaccatctacgtctcagtctggaggttgcgcactttgggtaaggagggcccggaacttccctggcgggtctgagctgcaaggcaagcgagggtgggaagagggaatttagggttctggactgcgggacgggagagaagctggggtctcc

SEQ ID NO: 9658 - DNA, 31 bp, Homo sapiens
  chr14:38678113-38678144
  hyper
tgctgcgagggaaccccggaaggagccacta

SEQ ID NO: 9659 - DNA, 580 bp, Homo sapiens
  chr14:38678172-38678752
  hyper
gaaaaaaatggggggcgggggggacaagccacctatgtgctctcctccctttctccaccccacccccttttttcgtagctgctgacgcgctggtggtgcctattaatcatttaccagtccagagccgcgccagttaatggctgtgccgtgcggtgctcccacatcctggcctctcctctccacggtcgcctgtgcccgggcaccccggagctgcaaactgcagagcccaggcaaccgctgggctgtgcgccccgccggcgccggtaggagccgcgctccccgcagcggttgcgctctacccggaggcgctgggcggctgtgggctgcaggcaagcggtcgggtggggagggagggcgcaggcggcgggtgcgcgaggagaaagccccagccctggcagccccactggcccccctcagctgggatgttccccaatggcaccgcctcctctccttcctcctctcctagccccagcccgggcagctgcggcgaaggcggcggcagcaggggccccggggccggcgctgcggacggcatggaggagccagggcgaaatgcgtcccagaacgggaccttgagcga

SEQ ID NO: 9660 - DNA, 227 bp, Homo sapiens
  chr14:38724298-38724525
  hyper
gcagtggccggcgggcgcctggtgggcaccccggtccccccaagggtcggctgtccttccccactggtcacacaagagcggccgtccttccccagctcgaagcccgtagcacattcgcaggcaaagcctcccaagtcgtctaggcagttagggagctctgcgcatttgccagcacggaggtacctcccggggcagggacacaacacatcgcccgagagtttgtccca

SEQ ID NO: 9661 - DNA, 381 bp, Homo sapiens
  chr14:38724978-38725359
  hyper
gggccctgggcctgcccgcaggagcgcgagcacagcgcgcagctcggcgcccgcacgcacggtgctgagcgccccacctcgcaggatgcaggcctcctcggccgcctgccgcttcatggtagcgtggtgcaggctgtagcaggcccccgaggccgagcagccagcacggtcggcagtggggtgttcgccgccgcccggcccgggccagagcgcctgccagaggaggcacagggcgaacgccggcctcattctctgaggccccgcacgcagagctgctcccaacttggatctgtcccgctcgaggacgcagagctgtgtctggagcgcggtcaccgccctctacagctggcttccccaacccggttccccctcccttcccct

SEQ ID NO: 9662 - DNA, 84 bp, Homo sapiens
  chr14:39583444-39583528
  hyper
cacttgctcagctccgcgcctaaggtgtctattagtacgcctgcgctgtgacctagaatgggcgcatgcgccgagcggaactgg

SEQ ID NO: 9663 - DNA, 162 bp, Homo sapiens
  chr14:39735616-39735778
  hyper
aaacagcacgcaccgcgccaggccaaggtccacggggatttgatttagcatttgggtaactggccgctaatggaactgaagacagctgggcctaacaagtgcccaggtgactcaggtaagcgaggaaaccagatcgaggttctcttgcgtgggacaggttaa

SEQ ID NO: 9664 - DNA, 30 bp, Homo sapiens
  chr14:42074488-42074518
  hyper
gcgcagtccctcagcggctcggagtttggc

SEQ ID NO: 9665 - DNA, 30 bp, Homo sapiens
  chr14:42075745-42075775
  hyper
tgcgaggaagtgggcgatcagcaaattgcc

SEQ ID NO: 9666 - DNA, 264 bp, Homo sapiens
  chr14:42076129-42076393
  hyper
aggaggccgccgttgcccacacgcgacgctttgggaagcccagctcccgggtccgccccggccgcggccgcagccccggacctcggctgcttgcctcgcgcctgaactgcggactcgccccagcgcggtggccagcgggcggggcgctgtgttccgcggcgcgcagggaggcggtgagcgtgtgcagagctgcccgaacggaggactatgtatgtgtgtgcgcgtgtttgcgtgtgtttgagcgtgtttttccttcttcccttg

SEQ ID NO: 9667 - DNA, 30 bp, Homo sapiens
  chr14:42076695-42076725
  hyper
agtgttttgtaagccgctttccagctagct

SEQ ID NO: 9668 - DNA, 30 bp, Homo sapiens
  chr14:42077312-42077342
  hyper
tgctgcccgcggtccggtgggcttcgaagc

SEQ ID NO: 9669 - DNA, 30 bp, Homo sapiens
  chr14:42077659-42077689
  hyper
gcgagacccgcgtacgactgtgaaagccac

SEQ ID NO: 9670 - DNA, 335 bp, Homo sapiens
  chr14:42079109-42079444
  hyper
atttgcagacttctagctggccgatagctgctctgcttgtccctgcgcactgacgtccccaactcctcttcgagtctgggctcggctgctgctgcagccctcgcaggctggtggtgctacaaggccatgtatgcagcgggctttgggggctgggctctgccactgcagctggcaggacggctttgacactttctccgggcagggcggaagagctcagcggaccccctggcagacagcaagcgcatcgtggccgaggcggccgcctggatgcgagaggagggagatgcccagagccacagaggagcgtggagggcggtggtgtcctgtctttgcct

SEQ ID NO: 9671 - DNA, 216 bp, Homo sapiens
  chr14:45431366-45431582
  hyper
tcaccatggaagcaatcggtttggtcacgtggtgcccttggttacgcccggtggcagctgtggggtctagggctcagacgggggccattttgccagaggctgcctcccggagttgggggcggcctggcggcaggctgaagctgttcttttgcctcttctgcagcttggggcttggagaggatctggaagtctgggctccatcgagccctttggaga

SEQ ID NO: 9672 - DNA, 31 bp, Homo sapiens
  chr14:45432097-45432128
  hyper
tctctcggacgttctccggggtcagggggag

SEQ ID NO: 9673 - DNA, 30 bp, Homo sapiens
  chr14:45603849-45603879
  hyper
aaacctaccgcggtcgtctctgcagtcgac

SEQ ID NO: 9674 - DNA, 18 bp, Homo sapiens
  chr14:48143617-48143635
  hyper
cgccgggaggggccccgg

SEQ ID NO: 9675 - DNA, 121 bp, Homo sapiens
  chr14:48143836-48143957
  hyper
ggaccttcaggaggccggcggccagccaggcgcgctccactcgcgcccgggccaagccgaggtgcccgggaaccgctcgccgaaggaggaagcgccgtccgtctgtccttccccggcggcg

SEQ ID NO: 9676 - DNA, 40 bp, Homo sapiens
  chr14:48144358-48144398
  hyper
cgaaggtccccggaggggcgtcaagcggcgacagcggccc

SEQ ID NO: 9677 - DNA, 30 bp, Homo sapiens
  chr14:50022777-50022807
  hyper
gccccatttttttttaaattatcctctaag

SEQ ID NO: 9678 - DNA, 31 bp, Homo sapiens
  chr14:50238427-50238458
  hyper
agataagggctgggcacggtggctggctcat

SEQ ID NO: 9679 - DNA, 119 bp, Homo sapiens
  chr14:50511810-50511929
  hyper
agcacaggcaagcctggttctcgtccaccacatggctcagcttcctgttcctcccctctgctcggagtcacagtcccgaggccagcggggtgtttaccgacttgggcctacccacaccc

SEQ ID NO: 9680 - DNA, 13 bp, Homo sapiens
  chr14:50582894-50582907
  hyper
gccctataaaata

SEQ ID NO: 9681 - DNA, 30 bp, Homo sapiens
  chr14:50863768-50863798
  hyper
tcctgaccgcgggccgagtcctgctgccgg

SEQ ID NO: 9682 - DNA, 194 bp, Homo sapiens
  chr14:51026823-51027017
  hyper
ctccccactccttcccaccagcgccacagcaacatcctcagagtctgagcgaactgcgcccagcgcgggcacggagcctcccaccgccagcaacctgcggccccggagaaggcagcgagcgcagtgacagcgcctcaccgccaccagctcctggaccaccatggccaagaaccgcagggacagaaacagttggg

SEQ ID NO: 9683 - DNA, 30 bp, Homo sapiens
  chr14:51027846-51027876
  hyper
gtgggcggtgctcacgcaggcggagaagaa

SEQ ID NO: 9684 - DNA, 680 bp, Homo sapiens
  chr14:51410486-51411166
  hyper
cagagaatagtgtccggcatacaggacaagaggcccccgtcacctcttgattaaatgctgagagtcaaagttccaaaaaagtttgtgaagtggacaggcgagaggggcctgggcttttgcccacctggcggtttccaggggcggacggcacagtggtttgggcgggacactggcgggtggcacctcggagacatgagttcggcgtctgttgggaggcctaatctgtcccccaggctgcccgcccacagcctagacacgtctcctctggacttcggggcaaggaccgggtgcaagggaccactctgaggggttctccacctcgtcccgcccggccgcggccggagactccgactccgggctggaccccggcccgccgtcccgcccccggttaccttggggcacttgtcgtagtagtgctgctgcgtgcggatccagcgccccaccaggtggtcgcgcaccgtgtgcgccagcgcgaagtagtagtcgcgggtggtggccacgttgcggtccttgaccagcgtgaagtgcaggtgccggttgaaactcttcttcagctctgccacgttctccacgcccacgatgccgcggatgctgatctgccgccgcttctcctggtccgtcaggggcttcgccatggctggggcggcgggctgcgcggcgggctgcgcagagagctggaa

SEQ ID NO: 9685 - DNA, 409 bp, Homo sapiens
  chr14:51560304-51560713
  hyper
ggctcatcagtattccgcctgcggcgtctccccgaccctccgccgtgcctcaccaggtccgcctatccagcagcgacagactcccgccgtccgcgcgaccccaccgcccccatcccagtccctccccgagggttcgcagcccgccctgccctcgagcgtgcctagcggccctgggcactggcgcggctctacccagctatgcagtgctttcccacacactggccgcggccactggctgcagacccgccgcggaaagggggcgccctgagtcccgctcgcaggcagcgcgccccgagagacccgctctaaggcatccccgcaacaactctgtgggggcattcaactcccccgtgcgccggttaagattcccccatgcctcctgcaatgcaccagaccagggaggtaaaca

SEQ ID NO: 9686 - DNA, 1890 bp, Homo sapiens
  chr14:51560770-51562660
  hyper
cgtctgctgcaaaaccggatgatcggagacgcagggagttaggagtgggttttcttaggactcaccttatgtagtttccacatggcccccagagccttgacttcgtggctggagtgtttgccctcctccaagcactggtagcacacgggcatcttgcattgcacgcagtacatgctgtggttctccagctcgtggtctgtgcaggtggagaccttgcgtgggctcagcctccggctcacacgaccctgggccgggggcaccaggcggtgcttggctaggggcccccggggcgggtggcagcgcaggcggcacggatcgcagtagaagacatcgcactgttcgcacatgacggtggcttccttgggcgccttctcgcagagctggcacttgagggccgcggctttgctctgctggtagcggtcaattaccccttccagtacgcgattcttggggaagccgcggagcccccggtcatccaggatgaggctgcggtgacactgggggcaggtgatacaggagttgcggggcaccggggccagggccggtgacaagtgggtggccggtggcggcatagccgggggaaacacgcggacgccgttgggggacttctggcacggggtagtgggggcgctggcgaaccccccgtaggagccatagccgctgtccgcctcgctgtataggctcatcttgtccaggtccagatagtcatagtcggagaccccggagcccgcggcccgatggctctggggggattcagactctggggtctgcaccaggatgttgcgggcgcacgcctgacacaaattgtgagagcagggcaggatgatgggctcccgatagaaggagccgcacacggggcatttcaactcctcttccatctcctccatggggaccggtctgggaggagacagcgacggctgcagcgggtgcctgagctggcgaggtggccgacgggcccgtcttgtccagcaccctggccagcggcggcggctgtggtggtggtgccttcccgcgcagcactggcacggacacccagagaggcgctagctctgtgagccgcagccgcgtagccgccgcgccgcgcgccagcccggaccgcccctacctgccctcctagtcccgccccggcccatgagcagcggcccattgggcggggggcaagagatcgaagctctcattggccaccagacccgtccgtctcctcgtctccgcaggccacagggggttcggtagagtctgaggatagggcagtcttcgctcgcggctgcaagatctctgaagggggccggcgtgcggaggctaggggaccgggaaggaggagttaggcgggatgattcatcctcgcccggcttacttccgacctccggtgcagtctcccaggagctgggggcgtgagaaacccctccccgcagcgagtgggctgccggagggggctggggcttctcgccagcgtttgcgtttggctcccagctctgagctccgcgcccacctaccgcgggcgagtgctgcgcagcacggaggacgccccttctcttccgctgctggcagccttcgcaggcgtctcacccgggcctaggcttctgcacggcagtggggcttttctccttctccgtgaatccgctgacgccgtgccctggagctcccccatcccgggagtctgacggcgctggcgcaagccctggcgacactcttggcttctttcatcctgcgtccctcgtttcctaaagagcatgtataaagtcgatttcctagtgtcgacatgagattcaactgggtaaccgatggaaatggtcagcattagtcagaatctatgaccccttcgtttcatgctttaaattatagctcggcccagaggcctcagtgccgtggtgtgaacgtgcttccttccac

SEQ ID NO: 9687 - DNA, 783 bp, Homo sapiens
  chr14:52117842-52118625
  hyper
cccccaaagccactatcgggaggggacaaaaataatttctgaggggccatgggcactaaaaccacagcagacagaggctgtgtctacctgaggaactggagaggtagaattagagggggaggctgggcatcctcggcggcgccccctccatccagcgtgaaacccacgaggcgcggcgtctcgagtggcgggcgggcagggggctgcaggattcacgaagccacctccgccggggaccgccttctctcggagtggcctcccctccggcgttccgctttagtaagacgacactcaggccaaacagccgcccccggccagcccgactcggctctggagggagcgccccgagggagtccagccggaggcggagaaggccactcggccagaaggtggggagccgccggcgtcccctcgcacctccgtctccacagcagggggaaaggccctgatcgccgtggtccacaccaccgcgtccacctgaggctcgcctcgcttcctgggtccctagaggggtggcgtactccgctttctcctgcccccaagtggccgcacccctccgcgggacgcttggttgggtccagggcggggcgggcgggcgctccccgtactgccgcgagctcagcgcgcagctcccgcggctcggctgccgccgcggccagttggggcgggtcgggggcggggtctcagggggcggggattcgggggggcgggtcgggtcgggaggcgtgggtggggggcggggcggacgcggagcgcccctctggctggcggggccaaggggct

SEQ ID NO: 9688 - DNA, 317 bp, Homo sapiens
  chr14:52313654-52313971
  hyper
ctttgtgtggtgcagcggctgggatcccactgcatctacatggcaaccaggaaatcagtcattcagagtttccatggtaaccagagggggggaggggtggaaaaatccattttatcacggtatgctgtgtcccttcctggaagcctacagaatttttagacagaggtcattatgaaatcaacaacaacaacaaacgcccgttggcatcaagacaggcctgtgaactggcatccccaggcaggctgcagactgggagggtgggagtgagcatgcagctgaccccaccatgaggcacagggcgtcgccttctcccctca

SEQ ID NO: 9689 - DNA, 115 bp, Homo sapiens
  chr14:52327418-52327533
  hyper
gctgggctgggctgcgccggagctcgcctgcacagatcagctccggagaggggaaaaccacgctcctcggaccaagcctcgggagctaaggtaaatgaaacgttttccatgttgc

SEQ ID NO: 9690 - DNA, 180 bp, Homo sapiens
  chr14:52455648-52455828
  hyper
ctgtatcagtggggtccgaaaggaggtgagggatttgagagttaggagagacagaatggcaggaattggtgacctactggatgctgtgaccgagggtgagggggagtgagggacgatctcggcttcagatttcactctggctgaggatatctggaacgatcgcatcgtattaacaattgt

SEQ ID NO: 9691 - DNA, 395 bp, Homo sapiens
  chr14:52534631-52535026
  hyper
aggtggccaggaaggcgtgggtgggggtaaagcgcgcagagcgcgggaagccagcgcgcacatagcgggcggccaggcccagcactgcgggggaggtgtcctctcggtacaggactcggcctctgccgtggctcgtgtcgatgtccgccagaaaaggggcgatggccgggaagtcggtggggaaatcatagtccacatactgcgtttccctggggaagtcctgagtggagatgatgccgttggtgcccacctgggagaggagagggacaaaaaggtgacagtcgctcaagcccaaggacgctaccctttcgcgcagggagggaagggaactgacttaggcaaaaagcctctctctccttccccactggccagggagtctggattcagggaaacaa

SEQ ID NO: 9692 - DNA, 208 bp, Homo sapiens
  chr14:52535055-52535263
  hyper
cgctgcagtaggtccaggggccctaaaactcgttcacctatcttctcactcccctcacaaccccggagccccatgtcctcggagaggaagcctccaggtctgaagagggaacaccccagctccgcagacgggcacagccttctcgcggtcctaactgcaaagcccgctggccgccctagcaacgccaccttttctgcctgggacgcgt

SEQ ID NO: 9693 - DNA, 770 bp, Homo sapiens
  chr14:52535334-52536104
  hyper
cggcatcgctctctggccgggtaccaccgcaagggtgctggggggctccaggagtggggtctgtttcctcccctctggaggcagggtttccgtgagaccgaccccagggaagaagctgcgggaaaagtgccaggagggggctgaacttacgtagaggttgctgaatcgggcttcgtagaagtgcaggggattcgccagcttcaccacggctgagctttcgtcgtcgccttcctgcaggagctggtccccccacgactccccgtgtgggaagagctcgtctgggtgcagcgccgcggcccgcaacattagcaacggcagcagcagtagcactggtaacgacgacagcaccggccgcccggccacccggtccccctccatgctcgctcggccgtgcgcttacccgctgcacaacgcgtcccgccccggcctccagcccactctccgcgccgcgccagcctcgaacctggatctccgcgggcgcctgggcggggcgggactccaggcccacccagcaagctaattggctgaggccctcggctggggaccaatcaccggctctgagaaagttcggcagtggccaccacatctggttctcgttaacttttctaaggcagcggccgctggagcagcggggctggcggggtaaaagctcctggccagggctgcctggagctgccccttccactccgcccccagggagctcccgggtcatcctctcatccgggctgccccgcggcccccaaggagccccacccccgggaccaaatggc

SEQ ID NO: 9694 - DNA, 109 bp, Homo sapiens
  chr14:52536342-52536451
  hyper
cgcttcgctccacccagagacgccctgaggagaagcgagcctttgtacgaaggcagagggctgactcctaagttctgtccccctcccgaaggccggccgctagggaaga

SEQ ID NO: 9695 - DNA, 698 bp, Homo sapiens
  chr14:52734303-52735001
  hyper
ccaggcgctcaccctgcagagcgtcccgcctctcaaagaggggtgtgacccgcgagtttagataggaggttcctgccgtggggaacaccccgccgccctcggagctttttctgtggcgcagcttctccgcccgagccgcgcgcggagctgccgggggctccttagcacccgggcgccggggccctcgcccttccgcagccttcactccagccctctgctcccgcacgccatgaagtcgccgttctaccgctgccagaacaccacctctgtggaaaaaggcaactcggcggtgatgggcggggtgctcttcagcaccggcctcctgggcaacctgctggccctggggctgctggcgcgctcggggctggggtggtgctcgcggcgtccactgcgcccgctgccctcggtcttctacatgctggtgtgtggcctgacggtcaccgacttgctgggcaagtgcctcctaagcccggtggtgctggctgcctacgctcagaaccggagtctgcgggtgcttgcgcccgcattggacaactcgttgtgccaagccttcgccttcttcatgtccttctttgggctctcctcgacactgcaactcctggccatggcactggagtgctggctctccctagggcaccctttcttctaccgacggcacatcaccctgcgcctgggcgcactggtggccccggtggtga

SEQ ID NO: 9696 - DNA, 379 bp, Homo sapiens
  chr14:52735044-52735423
  hyper
cgggaagttcgtgcagtactgccccggcacctggtgctttatccagatggtccacgaggagggctcgctgtcggtgctggggtactctgtgctctactccagcctcatggcgctgctggtcctcgccaccgtgctgtgcaacctcggcgccatgcgcaacctctatgcgatgcaccggcggctgcagcggcacccgcgctcctgcaccagggactgtgccgagccgcgcgcggacgggagggaagcgtcccctcagcccctggaggagctggatcacctcctgctgctggcgctgatgaccgtgctcttcactatgtgttctctgcccgtaattgtgagtccccgggccccgaggcagcagggcactgagactgtccgg

SEQ ID NO: 9697 - DNA, 49 bp, Homo sapiens
  chr14:52735451-52735500
  hyper
cggatcgggatggacgcggcgccaggcgagctgcgccctgggccaggaa

SEQ ID NO: 9698 - DNA, 1106 bp, Homo sapiens
  chr14:52781105-52782211
  hyper
agggcaagccgccgtcggcgcgctgggtgcgggaagggggctctggatttcggtccctcccctttttcctctgagtctcggaacgctccggctctcagaccctcttcctcccaggtaaaggccgggagaggagggcgcatctcttttccaggcaccccaccatgggcaatgcctccaatgactcccagtctgaggactgcgagacgcgacagtggcttcccccaggcgaaagcccagccatcagctccgtcatgttctcggccggggtgctggggaacctcatagcactggcgctgctggcgcgccgctggcggggggacgtggggtgcagcgccggccgcaggagctccctctccttgttccacgtgctggtgaccgagctggtgttcaccgacctgctcgggacctgcctcatcagcccagtggtactggcttcgtacgcgcggaaccagaccctggtggcactggcgcccgagagccgcgcgtgcacctacttcgctttcgccatgaccttcttcagcctggccacgatgctcatgctcttcgccatggccctggagcgctacctctcgatcgggcacccctacttctaccagcgccgcgtctcgcgctccgggggcctggccgtgctgcctgtcatctatgcagtctccctgctcttctgctcgctgccgctgctggactatgggcagtacgtccagtactgccccgggacctggtgcttcatccggcacgggcggaccgcttacctgcagctgtacgccaccctgctgctgcttctcattgtctcggtgctcgcctgcaacttcagtgtcattctcaacctcatccgcatgcaccgccgaagccggagaagccgctgcggaccttccctgggcagtggccggggcggccccggggcccgcaggagaggggaaagggtgtccatggcggaggagacggaccacctcattctcctggctatcatgaccatcaccttcgccgtctgctccttgcctttcacggtaagtcactccctacgtttccacagcccggctctgctcagccttctcatgctctcccctgacgcctccaccctttccaccgccctacaaactttttgcaac

SEQ ID NO: 9699 - DNA, 41 bp, Homo sapiens
  chr14:53161603-53161644
  hyper
caagcagccattcttccgcctaacatcgaaatctgagatca

SEQ ID NO: 9700 - DNA, 30 bp, Homo sapiens
  chr14:53173876-53173906
  hyper
ttcccccgcccggacggccatggccattcc

SEQ ID NO: 9701 - DNA, 30 bp, Homo sapiens
  chr14:53197057-53197087
  hyper
agttgtaatcccgccgccctcctgtcagcc

SEQ ID NO: 9702 - DNA, 679 bp, Homo sapiens
  chr14:53417141-53417820
  hyper
ccagcttaagcatcacgcctccaatgtgcacctcgccggtcactctcagggtgacatcgcggttcaggtccgtcacatggacactcagttcccacgtcccgtccgcgtagcagccatctggcatccttatcccgtccagagccatggctccttcctgcgagcgcggaggaaatggctctcgtaagcgtcactcccccaaagaaaggcgaatcccaccgaattcgcagcgccggccacgggctgggaggtggtggaggacccggggctttcggcagaaactcgggagggcggcggcggccggggctgcgggaggaccctacgccccgctcgccccgcagcgttcctcggtcccggcgccgcccgccccacaccgtccccgcctagcggaccgcggagggcttcacctgccggccggccccgagacacagcgcgggctgactccccgttcccctccccgccgcgccccctcgggtcccggcggggtcccgctccctcaccgcgcgctcctagcgctccgggcccgggactcgcgcggcaacaggcgaggggctggaggctcgcggggcggcggtgtccgcgtccggttcctcggctggcgaagcgctgcctgtggccggagcggctaatggagtcccgtcgtcgcggcccctcgcctggctccccgcgctccaccctctcc

SEQ ID NO: 9703 - DNA, 59 bp, Homo sapiens
  chr14:54420477-54420536
  hyper
gccagaggatttggggcgcactgaagggactgcgtctcccagctcgaacccggcttaag

SEQ ID NO: 9704 - DNA, 621 bp, Homo sapiens
  chr14:54422389-54423010
  hyper
cttggaggcctctaaggcccccggaccaactcccgctggaagaagcctgcagggactcgggaatcacgggaacctttcccgtcggttccgggcctggagggccaggaagagccgcgcgtccgcctttcgtcccgccaggaactccccataggacacgacaccgcaggaacaagcgtcctgggagcccctgggatcttggctgtcgtctctagggaccctacaccgtgaaatgatagaggcgaggttccttgggttccgcaagtcgacgaaaatagctcgtggagaaggcgcgtcctgcaactgcagttcgcaagctctcagggcgccccgccagctgggggccagattgggtgacactcccctcgacgcagcctccggagcggcgcgcactctccagaggccagcaggactgcgctctctaccgcagaacctgctccagctaggtgttctctccccatctcgccgtcgctctgccccctcactctctctggacctcagagccggttctctccttcctcctcccgcgctttccgtccggggatcgcaacctccagcccgtgggcaacgcgttcagcccaagaccccacagtttttcccaacgacccccctaccaagggcttc

SEQ ID NO: 9705 - DNA, 297 bp, Homo sapiens
  chr14:54430253-54430550
  hyper
agtggctggtggtggggggagcggctactgcgccttccccttgggcactcctctcgggtccctgaggcgacgccctagtaagcctccacgcacgtcagcgaagggtgggtggagggtcaccctgaccgcgccccacagctggctcccgcgctctgcccaccgccacgccaccttcaccgcgcgatctcggcactcccgcctttctcttgccctcgttatttttagttcggctgctgcacctccctgcctgcaacagctcgccccactctcagactcgttttgcaggatttgtgcccc

SEQ ID NO: 9706 - DNA, 30 bp, Homo sapiens
  chr14:54687299-54687329
  hyper
gggcaggcgcaaagcgctgcaatcccgggg

SEQ ID NO: 9707 - DNA, 30 bp, Homo sapiens
  chr14:54976979-54977009
  hyper
cgtttggtccgtgtcgctggggcatcttgg

SEQ ID NO: 9708 - DNA, 30 bp, Homo sapiens
  chr14:55032797-55032827
  hyper
catgtggggagctccggctcgggcggctca

SEQ ID NO: 9709 - DNA, 30 bp, Homo sapiens
  chr14:55493320-55493350
  hyper
attattcctctatccgcatgagtcattttt

SEQ ID NO: 9710 - DNA, 802 bp, Homo sapiens
  chr14:55595809-55596611
  hyper
tcgcccctgcggcggcggctcggggtgtctggccggcgcggggctcgcccagcctggtccggggagaggactggctgggcaggggcgccgccccgcctcgggagaggcgggccgggcggggctgggagtatttgaggctcggagccaccgccccgccggcgcccgcagcacctcctcgccagcagccgtccggagccagccaacgagcggtgagctgcgcggggcgcgggggacgcggctccggccgggcaggggagagggcgcccgggcgctgcttggggcgcggtccggagagggttcggctccccgggaccgggccggggcgcgcgcggagagccccacagcctgtgctctgccctccaggagcggggcggcgggcagcgatctgggcccggggcagtcgcctttgattatcgagggcgctggcgttcggggaaggttggcagcaccttacgagacccacacacgtccccggggcggcacgggccaccttctgcggagcctcgtgggcttcgccgccgtcgcacctccgccgcctgcgctctgcggccccagagtaagccccatccggtgacgagccgcagtctggtcaccccagtcccaccaggtcccgctgcgaggggaggcggaggggctcgctcagcaaaccagacggccgctccagtttctctaattggggttggagccccgtcacccttccccagatcacggccgcgggggagcgaagggacttcccaggactgcatagggcgcctcccgggacccacagcttggctggcccggccccttttgagcatcagct

SEQ ID NO: 9711 - DNA, 73 bp, Homo sapiens
  chr14:57261021-57261094
  hyper
agggcccggggacagcgccggccaagtcttgcgggcaactgcacactcggttccgggaggcaggtactccagg

SEQ ID NO: 9712 - DNA, 233 bp, Homo sapiens
  chr14:57261174-57261407
  hyper
cgcggtcccggagcgcggcgggaagaacgcccacgtcacctcccggtgttgttacacccacaatcaccacactctgacccccgcaaagaccacagaggagtaggaagagggctgccctcgtactccccaagccacccccgcctctgagcgcggaggcacgatgttctggggctcgagccttcgcatccaccgggccagcgctaaccaccggccgccgccctggaggggacccg

SEQ ID NO: 9713 - DNA, 414 bp, Homo sapiens
  chr14:57261465-57261879
  hyper
cggaggcctgggttggggggtcgtgagccggatgttccccgcagctggccagaaagctgcctctgagcctcttgagcaactccctgcctcctccggtagtctctctggactctccaagtgacttgctgggggcaccgggcgcggggagggcaggcccccggggtgacgcaggtgtgtactttacagccagagaaggcctagctttcagggacattggcttagtttgttgggtgagacgtgggggtggagaatgggagcactgtctctttgccaaattttccagagaaaccccgggactagctctgtccctggtgccccggctactgccagcgggtccttagcgctgtcgattgcgcgcaccggagcccgaagtcttccccaccgctggcaggagagccccgcgagctctcccgg

SEQ ID NO: 9714 - DNA, 178 bp, Homo sapiens
  chr14:57261965-57262143
  hyper
cgcgaaggaggcctcaaccttaggacaacccgggcgtcccgggcgaaggtctcgatctgccggagccactgcctttcaggcatcgctccattaaagccagggaggagagggtcattggccagcgacccgccctccttacgtccggaggtcaccccacgcctacaggcaggtttttctg

SEQ ID NO: 9715 - DNA, 718 bp, Homo sapiens
  chr14:57263927-57264645
  hyper
tgatgggggcttggaccctttcgtggcacgaaaaggagagagactgctgttcatcttaaaagtctcgaaggaggcaaaaacccaggcggaagtcatggctgactctgatcctgcatcttctcattctggttgttttccaccgcgtctgctcccatttgcgtgggatgcgctggtctcctgcccgactcttttgtgttcctcttttgcatgattaaaaacacgtttctatatgcactaaaccatcacctagcactggcacgcctggttttgggttacagctttgtccgtataataacagcgaagttctccctgggtgtgagatgcgggttcgaacatgtggtgtgcgcgccagggctggccgcttccggttaagtggacgcggggacttgactgcgtcccctgccttgcaggtaactggaatgggttgcctggcaagttggccctgcccgggacgccgaagggaccgcttccccattccagagcctgcctctggccttcagggccgctgacaggtccgaaaagaaagagaaggcactcagttttaaaaaaaagagatctagaggactggggaaaaggggatgagccaaggcaaactgggaattgctcgggcttcccccgaaagcctcagctcagtgccgggggagaccccaacggagggccagactcccccaaatccagtggccgaagacctggatttcctgggaggatccccgggggc

SEQ ID NO: 9716 - DNA, 42 bp, Homo sapiens
  chr14:57264764-57264806
  hyper
cgtcagcggctcatcctaccgggagacctggaaaaccagcag

SEQ ID NO: 9717 - DNA, 208 bp, Homo sapiens
  chr14:57265147-57265355
  hyper
gccctgggaccggcgcccccgaggcctgagaactacgcccggggggcgcgggctgaggctcaagagaggtcctaggtgcgggccagggatggagccagcccagagagaaaggggaaaacccggcaaggcaagagcctcagtctcgcccctgcctggcccgccaggctgtgagtggggcccattgggcagcgccaacctggggagtccg

SEQ ID NO: 9718 - DNA, 78 bp, Homo sapiens
  chr14:57265469-57265547
  hyper
cgcggcggagagcgggccgcccggcaccacgttccttctggcagttccgccccagcctcccagcgtcttgcgcctgtg

SEQ ID NO: 9719 - DNA, 149 bp, Homo sapiens
  chr14:57265912-57266061
  hyper
cgtcatttcagtaccaagtatcaccattattgggcttattaacttcattaaaaccggtcttgactaggagtggagatcggaactctctggatgtctttaagccagtgttcgctccccgcctccttccctccctccgttgccttcggtca

SEQ ID NO: 9720 - DNA, 78 bp, Homo sapiens
  chr14:57270893-57270971
  hyper
catctgccctacctgcaccctcgactcgggcaagttgattttcagtgccacctcctctcgcatgaagatgtctgggta

SEQ ID NO: 9721 - DNA, 49 bp, Homo sapiens
  chr14:57271153-57271202
  hyper
cgcagcagtcccccgttcctcacagcccttcagccgggagcctaccaat

SEQ ID NO: 9722 - DNA, 50 bp, Homo sapiens
  chr14:57272063-57272113
  hyper
cagggctcacttacccgggtagcccacggaggggtgcagcaagtccatac

SEQ ID NO: 9723 - DNA, 5 bp, Homo sapiens
  chr14:57272210-57272215
  hyper
cgggg

SEQ ID NO: 9724 - DNA, 30 bp, Homo sapiens
  chr14:57272910-57272940
  hyper
caaacttggaaaaaccgctcaaccactatt

SEQ ID NO: 9725 - DNA, 325 bp, Homo sapiens
  chr14:57274724-57275049
  hyper
ccccgcaggcctggcgcccgaggtcccgctccactgcccgcgccccccgcgcagccttatatctaacggtcaattcgtgcaatctgtcgcttctccctcccccacgccttgttttttttttcttccaagaagcccatctaccagttgctgtgtcctcgctcaacaataattacctcgtccgagaattaattataataaatgttttcttgataaactaacgagataatccgaggggcacacgtcccttaattacaggccgccatgctcctctctgcttctcgtccgggctgattaattttctgcatgatggaaaggaaacaaaact

SEQ ID NO: 9726 - DNA, 87 bp, Homo sapiens
  chr14:57275210-57275297
  hyper
cgcgagggagggaggaagaaacgtgccaaaagggttggccttgactattaattatcgttgggagaaagccccggtgttagcgctgag

SEQ ID NO: 9727 - DNA, 315 bp, Homo sapiens
  chr14:57276475-57276790
  hyper
gggatccatccaaacgaccccaaccaaatctgggggccaaaacgcaaagatcgcgggagaagcccagaacggcgttgacataaaaacaaaaccacaaacaaaaccttccaaaacaccccagattacattcgcagcgtttcgacgacgttttgcagaagcgacgacccccaggagcacgctctctgcctctctcccactaccgctctcatctctagatcacatttttctttttgcaacgatcgttattacacctcaaaatttgtaagagaaaaaatacatccgcctacagaactccacgttcgcagaggggcatcg

SEQ ID NO: 9728 - DNA, 233 bp, Homo sapiens
  chr14:57278053-57278286
  hyper
tagctgggaccacatcgggcctcgaggatgcgagtgtgaggtcgacaagatatcgtggaagagagcgaacgagggaggcccccgttggaaacagtttctgtgttagaacaaacgccaccaaacgaccgacactgcgaggcctggagctacctgggctggcgccgcccgagccccgggctgcgagcccagaggctgggaagtgatgggacctgggggcccgagccggagagtgc

SEQ ID NO: 9729 - DNA, 141 bp, Homo sapiens
  chr14:57278621-57278762
  hyper
agttggtaattaattcgtcgctttgttgtcggttcttatactgtatgtgtactcaaatgtggccgtccttgggatttacagcaattaacgaattacgggagtgcgcacgaggcagcaagctctcggcagccgggctccggc

SEQ ID NO: 9730 - DNA, 727 bp, Homo sapiens
  chr14:57278837-57279564
  hyper
cggcccctcgagcccccgaggggcccggagcccgcccagctccttcccggccctctgcagcagctccagtccggagacccgctggctgtcgcgttcccaggagtcaagagtttctaggggcccgggcgggggggagggtgagtaccgaccttttttctcaccccacccccactgtactgaaacacctggcggccgcccccgaagcctttaatggggatggtggtgaggagggggtaacaaatgccccgggcgttatgaccctcgtggcgctggctgtcggaggcactggttgggtgcgcttggtcagagtcatgatgctttcgatgaaggaaaggcaaatccacctcgatcacctgaagcagagtctccttcctacccctagaaaagacaacgtttcccccagtttgatcacaatgatgtttaaagcataaaagagccgaaaaagaaaaatggacgttgtgaatctggcagaggggaaggccggaggaaggccttggggacagtgggcatggggtgggatggagaatgatcagaacatgcgcttgtgagctaaaccaagtaaaccattttggactgggagatccatctgccgtagggtccagtgtccagggtaacctttcaagcccgatgtagaggtttgcgatgtcctcccagatggcgggggcagctgaatctccctaaaaatccccctgttctattcgacaggggcagatttatgcatggtggg

SEQ ID NO: 9731 - DNA, 48 bp, Homo sapiens
  chr14:57279642-57279690
  hyper
cgcagaaatacagggccaataaactacgagttggaaatggacagtgtt

SEQ ID NO: 9732 - DNA, 37 bp, Homo sapiens
  chr14:57283371-57283408
  hyper
ttcttaatgtgcaagcgccagggccggctgtggtcag

SEQ ID NO: 9733 - DNA, 591 bp, Homo sapiens
  chr14:57283445-57284036
  hyper
cgcccctgccggcgggtcgccgggtctcgagctgcgccgccccgctggaggcgccggggctgcctggctctccgcgcaaacctcgcgcccttccgtttgcgcgcatggagccgggtgagggcggccgcggccaccgcgcgatggaggatttggaagctcagagccagctggtacattttgagaaatttagcaaaccagactgggctgcctcggaaactgggttctgttctgactcatttgcagaaaagttatggggaaaaacatcttgtaaaattaaggttatgtttggcgggtacagtcttgagcgcacatggtcatccggcgaatcagccaagttttccaaagcgccccctctccagctctcaggccaggggagcaaagcgtaggtgtgtgcgtgtgcgtgtgcgcgcgcgcgtgtctctgtgtctgcgtgtgtgctcgcaagcgcgtgtgggtttggggtggggggacatcctgacctttctacaccctagtgcgtcccaactccagactgggaggagacgtctgcggcctctggtcttttcccttcttggacgaggtgcggccagctgagacctcacaccggccacc

SEQ ID NO: 9734 - DNA, 589 bp, Homo sapiens
  chr14:57284070-57284659
  hyper
cgggactgggggacccctgggatcccgccctcgtagcggaaggagtggcagcccttggtgccgggcctggtccttgaggctgccggccctccggggcgccaggactcgaggacgcggtttgcccccgcagtcctaagatccccggggccgtgacagcttggggaaggggcaaactctgtttggtctccacgaagtgcttcgatgttcgcaaaagggtaggcccctcttgcttggggtcctacacccctcggaactggctctgcccctgcctcttccccagcacagtctcccagctaaggctcagacagccggggaaaggggcgcccccatcactattccccacaacccgccccagtgtgagccagggcgcggctgcaggctgacaggcgcaccgtgaccacgccgtcacttcccttcaccaaaggttagatgggaggcgtgcaccctctggggagttcgcaaagcttctcgctttgatcagccgcgcgcagtgccagggagagatattgctggggtctgagtccgtcggaagtgtctagaaaagaagagagaggagcaggtaatcagactttggcggctgccctggaga

SEQ ID NO: 9735 - DNA, 31 bp, Homo sapiens
  chr14:57734480-57734511
  hyper
gtttagatactgtaaacgctcgaggaaagac

SEQ ID NO: 9736 - DNA, 30 bp, Homo sapiens
  chr14:58332101-58332131
  hyper
atgttagcctcctccgggcgtaaatccacc

SEQ ID NO: 9737 - DNA, 30 bp, Homo sapiens
  chr14:58546605-58546635
  hyper
tctaaaattccacacaacttataaacaaaa

SEQ ID NO: 9738 - DNA, 30 bp, Homo sapiens
  chr14:58711340-58711370
  hyper
ctcagataccacgacgccaagcggctcaaa

SEQ ID NO: 9739 - DNA, 30 bp, Homo sapiens
  chr14:58893725-58893755
  hyper
ccgtccgggaaccccggattctcacggcag

SEQ ID NO: 9740 - DNA, 33 bp, Homo sapiens
  chr14:59931088-59931121
  hyper
agcaggccaccaccagccccacgctgaaggccg

SEQ ID NO: 9741 - DNA, 245 bp, Homo sapiens
  chr14:59931193-59931438
  hyper
ggggcgccccgagcagctcccagggcaaggagaagcccagggccgtcagccaggcgcccgccagcagctgcagcgcgcggcggcggccgatcttctcccgcggcggccgcacgatagcgcagtaacggtccaacgagatgagcgccacgctgagcgtggacacgatgccgaagcacgagctgaagaagcggctggcggcgcagaagccgcgccagggccccgcggcggcggcaggcgccgaaccc

SEQ ID NO: 9742 - DNA, 111 bp, Homo sapiens
  chr14:59931719-59931830
  hyper
ggacccgccaaggccgccgccaccgggagcggcagctgtgccgcctccgcttgcgtcgctcaggttccccagcgccgcggtcgccacggtgctgaaggagagcacggccgc

SEQ ID NO: 9743 - DNA, 15 bp, Homo sapiens
  chr14:59932273-59932288
  hyper
ggccagataaagtgc

SEQ ID NO: 9744 - DNA, 59 bp, Homo sapiens
  chr14:60097187-60097246
  hyper
cacagtccatcttggtggaatcggcagtggcctgcatcgtgcgggctttgggggctcgc

SEQ ID NO: 9745 - DNA, 167 bp, Homo sapiens
  chr14:60097406-60097573
  hyper
ggcagcgaatcagcgcggcgcggccccggagccgcctgcgcgcatggggatgcgggcgccgctccacgcgacagcgttggctgggctgcccaagggtgctaccctggagacgggtaaagcggttctggccgcgaaggcgctgacgcggacagtgggtgggaggtttg

SEQ ID NO: 9746 - DNA, 741 bp, Homo sapiens
  chr14:60385979-60386720
  hyper
cgatcatgggccctgcgagtctgtgggtagcggctcaccctgctggactgcgcagatccagagaacgacacgagacctgcggttgctttggtttgccttttactaagttcatttctcagcctctctgcccactctgaaaagtctcccctttccccccttttaattctactctattttgtaaattactgttgtctcctgaaaattttggaatgcttaaaaggcactcaaaagcctgtccgagatcgactagaagaccctcggaaggtccctctcttctctggacctcactgggcgttcgtttgcccgcgccgtccttccattcggcttgccgggcgcgcagcggcttgcggctgtggtcagccaccttcccgggaggcggtggtcgctggccgcgggaaggatgccgcgctgggggtcggggttcgtcccggctgtcacgccaccttgtgacatcacagggccatgccctcggggctcaaggccagagaggctccgcgcttccaggacccgagagctaaagataatgaatgggagagagcgagactggaggaggtaacgaataagtccccaccaccttgcccataacgcgttgctttcagtcacgttccgcgaactggcgaaggtaagtgaaaagataagcgcaggtacagaaaaacctgccagcgagaagctcccgccgtttcccaggagccccaggtggggtcttccggttggacccctgcttccgctgattggttggag

SEQ ID NO: 9747 - DNA, 30 bp, Homo sapiens
  chr14:60558406-60558436
  hyper
aaaacattcattaccgtcggtgtgttgagt

SEQ ID NO: 9748 - DNA, 437 bp, Homo sapiens
  chr14:60794450-60794887
  hyper
cttgcaagagggagtgggagtcgttaaaaaaatatcctcgtggcttaatgaccaaggcgggtttattctcaaggaagggggagcggcgtggtggtgttactaaacataacagatggcagctgtctgcggctatatagggcgcgctgacaaatccctctggatggccacgcggcgctgggctgcggggcctgggtgcacttcgcgcctggctcggagggcgccgcctgcgggaggacctccgggagccgagctgcctccccgcaaacccggcccgggcccacgcgggctcagggcgccaggcggggtgcgccgaggtgcagctccccggccctaggcttcgctggggtgggggtcgaggcctctccgcgggtggctccctccaccctgccgccccgcctcgcggctgggagttgcccgggagctgtgaattcactaga

SEQ ID NO: 9749 - DNA, 10 bp, Homo sapiens
  chr14:60951979-60951989
  hyper
gccaagccca

SEQ ID NO: 9750 - DNA, 224 bp, Homo sapiens
  chr14:60952195-60952419
  hyper
cgtgtagcaaaattctaacgaaagcccttccccaacacccgggtaaacctagagaaacagtgcgatttcgcatttacgaatttaccacgaagaataaaaaaattggaggttttcacagaacagccaattcgcattacggcatacgcctgaggcggggttcctgtctaccgtgcccctcagagcccaggaaccacagcccgtgcgcctcccgcagtgggagttcg

SEQ ID NO: 9751 - DNA, 116 bp, Homo sapiens
  chr14:60952516-60952632
  hyper
cgggccgcaccaacccaggggataaggcgactccggtcgctctgaggggcagggccagccagccccctcccacccacgcacacgctccccctcagagccgccggcccagagaaaaa

SEQ ID NO: 9752 - DNA, 181 bp, Homo sapiens
  chr14:60952729-60952910
  hyper
cgccacagcggatcctaactacaaacggtccccggagccctgggctggactcgctcagccccgcccccacgcccctggtaccagccctgagagaccccgcggagcacgccgcgggagccgcagatcgcgctgaagagcagcgagatcgcgctctggacgagacctgcgcggctgcaaccgc

SEQ ID NO: 9753 - DNA, 216 bp, Homo sapiens
  chr14:60973791-60974007
  hyper
tctcggctcggctcgcgggctgtaaggtctccgcggaccccaccgcctcttctgcgcgctaagggtgagcgccaagcaatttcgcgagcaatagccggcaaagtaaccaccccgagagggaaaataaacctctgcaaactggagcaagggggtgctttcctcccctggccagaagctccgggatcgcagccctcccgggtccggcttcatccctgc

SEQ ID NO: 9754 - DNA, 432 bp, Homo sapiens
  chr14:60975456-60975888
  hyper
aaacttgcgaattctcggagcatttcagtttggcccagtcctctttgtcctctggagacctctcgaccgagacaacgcatcgccccaaagtgaattcctgaattcctgtggcatcactgcctatttggtgggaaaaagggagggaggggtagagcggggtgggggagggaggagtagtgaacgctgccgcactcgcctctctttttctcccagacactcgcatgtcttttcaacctccaggttctgcaaaatactgaagaaaagtccaggagctaacggcgggcgctgtcgagcacggggaggtgctgaaatagtcctggcgtgctgattcaagctttgattggcagagccacccggtgactgacagggggtctccatggcgcccgcgccgccaatccgcccaccccaatagcggagccagctcgcctgccg

SEQ ID NO: 9755 - DNA, 226 bp, Homo sapiens
  chr14:60976074-60976300
  hyper
cgctccgggctcagtgccctcgccgccgccggcactgcctcgatgttccagctgcccatcttgaatttcagcccccagcaagtggccggggtatgtgagaccctggaagagagcggcgatgtggagcgcctgggtcgcttcctctggtcgctgcccgtggcccctgcggcctgcgaggccctcaacaagaatgagtcggtgctacgcgcacgagccatcgtggcct

SEQ ID NO: 9756 - DNA, 111 bp, Homo sapiens
  chr14:60976802-60976913
  hyper
cggtctgtcttgggttaagagccctgcgttctgggctcctggccgggagttcccttgccggctctgcttccccacccgctggctccccacgcctgcgggcagctgcagcag

SEQ ID NO: 9757 - DNA, 47 bp, Homo sapiens
  chr14:60977338-60977385
  hyper
ttttgcctttaggtcgggccgacccgatccaacgcgatcgcgggagc

SEQ ID NO: 9758 - DNA, 54 bp, Homo sapiens
  chr14:60977658-60977712
  hyper
ttgccgagtaatcctcgccttaactgctggggtcttcggaagaacctctagccg

SEQ ID NO: 9759 - DNA, 314 bp, Homo sapiens
  chr14:60977879-60978193
  hyper
cgtcgccaccagcccggccgccagtctatccagcaaggcggccacttcagccatctccatcacgtccagcgacagcgagtgcgacatctgagttgcccatccaggatgctcagaagcagattccagtgtaaaaacgagaaaaacaaaatgaaagaggggaagaagatgagagacctgcaaatccagcgccacagaagccaggtgaccagggacccgcgggctcgggttgccgtttcccgccccaccccgcggccggcctggcttcactggcgccctttggccgcgaccacgggaaccagcggtgaggcctgacc

SEQ ID NO: 9760 - DNA, 30 bp, Homo sapiens
  chr14:60981226-60981256
  hyper
ctgctccccaaatgccgcagttcctctcgc

SEQ ID NO: 9761 - DNA, 335 bp, Homo sapiens
  chr14:60981477-60981812
  hyper
ccaaagagaatgtgaatggggcgggaggagaggagaagcagcttttcgctctattcaacggggacgcgagagcgcggacgatttccgctccttttgtgaggcggagcccgggggcggccgtgaatggggggtctgtggagcggccggcggggctgtcaggcggctctgcgtaatcagggctaatgacggcggccgggcgctcggcgggacaatgcgcggggccgcggggttttgtcggcctgaatggctaataggtttgcctgtgagctgcgagggggcggtgtcggggaggaggcggcggcgaggggagaaggggtcattgtccgcgcgctggc

SEQ ID NO: 9762 - DNA, 59 bp, Homo sapiens
  chr14:60981972-60982031
  hyper
cggtccgctcccaaagagaagcccagactgggcccacagtacccgggaaggtgagtcct

SEQ ID NO: 9763 - DNA, 208 bp, Homo sapiens
  chr14:60982798-60983006
  hyper
atattcccaaacttcttcagacgtgccctaccgcgagggaacgaactggttttcttcccgttttcacctccttgtctggagacaaaggggtgtgagggcgatcccagagctgaacaagcagtttcacgcctccctgcccgctcatgctgtttccgcttgccctgtggtttgctctgcctggaacgccgccccctacctcaactgctac

SEQ ID NO: 9764 - DNA, 315 bp, Homo sapiens
  chr14:61104241-61104556
  hyper
cggttgcaccccggacccctgcagctgtggacgccggagctgtgcgcagtcatcctgagccagcccgcggggcccgatcggaagggacgcctctcctaagagctggcctggagtcctggagcctccaagcgggcaagtaggggccgcaaaggctgggctgggcctccgctgaggccctcgggggcctctgggccctcatggcctggaggccgcgcggcccaagcccctagagcagaggccgcgctagcctgcaggggtcgacgcagggccggaggcagcggcttttccttcccactccgggttgaccctaaagac

SEQ ID NO: 9765 - DNA, 359 bp, Homo sapiens
  chr14:61104623-61104982
  hyper
cgaaactggcccggaggggggcccaggcctcacgcgcccggctctctcccagctctcctcctcctccttctcgggctcagaaagccttccagccgcggccccagccctccccccagcctgtgctgggctccgctttccctccatcaactccaagccgaattcaatccgagaaggctcctttgagcttttgtgtttgctgggggagatgtgggcgcaggagggatcgcgttacaactttcatttcctgaaatgtttgagggaacatccagggtttttatccccacatcaggccgggcgatgggctcgagtttcaggccttgtcactcagctgtcaccaaacaaacgaagctctcagagcc

SEQ ID NO: 9766 - DNA, 30 bp, Homo sapiens
  chr14:61108312-61108342
  hyper
atgagactgagccttcgggtccctcagtgt

SEQ ID NO: 9767 - DNA, 30 bp, Homo sapiens
  chr14:61108572-61108602
  hyper
cagcctgacccgaagcgcgctgcagaccta

SEQ ID NO: 9768 - DNA, 30 bp, Homo sapiens
  chr14:61109382-61109412
  hyper
cgattctctctgaaccggtggagaggaggc

SEQ ID NO: 9769 - DNA, 121 bp, Homo sapiens
  chr14:61109986-61110107
  hyper
caaaaattcgggaaccgggagccaaaccccttggcctctgagaatttaggaagcttcgttttcagccaagaggtcaaggcgagcagagagtggggactcgaacaatcgcgtgtttaggttt

SEQ ID NO: 9770 - DNA, 272 bp, Homo sapiens
  chr14:61114426-61114698
  hyper
aactctttggcttcgcggagcgctctccccgccacagccacctccccaccgtccttctgaatctctgtccgaaacgctatagagaacagaaggagcctgcccaggtggccgaaggtgttgccccgaggtgggggaaagtagagaccaatttttaaaatattgccttgtgagctccagtgcgagagagggctgcgactggagaccctttcctcgtctgggcatgcggcgcggtcagccagaccgacgggctgcagtgccgggccacgcgcgag

SEQ ID NO: 9771 - DNA, 1317 bp, Homo sapiens
  chr14:61115086-61116403
  hyper
agcgccaatatttcccgacactcacatcccagagaaacccacgcgcgggtgctcaaagcaaatgaggccccatccttagcaaggaacctcagagttcatgaactttcgctgcagcgccgcggagggcctgcgcgccgccccgtggacgggctccggccggcggggaggacttggtggctggtgcctgcgggggcgggagggggcggaggagaaaggacggcttcctagggtcgcccgagtcgcgggaagcacgccgcgtacctttccttggcctccgcggcccggtctctttgcctccggttcttaaaccagttgctgacctgggtggtggtgaggccggtggcctcggccagctcccgcttctcacgcggcgatgggtagggattgtgcgcgtaccactcccgcaggacacccctcgacttctccttgaagcagtagctggtctcctcgccgtcccagatggtgcgcggcagtggaaattttcggcgcacccgatatttgcccacggcgcccaggggtcggccgcgcagcttctcggcctccacgtaatgcgccttcagccacagttgctgcagtttggggtggttgtgaggcgagaactggtggctctccaggatcttgtagagctcacggaagttgccgcggtggaaggcgaccaccgccttggccttgagtacgctctcgttcttgtgcaggtggtcgcaggcgggcagtgaccacaggaacctgcccaggcgctccaggtttccgccttgctgcagaacctcgcacacgcacgccacttgctcctgcgtaaagccaaacgacggcagcatcgacatggctggggcctgccggggcgcacggcccaggcgcacgcggcagggagcagagccgagaggcagggggcggcggccgcagggaggggggcgcggctgttcctaacctcctccttaggctttgcaaaggcgaaaaccggagtcggaacttggcggtgggcggccaaggaagagaaggcggaggagtaggggaggttctggacacggaacggccggcgcactcagtagcctttaaggccttgctgcctccgacctcccgcccggtggatgctgctagttgccggggaacttggtttctgttctccccgcagcggccttaaagcgcgcagcgtccccggcacgctgattggctgccggcggcgcctatccggggctggccagccagcgcgccgcccggctgggcagagaggccgcaccgcccagagcggggagggcgaggctgcggagctgggggttgggggtgttgccggggctgcgcgggtagggagtggtgggagga

SEQ ID NO: 9772 - DNA, 106 bp, Homo sapiens
  chr14:61117129-61117235
  hyper
gcaaaaatgctttgggaacctcgtacgaaaggcgctggatgtggtgtaaattaaataaaactgtgcccggctccaataaccgtccggttgtaatataatccttacc

SEQ ID NO: 9773 - DNA, 30 bp, Homo sapiens
  chr14:61119314-61119344
  hyper
gttgctagggtttctcggctgggttgacag

SEQ ID NO: 9774 - DNA, 656 bp, Homo sapiens
  chr14:61119599-61120255
  hyper
cttagtcggaaactccgggtgccctcgacccttgggaactccggctccgatggccggcgtggcgccggagcagcagcccacctgctcctgggggacgccgctccccgcgaggtctgaataggcctggggctcaggcagagagatttgcggactcagagaagagaaacccaaaaccagtccattagtaaatgagttttgtgttgtcaaggttctttcccatccacttgctgttctgaaaaatagatcacgtttcgttatctttagtgggaatctgcaacgtgacaccggatccgcgcggcccccgcctccctccctgcctcgctctgcctggctgaggggagcaggcgggcctcctcagcttatttctgaacaatgaagatttgtctcttccccaagtgtatttatgtatgtatggagggaggaagttttctcctggaagcgggaagctcgagagcagagcctcctacttctttggtgcgaaaacgctgcgctggcccaagattcagggcgactgacgccccccaccacctccaccgcccacacctggacaaacagagccagctgtgagcctggctcgccgctgaaaaccctgccgccccgcgcggctcccgaaaataccatctccgtattgtctcgaggtcagggaagggagaaag

SEQ ID NO: 9775 - DNA, 497 bp, Homo sapiens
  chr14:61123391-61123888
  hyper
ccatgcccctctgcgcgtctcgcccactcgcttaggcttggactttgcaacaaggtttccaacaccgctgcagtgcttgacaaagccctcctggaagccagcagggtgaggctgccagcaagcaggcgggctgcgagggacgcttttaggactaggaagaaggccgtaagatctttccttacctctactcaagttcacccgccaccctcacccatcaaccctcgtgcaggcccgggtccacgtttcgcggactgatcctgagcctcagtataactcgctgtgccaggtgcgcgcgcgcagccaagtatccgcgcgcggacgccggggaggcttcaccgcccggtgtgctggcggccccgcccgctggctcgcagagcggggtctcgcagagctgggcctcacccgtcgccccgccgcctgcaccagaaactccctccccgggctgtgcgggagctcttgggcgccgcgtctgcgccggggccgactccgcccaggct

SEQ ID NO: 9776 - DNA, 30 bp, Homo sapiens
  chr14:61124115-61124145
  hyper
gagttttcgcctggccggcaggaaccgaaa

SEQ ID NO: 9777 - DNA, 755 bp, Homo sapiens
  chr14:61188223-61188978
  hyper
aagctgaggctgagccgccgtcgccgtctgcgagggtgactcaccgggggtgcgggtgggaggtagatccggagaggggcctaaaccaggcaactgggccggcggcggggtgggtgtggagtttatggggtggggcgggggggacgaagaagccagcagtggagcgtgggggagtcccagggagcgtgcccggctcgcgagcggaggcggcggagcagctggcctgctcgcggtgcccccttgccaccctctgccccggccctgcggattccgttggtttccgagcgcgggatccgcggcctctagtgggcgcagggcaggtggctcggcgtaaccaaagcgccttctctggacctctccgcatatctgcggaaggcgcacgcacatcccggtgcaccttttgttttggttaccgcgagggccggatagggcaccaagcctccctcccagccttgggcgaggaacgccggagcccgagccgtcggacccccacaggggcccagaagcggcaagggcgggctgagaccggctctggaatgcgctggtgatcaccttcacctggcgcaggcgggctggatccccggctcccagtttgcttccccgagaagaaccttcgagctgcttttggattctttctctcctatccccgcggggctggagacaccaggtctttaggcgaccttctccttactttgtttcgtccaacaaaacacacagacgcacacaccaagtgtctgactcgggaggacgcacaa

SEQ ID NO: 9778 - DNA, 31 bp, Homo sapiens
  chr14:61736456-61736487
  hyper
ttctgtctatgtccagcggagggcagcagtg

SEQ ID NO: 9779 - DNA, 139 bp, Homo sapiens
  chr14:61747388-61747527
  hyper
gatgggcaggccggccgcgctgcgctggtagggggcgcactcgttgacagggtggcgcagcgcgctggggagtccgctcagctgcgcgtcgtcgcgggacacgccgtagcgccggttgttctggtagaagttggtcagc

SEQ ID NO: 9780 - DNA, 579 bp, Homo sapiens
  chr14:61747582-61748161
  hyper
cgcacgagcaggggggcggcagcgcccggccctggccagccgcggcgcacaccgagcagttaccggtgcccgggtcgcctgtatagtcgtactccagctccttgatgccgttggaggagtagtagaggcccaggcccaggccgatgaaggccaggcccgcgcagaagaagagcggcagcgcgatgctggccgacagcagcggctgccaggcggggaggcgctgctgagtgaaggcggtgttgtcgggctggtgggcgccccgggccgtggcgctccaggtcatggcggccgcgcggggaccgacgcgcgggctgaccgagtgggggccccgccgcggggcgcctccctctccgcgccgcgcaagcccggggactgctcgcgggtcgggtttcccgccagctcaggtgggtttttgcccgggcccctcctctgcctccgtcacaggtgagtttagttccaggccctacgagcagtgcccacaccctcccagttccgcctccgcccaggtgcgctgcacccccgcgggtcaccgggagccgcacctcgcccgccccttccgaggtgagcaggtgggtgttt

SEQ ID NO: 9781 - DNA, 1234 bp, Homo sapiens
  chr14:61788223-61789457
  hyper
cgcagggccgggccgcggaccgcgggccacgcccctggggtccggaaggcgcgggagcggacgcgggggttctgtgaacttggaacctggcggtgcgaggttctcgccggggatgcggcggcggcagctgcttcctggtttgaagctcgccgagtgggggagagcgtgagccttcggaggcgggggcaggaggagaagcaagaggaggcgggggaagagacgcttggggctggggctcaccggacgggtaggtccggctctccagggagaggagctgcccggccctggagaaggggcgagtcctgcgcgagtccccgggaggcgccgcgcgcttggaagggacggtcgggcttccccggcccgctgagggctcggcggcgggctcccctcctttccacctcgggagggagggaaggaggggagggaaaagtcccacggaggaggcagaatggccagtcgaggggcgcttaggcgctgcctttccccagggctgcctcgactcctgcacctgtcccgagggctggcctgagacgggactcccggttctcccgctgcgaagcagcgcggccccccggggccggggcagcggcgccggcatgtcgtctggcaccatgaagttcaatggctatttgagggtccgcatcggtgaggcagtggggctgcagcccacccgctggtccctgcgccactcgctcttcaagaagggccaccagctgctggacccctatctgacggtgagcgtggaccaggtgcgcgtgggccagaccagcaccaagcagaagaccaacaaacccacgtacaacgaggagttttgcgctaacgtcaccgacggcggccacctcgagttggccgtcttccacgagacgcccctgggctacgaccacttcgtggccaactgcaccctgcagttccaggagctgctgcgcacgaccggcgcctcggacaccttcgagggttgggtgagtagcggtgaccccttccctttgtgtccacccaacccccgttccccttatgtttttcaaaactcacccgggtcccgctttcccatcgctttgtggctgagggaattccctccagactttggtcttcgtccacgtggccgcggcactggtgacgcgaccgcggtgggtgtgtgcaggcgcaggtgtgtctccaggaagccggcctggacacgatcccctttcaggacagcggcttggcctaacgggaagtcgggcaggggtccagggcggtc

SEQ ID NO: 9782 - DNA, 109 bp, Homo sapiens
  chr14:61943722-61943831
  hyper
ctgtgacctctttgacgtcagtaactgtttcctgtttatttgaactccctgctcaccctgtagatgactttgtctgagaaaaataataaagcaacggtacttaggagaa

SEQ ID NO: 9783 - DNA, 214 bp, Homo sapiens
  chr14:62162346-62162560
  hyper
ggaccccggcgattgccgcccgcttctctctagtctcacgaggggtttcccgcctcgcacccccacctctggacttgcctttccttctcttctccgcgtgtggagggagccagcgcttaggccggagcgagcctgggggccgcccgccgtgaagacatcgcggggaccgattcaccatggagggcgccggcggcgcgaacgacaagaaaaagta

SEQ ID NO: 9784 - DNA, 40 bp, Homo sapiens
  chr14:62163204-62163244
  hyper
cgtgcaggttttgtttcgttttaatcgccttgaaaaactt

SEQ ID NO: 9785 - DNA, 136 bp, Homo sapiens
  chr14:62583733-62583869
  hyper
ctccgtaggggacaccgagccaaggcctgcagcgagtgacctgcccggggaggcgcgggaccgaggctcacctacccgggcccgcgagtctcgcccagccccagcctcccaacccactctgccggccccaacttag

SEQ ID NO: 9786 - DNA, 375 bp, Homo sapiens
  chr14:62583918-62584293
  hyper
cggcgttccagctctcaaccttgctcccagcagcccccgccggcgcactcgacctacaggaaagttgctcccgagctgtggaggggcgtcatcgcctcctagcaacgctcctagcaaccgggtaacatctgctccctgtggtccaatgcgagctgagaacagctgcgcgcccgcctagcgctgcgaacccggagtgagaggcgcttcagagactggagggacggacctgcaggagccagggctgcccgccgagctgcagttgccgctactgccgctgtcagcgcccgactgaagagtgacagccgcaaaagcaggagtgagcaccgaaccccgcgcttctacctaacaggtgcatgcgccgatctggtgagtgga

SEQ ID NO: 9787 - DNA, 149 bp, Homo sapiens
  chr14:63511857-63512006
  hyper
aaaaatgtgttctgcggtgccaccagccctctcttgccccccggcatcctgggtctggagagcagcggccaggatccgcggcgggggagggggggatgcaggcaaagaaggtggaggaagaggaggaaaaggtggaagagaagattgag

SEQ ID NO: 9788 - DNA, 645 bp, Homo sapiens
  chr14:63512063-63512708
  hyper
cgacccggatgagcagctctggggaggaggaccaggcagttcatggtagtagcgctcccccggccgccgctgcccagactgtggcggtgccgcacacggggctcgggaactgcaggctccgcggggcacagtgcgcctgcgccgcccccgctgtcgctgtcccgccggtgctgatgctgaggctgctgctgaggctgctaccgcggcggccggcgcctgggcgcgggctctgcatctctccccctgctggggagcgcaagcgggaactcaagcccccaccctcccaatccccctcagctcagaccgagaccccttccccgcgccttcgtctcccggtctcctcgtccaccccctcgcgcagcgagctccgggctgaacagcgtagcccaacttctgggctgtgcgcctggtggttgctcctctccccggagatcgaggcaagcgatcgctgtccaatcgggccggtggaatgggagaagagggtgccagagagagcagtggccagtcggaggctcacatctcggcgtctcccgctcgggtcccgaatccgggctgctggcgcggacgcggctcccggggcggaggtgcgggcaggctccagctccagccccagccgaggctgagagcagggcagggactggctgg

SEQ ID NO: 9789 - DNA, 394 bp, Homo sapiens
  chr14:63512740-63513134
  hyper
cgctgctaccgcccccctccgggctccggcgcctgaaaccttcctgaacactggcgctttccgcaccgcccttaccccaccccggagcgggagcgcgagccctgaagtccgagcgcacagccggcgcccggaatggcccctgcgacccgggccgggcttggcgtctgggggagcgtgcggccgcccaggggagtttcccccaggaccgctgagcgcaggaggcgatccgcgagcccgccaccgctgcaaagttgcgggaaaggttgcacttgatgtgaagagtaggggaagagggtgaataattcacacccgagagagggggagtgaggagggcagtgttagcgatggaaaaacggtaaaggctgtgggggcgaagatgcgccagggtggagca

SEQ ID NO: 9790 - DNA, 30 bp, Homo sapiens
  chr14:63670696-63670726
  hyper
tttctgggaagaatcgcttaaagtttctca

SEQ ID NO: 9791 - DNA, 31 bp, Homo sapiens
  chr14:64320708-64320739
  hyper
tcctgtgtagcattcgcgtttgtggaagcct

SEQ ID NO: 9792 - DNA, 169 bp, Homo sapiens
  chr14:64761394-64761563
  hyper
cacttcgaggatcacgtcctcagcccctgactcacataagtgtcattcagaacagatgtctgattctaaggagccagtggtgaaaccagagaggctttgggtttgtcaaatccccagcagcaaacgtaacctcgggccctggagtggcaaagccgtggactagaggtgg

SEQ ID NO: 9793 - DNA, 31 bp, Homo sapiens
  chr14:64805630-64805661
  hyper
cagcagcaactccctacgttgaagtcgtctc

SEQ ID NO: 9794 - DNA, 30 bp, Homo sapiens
  chr14:64931882-64931912
  hyper
acctcactatttagcgtctcagaaaacgcg

SEQ ID NO: 9795 - DNA, 30 bp, Homo sapiens
  chr14:64970070-64970100
  hyper
cccggacccgcggccgggacggctctgcac

SEQ ID NO: 9796 - DNA, 44 bp, Homo sapiens
  chr14:65005556-65005600
  hyper
atttattttatttttttgagacggagtctcgttctgtcgcccag

SEQ ID NO: 9797 - DNA, 17 bp, Homo sapiens
  chr14:65005779-65005796
  hyper
tttcaaagtgctgaaac

SEQ ID NO: 9798 - DNA, 412 bp, Homo sapiens
  chr14:65008562-65008974
  hyper
ccagatccaggagatcgtgctggtgggcggctccactcgtatccccaagatccagaagctgctgcaggatttcttcaacggcaaggagctgaacaagagcatcaaccccgacgaggcggtggcctatggcgccgcggtgcaggcggccatcctcatcggcgacaaatcagagaatgtgcaggacctgctgctactcgacgtgaccccgttgtcgctgggcatcgagacagctggcggtgtcatgaccccactcatcaagaggaacaccacgatccccaccaagcagacgcagaccttcaccacctactcggacaaccagagcagcgtactggtgcaggtatacgagggcgaacgggccatgaccaaggacaataacctgctgggcaagttcgacctgaccgggattccccct

SEQ ID NO: 9799 - DNA, 203 bp, Homo sapiens
  chr14:65008997-65009200
  hyper
cgaggttaccttcgacattgacgccaatggcatccttaacgttaccgccgccgacaagagcaccggtaaggaaaacaaaatcaccatcaccaatgacaaaggtcgtctgagcaaggacgacattgaccggatggtgcaggaggcggagcggtacaaatcggaagatgaggcgaatcgcgaccgagtcgcggccaaaaacgccc

SEQ ID NO: 9800 - DNA, 459 bp, Homo sapiens
  chr14:65016470-65016929
  hyper
catgaagaattatgccctgggcggctttacaatggataggccaatacgtcgccacggcttttaagactgggaaacggggcaccaggctgggctttagaaatcgctggagaagcctgggtgcggccgcagcccgcgcggcctaggacggaagcgacgccccgccccgctccgcgccccgggcagccgtgtgcaggcgcctgcgggcggtatcctcggcgacgccgtatggcttccagggcgaggccatgtaccgggtgcccgagttttatgcgaggaggaagcggttaggtgggcagaccccttacttgatggatgtaagtgcagccttggtcgcccccatacccgggctgggcgcaaggcgggccctgctgcccccaaccggcgccgcgcccctcgccctcctccagaggcgggtcgtcgccttcgccccgggctggcggttctcaaagacacctggcc

SEQ ID NO: 9801 - DNA, 105 bp, Homo sapiens
  chr14:65171042-65171147
  hyper
ttgctggactgcagccgcgagctggagtctccacccacaggaaaaattcctggcccgcccctccctcgctccctcgctccctcgctccctcgctccctcgctccc

SEQ ID NO: 9802 - DNA, 166 bp, Homo sapiens
  chr14:65171658-65171824
  hyper
ttttccctccactccggaaacaaaaggggcaaatgcgccgggcggctccagagaggctcagtttgaaatccaggaagcccgcgaggccgcgcgcgcccgagggctggtgtttggctggagctgtgggcctggcgggtggacccttctgcgcgaggacccgagcctc

SEQ ID NO: 9803 - DNA, 30 bp, Homo sapiens
  chr14:65381328-65381358
  hyper
ggccgtacgtggggcggactcggccgcact

SEQ ID NO: 9804 - DNA, 30 bp, Homo sapiens
  chr14:65438692-65438722
  hyper
gtggaactcgttgtcggtgaagcggcacag

SEQ ID NO: 9805 - DNA, 31 bp, Homo sapiens
  chr14:66974386-66974417
  hyper
ctgtcatagtagccaccgttctgccactcat

SEQ ID NO: 9806 - DNA, 30 bp, Homo sapiens
  chr14:66975584-66975614
  hyper
gccggtgcggagggcgctgcggggctccgc

SEQ ID NO: 9807 - DNA, 86 bp, Homo sapiens
  chr14:67826147-67826233
  hyper
gggcgccttttcctaccggctgggatcgcttcgtccagcctgattcactcaggaggaatgcgcgaagaggccgtcaggaagcctcg

SEQ ID NO: 9808 - DNA, 30 bp, Homo sapiens
  chr14:67878958-67878988
  hyper
gtcgggatttctgacgtgacgtttccaccc

SEQ ID NO: 9809 - DNA, 30 bp, Homo sapiens
  chr14:67981500-67981530
  hyper
gggaaagttgccaacgcgcacccccttccc

SEQ ID NO: 9810 - DNA, 30 bp, Homo sapiens
  chr14:68038106-68038136
  hyper
attgattgttgcgacgtccccacacatttt

SEQ ID NO: 9811 - DNA, 30 bp, Homo sapiens
  chr14:68141708-68141738
  hyper
ccgcgcggcgacagcgggcttcggcccgat

SEQ ID NO: 9812 - DNA, 31 bp, Homo sapiens
  chr14:69258877-69258908
  hyper
caagccagcattttgtcgccacctccccccc

SEQ ID NO: 9813 - DNA, 228 bp, Homo sapiens
  chr14:69259277-69259505
  hyper
acgtaaaacaggatcgcccaaaacttgtcccaatcccagccctccccccgaagcccccgggctgccctgccaggcaaacttcgcccctcaaaaccctggcctccagattcacatgtaatccccgccagcaactgttgaaactcaaagggtgggaaggacggggccaaattccttcaaacttgggagaaatgccggaggagaaaagaatcatctcgctgcaccactttc

SEQ ID NO: 9814 - DNA, 30 bp, Homo sapiens
  chr14:69262502-69262532
  hyper
ttgaaacgtcatttcggggactttccaagg

SEQ ID NO: 9815 - DNA, 30 bp, Homo sapiens
  chr14:69281282-69281312
  hyper
ctggggagagccaccgcttgctgaggttag

SEQ ID NO: 9816 - DNA, 218 bp, Homo sapiens
  chr14:69444774-69444992
  hyper
ctccgagcccagctcccgtggcggggcgcgcacccggcacaccgcgcctgcctgggatgcagctccgtggctaagtagggatccccagtgactggccccaaatatcccctaagactgaccctcgttctgcagcccctcaactcgaaccgagctgcccacctttcccgggggtcggaggggcaggacgtagcgcaagcccatgtcggggttacagcttc

SEQ ID NO: 9817 - DNA, 235 bp, Homo sapiens
  chr14:69445728-69445963
  hyper
tggctgcatgtaatcgttggtttgctgagaatcataatggtccatgatggtgcgcgcgtgctagggtctggatttcttcctccaccttctctctgagcaacggctgctgccctggcgtggggagggagtagggctgggctgggctgggctggcggggccgggctcgctcccctgcgcccggttccgccgcggcgctgctggcgaaggctgctactggcggcgacagcggcggctg

SEQ ID NO: 9818 - DNA, 428 bp, Homo sapiens
  chr14:69446250-69446678
  hyper
cccgcggctcatgtgacgccagcttaagctgaacgggaccgaagccgggagacgcctccccgagctcggggactgagtggcagcgcgcttgggaaccccaggagccgccgggattggacccgttccccgccaccgttattgcgctcccacgcgcgctccaaaccccggggtgggagggggctggagaaaggacgcgaggaaacccgaagaacattcattttctctttcccagggaacctgggtctgggcaggtcggcaccctaggaaagggggcggagtggggcaatggaaaggaatttcttgggaatttcacgactccaccgccgccccccccggccccgccccaccccaccccaccctacaaggcgcgacccggctgatccctgccctgcaggaacccggtttctcgccagcgaactgctctcaga

SEQ ID NO: 9819 - DNA, 31 bp, Homo sapiens
  chr14:69618276-69618307
  hyper
agcagccaagcaggaacgcccaatcagccgt

SEQ ID NO: 9820 - DNA, 96 bp, Homo sapiens
  chr14:69658737-69658833
  hyper
ttttctctcctggattcgtgtgagccgccaccctcgctaccatccctgtcctcccagaccacaccctgctctgggccttgccgggagccacctctt

SEQ ID NO: 9821 - DNA, 30 bp, Homo sapiens
  chr14:69864915-69864945
  hyper
cggactcgggtagccgcggaggcctttctc

SEQ ID NO: 9822 - DNA, 60 bp, Homo sapiens
  chr14:69865218-69865278
  hyper
gtcttccgtactttcgttattaaacatacggctcaagtgatcaccggtatagacagtgac

SEQ ID NO: 9823 - DNA, 30 bp, Homo sapiens
  chr14:70014858-70014888
  hyper
gtaaatgcgcgcttcgtgcagaccgcagag

SEQ ID NO: 9824 - DNA, 396 bp, Homo sapiens
  chr14:70193412-70193808
  hyper
aggagtggatccaccccgtcttctttccctgctgccatgccctttggcaggcagccgtccccacgcccggaaagccccagcttcggctcagcccacagcacaagggcatatccttctgcctgcgcaggccagggtgctcgacgccctcgcggtccgcctgcgcgcccccacgcaggctcagcagcgcccgggcctgcagcagaggccggaggaagcgccacgggcggctcagacctgaggccgcaagggcgcgccgggcgggcagggcggagggtccgatttcctccctctgaacggaaaaaaagccactttccctgggaagaactcgaagaagttggatgtctgatcttcaccttggatttgtggtctcggcccgcgggcgactcaccccaccca

SEQ ID NO: 9825 - DNA, 401 bp, Homo sapiens
  chr14:70346146-70346547
  hyper
ctgccgcctgggccccgccgagcggagctagcgccgcgcgcagagcacacgctcgcgctccagctcccctcctgcgcggttcatgactgtgtcccctgaccgcagcctctgcgagcccccgccgcaggaccacggcccgctccccgccgccgcgagggccccgagcgaaggaaggaagggaggcgcgctgtgcgccccgcggagcccgcgaaccccgctcgctgccggctgcccagcctggctggcaccatgctgcccgcgcgctgcgcccgcctgctcacgccccacttgctgctggtgttggtgcagctgtcccctgctcgcggccaccgcaccacaggccccagggtaagtgcgcccccagctttgcgcccacctgcggagggaggggaggttgcttc

SEQ ID NO: 9826 - DNA, 1534 bp, Homo sapiens
  chr14:70654355-70655889
  hyper
gtccgcgcgcgcgtgtgtgttgggggatcgggggagggttagttatatatttcgattctctccaccgagtcccggatcacgcagaccaccaggggctggagagtgcagcactggagaaaccctccttctccctcgcccccttggccccagcggtgggtgctctggggctgcagctcccgacccgcggcggtggagtcccgagattggggtgagcgcgtgcgtgcgtatgtgcacgcgggcgcgcgccgagtggataacgcgcttccctgctagcccccaaacccggcggacactcacagcaccagaagcacaacacgccctggcccaggtggcacacatatgccgacatgcatccagcacacacaacacagcagtcagtctccccaaacagcacccgctaccaacccagcatgctcacgatccaactgtacccacctgcccaggcatctctctctgcccctccccacccggcggcaccctcctgtagacacccactctgccagatctgcccccccaacactgcatacacaatgtacactttccggggcaccctcaccccacttctcctggcactaaatccacaggaaggcggttcatatgaatgatcttgagaaataacttaaccccgttactcacaatcagggatcctcttaggggcatcccaagccccccaacctctacctcccatgtctcggctgcccgctaagggggaagggcaggaggctcaccccattactcaccgtttcctctcggcctcccgagcggagtgggcaagggaggggggtgaggaaggtacgcgatgcccccgccgcccggcgcctcaccggtcgcagcggctcatcgcccccgcgggctgcccgccggccgcagccgcgtccggggcatgtcagtccgccgccgccgccctcccgccggggttcgtgggctcgcagctgtcagggagctgcggggcagcgcatctggagcgcggggtctgggagggagggtgtctggggccagggcgaggggccccgggaggggtccttccgcacggatttcagaaagagggaaaccccgacccagagcggtgactggaatctacgcccgggagaggcccggagtcccggccgcgggcggcgggggattcctgcaggaaggggcaggaaggcaagcagcccggcgcgccctggcggctccgagggacctgggctcgggcttgcggtcgcgtcgcctgggctttccctgggctgggagcgcgccgggtctccgccttgcacgctgtcaccgcgggagacgtctcggcctcgccgcgcgcagaggggacgcgcggagaggctggtttctgggcgagcggagagctttgcccattaagctgccggaagaagccaaatcaaaaagccaatctccaagcctccaaacggaacgtcaccctatcagctgggagacagcgccgcactgactgacaagccgcgcatatttatcctcgcgcgcggaggggagactctcagaacgctcctcgaccagcagcgaggaagtcgagcccgcatcccgcatc

SEQ ID NO: 9827 - DNA, 218 bp, Homo sapiens
  chr14:70655919-70656137
  hyper
cgaattcagatccaacccctgccccgcggccacccaccctagtcgttggagcctggcgcccgcgcctcccggccggcagcacgtcaaaacggcggcgcgtcctgacctggattccgccgagttgggagctccaggcagcaggcgggcgcgcggcaccggctttccccttgtcctcaggagacgctgcctgcaattccgaaattaagtctccaccaaac

SEQ ID NO: 9828 - DNA, 640 bp, Homo sapiens
  chr14:72398592-72399232
  hyper
cctgtaatattccaaatgcagcgtgtggtgtgcatgttgaatacataaaaatgacgaggttaggaacaatatcgctgacggtcgcggtgtcccgttttaatttagagggcgccagcaacacgtcagtgagggagattcagaagccgccgggcacctcaccccgggccgggaatccctaagagaaccttgacgccgctgaagtttccggaccgggccagtttggaattgacgaaagcagcctccgcccggtcgagccagtctctcggttttctcggcggcttcttgaggatgaggcatttctaggttttctcctcctcgagcaaatcacggtctgcgccttccgcggctctgggaacaggtgagccgtgcggcggcgcccgcgggacgcgctcaggtgccggtccccgcccgccggcccctccctgcagcacgcggtccgggcccaggtgccggggcccaggtgccggcgcccaggtgcgcggggcacggggctgcagctccgctcggcatccgacagcgggcgccgctgcagcagctcgcgggccgcggagctgaacggcttcgcgagttggggcagctcctcgcgctcggccctgctcggcggcgagagctccgcctgggcgccgcgttcctacagccg

SEQ ID NO: 9829 - DNA, 161 bp, Homo sapiens
  chr14:72399451-72399612
  hyper
cgctcgccaccacggaaactcggaaagaggaggcgaggctgtggggagcggcgcggagacggactagacttcccctccgcccccaagaggctgccggtccccggttccctgggcttctccagctttatcatgaacctggcgcaaggttggctttaggaaaa

SEQ ID NO: 9830 - DNA, 366 bp, Homo sapiens
  chr14:72399923-72400289
  hyper
cctgggtttctgggtgtgaagcgcacaccgacggggacgagagcgcagaggatggcgcttttagatacttccagtcttccgatgttgtgatcgcaggtagggcagctttgcctctaatcaggcgttcattaactttttccctgaacaagctcgcccatttgtggtttggaagaaaagaaagcgagtctccgcggtgaggtgtggagggcaggggcgggtggggaggtttgttgtttgggaactgcgctagcaaaggaagcggtggctattcgcttggagaggatgacaaatgaactggttgcgtgaggagtgaagagaccgtgtttacagtcaccagcaggctgcgtaaagaagtggcccagtgag

SEQ ID NO: 9831 - DNA, 30 bp, Homo sapiens
  chr14:73359797-73359827
  hyper
gtcctcgcccggcccgccccactctgtcca

SEQ ID NO: 9832 - DNA, 72 bp, Homo sapiens
  chr14:73393456-73393528
  hyper
cgtggggccctccggccggatcagtgctgcaaccgtaaacacgcagggagggcaccccgagtgtcgccgctg

SEQ ID NO: 9833 - DNA, 31 bp, Homo sapiens
  chr14:73485669-73485700
  hyper
tggcacataatatatgcgccaaaaatgtgat

SEQ ID NO: 9834 - DNA, 35 bp, Homo sapiens
  chr14:74111544-74111579
  hyper
ggcagccagcaacagccggacgggaggaccccggc

SEQ ID NO: 9835 - DNA, 30 bp, Homo sapiens
  chr14:74180376-74180406
  hyper
agactgtggctcaccgtgctcctggcctta

SEQ ID NO: 9836 - DNA, 30 bp, Homo sapiens
  chr14:74181270-74181300
  hyper
tgtttctctgatggcgcatttcctttttca

SEQ ID NO: 9837 - DNA, 30 bp, Homo sapiens
  chr14:74225334-74225364
  hyper
gcacacaggtcccacgtgggatggtggaaa

SEQ ID NO: 9838 - DNA, 30 bp, Homo sapiens
  chr14:74225612-74225642
  hyper
tggtcctgcatgtgcgacttgggaggcgac

SEQ ID NO: 9839 - DNA, 31 bp, Homo sapiens
  chr14:74238785-74238816
  hyper
gtccacgctgtgaacccgagttactcagcca

SEQ ID NO: 9840 - DNA, 47 bp, Homo sapiens
  chr14:74252874-74252921
  hyper
gctacagttgcagtctcgccactggcccgggccgccagcccctagtt

SEQ ID NO: 9841 - DNA, 136 bp, Homo sapiens
  chr14:74253328-74253464
  hyper
cgtcccaggaaggccaagcaaataaaagtccggggaaagttcctttaacttccttcctgcgccctcgacaagggctgcgaagaggaagaggtcatttcccagggaagcaccgggcaggggccgagagctgcgccca

SEQ ID NO: 9842 - DNA, 228 bp, Homo sapiens
  chr14:74254303-74254531
  hyper
aagaaaaagtttttccgtttggtgttggggctaaaagggtcatgtcagaaagcagtgtgctctatgtgttcttaatgcctaaagtgggccttaaaacaagggtccctgtccccacgttctctctaaaagtctgcatgatgtccctcgtcatttctacgggttataagtgagcaagacgtttaccacgtatcacacttctgggggctatttcaacgcccaagctggggc

SEQ ID NO: 9843 - DNA, 30 bp, Homo sapiens
  chr14:74254822-74254852
  hyper
aggctggagaaaaaacggggttagcctttg

SEQ ID NO: 9844 - DNA, 473 bp, Homo sapiens
  chr14:74707071-74707544
  hyper
agttgtctgattcccaaatcccgcgctggtcaactggggtttatttttcacccccacgagctcagacaacccggccatcgcggcagctaaagcggccgccatcctctcccacgtaagcgccactatatactggagcccggggacgcgcgggctcggggaccctgggtgacctctccgccttctccccgcgctgctttccgggaggtgtgtcgcggcccgctcgaacctccgattcctgtttgagcttggcaattcccccgatttttcgttgcgttttactttgttttacgtggaaaggcaacgaaaaccagcgcgtcgcaggctctcgggcctcgagtagggacgcattgtgccgccttgcgaaaaggacggtgctcggcagcccccagtcttcccggagcccagctccccacgcctccgctccgctcctcgctcctcgaggccaactttccggcccggggcattggggctgg

SEQ ID NO: 9845 - DNA, 175 bp, Homo sapiens
  chr14:74707572-74707747
  hyper
cgagcgctgccggggatctctgcggccccctaaggctgcctcgctctccgtcgtcccggtcccaagcgcgccggggcctttgcctctcttacaacgaaatctgttcaaaacctccggattcgggccccggcgcgggagaggtcagcctgagctcagggatgggacggccaccggg

SEQ ID NO: 9846 - DNA, 737 bp, Homo sapiens
  chr14:74707791-74708528
  hyper
cgcggaggcagcccggggtggggccctcgcgggtttcgggcacagcggagcgcgtcccccactctgccgcatgtccctacgcccgcttttcagattctgaagatgtttcctccagcgatcgaaaaatgtccaaatctgctttaaaccagaccaagaaacggaagaagcggcgacacaggtgaggcccccgctttctgttacctctcctgcccgcgcaccccgctgccgtcccccgttccgggatcgggtctctcggaccctattttcgccgacaacggatctgaggtccgaggccgtgccagggcgcagaccacgggttgtttggcggaatctgcccgggggccttggcgtcggcaccggttgagcaggatgagtggccgccgggaaagcggcccggttcgggctttctcctccttgttcaggagaaaggaaaggctccaacacaggccaaactgagccacagagtgggggcggtccccagatccccgcaccagtacattctgagagccacacagacccggcggcgggcagattagctcccacctcctgccagagccggttctttgccctcggcctcaaccgccgcccccatttctctcccggggtccctgtcctctctgccaactccctaagctttctgctcccaccgttctccaaagctggagcgatctctgcactgacagagcattttcttttggcttctgctcattcgtgattctgaccgagtcgcttccctt

SEQ ID NO: 9847 - DNA, 195 bp, Homo sapiens
  chr14:74708856-74709051
  hyper
aaaaatctgcctgcctttctgcgggtgctgctcgcaggtgctgccccggcgctcacctcggagctatttccccgcaccccactccgtccccatcaggtggggccgccacagactctgcgccctttcaagacatttctccactagggcgttctctggcacccccgccgccacatcgttttctcccaccctaatttg

SEQ ID NO: 9848 - DNA, 30 bp, Homo sapiens
  chr14:74893082-74893112
  hyper
ggcgaagcgaggggcgcgcagctggaaccc

SEQ ID NO: 9849 - DNA, 30 bp, Homo sapiens
  chr14:75179348-75179378
  hyper
atttctctcttcaccgagaggagtacacgg

SEQ ID NO: 9850 - DNA, 30 bp, Homo sapiens
  chr14:75179844-75179874
  hyper
acgtagaagtattgcgccgttggtgattac

SEQ ID NO: 9851 - DNA, 30 bp, Homo sapiens
  chr14:75230399-75230429
  hyper
aagcaaatgcagtgcgtgcttcagccccac

SEQ ID NO: 9852 - DNA, 30 bp, Homo sapiens
  chr14:75536115-75536145
  hyper
agaaaagcctctcccgcccctccccggctc

SEQ ID NO: 9853 - DNA, 93 bp, Homo sapiens
  chr14:75743667-75743760
  hyper
aagtggcccagttccacgaatccccgcctcctgccctccccgctcctgccgggttggatctctaagaatggaggttagcgcacagcctcgcgc

SEQ ID NO: 9854 - DNA, 69 bp, Homo sapiens
  chr14:75743993-75744062
  hyper
gctggaggcaggtctgcggtccggctccccgcgcgccccgaactatccgcccgccggcctcatcctgcc

SEQ ID NO: 9855 - DNA, 30 bp, Homo sapiens
  chr14:76044576-76044606
  hyper
gaacacttaggtggcgccgggctttggtgc

SEQ ID NO: 9856 - DNA, 762 bp, Homo sapiens
  chr14:76604775-76605537
  hyper
ggccccttccatcatcgccatccttctgtgttgacccaccccggctccgtcccaactctcccttcctctccacatccaggaaagattaacttctctccgtgcgagaaagttatcattagccaagaattaaaagagtgattaatgatgccccctcccctgccccctccccaaggccttatctggtggcggtcagctggacaatgcggcagggtgggagggggaagcgagggcgacggagaaaatggaaaacaataaatattaagcgcaagaaaaaagggagcgcagcgccgttcccacttgttagattgaaggcgcctctccagaggggggaaggctccaaattgctaattagcgcctgtgaaaaggcctagctctgatatgcgcgccgctgaaaggccgacgttaatgaagccgcggcgcgcccgcttccctttgactggccttcatccctcctccgcgccccgggccggcccgaacaatgcggcggggagcgcaggctcccccaggcctcgccgggacggcccgggcagcgcgcgcggggggcggcgcggcgccggcgaaatgtggagggggagataaggccgagcgcagggaagaggctcactcccaggggcccagggaaaatttgcagttattatgaaggagatgagacagattaaaagcccttgtgttcgccgctttgcccctttatttagtggcttcatctacgagatgaaagaagttggaaatgactttctctgctttgcgcggcaagaagcttca

SEQ ID NO: 9857 - DNA, 31 bp, Homo sapiens
  chr14:76842689-76842720
  hyper
cgcgtgatttccccgccgtctttctctacca

SEQ ID NO: 9858 - DNA, 101 bp, Homo sapiens
  chr14:77227559-77227660
  hyper
aagaaattcccgaccgcaggaattccttctgcgctaggaatctccatggagtttgcgctccctctggcacgttgaaaacgtcctccgcagcttcgcaccgg

SEQ ID NO: 9859 - DNA, 32 bp, Homo sapiens
  chr14:77228493-77228525
  hyper
aggcggggaatgtgcgcgtcggcgcgcgcccc

SEQ ID NO: 9860 - DNA, 315 bp, Homo sapiens
  chr14:77428165-77428480
  hyper
aaaaaactagaaagctcgacttctgcctgcggggccggaagccccgctgcggccccagcccgcggttagcccctgtttgtcattttgcaaatctggtcaacccacctccggtgaaaactcccaacctcaccccagggggcaatgactaattacaaaacacattttctctcgttttcgtcaagctcgctgtcccgcccacacatcccccgcctatcccggcacccgtcggcttcctcaggagcctcactcaactgtgttgaatgaactcttggcctggtccctcccccagagacttcacaccgtggggttctttcc

SEQ ID NO: 9861 - DNA, 351 bp, Homo sapiens
  chr14:77493408-77493759
  hyper
ccgggttgggcagccccgtaaccagcccaccgtgcgttccacgccgagacgccaccgacgccgccgctgaagaagaattggggctctgacggttcagctctgggggtccctcctctggtgttggtttggggaagccgtttgggccccccaggccgttgggcagtcgcgcggtgtggctgctgcttcccaggctcaccggcggtggcgggtactcgaagcggctgcgctgttccaccgcagcggcggcggcggcggcggcggcggcggcagcgcttaggccgtagcgctccaggccagacggggccgccagcaccgcaggcttgctggaaccatcaacgtggttgagctgtt

SEQ ID NO: 9862 - DNA, 31 bp, Homo sapiens
  chr14:77499643-77499674
  hyper
cctaaaggagtaatcccggtatttgaaaaaa

SEQ ID NO: 9863 - DNA, 30 bp, Homo sapiens
  chr14:77564277-77564307
  hyper
gctcctctgaaccccgcctggaaaccttgc

SEQ ID NO: 9864 - DNA, 694 bp, Homo sapiens
  chr14:77591173-77591867
  hyper
ggagacgcggtgatgcgcggggcccgggccgtggacaagactgcagtgtcctgcactacctgccgcccactcatcaggccgattctcctcaccttacgcttagatgagtttcgagtaagaccactgctggcatcaagagtctgggcccatgatctcgccctttcgggctaggcgaggcagacccaggttggctgcggcccgcggtccccgcgcagccaacactggcagccaagcgcggggcgcgcgcgccgggagagtggagcgcggaggcccgacggcgccccctcccggcgggcccgagccacggccgcgggctctggcgggtgccggggaggccacgcgcgacggcgtcgcagccggagcccagacagacgccccacgctgcgcggccttcatcccacggctggggcgatggaaaggtggtcccgacacgcgcaggggtctgaggaatcggcttcgggattctgtggtctttgtggtccgcagccggcaccactgcttcctgtaatttaattttctctcccgaaagcgttgctaattaaatcctttctccggcgagccgtcgccccccgcccctgctagtctgtttattaagtacccggcacctgcgagggaatttttgccctcggcggccggcgggtcaggtggaggggccgcgctgccccttagctgcgcctcctggcttccttcccca

SEQ ID NO: 9865 - DNA, 153 bp, Homo sapiens
  chr14:77600264-77600417
  hyper
cgaacatttcagaacccaggacagctcctgcagggcacggggaggggaaacaccagagccgctttacacccaggccaccggcataactgcgatctaggcaggctttccaccgggagggagggagattaatgagattgacgctacattttgtag

SEQ ID NO: 9866 - DNA, 30 bp, Homo sapiens
  chr14:77606579-77606609
  hyper
tttctccgtccctgcgtccccacccacaca

SEQ ID NO: 9867 - DNA, 84 bp, Homo sapiens
  chr14:77606921-77607005
  hyper
cgctggctgcccgggctatttctttgcgaagagcgttttcatttgaggcgaaattaaaatccccccttcgcgcccgcctcccgc

SEQ ID NO: 9868 - DNA, 30 bp, Homo sapiens
  chr14:77607207-77607237
  hyper
aataggattccgtgcgcccgagagaacttt

SEQ ID NO: 9869 - DNA, 31 bp, Homo sapiens
  chr14:77680058-77680089
  hyper
ctggcagaaggcatgccgttgaagtgtactg

SEQ ID NO: 9870 - DNA, 30 bp, Homo sapiens
  chr14:77737480-77737510
  hyper
cccagctgtgcttccggggaccccgcttgg

SEQ ID NO: 9871 - DNA, 30 bp, Homo sapiens
  chr14:78266693-78266723
  hyper
ccggcgcgcggccacgtggctcgggtgact

SEQ ID NO: 9872 - DNA, 255 bp, Homo sapiens
  chr14:78432196-78432451
  hyper
aaaatagcatgcaccggacaaacatgcatgtaaatgattgaatgtgatgatggtgacggcacattttatgcccatgcttgatttctgtctctgctccctctctctcccccttccctctctcctgctctctgacgttaaatgcttggttactcaaggccgcagttacaggatgttaggtaaacagccctccgtccctgcccccgcccttttactttcaataccgagaaaatggaacagaacgttagggaaggaggc

SEQ ID NO: 9873 - DNA, 30 bp, Homo sapiens
  chr14:78624566-78624596
  hyper
ctgagaagacggagccggccccacggagaa

SEQ ID NO: 9874 - DNA, 30 bp, Homo sapiens
  chr14:79745139-79745169
  hyper
agattcccatcattcgccctgcgggagggg

SEQ ID NO: 9875 - DNA, 30 bp, Homo sapiens
  chr14:81421585-81421615
  hyper
tctagaaggctacacgctagggaaggtggc

SEQ ID NO: 9876 - DNA, 31 bp, Homo sapiens
  chr14:81685635-81685666
  hyper
aactgagctctgcacacgcctggctcttgcc

SEQ ID NO: 9877 - DNA, 30 bp, Homo sapiens
  chr14:81686842-81686872
  hyper
gtatttgccgagttcgccatttccacacac

SEQ ID NO: 9878 - DNA, 36 bp, Homo sapiens
  chr14:81901991-81902027
  hyper
gttgcaccagaacacacggacgcgcacacacacgca

SEQ ID NO: 9879 - DNA, 44 bp, Homo sapiens
  chr14:81902340-81902384
  hyper
ctgggcgtcccaatctcgaagacacccgtcggccagaagtgtct

SEQ ID NO: 9880 - DNA, 150 bp, Homo sapiens
  chr14:81902633-81902783
  hyper
gcctcctgctgcggggcgtgggtgcagttacctgcgccgcggtccgcagggtccccggcgtccgccgaaaggtcgccgcggcaaagccggcttctctggccgcgggatacccacccggccgcactgctctcgccacgatccctcccggcc

SEQ ID NO: 9881 - DNA, 30 bp, Homo sapiens
  chr14:81903131-81903161
  hyper
acccgctccgcctgcgggctggtagttgag

SEQ ID NO: 9882 - DNA, 30 bp, Homo sapiens
  chr14:82000011-82000041
  hyper
tactgacccgaggacgccgaggccaagctc

SEQ ID NO: 9883 - DNA, 293 bp, Homo sapiens
  chr14:85996086-85996379
  hyper
gatgtggacgggggcggagagcagagaagtaaaggaataaaaccaacttcgctggcaacttcaataaatccggtaactggaggcaaaaaatagactccgagggctgggtctggtccggatgaaacgctagggctccttcccttccttgaatcttgggcgctggaagccagccacgggcgtcttgccacgcgagtgcccctagacagcaacacacccactggaaacgcacgtgaacaaagctctcgcccccgggagccgctgcctgcggtttcctagtcgatcccagcttctct

SEQ ID NO: 9884 - DNA, 59 bp, Homo sapiens
  chr14:85996736-85996795
  hyper
aggagggacctcggcggcgacccctaaaacaataccatgccccgggatccccgctgctg

SEQ ID NO: 9885 - DNA, 30 bp, Homo sapiens
  chr14:85997566-85997596
  hyper
gtgagttccttgagccgcttgcgtgggacg

SEQ ID NO: 9886 - DNA, 90 bp, Homo sapiens
  chr14:85997835-85997925
  hyper
tcggggtactgacaacgggaatgaagccataggggaagaggataactgggacgggctggacccatacttgatacccgggaaactcctaga

SEQ ID NO: 9887 - DNA, 362 bp, Homo sapiens
  chr14:85998186-85998548
  hyper
cgcacgaaccgggtagtgtgcgcgtgtgtgtgctcgcgtgtgtgagcgcgtgtgccagcgtgcgtctccgcgcgggcgtgcgtctgggtggatccttgcgtggcttgggaggcaaatcgggcgtttctccaagtcgtcttaacatgatttaggctctcaaatacgtgaaagcggtagacacaacagggatgcgaaggaaataaaaaacaattggggaagtggtgccaagtcactcaggctttgaactgaggacgagtagtgcggtcgcgcctggggcgcgtccggaaatcatcctcagcctgtggcggccactgccccacttaaactcttctgcggggagagttgagcggatccctgggggg

SEQ ID NO: 9888 - DNA, 30 bp, Homo sapiens
  chr14:85999918-85999948
  hyper
cttcttttggggttcgttggcttggcgaag

SEQ ID NO: 9889 - DNA, 222 bp, Homo sapiens
  chr14:86000270-86000492
  hyper
gggggagggcgcggcgctgagcgggattaccaccagggctggaaggagacctcgagaacctttgcaggtaacgcgcgcccccaaccctcttcttccatgccccgccgctgcgctcccgcttcctcccagagcccttcctggccctcgcgggtctggcagaaagtaagagggaggcgaagttcaagatcccggggatgagcaccgagcgctggcagatcacta

SEQ ID NO: 9890 - DNA, 31 bp, Homo sapiens
  chr14:88459618-88459649
  hyper
ggtcaagggcctctgacgcagctggcggagt

SEQ ID NO: 9891 - DNA, 30 bp, Homo sapiens
  chr14:88789534-88789564
  hyper
gtcactccagcccccgaaggcgtgtgcgca

SEQ ID NO: 9892 - DNA, 30 bp, Homo sapiens
  chr14:88790077-88790107
  hyper
ggcgctgcaggaggcggaggaagggccgct

SEQ ID NO: 9893 - DNA, 547 bp, Homo sapiens
  chr14:89020728-89021275
  hyper
tgatccagaattaacccgcaacaatcggccagggcgttcggaatagaagttcaagactccttttagaaattactcaagtatatgagagcgaacctgaaaaacaagacttttctctttgttacgctcccgctacgggtctggccgccgcgccccattctccgggattccggggccgcgggcgcgctccggggtccgggcgagtggacacaccccaccgctcgggccagccgcccgcccctcccgccggccggggaccgcgccctcacctgctcccgctcccgctcccgcatcctcggggccgcgcgccccgctcagcgacccgcctcccggggccccgccgcgcggccgccgcagccgcacccgcacgccagcccgggccgcggcgcgctcatggggctcgcacgcctcacttcctgtctccaaaaacccggctcgcagaccattcccctgggcagagtccggcggtggcgacggcgaggggcgaggcctggaggtgggaccggccggcgaggagcgccgcacaaagaagccccgtgggggcgggggg

SEQ ID NO: 9894 - DNA, 140 bp, Homo sapiens
  chr14:89290906-89291046
  hyper
cctgttctcaggcgcgctgcgggcacctctcggacaaggccccagccgtcgcgggttgccgggcagagtcggacgccgccagctcttcactccacgcccacctctctcctggagcgctgggccttcgctggccgcaccgg

SEQ ID NO: 9895 - DNA, 112 bp, Homo sapiens
  chr14:89506987-89507099
  hyper
ggtctaaaagggagaacgacatccttatgacttgctttaggctgctttctggatgtattttcagagctggggatgaggagaggttgcgtaaaggtgccggcctgctgctggc

SEQ ID NO: 9896 - DNA, 207 bp, Homo sapiens
  chr14:89817834-89818041
  hyper
aaaatgcaaattttctaaaaccgttctgtggagagagggaggcttcctgtgaggcccacttcctgtgaagcgtttggtctatggacagcctatttttaaaaatgtaagtccttcctttgaggccccccggaactggcagcaggccgacgggcaatcgttcctctggccgcacactttcaagtgaccgaatgtacccaaactgtttga

SEQ ID NO: 9897 - DNA, 66 bp, Homo sapiens
  chr14:89884222-89884288
  hyper
cctaaaggccacgccggtggggcctctcaagtgggttgtgcggaacgccccggccggcctagagag

SEQ ID NO: 9898 - DNA, 31 bp, Homo sapiens
  chr14:89952768-89952799
  hyper
gaagattggggggaggcgggggaggatacca

SEQ ID NO: 9899 - DNA, 124 bp, Homo sapiens
  chr14:90084381-90084505
  hyper
gtcttccttagctaaggaaaacgattccctttttcctcaatgagccagtcgcaccctgcctacgacagctccacacgggagcttccagcagaccagtcctttcgggtgaggcacattttacatt

SEQ ID NO: 9900 - DNA, 57 bp, Homo sapiens
  chr14:90085512-90085569
  hyper
gcgcccggcgcccgcccggggtcggcggcgcggctcccaccccggcctggagccctg

SEQ ID NO: 9901 - DNA, 134 bp, Homo sapiens
  chr14:90420884-90421018
  hyper
aggccaagctgaagtccgaggctcagtcgccctccggaaacctacttccacccacttcctgtgttccgagggactggcttcccacgtccgcgacctggctctggcctcggagaagaacatcgcgactacaacaa

SEQ ID NO: 9902 - DNA, 200 bp, Homo sapiens
  chr14:90421129-90421329
  hyper
cgtctcctcccattggacaacctgccagccactcgcgttaatcccgcagggctattggccagagtctttgtttaattacgtttccttggagccgccctggcagtgaggcgcccaggcctgcccccagcacttggctccaccccctgactgtcccttaactcgttgagcgcggctggaaatccaagcgcttctaggtgctg

SEQ ID NO: 9903 - DNA, 604 bp, Homo sapiens
  chr14:90422191-90422795
  hyper
cggaaggggaaggggccgggcctcgaggcacaagccgctgccgccagggtttgaactgcgcgcatgcgcggcggccgccgaaggggcgggatccgaggcaagcgttggttctgtgcgcctcaggtacgtgttgggcggcagtgggcgcggactcggtgcggtctctcgcgggctgcggtcgggcccgggatcctgctcctggccgagtcgcggtgcgcgggctgctggggtccggcagggctggaggcggaccgcgaggaagcggcgcggccgggaagatggggcagggtcgcctcggccccggggcctcggtttcctccgatcacagcgcctcagggggcgcgcacgggcgctgcggagacctgtgtcctgccggggcgcggcgctaggggcccctgctcgggtttttattcccagacctaagcttacaggtgcgtggtcccagaaagtgagtaggaaagcgcccaccacgtgccaggcgcttaagctttctgtgctcggtttcccagtataggaggacggtcacggtacgtagtatagagttgtcctgagggtgaagcgagtttacacttggtgaggcgcttcgaatcgtgcctggccggcc

SEQ ID NO: 9904 - DNA, 2173 bp, Homo sapiens
  chr14:90526633-90528806
  hyper
ttattcgaaatcacacggttttactcaacagggctcctagcccttctgtctctgctcctggtgcgtaagggcggtgtgtggggctctgcgcctgaaaccgctctctcggaaggtgggaagatgcccacgtatccattcctctccgcgtacagattcgctcccacacgcccgggcgggtgattccggagggccgcgcggggctgtgtgcgcgggcgggggcgggatgtgtctggagggggcagagcgccctctcccggccccggagggcccacgcggaccggctgagcgtcccaccagccggttctgcatccactacccagatctgcgcgccctggtgggagcaccgcagccccgggtcggcccttcgaacgccgagcgtctacccgcggagaccagcgcaggaggcgggcccgcgcgcaaggaggcgggcgacagggtggagtcgccgcagctggcagccgcacggctctacctgttgcagcgtcggagcgcgcccgcctgagaaggcagagcgcggtgcggacctgtgctccgcgcgccggctggcagggcagggccgcggctgccaggaggcccgggaacagtcccgacggagcggcgcggagagggcgctccccggaaggtgagatctgagcgcggcagcggcgccagcgcccgctacaaggcggggtctcggggagggggccccggcggtttgctggagagccttgctactgttctgcatgaggtgggggatgccttctgcgcggaccccgcgtccaggcaaaactctggaacgcactaggcagccaagcccggggggaagagatggaacgctccaaggtcaaggtctcctggccgcggagcccttccagcccccagtgtttggcctcctctccggaagcggggctggctcgcggtgcgcgcttggtccgggcggagcctactagtaggcgcagaggacgcccccgcgcaggatccagagaccaagggcgctctggcatggtcaaggcgagggaggctgcccgggggagaagcccctaacttcctttgctccctgttccaacctccctttctggtctcctctctccagcccgtccgcccaacggatgcgcagcgttggggcccggccggaggtcggagccctcggacgccgcagccctcggacgccgctcagcacagcccctctctccgtgcgcccgccctggaccccctccatccctaagccccggcagccgattcggagactcgggaggccacaggctcagcgcgacaccacgaccacaactaggaggcaccatcgtcgatctacctggggaggcacctacaaagccagcagactgacacccgtgtcctagccgtcggcggcctgcgaagcgatagtcaaaggaaccaggacccaggaccccggcgctctgcttacccgcagacctccggaccgcgccccccccccgccgccccgccccgccccgccccgccccgcgaccgtctctttgcgggaaactcgagttggctcgagcttgccctgaagacgcgccacgccccctcccctatctgagccggacagggagccggggtggaaactgcgcccgcatcccagcgccaagcagacgtgaactctgcgcccgttccccgggaccttcagcgttaaggagaactccgaggagagcagggggagtggaggggaacggcggcgacaaagcggatttgaaactaggagtcaaggaggacgtggggagctggcgccacaggagctaccgaggcggcggccgggggagcctcgcggcctgcgggagagcccggcggtcatgggcgagccggcggtggggcgcccgggagctggctgagcgccggggcccttatttcccgggggtgtgggcgagactccgccgacgcccggtgccgtgggcctgggggctgcccccgggggcccggccatggctggccggggtttcagctggggcccgggccacctgaacgaggacaacgcgcgctttctgctgctggccgcgctcatcgtgctctacctgctgggcggcgccgccgtcttctccgcgctggagctggcgcacgagcgccaggccaagcagcgctgggaggagcgcctggccaacttcagccgcggccacaacctgagccgcgacgagctgcgcggcttcctccgccactacgaggaggccactcgggccggcat

SEQ ID NO: 9905 - DNA, 232 bp, Homo sapiens
  chr14:90528869-90529101
  hyper
cgtttccaccataggtaagtgtgctggccggactcgctgacaacctccgggcggcctccacttcctccggggggcaggaccgaccctctcatcctttcattcatccatctgggcgcccagccagactccactgacatgagctgtcgcctgatcaacaggtggtattgcctccccgctgctctaatgtggtccaggcaccggcagcttcagcgtcacctggcagcttgttaga

SEQ ID NO: 9906 - DNA, 30 bp, Homo sapiens
  chr14:90798553-90798583
  hyper
ggaattgttgaccgcgaaagggactaagga

SEQ ID NO: 9907 - DNA, 59 bp, Homo sapiens
  chr14:90849380-90849439
  hyper
taggacctgggaaaaacaaaacgacccgccgtagaggaaaaggaaaccccaaacaaaac

SEQ ID NO: 9908 - DNA, 381 bp, Homo sapiens
  chr14:90849476-90849857
  hyper
cgccaagaccccttccgtccggggctgtccgcgctgccactagtaaagatggcggccataggcggagccgctcactccgaaggccgcaggctaccctgccggccacgaccattcacgcggagccctccacgcccttcgcggcttgacgcattgcaggtgcagcgcgaccaatcagacggcgcggctcttttcggccaaccactgcagggtcgcgccggcctatcagagcgtccttgtcaaactgaacgaggaaagaagcctcagcagcgccaactaagcaaccggctacagaccgcgttccggtgcgtgtgtgacgacaccgccgtgtgctcctccgctgggagatatagtgccctcgcccttgcctcgccccgcccgcga

SEQ ID NO: 9909 - DNA, 504 bp, Homo sapiens
  chr14:90849897-90850401
  hyper
cgcttgacgggcggtggttcccccgagacagaaacttgactgaaaaataataccaaatacccgtgctgcggcccgtggccctccatagggccacctgaactagcctcgcctgtccccttgctctttgccgttcgtccttcgcgttttgtgaaaacagttggcgccgcagaaatgagataaacgcccctgagctcgaaacccgcactcgaactgccaccgagccgacccttcctgttttggaactcagggcccggccacccgagaagcaccctcatgggcactttgtttctacaagggcccgtttccatttccttcctaaggtttccttatcccctgcggcaggaggggcccgctgggctcgggttttcagctgcgttggagctgcagaggctgcggagtgaacgcggccaggagcccgcctgggagcgcgcagcgctctaggagccgagagccgctgcttggccctcgctggccgggtaaaccgaggggaagctcctggcctcc

SEQ ID NO: 9910 - DNA, 363 bp, Homo sapiens
  chr14:91580265-91580628
  hyper
cccctctgttgagccggggagagcaggttaactcttgcagggagaactgggcttgcagggtccagccagctgccagcagctctgcagctttaagaactggggcgggctagctgccgaggagaccacgctgctgcatgggccacgtgagctcaggctgtgggagcggatggagctgctacagtcagcgcttggggctggcctcagcttgtagacccgagccctgcagaacaaccccccgtggcgcaggagagcagaagaaagggggcctttatgcccttttgagggaagcacacattctgcaaggccgtggaaacaaagggaggaactgtttgtagccctcgtccagacgccccaaacaaacag

SEQ ID NO: 9911 - DNA, 30 bp, Homo sapiens
  chr14:91755601-91755631
  hyper
cggtggattttaagcgttccctcgaaccct

SEQ ID NO: 9912 - DNA, 49 bp, Homo sapiens
  chr14:91976435-91976484
  hyper
gccagtggctcccttccgctccccctgttttaaacgtcagaagccgaca

SEQ ID NO: 9913 - DNA, 537 bp, Homo sapiens
  chr14:92040359-92040896
  hyper
aggaggttggcagggaggaggcggcttgcagatgagaaggctggcaggcaagcgctgcgggcgaccgtgggtggtgggcgggttttcccctcaggcaggtgcaggtcctaagggggcgggccccgttgggtgctcatgacgcaaaggtccctaggatttgctcctcacagcgggagcgccctcgagaggaaccgcgtctgcgcctcccgagacggaccactcgggcgcctccgccccgcgccctgcctcgggggccgccccgcgcagtgagctcagcgtggaggcggcagcgccctcgcccttccgcgccctcccagcgcggtctctcctcgtccgcgcgccccgctccccaggcgtttctgggatgctggttggccgggcacttacgtgtttcaaagcgggtgacagccgccgctcgggtgtactgttcgctctctcccgccaggatccgagttcttgttccccgacaactcgtgggagtgcccgctccagcgtggtttctccttctccgggaacggccccagtgagcagaagagc

SEQ ID NO: 9914 - DNA, 30 bp, Homo sapiens
  chr14:92302433-92302463
  hyper
cgtcgctgaggagacgtgggaacagcccct

SEQ ID NO: 9915 - DNA, 30 bp, Homo sapiens
  chr14:92413691-92413721
  hyper
ccagaggggccgagcgagtcgtggagagga

SEQ ID NO: 9916 - DNA, 30 bp, Homo sapiens
  chr14:92789077-92789107
  hyper
ttgttagctctgcacgaccaattaattttc

SEQ ID NO: 9917 - DNA, 30 bp, Homo sapiens
  chr14:92789485-92789515
  hyper
ggcgggaggcgccacggcctctcagacgct

SEQ ID NO: 9918 - DNA, 16 bp, Homo sapiens
  chr14:92790082-92790098
  hyper
tgctccagccccagcg

SEQ ID NO: 9919 - DNA, 827 bp, Homo sapiens
  chr14:92980081-92980908
  hyper
ccagcctcttcctgaaagccccgctcgctccgatacaggaagtagaagggagcgagagccccagagcgcggcggcagcggcggcctggcccttccagagggccagagccagggacatgcgggcgcccgggactccgcgttccgcgcggcccggcgcctgagcgcctccgttccccgtcccggagctgccggcggcatgatccgacacgccggggcgcccgcgcgcggggaccccacggggtaagtccgggcggccgccccctcctccctcgcgatccccacggcccgcgtcctggccgccccactccacttcttgtcccagagagtccttcgggcgcgtgacctcggggttgtcgggctgatacgggacccccaccgtggccgaggccagaacctggttctgcggggcagggggcggccctggtgactccgctggacccgatgttggctaaactttcaaggccaggcatttcactgggaacccagtgcacactttaggctgctggtggacggattacgagggagtgcgtcgctacctgtcagcgccggggctgcccgcgtggacgcggccccctccctggcgtctgccccgcctgaactttgcaaacaaaactcgcggtcccagccccgccagcctgctgcacccgctgctctgcgagtcgcagcgcgcgccctcgggtactagagccccgctgggcgtggggtcggagacccggacccccgcaactttgggtgcccgcggcccaacagctgaccggccctcctggaccgagggtccactgggcccttttcccgccgcccctctgccctggccgtagacggtgacct

SEQ ID NO: 9920 - DNA, 171 bp, Homo sapiens
  chr14:93214771-93214942
  hyper
cgggaggccctggcctcgggcgtggggactgaacccggttctgtgctggggctcgcggttacctgtggcaggcgaccgtggtggcagtggtggcggcggcggcggtgagtgaccgcggtggtggcgccggcgggaccgtgagaactcgcggcggctcgcagcctcacacca

SEQ ID NO: 9921 - DNA, 16 bp, Homo sapiens
  chr14:93389556-93389572
  hyper
cgacagacggacgcac

SEQ ID NO: 9922 - DNA, 30 bp, Homo sapiens
  chr14:93582653-93582683
  hyper
tcctaggcgtaggacgtgaccaccagttct

SEQ ID NO: 9923 - DNA, 30 bp, Homo sapiens
  chr14:93897180-93897210
  hyper
taaccttccgggaccgaattctgcaatttg

SEQ ID NO: 9924 - DNA, 712 bp, Homo sapiens
  chr14:94254571-94255283
  hyper
cccaagaaatctcacgctgcctgcacccacactgcccagccggcctcattgcgcacactgcaacataggcacctccgtgcgctgcccctttgcacgcctccgcccagccccgatctcccgctcccgggcgtgggttcccccacgcctccatctccgcccgcacccttccaacgcctcacgctaccttgcctggcggcggccccagccgaccctgggctcggggaaaagaggtccgcgttccccccgcggcagctctgtttcccagcagccggacagcccccatttaaagccagccgcctccccagtcccccgccctctaggcggggcctccgtcctcaccttggcggctgcgcgggcgcccgggggcttcacatgccggggaggagcgcccggcgctggagcaaaagtttgcgcgccggttgggcctcccgggccgctgagcagaggaccaggagcggcgtcctcgcacggggcgcagggcgcggtggctccggactgcgcctagccgcgcgcggggcgggaggggcggcaccccgctcccagggccagggctggccgccgaggcggaggcagagggcggggaaagtctcctccacgccgcctggagccggccgcgcgagccctccccgggcccgcgttggctccccgcctttcctggtggcgccgcgcggctgcccggggcactggggtgcccgagctctctactaccctc

SEQ ID NO: 9925 - DNA, 302 bp, Homo sapiens
  chr14:94255304-94255606
  hyper
cggcgggaggcgccggcagggagctcccgctggggcagcaaagccgtgggtggaggcgaaataaataatccacgaaaaaggaaaacagacgtgagccgagccagagcctctcccgcctcccgcccggggttgcgctccccccgccgccgccgccagcgccgctgcagtgattcctcgtctccatctagcgaggctattgtgtattgggcgcttaattatttattcaccctggaggccgaggattcccacttccatggggttttggcccttgcctgcgcttcccccaagcctctcccgaggct

SEQ ID NO: 9926 - DNA, 31 bp, Homo sapiens
  chr14:94493109-94493140
  hyper
ctcggccccgagcccccgcccccagcgtgtc

SEQ ID NO: 9927 - DNA, 30 bp, Homo sapiens
  chr14:94547573-94547603
  hyper
cacgtactcgtgcgcgctggggaggaagtc

SEQ ID NO: 9928 - DNA, 11 bp, Homo sapiens
  chr14:94547817-94547828
  hyper
tgtagtttcgt

SEQ ID NO: 9929 - DNA, 72 bp, Homo sapiens
  chr14:94640375-94640447
  hyper
gaggcaaaaggctctgcgcacgcgctgtggggtggggcacacttggttgggggcggacgggggtttaggaga

SEQ ID NO: 9930 - DNA, 81 bp, Homo sapiens
  chr14:94889957-94890038
  hyper
cttgaaagacctgaaatgacacggcagtgtctgaacacacgggggcgcgctaatcacctcgttttagaagaagtcccaaag

SEQ ID NO: 9931 - DNA, 30 bp, Homo sapiens
  chr14:95235854-95235884
  hyper
tttgcaaactcctgcgcccgatcggcaaaa

SEQ ID NO: 9932 - DNA, 30 bp, Homo sapiens
  chr14:95236108-95236138
  hyper
tgttgtagccgaggcgggagccgctgaccg

SEQ ID NO: 9933 - DNA, 33 bp, Homo sapiens
  chr14:95236597-95236630
  hyper
gttttatactgagtcgacgtcatcctggattta

SEQ ID NO: 9934 - DNA, 180 bp, Homo sapiens
  chr14:95239421-95239601
  hyper
cgcggaggcaggccccgggaaaggcagtcggcgctcggtgctcgcactgcgcctcggcgggcggaaactcacaagtgtcctcaacgtgctaaacaaaccatcagggccccgcatcgcctggcgcaattggaataacaaatgcgacgcacgcaaattgtccacctcgtgttgctaagcgat

SEQ ID NO: 9935 - DNA, 37 bp, Homo sapiens
  chr14:95864477-95864514
  hyper
gtgtatggagtgtgtccgtgtccgtgtgtgcctctgt

SEQ ID NO: 9936 - DNA, 31 bp, Homo sapiens
  chr14:95932616-95932647
  hyper
cacctgcctcctgggtcgggggtctgtgctg

SEQ ID NO: 9937 - DNA, 249 bp, Homo sapiens
  chr14:96152797-96153046
  hyper
acttgccatggcctccgaagcttctgtgcgtctaggggtgccccctggccgtctgtggatccagaggcctggcatctacgaagatgaggaggggagaacctgggtgactgtggtcgtgcggttcaatccctcgcgtagggaatgggccagggcctcccagggcagcagagtgagtcctgggcacgaggggaggctgtggggagggctgcgcactgacccctgcccgtgtgggaccgcggtgggggtcag

SEQ ID NO: 9938 - DNA, 23 bp, Homo sapiens
  chr14:96342286-96342309
  hyper
aagccacattcgccacgctcccg

SEQ ID NO: 9939 - DNA, 363 bp, Homo sapiens
  chr14:96342879-96343242
  hyper
cgcactgctgtgcttgcggccgggtgggcgccccgccgctgcggtcgcggtcgccgctggtaagctgcgctctggggcttggggcaggaagcagtggggggcgctcgaagagcagggcagctacggccaccgtggccgccggaccggccatgtgctaaagtttctggggctcggcgccccgctgggcgcgcagcgcggggagcagacgcgccgtgggtggggcagcgcggtgctgctggcgcccggcccccgcggggtgcagctctgcgcgttctcatgctgtctctctctctttccctccgcgctgcctctccgaggtcctcccgccgagccccggcgcggggcatgaggagcccccgggtg

SEQ ID NO: 9940 - DNA, 115 bp, Homo sapiens
  chr14:96343319-96343434
  hyper
cgcccggcggccagccctatccggcggcggccagcgggtcaacgctgcccgggagaatgaggcaggagccggcggcagcctcctttttttccttctcctcgccttcctgcggctc

SEQ ID NO: 9941 - DNA, 145 bp, Homo sapiens
  chr14:96505487-96505632
  hyper
accaaccagcggggcggcctcgggcctcagtttccccatcccgcccacgaagggaggcgattgcgagcgcttggggtttctgacggaccccgccccgggggtggggcggggagtggtcacgtggaggggcgccccgtccgccgag

SEQ ID NO: 9942 - DNA, 117 bp, Homo sapiens
  chr14:96678012-96678129
  hyper
cccgctcctcctttttcggaagccaggcacagggattgaatcccaccccattcctcccctgctgtgtgacctagggcaagagatgtggtctctgggatccttcggttccttcagcta

SEQ ID NO: 9943 - DNA, 223 bp, Homo sapiens
  chr14:97685073-97685296
  hyper
gcgggcgctgcccggcgtcacccctgcagcgtccggatcgctccgcataggcaggggtggtgccccctccccggggcacagaaacgccacatcccgggggcgccgcccagaggctgtctctgtttctgtgtcccttcatgaggctctgtcccacaaaggcagcctgagccaggaccctaaagaggcctggtcatcgggaccggagggagttccgcttcccagg

SEQ ID NO: 9944 - DNA, 571 bp, Homo sapiens
  chr14:97685395-97685966
  hyper
cgctccggccagctgcccgggaagcgcccaagcacacgtcccgagtcccagattggattaagttgcccaactacctactttttctctctttaaggagaagcctaattggagaagattcggttttcttcgccatggcaggtccctttctcctgacccgcagttgcaggggctgagggtaggcgcaggtccgccctggggtcgaagccaccatcgggcctcgaggttgcccccctaacatccggcctgcacgcctggcgggggcgcaacagtgtctcacggctcgggagctcgtttttggcttctgagcaaggtatttttttcatctgccgtgtgtttagctgaattcagtatatttttctcgcacttctcgcttttttttttttctttctgaatctgctcttctgctttgcgggcccctaatctctcccgaatctcgggcgcccggcccggcccaggcgagcgctcgcggttggggacgcgggtggggacgcggcggtctgggcgctgcaggatgcgcctggccgcggaggagacgaccagggagcgggtcgccagatcaagatctgccagt

SEQ ID NO: 9945 - DNA, 30 bp, Homo sapiens
  chr14:99736128-99736158
  hyper
ggcgaggtgcgcggcggattgcaagcatat

SEQ ID NO: 9946 - DNA, 132 bp, Homo sapiens
  chr14:99736372-99736504
  hyper
gcggggactcggggcgggttcccctgcaaacaccgtacctggcccgctcgcgctcgcttttcccctctgctaaataaacccaacagggacggtggaagctgctgcttgtcttgccccgctgcctgactttgc

SEQ ID NO: 9947 - DNA, 393 bp, Homo sapiens
  chr14:99737318-99737711
  hyper
aagaaactttcctatggcccccgccccccgccatgctccaggccgacgccgtagactctgccagccagcgggcggccccggcgcctggccaggctcggctgttccgggctcggtgtccccagccccagacgcccggagccccatctccggcccctcgcgcgcactccgcagacacttacgggtgatgagctccctctgggacaagtgctgcgggttgccctgtttgcggcgggacattgccccggcatctattctggcatcgcccggagagctgcactgatggggggagccgggggagggggtccgagccgccgccgcgccgctgccgccgctgccgccgccgccgccgccgccgcacctcctcctctgcccgggttggtgttttttttccct

SEQ ID NO: 9948 - DNA, 1303 bp, Homo sapiens
  chr14:99739874-99741177
  hyper
tccggctaggcttcgcgggcgagtccagctgcacccaccccactccgcccccaggcctggctccggcggcttcacccgggcgcatggcgaggccgtgacgcctcagcgccgcctccctcggggccttttcctcggggggcacacgggggtttttgttttcgtcccgaaggtcttgggtggggcgatggcaccaacaatttaacagcgcccagagtccgtgagcgagaacagaaagagatcccttccagtcccataccctaaaaaataataacaataaaatgtgccctggcttgcagttctgtaaactgtgggctccacggtgggcggacgcgaggccgagcggatggagaccgggggcggggcgcggacttgcacctcctcgccctggccgggcaggctgcacccggctgcccacccccaacaccccacctccacgtggtccaaagtctagtagggcctccctcttctgccatccctctcaccgggaaaatctttccaggaaagtggcttaaaaaaaatatgcccacacgcacctttaataaacttctttaagacattcataaactggccatccctactcgcccggactctaaatttgaaagatcaactcgcgctctctttctgagaactagcgatgtgaagcccagagagggtgagcactttgccctaggacacacagcgcgtcagggacaggtctggacccaaaacaccgcggcgtgcctgcagcccagcgccgccggcggtccgggactcgaaatcccgacccacgaccctcaccttcctggggttgattacaaggaaggcagaccccgccagtggcaaggcgggacggggaggacccctcaggaaaagggagcccctccgcgagcggcgcaagggctctcggagtcccagctgcagccgccaccccgcgtgcggtaaggggccgtgcctggggagggggcaccccctccccactcccagcaggaagtagctggcgtgggccggcgcgtgccccacggacccgaggagcacttcctcattggccccgcgctgccccgacggcgggaagagggacgcgcgggcgggcggacgcagggccggacacgccgccgcccgccggcgcgctccacctcgcggcagccggggagaggctgctctgcccctgcccagccttgagccggccccttcgccctcctcctcccccttttcctccgcatcttcctccccctcctcctccttctccccctccttcccctcctcctcctcctcctcttctcccgagaggcggccgggcgcaggcagggagcgatcccagctgcca

SEQ ID NO: 9949 - DNA, 31 bp, Homo sapiens
  chr14:100069925-100069956
  hyper
tgcgagcgggccacctcgtgccacacggcgc

SEQ ID NO: 9950 - DNA, 305 bp, Homo sapiens
  chr14:100070159-100070464
  hyper
atgaggcccaccttctcgccctcggcgcgccgcagccgccgcgccagctcctccttgctccagcgcagcagctcctcgtccggcacctggctcagctcctccgacgccgccgccgccgtcgccgcgggcttagccatggcggggccgtcaccgcggcatcgccctcgccctcgcccggccggcgcttccccgcgccggggctccgctgggccggtccgcgcgcgggcggggggcggccgggggcgcgtgcggcccgccccgcgccgcctggcgcgtcctctcgccgcgcccgccggggccgcccg

SEQ ID NO: 9951 - DNA, 240 bp, Homo sapiens
  chr14:100070680-100070920
  hyper
ccgccgtccccctgcgcggtgcgcccgcccgtccagtgccctctcagaggcgcgttccggccgcggtcccgccctcccggccgggcgattgggccgctccgggggtgtgcgggaggggcggggcgcgcgcgggggaagctgcggcggtggtacggtccatccgcggggtttccgacccccgcccgcggccggctcccggcggttcaagtttctgcgcccggaggacgcggccttagccaa

SEQ ID NO: 9952 - DNA, 42 bp, Homo sapiens
  chr14:100071435-100071477
  hyper
gcggcgctcggagccccgctccacctccgctcactcgaccgc

SEQ ID NO: 9953 - DNA, 929 bp, Homo sapiens
  chr14:100149918-100150847
  hyper
tggtctaggagggtccgcaggcccccgagtctctgggagaacagcctccggccacgccgtgcgctctcggtcgcagacacaggcgtccctgggtcccgcaggatcctgccaccagcccgcgggccccgctggcggaccacgggcgctaggcgtggactgtccgggcggaggaggcgccccggggcaactggagaacaactttgggggtctggggttccaaggagaagtttgggaacagtcggcgttatgcggacttttgcaggctgggatggggtttccgggcaggtttgggggaaaaaggaaggggcctaagaccgcgcgcggaaagatgccgttatttggaggcgccgaagcgggcggagccagccagcaggacttcgcgccgccgccgggccagagcgctgaggatcggcgttgccagggacaacgcgttctgggcggagctgctgctggggcggacctgagtctgaagaggtgggggcggagcctggggggctgagccagaagcggagttgtgattggtgaagaccacatgctcggggtggggcctgggctggggcggtgtggaggttggggcggagctctggggggcggggcggggcgggggagggcccggagcgccggagccggaggcggagacgtggttggcggggactgtgcgccctgggaggggtcggagtcggcgggggcggagccgagcgggcggggagggtgctgggtcgcgcctggcctggggccgaggcggcgcgcggcgctgacagctgagtcggctcgcggcctcccggccccctcggcgcccggcccgaccctggcctggcctgccctgccccggagccatgagccccgggctgctgctgctcggcagcgccgtcctgctcgccttcggcctctgctgcaccttcgtgcaccgcgctcgcagccgctacgag

SEQ ID NO: 9954 - DNA, 914 bp, Homo sapiens
  chr14:100259386-100260300
  hyper
cgcccccgcaagggccgcccgccgcgccccgcagcccctgagcccccgtgcgcggaggcggggcctggccaaggggacagcgggcggcagacgcgcccctgcggctcccaggccgcccgggccgcgctccccgcggggaaagaggccgcaggcgcggggaggctcggccccgccccgccacgtccccctcccggcccgggccccgcggccgccgaggccgccccctcgcgggcggagcgggcgctgggctcgcgcggctgcggcggcggcggcgggcccggggttgccatggtaaccggcagcagcagccgccacagcagggccggccccagcgccagcgccggtcgcggtcgggctcagctcagtgtgtggtgagcggcggcggcgcggccgggccggggagcgggcgcggcccggcggcctcagcatggaggacggcttctccagctacagcagcctgtacgacacgtcctcgctgctccagttctgcaacggtgaggggcggccgcgcggggccggggcggcgagcggctggtggcgggcggcggcgacggcgacggcggggaccaagccgaggggccgaggcccggcggccgcgggcgaggccgcgcaaagttgttgcggaggggcgcgcggtccccgttcccgccgccggcgcattgtgttggagccgcggggccgcgcctcgctccgggccgccccgggctccccgccgccaccccggctcccggcactggcgcgcggaccccgccggctccagcacccgcggagcgcgcccgggcggaggcgcgtggggcacagggcggcggggaggcccgggcagcctccgcgttccggggaacgtgttgcttttttgcttcccgacccacatctgtttggaaatgactggatgaagaactcgggaaacaaatcct

SEQ ID NO: 9955 - DNA, 30 bp, Homo sapiens
  chr14:100371996-100372026
  hyper
gagtgcaaggcagataaacccaaagatgat

SEQ ID NO: 9956 - DNA, 544 bp, Homo sapiens
  chr14:100437405-100437949
  hyper
tgcaactctccggccccgccacggctccttatgtacaaagagagggaatcagtcgccggtgacctcgacggccctcggatcagggatgccccgagtccgagcgggcagggtgctcagcagggccaggtgatgggaatcatggggccatcgagcacggaccctggctcccccggtggcctctgtgagctctggggtcaggcggggactggaggagcgtccgcgccgggagggagcgcaccgcgccacgtgcccgcccggcgccccgcccccaccccggccacgcccctcgcgcttccctcaaagccccgcccctcagccccgccactctcgtccgccccgcccctcgcagcctcaagctcagcgctcccggaggcgcggacggtggggccccgcgccttttgtgtcgggctttgaccgccgcgcgcgctcattcacctcagcggccgcgggcggaggggcgcacgcgcgcgcagtcccctcggagggcggtggggcgaacagcaacgcgcgtaccctagctcttggctgctgtgctgagactagc

SEQ ID NO: 9957 - DNA, 985 bp, Homo sapiens
  chr14:100438017-100439002
  hyper
cgagtctcaggcggacgcgcacgcgttcccgccgcccggaccccagccggctcgccccccgcccccccatcccccggcggcggcccccaggcacgcgcccgcgcacacgccggcccgggcacgcgcccgccaagatggcaggggccggggcccagctgtcagtcgccgccgccgcggcccttccccgcagctagcggccccgacgcccacccggagaagatgagcccccgctgccccccgcagcccagtcagacgcggagccgccgcgcccggggccggctcccccgctagcgcccgcgtcccgcgccccgccgccgccgccgccgccgccgggtcgcccctggcccggcgcgcccgtccccggcagcgacaatgaggtgagtcggggccggcgcctcgtgggaggtggcagcggccagcgtcggaggggctgggctgggggcccgcggtgcccccgagggcgggaggggggctccacgggcgcgggggcttccagagaaccgcgggggctctgcagagattcgggggcattcagagcgcgggaatggcttcgcgagagccgtgggggcgtctggagagccgggagggtctgcagggcttgtggggggcagtgttctgcaaggggcaggcggcgctggctttggctgcttgtggggtcctcttaggctccggggggcctgcggcggcctgggaggcagacccccgcgggcaggtgtggccgtgtcccgaccgcgcgaggaccgaagttggcggaagcccctgtgcggtgccttccagcccggaggaggctggcctgaagcccccaggcgttgccgaagcctccccctgccagcgcccagagccgcgtttgggcttttacaggtgtagtttcccctcgacttggagcccgtcaaccccttcgtctcctaattctcaaccccccttttttttcttcttgcacgccagtaaagtgcaaggcccccaaatgtaccgctcgttgatgtat

SEQ ID NO: 9958 - DNA, 30 bp, Homo sapiens
  chr14:100613211-100613241
  hyper
gtggtcgtagtactcgggcgcgatcttccg

SEQ ID NO: 9959 - DNA, 90 bp, Homo sapiens
  chr14:100773414-100773504
  hyper
gaggctgggatttgggcggagagcagggaaccttaaaagggaaaggggccatgggcaaagggcgcagcaggccttcgggccacagctcct

SEQ ID NO: 9960 - DNA, 30 bp, Homo sapiens
  chr14:101033674-101033704
  hyper
tccccagaagctgtcgcgggattcccccaa

SEQ ID NO: 9961 - DNA, 30 bp, Homo sapiens
  chr14:101192401-101192431
  hyper
tttgtgtttcagcgcggctaaggccctgac

SEQ ID NO: 9962 - DNA, 30 bp, Homo sapiens
  chr14:101544102-101544132
  hyper
acttgaccttgcttcgctcccctcaagggg

SEQ ID NO: 9963 - DNA, 30 bp, Homo sapiens
  chr14:101656894-101656924
  hyper
cagagcagcaatgtgatgcaagcagcatga

SEQ ID NO: 9964 - DNA, 30 bp, Homo sapiens
  chr14:101923606-101923636
  hyper
gaggggagacggggcgggtgtgaagtctgt

SEQ ID NO: 9965 - DNA, 178 bp, Homo sapiens
  chr14:101924065-101924243
  hyper
cccgggagggaggcgcgggcctggcctgggcccaggaggatggagcccgactcagggccgtctctccccgcttgggggtgctcaggagggcccagggtacctgcgcgggcaccttggcggcgggtcaccctccctccgagccactccgtccgtgggcagcggccttaccaggtccgag

SEQ ID NO: 9966 - DNA, 142 bp, Homo sapiens
  chr14:101924295-101924437
  hyper
cgggagccccaggtgcacacacgcaggcctgggccgggcctccaggcctctgtccttcgggcgggctgggaggtggcctggcgatgcccgccgaggggtggagagggcgaagccagggcggcgtcggcgaggccatcaaagg

SEQ ID NO: 9967 - DNA, 334 bp, Homo sapiens
  chr14:101924457-101924791
  hyper
cgttgcccatgaccaggccgagggcatgaaaggatctttatcctccagtgacattgccaggccggcgcttttctgcggcctccccctcccgcggccctaattggggccggctgctaatgtgattaaaggccagttaaacgtttctccgagcagggggtgggaagaggccgagacccctgccccctccccagggtcacgccaggcccgtggtcgggggtcggcgacggtgccagcctgggacggcctggccaggtgcctgccgattgttcacccccaggcgggcgggccggcgggctcccggggctttatgtaagccggtgggctttgggcccga

SEQ ID NO: 9968 - DNA, 214 bp, Homo sapiens
  chr14:101924857-101925071
  hyper
cggggccctccccctccggtgcccggcgctggcggggcccagccacgggggcgggctgggggtgccaggctttgggggtctggagggcctgaagcaggtcgcgttgggggtctcactacctaagacagtgactcaggacagtgggacctgggtgctgtgctgcggccaggcagagcctgcgacccgcggcgccccccgcggcctcggcgacagc

SEQ ID NO: 9969 - DNA, 817 bp, Homo sapiens
  chr14:102026354-102027171
  hyper
gggggacactgcagtccaaggcgaaaggagacttgctcccggcctctgggtccctaggtcaaggcacctccccgccccgccgcccctgagcccaagtcgccaaccccgcgccgcgcgcagcgagggatcagaaggtctcggacgccgcggcagggccggccagggccccacgagttagggagttgccccgcacccctaaacgctcagcacccatttacggttgaaagtacgcacttgacgcgtccgggcgcctccgcggtgagtcgcgccgccgctctcggggtccgcgaaggtggctcagttcgggcgctccagtctcgacgttcccggggtagagagcaacgtccggggacgaacgggacgggtgcgcccagcggccggggctgcgctgggcgaggcaagcggcgagaggggagcgctccggcgttcaggcaacagctacccctagtgggagagccgcccggggccggcgccgccccgcgcccgctgccccgcgccccacgcccgtggcgccccgcgcccgggtcggctgggggcgcagggccggcgccgctttccccagctctccggtctccggcgcccggcggtaacccgcccgcgggctctgccctccgcacctctcagcccggccccggcggccgctgacccaggaaccgcggcgccccgctggaacgagatgggacggggcgggcgcggccagggcggcgcgggctggggcggcgcgcggcagcctcgggcagcggcggggggcgcggagcgcggtgtgcgtggcggggcggtgcggggggcggccgtgtgcgaggcgcgagtgtgagcg

SEQ ID NO: 9970 - DNA, 30 bp, Homo sapiens
  chr14:102030712-102030742
  hyper
agcccctgtgccagcgaaaccttgaacatt

SEQ ID NO: 9971 - DNA, 30 bp, Homo sapiens
  chr14:102030984-102031014
  hyper
ccccgttcagccaacggcgtccctaattct

SEQ ID NO: 9972 - DNA, 30 bp, Homo sapiens
  chr14:102606250-102606280
  hyper
gctttccaagatggcgacggagggaggagg

SEQ ID NO: 9973 - DNA, 236 bp, Homo sapiens
  chr14:102975690-102975926
  hyper
cctacccgtcccctcccggcctgcacggccagacgtcgggcggcggagggtcgcggggccgagcggggcgtccgcgcgcaggtggccggcgcagcgagggctgcacctgcgtgcgcgtgtgccggaggaggagggggcggcggccgcgggcgcggcgcgggggacggggactcaccatggggggcgcgggggccacaggccgggcgtccccgcccctgccgcggaccggagcgcgc

SEQ ID NO: 9974 - DNA, 249 bp, Homo sapiens
  chr14:103021761-103022010
  hyper
gcgggaggcctaggccggtcccgccctacgggtcccgggggcgaccctcgcgctgacattggcgtccaggccgcggcccctgcctccgcgcccacccacgccgggcctggccctcgctcccccgggaaaagccccgccggcggccgcgagagcgcggaagcgcagccgtagtgaccgcgagacaaagacccggcggcgggggaggcggcggagagaccccgccagcgcggagaccccagggaagcttct

SEQ ID NO: 9975 - DNA, 30 bp, Homo sapiens
  chr14:103057880-103057910
  hyper
cctctccaaggcagcggctctcaggctagc

SEQ ID NO: 9976 - DNA, 31 bp, Homo sapiens
  chr14:103242510-103242541
  hyper
cttccagcagccaggtcggactatctggggt

SEQ ID NO: 9977 - DNA, 31 bp, Homo sapiens
  chr14:103263057-103263088
  hyper
gtgcctctgcttctaccgtgattcctgaggc

SEQ ID NO: 9978 - DNA, 793 bp, Homo sapiens
  chr14:103394664-103395457
  hyper
agggtctcggcttctcgtcccaggggactgggggcggggtgggcgcggagcaggcccggacccccgcgtggcgccgcctcagcccgtgtctcttgcagctcctgccgctggatggggaactcgtcctggcttcaggagccggattcggcgtctcagacgtgggctcgcacctggactgtggcgcgggtgaggcggtcgggcaggggcggggctctggaaaggcatgttcaggggcggggactggagggaaggcgcgtcgaggggggcgaggaccggagggagggcgcctccgggggcgtggtttagggagtggcggaagtgtcccgaagcggggcttgggaggtcgtgctcagacgcgtggcgtggcgtggcgtggcgtggtgtggcgcggcgcttgttccgtggagctcagggatgtgctccggctcaggcgaacctgccgtcttccgcgactctgaccgcttctcctggcatgacccgcacctgtggcgctctggggacgaggcacctggcctcttcttcgtggacgccgagcgcgtgccctgccgccacgacgacgtcttctttccgcctagtgcctccttccgcgtggggctcggccctggcgctagccccgtgcgtgtccgcagcatctcggctctgggccgggtgagcactgaggggagggaggctcgggtcccctctccccacctcggcccgaccccgcccctcctggtctgcacacgttgggtctgagcactcaggtgaagtctcttcctcgggctggctccggtggggacccggctgcccgcag

SEQ ID NO: 9979 - DNA, 80 bp, Homo sapiens
  chr14:103430221-103430301
  hyper
gtcccttccaggtcctcgcctgcctcatggcacagcagagctggcctggtttttatgaaactgacgttcattatcgtatc

SEQ ID NO: 9980 - DNA, 890 bp, Homo sapiens
  chr14:103523110-103524000
  hyper
agggatgaaaagctagcggagggacgagggtgcaaggagcggctggagagagatgggctgcgggcctgggggcgctgccagagcgagaggaggcgaagcccacgagctgggtgggcaggagggcggcagggtctgtccgggcggggatgggcgggcgtggggatgcgcgggctggggcgcgggggtcgcagagccgcaggtccggccctgccggcgcgcacttaccccactcgaggaactcggccacgtacttgtcgcggcgcagggccgagtggctgcactcggtgtacaggcagacgagcacgtcgagcagcgtttccacgctcagggcgctctcgttgcgccagggcccgtccaggagcagctgctccagcttcttgagccgcaccttggccgacatggtgccgcgcggcccgctcccgacgcgccggcctctcaccgccggctcggccagtccgtcagggcgcgccctcgggggctcggcggctgcgagccccggcagcagcggcgcctcctcgccgccccgtccgcgtcgtcgcgccccggcctaggccgacatcttgggctccgtcccgacggcgcagagtctggggcgccgggccccgcgggtccatgggccgctctcctcccctcggcgccgccgccctcccagctcgggcggcccgcccccgccgccctcagccccgcccgcggccgcgccctccccgccgccgccgccgcagactaggagcggcgaggagcctagcgctgcgcaagcccggccggcgcccgagcccgaccccagccccgacccggcggcccagccccgcggcccgcagccaaccagggcgcggccagcaccagcgcagccaaccactacggggccggccgccgccgcgctgacctcagcg

SEQ ID NO: 9981 - DNA, 199 bp, Homo sapiens
  chr14:103524323-103524522
  hyper
ccccgtcccgcagtccgcgggcccatgttgcctgcggggcctcggacctgcccggccgaggtgggggtcgagggcggcccggcaggcgcagctctgatggcctcggcgggttgtgggctatttaaaacggcttgtcccagctcgaagcggtcctggaagactcgggccctacccctgactttaccgatgagagactgag

SEQ ID NO: 9982 - DNA, 78 bp, Homo sapiens
  chr14:103541956-103542034
  hyper
cgggggaggctggaggcggcggcgagggggacaggagtgtcgcccggctcctccgcccgcggccgccgagggacgtgg

SEQ ID NO: 9983 - DNA, 36 bp, Homo sapiens
  chr14:103593973-103594009
  hyper
gaccaggggctgggcccgggccggcagggagggtgt

SEQ ID NO: 9984 - DNA, 552 bp, Homo sapiens
  chr14:103739884-103740436
  hyper
gggctgcagagactgggccgggcggaggagacccccagcctgggttgagcggggcggatctgggactccgaggcttcctacgtggggcgggttcccagcggacgcctctgccgcacccctggcggggacccagctgcgccccttcccgcggccctcctagggcctgggtgcttggaggctcgaggccccaagatccatgtcgcccggaatcccggtgcctaggccttgtcgcgggccctgggaccaactcgcgggggtcaggagctgggggttgagagaaagatgatcaggtgggttggagaaaggagacgcttcccgctgggcgagtgagcccaggacgcggcagaagagggcagaccctaggggaccgccgcgtccccaggcgcgcacgcgacccctccccgcgccgaaaatcctctccccgcctcagtctccccgcctccgcctccccacccatagtgtcactccgaccctagccctgggtccaaacgggcaggagaggtcgctggtgcctccgcggtccccgccgcgcgcagaactcggccgagtgca

SEQ ID NO: 9985 - DNA, 30 bp, Homo sapiens
  chr14:103745316-103745346
  hyper
ggggtcgccgcggcgcgaccgcctcctccg

SEQ ID NO: 9986 - DNA, 215 bp, Homo sapiens
  chr14:103745688-103745903
  hyper
cgcgttgctggaggtcgtggacgcggcgggcgccgagcacctggtcacgctccaggacctggacatccgccacggcgacggctccgcggtgctcccgggcgtgtgcagcgaggcctcgttccgggccgtgaggccgccgagcaagcgcctgcgccggccgtgggaacccggggccgtcccgcgggtgctggtgggcacccaggccgacccggacg

SEQ ID NO: 9987 - DNA, 342 bp, Homo sapiens
  chr14:103989186-103989528
  hyper
cgcggctcttaaggggcacaacgcgggccgcccattggcggctatttatagcccattcattccattggcccgcgccgcggggtggtgccgccgctttgtccgccgcccgcagcccccaacaccctggccgcccacccgagctgtcccctcgctgggaccccgcgcagcctgcccagtcccccgcccaagacctcgaggccgaaacctcaggtccttggatatctggatcccctcgcacgcccttgcctctgggcgggaaactgaggcggagagcctccgggcactcgaggacgcttgggttcatccgcatcctcgagcctgcccgcctagtccagccagccc

SEQ ID NO: 9988 - DNA, 182 bp, Homo sapiens
  chr14:103989537-103989719
  hyper
cggcgaggggccgggcgaaagctttcggggcttccgcagcaggtacggcccccgccccacccccggccagtgcgagctggcccggagccgccgaccttcctcaaggtgcccgcaggcgtttcctgggcgatcctggtgcaaagcgaaggcgcgcgggaagcgcagtctggctgcggcccagc

SEQ ID NO: 9989 - DNA, 2 bp, Homo sapiens
  chr14:104583033-104583035
  hyper
ca

SEQ ID NO: 9990 - DNA, 312 bp, Homo sapiens
  chr14:104583110-104583422
  hyper
cggccaaggtggagccccgggccctccgtgcgcccgagcacccccggcccagacgagacggttcgggcgtggcccggcggggacccagaacccgggaggccaggtgcgcccaggccaggcgctggaggctggggcgccggatggggcggggcggccgctgagtcagggccacccccgcgcgggcgcgcggagcaggtccccgggccgtggaggatcagtcgcgggacctatgggcccgggagccgccccgcccggaaaaaccggtcgggccagcgcggcgcgggcacattccggcgccgggaagggcggctg

SEQ ID NO: 9991 - DNA, 1392 bp, Homo sapiens
  chr14:104601963-104603355
  hyper
cgaggctggggcagcccacaggaggagcgcgggacccgggcttgagtttgcacccaggcagagcgcccacccccgcccctagcttcggaccctgaaagtaaagtcgtcgtgcccggcagccagcccgaatcttccagccctcagggagtcggggtcggggcagggaaggccacgggtggcggcacaatcgggatcctggagtggaggcgcagactgcgggtcccgctgcgcacgctccgtggtccggttggggtgggccttggaggtccataggccaaggttgaacgggggctctggagcgtgggcggggtggagtgcacaggtcactgggctctgagcgtttccatgggccaggaccccaacgcgccgtgtcctcaggacagattggagggggaaggggctgcgattatgccccagtcggaagggttttacagcagccgcgctgccctctccctgccggatacccggcagtagacaccgacgtctgggggctagcgaggcaggtgggcgcggaccgcgacccgattctggcttccaacctccgcccagtggcgcgcggggccgtcgccccacacctccagtccgcgtggctggtgtctggctcgccgccggggcggaaggggcgctgtcggcgcaggcgggcggggccggagcgcgggggcgcgcggcgcggagcgagcgcagggctcgggggcgcggggcgcggaggaccgggggcttgacgggcggccctgcgcggtgcggggcgcggcggcggcgggcgcgcggccagtgaacgcgcgggcggggcggcggtggcgggaggcactaggggccgctccccgcgcttccctcttccatggcgctgccccagccgcccgagccgccccgcggcgcgccccgcaaggctcccagcctgctggagatgggggcgctctgcctggactcggagatcatcctgggcttcaccagccacctcctgcggcgacgaggcaaggtgagggctgtcgggaggggggcgggcggcgtaggcgccgtcccgttactttgccgcgcggctcgcgcggccgggggtgctgcgccgggaaggagacggcaggtccggagccgcgtcccgcagcccgggctgggactcgctgccgcactttcccccattagcgttgtccaagtctccctctgccttcaaggctgtgtcccaaccggacccacccggaggctgtggctagggcggagagcgcagcgcagggattctcgggctcaccttgcgccttgctaggatgggcgaagtagggggtcggggcccctgactgatcgtgagcccccgaggtgactccagccttgtgcaccccgtgttctgcggatatgggatgtgagcttgtgcttcccgaagcgccgcggcggtagaagcgctga

SEQ ID NO: 9992 - DNA, 30 bp, Homo sapiens
  chr14:104604724-104604754
  hyper
gggtccttggagtgcgcggggccgcgtggg

SEQ ID NO: 9993 - DNA, 30 bp, Homo sapiens
  chr14:104605280-104605310
  hyper
aactttggcaagagcgtcacgctggggcag

SEQ ID NO: 9994 - DNA, 164 bp, Homo sapiens
  chr14:105070849-105071013
  hyper
cgagcaggctgaagcggcaggcggccggcgggccccactcctgcaccgtgaagcgctcgcgctcctgcaccgtgaggttggcgctcagccacatgccctcggtgaagagcaggcagcggccgcggaagtcgtggccgttctcggacagcgggaccaccaccacg

SEQ ID NO: 9995 - DNA, 30 bp, Homo sapiens
  chr14:105156551-105156581
  hyper
agcccttcccaccccgcaaccgctggcagg

SEQ ID NO: 9996 - DNA, 30 bp, Homo sapiens
  chr14:105190143-105190173
  hyper
ggtggggtgcaggacgcagctccccttttg

SEQ ID NO: 9997 - DNA, 30 bp, Homo sapiens
  chr14:105190462-105190492
  hyper
ccggggcgtcactgcgcccgccctggccct

SEQ ID NO: 9998 - DNA, 15 bp, Homo sapiens
  chr14:105190900-105190915
  hyper
cgcttggatgccttc

SEQ ID NO: 9999 - DNA, 36 bp, Homo sapiens
  chr14:105196123-105196159
  hyper
gcgtcgtggggaggagcgtggcgtcggcgtcgtggg

SEQ ID NO: 10000 - DNA, 30 bp, Homo sapiens
  chr14:105196508-105196538
  hyper
aggactgcaggagccggatccttaacacct

SEQ ID NO: 10001 - DNA, 30 bp, Homo sapiens
  chr14:105246536-105246566
  hyper
ggtcttgatgtactcccctacagacgtgcg

SEQ ID NO: 10002 - DNA, 484 bp, Homo sapiens
  chr14:105330455-105330939
  hyper
aggtgcttggggtggggctcccgccatactcaagggcgcctcttgactccctctgaactcgcaatcccgccccagggtccggcacaagggctctgctggggctgagatccgtgaaggcagatgcggagaggcgccgctggattgcgagcaggcccaggtgcggggccaggtgggcgttgtcgcagccgggaacgcccagccgctccagctgcccacaggacaaagcccagggttccccggccgggcgcacgccttccacattctccctcacctccacgccttcgctcactgcgttccccaacacctggaatgcagcaatgcccttcgggcacgctgccccgcccccacgttgatcccgtcccctagcttggctccagggacaccggatacgcctattgtagcacccggcaaggagcgagcagtccgcgggaacttacccaggaaccccgagcgcctccgtagttcccaaccccacccccacccc

SEQ ID NO: 10003 - DNA, 328 bp, Homo sapiens
  chr14:105330980-105331308
  hyper
cgtcgatgcccaccaccatcgcccccagctcagcccagagcgcccggggtcagaggtggagatgtcggacatacgcccagtctggccaggctcgggagggaaaatctgggagcggcctctggaactcaccctgactccttcaccgtccgctcctctttttggcttccggggccaaaggttggggactcgaggcgcggctggagcctacagctcctggagcgtagttaagcgttaacccgctggccctgggccagggcgcggggctgctgtgcgcacccggttccgcccgtcgagctggggccggaccgggaggcgaagcggggggcgc

SEQ ID NO: 10004 - DNA, 31 bp, Homo sapiens
  chr14:105331605-105331636
  hyper
gacgtcagggacccgcgcgcgaggccgccgg

SEQ ID NO: 10005 - DNA, 453 bp, Homo sapiens
  chr14:105512034-105512487
  hyper
ggaaggatgtgcaaaatgttccgcctgcgaaggttccgcggtggcggggacactgctccggctccgctcccgcccgcccgagcgctcggatggggccgcctctgcactgcgtggccacaggcgcggcccggctgcccacgggcgccctttgcagctgctgccccctggcggccgcgggcggctactagcgggaaagcgaaacccgcccggtccattcaagccccgctgcctggcgccctctagggtcgttcttgggaacgggcggacctttcgtcaacactttgcctgcaagatcccccattgggggaaccgaggaggaagttaaaggaagatgtgtgtttttgagcgctgctttgtgccaggctcatcttaggtgtgggacgtgtactatctgaattaataccccaccaggcctgtgggacagtcactgtcaccattcgcaaattatggatg

SEQ ID NO: 10006 - DNA, 30 bp, Homo sapiens
  chr14:105663004-105663034
  hyper
agcctggcaggaagcggacacctcagaaca

SEQ ID NO: 10007 - DNA, 114 bp, Homo sapiens
  chr14:105714302-105714416
  hyper
gccacagaggcagggcgcgccctggggcccaagctccagggctgcaggcccagggccagatcctgacttgcccacccgccggctgtgtgaccttcagcgcgcgactaacctctc

SEQ ID NO: 10008 - DNA, 145 bp, Homo sapiens
  chr14:105715247-105715392
  hyper
cggacctagccaacagcaacgccggcgccgccgtgggcaggaaggccgggccgcgcagcccgcccagcgcccccgcgccagcgccgccgccgcccgcgcccgcgccgcccacactcggcaacaaccaccaggagagccccggctg

SEQ ID NO: 10009 - DNA, 18 bp, Homo sapiens
  chr14:105715538-105715556
  hyper
cgtcgtggggcccccggg

SEQ ID NO: 10010 - DNA, 136 bp, Homo sapiens
  chr14:105781849-105781985
  hyper
gagatgccctgtcctgcggggcggggtcgtcctcgcgggtacctggttggcgctgtctctcatttagaggcgtcgccaagccagtactgctatttgcgcctcccagttgatcttgccattgcggaagactggctgt

SEQ ID NO: 10011 - DNA, 30 bp, Homo sapiens
  chr14:106326603-106326633
  hyper
tttagtctaggtcagcttaggtcagttttg

SEQ ID NO: 10012 - DNA, 30 bp, Homo sapiens
  chr14:106326872-106326902
  hyper
ggaatatttctttgctgctttaaagtcatt

SEQ ID NO: 10013 - DNA, 31 bp, Homo sapiens
  chr15:22544585-22544616
  hyper
cacggggtagggagggcgccagctttgctct

SEQ ID NO: 10014 - DNA, 80 bp, Homo sapiens
  chr15:22892362-22892442
  hyper
tgacccggtggagccccgggacagggtgcggaccccgttccttcgcgctccgaaccggacggacccgcaggaggacccca

SEQ ID NO: 10015 - DNA, 114 bp, Homo sapiens
  chr15:22893270-22893384
  hyper
ggagggagcctggtccgcggagccattccgggcattcttggagagaggagttttgggctttgttaaggaggcgcgatcgttacggaggcagcactgtttcgcacaagcatctga

SEQ ID NO: 10016 - DNA, 182 bp, Homo sapiens
  chr15:22893606-22893788
  hyper
gtttgttttctggcggcggagggcaccgtggctgcgccgggagcggtggtgtttcttgcagtcgtccgtcggactccggaatgaggcgtggtcggagccgcggtgatgcctggtgcagtgcgcacattgctatgcttgacagcttggcggcagagtcccggccaggccgggacccgcggggg

SEQ ID NO: 10017 - DNA, 284 bp, Homo sapiens
  chr15:26107459-26107743
  hyper
gcctttcacttcaggtgggagcggctgtggatgaggatgtccagcggccgtcggtttctagccttgggatcattctggccccgacacggagtgacaggggatccccacgcgtccccgcatccagggcgcccctttagctgcggcggaggcacagagaggccttggcggcgctgtggcttcggtcggcaccgggtcccgcgcagccgggccctccaccctgagtggagctgccttctaagcacccagcccctgccaatcactgtgcccaacaccaagttcccggg

SEQ ID NO: 10018 - DNA, 143 bp, Homo sapiens
  chr15:26107845-26107988
  hyper
cggctgtagtcctcccacaggtccctgaaggccgtgatggccaggatgaagagcaccggcgccagtgccaggccgggctggaaggcgttcaccgccggcacgaagttgagcagcgcgatgaagacaaagtacacgttggccgg

SEQ ID NO: 10019 - DNA, 12 bp, Homo sapiens
  chr15:26108171-26108183
  hyper
cgtcctgccctc

SEQ ID NO: 10020 - DNA, 78 bp, Homo sapiens
  chr15:26108248-26108326
  hyper
cgtgtcgccgcgcccggctcctccgccgctcacgcccgcccgcgccggcctcttaggttatcatcactcgcggcccgg

SEQ ID NO: 10021 - DNA, 284 bp, Homo sapiens
  chr15:26108548-26108832
  hyper
cggccccgccctcgttccgcgcccggactgggccacgccggatagcgggaaacaaaaaaagcccgagctggaaacttcagagaggtttagtttcgtttcccagaagcatcagttcggtcccaaaacgctgcaaacgcgcgctgcctgcagtaggagagaggaaaccgcgaagcgcgagaaaaggcgcccccgtccccaagcagcccgcgcgcccttccaggggccagacctgctccatcctggacggcgaaacgacctcgggagaccccggttaggaccttact

SEQ ID NO: 10022 - DNA, 58 bp, Homo sapiens
  chr15:27017152-27017210
  hyper
ataggagccacccccacatctcgcctctcccggttccccagcgcctgttgctaaggag

SEQ ID NO: 10023 - DNA, 88 bp, Homo sapiens
  chr15:27112034-27112122
  hyper
cggtggtgactacacgaggcgccgaagatgctgttgagggccctggagaaacttcagcagaacagggcctctccccttgcaggccgag

SEQ ID NO: 10024 - DNA, 216 bp, Homo sapiens
  chr15:28339716-28339932
  hyper
aaaaaatagatggttcagagtcggtggaaccttccagtcctcacactcaaccccaaatcgttcgtgtgggctactgccggccctctctccggctctgcgctctttctgcctgcaaccgtgcccccgaactcgggccctgcgaggtgggggtgggcccgggcccctcctgccgcccctgctgccagcaccgttctctccgaggccctcaacgccccg

SEQ ID NO: 10025 - DNA, 629 bp, Homo sapiens
  chr15:28339954-28340583
  hyper
cgccagacgctcaccaagcctgcccgagccccgcctcccgcagccgtgcccagggcggagtggggcgacggcaccggtgccaggaccgacagaggccagggcgcggcgccgggcgtggtcctgacacctgccctgccgggaaggggacggcgttccacgcctgggcccttctccactgcgtacaggagcctgggtcacctgctcggcccaagaaaaggctccaggcctgcgggtgtgaatgagcagcagccaagagagcggtgctgccggcgctcaagctaggccgggtcaccgcctcctgcccaggtccaggcagccccggcctttcccgctggtactggcacgcccgtggccgcacggctgagtgctccgggcatggtgggtctgcgggactcggagcagagctcgagctggcggatccccggttggcgcccggcgggagggcaggagtggcccagccaggccgccctgcgcactccccgcccgggtgcgcccgggggaccgcggccctcccaccccgcccctgtgaaacgacagccggcagcaggcgccgcacgccgacttcacagtggcggcgatcaacagcgtgtggaaaacagcttcttcgtaaatcttaagaacattgtggc

SEQ ID NO: 10026 - DNA, 88 bp, Homo sapiens
  chr15:28340882-28340970
  hyper
ttgttcttcgagttctttaaatatctgacataataccggcaaggaacgagaagcaccaggtttaggcgctgaggtgaaaatttggctg

SEQ ID NO: 10027 - DNA, 30 bp, Homo sapiens
  chr15:28341768-28341798
  hyper
accgcgagtgtgaccgtatatcccttcagg

SEQ ID NO: 10028 - DNA, 126 bp, Homo sapiens
  chr15:28344223-28344349
  hyper
cgtctgtgcacactaacctttaggggaacttgccttgcttcctaagccgcgactcagccggggctgtgtaaaccctccctgcctgttcccaggctagtctggctcctcgcctccttcctcccgacc

SEQ ID NO: 10029 - DNA, 81 bp, Homo sapiens
  chr15:28344411-28344492
  hyper
cgcacctccgctctggatggtgagcggagcacagccttcgaagtaagaactcagagggagctcggcgctcccgcagcgggt

SEQ ID NO: 10030 - DNA, 454 bp, Homo sapiens
  chr15:28351666-28352120
  hyper
tgtgctctgagacctcgttgtccccaagggtctctccaccctccgggccccggcctccggccccgcctggcatgaggagcggggagcgcacagcagggtgggggcaccgggcgcacgcggggaatttccccacgaccacggccacgccaaatgcctgaacctccacggctgccggcaacagcgagcgcagggagggggctgtgcgcgcgggggccctggtggcggagcaggcatcaccccgagagcgccgaggtttgtggtcgcaaccccgggagcaccgctgcgggaggagcggcgtggccgggcagaggcgacttcctcgcaggcagtaccgggccccgcggccgcctccgggcctgtcctggtgccccgggcttccacccggcgggctggcgtgcgggggctggtcttcgccgagatcctgctgggagcgggctctggccccacggtgagc

SEQ ID NO: 10031 - DNA, 269 bp, Homo sapiens
  chr15:28352152-28352421
  hyper
cgcgcggggagggagagtccggcagggtcacgaggcgccggccccggggccgcttgaaacccgaagagaccccgctcgctcgcgcgcccgccggacgaatcctcgcggaggtcccggggcgcagccggcgtgagggtggggtctcatcgcaggggcgccgggagcctccccgctccgctagctcaaccaaggaccgctcagaggggctctcaccctgaacctcggcttttctaaaggaagggcagaccccagatttcccccttctcttc

SEQ ID NO: 10032 - DNA, 31 bp, Homo sapiens
  chr15:29107370-29107401
  hyper
actgggattccaggcacgagacactgggcct

SEQ ID NO: 10033 - DNA, 198 bp, Homo sapiens
  chr15:29130849-29131047
  hyper
ccagcacggccggggcacgcccgggaatctgtgtgctccccagggcccggggcgttcggggcgccgcgccttccagcgcctgggtcccagccccgatcccggagaccggcccggggggacccggggtcccgagtgcaccctcctgccctgcagactgtcccagcgccggggccagggggcgcaggacctcgcgcacgc

SEQ ID NO: 10034 - DNA, 166 bp, Homo sapiens
  chr15:29248972-29249138
  hyper
ctgtctatgattttgacgacttcaggtgcctcgtatgagagcaattgtataggatttatattttgtgactggcatatttcactctcaacgtcctcacggtgcacacacgtcgtagtgtagcacgtgtcacagtctccttgtctgttaaggtcgaggaatacttcct

SEQ ID NO: 10035 - DNA, 73 bp, Homo sapiens
  chr15:29562018-29562091
  hyper
ctgagactgcgtgctgcgtcatgaagcctgcgccttgcgtcagggcggctgggcggtgcgcctgcgcggctgc

SEQ ID NO: 10036 - DNA, 30 bp, Homo sapiens
  chr15:29862502-29862532
  hyper
ggaacgcgatgctccgagagcggcgagccg

SEQ ID NO: 10037 - DNA, 30 bp, Homo sapiens
  chr15:29863633-29863663
  hyper
ggccgcaggtgtggcgaacaggagcctctt

SEQ ID NO: 10038 - DNA, 59 bp, Homo sapiens
  chr15:29864125-29864184
  hyper
gtaataaagggaaacggccggtcatttcctgagaccattcttccgtgtctttctagcag

SEQ ID NO: 10039 - DNA, 31 bp, Homo sapiens
  chr15:29966996-29967027
  hyper
gcgggcttccccctgccggcctcccttcctt

SEQ ID NO: 10040 - DNA, 594 bp, Homo sapiens
  chr15:30113708-30114302
  hyper
tggcgtgcgcataccgcagggagtgacatcagatcgaaactacagggtttcgccggggaccaaccactcctccaaagacagcagctcccggccagcaggaggtggcaccccaagccccgacccgctgagagccggcttccagcccccgaaccctcactggagccgagtttctccgcgagggacctgttgcgtgtccccgccctcagcgagccgcagccaggcacaggcgccggcagctatgcacctgcccagtacggcggccgggcgcccgcagccccctccccggccgcccccagtgcggcccgcgccgcccccgcccgaggggctccccgcggcccgcggcccgcggcccgcggccccgcgccagccctgcccaccccgccgccccggggcccagacagccgccagcgagggagggcgggacgcgggccagatgccggtgggcgggcggcgacggtcggcccggtctggccctggcggccgcggaggcgctcaccttggcggccgcagctctggcggacatcttgtctctctccagcgccgcgcgaggctcctcggacccgaaactccgcggcgctggcccgcccgctcctc

SEQ ID NO: 10041 - DNA, 537 bp, Homo sapiens
  chr15:30114349-30114886
  hyper
cgggggcggccggaagggcccggcccagggggagggaattcaactcggacaaaagtccgggaagcgcccgccccgcccgggtcttctccacggggcgcgcccgaccggcacctccctccgagcgcggccacccactcggcctcccgcagctttcgcagcccggccacgtcggcctcgcccggtcgcccgcccgtcagcagcacccgtggcctcccggcgtctcctcggaagccggcttcgccacgtaacttcccgggaaccggcggccgccaaggaacgcggcgtccgctggctcagccggcgccggcaactcagcggccacgcaaacctgccggcccggcccactgagcatgcccggcccggcgggggcggggctggacgaggcgaggcgaggcgaggcggggagggggcggggccgcggcgggggagggggcgggacgagcggccggggtcccgaccccaagcgcggaaggaaaagccgggtaacccaagtaacttggaagacagtttccgctgccgtgcgagtcttcctgtttg

SEQ ID NO: 10042 - DNA, 30 bp, Homo sapiens
  chr15:31507690-31507720
  hyper
gcagaccgcatgagcgtaggggtcagggga

SEQ ID NO: 10043 - DNA, 15 bp, Homo sapiens
  chr15:31620728-31620743
  hyper
aaaggaatgccctgg

SEQ ID NO: 10044 - DNA, 173 bp, Homo sapiens
  chr15:31620800-31620973
  hyper
cggtgcggggcgggcggcacctgcaccagggcgggcgctgagcctccagcctggggatcaccgcccgcccccgccagcccagcggcaacagttcccacgcgcggcccgatactttgtagttgattcatctgtggcggttccctcccccctttttgtttcgtttttaacataaa

SEQ ID NO: 10045 - DNA, 59 bp, Homo sapiens
  chr15:31621525-31621584
  hyper
tatcgggtgggggcagcgattggggcgtggctggggttgagatccgctttgggggatga

SEQ ID NO: 10046 - DNA, 333 bp, Homo sapiens
  chr15:32162834-32163167
  hyper
ccccctccccagctgccgctcgcggtcccggtggcctctcctcccccgcctcctcccgcgctccgctccgcccctcgcgcccctccgctccgcccgcggccgcgcacaacgcccgcctcccggctccgcctgctgcctccgggcgcgcgccctcctctgacgtcaccggtcgcgttcgcgccccgcccccgccccgcgcggacgtgcgcgcgccgcgcctgtgccccgcccccgcccctccggggccgggcacggagagcgcgtgctcgcggccgcgagccgaggaggggacgtacagcgcccgcgcgcccgcgagcccgctccggctctccc

SEQ ID NO: 10047 - DNA, 113 bp, Homo sapiens
  chr15:33010128-33010241
  hyper
ggccaatggagaggcgcggccccgggcgccgcgctctgccgccggcatttaaacgggagacggcgcgatgcctggcactcggtgcgccttccgcggaccgggcgacccagtgc

SEQ ID NO: 10048 - DNA, 395 bp, Homo sapiens
  chr15:33010280-33010675
  hyper
cgagccccggcggctctggccgcggccgcactcagcgccacgcgtcgaaagcgcaggccccgaggacccgccgcactgacaggtgagcgcggacgcacccggcagggatgtgagtgggcggagggaagagggccgcaaaccaacccaggacccgctcagttccacgcgcggcagccctccgtgcgcgcaggctcgggtgcgttgttcgcgggggtgaattgtgaagaaccatcgcggggtccttcctgctgaggccgcggacaccgtgacctcgctgctctgggtctgcagggaaacgtaggaaaaaaagttgtcaggagcgggcaggatgacccccacatcccgtttccacctcccggaggcccccgaacacgctcctggtgctggtggcagca

SEQ ID NO: 10049 - DNA, 976 bp, Homo sapiens
  chr15:33010720-33011696
  hyper
cgccagagcgcaggagcatccggacctgctagtcggccgctgactgcgcggcgagttgccttgagagggtcccatgtgcttggggcgccgcgctgggtctgggggcgtcttggggcgcccattggagtccgcgggttggagcatccggagaatccatgatgtgtgcatttgccgatccccgaggtgagatggagactggcaagggcagagccgctgtgttcagccacagcggaaaaccgaacggtgggtaatccgacagctgcggtgcggggcgcggccctggccgcggggtccagcgaacccgcagtgctcacaaggcagacaccacacgcgctcgcggaccggccacgcactcgcgggcgctcgcttctctactccagcctcttccccgccccgcgcacgcccgggctgaatggtagacgttctggcgccgggcagcggccaccggctggttcccacttccgcgcgcaccccttaaactgtgttctagaggccccagcctcgccttgcagcgcctcactagctcctgaggactagggactggcggctgaggcgggttggcggctgcaacgagctgggcgtctttcgttctctctcgctgcctggctggctccgctggcccctccacagcttgcggagcaaggccatagcaggggagtgggaggtatattggggctgtcacctccttgctggccggagttatttgtagactacagactccggaagaacagacgcgccaccgctctcgcttggcattgccttcggatcgcagctcctccttgggggtgccccagcttggcgtttatttgcctgcgccaggctctggcgacggtcaccgggccaggcggggagggacggacggcaggtgaccagcctctgctgtgaagaaattcctgcgcgcccggagctgtccctaatgcattcccgggtcgaatccgtctactgccttcccctcctcgaccgactccgaatctcg

SEQ ID NO: 10050 - DNA, 31 bp, Homo sapiens
  chr15:33420377-33420408
  hyper
gcaaacaaattgctcccgggaaaaaaagcaa

SEQ ID NO: 10051 - DNA, 813 bp, Homo sapiens
  chr15:33602795-33603608
  hyper
agcagtttaggggacatcctccggtcgccgcggggcgcgcgcctccgctgagtgtgcggtgcggtacccagcggtgcgggggaggctccaccgcgccagcccagggcccccgcaccgcccccgccagctcgacgcgcccagcgttgcgctctccacggagcgggcggccgcagcgcacttggctggggcgagaggcgagaggggtgggcggactgcttggttggcgttggcgctctgcagtgcagtggagtgttagcccagctccctatatggtcggggattagcttggcgctgctgaggctgaggctgagccaggagctggaggaggaggtggaggacgaggacgaaaaggaggaggagaaagagcgcagcagcagtcagcgcacgccgagcggctgccgggggaagcagaggcgccggaggctggggcaccgccgacgcctcgggagccatggccgaagggggagaaggaggcgaggacgagatccagtttctgaggactgtgagtctccgcggcgggggcgaggccgtgggcaggtggggaggagcgcggagcgcggcgaggaggggctggctgcgctgcgccgcggtgccgggtgcccggtgccgggcgctttctccgcacccgcgggctgcagaggcggaccggccacctacccgcggggccgcgaggggctgcgtgggaaggggcaccatctcctgcctctcccttgttcccctaccgccacccctgccccaggccctccacctaggaccgctcgctctccaggcaacttgctacttggtctgaaacccttgatgcccaaacttcag

SEQ ID NO: 10052 - DNA, 18 bp, Homo sapiens
  chr15:33603879-33603897
  hyper
cgccggcaactgctgctg

SEQ ID NO: 10053 - DNA, 30 bp, Homo sapiens
  chr15:34331873-34331903
  hyper
atggctagaaagggcgtcaaagtcctcagc

SEQ ID NO: 10054 - DNA, 10 bp, Homo sapiens
  chr15:34728778-34728788
  hyper
aggcccctcc

SEQ ID NO: 10055 - DNA, 845 bp, Homo sapiens
  chr15:34728813-34729658
  hyper
cgcgtcggcccggagaaaaggaagttcgcccctagcctgggcttaccaaggcccgccgcccgacccatggagccctgcttggggaccgggggcctcgatgttctccttcaccatctgcggccagatctccctccagcagccttgccaggcagtgcctggcgtggagaaggggccctgcagaggcgcaggtccgcaccgtgcccccaacccggcgcctgcagcccaggggcaacaaggtgtggggtttttgagtttttccctctgggccttattatacagggaaagggaaggggcgaagatccgggctcgagttctcccagggaagtgaacccagaggcgatcccaaactcagtagttgccgcccggcacggggacttgatgccggcgccaagccgggcagcggaacgcaccagcggcccgaccagcccggcgagacgcgagcgggcggccccgccagacagcgccacttgccggcgccgagagtggcccctcgccgcggtgagcccctcccgggatgcgaaagccatcgcctagtccccgccgcacccgcccgcccatcgtgggaggaggatgggccggtccgagaggcgtaaggccgccgggctgcacccctagatcccagcggcggcctccccgcagccccgccgagtccggggggcagcgctcgggagctcttggcccgcagcttacgcgccgccccccacgcgtccgggtccccgcggcgccgcgggcggcccaaggctgccgccgccagcgagtcaggcagccgaggttccccagcttacctggccagggcgcggggctgccccggtccgccgccgtcctcgccgcgccgccgtcctcgc

SEQ ID NO: 10056 - DNA, 236 bp, Homo sapiens
  chr15:34729900-34730136
  hyper
ccgccgtcctcgccgcgccgctgccgggtctctcccgggggctgagctcccgcagagctcgcgcctagccgcacacctcgactgctgattagcccgacagctgaatagcggcgggagcctaccgcgagcggagtacggaaagcccgcagggccgcgccacatggcgcacgcgcactgagctgcatacctaggtgacaaacgtgcacgttttgcacgtgtatcccagaacttaaagc

SEQ ID NO: 10057 - DNA, 248 bp, Homo sapiens
  chr15:34806577-34806825
  hyper
tcccaagaaggctccggcagtcgcgggctcccacctcggggcgcggcgacgggggcctagaggggccaacagcccccaagcttacgccacgcgaggagtcggagagacgcgccctcccctctcctcccacccaagcctccggcagtcccgggccggggctgggccagttgcgggagaaaggggcggggaactggggcctctctggggaaggctcccctttgtcctgggactccgggcgccccctctct

SEQ ID NO: 10058 - DNA, 30 bp, Homo sapiens
  chr15:34903026-34903056
  hyper
atactttttttttttaaattttttggagac

SEQ ID NO: 10059 - DNA, 71 bp, Homo sapiens
  chr15:35014214-35014285
  hyper
ccatcacaatgagacgttctattctgggcaggcggcgcgagcagatgctgggcgccggcggaggcagcgtg

SEQ ID NO: 10060 - DNA, 30 bp, Homo sapiens
  chr15:35045680-35045710
  hyper
ggagctgtccatcccgggctggtactgaac

SEQ ID NO: 10061 - DNA, 30 bp, Homo sapiens
  chr15:35047008-35047038
  hyper
tgcaggtcctccagcgctcgcccgcccagg

SEQ ID NO: 10062 - DNA, 187 bp, Homo sapiens
  chr15:35087601-35087788
  hyper
ggctgaatgcgggccgggctggccaggtggcggcgcggggctggcgtccggcgcggcccgcggaccaggcgaggagtgaacgcggagggccgggcgctgactcaccgtcggcggggcgggtcggctcggctccggcggcagcgggctctgggtggctggctccaggagggccgctttatagaacgct

SEQ ID NO: 10063 - DNA, 30 bp, Homo sapiens
  chr15:35280625-35280655
  hyper
gcccccaaccccaccgccattcaccctgtc

SEQ ID NO: 10064 - DNA, 30 bp, Homo sapiens
  chr15:36053807-36053837
  hyper
aatctttctcaacagtttgcaatctcttgc

SEQ ID NO: 10065 - DNA, 30 bp, Homo sapiens
  chr15:37179588-37179618
  hyper
cacctagagaacctcgagccccgccgcgga

SEQ ID NO: 10066 - DNA, 30 bp, Homo sapiens
  chr15:37391172-37391202
  hyper
agtagtctaggcggcggcgcagcggctgcg

SEQ ID NO: 10067 - DNA, 31 bp, Homo sapiens
  chr15:37393697-37393728
  hyper
ccagctttgttgtggtcgcccgaggcgcagc

SEQ ID NO: 10068 - DNA, 116 bp, Homo sapiens
  chr15:37394739-37394855
  hyper
ggcccgagcagggacggccagactcacggagcttcagggaggagagtgtagcccaggttttcagccactcttttttgccgggcttcaagcctgctagagccgacgggtaggaaatc

SEQ ID NO: 10069 - DNA, 118 bp, Homo sapiens
  chr15:37402968-37403086
  hyper
aatcaattcccattttatgatcgctgacaaactcaatctcagggcggggtgtgagagctgggggtgagctggctcgggccgggacagaggtctctctgcgtacgccccgctccgcccg

SEQ ID NO: 10070 - DNA, 369 bp, Homo sapiens
  chr15:37403115-37403484
  hyper
cgagttctgagaccttggcaaacttccctcccccaaccgccggcgtgacttctgagttgtcactaatccgaacctgatattcaccagagctccttcggtcaccgacaacgctccccgctgctgccgcggcctcccgcccgccctcctcggcgtgttttcatttctaagtctacgggcagggattgccccgacccagtgtgtgtgtgcgtgtgtgtgtgtgcgtggtttcatttacattttaaaaatcatttttgcgttcttcagcgtggatctcagcactttccctgtgtctcaggccgactaactttgcataaacaaagcaacaaccgaagctcatagtgggtgaaatcttgcggggaaatgaaggca

SEQ ID NO: 10071 - DNA, 35 bp, Homo sapiens
  chr15:38365201-38365236
  hyper
cctccccgccggcccgcggccgcagatgggctggc

SEQ ID NO: 10072 - DNA, 31 bp, Homo sapiens
  chr15:38543406-38543437
  hyper
cttctaacaatgcattcgtgacagctgtcta

SEQ ID NO: 10073 - DNA, 30 bp, Homo sapiens
  chr15:38746855-38746885
  hyper
ttggggctctggagcgaatggcttttactt

SEQ ID NO: 10074 - DNA, 319 bp, Homo sapiens
  chr15:40074996-40075315
  hyper
ctcctgcctgtgggaccgctgtttccctggcaaccagatgcgcgatgcttccggtctcgcgatagcggaaagggctgtaccatccggaaatgggaccggggccggcggctgttggagccctgcgagctgggacggccggcgtgtgtccttccgtcttcgctgccgacggtgggggttgggagcgatttttcgtctttaggttggattcggaacgcggacgtctggatgcttgtgtatctctgtccctcatattgctgtgatgccttacaggtcagttatcctctccgagcacagtttcctcctccgtaaaatgggaaca

SEQ ID NO: 10075 - DNA, 30 bp, Homo sapiens
  chr15:40452916-40452946
  hyper
ccctacaagagtcacgccaagtgcaagcac

SEQ ID NO: 10076 - DNA, 306 bp, Homo sapiens
  chr15:40545035-40545341
  hyper
ccgcgtccctggagcgggacctccctccgcgggcgcccgcccggcgcggggcattcgcgtccccgagagggcgcagcagtggggcctgcgagctggggccgggtggccgcgccgggtcggagtgtggctggagaggggccgccccggaagcggtgctgcgcccaacgtccccttctccccgtaagccccgcaaggagcctgccgcctcttgcacctgagccaggagttcagtcgggaggcgggcgcggagcggttcccagcgcctggacgtcagccagtcgcaacacccgcgggaacacttgctac

SEQ ID NO: 10077 - DNA, 30 bp, Homo sapiens
  chr15:40559565-40559595
  hyper
aagttctgggcggccgcgcgtggtggctca

SEQ ID NO: 10078 - DNA, 30 bp, Homo sapiens
  chr15:40651021-40651051
  hyper
tgcatgaaggtgtgcgtgaatcgcggatgg

SEQ ID NO: 10079 - DNA, 30 bp, Homo sapiens
  chr15:40729018-40729048
  hyper
agttgttggggctgcggaggaggcgactgg

SEQ ID NO: 10080 - DNA, 30 bp, Homo sapiens
  chr15:40734681-40734711
  hyper
cagacccagtgagccgctgtagagcctgtc

SEQ ID NO: 10081 - DNA, 57 bp, Homo sapiens
  chr15:41046992-41047049
  hyper
ggccagcagaagtcaccgggagcaggcaggcgggcgggcgggcgggggtaaggagag

SEQ ID NO: 10082 - DNA, 30 bp, Homo sapiens
  chr15:41137004-41137034
  hyper
tgggactgcgtgcgcgcctgctgcaccacc

SEQ ID NO: 10083 - DNA, 30 bp, Homo sapiens
  chr15:41523224-41523254
  hyper
ccttttaattgcgtcgttagcgaccgagtg

SEQ ID NO: 10084 - DNA, 30 bp, Homo sapiens
  chr15:41576085-41576115
  hyper
caaccaacctacgacgcaaggagagcgcgc

SEQ ID NO: 10085 - DNA, 30 bp, Homo sapiens
  chr15:41709918-41709948
  hyper
cgagcagttgggggcgagggccaagaagat

SEQ ID NO: 10086 - DNA, 1117 bp, Homo sapiens
  chr15:41786423-41787540
  hyper
agcgggagagggactgcctcccggcagcgggctcttcgcacctgcagcagccgcgccgcctttccacctcgtcggtctcctccactggctcctcgtcgctgctcgaggactcggaggacgacctgctgagcgacagtgagagccggagccgcggcaacgtgcagctggaagcgggcgaggacgtgggtcaggtacgggccgcgggggcggggccagcgccgggcgcgggggctgcacgggggacctggctgggtgctcccggaggacccgctcctgtccatgctccctccagcggaaggtcctgttctcgcggtttaggaggaatctgggggtcagagggaggcgcctggccgacctctcgcctgggcaactttcacctcggctccgccggcgggtcgtggcgctggccctggggcgtctaagaagcggggcgaggagcaggcgacccgccgcggggactgggcgaagcgggggtagcggaccttgttggctgtgggttaggacaggagggatcggaggggctgagccttgccgggtgaaccctcggaaggagagaggcgaaggagagtttcccttaccccccgccccctctccggtgccgcggccgcacccccgccgttgccacggtttccctctcctgagtgggagtggagcggcgctccaggctctgctcgggagccgctgccgtctgctcccagcgcccgcacgaggcgtggacgcaggggagggaggggcgtgggcctgggagctctggctgggagcggaacgcagcccacccagtgcgcgccctgcctcccatcttcccggctcgccgctcctgagcgcggcagagaggggcggtaaactgaggctgcaagggggcaggatcactctgctagtctctgcctctgatagcctgggtgttctgggaccaggtctgaccctcggaaaacacagccctgggcactgttaagtcattcctgacgcccgccacttagggatgtgcggctcccgggacaccctccttgttcccctcgttttaaccaaggccaaataccttgaataactgtccgtggtcagcgcgaaggactttctttagatccacgtttcgcaagtgtccctgaggccgaggaagagg

SEQ ID NO: 10087 - DNA, 20 bp, Homo sapiens
  chr15:41788033-41788053
  hyper
cgtcccgcttccctcttccg

SEQ ID NO: 10088 - DNA, 1026 bp, Homo sapiens
  chr15:41804869-41805895
  hyper
ggtcactgtccaccctacctccgccgtgcacttacagatactggccagggcccggcacgcgccacagctgcacgcctctcagctgcccggcggcccccacggtcaccaccacgctggtccccgcgtacgccccgtcacattgtgtctgtgtgggcccatgccggccgctggccccgcaggtagaaaacagccaagacccctcggtgcctgagagcaaggagcgaggcaagggtcgtcgagcccctggctgggccagaggggtctggtatggtgagcgaaagaggaaggaggcgtctaaagctcacccggagaattcagcggggaggctggctccaagatactaggcggggcgctgactttcgggtcccgggggctgggacttgccagcggcaggggcgaggaccgcagaaaagtctcctgggaccccgggctagagcagagaatggcgcctgaaaggtgttgggagaaggcgcaggacgttaaggcgggtggaaataggatatgaaagaaagagagaaccccgcaacagctgcccttgcggtcgcggccacacccgtcacccggcccagccgcgctctcagcctggaagccactacccgactccggtcgcagaagccccgcgggtgcgcgctgataggtctgccagtttctctcctcgagcgcctttcccagtgaataacttaggggccgcaatgaatttggtcctgcagcctccccaatgctttcctcaacttagattggtggccccgccccaaggcggtgctgagaccccaaagaatgttcctccttcccaagctgcgtgatccagactctgggattcgcacgcacttggcgcttctcggcccgcactccagaagcacggaccggagaaatttggctgtgagagttcgaggcctctggaggaaccactgacacctggcctgttgaccggccacccccaagcctaggaaagtgcctcaggctggacggtcccctgaccgccagatagcacttacccgcggctccgaaccacaccagcagctgtcc

SEQ ID NO: 10089 - DNA, 30 bp, Homo sapiens
  chr15:41850597-41850627
  hyper
agttggaaaacatacggcaattggggctgg

SEQ ID NO: 10090 - DNA, 30 bp, Homo sapiens
  chr15:41913728-41913758
  hyper
aggattccgggacccgcgagcggagcggcg

SEQ ID NO: 10091 - DNA, 894 bp, Homo sapiens
  chr15:41952436-41953330
  hyper
cagcggcttccactcggggggcgggtcccaagggtcttgctgctgctctggggccgtttggactcctggtgttgggggaggggtcagggaggtgctgctcgcgtctccttttgcgcctgcgcggcgggctccgagcgggtaggagcgcgtgcgcggtgacgtggacgtccggtgcgcgcgcgcaggctcttcagctggagcggacacacggtgtgcgaaccgaacagaataacccgcccccagcgggatgtgaaggactccgggtgaggccggccacgccccgcacggtaactctcgggcctgggtggagggcatcgcttagtactggcccgattggagtttttcgagagtttgaagctcttgtgtatttgaacggcgtgagaaacgttccgctgagagagcttcgcacgccctcgccaggccgggccttgcgcagggccgcctttggcgcgcccctgtggtccctgagcgaggctgcgcatgtcacctcgcgcgcgtccccggcctcacttccgcgtcgctcagctacctaactgggaacatcgacgccagagagagcggccacgaggcgggaggggtgagaagcgcccatggctcggccctgccctcgcgtgtgtggggtgccgctccgcgtggtacggtccgcgtgacgacttctcgcccggcgccgggctctaggtcgagagccacgcttacgcgcttttcagtttagagcctaggtctcgtggttctagaactccaagggaaacggtgtcggcgtcgcttttctgagaacttggcgcagcgttttgacacctgtgcaaacgtcttttctaacaagtaatttccggccaaattgtttgaggcaggacgtcaagtttaataaaggagggcgaggaagtgagctgtaggagt

SEQ ID NO: 10092 - DNA, 30 bp, Homo sapiens
  chr15:42119669-42119699
  hyper
tcccacaccagccgcgcccaccgcaggtgg

SEQ ID NO: 10093 - DNA, 30 bp, Homo sapiens
  chr15:42119936-42119966
  hyper
tgtgcaggtcgcggcgcttcctgcctcatc

SEQ ID NO: 10094 - DNA, 37 bp, Homo sapiens
  chr15:42263897-42263934
  hyper
cggtgcatgaactgaacgtaggcggcctctttatccc

SEQ ID NO: 10095 - DNA, 30 bp, Homo sapiens
  chr15:42841084-42841114
  hyper
cccgtgggacccggcgtccgcgcctaacgg

SEQ ID NO: 10096 - DNA, 31 bp, Homo sapiens
  chr15:43312163-43312194
  hyper
gcttatttaattcactcgtctccaaaggcaa

SEQ ID NO: 10097 - DNA, 149 bp, Homo sapiens
  chr15:43394929-43395078
  hyper
ttgcctattgtttccacgttcttacctcattcttccattttccacccgtttcaatcattcctgttctctctttctcatcatctctgtctcactctcttttcctctgtgtgtgtgtatatatatgcacacattttcctcctcaaagatct

SEQ ID NO: 10098 - DNA, 102 bp, Homo sapiens
  chr15:43397759-43397861
  hyper
aaaataccaggtgctgcgttcccatcatcaagagtaaagggttagtactgcttctatacgaaaatggctcttgctccaaccccgcctcggcccccacatcaa

SEQ ID NO: 10099 - DNA, 30 bp, Homo sapiens
  chr15:43398420-43398450
  hyper
tctaatttatcaggcgtagctcttggtagc

SEQ ID NO: 10100 - DNA, 31 bp, Homo sapiens
  chr15:43584165-43584196
  hyper
aatagtgttacctgcccgtagttccagggcc

SEQ ID NO: 10101 - DNA, 153 bp, Homo sapiens
  chr15:43802597-43802750
  hyper
cccctccaatactgcgcagccttccagagcactcccagggcccggggcaaggacagggaaaccgaggatggagacctcgggcaggacccaggcaggcagtgacaaaaaacaaaaaaaaaaaaaaacacgccaaacaacgataatacagacaca

SEQ ID NO: 10102 - DNA, 30 bp, Homo sapiens
  chr15:43809674-43809704
  hyper
tggagctcagacgtcgtgaaggcaaagaaa

SEQ ID NO: 10103 - DNA, 89 bp, Homo sapiens
  chr15:44068729-44068818
  hyper
tcaccggccgtacctgcggggagagcgaagatgtgaccgttgagcgcaggtgaagcagtgtccccaggatccggcgtccggagcccggg

SEQ ID NO: 10104 - DNA, 30 bp, Homo sapiens
  chr15:44486469-44486499
  hyper
ttccaagccccaaatcgctgggacttgttg

SEQ ID NO: 10105 - DNA, 927 bp, Homo sapiens
  chr15:44486763-44487690
  hyper
caaagcctgcgcccccgacggggcggccgggctaggagcctaccgccctacccgcctccctccgggcgccccggaaaggtgcaccttactcgggcgggctcgaggaaccaggacggggcgccctcacccagggagagcagggtaggacttaggggtgtgggacgcggagactcgccccgcggcggcggtgacacaccgggtgccagggctccggcaggggctccggtgaagacgccctgcactagggcggtccgccgcaaccaggaacggacaaagcacggcgctggggctggggcgacccctgggcggcggccgccgccggccaagttgaccagacttgggggacaagggggtcccgcgggcggggcggggcggcgcggcgctgacctggatggtgcaggtgtactcgctgtcgtccagcagccgcacggtgcagctgtactcgcgctccaggctcctgctgctgccgctcatcaacctgctcagcatcttcccgcccgcccgcccgggagcgacgcggcggcgctgcggaccctggaccaggcgtccctcagcccggcagctccgcaccgaccccaggcacctgcaccatcaccccggccccgtcgctgccgttgcctcctgctggcctcgttcctcctccttatcctcctccttccctcagccgccaccgcctccccccagcccagatcaagcgccgggctctgtctcctcggcgccccagtgcccgtgcccagctcgcggggcggggcctcaactggagggggccaatgggggtcagcgcggcggaaccgagtggcagaccgaaaagccaatcgagatagagtactgggatgatgggcgggataaagaagcaatcacagaaaagcagtcggacctagtcaagccggagcagccctctagcgtcccaaacgaggggttcctctc

SEQ ID NO: 10106 - DNA, 30 bp, Homo sapiens
  chr15:45421597-45421627
  hyper
cccctcctcctctgcgcccccccacccatg

SEQ ID NO: 10107 - DNA, 30 bp, Homo sapiens
  chr15:45427393-45427423
  hyper
ttcgaccccgaccagcgcggggacgtggtg

SEQ ID NO: 10108 - DNA, 14 bp, Homo sapiens
  chr15:45427705-45427719
  hyper
ccatctatggttcc

SEQ ID NO: 10109 - DNA, 31 bp, Homo sapiens
  chr15:45459389-45459420
  hyper
aaggaacttgatgcttcgaaagtgcttttca

SEQ ID NO: 10110 - DNA, 263 bp, Homo sapiens
  chr15:45479774-45480037
  hyper
gggggcgacaggggtggcgagggcggcggagccggacgaccccccggagtaggggtcttcgaagtcgcgctcccgctgcagcctgtaggcggccaggatgtccgggggcggcgcggggggcgcggccggagagggcgcaggggggcggtagtcgggctcggggggcgccggcttgctgccccctccgccgccgccccccccgcggaagcccaggtgctcccggagccacttggctactccgccgctgccgccccctcctgggc

SEQ ID NO: 10111 - DNA, 31 bp, Homo sapiens
  chr15:45492781-45492812
  hyper
agcctatctccaccctcgcagccatctgagg

SEQ ID NO: 10112 - DNA, 30 bp, Homo sapiens
  chr15:45493515-45493545
  hyper
ggctgaaattataacggacaatgaagtgtg

SEQ ID NO: 10113 - DNA, 73 bp, Homo sapiens
  chr15:45670056-45670129
  hyper
gtgaatctggtcgctcgctccccgtccccgattcccactttgcttgcctcttctccccatccatctaccccac

SEQ ID NO: 10114 - DNA, 650 bp, Homo sapiens
  chr15:45670188-45670838
  hyper
cgccacccttttactaagaggagcctccgtcgtcccaaccccttgctccgagcgggaagcttggtgcagcgcaccaaggtccggtagaggggggcggcgccccctgcgccgtgggccagcaggccgcggacgcgcagacagcaagtggaccccaagggctggagccgcaacgcaagttccccctgactgggggacgccgcccagctcctggagcctgcgaaggctcttgaagctgagcttcccagggataccagaagggacactctcgtgcaattccggctagggaaagcgagggaaggtggcggctccgggcagggagcgagcgagtgctccacgccgcccgcaggatcgagtgagtcacgcggccgccagacgaggccggtggcgcacgcacccgagatccgatgtagtgcaccgcctcggcgccgcggctcccgccgcgcagacaccgcacccgcagcatcgccctggcccggctggtccacgcgcggaatgttcctggcctctgggccgcgtcggtccaagccttcccgagagcgcgcccggagcggggtgggcgggcgcgcggggcccgaggccttttgtagccgcgctccgccccggccgccccccgcggccccattggctgccgggaacaggtggtggggccg

SEQ ID NO: 10115 - DNA, 117 bp, Homo sapiens
  chr15:45670932-45671049
  hyper
cggcttctgttgcacgtccggacccggacccagacccgagcgtcgcaagaaggcccgttggagtctcgcgcaactgggcaggacgcgacttctgacgaagtgacaatggtctatgca

SEQ ID NO: 10116 - DNA, 515 bp, Homo sapiens
  chr15:45722444-45722959
  hyper
ttttagaagggttggctttccctcaggcctcggctatctgcgctcccctcttagggggttccacctcctactccccaaacctccaaactcctcacaagcacctaggggggccaagagcgaccggggtcggcaggtaaggaagaccgcggcgagcggcagggggcgccagcgcccgcgttcgggcgcttcacgtcagccgcagaatgtcctgcagggggcgcccgggagtcgcgtgcccaacggggaaagcgagtcaggtccctcgcgctccccgccccacgcgcgtgaccagagcgcgctggcccggcccacccggggcggttgtggtcgctatatataaggtggggaggccgccggcccgttcggttccgggcgttaccatcgtccgtgcgcaccgcccggcgtccaggtgagtctcccatctgcagagacgcggacgcgccggcccgcagttggcctgcggagcgcggtggacggtttggcgcccaccaggcgatcaatactttggattttta

SEQ ID NO: 10117 - DNA, 30 bp, Homo sapiens
  chr15:47476355-47476385
  hyper
ggtctgtgagggagcggacgaacccggaga

SEQ ID NO: 10118 - DNA, 7 bp, Homo sapiens
  chr15:47477012-47477019
  hyper
cgcaagc

SEQ ID NO: 10119 - DNA, 30 bp, Homo sapiens
  chr15:47477396-47477426
  hyper
ggggtcaaggctgccgggagggaaaaggct

SEQ ID NO: 10120 - DNA, 462 bp, Homo sapiens
  chr15:48009298-48009760
  hyper
aagagggagggaatcgaaaaggttgcttcgcaggctgcagcacccactgcgagctggatgactgaggcactgggagttgctagaaggagcagctactcagaggtggggagagggagggtgcgcagcagagcgccggagaggagggacgcggaggccaccgaggggtcagcagggccgcggcgccagggtgggggcctccaggcggcgctggccacggttcacccgcgagggcgagcgcgcccggccggccgcgcctcctgccgtccgtgcccgggggtgggacccgcgccgggagctgccgagtgcgtggagggagccaggctccggctcgcctgatggattgacttggagatggatcgaattacaccatttgccgtgcatcggtttgttttgctcctgctctgtcccgctgctgctgctgctgctgcaaggggtggtggcgagtttcaggattctatcaag

SEQ ID NO: 10121 - DNA, 30 bp, Homo sapiens
  chr15:48010284-48010314
  hyper
aggcagagccagctcggcgtcccccgcaca

SEQ ID NO: 10122 - DNA, 224 bp, Homo sapiens
  chr15:48010793-48011017
  hyper
tgtctcctcccggccgctctacccagcaactttccgtgctttgttccccgactggaaatgctttacggaagcgtcttggacagggtctccgccaggcgacaagagctcggtgctgagatgtgttacgttctcatctccccatcaattatggatggaaacaaataaggaagagtcaattttgctgagccccttctccggcaacgagaggcgttctgcagccggga

SEQ ID NO: 10123 - DNA, 208 bp, Homo sapiens
  chr15:48469937-48470145
  hyper
cctgcaaaccgtggcggtcgctgagctttgctcaaagattctttaaccaaagtcagggaagaggggtgttcgctgtctcgggctagaaatcagggaagagcgctggtccccgggcccccagccccggctcccagaccacaggcggccaggcctggggcgggcggggaagggcctgggagcggcccagctgcacctgctcctcaggaag

SEQ ID NO: 10124 - DNA, 412 bp, Homo sapiens
  chr15:48470215-48470627
  hyper
cgcccggtagactccccgccccccacctcgccccggttcccggaggaaaagacaatacattttaacgccattggagctgctgctgtgctgcggctgctgcttctccgcctccgcggggtgcggctctcgccgcggctcgcccggcggctctgcgggctgcaggtgcgggctgtcgccaccagtggccccgggcacctcggccttgttggcgtccgccatcccgccgccgctgcctccgcctcggccgcctgagctgaggggctccgagcgcgacaatggcggctgccggggaagcggtaacggatcccgatttgaaaaggccccgagcgctcagtaacccggatctcgcgagaaccggtcgagactgggtgactgggagatggtgtgtgccgggtgcggggggtgggagtgc

SEQ ID NO: 10125 - DNA, 833 bp, Homo sapiens
  chr15:48936812-48937645
  hyper
cgtcgtgtcctccaccgcctcttctcttggcccgactggctctggtttccttcacgttcccagcctccaaattggcgtccgccccatggctcgtgtaggacgctaaaagcacggtaaatcccagggcgatctccagcagacgccctcgacgcatgatgccgagccgccaccggctcccgccgcctcttgccgcgcccggggctcggtctgcggccgccgctgcgccctgaagcgcaccgcgccgccggggtcccgctatcccgccgcccgtcccccgggccgggctcctcccgccttctccaggcgctgctcccacttcaggcggcccctgccagctgcaacacagagacaaatccccgaggcggggagactttcagggcatcgggatgctgaagcctcgcggtccccattcccaagcccaacccgtgcgccgcctgcgcgtggcgcagttaatttgggtaagggaagaccgtttggtccacagctggctggaaagcccaggcccccggcggcagcagccccggccgatccctcggcctcccgggccccgccagaagagcgcggcgcaaagtacccatatccccagcggtcctaagccccgggcgagctctctgggtttattttttttagcggcacgaattgcgcgcgatgcgcgctctgaacgccccactcctcagcctgccctctccgccaggctggaagccagccgcgccgtccccgccgactccgggcgatgccaccgccccccgaacatctgacgcggagcccggcaccaagagccccgggccaggaagctgtcaggcaggggagggccagcgccagctgtggacgtt

SEQ ID NO: 10126 - DNA, 888 bp, Homo sapiens
  chr15:48937709-48938597
  hyper
cgtggccgcagctccagccccggtggccgcccgacccccgtcgggaccccggctgcacccactggagaagcggcggctccgactcccgaggaggcggcggcggctgctcccagtcgtggccgctacagccactgctcggctccgctcgcagctgtcccagctgtggctcctgtccgcttgtggcacccacagtctctgccgcggctcccgcagccccctcctttccccacctcttcaagtatcgtccgcgcagcggtttctcgcgagagaaatactttttttaaaaaaagaaagaaaaagaaaatgacaccccctccttcgtcgccctcatcaccaccccaccccccggccccatccatcctccctttccactcccctttgccagcctccgcctcggtgcggggcctctcgctcgcaggattagcgcagtgggaggaggcagaggtgatcaggtcctgcccggcctgggactttttgtcttgaggtggggaggggagaaatgggaagaggtggagtagcggttttagcccgctctgcggctgcgaggtttagatccgagattaacctctcccgcgataggtgaagccctaccggagcagaaagctgttccacctgcaccaagaatgcgcgctggagacggttgccccggaggccctggcccgagagaaaaccagtccccgctgcccgcgcctcccggtagcgcgctccctgcgcctctcccgccggacactcagcagacgccggaggccgggaggctaagactgggcgcgtcgcaggccgggaccgcggcagaggctgctgtgccgaccgaggagagggctctgccgcccccacttgccctgggtgtcgagagcccactccagacgcggctcttctgaggctcaattc

SEQ ID NO: 10127 - DNA, 35 bp, Homo sapiens
  chr15:49448551-49448586
  hyper
ggaatttcaagagaaccgagcggaaagggaaatcc

SEQ ID NO: 10128 - DNA, 30 bp, Homo sapiens
  chr15:50647539-50647569
  hyper
gtctgattttttaacgaagggaaagaaaat

SEQ ID NO: 10129 - DNA, 30 bp, Homo sapiens
  chr15:51058035-51058065
  hyper
gctttccggctgcccgactttaactcacac

SEQ ID NO: 10130 - DNA, 30 bp, Homo sapiens
  chr15:51385955-51385985
  hyper
gaccggcggcaagtcgacccacggctgtgg

SEQ ID NO: 10131 - DNA, 87 bp, Homo sapiens
  chr15:51973519-51973606
  hyper
atacaccagctggccggtcgcccctcctttgttccattcccgggggattggagtagcgttggagtcaccgacgccatcccctcccgc

SEQ ID NO: 10132 - DNA, 30 bp, Homo sapiens
  chr15:52029137-52029167
  hyper
tcagttgggctttgcgtaaatatagagtag

SEQ ID NO: 10133 - DNA, 181 bp, Homo sapiens
  chr15:52404391-52404572
  hyper
ctgcccgtcccgccccgtgtcccggtgtccgccgcgtgctcacccagccgccctgagcctgcagccaggcgcggtgctgccccatgagccgcgagctcagcaaggccaccaggcgctggcagtcccgggcgacgtcgccctcctgctcctttagccgcggctggaagccccacttcttcca

SEQ ID NO: 10134 - DNA, 54 bp, Homo sapiens
  chr15:52587471-52587525
  hyper
tggggattctaggccccgaggccggagcggcggagggggcggcccctcccacag

SEQ ID NO: 10135 - DNA, 68 bp, Homo sapiens
  chr15:52587793-52587861
  hyper
cggaccctcctacctgcgtgtacagctcggccaccgccatgggcaggaggggccggggccaggccggg

SEQ ID NO: 10136 - DNA, 30 bp, Homo sapiens
  chr15:52821390-52821420
  hyper
ctctctcgggctcacgctgcctcccatcgg

SEQ ID NO: 10137 - DNA, 31 bp, Homo sapiens
  chr15:52972047-52972078
  hyper
ggcacagagttgtgatcgagccccaagtgga

SEQ ID NO: 10138 - DNA, 383 bp, Homo sapiens
  chr15:53076173-53076556
  hyper
attcactagaacaacgacgttctaaaaacaaaggcgcagcaagcatccctttcttcgctgccgcgggctgaaccacggacgctcgcgggtcgcccagccccgacggcccgcagggggcgcgcgccgcagccgcagcacagcccggctacccccagaaagggagccgaatggagggaagcagggagcgcggagggctcgaggcttgcagataaggagaggcgcatcctgggatttgggtcctctgctgctacaacacaaccgtgctattgttggcactgtccgacccaagtgtcggtggtaagcggcgatgtcggggctgggtctctagcaaccgctgtgccctgggtcaggctggtcgccccagctaccgggatccctctccg

SEQ ID NO: 10139 - DNA, 209 bp, Homo sapiens
  chr15:53076791-53077000
  hyper
cccgggtttatgcccgttacacagagagaactacacagggggaactatggtcctacaccctcgaggggacagacaccggccgtgagacaggcaccacgcagagccttctggtgactgtccgcaggagcgagaccttttttggttttgcagtcggctaggtgtgtgtgtgtgagggtccccagttgactaccgggatgcactgccacttt

SEQ ID NO: 10140 - DNA, 30 bp, Homo sapiens
  chr15:53077594-53077624
  hyper
ggacgggaagggggcgccgccaactccccc

SEQ ID NO: 10141 - DNA, 30 bp, Homo sapiens
  chr15:53078048-53078078
  hyper
tcgtgaccggaaggcgcctccccaaacaca

SEQ ID NO: 10142 - DNA, 936 bp, Homo sapiens
  chr15:53078741-53079677
  hyper
aggcaggcgctccttcgatagcctcctgggtgccacaagcacctgccaggcaccatgtttgcgcctccagcgtgcgggtcccagcactcaggctccctccccctccacagtgccgtcccctgagctcggctatgtagctctccacgcttggaggtcagagggcgctcctgcggccaggtttccatggctcagaggtcgtctctgaacagaacgtgtcagtctgtccttccagggggcgacagcaggcagtggggggaggagggatattgaagtccagagcaagagcctccagggggcgggggtgggggatggggaccgagttttcccggaggggtagccttctccatttctatcttcttcccacattcccccgctccactctttggcttcagcgggcactgcctgggtaagaggccctgaagcctggctctggggtggtgtgggtgtgtgaaaaggcactaccttgggctctggagagacggagcagtcaggacgaggagcagccccttcgcccactccctccggaacctcagttgctcgcgggcagcccacgggtggagatatggtgccggtagcacaagagctagagagtggaaaaccgggggccagcgattcgctggggcgcccagcgagcctcttctcccctgactggttcccgggcgcaggctgcaggaacctgcatgaggactttgcctggggcgaacgaaggcagagctgggctggaaaacctggcagggcagagtctcagccagcgcggtgctttgggaccggtggcctgcagcgcccaaacccaaagaacgctttgggtcgcttcggggcacgaatcgcaggctggtcggcacctgccacccccagcttctcattggcaggcacgagttggaggagggggctttggcctcacgctttgattttagactgtgaaacggctcagtgccc

SEQ ID NO: 10143 - DNA, 174 bp, Homo sapiens
  chr15:53079717-53079891
  hyper
cgaattaatggagaacgatcagttaattaacaaaccctcattccggcttttaccttttctcttcgccaaggctcaggcctgggcgctgggctgagatggaggtggaggtggggggtgggggagtggggggggagggggcatggaccaggagtcaatcaacttggcaaccgccgg

SEQ ID NO: 10144 - DNA, 246 bp, Homo sapiens
  chr15:53079970-53080216
  hyper
cgaatcctcctgaaatccccggtggggttcgggctgggctcagctttcttctctgcctatccgcggtctcggggagccaggcgcggtgtctgcgctgcgccaaggagagcttccagctgaactcagaaacacctggggcttggggtttcgggcaggagacctctgctcctagacttgggggtcatttacacactctcatccccaaacccccctcccgcacggggattcagacgaaaatcgcgaaga

SEQ ID NO: 10145 - DNA, 30 bp, Homo sapiens
  chr15:53080444-53080474
  hyper
gtcaccccagccagcgccaaaagaatgagc

SEQ ID NO: 10146 - DNA, 72 bp, Homo sapiens
  chr15:53080918-53080990
  hyper
gtcccttcggctttcgtgtaccttatctcccgcgcgcccagctccttggccggctcacctgctaagcggagc

SEQ ID NO: 10147 - DNA, 242 bp, Homo sapiens
  chr15:53081054-53081296
  hyper
cggatttgagtttgctccagggtttggggttgcgcagcaggtccgagagggtcccctgggagcggcagagcaccctctgcgcgaagatggcctgtgggatgctgtagcgcttgagctcggtggtgatacgctgcgccacctctttggtattgatctcttccatctgccctgaattacttccattgctgacctgcgcgccggtcaccgaagggttgggctcccgggctgtgcccaggagttgc

SEQ ID NO: 10148 - DNA, 622 bp, Homo sapiens
  chr15:53081398-53082020
  hyper
cggccgagcatggccgggtggtgggcttcgaagccgttgggggtgagcatcttgtcggtgggcatggcggcccccgggtgggcatagtgggggagcccttgctgggagttgtggatgctgcccagaccggagctggagaggggcgagaggctctggcccatgccggccacgtccttgtggtagggggtatagaggttattcatggaggccagcccgcgctcatcccgcatgagcgtgaagctaccgctcacgttgcccgccaggcgctggtggtggtgcgggtggtggtggtgatggtggtggtggtgatggtgggggaacttgtccgagactgtggagatgggaggcagcggctgcagaggggtcaaggtggtgtaggtggtgggcatgctcatacctgggggagtctcgcaggccatggtcatggtgggatgcagggggccggccaggctgtgctcaggggcccggtggtggtggtggtaatctccgccgccgctgccgccgtccagcagggacgccatgcccatggagcgcgggtgcgcggggggcaggtggctgccgcggtgcgccacggagctgcgcgcgtgggggctgccgcccagcaggtcggcaggggcgggca

SEQ ID NO: 10149 - DNA, 898 bp, Homo sapiens
  chr15:53082144-53083042
  hyper
cgcacggagtccggtcttcacatcggctgctggcgactgttgccttccttcctctcactgtggggctctgtctctctctctctctctctccgtgtgtgtgtgtccgtgtgtgcgtgtgcgtgtgtgtgtgtgtgtgtgtctcgccttccctcttaccccccaccttcccctctgcgtcctcggcttttttttttttaatattaatttccaaagaggatccgcgccgttgggagagcgcagtgccccagcccgcccgcctcggccacctctcgcccctctctttcttaaaattctgaggtctccggctcccctgccgcggcccgcgcgcctgccgcgtctgctgcctgcccgccccgctggccagcttgagccatggctctgttactgttacagactctgtggccgcggttcggtagccgccgccgccgccgccgcagcggcccgccctcacgcccgccaggcgcagcgcgcatgcgcgaggcccgcccccgccccctaggtcgcggcgcgccaggcccttggcgtcccggtacaaatgaaggagggggcccagcgccttccctgcggcgctggatggccagggagctgcgggcacgtgcgaaagattggcgcagagcgcgacctggggccgccgctgcaatcccaggagactcgcgcctggctcgctcgcctcccttgcttgagtgggctctgtcctcccagcccggggacgctcgtgtcgggcttctagcggctggagtgctgtgcttggagacatcgcccctctctctccagttgctgcttcccggtgcagcttgcccggggagctggggactgtgtcatcaccccttcggctctagcccactaagctttatttcccggggggctgctgggagtgcgctttcccacccttgaattc

SEQ ID NO: 10150 - DNA, 11 bp, Homo sapiens
  chr15:53083116-53083127
  hyper
cgttgacccgg

SEQ ID NO: 10151 - DNA, 121 bp, Homo sapiens
  chr15:53091057-53091178
  hyper
caggcccgagttcccatcccccactgctgggggtagagccgccaggtcccctccccctagctagggtcctgggcccttggaggcgaagctgagtgagggagaggggcgacccctggccgca

SEQ ID NO: 10152 - DNA, 242 bp, Homo sapiens
  chr15:53095808-53096050
  hyper
tgccaccgagttatcggtcagtgctgcgaggtcagtggcctgtgatcatgtttatagcaggtttggcttggatttggtgacacagccagcaaacctgggagattatgaaaccgtgaaccagcccagggaagtgtagtcaagtttcagtttgggcatttctccgggtgagggaatccggtgggctccatttctacaaggctcacaaacgcaggtgcagttcggccgccgcacgctgcctggcg

SEQ ID NO: 10153 - DNA, 15 bp, Homo sapiens
  chr15:53097777-53097792
  hyper
gggggccttttgggg

SEQ ID NO: 10154 - DNA, 166 bp, Homo sapiens
  chr15:54270542-54270708
  hyper
ccctctcggagctacgccgtgctacggcggcaggagagggagcccgggcgctctcggtggaggaggctggggatcgcagtgccggtgctgcattcagaaaagactcagccgcagccggcgatgtgtgaagttcccagcacgcactcagcccggctgctcctcaccc

SEQ ID NO: 10155 - DNA, 30 bp, Homo sapiens
  chr15:55489220-55489250
  hyper
tgttagaccagatgcgaacacgactgtgcc

SEQ ID NO: 10156 - DNA, 30 bp, Homo sapiens
  chr15:55582233-55582263
  hyper
cccattctggaaggcgctacaaaatatagg

SEQ ID NO: 10157 - DNA, 30 bp, Homo sapiens
  chr15:55611409-55611439
  hyper
ctgcagctttcttccgccttaggaaggtgg

SEQ ID NO: 10158 - DNA, 90 bp, Homo sapiens
  chr15:55699899-55699989
  hyper
atcatcatcaggctggcgtgctagcggaagtctccgggcattatttaatatttaatctttctattcctgacatcacgggggctcaaatgt

SEQ ID NO: 10159 - DNA, 961 bp, Homo sapiens
  chr15:55879821-55880782
  hyper
gggaggcgagggatccgcgcggatgtctcgggggccagcgggcgcccgggccgcgcgctcggatcgcagcctcggccccggggtgccggcgggacgcgggctgcgcggacttaggcccggacagagccccatggcctcccggcggccgggcacggggccccgcgcacctcactcaccccggttcccccaatccggcacccttctcggttacctcgaactctcttcagcgaaatgggatccttctcctgttctgctgacattacagaccgcaaagcatgactcccccccaggccgcgggaattcggtctctttgatgctgcggcggcggctcctcctcctcgcggggccgctgcggctgcgaggcaagcctcggagccgaggcacggccgagggcggtggggacgcgggccgactttgcaaagtttgggaggaggacgaggcctcggggcggcggggcggcggggcggcgtgcgggcaccggcggggctcagcggcggtggccgggagcgcggcctgggggcggccccccacccggggccggcatgtgctgagggcgagtgcgccgccgccgccgccgcctcctcccactccttcttcttcgccgccgcctcaggagccgctgacaggggaagcaggaggctcgcggcccggccctggcggcacactcacagcgccctctgaggaggaggtctgctctctcgccgctcccgagtcgcagacacaaaagcccccagactggagccgcctgtaaaacccgctctggggcgggcgagggacgtggcgcggccccgcggcttccccgccctgagctccccagccccgcgcggggacgggcttcggggggcgggggccgctgcctcgtcccgcggcgcctcccgccaccgccgccgcctcgcgctccgcctcggcccagcccccacggcccgcgcgcgcctcttgctccaagccggggctcgcgggc

SEQ ID NO: 10160 - DNA, 168 bp, Homo sapiens
  chr15:55880890-55881058
  hyper
cgacgctaccgggcccagctttcgcaaggaaagggcatctccgaacttcgtcggaggccacagcagcaggcgtctcggcctcgcagctagggatcggaaagatgaacgtaccatgcgaggaaactttgtaagcgggagctggagagttctcggcgggcatgtggggat

SEQ ID NO: 10161 - DNA, 157 bp, Homo sapiens
  chr15:56034565-56034722
  hyper
gaagccgcgaggaaccgcggcgccccctgcacggcgaggctgccactaaggaaacaatataaataaagccacgtgcagccgcggcggccccggcgggctggcgacccggagtccggccggtcgcggaggcgcggacgcggccggagccgggacaatg

SEQ ID NO: 10162 - DNA, 374 bp, Homo sapiens
  chr15:56034885-56035259
  hyper
cgcagggcgagagcgggggccgggggtcagcgccaccacggaggaccccgccgcgcgctccccacgccccatcgtttcctctttccccatcccactcgcgcccgctcccgccccacagcggtaagagaaagcagaagaaagcgcgcccacctggcaaaggactgagcagcagcaggagcaggagcgcgcggagcagcatccccggcggtcgcagccgggcgaggggtcgcagaggaggcgccattcagcgtagccgcgcgggcatgctccccggccgcccagagcccctgtccgtctgcggcccccgccccgggcgctctctgctctgcggctggtcgcacgcagcctggctccccgctccggctccggcaccg

SEQ ID NO: 10163 - DNA, 453 bp, Homo sapiens
  chr15:56285898-56286351
  hyper
ggcgagcgggcactagcggcacccggcagcgcggcgggaaaaggccggcggcgcgcgctcctggggctgggcgggggcgcgcgtggcggggctcggggagtggggagggcgtgcggcggggctcgggtgggatgagcgcgcgcggcggggaccatggcgtggggagcgcgcgtggcggggcgcgccctcggtcccttcccgggaggtgggtggttgacgggcccgccggggagccagggagcgccgggaagcgccgggaagccaagctgcagtgttcctcagcaacaagtctcgctgagatccgacccagagttcggcctctgactagacgcctgggaatccgtgagcttaatccccgcttaaatcccaaacggaaaatcatagcgctttcttgtcggttaagggtgtcattcccataagaagctggacctggggaccgccagggaaagcctg

SEQ ID NO: 10164 - DNA, 30 bp, Homo sapiens
  chr15:56535818-56535848
  hyper
ggggcgtttgaagacgaagtggggggggca

SEQ ID NO: 10165 - DNA, 30 bp, Homo sapiens
  chr15:57599111-57599141
  hyper
gcactgcccagccccgcgcccctgcccctg

SEQ ID NO: 10166 - DNA, 66 bp, Homo sapiens
  chr15:57668712-57668778
  hyper
cgggctctgctggctgcggcgggagctggacgcgggaggaggcggcggcggcggtgagtgagctcc

SEQ ID NO: 10167 - DNA, 30 bp, Homo sapiens
  chr15:57669150-57669180
  hyper
ctgacctatcctgtcgtacacaagtcctcg

SEQ ID NO: 10168 - DNA, 43 bp, Homo sapiens
  chr15:57884056-57884099
  hyper
ccgccccggcccggcccggccccgcccccggccccacccccgg

SEQ ID NO: 10169 - DNA, 30 bp, Homo sapiens
  chr15:58358760-58358790
  hyper
ggagctgcatgcttcgtgggctcctttagt

SEQ ID NO: 10170 - DNA, 30 bp, Homo sapiens
  chr15:59042267-59042297
  hyper
atagtgctccgctacgtgttagagctgctg

SEQ ID NO: 10171 - DNA, 30 bp, Homo sapiens
  chr15:59225888-59225918
  hyper
cccctcccccggtccgccaccctagcgcaa

SEQ ID NO: 10172 - DNA, 40 bp, Homo sapiens
  chr15:59396924-59396964
  hyper
gcatccctgagcaacccggaggggccggttcctgcaccca

SEQ ID NO: 10173 - DNA, 454 bp, Homo sapiens
  chr15:59397169-59397623
  hyper
gaaaaaacaccccaaccggctgttgtgacaatcaaacgtgtctaagaaaattcagccaatgagagtgcgagagtgcatcttgtgttggccaatgagaacagcgacccgtgcgcagggccgcccaatggggcgcaagcgacgcggtatttgaatcctggaacaaggctacagcgtcgaagatccccagcgctgcgggctcggagagcagtcctaacggcgcctcgtacgctagtgtcctcccttttcagtccgcgtccctccctgggccgggctggcactcttgccttccccgtccctcatggcgctgctccgacgcccgacggtgagtgtgcccggggaccgctctcagaggcgagtccgtcggccccacagctcccctgtcgcttctctcatctgctccgagcttctccgtcccaaccggggctgcttttctcttctccggagctcactgctt

SEQ ID NO: 10174 - DNA, 49 bp, Homo sapiens
  chr15:59664056-59664105
  hyper
ctggctcttgacagcccgccggccgccaggtgctcgccctacctggcgc

SEQ ID NO: 10175 - DNA, 80 bp, Homo sapiens
  chr15:59664618-59664698
  hyper
caaggtgggtgcaccacgccggggtttcctgccccgtccccgggtccggcgtcctaggacgcggcgcggccaactcacca

SEQ ID NO: 10176 - DNA, 30 bp, Homo sapiens
  chr15:59729538-59729568
  hyper
gatgaggcaaaggtcgtgtcccccgcaact

SEQ ID NO: 10177 - DNA, 30 bp, Homo sapiens
  chr15:59915561-59915591
  hyper
tctcaaaaagcaaaaacaaaaaacccacaa

SEQ ID NO: 10178 - DNA, 541 bp, Homo sapiens
  chr15:60287044-60287585
  hyper
atttgccttcgagctcgctaagaaagtggcacctggttggtggaggggagagataccaaatgtcggcgcccagcctgaaataagtggcatgggacgcgcagggagggcgttcagcttcagaaagcagcggctacgctgggtccaaacccggcggctcgggaggccatagctcctaggtgcgtccgagctcctgctaccctgcgcggtgttgtcctaccggaggaagtggctgatgggcagtctaggatcccggcccctgacccagggccctctcctccctgcggtcctggtccgggtcatggtcccggggctggtctgaagtgctgtctacagagggcacttggggaaacatcgtaggtccggaaattcccagggaaagtttttgcaggagttgtggacgccgcagcagccccaactctcccaacccagcttgcgacccgagagaagtcgctcacacttctctttgggggagggcgacagttccggggaggacgcttggatcccgaaaatgacgggatccaggtcccacaaccctcaggaa

SEQ ID NO: 10179 - DNA, 28 bp, Homo sapiens
  chr15:60287643-60287671
  hyper
cgagtccagtgcccgtgccggggagcat

SEQ ID NO: 10180 - DNA, 358 bp, Homo sapiens
  chr15:60289304-60289662
  hyper
caagagtcagccaacagcccccgcgctgctagagcgcccaaagcagaggccggccgcgaggagggccagagtgcaccgcgggggggtttgcaccgcgctggggttggcaccgcgcgctaggacccacgaagcggcgcgctagtcccaggtgagcacgaaatgagcggaaggactctgccgcggaggggcggcgagcgcctggctgcgctgcaggccccgccaagccccgccccctagccattcttagctgggggaggccagcacggatcagccgctttctttcttttctctctttctttttcaaacccgctttgtgggtggcaactcagcgggggacgcatggagacaagaaaacaaa

SEQ ID NO: 10181 - DNA, 30 bp, Homo sapiens
  chr15:60292040-60292070
  hyper
actccaaaggcagtcgtgggagagtcgtag

SEQ ID NO: 10182 - DNA, 503 bp, Homo sapiens
  chr15:60296114-60296617
  hyper
atttccatgtcaaacatcatccgcgcggctgctccatctgtgaacgtgagtggtcgcctggctccctcttccgcggcggccgcttcctcataccttcacacggcgcacaccggccggcgcgtccagctgcctgcccagtggccgaggctcttccccctcgcccagtcttgagctggaagtgattcctattggccaaggtgtccatgtaaataggtgtgaaagaaaccagagctggccgggctctcccttctcgctcagtcccctccctctgcagcccccgctccccctcctcttcctcctcctcccaaggcgattgtcatatgatagctaagaagtggcacattaatgaagcgccgctacaggggtcttttctgctcctgtcaccgcttaaaactatcagatggttcgagggaggacatggaggcagccacctagctcagcggagacgcggagcccacagcagcgccctccggagccctaacacgtcgctgccaccatccgcg

SEQ ID NO: 10183 - DNA, 63 bp, Homo sapiens
  chr15:60296860-60296923
  hyper
cgtccctgccccctattctggccccagtaccgacttacttcccggctatcctcgcgccgttcg

SEQ ID NO: 10184 - DNA, 675 bp, Homo sapiens
  chr15:60297151-60297826
  hyper
cgaggaagaagatgcctcggcccggccgcaacacgtacagcgaccagaagccgccctactcgtacatctcgctgaccgctatggccatccagagctctcccgagaagatgctgccgctgagcgagatctacaagttcatcatggaccgcttcccctactacagggagaacacgcagcgctggcagaacagtctgcgccacaacctctccttcaacgactgcttcatcaagatcccgcggcggccggaccagccaggcaagggcagcttctgggcgctgcacccaagctgcggggacatgttcgagaacggcagcttcctgcggcgccgcaagcgcttcaaggtgcttaagtccgaccacctggcgcccagcaagccagccgacgcggcgcagtacctgcagcagcaggccaagctgcggctcagcgcgctggcggcctcgggcacgcacctgccacagatgcccgccgccgcctacaacttgggcggcgtggcgcagccctcgggcttcaagcaccccttcgccatcgagaacatcatcgcgcgggaatacaagatgcctggggggctggccttctccgccatgcagccggtgcccgctgcctacccgctccccaaccagttgactaccatgggcagctcgctgggcaccggctggccacacgtgtatggctccg

SEQ ID NO: 10185 - DNA, 348 bp, Homo sapiens
  chr15:60297941-60298289
  hyper
cgtgcccattaagcccacgccggccgccgtgcccgcgctgcctgcgctgccagcgcccatccccaccttgctctcgaactcgccgccctcgctcagccccacgtcctcgcaaacagccaccagccaaagcagccccgccacccccagcgaaacgctcaccagcccggcctccgccttgcactcggtggcggtgcactgacccgcaggagcccacgccccctctcgttctcctccccaccacctcactcgccttccctggctcccagtcctgccggcccccacctgggaccgccaccctaacttgttcatttcaccttcggccaacccgccttgccccaagagaacttt

SEQ ID NO: 10186 - DNA, 39 bp, Homo sapiens
  chr15:60690304-60690343
  hyper
gtgactcaccccggcccgccggcccgcagggaccgcgcc

SEQ ID NO: 10187 - DNA, 92 bp, Homo sapiens
  chr15:60884799-60884891
  hyper
ttacaccgcgcccctccgcttcctcccggggcgggaggcgggaggcgggaggcgggaggcaggcgcgccccagcgccgcgccccgccccgcc

SEQ ID NO: 10188 - DNA, 554 bp, Homo sapiens
  chr15:61519490-61520044
  hyper
gcattccaaatccaccgtctcagggtctaaatatactctttgcagccaaaagctccccgcacacaaactcaccgagctagcggcaggtccaggcccccagccctcatccccttcccttttgtcccagccctcgccgcccccctcccgctgaaaccgcggttcgccgcggtcaccctttggaaatcgcctttaattaaatgtttttcgcgtgtgtcatcctgatggcttttactgtactcgaattccgtgaatgggaaagcgcctggacagggggtgtggctaaggtggggggggggatactgtaaaacagccagcacatgatcagccatattcctacctccaactacaacatcgagaggaagggagcagttcctggggcccccattcgcctctacccagccctccccaaccgccgccagaagccgagtgcaagaggagggggcgcgctgggccggtacccaagccggggctggagaaatcctctccgtccccagctccaggcggctcgcgcgagcacgcttcctccggagtgacaggcgcgatttatacattat

SEQ ID NO: 10189 - DNA, 146 bp, Homo sapiens
  chr15:61520408-61520554
  hyper
gcttgcttttgtagacgctccctccggatgcgcgtggagcgccccacaggaccgccgccctctgcgcgttggcgcgcacacgccccccgccagcctgggcgccgggctccgaacccccggtctgcaaacttgcgcatctcccctcg

SEQ ID NO: 10190 - DNA, 589 bp, Homo sapiens
  chr15:61520576-61521165
  hyper
cgaacagctcgcccgcccgcaccccgcttccttcggcccttccttcaaatcccaaacgcaccgccgtgctccaaagaaggtgtccacgtcgcccccagaccccggagcgccccctctccacccccgggacttcccaggtcgctcactcctcccgccccccgcccagatctgagagggaccgaaaacacacccccgactcgggcagccagggccgaaactgtcaagaggagaaaaggtaaagcggaaggagggtggccataaacagatttttttgccccttcttaaaaggacactgccgctttaaaagtttctttcccgggcccccactccccgcatctccgtattttgggggagcgtatttaattgaggcaacgcagctttcctccagtgtttgcagaaaaatcaaagccaggggggtgagcccgccggctgtcaaccttcccgccgcctcccccgccccactctgctcccgcaagccgagaacgggctgcaaaagtttgcaacatttctggggggcggaggggggaggggaggggggtcctccgggctcggggcgccgccgcaggctcgcgcgcggccgccggacccc

SEQ ID NO: 10191 - DNA, 196 bp, Homo sapiens
  chr15:61521424-61521620
  hyper
cccaatgtagagatcgctggagatggcgagctccgagactccctctatcttctgttttcagagcaactctatggtaccaaaaaaaaaaaaaaaaaaaaaaaaaaaaaaaaaaaaaaaaaaagaaggagaaggcgaccggcgaaagcaggagggaaaaagcaggcggcggcgggcgggcaagcaaaagcgcgaggga

SEQ ID NO: 10192 - DNA, 74 bp, Homo sapiens
  chr15:61521656-61521730
  hyper
cgaaaggggacaagaggcgggtctggccacaggcagcgctagcgagagcttctccagccggcccccacacccac

SEQ ID NO: 10193 - DNA, 488 bp, Homo sapiens
  chr15:62358991-62359479
  hyper
acctccacctgaagccggagagagaaagaactgggtctccaaaccttgctcagcaaatccagccacgtggcagagggacagggaagagcctggcgtcaggttaccaggcagcgcccctctgctcggcccactggcaagcgctcccagcggcaggtataaaagctcaggctggcagtccttgaacactggtgctgaaccccgccgcgcgcgctttgaatttcccagccgctaagcgcctctcctggtcggtgtcccaggcagaaaggtgcagagacccatctgacgcaggactccaggtattttaggagggacccatcggcttgcttaattccctgggggattcgtctgaggctctttgcctctgcaaggggagaaccagccacagtttcccggaaggaataacaattactttaattctagctgaggactagactgctatggtccaaagagtcaggaaacgattgcaaggcaatcgttggcacagagaa

SEQ ID NO: 10194 - DNA, 86 bp, Homo sapiens
  chr15:62359847-62359933
  hyper
gtgccttcggcggagcggagactggcttctcccgggtcgggcccgcggagccaagtctcgcaccaccgccgcgtgcgcaaatgtgc

SEQ ID NO: 10195 - DNA, 710 bp, Homo sapiens
  chr15:62456255-62456965
  hyper
tgcgccccaccacagcgctgcattgccaacgcgcagtgcccggcggccgcaggacgaggctgaggcggcagcggacggcgcggggcccgggggcgcctccgaacaggctctccgcgcggagcagccggaggcggagacgccgggttcccggacagtactcagcagccaggcgcagggcgtcgccggcgcggcccagagccacggtgcccttggcctccaggcgctcaggaagcggggccctggatgacagcgggctcgaggagggggcccgggccggggactcggatcccgcgcggcgctcctcgtcctcgttcccgctggagacggagcggacgcgggccaggcggcgactccttccagcccgcagcgcgcgactcagcagcccgtcggggacgcgcaggaggcggcagcggcggggccccgcagcgagcgcgtcctggggcaggcggggaccgccgggggccgcgggggtggccgggcccggacctcgcgggccgcacagggtccccaggggggcgtccgggcctccgccgccgccgcagctgtgggcccggggccggggcgcgggcgggcccccgagcaggagcgactccttgcggcgcgtgtgcgggctctcgagcagcgcgcagaagccgtaggtggtgcgcacacggggcaggtgcggcagtgacagcgctgcctgcgagcgcgggtcccagtccgtgcggccg

SEQ ID NO: 10196 - DNA, 334 bp, Homo sapiens
  chr15:62457008-62457342
  hyper
cgcagcgccggggcacggcggcggcccggattggagactcgagcgtgcaaggggccggcagccgcggcgggatgcagaattcggggatgcgattcggcgtgagcactttggcgaaggcgggcttcggcgcggagctgcctgcggccgaggaacagagtttctcgaggagccgcatccttggaggctggggctaggagtggcgggaagaggtgcgcctgcgggggagagaagctgctgagtttgggcgcctggagctgctgcagcccctcgacgcggctggatccctcccccagaccctgtaaacgtcccccacgtgtttaagaccccagaccag

SEQ ID NO: 10197 - DNA, 54 bp, Homo sapiens
  chr15:63130455-63130509
  hyper
tggacagccacattgccgctgctagggatgcagggattccggtcactgcccctg

SEQ ID NO: 10198 - DNA, 30 bp, Homo sapiens
  chr15:63334688-63334718
  hyper
gcggcctctccggccgccgcctcggcggct

SEQ ID NO: 10199 - DNA, 30 bp, Homo sapiens
  chr15:63335994-63336024
  hyper
gacagcctcctggccgccgaagaggccgcc

SEQ ID NO: 10200 - DNA, 31 bp, Homo sapiens
  chr15:63341572-63341603
  hyper
tcttggaaaaagttggcgaaatgtcaacagt

SEQ ID NO: 10201 - DNA, 35 bp, Homo sapiens
  chr15:63448917-63448952
  hyper
cctagaaaagggctttcgcacgatcaggaaacata

SEQ ID NO: 10202 - DNA, 30 bp, Homo sapiens
  chr15:63449567-63449597
  hyper
acaaacccggagcccgatgtaaacaactca

SEQ ID NO: 10203 - DNA, 858 bp, Homo sapiens
  chr15:63795379-63796237
  hyper
aaggatgagcagaggtgcccccggtgggtggataccattaggcagaggtctatgcggaagaggccgacttgtggcgtgggaggtagggaggagtaagaagtgattgacggggcgtccctggctgctctaggactgcattgcggggaggtgcccggctctaaccactgcccggcccggttaatcatttcctgaccttccttcctcctctcgctctggccgcaggattgccacatcagtcttccccctcctcctgctcgccttctggccccgaggctccttcgccgggttttacaaggagccccaacttggaagcaatatttgtaatagccccggacgtcctcaagtgccccagtgagatcgcaggctcgatccagggtatgccggcccaagcggccccttgaggcttgccctcttctctaatccctcactaaaaagaggtcagagggtcagggatccaatctccatacagatcaacaagttacagactcggtttccccctgcggtaaaaaggggatggtaacagctggtagggtgttgcgaggcttaaatgcggtatgggaagtgcctggctgggagaccttaggtatctaacaaatgctagatcccttcccttcttatcgcctggtaatggggagtttagcttgcccagcaatcccaggctacgtttatctcacttgaacttcctggcttgaaagtcctacgatgtgctggaggtaacgcagatggtgagtcacagtgacaggatttgaacgtgggttcatgggcgcccctgcgggcccacccacgcagcatctaggtggctggctaacgccacgtgttcagaacctagaaagggctacggatcgcacctgccgcaag

SEQ ID NO: 10204 - DNA, 30 bp, Homo sapiens
  chr15:63902646-63902676
  hyper
attaactcctagaacggcaggagtagccca

SEQ ID NO: 10205 - DNA, 57 bp, Homo sapiens
  chr15:65067771-65067828
  hyper
ctgcgaccggcgagtgcgccgcggcggcggcggcggcggcagcggcggcggggggcg

SEQ ID NO: 10206 - DNA, 30 bp, Homo sapiens
  chr15:65068311-65068341
  hyper
cccctaaatccagtcgcgcagacctcagct

SEQ ID NO: 10207 - DNA, 30 bp, Homo sapiens
  chr15:65281789-65281819
  hyper
ggtcacaagcacaccgaccaccccacagcc

SEQ ID NO: 10208 - DNA, 30 bp, Homo sapiens
  chr15:65321888-65321918
  hyper
cctcccacgcctggcgccatgagccagcgg

SEQ ID NO: 10209 - DNA, 30 bp, Homo sapiens
  chr15:65360351-65360381
  hyper
ccggtggagcctggcgggcggggccacccc

SEQ ID NO: 10210 - DNA, 1278 bp, Homo sapiens
  chr15:65669326-65670604
  hyper
ccagggcaaggtctccgcgtgtgcacacttcggggaagggcaggggcacgtgagcatccccgcggctcgctcgctctcgctttcggtggcttctcctctccttcttggctcacgggctctgtcccgggtcgctccctagccacgcgccgccctccaggaatctccctcgtcttctcctgtctctcccgcgcactcctcagcccagtaccagctccaaatgcaggtcgtgccatctccgcccagtgcagccgtcagagtcccggtctccgctccccaggctgctgtcccctgtcttggctgcctcgggctatgtccacggccgggcacccagcaccccagctcgtccgcctcggtcagcgcttagccttgcggtctcccctggctcgtttccctcggtctccacgccagcccgccccgcttgctcccgcttcgctgcactccttgctcctcagtctgggctccgggtcctgccccagtcttcctccggggggttccgtcctcaacacgcccctagggcccccagcagtccggccttggtaccctctccccgtccggatccgcagggtcccccccgcgcggggtccgccctcaggtccgcgccgctctccccgggtccgcccctcgcgcccgctccctccctgctcgcccttcccctggctccgtccgcaaccgcccggtccggggcgctttcactcaccctcgctcggcgcgggcagcagcagcaacagcagcggcagcaggagccggggccagagcggggcgggcgggcggcgcggagacgcggcgcgctgcacagccatggggctctcggtcagctcggctcggcgacgcgcggctcccgggcctctcgcggctcacagcgtcccgcggggccggcgccggggccggggctggggctccggccggggccgagcccaggcggtgggggactggggccgcatgcctgctcagcagcgcggggggcgcagggggagcgccgcttgcgccatcttgcacccacccgggcgatctgtcagcctcgcccggggtgcgcgctccacactcgcaccgctcgcggccgccccgccctcctccccagcccgccgcccccctcctctctgctcccggtcccctcccccagccccctctccccggaggcccggtctggggaacaaaagagccggcgagcgctttaagcggccggacattcccggctgcgcggcggacgcgccccctgcgctttgaactgtggctggagcggccggcgccgtcccgggctgcagccgggtatcccctccc

SEQ ID NO: 10211 - DNA, 30 bp, Homo sapiens
  chr15:65714802-65714832
  hyper
ccgatgccacgccgcgaccatggcacgcac

SEQ ID NO: 10212 - DNA, 30 bp, Homo sapiens
  chr15:66084909-66084939
  hyper
aagaatccagttcgcgccaactgacctgtt

SEQ ID NO: 10213 - DNA, 30 bp, Homo sapiens
  chr15:66586009-66586039
  hyper
tacctgcggccctgcgtgccctgccacagc

SEQ ID NO: 10214 - DNA, 66 bp, Homo sapiens
  chr15:66586476-66586542
  hyper
gctgcgaagctgacatcgcctgctttgcagccacaggtttcctgacctgcccgcactgttgcccca

SEQ ID NO: 10215 - DNA, 30 bp, Homo sapiens
  chr15:66648673-66648703
  hyper
tttctacattgacacgccccggacagaagc

SEQ ID NO: 10216 - DNA, 30 bp, Homo sapiens
  chr15:66679085-66679115
  hyper
gtgcgccgcgctcccgtgacgtatttccgc

SEQ ID NO: 10217 - DNA, 31 bp, Homo sapiens
  chr15:66911653-66911684
  hyper
ccaccagatggccccacgccggccactggac

SEQ ID NO: 10218 - DNA, 352 bp, Homo sapiens
  chr15:66992919-66993271
  hyper
cctgctgttcgcttgcgatttgtgcatttaacgtgcactatctccagggaccttcgtggttctgtgaagcacgaagggcaagcatcctcatccgcggtttcaaacaagaaactgaggctaggaccgctactttaatttggccaaagtagtaggggatgggtgtgaggaagtgtctcagtccgatctttctttcggggagcaacggccactctcagagagcgcagcgcgaacagtacctggttccaggtaaagctcagcaaagggttctgaatcctccttgcaaatgccacccttcccccagcgcacacagactctgggcacggccgggggttcgcaccgccgcgcactcccc

SEQ ID NO: 10219 - DNA, 40 bp, Homo sapiens
  chr15:66995092-66995132
  hyper
caacaagcctgcctttcggatcctgcgggaaaagcccatg

SEQ ID NO: 10220 - DNA, 500 bp, Homo sapiens
  chr15:66995364-66995864
  hyper
gcggactgcggctcggcgtgcgcgtgttcccggccgtcccgcctcggcgagctccctcatgttgtcgccctgcggcgccccttcgacgacaggctgtgcgcggtctgcacggcgctccgcggcggagcttcatgtggggctgcgacccgcgcagccggcgcctcgctgagggaacggacccccggtaaccggagaccgcctcccccccacccctggcgccaaaggatatcgtatgttcaggtccaaacgctcggggctggtgcggcgactttggcgaagtcgtgtggtccccgaccgggaggaaggcggcagcggcggcggcggtggcggcgacgaggatgggagcttgggcagccgagctgagccggccccgcgggcaagagagggcggaggctgcggccgctccgaagtccgcccggtagccccgcggcggccccgggacgcagtgggacagcgaggcgcccagggcgcggggaggcgccggcgcgcagggggccccc

SEQ ID NO: 10221 - DNA, 30 bp, Homo sapiens
  chr15:67547279-67547309
  hyper
atccaggtgggaaacgggcttcccccggcc

SEQ ID NO: 10222 - DNA, 30 bp, Homo sapiens
  chr15:68112705-68112735
  hyper
gagaagcgcgcaaggcgcagctcgcatcca

SEQ ID NO: 10223 - DNA, 797 bp, Homo sapiens
  chr15:68113276-68114073
  hyper
tattaacccgccggacgccggcccatagtagagccccagctcctacccccacgacctgctccccggtgcccagccctgagcagcggggcttccccagcctctgtccacgcgcctttctccagctcagaccagggacaggagctgggtgggtctcctggcactggccagagcgcggggagctgtccgtagcttggtgctgaacggggacgcagagtcgacgctgcacaccccctggtgcggggcggtaccctttgtctaagaggtcctgggggccccccgcggccgggctgctggaaacggaggcgtctttggccctcgctgtacaacagaggcaggacaggcaggtcctgctcagggggacccagcccatcctctctttcctcccaccccccggcaccctgggggcgtcctggctccaggatcgttgtcaccaccaggccgaattctgagatgccttttaaaaaatcattaggaggctaagaataattaccgaacgagattgtaattatggggtgggggagcctgggccgagggagagggaatgagctggcggggacttgggggcagctctcggactgggaaggaaaataggttcctgtgttctccccggggaaggtgtgggaggaaagacagcgggatagttggagcgggacagaggcacagcctgggaaagacacccgaatggaggggccagaggcagaaagaaaggggccgagcgggttccaggactcccctgggagaaaagggaaaggcagggagatccgagacagaaagaccggaaccgaggagggggaaga

SEQ ID NO: 10224 - DNA, 694 bp, Homo sapiens
  chr15:68115505-68116199
  hyper
ctggacgcaggtgtgcggccgcttacctggggcgtgcaggccttgggctgcggggaggcggcgggcgccgcgcgtggcccgcgggcgggcggacccggggagggcgctagcgactgcgcgggcggtgggtgtggcgccccggctctcagctgtcaggcgcgcctgccccgccactcgggctgtgaccgcgccgtccccgccgccgcgccatgcgctccaggcttcggcctcttcttccggccagtccccggcctcggggtcaacggctcagggttcgcatctccgcgcccggggtcccggcgccccgtgcccgctgagagcgggaggggccgcgggtgggagcgcggagaaccagggagcacggctgtgcgcgcgcgcggggaggggccgcgccgtcacccggagagcccggcggatcccggactcccgcccgccgctcctcccgccgcgcacctccgctcaccgctcgcccggctccagccgccgccgcactgtgagtacccacgtccggtagcccgccgcccccgcgctctgctcctgcagcttttttttcgtttagttctgatttgggctcctgtggctgttgtttttatgattatacctaaagacaccaccgcctcgctcccaccactgccagtctcccgcttcgctgccctccccaagctcgtccatctagctccgggagccgacgggg

SEQ ID NO: 10225 - DNA, 30 bp, Homo sapiens
  chr15:68116455-68116485
  hyper
gctgtcatttcccagcgctgcgcgccctcc

SEQ ID NO: 10226 - DNA, 30 bp, Homo sapiens
  chr15:68118112-68118142
  hyper
tgagtaacaaaagacgcctgtccagggggt

SEQ ID NO: 10227 - DNA, 774 bp, Homo sapiens
  chr15:68119578-68120352
  hyper
cgcagcggcagtggctgcagcggccgccgccgccactgtgtacccgacgtttcccatgttctggccagcagcaggcagcctcccggtaccgtcctaccccgctgctcagagccaagccaaggccgtggcggcagccgtggcggcggcagcggcggcggcagcggcagctgctggcagcggtgccccagagcccctggacggtgccgagccagccaaagagagtggcctcggcgcggaggagcgctgcccgagcgctctgtcccgcgggcccctggacgaagacggcacggacgaggcgctgccaccgcccctggccccgttgcccccgccgcccccgccgcccgcacgcaaaggctcctacgtgtcggccttccggccggtggtcaaggacaccgagagcatcgctaagctctacgggagcgcccgggaggcgtacggcgcggggcctgctcgggggccgggacccggcgctgggagcggcggctacgtgagcccggactttctgagcgagggcagctccagctacaattccgcctcgcccgacgtggacaccgcggacgagcccgaggtggacgtggaatccaaccgcttccccgacgacgaggacgcccaagaggagaccgagcccagcgcacccagcgcagggggcggcccagacggtgaacagcccactggacccccttccgccacctcctctggcgcggacggtcccgcaaactctcccgacggcggcagcccccgcccccggcgccgcctcgggccacccccagctgg

SEQ ID NO: 10228 - DNA, 328 bp, Homo sapiens
  chr15:68120630-68120958
  hyper
cgcgctgcgaaactgggcccacccgcaccctccagtgagggtttcgaagggaagggaagctgggggcggcgggaggactggggaacttgtgtgctttgtttttgttgatgggaatggggaggagaccggctgagactgccagacacagagacagaaaaggggtgtggagaaagaaagaggaggtaagaaaggaacccagagccagagaaaagcgctcgcccgggtgggcatcagagccccaaggaagaggagaagagaggacagtgtggcctctccctgagtcgggccccagcagtaccgggtccccggaatctcccaccaccccaac

SEQ ID NO: 10229 - DNA, 576 bp, Homo sapiens
  chr15:68121149-68121725
  hyper
cggttcattaaaacacgaatcattaaccggatgcgaaaggcgtcatttatgccgcggacggggcactggcgggagggaaaatgcctaaaaggaggcgggtgcagagggtggaggacactttgaacgcccctcggcttgggagccgctttgtgtttagagtaattttcccgagggcgctaacaattaccctgaatctacaagggggcaagggtgcgccgcgtgcgtcactgtgcccgctcaagtccagcgggcgcaccaacctttgccactccgtcggctttccctcttggccgcggggtagggctgggcgtctttgggccgccgcagggcgccaccctaatcgcctgtcatttctcggccgtcgcaggtgttcgcgcccgagagggatgagcacgtgaagagcgcggcggtggcgctggggcccgcggcctcctacgtctgcacccccgaggcccacggtaacgcctgtcgcggccgctggccactgtaatgggggaaccgcagacagagggccggggtcaaggaaggcctgcgaaggaagacaaggagagagacgcagagaaagagggagaggga

SEQ ID NO: 10230 - DNA, 495 bp, Homo sapiens
  chr15:68125261-68125756
  hyper
aattaaaaatcgaggcgtaaaattacctgggaagtaatgcctaagtttgctttaattttggttagatccatctgcctttaagcgccatcccaggccatttccttcctccgccagtctgcagttaggagctccggtaccccctcccccatccctggagttgtttctgcgcggagcttagccctggggagaggaggaagcccgggctgtgaccccggcctttcggagggtggtctgcgtttcctcactggcccctccccttgtcttccagataccctgtgtaacgaactcgaccaggagcggaaggcgcgctatgccatccagcagaaattgaaaggtgcggaagccgggaaacaaagataggaggggtgctgggtgccggccgtgctgtcgactgaatgaatgaatagtgggactagtgaggaaggccacgatccacgtggatcaggatctgtgagggagaaaagtgggaactgattttaacgggaagattattct

SEQ ID NO: 10231 - DNA, 504 bp, Homo sapiens
  chr15:68126049-68126553
  hyper
ccagagtgaccctcgcgactgtctccccagaagcccacgacgccctgcaccatttctcctgcaagatgctgacgccccgccactgcactggcaactgctccttcaagccaccgctgttgccctagggccggcctggccgcacccctgcgccctcaagccatgctgctccttgtaaatacccgctgctgcggtggccctgagcgaggaacaagccattcggacccgaccgatgtaaatacagccgcccgtccgcccgccttcctcccgggctccccggccttgcccgccccctcccgggcgtccctgtccagggccccggcttggtttccaagtgtaaataccgcctcgcgcctcaaatccccctaccccgtgtgaactctagggcatcggacctcaaggggttaactggacagacggggggcgggaggggagagcgccccctcccattgtatagccttgaacccgattgtgaatacaatgtagcaacttcgctggcgcctgccc

SEQ ID NO: 10232 - DNA, 1700 bp, Homo sapiens
  chr15:68126935-68128635
  hyper
accggcggagcggggcggcggaacaccgtgcaacaggtgggggtgggagccgccccgcgggttctggggctcccagggtcagaatcgggcctgctcaagtgggcagcagcgagcactcaacctctccactgtgccctccagacacactcagttttcccccacagggcactccctctccgcgtttaggaccctcccttgggcccggaatggaggaggggcattacgtcacggtccttagcgcagcggtcccgggctctttcctcaagagctcgaaggcgccgagggttcatccatgcccatttccacgcctgccacaccggggaagttacctccggggcgctcacagacagggcgccctgccgggaatcccaggttcaaccagaattgtccctttagatggcgcgggcaccgccggcctggcctggcctgggagcgctgcggcagggcggaggtctcagggagtaaggtggtctccgccgggcaggcttggaaaggaaggcgggacttggagagctcggtcacagacggcctcccgtctgccccgccgctacccgaaaggagggagccccgtccgcattttctgttcggtccattttagttcgagaggggctaaggactcgccgggcctcggctggggcgtccgacgtccgggtcacggttggcaaggcctcccagcggcctcagtttccacagcgcacctcctgcttgggctacagacgacgctgcaaattgcagaacactctttgcagggaggagagtgtggatggagtgggagagagctcacggcacagggaatcattcagccttggctttcatttctcgccctcggctggctagtgggggtcccgggttgagcccttcttttatctttcctgggtctccgtttcggcctctatgaaataacacgcaggcctccgtccatgcggctcgtagaaggcgggcggcaggccccgcgccaccggccagcagctcgggaccgggagccctgggctgagggggccgggaagtttcgtggcgggttgtcttggtgggccttggacggagccggctagtaggggcgtgctctgggcctccccgaagctgtgcagacgaggagtcccgctgcgcggtacagccaggaagccagtccctagagtcctttgcgctgggggtcggagccttggagtcccaggatgttccgacggctaagaccagagcggacacaaaggagataacaatgaagagggcgccggcaaatggcgaagcatcgcctccggacaggccatctccgggcagggcccctctagggagcgggaacgtttcatatgcatgggacccaccagatccgctttccgctggaccggtggcgaaactgaggtccagagaggaagagactggagtctccaggccgcgccagggcccgcggaactgcgacggggcgggacagcgcgggtgtgggagtttgccggcccctttccccaccgcggattgcacctttggaagctgcacttttcttctctgtaaaatgggcatcaccattaccacccaggcaggaagttccgtggctgcggctcgacagaggagccaggcaaatgctccttcccacccttccttcccaactccccccaaagtggaaaagctcctaggcagctggggccctccggaagggacgccccatctgggcaggaatctctgcggactggagtcgtaggcggatccga

SEQ ID NO: 10233 - DNA, 280 bp, Homo sapiens
  chr15:68260480-68260760
  hyper
catgcaaactaggatcattttcgggcgttggggcccccccgcttgaaatctggtttccatgttcacaaaacgcagcccgactggtggaactcgcgactccagacgcagagaagctgtgggcagaggcggaggcagagggtgggaatgcagcctggcgttggagtggggagaaaggggagggaggaaccgcgcgcccaggccccgcccggttgcctaggtgacggggagcgagaggaagaagtgggggctgagctgatccgagcatttcagatcttaatac

SEQ ID NO: 10234 - DNA, 41 bp, Homo sapiens
  chr15:68521277-68521318
  hyper
tcattcattctctggacggcagcttccgcccttccccgctg

SEQ ID NO: 10235 - DNA, 30 bp, Homo sapiens
  chr15:68570803-68570833
  hyper
gtgctgactctggccgccttgcttctcaac

SEQ ID NO: 10236 - DNA, 592 bp, Homo sapiens
  chr15:68723494-68724086
  hyper
cggggccagggtaccctagggcggagagctcagggctggcttcccgctcccagccgcgcgcccctcgggccggaggttcctgccgcgccccgacacctggagtgcattaggcggcggcgcgcgtctaggcgacggcggctttccccagattattgaataattgcataattccgagcgcgggttgggaggcaatgccgggtccctaccccgggtgtcaggtaacgtttcgggggtcctgcgctgcgcgactgtgtcccgccgctgctggccgggcagacgagagctagcccccgcctaccggccatcgccccggggctttgctctgtctttggccggaggcactctgcgcagccctcacccccacccttcagccctccggggccgccgcgcccggctctccaaactttgagatgcttccccggagccaggcaggagggcagccagggcacactctcttggcgctgattcccttccccagccggggccgtgcgccctcggcgctcccgggacacccgagtgcccctggcagccgtgcgggaaccccggcatgggccttggaggcacctaaggcgcccaggagggccaccagatc

SEQ ID NO: 10237 - DNA, 305 bp, Homo sapiens
  chr15:69114201-69114506
  hyper
tatagacctagtgaaagagaacggcgcacggtttattctaatcgtccacctgagtcattcggttcggtttgggttgccaaggaggctctaactggagccctttctcctggtttttcggcgtggttgccttgggtatttttgaatcacattaagttttaagagaccttaaagccccgatgcccactgggttaccgacttacggcactaagttggctgcctgtggctgttaataaaccacggggattgttgtcaacgaggacagatacatccttacctttccacacgactgtattttagtgtttgtt

SEQ ID NO: 10238 - DNA, 246 bp, Homo sapiens
  chr15:69136218-69136464
  hyper
ccacacacatacacacacacacgtgtgtgtgtttcggggctgctcaggaggacaggcggctctgcgctgcggctgtggtgggctccgtgcacaccgcgctaggctcatagggcggctggcaggtccagagagcggcgtgggagcagctgctgccacggtggcagcggagatgaaggtgtcagcctgacgcgggcggctcctgagagctcgctggggcgcctcagcgactctcacatctgttcagca

SEQ ID NO: 10239 - DNA, 31 bp, Homo sapiens
  chr15:69351241-69351272
  hyper
ccaaatcatttggaaacgtggcagaatctgt

SEQ ID NO: 10240 - DNA, 110 bp, Homo sapiens
  chr15:69366699-69366809
  hyper
tcggtttgcaaccctacgaggtcgtggccgctcggggcaggaaagcaggctcctgtctctccaggatccagcctcccgatcaccgcgctagtcctcgccctgcctgggct

SEQ ID NO: 10241 - DNA, 45 bp, Homo sapiens
  chr15:69453675-69453720
  hyper
tctccgggtgagagagcgatgtatccgttccgctggggccggggc

SEQ ID NO: 10242 - DNA, 31 bp, Homo sapiens
  chr15:69591275-69591306
  hyper
gccaggtgcagggcccgcgagtccggggtcg

SEQ ID NO: 10243 - DNA, 77 bp, Homo sapiens
  chr15:70391278-70391355
  hyper
aagcctgtaggtgtctcggtcgctagcctggacactccgagggacgcggacgctcccccgctcgctcgccccggccc

SEQ ID NO: 10244 - DNA, 1254 bp, Homo sapiens
  chr15:71054930-71056184
  hyper
gctgcaggtcagcaccgaaagagccccgcacggatcccgccccacaggtgcgatttacacaacccacatcaccaccacccctcccaacttcaccacctctagggtcaccaccctgtggggttttgtctttacgactaagccgattccctctgcctcgctggggaatcaaacttcccagtgacaacgacagcggccagcacgggacgtccaccagcccggcagggcttgacgctgtctcagacccggggaaggtccggagtccgggcacggtggcgcggggtgcgcagccctgcccacctgccctacctggtgcgagccccggccccggggactggggagccaacacggccgagcgggcgtgggcagcagggcgagcgccgggagaggagagcgacgagggggggtcaacggaaagagcggagtaggggtgccaatcgaggaactttggatttaggaggagggggccagaaccgccccactgaggtttcttccagaagttcggaggcttgggagaaaggggtggggaagagacccgtagaggctcgggtgcggcggcggggaggatccccggggtctctgggctgacggagtctccggcctcagggaggagtcgccagggccgccgaagccgaactggcagaggaaaagcagaggaaggcggcgcgcgaactcgccagcaaaggagggctgcgctgctcccggagcggagcgcctcgcagcccggaccgcgggactcaccgcgctggcggcggcggcgccagacgacgcggggccgggcacgtcctgcctcctcaggcgggacttgaggctcttcatggctaactcttgcctggcccccgcgcgaaccttaaaggctgcggagtgccagcgcgcaaggagtagacggcagcggctgcagcagaggcggcgcgggctgtaccagccccacctgcctgccacctgcgggccccgggcagcagacgtcgacaggcctgaggcggggctcccctcccgtagccaattgacccgctgccctggcgggggcgtggcaaaccgcgaccaatcggaatgcgggaatggggcgggacttcccttttaaactgagtaacacccttcctctcccagctggaggaaaagtttgggaactttagcccgggaaggggcggaggaggtgggcggccagaggcgtggagatgcgcgcaggccgggctccaggccaccggcgcccgcccacccggagcttaagatctagagagagcacggggtcccgccttt

SEQ ID NO: 10245 - DNA, 30 bp, Homo sapiens
  chr15:71056473-71056503
  hyper
ttacagtacaagttacgtgctcgtttattt

SEQ ID NO: 10246 - DNA, 36 bp, Homo sapiens
  chr15:71184310-71184346
  hyper
ctcccctcttaggtgccggggcgggcacccggtgca

SEQ ID NO: 10247 - DNA, 428 bp, Homo sapiens
  chr15:71184965-71185393
  hyper
ctcctcccaatactcccgctctgtttttatgaggctgggaaaatagaacgaggaagtggtgacgcactgggctctcacgaatacaactagaagctgcaacgactgtgtggctctatcgattcgggagaggtccagaccggaaatggtcgtttccatggtaaccctgagcaggttgcctgggagatgacctctttcgggtctctttgaatctccgctgtagcgtcacctggaaggcagatctaacagagaacctggactgtctcctatcatgattcccgggaaatatcgctctgtttctggccgggctgcgaacaacgtaagttgggccttctactttctctttcttcccactggtactctttctgactggcgtctttgtcctaggagatgggctgtattattaggaccggcaccgctgggtctactca

SEQ ID NO: 10248 - DNA, 30 bp, Homo sapiens
  chr15:71407655-71407685
  hyper
ccgttgttgacctccggggtcaggggtgcg

SEQ ID NO: 10249 - DNA, 30 bp, Homo sapiens
  chr15:72072798-72072828
  hyper
ctcacgatgacttgcggttctctctgtaga

SEQ ID NO: 10250 - DNA, 120 bp, Homo sapiens
  chr15:72409509-72409629
  hyper
aagaacaccatgacagcggctatctgaaagccgtgatggctagggttagtgctagtcggcttggtgatgagcgagctgggaggggttctactaagaagagtagggcgaggggcacatggg

SEQ ID NO: 10251 - DNA, 30 bp, Homo sapiens
  chr15:72522192-72522222
  hyper
ccccgcggcctccgcgttccacaatcagga

SEQ ID NO: 10252 - DNA, 53 bp, Homo sapiens
  chr15:72522449-72522502
  hyper
ggagcgtggtccctggcggccacccggcaagggccggtcgagctctcgggccc

SEQ ID NO: 10253 - DNA, 648 bp, Homo sapiens
  chr15:72523105-72523753
  hyper
agggtggaatcaatcacgagggaccgagagaaggcaggcgaggatggaggcgcattgaggattggggcaggaggaagaggatgggaccagaatgagggggtagggctggggcgggaaaggagccggcggacccgcctgatctggaaggaacggcgctggggacttctgaagagcaggccccaggcgtgaggagccgttctcctctctctgagctccactgcatcccagacgccctggatcctgcgccgccctgcctgcgtgcccggggccggccggcgcgccgggattccgcactagccgggcgactggcccttggtggggactgatggcgtagcctcctgcaccgctcacctccggcgctgaccgactcgggctacgctgcaaagacgaagagatccggagccacggcgcgtgcagctgctgtgcaaggagccactgcctcagcctcaaggttatcccgctgcgggccgccgcaatccctccgccgccccgccctctgcccaatcccggctccgggcgacccgggccccgccccctgcgtccccgcgggcgcagtcaccttcaggaggaagcgcggcggcggcggcggaacgcgcgggcaggttgccctttcggtgggactaaattctgcggcggaaggacacagat

SEQ ID NO: 10254 - DNA, 54 bp, Homo sapiens
  chr15:72523972-72524026
  hyper
agcattctcccggccccgccctgccactccccactcctccgggtgtctgctctg

SEQ ID NO: 10255 - DNA, 38 bp, Homo sapiens
  chr15:72565001-72565039
  hyper
tgcgcacgctcgcgcggtgacacgatggcacgtggccc

SEQ ID NO: 10256 - DNA, 124 bp, Homo sapiens
  chr15:72612097-72612221
  hyper
tgggtacggcgggaccggggtttagcccgctcatgccgacgccgctgtccgcggtgctgaaacccaggcgcgggccggggccagcgggctgcgctgaccctcccggcgccgcggccatgtcccc

SEQ ID NO: 10257 - DNA, 493 bp, Homo sapiens
  chr15:72612513-72613006
  hyper
ccgagccccagcccccgtgcttggtgacgtcaggcagctggccgccgagtctacgcaaatgatttgcataatgaggaagcagccgccaatcagagtgggagttgactgggctcgccgggggcggggggggcggctgggctcacgcgctcctgctcgccatggcaaccggaccctcgaatgccctgtgtgtgtcgagtgtgtgcgggcgtggccgtggatcgcgcgtgtgcgccttgggccgcgtgaggggaagcagcttcgtcatgcgtgatggtgtctgccggagtcggggctaatccccaccgcacacacaggcacacacaggcaaacgcaggcacacgcaggcacacacacctccaaacgctggtgcgtttcctgcgggggtggatggggattcctcttctctattcccactatcgagccagtccctcggagccaatcccaccccgccccatcacacatctctgtcttcggtgtctttaaccactttctt

SEQ ID NO: 10258 - DNA, 31 bp, Homo sapiens
  chr15:72827182-72827213
  hyper
ttgtacagaatcagagcgtatcaagaatact

SEQ ID NO: 10259 - DNA, 30 bp, Homo sapiens
  chr15:72827251-72827281
  hyper
ctgtgcatcacaaatcgatgcctcctatgt

SEQ ID NO: 10260 - DNA, 30 bp, Homo sapiens
  chr15:72978742-72978772
  hyper
tcccgggaactggtcgcctggggcaagtct

SEQ ID NO: 10261 - DNA, 30 bp, Homo sapiens
  chr15:73344218-73344248
  hyper
agaggctccaggcccggactgtgcagaggt

SEQ ID NO: 10262 - DNA, 63 bp, Homo sapiens
  chr15:73661196-73661259
  hyper
gccgcctcccccgaagcgccctccggcagcgctcgggctcccgcgccccggaatattcatgaa

SEQ ID NO: 10263 - DNA, 58 bp, Homo sapiens
  chr15:73976030-73976088
  hyper
aaaatctggacaggcccgacccccatctcctcccaggctggagcggggccctgtaagg

SEQ ID NO: 10264 - DNA, 250 bp, Homo sapiens
  chr15:73976474-73976724
  hyper
gggcagcgccctgctccgggagccgagggttttccccgccagggtcaggcctgggggcggggcggggcgggggcgggggccaggccgtgtgctctgcccagcgggctggctcaggcctcggtcagcagccgccaccgcggggccaatccggcctcagggacgcaccggagccgcctttccgggcctcaggcggattctccggcgcggcccgccccgcccctcggactccccgggccgcccccggccccca

SEQ ID NO: 10265 - DNA, 308 bp, Homo sapiens
  chr15:73977016-73977324
  hyper
ctgggctgtggggcccgcggagagctgggggctcccggatcctaccccgcccccctttcctcgggttgagaggggcccgggcgccgtcggacctgcagaccccggaagctgcggaccgggccgggtgggtgaatgcgcttttgcaggccccgggtctggagcgggcatgggggcagatctgtcccgtgttgaagcttaacgaagccaccggccggcgctgggaggttagcggggtctcgggtcctgcagaggaaaacgcccagctccgggaggggagcggcggggagggaaggcgagtggttaggcgt

SEQ ID NO: 10266 - DNA, 30 bp, Homo sapiens
  chr15:74045609-74045639
  hyper
gccgcccgggcgggcgctggctcccttaaa

SEQ ID NO: 10267 - DNA, 30 bp, Homo sapiens
  chr15:74220002-74220032
  hyper
cggtcccgaggcggcgcaggcccatggcgg

SEQ ID NO: 10268 - DNA, 191 bp, Homo sapiens
  chr15:74268223-74268414
  hyper
cacaactgagcttaacgtttataaccacaggatggatggctgcttgccaggggatccaaccgtctgctcagagccccaccctccacattcggggaggagagaggaaccgaaggttgatcaccaatggccagtgatgtaattgatcatgcctacataatgaaatcgccataaaaacccgtaacgactgagtt

SEQ ID NO: 10269 - DNA, 30 bp, Homo sapiens
  chr15:74284466-74284496
  hyper
aagcagcccttctgcgagcccagaaagccg

SEQ ID NO: 10270 - DNA, 30 bp, Homo sapiens
  chr15:74287164-74287194
  hyper
acccgcccgatctccgaggccccagcagga

SEQ ID NO: 10271 - DNA, 30 bp, Homo sapiens
  chr15:74392490-74392520
  hyper
cgccccctcattcccgctccagcagcccat

SEQ ID NO: 10272 - DNA, 30 bp, Homo sapiens
  chr15:74420496-74420526
  hyper
ccggacgaggtgcgcgcagtcttctagctg

SEQ ID NO: 10273 - DNA, 413 bp, Homo sapiens
  chr15:74422535-74422948
  hyper
actagcaggcggggcgggggggttggggcggcggggcgggggagactagggcttatatcagcccagatccaggcaaaaatggtagggagggtgcggcgctctgctaacactatcaattatgcatcatgttgaacgtggcttcggggaggaggcggctagcagcggggggtgcgggagggaagggtccgcgcgagctcggctgcgcgcagctcagcgggtcccgctcgaagtctgtcggtgccaccgcctgcatttgcaaaaagagtttaaaggcaaagacacgccttccccccccacttcagccgcgcgcctttccttcccccaaattcctcaaagatggtttgtctcacgtgttgcagggcgtaaaagcggcttgcattcaattagcagcgaagctcgcgggcgctggcggg

SEQ ID NO: 10274 - DNA, 30 bp, Homo sapiens
  chr15:74428168-74428198
  hyper
cagaagccgggattcgtggcaacccctagt

SEQ ID NO: 10275 - DNA, 30 bp, Homo sapiens
  chr15:74658229-74658259
  hyper
agccagtgctccagcgcccccgtaacacct

SEQ ID NO: 10276 - DNA, 129 bp, Homo sapiens
  chr15:74685055-74685184
  hyper
cagccgttccagctcccgctccccacagcaccccaacccgcttcccccaccaccgcattctccccacccccggctggcagctttctccttcctgatgctcagaccaaaagccttcgaggcatcccagac

SEQ ID NO: 10277 - DNA, 30 bp, Homo sapiens
  chr15:75075983-75076013
  hyper
ttgttggttgagcacgtgcttccctgcaga

SEQ ID NO: 10278 - DNA, 30 bp, Homo sapiens
  chr15:75076236-75076266
  hyper
ggtcacatgggaaccgtggaagctctgtct

SEQ ID NO: 10279 - DNA, 31 bp, Homo sapiens
  chr15:75119483-75119514
  hyper
tgcgtttctgacgaaacgataatcccttaat

SEQ ID NO: 10280 - DNA, 30 bp, Homo sapiens
  chr15:75230420-75230450
  hyper
gagcgggcgggggccggacaggctcacagc

SEQ ID NO: 10281 - DNA, 159 bp, Homo sapiens
  chr15:75251254-75251413
  hyper
cggggcgtggagaaccgagggctgtgtaaggtcaggccctgagaaaaagcccccgaaaggctggaagttacgttggaacgggctggttgtggaaggagcgagctctccgtccccgggagtatgcaagtttgggctgcacgatcacttggaagggattgg

SEQ ID NO: 10282 - DNA, 342 bp, Homo sapiens
  chr15:75251478-75251820
  hyper
cggttctgcgtccggccaggttggccctcgaggacccagccgtccccaacctcctaaactgctgtcggatgtagaagactcgcattcactgctctccacagtcggtgaagggagaacgccgaaaagggccgcattccctcctgccggtcccctccccttcccgcgctccctctgcagcacttaaaatgtaaatgtacatcgtgattagccgcggggtcgctaattacagctgaagccattcattacactgtcagcgcgcgtcgcagcccgccggctgtgcgctccctcctagccgtgaaggggtgtagggggtgggggcgggagatgcggggagtgagggag

SEQ ID NO: 10283 - DNA, 30 bp, Homo sapiens
  chr15:75315709-75315739
  hyper
tgaggaaaggaggtcggacagttatgccag

SEQ ID NO: 10284 - DNA, 30 bp, Homo sapiens
  chr15:75495097-75495127
  hyper
atgtgggccatgcacgtacgtgcaggcacg

SEQ ID NO: 10285 - DNA, 37 bp, Homo sapiens
  chr15:75640774-75640811
  hyper
ctggagaaagagacagcgtgtgcggagggggtgctcc

SEQ ID NO: 10286 - DNA, 30 bp, Homo sapiens
  chr15:75743121-75743151
  hyper
gcagatctaggcgccgagactcccagccag

SEQ ID NO: 10287 - DNA, 31 bp, Homo sapiens
  chr15:75745114-75745145
  hyper
acaccaaaacaggccacggcataaattaaca

SEQ ID NO: 10288 - DNA, 30 bp, Homo sapiens
  chr15:75932567-75932597
  hyper
gatttccgccgcggcgccccaagacctgga

SEQ ID NO: 10289 - DNA, 31 bp, Homo sapiens
  chr15:75939284-75939315
  hyper
cccacttgcctcttctcgaagattctctacc

SEQ ID NO: 10290 - DNA, 324 bp, Homo sapiens
  chr15:76628701-76629025
  hyper
gtatccatcacccagctccagcgcgcctgggaaaaccgccccgaaagtccaagaggaagctcagagttgtaacggccgcggagccagctcggcggtgacgcaaggtccagtccagattgccaggcccggggcatgagagaggatccttgtaggtttcggaggtgggggggctgcactccattgttcactccgggccaatcagggttggcccacttcctcccagccaatctcccttcacccccagcctccaacccaacccaccccgcccatcagcccctggatccccatcacctcccccgcatccccggcagttctggggaagct

SEQ ID NO: 10291 - DNA, 58 bp, Homo sapiens
  chr15:76629162-76629220
  hyper
gggcgcgcgaccctcgtccttctgcccctggccgcacactttgcgcacatctcttttt

SEQ ID NO: 10292 - DNA, 465 bp, Homo sapiens
  chr15:76629659-76630124
  hyper
agaaatgtctgagaggatgagcggggactgccgaaagacgatgtgtctgtgttgggataggaggcagccgctgtgagtgggagtgtgtgagcggaaatgccaggacagcaccgttaggtgttgatatccaggcgtccgcagtgcctgtgtatttactctcttcttagtttcgtgtttgcgtttagtttcaagacacgtcgacaaaacgactgtcattaatgaatgtaataacgaaatatttggggtgggggacagaagaaaccttcagcaatccacaagatactggtttttcgtttccaatgccctggacctttagagagctcatcatctttccttatggtcgcaagtcttgaaagaaagagcaagagagcgagcgggttgggttggggctggagtagccgaggccggcctgggtccgggcagtcaggcctgacgcggccccgcgcccttccccggcagagaagc

SEQ ID NO: 10293 - DNA, 328 bp, Homo sapiens
  chr15:76630519-76630847
  hyper
ggagccgtagcagccagggagatgagggcggccgcaggcccagcgctgacaccgccgcaccttgggcccgcaggctgttcggcatcaagtgcgccaagtgccaggtgggcttcagcagcagcgacctggtgatgagggcgcgggacagcgtgtaccacatcgagtgcttccgctgctccgtgtgcagccgccagctgctgcctggggacgagttctcgctgcgggagcacgagctgctctgccgcgccgaccacggcctcctgctcgagcgcgccgcggccggcagcccgcgcagccccggcccgcttcccggcgcccgcggcctgca

SEQ ID NO: 10294 - DNA, 638 bp, Homo sapiens
  chr15:76632517-76633155
  hyper
cgaaatcgggccccggggggctgggccacccggaggttgggctcggggcgggtgggtggcggcccctcgctaacctctggcctcaccctgtcctggcagacgctgggtcgggccggcagcccgcgttgcgcccgcacgtgcacaagcagacggagaagacgacccgcgtgcggactgtgctgaacgagaagcagctgcacactctgcggacctgctacgccgccaacccgcggcccgacgctctcatgaaggagcagctggtggagatgaccggcctgagcccgcgggtcatccgcgtctggttccagaacaagcgctgcaaggacaagaagaaatccattctcatgaagcagctgcagcagcagcagcacagcgacaagacggtgagcagccgctgggccggaggctcgagtcgggtgggggctgcgcttccgccgcggtatctgcgtgcccttttctgggcgagccctgggagatccagggagaactgggcgctccagatggtgtatgtctgtaccttcacagcaaggcttcccttggatttgaggcttcctattttgtctgggatcggggtttctccttgtcccagtggcagccccgcgttgcgggttccgggcgctgcgcggagcccaaggctg

SEQ ID NO: 10295 - DNA, 81 bp, Homo sapiens
  chr15:76635028-76635109
  hyper
ggcggcccaggcccgcgggcaggaggcgggacccgtttgggcgggaaacctgcggcacttgtggcggttgagcggcggact

SEQ ID NO: 10296 - DNA, 261 bp, Homo sapiens
  chr15:76638235-76638496
  hyper
ggagctcaggaaggccggttccccgttgggaaagagcgtgtttaagttaaggcgtggtttgagagtagctaaccagagatcaggtcagctgttagggcgtgggggagggagggggcagggagcagggacgaggaagtggaagaataggggattgtgaggagtgatttctttccagattatcgagactcaagactttccagaacgtggcaaagagccctggaagaaatgtcccaggaacgccgcggtcaggaccgaggctcc

SEQ ID NO: 10297 - DNA, 378 bp, Homo sapiens
  chr15:76638855-76639233
  hyper
gctgcggcccctcagcctctggagagccggggggcggccctcgccccggcagaaagcaacctgtggcggcactgcgtccccgcgagctacaaccagacgcggccgcgctcacctgggcgttgcgctcccccgagccccggagagtttagaagccgtaaaagcccggggagctggagcttaaatcgcccggaccgggccggggcgcccgaaagcagtgaactcgagacccccaggaaccgcgtgcgccgggaggcaccgggacgctcccgggcccgagccgcgcaggctcccggctgggtggggcctgggtttgcttcttacgcctcctcctctccgggacgagggggcaatgagaccgttcaattaaatgtttaattg

SEQ ID NO: 10298 - DNA, 212 bp, Homo sapiens
  chr15:78111656-78111868
  hyper
atcccccggctcggctgcctccggtccccgctccggcctcggttcccgctccgcagggctcggctccgcgatggtggccgcggcggcgagcgcggcagggagggcgtgtgtatgcgcgtgagagcgcgcagcgtgtgcatgtgcgtgtgcgcgggagggtcccggctcccctgcgcgtcccgctcctgcctcctgctcgccacgatgcgatg

SEQ ID NO: 10299 - DNA, 131 bp, Homo sapiens
  chr15:78111916-78112047
  hyper
cgcacacacgcgcacacccaggcgcgcacacccggctccgcactcccgactcgccctcctggagcgctcacaaagaccccctgccgggacggccggagcctgcggagcgcggccctgggcccctccgggac

SEQ ID NO: 10300 - DNA, 30 bp, Homo sapiens
  chr15:78112803-78112833
  hyper
cgacaatgggtgtgcggcggtgtaggctga

SEQ ID NO: 10301 - DNA, 30 bp, Homo sapiens
  chr15:78556920-78556950
  hyper
cgtggaagtcggtccggcgcggggcggggg

SEQ ID NO: 10302 - DNA, 32 bp, Homo sapiens
  chr15:78632844-78632876
  hyper
gctggtgcagagggcgcgccccgacggggaga

SEQ ID NO: 10303 - DNA, 3 bp, Homo sapiens
  chr15:78913466-78913469
  hyper
cgg

SEQ ID NO: 10304 - DNA, 16 bp, Homo sapiens
  chr15:78913480-78913496
  hyper
cgaccagatctgagca

SEQ ID NO: 10305 - DNA, 30 bp, Homo sapiens
  chr15:79125413-79125443
  hyper
ggaccaggtagtagtataacttcagtgttt

SEQ ID NO: 10306 - DNA, 31 bp, Homo sapiens
  chr15:79237307-79237338
  hyper
gcagcgtggcccacatcgcagcgctggcggc

SEQ ID NO: 10307 - DNA, 1285 bp, Homo sapiens
  chr15:79382098-79383383
  hyper
cggacgcctccgtcttgcccttcccatgcctaagcgcggggaattacacgttcccggtgtagaacagacgatcggggctattagggctgggcggtgggagtgggggttgggagcaccatttttggctggacgtgtgtccagactcatcgtctctggtccttaggaccccatcttcctctgcatctccaggtgtcggcccctctgtacccgcctcccacggggctcgtccggcgaagggcagccgcagcccacatctactccccgccctcaatccctgccccctctgcccgccgcagtcactcgcctggctgggagcaagcctcccctctcgctgagggtgcagagagcgcctagggcgccaagagtagaggggccaaagttcaagcgccatcagccagccgaaggccctgagcccccagggccgcggccgggacgcagggaggtcaggacgcgacgctcgcctcacctgtttctccagcggctccttggccgacagcgccggcttgggggagggcgcgcggtcgcagacgcagccctccagcaggtaaagccccgagggccgcgagctcgagtcgctctcgaagtagaagagcaggttctgcagcagcgcgaaccacttggtttgccattttgtgttgtccgaactccgcttgctcaggtagcctttgcgcgtgccgtccttgcgcgccagcagtcccagggacgcgacgtggccatcattcagccggatccccttctgcatggtgctcagaggccagcgagaccccacgcgcttacatcttctccgcgcagcagccccccgtccgtgcgcgctgcgcgctgcctctctctggcgctcgctcgctcgctccctctagctctcccctccccccaaatatctacactccaggatctggcgccgagccgcggcttcttgaatccagatataccattccccgctggaacctcttctccgctccgcagagccccagtacccggaagatgccgcccgaccctcctccggtgccgggcaaactgagggactggcgatctgcgcgctggcgaggggcaggcggagtcatgtgacgccgatccctcgaagagcccgtttcagcagcgcggacagggacacacgcacgcagccccgccgaggcgcagagccgcgcgcaggctgcaacttggtgcctcctccccctccccagacacacacacacgcacacgcacacgcacacactcaaaccctgccctccctcccctcatctccccttctctccctcggatgttaaaaagcaaatcagatcaattt

SEQ ID NO: 10308 - DNA, 434 bp, Homo sapiens
  chr15:79383438-79383872
  hyper
cgccccaccgcggcgcactgtagacctggggttaagtgccagttgtcattttctcctccaaaggctcgccccccccccccactttatttctaatacgaggtggaaggaggaaggtgggtggcgaaatagagctgcaaaagcgtccagtcctagtctttgcatagtcagccgggtcacattgaattccagcatccggctgcactcccggcggcttccccagctacctgaggacagtacagggggtgagatggggtggtggttggtgaacgttggttactttattttatattattttattttgagagttgccataattaccggcgccaccccccgtgcaccctgaggtctggttggcgagccgctgctgggagttttctgcaaataccccccaaagcctgaaggcgggcttcaaacgcaggcgccggggaccatgg

SEQ ID NO: 10309 - DNA, 222 bp, Homo sapiens
  chr15:79502064-79502286
  hyper
cgccgggaaatcaaacgtccatttacatcttgtcctgcaaagcttcatcaaaacttctttgccggccagtcacgtccccttatcacttttccagcccagctttgtgactgtaagtgttggacggagaactgataagggtaggtgattgacactcacagcctccggaacccccgcgccgcctgcacttgcgtgatggggaaaacctggcgttcccgctctggg

SEQ ID NO: 10310 - DNA, 30 bp, Homo sapiens
  chr15:79551660-79551690
  hyper
acaactctgggtttgaggcccagtattctg

SEQ ID NO: 10311 - DNA, 97 bp, Homo sapiens
  chr15:79576134-79576231
  hyper
aggcgcacagtgagcgtggaacagcccggctccctagcccccggccaacgctgctctcagttcagggcagctacgtaacaccgcccctagctccgcg

SEQ ID NO: 10312 - DNA, 30 bp, Homo sapiens
  chr15:79603262-79603292
  hyper
cttctgggtaggggcgcgctaggtggagcc

SEQ ID NO: 10313 - DNA, 144 bp, Homo sapiens
  chr15:79723975-79724119
  hyper
cttgcaaaccactgcagagtccgaagccccgagtgctccctgggaagaggagagccgaggacactcttcgcccctgcttgccactgggggccgcagtcaccttcagcataggggagtggggagacgcgaaccccgcgggtggct

SEQ ID NO: 10314 - DNA, 209 bp, Homo sapiens
  chr15:79724351-79724560
  hyper
cgccagcttgagcgccccgggcgggcggcggtggagaagcccagcccagctctccccagccgcgttcccggcccgcgctgctcccagcctgcaagcccatgacgtggcgacgccgaccgagacacaaagaccgaggctgagaccgccaggggttgagggtgaggccgcgtcccggggccgctggagcgcgggcgtcatgcgagactgtc

SEQ ID NO: 10315 - DNA, 81 bp, Homo sapiens
  chr15:79724606-79724687
  hyper
cggcgcgctggccctggccgggactgcagccaggtgggcgccgcgcgtgtgagcgccgcgcgtgtgagcgcagacctggac

SEQ ID NO: 10316 - DNA, 91 bp, Homo sapiens
  chr15:79724701-79724792
  hyper
cgaaagtcgctccatccgcggggtgcaaccctgggcgcggaatccgggctgccgggtgacagtgaccagctgactctggagcctaccggag

SEQ ID NO: 10317 - DNA, 743 bp, Homo sapiens
  chr15:79724863-79725606
  hyper
cgcccggggcgcctcggaggtaagttcggagagcccgggccgggcggagggcgggagcgcacgagtgtgtgtgtgtgtgtgtgtgttcgcggtgtgcccgcggctcggtgcacacgcgcgcgggttgtaaagtcaggagctgcgggagcgcctccctgcctcggcttggccccggagcattgcgggccgcggaggtgtgggggcccttgtcgctgcgctcagggcagcggcggaaaaggtgtgtgcggatgcggggcggggccgcacctggtggacagagcagggattcgggaagagaagccacggaagatgatcatgcagtttggggcaagttttcctggttgagcatcgcttcaggaaacggtgttttgagggttaaatatgtgagctatctgtgcaaaaagcctgacacatcagaggcgcgaagtaagatggaaagctggacaagccccaggtggaccgaccggtgcatccaattcttaaattgagatttccagtcacgttgatgtggaatgggatcgttgttcttcccgagggtttgataaggatgctcaacttcacctgtcagaaagcacgggagctgggcctggcccgcggggagcgtaagctcgctcacacgcggtccaactcaggcaaatgcagcatgcccgacctgctctgccgccatccctccgaaagcgataatttccttgggctaccgaatccatcagagtagtcatttgtcccctcgccggcggtgcggg

SEQ ID NO: 10318 - DNA, 1217 bp, Homo sapiens
  chr15:80215296-80216513
  hyper
ctgtacttgcaagcctcgaacccccaactccaactgacctcccctctgccagagcaagaccacgagtacccgccgagagcggacctggctggctacacaaagccaggcgcccgaccagagggatcctccgggacgtcctccgccaccggggcgtccccgcccagccccgcccggcgcccggcgctcaccagctctcctccccctcctcctagcctgacagacgctccaggtcgtctagcaagccgccctcccccgccgccagcaagaaggtggcgtctcgcagctcctcgttattcgtccgcctcgggtccatccggccccgccgcccgactttgcgctgagacccaaggggaagccccgaggggaccccgcgccgtaggagggagtggaggagccggcgaaccgcgatggagccggggcccagcacagcgcgagcggctcctcggctgttcgtgctgcttccccagcttcttcaccggcacctgcagcttccgcacctcctggtccgcgttcacgttagagttaacgtcctccatcccggccccgctgcctccgccgcccgcggccctctcgctctcgcagcaacaagggaagagccggaggaaagaggcgtccacgccgctcactccagccgaggcccccgcatatagcagggccaggccccgtcgccagggttcccccagcgcgggtcccgaagcaccgctggccacagatgaaccgcctcctcagcgcaggtccgggattcggggaggcagcgccaatatccggtctctgcagccatcttccctccgtccctccgcccaccgagggtcggccctgtaggtgacctcagagcgtcggggatgggcgtggccccgtcgggcgctaagaagacctagcgcagagaggaccgccgagctcccgacggggcggggccaggtgtgtgaggggcggggattggacccggaggggcgtgtctggactgccggcggaagtggaacgcggcctgacctgcgacggaaagccactgcaagcccggaggcgaacagaaggcattccgcgagccgggctgagttggtgaacacggtcctcgttcaccccgcctattggtctgggcgtgtggggtattctccacccacttatacggcgtgtgggaccgacgggcccgtcctgcccggctccggtccggatctcgagtaggcgctcaatgggattcggggagacgtagtttactttgt

SEQ ID NO: 10319 - DNA, 56 bp, Homo sapiens
  chr15:80285824-80285880
  hyper
ttattggggcttctgccgttgctgggcttggcagactatcacgtaggaaaatgtcc

SEQ ID NO: 10320 - DNA, 30 bp, Homo sapiens
  chr15:80351968-80351998
  hyper
ctctcctccgcggtcgcgtcataggccgaa

SEQ ID NO: 10321 - DNA, 147 bp, Homo sapiens
  chr15:80352849-80352996
  hyper
cctacacagttgggacgctatgatttaccttcacatctcggaagttgtaaccagttgtgaggaagttaggaccttggggttacctaaagataatttatattaagttgttgggccataaaaactgggcagaattggccacgcgcggtg

SEQ ID NO: 10322 - DNA, 30 bp, Homo sapiens
  chr15:80654042-80654072
  hyper
cattgaagaaaatatttgctgagccctgaa

SEQ ID NO: 10323 - DNA, 101 bp, Homo sapiens
  chr15:80988251-80988352
  hyper
gcaacatcttctcctacgactactcgggatacggcgtcagctcgggcaagccctccgagaagaacctctacgccgacatcgacgccgcgtggcaggcgctg

SEQ ID NO: 10324 - DNA, 69 bp, Homo sapiens
  chr15:81071922-81071991
  hyper
aggcgtgacactgtctcggctacagacccagaggtaagagggcctggctgggggcgtcagggatgagct

SEQ ID NO: 10325 - DNA, 30 bp, Homo sapiens
  chr15:81072918-81072948
  hyper
ctccaagcagccaacgctacccacaggtga

SEQ ID NO: 10326 - DNA, 50 bp, Homo sapiens
  chr15:81294176-81294226
  hyper
caactcccagcttccccgtcccgccctccccgctccgagggccgcgccag

SEQ ID NO: 10327 - DNA, 634 bp, Homo sapiens
  chr15:82336684-82337318
  hyper
ccacgagccccaccacgcggtagggtacccgcacttggatggtggtctgcccgggcaggttgggcggcccaggcaccgcgccgttgagtgccgtgttcttattccgggaggcgcggatcatggagaagtgctcggcagcagagatgatctccctccgagccatggccacatcctccttcctgcccgtcacaacaaagacaggctcctccccgcgaactggggtcttgatgtaagtattggtcttcgcccgcagcgctttgattttacaacctacgaaccagggtgcggaggagggagtgggagagagagacagacacgcccattatcctggggtaaccgcggggaccggggacagcccgcgtccaggacagcgagacggcaggacaagagatgggcggaaagggggcgtctccctcactgacctcgggccgcgccacgggctgggcagcggatcccacccgcgaggcgctcgaggaacagcccattggctgcctggccctcccccagtgactgcagtcgtcccgaaccaaacccgagaatcccagaaaagtcatctggggagatgccgctgggatccagctgggcgcgccgtcagctctgaagacacggggaaggggctcggggaaggcagctg

SEQ ID NO: 10328 - DNA, 91 bp, Homo sapiens
  chr15:82337636-82337727
  hyper
ctttgtctggggcgccggcccatcgcgcggctcttcctctctccccaaggcaccccacgccgcggatcccgatactgaacacgccttcccc

SEQ ID NO: 10329 - DNA, 25 bp, Homo sapiens
  chr15:82337802-82337827
  hyper
cgatctcggcgacatgctcagaact

SEQ ID NO: 10330 - DNA, 52 bp, Homo sapiens
  chr15:82338055-82338107
  hyper
gtgcgcgccgcgcccccgccggccctcggctcggcggcgagaagctgcggcc

SEQ ID NO: 10331 - DNA, 572 bp, Homo sapiens
  chr15:82339663-82340235
  hyper
aaggaaggaggatttgaggggcgggccggggcggtgcgcgctggtcctctccgcgcgcatccccctccgccgcccactagggcggacgccccttcgggccccgcgcgctctgctgtcctttgttccgggagccgccgggctcgccgcgccctttgcgtcccgctgcggatcgttccgcagagcggctgggcccgcggttcatagagtcgcccaagatcctcacagagggacgtcttcccaaaacaatgaggccatgcggccgcagccgcacacgggctgactggggagatctcgtggtgccgcggggcggtcccggggctcgaaggcagaggctcccctaggtgtgccctgcctgaccccggctacaggaacgagcgctgtgggcctcggtttctcacccgtaaaatgaagaaaataatccccgcctttaccacctcgtgggtcgttcggaagattaaatgcgacagtggatgggcgcgcgcttacaaatcagtagacagttccgcaagcgcctttacttttgagaacgcggtggtgcagctcccttcaccgcttgcttacctggagctgtc

SEQ ID NO: 10332 - DNA, 844 bp, Homo sapiens
  chr15:83316231-83317075
  hyper
cgtgcgacggcagtgtgagaaagaaacgttccgggcgccggtgctcctttatgtccggtcagctcccgtctggacagacgctcgaggccgcctggaggccgcagtgcggctcggaggccccaccggccgcccccgcagggctgcggcgcctttaagcccaaaggccctgagtcacgaggaggctccctgcccccctcgccctccacccctccacgaggccccacgcccgcgggcacgtgaccgcgccccgcccgggactcgcccgcacggggcgggggatgggggtaccgcggcgccggacccggctgcgcgcggaccgttagctactgcggccgggacgcggccccgcccaggcgagcggcgggtggctcttaccagcgggaacgccatggggccggtgtggccctgcggggctgacgggctgaccggccagccggcgggcgagagacgcgcacgcacgtgggcactatttttgcagcgggccgcgcgcagccccgcaccccggcagcttatgaagctcctacgagccgctcctcggagccgccccccggccggatgcggagcacctgtgtcggccccgcccgggccctcgcctccgccccctcgcgccccgcccctcctagcaggccgagccgaggagggctccgccgcccacccggaacccggcggggactgccgccgctgctagccacagctgccccctggggggccagagacctaagcctgagcgcgccatcacctaagtgacccttgccgagtcactgtctgccctgggcctcagtttccctcttaacgaaagagggcacgatttacaagcccctgcgagcggcggcgatcgcttcgt

SEQ ID NO: 10333 - DNA, 369 bp, Homo sapiens
  chr15:83349242-83349611
  hyper
gcaccagcgccttggcgatgacgcccacttccgccttgggcgccaggtggaagtagagctgcgccaccgccatcaccaccgcggcgctgcggctctgcagcaggggtttggtgttgcgcagcagcagccggtggtcggggtccatgacatagggctttcgggagggggcggccgcggcggccgtctcctcagaccccgcgcccttggcctcgtcctcctctgagccgtagaaggctttttccgcgttctcctctagtagggattcctggacggggagaccgacgggtctgtgggcgcctccccgggacacacttcggcccgctctgcctgggctgggcccacttacgttctgggtggggctcaggaact

SEQ ID NO: 10334 - DNA, 30 bp, Homo sapiens
  chr15:83377914-83377944
  hyper
gtacatccagggcccgccttcctgaagagg

SEQ ID NO: 10335 - DNA, 849 bp, Homo sapiens
  chr15:83378239-83379088
  hyper
ccggggcggggccggcgctggggccgggcgctgtccatggtgcccgcgcgcctcgcccggtccccggccccaaccctcccgcgagcttcctggcgggctccctcaccgcttgtagtcggaggagaagatgccgccgctcgcggggtcgtggccgtactcgggctccccggggccagcggagccgcccttgtcttcgctgtaggcgggggcggccgacatggggcggccagggagacttcgccgaggaggaggttgcggggccggaggccggctggagcggaggaagggaaggcgggccggtccggtccgggctggcgaaggcggcggcgcggcaggggttcagcagaggctgcagtgtgcagcggcggaggctgcgcgcggatttctcaatcagggccgcgcgctgaggtcttaaaggcaccggcgccagccgagcggagggcgtgtccgcgaggaggcgacaggggcggtgcgtcagggcctggccccgcccatccctaggaaatgccctcttcagggcgtcttctgccctttaaagcgacttggctcgtctccagatctaaaggtgggcgagtctgctggacggacgctgggaccgtcttgcaggggatgtggaatagctgcccccacccccgaccacctggcctcggcgggacgggcctctggggctccgctctccccagacgcacgcgcggatgctcacccacgccgtggagggaaagcgggaactggaaagaaggctgtgcccgcaggctgggggttctagagcgggaaggggtcaccgcacccgaggaccggcctcagatacctaaggacgctccctttcccgccccacctttcctacaaaat

SEQ ID NO: 10336 - DNA, 30 bp, Homo sapiens
  chr15:83419390-83419420
  hyper
gccagtgacagcagcgtcctggtaggcagg

SEQ ID NO: 10337 - DNA, 71 bp, Homo sapiens
  chr15:83654897-83654968
  hyper
agagccttagttatcgcgagacttgacaggcaccctcaactttagcccgccggaagcggaagtcaggtggt

SEQ ID NO: 10338 - DNA, 86 bp, Homo sapiens
  chr15:83775915-83776001
  hyper
ttcccacttctgggccgtgggctcccccatagacgatcccgcgggcccttcctcctctgacaccctcggatctggttccacctttc

SEQ ID NO: 10339 - DNA, 115 bp, Homo sapiens
  chr15:83776022-83776137
  hyper
cgcctctccagctcttcgatgaccggttcccggccgtgccccgggccctccctcggagcgcgcgccgccaggggcacctgtccctgcgcgggggtgtcgccgcccctcggcgccg

SEQ ID NO: 10340 - DNA, 149 bp, Homo sapiens
  chr15:83776157-83776306
  hyper
cgtggcgcccctggcaggagcactgcaaggacgcctcccgggactgcaccgcggccctgcgcacttggggcgacggggccaggcgcgggggacggctgcgggctgggagggcgcgcggaggagacaccgctgaggggacgccgctgagg

SEQ ID NO: 10341 - DNA, 384 bp, Homo sapiens
  chr15:83776332-83776716
  hyper
cgcctcgaagggcaagcgccaagggggcgcgggcgccgccggaagctggggcggggcgcccagcgggatgcggtgaagggcgagcggcgcggcggctgcgatgagtgcctctgcggccaccggggtcttcgtgctgtccctctcggccatcccggtcacctatgtcttcaaccacctggcggcccagcatgagtgagtgagccggcgcggcgggggtcgcgccgaggggcggcgggagttggctcgccgcgacgggagcctcgcaacttttccgagggggctgggaccgtccgccgcgggacagaggttcgtggccgcaggggctccccgcgcctggccagactaggggggcgccccaggggtcgcacgggccgggtcttggag

SEQ ID NO: 10342 - DNA, 48 bp, Homo sapiens
  chr15:83776768-83776816
  hyper
cgcgccaggtgcccggggtcacaggcgtcaatacggccatgcccctgc

SEQ ID NO: 10343 - DNA, 144 bp, Homo sapiens
  chr15:83875521-83875665
  hyper
cggggcaccgggaatcgcgctcagggaaaactcaacaagtctagaaggcaaagagatggatgaatgactgccaagaggctcccgctggcctctggatgaccactaccactttccaggatttactgcccgccggcactcgccggc

SEQ ID NO: 10344 - DNA, 377 bp, Homo sapiens
  chr15:83875705-83876082
  hyper
cgttcgcccgggacccagggtatccaccaatgaccctgcccggagccgaagcctccgtcgcaggcccgctgcccggcggcgtggcttcccggtcggcaccggctttccaggaggaaggcagcgtcgggcctgcgggggccggacccgccttcgaaagtgggcggaaggatggccgccctggcggagtgcgggcgaggccgggagcccttgcctcagccccggcccggtcttcttcgtgccgcgccgccctcagccctcaccacagccggccgcgagctgcgggctcggggctgaggcgatggggaaagggggcgggcgcgccatcatgaaggggaaaatggtgggcgggcgggcccgcgcgcggccgcggtactcac

SEQ ID NO: 10345 - DNA, 281 bp, Homo sapiens
  chr15:83876201-83876482
  hyper
cgcgaagatgccgggaggccgcccccccgcgggccgacgaattgcgccgcgctccccgcgggcctcaagccgggcggacgagcggccgctccgacgaggggaagcggcgaggcggcggctgaggcaaggggtgggcggggggcgcagcaggcccggcaaatcacggcccggcagcgggggaggggagcccccggccgttcggcgctcgcccgcgtccggccgcgccaaggtccccgccgccgccgccgccgccgccgcgcgcgctgctcaccagcgccgcg

SEQ ID NO: 10346 - DNA, 486 bp, Homo sapiens
  chr15:83876654-83877140
  hyper
cgctcccctccccttccctcccgcgcgggccggttaattcctaggtacacggccggctttcgcggagaaaccgagcgcgccagcccggcttctcggctggcgggcgggcggtgggcgcgtcctcccccagcaccgaagcccgcgccgggcgggcgggagtgcctactccggaggacgcccgccgcctgctctcttttgttcttggcccggagctgcctgccgcagcccagccaatcaccacccggccgcccccttcccctcccgtccgtgccactctgggggttctccccactcgcgccccccgctcccacgcccacctcccgctgactcgaccctctcctggctacccccagccagccacttccgcggctgctctctggtgagtgggggacaaaggcgctccaggcctgggggacggcggcgcgaggggaccctctgctgggcaccaagctgccggaaagagcaccgctccggagtcagcgacct

SEQ ID NO: 10347 - DNA, 227 bp, Homo sapiens
  chr15:83951885-83952112
  hyper
ctgtcagactcggagcggtggcagccccgcagccacaaagagatgccttaaatgagaagaacatgtttctacaccgcatttgtgaaagtttggctcggagctacgcgctgattaatatcagatctccttcactcgcctcgccacaatcttgtcacatctggctgacaaatcccgaggaactccggcaaagccaggcggcggcggggctccgggtctgggcggcggct

SEQ ID NO: 10348 - DNA, 237 bp, Homo sapiens
  chr15:84115616-84115853
  hyper
agcagattgcacccagagcaccgcgtggagagagaagaaagcccgccacccacagaccgcttcctcctaccacaggtcccccatcgagttgcatttgttgtccctccctaggcgcatttctgagccttcctttcttaaacatacaccgagcgaaaatgcgccggagggaggcgatgttgcctgtgagccaaagccggttcggcaccaagacagaagcagagagaactgatctctctc

SEQ ID NO: 10349 - DNA, 407 bp, Homo sapiens
  chr15:84115931-84116338
  hyper
cgacccccaggacatccccacgcccagcttcccaggccggtcttctgcgcggctcaagtagcccaggtctccacgcaacaatgaagcgtgggcggccccagcagcttcatttgcatatcgccgcggcttggccaatgggctgcgcaggggctttggaacgcagtgttgccatcggcgtgcgcgcgtgtgtgcgagtgtgacagcggctgtggctgtggccgtggccgtgggaggcgggcccggcggagcccagccgcggggggaccggcccgggctcccgctccccgagcgcgtcgcggccgcgtggcccagccgagccttgagaccaccccgcccctgccggtcgcagtcgcgatgtcggtggccgggctgaagaagcagttccacaaagccagccaggtagggag

SEQ ID NO: 10350 - DNA, 175 bp, Homo sapiens
  chr15:84116377-84116552
  hyper
cggccccccgaggctcccgggcctttgggactcctgttccctgaagggcctctctcggggctcaatttcttcccgcctaggagggcgcgagggtggggtgaggggccgcctgctctctcctcggcgtcttggcgccttctccttcccattccctggcccccggctctgccctggg

SEQ ID NO: 10351 - DNA, 112 bp, Homo sapiens
  chr15:84116651-84116763
  hyper
cgcgcgaggggaggacgaccacagggagtacgatgccggcagggcctcccccgagtctccagccgtttggttgggagagcctcgtggggggcccatcctccaccggccaccg

SEQ ID NO: 10352 - DNA, 260 bp, Homo sapiens
  chr15:84116828-84117088
  hyper
cgaaatggccccgtctggactgtgcccggctccccggctggggctctctaccgcggtccttcccctccccaccgtcttcccggtgtcggcccggggctgggcatcacgcttctgctcttacagagctgacagcctgcaggggagacacggagacagacacgtaaacaaacagtgctagacacacctccacgcacagaggatgacaaataacacagtgggggcgtcagggagagcttcccggaggaggagacatgtcattt

SEQ ID NO: 10353 - DNA, 47 bp, Homo sapiens
  chr15:84748572-84748619
  hyper
gattgggagtctcaggggctacgaacaaacgttttatccccgggtag

SEQ ID NO: 10354 - DNA, 627 bp, Homo sapiens
  chr15:84748678-84749305
  hyper
cgtcccttcatctccgggggacggccactctcagggttcccgaggagcccgctccgtgcacctaggccctaggtcggctcccaagccctggcccgccgctacaccagcggtttcttacccgcaagtacaaatgtgacacagacaccagctcctcgtgctcttggctcccagggtttctttcaccgcgcctcagcacctgcagcttctccactcttacagcgcccgccgtcgtcaaggcaacagagggatgcccggtgacagactcggcgccggcttccggcgccgtaagagaagcgtccgcgcgggcgttctggacccgcagagttctcggcgtttccgaagctcttggtgtggccgggacccgggagaaggagcagggctggtggggctgctgcagccggtgagtgtgtgctggcgctgggggctggaacctcctaggccagtctctgggcggtgccgcaggaccctgctcgctgcggctctgaggcggaaacaggggctggggccgagcgcgggctggaagctttggtccctggagtgtcgcttccagtctggggccgaggcggtcgcctgtgtagacccgggatcctcaaatagaacgaatccgggaccctgcagaaatgaagg

SEQ ID NO: 10355 - DNA, 139 bp, Homo sapiens
  chr15:85200377-85200516
  hyper
cctgacattggagcaggggcccggctcacctggatttggggtgcggggcggctgaggctcacgcccagagccttctttagcaggaggattccgagcagatcatgactcagctgcagtcgctggtccctcagggaggtgt

SEQ ID NO: 10356 - DNA, 30 bp, Homo sapiens
  chr15:85259809-85259839
  hyper
gagcaagtctcctgcgctatgggaagctga

SEQ ID NO: 10357 - DNA, 30 bp, Homo sapiens
  chr15:85290875-85290905
  hyper
cctgaccttgctgccgccctaatgctgcgg

SEQ ID NO: 10358 - DNA, 13 bp, Homo sapiens
  chr15:85923532-85923545
  hyper
ggcggagaggaga

SEQ ID NO: 10359 - DNA, 20 bp, Homo sapiens
  chr15:88798633-88798653
  hyper
aatggaaatagttaaacacc

SEQ ID NO: 10360 - DNA, 264 bp, Homo sapiens
  chr15:88798724-88798988
  hyper
cgctgccgcctctgccaaagaatcgaacctcgtctactttattccacttgagcgtggccaaactgttgctatttagtggggagcaaaaaaaaacaatttgcaccatcgaaacgagccagcaactggttgggaggcgggcggtagctgggccccgcgtgccctcggcggccggggtcctctccggggagaggcacacacacgcatagccggatcgcgcctcgccagggccggagtcacctggaatgcgcagccggagagcatctc

SEQ ID NO: 10361 - DNA, 1265 bp, Homo sapiens
  chr15:88799036-88800301
  hyper
cgagctggggcgggcggagggccggctcccggccgcgggtgggcaggagggagacgcagagcgcgggggaggcaggctggggagcggccgcctgacttacatggaagtgatattccttgagatgtccgtgatgttgatactggcgttcccattgctgttccctgaatcctgcccttccaggagggggaagaggttcccatcgtccggccgccggcaattgatctcagtcttgctgcagacacaatttgcagggcaagccagcacggagcccacatagtccagccagacgcttcccagcaagaaaatccgccagaaactacacttggctgggcaaagagagacatccatctccgatcgctgcttctaaaaaagaggaggaggagaggagaggggggtggggtggggggagtggggagagcagggggggaaggaaacaaagacggcgagggaggggggaagggggagggggggcctctgcctttgaaacgccgagcgatcagatgcaaaatccttcagcgtctgaaaccatcgcggacgccgccgccgccgccgccgccgccgggtgggagccgcgaggagcgcctagtggcgcggtctgccgggcatggtggccggctcggcgatcgctgactcgccgggtccgggggctctggaagcgaggcgcgctctccgactccgagactttgcagggttgcaacagacggtggggaggcaaaaaaaaaaaaggaaaaggaaaaaatggtgctaaagtcaccaagtcccacctactgggcagaattaaaacggacacaccacgcacctgcaaaacacacacactcactctcacacatacacacacccggagcccgaggaaaggaagagaaggaagatgcagtaggagctgcagcagccgccgcgaatggctcgccgcgcggctgcagaaatgtacaagtgctccgagccttacgaaacgcacgggttatcggagcgtcttcctcggctccctccctcccttcctccctccctcctcccctccctcgtcgcggcctcctccccccgccccccgcccgggctgggagcggcaggagagcggaatctccccctccctcccctccccacacccgtctctctccccgcctgtcctctccctcctccccacccacccacccacccactcgccggctcgcggctgtagccggcaccgccacccgcagcctcgcggcagcccgcccgctccacgcctcgcagcgcggcgcccgctagccgcagcccgggggaaaccgaga

SEQ ID NO: 10362 - DNA, 515 bp, Homo sapiens
  chr15:88800412-88800927
  hyper
cgcgctacccggttttgctgcaatccggaccgcggtaggaagtgaaatgaacgtggcggaggtgattggggagtgctcccaagccttgggtggggggcgctcccaagcctgggtgggtggggggcgcaggctcacggacggcgacggggggtgccggagcgcacagacaccccagagaagcacccagagccggggaccgggaccgcagacgcgcagtccttggtctgaatgacactcatttccgtaatctagagtctggggctctggtcttggctgggaggggactgcgggacatggcacgctaggtgccccccgtgcccgctgcgctttcttggaggtgggttttgcattcggccttgagcaggcatggatcggggaaggaagaaacaggggtcgaaagggctgcgctggagagccgaggtggccccgggcgagctgtgcgtgcaagagaaatggccgggggaaattgagatgcaaggggcatattttggcaagcgccacgccagcaccgtcag

SEQ ID NO: 10363 - DNA, 30 bp, Homo sapiens
  chr15:89010953-89010983
  hyper
ggctgtgagaaacgcggggtcgcggttcct

SEQ ID NO: 10364 - DNA, 209 bp, Homo sapiens
  chr15:89147771-89147980
  hyper
catttgatgtgaagcgcggctcccccctctccactcgctttctccgctcgccttcaggatgacgtcatgaacatccgtggccctgacaggccacccgtgggttggtctcagctttaaagcagctgttctcctctggcccggcagccgcggcgactgtgtttgcacccggcggaccatgccaggactacggacccggacaggactgatgg

SEQ ID NO: 10365 - DNA, 30 bp, Homo sapiens
  chr15:89148295-89148325
  hyper
gagggccggagaagcgagcggccaggcttg

SEQ ID NO: 10366 - DNA, 132 bp, Homo sapiens
  chr15:89148582-89148714
  hyper
cctcccgcgcttctcgcccctgattctagatgcagctgacttgttgcatgcagaagagcagctgggttcggcgttccaagcctctcctctttgctttgcctgccaccagatctgagcgccaggctggccagc

SEQ ID NO: 10367 - DNA, 30 bp, Homo sapiens
  chr15:89148918-89148948
  hyper
gtagcctttccactcggcagaccaagcgcc

SEQ ID NO: 10368 - DNA, 30 bp, Homo sapiens
  chr15:89248459-89248489
  hyper
gagtgttcgctgcccgggctggcggcgcgg

SEQ ID NO: 10369 - DNA, 329 bp, Homo sapiens
  chr15:89345997-89346326
  hyper
tgagatgtccttggtctctcccggggaatttgaagacccagagactcgcagctccccgtgagcctccccgctgacgccttacctccccctctccaccatcccctgccatcccggtgtacgccacccccaaaaaaactttcagccagctcctcggtgagggtcgttccaaatcgtggccgacagtagcgggctgcaccctccttagatcgcgtcgtggccagcctcagctgcagaaccccgccgggcgcccgggagccctgtcccgccgcggcggcctcagagtccgggcacttggggattctctgagggtgcagccctcctgggcccct

SEQ ID NO: 10370 - DNA, 447 bp, Homo sapiens
  chr15:89346346-89346793
  hyper
cgcaatgcagatgcgggccctccagcccttctcgcgccgccttcctcccgccagccccggagctgccgggtccgcgccgccccggggagcgctcctctcccgccctgagcgcaggccggcttccccatcggcgcgccggtccggagccagggtccagcgcgctccagacgcctctgccttcccctccccctgtcggccgcccctcggtccctgggggtggggtttccctttgcgctcgccccctcccgcccccacccctcacgggccctcccctcccccgcccgtccctatgtatgtgtcacagcgcgccatgcccgcccgcccgcccacctacctccccgccgctccagagggggctcgcagagctgaggacgcgcgcagcgctgctcaaggtctctctctctcagcaccctcgccggccggcgtctgacgcgggtgccagggtct

SEQ ID NO: 10371 - DNA, 24 bp, Homo sapiens
  chr15:89346881-89346905
  hyper
cggacaggacgccggcaggaggag

SEQ ID NO: 10372 - DNA, 30 bp, Homo sapiens
  chr15:89347104-89347134
  hyper
tgagactgcacgccccggggctgggggctg

SEQ ID NO: 10373 - DNA, 726 bp, Homo sapiens
  chr15:89438207-89438933
  hyper
cgcaggtccgccagccgcctcgcaggttgccctcagcccctcccaggactcccggggcccccggagcatccaacagatacccaggggcagggcctggggcgccgcggacggcactggaggcagccgaccctggacagacgacaggggagagagccaagcggaccctggcaggaagggggctggaggcggacggtggtctcggaggccacggggtccgctcgggctctgctccctcacggtgggcacgagggtccggcgcccgcatccccgcgccgctccctccccacttgtgccccgggcgcccctcgcccgcgatcacagcccatctcagcccgggcctccgcagtgcccggcccacgcctcctgccccttccccggaccctgcccgggaggtgtggggacccgcagggcacccaaagcggtaagggaggaacccggcccgcacacagccccagaagcccagcgacccctaagccacgtaccgtccccaggcagctcctcgacggctagagctctcgggggccgcgagctgtcccggtccaaggcagcagtctgatttcggggaaattaaaagggcagaaaggaagcggcagcagaaaaacccccgcgctcccgccagaccagccccttaaaggaacacgcgcacctttccctcccaagggctgggctcgaagggaggagctgctgcaggcttgagcggtctccagactcgctgggaaccaccgc

SEQ ID NO: 10374 - DNA, 125 bp, Homo sapiens
  chr15:89902213-89902338
  hyper
cctcaggtctggaatccggcgggatgggggactgggcgacggcattgtgagggctcggcggaggcgccagggggcgctagctggctcctcgcagccgatccaggccgcggcggttccacgaggtc

SEQ ID NO: 10375 - DNA, 30 bp, Homo sapiens
  chr15:89905746-89905776
  hyper
agagaagcggcgcgcggccaggagcccccg

SEQ ID NO: 10376 - DNA, 157 bp, Homo sapiens
  chr15:89914292-89914449
  hyper
gtaaaaaggcccagtggctcacggaaggtcgcacagaaggccactgacagggcagcgatcagtacagccaccgtggtgggcgaggcatccggggcttccttttctctggtccacgaactcccaactccgaacgctgtgggactgcatgggcctctgc

SEQ ID NO: 10377 - DNA, 317 bp, Homo sapiens
  chr15:89914866-89915183
  hyper
cgagccggcctgttcgctggctcgggcgcccggttccgggctgggcaaggagcgcttggccatgagccgcgggacagcccaggcgggacggatgcgccctccagggcccaggcgaggccgcgcggtgcagaaccgccgggatttctccaacccgggtatgcgcacccacagcagcggcctttggaggccgcggcgccattttagtggccttccttcccccttggcatctgtcgtgtatggtgtggctgggtgtccccagctccccccatcccgctctgactttggctgccccctccgccagcctggatagagtgacc

SEQ ID NO: 10378 - DNA, 1068 bp, Homo sapiens
  chr15:89942571-89943639
  hyper
aaaggccccatcaacctagcccgggcccacgaccccaaatgaaacatctttcactcgccccccagcagcccgggccgcgtttgaccactagtagggcagaaccactgaccggcaggcggcgctccccggggctcccggctcgagccccagggcaccgggaggagtaaggaccccgagcgggagggagacgactggggggcgcgcggcacaaagagctttttattcaaatttgtttagagtttcgcgaatttgcatgaaaaatgtgtgagaaaagccagctccggtgacctcatccgcacctgccattaacgttcaattagcggctgaatagcggccgccgacgcgacgtgcagagaatccggcctgccccgcgcagcgagggcggcgggccaggcccgggatagggtgggaccgagggagggggacgcggcgtagggccccggcctactcctctggcccggagacccaggacctcgtccgcactccaactctccgagggaacgcggggatctcaggactcacgagcccaagattgtttggagcgcgccgggagccttaggatgcctggctccctctgggcgcagaaaagggcgggcttgcctcctccccaggacggaaggtggccggaagagccccgtcccagctcagatgggcttccccgccatcttccggacaaagtgtcaagtacaagttcaagttcagggccaggcccgggggggggcgctgagccttacccggccgcctttgttctctggcataatcgctcccacgtccccctcccgggcggggcccagcagagacccccgccccgccccgccccgccgcgccccgcaggagcctcctcctcccgccggcgcggcgcctgtgccctggtcccggtgtccccgctcggtgccaccgaaggatctaggggctcgggccggggagggggtggaggggggagtggaggcgcgatacgaacccgtgggagcctccccaaccccgcagtcccagcggcaaactgtgcttggtcggacggatgcccgcgcggaggtaagagccctttgcgggattcgcccgtatccctgt

SEQ ID NO: 10379 - DNA, 326 bp, Homo sapiens
  chr15:89949616-89949942
  hyper
cggccctccgcggcttgccagactgtcctgcaaaccacctcacccgtctctttggcgcaggagactcaggctgtaaccggagaaaacacttcaccctggaaccctaactcaggtcctggcaaaagatgcgagaggaagacttgctctcttaataaatctcggccgcccgcacatctggcccctagacctgctcggtagaggactggctggtggatgcgcggtccaggccgtgggcactcgacccacctctattttccttcccgaggcgcccctggattaccactttcggtttgcgcttacatccgggatgtcgaatttcccaggga

SEQ ID NO: 10380 - DNA, 30 bp, Homo sapiens
  chr15:89950359-89950389
  hyper
aggagtccctccgcccgctcccagtccgca

SEQ ID NO: 10381 - DNA, 680 bp, Homo sapiens
  chr15:89951772-89952452
  hyper
ctcctctgggaacccggatgggccgaacagcagcttccggcagaggccctcaggtttcagagttctccaagtggggagaagggcggcctgctcagcccgcgcacccgtggcagcaccacagagggaataaaagcagggtaaacaatttgaagatccccacgaaggcaagagagtaaatttacaaactcatttgcgtccggaatacttgcttctttttcactcatacattccttctaaaatgtgggctttctgtgtacatgggcgcgcattcccaggactcggttccctgggtggaattcacccaggaatacaatcgattttctgaacctgcgtaaggccacaggcagctctgaaaatgaaagcgtttgctaagtgggggagatctcaccgatcgaacgtttaaaaatggctttgtcttcattcagctctcccgatttattctgtgttttacaaatagaagctcagagcttctgtcgcccagtccttgcatgactcatggcggtggccacacgggtttcagggataacgggatgtttagaaaatcgctgcatatcggagtttcctagcacgttccatttatactgaacgcaggcggccgctgaaaatccagcctcgactcttgctaatgactgggtaggaccctcggggtcctgcgacggtgctggagggtgttcccggct

SEQ ID NO: 10382 - DNA, 300 bp, Homo sapiens
  chr15:89952699-89952999
  hyper
cgctccaaacacagatgctcatttttggaatattctagaaaaataacaagatcttgtttgtcgttatgattcacgggaggtaactgatgggagggccatttacatgagggcagacactgtggggcgaaggtgacttctggacgtaggctttaaagtaggaacggctccaaattcccaatatctccggccttaccggttgcaaatcggacccctgcgggaaaaccagacacttctgtttcgtggctttcgggctgcctccagcccacgcaggctcgtttagtccccgtggagtcagccccg

SEQ ID NO: 10383 - DNA, 102 bp, Homo sapiens
  chr15:89954287-89954389
  hyper
tttcaggttttgtcccgacagactttcagcaagcggcttagctcagccctggcgctgccttccaggaaagaggggcagcagcagcctcggctgagccgggtg

SEQ ID NO: 10384 - DNA, 251 bp, Homo sapiens
  chr15:89954590-89954841
  hyper
ctctgcatacccccgcgcgcgcttgctctgtgtggggggctggcagataggggtgttcctaggggccacgcggggggaagggggtggcggggccggtcttgcgcttcccacgctccatctgttcagttcactctggtggtctctgttccagtctggcctagggatccctggctccccacggccaagccgagaactagcgggcgcaggttgcattgtgcagactcccggggtcaggtcgcagggtcacgtgc

SEQ ID NO: 10385 - DNA, 59 bp, Homo sapiens
  chr15:89956294-89956353
  hyper
caactagtgcctgcaaagccacggctcctaatcagggtaatttaatatattttaagccc

SEQ ID NO: 10386 - DNA, 35 bp, Homo sapiens
  chr15:89956422-89956457
  hyper
cggccttatttgacggatggaaggagctgctatga

SEQ ID NO: 10387 - DNA, 165 bp, Homo sapiens
  chr15:89959839-89960004
  hyper
tgcttttgaaccaacgcagacctacagggccgacttcctgagggcgaatgtcgctttgctgcagcggggcacgggtttggttcccggcggggcctggcctgggaagcgcggggctgagggcgatgcccggccgctatcccgagtcggtgcgtgcctatgctgcag

SEQ ID NO: 10388 - DNA, 133 bp, Homo sapiens
  chr15:89962758-89962891
  hyper
tctctggctctgaggcgagatgggagctgtcctcccagtggtgctgaaactcgggctgcctccgttggggtcaccgacagaggctcacttgttcaggcacttcctgggtcagcctttccgcctctgagacggg

SEQ ID NO: 10389 - DNA, 476 bp, Homo sapiens
  chr15:90039452-90039928
  hyper
ccctgcagaggccggcgagatgcggagtccgcggctgcagggtagatcccctcctctgcccagctctgggccgagcccttggccaggtggggaccggcgcggatatgcctccgctgggcctgcaggcggcgagacttacttgggtagcgatagtagaattcgttctccatgtcgctcaagttcttgtgcgtcctctctgaccaccagtgggcgtcggcctcgaagtcgtagcgcacgaacaccccgaagagaatcaccataatcacctgcaggagcaggcaggtgagcggcagccgccagcggaggttggtgttccaggccatgctgcaggggtgcctggccgggctggcagcgggcggttcggacgctcggaggccggcggggcttttgagacccgggcaggggggcggggcggccacgtggggcacggagcagctgactcgggcaccgcccgcgcgctcgcccaactggcaggg

SEQ ID NO: 10390 - DNA, 129 bp, Homo sapiens
  chr15:90456073-90456202
  hyper
gaccgcccgggcaccccggcacagagccggcgcactgggctgggggcgcggcgcgggaagtgctgcaggacgcgcggggacccgcgattcccagccggcggatccgggaatggcgcggcccggccctca

SEQ ID NO: 10391 - DNA, 30 bp, Homo sapiens
  chr15:90627537-90627567
  hyper
gtgtcgaggaagtccgtggtgttcaggaag

SEQ ID NO: 10392 - DNA, 69 bp, Homo sapiens
  chr15:90628226-90628295
  hyper
gctcacctgatgaggtcttggttcccatccagcttcccccggtgctccaggccacgtgtccaggcaaag

SEQ ID NO: 10393 - DNA, 30 bp, Homo sapiens
  chr15:90630474-90630504
  hyper
tcgaagtcggtcttatagtgcctgggagta

SEQ ID NO: 10394 - DNA, 370 bp, Homo sapiens
  chr15:90631579-90631949
  hyper
gccagcctcacctcgtcggtgttgtacatgcccatgcccacgccgcctgcggggaagttgtacacttcccactccttgacaccactgccatcttttggggtgaagaccattttgaaagtgccggcccggtctgccacaaagtctgtggccttgtactgcagagacaagaggatggctaggcgaggagctccagtcggggggtgcccaggtcagtggatcccctctccaccctggcctacctggtcgccatgggcgtgcctgccaatggtgatgggcttggtccagccagggactaggcgtgggatgtttttgcagatgatgggctcccggaagacagtcccccccaggatgttccggatagttccattgg

SEQ ID NO: 10395 - DNA, 30 bp, Homo sapiens
  chr15:90633802-90633832
  hyper
tcatcagtctggtcacggtttgggagcccg

SEQ ID NO: 10396 - DNA, 82 bp, Homo sapiens
  chr15:90634776-90634858
  hyper
ggcactaccttctccttgatgaactgccagataatacgggtcatctcatcaccatccatctccaccacgggcttcgccacct

SEQ ID NO: 10397 - DNA, 30 bp, Homo sapiens
  chr15:90645565-90645595
  hyper
cggccgcgagcctgaggctctgcagagcga

SEQ ID NO: 10398 - DNA, 158 bp, Homo sapiens
  chr15:90792608-90792766
  hyper
cggaagaatctggcgtcgaggccggccagctccaaagggcaaacgctgtctcccccacccaaggtagcctcggcccgcgcccaagtgggtgtggctgcgggaaagccccgcccccaggacgcttctccaatgggaactgccctcgtgtccatggcaac

SEQ ID NO: 10399 - DNA, 30 bp, Homo sapiens
  chr15:90895795-90895825
  hyper
tgtggtctctataccgtcggcgggataagt

SEQ ID NO: 10400 - DNA, 31 bp, Homo sapiens
  chr15:91414432-91414463
  hyper
cagtcccccaagagtccggctgaggcagggc

SEQ ID NO: 10401 - DNA, 30 bp, Homo sapiens
  chr15:91475706-91475736
  hyper
gctgccggtgcttgcgagccgcgaagtcgg

SEQ ID NO: 10402 - DNA, 30 bp, Homo sapiens
  chr15:91477883-91477913
  hyper
gtgaagggacagaccgcaacagaaaatcat

SEQ ID NO: 10403 - DNA, 841 bp, Homo sapiens
  chr15:91642936-91643777
  hyper
tcctgatgaggcaaacgagaacaaagcagtcgaacagcaccatgatcgacgatactttgggggcggcgtgatcagaggattccccttcccgggaacttgcgtctagtcctctgacgcatcctagttcggagtgggtggaagggcatgtggagtccacagcgccccctcgccctaggcggggtggagacagcgagacgacgcccatgatcagctggttacaaaactcgaggaataagaagtttaatatttattggtctgcaaatccggagaccttgcggcctcactggtcctccttccctctgagctatctccacacccagccttcgatcagaaggagatttagaagcagagctgcccgcagcgaatacttttaatgcccgggccgggaagaaagcgggttaggatctgatcccgctgagtagaggacccaggagcctcccgccccgcgtgctctgtagcgcgggggcgcgctgcgcgctgcgcctgggcggctggcgggggcggcgtgggcgcggtgatgcaggtgtgacacccgccggcgcctgcctccgcccggatcgcccagctccgcgttagccggagctgcacgcggggctgccggggcggacgctgctctgcctgcatccggaggcggccgccagcggatttgccacccaggtaggggactgcgttgctcgctgcggtgcaaccgacccagccggggcgcggaccccgcgtgcgccagggctcccagactcgcctgcctgggctgaaatatacacgctcgcacagctgagtgctgttcatagtaaatggcacaaaagatcggagagtcttgaaaaaccggcgcagaaaagcaagg

SEQ ID NO: 10404 - DNA, 444 bp, Homo sapiens
  chr15:92459206-92459650
  hyper
ttcttgcccccctcaggtgagcgtcctgaccaccctggagcgtaggttcaacctgcagagcgctgacgtgggtgtgatcgctagcagcttcgagatcgggaacctggcgctcatcctcttcgtgagctacttcggggcacgcgggcaccggccgcgcctgatcggctgcggcggcatcgtcatggcgctgggcgcgctgctgtcggcgctgcccgagttcctgacccaccagtacaagtacgaggcgggcgagatccgctggggcgccgagggccgcgacgtctgcgcagccaacggctcgggcggcgacgaggggcccgaccccgacctcatctgccgcaaccggacggctaccaacatgatgtacttgctgctcattggggcccaggtgctcctgggcatcggtgctacccctgtgcagcccctgggcgtctcctacatcga

SEQ ID NO: 10405 - DNA, 575 bp, Homo sapiens
  chr15:92936725-92937300
  hyper
gtcgagaaaactttgcgaggaggcgagggagctggacaaagagcgggcgagggagggcgtttgccagcctgaggggtgcgccgggcggtgcgcgcacttccctgggctcagctccgtacccggtcgctcgcggtggccagagcccagtctctctaggccaggagtggcgtccggctgcatccccgcgccctcgggagctgaataaagccaggcgggagaagcaaaggctagcgcctggacgctggagttggtgggaggaggcgagcagaggcgcggagcaaagctgtcaaactgcgcgcggagccgggcgcggggcgggggaagggagaggagggagggaggggcaggcgggagccgggagggagcgagcgggctcgccgcgcctgagcaacccctgcctgtcgctgccgctgccgctgccgctgccgccgccggcccggactcgtccggagcgcagggtgtctgcccagctgcgcgcggcgcgcggaggctccggcgtccgccgctgcgccctccggcccctgctcctcgcgccggcccgcgtgggtcccggcgggcgcgaacccaccatgcag

SEQ ID NO: 10406 - DNA, 30 bp, Homo sapiens
  chr15:92938000-92938030
  hyper
ggactgagaccccccgccctcgcctggctt

SEQ ID NO: 10407 - DNA, 907 bp, Homo sapiens
  chr15:93198353-93199260
  hyper
catgtaccaggaaaatccagacgagcacaccccggccccccacccactctcccgggcagggcaggaggcacacggctggctggggcgcaccagggcacctgtgcgtgcaggtggggcgggcgcgcggcgacagcaggttggcgatgccgccctgtcggccggcgggggaaggaagagggcgggagggcccacctgaagacgcgcagcagcaggcaggcgatgaggagggtggtaaaggcgaacgccacgatcacggctgccttgagggtgggtaggtcgcggaggaggatggaaatgcgggtcaccaaggcgtcgccactgctgttggagctggagctgccgctgccgcccgccgccccagacccaaaccgggtggtgttcccgggccccgggccgggcggtggccgcgactcgcgctcgggttcgggccacggcgcggagacggactcggctctgctggcgcgggcggcgggagcggccaggagcgcgagcagcagcagcggcaggagcggggcgggcagcggcacggcgcgcatagtgcggtgggtcggcacaggatcgggcagggcgcgcgcggctgagctccaggatccgcaccagcacggaggcctgcaccgggggatcctgcggcggaggcggctgcgcggtgcttggcaggaagctgcggcgcccggaagagcccgcgccaccgccgccgccaccaccaacacgttgcaaggagtcattcgacgggccgcggccccacgtgggcggggcaggccacccggcctgggtcccggctgcgctccgctcgcccgcgaccccaattcctcgggacttgagaccccgtggtgaagcagcaactgccacgatgacacttgggctggccctgtgttacacgtttcacgtgttttatttatttcattta

SEQ ID NO: 10408 - DNA, 30 bp, Homo sapiens
  chr15:93257898-93257928
  hyper
gaggctcggccgggcgccctgcttcgaagt

SEQ ID NO: 10409 - DNA, 477 bp, Homo sapiens
  chr15:93615901-93616378
  hyper
tgcgccctccccacacggctccatctcacggcaactcgggcagggtgcccctctccgggtccccaagggcaggcatcgcacccacgacggggtgcgggagaaacaaaagacccgtggaaataggaggcggggtccggaggaggtccggagaacttgagcccggactcactcgcgcacatctggcccagcattgaggggcggcccagggacccggccccgcgcgcccggccggcagtgccttacctgcggggaagctgcagagaaggaaggcgagggtcggccagaatcccagggctgaacgtcctgcccctctccccatacccatccatccagctcggcctgttaccactagcctctccctggaagaagagttcagaaaaaaagaagaaaataaatcacgctgcgaagaaagggcagcctcgctccgccggcgggagcagcgagccgggaggctccgtccacctcggccgcgggcgc

SEQ ID NO: 10410 - DNA, 357 bp, Homo sapiens
  chr15:93616396-93616753
  hyper
cgcgccgccccccgcgcgcccctccctcgccatccatcactcggttctccgccaatgtcgacgcggccccgcgccccagccgcctgcgcaccgccccctcgcgctcgggtttcagcgaggccggcgaggtagccggaggcggccgggcggggacccaggctgcccggccgcagcgctcgccgtgaggacctcggaaaaccacggccctagatcagagggcgcgccacgctccccgaccctcgcgccatctccagcccgcggctgtccttgcaaaccaggcccagcacccttgggaggccgcagggcatgaggcggggcaggacgcccccttaatcccctccacgaatatccaatcca

SEQ ID NO: 10411 - DNA, 752 bp, Homo sapiens
  chr15:93631632-93632384
  hyper
cgtacgccggcgcgccgaggcaaagggccgccgggacgcgagcccacgcggtgcactgcgccgacatccccgagggcaggagatggccaggcagctccgcagccgggcgtcgagcgggaggcgggggcccgggcggcgcgggccaatgggggttcacggcgggacagtcgggtggccggctccgtccggggctccgcgagccgggctgagggaaggagctcccagcccgcacacggtgtaagggacgtgtgccgggtctgcccaaccacgcgcgctggcggctgcccgggggagagtattttaggaaaaaagaacaaacaccaaaccacaaaaactttcctgctgccaacagctaaagcgatagaggcgcagcaaagctccaaatgtgggcaagatgggagcaagatgagacgcggggctaaggaagaccaaagcagcgccgtggccccggcatgtgtcggcggcgcctcggagatgtcagagccgggtctgcccggctcccgacccgcgcttaccttggcggctgcatgagcccctgcggcccgcggggggtggcgctggcggggctgcgggagaagagggggtgtcggggcgccgctcgtctgccccggggcaaggtgggaggggctccgctggcgctggtccccgccgccccggccggctcagcagcggcccggggagcgcctcctgctcccgggctgcatgcctgcgagcgcctggcggagccggcccgggagcgaacggccagtgct

SEQ ID NO: 10412 - DNA, 307 bp, Homo sapiens
  chr15:93632604-93632911
  hyper
ggggtgcgggctcgcgttgccccgccccgccgcggccccaccctcccgcatcagcaccggctgggtgggtgcggagtgcgccagcggccaagtcaagactccttgaatgctcaggttagggggcgcgggcggcaagtgcggcgactccccggggcgcctccaactttccgaatcgcccgcagggttgcggtggagcgcacggtgtccttcagttaggcggtggtcgaggggagttcctctgagatttctggagaaggcggttacatccaagacaaatgctgttgcgctctgcggagacgcacctttg

SEQ ID NO: 10413 - DNA, 30 bp, Homo sapiens
  chr15:93633130-93633160
  hyper
ctttccagtctctgcgcttttacatgcaca

SEQ ID NO: 10414 - DNA, 31 bp, Homo sapiens
  chr15:93655833-93655864
  hyper
caactgaaactctgcacgcattaaactcaaa

SEQ ID NO: 10415 - DNA, 14 bp, Homo sapiens
  chr15:95387987-95388001
  hyper
agtcctttggagtg

SEQ ID NO: 10416 - DNA, 30 bp, Homo sapiens
  chr15:96284567-96284597
  hyper
gggccagccagtagcttcccaggacatgaa

SEQ ID NO: 10417 - DNA, 206 bp, Homo sapiens
  chr15:96596615-96596821
  hyper
cggggagccgctggcgctggcagcctgcccaccggcgacggtgaaccgggctggcaccgagcagggagccgggcctgccagcctgtccgcctcgcgagaggaggcccgggctcgccctctctgccctccagatgactctttgcattcttgtcaaatatatttagaacaagaggtgtccacttaaagagaaacgtttgttaatcact

SEQ ID NO: 10418 - DNA, 30 bp, Homo sapiens
  chr15:96865017-96865047
  hyper
gtcccacctgcccacgagcagggaacctgg

SEQ ID NO: 10419 - DNA, 31 bp, Homo sapiens
  chr15:96873708-96873739
  hyper
ccggcgacgccgctcgcgctaggaccgggct

SEQ ID NO: 10420 - DNA, 82 bp, Homo sapiens
  chr15:96873910-96873992
  hyper
ctcagtgagctgatcgcggagaagccacttctgccagccccggcgcctataaatcgcattccctcccgcgccccccttttta

SEQ ID NO: 10421 - DNA, 46 bp, Homo sapiens
  chr15:96876680-96876726
  hyper
ttcctctctctttagccggcctctctctctccgccctctccctccg

SEQ ID NO: 10422 - DNA, 30 bp, Homo sapiens
  chr15:96884494-96884524
  hyper
tgcaccgcgagcgccgggctgccaggctcg

SEQ ID NO: 10423 - DNA, 708 bp, Homo sapiens
  chr15:96897392-96898100
  hyper
cacacacacacaccccacacacgcactacgagaaggggagtttgatcttgtctcattggcgtctcgggtctgaaaggaaaatcgtttgggtaaacagccaagcttccaggcttaacgcccggctcccgcccccgcccctccatcccctcctgcctcccccactcgccttcaaccccacccgccacccacactcggctccgcagccgggccccgagcgagctccgcgagtcctggcgagagccgagggctccccgggttcaaagggccgcagccccgagggaacgccctccttgctgtgccccggggggcagaagcggactgctgggcggtgggaccggcctgggccacggtaggaaccgcgaaacctccggcttccctaaatagagctggtctcgggggagggcgccggggagttcggagcccggagggacatttttgccaagaccgagcggaagccgagcccgtgcggctggctgcgcctaggagttccgccacgggtccgacggggcaccctgggtccccgcagcccgtcacaggcgtttgcacatttgtgtgcacgaccactggcgggggcgttgagcctctgctagccgcctcgggctccgcacacccttgggtgattacccggcccccacctccctccaagcgacctcggctccaggaaaaggctttaatctgctattaagcgttttccaaagtttctttcca

SEQ ID NO: 10424 - DNA, 134 bp, Homo sapiens
  chr15:96903476-96903610
  hyper
cccaggctggggcagcgagggcgtgggggtctcctagaccggcccgggtgacggcggtaggggaccagcaacttccattttccgaccccgagaagggaaactcaacggagggggccggtcgagactcctcctcc

SEQ ID NO: 10425 - DNA, 348 bp, Homo sapiens
  chr15:96960781-96961129
  hyper
ccagctctacggggtcgcttttctcttaagcgccctgtgagggtcctcccttttaaattatttcctgcccagttatttttcccccaattaatccagaatagttttctcatctgctccagatgcacgcaaactgcagagctgaaatgaactgaactaagagcggaattgaaatacaccaggggtttccctgcaggaattgttccaacgaggtatccacgggtttcaagatccgttgaaatgcttcaggtgtggtttgcattctcaccgaccctcgggccagttccctcgcccccaaccgccgttatttgttccccccacctacttcaatagttgcgcctcacccttcct

SEQ ID NO: 10426 - DNA, 30 bp, Homo sapiens
  chr15:97491137-97491167
  hyper
ggctccgcctggcccgcgccggcccgcgtc

SEQ ID NO: 10427 - DNA, 50 bp, Homo sapiens
  chr15:98503768-98503818
  hyper
gcacggccttcctgcgcccacccacgcgtgggagcgccaatgaaatgact

SEQ ID NO: 10428 - DNA, 19 bp, Homo sapiens
  chr15:98503857-98503876
  hyper
gcagctgaccaatggccgc

SEQ ID NO: 10429 - DNA, 63 bp, Homo sapiens
  chr15:98504280-98504343
  hyper
accgccgcctggggcccgagcacctgcccccgcgcctcggccagcaccgcggccctggctgtc

SEQ ID NO: 10430 - DNA, 314 bp, Homo sapiens
  chr15:99091213-99091527
  hyper
ccacaaatctgaagcgtggcttgcgtggtcagccgcctgcctggcacccggtgaacagtttctcccggactctctgcatctagccccaaagaatctaagattctttgtctagaaaagtgccctggtcttccctggcacccttcgcggtgggtttccttgactccgcataaactcccgttccagcccaaatcagaggcggtcgcagcagccgttcctcgtctccatcagcatccgcgttgccatttccccgtcctgagctgttgctcatatcaaatgtcactcggggatgactaagagccgatgttgatgaggag

SEQ ID NO: 10431 - DNA, 168 bp, Homo sapiens
  chr15:99191461-99191629
  hyper
ggcgggaggggagggcgcgtgcggggtggccggcgcagtgcggtgggggcgggagcgggtgggcacgcgcgcgtgtctctgtgtgcgcgcgggaggcggtggggcgggagatgggggcggcgcctcgcagtctcgcgccccacgcccgggctccgctccgcacgtctt

SEQ ID NO: 10432 - DNA, 1390 bp, Homo sapiens
  chr15:99192803-99194193
  hyper
aaaaggaatgaagtctggctccggaggagggtccccgacctcgctgtgggggctcctgtttctctccgccgcgctctcgctctggccgacgagtggagaaagtgagtatgtgcccgccgcccgcggccactgcgggaacttttcctccgaggggctgcgccctgtttgcgaaacccgagttgccaccgtcgcagctgtcgggcccccgggctcgggagcggcggggtggggcgcagggcggctctgccgggagggaggctgcagcggacccgggacccgggctcgttcgtctggagccccgcgggccctggctccgcgcatccccgcgcgggaagggcttttctctttctccgtcctgacagcccagccgtgtttcccggctaggcgcgaggactcggtagggaagttggtgccggggcgggctccgcggttcccgggccccgcgacccgcacctcgccccttccatgcgcaagagcctctccgcacacagcgctgatcccctgcggcgcgcaggcagcagcgacagcaccctgggccgcaccgcgtctccgctgctggggctgaccgggcagtggggagcgggcagccgcccggcccgcggggtgcgagttgccctcgaggggggaggtgccctgcggagaggccccgaagccccaggacacgtctccaagcgcccgtcgctgcctcccgtcgcccaacgtgcttttgcccctcgggctcctcgggttcctggccttgcccgtcactttggcccgctcctcgttgggttacctgcccccggcgtcccggggctgggcggtggggtgaggggaagcgctctctgggcagccccccgggaagtgcgaggccgggagtcttcctcagcttgtctcttccggggagcgccactgggtccccagttcagagggctctgggatggtctcccagtttctcccgggccgggggatggaggggtactagggccgcatccgagtgtgcgttggtgggtgtgtggtcggagccgacgtgcattccgacacacgtgctcgcagcgcggggtgtagtcgccgcctcacggggacacctagacgcccgtccctggcgagaggtgtcgtacgctgtggtttcagcgccagggtctgcggcggcgcggggagggtgttgtgttttgcgagcgcggagccctggccttggttttgttgtggtcggcgtcgtgtcgccctctcttctgccgccccgcacttcctttgtacgtagttaataagcagtgtcgctccacattcgctgtcttttgcaatctgatagcttttgttttggtggtgtcgggtgggggttagtagggaagcgcggggatgcggggagcgagaactccccccggtgtctacggccggaggaggtgggggttttatt

SEQ ID NO: 10433 - DNA, 39 bp, Homo sapiens
  chr15:99955138-99955177
  hyper
ctggccgtgggagtccgcgggccacgtgcagtctcctca

SEQ ID NO: 10434 - DNA, 31 bp, Homo sapiens
  chr15:100107046-100107077
  hyper
cgtgcggggagacgtcgcggggacagagggg

SEQ ID NO: 10435 - DNA, 31 bp, Homo sapiens
  chr15:100273945-100273976
  hyper
ccgcagctttctcgcccgtaaagaggccttt

SEQ ID NO: 10436 - DNA, 592 bp, Homo sapiens
  chr15:100881251-100881843
  hyper
cggcggcgccgcaggcgctgagcgagacgagggagccggggtggccgagcacacggcccgagtagaagcacagctcggcggggcggccgcggcgccgggccgcgcccgcctcctccacctcgaagcctcgggacaggaagcgcaggtcgcggcgcagctgaaggtacaggtcgcgcccgaaggccggcaggtgcagcagcagggcgcgctctccgggccgggcgcgcggggcggctgggggcgtgcgggggcgtcgccgccgtcggggcccgggggctgcgggcagcggcggcaggtgcacgtcgtcggggcgcacccgccacgggagcaccacctccacgtcggccgccgcgtcgccgacagctgcggggagagaggagacgcgtcagcgcggcggggcccgcccggacgcccgccctcccgctggccgccagccgcgccagcgcggggacagcgcgacccggagccggcgctgccttcccttccctcgcccggcacctccacgctggcccgcgccacccggggagggtctccggcgcagccgcgcgagcacctcccggaacggcgccgcgcatcggcgagcggagacccg

SEQ ID NO: 10437 - DNA, 492 bp, Homo sapiens
  chr15:100881966-100882458
  hyper
cgcagagggaaggtagccgcaggacgcggggtgaagagggctgtgggagggggcgctacctgtgcccgggtccagtccccaaaccagcagcagcagcacgggcaggacgagcggaggcagcagggcgccgtcacacatggtacccgggaccggcagcccccccggaccgtggcggcgaagcaggagcgcgctaggcggcggcgccagccggagtgaagccctccagcctttggaaaaagtaattagcgctgcggacaaacccaacgtggtaaaccccaagccccgccttcccctcggaaggcgggaggggattgggccctcgctttcctccgccccgcctcctccttccctactggttgggatgggtcgaaaccacagtgcgtagttaggttgtcagcgctttcttacacgtggtttctgggcagtggcggggacacggcaccaggtggcgcgcgggagccgaccggagccgtgggaccctggaagagctgg

SEQ ID NO: 10438 - DNA, 19 bp, Homo sapiens
  chr15:101419292-101419311
  hyper
cggcgccagggctcctcgg

SEQ ID NO: 10439 - DNA, 35 bp, Homo sapiens
  chr15:101459154-101459189
  hyper
gtctgtttaactgttacggccgcagtgtgtgggcc

SEQ ID NO: 10440 - DNA, 31 bp, Homo sapiens
  chr15:101835747-101835778
  hyper
tcctccctccaccagccgtcgcgggaacccg

SEQ ID NO: 10441 - DNA, 30 bp, Homo sapiens
  chr15:102515284-102515314
  hyper
aagctgggggcatcggcaaggccaagctgc

SEQ ID NO: 10442 - DNA, 30 bp, Homo sapiens
  chr16:103516-103546
  hyper
agaagcggtggcagcgttgtccctcctcca

SEQ ID NO: 10443 - DNA, 113 bp, Homo sapiens
  chr16:215759-215872
  hyper
agtctgcagtaaaggtgcccacgcgcaacggcgtgggtcaatgccagaaaccctgggatcccggaggtcgaggcctccacacagacgggaacccgggctggttacgttccccg

SEQ ID NO: 10444 - DNA, 534 bp, Homo sapiens
  chr16:215912-216446
  hyper
cgataaggacgggcggggtgcccggaggctctataaggaggccagggcggcgggcgcggcccccagagcacgtcaggcggcgccatgctcagcgcccaggagcgcgcccaaatcgcgcaggtctgggacctgattgcgggccacgaggcgcaattcggggcggagctgctgctcaggtcggtagaggcggggtctccgggagctcagggaggtggagatgagggttttgggcgcgtgggccgccaacgccatccaaggtccttcgggtgcggatccccgggctctgggcggtgtgggcgctagtgaagccccacgcagccgccctcctccccggtcactgacctggtcctgcaggctcttcacggtgtaccccagcaccaaggtctacttcccgcacctgagcgcctgccaggacgcgacgcagctgctgagccacgggcagcgcatgctggcggctgtgggcgcggcggtgcagcacgtggacaacctgcgcgccgcgctgagcccgctggcggacctgcacgcgctcgtgct

SEQ ID NO: 10445 - DNA, 273 bp, Homo sapiens
  chr16:216505-216778
  hyper
cgcagccggggtgggggggctctgggggtccctagcggggcagaccccgtctcaccggccccttctcctgcagctgctaatccagtgtttccacgtcgtgctggcctcccacctgcaggacgagttcaccgtgcaaatgcaagcggcgtgggacaagttcctgactggtgtggccgtggtgctgaccgaaaaataccgctgagccctgtgctgcgcaggccttggtctgtgcctgtcaataaacagaggcccgaaccatctgcccctgcctgt

SEQ ID NO: 10446 - DNA, 36 bp, Homo sapiens
  chr16:330454-330490
  hyper
ggggcgacccgggtgccggcccgtgcgggcgacacg

SEQ ID NO: 10447 - DNA, 30 bp, Homo sapiens
  chr16:475479-475509
  hyper
gcaaaacaccccttcgcggccgctgcactg

SEQ ID NO: 10448 - DNA, 40 bp, Homo sapiens
  chr16:577639-577679
  hyper
ctcccggcctgcctcgcgcaggcaccgccccgagcttccg

SEQ ID NO: 10449 - DNA, 22 bp, Homo sapiens
  chr16:600998-601020
  hyper
ggtgagggtcccctgtcggtga

SEQ ID NO: 10450 - DNA, 30 bp, Homo sapiens
  chr16:619799-619829
  hyper
ggaaaccgagctgacgcggggctggcggcc

SEQ ID NO: 10451 - DNA, 51 bp, Homo sapiens
  chr16:717959-718010
  hyper
gggcgccaggaccctgcgctgtccgccgtggccggcgcgtccacacggtgg

SEQ ID NO: 10452 - DNA, 873 bp, Homo sapiens
  chr16:750453-751326
  hyper
catgattcgacctcacggccgcccttaggggtggaggggtcgctacctcaggtttggggaaggaacacgaggctctgaggagcgaatttgccccaggtgtccggggaggcctggcgcggggctgcctcggttccctcccagagccggggagaggggatatcgcaggatgccggcgcccgaggcggcagcaccaggcccacgggcgccccagtctaaatatcctccgtgcccctagagcggggaccctcgctccccagacccggaagcgccgccttccccgccagggacgcctgggcctccgcagaccccgccggccggcgcgccacccgcgccagcaccatggacagcggccgccccagccgcgcgctcagggccaggcccgggctggcttccaccgcggacggctgcggggtcggggcagccccgcaatcccaaatcccggcagcccccgctcagcagggaggggccccgggggcgaagagtgggggagaagccgggaaggatccggaggaggcggcgggggcggcgccaggggaggaataatcccggcgcagtgccgatttaggttgaaaacgctcccagtcatgggcctgcacgtggagcgccggggctgggggaggcattcgcggggctcctttcccgccccgctcgggagctcacgtttgccggcgcccacagtcccgtccccacctccaggcctcagggtcgagatggagaaaccaagccgcactttgagagcccacaggagggaggggacaggctgaggagcggccgtctgggtatgggtccggggcctggcttccctcatccacacccgcagcgctgccagaaggcgctgctctgcctgtggtcagccctcgacccgtgtgcttg

SEQ ID NO: 10453 - DNA, 105 bp, Homo sapiens
  chr16:755703-755808
  hyper
gggagaggatcggccgccccaagcctcccaccggggaggctgaggctgtgcccagataaataaggccgctttgcagggaaccaggcgggcgcctcctcctcccct

SEQ ID NO: 10454 - DNA, 61 bp, Homo sapiens
  chr16:765257-765318
  hyper
gccccgactccccggacgccgcccgccgtgccatggggttcccggccgcggcgctgctctg

SEQ ID NO: 10455 - DNA, 60 bp, Homo sapiens
  chr16:896899-896959
  hyper
ccggtttcctgtaacccgtgtgtgtcccgtgtctgtaatgcgtcccggtttcctgtaacc

SEQ ID NO: 10456 - DNA, 30 bp, Homo sapiens
  chr16:1021287-1021317
  hyper
gccttccgtcagtccgagttgcagaggcca

SEQ ID NO: 10457 - DNA, 236 bp, Homo sapiens
  chr16:1030443-1030679
  hyper
cggaccagctccttctgccgaccgggccggggagaccgcgtggctcagtggctgcagcggccaccggcccgggcgtgggggctttgagggcaccggcgcggtaggtcacccgggtttcgcgggccgcaagctcggagacgcgcgtgtcccgcgttggctgcctgacccggaatggcgcagccccttcgcctccagcgcgctggttgaaaggatccgagccaccctcggggacggcc

SEQ ID NO: 10458 - DNA, 31 bp, Homo sapiens
  chr16:1153581-1153612
  hyper
gcgccacccagcccttcgctctgctgtgacc

SEQ ID NO: 10459 - DNA, 155 bp, Homo sapiens
  chr16:1203807-1203962
  hyper
cgttggtgggggcgtccccggagagccccggggcgccgggacgcgaggcggagcgggggtccgagctcggcgtgtcaccctccgagagcccggcggccgagcgcggcgcggagctgggtgccgacgaggagcagcgcgtcccgtacccggccttg

SEQ ID NO: 10460 - DNA, 108 bp, Homo sapiens
  chr16:1204002-1204110
  hyper
cgcgcagctggtgcctccggctggtctgcaacccatatccttcccggccggcggggggcggggggcggggggcgtggggagggtgggggcccggggcgcgggactccc

SEQ ID NO: 10461 - DNA, 120 bp, Homo sapiens
  chr16:1204128-1204248
  hyper
cgcccctgttggtgggacctggcgtgggccgggcgcgcgggggtgcagggcaggggctggaggaccgcgctctaatttctgagagtggcgggcttggggggccaccgggcgcctccggac

SEQ ID NO: 10462 - DNA, 30 bp, Homo sapiens
  chr16:1360204-1360234
  hyper
tgggggccggcgagcgggcttgttttcggt

SEQ ID NO: 10463 - DNA, 30 bp, Homo sapiens
  chr16:1384640-1384670
  hyper
agattcccggggttcgactggaatgagacc

SEQ ID NO: 10464 - DNA, 31 bp, Homo sapiens
  chr16:1420663-1420694
  hyper
aactaagccattggcacggtcctcccagcac

SEQ ID NO: 10465 - DNA, 244 bp, Homo sapiens
  chr16:1429036-1429280
  hyper
ggctgcctcagccccgggcgttaggaaaccaccggccccgctgagtcaccgcgacacagcccggctctgccgtgacacagcacattcaaggcgccgcggtcccccggggtcagggacacgcgaggacaagctacagactgctcggaactcaggacagggcgggggagccgccgacgccagggaaattcccgtaccacgcgggctgagtgcaggcgggccaggccaggacgcaggggtcggccct

SEQ ID NO: 10466 - DNA, 135 bp, Homo sapiens
  chr16:1660659-1660794
  hyper
ctcacctctgccaggccgctgagccgccgcgcgttgccgggacaacggcgcgccaggaacgcggaaatagccgaaggtgagcgaggcggccccgaggactcccgaagcgccccgagcggccggaaagagccgaag

SEQ ID NO: 10467 - DNA, 30 bp, Homo sapiens
  chr16:1664071-1664101
  hyper
gcgtggggcaggtgcgcggggcccgggagc

SEQ ID NO: 10468 - DNA, 34 bp, Homo sapiens
  chr16:1875948-1875982
  hyper
cttagaatggggtacgcacgccctgccgatgcac

SEQ ID NO: 10469 - DNA, 30 bp, Homo sapiens
  chr16:1968583-1968613
  hyper
cgggaccaccaggacgctcctgctccgaga

SEQ ID NO: 10470 - DNA, 23 bp, Homo sapiens
  chr16:2014613-2014636
  hyper
cgtcatccgccatttgctgggaa

SEQ ID NO: 10471 - DNA, 112 bp, Homo sapiens
  chr16:2040848-2040960
  hyper
acctctgggccagccgcacctcggcgcctgtcttggaggagggcggtgcccacggtggggcaggggctttggcctcccctgcggagtggctctgaccagaccgggaggcagg

SEQ ID NO: 10472 - DNA, 260 bp, Homo sapiens
  chr16:2040980-2041240
  hyper
cgcacgtcccgacttgtggcccactcttggggacaagtgcatgtcccggcttcccccttggctccactctcggagctggagcgggaaaggagcgaagggatgaggttgaggctggaggtcgtttcttggaaacacagggctgccccgtgcagcgctggttaaaatgactgcggtccccctcatgcctgtctcccggaactggtgggcaggaggcattgaggtttgacggaacctcagaggtcaacggtgtcatcttttca

SEQ ID NO: 10473 - DNA, 405 bp, Homo sapiens
  chr16:2041775-2042180
  hyper
gcatagtagatgctcactaaacggcccgtgttgtcaataattactaaatacgcgagggttcgggaaagaaagaggtgacaccgccccccacccagatacgggcctgggaacgcagggacaggcccaggggcgtgggcgctcgaggcgggctcgcagaggtcgggtcgccgcagggccctgagcgccgcgccgcacgcaggtgttctccatcgccgtcttcgggcccatcgtcaacgagggctacgtgaacaccgacagcggccccgagctgcgctgcgtgttcaacgggaacgcgggcgcctgccgcttcggcgtcgcgctgggcctcggagccttcctcgcctgcgccgccttcctgctgctcgatgtgcgcttccagcaaatcagcagcgtccgcgaccgccg

SEQ ID NO: 10474 - DNA, 30 bp, Homo sapiens
  chr16:2042498-2042528
  hyper
ggaggcgggacctcgcgccacgcggcgagc

SEQ ID NO: 10475 - DNA, 30 bp, Homo sapiens
  chr16:2058557-2058587
  hyper
tcctttgatgtaaacgtctacttaaagaaa

SEQ ID NO: 10476 - DNA, 30 bp, Homo sapiens
  chr16:2060250-2060280
  hyper
cacaagcgtggtcccgcctccacttcccta

SEQ ID NO: 10477 - DNA, 30 bp, Homo sapiens
  chr16:2097895-2097925
  hyper
tttccgccagagggcggcacagaactacaa

SEQ ID NO: 10478 - DNA, 110 bp, Homo sapiens
  chr16:2301985-2302095
  hyper
ctgcctggggtgagcccggcctcctgcccctttgggaacaggatcagagctgcaggtttagtcaccgaaatgggggtgggggcagcagaacccagcggtaagaacaggcc

SEQ ID NO: 10479 - DNA, 35 bp, Homo sapiens
  chr16:2533374-2533409
  hyper
aggagcgtggggttggcgggcgggagttggggctt

SEQ ID NO: 10480 - DNA, 30 bp, Homo sapiens
  chr16:2571000-2571030
  hyper
cttctctcaagccacggaggacgtgggttc

SEQ ID NO: 10481 - DNA, 30 bp, Homo sapiens
  chr16:2582582-2582612
  hyper
tctgttacgtatcacgcacaggtggatccc

SEQ ID NO: 10482 - DNA, 30 bp, Homo sapiens
  chr16:2732188-2732218
  hyper
atgtacagtgtagacgtttgctggcatggc

SEQ ID NO: 10483 - DNA, 30 bp, Homo sapiens
  chr16:2732709-2732739
  hyper
acttcctcaccactcggcagaccctgtgcc

SEQ ID NO: 10484 - DNA, 30 bp, Homo sapiens
  chr16:2802466-2802496
  hyper
actggccaacgggacgcttagtctttcggc

SEQ ID NO: 10485 - DNA, 30 bp, Homo sapiens
  chr16:2828287-2828317
  hyper
cagtttttgaactgcgtagaacctcggcaa

SEQ ID NO: 10486 - DNA, 31 bp, Homo sapiens
  chr16:2969679-2969710
  hyper
accaccatgcccagctcgaagtactactttt

SEQ ID NO: 10487 - DNA, 43 bp, Homo sapiens
  chr16:3016806-3016849
  hyper
ggcggggaccaggggcctgggcgggcctcgaggtggggcctgg

SEQ ID NO: 10488 - DNA, 94 bp, Homo sapiens
  chr16:3017156-3017250
  hyper
cgctgcgcctgggcactgccgcgctgctgctcaccttccgaagcgacgcgcgcggccacgcgcaaggcttcgcgctcacctaccgcggtgagcc

SEQ ID NO: 10489 - DNA, 31 bp, Homo sapiens
  chr16:3018712-3018743
  hyper
gggtgctccttgtgggcgataactgggagca

SEQ ID NO: 10490 - DNA, 31 bp, Homo sapiens
  chr16:3071261-3071292
  hyper
caagtgcatggactgcgcgtcttgcagggcg

SEQ ID NO: 10491 - DNA, 4 bp, Homo sapiens
  chr16:3078145-3078149
  hyper
gggc

SEQ ID NO: 10492 - DNA, 321 bp, Homo sapiens
  chr16:3078252-3078573
  hyper
cgatcaccacctgcatgtcgtcctgcgggaggccgtggtcggctcagcgccggtcccgccccttgccccgccccgcacacgggccccgcccctcacctgccaggcctccagctcctgcgtgagcgccaccttctggcggatggcgcgcagcagctcccgagacagggagtctcgctccagcgagacgcggttgagctgcagggacagctccagggccctaggcgggcaggagcagaagacgcgtttgagggcgctagggcctcagggagccggggtggcgggggacttctgtacccgggcgggaggagggctgcaaacacc

SEQ ID NO: 10493 - DNA, 30 bp, Homo sapiens
  chr16:3156366-3156396
  hyper
catggaggaggcctcggcgcttccccgtgg

SEQ ID NO: 10494 - DNA, 31 bp, Homo sapiens
  chr16:3156726-3156757
  hyper
ggggccgttgcttgggcgacaggctccagcg

SEQ ID NO: 10495 - DNA, 30 bp, Homo sapiens
  chr16:3184679-3184709
  hyper
cgcatcccttcgggcggagcagaagctcca

SEQ ID NO: 10496 - DNA, 272 bp, Homo sapiens
  chr16:3200713-3200985
  hyper
cagaagattgagggttcgagtcccttcgtggtcgttgccatgttaacgttttcttccagctccacttaaaatttcttcacctgggactgcaccctgggcgactacgacactcgaactgagtgcgccggtcgctctcccctcacccccgtaggaacactgggacctcgccctgcgcctccagtcgcgaagctaaggacccagggccagaatagcagcgagggcgacttagagaacgccggcagggccctggcggactgcggagcttgaagcca

SEQ ID NO: 10497 - DNA, 114 bp, Homo sapiens
  chr16:3209165-3209279
  hyper
gaaggactcgcctgcgcctcctgactggagccttccacctgggagttctgagtgcgcctaaggcctggcgctgaggcagtggaccccagatccgggacccgaaaggagggcaaa

SEQ ID NO: 10498 - DNA, 2 bp, Homo sapiens
  chr16:3220284-3220286
  hyper
gg

SEQ ID NO: 10499 - DNA, 118 bp, Homo sapiens
  chr16:3220438-3220556
  hyper
cgccccggaatctgggaggcggcgtgaccaggtgcccgggttccatccgctggggctgggcagcccccctgcccccgcccagtacagaggctcctgccgggggaggcgtccatcgcgt

SEQ ID NO: 10500 - DNA, 302 bp, Homo sapiens
  chr16:3220590-3220892
  hyper
cggagactgagttggctgcggccaccgggtccccggacaccgtcttcattcactcccaccctcagtcaagcacctgtacccgcagtcctttcctaaaagaagaaaaacggccggtcgcgcgctgtccagagtactcagtcctggatccaggaggtggctggcggtgagctgatttccgggttcttaaacccgggcccggggcccaaggccccgcctggtggggtctcatcctgcagtttgagaaaccgaagaaggtaggagagggaggaagcgccggctttgcctgtgaaagattctttcat

SEQ ID NO: 10501 - DNA, 559 bp, Homo sapiens
  chr16:3221141-3221700
  hyper
cgatgccagctctaggagcgtggccgggagcccacgatcgcggcagcgagaagcccaaccagaggggaggagggagtccccggagtgggacagcgctcaggtctggggtggggttgatctagggcaaaatagggcgggcggcctgtggcgatgggcaggaccctctcgcccaccacacgcggaactcgctggatcctctccacatccaggccgcgtccactggctttccaacctgctcaggtccttaaagaaggattcaaaaggtgttgcggtattggcccaacaggatttgaccctgaggcccactctcaccctaatcataaccgcaaaaccacagcgcctggagagagagtgagagagaaacagaaacggagcgagtgtgtgtcgctgtgatgccctttgccgtcgctgctcatccccagtgacctcctggaactttttcagctcttgctgacagaggaagacacgggggcagagctaacgtctgagtcagggcagaggcgctgggctccatccgagggaggctatgggggcgcctctgggatggagccaaccaccg

SEQ ID NO: 10502 - DNA, 679 bp, Homo sapiens
  chr16:3221786-3222465
  hyper
cgcagacccggtaaccccggcgcaggggaaaatacagcggggagccccaggctgcaggcctgaccctgagcatcccctaccaagcccagtgtggatgggctctgtctccaaggggctggttcaccagggtctccccgcagcgaccccagaattctgccaatcacttggggacggcgatgagctctatccacttcggaatcagccgatttgtgccggattggtggcaggtgtctgaaatgtcagcggaaatacacgcacgggaggctcgttggtctaggggtatgattctcgcttcgggtgcgagaggtcccgggttcaaatcccggacgagccctagaagtggttacttttcccttgtcattttagagaatatagagctagaaaatcggggaccgagcctgaagcctcaactaccagtcgcgttgctccgcttcaggtcggtccaggtctgtgcctcagctacaagggacaaggatgctcctgaggctggcctggtcggcacttgcctcagcctcgagggagtcccgcgcccttctccttcccaaccccagaccagagaagctgtaccctctgcagcccgggtcgctcagctccacatgggctccgggtatggtggaggccggtggttgggttctgagtgatcgagtagtgtgcacggtctgggcgggccctggagagc

SEQ ID NO: 10503 - DNA, 236 bp, Homo sapiens
  chr16:3232780-3233016
  hyper
agcagagctaggaggagactccgatttcctgaagtctggaagagacaagttcaagcgcgggtggacgcggagggagccctgagcccccgcttctccctgcgccgcacaaaatggggagcatcccctgtgcccccacaatccggggccccccgggccctcgcccgcctccgcctctcagccctgggctggggatccgcgcgtcacgccgcgtcgcgtagtgaggagctccagctccg

SEQ ID NO: 10504 - DNA, 132 bp, Homo sapiens
  chr16:3233198-3233330
  hyper
cgcttctcccgctccggtcctctcttctcccccagggaagccaaaacccagaaggtgagcttcccacgtggaacctcaattcaagaggctgacactgagcgtcgcttcgctccaccagacccgcggcgcccg

SEQ ID NO: 10505 - DNA, 669 bp, Homo sapiens
  chr16:3233434-3234103
  hyper
cgtccaggtgtcggttccggggcaccttttactgtcactctgtccttctctgtgtccaaatttcacccggagcccgagaattcggcaggtctggactgaaaacgtctccccatcccctccggatccaagcctcgaatttcctggctcagtgggaaggcctcggggtctgggcgtggagacggggcccgagacccccaccccgccagggcccactaaagtgctgccagctgagccccggccttcgcccctccttcgtctctccctcattcccctccctctgacaccccgccacatacattactccccgcaataccatgcaattttaagctagggtagggctcacctgagactggagccgccataccgtcgaaccctacgaaaaatttatgcccgtaaataaacaagcccggcgcattcttccttattctaaataacttcttcctgctgcacggggtcgtctcctttaaccacggctaccgcagttggtagtgctggatcccatttcagggtgatgggatgctggatcccatttcagggtgataggaccgaccgcaaggcgaacgattcaggcccgtccgtctgcgtcccgggaccccgggaggtctccactgacgccctgccagcagcaggctccctccgccttcctagtctcctgtccttgctgaaaat

SEQ ID NO: 10506 - DNA, 194 bp, Homo sapiens
  chr16:3234164-3234358
  hyper
cgcacccaaagcgagaatcatacccctagaccaacgagccgccgcttcccctctgttttgttgttgttgttgttgttttttgacacgtccttccgcccctgacgcagagcgagactctctccatcgccccaatagctcagtccttagcgcgcgcacctgcgaatctgggcttttgggttcgcggccaccctcag

SEQ ID NO: 10507 - DNA, 57 bp, Homo sapiens
  chr16:3237949-3238006
  hyper
aagattcgcaggtgcgcgcgctaaggactgagctattggggcgatggagagagtctc

SEQ ID NO: 10508 - DNA, 1531 bp, Homo sapiens
  chr16:3238264-3239795
  hyper
cccggggtcccgggacgcagacggacgggcctgaatcgctcgccttggtgaaatgggatccagcgctgccaactgcggcaactgcggttaaaggagacgaccccgtgcagcaggaggaggttatttagaataaggaagaatgcgccgggctcattggtcgctacaggggcataaattttttctaggattccagagtatggctgctccagtcccaggtgagccctcctccgcttaaaattccagtttattcggagaaggggagaataccggaagcgggggagaagggaggggagtgagtgagaggagggaggcggggaagaccgggcatccgcgggcagcacttcagtcggccctggcggggtgggggtctcggcccttgtccccacccccagaccccggggccttcccactgagagcgagggaattcgcggctttgatctggaggggacagggagccccttttagcccagatctgctggattctcgggagtcaggtgaaatctggatacagggaagggcagagtgacagtaaagggtgccccggaaccgatgcccgacgcctgctgccccacggccttcattcttgctcctcctcacgtcctggggactggaggtcccgccagctccccccagtgaagggcaagggggcgcatcgcagaatcgcccctggtgcgcagcgtagttggtggcctaagccgtcttctccgagagctcagccatcctgggcacttgaggccaggcaggcgctgcggggctggttcagtcgatggagaaaagagactctcagcgtcagcctttagggttcgaggcccacgtgggaaactcgctttctgggttttggcttccctggggagaagggaggaccggagccggagaagcgtgaggtgcggcgaggtagggtgcctggtagctggtgtctcgtgcactccgtcaggcctttattgaacacccattggtgccacgctgagggactgcagcgtttccaaggcgagcttgcagtgatcgaggctcgcagaccctcagcgcagccgctgcctgctattgggaggttcccatgtcctgcggaagctggagctcctcactgcgcgcctcggagacgccgaatccccaactcaaggccgagtggcggtggcgggcgaggacccagggcccttctggattgtggtagcgccagggctgctccccattttgtgcgtcgcggaggaggggccggggctctgggcttccgccacacccatcctcacttgaaattgccccttccaggcgggtctgaaataagattctactcactgggtcctgctgggtccgccccagccgcccccaggatgctaggacgcccacaaagataaccttaatgcgtaaatcgtgtggctcgttggtctaggggtatgattctcgcttagggtgcgagaggtcccgggttcaaatcccggacgagcccggcttttggtgcagggtaaaagtcgtttcctgctcttttttagattcggctcgacttacagacctcagcgcaggacgtggacgccctgca

SEQ ID NO: 10509 - DNA, 464 bp, Homo sapiens
  chr16:3355368-3355832
  hyper
ttaacccttccctaccgccggggaagacagcagtttctctggcgaggaagtaggccgggctcaggcgccttagccagagggcgggcctgcgccaccctcggaaagcgtcacttccacttccggccggcgctctggctctgtacctggacagggctgcggtaggccagcggtgggctggcggttgcgctcctcagatcggcggcctttcgggcggtggcttgcgtttgagcctcagaaagcgaggagcggcctccacggaagccaagctggccgaggtaaccgagaagcggcttcccctatggcttcgaccctggagccgctggagcggcggcggccgcagggaggcagccattttccgtaggcggtggccgcggcgcttccgggccgcgcggctggagcctgaggcggggccaccgtcgggcacgagaaaccattctctccccgcttttcgcagctgtatccca

SEQ ID NO: 10510 - DNA, 603 bp, Homo sapiens
  chr16:3550752-3551355
  hyper
tactcagaacctgtcacccagcgcgaaacgtccgcaaagcgtgtaaacagacgcccagaagctgggaagcttgcagccctcatagacgccggtatcgccacgccctctgccctcggcgtctcaggagcgctctctgccggcccgctctccccgtgcgtatgcacgtgccgccgcgtcttcgcttcgctttttgtttgtccctgaccgtgcgccgtccaagggtccattggttgccatagagatcgtcgagcgctgggcctgtgatcgctgaggggcgagcagttgcgaccctgggctcctggggacctgagcgttatgtctttccgcgacctccgcagtaaggcagccccgcgcccctgtgacctgcgggtcttccagagattcagggctcccgcccgccgggtcccctgtgtaggcgatccctgaggcttgcgctgccggaggctcctttcgggcctctgcgcctcagggaccgcctgacccgcggctgcaacccggccgagcgtcccaggcccttcttcggccatttctagcgaggatggaaagttctctatctgccactggccgcgtgtggctcagaacgcttgaaatgtggctagtgca

SEQ ID NO: 10511 - DNA, 1035 bp, Homo sapiens
  chr16:3781527-3782562
  hyper
gtgagctcagggcaggcgcagccacccagcctgcagaataggcaggtggctgagcctgatggccctgatgccttgggatggaacaaaattggtgacacgttgcatgatgtcacccaactggtccacttggtttcctgggggccacttccctcccaccacagacctgcacacgggcccacgcccgccagctgcgagtctttccctcctcccggccagaggcacggctgcagcaccgcagcccacgcctacctccttgtgcttctccatggtggcatacagcttctgggacaggtcattggacacgttgggcatgctgggcttcttcttgttggcgcggctgatgctgcttttgttcttgttggttttcttgttgttcttcttcttggcattcttgctgtcgccctgactgccctgcaacaacacgcaaggctgtgagaccaggcaagtgcccctccacacttggcacggacgcccagctcccaggccgtgggcatcaggaagctcaggccaaagtaggtcaccaccaggcagaccccatacgtgaacggctacaggtggctgtaggtgctgcagccttcgggacagagcagggcctgtcctcggccaggctggtgtcattatcagctttatgccacgctgcctctaaaggggaaaagagacccagagtgcgagttcagaaattaacaaatgagggcagtgggggctgtttccactgtgccacaaccagatgcggaagattccacgtcacaactgtggtcagcagctgtctgccttgaggaaggctctacacacccgagaaagcatgagagcttccaggagacaggaaagctgctgatgggaaaagcagctgccccatcaagagcagggactctgaggcccctgcggggtccactcaaggcccacggagagcaggctggctccctgctggggccatcagtgctgcgcctgactggctgaaggtgggcttgctctcagcccacaggctcctcctctggaaagaacgcaggattaccactcacttacactttaacagag

SEQ ID NO: 10512 - DNA, 30 bp, Homo sapiens
  chr16:3931214-3931244
  hyper
ctagccttcgccgccggccagggaagtgga

SEQ ID NO: 10513 - DNA, 203 bp, Homo sapiens
  chr16:4166050-4166253
  hyper
cgggccggccctgcccgcggcggcgggcgctgggggtgggggcgccccgggctgcgagtgcgcggagcccgtcggcgcggcccgtctagtggggcctgcttccccccgagtgcgccgccgctcccgccgcggccgcagctgtcccgggaccgagcgcgtggaaccacggacgcgggcccctcgccgggcggcggtgcagacgc

SEQ ID NO: 10514 - DNA, 298 bp, Homo sapiens
  chr16:4166682-4166980
  hyper
ccgggcgctgtgggcccgccctccctcggcgtcccagaggccgcgcgccgcccggggtcccgaccctgcggagagacctgaaggcgcctgccgtggaagaagccgctggccgcaacgtttgggaaatcaaaatgttgccttcccactcggcacgcctttgggataaatcgaagtttccaaccgttggatttccctcccgggaggctccccttgctctgtaagcaatgaatgcgggccccggggcactcggcctgccctggacctgctcacggggcgaccttcacgggcctagcctcca

SEQ ID NO: 10515 - DNA, 30 bp, Homo sapiens
  chr16:4233231-4233261
  hyper
ctggagttttcattcgctaagggctgccct

SEQ ID NO: 10516 - DNA, 81 bp, Homo sapiens
  chr16:4234097-4234178
  hyper
gagatcggtccctgtccgcagggtcgggtagtggccccctcggggacagcgtgtgaggattcgggcgcgaaggacggggtc

SEQ ID NO: 10517 - DNA, 31 bp, Homo sapiens
  chr16:4291946-4291977
  hyper
aaaaccttggaggaagcgtgggggaccagtc

SEQ ID NO: 10518 - DNA, 30 bp, Homo sapiens
  chr16:4304209-4304239
  hyper
aggggtcgctgtgccgggccagatcctatg

SEQ ID NO: 10519 - DNA, 30 bp, Homo sapiens
  chr16:4322735-4322765
  hyper
gaaatactccatagcgatcggcccccctcc

SEQ ID NO: 10520 - DNA, 355 bp, Homo sapiens
  chr16:4363850-4364205
  hyper
tttgctaacagatttaaactagcgtctcctgtaccttttttctacacacctcgaccccagggctgcagttctgcctgcctgaggtcggatgcggtcggctgcagggcagggctccgggctgaagcgcagcgattcccgccgccgtgagggggcgctctgcgggcctcggcctcggcccttccggacgcccgcacaggtcgccggacccagagagtcggcccttaatagccccctcctggaagcgctaggtcccgaaactggccttcccccggggcccatctcccggctaatgtttaacccggccacactccacattatccacactcaggagaccggggtgaggtgagggtggagg

SEQ ID NO: 10521 - DNA, 31 bp, Homo sapiens
  chr16:4366576-4366607
  hyper
cgcggtggggggcgtgcggcgaggtgagagg

SEQ ID NO: 10522 - DNA, 30 bp, Homo sapiens
  chr16:4465716-4465746
  hyper
aataacacggaaagcggaagagcagagctg

SEQ ID NO: 10523 - DNA, 30 bp, Homo sapiens
  chr16:4588399-4588429
  hyper
gaccctcagccccgcgcggctttgcgcgca

SEQ ID NO: 10524 - DNA, 897 bp, Homo sapiens
  chr16:4986645-4987542
  hyper
ccctctgcgcaagagcgaccctgggacacgggggtgccctgtacccccagctcagctgcccgtgccctaggccctcaaggcaatgctccctgggctcccggagtcccctgtgttatgctccccctcggggaccccagccagtcccttcccacctggcggcgcttcccagcttcagggtggcctcggtcccgcgttcccgagagtcccgcactccgggttcagttcccggttcctggacccccgtaccccccattcctacactgcccgggaggtcttccaggtcctgtgcgcccacaggggcaagagcgtcccggagcggagctgtgggcgcctcctcacctccgggtctgcacagtggggctgtatttgcctttgtttctcttcctgaagagcgagttcatggtggcgctcggggtgcgggcggcggcggctggcgggccgggcgcgcaccgaggggcgggcgggagcgcaggtgagcgagcggcggcgcggggagcccggactgcggcgcggcagtggctccgggtccctactcgctgggggcggggcgcccgccggccactggctctgcgggccgctccccgagaaggtggtgcttaccttcccgaggaggggccaccgcgcgggcggggcttggacgcgggggtggggacactgggtcttggccggacgccgcccacccccagccgggggactccggaggccgggcaggcactggggcgcaaaggccgccggggcgagcgctcgcagccccaccctcctcgggcccggcgcgcctctggccgaggccttcacctggttctgcgctaccgcggaactcggcgctcctggtgctttggcggacacccagctgggccccgcaagacaggtgcggcagagacccgcacggattcatgt

SEQ ID NO: 10525 - DNA, 31 bp, Homo sapiens
  chr16:5007999-5008030
  hyper
cagagctagattagggcggggtcgtcctgtg

SEQ ID NO: 10526 - DNA, 31 bp, Homo sapiens
  chr16:5008249-5008280
  hyper
gggccatggccggggacgtgggcgggaccag

SEQ ID NO: 10527 - DNA, 55 bp, Homo sapiens
  chr16:5008529-5008584
  hyper
cattcccaaaggctcccgagggcgagggtgagcaaagctgcggggacctgtgtgt

SEQ ID NO: 10528 - DNA, 30 bp, Homo sapiens
  chr16:5666484-5666514
  hyper
tgaactgctgccaccgtgaatacgagctct

SEQ ID NO: 10529 - DNA, 30 bp, Homo sapiens
  chr16:6069647-6069677
  hyper
ccgtgggccccgccccggcgtccggagcag

SEQ ID NO: 10530 - DNA, 490 bp, Homo sapiens
  chr16:6069963-6070453
  hyper
gaccgcagccgggctcgccgggagttctaggtaagtccaggcggagtcattgcctctgcacccaccctgacctggtgggtcaggtccagaaggtctcatggagggaagcgctaggtccccgagaactggcctcctcctagcgccagtctgggcgctctggacgggaactttttcagggtgtgtggaaagatctcgaggcgtgtccccccctacccccaggaggccgagaccctgagcccccttgtgcgtcgcttccagaagcacgtccttccttgccccagagcgcccctccgaagcatccaggctacctcgtccgtcctcctgggagcgagtcctaggtgccaggagcagcgggagcctgcctgcgcactttgattagtctccctggccggctgcaagcgtgcactcagcgcgcccccggaccgctgcctccgcccgcagggtgtgcaggaggaggcatcttagtgacccgggagggtgtttaggtgcc

SEQ ID NO: 10531 - DNA, 30 bp, Homo sapiens
  chr16:7354239-7354269
  hyper
agagagagacagcgcgagccaccggtcatt

SEQ ID NO: 10532 - DNA, 31 bp, Homo sapiens
  chr16:7615184-7615215
  hyper
tttcacaatcttgcttcgttttaaatggaga

SEQ ID NO: 10533 - DNA, 428 bp, Homo sapiens
  chr16:8767885-8768313
  hyper
cacctctgactcccagcgccctgtttgtcttccggagcgctggggccaggcggaggaaagtagctgggagcaagaagggctggcagggccctgagcgccgagatggggagtgaggtggggagggcgggatgctccttcccttctccgcaaaggaaccccttctgattccgactctggagctccagagaccggatccgagacgcgggtggaggtggagttacactcgcctgcagccctgagggtgtaaatggcccattaagatccaggttaaatcaacctatggagctgccccccagagggtcagggtccccacaacttgacgggggtcctcagccgtctcctccccagtcccaggactccctcccagccctcgcggtccctctggtgggtcccgccccagcccccgtctcccccgcccccggaggctg

SEQ ID NO: 10534 - DNA, 31 bp, Homo sapiens
  chr16:9022848-9022879
  hyper
agaagctaagaagctccgccctatatctatg

SEQ ID NO: 10535 - DNA, 30 bp, Homo sapiens
  chr16:9053896-9053926
  hyper
aatagcgtctacaccgaccatctgagtatt

SEQ ID NO: 10536 - DNA, 215 bp, Homo sapiens
  chr16:9056292-9056507
  hyper
cttggaaaattactgccacatcggcagaaaaccgagttacctttcgagtcaggtttgattctgatgcaggcagccatgtgcggcagggctttcgcacggttgcaagcgcacacctggccggatgctggctgcaccacacactgccaagtacaaactccccgaaaaacaggtggattcggaaaccaacagcgcccgggtcagaactctgggccagt

SEQ ID NO: 10537 - DNA, 328 bp, Homo sapiens
  chr16:9186866-9187194
  hyper
aaccttgctgcattgccgattcagggaagggccgcctgcgtcagggtgtctgccctgcgttccaagtgtgttttctgctccccagcccagctgctaaccttgaataccttgcaacttgagaatcgcggcggtgctctagctagatccaccggaggcgattttgacacctccctccgccccccgggacagatggcaacgcctggggacgtttttggttggcttctcctagaaggggctgttgttgggcacccagtgtatagaggctgctgaaggtcctgcagtgcccaagataaccgccccggccccctctcagcgaagaattatcatg

SEQ ID NO: 10538 - DNA, 63 bp, Homo sapiens
  chr16:10133418-10133481
  hyper
agaacagagggcagcgaggactgcgcagcagcgggagggaccggtggcgttgggcgcggggag

SEQ ID NO: 10539 - DNA, 30 bp, Homo sapiens
  chr16:10274948-10274978
  hyper
gtgggcccaggctccgctgtgcctggggaa

SEQ ID NO: 10540 - DNA, 30 bp, Homo sapiens
  chr16:10275752-10275782
  hyper
aggatgcagtggggcgcgctgcgcgcacga

SEQ ID NO: 10541 - DNA, 818 bp, Homo sapiens
  chr16:10276232-10277050
  hyper
tgggagttgtgcgaccgggagctgctgagcgagggaggtagggagagaaagaggaggtaacgagggtgggggggcgctggctgagtttgtgacgagccagcagtaggagagggggagggaaggacgcgggctcccgcggtcccggttccccgagggaggtggatctttcccacgcagcgaccctcttgtgatcctgccgcttcctccctcttcaggcctcccacctccccccttcccaagggggcctcccaggcccggcgtcccgcgctagcactcaccgcagcctctctccacatagttctcagcagtggccgctcctggtcatctccagggctgatggctgcggccgcgattctcagcgctcacccggtcccatgatccggccaagccctaggagctcccctccaagatccctagctccgcttcctgccccactccggacggcaactgcccggtcctctgagcgcgccggagcaccctctccgcaacccagctccgggctggtgtgtttgagggcgagtgtgtgtgtgagtgtgggagcgcgctcgcgtgtggccggggatccccgcggtccccggccgagagaggcgcgggcggggaaaggcagctccctccgggcccttcgctgctgggccagctccgcgccgggcgttcggctccccacttcccagcgggagtccggtgagcgcctggacaccctggttcacagcactggcaaagccgggttcccggggcgtctttctgctgcggtcgcctccgaggaagaggagaaggaaggtagcggcgccctccacaccaacttagggacttgttctcag

SEQ ID NO: 10542 - DNA, 328 bp, Homo sapiens
  chr16:10277071-10277399
  hyper
cgctcaagcccaagaggcttcgagctccggcgggcgaaagcgtctcctgcccgcagcctctctcctaggtgggtcgagacagaccccgcagtccctcggcggcgacgcggagcgcggccacccgttccgagagcgcacggcggcaaataaggccaggataggtggctggctggcgacgggggcgcctgcggcggcgcgcgctgctgtccgtggtgttggaaccacgctctccgcccgctcccgggcgtctggtgcggctgaagaatcaattattcagatctctgctaccgcttcctcctcccccagtgcctcgcgctgggtacagtta

SEQ ID NO: 10543 - DNA, 469 bp, Homo sapiens
  chr16:10479755-10480224
  hyper
cagcctacttccatttcccctcgcgacccttcgccccgcccactctagctggctgtgcctgactggctgggctgccgcatattcgcgctgccattggtccataatcagctgggggtgggcgtagggagacctacttcagcaggtcctggccggaccagcattgttaacggctgcggttcgaagtggctgtgggtattgctgcggctggtgcgtcgtcgctctaggtacgttggggccgggcgagtgtcctgcgagagcggcgattggcggggtggcggctctaggagcgtcggtcgcctctctgagggccggccccggaggcctcggagcgccgggcctaccggacgtttgcggcgaagctgccctgactgaaaagcgtccgcggggccgtctgacaggtccgggaagaggcccctgaggggcggacgggcgcgtctccaccgttttcgcagagggatactggtgaagc

SEQ ID NO: 10544 - DNA, 619 bp, Homo sapiens
  chr16:10674032-10674651
  hyper
gtctggggacgctgcccgggaatccctcacgcgacctggggatctccctggactccaagagccccgggtgtaagtccggcggggcgaggggaggcgccctgactcctccccaaacttttcccgcctgcttcggctcaaaaggcgtgggaagctgtcccgggatggcgaagtggaattctggggccggagcgagcgtggcgcagaccagaggtcggcggcatgggtggcacctcggccctcccgttactgtcaccaattccgggggctgctcccggtccagtaagtggaggggtcgcgtccctgctgcccgggcgtacacgatcccggggcccccccgatgtcgccccgcgccctgggtgcgcccacaactcacccggcgctggcggctgcgctggcagctggatcgacggactggctgggggtgcgaggcgaggccgccgggctgttttgaagctctgggctgggactgcgcgccctccctccaccctctaggcggcggggcccctccttccccgatcccgcctcccgggccgtgacgccaggagccgggagagccgagtgggaggggccgccggcgaaaggagggggccctggagggaaaggccgaggccgggagcgc

SEQ ID NO: 10545 - DNA, 115 bp, Homo sapiens
  chr16:11035551-11035666
  hyper
agaggggaacagcagtcgagaccctactccaagtacgcatcaaagacgtcgagctccgagtcagcatcgtaaaggcccgagccggggtcggagagcacgccgaggtccacgagcg

SEQ ID NO: 10546 - DNA, 194 bp, Homo sapiens
  chr16:11762782-11762976
  hyper
ataggggtccaggtgacgtccggcgcccgtctcgcgggtagggaaactgaggccgggccgcagcgttcggcgcccggttccgtgggcagcggctgcgcggcgtgggcatgcctagctcccctggtccccgtcccacaccccgcctccgtcgggccgattcgagctacctccccagctgccgtcccctctccagc

SEQ ID NO: 10547 - DNA, 146 bp, Homo sapiens
  chr16:12211190-12211336
  hyper
gaaccgtggaaacaggcgtggtcaatacgtgcttcagtgcggacgaaccgtggaaacaggcgtggtcaatacgtgcttcaatgcggacgaaccgtggaaacaggcgtggtcaatacgtgcttcaacgcggacgaaccgtggaaaca

SEQ ID NO: 10548 - DNA, 514 bp, Homo sapiens
  chr16:12897351-12897865
  hyper
ctcctagaccagatcgctctctcggcctcgcctctcaactgcgcccctggaatccctaagagcaggctttgatgcagctatggcggctcccaggccccggtgcagccccggatggtgtccgactggcggagcgcacacctgaacaaaaggttcccccggcggaaggttccgcagccccagagtcccctccccgggtgaggggcgggcagtacctgcgggaaacgcggccagggtcctgcccctggctctgtggaaaacaccccccgcctctgcagccgacatggcgagcgagtttctggccttcacttagaacactgcgtgggtggaagccgcgcgacttcacacagaacaaccgctggacctgtcccgctttgggcgacgccctttgatctcggggcgggactggggcgggacggggaggggcccggtggctcggggcgccactagtgctgcctgggcggagcggaggcgccagcggcccctctgggatcgacctgcgcgcctggcgagtgga

SEQ ID NO: 10549 - DNA, 38 bp, Homo sapiens
  chr16:12995277-12995315
  hyper
agctcgctcctccccgtccgctcgcctggctcagctct

SEQ ID NO: 10550 - DNA, 251 bp, Homo sapiens
  chr16:12995552-12995803
  hyper
ccggccaaggctaggcgctgccagcccgattctcctctgctctccacccccgcctcacccagtggccggccggacctgcaccccgcgcttgaccccgctcatcctccccccgcccggccgggcgcgctcctccccggccggcccctcggcgcgcggcgcgctggaggcgaacgcgggctgaggcgaacgcgggctgagccgagcgcagtggccgccgaccaccgagcgccccgcgccgctccctgcatgtg

SEQ ID NO: 10551 - DNA, 864 bp, Homo sapiens
  chr16:12996073-12996937
  hyper
cggagaggccagcgagggcgctgaggcatcggacgcgcccccgacccgggcgcccacgccggacttctgccggggctacttcgatgtcatgggccagtgggacccgccgttcaactgcagctcgggcgacttcatcttctgctgcgggacttgtggcttccggttctgctgcacgtttaagaagcggcgactgaaccaaagcacctgcaccaactacgacacgccgctctggctcaacaccggcaagccccccgcccgcaaggacgaccccttgcacgaccccaccaaggacaagaccaacctgatcgtctacatcatctgcggggtggtggccgtcatggtgctcgtgggcatcttcaccaagctggggctggagaaagcgcaccggccccaaagggagcacatgtccaggtgggctgcctccccttcgccctcccctcggggcttcgctctccctgctctctcctccccaccttcccccaggcaatggcgctccccacggtccccgctccccgcatcccagcctctccgctgggggatgtcaccgggaagccaacttcggcttggaacacggagaaggggcgctgggctcagcacaggtgtgggtctgagcgtgttcgtgtgtgtgtgagcgtgtgtgtgtgtgtgtgtgactctgctccctcaccctctggccgcctcctcccgctggtgactgaggcggacttgagacacgtagcctgggagcccgtggccccgaaatcttcgggtttggggagagggtccatggcacccctcggattccaggtgctagctttttggtaaacaggggcaggcgagcccgaaaggggaggggggcgtgtgtgagcccgagcgcgcgtgtgt

SEQ ID NO: 10552 - DNA, 19 bp, Homo sapiens
  chr16:13648595-13648614
  hyper
gcttcggcctcccaaagag

SEQ ID NO: 10553 - DNA, 56 bp, Homo sapiens
  chr16:14396709-14396765
  hyper
tgggcttggaaattgacgaggcggtggagcgtccgcgtccccgcccccaccccgga

SEQ ID NO: 10554 - DNA, 30 bp, Homo sapiens
  chr16:14397059-14397089
  hyper
ggggtgtctgtgcccgagacaacaccaagt

SEQ ID NO: 10555 - DNA, 75 bp, Homo sapiens
  chr16:16043202-16043277
  hyper
ccccaaagatcccaggcgcttccggaaggcgagccaacgctccccaggcccgtccgcgagcgggtgggcctaagc

SEQ ID NO: 10556 - DNA, 104 bp, Homo sapiens
  chr16:16155949-16156053
  hyper
cttgtctcagaggaaaagatacaagccagagggcgctggtgatgaggtttggtctgtgccttgtgtcccgcttaggaggggatgggcagcgtgttctcacagct

SEQ ID NO: 10557 - DNA, 30 bp, Homo sapiens
  chr16:17481113-17481143
  hyper
aaggtgggctgtgggactggaggcaaagag

SEQ ID NO: 10558 - DNA, 30 bp, Homo sapiens
  chr16:17563812-17563842
  hyper
atcgcaggccaggacgaacagagggctcaa

SEQ ID NO: 10559 - DNA, 30 bp, Homo sapiens
  chr16:18178839-18178869
  hyper
aagggccccatgcacaccagcctcccagct

SEQ ID NO: 10560 - DNA, 30 bp, Homo sapiens
  chr16:18812905-18812935
  hyper
gccgcccttcccgacggcccccgcgacgct

SEQ ID NO: 10561 - DNA, 30 bp, Homo sapiens
  chr16:18995158-18995188
  hyper
ctgcttgtcgccaccgctggatggagcctt

SEQ ID NO: 10562 - DNA, 31 bp, Homo sapiens
  chr16:19097801-19097832
  hyper
cttctcgcccccaggacgtgcgtcctcccac

SEQ ID NO: 10563 - DNA, 30 bp, Homo sapiens
  chr16:19179913-19179943
  hyper
caaagtggccgtggcggcgccatgcccggg

SEQ ID NO: 10564 - DNA, 599 bp, Homo sapiens
  chr16:19421907-19422506
  hyper
ggtgaatagaggtctcggatgccagcaggcgtcccaacccagcaggaactggctcaattctcagaagaaagcgatcggccccgaggcaggaaggccggctccggtgcagggagcgccgcctgcgggctgcttcgggccagggtcgacccgagggccagcgcaagcagcggcaacaggagcgccaggaggtgaggcgggttcgccaggagtggggccagcgcccgggctgccagcctagcaggggcgtcttggcggagccccctcgccggctcccagagaggctgggaagaactgggaggggtgtccccaatgcggggcgcccaagcgtggcagcacgggctgggagcggggagccagcggggtgcggcgccggagtgcggggagaaccaccaggcgccggaattggggagcacgtggagggggcagcggctccagccccagaccgccgcgctctgtcactttgcattaagaaagcttccggggaatgcacacggcctggccgccgccttcgtgcagcccgccctgcaggtgcaggaagaaaagaataatcgcacccgtttctcaggtgcttacttcaccatgtccgatccggtaagttt

SEQ ID NO: 10565 - DNA, 30 bp, Homo sapiens
  chr16:19895306-19895336
  hyper
caaggagaggggaccgagaacaggtctagt

SEQ ID NO: 10566 - DNA, 30 bp, Homo sapiens
  chr16:20084836-20084866
  hyper
gctgtagtagaccacgggcacgaaacccaa

SEQ ID NO: 10567 - DNA, 176 bp, Homo sapiens
  chr16:20817421-20817597
  hyper
actgtcacgtccagtcgtttcccaaggcctaaaataggcaggcactggctcaaggccacacagtcaaggccccagggttcgtccgcctcgggctcctgtcaccctcgggtagaaggtggcccaaggctgaagaccgaggtccagggaggcgcctttccaaccgtgccagagagggc

SEQ ID NO: 10568 - DNA, 217 bp, Homo sapiens
  chr16:21531390-21531607
  hyper
cccacgatggagaagacgccgcacgcggcccacaccaccagcgccagccccggcgagcctgcctccttgagcacgcccgtgggcgtcacgaagatgcccgagctcatgatggcgaccacgatgacggccacgcccttgagtagcgtgatgttcccctgcagggtcacgccctcgccctcgcctgccggcgccgcgccgtccgcgcgcttggcggcca

SEQ ID NO: 10569 - DNA, 199 bp, Homo sapiens
  chr16:21831765-21831964
  hyper
gcctctgtcccggaagttgcgcgtgccagcgcaaccttcagacaatcaggggccccgtgtggggagggcgtatgctctcggcgggctagagcgccgctaaaacgcgctcttcgttctacttggaggacttgttccagccagcgtgagtgcgcgagtgtaaggagagacgggaaggatcggctccatccagccctgagga

SEQ ID NO: 10570 - DNA, 30 bp, Homo sapiens
  chr16:21964474-21964504
  hyper
ggctaggagaagaacgcaaaaagcagtgac

SEQ ID NO: 10571 - DNA, 30 bp, Homo sapiens
  chr16:22200964-22200994
  hyper
gcttagttaataagcgagggcatgaaggct

SEQ ID NO: 10572 - DNA, 125 bp, Homo sapiens
  chr16:22203750-22203875
  hyper
ctctggccatgccaaggcttgcggttgaactctggtctcgttctctcagagccgcaaacctcggaccatttgaagctggcggtcctggggcttcctttcctctcgataacatgtttacatccaaa

SEQ ID NO: 10573 - DNA, 30 bp, Homo sapiens
  chr16:22207233-22207263
  hyper
agtcacagtgctctcgcgatcagcagcagt

SEQ ID NO: 10574 - DNA, 30 bp, Homo sapiens
  chr16:22385985-22386015
  hyper
caaccaatcgcgagcgggctgctggccgag

SEQ ID NO: 10575 - DNA, 428 bp, Homo sapiens
  chr16:22824595-22825023
  hyper
aagccctcctcactcagccctcggcgaccctctggtaccctggacagctccccggggagcagtctaccgctaggcggcggctgctaagagaggaaccctcctgacgcggagtctgccgctccggggctcgctctccggcaggcccggggagaggtggggtgacaatgggttggggtgcgcgcgtgcctcataggtgcgagacagagcgagccgccggggtgtgagtcagcgcgctgggggctaagaagctgggtgaatagtcacggaatctcactcacgctcggctcctccacccatcccgtctacagcgcgtgtcccagtccagggcgtgcgtgcgctcggtgtccgattccgggctgtgtgtgtccatttggcgagatgtcgagagcggggggagtgtccttgtcggtgtatctgggcccaggtta

SEQ ID NO: 10576 - DNA, 202 bp, Homo sapiens
  chr16:22825267-22825469
  hyper
tgccttgacaccttcgtttcaccgccccaaagctggcctggggctccgtagggagtggcctgcatggggagggcccgcgtgctgtgtttctgggaggggtaagagagtgggggcgcagggggcgggccaggtccctgggcgcggcgcgggctcgggggacccgcgcggctgacgtcaggccactccttaaatagagccggca

SEQ ID NO: 10577 - DNA, 147 bp, Homo sapiens
  chr16:22825885-22826032
  hyper
ggtgccccctcggaaaccatgacccccggcgcgggcccatggagccatggcctatagggtcctgggccgcgcggggccacctcagccgcggagggcgcgcaggctgctcttcgccttcacgctctcgctctcctgcacttacctgtg

SEQ ID NO: 10578 - DNA, 60 bp, Homo sapiens
  chr16:23159922-23159982
  hyper
ggggtgcagtgggggcgcggcggcgcgcgggctcaccttgaagtcgcggctgtgctgcgg

SEQ ID NO: 10579 - DNA, 30 bp, Homo sapiens
  chr16:23313465-23313495
  hyper
gtccctgaacctggcgtgtgggggctggag

SEQ ID NO: 10580 - DNA, 30 bp, Homo sapiens
  chr16:23521209-23521239
  hyper
gtcttgcacgactgcgtctccttaagcctc

SEQ ID NO: 10581 - DNA, 30 bp, Homo sapiens
  chr16:23607377-23607407
  hyper
gcccccacccccaccgggcccaatccctga

SEQ ID NO: 10582 - DNA, 30 bp, Homo sapiens
  chr16:23652900-23652930
  hyper
acatcgagacggtgcgcgggtccagatatg

SEQ ID NO: 10583 - DNA, 406 bp, Homo sapiens
  chr16:23765948-23766354
  hyper
aggtctcccaggcttcctcagcgtcgacgccggggagcgccctggggttgggagcgcccggggcccgcgaaggaggaggtggctcaggtgtcagggcgcaccgtgggaaccggccccgggggaggcgtggaaacgcggggcctgggactcgaccagcctctcccgtgcggatcgcaaaatctcggagctgaaacagcccgttgttcgcagcctccctctgacccgccaccctgcacattgttttccattcgcccgggtcgcgggtgggaggagaggcacgccggggttctggagcttggccgcgcgccaggcttgtggccttcgtccccctggggccactggggcggccacgcctctccggcgggaggagagaacgcgtgggtccgggtggctgctccggcccttc

SEQ ID NO: 10584 - DNA, 201 bp, Homo sapiens
  chr16:23846852-23847053
  hyper
ccgaatgagtgacagcgggagcccatccctccaggagacgcgtgcagaatgaccaatgggatggatgggggtggatgggtaccagtctccgcagaggccggggtggaattcgctgcgccccaccccttccacccgctccccttcgccccgtaggtctttccactctcgctcctcccctgggcacatctcctgaacgcagcc

SEQ ID NO: 10585 - DNA, 201 bp, Homo sapiens
  chr16:23847310-23847511
  hyper
cggcagcagctgggcgagtgacagccccggctccgcgcgccgcggccgccagagccggcgcaggggaagcgcccgcggccccgggtgcagcagcggccgccgcctcccgcgcctccccggcccgcagcccgcggtcccgcggccccggggccggcacctctcgggctccggctccccgcgcgcaagatggctgacccggct

SEQ ID NO: 10586 - DNA, 86 bp, Homo sapiens
  chr16:23847788-23847874
  hyper
ggactcccggctccggaccctgctgcccgggactcccggatggacagtcctgccgttgccctgtccccaccctggtcccagacggg

SEQ ID NO: 10587 - DNA, 498 bp, Homo sapiens
  chr16:23847933-23848431
  hyper
cggcgtcgcgggagcctttgctccacctgactaggagcgcgcggggtctgtgcctgccctggagggcagcgcctcgggtgctctccgacccggggttccctatctctccgcctgcttccgggcgcgaggagccctcgccccccaccccttgtttccggggggggcggcgccctgggtgtccttctctatctccctgcgggcatgggacatcctttctcactcctctgtgcctccgggcagcgccctgtgttatctcccattgcccctccccgagggcctgggttcccctttccactcctcggtcacatcactgcgggcccctttcttccccagtccctccagtagtggggcatcctttcctccttcccagtccccctcccagaggacaccaccgccgcggggtcactctcgccctccctctgaatgcgtctttatctcttctcttttcccgagggtgctcggggcatctatgggtacatctgtcgcctgccttcagcc

SEQ ID NO: 10588 - DNA, 30 bp, Homo sapiens
  chr16:24267511-24267541
  hyper
ggagagctttcctgcgaggctgtggaagca

SEQ ID NO: 10589 - DNA, 45 bp, Homo sapiens
  chr16:24354627-24354672
  hyper
cacaagcagatgcccacgtgtatgtagttccgaattccctcagta

SEQ ID NO: 10590 - DNA, 172 bp, Homo sapiens
  chr16:25703003-25703175
  hyper
gcaccggaggcaggcgttgggctttacctctctaaaagtactggggcaaaggaatggagaacacggcgtcccgagctcccaagggaggggagtaaacgaggtggggtggggaacaccccaagtgcgtgcgtgctgggggctggggggcacgatctccgttctcccgggtgcc

SEQ ID NO: 10591 - DNA, 448 bp, Homo sapiens
  chr16:25703674-25704122
  hyper
accatgtccgggcagcgccgggggctgccgccgccgccgccgccgccgcgagccgggagccgcgatggcccggtggcccgcacctcctccgcctccgcctccgcctccacctctggccgcgccgccgccgcccggcgcctctgctaaggggccgccggcgcgcaagctgctttttatgtgcaccttgtccctgtctgtcacctacctgtgctacagcctcctgggcggctcgggctccctgcaattccctctggcgctgcaggagtcgccgggcgccgccgccgagcccccgccgagcccgccgccaccctctctgctgcctacccccgtgcgcctcggcgccccctcgcagccgcccgcgccgccgccgctggacaacgcgagccacggggagccgcccgagcccccagagcagccagccgcccccgggaccgacggctgggggctg

SEQ ID NO: 10592 - DNA, 343 bp, Homo sapiens
  chr16:25704389-25704732
  hyper
cgcgtgcacccggacgtgcgggcggtgggcgtagagccgcacttcttcgacaggaactacgaaaaggggttggagtggtacaggtaggaccctgggctccgcgggctggtggagacgcgtgggggagacgcggaggggaagccgcggctttccacgcccttcgagcatccaggcaccgtcccgagaggcccaagcccccgcgagggctctgcaaaccctggcggcgttgctcagggggatcggctgagagggctggactccagcgaaaggtcactttatttcagggcgaggggaggaggtgtcaccctgccctgcctcccgcgctcctcatccaaggaggtgc

SEQ ID NO: 10593 - DNA, 144 bp, Homo sapiens
  chr16:27121250-27121394
  hyper
cagccgccccacccgccgctccccgctcccgccccgccgcgcccgctgcaaactttggcctctgcagccccggcatccgctggacggaagagagagagaggagctcctcccgtagctttctcccgaaaacgttttctcttccct

SEQ ID NO: 10594 - DNA, 30 bp, Homo sapiens
  chr16:27215266-27215296
  hyper
ggttcttggcgtcgcgttggtgtaggccta

SEQ ID NO: 10595 - DNA, 259 bp, Homo sapiens
  chr16:27280120-27280379
  hyper
tcccattggtggcctgcggcttattcgcccgtccgttgagtgacgcacttccggttctccgtttgcgccattgccctggtggttccgcctcgtgggttagatcccaaattacgcccgctctcgatccttaataatgggaaggggcttccacttgtcgccctccgcctcctgcacctcagtgacttccctgaccaaggaggaagaattggcgtgcagcctgggcttccctcaatggccaccattccgctggcacaatgta

SEQ ID NO: 10596 - DNA, 30 bp, Homo sapiens
  chr16:27413510-27413540
  hyper
tgggtggcagccagcggcctcagacagacc

SEQ ID NO: 10597 - DNA, 30 bp, Homo sapiens
  chr16:27413771-27413801
  hyper
cctgattggtgactcgggctgggtgtggat

SEQ ID NO: 10598 - DNA, 92 bp, Homo sapiens
  chr16:28074133-28074225
  hyper
aagccgcggggcgtccgcagcgggtaggagctctgccttgcacctctccacggcggggcgtcccgcacgtccccccatgctggtccccggcc

SEQ ID NO: 10599 - DNA, 519 bp, Homo sapiens
  chr16:28074417-28074936
  hyper
cgcacgagtaccagatgccggtgtggaaattcctgaagaggaagcggtcgtcgccggtctcccagctgtagagcgcgccgccaggggggccgttccccgaggcggtggcggcggcggcggcggcggcgggggcggcggtgccgttggccgtggcgttggcgcccgagttggggcagttggcgcgcccgccctggccgcagcccggcttggggacccgctgcgtgccctggcaccagtgcgtggtgaggaaagcggtggtggcgaacagcagcgccagcaggttcagggccacggccaggagcgctcggccgcggcggctagtcttcatgccgcccgcgccgccgggacgggactgcaccgccggggagctccgcgcgcgaagttggcagctggcgccccgcgtcagcggccgctgcccgccgcgccccggggctcgggtgcctgagatcggcggcggcggacgcggcgcgggcccatgccccccccaaccccggggtgggggcgcggcgcggggggcgt

SEQ ID NO: 10600 - DNA, 299 bp, Homo sapiens
  chr16:28074955-28075254
  hyper
cgggcggcggtggaggagcggctacggcgcgcccggagcccggagcgcgagtgcacctcggctaggagccgctggcgcctggcagcggccacggcgcagggacgcgcgcccctccgtggggagacacctgcaggcggccggcgacactgttccggagcccgcccgcacggggagagggggccgccacgccgggcgcgggcgggggcctgggagtggagggacgcccccgaaagaaatccgagccagggtgagggtctgagacgcaaggagaatcccaggcaaggcgctcctgagaaaag

SEQ ID NO: 10601 - DNA, 30 bp, Homo sapiens
  chr16:28304288-28304318
  hyper
cccctcccaagatccggtcattacaactcc

SEQ ID NO: 10602 - DNA, 30 bp, Homo sapiens
  chr16:28875090-28875120
  hyper
cccttccctcccgccgctgttctctatggt

SEQ ID NO: 10603 - DNA, 355 bp, Homo sapiens
  chr16:28891399-28891754
  hyper
aggagcccggcgcccggtcagggagggcactggcatccctcattacccgcccagcctggccttagcccttccccgcgctccctaggcacccccacccccgcagggcatctccagggctctgcctcctctcccgccctgggggctactccccatcccgcggtccatctgcatgtcgcgggttcttccgcagcatgtgagcctcgctggggactctggaggcaacgaaagcctccctgtgccttggtctccgaacgcaggccccgtcgcgttaagcacaagctggcagggcctctcctctcccttctcagatttgctccttgacatttgcctgctgcctggcggtggcaacagctgg

SEQ ID NO: 10604 - DNA, 30 bp, Homo sapiens
  chr16:28936698-28936728
  hyper
tgggtcgcgcggttcgggaggacgcctgcc

SEQ ID NO: 10605 - DNA, 30 bp, Homo sapiens
  chr16:29110443-29110473
  hyper
gtctgaattttgagtggatagtgatgagcc

SEQ ID NO: 10606 - DNA, 80 bp, Homo sapiens
  chr16:29606231-29606311
  hyper
cgcgaatagttggtgccgccgctgctcagccgagaccccggggctctgcggctcattaccttccccgacacgacatggcc

SEQ ID NO: 10607 - DNA, 118 bp, Homo sapiens
  chr16:29607009-29607127
  hyper
ctggtgccctggggtgcgagcgcacacaggcgtgcccttggtttcacgtgcgccagttttcccactttctacgggggggagtggaaagtgaaaatagtaagatcgagaggtggatatc

SEQ ID NO: 10608 - DNA, 30 bp, Homo sapiens
  chr16:29624399-29624429
  hyper
ccccggcccgcgccccgtactcacgcacgc

SEQ ID NO: 10609 - DNA, 538 bp, Homo sapiens
  chr16:29624653-29625191
  hyper
tagcagagcgcgcccacgatggagaagacgccgcacgcggcccacatcaccagcgccagccccggcgagcctgcctccttaagcacgcccgtgggcgtcacgaagatgcccgagccgatgatggcgcccacgatgatggccacgccgttgagtagcgtgatgttccgctgcagggtcacgccctcgccctcgcctgccggcgccgcgccgtccgcgcgcttggaggccagcatcttctcccgcgcctcttccttctcctcggccaccggggccgctagcgcccgccgcttcgggcccgcacccgccatgctctgcttaccggccgggcctgggacacccgagagccgcagccgagcgaggattgtgcgcgccgctcgccgcccgcagctgcgtcaagaaccccgcccgcgccgccttttaggccccggcccgctggccccgcccaccgtccgcggctcctccccgccccgtggcccggccgcggctctcagccccgccccctcgacccagctcggagcacgtgcgtcctccggcctag

SEQ ID NO: 10610 - DNA, 31 bp, Homo sapiens
  chr16:29653961-29653992
  hyper
acactcactcgtttttcgttgtttttttttt

SEQ ID NO: 10611 - DNA, 30 bp, Homo sapiens
  chr16:29801931-29801961
  hyper
gacccggaggcgagcgctggaaggcgggat

SEQ ID NO: 10612 - DNA, 31 bp, Homo sapiens
  chr16:29822267-29822298
  hyper
aggtgcttcctgggggcgggggaatgcagcc

SEQ ID NO: 10613 - DNA, 50 bp, Homo sapiens
  chr16:29822622-29822672
  hyper
ggggcagccttactggcggcagcacagatacagggcggggccaaggctgt

SEQ ID NO: 10614 - DNA, 30 bp, Homo sapiens
  chr16:29828583-29828613
  hyper
actccctgattgaccggagacgcaccccag

SEQ ID NO: 10615 - DNA, 137 bp, Homo sapiens
  chr16:29836030-29836167
  hyper
cgagattgtgccacttcactccagcctgggctacagtctccaaaaaaaacaaaaaagagattcagtatatcagctactcacagttgaccctgaagatctctgggaagtagtgactcatgactcgtttatttattaag

SEQ ID NO: 10616 - DNA, 214 bp, Homo sapiens
  chr16:29888511-29888725
  hyper
tgagccaccacgaccggccacctcccgggatctctggcctgcccgacccctgcccatcccgggactctatccctcagtacctttgaagtgcaatacgaagccctggcccaggcctggatttgggggcccgggcggtgcctgaaactgcagtgtgaggtcgggcccagaggagagaaggcggcggcgcggctgaggtccccgcagctgggccaag

SEQ ID NO: 10617 - DNA, 169 bp, Homo sapiens
  chr16:29910604-29910773
  hyper
ctgcagggggtggggccgagagggccgaaggggccgggtggcctgggttaccctcctgctcaggcgcctgggtccactgggctgtctggaccccaagctaggggactggggaggagaaagacagcttctgggggtttagggtggggtcgaggatcgagggggtctccac

SEQ ID NO: 10618 - DNA, 35 bp, Homo sapiens
  chr16:29910887-29910922
  hyper
cgtcagatcctggggacgggcggagggaggggcct

SEQ ID NO: 10619 - DNA, 31 bp, Homo sapiens
  chr16:30022360-30022391
  hyper
gtgagcgaggtggaggcgaggatgcagccgg

SEQ ID NO: 10620 - DNA, 167 bp, Homo sapiens
  chr16:30077629-30077796
  hyper
aaacggggcgcccttcgcgaggagggaaacccctccgcggtgcttgatgcccccttaacactttccctgtctctccttatcgggcgaccttgattctgagcccggaacagctgcagccatgcgaagcgacgggagcatttttcaggggaaggcgcttgctcctccac

SEQ ID NO: 10621 - DNA, 30 bp, Homo sapiens
  chr16:30366420-30366450
  hyper
gttcctccctgctccgaactcccaattccg

SEQ ID NO: 10622 - DNA, 31 bp, Homo sapiens
  chr16:30380257-30380288
  hyper
ggaaaaaactgaggcacggaaatggggaagc

SEQ ID NO: 10623 - DNA, 30 bp, Homo sapiens
  chr16:30583153-30583183
  hyper
attcacttcatggccgcttggacatagaca

SEQ ID NO: 10624 - DNA, 188 bp, Homo sapiens
  chr16:30620878-30621066
  hyper
gcggatctagagcagccggttcccagtcatcggtgtttcgttccaaccaggagatgagggctggtttgggacctgcgcaccctggggaaagagaacaaatcagaaggccagctcctagatcacgccgagtagtatctccccgacggcacctcctgctaagcccctgcccacctcccctgacaacctgg

SEQ ID NO: 10625 - DNA, 905 bp, Homo sapiens
  chr16:30621123-30622028
  hyper
cgcgccccgcggcagcggatggggccggcctcaccgagcgcgcccaggtgaccgtaggtctcccgcatcacgtcccggtacagggccctctgcgcgggccgcaggcagccccactcctccggggagaagtacacggccacgtccacgaacttcagagccctcggcctcctgccccttttccgactgggtctggcctttcctggtccctgcgcagggagcggagccgaaggtggcgccatgggacccgagaagccggcgccacggccttccgtgtccaggcctcggccctcgggcgctggcggcccctgggatcgaggagcccctgccggaccagggctgagcgtggccggggaggcccggagggaatcggaattggtcgcccgcggggctaacggaaaccttttgctgttattcaggaaactcctgcccgaacttgggtgaaaggcaccggaagatgccttcggggaaaatggcggcgctgctaccgcaccgcctttgcctggaacacaggcagcttccagctatcgattttattgaccggagcgccatgccggcttcctaacctctttgccctcaagtgtaatggcgctgcgattgggcttcacgccgtcttttttcccctccccaatacgcgcgttcattggacgagagccgaagatcgagcgttctgattgggtgctagcaaaggcggtccgtttgaacgaagccaagagctgcataagggcaggaagctggactgctaggatcaggcgactacaaggagttgtgaagcgacttgcaccgacctgggggcagcaagaggccccggggctgctttccgctgttcgactctggcaggctcagccaatcactgaaggagggaacgatttgagcgatggagccactctggccgagttagagctgag

SEQ ID NO: 10626 - DNA, 48 bp, Homo sapiens
  chr16:30786679-30786727
  hyper
cctgtcctgctcccaccgaccccggtctgaccacgtccttggctgtca

SEQ ID NO: 10627 - DNA, 171 bp, Homo sapiens
  chr16:30787246-30787417
  hyper
ccggcggcggcgggcacgctggtggaagcgcgggccgcggcaggggaggacatcgggccgcagagaaagtgccgatggcctggggcagcggtgcgagggtgggaaaaacgcaggatattgcatcatagagacgcggccaccttcgcccctggagagcgccagtctcaggag

SEQ ID NO: 10628 - DNA, 114 bp, Homo sapiens
  chr16:30797728-30797842
  hyper
gggttaatgacagggccgacacagagcatggacgtgggaagaccgagggaggccgaggcgctgggagcccaggcgccaggcacgccagcctgagacctcgcgatggccccactg

SEQ ID NO: 10629 - DNA, 236 bp, Homo sapiens
  chr16:30798318-30798554
  hyper
cccccgggaacccaggcgtccccaactcacggctctggggtctgggaaaagccggaaggcggaatccagccccaggggacttaaccccttcagtgccctgcctcgggggacggactgggcgccgaggactctggggtccttctcaaggggtgattccaggctgaggacccggggaccagttcagggtgactgggacggagcaggaagtgaccccagcttcccgggcccctctagcc

SEQ ID NO: 10630 - DNA, 31 bp, Homo sapiens
  chr16:30816841-30816872
  hyper
cgcggcgacggcctcccggagctgaaggggt

SEQ ID NO: 10631 - DNA, 156 bp, Homo sapiens
  chr16:30817082-30817238
  hyper
aggcatccctgactcccgaattccagcaagggagaatcaggcgctggggaggcaaggagagggccgcggctctcctcgggggccgcggggcgcgactcttccaggacctcggctgcttttcccagtaaagcccaggcggcccgaggctggccgagg

SEQ ID NO: 10632 - DNA, 41 bp, Homo sapiens
  chr16:30935602-30935643
  hyper
ccactcgccgccgtcccggcctccgccggagggaggggccg

SEQ ID NO: 10633 - DNA, 30 bp, Homo sapiens
  chr16:30953481-30953511
  hyper
gaagtcactgaccccgcccatgctcagtgg

SEQ ID NO: 10634 - DNA, 207 bp, Homo sapiens
  chr16:30959909-30960116
  hyper
tggggggagggctgggcggaccaaaggccggaggggtggggcctggggatagcgagaggcttgagaatggggccgcttgggggagggaagaggcagcccggcgaggggcaagcgggggacccagccgggctgggcccctgggccccgggtctgtacaatacggtttgctataaaactcaaaatcttccagccggggctgcggagttc

SEQ ID NO: 10635 - DNA, 31 bp, Homo sapiens
  chr16:30964524-30964555
  hyper
agctggagagtgaccacgagtacccaccagg

SEQ ID NO: 10636 - DNA, 30 bp, Homo sapiens
  chr16:30964612-30964642
  hyper
actcatggtctccacgtgtctgctgcccca

SEQ ID NO: 10637 - DNA, 30 bp, Homo sapiens
  chr16:31008559-31008589
  hyper
catggttccctacccgcccggcacccccat

SEQ ID NO: 10638 - DNA, 30 bp, Homo sapiens
  chr16:31008945-31008975
  hyper
gcgagggtccggggcgtacgaatggtcaac

SEQ ID NO: 10639 - DNA, 31 bp, Homo sapiens
  chr16:31075213-31075244
  hyper
agtacgccggtgcttgcggaacactgaaggg

SEQ ID NO: 10640 - DNA, 30 bp, Homo sapiens
  chr16:31085567-31085597
  hyper
gcgtgcaaagacgccgcgttgtgacctacg

SEQ ID NO: 10641 - DNA, 228 bp, Homo sapiens
  chr16:31117072-31117300
  hyper
acctgtatacagtattctgaaaagggggtcgcgaggtgcatgtccaacctccgccgccgggggcagcagcgagtccaggccgagccggggcctagcgagcggggtcaaatggggtgaggcctgtgccagacctctccacctcggtggcagccgcagcctcctccgcctgcggctcctgtccacgccgcggccacgtgagcgccagattctggcgcacagaccactgcc

SEQ ID NO: 10642 - DNA, 83 bp, Homo sapiens
  chr16:31153974-31154057
  hyper
aaaaggcagggagcccgcgctgcggcccagacggcccctgcaccgcccggtgccgcccggcccagcgccggtccccagctcac

SEQ ID NO: 10643 - DNA, 640 bp, Homo sapiens
  chr16:31213545-31214185
  hyper
gatccccttcccttcccttcccgccgtggggccggggtcccgttggtcggtaggccaagcgtggggagcctcctttccggtagagcagctttgtttaggggtaggaggaacagaaagcggaagagcccgcggggtaagcgctggtgtgggtggaggggaaagacggggtggaggggaacgggggcggctcaccctggtgcgtggccgcctgcagctgcccggccatctcctgcaggcccatgtcgcgcagcacgttagcggtgagctcggcgccgtaggtctccaggtagaagctgaccagcttgtcggtgaggtccaaggcgtccatggacagcagcgcgccccgcgggatgcgcccgtagccctcgcgcagcggcaccgacagcagcttcagcttgaacttcttgagctcctcggcggtcaggttctccagcgcatccaggatggcgtcgcgcgcgcgccccatggctccaggatccccggccgctgccgccgctcaccccgctgcagccgccgaccaggaggaagtcggctccggggcggaacctggactccccgccttcctcccactctggtctcccgactccccgccccggtccgttgccctccagcaaaaggcgcttccttactacacccttgg

SEQ ID NO: 10644 - DNA, 88 bp, Homo sapiens
  chr16:31228309-31228397
  hyper
tctccagcaccttcaggatggcctcgcgcttcgttcccatggctcagccctgcgcctctgagcctccgagggcctggagccatcaggt

SEQ ID NO: 10645 - DNA, 28 bp, Homo sapiens
  chr16:31276465-31276493
  hyper
agcatgagccaccgcgcctggtcctatt

SEQ ID NO: 10646 - DNA, 30 bp, Homo sapiens
  chr16:46723151-46723181
  hyper
ccgggccctacaggcggctcattgattggc

SEQ ID NO: 10647 - DNA, 30 bp, Homo sapiens
  chr16:46865504-46865534
  hyper
atccccacagagaccgtgggagcgaaggct

SEQ ID NO: 10648 - DNA, 86 bp, Homo sapiens
  chr16:47175852-47175938
  hyper
cctaccctatccagctcgattttatcaagttctgcaggtaaagcggtgtgacagatctacgcgatttcatccgggggtgctctcgg

SEQ ID NO: 10649 - DNA, 810 bp, Homo sapiens
  chr16:47176766-47177576
  hyper
gtacaacaaattagtaagaaccgaacaccagcggcggggaattctgagacctctggcggagcgcgaggagcgccgcgtcccgggaagcacccgagcagcagcgctccccgggggccgggacaagccgggtccgcggcgcccgcgcgccgcccccggagcccgcagtggtgccgcagcctccgtggccgcagcaggtgggacccggctggcccagcaggccccgttccccgccgcgaggtgcaggcgccgcggggctattcgaaaaccactgcacgacgtcacggccgcggcttttattgttctcgtggaattactttttgccatcacatctggagaaagagcggcctccgctccacgacaggaatctcacaactttgcaaagggatgcgcggaattctacggaagcggcgcgagggcgcagcccggagggccctgctgggcccaggggcctcctggccgccttcccgacccgatccctcttcccacacgcgccccgcgaacgtcggccggactcgcaggggtcggaagcggcgcgcccggagagccggcggagccgggcagggctcgcgccccgcggtccgctccgagtagccgcgagccccgccagacaaagaggcgcgtcgggtcccgggcgcgggtaagggacgcagaggcgcgggcagggcggcgcgccagcctcggcccgcagggggcgccgtccgtggccccagccccggtccttacctttgaggaccgagcagagccgctccagggccatgttcccgagctgcccggcgcttcgcgaagggctgaggtagcggcggcggtggc

SEQ ID NO: 10650 - DNA, 118 bp, Homo sapiens
  chr16:47177628-47177746
  hyper
cggccagcagctgcctccccgctcccctgaggagagctcaggtcctgcggcccgccatgcccgagccccacagtgggctcccgcgcggcccgagcaccccgacgggcgccgcctcctg

SEQ ID NO: 10651 - DNA, 624 bp, Homo sapiens
  chr16:47177805-47178429
  hyper
gggaccggcaggcagctccgcccgcggccccggcgcgggatccactgaagtggcgggcgcggggcgcccaggctcatttaaggagggagcgcgagcgccgcgtgccggctgcgccgcctgtgcgcatgtgcccgccccgccccgccccgcgccgcgcctcgcgcgcccgccgcggcctcgcgccgtgggacggcgtcgctccccgccggctgccgttagggctgggagccggctgggcgcgggggtagtgagggtgcctctcgccgtggctgcgcggcggcctcgtccgagaggccggcgccggggcagtgaccggcccgtgcccagccgccgcgcagggcgcccggggcagctggccgagccctcgatgcctcccgtctgacggaggcgcccgggaagcgccgcccacctcggccccgcaccctcgccggcctgccgggtctccgccagccctagcagacagagaggggcgccggtccctagtcccccagacctccattcaaggtcaaaactttgcccagctcagccttgctcgaccctgggcagggaagcgcggacatcggcagagggagcccgaggctctccgtgcccttcgcgccggtgagttcccgacccgcggcgctg

SEQ ID NO: 10652 - DNA, 30 bp, Homo sapiens
  chr16:47495526-47495556
  hyper
ccagctccactctgcgtgtgcccccgactc

SEQ ID NO: 10653 - DNA, 144 bp, Homo sapiens
  chr16:49309109-49309253
  hyper
gttctcattaagagcggatgcgcccgggctctgagcattagcgctccagtgcagcttggaaggcatgctcccagctcggctaatggtggaagcggcggccgggcagcaagcgagctggggggcaggcgcggggcccagcgcaac

SEQ ID NO: 10654 - DNA, 16 bp, Homo sapiens
  chr16:49312032-49312048
  hyper
cgcggtgggagacatc

SEQ ID NO: 10655 - DNA, 30 bp, Homo sapiens
  chr16:49313292-49313322
  hyper
ctcccttccggctacgagccagtcagagag

SEQ ID NO: 10656 - DNA, 30 bp, Homo sapiens
  chr16:49315521-49315551
  hyper
cactccgggactagcgtcccctccgcgact

SEQ ID NO: 10657 - DNA, 174 bp, Homo sapiens
  chr16:49316038-49316212
  hyper
actgagagtcgcctcggccgctcgctttctcgactcccgcctcgcgcctcgatcctgttccgcctccctcggccctcctgcccgcccccactcgtcggccctcaggtaggaggcggcgcgccccggggtcgggagtggaatcgctggaggctgcgagtcgcctgcccgcctgtg

SEQ ID NO: 10658 - DNA, 30 bp, Homo sapiens
  chr16:49316868-49316898
  hyper
cctaagtggattttcgtgccacgcatggac

SEQ ID NO: 10659 - DNA, 30 bp, Homo sapiens
  chr16:49893107-49893137
  hyper
ctgaagactgaggacggaggtgggggcaac

SEQ ID NO: 10660 - DNA, 36 bp, Homo sapiens
  chr16:50582217-50582253
  hyper
cttgcctttgatgcgccgcaccggccaatgggcgcg

SEQ ID NO: 10661 - DNA, 67 bp, Homo sapiens
  chr16:50773733-50773800
  hyper
cagatatctctcttcccggtgagcctgaatataagttcagaattagctttaacgcaatgttctaagc

SEQ ID NO: 10662 - DNA, 467 bp, Homo sapiens
  chr16:51183963-51184430
  hyper
cgctaggcctgggagctttgaggccggtaccgtgaaacacctttaggagcaaggagggattccaggtgtcctccctttgtaccccaactccctgcccggatctcttccactctctgccatagcccccacacacaaactttgttctggacttgttcagccccttcgggacccacagttgtcgcctccatcggagaaaacaagtgcccctgtttcaggggggattccactctggctggccacccgcaaacctggaaaactattctatgacttcttccctgacccccctggaagtagggagcaccacgatccgcagagggcgcataccgaccagaaagattttggggggcagagggtgcaagtgttgtgggaagagatgcggagataaattttgcgagccagaccccgacactttccccgtccgtttgcaccgtctccggaacaactggcggccagcagcactctccacc

SEQ ID NO: 10663 - DNA, 356 bp, Homo sapiens
  chr16:51184601-51184957
  hyper
cgaagtaaacttccttaccgctggcagcaaggccgggcggcggaggccgggccgggtgccctggggccggcgccgggagcgctaggggccccgtgcggtcaggccggggcgacctccacccgcacccacgcctcatggggctcccgggtcttggccgcggctgggatccccggaaaagcagggacggagaagccaggccggcatgcccgccctccttcccccgggaggacccaacaactccggaaagatcctgccgggagatgtgctcgctttccccggggcagcgggggaaagcccagcaaaggcacattgaaaattaaaaagaaaaaaaaaattacgccgagtggaagaagcaa

SEQ ID NO: 10664 - DNA, 237 bp, Homo sapiens
  chr16:51185054-51185291
  hyper
cggcgcgggccggagcactcaccatctcgccgggggagcgaggccacttcggggtcggattggaaatgttgaggcttcgcttgcttcctccgcgacatgctggctcaaacatcagctggggcagaataaaaaattactaaaaaaaaatcttctcaaaattacggaaatcgagcggcggcggcggcggcggctccccccgcccgccggcccgcccgccccctccccggctccccggcc

SEQ ID NO: 10665 - DNA, 422 bp, Homo sapiens
  chr16:51185542-51185964
  hyper
gggactccgcggcccggccgccgggggccggcctcctctccactgcgggcccggcgccccggcaggcgccccccgctctctccctctcccctccctcttccctccctccttcgcccccccccacaatcccgggctgggccgacccaaattagcatgccctccccggaattgagccgccccgggtggggggtggggccgggcggcgagggctggggacccgggctgccggcgcgctgcgaacttcccaactcgggggcgaggcgcgccggcccgcggggggagggagtcccgcggcgggatcaggggggagggcgtcccgtttcgtgagtgtttcttcgtttctttaagagctaccagaaagcagcccacccccacccccattaaaaaaaaaaataagcgagtggggaagagccagccccacg

SEQ ID NO: 10666 - DNA, 303 bp, Homo sapiens
  chr16:51186025-51186328
  hyper
cgagttctccatcccctggatcccgggctcgcgggggcgcggagaagaggatccaggaaaggtttgggaacctgatgggtttgtggctggggggaggggcagttctcccgccaccccatcccctccccgccaggggcactgatcctccagcttcttgcttgctccctcgctccctttctctacctcggacattcccaggacaattagggctgaagttttcgggagaagcagccccgagcccgtgggataagggggcggcccggctccgcccaggacccctcccggacctcccccccggctgcc

SEQ ID NO: 10667 - DNA, 560 bp, Homo sapiens
  chr16:51186595-51187155
  hyper
gggacgaggtggcggcgcagagccggaaagcggggtggggggagggcggtggggaggtgttctgtccgaggctgcctggcggcgccgaagctcgcctccactttttgggcacttgccgagcgcggcgcccgaacttttcgctctatcaccatctccctcaagctgagatgcaacctccctaccctcgccccagagcccagagccaggagcccgatccctctgccgggctcaggcgcccgcgaacctgagactcggtacgcggctcagcctagctctttcccctcgcgcctcggggtctcctcgctccaaggttctcgaagtcttgcgcccgaaggactaaactaaactaaacttcggctgagtaatgggggaggaggggggtgcagatacacaatccctgccctatctcacgatcaggaaaggagagggctcataaggacgccccaattcgcgagcgcccttgagtctggccggtgccacggtcggttcgcgcgaagtgggcaccggtctcccgagccgacttcgtgtactccggacctgtactgcgctccggtagagga

SEQ ID NO: 10668 - DNA, 30 bp, Homo sapiens
  chr16:51187358-51187388
  hyper
acaccctctccgcctcgctctcccgttctc

SEQ ID NO: 10669 - DNA, 24 bp, Homo sapiens
  chr16:51189282-51189306
  hyper
cggcgccccgggggcgggggacga

SEQ ID NO: 10670 - DNA, 170 bp, Homo sapiens
  chr16:51189786-51189956
  hyper
ttagaacactggagcggcttcgaacccgaagtatggagcaggcttgggtgggtacctcgcccctggccaagtctacactgtgcgccctcggcgcactcgctctccagcagttcaataccagcagcaaaacgcaggtttttgggggaactcccgccgcccgccaccaaggg

SEQ ID NO: 10671 - DNA, 30 bp, Homo sapiens
  chr16:51190186-51190216
  hyper
cgattttgactttccgtccacagttgagcg

SEQ ID NO: 10672 - DNA, 30 bp, Homo sapiens
  chr16:52579634-52579664
  hyper
ttcgacaaattcggcgctgggggcttcagg

SEQ ID NO: 10673 - DNA, 30 bp, Homo sapiens
  chr16:52580251-52580281
  hyper
cttctttcagtcctcgggctctcttcgctt

SEQ ID NO: 10674 - DNA, 30 bp, Homo sapiens
  chr16:53468701-53468731
  hyper
gctggaggtgcgctcgcgggcggaggggcg

SEQ ID NO: 10675 - DNA, 412 bp, Homo sapiens
  chr16:54319227-54319639
  hyper
tctccttcttgaggcgccggcgcgcgttggcgaaccaggtggacacctgggtgagggtcatcttggtgatgatggccagcatgatcttctcgcccttggtggggtaggggttcttgcggtgctcgttgagccaggccttcagcgtgctggtgctctccctggtggcgttcttgggacgggacgggtccccgaactggtactggccatacgggtagaaggcggggtgcgggtgcggaaacgcggcagccgcggccggatgctgcaccccggggctgtccttcagctcatactgcgcgccctgtacgcacatggagaaggaagggacacgcgcggagggagcgcgagtgagccccagccatcgctgcctcccccctcctggcctgcacccctctagtccggcccccgcgcgctc

SEQ ID NO: 10676 - DNA, 35 bp, Homo sapiens
  chr16:54320210-54320245
  hyper
gattgacatttctacggggcgcaagcccctcctct

SEQ ID NO: 10677 - DNA, 34 bp, Homo sapiens
  chr16:54320655-54320689
  hyper
gacacttagggtgccgcgcggggggtgtgtgtcg

SEQ ID NO: 10678 - DNA, 125 bp, Homo sapiens
  chr16:54321150-54321275
  hyper
ggagcgagggagtgcgtcctaacagagtctccagaggccacctcgctgccttgcgggggcgaggcagcccccaacccagcaggaccaaacccagagattagccacttaacgccgcccccgggtcc

SEQ ID NO: 10679 - DNA, 88 bp, Homo sapiens
  chr16:54962470-54962558
  hyper
gtggacagaggagccacgcccacgcgcgcccgccccgaaccccgacacccggagaggctcgaccggcgccgacgcggcccgaggccca

SEQ ID NO: 10680 - DNA, 51 bp, Homo sapiens
  chr16:54964081-54964132
  hyper
tctgaggcctgtctctcgcccacctgctgctgccggcgcagaggggcagtc

SEQ ID NO: 10681 - DNA, 393 bp, Homo sapiens
  chr16:54965775-54966168
  hyper
tcctccaaaatgttgcaaatccgtaatcctatcttcgcaatccgatttgggagtattaaatttctgaaaagtcggtcgagctgcggtgcatccgggatttttcggccgggttgtaacttcggtctggggtagtatttttggagggtgggagtgcgtgggcatggctcagctttttgtttgcatttcttagctgttgaaaaaagaaaaaaagagccttgacttcccttgttttccccccttgcgcccaacgtgcgtccgctcccccgccgagcgcggagtcgcctcagttgcccaggcctctatctgcatggagggccgggccgccgtggccagatctgcgcacggggtacggacgtgcccgggcagatgggggcctacggggtgacaccgagg

SEQ ID NO: 10682 - DNA, 564 bp, Homo sapiens
  chr16:54966659-54967223
  hyper
cgcgccggcgcctcaagaaagagaataaaatgacgtggacgccgcggaaccgcagcgaggacgaggaagaggaggagaacattgacctggagaagaacgacgaggacgagccccagaagcccgaggacaagggcgaccccgagggccccgaagcaggttggtggacatgggaaagggcgtgttgggcgggagtaaaaaggaaaagagaggcctggagggggcgcgcacggggcctggaggttgggggcaggggtccctgcctttgcgggcgggaaccgggtcccgccgcgcggcctctgcgcccctgacagcctgggtttcgcccgcaggaggagctgagcagaaggcggcttcgggctgcgaacggcttcagggaccacccacccctgcaggcaaggagacggagggcagcctcagcgactcggattttaaggagccgccctcggagggccgcctcgacgcgctgcagggccccccccgcaccggcgggccctccccggctgggccagcggcggcgcggctggcggaggacccggcccctcactaccccgccggagcgccggc

SEQ ID NO: 10683 - DNA, 504 bp, Homo sapiens
  chr16:55090596-55091100
  hyper
ggctgtaattgctcccagccccggagtctggcaaaacgctcttgtggggcgtcggctgcggccccagattaatcccatcttttcccgcgccccaagcgccgaagccccagaactgccgccggccgggcccatccccagcccaggctcgtaatcaaaaggcagatttccgcgccgggcacctgtttgcagggctgcgcctccttccgctgcggtgttttatctcggcgcggcggtgaataattcatggccccgggtctgctttgcagtcaaacgcgctgcgttctgtccggcgccgccgccgccgcccgccggccgctgtgatttattatttaccaacgcgcggccgcgccgtgtaaggtgagcattgtggctgctcgcagaactgttacaatctggcctcgttagtggcctttcttgctgcatctccaaacagcggccccgcttattgattttcccgcggaacctctgccaagaaatcccaccgctgctgctctcaaagctgtt

SEQ ID NO: 10684 - DNA, 14 bp, Homo sapiens
  chr16:55357558-55357572
  hyper
aatgggccgccctc

SEQ ID NO: 10685 - DNA, 329 bp, Homo sapiens
  chr16:55357611-55357940
  hyper
cggagcgcaggggctgcagcccggaccgggagccttcttcaggctccctggctgccccgcggccactgcgggaggcgcgcgcgcgaggcagccaagccttgccttcggaggagatgcccagggatcttagcaagcagcctgcggctgccagggatcggacctggcgagtttcccgacggaatctgagggatcccgaacctcggcctcgagggggcgctatccggcctactcgaggaccaggcagctgcagagaagctccaaggtcaaggccctgggccaggccagggcttggagagccggaatctagcccgagtcctggggaggctgag

SEQ ID NO: 10686 - DNA, 359 bp, Homo sapiens
  chr16:55357991-55358350
  hyper
cgacgctgcccggagctgctccaacgagagccgggcctgtggcgtgaacaaactttacttcagcgcaggggcggaggaaccgggctggaggcttctcccccgggcctctgctctcctccacctgccagtgctcagcctccgcccagccttcgcccaccccagctccctccccctcccccacgcgcctctgttcactcagactcctgtctcccctctcccctcctccttctccctcttgcctttctcccccacttttctcctgtctcttcttttgtattctctcctccctcgccgccccggttgcctctcgcctcctccgggccgcaggggaggaggtgagcgcgctgcgcccggggcct

SEQ ID NO: 10687 - DNA, 109 bp, Homo sapiens
  chr16:55358566-55358675
  hyper
gcttggcacgcttggtggcccagggtcccggggcccggggtcccgtctggcggcccgggattaccgtgacgtcacattgagcctctggccaccttggactgggacacct

SEQ ID NO: 10688 - DNA, 264 bp, Homo sapiens
  chr16:55358784-55359048
  hyper
cggaccccacgggccggaggggcgccttccggagcgcagggctcggcagccgggctgccctcggctctgcctccactggggccaaccaggcgaaggaaccggcgctgggcatccgcagcggtgtaaggaactgagacacctcactgctgggggcgcggaacagctgggctgagacgggaactcgacagggaagagagagacgggccagggacagccaccatgtccttcccacactttggacacccgtaccgcggcgcttcccag

SEQ ID NO: 10689 - DNA, 30 bp, Homo sapiens
  chr16:55365131-55365161
  hyper
ccaatgggaactgacgggcagggaaggggt

SEQ ID NO: 10690 - DNA, 316 bp, Homo sapiens
  chr16:55404966-55405282
  hyper
caggggtctttgagcatcaaacgtgtcctccttccctctacctacttcggctccggtttctctcccgaagcctaaataaagaaggtaacagacaacacctctattggcagaggcttctgccttttccgtcaggctggctgcagcacatccgtaatccttatgtcagcctgcactctagcgttgccggcccggtccagcatctgacagccgcgaatccaaagctgccggcctctcgtttctaagcagcagctcacagcgccagccgccctcccgcagaaggggaacaaagcccggcggactagctcactatcttctg

SEQ ID NO: 10691 - DNA, 139 bp, Homo sapiens
  chr16:55499095-55499234
  hyper
gctgaagctaatggaccgtgattgtgcattaaagccactagatggtgccatgagcccagagaatgggctgatctaggccgctctgagccctgaggctgcttctccaaaagtggccaccagatggcgcagcctatctgca

SEQ ID NO: 10692 - DNA, 230 bp, Homo sapiens
  chr16:55513133-55513363
  hyper
gtggctggaggctgcgcatctggggctttaaacatacaaagggattgccaggacctgcggcggcggcggcggcggcgggggctggggcgcgggggccggaccatgagccgctgagccgggcaaaccccaggccaccgagccagcggaccctcggagcgcagccctgcgccgcggagcaggctccaaccaggcggcgaggcggccacacgcaccgagccagcgacccccgg

SEQ ID NO: 10693 - DNA, 199 bp, Homo sapiens
  chr16:55513482-55513681
  hyper
cgtcgcccatcatcaagttccccggcgatgtcgcccccaaaacggacaaagagttggcagtggtgagttgctgcgctggcctcaaggaaccacgtttagacaaacttcggaggcaaaggatgggggtgtctctccccctgccctcggcggtgggcacacagcgtgggggaggggcttcggtaaacagcttggggggtct

SEQ ID NO: 10694 - DNA, 30 bp, Homo sapiens
  chr16:55514363-55514393
  hyper
gcgggggcggactgcgctccgctcgggtcg

SEQ ID NO: 10695 - DNA, 30 bp, Homo sapiens
  chr16:55542906-55542936
  hyper
gccagagcctggggcgtgtcacagccgaag

SEQ ID NO: 10696 - DNA, 264 bp, Homo sapiens
  chr16:55690115-55690379
  hyper
ctgcctgggaggcccgggccgagacgcgccagcagagggctagcgagtttgtagtgcagtgacgttaagtgtccgagaaggctcctgtggctgttgaagtgtcgcggacctgagctggggagggggtcggcacgctgccctcagcctcggtgagttcaatcccagccatttggggcaggcgagagtgggtgaacgaggaaaagtgctgcagggtcttcagccgcccccagagggctgtcagaagtctccaactcttgagttccg

SEQ ID NO: 10697 - DNA, 123 bp, Homo sapiens
  chr16:55690453-55690576
  hyper
cgcgcgctcatcccagtgtctaaggcgctcccgggtggtcttgggagttgcaagtagggaggaacggccgggtaaccacctcttttccctttatccaagcagagcctcggcgtgcccccagga

SEQ ID NO: 10698 - DNA, 350 bp, Homo sapiens
  chr16:56224482-56224832
  hyper
caggggtttgctggaaactcccggtcgcttgaagccctgtccctccactccgggcaccctggcctccccagggtgggcacccctcctgcacggagagcggcggctgggatctcggagcagggtcggctatggccctggaggcagcggctcacagagaaaaagctctggcttttctccgcccgctgcgttcctcttcttacagcctcgggtgtcacatattaggtgctcaataaatgtggacataggaaacgaaaagtccgaatctgtccttacgcccccaaggcgaattctggggcgcgcgggtttattccgacccactaccacatcgcgtttcctgaggtaacccggcc

SEQ ID NO: 10699 - DNA, 839 bp, Homo sapiens
  chr16:56224880-56225719
  hyper
cgggcgacaagatggagagccggcccgagagggacagaggccgcgctggcagcgagctggggggcccacctgaccgtcctgcgggcagcccggccccgcgctcccattgacaaggaggtccgcgccgccggcgcgtggggcgggggcggaggcggggtggggcgccccggcgcgcgcccggccccactccccgcccccgccagtcccgcaagcacccaccccgggggagccgcgggccgggagggcgctggggggaggggcaggccgctccgcgagcgcgtgtgcgcgccgccgccggctgacgcgaactccggcgcgcgcctcccccgccccgcgccctccccgtcccgggggcccggcgcgcggccctgctgacgtcagctggcggcccgcggagccgggtgcgcagagccgctggcgcactcgcgcgctgcgctggcctcctccccgccccgggcccaggcgcgcgcgcgcttgttcgctctcccattttttttttcccctccctccctgcctctctctctctccctctccctcgagctcccggctggctgcggctccctggcgctctccctctctctccggtaggctcaccgagcgatgcgagctctgggagacagcgacgccgcctcccgctagagacctgcccctcggcccggccccctgcccaaccctgcccagcgcgcgggggtcggcgaaggcgccgcggacgcaccgacggctgaagagcggcgatgcacatgcactagcagcaccccctaactcactccctccacatcccgcgccgccgccgccgcctcctccacctcctcctccgccgccgccgcctcctcctcctc

SEQ ID NO: 10700 - DNA, 434 bp, Homo sapiens
  chr16:56225937-56226371
  hyper
ctgccgcgagtctccgctgctggaatcttgttagcggctgtctttttggagggttctggtttcccgacatttttgtttccagcccaggagaggatatcgtgattttccccccttgagcccaggctctgctctctgggggggtggggggcgctccaagccggggagccgtgccagccgagtcgtgcgggctgtggcagggaaggggccaccatgggatgtactctgagcgcagaggagagagccgccctcgagcggagcaaggcgattgagaaaaacctcaaagaggatggcatcagcgccgccaaagacgtgaaattactcctgctcggtaaggaccgccgctgctacccccatcccccgaccccggccactccgcaccccctgccaccagctcccccaccccactcgcgcccgggagacctggtccccaagtt

SEQ ID NO: 10701 - DNA, 53 bp, Homo sapiens
  chr16:56228363-56228416
  hyper
tgagctggatgaggtttcaggcgttgcaagtggtggacagcgcccagccgagg

SEQ ID NO: 10702 - DNA, 36 bp, Homo sapiens
  chr16:56228577-56228613
  hyper
gggggaggggagtgcgcaggaggggaaggaggaggg

SEQ ID NO: 10703 - DNA, 30 bp, Homo sapiens
  chr16:56553765-56553795
  hyper
cagcagcatgatggcggcggcttaggggag

SEQ ID NO: 10704 - DNA, 341 bp, Homo sapiens
  chr16:56659339-56659680
  hyper
gagctaggggtggggtggagacgcccgcgacgccaaggctggggtcccggaacacgctgggaggagggtggaaggcaacctcggggaaactgggaaaggcggcctggacttcgggaacaccgcgtacctgcgggggcacagccccacccgagcgaacgggctccaaaggggaggtcccgcggtgcccaccgcgcagagctcagggggtggtgcgcccggcccttctgcggcgcacagcccagcccaggaacgcgggcggtgcggactcagcgggccgggtgcaggcgcggagctgggcctctgcgcccggcccgacctccgtctataaatagagcagccag

SEQ ID NO: 10705 - DNA, 30 bp, Homo sapiens
  chr16:56666413-56666443
  hyper
ggggatggtgcgcccggcacttatgctggg

SEQ ID NO: 10706 - DNA, 224 bp, Homo sapiens
  chr16:56671948-56672172
  hyper
gacgagagtgagaggccgacccgtgttcccgtgttactgtgtacggagtagtgggtccgagggacctaggtgtggacagggacaggcaaggcgacagcgaggagaaacgaaaatcacatcggtggcggttgctctgcacacaactcgctcgctaccgcacgctccacgctctgcactacgccgatccggggacaggagcaggaggctgtggctgcactcagact

SEQ ID NO: 10707 - DNA, 164 bp, Homo sapiens
  chr16:56672221-56672385
  hyper
cgaaacgccaaggctgggttcccggaacgcgcggggactagggtggaaggcaacttcggggaaactgggaaaggcgaccgggacctcggggacgccccgtaccccgggcgtaaactcactcccgcgttagcggccccaaagcggggagggggtggtcccgtggt

SEQ ID NO: 10708 - DNA, 103 bp, Homo sapiens
  chr16:56672513-56672616
  hyper
cgggtcctttgcgtccggccctctttcccctgaccataaaagcagccgctggctgctgggccctaccaagccttccacgtgcgccttatagcctctcaacttc

SEQ ID NO: 10709 - DNA, 32 bp, Homo sapiens
  chr16:56703366-56703398
  hyper
tgacagggggtgggcaggccccggggtgtggg

SEQ ID NO: 10710 - DNA, 121 bp, Homo sapiens
  chr16:56703438-56703559
  hyper
cgggagtagcaggtaatctcagggaactgggcaggcccggcagggtgaaacaagcagctcacccgggtgcacagcccctcccgcgggagccgctgcgaaagggccgtccccgcggtgtgca

SEQ ID NO: 10711 - DNA, 237 bp, Homo sapiens
  chr16:56703621-56703858
  hyper
cgcgggcggctcggactcagtgggtcgggtgcaagggtggggcagggtctctgcacccggctccctcccctgactagaaaaggagctgccaactgttgcgctccaccacgccctccacgtgttccactgcctcttctcttctcgcttgggaactccagtctcacctcggcttgcaatggaccccaactgctcctgcgaggctggtaaggaacgcccgggttctgtgccttaggatgc

SEQ ID NO: 10712 - DNA, 115 bp, Homo sapiens
  chr16:56709777-56709892
  hyper
tggccctcagggtggcaggggcggcgcgtacctctggcagcatagcccctcccgcacgagcgggccccaaaagggcggtccccgggagcccaccaggctgcactcaggggatggt

SEQ ID NO: 10713 - DNA, 107 bp, Homo sapiens
  chr16:56709949-56710056
  hyper
cgcgtgggggtgggtgagaagggtactctgcacccggccccctcttctaactataaattgagcttccggttcctagaatccaccacgcctcccacctgccccactgc

SEQ ID NO: 10714 - DNA, 30 bp, Homo sapiens
  chr16:57023340-57023370
  hyper
gcccccgcccatcccgcgcccgagccccat

SEQ ID NO: 10715 - DNA, 31 bp, Homo sapiens
  chr16:57127432-57127463
  hyper
tcgctccacgtccccccgagttcaagaagct

SEQ ID NO: 10716 - DNA, 42 bp, Homo sapiens
  chr16:57318161-57318203
  hyper
agcgccctaggggtacgcgcagcgcgtcggtgacagtgtgag

SEQ ID NO: 10717 - DNA, 46 bp, Homo sapiens
  chr16:57318552-57318598
  hyper
cctgtgtggctccaggcgctgcaggaggcgtcggggctgggagcct

SEQ ID NO: 10718 - DNA, 30 bp, Homo sapiens
  chr16:57481675-57481705
  hyper
aggggcagatgcagcggggcagggcctgtc

SEQ ID NO: 10719 - DNA, 312 bp, Homo sapiens
  chr16:57519802-57520114
  hyper
atttggaggaggtgagcgaacaggaggccccggggaggagcaggaaggcagagagaaggttgggagctgccaggggctgggttatgccccttccgggggggcaggcccgggagcgcagggcctgggttgctcggatgaggtttgtgtgggtgcgggtgaggtcagctcgcgacctgggctcccccggagaggaaagctgcgggtggagagagcgcagggagtttcagggcccaggcactggcttttggggggcgggtctctaagctccccacccgagagtaggaaggtcccatgggacggagcgtcctcagg

SEQ ID NO: 10720 - DNA, 450 bp, Homo sapiens
  chr16:58060127-58060577
  hyper
gcggggaccgggagcccgaggtccgcggcgcgcctgccgggccaggagccagggagcgtcgcaagtttccaaggcgcgtgcgaggatccggcgtgcagtgttccgagctgggctgggcgccgagagcatgggcagcgacccgagcgcgcccggacggccgggctggacgggcagcctcctcggcgaccgggaggaggcggcgcggccgcgactgctgccgctgctcctggtgcttctgggctgcctgggccttggcgtagcggccgaagacgcggaggtccatgccgaggtaagacccccgccctgccctttggctgcgggctgggggcttggagggagaggcgccacgtccgcaggctgggacttggaggtggagggagcggagacgcgccccctgttctgggccgtggcggggaagcaagcggacttggcagtctgcccctccccagc

SEQ ID NO: 10721 - DNA, 620 bp, Homo sapiens
  chr16:58060638-58061258
  hyper
cgctactcctacagccctgttctgggcactgagcccccaccccgacccccttacattcagcctgtgtcccgggagccgcttccgccgcccccagcccttgcctcccctccttccttccctccagggcagccgattcctcgagagcccggctggcgcgcagtggcgctctttgcgagtggggagggggctgctctcggggacagccacaggcggagcaagagctgggcggctgggcaactgcgctcctgcccaggtggcctcccgtctgggtgataccgagccgcgcacggcgggccaggatggaggcggggggatgggtgcaaacggctgaggcagcggactcgggttgcgggggcgctttggcgactttctgcgcttttgcgaggaagcctaggcacgcccgggcggggtcctaaggacggaccctgcctcccacagcgcttcctcccaacagcgcccctacgtcgaagccctggattcgagagggtggaccccgcgcctctcttcgctaggagcccgcttggcgtccctcccggggccccgctctggatgggtcccgcgggtgaccaggcgcgacatcccggcgtagagccgagtccagccagcgccccagctccatg

SEQ ID NO: 10722 - DNA, 30 bp, Homo sapiens
  chr16:58426316-58426346
  hyper
tgcctgggcggtaccgcccgaattgactgc

SEQ ID NO: 10723 - DNA, 715 bp, Homo sapiens
  chr16:58497856-58498571
  hyper
gccccatttcgcctccgcgggggcggcgccccctcctccccgcggctcccgctctccttcctcgccttcccggccgcgctggggacccccagccgccgtccgcgaccccccaccgcgacgcccggaggcggcggggtctctttgttcgggcggcgggcacgggggaccacctcccacggtgtcaccgcacccaccccgcgcccttcctccgcctcctggagttcaccgggaccaggtggcggcgggtgcctttttgggggtgcgcggccatgcaattggtggatttttttaaaccgttttggaggggggagcgcggcgttgggggcgggagagcgctcctggctgtgagctgctcctgccgcttcgctccgcgctctcctgccgctccgctccgggtctcccgcgctcctctccccggctcggccgagcgcgctgccccgacgccgccacccagagccgggccgcgccgggcgccgagatgaaggtgctgggacaccggctggagctgctcacaggtaccgcccgcctgccccgcagccggccgccactttccgagttggagcggactccgggcgcggcggccggggactggggcggctcgggtctgagcaggaaggggtgcggaccccaactaagtcctagttttgtgctacctgtttgtgtgcggagcccagccccgggagaggacttgaggttgtggcgagtccctggcgct

SEQ ID NO: 10724 - DNA, 373 bp, Homo sapiens
  chr16:58549276-58549649
  hyper
tcaagatgttttcatgaggaacgattccagcccgcggtaactccggccagtctgcagcgtggacgacaaaacaggcaccacgtggttccggcgccggggcggggccagagacgccggaagtgaccgcgcggtgcgccggcccgcgaggaaacgcgctcttagaccatggcgacccaggcgaagcgtccacgggtgagtggcgggcgcggggtccagccttttcctccgcgcctcaccccttctccgttcgcagaaccgtccgcctgcgccccctccgctccctcccgcgggtcccgcgcccctctccgctcgtcccctcctccacccaaagcccgttctgcgctcgcgccgcggtctcctgcagttcccagcg

SEQ ID NO: 10725 - DNA, 31 bp, Homo sapiens
  chr16:61445875-61445906
  hyper
tggaactgaggtctttcgttcagggtaataa

SEQ ID NO: 10726 - DNA, 30 bp, Homo sapiens
  chr16:62068432-62068462
  hyper
tcggatctgctttgcgatggtaccggatgc

SEQ ID NO: 10727 - DNA, 137 bp, Homo sapiens
  chr16:62068946-62069083
  hyper
ctggtgtttgggaggaataagcggaggaaattgtggatacctgttggcatcagcgttggcggcagcacgtttttttaccgtttcccagccttggctggatcctgggagaaccggagtaggtcccttatgaacctctt

SEQ ID NO: 10728 - DNA, 137 bp, Homo sapiens
  chr16:62069136-62069273
  hyper
cgcgaccagcccctcaaaggttcccggatgagaagcggccagaccacagaaagcgcaggtctgggctcagctgtccctaggagagcggctacggagtccccggcttaagggggcctccgtgcacgcaatctcgagtt

SEQ ID NO: 10729 - DNA, 279 bp, Homo sapiens
  chr16:62069336-62069615
  hyper
cgcagggcgactccggagcccggcaagtttgtagcgggcaccgcacctcccagagctggagctgccacttgtgggaaagcctcgcgctggggctttcgcagctgagccttggcccgcagccctgccgcgggggtcgccctccctcgcctcggagatgaggcggtgcagaaaaccagccatagaccactcgggccccctcgcctccttttttccctggcttgcaccctccgcacagcgggctgcaggtgcttcccattcaccgcacggaccccgcagtga

SEQ ID NO: 10730 - DNA, 253 bp, Homo sapiens
  chr16:62069859-62070112
  hyper
caccatctgaggggcaggaggcgcgcaaggtgtccgaaggggcatgggaattcctataagaaacggtcccttctggatagtcggaacatagaggaaaacgggggtgggttaggggaacacttactcttgtggggccctgcgctggcgaatgtcaagcctccaggttcacaaatggctggaggtgctcggggttagctcccgagggcggcaagcgccgaccggtcctcgctcgctaggcaggcgcctccggatt

SEQ ID NO: 10731 - DNA, 22 bp, Homo sapiens
  chr16:62070245-62070267
  hyper
cggagcttggaggaggcaggga

SEQ ID NO: 10732 - DNA, 1043 bp, Homo sapiens
  chr16:65154642-65155685
  hyper
gaaaacctttcacccgggagaggcaggcgcggcgagccccgggcgaaagcagggcctcggcaaaaaaacggacaaggaagccggacccgcaagcctcccccgaccccactttctctggggactccgcttcacagcgtgaggcgggccctcctacagttcctctgggttggggaggggggagaagggagctctcctcgccgtcctccccatctggccagcttctcagtgcttcccacctcccggctcgcgttccggggcagagcgcagggagggaggccgtgcgtgccgggagctagagaggcttggcgcgctccgagaagcggcgcaggtttcgggaaggtgtggttctcaaagttaacgttgaccctggcagctttcgccaatcccaagccagaggcgagcccgagtctgggccgctcatggacctactcctgcgctggtgggagcttacaaacgggcgccagagctcccgcagagactcgggctggagggctgtagcgcaccgcagcctgctgccccagaaccacagtcggcggccccaaacccacgctattaaagtgcgggcaatctccttccggagctggggtctttccgttttcccgggcttacccggcagtctcgactgcagggactaagccccggggagctttcggcagggatccgggaggatggagtaagaaccccgcagagcgcggtcatgtcgccgctttggggaagcggcgcagggctggcgggcaccgcgccgtgggcgactttccccagagatatgaccggggacagtcggcgtgtccggaggtctgctctgcagtctcttgccccagccaggtacaaaccccctctgctgtggcctcggcgcagaccccacaggaggccggagccagggagagtcgtggagcgcacatctgaagcctccgtcccctgctttgcccgcgcccacagctggctcccttctccctttctgatttttaaacaaatctctccctcccttttgctttgcgttagtgaagccttctcgactcagataccaccgtccccctcaccac

SEQ ID NO: 10733 - DNA, 28 bp, Homo sapiens
  chr16:66638193-66638221
  hyper
gggtggccaagaaagtcgcaagaaaact

SEQ ID NO: 10734 - DNA, 70 bp, Homo sapiens
  chr16:66638268-66638338
  hyper
cggccggggtctttgctgtttagacgcctgggttcccggatcccagacacgcgcacgggcaggaagttag

SEQ ID NO: 10735 - DNA, 30 bp, Homo sapiens
  chr16:66878795-66878825
  hyper
cgcggagcgctgtgcgcgggtgtctgcggg

SEQ ID NO: 10736 - DNA, 30 bp, Homo sapiens
  chr16:66959387-66959417
  hyper
agggtttccgccgccgctgctgctgcagcc

SEQ ID NO: 10737 - DNA, 633 bp, Homo sapiens
  chr16:67189017-67189650
  hyper
cagaaaagtctgggcaggtggcggcggcggcggcggcttcacctccgacagagagggcaccgggggctgcaagggggccgaagcgacctccccgtcgccaccccgggcccccgagccgcacttcagatttcgcagcgcatcctccagctcagccagttcttcatcccggagccggtcgggctaggggaatggaacgtgccgtcacgggggacttaaccgcggatccccgccctaccccatcctgaccctagcccggccgcacctgctgggctaggatgcaactcaaacagcgctcctcgtccgccagcaaagcgtccagccgctcggcgccggcgcgcagctccagttgcagcggcaccgagtgctgggcgagcgcggccgccaggctcctctgcagcgcggcgcgcagcgccccctcgcggtaggcgcggaggaagcggccacagggctgccgcccgcagaatcgcagctgcacgatcagctgcgggtcgctgcggtggatcttcagcatctgcagcacgtccgggctcccgccgctctctgcggaggcgggcggtcaggcgccgggcggtccccaagctcggccgttctccaaacggccggaggaggggcgaagcccgtggtgaagccccg

SEQ ID NO: 10738 - DNA, 1399 bp, Homo sapiens
  chr16:67197558-67198957
  hyper
gaggagctggcggcgcgctgcgcggccctgcgcgaggtgcattgtttctgcgtggtgagccactcggtgctggacgccttccgcgcgcactgcccgcgcctgcgcacctataccctcaagctcacgcgcgagccgcatccctggaggcctacgctcgtggcgtgattgggcgacttctctcccccgtccccgtggacgtaagcgctctgagagggaacggggggggtgtccaggcgcgccccgagtgctagtgccttcttttgggattgttgccccccgggtctttaccgagttgggaactgtgatggcatcgggaccagtcctgggcgccctgagaccactcgctgctctcaccctctgcagacgccccacccgctcggtcctggacacactgcccccctctcttgcctccacccctctgcggactctgcagctccgcggccccggcgcagggagagggagggcacgggcgcgggccgggcctcaagggtgagtgtgaaataaacaaatcctgcagtgtttctgcgtcctattaaaggcggggtcggatctgaaagggaaggacagggaacgcgcggggtaccggaggagccatcccggcagaggttgggtttcctcaagagcctctggacgacacagctgcggggggtcagggtcggggcactcacacccttggaatgactacgtcccggggttcggcgggagggggcgtgcttccctgcccccccttcctatctgcttgccctgcctggggcttcactgtgcctctggccattaccttctaggacttgcccagcccacaccaggtcgcgcaccggcgatttctcctgtagaacaaagaaggaaatagagggaccgagaggggtgggactcgaacccaagtctcccactcatctcaccccaccccaccccactccaccccaccccacccctccactccactccactccacacatcccatccagccagccttttctgcctgctggtgcctcggccgctgtccgagccccgccccgcgggcttgcacgtggcccccgcctgacccggcgccccggggcggagtagggcggagcgggcggcaaacgcagcactttccgcggctttgacgagcccgcagcggccgggcccgagcgcagagccgggccgagactgcaccatgcaggaagcgccagctgcgctgcccacggagccaggccccagccccgtgcctgccttcctcggcaagctatgggcgctggtgggggacccaggcacagaccacctgatccgctggagcccggtgagggccggggcccctcgattccccctgtggtcccggggtccctccacgtcagtgaacacccatgcccgcccaaccccctcctgagactgggccgtggatccccggatttggccattc

SEQ ID NO: 10739 - DNA, 31 bp, Homo sapiens
  chr16:67203649-67203680
  hyper
gcctcctacttgggcccggaagccagtccct

SEQ ID NO: 10740 - DNA, 261 bp, Homo sapiens
  chr16:67204201-67204462
  hyper
gagtgggcgctggacgtgtggggccgcgggccgaactgccccctcctggcctcatctcctggtgcgccccgggtggggagggaaagctgactacatgcacgtccccagccagcgcgcggcctccgcggtgtggctcctagtgcccggggaagaaccctcaccctccctattcccagcagccctggccgccccgcccccgccgcagctgctgcacccacccccaccctgcccggccctttctgcaccgtcatctcctgcccc

SEQ ID NO: 10741 - DNA, 30 bp, Homo sapiens
  chr16:67208232-67208262
  hyper
ccgagcgcagggtgcgccgcctactgctgc

SEQ ID NO: 10742 - DNA, 30 bp, Homo sapiens
  chr16:67217709-67217739
  hyper
gaaaggtcgcgtcgcgcgcctcctcccggc

SEQ ID NO: 10743 - DNA, 30 bp, Homo sapiens
  chr16:67261066-67261096
  hyper
attgcggtttcggtcgctctcccgtgtttc

SEQ ID NO: 10744 - DNA, 216 bp, Homo sapiens
  chr16:67280007-67280223
  hyper
gtctcaccacccctcccgccagcgctcagaggcggggctggccgcagcgcgaggaatgcgggctgggggcccggggcacattccagggaagaccccaggcccaaggggcaagtttacgcaactcgccgcccagctgaggctgggagcaggggagggcacccaccccgactctctctcctcttctccagcactggaggcggccgggctggtggggag

SEQ ID NO: 10745 - DNA, 75 bp, Homo sapiens
  chr16:67280818-67280893
  hyper
agccaccctggcagaccgacggcgagtggaactcgagcacctccccaggtgcgcctaattcgaagggcagtcaga

SEQ ID NO: 10746 - DNA, 458 bp, Homo sapiens
  chr16:67281139-67281597
  hyper
caccgcgggtatctgcgcgcccaagggcagcgccccgtccaggctgcaggtgggggcccggcgcggctccggaaagttggcacatgcgaaggggtcggtgtcttccaggtactgcaccctcacggtcaccactgataccggctctccgtccccgcggtcttccccgcccgccatggctctgcggccggctcacgcagcgcgcctccgagtcccggccccagtgcagcttctactcaaagcacactgtagctccgcggttcgggcccggccggaccggacgcggctggaggggcggggccagacggaggcggggccgaggaagggggtggagccaagattagtccccgagtgcgcgccaggaggtaaccactgccggaggcggggccgccgctagccactcacagggcccaatgggaatcccgttagttcactggctaggagggcgggaaaaaccgagc

SEQ ID NO: 10747 - DNA, 30 bp, Homo sapiens
  chr16:67360790-67360820
  hyper
aggaaggcattcgccgcctgggggcgctga

SEQ ID NO: 10748 - DNA, 30 bp, Homo sapiens
  chr16:67427324-67427354
  hyper
acgcaggaatggaccgatggacgcgggaga

SEQ ID NO: 10749 - DNA, 8 bp, Homo sapiens
  chr16:67464885-67464893
  hyper
cggggcgg

SEQ ID NO: 10750 - DNA, 86 bp, Homo sapiens
  chr16:67465308-67465394
  hyper
ccccgccggccgcactcgccgtgctggccgccgccggctggatcgcgttgtcccgcctggcgcgcccgcagcgcctgccggtggcc

SEQ ID NO: 10751 - DNA, 58 bp, Homo sapiens
  chr16:67571310-67571368
  hyper
ggcgggctgagtcaggcggcaggaactgggcggggggcggcgccgggaggagccgaag

SEQ ID NO: 10752 - DNA, 120 bp, Homo sapiens
  chr16:67571883-67572003
  hyper
gacctccttgggctcccggggtggggggccccgagctccgggtgccctggggggggaaatcgggggcagggctggggaggctgccccgcccccgggtaaacaggcgcttccgcacattct

SEQ ID NO: 10753 - DNA, 30 bp, Homo sapiens
  chr16:67678741-67678771
  hyper
ccccaggcaggcagcgtcccctggtgttcg

SEQ ID NO: 10754 - DNA, 31 bp, Homo sapiens
  chr16:67707950-67707981
  hyper
gtgggtgattggccctcgggtccagccacag

SEQ ID NO: 10755 - DNA, 30 bp, Homo sapiens
  chr16:67876126-67876156
  hyper
aatccgcacacacccgccccggaagtgagc

SEQ ID NO: 10756 - DNA, 195 bp, Homo sapiens
  chr16:67969395-67969590
  hyper
agcatctgaagtcaaccgctgcgacgccgtttggagtgaggccaaggtcacaggggcagagttcgaggagaagggacagaagcgctcacccagggctgtgaagggcagacggctgtaggagccatggggatgcacaccgtagagctgcggtccagtcaggtctacgccgcccacgatcagcgatgcacccacgtg

SEQ ID NO: 10757 - DNA, 293 bp, Homo sapiens
  chr16:68118346-68118639
  hyper
ttgctcgggaggggcagatcacgaaaacggttctttaggcagtgtcacttcctctccactgccagccacccaatttaggcggctccatccctcccgctttcatggatatgcagcaggatgcagagagcacagagctgtgattggcacgagctcacaacgggctttcccgctcaatctactcaacttccagcaagggacaggccctgcccattggggttcgctgaggcctcaaacgcgcatgctgtcaagggagcagctgcgggggcccgctagtggggacaaaggcgcagcca

SEQ ID NO: 10758 - DNA, 311 bp, Homo sapiens
  chr16:68118759-68119070
  hyper
ggtccctgccctctggagactcagccattaaagttgaggtggggggatgaggatgtgggcggcgtccaggtaactctgaggggccctgatgccttccctagagccagccatcaggagtaacacgatgcgcccccacatcaccgaacccagaacctcagtgcttcagcaccccttcctcgacatgagctccgcccaatgaggagaagggtcttctgcattggccggtggtggtcccctatccaattagagaggctaacggccttctctcgtctggtttagaaggaatcgccgggggaatacaggccaaacta

SEQ ID NO: 10759 - DNA, 72 bp, Homo sapiens
  chr16:68269812-68269884
  hyper
ccaggtcccgtcccagcgcacccgccgtagccccgaagaggacgaccagtgatccgggccaggggcaggggt

SEQ ID NO: 10760 - DNA, 111 bp, Homo sapiens
  chr16:68269896-68270007
  hyper
cggccgcggggtcagggcccgggggagggggcggcggcggcggcggagtcatggccgcagaggaagggggctctcggccagacacgcggaccgacgaggcgcacgcacgca

SEQ ID NO: 10761 - DNA, 281 bp, Homo sapiens
  chr16:68270022-68270303
  hyper
cgcggatcagcttgggcgggacaccgtgtatcgggggcggcacctgcggcccggctggctcagtgggcgctgccaagacccgcccgtggcgccccgcggggcggggcggctaccggcccacgccctctccaggcgagttacctgccggccccgccggccacgtgaccggggcggctccgggaaccttgggggagggccgccagaactcaacccaggacgcaagagctcacgctcccggcctgggcgcacgcttaggatccggattcctacttccagggctg

SEQ ID NO: 10762 - DNA, 43 bp, Homo sapiens
  chr16:68271017-68271060
  hyper
gaggctcctttatggcgcgtttcccggccgttccttactttcc

SEQ ID NO: 10763 - DNA, 58 bp, Homo sapiens
  chr16:68298828-68298886
  hyper
gcgagggtgaccgggacgctgagtgcgcgggccgcgccgcgagcgtgagactgtgcga

SEQ ID NO: 10764 - DNA, 734 bp, Homo sapiens
  chr16:68482014-68482748
  hyper
gtgggggtgacccccagccctcgcccctcatacccaagagccttctccatgataaaacgaaaactaacccaagctgctccgacctccggcgcccggccacgggaggcccctagtcagtcggcggctgtccgggacccgcggtcctgagagcaacgagaacacgtcccgtcaactccccagcccctcacgcctcggttcgcccgctccccaagaaaacaaaagcgaattcagcagcactgacctctgacggcgggcgggagggcggtcagcgcccggcagcgcaccccgctcctcccggctcctcacagcccgggctcccggccgcagatctggcggcggccgcagcggcggcggctctcgcggctctcgggtccggagcctccctcagactcagcacctggagcggcgaacagctccgcgcttcattcctctgaccccgcctccctcgcgccgccggagccaatggtgacccggaccccgcccaggagtctgcccattgggggcgtcctcccctctccctccggccccgcccgcaggttcctgggtctctccttcaagaccacatcccccagagaccggcggagtttcgcacagccttctgggacttatagttctttaaggacgcggagtgggctcacgccgcgggtaggcaaacagagcgggactgcatttcccagagtgcactgaagacacggaggcgcggagcagggcgggaggaccgtttccatagcaaa

SEQ ID NO: 10765 - DNA, 329 bp, Homo sapiens
  chr16:68503999-68504328
  hyper
ctaaaactttccaaaatgctgcgttctgtgcagttagtggtagcgtttgccagaaaaaaataatagattgtaaaggaagcaacacggaacaaccacgtttttgttattcgaaatgcagctacacgtgtttacagtccttaaccatttcatctgacagcctggggagacagacttctaatttgtgttttgataaactgagagtgacagagcggttgttggccctgcttggaggtggagtgatggtgtggtcagaagggaagccggagggaagttacactcgtggggtgtgtgttatgtgacctttgtttaatacacgttcttatttgatc

SEQ ID NO: 10766 - DNA, 21 bp, Homo sapiens
  chr16:68631269-68631290
  hyper
ttttttttttttgagacggag

SEQ ID NO: 10767 - DNA, 202 bp, Homo sapiens
  chr16:68676402-68676604
  hyper
atgaatgaatgagtgaatgaccgacaaggggagctaaggggaaggcagcggtgcggtccgcgtcgcaggcagaagagctgactctccaatctccgctcctctctccgcccccgtccggaatgctgagtgcccgagaaggaggcggaaatgagcgcgctcaacagcccaccagccgggtgtttacttaattagggcctgcatc

SEQ ID NO: 10768 - DNA, 22 bp, Homo sapiens
  chr16:68676841-68676863
  hyper
cgtggtccacccccagcctcag

SEQ ID NO: 10769 - DNA, 172 bp, Homo sapiens
  chr16:68679399-68679571
  hyper
tggcgtcggggagagcgcggggctgcgctccctggggccaagggagtcccggaaggcccgtgaggaccctgcggtgtggggagtgcagggccgggcacgcctggacccagcctccttcactctctgccctcgggcgcaggtttgctggctgcagtgcgcggcctccgagccg

SEQ ID NO: 10770 - DNA, 178 bp, Homo sapiens
  chr16:68771019-68771197
  hyper
aggctagagggtcaccgcgtctatgcgaggccgggtgggcgggccgtcagctccgccctggggaggggtccgcgctgctgattggctgtggccggcaggtgaaccctcagccaatcagcggtacggggggcggtgcctccggggctcacctggctgcagccacgcaccccctctcagt

SEQ ID NO: 10771 - DNA, 30 bp, Homo sapiens
  chr16:68771483-68771513
  hyper
cctgaggagcggagcggcctggaagcctcg

SEQ ID NO: 10772 - DNA, 30 bp, Homo sapiens
  chr16:68771748-68771778
  hyper
aggagaggggcatccgtagaaataaaggca

SEQ ID NO: 10773 - DNA, 209 bp, Homo sapiens
  chr16:69140041-69140250
  hyper
ttcccggccccagggccgggggaggcgcctctcctggcgggcacgcgccgggtacttaagggcggctcggctgggcaggcggcagtcggagcgcgcggcggcgcggagcggagcgggaggaggggcatggagccgccgcgggcctgctgagctccggagcgcggcagccggcggcacggtgagcgcgggccggccggcacccaggaggg

SEQ ID NO: 10774 - DNA, 35 bp, Homo sapiens
  chr16:69373089-69373124
  hyper
ctggaagctgggcaaacggtcgagcaggcggccga

SEQ ID NO: 10775 - DNA, 30 bp, Homo sapiens
  chr16:70414252-70414282
  hyper
agggggagcatctgcgccgtcactgttggg

SEQ ID NO: 10776 - DNA, 377 bp, Homo sapiens
  chr16:70472226-70472603
  hyper
caggagagaggagagacgaggttcagaccagcctccacgggactggcgctttggccaagtttctggcttcagccgtgcctcagtttccccaaagtaggaaggtcgagccgtgagaactgggccactgaggatggttagggggcagtgccaggtaggggaaagatcacaggggagagaggaaagaggagctgatggggcagacaggctctggccaagagtggggccggggtctcccaggtggagcagaggccgggagacccagggttagcggtacgaactagggagtggactggaagtcgggaccagggcagagagctcttccgagggctggggctggggctggggttggggttgggggctgccggcaaaggagcgga

SEQ ID NO: 10777 - DNA, 1174 bp, Homo sapiens
  chr16:70719196-70720370
  hyper
ttttttcctgctttggcggtgacagcattgtctgggctccggggccgtgggggaacatggtggtggaagggggcggaggccggtaagaccccggactcgttaaagggccctagagtcggtcctggatccaaaccccattcatggtttggcggtctggggcgcagggagcctgcgtgtgcacaggctcgggtcaggaccccacggggccaccgcgggcaccgcacggacaccccgacacacgagcacccacacccccagacgggcacccggagacacgggcgcccagcagacgcaggcaggacgcgctcagacaaggacacacagacaccgcggcgcgcggccacacgaggctcggccacccgccgccacgcgtccccggggggtcccgcacccgtcgccgcgcgcccggccccgccgcgccccggttaccttcatgtcgttgactatggcctggaagagcccgcccagggcgccgcactccttctccgccgtctccatgctctggctgggccgggccgcggcggcggctaggcgcacggagcgcggggagcagcgcaagggagggggccaggccgcgcgggcgctcgctccgaggccgggccgggcctcccgcctccaggctgcgctcagcggccggccgcgccgcgctccggggtcgcgggcctccggcgggcggcgcgggccatgtcgcagcggggctggcgggcggcgcggggggcgcggcgcgggcagctcgcggcgcagcctcggcgcggggactgacggcggcggtaatccgagccgccgaggatcgggcgtcacgtgggcgcggcggaggggggaccgcgaggagggagggaaggagggcgggccgcgcgggagggggctgtgggaacggccgcgcgggcgcaggcccattcacggccagaaaccagggctttgaaatccgagcccgggcgctgccagactggtccggcgagcggggccgacgggcgcgggcgccaccgagggtcggggggcggcgctgggcggggcccgccctgcccacgcaggagcgggactggcggttgggcctcggcccccgggcaggggctccacgatatcttctggcctttggtctggggcggggggcttctcgcgcttctaaagacaggcagtgggtacagtggcgggatggggtcggtgcatgggctgg

SEQ ID NO: 10778 - DNA, 30 bp, Homo sapiens
  chr16:71323302-71323332
  hyper
ctcaagtcccactgcgcacgcgccctgtag

SEQ ID NO: 10779 - DNA, 132 bp, Homo sapiens
  chr16:71459956-71460088
  hyper
cgtgcttgccggttcttgccaccctccgccgcttgcaccggacccaggcgctcatcccccgcttcccccgcgccccagcccggtcacgcctcggagcttgtccccacctggccgtgctcagagtctgcctgc

SEQ ID NO: 10780 - DNA, 88 bp, Homo sapiens
  chr16:71460270-71460358
  hyper
cgcacaagcccggggtgagaccagaagctgctgcctgcagagcccgaccttgcgtagatgactccgcgagtgcaaggggctgcaggca

SEQ ID NO: 10781 - DNA, 158 bp, Homo sapiens
  chr16:71660029-71660187
  hyper
cacaggtgagtgcccgccccgcccccgggcttggccacctgcccaagaaacttgttggttgttgccctcaggtcgctcccgggcggggacacggaacccggccatggaagatccgtcgggggctcgcgagccccgggcccggccgagagagcgggacc

SEQ ID NO: 10782 - DNA, 294 bp, Homo sapiens
  chr16:71660455-71660749
  hyper
aaaaccgcgccaaagccggacgcgggacggagcccggggactgacctgggacgcagccgcgcctcctgggcccgcgccctgggaagccccggagccgccgcagccgcagaggaagggagaccccgggcgccgcagacccgaaaggtgagaggggccggggcgctgcgacctccgcgccggggacacctgtggcccaggccggcccgcgaggccctggcgtccccgggttctcgtcctaggagcccgtttaaatgaacaaatgccgtttctcccttctgcgctctcagaggcgac

SEQ ID NO: 10783 - DNA, 31 bp, Homo sapiens
  chr16:71668363-71668394
  hyper
tgccatgggtgtcctgcgggtcccgtggcat

SEQ ID NO: 10784 - DNA, 30 bp, Homo sapiens
  chr16:71880017-71880047
  hyper
ctggaagtggtggccgccggggccaggcag

SEQ ID NO: 10785 - DNA, 30 bp, Homo sapiens
  chr16:71918391-71918421
  hyper
tcttaccccaccatcgagttcagccacaaa

SEQ ID NO: 10786 - DNA, 59 bp, Homo sapiens
  chr16:72699009-72699068
  hyper
acggcttccgggtgggcggcttgaggtggcttccggccgccaggcgagactccgcggga

SEQ ID NO: 10787 - DNA, 119 bp, Homo sapiens
  chr16:73091751-73091870
  hyper
gcccggccagcggtggcggccgcggcagcagcagtggctgcgaccgcggcgactgctccgggccgggtgcgcgccccgcgcggctgctcagcccggggccccggcgcctctcggggtgg

SEQ ID NO: 10788 - DNA, 27 bp, Homo sapiens
  chr16:73100271-73100298
  hyper
cggagccagcgtgcgcgtccctaatgc

SEQ ID NO: 10789 - DNA, 14 bp, Homo sapiens
  chr16:73100575-73100589
  hyper
cgccccagcagtgg

SEQ ID NO: 10790 - DNA, 30 bp, Homo sapiens
  chr16:73104801-73104831
  hyper
cctagaccgtcttgcgcgcgcgcgcgcgcg

SEQ ID NO: 10791 - DNA, 30 bp, Homo sapiens
  chr16:74330522-74330552
  hyper
ggaggtcaagtcgccggtgtcccttcggcc

SEQ ID NO: 10792 - DNA, 98 bp, Homo sapiens
  chr16:74352095-74352193
  hyper
atacacttctggtctgcggcagttggagaatgggcaggagctggggtctgggaggggaggtgggtgtccaactcctctgtatgcggttgcttaactac

SEQ ID NO: 10793 - DNA, 214 bp, Homo sapiens
  chr16:74659411-74659625
  hyper
gaaaaaaaaaaaaaggacagaccaggcgcaatggctcacgcctataatccaaccttttttcttctgccattgacttgttgtggaagccagatcagctgtcttatagaacgcccacaacccggacttgtgtatatgctttctgtgctatcattaaacttgttctcctctattccctgcaactccagtcaatgaaagttagcgctagcttctagag

SEQ ID NO: 10794 - DNA, 30 bp, Homo sapiens
  chr16:74700930-74700960
  hyper
acgaggcgggaccgcgcttgaggaagcctc

SEQ ID NO: 10795 - DNA, 41 bp, Homo sapiens
  chr16:75018962-75019003
  hyper
gccgtccccagtatcccgggaccgtgcgccccacacagcca

SEQ ID NO: 10796 - DNA, 30 bp, Homo sapiens
  chr16:75032743-75032773
  hyper
gtttctgtggctaacgcccagtggtcaggc

SEQ ID NO: 10797 - DNA, 30 bp, Homo sapiens
  chr16:75033369-75033399
  hyper
ttgggatccccgcccgcccgcctgcctctt

SEQ ID NO: 10798 - DNA, 31 bp, Homo sapiens
  chr16:75033798-75033829
  hyper
ggggcaccggcgactccgagagggcgcccgg

SEQ ID NO: 10799 - DNA, 42 bp, Homo sapiens
  chr16:75285012-75285054
  hyper
cgaggaaactgaggctcggaggcagggcgcagaggcccaagg

SEQ ID NO: 10800 - DNA, 160 bp, Homo sapiens
  chr16:75285500-75285660
  hyper
ctcggccacccagagccggtccagccgctctccgcctgccgccacggcccagccggcccagcccgatcccagcatgcccggccgcgcgcgcccattggccgccgccgctctccatgcaaataagccgcctgtcgggggcgcgggcgcgcagacagaagcc

SEQ ID NO: 10801 - DNA, 82 bp, Homo sapiens
  chr16:75299750-75299832
  hyper
ggggcctggcgggcagcggcgccagcgggctgggggctcgggtccgcccgcgccgctcagaggccccgcgaggggtcccggc

SEQ ID NO: 10802 - DNA, 30 bp, Homo sapiens
  chr16:75497814-75497844
  hyper
agattcctagaaagcggagcgggtctcgga

SEQ ID NO: 10803 - DNA, 70 bp, Homo sapiens
  chr16:75528798-75528868
  hyper
gtggggacatcccccgcggagaatgaagaaccaacgtaccccaaagcttggcggctctgcccgagctgca

SEQ ID NO: 10804 - DNA, 112 bp, Homo sapiens
  chr16:75528922-75529034
  hyper
cgtctcttccaaattccaccgcacagccagctctttctcttcactgggagggtccgcaggggctgacttgctccttaaggtcccaagactattaagcgacacccggtgaggc

SEQ ID NO: 10805 - DNA, 26 bp, Homo sapiens
  chr16:75529877-75529903
  hyper
aaataagatatttccggccagggctg

SEQ ID NO: 10806 - DNA, 30 bp, Homo sapiens
  chr16:75600054-75600084
  hyper
cccgaacattcctgcgagcaatgtcgcaga

SEQ ID NO: 10807 - DNA, 30 bp, Homo sapiens
  chr16:75681562-75681592
  hyper
taaggaggatagtacgttaatttccaggtc

SEQ ID NO: 10808 - DNA, 31 bp, Homo sapiens
  chr16:76507679-76507710
  hyper
aaaataaaggagattgcggaaaccctattat

SEQ ID NO: 10809 - DNA, 801 bp, Homo sapiens
  chr16:77246211-77247012
  hyper
agcggcggctgcactcgccgcctgaggtcgagggcgccatggcggtgaatgacgggtgagaggggaagggaggagtgggcgaggagggcaggggcagggcggaggggaacccgcccaggtcccccgctccgcccccgactgccgcttccccggcctgtgcctccctcggcgtcgtcgggtctccgcgtctcggtggcttcctcctcgtcccctggactctcgctctcttcctcctgtctcctcggccccttctccgcaggctgaaggcggagctggagatattcggggagcaggtccggagcgcccccgaggtcggggccggcgagggagaggtagggagcccgaggaagggaggcggggcgggcagggaccgagtcaggagagagcgggcgggggtcctgggagcggcccccgagagtggggtctgtggggagcagggcggccccggggacagaggaagccgcggtggaggcctagggcagacgcgggcggacgcgaggagcgtaggaacctggtccgcagcctcacccagcccccggcaggccggacctgagctcccccgcgctcgcgacgaggaggatcccgagccgccggtggctgcccctgacgccctctaggccagcaggacccgcccgttcccgaccttccctcgagacccgccaagaaataaaggcgatgatttccgaccatgctcgcgttctccgcggagtctgtgctacaccgtggagcggggcggggcgtgctgggatctcgaggcggggcctctgccggacccctcccaccagtcgagccccgggcgcc

SEQ ID NO: 10810 - DNA, 413 bp, Homo sapiens
  chr16:77247376-77247789
  hyper
ctcagatctgttaaatgtgtccgccactctggaggccggcatttgggacccaaatccaaaggcacccagcagcaggctgcggccattgactgagcatgtactgactaagcaggcatttgccgattgcctgctgggtaccaggcactgttctaagcactggattttaaacagcgcggtcagcgacggcctcacctaggaagtggtatctgagcggagaagcgaggtagagaagcgagggggtgagccctgtgggtgtctggggaaaggtgggcctggcagaagacatgcctcatgccaaggcgggaggtgaggctgcacttcgctgtgtttgaggagacgtctggagaaggccggcgtggtagagtggaatgaggtagagtgggatgggagacgacactggagagttgccaagg

SEQ ID NO: 10811 - DNA, 202 bp, Homo sapiens
  chr16:77468255-77468457
  hyper
gaaggaagggtcaaagtgctgcgaaaggcccttcttggggatggggggcaaatacgaaccatcatttaatccgctggcgccgctgctgctgtcactggctaaggccgcggcgaccgacgcacagcagaggcagcacagctggagcgcctgcaagagaaaaggtgacatcgcgcgtgaggggcgcggcggggctggcgtcggg

SEQ ID NO: 10812 - DNA, 21 bp, Homo sapiens
  chr16:77469028-77469049
  hyper
gggctcgtccgagcccccggg

SEQ ID NO: 10813 - DNA, 738 bp, Homo sapiens
  chr16:77756217-77756955
  hyper
ctaagtcccgccccgcgcctctccccacctcaagtcccgcctctggctataagccccgccccgccccgatcccggcctccgatcccagatctcgcaccgccccgccccctgtctccgccccagacaccaccccgcctcgtgctctaagccccgcccctctctctggctttaggccgctcccaagcccagagctgctctgcgcaagcgcgaccgaccgagcagctccgaggagtccgcccggaaacaaacattccccagggcaatgtcacgacttggtcttcccgaggagccagtcaggtaaaggctttccgggccctggcaccccgagcttggtcaggcccggccttgatcgtagcggaggccaccggggccttttggccgggactgattttgcagctcccgccagtccacctgcgagcgccggatgggggagcactcgcctccagcaacccgcagggtccccgaacctttgcactgctctggccaggaacagagccggcttaagccagtatggtttacatacacgctgctccccttcccagccggcttggctgttctgcaatccgcgtctccagagttggaccccaggacccccgacagtggcacagacccgcagcaggcagccccggattcaagtcccccggtggctactttcagttgtgaccttgggtctgtcagtttcgtaaactctctgagcctggaggtgaccctgtgatcacttgccgggctgttgtgagg

SEQ ID NO: 10814 - DNA, 1093 bp, Homo sapiens
  chr16:77822153-77823246
  hyper
cccagacattagtctcggtccatttcaaggcacccgagcctgtgccgtatataaccaagtactgggcccacaggaagggggatgacagggtggtctctctaggctcgttttagtcacagatcttcggcaaatttgggtttagggccgcgatcccgaccctaacttgggactatttcaggaactggagttgaggcttcgttgggacaggaaagaagggtggggcgggggtgaagcgcttagggcacggctcttgtgaggattacggcggaggctgtggaccgcggcggcgctcgcagaggctgcagccattgcacagccgagcatcccacattcaacaggaggaacccgcgggagaggagccccactcccccagcgccgcagccaccgcagccaccgcagcccgtgcgccccgcgccctcgagcgccatggccaaggaaggcgtggagaaggcggaggagacggagcaaatgatcgagaaggaggcaggcaaggagccggcggagggcggcggcggcgacggctcgcaccgcctcggggacgcccaggagatgcgcgcggtggtgctggctggcttcggggggctcaacaagctgcggctcttcaggaaggccatgcccgagcctcaggacggcgagctcaagatccgcgtcaaagcctggtccagtatccgcgcctttctcgctttctctctttttgcgcgctgggcgctggggagggggtgggaaagctgcggctgggatgctgcccgggtagaaccgccgcgcgcaccccctccgcgccctcacccgggtctcagagcctccccgggccaaagctggggaggatgcagaggggcggcctccccaagccagatctaggggtgacgggaggagaatgtgagctcctgggcgcggggagaatgctggcgcccaggcaccccgggtctggaagattgcgctacgggagttctccgtctgagaggacaactcagctttcgcacgggagggttgatgcttaacagaattaaaaatatatgtattaagaaccgcaagcccactgtgtgccagccgccgttggtagttttacacgtgcgatcttatttaatacttcctg

SEQ ID NO: 10815 - DNA, 359 bp, Homo sapiens
  chr16:78079827-78080186
  hyper
gcaggccagggaaggacaggccgggcaatgggcgcggagacgaaggggccggacagcggcgaggcgctggctccggtcgcggcacccggctgctgagggcagtgctgctgcttgggacgttccaggcgaccaagtaccctcggcggccctggcagggcggtgcctggggtgggcgctgggcctccaggcctgcagccacgcttggcgctgtccgctagggccaggtgctgaagtgttggccgcgagcggagctgctgcagcgctggcttccccgggccgctgcgggtggacttggacaacataaagggctgattgagcggggccactttttcgcccgcgtaaagtgtcctccagcagca

SEQ ID NO: 10816 - DNA, 30 bp, Homo sapiens
  chr16:79048507-79048537
  hyper
agctactcagtgcctaagactttgaatagt

SEQ ID NO: 10817 - DNA, 197 bp, Homo sapiens
  chr16:79632619-79632816
  hyper
cgagccggacccccgcggagcacttatcagggtggctagctggaatcgcgtgtcagactcacatgaaaaactcgggagaggacgggttgtcgctgctcgagccgttttctcggaagccgctgctcaccaacttctcgtatttctccttgtacgcgtccctctcgcgcaccagcctggagatctcctgcttgaggtgg

SEQ ID NO: 10818 - DNA, 320 bp, Homo sapiens
  chr16:79633073-79633393
  hyper
cgcccccgccgcgcccccgccgcctccgccgccgccgccgccgccgccgcccccagcgctggccgggccaccgccgcccgcgcccccagcgccaccggccgaggcggccgcgctgcccgcggcgccgggcgcgccggccgtcgggtggtggtggtggccggcggcgtggtggtggtggtggtggtagtgcgggcccgcgccgctctgcgcggcggccgcggcgatcacggcggacaccacggcggcggcggggcccatctcctcgccgctgccgcccaaggaggcgccggcaccggccccggccgccgcggccagctgct

SEQ ID NO: 10819 - DNA, 235 bp, Homo sapiens
  chr16:79633613-79633848
  hyper
cgtgctcatgggggtggaggacagcgagcccccggcgatgagacggccgcactggctgatgatgcggtcggtctccaccggttcctttttcacttcaaacttcatcagatcgaagtcattaacatattccatggccaggggactggtgggcaggtcggagttgctcattgccagttctgatgccattctcctgccgccgccgccgccgccgccgccgctccgccagatgggctgc

SEQ ID NO: 10820 - DNA, 240 bp, Homo sapiens
  chr16:79634184-79634424
  hyper
ccccgctcgccgctccgctgcgcgctttgcataaggaagggctcgcctcgccggcccgggctgcaggcagggcgcgcgcggcgtccgctcggggctggaggcgcggcgggcgtctgtccgggcggcgcgggccttggcacgggggagttaacacttcatgcttctcgcctcctcttctgcttggctctctttattattttttttctttcctctctctccctcgcgcgctctctacctctg

SEQ ID NO: 10821 - DNA, 347 bp, Homo sapiens
  chr16:79635269-79635616
  hyper
gccgcccggccatgcgcctgcccagaaggctgggcatccgtggagagggaaagcccattttatccctctctttacaacgaggtaaaataagttgtttagaggccattcttcacggagaccggctgcccgctggcgtcgcgtgcccttggacagagcgagcgcctatgcgagataactccggggaagctcaaagtcaggtcagccgggctcagccttccggctcctgactggccggagtttggcctttgagactcatattgcgcgctcgctctctctctctcttacacacacacacacaaacacacacacactcacactcacccgtccccttacgaaatctgacctct

SEQ ID NO: 10822 - DNA, 104 bp, Homo sapiens
  chr16:79636190-79636294
  hyper
gaaactattgttggagcgagttggtttttacctcaacagcgccacctttcggcaaaggtcagttgaaattgatccgtgtccagttttgtcgatgaagtgaaaag

SEQ ID NO: 10823 - DNA, 498 bp, Homo sapiens
  chr16:80574602-80575100
  hyper
ggtgaatcagcagtttttgaacgaataagtggttatcacattaattcgtgcctcaatgaatgaatgaatggacaaacacaggccgggagcctgacccacttccctcttccctcccgggacccactgctccaggattgggcgaacctcaggtgagcgcctgctcccctcttccgcgaaccttcgcctacggcggccgggaggcatcaggagcgcggtcagggcgaaaaagccgactcgcgagcgcgcaggcgcagccctgacgcttccgtggggccacttccttttttgtctcctagcaacggcgggtagcgttgttgacatcccgggaggctgtgccgccggcctgagcccagagtttcgcggcctccgcgatggtaaatctggggtctccgtccacgccccgccgttccaagcacgccgaccgtcaaggaccttcgcacccagcttctggggcccacccaggcacgggcggtccaggggccgcggcggaggctggtg

SEQ ID NO: 10824 - DNA, 65 bp, Homo sapiens
  chr16:80837506-80837571
  hyper
cagccccccgggaccccgcctcgccccggccaggctccgctccgatcgcccgcccccctcctccc

SEQ ID NO: 10825 - DNA, 40 bp, Homo sapiens
  chr16:80838371-80838411
  hyper
gagcgccgcggcccccgcgacccggcgacccggcggcggt

SEQ ID NO: 10826 - DNA, 31 bp, Homo sapiens
  chr16:80838938-80838969
  hyper
ggggatccaggacaggcgtggccaccccata

SEQ ID NO: 10827 - DNA, 53 bp, Homo sapiens
  chr16:80966264-80966317
  hyper
tcttggaagaggaccggcgcgtctattaaacccgagtcgctccacgggctctc

SEQ ID NO: 10828 - DNA, 30 bp, Homo sapiens
  chr16:81040585-81040615
  hyper
ctggggcacggcagcgtctaagccacaagc

SEQ ID NO: 10829 - DNA, 30 bp, Homo sapiens
  chr16:81437109-81437139
  hyper
tttaggggtgccgacggggtagacccctat

SEQ ID NO: 10830 - DNA, 301 bp, Homo sapiens
  chr16:81779827-81780128
  hyper
ctccccggtgcttcccggtttataacttcatctactcgtgacacgtgggggtccgccgccgccactggcagggtgccttgagtgcttgagttttcgcccccagcacaggtggagaacccaactcccagaaaacatctggggcggaaacggaagcatggccgcagcggtgaacgcactgcattctgggaaatgtagtcgaaacggccgctggggcagagtgagcacccacagtggtgccttctggggagggtcgttttcacgtagtccaagagccaggggtgggaaccgcggggctctcacc

SEQ ID NO: 10831 - DNA, 30 bp, Homo sapiens
  chr16:81812723-81812753
  hyper
ctccaggcctgggccgctccatggcgggga

SEQ ID NO: 10832 - DNA, 921 bp, Homo sapiens
  chr16:82660490-82661411
  hyper
gttaggaaggaatccgtcttgtaaagccattggtcctggtcatcagcctctacccaatgctttcgtgatgctgctgctgatctatttgggaagttggctggctggcgaggcagagcctctcctcaaagcctggctcccacggaaaatatgctcagtgcagccgcgtgcatgaatgaaaacgccgccgggcgcttctagtcggacaaaatgcagccgagaactccgctcgttctgtgcgttctcctgtcccaggtagggaagaggggctgccgggcgcgctctgcgccccgtttctgcattcggatcgcccggcacgggcagggtgagggggctttcggggggtcggggcctccggtcgcggcggcgaagacagatcggggctcggtagggaggtcattccgagcccagagatcctaggcaccccccacacacaggctcccactctggcgtgcgtgtgtgtgtgtgtgtgtgtgtgtgtgtgtgtgtgtgtgtgtgtacgttcgttaacgggaggaggagagagctcccagtccttttttgctagcaggggcgacattctcgcccacatcaagtggggtaactttggttccctcctccggaggctcggtgcattggagaaagactcagttagaggcgactccaacgagccgcggttttccccagcccaacgcccagcggccgaagcgctgctcgggtccggattgcgggatgcggggctggagaggccgagcaggcaccaccgacttcccagggcgcccgggccccctggtacagcccggctgcccgctggaaggcgcctcggggcagcagagagcctcagcccggctgctgctgtcgctcaaaggcgccggcgccggccgcacccgcatcggggtccttttgctcccagaccccgggcccgaaagggccggagcgtgtccc

SEQ ID NO: 10833 - DNA, 365 bp, Homo sapiens
  chr16:82661468-82661833
  hyper
cggccagatcccgggctgccgcctctgctgccttccctgagcgggagcggagcgcagagaaaagttcaagccttgcccacccgggctgcagctgcttgttaaccctcagagcgccacggcgcgagggaagggcacgccaaccaggagagggggcgagggagatgcggtccgcctgcagtcacctctgcacctcagagatttcgggaagtttgagtgcaggaaagcagcgctccgaggccaggcctggggtgctggccgctgcggggggcacgccctgcgctgctcaggggcctgtggtttcggagagcaccccgatccagtcccccatcgcctctctggcaggcgttgggacttggagtgagctg

SEQ ID NO: 10834 - DNA, 30 bp, Homo sapiens
  chr16:84328193-84328223
  hyper
ccttgggaggagaccgccccagcctgcaag

SEQ ID NO: 10835 - DNA, 432 bp, Homo sapiens
  chr16:84401741-84402173
  hyper
cacctcgctcccggcgccttagagccgcccaccctgggttcctcaagaggatcacctggggctcgttaaaaacccagctcccggcggctccaaaccgtgactgggcagggaggggtctgggaatccggattttaaaccagcatttgctcctccacctcccccactccaggtgattcttaggatctgtaagtttgggaaacagcccaagccctgaggcgacgcagcctctccctgggcctttcatggccagccggcgctgtccccagagcccctggggtcccaggcgagctcgcggggcggggccgggtgagccggcacctccctgtgcgcagccccgccccaggggcggggcctcacctgccgcgggcaggtagacagctacctggtaaccgggtccggcccaggaggcttgggcgcgcgcagccatcccgg

SEQ ID NO: 10836 - DNA, 744 bp, Homo sapiens
  chr16:84651071-84651815
  hyper
gaccgcgcatccgcccggcaggcgcgcctccctacctgtgcactgctggatgaagtgctggtactccgctccctgctcgccggggacgatggtggagccgtcatatttaaaagtcaccctttgggttgggagaagaaaaaaacacacacacacatcagcgctggtggccgcgcgacgcggcgcttgcagaggacaatctaacagacgcgctggccacggagaagcccgcgggggcctggcacgccgtcccggaataaggcgaggaagacagcgcgggaggcccgaatccgtcccgcctggaggccggctcggtgcacgaggccccgcgcgagcccggggagcggggcgtggagacgaatgaaaagttcctaccagatgacggccgagccgtcgtcgcgcaccaggttgtacgccgcccggcaagcctctttgtcgatcttggtggccatcgccgcggagccgcagcgggacactgtccggggcggccgagcgcgcccctggccggcggcggggatgggagcgcggcgggtacgcgccgagggcgcacgggctggcggcggtggcgacggctacgcggcgcctgcaagctgcgagcgcggcggcggcttccactgcggacggagagcgcgcggggaccccaggccgtggcccgccccgcccccccgcgcccattggccgcccaggcggcggcccgcctcttcattggccgtcgggctgcgggggcggagcgtcttgattctctgg

SEQ ID NO: 10837 - DNA, 31 bp, Homo sapiens
  chr16:84652627-84652658
  hyper
ggctcctctgaaagcacgagctgactcattc

SEQ ID NO: 10838 - DNA, 30 bp, Homo sapiens
  chr16:84682716-84682746
  hyper
ccggacggggcctgcggtcccatgtttact

SEQ ID NO: 10839 - DNA, 363 bp, Homo sapiens
  chr16:84853365-84853728
  hyper
tccttgtccctagccggccctggaggccagcggccccgccttcctcgcccacccggcgcccgcgcctcagctgccccccgcctccttcagcccgctgagcctgcggggcggggccgggggcggggccggtgatgctcggtcctaccagcgccgccagcgatctgggggcgtggcctccgggctccggggagcctacaagaggcggtacgctgagccccggcacccactcgcatcccagggcgtctccggctgctcctattgagctgtctgctcgctgtgcccgctgtgcctgctgtgcccgcgctgtcgccgctgctaccgcgtctgctggacgcgggagacgccagcgagctggtgattgga

SEQ ID NO: 10840 - DNA, 110 bp, Homo sapiens
  chr16:85482268-85482378
  hyper
gttaatgcaaactggcaggggcgatggaggggggctccgggggcaccactggcagcccgccccacgccgcccacatccccggccctgcaacccggggcaggaaaccacca

SEQ ID NO: 10841 - DNA, 752 bp, Homo sapiens
  chr16:85589832-85590584
  hyper
agcgccgtggcttgaacggtgctttttgttcattcctgggttttaatattattttccttcttcatccctctctggccactatggaattctaatttgaaccatgtttggattgaagccgcctctgtattacttaccaggtaagcgagccgtgcgcctccctgggtcccgcgcggcgccggcgcgcccgggaccctccctcacccgacccccctccgccagacccccgagccagggtcggggcattgggtccgccggtgccccccgcagacgcgcgcggcctcggatcctcccgctgcggtcaagcccgcggtgtgcgcggctacgtgcggcggggagcgcccacctggcccgccgcccccatcgcgccgccgccgggggttgcgcgtctcgctccttttgtctgccgggagccggctccgccgcggcggcggagcgagcggccgaggcacttaaaccttccaaggtgaagtaagcgccgagtgtgaagttactttcctgcaggccgccccgatcgggtagcatgccccccccccccccagtcctggggtttatttccctctccctccagccaacccccttgcgcggtctcggcgcgagcgtggctcgccggcccccccgccgccccccttcctgcctgggattccctggaaggttttgttccgccgaggtcggaggagggggccggggaagctcaggagggtatttggcgtggcttcctgtttccttaaccttcctgcgcggtgacagccgct

SEQ ID NO: 10842 - DNA, 30 bp, Homo sapiens
  chr16:85722649-85722679
  hyper
agacagcctataggcgctgtctgcgggcgg

SEQ ID NO: 10843 - DNA, 861 bp, Homo sapiens
  chr16:85932119-85932980
  hyper
agcgcctagcaccttcgatgctcctgtttcagtcgcggtctcagcgggcagtggcctcctttgaagctgggattctcctgcccctcccgggcagcgcaggccaccggtgacccgggacggtctgtaaacgaccttcgcgtccccgtccccgtggaataacgcgcggcgggcatcactgcccaatatccagcgctcgtgaaggcggagaccggcggggcagctagtttctggctgtggattctgattaatgggccgcaggcgcacggtctgcaccgtccggctcgttgctagtggctcgctcgggagccgccgcactcccggggctgtccgcccgagccggcctggaaggcggaggacgcctccaggtcgctccgcggggcctccggaattcctgggaaagcccccctgcagcgccgcccctggaccccaggtgtgaggagcggggctcggccagcggctccagaagaggcccggaccccactgccgtggctgccgggggcgggaaagtgatttctcggaaagcagagcacttcgaagaaggcgggccgcgcgagccaagctgacgctattggtcggtgtggccgtcgctctgcgcaccgcccgtcccccccacgaccctttttaaggccgcgcgaccgctggcgcatcgcctggagcgcggcagcaagcgtgggaacgcgggcggcgagacggcggcaggacggcggcaggtaggcacagtgggcgggtagggcgcccgtgtcccgcgcggtccggtcccgcggggtccccgacgccaggcggggcgtgggggtggaactacctaccgtaatgtccccgggcgcagctcagtggccacccgtgtccctctctgctttttgc

SEQ ID NO: 10844 - DNA, 520 bp, Homo sapiens
  chr16:86320597-86321117
  hyper
tgctgttcccgcccgcgaagctgttgcagggacggtgcgcccttgggctgcactcaccaccgcccctcgcccgcgacgtcctggccccctaaccccagctttcccgccgccgctcactcccgcgctccgctgcagctcagcccggtctgcaactctccctctgttttctgccccgctcctcagttctgcgctctcctcttctccaggcttccctctcctcctccttctgcctctcccctgtccccgttccattctcctgcgcccctcgccagcgcgctcgcagcccatcggctcctgccggggcccctctggtgccagccgccttcaggctgtgggtccgtccgctggtggaggggaaggtcggggctggccccgggccccgcgctgctgggccccatggtcagtggagacgcctcctggtctcccttcagagctcctcgtcgtcgtcggagtcatcggaggaccaggaaggaggaccccccaccagctgccgcagcctctgctgcgaatccccccacac

SEQ ID NO: 10845 - DNA, 208 bp, Homo sapiens
  chr16:86334430-86334638
  hyper
gcaaataggattttgtttccccgacgtccaggctgagtgcagccagatgggatgacttgacaaagtcacaaacgctgacaaatcccggcgggggagttgtggcttcctccaaaggaaggtaggtctgtgtttgtcaattgatcagctcagcggtggccctgagtgaggccgtgaggaaagtaactccgtagttttaattctgatgatt

SEQ ID NO: 10846 - DNA, 30 bp, Homo sapiens
  chr16:86542407-86542437
  hyper
ctggcagccaggtgcgcgagggccgccctt

SEQ ID NO: 10847 - DNA, 30 bp, Homo sapiens
  chr16:86567476-86567506
  hyper
tctcagtcttctctcatctaatacctggct

SEQ ID NO: 10848 - DNA, 203 bp, Homo sapiens
  chr16:86600311-86600514
  hyper
attcctgcgctcctcgccccgattggcgccgactcctctcagctgccgggtgattggctcaaagttccgggagggggcgtggcccgaggaaagtaaaaactcgctttcagcaagaagacttttgaaacttttcccaatccctaaaagggacttggcctctttttctgggctcagcggggcagccgctcggaccccggcgcgct

SEQ ID NO: 10849 - DNA, 887 bp, Homo sapiens
  chr16:86600888-86601775
  hyper
cccccggccgcagtccgtgcgcgagggcgccggcgagccgtctcggaagcagcatgcaggcgcgctactccgtgtccgaccccaacgccctgggagtggtgccctacctgagcgagcagaattactaccgggctgcgggcagctacggcggcatggccagccccatgggcgtctattccggccacccggagcagtacagcgcggggatgggccgctcctacgcgccctaccaccaccaccagcccgcggcgcctaaggacctggtgaagccgccctacagctacatcgcgctcatcaccatggccatccagaacgcgcccgagaagaagatcaccttgaacggcatctaccagttcatcatggaccgcttccccttctaccgggagaacaagcagggctggcagaacagcatccgccacaacctctcgctcaacgagtgcttcgtcaaggtgccccgcgacgacaagaagcccggcaagggcagttactggaccctggacccggactcctacaacatgttcgagaacggcagcttcctgcggcgccggcggcgcttcaaaaagaaggacgtgtccaaggagaaggaggagcgggcccacctcaaggagccgcccccggcggcgtccaagggcgccccggccaccccccacctagcggacgcccccaaggaggccgagaagaaggtggtgatcaagagcgaggcggcgtccccggcgctgccggtcatcaccaaggtggagacgctgagccccgagagcgcgctgcagggcagcccgcgcagcgcggcctccacgcccgccggctcccccgacggctcgctgccggagcaccacgccgcggcgcccaacgggctgcctggcttcagcgtggagaacatcatgaccctg

SEQ ID NO: 10850 - DNA, 30 bp, Homo sapiens
  chr16:86602068-86602098
  hyper
cggccaggagggcgcgctcgccgccacggg

SEQ ID NO: 10851 - DNA, 30 bp, Homo sapiens
  chr16:86775107-86775137
  hyper
cctgtgatcaggagcgaagtgtagagacca

SEQ ID NO: 10852 - DNA, 30 bp, Homo sapiens
  chr16:87418082-87418112
  hyper
cgccgcccaaagggcgcctgttcctgcagc

SEQ ID NO: 10853 - DNA, 35 bp, Homo sapiens
  chr16:87525617-87525652
  hyper
gtgaggctgcccaggtcggccgggttgttggcctt

SEQ ID NO: 10854 - DNA, 1093 bp, Homo sapiens
  chr16:87525991-87527084
  hyper
cgggcgggcgccggggcgggggcggggaccggggccgggcaaggctcccgtcaggggccggcgggcgggcgcgcgcggggcgccgggggggcccggggcggccggggcggccgggggcggcgagcggcctcgggccccccgctcacggggaggcgccttccccgcgcccgtgcccagcggcggccggtgcgcggcggcggcggcggctgctcctcgtcgtcgtcgtcgtcgtcgcccgggaggcggccgcccccatctccccccgcgccgcagggtctgtcactgcgggccgccccccgacggagccgccccggccatgccgtcgccgccgcccgcgcctccgcccaggccggccgttaccccgggccgcgggcgcggcgtcgccgcctggggagcgctgggggccgcggccgcgaaacggacgctggagggggagggacgcgcggcgggaggcgcggagggatccggccgggacttgccggccttgctgctcccgcgcggcggacggatccgggcccgagcgcggcggcggcggcgacggcgacggcgacggcgacggcgacggcggaggaggcgccggccgaggagcggagggatcgtcgcgctcgcggctgacgggcggccgggatcagcagaagtgggcggggtggccgcctctcgcgacagcccgggcctgccgggcccgtcccccccccactgattggctcaggcggcccgttctcggcccgtgattgtgccgggtccccaatcccattcgcccgttccgcggccacgcctccctgggggctgtcgatcatgttggggccaccgcctcccgtccctcggcggccgtcaagacgcgattggtccgcggaatcggagaggcggaaaacccgggctggatttctggttgcttttgttcccgcaaatttgcgtggagcattgtttttcggcgaaaacggggcgttcggccttcctgctttatttttgagcggtgtaagagggaggtagtgggtatcttcgagaaacggccgccgcggggtccggagccccgggttccaatcccgggtcggccactgcaaagctgtgtgaccttgggcgagtcacttggcct

SEQ ID NO: 10855 - DNA, 30 bp, Homo sapiens
  chr16:87635195-87635225
  hyper
agggctggggacgccggcttctgcctgagg

SEQ ID NO: 10856 - DNA, 44 bp, Homo sapiens
  chr16:87635769-87635813
  hyper
gagggggccgagggcgccctgagtgctgcgcgccttcccatgac

SEQ ID NO: 10857 - DNA, 701 bp, Homo sapiens
  chr16:87636626-87637327
  hyper
ggggccgcgtcctcctctcctccggaaaacgctcgcgacccagggccgccggcggccgcgactctgctgtgtcgatcgcctgagtccgttttcaccgtttgcgggatctggaaccgagttacatgcatgtccagtgggggcaggtttaattttgacgacggagggtcctactgtggaggctgggaggacggcaaggcgcacggccatggcgtctgcaccggccccaagggccaaggcgaatacaccggctcgtggagccacggcttcgaggtgctgggcgtctacacctggcccagcggcaacacgtaccagggcacctgggcgcagggcaagcgccacggcatcggcctggagagcaaggggaagtgggtgtacaagggcgagtggacgcacggattcaaggggcgctacggggtgcgggagtgcgcgggcaacggggccaaatacgaagggacctggagcaacgggctgcaggacggctacgggaccgagacctactcggacggaggtaggtgccgcgggccgggccgggccggggcgggagggacgtgcttccgatcgcgccccttctgtggatctctggggaagttgagctgcgtcctccggttgggccgtgggcaccaggggcctttcccgggcttccctggaagccacggcggctcctggctacaggttgccccgctgcctggtggggacagtgc

SEQ ID NO: 10858 - DNA, 982 bp, Homo sapiens
  chr16:87723181-87724163
  hyper
cggggaccgcggcctcgctgtggaatgtgctgggtaacgccgtctggcgtcgtcttgtgtccccatacagggctggagtaccagaggccgaagcgtcagacctcctgtgacgacatcgaggtgctgtccaccgggacacccctgcagcaggagagccccgagctgtaccgcaagggcaccactccctccgacctgacccccgacgacagccccctgcagagcttccccaccagccccgcggccaccccgccgcccgcgcccgccgccaggaacaaggtcgcccacttctcgaggcaggtgtcggtggacgaggagcggggcggggacatccagatgctcctggagggccgggccggggactgcgcccgcagcagctggggcgaggagcaggccgggggctccaggggtgtccgcagcggtgccctgcgcggcggcctgctcgtggatgacttccgcacccgaggttcgggccgcaagcagcccgggaaccccaagccgcgggagcggcggacggagtcaccccccgtgttcacgtggacttcccaccaccgggccagcaaccacagccccggaggctccaggctgctggagctgcaggaggagaagctgagcaactaccggatggagatgaaacccttgctgaggatggagacgcatccccagaaaagacgctacagcaagggcggcgcctgccggggcttgggggacgaccaccgccccgaggaccggggcttcggggtgcagagactgcggtccaaggcccagaacaaggagaacttcaggccggcctcctccgcggagcccgccgtgcagaaactggcgagcctgcggctgggcggggccgagccccggttgctgcgttgggacttgaccttctccccgccccagaaatccttgcctgtcgctctagagtccgacgaggagaatggggatgagctcaagtccagtacggtgagtgggcggccaccaggctggtcccagt

SEQ ID NO: 10859 - DNA, 30 bp, Homo sapiens
  chr16:88519207-88519237
  hyper
ggaggcggagctggcgccgagaggcggggc

SEQ ID NO: 10860 - DNA, 30 bp, Homo sapiens
  chr16:88636429-88636459
  hyper
tcaaaaaataattccggaggtaagcattta

SEQ ID NO: 10861 - DNA, 30 bp, Homo sapiens
  chr16:88729953-88729983
  hyper
cggagaccttgaggcgctgtgcggggtccg

SEQ ID NO: 10862 - DNA, 30 bp, Homo sapiens
  chr16:88839824-88839854
  hyper
cggcaggaagccaggcgaccgatgggcgca

SEQ ID NO: 10863 - DNA, 33 bp, Homo sapiens
  chr16:88840132-88840165
  hyper
gggtgacaggcaggtcggcggagtggacagcag

SEQ ID NO: 10864 - DNA, 30 bp, Homo sapiens
  chr16:88840445-88840475
  hyper
tggaagttctgtgcccggcgataaggtctg

SEQ ID NO: 10865 - DNA, 30 bp, Homo sapiens
  chr16:88850740-88850770
  hyper
ggaccgcctcagtccggcagaggggggtgc

SEQ ID NO: 10866 - DNA, 115 bp, Homo sapiens
  chr16:88851817-88851932
  hyper
cggacccctcccctcccgcagtcttggccccgcggctccgagcgtgcgcggcggtgggcaggggcgcttctcgctgggtgggctgcggctggggcccgggcgctacataaggggt

SEQ ID NO: 10867 - DNA, 302 bp, Homo sapiens
  chr16:88878669-88878971
  hyper
tttctcctttattggccgagatccccacgctgcgcgcgggaggctggcgcgcggggtggagaagggcgtgaggaagcggtccaagtagcaggagggcggtgcagggcccggagggagcagcccagggcggaggcggcgggcctgggctggaccggccgggggcgctggcctctcgcggatgggccctgccgttgaggcggctcttccccgcccggacccgggggagggaggccggaaggtgtggccaggccagggcgcgcatccgcgagggcagaagcccttctgtccgcctgcagaggcca

SEQ ID NO: 10868 - DNA, 31 bp, Homo sapiens
  chr16:88938185-88938216
  hyper
acctgtgagtacaccccgaggagtggggctc

SEQ ID NO: 10869 - DNA, 332 bp, Homo sapiens
  chr16:88950060-88950392
  hyper
ttctgcggtggctgcgcccacgggagacgtgagtgaccccggcagtggccgacttccacggtggctgcgcccacgggagacgtgagtgatgcccggcagtggccaactcttctgcggtggctgtgcccacgggagacgtgagtgacgcccggcagtggcttactctttcgtggtagctgcgcccacgacttctggagacatcagaggcttccaggccccactgttttctgcatttggccactgcccacgcttctggggctgaggtctccctcttggggcccttttcagcccctaaagatctcctagcctccgaacctgaaatggctccccca

SEQ ID NO: 10870 - DNA, 1437 bp, Homo sapiens
  chr16:89007176-89008613
  hyper
ctcccagcgcccgggcgcgtcgttcccctcgaagtttcgccgcagcccccgcaggtcaggctctgctcacggggggctgcgctcagcccggatgggtgggcgctgggcgggttggctccaccctgccgtgggcaccaactttgaaaacggcccgtgcgctcggcgcggctgcggcgcagatccgggaacggcagccgcgggcggagtcggggtagagcggcggcggcgcgcggggcggacacggcacttacggtcggggggtccgggggatccggcgggcggcggacggcgcacactcgcgactcggtccgggagtcgctgctccttccagcttggtccccgcctccacgactcaggggcggctgcgcgctgtcttctggcgccgcaccgggctcaggcgcgcggcggggctggggcgcgcggggcggccgcctgggccatgccggggactcggctccggccaccccgcgcgggaacaaagcgcgcaccccgcccggggcggtctccggcctccgcggcccgcgccgggtccagccgccgcgcctgtggctccaacgccgcgcgctcgcccgagagtctcacggggccccgcggcccccgccccgcgcgctccgcctccgcctcctgccccccgccgccgccgctgcgccacctgcctcccgcccggcgcccatggcgctcagctccgccccggggcgccggcctggagaggggctccccgccgccgagagccgcccccaacgcctccgccaccggggcggcgccctaagaactggccgtgggggccggggctgtgcggagcgccgggagcagggagaggggagaggggcgcggggagggggcgacgggcgcgccgcctcctgcggggggcggcgcggggaggcgcaggcgggggcgagcgaagaggttgaggggtgcgggcgccgtggagggggcgcggctctggggggcggcccccgcctgcgcccaccctctccccctccgcaggccgcgcacacccacctcgcagcagtcggcggccgcgggcctcgcagctttagaaccgcggcttctggcggccgcgcgggaggctgaacgggagttggggggtgtggggggggtggggaggtggggagttgggggggaggtcgctccttcggccgccgcccccgccccctgccccgcgctcgcccccagcgcggcgcctggcccggcccggggccacctccgtgcgtggccggcaggggtcgcgctccccccgctcagcctcccgggcgggtccgatgcgaagccctcgcttcccgcgggtcccggggccaggtcatttgcatacactttgcattcatttgcatatcgtgcgtttcatgtccacctgcagaaacgccccgagccgctgctctgccctctccgcactttctctgccggcaggccccctcccccgcccgctttgcctttccc

SEQ ID NO: 10871 - DNA, 375 bp, Homo sapiens
  chr16:89189615-89189990
  hyper
ggcctcagggtttgtgccctccgacacctgagattcagggctcccagaggggtgggtgggcgccccaggacaaccaggtgatgatgggcgctgtgaactctgaaaagccccagcatcagagacctgctgctctctcatgtgaagggactccccaccccacgctcacactcgcagacgcacttggtactttcatctgagtctcacgcagtagcccttctctccacagcatcccagaacccgagggtgcccctcactaccacggtcccggatccacgtggctcaagtgaggctgtggccgacagctgggctgtccgatccactcttgtctgtgccgaggcgtgggtcccggccagcgtccctccccagaaggtctcc

SEQ ID NO: 10872 - DNA, 41 bp, Homo sapiens
  chr16:89266728-89266769
  hyper
ggagagctgtgctcagcggcatttcccggtgaggcccttga

SEQ ID NO: 10873 - DNA, 30 bp, Homo sapiens
  chr16:89268025-89268055
  hyper
cggccaaagccgcccgcagctctcagcacc

SEQ ID NO: 10874 - DNA, 100 bp, Homo sapiens
  chr16:89615004-89615104
  hyper
actcatggtcccgaccgtcagtaggaacgggagatgagttttggtgacgggtgaccggtgggctgaccgcctctgactgccgttccgtggctgctcagtg

SEQ ID NO: 10875 - DNA, 39 bp, Homo sapiens
  chr16:89627716-89627755
  hyper
acggttcggtaccacacgaaggtgcgcgccggccgcggc

SEQ ID NO: 10876 - DNA, 30 bp, Homo sapiens
  chr16:89724282-89724312
  hyper
acccgggcttgcgtcggagggggcggtggg

SEQ ID NO: 10877 - DNA, 30 bp, Homo sapiens
  chr16:89768615-89768645
  hyper
gcacggaaggtgggcggaaggacaagcctt

SEQ ID NO: 10878 - DNA, 30 bp, Homo sapiens
  chr16:89786954-89786984
  hyper
ggaaagccaaggtccgcaggatctgagctg

SEQ ID NO: 10879 - DNA, 66 bp, Homo sapiens
  chr16:89894506-89894572
  hyper
ttttgtgggcatcggccgtctgggtctgcgggggagcgccgggggtgtcaccgcgtgtccgagcgc

SEQ ID NO: 10880 - DNA, 30 bp, Homo sapiens
  chr16:89927372-89927402
  hyper
tgctggtctggggccgtggtctctgctgcc

SEQ ID NO: 10881 - DNA, 30 bp, Homo sapiens
  chr16:89939433-89939463
  hyper
gtgacaaacgcgggcggcctgtcctagaac

SEQ ID NO: 10882 - DNA, 30 bp, Homo sapiens
  chr16:89989273-89989303
  hyper
cccccacccaaaaccggcaaaagctcagag

SEQ ID NO: 10883 - DNA, 52 bp, Homo sapiens
  chr16:89990061-89990113
  hyper
ggtgacctcgggctgtcgaggcgcagctcacgtcagtcgcgaagcctcagcc

SEQ ID NO: 10884 - DNA, 113 bp, Homo sapiens
  chr16:90085466-90085579
  hyper
aggagcgtgccgggcacggcttcccgggccgggagcgcagagaacaagggggcggagactcggtccgtgtgcccccagccccgcgcggggaccgcgcccgggaggtgcccctg

SEQ ID NO: 10885 - DNA, 395 bp, Homo sapiens
  chr16:90088784-90089179
  hyper
acgtctttactgagcacgtgctgtgtgctgttctaggcgctgaaggatagaagtgaagggttcccccctcgtggagcttaggttccagcaataagcaaaacatgccctgcagcgaaaggcttctgggctgccggcgacattttcccaacgttcacaaccgggttccttccggacgcccgtctctagggacgcactcccgcctttggcagggccgctgcccggcggagtctcgcgaggatcttgtgacttatcgcggcatcgcccagcggttgccgggaaacggcgtggcttccgggggcgggcgccctggtcccggagtcgccgctgggcctgtccgctggcgtcatggtgagcaggggcgggagcggggctggggtcctcggcaggggcccgga

SEQ ID NO: 10886 - DNA, 234 bp, Homo sapiens
  chr17:523693-523927
  hyper
gtacaagtcccagcctgcccccggcttcaaccacagtagctcagtttcacggtcttacacattagctccgtggcctggagtaagtttcaaatgagcacagcgcctacttcctatggctgatgaagcacagtgactgactgcaggtaaacgcacctaatatagcgtgggtcaccaagtggatgttcaaagcatgacagctatgggtgtttcagattctacattctattttttttt

SEQ ID NO: 10887 - DNA, 468 bp, Homo sapiens
  chr17:576351-576819
  hyper
aaaaaaaaaacaaaaacaaaaacaaaaaaaaaacaacggcagcatcatttcgaaagccaggaggtcctccagagagcagaaacatggatgagtgctaccacatctgataagccctacacggaagccctcaccacatccactgagggtggacaccaagggtcaagtcgcctctctttagagaaagtctcttcttttgttactgctgaccaccccggcatcactgagagctgttgctatggaaacgaggtatccccagctgaaacagaggtgcttcagccagcctcagcaatgctaacaatgcagcccgctctccacgacggtgctcaacagcagcagaggctgcgggactctcacacacccagcctcagcaatgccaacaacgcagcccactccccatgatggtgctcaacagcagcagaggctgtcggactctcacagccacagatggctgcacgtctacagctcttt

SEQ ID NO: 10888 - DNA, 84 bp, Homo sapiens
  chr17:635851-635935
  hyper
cgcggcgccagcgaggcggccggacccgcagccccgatgctgctgacgctggccgggggcgcgctcttcttcccggggctcttc

SEQ ID NO: 10889 - DNA, 30 bp, Homo sapiens
  chr17:873368-873398
  hyper
gtttgcttttaatcacggaggccacagaac

SEQ ID NO: 10890 - DNA, 30 bp, Homo sapiens
  chr17:899767-899797
  hyper
ggcgtgagcccccgcgcccggtccgtgcat

SEQ ID NO: 10891 - DNA, 30 bp, Homo sapiens
  chr17:900213-900243
  hyper
catgatagcggtctcgctggtgtgcgcacc

SEQ ID NO: 10892 - DNA, 31 bp, Homo sapiens
  chr17:914942-914973
  hyper
gagaaagcacttgccacggggactctgaagc

SEQ ID NO: 10893 - DNA, 213 bp, Homo sapiens
  chr17:1011775-1011988
  hyper
ccctcttgcctcagctcggagacaccaagtccctgtctcctggctgggaagagggtggcccctctcttgcggttgccgtggaaacgggggattcctgcccacccgctccagggaggcggcgaggctcgggctgacaggcgcgccaggtgactcctggcacagccgccggagccctgagctgggctggcctggagggggcggccaccactgccc

SEQ ID NO: 10894 - DNA, 31 bp, Homo sapiens
  chr17:1133188-1133219
  hyper
ccttcgccgcccgccccgatcccggccccgg

SEQ ID NO: 10895 - DNA, 92 bp, Homo sapiens
  chr17:1390868-1390960
  hyper
gcgggggagggcgggaggagacgcccgctgcggtgcccccaggtttaaaatctagagggagggccgggcgcggtggctcacgcctgtaatcc

SEQ ID NO: 10896 - DNA, 31 bp, Homo sapiens
  chr17:1391199-1391230
  hyper
gcgaagctccgtctccaaacaaaacagaaca

SEQ ID NO: 10897 - DNA, 30 bp, Homo sapiens
  chr17:1420194-1420224
  hyper
gggccgtcttccggcggaagttgtctcttc

SEQ ID NO: 10898 - DNA, 30 bp, Homo sapiens
  chr17:1553187-1553217
  hyper
tagggcggtgtgggcggggtagaagcgata

SEQ ID NO: 10899 - DNA, 184 bp, Homo sapiens
  chr17:1588081-1588265
  hyper
ccctcacacaagaggccgctttccccgcagcgcaatggcggccagactgcgtccgctccgcgttcccagcgccgggaagtgcgcaacccgagttcagcagttgatccagtcggcgccgaggtgctcagatggattagtgagacgaccaattagagttgcacactgcgccgaggaggcgggccca

SEQ ID NO: 10900 - DNA, 127 bp, Homo sapiens
  chr17:1901572-1901699
  hyper
aaggcctcccgcaggccgacccgagccgagcgcgccctttgggcaccggccccgcccgggagggtcttctcgctctagagccgggggcccgcgctgagagatcggggttaccgcgcggggagccgcg

SEQ ID NO: 10901 - DNA, 30 bp, Homo sapiens
  chr17:1928182-1928212
  hyper
gaggtcggcctaggcgcactccctcccggg

SEQ ID NO: 10902 - DNA, 34 bp, Homo sapiens
  chr17:1929339-1929373
  hyper
tggtccacacagaccccgccggggggttcgcgga

SEQ ID NO: 10903 - DNA, 15 bp, Homo sapiens
  chr17:1959132-1959147
  hyper
gggggagaaggggcc

SEQ ID NO: 10904 - DNA, 45 bp, Homo sapiens
  chr17:2014967-2015012
  hyper
gattacaggcatgagctactgtgcctggcccgaaaggtccttaga

SEQ ID NO: 10905 - DNA, 30 bp, Homo sapiens
  chr17:2206902-2206932
  hyper
caggagctgggcggcgcgactcacctctgc

SEQ ID NO: 10906 - DNA, 31 bp, Homo sapiens
  chr17:2302258-2302289
  hyper
ggccccgcagctcccccgccccttgcccgct

SEQ ID NO: 10907 - DNA, 20 bp, Homo sapiens
  chr17:2415865-2415885
  hyper
ctgagcgaaagagcaagact

SEQ ID NO: 10908 - DNA, 203 bp, Homo sapiens
  chr17:2627380-2627583
  hyper
gaagggcgtggcccccgcccctcctgtctcacaggcaggtgggaccaggccaggatcgggacggcgagtcctctcggtagagaaggtgcccccgctcggccccgcggaggaactctcgcgcgaggagagggctcgaagctttggaaacgtcgggaagtacaaaaggctggcggttcggggatttggggggagccggggccgcc

SEQ ID NO: 10909 - DNA, 517 bp, Homo sapiens
  chr17:2627798-2628315
  hyper
cgggcgctgggccgcagcggcctgcgtgcatagaggaagagcgcggggtcgggcatggggtcggcgtcgtcgagggcgccggccccgcggtcccaggcggcccagtcccggccggggcccttggcggcggcctcgtgggcagcaggcgggcggcgggctcgcagtgcgcggcggcgtggcctgggctcggcggtggcgccggggcccgggcgcggggcctgcagtctctggcgcgccgcgtgcagctggcaggagaggtaggcggccgcctcggtgtgcttctgcagctcggtgcccagcacggtggcgcggtggctgcggcggcgcagctcctccaggaagcggcgctcctcggtgcgcaggctgcagcgcagcgcggacaccagcgcctcgcgctgcgccacctcccgccgcagctccgcgttggccgcagcacgcgcctccagctgcgactccagcgcgcggcacttgctctccagctcccgggacgccgcctctggaacggggcagaggccag

SEQ ID NO: 10910 - DNA, 30 bp, Homo sapiens
  chr17:2680268-2680298
  hyper
cagccagcctggatcgggacgtgagtcctg

SEQ ID NO: 10911 - DNA, 30 bp, Homo sapiens
  chr17:2756326-2756356
  hyper
ggaagcggggtcgccgtgaagttggttatt

SEQ ID NO: 10912 - DNA, 189 bp, Homo sapiens
  chr17:2756812-2757001
  hyper
gaggcagggccggggccggggagggcgcctgggagccgggcaggggggtcccgggagcgctgtccgcctcctcctgcgcttcgcccgctccctgtgccccgcgtcctccaccatccgggcggccgaggccggggcgcgggaggcggggccggggcgggtcccggcgcgggcggcgcgtctgagcgggag

SEQ ID NO: 10913 - DNA, 89 bp, Homo sapiens
  chr17:2757205-2757294
  hyper
gctcaggggccgggtgcggagcgcgcggagccggggctgcggggacgcgggcgggcgaggtcgggcaccgcgggcggcctcgccatgtc

SEQ ID NO: 10914 - DNA, 30 bp, Homo sapiens
  chr17:2952081-2952111
  hyper
actggggagccctacgaaggggttccggag

SEQ ID NO: 10915 - DNA, 30 bp, Homo sapiens
  chr17:2952357-2952387
  hyper
gaggtccggctttgcgaggaactcccattg

SEQ ID NO: 10916 - DNA, 1 bp, Homo sapiens
  chr17:3599244-3599245
  hyper
c

SEQ ID NO: 10917 - DNA, 243 bp, Homo sapiens
  chr17:3866999-3867242
  hyper
ggcaccttcctgggcgttttctggagccctcaggggagaccctggggccagctgggaggccgagcctgagtctccggccgtccctcgcccgccggtgtctgcgctgcacctgcaggatgccagcgggagcggcgcggcgttggggtggaatacggtccaggatggggtggaataacgcttccagggtggacggggccggagtggaggtgggaagtccgggaggaccgcgcagagggtgccagg

SEQ ID NO: 10918 - DNA, 81 bp, Homo sapiens
  chr17:3908048-3908129
  hyper
gctcctggaaagcgccgggacgcggcggctctggctcggcagcgccacccggtggccggagacagaggcggccgggccgag

SEQ ID NO: 10919 - DNA, 30 bp, Homo sapiens
  chr17:4167301-4167331
  hyper
gaatcaccaagtctcgcgagaatcgcggga

SEQ ID NO: 10920 - DNA, 30 bp, Homo sapiens
  chr17:4402758-4402788
  hyper
cccaccacccgcctcgagggaggtacccca

SEQ ID NO: 10921 - DNA, 30 bp, Homo sapiens
  chr17:4545059-4545089
  hyper
tctccaatcaactccgcctaccgctggggc

SEQ ID NO: 10922 - DNA, 31 bp, Homo sapiens
  chr17:4642753-4642784
  hyper
cggccggagaggaggcgcgagccagctgcac

SEQ ID NO: 10923 - DNA, 30 bp, Homo sapiens
  chr17:4710005-4710035
  hyper
aatgtggctcgcagcgggtccgggagcggg

SEQ ID NO: 10924 - DNA, 329 bp, Homo sapiens
  chr17:4853392-4853721
  hyper
ggcgggggtgagtcaccgggcgcgcgctgccccggcgccgacgggaagggcctccgagtcgggccgaggcgccgtgtgtcccccgccggtcggctggtatggctgcagaggagctcggggcagaccccgcactggccccagagccggcaaagtggagatctctaccgagggcagagacctacctccccgcagtgctacaagtggggcgccggaagagccccaggcgtgcagaagctcacaaaaggccacccgtcctcggtccattcatttttgttcactgttgattcagccccattcattgatgggctggggccgtgcgctgagcgccc

SEQ ID NO: 10925 - DNA, 204 bp, Homo sapiens
  chr17:4890352-4890556
  hyper
gagatgggaggaggcccgtcgggctcggctatgtgcagtgaagctggggttggggtaaggactccgccccagggcgcaggtgcgcagtcctggctaggcagcctgccagggtgcggagcgggagcgggtccttgggctgcacttgggcggcgccggatcggacgcttggcactctgggcggccccccggcggagtggtggtccc

SEQ ID NO: 10926 - DNA, 31 bp, Homo sapiens
  chr17:4900808-4900839
  hyper
gaattctagaactcggcggggcggggaggag

SEQ ID NO: 10927 - DNA, 119 bp, Homo sapiens
  chr17:4901560-4901679
  hyper
atgtgctgtttgttccgcggaggcgcagagaggtgccaggcccgggcggccgccggctggctggacaggaggacgggtccgcatggccgccctgagaggccgggcggggacctgtgtga

SEQ ID NO: 10928 - DNA, 170 bp, Homo sapiens
  chr17:4981378-4981548
  hyper
aaagggtcgcgcaaacggtccccgcgggaatgcgaagcggattctcgagttcttgagcctagagcaatgcttggggagcgacacgagggcgcagagcggcagatcgcggagcggaagttcatccccggagccgttctaggaaacccggaggactcaggtcgtcaatgatt

SEQ ID NO: 10929 - DNA, 89 bp, Homo sapiens
  chr17:4981951-4982040
  hyper
cgtttaggcccgttctgaccggggttcgctgtgtgaccttgaagtttatgcctccctccattccccccgcccccaggccttcatttcca

SEQ ID NO: 10930 - DNA, 30 bp, Homo sapiens
  chr17:5000788-5000818
  hyper
ctcctgcagtaccgcggacaagaacaccat

SEQ ID NO: 10931 - DNA, 31 bp, Homo sapiens
  chr17:5019613-5019644
  hyper
cccgcctcaccactcccggcttcccggggct

SEQ ID NO: 10932 - DNA, 30 bp, Homo sapiens
  chr17:5389577-5389607
  hyper
ctttagttttcccgcgactgcccaatcaac

SEQ ID NO: 10933 - DNA, 34 bp, Homo sapiens
  chr17:5390232-5390266
  hyper
cttagacagctcaactcgccgagatgacctgggc

SEQ ID NO: 10934 - DNA, 30 bp, Homo sapiens
  chr17:5974049-5974079
  hyper
caagtttgtgcagacgcggttgggagcgcg

SEQ ID NO: 10935 - DNA, 143 bp, Homo sapiens
  chr17:5974433-5974576
  hyper
cggagggtttgctccgtctcttggtgaacttgaacagaggcagaggcaaaagcaaaacgtatgtattttgtccagaaaattacctagtgtagagctttgcgtcttcgtaggtgtggacggagactcacgactgaaggttgcta

SEQ ID NO: 10936 - DNA, 31 bp, Homo sapiens
  chr17:6347034-6347065
  hyper
agagaggcaggcattccgctggagagaggga

SEQ ID NO: 10937 - DNA, 256 bp, Homo sapiens
  chr17:6347521-6347777
  hyper
agtggcgcgagcgggacgcaggatacaaagcccggagccacgaggctggcggcggggcgggggccggagcgatgaatgggcacggccgggccaatccaagcgcagcatttgcagccgcgagagagggagccaatcggatccccggggcggtggcggtggcgggggcggggacggaaccaatcagctgtgaggacggggccgggggcggagccgcgcagagtttcaaatcggctgcggtgggcgaggagcagctgtg

SEQ ID NO: 10938 - DNA, 253 bp, Homo sapiens
  chr17:6616629-6616882
  hyper
acatagctcagcgccgaggccatcgcgcgggagggagactggcgggcgagacgagtgaggggcagctagaggcgccgcgggcttaagaaggggccacagtccccggggattggggagggggcggtgacaactccgccccgcacgggggcgcctccccgcggccctggggcggggccacccctcggggtctgtgggacgcgcctgcccccaattctgccacccggcggcggtgggaggcgtctttggactccaa

SEQ ID NO: 10939 - DNA, 308 bp, Homo sapiens
  chr17:6679324-6679632
  hyper
cgtgccatcctcacccggagcgccggccgagcctcccgcctcccaacgcctggccagggccccgtctcgccctctgcacatgggatccactgaccaggcaactgcaggtttggggctctgcgacccgggggcaggaacagagccttgcaggcggcagcgcgtcacaaaggcggccggagcttggcatttagcttgggccagagcaaggcgcagacccggggcgcccatggagttggcgtcggagcaacagctgcgcgggcggagcaggtaggcgcgctccagtccctgcagcccgagcggggttcagc

SEQ ID NO: 10940 - DNA, 30 bp, Homo sapiens
  chr17:6939780-6939810
  hyper
tgtttggggtgctccgctcctttggggtct

SEQ ID NO: 10941 - DNA, 30 bp, Homo sapiens
  chr17:7142931-7142961
  hyper
agcggaaaagggaccgcatgaacctccgga

SEQ ID NO: 10942 - DNA, 15 bp, Homo sapiens
  chr17:7146549-7146564
  hyper
cgaagcccggtttct

SEQ ID NO: 10943 - DNA, 258 bp, Homo sapiens
  chr17:7166475-7166733
  hyper
accactgtcccctccggcatcaaggctcctaactggaggaagaaaccactgggacctaaagccggccgagggtggggagcagggtgagggctaggtcagagtcttggccacacccatcgttcccctcccttagagtcttttcagacctatcctccacctttcccacccctcccccacactcgcccgtttctctttccctcccgggcctgggcttggactgccaattgctgtgcactctgtcacgcctcactgttccgt

SEQ ID NO: 10944 - DNA, 30 bp, Homo sapiens
  chr17:7184884-7184914
  hyper
tggcctcattggcccgccccaccaactcca

SEQ ID NO: 10945 - DNA, 58 bp, Homo sapiens
  chr17:7254510-7254568
  hyper
acccaggctcggagcgcgaggtccccaggtgggccccaaccgccggatcctgcccttc

SEQ ID NO: 10946 - DNA, 891 bp, Homo sapiens
  chr17:7254951-7255842
  hyper
gcagggcgctgcggggcgggggctctcgggctggggcgacgtggccagcccagtcctgccgaggggtggggctggccctggggctcgctggccccgcgccgccgcggagagagcgcgcccgggccaccccggctggaaggcatccccggaatgcggcggctcagcacccgccccctcgggaattccccgggggagccgctgggagggactcggctcccgggctgggccggccgggcctcgggctctgagcggtgggattagaggctccagccccgccgacttgcagacgtgagatcgggcacacctgagcggcggcggggcggtcgtggccacatccggggcgacgtgcctgagtcaccccgtcccgccagcgtctgccagtccagccagtccgcccagtctctcgcgtccgagactcgcctccagcctcccacctccgcccgggccgcgcgagcctcgcgggggcgggggcggggcgccaaggggcggggctgtctcttaaagggccccgggccgctgcccttaggccacttcctgggggcggagaggacctcagcggctgcggcgacacccagggaaggcggcgcggccgggtcccgaaactcctggctgtttccatcagagccctcggacactcccagcccgggctgagcacgcatcgtcgctccccggcggatacaagggggctccgccatccgctcccgtcagttcggcctccatctcctgggacccgcgccggcagccaggccaggcctctgagtggccccagagccctggctggactcgtccacggcggcagcgatctgcccggggtctcggaggccatcccttcagagtcggccctgtgctcgccaccgtcacctgctggttggattccggaaacccactgtc

SEQ ID NO: 10947 - DNA, 320 bp, Homo sapiens
  chr17:7284207-7284527
  hyper
gggggcttctcacagtcggggcgatctggtctggaggagggaggggccgccagtcgccctggggaccgtcaccttgtcccactagggaactcggggtgcggccctcgccggccccgggccagcggccaggtccccgccctccgcgggatttactcctgtcccgcctcctcggatttagcccaggcagcctgggaggttccgcagtcgccgcttccgccttgaccaggtgagggtccggaccgagcagggggcccgggctggggagagccggcggagcagccgtcgctgggggcgcgtccggggggcgctgggcctgtcct

SEQ ID NO: 10948 - DNA, 31 bp, Homo sapiens
  chr17:7307051-7307082
  hyper
ctgaccgcccccaatccggggggacccaggt

SEQ ID NO: 10949 - DNA, 30 bp, Homo sapiens
  chr17:7308564-7308594
  hyper
tccttaggatcctccgcctggaccgccttc

SEQ ID NO: 10950 - DNA, 30 bp, Homo sapiens
  chr17:7338603-7338633
  hyper
acgccctagtagagcgggaaactacaactc

SEQ ID NO: 10951 - DNA, 30 bp, Homo sapiens
  chr17:7343090-7343120
  hyper
gactgtgcggggggcggcccgcgcggccgg

SEQ ID NO: 10952 - DNA, 30 bp, Homo sapiens
  chr17:7349182-7349212
  hyper
gctgggagtgtagacggcaggaagaggtgt

SEQ ID NO: 10953 - DNA, 31 bp, Homo sapiens
  chr17:7461585-7461616
  hyper
agagtcagcaggcacacgggaacccggaacc

SEQ ID NO: 10954 - DNA, 30 bp, Homo sapiens
  chr17:7554666-7554696
  hyper
gtggtcgtgcaccccggaatctgcagcagc

SEQ ID NO: 10955 - DNA, 30 bp, Homo sapiens
  chr17:7555307-7555337
  hyper
tagctccgcagccccgtctatttttagctc

SEQ ID NO: 10956 - DNA, 166 bp, Homo sapiens
  chr17:7571718-7571884
  hyper
tcacccctcagacacacaggtggcagcaaagttttattgtaaaataagagatcgatataaaaatgggatataaaaagggagaaggaggggaagggtggggtgaaaatgcagatgtgcttgcagaatgtaaaagatgttgacccttccagctggacgtggtggctca

SEQ ID NO: 10957 - DNA, 825 bp, Homo sapiens
  chr17:7572183-7573008
  hyper
ttgaccctgagcataaaacaagtcttggtggatccagatcatcatatacaagagatgaaatcctccagggtgtgggatggggtgagatttccttttaggtactaaggttcaccaagaggttgtcagacagggtttggctgggccagcagagacttgacaactccctctacctaaccagctgcccaactgtagaaactaccaacccaccgaccaacagggagagggaacaagcaccctcaagggggtcaagttctagaccccatgtaataaaaggtggtttcaaggccagatgtacattatttcattaaccctcacaatgcactctgtgaggtaggtgcaaatgccagcatttcacagatatgggccttgaagttagagaaaattcaacagtgagggacagcttccctggttagtacggtgaagtgggcccctacctagaatgtggctgattgtaaactaacccttaactgcaagaacatttcttacatctcccaaacatccctcacagtaaaaaccttaaaatctaagctggtatgtcctactccccatcctcctccccacaacaaaacaccagtgcaggccaacttgttcagtggagccccgggacaaagcaaatggaagtcctgggtgcttctgacgcacacctattgcaagcaagggttcaaagacccaaaacccaaaatggcaggggagggagagatgggggtgggaggctgtcagtggggaacaagaagtggagaatgtcagtctgagtcaggcccttctgtcttgaacatgagttttttatggcgggaggtagactgaccctttttggacttcaggtgg

SEQ ID NO: 10958 - DNA, 112 bp, Homo sapiens
  chr17:7573921-7574033
  hyper
ctcacctggagtgagccctgctcccccctggctccttcccagcctgggcatccttgagttccaaggcctcattcagctctcggaacatctcgaagcgctcacgcccacggat

SEQ ID NO: 10959 - DNA, 622 bp, Homo sapiens
  chr17:7576545-7577167
  hyper
gtttatcaggaagtaacaccatcgtaagtcaagtagcatctgtatcaggcaaagtcatagaaccattttcatgctctctttaacaattttctttttgaaagctggtctggtcctttaaaatatatattatggtataagttggtgttctgaagttagttagctacaaccaggagccattgtctttgaggcatcactgccccctgatggcaaatgccccaattgcaggtaaaacagtcaagaagaaaacggcattttgagtgttagactggaaactttccacttgataagaggtcccaagacttagtacctgaagggtgaaatattctccatccagtggtttcttctttggctggggagaggagctggtgttgttgggcagtgctaggaaagaggcaaggaaaggtgataaaagtgaatctgaggcataactgcacccttggtctcctccaccgcttcttgtcctgcttgcttacctcgcttagtgctccctgggggcagctcgtggtgaggctcccctttcttgcggagattctcttcctctgtgcgccggtctctcccaggacaggcacaaacacgcacctcaaagctgttccgtcccagtagattaccactactcaggata

SEQ ID NO: 10960 - DNA, 122 bp, Homo sapiens
  chr17:7577495-7577617
  hyper
gacctggagtcttccagtgtgatgatggtgaggatgggcctccggttcatgccgcccatgcaggaactgttacacatgtagttgtagtggatggtggtacagtcagagccaacctaggagat

SEQ ID NO: 10961 - DNA, 559 bp, Homo sapiens
  chr17:7578174-7578733
  hyper
acctcaggcggctcatagggcaccaccacactatgtcgaaaagtgtttctgtcatccaaatactccacacgcaaatttccttccactcggataagatgctgaggaggggccagacctaagagcaatcagtgaggaatcagaggcctggggaccctgggcaaccagccctgtcgtctctccagccccagctgctcaccatcgctatctgagcagcgctcatggtgggggcagcgcctcacaacctccgtcatgtgctgtgactgcttgtagatggccatggcgcggacgcgggtgccgggcgggggtgtggaatcaacccacagctgcacagggcaggtcttggccagttggcaaaacatcttgttgagggcaggggagtactgtaggaagaggaaggagacagagttgaaagtcagggcacaagtgaacagataaagcaactggaagacggcagcaaagaaacaaacatgcgtaagcacctcctgcaacccactagcgagctagagagagttggcgtctacacctcaggagcttttcttttttttttttttttttgaga

SEQ ID NO: 10962 - DNA, 692 bp, Homo sapiens
  chr17:7579248-7579940
  hyper
aatgcagggggatacggccaggcattgaagtctcatggaagccagcccctcagggcaactgaccgtgcaagtcacagacttggctgtcccagaatgcaagaagcccagacggaaaccgtagctgccctggtaggttttctgggaagggacagaagatgacaggggccaggagggggctggtgcaggggccgccggtgtaggagctgctggtgcaggggccacggggggagcagcctctggcattctgggagcttcatctggacctgggtcttcagtgaaccattgttcaatatcgtccggggacagcatcaaatcatccattgcttgggacggcaagggggactgtagatgggtgaaaagagcagtcagaggaccaggtcctcagccccccagccccccagccctccaggtccccagccctccaggtccccagcccaacccttgtccttaccagaacgttgttttcaggaagtctgaaagacaagagcagaaagtcagtcccatggaattttcgcttcccacaggtctctgctagggggctggggttggggtgggggtggtgggcctgcccttccaatggatccactcacagtttccataggtctgaaaatgtttcctgactcagagggggctcgacgctaggatctgactgcggctcctccatggcagtgacccggaaggcagtctggctg

SEQ ID NO: 10963 - DNA, 175 bp, Homo sapiens
  chr17:7590693-7590868
  hyper
cccaatccagggaagcgtgtcaccgtcgtggaaagcacgctcccagcccgaacgcaaagtgtccccggagcccagcagctacctgctccctggacggtggctctagacttttgagaagctcaaaacttttagcgccagtcttgagcacatgggaggggaaaaccccaatcccatc

SEQ ID NO: 10964 - DNA, 49 bp, Homo sapiens
  chr17:7739846-7739895
  hyper
ccccgtccccgcctgccggcccccaccgagatctcgcccaggagagaga

SEQ ID NO: 10965 - DNA, 50 bp, Homo sapiens
  chr17:7744963-7745013
  hyper
gcggagacagacaccgggacccacgcacagccgaccgtgtcagacagact

SEQ ID NO: 10966 - DNA, 39 bp, Homo sapiens
  chr17:7761564-7761603
  hyper
acctgggacgcgtgtacgacctaacgtcattggcacagg

SEQ ID NO: 10967 - DNA, 30 bp, Homo sapiens
  chr17:7790164-7790194
  hyper
gttggggagagaagcgtgaaaggatccgag

SEQ ID NO: 10968 - DNA, 30 bp, Homo sapiens
  chr17:8022389-8022419
  hyper
ataaaatcctctgtcggttctacaagcctg

SEQ ID NO: 10969 - DNA, 30 bp, Homo sapiens
  chr17:8023623-8023653
  hyper
ctccagcctggcagcggtgggattcgaacc

SEQ ID NO: 10970 - DNA, 30 bp, Homo sapiens
  chr17:8023946-8023976
  hyper
ctgggagtggggagcgcctgagccggaaac

SEQ ID NO: 10971 - DNA, 740 bp, Homo sapiens
  chr17:8055166-8055906
  hyper
tgagcattttctgagcgccaggggaaaagggaaggttgtggccaacagcaggaaccagcgctgggaacgggatgttctagtccgaagtgggctgacatcacaggcggcgcagggccagggactggagaacagagacacggggagcgctgaaagcctaatagggtcctggtaccggggcaaacctggggcccctcgagtaacgagcaagaagaccggggcatgcccgctgagagtcggctgtggggccgggaaagctgggacggggaggtggggacaagctggaggtaagatgagtgggtcaggagtgcagactcccggtgcaagatttcgaggaggacttcggtccttgggggcagggagagggtgggtagcggtaaggacgacagtgtgccctctgcctgggccgaaagtagcccatcagattggaagtggcagcggtccggctcagggacggagatcggccccaggatggccgcagagatgcctacctggtcgcaggagtgtcctccgcacgcctgcccgccgccgctccagcccgcagccgagtggaagctccaccgggcgggcggggaggcgggttgcataatgccgggcactgccccctcattggcctcttgccgacggagccgcaggccccgcccccgattggctggggatctcttcccggcgcctgattggctagtggtctccactaaggtcagggctgtgtcacacacacgggcgcacgtggacctgggtgc

SEQ ID NO: 10972 - DNA, 30 bp, Homo sapiens
  chr17:8093365-8093395
  hyper
tcggcccggcccgccgccaaagactagggc

SEQ ID NO: 10973 - DNA, 30 bp, Homo sapiens
  chr17:8093752-8093782
  hyper
aaattcctgagtcccgaggggtggggctca

SEQ ID NO: 10974 - DNA, 30 bp, Homo sapiens
  chr17:8152395-8152425
  hyper
tacttaactgtccccgcggggacggggaac

SEQ ID NO: 10975 - DNA, 30 bp, Homo sapiens
  chr17:8191805-8191835
  hyper
gtgaccaccgggggcgacatagaccctaac

SEQ ID NO: 10976 - DNA, 30 bp, Homo sapiens
  chr17:8230115-8230145
  hyper
aaaccctccatactcgcaggttcagctaca

SEQ ID NO: 10977 - DNA, 30 bp, Homo sapiens
  chr17:8230565-8230595
  hyper
ctcctggttctcagcgctcgcctcccacgc

SEQ ID NO: 10978 - DNA, 30 bp, Homo sapiens
  chr17:8280093-8280123
  hyper
cggacaccgtgcagcgctgttcacccagat

SEQ ID NO: 10979 - DNA, 30 bp, Homo sapiens
  chr17:8533203-8533233
  hyper
ttccccggcgccggcggagtccgaccctcc

SEQ ID NO: 10980 - DNA, 91 bp, Homo sapiens
  chr17:8649034-8649125
  hyper
aagaaatgtcaaaacacggtaacggaaatgaccctatttaaaatgttgactccgtggtggccgccttccttgatcccgtcaggctgcgtgc

SEQ ID NO: 10981 - DNA, 633 bp, Homo sapiens
  chr17:8868815-8869448
  hyper
ggagcccactctccccgacggtccccagcttgctccagctctgcctggagctcccatgcgtgccctccgcatccgccctggccgcccagtcacacacctgcagtccccgccgggcgccgagcccctctccagcggcgactccctgcgattcgggtgaccgtcgggaccaccgcgccccagctggagccgcgcggcgagccgcagcatctgcccagcctgggctcctccggcgggcggggcggagcctgtcagggggcggggcctaatggggcggggctgaccgcggagccggcctctccagccacctggcggcccggcagcgtcagccaggtgcgcgcccggccccacatcctctgggtcacgcccccgaggccgcaaggcgtctgagaagcagccccggctctgacccgccagccctcggaagaagcagaccctggccggtccatggcagtggcccgaggggcaccagcgcggagcaccagcgacccccaaggagtaaggggaggttaggcccccgcgtcggaagcgcggctttggccccgcaggagggctgggcggagcaggggggcaggtctggggtaggggcttaggggaaagacgagaaagaggaagctccgacgagctgcttccttc

SEQ ID NO: 10982 - DNA, 1538 bp, Homo sapiens
  chr17:8906189-8907727
  hyper
tgtcccaagttacacgcatcctatcttggcccagctccactggagcccgagcggcggggcgcagggtgcgagcgggaggctggtgttctgcccgcgatgggcaggggagccgggtggccgcggggcgaggagccgcgagggccgggccggcgtgacaccacctggcggagtctcggggaagagtcttaaaggcgcgcgctcctccgtgccccgcgcactcgaacgggagccgcggagagctcgcctcccgctgccgccggcgcctcggggaggtaagtgccacccgcggatcccgagtcgcggccgggtgggggcggcccgcggctgccccgcgctcgggaagctctggctggggctgcggtcggagggcggcgcccaagttttcttgaaggcctcggagggcagctggagcggcgtagagcctgcgcggggatggcgggggtggccgcgggccggggccgtctgggggcggccatcccgggcggtgcgtggaaaagtaggcactggtgcgcggcgaggggcgcacgccagagccccagccccgcgtcctgcgcacttggcgcgctctggccgcggtcccggcgagccccagcctgctccgggccgcgaccccggctccgcgccttcctgcccgcccgggtcctttgtagcccgctggccccgcggtcgcgcacggtcacgccggcaggtcgcgctcggcggccggccaagccagccccggccctgccgcgcccgcgccccgggccaccccgcccggccccctcggcgctgcacccctcgctttccccatctccagccgctcgctattttcacacctcccggtgccccggccccggcgcctgattcagtgcttagtaattaatttggcgtttcagaatggtcagcgggctggataatgggtgcattcatcccccgggctaatctgaacagaggtgggaagaaaggctttcacagacagaaaatgccattcgccgagcgctcaaaggggctgtcactcccagaataaatcgccgccgcgcccgccggctcctctggccatttccatacagctccggcccgcgccgcggacccgccggcctcggcctcggctcccgggaatcactcactcgagtgccttcgacgggaaagtcgggcgagagctggacccaggcgggggccgagggaaacggggaaactggagactcgggtgaaggccgcaggggacaaagagattgattagaaaatcaaacgcgcatctagaaggaggcgcaggcgactgctcaaggcgcggacggcggagctggggctcgggagcgtccgtccaaaacccccgaggttcgccaaagaggagggcccgcggcccagaccctccggagcgtgcccgaggcgacacggcaagcttctggggctcccaaattgtgaatggagttcaatgcacaagcatagatagtagaaacagggtcgacctgcacagactttttattccgagttccttgtgctatcagccccgtcgccctcgcggcctggaaggtgacacggtgtcttccccggcctcctgc

SEQ ID NO: 10983 - DNA, 241 bp, Homo sapiens
  chr17:8907776-8908017
  hyper
cgggtgacggaggctttatcctttgatcccttctggatccggtgacgcgctaagtgttgggcacgtacggcctacggagtttgaatgctggggccttcctgttgcggcacccccagcccactggtgcagcgggatcgtgcgctcccgccgcagccctaatccagaggaccgcgccgcgccagcgccttcagccaggctgtggcgcctccagtgggtagggctggctcggctctagccaggt

SEQ ID NO: 10984 - DNA, 30 bp, Homo sapiens
  chr17:8925737-8925767
  hyper
gtgcctggtgggcgcggtgcgcggcgggcc

SEQ ID NO: 10985 - DNA, 31 bp, Homo sapiens
  chr17:9548355-9548386
  hyper
ccccccaaggggcagacggtctggaaggagg

SEQ ID NO: 10986 - DNA, 68 bp, Homo sapiens
  chr17:9548749-9548817
  hyper
cctggagggggctggtcgtgccgccggattcccgcgcggggcggggctgccccgcccttggctccgcc

SEQ ID NO: 10987 - DNA, 226 bp, Homo sapiens
  chr17:9549055-9549281
  hyper
gcagccgctcacgccccggggactcaccgccccggccccagccgggacactgtgatggcgacggtgaggggggcttcgcctgcgccccgggcccagttccagcggcccccgggagccccggggaggaacgcccgcccggaccccagccccagctccagctccccgccggcgatggggcgcggccgccgggcgctcagggcttgaagaaccacggcaacacctgttt

SEQ ID NO: 10988 - DNA, 30 bp, Homo sapiens
  chr17:9549481-9549511
  hyper
tgtccccctggtttcgcctcttgaaaagtg

SEQ ID NO: 10989 - DNA, 153 bp, Homo sapiens
  chr17:10101294-10101447
  hyper
cggcgcaaggtggaagctccccgcgagtccgcgttgcccacgccccgaggggcgcccgctgccgtcgctgccccccaggagcgtggagctacaggtagcgccggcaagggctgccccccggggcgcccctccgaccgggacgctgcggcatcc

SEQ ID NO: 10990 - DNA, 315 bp, Homo sapiens
  chr17:10102264-10102579
  hyper
cggagggctgcgcgctccctcgcagaggggcctgtcactggggagaggggctcccactcgcgcccccaccgccggggaccgcgggaatggaaacgcccctctgttctgtgcctgctttgtaggcctggcggcccgtggcgtgcgggcggcttcttcgaggtgtctgcgagggatcgtttgtggttgtcattgtagtggttgaacctggggttgaacttgtctcaccggaaactgaacaatgggtgaaagacaggtttgaagcctggcgcctgagcccagcagcctggtggcagcgtggcacgctggagggacgga

SEQ ID NO: 10991 - DNA, 30 bp, Homo sapiens
  chr17:10600748-10600778
  hyper
cgcgaggcaagaagcgccaaagttggccac

SEQ ID NO: 10992 - DNA, 667 bp, Homo sapiens
  chr17:10632843-10633510
  hyper
ctgggaagttccacgcgcggaaccagccccttccagggtgtgagccctggtatgggactcgcttccatgaacacatccgcgtctcttagacgggggagaaagtgggggctccccaagcagaaagcccaagtcccgtcctccccactaactgtgcgcccctgcgactctgcccgctagtcagttacacggcccgctaggccagggggcggagctgggagccgggcgggtccccctcccaccgcggccgcctgacctgcaccaaggccgccagcgcgaagaaggcggccatgagtccgttgcaggcccgccacagcgctggcgccatggctcggagaacacggcgcggggcggtgagtcctgccacgtgcggggcggtgagtcctgccacgtacggtccgccttcctccttgcgcggagggaccgagacccccgcctcggtttcggtgccttggggacactgccgtggccgtcgctccgcccgggggcggggagcgaagggcgtgggtgtagcccccactcagcgacccattcagcccgccccgaacgccgcggggtgtaggcggcgccgtcctggtttcgcggatgggaaagcgagtccctcagggagcgcaggtctcggtggtggacggaagtcgaatttgaacccgtataggttcaactccaaacc

SEQ ID NO: 10993 - DNA, 30 bp, Homo sapiens
  chr17:11901016-11901046
  hyper
cttcacttctcacccgtcatttattgcgca

SEQ ID NO: 10994 - DNA, 30 bp, Homo sapiens
  chr17:11924904-11924934
  hyper
gcagggtttctgtgcgctggaagggatggg

SEQ ID NO: 10995 - DNA, 590 bp, Homo sapiens
  chr17:12692716-12693306
  hyper
tggacagaggaaaggtgggcacggggcgcgaaactacaagtcccggcatgcacggcgttctccgcacaggcgcacggggaccgccgggccagccggccagccagcctgcggagactcccgggtccccgcgccggactgggactgggagcaggcagcccgggcggagcgggccggtgccgaggacggccccaggcattgctctgccccgggcattgcgcggcgcgcgtgagggggatgcggcaggaggcggcgcggcgggaggagtaggcggcggcgccctcgggagggagctgcgcgcgggccagacggcgcccggaggctccgcagtgccgccgccgtcgcccgggaggctccgcgcgggagccatgtaaccctgcggcgggctccgggctgctccgtccttccccagctcccgggctagcgcggcagcggggccacgatgaagaagcagttcaatcgcatgcgccagctggccaaccagacggtgggcaggtaggtcacccgcgggcaccgctgtcggtgcgcgcccgcgaggctgcatccgcaggggcgcgcaggtgatggagcccgcccagcctccagtcctcctt

SEQ ID NO: 10996 - DNA, 49 bp, Homo sapiens
  chr17:12877270-12877319
  hyper
cgcttcccgggcccccggggtgctaaagctgcgctgctcttctcccaac

SEQ ID NO: 10997 - DNA, 108 bp, Homo sapiens
  chr17:13503836-13503944
  hyper
gccccgctcaccggtaccaggcgaggcccttgtcgtagctgcggtcgaagaagtggggctcggcgcccacggcgcgcacgtcggggtgcacgcgcaggaactccagca

SEQ ID NO: 10998 - DNA, 575 bp, Homo sapiens
  chr17:13504194-13504769
  hyper
cgccgccggccacaccgccagctccctcgggcctccggccaggacgccgccaccaggggcccccgcctcctcgccgccgccggacagccccacgacggggccggacagggtctggcagcgctcggccaggcagtagaagacgtaaagggacgtgagcagggagcagagcatcagcaagaacttccggaagatgctgcgggacagcggctcggccgaggtggagagggcactggccgggcccggaggggccatcctagccggaggcgacgtcgggcaacgcgccggccatgctaggcctggaccccgacaggtgccagagcatccccccggcgggccagcgcgctggacggaggccacatcgccgtgcgcccctgtggccgtgcgaactgtcccgggaggcagcggccggggctccgcggggaaacggaatcccgggggccccgcgcaggatccctgcctccagtcgagggagcgggaaggggaacgcgggtccgtgcttaagaaaccatcgtcttagactcgcccaagtcctgagcttggggcagccttggcccctcggttccccgcaagagtcg

SEQ ID NO: 10999 - DNA, 686 bp, Homo sapiens
  chr17:13505001-13505687
  hyper
cgcccgagttcaggttctctcagccaaggagcgaggtccccccgagtccctctgcccgagcgggagacaggaggcccgtgcagagccgtccacccctctccgtagcgccgggttgctccaaactgctcttggaccccacctgtgagccgcgtggctgggctgggctgggctgcgcgggacctgtcagcggcccccgccactctgctcgcaggcgctcaccggctgcctcctgggccgccgctggccgccgccacacgtgggacgccgagggcagcaaacttgctggtgacgtcaaaggcccgggccggaccagcccccggacgagcgcagcggggcgcggaccagcggccaggcggggccagacgggcggggtgggatggagaaaaggtggcgcgggctccgcagcagccgcccaatggcactggagagggcgggggcggcaggggcgacgccccttccccagtgtcccccattcctccccgcggcttcgcccccttccagtggatccggtgtctgcggcggctccggggttgcctgagtgacagctaaggccggccggatctctgggggcctgacttccacccaagacgccactagcttggtgaggggccccagagctctccaccgcagctcagccctccgcagccctgaccctccctctccaggttccccgcgctctgctcccc

SEQ ID NO: 11000 - DNA, 30 bp, Homo sapiens
  chr17:14201048-14201078
  hyper
ctgctttgcggtgccgcagagggtatagag

SEQ ID NO: 11001 - DNA, 949 bp, Homo sapiens
  chr17:14204052-14205001
  hyper
gtgcggaaatgcgtgcgggtgtgggagcgcaccactcagtagggtaggacctctcccagcgctaggtcactgcagcattcttcccaccatctgctcctgtcaccagcccctaactccgcccctttgggcccgccccttgttccgaagccaatagcaacccctgaccgccctacaccgcccagaagcctttccacaccccctcgtcctgggagcgggttggctgctgagctctcggagaagcgcctgtatttgcatggcgttcggggtttttggtaggtagagcagcccgtcactctggaaggccgggaccgcccactccacctcggtccacagctctcttcctgcgcagttcgcctctgcagcctctgcggggaagtgccggggctgctcgaggctcagttcttaggactgcaaggaggcagccccggcgtgcggcggtgcgcacagtctagagtggccagggcgcgagagtgcaacgtcctcctggccccgagcgcgtcgtcgcgccccgggagcagaccctcgcccagcagttaccgccgtcccgactttccgttccagttgcagctcctgccgggcaacatgtcaagagccgccgccgctacagctgccgccgccacctggggaagagcagcagcagcagcggcggccgcgggcacacgggggcaataaaccgagccacccgggcgtccagcgtgccggggaaccctctctgcgctcactgcccggcgggacccacgccatgtgctgagccatgtccctggccgcgcccgcgggcagcgcatggggcagcgcctgagtggcggcagatcttgcctcgatgtccccggccggctcctaccgcagccgccgccgcccccgccgccggtgaggaggaagctcgcgctgctcttcgccatgctctgcgtctggctctatatgttcctgtactcgtgcgccggctcctgcg

SEQ ID NO: 11002 - DNA, 642 bp, Homo sapiens
  chr17:14205182-14205824
  hyper
cgaggtgccggactccccaagccccatctccagctttttcagtgggtctgggagcaagcagctgccgcaggccatcatcatcggcgtgaagaagggcggcacgcgggcgctgctggagtttctgcgcgtgcaccccgacgtgcgcgccgtgggcgccgagccccatttcttcgatcgcagctacgacaagggcctcgcttggtaccggtgagtttccctgccaggggcagggtctccatcgtcgattcagaccctgagctaagggagacatggcgtatgatagggaattggcagggttacagcttcggaccacccggggtagggcagggaaactacggcagattgcgcagcgcatcctgtccgggtgcggtgagggttgcgctccgcttggttctcgtcacaacccacagaaagttctcgcggagcactggtgcccttgaattcatcaggcgacctcgccgcaaagaagaagggcagcgactgagaccgccctcagcaaagcgagccaccctctaaccatgggggtatccgactcgaatcgtattttatgactcgttttaaattttttcctcccggagcccgagacgctgggaatgttctgagcccctttggtcggtctccgccctcaaggaacttctagag

SEQ ID NO: 11003 - DNA, 30 bp, Homo sapiens
  chr17:14940884-14940914
  hyper
ggaaaaagactctggtttctacctgcttgc

SEQ ID NO: 11004 - DNA, 37 bp, Homo sapiens
  chr17:15164612-15164649
  hyper
accccagtgctctccgcattccgtttgtctccaagtt

SEQ ID NO: 11005 - DNA, 274 bp, Homo sapiens
  chr17:15165788-15166062
  hyper
cacaaactcgggtgcgttggctccgctgctggcgccgccaaagctgcgctgcggggctgcgcgcgcgcgaagcaagggggcagtgggaggctcctggcgttcccctttaacgggaacaacgccctgtttgcgtcgctgcagtagggtgtgtccctgggtcagcgtgtgcgggagggcgggactcagggaggagagggggcaggagagagggagggcaggagacagtcacttggccttaaatgcgcctcaagaaaaagtcggtccctgcaaaacc

SEQ ID NO: 11006 - DNA, 30 bp, Homo sapiens
  chr17:15166385-15166415
  hyper
cccgcgccggtccccgctattactgtctgc

SEQ ID NO: 11007 - DNA, 566 bp, Homo sapiens
  chr17:15244285-15244851
  hyper
tctaaactgcccaaacacaagcgaaagctttgcagccaagctaaacagaaacgactttgggcggtgagagaacagctttgatctgaatttaaggagctcggtctacaagaccaggtgattgaactctcctccccgtggctgcagatctgaaggctcggctattgaagcagagggggacgaggaacagcgtgcggggcggccagcaccgcagtggaaaggcacagcgctgctaacgggtaattattagaattaagaaattaaacgaattagcacagtgtcgggggttcggatgccccttccctgggcatcccttgaaaacccttgaaaagcatcagaaaggtaaattacgaggaaaccaacgtctgggtgggaggtgcctgtggatttgtacggtttttatttggaaggaaaagtgaagatcgcggggaggaattgcagggtgtccgcgacctcccgcgatcctgaggcgagaagttggagtcctggttggcgaagggggatcctttggggtagtcctagaggcaggctagagtcagcgagaccactcacctgtcggcggatgcccg

SEQ ID NO: 11008 - DNA, 103 bp, Homo sapiens
  chr17:15244987-15245090
  hyper
cggccgccccggccggctcgccggagctgactggccagttataggagaggcgggagctgtcaggccaggagggaaacccgtcgggcggcggttactatggacg

SEQ ID NO: 11009 - DNA, 603 bp, Homo sapiens
  chr17:15848768-15849371
  hyper
gggcttctgcactgacttctacggctgcctcttcctcgcctgcttcgtgctggtgctcacgcagagctccatcttcagccttctggccgtggcagtcgacagatacctggccatctgtgtcccgctcaggtgaggcgctcggcgtcgcccgaactcggggccccgtcggagctccgaaatgggtcgtcttctccaggccggggttcctccctcgggggccccagacgggccaggctgggggcgcgcggggcgcttggagggctggttcccagcctggccaccccgcaacgctagaccagtgcgcccgggcacccaagacatcccagatgcgcgtcgctctaaggagatctgcgtagggacagctctagggggtccggggagtgcggtccccggcgcccggggaggcgccgtggaaaccccggggaaagcgtcacccccggggaaagcgtcacccccgtgggcgggtggagcccggggcgcgggagttttggtgatcacatctccactcctgccacgaaggccgttcctaacactcgcccgcagcggcggtgcagcggcagtcccgtgagtgctgcggctcccggaggcccgggaggttcccac

SEQ ID NO: 11010 - DNA, 30 bp, Homo sapiens
  chr17:16256922-16256952
  hyper
cccggccgctgggacgcacctgcctgttca

SEQ ID NO: 11011 - DNA, 52 bp, Homo sapiens
  chr17:16283874-16283926
  hyper
aagagcgaaactccgtctcaagaaaaaaaaggaaagaccccccctccttctc

SEQ ID NO: 11012 - DNA, 1151 bp, Homo sapiens
  chr17:16283956-16285107
  hyper
cgcctgtgcggcgcacgcgcgctcagttacttagcaacctcggcgctaagccaccccaggtggagcccagcaacaacagagccaccgcgtcccccaccaatcagcgccgacctcgccttcgcaggcctaaccaatcagtgccggcgctgcaaggaagtttccagagctttcgaggaaggtttcttcaactcaaattcatccgcctgataattttcttatattttcctaaagaaggaagagaagcgcatagaggagaagggaaataattttttaggagcctttcttacggctatgaggaatttggggctcagttgaaaagcctaaactgcctctcgggaggttgggcgcggcgaactactttcagcggcgcacggagacggcgtctacgtgaggggtgataagtgacgcaacactcgttgcataaatttgcgctccgccagcccggagcatttaggggcggttggctttgttgggtgagcttgtttgtgtccctgtgggtggacgtggttggtgattggcaggatcctggtatccgctaacaggtactggcccgcagccgtaacgaccttgggggggtgtgagaggggggaatgggtgaggtcaaggtggaggcttcttggggttgggtgggccgctgaggggagggcgtgggggaggggagggcgaggtgacgcggcgctgggcctttccgggacagtgggccttgttgacctgaggggggcgagggcggttggcgcgcgcgcgcgttgacggaaactaacggacgcctaaccgatcggcgattctgtcgagtttacttcgcggggaaggcggaaaagaggtagtttgtgtggtttctggaagcctttactttggaatcccagtgtgagaaaggtgccccttcttgtgtttcaatgggatttttatttcgcgagtcttgtgggtttggttttgttttcagtttgcctaacaccgtgcttaggtttgaggcagattggagttcggtcgggggagtttgaatatccggaacagttagtggggaaagctgtggacgcttggtaagagagcgctctggattttccgctgttgacgttgaaaccttgaatgacgaatttcgtattaagtgacttagccttgtaaaattgaggggaggcttgcggaatattaacgta

SEQ ID NO: 11013 - DNA, 30 bp, Homo sapiens
  chr17:16394884-16394914
  hyper
ttcagcggaagcgccgaggcacctgctgcc

SEQ ID NO: 11014 - DNA, 706 bp, Homo sapiens
  chr17:16472108-16472814
  hyper
gggaccgtgcgacgcgcaacgctgggactgggcccacagcagcctccaccccgtctttgccctcccgcaagccacgagcacgggagcccgcgcgtggacgggctcgggctgtcactgatcgcgcggacactcgcgcgctgcgcccggacatcaatacctgtcgctgggacccggccgacgggcagccggagcggccctaaggccacaggcaacaatggcgacgctggcacaggcgcctgcgtggcgggctcagtcccgagcggcagcggatcctcgggctccgccacttcccttccccgcaaagcacagagtgtcccggccaggagctgcacgttccagcccggtcctgagaagcccggcccagaaaccccggcgcctctgcttagccgcgacctcgcctcggcgtcactgcgcatgtgcgccagaggaacgctgcgcgcccgcagagccaatcggagcccaagctgccgcctccccctcccgcgcctctggccctggacctgtctccatggcaacctcctccacccatcgctctgacttgcttgtcagcctgcgaggttccgaagggaacttcaaagtttccccgggcagacgcaggtctggtagacgtcttggaggccagggaggtgccagtagctggaggagcgccgggagttgaagccccgcgccaactacgcagagaaaactgggcgccagatttcctaga

SEQ ID NO: 11015 - DNA, 31 bp, Homo sapiens
  chr17:16570443-16570474
  hyper
ccaccggtgggaaaaccggcaggaggctgcg

SEQ ID NO: 11016 - DNA, 30 bp, Homo sapiens
  chr17:17140478-17140508
  hyper
cgccgacacccaggcgcgtgactccctgag

SEQ ID NO: 11017 - DNA, 738 bp, Homo sapiens
  chr17:17398398-17399136
  hyper
aaggtcctccttaggttgtgtcgccagcgcggcggggctcctagctgatgacgcagcgctccttgtccttggcctggctgccggcgctggccttctcgcggatgtacatgaggtcgctgtgtacgctgggccggcgcgcgaagggtgccacgatgccaaaggcgtcgcccgggtcgccgccgccgccgccgctgccggcccgcagcagcttcttgttccgcagcgccttcttgtgcagcacgtcgcagtactgcaccgagaccttgcggtgcaggtctgggctcatctcgctgggcagcttggccatggcgaagagcgcgcggaacatctggtccaggctgctgttcttcttggccgagatctcgaagtaggcgcagcgctgggggtcgtcgcccaccagctgctcgatctcgcgctggtccacctcgcggtagaagtcgcggtcacccttgttgccgcagatgaccaggggcacgtccacgttctccttggttttgttcttgaggcaagacttggtgtcgaggatctgctgcctgagccgctgcacctcctcgaaggagtcgcggttgtccagactgaacaccaggatgaaaacgtctcctagagggggcacagagagcagaaaaggagaaggtgagggtggccgcccaggggacaagtcgggctgactttgaggccgcgcggggcgcgctagcctctctaagcgcgaagcgcactactcggcgcgcggcagccgga

SEQ ID NO: 11018 - DNA, 269 bp, Homo sapiens
  chr17:17399419-17399688
  hyper
gatagcagttcttggccgggatactcagctccgagtcgctcgggcacatcttcttgatcatcgcggccagtttcattgggcagaggggccgcgagggcgggcgcggggccgagagaagggcagagagcggctgagggtcgctggggtggcacgcggggtgagcggctggagggctctgctcgggctgggcgcggctcgggcttggggctccggctccgctcgggctgggctcgggctaggctgggctcggctggggttctcccaggatc

SEQ ID NO: 11019 - DNA, 1927 bp, Homo sapiens
  chr17:17685253-17687180
  hyper
ctcggggccccgggccggccgccccctttttgcggggggagagcaggagccgcctctcgcagccactctgcgcgcggggtgggagggagagagggaggcgaagggacgacagcgccgggctccccgcccccatcccacccggttccaatatttcgcagaaaggcacgcggctcctaatcggtcttttccaggctgagatttagccgtgcgatgcccgcgcaggggcgggggccgcgggccaggggaggcgctcagagtccggagccgccgagcgaggtgaggagcccgcgtcctcggctggtggagcgggcgggcgggcgcgcaaacccgagaggcagatatagaaaggggggcaggttaaaaataaccctctccggctgggaagctcgcgcgcgctctctcgcctcgttcggtgccagaggactccaggggaggtggcgttggggagggcagagcgggattccccctcctccgccgggcggggtgcccgcctgcgcgccgcggttgcacgtgtgcggggccgcgcgcccgggccccctctgcacccggtcggtgggtgccccctccccaggaccgggcgcatctggcagtggccccccgcccgcagccttgcgcggctggagggaagcgctccattattcattatttacgagcgttaataggtttgagccacgggggcggggggttgggggggcgacgaggacccagtggggaccgaagcattagaagaagggatagggagggagggggaagggcgggggcggggctgtgccgcggcctggaggaagaggtctcggcctggggcccggcgagccgggcgcacctctccgtcaggtttctccacaccgccggccgtcgaggctgctcagggcgccaagagggcagcacgggccttagattttgctctcggcctctgtccttcgcgtcctcgcccttaccgaggcgtggggagggagctgcggaggccgtacgccccgccctgcgcgccccttgccgccgccgcgtccccgcggcagccccggcctcatttatcatcatctttggtcaagtggagtgtgcaaggaacagctgcttcactcggctgacttcgagggcggctacgggagaatcagggagatgaatgatgggggctggtggcagccccccgcggtccccgcgcaggcgagagggaggcggggacgtccagggccgcctccgcctcatggcgagtgcagcgcccccttcctctctcctggcgcctgcagcgaccggggaccgggggaccggggcaccgaggaccgggcccgccccgggaggggactgggcgcggggacgggggggcgcccttcgccggcggagaactggcgggcgcgctgccggcagagcccgaggttgccgtgaccttgctggggtcagcgggctgggctgcggaggcggcggcgcggcgtctttggtgcgctttccggattggcgcagaggccgggaaacaaggcgggggcgggcgggggaacacaaatagaaggtgaaattttacctgcccctgagggagtcctgcggattttctccggcagcagcaggcgctctgcctttgtcttacacggctgaaacatctgttgcagaggggcggagaggccgcaacaacccccacacaccctgcgctgctccccgtccccctctgccccagccgggctgcaggactccaggcgccgcgttaaccctgctcgcgctggggcgcgcgcccgcactcgctgccgcagtccagcgcctcgcgtggggctcctcgcccccgccccggatctggtcctggccggggcgcccggtgacccccctccacctcgatggggtgctgaggtgtaggcggggggcgggggcggaaagggttaatggcctagtcgcagaccctaattgtcagagccggccccgcttcgtttcaattaccctaagtaga

SEQ ID NO: 11020 - DNA, 30 bp, Homo sapiens
  chr17:17687403-17687433
  hyper
cgtttctttaaacgccgccgtctcacaatt

SEQ ID NO: 11021 - DNA, 30 bp, Homo sapiens
  chr17:17726744-17726774
  hyper
gtagcccgcatgcccgcccaccccaggaga

SEQ ID NO: 11022 - DNA, 30 bp, Homo sapiens
  chr17:17740390-17740420
  hyper
ccaccttgagagagcgggggacccctgatc

SEQ ID NO: 11023 - DNA, 30 bp, Homo sapiens
  chr17:17991204-17991234
  hyper
cctggagcaccaggcgcccacgagaacgct

SEQ ID NO: 11024 - DNA, 30 bp, Homo sapiens
  chr17:18266978-18267008
  hyper
cgggccggaggccgcgtagtgcagctgcgc

SEQ ID NO: 11025 - DNA, 30 bp, Homo sapiens
  chr17:18761716-18761746
  hyper
cactggggcgatctcgcgcccgcggccctt

SEQ ID NO: 11026 - DNA, 918 bp, Homo sapiens
  chr17:18907420-18908338
  hyper
agctggggcaccgcgcgctcgggggcctctccgcggcctctgcttctctgcccatgagcaatctgcgggaaagacctgatgagcccggctcggcggggagggcgggccgcgcggggaggggcggcgggggcggggccgggaactcaggtgggcgtgggaaggacggggctggggctggggctgggaagatgaggtgggggcactggactgggatgggaagaaagtaagggatcggaacagcggtgagggagcggtgggccacgtcccagggctcagcgtgcctctacgtgcagggaacccatatcccagatttccggagctgcctgaagtcctcgcaacttctgagggaaactagggcagccggggaacttcccagtagcttcttagagtgggaggcggccccggcacagaggcgccccgcaaaccgagggcttccgggtaagggaggggtcttaaaatttccgggtgccggcaacccaggaggcctgcccggaggaggctggggctctgggaggggtccaggagacccagaaacgcggttgcggggcggcgacgccccgcgagacccgggatccggggggcgcggccgggacttgcttaccgagcgggcgctggcggagcggggcgcacacgcggcggctgcggcggcggcgcgaggctgggcgggggcgcgccggtgactcagggccgccccgcttaccccgccgccgccacctgcggtcacgtgccgcccggggcggggccggaagctgattcacccctcgacagacagacagacctggggcggacgcactgcccacggtcccctggtgcccgaattccgaaaatatcagaggcctaagcccaagagctcctggaacacccatcccagagagggacagtgttctccctgaggtcacacagcgggtcaacagcctt

SEQ ID NO: 11027 - DNA, 322 bp, Homo sapiens
  chr17:19140729-19141051
  hyper
tcaaactgagccagacgcggcggtggcggcggctccgcgggctacggtcgctcccgcctctcgagcgctgccggtggccgcagcggcgcacccacgccggcccggaggagcagaggtgagccacagcccgtggggctccaaggccagagcgagtccccggggcgaggaccctccccctctccagggcgcggacgcccccagagcacaggctcccctacctcaccagccccgccagggcatgcgcccctgccgccccgctggtccctacgccaggctctgggggatccccttctttccaaccaggccccgccccacggactgg

SEQ ID NO: 11028 - DNA, 31 bp, Homo sapiens
  chr17:19265421-19265452
  hyper
tctggggattcagaacgcgggacagtaactc

SEQ ID NO: 11029 - DNA, 30 bp, Homo sapiens
  chr17:19281497-19281527
  hyper
gagcttcatggggacgcgcgcgctacgtgc

SEQ ID NO: 11030 - DNA, 237 bp, Homo sapiens
  chr17:19282088-19282325
  hyper
gcgcttctgcccttgtcggtttaggaaactgggaagttccctggtcctgctccccagcccgcagaggggacactgaggcccacggtaggtggtcctctcctcacccgagtctccacacagacaccatggccgagcctctgaaggaggaagacggcgaggacggctctgcggagccccccgggcccgtgaaggccgaacccgcccacaccgctgcctctgtagcggccaagaacctgg

SEQ ID NO: 11031 - DNA, 31 bp, Homo sapiens
  chr17:19391541-19391572
  hyper
attcaacactgctcctcgggctgagcagggc

SEQ ID NO: 11032 - DNA, 30 bp, Homo sapiens
  chr17:19436885-19436915
  hyper
tgagtcctggcgtccgagacgtggaggacc

SEQ ID NO: 11033 - DNA, 30 bp, Homo sapiens
  chr17:19437914-19437944
  hyper
tggactcagagctgcgaaatgatttcttca

SEQ ID NO: 11034 - DNA, 167 bp, Homo sapiens
  chr17:20059179-20059346
  hyper
atacagatgaggtgggcggacagtatgcagatgacgggggcgggccgcgcctggcgggcggtgtgcagttgaggtggtccggcaggatgcagatgaagggggcgggccgcgagggcgggcttgatgcagatgagggggcggggcccacgggcgcgggagagcagcgg

SEQ ID NO: 11035 - DNA, 30 bp, Homo sapiens
  chr17:20945540-20945570
  hyper
ggaacgcccgggaccgcccaccgaagtccc

SEQ ID NO: 11036 - DNA, 30 bp, Homo sapiens
  chr17:21030039-21030069
  hyper
ccaactgtgttcttcgccggaagtccacgg

SEQ ID NO: 11037 - DNA, 213 bp, Homo sapiens
  chr17:21189751-21189964
  hyper
ctatggtggctggagccgggtgggctggataattatgccttacataagtgggaggccggatccctgaccattgcccaaccactgtgagtaactcgggaggcactcgacgggggaggtgtctggggagggacttgcactgcacagacctcgtggagcttgggaaccaggaaatcagacacttctccactctggagagctcggggaagggtagga

SEQ ID NO: 11038 - DNA, 30 bp, Homo sapiens
  chr17:25659594-25659624
  hyper
gaccagtgatttggcgacctgcccaggcag

SEQ ID NO: 11039 - DNA, 30 bp, Homo sapiens
  chr17:25659905-25659935
  hyper
tggctctgcagtcgcggctctgcagtcgcc

SEQ ID NO: 11040 - DNA, 202 bp, Homo sapiens
  chr17:26554550-26554752
  hyper
acccctggggctctccccctgcggccccgctccaccgggggcgtggctagatctgaccgcgcccttccaggccccgccctcaggtatgggaaactaggccgcccggtcgcgcgcctctccaaaacgttcttcccagactgcgaggaccgcctcggcaggtggcggtaaaagcgcccccatcaagtcacataacatcctgcct

SEQ ID NO: 11041 - DNA, 247 bp, Homo sapiens
  chr17:26554791-26555038
  hyper
cgacgtctcccaggcttgcctccccggatcggattcctttcccttcgatcccgcaggccggaggcgcagacctgtggtgaggacacccgaggcctcctgggagacctgcagaccacgcccacctcatttacatgttcactcccgaccctggaaacccggatttcgcctccggacagcggcgtctgggcagggttcgggtactgcagtcccgcgtctggatgcccccgccccctgagctgcagggctg

SEQ ID NO: 11042 - DNA, 145 bp, Homo sapiens
  chr17:26904031-26904176
  hyper
ggggcggcgaggtggagtgagcgccccgccaggcatccgtggctgttagggactgccctcccacctcggggagcctggccatgaccttgcgttcatttctgccacaatccctttaccacgtgccgggcacttgctggatgctggg

SEQ ID NO: 11043 - DNA, 31 bp, Homo sapiens
  chr17:26925397-26925428
  hyper
tgtaaatggatgtcaccgacgtagaagactt

SEQ ID NO: 11044 - DNA, 332 bp, Homo sapiens
  chr17:26925693-26926025
  hyper
ctgggttctgccagcccgcccctcctccctccctaagaagcccaaaatgcgattagaagagtacgctcgcaccctagtcgcgcaggagcagcaaggcgaacaaagactccacaagcccccaaccccgggctcgacccaactttccaggacagtagacacggccggtgcccccgcgacagcagcccggcccagttctctccgccagagatctcccgcttaccgtctggggcgaaggcgacaggctgaggctcagttttttcactcgccacatcttcaaccagaaggcaggcctatcacgtctcagaccaagtcgaggacgccatgttcacccg

SEQ ID NO: 11045 - DNA, 342 bp, Homo sapiens
  chr17:26926083-26926425
  hyper
cgctcgggggtagagcccggggggcggggcccgcgttgaccacgcccccggccctgcctgcccctccgttgtcgagcgttttccgctgacggagccctcacctcagacaccggcggtagggctggatgcgggcccggcccaggaccggtcttctgtcctcacaccggggaggaccacgcaggtagctggagagtccaggagtccatccctcctgcttccagcggacctcctcacatccatggtgttcatatccaagttgtctccgtggatggagaagaggaatcctctccctaggtctccctcagtcctctccagccgcagccttgacgggaaagagccggc

SEQ ID NO: 11046 - DNA, 57 bp, Homo sapiens
  chr17:26926826-26926883
  hyper
ggatctcctatgcacgggaaacctgttgaaggtaggacagccgaaaggtcagtattc

SEQ ID NO: 11047 - DNA, 196 bp, Homo sapiens
  chr17:27038489-27038685
  hyper
ccgtctccctcgtcggtttgccggcttcccgcgtgcgccgctcggggtctgcgagccgggccgcgccctctgcccagcccctgccccgcccctcttaccgcggcatctgctctcatcccacgagcgggccttgggctcggtcttttccttagtccatctttcaattgtgagcgtcgtcctgacccacatcgctctc

SEQ ID NO: 11048 - DNA, 33 bp, Homo sapiens
  chr17:27038906-27038939
  hyper
ggggcctccggcgcctcccaggcccctctttat

SEQ ID NO: 11049 - DNA, 14 bp, Homo sapiens
  chr17:27044404-27044418
  hyper
gccacggggaccct

SEQ ID NO: 11050 - DNA, 162 bp, Homo sapiens
  chr17:27044581-27044743
  hyper
cgtctggtgggggccgggcccgcgcagaccctacgattacgcggggccggatagttcctacgattacgcggggccggatggttcctacaataacccggggccgcggagacccgacgtcatctcggggctgaggctgccctaccattacagagcggcccgggg

SEQ ID NO: 11051 - DNA, 30 bp, Homo sapiens
  chr17:27070933-27070963
  hyper
cggggccgcgagggcgcgcattaggaccgc

SEQ ID NO: 11052 - DNA, 30 bp, Homo sapiens
  chr17:27276469-27276499
  hyper
gttcccccgagagacgtttgcaaatcatat

SEQ ID NO: 11053 - DNA, 30 bp, Homo sapiens
  chr17:27278795-27278825
  hyper
ctgttctgcgcaggcgtgttgggggtgctc

SEQ ID NO: 11054 - DNA, 30 bp, Homo sapiens
  chr17:27506955-27506985
  hyper
agtccccccaccctcgaggctgcagccccc

SEQ ID NO: 11055 - DNA, 54 bp, Homo sapiens
  chr17:27893140-27893194
  hyper
gctcgtagggccagggcaggccggcctcgaaccactctcggcagcgcagcacgg

SEQ ID NO: 11056 - DNA, 309 bp, Homo sapiens
  chr17:27893344-27893653
  hyper
cggacgggtccccgaaaggctgcagccgggggctgaccagtgggcaaccgtggtggccgcggcgatggaagatgaccgggtagtagccgcgctccagggcgagcaagcaaaggccgagcacgttgcgggtgaggcgaccccacgcattggggatcaccagaagcaccgcaggaaggcccccggcgctggtgatccggcggccccgaacacaaggtcctaccacccagtccagggccactagcccatcgtccgccaactgcaggtactcccgggccagctcaggcccaggcgctacgggcaggacgaagt

SEQ ID NO: 11057 - DNA, 72 bp, Homo sapiens
  chr17:27940265-27940337
  hyper
agagggtggtggccgcgggccgccctggagcctccacgccgtgtcccggccccggccggtgggtgggtgcgc

SEQ ID NO: 11058 - DNA, 311 bp, Homo sapiens
  chr17:27940590-27940901
  hyper
cgagcagtagcgccccctgccgggaccctcgccagcgccacgcgcgccacgcccagggccaggagccagacaaaccccggcctgcgcgcctgcagagcggcggctggagactggagccaccgcctcgcgggtgcagcagcacagcaggcacggttcggggagggattcggcatggccgcggggtaccttcccaggccagggccctggaggcaactggcacggcctggtccccctgctttgctgtattctgattccccaacccgctcccctgggctcagatctgtcctgtcctagggcggagccaggcggtc

SEQ ID NO: 11059 - DNA, 620 bp, Homo sapiens
  chr17:27942739-27943359
  hyper
gcgcgcggggctagtccgtgccgtccaccagctcgcacagcatgttctccagagccgtgatgcgctgctcctgggcctgcacccgctcgcggagggccttgatctcttccagcagcgtctccagggtgtgctgctgctggggcggaggacagagaggccgtgtcgtataggggcggttgggggagatgtagattgggccagagtgcagcagggccgatcttaccgacaagggggcgtcgctggccgactggctgcggcgggggccggagggcgggcgcacgtccaggatgttgcgcttcgtgacccggagctcgcggtgcttggggggcacatagccgtccctcagcgaaatgagcacgggttcggcgtcctggccggatagccattcgtccgcttctagggccggctccgggcctggcgtatccgggtacagatcgtcctggaagaggtctgactgcgggggtgggtggacaggaggacttgcgtgagagggtgcggggcttgctccgctcccttccgcctcgtagccctgcccaacccttctcccggcccctcaccttgcggggcacagtcatgatgataggttcacactttctttcgtgtagcttgtagaacctata

SEQ ID NO: 11060 - DNA, 31 bp, Homo sapiens
  chr17:28088116-28088147
  hyper
gagcaaactttctgagcgttcgcggaggcgg

SEQ ID NO: 11061 - DNA, 56 bp, Homo sapiens
  chr17:28089159-28089215
  hyper
aagtgctgggattacaggcgtgagccagggctcccggcaagattttttttttttaa

SEQ ID NO: 11062 - DNA, 566 bp, Homo sapiens
  chr17:28562556-28563122
  hyper
tccccctccccgaggcggggaagaaggtctggaaagaaacgtgggttcgaggcggagaggaaaagcggacccacctgccaggctgcgcggggaggctggtcccgggctgggcaggcgggctggcctcgcgccctcgaggcacccggcggcgctggctgtgcggaggggcgccggcgcggccgtatttgtacccgcgggccctcacatggtctgatctctagatagccgccgccaaagagctcttgaagaatttttgcgtcactttgaggcgaataaacttaatgcttccccgcggccgcggctccgcgctcccgctggatggggttgcgctcgccagggaggggccgcgctacggggcggggtgcgcgcccgaccccagagccaggaggggagggacccccgacacacacacacgctcgcagggaggagcggagcgcggagcagccggcagggcagggccgagcgaggaatcctgactttcctgctctttaactttgcgggaggggggaggctgcacaaaggagcaggtgtgcgcctcccctgccgccccgcgcccacaggacggc

SEQ ID NO: 11063 - DNA, 638 bp, Homo sapiens
  chr17:29297919-29298557
  hyper
taagtctgttttcagcaggatcggaggaaggagacggggtggcgccaaggaaggaggagaaaaggcggccgagaaaaggaggagggcaaggggaagaggaagggcgagggaggagcctgaggagactcgcccggctcaaccccgacgtccgcgccccggccgcctgttggccatggcgggcctgggcctgggctccgccgttcccgtgtggctggccgaggacgacctcggctgcatcatctgccaggggctgctggactggcccgccacgctgccctgcggccacagcttctgccgccactgcctggaggccctgtggggcgcccgcgacgcccgccgctgggcctgccccacttgccgccagggcgccgcgcagcagccgcacctgcggaagaacacgctactgcaggacctggccgacaagtaccgccgcgccgcacgcgagatacaggcgggctccgaccctgcccactgcccctgcccgggctccagttccctctccagcgcggccgcgaggccccggcgccgcccggaactgcagcgggtagggaggccgggcccgcagctcccctggctcccccgggctgcccgccgcctgaccctttcccatgtggctcgaacccctttcctcagccgtt

SEQ ID NO: 11064 - DNA, 444 bp, Homo sapiens
  chr17:29421943-29422387
  hyper
caatctctagctcgctcgcgctccctctccccgggccgtggaaaggatcccacttccggtggggtgtcatggcggcgtctcggactgtgatggctgtggggagacggcgctagtggggagagcgaccaagaggccccctcccctccccgggtccccttcccctatccccctccccccagcctccttgccaacgccccctttccctctccccctcccgctcggcgctgaccccccatccccacccccgtgggaacactgggagcctgcactccacagaccctctccttgcctcttccctcacctcagcctccgctccccgccctcttcccggcccagggcgccggcccacccttccctccgccgccccccggccgcggggaggacatggccgcgcacaggccggtggaatgggtccaggccgtggtcagccgcttcgacgagcag

SEQ ID NO: 11065 - DNA, 30 bp, Homo sapiens
  chr17:29422761-29422791
  hyper
gcagaggtgggtaacgtttaggggttctct

SEQ ID NO: 11066 - DNA, 145 bp, Homo sapiens
  chr17:29482999-29483144
  hyper
gcttccaataaaaacaggacagcagaacacacataccaaagtcagtactgagcacaacaaggaatgtctaatcaatatttccaaatacaagttttctttggttataagcggcctcactactattttaaagaatgttaacaatatg

SEQ ID NO: 11067 - DNA, 92 bp, Homo sapiens
  chr17:29486026-29486118
  hyper
gagaatatttggagaagctgctgaaaaaaatttatatctctctcagttgattatattggatacactggaaaaatgtcttgctggggtaagta

SEQ ID NO: 11068 - DNA, 192 bp, Homo sapiens
  chr17:29490202-29490394
  hyper
gcaaccaaaggacacaatgagattagatgaaacgatgctggtcaaacagttgctgccagaaatctgccattttcttcacacctgtcgtgaaggaaaccagcatgcagctgaacttcggaattctgcctctggggttttattttctctcagctgcaacaacttcaatgcagtctttagtcgcatttctaccag

SEQ ID NO: 11069 - DNA, 110 bp, Homo sapiens
  chr17:29496907-29497017
  hyper
ggttacaggaattaactgtttgttcagaagacaatgttgatgttcatgatatagaattgttacagtatatcaatgtggattgtgcaaaattaaaacgactcctgaagggt

SEQ ID NO: 11070 - DNA, 69 bp, Homo sapiens
  chr17:29508438-29508507
  hyper
gaaacagcatttaaatttaaagccctaaagaaggttgcgcagttagcagttataaatagcctggaaaag

SEQ ID NO: 11071 - DNA, 89 bp, Homo sapiens
  chr17:29508714-29508803
  hyper
tctttatttataggcattttggaactgggtagaaaattatccagatgaatttacaaaactgtaccagatcccacagactgatatggctg

SEQ ID NO: 11072 - DNA, 164 bp, Homo sapiens
  chr17:29509519-29509683
  hyper
atgcagaatgtgcagaaaagctatttgacttggtggatggttttgctgaaagcaccaaacgtaaagcagcagtttggccactacaaatcattctccttatcttgtgtccagaaataatccaggatatatccaaagacgtggttgatgaaaacaacatgaataag

SEQ ID NO: 11073 - DNA, 175 bp, Homo sapiens
  chr17:29527438-29527613
  hyper
gaagttatttctggacagtctacgaaaagctcttgctggccatggaggaagtaggcagctgacagaaagtgctgcaattgcctgtgtcaaactgtgtaaagcaagtacttacatcaattgggaagataactctgtcattttcctacttgttcagtccatggtggttgatcttaag

SEQ ID NO: 11074 - DNA, 124 bp, Homo sapiens
  chr17:29528053-29528177
  hyper
gaacctgctttttaatccaagtaagccattctcaagaggcagtcagcctgcagatgtggatctaatgattgactgccttgtttcttgctttcgtataagccctcacaacaaccaacactttaag

SEQ ID NO: 11075 - DNA, 76 bp, Homo sapiens
  chr17:29528427-29528503
  hyper
gatctgcctggctcagaattcaccttctacatttcactatgtgctggtaaattcactccatcgaatcatcaccaat

SEQ ID NO: 11076 - DNA, 141 bp, Homo sapiens
  chr17:29533248-29533389
  hyper
tttctctagtccgcattggattggtggcctaagattgatgctgtgtattgtcactcggttgaacttcgaaatatgtttggtgaaacacttcataaagcagtgcaaggttgtggagcacacccagcaatacgaatggcaccg

SEQ ID NO: 11077 - DNA, 136 bp, Homo sapiens
  chr17:29541467-29541603
  hyper
gagtcttacatttaaagaaaaagtaacaagccttaaatttaaagaaaaacctacagacctggagacaagaagctataagtatcttctcttgtccatggtgaaactaattcatgcagatccaaagctcttgctttgt

SEQ ID NO: 11078 - DNA, 137 bp, Homo sapiens
  chr17:29546008-29546145
  hyper
ttttttccttgcagaatccaagaaaacaggggcccgaaacccaaggcagtacagcagaattaattacagggctcgtccaactggtccctcagtcacacatgccagagattgctcaggaagcaatggaggtaagggga

SEQ ID NO: 11079 - DNA, 81 bp, Homo sapiens
  chr17:29548866-29548947
  hyper
ggctctgctggttcttcatcagttagatagcattgatttgtggaatcctgatgctcctgtagaaacattttgggagattag

SEQ ID NO: 11080 - DNA, 125 bp, Homo sapiens
  chr17:29550460-29550585
  hyper
gctcacaaatgcttttttacatctgcaagaaattaactagtcatcaaatgcttagtagcacagaaattctcaagtggttgcgggaaatattgatctgcaggaataaatttcttcttaaaaataag

SEQ ID NO: 11081 - DNA, 157 bp, Homo sapiens
  chr17:29552111-29552268
  hyper
gcaggcagatagaagttcctgtcactttctccttttttacggggtaggatgtgatattccttctagtggaaataccagtcaaatgtccatggatcatgaagaattactacgtactcctggagcctctctccggaagggaaaagggaactcctctatg

SEQ ID NO: 11082 - DNA, 251 bp, Homo sapiens
  chr17:29553451-29553702
  hyper
ggatagtgcagcaggatgcagcggaacccccccgatttgccgacaagcccagaccaaactagaagtggccctgtacatgtttctgtggaaccctgacactgaagctgttctggttgccatgtcctgtttccgccacctctgtgaggaagcagatatccggtgtggggtggatgaagtgtcagtgcataacctcttgcccaactataacacattcatggagtttgcctctgtcagcaatatgatgtcaacag

SEQ ID NO: 11083 - DNA, 75 bp, Homo sapiens
  chr17:29554234-29554309
  hyper
ggaagagcagcacttcagaaaagagtgatggcactgctgaggcgcattgagcatcccactgcaggaaacactgag

SEQ ID NO: 11084 - DNA, 85 bp, Homo sapiens
  chr17:29554539-29554624
  hyper
ggcttgggaagatacacatgcaaaatgggaacaagcaacaaagctaatccttaactatccaaaagccaaaatggaagatggccag

SEQ ID NO: 11085 - DNA, 442 bp, Homo sapiens
  chr17:29556041-29556483
  hyper
ggctgctgaaagccttcacaagaccattgttaagaggcgaatgtcccatgtgagtggaggaggatccatagatttgtctgacacagactccctacaggaatggatcaacatgactggcttcctttgtgcccttgggggagtgtgcctccagcagagaagcaattctggcctggcaacctatagcccacccatgggtccagtcagtgaacgtaagggttctatgatttcagtgatgtcttcagagggaaacgcagatacacctgtcagcaaatttatggatcggctgttgtccttaatggtgtgtaaccatgagaaagtgggacttcaaatacggaccaatgttaaggatctggtgggtctagaattgagtcctgctctgtatccaatgctatttaacaaattgaagaataccatcagcaagttttttgactcccaaggacag

SEQ ID NO: 11086 - DNA, 141 bp, Homo sapiens
  chr17:29556851-29556992
  hyper
ggttttattgactgataccaatactcaatttgtagaacaaaccatagctataatgaagaacttgctagataatcatactgaaggcagctctgaacatctagggcaagctagcattgaaacaatgatgttaaatctggtcag

SEQ ID NO: 11087 - DNA, 124 bp, Homo sapiens
  chr17:29557276-29557400
  hyper
ggtatgttcgtgtgcttgggaatatggtccatgcaattcaaataaaaacgaaactgtgtcaattagttgaagtaatgatggcaaggagagatgacctctcattttgccaagagatgaaatttag

SEQ ID NO: 11088 - DNA, 85 bp, Homo sapiens
  chr17:29557858-29557943
  hyper
ggaataagatggtagaatacctgacagactgggttatgggaacatcaaaccaagcagcagatgatgatgtaaaatgtcttacaag

SEQ ID NO: 11089 - DNA, 118 bp, Homo sapiens
  chr17:29559089-29559207
  hyper
gagatttggaccaggcaagcatggaagcagtagtttcacttctagctggtctccctctgcagcctgaagaaggagatggtgtggaattgatggaagccaaatcacagttatttcttaa

SEQ ID NO: 11090 - DNA, 515 bp, Homo sapiens
  chr17:29559716-29560231
  hyper
gatacttcacattatttatgaaccttttgaatgactgcagtgaagttgaagatgaaagtgcgcaaacaggtggcaggaaacgtggcatgtctcggaggctggcatcactgaggcactgtacggtccttgcaatgtcaaacttactcaatgccaacgtagacagtggtctcatgcactccataggtgagatcaaatgaaagtttcatatagaaatacaaaacctagagaactggcatgtaagagaagcaaaaattacttcagcaaggccatgttagtaaatttgcatctgtttgtccacattaggcttaggttaccacaaggatctccagacaagagctacatttatggaagttctgacaaaaatccttcaacaaggcacagaatttgacacacttgcagaaacagtattggctgatcggtttgagagattggtggaactggtcacaatgatgggtgatcaaggagaactccctatagcgatggctctggccaatgtggttccttgttctcagtgg

SEQ ID NO: 11091 - DNA, 412 bp, Homo sapiens
  chr17:29562627-29563039
  hyper
ggatgaactagctcgagttctggttactctgtttgattctcggcatttactctaccaactgctctggaacatgttttctaaagaagtagaattggcagactccatgcagactctcttccgaggcaacagcttggccagtaaaataatgacattctgtttcaaggtttgtatcattcattttgtgtgtatgtgtgtgctgaggtatgtcaagtaatgattatgtacagaatgtgcagggctgattgtcttcttttaaggtaaaatatatggagcaggtataataaactcctattcgtgcatttctgtaggtatatggtgctacctatctacaaaaactcctggatcctttattacgaattgtgatcacatcctctgattggcaacatgttagctttgaagtggatcctaccag

SEQ ID NO: 11092 - DNA, 137 bp, Homo sapiens
  chr17:29576000-29576137
  hyper
ggttagaaccatcagagagccttgaggaaaaccagcggaacctccttcagatgactgaaaagttcttccatgccatcatcagttcctcctcagaattcccccctcaacttcgaagtgtgtgccactgtttataccag

SEQ ID NO: 11093 - DNA, 64 bp, Homo sapiens
  chr17:29579954-29580018
  hyper
ggcaacttgccactccctactgaataaagctacagtaaaagaaaaaaaggaaaacaaaaaatca

SEQ ID NO: 11094 - DNA, 160 bp, Homo sapiens
  chr17:29585360-29585520
  hyper
ggtggttagccagcgtttccctcagaacagcatcggtgcagtaggaagtgccatgttcctcagatttatcaatcctgccattgtctcaccgtatgaagcagggattttagataaaaagccaccacctagaatcgaaaggggcttgaagttaatgtcaaag

SEQ ID NO: 11095 - DNA, 99 bp, Homo sapiens
  chr17:29586048-29586147
  hyper
gatacttcagagtattgccaatcatgttctcttcacaaaagaagaacatatgcggcctttcaatgattttgtgaaaagcaactttgatgcagcacgcag

SEQ ID NO: 11096 - DNA, 148 bp, Homo sapiens
  chr17:29587385-29587533
  hyper
ggtttttccttgatatagcatctgattgtcctacaagtgatgcagtaaatcatagtctttccttcataagtgacggcaatgtgcttgctttacatcgtctactctggaacaatcaggagaaaattgggcagtatctttccagcaacag

SEQ ID NO: 11097 - DNA, 148 bp, Homo sapiens
  chr17:29588727-29588875
  hyper
gggatcataaagctgttggaagacgaccttttgataagatggcaacacttcttgcatacctgggtcctccagagcacaaacctgtggcagatacacactggtccagccttaaccttaccagttcaaagtttgaggaatttatgactag

SEQ ID NO: 11098 - DNA, 112 bp, Homo sapiens
  chr17:29592245-29592357
  hyper
ggcatcaggtacatgaaaaagaagaattcaaggctttgaaaacgttaagtattttctaccaagctgggacttccaaagctgggaatcctattttttattatgttgcacggag

SEQ ID NO: 11099 - DNA, 434 bp, Homo sapiens
  chr17:29652836-29653270
  hyper
ggttcaaaactggtcaaatcaatggtgatttgctgatataccatgtcttactgactttaaagccatattatgcaaagccatatgaaattgtagtggaccttacccataccgggcctagcaatcgctttaaaacagactttctctctaagtggtttgttgtttttcctggctttgcttacgacaacgtctccgcagtctatatctataactgtaactcctgggtcagggagtacaccaagtatcatgagcggctgctgactggcctcaaaggtagcaaaaggcttgttttcatagactgtcctgggaaactggctgagcacatagagcatgaacaacagaaactacctgctgccaccttggctttagaagaggacctgaaggtattccacaatgctctcaagctagctcacaaagacaccaaagtttctattaaa

SEQ ID NO: 11100 - DNA, 342 bp, Homo sapiens
  chr17:29654515-29654857
  hyper
ggttggttctactgctgtccaagtaacttcagcagagcgaacaaaagtcctagggcaatcagtctttctaaatgacatttattatgcttcggaaattgaagaaatctgcctagtagatgagaaccagttcaccttaaccattgcaaaccagggcacgccgctcaccttcatgcaccaggagtgtgaagccattgtccagtctatcattcatatccggacccgctgggaactgtcacagcccgactctatcccccaacacaccaagattcggccaaaagatgtccctgggacactgctcaatatcgcattacttaatttaggcagttctgacccgagtttacg

SEQ ID NO: 11101 - DNA, 204 bp, Homo sapiens
  chr17:29657312-29657516
  hyper
ggtcagctgcctataatcttctgtgtgccttaacttgtacctttaatttaaaaatcgagggccagttactagagacatcaggtttatgtatccctgccaacaacaccctctttattgtctctattagtaagacactggcagccaatgagccacacctcacgttagaatttttggaagagtgtatttctggatttagcaaatcta

SEQ ID NO: 11102 - DNA, 195 bp, Homo sapiens
  chr17:29661854-29662049
  hyper
ggtattgaattgaaacacctttgtttggaatacatgactccatggctgtcaaatctagttcgtttttgcaagcataatgatgatgccaaacgacaaagagttactgctattcttgacaagctgataacaatgaccatcaatgaaaaacagatgtacccatctattcaagcaaaaatatggggaagccttgggcag

SEQ ID NO: 11103 - DNA, 583 bp, Homo sapiens
  chr17:29663349-29663932
  hyper
gattacagatctgcttgatgttgtactagacagtttcatcaaaaccagtgcaacaggtggcttgggatcaataaaagctgaggtgatggcagatactgctgtagctttggcttctggaaatgtgaaattggtttcaagcaaggtaatcacttttcttttgccttctgtactatagcatatctgttttatcatcaggaggttttttgttttgtaattacttttaaattaaactgaacttttttgtgctaaaactttgagtcccatgtttttttttttaaaaaaaaaaatcctgcttctttacaggttattggaaggatgtgcaaaataattgacaagacatgcttatctccaactcctactttagaacaacatcttatgtgggatgatattgctattttagcacgctacatgctgatgctgtccttcaacaattcccttgatgtggcagctcatcttccctacctcttccacgttgttactttcttagtagccacaggtccgctctcccttagagcttccacacatggactggtcattaatatcattcactctctgtgtacttgttcacagcttcattttagtg

SEQ ID NO: 11104 - DNA, 216 bp, Homo sapiens
  chr17:29664384-29664600
  hyper
gaagagaccaagcaagttttgagactcagtctgacagagttctcattacccaaattttacttgctgtttggcattagcaaagtcaagtcagctgctgtcattgccttccgttccagttaccgggacaggtcattctctcctggctcctatgagagagagacttttgctttgacatccttggaaacagtcacagaagctttgttggagatcatggag

SEQ ID NO: 11105 - DNA, 322 bp, Homo sapiens
  chr17:29664835-29665157
  hyper
ggcatgcatgagagatattccaacgtgcaagtggctggaccagtggacagaactagctcaaaggtatgtcctaaattaaatataagttgtaaaaatatgcatattgttgaaaatacagctattactgtatgatcaatgttataatttattatttagtatatataaacacaaaggtttttataagttctgtggatcttttaattgcagatttgcattccaatataatccatccctgcaaccaagagctcttgttgtctttgggtgtattagcaaacgagtgtctcatgggcagataaagcagataatccgtattcttagcaag

SEQ ID NO: 11106 - DNA, 103 bp, Homo sapiens
  chr17:29665720-29665823
  hyper
ggcacttgagagttgcttaaaaggacctgacacttacaacagtcaagttctgatagaagctacagtaatagcactaaccaaattacagccacttcttaataag

SEQ ID NO: 11107 - DNA, 142 bp, Homo sapiens
  chr17:29667521-29667663
  hyper
ggactcgcctctgcacaaagccctcttttgggtagctgtggctgtgctgcagcttgatgaggtcaacttgtattcagcaggtaccgcacttcttgaacaaaacctgcatactttagatagtctccgtatattcaatgacaag

SEQ ID NO: 11108 - DNA, 128 bp, Homo sapiens
  chr17:29670025-29670153
  hyper
gagtccagaggaagtatttatggcaatccggaatcctctggagtggcactgcaagcaaatggatcattttgttggactcaatttcaactctaactttaactttgcattggttggacaccttttaaaag

SEQ ID NO: 11109 - DNA, 142 bp, Homo sapiens
  chr17:29676129-29676271
  hyper
ttttgtagggtacaggcatccttcacctgctattgttgcaagaacagtcagaattttacatacactactaactctggttaacaaacacagaaattgtgacaaatttgaagtgaatacacagagcgtggcctacttagcaggt

SEQ ID NO: 11110 - DNA, 143 bp, Homo sapiens
  chr17:29677199-29677342
  hyper
gctttacttacagtgtctgaagaagttcgaagtcgctgcagcctaaaacatagaaagtcacttcttcttactgatatttcaatggaaaatgttcctatggatacatatcccattcatcatggtgacccttcctataggtaagt

SEQ ID NO: 11111 - DNA, 159 bp, Homo sapiens
  chr17:29679273-29679432
  hyper
ggacactaaaggagactcagccatggtcctctcccaaaggttctgaaggataccttgcagccacctatccaactgtcggccagaccagtccccgagccaggaaatccatgagcctggacatggggcaaccttctcaggccaacactaagaagttgcttg

SEQ ID NO: 11112 - DNA, 124 bp, Homo sapiens
  chr17:29683476-29683600
  hyper
ggaacaaggaaaagttttgatcacttgatatcagacacaaaggctcctaaaaggcaagaaatggaatcagggatcacaacaccccccaaaatgaggagagtagcagaaactgattatgaaatgg

SEQ ID NO: 11113 - DNA, 411 bp, Homo sapiens
  chr17:29683976-29684387
  hyper
gaaactcagaggatttcctcatcacaacagcacccacatttacgtaaagtttcagtgtctgaatcaaatgttctcttggatgaagaagtacttactgatccgaagatccaggcgctgcttcttactgttctagtaaggatttcccctttttgagtcccccaccctcaaatttttattccagtctacttttaggaggcccttaaatattaaaaacatgaataggatacagtcttctacttctcacccaaacagataacaattcagccacaaagtaaaaatgttgtgtgtttacttttttgcatcttggcaggctacactggtaaaatataccacagatgagtttgatcaacgaattctttatgaatacttagcagaggccagtgttgtgtttcccaaagtctttcctgttgt

SEQ ID NO: 11114 - DNA, 144 bp, Homo sapiens
  chr17:29685496-29685640
  hyper
ggcataatttgttggactctaagatcaacaccctgttatcattgtgccaagatccaaatttgttaaatccaatccatggaattgtgcagagtgtggtgtaccatgaagaatccccaccacaataccaaacatcttacctgcaaa

SEQ ID NO: 11115 - DNA, 48 bp, Homo sapiens
  chr17:29685985-29686033
  hyper
ggttttggttttaatggcttgtggcggtttgcaggaccgttttcaaag

SEQ ID NO: 11116 - DNA, 218 bp, Homo sapiens
  chr17:29687503-29687721
  hyper
gcaaacacaaattccagactatgctgagcttattgttaagtttcttgatgccttgattgacacgtacctgcctggaattgatgaagaaaccagtgaagaatccctcctgactcccacatctccttaccctcctgcactgcagagccagcttagtatcactgccaaccttaacctttctaattccatgacctcacttgcaacttcccagcattccccag

SEQ ID NO: 11117 - DNA, 3666 bp, Homo sapiens
  chr17:29701029-29704695
  hyper
ggaatcgacaaggagaacgttgaactctcccctaccactggccactgtaacagtggacgaactcgccacggatccgcaagccaagtgcagaagcaaagaagcgctggcagtttcaaacgtaatagcattaagaagatcgtgtgaagcttgcttgctttcttttttaaaatcaacttaacatgggctcttcactagtgaccccttccctgtccttgccctttccccccatgttgtaatgctgcacttcctgttttataatgaacccatccggtttgccatgttgccagatgatcaactcttcgaagccttgcctaaatttaatgctgccttttctttaactttttttcttctacttttggcgtgtatctggtatatgtaagtgttcagaacaactgcaaagaaagtgggaggtcaggaaacttttaactgagaaatctcaattgtaagagaggatgaattcttgaatactgctactactggccagtgatgaaagccatttgcacagagctctgccttctgtggttttcccttcttcatcctacagagtaaagtgttagtcctatttatacatttttcaagatacaagtttatgagagaaatagtattataaccccagtatgtttaatcttttagctgtggactttttttttaaccgtacaaaactgaaagaaccatagaggtcaagcctcagtgacttgacaccataaagccacagacaaggtacttgggggggagggcagggaaatttcatattttatagtggattcttaagaaatactaacacttgagtattagcaataattacaggaaaataagtgcgaccacatatatcttaacattactgaattaaaactatggcttctaagtccttatccaaactcagtcatccaaactagtttatttttttctccagttgattatcttttaatttttaattttgctaaaggtggtttttttgtgttttgttttttgtaaaccaaaactatactaagtatagtaattatatatatatatatattttttcccctccccctcttctttcctaactaattctgagcagggtaatcagtgaacaaagtgttgaaaattgttcccagaaggtaattttcatagatgtttgcattagctccatagcaaaatggaatggtacgtgacatttagggtagctgatatttttattttgttaaataatttccaagaatagagtatggtgtatattataaatttctttgataagatgtattttgaatgtcttttaatcttcctcctcctctccaaaaaaatcagaaacctctttaagaaaacatgtaggttatatatgctagaattgcatttaatcactgtgaaaagactggtcagcctgcattagtatgacagtaggggggctgttagaattgctgctatactggtggtatggattatcatggcattggaattttcatagtaatgcagatccaatttctttgtggtacctgcagtttacaaaataatttgacttcagtgagcatattggtatctggatgttccaatttagaactaaaccatatttattacaaaaagatattaatccctctactcccaggttccctttatatgttaagatataatggctttgaggggggaaaaaataaacctaggggagaggggagtttcctgtagtgctgtttcattagaggatttcagtaaattaaattccacagctaattcaataaataatggtacatttaagtgttctgattttaataatatatttcacatttatccacacagtaacaatgtaatatgttaatgtaaataaaattggttttgatactcagaaataacaagaatttaattttttaaatttgtttacagtcctgggaaaagtaagaattatttgccaaaataagaggaaagaaaaccttagtattattaatgagtttaccatagaattgttggaaatactgaagacaggtgcaatttactaaacttttgtttttaaactattgtagaggctgcattagaagaaaatgtttataatgacagagcaactatgactatataaaaaagctgaaattagaactgtgtttagaaatagatcagtaacccagtgccaaggatgccaagctgccaccatggtcttggctctcccacaacccagtgtttctggggtaagtttcacagtttctaggccctggaatagcaggcagtgtaagcctttgataactttagttcgatgtttttcttgtttttgtttgttggtttggtgcatatgatagtgggtgttatgctattttgctcttcccatcaaaataaagaaacttccagaggtttactgttaaaaatactgatatttccataaacgggtttaccaagggtgtagtatttcataccgcctgaaatgatcagcattggcacaaatcaaaattcagccgcctttgaaatgcaaaaatacctttgactagtaagtacatcctaggagtttgaaaacttaactaaggtttaaaatttaccttgtttaaagaacttctgacttttgaggaaaatctagctttccaagtaactaaaatgtacatgagataaacctctcaccactatgtgtcccttgagaaatgcaacacttttttagtcttcatacttgtaatctataaaagaaattctgaagtttagaccaagttgcccatttctgcgtaattgacataagttctgttaaaaatattataagtaattcgtttcggtttgtagatgtttcccctgacttgttaaagaggaaaccaggaactcagtcatgtttttgtcctggataatctacctgttatgccagtactcccatccgaggggcatgcccttagttgcccagatggagatgcagttcagtagatttggggcaaagtggctacagctctgtcttccattcactcaacacctgttcatgactgagccaggtgcccaggacacatcctaaacagtcagcttctatcctgtgtcctagttggggagacagagtgccagccagcaaccctcccaggtttgtaggttttaggggttttcagttttgtttgggttttttgttttttgtttttgtttctacatccttccccgactcccaggcataatgaggcatgtcttactcaatgttatgcaatggatttaggcaaaaattcattcttagtgtcagccacacaattttttttaatgcagtatattcacctgtaaatagtttgtgtaaaatttgacaaaaaaagtatatttactatactgtaaatatatgtgatgatatattgtattattttgcttttttgtaaagcagttagttgctgcacatggataacaacaaaaatttgattattctcgtgttagtattgttaacttctttttgcgactgcgttacatcatttaaagaaaatgctgtgtattgtaaacttaaattgtatatgataacttactgtcctttccatccgggcctaaactttggcagttcctttgtctacaaccttgttaatactgtaaacagttgtacgccagcaggaaaaatactgcccaacagacaaaatcgatcattgtaggggaaaatcatagaaatccatttcagatctttattgttcctcaccccattttcctccttgtgtatgtacttcccccacccccctttttttaagtaaaatgtaaattcaatctgctctaaga

SEQ ID NO: 11118 - DNA, 31 bp, Homo sapiens
  chr17:29815732-29815763
  hyper
ggaggtggggagtcctcggggccagcccagg

SEQ ID NO: 11119 - DNA, 30 bp, Homo sapiens
  chr17:30454726-30454756
  hyper
cttcaataaggcagcgggacggtttggctg

SEQ ID NO: 11120 - DNA, 37 bp, Homo sapiens
  chr17:30592879-30592916
  hyper
ggagcgcggggagcggcggggccggggccggcccaag

SEQ ID NO: 11121 - DNA, 83 bp, Homo sapiens
  chr17:30813428-30813511
  hyper
cagagagggcgggccgcgcgctgccagggcagggactcggccgagagtgcccccgcggccggcagctgcgggcgccgcggcgg

SEQ ID NO: 11122 - DNA, 30 bp, Homo sapiens
  chr17:30814499-30814529
  hyper
ccaagggggcagcacgcttcccgggagcgc

SEQ ID NO: 11123 - DNA, 298 bp, Homo sapiens
  chr17:30846451-30846749
  hyper
gagacaaagggaatctgcacccgccgggtgggctctggcggcggcggcgggggcggaggctgcggcttcgagcgcgacgcggtcgccaaggcaacgccggccccagcgcccgcggctgaaacgaagccgctgcccgagcccgagcgccagcgcacacgccctccttgcagccccccgcagccccggccggccgcgcttctccgcctcgccgccgacagcccctcccagcccgcctgcccgccctccttccggctgtttttgtttgtctgtctttcccgagaaggtgatgatttggggc

SEQ ID NO: 11124 - DNA, 31 bp, Homo sapiens
  chr17:31203739-31203770
  hyper
ccccctctcgggaaagcgcagcctcgcgccc

SEQ ID NO: 11125 - DNA, 58 bp, Homo sapiens
  chr17:31254913-31254971
  hyper
cctgggaccgccagcccggggcggggcgcaggcagggaccctccgctcccctctccgt

SEQ ID NO: 11126 - DNA, 38 bp, Homo sapiens
  chr17:31255334-31255372
  hyper
ccggggagaggggaggcgggtgccgcagctttgttctt

SEQ ID NO: 11127 - DNA, 72 bp, Homo sapiens
  chr17:31255618-31255690
  hyper
aacttactcttcagtacgcagggaagaatagagaaagaaaaacacaaagaaacgccacgcagactgcagaga

SEQ ID NO: 11128 - DNA, 1005 bp, Homo sapiens
  chr17:31618439-31619444
  hyper
gcggcccgcagagctcgccgcggtacttgcaggagagcagcatgtcctccagctggtggcccaggcggtccatgaaggcggcgctgattccctcgaagtggcgcggaggcaggaagaggcggaagtccgccagcttgcggaaccactggcggcgcggctcgtcgccccgcagcagctcgctgacaagcgggcgcgcggtgcggttgggcagcagcagcccgagccagtggccggcatagtagaggtcccccttggagaggcgcgggaagcgcagcgggttgttgttgcacacagtgacggcggggaagggtaactggcggctccactcgcggtgcacccgcgtgtgtgacgggaagctgagccagtagagcaagcggttcgaggaccaggacagcagcaagccgaaggatgtacagaaggccagcacccacagcgcccgccgctggaaggagcccccagccgccgtgcgcccggcacacatgtgccgcagcccgtgcagtttagcgcggctcagcgatggccgccccctgcgggcgacccctggcccctgcagcgcccgctcgccgcctctgccgcccccgggctgcccggcagccgccaacgccgcgggcgccggctcctcgcgggccatgcggaagcgtcccgggccggtgagcgcggctgcgggcagcccggctccgccaatccggctcattcattcagcccgcggctggcggcagcggcggcggccccggccgggcggagccgccatgggagtccgcagcagcagtggaagcagcagcagcggcagccgcgcgcagcccgcgccagggaagcgtgcgcccgaaaggagctccggtggcgcggcatgcccgcccggcgccgccgctgccgcctccgcgggcgcccgcccggggctgagcgccgcctcagcccgcagcccctggcagtggcctctcccgagcgcctcccaggctttcccggcccctggtcttcctggaggatgcccggcgcccggcactactt

SEQ ID NO: 11129 - DNA, 784 bp, Homo sapiens
  chr17:31619649-31620433
  hyper
agcggtgctgggacacgggagagaaggcgccaaggaacgagcgcccccagaggcgcaccgcggctcctggctgggcgggcggggtgggtgtgtacgggggtgagtggtcgccttgccggctgccgccttctttcccttcccctccaggacccttccttgttactgctccctgggctgcgctcggcagagacctgcttaggcttccccaagtcctgcgcctaagtcctgccaggcgcccgctctcgcctggggctgagagcttctcagggcgtcctgcgggaggctgttcgccgccggggtccttcaaggatgctagccgcagggaagtgtcgcttctcgcctcggctctcccaggtgcctcgcgtctccagaaaagcccagccttgctgtctctcgcgtcttctctctgcccccgcggcgacaagagctggggactgcggggacccgccaacacctcccgggggtgacccggactcgctgctccgcgcgcccttctcctctcgagactccgagctcgcggtggccgtgacgccggctaagctccttccccggttgcccgggagaaccctctttgggccccaggcgaacttgggcagcggccgcgcgacgctggcgcggctgggctccgagcacctgctcctcagctcgctggccccgcggctccgggcgggcggggcggcggcggccgtgagcgccgtgcgctcctggagacgcggtgctgacgcgcccggctcctcctcgctgcattttaattcctggccactgtggccgctgcacaccgagc

SEQ ID NO: 11130 - DNA, 153 bp, Homo sapiens
  chr17:32483897-32484050
  hyper
attaaaagcgagagcgagagagaaaatgcttaaaacaagtcgctgagcagctcggagcctgttaaccagcgcataatgccccatgttaaccatcctgggggatgtcagggcggccacgctgatgcactgcggtcgggcgcagcggcacagcct

SEQ ID NO: 11131 - DNA, 611 bp, Homo sapiens
  chr17:32905944-32906555
  hyper
taaataggtttcccacagctgcgccccggacccatcccgcacgaagctgagccccagagcccccgcggcccgagaggagctgggcacagcagcgaggctgattcccagccagtgcccagcgaactctgggggtgggggtagggtgccccctacccgcgcctctggaagagcggctgcaaaacacctccggcgcccggtggggagcgtgcatcctttgaaaagggacatcagtgactgcggtggcgtctaccctggagaaacgcagctgagggaggtggaggctcctcccgccgcagctggccggccccattcgggtcccagcgctagccggcgttgggaaggaaaaatcaaacataaaataggggcgagcggaatcgcgaggtcggcccttggcccgagtctcattaaggagccgcgcgcgccgccaggctaggaatgcggaatggacacgtggacagaggagggggagctaggagtcggggagtctccgtggcgcgcgagctgtgggccgcgcgctcgggggccacgtgaccacggggaatctgggaggggtgggagtgagcgcgccaagctcggcgcccgcttctgcccgggtgggcgctgaatcccgg

SEQ ID NO: 11132 - DNA, 497 bp, Homo sapiens
  chr17:32906598-32907095
  hyper
cgagtcatttacggcggagcagccggcgcgagcgccgaggaggcggcgacggcggcggcggctgcttcgtgcaactgtggcttcccccacctcctcttcctttttgctcctcgattcttcttcttcccccacacacgtccatggggagccggctcccctgccagcacctcctctcctctcggccccgtaggcaccagctgccgcttccctggccgcaagctgcgcaggtgccggctgccctggcccctggcgccgcgcccgcgtctcaccgcccgcagcccggactggcgcggcgatccgctcgcccaaactgactcggagggagcgggagccgatgcccggcagcatcgagacagcgggcgaacgggcgtccggggacagggtgggggcggcggggaggaggcgtcggagactctgaaccccagaaaagttcaaggtttgtgcaggttcccccagggaaggcgaggagcgaggcggggcagcgcgcctctctgccg

SEQ ID NO: 11133 - DNA, 183 bp, Homo sapiens
  chr17:32907621-32907804
  hyper
ttggaggaagaaagcggcgctatccatgtgcggttactaccgaaaccgaggaaactggggattgcgttggaagtcggcaccctcgagtgagttcggattcgagctgggccgtgaggccgggagattcagcactgggctctaggtagcccccgggacgcccgcggccaccgggctccggactgc

SEQ ID NO: 11134 - DNA, 273 bp, Homo sapiens
  chr17:32907873-32908146
  hyper
cgcccggagctgcgcccccaccggctccgagggtgtagccgccagcgcctgggacgccccctccccgcaaagtgtccccgaattgcactctctggtcccggagctgcatctgagacagccgggcgccacggcagccctgagttggatgtgaccaagcccagcctggggccaagtcgtcgtcgactgttgctctctcggacccctcccgcccccgcctcggccatggccccggggatgtcgggccgcggcggcgccgccctgctctgcctctca

SEQ ID NO: 11135 - DNA, 547 bp, Homo sapiens
  chr17:32908170-32908717
  hyper
cgcggcgcggactgggggtgaggatgcggcaggcgccactggagggggtacggggaagactggggagaggagcacccacaccccctggactcgcagccgccactccgggtttggcgtctctggctgcagctcgagttaccgccagcccccgagccctccggcgagctcagctgaggggaccgagcccggcgccagaaaagggtggggggagggtgtcgctccagtcctctcctggttataaagaagggttcgaacccgaaggtctggggtcgtgtccgcccacggaaatctagagggatccgagggatcctccggatcgcgtccaggccgccccccgcccccgtctctccctgcagccggccgggctgggggctgttgggatccgccgggatcgcgtctttcctcgccccgggcgcgcaggccggtgcggggccgcgccgcccgtcgcctcgcttcctgcggcggtcctcgggaagggaagtggactgactccgggccggggagccgccgcggctcgcacgcccgcggtcctgtgagctgcatctaa

SEQ ID NO: 11136 - DNA, 31 bp, Homo sapiens
  chr17:33125098-33125129
  hyper
tcacagggttcctgctcgttctgaatatctc

SEQ ID NO: 11137 - DNA, 30 bp, Homo sapiens
  chr17:33447033-33447063
  hyper
cctctaccttctgccgcaacacacacaccg

SEQ ID NO: 11138 - DNA, 34 bp, Homo sapiens
  chr17:33700165-33700199
  hyper
cggttcctgctccgcgccccgcagaaaccgcggc

SEQ ID NO: 11139 - DNA, 1325 bp, Homo sapiens
  chr17:33700466-33701791
  hyper
ggaagggtgctgctcccttctcgaacctggcactcgagttacagcccgacgcggattcggctgggctagaccctgaagcacgggtagaaacgcaactccggagtcccaggctgggggcaaggaccctctctgacctctcaagctccagcgcttccgaagcccccttagcgtttccctggaggcgcccaggtcgagtccttatatactagcgggttggcgccatcccacgcacatcccacgcaggagatgcaagagccaatgggcgggtctgctaagcccgcgaactctgccgcgttaaattgcctagaagctcccacccttctgactgttgccacgtagttcttagtttccgggaatttggggattttttcctcccccttcttcccacccttcctccgtctcctcgctccctccatccatctctccctccctatcatctatctattcatctatctggattacagcaaaacaaagaataaagattatgaagaaagagaagaacttcccaggcccaagcagctgtcggctcctgcgctcccaacggggtggccgtttccttcctcgcaccctcttctctcccggtgcctgcggtcccaccttccagatacccctcggagagtccagctgagctctcgccagagctttccccttccaacccgctcgacttgcccagatcccaagctgggcttctctctccatcgccccagaaagtgggtcttggagaccgaggcaagaatttgggcctccgcttctgttccagaccccggaccccttgccaaaatgcggcagatgtgcagattgggccgcgcttggttcctggctgggtttatggagcctgcggctgaggcaggctccgcagaccccgagccagagtgggatttaacggcggccggtgcgctgtgcttggtcaaccccggtaaccgtcacgctgctagtgatatgaaaaaaacctgccagcgttctgcttttctgccccgctgcagtctttagcacccgccaggattctgtccgagtgtttggattttgtaatcctcctgtctttggccaactccccatccttggcggagcgctcgcccttggccgggctccgtgctgccagccttgcggaaccctaggcccgggcggctctgtcggaggcccacttctcactgatgcggagtggcccgagggtgggagcagcggttaatgccgcactgattaatacaggctccagtgaaagcgaaagtaagaaaataaaacggatttcattatacatatacaatgtgtgtatggatacatgtacatacatattacacttatgtgtatgttacgcacgtttgttaaaa

SEQ ID NO: 11140 - DNA, 30 bp, Homo sapiens
  chr17:33814581-33814611
  hyper
ggattccttgcaggcgctgtgccagcgcgg

SEQ ID NO: 11141 - DNA, 30 bp, Homo sapiens
  chr17:33914228-33914258
  hyper
ctttctaggtctaccgcgcaccccgatgac

SEQ ID NO: 11142 - DNA, 30 bp, Homo sapiens
  chr17:35054543-35054573
  hyper
cagttctcagaccaccgtttccacatcccc

SEQ ID NO: 11143 - DNA, 425 bp, Homo sapiens
  chr17:35078650-35079075
  hyper
gtggtgcacgccgggcgcgctgtgcacagtctccggaggccgccagtgcgaccccgccccacccgcgcacccccgcccggagggccccagcgcgcatgcgctcgccgcagggcggcctgcggggctgtggacgcgaggccagctcgtagggggctgggcggtcagcggggtcaagggacagccacgctgggacggaggacggggacaggggagcccctgcggcgccacttcttcctctccgagtcctgtctgcccttgatggagccactggtggggttacttgctggcggtcggccactttcgcccctccctcgccagcccgccagctccctaaggttttgtggttttttgtcaccaccacacctcagtgttgagctaagtgaggacgtccccccagcaaatgtattggacggaaggaaacggtg

SEQ ID NO: 11144 - DNA, 30 bp, Homo sapiens
  chr17:35082280-35082310
  hyper
ttggagttgagggtgtggaagggtgcgtgt

SEQ ID NO: 11145 - DNA, 32 bp, Homo sapiens
  chr17:35165829-35165861
  hyper
gaggcagccgggggcgcggggctccaggaccc

SEQ ID NO: 11146 - DNA, 334 bp, Homo sapiens
  chr17:35291564-35291898
  hyper
cctgacgccctagagcgagcgtcctgtcctcatcctcaactctcctgcctcgctggtccgtctgtggggaggggccttctttcccctatacctaggtcccaaggttcttacacccctaaatggatggagcaacctcctcctgcccaccagagggaggtgacaggccctgggttggggaagggccgacagctaggtccagctgtcgtccggtaggtcccactgaccgccccacactccaccgtgacccctctgctttgcatgagaaggagcccagctgggacgggggcggaggcaagccacccgggactggggccactatagattccagaaaggg

SEQ ID NO: 11147 - DNA, 799 bp, Homo sapiens
  chr17:35291920-35292719
  hyper
cggcgagaaccgggacagctgcggggaggggaggagtgtgaggacagcagggctggactggccccctccccgcaggcctcacgcagcgcagcaggctgggaggcgcctgggggtccgggtggaagaagtggggaccccatgccacacggcttttggcgcttgcgggggtgccagaagcctaccgagtaccggtcgtcttccgccgggaagtgccgggtccgcaggaggagcgcgaagccgagtccgagcccgcggagcccgccccctagatcgcagaaccgccttctccatcctctgccctgccccgcgtcggggtctgggagcgaccggcggaggccggcggcgcgccggagctgactagtcccctacgctcctccggcccgcagcggggagcccacatgtgtatgtgcaagaaggtgtggagaaggcgttagggtcccggcacccacgggtcagggcagaacgccaacgagtcgcactgcgggtctccgcggcttcggtttccatgacatggtgacgccggcggcaaggcggggggctgcctgtgggccttgaggttgctgggcggtgcgggcggagtcagcaaaggggcgttggcaaagccctaaaaccccacggttccacggagcgcaagccagattctctgaagcagcttccccgttcgtccgaagagggtattccatctgcacagcgggattccctgccagcccaggttcactgcgactccgcttccccgagcatttcccccgtttcagcttccgtctggtctgcgcatcgcgagtggggtccaaaggccaat

SEQ ID NO: 11148 - DNA, 30 bp, Homo sapiens
  chr17:35293612-35293642
  hyper
cctccaaagatgtgcgctgcgcttgggaca

SEQ ID NO: 11149 - DNA, 546 bp, Homo sapiens
  chr17:35294215-35294761
  hyper
gcggcggtccgcgccgagccgttccagccgccggcctactgtagccgctgcgccaggacatttttttttaaagctctccaagctgcccccctcctccccgactcctcccgctgcaaaagaaaaacaaaaaaaaaaaaggaaggaggctagaaaggaaacccagatttgccaccacaacgaaaaaaagaaggggaaaaggaaaaggagagaaagtcgagcgactgtggggttagacggaggcagacagagcgtgggccgagcgatgcggggctgtgcgcccaggcggccgcgagttgtgactggagccacgatgcacggccaggcgcggtgagaagccagcccgtagtgcctcccgaaggagcccgggcgcagggagggtcgccctgaggacacggaggccgccaggcaggccaagggccgaggtgactgggctggggcggtagggaaggagcgagtgcgcctggctgcctccgcacggagttgtccctctctgttttcgattgacacaaacacttctccaaaagcggggaaacctaagcaacaaca

SEQ ID NO: 11150 - DNA, 407 bp, Homo sapiens
  chr17:35295029-35295436
  hyper
tgacagctctacctcaagccccggagaactcagcggcgctttcctcgcaacccgagctcggcgagtcgtcgtcttcttcttctccgtttttatttatttatttccgttcccgccgccgttctcgctgaccttcactcctccgcgggctctgagcagaagggtcgcattctctcccgcctgagacttcttttcctcgccccgggagctcaggcggcgccgctccagcccggggccccgggactccccggctgcacacttcactgagacgcccccccaggccccgatcagcctcgtttcctccaccctactttgatttcctggtgcgagttttggcttgcacggccgagtgtgtgtcctctttttggagagactggggagctcgtgccgattgtcttcaggagtcatcc

SEQ ID NO: 11151 - DNA, 143 bp, Homo sapiens
  chr17:35299300-35299443
  hyper
gctcaccattggctcagggtccgccctgagtggtcctagtcagagatcgcaccgtcaccactaccctacacacacacacaagcgcgcgcgcgcggtgtcggctagccaggcggtgaaggggtgctggctaggcccggagcacc

SEQ ID NO: 11152 - DNA, 365 bp, Homo sapiens
  chr17:35299600-35299965
  hyper
gctggtggaccgcctggagccgggcgagctcatccccaatggtcccttctccttctacggaggtgggtgcgcgccgaatggcggggcacggccaggtcggggcgggcttcgttggaagcgggtggcagcgcgggggggcacgcctcgctctctgtaagccactggagagttggggcgagtagggagaaggctgggagtaaatcaaggggaggcggcgagaccgaggacccaattcacggccctgaataacgggggtagctggtaaggggcagctcccgggcttgcgcccagcctcctccctgcacccaggcccgcgagggctccccgcgatccgcgagttccccgcgtggccttcctcagcccgc

SEQ ID NO: 11153 - DNA, 452 bp, Homo sapiens
  chr17:35300260-35300712
  hyper
ggggactcgcccagccccgagcccagcctgcccgggcctctgcactccatgtcggccgaggtcttcggacccagcccgcccttctcgtcgctgtcggtcaacggtggggcgagctacggaaaccacctgtcccacccccccgaaatgaacgaggcggccgtgtggtagcggggtctcgcacggtctgcggagttcgtggttgtacagaaatgaacctttatttaagaaaaatagaaaaaaaaaaaaacataaaaagcaagtccccacccccttcctccagcctcgagaaccattctccttctggggagaccggatggaaaagggggacacgaaataggatccaaatcggcctcgaggtgggactgggatccgcgcactggctgtcgacgtgcagaactggggctccccaaaggaaacgcagacctctccccaactcccacctggacccggat

SEQ ID NO: 11154 - DNA, 83 bp, Homo sapiens
  chr17:35300812-35300895
  hyper
cgtggggagggaggccgtgagcacagccgggtgaaggaagtgaagcggcccagggcgctcccgggccagccaggagggttcta

SEQ ID NO: 11155 - DNA, 233 bp, Homo sapiens
  chr17:35303270-35303503
  hyper
tatttgataagaagcgttttcgagttgggcacacgatgtggattcgattcttctaacaacgtggttgtggcgcagtctctcccctcgtcgcgggattcagaatcctggcgaaaacccgaacaggtggcaacgctcagcagtcaaatttggagccgaaggccccaaggaggaggcctggaaatgtcagggcctgttctccttcccatcagtgctgtgccgcccacctctggccc

SEQ ID NO: 11156 - DNA, 30 bp, Homo sapiens
  chr17:35716123-35716153
  hyper
cccacctcagccggcgagctccatgaggtg

SEQ ID NO: 11157 - DNA, 30 bp, Homo sapiens
  chr17:36003559-36003589
  hyper
ggctgggtgagaaacgaggctattttatta

SEQ ID NO: 11158 - DNA, 2022 bp, Homo sapiens
  chr17:36102012-36104034
  hyper
aggttcagaggttccctaacacggagaaaggcaccggtcccgaagagggcctgcggccattgtgtcccaagcgcaggtgtcaaacgccggccgcggcgcccgcagggtccgtcccgcacgctccttctcaaacaatgactttgctgcccacgagcagagaagcctggactccagcgcagtccgcagcgcgttcgttaaggagcccaacttcggcttcttagaatgcagcccactttctagacgcccccggcgcacctgcctcgaggccgcgagaaaggccagctccggccgggagccggggaccgggaagcgcgcagtcccgaccttcctcccctgcctttctcttccaggaggtttactagaactccaggaactccaaaacgcgacttttctttctctttgcttttcgtcttaagggaacacggtgggcaaaagaagggagtgcgtgtgcccgaggcttgggagccccctgtgcagtgacctaggaaccgctagcgatttcttgaaaaattactttaatcaagtccggcgctcccgggagcgggggaggaaaggcagcacccgctcgggacgggagaaaaaagcctccaggtctgtcccgcgtctccaactcggcgagggtctccggctccccagtccctctccctgccctgctggggcctggggctttggggagggaagagcggggctggggtctaaggaccctgggccgggcctggctctccgccggccgggcctgcgggtgtcggcgacccgggggctccgcgggcggctcgggcgctcacagagcccgcgtcccgcgccagagcggtgaggccgcggggccgcacggggcgcctggctgggtgcgcgctgggagcggcgagcagccccgcgcccgcgttttgatctccttcccccctctaagccgcgtttacaacttcaccaatgaataacccgcctctcttttcaacctaatcacggctctttgtgtatctttctgttgatgatttatagaaataaattaataacaccccaactccacgtgctgcagtttatgttacgtctcagctgcggccagcccggcgcggggctgggtgcggaggggcgccccaggtccttccagcgccgcgctagaaagcgggcgcctgcggccgggtgggagggcctaggccctgtggcccccggtggccggcggtgggagcctggttcatccgccaggtcctgagcgacctccccggcagccctggcgccccagccgctcctaggggccactctctcgacccctcttagcctccgcgactcacaccttccgcctcgcggaactctcttgcaggagttctctcccggtaggggagaaatcacctccgggcgggagagcgacgagggaagaacctcaaacctatgaattataccaaagtgtgtttggggaaaaaaaatctacaagttcccctgattgttttggctagagggcaaaccgccaggccctcggagcacaaattcaaatgcaaggtcatatcccaccccaaaccgccgctgcggacgtgcggccaaggctcagccccgaaatcgcggcgcttcagtgtccgaagccacgcgatgggctctgtcctaaagcggagtggcccgggagcgacgtgctgtctcagggaaccgctcggctccttagataattagtaaccagctgtcaaagtctagggcggtcggggaggacccacaaacgatcccggccctggggatacactgccagccggcctgaactcccggggagaggccgggggtgggcagcgaggtctggaaacgccctcctttctcagactgagaccagatcctctgcgaactgaggtctgagacgcgttcgcccccacaccaccgcgcttcgtttctttggccccgcgcgtgtccacccggaccctgcatggaacatgccctttgcaaatctaaacccgcgttggggatcccggataattccgggccttgcatgggcgcggctaacaagagtgcccaccagggaactcgcctcccagatcccggctccggatg

SEQ ID NO: 11159 - DNA, 333 bp, Homo sapiens
  chr17:36104217-36104550
  hyper
cgcgtgggcaaacctcccggcaaagggctccacagctccagttctccccggcccagccccagccccgcggggaaaagcccttgggtctcggacgctggcctgggcctggggagaagaagcccggtgggccgcagggtcgtcccgctaagggattgggaagggtccgggtgttgggagagaagcagagcgccccccgggggacttctctggtgggaaacgggcttggcgagtgtggtcgggcgcagtgtcactcaggcccggggccggggctccaggggttcgggtgggtcccctccacctcgctctgcgcctacctgagcatccggtccacct

SEQ ID NO: 11160 - DNA, 706 bp, Homo sapiens
  chr17:36104643-36105349
  hyper
cgtcgccggacaagcggcccttggcgtggccgttggtgagagtatggaagaccggcttggtgtcgggctcggccccgctgccaggggacaggggcagcgtctccagcttcaccccgaagttcggggatggcagcaactcctccaaggcctgaaccagcacctccttggtgaccccggagctcagcagggcgctcaggagttcttgctggagcgacgtgagcttggacaccattttccaaggacggaaaaagaagggggtgagggggtgggtgggtgcgagagaggagggtggaggggagtttcacaagcaaaccccaaatccaggaacccctccacccttcagcctccagacacctgttactccccggggtcccggaggctcctccgaaaggagtcagaaaacttctaacttgccatgatcgccaccattaggccatataagatatgcaaattagtgggaagggcccagctttcggctggatgcaaatgatggtggggagggggaaacccggagagagggagagccggaggggcagacctggagagcagaagacctgggccgggagcggggctttgccagggtccattgtactcacgctggggggctagagaccttcttttactggttctgcttatcagccaaacttcacctaacctttggacttgttaagccagtgccttgcagcctaggcgcggggcttttcca

SEQ ID NO: 11161 - DNA, 145 bp, Homo sapiens
  chr17:36105458-36105603
  hyper
cgaagagtagagaccctggatgcgtcccggccgacgcaggtggtgggccaggagagcccgcagggcggaagagaaactgaccacttaggaaggggcgccgaggccacgggggaggtgaggcagcgttaggtgtggtgagcatgcc

SEQ ID NO: 11162 - DNA, 470 bp, Homo sapiens
  chr17:36714787-36715257
  hyper
gaaggggtgggatggcgaagggcaggggcgggatggcgaagggcaggggcagagggctaagttctggggaagaacagaggcaggaggagaacggatggggatcgtggagaggggagcgttaaaatgggccatgcaaagggggagctgcatggctgtggccgcgagcaggggtggtattgcagggggaggagggcaaggttaagttctggggaatatgaggcaggagaaggggttgggaatatttgcgggacagggtgtagccctatgtaggtccctgccgacagtgcggccgcatggctatggcttccatcatcccggaatggggacgggactggaatgaaggactcaagcgctggcatttgatagagcttctatggctgggacaggaagactaagttgatgatcgatccaaccctgttccaagcctgaatggcgggggtgggcaagatcttacccgttgcccagatggc

SEQ ID NO: 11163 - DNA, 121 bp, Homo sapiens
  chr17:36716048-36716169
  hyper
tgagcctgggaaggactgggctgggacaaagtcctccctactctccgaccccacacagtagccagagaagcccgtggctctacctgccccaagtggtcagccctaacggtggggaccaaag

SEQ ID NO: 11164 - DNA, 46 bp, Homo sapiens
  chr17:36762362-36762408
  hyper
cgtgatcccgcagcgcgcggccggggccgggcgcggggcgcgctca

SEQ ID NO: 11165 - DNA, 30 bp, Homo sapiens
  chr17:36763009-36763039
  hyper
ctacctgttggctccgcagacttctccagc

SEQ ID NO: 11166 - DNA, 30 bp, Homo sapiens
  chr17:36859555-36859585
  hyper
agacaaaggcttcccggcccctgtctccaa

SEQ ID NO: 11167 - DNA, 223 bp, Homo sapiens
  chr17:36886753-36886976
  hyper
agctcccggcccgtcccgccggtgtctggcttgcctcagctcacaggcttttcccgagcgccagtccctgccaggacctccgcagccagcaccttctcttgcgacctttttcttaccctctcattcctccctcgccccttcagccctgtcacctcctccttcctagatggcctcccgtgtccttccctttccactgattttatttttccgtttccaaaccacc

SEQ ID NO: 11168 - DNA, 38 bp, Homo sapiens
  chr17:36904349-36904387
  hyper
ctcccatcggggcttgcgaagaacggccggcccccatc

SEQ ID NO: 11169 - DNA, 778 bp, Homo sapiens
  chr17:36905120-36905898
  hyper
tgcatctgggagggcgagcgtgtcctccccactccccttgccccctcggcggcaggggcgctggccccgaaaagcggcgcaccaggatccagcctgggcgcctggcagggagcaatcgcgagaggggagtggaggtgcggggtgaggccgggtggggggcctcgccgcggggggatcgggtagctctggcggaggctgcgcccccggcgtgctcgggcagagaagaacggaggcccgctgaggatgggaactcaggctccgggtctgggacacaataatccggccgaaggcgagcggccacactggactaggaaacgaggcgccgggctgtaaggtgggcccgcgccttttctcctgcctggcgctgattcccgcatttttcgctcgcgccctgcgctgcgcgctgcctgtgcgcctccctgggcgcgcgggcgggagagtcgggcgagcgccaagacggctgggcccgactcccactggcgccccggctccacctggcgctggggctccggtccgcagtggctccggcaggagggagagaacgaggagggaggcttggaaacgccgggagtagcggtgaggccgacgccggggaagcgaatcgatactgcgttactggacgcccgtgggcctcatgaggatggtcgattccctcattcgttattcacgatttattagggatggcggccgcgtctgtccctccagagagctcgattatccatccggccagcagcgccattaagcgcactgacggtgggaggctcgagttagaaattag

SEQ ID NO: 11170 - DNA, 83 bp, Homo sapiens
  chr17:36906153-36906236
  hyper
gggccaagggaagatccggtcacctgctccggagcctgcaggcggagaggcgagtagttcaccggccccggaggaaaggggac

SEQ ID NO: 11171 - DNA, 30 bp, Homo sapiens
  chr17:37009958-37009988
  hyper
gacatcttgaacgccggaaaaaagaaaaaa

SEQ ID NO: 11172 - DNA, 30 bp, Homo sapiens
  chr17:37183537-37183567
  hyper
ggctcagggcgcggcgccagcgcctgtcat

SEQ ID NO: 11173 - DNA, 30 bp, Homo sapiens
  chr17:37309399-37309429
  hyper
aaggtgagaagtctcgggacggattccagc

SEQ ID NO: 11174 - DNA, 136 bp, Homo sapiens
  chr17:37310277-37310413
  hyper
ggaaggagaagtctctcgaaatatttcacttcgggggcgtcccactctcctgccctgcagaagaccccttgccacgtctcggagcttctttctccctcccacatgctcacgcggcttctcccgacctgtcttcccc

SEQ ID NO: 11175 - DNA, 326 bp, Homo sapiens
  chr17:37321298-37321624
  hyper
gctctctaccctccccgcccgagagtcacttacaaccggtagagaatggtggtctttccttcattgtccagtcccacgatgatgaccgtgtgctctggaagcgtcggaggaagggcagcgtcagggccaaacccgaagaccaagggactgtgtgcccccaccagacctcccaggaaggagatagcgctccccgcaggctggggacctctgcccaccgtaccgcgtctgcttcccacccagctccgacacctgccccactccgggacggtggaaaagacagctgagcccccacctcccttcacattccagaaaagtgtctgaaaggc

SEQ ID NO: 11176 - DNA, 113 bp, Homo sapiens
  chr17:37321787-37321900
  hyper
cgccgggacccaagaggagcaggcagggacgggggcaggggaggccgcggggcagtcgaggagcgcccatatacgaccctcggagcccgaggtccccccgtgcgtccgaccac

SEQ ID NO: 11177 - DNA, 499 bp, Homo sapiens
  chr17:37366040-37366539
  hyper
cccccactctgcatccgggcagcgccagcagtgccccagcacccccgcagcccgcctctccttggcgccccgctcccctccgcctataaatagcacaggacgtgctcgccgtggcgatgacgcggctgggcaggcggaggggaaggaggcagctctgccagagcggtgggcggcgagcgcggcggcgggaggggtgcggcccctccatgctgggctccgatgacaggggcgactgagtcatcccggggacccacgggccacgactgtccccgccgccagcgtttctgtctccggcttgggggactgcggggacgaggctgacctcggatgggtactgagccctcccagacccccggcacgcccggtctcggagggcacctctgggtgggcaagatcggcctcgacggccctggcgcgcaggagcatgtccgcccctgcgcgactcaggtgcacatggaggcggaaagtgaccgcagccccaagccgtttccctccagcg

SEQ ID NO: 11178 - DNA, 497 bp, Homo sapiens
  chr17:37380932-37381429
  hyper
ccgctccccctcctctggtcccgctcccgtggtggggcgcggggctgcctgtctttctggtctggagccacaaccgcaggcccccgtcctcgcccgtgaccgacggccggcgctgctgcaggccccctcgcggactccgcagctgcgcacccccggccgcggcctcgcgtccccgagcccaacagggctaggagcggggaatgcaggactgcggaggggcagggagagacgccctgagacgcggagataaacacccggagacgccgggagagacggggagagacgcacacagagacaccaagacacagacacgcaggttgtagagacaaattcagagacacgagcgaggatagaggcgcggactgagcccgggactgggacccggcggccgctggagggtgcgcctcgcacgcacagccgggcgcgtaccccgcccgcaccgctccacgcgcgccctccggcctcgctgcgcccatctctccaacgaagaccagtgg

SEQ ID NO: 11179 - DNA, 156 bp, Homo sapiens
  chr17:37381570-37381726
  hyper
cgcgaccctaggacgcccgggcccacaggaggaccccgccgggaagagggcgcccgggcccggggcgcggacaggccttgcgccccccaagttaccttggtttcctggagggcggagacggtccctggggggctgtgggtggccgcgtcatccggt

SEQ ID NO: 11180 - DNA, 244 bp, Homo sapiens
  chr17:37381825-37382069
  hyper
cgggcgtctccgggactctgaagccgttctccagaggctgcccccagttagcccccggcacggcagcccccaacccgcgggagcgggcagagaaagttgccggggtggcgggcgaggggaggccaccacgctgagccgcaggagcgggacgaccccgggcgcgaggaccgagggtctgcagaggatgctgctcgcagcgcggggaggagggaagtggggccgcggggatgagccgagggaggga

SEQ ID NO: 11181 - DNA, 39 bp, Homo sapiens
  chr17:37382286-37382325
  hyper
ggtggccaggagggcgaactgggcggagtcttggggggc

SEQ ID NO: 11182 - DNA, 140 bp, Homo sapiens
  chr17:37756292-37756432
  hyper
cctagggaactaaggtgactccgctcctcgcatctccctcctgaaatccgttgccctccttcctgtgaacccagccccggtcttggccttcttctcacgtccacactcccagggctggcgcccctgtcccagtgctttag

SEQ ID NO: 11183 - DNA, 681 bp, Homo sapiens
  chr17:37757095-37757776
  hyper
aaagagaagcaggcacagccccgtggagcttccagagtatcagggttttcctgccactgatcctcctgggggtcggtgtcccgcagtgatttatcgggctgtctccccgagtcacaaaatcagggctgggggttcactgggggtccatagctcactgtccgagtcatggctggaacgcagctcaacaatgaagggacaggaatggagctcaacagtgaagggacagggagtaactgctttccttccctttcccgccagatgggcaaatggcctggactcggagatacctctttttctctgtcatcttccaaatgctggacttggaatggggtctggaaaatcaagaggaagatgtcctcctgattgaacttggatccagccgtcgggttcagcggcccaggggttgagctgagccggctggtggacgcttggagagcctgccgctgaggctagggcaagaagggcgtcctctctgtgccttctccccaggccaggcacagcgctggcccctttcctcctccctcccctgcttctgttcttggagcatctctgggtgtgtgtgcgcaggcgggagagcaagcaagagaaagagacctgcgaggggacgtttggggccgcttgtccgcgcacatcttcttctcctgctcatcacaccatctcgccagggaagttgagcactgg

SEQ ID NO: 11184 - DNA, 563 bp, Homo sapiens
  chr17:37759986-37760549
  hyper
ccctcaatgaaatgaggccaccgtgagaaaccggtccggctttgcatctcatttacataaatatttattaatcgtcattaaactgaacagaaacacgcaatgcacttcgggtgtccgacgggagtttcatcttcgctacaagaggaaggtaaaattgcgtgtgtgtgggtgagtgtgtgggtgtgtcgcctgtgggattgcatttttgcatcgtgtatttggatgcctgatcccctgcctccggtgggcagagggtctccttttgcccctttttgggggaacctccagtaggagccctcagacctctccccgcccacccaccagctaaagccaagaggactccttggaccaaaaaatactctctccagacaccggaaatcgccaggtggcacccaccgaggcacagtccgggcaggggtggggctgcccccaggtctccatccccacccctcaccccaggaggggacagaatggccgcggggaggaggagccggcgagctcacctccttctgccccccggacgccggcgccgggcctgcttgtgcgtgcggtgtggtgtgcgt

SEQ ID NO: 11185 - DNA, 14 bp, Homo sapiens
  chr17:37761816-37761830
  hyper
agccgaagactagc

SEQ ID NO: 11186 - DNA, 827 bp, Homo sapiens
  chr17:37761946-37762773
  hyper
cggggggctgagcgggccctcgtactcggagctgttgtagtccgggctcgcgccgccaccgcctgccgccgcatacagcgtctcgtaggcggcgcagtagccgtgggtccgcagggcgtgcgccgcgccgccgcccaggccgccggccgcctggcactgtgcgcccgccaggcgcgagcacgggtacgggtaggggtgcatggcgaacgggccgcccgagccgtggaagcggccggcaccgtcggcgccttgctccgtgaggaagttgcgagagttgagctgcagacagccggccaccagattggtggtgggctgcgacagacccttgcacagagtctgcacgtaggacactaggtctggccgcttgccggagcgcaggatctccgagagcgcccagatatagttcttggctaggcgcagcgtctcgatcttggacagcttctgcgtcttggagtagcagggcaccaccttgcgcaggttgtccagggctgcgttcaggtcgtgcatgcggttgcgctcccgcgcgttcgccttctgccgccgaagcttggagcgctccaagcgcgccttggtcatcttgcgcttcttgggcccgcgcttcttgggccgctcgccctccgcctcgtccagtccttcttcctcctcctcttcctcctcctcctctccccccagctcgccttcctccttgacctcggccaacgtggcctccgtcccctcttctccacggagagggactggcttggccgcccgggctggccccggagcccctggcccgggcgcaggcggtggcggtggcggcgcgtcgcccttgtcgctcctcggctcgt

SEQ ID NO: 11187 - DNA, 99 bp, Homo sapiens
  chr17:37764038-37764137
  hyper
gggggagaagagggatcttctcgcttatttcattgttcccccatcttcagggagcgggggcagcggctcctcaaggcggcgggcgccggcgtcttcaga

SEQ ID NO: 11188 - DNA, 61 bp, Homo sapiens
  chr17:37764263-37764324
  hyper
cgtctgcactgggggagagccggctcccccgggacccgccgccatctgtcactctctactc

SEQ ID NO: 11189 - DNA, 30 bp, Homo sapiens
  chr17:37774334-37774364
  hyper
cgcccggctccgttcgctacaagaaacaca

SEQ ID NO: 11190 - DNA, 340 bp, Homo sapiens
  chr17:37774744-37775084
  hyper
agttctgtggtatttgcgagtaataaatcattggatgggagcgaggaagctggagacctggcccattttcattctgcataaaattttaatggtctctctggctgatccgggacggcagcgcgcggagaggctcttaaagggccagtggcggcgggaaggggcagcggtggggatcgccgttgaccccggcggggactggcaccctagaaggagttggagatgcggcctcacattctgcaggggccgtctccggcgtgcggtggcttctgcctccccctctggggctcagtgtcctccttagtggcttctaaggagagaacctgggcggggaccaggagct

SEQ ID NO: 11191 - DNA, 30 bp, Homo sapiens
  chr17:37782848-37782878
  hyper
ctctccccacgacctcgcaggcctctctga

SEQ ID NO: 11192 - DNA, 471 bp, Homo sapiens
  chr17:37783204-37783675
  hyper
agaggcagagacacacgcggagaggaggagaggctgagggagggaggtggagaaggacgggagaggcagagagaggagacacgcagagacactcaggaggggagagacaccgagacgcagagacactcaggaggggagagacaccgagacgcagagacacccaggccggggagcgcgagggagcgaggcacagacctggctcagcgagcgcggggggcgagccccgagtcccgagagcctgggggcgcgcccagcccgggcgccgaccctcctcccgctcccgcgccctcccctcggcgggcacggtatttttatccgtgcgcgaacagccctcctcctcctctcgccgcacagcccgccgcctgcgcgggggagcccagcacagaccgccgccgggaccccgagtcgcgcaccccagccccaccgcccaccccgcgcgccatggaccccaaggaccgcaagaagatccag

SEQ ID NO: 11193 - DNA, 111 bp, Homo sapiens
  chr17:37793984-37794095
  hyper
ctcatttctaatgacacgttccctcaccccgcatttttgggttagtcaatgtctcctggttttcttcgtaccgctctgacagtcggtcaaagtcccgcttcacgttttcct

SEQ ID NO: 11194 - DNA, 30 bp, Homo sapiens
  chr17:37823890-37823920
  hyper
gaacccgcggggcccgcaggggaggcccgg

SEQ ID NO: 11195 - DNA, 30 bp, Homo sapiens
  chr17:37824218-37824248
  hyper
ctcgtcgcggagggcgctgcgagggggaaa

SEQ ID NO: 11196 - DNA, 31 bp, Homo sapiens
  chr17:37844562-37844593
  hyper
gattttacttcctaaacgtacctgtaactat

SEQ ID NO: 11197 - DNA, 457 bp, Homo sapiens
  chr17:37856443-37856900
  hyper
ccagccgggtccagccggagccatggggccggagccgcagtgagcaccatggagctggcggccttgtgccgctgggggctcctcctcgccctcttgccccccggagccgcgagcacccaaggtgggtctggtgtggggaggggacggagcagcggcgggaccctgccctgtggatgccccgccgaggtcccgcggccggcggggccagaggggcccggacgagctctcctatcccgaagttgtggacagtcgagacgctcagggcagccgggccctggggccctcgggcgggagggggcagttacacggcagcggctcgagatggcccatccaagagactggcgctttccaggctccgaggggctccgggaacttgtcaaagaagttctctgaaattgttcagaaagttttcccgcaaagggtgtattgcgtagagcgcgcgcgcgcgtttcccccc

SEQ ID NO: 11198 - DNA, 30 bp, Homo sapiens
  chr17:37857132-37857162
  hyper
gaggaaagggtggcccggagggtggcctct

SEQ ID NO: 11199 - DNA, 31 bp, Homo sapiens
  chr17:37895237-37895268
  hyper
gaggggctctgcagtgcggtggggcctgggg

SEQ ID NO: 11200 - DNA, 62 bp, Homo sapiens
  chr17:37895727-37895789
  hyper
aattataagcctctcccgtgggggcggggcgtggagtactgggcggacgggggctctcccgc

SEQ ID NO: 11201 - DNA, 68 bp, Homo sapiens
  chr17:38020591-38020659
  hyper
taaaggacgctggccgcggagtgccgcgggttccgcgcctccagccccctttcgaatgtcaaacccaa

SEQ ID NO: 11202 - DNA, 30 bp, Homo sapiens
  chr17:38084022-38084052
  hyper
aagttgtaccgtgacgtgatggtcagatcg

SEQ ID NO: 11203 - DNA, 40 bp, Homo sapiens
  chr17:38228512-38228552
  hyper
tgccactggtgttccccgcctggcccggcccacagcagcc

SEQ ID NO: 11204 - DNA, 38 bp, Homo sapiens
  chr17:38228860-38228898
  hyper
gacatgcaggcagcctcgctggacgtggagtcagaaga

SEQ ID NO: 11205 - DNA, 30 bp, Homo sapiens
  chr17:38232113-38232143
  hyper
taatccccacggggcgtggagcatagggtt

SEQ ID NO: 11206 - DNA, 290 bp, Homo sapiens
  chr17:38264455-38264745
  hyper
gcctcctgtttctctggcccacggaggaaggggcccagtgtgtttgtgccggctcgaggctcacgcgggctgccggggtcacatggcccgggcatgtgcagcctgctccatttctaccacaacaactcgctcataaacagcccggctgctgcggcggtggcggtggagacatgtgcaagcgagggggtggggcacgtggccctgcccgagccaagggaaggcgctcgctcagcactgcctccacccctccccagcactggcgctgcctcgtcacaggaaattcctagtgc

SEQ ID NO: 11207 - DNA, 46 bp, Homo sapiens
  chr17:38347569-38347615
  hyper
ggagttcgtggactacgtgttccacggggagcgcggccgccgggag

SEQ ID NO: 11208 - DNA, 389 bp, Homo sapiens
  chr17:38347753-38348142
  hyper
cggccgtcggcgggatggggggccggaggccggaggcccgcgccgccgcccgcccctgaccccgcctcccacccccgcagctgcaagcagaaccaggacctgctgtctttctacgccgtggtcatggggctggacaacgccgctgtcagccgccttcgactcacctgggaggtgatgagacccctcccgttcctacctgggaatctgggcatcccgggctccccgaagtgcgtcctcccgggacggccgccggcctggagggagtctttgcgccagttggagggaggcgccctcttctggcatacgcaaccccagggcgcacagcttggctaatggaccctgtctttgtgcaaattagtgaaaagcccggatcccgcctgagtcacggc

SEQ ID NO: 11209 - DNA, 21 bp, Homo sapiens
  chr17:38383815-38383836
  hyper
tgttccaggctggttgcggtg

SEQ ID NO: 11210 - DNA, 142 bp, Homo sapiens
  chr17:38474110-38474252
  hyper
cacttccatattacgccgccgcctcacttctcagatttaggtgtgggtgtgtgtgtggttggggggaaaggagtgtaggataccacacgctgcggtcttctccaccgagcgctattttcattctttccgcagaacctcaccc

SEQ ID NO: 11211 - DNA, 181 bp, Homo sapiens
  chr17:38478641-38478822
  hyper
aagagtggggcacgccggggctgggtcctctggctgttccctctccccacagagttacttgaggtcaggcagtctccatgtgtcactgtaccccgcaggcagtgtcaccgtgacccactcgctgtgtgtctgtgtgtacacacctaccttggagtggctttatcccggccctccccccgga

SEQ ID NO: 11212 - DNA, 848 bp, Homo sapiens
  chr17:38498097-38498945
  hyper
cgcccgcccctcttccgtccttgtcccctcgcagccccctcctctccctgtactcggcgtccctctgtactctgtgtactcctcatctggagcctttcccccttcctgcttctctcctctcctcccccttcccaggctgcccccacttgcctgtccacatgccgcctctccctctcggttccctgcgtttctcccgctgcagccggacgcgccgggaatgggttaagccaggggcggtgcctggacggggcggggcggtggaaagggggtggtgcccggaggggagggggcgcgcagagctggggtgggggggccgtggcgcgtaccaccagagaccgagcgagtcgccagctgcccctggcctggcgggggcggaaccgcgcgggatccccacccccacccggaatcctcgccacggagaatccctggagaagccccggatccccggctgggaggaggaagtgctcgttgacccccagccccgcgctgatcccgcccccggcctgcggacttggggagccgctgtactctgcctcggacgccacgagactctagacgggagtcccctcgaggtgaagccgctgagttcccgggccccgccaggcttccctgggagagccgacggaccccccctcccagcacacacaacttccctgcttttcaccgggactggcggagcggccggcggacttagacgcggggacttcagggcagggggcgccccctgcccgggtcaccagtcggggcgaggggacgtctcctctcccccagctgctctgctcggatggcgccgccggctgagtgacgggggcggcgcgcaggacttcccagctcggacctcttgcctt

SEQ ID NO: 11213 - DNA, 30 bp, Homo sapiens
  chr17:38604452-38604482
  hyper
agcctaggtgtctctcgagggccaggggct

SEQ ID NO: 11214 - DNA, 31 bp, Homo sapiens
  chr17:38776490-38776521
  hyper
cgggttagaaaacaaccgatctccttaaccc

SEQ ID NO: 11215 - DNA, 856 bp, Homo sapiens
  chr17:39683577-39684433
  hyper
gggatgaacactagacccttccggccagagaaacggaatgcaggaggccctacgctgcggtggcagagggggcaagactggccccgggtggaccagatcaccaaagccaaactctcgcatcttcctgcggcagcgcggcccctggcctagacctctgggcactctacagccgggtcccatctcctcccactcttcaggcctcgctgacccgcgtcccttcttcgtcccggggctccaaccttgcccccgccacctccagaggccccacccacttatctgccctgcccagttctcctcccctttccaccaccccggcctctgcatccagccccgaggtcctgccccgcacgtctcctgtccccctttactcggccccacctgtggaccttcccacgtcctaacgggctcctgcccgccgccccgcctggaacctcgcccggcccgcggggctgggtttccgcggcaggtgcactgcacttcccgcggccgggcctccgcccaccttgtcccgcaggtcctggatggtcgtgtagtagtggctgtagtcgcgggagggcccaggcccctgcttctggtaccagtcgcggatcttcacctctagctcgccgttggccgcctccagggcgcgcaccttgtccaggtaggaggccaggcggtcgttgaggttctgcatggttagcttctcgttgcccgccagcagcccgtcggacgcggtcaggacgccgccgtagccgccgccgtaggcccccgaggaggacgaggacacaaagcgggcggaggacacggatacgccgcggccgccggagcccccgtgaatgctgggcgcgcgaaaggcgacccccggcccaaaacgcac

SEQ ID NO: 11216 - DNA, 30 bp, Homo sapiens
  chr17:39822527-39822557
  hyper
tgatcaccagccctcgcctgctctcttagc

SEQ ID NO: 11217 - DNA, 81 bp, Homo sapiens
  chr17:40400950-40401031
  hyper
acaatgtcagtgtctcgcttgactgaacgaagggcagtaagatcatatggagctacgctttttcaacgtggtggaagtgtt

SEQ ID NO: 11218 - DNA, 30 bp, Homo sapiens
  chr17:40427459-40427489
  hyper
caagtgtttgcaaccgcctcttgctccgtg

SEQ ID NO: 11219 - DNA, 31 bp, Homo sapiens
  chr17:40429066-40429097
  hyper
ccaccagtcagagctgcgggagggactgctc

SEQ ID NO: 11220 - DNA, 30 bp, Homo sapiens
  chr17:40574016-40574046
  hyper
ggagcagagagcagcgaggggacaggggtg

SEQ ID NO: 11221 - DNA, 91 bp, Homo sapiens
  chr17:40575291-40575382
  hyper
tgagctccccagctcccgggccaaactccggagtctgatcgctgattggctggccccaccccagaaagggagggaccggggcagaagggga

SEQ ID NO: 11222 - DNA, 30 bp, Homo sapiens
  chr17:40688557-40688587
  hyper
caccgctacctgcgcgacttctgtggctgc

SEQ ID NO: 11223 - DNA, 30 bp, Homo sapiens
  chr17:40760807-40760837
  hyper
aaaagaggagccctcgctcactcttgagcg

SEQ ID NO: 11224 - DNA, 31 bp, Homo sapiens
  chr17:40830981-40831012
  hyper
aaacgcccaccaaaaacgggaatcccctgcc

SEQ ID NO: 11225 - DNA, 210 bp, Homo sapiens
  chr17:40831631-40831841
  hyper
cggcgggggcagccgcggcggggttgaggccctgaggggcagctcccaccccgtagcagcctccgcaggtcctggcggaagcgcaggcccaggaaggcgtagagaacgggattgaggccacagcgggcgagggccaagccgctggtcaccagcagtgcgacatccttgcgtttgctggcagggcagctccgctcgcgcgcagccagtaga

SEQ ID NO: 11226 - DNA, 14 bp, Homo sapiens
  chr17:40832268-40832282
  hyper
ggaagaggaagccg

SEQ ID NO: 11227 - DNA, 30 bp, Homo sapiens
  chr17:40897167-40897197
  hyper
tgccgccaaaaccccgcactcaggagtcct

SEQ ID NO: 11228 - DNA, 224 bp, Homo sapiens
  chr17:41150278-41150502
  hyper
aataaagtttcattcgaatacttgagctgccgcgccctgcgtttccctcatgagcttcttccgcccgcaacacgagactcagcaccacacaatcagcgtggcaaagcctgaagggcgggacaggaagtgaggtcactcctcaccggggtgaaaggttagcggaagtgtccttctttcctttttgctggtagggccgggtggttgctgccggtaagtagaagctt

SEQ ID NO: 11229 - DNA, 30 bp, Homo sapiens
  chr17:41624130-41624160
  hyper
aacatgtctgtgtgcgcccaggagggaggc

SEQ ID NO: 11230 - DNA, 31 bp, Homo sapiens
  chr17:41723871-41723902
  hyper
ggatagcccagaggaccgcagaggcttgaat

SEQ ID NO: 11231 - DNA, 44 bp, Homo sapiens
  chr17:41790979-41791023
  hyper
cctccccagtccccatgccagcgctcccacttttctctgagctt

SEQ ID NO: 11232 - DNA, 258 bp, Homo sapiens
  chr17:41791085-41791343
  hyper
cggtcaaatgaaaaaataccagctccgcccccacgcgggctggccggggcgcctggagcgccagggcggctgcagcgcgctctccgcggccgtcggccctgagctcatttcctggggcgcgcgcgccgggctatttcagcctggcgctgtgcaaacaggacaatttactgcggccaaaagggacccaaattacaatcgtatcacagacaaatatccgccacgccaggtctccaggggccaggaggggcctctctcccg

SEQ ID NO: 11233 - DNA, 32 bp, Homo sapiens
  chr17:41791412-41791444
  hyper
cgtttgccaccgagctgtgcctgctctctgca

SEQ ID NO: 11234 - DNA, 31 bp, Homo sapiens
  chr17:41910271-41910302
  hyper
cagggagcggggggcgcgcggcggggcgggc

SEQ ID NO: 11235 - DNA, 115 bp, Homo sapiens
  chr17:41910563-41910678
  hyper
cggctgccgcgccgggcgggggtggcggagcctgaggaggcgcggcgcggggaggaggcgcggcgcggggaggaggcgggggaggagcggaggccgccctccgcgtctggcaccg

SEQ ID NO: 11236 - DNA, 190 bp, Homo sapiens
  chr17:41910700-41910890
  hyper
cgctagccggcgtcgtacccgctcccgctctcccgctccctgagtcccctgcctgtgtccccccgcaccctggcacacagccagacttcccttccgcccgcgcaacccaccctccgcgagtggaggggtggacacctgctcaacagagaattcgattttgcaaacatttattgagcgccctccaggtgcc

SEQ ID NO: 11237 - DNA, 30 bp, Homo sapiens
  chr17:41984003-41984033
  hyper
ccagaggatggggtcgaaaggccaggcgga

SEQ ID NO: 11238 - DNA, 836 bp, Homo sapiens
  chr17:41984426-41985262
  hyper
gccaccgggacccagcgcaacctctgtctcgctccccaacccccggaagcgctaacagcacggttcttacgtaatgccgggcttctaagtacccccaacccgcacagcccccggggaggccgcgcagataccggggcccctcacagctcaccaccttggtgcctgaagccactttggagcccctaccgcaggggcggggaccagtgtcaatgggcagcggggcttggttctcccaaccagcaccccagaaagagggcccaggggcgggggcgggtggacagggagggaacgggcctgggtgaaaggggcctgtggagtttaaacccagtgaatagggtcctaagtgccgtgtcaggacgaaaagaaggcggaggtcttgggataggagctggcccgggggccgggggacgcctacctgcgccccgggaagcccctagctccgggcggctccagcgcagccgggcgctcagcgtttattgcttgtcaatcgctagcccggctcttaaagcggcaaggcctctccgcgagggggcggaggtccggaggagaggggaggtgaggagaacgcggaggccggcacaactcggaggaagtagtctttcccagcagctggtacgggggcagccaggtagtggtttgggagacaccgcacagaccacgacgccctgctggagtcccactgggaagggttagggaggcaggactggtaccagtacccgctggtgcccctcggctcccaaggatcccttaaaggggcgatggtaaaagtgcctaatgagaccggcttgattactccgcccacccatcttggcttagaccggcgttctagttccagg

SEQ ID NO: 11239 - DNA, 30 bp, Homo sapiens
  chr17:42005404-42005434
  hyper
aagagccctttgcactagcctgggaggagg

SEQ ID NO: 11240 - DNA, 479 bp, Homo sapiens
  chr17:42030271-42030750
  hyper
tgcaaatgacgtgggcgtggttggcagatctcccaggaggcctcaggggtcctcaccacaggtctgggccctccgacctgcggaagcgaaggggaaggaattggatctggggaggcgagcctgggagacgtcgttaagtgatgttgccagggtagggccaggccgcgctctcggatgcaggatgtgtggtaacgggcgcttttaccgcgacctgacggggcggtcctcgccgtcggggaagaacgttttggaaagaagcgtgtccgggccgtctcttttcccatacctgggggcggggaagggaagagcgtggtcagatctggccacgcccccaggtggagcggggccgcagggtgagagccccaggggtcccgctccgcgcctgcgctcaccgctgccgggtgaccaggttgaggtagtggcgcagggaggcgtagtagcggttcagctcctccggcgaggcgtcttcgcggggagcc

SEQ ID NO: 11241 - DNA, 77 bp, Homo sapiens
  chr17:42030779-42030856
  hyper
cgcccctaggcagacgagcagggccagaagcactgtggtcaaggcgggccacggcctgcgcacgaacaccatctggg

SEQ ID NO: 11242 - DNA, 1928 bp, Homo sapiens
  chr17:42082006-42083934
  hyper
tggggggcaagagttggttgtcgtcatggcgacggcgctgatggctgtggttctgcgggcagctgctgtagccccgaggctgagaggccggggaggcactgggggcgcccgaaggctgagctgtggcgcgcggcggcgggcggcgaggggcaccagcccggggcgccggctcagcaccgcctggtcgcagccccagcccccgcccgaggagtacgcgggcgcggacgacgtctcccagtcgcccgtcgccgaggagccgtcgtgggtgccgagtcccaggcccccggtgccccacgagtccccagagcctccttcgggccgctcgctggtgcagcgggacatccaggccttcctgaaccagtgcggggccagccctggggaggcgcgccactggctcacgcagttccagacctgccatcactccgcggacaagcccttcgccgtcatcgaggtgagcggagcccggcgtgggccgtgacgcagcgaggggatggggttgtgcggccacctgtcctcaggcatggcaggatacgctgcgggctctgcgcagcggaagcgggaaggagcccggcagggcccagaccagcgccgccgggaatgggagaggccgtaagctcctccggaagcctcccgcccagcccgagtgaggatcctgggggaccccacccgccaggtgtgatgctctgaagaaggcccccaacatgggcgcagttaggggttcagaaggacctggacaggagccgcttgcactgcccctcccccaaagatgtcccggagtccaaggtcggagggaggagggcgggaggtaccccagcgtgagacaagggagtggcaagacccaacggggcaaagggcggagcaggtgggcactggtggccagaactgggtcctgacagcttctggaagggtagggtcaccgagacggccctgcaggccaggctgtgggagccagcggctcaggtccgtgtcacgctccttgaaagcccactcctccgcaggtggacgaggaggtgctcaagtgccagcagggcgtatccagtctggcctttgccctggccttcttgcagcgcatggacatgaagccgctggtggtcctggggctgccggcccctacggctccctcgggctgtctttccttctgggaggccaaggcgcagctggccaagagctgcaaggtgctggtagacgcgcttcgacacaacgccgccgctgctgtgccattttttggcggcgggtctgtgctacgcgctgccgagccggctccccatgccaggtgagtgcccgccctgcccgcccaggcgtcctcagagcgtgctactctgcccgccctgccccgtccggcaggcctggagggggccctctcgagcaccacgtctggcccacagctacggcggcatcgtctcggtggagacagacctgctgcagtggtgcctggagtcgggcagcatccccatcctgtgccccatcggggagacggccgcgcgccgctccgtgcttctcgactccctggaggtgaccgcgtcgctggccaaggcgctgcggcccaccaaaatcatcttcctcaataacacaggcggcctgcgcgacagcagtcataaggtgcggccctttctttcaccttcccccacgccggcgatccgggccttctcttgcgcccctcgcacttctccccgacgggccgcagactcactagcaagccgggtgggtagaaaagcctaagggagtataggggaggagttcagccctgggtgcccagatctgcgccctccctggctaaggactccgggcggaagtaaggataaaggggtcagagaaaagagaggtccgtgggggtaggggggcagtccgtgccggctgtgggccaggctcacccgctgactccggacacaggtcctgagtaacgtgaacctgcccgccgacctggacct

SEQ ID NO: 11243 - DNA, 846 bp, Homo sapiens
  chr17:42091702-42092548
  hyper
cttttggggccgaggcgctcaccttcagccagtccccgtagtggacgtagcccccgatgtaggcggcgtaggtgctaatggccaattggagtgcggcccccagcgcgaaccagcgccgcttcacgccaaaggacatgaaactagcgcacagcacggctgcccccatgtcgaaatacaggtaaggcactgggatgtcgggcttcctgcgagccgggagtggggaagcaacgaggacagaatgaagcggtgggggaagaagcttgagaccccttgagttcccacaggctccactgctcccccaaaccagactcccctcccatgggcaggaccgccctaccagatttggtccgacacccagaccagaacccctcccagggaggtcccaattcctcccagttcaagggtcccgacttctagcccccaatttcttgcccacatcaccgccccctgccgcgtttagcggctgcgtaggcctgctcaccggcgtgcctcagccctctcagcgtacagcatgagctggctgaagcagccccaaaaggggcagcgtgtgagcagcaccgaacccaactgcatgatcagctgcaacatccaccgtctcgaacctatcttcgacgccatcttgggaaagggcagtccgctgcggcctcaccccagtcagagaagcaggcgcggggatgggacacgcagcttccgggtcaagcgctttttctttttcctcccggaaacaacggtgtcattctctagttccggatctaaggtgacccagttgcgaagtccagccttctcgtctgctcatggagccttcagggccatatttgtccctgcgaatttgaaaactagactaga

SEQ ID NO: 11244 - DNA, 30 bp, Homo sapiens
  chr17:42148055-42148085
  hyper
gggccctgaggaaacgcctttacaaaggtt

SEQ ID NO: 11245 - DNA, 30 bp, Homo sapiens
  chr17:42264410-42264440
  hyper
cccctacggaaagacgagtccaggggccgt

SEQ ID NO: 11246 - DNA, 166 bp, Homo sapiens
  chr17:42386175-42386341
  hyper
gcggcagcagtggccgcacatctggatggaagcgagctttgtccagaccaccatggctctggggctgtcctccaagaaagcgtcctctcgcaacgtggctgtggagcgtaagaacctgatcaccgtgtgcaggtgggcaccgctagtgggcgggggctggggtggt

SEQ ID NO: 11247 - DNA, 247 bp, Homo sapiens
  chr17:42392465-42392712
  hyper
cgcagacgcgcggggggaggggcgggaccggccgtgcccactgctccctctcccaagctacgactacctgacggacgaggaggagcggcacagcgccgagagcagcacgagcgaggacaactcgcccgagcacccgtacctcccgctcgtcaccgatgaggacagctggtacagcaagtggcacaagatggagcagaagttccgcatcgtctacgcgcagaaggtgcgcgacgccggcgggcccggg

SEQ ID NO: 11248 - DNA, 30 bp, Homo sapiens
  chr17:42392968-42392998
  hyper
ggagcagctgtgagcgcacggcctgcccta

SEQ ID NO: 11249 - DNA, 235 bp, Homo sapiens
  chr17:42393843-42394078
  hyper
acgcttaatggggccgagggcgccagcaactccaagctctaccggaggtaagccccagccaggtggggcttgggcctgagagcgggtcgtcctggggaagaagggcttcctctaccggcgcaccagctctcgctctgccgcagacacagcttcatgagcacggagccgctgtcagctgaagccagtctgagctcggactcccagcgcctgggagagggcacgcgggacgaggagc

SEQ ID NO: 11250 - DNA, 264 bp, Homo sapiens
  chr17:42402709-42402973
  hyper
gcgtgagccgccgcgccggccttaacagcgcattttcaccagccccgccccggccgcgcgcggcactggaaaccccagcgccttctggacggcgagggtgacgcactggccctcttcctcggtgtcctcaggtgcgtggcggcggcagtgagaatgagttcttcgagatcgccgggagaccacacaataacgacgaagttacttgccgggctacccgccgagacttgaaaacttcgcggcgacttctctcgccggccttagcat

SEQ ID NO: 11251 - DNA, 153 bp, Homo sapiens
  chr17:42441041-42441194
  hyper
aacagccgcgcgaggacgctggggccactcgccggcggcatcgcggggctaggccgggccctagcggtccatggctcccgcctggtcccgctcgcccggccccgcgcagccccagctctgcgccgcgcctcgcagctccggctcccgctcccg

SEQ ID NO: 11252 - DNA, 30 bp, Homo sapiens
  chr17:42462943-42462973
  hyper
gctcagggtgttcccgcgacagggggagta

SEQ ID NO: 11253 - DNA, 42 bp, Homo sapiens
  chr17:42634025-42634067
  hyper
tcctttgtgttggctacggggcaattacgcctcggagtcctg

SEQ ID NO: 11254 - DNA, 614 bp, Homo sapiens
  chr17:42635072-42635686
  hyper
ccctgccccgcctgctgctgccgctgctgctgctgcccgccgccgggccggcccagttccacggggagaagggcatctccatcccggaccacggcttctgccagcccatctccatcccgctgtgcacggacatcgcctacaaccagaccatcatgcccaaccttctgggccacacgaaccaggaggacgcaggcctagaggtgcaccagttctatccgctggtgaaggtgcagtgctcgcccgaactgcgcttcttcctgtgctccatgtacgcacccgtgtgcaccgtgctggaacaggccatcccgccgtgccgctctatctgtgagcgcgcgcgccagggctgcgaagccctcatgaacaagttcggttttcagtggcccgagcgcctgcgctgcgagcacttcccgcgccacggcgccgagcagatctgcgtcggccagaaccactccgaggacggagctcccgcgctactcaccaccgcgccgccgccgggactgcagccgggtgccgggggcaccccgggtggcccgggcggcggcggcgctcccccgcgctacgccacgctggagcaccccttccactgcccgcgcgtcctcaaggtgccatcctat

SEQ ID NO: 11255 - DNA, 30 bp, Homo sapiens
  chr17:42853596-42853626
  hyper
tgtggagccctgggcgaggcaacccctacc

SEQ ID NO: 11256 - DNA, 976 bp, Homo sapiens
  chr17:42906654-42907630
  hyper
gctccaaacgcagccgccaaccacacaactgcccacaatcacagcggtagcgcctactcttaattttgaagctagagacttaaggaaacacacacacacacaaaacagttctcaagtttgacaaagtgggggaaaagtcattttaagtaaagacaacgagttaatcaggaggcgatgagcccagtccttccgccccgctttcccgcttccagccctcgaacgaaccctcctctaacccccgggaggcaggagttccagcggggagatgcgggaagcctcagacgagcccgcacgccgccggagacgcagggatcgaggtcggggagacaaagagcagcccgcgaagagcccgggcggcgaggggcggcccggctccgccctgcgcccctaaccgcccgggtagttgtcggcaccgccggggcgccgccgagtgcgcgccgcttctgtccgggctccccgaccgtcgcccgacacctccgcggcccaggacacccccgagccgtttccctcccgatttgggagccgcgcgcctggggacaaagagggagggtgcgccggggacagtggcaggacgcgggccggcgacgcccctccggactcggcgggaacccctcggcggcgcccccctccttctcccgctctggccgcgctcctccccggacctccggaggttctcctcggcccctccccgggctccccaagagttctcccgcctccccctgggaccccgcccctggcccgcttctcctcagccggccctgcggccgcccctcacccggcggcgggttcccccggagccgcctcctccgccgggcctcggcccgtcccgccggtcgcggcctcatgtgccccgcgtcgccatcgccttcaccctcgcctctcctccacctcctccgccgctgccgccttcgcctcagtctccagccgaggcagaagccgctcccgccgctgccgccgccgccgccgcctcccgctc

SEQ ID NO: 11257 - DNA, 450 bp, Homo sapiens
  chr17:42907654-42908104
  hyper
cgcctgcgcactgcgcgctgcggtgggggcgggggcgtcccgccgcggcccgggagcggggggcgcgcggcacgtggcgctcgagtgggaggggggcgccccagaacgcgcgggaagcgacgcgagcgccaactttccgcggtcgagtcctcgccgctctctcggatagtccgggacgcggcggaggcgcggcgcgcgtgggagtcacccgcgtggagtctggaccccgggtgggcgcagacttcgctccggacagttcattcttccaagctgattttcgggcgagagtcccccgccagccgcgcctcagtttgagcgggccgctaacggcgccgtgggttctcgccttacctgggtatcctgggttggtttagcgggcccagagttgtcttctgcgcgctccgccgaggccttggtccattgtagcacgggatgctaatgtctcctccc

SEQ ID NO: 11258 - DNA, 95 bp, Homo sapiens
  chr17:42988769-42988864
  hyper
cctcccgcacgtgccgctcctcctgctcgcgcatctgcctctccagggactcgttctgtgggatggagccggccggtcccgcggagccccgaccc

SEQ ID NO: 11259 - DNA, 30 bp, Homo sapiens
  chr17:43025008-43025038
  hyper
tccgccgctggcgtcgctgcttgctcacgg

SEQ ID NO: 11260 - DNA, 23 bp, Homo sapiens
  chr17:43028038-43028061
  hyper
gccaccgcgcctggtctactttg

SEQ ID NO: 11261 - DNA, 135 bp, Homo sapiens
  chr17:43044671-43044806
  hyper
cacgtgatgaccaagcggggccgctgtggggtgggatctccacctgcgtccgcctggcgcccccgccaactccgatcaggtacccatttgccccgggctccctgggtgccctgggcccagcccagccccatgccc

SEQ ID NO: 11262 - DNA, 5 bp, Homo sapiens
  chr17:43044863-43044868
  hyper
cgccg

SEQ ID NO: 11263 - DNA, 227 bp, Homo sapiens
  chr17:43045038-43045265
  hyper
cgtggtgtaggtggcagtgctgatggcgccgctgccccccgcgcccggcagccccggagggcccggcttgcctggctcacccttctcccccggcggccccacagggccgggaggacctgggtccccgggaggccccggagggccgggcttgccggtgcggcccggcttcccctgggggccctgcaccagcgtggaaggcgggggcgcgccgctctgctcgctcaggg

SEQ ID NO: 11264 - DNA, 201 bp, Homo sapiens
  chr17:43045371-43045572
  hyper
cgagctcaccagcacggggatgagcaccaccagcaccagcagcatcaccacacccgcggcggccgctagcagcgtctttcggcccgcgcggagcctggggagcgccgggccgcccggccgcgccgtcggggcaatggtgccggcgggcagggggcgcgggctaggcgcccgcgctcaaggacggtccggcggggctgcggg

SEQ ID NO: 11265 - DNA, 7 bp, Homo sapiens
  chr17:43047918-43047925
  hyper
cgtctcc

SEQ ID NO: 11266 - DNA, 31 bp, Homo sapiens
  chr17:43209588-43209619
  hyper
cccaccgccccttgcccgtcactgacccatc

SEQ ID NO: 11267 - DNA, 30 bp, Homo sapiens
  chr17:43239304-43239334
  hyper
aggtagggctcaggcgttgggaattgcacc

SEQ ID NO: 11268 - DNA, 31 bp, Homo sapiens
  chr17:43278126-43278157
  hyper
ctccctcttcccctcccgctaccgaacttgc

SEQ ID NO: 11269 - DNA, 40 bp, Homo sapiens
  chr17:43324313-43324353
  hyper
gtcacctccgacctctcgctgtagccgctatttctgcagg

SEQ ID NO: 11270 - DNA, 833 bp, Homo sapiens
  chr17:43324838-43325671
  hyper
gcccgcttcgagggggcggaggctttcgtggctggcccagtatccctgcgggaggccggagggggcgagcgggcagctggggttagacacgccgggccagccccgcagcagttctccttccggctgccccgccccatttgcgccagtcctgcctcccacccgggcatctggccccttttcctttcgccctacccagtacttagtgacgccataagtgacctcgccttacatctccgcgcgtgccgcctccgtcaccgcctgccgggtccccatttcttccgggcctgcccccgctcctcgcctgcccctcccctccaccagccagtgtcgccccatctgtctgtcctccgggcacttgtcccgcccctcactgcgtgtccctcccccgcccgccggctctcacctaggccgagacacgccccgggctgggcgggatcttggggcggccgggctagtagggctggatcaggcggaagccggggcccggggctgggcttcgtgtcctgcgttccgggagcgccaacccctccaggttaggaatctgagagtacgggctgcgcgcacctggggcgggtgcctgggaggaggtggaggaggagacggtcctcagaacgggtcctgggggtcggaggcgagggcgggggttgtaagtggccgggagaggtccctcccgcgggtcccggcgccccccgccccgtcggggacgcacctacttcgtgcagtttgtgcagcgagcgcgccagctcctagttggagaggtcgctgatgcgcgccgcgtggcagaaggcgagccccgcgtgggagcgccccccaacccccgcagcctgggctga

SEQ ID NO: 11271 - DNA, 39 bp, Homo sapiens
  chr17:43339368-43339407
  hyper
acctgtcacccccatgcagaccgaggctctgtcctggag

SEQ ID NO: 11272 - DNA, 354 bp, Homo sapiens
  chr17:43339475-43339829
  hyper
cgctggaaatattagaggcgccggtgcctgtgatgtcgccgcctctgtgacgtccccgccgcgaccccacaggcagggagccgcatttaggtttcgggcgggcggacgggggacggcccgagtgaggcgtcctccgaaggctgcgggcccgaagccagaactccttcctctccgaagacctcgggggtggggctcgcgcttccgcagcgggcctagagcgagaggcaggcggcaggtaagcctggctgtgctggacaggacttgcacccgctctgcacgccagcggctcagggctgccgcccttttcgtggtcccagggcccttccaagaaccggctaaaccaacccaagccgc

SEQ ID NO: 11273 - DNA, 26 bp, Homo sapiens
  chr17:44849774-44849800
  hyper
gatcagaggtgactcgcttttgggga

SEQ ID NO: 11274 - DNA, 41 bp, Homo sapiens
  chr17:44849831-44849872
  hyper
cgctacctggcccgaggaggggcaccggaaagcgctgagac

SEQ ID NO: 11275 - DNA, 264 bp, Homo sapiens
  chr17:44919153-44919417
  hyper
ctgagagaccttgagcaaccacgtcctcctctgagctccgcgtttgccgtgtgcaaagtgaaggggtaggccgaccccgcagggcccttcttgcgctcctctgcggtgtgtgggggggtctctggtccgcgagaggacagtccctgccgcgccgagcgtcctccagcgtccgcggccgccgcgagcagcgctgaccggcagggggcgctcctgcagaaggctggccgcggtggcgccctcggcggggcctgggctggcctgggg

SEQ ID NO: 11276 - DNA, 30 bp, Homo sapiens
  chr17:45056961-45056991
  hyper
gacatcagatgagtcgccgggacccctggc

SEQ ID NO: 11277 - DNA, 30 bp, Homo sapiens
  chr17:45266584-45266614
  hyper
tagcggctccggcccggccagcccctgctc

SEQ ID NO: 11278 - DNA, 826 bp, Homo sapiens
  chr17:45330947-45331773
  hyper
gatgcgctgacgacccggctggcaggcgggtcctcgtgggcgaggcgagggaggcggcgagagaggagcaatagtttcccaccgctccctctcaggcgcagggtctagagaagcgcgaggggatctagagaagccggaggggaggaagcgcgagtccgcggcccgccccgttgcgtcccacccaccgcgtcccctcccctcccctcccgctgcgggaaaagcggccgcgggcggcggcgcccactgtggggcgggcggagcgccgcgggaggcggacgagatgcgagcgcggccgcggccccggccgctctgggcgactgtgctggcgctgggggcgctggcgggcgttggcgtaggaggtgagtgaggctccggctcggcagcgtcgcagctgccccaggatctgcgccccggtcaagttgcggacttggagccggcaaacgcggagggctggtcccgcgcgtctgcgctgggaatgcgcgtgtcctggctggcgcggtcggagccgggagctggggaccttcctggcccggcggtggcggggctgagaggtgcctggtgcctgggagcgggtcctccgagacgccgaagccatcagccaggctgagcgccttcccggccgccgcggcgcgcacggtgcggtgggcgcatctctgagccccgcgctcacccggggctgcgcgcgtcgcgggtggtcctggtcgggccaaggacgactggcccaggagccaaggcgaggtggggcttccgggggttgttcccgcgccttggcagagggatgccgctgtagcttcctgggtgagagcgtgcgcgcgcgcgggtttgc

SEQ ID NO: 11279 - DNA, 40 bp, Homo sapiens
  chr17:45609731-45609771
  hyper
aagaagctggctgggcgcggtggctcatgcctgtaatccc

SEQ ID NO: 11280 - DNA, 785 bp, Homo sapiens
  chr17:45810599-45811384
  hyper
ctagtgacagcggcccgctggagaggaagcccgagagctgccgcgcgcctgccggacgagggcgtagaagccaggcgtcagagcccgggctccggtggggtcccccacccggccctcgggtcccccgccccctgctccctgcccatcccagcccacgcgaccctctcgcgcgcggaggggcgggtcctcgacggctacgggaaggtgccagcccgccccggatgggcatcgtggagccgggttgcggagacatgctgacgggcaccgagccgatgccggggagcgacgagggccgggcgcctggcgccgacccgcagcaccgctacttctacccggagccgggcgcgcaggacgcggacgagcgtcgcgggggcggcagcctggggtctccctacccggggggcgccttggtgcccgccccgccgagccgcttccttggagcctacgcctacccgccgcgaccccaggcggccggcttccccggcgcgggcgagtccttcccgccgcccgcggacgccgagggctaccagccgggcgagggctacgccgccccggacccgcgcgccgggctctacccggggccgcgtgaggactacgcgctacccgcgggactggaggtgtcggggaaactgagggtcgcgctcaacaaccacctgttgtggtccaagtttaatcagcaccagacagagatgatcatcaccaagcagggacggtgagtgcggcgcgccggcccttggggcctctgtgcccgcgccggaacaagaacgtctcgtctgtttttctgg

SEQ ID NO: 11281 - DNA, 518 bp, Homo sapiens
  chr17:45867102-45867620
  hyper
tcgcagcagccggcgcgtctttgttccgtccaggcatcttcaacgcgtccctccctctggacgctgccgaggaaatactgaagtggtagaggatgtggggaggccgtccaagagtggaggtgtcccgggcctgctctctccaggaggaggagtgcaggctggggtccacctccccggtccagcagtgctggggaggggaccccgcacgtgtgcccggagcgcggacacggtgatgcggctgcccctcgccccggccccaggctcgctgcgccctccctccccggtcgcctctgcgtttctcccgccagcaggagaccgagtctgagcgcagccgccgaccctgcgccttccctgtgcactcaaagaccgccagctctgggggagcccggggacccacgccgctctgggcacaggcgaccgaggccaaggcgctccgggtctctccagttccggcgtcttctggtcctcgggctccgctccgcggccactgggcccgctgcacgcgagcgcgccgagct

SEQ ID NO: 11282 - DNA, 30 bp, Homo sapiens
  chr17:45973402-45973432
  hyper
gctttcggttggtgcgctctaccgtccatc

SEQ ID NO: 11283 - DNA, 30 bp, Homo sapiens
  chr17:46089316-46089346
  hyper
ctctgaggggcttgcgtctccctgatgcgc

SEQ ID NO: 11284 - DNA, 207 bp, Homo sapiens
  chr17:46124762-46124969
  hyper
tgggacctcggaattcgtagcttagcaagctccccaagtgatgctgggagtaaactaacgtttgagagtcacaaacatgttttggcaatataaccagatgggactggagaaattaaaaaatgagaaacatccctaaaaaagcaagactaagctgcgtgggaggccaaacgaggggggtcctttgggctgtttctaccatgacaaaaa

SEQ ID NO: 11285 - DNA, 307 bp, Homo sapiens
  chr17:46125006-46125313
  hyper
cgccaacgttccgccaacgtcccaccaccctcatgatatccgtccgcggtactgctccagcgaaggtacccttgcctgggccatgaggcgcaaccgtccctcacagctggggtggcttctccaggttcgcaccgaggggaagttggggtaccggtttccgccgccagcacccaagatggcggcacgagcgtcgcaaccacaagaaccacatgcttcgtgtcccgcctcagcattctcgggtctcactagacttttgcaagtcactgtgggaaccctcaaggcgagggtgttccgcactctggcggcg

SEQ ID NO: 11286 - DNA, 186 bp, Homo sapiens
  chr17:46507534-46507720
  hyper
gacgggctggaaggcgacccggctgcaccgcgaggcacctgtacctcagccgcggtcgccgcccgcccagcccggccgcggggcggggccgtgggtccccgggcgcgtcaggaagtggcgcgggcggcaggcggggaccggaacggggcgcggggcgtgggtgcacgtggcgctcacgccggagcc

SEQ ID NO: 11287 - DNA, 16 bp, Homo sapiens
  chr17:46619087-46619103
  hyper
cgcaggggcgggggca

SEQ ID NO: 11288 - DNA, 1058 bp, Homo sapiens
  chr17:46620325-46621383
  hyper
agcaaaacacataagtctatgcgactgagggtgggagaggctcgatttttccagtagacggccaaggagcgcgggggtcgaaaggaccgggaggaggaaacaggttagggaaactgcaggtcgatggcacagagcgtactggtgaaaaaatccagctcttcctcggaaaaagggaccgggctgtcgagagaaccctgtaggctaggggagaggcctccggatagctggagacaggagtcggccgcgaagaagttgaggtcgggaaggaaaggtgaatcctggcgccccgagaagacgtcttctggcaatggcccgggctccagcccgccggccccgcgcagcgcgcagccgggactcgacgcgcctgcgccctctaagcgaacggctaaaggccgggggtccgcgcttaaggcccccggcaccacctccggcgggtgacagcaggcttcccacgccgcccgcgaggcggaggggccgcccgggctggccgcgggttcctcggcagggtcgcagatgtcctccagggctcccgggcaggcaggctccccatccggcggctctcggtgctgcgtctgccgcttgtgcttcatgcgccggttctgaaaccagactttgacctgcctttcggtgaggtccagcaaggccgcgatctcgacgcggcgtggccggcacaggtacttattaaagtggaattccttctccagttccagcagctgcgtgttggtgtaagccgtgcgcagcctgcgcgccccgccgccaccagcctccggcagtcccaggccatctgcagggaaaacaggctcggcgtcatagcgggccgtgtactcagcccaacctcagttcggactaccccatcctccaaaaccagtatcacctctccccttcctcgccaccccacccccgcccccaccccaaagccgctcgctttactgcttttgggttttcttctctccctctctagtctacagccccggcccgggtcagggcaaagcattcagagccgcccacgggccacgcagggggcggagagcggctcccttcggcgccggaacctcaga

SEQ ID NO: 11289 - DNA, 30 bp, Homo sapiens
  chr17:46621694-46621724
  hyper
gaaaaaaaaaaagacgctgttagcggccag

SEQ ID NO: 11290 - DNA, 358 bp, Homo sapiens
  chr17:46655060-46655418
  hyper
ttatgtggctctgaaaacaggcgaccgtaaatctccggcaatggcgagtttatagcggggacaattggcttccccagctcaacccccccccaacccatgcctccgaagtccctttggtgtaaagctccaggggtgggagggggaaggggtgcccacgcactcacccgtgctcacgtgaactttgcgcatccaggggtagacgacgggctctttgcacgcggagtgggacgggctggggtgcagggggttctgggcgcagggaggcggcggggggctgctgctgaccgcctcgcagcgctggccgggctccgggaggagggccccggcgggtggcggcgcaggagcccgaggggacaga

SEQ ID NO: 11291 - DNA, 548 bp, Homo sapiens
  chr17:46655450-46655998
  hyper
cggaggcggcgggggcccagggtcccggcaggccgcgtagcgctgcacggtgcacgccgcgcgccgcccgaagcccgcctccggctggaagctgctctctcgcctctggccgccggcgtagtacccgggcgagtggtcgctgggtaggtaatcgctctgtgaatattcctcgcatggagggaacttggggtcgacatagtttgagttgatcaaaaaagaactcatagccattaatttctgggaattgcccacaaaatatactaaaatttattccgacccctgactcgttttcctgtttccgaaagccctcctacttactgtcaagtgaacaaagttaggcgcccacgtgatcctccgagccaatggccgccccgcctgcgattcccggataaggaaatctgctcacccggaccccactccagccaaagaggtttatttccccttcttcccttccccctccccacccacccacccaacaccaggatttacatagggctcctgcggggcgaccccctccttgcctcgctctctccgggatcagagagaga

SEQ ID NO: 11292 - DNA, 445 bp, Homo sapiens
  chr17:46656057-46656502
  hyper
cgcaaaccctagatcccttaagaagttggggctcccggtgtagccctcctgttctgcctcacctctgcccagcattctgtaccttccaaaggccccagtctcctcccctcggcgggagggagcgctagcaccctgcgtctctatggggagttaggttactggcgggttgggggctccgtctcgaaaggggaacccatacgggggccagagcacagagcttggggcttttctctgcagctggatggggaagggtaggggtgagagaggaggcgtccagagctagagggcgggtgcgcagagggacttgtcagagatgaatggaaccgcgggcggatcgataggaaattcatgcactaattcggggagacttcgccttccaaatctcatttagctgcacggttagctagactgtgtccgtcagtccgtctgtcccccttctcctatc

SEQ ID NO: 11293 - DNA, 189 bp, Homo sapiens
  chr17:46659084-46659273
  hyper
aggaacaggcggcagagccaccgcgggtttgggtatccttgatcctggcgcccaagagcagagatttttctcctctgcgccctggaagtcaccacctgccaatcccaccaaggcgccgcacccccctcacccctccagccgcctgagatggagaacagggtttatgggcgactcccaggacgggtttca

SEQ ID NO: 11294 - DNA, 482 bp, Homo sapiens
  chr17:46659384-46659866
  hyper
cgctcccgggtctttccgtggcttcccagccgccttctcctggcagccacaggttgctagcgtgacctcgcccctcccagccaccctccgccgtccaggcgtgcccagtccgctaggaatcatcaccttttgttggcggggagaagggactcagcgagggagcgaaaccgaaggcccgagcggaggcgagtccccagccggcctgcgcaccggcggcggcggcgcggaggagagaaaggcccagagggggcgcgggcgagggtactcaccgggaggctccccagccccgccggccgccgagccgcccgcggacgcgccgggcaacagctgagctctctcctgtccactattgtgtgtccggaaaaccggaccgcggcggcggacacagccacgggctccctcagaagccggaacgtgacttttttttttggtgtgtttttgttttggaagcgcaagttttcgtgttaatctcatactttggc

SEQ ID NO: 11295 - DNA, 31 bp, Homo sapiens
  chr17:46662739-46662770
  hyper
tggagcaggggctcctcgggagcagaagggg

SEQ ID NO: 11296 - DNA, 30 bp, Homo sapiens
  chr17:46663388-46663418
  hyper
ccagccgctgtgctccgaagccgcaaggct

SEQ ID NO: 11297 - DNA, 97 bp, Homo sapiens
  chr17:46663719-46663816
  hyper
tgcaatcagtaaattcgccaaaagaaagaacgaaagatccgcctaaacctgccggcgtgcccccacccccggtctacagaggcggaggtggctgcgg

SEQ ID NO: 11298 - DNA, 794 bp, Homo sapiens
  chr17:46670737-46671531
  hyper
tgcagggcagggactcgggcgaggacagggagcagctcgaagccgcttgcctgaagcggggctcctgggcgggcgcggggaaggcgcgcgagctctcgcccaccgccccaaagtggctggaggaggccgaggagcggttgacgctgaggtccatcccattgtaattgtagccgtaagagccggtgtgcatggcagcgggatccctgtaagagccgctcagagagctgccactgccataatttagcaactgatagtccgggccatttggataacgccccgagaaggagtttacaaagtacgagctcatttgggtgattttggagggcttgatttgtggatcgtggtcgttataaccctgtgcttcacgatttatgatgtattaatgaattatagcgatgcactgtacttcgttttgctatgtatgcggccaaatatggggggggggttggaaggggggtggggggcgttagggaatcacgtgcttttgttgaccagtcgtaaattctcgctgatgacctcaagaggtaattcatgctctatggttacaaataatgacgatccgagaatcgttagggccgattcaatgcgagcctccgagagagggggaaaaaaggagaagggggagaaacagagagaaggttggctttggcctctgagcagagcgcgccacctcccggcgaccgacgggagcgcgggcgtgagaccgccatggcggcgggcggctgcctccctgctggctccctgcaggctccctgcagtcgccgggagagaaagaaacccggccaaggctcagc

SEQ ID NO: 11299 - DNA, 809 bp, Homo sapiens
  chr17:46674937-46675746
  hyper
cgagagacccccggccggcgcccaatcttcttctatctcctaactgagatgcccacccagcaccctgtgggagattggggcagggggcgctcactagttctgtgtcccggggtgggcgcccaggggagccggggcgacggcgacgggaagtctcactcactgttgcacgaattcatccgctgcatccacgggtagaccggagtggagcacttctgctcttctgtctcgccgaacacgctcttgtcctgcgcgcagtccgacttccgcggctcggggtggaacgggggctgctcgtcggcgccggagagtgcgcaggccgactctttctcgcggtagaaggccggcgccggcccgtagtcgcagggcgccgctcggccgtagccaccgcccgccggcgggtaataggaggaagtggcaaagcccttgtcctggcccggccctggcccgtagggcgcggggtaatgtctcagcgggtccgcatagcccgacgaatagagcggtagctggcccaggaaggactcctgcccgctggccagagtgacggggaaggtggagttcacgaaataggaactcattgggaggggaggcgcgcgcggccgctgctgctccgccgggtttatgatttgttgtgttttatagtccgagcgccgcgcctattagtagtatatccgagattgggttttagctgaggggggatggcgaggtgccagtgagggccagaaggaaatacaaccatctgatccaacactgaccaatggcagaggcaggaattgtcaaatagcacccaggaggagcgcagcccgcacgag

SEQ ID NO: 11300 - DNA, 1612 bp, Homo sapiens
  chr17:46687506-46689118
  hyper
atggctattctctgcaaacaccggccttcctccgcaagacaaacggcctcgtctccagcccgtgccggcgctgctgataaatatttaaagctaaaaggccgagaggaagggtgggggcgggctgggggctcgcagcgccgtggtgccggcgaagagagatccgccgggaagcagagcgagcctgagagcaccgagcaaatatgggggcggggatggcctgctgggtcgcggcccagtgggtgcagccttccagggccgacctccggctgggagcactctggacgcggaaaggggcgcccagccgggaaggaggcgccttcagggtaatgtgccccggcccctggggctcaggacagctcggtgcgcggcgttacctgagcttcgcatccaggggtagatccggaagttactctcggccgccaagtccgagtccctctgctccttggcgcccgccgccttggcggagtcgccgggacacaccccggagaggttctgctcaaagggcgcgcagtgcatgttgaaggaactcggctcgagcccatagccggccgcgtagacgccggccgcgctctggcccgccatgccccccccgccggggtacaagccctgcatcgaggcggcgaaggaagcgcccgaacccgctccatagcccgggcgctgggggttggaagcaaacgcacaagaagtttgttctgggaaggctccggtagcgaaaaccgaacttgaggctggatatttagaaaataaagtattcgcataatacaatgaactcataatttggccggatgatttgtaggcagggacgttttagtgtcggttttacgagattccttgatatattacagaattagagtccagatttacaccaaaaaggaccccctttttcctctccggaccacgtgaccccgcccacgtgacgtcccctccgccaatggccgggccgtctccccacggctcccggtaatgtggaaaaaattgtgtggcgttggatttataaaatatgatcaataatgaatgggaaagccgagccctgtggattggggctgggggctcaagggccgctgccgactcccgcgggctggaggccgcttgcaggcgagatttggggaggaagagattgagtggaagggaaaataaataacctcggggcgatccgtgtcaccctccacccatcctcttcagcccgttaccgagcgagagacaaacgcagggattgaatgcacgcaactgggtgggtgggtgcttggggcaggtctgttctttattaaaccaggccaattctgcacggcaaggccttttggggaagttggtccggttctcccaagacgaggaatgaggcgagcctggctcacgactctgtctctcttggtgccccagatatgcgggcggagatggagcaagtcttcctaggtgctcctagggcacaggatccagcccacgggccttggacgctgccgtttctggtggcaaaaaaaaaaagaaagaaagaaagaaaaagaaaaaaaaaggtttgaaagtaaaagaaaaagggggttgggagggtggggagagaaaggaagggtggaggttggcccgggcgcgctgctctcccggttcccggaggcggatgcct

SEQ ID NO: 11301 - DNA, 49 bp, Homo sapiens
  chr17:46689519-46689568
  hyper
ccaatcaggctcagccgcctccctcacccccagcgcccctgggccgagg

SEQ ID NO: 11302 - DNA, 322 bp, Homo sapiens
  chr17:46690041-46690363
  hyper
gaaatgaggacgcagcgagagagagcgagagcgagagcgagcgagcgagagagagagagagaagggagacagaaagaattacggcgtgaataggcagtttcatgttgttgggagaacttagcagaaatcggtaccttggtcattacaaagaagcacgttcaaaggaaaaaaaagacaattgcacaaggaggctttttacacggggaggggaggggcatggggggctcagccgggcctttgccgctcgccctcacagggcgagggagcctttgcttaaatccttttctttccccccggcccccaagagaagggaaggagatcc

SEQ ID NO: 11303 - DNA, 275 bp, Homo sapiens
  chr17:46690429-46690704
  hyper
cgctgcggtgggaggcccggctcctggccccgctagcggggccagagctctctcgggcaggggcgcgcggcggcggcgcggccgggacccgcggacgtgcgggcggccgcggccctggcagtcccagctgaagcctacttcttgtcgcccttctgcgcgtcgccctcgtccgccgcctctggggcccgctccagcttctgtttctccagctcctcctgctcgcatttgctgctggggaacttgtctttgttgttctcttttttccacttcatcct

SEQ ID NO: 11304 - DNA, 195 bp, Homo sapiens
  chr17:46690852-46691047
  hyper
cgcctgcgtccggcggctgctgggaatgggggaaagggcgagacagaggggaggggagggtgggggagggggcagggacggagaaggttggaagattcgtgaacgagcctgggagaccattataataagggcaggggaccttctaccccgtgcgggggcggggggggcgcaagaaggccgcggtcggcggaggag

SEQ ID NO: 11305 - DNA, 319 bp, Homo sapiens
  chr17:46691499-46691818
  hyper
ataagaaagaaaggggaaaagcggcaggcgatcggaacggagccggcaagtcttccagaagctggaggaaatgcgccccggcctgccaggccttgggcccttccggccccctcctgcccttgtcggccccgaggcgagctcaccttgcgggcgcatccaggggaagagctgtgtgggcgacgggctctgctcggagccctcggcctcctcgcccaggccgctggcggcggcaagcttgcagtctgcgtactgcaccaggtctggatcctgcgcaccgaataggctctggcgttgcagcgggtcgtagccgtagaaattg

SEQ ID NO: 11306 - DNA, 600 bp, Homo sapiens
  chr17:46691987-46692587
  hyper
cgcagtcataataattggggcgcagggactccccggttttgtatttggagaacagtgagttgacgaaataagagctcattttattgaattttgaggcggcggcggcggcggaggctatagttgggggctgttggggagggggtggggagggggaaagggagggagagagagaaaaaaacgcggattcgccggctcctagtcaccctcgccaggaaaggagagggaaagagaggagggaaaaaaagaaaagaaagaaaaggcgaagaagatctcgaagccgacacactttttgtggtttccaggaatagaaaaggacagagaagcctccaaaagtctaagcttgcatggcagccgcggctcgctcgccctccccccaccccccaccccccaaacaaaaatataccaccacttaaagaggtcctcgctttacatttcgaagaagggatgccagttcataaacagttttcggtgatttacttccctgcaaatgagttgtttcatattttgcactgtcttttcatgatcatttgcatccattagagaccccgcatcctattggcttcttcgtactcctcccggacagaacgcagagcgagggtg

SEQ ID NO: 11307 - DNA, 30 bp, Homo sapiens
  chr17:46696417-46696447
  hyper
gtaaaaagggggaccgagcagttttcaaac

SEQ ID NO: 11308 - DNA, 1214 bp, Homo sapiens
  chr17:46702543-46703757
  hyper
gcgcggctacagcgcgagatctgctaggaacaatcctccgccaagctgttgcatcgcaaataaaatcctaatgagctccctcccccttccccttggccggcttttacggtctgcgcgtggcgcggggagctctgccagccgcacggccccgggcagcccagtgcgctccggcccttgccctcgccggctctcggcctcgctggccgctggccccggcccccgccagctcctctcccggccgtcgccggtctctggccgggctttcagctggggcctccgggagagagggggaaagagggccgagagagctgcaagtcgatccccgagcccctgttccccgcaggacttggagaagtgggggcagcgctcctctggcggcctcagtctccccttctagagcacgcagctttccccttccctccgtctttccttcctctcccctcctcctcccggcccgctctccggccaccgccgcagtttcccttcacattgtccgcagtttattgcctttcccctccccgcccccctcctggccttcggcctgggtatttcctcactttttataacttactttgatccggcctctctttgtcctcgcttccttcgcaaattttattgtccccgtagccgggtctttgattagacagcacggcctccctgcccgccgaagtttccaaactgtactcgggcgtgccctgtttgagcagctccccaggcgcgcccagcagcggctccgccttcaccgccgcctggccctgccccggggccgcttcgccgcgcggcgccggctccagccaggtgcggaggtacctgctctcggccggcgggacgccctggggctggatgtaagggtggtagacggacggcaggctcccggacgcgtgcgggctcagcggcgcccaggaggcgccgaacaccggcgctttgggctggaagctgcacgaggggaactccaggtgctccgcgtggcccggctgccgcgagctcgcgtactggccagaaggaaacttggctggaggcgcgtcctcactctcgtgacttatgatcgagtcgacataatagctgctaagcgtcccagaaatggacattctcagacattatccgggcgcttgcagggggaagggaagcgctcgcgcggcggcgcccaagcagggagaggtggcacccggaccggtgtgagggctttcggacgcgacccccccagccccccaccc

SEQ ID NO: 11309 - DNA, 30 bp, Homo sapiens
  chr17:46703989-46704019
  hyper
ggctccggcggccacgtaacctcagcccca

SEQ ID NO: 11310 - DNA, 17 bp, Homo sapiens
  chr17:46711510-46711527
  hyper
ggtggcctccatttttt

SEQ ID NO: 11311 - DNA, 325 bp, Homo sapiens
  chr17:46713851-46714176
  hyper
agaggtgccagaagccgagttcctagaccccagctggattttttttttttttttttttttttttccaatttctggcggcgggcggctggggaagcagctctgtggtctcccggcgggtgaggccgagacagagaccaacctctaggcggcgccctggcgttgagtccgcgctgaacaagattctctcgcagctctgcgtcccgcgccgggtgaaggggcgtgttcctgcaggcgctcggggctcggcctggagctggcggccggcacgtcgcctttggcgccctctgccaaccaagagaaacacggttaaatgagtgcgctggga

SEQ ID NO: 11312 - DNA, 379 bp, Homo sapiens
  chr17:46723838-46724217
  hyper
agcccacgcctgccacgggcggttggtcctgaaagctcgggccacggggctgcccagcttggagaggggcctttcacgccgcagtccccagctgcgagaggaagggctgcgcccgcctcctcacctacctctcggaaccacgccgtcccccgcgcgtcttcgtagactgcaggagtccagggcgtctggggactgtgacggcgcccaaggcgggggatgtggcggctctgggtcgccgccttctgcccccgcctctgtgaggcctctcgaggcagtgtctgtgtctggggcagcgacgccgacggcgctgggggcgcgaaggggctcacgctcctgcgttcccctggcgccggtgagtggcgggcgaggacagggtccg

SEQ ID NO: 11313 - DNA, 31 bp, Homo sapiens
  chr17:46755696-46755727
  hyper
aaacccaggagatgctcggggtcggggccca

SEQ ID NO: 11314 - DNA, 661 bp, Homo sapiens
  chr17:46795712-46796373
  hyper
aactttcataaacgccggcaccgaactcaacgcaaaactacccaagtgccaaagaccatttctgggaagctcattccatgagaccttcgcatttttccaaatcaaaggcttcccttcggatctaattatttctcctctacagggctgcgggagggggaggggatgtgagactagggcaacagattaagattgaaagtcctttctcgcagcttcattttcgcccccacactgtcccaaatgcttagaaccctcctcgtcagaatgggaacggtgcccccgcttgtcctaaaagacacagaccaggtccgtgaacttgacccaggcgcccacgcctcttttccccgaaggtcagacaaaggcagaagggttggctggattctttcccgggccgcgaaggcctggggatcgcaagttgaggaggagaagaccgcaaacccctttggttcaagcaagctctgcggcaggtaaaaggcaaattggtggggacgggtaggacagggagagcattatctggctaactcccgcaggcctcttccgatttgtcggcggggacctgactccctgcggtgtctctggccccaaatacggaggccaggagcttttcgttgtctcgcccgatttggtatcttattagccggtgtcgctgagccgcgggggactc

SEQ ID NO: 11315 - DNA, 74 bp, Homo sapiens
  chr17:46796498-46796572
  hyper
ggagatcgagtgtttgatcttcccttgctccaggatcctgaattctttaaacacactcgcacgcgctcgcacac

SEQ ID NO: 11316 - DNA, 6 bp, Homo sapiens
  chr17:46796631-46796637
  hyper
agcagg

SEQ ID NO: 11317 - DNA, 364 bp, Homo sapiens
  chr17:46796849-46797213
  hyper
cgggcgacagccccccggataaccccgccgagggaggggcgcttgtaaaaccgagcggcgacggcctcgttacgaccgactcgaacattctctaataaatcatcggccttagctagtattcgtttgtgtacgcatctgtttatcctgattattaaaataaattaaggattagactgcctagaataaggtaaacgaacatgaaatgccaaggaggaaaacagaaaaagttacaccatgtcgatcccgaccaaaacattggcctgacttgccggatggcctcaagaatccggcttttagctgcaggcccggcgggtgttccccggaaggcaaggattggaagctctttgataaagccgcgcgaggc

SEQ ID NO: 11318 - DNA, 32 bp, Homo sapiens
  chr17:46797274-46797306
  hyper
cgtctcggcctggctccggaggggtgaaggaa

SEQ ID NO: 11319 - DNA, 71 bp, Homo sapiens
  chr17:46800976-46801047
  hyper
cgcctgcagggaaggcggggcggattctcggctggcggcggcctcgcagggttcccggaagcgctagccag

SEQ ID NO: 11320 - DNA, 150 bp, Homo sapiens
  chr17:46801108-46801258
  hyper
cgagattcaaaaagagcttccggaggtagtttctacgcattgcgccactactcccttattcggcttctggaggcctaataaaatccacttgctttggagttagaaattatttcgggcctggagcccgcgtagacgcgaccctgtgatccc

SEQ ID NO: 11321 - DNA, 531 bp, Homo sapiens
  chr17:46802380-46802911
  hyper
aactctcgccagttccgaagtcggcgagggagggggtttacttgcccgatcgttggtgggtttgagcttatagaggcagaggagtaagaacctgcgatattgaaagctacccacatggggcttccttgaaggaggacgtggaaggcagaaagtgacctgctctgagcggcgcatgtaaccgaggaccttaagctggaccacggggcttggacgattttttaaatcaggaaatcgacctcatcttcctcctcctcgtcctcttcccctgaacccccagtccgcatgcactcacactctttggccttttccctcagtcccgggctcctctttggtaaatagatttgtaggtgtctaagtcacgtcccaccctcactccttcccaggagaggagacagggctaggatcccacccgaccgcgggccataaacacttggctgcggcggccgccgcggggtttctaggagagctggctccgggagggaaatgtcctcgaggtagtggcggccgcggcccaccaccaactgctcgcca

SEQ ID NO: 11322 - DNA, 80 bp, Homo sapiens
  chr17:46802993-46803073
  hyper
cgtggagaatgcgccggcaggccccccacccccagcctaaggtgcaggaaggaccagcacgaacccgctggctttgctgc

SEQ ID NO: 11323 - DNA, 334 bp, Homo sapiens
  chr17:46804101-46804435
  hyper
tccccaggacacccccactttcgctcctcccacccaggcaaggagatctcttaaggggtagcgctgttcttcaccttggcgagaaccttcttctctttgacccggcggttctgaaaccagatggtaatctggcgctccgagaggctggtggctgccgagatcttgcgcctcttgtccttggtgatgaacttgttagccgcatactcccgctccagctcccgcaactgccccttgctgtacggaatgcgtttcttgcggccgcgacgaaaggcgcaggcgtcaggagggtgctgcccgctggagtctgcgcggcgtgaaagggagggaggaaaag

SEQ ID NO: 11324 - DNA, 30 bp, Homo sapiens
  chr17:46805618-46805648
  hyper
tctccgcggggtacgcggccagggtggctg

SEQ ID NO: 11325 - DNA, 150 bp, Homo sapiens
  chr17:46805931-46806081
  hyper
ggtggcataattgccgggctccatggagccgagggtcggctcatgaggtgcgggggcggggaatctagggggcacccagctcgctctccccacccaggccgggggaatccaaagcgttttaaatcgctcccagctcgcaagtcgcctgca

SEQ ID NO: 11326 - DNA, 30 bp, Homo sapiens
  chr17:46806430-46806460
  hyper
ctcatttacacgtccggggggaggggaggc

SEQ ID NO: 11327 - DNA, 30 bp, Homo sapiens
  chr17:46806920-46806950
  hyper
acgtagaagacatgcgatctggatggaacc

SEQ ID NO: 11328 - DNA, 51 bp, Homo sapiens
  chr17:46811448-46811499
  hyper
ctgaagtctggaaagggcctgcggggctatagctctcagcggccggagcct

SEQ ID NO: 11329 - DNA, 183 bp, Homo sapiens
  chr17:46816136-46816319
  hyper
gacattctttccttccttctgcgtgtgtaaacacacctggtcgggcagatttttcagtaatcccaatactgagtcacctcaccggccggggtttactccccagctcctggatggtaaagcgccctgcggcccgcgggtcaggtctttaacggtccagccagcgcagcaagagagctggggagt

SEQ ID NO: 11330 - DNA, 30 bp, Homo sapiens
  chr17:46824377-46824407
  hyper
cagagtcccccttcccggggctccttctgg

SEQ ID NO: 11331 - DNA, 445 bp, Homo sapiens
  chr17:46824674-46825119
  hyper
gggaggaaaggaattcgggcaaatttgtgggtaggggcccagacccaagacccgtgtttctcctgcgtgggttggagtctgtctcaggtcgctccagggacatcaagagcccgcgccgccgagagcccgcgccgccgtccagcgggaagcagcggacccacaggggcctccagccgcctccccgctcccgccccgtgtttctcctgggcctccagctccgtggagagagctgagagttctcggcccgcgggcttcctcaccaaatccccaaaaaccgacgcaggcacagagggctgactgtgttttgagtaatgcacgcgaggcagtccaatccggcgagatggcccgaagcggggcccagcggtcgggggtgtgggtctggagagagagggtctccccacttccttcctccggctgctcggtcacccatcgactacccgggcgg

SEQ ID NO: 11332 - DNA, 58 bp, Homo sapiens
  chr17:46827443-46827501
  hyper
tcgattctaggggccgcagaggctactctcgtgctctggagaagcaccgcatctttct

SEQ ID NO: 11333 - DNA, 16 bp, Homo sapiens
  chr17:46827625-46827641
  hyper
cgccagcattttgccg

SEQ ID NO: 11334 - DNA, 220 bp, Homo sapiens
  chr17:46829915-46830135
  hyper
ctgaaggagagtctctcagcccggtttgggagtaaacccaaaaccgttcattcgtcagggaatgccccaggttggttcacgcgagttttaaaatgaatcggaggtgaaatggagctcattaccctctcttcagcccgaccctcaatctttggcagcgaggggcagttatgggacggggggcgggtgggaagagcgcccagggccccctccgggttctccc

SEQ ID NO: 11335 - DNA, 411 bp, Homo sapiens
  chr17:46830189-46830600
  hyper
cggtagggatgcctgggagtctagggagtggcgggggtgtttcttggcccggcagggtggggtttccaagcgtgatctcctcgccctggcagagccggggtgccgggtgggggcaggctcgggggcctgcctgcggtgaatcaggcttgtgacctcaggccgtccaggtaaacatcctctgcgctttggaaactgttgggactagaaaggagcgggcggcagggagagggaagggggaaggagggattctgagtggaggagacctctgaaatcctctctcctgccaggaaaccagggcggtcttccaagcgggcagccacgttgcctacttgaggccaaggcagaagcatcaatcacatggggcgtagtttctgtctggctaaagaacggctcacgcggacctcgggaatg

SEQ ID NO: 11336 - DNA, 552 bp, Homo sapiens
  chr17:46831773-46832325
  hyper
gagtcctaatgggaacagtgacggaatgaaagtgaccacgctggaacccgaagcgctgttcccctccgtggcttcacactgatctccacactagaattccgtgtctgcagttcaagttcaaactactgtggtcggggaagggctacagagatctcgcttggccgtggagtcaccggccccgtccagtcttgcttgggacacatactggtttacactctctcgggttcagtttcctcatctgtaaatggggctcgtatccccctcataaagtggtttgggggataataaagcttgtaaaagcgctttgccccagtgcttggcacataatacgcgctacgttaacaatgtcgcgtacacgcccgaaccggaggaaccccattccacgctccttctggaaccgaattcacctctgaggctttggggcttcagagccggagccgcttgggcaaaaccagcagaacagcgagagggaacgggctggtctagccctgccctgagcatttctactgagacccccggtcctgcttcttccagcctctgctggatttctct

SEQ ID NO: 11337 - DNA, 201 bp, Homo sapiens
  chr17:46832489-46832690
  hyper
cgtcgacccggggtctttttccgccaaggagctcggggctcaagaactcgggactgggctgtgggcggggcatggttttcctctctgggcgtcctaatctccaatttcaggcaaattcgctaggaagaaccttcccgagcgcgccttctccaacaggacctccaagccagcctcacgcacgcaggcctggctctctcctgc

SEQ ID NO: 11338 - DNA, 30 bp, Homo sapiens
  chr17:46832904-46832934
  hyper
cctctttccttctccggtcctttcccttcc

SEQ ID NO: 11339 - DNA, 30 bp, Homo sapiens
  chr17:46970398-46970428
  hyper
ccaacggtaatgaacgattgactgcctcgg

SEQ ID NO: 11340 - DNA, 30 bp, Homo sapiens
  chr17:46970690-46970720
  hyper
ggacgaccaaaggtcgtcattataagcaaa

SEQ ID NO: 11341 - DNA, 103 bp, Homo sapiens
  chr17:46985493-46985596
  hyper
cgtctgagggtcgccgccattaacgggaatgatatggcccttcctcccccactccctcctctcttctcccctttcaacacttgaattgggctctccgctactt

SEQ ID NO: 11342 - DNA, 136 bp, Homo sapiens
  chr17:47072892-47073028
  hyper
tacaatcgtccggccgcagagcggtgagccaaagtcggagtcagctcagactctgcaaacgaaaaataataacaataaaaaaaattcaaggcattcatatcggtgtagtcaacacgtgttgcggagtcggcccggg

SEQ ID NO: 11343 - DNA, 224 bp, Homo sapiens
  chr17:47073103-47073327
  hyper
cgcgtgcccccgctagaattatcctccctcccacagagtccggagtaacaccccagttttcgccctgttcaaggggattccagaatttctgggggtcgacccctcctttttccccgttccctgggcgagggggttccagggtctccgggccgcgctctcggccacccctggcgccatcccagcctccgccgctagaaactcgttggcctcgctcgccgctccgc

SEQ ID NO: 11344 - DNA, 226 bp, Homo sapiens
  chr17:47073388-47073614
  hyper
cgaaacgcgcggcgagcagccccctcccccaccgcccagacggggtgcgaccgcccacgtgtcgccccttgcccagtcgggtccttccctcgggctccgggagccggaggatccggaatgagttggtcaaagccgagggaagggacccaggcggatccgcttccccctccccaggaacggcgggaggaggaggggagtggccgccgccccctcccctaagctcccg

SEQ ID NO: 11345 - DNA, 1279 bp, Homo sapiens
  chr17:47074170-47075449
  hyper
ccggtcctgcatccccggaggcgggggagtttcgtggggctggcgtggggaaggcggagaccccccccatttaaacatctagggaaaaggttcctttctttttaaatcaccagctcgtgcgaccctctcctgaagaccccagagtcttcggcttctctttgtctgtctcggccgtcccccgcctgtcagtcgctagcagttaaccggggaggggtgagcaaccccgccccccaaaacgaatgaaaaataaccgtacattttaccctttaagacatgtgagatctgggctggaccatcctcccccagtttgggctggggtagggggatgggtgggggcggggcgcttccctaggggccaggttcttgcaaagggggaaggggcctgtagagcttcagggacgctgccgcaccgccccagtttaccccgggggtgagttgagttccccaccctcaggcgggagattatcgggtttggccggagggccgaggggccctgtggcgtcgggggtctttccctgcagggtgggtgggggctgtcaccacgtggcttctcctttttttttttttttttttttccgctccattttttttcaagtcgattttatttagaggcggcgccagggcggccgcggagaaacgtgacacaccagccctctcggaggggtttcggaccgaagggaagaagctgcgccgtgtcgtccgtctccctgcgcgccgcgggcacttctcctgggctctccccgaactctcccgcgacctctgcgcgccctcaggccgccttccccgccctgggctcgggacaacttctggggtggggtgcaaagaaagtttgcggctcctgccgccggcctctccgcctcttggcctaggaggctcgccgcccgcgcccgctcgttcggccttgcccgggaccgcgtcctgccccgagaccgccaccatgaacaagctttacatcggcaacctcaacgagagcgtgacccccgcggacttggagaaagtgtttgcggagcacaagatctcctacagcggccagttcttggtcaaatccggctacgccttcgtggactgcccggacgagcactgggcgatgaaggccatcgaaactttctccggtaagaacacagccacctcccggaaaagccacaacgagagccccgaacaacggagacccgcaccttccggttcctctcccgccaactcctctcttcccgggcctgcggggtttggcctccgtacccaccctcgacctacccccttcgatgccccctccctcgctctg

SEQ ID NO: 11346 - DNA, 119 bp, Homo sapiens
  chr17:47210264-47210383
  hyper
ggggacgcagacgccggagccagggagcgggcggttggagtcttaagtccaaccggttccccgcataggtggctgcagaggcgaggtgacggcgcgtgcggaacgaactctgcaccccc

SEQ ID NO: 11347 - DNA, 31 bp, Homo sapiens
  chr17:47440023-47440054
  hyper
aggtaaagtgaagaaacgggccaaagcagaa

SEQ ID NO: 11348 - DNA, 30 bp, Homo sapiens
  chr17:47563751-47563781
  hyper
ggccagaccggaaacgggatcatcttcgat

SEQ ID NO: 11349 - DNA, 1090 bp, Homo sapiens
  chr17:47573575-47574665
  hyper
gagggacagtgagacgagaagagagagcagaggcttggacatttccagcgcctgtccccgcgctcctgctcgcggcctctcccagtcccggaattggggctgcggatctaaggctgggaggggagtgcccacttcgccggggcgaacccgctcccggggttcccccacggccggcgggctcctccgacgcgcgtgttctcacggcttgaagcagcgcagcggatcgcgagggacggagcgggtgtgcccctacccgggctggcggtggctacgtctcggggtgcagagcgccggggcgcactaggcggggacccttcctggccgcgcgcagctctggctacgcaggcgggaggcggcaggcagggggcgctgcggggcgaggcaagtgcagtccgccgctgcctgcctgcgagtctggggctgcgcgccgctccccacctagctgcgcgacccgagcgccgcgcccaccgcgctccgtgggctcccgcgcctcgaagggtcgggatccggtctgagcctctcctggctctcggtgcaagccgctgggcacctaacgagacgggggcgcccggacgcctcggattctgtagcgcggtatcccgggccaccgactcggcaaaggtcggcgggtcctccgggtggtccgacgagattgtcagatgtggcctgctttatggccatgaaccgaatgccctggaaggtctggcaacggaggaggcgtcttcactctccccgccagcatctttcatcagagcactgcgccccaaattccggctttacagatacggagactgaggctctgagagtttaaacgacttggccaagatctcacagcaagttgggccagagtcgtggctagactccccgacctgattcccagctcggtactcccccaccttttcagggggcagccgctgtcccagctcggggtcacggctgcgtttcccagcagggcggggggggttgacactgtccccagagtccgtcggcggtagagcctgcgggtgaggtgggcagagattctgtccgggtgcgggccccagcccgaaagctcagccccagttccctggagctgtcaggacctgtggct

SEQ ID NO: 11350 - DNA, 427 bp, Homo sapiens
  chr17:47574903-47575330
  hyper
cgacaggaacctgccgtctgcagcccctgcggctcccgcctccgcctcggcgcgcggctgctcggtctgggatggctgtgcgcggtccgagtttcttcctgggccgcggtgagagagagagggctgaaaccagagcgcgtcccggcgggtcggctggcgggccgcgccggtaatggaggcactttgtcattcagacgtctgtaaccagagccgccgggctggctaatgcgcctaatagggatggaacgagggcagcaaatgggcgtgcgtgagcggccgggctgagctgggtggatggtggatggggaggcagctccgcgggggacgggcccctaccgcactgttccagcccagtctggctcaagcgcctcgcttcttccctgggggaccgcgtggggaggcgggaataatcgcatgtgctgagttc

SEQ ID NO: 11351 - DNA, 30 bp, Homo sapiens
  chr17:47645353-47645383
  hyper
aggagtggaggtcgcggttatccctcccgc

SEQ ID NO: 11352 - DNA, 30 bp, Homo sapiens
  chr17:47647458-47647488
  hyper
gcgagtgagcagagcgcgcggcgggcgcgg

SEQ ID NO: 11353 - DNA, 30 bp, Homo sapiens
  chr17:47841772-47841802
  hyper
gcagaataggggagcgtcacacccagtccc

SEQ ID NO: 11354 - DNA, 76 bp, Homo sapiens
  chr17:47865524-47865600
  hyper
gatggcggacgctatccgttagttcctttttcaattccccattcccaccccttcgagaccacgatgtttcttaaaa

SEQ ID NO: 11355 - DNA, 30 bp, Homo sapiens
  chr17:47979580-47979610
  hyper
ctgctgatgaaaggcgctgccagattaacc

SEQ ID NO: 11356 - DNA, 30 bp, Homo sapiens
  chr17:47987581-47987611
  hyper
ggaggagcggctcccggtggcggcgggctg

SEQ ID NO: 11357 - DNA, 30 bp, Homo sapiens
  chr17:47988085-47988115
  hyper
tggcagcgcgcacgcgcacacttcctccag

SEQ ID NO: 11358 - DNA, 30 bp, Homo sapiens
  chr17:48041286-48041316
  hyper
gatgaagacgtcggcgaaacgcctactttc

SEQ ID NO: 11359 - DNA, 53 bp, Homo sapiens
  chr17:48041532-48041585
  hyper
aaacttcagagctccgggccaccgagcctggaagttacgcgtcccccagccca

SEQ ID NO: 11360 - DNA, 29 bp, Homo sapiens
  chr17:48042111-48042140
  hyper
ggctcagtaaccagtcggctgcccggctt

SEQ ID NO: 11361 - DNA, 434 bp, Homo sapiens
  chr17:48042213-48042647
  hyper
cggagaggggggacgcaggtctcttcagactgcccattctccgggcctcgctgaatgcgggggctctatccacagcgcgcggggccgagctcaggcaggctggggcgaagatctgattctttccttcccgccgccaaaccgaattaatcagtttcttcaacctgagttactaagaaagaaaggtccttccaaataaaactgaaaatcactgcgaatgacaatactatactacaagttcgttttggggccggtgggtgggatggaggagaaagggcacggataatcccggagggccgcggagtgaggaggactatggtcgcggtggaatctctgttccgctggcacatccgcgcaggtgcggctctgagtgctggctcggggttacagacctcggcatccggctgcaggggcagacagagacctcctctgctagg

SEQ ID NO: 11362 - DNA, 328 bp, Homo sapiens
  chr17:48042750-48043078
  hyper
cggagggaattcccgctaccgggaaggtcggaactcggggtgatcaaacaaggaatgcatctcacctccgtgggtgcttgtgctgcgcaaggaattattaccggagcggttgcgatggcctttgcccggcgacccaagaagagtaagcaaactaccgtccacccagcggatcaggtccaatccctgcgcctcggcccaatccctagagccccgcggcgccgtatcccctcccccccaactctggaccccgccgtctgtccccgcggcatcaccagggtgctggagttttccgagcaggccccttgcgctaagcgagaggatctgtgag

SEQ ID NO: 11363 - DNA, 30 bp, Homo sapiens
  chr17:48047321-48047351
  hyper
aaccgacctggtttcgatttgcagttgtgt

SEQ ID NO: 11364 - DNA, 1167 bp, Homo sapiens
  chr17:48049366-48050533
  hyper
ccgcagggaatgcggcgaacgctgccctaagcgcccgggcattgcggctgctccatccgccctactcctcccattgcctgggacctctgcagcgtccccgtagagccgcgcaggttagggtggctggcttggaagaacagaaacccctcggcccaaccctcccctgtccctcagcattctagggctgggctgtcccgcggccgagattcctggagagctaggcgggccagagctgaccagatcccccgcggcggcaccgcagcgcgatccaggagtggccccgccgggctacgctgcgcgctcttggaacccgggtcaccttccctgccgccggaaccgctctgtgcgcgctgcccaacgaaggaaggggctgccccacgcagacccggcttctgggggtccctggaaacccaggcggccacggtgtggcgggggagacatggtcacttttcctgcagggtgcgcctgagcagaggggcagcccgttacagtaggcgaggccagggcaaacccggggtcactatcagcgctgcgagactggtattcaaggtcctctcagccgggcctctcacccaccccgctggccgcagccggaggctgccacgcggacaccgtctcaagcctctgagcattgctctgagcctctgcctgcaatgtccttcctctgtcatctctaggcctcggctcagccctggacctagcctttctgccccgccctaccccaagctggcgccaccgcccgtggctgaactccgacctcccaccgcaggcgccgcggtaccctggctgtggccctcggcgctttcttcctagggtcacaggacccatacgagtgggagctccctgggagcagaactgcgtcttgtatcacctggcgcggtgaacgtgggggttgaaacgctccacgcggaaggtagagggcaggggccaagggggcgatcctggtggctgcgctttttgctatttgctgccgacggcatgcagacgagatgcaaataagcttatgaaactgtccgtcctaccccctcgctccctcctcgccccctacaccgtgttgtgctgcccaccagactcggagaagccgcggctgtccccggaaccctccgagcggcgccctcaggcccccgccaaaaagctccgcaagccgaggaccatctactccagcct

SEQ ID NO: 11365 - DNA, 30 bp, Homo sapiens
  chr17:48072550-48072580
  hyper
cgcgcctctcctcgcgtcccaagccacaat

SEQ ID NO: 11366 - DNA, 30 bp, Homo sapiens
  chr17:48134211-48134241
  hyper
agaacctgtctggacgccacccctccgccc

SEQ ID NO: 11367 - DNA, 30 bp, Homo sapiens
  chr17:48172867-48172897
  hyper
cagcaagttctccccgtccccgctgtccat

SEQ ID NO: 11368 - DNA, 171 bp, Homo sapiens
  chr17:48206268-48206439
  hyper
gcccttcgggcaggcgataggaaagggcccctgaagaggagaaagcgacagagagaagtgcaactgggagaggccgggaagaggtggatgggaaaggagactagcggtcggggaggcagttgtggagccagagaggtggtccccccttcccatatcgccggccgtccactg

SEQ ID NO: 11369 - DNA, 31 bp, Homo sapiens
  chr17:48207254-48207285
  hyper
ccccgcccctgccgcccgccaggcctggccg

SEQ ID NO: 11370 - DNA, 30 bp, Homo sapiens
  chr17:48278763-48278793
  hyper
ggacttactgtcttcgtcttggccctcgac

SEQ ID NO: 11371 - DNA, 30 bp, Homo sapiens
  chr17:48351993-48352023
  hyper
ttctggagcctggtcgccaccttccagaat

SEQ ID NO: 11372 - DNA, 30 bp, Homo sapiens
  chr17:48503148-48503178
  hyper
tcaaggacgcttcgcgcctgctcctttggc

SEQ ID NO: 11373 - DNA, 30 bp, Homo sapiens
  chr17:48585630-48585660
  hyper
agggcggggcgaggcgggtcatgcacccct

SEQ ID NO: 11374 - DNA, 30 bp, Homo sapiens
  chr17:48609908-48609938
  hyper
agaggggatcaggtcgccagcactggctcc

SEQ ID NO: 11375 - DNA, 132 bp, Homo sapiens
  chr17:48619158-48619290
  hyper
tagggctctgaaccccgggtcactcaaagccactctcgttctgcaggtctcagcgctccgtcccccaccaacccgttcggcgcgggcgagccgggcaggccgacgctaaaccagatgcgcaccggctcgccg

SEQ ID NO: 11376 - DNA, 608 bp, Homo sapiens
  chr17:48619346-48619954
  hyper
cgcctctctgcccctcccgctcagcagcgtgccagctggcttgaccctccccgcctcggttagcgtcttcccgcaggccggagccttcgcaccgcagccgctgctgcccacgccgagctcagccgggccgcggcccccgcccccgcagaccggcaccaaccccttcctctgagccccgccccgtcccataccggcctgcgcctgcgccggacgctccgcggccccgcctccggacccggggctgggcggggcgccggtgctagtggaacgccgagccagtggcggctggtatcccgcggcggctctggaagctggacgcggaccacggcccgggagctagaaactgaacgcccgcataataaagactggaaccctcgttctcagctctcaccaagtggactttttgcggggtgtggcggccgggtctcgaccacagcgtggatcaccggctgtttaggaaactgcagctgcacaacgtggggtgcaaaactgccccgcttcctttacagctcttctcaaccctcacctccatcccccgtcacccaggcaccttcgcttccagatgctgccaggctgtcactcaattcggtcatttcattcatttatca

SEQ ID NO: 11377 - DNA, 31 bp, Homo sapiens
  chr17:48638201-48638232
  hyper
cgcctccactcccgcccgggactgcccccca

SEQ ID NO: 11378 - DNA, 30 bp, Homo sapiens
  chr17:48639570-48639600
  hyper
cccaaagtttgcggcggattctagggtctg

SEQ ID NO: 11379 - DNA, 30 bp, Homo sapiens
  chr17:48639821-48639851
  hyper
agagcccagtgccgcgggtgcctcctaccc

SEQ ID NO: 11380 - DNA, 31 bp, Homo sapiens
  chr17:48712405-48712436
  hyper
cgccgcctgccttcccgcggggccggcaggt

SEQ ID NO: 11381 - DNA, 30 bp, Homo sapiens
  chr17:48944743-48944773
  hyper
ctcgtggtggggggcgggtaagtgcctttt

SEQ ID NO: 11382 - DNA, 38 bp, Homo sapiens
  chr17:48997200-48997238
  hyper
catggaaacccttccccgggcgtcgggcaggaccagcc

SEQ ID NO: 11383 - DNA, 514 bp, Homo sapiens
  chr17:49021779-49022293
  hyper
gaggtggggaggtggggctgtcggtgctccagggtccccgcagagggcagggaagccctggacctggtctgaccttgcgcgctagccccagaggtcgccgtgctctgctgtcggcgttcaggtgcccgcggtcgggccggggagggcagtaatcaagccggcccggcggctggcgaggggcgcgggtccagcgcgctgccctcggccgccgccctgagcggttatttataaccgcgggtcgcgttacctcctgaccttaagctggggcgggcgatccgcagcgattagcatctatctcctccccgccgcccgctgcgaacaaacacccctctgtgcgccctcccccgcccgccccgcgggaggccctgcaggaagcaggatgttgacccggagcctccctgcgctcctgcggcggccccgccacatgtgagtggcgggcggtggagtgcgggtgggggggaagcggggagcaggagctactcgtgtttgatggcttcccgagttgccaatgtcc

SEQ ID NO: 11384 - DNA, 116 bp, Homo sapiens
  chr17:49027999-49028115
  hyper
gtaaggctgttgctggcgtttagaggtacttcgtaggtgctgatttttcctaattgaactgtggctggatcttggcctaaaggtcccactgtcagcaaatccgtgtccacatgcct

SEQ ID NO: 11385 - DNA, 152 bp, Homo sapiens
  chr17:50235950-50236102
  hyper
cagactctccaggtcgcgcgcgcccttcctgctcctctgctattttcctgaactccccagaacccccagttgcctggcttccatcgcccgcaactagcgccgctgtcgagattttccgcaatacaactgcaggggtcgttatttcctcgcct

SEQ ID NO: 11386 - DNA, 673 bp, Homo sapiens
  chr17:52977754-52978427
  hyper
ggcagccaaagaggcgcagagaagaatgacaaggtgcccagcaagcggcaggatcaaagcctgggtctctaattcccaggctggagattctgggctgcctgctcctcctgcacggggcgaaaagcccacctgggatccgagcgggcggccgcgccactctcgcaggctccatacacccgccactacccgcctgtaccacctgcagccggcagcgcagcctcctcgcgggtcccgcagggcgcgctgcaggtgcgctgggcgtcccgaagccccgccctcgcgtccctgccccgcgcccagctcctcacgctcggtgcccgcgccccgcagcggcagcgcagaacgcaccgcctctgccagagcccgggaagcgctcgggcgaagaggaggagccaagggtaccgagcgggtggagtcgggagccggagagcggtggaggcggatttcctgggcccggccctctggcgctaccatggcgtttggcaagagtcaccgggatccctacgcgacctccgtgggccacctcataggtaaggaggcgcggggagagacgcccaggcaggcaggggaccgtgggatcctttcctgcttgatccattctcggcctgcagaggacggagttagtccaacttgaaaaaattattcccctccccccgcaactttcccaaggcac

SEQ ID NO: 11387 - DNA, 144 bp, Homo sapiens
  chr17:52978453-52978597
  hyper
cgtttccttcttggccaactcactgtagaacctcagtcctcaaaaatgtaccttcctttcgatgccgcctggggagtggaaccaaacaggtgaaccgcgggagtcaggcatggagtgtttgggcctccacgaggagacaccaga

SEQ ID NO: 11388 - DNA, 1141 bp, Homo sapiens
  chr17:53342463-53343604
  hyper
gggctggggtcggcgcggtgtcttctgcccttctgcagccgtcgacatttttttttctttctttttttcaattttgaacattttgcaaaacgaggggttcgaggcaggtgagagcatcctgcacgtcgccggggagcccgcgggcacttggcgcgctctcctgggaccgtctgcactggaaacccgaaagtttttttttaatatatatttttatgcagatgtatttataaagatataagtaatttttttcttcccttttctccaccgccttgagagcgagtacttttggcaaaggacggaggaaaagctcagcaacattttagggggcggttgtttctttcttatttctttttttaaggggaaaaaatttgagtgcatcgcgatggagaaaatgtcccgaccgctccccctgaatcccacctttatcccgcctccctacggcgtgctcaggtccctgctggagaacccgctgaagctcccccttcaccacgaagacggtgagcgctgccgcggccccgctccgggaagggacgacgctccgggggtccccctccgcggccgggcacgcccgctggagcatcccccaaccccgctcccgccctgtcccgcggcgccccggccccgcgctgatgaaattgaggagctcacccagcacccttcctccccttcctcctcctccatgaaaggggagggacccctcctgagctacatttaaaagagcttcgggcacccggcctccctgggtcccgctcctgcggcgcgggtgggaggtgtaacttgacaggtcaggatcgttccctagaacgaggcacacccgcacgcagagcgagcccgcctgcggagggcagagcctcccgggctggggaggagaaaccctggggcctggttctgtgcggggcagggggcgggggtcggcttgagggagggggtttcactgcgtagcctgggttttggggttgtgttacagcttctgttactggttagtatttggaactcacgaggtgtgagagaagactcgttttcttctggtgaagggtagctgagaaagcggggtgggggctggggccggtggggggagtggtctctcggcgggaagccgtgcacgcctccagcgttgacactttcccggtgcactttttct

SEQ ID NO: 11389 - DNA, 30 bp, Homo sapiens
  chr17:54376036-54376066
  hyper
tctttatatatatagagagagagagattaa

SEQ ID NO: 11390 - DNA, 30 bp, Homo sapiens
  chr17:54671975-54672005
  hyper
agggcaagaagcagcgcctaagcaagaagc

SEQ ID NO: 11391 - DNA, 30 bp, Homo sapiens
  chr17:54674044-54674074
  hyper
ttggactccaaagtcgctctcctttgctcc

SEQ ID NO: 11392 - DNA, 47 bp, Homo sapiens
  chr17:54675122-54675169
  hyper
gagctgggaggacgcgggttgcagacgtgaccggcgacagacagacc

SEQ ID NO: 11393 - DNA, 353 bp, Homo sapiens
  chr17:54910846-54911199
  hyper
aaaccgcggccgggctcggggtcagcggcgacgagcgggcggctgccccgctcgccctcggcctccgcgcccgcccgccgctccgcagcggaggagccctcaggtttgcgttactgcggccgccacacctacctcagcccgccgcggccaggtcgggcggtgccgcgcaggccgcctccccccctcgcttcccagtcggcttacgcatccccggcggcggcggcgccggcatcggctagaggttcggctcaagtcgggggcactcgtgtctgcgccgagcggcgggcgtgagcgcggcccctgggccccgcgcggcgcggtgctgcgaggaggatcctcgtggccttgccccg

SEQ ID NO: 11394 - DNA, 654 bp, Homo sapiens
  chr17:54911580-54912234
  hyper
caaggcctgctggcccggagccgcgcctccacccgcgcgaggtagggcttcgaggaccggcgcggcgcaggtctccggaggcctcccgagaggggctagggtcgccgggccgcgcgtgggagcgggtggggcccgggaggagacggcgccccggaggggagtgcgaggcctgggccgacggttacgggcgccgaccggcgttgcctggcctgaacgcccggcctttcggtggagggcagcttgcccctgtatgttgcgcccttccgtgggtcagaccggcggcaaggtgaggcggcggcggcagcagcagccgccttgggctcctggacgcgctcccgaggtggggcgggttggggagtggggattggagcgtgatggctggacgtcgccttctcggcgcggcaggtcccgggagacggggggacgaggcgcagtcccgccctcgggagagcggagccaccttcactgagggcgcccggtttggccccggaaaggcaggaagggggcggggaagggatggcgagctcggggtgcaccgcctgtttcttttctggttaggtatcgtccttggagaagatggaagcggagaggcggccggcgccgggctcgccctccgagggcctgtttgcggacgggcacctgatcttgtggacg

SEQ ID NO: 11395 - DNA, 30 bp, Homo sapiens
  chr17:54990647-54990677
  hyper
ccatctccccagggcgtccagagtgtggca

SEQ ID NO: 11396 - DNA, 30 bp, Homo sapiens
  chr17:54991049-54991079
  hyper
gctgggtgcagaggcgcgggcgggcggcgt

SEQ ID NO: 11397 - DNA, 30 bp, Homo sapiens
  chr17:55163835-55163865
  hyper
gatgtcctgggtggcggcgccttcctgccg

SEQ ID NO: 11398 - DNA, 371 bp, Homo sapiens
  chr17:55938733-55939104
  hyper
gcgacagcgctagacgcagccggcaggtccgcaaggttgaggtgcagcggtgccgcaggtgtcacctcgagagtgcagtcggagagcgccgcgggtgaatgggccaggcaaggcaggggtaccctagggatgcgacgcggggctcctggggacaaaccctgccccaggccgggagggaggagggagcaggagggtccagcccacgccgctggccacatcagagcaccaagagaacaccaactgtttattacaggaattcctatgaaacagctccaagaaaaaacccacacataggaggaaaaaaaataacaaagcaacactcaacagacatggggctggggcttcccccacagtgcgccgggtcctggcgc

SEQ ID NO: 11399 - DNA, 133 bp, Homo sapiens
  chr17:56032179-56032312
  hyper
cacacaaaagggggagcggcgggagaggggactcgggcgaagccggctccgggaggcctcgtctcccttccctgcggcgctggcccgcgccccccggtctaatcgcgcgccccgctcccggccccccagatgc

SEQ ID NO: 11400 - DNA, 31 bp, Homo sapiens
  chr17:56401799-56401830
  hyper
cgtccccgctctacggcggcggcgggaggag

SEQ ID NO: 11401 - DNA, 160 bp, Homo sapiens
  chr17:56402169-56402329
  hyper
acctctcccggggccccgggagcaggcgcccctgctctggcctggagagcagggcccgggggccaggacggcgggagcgggagcgtctcccgctggttgcgcagcgcgatctgcctctgcagccgcagcacctcccgctgggactcgcgcagcagccgat

SEQ ID NO: 11402 - DNA, 206 bp, Homo sapiens
  chr17:56406103-56406309
  hyper
cagtccaggagcctcgagatggtgggctccgaggagggctgagcctcagaattgggtgggggggtgagccgggaagagccagccctcccctcctcctcctcctcctcccctcccacccaccaataggaagtcggctgctggtttccatggtgatggcgctggactggtgggctgaaccggctgacagggtcggggacagaaggaag

SEQ ID NO: 11403 - DNA, 1163 bp, Homo sapiens
  chr17:56429043-56430206
  hyper
ccactccttcctctctcgttcccaattccgttttatctattcctttctctagtctactcagggtcaggcatcctttccgactactcactcagcagcggatccccacccgcctctgactcccagtgtctttcggctccaacgtaagttcaccgaacgtctaagagctgaggattcaaaggcatgtaagaccgcccctgccctcagctgcaagacctgtccgcgatcctacgaggtaaacgatggcctccttcggcttctcactccccctgccacctctgagttctgagacttaacttttctctttactgtcccacagccccattccgccctctttccccgaccttggtcccccatgggccctacaaccaggtccccgactgacaccttgaccagcgaacacagcaaacaggcccgcagatgccgcaggtccttcggcaccgtctccagggccatcttcgccgatgggaagaacaacagggagatagacgaccacagcctgtgcacccgcaggaagtaaatagctcgttacccagaatgcccaccacttccggcgcttagacttcctcttccggtgtgggcggacgccagctccgcccctacccccgccagaggagatggtttctcccgccagcaggcggggaggctgggcggccggccgccacctgggccggagcgcgtcgcagccacctgagcccgccgagggcgcggcggaggctgtgtggggtagtcagcgggcccccggggcgggggggcggctgcgcttgcgcgggagtgtgtcgggctgagccgcagcgccgagacgcgggctgtttgatctgggctggtggccctgggcgtcggtcctgttccccgatggtaacccgaagtttgtttttttttgttttgtctccccgttttagaagcattgggggcagtgaatccactgtctccctctggattgtctctgcagagaccgagaagaaatccagggacagccccacccctccttcctaactgcgagagcgctatagggtttccacttgcttcccacaggaatgctggcctgggagctacggcggaaaaaaatgcgtatttatcttttaaaactccgtctgtttgctcgttccggctgataatttatactttgcgcagttcttagcgcttagacacggttcctttactaa

SEQ ID NO: 11404 - DNA, 51 bp, Homo sapiens
  chr17:56833161-56833212
  hyper
cgcccccgggccgcgcacgtcggtgctcggcggcgcgcacgcctgcgggag

SEQ ID NO: 11405 - DNA, 30 bp, Homo sapiens
  chr17:57970348-57970378
  hyper
catgtttctgccagcgcctggatcctgccg

SEQ ID NO: 11406 - DNA, 30 bp, Homo sapiens
  chr17:58215071-58215101
  hyper
gactctgtatattttaaaaaaaaaggcaaa

SEQ ID NO: 11407 - DNA, 326 bp, Homo sapiens
  chr17:58216972-58217298
  hyper
cttgcaaccagcacccgcgacggtgtctacactggaattccaaggaaaagagggctccaggggcgcgaccaaggtttggtcttctgctgagcgctgctggatgaatcgccagccttcgcccgcggccccctcctcctcatccctgaccccaactcgacaagatcccccgagcgcaggcccaaactccgcacagcttgtgggccgtgaggtccgggtctcgaagctcggtcccgctggggctgtccctccgcctctacttccagggtaaagaccgcggaaccaggcgggggtctggggagcctggctgcgacctcggctgcaggctt

SEQ ID NO: 11408 - DNA, 179 bp, Homo sapiens
  chr17:58217356-58217535
  hyper
cgccacctaccggaagccgcgtccgcgctacagcctccactcaggattcgacccgaactccaagacgcgtccgcactggtccaacaaccctcatggatcgtcgcctgcctcaactgtttagaccaccgcgggtttcacccggaagcaccggggaggtcggagcttgcctgagaggctca

SEQ ID NO: 11409 - DNA, 363 bp, Homo sapiens
  chr17:58228041-58228404
  hyper
aaaaaaaaaaggatgcttctcggacccgcctcaacgcacgccttcttttctcacccagcctcctccgtctgcccgtgggtttccgtccgtcccgctgggactcagcgctgggtgactgccccgcggccagagcaagggcggtctggcagggtcctggaagccgcgcttcccacacgggttccttgcccctgagggtcgcaagctcccctggcctccctaacctccagcgctgaattgggagcctggcgggggcggggggtgggggacccggagccccaaggcctctgcggagccggtctttccggacagggtgattttcgtttaaagattaatggtgaagccgagctcttaattattcctcta

SEQ ID NO: 11410 - DNA, 523 bp, Homo sapiens
  chr17:58498747-58499270
  hyper
cccctctcctgtgcccgaggtggccgctgggtggcaggggaggcccgggccgacggcggtcccaccgcactgtcgcgaaggcaggcgaagaacagggccacactgagtggggacaactgggcccgggcccagaggacacgaaggaaggtccgggagaaggaattcctagtttcagggaagaaaaggtggctcgagtgaggaaactgcgggggcaacggtctctcgtcgccgggaccccgccgtgtgccgcccagggacgcgagggggcgctgctgccgcgccaggggcgagggtcccggggcctcctgagcacctcccggccctgcccggccaactcagactacacccggactctgcccaccgcgtttccgccctcggcctcgggtccctggagggctcgcgggtaggaagagtcggggtggcgggactttcgccgacacccggctccccgcctggtggctgcgcacacgaggccggcgacgggacttgcccgcgtctcagcgcctcctgtgtgaagcgggac

SEQ ID NO: 11411 - DNA, 30 bp, Homo sapiens
  chr17:58603272-58603302
  hyper
tctagttccacggccgccatcttccttccc

SEQ ID NO: 11412 - DNA, 51 bp, Homo sapiens
  chr17:58676700-58676751
  hyper
cgtgcaaaggttttagcgttgggattgtgaccgactcggtgaagagagggg

SEQ ID NO: 11413 - DNA, 705 bp, Homo sapiens
  chr17:58677542-58678247
  hyper
gggggaagcgcagtgcgcaggcgcaactgcctggctctgctcgctccggcgctccggcccagctctcgcggacaagtccagacatcgcgcgcccccccttctccgggtccgccccctcccccttctcggcgtcgtcgaagataaacaatagttggccggcgagcgcctagtgtgtctcccgccgccggattcggcgggctgcgtgggaccggcgggatcccggccagccggccatggcggggctgtactcgctgggagtgagcgtcttctccgaccagggcgggaggaagtacatggaggacgttactcaaatcgttgtggagcccgaaccgacggctgaagaaaagccctcgccgcggcggtcgctgtctcagccgttgcctccgcggccgtcgccggccgcccttcccggcggcgaagtctcggggaaaggcccagcggtggcagcccgagaggctcgcgaccctctcccggacgccggggcctcgccggcacctagccgctgctgccgccgccgttcctccgtggcctttttcgccgtgtgcgacgggcacggcgggcgggaggcggcacagtttgcccgggagcacttgtggggtttcatcaagaagcagaagggtttcacctcgtccgagccggctaaggtttgcgctgccatccgcaaaggctttctcgcttgtcaccttgccatgtggaagaaactgg

SEQ ID NO: 11414 - DNA, 243 bp, Homo sapiens
  chr17:58700867-58701110
  hyper
atttcttattacagcggaatggccaaagactatgacgggtcttcctagcacatcagggacaactgccagtgtggtcatcattcggggcatgaagatgtatgtagctcacgtaggtgactcaggggtggttcttggaattcaggatgacccgaaggatgactttgtcagagctgtggaggtgacacaggaccataagccagaacttcccaaggaaagagaacgaatcgaaggacttggtgggag

SEQ ID NO: 11415 - DNA, 126 bp, Homo sapiens
  chr17:58711212-58711338
  hyper
gtgtaatgaacaagtctggggtgaatcgtgtagtttggaaacgacctcgactcactcacaatggacctgttagaaggagcacagttattgaccagattccttttctggcagtagcaagagcacttg

SEQ ID NO: 11416 - DNA, 192 bp, Homo sapiens
  chr17:58725251-58725443
  hyper
ggtgatttgtggagctatgatttcttcagtggtgaatttgtggtgtcacctgaaccagacacaagtgtccacactcttgaccctcagaagcacaagtatattatattggggagtgatggactttggaatatgattccaccacaagatgccatctcaatgtgccaggaccaagaggagaaaaaatacctgatg

SEQ ID NO: 11417 - DNA, 251 bp, Homo sapiens
  chr17:58733951-58734202
  hyper
gaatacagggtgagcatggacaatcttgtgccaaaatgcttgtgaatcgagcattgggccgctggaggcagcgtatgctccgagcagataacactagtgccatagtaatctgcatctctccagaagtggacaatcagggaaactttaccaatgaagatgagttatacctgaacctgactgacagcccttcctataatagtcaagaaacctgtgtgatgactccttccccatgttctacaccaccagtcaag

SEQ ID NO: 11418 - DNA, 1531 bp, Homo sapiens
  chr17:58740341-58741872
  hyper
ttcttatttttcagtcactggaggaggatccatggccaagggtgaattctaaggaccatatacctgccctggttcgtagcaatgccttctcagagaattttttagaggtttcagctgagatagctcgagagaatgtccaaggtgtagtcataccctcaaaagatccagaaccacttgaagaaaattgcgctaaagccctgactttaaggatacatgattctttgaataatagccttccaattggccttgtgcctactaattcaacaaacactgtcatggaccaaaaaaatttgaagatgtcaactcctggccaaatgaaagcccaagaaattgaaagaacccctccaacaaactttaaaaggacattagaagagtccaattctggccccctgatgaagaagcatagacgaaatggcttaagtcgaagtagtggtgctcagcctgcaagtctccccacaacctcacagcgaaagaactctgttaaactcaccatgcgacgcagacttaggggccagaagaaaattggaaatcctttacttcatcaacacaggaaaactgtttgtgtttgctgaaatgcatctgggaaatgaggtttttccaaacttaggatataagagggctttttaaatttggtgccgatgttgaactttttttaaggggagaaaattaaaagaaatatacagtttgactttttggaattcagcagttttatcctggccttgtacttgcttgtattgtaaatgtggattttgtagatgttagggtataagttgctgtaaaatttgtgtaaatttgtatccacacaaattcagtctctgaatacacagtattcagagtctctgatacacagtaattgtgacaatagggctaaatgtttaaagaaatcaaaagaatctattagattttagaaaaacatttaaactttttaaaatacttattaaaaaatttgtataagccacttgtcttgaaaactgtgcaactttttaaagtaaattattaagcagactggaaaagtgatgtattttcatagtgacctgtgtttcacttaatgtttcttagagccaagtgtcttttaaacattattttttatttctgatttcataattcagaactaaatttttcatagaagtgttgagccatgctacagttagtcttgtcccaattaaaatactatgcagtatctcttacatcagtagcatttttctaaaaccttagtcatcagatatgcttactaaatcttcagcatagaaggaagtgtgtttgcctaaaacaatctaaaacaattcccttctttttcatcccagaccaatggcattattaggtcttaaagtagttactcccttctcgtgtttgcttaaaatatgtgaagttttccttgctatttcaataacagatggtgctgctaattcccaacatttcttaaattattttatatcatacagttttcattgattatatgggtatatattcatctaataaatcagtgaactgttcctcatgttgctgaatttgtagttgttggtttatttta

SEQ ID NO: 11419 - DNA, 750 bp, Homo sapiens
  chr17:58742891-58743641
  hyper
tccacacattctggttattttcaatattttgcagaagataattcttgatcggtgtgtcttatgccacaaggattaaaatatgtattcattgctacaaaacaatatctcgaaatttagcagtttaaaacaacaaatattatctccagtttctgagcctcagaaatctgagagtggtttagctgggtgatagtctcgtggttttggtcaagctaccaaccagggctacaatctttcgaaggtgtcattggggctagaagatctgcttcccgcaagactcacagctgttggcaggagacctcagtttgttgccacatgttcccctccagagggcctctcacaacatggcagttatttgtccccagagcaagcaacaccggagggcaaggaagaagccatgatgttttttgtaacctagcctctgaaagtgtcataccaattctgtattttgttggtcacacagaccaagtcaactacaacgtgggagactcctacacaaggcatgaattctaggaggtgggcatttttaagtgtcatctggaaggaggctgtcacaacctggaagttaaaagcattgatattctgaaatacagcgtgtataacattgttttagtagggtgtgcaatagttatgttttggtaatagcattaatgaacaatgttattttcatcttccagacatctggaagattgctctagtggagtaaaacatcttaatgtattttgtccctaaataaactatctcactaacaaa

SEQ ID NO: 11420 - DNA, 52 bp, Homo sapiens
  chr17:59467475-59467527
  hyper
cagcgccccctagtgccgggccggccgcgcatgagggcggtgggacagatcg

SEQ ID NO: 11421 - DNA, 340 bp, Homo sapiens
  chr17:59473906-59474246
  hyper
cgcgggggagcccggtccggccgctaaaccgggctggctggcgccagggctccgggaggtgcggtccggcggggaagccgtgatgggaagcgactctgtccagggagtgtccttcaccaccacactcctcacgtccaggcagtgatcgacggcctggcggcaccctcacagcgggcccatagcacggggccacacacgtcccctgagcttagcctgggcacattcgtctgccaccgagggcttaagccagtctgcagcccgcgccccgtcactcggacgcaagtccgtcgtccgctctgccacgcggccgcacagcccgagcttcctgctgcccactgcc

SEQ ID NO: 11422 - DNA, 30 bp, Homo sapiens
  chr17:59474907-59474937
  hyper
cagactcttcagagcggctgcagcaggacc

SEQ ID NO: 11423 - DNA, 1168 bp, Homo sapiens
  chr17:59476133-59477301
  hyper
ggggcttcaatcacaggtgctcgcagacaccccaactccctcacgcgttactcagcactccttaacttaggagacgtgcgcttccgagagatgagaagaaactaaaaaagtggttggcagggcgaagagaggaagccggtatttcggaagaaggagactttcgtctccggtaccggatagggcgaaaattcgttgggtcgcgggtggagaatccggggtccgcccgcgcggtgccgccctgtgctcagcgaaaggtgcgctcaccttcctggccccgaggatccgctcctcccggccgctggaaagctcagggcggggcccgggcctgcggagaactccaggttccttccgagtcttccggtgaaggcgggcgcgggtagggggtccccgcgtttccccagcgcaaggccgcgtcccgctcccgcccgcgccggccccagcagggctcggccatggctccactcaccagctcccgccacctgggatccgctcccggacctcggccgcccgagcctcccgactcgcccgcccaccggcctcgctttccagtgcctgctgtctctttccggggcgcagggacccccaggcggcgccacgacccggagctgggtcggaggccaggctggggctcgggccagagcggccgggcctctgggcgcgggagaaggagggcgccccctctccgctcggggtcgtgtcaatgctttgcacttggggccggcgtgcggctgcgggtccttccccaaggccccgggacccgggctcccctcgcctcaggccctttcggcgggtcaggtcggccctccgcgctctccagtccggcgcaggcagccgcaggcgcgggcgggcggtgggggccggggcaggaggaggggtctcggggcccggcggcccgtcattggttaatattttattctgttgacatgttttcttactgctgaggcttccgacaccttctcccaggccccccctcccggccggagcttggcctgagctgtcaaaaccccgcccccggagacccacaattggtccaaaaagcgtaaaatcagcaatcaaggggggcctggctcgttagcgcaggggatccgagctgggcaggacatgtgagatagtcacagttttccagagatcacgacaagatctaaccagtcgcgcgtggtccccggcg

SEQ ID NO: 11424 - DNA, 30 bp, Homo sapiens
  chr17:59477542-59477572
  hyper
agagccggcgctggcggccagcgccatggc

SEQ ID NO: 11425 - DNA, 726 bp, Homo sapiens
  chr17:59477883-59478609
  hyper
accagttccacaagctaggcacggagatggtcatcaccaagtccgggaggtagggctgccggccggctggaaggcgcgcgggcgggcgggcgggctggggcacgggactgcacggatcagagcagagctggggactcccggctcccggctcccggctccaggttctggccctgacgccacgcttcgctcccacggacaaccaagttgacttttctcgtttggcaccggagcgatttttttttaaaacaaaaacgctaaaatcctccgaatgaaataaaacgaaaacatactgctaaagaatagccccaaccgttctgagtcccagcgcagaggaggccccgcggcttggccctggcggtctcctccgccccgcgctctcgctcttctgcgtccgggtccgtctccgagctcgggggaaattcagcctctctcagactctgctccgaccccgaagcccctagtgggacctgggcccagctaaccccacgctggttgctcggttcctggcagcgagccccgggtcagccgagccctccgcctcaccgggctgggagccctttctccaccgcgggcatccgagccctggacgcatccgccgccccaggccttaaagcctgaagaaagccacagccccggcccctccacccttcgactcagccaccgagaatccaggcctcgggttcaccctcttcccccgaactgcacggccaggatgtcttatcaggc

SEQ ID NO: 11426 - DNA, 139 bp, Homo sapiens
  chr17:59529011-59529150
  hyper
ccagcacttccctgccgccgccgccccgcacccggccaccgggcttcctcccagtcctcacccctgacctccgcggccgacttcgaggcgcgccaggccgggtccagcgcccgcggccccctgggccgggacaaggagg

SEQ ID NO: 11427 - DNA, 11 bp, Homo sapiens
  chr17:59529253-59529264
  hyper
cgacctcggga

SEQ ID NO: 11428 - DNA, 436 bp, Homo sapiens
  chr17:59529843-59530279
  hyper
cggagtcggagccccggccgtcccgcgctcctcggacccgaacctgcaggggacctcgggccgctggcgcctccgcatgcggcaccgcaattagggtgagtgtgggttccagccgagtggggacgagctgggcgtgcggggctggggccacaggggctcagggttaggctgcggggacggacaggaggatgagctggaaaggggtgagtcacgcgacccggggaagaacttcaggggcggtcaaagttgcaggaaggcggcgcgaagtgccttgggtcgggccgccgcctcggcccgacacccagtagttggggcacgagccctcctctctgagtaacgcgatgaattgggtctagagatccaagagcatagaaatatcgacagcgccagcaccctaagaacaaggccgtgacaggcggagcggtggcctggaaat

SEQ ID NO: 11429 - DNA, 298 bp, Homo sapiens
  chr17:59531719-59532017
  hyper
ccatcgcaaaggcagcggaggttgcgggccgcacccgcggaggagtggatgtgaaggacgagagcggaccgctatgcggtgctgagtgcgggaccccgcggtgctggcggcggccgagcgcgcccaagctcgaggtccgagaggaccgcgaggacggccgccccgggccagccgggcgtggaaaaaaggaaattgctgggaagggggcaagctgtcccgaggtctggatgtggcttcgtggcggagagaaaaggaagaggcaaaccctgagcccgggagggagagcactgagcaggcc

SEQ ID NO: 11430 - DNA, 15 bp, Homo sapiens
  chr17:59532269-59532284
  hyper
cgatcccgccggggc

SEQ ID NO: 11431 - DNA, 226 bp, Homo sapiens
  chr17:59533874-59534100
  hyper
cgagagcgaggaggccttccgggccccgggcccagcgctcggagaggccagcgcagccaacgcccccgagcccgcgctggcagcgccgggcctcagcggagccgcgctaggcagccccccgggacccggggccgacgtcgtcgccgccgccgccgcggagcaggtagggctgcgccagccgtcgggtagaagtcgggcgtcggtctgtctgcggggccgcctgtgt

SEQ ID NO: 11432 - DNA, 30 bp, Homo sapiens
  chr17:59535238-59535268
  hyper
aacagggatcgcgacgctcaaaagtcccag

SEQ ID NO: 11433 - DNA, 589 bp, Homo sapiens
  chr17:59539224-59539813
  hyper
gacctccgagaaagtcggggctgcagcggggttggggcttgggggaccctccaggtggagagaatctaggggtatcccctagtctctgtccctttccccaggaaaggggctgagagtaagcgccttgaatttggccaccgctttggccggggagctcccgcggctctcgcagcgcagctagaacttgcgtgttccctcagcagtgagttcgcagttacgggtttgttgccagaattaaaaaagccccaaacccttgccccgcgccccgcgcgcctccaacaccgagaaacgtccgaggaagcttatcttagcagttcattctaaagccatttccgagtatgaatagataaaggctccagctccgcaccctttcagagcctgtttcatgatcagaggagaagccccgggctttcatctcctcccgggccggcgagcaggcggcttgtttattcccctggcggagccgtttccgcgtgtgccgtggggagggcgggggagcccccatctgtctgggggcgcgggagcccgacggcgcgaggggaactgggggagcatggagagggcgcttggggcgcggagagaaggtgcg

SEQ ID NO: 11434 - DNA, 30 bp, Homo sapiens
  chr17:60142577-60142607
  hyper
gcagccgccgccggcgccacaacccaccat

SEQ ID NO: 11435 - DNA, 30 bp, Homo sapiens
  chr17:60704528-60704558
  hyper
taggctgctggagacgcccgcagaaagagg

SEQ ID NO: 11436 - DNA, 30 bp, Homo sapiens
  chr17:60705824-60705854
  hyper
aaggaggcttgtggcgcgcggcatccgccc

SEQ ID NO: 11437 - DNA, 58 bp, Homo sapiens
  chr17:60885476-60885534
  hyper
gtcgaggggctgggcgggcgggccggtccagggcgcaggagccgcccattaattgcgc

SEQ ID NO: 11438 - DNA, 36 bp, Homo sapiens
  chr17:61043879-61043915
  hyper
ggcgagagctggcccccgagccgccgctgacaggag

SEQ ID NO: 11439 - DNA, 30 bp, Homo sapiens
  chr17:61044392-61044422
  hyper
ggcggattgctaaacgtggcagggaatgtg

SEQ ID NO: 11440 - DNA, 46 bp, Homo sapiens
  chr17:61553923-61553969
  hyper
ctacccccggcaggcgacgtccccgcccctcgaccatggcctggtg

SEQ ID NO: 11441 - DNA, 30 bp, Homo sapiens
  chr17:61819058-61819088
  hyper
actggccccggcagcgtaccaggcaccccg

SEQ ID NO: 11442 - DNA, 30 bp, Homo sapiens
  chr17:61851077-61851107
  hyper
aattacataatccccgcccctgggccggaa

SEQ ID NO: 11443 - DNA, 30 bp, Homo sapiens
  chr17:61921071-61921101
  hyper
tcatgctggtagctcggaactgccaaggga

SEQ ID NO: 11444 - DNA, 113 bp, Homo sapiens
  chr17:61926211-61926324
  hyper
cagggagcagccagcagaggccgcaagctcggccaagcgagccgggatgtccaaggcgggaacgtggcttcgcgcgcaactctctgagacgcgggccggctcacgtgtccggg

SEQ ID NO: 11445 - DNA, 31 bp, Homo sapiens
  chr17:62067669-62067700
  hyper
atggtcactagatgtgcgccaagcgtatgcc

SEQ ID NO: 11446 - DNA, 65 bp, Homo sapiens
  chr17:62776357-62776422
  hyper
actgggccccggaggcggggtcatcgagctgcccagagccaacaaaccccaaggtggacactgcc

SEQ ID NO: 11447 - DNA, 1405 bp, Homo sapiens
  chr17:62776446-62777851
  hyper
cgcagcgcactcacgtctgctgggcgggcctcagggagcccaagggccgggtgggcggggccggcaggttaggcccggaccatcgccctgggcggggcttccgaggtggtgccggagaggtttcgcggaatcggagctggcaacggcagcgaatagggacagcgacgctcaggagtgctgtcacccatacccaaagaagctgcgtctgggcggggcgaggaggaacctgaatgcctctgctggggaccttggggggcattgggacgaggaccggagcagaaagccggggtccggagccaggaaggctgcgtctgaaggggcgctggctggtcgctagcggagcccaaggagggtgggcctcccctgtcccgccttcccccttcccttctcccccggggatttgctgtcccggagtccctgcgtccctcccgcctgcggctctgggaatgccggtctggggctggttgtctagtgcgggcgttcccgttcgcggggaggtcattggcaccctgaatcacccactgcgagcccttccaaccggattgtagacctgccagctccgggcccacctcccccaacagggcctttcccggagcaacccggccgggcctggaaaaactccgagagggattcccagcgcagggacgcccaccggagcgcagtgtctcgggctggataagaaggggacccggccacagctccttcgccaacctgcgggaacacagagaaggggagggattggtgggggccgagaggatccctggagcgcgagagcgcacccgtcgccaggaggtcccctgcgtccactgcccaggcgacgcaagctacagcggcgtcaacgcctgggtcggcgctaggggcctgggcctgctccccacccgcctccagagggagggcagcccttcgcctaccttctcctccccgtgggatgcggcccgagcagctcccgccccagcacggagacaaggggagcaggcgcgcggagctcccgggtgcggacccgccacctgccgcacccttccctccccaaccctgcccctttccccacccccaccccacctcccacctcaactcccgctcggcggcccactgcctgcccgggcacctcggggcgtccgctcgccggcctcgtctccacttgtcccggcaggcgcgcgtgggctcggcgtcccgcgctccctcctcgaccgcgcggctccggcgctgccaggtttcctgtatagcactataaccagtgaggcaccggcggagagcgcccggcagaacttcctcccggactggggctgggctgcggttgcgagagacaatccccggcgtcctggcttcctgtcgcctctgggccaggcccgcgcctgaagaggaaagatgccaccccctcccctgcatttcccgggatcctgggcca

SEQ ID NO: 11448 - DNA, 31 bp, Homo sapiens
  chr17:62915937-62915968
  hyper
aagctgaaagagccagcgaaagaaaaaaaaa

SEQ ID NO: 11449 - DNA, 30 bp, Homo sapiens
  chr17:63119250-63119280
  hyper
gaaagggatcccggcgctatgggcttcaag

SEQ ID NO: 11450 - DNA, 34 bp, Homo sapiens
  chr17:63341481-63341515
  hyper
ccaccccaacccacctcgacgcatgccaaagaac

SEQ ID NO: 11451 - DNA, 543 bp, Homo sapiens
  chr17:63555846-63556389
  hyper
aacaagctgctttccctagcacggaaaagatcaaactaagaagggtaggggctgaacggggtgcaaccccgggcgagaagccagggaccccggatctgggatgggtgcacgctgaacccgaccagagcctcgagccgcggggctgggcggcgcggcccacggagaagtggggctgccgttggcaccgcgctacccgggcggtgggaggtggagcggccccgttacctggaagacgaaggccgccgaagccaggctctcatgtcctccgagcccctccggcccggtcccccggcccaaatgcaactgaacgcctccagagccctggcgggcacacctcgaggccggaaccccgggacacgccagcagcgccccgagcccgggcggggggtcggtccccggcgccgccgtttgcagaggcgcccgcagaaaaagcacagaaagcagcagcctagtccagaaatggcgacgcgcggagtctctgcctctccgcaaaaggggccggggcggccacgggcgaggggcccgggccgggaggagggacgc

SEQ ID NO: 11452 - DNA, 256 bp, Homo sapiens
  chr17:63556624-63556880
  hyper
actcacatccataaccgcgacagcgacgcgacccccggggggtatctgccccctctccgcccccgccactgccgccactcggataagtctcctctctgggccccccgccaacccggtcaccgcgctggggagggggctccggcgcagggcgcgcaaggctgcccggccaagccccccggaacgctgggcgccgggtccgccgctcccctccgcgccggcccctagcgcgccccgaaatagccggcctgccaacttc

SEQ ID NO: 11453 - DNA, 170 bp, Homo sapiens
  chr17:63557213-63557383
  hyper
ggcccggctttcaacgcaggtcctgtttccagcagtcactcggcgcaccaaatgtcctccgggcgcttccaacaaaaactgcgctgtggatttaactgtgcacttcaaaggcgcgagccgagcgcacggtcctgaaagggaggtacgcgccggccgcgccccgggccgcc

SEQ ID NO: 11454 - DNA, 158 bp, Homo sapiens
  chr17:64257869-64258027
  hyper
tttagactcaggtattcggattccagaatcccctcacccttgccattaaaggtgtggtctctggaacagggacatcagcagcagaagcaagtatcatccatcacctcagagctggtaagaaatgcagtctccaggctcggcgcagtgactcacgcctg

SEQ ID NO: 11455 - DNA, 30 bp, Homo sapiens
  chr17:64877670-64877700
  hyper
tcattgatgatatcttccaggccttattct

SEQ ID NO: 11456 - DNA, 601 bp, Homo sapiens
  chr17:64961012-64961613
  hyper
tatgaggcgcccaccatggtgcgatgcgaccgcgggctgcagatgctgctgaccacggccggagccttcgccgccttctcgctcatggccatcgccatcggcaccgactactggctgtactccagcgcgcacatctgcaacggcaccaacctgaccatggacgacgggcccccgccccgccgcgcccgcggcgacctcacccactctggtctgtggcgggtgtgctgcatcgaaggtacggccagccccgacccctcgccgccccacacacacacacacacacacacacatatacacacgcgcgcgcgcgcgcgcgcacacacacacacgcgcacacactgcccggcgcgcgggccggggagagggtgggcgcggcgctggctccgcgcgagacacaaaggagccggagctggcgggcgggtcccttcgcggccagctgtacatcagctctggtccctctcggctggggacctccccagcacaccgatcccacaaactctccacgcgcacaccccctcgcccacagacacaatgaaacacaccgaaactcaagcacgcgcgcgtagcccgggacccgagcgatccccaggggccgcgccgg

SEQ ID NO: 11457 - DNA, 42 bp, Homo sapiens
  chr17:65352418-65352460
  hyper
agaaaatgaactttgggaggccgaggcgggcggatcacgagg

SEQ ID NO: 11458 - DNA, 30 bp, Homo sapiens
  chr17:65374034-65374064
  hyper
aggaccggcctcggcgagggaggaggcggg

SEQ ID NO: 11459 - DNA, 435 bp, Homo sapiens
  chr17:65822941-65823376
  hyper
tgtggtacacaaacacgcacaaaaaaatgcgttttcacacccctagctgtggttttaaaattgtgttaaggaaacggatcatttgggttagtaggggaaccttatctggtcctgtgtgtttgtttttattcttcgagtgctaatgggcccgtgcaacagttgctgttaaatggctgattaaaaagcaacgcagaaagccaaacaagacccaaccaaatttggttattcatccgattcagaattattttggttaaatcaaaaataaaagtacaaaactacaggaacgcgcgtcttaactcatttgatcgctttgccttgcttgggaaatgcagtttcgtgtcacctgttgcagaagatatgtagttgatcatctagacataattgccgaagatgaacttctggaacaacttctaagtcacacggcatcagtatcag

SEQ ID NO: 11460 - DNA, 96 bp, Homo sapiens
  chr17:66434324-66434420
  hyper
tgccatgcatagctacgggaggaagtggctgagccccggaacctttaactgcacgttctggcagccctgccacccctttggcgatacaaggtcatt

SEQ ID NO: 11461 - DNA, 1203 bp, Homo sapiens
  chr17:66596260-66597463
  hyper
cactctaagcccagcgccagggctggagccgtgggtggagccgctgcagccctgggccgggggcgtcaggaaactcgagactggggcgcggggaggccccggccagagcgcccgctctcccgcgtcccgggcggggtcctcacctgttccagcgggccaccttcctccggtaataccgcagcgcctcctggctggccaggagcgagtcctcggctcccaggagaggcggctcctccgggacgttgtacagcgggtgggcgaagagggcctgcaacttggagctcgacccgctgtggctgccgccagccggttcagtccggggctcggttcgggaaaagttgtgcacgatcgtgccggggtccgaggcagctgcggccgagtcccgcgccagggaggaggcgcggccggtgcacgggcacccccgcgggcgctcccgaggccgcagctggcgctgtacttggggccagaggtggaagtagaggtcggcggagagcagcgcgcccagcagcagcagagtcagtaggcggtcccggcgcagccccggcatggcgtgctggccaagggggacgccgggggcaggccggctgtctccggggtcccgggaggggtcgcggggtgcgggcagaagaggtgcctggagtcccgcgggtgggccggggtcagtgagaccggaatgctccccgcgcgggctagtcccctgtggaggggtgtcgctcctcaacttggggaccaggtgcacggagcaccggggctctcggagtcagcgggcgtcgcttctccgcgccgagtgagccgagggaatggggttcccggggtgcccgcttcttgcgccttttctcccgtgcgcccgcccgcccggacgctcgcggcaggtgaagggccccggggcgccggcgccggctgccaccgcgggcggacgggcgacggggcggggggcgaccgcggagggcggacggaggccgccggctgcaaagcccggggcgtctctcctgaggatgctgtcgctcggcggcggctgctagtgctcccgcgactcctcctgcgggcggcggagacgccagtgccggcggctggcacgggcggcgcgagtggggagttggcgaagcaggagcggctccggggagcttgtctgtgcgcctggactcctagaggcagaggtagcgcggggcctccccgagcctggcctggcgccggcacccccac

SEQ ID NO: 11462 - DNA, 1005 bp, Homo sapiens
  chr17:68164769-68165774
  hyper
tttaggggtctgcgcgctctcgcctggctgctgggaaggagggctgggaggcgctgaagcgagggcagatctgagtgtctgtaggagttgctattccaaaaaaaatcattactctctaattgttctgattttagatcagcaaagcgtgccgggcggtggtggagagactgagggcggacaaggcgagagggaacgagccgtccacccttcggagaagcctaggcgccttgtaagtaattcgcgaacagtcgggagaacaaacagccaagcggcgctgcagtggccgcacttgcgcgcgtctcaatcctgggggctctgcgcgcccgccccagtccctcgccccattgactcagtggcttctccgggcgctgcagcctccgcggggggcttcgaagggccgaggggctccggcagagagggagtggagagggagacgcgccgggaccgacgaacaatcctgcccctgcggcaaaggtctctacccggcgctggcacctcgcaggcccctcgaggagcacgcagggcaagcggcccaagagcgggggaaccgggaagtgtgtggggctccagacggagtaggaagctttgcccaaggccaggctgcaatcaggcagccgcaacagccgggcgcggagcttcccacctgctgctgtcccagctgggccgcaacttcctcctccccggcccgggcccgactccccggccgggctccgagggtggagggggacgaggcggcggcaggttccctccgctggcaacgcctcgcagcatcctcccctccccgccgcggttcccggggccggccgcgcggccaggcgcgctgcgattggccggcagcggccgggggcggggccaggagagccggtgtcgcacggaccgcctcaaaagagcccaggatattgcagagcgcactggagccctggccagcgcgcagccttcccggcgccggcgggctgggtcttgggaattctggtttgctttggctcactcgctttttacaaacca

SEQ ID NO: 11463 - DNA, 30 bp, Homo sapiens
  chr17:68166006-68166036
  hyper
atatagtttgtgtgcgcaccagaacatccc

SEQ ID NO: 11464 - DNA, 350 bp, Homo sapiens
  chr17:70026543-70026893
  hyper
aacagtcagctcctgcggcatctgatttgcctcctgccctcgctgctgttaatctgcaacacgccacagcctctagatcgctgccgttcagagtcggatgtcatgggggcgactggcaggggttctttcttctttcggtttgatacatccttccttccgctgctcctcgcaatcaaccgctaggggaaggagggaagcaggcaggagggagagcgggagacttccggaaatccctttcctcccttcccttcacaggttgccccatagtgaccctggagactcccgcctgcccccagtgaaggaattggttactctcccagagccctcccgggcatcgcccccttcctcac

SEQ ID NO: 11465 - DNA, 30 bp, Homo sapiens
  chr17:70113172-70113202
  hyper
atctttctttttttcgaaaacaggaaaggg

SEQ ID NO: 11466 - DNA, 191 bp, Homo sapiens
  chr17:70113827-70114018
  hyper
cgtccctaccgaaaacggatttaaacaccgtccccacttttgctaaggaagtttggatagggaggttgtggtccttaattcgccaggtaaaaggaaccccatcagctcgcatccctcacccccatcctgagcactgagtgtttgcgagaaactcgccctgcgccagcaactctgggctccggtctcagctc

SEQ ID NO: 11467 - DNA, 457 bp, Homo sapiens
  chr17:70114152-70114609
  hyper
cgcacctctgtgtctccgctcccggcggcagacctcgcggcgcttgctcaagagcgggtatccgaaagcacgtcccgaacacggagaagcgccctccgtctcctgcctcgtgacctgcgccctttccctccctcaccgcatcagatggaggaccctggctcctttcgcccctggcaaaatgctctagccaacactgggtcaacagccttagtttccagatctgtaacctgaacatcaggagcgggttcctttccttctacctgtgtctgaggtcctctggtcggggactgcgcgcgtcttcccaggtcagggaggaggggtcggggcgacctgagaaagacacaacgaagcgaatggagcccctgaatggggaaaggggagtggacaccaggaggcccctgcagaaatgcaggaccgatccactcgcgagctgacaatgccacgcgctagacttggc

SEQ ID NO: 11468 - DNA, 595 bp, Homo sapiens
  chr17:70215711-70216306
  hyper
cctcacaccgcggcccgaccggccgcacattaatccgggtggatttggccatcttgtgacatagccaatcagttcgagggaggggacggcaggaacgcctctcctttcacgccacaaaaggattttcgtcccttgagagcacaatgaaaaaaaaaaaaaaaaaaagccaatcaaggcgggatcagctgtgggctggtcgctgcagatctgtctctcccagaggggggtgggggcacatattggtccgtgtgggaaacccagagcctcagcttctcacacattgttctcctcctcttcaactgcaccccctccccaccagcccggaccctcccctctcccctccccaaagccgttattgccacaaaagatactttccccattgtgccccggacagctgagaggtccgagttagccatacacagctccgcgtcctctccagggagaaaggggatggaccctgcaagtggagagcgggatgcttatcatacaaaggaattaaacccacttgggctctctcgccatccaggactgtggggggttaaatacggttacattttcattaggtgctaatagcagaagggcagccccgggcagc

SEQ ID NO: 11469 - DNA, 200 bp, Homo sapiens
  chr17:70216392-70216592
  hyper
cgtcaaagccgggtccagggaaggggggcatgccatgggcgtattgttggcctgcgagttccgtcaatgggaaaagtcatgtttcctccgaaggaaacaagtggaaattgtcggggaggggaagggctggtgggtggctgggaagcagagctcggccagttgctactaaggctgccttcgaactgtccctccccactgcc

SEQ ID NO: 11470 - DNA, 52 bp, Homo sapiens
  chr17:70270192-70270244
  hyper
actaacatacttctcacgggaagcactgtgcctgtcccgaccaggaggggct

SEQ ID NO: 11471 - DNA, 40 bp, Homo sapiens
  chr17:70553091-70553131
  hyper
cctccgagactggaaccgtagagagcgaccacctctttct

SEQ ID NO: 11472 - DNA, 30 bp, Homo sapiens
  chr17:70587738-70587768
  hyper
ctattcagaaagcccgtccacaccctggcc

SEQ ID NO: 11473 - DNA, 561 bp, Homo sapiens
  chr17:70588500-70589061
  hyper
gcagccagaccctgtcctctgcgctccagactcgcggaggtcgcgggcgggggtcctcaggcggccgccttctcgtccccaggggtgggcgcgcgacgcgggcagggaccgggcgcccggaggaccaagcgagcgcatcccgcctactcgtgctgggacatcacccagcctggacgccgctcctcgcctttcttccccgcgcatcgccagcgccaaccaaagatccccgccgggaaagcctctctgccaagctggaaagcgctgaaggcggatcgtctctcagacttgggtttgcaggttcacaaggcccgggaggcttacggtgggcgcctgcctaacagagggtccttgcggagaagcgcagaacgacaaatgccagaggcggtgaccgcgtcctctggataccagcgccgcaccgcgcacccgcgccgcctgcgcgccctgcagtcggctgggccattcggcccttatataccaggcggacccgcgccgggacggggcggagcggggtgggcggggagggggtggggaaggccgaacggcttcctgggagtcgtagtt

SEQ ID NO: 11474 - DNA, 83 bp, Homo sapiens
  chr17:71306651-71306734
  hyper
ggcaaacagtgggcaccgggcacacagtaagggatgtgggagccggtcagattgcaaggggtgggagtcgtggagagagagaa

SEQ ID NO: 11475 - DNA, 964 bp, Homo sapiens
  chr17:71307045-71308009
  hyper
atggctcctgggggacgcgccgggggcagggggcagttttgtaaccccggctgggggcgctccggagagggggcggggccagggacggccgatccgcgcgcacccgccccaagcgggcgattaaatcattaaccgaccgctcccgcctgcgatcccgctgagcgcgctgagctcggggcgcactagcccaggagcggccgtctccccggctccaagggggcgggtggctcgactgccctccccccgcaccccgccaggaggcgcctcggcctcccgggcttccgagggagcgggcggggcgggagcctggcgggggagggaagggttcgcggggcgggagtaggggaaaggaggaccatttgttccttcggccattcccttccagacagctccttccctctggcttcccggccgggtgacattgggtggcgtgtgctgcagtgtgtgtacgagagcgagatgtgtacacgcctctgcccgtacaggcggagaattcggttcttattcatggagaactccgggcgcacacacgcccccctcgcggagatcgcgggccgcgcgccgccgattgctgcgctcctgcccacaccgacacacaccccattcctgggaagggggaggccctttaaaaccggcccccaaccccctcagcggcacccttggccagggccgggagttccagcgtggagagaggaaatggagtcccggcaacgctgcgcccggctccctgccacctcctcctccacacatcccgctctgccaggacactaggtgcgcagcttagggtcccaggcaccgcggtgggcgcggtgaaaagcgcgagcgccgagaagtgggggctccgcgcccttctccccgcgccgcggcctcgcatccccagcttcgatcctctctgccccacagggggactcgagacccccaagcccacccagggcacccagcgcgaaggcggctaccacagaca

SEQ ID NO: 11476 - DNA, 179 bp, Homo sapiens
  chr17:71308388-71308567
  hyper
agcctgcgctccggccgcgaacccccactggggcccccagggccaggggcgcgtctccctccgggggcctggcgcgaggctcttttgaggctcttccccattcgagccggggcaagaaaccaagaactccagcccgggtggcgttcctcgttcctgctccctcccggacctgctaacca

SEQ ID NO: 11477 - DNA, 30 bp, Homo sapiens
  chr17:71469605-71469635
  hyper
tagggtttgcccagcagacctggtggacaa

SEQ ID NO: 11478 - DNA, 30 bp, Homo sapiens
  chr17:71641654-71641684
  hyper
tccagcctcgctcgcgcccctgtctcaaag

SEQ ID NO: 11479 - DNA, 137 bp, Homo sapiens
  chr17:71948491-71948628
  hyper
agaacccaggattacgacaccggatcagccagagacgcgctggaggggcccaggaggggctgcagcgcgccgcaaatcccccggggcttacgggagccgctctttaggagacagcgctggacgaaccgggcggggtg

SEQ ID NO: 11480 - DNA, 30 bp, Homo sapiens
  chr17:72210263-72210293
  hyper
attccaagatggggcgctctctttccgggg

SEQ ID NO: 11481 - DNA, 30 bp, Homo sapiens
  chr17:72270429-72270459
  hyper
gaccgtggattgaacgcttccccagagacc

SEQ ID NO: 11482 - DNA, 112 bp, Homo sapiens
  chr17:72353147-72353259
  hyper
ggcgagaagagcacgttccaggtgacccggcggcccgcgtcgtggccactcgggcccagctgcgtctggaagctggtgctgcggtcgtcgcgggccgggttgttgatgaccc

SEQ ID NO: 11483 - DNA, 99 bp, Homo sapiens
  chr17:72353416-72353515
  hyper
cgagcgcgcctgcagctggaacagctgtgccggtgggatcatggggtagcgtatggcgcgcagcgcccgctcggccacggcagggggcggccgcgcgcg

SEQ ID NO: 11484 - DNA, 1803 bp, Homo sapiens
  chr17:72427139-72428942
  hyper
cggcaccccgagactcggcgccctgccctccctccgcgtctccagggccctggccaggcccaacaacctctccctcctctgtgcgcctcagcccctacgggcctctggcgcgggctaactaggcctcgctgcgggcccccaggactgcgcaccccaccccccgcgaggccagcagccccgggggaaggcggccggaaaatctcttgtttatcgggctggataagtaccagcctggattcgcttcccaatttctgcggtccagcttcagcagattcctggggccggaggggaaagggtggcaacccacagatccaccccggaacagggagtggggggtggggctggtgggaacctgacctcctggaaaggacggactcggagtcagagccaacgtgtcccggagcgcagaggcccagggggtcgcgctaaacactgtacctcggggaacaaaaccgtgaaggctaattaggacaagtcggagcagggaacggggacgccgggaggggagagcgcgctccgagttgggcagaacctggaacggtcacaggaaacccgggcgcggggtagtcgggccgagggggacctttgcccacggtccagagtggtctggactcggcccacgcgtgagaggagcgcttggtgacgatcccacgtacgcttggtgactggtggaggtcccagagaaggaccgtgcgtgcaaaaggcgaacctcggtgtgcggtgtgtccacgtgtgcaagctggggaggggagggggcgcagaaggcgtgacaaagacggactctgtcttgagtgtgcgcctcgctccggcccgctcccagcgaactgtgcctgaagtgtgtctcacgggagggccaggacgaaggtgacaaaggctaggtgtcccccacggagacgcgccaaggtagccccgcgcgtgtccgtaggcgcgctctctggaagacgcggtggggggtgcgcagggctgcaccctcacaccaattgccccggcgaaggccgagcccagaaagtgagtgcgcgtgagtgtgcgcgcgcccgcatgcgggggcgtggcagtcaacagcaacaacccacacgccggcagggccagaaactcccatctccctcaccagccggaaagtacgagtcggctcagcctggaggtgagtcggggcggggagggccgggcaggctttgttcctgtgtaaacggagcgcacgtacctggagcgcggcgggcgcccgattagcgccctgaatggaggtgatgtaacggtgatgcaggctccagcccaccctcgccgaaagcaaggagccctgcctggggacaggcccgcgcgagagcgagcaacccagcgcgcctggctcagcctcggtcccagggagaggcaggccctgcgtcccggcccgggccccgccatcccagccaggaccgggcctggcccagcgccccgcgccgcgtccctcccacccccgcccgccccccgcctggggctggagttggccccaaacgctgcgctggagcggggccggcggcgagtcccaggtaagggctgctgccttcccgctccgccgcccggaagagtcgggtcgggacggcggggagtgggcgagggcagaggcggggggactggacatcctgcgggctggggacgccgcgccaactccgctcggtcgctgaaagttttcaaacccgagccggctggggactgggggggtgggggagcccggcgctgcggctcgggctggagggaggggaaaccactccataatcggggtctccaagaggagcccctccaccgcctgcctctcggtgggagtccgcg

SEQ ID NO: 11485 - DNA, 30 bp, Homo sapiens
  chr17:72439029-72439059
  hyper
ggagcctcaggccccgcccccacactgaat

SEQ ID NO: 11486 - DNA, 374 bp, Homo sapiens
  chr17:72449938-72450312
  hyper
attcacctaaaggcaacggtggcttgcctcacccccaactccaccgacggcaggagagggtccgcgggggcccgggcccagggaaggttttacgctccgtccttaacccagcgtcctaacctgacccggctgggagagggggcggggccccggaaccccacccgcagacagcccactcccccgcacgcacctgggttgggggaggtggggggcggtggggggcagtgaaggtggggggaggtgggggtgggcccgagcagccggcgcgcccacgtgcctctcccgcgagggcccggccaccccagctccagccaacccgaggccgcctctcgtgccccaccccaagccccgccccggcccctgcaacccgatcc

SEQ ID NO: 11487 - DNA, 159 bp, Homo sapiens
  chr17:72450330-72450489
  hyper
cgaagccagctgtcccagctcctgctgtagcctgggggccgggccgccgcgctccgcccatccccgccctcagagctgggcctcgcagccgctagggattgcgggggccgcatttatccctgtgtctctcaggccccgcagagacgggggtggggtggg

SEQ ID NO: 11488 - DNA, 30 bp, Homo sapiens
  chr17:72889986-72890016
  hyper
ccaggtagtagggacggaggcgtcaggggc

SEQ ID NO: 11489 - DNA, 56 bp, Homo sapiens
  chr17:72920344-72920400
  hyper
gcgcctgtccatctcggcgtgggagagaggagacgctcgccgtcccctgaccccca

SEQ ID NO: 11490 - DNA, 30 bp, Homo sapiens
  chr17:72931888-72931918
  hyper
aaaaatcgatgggccgcggagcccgagcgg

SEQ ID NO: 11491 - DNA, 30 bp, Homo sapiens
  chr17:72968953-72968983
  hyper
acccgcggagtcggcggttccaacccagcg

SEQ ID NO: 11492 - DNA, 543 bp, Homo sapiens
  chr17:72983946-72984489
  hyper
ccggaccctggcaaagcgccaggccccgcgtgggctcccggcgagcggttgatggcgagggggcgcggcgcgggctctgtagcccgagttcccgacgctggaggcccggcccgcctcagccgcattgtcccgggccgcgcgcaccggccctgagctgcgccgccgcagcacccgcccgccgcccgcggggccatgcggagagccgccgggatggaggacttctccgcggaggaagaggagtcctggtacgaccagcaggacctggagcagggtgagcgcgggggcgaccgggacaggaaggcggggagcgcccggtgacccctgtccgcttctccattgttgggcgctatcaccccgggaggggctgggctggaccgggcgcgcccgactcggaggagggacgcgtctggagaaccgggacgtggagagagggggcgctgccggagaagacgcggaccggacgggcggagacctgcaaaagtggggggcggggggcggtcttcctattttcccagacgaccgggcatccgtcatccagctcgc

SEQ ID NO: 11493 - DNA, 31 bp, Homo sapiens
  chr17:73029808-73029839
  hyper
gctgggggctggtgctcgctaagtaaggatg

SEQ ID NO: 11494 - DNA, 30 bp, Homo sapiens
  chr17:73043060-73043090
  hyper
acggaagtgggtcacgggaagatctttcct

SEQ ID NO: 11495 - DNA, 178 bp, Homo sapiens
  chr17:73073505-73073683
  hyper
tgcctgggcgtcacctacccccgcagctccccgctcggcggccgcccgagccgcagcgtggtctacctgctgggccgcaaccccttctcgtggtgcctggagtgggacgacaacgcgcagaccgtgctgcacggcgcctaccaccgcacgctgggcgtggcgctcgactgcgacgccg

SEQ ID NO: 11496 - DNA, 86 bp, Homo sapiens
  chr17:73073967-73074053
  hyper
ggctagagttcccccaggcactggggacagtcccgtggccttgtgggtgggggattcctgactgcggtgcacagcccactcccaaa

SEQ ID NO: 11497 - DNA, 38 bp, Homo sapiens
  chr17:73127280-73127318
  hyper
taggtcgttcatctcccgcacagcgtccaaggctcccg

SEQ ID NO: 11498 - DNA, 30 bp, Homo sapiens
  chr17:73285310-73285340
  hyper
gtgtacacagtccccgccctctcgtgagcg

SEQ ID NO: 11499 - DNA, 84 bp, Homo sapiens
  chr17:73422367-73422451
  hyper
atgaaagcatacttcacggttttaattagcaagtggaataacttctacttgctcatgttgtcagccctacgtgttgccatcaac

SEQ ID NO: 11500 - DNA, 30 bp, Homo sapiens
  chr17:73452533-73452563
  hyper
ccggccgcatcactcggcacctaattccgc

SEQ ID NO: 11501 - DNA, 171 bp, Homo sapiens
  chr17:73511276-73511447
  hyper
cccagcccaggcccaccggggaacaaagcggcgggagaagccgggcgggccaagcgcccgaggtataaacgcggaggatggaaaaaggggcgcgaggaggacggaaggagcggggagatggaggtgcccgccgaccccgcaagaaaagttagtttgcgcccgcccccaggg

SEQ ID NO: 11502 - DNA, 34 bp, Homo sapiens
  chr17:73521009-73521043
  hyper
gtcggaggggatgggacgtcgcaggcttcccgaa

SEQ ID NO: 11503 - DNA, 15 bp, Homo sapiens
  chr17:73522411-73522426
  hyper
cccgcgggagggact

SEQ ID NO: 11504 - DNA, 15 bp, Homo sapiens
  chr17:73522482-73522497
  hyper
cggagacccagtctg

SEQ ID NO: 11505 - DNA, 55 bp, Homo sapiens
  chr17:73585951-73586006
  hyper
ttgccccgactgcacccgacgggccttccctcgacgagagcggctccagcagtga

SEQ ID NO: 11506 - DNA, 30 bp, Homo sapiens
  chr17:73663342-73663372
  hyper
tttccagtgtggcgcgggggtctcctggga

SEQ ID NO: 11507 - DNA, 31 bp, Homo sapiens
  chr17:73760184-73760215
  hyper
cagtacgtgaggcttccgccagctggagtaa

SEQ ID NO: 11508 - DNA, 30 bp, Homo sapiens
  chr17:73781292-73781322
  hyper
ggaaggcgggagctcgggatgcagagtgca

SEQ ID NO: 11509 - DNA, 30 bp, Homo sapiens
  chr17:73993576-73993606
  hyper
catcagacactgaaacggccaccgaccatc

SEQ ID NO: 11510 - DNA, 119 bp, Homo sapiens
  chr17:74072591-74072710
  hyper
tgcggtgtaaccatgcgctaaggaccttcctcgagagcagccttgggaccgaggtgcaggggtcgcggccctccagcatgaatgtgcccgctcagccgacgtctcccttcccggtctga

SEQ ID NO: 11511 - DNA, 391 bp, Homo sapiens
  chr17:74072998-74073389
  hyper
cgtcgacccggtggccgcgggctcgggtgcccggcgcgccaagcgcaaggtgacacgcatgatcctcatcgtggccgcgctcttctgcctctgctggatgccccaccacgcgctcatcctctgcgtgtggttcggccagttcccgctcacgcgcgccacttatgcgcttcgcatcctctcgcacctggtctcctacgccaactcctgcgtcaaccccatcgtttacgcgctggtctccaagcacttccgcaaaggcttccgcacgatctgcgcgggcctgctgggccgtgccccaggccgagcctcgggccgtgtgtgcgctgccgcgcggggcacccacagtggcagcgtgttggagcgcgagtccagcgacctgttgcacatgagcgag

SEQ ID NO: 11512 - DNA, 31 bp, Homo sapiens
  chr17:74132738-74132769
  hyper
gctctcagcctcaagtcgggcttaaagatta

SEQ ID NO: 11513 - DNA, 30 bp, Homo sapiens
  chr17:74136743-74136773
  hyper
ggatcttttagtgccgaggtatgggaaaca

SEQ ID NO: 11514 - DNA, 40 bp, Homo sapiens
  chr17:74381567-74381607
  hyper
cagccacggctccgggcggggaaggcgagccccacagccg

SEQ ID NO: 11515 - DNA, 30 bp, Homo sapiens
  chr17:74497094-74497124
  hyper
ctcctctcttcctccggaggtttaaatctc

SEQ ID NO: 11516 - DNA, 146 bp, Homo sapiens
  chr17:74533838-74533984
  hyper
agccagcggtggggcggggatgtggtctgctggaaaatgtttaaaaaaacaaatccgctccaaacccccagccccgtgtgggtaagagccaatgccggcaaggtgaaggctgcgcggggtgggggcgacgcgactgccgcccgccc

SEQ ID NO: 11517 - DNA, 647 bp, Homo sapiens
  chr17:74581100-74581747
  hyper
agggaggaggagggagtggagcgcaggacgcggcgcggggaggagaacgcggatggagccaggagtcacccctctttccctcgggcgcccgcctcttcgcggatcgcgcccgcactgggcttatccagacacggcgagcggaagccggggagaagggagcgggcgcggggcggacagagaccgcagcgggcgggaaaggcgactggccgcggcccgacggagggtccccgcgaagttggaaaccggagacttgggcccctgcccaaaaagcagaatctgacgttaccgagggagagttcccgacaaaaaaggaagtttttatctgcttcggggacccagccagatttcgacaatagaaagtgtacttatcaggccggggaggacttcaccaacaaggggcaccggggcgggtcgccagtgcacaggggcgaggtcttccttggacccaggcaaaggccgcggggtccgggcagcgcgaggtcaaggctgggagagggttctggcgacaaagggccgcggccgagtcctcgctgagagctgccccagaggggtccacgcggaggttgggctgagggctgcgggccgccggggagccctgggctggggaccctccccgcgccctggtcgcccctgcgccctcccgctct

SEQ ID NO: 11518 - DNA, 225 bp, Homo sapiens
  chr17:74732258-74732483
  hyper
ccttcctcttcaggagacttggggggactcttcgatcgcgacctggatttggattccctcttggacactgggggaggactcctggaccgagaccgggacctggaccgcgaacgagatctggagaccgacgaggacttggacttggaccttcgtgcggatctggacttggaggtcgaccgagatcgagaacgagtgcgggaccgagacttcgagcggctgtagcga

SEQ ID NO: 11519 - DNA, 262 bp, Homo sapiens
  chr17:74732943-74733205
  hyper
tggtgtgagtccggggggcggccgtagcgcgccatttgcacccgcagctcgcggccgtccagcacggccccgtccatggcatccatagcgtcctcagcgtcgcgcttgtcgtgaaagcgaacgaaggcgaagccgcgggactccttggtgtagcggtcccgcgggatgtacacgtcgccgacgcgcccgtacttctcgaagacgcgcctcagcgtgtcgggcgaggtgcggtaggtcaggttgtccaccttgagggaggtca

SEQ ID NO: 11520 - DNA, 30 bp, Homo sapiens
  chr17:74864287-74864317
  hyper
ctcggggctggtggcgccctgggaagctgc

SEQ ID NO: 11521 - DNA, 30 bp, Homo sapiens
  chr17:74865163-74865193
  hyper
ccctgagaccctttcggtaaagttccctcc

SEQ ID NO: 11522 - DNA, 57 bp, Homo sapiens
  chr17:75082777-75082834
  hyper
agggccatgtagtagacgcctgtagttttcgcctgtccaggacgccttcacccctgc

SEQ ID NO: 11523 - DNA, 30 bp, Homo sapiens
  chr17:75137660-75137690
  hyper
catgcaatggaggccgtccggctcctggat

SEQ ID NO: 11524 - DNA, 790 bp, Homo sapiens
  chr17:75368667-75369457
  hyper
cttattgtggaggaagggaggcgtcgcccgtccctggcttctctgacagccgtgttccatccccgccctgtgccccttctcccggacagtgccttctccagggctcacccaggagggtgcagcggtggcccccggggcggtggtcgtggtgggggtgttagctgcaggggtgccctcggtgggtgggagttggtggcctctcgctggtgccatgggactcgcatgttcgccctgcgcccctcggctcttgagcccacaggccgggatcctgcctgccagccgcgtgcgctgccgtttaacccttgcaggcgcagagcgcgcggcggcggtgacagagaactttgtttggctgcccaaatacagcctcctgcagaaggaccctgcgcccggggaaggggaggaatctcttcccctctgggcgcccgccctcctcgccatggcccggcctccacatccgcccacatctggccgcagcggggcgcccggggggaggggctgaggccgcgtctctcgccgtcccctgggcgcgggccaggcggggaggaggggggcgctccggtcgtgtgcccaggactgtcccccagcggccactcgggccccagccccccaggcctggccttgacaggcgggcggagcagccagtgcgagacagggaggccggtgcgggtgcgggaacctgatccgcccgggaggcgggggcggggcgggggcgcagcgcgcggggaggggccggcgcccgccttcctcccccattcattcagctgagccagggggcctaggggctcctccg

SEQ ID NO: 11525 - DNA, 623 bp, Homo sapiens
  chr17:75369492-75370115
  hyper
cgccccagccagcgcgcagggcccgggccccgccgggggcgcttcctcgccgctgccctccgcgcgacccgctgcccaccagccatcatgtcggaccccgcggtcaacgcgcagctggatgggatcatttcggacttcgaaggtgggtgctgggctggctgctgcggccgcggacgtgctggagaggaccctgcgggtgggcctggcgcgggacgggggtgcgctgaggggagacgggagtgcgctgaggggagacgggacccctaatccaggcgccctcccgctgagagcgccgcgcgcccccggccccgtgcccgcgccgcctacgtgggggaccctgttaggggcacccgcgtagaccctgcgcgccctcacaggaccctgtgctcgttctgcgcactgccgcctgggtttccttccttttattgttgtttgtgtttgccaagcgacagcgacctcctcgagggctcgcgaggctgcctcggaactctccaggacgcacagtttcactctgggaaatccatcggtcccctccctttggctctccccggcggctctcgggccccgcttggacccggcaacgggatagggaggtcgttcctcacctccgactgagtggacag

SEQ ID NO: 11526 - DNA, 441 bp, Homo sapiens
  chr17:75370185-75370626
  hyper
cgtgggccgggagcaccgaacggacacagcccaggtcgtggcagggtctagagtgggatgtcccatggcccccatccaggcctggggatatcctcatccgcctcccagaatcgggccgtgggggacagaaggggcctgcgtgcgggcagggagagtattttggctctctcctgtcttcggggtttacaaagtgtgttgggacttgcggggctgctctgtccaagcctgggtctggcgtccgcgtctctgagcctgtgagtgcgtgcgctttcctgcgtcctcttgactgccggtgctggggctctgcgtcctgcgtccgcgggagtaaatacagcaggcgaaggggaagctcacacaatggtctccagcgctctggggcagggcttctgaggggcgggcctgcctctgccgggacctggagcccccgcccctcggagaggc

SEQ ID NO: 11527 - DNA, 357 bp, Homo sapiens
  chr17:75447462-75447819
  hyper
tccctacctctgccccgcgctctgggaggctccttgttccgcgaccacaaagcccctttgatcctctgctcggctctgagccatgtgacccggtgggcgggccgcggctctcggcgcgtccagcgcagcccgacgttccgctgctggggtgagtcctgctcctttgttcttcccagccttgcaccactggctcgggggctctcaggtggcgcggccgcgaggcggaccctgatggccatggtggcggtgccgggagccacgctgtccctgggccccggcccgaggccggcaggaccgagcggggtccccaggagaggggtggcggggagctcgatctccacgcggggaccagatttt

SEQ ID NO: 11528 - DNA, 485 bp, Homo sapiens
  chr17:75524681-75525166
  hyper
gtccgcgagcgccgcgcagcctcccggaccgccctgagctgctgcgcccggcgctgctcctccttccccagctccgcgccttcccctcgcgatccccctcctgcctcttcggtcctggaagcgtcccaagatggggtgggggcatggagggagagaggggaggagggagctgcccgggggcagtgccgccaggaagtgggacggggactctggcgcccctccaggctgctgcgcgcgggctggggaccgtgcaccgctttgcgcgccagacgatgcatcttctggaacggcagctgaggcaatgcggggtgtgaagtggcggcgggcagaggggctcgcaggggctgggatccgcgtgcccctctctgcctcggtgcggagcacgatgtgcccgggcgggggcgaggacgtccgggaggggctgggctgcgcacgctcgcggggccgtcgcagatgggcggtttggaggcgctgcagtccctggg

SEQ ID NO: 11529 - DNA, 653 bp, Homo sapiens
  chr17:75953796-75954449
  hyper
aaatcttctcctggcttgaaccgaaagttaaaaagggacttttcgaattgcacattgcgcctgaccttacctaccactaatgaataatggatatcgaggagccgtggaatggaggatcacggcggcgtacggagcaccggggaggaatcgtggggtgcgtaggcgccggagcgcccgggttcggcccggaccgaaggcttgcgcggtgaaggtgtggtgtctgtgctccggggaaagggctgtctccccgggggactgtttcgcagcgaggcttgttttgctcgcagctgggcgctccctggggagcgactgagcgcaagggcgggccgggaggcgcgaggcgagcacgatgctccagggccccaaggactcgtgtgcgtgtgcgtgtgcaaagtggggcggtgcagggcgtgtgcacggcacgggcgagacgcgcgccggtgcgggcgccgggcgccgccgggcgcaattacagcataaagcccgggcgccgcggggcgctggcccggagaacccaccggacgcgcagaaccggatcggcacccctcccgccagcaccctaacgcggagccacagcgcccagggaccggagggcaggcggcggcggtaaaggacaccacgcaagtctccacgtaacccccccgagcagtgca

SEQ ID NO: 11530 - DNA, 155 bp, Homo sapiens
  chr17:76227981-76228136
  hyper
tcagaagagccgggcgccgccgcgcccgcccgccccccgtcccccggctcccggctccgcgcgccccccgccgcccccggggccctgctacccccgacccgtcccctcccgccggccgcccccatggcccggctgggcgcgctgctcctggccgc

SEQ ID NO: 11531 - DNA, 31 bp, Homo sapiens
  chr17:76349273-76349304
  hyper
ccgccagcccggcggccgccagatctggagg

SEQ ID NO: 11532 - DNA, 207 bp, Homo sapiens
  chr17:76355659-76355866
  hyper
ccgaaggccccagccggagtattccgggaacctgggatctccggcttccatccgctctgcccctacctcgtcacctccctgccgggaatgacccgggaaggggaggggaaaccgggaaaagctcccgggactgagcgagacccctccccacgccgcgctcctccttcctacctggtcccgaatcgaagtctccgtccttggggctga

SEQ ID NO: 11533 - DNA, 63 bp, Homo sapiens
  chr17:76588404-76588467
  hyper
tgaaccacatggccctggggtcggggcctctggccgaagggcgctcagcttggtctgtaaaat

SEQ ID NO: 11534 - DNA, 138 bp, Homo sapiens
  chr17:76921080-76921218
  hyper
ggagcagctgcaggcgtcggccgggcgaagcagcgtcgccagcagcaggaggccgagcgccagccgcagggtgcgggccgcggcgcccatggcgggccggggggctgggcgggcgggggccgccgctggggggtccgg

SEQ ID NO: 11535 - DNA, 69 bp, Homo sapiens
  chr17:76921483-76921552
  hyper
ggccgcagttttattgcgctcggaggattttctgctcctcctcccggtggctggcggccaatgcaggct

SEQ ID NO: 11536 - DNA, 1 bp, Homo sapiens
  chr17:76921859-76921860
  hyper
c

SEQ ID NO: 11537 - DNA, 30 bp, Homo sapiens
  chr17:77020205-77020235
  hyper
gtttggacgaaaagcgctgggggtgttgga

SEQ ID NO: 11538 - DNA, 131 bp, Homo sapiens
  chr17:77071369-77071500
  hyper
agcggcctccggcccccgtgcgtgacccctgcctatctcagaaatacgggtgcaaacccgagtggccgcggggcccagcgggaatcccgacgccccggccagacccctgcttcccacgtcgctggtctatg

SEQ ID NO: 11539 - DNA, 31 bp, Homo sapiens
  chr17:77099946-77099977
  hyper
aaagaaaaagcggcagcggcagcaacaacac

SEQ ID NO: 11540 - DNA, 102 bp, Homo sapiens
  chr17:77179380-77179482
  hyper
cggagtgcgggagcatgctgccggagttggacagcaggaggcagcccgagttcgccatggagcacagcatggggcggcaggggggcgcccggcggcggctct

SEQ ID NO: 11541 - DNA, 159 bp, Homo sapiens
  chr17:77179617-77179776
  hyper
cgcgcctctgcccggtgttccccctgcccgggcggggaggctggagagagcgcgcgcgagaatacggccagagagtctgtgcgcgagagatcgggcgagcgggcgagagcaggagtcagtcactttggagcctccggagccctgtctgcaaagagtggt

SEQ ID NO: 11542 - DNA, 221 bp, Homo sapiens
  chr17:77179799-77180020
  hyper
cgtgtgcgcgcgtgtgtagcggtgggagggggagtccctggcgtactccaacatcaaacggagccccgcgcggagggaagagaatccggagcgacggcacaacagctgatcccacacttaacccctcgcccgccggcaccggggcagccctccctcgcgccctcccacgctcgggcccctgcgcgcccctcctcccccccgttgccagcacttgctcctgg

SEQ ID NO: 11543 - DNA, 31 bp, Homo sapiens
  chr17:77188903-77188934
  hyper
tttaccaaaacatcctcgcctgttgagttag

SEQ ID NO: 11544 - DNA, 149 bp, Homo sapiens
  chr17:77766024-77766173
  hyper
agctgaggcggagatcgattggagatttgtacaaatcttagaattaaataaacccaacagcgcacacaccctgcgcggttgcagactcccagccacgtggcccccggcccctgcccacccaccccccaggtcagcgtcgcaagagcgag

SEQ ID NO: 11545 - DNA, 38 bp, Homo sapiens
  chr17:77771550-77771588
  hyper
cccggagccgcacacccgacccccggtctccatggcaa

SEQ ID NO: 11546 - DNA, 46 bp, Homo sapiens
  chr17:77774930-77774976
  hyper
caaggagaggggcggacgggccccagcggggcgctgggctcctggg

SEQ ID NO: 11547 - DNA, 539 bp, Homo sapiens
  chr17:77786328-77786867
  hyper
ggggaagtgggggtacgaacccacgcggctgtgccaaggggtcccaactccggagtccaaccccacccaccagtcctctgtgcgcacttttcgtttatttctcagcagtctcagtcctggagctcctggggcgatttcgtcccctgccctggtgcgcccccgggccctgccctgagcccatgccccaggccgggtgtccagttcaccctgagctccccttggcgcccggagaagggtgctcgggcccgggtgctggggagcggcggggtggccgccggcgcctcttcggcgcggatggctctcggcggggccgaggagggggtcgcagagcggctccccgccgagaggagggtgggcgctcggcacctgctgagctacggtggtggctgcggtttatggcgcccgaggatccacccggatcttctccgcggagttccgggcttggctcgtctgtagtcagcacgcacacagctttgttatttgttatttttttaatttttctgcggggagcatcggggctagcccgcccagctccaacg

SEQ ID NO: 11548 - DNA, 96 bp, Homo sapiens
  chr17:77788536-77788632
  hyper
cacccccatttctttcagatgcggagatcaaagcccaggctcactggtgggtcgggagctcactcctccaagtacacttggccaacctcggggagc

SEQ ID NO: 11549 - DNA, 54 bp, Homo sapiens
  chr17:77789473-77789527
  hyper
cgtccagccagccgccttgtccatgagaaccacctggagggcagggtccagtgc

SEQ ID NO: 11550 - DNA, 144 bp, Homo sapiens
  chr17:77813599-77813743
  hyper
cctccccctcgcggcacgttctcagtgttcacggccccgggacccctgctgggggccacggaagcatccgccgccgctcccagttgcaccgaattgcgtcaccagcgccccgggacgcgcgggccccgccggcagggggcggaa

SEQ ID NO: 11551 - DNA, 1491 bp, Homo sapiens
  chr17:77814493-77815984
  hyper
cggcccgaggggcaggggcaggggcgcgcctggcctggggtgtgtctgggccccggctccgggctcttgaaggaccgcgagcaggaggcttgcgcaatcccttggctgagcgtccacggagaaagaaaaagagcaaaagcagagcgagagtggagcgagggatgggggcgggcaaagagccatccgggtctccaccaccgccctgacacgcgacccggctgtctgttggggaccgcacgggggctcgggcgagcaggggagggaggagcctgcgcggggctcgtgttcgcccaggaatcccggagaagctcgaagacggtctggtgttgaacgcacacgtggactccatttcattaccaccttgcagctcttgcgccacggaggctgctgctgcccggcggctgctacccaccgagacccacgtggcccctccccaggggtgtaggggtgacggttgtcttctggtgacagcagaggtgttgggtttgcgactgatctctaacgagcttgaggcgcaaacctaggattccctgagtgttggggtgcggcgggggggcaagcaaggtgggacgacgcctgcctggtttccctgactagttgcggggggtgggggccggctctcaggggccaccagaagctgggtgggtgtacaggaaaatatttttctcctgccgtgtttggctttttcctggcatttttgcccagggcgaagaactgtcgcgcggggcagctccaccgcggagggagaggggtcgcgaggctggcgcgggaagcgctgtaggtggcagtcatccgtccacgccgcacaggccgtctgcgccgtcggaccatcgggaggtctgcagcaactttgtcccggccagtccccttgtccgggaaggggctgagcttcccgacactctaccctccccctcttgaaaatcccctggaaaatctgtttgcaatgggtgtttccgcggcgtccaggtctgggctgccgggggaggccgagcggctgctgcagcctccctgctgccaggggcgtcggactccgcttcgctcactacgcccaggcccctcaggggcccacgctcaggacttcggggccacacagcaggacccggtgccccgacgacgagtttgcgcaggacccgggctgggccagccgcggagctggggaggaaggggcgggggtcggtgcagcggatcttttctgttgctgcctgtgcggcggcaggaagcgtcttgaggctccccaagactacctgaggggccgcccaagcacttcagaagcccaaggagcccccggccacccccgctcctggcctttttgccaacgactttgaaagtgaaatgcacaagcaccagcaattgacttcccttccgtggttatttattttgtctttgtggatggtgggcagatggggagagaggcccctacctaacctcggtggctggtccctagaccacccctgccagccggtgtggggaggagctcaggtccgcgggaga

SEQ ID NO: 11552 - DNA, 30 bp, Homo sapiens
  chr17:77982385-77982415
  hyper
gctccgactgagtccggcctgcgggaccca

SEQ ID NO: 11553 - DNA, 47 bp, Homo sapiens
  chr17:78009471-78009518
  hyper
ggcccacgcgccccacgcgccccgcgcgcccccgccccagctccgcc

SEQ ID NO: 11554 - DNA, 508 bp, Homo sapiens
  chr17:78009995-78010503
  hyper
gaagaccccccgggcgtccatgcaaggagtctccgtaggacccctggagaagggcaccggagccccctagggcaggagatggaaaagcgctcgccatgcgcggggtccccggcccccggtgcccccagcccgcctgccattcccgggcgcttagcagtccggggtccccaggtgcccggcaggtcccttcgggacctcgagccgcccgctgggcacacgctgacgccgctgtcgctttacagaaattgagcgcagccgaggcgggacccgggcgcagagagcgataaaggaaaagcatggtcgtgctctaatcattacagtctaagggacgacacgtcgagacggcgcgcgcctctgcgtgcgtggagatggcacaaaggccgcgccgcccccggcggcccccgccctcgcagcgcgcgtggtcccggcccggccggatgttgacagcgtcgcctagcaacgggaaatggcggaaccgggcggcgcggcgggccggtaagccgggccg

SEQ ID NO: 11555 - DNA, 15 bp, Homo sapiens
  chr17:78010737-78010752
  hyper
tcccctactccaagc

SEQ ID NO: 11556 - DNA, 31 bp, Homo sapiens
  chr17:78388503-78388534
  hyper
acctggtgaatcctttcggggttcagcaaag

SEQ ID NO: 11557 - DNA, 57 bp, Homo sapiens
  chr17:78428406-78428463
  hyper
ccccggggactcttcccgcctgcggcctcgcgccagcccggccggctcgcctagtgc

SEQ ID NO: 11558 - DNA, 31 bp, Homo sapiens
  chr17:78955670-78955701
  hyper
gcactttctgggctctcgcccattccttgag

SEQ ID NO: 11559 - DNA, 45 bp, Homo sapiens
  chr17:79008325-79008370
  hyper
gggccggccggggggtcgccgcccgcccggcgggcttacctgcga

SEQ ID NO: 11560 - DNA, 641 bp, Homo sapiens
  chr17:79008849-79009490
  hyper
ggtgatgcgggcgcaacgggggcgggacgcaggggcggggactgccgcggggcggggcctgaggcggctataaaggtggccgccgccggacgccgggctctgtggttcgggtccgctttcgtctccgtcctgctgccgttaccgccgctgctgccgccgcttgcgtcccccgctccggtctgtggtgcagccgggacccaggaccatgtctctgtctcgctcagaggagatgcaccggctcacggaaaatgtctataaggtgagcgccccccggcgccgagctgagcccgctccgtgtgcgcctgggtcgcgcgccgcccgcgcgcccgagcccgaccagggcggccccggggccgcgcgccgggccaggaggctgggactttgggggtcttcccggcgcggccacccgggacccgggctgctggggtggtgagcccggcgccggccgctcacaggtggccacccccgcccgggcccccccatcccatgcgcgccgcggcccggtcagtccccagccccaggcccggggagcactccccgctccgacggccctgctcggcccccgcgcgctcgccttggcgtcggcgggaacggagccgcgcgccgggccccggaagccctcggaccggtcggggtcgtag

SEQ ID NO: 11561 - DNA, 30 bp, Homo sapiens
  chr17:79196662-79196692
  hyper
aaacctcgggtcggcgacctggcgccccgc

SEQ ID NO: 11562 - DNA, 158 bp, Homo sapiens
  chr17:79317381-79317539
  hyper
tagccgctaggcccacgacaggacttctagggaggggtccctgcaaatgcccttgggcgaagagaggacggaaagaatattctcccttaaattgcaattaagggtgtgcggggcgggggtgcttggggggtgctgcggcaggccgggttcgctcaacc

SEQ ID NO: 11563 - DNA, 370 bp, Homo sapiens
  chr17:79317846-79318216
  hyper
ggcgggtgtgcgctccgagcgtctttcggcgggggggaggggggagcaggaggggcgaggagacttgcgcagtcagggagccgcgaaccccgagtctcggtcctcgaaggcggcaggagaaaccgcgcgctgtgccccgacctctctcgccctggccaaccgcgacttgggacgagctggaggagcttcccccgggctccggacgcccgcgccgaaaaccgggccatgggtaccaaacccgactctaggcggtcattcactttgtccccacccaaactctgatgagctatttgggagtgcgcggggactgggaagtgagggacttttataacattcttctttcgactccggcttccgagcccaccaccca

SEQ ID NO: 11564 - DNA, 31 bp, Homo sapiens
  chr17:79319252-79319283
  hyper
caggaacactttgggccggggtctaccccgc

SEQ ID NO: 11565 - DNA, 30 bp, Homo sapiens
  chr17:79519273-79519303
  hyper
acgcggggcttgcccgccgccaggcccccg

SEQ ID NO: 11566 - DNA, 37 bp, Homo sapiens
  chr17:79886040-79886077
  hyper
ccggagcggcgcggggcggggacggcctggcagctcc

SEQ ID NO: 11567 - DNA, 31 bp, Homo sapiens
  chr17:79889370-79889401
  hyper
tcccagcactgccaggcgctttgctggggca

SEQ ID NO: 11568 - DNA, 31 bp, Homo sapiens
  chr17:79926113-79926144
  hyper
gagggaaggtggcagccgagccctctccaga

SEQ ID NO: 11569 - DNA, 1015 bp, Homo sapiens
  chr17:79988352-79989367
  hyper
cccttgtcctcccgccgcccactggtgggacgtgaggccagccagagagcggggctggccaggtctcccgtgctgaggccgtgccacggtgcgctggggctgcgtccgctcactgcgctccttgccctgcagtgatggcgagcgaccaccgagaggcgctgctggacagggagagcgagaacgcgtctctccgggagaagctgcggctccgggaggcggagatcgcccgcatccgggacgaggaggcccagagggcgagcttcctgcagaacgccgtcctggcttacgtgcaggcgtcccccgtgaggaccctgagccccccaaagtgagacaggccgggaggacccgggcgcagtaggagtgcatcaggcggcgcccgagatggaccaggggctgcgtcccgcccgcgccgcctctttgagacccgggtcgtctgttccacgcggcggttgcggcgactgttggtggtgtcgcggctgcgggggaaccccgtgggaggcgcctgggaagggctccctaccggccccttcttcccggtcgacgccacgtgggagcacaccgggaaggggtcccgcgggcgcgtctccccctcgccttttgcgatgtcaccgtgaacgctgcggccgcctgcgcgcggcggggtttggaaatacagcgcgtttgcactttgtgatacattctggccccgcctctccctccaaacgcgcgaccgtccgtgcctctccaaacgcgcggccctctgcccccagccctgcagggagggcctgccggggtgcggctgttcgcccctcctcgccgctgccttgaagggacgggagggccgcgggggctgtccgtctgggggttcgggcggctgcagaccccggagttcccagctggctcccggcggcagggggcgggtccccgagaaagcgcagcgcgcggagccctccccgccgggtccaggtcgctgggctctctccggcctgcgctgcgccccgagggacccgtaggagacccccgggccggggtcgcg

SEQ ID NO: 11570 - DNA, 30 bp, Homo sapiens
  chr17:79989583-79989613
  hyper
catttctccgcagctcggctcgcggccgcg

SEQ ID NO: 11571 - DNA, 30 bp, Homo sapiens
  chr17:79989899-79989929
  hyper
tgggctggctgcgggcgaggcggggccgcc

SEQ ID NO: 11572 - DNA, 31 bp, Homo sapiens
  chr17:80156992-80157023
  hyper
gcagtcattataaaagcgcttcaagtaatct

SEQ ID NO: 11573 - DNA, 557 bp, Homo sapiens
  chr17:80329443-80330000
  hyper
gaggcagcttcgctccgcagacgcagacgcgagacccgcctgggaccctccgccgaccccgctgcggccccgcgacccccgcgtcttcccggcgccgcgcggtcagcgccgccccctagacacccggcgccgtcccctccgcgcgcctgctgcccgctggggttattttaataccgggccctggcgcggggcgcggcgcattcccagctggcggcgggcaggtggcggcggcgcagagacccggcgcggggcggggggcgcggctttggtggcgggactggcgggcgcccctgccgtgtgctctggaagccgaggccaccgcggagcccctcgcgccccctctgcgctgggacaggggagcgcgcctcggaaagttccccgcggccccgctgcgcgaggagtttggagccgcgagcggctgcccccacgcgcgaccccaggctcggcgggcaggtctggccgctcagtgaccggaggcaggtgggtcctcggtgggtgaccgggagcgcgcggggactgccgggtctgtgcccttcggggccctccgcagggctggg

SEQ ID NO: 11574 - DNA, 217 bp, Homo sapiens
  chr17:80503129-80503346
  hyper
ctcccactcctcagctcggaattcctatcccgaattctaaaccataaattagttttgtttgcttttgaacttcatatccatgaaattgtacagagtcctttgtaggagacggtgtttgttttttattgaatactgtgtttctgaggttagtccatatttttgcacgtagctattggccattctcattactggaaagtagtaacgtggatatacaacg

SEQ ID NO: 11575 - DNA, 36 bp, Homo sapiens
  chr17:80551802-80551838
  hyper
agcgggatcaggccacgcggacgaggaggtgcgagg

SEQ ID NO: 11576 - DNA, 560 bp, Homo sapiens
  chr17:80655625-80656185
  hyper
aaacttgggggatccccgggctgcctgcctgggagctctgggcgctccggcctcccctcgccctggaacccgctctccggccgctgtcgtggggggtcccctcttccgcacgcgagtcacctgtgctccttcctctcccccggacacgcgggacccctggcctcgggaccggaccctggtctcccctcccctccgacccacgcgcagacccagcacctgggcgcctgctcgccgcgctccgccccaggagccccggagctcgcgtcccctcccgcccctcctgccccgcggccgaacgcgcacttgcggactcgagcccccgccccgggtccccacagcagcggccccaggtcgggaggagcccagcgcccggcccagccgcgggctcccgctgcgcgcagactgcggagaaggatggagactgcgccgcggggcctcgagtggaactgggggtgcaacagggacgccgcagcacgagggccagggccgggcggagaaaggcccgcccgcgaaccgcgctcctcctcagccccgcgcccccggaccgggactcctaccct

SEQ ID NO: 11577 - DNA, 31 bp, Homo sapiens
  chr17:80656449-80656480
  hyper
accgggctgcccagggcgctcatcgtgacgg

SEQ ID NO: 11578 - DNA, 188 bp, Homo sapiens
  chr17:80656873-80657061
  hyper
gggtgtttacactctcgcgtgcgcccgtgagcgccacgaactcgctcccacggtcgtcgggtctgcacgccccgagtcgggaggggcgaggggcggtgcagggtcccagcgtggggcctccccacctgcccaccagggagacctcgggtgcctggccgggtggggctcggggtcggtccagttggcgg

SEQ ID NO: 11579 - DNA, 38 bp, Homo sapiens
  chr17:80693416-80693454
  hyper
cggggtcacgcgccgcgcgctcccgccccgccccgccc

SEQ ID NO: 11580 - DNA, 31 bp, Homo sapiens
  chr17:80840580-80840611
  hyper
ctggggcaacagacagcgtgagacacaggag

SEQ ID NO: 11581 - DNA, 58 bp, Homo sapiens
  chr17:81036701-81036759
  hyper
gttgtcaaagctggggcgggggttgctactgatacccagagtgcgggggccagggtgc

SEQ ID NO: 11582 - DNA, 203 bp, Homo sapiens
  chr17:81039184-81039387
  hyper
tccccgaaccgaggcccggggcgttccgctccagcagaccgaagccagaaacgccgcccccgccacccaggccgagtgtgtcgagaaggggccggcgcccttttcagggtgtcaggggactgtgtgcccggtaggagggggcgcctcccggagcccgaagggagggcgcggtaggcagccgagggtggcggggaggccacccc

SEQ ID NO: 11583 - DNA, 815 bp, Homo sapiens
  chr18:500308-501123
  hyper
tcgaggtctccagccgcgcctgacccgggagccgggtgcgcccccagtgtccgcgcacgaacccggcgccctggcagccccgactccccgggcccgcagcccaagggaaggttcgcgcgggaggcacctccgtggcctcccgcgcgccccgaagcccgttccccccgcccagagccccgcggagctgccgccgccctacctttcatggtgaccgtggggacgcaccgccggccggggagctccgcgcgagcgccgcgcagccgaggaagtcgtcccgagcggctgctcaccgcacgcccatggtagccgcgccgcgcgccggccgtctgcgcccccgtcctccctcgccgccgccggcccgcgctccccgcgctcccggctccgcgctctgctgcctcggggctgccgcgcgcgccgctctcgctctcccagcgcccctccccctggcccgacccggccgagcgagcggccgcgcccacgcccctctcgcgccctcccgcgcccgccccgccctcggcccgcgcctgccctcgccgggcactttctcgcccgccctctcctgcgcgccctggccccactcgcgcgggctctctctttttcccgttgcaccagcgtcgggatgaagtcgggagcaaagcccttcccggggcggtccagcgttcaccttcggcgagcacctaaggtgccgctgctgctggggtcgcttctacaccccaaactacctagcaagtgttgggcgagaggatggggagctgctgtgccccgggggtggcggggggtaaggtgggcccttccccaaacggctctggggcatg

SEQ ID NO: 11584 - DNA, 67 bp, Homo sapiens
  chr18:712371-712438
  hyper
gcttaccatggcgtccgcgcttaccatggcgtccgcgcttaccatggcgtccgcgcttaccatggcg

SEQ ID NO: 11585 - DNA, 1441 bp, Homo sapiens
  chr18:811633-813074
  hyper
gaaaggctcatccactcgccccacacacccgctcctctccccgcacagctgctaccggcgtcggccgatacacagacccccagcctttaggacccaaaggggccgcttccctcgcccctacttcggccgtaggggcaaaaataaacctctcctccccgtcgccgggcggtccacacgaccccaaagacaaggggtggggagtgtccccacgcccctggaacctcaggtcggacttgggcgggacccggcaggtctggacagggcagagaccgagtcaggggcgagcaggtagcgcggggaacgagacaagcccgccgggcgatccgggggaggggagaagtttcttcccaacttcccgactcgggcccgcgggggcggggaaccgcggcggcggcggcggcggcggctccgggcgctggggcctagccctgtccgggcagaggtggaaccctccgcccgcggggccccaccgggtccttacctgtcctccggccgcgctctcatgagtcgctgctaccgcagctcgaggtggcggagggcggaggcgaggcccgcgggccctctccctcctccacctcctcgtcccggggcgcccggcggcagcaacgacggcagagccggcccgggacgcgttacttcaggaggagggagttcccgggctccccacgcctcggcctcactctccacctcctccgccccccccccccggccccgccccctgacttctagcgggggcgggggctgcgggtacctgcgcgcgccgccgtccgctcaccggaactcgggccacgccggcccggctccggggcccccagccttccggcgcctacgcccccgtcaggtcccctccgcgggctccgggccgctttgctgtggtcaggataggcgaccggtccgtgtcacttctcccgacccaacatggcggcggggtccggggcggattcccgggggcggtgcaggccgagggggcgtgaggaggaggtgcttccctgcccggagagcaggcccgcggcgtcccttcccacccgcgaacccaccgacgctcggctgccgcggagattgaatggagcgctccgattctgcccctctgcctttctctgttccttggcccagctctcagtagtggccagggctttggggcttgcttttgtgggggaggacggggttgagtttttttggttggctgtttgcttctcagcgctacgcttccgcaccctttgtcgttggtagtaaaatctcaagcccaaccgcgtgagccgggggcgttactcacaccctcatcaccatcctgatcgccgtccaaaaaacgttcacgtcttgcctccttccgaggcagggatcctgtccctgcccccaggagcttcctgttgactgtaggtcgaaccagccttgccgggaggggaaccgaagctgagttctgtttggcgactatcccagtcat

SEQ ID NO: 11586 - DNA, 335 bp, Homo sapiens
  chr18:904836-905171
  hyper
ccctcctggttctgcgcgtctacaaacttttgagcagaacacgagcctcggcaaacgagtcccgcagctcctcctgctgctcccgctggttcctgcggcttctgctcagacaccaacgccagacggcgatgcctctcgggtggtgactccagcgcaggaacttgaagaagcgctttgcccgccgtcctacctggcagctctcctggcagcgggaggagttgaagggtaagggagggaaaatcttaccaaagcgaccggctcactcgactgctgattctttcgcttggcatcgcgtcaggggagttagctttccttcagccgggtctggctagtta

SEQ ID NO: 11587 - DNA, 30 bp, Homo sapiens
  chr18:906209-906239
  hyper
agccctgcctggcccgggatggaggaacct

SEQ ID NO: 11588 - DNA, 30 bp, Homo sapiens
  chr18:906711-906741
  hyper
tagcgctggctgcacgccaagtctctccag

SEQ ID NO: 11589 - DNA, 30 bp, Homo sapiens
  chr18:907590-907620
  hyper
ctttggatcctcgccgagctggggaggaac

SEQ ID NO: 11590 - DNA, 30 bp, Homo sapiens
  chr18:908490-908520
  hyper
catccgccacgggtcgcagttggagatttt

SEQ ID NO: 11591 - DNA, 184 bp, Homo sapiens
  chr18:961751-961935
  hyper
cctggaggctagcatcggaactgtcaccggcataatttcgttgtttttaacttttcagttaaaaaacttttaacttttcagttaaaaaagaaagcaagcgttctttggctgtctctgtgccggatgcagagggcacaactgctctgtggcacagccctctgtgatcggccgcgtgagggtcctg

SEQ ID NO: 11592 - DNA, 30 bp, Homo sapiens
  chr18:1664281-1664311
  hyper
ctagctctgtagactcggcgccccctaggg

SEQ ID NO: 11593 - DNA, 30 bp, Homo sapiens
  chr18:1777065-1777095
  hyper
ccatggccttttgcaagtgtaccagattat

SEQ ID NO: 11594 - DNA, 51 bp, Homo sapiens
  chr18:2571377-2571428
  hyper
acctaactttaggggtcgtgccagtcttcgtagagacggccacactggccc

SEQ ID NO: 11595 - DNA, 1008 bp, Homo sapiens
  chr18:2846787-2847795
  hyper
gagtcattggaaatgctgtaacgtagacccttatcccaaaccctttcgcccctccaccccgagccccctgccgagaagcgaagggactggagacggggagacttggtggggggagagtcacgtttcggagagggaagtgaaataaagagggcggcacccggggggacctgtgcgtcattgagggaccggggagaagcgcagggcgcacggggctgcagaaggagaagtaggaacgagaagccggagggggcggccgcggagcactggttggagcgccgcgaagcgcccgagcctcttgccttcgcgggcggcgccctggccgccggcagccttgtggccggtgccccgatccgccgcgctccggacccgggcaggcggggcgcgcccgctgcgcgcgggatgtggcagcccagacggccctggccccgcgtgccctggcgctgggcgctggcgctgctggccctggttggcgcggggctgtgccacgccggcccgcagcccgggtatcccgcgcggcccagcgccaggaacaagtaagtgcgcgccccttggctggccccaaaccgcctacccctccccggcccccagttgagccccagagctgccctgccaaagacgacgagcggcagccgggggcctcccttggacttccccgggcggctccctctgcgggggaccgcgcgctccgcagccggcgcctcaggcagagctgactccgggggcgtgggcgcagagagcgtcccgcagacccgggcgatccgaaaacgactcccaggaattccatgagcccctgggaccatgggtgcttttctttcccgtcttggtcgggtccaggcgcgcgctctccagaggcgcacccgggcaccctccggcgtctgctcggtgaagctcccgcctccgcagagggcgacgggcccccccgaccctcgctcggtctggtgccgcagtcccctctcccctggcctcattgttctccgggtttaccccgtgcccctctccctctctctc

SEQ ID NO: 11596 - DNA, 742 bp, Homo sapiens
  chr18:2906054-2906796
  hyper
cggcggggatggcgtttcttggcgagcgggtccctcagccaggcccgggtattgtcaggcgtcccgtggacggtcgggaggggcttcctggagggctcgttccgggaacgagttcaaaggaggaaagggcggcagcttccggcgccttccccagagggccgggagacgcacgccaggagcttcctccgttggaagtcccttccgctggcgacgtgggcgctgtggccgcggccctcgtggagcctgagccctcctcacggcctccgcgcagccctggggccccccggcagggtccctcggcagcccgcgggagaggccgtggggccccggcaggagtgtggttcagagacggtgcgggggtcggtggcctcaggtccctttcagtcacttgcgacgcacccgcggtttccgcgtgctgtgaaatcgggaattgttgatgccggagccaagagtgaggccggtttggaaagtgcagccgtctgcgccggagaggctggaaacgccccggccccgggcaggggtccccggcggcgtccgggtggcccgcggcgtcctcggaagatgcgggcggacgcccgtgtgtcccgctggcctgacgtcgcaggggtggccgcagagtcctcacggggaccccgctcgccgggactcatggaggggaccctgacggggcagtcagggctgaggtttcctaatcccgtgtgtttctttctccccgacgcccggcagaggcgccctcgccccc

SEQ ID NO: 11597 - DNA, 153 bp, Homo sapiens
  chr18:2907033-2907186
  hyper
gaccgggagcggcaccgtccccggcgcagaaggcttcgcgggcgcaccaggtgaggcccggggctgcgcggggaggagcgcggggctctcccggaacttccgcctgagcctcggggtctgctgaggggcgtggcggttcggggtccagccttc

SEQ ID NO: 11598 - DNA, 165 bp, Homo sapiens
  chr18:3012398-3012563
  hyper
tggtgatccgctggcgttagaagtggacagagaggctctcagtacaaactgtatctgaacgtgttcctcacaaattaagatctgcaccgggggctggggggctttgagaaaactaaccacatttgaatccggtccacacagcttgaaggcggaggtacggggcaa

SEQ ID NO: 11599 - DNA, 45 bp, Homo sapiens
  chr18:3247279-3247324
  hyper
ctagcatcaagatccgctcccgggatacgcgcactgctccggggc

SEQ ID NO: 11600 - DNA, 36 bp, Homo sapiens
  chr18:3262088-3262124
  hyper
cttccggtgcgccttccggtgcgccttccgctccgc

SEQ ID NO: 11601 - DNA, 30 bp, Homo sapiens
  chr18:3262534-3262564
  hyper
gtgggccggccctgcgccacctgggtgacc

SEQ ID NO: 11602 - DNA, 632 bp, Homo sapiens
  chr18:3447897-3448529
  hyper
aaccctttccaattctcggttcccatctcggttgcctgagaatcgcagtcattagccaagtccacttggacgaaagcaaagctacctttgtgtacataatgagagccaccgcgtggccaaggagaaccacggggaagagggaaacatttttgtctcgagctggctaaagcgggcggggggggaggtagggttaaaccgaccgaaggcgtgttttgtggagtggcttcgaaagcggccgaggcagccgaagccgctttcgaagttagcaaacaaagcgtctccccagtaaccgcccggttccagacgaggctcctgccactcaggccgcggagtcgcagcgtcgcccagcccccggctcctcctccctgcgtctctcctccctccgctcccggctccccagcggataggagccaccaatcccagccacagacaacccttcaaacgaaatagcgaggcggccccctctaacgggcggcgggggcgctggccccctccctgcgccacatctgtcccgcaccgggcgcagcagctgattcatctgcagccaggtccgggaaggaactgtgctcccggcagttgcagggcagcgtccgggcgggtggcttgtccccaggaccgcgctccccccgagc

SEQ ID NO: 11603 - DNA, 1868 bp, Homo sapiens
  chr18:3449232-3451100
  hyper
tagcagggttccaatccgaagagtagacactgttgaccgaaacagacgagcaggcacggcgtggtcaccccttagctataaaagtggccgctgccggggttcggcgactcggggtgtcaggcggagtcttggtgaggcaggcgcgcgcccggccgtccccgggcagagacgtttaaagagcatgtgagcgtgacaagtgtctgtccgcaacgtgtcagatttcgaaactgccttgcaatccagtccggaactcgcagctttagcccgggggaacagacgttcgtttaggctgtgtctcatcattcccccccgccccacccccgccgacctcccactgtcgctgctggaggaagagccccgggaggagaagggtgcgccgcgccgcgcccgcgtgtcaatggcagccgcgcattctggaagaagttggttcttgtctcgaatacttttcctcccgtgccccgccccttgaatcagaggcggctgtctcgtgcggctagagcagggccagtagagttcggggcagctgtcaaaaacgagacggggaggcttttcttcccgggggtggaggagggaaggagggaggtgtccttttttccatctgttgcagtttccgaaccaaacgcaccctcgccagccccgggaagaaaggcccaagggagaaacctggggcgctcggctggtgcccccaccgccgggcgagggatgcgggcggtccgtgcgcggcaggcggaaaggatcgtgtttctggacccggccaccccccgcgtccgcaccgccgcccccgagggacgagtgacagcggccgccgcgctcggtccagtcttcccggctggaaggtgcgggggaggggcggaggagcggcggggcgggagggggacggggcgggcggctgggggcggaggcaggacctcctgtaccttccctcctcgcctctctcactctgacagcgccgaggtgcgccgagcaggagcagggaacaaaggagcggagaggggaggggagagagttgggcgagggagagcccccggccggctgccagaagatcccggcgggaggaagcccaagtgtcacttgaattccacccaaggagcgggcgcctgggatcagagcgtcctgtttagcaataacggctggagcacgtcctacaagttacgggagagtcggctgtgaaggagacgttcgcttatcccctgtgtccccgctcctggcccctccagacccccgccttgcctcgcgctgggaggggagatccagaatgaaaggcaagaaaggtaaggcggccgcgggctgcgcgcaccagaagacgcgagtccggggaaacgtgctggccgggccgcgccgcgcggagtcacttggtggacttttccgcccaggggctctcatgctggagtggcggccgtgctctttgttgaggctgcgtctgaaacggcagcggctgttttcctgctagacacaacacgaggggctgttgtggggcgagcctctccacgctgctggcacgttgtcaagaaacacgctcagcgccttgtttgtgcgcctgcaagtttcattgtctccgccgacaccccacgctcggcccagccgccgcgtggcttctcgctctttctcgcgtgctggggatatggggtccgagtagggaggacccagcccctcgtttttcccgatccggacccaggcggccggggccgcgggaccgccgcggctttgtctgaaagttccactcctaggctccccccgcccccgcccccgccgcccccctactcccagccgggccctagcactgttctttagggatgtggtgtttttacgatcgaaggaatgcgattctggaccccctcatcgccctcgggtgtaaacagctttggaaa

SEQ ID NO: 11604 - DNA, 393 bp, Homo sapiens
  chr18:3451508-3451901
  hyper
acagaagttaatcactcgggaagcggacgggaggggcggcgctactgcgcatgcccgggagccgcctggagtttggaactccacattctttcagacccggcccgctgcggggcgttcctggggggtagcctcaaggccagcggggttccttcggctgcgtttctgtgggaggccctgaaacgcgcggagcttccctctgcctccaggctttcccagcgagagtgaaattaaacttgaaactcggatcaactggcagtcgttgttggtagaacgccctaaggacccctccccgcgggacggagggaggactcgggacagggaattggccctgggagaaaacgcgcggggggcgtccgagacgccccgtgaaagccgtgccgacccttgggagga

SEQ ID NO: 11605 - DNA, 50 bp, Homo sapiens
  chr18:3452214-3452264
  hyper
gccccccctcctccaccggcgcgctgcccacagccgcgtgccctctcccc

SEQ ID NO: 11606 - DNA, 401 bp, Homo sapiens
  chr18:3498977-3499378
  hyper
aaggagatgggcaaacgggtacgggaagtggggggctgaggggggcccggggggcggctcctgcgaggtggacaactacaccgcgacagtggaagtcaccgagctcgggagcggacgggctcggagggggagaggcagccggcagaggagcggccgggggaggaggggacagatgcttggcggcggcggccgggctgcggggcgctcagagccgggtctgcgcctcggggatgtagatctcgatgctctcggcgctctcggtggccgagttctggcggacggacgcggcgcgcttggcggccatcaggcgcttgcgggcctcctggcgctgcgagctctccagcgagcgctcccggatcagcggcgcggggcccttcgccggcttctttggcactggagga

SEQ ID NO: 11607 - DNA, 1037 bp, Homo sapiens
  chr18:3879109-3880146
  hyper
acctgcaggtactggcaggagcgttcttgctgacacgactcggacttcaccatggcctggtccatgttcaccgaggccttctggtaaacctcccgggcccggctcacggtgagcgtggaggaccaggcgctcttcttcagcagcggggtgtccaggctgaccggcaggttggcgcaggtggagcacttgacgtcgttgttgctccgggaggccttcaccgcctgctcgctgatggtgttgtaggcctccaggaagtactgtgaggccgagcggtcggggcacctgcccatggtcatcacgcccgagggggcgtggtagatgcacatgtcaccatccaggttgtcgtccgagctccaccagcccggggaggtgctgggccgggccttgggctccgcgcgccgctccttgctcttgctgcgtttgccatagcgcgccgcctgcgcctcgtcagggctggccttgcccccgttgacgctgcccttggacggcccctccagggagtgcgacttggtgaagagcttctggaccgagtgcaccaggtggcggatgcggccggggctgtcgctgcggtgctccacggccgtgcgcttgtactgcagggtgtgatagccatcgcggctgagtggcagctgccgctcgaactggtccagcaggttggcggggatgcggttcgccttggtggccagggtgcggggcaccagggcacactcgtccttcagctcttgctgcgaggtgtagtgcctgcgggggaaggtgctgctggccagcgggtcgctgaaggggcccacgcactcagcctggaaggagttccgctgggtgtagtatgggtggtctgcggggtggtgctccactgggctcagcaggtagggcttgcggtcggagtggtgcgacagcgagtcacaggccgagtcgcaggtgaccccgtggtgatggctgcggctgcctgatagccctttcatggcggaccggaagcagccgccagggtcatggacacccggaagtcaggctccagacccgtcttgggcagggatctgggg

SEQ ID NO: 11608 - DNA, 432 bp, Homo sapiens
  chr18:4453834-4454266
  hyper
ggagtaaggagtgaagagtctcgcctggatccacaaaagacgtgacatctcccacccagcgtcccactgcttgccgcctggctacctttaaccccttgccctccgcacatcctccccttctctagcagaaaattccgcagcgctacggtcgggctggaggcaagccctgcagccgggggcgagcgcggcactcggacacaggcactcagtgtctccggcgccggcagccgagccacgggccaccccttcccacggcctcccggtgccacccagcgaggccgggacagcgcgccttccgcaaaaagcgcagcagccgaagtcctgaaagcagggtcttcatcgccgcgggccctccgaaggtgcctctcccagctgcagccgcccctcaatgaaagtgcaatgtgttatctcgcccagcccagaggagaggtc

SEQ ID NO: 11609 - DNA, 169 bp, Homo sapiens
  chr18:5197405-5197574
  hyper
aaaggtaaacttcccggcaggggacagtgaattgcttttaattacctgctgtggctcgtcgccgtggatattggactgacatttaagatagatttgtcaaaaaaaaaaaactctaagagctttctttactctcgaggatgactctgagttctccgagttgggctggctc

SEQ ID NO: 11610 - DNA, 1486 bp, Homo sapiens
  chr18:5237297-5238783
  hyper
gcctttcccgcctaccgagcctgcccaccacccgaagtttaagctcatcttggaggacctgacactcaggaagccgtctcccgttgttccaccggctttgtggccccaatgtctgtataagctgctgatttgccttgggaaaacaaaccagcatcgatttcagagaaattactggataatttgcgctgtgaggcgcctagatcgcaaggcgcactccgcaaatgacagccgctcccgtgcacttgtccagtcattcgggtggcatactgtccgggtggaagcccgccaaaataatccatttggaagggacggagggcttcgtcagaaattgccttcttgtagctatgagacattgagcaaaacagataagaactggggcaatggaggcataaacattaaggctaggatgtatttttggggagaaagcggcggctagcagggacgaagctcaacttcatgcgccgcgccccggaatgctttgcctttagccactagcggagccgcccgcctgagggagccctccgggagtgagcgcacgcaaccgtgcagtcagattcctccgccgaccgcggccctctctcctcgggctttgccttcgctctctagcttttcttctttcactcccgctcgccgactccagcccgctgggctcacgctctgccggacaccaatcccggcggccctgcccgacggagctcaaggctaggcctggccttgtccgcggagtccgcccctcgccgccaccgggatccgcccccgcgccgacacgcacttccggcagcgccgcggccgggagggaccgagcggggagcaaggcctgcggggaggcgcaggatggacgcgttggctgtcatgatgtaggacctcctgacctagaaccatgcccggcgcagggagaacaacgagcttacggaccgggtgcgggggctgctgtgcgagaaagcctacctgctggcccgggagcgttcgccggcccacctggtggctttccctggacgtttaacggcgactccgcccggcctcccgactttttgatgcaggcgttctcttacatgactttcttcgaggctagattctcgaaagacatcctgaaggtggctttcttaattagctgcctcaccggctggcggagcagttcgtagtcgcctacatcgagagggagagccccgtcctggctcagtactggggcttcgtggacgcgctgtagcgggtcttcgccgtcgtgggtaggaaacagtcgggccggatccccggtgtctggggagcggctgccggccgggcccgcgcgagccgcttcactcctacaagcccggctcactagttccaagctgctggactttgaccctcgctgggaagcttgatcgccgcctgttctcgccaatctctatgcctttgcactgcccagcaacccggtcactgcccaggacctgttaaaagttgaatggacctcccagaatcacgccgctgccaccgccgtttctagaga

SEQ ID NO: 11611 - DNA, 30 bp, Homo sapiens
  chr18:5295790-5295820
  hyper
cgcaccctggcccgcgcttacctgcagcct

SEQ ID NO: 11612 - DNA, 321 bp, Homo sapiens
  chr18:5542836-5543157
  hyper
catgaacttggcgggcgtgggggggaaggggaagaagtccggcgagattagaggggaaatccgaaaaagcaagcccctgcggcagcagccaggaaacactcgccaggaactggctgcgaccccaactccagcggtccgaagccctagcctccccacccccaccgcggcagagccgccttcgcagacacctcccgaggagaatcgcggccccgagggcgccaggtgagtcgcgccgccccgagcccccgggccacggcaggccgacccaggcgcccccggcccgcccgtgctcccgcgcccgggtgccagaggcgaggggcc

SEQ ID NO: 11613 - DNA, 116 bp, Homo sapiens
  chr18:5543430-5543546
  hyper
gcagtgtcgccccctgtcccccgcacctccccgggggaggggccggcccgcgctcgcccccagcccgaggggcaacttaaaacatggcgccccgggcgggggatttgtgcaaattg

SEQ ID NO: 11614 - DNA, 362 bp, Homo sapiens
  chr18:5543899-5544261
  hyper
cggaaaagttacctgggatcagcagggagcccgggcgcgccgcggcgtggggactaggctcgggcgcgcgtcctcggcggcggtgcgcaggagactcgggcgtggggaggaagccgcagcccagggctgctcgccgctgttccccccgccccctgttgcaggagacaccgaggctccgcggagctgcggcgggggcccacgcccagagaccgtgcgaggaaagccaacctcgtcctgcctgccctcccagccgcgggggagggggccaccgcagtacttcaggacagttacatgggcacagcctcctccgtcctggcgcagggtcaggctccgcggacgacgcctggagacagctgccaatg

SEQ ID NO: 11615 - DNA, 1213 bp, Homo sapiens
  chr18:5628270-5629483
  hyper
tttgggatttaccatcgtttctactttcattcatttagtggcttccagccctctcgcggcccagtcttaatccatcgcacttcagagggaattacgagggagttgcggactggcgggggcgggggtctgtaactaacaccaggtgcctgtgagagagccccaagggcgggggcagcacctcctggctgggttgggtccgcctggcctcgcctcgcctccgggatccttggcgctcagcgccgccctcccgctactgcgctacccgccagagcccggcgtcttccctttccttgtcttgtggacgccgcccttcgctcccgggaggatttcgcctccagcacctcaggcttttctggcgcaaaggtcgccagcccgagcgagcccaggcggcggcttcacttctgcagagggaaagcgaaagacgcggccggcgggccgagggggcggccgaacgcgccgcgtggttgctgctcccgaatccgcagcggcggcgccagggcggtcaccgagccctgcggaccccggctcaacttccagcgccactcgggtgccccgagcccgccgcagctcccggcgcgccctccagccgcggcacgcagcccctgacgcgcccggggcgccctcccgcagcaccagccaggccaccccacctcccgcgccgcgcttccccgccagccgccggccaggagctccccggcttctgagcaggacgcgccaaagggagttgggaggctcagcagcccccagcgtcgccttctcgggtgacgtgacgctctctctggagcgcgggcccgcctccgccaagcctccaccgcaggtccttacagccgagccacgggaagatgcaacgccgggcgaggggcgcctcccggattttgaaaaacagcctcattcgcctcgggaacgcctcgatcccccacccgcaccctttggccagatgattttaatcctgggattccgcgttggtcgtgggggtaccgggagctggagctggaggagaggagccggcagcgcggagttgccggggtgcagctgcgcgcagctggcggcgaggggaggcggtccctgcggctccgccgggctgggggaactggctcctgcgcctctgcctcccggaggatcgcactcgctcatccttacacaccacacacacacacacacacacacacacacacacactgccgctagcgccccccacgccacaagccggaat

SEQ ID NO: 11616 - DNA, 256 bp, Homo sapiens
  chr18:5629569-5629825
  hyper
cgaggttcgcaccttcccggaaggcccccccctcccccgcgtttccccagggcgagcaaggtctagcttctgagactccgctctctgggctagcggttcgagctgcaggggggcggggacggattcggagggagcactagagagagagcccgcgctcactcctgccctcctcgcaaagaactggccagccccactcgcgtccagcccacaactaggctgccgggaccggggagccagaccccaggtcgctccaact

SEQ ID NO: 11617 - DNA, 530 bp, Homo sapiens
  chr18:5630124-5630654
  hyper
cgcaagccctctgtccccctcaaagcacctctctgctcgtccctagtctccaggtgcccgtctgagagtccctgtcgcctccgggcggacccggccaggcagcccccggtcgggccagcctcgccccttcctcgctttctcccccatcgacctcgagccaagggcaggcggcccgcacccgcgcccctgcccacggggctaggcggcgctcccggcctacgcccggctgccaagaagagaaaggcgctcacctgagtcaccgaagccttcctttggggcccctcccggagcttgttcgcagcccgcaggcacaaccttccttggagaaaaaaagtagcgcaagggcagagagaggtagggctgctcacaggtccctccgcaggggctctttccttcgaattctccggggtccagtctcgggctcggcggcgggaaagagctcctggaggctggaaggggccgccagacccgggctcctcccgcagctgcggtggcggcacctccaagttgccacctgcagcgcgcttcgg

SEQ ID NO: 11618 - DNA, 112 bp, Homo sapiens
  chr18:5630693-5630805
  hyper
cgccctccccgtccgctcgttggctgcgcccggtgcccgggcggtccccgcgctctgccccgccctgagcccgcctcccagccgcgcgctcgcaaagtatgggtctccttac

SEQ ID NO: 11619 - DNA, 30 bp, Homo sapiens
  chr18:5894650-5894680
  hyper
ccacaggctgggagcgctgtgctgtgcccg

SEQ ID NO: 11620 - DNA, 223 bp, Homo sapiens
  chr18:5895017-5895240
  hyper
cgctcacttacccagggagaccgagggaggtcggggccggcgaacgggcgctcgggcgacacaaaggaaccatggagaaactttttcagcccgagccgacggcggagcgcagggacagcgccccggggccccgcatccgagcgcgactcagcagccccgcgggggcgagcgcccgccccaggctcgcagtccccgccggcgctgtggcgggagccatttccaa

SEQ ID NO: 11621 - DNA, 30 bp, Homo sapiens
  chr18:5895498-5895528
  hyper
acacagggaaattgcggcagggtggcggtc

SEQ ID NO: 11622 - DNA, 31 bp, Homo sapiens
  chr18:6414307-6414338
  hyper
gggacacgcgggcagacgggggcgttagccc

SEQ ID NO: 11623 - DNA, 30 bp, Homo sapiens
  chr18:6414963-6414993
  hyper
ctgcccgccccgcgcgcatgctcccgccgc

SEQ ID NO: 11624 - DNA, 849 bp, Homo sapiens
  chr18:6729208-6730057
  hyper
aaaaacaaactttactagagccgctagcaggagccccaaaggatcccggccggtttccagtttcctagaagcggggatcacacctccccgcgcactcccgacacatgcgcgcgcacgcacacacaggcgcacacacacagacacacaggcgcgcgcacacaggcacacacatggacacacgggcgcgcacacacaggcacaaacacaggcgcacacataggcgcacacacacacaggcgtgcacacgtacacaggcacacaaacaggcacacacaggtacacacgcacacacagacaggcacagacgcacgcacacacacaggcacacaaacaggcactcacacaggagcgcgcgcgcgcgcgcgcacacacacacacacacacgcactatgcccgcccccactccagcccgtgggcgtggttcccagcgtctgcgaattcgcgcgcccggggcggggcgggcctgcccgggggcccctgacagccgcgggagagagcggctggtcgcacctcgggccgcgccgcccagctgctgacagcctcccggcgcgccggtccatgctggtcccggtctttgttctggggccggcgccgagacatgcgcggctgacgatggaggtggaggactcgggcggcgtggtgctgaccgcctaccactcgtacgcgcgcgcccagccccccaacgccgagtcgcgctgcgcgccccgcgccgcagccagccacccgctcagcaggtacccggagccgctcccaccagggcggcgcagtcgcgctgggcttggggggttcgccgtgcagctgcgccttgtgcctgagcgcacgaccgccgtcactggatgttgtttcaag

SEQ ID NO: 11625 - DNA, 30 bp, Homo sapiens
  chr18:7116685-7116715
  hyper
ctgcctagccaacacgaagccacgctgcga

SEQ ID NO: 11626 - DNA, 13 bp, Homo sapiens
  chr18:7117306-7117319
  hyper
cgccccgctccgg

SEQ ID NO: 11627 - DNA, 1711 bp, Homo sapiens
  chr18:7567006-7568717
  hyper
acaaacttctggcggcggcgcagcctcttccacagtcaccctccccagagccagctaccaaaatagaagacgcggccggggcgaggaggtgggcggggggagcccggtggccgctcctccccgcgcggctgacgcccgcttcggcggcggtagtggctgtggccgcggggccgcccccagccgagctcccggaggcgctcgggcgcgggccggcggggcacgggcgctcacgccctctagcgggccgcggcggcgccgggcggccgtgacgtgagcgctcccttcagccggcctgcggggcaccgccagtcagtcggggagcaagagccccgcgcgcagccggcgcgggctcggtcatcggcgcgccgccgcccggggctgggcttggggctgcctgtggagaggcggcgggcggaacgcgcgcggccacggccacggccaccgccacggccacggccggcagctcgggtcccgggtcccgggcaggggaaggggagaggcggcgagctcagcaaccggaaccgagggaagattttggctccgcgggctcgccctccgctccctctgccagcggcgccagacgccgagtggggccagggacaggggaggaggacccaggaccctgtgcccgcgcccctggagccgctggagttcggacttctgcaactgttggcactttgggggcttggcttagcgctctgctgtttacccgtctctcctcgctgcctcggaaccaaagctcccggccccctccgccctcgcgcgcccacccaccgccgccggggagcggcccggcccgcactcagcaccatgaggggacttgggacttgcctggcgactttggccggacttttgctaactgcggcgggcgagacgttctcaggtaagcgggaccgcctctgccgcccccgaggcgcgcgggccggcgcgggacgcccgggacgccgacagctccctggtggtagagccctaaggctggcgtcggggccgggcggggggcgcggcgggccggacaccgcttctgcctgtgagccgggcgctgggcgaggggccgtggggctggcaggcacccagtcctcgggcgggcggagcggacggaccccgagggcgagctccccagccgggactgccagctcggccgccgtccttccgcggcctgggctagtgctcaaggttgggcggcttgcactcttgagtccctggccggctgcaaaaggaacagcagaaaactttgcttgaagttcccagttgcagccgccgggccgcctggcgtaggcgctgcgcggtccccgccgaccccgagcagcggccgggcccaggccgctggtgttcggctgcgcccgcagcgatcgccgggaactggcggccgctccggcggcggcgatctcccggtgccctgccctccctgtcgccccctgcccggcgcggctggcgaccccgggaggtccccgcggtcgtgcagcgtctgcggagaggctggggggagttcctcgccggtcccagcggtagggcttggcggccgcggagggaagcgggcaggtccccaggccctggccacggccctgcgccccgctgggctccccctccccaccctcgtccccctagcggagcgccgcggccagctgcaacttgttcatccagcccggctgcccgggggtcccaggtgggaaggagaggcactggcggtgtgcgagcaagcgtgtgagtgtgt

SEQ ID NO: 11628 - DNA, 52 bp, Homo sapiens
  chr18:7568792-7568844
  hyper
cggagtcgggggtccggcgtgggggcgaacccggcacgctgtcacaggggtt

SEQ ID NO: 11629 - DNA, 31 bp, Homo sapiens
  chr18:8706048-8706079
  hyper
agggcggcgcgcgtggcgcccgcggagccgc

SEQ ID NO: 11630 - DNA, 44 bp, Homo sapiens
  chr18:8748271-8748315
  hyper
caacactaaatatattcgtatattagtaggtgccaaggcaggag

SEQ ID NO: 11631 - DNA, 34 bp, Homo sapiens
  chr18:9474912-9474946
  hyper
tatccctacaggcccacggcgctctttcctccaa

SEQ ID NO: 11632 - DNA, 30 bp, Homo sapiens
  chr18:9475346-9475376
  hyper
tcgggctggctggacgccggggccttggga

SEQ ID NO: 11633 - DNA, 423 bp, Homo sapiens
  chr18:9708947-9709370
  hyper
caattgatttactcacgtaaaacagaaaaataaaaccaaaagcgaacccagccaagggggtgaaagccgagggcgcggccggggtggaaggtgaggcagtgacctgtgcggagcgcgccctgcaaacttccctgctgcgggtgaaagaagctgcctgggaaagtcctccccaccatcactcccctaaagtggggttttctccgcccgaagaagccttaaagcagccagaaacaaaaaagcagtcaatccgtgcggcccggggactgcagacaggggacccggcgaggacgcagggagccgctggcgaaccgcccctgggaattcagataaacgtagggtcgcttcctttcgggggcccactccgcattccagaattccttcttctaaaagaagagccggttctaagggcgttttcagcagcca

SEQ ID NO: 11634 - DNA, 30 bp, Homo sapiens
  chr18:9913710-9913740
  hyper
ggaagagtgtgatgcgctgccagagcagtt

SEQ ID NO: 11635 - DNA, 30 bp, Homo sapiens
  chr18:10455168-10455198
  hyper
agccccgcgcctgccgtctcagccctggga

SEQ ID NO: 11636 - DNA, 30 bp, Homo sapiens
  chr18:10455448-10455478
  hyper
tgatgtgttccaagcgtttaggagagtgga

SEQ ID NO: 11637 - DNA, 130 bp, Homo sapiens
  chr18:10647663-10647793
  hyper
cacagggaggcccccacggcaaagcaccagcccgcatactccctccccaaactgtagcttcccttgggcccacagcaactccccacgtcgcttggctggagcatgtctgtggggacgggttttgctttcc

SEQ ID NO: 11638 - DNA, 80 bp, Homo sapiens
  chr18:11148544-11148624
  hyper
gcagcagcctgaagatgagcccgcacaccacttctgaggccatcgcgtcggtccggcgagtcggagcagaggggcgaggc

SEQ ID NO: 11639 - DNA, 352 bp, Homo sapiens
  chr18:11148741-11149093
  hyper
cgagggcacgctcccggggctcttggccgcccctcgcccaccgggctctgggtagcccctcaccaggctcttggcggccacctagcccggcgcccggccccctgcggccggcccatttagtgtgaatcctggatccggcagcggcggcggcttcttcaggggtagctgatgccggggccttggagagggacgctttgggagggtcctgggaggcggcgcggcgagcaaagggggcaagaagggcgtgctgtgctcccgcctggctcccggggcgtcgtttgggggcggccggggagttttctacttggaagcccctctgaagccaccgcgtctcctttgcccggcctcgtct

SEQ ID NO: 11640 - DNA, 158 bp, Homo sapiens
  chr18:11149115-11149273
  hyper
cgctctggcctcggccccggctctcggagctgcccggcgggctccgggtctcgccctccagcccccaggcggcccgcggcggatccccgagaggcagcgcagctcagcccctgcgccccccagcttcgggccggagagaccggggtgggagctgccag

SEQ ID NO: 11641 - DNA, 461 bp, Homo sapiens
  chr18:11149298-11149759
  hyper
cggggctcgccttgtgggtccggtgcgcgggcggcgctgcgagtccctccctcactcgaaggaacggcgcgagcgtggggagaaatggagaccagagcgcatatcgggtgagtgggtctcccactccctcctccaccgcctcaatttaaaactcaagagaaaaaccagcgccgtcccgtcgcccagcgcgaccaccgcctgccgccttgcagcctcgccctcgcggcgcagccggggctccccggcggcgcgcgcttctccaccttcaatgaaactttcgaagccctcactcggggacgggcgtgtcccccggccaatgggatggcggctccggggcctgcgcgcgcggagcccgcccctgagcggctggggaagtgagagccttgcaccggcgcggagggcaagcccccacccgcggctcccgcgcctgggagagacccggcctggcctgccagtgggct

SEQ ID NO: 11642 - DNA, 220 bp, Homo sapiens
  chr18:11149779-11149999
  hyper
cgcgggcactcctgccccactggctcccgcagccccgcggctctgcgtggttctgtcattccggtggtgcaccctggcatccagtccacccggccgggccctgagcttgcccaaacccagggaaccgtttaaggtccgagggaaacgcacaggcccggcaggagagaagccaggggcttggagagtcctgtgcgaccccgacttctgctgggtccacagg

SEQ ID NO: 11643 - DNA, 30 bp, Homo sapiens
  chr18:11752523-11752553
  hyper
agttgcagaaagagcgcctggcttacaagg

SEQ ID NO: 11644 - DNA, 591 bp, Homo sapiens
  chr18:11947251-11947842
  hyper
aggaaccacaaaccgcgtagactcaggccagccgctgggcctgggcctgtgtgtccctcaggcggcgacctttggcccacttcaggccggccgtatttaccagcttagaggcgccgcggcgttggcgagtcctttttcacccaccccttccctccgttctcaggcttgaacttgaacaggcactcatgactcagcaaacggtacttgatagggttctttacacgtcagtcaggctattttttaaaatcactcttcctggagatcttcaaaccagaagcaccgcgggccctccccaacgggcttctgcttacctccactacgtgatgcagtatggcccccgggaggccgcccccagattctagaggggcttaccccagacacacccgaaggaccacctcgtgacctcagaggaacagccctagacccaggagagactgccagacacccccgtggcagcccgccagggcccagctctacttgtcgcctggaggtgctgcctcccttccacgccgccccagggaatggccgcccctctggggctcctcccaatcccccttcccaggactgacaatggcccggcgccctgctttg

SEQ ID NO: 11645 - DNA, 30 bp, Homo sapiens
  chr18:12038703-12038733
  hyper
ctgaggggctggggcgcccgtctgccctga

SEQ ID NO: 11646 - DNA, 30 bp, Homo sapiens
  chr18:12253844-12253874
  hyper
agggctgcaggtcccggtgtctgcggcagc

SEQ ID NO: 11647 - DNA, 117 bp, Homo sapiens
  chr18:12254350-12254467
  hyper
cagacctccaggcccgctaggggatccgcgccatggaggccgcccgggactatgcaggagccctcatcaggcgagtgccccgcgtccccctgattgccgtgcgcttccaatcgcctt

SEQ ID NO: 11648 - DNA, 265 bp, Homo sapiens
  chr18:12307602-12307867
  hyper
cgcgaggagtaggctgcatagacccggcgcaggaggtgttcattttcggatccagccctgtagtcactttagctaaacccggttccaaaggggtgggagtcgtcggagaggaatggcctctgtatctccggagacggaaacaccaggacgaagaggccctaagaacgtgtgcccggggtgcgaccggggggtggggggcagggggcagagaccctgaaaagctccaccgccgaaccccagggcagtgtcccggcttggctggact

SEQ ID NO: 11649 - DNA, 745 bp, Homo sapiens
  chr18:12308311-12309056
  hyper
ccaggcgggccagtgcgggaaccagatcggcaccaaggtgggcctggcgcggtgcagggcctctccgcgggtcggctgctggcgggccccgggtctcccggcgcgacccccgccggggcgcgcacccgctgtgcgcccctgggtcctcggagcccggtgcggacccgcgagggccgcagggagggagcgcccggggcgtggccggccggggaccttctactcttcgctccccacccccatcccaactgggagcggctgccggcggctcaggcgcgcctggaattcggccgccggggcgcctggggtgggcgcgggtggcggcgtcccgggctctgggttctgagcgtctgtccccccgccttgccctgcccaagttttgggaagtgatcagcgatgagcacggcatcgacccggccggaggctacgtgggagactcggcgctgcagctggagagaatcaacgtctactacaatgagtcatcgtgtgagtagcaaggccgccgcgccctgcccggccgggacccgcgtggacgctccggcgccgcctcttagcgcggcgagtttgcttcgggaaaagttctctcggggtgtagcaggatgcccggccactcccttcgctcctccggggcgggaaatccgccgtcagtttattcaaacagctcgattcagcctatcctgagggtctgagcgcttgaacgggaccacccgttagcgttgtgaaatcaacgtagcggttcctgcccagc

SEQ ID NO: 11650 - DNA, 31 bp, Homo sapiens
  chr18:12376269-12376300
  hyper
agtgagagcgactattcgacacgtgaacctt

SEQ ID NO: 11651 - DNA, 615 bp, Homo sapiens
  chr18:12407707-12408322
  hyper
agtaaggacgagcgtcgcctcctacgcccgcggcatctgcagcaagcgcgcatcgcgcaccccagggtagcagcgcaggtctggggctgcgccacagccgcgcccgcagagctatttttagccgctgcagccagcctagccaccagacggggtgggcggcatccaagggcgccccgcccatcgaggccccgcccacgccgcgcccggagccgcgcggcccgaagcacccggcccggatcgcagagcccgcgccctgcgccggcggcaatgaagatctggagctcggagcacgtgtttgggtgaggccgggctgagggccgcggtggggccgtccagacgccggctcctgctcccgagcccggctggagcggtccaggaaaggccggacctcacagcgggcctcgcggagatccccgccccgcgccggccgttcccagaccgcaacttcggcgtcccggagagggcacgcgcgcttccccgggaccgcggtctgggcgaggctctgcgccgggtacggcctctcccccggcgtgcgcaggggcctggctgcaggcacagaggccccgctggtggtcgacagccagggcgggggcagccggagcgggggcggccggg

SEQ ID NO: 11652 - DNA, 42 bp, Homo sapiens
  chr18:12408339-12408381
  hyper
cgggggggcggccgggggcctggcgctcgctgctctccttgg

SEQ ID NO: 11653 - DNA, 30 bp, Homo sapiens
  chr18:12656809-12656839
  hyper
ttctctttgtatcccgacatcctgtcaact

SEQ ID NO: 11654 - DNA, 55 bp, Homo sapiens
  chr18:12657374-12657429
  hyper
ctcccctgcgggtccccgccggatcctcccgggggtctcccgtggcaaaatgggg

SEQ ID NO: 11655 - DNA, 34 bp, Homo sapiens
  chr18:12658129-12658163
  hyper
gcctcgcgccgtccagcgccgcccagcgcccgcc

SEQ ID NO: 11656 - DNA, 31 bp, Homo sapiens
  chr18:12859860-12859891
  hyper
tcagcaacaagcctggcgcagtggctaacgc

SEQ ID NO: 11657 - DNA, 30 bp, Homo sapiens
  chr18:12883588-12883618
  hyper
accgctcccggggacgccagctgcccaccc

SEQ ID NO: 11658 - DNA, 31 bp, Homo sapiens
  chr18:12991134-12991165
  hyper
ctccggactcgcagggcgcgcggcttcctcg

SEQ ID NO: 11659 - DNA, 31 bp, Homo sapiens
  chr18:13217472-13217503
  hyper
ggcgcagcctgtgagccggggacccctgagc

SEQ ID NO: 11660 - DNA, 51 bp, Homo sapiens
  chr18:13217884-13217935
  hyper
gaaagtggaagcagggcggggagcgcgggggaggcccgggggtgaggtcct

SEQ ID NO: 11661 - DNA, 30 bp, Homo sapiens
  chr18:13218869-13218899
  hyper
cacccagcccggcccggcacttgcctttgt

SEQ ID NO: 11662 - DNA, 19 bp, Homo sapiens
  chr18:13312124-13312143
  hyper
tgcccggccaaatctgaaa

SEQ ID NO: 11663 - DNA, 30 bp, Homo sapiens
  chr18:14726130-14726160
  hyper
ttcaaggacagctgattagtaacattaatt

SEQ ID NO: 11664 - DNA, 28 bp, Homo sapiens
  chr18:15198163-15198191
  hyper
aagcagcggtggcgctgacaaaaagccg

SEQ ID NO: 11665 - DNA, 30 bp, Homo sapiens
  chr18:18691690-18691720
  hyper
cctggggggtggggcgaggggggctgagag

SEQ ID NO: 11666 - DNA, 30 bp, Homo sapiens
  chr18:18821369-18821399
  hyper
ctaaatctctctaccgggccgcagcatctc

SEQ ID NO: 11667 - DNA, 1623 bp, Homo sapiens
  chr18:18821651-18823274
  hyper
cccaggccgagttcacgcttggggctcttcagccgccgtccagtgaacagagaaagcaattgcgcagaggcgagagcaggctgaatgaacgcgggctccaggggaaataatttttcctcctggcttcgcgcgtcagcacactggggtgcagccctccctcacagaagaccccccccccgcacgaccccctgtacacccccgcggggctgcgcgttcgtctgtgcggcggggtttgggaatggaggcgtgaggaccgcgcatcgagggctccacaggctgggcggggggcgtcgttggaggggggtaggggagaaatgcgcgcccaccaccctcacagagggcgagggacccccaaaagccactcgcggacgccgaggcagcgggaaggcgcgaggcggggcggggggagggggcgcgggggtccccgctgcggaggccagggcgggcgggaggggcagcacctgaggaatccgcctccggctgcggcggccgccgcctcgctccgccccggggaactgagcgcgcggaccgcgcgcctgccagagagacgccagccgccggcggcgctagcacctcggagtcgggcggccggagcagcggagcgcagcgcggcgcagggaacggcactgggggtggggagaccagcccggccgagccgagggccaccccctggtcctctgccctcgcgccccgctagggccaggtgagcggccgcggggactccggggcgcgggcaggaggtgagaggtcgcgaaccgggcgcgggagctcgcctgtgaccggcaggagctgccctttggcgggctggacgccctggccgcgcggggaagcgccgcagcggacttttccggagggatgggaagctcagcgggggtgtgagcggagcgcgtgcgggtggcgagggagcgccagtgccaacctgggagccgtgcctgccttccctgccgcctcgcgtcgcccaccgaagggacccggccgtgctgtccgcgcccagaggccgaaggcctgtcaccgggctctactcgctgcctttgtggcgggagcgagacggcccgggggtgggacgagggagctgcggcgcgccgagtagcgcggggtcccccggcggaggcggcgagggggcacctggttcgtctccccgagcccaggggcagtgagggggtgccgggcaggcgggcgggcgacaggtagggcgccgcggaggtggcggggagaggatggatggagttcagcctgggaaagttgagaacgtccagaggtggctgggcgctcgctcggcgtctgtgggtttttttcctcaacaccaaatgtcacttcgtcacgagcgggcgcgcgtgtcttccggccagcatgtccatttttctgtgcatggctgaggaccactcttattccgaatgagacacaaagagttgtgttgacagctgaccctgacacaagcagacagcgagtgaggtgcgccctggccggggagggtgagggagactcgttaaaggaaatccattcccgccgtccctcttcccagctccattaagaggaaactccatgtggagattcagtgcgtggggtttctcagttacatgagtccaaggaacgtccccgaacgcgactcgtttgcccggaact

SEQ ID NO: 11668 - DNA, 30 bp, Homo sapiens
  chr18:19284433-19284463
  hyper
agcccgcggccctgcgccacccccggctca

SEQ ID NO: 11669 - DNA, 30 bp, Homo sapiens
  chr18:19284816-19284846
  hyper
cgcccgctccgccccggcttcctggagccg

SEQ ID NO: 11670 - DNA, 2369 bp, Homo sapiens
  chr18:19748746-19751115
  hyper
ccgtacatgacgacccgagttaaagttcccaaaggtcagctggggaatgttgtcttgaggttcccgaaaccaccacgacctgagccgtagcatcccgagatagggtcggagaaagtttaaggtcggtctcacacaacttcagggcaaaaagcgcatttgctgtgaaggggctaggcgggggttggggggcgggggggcgcagagcacgttcccccttccttctgggggcgtgctgacccaaggtctggagcgcccctcccgccgcggcggcggcgcgggactgtgcactgccaactcctcccgtgccaaggctccctccccctccctcgtgtgggtgtgtgtgtgcgactgcgggagcgggagggtgcaccgccgctggatgggtgcgggtcgctagccaggtcaggcgttctgtggcctccgcccctcccccggggtccctgggctcggtgccccccgggtggactcgcccccactccggggacagggcttgcggctcagcccacgcccgcaggcagcgcggctctcattgtctgcctgggcggcgcgctcccctcccccctcgccgtcccctccccaccctcttttctctcctcccctcgatccctcctcctcctcttcacctccagcgcccagctgctcgctgagcgcagttccgacccacagcctggcacccttcggcgagcgctgtttgtttagggctcggtgagtccaatcaggagcccaggctgcagttttccggcagagcagtaagaggcgcctcctctctcctttttattcaccagcagcgcggcgcagaccccggactcgcgctcgcccgctggcgccctcggcttctctccgcgcctgggagcaccctccgccgcggccgttctccatgcgcagcgcccgcccgaggttcggctgcttcctcctcgcgcgatctccccgctttcctcccctccacccctactcgtcgcgggcccctggcctccggctctccggccctctccaggccgcggtcggctccgacggtgtttccctccttccctccgggcgggctgaggcggctcccaggctcccgggacaccgcggaccaacttctagtctctttttctctcctcgaagcgcttatctgcgcgcagccttatctccgagttatctcggcgcaaaggggcgggagccggtagttaggcaggcagagaaacttctttcttgctatctagccaggtctgtgtgtgggcattaattttagtgtggtaatctccgatgagccgaggcgatttggaagagcagcctggaggaggccagcccggctgcatttcacctccctcccccactcgctccgagtctccctgtcattcttcctgctctcccatttggggtcgcctcggctctggggcggtctcacgctcccccctccccagcccgttgcgttccccctccttttctctgctctccgctccaccccgctacgtccgattccggaacggtccggcgtttctgctgctggagatgaccgcggggtgggccgggtggcccggccggcgtgagcgcgcacgctggtggctgcaggcgcgggccgtgtctaaggtgtgcggcgccgcggggacgccggtggggctggcgattcccgccccacaagctctccgcattgcctctgctgggaaggacccagactgctgcccccgccctggcgtcccactttccctgggccgagttgcatttctctctggggctcgcgttcgggctggtcagcgcagtccgggaagctctgggagagccaatataggagaacgcggcggtttcgttttcggggacaggttgccttccttacgcgaagggttttcccgtggggaaccctcaccccgaggcatttcgggagaggggcatccgcagagaggcgggatgcggcggtgccgacacgcacagctacttaaattcttttgtgtgtcatcagcccgggggagacactttagggcggaaggaaagcctcagccagcttctgcagatcacccctgggatctggcgcgcgcacggagaaaggatgcggccgagggggtgggcggggaggacgcggggaccggagcggtgcctttgagggagggctggtatcccagcccttccagggccctgtggcggctgcgcaggctcccttcccctcccttattgatctccacgcccggggcagaaataggatctttgagaagtctcaaatgggatctttgagaagtcagatcccatttgaactagaaaaaggagtggaggcgaggtagcgtgcagcctacgctcttgttaacccgtcgatctcctaccatacccgtctcccccaccccacctcaggagctagacgtcagcttggagcggcgccggaccgtggatggccttga

SEQ ID NO: 11671 - DNA, 30 bp, Homo sapiens
  chr18:20261870-20261900
  hyper
taatgtaaacatgtcacttgctctctcaat

SEQ ID NO: 11672 - DNA, 210 bp, Homo sapiens
  chr18:20512627-20512837
  hyper
tctagtggtctaaaaacgattcttttacaaatcaggagaaataggaatacctactatcggtttgaatctcaaacgaacagccacaagaaaaatggactttttaaaaaaaattatctaacagcatgttgtcccaataaataatgctgaaggagattccttctcgtttcaaatttgccagaaacttcccgtttaacctcagcaaaatacaga

SEQ ID NO: 11673 - DNA, 1246 bp, Homo sapiens
  chr18:20512902-20514148
  hyper
cgacaaggccgaaaactatgttagacggatccgcgtccataccccccatcagttaattttaactcttcattcggtacaggtcactctacacatgcttccctgcaaaatgcttaagctagacacagtgtacagataactttcacagaaccgcaagggcttgatgctcccccaacagaacggcttgagctttccccagcgcaattcagaaatgctgtggcggtcgccagactcttcgggtagctcccggcagctccgaggtagcgctcccctccccaaccatcgccctccgggatgggccgcaccgaagagcccgctcctcagctagggcacgaagtgcgccgccgcgatgggcagctggaggaaggggcgtgacgcaagtggaactcccgcgtgacgtcgcgcgggctcccgggcggggcgggtccggccgcctccgagcccggccggcagcccccggccttaaagcgcgggctgtccggaggggtcggctttcccaccgaggatttggcactctggtgagggaaaagggcgaaagagaaaagcgagcagccgtcctttcacagcctcagaaagtgctcgcttcccttcgggggctttcgcgaatcccgaggcaatctcggaggcggtgagtaaaagcaatctctttaccccacccggagctctgggtcggagcgactgcttctggtctggagctgcgtgcttggcgaagggctcccggggtaggggtggctcccggctctggggttgtgtctgatgaaataggccgggcccgggctacactcggtggtggtggaccggcgggaggacgagcgctacctcagtactacttctgggtctcccgcgcgggctgaggaagcgcctttcgccgccaagcccgccccgcgcatgcgccgactgcggctcgcgcgcgcgcttcggaggttttttggccagacccgcacgcggaaccggcgcgggcacctggggagaaatggatggagaagggacctggctggaaagcctttgccccgctgctctgctccgcccataagaggacccctgaaatgtcccgtgcagtttgttcaagtcccctgtgtgatgaaatgtgcctctcgccttacccgtgtgagaatacctgtggtgtggcagcgagtattttggtgagcacctgcagtgtagtggtttatactaaggaatacacacaaattacaggcctttgagcccagaatgcaacttgggaggtaagacgtgacgttctgagagattg

SEQ ID NO: 11674 - DNA, 75 bp, Homo sapiens
  chr18:20715562-20715637
  hyper
aggggcgagcatggcccgcccgcgggggggctggaccgccgcgcacgccgcccgatccccgcgccctacccagcc

SEQ ID NO: 11675 - DNA, 30 bp, Homo sapiens
  chr18:20716530-20716560
  hyper
ggcggcagcaccagcgccttcgagcagctg

SEQ ID NO: 11676 - DNA, 30 bp, Homo sapiens
  chr18:21033245-21033275
  hyper
gatccagttccggacgcggccgccgccgtc

SEQ ID NO: 11677 - DNA, 30 bp, Homo sapiens
  chr18:21166683-21166713
  hyper
atgctttcccttttcgtctctgggttggag

SEQ ID NO: 11678 - DNA, 31 bp, Homo sapiens
  chr18:21242240-21242271
  hyper
gtgctggccacccctccggggaggaggcatc

SEQ ID NO: 11679 - DNA, 457 bp, Homo sapiens
  chr18:21242502-21242959
  hyper
ccccgccgcttcctcccgggcctcgcccgcagctggaggagagaggaaggaggaggcggcgggcagcgggcagcgcccaccccatcccaccccatcccaccccacccgaccccgcgggcccggccgcccgagcccggccccagccctgaccccggagtcccggtcgctcaccttgaaggacatcctgcacatgtccgcggccgcccgagcgggagccggcgcgctttgggcccggggcgccttgtcctccccggcccttcactctcccggggctctcggcgttccgcagaggggcggcctccgacgccgcgcgctcccgccgcccggcccggcagcagccgccgcacacagggccgggccgaaggggcggcgcgggggcgcgcgcgcgcgcacactacacatggggtgtcgcgtggacgcgctccaggacctgccacacacgcgcgtgcacaaacac

SEQ ID NO: 11680 - DNA, 886 bp, Homo sapiens
  chr18:21269065-21269951
  hyper
tgttgaggagttgacgactcaacacttggctgggaaatcgaaatgtctttgatgtgagttctgtaggtagtggcagtttcctctgctctcaaccaaattcgtttacaagcctcctttactcttaggtcacaggtggcttttctggctttgacctgagcggtgagtatccagagaggagaacgatctaattaatttctgtcctggcgcctggagggttcgaagatcccaggctcccgttcccgccgcctgggtgggagcccgggaacgcctctcccattccccgcccgcgaagtttgcagcgcgcctcgcgcgggagagacgccgtctgctggcgcgcggctgagcgctgtcagttcctgatccggctggtgcccgctccagccgcggcaggttccagagctgagaggccacccccacgccgcgggcttccagcgcgtggagcaaggggagcggccccggcgccgcccatatccccggctgcgctagtcctggcgctgcaggtccgggaggcgcaggcggagagcggcggtgcccccgagcccctctgcggacggctcaggcgggaggaccccgcgcggctggatggcggcggccgcgcggcctcggggtcgggcactggggccagtactgccgccgacgccgctgctcctgctggtactgcgggtgctgccagcctgcggggcgaccgctcgggatcccggggccgcggccgggctcagccttcacccgacttacttcaacctggccgaggcggcgaggatttgggccaccgccacctgcggggagaggggacccggcgaggggaggccccagcccgagctctactgcaagttggtcgggggccccaccgccccaggcagcggccacaccatccaggtgagggcct

SEQ ID NO: 11681 - DNA, 50 bp, Homo sapiens
  chr18:21270126-21270176
  hyper
ggcaccaccggcccgaggcgaggagggggagcacgcgaggtgacatgagg

SEQ ID NO: 11682 - DNA, 139 bp, Homo sapiens
  chr18:21851970-21852109
  hyper
cgggcggctccctgcgcgcggcgggcagcgtccgggccgctcctccccttccccagcgccgctggcgggcggaggcgcaggtagggaccgccggggaagcctgcacggccctccgaggagaggtcggggactgctcctt

SEQ ID NO: 11683 - DNA, 519 bp, Homo sapiens
  chr18:21977254-21977773
  hyper
ttaaaaagtcacatggacacacgaaagtaccgagaaggcacgcagctgaagatctggtaggggatgcatgcggcaccagcatggtcgtggcacccgagtgggaagtgcaacaaacgccaacatcttgttacttttaacgcctaacttcctgcagcgctggagcagccagcggccgccgggaagccgagctcggctgcagccctgcgtcgccgcgccacgacccgaccatcctctgagacgcccgggacgggagcgcccacccccaaccaggcgcggacagacctcccgagcgcagcccggcgggaacccgtcagcgcgggaaccggcctcgaactccaggcgtggacagccgcgagaaactgacctacgcggtcacccgggctcccagagctcccgaggcggtggccacgaccccaggcttcccgtccgcccgccccacgtcgaggaagtggtcgtcaccaactctggctggcactccccgaggacgctcgagcccgcgtaacgtctgtctccgggacc

SEQ ID NO: 11684 - DNA, 123 bp, Homo sapiens
  chr18:22006338-22006461
  hyper
agtctcctggccattccgatggcgccaaggccgcaatgggcaagcaaaagccccccgccccggcgcattcctaggagacagagccgtgagggcctctggctgcaactcgcgagggtcggcttt

SEQ ID NO: 11685 - DNA, 31 bp, Homo sapiens
  chr18:22653838-22653869
  hyper
aaacatctttccccaccgtaagccaaaaaaa

SEQ ID NO: 11686 - DNA, 232 bp, Homo sapiens
  chr18:22929190-22929422
  hyper
actttcaagaaagccggggtctcgggcaagtctcgccggcgcgagcctggtccaccgttaccctgacacccgcgcacgcccgtggcgtttcttttttcactgtcgacacttggatctttcaggccctgggtctaggtttcccccagaaaaatgaggggcccatgtgacggaaaccaccagacacactgtgtggagacacatgccaatgattcacctcgttcccgaactaaaa

SEQ ID NO: 11687 - DNA, 81 bp, Homo sapiens
  chr18:22929637-22929718
  hyper
cgggaaccggggccacggggcgccgcggcccggcagccaggaggaagaggatgctgcgccgccggggaccagagggcgggg

SEQ ID NO: 11688 - DNA, 1259 bp, Homo sapiens
  chr18:22929926-22931185
  hyper
ggacctcgcggctcccctcggccgcccgcccccgatttcctcggaaggaggctcgcgaaggtggaggaggcggccgaggaggaggaggaggccgccacgtgactctcctcgccacattccaacacagccatcagatcgataacttcagggacccccgcccccgccgcagccagctagtgcgcccccaaaatcccgcacgcacgccccgcaacttccctctccaacagggacgacggagagctggaccccaccgcgaaacgcaaaggactccaggggcggcggggagaagtaggggcgaggggcggtcaacttctgggaatggccaagaggggtgctctgaggcccgagccggggtccggtgcccgcggccggcggccggggtctgtttactccggcgacgtgcggagaggacccaagcaggacgcgggcgggcgggaggcggcggccgggaccccgggccacgtttgtcacgagcgggggctgctccccacctccgagatgacttttttcttcttccaaagaaaaggaaaaaagaagcaccgcacggttttgcatatttattctttgcgaaaacacacaacagaaactttttcctccagcccagatgtagatctcagacgggatatttttttttcctccctctccggataatttcgtttctttctctctctctctctttttttttttcggttgttgttgtcttttctcgcccactttctaccgccgccccattcggggatcctcctcccgtcttcgtctccccccaccccgacacctcaccctcactccacctaggggctcagcggggaggggagcgcgcgcgcccccgcactcacactcacactcacgcgcgcacacgcctcgcagccacgcagccctcgctccgctacccacagtgacactcgcggatgggggaaagcggggagcagggggttcctccttacctttgagggatctcggtttcgcttgcttgcggcgagacatcctaaaagcaaacagctgaagttgtttcaattcagccctgaaagaaactatacttcctcgtggccgcgcgcccctcgggccgcggcgcctcgcgccctccgctcggcctccctcgcgccctcgctccgcgctccgctcctcgctccggctccggctcgcgctcgcgcgcggggctcgcggctgcccgagctccgcgctctgcacgacggcggcggcggcggcggcggctgctgcaccaaactttcccagccttcgacccccacccccaatctcca

SEQ ID NO: 11689 - DNA, 468 bp, Homo sapiens
  chr18:24127690-24128158
  hyper
gagcttgcggatgaccgcggccagcgtcaggttggcgctgcgcagctcggggtccttggtgaggtcgagcgtgcggcagtacgggggctcattgaggtagcggttgagggagctgcggatgctgatgagcgacgacttgctgtagagctggccgcttttggagcgggcctcggcatagaaggagcgcagcacgcggcacagcgcccccttgtccatggtctcgaagtccgggctctgcgccttctcgctcaggtactcccggaagatgcgcacggcgtagcgggtggccagccgggtgttctcgctcagccgggcccgctcggggcgctgcagcacgtcggggtccagctcggagccgtccccgggcggcccaccgcgggcccggggcgccagcagtcgcggcggcgcctcgggctccagcgcggcgctctggtccatattgatcatatggaccggctcgggctccag

SEQ ID NO: 11690 - DNA, 161 bp, Homo sapiens
  chr18:24130252-24130413
  hyper
agggaagcattttacgcatcaattgaaacccatccatcaatttgcattttttttttttaagaaagaatgaaagaccaggtctcagggcagtgtgggcttctgagtgggagttgacgatgtctttttctgcagcgaacgctgctggtcctccgcgtgcctgc

SEQ ID NO: 11691 - DNA, 302 bp, Homo sapiens
  chr18:24130644-24130946
  hyper
ggctttgttcacaatgcactgcccgccgcacccgccctggacacgtgcagaaaggcgtgctcgtttctccgaggctgcggtgagcagctaagttagttgcacactgggacccccacatacgagctggcacacactagtcacacacggctaattccagagggctggccctttgtcctgggacgctcccaggttttcgggccgcggtgcggagaactcaggtgggtgcccggcaagttacctaccaggggctgttcccccgcgaccctcgccataagcgcagggacccgggggccgcgctggct

SEQ ID NO: 11692 - DNA, 96 bp, Homo sapiens
  chr18:24131098-24131194
  hyper
cgcagtttgccggaggcggtgtgctgggttggacgctccgggaaacaaagcaacccaaaacagctcccagttgacgtcaacttatttccagaaaag

SEQ ID NO: 11693 - DNA, 30 bp, Homo sapiens
  chr18:24367819-24367849
  hyper
gtgtatatatatataaaacacaattgtgtg

SEQ ID NO: 11694 - DNA, 218 bp, Homo sapiens
  chr18:24764951-24765169
  hyper
cgcatctccagcggcgaagcacctggaaaggtgagggcgcacgtccccgcccaccagagcccgctcccggcgcgggtacccagcagcgcgccatcatctctgcccctccagtgccccccagccccaaccccagccccagcgcggttacctcgcgggccgctgccgggcgcttgcaggtgctgctgttccaggagcgcagcttcggaggaaacttcccc

SEQ ID NO: 11695 - DNA, 58 bp, Homo sapiens
  chr18:25755393-25755451
  hyper
gagagacaaagtgagagagcacgacccgggaggagagcgtggagccgggcagggacag

SEQ ID NO: 11696 - DNA, 1117 bp, Homo sapiens
  chr18:25755555-25756672
  hyper
cgtccagcccctgcccccgccccagcagcactcaccccccggcgggccggagcgcgccaggccctgacccgtgaagaccacggagcggggtaatccacaccacctgtctccacccccggagcaggcacttccgagctgcgtccgcacttttcggggctgccagctggcagtagagcacctctccccttgccccgagggcgacaggcagggggaccctccgtggattttcctgccccgcggcgagggtgggcacgcccctttcccgcaaccttcgagggaccccacggcaggcggagaccgacttgggaccagggcactgcacccgcccagctagagggtcccggccgaggctgtgtgaagtggcctccaggcctgggctggctggtcgggaggagcctgggggcatcctcgggttggaggcggcggaaagttgggctgcccccgggctgggaacccgcagcgtgcagtggcgagggaacctgcgcccggactggagcaggtgcttcctgccgcggaggagcctcttagtagagattaaatgaaaaggctcgctggctctctcccgagggtatgaaaagtacggaaggctccaggcaaaggcgcccccggggcgcatatagggcacaggcagccggacagagaaaggagcagccgcgtaacggaacttctcgcccgggggagatactaggcgtgagaggccagactcgttctacaggcaggcgctgaccggcagagactcctccgggcaagagggccagattttctttccaggtgggacgaacacagaatattgtgagggcaagagaagaagaaaaggaggcaactccagactgggataaagacaataggacagtagagcccttgagcaccgggaggcgcacgggtgcagggtggggtaaggtggaggcaagtcccgtaactaagacaccagagtgagaattcctactgtaaactcgcgacccatccctgcagaaataaacaaaaaaattggagcaaagtactatgcgaggggcgaaaggcacagaaaactgcaaaacctgggagttatcctgcctcaccctcctgctgcctggggacaccccccgcgagcttgctcggccccgaagaaggagcagag

SEQ ID NO: 11697 - DNA, 784 bp, Homo sapiens
  chr18:25757187-25757971
  hyper
caaatagcgggccgcggagtccgcgggactcgcaccaggagtaataaaacagacccagagatcaaggagctggggagggggcgggggaacagggagggagagcgtgtgagcgtctgcgagtgtgtggaggcggctgctgtggcagcgcaggcggctcggctccggcccggagcgcagcggaagccgcgagggatgcagcggcggggaccttggccggtggaggatgtggaggtggaagtggagcggatggcgctccccaagagctccgccacgcgaggtttcgggctcgtggttttgcttcctccgggtccccgctccagggccgctcggcgcgacgaagacgccggggacagcgccgcggggagggcgctccgggtcgtgcgtgctgcacccacaaagagcagcagtcccgccactccgcgcctccgctgcgtgggggccgaggggcgcttctcggctcctctttccggtcccccggcgagttggagactgttctccggcctcggccgcaagggggtgaggcgaggggccggcgcggtctctcccgccgcggctccgtcccgcgcagctgctgccgcagccgcccctgctgcccgcgcaccggcacccgcccgccggtcctcgccctgcgccgctcactcgcgcgcgccgccctccgtcgccgaccgcgcaccccgctcggcctccgctgcgcgacctgggcgagccgccgccgctctccccgcgctcgccccacgcgctgcctggctgcgcggcccgctcccctctcctattcctcccgccg

SEQ ID NO: 11698 - DNA, 46 bp, Homo sapiens
  chr18:25758128-25758174
  hyper
cggggggtcgccggagggaagcctagagtgcgccgagcaccgcccc

SEQ ID NO: 11699 - DNA, 20 bp, Homo sapiens
  chr18:28620935-28620955
  hyper
cagcatttaacctaaactca

SEQ ID NO: 11700 - DNA, 172 bp, Homo sapiens
  chr18:28621033-28621205
  hyper
cgcgcaccttcttccttgccacagctcgacacccccacccatgccttgccgggaaagctcctggtcttccatggcctctgggagcctcgagcgaatgcgagaaattctgagagcagcacccgtagtttcgttccccatcctcaatcccttcgcaaaggaaacacaaaacccc

SEQ ID NO: 11701 - DNA, 577 bp, Homo sapiens
  chr18:28621468-28622045
  hyper
ggccaggaagcagtaagaatccgcgagaccagactcggctcactgccgacgcgggtatagacctcgctcccatcggaccccatgcgcatccatggatgcgggtaagtcgcgggtccgcggctcctttctgggcgtgcggaatgaaactctgttgaagcctgaagcttcgcgtgtaaccgcgccgccagagttccgaacacttcaagtctcccgtgttctcagagcatcgtctctaacttcctctcctagaggatttcgtcctgggcggcaggtttccgtagactcgaaaccccaggctgtgctccggccgcgcagtcctccccggagccggagtaagtacgacgcaaccccaccgcatccatcatcccccaccactgtcaccctctacccgcctccacacctcggcagcatccccaaaacacaacacgaccccaacccccattctggcccggtcttcccacactttcgcgcccccggcacatcccgcccccagctgggtggctggcgggggtggaccgcttgggtgagcttctgaataccctttaggggagataccgagaaacccacttctcagggg

SEQ ID NO: 11702 - DNA, 805 bp, Homo sapiens
  chr18:28681378-28682183
  hyper
gcacagggagccgcacgttcccgaggcacagggagccgcacgttcccgaggcacagggagccgcacgttcccggggaaggtgccagaggccagctggacggccccggcgcactcccgccccggcgcactcccgccccggcgcactccgaccccggcgcactcccgccccggcgcaccctgctccccggcgcgtacccaggggccacgattttggctgggcgaaagcggcccgctcccgcctctccttgagtgcgctgattacatctaccggagacaccttcccttcccttggggatcccaactctcaggtcgcgatcctcttcctatctgccctcccccacccccgccaactccattttctagccacccagaggccccttcaccccagcttttcccgccacccccacctatccccgttcccctagttttcctctgcaccctaggcgatcgcccccttccccggagcggtggccgcggctacactcaccgcgagggtcagcaggagcagccggcagagggctccgttccaggagccggaggggcgggctgcctccatggagagggctcggggcaggtcgcgggccgagcgtcgggccggggtaggagggctccgcggggcgagggccgcggccggagcgcagtctgggcccgctgctcaggaggagcgcgaggcggaggaggtggggcgcgcggagaggtgcttttcttagcttctctgaagcgcctgcctctcatccaaggggcttttcctttggcggagggaggggctccagacgcgtccaaaagacaccgatcggcccctcct

SEQ ID NO: 11703 - DNA, 812 bp, Homo sapiens
  chr18:29077848-29078660
  hyper
agagaacggcggggcggggcctgccacccacagtccccaacccaaggacgtcacggtcccaggtgcgagtgcgagcgggcgggagtccaccccgcgcctccctcctctgctgaactccccacctctgtaaaagcggcccgggccggcccccggctccattttctcgcggcggccacacctggagccgcgcctttgggttgggctgggctgggccgcgcaaccgccacgggaagacagccctcggggcggggagggagagggtggccgggccggggggaggccggggccagggaggagccgagtgcgcgctcggggcaggcggcggcgcggagcggtgcggcggcgggaggcggaggcgagggtgcgatggcgcggagcccgggacgcgcgtacgccctgctgcttctcctggtaagtgccgcaagcgggacaggggagccaccgccggggagggcgtcggtaggcgaggtctagacctcgcgaccagacttgcccgccgcccttgtgcgcgttacctgcccggcgctccttcctgctgcccgaggggggaaaagggccgggcaggctgcggcgagatccgacctggggcttcggaaaatcctcttggctggagccaggagagtaagttgcgacctatcgaagttgtgttttccttcccgcgtcacccaggccccagcgcccttttctgtggtgtgtgggtgtagtgagccctggggcggggaacaccattgctgggggtcggaggctttgttgagagtctctgggacgagaaacgtggaggcaatagggaacaacctcgcgcttcttccacg

SEQ ID NO: 11704 - DNA, 37 bp, Homo sapiens
  chr18:29265159-29265196
  hyper
tgcctggccgcaagggcggcagcggcattaccgccgc

SEQ ID NO: 11705 - DNA, 134 bp, Homo sapiens
  chr18:29598281-29598415
  hyper
ggatgacagagtagcgatagcaccgtcttaggagacgcccaatcataggtcataggtcatttttgcagcttattgtgatgacaacagtggaggatggtcttccacttcaccttaaaagcggctgttctctgatt

SEQ ID NO: 11706 - DNA, 30 bp, Homo sapiens
  chr18:29599761-29599791
  hyper
tctctccaaaccggcggaaattacagagta

SEQ ID NO: 11707 - DNA, 447 bp, Homo sapiens
  chr18:30050267-30050714
  hyper
caccgttgtccaggcgcgcgatctggggcagccggtaagtgctgaccaggaggtcgagcggcacggccaccgagctccacttcacatccttgaggctgcagcccagcgagggcgccgggtccatcttccccgaagcctcctgtcccgcgctcccccgccgccgccaccggcaccacccgcgcctcggcggccgccgctgctcgcgctcgcggtctggggcgcgcgggaggcgccgggcagctccggccgcgggcagccgggggggcgcggcgactggggcggcccggagggagggggccggcgcccggctcagctgccgctgcggggcatggctggggcgccccgcgtgccctcacgcccggagaagactcagagcagccgcgcggctgcgggcggcggcggcggcccgggtggctgcggcggctcccgctccgcctcctcctctgg

SEQ ID NO: 11708 - DNA, 68 bp, Homo sapiens
  chr18:30051018-30051086
  hyper
cgcaagctttagctctcgctcccccgtccgaccactcgggcgccctgcagtctcgccgggtgctgctg

SEQ ID NO: 11709 - DNA, 31 bp, Homo sapiens
  chr18:30051299-30051330
  hyper
cagcccaacggggctgcggacggcaggcgtg

SEQ ID NO: 11710 - DNA, 532 bp, Homo sapiens
  chr18:30350056-30350588
  hyper
gatgtgcaggatcttgctgaccgacagcacctcctccaccgtgtccagggacagggtcacgttggccgtgtagaggtactcgagcaccaggcgcagcccgatggacgagcagccctgcagcaccaggttgttgatggcccgggggctggtcagcagcttgtcgtcgggggaggaagaaggagtcccgggctcctcctgcggcggcggctgctgctgctgtgacggctgctgctgcggcggctgctgctggtccttgggggcccccaggccgtcctggccgccgacccctcccccgagaggggggtggctggagaagagcgatcggaagtactgcgagcaggaggccagcacggccttgtggcaatggaactgctggccctgggccgtcagggtcacgtcgcaaaacagctgcttcctccacagcaggttgaggccgtgcagcaggttgtcgctgtggctggggtcgaaggtggaggtcctgtccccggatctggacatggcgagctgactcggtgcacctggctttaaaccc

SEQ ID NO: 11711 - DNA, 30 bp, Homo sapiens
  chr18:30352490-30352520
  hyper
tttttctttatgagcgtttgccatacaact

SEQ ID NO: 11712 - DNA, 107 bp, Homo sapiens
  chr18:31020403-31020510
  hyper
tgttttcaaacgcgcggggcaaggactccccaccgcctctggaaggggtgaagaactagtcgactctaactccctcagggtggccagggaattgcatttggttctcc

SEQ ID NO: 11713 - DNA, 628 bp, Homo sapiens
  chr18:31157629-31158257
  hyper
tacggtatggcatcgcgtggatccacggtgacggctctttggtcctgcattgtttgagatgctgtaggtggttcaacattgtgttaagttgcacgtacattattagttctgtatccgaagacactggctctgtaccctttcaacaaggctctgggagttcccccagccaagcagagacagggttaaggcagtccaacagaggagagtagtgcggtgtgtgtgtgagtgagtgtgcacgcgtgagcgcacaggacagaggcgtcgaggtgcggggcggactcctacacaagttccaaaggccaccgtgtccgcggctttcggcctgagcgggacagcgggaagcgggtggaacggcctgcacggagtgggcagcgccccaggaatttgggggctgagttggagggagaggggtctcgcgagggtttcagggcgtggctggagtagggggcgcgcggcgagtgtgcacgggtgtgcgcgcgcgagagggcgagtgtgagcgcggcgagtgtgagcgcggtgagtgtgcggccgcgtcgccattccccgtgacgtcagagtgtattgttgtgagcggggccgagcggagcatccccggagctgtcaccgcagcggccgcggcggtggcgca

SEQ ID NO: 11714 - DNA, 637 bp, Homo sapiens
  chr18:31158456-31159093
  hyper
cgccgccaccgcccgcgcgcctccccccgcggagcgagtgcgggtcaccgggtcactgggtcattgtctccgcgcccgaaccccgagcaccccgtggaatcccccacgtcatcatcagaaccatcaatgagatgcaaacatgaaagacaagaggaagaagaaggaccgcacctgggccgaggctgcccgcctggtacgtaccgccccccacacgccgcccgcgcctcccgccggccccgccgctcgccccgcgccggtccgcggcggcggagacggccacttccagcccgagccgccgcccgctcgccgggctcctgctctttgttattctgcgggagtgggctcgcccgggggcccctgtgtgtgtgcgtgcgcgcgcggaggggcgcagcgattatctccgggagccccgcgtccgggaccgcccgggacacttctccccgtacttcgctctcggggctctgctgtgccttctccacgggtgaatttccgagcgctcggcgcagctcgacttccctctctgccgctccggagacctttgtgtggcaattaccactccctcccggcccctccaccccccggaatttcatcaataactctgtgcacagtctgtgtgtatgttcggcgtttgtgagtt

SEQ ID NO: 11715 - DNA, 531 bp, Homo sapiens
  chr18:31739004-31739535
  hyper
atgctggggcaaaagagagctcgggttgctgtttctacttcagcggcggcggctggagcagcgggtacaggtgaggttgccctggcggtgtccatagcaacgctggagggggtggcagggagaaaggcgccctccaccctgtcagcctcctcctcgcctcccccgacctgcaggcgcgctaagcgctccgggcgccgcgctccgcgagggggagcagtgctcccaacccgcgaccctccgcctcagacatcacagttgccgcggcaacggccggaggaggaaggccaaggcttttctcccgctgacgtcccccgccaccagtacccagagtgctggggcctggatgagatctgcgtccgcttcacccgagcatgagcttgggtctctcggaggagcaggagacgcgggctcgaagccgcgggcctgaccctgatccgtggatgccgccgccgccttctcctcccctgggtggtgggggacagggcctgggaggcacggtcacgccgagtttgagcacgtgaccttccaaga

SEQ ID NO: 11716 - DNA, 30 bp, Homo sapiens
  chr18:31802056-31802086
  hyper
gtgaagaaaatcgacgctgctgcggctccc

SEQ ID NO: 11717 - DNA, 988 bp, Homo sapiens
  chr18:31802368-31803356
  hyper
atctctgggagtgatcgaggcattcgggctgccccgtgcctcccgggcagcgatctaacgataaaacctgacagtgtcctggggaaaaccccacatccaccgctagcgctacattcgggctttatgccaataaggagacactgtagactatcgatcagactcgtctgctctcagagcgtgcggccgggcttccagcctggcctttaggcgcggtggcggcggtgggacacgcgccaggcgcccagagaaggacatgggacaatggcccagcccgaggacgccagacgccgccgcccgacccggggaaggaagctcctgcagccggtccgggaacccgaggcggggagggaggccagctctggaggtgcgctgccgctttaaaataaaggaccacaaagactgtacagtggggaaaacgcgcctggctaatgcgagtggggacgacttggggagggggttgaggaaggtagggggcacacgagccaacggcggctcacggctccccctctctcccgcctctctccttcctccctccccgccgggctgctccggcagacaaataacagaggaaggcgagtcactcaccgtggtcttgacaggcacgtagagcacttgcttggcgccgccgcctcccccgcggacctcgtccggctggcccagctggaagcccttcgatttgacccagaatttaaatttggcgttgtccgtggagctcgactcggagccattgaggagctggacgatccgttcgtattttttacgggtcaccgtcttggtcttgcctgagtccccgtaagtcctgaggcaccagtcctggaactggcggtacatgtcgcgctcgctctccatgttccccgcgctcggccgctggccggatgctcccagcgcacttcgcacctgttcaccctaggctcatgaaaaatgcagccccggccacgttgcagggatgcgaggtcccggccgcagcgggagcctgctttgggtgggg

SEQ ID NO: 11718 - DNA, 30 bp, Homo sapiens
  chr18:31804550-31804580
  hyper
ctctgccaggaaaacggcccgaccagtgcc

SEQ ID NO: 11719 - DNA, 81 bp, Homo sapiens
  chr18:31805085-31805166
  hyper
aggtagcagcgggcccggcggcagccaggtggcagaaaggagcacgcagcatccaggtggggggacgactccagcagggtt

SEQ ID NO: 11720 - DNA, 30 bp, Homo sapiens
  chr18:31902859-31902889
  hyper
ctttatggacgcacgcgggcttagagtggg

SEQ ID NO: 11721 - DNA, 383 bp, Homo sapiens
  chr18:32073447-32073830
  hyper
gtcagtgactgaagcgcccgtccattccaaggtgtgtgcacggcgttttcttctttgacagctccggagtgggggagggcgcgggggtggagggggtccgtgtgccgggcgaggagtgggcgcgaggccgggctgccgcgctgcccccggccgcccggtgcagaggagcccgccgcggggcgggaggtgcacatgacgcgcagccccggctgcgcagggaccgcagccgcccacggcgccggggcgcggacacaggcggctcggcgctggagcaagggcaggcgccgcgcaccgagcaaagtcaagagtggaagcgggcggagagcgccggcgggggcagggattcgcctcaacgcccactcacggggttcccacctgtgcgc

SEQ ID NO: 11722 - DNA, 413 bp, Homo sapiens
  chr18:32073907-32074320
  hyper
cgggcggcgcctcaggcccgcggggcggcggtagcggctgctgcaggatgtccggcccgggggcgcggggccgcgcaggtaaatctcccccgccctcgaaggccttcgcagcgccgcagcccctgctgctgccgcggcgccgctcggggggtggctatggcagccggctccttcgcgtcgcgggttgagttgttttcgttgtggtcgctgccctcttggtcatcctctcgggctgagctggtgggaggtggagtgtctacctccattagggatgatactcacgtcggggaacagtctgaggggtactgactgggacatccgcgttgggttcctttgcagccagcggcgtcctttcgtgttgcagtgcactgcggtgcccgggccgatgcctgggtgggagtgggctccgggcc

SEQ ID NO: 11723 - DNA, 102 bp, Homo sapiens
  chr18:32074337-32074439
  hyper
cgggggcgggtgggcacgggggtgagtgtcttcggcttttatagcctgttgcccacttcgaagttttctgctggacagagggcaggcgggaggttcgttctg

SEQ ID NO: 11724 - DNA, 1865 bp, Homo sapiens
  chr18:32556604-32558469
  hyper
cccagttggtgtgcaagcccccgtttgcaggtaattaattcacagtgtggcggcgccttttcaagccccctctgcaagccgcgccggcctcctccctctcgagcggggtcaaaccacttagtttatttcacccgctggcactttcttccctgtcacgaattcagcctggcttcctttggcctgagacagcgtcttcaggcgggtcggctcggacctgcccagtggggcgcccacctgcacccgcacccgcacccgcacccgcgggaaggggcggcgctggccggactctctcgggtggactcccggagcggcggcggcggcggcggtggcagactgcgagtcacgtgcgacagaggaggcggagcacggcggccgggtgggtggagaaaacaaagcccccagctgtcagcagaggaaggaggcgacagcgccggagcaggtgagtcaagtgcatttaaagcggtaccgccctggcgcaccccgacaccccctgcactgaagcagtccctcccaggccaggggctggctgcgcctcctcctgccgctgaggtctgcagcccgcggggctcggagcaaccggaaccgggggtccagagtctagcaagaagttgtgcaagggtcggctaggcggtctccgggtgtgcaccccgccgctctcccgcgggccacatctctggttcggtgccccagctctgtgcaccccaggaaagtggagggagggagttggggctgccacgctggcagaagcgaagtggactggttctgaggggtgaggctggggctgtccagggtaggaacacggcgttggtgaaggaggggggctcgcgactgcgcgaccgcggcgcacgaccctccaggctctagctggggcgccggcactgagagagctgggggctctggcaggggctgcgcgcttgggggcagatcaggaagtgcagcgcgctggcgctcgcgcgcttgggagcatcccctggaccccgggcacttccccttcggcagccaccactctcccactccgacgccggccaccatccgcgctcccgggactcaggagccgggtgggtgcaaaaggaagcgggttgttattctgcgcccaagcatctcttctgcagggagccccgggagcgcagggcgagggctactcagcgacttcgcactcggcttagtgggaaattcttcggtctacccttagaagggctatgcggaagccagaaatcccacaaagagccaggagaggggtggacgcggaaagcggtcccctctgaacctggggcgctcgataaagctgattttcagaccccaaaagggctagtgggtttggtcactcctccagtgacttcgtcaatacagtgccaagggcagagccgtaacctcggagaaggggcgctgcagccatttgatcaggagaagcctttgtcttaacccccaagcccctcctgctagtcctcgctgggtcagtagcgctgggagtaattaatattacgaacattagcctttccttcacctccgcaccagccaacactgctgtcccctccctgattgtcttctctatcacttgttcacatctccttttccaaaaaaagaagaacaaaaggaaaatagtgtagacccgctaggcaggaagaggtcactaaaaatactatcgtgctgtcaatgtagaatgaagggttaagcgctcaaacccgcgcccgcgcgcaccgaaacggaagaacttccttgattagcatagtatcgaccctggggccgcgctgcgaggcggaggttcggtcccagctggggtgaagtgtgcagaccggttgcgattgtggtcagacgcagcacctacttctaatctgaggacccgcgatttacacttttgctgaata

SEQ ID NO: 11725 - DNA, 409 bp, Homo sapiens
  chr18:33766780-33767189
  hyper
ggcccggccacacccacgtgcgggaagtgcggggcgggatgcagggttggggaggcaagggcaggaagtagggcccaggacgcggttgggagggcggggaagctcagctcacttggatcccagctgcagggcccgctccgggggaagcccccgagcttcccggttccgaaagtgtgcagccactgagaatttattagcctcgtggatccctaatctttccccttttctaccctttggtcagccgcattctaacaaacggcaagcacacgccccgctgggtagcagcaacccgagaacgcccccacccccgcccccgccagacgccggttcccgcttgagagggtgagggtcccgagacccctgcgaggaggagggtcgcggggttccaggatgccgatgccaagcagga

SEQ ID NO: 11726 - DNA, 48 bp, Homo sapiens
  chr18:33877649-33877697
  hyper
agcccgggctgcagcccggcgcgcctgagcctgcgagtccgcgagcca

SEQ ID NO: 11727 - DNA, 30 bp, Homo sapiens
  chr18:34973989-34974019
  hyper
cgggggccgcagggcgcgcgcgacaactgg

SEQ ID NO: 11728 - DNA, 71 bp, Homo sapiens
  chr18:35065074-35065145
  hyper
tccttaaataaaccgcggtgatctcacttgcggcgccccctcccacgccggccccctcctcccccactaga

SEQ ID NO: 11729 - DNA, 41 bp, Homo sapiens
  chr18:35065516-35065557
  hyper
cgctctgggccttcagcgctgactcacgctcgcagtaggtg

SEQ ID NO: 11730 - DNA, 50 bp, Homo sapiens
  chr18:35144886-35144936
  hyper
cctttagtattttcagcaccacggcgatggacagcaccctcggtcctcgg

SEQ ID NO: 11731 - DNA, 582 bp, Homo sapiens
  chr18:35144968-35145550
  hyper
cgtcctgggctcgaccggtgcagccttccccatccccatctttcaggtcgctgtacccaaaaatccaagccccgtctcctcgatcccctctctctttctcttcatcggcgcccgctgctctctccatggcatcgttcctatcagcacctcgcccaaaacccagtcttgccccagcgaacagctccccacgcaccccagctctggtctccgctgcccgagcgcctccctccaccgcgcccgcccgaggcttcctctcgcttagtccgccgctcgtcagtcgccggccggccggtcggcccgccagcccgctcctgctccccggcaaagttgggagggaaaggtgtactcacctttgtgcatgcctgtgaacctgtccttcagaaccgtaagctcgtagattttgccaaactcctcgaagaggggcttgaggtccttctcatccaggttgcgggggatctgcccaatgaacagcttgatggcatcgtggtccttcatgggaatggtcgacgggttccccgggctgtggcttaatccgttcatgtgcccggcactgcccgggctgctgccgagcccgttggtact

SEQ ID NO: 11732 - DNA, 68 bp, Homo sapiens
  chr18:35145968-35146036
  hyper
atctctgtcctttccgtttaaacaggctggaccggttcaagttcccagccagaccaggggtgggggtg

SEQ ID NO: 11733 - DNA, 703 bp, Homo sapiens
  chr18:35146061-35146764
  hyper
cgcggggggccgggaatgggcgcgctgtgggggcccgcgccacggcgggcggcggccgggggcagggcggcgtggggcggcggccaccgcgcctcccccgtcggcggccccgcgccgtggcgatggtacagtccgagacggcccccggctataaatagcgccaggcgcatggctcttcgggaggcgctgagattccgggcccggcggccgcggggagcgggtgtccgtgaggagccgggcagccggcctcctctctttgccttttgggggttctttttgtaatagcagcaggtgcaactttttgtattttaaaaatagtgatttttattttcgtgtgggtatgtaggggggctttatccaccaagctatgctctattagggcgccaggcgggcgaagcaaaggcagggatggcgggcggggcggcggcggaggtggaatgggcgcttttttcttccatctggctttatttatttatttagactagaaaagcgagccggcttggagggagtccgcccggggatccgagcgcgcattcatcagtgtcgagagaaaaaaagctacataaatatatattatgtggataaatctatagacaagagctctctcgcgcgcgctctctccctgtctctctgtgtgtgtctttctctgtttttttttcctcctcgcacccccaacctgccagagcagccccacatcttcctc

SEQ ID NO: 11734 - DNA, 273 bp, Homo sapiens
  chr18:35146895-35147168
  hyper
cggaaggtgggggtccccgtcccgggcggcctcccccgccccggagagcgcggctggtcccccggtggctggcgggaggaaggtaggagtcgggcgcccctgcccgctcgcccgccggagggggaggaaggcgctgggcgcggtggccggtgagccagcgcgggggatggcttgatttgccctcgtctgctttacgggttcaaatagaatatatttttttaatcaccatcaaaagaataaagcccctgaatcgctatctgggttgccgccgga

SEQ ID NO: 11735 - DNA, 375 bp, Homo sapiens
  chr18:35147245-35147620
  hyper
cgttcctgccgtggggaccgggggtcgagccgcccggtccggaccccgccggactccccgccaggcccactggggctggcatctcggctgcgcgggaaagggagtggcaggcgcggagccgggagcagggtccgagcggccccgcctgtaggggtgaatactggtggtgaacttggctggggtagcagattttcacgttaatgatatttacctgcaccccgtcctctctcatgtttgctttttcagggcagcctcttcgcttcagaagcctggcaaattgaaataacgcgcccgctcccccgcgggctgcggggctggggagctggggcggcggggctgagcggctggcctaacccccgccggccctcggctagc

SEQ ID NO: 11736 - DNA, 30 bp, Homo sapiens
  chr18:38242390-38242420
  hyper
caatgtgccagtatgacatgagcagtgatt

SEQ ID NO: 11737 - DNA, 99 bp, Homo sapiens
  chr18:39172187-39172286
  hyper
ctgtcttgaaaaaaaaaaaaaaaaagagaacaactttgggggaaagccctaagacagtgatgtcacaattttgccaccaggacccgggataggccaaga

SEQ ID NO: 11738 - DNA, 30 bp, Homo sapiens
  chr18:40857449-40857479
  hyper
tcttctgagaagctcgtctccgagactcca

SEQ ID NO: 11739 - DNA, 1667 bp, Homo sapiens
  chr18:42258978-42260645
  hyper
aaatgcgcccagtttcgagagcctatcacagctcacgtctgggcgcgcagtacccccccgacactgctcctgttgtgtcagatagtggcagtgttgagcccaggaatacgcgcggagcccgcggcgatccccgcggccgctcagtcttcgcggcggactccggcgcgcaggagccactgggccgcaagggcgccggggagcgggaggggcgctgggggcggcaaggggtcccagatcccaggccacgaactgttttccttttccccgggcaagagccccgctcccttcaactgacagaaattcactggggcaggggggcgagtggggagagaggtcgctcagggctcgctactggctgcgcctcccccggctctggtctgggaagcggctctgggccctccgggcgagcagcttgggcgccggcgccccctgcgaggaagatcgcggggtgacggtcggtacccgttcggctgggccgcgctgccgctccgatccacctcccttccgcgcccgcgccctcccccttcctttcactaggagtccgggattcggagagggcgcgggaggcaggcacacgggcccgaccccactccagcgctcaccggggacgcgggcgggcggcgacgggacgcggcgggggcgcggggcgggcgcggccatggagcagcagcggcggcggcggcggcggcggcggcaacactagcgaccgcgggcggacgagcgggcgggcagggccgccgggctcagcggaccgaactgcacagctcagcaaaagcgccctcgccctccgcgcgccgcctcctgcgagcccaaacccaccaacattttttaacgctccaacccatcctttgaagaaaagcaaaaaaaaaaaaaaaaaaaaaaaaaaaagcaaaaaaagaaaaagcattgatcggagagacggggatatatatatatatatatatatatatatatatataaaattttttttggctcctgctaaaattagcagggctcgccgcgcgcctgtgtgccagtgtgtgcgagtgtgtgtgcgtgcgggcgtgtgtgtgtgaatgtgattactccaggactcctcgggctccggagacgccattttcccccttgatatctctctccataaatcggtggcgcggcggaggcggcagagtcgggcgggaagcgcggggccggccggggcgcccgccgctcgccgccgcctccgcgcgcccgggggccccggcgccccccgagctagggcggccagctcgcggctcgccgtttgacagatgctcatcgccatggagttgccgcagcagcacctttgggggctcgggcgagcgacgggagccgggatctgagcgagcgccggggccagcggagccggagccgccgggacatgggtgagcacgcgcggcgaccttggcccgggagcccgggcgcccagcctccctccgcgccgcgggcccccgcactcccggaaccgggggcgacgtgtgtgccctgcatgcaaaagttcacgtcgccttgctgggtctttgactttgcacccggcgggaagggggagaccgggccgagggggcgggatgccggtccgggcgaggttgcaggagatgggcgcgattccggcgggccggcgggtgggcggcgatgctggctcaattggagtggctcgttggtggcggcga

SEQ ID NO: 11740 - DNA, 68 bp, Homo sapiens
  chr18:42531891-42531959
  hyper
gagacgatccccagcgacagcggcattgggacagacaacaacagcacttctgaccaagcggagaagag

SEQ ID NO: 11741 - DNA, 31 bp, Homo sapiens
  chr18:43678696-43678727
  hyper
agcagggagcctcccacggagcccgttaatc

SEQ ID NO: 11742 - DNA, 204 bp, Homo sapiens
  chr18:43913550-43913754
  hyper
agtcaggctctacacgtgcgccagcctccgagcgcacgtccccgagtgacccgtgcgcggtgtgcagggacctcagggtcgtgtgcactaagggcgctcgtgcccgtctctctgcactaaggaacgcacctccacatgtctgagtgcacgtccctctccatgtgtgcacgttccgtgttcacgccgcccatgtctgtgcagggg

SEQ ID NO: 11743 - DNA, 329 bp, Homo sapiens
  chr18:43914155-43914484
  hyper
gccgcccgcgcccgcgccccggagccgcgccacaaagggcccgcgcgcagccgccgccgccgccgccgcgcgaggagccaggatggtcctggtccacgtcggctatctcgtgcttccagtgtttggctctgtgcgaaacagaggtatcgctttttcctttcggggtctgcttcggagcgtggatcgccgcaggcaccggggcgggggcgggcgccgcgggcggccgggggctcagggcacacccgcgaggacgcagggcgagcggtggcttccccccaccccattttagggggacccccgagggtgggggcggccgccctcgtgggagc

SEQ ID NO: 11744 - DNA, 279 bp, Homo sapiens
  chr18:44336170-44336449
  hyper
atgctcttggaaacgcggtggcccaagcctaagcggccatgctcggggctaggagcggaccccacggccactcaccccggggcgctgcgaccgaagctgccgcggccactgccacccgggggctcgccggccggctccgcgcatcccgccctctcaatggactttcttacctcttaatgtagttcctgccatacaggatctgttgcagcaaggtcaccaaggcaaaggcgcagatgaagatgaagagcaaagttcggctccccaacaaatcccggttgg

SEQ ID NO: 11745 - DNA, 151 bp, Homo sapiens
  chr18:44337012-44337163
  hyper
cgatagggacggggggagggggcgtacaaaacacccgcgcagtctggctaatgataggcgggccgtggggagggggaggggcggagcgcaaaacgccgggtttgaatcttggaattaaaaagagggcaggggctgggcgcggtggctcact

SEQ ID NO: 11746 - DNA, 155 bp, Homo sapiens
  chr18:44337462-44337617
  hyper
agaggaaacaacagttgcggagctggacttgatggaagggagcatttgcgtgcggcgcgcagggcactgagtcaccatcgtggccgcgtcctcgcgctctcctagcgatttctccggagaaagcggagcaaggtcagccgggcagcccttcaagg

SEQ ID NO: 11747 - DNA, 128 bp, Homo sapiens
  chr18:44337649-44337777
  hyper
cggggctgcctgcccgtgccccggcgcccaactcctacaaggaagaaattcaggggctccccgcccccgccacagtcctcttccccctccccagctgcaactcggcagccgttcgtcaaagaccctgt

SEQ ID NO: 11748 - DNA, 30 bp, Homo sapiens
  chr18:44581294-44581324
  hyper
tcgccagtcctgaccagtggggacccattc

SEQ ID NO: 11749 - DNA, 30 bp, Homo sapiens
  chr18:44777721-44777751
  hyper
ggggcggccggttccggcaatacctggtaa

SEQ ID NO: 11750 - DNA, 30 bp, Homo sapiens
  chr18:44778068-44778098
  hyper
cagggtgacgtcaccgtctccctgacactc

SEQ ID NO: 11751 - DNA, 246 bp, Homo sapiens
  chr18:44781011-44781257
  hyper
gaacccacgctcagccgggcctgggcccagtttcctccacctgggacacagtcggtttccgagccggcgttgaactccgcggtataggaggccacaacaaaacccgggtgggaactgtccgcggtgctgacgagatgcatcgttccaaagcacagcgaatcctactgtgttcaagtcgggaagaagcctcccagcatgtaattgagccctagattcggctctgggcgggctcgagcagagcctcat

SEQ ID NO: 11752 - DNA, 30 bp, Homo sapiens
  chr18:44786871-44786901
  hyper
gaagttactaggctcgcccgcgggagtcgc

SEQ ID NO: 11753 - DNA, 30 bp, Homo sapiens
  chr18:44789934-44789964
  hyper
catctaggacatgccgggggctgtttgcta

SEQ ID NO: 11754 - DNA, 30 bp, Homo sapiens
  chr18:45275552-45275582
  hyper
ctcctaacagagaacggcgctcggagccgg

SEQ ID NO: 11755 - DNA, 39 bp, Homo sapiens
  chr18:45662552-45662591
  hyper
gcgctccagtgggtgacgccggcccgggcgcccgcggga

SEQ ID NO: 11756 - DNA, 253 bp, Homo sapiens
  chr18:45663033-45663286
  hyper
ctggcgtgggccggcggcaatggggcagtggcgagagttgctctctgcagagttccagatcctctctcctatttcggaagaggtgcgtggccccacgccccgcaggagctccggcgaggctgggggagttgaacgctttgcggacgccgccacccgcgccagccagagccgccccgcggccacccggccacagggtccccgcagcgcgtagcgagaatgcccgcagcgctctcccggccgcccggaagggctt

SEQ ID NO: 11757 - DNA, 30 bp, Homo sapiens
  chr18:45663495-45663525
  hyper
ggttgtcattgattcgtgctgggcgagtta

SEQ ID NO: 11758 - DNA, 240 bp, Homo sapiens
  chr18:45687996-45688236
  hyper
ccggccacaagcgccccggactccgtgcctgcccgcagcccccttcctgcagcgttcactcggctgcccggcccggcccggcccgggcgccccgccccagccccgccccgctccggaggcccctcctctatccccgccccttcccgggcgccccgccctctccctccactctgcgcccccgcggcctctctctcctcctgcgggagccatcgccctcctcccgggcgcccctccccgcgg

SEQ ID NO: 11759 - DNA, 1628 bp, Homo sapiens
  chr18:45934609-45936237
  hyper
cgcttttctttggctcctcctggccttcatcctagtaaaaccagacaagcaaccggaaaaacaaagcagcacagcggccagagacaattcgctttcaacggagcaagagacgtacacaccttgagagaagacgcacgcagttcccgtgcgtgtcgctgggaacagacctcgcactaccccgcgcggcgacaggcaccgggccaggctcggcttcacttgtccgaggcttggaggaactgtgtgcgtgcgcccatttcccccagcttcccgacttgacagcagcaaggatctttgagtcctgcatgagcgacacctcgggcaaggactgtactctgctcagatctcatcgagaggtgctggatcccagcctttccagctcattttccaattttcaagaaaagacagcgcgaagtgagactgcaaaagtcccaggaaaacgtcactcaccaaaacgctcccgcgccttccaggcagaagtgcggtaaaacttttggcagaaaccacctgtggctgccgacgggcccgccccgctcgggcccgcaggcgccgccgagccccgggccgcacgcgcccgcagaagttcctttccagccccgcgcgccacttcgctccgggccgcggtgccagccaggaggcgcggcgcccgctcgctggctcgctctccgctggctctcccctccctccttccctccctccctcctcccgcctcctccgttgcatggctgccgcacggagcccctgaatagccaccgcagccccccgcctcctgcccaccgcgcggagggcgcccctgctccagccggcgccccaaggcgcgcggaccgccggcctcctagcaacggcccccgcaatcgctttccggcgcagcccaagcaaagccacccgcccgccgccccgcgacctcccgaactgcctcggctgccgaggtgctgtggagatcgcgaccccggcagccggcgcccgagcccggcgcgcgaagccgctcacctccgcgcgccgccggccctgcgcgcctcccgcacttggctccgggacgcagtcctggcgtcctccttcgccgccggtgtccgccggtccctgcgcgcccgagcctcgccggccgcgccgctgtcagagtctcgtggcggggctgcgccggcgggtatggagctgagcggcggcagcgggcgagcgggcagctcctccctccccgcgccgcgcctccgccctccccgcgccccgcctcccgcgccgcggctgtcagccccgcgccccgcgccccgcgcccgcgccgccggctcggggggcgcacagggctaaagggcccggatgtgtgcggtcgcctgtcgctcgcgcccgccccctccccgccgcgcggcacatgcacttgctgcgccgcagcccccgcccggctccgctaatttctattttgacagtaactgtggcgagtgggcggcgcggcggggggcgcccgggactggcggaggctgcgggcgggagtcaggacccgacgcggaggcggagtgggggggccgggcaccgccaccaaccgctcggggctccgcgtcttttctctttctttccttttttctctctgcctcctccaggatttaaagggacagccccggcagaggcgagggggccaggcg

SEQ ID NO: 11760 - DNA, 404 bp, Homo sapiens
  chr18:45936453-45936857
  hyper
aggaaataaaacaactcggcaactgcttttctacccgaaagtcgggagcaaggagtgggggcgagaagttaagtttcccaaatgctctcggcactccagcgagcgcaccaagacgcctagccagcacctgaaaccgcaagcttgccgcaccccggggcgccgaatctcagcgggcaatcgcgctcggcggcgctgcggcccggagtccccacccctctggagccttgggccccgcactccgcaccccacacgccggggagcagccgctggccgcccgtcactccccgggtcggcctggaaggcggccttccgaagcgtccaatcaccgcgcaacaatgccaacgggcgggcccggggagggcttgtccccgccccgtcccgccgggccccgccccctcggagtc

SEQ ID NO: 11761 - DNA, 62 bp, Homo sapiens
  chr18:45937125-45937187
  hyper
caccctcgcacgtcagcgggtcctctccggggctcctccctcagaagcgggaaagtttgtcg

SEQ ID NO: 11762 - DNA, 217 bp, Homo sapiens
  chr18:46065139-46065356
  hyper
cccccagttctcccaccgcagaggcccccacccagggctgcgccagcgccgtggggtcgctgggcggcgggttttggcgtcgctagactgggctgtcttggcagctaaggcgacatcccgagcgtcctggggccaccctgctctccagggcccgccatcctggaaaagaaaggcgaactacattacccagcaggcctccagccgccctctttccttt

SEQ ID NO: 11763 - DNA, 87 bp, Homo sapiens
  chr18:46066173-46066260
  hyper
tgcagctgttcagaccgcgctccgccgaggtagggagcccgtctcggggtggcgtttgggggccgggggctgcggcactcggggctg

SEQ ID NO: 11764 - DNA, 156 bp, Homo sapiens
  chr18:46066780-46066936
  hyper
ggggcctcggagggccgcgtgccggtgcctggatgtggccggagggggcgtccgggacaccgcgcgcctgagccgagtgtttctctattgatggtaaaagacaatcgggaggggggtggtccgagcccgttatctgggcggcgttggctctgtttg

SEQ ID NO: 11765 - DNA, 189 bp, Homo sapiens
  chr18:46067447-46067636
  hyper
tgaccccgcaccgaggcgttctatgggtgtgcgtgcccgcgctcgccgccgctgccttcgcagaccggggagagagtcagcgactgccaaccgcagccccggctcttcagtctggggacagtgggagcccaagcccagcgcgccccagcccggcccaggccgccgcccgcccggcgctgtgtctctgcg

SEQ ID NO: 11766 - DNA, 30 bp, Homo sapiens
  chr18:46476807-46476837
  hyper
gcgaggagaaaagtcgtttgcctgctaagg

SEQ ID NO: 11767 - DNA, 30 bp, Homo sapiens
  chr18:46986861-46986891
  hyper
cgcagcccaggtggcgcacaccggctcagg

SEQ ID NO: 11768 - DNA, 1194 bp, Homo sapiens
  chr18:47087200-47088394
  hyper
ggcaggacctgttccgggcgactgcagggttaagggtatcgtcttaaagagccggatcctcccggctggagcgaggctggatggcgggacgcagcctctcagcctctcgtacccgccctgcgtccgcagtggttgttggcgcagccgccccgtcggtgttccgggctcagtccccgctccccagcgccagacgcagactccgggccaagttctccctccgctcgctgctttctgccgcaggacccggatcaataaagggaaggagagccgggaggaaatgatggagaacagagagaaaggagatgcttgatttcactcgccaaggagtgagtgctcatcggcagacactgggctctggccacgcgtcttagactccaaatctcggctcactggtccctttgaggaggtcgcctggtgttcccgtagccctccaccccaccgtaggagagcgcctgccacgagctccgcgcctcgctaagtgctttgctacgtgaactcttagttttcccaacatccctaagccgccgatacattatcacccacgtattgcggacgagagaaccgcctcggagaagctggctggctcgcttggagttttgcagctagtggcggagcgagcattccgagcaggtactgtgcgatcctccagcgccggccgcagctcacagccccttagctccgccgggttattgtgcggccgcgccttctgcacctgttgcggccctcgctaggcgggaagggagggagaagaggaggacaaaggggatgaccaggtggctctcccccgacggactcccggcccagggagcggatagaccactcccagagagagtgtggctttgagccttggagaggatgctctccttctccagggatcgcctccccagcggacgcagagtttcagggaaatgtccgcctccgccacttgggatggcagtggggagaggaggatctgggtgtccggaggagggcagtgggagaaagctggagctgctggagtcgcagctgcctgcggagcgggcccgggaggaagcggggccgagcgtgcggcgtccacgcggtgagtgtgcagcgctttcattcaaactttctccagtctcggttccggcgtcagcaaggtgtgaccaatcagagcccagagacgggaataaattatgcaaatcaccatctggcgatgggtcagatgactcccat

SEQ ID NO: 11769 - DNA, 767 bp, Homo sapiens
  chr18:47339390-47340157
  hyper
catttctgcaggcctctccatcgattcacccggggagccctgaccaccgaggccgagcggcgggctcctgtgcgcagctgccccgcagcaggcgcccgcggcctatggcgccgccccattttttctaatacttggactcgaactagtggggtcactgttaggcgaagaaaggaatgacctccaaggtcacatgcaagcaaactttggtctcaactaaacaggaaattgcaccgaaatcgctgtcgctagcgccttacaagtaagggttttctccttaacccaaacaagcctttcgggctgggtttttatcacgtccgctccaaaaccgaggaggttgagtgaacttcaccccacgaccccgactctccgcggcggccggaagcggaggcctggcctggggagggcaggaccccgaggggcgaggagaggaggagggggctgcgctcacctcggagcagagccatggcggctgctgggtcgtcggcggcgcgggtctgtggtgtgggggacgctgagcggccgctcgcaatcacccagatttcaagagcgtgggtggcgccccgagagccacgcccctgccctttcacctacttcctggggctccttggcggggtcccagcgtaagatggtcctaccccacgcgtagcgctgcccgcctcaccccagcccgagggagcccaggggacggggctcggatagaccacaacgcgccttgagagcggactctttcctcacatcctcatttttagattttctccgtttccaaa

SEQ ID NO: 11770 - DNA, 291 bp, Homo sapiens
  chr18:47721048-47721339
  hyper
tagccgagggagaaggcgaccctgagtactaggtggccccgagcgcgccaccccggccccggggcgcctccctcgcggccgcgctcacctggctgtagagctcgcccaccgacatggcccgggccgggcggggctcgggccccggctcctggctgccccgcggctctcagtccgcggctggcccgcctggcgccatgttcccgggctggcctggagtttctcgatcttctcgctcttctccgacctgccccgccggcttcccgcaggcgccgcggccggctcgctcccggc

SEQ ID NO: 11771 - DNA, 31 bp, Homo sapiens
  chr18:47792761-47792792
  hyper
gctggctgtacattttcgagtccccttcggg

SEQ ID NO: 11772 - DNA, 35 bp, Homo sapiens
  chr18:48346823-48346858
  hyper
caataattagttatcgtctcgctctgcattgggtc

SEQ ID NO: 11773 - DNA, 80 bp, Homo sapiens
  chr18:48494352-48494432
  hyper
catcctagagcggccgcgcgggacccggccggcggcgcacttccgcccgggcgcattgtagccccgcggacagctgggcc

SEQ ID NO: 11774 - DNA, 30 bp, Homo sapiens
  chr18:48724081-48724111
  hyper
aatctctgggagcccgccttctcctcccgc

SEQ ID NO: 11775 - DNA, 13 bp, Homo sapiens
  chr18:49866346-49866359
  hyper
agagggcatccct

SEQ ID NO: 11776 - DNA, 207 bp, Homo sapiens
  chr18:49866411-49866618
  hyper
cgctcttttttccctaagccatagtctgtctgcccccacccccttcccgtggaatctttgcctgatccagttcgtttccctccggtctccacattttcccttccagccctccacttctccggatcaatgtgtagtacggttccaactcccagctcgcacaccgctggcggacaccccagtaacaagtgagagcgctccaccccgcag

SEQ ID NO: 11777 - DNA, 37 bp, Homo sapiens
  chr18:49867104-49867141
  hyper
tgtgagtgctgccgctgcccgcgacccctggccccga

SEQ ID NO: 11778 - DNA, 232 bp, Homo sapiens
  chr18:49868161-49868393
  hyper
ttgcgggacctcaccgcaagtgtagatgggcactggggtacagtgagcggtcctggcaaagaaggagaggagagcggctggatgagcattcagagagcccttcggaaacgacctttttccaaatccaaaggaaaaacaggctcaggcagagaccgggcgttgagtaggagctccccagttcgtgcctgggaaattaacagggaatggcacatcaatcgcggccaagccccca

SEQ ID NO: 11779 - DNA, 241 bp, Homo sapiens
  chr18:52495779-52496020
  hyper
gataagtagctgtccccgtgctcatcgccctgtggagcagatcctgtctccttgctgacggtggagcccgggagttccagggcttgggaaggggaaggaaacctctctgaaatctgacacctgctctcccggcaaggaaacttcgcaggctggtgagttgggaaggcgggctgctgctgctggaacgcgttcccacccacccgggtgctgcagcgccggcctgcgccgtgggaagtgaggc

SEQ ID NO: 11780 - DNA, 244 bp, Homo sapiens
  chr18:52989054-52989298
  hyper
agttgcattttcccatatggccgggccaagcgtggtgaatatgcaaagcaggaagagaccattcctggcgggcgggggaggccgcggcgctgctgtcagacgctcaactttgcgcagcggagctggaaggcagcccggccctgatggagctcgaaatcctaatgcatacgcgagatcgattcaacttttccgaggggtttttattagttcctcgaataatgccgattcttacaaatttctgcag

SEQ ID NO: 11781 - DNA, 386 bp, Homo sapiens
  chr18:52989589-52989975
  hyper
ctcccagcattgtacgcagctgcctgagaactcgactcggagaaaggggagggaaaggggagggaagaaaaaaaaaaaaaaaaaaaaaaaaacaccacgtctctgacctcgctcaaaaggagagagggggcagtgttttctgactgcttggtcaacaacctacaaaacggggttgcggaatgaaacagagtagcagtgcggcccgccccgggctccgcgggccccggcctccccggagctggtgggaagcgcggccgcccatgaacttcacctcgccccgccgcagacagccgcatgggcccagagcctacggaggggctggggcgctgctcccctcgctggcgctgggcgccccaagggcgcacgttctccactctggagttggg

SEQ ID NO: 11782 - DNA, 1436 bp, Homo sapiens
  chr18:53254848-53256284
  hyper
acaccactcccctccgcttttcaaagtagctatcaagaaattaaagatgagcgtctctggagtgaaaacacgtccaaagggggaggggtggggtgacagggttggggggagcggagtggagggtcgggtcctctaattgtccagcaccctaatttgtgaaagaaaggggttataaaaattaaagtcaggcccctggcaaagtcctcggtccctccgagggggcatcaaggggaggggcgggggggctggcggcgagggggagggaagcggcgggaggggaaggggtgtctcttctgggagcgccgggcgccgggagcccgcggcgcgggaggcgcggagccgcgtgcggggccgccgagcccgaaccccgcgccgccgggcgcctccgccccgccgagccccgcaggcgccggtacctaccgcccgcgcgcgagaaggggctctccgtgcaccgccggcgccgaggcggcgttcatgtctaaccgccgccgccaccgccgccgcctgctcctgcgcccgctcccgcgcctgctgcctccccgccgccgccgccgccgccgccactacagatccgcagacacacagccaagatccctgactcttaacaccaactctcttctccggggaggggaggggacggagggaaggggggagggggaaacacgccgaggcgcacggaattgcaagttcagcaaagaaatgggtgggggggctccggcggggagacgcgacttgctccgggtcgggcaggctaggatgcatccccctcgcacccaccccgaggggaaaaaaaaaaaatctcaacacctcccccgcctcgccaaaaaatacaaacgaaaattcatcgagcacctcatttttcctcagatcgtcagttacaatctgaagcctgaacagttcagtttttgcccgttgcatccctcggaggcactttgaaatttattcgagtttacatcccctcacttctttctttctcttactctcgttccctctcactcacacatccacacacggcaaagcaagtttatactaggctgcaaatacacgtgatgcaaaaagactttgccaagaggaacaatatttttctttttcgtctataaatcaagccacattttcctggggagattttcgtttcggtagttttgcgttgggggcgaaatctgaattgcatactttctttcccctcccttttaagtcacagaatagtataactgcaaacttcgaaaaaaaaaaagggcaatttttgggggtggatgttgttttgtttttgcacttgagttcctaggcacgctaagtccctgttcgccagcactgtaagtttttaattcaacatttaccattataggccctgcatgctcttaaaacatactttttcacatcactttttaggataaaatttaagcttcataattctatcgtttcgtaataacaagcgt

SEQ ID NO: 11783 - DNA, 392 bp, Homo sapiens
  chr18:53256997-53257389
  hyper
acattgtaatccattcacatccgggaactgcgggcttataaagagaaggagctgcggccgcggctgctcctccagacaatgactgggaaggggcggggcgggagcaggcgaccatagagtggtaaacagagcgcctagagaggcggccaagatggcggtgctggtcgaccacgcctcctccgggagcggaggcgggtggctgttctcgggtaggcgtcgcgcgtggggcggcactgtgggagttcccgaggccgaggtcgttcgcaggccccatttccctgcgctcttattcgtgttgccgcttcttggccgtccttgctctttgacacaaaagtgtagtttcggcacaaatttacaaattaaactccacagacttccgcagggaagtgaga

SEQ ID NO: 11784 - DNA, 30 bp, Homo sapiens
  chr18:53257771-53257801
  hyper
ataacgcccactttacgaattttatagtgg

SEQ ID NO: 11785 - DNA, 705 bp, Homo sapiens
  chr18:53446769-53447474
  hyper
aagcacccacttcacgacttaacgtttcaggaatatgaattctatgttcagaaaatttccccacactcttcttcgctggcacattcactgatgtagaaaatgccaggagccccgggggtgtgatgtttccggtggataatgtctcccgttccctgccccggggcccagacagttggtgcttaagcgtctacaatgtagagtttcctgcattttcctcgggccgccatttgtctacttgtcccatccaggacatctccctaaataatctctaagtggaaaaatcacggtcctctaggagatttatccgggaacgaacgtgcgtggggcagttcaaattcctgagctcagatttcgtttcccgcggtcagatggtgcggtcggtggggcccgagggatgcgcacagctgtgcctgagaggtgctgctctcccgccaccgaagtcgctgggaaattctgctgcactgagacattttaatgtcggatgttctaatcctgcgggcaaaaaaaaaaaaaaagtttgaaccaggtactgggcttttgtcacggtgaaccccacccgcgccccgcgccgtcccttcattcactcaggcgaggtggcttggatttgcacctcgttgaagaagcctcccatgcgacatctccgccagcaccccgcgcggacttggctgggcggcggcggggagtcagcttgtcaccgcacggcgg

SEQ ID NO: 11786 - DNA, 64 bp, Homo sapiens
  chr18:53447798-53447862
  hyper
cgccggctactcagctggccccgcagcttccctgcggctcagcggcctcccacccaggagaaaa

SEQ ID NO: 11787 - DNA, 30 bp, Homo sapiens
  chr18:54305272-54305302
  hyper
ggaaggaataggggcgggccacccccaaaa

SEQ ID NO: 11788 - DNA, 30 bp, Homo sapiens
  chr18:54318600-54318630
  hyper
tgcagtggcggcggcggcggcaccggcacc

SEQ ID NO: 11789 - DNA, 30 bp, Homo sapiens
  chr18:54724442-54724472
  hyper
taggagcaaagttgcagggtcatatgggaa

SEQ ID NO: 11790 - DNA, 31 bp, Homo sapiens
  chr18:55021325-55021356
  hyper
ctggtcctcgcagcgccgcgggctccagccc

SEQ ID NO: 11791 - DNA, 30 bp, Homo sapiens
  chr18:55101950-55101980
  hyper
gcattactgctgcccgcgccgcccgtgggc

SEQ ID NO: 11792 - DNA, 110 bp, Homo sapiens
  chr18:55103303-55103413
  hyper
accggcccgagctctccatcccgctgcaccacgccatgagcatgtcctgcgactcgtctccgcctggcatgggcatgagcaacacctacaccacgctgacaccgctccag

SEQ ID NO: 11793 - DNA, 1163 bp, Homo sapiens
  chr18:55104738-55105901
  hyper
ctgaaggcacagccttgcccccgcggggaaccggcggccaggatacaacagcgctcctggagcccatctctggccttggcgttggcgcagggactttctgaccgggcttgaggggctcgggccagctccaatgtcactacctacagcgagggcagggtgtaaggttgagaaggtcacattcaccgctttgggaggacgtgggagaagagactgaggtggaaagcgctttgccttgctcaccggccgtccttgccccggtcccagcgtttgctgggatttgccaggatttgccggggctccgggagaccctgagcactcgcaggaagaggtgctgagaaattaaaaattcaggttagttaatgcatccctgccgccggctgcaggctccgcctttgcattaagcgggcgctgattgtgcgcgcctggcgaccgcggggaggactggcggcccgcgggaggggacgggtagaggcgcgggttacattgttctggagccggctcggctctttgtgcctcctctagcggccaagctgcgaggtacagccctctattgttctaggagcacagaaacctcctgtgtgggcggcgggtgcgcgagctagagggaaagatgcagtagttactgcgactggcacgcagttgcgcgcttttgtgcgcacggaccccgcgcggtgtgcgtggcgactgcgctgcccctaggagcaagccacgggcccagaggggcaaaatgtccaggtcccccgctgggaaggacacactataccctatggcaagccagggtgggcgacttcccatggatcgggtggaggggggtatctttcaggatcggcgggcggtctaggggaacaattcgtggtggcgatgatttgcatagcgcgggtcttgggatgcgcgcggttccgagccagcctcgcacagctcgcttccggagctgcgagctcaggtttccacccccgatcccccgggctttcctcgcaccgctgagcccagcttgtggggtgcactcgaccaacgcccgacagggctggggaatgtgacaggcagcaggttcacccgggcttggggagggggagtttccgctttgacagcattttcctttgccgtctgctggtggattcctattcccagtcggtaatcgccccgcagtgttgatctaagaaggt

SEQ ID NO: 11794 - DNA, 30 bp, Homo sapiens
  chr18:55114512-55114542
  hyper
cagcaccacgaacagcgccatggaggaacg

SEQ ID NO: 11795 - DNA, 54 bp, Homo sapiens
  chr18:55470276-55470330
  hyper
ctcggagcgctcgctgcgcacctggccgctgccgccgcccgcccggccccagcc

SEQ ID NO: 11796 - DNA, 249 bp, Homo sapiens
  chr18:55470591-55470840
  hyper
gggctggggctggaggcgggctcggccttctcccctccctttttccctccctagggcggagaggggctggactgcaagccccggggcggcccgaggcggcccaggtccagctcctgccccacgccctccgtgcgtcctggagtcaggtgggcacccctttcagtcttccgagcccagcctacgagcccttgcctcgcccagcctgagacccagttgctgcggctgctcttagctccccgggggccgcac

SEQ ID NO: 11797 - DNA, 191 bp, Homo sapiens
  chr18:55470898-55471089
  hyper
cgtcaccccgggtcgaggactgagccagcctggaaagctggcggggccgcggcgcgcccgggacctgagctccctcggtaaggggagctgtgtcctcttgatgccaagtcatgtttggggaccggtcaccgaatgcgcgtcaaagttcgccgcgtggagggtgaagaaagaggctgcgcctcaagacttcc

SEQ ID NO: 11798 - DNA, 30 bp, Homo sapiens
  chr18:55710764-55710794
  hyper
gatatttcacgttgcggctcacaaatgaac

SEQ ID NO: 11799 - DNA, 169 bp, Homo sapiens
  chr18:56887256-56887425
  hyper
ttttccggaccgggcgtcccagcgccccggttagctatagggagacgtcagagcgctctggtccgcgatagaagagccccccagcccccccgcccgggcttccatataaagtaggggccctagtggaggccgcagcagtagcaccagcggctgcggcggcggagctcct

SEQ ID NO: 11800 - DNA, 30 bp, Homo sapiens
  chr18:56887636-56887666
  hyper
gtgagtgtcctggccgcgggagccgcgcgc

SEQ ID NO: 11801 - DNA, 267 bp, Homo sapiens
  chr18:56932077-56932344
  hyper
ggaccggtccagggccgcagtgcctaaccccaggacaccgagcgagggcgcctccgcggtcctacgggaacctcaggacactgagcgagggcgcctccgccatcctacagctgttctcttaacgtcgagcctctggagcccagcaatccagagaggccgagccctcagtcccctgcgtccgtgcaggaaagaaattgggctgcgagcatcgccaacagaagccgggagccgtggcgcgcattatggacacgccgccctcgcgcgcag

SEQ ID NO: 11802 - DNA, 54 bp, Homo sapiens
  chr18:56932699-56932753
  hyper
gctgatggtggccacggggtcgcgggggaggtccgctcccggcaggctccagct

SEQ ID NO: 11803 - DNA, 216 bp, Homo sapiens
  chr18:56934998-56935214
  hyper
aggagattgtgaagcgggctgagatttcgagattccttcctcgccctagagccggcgccaaagaactgcagatactgtccagggcacgcccgcaagaactagctctcggggcggtggcgtagggcgctccaggacactctccgagcgcggcacctcaccagacgcgccttttaccgaactctgggttggcgagtgtggagcgagttggggaggtta

SEQ ID NO: 11804 - DNA, 30 bp, Homo sapiens
  chr18:56939181-56939211
  hyper
ttccaactcggtattcgcagctagtgacga

SEQ ID NO: 11805 - DNA, 153 bp, Homo sapiens
  chr18:56939498-56939651
  hyper
aaatgcatggacacccgtgaattccgagaagcattggctgcaatttgggcctcgggccctcccagatcccagttcctcaacctgggcgctttacctggacccggacctctggtaggttgaccttgccggccagctcctcgcggctgtacacgt

SEQ ID NO: 11806 - DNA, 407 bp, Homo sapiens
  chr18:56939763-56940170
  hyper
cgcttcgccggtggctggcccgacgggcagccctgggctcggccgtgcctccccgggctccttggggcagtagggtcgaggggctggggcgacgaggcccgggagggtcagatgcactccccaaaacacccttgggccgaccccgcctcgctgtgggcactggccagcccgcctgcgggctccgagatggcccggggaggtccgtggtgagggcggcgatgggtcctaagctttctctgaatgcaaattggaagctcccgccatagacggtccccaaccccgcgcccagttgccttaataaaagttaaggaaggggcgctctcgtctggccaactcctaagctcgggcgcccgaacggcctcgcacagccaggggtgcgcactcaccttcgtactcgggggcgggcg

SEQ ID NO: 11807 - DNA, 679 bp, Homo sapiens
  chr18:56940565-56941244
  hyper
gcccgggctgcgcacgctgggggtggccgagcgctcagcccgctgccgccttagtcccagaagtcggaagttcgggctcggggtagctggggctctcggcgctaaaggcggggagccaactggccctcggctcctcccctctcgccctggacccagccccttctctcggcccctccctccacagaggggcgtgtcctcacccggcccagccacagggtcctctagtggccacccctgggccggcactaggaatattccccttccacctcttgatccgttttaagctttacaaacacactccggggatccgcggcgggatgcctgatgggctcgggaacctggtcgcggcgcacccctagtcctgcctcagtggggccgacgcccttgggctcatctctccccttgcgtttgtctccctctacttcgggcttaccctctcacttcagactaccccctgggggtcacctccctccttggacgcacccctccccagcttcagactcgcccctctagccccctctggctcacctccgcggggccgccaccctggcctgtgccccctggaagcgccgagacccagccgaaggcttcccagccccgcactcgtcgcagtttgaatttcccctcgctggctcccttttcgggacccactcctttcttggctgggttgtacgaagtc

SEQ ID NO: 11808 - DNA, 30 bp, Homo sapiens
  chr18:56976171-56976201
  hyper
ggctggtttgcaagcgcaaagtgttgcact

SEQ ID NO: 11809 - DNA, 126 bp, Homo sapiens
  chr18:57069860-57069986
  hyper
ttgtggagaggtgactgaggccgctgtgctgaggctccctgggcgattcaactacaccatctgccgtgtcagcttggaactgcaggagacgctagaggggaagacggagaaaggaagggaaacaaa

SEQ ID NO: 11810 - DNA, 452 bp, Homo sapiens
  chr18:57363597-57364049
  hyper
ccacacaagtatttcagggagcggcaaccatcctcaggatctcagggcacacaccctagacgcaaagtcagttgctcagtgttgctctgactccgatccaaccaaccctcaaagattcgcaccgcgcggcacgcacccagcaggttccagcgtaaaagctgctccggtcccaagcgcgtctccaaacccctcctttacagcgccgcctccccagccagccccggtgcgcagtggcgaacagcccgcagagcccccaggcttacctgtagcatgtggtgagctcgcctgaagacttcagacacgggtatttagtcgtcgcgattttgctctctgagcagatttctctatgaaaaagtgcagaggaaatgttcgattctcagcgggagagcggaggcgggcagcgcgcgctggggaatccctggcgcgtggggatcgccaggctccccgtcccg

SEQ ID NO: 11811 - DNA, 82 bp, Homo sapiens
  chr18:57364448-57364530
  hyper
gccgtcctccggctcctctctgtaggtccacgtgtgtcccaacgccaggagcagcagcagcggacccaggctcctgcccagc

SEQ ID NO: 11812 - DNA, 30 bp, Homo sapiens
  chr18:57364857-57364887
  hyper
gggacgttcacgtccgattgacagacttgc

SEQ ID NO: 11813 - DNA, 30 bp, Homo sapiens
  chr18:59000845-59000875
  hyper
gcacggagactttgcgaaacatccgaaggc

SEQ ID NO: 11814 - DNA, 16 bp, Homo sapiens
  chr18:59001327-59001343
  hyper
aggtggaggacgtggc

SEQ ID NO: 11815 - DNA, 30 bp, Homo sapiens
  chr18:59001711-59001741
  hyper
aaagctctgaattgcgctcgctgtttggtt

SEQ ID NO: 11816 - DNA, 752 bp, Homo sapiens
  chr18:59560075-59560827
  hyper
agtggaaatggtacacgtttaggaggcaagaggctgacaggcaggaaacacaattgagactgagctttcttcagcctgcagtgaaatacatgcaggaagggttagatacgcgccgcggagaaggaaatccaagcgccctcctgggcagacggggctggagcgggtgcactagggaggtggagcaaggcagatgaggtgtggagggctggcggccgagaagggggcgtcacggctcctaattgtctctacaggataaataaccacctcccccctcctccgcagtctcccccgcccacgagttcccctctggtggcagagcgcctactagcaacagtaagccctaggaaagaaagaaatcggagcaggtggggaataacatcttggggcaaagacacactggcaaaatctaccaggtaacccggtcatatgggaatgcggggcgcctagtcagccgcgcagacaggcacacagcgcggcaatcccgagcatctttctttcgtttgcccctgtccgccacctcatcaagtcaccgccacctcatcaagtcaccgtcacctcatcaagtcaccgtcactctgctttggcgatttctctactctctccagacccaggcagcgctccccaagccatgccccgaccccaggcgggattggggaccgccgcttcccgagcagcgccccacgagtccagctggctttgtcctgccgctgtccttccaggagcaagcgccccaggcgcgtgtgtctgcacaa

SEQ ID NO: 11817 - DNA, 30 bp, Homo sapiens
  chr18:59992372-59992402
  hyper
cgagcggggccccgcgtcccaccgcaaacc

SEQ ID NO: 11818 - DNA, 31 bp, Homo sapiens
  chr18:59992690-59992721
  hyper
cggcccgacgcctcctcgggagccccgggaa

SEQ ID NO: 11819 - DNA, 35 bp, Homo sapiens
  chr18:60189580-60189615
  hyper
cgcgcgtccccacctgcgcacggtgcctccagcct

SEQ ID NO: 11820 - DNA, 1009 bp, Homo sapiens
  chr18:60190636-60191645
  hyper
tctgcgccgccctagccgaggatgctgaggatgaagctgccgctgaagccaacgcaccccgcggagccgccgcccgaggcggaggagcccgaggcggacgcgcggccgggcgcgaaggcgccttcgcgccgccgccgcgactgccgccccccgccgccgccgccgccgcccgcgggcccgtcgcggggccctctgccgccgccgccgccgccccggggactcgggccgcctgttgctggtggagcggcggcgggggcgggtatgccgggcggcggcggggggccctcggcggcgctgcgcgagcaggagcgggtatacgagtggttcgggctggtgctgggctcggcgcagcgcctggagttcatgtgcgggctgctggacctgtgcaacccgctggagctgcgcttccttggctcgtgcctggaggacctggcgcgcaaggactaccactacctgcgcgactcggaggccaaggccaacggcctctcggacccggggccgctggccgacttccgagagcccgcggtgcgctcgcgcctcatcgtctacctggcgctgctgggctcggagaaccgggaggccgctggccgtctgcaccgcctgctaccccaggtggactcggtgctcaaaagcctgcgcgcggcccggggcgagggctcgcggggcggcgcggaggacgagcgcggcgaggacggcgacggcgagcaggacgccgagaaggacggctcaggcccggaaggcggcattgtggagccccgggtcggcggcgggcttggctccagggcccaggaggaactgctgctgctcttcaccatggcctcgctgcacccggctttctccttccaccagcgggtcaccctgagggaacacttggagaggctccgcgccgcgctccgcgggggccccgaggacgcggaggtggaggtagagccgtgcaagtttgccggccccagggcccaggtaaggcgcacggagcctccctggactcgcggtgcgatcgctgccccgg

SEQ ID NO: 11821 - DNA, 30 bp, Homo sapiens
  chr18:60194189-60194219
  hyper
gtactgggccgtggcgataaccctggtaaa

SEQ ID NO: 11822 - DNA, 1 bp, Homo sapiens
  chr18:60263660-60263661
  hyper
c

SEQ ID NO: 11823 - DNA, 30 bp, Homo sapiens
  chr18:60263885-60263915
  hyper
agaggatatcaccccgggcgcaccgccctc

SEQ ID NO: 11824 - DNA, 1213 bp, Homo sapiens
  chr18:60383091-60384304
  hyper
ccccgagcggcgggaacggcagcggcagcggggcgcgggaagaggccccaggcgaggcgccgccggggccgctgccgggcagagcggggggtgccgggcgcaggaggcggcgcggggcgccccagcccattgccggcggggctgcccccgtacccggggccggcggcggcgccaactccctcctgctgaggagagggcggctgaagaggaatctgtccgcggccgccgcggccgcctcctcgtcgtcgtcgtcctcggccgctgctgcctcgcactcccccggcgctgccggcctccccgcctcctgctcggcctcggcgtcgctgtgcacccggagcctggacaggaagacgctgcttctgaagcaccggcagacgctgcagctgcagccgtcggaccgggactgggtgaggcaccagctccagcgcggctgcgtgcacgtcttcgaccgccacatggcctcgacctacctgcgcccggtgctctgcacactggacaccacggccggcgaggtggccgcccgcctgctgcagctgggccacaaaggcggcggcgtggtgaaggtgctgggccaggggcccggagccgccgccgcccgggagcccgctgaaccgccccccgaggccggcccccggctggcgcccccggagccgcgggactcggaggtaccgcccgcgaggagcgcgccgggtgccttcggggggcctccgcgcgcgccccccgccgacctacccctgcccgtcggcggcccgggcgggtggtcgcgccgcgccagcccagcgccctcggactccagccccggcgagccgttcgttgggggccctgtctcttcgccccgcgccccacggcctgtggtctccgacaccgagagcttcagtctgagtcccagcgccgagagcgtgtctgaccggttggacccctacagcagcggcggcggctcctcgtcgtcgtcggaagagctcgaggccgacgcagcctcggccccgacgggggtcccgggccagccccgccgtcccggccaccccgcgcagcccctcccgcttccccagacggcttcctcgcctcagccgcagcagaaagccccgagggccattgacagcccgggcggggccgtccgcgaggggtcgtgcgaggagaaggcagcggcagccgtggccccgggaggcctccagtctacccccgggaggagcggggtgaccgcggagaaggcgcc

SEQ ID NO: 11825 - DNA, 126 bp, Homo sapiens
  chr18:60985621-60985747
  hyper
accacaggtggcaccgggctgagcgcaggccccgcggcggcgccgggggcagccggggtctgcagcggcgaggtcctggcgaccgggtcccgggatgcggctggatggggcgtgtgcccgggctgg

SEQ ID NO: 11826 - DNA, 30 bp, Homo sapiens
  chr18:60986896-60986926
  hyper
gcaaatgcattttccgaaaagctgctggat

SEQ ID NO: 11827 - DNA, 30 bp, Homo sapiens
  chr18:60988081-60988111
  hyper
taccggcgctcggccgccgggggaagaccc

SEQ ID NO: 11828 - DNA, 207 bp, Homo sapiens
  chr18:63417590-63417797
  hyper
gatcacggctttcacgacaggctaaggtgggtgttggaggggcagcttgaaaataccctcaaaactctcctccagctccgtgctttcagatgcaaatgcctcacggagagatggatgggctgcagcccctcctactttcacccctcttctttattttcctgcgaaggaatccatctgtacagatccgccaggcgggaggtggaggag

SEQ ID NO: 11829 - DNA, 30 bp, Homo sapiens
  chr18:63418568-63418598
  hyper
gacaggcttgtggacggaggcgggggcgtt

SEQ ID NO: 11830 - DNA, 420 bp, Homo sapiens
  chr18:67067488-67067908
  hyper
gccactttcagtcctagttaacgaaaacgcatgcataaatcaaccactcgggtcggtcggtcttctccactccttcagcagaggacgtcggcgcccggctgcctcgcccgcctgcctgtctctaggctgcgggaggattagacacatgcgcacgattggtctctttgtgtgcaccaggaagggtctggcgtcgatttacacttcctaacggggcagagacctggaacggccgcgagtgcttgggaataaaaatgtactgtaaacaaggccaatgaaataagtgtctcgctcccgctggccttccgcgttggaagtgtccccactgccctttccccgctgcacagcttgcgagtggagatttagagcccgggaatgaggcgccgtgtccttaggaatctcgcgcccggggagcgctgaggg

SEQ ID NO: 11831 - DNA, 783 bp, Homo sapiens
  chr18:67068592-67069375
  hyper
cggctggctgcctggggggggggcagggagaggtgacccgtgcgggtacagggcagagagggacccggcccttaggcggatggcccgcttgttgcttggccaggtgggggcccacacctgccggggggctccgcagacggacctggggactccaggagcgcctgagtccccatcctcgagtgcaccgggctgtcttcgaccgtgcggggaagtcagtagacgaaaggggttgtcagttccaacgaggaacgtgccttggaggaggtttctttgcggtgctatccacgatggtctgttctcaaaagtgtgcgcctttcgggtggaactgctgtgtgtggcgacgctcgcgtgtgtttagaatcaccattttctggtctccgcttcccaagctcaattcgaaattcccgtctgatgccctcccagcgccgcgcgtccctgccggctgtagtttagggcgccttcgccgtggccgagggcggctcccgcgccccgcaagtgctcccctacccggggacccgcgcccgcgtgcaggcaggtgtgtgccccgcgcccgcccgcggtcactgctccgtgacggcaaagttgatggagacctttccctattcttgagagatgcgctgcctggcttgggagggaaaccgtgtagaacccaagggttcaaaactattctagtgaccagacgaggcggtaggagggactcacgggaggcagcgggacaggaggggctgtcacctgggcgggagcagcctagacttgggacgcgagagagaggatggagggatg

SEQ ID NO: 11832 - DNA, 83 bp, Homo sapiens
  chr18:67956848-67956931
  hyper
cggggcgcggcgaggccgcaggcgcgagggcgggcctggggcgcggcgctgggactcggggacgcccccgccccaccgcgagg

SEQ ID NO: 11833 - DNA, 1392 bp, Homo sapiens
  chr18:70210418-70211810
  hyper
ttttgccccgtccccgctcctcccaggaaagcagacaggccatttcaataccagcccagagacacgcagagaagccgccccctcgccgcccacagcctcccattaactcttccagtattctttctaagaacagagaagttggctcttgataaatatccgctgtccgcagccccgatcctacatgatttcccttctctctctccacctcctccacccctcgatctggaccagggagagtcttcgttaaaatccacgcagaaggcgcttgcatgcggaggggagggcaggtcgggggtggttacctggaacatccatgctgggcgagctccgctgtccgcgaagttgctctgcttagagaaaatgaggcgagtgggagctgtcgggaggaggacacggagcgcgaccctgctcccagcgcgtggccaataaccgcgccgccccgccctgccgctttcccgcgccagcctgcgccgcttcaggggtgcaccacgccccgcgcgcccgcttaggcgccgcgcccgggaccgggaaccccgcgtctcgcccggctcagcgccccgcgctgtgcgcccaggtgcctccaacccctgggcttcgcgcccgcaccgctgcctggggcccctcgagctcccgcgctcagcgcgtccgcagcgcggctccctcgcgggtcccctcggccccgcagccccgccagtctccagagggcatagccgagcgctgccgcctccctaggactcggaaccttccctgctcccaagcccgccgcaccctccaacgccccggtcctgctcacccaaacgcccagagcaaaatactcccagacgtctcttttgaaaattagacacccttaaaagcaccggtcgcttctcttcttttagattctttcttttctttccccaattccctccaagtcttaatattgaatggcgtgaccactttcataatgacaggagcgaaaaaaacaataagttaaaaaaaaaaaaaagaagaagaagactgggatggctgggacgaagagagggaaaaaaaaagcttgagaatttgatgatttaggagctgtggttccagagtcccagttggggaactgtccggttcccgcagggctagaagaggggcctccggcccgggtctgtgtgtctgctcctctggacctcggactggtggagcggctggcgcttgcgcttatttattaaattgcggtgtccgcgctcgctcaaaggacccggggagacgcgctgggtttcccagctgcgcctggagctcggctgagggcgcaaacacggacgtggggcgccacctgcgggtgcccgggcctccctgccgcaggctgcggaccggcggactccgacagaagacgggggagtcctggccgcaaggctgaggtttgctgat

SEQ ID NO: 11834 - DNA, 178 bp, Homo sapiens
  chr18:70534137-70534315
  hyper
ctggccccactaggtatcatccgcgctctcccgctttccacctgcgccctcgcttgggccaatctctgccgcacgtgtccatccctgaactgcacgctatcctccacccccggggggttcctgcgcactgaaagaccgttctccggcaggttttgggatccggcgacggctgaccgcg

SEQ ID NO: 11835 - DNA, 304 bp, Homo sapiens
  chr18:70534427-70534731
  hyper
cgttcggccccgggaaaggggcgggagggctggctccgggagcgcacgggcgcggcggggagggtactcactgtgaagcacgctgcgcccatggatcatgtctgtgcgttacaccagaggctccgggctccactaattccatttagagacgggaagacttccagtggcggggggaggacagggtcgagaggtgttaaagacgcaaagcaagaaggaaataaaggggggccgagagggagaccgagaggaagggggagctccgagcccacgctgcagccagatccggatgagtccgtcctccgcc

SEQ ID NO: 11836 - DNA, 108 bp, Homo sapiens
  chr18:70535446-70535554
  hyper
cccggggctggtgcgcggcagaatggggccgcggcggcggcagcaaggacatcccagccgcgcggatctgggggaggggcggggagggggtgaggacccggctgggat

SEQ ID NO: 11837 - DNA, 365 bp, Homo sapiens
  chr18:70535575-70535940
  hyper
cgcagagagaggatgcagccgcaaatcccgagccggatcctcgtgccggacggaaggcgtggaagcgggaggggccttcgtgtgaaaatcccttgtggggtttggtgtttcactttttaaaggttagaccttgcgggctctctgcctcccaccccttcttttccatccgcgtaaaggaactgggcgccccctctccctccctccctggggcgcaggtttcgccgcggactccgcgctcagcttgggagacacggcaggggcgcgccccagggaaaggcggccgtaaaagtttcgcggttgagcactgggcctgatgtccagtccccccaccaaattactcctgcaaagacgcgggcttcttgcaa

SEQ ID NO: 11838 - DNA, 30 bp, Homo sapiens
  chr18:72124670-72124700
  hyper
agcaacaccccgcgcgccccgagcacccac

SEQ ID NO: 11839 - DNA, 31 bp, Homo sapiens
  chr18:72921090-72921121
  hyper
ctctgctcggctagggcgggcgggtccgccc

SEQ ID NO: 11840 - DNA, 30 bp, Homo sapiens
  chr18:72922720-72922750
  hyper
caggaaaagcagctcgatgtgtctgtctat

SEQ ID NO: 11841 - DNA, 24 bp, Homo sapiens
  chr18:73167904-73167928
  hyper
ttgatcggcccaagcgcaggagaa

SEQ ID NO: 11842 - DNA, 31 bp, Homo sapiens
  chr18:74204103-74204134
  hyper
tgcatcatccccatcccggtgggtacagaag

SEQ ID NO: 11843 - DNA, 35 bp, Homo sapiens
  chr18:74207201-74207236
  hyper
ccgaccgcgccagctgcgcccgggcgcgggggacg

SEQ ID NO: 11844 - DNA, 130 bp, Homo sapiens
  chr18:74843246-74843376
  hyper
gacttgagggtgaccgtccttaaactgtcccccggagcttcgccagataaaatgtccaaaacacacactggagttccctgacgtttccttcctctgaaaaactctctttccaggcggggcgttctgtggt

SEQ ID NO: 11845 - DNA, 507 bp, Homo sapiens
  chr18:74961448-74961955
  hyper
agcgtcgccagcctcgatttcctggggttattcctgggagagaggcgttctcacggacagccaccctggggaggaggaggaggaaaggcactaatggatgaggaggcccgcgcacccctccgcctcccaccccggcgcgccctggaacgccctggagcgcgcccggcttccctcgcccgcctggcccgcggcatccggcagccccgccttcagcccgccgggcaggtccgcactccgcagaggcgagcgcgctccggttccagccgggaggtgggcggcgacccatcccgctagaatccgtccagtctctgctcgcgcaccgtgacttctaaggggcgcggatttcagccgagctgttttcgcctctcagttgcagcagagaagcccctggcacccgactctatccaccaccaggaagcctcccaaaagagctctcgccctgtggacgactcggaatccctggaaaagccgggagggagtcggaggcgccagcccactggggaggtg

SEQ ID NO: 11846 - DNA, 152 bp, Homo sapiens
  chr18:74962018-74962170
  hyper
cgctgggcagtgcggggaagcgccgcgggaaggagcggctccgagcaacaggtgcagcacgcagcccctccgggagccagggaaaaccgccggcgaagatctggagcggtaaggcggagagaagggtctttccacctgcgcggctgcagccg

SEQ ID NO: 11847 - DNA, 134 bp, Homo sapiens
  chr18:74962209-74962343
  hyper
cggaggcgcccgggaaggggaccccagtgctctcgagatcaccgtcccttcccgagaaggtccagctccgggctcccgaacccaccctctctcagaaggtcccggcgcaaagacggtgccaccaggcacggcca

SEQ ID NO: 11848 - DNA, 30 bp, Homo sapiens
  chr18:74962779-74962809
  hyper
ggccaccgtgtacgcgctgcccacctgggt

SEQ ID NO: 11849 - DNA, 30 bp, Homo sapiens
  chr18:74963028-74963058
  hyper
cctcttccacccgcgcgccagcaaccagac

SEQ ID NO: 11850 - DNA, 196 bp, Homo sapiens
  chr18:74963349-74963545
  hyper
gtgccattggcttgcgcaagaaagttacttggagtctgagagatgctggggaaagtttgcagttcacttcgcatggtccagtagaaccagtttctcctcccctccccttcctcggccctgcggcccttcaacgcccccaggttgcctgggcggtaggtaggcgggcgctgccgcatccttcccggtacagcaaacc

SEQ ID NO: 11851 - DNA, 2 bp, Homo sapiens
  chr18:74963720-74963722
  hyper
cg

SEQ ID NO: 11852 - DNA, 160 bp, Homo sapiens
  chr18:75362844-75363004
  hyper
ctgcgtcaggaccctgcaggacgcgggccgaggctcccagctgccggccatgccctcggctcctctcccgacacgcgccagcactgccccctgctggcctcccgggagcactgcccgctgccgcggcgggaggagacccgggaagaagccgggaccgcga

SEQ ID NO: 11853 - DNA, 41 bp, Homo sapiens
  chr18:77156453-77156494
  hyper
agagaacgaggtcggccgggtctgtgcgcccagggaggggc

SEQ ID NO: 11854 - DNA, 43 bp, Homo sapiens
  chr18:77159979-77160022
  hyper
cttaaaaaaaaaattccgtcgccctgggcgcagccttaggtac

SEQ ID NO: 11855 - DNA, 68 bp, Homo sapiens
  chr18:77193449-77193517
  hyper
tctccatgtcaggacgtgcactcgccgatgaagtgtccacccaagatggcgacgggtgagcacgggca

SEQ ID NO: 11856 - DNA, 30 bp, Homo sapiens
  chr18:77439059-77439089
  hyper
tgctcatcagggttcgcctggggccactga

SEQ ID NO: 11857 - DNA, 59 bp, Homo sapiens
  chr18:77547988-77548047
  hyper
aggcgaaggccgccccgggagagcggggtcccgggagagcggggtcccggctgtggggg

SEQ ID NO: 11858 - DNA, 138 bp, Homo sapiens
  chr18:77548351-77548489
  hyper
ggcaggcccagctcggacgaggctcagctgccgcccccgttgcctttgtgggtttttctgcggaagccccttttcctcgggtggatgggaccctgcgcgtggaaccccgcacagcccccgctccgccgcgggccgcag

SEQ ID NO: 11859 - DNA, 30 bp, Homo sapiens
  chr18:77551522-77551552
  hyper
cctttcacagcacacggtgcagggctggac

SEQ ID NO: 11860 - DNA, 200 bp, Homo sapiens
  chr18:77558196-77558396
  hyper
tcgggccaagggggcgggggcggctcggggccgggcggggctggtgcctccccctcccgctcagcgcccagagtccgggagtcgaggggggcgtcgggccggaggcgctcgccggtctggccgcgccgcgcgcgtggatggaggtctcggccgcggatcgccccgtctattcgcgctggtcctgcgggagcccgggtgag

SEQ ID NO: 11861 - DNA, 579 bp, Homo sapiens
  chr18:77558416-77558995
  hyper
cgggtctcgggaaaacccgactctcccggcgcccgccccggttcggttgggggcgcacccggctcgcgcggagagcgggcggggtgtgggcgaatgctcggcgcgctgcgcctttcccggtcccccttctccccggagatgaacgccccactcccgctcggacacacggccgcacccctactctgcctcctccgaccagccggggcgcggcccgaattgggggagagaagacccagctcccgcagccgcgaattctgcaaacccggagcccatgcgccccgtcctccggcccggggagctcccagccttgcccgccgagcgcagcccgggtccggactgtggtcactggggacgagaagggtccctcctgcggggctcccgggttcggatggacggagggggcgtccggcaggtgaactgggcccgctccgcgtcccgaacgttcccctaaacccacaagtcccggagaccctggggcattctgcgatttcggagtgaccggtggagcccccgcccgcgcgcctggctcccggggtctccccacacagcaggggctgcggggaccccctctgtcacctc

SEQ ID NO: 11862 - DNA, 31 bp, Homo sapiens
  chr18:77710900-77710931
  hyper
agccagtccaggccctcggcctccatcgcag

SEQ ID NO: 11863 - DNA, 55 bp, Homo sapiens
  chr18:77724413-77724468
  hyper
gccggtggcgcccacgggccctcttgagtaaggcggctccgcccaggccgtcccg

SEQ ID NO: 11864 - DNA, 31 bp, Homo sapiens
  chr18:77867027-77867058
  hyper
ctttaggcaggggccccggggggcctgtggg

SEQ ID NO: 11865 - DNA, 952 bp, Homo sapiens
  chr18:78004713-78005665
  hyper
tgcagccttgaaggcgccttggccagggccatcccacggcccgggcccccagagcccccccacggccccgaatccgagcagcccctggccctcaactcgccccggaaaggccgccctcccctccaatgtgtggcgcgccccgatcgcctctcactcgtggaacaaaagagcagctcccgcggagcgggtccagagtctgcccggactgtccgatggccctcggccctctgagcgccgcggctgccgggctttgtgtccgcgcggggggcgggaaggacggccggggtccccagtgcgcgtcccgcggagcggcgcgcggcgcccgaactggaaagttgtcgccggcgcctgtcgcctccacgccgccccagtccccctccgcggggcgccccattcattagccaggagactgggcgcagggccgccggggcgggcggggggcttaccttgctcttgacttccactgcgctgcaatcgtagaatcgcaaggtctgagacttgtgaaaacttcggttcatggtttcggccccggtcagcctcgccgtcgccctcgctcctcaggggccgcagaaagactcccgggggcggcgcccccaggccccggccccggccccggcccgcgctcgcttggccggcgggctgctcccggtgctgcgggcccgagctgggctggccgcgcgcctcagggactccaggggccgcgcgcgggaggagcgcgggggacgccggcgcgcgccgccccacctcccggcgcccgcgcccgcgccccgccccgcccccgagccccggaggacccgcccatatccccgcccacagccccgccccgcgctccggaggacccgccacaccacgcccccacgctgcagctccgcgtcggatcgccagtgggtgcgcgccctcctgtccacaatcccagagcctggggaaaggagcatcgcggccagcccaaggc

SEQ ID NO: 11866 - DNA, 144 bp, Homo sapiens
  chr19:290868-291012
  hyper
gcgcccaccccaggggcggaggcgcggacgtcctgccggggtaacccgcggccgcccccacctcccgggcccgcgtgactcacctcccaggccaggcggggcgggatggaggcgcgcgcgcggcccctccgcacagacttcctg

SEQ ID NO: 11867 - DNA, 31 bp, Homo sapiens
  chr19:384495-384526
  hyper
gaggaggggctcggagcggtgccctccaggt

SEQ ID NO: 11868 - DNA, 31 bp, Homo sapiens
  chr19:452244-452275
  hyper
ttcctgcgtaggtgtgcgtttctccgtttca

SEQ ID NO: 11869 - DNA, 50 bp, Homo sapiens
  chr19:460220-460270
  hyper
ggccgctcgccgctctcggcctcgcccgcccagtccgagtggggggcggt

SEQ ID NO: 11870 - DNA, 30 bp, Homo sapiens
  chr19:460602-460632
  hyper
tgaagctgcccttccggatccactcggcgg

SEQ ID NO: 11871 - DNA, 92 bp, Homo sapiens
  chr19:460856-460948
  hyper
ccgcggcccaggaagccgcccggggccgcgaacttccactgcggcattcggggcagcaacgcgcagaaggtggtgggcgcctcgggctcggg

SEQ ID NO: 11872 - DNA, 68 bp, Homo sapiens
  chr19:461499-461567
  hyper
gtggggaaactgaggcgcggggaggggaaggggcgcggccgagggctcacagacgaagctcaaaccca

SEQ ID NO: 11873 - DNA, 54 bp, Homo sapiens
  chr19:461793-461847
  hyper
tctccgagaccggccgcaccttccctggcctcaagggtcggttccttctgcacc

SEQ ID NO: 11874 - DNA, 30 bp, Homo sapiens
  chr19:488550-488580
  hyper
ctaacgagcgccctcgtccctcgcgctgct

SEQ ID NO: 11875 - DNA, 41 bp, Homo sapiens
  chr19:507105-507146
  hyper
gggcaggtccagccccgcgcatgctccgtcaggcttctctg

SEQ ID NO: 11876 - DNA, 265 bp, Homo sapiens
  chr19:591380-591645
  hyper
cgtggtggtcgcgggcgtgtgcgcctccggtgggtttattttggtgggacgtgtggtttgtgtgtgttgggaccaggtggcgggcgtgcgcgtgtacgcccggggccggtgtgcaccggtgggcagtagtgtgagccgcaggcaggtctcacacacgcgaccatggagggatgcgtgtgtgtttgtgtatccacgagtggggtgtgaggtggggtgtggagggtgcaggtggagggtgtaggtggggcccgccgggctagcgagg

SEQ ID NO: 11877 - DNA, 14 bp, Homo sapiens
  chr19:591765-591779
  hyper
ggaccctggacccc

SEQ ID NO: 11878 - DNA, 524 bp, Homo sapiens
  chr19:603475-603999
  hyper
gcccggggctggtcccgcaggtgccccggggaggcaccggcctgaggtgtgggcaccctcgcccccaggttctactgggacttcaccatgctgctgttcatggtgggaaacctcatcatcatcccagtgggcatcaccttcttcaaggatgagaccactgccccgtggatcgtgttcaacgtggtctcggacaccttcttcctcatggacctggtgttgaacttccgcaccggcattgtgatcgaggacaacacggagatcatcctggaccccgagaagatcaagaagaagtatctgcgcacgtggttcgtggtggacttcgtgtcctccatccccgtggactacatcttccttatcgtggagaagggcattgactccgaggtctacaagacggcacgcgccctgcgcatcgtgcgcttcaccaagatcctcagcctcctgcggctgctgcgcctctcacgcctgatccgctacatccatcagtgggaggaggtgaggtggggcgggggcggggccaaggcagc

SEQ ID NO: 11879 - DNA, 30 bp, Homo sapiens
  chr19:661732-661762
  hyper
ttggacttctcttacgggtcaaagcgtagc

SEQ ID NO: 11880 - DNA, 31 bp, Homo sapiens
  chr19:663759-663790
  hyper
gcaggcattccctcagcgctgcggaatacag

SEQ ID NO: 11881 - DNA, 30 bp, Homo sapiens
  chr19:709310-709340
  hyper
gactcgggctgggccgcgcctgccgggagg

SEQ ID NO: 11882 - DNA, 63 bp, Homo sapiens
  chr19:813718-813781
  hyper
gggcgcgccctccagccgccctgggggccccagctcgtcggtgctcaccgacttattctgctg

SEQ ID NO: 11883 - DNA, 88 bp, Homo sapiens
  chr19:814461-814549
  hyper
aggaagccggcatacacgtccacagggtggctgcggtactgcgtgatctgcgtgagcccgcatacgcccgcggcgatggcaaaggcga

SEQ ID NO: 11884 - DNA, 778 bp, Homo sapiens
  chr19:941803-942581
  hyper
tgtgtcaggggtggctgcaagcgtatgtgtgtgtgcacgtcgaggctggagagtgtgtgtccaaaagcgtgcctgcttgggctcgccacgtgtgcgcacgtgtgcccgtgacagacgaccttcctgtgtgcctgagcatttgggagcctcgtgctggaccctgaagcatgaggtcgcggtggggcctattaaccattagacccccggggctgctagagagtggcgctgtctgtcttggtcagcagcgcgcgtcggccgcggggcacagatcagcgcctcccctgcccgccatgggctctggagccagcctagccgatgatggagccccagtggccaccgagctatggacagggccgctgggggtgcacccccaccctctccgaccccgaggagctgccggcagagccctgtccactcttgcctcagtttccctgctggacacaaagggctgaagtccaggtcccttcgatggcccaaattacctgactgtcgatcctgactggggcggtggcgacatggcccccgcagctgcccggcggtggcacccaggggcgtcacccacgagggacgcttgactcaaggtcctctccactggccgccgggagccgggccgggagccgctgcggtgccgacctggtgggtggcacacggggggcgggtgcggaccgcctcttctccgctctgccggctgcacatggccagaggacaattgggggtcacagggttaaacgctgactaatctggccattgaaggcccaagcgccgggatatgcagcct

SEQ ID NO: 11885 - DNA, 30 bp, Homo sapiens
  chr19:942806-942836
  hyper
gagcaagtaagaacccgccttccgggagga

SEQ ID NO: 11886 - DNA, 121 bp, Homo sapiens
  chr19:1173280-1173401
  hyper
tcgggccatctcagcccgctaccctccctcccgcctgtccctggaagccgggtttgaatgcgacccgcactcccacccccaacacgctctgcagactccgcccagacggccccggggtcac

SEQ ID NO: 11887 - DNA, 31 bp, Homo sapiens
  chr19:1253419-1253450
  hyper
acccccccccccatcccggccactggggaga

SEQ ID NO: 11888 - DNA, 68 bp, Homo sapiens
  chr19:1260498-1260566
  hyper
ctgcagggtggggggcgcgtcccctgcactccaggacccgcccctcgggatgccgacccccaccccag

SEQ ID NO: 11889 - DNA, 30 bp, Homo sapiens
  chr19:1438373-1438403
  hyper
gataactgcgcaggcgcggaccaaagcgat

SEQ ID NO: 11890 - DNA, 30 bp, Homo sapiens
  chr19:1438780-1438810
  hyper
tgacgcccgatccgcgcccgcacaggcaga

SEQ ID NO: 11891 - DNA, 30 bp, Homo sapiens
  chr19:1449907-1449937
  hyper
ggaatcttggtcctcggggcacccccttcc

SEQ ID NO: 11892 - DNA, 170 bp, Homo sapiens
  chr19:1455092-1455262
  hyper
aataaacacacacggcgccgccctctgagcccgcccccgctgacttgctccccaggtgtttcctgctgaatgagattgagaaggaggagaaggagaagctctggtactactctcagctgcagggcctgtccaagcgcctggacgagctgccgcacgtggagacggtgagc

SEQ ID NO: 11893 - DNA, 30 bp, Homo sapiens
  chr19:1456011-1456041
  hyper
aggcggggtcagagccgggggcggggtcag

SEQ ID NO: 11894 - DNA, 125 bp, Homo sapiens
  chr19:1469945-1470070
  hyper
ggggcccccgccggcggccagctctccctcctcggcagcgacgtggacggtcccagcctcgccaaggctcccatctccgcacccttcgtgcacgagggcctgggggtcgccgtggggggcttccc

SEQ ID NO: 11895 - DNA, 30 bp, Homo sapiens
  chr19:1470772-1470802
  hyper
cagctgtgggagtgcgggtgggggtgtggc

SEQ ID NO: 11896 - DNA, 30 bp, Homo sapiens
  chr19:1471522-1471552
  hyper
ggactcgcaggggccgggtctccgtgactg

SEQ ID NO: 11897 - DNA, 167 bp, Homo sapiens
  chr19:1491271-1491438
  hyper
gacggcctgaggcagcgcgtggagcacttcctggagcaaaggaacctggtcaccgaagtgctgggggcgctggaggccaagaccggggtggagaagcggtatctggctgcaggtgagccgtcggcgctagcccgtttcgccgacgggcacaccgaggccatgggcct

SEQ ID NO: 11898 - DNA, 129 bp, Homo sapiens
  chr19:1546216-1546345
  hyper
gtgcgcccgtttgtgcgcgggggaagctcgcagccacgagcgaagggacctgtgtctccactttggacaaatctcccgggaatttcccgggggttcagagctccgatgtcggggcggggaggggcaggg

SEQ ID NO: 11899 - DNA, 453 bp, Homo sapiens
  chr19:1567167-1567620
  hyper
ccgagggcctgggctgcggcgcggctccccggagcctttccgggctggaggcggcccagacaaaggcggcggcggggccggagcgcgcaggggaggagcgcgggctgcgcccaactttctcccgcggcggctgcaggacaaaggcgcaaaggcagcggccgaggccggagcccacgcggggcgtgtccggtgcggggcgtccggcgcgggctgggctgggctcgggcgacccccttccccggggcggacggtgcggggacccccaggacagcaacccccgacgagggccactcaccctggcgacccacgatctcggcgacgtgctcggagctgggcaccgggacgcactcggtcatgttgacgcttttcttgcggctgccgatcacgctcatctggtcggccagcagcgtcgggggccccagggccgcggggtggggcgcgaagcccgcgaac

SEQ ID NO: 11900 - DNA, 210 bp, Homo sapiens
  chr19:1748637-1748847
  hyper
cgcaaaccaacccaccgcgggccgccgagccccgctccgggatccgccggctgcctccatcccagaagagtgcgcagagaattaaatctagatatttacatgtttaatggctaaaggagcctgtcttctggcagggcagggagggcgctcaggtggtttaactcagcgccgggatcccgctcagctgcgggggccgcgaaccccgccgct

SEQ ID NO: 11901 - DNA, 204 bp, Homo sapiens
  chr19:1753989-1754193
  hyper
ccctgcagcacctgccgccgctcgcggccgtggccgacaagttccaccagcacgcggcggccgcggccgtggccggggcgcacggcggccatccccacgcgcacccgcacccggcggccgcgccgcccccgccacccccgccgcagcgtctggcggccagcgtgagcggcagcttcaccctcatgcgcgacgagcgggcggcgc

SEQ ID NO: 11902 - DNA, 1129 bp, Homo sapiens
  chr19:1754224-1755353
  hyper
cggcaaggagctgcccgccatggggtcgccgctgtcgccgctgcccaacgcgctgccgcccgcgctgcacggcgccccgcagcccccgccgccgccaccacccccgccgctggccgcctacggcccgccaggccacctggctggggacaagctgctgccgcccgccgccttcgagccgcacgccgcgctgctgggacgcgcggaggacgcactggcccgcgggctgcccggaggcggcggcggcacaggcagcggcggagcgggcagcgggagcgccgcggggctgctggcgccgctgggcgggctggcggcggccggggcgcacgggccgcacgggggaggcggcggccccggcgggagcggcggcggccccagcgcgggcgcagcggccgaggagatcaacaccaaggaggtggcgcagcgcatcacggcggagctgaagcgctacagcatcccgcaggcaatcttcgcgcagcggatcctgtgtcgctctcagggcacgctctccgacctgctgcgcaaccccaagccgtggagcaagctcaaatccggccgcgagaccttccgcaggatgtggaagtggctgcaggagccagagttccagcgcatgtcggcgctgcgcttggcaggtaggagcgtggcgcgcagggccagaccctgggggcgccggctctggactcccgagcacctagcggggcggcggccgatgcccggggccagcgccccaagccccgcccgtgcgccccggcagcccgggaccccctatcaggaagctagaccgcgatccgcgccgctgcccgtttgtaccgttgccaaaagggagaaagggattgtgccgcctccccgccccccggtcgccgcttctgcccctttcgggagcgcgtaggggttctctagtccttgttagactgctgggaggctccgagcctctccccaagcagccctcagggaagctcattgtgtgtgtgcgtgtgtgtgtgtgagcgcgcgcctgttggggggagctgtgtccccgaacgagctgctgttgtcggctaaggtgccactcccctcctccagagtgggtggagaggggctgttgagcccccagccccgggccacagagctccgagacgttgcggcgggcgcc

SEQ ID NO: 11903 - DNA, 30 bp, Homo sapiens
  chr19:1757457-1757487
  hyper
agctcctggcaccccgagcctcccgcaggg

SEQ ID NO: 11904 - DNA, 522 bp, Homo sapiens
  chr19:1761983-1762505
  hyper
cgtgcccgggtcacaagtgtagacgcacccggagacacgtgtgtagacgcctccgttcacactgggacgagtgcagactgacccaggacccccatccgccctctggcagtcttgagccagcaactcccctaagtggggtgcggggacatctggaagacgccccatctccccctggacgcagtggctgcgccatctggagaccctcgtgctggctgctgggggtcctgcgtgccttccgcgcgcccccagctgcgcccgccagccctccaaccctcctgccctcctgccctcctgccctcctctctgggagtcgggacagaagctgctgggctctcctccctggagctggggctttgggaaggtcgagtagaccctcagtgagtgggatgcgcgagttggggacgctagttgcggggcagcaggggtccacgcatttccaagcgccctttcccgtccaaggacctgctggggggatgactgtgcctcagtttccatcacccagcaaacgccgtcccgcagcac

SEQ ID NO: 11905 - DNA, 193 bp, Homo sapiens
  chr19:1762627-1762820
  hyper
ggcgccaggagacccgggacccgggaccacgcgcccgcggccttggagcctcagggtcactggtgcgggctccgcaggaaagcgcagcccccagcaggcacccaccatcccacccccgcatcccaccccaggggaaaccgcgccgcaccaggcgcgagtgttcttcttccttgtctggcgccccagaaccgcg

SEQ ID NO: 11906 - DNA, 179 bp, Homo sapiens
  chr19:1766123-1766302
  hyper
ggtttggatgtgcaaggctgccgacccccatcgtggttgagcgcccgtgcaggcgccacccacccacccacagcacctcgctcagacttcgccctccaccccgccgggacatttgggaagcctcaggcagccccacgcgggcacacccgatggtggacggaggctggcaccctcagccc

SEQ ID NO: 11907 - DNA, 247 bp, Homo sapiens
  chr19:1769648-1769895
  hyper
tgcacagagggggcatccaggcggcccccctactccaactcacacctctgtcagcggctgtgggggatgggagcaatgacaaagctgctcgcggtaaacagctccgactggatcgatctgggctgtgaggagctgtaattagattgaacgccgggaaggggggcagcagagcctctttttgctgcaatcgacaaaacgggaagttttttcagactctgcctggcccggcccctcccccagcctctgc

SEQ ID NO: 11908 - DNA, 312 bp, Homo sapiens
  chr19:1775734-1776046
  hyper
ttcaggacgcccagagggcctcgagaaaaaccagggctcactgtgttgtcccctaaagcgggtcaagaagcacatactagaaatataaaccgggtatttaaaaatggaattttaaagaataacccctcctccgtcagatcccctgccccaccgagggaggtagtagaaaacttccttcctccccacccgccccggccccctccccagggacctcagccctttccaaagtcgccaaaaacccacatcaagccggatccttacggtcccccaccctctccaaaaccaaccccacccgctggcaggacggcccct

SEQ ID NO: 11909 - DNA, 825 bp, Homo sapiens
  chr19:1776192-1777017
  hyper
cggggggctcccacgtgcgggtaaattccagacgcccccgccccgccccgtctgttgagttcactttacctttaggcaccttcgtggagcgcaaggaaggacgcagctccggacacgggagaccacgcccaggctcccaggagaaggggacccggccggagaaggcgccgctggggccgcccggaggagcccctctgcacgggcccgtggagacgcttcctgcgtggaaccttctggaatccaccgcccccctttccgcccgcgtcagggtctgaactgggcttgcaggggggcagcggggttgaacgtggtgttggtttccactctcgccaaagagagaagacgccgaggaaggtggattccgcttgctccattttttgccaaaaatatttacaaatgggaagggtcggaaatgaagatgagcgcccccctcccaccccgcgctctcccccgctcctctcatctggtctgggtgacctccgagactggccggccgcgggatcccaggagcccgcctcctccgggggttcaagatccgagtctagaaggaacctcctccctgaaatccccccactcatcggctgcctcccagggaggaggcggcccccctaccccccttgaaaatgcaaaagacatttctagtgaaatgcccctcccctcccccaggtaaaggctacctcactcaagctcatgtctgtgattggaaaatcacgcctgataccaaagatttctcccaaggatttgtgctggatgacaggattccctggcctgggacccggctcggggccccgcctgccgagtgccaccccttcccgaacctgagag

SEQ ID NO: 11910 - DNA, 31 bp, Homo sapiens
  chr19:1826719-1826750
  hyper
gctcctgagatttcaacgggctcagggacca

SEQ ID NO: 11911 - DNA, 571 bp, Homo sapiens
  chr19:1856946-1857517
  hyper
gccggggtggggggggcgaccggggcaggggcgcgcagccgctgggaacacagctgccgcacgtagctcggcggcggcggcggggacatccgcagccccagccggccccgctcacgtggtcccactcccgccggggccagggggcccgggccagggtcgcctctccggcctgggtgcctgccagccccgccccgcgcttggagactgaggcgcgcacatgcgcacgtgggtggcggggcagggggtgcacgggctacccacccacgctgcgctgggcgaagcgcctctgcgaaatgccaggccctgcctcgcacacaatccactcgcagggaggagggtggggtgaacttgtgggggcccagagcgcgctgctcctagccagccgggcccccaggtgcacagccacccagctgctccgcgctacctggccgagacgcagcgccctgaggatgcggtgggtggggacaacgcgggagggcagtgtgggcggggccgcggtggacttgaccctctgactcaggctgggcccgggtgagctcaggacagcctcggaaacaggcaggctcagaaa

SEQ ID NO: 11912 - DNA, 726 bp, Homo sapiens
  chr19:1978312-1979038
  hyper
tctatacaaatgaatacgtggctatcaaattggtgagtcggcccctccaccccacccccgctgacgtgccccccagggatttcagggcagcgacccggtcccctggtgactcgctcttgtgcccccaggagccgatcaagtcccgggccccgcagctgcacctggagtaccggttctacaagcagctcagcgccacaggtaccgggcggcccgcgggtggggcgggggctgcgcaggggcagggagggggctgccgccgcacgcccgtgcgtctgtcctccgccgcagagggcgtccctcaggtctactacttcggtccgtgcgggaagtacaacgccatggtgctggagctgctggggcccagcctggaggacctgttcgacctgtgcgaccggaccttcacgctcaagacggtgctgatgatcgccatccagctggtgcgcggcgggcggggcggggcggggctcggagggaagagggtggccctggaggggagcgcgtgggacggggaggggcccggccgacaccgccgtgcccccctgcagatcacgcgcatggagtatgtgcacaccaagagcctaatctaccgggacgtgaagcccgagaacttcctggtgggccgcccggggaccaagcggcagcatgccatccacatcatcgacttcgggctggccaaggagtacatcgaccccgagaccaagaagcacatcccgtaccgcgagcaca

SEQ ID NO: 11913 - DNA, 578 bp, Homo sapiens
  chr19:2165095-2165673
  hyper
gtggcccctgaggaggcggggcgcgtgcgtccgcgcttgggaccctctggccacgctccgggctgggcagggcgcgttttcggggaaaagtgaagcaggcgctgtcagcgagcgtgtccggggcgcgagttttggggggcgcgtctgcagggcccggccgggcatccccgcgcgccctgggactcccgcgcgcgctgggcttgtgtcagtttttggaaacgtgctcgctgggggcggggtcaggacgcggagagcgctggggagcccgggctggctcactgccccgggtcggtgcgagtggatgggagagggagcgcagcttccagcctggccgcacgtcccgcgcgcggggctggcggggtagggccctggggctctggcttctctggttgggcagctccgggtgtgcgcctgggcggcctgagccgggatcccgccaggagaggtcctaggacaaaaactgaaagcagaggccgcgcttcagcgccccgaccggtttcctccctcgaaagttcaaactccagaacccttccagcctccacttctctctgttgggctctcatcgttttaggtggtag

SEQ ID NO: 11914 - DNA, 370 bp, Homo sapiens
  chr19:2168976-2169346
  hyper
ttattggttgtttgctcggaaagaaccttcaaaggccacagaacgggaccttccccctggtgactcacaggctgtgggcgggcaggggcggcctccactggccaagggtccggactctctgactctcattaatgagtgagtacatgttccgcctgacagcctggcctggagcccggctgtgggcggcggtgagtgggcagccagcagtgagtagcagccggggcggggtgagctgtccccaccgtgactcagaaggtattttctgctgctgacctctgagcttgagtgtcctgagtaatcccagctcccccggaggcagattaacctttaggcagctttgtgtgagtaaaggagtcgctttaaataggaa

SEQ ID NO: 11915 - DNA, 36 bp, Homo sapiens
  chr19:2250669-2250705
  hyper
acacccgctacctggtgttagcggtggaccgccctg

SEQ ID NO: 11916 - DNA, 173 bp, Homo sapiens
  chr19:2251061-2251234
  hyper
gtggccgctctcaactcctccaattgcgggttccaggccatccgcggaactcgaggagtcgccacccagcgcagaccccttcctggagacgctcacgcgcctggtgcgggcgctgcgggtccccccggcccgggcctccgcgccgcgcctggccctggatccggacgcgctgg

SEQ ID NO: 11917 - DNA, 339 bp, Homo sapiens
  chr19:2251610-2251949
  hyper
gggtcgggcacagcgcagcgcgggggccaccgccgccgacgggccgtgcgcgctgcgcgagctcagcgtagacctccgcgccgagcgctccgtactcatccccgagacctaccaggccaacaattgccagggcgtgtgcggctggcctcagtccgaccgcaacccgcgctacggcaaccacgtggtgctgctgctgaagatgcaggtccgtggggccgccctggcgcgcccaccctgctgcgtgcccaccgcctacgcgggcaagctgctcatcagcctgtcggaggagcgcatcagcgcgcaccacgtgcccaacatggtggccaccgagtgtggctg

SEQ ID NO: 11918 - DNA, 1138 bp, Homo sapiens
  chr19:2252588-2253726
  hyper
cggcttcccctctctccgaggcctctccttgggtccccggtctgcgagggtcacacggtcctcccggacggcctctccggtggcctcgccgggctcctcttcgtcgttctctgcagcctcccgactcccgggaatcttgggtctgacctctgcctcggcccggggcgcaggcggcgctgatggaggcgcctgggcctcgaacttaggctgcaagacagagtggggtcctggggtaagcgcccaccttccccccggcccgggctccttctttccttggggatgaaggtcccaatgcccgcggtcagtggaaggaagctcttaccaggggcgacgatggctccctcggggctgagcttggcgggacccagggctcgggcacacgtgcttggagtgctgcctccccagggacggcgtctgcagcgacagggtcgggacccgagtcagctgggccgaggcacggtccacactgtccatccctccctcacccctagagcccccctccctggacagttggagtggggctcccccggtacggctgagactaaggatgcccccgagccgtgggaagggactccgggactccgctgccgcggcgccccttctccgaacctcgctctttcaattggtcattcttccccccgaccacgggctgtaggaggcccctagcaagggaggggtcgcaggagtgcccccggggggcgctcacgagctgagcggtccccagagagggcgcaggggaaaggcggcagaacgctacgaggcaggaggggttgcacaaggttcatccggaagccagaacctactcgcggcgaggggaatgggccccgcaaaaggtccacaccgggtgagaggggcgcgcaaggcccgtcacttaaggggagatgcacaaaccaactttgggggcgtgcaagacccagccctggagaggaggctcccagaccccaccctggcggcacagcgcctttccttggaggaataggcgcacaggtggaccccagcctcgccccacctctggggagcctgcgctcaccgcggcacagctggaaagccgagcccagcagcgccaccagcgaggcgagcaccaggcacttgttgagcgacaggtctccccagggcagctcctcgctcagggccgggg

SEQ ID NO: 11919 - DNA, 509 bp, Homo sapiens
  chr19:2289762-2290271
  hyper
accatagcagggacaggaagacgggttgaaatctttagaaaacgcttgagaaactgcaaaaaagacgcatgctgatgaaaaacagtcctgcggttgggcgtctacaaaaaaaggggaagttctgcctggggagcgccgtgcagccgtccccttcccctccgggaaatgcataggtggacacgcgagcggccggcccgcgggggaggggaggggagggtccgccctggggacccctcagatcatcttcatgttgaacttgcgcgcgcctccctggcccgccgcggcggccggcccatccaccttgcggaaggagtactccaccgagaagttgtttttgtgctgcccgcggccgcggctccacacgaacagcagcacgaagcagaagaggaccacgcccaggaaggtgatgcagcccatggcggtggacaccaggatggtggtgaggtcgagcggcgcgcgcagggccgccagcgtctcgttgtgggcctcgcccggggtccggttggcgg

SEQ ID NO: 11920 - DNA, 237 bp, Homo sapiens
  chr19:2290630-2290867
  hyper
ggggtggcgcaggccggcagccgcccgtcgaagttgagggtcttgcgacgctgcacgatccacagcaggcgacagtcgcaggccagcgggttcccgtccacgcgcagcgtctctagcgtgttcaccgagtggaaggtgctctcctccaacgtggagagcaggttgttggagaggttgagcaggcggatctggcgcaggcccaggaaggcctgcggctccaccacagccagcagggcc

SEQ ID NO: 11921 - DNA, 30 bp, Homo sapiens
  chr19:2302768-2302798
  hyper
tttggcaggggggccgggccggcggcaggg

SEQ ID NO: 11922 - DNA, 31 bp, Homo sapiens
  chr19:2329160-2329191
  hyper
ttaggcggaacgggcacggtgctaagctaac

SEQ ID NO: 11923 - DNA, 30 bp, Homo sapiens
  chr19:2426859-2426889
  hyper
ccgggcaggcagtacgtacatgcggacccc

SEQ ID NO: 11924 - DNA, 31 bp, Homo sapiens
  chr19:2431505-2431536
  hyper
gaggctgccccccagccgcaagtgggcacag

SEQ ID NO: 11925 - DNA, 53 bp, Homo sapiens
  chr19:2462944-2462997
  hyper
cgcgggagagaaatcccggaccctgggactatgcagcccgtgagggccccagt

SEQ ID NO: 11926 - DNA, 30 bp, Homo sapiens
  chr19:2474999-2475029
  hyper
gcctggcgcacacgcgtggctccaacacga

SEQ ID NO: 11927 - DNA, 349 bp, Homo sapiens
  chr19:2488499-2488848
  hyper
gcctgcgctcacaggcgtgtgcgtggggaagtgtttgggccgccgtgtacacagcaggcacgccataaacgcttcttggatggctccatgcgagggaagggagggagggcagagttcaggccctacagggaggaaaagggaggggcggaggcctggctttaggtttgaatctccgcggcttactagctccagcagctcagcaaaagcgtgactcagtttccctcgtccataaaagggaaagccgaatcgccctcccacgtgtcgaggtgaaactagacagtgcactaaggcacttagcaaaacgcgctgccttgagaacccttattacgccttccttccttccacctca

SEQ ID NO: 11928 - DNA, 252 bp, Homo sapiens
  chr19:2579150-2579402
  hyper
gatgggtgcccccggccgggcaggtccagacgccaaggtctgcacaggggtcacccggacacacctgactcggaccatgtggctaagtttgttttgaaatttcactgccccagcgtaacccagagtccaggccacgcccagcacggctggctcccgtccgggtctctgtgtcctgcagctcagggtggccagggcgggcgggcaggagggcaggcacctggcacccacccagacctgcgccctggccatcag

SEQ ID NO: 11929 - DNA, 34 bp, Homo sapiens
  chr19:2579725-2579759
  hyper
ttgccaaacgtgcagacgacgggcctgacatccc

SEQ ID NO: 11930 - DNA, 30 bp, Homo sapiens
  chr19:2611090-2611120
  hyper
ggaagtgggcccctcgcaccgggtgcggcg

SEQ ID NO: 11931 - DNA, 30 bp, Homo sapiens
  chr19:2740078-2740108
  hyper
gcctccccgagacccgctggcagaactttc

SEQ ID NO: 11932 - DNA, 30 bp, Homo sapiens
  chr19:2783445-2783475
  hyper
gacctaatggaggccggaaatcgggtctgg

SEQ ID NO: 11933 - DNA, 836 bp, Homo sapiens
  chr19:2944613-2945449
  hyper
cccagaaactacccctcgagcccctgaccgcttttgctgtcaccccagactgcccccagccctacccctcggccgctgtgaccacgtccccggggcccaggcgctcgtcgtgcgccgccccgcgcgtccctcagctttctccggctgcgaactcgggcggaagccggttcctgccgccccacctcgccctgggcccgggctcggctcccgcccggcactcaccatgtcccgcccgctcctgggctctccagggttagcgccccgcggtccagcgaccggcgcaggtgagcacgacaggacacctgagccgctcggggtaggcggggaagcgcgcaaggcagaggggaactcggcttaccgtcctcggggtctgattggacagatctcgggaagtggagactctgattggacagtgctgtcgactccgcacccctgattggagaattctccagtccgtccccctagcgcccttgattgggcagggctccgcttcggattaacgtctctgattggacagttccctaggccccgcccctgcctgtcctgattggataattctctcctcagtgacgggctcgtcgagaacacgcgtggctgaccctctagccgggcagccgcggatctgggagaactcactccagtccagggagggcgcggcgtcctcctccctgactgcacggcaactccagactcagtttcccctcggagcggcccctcgtgcggggaggagaggaagggcacggagtcccatggggcggagtcctgcgtgggggcgggacccgcgtgcgtgacgtcaccgtgctgtcccgcgtgggcgcggacgcctggggtccaga

SEQ ID NO: 11934 - DNA, 206 bp, Homo sapiens
  chr19:2950448-2950654
  hyper
cgccattaaacgagcccgccccctgcactttgaactctgcccccatcctttgacccaaacccccctacgccccggcatcggagtccccttgcttggcctctgccacgaagatacggggccaggtccagcagtacaaggaggagaaaccgctctcacgggaggcgctgcggccactgagggagacggccgccgcgggtcacagacgg

SEQ ID NO: 11935 - DNA, 83 bp, Homo sapiens
  chr19:2950919-2951002
  hyper
gggacgaggttgggggcgtggtctttcgcgcaatcctccaacgcccaattaccctgataaacaataaacgctaaaataagtaa

SEQ ID NO: 11936 - DNA, 31 bp, Homo sapiens
  chr19:2977482-2977513
  hyper
cctgggcgggacggggcggggacaaggcggg

SEQ ID NO: 11937 - DNA, 122 bp, Homo sapiens
  chr19:3061486-3061608
  hyper
aggcagtgggggtgcgttttaaggcccgccctagatggggggcagggtgcgccctctaccgccctccaaagcgccgggagggagtgcacatccgaggggggtagaaacgcgccctagggagc

SEQ ID NO: 11938 - DNA, 88 bp, Homo sapiens
  chr19:3094303-3094391
  hyper
ggcccctcccattggccgcaccgtctgcccgtcgcgggctgcgctcccagcctgctaggttgtccggcgctgtcgctcggttgcggcg

SEQ ID NO: 11939 - DNA, 174 bp, Homo sapiens
  chr19:3094776-3094950
  hyper
tgctgctcggtgagtgcggcccccgggcctgccggctgcgggccctgccctgcctgtgcctgccctgcctgtccgggtcgggccgggaccctccggggtcagccctgcctgtgccgtccgggtcgcgagaccctccggggtcagccctgcctgtgccttccctgcctgtccggg

SEQ ID NO: 11940 - DNA, 31 bp, Homo sapiens
  chr19:3361306-3361337
  hyper
agcacaggggttaggacgggcccgggaggtg

SEQ ID NO: 11941 - DNA, 55 bp, Homo sapiens
  chr19:3367361-3367416
  hyper
ttctggattctggagccgccgccgggaggagcgggaggcccggcgctccgggtct

SEQ ID NO: 11942 - DNA, 30 bp, Homo sapiens
  chr19:3506424-3506454
  hyper
aggagaggcggggtcggcgggagccagcga

SEQ ID NO: 11943 - DNA, 36 bp, Homo sapiens
  chr19:3721530-3721566
  hyper
ttgctggcagccttgtcgggccgggctctggccgcg

SEQ ID NO: 11944 - DNA, 345 bp, Homo sapiens
  chr19:3785490-3785835
  hyper
tccctgcctcccccatctccccgaccgctagtggctgggaagtgggcggtgctggggggtgagtctcggcccctccaagatgcgcctcccatgaaatcctccagtcccacgtgtactcacacgcatacggatgcatgcacacgcacagaaacacacagggctcggacacagctgcgcgcagacaagcaaaggaccacgtccacgtggaaacaggtgtgcgcacacgtccccgcgcatccgcgcgcacaagcgctccacacctgggaacgtgcgcacctgtcccccgcccccggcacacacacagccgccccacactggaacacctgggcgccagcgccgggccac

SEQ ID NO: 11945 - DNA, 179 bp, Homo sapiens
  chr19:3785864-3786043
  hyper
cgcacacgcttttcggccacacgcgcacagccctccacgtggacgcgcgggtacacacgcccggggctcgtagccgcgcacacccgcacccaggaaaccccagccaccaccacgcggggtccgatcgcctctgagcaccctccgccccagccgcgcacccgctgcgcgcccgggacgcg

SEQ ID NO: 11946 - DNA, 16 bp, Homo sapiens
  chr19:3786583-3786599
  hyper
gcgcggcggggaccgg

SEQ ID NO: 11947 - DNA, 7 bp, Homo sapiens
  chr19:3822134-3822141
  hyper
cgttgaa

SEQ ID NO: 11948 - DNA, 30 bp, Homo sapiens
  chr19:3880591-3880621
  hyper
gggctgtgcttttccgtcaggccgccaccc

SEQ ID NO: 11949 - DNA, 30 bp, Homo sapiens
  chr19:3970870-3970900
  hyper
ccgagccctttccccggcccggtcacccag

SEQ ID NO: 11950 - DNA, 1665 bp, Homo sapiens
  chr19:4053793-4055458
  hyper
atgtgtaggtgacgtgcatgtgtctgtgcgtgtacgtgtctgtgtgcacgtgcgtgtatgtgtgcgtctgcgtgcatgtgtgcgtgcggtgcagggagagaggcgggaggggtcgtgagcggcggatgctggggcagagagcaggacggcgcctcccccgcggcgggcagctcacctggtgaagcggaccttgcagatgttgcactcgtagggcttctcgcccgtgtgggtgcggatgtgtcgcggcagcttgccggcgccctggatgaccttctcgcagatggggcacttctggaaggccttggctcggatcttcttctccaccttctgcgaccaggccgggtagacgtcgccgtcgtgggcgccgctgaagtacttcaggtagtagtccatgacgcccttgtcgtcggcccgcgactcctcgtcgctgtcccccgccgcggcccccgcccggcccaccgatgacatcatctgctgcagcagcgtgctggccgccagcccgtccacgtcgggcccgtccccgtcctcgccctcggccgctcccgacaggaagcccggagagtcgcccggctcgggggccgcctccgacagcgaggcggcctcctcctctccgccgcggccgtagtggccgttctgcgtggcggccggcggggccaccggcggcggaaagagacccccggtgggggcgtcctcatcccgctctggccacagacccgggttgctgtcgccctcgtccccgtcccccgtcgggggccgctcggccggggggcccggcccatagaagtctaagccgttgcagtcgcccgcggccacggcggccacagcggcggccacggcctccttggtggcatccaggtcatcatcggacgccccaaaggcggaccacgggaagctggcagcggcggcggcggccgcggggggcaggctgttcatggggttgctctggaagaactcgaggtactccttggcgcggaggaggttgcgctgatcaatttgatctacaaggtccagctgcccggcgtcggcgcccgcgtcggccgccaggatctgccggtccaggaggtcggcgcacacgtggctcacggcggggatctccagcaggcgggcggcgctgaggatgtcacccacgttggctgtgctgacggtgagcgtggccgtgtaggcgaagtccatgagcgcggtgagcgcctcggcgctgacgaagtcgatctcgtacacgttctgctggtccaccacggcgcccgacgtgaacagcttcttgaagtactggctgcaggcggccagcaccgagcggtgcgtggggaactcgcggccctccaccaggatcaccacgtcgcacagcaggccctgcgtccgctgctcgttcagcccactcaggatgtcgctgctgtggtcggggaacgggatcccgatggggccgtccacgccgccggccatcttccgcgccgagacctgcagcagtggggaaggagagggcgctcgtgagtgggggtgcgggggttcctgtgcccactgacaagggcccgaggcccttgagaagcagcgttccaccctgctcccccagcctcacattcccacctgcacgtgaaggcggtcagatgtcgcgcctttccagccccagcttccccagctgtgcaccaaagcgatacatgccctgcctccagc

SEQ ID NO: 11951 - DNA, 59 bp, Homo sapiens
  chr19:4064871-4064930
  hyper
gcgccgactgggtgtccgggcccgggtggacagcaacctcccgccgcggcccaccgtgc

SEQ ID NO: 11952 - DNA, 31 bp, Homo sapiens
  chr19:4078644-4078675
  hyper
aggctggagctctgtccgctagcagatccag

SEQ ID NO: 11953 - DNA, 81 bp, Homo sapiens
  chr19:4182730-4182811
  hyper
catgcaggtgtttgcggggcttgggaaggggctccccgatgacccgggcgggaaattggggcggccgcctacgtgagagtt

SEQ ID NO: 11954 - DNA, 30 bp, Homo sapiens
  chr19:4198043-4198073
  hyper
tgcgaggctgcggacgtcgcgggcccggag

SEQ ID NO: 11955 - DNA, 30 bp, Homo sapiens
  chr19:4247487-4247517
  hyper
ctcttcttgaggggcgtggctctgagaagc

SEQ ID NO: 11956 - DNA, 106 bp, Homo sapiens
  chr19:4304578-4304684
  hyper
cggcgggtgcgcctgcgcaatgcgcgcggtgatggagcgctaaccgggggcgcggcggcggcgagggctcggcgggccattggctaccggccgcggcaaaggcagc

SEQ ID NO: 11957 - DNA, 149 bp, Homo sapiens
  chr19:4432844-4432993
  hyper
gaagtcagccctggcaacacacgtgcccggccaaggctcacttctgggcaggtgcgtaggtgctaccctgtcttacacccgccctcatgaggccacctatccccgaagctggccatgccccaagcctcggtggcaatgagcttgtgtat

SEQ ID NO: 11958 - DNA, 56 bp, Homo sapiens
  chr19:4471581-4471637
  hyper
actaagagctcccccggagcctgccccttcctctaagtcccgcctcctcgagctgg

SEQ ID NO: 11959 - DNA, 30 bp, Homo sapiens
  chr19:4472165-4472195
  hyper
tgaacttccgttggcgcaacgcccaataag

SEQ ID NO: 11960 - DNA, 30 bp, Homo sapiens
  chr19:4639224-4639254
  hyper
ccccacgacggcctcgcccccgcatccggg

SEQ ID NO: 11961 - DNA, 178 bp, Homo sapiens
  chr19:4639829-4640007
  hyper
attgccccccttggcgtggggctctgctctgggaccagcacccccatcccccatgtggactctagtggactctgccccctttaactgtagggccgcaggtgctcaggccagattccagaaccctgagggcattccaggcggtgggcagctgggccagccgtgcggaggtgggcatgac

SEQ ID NO: 11962 - DNA, 28 bp, Homo sapiens
  chr19:4666908-4666936
  hyper
tcaaggtgttgaccgggctaggctctta

SEQ ID NO: 11963 - DNA, 30 bp, Homo sapiens
  chr19:4769516-4769546
  hyper
agaatcggaggaaccgagaacgaagagggg

SEQ ID NO: 11964 - DNA, 21 bp, Homo sapiens
  chr19:4946174-4946195
  hyper
tctccacgaagcactcactcc

SEQ ID NO: 11965 - DNA, 30 bp, Homo sapiens
  chr19:5292738-5292768
  hyper
tacctgccccctctgcggtcctgttgcctc

SEQ ID NO: 11966 - DNA, 141 bp, Homo sapiens
  chr19:5292996-5293137
  hyper
ctggccctggagggcggccggcacggtcaggcccgcgctgggctgtggggacccccgtggtccccagcctcggagcctggagggggcgcgacaagagagacaaagcccggggcggcccgggcctcggggtggaagggggtc

SEQ ID NO: 11967 - DNA, 471 bp, Homo sapiens
  chr19:5293155-5293626
  hyper
cggctcggagatcgggcccaggccccgcgaggcctccacagggcccgccgcagccgctccccgcgtccctcggtccgcccggagcgcggcgcgcagcgaagactcgggagaggcctcggcctggggagctcggcctgggggcggggcaaggggcggggctgtagggggcggggttgcagtgggcggggctgcaggggacgggccccgaggagggggattggggggcagggcggggccccggccggaagtggggcggggggaccagaggggagccccatctggaggcgcggagagcctccgcaggagtccatgaaacactgagcgaaggggcgccccagggagggcacgacccaagacccctccctcccgaagacgtctcacggggagcctctacactgctcctcgcttccccagctctgatcgtagccatggcaacgcatgaggaggctggatgccggacagggcggcgga

SEQ ID NO: 11968 - DNA, 207 bp, Homo sapiens
  chr19:5338900-5339107
  hyper
cgtcaccctctgcaccccaaggacagcagcgatagggggccacccagaggaggccagaatcccagcagccaaagtccgggtggtggcggacgggagcccggagcgtgtgggtccctgtccttgggaccctaggggtctcttcctgcctcctccggcttctaggtatcatccctgctgctcagccgggactccgacacctcggacacc

SEQ ID NO: 11969 - DNA, 30 bp, Homo sapiens
  chr19:5340107-5340137
  hyper
gggaaggcggcgggcgcagcagccctggag

SEQ ID NO: 11970 - DNA, 740 bp, Homo sapiens
  chr19:5608065-5608805
  hyper
cctgagctatgccatccgccctggaggctctgcatacttcagtcaagtagctgagtggtgtcctgcccctctggccttcctacgtccttctgtttttgtccagagctgagccccacaggtaaggccaactctgtcactcacgcctcagctgaatgtcacttcttcagcgagctctgctgaagctgcctcccaaatctaaacacggcctccccaacacactgacggcgtgctctaatattccttaatacgctcatcacaacacatcatatgtgtttatttcttaaatggtctttttcccgccagactaaaaaatctgtgatgacagtgaccacgtatgtttacctctgcttaatcatcagtgtccgagtgaagtcaacaaagtaactgaataaacaggttattcatggctataagaatttcctaagcccttgctgaacacacagactgttcagagaaaaattgaacagcacgctttctccgggtcctgtccgcttcttaagcaatgaaacattaaccaacacctgatcgggtgacacagacctagacaaaggaacggcttctgtagccagaaaactgtgtcagacagggcccactctgcctggaatcagggcaccctccagacactaaatggtccgaaccttgtcccttggaagccactccccagaggcacccaggagaccagggcagtgccaattgcttaccagaagactcttggctaggcgcggtggctcacgcctgta

SEQ ID NO: 11971 - DNA, 30 bp, Homo sapiens
  chr19:5687363-5687393
  hyper
ggtggtggtgtcctcgctgctcggtgcgtg

SEQ ID NO: 11972 - DNA, 30 bp, Homo sapiens
  chr19:5691181-5691211
  hyper
cgaaaagcgctaggcgttaataccttggtt

SEQ ID NO: 11973 - DNA, 30 bp, Homo sapiens
  chr19:5828286-5828316
  hyper
ccccgggactctcgcgataactgtactgag

SEQ ID NO: 11974 - DNA, 446 bp, Homo sapiens
  chr19:5962009-5962455
  hyper
ggaagctcccactgtgagaggcgtgcctgccctgctgcactccctcccgagcaggccttatatcctgccacggggcacgcggagaccacggccacagcagctgaaacagcctatcacccagcgtacaccgcatcaacaccctgcaatgagtgtttgaactaggccctctctctgtcattcatctacacaacaccagctgctacgtactcacaaatatttactaagccctcattctgtgcagggcgccacaggaagagtggagaacaggaagctgagggcagacgcttcaggagaaaacatctgactgaaagggaggggcgtgtttgcacttggtgaccaggcactgtggagccctggcactcccagaggggtgtgtggtgacagcatctacccctagatgtaagttctagaaagtggggcctcgtctgttccgtttctctctgtat

SEQ ID NO: 11975 - DNA, 606 bp, Homo sapiens
  chr19:6110332-6110938
  hyper
ccccgaacggggtccccgccgccccccacactccccggccgggctgggcccggggcggtcgcatcggtcacctggagttcgggccgggagttcgggcagcggctcccgcggcggcggcagcggctgctgcgtgttggtccccgttggtaagtaacagtctccacggctacagtctctatggcggcggcggtggcggcggcggccgctcctcctccggctcccgccgccagccagcctcgcgcagcccgcccgcccgacggggcggggcgttgttaccggcaacggttaccaggctccgcgccccaccttcctaacggcccgcccacgctcgcctccaacgggcccccaagagggcggggcgcgagaccctacggcgttccattggctgtctgcagagtctgtcggaaggaggaggcgttcccccttgaaaaagagtgcgagactcggccaatggccgcgaagaggggcgggtcttggcgggaggcgcgcgcggctcagagggttggcgaaccggtcgcgcgcgcggcgccgtgggttggtggcgcgttttgggaaagtccagttttaggggacccaagggactccgtttaccccacaggaggagtg

SEQ ID NO: 11976 - DNA, 30 bp, Homo sapiens
  chr19:6393404-6393434
  hyper
gctcttgtatataacgcggttaacttcatc

SEQ ID NO: 11977 - DNA, 140 bp, Homo sapiens
  chr19:6464134-6464274
  hyper
caggtgcgcccacagcgcggccccgcccccttcttgactccgccctctcagcgaggctcaggtgcacaagccggaagtgcgctctcccaggtgagtgactaaactttccgggtcacgtgacagggcggagccggtggggt

SEQ ID NO: 11978 - DNA, 31 bp, Homo sapiens
  chr19:6464627-6464658
  hyper
cgcaggtgcccctggccggagatgcggtagg

SEQ ID NO: 11979 - DNA, 234 bp, Homo sapiens
  chr19:6590324-6590558
  hyper
agcaggtctgaaccagcggggaacgtgaagtcgagaccttcaaaagaacttcttcgtttcccgaatcgttttcctggatgtcactgggcgcgagagcaccgcgcgcagcggactctctacgctgcaaaggcgcccggcgcggtccccaaagggacccctcccccacccggagcgagtggctggggccatcccgtcctaggaggccccaggaagcccccacgcccagccttgtga

SEQ ID NO: 11980 - DNA, 285 bp, Homo sapiens
  chr19:6590846-6591131
  hyper
ctcaccccaagtgactcgagcggcagctgctgctgagcctgtgcgaagcgctggatgcacaccacgaggcagatcaccaagcccgcgaccaatgggaccaaagcagcccgcaggacgcacccatagggcctgcgccgcaccgagcagcccgaaccctcctccggcatcgccgcggcgatcacctccgctagcgcaggaggggcgatgggggcgcggagcgctgccgagaaggaaggaaggaaactgcagccccctcccggggctcctgggcgtctacttgcttca

SEQ ID NO: 11981 - DNA, 179 bp, Homo sapiens
  chr19:6767995-6768174
  hyper
ggctggggtagctgcggcagctgtgacgtaaggaggggtacgcttcctccagaccgccctcccggattttccggaaagaagccccatttaggtggcgggttttgtggagagacgtccgggaaaacgcgacagcttccttcagtgacagcacgctggagcggggcgggactttggtggag

SEQ ID NO: 11982 - DNA, 31 bp, Homo sapiens
  chr19:6801936-6801967
  hyper
gatttgcatatgggcacgatgccagcacagt

SEQ ID NO: 11983 - DNA, 30 bp, Homo sapiens
  chr19:7087694-7087724
  hyper
aagagagagagagagagagtgtgtgtgtgt

SEQ ID NO: 11984 - DNA, 30 bp, Homo sapiens
  chr19:7099025-7099055
  hyper
cggccgagaggaaccggaaaagccaaggcc

SEQ ID NO: 11985 - DNA, 118 bp, Homo sapiens
  chr19:7293748-7293866
  hyper
gggtcctctccccatcgcggcgctccccgcccacgcccgcgcccccagactcaccctctccggggtacaggtggcccgcggcgcccagtagcagcgcggccaccgccaccagcagcgg

SEQ ID NO: 11986 - DNA, 88 bp, Homo sapiens
  chr19:7294526-7294614
  hyper
ccccgcctccctgtgccgggccccgcgcgggaggccctgggcgcgccgggaccgagggcgcgccccagatccgcgcgccctacagccc

SEQ ID NO: 11987 - DNA, 31 bp, Homo sapiens
  chr19:7294906-7294937
  hyper
gcgcccccagatgtcccgcccgcgagtgcgc

SEQ ID NO: 11988 - DNA, 148 bp, Homo sapiens
  chr19:7459680-7459828
  hyper
tctccctctggatccccgcaacccagctgtcccctcagagcccccggccctactgacagccaggctcgcattgctctccttcaaaaagccccccaaccccgctgacccgcccctcaaaagtcgccctcaccctcgccgcgagcaccct

SEQ ID NO: 11989 - DNA, 470 bp, Homo sapiens
  chr19:7460086-7460556
  hyper
gtggcagaggagctggcggagagcggcctgcgggcgatcgggccgaggtgaggacggcggcggggcggtcccgaggaaaacggggctcaggagggggccctcggtctcttcagggggtggcctggggcgcgggacccccggggctgcctcgggcctcccgccggctcctgggggacttctccaggcaggcgaacgggtgctggggtgcaggctgctccttcaatgcatggaggctctaggcggcgattgcagggtgcagaggtgcagacgatgcccgcccgctccgtccgagccccagccagtcctggggtgctacggcttactctcctccaggagaggagaggaggggtcacttgggccccagcctctgctcctcgttcaggagcgcccggggcaggaccagggatggaatggaacccaccacaatacccagcaccgtcgtatttcaggcctcccgggagaaccctcac

SEQ ID NO: 11990 - DNA, 30 bp, Homo sapiens
  chr19:7581399-7581429
  hyper
gggtggggggcgcccgccagctctggggtc

SEQ ID NO: 11991 - DNA, 31 bp, Homo sapiens
  chr19:7588102-7588133
  hyper
agggattgcccccaggcgattaactcagttt

SEQ ID NO: 11992 - DNA, 130 bp, Homo sapiens
  chr19:7660555-7660685
  hyper
caagctccctccaccatcgccgcagtccaggccgcccccctccgccccgcccctgctgctccgtgcacactgcagtgaggggcccgggcggggcgcaggggcgcgccagggtccgggtccgggttcgggg

SEQ ID NO: 11993 - DNA, 130 bp, Homo sapiens
  chr19:7660714-7660844
  hyper
cgggcccgacgcagcgtcgccagcgcaagcggccgcacctggctcagcagcggcggcggcggcggcggcggcagcggcggtagcagcagcgggcccggctggggcgcgagcgcggcgcagcccagcccag

SEQ ID NO: 11994 - DNA, 1167 bp, Homo sapiens
  chr19:7676863-7678030
  hyper
cctggcctccccctacctgcccgaggggacctccaaaccactgtccgacaggcccaccaaagcaccagtgtacatgccacaccccgagaccccctcgaaaccatctccctgtctggtgggggaggcatcgaaaccgccagccccatccgaggggtccccgaaggcggtggcttcgtccccagcagccaccaactccgaggtgaaaatgaccagctttgcagaacgcaagaaacagctggtgaaggcagaggctgaggccggagcggggtcccccacgtccactccggccccgccggaggccctgagctcggagatgagtgagctcagcgcccggctggaggagaaacgcagagccatcgaggctcagaagcgacggattgaggccatattcgccaagcaccgccagcggctgggcaaaagcgccttcctgcaggtgcagccgcgggaagcctctggggaggcggaagcagaggcggaggaggccgattccggtccagtccctggtggggagcggcccgcaggcgagggccagggtgagccaacctcacggcccaaggcagtgaccttctcgccagacctgggcccggtgccccacgaggggctgggggaatacaatcgagcggtcagcaagctgagtgccgccttgagctcgctgcagcgggacatgcagaggctcacggaccagcagcagcggctcctggccccgcccgaggcccccggatccgccccaccacctgctgcgtgggtcatccctggccccacgacggggcccaaagctgcatcccccagccccgcccggcgagtcccggccacccggcgcagccctgggcccgggcccagccagtcaccccgcagcccgaaacacacgcggccagcggagctgcggctggcacccttgaccagggtgcttacgccaccccacgacgtagacagcctcccccacctgcgcaagttctcgccgagccaggtgcccgtgcagacgcgctcttccatcctcctggcggaggagacgccccccgaggagccagccgcccggccgggcctcatcgagatcccgctgggcagcctggcagatcccgccgccgaggacgagggagacgggagccccgctggtgctgaggattccttggaggaggaggcgtcttcggagggggagccccgggtggg

SEQ ID NO: 11995 - DNA, 30 bp, Homo sapiens
  chr19:7701787-7701817
  hyper
atctgtgagcgtgtcgtcgaggtgtgcacc

SEQ ID NO: 11996 - DNA, 31 bp, Homo sapiens
  chr19:7762517-7762548
  hyper
gcaggtccttggaccccgcctatgccccagg

SEQ ID NO: 11997 - DNA, 30 bp, Homo sapiens
  chr19:7795604-7795634
  hyper
ccagggctcagggccggggtcgcgtcgggc

SEQ ID NO: 11998 - DNA, 30 bp, Homo sapiens
  chr19:7853414-7853444
  hyper
acccggcgggcatgcgttttgggatggggg

SEQ ID NO: 11999 - DNA, 30 bp, Homo sapiens
  chr19:7939452-7939482
  hyper
tgtttccccagctgcgcctgaggaacccag

SEQ ID NO: 12000 - DNA, 39 bp, Homo sapiens
  chr19:7953416-7953455
  hyper
ctctgcgggagtcgcggcagctccgctcccagagaccca

SEQ ID NO: 12001 - DNA, 35 bp, Homo sapiens
  chr19:7990147-7990182
  hyper
agggccggctagggggcgccgcgcccctcacacca

SEQ ID NO: 12002 - DNA, 257 bp, Homo sapiens
  chr19:7990904-7991161
  hyper
gacccgcgccggctgcgcgttcggcctctccccggcggcggcggcggcggcccgggctccggctcagcccaccccacccgcccctggagcggcggagaccgaggcaggcaagcagcgcgcgagccgggccgccgcggctgttcctatggcgacgggggcggggccgccgcggggggcggggctgcagggggcggaggctgcgcagggagcggcgcgcgagccagcgaccccgcccgggcctgcgggaggacggaacc

SEQ ID NO: 12003 - DNA, 379 bp, Homo sapiens
  chr19:8115229-8115608
  hyper
tcccccaagtctgggtaacaccgtcttggccgcggcccgcgggttgggaaggtagggggcagtgagccgtagcggagaggctggccccagcccgccacgccgcttccccacgctcgcagccacgcggagccgcgtcctggtccagcctcacccacccagagcaagaggcggaggaactggaacagcgccccggcccgtgggctgccactggccgcagcaacgggacgggtgagagcacctgcccccgacgcgtcttaactgctctggtggggcggggctgaccgtgcaagccccgccccagtctaagcccctcctacaaagcccggccccttaccataagcgccatctgtcaggctccgcccactgtcttaaatcccac

SEQ ID NO: 12004 - DNA, 49 bp, Homo sapiens
  chr19:8273922-8273971
  hyper
gcagagatgggcggagcgggaacgggggcgggggcgagaatgggggggc

SEQ ID NO: 12005 - DNA, 110 bp, Homo sapiens
  chr19:8274334-8274444
  hyper
ccccgccgccggccctcggtgcgcccggccgcctgcacccccaggtaagcgagcaccccgcgccgcgaacaccgccccgaacgccaccctcacggcggtccccggccccg

SEQ ID NO: 12006 - DNA, 646 bp, Homo sapiens
  chr19:8372856-8373502
  hyper
ggggtcttcctagcaccagtgcgcgccttcccacaagcgatgaagtccaagtccacgtgctgggggagtgtcatgaactgacgtgcggtgcagccagtgactaggcgttgtcggtgcgcggcggcggggcgaagcctcgcgaggggtgggagcccgcgctgcggggcgtcactcacctgcggcctgggcagaggtcggggtggaaagcgggctcgcggcggcctccaggcctagtccgaggccgagcagcagcagcagcgccaggcccagagcccctgttcgccacgctccaacctgcgccatccaaccgccgctcatgctgtccccacagcggcgccggccacgcgctgtccagaccgctctcttatccctgcgcacgcgcacgcgcggggttggggcggggcccaagcccctgagttctgcggcgcccgcggctacgcgtaccgtaaatgtcagaatagcagggaaaagagaattagaggcccgtccccactttccccagtgaccagatcagttgaaaggtatggagcccgcttgaagttagaaacttctggggatgggaaggaatttgttggtgttcatttgcattatttcccgttccaaatgaggactgctgcaaatgttactgcctcgtgatcttctttaa

SEQ ID NO: 12007 - DNA, 30 bp, Homo sapiens
  chr19:8429145-8429175
  hyper
acctggaaccccaacgtccccgagagtccc

SEQ ID NO: 12008 - DNA, 30 bp, Homo sapiens
  chr19:8942731-8942761
  hyper
gcaagcagcagcttcgtgctgacctaagct

SEQ ID NO: 12009 - DNA, 31 bp, Homo sapiens
  chr19:9267730-9267761
  hyper
gttgcatctgaagtgacggcacaggacaaga

SEQ ID NO: 12010 - DNA, 57 bp, Homo sapiens
  chr19:9609380-9609437
  hyper
ttctagtttccctccgcgtgggtgcggaggtatcaaggggtcggctcagtgcctggg

SEQ ID NO: 12011 - DNA, 418 bp, Homo sapiens
  chr19:9648913-9649331
  hyper
caactttcacccagtgctcaccggaacactcagaaatcgccaggtccctgaaccgggaagatcctggggacggagccaacgcggatgcaaaaggcagcaattattttcctgccggaaaaaaattcacaaacgctgctttggaggcctttggagaggggcgcacagatgaaaacaccctgcggacaccgtaactataaacccgactcctcccgaggagcgacggtccgagcggacgctagcgggcccagcagacacgagcagagcgggccaggcctctctaacgtccgggccaaacccgtccttcaccccaaaaccagttcatctcctcggaactcacccaggccagtgaggccttaactctgaaaggcaaaaagactctcaggcgctcacagccggcgtcacaaaaggaacggcgcac

SEQ ID NO: 12012 - DNA, 31 bp, Homo sapiens
  chr19:9879693-9879724
  hyper
gcgtcacctaaggcttcgattgcagacagcg

SEQ ID NO: 12013 - DNA, 30 bp, Homo sapiens
  chr19:9942246-9942276
  hyper
tttaaattaaaaaaattttttttttgagat

SEQ ID NO: 12014 - DNA, 41 bp, Homo sapiens
  chr19:10024727-10024768
  hyper
tggcattccccagccccgccccccaacggtattcccggccc

SEQ ID NO: 12015 - DNA, 30 bp, Homo sapiens
  chr19:10047405-10047435
  hyper
aggggtgcccgtcacgtgtttgtaaatttc

SEQ ID NO: 12016 - DNA, 357 bp, Homo sapiens
  chr19:10197445-10197802
  hyper
tttttccaggaaatgccgtaaagggatgaaaggcggggggggggcggcggaggccaaaaccaagggtcaagttcgggccgggagaacggtgcctagagatgggggagggatgatcccgtttccccttcccccaccggaacccccctgtctccatcccagctggagaagagcgtccggcgcctccgggagaagtttcatgggaaggtatcctccaagaaggcgggggctctgatgaggaaattcggcagcgaccacacgggagtggggcgctccatcgtgtacggtgaggctgcaggggtcccgggcctggtgcggggaccgcgcgtgggagcgccgagggggcgtggtctagggaga

SEQ ID NO: 12017 - DNA, 30 bp, Homo sapiens
  chr19:10207176-10207206
  hyper
ccgcgcccacgacgcgcccagcaggagcag

SEQ ID NO: 12018 - DNA, 51 bp, Homo sapiens
  chr19:10340886-10340937
  hyper
tctggtttaggaatgcgcggtatccacgctcgctcgcgcgggagccacgcc

SEQ ID NO: 12019 - DNA, 91 bp, Homo sapiens
  chr19:10381340-10381431
  hyper
attaaagaggcctgcgtaagctggagagggaggacttgagttcggaccccctcgcagcctggagtctcagtttaccgctttgtgaaatgga

SEQ ID NO: 12020 - DNA, 30 bp, Homo sapiens
  chr19:10382033-10382063
  hyper
acagccagtaggttcgaatccagaccctgc

SEQ ID NO: 12021 - DNA, 365 bp, Homo sapiens
  chr19:10397627-10397992
  hyper
cttatctctagagccggccctggctctctggcgcggggccccttagtccgggctttttgccatggggtctctgttccctctgtcgctgctgttttttttggcggccgcctacccgggagttgggagcgcgctgggacgccggactaagcgggcgcaaagccccaagggtagccctctcgcgccctccgggacctcagtgcccttctgggtgcgcatgagcccggagttcgtggctgtgcagccggggaagtcagtgcagctcaattgcagcaacagctgtccccagccgcagaattccagcctccgcaccccgctgcggcaaggcaagacgctcagagggccgggttgggtgtcttaccagctgc

SEQ ID NO: 12022 - DNA, 31 bp, Homo sapiens
  chr19:10398405-10398436
  hyper
tttgctgctggaccccgcgacttctggcagc

SEQ ID NO: 12023 - DNA, 30 bp, Homo sapiens
  chr19:10400293-10400323
  hyper
gtgggggcggggctcggagtccagcttatt

SEQ ID NO: 12024 - DNA, 356 bp, Homo sapiens
  chr19:10400588-10400944
  hyper
aacgttaaaccaatccccaagcgcaactctgcctcccccacaccccacccgccgcgccgcgcggagccgtcctctagcccagctcctcggctcgcgctctcctcgcctcctgtgctttccccgccgcggcgatgccagggccttcgccagggctgcgccgggcgctactcggcctctgggctgctctgggcctggggctcttcggcctctcaggtaagagccccgctctggttcggggtggacagggcgggggcggagtccctggacctgagaaacggcctcctgtccctcccagctctgccctcgcctcgctcccacgcctctgcccccacctcgagcctgagtcttctcccctt

SEQ ID NO: 12025 - DNA, 157 bp, Homo sapiens
  chr19:10406002-10406159
  hyper
caccttctgtgcccttcagaccggccagtggtggccgaacttgctgcctcgccccctggaggcgtgcgcccaggaggaaacttcacgttgacctgccgcgcggaggcctggcctccagcccagatcagctggcgcgcgcccccgggggccctcaaca

SEQ ID NO: 12026 - DNA, 140 bp, Homo sapiens
  chr19:10406278-10406418
  hyper
cgcgtggccggtaagtggcagctggggagaggcggggcgaggtatctgagagggggcgtgacctgggtcttggggcggccggccccgcctgcctccctctcggtcccggtagactagacggaagtgggacagagtagaag

SEQ ID NO: 12027 - DNA, 31 bp, Homo sapiens
  chr19:10426144-10426175
  hyper
cggtctacgaacaccacgttcaccctgggga

SEQ ID NO: 12028 - DNA, 30 bp, Homo sapiens
  chr19:10491445-10491475
  hyper
tattggctggcactcggtggacggagacgg

SEQ ID NO: 12029 - DNA, 30 bp, Homo sapiens
  chr19:10529635-10529665
  hyper
gctgatgggggggccggtttttgctcggcg

SEQ ID NO: 12030 - DNA, 288 bp, Homo sapiens
  chr19:10530146-10530434
  hyper
cacgggggtgcgctccgcggctacctgggaccttcctcagtttacctctggcagaagcgctttagaagaggcagcgatgtatagagcggtgggccggcagctgcggtatccgccacagggtgtcttcctggagccacaagggaaccaatgggacacaccccagaaacaccccagaggccccaggccgaccacacacatacactcacgcacacgcacacactaacatacatagacgtcctccgacactacagtcagacgacagaggccgaatcgcgtgcacaactccgc

SEQ ID NO: 12031 - DNA, 875 bp, Homo sapiens
  chr19:10530723-10531598
  hyper
atcactatcctccgacgcacagacaggagatcccacacactctgccgccgcccgctgcaggtaccgcgccggtggcactaggaccactcctcaaaaactgccccccgccaggggtagcggcgaggacacgccaacaccggactccgccctcgccatgatggaccgactgactgacactctggcaaccagtccggtgtctgcttccagatcggattaaccgtttaactccttcgtgcctgtgcgcgccgcggccaagcagggtgctttgaagacagacgagttccagcgccccctcccagcccggagcggggatctgcgtgggcgggaagggcccccctccttaggtagctgccccccgctggcccggacggaggaggaggggggcggcgctgacagccgcggcgggcggggggcggggaggggcgggacggggcggaggagccggggctggcgccgagcgggccgcggaacgcggagcgcggagcgcggagagcgccgccgggcactgagcagagctccaggcgccgaaaggaagctgcagagcccggcccgggggcgattggcccgcagcgcccccgggtctgtccccggggcgccatggccctaccgcggccgggcgcacccgcggggccctgggctcgctggcttgcgcgcagctgagcggggtgtaggttggaagggccagggccccctggggcgcaagtgggggccggcgccatggaacccccgaccgtcccctcggaaaggagcctgtctctgtcactgcccgggccccgggagggccaggccaccctgaagcctcccccgcagcacctgtggcggcagcctcggacccccatccgtatccagcagcgcggctactccgacagcgcgga

SEQ ID NO: 12032 - DNA, 279 bp, Homo sapiens
  chr19:10531608-10531887
  hyper
cgggagcggcagccgcaccggcccatagagcgcgccgatgccatggacaccagcgaccggcccggcctgcgcacgacccgcatgtcctggccctcgtccttccatggcactggcaccggcagcggcggcgcgggcggaggcagcagcaggcggtaagactccccgcggcggatgcgcgcggaacggatgggcgcgcagggaggaggcaactcgagctgccggccgcagggggcgctaggatgcgggtggggtcggtttggctggcgggggcggagggaa

SEQ ID NO: 12033 - DNA, 3 bp, Homo sapiens
  chr19:10624849-10624852
  hyper
gcg

SEQ ID NO: 12034 - DNA, 609 bp, Homo sapiens
  chr19:10624965-10625574
  hyper
cgcgcccgggtcgaggtggtccccgcagtcccgggccgtgccggcaggcgccgcgcgttggcgcgtacctggcagtagatgcgcgcgtagagtgcacagatagcggccaggatgcccacgaaggcgagcacgcagaagagcacgtaggccttggcgtagagcggcaagacagtggagcaagcgtccaggcgacccaggcaattccagcccagcgctggcaggagcccgaggagcagcgacacgccccaggccgcggctgccatcgccagcgtgcgcccccgactggagacgggcgcgggccccctgcgcgccatggtgaggctgcgctccagcgcgatggccaggaggctcagcacggacgcagtgagtgccacgaagacgcctccctcccgtgcgaaccagagcgcgggggacagtttcagcgtgagcggccccgacagtaggatgttggcggcgtaggcggcgcctgccagcagatccgacaacgtgaggctgcccaggagcaggaacatgggagcgtggaagcgcgggtggcgtccgagcaccaacaacacggctagattctctagcacgatgaaggcgcacaccgccaggcacaccacggcgtcg

SEQ ID NO: 12035 - DNA, 160 bp, Homo sapiens
  chr19:10691750-10691910
  hyper
tggcacccaatagtcgctcaatcatgaaacagcctttgcagtcagccaatggctgcaatactggccgtgatcagcagatggtgagcgagcgcttatttcaaaacgggctgcgattctcttaagtccccacgtggggcgggtttgcgactcccctgtgcat

SEQ ID NO: 12036 - DNA, 31 bp, Homo sapiens
  chr19:10929999-10930030
  hyper
ccaagatgtcctaaagcggccaaggttgaaa

SEQ ID NO: 12037 - DNA, 51 bp, Homo sapiens
  chr19:11199929-11199980
  hyper
acaacaaatcaagtcgcctgccctggcgacactttcgaaggactggagtgg

SEQ ID NO: 12038 - DNA, 264 bp, Homo sapiens
  chr19:11200921-11201185
  hyper
agggcgactggagacccggatgtccagcctggaggtcaccgcgggctcaggggtcccgatccgctttgcgcgaccccagggcgccactgccatcctgagttgggtgcagtcccgggattccgccgcgtgctccgggacgggggccaccccctcccgcccctgcccccgcccctttggcccgccccccgaattccattgggtgtagtccaacaggccaccctcgagccactccccttgtccaatgtgaggcggtggaggcggagg

SEQ ID NO: 12039 - DNA, 37 bp, Homo sapiens
  chr19:11253287-11253324
  hyper
tcagagggagaacaaacgggggcgggggtgggatggg

SEQ ID NO: 12040 - DNA, 98 bp, Homo sapiens
  chr19:11308159-11308257
  hyper
ccttgcgcgctccggccgctgccttccctgggtcccgccgcccgagcgtcttcgcgcgcgccgcagcctgggcgcccggccctcggaggtggctccgc

SEQ ID NO: 12041 - DNA, 31 bp, Homo sapiens
  chr19:11465992-11466023
  hyper
ggttccttcctacaatcgatgctaacacgcc

SEQ ID NO: 12042 - DNA, 940 bp, Homo sapiens
  chr19:11491657-11492597
  hyper
gggaggaggtcagggcggtgggcttgccccgtgattcgccctggctcctcctacacccccgcctggggcctcaccgctaggcgtcagcagcgacacaggctccgaccaggcgctccagaagccgccgaagctcggctcagccatacgcgcgcggacggcgaaggtgtagcgcgtccggccccgcaggttgctcagcacacactcggtgcggccctccaggatctccacctgggggcggaatcagggcgagggacgcgtagcagacaaaaatagatgacgtgggggcgggccctggtggaactgagccaatcaggggaaaggaaaacggtgccctagaattgcaatgggaccaataagagtagggggaggagcccaagaaagctcagggccaatcagagagagagtctctggtacgaaagggcgggacccgggcaatttaatatctgggctagcactcgtagagggacccgggcgctaaaggggtctagggttacgggccggagggagaagaagttggggttcaacaggcttgcgaggacattaggaaagggggtgtgtctgtgggcgtggaacggtcttcagcaccagggtaatgggatgtgggatgttacggaccggccctgaaagcggcaccgggcgcgacctcgagaggcgtggctgggccgtagtcagtggagctttgggggctgggccgtaggggctggcctcaccctctgtacgctccctgcgccgttgccggccgagacgtccacctcgtagcggatgtgagacgtcatgggtgtctcaggcggcgggagccagcgcaacactacgtggccgctctcgtcagccaaccgcgccaccagccccacgggggcgtctaggagcactgcaggcatgggggttggtcaggtgggcgaggactgagaccctctcctccgaccactcctccattcccaga

SEQ ID NO: 12043 - DNA, 651 bp, Homo sapiens
  chr19:11529450-11530101
  hyper
gcagcggtgcctggacgcacaggcggactcagggcaccaaaggggcacaggtcctggggcctcagcctccttggccgctcggactcgggccgagtcctcctgctgcatccccacgccccttcccggccagaagctgcgagactagggctggggtcccaggctagtcccctcctcgctgcgggtcccctcctcccaggtcctgaggacatggggtggcatttggggatgtcccagggcccagtctaatagaacctgtctctagctctttctgccgactgcgctcagagactcgcgcccccatccctaagaggaaccagtcgcttcactgggtcaagggccgcgagtccccaggaggggactccagggcaagttcagattgggagcagataccgtccgacgggcgggcgcttggagtttctggacctgcgggtcaccagggatgcggggtccggggatcccttgtccccttaccagggccagctctttgcctgctgtgcgctccatggccggcgcccgtccctctcagtggcgccgctgagtgaggcggaagggccggcgggtggcgggtggcgggcggcgggcagtggccgggcgctgaggccagaggggcggagcggccgagctgctggggcggggcggggcagggcaggc

SEQ ID NO: 12044 - DNA, 409 bp, Homo sapiens
  chr19:11531257-11531666
  hyper
atgaatacccagggtcatggtcggtaacatttattgcgcaactctgaggccggggcggacccagctggggagatttactgtgggaacgtctggcccggccccttcctcccctccgggcgccgctggccgcctccgttcccggtccgggccgcgttcagcccctgaaggggccccgtggggcctgcgctagacccggagggatcgggggctccgaagggggccgcctggtgggtgtcaggacgagtctaggacctccgagagcgacggtgcttcttgtgactttcgattaatttctgggaacggatcttgagtgatgcgcgggtcactacctcgttgtcctcctcctcactctcttcgtctaaggggggtggggggatgagcagggagcgatgtgggatccaggtcccca

SEQ ID NO: 12045 - DNA, 701 bp, Homo sapiens
  chr19:11532938-11533639
  hyper
agcttccccagggaggtggggcggggactctgaggaatggggtggggcttcccctgtgggcggggcctctgacgtccgggacagaggatgtggcaggccacgttccctcgggcaagctggtgtggcaggaaccccgcttcgtggctgcgcctctgcggtcccaggagggcctgtcggggcttcccctgggcggggcctaccacagtgatgtggatcagcttgctggccaggtgctccaggctgtccttggccacttgcatcgcccgcaaggcgcgctccagctggtccttggcctcggcgtgccgccgctcctccttcttgagacgctcctgcgcctcggcttgcagtttctgctggctgcagggagccgggaggtcaccccgggggctcagcccgccccgccgccctccccagagccccggtgcctcacctcaccagcgtggcctcccccgagtacttgaggtcttccagctcccgctgcagttgttgcttctcctgcttcagcctcaccaacgtctgctcgttctcgctcttgagcgtctccaactgcgcgaaggtgtcgccctgggccaggaaccgccgcaccaacgactgcgggccacccagccccagtcagagccagggcctagggagcgtaggggcgctccacctcctctcccccaccctgcgaaccctcgcacgcaggacaggtggcctgagct

SEQ ID NO: 12046 - DNA, 281 bp, Homo sapiens
  chr19:11590856-11591137
  hyper
cgggcccgcggggcctccgggcgcgccccctcctctcccctccccgcttgccgcaaggtcgacgggctcgaggacgagacgcccgcctcccgggtgcggccgaggcccggggcgcgcgatccgacgccacccgctttcccagggctctcggggacgctttgtcgctttggcttggcccagcaccagtgatcgggccctgcgtttgcctgggcggcctgcggggtctgggcctggatggaggaagcatccttagccgccgcggcccctcccccatcaggcct

SEQ ID NO: 12047 - DNA, 318 bp, Homo sapiens
  chr19:11592978-11593296
  hyper
actggaagatgccctagagatcgagccaatgggagtgcgcgcaccaggggatgctgccacgcctggaaagggcaggccaatcgcagtggcccgcgcaataggggcggtggcggtgcagatccccgggtggcccctcttgggctcgccggggcgacctggctgcgggcgctaggggccccaagcgatggtctgttccccaccccgtgttcctcccggtttccgtcatcggaaactgagctaggaggggggctgctcctgggcgcgcggaccccgctgcggttcccatggaaacctgccggctccggcagtgcggggaga

SEQ ID NO: 12048 - DNA, 31 bp, Homo sapiens
  chr19:11593855-11593886
  hyper
ggccctccctgaccaccgacctaaacagcat

SEQ ID NO: 12049 - DNA, 747 bp, Homo sapiens
  chr19:11805240-11805987
  hyper
taaagaaggaactggggaccccggaccgtagctccttccacgcatgaaccccgcacacgagtcgggattccccccatgaccctcccgtggcccccgcacaatctggagagacgcggggctgcgggcgcggagctgcccagagaggactcctgcccgggcccgcagtcgccgcgaagggacgggacaggacgcccggggtcccggctgccagcccagccccaccctgcggccgaggggaccgagggccgagctccgccagcggtactccggtccacagagcccggagtcgctggctgggaggccggggacccgccacggccagttccaaccagcccctcctcccgtctcgggatccctggcccctcacgctcaccattttccgaattcctccgtgtcccgggggcctctctgcggctcccacgaccagtgcaggtccctgtgtgacagaggctgccgcagactctccagagtgcctctcagcgacagagacaggagcccagcgaagtggcgtgtagaagacgccgcgggctttttcaatctcgcaccctcttagctgaagtgcgcctgattgacagttcccacgaccccgccccacggccctgattggatagtgcgacagatcccgccccctgacgactgagttacagaagcgatctcacgctggggagtggagactgatgaacgagttcttgacacagcccttggcagggcgggcttcttccctgcgctgtgacctgacccctccca

SEQ ID NO: 12050 - DNA, 789 bp, Homo sapiens
  chr19:11909168-11909957
  hyper
gccaacgaccagggcgcagggagtgagcttagccttagaaaggctgtagctaggattaatcagccgggctctgcagggctccgttacccagggcttaccctgtcactcagggctgaggggcggagcctggaaccccatccaatcaggggccctgggacggggccctgccaactgtcaatccggggaagcagaaggccgcactcagagtctctgcactcctttgttgctggggtccgttgcgttctgcatccagtccttgctgctccgagaggccccaggtgcctccgccacggctcctgtgacgctgtcacctgcgctgtgacctgctccggagtcataaagaggacgccgggacaccaagaagcagggaaatggtaaagtgcccggcctagcgtccagatacgtggaagaggggctgggtggaaccaacaggatcctgctgtggcgggacccaggcctccgctcgggcgaccccggcgattgggacccgcgtcccccatggcgtggcttggccctcggtccgctcggccgccaggtggggctgggcccgcagctgggaccccgggcgtcctgtcccgtccctacgcggcgactgcggccccggccccggagtcctctctgggcagctccgcgcccgcagcccggcgtcttcccagattgtgcgggggccacgggagggtcatggggggtcggatgtgtcccgcctttcttctgctaaaaattaaactgaggctctgttaacagttaaagagtttgttggagcaacagcgattccgagtgagaaacacc

SEQ ID NO: 12051 - DNA, 31 bp, Homo sapiens
  chr19:11950106-11950137
  hyper
ggtcagtgctccaacacggggaatttgagtc

SEQ ID NO: 12052 - DNA, 762 bp, Homo sapiens
  chr19:11959421-11960183
  hyper
tagaatctgtcagtctggctccgcagggcctgatacccagggcttccgctgtcacttagacgtggggggcggggccgaacattccatccaatcagaggcactggctcggggccctgcccactgtgcatccaggcacggaggatgttgcattcctgccgtcacctttgtcgctgcgagggcggcggttgggatctggcctttccagccccgagagggacctagtgcctctacccagatttctgtcgctctgtcacctgcgctatgccctgctttactcacaggagctgtagagaggaccccggtacatctgaaagccgggaaatggtgcgtgtgctggccgggagtggtgcgatgggggaggggctgcctggaactggcgggacccgggcctccctgtgggcgactccggggtctgggaccgagtcctcctagagctgctcggccctcggtccccgcggccgctggatgtgggtgggccggcagccgggactccgggcgtcctgtcccgtccctgcccgtcgactgcggccttggccccgaagcccttttgtgcagctccgcgcccgcagcccgacgccccagcttgtgcgggggccacgggagggtcatgcgcggatttcgactcgggtgtggatttcgtccgtaggaggagcagcggtctgtggggcccacagcctccactttctcctgttaaaaattatactgaggtacgttaacaaaaagttcatttgaggaaacagccattcacgaatgagaaacacc

SEQ ID NO: 12053 - DNA, 814 bp, Homo sapiens
  chr19:11998442-11999256
  hyper
tgcaggaaggagctcgcccttggaaaagctgtggtcagaatccgtctgtctggctctgcagggcccgatacccagggcttccgctgtcactcagacatggggggcggggcctagcattccatccaatcagaggcattgtggcgggtccctgcccactgttcctccagacactgagggggtcgcattccttacctcacctttgtccctgcgcgggctgcggctgggatccggtctttccagccccgagagggacctggttcctctgcccaggcttctgtcactctgtcacctacgctatgccctgctgtagtcacaggaggtgtagagaggaccccgggacatctgaaagccaggaaatggtgcgtgtctggggccgggtgtcgtgagacgggggaggggctgcctggaccgaccggaaccgactgtggcgagaccctggctttcctgcgggcgactttgggatctgggaccgagtcctcctggagccgctcggccctcggtcccctcgactgctcggtgtggctgggccggtagccgggacaccaggcgtcctgtctcgtctctgcgcggcgactgcggttccagagccctctatgggcagctccgcgcccgcagccacgcgtctacccagattgtgcgggggccacgggagggtcatgtgggtgatcccgactcgggtgtggggttcgtgcttgggaggagcagcggtctgtggggcccccagtgtccactttttctcctgttaaaaattaaactgaggaacgttaacaaagagttcatttgagcaaacagcgattcacgaatgagacacacc

SEQ ID NO: 12054 - DNA, 653 bp, Homo sapiens
  chr19:12075733-12076386
  hyper
gatacccaaggcttccgctgtcactcagaagtgaggggcggggcctagcattccatccaatcagaggtgccggggcagggccctgcccattgtttatccaggcacagagtgggtcgcattcctgtcctcacctttgtccttgcgcagccggtggttgatatccgctgtatccatccccgagagggacctggtacctctacccaggtttctatcgctctgtctcctgcgctgtgcccttctgtagtcacaggagctgtagagaggaccccaggacatctgaaagccaggaaatggtgcgtgtgcatagccggttgtcccgagacggggtagaggctgcctggaaccggccggaaccggctgcggcgggacccgggcctccctgcgggcgactccagggtctgggaccgagtcctcctggagctgctcggccctcggtcccctcggccgctggatggggctgggctggcagccgggaccccgggtgtcctgtcctgtccctgcgcggtgactgcggccccgccccggagccctctctgggcagttccgcgcccgcagccccgcgtctccccagattatgcggaagccacgagagggtcatgggggaaatcctgactcgtgtgtagggttcgtgcgtgggaggagcagtggtctgt

SEQ ID NO: 12055 - DNA, 661 bp, Homo sapiens
  chr19:12098445-12099106
  hyper
agggcgcagcattgccggtcttctcattgcctggctgctagaggaaacccgaagtcgggattctttctttcctgctctgagagggaccaggtccctcctccgtagcttttgtctctctattgcctgcgccgtgtcctggactgctcacgggagttctgcaggagacgccggaatatctggaagctgaaaaatggtgagtgtgcggagccggaaaccccgaggtgggtttgggggttaggggacggtctagtcagaaccgcggaatcggaacgcgggcctccatgttgcgactcgggggtctgaggcccgagttcccctggcgcagctcagccctgggtccccttggcctcagggtgggtctgggcggcagtcgggaccccaggcgtcctgtcgtccctgctcggcgactgggacccctgccccggagctctctctggggagctctgcgcccgcagccgcgcgtctccccaaattgtgcggaagtcgtggagggaatcccgcctcgtgtgtggggttcccagtcgcacgtttcttctgttaaaaattaaactgagacactgttaacaagtaaagagtattttgggtaaacagccaatcatgaaggagaaacaccgggtcatgacttgttaacggaaaaaaaaaaccaaacagtaaaataact

SEQ ID NO: 12056 - DNA, 30 bp, Homo sapiens
  chr19:12146614-12146644
  hyper
cggggctctgaaaacgggtttgaccggatc

SEQ ID NO: 12057 - DNA, 943 bp, Homo sapiens
  chr19:12163055-12163998
  hyper
tgtgtttccctcagccgaggtctctcctattcggctcagaataaacttattctacacgatttgggtttttccgttaccaaaccacaagccaggactgggagtttctcattcattaatcgctgtttgctaaaataaactctcattttttaacagtgcctcagtttaatttttaactggaaaaaaaaaggaactggggaccccacagcccacagctcctcccacacgaaccccacacccgaggcaggatcccccatgacccttccatggtcaccgcacaatctggggagacgcggggctgcgggcgcggagctgctcagagagggagccggggccggggccgcagtcgccgcgcagggaccggacaggacgcccggggtcccggctgccggcccagctccacccagcggccgaggggaccgagggccgagctgcgctagggggactgtgtctggagcccagagtcgctgcaggggggcccgggccccgccacagcgggttcctctcggttccacccagtccctcctttcgccttgggactccccagcaccgcatgctcaccatttcctggcttccaggtattctggcgtcctctctaaaggtcccgtgaacagtgcaggtcacagcgcagtcgacagagcaacagcagctacggcggaagtaactggtccctctcggagcaagaaagccccagaccttaactagcgcgagcagccctaggagtgaagagagcgggaatgcaacctccccttccctggaggacagtggcagggccccgccctagcgcccctgattggataggggtctagactccgcccccttccctgagtgacagcagaagccccgggtaactgggcgctgcagagccgaagcgactggttctggccacactttccaaggtcagctccctccctccctcccacctttacttcgaatatttgccttc

SEQ ID NO: 12058 - DNA, 377 bp, Homo sapiens
  chr19:12203283-12203660
  hyper
tggtgagtgtgtggggccaggcgtcctgagacgggggcgaagggcttcttagaacctgctggaaccggctgtggcgggacccgggcctccccgcggcgactccggggtctgtggggctgggccggcagccgggacccggggcatcctgtctcgtcccttcgcagcgaccgcggccccggacccggagccctctttgggcagctccgcgtcttcagccgcgggtctcctcagattgtgctgggccatgaggaggatcatggggggaatcccgtctcgggtgtagggttcttgcgtcagaaaagcggtggtctgtggagtccccagtcgtcttttctcctcttaaaagttaaaatggccgggcgcggtggctcacctga

SEQ ID NO: 12059 - DNA, 46 bp, Homo sapiens
  chr19:12204538-12204584
  hyper
attacaggcgggagccagcgtgtccggcctatttgttctttattgt

SEQ ID NO: 12060 - DNA, 867 bp, Homo sapiens
  chr19:12266888-12267755
  hyper
tctcgaatttctgggctgaagcaatccccccgcctcaacctgccaggcgtgacccactgcgcctggccttcaatttagtttttcaggaaaaaaggggggactggggaccccgcagcccaccgctcctcccacacgaaccacacacccgaggcaggattgcctccatgaccctcccgtggtctccgcacaatctggggagacgcgggactacgggcgcggagctccccagagagggctccggggccggggccagggccggggtcgcagtcgcagcgcagagacgggacaggacgcctggggtcccggctgccggcccaaccccaccctgcggccgaagggaccgagggccgagctacgccagggggactccgctctgcagacccgaagtcgctgcaggaaggcctgggtcctgctagagccggttcgagccggttcctcccggcccctcccccgtctcgggacccccggccccgcacactcaccatttcccggcttccaggtgtcctggcctcctctccacggatccctctaacagtccagtcacagtgcgggcgatggagcgacagaagctatggcggaggcacctggtccctctcggggccggaaaaccgagatcccgacctccctttggtgcaagacgcctgggagtcaggaaagcgggaatgcggcctccccttccccggatggacagttggcaggaccccgccccagcgcccctgattggatgaggctccagtccccgtcccatcggtcctgagtgacagcggaagccctgggtaacaaggcccggcagaaccgaaatgacctgttccaaccacagattatctaagcgagctccctccctgcgtcttgctctttgggtatttg

SEQ ID NO: 12061 - DNA, 91 bp, Homo sapiens
  chr19:12551332-12551423
  hyper
aaatccctcagggaggcggatctggggtgtcctcccctctcctcctgttaaaccgtttctgctgcagccctcggcgtctcggtgcagtgag

SEQ ID NO: 12062 - DNA, 722 bp, Homo sapiens
  chr19:12595270-12595992
  hyper
agacgtccggggtcccggctgccggcccagccccatcctgcggccaaagagaccgagggccgagctgcgccaggaggactcgggtccacagacccgggagacaacggcggggaggcctgggtcccaccacagccagatccggccggtttcaacccgcccctctctcccatctcaagacccccagccccgcacacttaccatttcccagactctgggatgtcctggtgttctgtttacctctcccgcggccagcacaggtcctacctccacctgaggcccttcctccacctgagggccttctggggtgaggagaccccagagcggagcgcagcggctggtagccacgccctcgccgtttgcgcagcgcccctccgcccgccttcccggcggcgcccctgattggacattgcactcttggacccgccttcgttgcctgagtgacagctagtagggaagtcgcgtctctaagcaacctgcattcgtccggggtcaggaatctgttcccctgccacggatatttgcgtctaagcagaatttgttaacgtacccggggtcgggcactggtgtcttcctgcagctccttctgagcgcggagacacaagcgtgcacagcgcaggaaattccaggctcagtttccagaaaaaggctctttgtccacagcgaaaaaggacgcccgggccatgccagactagaacggaagggtcagacgctcccagacttag

SEQ ID NO: 12063 - DNA, 74 bp, Homo sapiens
  chr19:12721073-12721147
  hyper
aactcctggagtcaagcgatccacccgcctcagcccacccaccccccgacctcccccaccgcccccaccacgca

SEQ ID NO: 12064 - DNA, 260 bp, Homo sapiens
  chr19:12750946-12751206
  hyper
cagagactgctcgcccgcaacacgcagtaacgatctcaggagagcccatgatggggcggcgcgtgtcgtagccgagaagactctgtcatcgccggcgacctcctggaactctctcttgcggtttgcagccagatcacttcccatacacgcggcagccaagctcaggggatggcatcagactgaccctaggtggcgctcgaacacccgccggacctcaccagacaggcactttccccagtctacaccgcctggttcgggtc

SEQ ID NO: 12065 - DNA, 38 bp, Homo sapiens
  chr19:12806991-12807029
  hyper
accactgggtagggcgcgcgtacgcggcgtagcgcgcg

SEQ ID NO: 12066 - DNA, 155 bp, Homo sapiens
  chr19:12885825-12885980
  hyper
cgccacagcagctctgcgagggactggcttctgctcacctgagaccggagggggcgtggcctcacctcacctctgcccaacaaaccctgcgcgtccaggccagggtggtatcgcgagtcacctgggccccacaggcaccacgtgaccaggccaat

SEQ ID NO: 12067 - DNA, 30 bp, Homo sapiens
  chr19:12886189-12886219
  hyper
ccttcccctagccccgccccacgacctacc

SEQ ID NO: 12068 - DNA, 31 bp, Homo sapiens
  chr19:12897558-12897589
  hyper
ggcccaatctccaccccgtgctcaaacaccc

SEQ ID NO: 12069 - DNA, 238 bp, Homo sapiens
  chr19:12899528-12899766
  hyper
ctgcccaaccccccaacgctgcccgctgcgcccccgcggggcccagccagatgtcagctgcagttattagcctgggcgggagacacaggcctggcagtgtgcctgccagactcacaggcctccggaatctcccttgagcctggggagggggaggggagccattcaagcaaggggaagaagggagggggcatttaggggtcacagggaccctccaaggacgggacgcccccagcttctg

SEQ ID NO: 12070 - DNA, 625 bp, Homo sapiens
  chr19:12900127-12900752
  hyper
ccgtctgcacctcgccgcagcccttcccgggaaggggctctgggttccctcatattctccccttagattttcaggtcttctctgactcggggagggaagctctcagatgacagagctactctagggaaggaggggggctccctctaggtattctggatgatagtaggatgggacctgcagactaaaacgagagtggggcccctgactcacatgagtgagtggggggtgttggggacggagctccagatctcctggcagaagggaagggcaccccacccgagggaggaggcagccgccgttccagcccgcccaggcgccgggggcgcctcgaggcatcggcccgccctctccgcgccccgtcgggccgggggcgaagtccgacccaggcccgcgggcaggcggggacctgccgggctgggttgggccaggccgggcctggcaggacgcagccccaaagcggcggggtggggcggggccgggccaggcggccgtgggggccccgggggcggcggtcggggctggtcgggactagcagtctgggggcccaggcgcgccctgggacctggcagatagtcgggttccccgcttctggctcggggccccaggacagcgctggtcccacctc

SEQ ID NO: 12071 - DNA, 30 bp, Homo sapiens
  chr19:12902438-12902468
  hyper
ggctggctgctacccgcccgcgccagcccc

SEQ ID NO: 12072 - DNA, 30 bp, Homo sapiens
  chr19:12912575-12912605
  hyper
cacggacgatcacacgcgtggacccgcgtt

SEQ ID NO: 12073 - DNA, 244 bp, Homo sapiens
  chr19:12951462-12951706
  hyper
agtttggataaggggcggggccatgcttgtgtgggtgtggtcagtcgcagagggacggtcattggggggcggagactcaggtgggcggagactcaggtgggacggacagaaaggaggagtcgtacctgaggggcggggccatcccagatgaagccagaatcgtcttggaaggggccaggctgactcggcaacgaaaaaatttagagaggcggggccacaggcgaaggggcgtggtctccccata

SEQ ID NO: 12074 - DNA, 174 bp, Homo sapiens
  chr19:12991903-12992077
  hyper
tgcagccctctctgcgccgcctccccggaccctctaagagctggcagcttgtagaccacgaacctggaggtcggagaatgcacagaaataggagagagggaagagaaggcaccccagggttccccgaggaggtagccatcccggttgagtgaccgcagccggaccccggggcga

SEQ ID NO: 12075 - DNA, 30 bp, Homo sapiens
  chr19:13001975-13002005
  hyper
ttgcactgtagcctcggcagtgaaccggga

SEQ ID NO: 12076 - DNA, 451 bp, Homo sapiens
  chr19:13029852-13030303
  hyper
tgtggaaatcagacccgtcagtgcgtcagtcagggccgggttcagtcagtcaggaaatttgaggccaggcctgatgagagggagccccaatggcaaaggacaagcggccgggctcgggtccgctggagatggctgggatcgcagccgttccctgcctatctgtccgcccgccccacgcgcgagaaggaaacaagcgccgcgtactccctgtcgctccattccgtattttcccgccttcaagctcgcaccctctgcgcatgcgccgaccccgcccctggccagctgcgctcccgcggacgagtgtgttgtgacgcgtgctcccggccccgccctctttgagaacttgcgcggccaactgggcggggccgaccgttaagcagcagtttcgcggtccgcgggctgcgcgcgcagtcggcgccccttgggagcaggacggcgcgctctgggtgcg

SEQ ID NO: 12077 - DNA, 472 bp, Homo sapiens
  chr19:13049976-13050448
  hyper
aaacacaagtcagattttggcaaattcgttctcagttccggcaagttctacggtgacgaggagaaagataaaggtaagagcctaggagtgggtgctcagatccgggaggacttcctggcagaagtccttgtctgtacacacacagccgggacagtccccttggaggaggacaggtggaggaagtgggggagtcttctctattctctaagtcgagggtcctcgcgagtcaaggcccaacggtgacctcactaccgtcccgtctcaggtttgcagacaagccaggatgcacgcttttatgctctgtcggccagtttcgagcctttcagcaacaaaggccagacgctggtggtgcagttcacggtgaaacatgagcagaacatcgactgtgggggcggctatgtgaagctgtttcctaatagtttggaccagacagacatgcacggagactcagaatacaacatcatgtttggtg

SEQ ID NO: 12078 - DNA, 829 bp, Homo sapiens
  chr19:13050857-13051686
  hyper
cacacctaggtcccgacatctgtggccctggcaccaagaaggttcatgtcatcttcaactacaagggcaagaacgtgctgatcaacaaggacatccgttgcaaggtgtgcctgggggtggtggcaaatggctgtcatggggagattcagaggtcagcctcattggggggtggcccccgctcaccttcttccttcttcaggatgatgagtttacacacctgtacacactgattgtgcggccagacaacacctatgaggtgaagattgacaacagccaggtggagtccggctccttggaagacgattgggacttcctgccacccaagaagataaaggatcctgatgcttcaaaaccggaagactgggatgagcgggccaagatcgatgatcccacagactccaagcctgaggttggtgtttgggcaggggctctgctctccacattggagggtgtggaagacatctgggccaactctgatctcttcatctaccccccaggactgggacaagcccgagcatatccctgaccctgatgctaagaagcccgaggactgggatgaagagatggacggagagtgggaacccccagtgattcagaaccctgagtacaaggtgagtttggggctctgagcagggctggggctcacagtggggagtgcaccaaccttactcacccttcggtttccttctcccttctgcagggtgagtggaagccccggcagatcgacaacccagattacaagggcacttggatccacccagaaattgacaaccccgagtattctcccgatcccagtatctatgcctatgataactttggcgtgctgggc

SEQ ID NO: 12079 - DNA, 932 bp, Homo sapiens
  chr19:13054372-13055304
  hyper
acaacttcctcatcaccaacgatgaggcatacgctgaggagtttggcaacgagacgtggggcgtaacaaaggtgaggcctggtcctggtcctgatgtcgggggcgggcagggctggcagggggcaaggccctgaggtgtgtgctctgcctgcaggcagcagagaaacaaatgaaggacaaacaggacgaggagcagaggcttaaggaggaggaagaagacaagaaacgcaaagaggaggaggaggcagaggacaaggaggatgatgaggacaaagatgaggatgaggaggatgaggaggacaaggaggaagatgaggaggaagatgtccccggccaggccaaggacgagctgtagagaggcctgcctccagggctggactgaggcctgagcgctcctgccgcagagctggccgcgccaaataatgtctctgtgagactcgagaactttcatttttttccaggctggttcggatttggggtggattttggttttgttcccctcctccactctcccccaccccctccccgcccttttttttttttttttttaaactggtattttatctttgattctccttcagccctcacccctggttctcatctttcttgatcaacatcttttcttgcctctgtccccttctctcatctcttagctcccctccaacctggggggcagtggtgtggagaagccacaggcctgagatttcatctgctctccttcctggagcccagaggagggcagcagaagggggtggtgtctccaaccccccagcactgaggaagaacggggctcttctcatttcacccctccctttctcccctgcccccaggactgggccacttctgggtggggcagtgggtcccagattggctcacactgagaatgtaagaactacaaacaaaatttctattaaattaaattttgtgtctcc

SEQ ID NO: 12080 - DNA, 30 bp, Homo sapiens
  chr19:13057191-13057221
  hyper
gggacactggtggtcgaatctaggagtaat

SEQ ID NO: 12081 - DNA, 60 bp, Homo sapiens
  chr19:13094489-13094549
  hyper
catggttacgtcaggcgcgtgcccgtcgcgcgcgccgccgtcccgcgcgctcttgcaggg

SEQ ID NO: 12082 - DNA, 74 bp, Homo sapiens
  chr19:13106034-13106108
  hyper
ggcggggtccgagtcccgctgcgtgtcagcgtgtgtctgcgctggaacgcgggccagcacgtgtcagggcggcc

SEQ ID NO: 12083 - DNA, 31 bp, Homo sapiens
  chr19:13106802-13106833
  hyper
gggtgcaggctgtgccgcggggagcccaggc

SEQ ID NO: 12084 - DNA, 31 bp, Homo sapiens
  chr19:13107273-13107304
  hyper
aggcctcacatgggagcggggctaagaaaat

SEQ ID NO: 12085 - DNA, 808 bp, Homo sapiens
  chr19:13208696-13209504
  hyper
accgggaaggctcgacgctccaggacaggaccagccacgcagacaggtcgatttgcccaggcccgcgcccgcacgcacgcacgcacacggccccgcacacagccccgccccaccccgcaaccagccctgtcgactgccttatacacccgcccccgcgctggccggccgacctagtgccttgttctcacccccgtgctggcggagcggacgccgcgctctgggtcccagaggggccgggtggctcagacgacccaccactcccccaccctgaccgtgctgaacagacccccccacacgagagaaaataaaggagcaataaagtcacgagaactttcgtcccccaatcgagagcccgaggggcaccccagccccgcctctgctcccccccaccccacccaccctcggggcgcccccctccccccgcaagccagcctgggccagccccgcttcggcccctcccgggagatccgtgcgcccgaccagcaccagcatcgcggaccgcaaaggccgcccgtcccgtcaaacaagtttcttcttaggctaagaaacgcagtatatacgagtatctctatatatagtactaatggatttggtgtgcttcccccttagcgtccccctccctctgctcctcctccttcagcctggtctccccctcttctctgccctccacccccgtctctgcactgagatacataagaaacaagggtagtttactgtctgttttgttttctgggttttcagtgtcctagcggaatgcaagtaggcagccagcccgtctgttccctctccgccccgccccgccccgccc

SEQ ID NO: 12086 - DNA, 53 bp, Homo sapiens
  chr19:13213413-13213466
  hyper
ggtgtggtttccagcgtcaggccaggctctgctgtctcgcgagggtccggcct

SEQ ID NO: 12087 - DNA, 89 bp, Homo sapiens
  chr19:13213673-13213762
  hyper
ccaggctgcctggccgcgcctgataaggagcctggctgaccccggaggaaaccagcgggcggggacctagcagcgcgggcctcccggcc

SEQ ID NO: 12088 - DNA, 3 bp, Homo sapiens
  chr19:13213789-13213792
  hyper
cgg

SEQ ID NO: 12089 - DNA, 30 bp, Homo sapiens
  chr19:13227406-13227436
  hyper
ccctcgtgcaggcccgccccgagtccgaat

SEQ ID NO: 12090 - DNA, 1230 bp, Homo sapiens
  chr19:13265820-13267050
  hyper
cggttaccacgtgggcgagagagggttgggcccccttttccttgcccgggcattccctaactggtggagccccgcctcccccagatttgggggttcccttgaaattgtcctacaactccgggacagggagatcggggctttctgagttgagacaatagtgctaaacacactgccccaagcggagctggggatcgattgcacgcactttgaagccttgaaaggtggtagatctcgcccccaccccctagaccaaactgaatcagctgtggccggggccctacagtatcaggtggagctgagcgggtgagctttgaagggctctttagtccccagttcccgtatcttcctcgaggaatcgttgtgtgtctcaggcagggacgtgcagcctcagtttcctcatctgtgaaatgggcctctaagcagcttctccacccggcattaggtttttaaaaatgcccattagagccctagttattttcttgggtcactccccagctctagaataaccaccccgaaacgagaaagccctttcaatataccccacgtaggtttaagagtggggttgtgggcgttgccccagggcgaagggagggggcctgtcgggaagacaaaggagtcgcaggtgcggggagtggtggcggcggcaggcgccgggaaagcgctcgccccgccccgccgacggctggctctgccgccgcaggcttcccatgaccccaggggaactgaccccgtggccacagggtagaaggaggggcaagccggcctcagaacgtctgctggtggaatctgggagctttggctcccctcccgcccaacccacaccccctttcctctcctgtgtggattgtgaaggagagcttctcaccgttctccagccaagctcgcccccacggctgcctgattccttcctgggaacacgtggggggacttttaaaaggcgccacctactccgagtcctgacccacccaactctcccaggggacgtgggggcactggagccccacaccgcaggcggtagctcaatgcacccgcgtcggagttcctcccccgcgagcgtggcaaggctcagggaagtcccgggcccctggggagggggccttgccgcgcatcctgtcgcaggaaccgccgggcccttccttccgcgggaagcggcttggccgacccccgcccccgcccgggcctcttgggggtttccggtgcccggccaccgtggggctggggactgaaagt

SEQ ID NO: 12091 - DNA, 31 bp, Homo sapiens
  chr19:13274044-13274075
  hyper
ggtcgcgcccaggtcccgggggcgtcagagg

SEQ ID NO: 12092 - DNA, 285 bp, Homo sapiens
  chr19:13616671-13616956
  hyper
cccagcctggaagaggggaggcggagggaggagggggaggcgcagctgctgctggggttcgggcaaaaggatatggccattcggtgatctttttggcgtattttctcaccacgttgtcttcgctgaagaggaagagagaccggttaaccgtgaggcagttctgtcggacggggatggggttgtagagtgccatggtccgcgctctctgcgccattgactgcttgtacatcctttgcgccccgggctgcccgccctgccggctgcccccggctcctcgcccgcctc

SEQ ID NO: 12093 - DNA, 306 bp, Homo sapiens
  chr19:13617158-13617464
  hyper
cgactgcggagacgctccacggcccagcccatcgggcggcggcggctcggcgcctcgggtcgggggctcagaaggcggctgcccgggccgagccggggatagcagctcgggacatcttcctggctgaccccggagaaggaggggcgggaggagggtgcgggggcggggcgcgggggcccggggaggaggggggaggggagagagaagcgaggcaaaaaataaccgaggaaggaatccaggcaatccccagtccacccactccggaaaaaaaaaaaaagagacagttaaaaaaaaaaaatccaccca

SEQ ID NO: 12094 - DNA, 105 bp, Homo sapiens
  chr19:13617489-13617594
  hyper
cggtttgcaaaggacgccccccccgggacgcagtggaagcttcaaattcctccgaggtccgggtcaggctggcatcttgcaaaaggagtgcgctcggcccattaa

SEQ ID NO: 12095 - DNA, 55 bp, Homo sapiens
  chr19:13617922-13617977
  hyper
tgcctcttctgctcccggaggaagtgtgagtgtgtatgtgcgcacagcgtttcgc

SEQ ID NO: 12096 - DNA, 105 bp, Homo sapiens
  chr19:13618305-13618410
  hyper
acacatgagggcccgcgaccaatcgtggaggctcgtggaggcgcgggggtaccgggctcagcggagtttgtgggggagagaggggagcgtcgcatggttgggagg

SEQ ID NO: 12097 - DNA, 63 bp, Homo sapiens
  chr19:13954424-13954487
  hyper
ggcaccctcccccacccgctgggacctctgggaaactccccgggctcccggagtagctctggg

SEQ ID NO: 12098 - DNA, 74 bp, Homo sapiens
  chr19:13961396-13961470
  hyper
tcaccgcggcgtgatgcggacgggcgcggcgcccagcagcctggccggcggcccgatctcggctggcctcggcg

SEQ ID NO: 12099 - DNA, 31 bp, Homo sapiens
  chr19:13961694-13961725
  hyper
gcagctgagatgatcacgcagtgacactgcg

SEQ ID NO: 12100 - DNA, 1344 bp, Homo sapiens
  chr19:14073500-14074844
  hyper
aagggcttagctggagggcagcgcctgcacgaagaggccgcgcgcgtcagtccgcgccagcttggccggcggctccagggtctccgggcccagcgcgggtgactcgccgccagccgccagtgagatgtcctgcggcagctcgtcctcgctctcctcctcctcttcttcctcctcgtctggaacacagggaccaagtccggctcggggcggggtggcaacgcccccgggctcctcctcctcccgagcccctccgttgtccgccacccccgggacccgcgccctgggtgggaacacgcctcgcctacctttgtcggggtccagggggttcagggaggtggccagattggcgaactggaggaagaagagaagaaaatgggtgagggtcccgccgcctggcgccccgcccgcgcccccagtggcccgcctcgcgcacctcgcccatgacggcgatgggggtctcgcccttggcctgggctacgcggtgctcgatcaggtagtacatgtactcgtcgtagagcagccggatgaggtggaaggaaccgaagctggcggcgctgcgcagggtcaggtcccggatcaccatggagctggggatggagacggagaggagaccgtcaggccccgtccggcccgaccccctctccccctccccgctgcgatgcgcccgggcctcgcgccagcccagtgactcaggctggatcccgcacagccttcccggcacatgagcccagggccccagcctgcccgcccagcctgcaggctcgggtcgtcgtagaagagcacctgagacccccagggacgcggggccttccctggtgccgcccggacccgatcccgccgcgcgcgcacctgtagaaggaccacttgaggaggaagagcttggcggccttggggaagccggcgctgccctggtagggcttgagcacctggctcaccacgccgtccagccaggccgcccactgctccagcgagttctgctgctgcagcgtcaccttgaagtcctgctccagccgctgcaccacgcggtcctcgcagcggcacacccacgaggcctgctcctggggcacagagggtgggcgggcgcccggggctcagccgccgtcacccccgcctggcccgccccgttaggctgcccctcattcgcccgccccgccccgccccgcgctcacctgcacgttggcgaagtccacgcggttgaggtcgctcagcatctggttgatctgtgcggtgttctgcagcacagcgcgcgccgcctgcgccaggtggttgagcgacgtgtagcgccgcagtgtctgcgcgaaggcgccagccgcggccacctgcgtgcagggattgaggggcttg

SEQ ID NO: 12101 - DNA, 30 bp, Homo sapiens
  chr19:14117526-14117556
  hyper
gtagtccgctcttgcgtacactttacatgt

SEQ ID NO: 12102 - DNA, 30 bp, Homo sapiens
  chr19:14202461-14202491
  hyper
tgtgggtgggtgatcgaagtcgagaacacc

SEQ ID NO: 12103 - DNA, 31 bp, Homo sapiens
  chr19:14205671-14205702
  hyper
aaaccctctgagcccacgccttgtatgcaag

SEQ ID NO: 12104 - DNA, 30 bp, Homo sapiens
  chr19:14228458-14228488
  hyper
cctcgggctggctgcgctagctgcggcgcc

SEQ ID NO: 12105 - DNA, 31 bp, Homo sapiens
  chr19:14306908-14306939
  hyper
ctcactgtctacacctcgtctccctatctat

SEQ ID NO: 12106 - DNA, 30 bp, Homo sapiens
  chr19:14529908-14529938
  hyper
gccccggtgcccaacggccaacacacagcg

SEQ ID NO: 12107 - DNA, 182 bp, Homo sapiens
  chr19:14583613-14583795
  hyper
cgccgacggccagcgccaccaacacctgcgggggaagccggtgtgagctatagagcaggcgcgggcgcaggggggcgcagggatggtgggggcgtggctggaaggtaaaagcctgggaggaggggcgagccgtcgcagggagggtaaatggggatccagatgagaaacggatgcggaaaaaa

SEQ ID NO: 12108 - DNA, 245 bp, Homo sapiens
  chr19:14584167-14584412
  hyper
cgaggggccggtgcgcccctcaccagcattgggctccagcagatgcacgacaccaccatgataccgacaagctggcccaccatctccacgtcgtgggcgcgagctctgcgtgccgagccgctgctccgagagccgccaaagaaggtggaggccgaagcgatggacgaggcggacgaggcggaggccgagcggggtccgtgcgccccccagcgacgccggctgtcggggcctgaggccgggggagg

SEQ ID NO: 12109 - DNA, 353 bp, Homo sapiens
  chr19:14584536-14584889
  hyper
cgccagccgcccgggggacccaggccgatgaagcaccacgtgcccgggtactgcagctcatagcggcccacgcgcgccagcggcagcagcgccacggccaaggccaccgcggccaccgcggccagcgccaggcgcgcgcgggcgaccgagacccgcgcggcgtggagcagcggccgcgtgacgcccacgcagcgctccacggccatgccacagcccagcagcagcgggcacaggccgaagaagaccatgcagccgcccaggaagtggcaggccccgccggccggagcgcgccccgcagtgtacagacgcagcaccagcgcgcccgggatcacgtggcccgccaggtcggtggc

SEQ ID NO: 12110 - DNA, 48 bp, Homo sapiens
  chr19:14607133-14607181
  hyper
ccgccccgcctaagccgcggctggctgtaccaccggagggctgaggag

SEQ ID NO: 12111 - DNA, 30 bp, Homo sapiens
  chr19:14640085-14640115
  hyper
ttaccccgcccccgcgtctggcctaaccgt

SEQ ID NO: 12112 - DNA, 30 bp, Homo sapiens
  chr19:14800715-14800745
  hyper
ctaacctcatcccccgggtaagaatactag

SEQ ID NO: 12113 - DNA, 198 bp, Homo sapiens
  chr19:14887409-14887607
  hyper
tgaccatgtggctttctccatcgccggccccacagacaccagcggcgcctcccgtttctcagacgcatccaaggggtcccgctggagcttcctcgctaccacccccagcggggccccaaagtacttaccgagaaagacgagaaagacgcggcctcccatggttccagctgagctgccggcaggagcagcaggggaaag

SEQ ID NO: 12114 - DNA, 30 bp, Homo sapiens
  chr19:15090227-15090257
  hyper
acgcctgaccccagcgcctcggatccccca

SEQ ID NO: 12115 - DNA, 435 bp, Homo sapiens
  chr19:15121627-15122062
  hyper
agcagggaccatgcgcgtgttggtacccccggctgagcgcagccaggacacacgcgttggggccccagcatggcgcgaggcagctcaggccatggcgaggaccgcgcacattctgaccgatcgctgcgggcaggaggcggtgaccatgtggcagcccaaggacagcgtgctggacccgaacgtggcccaccacctcggccgcgccgcctacatccagccctggcgcttccgcgtggagatgatcaaaggcggcggcaccttggagaagccgccgccaggcgagggcgtcacgctgtggaagggcaagatgaagccgcccgcctggtacgcccgcctgccgctacccttgcaccgcaaagcgcgcgccctgcagaccaccgaggtggtgcacgcgcacgcgcgtggagcgcgcctcaccgccgcccgcctcggccg

SEQ ID NO: 12116 - DNA, 220 bp, Homo sapiens
  chr19:15218124-15218344
  hyper
gcttcctgctggcgcggggcggggggcgggcggggaggcccgggcggggcggggagggcgcggggcggcgcggccggagcccggggcgcgcactcggctcggcccggcccgggccgcagcatggccgagccgctactcaggaaaaccttctcccgcctgcggggccgggagaaacttccccggaaaaagtcggacgccaaggagcgcggtaagcggagat

SEQ ID NO: 12117 - DNA, 573 bp, Homo sapiens
  chr19:15288254-15288827
  hyper
tggaaagagaggcagggcccacggacaaacagactgggatggatgcatagacagacggatcgatcgggtggatgggctcacttgcaagtgcgctcgcggccaccggcgtggcagtcgaagttgtcgtagaggcaggcgggcgagctgcaggcggggtcgcagcggctgttgttgaagaggcgccagcactgcagcgcctcgcattgccgccaggggtcgcccacgctcagcgagcagtcgccgccgtcccagccgcagcctgggctgttgcactcgcggtcgcagcgctggtccccgcgcttggcctggcaggcggcgcgcgggcaccgcggctcctccgagacctcgggtgccgcggcgggcgcctcgcagcgcggcccggtccagccctgcgcgcaagcgcagcggaagaagggcgcgagcggcgcggggcggcaggagcccccgtggagacagggggcggccgcgcagctggcgttgctggcccccggcggcgaccccgggaagctgcggcaggagggtcccgacaaccctggggggcaggcgcagcgcggcccgcggggcgtctgctgg

SEQ ID NO: 12118 - DNA, 30 bp, Homo sapiens
  chr19:15306317-15306347
  hyper
cggcttgtcccagacgcctgagactgaact

SEQ ID NO: 12119 - DNA, 262 bp, Homo sapiens
  chr19:15310971-15311233
  hyper
ggggtcccagggcctccgggtccccgcggccagaggagagaggcgggctgcgggcgggggagggggcgcgcgcgccgccgaggctccggctcggaatccggctccgggtcttgctgcgcgccggcctgggaagttttctccgagttcagagctcccagaacttcgcgccccctccccaccccccgcctggcccagcccgcccggggtgtcgggggcggggtgggggggcttttgtgcgagaggtccccggcctagaagtacc

SEQ ID NO: 12120 - DNA, 741 bp, Homo sapiens
  chr19:15334101-15334842
  hyper
gaggcagggagagggacaggccgatcatgcgaggaatcccagcccaagcccccgaggtccccgctcccgccctaaaagatgcacgcgccaagcccttgggccagaaaaaaaaaaaaaaaacgggccgggattggctcaggctgggggaggcgggtctacgacgagacacgattttctattggcttactcgccaggactctgcccaatcgacgcgatcgtcttccccagaagacccccgcctccctcccgccggcggccgcggaggcggaagaaggcgcctttccgtcgccctagcaaccgtcagcggatctccgtcgcccgggcaactgtcccaggcctcccgtcagcctttgcctgggcccctccggtcactcggacaaccgctacccgttccggtcaaccatcaacccgtcccccgtcaccccggcaaccatcgccggacccacctacccctggacgccgtcctggtcctgtccgcaggcctcctcgccccaaacctccgccgcgggctccgacgtccgcgaccccacgtctcaggggctccctcctcctcctgcccgtcttctcgcctccccggggcggggggcattgctcctcccctggcaggggggccccgggttggacccggctctgggggtccctgctcggtcgggacagtgggaccgccctgtgctgtggccgcgcgcagccccccgcaggcttcggcgctcgcactcttgcgtgggactgtccaaccgccac

SEQ ID NO: 12121 - DNA, 706 bp, Homo sapiens
  chr19:15342706-15343412
  hyper
cctctctcccgaggcttgaaccgtctcgaccccacgcgaccccgcagccccgatagcgcccccgtgcgatcaccttgaggttcaggaaaccgtgctcacccagcgaggggtcgctcaggcaggcgggggacgcgctccgacggcgcccgcagcagccgcgccggggccggcacagcacgtgcgtgagcgctatgcagccgtagaccgccgcggccaccagcgccaccgagaacaccaggctccacatgaaggcgcgcagcagcttcagcgacaggcgcgacggcgccagcagcgcggtcaccaccagctccggcatgtcgccgcgctccgggaccacggcggcgctgccggccaggggcacctgcagcagcggcgaagcggtgtcagggctcaggggcccatcgcccttggcctggggcccctccgtgccgtcgggatttgtgggacgcgctgaaggaagaggcgggcggctccgacagaaaacagccagagcgcaccactcacctgagtgccaggtaaacacctgggcgcgacagggacaggaaacaagggtagggtgcggaggctggggaggaagaggttggaaaggggggaaataaatgggcggggcctagcaggtcctgtgcggggcttagggccggggcggggcccaggaagactcagcagcgggtgggtgagggtctaaaggcggcaattccgggccggg

SEQ ID NO: 12122 - DNA, 512 bp, Homo sapiens
  chr19:15695277-15695789
  hyper
ggtggggttgggagtcccagacgaggttcccggcgcgatggggccgggatgggggtcctgggcacagtcagagtccccaccccctcccccgggaactgcatcggccagacgttcgccatggctgagatgaaggtggtcctggcgctcacgctgctgcgcttccgcgtcctgccggaccacgcggagccccgcaggaagctggagctgatcgtgcgcgcggaggatggactttggctacgggtggagcccctgagcgcggatctgcagtgacccaccactgtcaggtctcagagccacccgcgccctcctcaggcacctttgcagattccggggaatcaatctgtgcctgagtcccacagacagccagcagggggcgtcggagaactgcagggatccagggcctggcgaggggaaggcggagtatttctgagccaagaccctgacagcctctctggttgagcacagtggccccgtgctgagggcgggttgtcccagagcgcaggtggggacag

SEQ ID NO: 12123 - DNA, 794 bp, Homo sapiens
  chr19:16186825-16187619
  hyper
gctgacccgttcctcgctctgtcgtccccaggtggaggaggagctgacgcacctccagaagaaactaaaagggacagaggacgagctggataaatattccgaggacctgaaggacgcgcaggagaagctggagctcacggagaagaaggcctccgacgtacgtgtgcagggatgcgggagcccgcggcggggccaggccggagccccggggccgggaaggcggggagagccgcagggggaggaggaagaggaggaggagaaggcggcgcctcccagcgctttctccaaataagtcccgaaaaggggcactttccagcagctgtggccagcggtgccgacgtcaggccctcccccagcggtgctgacgtcggcggtccggccgggtgacctcatcgccccgacggcagccggcccggggggcggggagaggcgggggcggcccccgcgcaggcaaaggcttggggggccggggcgcggctgtgcagctctcgccggagccgagcccagccgagcgtccgccgctgcccgtgcgcctctgcgcctccgcgccatggccggcctcaactccctggaggcggtgaaacgcaagatccaggccctgcagcagcaggcggacgaggcggaagaccgcgcgcagggcctgcagcgggagctggacggcgagcgcgagcggcgcgagaaagtgagcgccccggcctcgggccccgcacccgcagcctcctcccccgcgcgccctcctttcttcccggcttcccgcgctgcccgcccgcgcgcagtcctcgggccgccttttt

SEQ ID NO: 12124 - DNA, 639 bp, Homo sapiens
  chr19:16187640-16188279
  hyper
cgacccacatccctgcgcccgcagccaggaccccctacttcctccgccgtcctccttcctgggcctgggacaggggagggggcgccgcctccgggtcgggcggggccggccaagcgggaaatggggggatggggcggagggggtgagcgatctccgggtggagaagtggagcggcgggagggggcgtatcgtgcaggctccgactccggggctggcgccggggtcccgggccgaggggaacccgcgaccggacttgtgggggagaatgaggatgaaaacgtggagcttccattgtctagggtttgaccggccgacagggatttcgacgggggaccggggatctggggagggggtcgcactttctcgcctctttcgcggcttcccggcttctgcttgcttccctgaccgttcccaggggcgcggcggcgacgtgtctgctccaggcggcgggggggatggggggtggaggaagttcagccccaagccgcccgcctttctccagctgattcctgcgggaaccggggcggcgggaccctgcctctctccagaaggccccgggaacgctggcgcggggccctgaacccacgatcgtttgagcgcctgctgtgcgcctccgccgcgagtcgcagggcccgagat

SEQ ID NO: 12125 - DNA, 30 bp, Homo sapiens
  chr19:16222383-16222413
  hyper
tcgggggtggaaggcgggggccacataatg

SEQ ID NO: 12126 - DNA, 37 bp, Homo sapiens
  chr19:16222616-16222653
  hyper
tggagccaataaggggcgggctcggtgctgatggacg

SEQ ID NO: 12127 - DNA, 30 bp, Homo sapiens
  chr19:16436107-16436137
  hyper
ctggatggcctgggcgccgaggccgccccg

SEQ ID NO: 12128 - DNA, 31 bp, Homo sapiens
  chr19:16638140-16638171
  hyper
ttgtgaggttcaatttcgtgtcctgaagctg

SEQ ID NO: 12129 - DNA, 30 bp, Homo sapiens
  chr19:16771073-16771103
  hyper
cccccttaggggagcgcgagcgccccacct

SEQ ID NO: 12130 - DNA, 30 bp, Homo sapiens
  chr19:16772748-16772778
  hyper
ttacggagcagaaccggccccaaggctggg

SEQ ID NO: 12131 - DNA, 334 bp, Homo sapiens
  chr19:17007054-17007388
  hyper
cacgtcctgctgtaaaggccccggggccacagaagccaggtcatccccgtaggtggaggacgacgaggccggcagccgctgctctggaaggaagggggcctcggtcgggagggcgtggcggggaggggacccaagggccgaggggaggagatccgtggcccagagcagcagcgatggtgtccccgaggctaggcggggggtagggtcctcaccgagggcgcagcagctgggaggcgcgggctccaggggcgcggcctggcggcaggcggcctcccgcaggcggcaggcgctggcgtagaccaccccgtcggagccgcacaccgggttcccctgg

SEQ ID NO: 12132 - DNA, 336 bp, Homo sapiens
  chr19:17007446-17007782
  hyper
cggcagggcccgactcgccggggaaccagcctgggggacgaggcaggctcgacagaccccccaccctgaaccttgcccgcgcccccacagaacctgggggtggggaagatgtccctgggtcccgggcccactaccccctcggtgggtcttggggcgcgacagttaatgggaggtcctgagccctggccttatggaatttcacgcaggtatttgcctaatacttacaaaaacagaaacagacttttaaaaagcggttgtaggagagaaaggagacagggcgtcctgtctgggccgccctgcaacaacagccccgtcccctgccgcgcctcctccgca

SEQ ID NO: 12133 - DNA, 302 bp, Homo sapiens
  chr19:17008216-17008518
  hyper
acaccctcactggctcggccctgcccccagtatactgaccattccccagccacttcccttccgcacttaccactcccccagccacgcccctccccgctgaccgctcctccagccccgcctcccccgtacaggcagagcgcccgcccacctctatgctgcgttctcctgactttacgttggcccctcctctgccaagcccccaggggagccctccctggcgtccgagggtgggagtcggggtgtggcaggccgcggtggggggcggcagtggctccgcgcactcacccgggccccgggcaggg

SEQ ID NO: 12134 - DNA, 113 bp, Homo sapiens
  chr19:17008585-17008698
  hyper
cgttgtagaagcgagtggcctcgaaggctacgggacgagggtggcgggtgaccaagtgcaggcgcgacgggtcagggaccgggccgggccgggggtgcgggcgcgcgggccta

SEQ ID NO: 12135 - DNA, 99 bp, Homo sapiens
  chr19:17355756-17355855
  hyper
ggtgtagctgaggttgcggcggatgcttcgcttgaaaaagctcttgcagccctcgcaggtgaagacaccgtaatgcttgccgctcgacttgtccccgca

SEQ ID NO: 12136 - DNA, 57 bp, Homo sapiens
  chr19:17392598-17392655
  hyper
ggctgggaaccctgctcggccctggagaggggccccccgagccgaggggaggagcgg

SEQ ID NO: 12137 - DNA, 31 bp, Homo sapiens
  chr19:17393057-17393088
  hyper
ccgaagtctgggaatccgggaaggggcgccc

SEQ ID NO: 12138 - DNA, 30 bp, Homo sapiens
  chr19:17420289-17420319
  hyper
ctcctatgtgggggcggggctagactgcac

SEQ ID NO: 12139 - DNA, 56 bp, Homo sapiens
  chr19:17448270-17448326
  hyper
gacggtgggcaggacgtatcctaagatacccaatggtggtcgagaatagttgagca

SEQ ID NO: 12140 - DNA, 30 bp, Homo sapiens
  chr19:17501242-17501272
  hyper
tctatacacgtccccgcagacccccccccc

SEQ ID NO: 12141 - DNA, 30 bp, Homo sapiens
  chr19:17530727-17530757
  hyper
caaccctggcgacgcgtggtggcgaggctc

SEQ ID NO: 12142 - DNA, 30 bp, Homo sapiens
  chr19:17531355-17531385
  hyper
gagaacgtggtggccgatatccagatcgtg

SEQ ID NO: 12143 - DNA, 30 bp, Homo sapiens
  chr19:17622264-17622294
  hyper
tcccgaactcacttcgactcaggcacagca

SEQ ID NO: 12144 - DNA, 1043 bp, Homo sapiens
  chr19:17716508-17717551
  hyper
atgaggtggtgcctcccggtaccagagccccgggatgtggcctcctccatagggacgaggtttcccccatcccagctcaaaatgccccctaggtgctgggggcgtggcctcaagttggggatgtggctccttccttcgtcgcgcccttgggcgtggcctcccgagagggcggggcatcctccattcctaattccccaaaagggaaagctgagtcaagggcgtaggcgcagcccacccttggcgtggagccccccgagccccgcccctggggaggtcccaccaaggcgcaagccccgtccctccccgcccagcgccctccgcgcaggcgcagtgccgctcggccgaccgcccgcgctaaggcgcaggcgcggcaccgccctcctcggcggagcgcgtgtccgacttgagcttcacgaactccttggccacctcgtcgttgctgcgctgcgagaggattcgcagcaccgtgaggcccgtgtcgtccatgtggatgcggcggccgagcggcagccagcaggcggcgctcccgcgctgggccagctcacgcagctgcagcacggccagccccaccgtgcggtcctcgcgcgcgaagcagtagtccttgacgcacacctgcagctcatagcactcgggacccgcgtcggcgctcagcgtgctgcgtggggaggggcggaacgtgagacaggccacacctactgtgatgccccgcccacggccccgtccccaccgcatttgcgggccacgcccacaccggggtgcccacacctgtcacctcccacgctacgctagccccgcccctgccccgttacttgacctacaaccctgtgcttggccgcgcccacagcagctgaccccgagctgggccacgcccacgcctgttcttcccatttttccacccaccgaaaaatgaccgcatagttttacatccagctcccgcccctcagacaccgccctgcaaggccatgctcccaccctgagatacccgcgcctgtgccctctgccggctgaactgctgcccgcacggccctgcccctaatgtccca

SEQ ID NO: 12145 - DNA, 479 bp, Homo sapiens
  chr19:17790866-17791345
  hyper
ggacaggaaagggggccgagagtggcgagggggttctcaggagggaagggtgttcgcggtgagggaggggattcgggaagggggatgggcgcagaggggagggtggtatcgggggagaggcttggaggaggaagggggctcagagaaggaacccagtctctctccctgtcttccccggtcagtaaatggtccctgagtcaccgtcttcgtcgtcacatcccgccacctccccgcctgcgccgggttgctgtatcagggtcagcggggcggaagcgccacccttccccagcgggcttcgggtcacacgcatgaggctatttatagcgtgggcgcgcggagggcgtgggaggcgcgccggcggacaggggggcggggatgaggggggtgcccactgctgtccccagcgacgagcgggtgaagacaccgcgtcatgcggcctcaaaggtctttggggcccccagaagcgctgactgatgaat

SEQ ID NO: 12146 - DNA, 30 bp, Homo sapiens
  chr19:17792548-17792578
  hyper
agaggcgcgggcaggcgctgtccacggtgc

SEQ ID NO: 12147 - DNA, 30 bp, Homo sapiens
  chr19:17798831-17798861
  hyper
gggcccagctgcgtcgacaagggctacccc

SEQ ID NO: 12148 - DNA, 30 bp, Homo sapiens
  chr19:17799313-17799343
  hyper
acaaggggcgacggcggcccccaagcaggt

SEQ ID NO: 12149 - DNA, 29 bp, Homo sapiens
  chr19:17858814-17858843
  hyper
gcgaaaatggggaccgctccccaaatccc

SEQ ID NO: 12150 - DNA, 476 bp, Homo sapiens
  chr19:17958345-17958821
  hyper
gcatcccctgtttataatcctcaacgttctgcatcctggtatggtcgggtaccctgtgtctggaccgggaaggcctggagggtaggggctgggaactccgccccccaatccctccttcccaatccctcctccccacccccaaccccgcagcccccgtcgcgcatgcgcaatgactcctccaggtccgcaaggcaggcatctcccggccttagtcaaagccgaagcccagagaagcgagcgatcggaggatgcgagtctcggctcacgtctgcctcgcagctttcctccgaggcctggaaggcgagctagcctttgccctggcagcaccctgccccagcccagccatcccccgccaccaccatcctcccccagtgtctgggccgagccctgcggcatcgccagctcttacctagcgggcagggaccctggactttcgaagggcgggcagagccgggaggcagcgagaggaaagtccc

SEQ ID NO: 12151 - DNA, 266 bp, Homo sapiens
  chr19:17983399-17983665
  hyper
gcctgggccagcttctgaactcggtcctcaccgccctgctcttcatgcccgtcttctaccgcctgggcctcaccagcacctacgaggtaccggacagaggcccgggggtaggacctgccccactggcagtgctgggaccccgtgtgggggaggcgctggggctttgggccgctgtacaggaggacgcggatggcacctcggtgctttaacggaaggggcccctaggcagacacgtggggagggttctaggaagaggccccaggcgc

SEQ ID NO: 12152 - DNA, 34 bp, Homo sapiens
  chr19:17983839-17983873
  hyper
ggctccggggttcgaaacctggcttcactgcttt

SEQ ID NO: 12153 - DNA, 90 bp, Homo sapiens
  chr19:18062903-18062993
  hyper
tagaggagacgccttgcgggggggagggccccggctgtggccgcgacggactgcctccctcggcctgcggggtccgcgccccctccccgg

SEQ ID NO: 12154 - DNA, 30 bp, Homo sapiens
  chr19:18112418-18112448
  hyper
gaccccctcggccgcgaccctcttcagggc

SEQ ID NO: 12155 - DNA, 250 bp, Homo sapiens
  chr19:18118063-18118313
  hyper
gtcccgtggccacaccgcagctgtggacctgggggtgcccgagcgtcccctgcattcagctctgtggcgggacgggggctgaggatgactggagcaggcacaagggctgcggggaaggtagggtttgccagaggctgaaaattgggaagggaacatcatttcgtaggtaccgctcctgggcgaatgcgccgaggcgcgaccgagtgacggtatgtcaagagcaggttgatgacccgggagcgaggctctt

SEQ ID NO: 12156 - DNA, 385 bp, Homo sapiens
  chr19:18118522-18118907
  hyper
tctccctttgcatagcgggggaaacaggcctggaacagtcataggctctctggccctcaactggggcgagagtcccccgccccaaatcgggctggacatgcctcgagtcacgtcaacgaggggcggctggtgagtgattaagccgagaggctgaaggctctgctaggtgacctcaggcctgggccctgcctctgcacctctttttttcctctttacccccggggtccgcgagagaccagctctggcagcctaagggcttcagtttctccccggggtccgcgagggaagggggcagccggcggtgagcaggggcgtttgttattttgctccacgcctgggcagagccacgccccttgtcgcgctattggtggagtcccttcccggg

SEQ ID NO: 12157 - DNA, 177 bp, Homo sapiens
  chr19:18118965-18119142
  hyper
cgcacggcgcggggattttctgctccggttggtgagcgcgcctgcgcgttgacggcgattttgcgttctgaggctgcagcgtcggcatcttgagctgccggttcgcgagttcgaggccaggttccgcctgtcgtgggttcgcaccccggacgcgatgctattcgacaaggtgaaagc

SEQ ID NO: 12158 - DNA, 30 bp, Homo sapiens
  chr19:18316087-18316117
  hyper
gtttataaaaagctcgccagctgcggaggc

SEQ ID NO: 12159 - DNA, 629 bp, Homo sapiens
  chr19:18336508-18337137
  hyper
agcgcaagcagctgccgggcgcaggcgcgcgctcagcctgggactcccgaacgccctgcctcgaaaaccccctcaattcaggtcttcctccgtggacacccagagttcattgtgaggcccccagggcatctctttgctggcactgggacaggatgctggtgggagggggcaccaagggaaggagtgccccttccccctcctcccactgccaggacgcacagcctgcctgccccaggccggcgagggtcaggaggagacgtgagcctcagcccgtcccactctgggcctcacagctggaaggagacagacggctggtcccctgggcctatatccaggcggcgggtggagacagacggagacagagagagacagagtcaccaactgcgagacaaaagtagggtaaggtagggtagagggagagagatacagagaaagcgagggagaggcagagcgtccaagcccggactccggccccggccccagctgtccctggccttgtccctgtccctgcccttcccacctccacaccgggcgtcccggtgaccccgccaggccctctgtccagcctcaccacagcggatgggccaccgtgaagcgccgctgcaggcggatgctctgattcaccaaaa

SEQ ID NO: 12160 - DNA, 31 bp, Homo sapiens
  chr19:18343302-18343333
  hyper
ggacattccacaaccccgaaaaccttcggac

SEQ ID NO: 12161 - DNA, 254 bp, Homo sapiens
  chr19:18420496-18420750
  hyper
cgccgcccatgccgcggcctttctgctgcttctgctgctgcaggcctccgcggccgcggcccttggccaccacctcctccttgaccatgtcgatgatctcgtcggggatgcgcaggtacttgatggtgctgccgcggatgtagcactcgggcatccgccagaacttgtccccgtcctgcggagaaggggagcaggttattaacttaccaccgggccgtctggcccagccctgggagcgcgggaggccctgcaga

SEQ ID NO: 12162 - DNA, 30 bp, Homo sapiens
  chr19:18525427-18525457
  hyper
cttcgatgtgtggccggtgaaagccacaca

SEQ ID NO: 12163 - DNA, 30 bp, Homo sapiens
  chr19:18547989-18548019
  hyper
agactctcaagccccgccccactttcgggc

SEQ ID NO: 12164 - DNA, 452 bp, Homo sapiens
  chr19:18548687-18549139
  hyper
gcggctgacgcgcgtcgtccggtactcgtattgcgcctcgatggcctcggggccgtagaccacgtccgggctctcgacgaagaactgggcggcggcctccatcgcggcgggctgggggcccggggtgagcagggggtcagcggggactctaagcggccggggccaagccagcctgggtccccacggaggccgtccctgccccgaaccgcactcaccggcgcagagtcgactcaggcagcggcggcggacagcgcgggctctcgggcgcgcgacctccggagaaaagcgctgcggcccctcccccgccccgcccccttccccgcctctcccgcgctgggagggaggggcccaacgtctggagacccggttcgaggcccgacaacccagagccaccgtggccatcgggtccccgcctggcggaagtggccaggcgtccacgagcgcggcgcgta

SEQ ID NO: 12165 - DNA, 30 bp, Homo sapiens
  chr19:18632978-18633008
  hyper
acgccccccgagtccgaccaaaccaacagt

SEQ ID NO: 12166 - DNA, 187 bp, Homo sapiens
  chr19:18714393-18714580
  hyper
ggggcagcccagcttcgcagagatggcagccaaggacagggtgatcctggcccccagggaggccccctgaatgccagcgctgccctgcacttgccctcactgccccagatgggcgaggtggggtggacacggttcttgggccggccctgatgattttccggggcaaacttggctcgagggctctgtc

SEQ ID NO: 12167 - DNA, 4 bp, Homo sapiens
  chr19:18715077-18715081
  hyper
gaca

SEQ ID NO: 12168 - DNA, 339 bp, Homo sapiens
  chr19:18721516-18721855
  hyper
gcttgtccgctgcccgccttgacctcggctgctgtggcttcccggacgcctggcctgccgctgattcacgcccaggccggcctcagcgccccccgcctgccgcccccagccaggccgccccggggggtaggaagtgggggggggggcgagggcggcgccgagtcaactttccctcttaagccccgaaggaatgtcggcggatttcctgaaacccgaccctggccgcccgccggccctcccgcccctcacctggaccggctcccccgggaacagcaggaggggcgcgggggctcaccttgggggccggggtcaagtcctctttccgctcacccccccagc

SEQ ID NO: 12169 - DNA, 30 bp, Homo sapiens
  chr19:18811560-18811590
  hyper
acggggaggccgagcgtgtccgcaaagaca

SEQ ID NO: 12170 - DNA, 841 bp, Homo sapiens
  chr19:18901312-18902153
  hyper
tgtctctgtgtctctgtctcccgtctcttctctctcccgaccgccccgccgcgctcaccgcacgcgtcacactccatcaccgtgtttttcaggaacgtgatctccctgacctgcaggggtgggatggaatcagcggggtcccaacctctcctcatccctcgggtctcccctctctctaccccggggtccctttctacagcctcttttcgccaaggactccctacccgccgacccccttccctccccatctcctctccaccttctcgggtacttcctctctcctcgctgggaactgagacccccttccgttccctggcactccctgccccgcacccgggccccgcacctgctgccgcagcagctcccgcacgtcctgcagcgccgcgttggtttcctgcagttcccgaagcatctgcgggcccaggtctgagcctgcggcggcaggggacctggtgaggcgtcatggggccggggaatcccaccaccaactcccaccgttgcagcgaacccggacctccgaggccccactgcgctcctctagtctcggtcccgccacctgctttctgcgcccggcacgtcccctacgaacagtccgtgagccccaaacagcctggatcccgggcctctcacgggtcctacagtccgttgtggggccgtgggcacggcgcgggtgctaacgcggcttacccaacgggctctggccctgtccggacgcgccgagggcagccagggtgagcagaagaacgcaggcggtgtcggggaccatggcggtggcggggagctgggtggctgctcgctttctaccgcccacgaggcccgcggggcctatttatccccaagg

SEQ ID NO: 12171 - DNA, 30 bp, Homo sapiens
  chr19:18981113-18981143
  hyper
catcttcctcccaggcgatgaccagagagt

SEQ ID NO: 12172 - DNA, 30 bp, Homo sapiens
  chr19:19322763-19322793
  hyper
agcggagcgcagggcgcaggggctggaccc

SEQ ID NO: 12173 - DNA, 120 bp, Homo sapiens
  chr19:19336135-19336255
  hyper
gtccctgaaagcctcgccaagccaagggagagacacatggaagctcgctttgtgataagccacatccctgggtgagggccacgcccccgggtgaaggccacacccgttacgacaagtctt

SEQ ID NO: 12174 - DNA, 150 bp, Homo sapiens
  chr19:19431244-19431394
  hyper
cgcctgagaggaggcgggggctgttacctgcaacatcccggttgtccatcttgagactcatccaatcccacaatgctccggcgccccttaaggggccctgttatagtgtgcatcgcctgatgggagatgtagtccgcctcggtcagactc

SEQ ID NO: 12175 - DNA, 30 bp, Homo sapiens
  chr19:19517597-19517627
  hyper
ggctgagagcctgacggacacttggattgt

SEQ ID NO: 12176 - DNA, 28 bp, Homo sapiens
  chr19:19651027-19651055
  hyper
cgtcctggttcaacgtggaccaccccgg

SEQ ID NO: 12177 - DNA, 418 bp, Homo sapiens
  chr19:19729111-19729529
  hyper
tgctgaaaatccttcacgccactgctcggccccataaggcctatccagcccgttccgtttgaaccccatacatcccttcgtcctcgggacccccctccagccctcctcaagcgcccctcgtcagtctggcctccacgccccgtcccctcagcccgccaacctcactgccacgaccctgcgtggcccctgccgagcccgcgggcagcacctggcctgtgcctcgtccaggctctggtcggtgatggccatgatctgctgcaggacgtcgctcgtgtcgaggcgccgcggggcggggggcgatggcgcggggcgcggcggggcggccatgagcggcagggccgggcgggcgctgtgagggtgccgtcgagcctggagcactaccactggcgccgcagccaaccgccgctgcctgagcgcc

SEQ ID NO: 12178 - DNA, 162 bp, Homo sapiens
  chr19:19729585-19729747
  hyper
cgtgtattgcaccgcctacagacacgccccttcatctccgtcagccaaccggcgccacgcaccgcccccgggactcgccccgaacttccccctctccgggcttggactgggtttggggttgccgaggcaacggcacttctcataagcgccctccttcccctt

SEQ ID NO: 12179 - DNA, 30 bp, Homo sapiens
  chr19:19738577-19738607
  hyper
gggcggtgccgaggcgtggaggtgatcgga

SEQ ID NO: 12180 - DNA, 149 bp, Homo sapiens
  chr19:19739478-19739627
  hyper
tttgccagctcgcagtatcagcgagccgcggcctcctgtgcgaggcccacctctgcggccccagctgatcatcgggcgcacgctagggttttgcaatcccgcccccgtacccctcaccctgggacagcgctgccccctgcaaagcccgg

SEQ ID NO: 12181 - DNA, 30 bp, Homo sapiens
  chr19:19774930-19774960
  hyper
gtcggggaccgccccggaacacaaccacac

SEQ ID NO: 12182 - DNA, 669 bp, Homo sapiens
  chr19:19843294-19843963
  hyper
ccctggtgatgagggcaggggcgtttgaacagccacaggaacctgaccccggcagcaaggacctagccaggcttcggttctcacaagtgaggaaacgcacccgtggattcatcgtaaggtttccaaccaagtggtttcttaaacgcacaaaccccacagaccgagatgggatctccccaggaccctcccgctgtcaccgaacaatccggggagacgcggggctgcgggcgcagagctgcccatagagggctccaggaccgggggccgaggtcgccccgcggggacgggacaggacgctggggctcccggctgcgggtccagctcccacagagaggaccgagggccgaactgcgcccgcggtggcccccgggtctgcaaaccccggagttgactgcaaggaggtccccggcctcggccacagacggttccaaccagaaacctcccctcggacactggccccgcacactcaccatttcccagcgtccgggaagtcacggtgtcctccctacggatctgtcagtacctgcaggtcacggcgcgacaaaggatgcgctagagccaccttcggccttcaggagcaggtgaaacgcaatcttcccatgggccaggaatggcgacgtccgcactgcgcaggcccagcgtggcgccgctcacatcttttcagctgag

SEQ ID NO: 12183 - DNA, 30 bp, Homo sapiens
  chr19:19887362-19887392
  hyper
ttcctctggggttgcgaaccgcccccgagc

SEQ ID NO: 12184 - DNA, 301 bp, Homo sapiens
  chr19:19932100-19932401
  hyper
ccctgacgaccttcccgtggcccctgaacaatctgggaaagacctgtgggtgcagagctgcccggagagggttccacgccagggcacagtcactgcgcagggaaaagacaggacaccccggggacccgctgtcaacgcagccgccatgttatggctggggcggagctgggcaatgagaacttggagcgcagattgtggagctgactgccgggaggcctgagttctgccactgccacagccacagccacttcctccccagttccaaccagcccctctccctctctcgggatgtcgaactggc

SEQ ID NO: 12185 - DNA, 301 bp, Homo sapiens
  chr19:19932460-19932761
  hyper
acctgcaggtcacagggccacagaggctgggcctctaggagctgacggcacagagcagtgaagacgatagctggatctctggcgtcagcgagagacaatgggcccgccaaagccggaagccggaaaccgtcctgttcgctacagctgcgtggctgattggacggtttccagcccagcgtccctgattggataatgcttgaggccccgccccctcaggtcctgagttacagaagacgtgatccgatgctggactgagtgaagaaagagagacagtctaagctgcagccttttctttttttaa

SEQ ID NO: 12186 - DNA, 30 bp, Homo sapiens
  chr19:19976597-19976627
  hyper
cgctgggccggaaaccgtccaatcaggcac

SEQ ID NO: 12187 - DNA, 513 bp, Homo sapiens
  chr19:19976841-19977354
  hyper
agaggctgtttggaacggtgggaagtggctctggcgggactctgcttcctcacagtcagctccacaatctgccgccggagttctccctgcccagctcggcctcagtccccttcagccataagatggcggctgcggtgacatccggggcccggcacagtgattgtgccctggcctggagccctctttcagcagctctgcacccgcagcaccgcgtctctcccagatcatgcaaggaccacgggagggtcgtcaggggagaatcctgactcggttccctgcgggttcatgaatgggaagagctttggtccgtgaggttgttagaaacaagcgcttggtgccgcaaaacaacacaaaacaaaaaactacccagcacttagaaaatttcacaggaaggcatatttacttctgaagaagagtgctgctcgcgtccgacctgatcgcaagagcacacagaagaaaggaaggaaggttttttttttttttgaggcggagttttgctcttgtggcccaggc

SEQ ID NO: 12188 - DNA, 167 bp, Homo sapiens
  chr19:20011423-20011590
  hyper
acactttacttccaacggtattattaatatgacaacgaaatacttctgttcaccttttcaatacattcaaaaagagagagtaaaaaagagaatgttcccatgctctggggtggacgtggctcagctcagagaggaagccctggctgaaaaggctgcagcttaggctg

SEQ ID NO: 12189 - DNA, 181 bp, Homo sapiens
  chr19:20011649-20011830
  hyper
gggcgggaccttaagaattatccaatcagggacgctgggctggaaacgtccaatcaggcaagcagccggaccgaacagggcggcttctggtttggcgggtcctttgtctctcggtgcagccggagctccaggtctcctcttcactactctgtgtcctgtgctcctacaggcccagcctctg

SEQ ID NO: 12190 - DNA, 121 bp, Homo sapiens
  chr19:20011889-20012010
  hyper
gcctagaaatggtgagagtgccggtccgacatcccaagcgacggggaggggctggttggaaccggtggaaagtgacggtggcgggactcaggtatccccttagtcagctccacaatctgcg

SEQ ID NO: 12191 - DNA, 121 bp, Homo sapiens
  chr19:20012069-20012190
  hyper
tatagcgcagcccccaggcgtcctgtctcttcactgtgcggtgactgtgccctggcttggagccctcgctgggcagctgcgcacccgcagagccgcttctctcccagattgtgcagagacc

SEQ ID NO: 12192 - DNA, 811 bp, Homo sapiens
  chr19:20149645-20150456
  hyper
ttccttcaagctcttcggctggacccccaaccacaaaccgtggctgggtgctctctgagcataaatcactgttaacttcaataagttttcaacattttaaaggtgactcccatagtttttaaacaggagaaggaaaagactgaggacccccgggatcacagcacttcccacgcacaaaccacacacggggtctggactctgccctgaggacgcttccattgtccccgcagtcggggcagacgcaagaacgcgcgcggctcttcccagggtgggctccgggcgggaagcgggagaacggaacgggatgcccgcccagggtcccggctgctggcccacctcgcatcctgtgcccggaggtgatcgacggccgagctgtgcctgccggggactccagtccgcagactccggagctgacagctgggaggccccagtcccgtcactgccggttccggccggtttcaaccagccctgcccccacctcgggatgcgcggcctggcacactcaccatttttcggcttccgggatgtcgtggagtcttagctctggatctcacagcatctgcaagtcagagggcaacagaggctgcgacagtcaccgggaactactagagcagaggatactaagcaatgaagatggaccctgagctctggctggagcgagacaaaggccccgccagctccaggacaccgccccctctaccttggctgcgcacctgattggacagttcccactctagcgcccatgattggatacagttccatgccccgccccctcaggtcatgagtgacaggaggcgtgatctgagaatgt

SEQ ID NO: 12193 - DNA, 901 bp, Homo sapiens
  chr19:20162580-20163481
  hyper
aactttgagcaggctgggaaacgatcccagacccttgagggtctgtgagaaatcaaactttcggcactttggaagtcaggaaaccagcacgttgggggaggcgggatcacagttacttgctgagacaagctgccctggctacgttcactcccgtcaggtaggagaggttaaagaacaggaaggctccccctccgcagggcggaactgctctgaaggcatggaggagcgacgctgaaggtggaggcttcgcccaccatgccgggagctaaaatttcttaaccaatgccggccagcgatggcagggctgcgggactacaatcccagcgcgcacagggatcagggactgtgcgcatcactggaagaagcggcagaacggcgcgcgcctcgctgagctttctgggagatgtagtctcatggcaactcccagccttttggccacaaggctacgggacctacaatcccagcctgtaccaggatcgggagcagttcgcagcactagaggaaggggcagggcggtgcgcgccgcgcctgatatgctgggagctgtagtctcttcacggtttttagccaatgagtaggtagcttcagaactacaatcccagtatgcatgggggcggtgcgtagtcctggaggtaggggctgagaggtgtggacttaccggtgtccaaagcattgctagcagccaattccatgccgccccgttgccagggagagtgaatacagctagggacgtgaagggtaggtctgggctgggcattgaggagggtattaggctaggaagtatacctcacctttgtccaaatcgggtggttcggcctcctctcattggccctatgcagctgggttgcctctctcacccgcacccaagggtctttccagagtgttgcgtcatttccagccc

SEQ ID NO: 12194 - DNA, 110 bp, Homo sapiens
  chr19:20188907-20189017
  hyper
gatccacagctgagggacccccggaagcctagaaatggtgagagtgcctttccagcattccgagagaggggagggactggttggaaccgatgggaagtggctgtggcggg

SEQ ID NO: 12195 - DNA, 79 bp, Homo sapiens
  chr19:20189076-20189155
  hyper
ggcctcagtccccttcagccataagatggcaacagcgccgacagccgggccccgcggcgtcctgtctcttccctgccct

SEQ ID NO: 12196 - DNA, 121 bp, Homo sapiens
  chr19:21541708-21541829
  hyper
tcagcgacgctgggctgggaactgtccaatcaggcacgcagcttgagcggagaggacggcttccgggatgtggcgggatttgtccgcttctttgtctttggctgccgctggaactccgggt

SEQ ID NO: 12197 - DNA, 181 bp, Homo sapiens
  chr19:21542068-21542249
  hyper
ttgcccagctcggcctcagtcgccttcagccataagatggcggttgcgccgacagcccggcccccgggcgtcctgtctcttccctgcatagtgactgtgcccttgcctggagccctctctggggaatctctgcacccgcagcgccgcttctctaccggattgtgcagggaccgtgggaggg

SEQ ID NO: 12198 - DNA, 252 bp, Homo sapiens
  chr19:21579902-21580154
  hyper
ggcgaggacggcttccgggatgtggctgggccattgtttctctctgctgccggagctccaggtctacccttcactgctctgtgtcctcagcgtgtgtggcttcgtgacctgaagatactgggaaatccatagctaagatgccaggaccccctgaaagcctagacatggtgagagtgctgggtccgacatcacgagagaggggaaggagttgctcggaaccggtgggaagtggctgtggcgggactcaggcct

SEQ ID NO: 12199 - DNA, 101 bp, Homo sapiens
  chr19:21580233-21580334
  hyper
cggctgcgccaacagccggggccccgggcgtcctgtctcttccctgcactgtgactgtgccctgcctggagtcctctctggcagttctgcacccgcagcgc

SEQ ID NO: 12200 - DNA, 304 bp, Homo sapiens
  chr19:21646229-21646533
  hyper
ggaactggggaccccacagaccgcagctccttccacgcaggagacccgcacaaccagtcggagtctttccctgatgacctcacaacctggggaagatgacgggctgcgggcgcagagctgcgcaaagagggctacaggctggggctaaagccgctgtgctgaaacggtaaaggacgccccggggtccctgcaccggaggagagtgagggctgagctgcggggcactcaggctcacaagaccgtcccgccaccgccatttctggcgcgtcccaaagaggcctcccccgtctccaaacgccctgcc

SEQ ID NO: 12201 - DNA, 30 bp, Homo sapiens
  chr19:21688382-21688412
  hyper
gcacgcagctggagcgacaggacggtttcc

SEQ ID NO: 12202 - DNA, 30 bp, Homo sapiens
  chr19:21769175-21769205
  hyper
cagacagttctaggcgctcaggtccgcagc

SEQ ID NO: 12203 - DNA, 241 bp, Homo sapiens
  chr19:22018453-22018694
  hyper
gccgactctcctgtttctaatagaccaaaagagggactagaaatgccacggaccaaagctcttcctattcatgaaactgcatcacgagtcaggattctctcctgacgaccctcctgtggcccctgcacaatttgggagagacgccgcgttgcggctgcagagctgcccacagagggctgcaggccgggacacagtcactgcgcagagaagagacaggacgcccggggctgcctcccagagc

SEQ ID NO: 12204 - DNA, 272 bp, Homo sapiens
  chr19:22018873-22019145
  hyper
tgtggatcccccaatacccgcaggtcacagagccacagaggctggacctctagcagcagaggacacagaagaacgaagacgagacgcagagctccaactgcagccagagacaaaggccccgccacatcccggaagccgccctgtcctctcctgccccgtgcctgattggacggtttccagcccagcgtccctgattggataacttctaaggtcctgcccccgcaaaccctgaatgaaagatgtgatcagacgctgggctgaaagaagaaaga

SEQ ID NO: 12205 - DNA, 70 bp, Homo sapiens
  chr19:22034351-22034421
  hyper
aaaaaaaaaaaaaattaacaacagaaactgaagaccccagggccgcagctcctcctgcgcacacaccgag

SEQ ID NO: 12206 - DNA, 599 bp, Homo sapiens
  chr19:22034446-22035045
  hyper
cgggcatccctgaacaatctgggaaatactcggggctgctggtgcagagctgaccagagagctccagacagggtaccgcgcaggaatggggcgggacgcgggaggctcggctgcgggcccagccgccatcttgcggccagaggggcctggggcggagctgcgccagcgaccaggactcaggagcggactgtgaggaggccggtcccgccactttcacagcctgctctcccctctcgggatgcctaaccccgcacactcaccatttcccagcttccaggatgtccgggcatcttagctgtgcgtctcccaggacttgcagatcacagggtaacggaggctgcgacaaagtcaccggggattcccgagttggagaacgcggaaaagcagaggcgggtcccaaggtctagcgggagctggagacaaaggccccgccaaaagccggaagccacggccccctctccaactgcgcgtctgattgggtggttcccacgccagcgccactgattggataaagctccaggacccaccctccctagcgtttgcgcattttatggacagggaaacaggctcaagtaggcggggcacatgcccagggaatt

SEQ ID NO: 12207 - DNA, 30 bp, Homo sapiens
  chr19:22715395-22715425
  hyper
gccaggcagcagcgcgtccaggtgggtgtg

SEQ ID NO: 12208 - DNA, 5 bp, Homo sapiens
  chr19:22817381-22817386
  hyper
tctgc

SEQ ID NO: 12209 - DNA, 293 bp, Homo sapiens
  chr19:23258305-23258598
  hyper
cggccccaggcgtctctggccgcaagatggcggctgggcccgcggccgggacccccagcgtctcgccgcgtccctgctgggcgccctgtctggacctccctgggcagctctgcgcccgcagccccgagtatttcccagagtgcttagggatgccaggcgggtcatcagggtagaatcccgactaggtgtgtgcgtgggaggagctgcgacccgtggggttcccaagctttcctgttattttttttttcttttctttttagacagtctcgctctgtcgctaaggtaaagtgcag

SEQ ID NO: 12210 - DNA, 205 bp, Homo sapiens
  chr19:23299706-23299911
  hyper
gtcactcagggcctgagggggcggggccttaaacgttatccaatcggggacactgggcggggggccgtccaatcaggcccgcagctggagcagacagggcggcttccgggatttggcgcggcctttgtttctcgctgccgccgaagctccaattttcgtctgtctgctttgtgtcctctgcacgtagaagcccagcctgtgtggc

SEQ ID NO: 12211 - DNA, 40 bp, Homo sapiens
  chr19:23432693-23432733
  hyper
tcccattcatgaacccgctccccgagtcaggattctcccc

SEQ ID NO: 12212 - DNA, 169 bp, Homo sapiens
  chr19:23432792-23432961
  hyper
gctgcccagagagggctccaggtcagggcacagtcactgggcggggaagagacaagacgcccgggggccggctgtcagcgaagccgccatcttatggctgaaggggactgaggcccagctgggcaaggagaactcagggcgcagtttgtggagatgactgcggggaggc

SEQ ID NO: 12213 - DNA, 324 bp, Homo sapiens
  chr19:23433023-23433347
  hyper
cggagccgccactctcaccatttctaggcttccaggggaggccctggcgtcttagctgtggatctcccaatgcttgcaggtcagagggccacagaggctgggcctctaagagcaggggacacaaagcagggaagacgagaccaagcgctccagctgcagcgagagacaaaggccccgccaaatcccggaagccgccctgtccgctccagttgcgtgcctgattggacggtccccagctcagggtccctgattggaaaacgtctaaggcccagccccttcaggccttaagtgacagaagacctgaccaaacgctggactgaatga

SEQ ID NO: 12214 - DNA, 28 bp, Homo sapiens
  chr19:23456223-23456251
  hyper
agaagcggctgggcgcggtggctcatgc

SEQ ID NO: 12215 - DNA, 545 bp, Homo sapiens
  chr19:23456490-23457035
  hyper
tgggcaacaaagcaagactccgtctcaaacaaacaaacatgtttaacaagagactgggagtctcacctgccacagctccttctacgcacacacgagtcggaattctgccctaatgacccgcctggcatccctgaacaatccgggaaatactcggcgctgcgtgcagagctgcccagggagctccagacacggcgccgcagggtccgggcgggacgccggggtcccggctgcgggcccagccgccatcttacggcgagaggggtctggggcggagctccgccagcggagactcaggttggcgacccgggagcggactgtggggaggccggtcccgccggtttcacagctcgctctcccctctcgggatgcccagccccgcacactcaccttttcccagcttccaggatgtcctggcatcttagctgtgcgtctcccagaacctgcagatcacagggcaagaggctgtgacagtcaccgggggctcccgaggtggaggacgtaaaacagcagagaccgatcccaagctgtggcgggagtgagataca

SEQ ID NO: 12216 - DNA, 131 bp, Homo sapiens
  chr19:23577704-23577835
  hyper
atcttttcgcggtgacgcccataaatttttaatagaaaaaaagaggccctgggaaccccacggactaaagtgcttcctattcatgagccagcacctccagtcaggattctcccctgacgaccctcccgtga

SEQ ID NO: 12217 - DNA, 121 bp, Homo sapiens
  chr19:23578014-23578135
  hyper
gcacggattgtggagctgactgaaggaaggcctgaggctcgccacagccgcatcccaccggtttcaacgagccccgttccctctctcgggacgtcgcacctggcagtctcaccatttctag

SEQ ID NO: 12218 - DNA, 121 bp, Homo sapiens
  chr19:23578194-23578315
  hyper
cacacaggctgggcctcctggagcagaggacacagagcagtgaagtcgagacctggaaactccggcggcagcgagagacaaaggcccagccacatcccggaagccgccctgtccgctccag

SEQ ID NO: 12219 - DNA, 25 bp, Homo sapiens
  chr19:23578434-23578459
  hyper
agagtgacagcgtaggctgcagcct

SEQ ID NO: 12220 - DNA, 83 bp, Homo sapiens
  chr19:23598012-23598095
  hyper
tcgttaacgttttaacgttgactccctttactttgcaagagaagaagctgggcgcggtggctcatgcttgtaatcttagcact

SEQ ID NO: 12221 - DNA, 535 bp, Homo sapiens
  chr19:23598334-23598869
  hyper
aacaaaccaacaaaatgtttaacaaaagagactgggagccccaccggccacagctcctcctacgcacacacgagtcgggattctgccctgatgacccgcctggcatccctgaacaatctgggaaacactcggggctgcgtgcagagctgcccagggagctccagatagggcgccgcagggactgggcgggacgcgcgggtcattgctgcgggcccagccaccatcttgcggccagagggacctgggacggagctgcgccagcagggactcaggtcggcaacccaggagcggtgaggaggccagtcccgtcggtttctcagccagctctcccctctcgggatgctcaacccctcacactcaccctttcccaccttctggaatgtcctggcatcttagctgtctgtgcacgtcccaggacctgcagatcacagggcaacagcctgtcaccggctggggcgagaggggggcagaggtggaggacgttgaatagcagaaagcgatcccaagctctggctgcagcgagagacaaaagccc

SEQ ID NO: 12222 - DNA, 181 bp, Homo sapiens
  chr19:23869521-23869702
  hyper
tccggtgacggccctcctgtggtccctgcacaatctgagagaaatgcggcgctgcgggtacagagctgcccagagagggctacaggccagggcacagtcactaggcagagaagagacgggatgccccggggctggctgtcagcgcgccgccatcttatggctgcaggggactgagccgagc

SEQ ID NO: 12223 - DNA, 211 bp, Homo sapiens
  chr19:23869881-23870092
  hyper
atttctgcaggtcacaggcccacagaggctggacctctaggagcagaggacacagagcaatgaaagcgagacctggagctccggctgcagcgagagacaaaggcgccgccaaatcccggaagccatcttgtctgctccagctgcgtgcctgattggacggttcccagcccagcgtgcctgattggacaacgtttaaggtcctgacccttca

SEQ ID NO: 12224 - DNA, 701 bp, Homo sapiens
  chr19:24216103-24216804
  hyper
cgcactaatgctgaacggggcgggggcagggggtgggggtgggagtggtatggggagagtgccggtccttatccaatccttggcgctggagcggcaaccgcccaatcaagcgcgcagttgaagaggagtgcatggtttccggcatttggctgggcctttgtctctcgctcccaccagagcttggaatccgtctctgctcttctgcattctccacctcgggagcccctggggactctgtgacggcctctgttgccctgtgatctgcaggtccggagagacgcacagctaagatgtcaggacatcctggaagctgggaaagggtgagtgtgcggggttgggcatcccgaaaggagagagcgggctgtgaaaccggcgggactgccttcgtcaccgctcccgggtttccgacctgaggtccctgctggcgcagttcagccccaggcccctctggccgcaagatggcggctgggcccgcagccgggatccccgcgttcagccccgtccctgcggcgcccagtctggagctccctgggcagctctgcatgcagccccgagtatttcccagattgttcagggatgccaggcggatcatcagggcggaatcctgacttggtgtgtgcgtggcaggagctgcggcaggtggggctcccgagtctcttttcttaaacattttgtttgtttgagacggagtcttgccctgt

SEQ ID NO: 12225 - DNA, 100 bp, Homo sapiens
  chr19:24216923-24217023
  hyper
tagttttgtatttctagtagagaagtggttttgccatggtggaagctggtctggaactcaagtgatccgcccgcctcggcctgaccgggaaatagaagcc

SEQ ID NO: 12226 - DNA, 30 bp, Homo sapiens
  chr19:28284105-28284135
  hyper
gccctgcagccagcccgggggtccaatggg

SEQ ID NO: 12227 - DNA, 812 bp, Homo sapiens
  chr19:28284337-28285149
  hyper
tggcccctcaggaggaaggggcggggagatcccagctactagaggacgcccgttccaatggcaactctgccaaggcgcctatgagagcctcttggcttttacctggtctgcgagaaatcaaactttgggcacaagtcatgaagccgacaagcccgggagacacagtgtcagaattacaaggtgagatcagccgcccggccaagctatcttctcgctagcaggtgaggcccgtgaacagccaagctccccttggcacggcggaaccgcagtggacgcgtggaggggctccgtagaggagggacctttgcttgggatgcggggagctgtagtctcttatctgcacccagcttgttagttgtacgcctgcaggactacaatctcagcacaaagcaggattgtagggcggtgcggatccctggagggagacagcgcggtgcgctcctgccggccatgctggctggggtggtgtcttaggcggttccagccgttagtcacagggcggccggactacaatcccagcatacaacgggagtggaggtggtgaccttgagagagggcctgtgctgtgcgcgcctcgcggggcatgctgggagcagtagcatcttagctgcttccggccgctggtcgcagggctgcgggactacaatcttcgcatgaaatggaagagagggtggtgcggatagcttgaggaaggtacggataccttgagggaggtatggatacgttgagggaggtacggatacgttgagggaggttacggatacgttaagggaggtacagcagcggtgcgcgccttgcagggcatgctgaga

SEQ ID NO: 12228 - DNA, 202 bp, Homo sapiens
  chr19:30015760-30015962
  hyper
ggctcccagggaatcctctggcggtgcctccgggaggctggtagccggggaagcaggcacgtgaatccaccgggctgccccaccccaacctgaggtcagagctgaggcgtaggggccggggtaggggcagaggtgccgaaacgcactagctggggactcccgggggaaggagataggagagacccaaggcgagccttaggac

SEQ ID NO: 12229 - DNA, 904 bp, Homo sapiens
  chr19:30016024-30016928
  hyper
cggggaccagaccgcgctccctcagatggctggggagggagcagactccgggtgaaggctgggggaggtaccgggatgccgagtacgccagagcaggcgggggatgggttccggcttcctgccgcctcggcatctcgctttgcaccgggcaaagaaggggccacgaccggcgaagagcgcgtggagacacagggacccgcgatccaggggcaggaaccccgccccctcccggaaacctcccgggccctgagtcgtgcccggcgctccccaccccaccccacccccgccgcccctgccgtcactcacggccgctgcgggctggctagcgtgtgcgctctccgcgccgcaggcacctgctcgctgggcgctgtgcgctcacttctccctcgcgcactgcagactcccggcgctgccgccgccacccagcgtagtctccggctgggcacagcgttccgcccttctcgcggccccgggcgcccacccatccgtcatggcccaggcctgggccaaacagcggggcagctggttgcccaaactggggtaaggagttgagggctgggagctgcagagaggaccgagggacacacggggagcagggatgagcggccgtctcgagccgtgcagactgggaagaagccagggagagtttgggtgggaggactcccaacccaagcgggtgcggggcggggctgtactccaaccagaaagacggtggtccctccgagcgacccccgaggagagagggggagcgctctggggcgggggcggggcgggctgtggcaggagaggggagggcgggggcgatgcagcggtggaggcggcttggcgcccagccactgaccgccccctcccttcccctcccctccccctctccccgcctctctccggctccgggtccgccacg

SEQ ID NO: 12230 - DNA, 58 bp, Homo sapiens
  chr19:30017451-30017509
  hyper
gctcccgggcccccgccgccaccgcgccccccgcgggagatggaacagcggaaccggc

SEQ ID NO: 12231 - DNA, 144 bp, Homo sapiens
  chr19:30017577-30017721
  hyper
cgcgggaactttgctgccgctgtggactcgggggggtctttgctggggccgccaccgagaagaagaagaaagagaacgaaccgggaagcttcgcggtctccagcaatcccgctgtgcagcctgggcccggaggggtagggagag

SEQ ID NO: 12232 - DNA, 850 bp, Homo sapiens
  chr19:30017765-30018615
  hyper
cgttcccagtcccgccggggccccggctgcggaaaggatgcctgcggggagcgggagtaggcgcgccccagccaggctctggcggtgcggccaggggcgggggagaagcacgagtcgcccctgccgccccgccccatccggagggaagcagtaggcagccgatggccggtccctgcctcggccctgcagccgcttccccgaactttgctagcccctccggccgtgcgccagggagcagctgcggggtggggggcacaaggccagccagccagagaccgactgcctcgctttaggttgccccaggcccccgacctacagctggtcacgcctctctctctctccccacccccagctgcattcacagaagtccccaaagatgtgacagtacgggagggagacgacatcgaaatgccctgcgcgttccgggccagcggagccacctcgtattcgctggagattcagtggtggtacctcaaggagccaccccgggagctgctgcacgagctggcgctcagcgtgccgggcgcccggagcaaggtaacccgccgcccacgcggtaccggcgcgcgcccggctcgcgcccggggcggcgaaggctaacccagggagggaagcagcgggcttcactcgcgcagggcgccgccctgtggcgcagcccatcttccaccttcgcatcccaaagcatcttcaaagtcagcagtggttacccccaaacctgtcaattattttgacagcatcgctgttcccaccacctcccagaactccattcacgcccagcccctaaagagccacacctcagcctggtcgcttgctcgtgctcgctggctgcggccctctgatgggtgctggg

SEQ ID NO: 12233 - DNA, 530 bp, Homo sapiens
  chr19:30019080-30019610
  hyper
atccagtctccccagttcagccggcaggtgtgcaccagggcagccacccgttggtcaggcaccatgctagctccaaagcccgcttcctcctgggaaactcttggaaagccggacgtcctttgtgccctcaacccccatcccccgggcggtttcggtcctagcctgccggaggagggtgcccttgcctaaaggcggatccgagttcccctagccagaaggccgcgagcctcacgtctctctctccctctttgcattttaggtaacaaataaggatgcaactaaaatcagcgtaagtgtggagcccagcgcgggccgcgggagaccccttctggccgcctcgggtcccgcagctccctcccttagcaagccgcggcggccgcgcatgtggggccgcgcaagtagggcagcgatcgcagccttgcatcggtggctgctcggcgtgtccgggcgccatctgtcgccggttgcagggtcgggttctcttttgtgtaaatcaagggtccaaggcttgagtcccctaattcggctcg

SEQ ID NO: 12234 - DNA, 270 bp, Homo sapiens
  chr19:30019660-30019930
  hyper
cgcgcctgccagcctccgctctgcgggcattcctcctagcaccgggagcgcgcggctgctcgccctcgccgcgaccgtggcgccagcttcccgccccctctgccccgccctgagcatctgctctgcgccctccgctgcaaccctttatcctccgcctggattgcgggtctgggtgcggggtgttgcaggcttgcaggggacggggtagggggtggttgtgccaggctgcgaggggcccgggtcatggggttgctaactctgggaggagat

SEQ ID NO: 12235 - DNA, 304 bp, Homo sapiens
  chr19:30019993-30020297
  hyper
cggttcagaggtgagggctccctgggtgtttgttgagagccgtagagcagtacttcccgaagtccccaccggggcgcaggggaggagcacttcgctggggggcttctggagatcccgcggaaaggcgggttggtagcaggtggccagggagccaggcagcagcctcagcgttgcttgccttcttaagaaagcacagtgttagctgtaaagggcggggtccggtgacagggtggctttccttaggaagcgattcgggcaggccctccgtgctccgggaggtgaggagggccggctggggcgggac

SEQ ID NO: 12236 - DNA, 30 bp, Homo sapiens
  chr19:30020576-30020606
  hyper
gggtgaaagggaagccggatcgtgatggtg

SEQ ID NO: 12237 - DNA, 100 bp, Homo sapiens
  chr19:30155979-30156079
  hyper
tgtgctgtgaggcccgccggaggcaccagaaggcacaagcctcccactgcccctttccccgccaagtcccgcaggtctcgcagtcgcgggcgcccccacc

SEQ ID NO: 12238 - DNA, 88 bp, Homo sapiens
  chr19:30156298-30156386
  hyper
cgagccaccgcgggggcgtgtccggcggagctggccgggacccgggcggagcgggcggggacccgggctactgcggtgtggactcgag

SEQ ID NO: 12239 - DNA, 92 bp, Homo sapiens
  chr19:30713500-30713592
  hyper
agccccctgcccggccgtctgcggggctcaggcggggcttggcctccgatgagcgcgctgtctctgcccggtgggtcccaccccgcccggcc

SEQ ID NO: 12240 - DNA, 30 bp, Homo sapiens
  chr19:30715725-30715755
  hyper
cgtcccgctgtccaccgagattcacccggg

SEQ ID NO: 12241 - DNA, 462 bp, Homo sapiens
  chr19:30716307-30716769
  hyper
tgggtgatgagtatcaatgaacggggcgattctgaaaagaggctgatgaaaatcgagcccgccctgccccggctgggctgggaacagttcgcagggctctgccgagtgggcgagtgaggcgcgcgagcagggcgcccgtcccccctcagccccggaaaatgatcaagtcaatcgtgtgggcatgtttcattattcattgaacacaatcttttacaacgctccgtttacgtgcccgagtttgctcctgacgcccgcgtttcaatgtttaaggtaaggaaaacaaaggtgggggggggatcgcggggcgcggcgcggtgcggggggcgcggcgcgggggggcggcggcgggtgggggggcagcttcggcgtccgggaggtggcaaagtgagtttggactcttggcgcggcccccccgtcccctccccctccccatctcggcgaggcctgccgcccggttccttc

SEQ ID NO: 12242 - DNA, 3038 bp, Homo sapiens
  chr19:30716952-30719990
  hyper
cgcctccccgcccgcggtcccgggaccgttactttgaaaaggagtcccgaggcctggcgcccggcgcgcgatcgggaccccgcgtccagctccggggacccggccggcgccccccacccgcgagcggcccgcgagccactctcaggccccgggaaactttcaagagggtctggggggtggggggagtaaaaaggggagggggtaggctggggccgcggaaacttctgctcaagtgactttccccattttctcctctgcctgggacgggggttcgccttgcgctctttctctggtccgcgctcactgcggggttccggcccctccgcccgtggagagagggtaatttgcaaccttttttttttttcaattaaagttagctgatgcttacaatgtgtcaaacttgcgggcgccgagagccgctgagatctgccattttgtgattgcatcggcctcctgtgccccgggagcctggccaggctgaggccggagagttggtttcagggctgaggtgccagggtccgaacccgcgaccccaggaaaggccgtggcgcctgcaagcgcaggcggcgcccgcagcacctgccccagccgggcctcggcctgggggcccagccgggggccaaagaggaaataaataaataaataagtaacaggttatggagggaaaagagccggccagtcccaggctggagaaatgaggccaatcagagcgaggaagtgcgggcgtgggggctctggaaggcagaggagaggcagggcttgcgcggcgtctgggaagagtgcaatctggggggacgcctcccgtccccccagcgcagatgcatgactggggtaggaatgatctttgctgataagcctttttctgtttgcttcaagacattatttttcgaagatgaattgaggaaaacagtcgtaggcgagactcggggtgtattttaggcaaaaaaaaaaaagttagggttgggggagagctttcctttgatgagtaggaaagtgtccagatctcgacgcgcccatctgttgcagttttgcaaataatttaaaatatagatatctccatatagacggatgtatgtgaagtggaggaaggtcgaaacgcggggaagttagggaaaaagaaagaaaaagggctgggcagagagagacctgtgttgctcactcttcactctgcggagtgaactccggcagggctttctttggggacaggtggaaagttaagtcccccccttttcacttctgtattgtgagtggttcctactgtgtgcctgttggagaacatgtccaccgttcccgagttaggtggaggattggaatgttggggggcggggagcgttggagttgaggacgcagtggccaggggctgggggccgagaaagagcagggcggggtctcagccccgcgtgcgggtggcagcggcggccgggttttgtttgccagatattgttatgtctaacgggtgcctcgccggagacgtgatttgtcagccgccttcgttttcactttagcagaaaatacggcagctgcgaggtgtcccggcctgcggggctcgggcacccggtgcgtcctgggggctgggtcgtgtgcgcgggtgggagccggcggccggcggggccggggcgaggggcgagcgggaggggcggagtgagcgagcgcgcggtacggccctccggttcctcctgcgccttctcccggcagccgccgccgccgccgccgccgctgtgcaatttagcagaaatccgacaggggccgcgtttgctgagcgcatccggcggccgggcagcccgagcgggccgccgggcctggtcggccggtgtagaggcgcggagggggccggcggaggggaccggcggggatgggcgcgggaagcacgcctgaccagagcacgcgccgttccccaaccctggtgtccccggcgagttgggcagccccgcgcgccctgaccttgacgccccagtctccagccagggcttaggtgaacttggggtggggtgtgcgtgcgtgcgtgtgtatgtgcgtgcgtgtgtgtgtgtggaaggggtggtgagactgggaacgcgctgttttctttcccagtttgatactagcaactggatttttactttaagaccggctttgctctctgctggggttgggagggggggcgatcttttcccatcactcacatctttgttcattgttcactgagtggaaggcaggcgacttaaagagacgaaagagaggaaaaaggggtgagagacggagagaggaaaaagaggggggcggccagaagagggaaggagaggcgtggggacagggcccccgcccccgccggggtcgggtttgatggtgaaatagtaaacccacgcacggagggtcgccaggaaagtggacattaccgctttaattaacttcgagatgctccggcggcgggacctggcgtagccgtgacgcgcccccataaatctgcccggcccggggctgctccgagaactcgtacagtagcggcgtcagatccatcccgcgcctcccagtccggagtccatttgcataattggattttttttttttgcctccttctttctccctgaaacttgtttgaaaacccaagtgaaaaccgcgacgatctgcacactcaaaagcaagtgccaagtaagtgccctgcggtggcctcggcgcgccccggggtgagcgcgcaaagccgggagcgaggtgccgcgagctgcgcgccgccccgggccggcctcgcgtgtgggcggctgggcggctgggcggcgggaggacggcctccgcgggctccgggactgcccggctggctgctcgcacaactttttttttttcccccgtctgctgacttttcgggccaggtgaagtgtttgggccacgcgtgtacctgtggcgagactcgggaggcgatcttggggggcgcgcggtcgcagttgggcatcttgcctgggtcgggggcgggcagtcggtcccagtggccgccgctgagggcagagctgcgagcgagcggggccggctgctggtcgcgccgcgccgtaaatgcaagcctgtagcca

SEQ ID NO: 12243 - DNA, 78 bp, Homo sapiens
  chr19:30865946-30866024
  hyper
ggacatgatggcattaataatcgttaccaaagacggtgggagtaacaaaggaatgcgtctccgagacgccgcccagcc

SEQ ID NO: 12244 - DNA, 3 bp, Homo sapiens
  chr19:31839562-31839565
  hyper
gct

SEQ ID NO: 12245 - DNA, 90 bp, Homo sapiens
  chr19:31839837-31839927
  hyper
cggctcagcgcgctccgcgagcggctccccaaatgggtgcgagagggaagagggcagagcgcggcggggcgtccggggggcgcccggtac

SEQ ID NO: 12246 - DNA, 182 bp, Homo sapiens
  chr19:31839941-31840123
  hyper
cgcacccaaacaggagagcggcgcccggagttactcagtgcgggcagaagagcggggcgaggagcggggtcgcgcccgctggaggcgcggggcgagcggaggaagaggaggaggagagcagaaggaaggggaagcggctcgtacctgctgcgcgccggggcgcctgctgcttcctcctcggc

SEQ ID NO: 12247 - DNA, 36 bp, Homo sapiens
  chr19:31840722-31840758
  hyper
cgcggctggagcggcggcgtcggcaacaggcaagct

SEQ ID NO: 12248 - DNA, 30 bp, Homo sapiens
  chr19:31841146-31841176
  hyper
cagccctcagaccccgcgccacccagctcc

SEQ ID NO: 12249 - DNA, 543 bp, Homo sapiens
  chr19:31841937-31842480
  hyper
ccggcgagggcgggcgccccgcgctccagcaccggctgcctgagcgctcctggagcagcaaaccccagacttcttcctccttctctccttccttccttccccctccccttatctttttctttttttagtctctttctccctctttttctgccctgtgtcctttttattttttctctacgactgtttttgcaagtttgtttcaaaagttcacagcatgctttcttttcttttagaccgggagacagtgatctcacccacacggtaagatcaaaagtctccgctcgcccagcctgcgggcttgggctgggtccagacgtctcccaggatgcagatgcgccgccgctggcctccccggctataaagccgcctccagcgcctttccgcgcgcaggagcgctcggagttgtggggtacggaccccaggcggggcagggagtccgaggcgggctgcggcggggctctcgggctggcggactcgggggctgaggcgccgtgcgcgttgggtgcccgcggccgcagaggccagaaccgctactcctccagg

SEQ ID NO: 12250 - DNA, 30 bp, Homo sapiens
  chr19:33072491-33072521
  hyper
cgggctcgtcctggcgggcctggatccaag

SEQ ID NO: 12251 - DNA, 175 bp, Homo sapiens
  chr19:33166793-33166968
  hyper
ggctctgcagcctgcttgccccggagttggcacccacggaggatggggaccgcaccctcagcttcgcagggagccaccgtggaggccagggcggtgcagagacacgacgtgtgactcggagtgcgcctggggaggatggacgagggagcgggggaccgctaacggggctccctct

SEQ ID NO: 12252 - DNA, 499 bp, Homo sapiens
  chr19:33166988-33167487
  hyper
cgcacgtcgagggtcccgggcgggctccgtggacgttggcggtagcgccgagcgagtcacggaccatgaagagcgttcgtgccgcgcggcccaaggccgggatgggggttagccacatcctgccgcgctgagggggaggctaacgggcgcgggcggccgggcccagccggagcccaccgcgatggcgagggaggagtgcaaggcgctgctggacgggctcaacaagacgactgcgtgctaccaccacctggtgctgaccgtcggtggctcggcggactcgcagaacctgcggcaggagctgcaaaagacgcgccagaaggcgcaggagctggcggtgtccacctgcgcccggctgactgctgtgctgcgcgaccggggcctggccgccgacgagcgcgccgagttcgagcggctctgggtggccttctcgggctgcctggacctgctggaagcggacatgcgacgcgcgctggagctgggcgccgcgttcccgctgcac

SEQ ID NO: 12253 - DNA, 455 bp, Homo sapiens
  chr19:33167496-33167951
  hyper
cggccgctggtgcgcacaggtgtggctggcgcctcctccggcgtggcggcgcgcgcgctgagcacccgcagcctgcggctcgaggcggagggcgacttcgacgtcgcggacctgcgggagctggagcgcgaggtccttcaggtgggcgagatgatcgacaacatggagatgaaggtcaacgtgccccgctggaccgtgcaagcccggcaggcggcgggcgccgagctcctgtccacggtcagcgccggcccctcctcggtcgtgtccttgcaggagcgcggggggggttgcgaccccaggaaggccctggccgccatccttttcggcgccgtgctgctggcggctgtggccctagccgtgtgcgtggcgaagctgagctgacggacacccgacggccgcctgctgctgccgctccctcccctgagaaaagactcgggatgggtgtggggtctggc

SEQ ID NO: 12254 - DNA, 30 bp, Homo sapiens
  chr19:33182626-33182656
  hyper
gacacccattgtcccgcgagagtgccctag

SEQ ID NO: 12255 - DNA, 39 bp, Homo sapiens
  chr19:33555230-33555269
  hyper
aaaataaatatgagaccgccaacacgcctgggatggtct

SEQ ID NO: 12256 - DNA, 86 bp, Homo sapiens
  chr19:33555883-33555969
  hyper
gcggcccttctagccccgcctgaggccgagcactggagccctggagacgcgccccgccccgtcgcgggccccgaacccgcgcccct

SEQ ID NO: 12257 - DNA, 64 bp, Homo sapiens
  chr19:33685241-33685305
  hyper
cccacggacgctctaccggcggcacccggccgggcgggctgggcgcagcgcggggcggcccggg

SEQ ID NO: 12258 - DNA, 236 bp, Homo sapiens
  chr19:33685802-33686038
  hyper
cgcatggcagtccgcgccgcgccctgaccgacctcctctccggccgcggcatcccgagccccccaccgcggtggctcccgcgcggagacccagagaggggccagcaccgcttgcccgcctggccccgggcctgggagggcgactctggtggcgcagccccggctcccgccccgctcggagtagcgcccggagcccgggctgagcgctggcaggaggcccttcgtgcaggcggcagc

SEQ ID NO: 12259 - DNA, 3867 bp, Homo sapiens
  chr19:33790838-33794705
  hyper
attgactttgatatgtttatattatagatataatacataaaacatctagagtgagactctacgttctccccaaaagaagagaaccaagccgtccttccctgctcccagccccagtgatgcgttggcgggaggccacctcccttcccgaccaggagccagggcctctgggggacaagccttgtgggcagcccaggccggaggggctggggaaagctgagggcaaaggagaacccccctcacctcattggtcccccaggatcaaaagtaatcccaaaaccaaaaggaaagggagtctcagacccttcccccagctgccgacggagagtctcattttggcaagtatccgagcaaaaccaaaacaaaacaaaaaccaaataaaatggtggtttagcagagacgcgcacattcacattgcacaaggcactgctggggcacagaggccagatacaagtgttgatatcggctgataaagcaaaatatttggaaagcttgtcataactccggtccctctgggatggactgatcgtgcttcgtgttcctaggcaatgctgaaggcatacagtacaaacaaggctgagggtcccagtggcccttcaccccccatgcccgccccacagccagatctctaggtctccctctcccaccaggggtatacatcctcagagctgacccacgacctagctttctggtgtgactcggggtgggggctcccactggtcacctggtgacccccatcgcagtgagttccgccccaaggggaagcccagcctatagcaggctggggtggggtgtgtgcggagggaggtgggagaggcgtggaactagagaccctccaccttcatgtagaactaggggaacaaccttaggttccaagccccaagtccctatgtttccacccctttctaaggacaggcgtggaggagcggctggggctggcgggcttgtcgggatctcagctccctgagccctcctcctgccacgggcctgctcccctccttctctcatgggggtctgctgtagcctcgggaaggaggcaggaaacctccaaataaaatgacaaggcacgatttgctccccctactcagtaggcattggagcggtgagtttgcatttccaaggcacaaggttatcctaaatactagagttgccgggctcccagctcagccccaagaattctcccctcctcgcagggagaagccaccgcctggccccctcatcttagacgcaccaagtccggcgcagaggaagggaggggacacgcggagcaggccaggctttcaggaggcaccggaatctcctagtcctggctcgcacggctcgggcaagcctcgagatccggcgaccccaaaccactccctgggtccccgccggaggctggcccagggcggtcccacagccgcgcgcctcacgcgcagttgcccatggccttgaccaaggagctctctggcagctggcggaagatgccccgcagcgtgtccagttcgcggctcagctgttccacccgcttgcgcaggcggtcattgtcactggtcagctccagcaccttctgctgcgtctccacgttgcgctgcttggccttgtcgcggctcttgcgcaccgcgatgttgttgcgctcgcgccgcacccggtactcgttgctgttcttgtccaccgacttcttggccttgcccgcgccgctgccgccactcgcgcggaggtcggggtgcgcggcgcccagccccttgagcgcgctgccagggcccggcaggccggcggcaccgagcgcgggcgcggggtgcgggctgggcacgggcgtgggcggcggcgtggggtgaccgggctgcaggtgcatggtggtctggccgcagtgcgcgatctggaactgcaggtgcggggcggccaggtgcgcgggcggcgggtgcgggtgcgggtgcgagggcggcggcggcggcggcggctggtaagggaagaggccggccagcgccagctgcttggcttcatcctcctcgcggggctcctgcttgatcaccagcggccgcagcgccggcgccccgacgcgctcgtacaggggctccagcctgccgtccaggtagccggcggccgcgcagccgtagccgggcgggggcccgtgcgctcccccgggcatgacggcgccgccggggcccgcgggcgcgcccgggtagtcaaagtcgccgccgccgccgccgcccgtggggcccacggccgccttggccttctcctgctgccggctgtgctggaacaggtcggccaggaactcgtcgttgaaggcggccgggtcgatgtaggcgctgatgtcgatggacgtctcgtgctcgcagatgccgcccagcggctccggggcggcaggtggggcgggaggctgcgcggggcccgcgccccggggaaagccgaaggcggcgctgctgggcgcgtgcggggggctctgcaggtggctgctcatcgggggccgcggctccgcctcgtagaagtcggccgactccatgggggagttagagttctcccggcatggcgagcctcggcggcctccagcctgcgcggggcgtcgccgccgcccacccggagaccctgctcgcccgcgcccgcgcacctccgggtcgcgaatggcccggcccgcgccggcccagcttttatacccggcaggccgcgtcgccccctagagtccgaggcggcctctgtccccgggctgcggcggcgcggcgcctgctgggtcctagcgcgcggccggcatggggcggcgaaccagcgcggcacagcgccgcgctccccaggcaggccgcggcgcaacgcccaccgcctccagcgcgcccagcagagccgcggcgctcgctccaagctccgcccccggcccggccgtcgcccccgcgcccacgtggtcggtagcgggggccccctcctcctgcctgccctaggcgcccgtatccagccacggccgggagcccaggagtatcccgaggctgcacggggtaggggtggggggcggagggcgagtcttggtcttgagctgctggggcgcggattctctttcaaagccagaaccaggcctgtcccggacccgcgtcccggggaggctgcagcgcagagcagcggggctggggccggtggggggccgtttgggacgcgcggagaggtcctgagcgcggtggctctgcgtctcctagctctgatctccaggctacccctgtgattccgcgcagaggtacctctcggaggacgccggggtcccatgggcggcgccgcgcagggcgctaggaccccgcggggagcggaggcggcctcggcccgggagcctggaggacctggccggtcgatccgcccgggctggaaaactttctttataattacttctccaggtcggagcgcgcggcttgctaggcgcgcggggccggcgctgttacccggcgtggagtcgccgattttttttcctgcgggaccgcggggccccccagactagcggagctggacgccggggcgagcacggggaggggcgcaccgagggaggagacaaacttaactctggggccgggattccgaggcgggggccgcagccctcgaggcccgaagccaccgcttcctcccccgcctccccattcaggtgggcgccaacggcgggagcgagggtgtccaggccgccgggctgccaggtccgagcacgcacagggagaactctgcccagtggttcgccgggcgctgtagtccccgggatcctagggaccgaggcggccaggccctggggccccttgagtgcggcagctaatgctctcaccgcggcgggggaaggagcttgccaccgagacccccagccacgtgcgtccctcgcattctttaccggggccggggtggcggctacggaccgtcagctgggcccag

SEQ ID NO: 12260 - DNA, 222 bp, Homo sapiens
  chr19:34112507-34112729
  hyper
agtggcagcactggccgcggtctggagcctagcgtcaggccggagtccggctctcctgaaccgggagaccggcgcagccccagccacgaccgctcccacccccgcggccgccggaccgcgcccagcagcgactctttctgagagcgctgccagaggggccgcgggagccgcagagcgcgcgtgggcgcggcgcccgcgagcccccgggagggccgagtgcat

SEQ ID NO: 12261 - DNA, 157 bp, Homo sapiens
  chr19:34113145-34113302
  hyper
ggagaaccgctcccggactggaggcgcccgcggcctcgggtgcgtccgctgcgccaggtaagtggctgcgcccctgccccacccctgttcccgccctgcgcaggctcctggcctgcagagacgccaggaaggggtcccgagcgggccccggactgca

SEQ ID NO: 12262 - DNA, 683 bp, Homo sapiens
  chr19:34113366-34114049
  hyper
cggggctcgggtctggttgcactttggggaccggccccggtagcgggaactttaattagactttctctccttggatctcactcgctgccgcgcttctgggaactgccgtccctcgggccctcttggtccctgcggactcccgctccgcctcctggccctcggtgctgcccgcggggaggcggcgtcgggcgctgagcagcgagcgccgagggccaggcaggagcgctcggggcgctggggcttcctggcgcgctcggagccggggctccggacgggttgcggcgggcagagactatgggggaagtttaagtggccttggcttcctacccagcggctccgtcgcgcgcgtccccgacccgcaactctccagggcaccggcctgtgagtgctggaggcgagtgtgcgtgcgtcagcgatggtgtgaaggtgtgtgcgtgcgtgtgtcgggagtgcgggagtcggagcctggggcggctccagggggcggggaaatgatccgtttggccgcgggaccgagccgagctctgacggcggctgcaactccggctaccgactctgcagacccgctctggcctcgctggaggccagccgggccaggagggcgatcacgggttttggcagtgcccgatgctggggcttgggtctgatgtgaccccgattccttctccagtgcgggactcccg

SEQ ID NO: 12263 - DNA, 87 bp, Homo sapiens
  chr19:34114286-34114373
  hyper
cgcgtcccggcccctctccatctgcttggcgcgatctggcgcagcagcagagcacgtgggagaggcgttgggtgcagggaggtagta

SEQ ID NO: 12264 - DNA, 151 bp, Homo sapiens
  chr19:34175218-34175369
  hyper
taaattgccttccccgggagtagcgtgccgcccggcaggggcctgggtgtgccaaggcccggctctggggatttcaggacccaggccagcgctccccagcagcagggcaggaggcagcctgagagtcggcagccccgccttggagtctgag

SEQ ID NO: 12265 - DNA, 30 bp, Homo sapiens
  chr19:34287110-34287140
  hyper
atcagcctctcccccgccccctccccgagc

SEQ ID NO: 12266 - DNA, 687 bp, Homo sapiens
  chr19:34310889-34311576
  hyper
cccttttctgtgtcctggacccggttcagggcccccgaggaagctgcggtttggggcgagccgattgcaccagcagggccgggctgctgctcccggggctgacgcgggccacgccctcctggacgcggacacacccccatttccccgggcccacagagccacgcctggccctgcagccaaacagcgggaaggcagattggtacgagtaggtacaaggccctggaattctcgcccggttgccacacactgcacggagcataattgggggaggttgtgcaactgcccgggaagccggggctcgcaacgagggctctctccaagtccccatcacaggcctccggggagcctcgggacagagcctgacgccaccttcgggtgacatcgatggcctcgctctggcagaggagtagtgtggctctgccgagaactggggagcccgggtccccgcagggccaaggggagggagggctggcggaaggggccgcgcccacagccccaggtggcagcagcggcggtggcggtcccgactggcagagcctaacgagaacagggcctatccccaggggccccgggctggacgcagaccagatctcgcgggggtgggctgggaggcgcccgccagaggccggaggctgacagtgcctttcctatcctatgggtctattgtgggcccgcggagcccccatg

SEQ ID NO: 12267 - DNA, 154 bp, Homo sapiens
  chr19:34972209-34972363
  hyper
cagtattcctgggcgcgggacgggcgaagcgccgtgggttccaagctgagctgggtcggccctgcagcgccggagagcaaggcggcgcagggaagggagatggggcgggatgtggggaaagctgtcgactgcttggatctctccggcccggatg

SEQ ID NO: 12268 - DNA, 125 bp, Homo sapiens
  chr19:34972522-34972647
  hyper
cgcggccgccgccactccccccacattccagaggccgcagcgccgtctccttcctcgcattcctgcccccgcaaaggagtccctccgccccgcgcgaggccgcggcgaggagggggcgcggcccg

SEQ ID NO: 12269 - DNA, 448 bp, Homo sapiens
  chr19:34972675-34973123
  hyper
cgcgcgccgccgagcagggcgccgcgtcccccggcccgcgcgtggccgccggaacgaccccggcccggcgccggccccgccccgccccgcgcccaggggtcccggggcgggctccgggcttcgggcggacgatgcggcggcccggccggagcggcggcgggaagcggaggcggaggtgacgcgccagggccggcgggccgggccatgcagcgctccagggcgggcgcggacgaggcggccctactcctggccgggctggccctgcgggagctggagcccgggtgcggctctcccggtcgggggcggcgggggccgcggcctgggcctggagacgaggcggcgcccgcgctgggccgcagagggaagggcagcggcggccccgaggccggggcggacggactgagccgcggggagcggggtccccggcgcgcggcggttccggagctca

SEQ ID NO: 12270 - DNA, 214 bp, Homo sapiens
  chr19:34973242-34973456
  hyper
cgctccggtcgctcggacccgcgtcccggtcccgggccgccttcggtgggcagcgcccgctccagcgtttccagcctcggctcccggggctcggccggcgcctacgctgacttcctcccgcccggcgcctgccccgcgcccgctcgctccccggagcctgcggggccggctcccttcccgctgcctgcactcccgctgccccctggccgggagg

SEQ ID NO: 12271 - DNA, 195 bp, Homo sapiens
  chr19:34973553-34973748
  hyper
cgctcggcccggcagttccctgcgcgcatggctggggtccggggttccgagactgcctcgggtaggcggccggatcagcggaggagagcacggggctggctgggggtgcagcagtgcacggggttgggacgaggaaggtgcatcccctggggactggggagcgcaaagggtgagtgagtgcgcctggatccccag

SEQ ID NO: 12272 - DNA, 30 bp, Homo sapiens
  chr19:35168379-35168409
  hyper
ggccggctctaggtcgacggccccaggcgg

SEQ ID NO: 12273 - DNA, 30 bp, Homo sapiens
  chr19:35168633-35168663
  hyper
ggtttggggcagtgtcgttcccggaggtcg

SEQ ID NO: 12274 - DNA, 219 bp, Homo sapiens
  chr19:35168867-35169086
  hyper
aacgcggggtgatgacggcgccgacctcttggcactgttgtgagagcgaagtgggcgcgagagcagacgccagctacagttttttttgggttatgtcgtcatgaagccggcgctttcagttgtgcaaccttgaacaaatgggttcagtatctcggaatttcagttttgtcttcattttaaaaaataaatctggtttagaactcgacctcaagcgatccg

SEQ ID NO: 12275 - DNA, 30 bp, Homo sapiens
  chr19:35169516-35169546
  hyper
ccagggagagattgacgctccggcgagtga

SEQ ID NO: 12276 - DNA, 66 bp, Homo sapiens
  chr19:35490572-35490638
  hyper
gaaaagcccttaccaccgagttagtgggactcccagcactggggtgatgagcgcaaggtctcagca

SEQ ID NO: 12277 - DNA, 310 bp, Homo sapiens
  chr19:35531802-35532112
  hyper
tggggccggttgtgcgggtggcctatctggggcaagcagccgaggccgactgtgtccggcgtgtggttgagcacgggcaggtgtctggcggtgaccctgcacgtctggtgtttacctggccctgggtctgacgtgggccgcgcctggctgctggcgggacagtgtgttatctgcctgcggacgcttccggccacttggcctgggcctctgcccttagcgctgtgttttcccggccaagccccccatcccccctatctagtgctaggactttctggctccagaggtcaccgcggccgggcggaggctgcca

SEQ ID NO: 12278 - DNA, 30 bp, Homo sapiens
  chr19:35626434-35626464
  hyper
gtggggccagatcacgtccagctgctccct

SEQ ID NO: 12279 - DNA, 42 bp, Homo sapiens
  chr19:35738943-35738985
  hyper
accggtcccaagccccgcgccttcgctcggcccctttaagag

SEQ ID NO: 12280 - DNA, 30 bp, Homo sapiens
  chr19:35760846-35760876
  hyper
cagcgcccgggccccgccgctgcctctgtg

SEQ ID NO: 12281 - DNA, 136 bp, Homo sapiens
  chr19:36123861-36123997
  hyper
tcctgcgtccagccttcgtcccccacgtgctacagagagcaggtgaggggccagggtcatcatccctgccacataactccccccaggccctggaactccccactaacaccctgacagattccgctctctcctctgc

SEQ ID NO: 12282 - DNA, 30 bp, Homo sapiens
  chr19:36232203-36232233
  hyper
cgggaatctacccccgagccctcatccccc

SEQ ID NO: 12283 - DNA, 30 bp, Homo sapiens
  chr19:36236378-36236408
  hyper
aggcgcttaccaagcgctcggaaacgcccc

SEQ ID NO: 12284 - DNA, 147 bp, Homo sapiens
  chr19:36336488-36336635
  hyper
ggagaggcactaggcgggggcgggacatgcgtggagggggcgaggccagaccagagaggggagggatccctcgcactcccacctctccccttccttgtcccaggacaagttgaccggcggattgctgctgacgctgacgcatgtcaa

SEQ ID NO: 12285 - DNA, 30 bp, Homo sapiens
  chr19:36394467-36394497
  hyper
gcaccccgtgtgcccgccgcacagccccga

SEQ ID NO: 12286 - DNA, 44 bp, Homo sapiens
  chr19:36427252-36427296
  hyper
gtgcgcgcggagcctgcgcctttaagcgccggtgcgcgcgctgc

SEQ ID NO: 12287 - DNA, 30 bp, Homo sapiens
  chr19:36523569-36523599
  hyper
gattcaggatgcttcgcccctccccttctc

SEQ ID NO: 12288 - DNA, 31 bp, Homo sapiens
  chr19:36544541-36544572
  hyper
acagatcttttacagtcgaagctaattctga

SEQ ID NO: 12289 - DNA, 31 bp, Homo sapiens
  chr19:36708803-36708834
  hyper
attcaaaagatacatacgaaataataaaact

SEQ ID NO: 12290 - DNA, 138 bp, Homo sapiens
  chr19:36736157-36736295
  hyper
cccctgagactctaacgcgtgcaccaactcgcgcctagagggcgtgtatgaccccagctcagttctaagccgaggggctgctgccggacattctagggtctgatctggcgggctcgaagggaggacagtcactgcgac

SEQ ID NO: 12291 - DNA, 284 bp, Homo sapiens
  chr19:36736314-36736598
  hyper
cgacgcccacccagaaaatccggatcacatttcccgtggtccaccgcgcatctaggaggttacctgcgtccaggcggtgacttgcgagggaccacctttcccagggtccacggcgcatttaggtggtggcttgctctggactacatttcccagggtccaccgcggatctaggaggaggcttgagatgcagcctcccagcttcgaggctaccacctgcccgaattggtgctttggcagagtctctggtgcccgggtgaatgggttcagggtctcttaaggaccct

SEQ ID NO: 12292 - DNA, 56 bp, Homo sapiens
  chr19:36736765-36736821
  hyper
cggggccttggctcaggcggaacccgaccgggatcgccccgcgagatgcagtcgtt

SEQ ID NO: 12293 - DNA, 230 bp, Homo sapiens
  chr19:36822236-36822466
  hyper
attttaataaacctcaacctgcgggtcactccctcccaggcgtgcaacaaaacacctgcctagaaatcaaaaggcgttttacccgagtgggctgaaaaagccccgtttttacctttaatctggagacaatacgggtcagaggtcaggaaactacatcagcgccagtgcgagcgcccacgagtccggtggacggatgagaaacggccggggggcagcctgagtcccagttc

SEQ ID NO: 12294 - DNA, 335 bp, Homo sapiens
  chr19:36822557-36822892
  hyper
cgtggccgaatagcccaagactgaggactcacacttcccactttgcacctggaggccacctgcagaccaaccttgcgccaggcttccggaaatgggagggcgggcttccggaaacggcggccaatgggaaacgtgatcagatgttactaggcagacagtccgtttccaggcaacacagaagaaaggaacgcgctcagtcagcctcaaatagacggagatttcagccaatggatgtgcaggttccctccacattagccaataagaagtgcttggggcctacctgcctacaagcacagcaaaagctttcctgcgcatttttgcgctggaatggctac

SEQ ID NO: 12295 - DNA, 270 bp, Homo sapiens
  chr19:36909078-36909348
  hyper
cagagctctgggattacagatgtgagccacctggtccggcctagtctgcgcgtttctgctgggagtctttggcgtgcagaaactgaccgagggccatttctctgcagctgggcccggtgtgggcagaggatgctggggtcagtcacgcactccacggccacaacaaccttcgctcatacaatagtctctgcacccaagtcagccgcacagactccgtcacgtcccagccccggccccgtcacgcccacgacacacacacccgggcctgag

SEQ ID NO: 12296 - DNA, 319 bp, Homo sapiens
  chr19:36909623-36909942
  hyper
cgctcgctggtgcagcccctgctctgcgtgaacccggagccggagctaggtccgtcccagcgaggctgcgcttcgagtcccttagcgcctggggacggcgcggcagggcctggaggggagcggggacagatggctggcgcgttaaagaggggcgcccgcgaccgcctctctatagtgccaactagggagccctgtgagcgaggacggcgctgcgagtctgtccctggcgcgctcctgggtgggattctttcactgggtgtggctgttgggatttgagaccgtgtgactccggagattcggggaagccagttcctatatt

SEQ ID NO: 12297 - DNA, 137 bp, Homo sapiens
  chr19:37095675-37095812
  hyper
gtcaccgctcagcgccgtcacacaaacggccccgcccccactcagtcccgcgggcccaatcggggacagtcagggctgtcccgggctgtgcacctgctgtgcacacacaccccctgctgtgcacaccccccgccccc

SEQ ID NO: 12298 - DNA, 210 bp, Homo sapiens
  chr19:37096487-37096697
  hyper
gcgaagggggattttgcccgttctgatcccgcggaagcgccatcgctggcggcgggtccccgcgcggagcgggcgctgtgtgttcgcgcgcgcgggcgcgcgctgaataggggtggcctcctgcgcccaacctgctgcattttaggtgcttgcctctctttgggatgttgtggccgattgtgtgtgaaaagtgaacggagtagtgttgct

SEQ ID NO: 12299 - DNA, 645 bp, Homo sapiens
  chr19:37157549-37158194
  hyper
agacattcccttccgcggcactggtgagccaggatttcttaccttcagcattctcagggaaggctctggtccaagctctgattcggattccaagcgaagccacacgcccagctcttccttctccaccggcccgggacatccttacctgcctctacccggagaccattcctgcgaggctcctaccggaagtagctgtggacagcagtgtcctctgggaaatgcagtccgaggggagagcgcctggggtggagcgggtgtgttccgccgggctccgggatgcacttgcgcagtttcacccgaggctggagtgacgccaacctgttaatgttcgttttcggattctggacttcgggttccgctgaggacggatttcggaataggcacagtggctgccccgaacccctcaaggcggcctccgcgggctgtggctgaagataattttcggcgggcgcggactaacccggcttccctttgtggagttgtggtgagaaaggtgttttgttgtgcgcgtgtccgaaggtgactccggaggagaaggtggatatgaactgacggtgagggtgtagcgcgtgagatttgtatgtgaaacgatttaaaaaaaaattttttttttggccgggcgcggtggctcacgccaaggcgggc

SEQ ID NO: 12300 - DNA, 419 bp, Homo sapiens
  chr19:37263455-37263874
  hyper
cacacccactccgggcgcgcacagtcacaagcgcccacctgatcacccagagtcagcaccacacagccacagtcacagaccacggagacccacggcagccatcgcgatcacacacgcaaactcctctcctcagccctccacacacaaaaggaccggagccggattcctcaccctcagcattctctggttccgctcggggccagcctagccaagttcctcaggactccaaggcgcggcggcagctaaatcggcacagcaaacggtcccgccacctggctaagaggaagccaaaatctcgcgagacgtggcgtcggcctgcgggatcctctgggaaatgtagtccagagcccgactgcgggcttccctatgcctctcatttccaagcctggcttgtttccttttaccgctcctctccaacg

SEQ ID NO: 12301 - DNA, 212 bp, Homo sapiens
  chr19:37264216-37264428
  hyper
tccagggctcagtctgcattgcgcggaaaatgaaggtgaaggtggaggtgggacctgatggtctcgtcccggatagggttgaagaagtgggagaaaaggaatcaaaatcgtggatgggataagattgtgcgcgaatgctctctgggagcggatcgtggccgacgagggcccgaagatgctgccttgtgatcgcaggtgtgagtggaagctgt

SEQ ID NO: 12302 - DNA, 31 bp, Homo sapiens
  chr19:37282770-37282801
  hyper
tcccattggcgcctgacgggttggttagggc

SEQ ID NO: 12303 - DNA, 52 bp, Homo sapiens
  chr19:37287904-37287956
  hyper
tgcttgtaggaaggtcggccacaagcacttcttttgttttttgaaaccgagt

SEQ ID NO: 12304 - DNA, 229 bp, Homo sapiens
  chr19:37288195-37288424
  hyper
gggattacaggcgtgagccgccgcgctcggccggccccaaacacttcttattggctaatctggagcaaacctgcatatccattggctgaaagctccgtctattttagggtgactgagagcgtctcttccttctgtgttgcctggaaacggactgttcgcctagtaacatctgatcacgtttcccattggtcaccgtttccggaagcccgctctcccgtttccggaatcc

SEQ ID NO: 12305 - DNA, 225 bp, Homo sapiens
  chr19:37288606-37288831
  hyper
cgggctgcgtcccggcccttccacatcggtccaccgcactcgtgggcgcccgcattggtgctgacataatttcctgacctctgacccgtattgtctcgcgattaaaggtaaaaaacggggctttttcatcccactggggtaaaacgcccttttatttctagccaggtgttctgttgcagaacgcctcgaagggagggagtgaccggcaggttgaggtttattaaa

SEQ ID NO: 12306 - DNA, 122 bp, Homo sapiens
  chr19:37328885-37329007
  hyper
caccacctttacgaacgtggtcacgcacaacgcgacgcagtcataatcacgtacatacagtcacatttaaatagtccattagggtcacacacagcgcctgtcaacgtcgtgtgcgcgtgcgc

SEQ ID NO: 12307 - DNA, 322 bp, Homo sapiens
  chr19:37329066-37329388
  hyper
agctcctgcatcaatttcactctcgcatccactgctcccatcgcgatcgctcgcccccacgctccctcgccggcaaagccaccaactccaaagacattagcacctcactcccctcagccccggcctcgggccctccggagtcattcggcttctgtgtctcggaatcactcacccggccctgcggtcccttgatggtggaaggttccgcgatctttctattaaccctaaagggacagagggctgacaggaagttgcccggggaacggtgcactctgggaaatgtagtccggagcctgggccgtctttaactgccccggacacc

SEQ ID NO: 12308 - DNA, 85 bp, Homo sapiens
  chr19:37329447-37329532
  hyper
cgcccacacaccgctcacatctgctgccgagagcttccagaattccaggccgcgtttaggaagcttcagcggaggcatgcaggct

SEQ ID NO: 12309 - DNA, 254 bp, Homo sapiens
  chr19:37340847-37341101
  hyper
caagcaggcccaccgcggtctcacacacactcgagccttcctttgcccagtctcacatgcatgactgggatcgcggatttgtccccttccgactccccatgctggttcggtcccagacgctcaggtgccacattggggtgcgctctcccggctcctccacacgctacgcagctgcccgcctcaagagcgtctgcgtgcttccagcgttaagtggaattccaagcagcctccggggcacagttagtctggtcact

SEQ ID NO: 12310 - DNA, 86 bp, Homo sapiens
  chr19:37341165-37341251
  hyper
cggcgaggcttggactacgtttcccaggagaccctgcggtccagtatgtctcccgaggaggggcggaagcccgggagccgccctct

SEQ ID NO: 12311 - DNA, 682 bp, Homo sapiens
  chr19:37341571-37342253
  hyper
actcccggaaggctccgatgggcagctcacctcaaagagatagttttgttggtgccagagtccgcgccaggggaatcgggatggctgggctgtagctttcggcaacctgtcgctttctggactacacttcccagaagcctctaggcccagggcactctcccgcgataactagattgtctcttgaggagtgggcgggatcttcccgcggatttgggcaagcggccttggggctttgtgagatagctagggtcgacttgtgtggattctagtagaacggagctgaccctatccgaacaggcgtaagtgaggcggctcggagcctggcgcgacaggaactcccgacctgtgtgggctgcgtggggaacaggctaaggagcgattgtgaggagtgtgtacggttgtgactgggggcgtgtgtctgtgcgaccgtgtatggaactgtgagggcggggaggaggactttttgtttatgtttgtgcgggtgtgagtagagtttaattgtgaccgggttgggcactgtgtttgcgagtgtgaggttcctggaccgcggttgtgactgtatgtccccttggggtgtgtgtgtgtgtgtttactaccatttgccgaactgtgtgtagtatgccttaattttgaggtttgtggctgcttccgtgtgtgtgtgtgcgcgcgcgttggtgatatt

SEQ ID NO: 12312 - DNA, 847 bp, Homo sapiens
  chr19:37406843-37407690
  hyper
cctttccagtcatcccggatgggaacttgcagacctgagccagttctcctggggaccaaaatatctcacctcccagatctaagggtcccgccaggagtgacgaaacgttcgaattcctgcgagaaaagtggcaggccaccaggccctctgggaaatgtagtccagagcgggacccacgccgattcctgtcagctcctcgcctgggcccacccgaaacggctgctccctcaactctcaacatccagccgagcctcggagttgcgggtcgccgtagcgctgcgcaatggagatgagcctcccggggaacccggcccaagcctcaccctcacacaggaaagcagatgtgttctggccggaagttgagtggggccgcggggcctgctgggaggtgttgtcctcggaaacgtcgctggcgcggagggatggttcggcgctttaggcgtctgtcacagacctatctgcgggtcgccttcacccagcatctcagaaactgcgcgcgggatgaacattcgggtgtttccggcaggtgacgctgccgagtccccgcagcagggggcgagcaagggactcgcggttgacgggacacggatcctctaaggcccagagtgtcccgagtagcggcagtggggagtgctcagggtacgctaatggtgagtggttgcagttgatgggacaaaaaactgtgatgggagttagtgtgggtgtgtggttgtgtgtgtgagtgtgacggcacgaataatctgatggggtgattgtgatatttggttgcgcgggattatgatgaaatgtgtgatatgtgtgtgattatgattaaggctgtagcgagtgtgaacgtggcgaagtgtgc

SEQ ID NO: 12313 - DNA, 636 bp, Homo sapiens
  chr19:37463931-37464567
  hyper
tgcagctgggcagtctggcctcggcttcactggaggcggggaactggacatgactgtgagcgccagtgaccgtggtgcggtccaggccccgggtggcgcacccacctctggactacatttcccagggggccccgcggccaaccttttccggccgaagaaggctagtcacctttccttggcgggtgttggaaagcaaagggctggaacgtcccgggctgcggagctcgctgggttgggatggactcgttcagacctgagtgctaggacgccgaagggggcggtgaggcgtcccggcgaggagctggggtcgtctggagtttaaaagacaggtggctctcggagatgtgcgggctgcatgcccacgcttcaccgctaggggaggtcagggctgtgcgatggggaaggaagagagtgtcggggcggtgcagtcgggatgggagaagggtgtcagggccactggcccccagctcggcagagggcagtgtcgggccgcgcgcaggcagggagtgggtgtggtgtgaggctggcgctggagcggtctgggaatgttaggaggtctagggtatcgcggccctgcgtcctcttgtctggactaaaagtccgggcagttctccccggacctggattgtgggccca

SEQ ID NO: 12314 - DNA, 79 bp, Homo sapiens
  chr19:37464666-37464745
  hyper
cgtgtgccgggtcatcgaccccatctttgggaggcctgggagggggcgggacaccctcgctgtacattctggggatacg

SEQ ID NO: 12315 - DNA, 158 bp, Homo sapiens
  chr19:37701528-37701686
  hyper
cacacacatatttagagacatcgtgcagtttccgtaatcggcgctcacgggcagagaatataaccgcgcccttatggtgtttatttgtgtgggtcgccatctttgatgcgtatcgattccgtacagtggaggagtccgcctcctggagtgttgactag

SEQ ID NO: 12316 - DNA, 30 bp, Homo sapiens
  chr19:37862257-37862287
  hyper
tatgtgacaggctgcgggtgtgacagaatg

SEQ ID NO: 12317 - DNA, 922 bp, Homo sapiens
  chr19:37957585-37958507
  hyper
cagcgctggcacaaacgccaagtctcacacatctacacccacaagcacaccctaccttgtatccacagtttttcattcattcaagatcccactgtcatgcacgtttgcacgcaggttcatactgaaagataaaagggaaagcgcctccacgaaatccgcttacggacacgatcccggggccacactcagccagacgaatgtctggcaaatgacagtcacttcacgccagactctcacagtccttcacacgccactcccactgcctcagggaaccacaagcacaggcatcgccccgcccggcgtcctcctccaaagattggggcaccaggaccgcgggcccccactcccacccagcacaaagagtccggcgctcagagctagcggtttcccgaggactcaccaccaagcccgcggacacaggccccgattccacacttaacgctgccaaagtggcagagccggcgcgggctgggacagaggcggcactgaggccggcgctgtcggtggctgagagcgccacaagtctcggtccgttacaccaggggcgacgcttcccagaggcccccgcggctcacccgggcgggactggcttcactgtttgcgcgtcctgagaagcagaccacggtgttccagggctcacagctccgcgcaggggagctcagcctaggttttgcacgagcggcctcccgcgagcccagctctgagagattgggagcgcaacttggtgctgagaagaatcgaatcgttccgctgcttcctgcgccgaactacatttcccagaggccttcgcggccctacttccccgaccccacctgcaaaaaggcacttccttcttacagtcggctggagctgcaggttcgcaaggtccgtgaaggaagcccggctcagtgtgtttagttccgtctttttgggtctctacctg

SEQ ID NO: 12318 - DNA, 896 bp, Homo sapiens
  chr19:37959873-37960769
  hyper
cgcacaaaccttttccctgcggccaacctgcgattctcaactccccgccctggttgctaagggaggcgcgcagagcgcttgtgcctgcgcacttccacaccagcccgtgtagtgtgacgctgggccccgtccctgtgaccgggccaggctcggagctgcagggaatccggactttcgggctctctggaaggccggggagaggccagtgtgggaggacctggtggggaggaggccgtgttacaaaccctgcgcggagctgcaccgctgctgccagacactgcgacgccgcgaccttttctactccggactacgtttcccagcggaccccgcgggagttgggccggcggcccctttgtgtcctccgggggcggaggcagctgaggcgcttctttccgggcccgtaagggctgggttccatccaactaagggtagcggtgagacccgagtgcagattccccgagccttcggggcaggaaggagatcttccaccagttctgttctgcaggtcgggagtgggctgaggagtggcgtgtgggtctccggaagctcgtcgcaggccatctgtgtgactccggtgcgagtggaggttggtaccgttcagtgcgaggctgtcaccccgtgtgcctgtccacgtcctgtgtgactgggtgcgaggaagtcaatggcaccgtggaatgtgaggctgtgagttgaggcgggagcgggcgactgttcgctgcaccttgttgggccgatacccgcggcttctttgtgactgggttgtgagattgtcgcttgtgatagataccctggtggctgagccttgccggtatgggaaagggtgcccgtgtgaggcagtccatacccatggcctctgactgtggcgtgggtaagacggtggttggcactgtagtttt

SEQ ID NO: 12319 - DNA, 889 bp, Homo sapiens
  chr19:37997256-37998145
  hyper
gatctcttcccgctgcggcagccccgccctttccttgcggctccgccctttccgtgaagtcacgcccgtccttaggctgtctctgtctccctaagagcgagtctcttcgctgctctctaactcctagagctggctcagaaagagtttcacattgccataggggagctcctaggagaggctgcacccattgcacgtaagaagcggtaaaaatgtacgcggccatcttaccaggctgccggagacaaagaaagctcagctttgatgtctgggcgccaccatgttggccacaggaggttttggcatctgagatgctgagttaagagcagagacgacatctctgtttagggatccagggacacttccttctccttgtcctaaaatagccttatcttttggtctagcaaagggcttaatcatccgttttacggcacagttttaaacatggccgccccaggtaggagtcaagtgggcgtcgccatcatacctccaattacagctttgagaaacccagaatcctgttcactggaaggttgccgggtggcggctgacagcctcaaagtcgcaattgagtctgcgcaccggccattcaggatgggacgaccttataccgcggtgaggcggcgtggcaggacgaccaatttcagattcagggcgcggatgcagcataaatgggaaggcacggtttgagaaacggtcaaacctgggactagtggaggatagtgagctgccgactacggtggccgactgggtcagctatgggtgcccgtgagggtcaatgacaagggaactgaagggttaagagattcggcgtctgagcctcgcggggcctcagtggtggcggacagaggtttgcgggagtcagtggcacggtctctgaagaagatggatt

SEQ ID NO: 12320 - DNA, 1774 bp, Homo sapiens
  chr19:38145556-38147330
  hyper
taaacggaaggaactcgaatgcatttcacagaaacaaagcagcagcacgaactcacagggaaccggcttttagaagagcagcagcgattcgtttctccttctcaagcgccttctctggaaactggcagggctggggaagcaggcagagttcaggacaccccaggcttttcttgactcgattggaacccaccctccacgcttccctggccccaactaaccgccacctgcatgcacaaatggaaacgacagggcagagggtcagcagtcacccgcgtctgggttcgcagctccgggtacgctgtagttccgcacccggttgcccacgcccgggaccacccactgtgtcttttcggaactgtccagcgtgtcctcctagaccccagacacccaccccaaatctaggtcccagcgttttgcaggggaccttcatcctggggcgttcacctctgacttccctcttgggccttttcgctacggccgagcctaagtggctgaagcgcggacgaggatgcgcggggcctcggtctccaactgcaccacaggccgcacccacgaacctggtccggcacagttactaccgcccgggcctccaggcctcagggctgcagaagctcagtcccgggaaaaaaagcacaccggcctgaggctccacaggaaccttttctccaccttggcccggcctgcaaaacctggcccactccgcgctcttttccctcagaaaagcagcggccacagtggcgcccggctcccagccccagcctcacccgactcagaggatagcccagccctgggagtcagcggcgccagaatacgggagagcgcctgtctccgtcgcgaatgcgctagcgcgcgggggggcggaggcaagtcccgcagctgctccgggccgggaggggcgcgtggggccgggtctcggcggggatagtcgggccggggagacggagccagaggggccgcagtgtccctcgcctcaggcctctacctgtaatggccgccccgtgactgaccagtgccattaaagataatccaggcctgctcccctgtggacactgcggtccaaaatttaaaaaaacaatattccgcctttttatttttcatttggttctcggctcggagacaggcggaggctgcgagccccgccccgcccccagcgacgcctcaccggaacctttggaaatcggcttctgcctcgagtgcgcaagcgcgcggggggcgaacgctggggcccttcagggagcaagggagaagtgtggggccgcacctgccgaggggtcgggaggtttggaggagggtggaggttggctacaggatcccgatggggatggagtgttcaaatctaggcctgtagccgtgaccctggcgtgagttggatggaggaaaccccagtatcgcgagcctggaccaaggcgcggcgcgtgctgcctgtggtgtttgctgagtgacggccgccgcgcccccgcgtacctggaccgagtgcctggccgctggcggagtagtgtttccgtgcacggggctgctgcgtgcgcgtgtgccgttctctagcgggggattaggatggtgccgcagagaaggctgcgcggtggtgcctgactctgacgctggctgtagcgggtctctggggtctttgcggtttgtgtctgcgtttgtgacgtacctgacatcggatctgtgactgtggctctgcctcatccagcgttatttccagaatccttctgatagggcagcgcttctggttctggttttccatggagacggtttgtgggtccctatgaaa

SEQ ID NO: 12321 - DNA, 260 bp, Homo sapiens
  chr19:38182699-38182959
  hyper
atttagccttttccaaattttcgagtaaactgacgtcctggaagaagcacccttattttcaccattttacagtcgaagaagggaagataagaggcggtgaatccgagactttcattcaggtgacgatccctcgcgggcactcactctcgctcacactacaatcagatcctccatgcggctttcatatactctgtcacactcgcagccagaatcccctcggatggactcttgcaaacctccagccccatcccgggatccgt

SEQ ID NO: 12322 - DNA, 270 bp, Homo sapiens
  chr19:38183111-38183381
  hyper
cgctcccacgtctccgggcgcagcttgtgccagcgactactaggtcagggggcgcagctgagagaattcaagcaacctccccgcaaccggttccgccgcgtttgtgggctggtagcccggaatacatttcccagaggccttcgcggccgacgtgcttcgcgcaggaacgcagccgcctcccgactggaggacgcggtagcggagctgctcaaagcgaggtgctcagccctgggaggctcagggctgcccgaggggcttagtcccagagcc

SEQ ID NO: 12323 - DNA, 71 bp, Homo sapiens
  chr19:38210086-38210157
  hyper
aatagaccccacagagcccagcgaagcacgctttacaaaggacacacacggcatgtacaggtcacacaagg

SEQ ID NO: 12324 - DNA, 425 bp, Homo sapiens
  chr19:38210326-38210751
  hyper
cgcctgggggcctccgcgctctgagcgcctcctgcagccccactctcaccgccacgcagggtaccacgcgggcggcgggctggggctgcagaggctcccgcagtgacctgcgccgccttcttcaggtggaaccaaaaggtcccggaaccggagccaggggtccaagttttctccgttgcctttgtaatatgtagtccaagccagaacagtcaggaccgcaggtaccggtgagaaatggagtccagaatcctaaaaacctacgagaaatacggcagcgaccacttggaccgcgcctcccacccaccgctcgagccccggagacttctgggagtggccgccttgcctcgagtgcgcatgcgcagatcggccactactgggcccctggcctgaggcttagggtggagttagtgcgttcttagggccag

SEQ ID NO: 12325 - DNA, 126 bp, Homo sapiens
  chr19:38700327-38700453
  hyper
tgtctccgccctcctcctcctcgaggccccgtcctcaacccgcactgccctccccccgccaccgggcgaagggggcgggaagcctgggaacaggctgttctcacatcctctcctggcgccggagcc

SEQ ID NO: 12326 - DNA, 93 bp, Homo sapiens
  chr19:38700504-38700597
  hyper
cgcgcccaaactgtgctttgaggcccggcccttcccttcgtgtcccagtttccagcttcctctgcccgtctcggacatccctgtctctcctcc

SEQ ID NO: 12327 - DNA, 30 bp, Homo sapiens
  chr19:38701979-38702009
  hyper
ggcgggggcccacccggccccaccaccgcc

SEQ ID NO: 12328 - DNA, 30 bp, Homo sapiens
  chr19:38715183-38715213
  hyper
ctcacacagccacacgcacacacactgcaa

SEQ ID NO: 12329 - DNA, 57 bp, Homo sapiens
  chr19:38747159-38747216
  hyper
gtcggcttgaggcacgcagtcgtgcgaagttgaggtatgggcggggacccagagtcc

SEQ ID NO: 12330 - DNA, 658 bp, Homo sapiens
  chr19:38754870-38755528
  hyper
ggcttccaagaaacgcgtgtctgccgccccctcctcccaccctgaggccagtcctagagcgaaggccctcctccgacgtcgtcaccaagcccaagggaagggtggcaggtgctcagcgggcagacgccccgccccgccccgccaggttctgttgggggcgaggcccgcgcaagccccgcctcttccccggcaccaggggcgggcccaggtgcgcccagggccggggagcggccgcgcaggtgcctgccctttgcgcctgcgcccagctcgccctgcctagccaggtgcgccccgccccctgcctgcccggccaccttcgggagccgcttccaataggcgttcgccattggctctggcgacctccgcgcgttgggaggtgtagcgcggctctgaacgcgctgagggccgttgagtgtcgcaggcggcgagggcgcgagtgaggagcagacccaggcatcgcgcgccgagaaggccgggcgtccccacactgaaggtccggaaaggcgacttccgggggctttggcacctggcggaccctcccggagcgtcggcacctgaacgcgaggcgctccattgcgcgtgcgcgttgaggggcttcccgcacctgatcgcgagaccccaacggctggtggcgtcgcctgcgcgtctcggctgagct

SEQ ID NO: 12331 - DNA, 30 bp, Homo sapiens
  chr19:38810523-38810553
  hyper
agacggtccggaggcgggggccacgtcagc

SEQ ID NO: 12332 - DNA, 727 bp, Homo sapiens
  chr19:38852765-38853492
  hyper
taggaggtggtctggggatgccgcttgcctggaggctctcgccccgctgcccaatcccttcacggtgccgggcgatccctgcagccgtacgcggacccggtgcacgaccccacctggcgctggtgggcgaacaacaaacaagaccaggtaggcggagcggattgggagccgggaaaggggcggcgcccggacacccctcaccgtgccccacccccggcgctgactctgccccgcgcatccggtaccccaggattactacttcttcttggcgagcaattggcgaagcgcgggcggcgtgtccatagaaatggacagctacgaaaagatctacaacctcgagtccgcgtacgagctgccggagcgcattttcctggacaagggcactgagtacagcttcgccatcttcctgtcggcgcagggccactcgttccggacgcagtcagaactcggtctgcgcgggaccagagtggagcccgaagggcggggcgagggctaccagaatctgggagcctggggggcggggacaccatcggaggggcggggcctgtctgtgagggaggccttaaccccgtttactgcccggagcaggcaccgccttccagctgcatagccaggtggacgtgggcgtggtgctggccgaccccggctgcatcgaggcctcggtgaagcaggaggtcctgattaatcgcaactcggtgctattttcggtgaggccccccggggagtt

SEQ ID NO: 12333 - DNA, 248 bp, Homo sapiens
  chr19:38877688-38877936
  hyper
cgagggtgaggcctggggctcccggggtaccatgagtcccgggggtgtggcgctgccagggaaccagacacccagcccacgagtcaggcgcatggcctgggaggtcatctcgggctccaccagggacgtccggcgggagtcgggggcgcggtccgagggctgcacttttcgggagcccccgcccgcggatggctccgactgcaagttccccatttctgacggagctcggagactagtcagaaaaattt

SEQ ID NO: 12334 - DNA, 617 bp, Homo sapiens
  chr19:38976231-38976848
  hyper
gcatggacatcctggagctgtcggagcgcctggacctgcagcgcttccactcgcacaccctgcgcctctaccgcgctgtgtgcgccctgggcaacaatcgcgtggcgcacgctctgtgcagccacgtagaccaagctcagctgctgcacgccctggaggacgcgcacctgccaggcccactgcgcgcaggctactatgacctcctcatcagcatccacctcgaaagtgcctgccgcagccgccgctccatgctctctgaatacatcgtgcccctcacgcctgagacccgcgccatcacgctcttccctcctggaaggagcacagaaaatggtcacccccggcatggcctgccgggagttggagtcaccacttcgctgaggcccccgcatcatttctcgcccccctgtttcgtggccgctctgccagctgctggggcagcagaggccccggcccgcctcagccctgccatcccgctggaggccctgcgggacaaggcactgaggatgctgggggaggcggtgcgcgacggtgggcagcacgctcgcgaccccgtcgggggctccgtggagttccagtttgtgcctgtgctcaagctcgtgtccaccctgctggtaatg

SEQ ID NO: 12335 - DNA, 30 bp, Homo sapiens
  chr19:39109669-39109699
  hyper
tccagcttgagtggcgcgaatgcgcacgcg

SEQ ID NO: 12336 - DNA, 379 bp, Homo sapiens
  chr19:39139397-39139776
  hyper
gaagtagaggggatacggagagtggggataatttggggagggatttctaaagaattgatgggaagctgaaaagctaaagcgttggagagaatgaggaagtgtagagggagaaggtgagatcggtgggagggagggtgagctggaatggtggataatgggagagaggttcgtttaggaaaatgaaagtctcattagaaagggaatgcgtaatggatagactgagaaaggaatttgaggagggggtgctggctcctggaggtgcagtcccgggactggagagcgtgtgtgtgtcgtgcaggcagaatgagtttggggaggaagcgttgagagtgtccaggaagaattgtgtcttttttggagagaccggaggtaggtgaag

SEQ ID NO: 12337 - DNA, 64 bp, Homo sapiens
  chr19:39140556-39140620
  hyper
gaggggtgtccttatccgtggccccacctactgcaggatggacaggttgcgatagttggcataa

SEQ ID NO: 12338 - DNA, 30 bp, Homo sapiens
  chr19:39340232-39340262
  hyper
ggcctgggcgcgtgcgcagaggcccccctc

SEQ ID NO: 12339 - DNA, 30 bp, Homo sapiens
  chr19:39574171-39574201
  hyper
gcagccgctcctcacgttcaaacagattgc

SEQ ID NO: 12340 - DNA, 30 bp, Homo sapiens
  chr19:39574498-39574528
  hyper
ttttgaggttgccccgggcttctgaggagg

SEQ ID NO: 12341 - DNA, 274 bp, Homo sapiens
  chr19:39754958-39755232
  hyper
aggcaggggactggacgcgtgggaccctctctttggcctccctgacgtccctcaggagcagagatgcgaccgagtgtgtgggccgcggtggccgcgggactgtgggtcgtgtgcacggtgggcgcggcgatccgccagcgctgcctgctctcgcactaccgctcgctggagccccggacgctggcggcggtcaaggcgctgaggaaccgctaagtgagtgaccgcccagcccttgcgccccccggtacactggccccgccgggttcccacacac

SEQ ID NO: 12342 - DNA, 133 bp, Homo sapiens
  chr19:39755264-39755397
  hyper
cgcccagcaggcgcctcttgtacgtcagagcccacagttcccaccacgagatccccgcagtccccgtcgtcagcgcgaacgcaggctcagggtcagtcacaaaaggagccctgcagggcggactcggctccag

SEQ ID NO: 12343 - DNA, 12 bp, Homo sapiens
  chr19:39755652-39755664
  hyper
aggagggatcct

SEQ ID NO: 12344 - DNA, 30 bp, Homo sapiens
  chr19:39881515-39881545
  hyper
gacggcagcccggacggggtcctagcggga

SEQ ID NO: 12345 - DNA, 30 bp, Homo sapiens
  chr19:39882179-39882209
  hyper
ggccctgcccagagcggcctcctgcagcaa

SEQ ID NO: 12346 - DNA, 30 bp, Homo sapiens
  chr19:39898000-39898030
  hyper
aaaccgaagcaatccggacttccaggtcaa

SEQ ID NO: 12347 - DNA, 13 bp, Homo sapiens
  chr19:39936017-39936030
  hyper
agtttcagcctgg

SEQ ID NO: 12348 - DNA, 30 bp, Homo sapiens
  chr19:39989527-39989557
  hyper
gctgcctgaaggggcggggccattctctca

SEQ ID NO: 12349 - DNA, 185 bp, Homo sapiens
  chr19:39993471-39993656
  hyper
ctggcgcgcgtggctggcaggcggcgcttggcagccggaggcccgtgggcccgggacattcagcgcgcaggcgcctgggagctgcgcttctcgtaccgcgcgcgctgcgagccgcctgccgtcgggaccgcgtgcacgcgcctctgccgtccgcgcagcgccccctcgcggtgcggtccgggact

SEQ ID NO: 12350 - DNA, 35 bp, Homo sapiens
  chr19:39993711-39993746
  hyper
cgaccccaccccgtcccagccggggaccccggccc

SEQ ID NO: 12351 - DNA, 170 bp, Homo sapiens
  chr19:40006277-40006447
  hyper
ctcctacctggccccggccctacctttggatccgcccccggaacctgctccggagctgcctttgttgcccgaggaggaccctgagccggcgccgagcctgaagctcatcccgtcggtctccagcgaggccgggcccgccccggggccccttcccacgcgcaccccgctgg

SEQ ID NO: 12352 - DNA, 40 bp, Homo sapiens
  chr19:40022936-40022976
  hyper
atgtcatcatcacagccgactcagtcggccagaggactga

SEQ ID NO: 12353 - DNA, 712 bp, Homo sapiens
  chr19:40324313-40325025
  hyper
ggcaacaactgtaccattggtcgctggtgccaagagctcagccaatcacagcctagggcagctgttgctaggcgacgaagaagcggcccgcggagctgagcccaaacaaagggcgggagtggggcccggctaccccctcccagcctccctcctgcaactgcttcctcgggcttggccggttccaggaattcaactatgaatagccaggcagggcccgcacctgcctgccacccccctcctctcctcccttggcctcgtgctaagtctcacggcgacgggagcagggcggatcccgtcctgcccacctccctgcgaccgcttgccgccccacccgtccccgcgccgttacctgaaggagcgggcaaggggactcaaactgctcggggagcccgagctcagacctgcccactggctgagggtatccggcggacgcggcaagccagggccccgattacccagtaatgcaaccagcaaaatggcgaccacaacaaaccggcccccccacgccctggactccgcccccatccctccctctccgctcccctcacgtgacccacactgacactccgcctgcgcgagatggccgcttacctgcacgcatgcgcagcgagctaccaatcccacccaagaaccgaaatccaggctgccgctgcgcaaaggcagctagaaacggagcatgcgctctgtgaccgagtgagaatttacccaaccc

SEQ ID NO: 12354 - DNA, 1031 bp, Homo sapiens
  chr19:40561465-40562496
  hyper
tggccacaacttccctcacttcgtacgaaatgagaaggaaataaaaggaggaggaatcggtctgagttcgaagctggttcctggggacagatctctgagggacgctgggttctcaacatgtagctgccctcctgggggaccctcaagaggcacttccagctctcatattcccaccccgagtccagatctgcgccttcttgtgcaaagcttcattctcggttcaatatctaacctccctactggggacattttcattcctctgctgcagcctctgcagctttgaaggggaaagacggaggaagcagcaggagcctagtaccaccggcacagtgacactcacacagccccagcaaaacgcactgcgtccacacgccgtcccggtcctgtgcacagggcctcacgcacacactcacacagtcccctccgtcactcaagatcgcgcaatccccatcctttgatgcccgcgcacacgcacgcctaaggatctggcagattccgtctgcgccccgggttcctcctctgagcgcctcgctctcgcccacccgcactgccgggtcggtcaggttcgagtcccagtccacgaagacctcccgcagccaccgatttcttcctaggacgtgaagaccttacccagctaggtcgtcaaccccaggagacaggaagtggaaccgctaattccggtgcggtggcctctgggaaatacagtcctgagcagaaagaacctcagaagtcttggtctatggtctgttcaggttgatcccagcatacattgggggctcctaagggacccgagcctaatggatttgtgggagttccagaccgtggggtgcagaggttgcggccacgggcgagaatccccatctgagaggagcgttgctgttttcggtgcgtcagggtaaattaccttttctctctatgcaaaagaatgcaaatgagcagaacttttaaagaagaatttaaagtaaaattacgtcaaaatgtagctgctttgacctcttcgtctcagatccgagcataggcttcccctttgt

SEQ ID NO: 12355 - DNA, 31 bp, Homo sapiens
  chr19:40727912-40727943
  hyper
gatcccagttttatcccgctgaatgactctt

SEQ ID NO: 12356 - DNA, 30 bp, Homo sapiens
  chr19:40791686-40791716
  hyper
cttttcagtgtgctcgtcatggttgagctc

SEQ ID NO: 12357 - DNA, 30 bp, Homo sapiens
  chr19:40854359-40854389
  hyper
gactcgtccgcggccgctctaccccaacag

SEQ ID NO: 12358 - DNA, 151 bp, Homo sapiens
  chr19:40932004-40932155
  hyper
gagcttgtagggggcggattctgaaggaggggcttcagggcgcatgcccgggcagctgcgcgagtgaggggtggaaagaggtggctttttactccggggaacggtggcgagtgggggcttttgcctctcaaaatacgagcccctcacaact

SEQ ID NO: 12359 - DNA, 44 bp, Homo sapiens
  chr19:40939938-40939982
  hyper
ggccgcggccgcctcccgggtaccccggccggcccagggcggag

SEQ ID NO: 12360 - DNA, 30 bp, Homo sapiens
  chr19:40948972-40949002
  hyper
cagattcccccaaagcgcgccccataggaa

SEQ ID NO: 12361 - DNA, 30 bp, Homo sapiens
  chr19:40971189-40971219
  hyper
cctctctgggagtgcgaacaaccaccacca

SEQ ID NO: 12362 - DNA, 558 bp, Homo sapiens
  chr19:41018504-41019062
  hyper
tggctcaggctaccagccctgcgacccgcaggtcatctgcaaccgcgtgaaccacgtgcacggctgcctggcggagctgcaggagcaggcagcgcggcgacgcgcggagctggaggcttcgcggagcctgtgggcgctgctgcaggagctggaggaggccgagagctgggcgcgcgacaaggagcgtctcctggaggctgcgggcggcggcggtgcggcgggcgcagcgggcgcagcgggaacagcgggcggcgcgcatgacctgtccagcacagcgcgcctcctggcccagcacaagatcctgcagggcgagctgggcgggcggcgagcgttgctgcagcaggccctgcggtgtggcgaggagctggttgcggccggcggtgccgtcggcccgggagcagacaccgtgcacctggtaggcctggcggagcgcgcggcgagcgcccggcgccgctggcagaggctggaagaggcggcggcgcggcgagagcggcggctgcaggaggcgcgggcgctgcaccagttcggcgctgacctcgacgggctgctggactggct

SEQ ID NO: 12363 - DNA, 629 bp, Homo sapiens
  chr19:41025293-41025922
  hyper
tttcccctgggcaggtggaaccgcatcgtggagctagtggaacagcgcaaagaggaaatgagcgcggtgctgctggtggagaaccacgtgctggaggtggccgaggtgcgcgcccaggtgcgtgagaagcggagagctgtggagagcgcgccccgggccggcggcgccctgcagtggcgtcttagcggcctagaggccgctctgcaggcgctggagccgcgccaggcggcccttctggaggaggcagccctgctggctgagcgcttcccggcgcaggcggcgcggctgcaccagggcgcggaggagctgggcgccgagtggggcgcgctagctagcgcggctcaggcctgcggcgaggcggtggcggcagcagggcgcctgcagcgcttcctacatgacctcgacgctttcctggactggctcgtgcgcgcccaggaggcggcgggcggcagcgaggggcccctgcccaacagcctagaagaggcggacgcgctgctggcgcgccacgctgcgctcaaggaggaggtggaccagcgcgaggaagactatgctcgcatcgtggcggccagcgaggcgctgctggccgccgacggcgcagagctgggcccgggcctggcactagacgagtg

SEQ ID NO: 12364 - DNA, 387 bp, Homo sapiens
  chr19:41055083-41055470
  hyper
tgtccccacagtccatggagtcgcaggtggaggagtggtaccgcgaggtgggagagctgcaggcgcagacggcggcgctgccgctggagccggcgagcaaggagctggtgggtgagcggcagaacgcggtgggcgagcgcctggtgcgcctgctcgagccgttgcaggagcgccgccgcttgctgctggcttccaaggagttgcaccaggtggcgcacgacctggacgacgagctggtgaggccagcgcaggggcctggggcggggcggggcggggcggtggggcggagaaggtgggcatggggcggggctgaagatggagacggctgagaccctcccactcatacgctgaaagacgcattcagccgttcactcattcattcattca

SEQ ID NO: 12365 - DNA, 445 bp, Homo sapiens
  chr19:41059939-41060384
  hyper
gggggtgcttgttaattgccccgtgggccgtgccagtagcagaggagcgtgtggtcttgcagggcctcggaacgccccctctccacccacatccccttacctcctgcccccagggcctgcggcgggagatccaggcgcatgggccgcgcctggaggaggtgctggagcgcgcgggcgcgctggcgtcgctgcgcagcccggaggcagaggcagtgcgccggggcctggagcagctgcagagcgcctgggccggactgcgggaggctgccgagcgacggcagcaggtgctggacgccgccttccaggtggagcagtactacttcgacgtggctgaggtggaggcgtggctgggcgagcaggagctgctcatgatgagtgaggacaagggcaaggtgcgcccgagctgggggtgcggagggcctgggggcgctggagccgggggccg

SEQ ID NO: 12366 - DNA, 31 bp, Homo sapiens
  chr19:41074216-41074247
  hyper
tgaggggaggggaaagcggagagctcctaga

SEQ ID NO: 12367 - DNA, 30 bp, Homo sapiens
  chr19:41082299-41082329
  hyper
ccgggggtgtggggcggtgtggcgggcgca

SEQ ID NO: 12368 - DNA, 21 bp, Homo sapiens
  chr19:41105980-41106001
  hyper
gaggccagagctctactgaag

SEQ ID NO: 12369 - DNA, 176 bp, Homo sapiens
  chr19:41106351-41106527
  hyper
gctggcccgttagaaagctccgccgaaccagcccagacaacaaaagcgattgtgcgggttggcgcctgcctgggcaccaaatgctcaagattgtggggcggctgggggccaaaggcctcctcctgtttcccgaatcttccccctgccctcctcccgctccagctcttgacccctag

SEQ ID NO: 12370 - DNA, 246 bp, Homo sapiens
  chr19:41111116-41111362
  hyper
cgcgacgacgagcacggtgaggaaagggtggccagagtcccctccgacccctgtcaagcatttcactttgcccctgaccctcatatttcccgccttcccgagcacctttgcccagctcgccctccccgccttgtctagccccaccccgtaagaacccgtgtagacatccgtttgcccggccgtgcctcccctaggcgtggcatctatggtgagcgtccacgtggagcacccgcaggaggcgtcggt

SEQ ID NO: 12371 - DNA, 30 bp, Homo sapiens
  chr19:41111742-41111772
  hyper
ccccaggacgtccccgaagtgctcggagct

SEQ ID NO: 12372 - DNA, 218 bp, Homo sapiens
  chr19:41115563-41115781
  hyper
attggtgagcaagacggagggcgcggaaggaggcggggcggggggctttgcctggtcaccttgtcaccagccccctccgtgtcctcagatgtggacgaatgtcgccgcgtgcccccgccctgtgctcccgggcgctgcgagaactcaccaggcagcttccgctgcgtgtgcggcccgggcttccgagccggcccacgggctgcggaatgcctgggtga

SEQ ID NO: 12373 - DNA, 101 bp, Homo sapiens
  chr19:41119165-41119266
  hyper
gctggaaaggtggaggcgggaccaaggcgctgtgggaggagcttagaaacctggcattggtgggggcggggttactgcgatgtgggcggagcttgtctggg

SEQ ID NO: 12374 - DNA, 303 bp, Homo sapiens
  chr19:41190145-41190448
  hyper
tgtatttctagtagagccggggtttcaccgtgatagccaggactgccggcctcacgctttttaacaccaacttcaaacgacttgggctggtgtcccagccaggccgcgcacccgcacagcacagcacagcggcccccgtccccctcgccccgccgcaccctgccgcgcccactcaccctgaccgggaagctgcacgtgcccttccgcaccgcgtcctcgtctgcctgccactggtgcgggcgcgacgcctcgggcacgtaggctggcttcctccgccgcaggctctgccgtaacttgttcatg

SEQ ID NO: 12375 - DNA, 30 bp, Homo sapiens
  chr19:41222269-41222299
  hyper
gacagtgccaggcccggggccacatgcttc

SEQ ID NO: 12376 - DNA, 107 bp, Homo sapiens
  chr19:41223421-41223528
  hyper
tggtcagagctggagacgacttgtctttggacggagaccgggacagatggcctttggactgatccgcacaggtccgacctccagtttcagcccgaggaggccagccc

SEQ ID NO: 12377 - DNA, 30 bp, Homo sapiens
  chr19:41256380-41256410
  hyper
ctcccggaaaatggcggcccccgcacactg

SEQ ID NO: 12378 - DNA, 3 bp, Homo sapiens
  chr19:41596078-41596081
  hyper
cga

SEQ ID NO: 12379 - DNA, 30 bp, Homo sapiens
  chr19:41641727-41641757
  hyper
gagcccagcaaaggcggggccaatgtgtgg

SEQ ID NO: 12380 - DNA, 111 bp, Homo sapiens
  chr19:41698891-41699002
  hyper
ccgggggcccaaggcgctgtctccgccgcccaagccccgcgtaaacctgggtgacctcggagacatccgttggagcatgagttcccgacatcaggcggcggcggtggtccg

SEQ ID NO: 12381 - DNA, 30 bp, Homo sapiens
  chr19:41699267-41699297
  hyper
ccccgggcccacgccgctaccactgctggg

SEQ ID NO: 12382 - DNA, 64 bp, Homo sapiens
  chr19:41732223-41732287
  hyper
gccaggtggctggacccgacccaggctccccgcccccactcgggccgcccgcccgggactgtac

SEQ ID NO: 12383 - DNA, 37 bp, Homo sapiens
  chr19:41831044-41831081
  hyper
cccctcccagttctcccggggtcggggtaggtggaaa

SEQ ID NO: 12384 - DNA, 51 bp, Homo sapiens
  chr19:41832011-41832062
  hyper
ctgccacagccagctccgagccagcgtggcaccagccggcaaggggacgcg

SEQ ID NO: 12385 - DNA, 31 bp, Homo sapiens
  chr19:41859851-41859882
  hyper
gttttgaagccgcccccggccccacccagga

SEQ ID NO: 12386 - DNA, 125 bp, Homo sapiens
  chr19:41870307-41870432
  hyper
aaatccctaactgctccgtgctgcgcctaccccaccgaagagctctctgtggtccgggatcacaaatcagagattgaaccaggaccaagggggaattccttccaggacctcgtgtacatccccgg

SEQ ID NO: 12387 - DNA, 471 bp, Homo sapiens
  chr19:42028282-42028753
  hyper
atctaaaacaaaccaacgaggctgccaacctgtgagatagttggtccacttgtacaaaaccccctccatgcttcagagccccacaccgctcatcctcccggcccggcgccggccgcggtgatggggtaggcgcggggcctggggcagcctttcccggcccgcccgggccccctccgccggcacgaagccgctttctgcctgcgcgcgccgcagggacgtggcggcccttagaggccgggacagcgggcgcagcgtggagcttgggggccgcgaggcgcgggctcagacatccccgggtaagcctcggcggcggcggccgcgacaacggcaaaaatgcgactgcgaccgcgaccggtctcgtgctcgcgcttccgcggcccggctgctccctccggcgccccggcgctgcctcttcctcgcctgccttccttccccctgggctccccgtttgtttttcgaccttcctttata

SEQ ID NO: 12388 - DNA, 182 bp, Homo sapiens
  chr19:42297159-42297341
  hyper
gtagaatttctaagtcgctcctaaagcacgagggtgaggaactgcggaaagttctctgcgccgccaggaggcgccatcataaaccacgtcggtgggtggccgccaggctccagctttgtttcccagccaagcaaactttgcaatgtgggcctgagtctgagctacttcgtagctggaggaaa

SEQ ID NO: 12389 - DNA, 188 bp, Homo sapiens
  chr19:42444455-42444643
  hyper
cgggggggccattaggcgctaatgggaagatggaggggcctgtcggccgcgcgggccgggcctcatttgtcctgcttcccgctccattggccgctgcccccgccccgcccctcccccgccgccgcgcgccccatttccgcttcaaacctttggaggggacgtgggggggatcccgggggctgctgaaa

SEQ ID NO: 12390 - DNA, 35 bp, Homo sapiens
  chr19:42498241-42498276
  hyper
cggcgagagagccaggcgggcggggcggggacctc

SEQ ID NO: 12391 - DNA, 31 bp, Homo sapiens
  chr19:42498570-42498601
  hyper
gattcccagagacctccgcaataggggactt

SEQ ID NO: 12392 - DNA, 31 bp, Homo sapiens
  chr19:42501310-42501341
  hyper
cggggggcgctgtgtgcggggaggggtctcc

SEQ ID NO: 12393 - DNA, 208 bp, Homo sapiens
  chr19:42636624-42636832
  hyper
cgagccctccctgccggaagtcactcagggaggaaaccacagggccggtccgcccccttcagaagggaaaataccctggcccacagacccgccccggcagcccggcccaccccaaatcatgtgtgtgtgctggggggtgggggctagtggggcagaggataagcaggctggaagagccgactcctacggctgcgatccaagaggtgcc

SEQ ID NO: 12394 - DNA, 30 bp, Homo sapiens
  chr19:42637615-42637645
  hyper
gtggggctgcctggcgtctccagacacccc

SEQ ID NO: 12395 - DNA, 416 bp, Homo sapiens
  chr19:42680241-42680657
  hyper
aaaaacaggcggaaccgccaccagccctgaccccctctcgcctcattttctccacagtcgccccttcctcaaatgcagggtcaaaatgggggtcccgcccagcccggggagcctctccgaagcgccgcagccagccgggagcagatgccacctcgcctctcttctctgtcctcgctcctttttgtgttcagtggccctggttgcgatgtgttttattttcatcgtctttttattggtattgttttttttctctttttcttttctttattttttggcccgggggcagcagcggcgaagcgcccactgcctgcctctttcctcagctctgcggccgtcaggctctttctctagtctgcgctcttgactccctcctttctcttctgcctcggctctcgctcctccgctcctccgctcct

SEQ ID NO: 12396 - DNA, 30 bp, Homo sapiens
  chr19:42754953-42754983
  hyper
acaggaaaccgtcggcggtgggtcccgggg

SEQ ID NO: 12397 - DNA, 30 bp, Homo sapiens
  chr19:42774788-42774818
  hyper
tgcggggggctagccgactcagccaccctg

SEQ ID NO: 12398 - DNA, 400 bp, Homo sapiens
  chr19:42901073-42901473
  hyper
ggcgggtccgacacgcgaggcgcttctttggagtctggcggcgaaagctatccatgacgtcagtcactatcttccagccaatggacactcggccttctacctccctgggccactcaggaccctttgcctggtaggcggggcccacagcccaactcgggcagcgataggctttcggagacgccagtctctgccaggcccagtcagtcggccaatagacccggaacctgagggatcggaatcctggtccactccgcagaggcccgagcgggctcgcgagggaacgggttctccgagtctggccgggtaagccctttccagcacgcctagtattaggattctgcacatagctcgggtggaaaaccgtgaggcttagtgaggcttgaggcggaggggggaggag

SEQ ID NO: 12399 - DNA, 30 bp, Homo sapiens
  chr19:43032572-43032602
  hyper
ctccaggaacgcttcgagcacggctgctct

SEQ ID NO: 12400 - DNA, 37 bp, Homo sapiens
  chr19:44008521-44008558
  hyper
cccctactgacctcttcgaccccgcctcccctccctc

SEQ ID NO: 12401 - DNA, 194 bp, Homo sapiens
  chr19:44029817-44030011
  hyper
ttggtgcaagatttaaggaggcgctcactcacaggtgcggaccctgcacttacaggaccctgagagcgagtgcctccttaaatgttgcactccagggtcctcaccgtccttttcctagtcctgggctccgggttctaagcacccagatgctccttcctcaaacggaggtttccgcaagacaggactgggtctct

SEQ ID NO: 12402 - DNA, 30 bp, Homo sapiens
  chr19:44100423-44100453
  hyper
tcaacgcgcctgcgcgccacgagagcctac

SEQ ID NO: 12403 - DNA, 130 bp, Homo sapiens
  chr19:44144216-44144346
  hyper
agcaggtgggggatctcggtgagcgcgggaaatggagggtgttgggtgagggtgctgcgtgcgggcccaggtgctgcgcgcgagggtgcggagttgctggcatgcagggtgcttgcgctgcgcggagggg

SEQ ID NO: 12404 - DNA, 30 bp, Homo sapiens
  chr19:44174056-44174086
  hyper
actgcgccgcgtggcgttgcacaaagcacg

SEQ ID NO: 12405 - DNA, 104 bp, Homo sapiens
  chr19:44405909-44406013
  hyper
gatttctgtggagacgatctactcaccacgtaggggctacagcagctcggacaccggaaaaagatctagagctcgagggtgaccctagcgcggtgacttctggg

SEQ ID NO: 12406 - DNA, 111 bp, Homo sapiens
  chr19:44506787-44506898
  hyper
cacattccccaccaggcgctcagagatatggaatacgttcccggtgggcactgcggtgtgtgtagtcaaggaccaccgcggagtccaacgcttcccgctgaagagtgagat

SEQ ID NO: 12407 - DNA, 73 bp, Homo sapiens
  chr19:44507928-44508001
  hyper
gagatgttcacccaaccgagagtgtgtcctcgggaatgggtgttgataatcattaagccgtaattggtaactt

SEQ ID NO: 12408 - DNA, 30 bp, Homo sapiens
  chr19:44511186-44511216
  hyper
tccattactcaagacactgaagactccaaa

SEQ ID NO: 12409 - DNA, 30 bp, Homo sapiens
  chr19:44529807-44529837
  hyper
tgtcacttaatgtccgtttatcttccattg

SEQ ID NO: 12410 - DNA, 30 bp, Homo sapiens
  chr19:44598549-44598579
  hyper
ctgcagtttttccgcgatagtttggggcag

SEQ ID NO: 12411 - DNA, 214 bp, Homo sapiens
  chr19:44617148-44617362
  hyper
ttccccactaggcaggcgctcgtggctttgggattcgttcccagtgggcacctcggagtggcaacgcttccccctgaagaatgagattttgagcgtttttccttcagcattcggaggagtgtaatccaaatgctctgtggagtcgtacacactggctccagaaggaggatacaagcaattctgggaatggtagtccagacgctcagtggagtag

SEQ ID NO: 12412 - DNA, 31 bp, Homo sapiens
  chr19:44645855-44645886
  hyper
atgggaaaagaagcctcgtgggagagcagag

SEQ ID NO: 12413 - DNA, 489 bp, Homo sapiens
  chr19:44711509-44711998
  hyper
gctctggctttctaggatacccggaagctcaggttactcggaagtatttccgctccaaggagcggaactatggccggtttcccctggggcattctgggaagtgtagtcaggggcccgcgtagcctggggcacttccgcttttggatggcggagctagggaattgtgggaagtgatccggggtttctctttagttgctgggaagttttttcgctctaggagggcgaaaacaagtgtttggatccgctgggaccctccaagttttctcagcctcgtcagggagcaagcggggccctggccctcgtctggaggaaggctagagaagctgtggccagctgggaggctggagttgggagcagtttgtgttctttcctctcggctgagcctcacgtttggagcagttcttgcgtccccgggttgggagcgtcctggatcggttgtcgcttggttagagggtctcctggcgttccgcagccagcctctcccaccta

SEQ ID NO: 12414 - DNA, 381 bp, Homo sapiens
  chr19:44763971-44764352
  hyper
ggcagggcggtagcctgtttccgctcgggcattctgggaagtgtagtgcagaagccgttgcaaccttgtgtacttccgctgcaggagggcgaagcagccgtcatctatcccctctgggaggtgagtcagcgcggaacctctgcatctacggcgagctttcctggcctgggcgttggactcgcaggtgcctgccctcgctctcagtgaagggaagtcgcagagggcggggacgacggtttgcttgccctttgtttttagggcggtgcatgggtctccaagttgggaatggctcctggtcgcacgtttggtttgaaggtctcccgggcgctcaagttccctcgccttccccaccttccacacgctctgctgtcttctggcaat

SEQ ID NO: 12415 - DNA, 30 bp, Homo sapiens
  chr19:44905901-44905931
  hyper
gacttccgtgcattcgtctaaaataacgac

SEQ ID NO: 12416 - DNA, 434 bp, Homo sapiens
  chr19:44952395-44952829
  hyper
tgcttttccaagcctggactgcgagggctgccgacccgggcccaccccgcacaggcgctcagaatgttcgatacgtgcgcctccttacacccctgcctcaccaggccgagctcatggaaatccgtgggcttcgaccctccgccgcacgttgtcccttcacactggtcctatagagccgatcctaattcccatggcctgacagtacaaccgcatggagatgcacgtctctaagacgcctcaccactgcctaagaagcaatcaaggtgacgcgcccaccggaaacggaagtagtcgactcgaggtgtgggactacctttcccagaaccctccgcagcgcagtccgatcctaggggcgatggtgtcgtaaatgcgcgtccacctcgagtcacgcccactgcgaggcggcgggaggcggcatgcaaggtgtttctgag

SEQ ID NO: 12417 - DNA, 566 bp, Homo sapiens
  chr19:45004315-45004881
  hyper
cccctaccaacctgggcgtccgctggcccgcagcccaggctgggcctgtcaccgcctcagtgcctagcacggctctgcggcaggacgaactcgggttaggcaaccccctgccccgattctgcaacacggccgactcgggttaagctagttcggtcccctctcctagtcagcatccgcaaggccgctgggggttaagtctgaagggccgagctgctcggcgacagcaagcgtccgcgcgcgggacaatggctgctcttgtggccgaacccggaagtgcacttgggctcggagagccagaactacaattcccagaagcctccgcggcgcggacggtcagtaggcggggttccggcttctccaaggaagtggggcgggggaccgggccagaagctaagagggcgtcctcgtccggggcccgggggggcgccacacctgtgcatgtgcaggtctagggggagcactaagaccagccgcggcgccgggaggccgaggccagtgcagcgacgcatggggagtcgctctggcgtgacgtcagaatccaatagaaatggcggggaccctttctg

SEQ ID NO: 12418 - DNA, 774 bp, Homo sapiens
  chr19:45146960-45147734
  hyper
gccactcggcaaccgcgagccgttagtaagttgctgaatctctccgtgtgcctccgtttcctcacctggaatgtgggcgacctcacacaggaagccgcctcttctagtgggcaccgacggagcgagcgcgcgtctgcagcgggactgagcgccgggagagacctgcgcaggcgcaggcgcgcgggaagggccagcctgggtggcccaccccgcgcctggcgggactggccgccaactcccctccgctccagtcacttgtctggagcttgaagaagtgggtattccccttcccaccccaggcactggaggagcggccccccggggattccaggacctgagctccgggagctggactcgcagcgaccgcggcagagcgagcgggcgccgggaagcgaggagacgcccgcgggaggcccagctgctcggagcaactggcatggcccgagccatggccgccgcgtggccgctgctgctggtggcgctactggtgctgtcctggccacccccaggaaccggtgagtgacccccgcgcagtccggtggcccctgtctggctcccgctccgcatccaggccgggtacttgcccccttgggttcccgaagatgacggccccgccgcggcgccacccaccccccatctctgccccggggttggaaggaacacggtgcgagggtgcgagggcaggaccctcctcttggccacccggagagcggtcggagttgggtacagaaattcctcgaaattggcagcaacacgggtcgggcacaagaccct

SEQ ID NO: 12419 - DNA, 30 bp, Homo sapiens
  chr19:45207312-45207342
  hyper
ggccaacagcacagcgctggtggaacgtcg

SEQ ID NO: 12420 - DNA, 116 bp, Homo sapiens
  chr19:45281277-45281393
  hyper
gcaatgcgtcgacccccggctgtccgtgagtcccccttcgctgcgggacctgctgccccgcacagcgcagctgcttcgagaggtggcccattctcggcgggcggccggcggaggcg

SEQ ID NO: 12421 - DNA, 138 bp, Homo sapiens
  chr19:45312125-45312263
  hyper
ggccccccgctgcaggcgctggtcagtaagcccggacagctctaggcttgggggcggacgagccccgagcctggccccgtgcactgggaggtccgctccgggcagtgggaggtcctggccccgcgcccgggcatcggg

SEQ ID NO: 12422 - DNA, 79 bp, Homo sapiens
  chr19:45348195-45348274
  hyper
ccctggcgggtggctgcggtgagaaggcggcgcggagcaggtgttgggaggggaggaccagggcgcgcagggaggtagg

SEQ ID NO: 12423 - DNA, 454 bp, Homo sapiens
  chr19:45349514-45349968
  hyper
cagggtcggcttgactcgggggagcagcgggtggatcctgtgacgtcagcgggttcgaaccgccggagctgagcgagaggccgggggtgccgagccgggcggggagagctgggccgggagagcagaacagggaggctagagcgcagcgggaaccggcccggagccggagccggagccccacaggcacctactaaaccgcccagccgatcggcccccacagagtggcccgcgggcctccggccgggcccagtcccctcccgggccctccatggcccgggccgctgccctcctgccgtcgagatcgccgccgacgccgctgctgtggccgctgctgctgctgctgctcctggaaaccggtgagacgagcggacggccccctgccctcgcgcggaccccctccaaccttaccttccgagctggggaagccgagcaccttccccgcccacccccggct

SEQ ID NO: 12424 - DNA, 31 bp, Homo sapiens
  chr19:45350297-45350328
  hyper
ggtctcgaggaagaggcgagaccacctccct

SEQ ID NO: 12425 - DNA, 239 bp, Homo sapiens
  chr19:45418005-45418244
  hyper
ctgggagggacacccgcctacactctgcaagaaactcaaaaagggagatgaggggatcgtgggagggaggtagggagggaggagggtgccactgatcccctgaacccctgcctctgcctccagagtgcccctccggcctcgccatgaggctcttcctgtcgctcccggtcctggtggtggttctgtcgatcgtcttggaaggtaaaagtgggatgggagaattgcggagttggagattt

SEQ ID NO: 12426 - DNA, 30 bp, Homo sapiens
  chr19:45579363-45579393
  hyper
gggtccacgggttccgcgggccgagggcga

SEQ ID NO: 12427 - DNA, 91 bp, Homo sapiens
  chr19:45655465-45655556
  hyper
cgtgcagcgcagcaggctctgcgcctcggccacggtgaaggggaagtcggcgcccaggaagcgctcgaagagctcggggtcgccgtccagg

SEQ ID NO: 12428 - DNA, 1095 bp, Homo sapiens
  chr19:45655647-45656742
  hyper
cgcccccggtctgctgccggtcctccaggcactgcagcgcccagctcaggcggcacggccactggttggcgagcaccacccacgccaccgcctggcgcggcgtggggcccccaaagtccccctgctgctgctgctgctgcagcaggcgcacggtgatgggcacggtgttgacgatgcgccgcatggacaccacgttgtcgggcacgtactcgtagaggcagtcgcgctcgtcgtgaaggcagaagagcgcctcctggattcgccgcgccgcctcgtcgtcgatgcggccctgcccgcgctccgtccccgcctgcgcctgcaccgccagcagctgcgcgctctcgcccccggcgtcccccggcagccacggcttgcgcgtcatctcgcggtacaacaggtcgtcgcggctctgcaccgcatcgtgcaggaactgcagcttggtgcggcggcccataatgggcacagagaagggcagcgtgacagtgcggttgaggaagaggtagccgttatcggccgtgcccttcatgttgcccgcgctctctaggcacgcggccaggatgctggggtccacgaccaggatgaagatgaagggcgcgtggctgtcggacagcagcgtgttgatggcgttgagcacgcccaccacgcgctccgggtagcacgtgtccagcccggtgacctccagcaccacgcgcagcctgcgccgctggtagatctccaggaagcacaggaagtcggtgagcagctccacctccttcttcacctcgcacatgaaacccagctggctgccgaacttttcacgcgacaccagccgctcgatcttcttgcgctggcttacgaacaggtgcttgcccaccgagtacacggccatgagcagccccgagcccgacagtgtggtggccgcgccgccaaacaccttgagcaggctgccgctcgggctgccgtggcccagcgcgtggccgcccagtgacaagtagagcagccccacacccaggcccagcgccgccagcagcgccagcagccccaggcacacgcggcgccgacaatgccactcgctctggcagcagtcctgcctggtggccggcttgttgcccagca

SEQ ID NO: 12429 - DNA, 522 bp, Homo sapiens
  chr19:45656790-45657312
  hyper
cgcacaacgtggtcaccaggccggcccacagcttgtcggtgcccgcgtactgccaggcgctaaagcggatgaaaaggaactgcacgttcctgcgccgcaggtgcacctcggtgatgatgggctgcaggaacaccaggtaccacagtagctgcgggacgccccagccgctcacggcacgcggccgccactgcacgtgctgcagctcctcgctctcgcgctgcgcggcctcctgctgcatcagcgctgcgggaagggagcccgggagccgcgtgagccgcagacccgccggggtgggcggggcctagtacgggcagggcggagcgctcctggagaggcgaggggcgcccagcagaggcgaggggctggaagcgagccgcggccgctccttaaagagctggaagccggtgcagaagcgggggcgtggagaggcctggagccgggcttggaccggaagcggtctgaaggccaggctgtggggtcgggatgggcagaggtagagccggcagaggagagatgggagga

SEQ ID NO: 12430 - DNA, 42 bp, Homo sapiens
  chr19:45755077-45755119
  hyper
gcccgacccctgggggcgcccctctctcgggacccctctctt

SEQ ID NO: 12431 - DNA, 311 bp, Homo sapiens
  chr19:45888913-45889224
  hyper
tgcagcgccgtgctgcaccagcgccatgcagatgactgtgtcgttgcacgacgccgcgcagtgcaagggtgtcctaggcgtgggggtggggggttgcggggaacgatgcgtgagaggctgcgcgtccgcccacgggggacccagcccaccgcgcgggtcggggctcaccagccgtggctgtcgggggagttgacattggcacccgcggtgatgaggaaatccacgatagagtagttggcgccgcagatggcgttgtgcaaggcagtgatgccctcctcgttgggctggctcgggtcgttcatctgagtgca

SEQ ID NO: 12432 - DNA, 22 bp, Homo sapiens
  chr19:45889315-45889337
  hyper
cgcctgctgcaccacctccagc

SEQ ID NO: 12433 - DNA, 263 bp, Homo sapiens
  chr19:45959072-45959335
  hyper
gtgtcaggcagccagccggctgcctgccctggacagcagcccagagtgtctgcaggagggagagggtagttcaggagcctgagtcaccctgggagaaaccccagccacatacctggccgctgacatcacccggccagggcacccccggcagcctagacaagctgactgaatcacaggcggaattcagccaccccgggcacgtggcctgctgtgaccccccgcaacacccccgagtggccgtctggctgcgggggttgggccgg

SEQ ID NO: 12434 - DNA, 30 bp, Homo sapiens
  chr19:46000139-46000169
  hyper
cccggggtcgcgggcgctcatctccgccgc

SEQ ID NO: 12435 - DNA, 632 bp, Homo sapiens
  chr19:46001720-46002352
  hyper
gggctgaaggatggcggtcctggcccgccagctgcagcgtctcctctggaccgcttgcaagaaaaaggagagggagaaggaggggagggaggaagaggaggaggaggaggcggggcgcagggcccccgaagggcctcggtctctgttgacagcgccgcgccgcgcccagcggccgcacgggggtgccgaggcgtctgggggcctgcgcttcggggcgagcgcagcgcaaggctggcgcgcgcgcatggaggatgctcactgcacttggctttcgttacctggtctgcccccgggctgggccttgtttgccgtcctcgacggccacggtggggctcgagctgcccgcttcggtgcacgccatttgccaggccatgtgctccaggagctgggcccggagcctagcgagcccgagggcgtgcgcgaggcgctgcgccgagccttcttgagcgccgacgagcgcctgcgctccctctggccccgcgtggaaacgggcggctgcacggccgtggtgttgctggtctccccgcggtttctgtacctggcgcactgcggtgactcccgcgcggtgctgagccgcgctggcgccgtggccttcagcacagaggaccaccggccccttcgaccccgggaac

SEQ ID NO: 12436 - DNA, 275 bp, Homo sapiens
  chr19:46002431-46002706
  hyper
cgactttacctacaaggaggctccggggaggccccccgagctacagctcgtttctgcggagccagaggtggccgcactggcacgccaggctgaggacgagttcatgctcctggcctctgatggcgtctgggacactgtgtctggtgctgccctggcgggactggtggcttcacgcctccgcttgggcctggccccagagcttctctgcgcgcagctgttggacacgtgtctgtgcaaggtcctgggggcgtggcgtggtacctttggggcttggt

SEQ ID NO: 12437 - DNA, 30 bp, Homo sapiens
  chr19:46012673-46012703
  hyper
ggctcggtggaaggcggatggcggatgtcc

SEQ ID NO: 12438 - DNA, 30 bp, Homo sapiens
  chr19:46105299-46105329
  hyper
acctagtgagaccccgcagcatcgcgggca

SEQ ID NO: 12439 - DNA, 30 bp, Homo sapiens
  chr19:46142632-46142662
  hyper
atggcggcgggtggcggagcttcggggccg

SEQ ID NO: 12440 - DNA, 563 bp, Homo sapiens
  chr19:46144642-46145205
  hyper
tcctcacccagtagacctgaccgtccagcttctaaaaactctggccacgcccctcaatattgactccgccctcccagaccttccactgttaccgtgccacctcaagattggtccctccaaggctctggcaccgtccccgcttttgaactagctggccccactctaggttacgacctcgtggcctggggcatgactacatttctcgaccatttcctccctatctctttctgcggcttgacgccgccccagtccttacccttcctttttggcgctacagttgctgctggaggatgtggtccggctgcgggggtcctcacggcgcaccgaggcgaggcgctctggtgacaagtagcggcggacactgctaaaagagagcacacaggtgggggcagagccttctaggccagcaggcgagtgccgtgagcaagcgagattctccctgcaccctctgctgctggagctcaggcaaacaaaccacctctgtctcccacgaggtcttggaagaggctgggggtcccggccttgtgccttacctgcgcccggaggtcgcctccttcttggga

SEQ ID NO: 12441 - DNA, 30 bp, Homo sapiens
  chr19:46145615-46145645
  hyper
agacgggggagtgccggctgcagggccacc

SEQ ID NO: 12442 - DNA, 419 bp, Homo sapiens
  chr19:46180190-46180609
  hyper
tctggcccctccctaggccctcgctgcctgccgcacggcccagatcgtgacccagtactgcgtgggtgccaactacacgtggctgctggtggagggcgtctacctgcacagtctcctggtgctcgtgggaggctccgaggagggccacttccgctactacctgctcctcggctggggtgagctccgatcccgtcccccgcccaacccagcgcgcctctcctcggctcccccaactgccctgctggttggcctctgcgggtctcctcccgtctctaggcttctgccttccccaccccgacagaggaattccgcgggtcttgggcctggcggggcccgtgagcgcgctgacagctgcggcggggtgggggggcggggtcggggtctgcacaggggcccccgcgcttttcgtcattccctgg

SEQ ID NO: 12443 - DNA, 30 bp, Homo sapiens
  chr19:46220698-46220728
  hyper
ccgccattcggggccgtgcccatataaggc

SEQ ID NO: 12444 - DNA, 35 bp, Homo sapiens
  chr19:46271266-46271301
  hyper
agagctggacttgcgccgcccgaggcccctcacct

SEQ ID NO: 12445 - DNA, 235 bp, Homo sapiens
  chr19:46379914-46380149
  hyper
cccccgccccctgccgcgctggctccccgtccgtcccaccagccttgctgtcctgggcaggccggggaattcctcccggttcctggaaaaaacaactggggccgagagaaaggccctcagtctccccaggcacccgcccccctccctcgggcctgggggtctctcccggagtcggccagcccgaggcaggaagccctgcggtttctggcttctcccaggcggcctccggatctgg

SEQ ID NO: 12446 - DNA, 30 bp, Homo sapiens
  chr19:46388917-46388947
  hyper
agttcacgcagccgcgacacacggcctcgc

SEQ ID NO: 12447 - DNA, 70 bp, Homo sapiens
  chr19:46405102-46405172
  hyper
ggggctggctggggttcggggtccccccgccgccgcctctcccagaccgccgggccgagagctccttagt

SEQ ID NO: 12448 - DNA, 31 bp, Homo sapiens
  chr19:46476432-46476463
  hyper
gcccttgcacctgccacgggagggggggaaa

SEQ ID NO: 12449 - DNA, 31 bp, Homo sapiens
  chr19:46476797-46476828
  hyper
tcatggtgggggggggcggggggcggggggc

SEQ ID NO: 12450 - DNA, 30 bp, Homo sapiens
  chr19:46477323-46477353
  hyper
gccgggtagggccacgcccttcggcgcccc

SEQ ID NO: 12451 - DNA, 418 bp, Homo sapiens
  chr19:46519206-46519624
  hyper
gatggggtaggcctgagggttcggagaaggtgcggtcggggaggagtctcgcgattgagtttgtcggggcgggcgggaagctgacagctgcctctgtggtctcaggaggcggactccgccggtgcagccgcccccgacgcgggaggaccgggcctcatcgtcccgggagcgctccgcgtcgcgaggccgcggcgccgcgcgctcctcatcccgggagagcggccgcgggagccggggtcggggccgccctgcgcgcccctcgccctcgcccacaggtctgtgcccctgccctgcggtagggaggggacgcactggcgctgccaaggcccgtctccggacctagccgcctcctctcccacgccgtcctaggtggtcgcgcgctccgcttcgaccccacggcctttgtgaaagccaagga

SEQ ID NO: 12452 - DNA, 396 bp, Homo sapiens
  chr19:46580426-46580822
  hyper
cgtgggcgttcacccgggtgccggtgtttctaaatcgcgggctgcgacctgcatactcaggtgccagctgggagcagaggcggatttgcgaggccaaaacctgggtgtgacttggaatctcagtcgcgctatgggggtgcacgctggctcaaatccccgtggaagatgcacctgtgacctgcccaggctgcaaaaccaggtgcgctgccatgggcacgactcactgggctccattttcaccacagggaacttggaccgcctgacattgaaaaagactgaggtagctcgggggcagccaaaagaaaccagaggcggggatcctagtatcattcaggaagtggacccagccgcaaactcaggagcgttccaagtgtccagagcgtctggtagtcgcaa

SEQ ID NO: 12453 - DNA, 30 bp, Homo sapiens
  chr19:46850467-46850497
  hyper
ttcaaaggtgcgcccgcctggcagggaggg

SEQ ID NO: 12454 - DNA, 367 bp, Homo sapiens
  chr19:46916540-46916907
  hyper
aggcccactccaagctggaaacgtggtgtcccagctccaagttggggcgcgcgggctgccagcgactcttcctgccccaggccccagggacgcggctggaacttgggacaggacttcgcagacaaagacggtccagtcgaagctattcaatatggccgaggcgctgggaggccccagcccgggcctccagtagggtcccccgcccccaggcaggccgccacccagctccaggctgaccttgacgcgccgcagcctgccagcccgcgcgcttagagctctgcaccgtggagcgcgcgggcaggaagttcctcctcgccctccgccagaatgaggcccaccttcccccgtctcatcttacactcccaga

SEQ ID NO: 12455 - DNA, 58 bp, Homo sapiens
  chr19:46930072-46930130
  hyper
atagcaacggtcggacgcgctgctaggttctggctctgactgcgcctgcgcggctggt

SEQ ID NO: 12456 - DNA, 46 bp, Homo sapiens
  chr19:46974562-46974608
  hyper
ctgacgctccgcctgcccagccgggacttacttggcagatcagcct

SEQ ID NO: 12457 - DNA, 155 bp, Homo sapiens
  chr19:46974831-46974986
  hyper
cgccgctcgggggtcttgggctgcgcaggtgccgacgtctccatggcaaccgggcgtgggttgctagggctgagcccggccggcgcgccggcgctgcaattggacctagggagccgggtgcaagagtggcctgttcaggtcgcagagcaagcggg

SEQ ID NO: 12458 - DNA, 308 bp, Homo sapiens
  chr19:46992619-46992927
  hyper
tgccccggccctcctcgggccccctgcttgccggacttttgtcccccagcaggtctcaccccctaatgcatggatttcgtcctcatctagggagcgtaaccccagcctccccaccgcatgctccctgcgggagggtcctgtttcctgcaccaagaacagggcctgggacgcgccagccctggataaatctcatggactgcgcggatggcgctgagggctcctcccagacagtcgccttctctcccaggagggggcaaccgcgctccgctccacccgtcgccagaggctccacgcgcgggacagacccg

SEQ ID NO: 12459 - DNA, 84 bp, Homo sapiens
  chr19:46996430-46996514
  hyper
cgcaggccccgagagcgccacgaagagccctgctcgcctctgcaggtgcccggcgtccacacacacaccccctccgggggcaac

SEQ ID NO: 12460 - DNA, 261 bp, Homo sapiens
  chr19:46996577-46996838
  hyper
cgcccacttctctttcctcctcccatccgggcttcctccgtcgggatcgctggcgcccccggcctgcgagggcccgagaggggaacgtgacgctggcaaaacgcggcccgggcgcgctgtgaagcgaggagattgcgtctgcggaggacaggaagaggggaggggagggcgggggccacaggcgggcgggtgccctgcggggcctgctcgcagcctgggcggcttcttggggggccactagcggcatttagggggcagcct

SEQ ID NO: 12461 - DNA, 178 bp, Homo sapiens
  chr19:47137348-47137526
  hyper
aagaggcgcttgtcgcggaaggggttctccgcggcgggtactggcgtcaccagcgggtcatctttggcatgcgtctcgcagaaagccaggagttccgctgctgcctgcgacacctgcgagcacccgggtggagatgtcaccgccctgcccggctccttggagccgcccacttaggccc

SEQ ID NO: 12462 - DNA, 30 bp, Homo sapiens
  chr19:47137882-47137912
  hyper
cttcagctgttccaccgtcttgcgggcctc

SEQ ID NO: 12463 - DNA, 30 bp, Homo sapiens
  chr19:47141841-47141871
  hyper
ctcacgccgtctcccggcagtacacactca

SEQ ID NO: 12464 - DNA, 30 bp, Homo sapiens
  chr19:47142444-47142474
  hyper
cccgacgacggaggcggggcctgcagaggc

SEQ ID NO: 12465 - DNA, 30 bp, Homo sapiens
  chr19:47217222-47217252
  hyper
cttgtcgtaaaggccgtagaagccacactc

SEQ ID NO: 12466 - DNA, 30 bp, Homo sapiens
  chr19:47217771-47217801
  hyper
ggagataaggagggcgcctgccacccaatg

SEQ ID NO: 12467 - DNA, 31 bp, Homo sapiens
  chr19:47363344-47363375
  hyper
caagttgcatggacgcgcgcgttggctgcag

SEQ ID NO: 12468 - DNA, 30 bp, Homo sapiens
  chr19:47363930-47363960
  hyper
cactgcaccgtccgcggccgttcctaacct

SEQ ID NO: 12469 - DNA, 31 bp, Homo sapiens
  chr19:47494585-47494616
  hyper
gcgccatctagaggtgcgtgaaatcctgcca

SEQ ID NO: 12470 - DNA, 31 bp, Homo sapiens
  chr19:47516068-47516099
  hyper
tagtccaggagtgaaacggtggcggattaga

SEQ ID NO: 12471 - DNA, 31 bp, Homo sapiens
  chr19:47523252-47523283
  hyper
gggtaggggaagcttgcgggctggcaggagg

SEQ ID NO: 12472 - DNA, 31 bp, Homo sapiens
  chr19:47729938-47729969
  hyper
gccagagcccccggggcgctgggcacgggcg

SEQ ID NO: 12473 - DNA, 30 bp, Homo sapiens
  chr19:47730015-47730045
  hyper
gagaggcagaggggcgcggtcagcacccac

SEQ ID NO: 12474 - DNA, 294 bp, Homo sapiens
  chr19:47731297-47731591
  hyper
gtggcccggctgggcccgccacctccccccgtcctctcccacttctccagttcctccgagtctccagccctctctcttcccggctcctatcaccccgggggcggggcgggcactcaccgtccgggcgcgggcctcggggccggctgcggggacccccaggccagcgggaaccccccagggcggcggtgacggcgggtggggcggtgggggcgcagaggtaggcagcgggcagcagggtgggggcggcgggggcggcagccaggccgggctcgcagaggccgcaggacactgccg

SEQ ID NO: 12475 - DNA, 16 bp, Homo sapiens
  chr19:47734361-47734377
  hyper
cgcaggcgcgtccgcg

SEQ ID NO: 12476 - DNA, 31 bp, Homo sapiens
  chr19:47778088-47778119
  hyper
agagcggggcggtctgcggggtgggggcggg

SEQ ID NO: 12477 - DNA, 168 bp, Homo sapiens
  chr19:47910210-47910378
  hyper
tgaaggctgcaccctgccctgcgaagggggttcagaggtgcaggctgagccccaggaagcccgggacccggctttgacgccctcctaagaaccccaggctctccgtccccgccttccccctgtacctgtgcggttggattgatcgatcataggttgcacgatgcgtct

SEQ ID NO: 12478 - DNA, 25 bp, Homo sapiens
  chr19:47910558-47910583
  hyper
gcccgggctctcgccccgggccggc

SEQ ID NO: 12479 - DNA, 30 bp, Homo sapiens
  chr19:47921384-47921414
  hyper
tggggtaggacgaccgcgtcctgtcgtcac

SEQ ID NO: 12480 - DNA, 30 bp, Homo sapiens
  chr19:47923372-47923402
  hyper
cgtttaaggcagtccgaggggaagggtctg

SEQ ID NO: 12481 - DNA, 97 bp, Homo sapiens
  chr19:47931731-47931828
  hyper
ctgatgggggcgtggcgagtggaagagcttggcggctggaccccggcgctgctgctatatgtgggtgtgtcccgcagacgaccgcgggccgcaaaaa

SEQ ID NO: 12482 - DNA, 573 bp, Homo sapiens
  chr19:47933274-47933847
  hyper
gggtccaagagcaggtgcagccgagtccctagccccgggcgggcggtggggacgagtctctgcgcgaggccctagaagccccggatgtggcagtacgcctccaggctggcgaagaggatgtacaggagccagaggcccaggaagagcgcggtggtggcgagcttgggtccgcgcgggccgcccagctcgccgccgatgtgcggccggcgccggtacagcagcacggcaatgcccacgaaggcgaagacggtgaagagcgtgacggagaaggccagcgtgccagtgcgcacctcgaaggggcggccctgcaccgcccagtacacggcggccacagaccaggcgacgcccaggccaaggaacacgttcaccgcgttggagccggtcacgttgccgatggacgcgtcggcgcactggtcctgcagcgccgccaccttgctggcgaacgtgtctgcgaggcagagacatacaggtcggaggggctttgcgccgccacccacaggggcgggcatccgcctgccccctcccagcctttcccggtcgcctgctttctgcgggcagtgtgggctcaagacc

SEQ ID NO: 12483 - DNA, 77 bp, Homo sapiens
  chr19:47960799-47960876
  hyper
cgaataccacgcacaccgggaagaagaccagggtcagcagcgcctcccacacctgcgggcggcgggcgtcagggcga

SEQ ID NO: 12484 - DNA, 30 bp, Homo sapiens
  chr19:47975472-47975502
  hyper
cacacacacacgcacgcagtctcccagcca

SEQ ID NO: 12485 - DNA, 30 bp, Homo sapiens
  chr19:48113095-48113125
  hyper
tccccccttcgcaccgcccctaaacaatga

SEQ ID NO: 12486 - DNA, 30 bp, Homo sapiens
  chr19:48614075-48614105
  hyper
ttccagagctcacccggagctattttcatc

SEQ ID NO: 12487 - DNA, 159 bp, Homo sapiens
  chr19:48823577-48823736
  hyper
gcttccctcctcggagcgggcgctccctgccaagcgtcccaaaggcatcctggccaaacagggtggggctcctgtagggatggacatataagacccttcagacagcaggcgggccagggcccagagagggtggacaatgaactgcgagggactgggaat

SEQ ID NO: 12488 - DNA, 30 bp, Homo sapiens
  chr19:48824607-48824637
  hyper
aggcctgagaggggcgtgccgtagggagct

SEQ ID NO: 12489 - DNA, 30 bp, Homo sapiens
  chr19:48825136-48825166
  hyper
tcagcggttcactacgcaagcgcgaccaac

SEQ ID NO: 12490 - DNA, 642 bp, Homo sapiens
  chr19:48901492-48902134
  hyper
tcctccccatctcggcgcctgtccctcgctgcatctcctcctctgtgcgtctctttatctcgtctccctgtccctgcgtctcccgtctgtgcctccctctcctccccgtctctcccggcccgggcgctcagaggccgcccggcggggcccgcaggcgatgcgcggcgccggtggcccccgcggccctcggggccccgctaagatgctgctgctgctggcgctggcctgcgccagcccgttcccggaggaggcgccggggccgggcggggccggtgggcccggcggcggcctcggcggggcgcggccgctcaacgtggcgctcgtgttctcggggcccgcgtacgcggccgaggcggcacgcctgggcccggccgtggcggcggcggtgcgcagcccgggcctagacgtgcggcccgtggcgctggtgctcaacggctcggacccgcgcagcctcgtgctgcagctctgcgacctgctgtcggggttgcgcgtgcacggcgtggtcttcgaagacgactcgcgcgcgcccgccgtcgcgcccatcctcgacttcctgtcggcgcagacctcgctgcccatcgtggccgtgcacggcggcgccgcgctcgtgctcacgcccaaggtgcgcgcgaccggggcggg

SEQ ID NO: 12491 - DNA, 116 bp, Homo sapiens
  chr19:48947361-48947477
  hyper
ggagaggatttggtccctcaactatcacccagcctgagaacgagggggcgggggccttggagcccaccggacttttttttaaacccgacaagggctttttaacgtcaccagatggg

SEQ ID NO: 12492 - DNA, 31 bp, Homo sapiens
  chr19:48996514-48996545
  hyper
gccttcgtctaggccccgccccaggccctgc

SEQ ID NO: 12493 - DNA, 31 bp, Homo sapiens
  chr19:48996832-48996863
  hyper
gcctccctccaggccccgcccaactctaagc

SEQ ID NO: 12494 - DNA, 466 bp, Homo sapiens
  chr19:49127267-49127733
  hyper
tgggcctttgttacgcgtgttagagtctctgtctttgcagctaaagacctcctccctcacgccccttttcttttgtgaattcaatggatgagacaggcccactctcccttaacaaagatggcgacaacggcgctgtctatggggccgcgacgtcgtctccgctgcgcgtcggccctcacccacgatggcggccagtctcccgaagcgcgaggccccgcccagctctcggcctctcccgcggccggtccctgcaccaagctcgcgagctgactggctccaccccccgcgccctcgtattggtgcggcccaggccggctgcacggccattggctgagcggatgcacaccctccccccacccctaggtctgatgggggctgttggtgctgacttgcgggaccgcctggaggaggacccggcgtgtgaggagggtgcgggggtcggggcagggaccggagtctaggggac

SEQ ID NO: 12495 - DNA, 217 bp, Homo sapiens
  chr19:49141162-49141379
  hyper
caaaataccgagagcggaggtttagaaagaggaagattggtttccggaagaagtctgttctttaatacccaaatgtttccccaccgcgcctagaatcagaccactgagaaaacaggaagtattctgtccctttaatagctttgttttaggggtaactcccctcgccttgtggggaggcttaggacgggcgggtgcaatcctcgaaggggagtctcag

SEQ ID NO: 12496 - DNA, 51 bp, Homo sapiens
  chr19:49199688-49199739
  hyper
atggtgcagatggctcgcgcacagctggtggtgacccgactttcctgcctc

SEQ ID NO: 12497 - DNA, 123 bp, Homo sapiens
  chr19:49199950-49200073
  hyper
ggaagtgataatgccgggaatccgggaatcccggggaggtgcaggaagacagcgagctcgaggcagtggggtgcgactgagccggatgtgctgagctgcccggggcacggggcggttggggta

SEQ ID NO: 12498 - DNA, 504 bp, Homo sapiens
  chr19:49216984-49217488
  hyper
cctgatcctccaggatgtcatcgatgccccggttaggaagcaactgcggatggagaaatttggcgtgaactcgggactgcgacctggacctgactggagaaccctagccggattcaacccacaccctcttacctgcgccctccggatcgcttcctgcagctcctcctccagagtcagagccgctgagcccggccctgaggaaggggtcagggctggagctgcagcaggagccggagtgggagttggagccggagccgtccccggggtatccgcggcacgtggaagaggtggcctgtgagatgctgcgctgggcttgacctagagcagccaagagggcgagcgcccataagccatgcccacagggcgcaaccccacccactcgcaacgtgtggctccaccccttgatcctctcgcgacccctcgctcatcaacccctttggcctcgccccctattctttcattggctcctcttctctaaagatccgccccctgttagtctgaacc

SEQ ID NO: 12499 - DNA, 51 bp, Homo sapiens
  chr19:49217526-49217577
  hyper
cgcccccacacttcattggctagttttttcgacaccccgccccggcccact

SEQ ID NO: 12500 - DNA, 481 bp, Homo sapiens
  chr19:49255913-49256394
  hyper
gggaggagaggaaggagagggcgcggccgggagtctcgcagcgtccgccctcccgggccgggcggatggctggaaggtggagccccgcccgtcacttggcgccgagccccagcgccaggggctaaggcgatggcccctgggcccaccgctccccagatcggggatgcaggggaccgcgccctgcccctccgccccgtcattgacctgcgcgaaggcttcacccagggcaggctacctggcttctgagcagccgcagcatcattgcgtggaccaggagacggagcgcccagttgcaatgctggagccgggaggtccaatccgccgccctctctcttccggtgccagggcttagagtcggcccccgacacctgggtgcttcgagcctggccacgccccagcggctgggcagggcccccgcacctggtcccggcgagtggagcgatcgtccgccctctgccgcgtcctcctgggggatggagaa

SEQ ID NO: 12501 - DNA, 30 bp, Homo sapiens
  chr19:49298883-49298913
  hyper
caaggctaaggcggcgcagaggcttccggg

SEQ ID NO: 12502 - DNA, 154 bp, Homo sapiens
  chr19:49314167-49314321
  hyper
aggccagtggtcttcccggaagtgcgcctcccccggttatttcccagaccccggcgcggggctgcgaacccacctgccccagagcggctgcggccatgatccgtgcggcgcgtaactgtgcccgcccggggcgcggctccgaagagagacgttc

SEQ ID NO: 12503 - DNA, 30 bp, Homo sapiens
  chr19:49315664-49315694
  hyper
ccgcggccaatcagcggttggtgcacacgc

SEQ ID NO: 12504 - DNA, 30 bp, Homo sapiens
  chr19:49436797-49436827
  hyper
gtgcattcgcccagcggggaagctagaact

SEQ ID NO: 12505 - DNA, 31 bp, Homo sapiens
  chr19:49466992-49467023
  hyper
gggaaccaaaaagacacggagacaaagcaca

SEQ ID NO: 12506 - DNA, 85 bp, Homo sapiens
  chr19:49467099-49467184
  hyper
cccaccaaaaaagtcggggagtgccaaggggatgaggtcagcgagtggccccacccccatccgtccccgcgggggccccttcccg

SEQ ID NO: 12507 - DNA, 194 bp, Homo sapiens
  chr19:49577261-49577455
  hyper
gggcgcagagacaagacggtggccttctagccactggtgtccggtgacactgcataaaaatagctccatcagatgggcttgggggaagtggaggggtttgatcactgagactcccaggaaagaagtcctggtcgccctctgctgggggtgtggagagaggtaggtactaagggttcgaacgccctgctaatcct

SEQ ID NO: 12508 - DNA, 84 bp, Homo sapiens
  chr19:49646031-49646115
  hyper
ccctctgtccctctgtccctccgctgcagctgtgggtgggcatgcctgcctggtatgtggccgcctgccgggccaatgtcaaga

SEQ ID NO: 12509 - DNA, 83 bp, Homo sapiens
  chr19:49646245-49646328
  hyper
cgcctcctcccgcactgtgagtgtccggcggccaattccagccttcgcttcctcagagccccgcctcttgccctcagtctagc

SEQ ID NO: 12510 - DNA, 405 bp, Homo sapiens
  chr19:49660927-49661332
  hyper
atcgcggcctgggacccgccctctccccgcctcccgctttggcgtctccaagactccccgccccccagacctcgccccgccccaggctaggctggaaagtggaggatccggtttgctctgggcgggtctggaagcagagccggcggagggagcgccggggccctgggctgcaggaggttgcggcggccgcggcagcatggtggtgccggagaaggagcaggtgagcgccggaccagggtctgcgggagcgcggagctggggacctcgcctccaggctcccagagaggagggcgctggacacccagattcctgggtcagacggaggagggggatgggagggtccaggttccagggtccagggcatgggggtcgagactcctgagtctggagcgggagggcgctggg

SEQ ID NO: 12511 - DNA, 640 bp, Homo sapiens
  chr19:49925605-49926245
  hyper
tctaccccccatttcaagccccgcgcccccaacccaacgcacacgcaggtcgcgcaggaactaggcgcagtccggagcgcagggcatggtctttattaagatggggacgggcagcgcgctcagggcgcatccaacaccagcagcttgtgcatgtacgagttcagccagtggcggcgctcgagggcggccagcaaccgcgcgcgctcccggaaggccgcgtcgtccgccagcgccaggctcctccgcggcctgggggtggcgggatccgcccaggcccgtcctggggggcggaggctgtggagagacgcggtgaccgcgcgtccagactcgctcttgccgccgcctgtcctccccgcggtctaactcgaagccccgttactgcccagtccgtggagtggctcggtccggctccccctgtctctctcgttctctgtgtgggtctctgtctctctgctcaccaggttcgaaactccccaggtactgagaccgagtctgatgcacttgtccgcccacagcgctcagcgcatggccaggcgcacaccaagaacccaataaacgttgctcaaagaatgaatccgtttctgcaacgactcctttcgagcctctccacgcctttctcgggatctatctttctgtgtct

SEQ ID NO: 12512 - DNA, 30 bp, Homo sapiens
  chr19:49926733-49926763
  hyper
ccttatatcgcctccgcagcccccgcaccg

SEQ ID NO: 12513 - DNA, 31 bp, Homo sapiens
  chr19:49929635-49929666
  hyper
ttaaccccttccttcccgctctcccccgcag

SEQ ID NO: 12514 - DNA, 30 bp, Homo sapiens
  chr19:49935878-49935908
  hyper
caggtggggcagcgcggacaccaggcctac

SEQ ID NO: 12515 - DNA, 31 bp, Homo sapiens
  chr19:49939532-49939563
  hyper
gaacctgatgttggggcggactctacatttt

SEQ ID NO: 12516 - DNA, 109 bp, Homo sapiens
  chr19:49956759-49956868
  hyper
actgcggtagctcagccgctccgcctctcttagtccccgtgattcccgccgcccaataggatcgcgccctgtaggacgctcccttgagccttggcggtggcagcctttt

SEQ ID NO: 12517 - DNA, 30 bp, Homo sapiens
  chr19:49977303-49977333
  hyper
caccatgcactgggcgtgccacccagggag

SEQ ID NO: 12518 - DNA, 30 bp, Homo sapiens
  chr19:49990679-49990709
  hyper
aggtccaaccggaagaatgtccggattgga

SEQ ID NO: 12519 - DNA, 31 bp, Homo sapiens
  chr19:50003947-50003978
  hyper
agagacgcataaaagccgcagcagagatggg

SEQ ID NO: 12520 - DNA, 103 bp, Homo sapiens
  chr19:50016228-50016331
  hyper
aggggttgggggcccggactcctgggtccgagggtagagcggttgggggcccggactcctgggtccgagggtagagcggttgggggcccggactcctgggtcc

SEQ ID NO: 12521 - DNA, 30 bp, Homo sapiens
  chr19:50144982-50145012
  hyper
gcgccactgcatcccgtctggttctaaatt

SEQ ID NO: 12522 - DNA, 30 bp, Homo sapiens
  chr19:50167911-50167941
  hyper
cccaggtcgtcgcacgcacctggaagattc

SEQ ID NO: 12523 - DNA, 30 bp, Homo sapiens
  chr19:50316443-50316473
  hyper
ctgtggtccggagccgccagagggcgagat

SEQ ID NO: 12524 - DNA, 54 bp, Homo sapiens
  chr19:50317014-50317068
  hyper
tctcccctacaaccttcgagggtggttgagtccagcgatcgttgcctagtaacc

SEQ ID NO: 12525 - DNA, 30 bp, Homo sapiens
  chr19:50321445-50321475
  hyper
acgaagcctcagcgcgtgccccgcacaaac

SEQ ID NO: 12526 - DNA, 30 bp, Homo sapiens
  chr19:50380769-50380799
  hyper
accttcagcgtctgcgccacgtgactccga

SEQ ID NO: 12527 - DNA, 40 bp, Homo sapiens
  chr19:50393536-50393576
  hyper
cgccagaagggcctgcggaagcttaggaacaccttggtgg

SEQ ID NO: 12528 - DNA, 46 bp, Homo sapiens
  chr19:50393796-50393842
  hyper
ggacagcgagctcagcagcgcgcgcggcagcaggtcccagccaccc

SEQ ID NO: 12529 - DNA, 31 bp, Homo sapiens
  chr19:50401022-50401053
  hyper
agggagccaggggctccgtgaggaggaaaac

SEQ ID NO: 12530 - DNA, 481 bp, Homo sapiens
  chr19:50553991-50554472
  hyper
ggcaaatgggggcttggacctcggatcggcctcccacgcgaagcttgctccccaccagcatccccacgttggtggcgacgctgccccggccccacggatacttccgcgcctgtcagactccctgatgaactacccttcccagagtaccgcgggagctcgggctcctgagggcgacggtcctctgatggcagatgcgggagaaactctggcgtcaggcggccctcgcgtggagcacacgaagtcgtggcttattctggcttcagtatgtggggtggagaaggcgatccacgcagctgcgtctatttcctgtggatcaatcgcaaaatacgttctgtaagccccgcccccactgcgtgcgggcggcttttgtctccacggcaaccgtcaactctggaaacgcctgtctttctccatggcaactgtctacgccgcaggctggagctgcccattaccggagcccgtaagcagtatgggtgctgga

SEQ ID NO: 12531 - DNA, 116 bp, Homo sapiens
  chr19:50708604-50708720
  hyper
cttcccccggcccccgtcagaggccctgaagctccaggcccgccccgttcccagccgggcaggtgctgggtgacatcagagccgggctcccgccctgtgacgcgacggggccccgc

SEQ ID NO: 12532 - DNA, 311 bp, Homo sapiens
  chr19:50815627-50815938
  hyper
cctccccaatcgccccgccccctggcccgtgtccgtgcgttcccggagcgcaggaggggtgcgacatgcgtgtggggggcgcgtcatgcagcgcatgcgtgtaggtgcaggcaccctggcggccggggggaaaagggggagccggacttggaaagagtccctttagctcgctctctccctccccgaatcccacactattgacttgggggatggggtgggaggggaggagaatcacgttttgtagaagtttatcatgattgtggttattttgaaaagctgaactcaaaagctgggtacgtgtggcggactgg

SEQ ID NO: 12533 - DNA, 30 bp, Homo sapiens
  chr19:50816433-50816463
  hyper
atgattttccacccgcgagcgtgacgcggt

SEQ ID NO: 12534 - DNA, 30 bp, Homo sapiens
  chr19:50831796-50831826
  hyper
cacgtcggtctcgtcgatgccccagaagcc

SEQ ID NO: 12535 - DNA, 163 bp, Homo sapiens
  chr19:50832713-50832876
  hyper
gaaaaaagtgcgggcggggtagagggaggaggggacacatccaagctatttaaagacgcccgactggcctggaggggcggggccaccatgagagaggccgtcctgattgggctgagaaaggggcggagagaaacaaaacagatcgcacgccctcacctaaaac

SEQ ID NO: 12536 - DNA, 1401 bp, Homo sapiens
  chr19:50836198-50837599
  hyper
ccacccggttccattcggagccttggtctctggacaccaaaggtgaaaatgtgaggactctctgcctacgatccttcgtcccctaaaaccctccaagtaccttggccccgaaagctcagagtcgaggggaatctccccgctataatctttgggtccctggatcccaagtcccccgtctccaaaactaggattcgggctgtcttaccgcccccggaccctgagccttcgccccctcccccgtactcaccccaagtcgaggcgaggtggggatgggggaatccggggctcgagatggggggaggggtgacccagccccggcagctctgggcagcaagaggctgcagaggggggagtgacatcaccgccggaggaggggcagcaccgctcccccaacccaggggcttcaagctccgcctttatggcggaccccggggtcctggaatgccaaggcagagaggagaaacaggagacgaggtccgagggaacggtatccccgccccttagaacaggaactggtaaacccttaccaattacagccacccccgactgccacctgtggctgccgtcgcgacctgtcgcctcccacgcatgttgtggctgcgcccgcccccgtcagggcgtgaccacggcgtggactacaacgaccgtgatgctccacggagccaggagcctttgacgaaaggcagcgtaggcgagggccttcatgggactcgtagtacaaggcccatcacaagggtgcgccgtggagaaaaggggtgatacccttcgcctccctctcttcctcaactccgtgggtccatgcacaaagctttctcttcaaaaagtacgctctgaaaagaagcaacctaggcaggttcgttcaatggaaatattggatttttactgagtagcgctagctctgctacccggtgcgcatgcgcatcacctgggcggcacccgcggtactgcgcctgcgcggtctcgcgccttcccaggtccgctccgcgagggcgagcgcgcgccagtcccactcgtgcgccgctcttcatgtccccgcggtcgaagacggtcacatacgcccccaagaaaacgtcgccgaggatccacacaggtactggaggcgaagcgatgtccaaggcccggaagccggacaagcagaggcggacgtcaccctgagcaaactgcaaggcgacaaggcggcaactgggtgtccaggccgcaggaaccaccatttccctgggagtccgtgctctctccgcccccaaccccggggacaagaaatgtttctgtggccccttccggccctagtgatgtccaactaccagctccaccctctcaactccagtcatattacatcactgtggcgtcattatgacggacacctacctggatgacgtaatcctgggccgtgagattaaacca

SEQ ID NO: 12537 - DNA, 31 bp, Homo sapiens
  chr19:50860731-50860762
  hyper
cggtttgtgatcaggtcggcctccaccatca

SEQ ID NO: 12538 - DNA, 241 bp, Homo sapiens
  chr19:50871937-50872178
  hyper
tccaactgcacccaagcgcccttaagtagtttgagaggccgtgcctgcaaattcccaattggccacaaggtggaggtgtgggcctgttttcccagccaagattccccagccgccacccgtttctagagctggacccctggaacaccaggctctctccagctttcctgcttccgccctagcagttcccaccgcctggaatgccgacttgctcgctctctgcaccccacgggaaaaggagcag

SEQ ID NO: 12539 - DNA, 31 bp, Homo sapiens
  chr19:51052519-51052550
  hyper
agacagacagacaaggcgagggggcagaaac

SEQ ID NO: 12540 - DNA, 13 bp, Homo sapiens
  chr19:51142565-51142578
  hyper
ttcccggcaggtc

SEQ ID NO: 12541 - DNA, 41 bp, Homo sapiens
  chr19:51142587-51142628
  hyper
cgctgctgcggcttcatagacccggcgctgcaggatctgct

SEQ ID NO: 12542 - DNA, 30 bp, Homo sapiens
  chr19:51142918-51142948
  hyper
gcgctcccactccccggcccgagatccacg

SEQ ID NO: 12543 - DNA, 351 bp, Homo sapiens
  chr19:51161902-51162253
  hyper
cctggagtgcctagggtagagcgcagcctgcagtcgccagtggagggtcgggcctttgggcggtttgagatggagcctcgacagacagtgattaggacgcagaaccaggctaagagagcgtaaggagcctagagcgacccaggcgagagggcagggctggaggggagtttagggacggagcgatggtccgctggaccagggcctgtaaacgactccagggaccaggcagggactcttcgacgatcaaagccagggctgaaacgacctgcgagttccttttccgtccccaccccccttacaggtggctcatcgcggtcacggacttccagacgcgctcgcgcttgctgcgct

SEQ ID NO: 12544 - DNA, 272 bp, Homo sapiens
  chr19:51162427-51162699
  hyper
gcaccgccccgcgggctggggccacccacccggagccccggaggacagggggcgttgccttcccaggaaggaggcggggccggctcgagggggtggatactgtgagtttaattataaagaatgacctggtacaaaagccatttctctctgcaaaatcttggtggggagtcaggggaagggaggtgatggggggtaggaatgaacccccatgttataatcccgcgtccctaatcttcctccagtccctgtacgtggacgcctgggtcccaatc

SEQ ID NO: 12545 - DNA, 30 bp, Homo sapiens
  chr19:51198873-51198903
  hyper
gccgcgtgcacggacgcgcggacggagccc

SEQ ID NO: 12546 - DNA, 628 bp, Homo sapiens
  chr19:51227640-51228268
  hyper
ccagcatgatccctgtctgtccgcagtgggccgcctggccggcctggacgcaggcctgcaccagctgcacgtccgtctgcacgcgttggacacccgcgtggtcgagctgacccaggggctgcggcagctgcggaacgcggcaggcgacacccgcgatgccgtgcaagccctgcaggaggcgcagggtcgcgccgagcgcgagcacggccgcttggagggtgagtccgcggcgcgcggggtggaaaaaaatgagactatctgggccaggaatgggactggttgagaaggtgaccctaggtgtccggggcgggagagttcgggagagctgctgtgtgctagcggacggggttagagagctgggaggctgaatgcagggagcgggtgggcactccagacccgcgcggacccgactggggcagcaccacgccccctacagtccagctcccaccgcctggccccgcccctggcggaccagactctccacctcctggctcccgcggttctgaccacgcctcctcccagccctccccatgagttcctggccccgcctccctccacccccggatgttttgtcctcgcccccttccagactctgaatgcatgaccccgcctccttctctacccggcc

SEQ ID NO: 12547 - DNA, 270 bp, Homo sapiens
  chr19:51228368-51228638
  hyper
cgcggggcgggagcctggcgcagccggcagaccgccagcagatggaggcgctcactcggtacctgcgcgcggcgctcgctccctacaactggcccgtgtggctgggcgtgcacgatcggcgcgccgagggcctctacctcttcgaaaacggccagcgcgtgtccttcttcgcctggcatcgctcaccccgccccgagctcggcgcccagcccagcgcctcgccgcatccgctcagcccggaccagcccaacggtggcacgctcgagaact

SEQ ID NO: 12548 - DNA, 201 bp, Homo sapiens
  chr19:51228702-51228903
  hyper
cgtctgcgagttccccttctagcggggccggtaccccgcctccctgcccatcccaccacccggcctttccctgcgccgtgcccaccctcctccggaatctcccttcccttcctggccacgaatggcagcgtcctccccgacccccagtctgggcgcttctgggagggctcttgcggtgccggcactcctccttgttagtgt

SEQ ID NO: 12549 - DNA, 217 bp, Homo sapiens
  chr19:51324263-51324480
  hyper
agctggggctgtggtgcgggctccccaggggcaggtggcctggcctgaagtccaaggtcgaggcccccttcccttcccagcaccctcccgcgcgtttctcgccccgcctcctccttcctcctccctcagttgccccacccagctcccgctgaaaccagcccttccctgtgtctctccagagtggagggatatcctgtggggcggggagctggacaga

SEQ ID NO: 12550 - DNA, 133 bp, Homo sapiens
  chr19:51412559-51412692
  hyper
ccgagcagaacaattcgttttccatgaccagtgccgcctgccagggctgcgagtgcgggctgcagtcctcgccgtttatgatttggctgcagctaccagagacgagcgatcctgagggcggagtcagggatgg

SEQ ID NO: 12551 - DNA, 30 bp, Homo sapiens
  chr19:51415666-51415696
  hyper
gcgcagaccgggaaccgggcgggcctgcag

SEQ ID NO: 12552 - DNA, 361 bp, Homo sapiens
  chr19:51415994-51416355
  hyper
ctggcttgcgctctacggatcttgtggagacgcataggtgcgggaaggggggtggggggtgagagggtgccgtagaccgcggagggtgcacggaggggcaggccgaggtcaggactgccgagaaacagcggggactcatcaggggagaggtggtgtttacagccacgaggccgggtgagatcatccaaggagtgggtgggtgtagaccgcggagccggcgcgggtgagggatagtgcccgcaggtgaccgcgacgaggcaggaatgtctctgtgtctctctgtctctcctgggtctctaacactctttccttctccttccttacttctttcccccacagcccaccccgtgtgtctgtctct

SEQ ID NO: 12553 - DNA, 30 bp, Homo sapiens
  chr19:51520367-51520397
  hyper
gtttccgcagtgcgcggccgtcagcaccca

SEQ ID NO: 12554 - DNA, 909 bp, Homo sapiens
  chr19:51522317-51523226
  hyper
cagcggcagcagcttcgccagagcccgggcgccagaggcggcggagaggtggaggtgcggagctctcatggccaggatctgctggggtgtgtgcaggggcgggttaaaacagatgctccgttagagacccccacctcgccgcgctcatccgcccagcctgggccaccccagcccgcaagcacccttttgacctgcagccgataaccccaggggctggcagacgggagattcgggctggaacagcggtaatgggcacaattaccctaatgacgcccctcgcggcatcttcccgtcctccctgtgcccgagtggagcgctctccgcgccccagctaccctggctgcagccacgccgcgcccgaggtttccccctccttcacgcgcggggtggggatccgaggctcggagccagtgggagcctctttctcaacctcacagcggggggacttccgcgtcccgcaggtggagaaaccgaggctctaagccggctcctgcctgtggcccgggggtccccacccatcctctcgcaatccaccccaacccgggtggggtgcaggtagcttcacctgggagtcgccgataggaaggagggaggggacccagacgtgcctctgccctgcctgtggtctgccgctggtatcctctgcccagggacccctggcgggaccttcccttttaaccccaaggagtccggaagcttctccaccctcccctacccccacccccgggctccctccctttccctctgtctaattgtaccgtgggtgaggctggcactcctgggtcccagattcctgctctgggaggggccctggaatacaggcttctcccagtgcccgaaacgcccccttttcatcccttttggaactggcttccgtggggattctccgggtcccggtgccaagaaggc

SEQ ID NO: 12555 - DNA, 118 bp, Homo sapiens
  chr19:51527587-51527705
  hyper
ttggaggaggaaaggtcgggggagacatgggtgggagaggtgagtgacacctttgaggatgaagaaacatcgctctgcttccaacctcttccacgtctcccaccgaagcccccttccc

SEQ ID NO: 12556 - DNA, 30 bp, Homo sapiens
  chr19:51568508-51568538
  hyper
tgggggtgcagtggcgaggtgggaggaaca

SEQ ID NO: 12557 - DNA, 31 bp, Homo sapiens
  chr19:51815072-51815103
  hyper
ccctccccctccgcgccgcctctgccgcgat

SEQ ID NO: 12558 - DNA, 204 bp, Homo sapiens
  chr19:51830798-51831002
  hyper
gccagggtgcctggaggggggcggcggtgggagtgacccgaggtacatgaggtgctagaacccgaggcgatgggtcactggggtagggggcagaatgctgggtcaccggggaacggaggagcctgagagtcggggggctggcctggctgggcgctgcggcccggcccctgacccggatccctggcaggctgagcagcggcacgg

SEQ ID NO: 12559 - DNA, 5 bp, Homo sapiens
  chr19:51831120-51831125
  hyper
cgcct

SEQ ID NO: 12560 - DNA, 217 bp, Homo sapiens
  chr19:51842631-51842848
  hyper
tatttctcttcccaaacgtaactcagccccttcctttccagctccacccacttctgccaggttacttcgccccctcctggattgcactccgagaagcctccccttttcccagatatctccgcccttccttgtggaccccttcccctttctaagacaattctgcccgctttctaaatgacctcgcccctttccctggtgactccgccccccttgccag

SEQ ID NO: 12561 - DNA, 339 bp, Homo sapiens
  chr19:51869655-51869994
  hyper
cccgcgcccctctctgcgcctgcgcgcagcacggtcagccagtcaaccgctgcagagcccgcctccccgacagaggaccaatcgagaggccggaaggaagggaggtgtggcaagcaatgcaaaccaatgggaagcggatctcggggagcgagcgggacctggagagagaaggaaaggcctggcggagagggcagggcagagaactaggggaaaggtcgtgcactggagggaagcgcgcccggagtttatagatcctcccggtcctataaacacttcccggtatccccggatctgctctccctctccagatcccccacttcttcccggcctctccaagtc

SEQ ID NO: 12562 - DNA, 30 bp, Homo sapiens
  chr19:51925113-51925143
  hyper
gggcgcaggtgcggcgtgaggaccgcgtcc

SEQ ID NO: 12563 - DNA, 31 bp, Homo sapiens
  chr19:51925343-51925374
  hyper
cgccgcccccagggggcgctccaccttcaga

SEQ ID NO: 12564 - DNA, 285 bp, Homo sapiens
  chr19:52074271-52074556
  hyper
ttccatttgtccttggctgtacggaataaaagccctttgacgatggcggcctccaatatcataatccgtatgggtgcggccatgccgtcctccctaccaagtttctgaagttgaatgaaccgcggaataaaggtacgccgttatacgccatgataactgttggcggagcgtagcttcaaaagtgttagtgggcatgcgcgcggttcaacagcgcctacggaaatcctaacgggaatgtaacccaaaccggaagtggcctagagcgaccatttagcttctgttgtt

SEQ ID NO: 12565 - DNA, 31 bp, Homo sapiens
  chr19:52160024-52160055
  hyper
actgacatgaaagccccgactttcttggaaa

SEQ ID NO: 12566 - DNA, 598 bp, Homo sapiens
  chr19:52207128-52207726
  hyper
ggtgcgtttagggcaggggagcgagaaggctcgggggcgggctcaaggctcagggccaggactccagggggcgtggtctggctcggggggcggggcttgtaggttactcagtggcaagccggagttgaggcgtttaaacccgcgtgtcccgcagctccggactcaggacttgtcctatttccgagatatgccgcgggccgaaggatacctggcgcggatccggccggctcagctcacgcaccgcgggacgttctcctgcgtgatcaagcaagaccagcgccccctggcccggctctacttctttcttaacggtggggcggggcgcggccgcgtgagtgagcggggtcgggagaggggtggggctcgtgcctggctgacgtgcgcgcccccgcagtgacgggcccgcccccgcgggcggagacagagttgcaggcctcgttccgggaagtgctgcgctgggcgccgcgggatgccgagctgatcgagccctggaggcccagcctgggcgagctgctggccaggcccgaggctctgacgcccagcaatctgttcctgcttgcagtcctcggggccctcgcatcagcgagtgcgacagtgt

SEQ ID NO: 12567 - DNA, 172 bp, Homo sapiens
  chr19:52222623-52222795
  hyper
gcccaccgcgcccgccgccgcgggttcccagggctggtggtagttgccgtcccacacgtacgtggcggggtcctcgtcagcgaagacctcgcggaacatgtcgaccatgtagaggtcctcggcgcggttgccatccaccaccatgaggacgcgcagccgcgcgcgcgggtac

SEQ ID NO: 12568 - DNA, 654 bp, Homo sapiens
  chr19:52531317-52531971
  hyper
cagagtcggactcgtcgctgatttcctcagactcttcatccctacagccaaaggacccgtcattaacgccccgcttcctcagcgactgcgttcaaatacagccccaatcaggacgctccacgcaccatcggtacacagacccacaggccgcgagtccatgcccagaactcgactcacccgagcccgaacctctccagacaccactggcagcgacaaaacgccgcatccacgtccgaaaacgcttcctattcagacgcgctcctgcgcggactccgggaagctgagcggtaaagaccgtgaagcgaggcgaggaccacggagcctgcccgggatcgcgagttcagactgcgggcgccgctctatgaggtcacagggctgcgcccatcgcagcgtttctgacaggagcggccataatggctgtgggaatcactcttagtcacctcagtgcctttctctcttcgttgcaagggacactcaagagtcgggtgcccagccaaggccaacacggcgcagtggcattctattcagcctgctgtggaaaaaagatggcggcgccctttgtgcccattatagctgagagtggagccttagctggagcaccatgggcacggccatcttagaggaaggcagcagccgtacggcagagaagatgct

SEQ ID NO: 12569 - DNA, 1 bp, Homo sapiens
  chr19:52552118-52552119
  hyper
a

SEQ ID NO: 12570 - DNA, 31 bp, Homo sapiens
  chr19:52643470-52643501
  hyper
ttgtcctgtgaagcagcgttgctgcctgcct

SEQ ID NO: 12571 - DNA, 161 bp, Homo sapiens
  chr19:52715131-52715292
  hyper
ctcagttttcagcctcctgctcgtctactttgcaaacgattgaccgtcaagcccgggtttgagcctgactcactccagaactctggtttatggctgtacacttgcttagatacttacactggcccccaccgcctttgatcgaagcaattgctgctgaaaaa

SEQ ID NO: 12572 - DNA, 31 bp, Homo sapiens
  chr19:52800383-52800414
  hyper
ccgcccccgccccgctcggacccctccgctg

SEQ ID NO: 12573 - DNA, 328 bp, Homo sapiens
  chr19:52839389-52839717
  hyper
actgccagcaaaacccggaaaacagaggcactggaggcgtggcctagggaagccccgccccgtcccgtcccggtccgctctctatgctgcgcgcgcgcagttttttgcagacccggaagcggatcgcgtgggtagaaggtcacaccgcagcgcgtcagtttccctttgtttagattcaatctgggcttcccagctcccccgcgcttctgtacccgggatctgagagtcaacacagaccttgaaatccccgcaccgctccctccaccccgtgtaaattcaggcgtctccgtgagagtccggcgctcgcttccctgtgtgttaaaatcgc

SEQ ID NO: 12574 - DNA, 333 bp, Homo sapiens
  chr19:52839741-52840074
  hyper
cgttctgccttgggccaggtaaacacggattttcgagactcctttccgcttaaaactctttactgacccaacgtcctgccccgcgcttttaaaagtccttaccgcaaggtggattcccgcccggggagcctcccaacctcgcccccggcccctgaagcgcagcgccgcagccccagtcccggcgggggaggccgcgtcctgtactgggtcctgggacccttgagaccccacacttctaataattcagccccacccttttcctccttgatccgggccttcctactccccaggcctccccttcgcagccatcgctactcccgacccccgggtgtg

SEQ ID NO: 12575 - DNA, 609 bp, Homo sapiens
  chr19:52872924-52873533
  hyper
aggaccacatgcgagcgcccctacagccgatttaaaattaattttaatagcaggaattttcctggatctaatcatcaacaaactttccctctgccgggacacaatctatttccagatagctgagttcttccagtctccacggcaggtctagcctccaaaacgagacgagctgggagcgaggcggagggaagcgcaggctccgcccaatcccacccgggcctggcctcgcctcgcctctcagctgcgcgcgcagtttcctggagacccggaagcagattacgtggagtgacggtcatgctgcggcgtgtgagtttccctttgtttagattaaatctgggatgctgagtcccctcgcgcttctgtacccggcatctcaggggtcacacagaccttgaaatccccgcatcgctccctccaccccgactaaactcagacgttctaatgagagtctggcggtcgcttccctgagtgttaaaatcgctcggaggctggtcctgtccccggtctttcaccacagggccatgtagacagctcctgtcgcggagtttgcctgcttcaaatccttcagtgacccctagacacggcccgcgctgcgtaaagttctcaccc

SEQ ID NO: 12576 - DNA, 22 bp, Homo sapiens
  chr19:52873570-52873592
  hyper
cgccctcttttcacaggcctgc

SEQ ID NO: 12577 - DNA, 160 bp, Homo sapiens
  chr19:52900955-52901115
  hyper
cgcagccagtcaagcgaacggaagcgcaggcccggcccaggctttgtcccggcccgccctggtcccagccagtccggcctctaggatgcgcgcgcaatttcgtgcaaacccggaagcggaccgcggggggcgaacgcctagagcgcagtttccggtagac

SEQ ID NO: 12578 - DNA, 91 bp, Homo sapiens
  chr19:52956756-52956847
  hyper
gtttcctggaaacccggaagtgaatcatggggcgtgaactcgcaagcgcagtttcctgaagacccggaagccgatcgcgtggggagccggt

SEQ ID NO: 12579 - DNA, 30 bp, Homo sapiens
  chr19:53030943-53030973
  hyper
agtgaaggtcacgtcgccatggtgagtttt

SEQ ID NO: 12580 - DNA, 459 bp, Homo sapiens
  chr19:53073313-53073772
  hyper
cgtgcttcagccttcctgaccgctctcgcctccaaagcccgaaaaatagagtcgctgggagcgaggctgagagacgcacaggtcccgccccggccccgccctctgccggttctaaagggcaaggtctctccgcctggggccccgcctctacctcgatcaggccccgcccaccttctcgttggctccacccaggcctggctttagtcctgtgcgcacacatccgcgcagaccaggaagcggatcccgtggagtgaaggtcgcaccgcggcggtgagttttgctctgtgttgtattaagtctgcactccccatatccccggcacttccgtacctgggacgtggggtcaccacagacctgtaaattctcgcccatcttccttcaaccagagcaaatgcagacgttcccctgggaatccggaagtcgcttccttttgtgtttaaagtcgccctgaggctgttc

SEQ ID NO: 12581 - DNA, 240 bp, Homo sapiens
  chr19:53073819-53074059
  hyper
cgtagtttctgtgctcaaaaccgttttttaactcctccctccccgcgcttttcaaagtcctcacccgagatgtgtatttccgcctgggcgcctcccagtctcaacctttaggcgcctgaagcgcaaacgtcgcgatcccagtctcagggaggccgagttctctgcctggtgctgggatcttgtggaccccaccgaaggcgtcgtcgcaccccacctcccgcctcatgctgggccttgctg

SEQ ID NO: 12582 - DNA, 997 bp, Homo sapiens
  chr19:53104165-53105162
  hyper
ctctgcccccaccgccgacccgccctccccgaccccgagtgaatggagaatagaaagggagaggatttctgttctgtcctgtgggccctcagtatgaaatcgtagttctgcccaggcaggactttgcatttcacattctagtttgcatccccgttccagacaattccagggcttttgactcatgcctcagccttcccggccagtctcccttccaaaacccgaaaaacggaggcgctgggctcaagactgactctgtcccgccccggccccgccctctgccggttctaaagggcaaagtctctccgcctcgcgccccgcttccgcctgcccaggccccgcccacctcctcctggaccccgcccaggcctggcttctgtcctgcgcgagcagatcagcgcgaacctggaagcggagagcgtggagtgaaggtcccacggcagcgcgtgagtttctctctgttttatattaagtctgtgcgtcccaggtccccggcgcgtctgtacctgggacgtggggtccccacagacctggaaattctcgcccgtcttcacccagagcaaattgagacttccctttgagagtccggggttcacttccttttgggtttaaaatcgccttgaagctggtgcggtctctggtcttgctgctatagggcaatgtatacactttgtattgggtagttttcctgctcaaaacctttttctaactcctcccgccccgcgctttttaaagtccttacaggtgaggtggattcccgccctgggcgcctcccaccctcgccttcgacggcccctcgagtgcagcgccgtgcccccagtcccgcggaggctgcgtcctctgcctggtcctgagatccttcagaccccaccattgtcttaaggcgccgtcgtcccccacctcccttctcgtgccgggccctgctgctccccaggtctcctctccgccgtcaccgcttcccctgagcccgcgttgggaaggtgtccggggcctgtcctgt

SEQ ID NO: 12583 - DNA, 668 bp, Homo sapiens
  chr19:53140950-53141618
  hyper
catcccggaggagctcgttttccgggggctggagctgggcaggcaagaacaccccgtgtcacaggacaggccccgggtacctccccaacgcgggttcaggggaagaggtgactgtggaggagagacctgtggagcagcagggcccgccacgaggagggaggtgggggggagacggcgccttaagacaaggttggggtctgcaggattccaggaccaggcaaagtacgcggcctccctgggactggggccctggcgctgcgctccagtggcctacgaaggcgagggtgggaggcgcccagggcgggaatccagctctcgggtgaggactttaaaaagcgaggggcgggaggagtcagaaaacagttttgagcaggaaaactacgcgacaggaagtgtatacatcgccctacagcagaaagaccggggacagcccagcctcagggcgactttaaacccaaaaggaagcgatatccggactctcatggggacgtctcaatttgtcctgggtgaaggaagaagggagagaatttccaggtctgtggggaccccacgtctcaggtacagcagcgccggggacctggtaagcgcagacttaatagaagagcgaaactcaccgccacggtgtaactttcactccacataatccgcttccgggtttgcgcgcatgt

SEQ ID NO: 12584 - DNA, 136 bp, Homo sapiens
  chr19:53141647-53141783
  hyper
cggggcccgcgaggtgggcggggcctggatgaggtaggggcggggtgggaagccgagagactttcccctttagaaccagcagtgggcggggccagggcgggacctgtgagtctctcagcatcgttcccagcgcaga

SEQ ID NO: 12585 - DNA, 798 bp, Homo sapiens
  chr19:53193141-53193939
  hyper
ggcacctccccaacgcgggctcaggagaagcggtgactgcggaggagagacctggggagcagcagggcccggcacgaggagggaggtggggggcgacggcgcctgaggacaagggtggggtctgcaggatcccaggactaggcagaggacacggcctccccgggacaggggccgcggcgctgcgcttcagaggccgacaagggcaaggctgggaggtgcccacggcgggaatccacttcgcgggtgaggacgttaaaaagcgcggggcgggaggagtctgaaaatgattttgagaaaaaaaaaaaaaaaacaacaacaactacgcgataggaagtgtatacattgccctagagcagaaagacaggggatgggaccaacctcagggcgactttagacccaaaaggaagcgacttccagactctcacggggatgtctctatttgctctgggtgaagacgggagagaagttccagatctgtggggaccctaggtccgagggacagaaacgctgaggacctgggaaatgcagacttaatacaaaacagcgaaactcaccgccgcggtgtgaccgtcactccacgcgatccgcttccagatttgcgagaatctgcgcgcgcaggacagaagccaggcctcggcgggccccgcgaggtggtgggcggggcctgggccgggtggcggcggggcgcgaagcagagagactttgcggtttagaaccggcagagggcggggccggggcgggacctgtgtgtctcacatcctggctcccagcgcctctgtttttcgggtttgggaggcg

SEQ ID NO: 12586 - DNA, 484 bp, Homo sapiens
  chr19:53400383-53400867
  hyper
gctttcttgattgcatatattcgttttccaggagttggaactaggtagcaacaccgcacaaggagggaggtggggagcgacggagccttcggacaggggtggcgtctgcaggatcttaggaccaggcagaggacgcggcctcccgggaaccggggttgaggcgcggcgctcctgaagccgccgagagcgacggtgggaggcgcctagggctggaatccagctcgcgggtgaggacttgaaacagcgcgaggcgggaggacaggtcaggaagggttttgagaaggaaaattccgcgataggaggtgtctgcacgaccccactgcagaaagaccgaggacgggacctgcctcagggccactttaaactcgaagggactcacggactctcacccggacgtctcaatttgctctgggttgagaaagaggggccgcaatttccaggtctgtggggactcaacgtccccggtatagcagcaccacaggac

SEQ ID NO: 12587 - DNA, 443 bp, Homo sapiens
  chr19:53445370-53445813
  hyper
gagaaacggtgattacggagggaagacctggggagcataagggcccggcacgaggagggaggtggggggcgacggcgccttaagacaagactgggaggcgcccagggcgggaatccgcctcgcggtaaggactttaaaaagtgcgggttgggaggagtcagaaaaaagttttgagcaggaaaactacgcgatgggaagtgtatacgttaccctatagcagaaagattcgggacgggaccggtctatggtgactttaaacccaaaaggaagcgacccccagactctcacggggacttctcaatttgctctgggtaaagaaagacggaggagaacttccaggtctatgaggaccccacgtcccaggtacagaagcgcctgggacccgggaagcgcagacttaacacaacacagagcaaaactcacccccgcggtgggaccgtcac

SEQ ID NO: 12588 - DNA, 30 bp, Homo sapiens
  chr19:53446037-53446067
  hyper
ttttggaggcgagaccggccaggaaggctg

SEQ ID NO: 12589 - DNA, 543 bp, Homo sapiens
  chr19:53465743-53466286
  hyper
ctgcgctccaggggccgactagagcgaggctgggaagcgctcttgcccagggcaagaatccagctccgggtgaggacttgaaacagcgcgaggcgggaggacgcgtcagaaagggttttgctaaggaaagtttcgcgacaggaggtgtctgcacggccccactgcagaaagaccggggacgggaccagcctcagggcaactttaaactcaaaaggaagcgactcacggactctcacccggacgtttcaatttgctctgggttgagaaaagaggggccggaacctgcaggtctgtggggaccccacgtcccctatatagcagcaccagacaactaggaaacgcacacgccgccgtgcaactttcagtccacgccatccgcttccgggtctgtgccaatcggcgcaggacagaagcgggacctgggccagatccccgagaggtgggcggggcctgggcgaggccggggcggggtgcaaaggacaaggggcccggcgcggaagagaagagtcttgggctgggaggagtccgcgggggcgggaaagg

SEQ ID NO: 12590 - DNA, 106 bp, Homo sapiens
  chr19:53496336-53496442
  hyper
cagaaagaccggggacgggtctagcctcagggcgactttaaacccaaaaggaagcgacttctggactctcaccgggacgtcaaattttgctctggggattagccgg

SEQ ID NO: 12591 - DNA, 165 bp, Homo sapiens
  chr19:53496621-53496786
  hyper
gaaggaagaatggtagaaatttccaggtatgtggggaccccacgtcccctgggacagaagtcccagggacctgcggagcgcagacataacacaacacagagcaaaactcaccgctgcggtgactttcactccacgcgatccgcttcccggtttacgctaaactgg

SEQ ID NO: 12592 - DNA, 228 bp, Homo sapiens
  chr19:53496813-53497041
  hyper
cgggacatggcagggggtgggcggggcctgggcgaggtgggggcggggcgcgaggcggagagaccttcccctatagaaccggcagggggcggggcgcgaggcggagagaccttcccctatagaaccggcagggggcggggcgcgaggcggagagaccttcccctatagaaccggcagagggcggggcgggatctgtgagtctctcagcctcggcgtgtttttgggttt

SEQ ID NO: 12593 - DNA, 426 bp, Homo sapiens
  chr19:53561406-53561832
  hyper
gaggctgggaggcgctcaggacgggaatccacctcgcaggtgaggactttaaaaagcgcggggcgggaggaggggtcaggaaagggttttatgcgggaagaagacgcgaatggcaggggacagggactggtctcagagcgagttttacccacatggcgaggtccgtatttacctcgggtgaagggcgcgatgcggggattttaaggtcagcagagcgggtgtggaaaagcgggacggcgaatcgaaggcttaatctacacctaggcacactcttgctcggcggtgtcaccttcacacaccgcgatccgcttccgggactccaagaaactgcacgtgcgcgcagagcccgggtagcctggggcggagcccggggagaggcggggtctgcagagggaccgcgggggcggggcctgtgcagttgtaagg

SEQ ID NO: 12594 - DNA, 184 bp, Homo sapiens
  chr19:53606517-53606701
  hyper
ctgaggtggagggtgcggtgcggagattttaagtccgtagcgacccccgggcatcgggtgtgcgaatgggggacggcgaggcgcaggttgagtctacacagaggaacactcatacgccatggtgtgatgcttgctccgcacgatccacttccgggtctgtgggcaactgcgcgaaggaaagcga

SEQ ID NO: 12595 - DNA, 181 bp, Homo sapiens
  chr19:53607032-53607213
  hyper
atgcccacagcccagcgcccagagccatctgtagtgtcttgtggaacggcgtagatgtttcaaacggtttcaagttaaaagcacagttgtgtaggttattttggaaaccaaactgctttcctcttagaatggaggcggtttatgttgaaagcattttttgctagcgcgtttacccagtaat

SEQ ID NO: 12596 - DNA, 189 bp, Homo sapiens
  chr19:53635574-53635763
  hyper
ggcaggcaagaacatcgggtgtcacaggacaggccctgagcacctccccagcgcgggctcaggggaggcctggggagcagcggggcccggcacgaggaggagggaggtggggcgcgacagcgccttcagacaggggtggggtctgcaggatcccaggaccaggcagaggacgcaaggctccccgggact

SEQ ID NO: 12597 - DNA, 466 bp, Homo sapiens
  chr19:53635784-53636250
  hyper
cgctccaggggccgacgagggcaaggctgggaggcacccaggacgggaatacacctcttgggtgaagactttaaaaagcccggggatgggggagggggtcaggaaaaggttttaagcgggaggaagaagcaaaaggccggggacggggagcagcctcaaagcgacttcaacccaaagggaagcgactccggacccacactgcgaggcctgtattcacctggggtggagtgtacggggattttaagggccgtatcgaccctggacatcggctgtggaaatgggaaacagggagcgcaggtttaatctacacagagggtcactcacgctcgacgccgtcaccttcacccaacgcgatccgtttccgggcctgtaggaaactgcgcatgcgcggagagaagagcccgggcagcctgaaggaatggctggagtgggcggggtctgcgccgctttaaggtaaaaaaatcag

SEQ ID NO: 12598 - DNA, 367 bp, Homo sapiens
  chr19:53661520-53661887
  hyper
gtggcggggcgacggcgccttagaagaggggtggggtctgcaggatgccaggaccaggcagaggacgcggcctcgccggtaccggggctgaggagctgcgctccaggggccgacgagggcgaggctgggaggcacccagggcgggaatccacctcgcgggcgaggactttaaaaagcccggggcgggaggaggggtcaggaaagggttttaagcgggaggaagacgcgaaaggccggggacagggagaagcctcagagctacttcaacccaaagagaagcgactccgaacccacaccgcgagtcagctggggtggagggcgcggtgcggggatcttaaggtctgtagctgccgggcgcagtggctca

SEQ ID NO: 12599 - DNA, 334 bp, Homo sapiens
  chr19:53662186-53662520
  hyper
tagcgagcccgggaactggctgcggaaacggggcacggcggttcgcaagtttaatccatactgagggacactcacgctcggcggcgtcacccgcacccaacacgatccgcttccggaactgcagaaaactgcgcgtgcgcggaaaagagcccgggcactctgggggcggggcctggggagaggcggggtctgcggacgaaacgctggggcggagctggggcggggtctgcgcttccctcagcctgcctagcccgcagtctcatttttcccggtttagaaacgctggagtgttcactatgtccccgggagcaccgttccaatttgaagcagtttt

SEQ ID NO: 12600 - DNA, 635 bp, Homo sapiens
  chr19:53696029-53696664
  hyper
cgggcacctccccaacgcgggctcaggggaaacggtgactgcgaaggggaggcctagggagcagcagggcccggcacgaggaggagggaggtggggggcgacggcgccttaggagaggggtggggtatgcaggatcccaggaccaggcagaggcgcggcctccccgggactggggctgcggcgctaacgctccagtagctgactagggcgaggttaggggacggtaaaatcctgcacccacttcgcagatgaggacttcacagggcgcaggtcagtaaagggttttaagcaggaaacggcgcaggaaaggaggtgtctgcatggtctgaaggccgaaagaccgcgggcaggaccagcctgtgtgattttaacccaaagcgatgcgacccccagagtctcgcggcaaagtctgaatttacatggaatggagggagccgtgcggggactttaagggctatacgaacccccggacatcgggtacggaggagcaggggactccgaaacgcaggtttaatctagatagagggaaactcacgcggcgactaacagccttcactccaagagatctgcttccgggtttgcaagaaactgcccgcgcagtaggcaaaggggcgggttgcggtggggaaaggcca

SEQ ID NO: 12601 - DNA, 30 bp, Homo sapiens
  chr19:53700095-53700125
  hyper
ccaggtggctggaaacgcaggctcccaccc

SEQ ID NO: 12602 - DNA, 324 bp, Homo sapiens
  chr19:53700372-53700696
  hyper
ggggagtgaaggctgcgccgccgagcctgagtttcgctctctctagattaaatctgcgcttcgcagtcccccttcttccatcccccgggtctggaggggtccctacagatcttaaaatgaccacaccgcgccctccaccccaggtaaattctgacgttgctgtgagaatgcggagatcgctttccctttgggttaaagtcgctctaagcctacttcctgaatctggtctttctgctttgcgctaggtaaacatggcctttcgtgtcttttgctgcctaaaatcctttaccgatttttcttcccgccacgcgggagggcactttt

SEQ ID NO: 12603 - DNA, 259 bp, Homo sapiens
  chr19:53757919-53758178
  hyper
tagaccctctcggagcgacgggactgggaacgtcttagggccacgccgcgagaggaatgagcaggttcggggttttaacctacagggcgaccccaaaacccgacagcggagcgtgggaacctgtggcccgcgaggcgcaggcttgaacccgaaagacggagactcacccgagagcgccagtagccccgcgagatccgcttccgggtcggcaggaacctgcgcgtacgcgagtgcactggggcggcgcaaggggcaaggg

SEQ ID NO: 12604 - DNA, 557 bp, Homo sapiens
  chr19:53970482-53971039
  hyper
ggctcctgcccccgcgcgcgcatccctcccaccccggcgccccatccagcaggtggtcacctcactcctccctggcctgagcactccgtcccgcatccatggcggtggctttagggaaatctctgaagttgagcacggggtggacttgccctcctgagtgaatggagaatagaaagggggaggatttctattttgttttgtgggccgtcagcatgaaatcgtaccttccgcccaggcagggctttgcatttcacattctagtttgcatccccgttccagacaattccagggcttttgaatagtgcctcaaccttactggccggtctcgactccaaaaccctaaaacaggcgctggagcgagggtgacggactcacaggtcccaccccggccccgccctctgcgccttccaaagggcaaagtctctccgcctctcgccccgcccctgcttcgtcaggccccgcccacctcccaggtcccgcccaggcctggcttctgtcctgcgcgcagattcgcgaaaacccggaagcggatcgcgtggagtgacggtcccacggca

SEQ ID NO: 12605 - DNA, 286 bp, Homo sapiens
  chr19:53971109-53971395
  hyper
cgtggggtccccacaaacctggaaattctcagccgtcttccttcacccagagcaaattgagacgaccccgtgagagtccgggggtcgcttccttttgtgtttaaggtcgccctgaggctggtcccgtcccgggtctttctgctatagggcaatgtatacactttctatcgcgcatttttcctgctctaaacctttctctgactcctcccaccccgcgctttttgaagtcctcacccaaggggtggattctcgcccacttcggccggtggagcgcagaaccgcggcc

SEQ ID NO: 12606 - DNA, 30 bp, Homo sapiens
  chr19:54024167-54024197
  hyper
cacggctccatttgcgccgtgtagagttgc

SEQ ID NO: 12607 - DNA, 215 bp, Homo sapiens
  chr19:54024634-54024849
  hyper
tggtggggccccgccgtggcccagtgactgagataattgtcttcgtctgtggggtaatgcgaacaagccccgttcccctaagccgtgatgcatgcggggttgacgcggccgggctctgtccccataaactgtgacacaggtgtgtgtagacgtctatgagggccatagcgccgggctgtaagggcatctgtaggggtgacgcagccgggctgtgt

SEQ ID NO: 12608 - DNA, 31 bp, Homo sapiens
  chr19:54206967-54206998
  hyper
atttagtgtaatcaatcgaaatcatttcctt

SEQ ID NO: 12609 - DNA, 30 bp, Homo sapiens
  chr19:54372591-54372621
  hyper
ggcagccccggaggcgggcgggggtccggg

SEQ ID NO: 12610 - DNA, 30 bp, Homo sapiens
  chr19:54373028-54373058
  hyper
agtgtggcttaatccgtctccaccaccaga

SEQ ID NO: 12611 - DNA, 30 bp, Homo sapiens
  chr19:54382650-54382680
  hyper
gagtccctcccaggcgccgccgcagcgtcc

SEQ ID NO: 12612 - DNA, 30 bp, Homo sapiens
  chr19:54401930-54401960
  hyper
gttctggacatctgcgttgggattctgagt

SEQ ID NO: 12613 - DNA, 30 bp, Homo sapiens
  chr19:54411653-54411683
  hyper
tgcggacccgggcacgtcttcttccctgca

SEQ ID NO: 12614 - DNA, 31 bp, Homo sapiens
  chr19:54415929-54415960
  hyper
gtcagatctgagatttcgatttgggagtcag

SEQ ID NO: 12615 - DNA, 30 bp, Homo sapiens
  chr19:54461000-54461030
  hyper
atttttacgaggatcgggtcttgagtaaac

SEQ ID NO: 12616 - DNA, 319 bp, Homo sapiens
  chr19:54465292-54465611
  hyper
cggaggttactcccacggaagtggtgctactcgggcttcttaagttgtggagacgctcagggaaaagttgggctgacagggaagggttctagcgggtggagaggtggggcttgcaggggaagagtggggagagctggtgggcgccgcatggtgatggggcgggggtcgctaaggaaggaagaacgcgacgggggctcctggggaggaggcggcggcgtggggcttggcatcatggcggggggtggcttcccatgcgatgaggatcgtggagccccctggggcggaggcggcgcgggctaggggcgagggctgtgagtgt

SEQ ID NO: 12617 - DNA, 189 bp, Homo sapiens
  chr19:54483018-54483207
  hyper
tgtcgggaggcgccgcgagatggggggccgggaagggggcgcaggcggccgcgtctgaccgccctcgctctccctccttttcctttccttcctcccccgcaggagttgtccgggcctccagcatcttccccatccttagcgccatcctgctgctgctcgggggtgtgtgcgtggcggcctcccgcgtct

SEQ ID NO: 12618 - DNA, 30 bp, Homo sapiens
  chr19:54483517-54483547
  hyper
tctggcgcgtaagacgccgggcgcttagga

SEQ ID NO: 12619 - DNA, 263 bp, Homo sapiens
  chr19:54485383-54485646
  hyper
gagccgggcccgaagcgggacgaggagaagaaaaaccactactcgtacggctggtccttctacttcggcgggctgtcgttcatcctggccgaggtgataggcgtgctggccgtcaacatctacatcgagcgcagccgcgaggcgcactgccagtctcgctcggacctgctcaaggccggcgggggcgcgggcggcagtggcgggagcggcccctcggccatcctccgtctgcccagttaccgcttccgctaccgccgccgctc

SEQ ID NO: 12620 - DNA, 324 bp, Homo sapiens
  chr19:54485672-54485996
  hyper
cgtcgccgtcgcgggacgcgtctcccggcggccccgggggcccgggctttgcctccacggacatctccatgtacacgctcagccgcgacccctccaagggcagcgtggccgcggggctggcgggggccggcggcggcggcggcggcgccgtgggggcgttcggcggcgcggccgggggcgccgggggcggcggcggaggcggcggcggggcgggtgccgagcgggaccgcgggggggcgtccggcttcctcacgctgcacaacgccttccccaaggaggcgggcggcggcgtcacggtcacggtcaccgggccgcccgccccgc

SEQ ID NO: 12621 - DNA, 55 bp, Homo sapiens
  chr19:54486106-54486161
  hyper
cgcggcgggggagccgaggggcgtgtccggggcgcgtgcgcgggcgcgcgtgcat

SEQ ID NO: 12622 - DNA, 85 bp, Homo sapiens
  chr19:55597978-55598063
  hyper
gtcccattctggggacgctggagcgcccccccgccccgccctctggccccaggacccctcgccctgagcccgcactccctacctc

SEQ ID NO: 12623 - DNA, 6 bp, Homo sapiens
  chr19:55598488-55598494
  hyper
cggcca

SEQ ID NO: 12624 - DNA, 696 bp, Homo sapiens
  chr19:55690479-55691175
  hyper
gtcctttgagccccacgcacaacaaagaactccaactcccatgaggcctttgcgcgaacagccgcgcagaaaccggacagccaccgcgagtcatgctgggagttgtagtatcagcctccccgcacttgagagggggtgtccaggacctagttccatcctaaagggataccctcttcctccacggccccacaggcatcccgctgacttctgcctcgtcctcgcccctccgcagggtctgaaccggaagcgggcgaaggcagacgtgggaaccagcagaccgcgttgcccagagcaacagccgggctcctctcaagcggggtgagagcaaagctggttgcccgggcaacgggttgttgccaggacaacgggcggggctgacgcacagacgcggagtcccggcggggcaggctcgctccggggcccaccggtgcctgggaaccccccaatagcccgactgggatcctgaggtcccgcgaggtggggagcgggcagcctgtggtccgagcgcccacagccgactgctccctccgcacctggtcctgggagctgagacgcaggttccctcttccctctccccaattttgctggagggcgggtcgggggctgcccggtgcctgtgctgagccccctcatccttcttggcctgttggtctctccacgcatccgtgctgctctcgtgaccgcctcggtctccac

SEQ ID NO: 12625 - DNA, 30 bp, Homo sapiens
  chr19:55691715-55691745
  hyper
ggaaagccctgccccgcccctcctcccgcc

SEQ ID NO: 12626 - DNA, 417 bp, Homo sapiens
  chr19:55728162-55728579
  hyper
atcgtggaggatgccacgcacagacgtgaatagaaagagcctggaccgtgtcctgaggtcagcgactgaggtcctgggtggggccagccaggacctgcccgggggctactgccctctgaatcaatacctccagggaccctacgttgacacccatggcctcccactctccacccctcagtcctgcgtgcggcacgtagtgctcactgggcgtctgtgtagggggttgaaggctgaggctggaacaagggcgtggcggtcgcaggctccagggcacgacggtccttcctcttccccttctcagccacatctggggctccgtccctgcagccaaggctccctggcgctgtccttggtgctgacgcggttctggaagtgcggtgccagggtggctggtgcggctcccgatggaaaagcccc

SEQ ID NO: 12627 - DNA, 22 bp, Homo sapiens
  chr19:55764189-55764211
  hyper
gccactgcgcctggctgtacac

SEQ ID NO: 12628 - DNA, 30 bp, Homo sapiens
  chr19:55866330-55866360
  hyper
cccccgcccccccccgccccccaatatata

SEQ ID NO: 12629 - DNA, 41 bp, Homo sapiens
  chr19:55962683-55962724
  hyper
tgcgttcaagaggaggcgggcccgggcgggtggggaaagcc

SEQ ID NO: 12630 - DNA, 51 bp, Homo sapiens
  chr19:56098516-56098567
  hyper
ttgcaacggttgagatcgtcctcagggtaaaattcccgctcctgtcctctc

SEQ ID NO: 12631 - DNA, 103 bp, Homo sapiens
  chr19:56111237-56111340
  hyper
aaaaaaaaagaaagcgaagtgcgccaactgcaatacagagctggaaaagaccggcaccatcttatccacttagcactccatgggcttcgaagcctgtccggtg

SEQ ID NO: 12632 - DNA, 30 bp, Homo sapiens
  chr19:56652051-56652081
  hyper
gacaaaaaaaaatgcgatccgtagtcaagg

SEQ ID NO: 12633 - DNA, 35 bp, Homo sapiens
  chr19:56728567-56728602
  hyper
ggttccttggctctttttgcccgtatgccgaagag

SEQ ID NO: 12634 - DNA, 130 bp, Homo sapiens
  chr19:56728658-56728788
  hyper
cgatgatgactccagctttctccttctaggcattccggttgggcatgaccggtcctgtcagccgagcggccagtttcagttcttcagcagaactgtctcccttctcggaggccgagggcttcccggggaa

SEQ ID NO: 12635 - DNA, 31 bp, Homo sapiens
  chr19:56809209-56809240
  hyper
tgataggactgagggccggaaaaccagaaaa

SEQ ID NO: 12636 - DNA, 541 bp, Homo sapiens
  chr19:56879474-56880015
  hyper
cgcccccacggccgaactcacgcctacgtactcagtcaccagcggaaccctctccaccaggctccgcgtcgaggccctacggggcgtcaatacgcacgcgtactttgtgtcccaggtagctcgtctcttagccatgtacgcctctgcattccggtcactgggagcggggccgtgggggctgcacatgcgcactgcgagtcctcgcctactcccagaaaccacccgggcgcatacgcggtgcggccgctgcttcaggtcggcgggctccagggagacctgggtgggcagcgtcgccgtttctcctttcttgggcagtatttttcccagcgccacgcggaggctgggccattatgaggtttgtgttgcgtcggggcggtccgtctcagaggcgctccggggaggagtgggcggctgaatggccagaggcccagggatccgttcaggtcagcgctggcgtccgggcctgagtttggaggtggcgggtgccttacaagaatgctcgcgtgatcagtgtgttggcgtttgtgtacacagaggacat

SEQ ID NO: 12637 - DNA, 167 bp, Homo sapiens
  chr19:56904536-56904703
  hyper
tgaatgcaaaacatccgcaatttcagggggtcggagacccctgcgcacccacctaaggggtccatgcacctgggctatgaggctggaagcagaaagggggcgccagaaagcgcacgccgcgagggccggcgggaaatgtagtctcacgccggtaaagccacagagcg

SEQ ID NO: 12638 - DNA, 577 bp, Homo sapiens
  chr19:56904723-56905300
  hyper
cgttcttctcaggcctgagacccaaccggcccgggcaccagctcctgctggaccccagagcgcctggaaagctccggaacctctcacctgccgcctcctcgggtccaagtgccaccgcggccgcgcccccggcagcccagggcgcgcttccaccacggtaccggtggattcgccgtgcgcagccggaagatggcgcagacgcacaaagcacaccgatgctgcgccatgatagggccggcgccgcagtgtcttccgggaaacatagtctttaggcgtaaaggcagcagcccggccttgaagccggatctcgcgatgtttcagggtgagccggacgcaggcgtgcctgcgcagtgcgcggaggagtgctgttcgtgtgttcgagtccctgggttgcttcctggggtctgtggtgctgggtgtgctatctgcgtgtgattctctagcgagagattgtgggcgagtgaccgagtgggcaaggggccgtcactgtgtgtgcgtgattttgacagtgtgtggtggtagcttctgactccgcgtgggtcgttgaatgtatgactgggaccgtttagcggtggat

SEQ ID NO: 12639 - DNA, 809 bp, Homo sapiens
  chr19:56915126-56915935
  hyper
ctgctgtgtgcccagggcccacgacagtgcccgatacagcaggcgctcaataagtggcgaatgaaagacagggcaaggcggagagagaagaaacagaaagggaaagagaaagcccgggccgccagagcgcttaatcacacgtacatcctaccgggcccctctccagctggctcaggctccacactggtcctccagctcccttttctcagcgatggactcacagccccacccggagcgctggagcgcggacgcggtcactgcgcgtgcgcctcaccgcgctggcaccccggcctggcagcctttggggacctgaaccagctgcgcctgcgcaggtggaacgggtggaacgggtgggggagcggacagtcgaacggcctgagagggctcagctggtccgggtgggattctgaaggccagcggaggtgggcttactagggaaaggggcgcagcagtaactacccgcaactgagcggcgggatctgcggccgcccggggccctcggccaacatcccagcatcctctgcgccgcgccggccccggactccatttcccagcggcccctgcggcctgccctagggctgcggcgcctttgtgagcgcggccgccggccaggatcgagccctggcccgggccctggcccagccccggcctccaaggaccgcgccgaaggaggtgcccactggagggaggaggcggtgaggagcgcgggatggagctgacgccgggagcggccatgccaccatgtgtgggaccgtgtgtgacagtgtgtgagaatgtgtgagacattaaggaaccgtgtgtgacaatgt

SEQ ID NO: 12640 - DNA, 43 bp, Homo sapiens
  chr19:56987611-56987654
  hyper
aggggacacaaccatacttagcgtcagtggagggctctgtcct

SEQ ID NO: 12641 - DNA, 172 bp, Homo sapiens
  chr19:56988111-56988283
  hyper
gcacagtcacacactcataaccgcaaagccactgacgctaagtggcagacagacgcccaggcaagtcacacagtaacccaaggctacaataaacgcccacatcagcctgacactgacacacgcacacactccagaaacacaaatcttcacagtcagcgtcacacacccactc

SEQ ID NO: 12642 - DNA, 122 bp, Homo sapiens
  chr19:56988383-56988505
  hyper
cgcctcacacgcggcgccaacttcacacttgggcgcacaagccccgagaaccacagcagcgaagggcgcaaaccccacgccgtggcgggccgagaacccacgcaggcgcgagcccaccgccc

SEQ ID NO: 12643 - DNA, 137 bp, Homo sapiens
  chr19:56988963-56989100
  hyper
ggtctcctaggggactggcgcctggccctgcttttcatcctctcaggagatcacgtgtggacactgaggcccttcctcgagctctttaaccaaacccaacctccccaattcgccgccttccccgctcccacaaccac

SEQ ID NO: 12644 - DNA, 178 bp, Homo sapiens
  chr19:56989173-56989351
  hyper
cggcctcacccgcggaggcggacaccgcccacccgcgcgtgcgcactacgcagtcatcctgcgacctccagaatccaccggggtgcagcgaggctgtggaaagtcccacccagaacgtgaggtgaagaaggcttgggctgcgctggttctgctctgtccgggtcggagatgaactgac

SEQ ID NO: 12645 - DNA, 124 bp, Homo sapiens
  chr19:56989501-56989625
  hyper
cgcctgcgtagccggcgggctggcagtgagactgactgcgtcggggttgagactgggtggatgaggctcaccccggcggggagaagggacgaggaggggcggacagcggaaggtccgggagtgt

SEQ ID NO: 12646 - DNA, 65 bp, Homo sapiens
  chr19:56989696-56989761
  hyper
cgtcccggtcatctgggcgtgcgggtcccgggttttgatcgcgcgtttgtgtaggtgagacccac

SEQ ID NO: 12647 - DNA, 104 bp, Homo sapiens
  chr19:57049680-57049784
  hyper
ggcagtgacgctcccgcaaggagctgacgcccaggcccttagcacctgtcacagccaagcacccttttactccggccctgcggtcccacccctcgccgcaagcc

SEQ ID NO: 12648 - DNA, 179 bp, Homo sapiens
  chr19:57049807-57049986
  hyper
cgcctgcgcgactcccagaagcctttggggggtgggtgtgtagtcagagcggcctctgcttccggccacacccaggcccagcgttggccaccacttatgcggcggctgcggtccagggacaagtgagagcgacccgcagagggcaggacggacgggcgttgcataggcccggggccaaa

SEQ ID NO: 12649 - DNA, 862 bp, Homo sapiens
  chr19:57078350-57079212
  hyper
tcctcacttttctatcgcgtaggccccgcccgcgccccaagccccgccctgtcatggttttcctctccagagggtagccgctacgccttaccgactgcgtttcagtgctgtcccactgctcctgcacaccccacgcctgcgaccctacccaccacggacaggcgctcctgcgagctggaagccagttctctgcgtcctgagcctggcagctgcatctgaacactcggagcctggcgatggcttccagaaacccctgcgccgtgggtcgcttcagtgaaggggcctgtacttcggcgacccagactccgggctgagaggcctcctaatccaaccaggaggaccaggagaggcccaaaaggggacacagggcagtgaccgccaggcttggagaggagccgctcctggcaaagccagcgccctatttctgaacgccgcctccgttccggactacacttcccaggggctattgcagcggaggacacgcccacttccggaaaggacccaaagccgggcgagtgcacgtcccgccggttgctgaggagaagggaggtctgggcggggcagcggccgaggctggactggggcgcggcgggggcggtgtcctggttcctgtgtgggcggcgggcgtgagcgtgcgcgtgtggcctggtggctgtgagtgcccatacgtggtgagcgtgcggtgctgtgctgaggaggggcgagcgcgcgcggggatggcggcccggtgtgtgactgtccggtgcgtggccgcgaatctgcgcctgcgtgcatggcccggcggcgtgcggaaggcggtgtgtgttggaatgagtgaagcactttaagtggccaagagcaggaaacccggccggaggaggct

SEQ ID NO: 12650 - DNA, 30 bp, Homo sapiens
  chr19:57183001-57183031
  hyper
ggtgcagtcggctccgcttctactcagtct

SEQ ID NO: 12651 - DNA, 152 bp, Homo sapiens
  chr19:57610675-57610827
  hyper
tgcacagtcagatcgcaggaacgcggcctagctgcttcagccacgttctcgcggcgccacctggtggccatggaccgccatcgccgctggacgtcagggccgccaggcccagcgagatgtcacctcctctgaggagccttccaggatcgcac

SEQ ID NO: 12652 - DNA, 62 bp, Homo sapiens
  chr19:57610895-57610957
  hyper
cgctgtgtttcctgccgggtcgctaccgccatgatccgcacgtagtggtcaaggctgaggtt

SEQ ID NO: 12653 - DNA, 446 bp, Homo sapiens
  chr19:57683239-57683685
  hyper
cgtctgcccttttaccggcttgggtgcaggcaagggaaatgcgtccccgggccggggggcgcgagcgggggtccggggccgcgagctggggtccggggagcgcgagcgggggtccggggggcgggggccgcgggccgcgaggggggcgggggccgcgagggggcggggcgtgcgagggggcgggggcgtgcgagggggcgggggcgcgcgagggggcggggcgcgcgagggggcggggcgcgcgagggggcggggcgcgcgagggggcggggcgcgcgagggggcggggcgcgcgagggggcggggcgcgcgagggggcggggcgcgcgagggggcggggcgcgcgagggggcggggcgcgccgggctcgtcctctccgcggcgctcagtggcagcagggagggccggtgagatgccagagcaaggtagggtcctgtatttgggga

SEQ ID NO: 12654 - DNA, 101 bp, Homo sapiens
  chr19:57683805-57683906
  hyper
cggttgatgtcaggcagtgctgggaggcgttgctctccgggttcgcttctctcctgttgtcctaactctgcatctctcccgggtgaatcacagagctgtaa

SEQ ID NO: 12655 - DNA, 490 bp, Homo sapiens
  chr19:57702751-57703241
  hyper
aaggctgtgcattatgcgtacggcgggagctgggccaacgacggcctaggacggggacgtttccgacggctcacgccggtgggggcgggacttccgggttgctcgctgcggacgccattttcttctgcacttctgtctggagaggtctgtagccactgagggccccggtcggggccgctttgcaggtccctagtcaggaccgagcaggggagtaggataggaatccccgccgcacctttgtacgagcctgaccccttccgtgggtttgttcctgggtcgccgtcaagctgcggtctctcctcccccgcccttcagccccgcggtctccaggggcggcgccctgggtctggaacgcggttgccaccgaggaggcggcggccctgcgtctggaacgccgttgccaccgaggaggcggcggccccgagcgcgcctggaagccccgggcaaccggccagggtcgggcacaggtggggtccgtcaggccgcccgg

SEQ ID NO: 12656 - DNA, 178 bp, Homo sapiens
  chr19:57791724-57791902
  hyper
ccttgcgtcggccgcggactctgggccattgacgacccaggacaggagagttttctgcgggccagggcggcggaggcgggacttccgcttcttcgtgtgacgtcatctccgtgggccggtttggccctgaaacagtgtggggcctagagcgctgggtgggcgcgttctgcggcctgag

SEQ ID NO: 12657 - DNA, 459 bp, Homo sapiens
  chr19:57831527-57831986
  hyper
agcccatgatctcaatcggggcgaatatccccgcctcctgacctcaattttcctaagctagaaaggacctttcgaccctccgacttgtgcccatagtaaagcggcggccctaagacgacgcgggggtccttgtgcgcacttaaatggagtcggctgcgcttggtgagttcccacacccggtagatgtgagggaaaaactgccttactcagaaggcaccaccccttgcgtcggccgcggactctaggccaatgacgggccaggacacgggcgatttctgcgggccagggcggcggaggtgggacttccgcttcgtcgcgtgacgtcatctccgtgagcaggattggccctggaacagtgtggggcctggaccgctgggtaggcgcgtccagcggcctgagcaggggagggtaatgaggctgttacgcgccttctccgcatcttggcgggagcctgacgcc

SEQ ID NO: 12658 - DNA, 329 bp, Homo sapiens
  chr19:57832024-57832353
  hyper
cgaggcctaggcctccgcagccgccctccgtctcctcagccccgacgctgcgcccgctttgtgcgcatttttctctggggaaactgaggctccgagtgcgaaagtcagccgaggtcgccccgcccaggacagagaagggctgggggtcggctgagccgcggcattcccgggccccgctagggctgcagggtctcaggatggcagcctcggcgcaggtgagtggacgaggttttggccttgctgctgctctgctacttctggaggcctcgtgggcaggcagaagccaagacagccacaggatgtttctttgtcgccgtcgtttatttaag

SEQ ID NO: 12659 - DNA, 577 bp, Homo sapiens
  chr19:57862380-57862957
  hyper
tttaaaagcagctgtggcctccgagatatcgttttcccagtcttttctccccctccctgcacgacgcctcttggcagacatccgggagaacccgaaaggcgctcgttgcctggttggatgcagggtacaaactacgttacccagaaatctgtgcccagctcattgttagccggcgtgcagccaatgacagcccagaaactgggcgtttcctgctgctctgggctgcaggggcgagacttctggcgtcgccgtcgtgacgtatttttcctatgcccggtccgtgcattctggttgtgaaggctgagttctagagatcgggtcggctttctacgcggctctcgtggaacctagcaaagaaagacagtgaagactgcaggaccttccttcgcgcttttgttacaatccatgacccctgtcgtgggacgggcggcctctcgcggaggtgtctgccggggctgggctcttaccgaggcctccacacacgtcctcttgtccttgtctcccccagaagcagccgccttagtcttgtgagcgtttttacaccgggtagattgagacttggagtgctacactcagc

SEQ ID NO: 12660 - DNA, 35 bp, Homo sapiens
  chr19:57863221-57863256
  hyper
cgcaggggcagttcgtacaaatgcatgcatggaga

SEQ ID NO: 12661 - DNA, 555 bp, Homo sapiens
  chr19:57874396-57874951
  hyper
tagtgtgtccctttggcggtgtagccgttgagaacttgctgtgcttcacaatccgatatcataggtccctcacatttctgtgagtatcctagaccttacttcaagaaaatctggttatgtcgcctttaagagcaacccaagccccgtcctgtccgtggagtccggcactctgtttaccagctcccctgacggtgccactgagcctctatccgccatataaggactgaccaacgctctaaggcaagtccagaagcggtgtcgaaacttcataacccagaagacactgcggttctcggcagcgcgactgacccaatgaatgtgcaggaaggaacctttgcgtgcgtgcgtgcgtgcgtgcgtccgtcctcgtgctcgcgcatcgtaggagggcgggacttccggcgtcctcttgccgtggttgatttgattttctctggtgttttcactagttccggcctttggcgctctatgacgtcaccgaagtgacggagcggaaaagcgcgagaagcggcttggttccttgtacgcagaggcggtagtgacacaggcacaact

SEQ ID NO: 12662 - DNA, 31 bp, Homo sapiens
  chr19:57875153-57875184
  hyper
gtcaggccccttgtctcgaagagaggggcgt

SEQ ID NO: 12663 - DNA, 31 bp, Homo sapiens
  chr19:57901091-57901122
  hyper
cgctctaagacaagtccggaagcggtgtcga

SEQ ID NO: 12664 - DNA, 84 bp, Homo sapiens
  chr19:57901384-57901468
  hyper
gcgctggggacagtggcgtccttgtcttgcctttgtcgctcccgccccgctcttccctggctgggctggcggaggccttgctga

SEQ ID NO: 12665 - DNA, 425 bp, Homo sapiens
  chr19:57998946-57999371
  hyper
atcatctccaatctccatctccgaagttatgcccacttcctggaagtttggaggcacgggaactacattgcccaaaaggcgcagcgccgcgaggcggcgatccctgaccaatgaaaagaggtctgcccgagcgtgcgacacgcaatgggcgggacttccggcgtctcgtttggtattcactttcgcgactcaggtgaactaacctgcgagaagctggttgtgcgctgaggcgaccagcgccggaaggcacggtggcgactcacgctgttctcgccgctcagaggcgggtctgaggctcggtggcggcgcccagggtggcccgggccctttcctcggtcattgtctcccctccagctctactcacaggctccgatggcggcggccgccctgagggaccccgctcaggtgagcgccgcgtcctcctg

SEQ ID NO: 12666 - DNA, 432 bp, Homo sapiens
  chr19:58011064-58011496
  hyper
atctccatctccatcatctaccgtctccaatctccatctccgaagttatgcccacttcctcgaagtttggagccacgcgaactacactgcccagaaggcgccgcgccgtgagccgcgatgcttggccaatgaaaagaggtctacccgagagtgcgacgcgcaatgggcgggacttccggcgtctcccctcggcggttgctttcgctgccctcaagagaactcagcttgccggaagctggttgttcgctgcggcgaccagctccggaaagcgcggtggggacgcgctgtgttctcgcagctcagaggcgggtctgaggctcggtggcggcgcccagggtggcccgggccctttcctcggtcgttgtctcaccgccacaggctccgatggcggcggccacgctgagggaccccgctcaggtgagcgccgcgtcc

SEQ ID NO: 12667 - DNA, 12 bp, Homo sapiens
  chr19:58038572-58038584
  hyper
cgcggcggactg

SEQ ID NO: 12668 - DNA, 369 bp, Homo sapiens
  chr19:58038923-58039292
  hyper
cgccccgcctaaagtcccatggccgaggcagcgctagtgattacgccgcaggtgagagcggagtcctcggatcctcacctgggtcctgaggccccggactggggtcacctgcgtgggtctctgcagttcaggcctcttctccaggacagcgaggagttctgggtggggtcctcagagctgacgggcggtgaggtgaagaagggagagcgttgcgtaccgtgggggctgcacgcgcagagcctgggaggtgcgccggggtcgcgagcattcggaaacttgggggcggacctgtgtctgcagggagcagagagaatgaggagaagaaggcacggctgccatggcagcctgagcaaccggggtttttaattc

SEQ ID NO: 12669 - DNA, 814 bp, Homo sapiens
  chr19:58070514-58071328
  hyper
cacaggcccagggagcagctccggaaacaacatcctgagcgacgtccccggaccgtgctgtgcactgagacggacacacacacatcacccagggagccgttcaagcttcctcaaccccgggggggggaagagtaaatatttctactttgcgcgcgcaaaaatgaaggacgaggacagtaacgggacttgttcaaggtcgcaggcccgagaaaggacatggttggaagagccacgaggaggactgcggtcgctcctctcacctgtgaggggttccgggaccctaaaagccctatttcataccacaacgccgcgcaccccagaaacggggacgctccccacgccaccgcgggcctgcattccggacccgggaccgcgcgacccccttctaggcctctaagaagcaacggcagggactgcactgaggacgaccctgaaacgccgtccttccgctcgtcgggcccgggacactgaggccgggtggccgcggggagccgagccagtctgctcacctgcgctgcgtccttcgtctccgccatccgaccgttggcaggacgaggccgcgtggggcagctcccacgggctcaaaaccctaccccgggtcctacaacggtgcggaggtgagccccagtcgccctaccatccttcccagcacagttctgagagcgcggaccaacacgccccaccacaaacgtccacgccagcgaggccggaagtcccgcccctgtgtcgcggtcgcctgccacgccttttcctgcgccggcccactgccttctaggtaatgtagtcttgtcccgtaagaggccaggcttggctc

SEQ ID NO: 12670 - DNA, 860 bp, Homo sapiens
  chr19:58094924-58095784
  hyper
cgcctcccgcctctgggtacagtcaaagggctcaggtcagagcaggagcagccgggggcgcggcccccacgtggcctcccgggacacgtgcccacagcgcgacacctaagtcgctcctttcacagaatagccttggccccggcacggcctcgaacgccttgaccccgcaagggaggggcacgaggctcctttgctcccgcaggagcgtcgaatacgtatggaatacgcgtcggtgtggatctggcctcagcttcctgagcctgaatcaatgcttctaatcacgtgggcgctcagccgcgacgggaccacagaaatcgaccagcggcctgtttaaggagcgacaaggcccagccctctcctgcattgtggcgacgccatttccctgcgcccccagcgcggccgcttggcttttgtttgaggtgacgctgggcggcagcatccttccctcagccctggggaccagcggggactacagaacccagaaggttttgtctccagccgcagggatgctgagccaatccgcgctgagaaaagggtcgtttccgctttgggaccaatgggtcggggagggacttccggtatcacttcagtggcggtcatttttgcagcgcttgggtgcatccagaccgtcagagctttgggagcgctttgtttggcgacagtcggaaggcgcgaggggaggggtcctcccgctgaacagtgggggttctaagggtcggcggcggcggggttgacggctttgcctaggtccctccgcccgtagctgtcgggtcccggccccgctctgcccacagactccgatggctgcggccgcgctgagggccccgactcaggtgagcgctgcctctactgggcctcac

SEQ ID NO: 12671 - DNA, 718 bp, Homo sapiens
  chr19:58111072-58111790
  hyper
ctccacctttctccatagcaacggggtcattcctccctgaggtccaggagaagggcgacctctgccagcccaagaagcggtgagaactacattacccagaggcccgtgagccaggttcttggcgtggagccaatgaggctcaggggagggacatttccgctctgtccaacttgtcggagcggaacttccggcgtcctccctgtggcgggcactttggcttgtgtcagttccatccgcgggtgccggatctggacctaggtgctgacagcgagaaggcgcgaggagagtcgttttctcagctgcacagccggggcctgacggtcgccggcggtggtgacagctttgctcttgtctccgcccggatcgtccaccgctcccggcccgctccgcccagagtccgatggcggcggcactgagggccccgacccaggtgagcgctgcgtcctcccggcctcctctgccctccccacccgaaactgagggacgcgtgaagggttttctgcagcccggaccgcactgtccggcacagtgaggcgctggtgctggatctcgtttctggtagtgtggcagggagcgggagagcgacacggtcagggggctgcgcgggcaacagcttggagctgcgcctgagccgggaggctggggagacccaggccggcctcacgcgtgcaggtagcagagggtggggcagcgccgcgctgcattggccccactgagt

SEQ ID NO: 12672 - DNA, 729 bp, Homo sapiens
  chr19:58125364-58126093
  hyper
ttgagggtcctttaaaaggagcgaagccacgccctgacctcagagtctcagggcataatttctcagcgcccctcgcagtaccatttggcctttgcccagcgtgcaggggagttagccgtcaccacggccaagtgcacatgagaactgcattgcccagaaacctgtgcgccgcccggcggcggcactcttaggggcgtctccctgcggacggaagctctctgggcgggacttccggtatcttcctcgcggtggacatcttgtcggctcttaggtggaaccatcggagcagaagctcggggttgctgggcggttccgaggtgacggaagcgggagggtgcgggagaagtcgctgttcgctctgcggagtggctcgccagcgaagaccccgcctgcgcccccggggacggacgaccgcggtgccagggtcccgcgacctgggaccccctcgcggctccgggtggtctacgaactgtgatggcggcggccgcggtgatgggcccggcgcaggtgggtgctgcctttcccagactttcgcccgccccaaatcctgaagttccaaatgaggagcgcctgtctgagtccctgcagcgcaggccccagtgtccaaggcagcggggcgctggtgggtgggggcgagtgtgactggcagaggggcagcctgagcataggtttggagctggactgagcccgtagcagtcgggagcgtgtgtgaaccgtagtcaggcctgc

SEQ ID NO: 12673 - DNA, 750 bp, Homo sapiens
  chr19:58144269-58145019
  hyper
acgtgtaaatggacccgcacagctcaaacctgtgttgttcaagtgtcaacctacttaagacctcaaacaccgaagcccctcagtcgccctggaaggcagcagacgcagcttcctagcgctcccagctgtctgcacacaaggcgccctccgtcgcagcctgggggagactacattacccagaaagccttgcgtcgagcggcagtactttgatccaatgaaaatccaagacaggggcatttccgtgtgggtctacccccgccccccccagggcgggacttgtggcgtcttcgcagcggtcattttggctgccctcccggaggtccgttctgtctgtcagccgctttggtacgctgcatcgggatcgaagtgacggaccgtgaaggcgcgagagtcaggtctgagggtcgggggcagagccgcccgcgaggccggcctggggatagcgatgctcgggttccccccgggtcgcccgcagctcccggtccagctccgcccacagactcggatggcgaccgcactgagggacccggcttcggtgagcgctgcgatctccgggcctcccccggccgagattcttaagtcccaagtgagaggcaccagctcacgtctctgtagcacagggtcggggacactgaggctcgtgggtggggcccctatttctgacatccgatgtggtgggcagggggacaagggacaggaccggcgcgtgcagggcttggacgggcaaccgagaagggggcattcaggaac

SEQ ID NO: 12674 - DNA, 30 bp, Homo sapiens
  chr19:58176064-58176094
  hyper
aaggttttgggattcgaattcagtggggca

SEQ ID NO: 12675 - DNA, 536 bp, Homo sapiens
  chr19:58193122-58193658
  hyper
acctccttctcccctagaggccgaagtcgccatttccctgcacggggcacagcacctcagaatacaagttcgcagaggtcaaagcagtggacacactccgaagagctccgtggagttttggaaactacattatccagagtgcagagcgcaaaacggcggcggagttgagccaatgacagcccaggatagcaacacttccgcgcacgcgcagcgcgacgggccggaacttccggcgtcctcctcgtggcggtcattttggcctctgtcctgtttgtccagcccgccagtttctgcagtggaggtcgcgactgagggacgggacagagaagtcgcgaaagtgggccagaggttctgcgacaccacctcgggtgagctgcgccaggcccgggatagggactgttgtgttcgaatgcccgccccggtcggccgccgctccccgcctagtccacggagctcaatggcggcagtcgcgctgagggactcggctcaggtgagttgtgcgtcctccgggtctcgcctacctcccccagcagaag

SEQ ID NO: 12676 - DNA, 441 bp, Homo sapiens
  chr19:58219951-58220392
  hyper
aaactaacataaatggcgtccctcctttgttcagaactctccgtggcttctagcatcctcacaatgacagtacaaccctaggagtaactccgcctcatattcttcgttccctgcagaaaacagctttccgaattctcctggctcagtcgcgcctcaacctttgcacgcgccggttcctccgcctgtcacgctctcccacacctcgtcacacgcagtgtcaaaaaaagggccccacccacgaacgcctcagtgtccccgaccctgggcagcggggactcgagcaggcgcccctcactgatggctttagaacgtgggtgggggaaggtgtgtgaggacgggaagacgccgcactcacctgagttggcgtcctcagagtggccgctgccatcagactctgcgggtagagctgggccgggagcgacgggcgacattggtagggac

SEQ ID NO: 12677 - DNA, 110 bp, Homo sapiens
  chr19:58220515-58220625
  hyper
cgctctgctatctctgatccggtgaacacacctcagagaagctaaaatggccgccacgaagaggcccccccaaaagtcccgtcctttctttttgtgactctcaaggaaag

SEQ ID NO: 12678 - DNA, 63 bp, Homo sapiens
  chr19:58220669-58220732
  hyper
gcagagcattctaggtaatgtagttttcatagatcccgaggtgggtgccggggaccctttgca

SEQ ID NO: 12679 - DNA, 413 bp, Homo sapiens
  chr19:58238325-58238738
  hyper
gcagtagcctccttaccggtctcctcgtatccatcctcgcagtccccaccccaaactaatgttctcccctgagcaaatttcgagacacttaaaatcccagctaagatcacgtccttctattcaaaaccctcagttaatctcaacgccctcagaatgaagcgacaacttctcagcctgccattccagtcacagttcctcaaactctgctctgtgttgatgagaaccctgtctcccaaatgtttgggggtcagcagcacccccgagcctttacctgcgccgtcccctccgcccgtaactctcccacacccacccacaccgagataggaccccgccccaagagtgcgtcgctgtcctgggacacaggggctgcaggcactttacgattcggagtcggagaaagggtgactgagggc

SEQ ID NO: 12680 - DNA, 222 bp, Homo sapiens
  chr19:58238987-58239209
  hyper
gctacaaggaggagccggaagtcccgcccacgcaccccccgcaggcactgaaacacccctctcctgggccctcattgggtatgcaacgtataggtttgtgggtagagtgtggttcccactgagctatccttcaaggcaggggattctcggcctgggctcttgggaaaactcgaagtaggagggccaagttgtttgggaaaagtaacccgagtttcaaagggc

SEQ ID NO: 12681 - DNA, 669 bp, Homo sapiens
  chr19:58258067-58258736
  hyper
tacataacccagaaatctctgcgtcgaatgacagcgcgtcagagccaatgagggctcaaaataaaggcgtttccgcggaaacagtataaaggtgggacttccggcgtcctctactagtggccattttgattggtgttgggtgtattttccagtgagagaccgcggagtgttgggtcgtgtagaagtgactgaacccagaaggtggagacgagacgttgtcccgactgcacagaggctgctctgcagctccttaaaggcgctaggcgtgacccgcaccaaggccgggatcgggaccaccgtgcccgggtacctgcactgctcgccccctcctttcgaccccgctttccccacccagtcggatggcggcggccgcgctgaggcccccggctcaggtaattgtggcgtcttccgtgccctcaggtcacctcatctttacctaagtccaaaagcagagaggaagcggcgcctgctcaaggttttacaccctgaacccggcgtcgggacactgaggcgctctctatgggcccccgtttttgacacccgcgggatgcgctcaggagagctacaggcacagggagcggtgcaggcaaaggcctggagatgaactgagccgagaggatcgtaacctagggtccacaggcacctgtcgggagcaaagtgtgaggcaga

SEQ ID NO: 12682 - DNA, 382 bp, Homo sapiens
  chr19:58280875-58281257
  hyper
gaaagccaccttaagcgctgcccatgtctgggaactacattacccagaatccgccctgcgaaatggtaacgtggctgagccaatgaagcttcagagaagccgtgccattgccggggcacgtaaagtcaagccaggacttccggcgtcctagccgtggcagccattttggcctgtcaggtccatccggcgatgctgggtctggacgagctcgggaggagtggttgtggccattgcacacaggcggatctgaggttcggcgacgccgctggtcgcgacccgggacaggacaacgacaggaacaccgccgagcccgcgttccccccccgcccagagtcatggcggcagcagccgctctgagggcgcctgctcaggtgagcgctgc

SEQ ID NO: 12683 - DNA, 30 bp, Homo sapiens
  chr19:58330901-58330931
  hyper
gagttcctgacatgacggtgggcttttcct

SEQ ID NO: 12684 - DNA, 78 bp, Homo sapiens
  chr19:58331142-58331220
  hyper
tggccccggactgctacgtgggactgcggtgaatgaacccagaaggtggagaggaaccgttctcggtgcacagaggcg

SEQ ID NO: 12685 - DNA, 246 bp, Homo sapiens
  chr19:58385531-58385777
  hyper
tcataatgttttttgtcagtgtgaactctctgatgattactgaagctagcatatttgctaaacgatttcccacattctccacattcataaggtcttttcccagtgtgaactctctgatgattactgaagctaacatatttgctaaaggatttcccacattctccacattcataatgttttttttcagtgtgaactctctgatgattactgaagctagcatatttgctaaacgatttcccacattct

SEQ ID NO: 12686 - DNA, 464 bp, Homo sapiens
  chr19:58458426-58458890
  hyper
gggaaaccctccccttcctggcgtagatttcataaccctttacagccaagggaaacgtagaaagagccaggcctcagagaagagcatctatggcggtattagatgggctcaagccaccccgtagccccatgcctggccttggagccgggtgccctcgcaatggctgtgtcacctctgtgccccagggctcagtggcgcctctcatcaggggctccttgccagtcgcgccctcccttccctagcacaccaggtgttggaaacgggagcccctccggcgagcccccgtgtcctgtcctgggcagcagggccgcgagcaagcgccctcgggggtgctaggactagcgtggggagggcggggaaggcccagaggacgcggcacatacctgggccggggccgtcagctcggccgccgccatctgactctgtgagcggagcggggccagagaggatgtccttattccggg

SEQ ID NO: 12687 - DNA, 370 bp, Homo sapiens
  chr19:58458978-58459348
  hyper
cggatgatgctgacccagcgctccggggctttctaccaagtaatcagtccagacaaatgccaaaacgaccgccacaaggaggacaacggaagtcccgccgcgaccgcgcgtgcgcttacggaaacaccacctttcggaggcctcattggctgaaggtcgccgtcgcccaacgcaggccattctgggtaatgttcccacaggcgcacggcgggagagtgagggtcgcctccacctccttccggaagtaaaggccaaacccctgtagggggcgctgggaaatggacactccaggttggggcggaggcgaggcttcgttctttcttaaaggagacgtacccaggtttctaccgattgctgtctgccagtgttt

SEQ ID NO: 12688 - DNA, 437 bp, Homo sapiens
  chr19:58520707-58521144
  hyper
cttccacacccatgctcctctcggcacctttcacccagcccaagcagcggcggcccagtggtggaaaaggtgccacggccaaacggattggagactcaccccgcattctaggccggagaagcgggcgggcttgggatgccggcaggaggcaatgactctccccaggcgctgcatcctggctccggggcacaagcgcctctccgccctgacgctgatgctcgtctggctgcccgttctttggcatcaaaataccagacgatggtggcgcaccctgtggcctgggctgcctcacctcattcggtcccgcctagaaagaccagaggaccagaaaaccagaagcctgtcagagcgactagaggctggctccagccaacagccgcgcgcctcagcgtccacgagggttacctgggtaacgcgccgcttgggctcggcgccca

SEQ ID NO: 12689 - DNA, 13 bp, Homo sapiens
  chr19:58609346-58609359
  hyper
cccggcccctgcc

SEQ ID NO: 12690 - DNA, 53 bp, Homo sapiens
  chr19:58609472-58609525
  hyper
cgtcctcaccgtctaccctgttggggtcgctctctgacccccgcgctgcatcc

SEQ ID NO: 12691 - DNA, 318 bp, Homo sapiens
  chr19:58609712-58610030
  hyper
gcatggccaatcagacgcgagtgtggcctcccggcgtcccgcccactccggcgcctgcgtcattttgggcaccatggcaacgaagtaaacaagcgggtaaataatagacccctgacagccagagacccggagaaacaaagacggtgagaaacggagaaacaaagacaaaaagacgcgcagaccgggagggagagaagcatgaaggcccacagacgctcgggggcagaccaagacgccctggggtccccgaaacagagatgtacagagtcggacacggaaagggagagaccagctcacggttaagaaaggagggagacc

SEQ ID NO: 12692 - DNA, 591 bp, Homo sapiens
  chr19:58661716-58662307
  hyper
ctgacagaaaagctgcagactcgggggttacccccggagacggaccaggacacccagcaggcgtggcaaaacagtctctatgggagggcgggctagagatgcgagcgcggaactcacgggtgacgctaaggaaagagcgggggcgtccagaccagccccggagcgacctcgtcctcagaggagtgaccccaatcgccacggagcgtccccacccaccaggagaactacgcccctggccagaccctcgccctagcgggcccgacatgcccaccacccaggtgaaacccacccgcggacgcgcccctcgccgccccacaaggacccggcggacctccacccgccaagacttccctccgcaggaaacggaggcagcgcagggctcagggatgcgtcggcacttacggttggcggccggcggcagccatgttccgggcgattgcgcttgcgcggctgccgggacaaggatgtgcgcgtgcgcggagtccccgagcttcccccgcccaacgctggggcggccgcgggtaccgggttattcattaccctggcgtggacttgcctcggggcggacgcgcaggcatttactttctccta

SEQ ID NO: 12693 - DNA, 542 bp, Homo sapiens
  chr19:58665952-58666494
  hyper
ccacaactactaaatcaacaccgacacactcataagcagccccttcctcgtcctttttttccttctgagctcgggaacgtctgctgggggtgagggggactcgcagaccacccccccccccgccccaggcggaggtcgggggccgtcacctggccaggtgtccggggaacggctcgggcggctgacaccgcagtccgcgagaggcgaggaggatccttggactgtgggcaggatcgcaggcagcggaggccctgcccggaaggcgggatctggggacgatccccattcctcccagccgcagacgcggagcccacaggagtccccgcagccctagcccgtgcacccacggcggagccgaggccgcgactccgggcctgttggctggaacccgcagccgtgtctcgggccgccccggtagcggccacccctgagagcactcggccccgttctatcccgcagtggtttggggagtgcaggtcatcactcccacccgccaaggcggacgccggaccctccattgcgcatgagcgcccactgcggcg

SEQ ID NO: 12694 - DNA, 238 bp, Homo sapiens
  chr19:58666550-58666788
  hyper
cgcggcgctccaccgcttccgccctcgggttgcgttagccgcgacgatggcgccccccagtggcagcagggaggctgtgggggtgctgggcgttgcggtgtgcaggttttctgggaggatacctggcgccgaccttgaagggaccccaacgtgagagggaaagacgcccgtgatgccaaggcttgggcagcggacagccaaaatcctgaaaccccgcggtgctccctgtgattcactt

SEQ ID NO: 12695 - DNA, 43 bp, Homo sapiens
  chr19:58694818-58694861
  hyper
gcgcgaaacctgcgtccgtcgggggctgcgctgggcgggtcca

SEQ ID NO: 12696 - DNA, 671 bp, Homo sapiens
  chr19:58739922-58740593
  hyper
tctctccccagcagggcaaggcgccgggaaggcacccgagatgacagcgccgagccccataggcgctagtcccgccctggacgccgaccgccgcctccacagtctcggcttcggttgctggatgagaaccagcgtggcccgtttaagggggaggggacaggcgctgcaaggagcagagccgcgggaagcaactccctaagccacaatgctagtcgcgaacacaggaaaaagctcatcccgccgccgcggggccccatgctcccgccggcaatgactatgcctgtgggagcaacggctaccggcgcgcggccttctgggagttgtttgttgcgcggagcgcgggcacgtccgccggccaccggaagcaccgccattggccggtgcgtgcaggtgagtctggcggcctcaaggttggctcggaggtttcactgttagccgggtgcggccggagcgcaggaccaggccagagccgccccaagtgatctgggcgtgccggagaaacgagcagggcctgcgggggtccctcatgcggcgaggccgagcaagggcaggggcctgatgggatcgggatctctccggcctcagggacggggaaggccggtccagtcaggtttcccctgcaggagcgcccggctgggtctgagcttgtcgggaggctctcctgctgcaga

SEQ ID NO: 12697 - DNA, 208 bp, Homo sapiens
  chr19:58790184-58790392
  hyper
ctcccattggccagaggccagcgggtgggggctcccattggccatcggccataatgcttccattggtcgaaggccagaccagcggagactcccattggccgagggctgtggttcgccgcacggcctactgggagttgtagtcgccgcgtcgccggtgcggccgccattgtccggcgttcggcgagtcgggtggtccctttggctggag

SEQ ID NO: 12698 - DNA, 8 bp, Homo sapiens
  chr19:58838198-58838206
  hyper
cgcctttc

SEQ ID NO: 12699 - DNA, 166 bp, Homo sapiens
  chr19:58858590-58858756
  hyper
cctggggagacccagcgctaaccaggggtgcccaagggaggagccgggagaggccctcctggaggtgggcacagcccaggcaaacatcagcagacggaaccagcacccgggacccagggaaacgtcacctgccaccaggagctccacagggtcgctgagctccgat

SEQ ID NO: 12700 - DNA, 27 bp, Homo sapiens
  chr19:58858901-58858928
  hyper
cgaaggtgacgtcggggatgggtccct

SEQ ID NO: 12701 - DNA, 30 bp, Homo sapiens
  chr19:58859150-58859180
  hyper
ctcctccggcgccgccgagctgcgcccgct

SEQ ID NO: 12702 - DNA, 30 bp, Homo sapiens
  chr19:58874307-58874337
  hyper
ccccttcctgcacccggccagcctctgcgg

SEQ ID NO: 12703 - DNA, 30 bp, Homo sapiens
  chr19:58912403-58912433
  hyper
ccggacgctgggagcgtcactgtccagact

SEQ ID NO: 12704 - DNA, 327 bp, Homo sapiens
  chr19:58919527-58919854
  hyper
acatttttctgagccttgctccgggctccgtaaagcggacacggtgccagggagagaatttcggggcggttgcgggcacaggcgggcttctgcggaggccctggcgaacgcccccgcgcggcgcggtccgatggccccatggggccgcccctccactgtgaggtcaccggggttcagcaacattcactgcggctaggacgcgtacaggtcactgaggcagaacttcccgattctcgcgccttcgttcgtttctgcggaccagcggagactcctccacaccgcccaccgcccaatgatcccactgccgcaaaccgccccaaagccagc

SEQ ID NO: 12705 - DNA, 167 bp, Homo sapiens
  chr19:58951233-58951400
  hyper
acttccgctgggtgacggtcgcactcaggacctgtcttcccaaatgcaaaatgcgcgcaaggcctctgggcaccgcagggacgaaggctgggtatggagaccctggagacgcgtggcgctggctccactttcgggaacaccttggctcataaaagcagagtaattag

SEQ ID NO: 12706 - DNA, 554 bp, Homo sapiens
  chr19:58951525-58952079
  hyper
cgccggaagtcccgcctctcaatgacagctcggacttgccactggtccgagctttcattggctcaaggatccccgccgtctatgacgctatttccctatgcccgtcacgctactgctaggtcgttgccaaggtgattgaggaatggcgtttattgcgtcgctgctcaggcaacgcaaactacattatccagaaggaccctcgcggtgcctcagggctggccattggcagccgaggagacaggcacttccgggcggagtgtaagacgctggccaatcacagcctggcagcgggacttccgtcgtcgtcctcggaccatcactttggcatttctcgattttgtctgcttctgaagggaccgcgttgtcaggcgagggacggaatcttggaggctccctgggcccatggaaacaggagcgaggaaggcacgagagtcggggaagttccgccttcttgacatacaagcgcccccaccgcggcgaatatcgcccctgagcccagtgttcgccccccacaacaccgcaccccccttccccaccctgtgccttagataaag

SEQ ID NO: 12707 - DNA, 30 bp, Homo sapiens
  chr19:59031448-59031478
  hyper
gggaaggcagttcccggcccaagtgcccaa

SEQ ID NO: 12708 - DNA, 249 bp, Homo sapiens
  chr19:59066307-59066556
  hyper
cgcccgcacgcccgcccgggatccacggtccagcaggggccactcaccggagctgggacggacacccgtttccgcttccgggtcacgcttctctttctgggatccccgacttgcccaccaactaaggcccctcggtcctgtcgccgccgccgccgtttccggattaaacgacgtgacgtaacatgccccgcccgcacccggaaggttgggaaactccaggagcgcgcgtgcgcccgtgccccggaacgg

SEQ ID NO: 12709 - DNA, 30 bp, Homo sapiens
  chr19:59087186-59087216
  hyper
ggtccctcctgggtcgaggagttctttggc

SEQ ID NO: 12710 - DNA, 116 bp, Homo sapiens
  chr20:291046-291162
  hyper
cgccggcccccaaatccaggccgccctgccccctccggaaaggggagttgggggcgagcgccgaaatctgagtggctctttcaagcctccgttgccatagaaaccggccgcacagg

SEQ ID NO: 12711 - DNA, 160 bp, Homo sapiens
  chr20:291220-291380
  hyper
cgccagaggccccgccccccagctctggggagtccaccaatcagcaggtcccgtgacttagagccctgccctcggcccagggacaccaccaatgcgcttcgaccctgccctccttctcttcggtgtaacaagaagactcgatattttttttttttttttt

SEQ ID NO: 12712 - DNA, 30 bp, Homo sapiens
  chr20:327796-327826
  hyper
ccctgccccacgcgcggccaggccccagcc

SEQ ID NO: 12713 - DNA, 30 bp, Homo sapiens
  chr20:329001-329031
  hyper
ctcctttccttccccgctcttcttttccct

SEQ ID NO: 12714 - DNA, 42 bp, Homo sapiens
  chr20:362797-362839
  hyper
gtaacccgccctcatttccctgggtcccgagtgtggcaggga

SEQ ID NO: 12715 - DNA, 30 bp, Homo sapiens
  chr20:443316-443346
  hyper
ggtgtagagtgtggcgctcttgagcgagtg

SEQ ID NO: 12716 - DNA, 142 bp, Homo sapiens
  chr20:524513-524655
  hyper
aatctctctgaatgcggccatgctgggatgtcctattgtaaccttagggattcagttctggcctagggtgcaaaatggaaggaatccccaacgcaaagcagaataaggagacttgcaatagttaagcgcattttatttcaat

SEQ ID NO: 12717 - DNA, 30 bp, Homo sapiens
  chr20:657272-657302
  hyper
ctagctcaggcgggcgctgcaagaggaagt

SEQ ID NO: 12718 - DNA, 350 bp, Homo sapiens
  chr20:708551-708901
  hyper
aggcgggagccaccgcgcccggcgggatattatatttccataaggccctccgggggcctgggaacggactggtgcttgcgtgcggggcttttccactggttcccttccgtactcgggcttcccccgctgttgttactccctcaacgggaacacaactccaccgccgcctccgggacacacccccgccgcgtgggccggggtccgggacgcgcgctcagctcggccccgcgggggcggcgcaggagggaagggggtgcggaccccggaggcgccgcaggaagccctcgcccacccttcccggccgggccgggtccgcagctgacggtgggggtggggagcagacgggcggg

SEQ ID NO: 12719 - DNA, 472 bp, Homo sapiens
  chr20:708944-709416
  hyper
cgggccgactccgggccagctgcggaggcgggggaggggaccccgctttccatggcagtgccgaggcggcgcgcacaaaggcgccgcgatcagcgcttcatcggttcgagtcaattatctgaggcgcggaggcggcgggcggggcgaggcgattccccggtggggctgcggagcgcggcgccgagactcagaggagggggcgctggggaagcggcttctccgtctcctgctccgccccgggcttcgtggcgaggcgccgtcgccccctggtggggcctcatccattcctcgctcactcgctcgttcacctttttctcaaccttacagcgggtggctctacggtacgagctgagggtgaagtgctgagaacagggcaagcgggccgtacctttaaatgccctgtcgggagctgggcccctctgagtggccaacctcaccaggaaagggcgctcagcctcgcgctgcagatgga

SEQ ID NO: 12720 - DNA, 30 bp, Homo sapiens
  chr20:1165688-1165718
  hyper
cgcgaggtcaggctcgccgtccttcgccgc

SEQ ID NO: 12721 - DNA, 711 bp, Homo sapiens
  chr20:1206698-1207409
  hyper
gcggcgccaagaacccggccaagctgacttggcgactcctcgcagcccctgctctggcacgccacacctcagacgaggctttgaaagtagggcgcagcctgagaggccggccggaccccgagtgctgtaggcgggctgggagatgggggccgccgccacccacattcccacacgcacccggcgccggcgcctcacgccgtgttagctcgcggcgccaagcccggagggtcccgcctgaggaagaaaggtcgtcgcccgcagcccagctggggctggaggcgcgacccggggtctcctcgcccgcacgcggaagaaaatgggcgctgtggcctcagtttccctctgtgagcacccggcccggaactctgaggagtcgtctgtggaggagcctttggcgtccccctgcccctgagcgtggccgtcagctcttcccagcccctgcactttgctttcccctccctcacgcccggaagggtctcgccctgcccggctcagccctctctccccacgcccctctcccagggtccccgcccggtccccttccgaccccttcctccctcccttcgctccctccccgccaccgccgccaccctgccctttgcgggccggtttccacggagtggccccatcccggtggcttcacgttgcacgaagtcagttcaatctggagactgaaaaagcctccgggacgtggggcgggagggtgcgggg

SEQ ID NO: 12722 - DNA, 30 bp, Homo sapiens
  chr20:1447713-1447743
  hyper
gatgagaggcggggcgggtcttacatacac

SEQ ID NO: 12723 - DNA, 244 bp, Homo sapiens
  chr20:1784061-1784305
  hyper
gaggccccgggcgccccggccgcacgcctgggtaaaaggtcccgaggagtccgcagaagcgcgcccacgcccgagacggccgtttccgccggcctgggaaaggggcggagaagggggtcgcccgggccgcagcgtgccggtccccgccggccgagccgtgtttggggccagtccccgcaccccgcttcttccccacctggggagcggggcgccgcggtaggggcactggagcgcacgatgcacc

SEQ ID NO: 12724 - DNA, 39 bp, Homo sapiens
  chr20:1875079-1875118
  hyper
tttgcgcaaagtggagcggggacccggcctctgggcagc

SEQ ID NO: 12725 - DNA, 669 bp, Homo sapiens
  chr20:2187753-2188422
  hyper
acttgggaccttgccctgccccgcggcccgcgtcaccatggcaactgcaggcagccagcaccgacggcgggaaaacgaggaccggagccgcgttacagccttggccttcgagcagcccagggagagtctctgcgtcctccagcccccgcttcccttcatgtcggaggtcctaagcccgcagcgaagtccgcaaagagctttccccgacgcctacgagaccggaagtgcctgggcccaggtggaggaaggacccgcgtggccgcctccgcgctctccctggggtccgtgccccttccggcgtttctcccgcgtccttcaccatggcaactcgggcgtcgggagcgtgggctgcgagccgagtgggtgggggagccgccgggctctatccgccagcccacgagaagtgacgcaggtgacgggaggccgcagggacctgagggcggagaggggaattcagaaagtgccgggcggcggcttccgcttcctctgcggggtctctgggtggtcgtggctgggagctgccggggcccggtggccgtgcgcctctgctccgggcaagctctccctgcaaggcccgggcggcggcagggggcagtagcggcccgcgatgctcagaggctcgctggcacggagctcccgggctggggcgtccagatctggagaagccgg

SEQ ID NO: 12726 - DNA, 30 bp, Homo sapiens
  chr20:2489270-2489300
  hyper
ttctaggtcactctcgtccccccgggggga

SEQ ID NO: 12727 - DNA, 467 bp, Homo sapiens
  chr20:2539211-2539678
  hyper
agcccggggtctccccggaggaagcaaacagggcgcaggagacacagagaagagctgggggagcaggagcggggcgaggcagagaggacctgcgagggcaggagaaagcgcgacgagagggcctccttccaggagcggacagcagccccaaagagggaaaaggagattccgaggagggaggagaagtcgaagcggcagaagaaacccaggtgtgttgtggctccgattctgggcattcgctccgcgcgctcccgctccttcgcggcccttccccttcccccgtgagggactgatgcccccctccccggggagaggcagcccgtgccctcgctctggcttccgtgcctcccagcccttaccactgccccactctgcggtgggttcttcatcccagaaccgggatgaagatcgcgggtccgcgcgggggagtggccgcgggctctccactccagcgcctcgtggcaccc

SEQ ID NO: 12728 - DNA, 31 bp, Homo sapiens
  chr20:2627686-2627717
  hyper
aaggagtataaagtgccgccctcttgtggta

SEQ ID NO: 12729 - DNA, 202 bp, Homo sapiens
  chr20:2668733-2668935
  hyper
tcctttcattttaattaccatcggggatctgacaggaagtggatccaagtgccggcatcacactctggggcctccggggggcgctatggcccaacacacagcgtggccaagcgcgcctcagcctaactcaccacttcctatctgttttatacggtttgcacccgcttaaggcggcggaggcgtgggggagttctgctgatgt

SEQ ID NO: 12730 - DNA, 20 bp, Homo sapiens
  chr20:2731223-2731243
  hyper
cacttctcctctccacccca

SEQ ID NO: 12731 - DNA, 1049 bp, Homo sapiens
  chr20:2731391-2732440
  hyper
cgcggtcaaggggctgacaatcaaggaaaacctttggtagggagtgcctgctgagcccggctcaaccgaaacccgagggctgagtggggaggttgacctggggaaggaagggtggttgcagaaggaatgataaggaccgatccccagaagtgagtgctttctctttgccgggaaactaaaggaaatccactaagtcaggatcagaggtgaaggtagggctctgagactggtggattaggtcggggccaggctatctgaaaagggcggtgcggggatcaggaaaaggggaaggaggaggagaagggcgtggggagctgggtcagacgcgcatacacacacacaccccttgcacaacgccagggtaagcagtgaacacaacacacgtggagatgcaatgtagaatctggccgctggccggatcttctctacttccatcctcccgccccagcccaagccacccacttctccagttgcttccctggggtgcatgcaaacctctagccttcagatgctgcagagagtccacttgagccgtgataaatggagattgttaagttttttcttttttataataaactcctgatttgaccagatgaaaagagaaaactctccatcgagtcctgcccttaggactataactcatatgtgtatacggtttcccttttttctaatcacaaatgggtgcatgtgtgttcataccaagcgcctagggccgaggacagaggctggctcagtaaatatttgttgagtaaacaaacgaaagaactgaaacttccctgaatctcgctgccgggggtgcctggagttttccgggggacttgggctgggcctggtggagggggctgcagcgaggctctcggactgggcgctggcctgcttttggcgccctgcgtctcaccctgggagtggggggctgcgggggagacgtcctccaaacgccgcccccttccccagctctgaacgagcccaccattgactacggattccagaggctacagaaagtcattcccagacaccccggagaccccgagaggctgcccaaggtactc

SEQ ID NO: 12732 - DNA, 23 bp, Homo sapiens
  chr20:2780741-2780764
  hyper
tgcactgtgagtgtgagtgtgcg

SEQ ID NO: 12733 - DNA, 609 bp, Homo sapiens
  chr20:2780883-2781492
  hyper
cgtgtgtgcgcgtgagtgcgagtgtgcgtgcggggtgagtgtgcatgactgtgagtgtgcgtgggtgtgcgtgtgcccgcgtgttagggagggatcgccccacggggcaggagagccgggcagtcggcttgcgggggagcggaccgtcggtcggggaactcaccgttagctgtctccgccggcggctgtgccgggctgctatgcagggccggggtcgagcctgggaccttggtggtcccgggctgcgcgaggcccagcaccgagttcctgggcgcccccagagccgggccgacggccggcgcgaaggcggccagggcgagcaggagcccccacatggcggggattgagtgccaggggcgcgcgggctacggcgggtggcgggtcggtctcttcctgccgagtgcgccgagccccccgccccttcctgccccccgcccctccgcagcctcctgcccgcccacagcccgctgcccgcctcggacctcggagaggaggagagggccgggaggagcgagcggggctgacctccaaggggccgccccaagtctcaggaccgccgactctgcccttcctctccgccgtctggggccaacccgcctcgttggcgcg

SEQ ID NO: 12734 - DNA, 130 bp, Homo sapiens
  chr20:2785653-2785783
  hyper
cccttccctcccctactccttcgctcactcacccggctgccacgtcccgtcccggggttacataacccggagagagaagcctgagcgatagcctgcgggctggggctgcggtggaggagccaagggttga

SEQ ID NO: 12735 - DNA, 571 bp, Homo sapiens
  chr20:3052453-3053024
  hyper
ggggagggagggacccgcagccacaggggcgcgccccgctccggcctcgcctgagaactccaggagctgagcggattttgacgccccgcccttgaccgcggtcgaggcccccacggcgccccagcgcgtctcagccccgctgtcccgcccgaactccgaaccccggaccccagcatccttgcccggcgcaccccggccggcctcgcagggtcctccgagcgagtccccagcgccgccccggctcccgctcaccccgcccgtccccgcagtgcctcccctgcggccccgggggcaaaggccgctgcttcgggcccaatatctgctgcgcggaagagctgggctgcttcgtgggcaccgccgaagcgctgcgctgccaggaggagaactacctgccgtcgccctgccagtccggccagaaggcgtgcgggagcgggggccgctgcgcggtcttgggcctctgctgcagcccgggtgagcggggcaaggcgctccggggccagggggaggcgggcgggggtgcggccgggattcccctgactccacctcttcctccagacggctgccacgccga

SEQ ID NO: 12736 - DNA, 16 bp, Homo sapiens
  chr20:3073375-3073391
  hyper
acgcagccagacaccc

SEQ ID NO: 12737 - DNA, 327 bp, Homo sapiens
  chr20:3073560-3073887
  hyper
cgcagactgctaagagcagcatgagcacggctccggcggcccccagggccccgcgggtcggcgccaccccggagcgcggtgcccggaatcacttagcgccatcagccgggcggctgggagggggaagcggccgatccgggcggctgggagggggaagcggccgatccaggcggcagcggagggggctgcagcggaggcggccccggcttgcacgctcgcccttccgcctgcccggcagggccccgtctgagccccaggccccaggcccagcggcgccgctcgccggtgaaggaaaccagcgcagagaggccgcgctgccaggcgcgt

SEQ ID NO: 12738 - DNA, 30 bp, Homo sapiens
  chr20:3140550-3140580
  hyper
gcgagtgacggatgcggccgaggctcaaaa

SEQ ID NO: 12739 - DNA, 296 bp, Homo sapiens
  chr20:3154660-3154956
  hyper
tagggaggggtcgggacgagccgtcgcgggtggatccgcccggccgagcaacgacccgcccgggcgcgaggaccacgggctgtcgtgcgggaggcgtcgaggggcagtaaactccgttcgtgaccaaacggagacgatttgaaacttgctgctcacactggatcaccgtctggaaggtgcgacggggaaaaaatacacattacactccagcaggattgaacgctttcaccctgtgccccgcgcctggcgtaacgcgtggccccagaccacacgctgtaacccggggtgagagggag

SEQ ID NO: 12740 - DNA, 30 bp, Homo sapiens
  chr20:3218779-3218809
  hyper
cagtcctgggaccgcgtcccggccgcctgg

SEQ ID NO: 12741 - DNA, 941 bp, Homo sapiens
  chr20:3220009-3220950
  hyper
cagccgggctgggctgctccccgccgcccgcagctgctgggccaaaccgagtagacccggctccttcgagcctgtgcgcgccggacccagcagacccagcgtcgcgagtttaggggctggacggggccggggagcttctgggaaaacgttcgactgcgccacgagcccaccgagctgtgcgactgaggcagaccccgggagggcttcccccgcgtccgctttaagtacgcggccggcccctgtctcctcctttcgaccggggacctccgcagggccacgcccgctggctgccccgcctcctgcatttatcccggtagctccggccgcaagtccttctcctcctcctccaggaagcgcgccccgactgactagacggacctccgtgcattccccgggctacgccctcgcccgctgagacggcgctctccgagctcggctgctttgggttttcgctgcgagcctcgccaacttatctgccagcctcttcacgtcctcggccttctatgaggtcaaggtcatggttcgccccctttttccttccccaaatggcccttgcgccctgtcccctttcctggaccggctgcgacccgcccggggacgcgccttttcggggcgcttagtctcctgcgagtagggcgtgtgcgcgtgtgggtgcgcgtgctgcgatgcgatccggcaaatgcagctgacgaacccctggcctgatccacggtggctcccagtagaaggctctacagcccttggaaacggaacacgcagctccgtaaagcgctaaccaacctcccgacccctccggccgccatcgctttccggctcagccgcgctgggacggagtcctcggccactgtgccctaaccatggtagaggaacggggacaggccggggcaagcccacctctgcgaaggaagggcttctggcgcgttggggaagcctcatgcata

SEQ ID NO: 12742 - DNA, 299 bp, Homo sapiens
  chr20:3229180-3229479
  hyper
atttccccttgtcccacccagcgactggttgacaggaagcagggtgtctatggactggcggcgggcgccccttttcctcacctccctgcgcggccagcgggggcccggggtgtggtcaggtgggaggcccgcgccacgtgcggcaggaaccgcctggcgagtggaacccgagcttgcacggggacagctgatgcctttctggtcgctcctctagagctccgcgggctccggcaaacccccccgttagaacttgcggttccaacgcgcagcgccaaatctggcccttacttgacccgtca

SEQ ID NO: 12743 - DNA, 187 bp, Homo sapiens
  chr20:3229526-3229713
  hyper
cgccaagctttcactgcgcggaaacgcgcccatcaggctggaaaggcgtggttcctactacagctcggccgcggcaggctggggccgagaaccggcacccgtgcacggcggactaagacgagggtgagggacacgggtgggccgggagagccccgttcccatagccggcttccttgagcccctcccc

SEQ ID NO: 12744 - DNA, 437 bp, Homo sapiens
  chr20:3451348-3451785
  hyper
agttagggcagagtgccgggtctctaggagggcaacactcaacgcagtcggctcctaggcatccagtggggctgcaaccccgccgccggggacgaaaggcgaagggggaaaactagagctttcgccggccgggacagcgcagccgggtttcagctcgttctacggtccacgtcagaagatcgcctccggcgccgcggacgccggagaccactgtctgcgcccccgcacgcacgcacccacgtactcgcgcacgcgcgcgccggccccgcccaccgccccgctgtggcccctttggaccgcacgagccaccgtccgcacagccccgccccgcacggccaggcgaagcggagccggccgtgcggtgtgtgtgtatgtgttcgcggggcgccgtctcagccccgggaagatggtggctgcagcggcggcaactgaggcaa

SEQ ID NO: 12745 - DNA, 31 bp, Homo sapiens
  chr20:3452294-3452325
  hyper
gagggccatttgcttccggggagatcatcgt

SEQ ID NO: 12746 - DNA, 30 bp, Homo sapiens
  chr20:3632574-3632604
  hyper
ccagggagggttatgagagccaccaacagt

SEQ ID NO: 12747 - DNA, 128 bp, Homo sapiens
  chr20:3641419-3641547
  hyper
cgcgcaggcagcgggcgccctggtccagcaggcagccgtcgggggcgctgggcgctggggtgcacgagacctgaaaggccaggaggcgaggcctgcgcggcgggagggcggtgagccggagagaggcc

SEQ ID NO: 12748 - DNA, 113 bp, Homo sapiens
  chr20:3641773-3641886
  hyper
cggcgcagggcccggcggcagcgggcgcggggacagcccccctgcgcagcccggcccaggcactgcgccacatactcggagcgcaaacgctggcaccgcgcgtccgccgtgca

SEQ ID NO: 12749 - DNA, 58 bp, Homo sapiens
  chr20:3766678-3766736
  hyper
ggggtgcggggggcagcgtttcgcgcgcgggcgcgggccacgccgctgcaggacacca

SEQ ID NO: 12750 - DNA, 30 bp, Homo sapiens
  chr20:3801303-3801333
  hyper
caacacattcagggcggggtgccccattta

SEQ ID NO: 12751 - DNA, 278 bp, Homo sapiens
  chr20:4129523-4129801
  hyper
ggaggaggaagccaggcggctggcggaggaggagagacggaggaggccgagaccggagcgccgctcgccgcagacttacttccccggctcagcagggaaaggtacggtgcgcccgctctccggccccgggccccggctctcagcctcccccgggcgcaggcaggggctgcggccgccgcgagagggtgaggggcccggagcggtccccgagggctcggccggcccggggcttgggcggccagcgcggcgctcgggcgctcgggcgggggtgcggggcg

SEQ ID NO: 12752 - DNA, 96 bp, Homo sapiens
  chr20:4130006-4130102
  hyper
gcagacaaagccgggcgcggacgccccgcgacgactcgggctgccgggagggtgggcaccggggagaggacagaaggctcccgggtgatggcccga

SEQ ID NO: 12753 - DNA, 1285 bp, Homo sapiens
  chr20:4803136-4804421
  hyper
gacccacacggcgcccgaggtgaaacagaaccctcagtctccctatgaggccactggcactctcggctgtccccagagctctccgacttagagctgaatgcaaagtaagcgctcgaaatgcagaagtagccggggccgcccacggcacctgcctcgctcggggcgagagaagacgccaggctgaggtcccagcgacctcaggcaccagctccgaaggagggcggggagaccgcaaaggggaagtgcccggagggccaacggcccccgcgcaccctgcgcccctctgaagcgcgccgcctccccgcgccggggactgggacctgcctctggggaatccgcctagaagacggcggcggactggggtcgggcactctccagggctgtcaggccctccccagccctgcacctgccgcgccgccccacctcgccaggaagtctcagagaccccggggatggggtgggagcgccttcccatcgcgggctcaaaaagaaggaaggacgcccccaggggtcgtagaaggaggactagctccaagccacaactttcttcggacccaaggcaggccggctggggctccgcgcctacacggcccctggcgggggtccgcgcgccccgggagccccgcggctcggggaggaaagaggagacaagagacaggcgaggattacggggctgacccagccggggtagggaccatcgtggaaaaactttggcgaggtggggggacgcggaaagagagcggcccgcgccctgcaccttgcgccgggcatcccgcgccagtgcctcgctcccagtgccccgcgccccgcgccccgcgccttgccttcaccccgggccagctgcatcgcgcccgcgccgcaggaaccgtggagttggaaagtgggggcgccgcggctggggggctgcttcagctgcgcctcggccagcgatcggcgggccgggctcaaatccagccaggctgggcaggcggtggccgcgcgactggggaccgggcgccccgccctcctcgctcccctcctccttcctctccctccctccagccccttggcctttttcagcccctaccggatctgctcgtccgctgtcctctcttttctctcgctcttcatatcactctccaccccttcgccttgccttcgcctttcttcctccccttgtctcctgccccctcctcttctcccctcccctctaggggcggagcttctcccctccctcccagacaatgctgtggctgcgtccccttccccgccagctcgtccaggctcccgccgccagcgattcttc

SEQ ID NO: 12754 - DNA, 45 bp, Homo sapiens
  chr20:4981853-4981898
  hyper
gggccagggtggccggcgggcgcggggtcccgggagatgggtcgg

SEQ ID NO: 12755 - DNA, 179 bp, Homo sapiens
  chr20:4982139-4982318
  hyper
gccgcctgcaaaatggcgccgcggaggggcgggccgggggcggggtgcagcggagccgcccgcccccgcgccggtctggggcccacctccctccccgcccccgacccctgccctcgggcctccccccggggaggggctgctccctggcacccggcagcgctccccggaacatcccgggc

SEQ ID NO: 12756 - DNA, 30 bp, Homo sapiens
  chr20:5100005-5100035
  hyper
ctttgtgactttggcgcgaaaaagcaggtt

SEQ ID NO: 12757 - DNA, 30 bp, Homo sapiens
  chr20:5107431-5107461
  hyper
gaccgtgatggtggcgctgcgcgtgcgcac

SEQ ID NO: 12758 - DNA, 790 bp, Homo sapiens
  chr20:5296191-5296981
  hyper
tccacatgtgggcgccgcgggatgctgggtagcaaggagatgacccagctgaacaatgcatttggtccactcctgcgaggggaggagaacgccgagggacaggaactgcgcgccagcaaaagacaccctaacctggggtgcgcccgccagctgctttcccaaggtgaaaacctccaagaggcgagatgcaaatcccagtggcgtccacacccggaggtgtcttctctccaggtcgcccctccgtctcatgcgacaccccaatccccgcagcctctgctcagcgtgggaccaagaatggggagtcctacccctcctcggctttccagccccctaacccaagacaagagggcgcgcgcccgggctgggacaggtcccagccgcattttcgtagattgcactccccgcccgggagcgacccgttccagcagcccccttcccgccccatcaacgcggccgcactgtcggcgtctagaggcgacatcctggcaaagacaggaatcaagtcagaaattcaggctctagaagcaaaggctgcggtgcctcctggctggaagaaaacggcgggtgggtggaggatgcggtgcgcgggaatttccccacggacgcttgctgtttcctgctcacctttcaggaaggtgcccctctacctgcaccctcccctgcaatttggagctcgtccgcgagctcagctacccgctggctccctctgcccgcgcccgcacaccacagactccgcttaccgtaccctacccggtcctagagggcccagaggggatctcctgaaaccaac

SEQ ID NO: 12759 - DNA, 42 bp, Homo sapiens
  chr20:5297005-5297047
  hyper
cgcatatctcgagagtggcgggaggcaaagcagccggaatgc

SEQ ID NO: 12760 - DNA, 193 bp, Homo sapiens
  chr20:5297225-5297418
  hyper
cggttttcacctcgaggacccggacttgcacttgcagagccgctgcgtgggggatgtccctcttttttcctcgccccggcgggctcctccggcgtgtcagggtctctgggttccagctggagttggcgctccggccccacagctctttccagcgtctcggacctgtgcgccccgccccgcgctggactccgcc

SEQ ID NO: 12761 - DNA, 168 bp, Homo sapiens
  chr20:5297672-5297840
  hyper
cgtggcaccgcacccgggtcgcgcgcgcaggaggggagagtcctgtcttccggaggtgcccagtgccagcgtccgcgcccactagaaggtgaccctttcaaggaaagcccggctccgacgagtgcggtgtgggcctttggagatggcggtgaaggaggaggcccccag

SEQ ID NO: 12762 - DNA, 580 bp, Homo sapiens
  chr20:5891857-5892437
  hyper
tggggagcaggctgaggcactcgaagcgggacctcccgcctcccctaccatctcagatctgcactactcccctcggccgtccattctttggcccgcctttcccccacccccgctccagaccctgcacaccaggcgactggactggcgtaaatttccgcccatttgcgtcgccgcctgggggtgctgcttcgtgacgtcagggctgagctagggggcgcccgctcctggctgcccgctcctcccggccctgcggcccccgcctgccctttaaaagagcggggcctgcgccggccgcgccacaccgcggggaccaggaggcacgctggttttccggggccgctccatcgcgccttcctcctgcgcctcgcttctccggtccagccgccatcttcctttccgcacaggggccgccgagcggggccatgcagccaacgctgcttctcagcctcctgggagccgtggggctggcgggtgagtgggcgcggcgggccggtcagcaccgcggacagcgccagcctcgctcttccccgccgctcccgcagccaggctggcggatcccgggagagagggagggttgagg

SEQ ID NO: 12763 - DNA, 50 bp, Homo sapiens
  chr20:6748695-6748745
  hyper
tcgggggcctgggacgcgctggccgaggtgtgatcggaccccaggctagc

SEQ ID NO: 12764 - DNA, 30 bp, Homo sapiens
  chr20:6749465-6749495
  hyper
gctctttcaatggacgtgtccccgcgtgct

SEQ ID NO: 12765 - DNA, 1299 bp, Homo sapiens
  chr20:8112346-8113645
  hyper
gtctcgaaagcacaacgtaaccgtttgcccgggtttcaagatcagcgcgctgcaaactctcaggcgcggccaggtttcctcaaagagcctctcaactgcgctcttctctgctgataaatgataattctcttcaaaaagctggtttgtggctggcgctggagagctccagctagagccaaaagccaggggttgcctctttggttcctcccgatgggccccttttcccagccagttgggatccaaagacgctccggagctcgagcccaaattcccaagaaaaccccaaagagcgtaaggctcctggggacccctagcacctctgcaaccagggcacggggcatgctcagagcgaatgcgggaggcaggcgttggctgcaatggggctcgggagccaggaggtgccgctgcgtccccgcttcctggcgcctgacccagcgtgcaaagttgggctgggagccgcggggggaaggaaggacccagcgagcgagggtggcggggaaggggggcgggggggaggaggagggaggagggaaaagagcggttagggggggcgccgggcgtgtgtcactcgctctctccctctgtgtatagaggatgtgctgaatggtgcgctttgaggcggcggcggcggaggagcagaatccgccgcgactggcagcctcggctgaccggctcggcttctcttcgccttccgaggctcctcatccaccgcgggctccagacctcgcgtcccgcccggggcatggccgggcgctgcgcccccgcgcgctctgcctgctgagcggcgccggagggaggtgcggaggccgggaggccggggaggccggcggggagcagagtcgagcgcctccggagcagagaaaggagcccgcgccccgcgccccgcgccccgcgcacggtccccagtccctgccgcgctcgcccgggccgcccggagcccagatgagcccagatggccggggctcaacccggagtgcacgccttgcaactcaagcccgtgtgcgtgtccgacagcctcaagaagggcaccaaattcgtcaagtgggatgatgtaagtattggggcggcccgagtcggggcgctggctcgggcaccgggcagggcgggcgtcgtgggggtggggcaaggggcgcgttatgcaatgggcgcactgggagcgggcaggggcagcctcgggcgcacaggttggcatctgccaaagcggatgtccaagggcagaagctttgcgcgcgctcctgtttcatcgggcttcagtagttgccatcctttctgggtctggcaggcgccccctgagggtct

SEQ ID NO: 12766 - DNA, 30 bp, Homo sapiens
  chr20:9112082-9112112
  hyper
ggtaataactttacttgttgaaggaatgag

SEQ ID NO: 12767 - DNA, 508 bp, Homo sapiens
  chr20:9487211-9487719
  hyper
cggactttaggtggacccggaatggaaggagggtttttgctgcccgcatgcccccagggctctttccgggaaatagaagggcgagtcctttgcttccgcagcgtccggtgggaaaagatgccacgtggcgcggtgcgggcggactcagaggccccaggcgcccccgggaactgccacttactcagggcccgcggtccctggcgaaaacgggcgtggcgccagtgctcagaccgtgaagtggaaaaacggatcataacctcgcgttaaggggaaattcaggtttttttctctgagaaatgtatccttccctaaccaaaatccagcacctagggccacccatccctcggtccctgagcccaccctctccctgcaggcacagctatcccaggttccggcccatcaagttgggaaatgagacgatccatcagtgccaggctcccgggagctgcagctggctccaagtgcgtggccggaggcgtcccccatctgcacgagtccccagagtcac

SEQ ID NO: 12768 - DNA, 121 bp, Homo sapiens
  chr20:9487788-9487909
  hyper
cgcgttgcctgctgtggctttgctgctctgggctacaaggccgggccggcttgggttgagactcccgaggctgcaggcgaggcggtgggtacaaacttccgtagatcctgctgtttctctg

SEQ ID NO: 12769 - DNA, 76 bp, Homo sapiens
  chr20:9488205-9488281
  hyper
ggtgtggggcctcccagagttcgtatatggccctcactggaccaggggagagaggccggggacaggccacccttga

SEQ ID NO: 12770 - DNA, 191 bp, Homo sapiens
  chr20:9488328-9488519
  hyper
cgcacctggcgggctggaccgggacagggggcggtgcgcaccggggctcccaagcagccttagcggtggagaccttccgaggggaggcgagcctgcggtttgtctcccgttaaggtggaagactggatttttcctccagttccgatctagggtgaagtcccttctcccgcgccctcatgcccagattgggg

SEQ ID NO: 12771 - DNA, 986 bp, Homo sapiens
  chr20:9488782-9489768
  hyper
cctggactgcctgcgcgccctcggagcccgcctggttggcagtctctgcttcgatctcctctaagcagaatctattttctgtttggaaaatctcttacaggtcctggggttgtcccaggaccaaactgcagcgaggccgcgcgcccctggccctggaacgcagcatcctccccattttacctggaggctagatcgttggggctcttcgggggaatttccctgggcacggatactgtgctggcggtttagaaaagaaaaagaaaaagaagcgaagcctctgtaacctggtctcctccctctcctcggtttaataccctgcctcccctactagtctccaggcttttctctggacaggggagggacccgagaagcccgcggccagtgatcgccagggtctgtctcgtcgcccatcctccccgccccagagcaaggtcggcagaggcttcccggggcataagaacttcaaagaaagtctcagaggagccacgctaccaggaactttcgtcgccctttaaaattgtcagatagacaagtaaaaacagtaactaactaagggaacaatggactcttgtgacatgtgtaactcttccaggtaccccaacactaaagaccccgtggttcctgtcgccatggcctgaacgtactcaactccagccccggggctgacctctctccctgagctttggagcgggtttggacctagccgttgcaagtaggcatgacttttatcacccatcgctatacccagagcagctgctcgaatgtgccaaggagcccaactcgggtgcaaagcgccgacgtctttcccaggttgaggacatcgcgagccagaggtgcaggcagcgaggcgcccaacagtagaatgcatcttccttcccgcgggcagaagccgtcaagtctggagtccgcagcgggcgcgcgggccagcccagggatactgagccatgagcaaccaggcccacctaccgccgcgccatccaaaggta

SEQ ID NO: 12772 - DNA, 466 bp, Homo sapiens
  chr20:9495177-9495643
  hyper
ccccagatctcattggccctccgcacaagccaagccacagccactcctgccacacaatcggattgctttcagcactcgcagccgtggaccgccgtgcggtcctttcctccgcagtgagccgatttgctctgccagcagctgtcggtgccgcgctcgacaccgagtcctagctaggcgctcacagaatacgcgctccctccctcccccttctctgtcccccgcctctcgctcaccccggcccactccagcggcgactttgagggattccctctctggcggcctctgcagcagcacagccggcctcattcggggcactgcgagtatggatctccaaggaagaggggtccccagcatcgacagacttcgagttctcctgatgttgttccgtgagtagcgatttggcgactgggagagaggacgggcactctttgcagagaacagagccggcaaagtaaagtcaattagc

SEQ ID NO: 12773 - DNA, 80 bp, Homo sapiens
  chr20:9496450-9496530
  hyper
gaaagtaaacccccttctctccgcttccctatcggggctgcacgtagagcatctaaccgcatgttcccggaacctgggat

SEQ ID NO: 12774 - DNA, 333 bp, Homo sapiens
  chr20:9496580-9496913
  hyper
cgccctttacagcccccgccccggggccgggcgagctgagggggcgcggggcgtctgtgttcccagctgatcacagaacaggccgatatcgcattgacccggggagctgaggtgaagggccgctgtggccacagccagtcggagctgcaagtgttctgggtggatcgcgcatatgcactcaaaatgctctttgtaaaggtaactccgagcccagcgggcagaggggccgcaggctccgcgtgggtgtgggaagtggcggcccctaggtttaagaacccagacgctgcggggacgattgaagcgcacctccccggctcaacaggaaagccacaa

SEQ ID NO: 12775 - DNA, 16 bp, Homo sapiens
  chr20:9819466-9819482
  hyper
cgctcccagcgccatg

SEQ ID NO: 12776 - DNA, 105 bp, Homo sapiens
  chr20:9819682-9819787
  hyper
gttttcgtggcagccggcgggaggcaggctgtagcggcggccgggggtggaggtgagggggagggtcggggggcgtgtctacactcagggtgcaggagccaggag

SEQ ID NO: 12777 - DNA, 2 bp, Homo sapiens
  chr20:9819833-9819835
  hyper
cg

SEQ ID NO: 12778 - DNA, 58 bp, Homo sapiens
  chr20:10015603-10015661
  hyper
cgagcaccgccccaccgcgcacgctgcggttgccccggcagccgcgccctgcgtggcg

SEQ ID NO: 12779 - DNA, 30 bp, Homo sapiens
  chr20:10015949-10015979
  hyper
ccctggcttctgatcgcccggaagactaag

SEQ ID NO: 12780 - DNA, 592 bp, Homo sapiens
  chr20:10198138-10198730
  hyper
ggcacgacttctaatcgcatccttcccggaaaagtacaaacagttcctcagacgaggtcccccacctcccacgcgctccccagccctccctccctgcggagagccccgcgacagcctccccaacacctgtgaatcatccgggaggctgccaccgccgagcgatccgcgcaccacccccttcccgggcccgggcacggccagggaggacagttagggttgttgctttataattatcacttttaatctctaatacgaccagcacaagtagcctttgtctccccgccctgatttgagcatccgagggccccccgaggcagcctgcacgggtaccccggggtttgcgcactgagtgaacccccagattcggccgtgtcccagccgtccttgctctgaatcccccacctcctcccggccgtttggacggttccctcggggcgtctgtgcctccgtggggtacccctaagacacccagcatgaaaccccagcaccgactgcaaattccaccgaaagcagagtcatccgtttttgccctcggcaaacaactcaacttcaagcctcgagtccttgcaaacccacgctggctgggctaact

SEQ ID NO: 12781 - DNA, 64 bp, Homo sapiens
  chr20:10198940-10199004
  hyper
cggggatgcccctacggaccctcttcggagaaaacaaatcgccgctgaaatttcccccacccct

SEQ ID NO: 12782 - DNA, 321 bp, Homo sapiens
  chr20:10199254-10199575
  hyper
gcgtttgcccaagaccgagtgttaaaatggagtcataagagtcgccccgtgcgggtgtttatagaaggtgaaaacacgcaggtttgcaggccagcgcactgggaaccgagtcaagcgcgccgcagcccgggccccgcccccgcccccgccgtgccccgcccccacttcctcccgcccctcgctgggcggctattaaaagctgctgacgtcaaaacggacggccatctttgatgagggcagagctcacgttgcattgaagacgaaacctcggggaggtcaggcgctgtctttccttccctccctgctcggcggctccaccac

SEQ ID NO: 12783 - DNA, 30 bp, Homo sapiens
  chr20:10414357-10414387
  hyper
agcctggggtacaccgtgcaccctccagac

SEQ ID NO: 12784 - DNA, 575 bp, Homo sapiens
  chr20:10415534-10416109
  hyper
tttctcacaatctttcgcaccgaatatatgttccattcttgagctagtcattttccaatgttaagaaaacacaccacagaaaagcgtttttttttctctcggtcagttcaactgcctagcaccgtgagttaccatgatacgttatttgctaatgagagtcattggggtcccagcctttaaaaatagcctgcgtccggcgccatttttgttttgggcccactttgaaagccgcgatattctgaacagaggccatttttcttttgggcagattccacgggccatcgaagtgtttcgctgccatcttaaatcctggctgtggcctcaatcctgcagcgaagctgcccagatcattttgtgtttgggcggcggctgagttcccaaacgcgcgcggagaccctgggaaggaggaagtaagcgcgaaagtgcttcccttaagcttctgaaggttggctgcagttccggctacctgtgtagtccgagtttccacagccaggtactactccgccagtgaccctggacagtaacaaaacatataaagcccgagcccaaaccccgccaccatcataggtaagcac

SEQ ID NO: 12785 - DNA, 31 bp, Homo sapiens
  chr20:10491693-10491724
  hyper
aacctggctttggtgccgtgttcttgtccct

SEQ ID NO: 12786 - DNA, 232 bp, Homo sapiens
  chr20:10653792-10654024
  hyper
ggactcaacatgattccggggcaaaaaaaaaaaaaaatgcacgagtgcggaagaaatccgacgacttcccggggggcaacagcggagcgaacgcgcccctgtccggcctggaggggtcaccctcaggaggcaggggctcccgtgggggagttggcgcgctcagcccaggtgcagccgctcgggcgcaggggcgaggagtcgggcgctcgagggctgccgagcctgctcgcgg

SEQ ID NO: 12787 - DNA, 536 bp, Homo sapiens
  chr20:10654668-10655204
  hyper
ccacctctacccagcacgccgggcagggcgcatgcgcgcttattaatattcatgagagggcgtgctcaccctgggcacgcccctccccttcacgttgctggggagggggtagtgcgaggaggaacttggaaggggttgggggcagcgggatgctcagggcggcgtagaagaaccagggccccacaccaacccccgccctcgggagcttcgggccaggagggaagggagagtgcggggaggtacttggaagggatcgttgctcagggacgcctggaggcccccagcggggaccgccccctcgggcgccccgggccgtgcgcctttgcccgcgcgtcggggccccaggtgtaggcgccgcggcgctgactgagcggtcggagcggggcagcttccgccttccgaaccgcctgcgtcagctgcggctttcgccccgggaggagggcctgcctgcccgccgggagttcggcccgcttcccgcgagcgagccgcccagagcgctctgctggcggcagaggcggcggcgaggctggcgcgct

SEQ ID NO: 12788 - DNA, 157 bp, Homo sapiens
  chr20:10655444-10655601
  hyper
aggctttgggaagggccggcggagatgctggtgggcttggacgccctccccggcccgacgccccggccgcagtgccgggattgcacctgtaggcggcctccgagcagctctctgggtggcaagagatgggcctgggagggaccgtgtccccagcacc

SEQ ID NO: 12789 - DNA, 30 bp, Homo sapiens
  chr20:11667840-11667870
  hyper
tcttcctctccctgcgccggaaacgtgcca

SEQ ID NO: 12790 - DNA, 179 bp, Homo sapiens
  chr20:11871147-11871326
  hyper
aggatgccctgtatcccgcacatccactctgccagtgcaagtgttcaataaatgcttaatacattcattgatgaatgacccagagagaaaaactgcagttcgtgggacaaggacgaagtggcctctcagagatgcgggagtgctggctctcctccaccctccccgccttctccaagccc

SEQ ID NO: 12791 - DNA, 66 bp, Homo sapiens
  chr20:11871661-11871727
  hyper
cgcccgggcaggggcgcgcgccctgcggccggccggaggggccgagcgaagcgaggagaggccggg

SEQ ID NO: 12792 - DNA, 271 bp, Homo sapiens
  chr20:11871950-11872221
  hyper
gacgcccgcggggtgcgcgaccccggaggtggcggaggtccaggcagggggcgcggtcgggaagcctcggcgcctagcaggtggcgggggccgcgcccctctcccggggaggcgcgcggtgggaagcggagcaaacttcccctaagtaactttcctgaggcgctgccggcggggactccggggaccgacgctccgggtttgcgcggcctcaggcgccgcgggaacccagcgagtggcggcgggcgatggcgggggcggcttcctcctgagg

SEQ ID NO: 12793 - DNA, 67 bp, Homo sapiens
  chr20:11872459-11872526
  hyper
agaccaagggagatcacggtgctttttcttttttaaatattccccgccacctcgccaaatcctgtaa

SEQ ID NO: 12794 - DNA, 30 bp, Homo sapiens
  chr20:12947867-12947897
  hyper
agctgaacagaacccagttctttctcttga

SEQ ID NO: 12795 - DNA, 30 bp, Homo sapiens
  chr20:13200967-13200997
  hyper
acgctcggactccgcgccctcagccggatc

SEQ ID NO: 12796 - DNA, 133 bp, Homo sapiens
  chr20:13201338-13201471
  hyper
gcccggctagcgggcggcccagcaagtgtcaagacccttcggaacgacactttggcactcctcctctcccccgactgcttcaggcaggggtcgcaggcagacgcatggcttgtccggcgccccctccgttttc

SEQ ID NO: 12797 - DNA, 30 bp, Homo sapiens
  chr20:13976824-13976854
  hyper
cggcctgggtgtcccgcggacaggtgcccg

SEQ ID NO: 12798 - DNA, 30 bp, Homo sapiens
  chr20:16553757-16553787
  hyper
ggccagggaccagccggtgacacttttaag

SEQ ID NO: 12799 - DNA, 30 bp, Homo sapiens
  chr20:17206931-17206961
  hyper
cttcccagccgcttcgctccggacctgcct

SEQ ID NO: 12800 - DNA, 30 bp, Homo sapiens
  chr20:17207322-17207352
  hyper
caatgacatcactccgccgccgctggcctg

SEQ ID NO: 12801 - DNA, 30 bp, Homo sapiens
  chr20:17207682-17207712
  hyper
tcgctctttctctccggtacacacagctcc

SEQ ID NO: 12802 - DNA, 111 bp, Homo sapiens
  chr20:17208545-17208656
  hyper
acagacgaggctggacgtttggacactgcaattcacctcggtgtttctcccaccccgcgccgggaggacttccctcccagggacttcggtccctgctcctctccgggaaca

SEQ ID NO: 12803 - DNA, 117 bp, Homo sapiens
  chr20:17208739-17208856
  hyper
cgcccacccctggagcgcacttctggttggctccctagttctcaactcccggctacaggagctggagaggtggattttgagggggattccctacggagaagtcgaggtgtcctctcc

SEQ ID NO: 12804 - DNA, 30 bp, Homo sapiens
  chr20:17429350-17429380
  hyper
atcctggagaaaaagtccacactagttgag

SEQ ID NO: 12805 - DNA, 58 bp, Homo sapiens
  chr20:17549961-17550019
  hyper
aagtaggtaaaaaatgcgggaggcgtccccgctgccgcggcccgcgactccgctcccg

SEQ ID NO: 12806 - DNA, 179 bp, Homo sapiens
  chr20:17661563-17661742
  hyper
aatggagaccccgaacgaaacaacttggtcggggtcaccctcgccagccggggcactctagagctaaaactcgcgacttatcattcggagaggggtccctgaagcactgcgggcgccccactggaagcgcagaccccggcctgcctcccctaatcagggcgcagcgggagagccggccg

SEQ ID NO: 12807 - DNA, 30 bp, Homo sapiens
  chr20:17949250-17949280
  hyper
cgagcagggcgccacgtgctcccccagagc

SEQ ID NO: 12808 - DNA, 14 bp, Homo sapiens
  chr20:18038152-18038166
  hyper
caggcccggccccc

SEQ ID NO: 12809 - DNA, 39 bp, Homo sapiens
  chr20:18038209-18038248
  hyper
cgggagctcatcccagctgcggaccgagacccccaggct

SEQ ID NO: 12810 - DNA, 226 bp, Homo sapiens
  chr20:18039722-18039948
  hyper
cctgtctgtaacctgaccctccgcgctcccagcctacagggcccgggaatcaacacagcggttttccctgttcccttccgccctgaatggcccttggggacacaaccgcctggtaacggatttctcggcgctactggcggactcgcgcggcgcagggagccggggcgcagctctgccggggctgcgggcgggaccggtgcgcggcgcctctaggtctgccctcaag

SEQ ID NO: 12811 - DNA, 30 bp, Homo sapiens
  chr20:19192660-19192690
  hyper
cctctgggaggcagcgtgtgtgcttcccga

SEQ ID NO: 12812 - DNA, 120 bp, Homo sapiens
  chr20:19673386-19673506
  hyper
tcaaatcctctttgaagattccggcgcgctgaccgacgatgctgagaaattccaccaggtggcgctgcgtccgctgacgctttattatcgggcgaaaacgtggaaaacagaagcccactg

SEQ ID NO: 12813 - DNA, 30 bp, Homo sapiens
  chr20:19738506-19738536
  hyper
agccaagtttgctccggcttagataaactt

SEQ ID NO: 12814 - DNA, 39 bp, Homo sapiens
  chr20:19739312-19739351
  hyper
cgaggtgcggaggtgcgggtgtgcgtgcgtgtgcaccgg

SEQ ID NO: 12815 - DNA, 134 bp, Homo sapiens
  chr20:19739431-19739565
  hyper
cgcgggtcagacccggtgtcgcacagctttgatccccagcgcggaccccactggtgagtccagccagtgtgcagggcagatgctccgaccggagatttcctcccccgggtggaaaagcaggagggttgttgtgt

SEQ ID NO: 12816 - DNA, 157 bp, Homo sapiens
  chr20:19739612-19739769
  hyper
cgggcggaggaggagccccggattcctgccgggaagggacggggccactttcccactttgaggcctccccgcccccttctgggcttggcctccacccttggcctgggctcccaccagctcggcgtccacccaccggcggtggcgcgcccctcgaccg

SEQ ID NO: 12817 - DNA, 193 bp, Homo sapiens
  chr20:20344443-20344636
  hyper
gtgggaggaaggggaaaggatcggggtcgccgcagcctttctggtcagtttcgctgggttttgtcagttccgtttgagaccgaggcgcacggactagcggccgccagcacctcacaggtggaggacacctcttgcgccccaaggtcaatgtcatcccgatgggtcccgtgccgtcctgactctccctgaccta

SEQ ID NO: 12818 - DNA, 489 bp, Homo sapiens
  chr20:20347220-20347709
  hyper
ctctgccctgtcccccgaagattctgccttttgtgtttcctcggggctgggctggacagaggatggaggcaggcggcccagtctgggtccaaacggaacggcagcggaggtgggggtgggggtgggggcggggggaatcttcgctgttgtctcttcctggtggcacaggggaggcggcttgtcctctcggaggcctcagcctgcctcagagtacagattgccccccctccccccgtccagcacgcgtctcttttgcgtccagattggccgcgaccggagctcaatagcaggaggttaatttccttcacaaaggtgaagggggcacggctccgtgggggctgcgcccagacaggcagcccctttatttcgcagcgccttgattggagcccttgatttagcatctgatgtcaaccggcaaacaaaatgcccgctcggaatgaaaatgcatgaggccgcgcggggaggagaaagccaacttcactggggcgc

SEQ ID NO: 12819 - DNA, 485 bp, Homo sapiens
  chr20:20347736-20348221
  hyper
cggccaactcgacccggattaaccgagccttggaccacgcggaagctccgggcggcctgggtcgggccccgccaaagatgccattcccaagcctccaagaacccaaaagttcagaaattcacgttcctctgggaacccagcccagcccgcccgcgctccaatcccgcgctttcgggagactgagaaggccgtgccaattccttctcaaactcgaaagaaaccttctctagccccgtgggcgcgcggaggctgcgagcacaaacatcgccctcggccactgccagaaggccgggccccctgtccacacttggaaccccggggaacccttttgcttggcctcttgggtccagcggcccatccgtccaaggtccgggcggaggccgtccggaccctgctgctctctcggattcttgtttatttcccaaacaccacgcggagccactgcgcctccgcaacgatctcccccgcaccgccccggcgcgccc

SEQ ID NO: 12820 - DNA, 1082 bp, Homo sapiens
  chr20:20348257-20349339
  hyper
cggctccggctcgcggattgaaccctcctgacatatttggggccattcttctcctttgttgctattttgctagcgacccgcgggtaatccccgcgcgggaggggggcgtgcattgtcgcgctgatggacgggcccatttggcggctccgcgccccccggaggagagacacaaagcccaggcacgtgcgcctccccatagagaagcagcagaccgtgaagggaggcggggccgggcgtgtgcctggaccgggcggggcggcggcgccgggcggggcgaccaggggcgcgcgcgggggccccgcgccctcaggtacatctgccgcacctaccgggcgacccccgagtcccggcccccttttggccgccccatcgccctcccaccctgccaggctgaggagctgcggacgcgctgattggctccaggggaagcgggaggcgagaacaatggccccctccccccgttaaaagggagcggctgccgggcccggggacagggacgcgcgtgcagggcgcagagctgggccgagccgtcgccggcgccacgcgagtcccgcagccgccgcgcccgggcaatgggccgggggcactgagggccgccggggccgagcgcggaggggggaccgagccagtgccgtgccctcgggccgcgccaacatgccccgcggcttcctggtgaagcgcagcaagaagtccacgcccgtttcctaccgggtccgcggcggcgaggacggcgaccgcgcactgctgctctcgcccagctgcgggggcgcccgcgccgagcccccggcgccgagcccggtccccgggccgctgccgccgccgccgcccgcggagcgcgcccatgcagcgctcgccgccgcgcttgcctgcgcgcctgggccgcagccacccccgcagggcccgcgggccgcgcacttcggcaaccccgaggctgcgcaccccgcgccgctctacagtcccacgcggcccgtgagccgcgagcacgagaagcacaagtacttcgaacgcagcttcaacctgggctcgccggtctcggccgagtccttccccacgcccgccgcgctgctcggagggggcggcgg

SEQ ID NO: 12821 - DNA, 1275 bp, Homo sapiens
  chr20:20349568-20350843
  hyper
gccaagaagcccaaggccatccgcaagctgcacttcgaggacgaggtgaccacgtcgcccgtgctggggctcaagatcaaggagggcccggtggaggcgccgcggggccgcgcggggggcgcggcgcggccgctgggcgagttcatctgccagctgtgcaaggaggagtacgccgacccgttcgcgctggcgcagcacaaatgctcgcgcatcgtgcgtgtggagtaccgctgtcccgagtgcgccaaggtcttcagctgcccggccaacctggcctcgcaccgccgctggcacaaaccgcggcccgcgcccgccgccgcccgcgcgccggagccagaagcagcagccagggctgaggcgcgggaggcacccggcggcggcagcgaccgggacacgccgagccccggcggcgtgtccgagtcgggctccgaggacgggctctacgagtgccatcactgcgccaagaagttccgccgccaggcctacctacgcaagcacctgctggcgcaccaccaggcgctgcaggccaagggcgcgccgctagcgcccccggccgaggacctactggccttgtaccccgggcccgacgagaaggcgccccaggaggcggccggcgacggcgagggggccggcgtgctgggcctgagtgcgtccgccgagtgccacctgtgcccagtgtgcggagagtcgttcgccagcaagggcgctcaggagcgccacctgcgcctgctgcacgccgcccaggtgttcccctgcaagtactgcccggccaccttctacagctcgcccggccttacgcggcacatcaacaagtgccacccatccgaaaacagacaggtgatcctcctgcaggtgcccgtgcgcccggcctgctagagcgcgccctccaccccggcccccgaactgtgccttcgcttggagacccacaaagagagtgcgccctgcactccccgaacccgagtccgcgctgggggagcctcgcccccgcccccaccgggtgaaagtgtcgtctccgcttctctcggtgtggcgtgacggtaaccccatactctccttttgactccttttggaacccccacttttacgttgtgtccctccgcctcccccatggcgcaacaggagtcagtctctttctgtacaagggagaaaagctgtacgcgtttgtctcgtggttggaagcctccccttggcggggagaagctttttttcttgctagtattcgctgtgttcatggtctagaaatgcggtctggtctcgcctcgcctaccaatctct

SEQ ID NO: 12822 - DNA, 31 bp, Homo sapiens
  chr20:20692668-20692699
  hyper
cagttcaatgtgtgcacgtgatgaccacttg

SEQ ID NO: 12823 - DNA, 30 bp, Homo sapiens
  chr20:20693478-20693508
  hyper
ccgagaaggcgcctcgaatcacaaaggagc

SEQ ID NO: 12824 - DNA, 400 bp, Homo sapiens
  chr20:21080556-21080956
  hyper
ctgaatcccctctctggcagccgcggagacaaaggtctccaggaataattggagatgtgcatggaatattaaattaatttactgctcttaattcttatgcaaattctgacctccgatggcgcctatcaattaccccgcccgcagtgaaagcgaaagcgacagtttcttctcttcgcttttttttcttttttaagaactcgaaaaaggaaatatttgcaataagcaggcggtagtagcacttcgtagctggaattatttaattgaatcttcaagtttttagggatgcccgtagaggataaaaccccagtgctcagcggagagggtgggaggggtacagggggcggaggaatctgttggtttgactgtacacctgcgggcggcggcaaaatacagccacgag

SEQ ID NO: 12825 - DNA, 816 bp, Homo sapiens
  chr20:21081028-21081844
  hyper
cgttagcccggggtttcaccgaagccggcgattcgaagggagtggcgtttccgcaaactgcatcgctaggggcccggcgtggaagcgcctctgcgcaactttcctccaccgctgcctacaagggaggctctggcttccgtttacttattttttaggagttttaacctttggttcctgcttttacaaccgctaaccccaaaaacattttttttttctttttgttctttgtaaaaccaaaccactatgctgtgcgttcatgttcaactctgttgaaatcccgggtgggccgaaataagatttaattgtctcctgcgtggagaagtgacacccactttttcccctgaattgagcaaacaccagggctttgtctgagcttgtggcttaaacgccgggcggtttctgcacccagttggtgggttgtaagacaggaggtttccaagtctttcatcatgtttctaacaaggaaaaccaaatcgggcccataatgtcatcagccccggcccgacctcgccgggacctcggcagcccgatgatgtcgctagcggccccggcgcagccacgacgcgccgcctttcagctcctcgcagtccccacaaaagccagacaacaatatcaattaatcatgcagcgggcaaacaaggagatttatcccgcgacaaacagccccaccgagagccgctgaatgggcgtgattagcatgtgaaaaggcgagcaaaactccgcggttcaacagctaaagagcaatttgatggggctgggatggggaaattacttgattagcgtccatcggaggagaacacggttacagcccctcgg

SEQ ID NO: 12826 - DNA, 29 bp, Homo sapiens
  chr20:21082094-21082123
  hyper
ggctctggcccggaaagagagtgacagag

SEQ ID NO: 12827 - DNA, 403 bp, Homo sapiens
  chr20:21082215-21082618
  hyper
cgggccccaggttggagtagccacgctagcggctaggccgttccaccgggtagctccgcccttccttttgctcaggcagctaactttggagccgggcaagacgtgttttcccgctccttcgaatttaaccgcccagtgcctgcctcctggaaaagctgtcacgattgggcttgggcttgggcttggccttggtcaagaaaggtttcctcggctgcgccaccgtggggatggaggtgggagttggaacacagccccctagctgagtgcaggggccagaggctggcgggggcacgcgggggtggttgggggcggagtgcggcgaggggtgagggcgcgaccgccttggggcaggggcggcgatggagtagctccgggctctccacggactcgattggacagcccc

SEQ ID NO: 12828 - DNA, 209 bp, Homo sapiens
  chr20:21083789-21083998
  hyper
gtccaaacgcgccaacgctgcaagcaatgtggcagggcacaccgaaatgcgtgtctcgcacacctgcccatctttccctgctcaacacgaaagcgccttgtggctctaagcgcttccttggggtggctggggctgtgcattttaattccaaagtcaagaggttgaaccatctcaaagttggcgggtggagggggcggtggcagggaact

SEQ ID NO: 12829 - DNA, 86 bp, Homo sapiens
  chr20:21084351-21084437
  hyper
ggtgaaatcaatgtgcgccaactcgcgctctggagacaggaaaaggtagcaccgctggcgtcctggcacgtcgagcgaacaatgcc

SEQ ID NO: 12830 - DNA, 60 bp, Homo sapiens
  chr20:21372362-21372422
  hyper
ccctcccgggagccccgcgagccggccgcacgcacaggatgggcgcggaaagccccttcc

SEQ ID NO: 12831 - DNA, 167 bp, Homo sapiens
  chr20:21377473-21377640
  hyper
cgcgcccgctcggccccaggacctcctaagccgcgcgcaccccgtcccgcgcccccgcgcccctcggctgtggcgggaaacgcctgagccgcccgcagccccgcgctcctggcccctctcacttgacgagtagcgtgggtccgggttggcgccgtaccagccggtgg

SEQ ID NO: 12832 - DNA, 753 bp, Homo sapiens
  chr20:21377737-21378490
  hyper
cgagacgccgggcggcatgtggtaggtggcggccgccgccgccgcagctgctgccgccgccgccgcggccgccgcgttgtgacccgccatggcgtgagaaggctgcatgcccgccacggtcgccgcctgcgaggagggcccaggtggcggcgcgcggtaggcggccgcggcccccaggggcgcccccaggccgggtggcgcgccgtccatggcgccgctgaacttcttgtaggtctcctcgatggggctcaggatgtcggacacggagaagggcgtcgtgtgctttgggctcaacgacatggctcggcgggcagccaggtaggggggcctggggcgcgcgccggcaggacgcggcggccgctcgtcgccgccacctcggccgcggcagctgagcctgtgacgaggagtcggcggctcggcgagccccccgggctgcgggatctggggtttattttagtccggcgccaggtttacgacagactcggggggcggagcaacatcccaaacgagcaaacaatggtcattgacatctttttctctcgcccccccaacccccgccccataatggaggcaaaaaaaggtaaaaggggcagttgggtgtttcttggaaagatcactccccgttgcttttcccatctttgcttttcccatcctttgcttttcccatccttcgctcctccatccgcggccgttaccccagccctcgagcaccagaaatagaaactcggaggctggcgtcgaggctagacatgg

SEQ ID NO: 12833 - DNA, 39 bp, Homo sapiens
  chr20:21378678-21378717
  hyper
ggctcttgggtcccaccgtaagagcgcataaagagagga

SEQ ID NO: 12834 - DNA, 741 bp, Homo sapiens
  chr20:21485918-21486659
  hyper
tgtagaggacacctcgcggagacatctcgagtcccgcaggtgtctgagctgcgctgcgcgccccagccgggaagccttttcttatccaaccgcgccgccccgcggaaagcctgggtactgcagacgccctcaccggcccaccgacagctggttttgaagcgggggcttagaaaagtaaaggggacagtgtttggagccacgatgcctttgatgtgaggcggttccacccaacaatcaacgaatcaagctggaactgcaggccctacttttgttggggggaggaccttaaggaatgtcacccccttgtcccctaccctctgccccacgcccagcctctcagaaggcaccaggcgtgagtagagtgcgaggcgtccacaccctcgtgtcccttccattcccggacacctttgcaccctagccgaggcctcagcacggagtgagggttgcctggggtgccctgctgtgtgtggggcgttcttgcctcccgggccctgaccccacggtctgggtcggcgaggcgtctctccctggcgtctggactgtgcgcctgccccgcttccaggcgacgaacggcaggagccgggggtccggcgggacccggatccagggcgggcggaaggcgagggtctctccttcccggaacccccgccccggaaacctgcaaccaaaccgggtccctcctccgcatcgctcccgcgctcccgggccgcctccccacgcgggcacccactctccgggccc

SEQ ID NO: 12835 - DNA, 131 bp, Homo sapiens
  chr20:21486785-21486916
  hyper
cggctgtggtctgtgcccaaacacgatggaaaccggggctgggacgggcggtggtacgcacgtggaggagaagaggcatggcgggaaaaccacagccgaacacaggtcgactcgcacctcccaggcacccg

SEQ ID NO: 12836 - DNA, 670 bp, Homo sapiens
  chr20:21486954-21487624
  hyper
cgccgccacctcttggcaccactcaccgggctccgacccgggccgcgagtccgctgatgcgcagctgcctccggcggctcccgggctctgcccggacccgcgcgcagagacgctcgggaacgctgggctcgggcgcctcctggcggcggcagcacgcggcacacgctcggttctccggcccgagggggcgcgtggagcgtacgcgggatccgcgcgcgggcctgggctgctggcccacatttccccgcttgctcggatggcggcgctgaggcctattcgcctctttattaataacgatgcctcgggagggaaaaaatagagcctttaaaaatcagagtgcgagagaggagtgtgtgtgtgtgtgtgtgtgtgtgtgtgtgtgtgtgtctcggggcgttggtgaaagcaataaaactcagatcgcttccttggcgagatagcggcggctataatgcgccggggggatcaggggtttatttgcagatcctggataaaagatgatatatcgacacggtttagagtgtcactgcgcttggcctctcagggagccacaagtacatatttcctgaaataccgcccagcacagtatctaatccgcccgccacttaacaccgggaggggaacttcagcagcgcacaagcgcgctcccggtttcctggttctgggtggg

SEQ ID NO: 12837 - DNA, 294 bp, Homo sapiens
  chr20:21490386-21490680
  hyper
ccagccttgatggtgcagcttcggagagaacagagatacaatttccaaatgcgccgacgttcagtccctcagcgtctgcagcacccgctgggctctgagctagagtcccaagtatttttagaaacccgcgagatagaggagaaaggctcatcctccagttggccaggcttcctaagacgctcccccgcgtggccaagtgtgcgccagcatctgccaaggagatcttcctccagcaacaagggtgggacggaatccgttccccgccggaaagatggatgcgcccttcccgggcgt

SEQ ID NO: 12838 - DNA, 93 bp, Homo sapiens
  chr20:21491252-21491345
  hyper
ccactcatagatttgggccagcgaggggggtttgctctcctcgcctttgcggctcccgaagtcacttttcctcccgtagccggacgctgccgc

SEQ ID NO: 12839 - DNA, 244 bp, Homo sapiens
  chr20:21492581-21492825
  hyper
ctggaccagggggtgtgctgtcgggtactggggggtgctggccgagctgtactgggcgttgtactgcatgtgctgcagcgactgcgcgctgtaggcagaaaagggaatgcccgcctggaaggtggcggctgccaggtcctgggctttgagcgcgtgacatggtttgccgtccctgaccaagacgggcacggccacccggcgcggcgagggcaggggcgtcacctccatacctttctcggcccgg

SEQ ID NO: 12840 - DNA, 1003 bp, Homo sapiens
  chr20:21492990-21493993
  hyper
cgctttcgcttcttgccggcgtcccccccgccgcccggggtctccttgtcattgtccggtgactcgtcggccgagggctccggggacttggagcttgagtcctgagggggcgccccggcagccagaccgtgcactggggggagggggagagagaagcgcgtcaggcgtctggaggccgcgcgcagcctgcaccagactcggagcaccctggatcctccgtgcgaccctggacctccgcgcctggcagcccagccccgctgcctttgccatgacccctgccttcctctacgcctgacgaagacgtcgggacctcccagggtaaagagggaaatccgtaggagtgggggctaggggctcgcctttcaaggggctcacatagtgtgggtgagaatttggggggggaagtggcactgaagatcatcgcgggttaagggctccggcgcccttaagcggtttcctctccggcgagacgtgggcagatttttaaaagaaataccccacaatcccagcattgatcggctcggccatttaaggcaggtttttgggggctttcgtttctgctttcgggccttctagacaccccctgcactgcacaaagcgtcctctatgatcgcgcagggggcagggtgagctatttatacccgggccacccgaagcctccccaccctccacccgtacccggacgaggctcgctggctacctccagggcgccaggccagtccctcccagcggccggagtccgggggctgcggctggagccatcggtccgggttgacatcatataccagcccctgggaggtatagcccttctccctctttctccttaacttctcgcattgaaaaaaattttggagaccaagttctttcccggaactaaggaggcttgaagaggagggcagaggacatcctatacaggtgttaaaaatctttctacggatccgagtgagggggtccgggcttacatggccccttcccctttcactcccagcgtccaacccgggct

SEQ ID NO: 12841 - DNA, 67 bp, Homo sapiens
  chr20:21494664-21494731
  hyper
tcggcgcgcggtggcggctggtggcgaggaaaaaatgggccattgcccgagcgatcagtccatataa

SEQ ID NO: 12842 - DNA, 30 bp, Homo sapiens
  chr20:21497165-21497195
  hyper
tttggatccaggggcgggagtgggcctgcc

SEQ ID NO: 12843 - DNA, 30 bp, Homo sapiens
  chr20:21497827-21497857
  hyper
tgggtctcagcttgcggtgtcctcttgtcg

SEQ ID NO: 12844 - DNA, 225 bp, Homo sapiens
  chr20:21498084-21498309
  hyper
ccatcacttctcgtccgtgtggttcccgcgtccatttccagagcgttaacatttgcaattgaaaaggcgctgggagaccgctgggaggtccgtaattgaaggggagaaactgggcttgttagtggaagatcataaaatgcaagtcccccaggagcggcctgtggacgccgggaggcctgcgcaggcccagctggcggccagggcaagtccggtgcccagagcaca

SEQ ID NO: 12845 - DNA, 210 bp, Homo sapiens
  chr20:21498726-21498936
  hyper
gtggtctggagacctcgtaggcactctgcaagatgcctcgttctgctgcatgcttggggaggaagttgagctgggtgctggaagttctgaacccagcatgccccgggccggaggagatttgcttggtgtctccttagcgtcccgaacaccgcgcgcccctgctggggtaacctgaacagctggacccctcaactcgatctttattatcag

SEQ ID NO: 12846 - DNA, 30 bp, Homo sapiens
  chr20:21500322-21500352
  hyper
caggagtactaccccgtgctgggacctttg

SEQ ID NO: 12847 - DNA, 78 bp, Homo sapiens
  chr20:21501281-21501359
  hyper
aacctagctttaagcccccctcgggccaaacgagcctgtcccagccaatccattatcaccggtttattggggaaccaa

SEQ ID NO: 12848 - DNA, 700 bp, Homo sapiens
  chr20:21501444-21502144
  hyper
cgtcagtgttgccttcaggaacgttctttcagccaagcccgaccttccccggatgagggcgatttcaatacgggagatctgggtttctccaggaaacacgcgctgaaagcactctcttatctgaatttacttcttaacacgtgacaaaatcattaccacaagactttggaaaacaagcggctctcctaacgggttgcattcagcacttaaagctgggtcgggcaggctgatgtgaaaagtagttgtcggtggcgcggagaaggcacgctcttagctggagctaagggctggttccgggaaggacagggaatgcacccttgggccctcgggcacagagagggggttcctagggctctgtctctctctctccaatgtgagccccagaggttcacaaccttcccctagacgcaacgtcccctttccacccccaagagccactaaagtcgagaaggcgccagaggagctccaaagggcctcctggtagtgtgtgcgtgtgtgttgtgggaggaggttggggcggagggggcgcccctcggagacaaggaccccaccgaggttcatttctgatcctctggcgatctctactgacacaaacgagaactgtccggcgccgggcgcggcccaggcgacactcgcctcccaaactccagtcttcagtcgcctctccagagacctcagtccactgcgcgggccctcagcc

SEQ ID NO: 12849 - DNA, 256 bp, Homo sapiens
  chr20:21502443-21502699
  hyper
cgctccgccttctactcccggagctgcggcgacagccccgccgcatttcaaggcgcgtctttatctagtactccacctacccggacccccctcgctctgcgcccttcccccaccgcgcgccctaccaggcggggctcaggggaccgcaggcggggaccgccgcgggtgccgcgcccctccctcctcctccgcctcccagccccgcaccttcccagcccctgggacagtcccgctttccctgaccgcaccggaaagt

SEQ ID NO: 12850 - DNA, 336 bp, Homo sapiens
  chr20:21502837-21503173
  hyper
cgcacttgcccacctgctgcgtccggactacgcggcttggggatcgagccgagtcaggacccgggagagcgaggggctcataaccggggtccgccgtgaacccgagctccggcgccgctcggcggcgacgacggtgccccgagacccctctctgctggcaggccgcggtgaccgtgcccggagcgcgttcccgcgccgggcggctgtggcaggaggaccagacagtcagcgcctggcagcgagggcgacgccgggcttcctccatcgccaccgccgggctccgctgcggctcccgggctccgccgggtgccccgcgccatccccatcccgcgttca

SEQ ID NO: 12851 - DNA, 350 bp, Homo sapiens
  chr20:21503594-21503944
  hyper
agggggcttccaccccgcctcggccccctgcccccaaacgcgcgggtagattccctccctcctgcgcccctctgagcaggagatctgggaccccaggtttctcctgaccctcgcccctcctccgtccccagcagtgccttggactccgcagctcctggcgagcccggactgctggttaacaaggtcgccatctataaattgctcggtcgctaagacgccataaaaccaaagggccagatgtggcacgttatttatgtgtgaaaccgcgtttacactagatacgcggatccaaggccgatagcacgacttcgcgggaggtcacagacctctcgccccggctccaggctcct

SEQ ID NO: 12852 - DNA, 30 bp, Homo sapiens
  chr20:21681907-21681937
  hyper
agtggccagtgtcagcggaaacggtgctcc

SEQ ID NO: 12853 - DNA, 16 bp, Homo sapiens
  chr20:21682361-21682377
  hyper
cgcggagtttcgttgt

SEQ ID NO: 12854 - DNA, 30 bp, Homo sapiens
  chr20:21684123-21684153
  hyper
cggctttatttcctcgtctttagagtgtgc

SEQ ID NO: 12855 - DNA, 1176 bp, Homo sapiens
  chr20:21686206-21687382
  hyper
gggggcgctggggcgcagtgacgggaaccaatgagctgccaactcgcgcgtctccggcgtgactgccgagattgacgtggaggacacgtcaaattgattcccgcacgctgcagcctcccggtcagacgaatttctcccaatcggatgaagttcaccctgggcctggggtcgcgggcgtggagagtgtcctgggagggggcagcagcggcggcggcaggccctggagcgggcggcagcgcgctccgctgccgcgcacagcgcgtctccagcccgcggctgggccgccgcggctctcggctctcgggcgccctccctctatgcctctcacgcggcggcggcggcgcccaagctctcccggactgcgccgggcccagccccggccaccccggccaccccggcgccaggcagctggccggcccgctcgctatgggtaaggggcgggcgacaggcagggctcgggagggctgatgaggtgggtcgggtccgcctgcctcccttccctctcgtccgctttccctgggcgacccagtcctgggtcctggagaagctgcattctcctctgatccccagccttcagggggcagttgagcaagtctgggaagggagtgttccaagtagacgcgctaaaagtcgcgaaagggcacggagggctacaatgcgccgcgctccactccgcggctcctctgcgcccttgcccactccaagccagacccaggcggtttgcccttggactccgagctgtctggggacccacaggtcacctttggaagtgcgcctgggtgcagtccctcgctccgcgtggggacccttggctaacccgccgggtgttttctccccctccggctcactcttgtctggcgcatccgcagagcagacgtatggcgaggtgaaccagctgggcggtgtgttcgtcaacggccgccccctgcccaacgccatccgcttgcgcattgtggagctggcgcagctgggcatccgaccctgtgacatcagtcggcagctccgcgtatcccacggctgcgtgagcaagatcctggcgcgctacaacgagaccggctccattctgcccggggccatcggggggagcaagccccgcgtcaccactcccaacgtggtcaagcacatccgggactacaagcaaggagaccctggcatctttgcctgggagatccgcga

SEQ ID NO: 12856 - DNA, 45 bp, Homo sapiens
  chr20:21687755-21687800
  hyper
cgggcaggcttgcaggagaggactcacactcgctctcctcccggg

SEQ ID NO: 12857 - DNA, 30 bp, Homo sapiens
  chr20:21690021-21690051
  hyper
gtagctgtgcatggcggggaactcgcggca

SEQ ID NO: 12858 - DNA, 30 bp, Homo sapiens
  chr20:21694292-21694322
  hyper
gaaaaacaggcttgcgcaatcgtggcgtca

SEQ ID NO: 12859 - DNA, 240 bp, Homo sapiens
  chr20:21694602-21694842
  hyper
ccccctgcccacagcgagctccgagccgcgggtgtcagcggactcgacgcattggctgctcttcgcacttgtgcgggcgcctggggtttggaaagggtgagggtccgcgcaacgttagagtcctgttcccttctgcggaagtcgccatcagacctgaaaccttcccagccctctgcgcccttcacttcctttactgagcaggtggtgagggggttggacggcaacgggaattgcacctgg

SEQ ID NO: 12860 - DNA, 30 bp, Homo sapiens
  chr20:21695758-21695788
  hyper
tggtccatccctgtcgttccttctctctct

SEQ ID NO: 12861 - DNA, 30 bp, Homo sapiens
  chr20:21696452-21696482
  hyper
cttctagagccagccgcaagagctgtgagc

SEQ ID NO: 12862 - DNA, 494 bp, Homo sapiens
  chr20:22557360-22557854
  hyper
ggcccccaaagcattgaggagcggcttctctttatgaagctggggagaaggcgggcgataaagattgggcgtttaaattggccatttggaagattacatctcttcagcgagggtctttctttcaaaactcgcactgaattaagggtcatggctactccgtacccggctctcaaaggcacggcacctttgaattaggttgcggagtggcctgggcgaggggacccggggccatcaaaggcccgagggaaggccgtggggcgacacccgtctaatgacaagtaattgaaggattcgacgccgcgcattaccagcggaacgggaggcattaattatttaaaaacgattagccttgccgtgtgtcctgcaggcgtcccatcatgttcagcgaagataaccagccacccgaggcgagccggggctcggagggcggcgggcgcgctccccagcaggcttcgggtgcggtggacacgggcgcacagcccaaggcaccaggg

SEQ ID NO: 12863 - DNA, 30 bp, Homo sapiens
  chr20:22558819-22558849
  hyper
ccccagacccgagccgctcgaggggcctgt

SEQ ID NO: 12864 - DNA, 37 bp, Homo sapiens
  chr20:22559324-22559361
  hyper
ttttaccaagatatcgatcagcgttataaaattcagt

SEQ ID NO: 12865 - DNA, 221 bp, Homo sapiens
  chr20:22559661-22559882
  hyper
gttatctcggaacccgggctaggggagggatttaagcgggaggggggcgtgaaagacacaagaagcacagaaaagcctccgaaagcgcctgctccccgacatcctttttatgtattcggacagaactatatcttatcggccgggatcagtgaaggggggcgcgctaagtagtttaaaacgaccctcgcacaatgggcgtgccatacgaaacatagcaggtt

SEQ ID NO: 12866 - DNA, 30 bp, Homo sapiens
  chr20:22562722-22562752
  hyper
ttgttgatggagaacgggtggttgaaggcg

SEQ ID NO: 12867 - DNA, 177 bp, Homo sapiens
  chr20:22563458-22563635
  hyper
ggctcatggagttcatgttggcgtagggggccaggccgcccatggccccggccgcctgccccccgagcgggctcaggctgggactcaagtgcggccccatgcccgccacgccggccgccccggccgagccgcccatgcccgccatggcgcccgcgccgggggacatccccgccaggg

SEQ ID NO: 12868 - DNA, 726 bp, Homo sapiens
  chr20:22563663-22564389
  hyper
cgacatgttcatggagcccgcgctcatgttgcccgagccgctgcccatggcggccgccgacatgctcatgtacgtgttcatgccgttcatccccaggccggcgttcatgttgctcacggaggagtagccctgcggacagagccccgggagggaggcgacagcgttagcaccgcggctggagggtgcccagacctcccacccaccgcccaggcctccgcgtccggggaggcctccggggagccctttcgtccccgatggcccagtctccggactccgagtctgtttcattcagggagagtcatgatcgatcgcccttgggaaggtggcgagcggattgctgcttgggcatgtggcccgttcctagcccttctccacctcgcccagattctagaacaggggtcccatggagtactcccaagccagcaccccaaatacattcccctaccccagagtctccccaaactctcccaccagcatactgagctggcgccgaggcccgaagtccccggacgccacctccggtcgcagcaagcaacctgcgggacaacgcgcggggcgcctcgggctgcctccagcgaagactgtcccgggccccctctgtccggtctccctccagggaccccctcccttgtcccagggaaactgcaaggcagtgcctgtgcggagtgcgggggcggctggaggcactgaacggggcaatagggaaagaaccgagacctgaaccac

SEQ ID NO: 12869 - DNA, 331 bp, Homo sapiens
  chr20:22564637-22564968
  hyper
atctcaaggctaacagtgtgtcgtataaaaaagagacccatttgattccaaggagggcggaaaaggcggctgcccagaaaggctggggttgtggggcggggtgggggggtgccagcgagggaagcggtcctgaggttggggaaggagcgagcgccgccgctccacttccccctggaaaagacgagcgcttacctcgggctctgcatagtagctgctccagtcggacggctcgtgcccttccatcttcaccgctcccagcatactggaagccgagtgcatggcagtttaaaatttaacagccacaacaaacgaccagcaatcaccccccacc

SEQ ID NO: 12870 - DNA, 341 bp, Homo sapiens
  chr20:22565866-22566207
  hyper
gccaatttgcaaagcgctgtcctatttagaaaaactacgtacacacctttaactcgcccgctgctgctcctgcgaggcccctccctgttacagttcagacccggaacggcctcgggagaagcgcggggcgcacggtctggccgcctcggctctccgactcctcagacaccggccgccagggacccgcagtggggcggccggcgcctggcgcaagcagcccctctagcagcggccgacggttgggaggctgagatttgtctctgatattcaggccggcgtgtttcaaggttacttttcagtcacaaccgaggtgcccacagcatttcgtaactaaaacaaac

SEQ ID NO: 12871 - DNA, 154 bp, Homo sapiens
  chr20:22567410-22567564
  hyper
caccacagcactattggtggccggggtcagggacaccagagagcgctcggcgggggcttccacagtgacagggcgccccctgtcggccgccaggcccgcgggaccgacccgagtcctcatttacccccgcgatcccaaccccgcagctccggca

SEQ ID NO: 12872 - DNA, 38 bp, Homo sapiens
  chr20:22567605-22567643
  hyper
cgccttcggggggactcggcctttttggagccccaacc

SEQ ID NO: 12873 - DNA, 110 bp, Homo sapiens
  chr20:23029121-23029231
  hyper
acagcgctgcggacacggactgggctccagtatgcagtcatccacgtcctcgcaccggtgttggtcggccgccagccggtagccggtctcgcacatgcacgagtaggagc

SEQ ID NO: 12874 - DNA, 497 bp, Homo sapiens
  chr20:23029588-23030085
  hyper
cggcgccgggctccacagccagtggcctgcaggtggctgggaagtggaactcgcagaggaagccatcggccttcacttcgcactgctgctcctcccagatcggctcgctgggcacagtggcctcagcagcggagacagcgacgcacaacgggccgcagaggggagccccattgaggtcgagccgtgcccacctgctatagctggtgttgttgtctcccgtaacccactggaagccgcgcaggggcccgaggcgcttggggtcgccgcagccgggtggcagctgcaggccgatccagaggcgccggcggccaacgccgccgtcgccgttcagtagcaaggaaatgacatcggcagccaccgaggagcgcactgtcattaggtggccccgcagtccgtcgcagatctgactggcattgaggaaggtcgcggggcccgggtagagcgcgaagcagtcgtgctcgacgcactggctgccacccggctgcggctctgcgggt

SEQ ID NO: 12875 - DNA, 328 bp, Homo sapiens
  chr20:23030291-23030619
  hyper
cgaggcagcctctgacatgcggatcggccagggctcgagtttataagtgcccggccctccctccctggacgttcgggaaaaggaaggaagtgcctggtgggaagggctgatgccgcatactcggattgctgggttctctggccgcccttgcgcccgccctcgcgcatgggatcacctcgccgggatgagtaaaccctgccctggcgcagggaggttctcgggcggggccgacaggggcaggcgccagggaaggccagcacccctgtaacaagacgactgtccccgcccaccactcgggcccccacgcgtgcagccctctttcatctct

SEQ ID NO: 12876 - DNA, 30 bp, Homo sapiens
  chr20:23030848-23030878
  hyper
cagctggatcctgtccgcggccaaggtgcc

SEQ ID NO: 12877 - DNA, 30 bp, Homo sapiens
  chr20:23031231-23031261
  hyper
accccccaggggagcgcgcaggatcccagc

SEQ ID NO: 12878 - DNA, 30 bp, Homo sapiens
  chr20:23338902-23338932
  hyper
gcggctccagaaggcggggagaggcggggc

SEQ ID NO: 12879 - DNA, 30 bp, Homo sapiens
  chr20:23618040-23618070
  hyper
ggacctgacgtgtccgtgcggttccaggcc

SEQ ID NO: 12880 - DNA, 172 bp, Homo sapiens
  chr20:24449759-24449931
  hyper
cgggcagcaaattcctgtcctcctagtcccccgcagctatcccccgcccccagcctctgtggccctcacattgtcagacactggccgcgggccaccatctggacgcgatcccccgctagggcctccctggtctgggccaaagttggtggccaccttcgcgcgggctgcgccc

SEQ ID NO: 12881 - DNA, 30 bp, Homo sapiens
  chr20:24450346-24450376
  hyper
ggcggccgcttgggcgcacttgccgggtca

SEQ ID NO: 12882 - DNA, 20 bp, Homo sapiens
  chr20:24450683-24450703
  hyper
gtgccttgccaccccgggag

SEQ ID NO: 12883 - DNA, 120 bp, Homo sapiens
  chr20:24451413-24451533
  hyper
ggggtttcgttgcacgcagaggcttgggcgcttggcacccagacttcaggtgcgcacagtcctcctgcgacgtcagatgcgctggcgccgcggcgctcctggctcggaccgatgcctgcg

SEQ ID NO: 12884 - DNA, 31 bp, Homo sapiens
  chr20:24564177-24564208
  hyper
ggcagggtggccctggcgtttggaagagttg

SEQ ID NO: 12885 - DNA, 31 bp, Homo sapiens
  chr20:24638561-24638592
  hyper
ttccagataaatagttcgggaggcagccagt

SEQ ID NO: 12886 - DNA, 438 bp, Homo sapiens
  chr20:25058267-25058705
  hyper
cccccacctcctacaacacctcgagccgtgcgatcccgggggcccttccttacccaggagccagggcgcgcaggagcccagcaggccgccctcggcggagttgagcacggagtctggcagcgggatgcagtggcgcaccatggccccgtacagcccgtactcggccatcacgctgctgccgccccagcgcttctcccgcttgcgccatttggccctgcggttttgaaaccagacctggttggaggcaggagaagcagaaggcacacagaagagacagtgaagaggggcgcctggaggagcggaggcggcgtcccagggctcggatcttctctcccgagcatgatcccatgctatttctgaaggaaatagctcccgagggccaaccagccgccctcagggagagcgcccaggagcccccagcagcgcccacgtgcggtc

SEQ ID NO: 12887 - DNA, 72 bp, Homo sapiens
  chr20:25062239-25062311
  hyper
gtctgtgacccctgcgcggctcagagcctaggggacaggggcaggagcggaaagcgcgggcctgattaccgg

SEQ ID NO: 12888 - DNA, 30 bp, Homo sapiens
  chr20:25064112-25064142
  hyper
aaacaaggggcttccgataaggataattac

SEQ ID NO: 12889 - DNA, 30 bp, Homo sapiens
  chr20:25065192-25065222
  hyper
agcgtcaagttatacgggcgcttcactcag

SEQ ID NO: 12890 - DNA, 166 bp, Homo sapiens
  chr20:25129464-25129630
  hyper
cgcccatccccgtgcgcacgtgttcgctgtgctagccccgtgcgagctgagctgccgttagagtcggtagattacagcgaagctgcagtcagcagctcgtctgcctggccctgcacaccgtgagactcgaggcagtgcccgggacgggaccacctggggaagagag

SEQ ID NO: 12891 - DNA, 84 bp, Homo sapiens
  chr20:25228117-25228201
  hyper
ggctgcctcgcgccctcgggaacgggcgtctccagctcgctggcagctggttttctccacgtctgtcatcggcctggagtggca

SEQ ID NO: 12892 - DNA, 30 bp, Homo sapiens
  chr20:25370882-25370912
  hyper
ccaggagtgcctggcgagagggccggagca

SEQ ID NO: 12893 - DNA, 16 bp, Homo sapiens
  chr20:25565652-25565668
  hyper
gggcctcgaccagacg

SEQ ID NO: 12894 - DNA, 316 bp, Homo sapiens
  chr20:25565825-25566141
  hyper
gtcgggaaaccgggttttcaagcgttcggcccagcgggcgctgtattttagggcgtgacccccgccccgccctcgagggcgaccggaagagcaggcaccacagcagatgcgccgagtctgcgccccgcaccgcgaggagcacccgaggccgcgctcccggagccgggtctggtgactaaggcgcgggtcgcgacgcaggggcggccccggactctcgaccccaccagccgcctgaatgtcccgccggacgcccgggccggctcacctgggaggcgcctccgccgtccgcccgcgcggggccaggagcgcggcacca

SEQ ID NO: 12895 - DNA, 1267 bp, Homo sapiens
  chr20:30192833-30194100
  hyper
tccttccagaggagcccagtgcggccctcgcctctacccgctgccctgcccggtgccctgccaccgacccacccttgctgttctgaaacccgggtcgtctttccacactgcgagcaggcactagacgagcaggaggctggacctaggagcgcgggtcacgcccccatgccgcccattggctgcttttgaacgttctgagcccgcccctccgggggccgtggcgtgtttataaaagacaagctgtggctccgcactctcattccacgttcttaactgttccattttccgtatctgcttcgggcttccacctcatttttttcgctttgcccattctgtttcagccagtcgccaagaatcatgaaagtcgccagtggcagcaccgccaccgccgccgcgggccccagctgcgcgctgaaggccggcaagacagcgagcggtgcgggcgaggtggtgcgctgtctgtctgagcagagcgtggccatctcgcgctgcgccgggggcgccggggcgcgcctgcctgccctgctggacgagcagcaggtaaacgtgctgctctacgacatgaacggctgttactcacgcctcaaggagctggtgcccaccctgccccagaaccgcaaggtgagcaaggtggagattctccagcacgtcatcgactacatcagggaccttcagttggagctgaactcggaatccgaagttggaacccccgggggccgagggctgccggtccgggctccgctcagcaccctcaacggcgagatcagcgccctgacggccgaggtgagatccagatccgaccactagatcatccttataccgacggggaaacggaggccagagagggcgtgggcgcttgcaccacttccgtcccatccttgcgggtacctggctatgcgggggtgcctaaggagcctggaaaaagcgctcccccgtcgtgcttcctggggaagggggcgttcgctgcgctcggagcggcgtcccttccaacccgccggtctcatttcttctcgttttcacaggcggcatgcgttcctgcggacgatcgcatcttgtgtcgctgaagcgcctcccccagggaccggcggaccccagccatccagggggcaagaggaattacgtgctctgtgggtctcccccaacgcgcctcgccggatctgagggagaacaagaccgatcggcggccactgcgcccttaactgcatccagcctggggctgaggctgaggcactggcgaggagagggcgctcctctctgcacacctact

SEQ ID NO: 12896 - DNA, 304 bp, Homo sapiens
  chr20:30196328-30196632
  hyper
agacccagcccatctggaggccggctccgcggcggcctgggagcgtttccatcagctgggcccgaggaatgcggagctatttaacctgagcatccccaggtgtacggaggcgcctggctgtctggggcccgcagcctttggcacagccgcgctagacaaacagcgcgccgcccccgccctgcccctccgcccccagctgcagccgggcctgggaaccggcgggcgccggcggcttgcataagaggctccgggcctcgcagagggaggggggacagaggccaccggtgtgtgtgcatgtaacaca

SEQ ID NO: 12897 - DNA, 30 bp, Homo sapiens
  chr20:30327414-30327444
  hyper
gctaataacggtaacgataattattgttat

SEQ ID NO: 12898 - DNA, 30 bp, Homo sapiens
  chr20:30457819-30457849
  hyper
gggacacatgcagacggagagcaggactca

SEQ ID NO: 12899 - DNA, 36 bp, Homo sapiens
  chr20:30458088-30458124
  hyper
ccggggaggctgcgcggggcccgccccctaccttgg

SEQ ID NO: 12900 - DNA, 54 bp, Homo sapiens
  chr20:30458609-30458663
  hyper
tccggctctgcctggacgtccctgcgggccccgggggaaagcacccaacttctc

SEQ ID NO: 12901 - DNA, 70 bp, Homo sapiens
  chr20:30458690-30458760
  hyper
cggggctggactttgatcgccgagggctctctgctcttcagagtctgcttggaacgggataagtgggtaa

SEQ ID NO: 12902 - DNA, 174 bp, Homo sapiens
  chr20:30555513-30555687
  hyper
gttactggggggcccgcccaagtcccccagctcctttcttccaagtcccccacccacccccccgtcagacccaggccactggaggtgaacacaggagaaaaacgaagtggagagaatgggaagggggaggcgataaacaaaaaagaaggaagtgcagtccgaggggagatgaga

SEQ ID NO: 12903 - DNA, 571 bp, Homo sapiens
  chr20:30555944-30556515
  hyper
ccggaagtcgctccccgcctccctctccgccaacatggccgcgaagtcggatggagcggcggcctcggccagcccggacccggagggggctgccggtggagcccggggcagtgccggcgggcgcggggaggcggcggcggcggccgggcccccgggggtcgtcggggcgggcggcccggggccgcgctacgagctgcgggactgctgctgggtgctgtgcgcgctgctcgtgttcttctccgacggtgccacggacctgtggctggcggcctcctactacctgcagaatcaacacacctacttcagcctcaccttgctgttcgtgctcctgccctcgctggtcgtgcagttactgagcttccgctggttcgtctacgactactcggagcccgcagggtccccgggacccgccgtcagcaccaaggacagcgtagccggcggagccgccatcagcaccaaggacagcgccggcgccttccggaccaaagaaggcagccccgagccgggtccccagcctgcgccctcctcggccagcgcctaccgccgccgctgctgccgcctctgcatctgg

SEQ ID NO: 12904 - DNA, 8 bp, Homo sapiens
  chr20:30946145-30946153
  hyper
acacaccc

SEQ ID NO: 12905 - DNA, 111 bp, Homo sapiens
  chr20:30946218-30946329
  hyper
cggtcctgtctcagtccctcagcagagcgggaaagcggaggccggagccgtgacctctgaccccgtggttatgcggagccgccgcattccttagcgatcgcggggcagccg

SEQ ID NO: 12906 - DNA, 290 bp, Homo sapiens
  chr20:30946345-30946635
  hyper
cgactgacgcagcgcgggcgcgtggagccgccgccgcccctcccccaccgccgctctcgcgccagccggtccccgcgtgcccgccccttctccccggccgcacccgagacctcgcgcgccgccgctgccacgcgccccccccaccgccgccgccgccccagccccgcgccaccgccccagcccgcccagcccggaggtcccgcgtggagctgccgccgccgccggggagaaggatgaaggacaaacagaagaagaagaaggagcgcacgtgggccgaggccgcgcgcctg

SEQ ID NO: 12907 - DNA, 84 bp, Homo sapiens
  chr20:30954185-30954269
  hyper
ggtattagaaaactactcggatgctccaatgacaccaaaacagattctgcaggtcatagaggcagaaggactaaaggaaatgag

SEQ ID NO: 12908 - DNA, 30 bp, Homo sapiens
  chr20:30955515-30955545
  hyper
cactttgcctatagaaggtaaatgagtccc

SEQ ID NO: 12909 - DNA, 110 bp, Homo sapiens
  chr20:30956816-30956926
  hyper
gtgggacttcccctctcgcatgcctcaatgctatgctacattccaattcaagaggaggagaggggttgttttataaactgcctggccgaatcagccttttcacgctcaag

SEQ ID NO: 12910 - DNA, 387 bp, Homo sapiens
  chr20:30959965-30960352
  hyper
ggtgtgagccactgcaccaggccccttcatcttaattttaatatatctttgaataaacaccattgtatgaacctgctgtaagcttgggagtggtctgttagtctacagcttgtgtctgagatgtgctaattgaatatttgctcagtacctcatcttaactgcctttggctttatgttgcttatccttcatagtatcttgttcattggccttttacatccataggcatcacttctctgatattcgttgtgctcttttaatggattaatggtttgcttggttggttcctctagttagactgtaaactccttgagagcagagtctgtattttattaattacccacagtactaggtacatagttgccttcaataaatatatatttaatgaa

SEQ ID NO: 12911 - DNA, 296 bp, Homo sapiens
  chr20:31015929-31016225
  hyper
gaaggatgccctgcagtggtctcgccatccagctacagtggagggagaggagccagaggacacggctgatgtggagagctgtgggtctaatgaagccagcactgtgagtggtgaaaacgatggtaaggaccctttaatggatgggtgagggagccacagcaggcactagggactaacctttattttcctctcttccagtatctcttgatgaaacatcttcgaacgcatcctgttctacagaatctcagagtcgacctctttccaatcccagggacagctacagagcttcctcacag

SEQ ID NO: 12912 - DNA, 105 bp, Homo sapiens
  chr20:31017139-31017244
  hyper
ggcgaacaaacaaaagaaaaagactggggtgatgctgcctcgagttgtcctgactcctctgaaggtaaacggggcccacgtggaatctgcatcaggtatgtgtaa

SEQ ID NO: 12913 - DNA, 154 bp, Homo sapiens
  chr20:31017702-31017856
  hyper
gggttctcgggctgccacgccgatggcgagagcggcagcccgtccagcagcagcagcggctctctggccctgggcagcgctgctattcgtggccaggccgaggtcacccaggaccctgccccgctcctgagaggcttccggaagccagccacag

SEQ ID NO: 12914 - DNA, 360 bp, Homo sapiens
  chr20:31019122-31019482
  hyper
ggtcaaatgaagcgcaacagaggggaagaaatagattttgagacacctgggtccattcttgtcaacaccaacctccgtgccctgatcaactctcggaccttccatgccttaccatcacacttccagcagcagctcctcttcctcctgcctgaagtagacagacaggtgcacatgggcagcctcccctttgcctctctctgggtgggcttctgttctcttttaagtttatttattaggatttttttcccccttgatccttctaggtggggacggatggcctgttgcgtctcagcagcagtgcactaaataacgagttttttacccatgcggctcagagctggcgggagcgcctggctgatg

SEQ ID NO: 12915 - DNA, 107 bp, Homo sapiens
  chr20:31020681-31020788
  hyper
ggtgaatttactcatgagatgcaagtcaggatacgacaggaaatggagaaggaaaagaaggtggaacaatggaaagaaaagttctttgaagactactatggacagaa

SEQ ID NO: 12916 - DNA, 635 bp, Homo sapiens
  chr20:31021085-31021720
  hyper
ggctgggtttgaccaaagaagagtcattgcagcagaacgtgggccaggaggaggctgaaatcaaaagtggcttgtgtgtcccaggagaatcagtgcgtatacagcgtggtccagccacccgacagcgagatgggcattttaagaaacgctctcggccagatctccgaaccagagccagaaggaatctgtacaaaaaacaggagtcagaacaagcaggggttgctaaggatgcaaaatctgtggcctcagatgttcccctctacaaggatggggaggctaagactgacccagcagggctgagcagtccccatctgccaggcacatcctctgcagcacccgacctggagggtcccgaattcccagttgagtctgtggcttctcggatccaggctgagccagacaacttggcacgtgcctctgcatctccagacagaattcctagcctgcctcaggaaactgtggatcaggaacccaaggatcagaagaggaaatcctttgagcaggcggcctctgcatcctttcccgaaaagaagccccggcttgaagatcgtcagtcctttcgtaacacaattgaaagtgttcacaccgaaaagccacagcccactaaagaggagcccaaagtcccgcccatccgg

SEQ ID NO: 12917 - DNA, 4889 bp, Homo sapiens
  chr20:31022233-31027122
  hyper
gattcaactttcacgtatcaaaccaccctgggtggttaaaggtcagcccacttaccagatatgcccccggatcatccccaccacggagtcctcctgccggggttggactggcgccaggaccctcgcagacattaaagcccgtgctctgcaggtccgaggggcgagaggtcaccactgccatagagaggcggccaccactgccatcggaggggggggtggcccgggtggaggtggcggcggggccaccgatgagggaggtggcagaggcagcagcagtggtgatggtggtgaggcctgtggccaccctgagcccaggggaggcccgagcacccctggaaagtgtacgtcagatctacagcgaacacaactactgccgccttatcctctaaatggggagcatacccaggccggaactgccatgtccagagctaggagagaggacctgccttctctgagaaaggaggaaagctgcctactacagagggctacagttggactcacagatgggctaggagatgcctcccaactccccgttgctcccactggggaccagccatgccaggccttgcccctactgtcctcccaaacctcagtagctgagagattagtggagcagcctcagttgcatccggatgttagaactgaatgtgagtctggcaccacttcctgggaaagtgatgatgaggagcaaggacccaccgttcctgcagacaatggtcccattctgtctctagtgggagatgatacattagagaaaggaactggccaagctcttgacagtcatcccactatgaaggatcctgtaaatgtgacccccagttccacacctgaatcctcaccgactgattgcctgcagaacagagcatttgatgacgaattagggcttggtggctcatgccctcctatgagggaaagtgatactagacaagaaaacttgaaaaccaaggctctcgtttctaacagttctttgcattggatacccatcccatcgaatgatgaggtagtgaaacagcccaaaccagaatccagagaacacataccatctgttgagccccaggttggagaggagtgggagaaagctgctcccacccctcctgcattgcctggggatttgacagctgaggagggtctagatcctcttgacagccttacttcactctggactgtgccatctcgaggaggcagtgacagcaatggcagttactgtcaacaggtggacattgaaaagctgaaaatcaacggagactctgaagcactgagtcctcacggtgagtccacggatacagcctctgactttgaaggtcacctcacggaggacagcagtgaggctgacactagagaagctgcagtgacaaagggatcttcggtggacaaggatgagaaacccaattggaaccaatctgccccactgtccaaggtgaatggtgacatgcgtctggttacaaggacagatgggatggttgctcctcagagctgggtgtctcgagtatgtgcggtccgccaaaagatcccagattccctactgctggccagtactgagtaccagccaagagccgtgtgcctgtccatgcctgggtcctcagtggaggccactaacccacttgtgatgcagttgctgcagggtagcttgcccctagagaaggttcttccaccagcccacgatgacagcatgtcagaatccccacaagtaccacttacaaaagaccagagccatggctcgctacgcatgggatctttacatggtcttggaaaaaacagtggcatggttgatggaagcagccccagttctttaagggctttgaaggagcctcttctgccagatagctgtgaaacaggcactggtcttgccaggattgaggccacccaggctcctggagcaccccaaaagaattgcaaggcagtcccaagttttgactccctccatccagtgacaaatcccattacatcctctaggaaactggaagaaatggattccaaagagcagttctcttcctttagttgtgaagatcagaaggaagtccgtgctatgtcacaggacagtaattcaaatgctgctccaggaaagagcccaggagatcttactacctcgagaacacctcgtttctcatctccaaatgtgatctcctttggtccagagcagacaggtcgggccctgggtgatcagagcaatgttacaggccaagggaagaagctttttggctctgggaatgtggctgcaacccttcagcgccccaggcctgcggacccgatgcctcttcctgctgagatccctccagtttttcccagtgggaagttgggaccaagcacaaactccatgtctggtggggtacagactccaagggaagactgggctccaaagccacatgcctttgttggcagcgtcaagaatgagaagacttttgtggggggtcctcttaaggcaaatgccgagaacaggaaagctactgggcatagtcccctggaactggtgggtcacttggaagggatgccctttgtcatggacttgcccttctggaaattaccccgagagccagggaaggggctcagtgagcctctggagccttcttctctcccctcccaactcagcatcaagcaggcattttatgggaagctttctaaactccaactgagttccaccagctttaattattcctctagctctcccacctttcccaaaggccttgctggaagtgtggtgcagctgagccacaaagcaaactttggtgcgagccacagtgcatcactttccttgcaaatgttcactgacagcagcacggtggaaagcatctcgctccagtgtgcgtgcagcctgaaagccatgatcatgtgccaaggctgcggtgcgttctgtcacgatgactgtattggaccctcaaagctctgtgtattgtgccttgtggtgagataataaattatggccatgggaaacattgtatatttagtgtgtgtattttgataatgattgatcttaaatctgtatacagaatatcattgatataatactctttaggcaggagcactcttgccttcccccaaaatttacactgctaaagccctctgtcacttggcgacccttctggtcttgctggaggggtttcctgggtataacccattgggctgcccaaggccagccagcctgagctctcctgcaagacagagcctgatgtggcacggagtggggttgcggggggtggggggactgcctgactcccagagggacttgaaactgaagcaagaaggttgcattctccaccaagggagttaacctacctgaactaagtagaaatgccagtcttccactaccccctccctgccatcttttcttctgctactttggggagttgatggccaggaaagaagccagcacagggttaaagtaactcctggcattgcccaccagggggctggtgcacctgctgacctcagggtcacagttgagtcatttgccagttgacggagcaagtttgaccttggttctgttgctgaagcaaatttggaacttttctgtctcagtgtgatccactaacccacaggatcatttggaaccttgaatagctctgcttggacaatggggttggggaatagggttgtctttcctatgaaaatgccatctgtagaccttgtgagtcagccgtccagatgtttgcaggtgaattcctctgcttgacatcctccctgtcactttggaccctatgggagtgggcatctccacgcacctgtgtatgtgaaagtcattttacatttcaaagcagtgtgtgtttcttatttttatatttttaactctttattcttggatgtataaagtgaactttttggcttctgtaagtatgctctatgcacctctaatgttttatcatgtatttatatgttgtacacagtactggctgattctgtaaatggatgtattgtacagagaacatgaacgtctcttcctaattttacatcttcagcatcattgcattaaagtggtgtaatctccttctctacatctgttgtcagagccactgagtgctgtgctgctcgacgtgagggtgaaatgattgacttgtgacctgccaggttgcccgatgccctgttgggtcaccggctggacctgctgcagcctgcagagccacagtcagcctgcccacatgccaccgagcaaacgcatcttgcttttcacatctctcctcctacagccttaatggctgcttgctgccatatgtgacaaatcaccaccaccagtgttaagtgcttctggattcatgggtgagttccctgggcagcccccaggaaggccttccagatctggctccagggtcaccacctgtcacagcaatacctgggaccatgctctcctgggactgtgaggctccttttgacgtacttttgacatcaggcaggtttgggaagaaacaaagccatgcctgctcctgcctctctcccaacatgtttccagcaagtagatgcccctgtgtgtgttttcccttgccttgtttcctgccttatatcttgtatttcgacttattacagagttgagggttcttgcttaatttagatcaagtataaaatttgtatgacttcaagtctcattttatctgaaaggtttttttctcatttaatctgatgtggcattttcgtcatctgaagcatgagtgacaagttgggaatgatgtggtgatttagaatgcagtattggccaagtccaagttgtcaacttaagcgtctgtttaccaaagaccgggaacaggggcccaaacatgtccagtcctcttcttccctctgctggaacctttggggacactcaagggtacagtttgacactgatctggtccatgaggctgcccagagaaagcactgcttctgtatgtctcttgtggtattggaacaataaacccgtacaacctgca

SEQ ID NO: 12918 - DNA, 36 bp, Homo sapiens
  chr20:31172327-31172363
  hyper
gccccgcggcgggacccgcccgcggccgccgcgcgc

SEQ ID NO: 12919 - DNA, 72 bp, Homo sapiens
  chr20:31172881-31172953
  hyper
cctgctcgggcggcggcggcggcgttggcggcggcggctccggctcgcctcctgctccgcctcctcctcccc

SEQ ID NO: 12920 - DNA, 163 bp, Homo sapiens
  chr20:31351104-31351267
  hyper
tgtgcgccgtggagggcgtgaggcagagggcgacctcccggggtgctcctgagctgagccatcaagcgcggggagcagcggggctgccctctgcctgtgcacacctggcccgggaggagccggccggaggggcggcgcctccctgtcccggccacgccgccta

SEQ ID NO: 12921 - DNA, 141 bp, Homo sapiens
  chr20:31797661-31797802
  hyper
gaaacaatgagaaaacgttatccagagagaggcagtggatgggtgtcccgacaggaatagatttcagcaccacggacagcagtcacgccagtgcggagggggagggcagaagcgggaaaggctgtccgttctgaccggaag

SEQ ID NO: 12922 - DNA, 30 bp, Homo sapiens
  chr20:31989402-31989432
  hyper
ccaaagctccgtggcggtgctgaactttag

SEQ ID NO: 12923 - DNA, 30 bp, Homo sapiens
  chr20:32031936-32031966
  hyper
ggagggctgggctgcgtatggtagagcgtt

SEQ ID NO: 12924 - DNA, 30 bp, Homo sapiens
  chr20:32032428-32032458
  hyper
gctgtgttcacagtcgagtatagaaaagcc

SEQ ID NO: 12925 - DNA, 31 bp, Homo sapiens
  chr20:32090525-32090556
  hyper
accctcttcttggaatcggccatttctccaa

SEQ ID NO: 12926 - DNA, 30 bp, Homo sapiens
  chr20:32342006-32342036
  hyper
tcacactgcaaaggcttgggtacagggagg

SEQ ID NO: 12927 - DNA, 30 bp, Homo sapiens
  chr20:32398867-32398897
  hyper
ccactcctacagagcgcaggccaaggagac

SEQ ID NO: 12928 - DNA, 30 bp, Homo sapiens
  chr20:32699010-32699040
  hyper
ttactggcctttctcgaccattcctttgcc

SEQ ID NO: 12929 - DNA, 30 bp, Homo sapiens
  chr20:32700242-32700272
  hyper
gcgcggcgtctgagcgagctgcagccggaa

SEQ ID NO: 12930 - DNA, 185 bp, Homo sapiens
  chr20:32899355-32899540
  hyper
cgcacaagcctgccctttggccgcggggctttagcctgccctagcttcagcatccccgctcgcctcccggcggtcctgcgtctcactctggattaactggaggcttcgagatgggatagagaggggtgcaggcgctgagaaagcccgctgatggggatggagccggattaagcagttctgtggag

SEQ ID NO: 12931 - DNA, 30 bp, Homo sapiens
  chr20:32900061-32900091
  hyper
ccagatgtctgccccggaacccacgctgtg

SEQ ID NO: 12932 - DNA, 88 bp, Homo sapiens
  chr20:33104125-33104213
  hyper
ggctcgcccgcccccgcctcacgctggctcctgataggcagctagagctgtccgttttgacagaaacctttgcgcaggcgcagaaagg

SEQ ID NO: 12933 - DNA, 30 bp, Homo sapiens
  chr20:33297203-33297233
  hyper
gaggacctcctcatcgagcaccccagcatg

SEQ ID NO: 12934 - DNA, 30 bp, Homo sapiens
  chr20:33345729-33345759
  hyper
tgctgctgctgctgctgttgttgttgttgc

SEQ ID NO: 12935 - DNA, 253 bp, Homo sapiens
  chr20:33464405-33464658
  hyper
gccgcgaccgcaaaggcggccgcggttctaggaacttgacgtgatggggcttcctgaggagcgggtccggagcggcagcgggagccggggccaggaggaagctggagccggaggccgggcgcggagttggtctccgccgcccgaggtcagccgctccgcgcacgtcccctcgctgcagcgctaccgcgagctgcaccggcgctccgtggaggagccgcggggtgaggcccggcccgggcgggcctggggtgtc

SEQ ID NO: 12936 - DNA, 30 bp, Homo sapiens
  chr20:33680735-33680765
  hyper
gaattgtagtcctgcgcggcagcggggtag

SEQ ID NO: 12937 - DNA, 6 bp, Homo sapiens
  chr20:34188625-34188631
  hyper
ggtgag

SEQ ID NO: 12938 - DNA, 341 bp, Homo sapiens
  chr20:34188747-34189088
  hyper
cgccttcgttgagaccttgaagactatcccggagccccgcgccggggggcgagccatagaggggcacccaggccgggccgaaggtagggttaaaccccgctgtggggaacaagagaagcgtgttggaggggagcgtggggagggcgagtgctggtaaatctctgcacctcaccctgatctcctccaagtattcgggggtgagggcaggggaggggggctaagccgctctgaaacggaagaagttggccagcagctgcggacgcgccgctgtggaacacgacctggggcgcctccaaaacagctcagcgccccaaggagctggaaatcgcgggagcccggcc

SEQ ID NO: 12939 - DNA, 325 bp, Homo sapiens
  chr20:34189166-34189491
  hyper
cggggaaaggagtggaccggcagtgtcagcgtgtgcacagctgtagaagggtgggactgggctggttactggacaggcggttgtggtcagaattttgccaacggagccaaaccgatggtggggttcacagtctgggggcggcttgaagcagtttgttttgcgggcggaccagccctcctaggcggagcggggtcgcgaggatggggcttgcggttgggaatgggccctatggagccctatggaccgaggcgagtgaggccagatttgccgcggccagaagcgctcacccgcgcggcccggatgggagatccgcctcaggtccggc

SEQ ID NO: 12940 - DNA, 326 bp, Homo sapiens
  chr20:34189679-34190005
  hyper
cggagtcggggccggagccgcggcgccgtgggccccggagggacttacctcctgccccaggaaagacacccgcacatagggctccaccaggacgcgctggtcgtgcagggcgcggaccaggctgcccagcagccccaggcgcagcgcgggaagcccctcggcgcggtacaggcgcacgcggagccgcgcccatggcctctcggcgggcaccccgcgcggcaggagcaggttcctaggggagggggcaccgagcggggggggagaaactgggatctcggcccctccccttatccgcgccccacggccacccccggatccatgtcctc

SEQ ID NO: 12941 - DNA, 30 bp, Homo sapiens
  chr20:34203950-34203980
  hyper
cggcctcgtcctcgcgcaagcacacgccca

SEQ ID NO: 12942 - DNA, 30 bp, Homo sapiens
  chr20:34330349-34330379
  hyper
cccattcagtgaggcgcctttcactccccc

SEQ ID NO: 12943 - DNA, 191 bp, Homo sapiens
  chr20:34359741-34359932
  hyper
tgttcctgctagggcgcgggcctgtttcccgcgcgtcagggtagtgggcgtggcctgcgcaggccgttgccacagtgatcgggcagacggggcagggggcggggcagctgggaccttacgtcactcggtggtggcgatgatgcgtgtgtgtggggggcggggcatacgctgggcgcgtcccgggggtcacg

SEQ ID NO: 12944 - DNA, 30 bp, Homo sapiens
  chr20:34360181-34360211
  hyper
gagagcgtggcgggcgtgcgagcggtgccc

SEQ ID NO: 12945 - DNA, 179 bp, Homo sapiens
  chr20:34680185-34680364
  hyper
tagggaaaatcgaggtcggcgctggcgggaacccgggaggacgtgggggccccgggtggggtctgctcctcttcttcgcccggcctctgagcccgccgcagctcaggttgacgccgggcccacgtggggaagccggcggcgggtccccagcgccgggagggttcgcggggctcagcccc

SEQ ID NO: 12946 - DNA, 714 bp, Homo sapiens
  chr20:34680611-34681325
  hyper
cgagcgcgcgagagagcggggcatttctgcgcagctctagcgcgcctcggagcccgccggggcagccgccggacaccaggaccgcgagccagacagctcccggaagccgcgccgccgccgccaggttagccgcacccgccgtccccctccgcgtcccggggaccccgccgcgtcgggtcccgcgtgtgcgtgtggggtggccgccgagggcggcgggctcgattcccgatctttgggcactgacaggccggcgggccggctccaggagccgcgggcttcggttcgtgtgtgtggggactgtcgcgggtttgtgtgtcggggctccagtctctgggtgtgtgttaggtgtgagcgcgcgtgtgcccgtggatccgtgcgagcggctgctcggtgtgcgcgcgcgtgcgtgtgtgcgccgggtgtgcatctgtgtgtgcgtgtgtgagggtgtgtgccttgcgtgtcttcgcgagtggtgcgtgcgtatctgggtgagggtgcgtgtgtctgcgtgtgtctgtcggtgaatgtatctgtgagagggtgtgtccgaatgtgtagcagtgtgtacacctctgggtgagggcgtgtgccagtggcttcgcttgtggctgcagcctgtggcgggtgtgggtgtgtgtgtgcgcgcgcgtcgctgtgtgcgcgccagtgtaactcccgtgtgtgcgcgtgtgagtgcgggtgtgctcccgc

SEQ ID NO: 12947 - DNA, 30 bp, Homo sapiens
  chr20:34742314-34742344
  hyper
gggggcagccggggcgctcgagaggccccc

SEQ ID NO: 12948 - DNA, 282 bp, Homo sapiens
  chr20:35201302-35201584
  hyper
gacaacacataccctatcacccgaggatgagacgggatgacacacacgaagtgccccgcacagcgtcgttgtaaagcgttggctgttttcacctctggccgccccctgtgagcccgatcatgtgctttttgggcttaggtcggaggcggcctcccagattctacaggccattgaggtcgtaacaagcgtctccatcagagcctagtccttaactagctgcgggtaagtgcccggactaagtggcctcagtttcccctcgaagcaacgggaccaatcgcaccg

SEQ ID NO: 12949 - DNA, 125 bp, Homo sapiens
  chr20:35201647-35201772
  hyper
cggtaacgacccccaccccggcaaggagcacagtaggcgctccggaaacgccctccacgaggagggccgggccacttcctgcccccgagcgggctctccccggcggaggctcccaccgccgctat

SEQ ID NO: 12950 - DNA, 30 bp, Homo sapiens
  chr20:35491340-35491370
  hyper
aggcccagcaggcgcgcctcctccgacgcg

SEQ ID NO: 12951 - DNA, 39 bp, Homo sapiens
  chr20:35579323-35579362
  hyper
tgttcaaggagctgcggttagcgcggaggggtcccgcga

SEQ ID NO: 12952 - DNA, 30 bp, Homo sapiens
  chr20:35974254-35974284
  hyper
gggcccgcggggtgcggcgccctggcggag

SEQ ID NO: 12953 - DNA, 30 bp, Homo sapiens
  chr20:36034971-36035001
  hyper
acagcatgtgtgcccgtggacccgtgtgag

SEQ ID NO: 12954 - DNA, 31 bp, Homo sapiens
  chr20:36235666-36235697
  hyper
ttagtcaacaacagaccgggacaggagtgtg

SEQ ID NO: 12955 - DNA, 30 bp, Homo sapiens
  chr20:36322247-36322277
  hyper
ctgctctcccctcccgcccctcctctaagt

SEQ ID NO: 12956 - DNA, 422 bp, Homo sapiens
  chr20:36531578-36532000
  hyper
tgggccggagccgggcgagggctgggagctgggccgggtccggggacagcgggcgaggggcagctgccggagccgggcagccaggccgctcagggcaggggacagctggcgccggttctgcggtctccggggcccagatgtgaggcggcggcgcccccggcccgagagcgcacgatgggggccccgctcgccgtagcgctgggcgccctccactacctggcacttttcctgcaactcggcggcgccacgcggcccgccggccacgcgccctgggacaaccacgtctccggccacggtgagttcggtcgccgcccccgcggacttccccaccaaaccccaacccgggccgcgccactccaacttggccgccccggggctcgaaccggcgccagtcgtggcgggcatcccggggcgccccctgc

SEQ ID NO: 12957 - DNA, 30 bp, Homo sapiens
  chr20:36662295-36662325
  hyper
cccgccgcactgggcggcccaggccgctcc

SEQ ID NO: 12958 - DNA, 292 bp, Homo sapiens
  chr20:36781077-36781369
  hyper
ttttccaggcagacccggccctttcccacccatcagactgatttcctcccgcagcgcccctgcgctcaccccagcccaacttcctgcctctgcatcaccagctccacagttcccgccccgggatgtgggtcactttagtcactgtgccgcttggctgaccgccactccaacccgccgccgggtgaggccaagcaggaggaagggggccatcccccagaaccacgcttcccattccctgaactctgaaaccttgtggtgtggacgagggtggggacaccggcgtgttcctgtc

SEQ ID NO: 12959 - DNA, 30 bp, Homo sapiens
  chr20:36793851-36793881
  hyper
gccccctgggggagcggacagggacacaca

SEQ ID NO: 12960 - DNA, 30 bp, Homo sapiens
  chr20:36889206-36889236
  hyper
gcgcggcgggacagcggcccctttgtgcct

SEQ ID NO: 12961 - DNA, 30 bp, Homo sapiens
  chr20:37075228-37075258
  hyper
gtcctcccagggggcgctgcaggcacgtct

SEQ ID NO: 12962 - DNA, 484 bp, Homo sapiens
  chr20:37274670-37275154
  hyper
cttgatcctttctggccaggtcgcctctttcctggtcgcccaggtgcgaaaactgaacgacagtagcagcaggcgcccccagctctgcgacgcaggcctcaagacttggctgcggaggatgcacgcagacagggacaaggcgggggacggcctcgaggcggtgagtgcccccgaccccagacaggtggagaagggccgaggcgacaggagggcacctggggcgcggtgcttcccttcctccaggtccccgctaccgggctgccagcaacggcccagtgaggccaccagggggcgttgcggcgccgtcacggggagcgaggaggcgtggctgcgaaacgagggcttagaagcgggttggggaggggaaatggagtgactcggagacttcccctagaaaccgtcaccgccgccccatttttcggcagcccctggccgagggttgggaaaatgggagtcgctctgcggggtgtgaggtgattggggc

SEQ ID NO: 12963 - DNA, 841 bp, Homo sapiens
  chr20:37302481-37303322
  hyper
aggcagagggaatcaggaaagcgatgggcttgtctgaggaacagaaaggacaacgaacgtgtgagtcacactaaggggcgccgtggtgcggcatgaggctggagcctgatcactcggggtcttactggccacggtgaggagtcagggtttcatgcgcccctgcagtcagaaagcatggcccaaccccagtgccctaagtccggaaacattcaaagctggacccagggtagcgggatccggggcctctggggacccgagagggacgttaagttcagggcttcagggtgcagccctggggtcggtacccccagcctccaacccagagctggcagcgctcgcccccttctccgcgcgggccctcagctcagctccctcttcgctccccgtgtccccgcgagcgggagggaggggatgctaggacgccctgtcggcgtcgtcgccgctttccgccattgtttagtcgtgatgctctcattttctctgaatcaacaattttctgctcggctccgcgccgaccggcgaacgcggggcttttcctcgcccgcctgatgacagcagagcggcgcggagcagctggtccggaaggaagcgccaggcgcctgcccggtcccaggcgtccgctgccgcccacccacaccagaccccgcccccgcgcgtcaagccccgcccatccataccaagtcccgcccccacaccctcacccacacaccaggccgtccccaccccgcccccagagccccggggcgccccgcccgctagccgcgcacgcgcagtgagcacggcgacccccggtggtcgggtgtctccgcaggccgaacacgctgctcgcccagctgcggat

SEQ ID NO: 12964 - DNA, 30 bp, Homo sapiens
  chr20:37352777-37352807
  hyper
gaaatgcagcacttcgcccccccacctccc

SEQ ID NO: 12965 - DNA, 553 bp, Homo sapiens
  chr20:37353165-37353718
  hyper
cagacctgctgccagcttgcccggtccagccctgagagagcctcgaacgccagctgcgagggtcatgagccagagagccccggggcgccgcgcggagagcaagcggagatagcgactttgcgccccccagccctcgccttcttgcatcgcgttccccgcatcctcgggtccttctgtcctttccgctgtccccaccgccgccatggccaccttgctccgcagcaagctgtccaacgtggccacgtccgtgtccaacaagtcccaggccaagatgagcggcatgttcgccaggatgggttttcaggcggccacggatgaggaggcggtgggcttcgcgcattgcgacgacctcgactttgagcaccgccagggcctgcagatggacatcctgaaagccgagggagagccctgcggggacgagggcgctgaagcgcccgtcgagggagacatccattatcagcgaggcagcggagctcctctgccgccctccggctccaaggaccaggtgggaggtggtggcgaattcgggggccacgacaagcccaaaatcacg

SEQ ID NO: 12966 - DNA, 463 bp, Homo sapiens
  chr20:37353806-37354269
  hyper
cgtgccgggctctgcccccgacagtcgcccggtgatctcggcctggagaccccctcctgtacccaggaatctccctttctccatccctcccagccctgcgcggggacctacgcccccaggcggtgttttccgccctaacccacgctccctcccaacggcaccagctgcaagaccgctaggctgaagttcggtctgagacacctgtccggagacactgcaaaagtgaaggaaatggggggagggagcaggaagcgatgagaaagaaagaaaatcaggattggagggcacggtttggtcttggactctggaacggattcacagctgcatttttgggaggaaagaagaaggggaaatcgctgaggtcggagtctcctccccccgcacacacgcatagacacgcacacgtatataggcaggcacaccacatgcccacagccccccttcccacgaacaaaggcgcagg

SEQ ID NO: 12967 - DNA, 85 bp, Homo sapiens
  chr20:37354562-37354647
  hyper
ctcgcccctctcgcccgaaatcccggctgcaccgcaaagaggcggccagctcctccccgtgtgaccctggcgaagccctctccag

SEQ ID NO: 12968 - DNA, 27 bp, Homo sapiens
  chr20:37356015-37356042
  hyper
ttaagccacgccccccgggcccctcat

SEQ ID NO: 12969 - DNA, 266 bp, Homo sapiens
  chr20:37356168-37356434
  hyper
cgccgttgtgtgctgctacaccggcaagatcctcatcgcgtgcctgtacgaggagaatgaagacggcgaggtggtgcgcgtgcgggactcgtacgtggccatagccaacgcctgctgcgccccgcgcttcccaacgctgggcggccgagtggtgaacgtagcgcagatcatcgagctggtgatgacgtgcatcctgtacgtggtggtgagtggcaacctcatgtacaacagcttcccggggctgcccgtgtcgcagaagtcctggt

SEQ ID NO: 12970 - DNA, 975 bp, Homo sapiens
  chr20:37357215-37358190
  hyper
cgtgtccggcttcgtgcactccctcgagggcctcatcgaagcctaccgaaccaacgcggaggactagggcgcaagggcgagcccccgccgcgcttctgcgctctctcccttctcccctcaccccgcccccaccagcccagtgcgccctgccgccgcgcttgggaggccaagctttaaacatctctggttcctagtttctgattattcggggatgggggggatgggaggggacagggattcacgatccatcgcgtctgcgtttctgttgtcctttcttttccacaacaccctggttttggggggaggcggggtgcatttgcgggcagggttctctgtccttccaagtggggccccgacactttggttccagtcatcgagggggttgggaagggagggagagggggcgcagctcgcaggcgtggcaacttgaccttgggggaatatttcacatccatccagagctcggaatctacagcgtccagccatttccagcaagagcgcttcccattccggagacgtttcaaccctgcagcgggaaaggctgactgggaaatccattttgggtgggcaatttccttcaacgaagccggaaggcgagaagccgcggcggggccagcttgcctgccggttttcaggaatctaaactctcatcttgtgcaatttatcaggtgtggaactgttctactgtgcgtgtggtgtgctcgtggtgaataagatgaaatgtatatcagaaaaaaatctatctctaatttagagtgcggtacataattatatccgcaaataaagaagagacaaaggcttgcgcggcccggtgtcgggtttgtgtgttcgtaccagccgggatcccctggcgctgggaggcgtgggaactggctcccgccggctgaaaccggagatggtgagcagctgtggttaaagggtccggggagggctctagggagtacaaagattagttggcggcgaggaggctcctca

SEQ ID NO: 12971 - DNA, 139 bp, Homo sapiens
  chr20:37434213-37434352
  hyper
gccgggaccctgtcccgcgctgcctcccaagccggatggggttgagcgcgcccaccccagtcccaggagctcaggccccgccttgggggaggagccgagaggcggcgcggaggctcgcggccgagcagagccagctctg

SEQ ID NO: 12972 - DNA, 233 bp, Homo sapiens
  chr20:37434488-37434721
  hyper
cgggggatgaggatggggcggggaggtggtcccagcctgctatcacctagctgggggccggggcgctttggccaagggacgatagcttgagataaatgggagtgtggggactctggaaagacgggtaccgagagcgctaggtccgggagtcgggctggaatgggggcgttctccccggcctcgcaattccttgacgaggccaggggagggggcgcattggcaggttgttggct

SEQ ID NO: 12973 - DNA, 157 bp, Homo sapiens
  chr20:37434736-37434893
  hyper
cgatcttggggcggggaggtggggtcctcggtctgttctggactcatggggccgccgtctgccgggggtgcaatgccgggcggcgggagccacagcggacaccaaacaacccccccccgcgcactctcccggccgggcatggtggtgccgccccctc

SEQ ID NO: 12974 - DNA, 439 bp, Homo sapiens
  chr20:37434930-37435369
  hyper
cgcagagagcgctcctgcccgggcgggaaagatccccaaggcaggcgcctccacctgcagacccgccccgcctcaggatccggctgacagcaccagccagcccggggagaccccgcgagtggtagttccccgggaggggcgcgcccggcctctcccagggccccgtgcgccggcggctgggtcccccgcgccaggagcgctcccctctgggcgactccggctcatcgattccggcccagaggagcgcccccgggcgccgaggatgggcggagacgtgcagccgcccctgagaggtcgcccagaggggtctccccaaggtcacccggagtgcccaggctgagctgcccagaccgccccgggtggagagccgggaggcaggcgctcgctgccctcctccttcccccatgtagactcccttcctccgctcccccaccccggc

SEQ ID NO: 12975 - DNA, 362 bp, Homo sapiens
  chr20:37435487-37435849
  hyper
cgcgccaggcctgggtcccggtgctcccgggcacctcaggagcggagggagagggatgtggcttcatcagcgcttctaggaaccgaaaaccgagctgcctgcgcgcccatgtgattgcatttcacataaagggcccctgttttcactgtcagaagagccccccagctctccgcggctctggacaccaggtgccgcctctgaatcaccctctgtggaggacccggggcccggaggtacaggcgccctttcccgcagggctctccctggaaagggcctgccgatggcggcctcagtccgcaggggtacttccctgtgtaccctgccatttcctgcggctggtgaagcaccggagaaaaaccgtc

SEQ ID NO: 12976 - DNA, 811 bp, Homo sapiens
  chr20:39316041-39316852
  hyper
ctcagcctcgcctctcgcctgccgggacgccagagtccctctcctttcctcgttgctctcttcctggcgcggactactctccgggcagcaaagcagctgtcccggcttaacgcgcaaagttcagaaagccaggagtctccagatggccttggtgacttctcgggactatgcctcgccgcccttcagcctggagagaagttactccgggacctcccaccctctcgtctctctctccggctctgctcgagtctaggaggcggcgctggcgtgcgctactctcgccttagccaaggtcccctgcccgcccgcgcacccgcccgtcgcccgcggcccgcgcgcccttcctccctctcgctcaagtcaaacaggtcaaggctggggccgcggcagggacagggtccggggtagtctgggactagggacgtgggacagggagtccgggccggggcaagggcgggggccaggaccggccacgactcacagaaagaactcgggagaggaggggctgtcgctggtggagcccgcctccctgaagccggagttggcgagtttctcgcacttgaccttgtaggcgtctctctcgcgggccagccgggacacctcctgcttaagctgctccacctgctgaatgagctgcgtcttctcattctccaggtggtgcttctgctggacgcgtttatacctgcaagactgggcgtagccccggttcttcagggtccgccgcttctgcttcaggcggatcacctcgtccttggtgaagccccgcaggtggcggttcagctcgcgcacggacatggacacgagctggtcg

SEQ ID NO: 12977 - DNA, 1408 bp, Homo sapiens
  chr20:39316983-39318391
  hyper
cgcttggtgatgatggtgatggtgcgggtgagcgtgcgggcccagctcgtcgtgggccacgccggcgcccgggtacgcgtggtgcgggtgagggtggtggtgatggtggtggtggtgagcgccgcgaaagctgtcgaagctttgcagcggctgtggcactgggtgcgagccgatgagcgcttccaccgcgtcctcgggcgtcaggttgagcgcctcggggttcatctgctggtagttgctcgccatccagtacagatcctcgaggtgtgtcttctgttcggtcgggctgaagctgggcgacgagggcacggagctacacggagtgctgagcggtgtggaggacaccgagccggctggctgcaggcgtgtgcagggcctgcccggacgctccgcgcgccccagtggctccttcttcacgtcgaacttgagcaggtcgaagtcgttgacatactccatggccagcgggctggtgggcagctctggccccatgctcagctccgcggccatcgctgaagcgaggcgcagccgccgctgccgcccgggaaactttgcggccggccggagcgcgccgagccaagcgcgggggggaagagcggagaagagctggggaggcggggagcgagggcgcagcgggccggggccgccggccaagcctttgtctggggacgcggcggcgcgccggagagtcccgaggctgcctgcaccgccccagagctctgggctgtgcccgcgcagggaccgggccgggtagagtcgggcggggtggagaggcaagcggagcgcgcggtggggctgaggggaggcgtggggcgagtgcccgttgctcgctctctagctctcttgctcttacgctctctcgctcgcagccgctcgcagctcggcggtgcagctgtgctggatccggcggcgccgcagccttttatcgcctcctgatgtcactggggtgcgggggcccgggcggcccggtgcgcgggccaatagctgcacggcctccgcggcccagcggcgcagggcggggcgcgcctgacagctcccccgccccccgcgtcagctgactggcggcccgagcggccccggagcggcggaggcctggcggagcgctggagcggagtgggacggccagcctgggcccacccccgtaccctgcaggtcccggcccacgcacgctcgcctggagtgcgcgccccacctctaggccaaatcaccgctttcccctcctcgcgcactctcctccctcagttccctttgcaccccacccccatcccgtgtcacccccaaggaggctcagaatgagcgccgggacaacgcctcctgggccctttgttcccaagcggcccccgcccagtgggcgacgctctgtgtgtcctcgcggcttctggccgtgtgtgtcgtgcgttcctgtttctgg

SEQ ID NO: 12978 - DNA, 282 bp, Homo sapiens
  chr20:39318921-39319203
  hyper
ccaacccaagccagcccagaacgcatactatgtgtgcaccagagcccaggacaggttcccctcgagcgatgtacaggtcctcgggtcccgtcttcgtactcagccgcgagcctcgagccgcgagctccgctctggtcgccccgttgaaattccgtgccccagcgttcgggggtgcccgtcggctgctccctgggccggaaggtcctgggcggaggaaggccggtagccaaaagtggaagcgccacagtgaagcggcccagggccaccgggtgagaaacctcc

SEQ ID NO: 12979 - DNA, 47 bp, Homo sapiens
  chr20:39319514-39319561
  hyper
cgcgtgagccacaccggtgcagacgcgcctagattatttttaaatgt

SEQ ID NO: 12980 - DNA, 30 bp, Homo sapiens
  chr20:39968593-39968623
  hyper
caggggccatagggcgtcggaaaggtcttt

SEQ ID NO: 12981 - DNA, 30 bp, Homo sapiens
  chr20:40247214-40247244
  hyper
tgcatggatgtgatcgcggccttgattggc

SEQ ID NO: 12982 - DNA, 380 bp, Homo sapiens
  chr20:41817535-41817915
  hyper
tggggaactacctctgctcaccgccttcccgtggccaaacccaaatatgagttccccgaacttttcaggagcggacgcgctcacgggtcaaatccactcccctccaagggccttaacacgggcgcccagctacctcggagaaaagccagcgggtagggcggaggtattgctctcggtcatcaacgcaaacatcccctcgggtgcctacagcggcctgcttaggggagcagcgtgttcagagcaaatggagagcttcctgtatctccgaggaaaaaagaaaagccgccgccccggcagcctcggcctgctggggacctgtcctccccactaaaagcgcgcgctgcccgaggagctgcccgggagagaacgctccaccccgg

SEQ ID NO: 12983 - DNA, 741 bp, Homo sapiens
  chr20:41818007-41818748
  hyper
cgcggaaagttactccagcccggggggccggcaggaaactgaagcggggaacttcgccaaacgcgggctgccgagggacgcgaggggccgggctcgctggccggggcgcgcggggacactgcttcccgcgcctgcaagctgagacccgggttccggccatggggacccgcgcccccgcgagcccacacaactttctcctccgagggccccgcggctgggggcccgcgcgcatccaggagggagcggggagcccaggggagccgggcgggcgcactcacctgcggcgctctgagcccgggcgccgggcagtggcggcagctgcagcctcaggagcaggctgagggcgagcgcggcgaggctcgccatccgggcggcggcgggcagctcagccccttcccgcgggggccggggccgggactggggcgggcgcggggtggccccgcatcgccggcgcggccgctggctgtgcgcgcggctggctccgctcgggctcccggagccggcgctcctgcgttccaagccgaggcgcggcgcgaactgaggcgggaggctgggcgggggcgggacgcggggggcggggggcggtgtcccccgagtcctaacgccgccgccgttgccgccgccgccgccgccgccgcccgcccgggcgctccgcctcggccgtgcacacaccctcacgcgcacgcccgcgcctggcacacgcccgcggctggcacacgcgggctcccccgcgcaccctct

SEQ ID NO: 12984 - DNA, 116 bp, Homo sapiens
  chr20:41818804-41818920
  hyper
cgcacccacacgccgggcagggtcctcgcctcttcgccccgcgccgcgccgcgcagccaagcatcgtctgccctgtgggggcgcaggtacgggggcggtgcggggaggaggaagct

SEQ ID NO: 12985 - DNA, 30 bp, Homo sapiens
  chr20:42086251-42086281
  hyper
ccccgaagagatcgcgcacagttttataaa

SEQ ID NO: 12986 - DNA, 30 bp, Homo sapiens
  chr20:42136655-42136685
  hyper
gagggtggaggctgcgtgtttggagatacg

SEQ ID NO: 12987 - DNA, 30 bp, Homo sapiens
  chr20:42286509-42286539
  hyper
tgggcaggccttagcgttcacccgcggttt

SEQ ID NO: 12988 - DNA, 41 bp, Homo sapiens
  chr20:42296222-42296263
  hyper
atgtcattttgtctcccgcctaattgcgggatgggggtggg

SEQ ID NO: 12989 - DNA, 803 bp, Homo sapiens
  chr20:42543682-42544485
  hyper
agctcgggactcaggcgctcccggggtcacacggggccgcgcacatcagccccgccgacgggcacgggcggctcacatcgatcccctcgcggccacgctcacgccctgagttgttgggatcgcgggcagaagtcatcccgacagccacccgtgcgacgacacagtggcccctcactcgcgtccccctgacagcctcgcagtcattcacaagccgtcacagtgacccacagccacacgcaggcggccaggcactgcttacacggtcccgccgtcccacgcaagtcaccctgacagtcacttatacacaacgacacgcaaccactcacccgcaaacagcctcaccgccacagacgagtcacccacagacgctccgatgccccacacaccgtgacatgcccccacccgctgtcacacccaggcacaacgggggacagtcacacaaagaagtcgcccgacagtcacactctcgcagccacaacgcctcacccaggcgcacgctgtcacacacagccacccccctggacggtgagcctcagacacagatcgtcctgacggccacacagtcacacgcggtcacacccagggacggccacacctcggtcatccacactcgcgcgtcgaggtttaacttctcagcgccgcagcacactaattgggcagtttactaattggccgtcactgcctggcggggcctcggattccgagtaggctgcggccaatcgaggcctgtgtcctcccgggagcggtgagccggcgtccctccaggctggggctgtagtgccggacaccctccctcctccatg

SEQ ID NO: 12990 - DNA, 16 bp, Homo sapiens
  chr20:42544727-42544743
  hyper
cgtcggtcccgggccg

SEQ ID NO: 12991 - DNA, 224 bp, Homo sapiens
  chr20:42876029-42876253
  hyper
cgctggagagcgatgcggccaagccagcggaggcccccgacgctcccgaggcggccagccccgcccattggcccagggagagcctggttctgtaccactggacccagtccttcagctcgcagaaggtagagccgggccgggagccgcctgcgccggtggccaggaagcttggggaggggagccccagggcttgagggatctgagggcggcgaaagactggaggg

SEQ ID NO: 12992 - DNA, 30 bp, Homo sapiens
  chr20:43016304-43016334
  hyper
gggaggcggggggggcggtggagcggggga

SEQ ID NO: 12993 - DNA, 341 bp, Homo sapiens
  chr20:43017189-43017530
  hyper
gctgtgattggtgatcgaaccgagcaggcctcctctggatttggagagacatagtgcgtctgggcctgtgattggcgggattgctgtgattggtgaagtccctaaggctatctaagtttctgaacaccagttcctgcgttggccacgaggaggagcccaggaagcgcaaagcgcagcactgcggagagtcttggccgcctcctccgggacgccctccggcccagcgcggtgcctgccctgccctgcgccctggggcaaccgcgggatgaggtggggcggcaaagggtgtcagggctcccagctgcggcccgggtggccacgcttctctgcacagttccttt

SEQ ID NO: 12994 - DNA, 425 bp, Homo sapiens
  chr20:43438793-43439218
  hyper
ggggggcgggccgcgcgcttacctgcgtcctcgtcgtcgaaggagttcatgcacgggaagtagatggcgagcgcctcgaaggaggcggacagactgaggcggctctgcgagcgctccatgcccgcgccggcgccgggcgcctcggccgcggcggcggcggcggcggcgggcggcttgggcagcttggccgccccattcttgacgcggagtacggcgcgcggcgtggtggcggcggcccggggccgggccgaggctccgctgcggggctggcgggcgcggcggggccggcgggcgggccaggagctggcggcgcgcggagcccgaggcgcgctgtgctgctggcggcggcggcggcggcggcggtggcggcggcggtggcggcgcagcgcgctctggtccgcggcgccccccgccggcagcgcgag

SEQ ID NO: 12995 - DNA, 263 bp, Homo sapiens
  chr20:43439247-43439510
  hyper
cgtgccgccgggggagggggcgccgctgcggggcgtgggagcccggagggcgcgggctgcggcctcttctagcagcccccgggcccggcaggtgcgcgcggggaggcaggcgccgggcgaggttgtctgggccctggtccgagggctgttcccgaccccgcctcggcccccaccctcagccggccgacttgcggagaggccggcgtccagtccctcacccagacaggcctctcccagagacactggcgcgctcggaggggatg

SEQ ID NO: 12996 - DNA, 42 bp, Homo sapiens
  chr20:43726587-43726629
  hyper
gaggcgtcgcagcaccgggtcgtcgcgcacgccttccgggct

SEQ ID NO: 12997 - DNA, 64 bp, Homo sapiens
  chr20:43729512-43729576
  hyper
gcccgggaccgtcccggagccacgtccctccccaaaggaggccccttacctgtggtggcacctc

SEQ ID NO: 12998 - DNA, 30 bp, Homo sapiens
  chr20:44034865-44034895
  hyper
gtggccaagggtgccggaggcagggttcgg

SEQ ID NO: 12999 - DNA, 30 bp, Homo sapiens
  chr20:44035121-44035151
  hyper
gaagtaccagtagccgcgctcgcaggggct

SEQ ID NO: 13000 - DNA, 30 bp, Homo sapiens
  chr20:44098709-44098739
  hyper
gaacgcggacactccgtggctgcagtgggc

SEQ ID NO: 13001 - DNA, 30 bp, Homo sapiens
  chr20:44098972-44099002
  hyper
tcctctggggctggcgctacgccccaccct

SEQ ID NO: 13002 - DNA, 383 bp, Homo sapiens
  chr20:44099336-44099719
  hyper
aggggtagacaaaggcgtcgttgaaacgcagccaagggggggtccccacccctagctgggattcgagtctctggtgcatgacgggcttccgggcacgcacagccgggacattgttccccgcggcctggggacccggggccgcagtttccttctcgaaccggccgaagcctgccctgcgggaaagcccggagcctggggcgctcacctctcctcttggagtccctccctgggggcctcccccagccctggggaaagactgggagagcctggcctggcaagattttccccaattcctctgtccaggcggaaaggaactttacagatttaggaaaatgccccgctcatcttaaagatgtgtaagggagcatcggtgagaaaaaaat

SEQ ID NO: 13003 - DNA, 330 bp, Homo sapiens
  chr20:44452740-44453070
  hyper
ccgggtcgatgtagccgtctgcattccttcaggtccgagggacagggcagggctcagggccggggcgagctgccctggccaccacactcgacgccccgcttccgcactcccaacacggggaagcttccagcgctgccggccgggttctgactgctaagcccctccctcggctcccgggcccccagcgcacctgtcgaagatgcggaagcactcggccagctcctcctcgctcttccctttcgcgtcctctttcatctggcgcaccatcatgaccaagaactcctcgaagtcgatggtgccgctgcctgcgggcagcaggtggcagactga

SEQ ID NO: 13004 - DNA, 80 bp, Homo sapiens
  chr20:44540762-44540842
  hyper
cagctcaggggatccgggcgacggggtctggcgggcagggttgttccagccgcctttataaagccggcctccccgacccc

SEQ ID NO: 13005 - DNA, 30 bp, Homo sapiens
  chr20:44600336-44600366
  hyper
ttccctcgcccccacgattctcgtggagcg

SEQ ID NO: 13006 - DNA, 145 bp, Homo sapiens
  chr20:44639092-44639237
  hyper
acctccttcctctggctcttacgctacaggatccaaaactactcggaagacttgccgcgggcggtgattgacgacgcctttgcccgcgccttcgcactgtggagcgcggtgacgccgctcaccttcactcgcgtgtacagccggg

SEQ ID NO: 13007 - DNA, 442 bp, Homo sapiens
  chr20:44639267-44639709
  hyper
cgggtgagaacgtgaggagggaaaatccaagagacctgggcggggtcagggaagggaggaccacggagagcgtggaggcagcagtggccccggcttcctcttgcctgcccgcgctgccctggcttatacggcccctcctgccagacagtgcacagggccagggcgccaggctgggagagcttcgcgcaggcgggatttcagcccgcacttatttcggagcccttgccttgggcagcgcacaatctgcgcagcagtactcggctaaccctcttcctctcgacctgtttcttcagagcacggagacgggtatcccttcgacgggaaggacgggctcctggcacacgcctttcctcctggccccggcattcagggagacgcccatttcgacgatgacgagttgtggtccctgggcaagggcgtcggtgagattctgagtcctcct

SEQ ID NO: 13008 - DNA, 13 bp, Homo sapiens
  chr20:44642355-44642368
  hyper
cgacaagtggccc

SEQ ID NO: 13009 - DNA, 54 bp, Homo sapiens
  chr20:44650231-44650285
  hyper
attcaggaacccttcgcacagcgggcactaggaccctgcgcggcgccgcgtctc

SEQ ID NO: 13010 - DNA, 292 bp, Homo sapiens
  chr20:44660584-44660876
  hyper
cccctcaaccagtgcgcctggcgttcagggaggggacgaaatcagccctggctgacaagtcccgggagcctggcgtcccgcccaggcagctactggaaaggcgggacccagaactagcctacctagccgccctctcccctgccctcatctcctggcccggatccggcctggagtctggctccgcgctgcgcgccgcgttacataagcggctgcgggcgcgcggccggctaggctcggcgctgcgctctcggcctgcgcggtcgccatggagaccggcgcggggccacctagt

SEQ ID NO: 13011 - DNA, 192 bp, Homo sapiens
  chr20:44669699-44669891
  hyper
ggcggcccccgagaccgctgtccacggtgctgaaacacagcattgcactaatgcggtgcttctccaccttggctgcttattagaatcacttggggagcttaagaaaaaaaaaaaaaagccaatggccaggcttcatttaaattaaacgaggaactctggatatggggacctggcgtccgtgtgtttaaaagg

SEQ ID NO: 13012 - DNA, 20 bp, Homo sapiens
  chr20:44686016-44686036
  hyper
gagctgagctgttcctgcct

SEQ ID NO: 13013 - DNA, 30 bp, Homo sapiens
  chr20:44718699-44718729
  hyper
tggcaatgagggcccgggaagtggctctcg

SEQ ID NO: 13014 - DNA, 112 bp, Homo sapiens
  chr20:44879678-44879790
  hyper
cttgcccacatacaggggctccgtgcccgtgtactcctctaccacgaagaactggttccacacccagccgcgtttgacgcggccggctcccagcgcgccgtcctgccgagct

SEQ ID NO: 13015 - DNA, 126 bp, Homo sapiens
  chr20:44880040-44880166
  hyper
cggccgccgggatgtcgcccccgacggggcacccggacgggcccgcggccctgaacgccgcccagccgcgggggtacccggctggagggggagggggcgcggccgcatccggggcatggacagccc

SEQ ID NO: 13016 - DNA, 225 bp, Homo sapiens
  chr20:44935839-44936064
  hyper
tcaaacagcagcttctctgcccgccacaagggggtgccctgcacctcggggagacctcgggggatcctggatcagccctaccctctgcagccccgcctgggacagggcccgacgttgccagagaagaggcagcggggaggcgcgagcgagacgggtccacactgtgcccacccagggctgcccggcaccccgcgcgcccacgcagtccactcttcacagtaaacg

SEQ ID NO: 13017 - DNA, 104 bp, Homo sapiens
  chr20:44936314-44936418
  hyper
cgcggctggagtcagcctccgggtgtccccggacgcggcacgacctcgcacacacacaccgcgcgcacacgctcgcgccgtgcggtattttcccggccccggac

SEQ ID NO: 13018 - DNA, 35 bp, Homo sapiens
  chr20:44937332-44937367
  hyper
cagcctttccctctctcgggcggcccagtcccagg

SEQ ID NO: 13019 - DNA, 30 bp, Homo sapiens
  chr20:44937614-44937644
  hyper
aacagtggccgccccggcttgctgcccaga

SEQ ID NO: 13020 - DNA, 30 bp, Homo sapiens
  chr20:45142229-45142259
  hyper
aggaacagcacatgcgcagaaaggcccccg

SEQ ID NO: 13021 - DNA, 30 bp, Homo sapiens
  chr20:45338381-45338411
  hyper
aagtcccgatcgggcgctgcctgctggaag

SEQ ID NO: 13022 - DNA, 177 bp, Homo sapiens
  chr20:45524132-45524309
  hyper
atatatttcttttcaaaagtccgtttgcgctcggcccgctctggttcaggtctggggctttgaaccggggcagggaatcctggcgcctgctgcgggtagagttgaaacttagaaaagtttacatccgaagggtgtttagaaggcggcaaggatttcgttgtaatgggagaaagtggg

SEQ ID NO: 13023 - DNA, 49 bp, Homo sapiens
  chr20:45985581-45985630
  hyper
aaacacttcctgagcgattatctttgtgaggctcgggtgagcaagagcc

SEQ ID NO: 13024 - DNA, 920 bp, Homo sapiens
  chr20:46414674-46415594
  hyper
gtgaacgcagagctggggtcccggcggctctcgacctcccgatgcctccggactcggctggccgcgctcccggcgccgagcgcgcaccctcgccgggacacacagacgcacactcactcgacacactctcgctcctgctcgccctcggcggagagttgaaacagatgtgggattcgcccaggagctggaaacgagggagggaagcgagccagagccttgtgtgcacgtgtgtgtgcgtaacacacaaaccagggggcatcgctaataaatcaaatatcgtgataaattcaggagggccatcgatcaggtccacttggctggaaacgacgtgaatctgcctcttttccgctttcttcttctcctctctcggagctggagggagccaaatgttccgcggggagtgcgacagccccggccgggcgctcccctcgtaatgacacgttaataaatgttttcttttatctgctttcacaggactcgccccggtctgcaaacactcgactgcctttgccgaaagcctcgcgctcgcctccagccacacacatttgccattggagaggccggcgccggccgcgacccgcagctcaatcgcagggcaaaccgagctgcctgtgcgcgcccgagaactccccgagaaattaacttcggctcaagtgaaaatagcagctgttgtccagaaatggcccgggagtagcatagaaaggagaaaccggcttcctccgaaaggggaggaattggactcaagggggtgctgtctaccgtggtttccgctgtccctcgcgccacagaagaggccggagggggaccggcctgacgcgggtgggcaaagagcgggcagagaactcaccagcagctgcagaaaacacagccgagttgctagctaaggggaaacagacgccgctgtgggaaagcacttgtaa

SEQ ID NO: 13025 - DNA, 264 bp, Homo sapiens
  chr20:47443672-47443936
  hyper
ccctggggttctgtcaatccccgcccctcctctgagcttcaggttttatcctactccatcaacgcgcagggacgttgggctctggggctcctacggtatgtcctagatgagtggtgcaccgggcgcgtagttattcctgggaaaaagacgcaggagcgccagctcccggcgccgccggggtccccaagcccctgcatcgcggatgtaactaattttaaaactatttgaaaggcggggacggggaagaaaagacaaaagggcagc

SEQ ID NO: 13026 - DNA, 483 bp, Homo sapiens
  chr20:47443944-47444427
  hyper
cggggaagtggagtgcgggagagccccggtcggagcaggaccgtgcgccggccagggagggaggcgacgcgacagctctggaggagctcggatcccccccgctttccgcgcgccctgcggggcgcccccgaggcaattctccacccacggggaccacggccacaggttgtggggaccgcagcggggcgagcggctggagggaaagctgtccccaagctcccgagcgacactcaccgactgcaagaagcgcaaggtgcccacgtagtccctctcggtgcccaagatctcgttgaggacgcagaggcggaggcgcagctggcgctcggactcccgggcggccgcgcacgggccggggccggagctgggcgccgcggcgccaggggcccgggggtccgggtgggcgcagtccccggccccgtcgccgccgggctcgctgccgctgggcgcctccattctagcgcggccgcgcggcgccggctcctt

SEQ ID NO: 13027 - DNA, 128 bp, Homo sapiens
  chr20:47444452-47444580
  hyper
cgtccaggcgccccatcccggacggggcgcgccggcgggccgggctcagcggcgggccgggctcccggcgcggcgggcgggactgggggccgggcggctgggccgggggcggaggcagcgcgcggggg

SEQ ID NO: 13028 - DNA, 183 bp, Homo sapiens
  chr20:47444609-47444792
  hyper
cggggctcccagacggctggccccccgcccccgcgccagggaccgtctgccaagtgccacgccgcgctcggccgcagaggcgctctgcgcgtgcacggggcccctggggacgcggcgcggcgctcggcgcctccgtcggaagctcgggggtcgggcgggagcctccggaagggccccgcggag

SEQ ID NO: 13029 - DNA, 241 bp, Homo sapiens
  chr20:47444920-47445161
  hyper
cgcgcaggctcctgcttgcaggtccggccgctgctcgggccaagtaaacaccgggctgggaaagctcgctgcggagccgctcgggggcaagccagccccgccacgcgcgcctccgcggccccgggaagtcaggggcgaccgctgcctgggcagtgacggcccctctctgggcagtgacggcccctcccgggaacgccgggccctcgcggtgccctcggtgctaccacgaccttgggaagga

SEQ ID NO: 13030 - DNA, 31 bp, Homo sapiens
  chr20:47663142-47663173
  hyper
cgcttgccgcgcctcgcggcatcctaggtct

SEQ ID NO: 13031 - DNA, 1123 bp, Homo sapiens
  chr20:47934835-47935958
  hyper
tctccgttggcgtcccggtacctagcttgagcccgaccatgggcatgcgtggcgtggcgcgaatcctgtccctgtcgctcgtcctggccgcggtggccacgggggcctgggagcgggggccgctgggcgtgctcttgccctggcagggctccgccgcgctgggccgctgctgtcctggccgtgacccgatgtttgtcgcccgcgggcccccgcgctgcttctgcgaccaagcgtgcggcgcggcgcggcgcgggactgctgcgcagactatacgcgggtctgcccaggtgcacccggggaaaggcaaggcactagcggaacgctcggagcggaggggagctggggcgggggatgagcggaggaagggagcccagcacctagggggctctgggcttggaggggtcacacgagccgagggcggggcgcggcgcttggggactggaagggtgcgccgcggggcagacgggacgtgcagggggtcgcgcgggcaaggagggacgcagacactcaggacctaaaggggaagcactggctgtggagctgcgagccgagaaagacgcgcaggttatgaacctgggtgcgttcatctcgggggacctgaaggagagggactcgtggagagttgaggggtgtttcggaggaggggcgcaaggactgctcacaggacttgaagggcggcaggaaggtggaggattcggcccaggtgcgggacgcaggcggtggaagggaaatgagcacaagaggcgcaggcaggaaggagagcgcctggtgcgagagaggaaggagcgcacccagtaagcggtgtcgggggggtcgtgaagcttggagggcctcgaggggagggaggcgcttgggttgaggtagggcgccagatttcgcaaatcaaaatacagcacacccagttaaactcgaatttcagataaacaaatctttctagagaaaaatatgtcctaaatatcgcatgggatatacttatactaaaaaattatttgttgtttttctgaaattgaaatctaactcggagtcctgtattttatctgagagccccagctggggacgggcgcggggccaagagagctgcgagggaggaggggttgcaagcttctttcgggcggaggggtca

SEQ ID NO: 13032 - DNA, 31 bp, Homo sapiens
  chr20:48098878-48098909
  hyper
gccagagtacctcgtgcgccagccccccgac

SEQ ID NO: 13033 - DNA, 162 bp, Homo sapiens
  chr20:48099131-48099293
  hyper
gggggccccgcgggcgcgcgtcacggccgtcttctcacctccatcccgacggctgcgaggcagaaagcgaaagcggacgcgggtcagcaaacggggagctgggcatgctgtccccccgccccccacctctccaccaggctcccagccggccttgaccttccc

SEQ ID NO: 13034 - DNA, 172 bp, Homo sapiens
  chr20:48099322-48099494
  hyper
cggatggtcgctgtccctcccgccggtgctgaagtccgccgcaccccatggatggagggaggggccgcccctcggggcggggagagggccccaagagatgcccctggagcccgggaggccccaccctgggcttctgcggcccaggcgcgacccagccgcccggggcgctgtc

SEQ ID NO: 13035 - DNA, 30 bp, Homo sapiens
  chr20:48099875-48099905
  hyper
gcgacaaggtgagccgcgaggaggaaaagc

SEQ ID NO: 13036 - DNA, 30 bp, Homo sapiens
  chr20:48100397-48100427
  hyper
aacaggccgagctgcggcaggcaaaccccc

SEQ ID NO: 13037 - DNA, 248 bp, Homo sapiens
  chr20:48184406-48184654
  hyper
ccctcacccacgtgcggggccccgggactcccacctccgagggtctcgccttgcccgggatactggagcgggactcgggccgggccggccgcgggctccgagacccttgggctgcagcccgggcgggagccgccccctttgtctggcggggccgagcggagcaggacactcaccgcgtgcggcggcggctcagtagcagcagcagcaacagtgcggccaggaggccgaggagcgcggcccaagccatc

SEQ ID NO: 13038 - DNA, 30 bp, Homo sapiens
  chr20:48330531-48330561
  hyper
cttgcgctcgccgccgaccctcgctcggcg

SEQ ID NO: 13039 - DNA, 509 bp, Homo sapiens
  chr20:48598695-48599204
  hyper
tgacccgcctcttaacggtcgccgcgtcccgtctctcccccaccaaagcacacttccctttgcattgtaattatctgtttacttcgtctgtctccctcactggaccagaagctacccttcgggagaggctctgagtgttctgtccggggctgtgccctggccccaggtacagtgccccacacgtgctgggcgctccgtaaacactggataagggaaggaacgggtgctcttggctagctgggccaggctgctttgcaaaaaggccgtggcatttcaagccgccgagagccacgtgcggtgtccctttcctcgcttcctccccagtgatgtgcgtttccctcgtcaatgccacgctctccaggcgccagccgggcggaggaaatttccgccccctcccaagcccgaggcgggggcgggcgtcggaaggtcaggtgtcccggccggcgcgcagcgccagggggcgtcagaagcgctcagaccaccgggcgctgagccggtgggcgcgcggc

SEQ ID NO: 13040 - DNA, 30 bp, Homo sapiens
  chr20:48599506-48599536
  hyper
tgctgcattcattgcgccgcggcacggcct

SEQ ID NO: 13041 - DNA, 30 bp, Homo sapiens
  chr20:48729934-48729964
  hyper
taggcttgggaaggcgcgattgtgaaagaa

SEQ ID NO: 13042 - DNA, 199 bp, Homo sapiens
  chr20:48771161-48771360
  hyper
tttacagcagggcccccgtgccaggatcggggctggaacatggtagaagctcaataaatgcttgatgaatgaattaaggctcagccagatgcgtctaatacttcggcagataaatgacagcagcagggatttaccccaggtctaaccgacaacaaagtatgcaataatttctcatagaaattccatacaggcagccggg

SEQ ID NO: 13043 - DNA, 107 bp, Homo sapiens
  chr20:49226115-49226222
  hyper
gcactcgtgcaggctgcggcccagctcctgcaggctctctcgggctgcgcggctcggggggcaccgggcgaaggcccgctgcatgctggaggcgccgtcgcgcaggc

SEQ ID NO: 13044 - DNA, 31 bp, Homo sapiens
  chr20:49574742-49574773
  hyper
ccgcctctgcttccctcgcagggtggccctc

SEQ ID NO: 13045 - DNA, 134 bp, Homo sapiens
  chr20:49639050-49639184
  hyper
aactctccttcctcccaggatcgggggagaaacctcggcccacagccgggatgcgcccccgccggggtcaccgcggcggcgaacgtcccggacttcgcatcccggtgaccccttgggatgaaccgaagccggac

SEQ ID NO: 13046 - DNA, 639 bp, Homo sapiens
  chr20:49639217-49639856
  hyper
cgccacgcaccagcggtgactcccgagtcctctgtcgccctggcctccccgcaggcgggtttcgaggcccccgcagggagttcagggccacggccacgtgcagccgcccccgagcccgagtttgcaggctcggggtccggttcgcgctttggtggcgcccggcgaggctgcagcgcgcaaagttcccacctcaagttcccgtcgcggcgtccccgcctcggagttggcccggccgcggcttccgttccccccggctgcccacgggtccggggcgaggacgcgagaggggcctggaagtcgcccggggagcccgctctgcctcccggagccgccgccaaacttcggtcccggggcccggctcagctcccgccctcggagccacggccgccccgtctctgcctcccggtccccgccgggctccgagtgcgccgggagcgcggcgcagcagccgccgagggagggagcgaggcaggaggcgggacggagggaggggactgagcgcggggcggggagaaggggcgggcagccgaaagcgcagcgcctggcctcgcctcgcttcgggacagtggcagcggcgccaccgtcacggggcgtccaggcgcccaatcgggaccccgcaccttggatccgggggccctg

SEQ ID NO: 13047 - DNA, 114 bp, Homo sapiens
  chr20:49639882-49639996
  hyper
cggccagttcctgagcccgcgtccgggactgctcgcgctacgccctccctcccgttgccttcttccccgtctgctctcccaggagcgaccaccctgcggccccttcgcctgcac

SEQ ID NO: 13048 - DNA, 46 bp, Homo sapiens
  chr20:49640094-49640140
  hyper
cgcggtgcaagtgctccggtggtcccgggtccgcgcccctagcagc

SEQ ID NO: 13049 - DNA, 30 bp, Homo sapiens
  chr20:50158042-50158072
  hyper
cattgggcccagcccggggaagtccccagc

SEQ ID NO: 13050 - DNA, 769 bp, Homo sapiens
  chr20:50158920-50159689
  hyper
tcaaatactcatagtcgaagaggatggagaagtcaagctcgtcttgggggctgcccccaggctcgtggcctggggcgtccccgccgtcgggttggggctgccgctcgggggcgttcatggcgcgcagggcgggaaggctgcggggccgggggcgagggcgggcgcggctggctctgggacccctcgcagtggggctggcggaggcggctcgagcggcggggtccctttcctcgtagggacgcacgccgggtccggggacggcgcgcctggcgcagcgggtcctggacgcgcccggggaagctgagcggcggcggcgacggcggcgcgagcttcctgctccggaggcacctgttgcagcccggggaggcggggggggggggggcgtggaggcggggacagggcggccaggccggcgggggcggggccgccaccaggggaccggaggggaggggcgcgcggcctgggctggccggtgccgggaggaaggaggctgtccgcggacctgaccacactgtcccgggccaccgctgggcgctggggcggccgctgtctcccaccctccacgggtgagtgcgacacgcgctgcgcgaaccagggtctagacaagaaagctgccgccactaggacttttgccctaagggacccactggccccacactttttcctgcttttcttctccatggggtggaagggggtatccacccccttctattgcagacccgtgtctccaggcgtctccgtgtgcccacgggggcggcatgattttcac

SEQ ID NO: 13051 - DNA, 30 bp, Homo sapiens
  chr20:50179528-50179558
  hyper
tcaggaatccatgacgtcgcctcctccgcg

SEQ ID NO: 13052 - DNA, 1657 bp, Homo sapiens
  chr20:50383661-50385318
  hyper
tggttcactccacccgccgcgtctcctgttccgagcaactgacgctgcaataagcggccgccaccgggaaatgcccagagaggaccagacgcccgaggaagggcggagcagagcggccgcaggccccgcccaacaccgcgctcagcctcccgcgggctccagcctcacctgcgcggcctgtggagctgcacatctccaggccccgccccccagaactctgattggcgggtctaggcgggggccgggaaatctgcatttgcaccagcgcccacccccgtccttcccacccccgcccctcacgcccaggtaagtctatggcaggcgatacgagagccccgcaaacctcaacgcgtcacgctgccatcctccgaacaggaagacggcgaggcgcaaaataccaacccgtcccctcttcccaaatgcagaaaaacccttgcctgttccgcgcctaagctgccctcggggtctcctactgcgggaagggcacagcaggtggcagcccctgtcccagccgtgggattccttccccgaaattgtggggggagaacacaaggggtagtgtcaccaagcggccagtaggagaccctcccaccctcctgcgactgctggttcgggtccaccccgggcggagggggaaggggccaccggagcgcaggtggtctcggcgcagcctcctggggctgggacccaggggcgctgatggggtaccccgaggcgtaggccgcgcccccctaaaagctgagcatatctgggctcccgagtaatgctccaagcgcagagctcggtgtgacactgaccaaattgttacctcagatattaattacggacagatattaattacggaacaataaaacggtgagaaagcacggctgatccgaattccgcgagtgtgtaaacagcactggggcgggcccggcttctcggggtttctaaaggaaggtgggcaaggaggcccaggcaaccgggcgctcgaaccccaaagggccggcatcaggctaggtgccgcccggggctgaagcgcagggaccccctccccacctccccgcctccccagccctgccccaggctcatggcgccgggcgcggcgcgcggccaacctgtcaggcccggccaggctggcccgagcgccgggctccgggaggcgcggacaaaggaaaacacgggcccaggcccactcacccggcgcggggcctgctgtccatccgcttcttctggcgcaccggctgcagcgggatgttgtccgtcatgtcggcggcgccgcccgccttggccgccgcgccccccgcgccgcctgggccgccgcccggtccggcctccgcgccgccgcccgccggcgccgcgccgccccgggggaggaggcggcggcagcgggcgggccgggcccgcagcgagggggcgagctcgcgagcgccgggccacgcgcggagcgcccgcgcggcccgaccgacggacacgggcgcaccatgggcccgagctccgcgctgcgcccgctcgctccgcgccgcgccgcgcctgccacggggggcggccgggccgtgtccgcgccgccgcgaccgctgcagtgtccccgcccccggcccgcgcccgcgccccccacgcgcgcccacccggccacgcgccccccgcccacgcccgccgtgcgcgcaccctgccaccg

SEQ ID NO: 13053 - DNA, 1068 bp, Homo sapiens
  chr20:50417218-50418286
  hyper
tgttccaggtgggccaggccacgaagccttcacgctcccctcaacccccaccccaccccgcccccaaccaaggcacaaagagagtccctccaggcgcctgggacctcgggtgcgcgctgcgctgaccacccggcgccccgaaaacgcccagccatcccctccgtcaagccgatccttttaatttgccctggaaaaatgttaaacggggaattctattgacgtattataaacttgggaaatgtattacattcagtctccgacaaaaaggcggggatacggaagccaaaaagtggcgaccgtcttctcgggaaaccccgggtatcagagatggtctctgagagtcctccggggttgccgcgcacacccgtctgctgcagggaaattagaaagcaggcggggagcggagcgacgaacaaggccggagaggaggctacaaatcccccctccccccacgcgcacgctaaaaacttatcaggcgacaatttggcgggccgggatggagacgagatagtggaaaaccgcctcgctcctaaaacctccgcggtgaagtgatgaagtgggaacagagttggccccgccgttcctggcgcggctggggtcccgaactcccctcgatctgggaaacgctggccgcggaagcgtgggccaggtcagccgcgggagttcgctctggccccccacctctcccctttcacacccaagcgcaaatgtggaaagccgagcgctccagaaaagccacgcaaaacgggaggccggtgcaccccagtggggctgccgcgcgcccgccaccccggccactgggggctcgcaccctcgggcttgccgcggttatttttaggaagtcggaaatcaaagatggctggaggtcaggccccgaaaggttagggcgaagatcggcaggcggcgcagcccgggcagaaaaggcgaaatccagaaaagaaaaaaattttaaagggaaacattgagccctcctcccccacctctctgggccctccaatcccctgcgcagcgcgggtggcccgcaccccagctcctgagggtggggagaggtcgcgccccctcccccca

SEQ ID NO: 13054 - DNA, 56 bp, Homo sapiens
  chr20:50720503-50720559
  hyper
ggaagctggagagcccgcggctctggaggggtgagccgccccggagaggggaccca

SEQ ID NO: 13055 - DNA, 440 bp, Homo sapiens
  chr20:50720760-50721200
  hyper
cccctgagattccagtggaggcgggggatggggggatccctaacttgcaggaagaatttggcgagcgagaaaaggtcccctcccgcaggctcttctgaagcggaggatcccgggacgagaaatgctgcccggggggcttaaggtagccgacgatctccttgctacatcctgtgtccacgtggcagccgaggagggggtgtgggggccgcctgttaagtgcgacagcatcactgctctatccccaccacggctcccacttcgctcagataaaatgcagagctcttaccaaggctcacggccgtcccccgccccccaccgtctgcccccatcacctctcgggcctccggtgacctctcgggctacagcagcgctgacgccctgggtccctgcgcttctgttccctcggcctggaatgctcttcccccgggtacctgcacagc

SEQ ID NO: 13056 - DNA, 436 bp, Homo sapiens
  chr20:50721234-50721670
  hyper
cgtccgctcctcggtgaggccttccctggacaacgcatttgaaacgtaaccccaaggcaagaagccaccttccaggcgcgcagccgaagcccagtgccaaggaggccggagactcgggtgcccgcgcatcccgaaaacagcctctgaggggtcctctgagcatccttccagcgtgtttgggaggcaaactcgttgactagctcttgagaggagtggctagaggaatccaggcggggaaggggacggtggactccaggagagtgtaatttacaaaggcggggggcggggacgcccaggtccgagtcccaggactctgcgccggacgcttcgcccgccctttcaggtcccctgcccggtcctcgtacccgcgcgggtccggagaacctctgagcaccggcccccagcccccgggcggggctccagcggcgctactcac

SEQ ID NO: 13057 - DNA, 42 bp, Homo sapiens
  chr20:50721988-50722030
  hyper
gggcagcccgcgccacctgggagctcgttagaaatgcagact

SEQ ID NO: 13058 - DNA, 121 bp, Homo sapiens
  chr20:50722089-50722210
  hyper
gattcgcatgcacattaaagtttgagaaaccgtgtctgcattttaacgagatccccaggtgattcgtttgcccattaaaatttcagaagcgcagctctcctccaactttaatgtgcgcacg

SEQ ID NO: 13059 - DNA, 62 bp, Homo sapiens
  chr20:50722269-50722331
  hyper
gagctcctgtatttctaacgagctcccaggtggcgctgtggctgctgcgctgcacaggctgc

SEQ ID NO: 13060 - DNA, 157 bp, Homo sapiens
  chr20:50722630-50722787
  hyper
gtgactcgggcgcaccggctcttggaccacacaggagtgcttttggggccaacccggcgccggccccgcccagcaggtgacggaggcgtggtcctcggggggttgagctaattagcgttcatgctcagactggctgggacctcgatgagacccgagg

SEQ ID NO: 13061 - DNA, 30 bp, Homo sapiens
  chr20:51589970-51590000
  hyper
ttcgggggagtttgcgccgggtgcccttct

SEQ ID NO: 13062 - DNA, 30 bp, Homo sapiens
  chr20:51963662-51963692
  hyper
ggattccaaggggcttgatcaaaatttctc

SEQ ID NO: 13063 - DNA, 167 bp, Homo sapiens
  chr20:52209196-52209363
  hyper
gcccctcgggcgggaccgcccaggcagccccaaatccagcctcccgggcccccagcagcgccctccgcctctccaccatcccgtccggctcgcagtcggggccaaatcgagagacaagagggctgtgcctgaaactgagcggtttcaccactcggcacctcctggca

SEQ ID NO: 13064 - DNA, 24 bp, Homo sapiens
  chr20:52308720-52308744
  hyper
aaactgacctggaggccgggcgcg

SEQ ID NO: 13065 - DNA, 19 bp, Homo sapiens
  chr20:52311457-52311476
  hyper
ctaatttaaagtagaagct

SEQ ID NO: 13066 - DNA, 28 bp, Homo sapiens
  chr20:52789920-52789948
  hyper
cagtggccagctggtggggcccggcagg

SEQ ID NO: 13067 - DNA, 146 bp, Homo sapiens
  chr20:52790081-52790227
  hyper
cggcaagcgagcggctcttgctgatgggggagctcatggcagcgggggacaccggagcgcgggaaggcaggaggatggggtggggcgaggttggtacgaggtgctagtgggagtcggggcttaacgattctgggaaaaggaagcaa

SEQ ID NO: 13068 - DNA, 30 bp, Homo sapiens
  chr20:52790574-52790604
  hyper
gtggccaatgagcacgcagaggagggcgga

SEQ ID NO: 13069 - DNA, 507 bp, Homo sapiens
  chr20:53092025-53092532
  hyper
tgctcacgggtggccgcagcccagtgctgggactcgcgcggctcctcctcttagccccccaccccttcctcctctttcctcctcctccttcctcctcctcctcctccttcttctcctccttctcggccgggaggaggcagggctggatccctcagccgccgccgctcctcctcctggcaggccggccgcggagtcagctgacgccggcgctccagcctcgcctccccgcgccgcgctctgcgctccccgaaagtggctgcaagccggccgcccactgtcagggttggggggacagagaaagtgatgtgcgccttctaaagcctcgcccagcgccgccgaagcagcttcacctctccaactttctcccaccgactgcttgtcttgaccctgccctccaccctccccagagccacttcgggtgcgcgctcttgggtaaagggggggtcaccggctgtctgggatggcttccaattttaatgacatagtgaagcaagggtacgtgaggat

SEQ ID NO: 13070 - DNA, 181 bp, Homo sapiens
  chr20:53092686-53092867
  hyper
cgcgtctccggggctgtcactgtaaggccagcgtctaggtatgtaatggatctatctttatctcttggatgacttggctttctgatggtggccgcgtgttgggcttcagtagcccctggagcccatctactcgaaataaatatttctcggtagccatggaagttggagctgagaagcccgg

SEQ ID NO: 13071 - DNA, 255 bp, Homo sapiens
  chr20:53092912-53093167
  hyper
cgccgccaacttaacttttccgggggatggatcggctggttgagaaagaggacacgcatactcggtgtgaacgaggtcacgaaccctctgaccccagggagagatttctgccaagcgtaaggtgtctttggatccccccacctctgtcccaggtgtcgtgtcaaaggcggtgcgggctggcctctggtcggggccaacttgggtagatacttgaatctggattttccgtggttcgaagccggggtggtggatttc

SEQ ID NO: 13072 - DNA, 391 bp, Homo sapiens
  chr20:54578582-54578973
  hyper
caagatctggccaagagataacgacgtccagggaccaggtgcccttcggctcccgccgacctgttgctcgaaacttgccctgagctctcgctgccgggctctgggctcccaagcctctcccccgccgccgcagcagcctcttttaggggcccggaagaaatgggagccggggctggtgagaggggtaggaagagggacggtagaagtttcagacccaggcatatttgggaaggcgagtgctttacatgattccccatttcccaatcggaccagcttagcctgggcaggcagcctcgtgctgaggtgcctggagaccgcccaccccctaggtgctcgcttccccccgggtctgacctgatcgaagtaaatgatgcgcgtcttgttgctcatc

SEQ ID NO: 13073 - DNA, 53 bp, Homo sapiens
  chr20:54579139-54579192
  hyper
cgttctgtgcccagacgggcagccccggcagcgtgaggaccagcagcacggcc

SEQ ID NO: 13074 - DNA, 334 bp, Homo sapiens
  chr20:54934185-54934519
  hyper
tcccgcccaggctagacgcccggctgctccgcacggcgcgcggggactgccgcggccaccaggtaagcaccccaccccgaccctgatcccgggcggtgtccaggtccccagacgtccgcagggccgcgccggggtccggccgcctccgccaaggacgcctttgcacttgtagctgcccgggaccgagctcttccagggtccccgaaaccccaaatccctgcaagccaaggaagcgatcctcctagttgacagccagagaaactgaggctcgggaaggtgtggcgctctgcccaaggtcgcgcagtcttcggccgagccccgggtctgcagagcc

SEQ ID NO: 13075 - DNA, 411 bp, Homo sapiens
  chr20:55199899-55200310
  hyper
ctgaagaagtcctacgtaccgcttgtcatatacatatgtaaagataatttaaaaccctagggtatacccttttcaaatgcagagtttatagtttccaaggggaggagggcaggggaggagtaaccaggacctttcctgccagtcttccaatcgcgatagctcgttttggctgtgaatttccccccttcccctccccctcccgttaattaaataaacgctggaagcgtgtgtttaccgcacacgactcggccctcggggaactctttttctacgtctctcctactcttaaactcctcaactcacagagggttggagagctggcaccatgagcttccagttcctacgggtgagaaaagaggtgtctgtgtggagggcaggtgcgaccccgggggctagcagagaggagaggct

SEQ ID NO: 13076 - DNA, 741 bp, Homo sapiens
  chr20:55200615-55201356
  hyper
cgtacggatgggctccgggatgttagtggagaggtgacaggagtctaccatcccacggccaagcgtgtgaggcctccggcgggcgggggtcccccccggggcagggcagggggagagtcaggcatgtctctaacgggctccctagtagaaccgctaggaaagtggccttcaaccctaggcacctttgtggctttcaggtagttgggcgactaaaaattcacttttgcctgctgtgaaatgggacaggtggttgtcaggttagagactgtgcccacgaagtctcgtttggcgggccgggactgacgtggacccgggccctcctcggaagcttgggaacctgtgagcccctcagctcctcgcctcactttgcctgtttgaaaaaaggagttgtttgagaggaagagttaaggctcaaaaggttctaaacgaagagcatgcggcctgacgcggagcgcaaagaagcgagcagtgaactgaatctggtgggactgagaccagaggcgtctgtatgcggcggccgcttcgcgccctattaaagcaatctgttatttacgataatcatttttgtaattattttggagtggctgtgacttgatgtctgtggtgccccagggcatgcccttactggacatagatacttcagggtgccctttgacgccagtgtcggtccagtgggtgccagtgccgcgaagggagggtggcgggcgtgaatgccccctcctcctgggtttgccgcaggcc

SEQ ID NO: 13077 - DNA, 1 bp, Homo sapiens
  chr20:55201450-55201451
  hyper
g

SEQ ID NO: 13078 - DNA, 488 bp, Homo sapiens
  chr20:55201580-55202068
  hyper
cgtctggggtgggggcaggggtggcggatgactcaggcctggggccgggagccctgtttccaaaggcaccacctcgcgcctctttggaagtggcgcgctgttggggcgctcccgctgttgcagaggcctggtttgcggtttcataggggcgtgggtccagggcttccagggagtaagtgagtttaggctccctagggggcggtagaggggaacccccgacaaccttccatcctcttctccaggcggctgcgaggcctccggggttccagaggggtccccttctgccggtgccggctgtcttgagcgcggccacgcagtccgcgtcttcacgtgggcaaggggcggggacgttggagggaggctgtcttggatgctggagccttcggttcccggctctgctgagcagaaaagttgaagtcaaggaagggttgaggcttcctcacaagggcgcgcgcgtgcctgggtgccggcccagaagccgagaatgt

SEQ ID NO: 13079 - DNA, 1079 bp, Homo sapiens
  chr20:55202358-55203437
  hyper
gggcagctttggctagtgttgctgtgggaaaggagagccagggcctgggatgggggatgagcaccttcttgcccattccgggccccagcgtgcaggaggtaaacttgccagcacagacaagacagcttgttcaagctgcacctcaggccgggtcagagaataaaaccgagggctagaaggcccagaatgtcggacagcccagcggcacccgtcagggagtcccaggcgcccgaaagaggcgccgcacctctggcgagtctaggacccatcttcctggacctgtgctctggagtgcctgcgggcctgggtctaatttctgcttctggcaggtgtccccctcccccgccgctaataccaggagcgctgcttctgcggtaacttattttacccccagaagcctgttttgggaccgaagtgtcagggtcctgtgtgtctttttatgcactgttctccttagtgcaaagccctgcagatatgcttggccgaaaagtctcagtggtttcaacttccagattttgttcccgcgtccggtcggaaaatcacctgggatttggctgctgtctaaggccgggggaaagtttcccttggaggacgcctattattattattttcttttaggcccacctgggtctaaataaatgctaaagttcaaacgaacccgagaaggaacagcgaggcagtggatgccgccattccgtggatgggagagtcatgtctactgcaggtgcggacaccgtactgataggcattgattattgcaaaatcgtattcagtatcaaatagaaatagtcttgtcctctaatccccacagaatgtttaaatccagcccagggagccagttggggcgtcccaacaaatacgccctcgagaattagcgatgttccccttacaatgaaagtcaattgctgcataataactgggccaaagaatttcgttagtttaaattttaaaaattagtattgcactttgctttcaagtttgggtggcaagtaccgaaggggagagggaagcagcgtttgtgtggaaggaagtttcgttttctgtctaaacatgtgggacctgggtgtctacctctccag

SEQ ID NO: 13080 - DNA, 163 bp, Homo sapiens
  chr20:55203505-55203668
  hyper
cgggttttattcctgcccggcgcttctttcccagggcgagtagaggcttctgagtgaccggcccgccagaggcagctgcagagccggcgttccgcagggcagggcagggccgggccgctgggctggtccagtgcgcgcgggttccccctggcctcagccagcc

SEQ ID NO: 13081 - DNA, 58 bp, Homo sapiens
  chr20:55203806-55203864
  hyper
cgggaccgcgctgtgcccacggagggaactgggcgtctctggcgcactggggctccag

SEQ ID NO: 13082 - DNA, 1704 bp, Homo sapiens
  chr20:55204075-55205779
  hyper
tgccaatctcaggtgtgtttacggtggaggtgacagaaggaaggcgcgtcgggggacccaggcctcgcaggtcttcggctgtcaacgaggcaccgcccactgactccgcgcttcgtccctcacagcgtggggctcggcgctgcgccaggcccgggtgcggggcggagctaggctgggactggctgggggccgccccgcccggcgcctgggcctccgcgccggcccccggggaggagttatgataatttccttctcattaaggcgctcgggtcccccggctatcgccaggacacactgttcgggcgcggctttccccgtccgcggagcggtcttgacactcgcggcggcagcatctacgctcgcagagccgccgatgcgtgtccagtgacccggacagcaaggcccgcgcgcggcgggggcggcggcagacgcctggtcaccgtgaccccgattttggatttaccgcttgggggctggggggatcctggatttaactggcgactgttttgggggacgccggacgccatgttgtggaaaataaccgataatgtcaagtacgaagaggactgcgaggtgagctggggctccggggtgcagccccgccccgccgaggacagtccgggaggcaggggccactggaccgaggtcggggacgagggcataggagccctggcctctcggtgggacgggatccacttctccggacaccccttagtccatttctgcggggcccctttcctgtatagggccttttcctaaatagcctcccctcgggaacgaggcctggaaagagaatggcaaatcccacccacacagcttaccgggcgctttcctaagcggcaaacagccctgcttcccgttttctcggaaaagtgccccgtctgcaaccctcagacgtggcttttacgcacgaagtctctgtccaaaggggtcagatgaggctacctgctagcgacaccttggcggacactcctccaaggccggcttgtcacctgccccgctacctcctcggggaagcacgaaaacaaccgaagtttggctttcaaaagaagtgggggctggggagtggtggtgggggtgcccgaggccagatggggccgtaagagctcgcgagtgctccagcctgtcggacaggttgagctagagtttcggagagtgggagggaagaaggaggcggcgagcgggaagaggaagaagacgcaggcagcgctaggcgagctcaggggcgccgggagcgcggagctcgggctacggactcgcgggagttcactgcgcctccgggccctggagggctgcccctgcccgcaggcccgggcgcttccgccaggaggcgacagcgccatgttcctccaggttcccggcgccccgagacccctgggcagatggggacgcatcctttagaaactgagtcgggccgcccaggggcgagggaacgtgcgcgggcaaggctgcccaatttccagggttcttcatgccccctctgcgccccgacgtgcgagaacactgcccttggcagtgcagggcgcccccacttattactcccctcggctgggcccggccagcagggagggccgccctgtgcgcgcgctccctcttcacttcccagggcggcgcagggtggcgggccctgctttccgagcgccgcccgctcggaggtctttgtcccgagggcgtggaagggagggtcccgggggcgggggaggt

SEQ ID NO: 13083 - DNA, 136 bp, Homo sapiens
  chr20:55206293-55206429
  hyper
cgggtcccccacctctcctccgccgggcagcacctctacagccccgcgccacccctctcccacactggagtcgccgaatatcagccgccaccctactttccccctccctaccagcagctggcctactcccagtcgg

SEQ ID NO: 13084 - DNA, 134 bp, Homo sapiens
  chr20:55206463-55206597
  hyper
cgccgccatcaaccccctgcaccagccggcgcccacaggcagccagcagcaggcctggcccggccgccagagccaggagggagcggggctgccctcgcaccacgggcgcccggccggcctactgccccacctct

SEQ ID NO: 13085 - DNA, 22 bp, Homo sapiens
  chr20:55206736-55206758
  hyper
cgaggtgcaggtgagcggcgct

SEQ ID NO: 13086 - DNA, 295 bp, Homo sapiens
  chr20:55499421-55499716
  hyper
taaggagagtatcacgtttatactttaaaaagcccaactgctctgtttaaagtggatctttcataaacttgcagtcaggagcaacaatgacgtccttcagggagtcaaacactttggaaagaaacgcgaactgaaaatgctattggaggacgcaagaaaaccgaaaacgctcggtcgagtttttctgtcaagccacgtttgaaattaaggaattcgtgtaaattgccatctttcgcatccgaagcaagaaacgtacacagtttccctgctatacggagttgttgtgacataagaa

SEQ ID NO: 13087 - DNA, 127 bp, Homo sapiens
  chr20:55500174-55500301
  hyper
acacaggaaacaagcgttgagtgtgtgccaataaaaatggtcacaaatcagggctgctgatgtcataaccctgggggtcgggggtcagggggagtgaatgcgcctgaaagggaccgcctgtctgcgg

SEQ ID NO: 13088 - DNA, 280 bp, Homo sapiens
  chr20:55500440-55500720
  hyper
cggctcttttgcatgcaggcccgcctgaatggggcgcctggaggctgcattgaggccgggctgtgtaaactgtagggtgcctcgccgactcggagccgcagagactggcggcgggtcaacttggaccactttgcattcacgctttgaataggcggagcgggaggcgtcctttcccgcggccgcctttcagccgagagagtgacagattggaggtcagcggctggcgggacggaagccctcgccgggcagatggacccgctccgggccgcgccggggaccc

SEQ ID NO: 13089 - DNA, 70 bp, Homo sapiens
  chr20:55839509-55839579
  hyper
ccgcagcgcgctggcgctgccggggggttagtttgagcaagtctggagaatgtgcgcgcacatatggagg

SEQ ID NO: 13090 - DNA, 30 bp, Homo sapiens
  chr20:55840958-55840988
  hyper
cctggaggtgcgggcgcgggcggtggggca

SEQ ID NO: 13091 - DNA, 30 bp, Homo sapiens
  chr20:55841622-55841652
  hyper
gcaggggccccggggcgctctcccagcctt

SEQ ID NO: 13092 - DNA, 117 bp, Homo sapiens
  chr20:55841872-55841989
  hyper
gtgcctagagcctggcgggacgtcgcggggatgcggctggaggaatcggagccggccctgccctctcggcactcgcggtccggaccaggaaggcggcccgagcaggacgggtgggct

SEQ ID NO: 13093 - DNA, 134 bp, Homo sapiens
  chr20:55842055-55842189
  hyper
cggtgacccttgagccggtcttgcccctcagtccctgtatccttttaagccagccacgctgacccctccgcgcctccctgaagccgttgccagcctgtctctgcgctcgccattccctccgcctggacctctcc

SEQ ID NO: 13094 - DNA, 30 bp, Homo sapiens
  chr20:55964258-55964288
  hyper
ggggcgaaggagtgcgactggacccgcacc

SEQ ID NO: 13095 - DNA, 98 bp, Homo sapiens
  chr20:55966871-55966969
  hyper
ttcgtaagtggcccccgcgcccgggcccgcaccccgccgcacaccttatcgcggcccgggcgccgagtccactccggggcacacgcccagacggcccg

SEQ ID NO: 13096 - DNA, 431 bp, Homo sapiens
  chr20:56284098-56284529
  hyper
ggagccccagacacctcgcagaccagacagtgtctcacacgcccctccacccccgcccaaagttgataaagagccggcctaaatgctccatcgcgactgccctcagggaaataaaatggaaacttcacggatccgcccgccccaaccctcccgcgccgtgcgccgccgctgagccccgggtccgagtccgggcgggcggggcgcggacagcgggggccgtgccaggctcgcagcgccgcgggacaaagccgggccggccgccagctgccgcgagccgggagggcgcgcccggggcgcggcgggcgctgcccgggcgcagggcgttcggtccgagggggcgcgcagggcccggacccccgctcgcagctgtgccccgacatagggtccgagcccgatggagtctccggggaggggggcgtggggtcactcac

SEQ ID NO: 13097 - DNA, 216 bp, Homo sapiens
  chr20:56285527-56285743
  hyper
ttcgcaggagactgtccgccttcagttctccagcagctcggggatcatggcccactgaacccccaagcgctttcacccgaacccaaggaggacgaccaggaaagacgggaactcgcgtagacacgcccggaagcccttgtcatgtaaatagctgtcggggactggtgtattgtcgccgccccagccggcgggacctggggcgaatccacacccatt

SEQ ID NO: 13098 - DNA, 23 bp, Homo sapiens
  chr20:56577649-56577672
  hyper
acagaaagccaaacaccgcatgt

SEQ ID NO: 13099 - DNA, 142 bp, Homo sapiens
  chr20:56785103-56785245
  hyper
ccgacgccggcaggcccggagaggattttcttcgtgaatccaagacagaggggtggaaagtgctcaggacctctggggtgtgtcctgtgggccgctggggctggggtgcagcccacgaggaagtgtccgtggggtgtgcgta

SEQ ID NO: 13100 - DNA, 635 bp, Homo sapiens
  chr20:56803445-56804080
  hyper
gtcgggcaaggcactcgcggccttcgggtcacagacgagccgctggctccggccgcgggcacaggccaggggctgcgcggggagggcccgcgagtccgccgagcccaccctgggcccgccgcacccctgagccccggcccgcgcaccgctcctgcgtcccgcattggggtgcaggcgagaggcgcccccagttggccccgccgcccgcgctccgcccgcccccgccgccgcccgccgcatcccccaggcgcggccgcgcgtcatccgcggctcgagtgcggtggccacgcgtcatcgccgcccccgccctgacgccccaaggcgggcccatgcgccccccgccccactgtgacgcccaggccccgccaggaccgccccctccagacgcaaggcgaggcccctccctgcctgccgcccgagcctccagggagaccgatgggcgggcggccccccaaggtcccgcagtcctttcccgctccgcgatgaacaaagccgcagtttcacgcggccgcgggagacggttcttaaataatggaacaggacataagtgcttcccagagcaaccgggagatttattgataaatacagagacatcgccgggcagccacgctccgacaacccgcactgggcccccg

SEQ ID NO: 13101 - DNA, 281 bp, Homo sapiens
  chr20:57224798-57225079
  hyper
ggtcctcacagtgaactcgcccagccctgctcgcggctctctcgattttatgtgggtttcgttggatgcattttgttatttgcctcaatggatgtttcacattaatttttagttgcacaacgaacgcgcgggaacattctccgtgagagaaaaagcacgggtggggggcggttaccggtgcttcccccggtcgcctgggggtcccgcacgcgccccgcgggtgccgctgtctggctggggtccctgggtgagccgcgggcaccggcttcgcgtctccccgg

SEQ ID NO: 13102 - DNA, 335 bp, Homo sapiens
  chr20:57225218-57225553
  hyper
cgcagcccggcccgcagcctcgccccgcaaggggaagccggccctgcacaggcccggggcccggaaggcgccgccgcacagctctgcgcccccgacccgctccggccgcgcgctgggccaggcccttggcctcaagcctcccgggcggctccgggccggacccgggtctccgtcgcgggacgccagcctgtttgtgggtgccgtgctcgggcccgggcggcccctgcccgacgcggccccacggagcccctgcacgaaccccgccgacctggcccggggcggcaagtcgaggtgcttagggcgccctgggcccggccaaccgtggaaaacccggc

SEQ ID NO: 13103 - DNA, 48 bp, Homo sapiens
  chr20:57415187-57415235
  hyper
gtggcgccgagctcgccataattacaacgacctgtgcccgcccatagg

SEQ ID NO: 13104 - DNA, 303 bp, Homo sapiens
  chr20:57415538-57415841
  hyper
gaccgagcctgagaccgcccccaccactgagcccgagaccgagcctgaagacgatcgcggcccggtggtgcccaagcactccaccttcggccagtccctcacccagcgtctgcacgctctcaagttgcgaagccccgacgcctccccaagtcgcgcgccgcccagcactcaggagccccagagccccagggaaggggaggagctcaagcccgaggacaaagatccaagggaccccgaagagtcgaaggagcccaaggaggagaagcagcggcgtcgctgcaagccaaagaagcccacccgccg

SEQ ID NO: 13105 - DNA, 2077 bp, Homo sapiens
  chr20:57428310-57430387
  hyper
ccaccgtgttatgggcgtgcgcaactgcctctacggcaataatatgtcaggacaacgcgatatcccccctgaaatcggggaacagcccgagcaaccacctttggaggccccaggggcagctgcccccggtgctgggcctagcccagccgaagagatggagaccgaaccgcctcacaacgagcccatccccgtcgagaatgatggcgaggcctgtggacccccagaggtctccagacccaactttcaggtcctcaacccggcattcagggaagctggagcccatggaagctacagcccacctcctgaggaagcaatgcccttcgaggctgaacagcccagcttgggaggcttctggcctacactggagcagcctggattccccagtggggtccatgcaggccttgaggccttcggcccagcactcatggagcccggagccttcagtggtgccagaccaggcctgggaggatacagccctccaccagaagaagctatgccctttgagtttgaccagcctgcccagagaggctgcagtcaacttctcttacaggtcccagaccttgctccaggaggcccaggtgctgcaggggtccccggagctcctcccgaggagccccaagccctcaggcctgcaaaggctggctccagaggaggctacagccctccccctgaggagactatgccatttgagcttgatggagaaggatttggggacgacagcccacccccggggctttcccgagttatcgcacaagtcgacggcagcagccagttcgcggcagtcgcggcctcgagtgcggtccgcctcactcccgccgcgaacgcgcctcccctctgggtcccaggcgccatcggcagcccatcccaagaggctgtcagacctccttctaacttcacgggcagcagcccctggatggagatctccggacccccgttcgagattggcagcgcccccgctggggtcgacgacactcccgtcaacatggacagccccccaatcgcgcttgacggcccgcccatcaaggtctccggagccccagataagagagagcgagcagagagacccccagttgaggaggaagcagcagagatggaaggagccgctgatgccgcggagggaggaaaagtaccctctccggggtacggatcccctgccgccggggcagcctcagcggataccgctgccagggcagcccctgcagccccagccgatcctgactccggggcaaccccagaagatcccgactccgggacagcaccagccgatcctgactccggggcattcgcagccgatcccgactccggggcagcccctgccgccccagccgatcccgactccggggcggcccctgacgccccagccgatcccgactccggggcggcccctgacgccccagccgatccagatgccggggcggcccctgaggctcccgccgcccctgcggctgctgagacccgggcagcccatgtcgccccagctgcgccagacgcaggggctcccactgccccagccgcttctgccacccgggcagcccaagtccgccgggcggcctctgcagcccctgcctccggggccagacgcaagatccatctcagaccccccagccccgagatccaggctgccgatccgcctactccgcggcctactcgcgcgtctgcctggcggggcaagtccgagagcagccgcggccgccgcgtgtactacgatgaaggggtggccagcagcgacgatgactccagcggagacgagtccgacgatgggacctccggatgcctccgctggtttcagcatcggcgaaatcgccgccgccgaaagccccagcgcaacttactccgcaactttctcgtgcaagccttcgggggctgcttcggtcgatctgagagtccccagcccaaagcctcgcgctctctcaaggtcaagaaggtacccctggcggagaagcgcagacagatgcgcaaagaagccctggagaagcgggcccagaagcgcgcagagaagaaacgcagtaagctcatcgacaaacaactccaggacgaaaagatgggctacatgtgtacgcaccgcctgctgcttcta

SEQ ID NO: 13106 - DNA, 101 bp, Homo sapiens
  chr20:57466876-57466977
  hyper
ggacaagcaggtctaccgggccacgcaccgcctgctgctgctgggtaagggcgggcggggggcgccggccccggcccgggggccctcgaagggcgccccgc

SEQ ID NO: 13107 - DNA, 34 bp, Homo sapiens
  chr20:57470652-57470686
  hyper
ctttcattttctaggtgctggagaatctggtaaa

SEQ ID NO: 13108 - DNA, 252 bp, Homo sapiens
  chr20:57478607-57478859
  hyper
gacatcaaaaacaacctgaaagaggcgattgaagtacgtgctggctccttgtgctgtctgtcttgtagcgccctcccagccagtgctgttccctgaccgctttgctaaatcattttcagaccattgtggccgccatgagcaacctggtgccccccgtggagctggccaaccccgagaaccagttcagagtggactacatcctgagtgtgatgaacgtgcctgactttgacttccctcccgtaagctacaccc

SEQ ID NO: 13109 - DNA, 30 bp, Homo sapiens
  chr20:57480439-57480469
  hyper
attctatgagcatgccaaggctctgtggga

SEQ ID NO: 13110 - DNA, 438 bp, Homo sapiens
  chr20:57484404-57484842
  hyper
gacctgcttcgctgccgtgtcctgacttctggaatctttgagaccaagttccaggtggacaaagtcaacttccagtaagccaactgttacctttttatataacagagatcatggtttcttgacattcaccccagtccctctggaataaccagctgtcctcctccccaccagcatgtttgacgtgggtggccagcgcgatgaacgccgcaagtggatccagtgcttcaacggtaggatgctgtgggcttggctgttcgtaaagaacgctttgcttctgtgttgttagggatcagggtcgctgctcacgctcttggctttgctctctttggttaagatgtgactgccatcatcttcgtggtggccagcagcagctacaacatggtcatccgggaggacaaccagaccaaccgcctgcaggaggctctgaacctcttcaag

SEQ ID NO: 13111 - DNA, 30 bp, Homo sapiens
  chr20:57485068-57485098
  hyper
ccttgctgggaaatcgaagattgaggacta

SEQ ID NO: 13112 - DNA, 97 bp, Homo sapiens
  chr20:57485782-57485879
  hyper
catttcacctgcgctgtggacactgagaacatccgccgtgtgttcaacgactgccgtgacatcattcagcgcatgcaccttcgtcagtacgagctgc

SEQ ID NO: 13113 - DNA, 30 bp, Homo sapiens
  chr20:57797362-57797392
  hyper
gacccctggctgggcgctcccgagaccccc

SEQ ID NO: 13114 - DNA, 30 bp, Homo sapiens
  chr20:57798081-57798111
  hyper
tgccctcacataaacgccacccagaaatgc

SEQ ID NO: 13115 - DNA, 577 bp, Homo sapiens
  chr20:57875496-57876073
  hyper
gcctcgggccgctgcgctcctggccagctccccccagcgcctgggaggcgacccccagtgcgcccgggttcaaaggcccggcgaggcagttccagcccctctggggggcggggaggcgacgggggtggtgcagaagccagaaaagcccgagccacagccggccagctccgcgcagggatgggcagcgcgctctgaaagtttatgaccgccgcagccaactcctggccggagctggagacgcagcgagcgatcggccggcctcgaacccccacagctggagggcgaggccagctgtacccggccccagtgccctttcgcggccacaagcggccgtcctcctggtccggtgctccggcgcctgatctaggttcatggagccggggctgtggctccttttcgggctcacagtgacctccgccgcaggtaagcgcacggggcggcgcgcctctcctggcgcgagcgcacacaaaaggacccagggcgggggacccgaggcgcggagaagatgtgcgtcgcggggagcaaactcttgcctgggctctgcactcgtgaagacgcctgggggagggctggggag

SEQ ID NO: 13116 - DNA, 315 bp, Homo sapiens
  chr20:57978780-57979095
  hyper
caggaacctgagtggggggcacggggcccgaggaagaaggggccagcgggctgttccccacgctgcacccccactctggcgcagcgaagtctgcagatctctgggccccggcgctgccgaagcctcccccacgcgccgcgctcactcgctgcacaacagcgccaccacgaggccgcgggcggaactgccggcagcacagcggtcgcaccccccgggccccccgccggctgtgcggatcccgaatccctgcttggctcggagctgccaggtctaagccgaccctcagagacgcacgcccctgacccactgggcagc

SEQ ID NO: 13117 - DNA, 136 bp, Homo sapiens
  chr20:58090759-58090895
  hyper
aaggaatctcctctcccgagtttgcagcccgcgccttctgccgggcgtttggcgcatttcttccagagaatacggatccgaattattccagaggagcctcggccgcagtctctccagccgccgccagagggaaacc

SEQ ID NO: 13118 - DNA, 13 bp, Homo sapiens
  chr20:58179981-58179994
  hyper
tccagccccctcg

SEQ ID NO: 13119 - DNA, 142 bp, Homo sapiens
  chr20:58180236-58180378
  hyper
gtggcgctgagagcaggaccccgcgaggctccgcgccccgcctgcattcggggagccgcggcaggaacccgcgctcggccccgcggttcctatccccagtctcgcagggctggggcgcctcggagccctttgtccataaaag

SEQ ID NO: 13120 - DNA, 31 bp, Homo sapiens
  chr20:58323973-58324004
  hyper
tgtcagcacacaaacccgattgtgggcccag

SEQ ID NO: 13121 - DNA, 498 bp, Homo sapiens
  chr20:58514020-58514518
  hyper
cagcagggaaatgacaggaggcgcagcttaggtgtggaggctccaggtggccggtccccgcgcggctcagatgaagtggatccagctctcttcgcactccccgcgaggcatgtgcagcgcgtggttgcgacatgtgaggctgtagtctcggtggtcgttgttgtcccagtactcggcacccgccacttggtagcgcaccgcgaagtgcacgcgggagccgagctccagcaggaagggcggtactggaaagccgaaggtgaaaacgtcctccgtgccctcggggcctgcgggcccgcgccaccgcgccaccgcctcgtgggtactgcgccagcccgagaaagtgtagcgcacagccacctgcttctcgaaggccacgttgcacacgcgcaccgtaccgctgatgccaaggtccgagcaagtgacacgctccaggcacacgagctgccgctgcaggcgctcgccaaagtcggcggcctcgacgggcggcgggaaatcggg

SEQ ID NO: 13122 - DNA, 21 bp, Homo sapiens
  chr20:59826956-59826977
  hyper
aatggaagtgcacactcccac

SEQ ID NO: 13123 - DNA, 67 bp, Homo sapiens
  chr20:59828340-59828407
  hyper
cgggagggcgagcgggtctcccgctgcctctgcagagccccgcgggccggattgccagctttgctct

SEQ ID NO: 13124 - DNA, 113 bp, Homo sapiens
  chr20:59828962-59829075
  hyper
ggggagccaagcaccgctgtgctcctgctccttcagcggggctggcttcccgcttgcacacactgcctctccctccaccacctcctcctgcctgtcacgccccctcccagaag

SEQ ID NO: 13125 - DNA, 255 bp, Homo sapiens
  chr20:60552246-60552501
  hyper
gcccagcggggcgcgcgccacacacacacaacaccgcccagcggggcgcgcaccacacacacacgacaccgcccagcggggcacgtgccacacaactcccaacagctgtcatttcccccagctggcatgaaaactaagttctgctccgatggtgaaagctgctcacatatatttaagtacaaagattacgatggcatctttacagcacattctcaaccaaagttaagatgctggaaggagcggattctgctgtgt

SEQ ID NO: 13126 - DNA, 31 bp, Homo sapiens
  chr20:60639842-60639873
  hyper
cccccggcgccggcgccgcagccgccgcgcc

SEQ ID NO: 13127 - DNA, 30 bp, Homo sapiens
  chr20:60697023-60697053
  hyper
ataggggagtcgtccggaccccacttctgt

SEQ ID NO: 13128 - DNA, 30 bp, Homo sapiens
  chr20:60757904-60757934
  hyper
gccggcgagaagcgcggctgcagctgagcg

SEQ ID NO: 13129 - DNA, 244 bp, Homo sapiens
  chr20:60941670-60941914
  hyper
caagtcccgccctccccgggatcccggacttggggccgccagggactgggcccggcccccctcccgccccggtcaccgcagtcgaactggaccggcgcccagccgcccccgggtccatgccggggactttaattccgccttcccggagggacgcgaagtttcccggccgagacggagcggccgggtcggggtgccttcttgggcccccaaaatgcggaaccagagagtccgcacctggactcgc

SEQ ID NO: 13130 - DNA, 30 bp, Homo sapiens
  chr20:61339856-61339886
  hyper
cacgatacccgccgcgcccgctcggaatcc

SEQ ID NO: 13131 - DNA, 30 bp, Homo sapiens
  chr20:61340101-61340131
  hyper
gggtgcgcggagagcgcgagggaggagatt

SEQ ID NO: 13132 - DNA, 30 bp, Homo sapiens
  chr20:61435814-61435844
  hyper
tgctgggaggacatcgtcgggaagacatcc

SEQ ID NO: 13133 - DNA, 68 bp, Homo sapiens
  chr20:61447608-61447676
  hyper
ttggccggacctggcgacccctgagcttctgggaaatggacatggccagcaccgccttcaggttcctg

SEQ ID NO: 13134 - DNA, 76 bp, Homo sapiens
  chr20:61492901-61492977
  hyper
tcgtgaagctcagccccggctcgcccagcgccgcgtccccgccgcccgcgccctcgacggccgcctcgccgcctgc

SEQ ID NO: 13135 - DNA, 64 bp, Homo sapiens
  chr20:61511890-61511954
  hyper
ggccccttctgggctccgaatctggctggcggaggccctcgtggcccatcgttagaagcgatat

SEQ ID NO: 13136 - DNA, 102 bp, Homo sapiens
  chr20:61560358-61560460
  hyper
taagactcagggtccgcagcagaataccctgacccaaaataaaaatactatgacaaaaatactccaggaggcagccggctttacttcgtttaaagccggatt

SEQ ID NO: 13137 - DNA, 379 bp, Homo sapiens
  chr20:61560528-61560907
  hyper
cggcccgtcctctccaagaaccggaagccggacagcgtcaggacgttttattcttctcacctgggattcagagaggcagcggccaaggacagggcccccgccgaggccaccgggcagcgtccaggtctcggcctttgggaggggagcagcgggggaggggcacggggaggggcgagggcggggcgcgcctgggcctcggcgctgggctcctcctctgcccgctccgggggacacccacaggattcttgcagacctctgccgaggcaggatggaggcctgcagggatgcaccgcgggcccgcgacccgggcggccggaacatagttctttctggccggagatcggcccggtcgtgagtcgtgtctgtgccaggcccccca

SEQ ID NO: 13138 - DNA, 337 bp, Homo sapiens
  chr20:61585336-61585673
  hyper
gattcagggcctcctcactggcggctggtttgagtggctccgccttcactacgtccctcccaggctcgatgtttaaaaaggagcccttgccgcagccttcactacgtccctcccaggctcgatgtttaaaaaggagcccttgccgcagccttcactacgtccctcccaggctcgatgtttaaaaaggagcccttgccacagctcttcaacttcctttgcaggcccttattgggtagcgccaaggattctggaggggcctgtgggtcaaggctgccacacgcacgccttttcctagcccgccctcctgcagccacatcacaaaggctgggccaggcga

SEQ ID NO: 13139 - DNA, 221 bp, Homo sapiens
  chr20:61637735-61637956
  hyper
cgtgcatgcgccgccgctcgcgcgcgttgatgctgagccgcagagaccgctgctctcgcggccgccgccgcccgtccgccgcgctccctggcccgcgccgccgccgccgctgctcgaaggcgtcgtcctcgtccccgctctgttcgccgctgctctccgccgcctgagctggggcgcgaggtgcaggcgccgcggggaggtcgccgcccgggcccggagtg

SEQ ID NO: 13140 - DNA, 249 bp, Homo sapiens
  chr20:61638220-61638469
  hyper
cgggtcccagagcctcggcgcccgctgcctcctccgcctcttccttctctcccacctcctctccctcccagccgcgacgcgcagggggcgggctctacctccccctcgcccccgcttcggttttaagccgcggaggcgcccggtgggacctcgctgctgtccaatcaggggggaccgggtgagctcctcttcctggagccgggctccaccagcgccgcaggctcacaggccgggggtgggggctctgga

SEQ ID NO: 13141 - DNA, 263 bp, Homo sapiens
  chr20:61638534-61638797
  hyper
cgactccccggccgccgcctccggccgccccggggattccgccaccaaacgcacgcgtcccaggtgggcacccgcctcggtccgtctttgagtctgaccctagcgcaagagtccctggcgacacgcaggggccagagcgggggggcgcgccgcaatagcagcagcgccagcgccaacaccctgtcccgctgaggggccgcttcgggtcggggtcagggtcgtgggcgctctggtgcagccgcggcgcagcgtgtacccggagc

SEQ ID NO: 13142 - DNA, 31 bp, Homo sapiens
  chr20:61640692-61640723
  hyper
attctgcgcaggtggacgctgggggctgttt

SEQ ID NO: 13143 - DNA, 820 bp, Homo sapiens
  chr20:61733166-61733986
  hyper
agtatgaatgtgtgtggtaggcgacagctgtgtgtgtacgtccgggtgcgtgtgtgcgtgtgtacatgtgagcgtgtgtgcacgtgagttagagcctgagtgtcccctgcgtgggttagtgtgtgcgcccgcccggtgccctccgtcttgggagtctgggctgctgctccgcgggctctggagccggcgctccccacgagcccggactctccgccgcgcccgggagctgcgcaatcggctgctaagacgccggcgccaccggctgggccctgttctcccctctcttttctacagtcttacccgcagctgacagggttcgaaagagcatgaaacggaggagacgttacagcaacgtgtcagctgaaatgatgggcgtagacgcacgtcagcggcggaaatggtttctatcaaaatgaaagtgtttagagattttcctcaagtttcaaatgaggcgaatcccgttttccgcgatgctgcagcgcgcgggttttaaccgcagggtcacgcggaacgccgcgccgcgcgactgtgcctcggtctctgcgcccggctctccctccggtccgcaagaggaggaaggcccgcggcgtgccgaggtcagcggcgcggagccaccaggcgagacggtcacggacgcctgaaccgaggtcaccgaggccacggggccgggaggccctcagcagagcccgggggctccgcacctcaaggccggccaggaagaaacagcagcaggagcccagggcgccccggggagcccccgacacgcgggccgagcgcccagagcggcccaggccctcgcgaggagaccggcctccccagg

SEQ ID NO: 13144 - DNA, 357 bp, Homo sapiens
  chr20:61734251-61734608
  hyper
ccctccccaccgccgcccctgcggtgagatcctgcctgccggggcgcaggggcccgcggttgggctccgggagacggaagaggccccacagctcgggccccacgcagtggacgctgccacttaattttggcgtaattgatgtcaaggcgggtgcccgggcccccagtgaaatgcctcatgaactcgctgcgaggaacggcgctccacgcggtgcacggtggccaatcagagctgccgcttctgatggaggctgagccggctggggaggcgtcttggccaagaaccagccccagcctcgctcagggccccaacccgcagaccatgtaattaagctgcgttctgcagccagggcaaggt

SEQ ID NO: 13145 - DNA, 339 bp, Homo sapiens
  chr20:61808666-61809005
  hyper
cgtttccttgggtctccgtgtggccgccgggcgcagggcacggtcgagggcgctcgatggctgagtccgcgtgagccgaggagcgcgcggggcgggacgcggtgcgaatgcgcgggaggcacgaggcgcgcagtgcgtgtgtgcgcgtgtgcgcggcgcgcgtgccccgcagttctcaaggacacctcggggaggcagcggcggggccggtgtccgggtgacgtcaccgcgcgccccagtgataatcggccggtgccggagcggagcgcggatacgcgcggaggcaacggcgacggcggcggcggcggcgggcgcggggacagttgcatcggggccggg

SEQ ID NO: 13146 - DNA, 413 bp, Homo sapiens
  chr20:61809218-61809631
  hyper
cggctcccgccgggactggtaattacgctcggggccgggccggggcgagccgggcaagcggcctctctgggtctccccgtctttctctccacgaacagctcgagcgccttctcgcgggcccgctgcgcgcggagaggacgagctcgctgggttgtaaaaagagacgagttttcatctttgagcatcgagattcgttcttttaaccgcattcggtgcgcgctcctgggtcggcacgggcagggcgacggcaggggaaggcagctgcggaggagctcgcgccgcccagtcggagcggttctgcgcccctcggagccccgcgggaggcggccgggtgcgcacgcgctcaccacccccacccccggaatccgtcttcgcgattcccgggcgccccagctccaggaacgcccggaggg

SEQ ID NO: 13147 - DNA, 294 bp, Homo sapiens
  chr20:61809840-61810134
  hyper
cgccccagccctgagggcccctctgcgtgttcacagcggaccttgatttaatgtctatacaattaaggcacgcggtgaatgccaagagaggcgcctccgccgctcctttctcatggaaatggcccgcgagcccgtccggcccagcgcccctcccgcgggaggaaggcgagcccggcccccggcggccattcgcgccgcggacaaatccggcgaacaatgcgcccgcccagagtgcggcccagctgccgggccggggatctggccgcgggacacaaaggggcccgcacgcctctg

SEQ ID NO: 13148 - DNA, 397 bp, Homo sapiens
  chr20:61810159-61810556
  hyper
cgagggcggccgaggggggagcctgcggccggggccaggctgcggccagccggcccccggccacgtgtgtccgcagcgcggagcgcccaggcgcccgcagagggcggcggggcccgggagacaaagggagggtccacggggagcggcgggcgggtgcgtggggcggcgggctagggtgcggcgctgtccgcggtgctggcggcggggcggcccccgcgggacgggagggcggccaagtgcggccctcgcccccacagcgggcgccctggacagttgccacggcaacgtgggaggaggtggggcagggtctgaggtcaccgctaagtctgcccttcctcgggccgctgcgccgcggggcggggcggaggcggcgctcgctgtggccccagagcagccc

SEQ ID NO: 13149 - DNA, 7 bp, Homo sapiens
  chr20:61810632-61810639
  hyper
cgccgga

SEQ ID NO: 13150 - DNA, 30 bp, Homo sapiens
  chr20:61810887-61810917
  hyper
taacagtcagaggacgaccccctccccaaa

SEQ ID NO: 13151 - DNA, 30 bp, Homo sapiens
  chr20:61847112-61847142
  hyper
gggcccggcctccgcgaccccgggctctgc

SEQ ID NO: 13152 - DNA, 181 bp, Homo sapiens
  chr20:61862297-61862478
  hyper
ccaaccatcccaaccaaactctgcatcgttccactagctgatcgcctgccggagtctcagtgtgctcttctgccggcgtgctccccctgatggcctctcgacgtccagccgcttgtgtgttctgccaatgggctcctctccgtgtccagggcttaggtgcctgcccgctaggtctcagggt

SEQ ID NO: 13153 - DNA, 30 bp, Homo sapiens
  chr20:61885276-61885306
  hyper
acagcctccgtcatcgccccacccgaatct

SEQ ID NO: 13154 - DNA, 426 bp, Homo sapiens
  chr20:61885777-61886203
  hyper
cgcagcggccggagcaggagcccatggtgcccgcctatacaggaggcccccgggtgccccgcgctcggcccccgcccccgctccgcccgctccccacgcgccgcagcctggaccccgccccctccgcatcccgttcccccctcctccccgcaacccccggcccagccccagccccgggtaacagctgcgctgcgtctcccctcccacccccgcctgcggcccctgggggcttcgcgccggccggagagggggaccgttcttaaaggggcgatggcgcggcctctcgggtagcgaggggcggcgccgcggccccaggacagacctgcagctgaggggagcccgccctggacgcggcagggatgaccggcgtccgccccctcctgcaggatgacctgcccagcacctgctcccgccgtgcgccctccg

SEQ ID NO: 13155 - DNA, 21 bp, Homo sapiens
  chr20:61886256-61886277
  hyper
cgaggcgttttctctgagagt

SEQ ID NO: 13156 - DNA, 57 bp, Homo sapiens
  chr20:62119561-62119618
  hyper
gcgcgcggggcgggggcggggcgggggcccgggcccggggttcggagcgcggcaccg

SEQ ID NO: 13157 - DNA, 184 bp, Homo sapiens
  chr20:62119922-62120106
  hyper
ggcctcgcgggagtcctgcctgggcggctgctccacggtctgcggggcggccacggggcgggggcagccctaacgctgccactgggcgaccgcgggccttcctcactcgcggggcctccctcactttcggggcctcgtctgcacacagggcccaccccagctcgtctgggcagggtcacctgca

SEQ ID NO: 13158 - DNA, 413 bp, Homo sapiens
  chr20:62185030-62185443
  hyper
atgggtggcatctgtaatgggcggggccttgctgggcagagcccgcggcgggggaagccgcccctctcctctgtccaggcgctgggtggtccatccgcctggtcaccggccactgcctctctcccaaattcctccgagggattcccgaggagtgcgctcggactggggggttgagcaggaactccctcccagtcacccgaggctcctgcgccccgcccgaagccgggggtgcgtggggagtggtgcgcccgcggaagggctccgggacgggaaccccccttggagcctggctcttggaccagccacccgccgtggcccctcagtcggggacgcgggcccccagaagtctggggctctccaggaagcgaagcggatggaagattactcggctcggggtcccgggtccccacccc

SEQ ID NO: 13159 - DNA, 107 bp, Homo sapiens
  chr20:62273410-62273517
  hyper
cgccccggcccctgcccgctccgagctccgccccggccccgcccccgcaccttctcgcgcagccgctcgcgcagtgcggccaggtgtgcctcgcggatctccttgct

SEQ ID NO: 13160 - DNA, 68 bp, Homo sapiens
  chr20:62273725-62273793
  hyper
cctcccgcccagcgcccgctcgcctcacctggcgcctccacctgcccaggcctcggtgggcgccggga

SEQ ID NO: 13161 - DNA, 30 bp, Homo sapiens
  chr20:62284063-62284093
  hyper
gccagagcaggtggcgcgggcgtcgcaaag

SEQ ID NO: 13162 - DNA, 940 bp, Homo sapiens
  chr20:62383188-62384128
  hyper
gtctcccatgaagccccgccccccggtgggtctcccggtggagctcggctcctgcaggtccgctccggaacctgctgactctcctgcgattcctaaactggcagcgatgctccagagcctcttccgccccgacagcagccccacctctgcccggagcccggggcgcctccactgcctctcctcacacagctgcccgccgcgagctccccctgcaccctgcgcctcggggtgggcgttccaggactccccgaacccttggggccgccccgctctgggctgcctgtgccccacccgcctcactggttgatctcacccacttgagatgccctcgccaggccttttttggcaaatctgcctccctgttcccaggctgcctttttctattatttcctccccaagcaaatccatccactccacacctgctacctgacaacgacctgccagtgctgagctccagggtgggcgcggtgggtgcagacaggtcggcaggcacaaggacagggttctccctcccgaggcagggcgggggcgggggggcgcagaggtggctgagggttgggggctccaagcagagcgagctgagtttgccgaggcctggctgccttggcggccagcaggtgagcagggtgggccgaagcctctgcaggggccatgtggcccagccacacccaggaggccggggcagagcagacaggggcccggggcggatctccctgccctgctgtcgtcccccctgtgcagagtggacccggtgtggggtccggggcggtctgcgccctcatcaggacccgcctgcccggacatcgtggccacgcgcagcgcgcggcacgcggaccctccccgcactcaccagcgtgtggcgcttcatgtgctcgcgccgcgtgaacttcttcccgcagatctcgcaggggtagggccgctctcccgtgtgcgagcgcat

SEQ ID NO: 13163 - DNA, 376 bp, Homo sapiens
  chr20:62384602-62384978
  hyper
tggtgtccgatcagacgcctccctggaggcagagaagaaacaaacactgtggagtaatacggacccaaaagtgtgcaggcgaaatgggagatgtgggtgcaactcaaagtcctgggctcttcttgctggacgccggagaagcagccagacccatttaatcaagttcttttcccccaaccctgagacccaacgtcactcagtggcaggaactccacaccaccatctccatggtgcgtgccctggggccaggctcaaaaacctgggggaccctcagcacgcccagtgccgttatgctactcaggcccagataccagcacgtcagacctgggcatgggccactgagagagcccggagcagccacgtccacgggacccta

SEQ ID NO: 13164 - DNA, 465 bp, Homo sapiens
  chr20:62461264-62461729
  hyper
cccgtgagttctcggcgcacaggtgtctgcgcccaggccgcgcgctaaacacgtttctaattagcatttctttaaacaatgctgatcacaatcttgccaccgtaatccactccaaatgcatcgttgagattgcagcacggaaagcgagagaggaaattcgctgcgaatctcaaactttcttttgtttatatttcttcgctgtcagaaaatatccgttcttcgccccatctggtctgtaccctggctcctcggtccagccctattgtgtgtgcttcgttaaacctacaaacagtgaatctgtcagcggggccaggggaaccccaactagcaggagccctccctctggcgcagagaattccccgtttgccttagggattgagttgtcagacaccggctcgcgctcccccgcgaaactgacatgtctatttacagagaaacaaagacgcggctcgcagcggaccccgc

SEQ ID NO: 13165 - DNA, 34 bp, Homo sapiens
  chr20:62463024-62463058
  hyper
acgggagcggcgaccccggcgagggcacccgctc

SEQ ID NO: 13166 - DNA, 13 bp, Homo sapiens
  chr20:62463386-62463399
  hyper
ctgactaggggca

SEQ ID NO: 13167 - DNA, 126 bp, Homo sapiens
  chr20:62463622-62463748
  hyper
gcattcctggccggcctgcgcaggggtaaaggccacctcgcttcctctccccgggcgcggcgggaagggaggtgagcctgtggccggcagccgcgcgagggagtcgagcccggcccggccaaccaa

SEQ ID NO: 13168 - DNA, 31 bp, Homo sapiens
  chr20:62467675-62467706
  hyper
gcaggggcagggagagcgcaggcagggcagg

SEQ ID NO: 13169 - DNA, 30 bp, Homo sapiens
  chr20:62477875-62477905
  hyper
caccctgctggagccgggccggcgggccgg

SEQ ID NO: 13170 - DNA, 328 bp, Homo sapiens
  chr20:62495255-62495583
  hyper
tggtggtaagggactcgggcctgtgcaagagtaccaggaagacacctgtgggaggaggtggccgggtgaaggaaggggcagtgggaggagcttccatgcctagggaccagtaccaccccaggctggaagcccagagtggagtcctaggacatcagatcctaaagggcttgaataccgtttaaggcttttcttccgggagcaagtaggagccaaagaagggaagttgcgggacttgttttcgtggggccagttgcctggtggttacgcgcctctcctctgaagtcaggcatcctgttccagagtatcctggttgcgcttcaacttgcgg

SEQ ID NO: 13171 - DNA, 235 bp, Homo sapiens
  chr20:62600640-62600875
  hyper
tgggaggcagagacgcgactggcgccccggatgagaaggggcttcggccctcccgagcccagcggggacacagagccctcgcggggagagggggctccgccgcgctgcgcgcaggagacgccagcagcgggtccgccgcgtaggccgttcggcccgggaccccggcccaggcctggcgcgcgggtgagcgcggccagggacgcgcacctggggccagcctcgccacccacctgtc

SEQ ID NO: 13172 - DNA, 540 bp, Homo sapiens
  chr20:62601089-62601629
  hyper
cgcagggtcgagatccggggcgcggtgggcgccggggctgcggccagaatgggtccggggcgcggccgggcgcttacctgcggcgcccagcggggctgcggccgggccgggccgggccggggcggggggcgcggggcgcggggcgctgggtccgggcggcgcaggctgcgcgccgcgctgcgcacatgcgcgctcccgcccctcccacctttgacagttttactgcgggggggagggggcgaactctcgcgttattcccgcggccgctccgcgacggggagggggcggggagggggcgggggcgggggcgggggcccggcgctggcctgtggttcccccgctccgcggttccgcccccgtcggccgggcccgcagtccagagtagccggttctgccgtcctggggcgggggacgttttttggacagtggggtaaactgaggcccgataggggcgctaggcactgcccggagtccggcgcgcacggattgaggcgacctgattccgccgcatcctggcccgcgcggcgagtgtggtctctg

SEQ ID NO: 13173 - DNA, 30 bp, Homo sapiens
  chr20:62681148-62681178
  hyper
ccccacctcccccgcgacctctcagaagga

SEQ ID NO: 13174 - DNA, 31 bp, Homo sapiens
  chr20:62694895-62694926
  hyper
gccgagacccctgccccgggccagccctgcc

SEQ ID NO: 13175 - DNA, 907 bp, Homo sapiens
  chr20:62714750-62715657
  hyper
tgggaggctggggcgcgtcgcacactctcagtcgccgtcaccgcgggaagatggtgccatccacgttctcctccaggatggtctccacgcgcctccgctgccggggagagaggctggggtccggcgtgtgcggaggcgggcagggcccctcccctttccccgcccctaccggggcttgtctgcacctcttggcggtccagggggtccgggatccgcgcgggcttcagctgcggcggcaggaacagctccagccggatggcggcgcgcgcggacttctgccgctggatgagcagcgcgatctcctcggcctgcggggcccgggtagctgagcgcgcgccgagccccgccccgccccgccccggccggctccgctcaacgctcccggtgcgccccctctgccctccgaccccctcgcctcacccgcatgcgggtgtagcgcagccgcagggcgcggactcgcccgcgggcctccgctgccttgaggacgccgaggagccggttctggcgctcggcgggcagctcgagcgactgcgtccacgggcgcgggtcgggcatgcggtaccccggttccaccgacccgcacgggaaggtggaggccgccgcgcccacgtcctccagcaggtcgccgaagagcagatggcggtggcgctgcgcagggagcatggccgccagtccctgcggcgtcagggcccagcccggcttggggggctctgtcgcgggcgcccccttggcacgctcctcaccctgcgccgtgcctggcgcgctcttcccgcttcgctcccgcgggcccttgcgcccgccctccttcgctggcggcggcatcctcccgccctgcggagggaggagggcgtcccgtcggtgccggggctggcaccgggccctgcccgcccctcggcagggccccaac

SEQ ID NO: 13176 - DNA, 31 bp, Homo sapiens
  chr21:15270038-15270069
  hyper
ttctctacaactcactcggttacaacccttt

SEQ ID NO: 13177 - DNA, 710 bp, Homo sapiens
  chr21:15588288-15588998
  hyper
tactctcacccactctcccaccgcccagccctacgccaggcgagggagcagtgcggtgggcggtaccccaagtccgctgggggcgtggccctggagccatgcctcgcccccagcgcgcgctcccggcgccggccccgccccctcacccaggcggcgccgtaaagccggagaaggggcggggtctcagctcctacttcattctacggccgagaccggaggatgttccctgctcaggaggaggccgacaggaccgtgtttgttgggaatttagaggcccgagttcgggaagagattctgtacgagctgttccttcaggtaccgtctctgggaaggggcggcggaggggcggagcacgtcgggccggaaacatagcgcgcacctggaccacccggagcccggcccccttccgtcccatcctgagcaggggttttaatttcgtttcctcttggcgcacctgtctccaggtgagcggctggggagtgaaatgagggcgcgttccccatccccatccgcgctgcagagtcctggggttgggcagggacgtggttccttcaacccccgtttctgattaagggcttcccagaggctgcctgggcctcgggtgtgcgcgggcagaaccgaaaacagcctggtcactgttctccgtcaagtagtaagcacgcctgacatcccccaaaaggagaggggtcgcttttataatgtttcctttt

SEQ ID NO: 13178 - DNA, 30 bp, Homo sapiens
  chr21:16130746-16130776
  hyper
ttctagtttttggaaatctagtctactgtt

SEQ ID NO: 13179 - DNA, 31 bp, Homo sapiens
  chr21:16436647-16436678
  hyper
ggcgccgcccaggatccggctggacagcagg

SEQ ID NO: 13180 - DNA, 30 bp, Homo sapiens
  chr21:16488404-16488434
  hyper
aacctctctcctgtctcttgtacaacaaag

SEQ ID NO: 13181 - DNA, 48 bp, Homo sapiens
  chr21:18885392-18885440
  hyper
gaccaggagcgagagccgcctacctgcagccgccgcccacggcacggc

SEQ ID NO: 13182 - DNA, 722 bp, Homo sapiens
  chr21:18885686-18886408
  hyper
gccgcgcagggcgcgcggagtgcccggggacggagccctcggcggggggtggaggcggaggggctcgggcgcggcgtgtcgggtgcgcctcgcagctctcccatagcattctctgccccggtgcgggcttgcctttctttgctctcgccgtctcccttgtcagccttcgtgtcggttctctccagcgttacccgatttcaaaaaccttgggcggcgagttttcaggtgtcgagtcgcccaggcggggaggctgaattgcaaacgccattattcaatggacatggagctgcccggtgcctcggatcggccaggctacctctaggaaagaggcgctgagcgaacgccagcctggacggtgttagtctcctggaagcagctcgcccaggcaggagctgctaaccagacgcgcattgtgaaggagaccgtggaaaatcaaaagtgggttcctgcaaaaatgtagcattggtttctgcagtccttgggcgaagtgcaaaggagaattcagtgacctcgtttttgagtttgtaatgagtcgttcattttggagataagacgggctgagttgtacagggtaattgctagaggatttgccaagtgcgtttgtcgactgctcctttctctgggaggggaaaaaaggcatgtgaaaaatgcgtggaccattaggaggcgtaatcattttgacactttaaaaaacggattttccatgtcggtgttttaaccaa

SEQ ID NO: 13183 - DNA, 296 bp, Homo sapiens
  chr21:18984015-18984311
  hyper
cgtcatcctgggacctcgtcaccgcggcggctgctcctcaagttctactttgttccacaaggctcctctgctcacggctgcgtggataaaacccaaagggaatccagaatcaagctcggcctcgcaggagtttataacttttgtacttttccctcccttgtaacgaaaagctaatcgcaaacgtttctaggaacacatttttctcctgatagacgttcccaaggtggagggcgcgagaagactggcccgtggggtgaggagccccggcccgacctcagcggcgccacaaagccatg

SEQ ID NO: 13184 - DNA, 31 bp, Homo sapiens
  chr21:18985139-18985170
  hyper
cggcgcgtgcggctcccgcgtcgtcgggcgg

SEQ ID NO: 13185 - DNA, 30 bp, Homo sapiens
  chr21:22370332-22370362
  hyper
cctgaggcagccggcggctgtgaaggagct

SEQ ID NO: 13186 - DNA, 197 bp, Homo sapiens
  chr21:22370682-22370879
  hyper
cgccgctgcctggatatagtgcggcaagagcggagcttgcagtcactttgcgaggaggagcgcgcgggctgcgggcggctggggcaccgcgggagcggcggcggcggctctagcagaggcggccggggcagcgaaaggttctctctccagggctggacttaataactttgaaactgtccaccggtgtcacgtcctga

SEQ ID NO: 13187 - DNA, 494 bp, Homo sapiens
  chr21:26934361-26934855
  hyper
gggggggggttgcagaaaaggcgcctggtcggttatgagtcacaagtgagttataaaagggtcgcacgttcgcaggcgcgggcttcctgtgcgcggccgagcccgggcccagcgccgcctgcagcctcgggaagggagcggatagcggagccccgagccgcccgcagagcaagcgcggggaaccaaggagacgctcctggcactgcaggtacgccgacttcagtctcgcgctcccgcccgcctttcctctcttgaacgtggcagggacgccgggggacttcggtgcgagggtcaccgccgggttaactggcgaggcaaggcgggggcagcgcgcacgtggccgtggagcccggcctggtcccgcgcgcgcctgcgggtgccccctggggactcagtggtgtcgcctcgcccgggaccagagattgcgctggatggattcccgcgggcagaggcagggggaaggaggggtgttcgaaacctaatacttgagcttc

SEQ ID NO: 13188 - DNA, 618 bp, Homo sapiens
  chr21:27011502-27012120
  hyper
gccaccccctcagcttcgcccgttgggcagaattttccaaatatctccacccctaggctgaaaagccagaaagaagttttgagccaacgaggggaagaaaggagttggggcaaaacaggaggcgtttccctacccgcatacatccccgtccccgagacacccaatccccccacccccagcctgcccgcgcctcccgcccccagctcctcgccctggggacagctggcagccccgcgcggaccagacacaaagccgatcaatcccggaggcgtgggggcggagggacgacccgccggggctttcccgggcgctgctctcctcctgctgccccctcgctaggacccggcggacgcctcgtctggttttcacgccctctagcccctacccccacacccccaaaacagaacagacccccatccctgggctggaggacccgcctcttggcagccagctgagaaggcgccccggggagggggaaactgacatcccatctagagccgtccctcctcttcctcccctcccgactctctgctcctttcccgccccagaagttcaagggcccccggcctcctgcgctcctgccgccgggaccctcgacctcctcagagcagccggctg

SEQ ID NO: 13189 - DNA, 696 bp, Homo sapiens
  chr21:27012148-27012844
  hyper
cgccaccgcctcctcctgctgctgctgcgctacctggtggtcgccctgggctgtaagttgctcgggttcctctacccttcctgcctggaccagcctgcccccaccctccagccccccacggggcgctggctgacagtgtctgggcggctctgggccgaggtcgccgcggggcgtctgaccttgcgcccaggcgagcgggaaacccagggtgcccgcgagcggacgctgggagcaagggagcgcgaggtcgtgggtttcttgtgaattgcgtctgattttgtcagttctagatacagaaaattaagggttcccactagcaggttctcatctgtttgcaaagttggggtaagttttcagacagagggacgtgattcgaatgcaaaactcactacccactggtaagatgctaagaccccaagaaagatggcatcactgggaggcgggcgccggccacactttgagtccccggggagggggcagcgtccgcgtggtctgggctctgtagcgtcccagctgagccggcgatatgcagcgcacttgtggggcggaggtggagggaattcgtggctgctgagccagaattacttttatcctctccacctgcacatctacattcacttagagaagtctggtctggggactctagccagctgctctgtcctcaggggacatccaacgggacgattgttagaaaga

SEQ ID NO: 13190 - DNA, 30 bp, Homo sapiens
  chr21:27403678-27403708
  hyper
gcttctccccctcttttttgggaaaaaata

SEQ ID NO: 13191 - DNA, 218 bp, Homo sapiens
  chr21:27541877-27542095
  hyper
gcacagaattaagcctcggaggtgatccgagggtgggaagcagaggggccccgaggctccgccagaagccccggcagcgtctctgccccctcccaggcggacgcgcagccccgggaagggagccgggcgggagcctcggtggcgcactgagactaacgcggctcggcccacggcgagggcggggtgtcgcggcttttgttcccgcggaccttctgcct

SEQ ID NO: 13192 - DNA, 1215 bp, Homo sapiens
  chr21:27542344-27543559
  hyper
agagaggaaggtgaaacgaggcggagaacgcagggaaaagcgaggggctcctagcttcctgggctgtcccgactcctcctcctcctccccagggcccaagagaaaggaaagggcaacgattcaagagcgaaggactggctttagggacgctgcgttttcggttttccccacgtgctccttcccccttcccccctgtctgaatgtctctcgcctcccccgacccccgcttccaaggcagggactaagtcggggtctgggctcagggtcgccccctacccttctcgccccgggctggcgcggaaccagggagaccagcgcctcgcccgctccctctcagcgggccggagcgcgactccctggggcagggctgggccgaaagcggggatgcgctggacgtccgcaagcgggggcggagaggagaggggtcccattgacggacccccggcttctctgcattaaagacttgggttaaggtcttggggggtatcgcgtccccaccgtgcagcctccccccgccttccgaggcgcggcacccacctccagcgcccgagccgtccaggcggccagcaggagcagtgccaaaccgggcagcatcgcgaccctgcgcggggcaccgagtgcgctgctgtgcgagtgggatccgccgcgtccttgctctgcccgcgccgccaccgccgccgtctcccggggcccccgcgcacgctcctccgcgtgctctcgcctaccgctgccgaggaaactgacggagcccgagcgcggcggcggggctcagagccaggcgagtcagctgatccggcccaccccgctcggcacccgagagagacccctagcggcgccgccggggaactgcgcccgctcgcgccgggaggggccctcgcgccccgcgcccacaggtgcacgcgcccttggcgccgcctgcaccccacgcgccccctccgctccccggccgacggcccacctgggcttcgtgaacagtgggagggagagtctggggccaggagagggacggtgcaggatcagggaaaggtgagtcctaggacgctgaggctctagaaaagtcgagagcgctcctgctcgtccccgtgagcttgaatcatccgaccccgcaggcctcccgggggtgtcgtataaaggactgctgctagggtgcgtttttatccgcatttcgttttttctctcggtttggagaggtggggcaggcgtttctggaagaga

SEQ ID NO: 13193 - DNA, 30 bp, Homo sapiens
  chr21:28215957-28215987
  hyper
cgaaggggccccaccgccttcagcccgcct

SEQ ID NO: 13194 - DNA, 78 bp, Homo sapiens
  chr21:28216504-28216582
  hyper
gaggatgaatggacagacaaacgagagcaattcttctacctgtgggctgtcctacgccttgcagtgccgggtcctgcg

SEQ ID NO: 13195 - DNA, 1031 bp, Homo sapiens
  chr21:28216633-28217664
  hyper
cggtctccgctttcccagtcggccggggctcgtcgtccacgaccccgcacgtgccgccgacgtcgccctgccgattccgccgcaggaggtggaactgtagtggtgccggcggcttctcccctggggcggcggtggcgaggcgctcgctggcggcgggcagcggctggatgaaatacgcctcccccagcaggtagaaggcgccgcgcacgccctcgcagaggctgagggcggcagccgagctgggatcgccattcacggtgccggagtagaagcagtgcgccaggtcggtttccggaagcggcgtctcggacccggatttgcgccccacgttctggagcgtgaagccgggcgccaaaaagctgctgtcgggccgcagctccagatccagctgctggtcaaaggcgtgcaggcggaggcgcgtggtcccgtgtcccggggcgcgctccagctccggcaccactagctcctcgtcctcctcggaggggcgcccgagtgcgtccgacacggccagtagcgccgcggcgagcagcagcagcgtgggtactggcccaaagctccgagaccccggagcccgctccgcgttccccatgtcgctgcccagcttgcgccttccgaacccctcgggcacagctcgctgcattggagccccaggagacaccgctcgtagcagcgcacggagcgagggacctttagttcgggtcgggagagcaaagcctcgttggcctgctctggattgttaaaattaacaatttctattattcgttggaagggcgcgcagagccggctacagccgaagctcccggagtcactaaaaggaggcgctgcagttctgccggcgcgcgggaagtttttcttccagcgcaaagttggagacactgagaggcaggcgcaggcagagtggctctgctgggacaagaagcgctctggggcgcctccggggctgaggcaacgcggagattggtgcctggcgcccctcttcggcctccgccttggctgcgatgttgctcactctgctcagggctctcccctct

SEQ ID NO: 13196 - DNA, 15 bp, Homo sapiens
  chr21:28217711-28217726
  hyper
cgctttccagcgagt

SEQ ID NO: 13197 - DNA, 30 bp, Homo sapiens
  chr21:28217926-28217956
  hyper
taggggcggaaggggcgctgtgaccagcac

SEQ ID NO: 13198 - DNA, 30 bp, Homo sapiens
  chr21:28218581-28218611
  hyper
ctcccgccagtctgcgtgctttcactcaac

SEQ ID NO: 13199 - DNA, 30 bp, Homo sapiens
  chr21:28338821-28338851
  hyper
attgagtcaagtgtcggagggaggggggcc

SEQ ID NO: 13200 - DNA, 307 bp, Homo sapiens
  chr21:28339247-28339554
  hyper
agaggggaaaaagccgtaaaaattaaaacaaaaatgcaggggggcagcctgaggcgagctggtgaagcggcgtgtctgtgtcccttcggctgcggtctcctcctgcccgccgtcatccccagtcggcagctgcgagcgccgagagcagcgcgagcgctgtgaagatgcgaggaggtggaacaatgaatttatagcggcatgccatcctgcaatggcaatttcaacagttcgtcactgcacgctgcctcttaaagggagagcttcccccaccactcccacccttcccagtccgcgcctaatcagatgg

SEQ ID NO: 13201 - DNA, 261 bp, Homo sapiens
  chr21:28339787-28340048
  hyper
ttaaagttattgagacgtttcaagtctctccctgcctccttcttgcctgcttttctcgccctcggtgggaagttcctgccgcaagtttttcccctttgcacacccgtgcgctctggcctcgcagaccgtgcaactccatccaccagccagagcttttcagcttcccgtgcgtcccctaaccaccgcgttcccttcgcttcctcccctccgtcccggcacccggtttcctccctccccattctccagcctcttgatgctttg

SEQ ID NO: 13202 - DNA, 98 bp, Homo sapiens
  chr21:28340062-28340160
  hyper
cgggctccgggtgactaacttctcccggccaccagcagagcggctggacagccagagagcccagggcgcttcctggcgcgctgcggtaccccggggcg

SEQ ID NO: 13203 - DNA, 30 bp, Homo sapiens
  chr21:30365297-30365327
  hyper
tgtccctgaccatccgccaccggagacgtc

SEQ ID NO: 13204 - DNA, 30 bp, Homo sapiens
  chr21:30396942-30396972
  hyper
acttcccataatgccgcgttccggaagtta

SEQ ID NO: 13205 - DNA, 247 bp, Homo sapiens
  chr21:31311386-31311633
  hyper
cggctcgcgatcccttgcccagagtaggggtgccggtccctgcgaacctggatccccgcactctagcccgcgttcctggagcccagattgaaaaacccgccaactgtacctcccggggaaggccggcaccctccaggagggaagcagtgacgcggctcccccttttttgtgtagcctcccatgagcactgacctccaccttccccagctccggctcctgcgccgccgcgcgctgcctcgcccgggac

SEQ ID NO: 13206 - DNA, 219 bp, Homo sapiens
  chr21:31311700-31311919
  hyper
cgatcctgagtacttgcggggcggtctgagggaggatatagcagaggaaatagaggagtgcccagctggtgtccctggtccagagcccgggctgggcgaggagtgtgccgtgctccatcttcctagcttcttaattcatgccgagatacagccgctgccggacgcccgagagatgcacccaacttgggccgggtccccgcctcatcctctctggatgct

SEQ ID NO: 13207 - DNA, 133 bp, Homo sapiens
  chr21:31312079-31312212
  hyper
cggaggatcagcgctctctggctcccggagcccagagaccagctgaggaaagttgctgccccgatctgcaggaacgtctccctcattcgtcctttggtcagatgcaaaagtcgggggataggcacagacagag

SEQ ID NO: 13208 - DNA, 30 bp, Homo sapiens
  chr21:31312520-31312550
  hyper
tgctgctgggaagtcgatcgagtgttgcat

SEQ ID NO: 13209 - DNA, 30 bp, Homo sapiens
  chr21:32716075-32716105
  hyper
tcctgggtgggtgacgtgatcccgcagtct

SEQ ID NO: 13210 - DNA, 30 bp, Homo sapiens
  chr21:32716469-32716499
  hyper
cgcacgtttctccccgtctggcttcacatg

SEQ ID NO: 13211 - DNA, 89 bp, Homo sapiens
  chr21:32931770-32931859
  hyper
ggaggcctctgcctccctcggcgataggtccgcgaagctgcctgtcatctcgcataggtggaggtggccaatggcgtgcacagacggag

SEQ ID NO: 13212 - DNA, 30 bp, Homo sapiens
  chr21:32932325-32932355
  hyper
caaggttgtggagaacgcggaaacggagac

SEQ ID NO: 13213 - DNA, 46 bp, Homo sapiens
  chr21:33058220-33058266
  hyper
aatcaaagctgtgggccgggtgtggtggctcacacctgtaatccca

SEQ ID NO: 13214 - DNA, 1801 bp, Homo sapiens
  chr21:33244740-33246541
  hyper
tcgaagagaggcgagcgccggtccacctcctgcaatcacaggcatcatttcaatggaaggcaaagaaggtgtaagctacaagcagaggcagcaaacgccctggttcctacattgctgctgctactattactgctgtggctgcgcctcctccaacacagccaaccaggctgcgtgcgagcccgggcagacgcctggccgcctccccaccctttcttccagccatccatctatccttccacccccggtccagggggccctactgtgtggcggactcagggccgggcacgcaacccgactcacagtccacggagttcgagagccttcccccttccccccgccccgggtgggtgcggccagtgggggatttcaccgccgaaaggtccagaaaacccaagcccagaatccgggcaagaggcgcagccggaggcggcccgacctgggcggcccgggagcgcgcgcctccgaggccgcgcaggttctccctgtctggcgctcaggtggcttctccgtccactccgccgctcccctccccgggccctcccctctccagcgagggtcgagtttgactgtggcgcgcggggaaggaggggctactagggatttgaaagtgcacgggctgcggagtggagctcgcatctgttcccgccgcccgcgagcggattaaatttctgcaaattcaaactgaatggggctttcttctgctgccttccagagggcgccggcagcccgccgcgcgcttctctccggcgggagcggccgcccagcgcacggctaggagcgatcgcgggagcccgacccaagcccgtgcgggccagacggcggcggcgaggcggaggctgcggaggcacccgggctcccggacccaggcacccggaccccgggacccaggcgccgccggaccgcgccccaccccgcgcgcccgagcagggcgactgtcattagcttcctggacgggacccggggcgggatcctggtgtcctgaaaggggcccgggcgaccctaagaggaagaacttttgggggcggggtccccggtcccgcgtcccctgggcagccgctattgtctacgcgcctcgctgggcggcgcggggggcgtgatcgcggcggccccgggctctgggtgcggagacccaggcggggctgggcccagggcggcggcgggagaagccggggaagccgaagagcctggggaggaggagctgcgagcgcgggagacgagcaggagccgcgcgggccgcggcgagcgcgatgccggcggcggcgggggacgggctcctgggggagccggcggcgcctgggggcggcggcggcgcggaggacgcggccaggcccgcggcggcctgcgagggaagtttcctgcctgcctgggtgagcggcgtgccccgcgagcggctccgcgacttccagcaccacaagcgcgtgggcaactacctcatcggcagcaggaagctgggcgagggctcctttgccaaggtgcgcgaggggctgcacgtgctgaccggggagaaggtgagtctcccgggcgccgtggggctggggcacaggggcgggagtcggcggccaggaccccgcggggagcactgcactgggagtcccagtgtgcagtcccgggccaagcgccttccccctccgcccggctttcctgttgggttaaaacgcgcgctcagcatctcgcagcctttcccgaaggcggcctgcggtccgctgcccgggggttgggggcttgggaggggacggccttgccccgggaagcgtcccgcgcggccgttctgctcgtggaagggcgccgcctggcgacacta

SEQ ID NO: 13215 - DNA, 1311 bp, Homo sapiens
  chr21:33784063-33785374
  hyper
tccgccggccccgcgcgatccatagggtttgggtcgctgggcgccaggtacccgcacccggcaagcagccacggagcccctcgcgcacttgtcctcgatacccttgagttggggctacgcaggccactcctaggccactggctgggcgtccgaacgtgggtcaccccgcgcacagtctagaggttcagaaagatgctgtggcccactttaaaacaaagcccaattattagcgctcggcggctgtttgcgccggtgcagtgtcagatcccccagcgctgcggacaaccagcacccaaaggaagccgagctggagctaaagatcccggctccggagccatctgaccggttttgagacctccagctcgtcgccgtcctggctgcgagagcttgggcacggcgccggggctcagtctcctcttctgtggaatggcgataactgtatgtgccgggtgactgcacgtggcgcgcggcgggtggcggggatggcagcggtgcgatcccacgcctccaggaccccaccttcctgcggcccccgatcggccccgccccgggggcgccccagctgcacgcgcggcgctggctccaaagtgcgtcacgggcaccggccgcgctccttctgccgccagggcgaggctggcacccggccagcgcgggcagggccacgggtgcccggctgtttcccgggtgtggaaggcgctcaaggtgcgcggcccggggcgcgctactgggggcgccctccgcggtgggcagcgcgccagggatcggcctgggcagccgcggggcgcgcgaaggctgcgctttccctacggcccccctcgcttcctccggcacggcggcaacggagatttcctctcggggaaactacgcggatccttttcggggatcctcgccccgccccagttctccgccccctcccctttgctggggcgcctgggctggcccgcgcaggggaggaggctctggcagcctgggcagggaggcggcggggggccgcggagccgctggccatcgattctccccgccatgtgacgccgtccttagccctgcgacccccagcgcgtcccgggcctgcgcctccgccccgccgcgcagcgcacgatgcttctgccgggacgcgcacgccaaccgccgacgccccagcccgtgcagcatcccggcctccgccggcaggtagagccgccggggcagctcctgcgcctcttctactgcactgtcctggtctgctccaaagagatctcagcgctcaccgacttctctggtaagagcgccctccctggctgtgtgcccccggcaccgcggagcgcccaggtg

SEQ ID NO: 13216 - DNA, 52 bp, Homo sapiens
  chr21:34100891-34100943
  hyper
gctcacagggttctatcgaagagtgcttaggtgtatacgatggagagtggga

SEQ ID NO: 13217 - DNA, 30 bp, Homo sapiens
  chr21:34304880-34304910
  hyper
aatgtgttttgagagcgctgggctccctcg

SEQ ID NO: 13218 - DNA, 210 bp, Homo sapiens
  chr21:34398070-34398280
  hyper
gagcggaattagcccggatgacatcagcttcccagccccccggcgggcccagctcattggcgaggcagcccctccaggacacgcacattgttccccgcccccgcccccgccaccgctgccgccgtcgccgctgccaccgggctataaaaaccggccgagcccctaaaggtgcggatgcttattatagatcgacgcgacaccagcgcccgg

SEQ ID NO: 13219 - DNA, 30 bp, Homo sapiens
  chr21:34398517-34398547
  hyper
gcgagaagtcggagcgacaacagctctttc

SEQ ID NO: 13220 - DNA, 30 bp, Homo sapiens
  chr21:34398834-34398864
  hyper
ccgagggtcaccaacgctccctgaaataac

SEQ ID NO: 13221 - DNA, 30 bp, Homo sapiens
  chr21:34400057-34400087
  hyper
catgtgccaggtgccgccgccgcaccacca

SEQ ID NO: 13222 - DNA, 65 bp, Homo sapiens
  chr21:34442191-34442256
  hyper
ctccttcaacagccccgcttgccttgaaaaggcgcccttactccgctcagggggcctgtcccgcg

SEQ ID NO: 13223 - DNA, 1768 bp, Homo sapiens
  chr21:34442594-34444362
  hyper
gggaccatgctgcggccacagcggcccggagacttgcagctcggggcctccctctacgagctggtgggctacaggcagccgccctcctcctcctcctcctccacctcctccacctcctccacttcctcctcctccacgacggcccccctcctccccaaggctgcgcgcgagaagccggaggcgccggccgagcctccaggccccgggcccgggtcaggcgcgcacccgggcggcagcgcccggccggacgccaaggaggagcagcagcagcagctgcggcgcaagatcaacagccgcgagcggaagcgcatgcaggacctgaacctggccatggacgccctgcgcgaggtcatcctgccctactcagcggcgcactgccagggcgcgcccggccgcaagctctccaagatagccacgctgctgctcgcccgcaactacatcctactgctgggcagctcgctgcaggagctgcgccgcgcgctgggcgagggcgccgggcccgccgcgccgcgcctgctgctggccgggctgcccctgctcgccgccgcgcccggctccgtgctgctggcgcccggcgccgtaggaccccccgacgcgctgcgccccgccaagtacctgtcgctggcgctggacgagccgccgtgcggccagttcgctctccccggcggcggcgcaggcggccccggcctctgcacctgcgccgtgtgcaagttcccgcacctggtcccggccagcctgggcctggccgccgtgcaggcgcaattctccaagtgagggcgggcctgggcctggggcgcgacctcggcccggcctcccttcgctcagcttctccgcgcccctgctccctgcgtctgggagagcgaggccgagcaaggaaagcatttcgaaccttccagtccagaggaagggactgtcgggcacccccttccccgcccccacccctgggacgttaaagtgaccagagcggatgttcgatggcgcctcggggcagtttggggttctgggtcggttccagcggctttaggcagaaagtgctcgctctcacccagcacatctctctccttgtccctggagttgcgcgcttcgcggggccgatgtagaacttagggcgccttgccgtggttggcgcgccccgggtgcagcgagaggccatccccgagcgctacctccccggagcggagcacgccggctcccagtactaggggctgcgctcgagcagtggcgggggcggaggggtggttcttttccttctcctccgccagaggccacgggcgcccttgttcccgccggccaggtcctatcaaaggaggctgccggaactcaagaggcagaaaaagaccagttaggcggtgcagacggtctgggacgtggcagacggacggaccctcggcggacaggtggtcggcgtcggggtgcggtgggtaggggcgaggacaacgcagggtgcgctgggttgggacgtgggtccacttttgtagaccagctgtttggagagctgtatttaagactcgcgtatccagtgttttgtcgcagagagttttcgctcttaaatcctgggggtttcttagaaagcaacttagaactcgagattcacctttcgtttccctttccccaaaagtagcgtaaccaacatttaagcttgcttaaaaacgaaaaccaaccgccttgcatccagtgttcccgatttactaaaataggtaaccaggcgtctcacagtcgccgtcctgtcaagagcgctaatgaacgttctcattaacacgcaggagta

SEQ ID NO: 13224 - DNA, 37 bp, Homo sapiens
  chr21:34444444-34444481
  hyper
cgggccgggcccttgaccagcgcggcccgcaggtctt

SEQ ID NO: 13225 - DNA, 30 bp, Homo sapiens
  chr21:34482071-34482101
  hyper
tgcgctccggcgcccgcaggtcctcgctcc

SEQ ID NO: 13226 - DNA, 298 bp, Homo sapiens
  chr21:34602439-34602737
  hyper
gcgagcgtcgggtcccagagccgggcgcggctggggcccgaggctagcatctctcgggagccgcaaggcgagagctgcaaaggtaacgcagcgtggcggggtcgcgggagcggagcgcgtggccagctgactggagggaaaacgccgcctccctgcagcggttcccggaatcccctccggttccctctcgctctccccgactcctcctcctcctcctgccctccctctgcgtcttgagtatgcggctagtgcgcccttcctctctcccggggccgcacctgcgaccccaggacccctc

SEQ ID NO: 13227 - DNA, 522 bp, Homo sapiens
  chr21:34602763-34603285
  hyper
cgtcgcccctgctgggagtccgctttcgttgcacccctccgcgtcccaccccaccccaccaaggatgcccaggataccgggcatttgccactgcaagatgtgagtcgttgctaagtttgagggtcacattcctccaggtccaccccgccttgcaaaaccggctcaccagctgggtgctcaggttcgggatctccagcccgcccccttgaggtcccctgggattagcccccctcgacctgcgtcagggtcacagactgcagccggggctggagcggcctacacccctccggatccgctgcgtggaggcaggagggggaaggggcgaggggacgtggccgcggagacagaagggtgcaccctcccagggtcggagaggggagatactgggaagatactccgcgaatatggagaggcgatcggcacttgcatttcaaccctgagcaaatcaatccgttacacgcagtagcgagttgactccatcagcccgtttatttggttagcgatggttatattgactctgag

SEQ ID NO: 13228 - DNA, 30 bp, Homo sapiens
  chr21:34638520-34638550
  hyper
cctttcaaagcttgcgaggatcccttcctc

SEQ ID NO: 13229 - DNA, 31 bp, Homo sapiens
  chr21:34776440-34776471
  hyper
tggttctgcagcctggcgagactgcgcttag

SEQ ID NO: 13230 - DNA, 30 bp, Homo sapiens
  chr21:34915083-34915113
  hyper
actgacaacttatgcggacacggtcgcctc

SEQ ID NO: 13231 - DNA, 30 bp, Homo sapiens
  chr21:34915742-34915772
  hyper
tgggtcccccctgccgtttagctactcgta

SEQ ID NO: 13232 - DNA, 58 bp, Homo sapiens
  chr21:35013431-35013489
  hyper
tagaaacgcagatgttcggccccgacccagacctatcccaaggcgatgcttacatctc

SEQ ID NO: 13233 - DNA, 30 bp, Homo sapiens
  chr21:35747816-35747846
  hyper
agtcgtggtttgtgcgcggccaggcgctgg

SEQ ID NO: 13234 - DNA, 111 bp, Homo sapiens
  chr21:35986868-35986979
  hyper
aggggaccgggaccctcggggcgccgtccccacgccccagccctgacgggtccgcggccgagcagcccgggggacgtcgctgcctccccgccccgcgcgcggccgggactg

SEQ ID NO: 13235 - DNA, 84 bp, Homo sapiens
  chr21:36042155-36042239
  hyper
ggggacagcgtagacgcggagggcccgctgggggacaacatagaagcggagggcccggcgggcgacagcgtagaggcggagggc

SEQ ID NO: 13236 - DNA, 1782 bp, Homo sapiens
  chr21:36160096-36161878
  hyper
atatggtgtatgtacttgtcaaactgtttatttgccattcacactgattgtaacactggatttacagaagaaactgtggtacaaagagaggaaggctctggtggctcctgaacagcagcagtccagctgccctgctcaggctgggcacgacgaatgctcccaggagaggggaggcggcccacccgactgtgtaccgtggactgtggacagtgcagtgcctgctctcctgtgctatctagaaacaccttggagagagggttctgggatattctctcatgtcatctggctgaagacaccagcttgacagttcccctttaagaagcattccatacgtttgtaccagggagaaagaagcccacgcacgaattttcaggatgttttgtgaccaaacccaataactgccacacaaatagaccctaggtgggggctggcttaaataggaccacatttcccgttgctttttcagtagatgtgttataccgtcatttcaatttgaaagtttatttttttccattgatttttatacatccagaataacacaaataaccaacagttctttttctttttttgcacattcatttcccctagaacaaaaaaagtgaacttaaaaaaaattggaaccatgctattagctgtttacaaaagtgaataagaagtagctcattttaaagtctaaaataaacaaagtagaaagaagcatttttttccctacagtatttagcaaacctaagaaaaagtccttagaaacacacacaaaaaaattgaaaaaaagttataggcattaacaatattttataatgaagcttaaaatctatttacatacataaatacaattaactttgttgatgcaactcttctggaaggaaaaaaagagccaaatgatcagcctcatcaatactgacctggctaaaaacaaaattcccaacaaacacacaaaaatcccaaaacaaatgtatacgctacggtaaacaaaaaggcattttgttcagatgtaaaatatgttttgtgagattattgtcaaacaaattttcatgtataaaagacccaaacatgtcattccccccaaaaataaaaaccaacaaaaataaaaatcatcaggacggaatgtcccaaagaaacaggtatttcaaggcagaaatctgcaatcctaaattgcaggacatttgagtggaaccattcatttcctttctaatcagagcatttctgtttatctgcacagaaacccaaggcagcagaaaggctgtctatttactcactgattgtgatttgcccaggaaagtttgctggtttggacagcaagcagatccaatatggttggcaatgtctctgttctgctggaagaaacccataaacaggagaaaggctgacaaaccatgttcctttatgtgaagggggaagaactggaccttcttgtgttctgaaatttggtactgggtgggggtatgtgctatctgcttaagagaacacaggaaaaggaggagggagaaagtggggtttggaagatagaggaagagagaaaaaaagggagatattggggggaagagagggagggaaatgtattttcagatagtgagaaaaagaaagaactgaaatatgtatccatgttgaaatcataaatagggacatgagtaagcagtagaaatggcttattcaatacttctcctggaccagacacatgcagttattacatgattggcttaagggtctcattgataccttaactttcctgagggcaatgaataaaaagataccttaatctacctgaagtcaatgaatgcaatt

SEQ ID NO: 13237 - DNA, 2976 bp, Homo sapiens
  chr21:36161931-36164907
  hyper
gtgagacctatcgccaaaacaactacagtttgattttttttgaaacaattaaatactatatatgctggtaagagtctgtgaaactctaaatgaccaatccagtgagcctacaatagtgacaagccccctccacacatggctttgagagtaaaggttcaatgtaaaagattatctaatcagagcatgaggctggttttgagttggaatatcttcagttaacagaattaaactgaaaaacataattttttccttcatttttctccagcatttttgcaggtcagacatggtaacatgtgctgaaaaaaaacatttacgtttaatttgggggaaatgggctaatggtgcttttcagaaattaaatttttacatttgctgacattttatggtaatttagctgcaaaaatgtaatacggaataatatatgaaactgagttgtggagggaatcctgtcaaaaatgaaagtgaatatattctgagtttgtccgagatctgctatagctcttctctagataagaacgacctgacaacataagctgctttactctttaactcttaccaaagtgctactgcatgtgtgtaaaacaaataatcaatatatatataagaaaactcaaaaacaagttgttttaaataagtccagctgtttttgctgcctgcagccaaagatttgcctaatttgaatgcttaaatttataaaataaaaatcaaacactgttctgaagtcctgctttcaaatactcttcagagttgacctgaaatcgtttcaacgaattttaagaggtacgttaaataaccaccagatcatttggagcacacatgtgtcaaaatcagcagttagtatttatgagttgtacaacaactgcattctgaccaaatcctccaataaaaatagtgccataaaatttacagcgacattggatacctttgaattgtagccacggacagtagtgacatgaatctttcctgtcacactggtgcacaggtaaaagcccatataccccatagggtagggtctcagcctggtgaaagcaacacaaagatgttgttgagtgagcagcacaggacagggggtctcgcacaggtgggaccatgttttcccacttgtctccactgaggcacacagaggcaaattgactcctcgaggcctgcttctggtgggcccttaaattgctataatcgtaacccctaaattcattgatttggttcctatgtaaatgtggctcccctacacagtttactttggctgtgttctgttacacagcatctgtgaaattatcagatgaccttggggtgagcaaatccctgggcagaaatcaaatcctctccaaagatgtaattattggcacctgcctcaaccctctggaactagattgaccttctctgttttaaggaggaagttagatatgagacccttgttgagcctggcagaaaattccatacttctgatccttggagtgaccctcagtgtctaaaaatcctattaaaaacgttgctgcgtgagctactcacttgtttgattaacatgaaagggagtttaatgtaaacaatacttctggataaccaagcgatcacattactcattctttttttctagccttcttcaatgtgatacatttaactttggctactatcaagaacaaaagaaaatgtagtacttgatatttttcttaatataagtacatttaaataattaaaaaattatcaacacataaatgtctgaacatcaagatacataaatatctggggattccttgtgggaatacagtagttaaaaatgacccaaagctgtagctgtttctcaaaaaaacaaaacaaaacaaaaaaaaacaactacccaaaagtccaaaagaaaagttaaataaaacttaaagaaaagggaatcatatttctttccatggtcaaagcaagaaagaagcaagctcaatttatatatatttatataaacgtatataaaaataaaaaccacccaaatgcaaatacgcattttgcaattgataaggtgcggaaaaattaaaaataagaattagatgccaaacagggcgagttgcatccctcctctccccccaccccaaccaaaattccacactctttggaataaacaacttggttaaaaagttaagtcaagggtataaaatctttctttttattcacagcattgctaaatcagaagcattcacagtttccctccgggaatcttcctgtttgctttccagcgcgtcccctgggtgctggggccggcggacaccctcgaggtgcgtcgcctcggacacctccgcgagggccggggcgccagcagacggcggcggcgtgggcttctgggcgcaggaggctgcgcgggcctgacctacagcgagatcctggccgtcgggcgccctcggccccaggacggtggccgggcccagggcccgggatcccggcgggcttgtcgcgaacaggaggcccgcgcgcccggaggcgaaggcggcggcccgcggggcccagccgggccaggcctggcgcctcagtagggcctccacacggcctcctccaggcgcgcggagggcgccatgttggtgggggagttgctgtggctgccctcggcctccaccacgtcgctctggttcgggaggctggggttgagcagcgcggagccggtggaggcgttggtgcagggcggcaggatgcgcggcggcgagcgctcgccgcccaccatggagaactggtaggagccggccgaggcgccgtagtacaggtggtaggagggcgagctggcttggaacgggcctccctgcgcttgcgacgagccggggtagggcggcggcaggtaggtgtggtagcgcgtggccgagcccatggccgacatgccgatgccgatgcccgaggtgaccggcgtcggggagtaggtgaaggcgcctggatagtgcatgcgggggtcggagatggagggcagcgcggggaactggcgcgggtcgctgaacgctgtcaggtcgggtgccg

SEQ ID NO: 13238 - DNA, 163 bp, Homo sapiens
  chr21:36171596-36171759
  hyper
cttgagagtcgactggaaagttctgcagagagggttgtcatgccgctggcacgtccaggtgaaatgggcgttgctgggtgcacagaaggagaggcaatggatcccaggtattggtaggactgatcgtaggaccacggtggggatggttggatctgccttgtat

SEQ ID NO: 13239 - DNA, 204 bp, Homo sapiens
  chr21:36206694-36206898
  hyper
tctggtacttaccctgcatctgactctgaggctgagggttaaaggcagtggagtggttcagggaggcacgagggttgggcgtgggggctgggtggtgtgggctgaccctcatggctgtgcgccgcagctgctccagttcactgagccgctcggaaaaggacaagctcccgggcttggtctgatcatctagtttctgccgatgtc

SEQ ID NO: 13240 - DNA, 106 bp, Homo sapiens
  chr21:36231769-36231875
  hyper
cttcgaggttctcggggcccatccactgtgattttgatggctctgtggtaggtggcgacttgcggtgggtttgtgaagacagtgatggtcagagtgaagcttttcc

SEQ ID NO: 13241 - DNA, 180 bp, Homo sapiens
  chr21:36252844-36253024
  hyper
ataacgtacctcttccacttcgaccgacaaacctgaggtcattaaatcttgcaacctggttcttcatggctgcggtagcatttctcagctcagccgagtagttttcatcattgccagccatcacagtgaccagagtgccatctggaacatcccctagggccaccacctaaacaccagtca

SEQ ID NO: 13242 - DNA, 267 bp, Homo sapiens
  chr21:36259126-36259393
  hyper
tccgggccagtaccttgaaagcgatgggcagggtcttgttgcagcgccagtgcgtaggcagcacggagcagaggaagttggggctgtcggtgcgcaccagctcgcccgggtggtcggccagcacctccaccatgctgcggtcgccgctcctcagcttgccggccagggcagcgccggcgtccggggcgcccagcggcaacgcctcgctcatcttgcctgggctcagcgcggtggaaggcggcgtgaagcggcggctcgtgctggcat

SEQ ID NO: 13243 - DNA, 170 bp, Homo sapiens
  chr21:36260354-36260524
  hyper
ttgggagttgagcagccgcagagtcacacacatgcaaacacgcactcttcggaaggcagccactgtctacatcagctgggtgactcagccctgactcgggcagcagcgagacgatactcctccaccgtcgcccagcacccgccggttagctgctccgaggcacgaacacc

SEQ ID NO: 13244 - DNA, 40 bp, Homo sapiens
  chr21:36265220-36265260
  hyper
ccgtggacgtctctagaaggattcattccaagtatgcatt

SEQ ID NO: 13245 - DNA, 118 bp, Homo sapiens
  chr21:36421137-36421255
  hyper
cctctcatgaagcactgtgggtacgaaggaaatgactcaaatatgctgtctgaagccatcgcttcctcctgaaaatgcaccctcttctgaaggcgggggactcaatgatttcttttac

SEQ ID NO: 13246 - DNA, 132 bp, Homo sapiens
  chr21:36421463-36421595
  hyper
ccacgctgcgaaaccctgtggtttgcattcagtgtgattcgtcctgcctgctgaccactatgctgggttcagacttctgacactgccaggctacccaacttgtggttctgtggttgtttatgaggcccaaag

SEQ ID NO: 13247 - DNA, 364 bp, Homo sapiens
  chr21:37528251-37528615
  hyper
gcaggggtcccaagcccgccgcgccccctgcgccccaaacgtgtgtggagggcttggacgtggtccagagggaaaagatggggtgaaccaggtgccgcgcacccttcgaggagcccccgcttctccgtttctgtgagtgactccaaagcacctccgagggccgacacacgcgcggacgaccttgggcgggcactgaccaatgtccccttccactcggttgtgtcgggggtccccaggtgaggcgcgaacgccgccccgctcacctgtacgaggcctttcccggagcagcccggctacgaagcgacacccatggcggagaagctaaggaagactcccgctccctcacaccgcggctgaggcgact

SEQ ID NO: 13248 - DNA, 30 bp, Homo sapiens
  chr21:37692326-37692356
  hyper
cccgcagggccccgcgctggaagctcagct

SEQ ID NO: 13249 - DNA, 84 bp, Homo sapiens
  chr21:37757750-37757834
  hyper
tacggcttccctggcccgggcagctccgcggctcttttggtcgcgtcggtccgggccagaggccctcgccgagggcgggcccct

SEQ ID NO: 13250 - DNA, 1163 bp, Homo sapiens
  chr21:38064359-38065522
  hyper
tagatttgtcaataacgcagggcctggcaaataggaggacctctccaaaattaaatgcaagattgaacataggtctctcacatcataataaagcggtttaatttggcttccaccgggggagcggaatagcacttgcccagcccctttgagccctgcgcacactcgcaccaccgccgcctctcccacaaagagaaaagccacgagaagggtcccgactgtgcaaatctgtgtgccctcccgaggaaggcgcccgagggctcactctgcctggttcaaaagcttgtgggagagaagcacccaaaagaattccgttgtcaggttaaagtctttgtctatactcgcaggatgggaaggacgatggtgcaatcaccgagattattttgttttcgtcctctaaaaaatgaagaggggactggagtcgggaccaaaattattggcagaccgcacggtttgcagtcaccctgaagttaccagcagccgatgctgtgtccagggaaaatattcttgagctggaaaacgtgctaatttaaagtctttcgtttcacacgaaaatgtgctgcactctttgactgctcaggaatttgctctagcacctagaaggaattctggcttagggcaggggcgagggacagtggagggcgttggaccttcttccgcaatcgggaccactccaggtctccccggagaaggctgagtctccagcgcgtggattcagatcaggactctgtctaagtaggcgagagctggggataccgctgggggctttggcgaagctaagaaagcactggcttcttattctcaccagacatctcaacacccacgtgcgctgggtcccgcagtctctcgcccgccccacgcgggtcccagccctggtccttactccccgcgcgggaagaatctggggagggtgggggcggagaggcggctgatcggagagtgggagggaggatgggagatgggcagaggctgcccgcatcagggccaggacagacgtccgcgcggccccaggcactcacttgagtgtcacgcaagtcaccccaacaccgcacaagacagtggcggggtgcgcaccgaggcccctacctggggggtgtgcgcgcactgaacgaccccttctccaggtgcgcgagccgctccggcggccgtgcacactgcgccccctt

SEQ ID NO: 13251 - DNA, 331 bp, Homo sapiens
  chr21:38065799-38066130
  hyper
cggggagagttggcgacccgggcccatcaccgccccagtgccaccgccccagtgcctgaccagatggggtgcggtccctacgcccggcgtggccccgccgccgctcagatctgaagtccggctttcgctcgccctgcgcggcggaacctctgacccggagcagctctaggccgtgggcttcgtctcctcctcctggaaggaatgaatgggctccccgacacacacctctcagaaaactcacctttcacgctgaccttcaaaagaaaagaaagaaagaaaaagaaaaatccgctcgaagcgggaaaatgtccacgcccggatttggggtgga

SEQ ID NO: 13252 - DNA, 30 bp, Homo sapiens
  chr21:38069935-38069965
  hyper
tgctcggcttcgaacgccttcgaacttttg

SEQ ID NO: 13253 - DNA, 988 bp, Homo sapiens
  chr21:38070834-38071822
  hyper
tgcaccttagtgtttcgaggacagaaagggcagaagggtcacttcggagccactcgcgccgttttcacgtgtgtgtgtaatggggggaggggggctcccggctttccccttttcagctcttggacctgcaacaccgggagggcgaggacgcgggaccagcgcaccctcggaaggctcgatcctccccggcagggcgcctggccaacgagtcgcgccgcctcctctcggccgcgcctgctggtgaccttcccgagagccacaggggcggcctcggcacccctccttccctcgccctccctgccgcccatcctagctccggggtccggcgaccggcgctcaggagcgggtccccgcggcgcgccgtgtgcactcaccgcgacttccccgaacccgggagcgcgcgggtctctcccgggagagtccctggaggcagcgacgcggaggcgcgcctgtgactccagggccgcggcggggtcggaggcaagattcgccgcccccgcccccgccgcggtccctcccccctcccgctcccccctccgggacccaggcggccagtgctccgcccgaaggcgggtctgccataaacaaacgcggctcggccgcacgtggacagcggaggtgctgcgcctagccacacatcgcgggctccggcgctgcgtctccaggcacagggagccgccaggaagggcaggagagcgcgcccgggccagggcccggccccagccgcctgcgactcgctcccctccgctgggctcccgctccatggctccgcggccaccgccgcccctgtcgccctccggtccggaggggccttgccgcagccggttcgagcactcgacgaaggagtaagcagcgcctccgcctccgcgccggccgcccccaccccccaggaaggccgaggcaggagaggcaggagggaggaaacaggagcgagcaggaacggggctccggttgctgcaggacggtccagcccggaggaggctgcgct

SEQ ID NO: 13254 - DNA, 270 bp, Homo sapiens
  chr21:38072899-38073169
  hyper
tgaaggagggtcagcttcaggcgctgcgagtcagcggggatcacggtgaggcccaagcactgcaggctgaggccacagagcgaacacttgtgctgagccgggccctctcgtgaggctggggtgcgggaagtccgggcaggagagacccgcccccgccgttgctgagctgagacccggctgaaagagaggggtccgattaattcgaaaatggcagacagagctgagcgctgccgttcttttcaggattgaaaatgtgccagtgggccaggg

SEQ ID NO: 13255 - DNA, 286 bp, Homo sapiens
  chr21:38073239-38073525
  hyper
cgcccacgccggttgccgctggtgacagtggctgcccggccaggcacctccgagcagcaggtctgagcgtttttggcgtcccaagcgttccgggccgcgtcttccagagcctctgctcccagcggggtcgctgcggcctggcccgaaggatttgactctttgctgggaggcgcgctgctcagggttctggtgggtcctctgggcccaggagctgggagggctgcgccggcctctggagccccgggagccagtgccgaggtagggagacaacttccgccgcagggcg

SEQ ID NO: 13256 - DNA, 340 bp, Homo sapiens
  chr21:38073615-38073955
  hyper
cggaaagctcgaccttttgcgttcgcctctgccaagcctgttatttgtgctggccgctgggtctggagctgcgcttctcggcccctccccggtggagcgcagagggctggtctgcaagcgcggcctccagccccgcggctccccggcccaggagccaggcgcgggctgacccgggagcacccggcagcggagggggctggaagcggaccctaggcctctcctgtgccacccggccctaccgcgcggccgcggggcgctctcctctcgggcgcagcggtccttcagcccagggcaggttcctccctttcctactcggaacgtggcaaagataccccagtcc

SEQ ID NO: 13257 - DNA, 71 bp, Homo sapiens
  chr21:38077617-38077688
  hyper
cgaagtggtttgcaatccgaaagtgagaccttgagtcctcagatggccggcaacgcgccgaggtcacgctc

SEQ ID NO: 13258 - DNA, 30 bp, Homo sapiens
  chr21:38080960-38080990
  hyper
tgcctcctgggcggcggggactttctgtct

SEQ ID NO: 13259 - DNA, 30 bp, Homo sapiens
  chr21:38082598-38082628
  hyper
tagcgccccgagcccggggccattcaccct

SEQ ID NO: 13260 - DNA, 759 bp, Homo sapiens
  chr21:38119778-38120537
  hyper
tggaacatttcaggtcgcgtcctgagattggacagcacggcctagactaaggcgggggagggcgacagcgaccccgcgggtgcagcgcgtgggcggccgaggggtggtggctgcgcccggggcttgggggtggggtggctgcggccgcgccccttgctgccctctaacgtgtcgcctgtccccgcagcgcccgccgccgccgtgcgcaggttcggcgaggacaccgcgcccccgagcttcccgagctgcggccactaccgcgaggagcccgcgctgggcccggccaaagccgcccgccaggccgcccgggacggggcgcggctggcgctggcccgcgcggcacccgagtgctgcgcgcccccgacccccgaggccccgggcgcgccggcgcagctgcccttcgtgctgctcaactaccaccgcgtgctggcccggcgcggaccgctggggggcgccgcacccgccgcctccggcctggcctgcgctcccggcggccccgaggcggcgaccggcgcgctgcggctccggcacccgagccccgccgccacctccccgcccggcgcgcccctgccgcactacctgggcgcctcggtcatcatcaccaacgggaggtgacccgctggccgcccgcgccaggagcctggacccggcctcccggggctgcggcgccaccgagcccggcaaatgcgcacgacctacattaatttatgcagagacagctgtttgaattggaccccgccgccgacttgcggatttcca

SEQ ID NO: 13261 - DNA, 84 bp, Homo sapiens
  chr21:38120553-38120637
  hyper
cgccggtgccgagggccgaggagcgcccgggtccgggcaggtgaccgcccgcctctgtcctgcgagggccggtgcgacccagtt

SEQ ID NO: 13262 - DNA, 30 bp, Homo sapiens
  chr21:38338877-38338907
  hyper
gctcagccggccggcgaccccagcgcgccc

SEQ ID NO: 13263 - DNA, 868 bp, Homo sapiens
  chr21:38378576-38379444
  hyper
gaaacgcccctagcccgcgggcctcgctttcctctcccgggttcctgggtcacttcccgctgtctccagcccgagctcgtggccccaatccctggtacctccatcctctggtcaccccttctctggtgccccctccccgacttttctttgtcccgtccccacccttgcccgggcctgccggacccccctccttgacacccggcgccacctccttgagcttttctcgtctcctccccatccccggctccctggtcccctcccggaacttctctggtcccctccgctcctccgacccgggcttttccttcgtaccctgcggccccctccgcacccctcacggagctcctcgggtcctgccccctcccagcgcttgcccgcgccgccccgcccccgtttttaaacctggcgcgcgggtaggtgagcgcgttagcccgagtggatctaggcgcgctcgtaggccggcgccgcagcaaggggcgcgggctccgccggcaccatggagcccgaagcggcggccggagcccggaaggcgcgggggcgcggctgtcactgccccggggacgctccctggaggcctccgccaccgcgcgggccggagaggtgagggtggccccgcgccccggtggacgcgctgagaggcgtgcgcggtggcggtgcggggagcgcagcgagcgggaggctggggcgctgctgaacccccgatccccagcggagctccggagctcgacggcgacgccaagcaagctcctgagccggcagccgggttcccgggaggggcgctcagttctccggttccaacgcacagctctgaagtgcggaggcccaggatgtagctggccaggaaaggggccgacgcttccgtgtagag

SEQ ID NO: 13264 - DNA, 30 bp, Homo sapiens
  chr21:38593269-38593299
  hyper
aacgcagaccccaccgtttccttccattct

SEQ ID NO: 13265 - DNA, 208 bp, Homo sapiens
  chr21:38608355-38608563
  hyper
gatttatgatttttaccgttttagattgttacaacacaattcaatttatgaatgaaaaatttcttggcacataatttaagaaagatgatattagggtttagcaacaaaagtttctatccaaagaaatgtgcctatgttaacctttagagtaagtgcggtaaacagtgcgggccgaggagtgctggtctggacccgcaggctgaggctg

SEQ ID NO: 13266 - DNA, 215 bp, Homo sapiens
  chr21:39047623-39047838
  hyper
tggcggggatttttccgcgagtggctgcattggctttaagaaactgcgccgggctgggcagccgacgcaccgctaggtggcgcacgcgctcgctgcgtctttcagggctgcaggtacggtgcgggtttctggtgcgctgaccgcgctggggatgagcaccactgtcatcgcggggaccctcgggctgcgcctctgcccctcggtccccagcaccc

SEQ ID NO: 13267 - DNA, 370 bp, Homo sapiens
  chr21:39288333-39288703
  hyper
tttcacatcagcaccgagaggctgttaggagactccattctgctcgcggctgctccggctccaggtccggcttcccggcgtccgcgggtctccacccctccgcccgcccagcctctccagccaggtgcggccgtctccggactggctccctctggccgagcgcggagagcagggctgggcgctggggccaagggaggggcggaggggcgcgcgtttgggcagggacgggggagggagactgggtggaatgaagtggggaaagataagagtggcagaagaaaaaaaaaatccccggttaggagaaaagtggtggaccacgcagagagacgtcatgaaatccgcagattcaatgaatgctactcaattccag

SEQ ID NO: 13268 - DNA, 435 bp, Homo sapiens
  chr21:39288790-39289225
  hyper
cgcacagcgccggcgcggtccgggaggaaggggcgggggcgagcaggacagagccacagacccagagacgcccaccccgccgcccatgccagctagcgtgtcagcgcgtcgaggaccgggcttggtgggggcgggctgggcacaaaccaacgtgcatcccccgccactggaaacgtgggtgctccatgctgggggaatcttttgggtttcggtccccgaccccccagtcccaacctttctcccagtgccactaagtaagttattcccggagaaacgcctggaaagcaggaaagagccgaagctcggggagcagttttgtctgctggttgtaggggttcggcttttagggttttgtgagataaggaaaaagaggctctgggcactgcctcccaccgggctgaaatccgtgagaggcagccccggcgcgggagccgg

SEQ ID NO: 13269 - DNA, 8 bp, Homo sapiens
  chr21:40032312-40032320
  hyper
cacctgtc

SEQ ID NO: 13270 - DNA, 157 bp, Homo sapiens
  chr21:40032367-40032524
  hyper
cgctgccttcctccccgtccccgcagccgctgtagccagcgtgggagccgggcaggtcgcgtggggcgctggacttaccgagaggttagcgccgccgtcgggggagggcgtgtcccgcacgtgtgtgtccgcgcgtgtccgcgcccgcgtgtgccag

SEQ ID NO: 13271 - DNA, 235 bp, Homo sapiens
  chr21:40032679-40032914
  hyper
ggagtgcgcgccgggggcggggcagggacgcgtgggcgggaatgcacgcgcgtggccaggtgcgcgtgggtgcgagcgcgcgggagtcttcgagtgcgcgcgtgtccgtgtgcgcgtgggtgtgggtgtgctcgcgtgtccgtgcgcgcgccctcggggccaagagcgcgggccgcgcgggcaggtttggacactacgcgccctgctcgggtttaggacgcggctggcggctccg

SEQ ID NO: 13272 - DNA, 459 bp, Homo sapiens
  chr21:40032973-40033432
  hyper
gaggagcagaggctgggacggccggaggagagagtccggccccagcaggaaaggaacccagcacgcgactactggaggggcgaggagcaagggaaggaccagaggggaggagagggggtcaggggagggaaagtgtgggagggggagccgcgggggtgcgcgctcctcctaactcggggtcgcttttagcgagaagtgatatttttccagcctcattgaaaaccgttgcaaacattgaaaatagtaaaagtgaaaacggttgcgacactaagacgtttataaaatgaccgcggactgccctcgatgctgatgagaactgggacgacgtcgcgcagagcgtccggagggagaggcgcggtgcccgggacctcggtcgtggggaggagccggatacagccgccgggacgcggggatgccgagggcaccgcggcctggtctgaccgacgcacgcggtgacag

SEQ ID NO: 13273 - DNA, 25 bp, Homo sapiens
  chr21:40033449-40033474
  hyper
cggcgtctgcaaccagcagcctcca

SEQ ID NO: 13274 - DNA, 142 bp, Homo sapiens
  chr21:40105801-40105943
  hyper
tttaaacccaaattattgccagagaaattggtatatttattcagatgaaaaatacttgcattagtaagcgaaaatatctgtcatcgtcactttacagaaaatggaaaaggatgaggattgcacaaaaactagaaattccatc

SEQ ID NO: 13275 - DNA, 378 bp, Homo sapiens
  chr21:40105997-40106375
  hyper
cggtggcgctcgaggcaaacggtgtcatgaaacggtcactggatgcactgaccctgaagatgctctcaaagcacgagtccgttcatcagagagtggacttgacacccatcagaaacattcccggagtgcgttggtgtgaaggtgcgaggagagtcggggaagcatcccgaagccctgctaggcgaatgggtactgctgagattacagggtcagcacaaagcagaatacaggacccgaaaataacagctgcaccggaagaatacttgaccactgtttaagaaggaatttgacgaagagcagtcaccgagtgcagccctgggccggctaaaggaaaagaaaaaaaatcactcaactgccgctcggcggcgggaatgccag

SEQ ID NO: 13276 - DNA, 88 bp, Homo sapiens
  chr21:40177514-40177602
  hyper
gagtgacagcaggaggcggagggaaggttgggccggaaggtgtcagccccgccccgcgctccctcgccgcctccgccctcctcttctc

SEQ ID NO: 13277 - DNA, 672 bp, Homo sapiens
  chr21:40177801-40178473
  hyper
tcctccctcctcctcccgctcctgaagagcgcgccgcgtgggggacggcccggttacttcctccagagactgacgagtgcggtgtcgctccagctcagagctcccggagccgcccggccagcgtccggcctccctgatcgtctctggccggcgccctcgccctcgcccggcgcgcaccgagcagccgcgggcgccgagcagccaccgtcccgaccaagcgccggccctgcccgcagcggcagggtaagagctgggcccgcagagagcgcccggcgcgcggctccagtcccatggagggtcacccggggcctgggcgggggtcgcggggggcactgacacgcagatctcggggcgctgccgggggtgcaggtgggggtggcggctgctgcgaggactctaggggcgcgcgtctgagttccgcgccggctcgttttccggttatggagtggcctccggggctggcggggtcggccggggggttcctgcgtgctagggccgctgtcttcggggtcgcctagcggcgggcgcggccagggcgcgctggcttgtttcgctcgcttttgtttttaaaaggaaacgcaggcctggtagggggtcctgcccagtggatgtcccggcgaacatgatttcgcgaacgggagtgggggcacaggagagcgtgtccgaggtggc

SEQ ID NO: 13278 - DNA, 30 bp, Homo sapiens
  chr21:40685664-40685694
  hyper
cccgcccggggaggcgaacctcgctcagct

SEQ ID NO: 13279 - DNA, 30 bp, Homo sapiens
  chr21:40686606-40686636
  hyper
gccttcctggaatgcgcgttaacaattctg

SEQ ID NO: 13280 - DNA, 30 bp, Homo sapiens
  chr21:40752101-40752131
  hyper
gcccaggagaaacccggaacgtgttaaccg

SEQ ID NO: 13281 - DNA, 30 bp, Homo sapiens
  chr21:40817881-40817911
  hyper
aacgatcctcctgccgtccctgttcggcgc

SEQ ID NO: 13282 - DNA, 71 bp, Homo sapiens
  chr21:40941232-40941303
  hyper
tcatttctctacacatcgtctcctacagctcctgctcattcaccctgctccacccacgctggccttggctt

SEQ ID NO: 13283 - DNA, 66 bp, Homo sapiens
  chr21:42539637-42539703
  hyper
ccctagttcaggccctcgctgcccctttaagggttctcgaaactttccccccggtatcagatgagc

SEQ ID NO: 13284 - DNA, 527 bp, Homo sapiens
  chr21:42540313-42540840
  hyper
gtagttgcgcccaccccgggacccgggacccctgccgagcgccacgccgacggcttggcgctcgccctggagcctgccctggcgtcccccgcgggcgccgccaacttcttggccatggtagacaacctgcagggggactctggccgcggctactacctggagatgctgatcgggacccccccgcagaaggtagggacccccggctgctgccgcgggcttttcgggctcgttggagggagggggctgtccagagacgcctccacgcggcttagcgtcgcccccaaagcagcagctgtccccgcacagaagagcggggaacgcagaggggctcgggtgggccggggagcgggggcgctcgctcttgagtcgcggaggacggcagcccccgcccggggcgcactgaggggtgtgcgcgagtgtttcagaacttgtgagctccccctccgcggggctgggcgggagaggagacctggaacttgccgcctccaataacgtgatttccttcttgcgggcgacacctacttcca

SEQ ID NO: 13285 - DNA, 333 bp, Homo sapiens
  chr21:42688772-42689105
  hyper
ccgccagggccaggaggggagcggcacctggaagatgcgcccattggctggtggtgagtgcgcccccgcctcggggcgagggtaggggcggggaaggaggaccccaggggaagcgtcgctccccaaccctgcctgggacccgccacgcttagcaaaagcgggagggctggttcttggcgccgaggctggtcttagacctgggatcaggaatgcgggaagcgattccagagggggcgaacagcgggggtttccagcagggttccccgaccctgtttccccgcgctcgccaggcctgttcccgccgccccagccggggtgcatgggattagggag

SEQ ID NO: 13286 - DNA, 30 bp, Homo sapiens
  chr21:42797938-42797968
  hyper
cgggcctgatgaaacgagcatctgattcag

SEQ ID NO: 13287 - DNA, 644 bp, Homo sapiens
  chr21:42878704-42879348
  hyper
aaatgccttgtaactgggctgcgtagcctttgtaattttccatgattcgggaggttctcgcggctgggagctccgtgaggtcaggcattgccttgggcgcgatgcgctcatctttcccgcgggaccactgcacaggttcgcacggagggaagggctgcgcagcctcgaaggcgagccctgggtgctccctgcccacagggctcacctcgggccgccgtgctatcctttccttcccaaacaagccaccaggattcctcgtgattagggctgccaccagggcgttctgaacaggattcagggccaccgcgctgtgctctacggcggagcgggcgaaggccctcctctgccacaagcgctcagggctctcggcgcacaaactttctggacatggggcagtttttcagctggacccgtgctcgagcagagcgcccactgccagactggagcacttgaccactcagggtgccactgtgccgagccgggcaggacaggatgaggtggaccgaagcgcccaggtgccccgccttccccccaacccggcacggagcgcaagcggaggagccagaccggctcctcccgggcgggttcctgccggtgccgggtgtccaggaggccccggccctgatcgccgccagcgggtcgcc

SEQ ID NO: 13288 - DNA, 130 bp, Homo sapiens
  chr21:42880092-42880222
  hyper
cccgccctggctctcgctttaatctcaggaggcggtgtcccagggtccagggcgacacccccaagcgggtcgcgggtcaccctgggcgggcgggggcgggggcggcgggaggaggcgtttcccaagggaa

SEQ ID NO: 13289 - DNA, 30 bp, Homo sapiens
  chr21:43181714-43181744
  hyper
atccactgtgcaaccgtgtgaggcacaccc

SEQ ID NO: 13290 - DNA, 30 bp, Homo sapiens
  chr21:43182352-43182382
  hyper
aaagtcattgtttccgtggacaaaagtgtt

SEQ ID NO: 13291 - DNA, 804 bp, Homo sapiens
  chr21:43186592-43187396
  hyper
cgccccggtgggtcccgggcgggccggacgcgcctcccaagggcgcgggtccgaggcgcaaggcgagctggagaccccgaaaaccagggccactcggggagtgtcaggaagcacgactgggcgccttaggacgtccgggcagacgcggcccccgaggagccccagaggagccccagaggagccgcctgacccggccccgacgtgcgcgatcgagcccgggctcgccaaagcccccgcgcccctccggcccggacaggccgagtggacattgtcggagccccgcggcctcgccggcaattggtttcccccccgaagctgctccgggggtgagttcgggagagagaggcaggaccccgggaccagagcaccccgaccccgaccccagcccgggccccagccgccccagcgccccgcccgggccgctcacctgtcgtcgacgtgcaggctgggcgagcacttgatggccagccaggtcttccagtggacatggcgcaccttgtacacctgcccgaagccgcccgagcccaccttctcccagcccgtgaactcgcccgcgtcgaaggtgcgcagcagcgccagggcccatggggtcccgccgtcgccctccatcgcgcacgtctagccagcgccgcggcggctgcccaggtgcccaggtgcgcgctccgccctgttacgtcacttccgtaggtcgtcccgcccccaggccccgcccacttacccgccccccgggcgccctctctgccagcgcccggtgactgcggacggatgaatagacgctgcgggtcactgcgctctcccctgggt

SEQ ID NO: 13292 - DNA, 31 bp, Homo sapiens
  chr21:43221770-43221801
  hyper
gattggtaaactgagtcgcggccgcagtggt

SEQ ID NO: 13293 - DNA, 31 bp, Homo sapiens
  chr21:43373717-43373748
  hyper
gcgcctccccgagccacgagcccagccgggc

SEQ ID NO: 13294 - DNA, 30 bp, Homo sapiens
  chr21:43639864-43639894
  hyper
gccatccccaggaacgccaggcaaggtctg

SEQ ID NO: 13295 - DNA, 31 bp, Homo sapiens
  chr21:44013673-44013704
  hyper
cccctccaccacaccccggcaagcccctcct

SEQ ID NO: 13296 - DNA, 30 bp, Homo sapiens
  chr21:44299585-44299615
  hyper
agtcccacagagcccgccatgtacccgccc

SEQ ID NO: 13297 - DNA, 138 bp, Homo sapiens
  chr21:44494639-44494777
  hyper
agcagcaccttcctccgcgggtcgcgggagtcacctacgggaagggactctccgtctggcacaggccctgtctggcctggggcgcgcatgctccgccgccgaatcttccagaaagccgtggacccgaggccccggcag

SEQ ID NO: 13298 - DNA, 1085 bp, Homo sapiens
  chr21:44494940-44496025
  hyper
cgggctccccaagacaacagcgccgggcggccggatgcacgtgcgtcccgggaaggcgggttcagctggcatcgcctggccggttccgttcgctccttaaaccacaagacccccttggggtcacgacgttcccggggcacccctgcactcgcgcgccagcactcccggaggggcctggggaaggccacgcgcacggagagcgggaaactcctctaggtttccaggtgggagatccagaccctactgagacccggaaaccgccggccactccgcctccggaagcgacactttgggacaaagctggggacaagtaagcccagaagatcctcgggaagccgagaatttcgcgctccgctctcccacccacgctccgcctcccgcttgcatcctacagctcagctgcggtctcgcctggggctcagggaagtgaggtcccaggaaaacctccatcccccgaacgcaacctgggcagagccccgcgtccctcccccagcgggcacccacctcgcgtgccgcccgcgcaacgacagcgtttaccgccaccccacacggtccgccaaaaagggcgatttgcaaacagccatttcccatccacaatgcagcgaactcaatgctgggcaccgaaacgtgcatctcccccggattcccaccccgcgtccctgctccacgctccaggactcgccgccagtggggtccactccgccggcgcgggggctggggtgggagcccggggccacgtgcacggccagcccccatcttctgggcggtcaagaccgcaggcgtgggcgccggtggggcgggggtcttgggagaccctgtctcgccgcctttcggtgcagatgatgcaactctgggcggaggcgcggagagggaaaccgggacccagttgagatcctctgtccagagaggggagcgagtctcggtggggccggatctcacctggacggatacatggaaaagaggggcgagcggctgccccgactgcggcgaggcggagacggcgaccccggggtggcggcctcgcggggacccacggcgaggggagcaggcgggcggtgattggcggagaggcgggggcggaggcc

SEQ ID NO: 13299 - DNA, 111 bp, Homo sapiens
  chr21:44513218-44513329
  hyper
cgcccagatctttcacgatctctcgaccgcctcctgtcacgctcccgtccgccgccacctccaccaccgccaccgccaccgccacgaccacggtctctagaccgagaacga

SEQ ID NO: 13300 - DNA, 209 bp, Homo sapiens
  chr21:44514585-44514794
  hyper
gcgacggcggccatacagctcccgccgcagctctctggaaatgggcttcaaatgcatgaagttgcagaagccgcctcgtgtgcattctctgtgggtgggttggaaggagacatttactacctcgtgtgcacacggccccgaactgtgctcagtcacgtcactggccactcctcactcaccccatctcatactgacggcagcaggcttct

SEQ ID NO: 13301 - DNA, 30 bp, Homo sapiens
  chr21:44515794-44515824
  hyper
ttctctcacctcaaaaaactcatcatagtg

SEQ ID NO: 13302 - DNA, 30 bp, Homo sapiens
  chr21:44524440-44524470
  hyper
ttattgtgcaaccgagagcacctgtctcca

SEQ ID NO: 13303 - DNA, 250 bp, Homo sapiens
  chr21:44847591-44847841
  hyper
agaggccgcttgcccgcggggacgtcagccgcttttgctgttaaaatctgaaatgttcagcaagttagaaacttgaaacctaaggaagcgtgaccggccgctctggaagcccccgccgcgcggccggtcccggccccggccctcagcggcgctggcgtctgcgcgtcccggggctgcccccgcagcatgtggggctgggaccctcttcccgcgcgggccccgggcggacgctgcgggcggtgacggagcc

SEQ ID NO: 13304 - DNA, 690 bp, Homo sapiens
  chr21:45148317-45149007
  hyper
gctctcccctggaacgcctggaactagggtggtcaggctggggtggaggagctcccctggaatgttccagagcttcccccactcctgccgttctgagtcaccctgcctccccggaggaggaggaggatcagctgagccgccgcgctcacgtagtgtctggctgtctgcctgtctgcctcgctgtgagcagagtgggatgctgccgataaggcgcgcacgtgggccctgggaggagcccgaggcagccactcccgcacgtgggcaggaggagggctgctcacaccaccggccgagggaggaggactgcgggctgcgcctgggcaggggatgagcttgtgtcgcgggcggcagggggaagggagtcggagagctcctgcggtccagccggatgactgatgaggttgaaagcacttccgctgcggcccccgcaggaagttcccaggaggaagttgcgaccctttctaagccatcccactggcctggactctgctgggattattttgaccccccagggcagagtgtagccatctgactggctttctctctcggcaggagacggggcgcacgcctgcaggtgggggagccccaatacgtcacacggatgagcggggcaaagcccagccccccaccccgcacccgcccgcccgcaatcctgccccctggctgcggcctccgcggctcttcccaccc

SEQ ID NO: 13305 - DNA, 39 bp, Homo sapiens
  chr21:45381602-45381641
  hyper
tgtctcatatggaaaacggtgagcgcgtatacactttgt

SEQ ID NO: 13306 - DNA, 31 bp, Homo sapiens
  chr21:45526971-45527002
  hyper
cgcccagcgctggagcgcgcctaagaggcgc

SEQ ID NO: 13307 - DNA, 64 bp, Homo sapiens
  chr21:45553435-45553499
  hyper
ctggatagggctgagacgggggcgggtcttggctccgcccagaaggctgcgcaggcgcagtccc

SEQ ID NO: 13308 - DNA, 165 bp, Homo sapiens
  chr21:45660234-45660399
  hyper
tgggggagggcgtgtccgcagaccgtgggcaccagctggccttggagagcgctcggccggtcacctccctccttctcccttcttctaggaaatcagcagtgccagggagtggaaggggcagcgcccgtgccccggcgtgcagggtgcgcccgccttccctccctc

SEQ ID NO: 13309 - DNA, 78 bp, Homo sapiens
  chr21:45713626-45713704
  hyper
tttcccccggccccccgcgtcaccccgcgctgttgcctcccacagaacctggctcctggtgcgcgttgcggggtgtgc

SEQ ID NO: 13310 - DNA, 161 bp, Homo sapiens
  chr21:45875681-45875842
  hyper
cgagcctctcccggccggctccgcgcgcggccccgccgtccacgcccagcgcgggccgcgcgcacagggcttggcttctctgttttctcggtttccttcttcaggcagttgaaagaaaaggcgcggttctgtgcccggtgcgagccgcggctcctttaggg

SEQ ID NO: 13311 - DNA, 258 bp, Homo sapiens
  chr21:46129377-46129635
  hyper
tgagtcctagaaagcgagagacgagaggggaatgagcgccgaaaatcaaagcaggttcccctcctgacaactccagagaaggcgcatgggccccgtggcagacccgaacccccagcctcgcgaccgcctgtgacctgcgggtcaaccacccgccgcggctccacgccgtgggcacagactcagggagcaggatgagaaagctgagacggcgcagccacggcccggtgccttcacgcgcacagcgacacagccccagcc

SEQ ID NO: 13312 - DNA, 30 bp, Homo sapiens
  chr21:46131084-46131114
  hyper
tagctcttgaagctcgtccccaccctgcgt

SEQ ID NO: 13313 - DNA, 457 bp, Homo sapiens
  chr21:46800434-46800891
  hyper
cccagcgtccgtccgtgcacacgctcacctcgcacccagcgtccgtccgtgcacacgctcacctcgtacccagcgtccgtctgtgcacacatgctcccctcgcaccgagcgtctgtccgtgcacacgcttacctcacacccagcatccatctgtgcacacacgctcccctcgcacccagcatccgtgcacacgctcacctcgcacccagcatctgtccatgcacacactcccctcgcacctagcgtccgtccatgcacatactcaccttgcacccagcatccatctgtgcacacaccctcacctcgcacccagcatctgtccgtgcacacacgctcacctcacacacactcccctcgcacccagcgtccgtcggtgcacacacgctcacctcccgcacctcccgtggaggcggcatccaggcagggaagcaaggacactctgcgtccattcctctct

SEQ ID NO: 13314 - DNA, 38 bp, Homo sapiens
  chr21:46825929-46825967
  hyper
tgccaaccgagcgccgcgcggtccgagaacaatgccca

SEQ ID NO: 13315 - DNA, 41 bp, Homo sapiens
  chr21:46950829-46950870
  hyper
ggaccagcgcgcccagcggatcttcacgaagcccgcggcga

SEQ ID NO: 13316 - DNA, 172 bp, Homo sapiens
  chr21:47062752-47062924
  hyper
gggcgctgcggccccagcctccgggccggggccaggcccacagagaacgggaagcgggcgctgcagggggaccttcggggttgcggcacggctgggaattcaacggccattcccgtcccgtcgggcccacccgcccgcccgccaaatccccgcccaccgcggatccgccccg

SEQ ID NO: 13317 - DNA, 986 bp, Homo sapiens
  chr21:47063438-47064424
  hyper
agaactttccgggctcggattggccgcgccggttgatgttccgccctttcattggcccgcggcgcccgctttcgcgagcctgcccttgggcgggggcggggccggcggcggcgcgcggcgctagattggttagcggcgcagaggggcgggcccgcgccgcgcgcagcgctcgggctggagcgcctgaagccgcgaccgccgcctcagccgcctcagccgcggtcgccgccgcttcggctgacttaggctccgccgccgcctcctcacccgcctcgccccgaccccgcccgggcctcccggcctctccccgccggcccgcgggctcgccgtccggcgcagggcaggtgagtgagcggtggcgggcggggtcggggtcgggcgcccttgcgggttacggggacccagtccccgacggaggccgagtgacggggcgaccccgggccgcggcaaacttcgcccgagccggggcgggcgggggtcccgggctgggtcgcgccgtccccgaccgccgccggcgcctgcggcggcccggggcagcgaggggactcgcgctccctcaaggtgcggtcgccaggcctggcccgcccgcctccgccccctccccaaattcggaagttgcggcgggaagccgagaacgtctcggatgtgggtcagaaaacgtctggactacttgaggcttcagtttcaaaacggcacaaatttcatctcttgattgagaagagatctggggaacaccccggagcggccgcggcggctggagggcggcggggcggggcgcggggcctcctccccctggacggccgccgggagagcgcggcctcacccctcggtgaccctgcggagagccgcgcgcgggcggtggggcgcgcgcaggtctctcttgttgctcgctgtgttttattttaattttgggggtggttagaacgtgtttcttattgtccccacacgtgttctaattggaagtcttgtttcgtgaaagagttttt

SEQ ID NO: 13318 - DNA, 30 bp, Homo sapiens
  chr21:47392901-47392931
  hyper
aggtgcggcctcagcgccgtcccttcccgg

SEQ ID NO: 13319 - DNA, 107 bp, Homo sapiens
  chr21:47394339-47394446
  hyper
gaccagtgttgagccgtcgcacccccgcttgggaccaggatgggctgcactttccccacccgcggccctgggacccgccccacccgaagcccggggagatccaaccg

SEQ ID NO: 13320 - DNA, 30 bp, Homo sapiens
  chr21:47518732-47518762
  hyper
acccgggctgacagcgacccgcagcccctg

SEQ ID NO: 13321 - DNA, 89 bp, Homo sapiens
  chr21:47717297-47717386
  hyper
cccggagccgggtcccgccttcggcctgagctagagccgcgcgggcggccggcttcccccaaaccctgtgggaggggcatcccgaggag

SEQ ID NO: 13322 - DNA, 239 bp, Homo sapiens
  chr21:47717433-47717672
  hyper
cgcgcttccttccttccagatgttccagaaggagaaggcggtgctggacgagctgggccgacgcacggggacccggctgcagcccctgacccggggcctcttcggagggagctgagggccgcgttccttctgaaagcgggacgcgggaggggtggaggctgcggggagccggggtcgcacacgaataaataacgaatgaacgtacgaggggaacctcctcttatttccttcacgttgca

SEQ ID NO: 13323 - DNA, 2 bp, Homo sapiens
  chr21:47717748-47717750
  hyper
cg

SEQ ID NO: 13324 - DNA, 44 bp, Homo sapiens
  chr21:47799181-47799225
  hyper
ctgcgtgtcgtgagccgcgcccgtcttcccgggccgcgtgtcgt

SEQ ID NO: 13325 - DNA, 1042 bp, Homo sapiens
  chr21:48087161-48088203
  hyper
gtttgcctgctgggctctgtgcgcctgctgggctctgtgcgcccgggaaggtgcggccaccctcacgcggaaggcggccagcggatcccggtgcgcgcagctcccagcgctggggttccagcgccccgcctcttcctatagcaaccagcgggacctgccgtcccccggggcaccccgaggggtctgcgcccgcttctttccgaaacgggaaggcgctgggggctcggcagccagagggacgggttcagggagcgtccggtgagcctaagacgcgcctttgccggggttgccgggtgtctgcctctcacttaggtattaggaaccgtggcacaaatctgtaggttttcctctgggggtgggcggaggctccaaaccggacggttttctcctggaggactgtgttcagacagatactggtttccttatccgcaggtgtgcgcggcgctcgcaagtggtcagcataacgccgggcgaattcggaaagcccgtgcgtccgtggacgacccacttggaaggagttgggagaagtccttgttcccacgcgcggacgcttccctccgtgtgtccttcgagccacaaaaagcccagaccctaacccgctcctttctcccgccgcgtccatgcagaactccgccgttcctgggaggggaagcccgcgaggcgtcgggagaggcacgtcctccgtgagcaaagagctcctccgagcgcgcggcggggacgctgggccgacaggggaccgcgggggcagggcggagaggacccgccctcgagtcggcccagccctaacactcaggaccgcctccagccggaggtctgcgcccttctgaggaccctgcctgggggagcttattgcggttcttttgcaaatacccgctgcgcttggacggaggaagcgcccacgcgtcgaccccggaaacgaaggcctccctgatgggaacgcatgcgtccaggagcctttatttactcttaattctgcccgatgcttgtacgtgtgtgaaatgcttcagatgcttttgggagcgaggtgttacataaatcatgg

SEQ ID NO: 13326 - DNA, 30 bp, Homo sapiens
  chr22:17601366-17601396
  hyper
caggtccagcaggccgccctgcgccagcag

SEQ ID NO: 13327 - DNA, 39 bp, Homo sapiens
  chr22:17602546-17602585
  hyper
gctgggaatcccaccggctgtaccgcagggcgttagtac

SEQ ID NO: 13328 - DNA, 1157 bp, Homo sapiens
  chr22:17849826-17850983
  hyper
gagctccttgggcgccgttctcggctggaataaaagcgttaagaaacaggtggaaagcacttcacttctctaggcttcatatttctagggtggacagcccgctcctgctccggctctgccctcggcatcaataataactgaactcccacacgtgcacgtttctgtctctagcccgaccgaaaggaccaccccgcgggccctttaaaaggacgcgaccactcaggccaagtgggggtgggagagctcctggccgtcctcccttgggaaagtgcttcaactccccagtcccaaagtcctggagggcggagggcgcctcgtgagagttctcgggggtgcggcccgcgccccctgggtcctgcggatctgggcccgggggcgcgcgccccgcccctccccctccctggcggtgcagctgtccgggcgggggtggggcgggggccggggcccgcgtgggattaactaggaccggggcgggagtcgaccgcggccggcggggagggctagccccgctctggcgggcgggcgcgtggcaggggctcccggaggccccgagctcccgggaggcgctccggccaacttcgggccggtggggaccgggcctgggcgcggggctctgaaggtgtggaaggaaagtttgggactccgttattcttccacagcgtccttcctcccgtaatatccagcctctttatcgcggggctcgggagcccttggagttgatctcgccaccattatccccccgggcgagcgcggaggacgggctggccattctggccaggccggaggtgttttccagcccggggctttgtgataactgggccgaaacccgagggtcctggagcgcggcgggtggcgggagcttgcggagcgcggcgcactcggcggccaggcatcggccagcccagcggcagccccctttctcctatttttatttttatttttggaaggagctgagaattagtcgattggttggcaggttgaattgccttctcttctatggcaatatgtgtcgtgacttttcaccttttgcctttggacaaaggtgaatggcaactgcgttggtcagtttttgttttctgttctgcggatgggttcgccgacgcagtaatcaaaattagagccactcttttggaagagcaaatcgttgttgttgcctc

SEQ ID NO: 13329 - DNA, 195 bp, Homo sapiens
  chr22:18441047-18441242
  hyper
ttgggtcctcaggccacgttgttatttgtgttctgttccctaaaaaccgtcagagagactgagttgaacgcactccacacactgatgatgatggcagatggccagaggcagttacggaagaaagaaaagacagtggggtcacagctcagctctgccttcctgctaaggtgtctcctgcatcggccttgggcctca

SEQ ID NO: 13330 - DNA, 30 bp, Homo sapiens
  chr22:18593347-18593377
  hyper
agggcagcctcccccgcgggcgcagtcccc

SEQ ID NO: 13331 - DNA, 98 bp, Homo sapiens
  chr22:18923727-18923825
  hyper
ccggcgccgtggacagcgggacgaagcggggaatgcaggggcgcagcgcgggcagggcgcgcctcagagccatggcgggacggcggtacccgcccggg

SEQ ID NO: 13332 - DNA, 153 bp, Homo sapiens
  chr22:19510793-19510946
  hyper
ggcagcagccaagacccccagcgtcttggaggggaagcgaaatcctcagtctgacacccgctctgcctatggaaacagcgccgcgcacagaaaaggaaacttcattccgtctgttaagggcagggccgggctagtggcaggagaaggtcagct

SEQ ID NO: 13333 - DNA, 314 bp, Homo sapiens
  chr22:19511141-19511455
  hyper
cgtagtcgccggtggccgtgggccgccgcggcgctgagtacttcacggggaagctgaggtcgggacggccggtgcagacccaggcgccgcagcacaagaggcagccgcctaccatgagcagcgcggtggccgcccagccgatgtacagcgctgcgcccagctcgtacttctgcgacacgggcacagacgggtcgtaaaactcgcggacgacaatgttggcgaaccagcagagtggcacgagcgccagcagcccgcaaaacaggtagagcacgcctcccgtgagggccacacgcgccttggccgggcccggggcc

SEQ ID NO: 13334 - DNA, 187 bp, Homo sapiens
  chr22:19511541-19511728
  hyper
cgcctgcacctcggtgctcagagccagcaccgagtcgtacactttgcactgcatgtgcccggtgctctgcaccacgcacgacatccacagccccttccaggtggtctgcgccgtcacgatgttgtggtccaggaaggcggtcacctgccacatgggcagcccgcacgccaggatcagacccccccag

SEQ ID NO: 13335 - DNA, 479 bp, Homo sapiens
  chr22:19706042-19706521
  hyper
cgcccagtcagggggatggctcggtcggcctcgggggtcgacgatcccccgggtaggcgacgtgccctgtccaggcctcacttcccgcgtccgcaaaacggggtggacaacgcagcctaaggcagagccgcgccaaggtccctcgctgtcgccgggctctggcggcctgaccgggcctggggtccgagcgtgcccccgggcctgggggggtcgccgcgatggactcgctggcagcgccccaggaccgcctggtggagcagctgctgtcgccgcggacccaggcccagaggcggctcaaggtgcgtgtgtggagagggcggaacgtgggtctgtgaccccgcgggctccgggactcggcatggggtccccgtccccgcgcgccacggcccgccagcgcctaggctcagcccttccctccgcagcggcctcgcaggtccgcggccccacggtggggcgacgtgccctgtccaggcctcacc

SEQ ID NO: 13336 - DNA, 303 bp, Homo sapiens
  chr22:19748605-19748908
  hyper
gtttgcgccggccgccggggccgccaccagcgccgccgccgagcccgagggccccggggccagctgcgcggccgcagccaaggcgccggtgaagaagaacgcgaaggtggccggtgtgagcgtgcagctagagatgaaggcgctgtgggacgagttcaaccagctgggcaccgagatgatcgtcaccaaggccggcaggtcagggcgcccctccccacgccgcgaccctccccacgtgctgccgccagggctgcgggcctccgcctgatccgcgcgagcggggccgaaagccgggtcgggggc

SEQ ID NO: 13337 - DNA, 50 bp, Homo sapiens
  chr22:19748960-19749010
  hyper
cgccgtcccggctccggcgacagccgcccggcgctcccctcctaacacct

SEQ ID NO: 13338 - DNA, 431 bp, Homo sapiens
  chr22:20255236-20255667
  hyper
ttaaccccttggtggccggggcgctccgaggccgggccccgcccttccagcccacggcccccgccctcgacttggcccagcatcggggaccctcggaccgccaccctcggccctgccgaagccgtcaactttcccgggaagcggcaacttttcctgccgcctccggctccgccctcccggggccggggcgccagcggccccagcctggcgcggcactgcggtggctttccctgccgcccggctacgcttccctcgcctcggcagcccgggacgggccctgcggctccggggagggggcgagccgcccccctccgcgccccgccgccggccgggctcgggtgcagcgcggacactcacctccagcggacgccctcttcatcgtaggggttgggcggggcgcgtcggggactgaaagtcgtttcggggcgggc

SEQ ID NO: 13339 - DNA, 901 bp, Homo sapiens
  chr22:20790617-20791518
  hyper
ggagtgagtagacagagaccacggcgatcgcgccctccccctctccaggcaccgccccgcccgccgccgccgctgcattcctggggccggggaggcccgggagtccgcggcggcggcatcgatgcgaagcagatggcgggccaggccggcccccgccccggaggcggggctcgcagcggggaggggtctgcgcgcctccggaccagagttcggaaaccccgcgctgccccctcgcagccccttgtctctggcgccgagcccctggactcggcttgccccgggtccgtggctcaggcgccccgacgcgacccagctcggagcccggcggccgcctctgcggctgccagcccgtgcggcgtctccaatccgcgccaaggcgcccccacacgcccgctcctcacccctgcgtggagatgcccttgaccttgtggcctttggccagcccaccggctcccccgaccccagctcctaactcctggcgtccggggctcacctctctgccctccgtgcaaactcccggactcgcccccccaccggccgggcctgtcgcctgcctgtcccacactggcttccccagccggcgccccacatttgcgcggccccttcttgcacccagaatccccacctggttgtcgccagggttcccacatcctccggtcccctgtgcctgtcatagtccttccgcctcccgcttctggtccacttcgagcgccggctcctcgacgctcgcctgggtcaccaccctcccacccgcgcccgctctaagacgcgaatctgtctttccaagtctggcttgctccaggacctccccggctagcaccgctcctcctcccctgaccttcctcctcactcccactcccggctccagtcggactagtgcggggctttagcacatgcagtt

SEQ ID NO: 13340 - DNA, 30 bp, Homo sapiens
  chr22:20791718-20791748
  hyper
gcctggaacggagccgcgctggctagggag

SEQ ID NO: 13341 - DNA, 10 bp, Homo sapiens
  chr22:20792481-20792491
  hyper
cgcaagccca

SEQ ID NO: 13342 - DNA, 30 bp, Homo sapiens
  chr22:21271377-21271407
  hyper
gcctccctggcccgcgattcagcctgcacg

SEQ ID NO: 13343 - DNA, 704 bp, Homo sapiens
  chr22:21319204-21319908
  hyper
ggtcgcgaggatccccggagacccagactcgggcccggggcgcccccggccagagcggcccctggctgcctccctacgccccgcgactccggtccggacgccgagggcctcggcctgcccctgtcccccggccgccccccacctgctccggcccggcggggcggtgctgggcccgcgggctccccggccgcagtgcaaacgcagcgccagacacgccccgcccgcgcctccccgcccccccgcgcccgcggccccaagcggttcccgagcccaggcccgcgccgagcccaggtgagcgcccgccccggggaccctggtccccggaaccccggtccccgcccgccgccccgcctcttcgccccggcgccgggggccagcgcttgcgctcccaagtctcggaccccggcccggcacgttaggggctgggggttggcaagcggggccagaggcactggccggggtccgaagctcacctcgtccttctctcgtcccacaacggccccttcccggctcgccgcggggccccactgtgtgccagtcccccttctcgggctgcaaggtctggcgggggcaacgggacggagccggcgaggctgctggcatcggcttcccagagagagggaactgcacgtgcagaggcggggagagtggacagaggcttgccctgagctccgtgggggaggggagagcgcggagcccccaca

SEQ ID NO: 13344 - DNA, 157 bp, Homo sapiens
  chr22:21368224-21368381
  hyper
gggctggagacgccccgcagagggctacgtgccctgctggacagaggtctcctgcctcctcggcggcgccagcccacctcccacaacccctgcgggagaagcccccaaggggaggagacgggcctggcccctgccccgagcaccttccgtctctagg

SEQ ID NO: 13345 - DNA, 377 bp, Homo sapiens
  chr22:21368435-21368812
  hyper
cgtccacaggccgccgtcgcctcttcctcctgctttttatcctccccagacctctggcaggaaccgctcatcgttacgcccctttcgcagcctcagaccctgaggcggagaccgcttggcgcctcacttagagcgcgacccggggatgtgggcggagtctgcggctgcgctgaccaatcgagtgtggcgtccatcgactggcgtctgccacggcaattagcgacgcgctcccccgcggcggtcgccccggcaacccagtgctgtaggttgccgtagaaaccgtggctctcctgcgctgaggctcctcgcctgagaggataaactgcacgcgccacgggctatgcactgggctgggcgccttgtgggcatcctccctg

SEQ ID NO: 13346 - DNA, 30 bp, Homo sapiens
  chr22:21386899-21386929
  hyper
catcccaggccccccgcgcggccccacccg

SEQ ID NO: 13347 - DNA, 30 bp, Homo sapiens
  chr22:21996694-21996724
  hyper
ccgggcggtggtgccgccaagaccggtgcg

SEQ ID NO: 13348 - DNA, 1131 bp, Homo sapiens
  chr22:22005793-22006924
  hyper
ttaatgaatgcttctccgcaaagtggatcacaatcacgaagaaaccaaagcttacacttccgttccccatatctcccacagatccaaaagaccacggggcccaggacccggtctccatagcccagccatacccgggggttttcaggaaagcctcactcgcgtcctgccgggcgatccggggtggttgagttgggaggggggctaccccagtttgtaagcccaccacgtccaaatatcccatccaggaggcgcagagagcaacctcagcatgcataacaaagcagcccgcggccgcgttcacagcaggcttggcgggggttcgggaatttccacagggtctcggcctcccccactgtgggctcgcgcctggcgcccctcaccgggcttccaagcgctcttgtcggtgtcgctagaaaactcgcagagattggagctgagaaaaggcgggcaaagttccttttgataagttatgaatggggaaaaagtgtttgtagaactcattgttaaaaccacggagcccgagactcggccggcgccgggccaatcggaacccggaggctattttgaaatctctcccgtctcagccaacaggcatgcaggaggcgaatccccgcgccagcgccggccaatgagcgcagcgctatgctaaggagtcgggggcccggcccctccgactgtcagcgggttaaagatggagccggcaggcgaggggccgccacgaggtgcagggtcgtctggacggggacccgggggcagacgatggccgggatcctcttccgtctaaccctccgcgtcctgaccgggccctgggcggaagggatgtctgcgtgagtcagctgtgtctgaggaggggatcctgggctgggctgggcggccctactcggcgggtcaggcggaggggcgcggccgggatcccgggggccctctttggagcagggaactctagaagggcggggagcccccatcctctgctccactctgggcctccaggcagaagaatatgttagaaaagaatccagagtgtatctagtgcagggcaaggggccagggatggagtcgtcagctagaaggggcgcgtcgtcccggggtggggccgccctttttctcctggagccgcgggccgagtcaggg

SEQ ID NO: 13349 - DNA, 224 bp, Homo sapiens
  chr22:22012118-22012342
  hyper
tcgacagcgaggtcccgcagagcaagacctgccagcagatctccgaggaggacttggagaggcaggcggacacctacactgggcgcgcgctgcgcctcctcttccgcagccccgtccgcaacccgtcgctggcggagagggtggtacaattggaacagcgcgggctctcttttttccggatgcggccgcggggcatgggaccggctgggcgggaactgtcacta

SEQ ID NO: 13350 - DNA, 31 bp, Homo sapiens
  chr22:22280174-22280205
  hyper
cagagatgcacccaaacgaggctcatcaaaa

SEQ ID NO: 13351 - DNA, 30 bp, Homo sapiens
  chr22:22292759-22292789
  hyper
ctaaggcaaggctgcgctcccagggaatgc

SEQ ID NO: 13352 - DNA, 405 bp, Homo sapiens
  chr22:22862457-22862862
  hyper
ctgcattaagagtcccgacagcgacgcagtaaatgagacaagacgctgcggtaggggagagagacccatacattcaaatgccttaaggggtctgggcctacaggtctccagaactggggagggcctggggttacaaagcagttttcagatttttaaatacattgagcgccaaaagagaccccgcgggggcgatgggggaggggagcgcactgggagccaggaaaggccccttctccaggaggcccgggcccagcccgggggtgggggcgtctgcgtgagggagtggaggctgatgtaaaagtggcgcccgctgagattagggaagggggtgtgcgtgaggggatcgtgggacctggttctgccctgcactcccccacagaaagcggctgtattgcaaaggccgct

SEQ ID NO: 13353 - DNA, 21 bp, Homo sapiens
  chr22:22863219-22863240
  hyper
ggggttaaattgagaaggagg

SEQ ID NO: 13354 - DNA, 31 bp, Homo sapiens
  chr22:23254251-23254282
  hyper
aaggccttgacaggctcggttaatccatagt

SEQ ID NO: 13355 - DNA, 30 bp, Homo sapiens
  chr22:23500537-23500567
  hyper
tgaatgaggtgccccacgtgttcagttcac

SEQ ID NO: 13356 - DNA, 202 bp, Homo sapiens
  chr22:23523141-23523343
  hyper
cgcgccatggtggacccggtgggcttcgcggaggcgtggaaggcgcagttcccggactcagagcccccgcgcatggagctgcgctcagtgggcgacatcgagcaggagctggagcgctgcaaggcctccattcggcgcctggagcaggaggtgaaccaggagcgcttccgcatgatctacctgcagacgttgctggccaagg

SEQ ID NO: 13357 - DNA, 31 bp, Homo sapiens
  chr22:23546141-23546172
  hyper
agaagctgggctgggacgggaggacaaacac

SEQ ID NO: 13358 - DNA, 31 bp, Homo sapiens
  chr22:24113336-24113367
  hyper
gaaacatttccccacccgcttccctttcttg

SEQ ID NO: 13359 - DNA, 465 bp, Homo sapiens
  chr22:24180528-24180993
  hyper
ggaaggatacggtcataaggacgcccccgaagagaaacatgaagacgaagtcggccgtgcggccgcggaaggagccctcttccagcatgcggcagtagcggaacctacggcgtcggtataggaagtgccaccaggcggggcctcagtttccccgtcccggcctctctcccagcccggccggcctgccctccacccagcccgtgtccgcagggcgcaggatacacgaagagcatgttgaagaagaagctgaatcccaggggcccgaagaagaggaagttggtgacgagcctccagacctacgggggacgggcggtcaggtgcggggtgggtgggtcgggcccacaggtgcgcggcgcggggcggcctcacctggaacttccggaacacaaggtgcgggttgaagtagagttgaaaggggctgaggagctccagctgctgtggaaccaggggccagtcaagagctgc

SEQ ID NO: 13360 - DNA, 484 bp, Homo sapiens
  chr22:24181054-24181538
  hyper
cgacgtccggtccgcccggccgcttaccaccgcggcggtggtgaggacacaggctgcggtgtaagcccgcgtcaccgccggcacctgcaggaactcggccgctagtccctgccacgccattgaaccttctcaagcacgcgtggcccagccagcaacgcgctctttaacccgcctcccagccccgccttcggccaatccgcatccgaggcgctgcgcgccccaggctgaaaagagagcccctgagcccgacagccaatggaaggaagaagagggaaattaggggcggaaagggagagtgggcgggtagaggctggtggccaatgggcaggcgccaaggttgagcacgtggcggttgttgtggctgcggtggtggcgcgggagaacgtgtggccaatgaggaactggtcatttcgcggctttctaggagaggaccagtagcgtggacccacgacaccacgggggcggggctaagatcgtatgggtt

SEQ ID NO: 13361 - DNA, 90 bp, Homo sapiens
  chr22:24236848-24236938
  hyper
gaacggagctggggggcggggcggggggaggacggtggctcgggcccgaagtggacgttcggggcccgacgaggtcgctggggcgggctg

SEQ ID NO: 13362 - DNA, 30 bp, Homo sapiens
  chr22:24407960-24407990
  hyper
ccagtcagggaaaccgaggccgggcttcct

SEQ ID NO: 13363 - DNA, 164 bp, Homo sapiens
  chr22:24551792-24551956
  hyper
gagagctgcacccactttgcccggcagcggtccacagcccgccaccagcggccagtccagggaaccggagaggattggccggcaaaagtcagttgcgctcctgggcccgcttccagtagagtgccggcgccccgtccggccgcgcctgccccgccccggcccgc

SEQ ID NO: 13364 - DNA, 508 bp, Homo sapiens
  chr22:24552423-24552931
  hyper
gccccgggctgggagctggctcgtgggggcgtgcgctgcgcgaaagcgaaagccgcccgccagagcaactttgcggcggaaggcgccgacgaggagctgtgccgtgccgctcttggggatggtgagctggccgcccggccgggtgggcagcgcgtccgggcgcggtgcttcgctagctataaataggtgctgtgcggggacaggaagatggttccagccctttacaagcaccggcccgttatgtgcgctgggctaggaccttgccccgcagcggagtgggaggagtgaggttaggggtaacggttgcatgggatggggggtgggcacatagagcctacagcagagttggcggcggggctctcccatgcacttggttgtttgtcgtttctgcttttcccgggagggggaagggaggaacagcccggcagttctggggaccttagcgctccacgtcttatttggcaggagaggctggaaacgagcgggcgccagctgcaggcaaattgca

SEQ ID NO: 13365 - DNA, 31 bp, Homo sapiens
  chr22:24563089-24563120
  hyper
agggcagggggccacccggaggagccgctct

SEQ ID NO: 13366 - DNA, 37 bp, Homo sapiens
  chr22:24643677-24643714
  hyper
ctgcctaagaaagggccggggtcgctgcaccctctgg

SEQ ID NO: 13367 - DNA, 92 bp, Homo sapiens
  chr22:24989195-24989287
  hyper
gaggaggccctgcttgcgtcagtcttggcgctagaacccgagggcctggagccgccaggggagacgcggagctcggccgagacgaggtggct

SEQ ID NO: 13368 - DNA, 1463 bp, Homo sapiens
  chr22:25348233-25349696
  hyper
ttgcccgcccccgggccggcaccagcagcccaggcaagtcagtgggcccacatttatggagcgcctcctgaaatcctgggttgcattaggctctcggggtcgccggctgggcagcgggtcggtgccggtggcgggggatcctggctggtgactggggaacatccagggaacgcgggagggtacccggagcaaagttcccaattggacagagcggggtcgggcctcgaggggcgggagcgcttccggcaggggtgtccaagcgagtcgtgacctctgacccgccggagaggtcccaggcccaggcgccactgcggactcgggtcctgcctgctctgctcccctccgcgcaggcgcggccggcggcagttcccatggtgacgggggcgcgtccccgctcgaggccccgcccccagcaggctaggctgcgcggggctgcgggctcccagggcaggtgccgcgggctgcgggcaggtggcggcgcggcgcgggctggcggtggctccacggtaggttgcgcagcggctgcgggcagtgggggccggctggccgcctcctgtccccggccgacgaggtagctgggggtgacggcggctggcgagggccgccaagtttctgcccggccgaggccccgggagaaaagttggcaaagttggccggggaagaggcggggagccggaggatttccccagactccgggtctgcagggagggaggatcccggtttgggagccggggaatccgtctcccgagacttgagagtggatcccgcgggaagatcccgcacagggcaaccaatggatcacgtgccacctggttggcgacttgggagtcgatccctggaggggatcgggcgctggaggcctggggtcccactggatccccagtcaggggtgacggcgaagggtgattcgagactgggagcgagaggatcaatctcctcccatgccagcctgagccttgggaatggattcagagagatcccgtggctaggagctgagggatcgctggagatctgggttactcagcctggagctgctagggtctggacatttgtgcgggttggaggccccggaggtggaagtgggaagcaagggcggcgagcgagacggaaccctggtcgaggggagcccggaggacagcgcggtggttcggggggcgtgagaggggcggcgcgcggggcccctcggacgcggaggctccggacacgtcctctcggcctggcctgcgccccccctccgctcgtcttcccagggcggaggcgccctgatgggattaagcctcagtccccctgttaccaggcaggcccgcgtggtccccgccccgatggcggcgcggcccacccgggctcacgggtggggccctcgggatgggaagcggctcgttgacccccacccgagcctgaccttttcacaccctgctggcacaaactcgcctgggagtggggacgccgcgccttaaaaccct

SEQ ID NO: 13369 - DNA, 114 bp, Homo sapiens
  chr22:25507703-25507817
  hyper
gagggtgcccaaaggccgccccctccacccccacccccatccccatcccccgcctttcgggaccgtcacgccctggagtgagtgcagccggcttgttcctcaaagctccttgtc

SEQ ID NO: 13370 - DNA, 30 bp, Homo sapiens
  chr22:25678424-25678454
  hyper
ggcgggcatgagaacgcatggagctggggg

SEQ ID NO: 13371 - DNA, 30 bp, Homo sapiens
  chr22:25800648-25800678
  hyper
cattcgggtcgccccggcacctggcatgtg

SEQ ID NO: 13372 - DNA, 662 bp, Homo sapiens
  chr22:25816891-25817553
  hyper
gggagagacttggttgggaggcgccaaccgagctggccgctgggactctgcacccaggtgcgccaacccttgggcgcacgctccccgcagaccctcgctgaaggagcggtgggcggcgcgccgcgaccctggcgggctacagattacaccgcttgcagggcgctgctggggcgcgcagagcggggctgccccagggtggctcccccaggttggggcgcggcgggcggcggccgcgggcgcgcgtcccatccgggtcccgagtaaccgccaccgccgctgccaaagctcgccaacatggtggacctggaggccgtggtggccgatgtcagttacctgatggccatggagaagagcaaggcgaccccggccgaccacgcctgcaagaggaccgtcctgcccgaacccacgtaccacctgccccggcccgcgccggtccccgacgccgccgccccctgcggccgccagcgaccccctgcgtccgggagaatcgggagctgagccgtcgctgtcccggagcgggtgacacagcggagcgggcgatgcggggccggcctcctggctccagtctctgaaatggggcatcggagggcgggtggggggcactccgggagagagcgctccaaagtgcctggcgccgcgccctgcgcgcagctagcacccca

SEQ ID NO: 13373 - DNA, 30 bp, Homo sapiens
  chr22:26564738-26564768
  hyper
gaggaagcctcgcagcgctagtgccctgcc

SEQ ID NO: 13374 - DNA, 126 bp, Homo sapiens
  chr22:26565234-26565360
  hyper
aaactttgcagggccgacgggccggcggccagaggaggcggctggcacccccggcgccgccgcggcccctccagctcactgcccgctcgcccgccccctccctccctgcactcgctcggcacagac

SEQ ID NO: 13375 - DNA, 105 bp, Homo sapiens
  chr22:26565502-26565607
  hyper
ggaagctgccccggcccgcggcctcctccctcgctcccgcttcccctttctcgctcaccgccgccctccttccccagctccctcgccgtccgcccgccccacagc

SEQ ID NO: 13376 - DNA, 30 bp, Homo sapiens
  chr22:26565936-26565966
  hyper
gcgcttccctgcttcggctgcgggctccct

SEQ ID NO: 13377 - DNA, 386 bp, Homo sapiens
  chr22:26756624-26757010
  hyper
caagaaaaagcctccccgaccagggggcgggaaagtgaggcttctcctgtgcgctttccccagcacagctgagaccacactgggctgtaatgacccggtaactgttctctgttccccattcgactgagttttgggagaacagaaaacgtgattctctaattcactgcttcatacccagctcctagcacagggatggaacattggaggaacagagtctacgggctgaaaaaaaaacaaaaaacaaaaacaaaaacaaaaaaaacacggagagtgtattctggactctgggagttcaaaagctataaagtgttgtgcaccgggctgcacttcccgaggagtaggagtattagatacactacggggatacccacgcggctttaaacagt

SEQ ID NO: 13378 - DNA, 145 bp, Homo sapiens
  chr22:26763713-26763858
  hyper
gggtgatctcccagggcgttacctggcgttctgcaaaccctaatactcttaacgcccccagtttgtgcacacggggaatcgtgagcgccacctggtggcagctattattacacattattgctttaagcctcgcccccacctccca

SEQ ID NO: 13379 - DNA, 31 bp, Homo sapiens
  chr22:26825081-26825112
  hyper
cggagcggcggcgggcgcggcctcgggtcgc

SEQ ID NO: 13380 - DNA, 30 bp, Homo sapiens
  chr22:26879458-26879488
  hyper
cgcagcccccggggcgcaggcagcgactgg

SEQ ID NO: 13381 - DNA, 140 bp, Homo sapiens
  chr22:26880365-26880505
  hyper
tcaatgaattagtaaacggaaaccattttctggcacgtggtaagcactgtgccagtgtttgctattaatattatgccgatgttgatattattggtggtggtgacacgagggaagcaacatgaacacgtgactgctatcat

SEQ ID NO: 13382 - DNA, 269 bp, Homo sapiens
  chr22:27053380-27053649
  hyper
gggccgggggtggggcgcctccgcccgccagccgctcccgcattaaaatttcatgggcgctgcagcagctacaaagacgacgccggctgcgctcgcgggaccagagggagggaggctgcggacgagtgcggggaggagtttgagatgggaggcgcttgcaggggctcccccagttctgcgctgtgagccggggcacaaagagccctctgcactagcgccgcaggaccgcggacccgaggtaagacgtcgccccatcctagaagccttcc

SEQ ID NO: 13383 - DNA, 445 bp, Homo sapiens
  chr22:27299013-27299458
  hyper
ccttagtccttcagcaagggccggcccttgctcctttcctgagcggctattttgagagcgatggaggggagagggtattagattcctgaccttgaggtcggggaggggagggtgatgctagtggtggacgaaagacttgaagataatgagaaattgcatcaactttacccaggctgtttctgggtctagaagcaagcaaaaataaggcgggagcgggtggggggaagaaaaagaggcatttattttggagccgtatcggaagcacaagtgtcatgggctgaaaggccgccttctcctgcgggctaagggtgtgggcgacagctcgcacattcaaataagggagcgattacacggcgcttgcttctgaagacggatttcctggtagggggagcgggcgggggggctgggccggtgtaaaggggacggcaacattaggctttggcaa

SEQ ID NO: 13384 - DNA, 112 bp, Homo sapiens
  chr22:27496915-27497027
  hyper
tgccttacagccggcgctcgaccctggaaaaaattgactgtctgtttctgcctgactgctcgagagttacaggctgcaggggcggggggaggaggcgcgagggcaggcgggc

SEQ ID NO: 13385 - DNA, 30 bp, Homo sapiens
  chr22:28196819-28196849
  hyper
cgcgggtgggtctgcggggaggggacgaag

SEQ ID NO: 13386 - DNA, 220 bp, Homo sapiens
  chr22:28198433-28198653
  hyper
ccactttatgggggagcacatcggttgagcccagtaaccggagcgacttgcgaggcggctgggaaccccgagaagacacgcacgaagagggcgcacccgccgggccgcacaccttgccctgggccacccggtccaagacccagaccctctgcgggtgcgaagttggcctccttaagagatcaattaaactgaagaggccgaggaatggaattgggctgtg

SEQ ID NO: 13387 - DNA, 565 bp, Homo sapiens
  chr22:28838081-28838646
  hyper
ttattttgatagaaccgctggatttttttttttcttgagttctcaacaaaggagccatattaggaaataatctcgcaaaaagcaaagtgccccctcccccttttccccatgatcgattcacacacgctggtgcacgctgacacgcacagacacacgcccgtgcacaatggccagcgcaggcaatcgcacgggcccacgaggcctcaggagccccgcaggctgaaggcccggctatggccagccccaggcgctcaggcaggaggcctctcggcccgccgccccggaaccagctgctgggctggtgtgctggggctgctcgccccccagcggggccctggggaaacggctgccagcggctcagagccttttaaccccttggggaaataggtgttataacaccacctgcggggcctgtgtcaggggtgcagcctcaaatccactcccgccccacgccccgccatggggcaacacctagtaggtcttggctggctcctgcaaagctaatcgtgtcgctgtctgcacaggacttctaaagcaaacgggtgcttccgagctgtcacccctg

SEQ ID NO: 13388 - DNA, 30 bp, Homo sapiens
  chr22:28838865-28838895
  hyper
acacttaccttcttccggggctgccatttc

SEQ ID NO: 13389 - DNA, 30 bp, Homo sapiens
  chr22:29091825-29091855
  hyper
ctctcccaaaatcttggagtgcccaaaatc

SEQ ID NO: 13390 - DNA, 131 bp, Homo sapiens
  chr22:29468802-29468933
  hyper
gagggccctgctgggccggcccaggtgaggcgagagatgggcggggcctgatgcgtgagtggcaggagcagcgcgcggccggggcggggcgtgcgtgcgcagtgggctccgccccccgggcctctccgcgg

SEQ ID NO: 13391 - DNA, 193 bp, Homo sapiens
  chr22:29469221-29469414
  hyper
gtgagcgaccccccgccgcccgccctgagcggagcccactcgaggggcgacaagggccggccggcctgagagccccctccctcccgcttcaggaccttccgggccccttcccctcgcccctaggcgacgcccctcaggccgggatggtcccttcctgggacccgggctacccccaggcccgtcatcgacgccc

SEQ ID NO: 13392 - DNA, 45 bp, Homo sapiens
  chr22:29469460-29469505
  hyper
cgacgcccctcagcccaggaggccctctccgccttgagtcttcca

SEQ ID NO: 13393 - DNA, 219 bp, Homo sapiens
  chr22:29702368-29702587
  hyper
ggggcttaaccctcccgcgtccggccggcctccgatgccccccgtcccctgttctgtgcggaactccggctttggccatctgcctacttctctgagcttcagtatcctcatctgtaaaaccggttcccctcatttcagggtcaaaaatgagcattcagtgagcacaaggagccctcagtcgccaggggcatcctccccctccccgcggcggtgccgttt

SEQ ID NO: 13394 - DNA, 311 bp, Homo sapiens
  chr22:29702940-29703251
  hyper
ggcccctttaagagcgcgcggccccgcccgccccctccgggcaggatccgaattccagggaggcggggcggagacggcggcgaggaggaggccgcggcgcgggacgcatagagctgcggctcgggcggcgcctccctgcggcggcccggcccggctccggcccccgctggggcaatgctccccggggccgcgggatgagccaggtgagcgcggagacccccagcactccctgcctggtgcgcatggacgggggtggggaggcggggcgggaagcggcgtcctcggcctctgttccccggggctgtgtgacc

SEQ ID NO: 13395 - DNA, 30 bp, Homo sapiens
  chr22:29885579-29885609
  hyper
aaggccaagtccccagagaaggaagaggcc

SEQ ID NO: 13396 - DNA, 30 bp, Homo sapiens
  chr22:30643027-30643057
  hyper
ctgaagatgggcatcgccaggagggggccc

SEQ ID NO: 13397 - DNA, 62 bp, Homo sapiens
  chr22:30792969-30793031
  hyper
cttggctgccagctccgcggcccgggcaaaaggctgggactttactccgggtggcggcgagg

SEQ ID NO: 13398 - DNA, 30 bp, Homo sapiens
  chr22:30820242-30820272
  hyper
gtctaataattccacgccagcattgccggt

SEQ ID NO: 13399 - DNA, 31 bp, Homo sapiens
  chr22:31002802-31002833
  hyper
ctgcagctgcagctcccgttccactccttgt

SEQ ID NO: 13400 - DNA, 30 bp, Homo sapiens
  chr22:31003132-31003162
  hyper
cacagaccttcccccgccccacccctctgc

SEQ ID NO: 13401 - DNA, 31 bp, Homo sapiens
  chr22:31090545-31090576
  hyper
atcattgttcctccagcgcctggcacggctg

SEQ ID NO: 13402 - DNA, 431 bp, Homo sapiens
  chr22:31198698-31199129
  hyper
tcctccggggaccgatcggtggcctcgcgcggctctcatcgctctccgagcagtgctccagggggcggagggagcctcctcgggcggtggggaggaggctggaggaatgaggacgcagcacggcgcgcccttgcagcgctcaggctgacgggcgggcgggcggagcgggcgcacggctcctctaggtccggctgctctctgagctcgcgggctggacgctgtccgcggtgctgaagcggcgcccgcggcagggaggcggacccggagccgccgggcagcacacacccaatcccgggaccgccctcctcccaggctcggagaggcggtggcagccggcactgcacccagatggactgagagcgcggcggcgggaaggcggcggcggcggcggcagcagcagcagctgcaagagccctcgcagcctcggggca

SEQ ID NO: 13403 - DNA, 30 bp, Homo sapiens
  chr22:31477097-31477127
  hyper
gccaccgaggcagacgaccccaagactccc

SEQ ID NO: 13404 - DNA, 606 bp, Homo sapiens
  chr22:31480780-31481386
  hyper
cgggatcggtgcctctcgaagtctttccgaccccgggagcggctcctccagcacccggcgcccgccattactgcgccccgcgcgccggcccggcccccgctggcctcgtggcaagaacgggggcgtcccgagccgggctcctccccgcggggccgggccatataaggaaaagctaggcccgctccgcccgccctgcgccccagcgtctggccgatttggggacgcgggcagtcgcttccggccccggctcccgcacattcttgaggattgggccggggatgggaggaatggggacgcctggggacttgcacgccgcgtgcccctccaccacccgccgggacgccctctgcctcggtcccgagttcgagttcgacctccgccactcagctgggtgtcctggggaccttggtttcttccctttagatccggacactgaagcaggcggtagcgggtgtcttcctacctggctaccccttcggcgcctagcgcgaggcagggtgggcgaggcgagggcggcgccctgcgagggagggcggtcgcagaacctgcgggccttcagcgccccctggcgaggcttccctccaccgccggcgggacccccatggg

SEQ ID NO: 13405 - DNA, 30 bp, Homo sapiens
  chr22:31556210-31556240
  hyper
acagattgacgcggcgttagtattggccgt

SEQ ID NO: 13406 - DNA, 30 bp, Homo sapiens
  chr22:32145987-32146017
  hyper
tcctccgcggcccgcgcttgcccagccagc

SEQ ID NO: 13407 - DNA, 30 bp, Homo sapiens
  chr22:32149785-32149815
  hyper
tcgagggcaggaaacgccaggaggtggccc

SEQ ID NO: 13408 - DNA, 30 bp, Homo sapiens
  chr22:32340182-32340212
  hyper
actgcatgtgcagccgccatcaccgcgccc

SEQ ID NO: 13409 - DNA, 419 bp, Homo sapiens
  chr22:32571880-32572299
  hyper
aggaaacgcgggaggcgaaggcgaggctgctcagcggcggctcgggatgcctccagcaacggggactagccctgcgcgcccggggagggggaggcgctggcgctgtgacggccgcggggagggccaccttcccagcacacgcacacatacgcccccggccctcagccgctccggctgccgctgcccgccgacagctgacctccaggcaccgcagcgcccgggaacagccatctgggaaccgcgaccgcgcactgacacacgcagtggccgccgccgccgccgctccgccaagcgctgcctgtagcacctgcacggtggtttggaggggaaggtctgggcaggcgaacgttccacgagggcgtcccagaggcatctgcagcctccgctctcctgttctgctctggcgcccaccagcccct

SEQ ID NO: 13410 - DNA, 23 bp, Homo sapiens
  chr22:32687449-32687472
  hyper
cactgcgccggggtcaactgttc

SEQ ID NO: 13411 - DNA, 31 bp, Homo sapiens
  chr22:33149562-33149593
  hyper
ccctatttctggcttccgaggtttccaccac

SEQ ID NO: 13412 - DNA, 203 bp, Homo sapiens
  chr22:33453871-33454074
  hyper
cctaaggcaggtcctaggagccggcgcagagcagaggtccggccgctgcggttcctggtttcccgcaagctcttccccgggccgggcgctgggtggaggcagtcttaggatccacagtcttgcgcgcccccggctcccgggcccggcagacggcccccgcacgccgatctgtctgtcccagggaccggcccagggccccggca

SEQ ID NO: 13413 - DNA, 65 bp, Homo sapiens
  chr22:33454193-33454258
  hyper
cgcaccagcagcccccgctcgaggtggggtctcccggctgtcagaaaccccacaaagtctacttt

SEQ ID NO: 13414 - DNA, 16 bp, Homo sapiens
  chr22:33454345-33454361
  hyper
gggtcccgggagctca

SEQ ID NO: 13415 - DNA, 68 bp, Homo sapiens
  chr22:34316493-34316561
  hyper
cggggggggctgcaaccggccgcggcgcgctctcccccagggcctgcgccgcccgcccgcggctccgc

SEQ ID NO: 13416 - DNA, 17 bp, Homo sapiens
  chr22:35697198-35697215
  hyper
gacgcagggagagccca

SEQ ID NO: 13417 - DNA, 31 bp, Homo sapiens
  chr22:35746850-35746881
  hyper
tcctgagcacggtctacggcccctgctcagg

SEQ ID NO: 13418 - DNA, 153 bp, Homo sapiens
  chr22:35768081-35768234
  hyper
tcccggtgtctgttttcgctgagtcacggtctagagatttgttttcctcagagttccagctgctccaggtttaatcccctggggcaaagtccggactgtccggctggagtctggagtcgggacatgcctcagccagcacgtcctcggcctcgt

SEQ ID NO: 13419 - DNA, 91 bp, Homo sapiens
  chr22:35777143-35777234
  hyper
cgaacgagcccagcaccggccggatggagcgtccgcaacccgacaggcaagcgcggggcgcgggacgcgggacgggcgcctttctctccca

SEQ ID NO: 13420 - DNA, 30 bp, Homo sapiens
  chr22:35796174-35796204
  hyper
tggtttgtgaagtgcggaaaaccagaggtg

SEQ ID NO: 13421 - DNA, 40 bp, Homo sapiens
  chr22:36424354-36424394
  hyper
gctccgtctcctcccgctccgggcaccggcagctccagct

SEQ ID NO: 13422 - DNA, 40 bp, Homo sapiens
  chr22:36424418-36424458
  hyper
cggcggcgccgggcccgagctgaggcggctgatgcggctg

SEQ ID NO: 13423 - DNA, 52 bp, Homo sapiens
  chr22:36425194-36425246
  hyper
gtcctggaggcacagcgcggctggagtgcggggcagcgcggggggggcgggg

SEQ ID NO: 13424 - DNA, 31 bp, Homo sapiens
  chr22:36462114-36462145
  hyper
ggcgccccctggaggccgcccctgctggcgc

SEQ ID NO: 13425 - DNA, 876 bp, Homo sapiens
  chr22:36901806-36902682
  hyper
gactccgtcttaaaaaaaaaaaaaagcgaaataccctttttcgtccattcctcccatacctactggccaatcaaggtgtgtggttcgtgtggggaaggtcccagcttccgcaggtgagctctggcaccggccttacctgcactgatgcacctggcccttctggtcagttaggatgaagtagtggccattccaggcctgtcggtccttgtccagagtgacgtgggcgatggtggtgttgtactggacacggagccccagcgtgtccgcgaagtcacccaggtagcgcaccatgtcgcgggcgtcggggaagtaggcacgcgagtagtgtctgaagagcagccgggggtcgtggctgagcagagagttccagtcgtggcggaggttgaactcggcgttagccttgcccgtgtaccgcttgttgatgctgatgagcttgcggtgccgcgggtagcgtgtgaagaagctgccgggccgcggggcccgctcgaacactgcgtagtcgcgtccagcgcgctgcaggaagtaggccatctgcaggcccgcgggcccagcgcccagcacgcagtagtcccggcgcgggggcaccgacagcgctgggtgcagggcgatggccaggagcagccccgggggaccccacaacggggccgcagcggagaggcccatcctgcagcagatcagaggggtaaggcctcgcacccggcccggcggctgggagacacgaggcccagaaagaggcggggcctgcgggaactctcactgcaatctgggtcacggccaggcccagaagccgtcctcagagctcatttgcccggactccaccgtttcaagctgggacttggggctccccggaatcccgagcccctccatcttatctcc

SEQ ID NO: 13426 - DNA, 30 bp, Homo sapiens
  chr22:37099534-37099564
  hyper
ggcgcccgcggaggcgctcccacctactgc

SEQ ID NO: 13427 - DNA, 31 bp, Homo sapiens
  chr22:37172187-37172218
  hyper
accctcgattggttgccgccaaaagctccca

SEQ ID NO: 13428 - DNA, 51 bp, Homo sapiens
  chr22:37172608-37172659
  hyper
acttgctctgacttcgcgcggttctcgcggcttccccggttcccgggttct

SEQ ID NO: 13429 - DNA, 86 bp, Homo sapiens
  chr22:37252547-37252633
  hyper
aacctcctctaggtggcgctgcggagcggggactcggctgctgatcgcggcgccccctggcggtctgttcccgtcaacatttagat

SEQ ID NO: 13430 - DNA, 323 bp, Homo sapiens
  chr22:37414959-37415282
  hyper
attccctctggaaagccggccccgcccctcccagccggcccgggggcccagcgcagaagcgggtggggcaagagtttccgaggactccaagtaggggcgcttcctggggcggggatctggctcctagaagttacagtactcgatcccgccaggaaagagcaatgaaagcatgcccgggatggggggcgatggcatcttgggcttagaatcccctttccttccaaggcagagggggtgggcgcacggctaggaagctccgcgagccgcgcacacgccatcgcctgcggcctccccaggcagcccgagctcgcccgcctccagag

SEQ ID NO: 13431 - DNA, 41 bp, Homo sapiens
  chr22:37595693-37595734
  hyper
acgctccagccgtccccgcagccctgcgacaggcttttgag

SEQ ID NO: 13432 - DNA, 142 bp, Homo sapiens
  chr22:37640387-37640529
  hyper
gctggtgggaggggcgctcaggtgctgggctgagccctggccatccccacaggccccctgcgtggaggctccagcaggagacctgggggccctctgtgctgggaggctcacttcctgtccacggggcgggcccagaggctgt

SEQ ID NO: 13433 - DNA, 31 bp, Homo sapiens
  chr22:37713069-37713100
  hyper
gggggctcccaccacacgtggataagaggtt

SEQ ID NO: 13434 - DNA, 192 bp, Homo sapiens
  chr22:37915114-37915306
  hyper
gattcgctcccacagcgcgtcctcctccgcctcagaccccgagccggccccggcctcctcctcggcctcccccgcctccgcccggcccggcatggccgtgtcctcagggtctgcgggcaagaggcgcacgggggtcgaccagggctccctagggctagatgtgcggccaagcacccccggggcgtcgtccgc

SEQ ID NO: 13435 - DNA, 421 bp, Homo sapiens
  chr22:37956781-37957202
  hyper
ccgagctttcgggcttcgtgtcccgttccaggctggtggagggggcagaggatcggacacggctgagcggccaaaatgcgcgaggagggggcgagccgaggggcagagcgggggctgtctccgcgccttcctgcgcgggggaaggaagggccggggcgggcagcgggcgacgcggcggaatgtctcccctccgccgaggcccacgcggagagcgggaagtggggggtggggggcccggggagatggacaggcaccctgcccccctccccgaccgccgcattccaggctggagccgcggatgaggtcatcccgtccggttcccctccggccaagacagccggtcgtccccttcccccgcggagcgaccctccgcgtcctgagccccgtccccccagggaatgttggatggccgaagtctttc

SEQ ID NO: 13436 - DNA, 339 bp, Homo sapiens
  chr22:37957264-37957603
  hyper
cgcaacattcgaagcccttttcctagaccgggaaactgaggcttagagagtaggggggactggccgggaggccgcagcggcactaaacgtggcgcggggacccgagacgcggcccgcagccgctccgtctcgctcggtcccgggctggttcggctctaactcggggcggtgggcacgaagcgcgtctcctttccactttccccgtcgctccctaatggcccacggtgccccccttggaatacggaggaccgggtcccctagcgcgactgcgaacaactagctaccccgttctggcctcagtttccccgtctctccaccttgaagcgtctggactttgag

SEQ ID NO: 13437 - DNA, 30 bp, Homo sapiens
  chr22:37963392-37963422
  hyper
ccactcacaggaaccgcaagccacaggcct

SEQ ID NO: 13438 - DNA, 35 bp, Homo sapiens
  chr22:38072874-38072909
  hyper
cttggtcagaggatgccgggcgggaacaaccccac

SEQ ID NO: 13439 - DNA, 744 bp, Homo sapiens
  chr22:38220617-38221361
  hyper
tcccccacggttcacaggaggcgcactgggccgcagggcccgggcgcgggacgtggcgcgggcccctgcgggagggcacctgcccgccccgctgaccaggcgccctccgcaggtacctggccgtgcggcacccgctgcgctcgcgcgccctgcgcacgccgcgtaacgcccgcgccgcagtggggctggtgtggctgctggcggcgctcttctcggcgccctacctcagctactacggcaccgtgcgctacggcgcgctggagctctgcgtgcccgcctgggaggacgcgcgccgccgcgccctggacgtggccaccttcgctgccggctacctgctgcccgtggctgtggtgagcctggcctacgggcgcacgctgcgcttcctgtgggccgccgtgggtcccgcgggcgcggcggcggccgaggcgcggcggagggcgacgggccgcgcggggcgcgccatgctggcggtggccgcgctctacgcgctctgctggggtccgcaccacgcgctcatcctgtgcttctggtacggccgcttcgccttcagcccggccacctacgcctgccgcctggcctcacactgcctggcctacgccaactcctgcctcaacccgctcgtctacgcgctcgcctcgcgccacttccgcgcgcgcttccgccgcctgtggccgtgcggccgccgacgccgccaccgtgcccgccgcgccttgcgtcgcgtccgccccgcgtcctcgggcccac

SEQ ID NO: 13440 - DNA, 30 bp, Homo sapiens
  chr22:38302075-38302105
  hyper
ctccgcactggaggcggagctgctgctggg

SEQ ID NO: 13441 - DNA, 30 bp, Homo sapiens
  chr22:38349051-38349081
  hyper
acctctgagcagctcgcaggtccccggggt

SEQ ID NO: 13442 - DNA, 68 bp, Homo sapiens
  chr22:38477063-38477131
  hyper
cagggccaggctgaacagatacgggacgtgcggccgcagacgcgccaggcccgccagggcgccgcacg

SEQ ID NO: 13443 - DNA, 510 bp, Homo sapiens
  chr22:38477296-38477806
  hyper
cggtgcacactgccaagtccagcaggcgccggcggggccggaccctgggggatgcctcgcgcagctgcagccccgcaccgtcagcctccgcctcgcccggagcgtccccggcgcggtcgccggcgctgtccctgcgcggtcgcgggcccggcccgggcggcggcctcatgacagccccgcaggcgcagcagtgcagcaggagcccgccgagcagcaggaagccgccgcgccagccgaagcgctccagcagctgctggccgagcggcgacagcgcggacaggaacacggggctgcccgccgccgccagcccgttggccagaggccgccgccgctcgaagtacagccccagcatgatgagcgacggctggaagttgagggccaggcccaggcctgcgggcgaggcggtgctgtgccggggtccccggagagcccctccctggcccccacaggagggaggggccaggcccgggaacccagcagatccgggaacccagccgagggacttcgaag

SEQ ID NO: 13444 - DNA, 130 bp, Homo sapiens
  chr22:38578022-38578152
  hyper
tcctcggcggcgaggcgcggccatgtttgtgcggggcagaaggtgcccggcttcttggcagtcctgttgatgagggccaggagtcctaccctagtccgccttccgcctcctaaagcgaccagagcctgga

SEQ ID NO: 13445 - DNA, 30 bp, Homo sapiens
  chr22:38713593-38713623
  hyper
cgcgcgggcttacgcgtgggggtgggggag

SEQ ID NO: 13446 - DNA, 30 bp, Homo sapiens
  chr22:38793918-38793948
  hyper
ccggccattgtttacgggggaagcctgtcc

SEQ ID NO: 13447 - DNA, 79 bp, Homo sapiens
  chr22:38863832-38863911
  hyper
aggcctccagtttctgcggagggaaggcagagggcacttggggcatgggcgacatgggtcgtggcgggcacccggcgca

SEQ ID NO: 13448 - DNA, 30 bp, Homo sapiens
  chr22:39052744-39052774
  hyper
ggacgcgtcaggtacgtctccgagtccggc

SEQ ID NO: 13449 - DNA, 30 bp, Homo sapiens
  chr22:39052973-39053003
  hyper
tgattgcatgagatcgtgcgtgtgaacgtt

SEQ ID NO: 13450 - DNA, 30 bp, Homo sapiens
  chr22:39239320-39239350
  hyper
gtcggccatggtgtcgcggcggggcccggc

SEQ ID NO: 13451 - DNA, 30 bp, Homo sapiens
  chr22:39267525-39267555
  hyper
gcccatacagctcacgctccctctccctgc

SEQ ID NO: 13452 - DNA, 32 bp, Homo sapiens
  chr22:39268734-39268766
  hyper
aatttctttaaaacatcgccccccacccatta

SEQ ID NO: 13453 - DNA, 31 bp, Homo sapiens
  chr22:39638609-39638640
  hyper
ggccctcgaggagccccgagaacaaaaggag

SEQ ID NO: 13454 - DNA, 30 bp, Homo sapiens
  chr22:39639503-39639533
  hyper
gacagagcctaagccgaggctggcgccgaa

SEQ ID NO: 13455 - DNA, 30 bp, Homo sapiens
  chr22:39715771-39715801
  hyper
cgttcagaagttgacgtcagcttcggagac

SEQ ID NO: 13456 - DNA, 30 bp, Homo sapiens
  chr22:39796155-39796185
  hyper
cgacaccgagcagacgtgcaatgataataa

SEQ ID NO: 13457 - DNA, 30 bp, Homo sapiens
  chr22:39898831-39898861
  hyper
gaggtccttagggccgagggatctcttaaa

SEQ ID NO: 13458 - DNA, 30 bp, Homo sapiens
  chr22:39930974-39931004
  hyper
ggacagctttctcacgcggcgagactccaa

SEQ ID NO: 13459 - DNA, 30 bp, Homo sapiens
  chr22:39953542-39953572
  hyper
ggacggcttttcctcgcacgcagcgcggct

SEQ ID NO: 13460 - DNA, 31 bp, Homo sapiens
  chr22:40280490-40280521
  hyper
tctttttaacaaaattcgtaagctggtacta

SEQ ID NO: 13461 - DNA, 30 bp, Homo sapiens
  chr22:40742687-40742717
  hyper
gtggctgtggctggcggaggccgagcaggt

SEQ ID NO: 13462 - DNA, 30 bp, Homo sapiens
  chr22:41418871-41418901
  hyper
ttacctatcagcgccgcacttaacagttgt

SEQ ID NO: 13463 - DNA, 156 bp, Homo sapiens
  chr22:41593088-41593244
  hyper
ctcctccgacttctcccgcaccgcggccgcaatccagcccggacactctgagggctctctctgagctgggcacggtcctcgctgctcggccgagtgcagccccctcacctcagtgcgactgagacaaagcaagggtcccaccggcccctgtcccct

SEQ ID NO: 13464 - DNA, 232 bp, Homo sapiens
  chr22:41682702-41682934
  hyper
gggaaatagtaactatcgtagagaagctccgcagacaccacttgaacggccacgttaacatcaacagcaggacaagctgacattcatcgcacgctttctgtgtgatgcactgagaaaaacacggcgtcaccgtccggtctataatgcatgaccttagtctaatcatgagaaacccaagctgagggacatggtacagaataactgatctgtacccttccggaaatgtctgtat

SEQ ID NO: 13465 - DNA, 30 bp, Homo sapiens
  chr22:41697400-41697430
  hyper
gggcttccccgactcgcccccacgcccccc

SEQ ID NO: 13466 - DNA, 30 bp, Homo sapiens
  chr22:41697686-41697716
  hyper
actaataataataacgtaatcatacctcta

SEQ ID NO: 13467 - DNA, 194 bp, Homo sapiens
  chr22:41763238-41763432
  hyper
tgtcagaggattggcgcgacagctccacgtgctgcagctggcgcagggccaggcccgccctgccaagcagcgggaagggaaggcctggctgcagccggagctggcaggtggccgagccgggggtggacgggcgggctgggactggtgctggccattggctgcctcaaggctcccaccccgcctgcctccctagc

SEQ ID NO: 13468 - DNA, 198 bp, Homo sapiens
  chr22:41864790-41864988
  hyper
gtcttgctctcgcgcgagtttttgtcgctgctgggcggccaggtcctggcaggtgcatgaaactcttaaaaactctcccagatttggatggcggagataactaaaatttgttcttgggtaaaacatctttgtgcttggtatctatttctgcaagtgtctttgggcagtccgatttcctcttgcgtgtctgttcgttgc

SEQ ID NO: 13469 - DNA, 73 bp, Homo sapiens
  chr22:42017064-42017137
  hyper
cacggaagagggggcgggggcagggatgcacttttgcgcatgtgcttacagtcctgacgtaggaaggggcggg

SEQ ID NO: 13470 - DNA, 31 bp, Homo sapiens
  chr22:42062755-42062786
  hyper
ctcagatttgggtatccgcatggagtgccct

SEQ ID NO: 13471 - DNA, 81 bp, Homo sapiens
  chr22:42228657-42228738
  hyper
ggtccaggtttgactccgctggctttctcaggcgggcagggcgggggtaggcagctgggaagatgacgtaatgtgctccca

SEQ ID NO: 13472 - DNA, 397 bp, Homo sapiens
  chr22:42310612-42311009
  hyper
agccggaggccgggaggacggcggccgccgagcagtccccgcgccccggcccgcgccatcgggcccgcgcctcccgctactgcgcccggtgcatggccgggcgccgcggctccctccggctcggctcctccgctcccgcagggatcgcgctggctcccggcgcacgccgcctcggccgtcggcctcctctggggaccccagccccgagtgggctgggtctggagctccgaggccgcacctccggtgggcgcgtcctccgcccgggctcacctcggacccgagctgcccggtccgcgtcctgagatcttccccgggccgggcggcgggtcctcgcctgcgcgcggcccccggcttctccccggcccggcaggtgtgcgggtcttggccctagcggagg

SEQ ID NO: 13473 - DNA, 148 bp, Homo sapiens
  chr22:42311315-42311463
  hyper
gggcccgcgactagagcgtccctgtcttacaggtgcggggacctgtaccttacaggcgcggaggtcaaagcagcccggaattgccccgggacgggcagggccaccctctcacctccttcccgtcccctctgtccgttctgatcataac

SEQ ID NO: 13474 - DNA, 31 bp, Homo sapiens
  chr22:42322868-42322899
  hyper
tgccctgccccgcccccgcctgctgggtggg

SEQ ID NO: 13475 - DNA, 386 bp, Homo sapiens
  chr22:42353638-42354024
  hyper
cacctctgctggccctcaccacgctgtgtctccgcagccaaggccgccgcgatgccgcacttcctggactggttcgtgccggtctacttggtcatctcggtcctcattctggtgggcttcggcgcctgcatctactacttcgagccgggcctgcaggaggcgcacaagtggcgcatgcagcgccccctggtggaccgcgacctccgcaagacgctaatggtgcgcgacaacctggccttcggcggcccggaggtctgagccgacttgcaaaggggataggcgggcggcaccgggcgccctcccccagcccgccccgcccgcccagcccggagacccccaaggcagagggaggccggcctgttggccctccacgctatccctctgca

SEQ ID NO: 13476 - DNA, 344 bp, Homo sapiens
  chr22:42470232-42470576
  hyper
agcctcccgggcggggtctcccggctcccgcggccacgttgcagcccaggcggaggcgcgggatctcgagctgggatcgccctcttgggcttcggtgcgatcggcggcgggaggtgagagtgggcccggcgggctccgggaggaggtggccccagggaaggtgtggccgcggggaagtggcggcgaacagccccgacgcgaggacggggaaaccaaggcggcagccagggagaccctgaccgaggtgacctctgtttagggcgacaaccgggttggggctccccgcagtggccactggcccggcggtcccgcacccccagcccgcctctcctccaacaaaagaa

SEQ ID NO: 13477 - DNA, 401 bp, Homo sapiens
  chr22:42669779-42670180
  hyper
tcctctggctcaaagacggcttttggaaacactgtatcactccttttattacaaactcctctgccctcctccaggcgcctgggccactccaggattacaaatggagccttctgcctctaggtcactgattctactaccatctgtcagcgtggattgattgaggagactggccctgctcggcagatcagtgacttgtgcgaagtgagccagggtgtcggtgccttcagagcaggcggatgtccttcctcacttgccagctctcgtgagcagacacacagccctcacctttatccttcaccaagctccagctctccttcctcttgggaggcgccgcctgctaactcagtcacaccaagagggaggcctggaattcctgctcacaagctcggggcttcatctgc

SEQ ID NO: 13478 - DNA, 27 bp, Homo sapiens
  chr22:42679916-42679943
  hyper
cgaggcgggggaggaggggaaagggaa

SEQ ID NO: 13479 - DNA, 30 bp, Homo sapiens
  chr22:43116062-43116092
  hyper
gggaccaggtgccccggcagatcctctccc

SEQ ID NO: 13480 - DNA, 36 bp, Homo sapiens
  chr22:43116705-43116741
  hyper
cctgcccctgccttcccgaggcgcctcctccccact

SEQ ID NO: 13481 - DNA, 31 bp, Homo sapiens
  chr22:43177262-43177293
  hyper
agtaaacctttatctccgtaagctgctgaga

SEQ ID NO: 13482 - DNA, 31 bp, Homo sapiens
  chr22:43547343-43547374
  hyper
ggggaggaggaggagccgagagacttgctcg

SEQ ID NO: 13483 - DNA, 25 bp, Homo sapiens
  chr22:43659490-43659515
  hyper
aagctcaggcaggagtgaagccggc

SEQ ID NO: 13484 - DNA, 491 bp, Homo sapiens
  chr22:43659642-43660133
  hyper
ggtatgcagcaacacagaatagatttaagaacacaaacaccctgctagttgtaataaagacaaaaacgtctaaagttaaaaatcaaacaaacaaatggaaatgaggaagcctgcattttgcccggcactgtaactcctggtttcacctgattttgcgactcatatttcctcaccttgattttctcactaatcaatcaaattgttggaatgacgcagagtctaactaagcaacgagttagcacggaaagcgctttcatgctgctgccctgcacagaagctgcaagttcacacggaaagaccctttccgctggctcgattccaaaacagcatcagcgcctgagtcacacagatagtggcgtgcggtcaacgcttaacagccggcaggggtggaggctgatttgcagtatttaccaatttacgtgggataaatacgccagccacggctaatttcaaggtaccagggagatgtcgccaagggtagagctgggaac

SEQ ID NO: 13485 - DNA, 30 bp, Homo sapiens
  chr22:44263900-44263930
  hyper
gtccgcggtgctgaacgcacagcttcccct

SEQ ID NO: 13486 - DNA, 566 bp, Homo sapiens
  chr22:44287469-44288035
  hyper
gggcgcagagcacagcgccaggcaccagcgtctctgggctcgatccgctttcattaagctgtccccgccccttttcgcccccgcggtccgggactcaccgaccgacttgccgcagacgatgctgactgcgttgagcgccccagacgaggaaccgtagatgcggcgggcgccctggaggaggcgcggggctcgctggcgcaggcattcggtggcgcccacgtggtgggcgcccaggtagccggcgccggagaaggacaggttccatctgccctcctcctctaagaagcccatggcgggtggaccgggcggggtgatcgggacgaggaagggtcactccgtgacccgggatagggccgggatgcagccttggacggggctgggcccaaatgtgggctctggagggagccgggctggggctggtgctggtgctccctgcgccgcccccgggctgcgtcacctgcgccccagccaatgaagtccccgggtcgcgatcagcccccactccagttgtgcgccaggtgtgccccagaagtgcccgcgcgctgtgtatacgctggcgccgcccc

SEQ ID NO: 13487 - DNA, 30 bp, Homo sapiens
  chr22:44320158-44320188
  hyper
gcccgggaagggggcgttggaaccccgagc

SEQ ID NO: 13488 - DNA, 30 bp, Homo sapiens
  chr22:44351355-44351385
  hyper
ttgacctgcagctccgccaccgcggacccg

SEQ ID NO: 13489 - DNA, 30 bp, Homo sapiens
  chr22:44420651-44420681
  hyper
catagccagccgcgcggggtgaccgttcat

SEQ ID NO: 13490 - DNA, 34 bp, Homo sapiens
  chr22:44893740-44893774
  hyper
gcaggagggtgaggggcggcgtggagggcccgcg

SEQ ID NO: 13491 - DNA, 205 bp, Homo sapiens
  chr22:44894099-44894304
  hyper
agggaccgggccaggccggggccggggcaggggcggggccggggtcgcggcagagggcgggtcaccgcgcggcctttgtgcgggcggggccggcgcggtggcggtggcgggcgggccttaggctggccccgctggttgccatggataccgaccgctcccgcgcgtgcggagacgaccgctgccccgcccccggaagtgatgcaca

SEQ ID NO: 13492 - DNA, 949 bp, Homo sapiens
  chr22:45097904-45098853
  hyper
cagagggcagacccagcgaggcgtcgtggcagctgcggccgcggagacgccggctccgcctcttgcacacgccccctcgcctgaggccccgccccgcccgcgatgcccccgcccccttccccgccccgccccccggggcgccgagacccgcccctgggcccgcccccgggtccgcccccggcctccgtttgcgccgggtctgtgctggccgcgcgcctggcgctccacgctgagcctctccgtgcaatgattaacccggcggggcggccggcgcgggacccgagacggaggcgcggggccggggcgggaccccgcaggaccgctcggcttcctgctctcgccggagtttccgcgtagagggcgcatcgccggcccggggcccttggtgcggcgtggcgcagggcgcggcgtggggcgcgcgtgggcgcggcgcaggcggcccgggtcaccatgaggactctccgcaggttgaagttcatgagttcgcccagcctcagtgacctgggcaagagagagccggccgccgccgcggacgagcggggcacgcagcagcgccgggcctgcgccaacgccacctggaacaggtaaggccgcgccctcccggccacccggaggccctggagccgggggaggggacccctgagccgtccgcgggctaggggccgccccgagccaggaacgctgccgaaggcggcgcggcgcttcacagtttgcaaagaacttgccccgccggagtggtgcgggcctggaggaaagttcagtgcagcgtggttccagaacccagggaagggagcgaggcccgccagcgcccggggctggcccagaagcgcccggcgggtgggcggcggggtgggccgggaagccgcgtgcccgcctcctacccggggtctttccacgtctccactgcggtgctcgtgacaacctgggaggctaacggagcaggaagtat

SEQ ID NO: 13493 - DNA, 300 bp, Homo sapiens
  chr22:45148270-45148570
  hyper
gaggggctcctgagcgcgtgtgctccgcccgaccccgccctgtccccccgacacacaggtggacccagggtcagctcgtgcacctgggaaatggctcccgccgggtagcaggggcggaggggcggggctgggcggaggggcgggggggcggggcctgcccgggagccacgtccggggaggggccaggtgagcggcagacccggcacgcaggtgggggccggcggggtccgtggccaggtaaggcgggcggcggcgggagggagcgcgcagggaggaggccgtgctcggggtgggggggtg

SEQ ID NO: 13494 - DNA, 30 bp, Homo sapiens
  chr22:45148873-45148903
  hyper
tccttttttgcttccgtcctggggtctcag

SEQ ID NO: 13495 - DNA, 30 bp, Homo sapiens
  chr22:45403032-45403062
  hyper
ccttcggtccagcccggcggcccagaccag

SEQ ID NO: 13496 - DNA, 30 bp, Homo sapiens
  chr22:45403685-45403715
  hyper
ccgggctctggcggcggcatctgttcgtgg

SEQ ID NO: 13497 - DNA, 1005 bp, Homo sapiens
  chr22:45404005-45405010
  hyper
aaacgaggtttgccacggaacccagaaatcgcttccaacgagtttggtgtccaggcccccacggccgcccccctccgcccccatggccgcctcagcgcaaagcgggggactccgagccgggagaaatcgccacgttccaaaaacatgtccaccacctcaaaatggacgccgggccgcgcgctgccttttaagtgagctcctctcttcggcccccgcagggcccggctctccctgccgcctccgagaacccggctctttctttccaggaaaggggaggggtggggaactttgagaactggagacagacccctctgggagtctgagcgtgcgtcgcccaggctggcactttttagggcgccgccaaagtgcccagccaccctcccgccccatcccagggggggccgcgatcccatcgcttacttgtttgtcgctgagcgcggcgatccgcggctgcctttcgtggagctgcttcttgaggtcgccgttctgcggaaacacggaggagcgggctcaggcaggccacccggggtcaggtgcaccccagcaccgcgggccgcggcaccccccgcccggagccccacgggcggggccggccgcagcgcaccccaagtttcccgggccgcgtcctgcacgcgcggcggccgggcagtgccgcgcggggccgcttacctgtggctgccgcctcatcggggcagctcgcggggcggggcgggggccgaggccacccggcggcgcgccccgagccgtgcaagtttgcaggccggggtgcgtgtgcgagtgagtgtgagtgtgagtgtgtgccgggggaggggggaggaacaaagagccaagtaaacacggcgagtccgtgtcgagcaaagctcataaatattcaagtcgcgtcctaatctccccaacacacacacgcgcacgccgagccccgctcaggctccggccgccacgccgccgctcgccagcagcgatcgccaaaactacttctgcacaccgggcaggttcgcccggggc

SEQ ID NO: 13498 - DNA, 121 bp, Homo sapiens
  chr22:45405046-45405167
  hyper
cgcactcccctccccgggaccggctcacgaaggggccccctccaggcaccctcccagtcatgcagaccctacatcgcttaagagaagactccaggctcgggtcccacgcgtcctcgatccc

SEQ ID NO: 13499 - DNA, 38 bp, Homo sapiens
  chr22:45405381-45405419
  hyper
ggcgcgcgagttccacggcgagcgcctcgggccggctc

SEQ ID NO: 13500 - DNA, 30 bp, Homo sapiens
  chr22:45898951-45898981
  hyper
cgtcccgggtccgccgccccagcttagggt

SEQ ID NO: 13501 - DNA, 639 bp, Homo sapiens
  chr22:46262412-46263051
  hyper
gtgctggggaggtggagacagcgcgctcccgagccctggaccactccctctgccccgcgcggggccgagctccacggcacgtgctttggcttggaccgggaaggcccgcagtcccacagtgcccggggaggacggtccgcgccttccacgacttcgcgccgcccgcgtggctgcagcgccgtggcccggggacgcgaggccacagcccgggagcgaggagcgcgggaggaccggcctgcctgtgcccggcaaagggggcccttccgaggcgggctcccttccccgccgctcccgtaagcgcgggagccagaggaccccagacccgccgcggcccaccccaagccccgatcaagtcctgcagcgcgggagggacccctgcaggcgcggggccagacgggcgacaaagcggcggactgcgagggccctgaggaagccggcggcgcggggtcaggagcaacctgctattcgtagggtcaggagcccacgcgtccccactgcggagggcggggtcgcagccaggcctccccgtttctagctgtgcggcctggggcgaggtgcttgacctctcggggcctcagtttccttctctatgaagcggagctgatcggccgcgtcccggggctgctgtgacagtccaag

SEQ ID NO: 13502 - DNA, 112 bp, Homo sapiens
  chr22:46263511-46263623
  hyper
cgcgtccggccaagcgccgcctccggcctctgcccgcggcccggcgcgccctcctccccagcgcgcccctatcctgcacgcatccgcggccccgggccctttccgcagcccc

SEQ ID NO: 13503 - DNA, 2 bp, Homo sapiens
  chr22:46263743-46263745
  hyper
cg

SEQ ID NO: 13504 - DNA, 20 bp, Homo sapiens
  chr22:46302162-46302182
  hyper
ttgctggctgttaacacgag

SEQ ID NO: 13505 - DNA, 51 bp, Homo sapiens
  chr22:46302264-46302315
  hyper
cagggtggcccaagccctgttttactgaggaagaaacggaggcccctgggg

SEQ ID NO: 13506 - DNA, 176 bp, Homo sapiens
  chr22:46363414-46363590
  hyper
cctagacacccacaaccgagccctctacctcatccaacaccgctatgccacacccagggtctgttagggtcctccgagaacagagccttggtccacacccaagcaggggccctgggctccccataggcacccacctgccctgccagggtgactcaagcctccggggatgtggtggg

SEQ ID NO: 13507 - DNA, 559 bp, Homo sapiens
  chr22:46366728-46367287
  hyper
gtccccacccgcatgcgccctgctgccccgcccccctcaggcgatgcctccgcagccggggctgcccgccgggcctggagcgctctctgtgcccggaccttgtaattatgtcccacagcccgggaaaccgcgggcctcgcagcatctggctgcggttgcgaacttttgtttcaagatgcgcgactatttatagaaggaaaactggtaggatagtaatttcctaggagcaagaggagaaattggctgcgtctttattaaatgggggtgggggcgaggcgatgtattaggactgcaaccgcatggggggagggggtggcgcagggagcgggaaggcagcggctgccccctctggccgcgtcaggcgaccccggacgtggcccgcgtgtaaaggagggggagggggaagggaagagaaggggagggagagcaggctctgaggtttaatcagtagcatccagcttaaattcccccaaacggcggttccataaatgaaacttctttttaagtcagaggccagagcatatgcgtcccattaggaattcggcgaagccaccactgc

SEQ ID NO: 13508 - DNA, 31 bp, Homo sapiens
  chr22:46466169-46466200
  hyper
gggcgggaaaagacgccgcggcctccttggc

SEQ ID NO: 13509 - DNA, 43 bp, Homo sapiens
  chr22:46512496-46512539
  hyper
cagcagcccccacctccgaggccagccccgcctgcaccccccc

SEQ ID NO: 13510 - DNA, 30 bp, Homo sapiens
  chr22:46545332-46545362
  hyper
tgggtcctcctgggcgcccgctgccacaaa

SEQ ID NO: 13511 - DNA, 61 bp, Homo sapiens
  chr22:46634891-46634952
  hyper
taaagcatcttcctaacgggtgtgtttgctatacgaacataatggacgtgaagtggggcag

SEQ ID NO: 13512 - DNA, 30 bp, Homo sapiens
  chr22:46645888-46645918
  hyper
atgctggtggtccccgcgagcctccgcctg

SEQ ID NO: 13513 - DNA, 31 bp, Homo sapiens
  chr22:46774456-46774487
  hyper
gagggcacagtggccacgggaggatgcccac

SEQ ID NO: 13514 - DNA, 30 bp, Homo sapiens
  chr22:46933218-46933248
  hyper
ctgtggggaccacgcgcccggcctcccccg

SEQ ID NO: 13515 - DNA, 126 bp, Homo sapiens
  chr22:46933977-46934103
  hyper
ccattttacagcaagacgcacggaggctaaaatgcttcaccccgactaaaactccctggactttgaagcccaataggcagctaccggatctgcgtcccacttggtttaaagcgcaacttttaaatg

SEQ ID NO: 13516 - DNA, 30 bp, Homo sapiens
  chr22:48137393-48137423
  hyper
acatgaccatcaacctgcccagcccaacat

SEQ ID NO: 13517 - DNA, 308 bp, Homo sapiens
  chr22:48885529-48885837
  hyper
ggccccggccccggcacggccctctgggccccggaccccctcctccggccccggcaggcgccccgcgggcctcccggagtcggcgcggagttacgagcgccgggcgcatggtcccccgagtcccggccggtccaacgctgcgctgggcgggcgagagggtccacccgggttccgggcgctcgagcacttcggggtcggacgccccggcccgagcctcccttccctgactccccggcagggcccgggctccaggccccgggtggcgcggcccgtccctgcccggcggtcggagcccagccagcggcttc

SEQ ID NO: 13518 - DNA, 114 bp, Homo sapiens
  chr22:48885907-48886021
  hyper
ggagcgccctccccgtgcctcagcccgggacaaggggggaggcggcggccgagcccggagaggagctcttcaggcaggagcccagcctgggctcggaggagcagctggagcttc

SEQ ID NO: 13519 - DNA, 25 bp, Homo sapiens
  chr22:48886204-48886229
  hyper
gggcgtgagctgagggctggggtag

SEQ ID NO: 13520 - DNA, 31 bp, Homo sapiens
  chr22:50170509-50170540
  hyper
acagcccagagcccctcggtgtgtgatgaac

SEQ ID NO: 13521 - DNA, 394 bp, Homo sapiens
  chr22:50170577-50170971
  hyper
agggcaccatgctccctgagccggagtccagtccccagcagtcgagccctaagacgctaaccaggaggtgtggagagccatggaggcaggtccgggcgactcaccggctgcgatcctggccgccttggcgtagttcccattctcgatgcaggagatcagctcactgcggtcctccagcgtgtgccgtcgcacaagagccggtttgccccgcccacatttgggcgcattaaagcttcgggaggaagagcagagggagtcaggcgccccgcccctgccttcagcctcactcgggcttcgtcccgtgagctgtccgccaccaagctggccacgcatcctgcctgacacccccgcggccagacgggcctgtgggtgcgcaggtctggagggagtgaac

SEQ ID NO: 13522 - DNA, 30 bp, Homo sapiens
  chr22:50242068-50242098
  hyper
ttcagccccctccccggtcccccaggaagg

SEQ ID NO: 13523 - DNA, 30 bp, Homo sapiens
  chr22:50242477-50242507
  hyper
cgagcccgcagcgacgcacccggagtgtaa

SEQ ID NO: 13524 - DNA, 99 bp, Homo sapiens
  chr22:50246600-50246699
  hyper
gtgaaggggcacagccgcggggcaggggcgggctccgggcagaggcggccgtgataactccacgctcccgctccagccggtgaccgccacgcgggctcc

SEQ ID NO: 13525 - DNA, 30 bp, Homo sapiens
  chr22:50356064-50356094
  hyper
aggtagcctcacagcgcatctgtttgttgt

SEQ ID NO: 13526 - DNA, 30 bp, Homo sapiens
  chr22:50700548-50700578
  hyper
cccggggtcaacttcgcaggccacccccaa

SEQ ID NO: 13527 - DNA, 85 bp, Homo sapiens
  chr22:50745644-50745729
  hyper
cgagaccatctccgctcggcgcacggagctcggcggctgaagagtgagaggcaggcgcggaggagggatccgacgcggctccgga

SEQ ID NO: 13528 - DNA, 31 bp, Homo sapiens
  chr22:50765138-50765169
  hyper
cagggagagtgcggggcggccgagggcccca

SEQ ID NO: 13529 - DNA, 30 bp, Homo sapiens
  chr22:50874139-50874169
  hyper
gaggtcaggcctgccggctgccatcacaaa

SEQ ID NO: 13530 - DNA, 30 bp, Homo sapiens
  chr22:50913816-50913846
  hyper
cagcgggagaaaggcgggagaagcctaggc

SEQ ID NO: 13531 - DNA, 114 bp, Homo sapiens
  chr22:50965027-50965141
  hyper
aagtctggcgggcctgcgccgtccatgcagagcagcgcctcctccacctccagggcgtggcccacgcagcgacccaggggcttgtccatggcggtcagcgctgccgcgacccga

SEQ ID NO: 13532 - DNA, 640 bp, Homo sapiens
  chr22:50970391-50971031
  hyper
ttctaccggtgttgggcggcagcttgtatttgggcccggggcctccgtagtgcgccgcgatggggccgcggggccggtgtggccgccaaaggcccacccaggcgtccgagcccatagcgcgggtggggggcgcttacggctcgcagcacctgcggacagaaggcggtggccgcggcccctgcaccgcaaattcttggggagcgcactttcccactaccctgggatcagcgcggggcggggcggggcctggaccgtatccctggcgccagcaaaacaaacgcgagcttccttcccggctgtgtggagcttggggccgggagcggatccagggccatcacccggactccaggcgcattaggcagggacgtgaactcgcgggggccaagtctagacccagacttggtgaagggaatcacctgggggtggggtgggggcaggagattttcgtgctgttgggaaagggtgccccgggaagggcctgcgtgggggacccggtgccccgaggtgcactgacctgttgtggtagctcctagcgtgggaaaacaaagcgacgtggctggacatccccgctccgccccgcccacctcccagaccccattgtggccctttcccgcttcctggcaaccgcactgactgcctg

SEQ ID NO: 13533 - DNA, 30 bp, Homo sapiens
  chr22:51021476-51021506
  hyper
gggctgctgttggacggcctgggccaatcc

SEQ ID NO: 13534 - DNA, 31 bp, Homo sapiens
  chr22:51066541-51066572
  hyper
caggaggagccggtaccgggctgcgggcgct

SEQ ID NO: 13535 - DNA, 83 bp, Homo sapiens
  chr22:51112150-51112233
  hyper
cgttggatccggaccggccaggggtccttggggggaagtccggagcaaactccccaaactaggctggcgtgggggagccgcgc

SEQ ID NO: 13536 - DNA, 30 bp, Homo sapiens
  chrX:2647654-2647684
  hyper
cacatctgaagacacacaaacttgggaaag

SEQ ID NO: 13537 - DNA, 482 bp, Homo sapiens
  chrX:2815891-2816373
  hyper
gaactgtaactagcgcgtcataaatcccagcccttatcttgaacaagagtcaaagaccggacttgaaggcatcccccaagataaaggtaggccctctgcagggcagctgtaagtcagctctcctccacccctctggctggccccctccttatccgagtcctgcttccttcctctttaaatctgcagacaatgctgcttctctgcaggtctctgcatattccctcagctcacagaccggctgcatacttggtattttcagggttaggtttgcaacacatgactggggaaatgcatgaaaaggaaatgatgcaagaattcaccgcggacacctttaggtgagaaggagatgtgacaaaaagtctctgcctggccaaaccgtagccaggctcctgaagcccctcccaggcccggtggtgcgtttccttatagaattagatttcagcaaagtaccggctaagtcagtttggcgagaagccaccatt

SEQ ID NO: 13538 - DNA, 42 bp, Homo sapiens
  chrX:2846776-2846818
  hyper
ggatggagccttggggcgggacggggcgcgtcttagtggggc

SEQ ID NO: 13539 - DNA, 1216 bp, Homo sapiens
  chrX:6144503-6145719
  hyper
ccctgctcccgcccccgccgctccgggaagaaagggcgctgtgtctggcggcgagcaggcgccggaatcgtgcgctcgggcccagggttgcacggagcactgggcccggataccgggggcgcaaagcttcgggtgcggcccaggagaaccccgccgagggaccccagcctaccggttctcggaggggcgaaagagccaggtcaggttgagggacaggaggaggaaggggtgtccaggagactgactgaaggatgagagtgtcctccggggtagcgaccggcctcttggaaaaccagaggcggagggagcagccgcggagtggagggcgcaggccgggacctgggcctctcctcccacagcaagccccccacccacgcatcatctgcagccgagcggcacctacctccctctccctacctcatccccgctcgcgcttccgcaggtcaggccacgcgggtgccagcgcgggctgtgggcgccccagccgcggccttggggaggggtcaggactgaagttcactctctctctgcgtggtctcgaagcccctcgcccaccccgcactgtctcctccgccgccggctgcgcgcttggcggatcttctccatcagttctgcccactggagtgggaaggggctgagccgagccgcgcgggaattgggaggcggggaagcggggaggcgggggaagagacgagatgaaatcggcccgggacagcagagaggcttgggatgggatggaagggaagagggggtggcggttgcgttttccagggctgtagaggtggtgcgcctattggaaccgactcctcagcctcctcccccgtccccacctcggggactggcggaccgtgcgccccgcaggcttaacactccccccgacaccctcgctccgagaaggggtgttctcagtgggcaccgactagggctccagatcccccgagacccagaccagggctccggtagtctgtcctcgcagcttccaacttttccgctccttcggaaaagcgggcagttcagagatggttcccagggcggcagctgcaagcccccccgcgcccccctcaaaggttcagactacactcaaaggctccgaaagaagcaaaaccaccagctctaccctccttctgcggcttgcctcacccttcccacccgcctcgaaacccacacacacgggaaaggggtgcatggagcccgctccccggtttacagaagcagc

SEQ ID NO: 13540 - DNA, 91 bp, Homo sapiens
  chrX:6145835-6145926
  hyper
cgtcatcttatccgaggcccggagatgaaggagggaaaaaaaatcgcttaaatgcgaccccaaccaagccggttttccctttttctttctg

SEQ ID NO: 13541 - DNA, 191 bp, Homo sapiens
  chrX:7065650-7065841
  hyper
tcctccaggctactttgcagacggggaagctgaggctgggcaccgctcaaggtcgcacgcatgcgtaaccgaaaagagagcgcggaggtcccgccgcgcctcgctctgaggagaggacgcggagccgcgcgcccgcccggtggaccccagggactgctcccacgtgctccggccccacgcgcgggccgccg

SEQ ID NO: 13542 - DNA, 30 bp, Homo sapiens
  chrX:7066061-7066091
  hyper
cttactggaggcggcggctgcacactaccc

SEQ ID NO: 13543 - DNA, 206 bp, Homo sapiens
  chrX:7066302-7066508
  hyper
gcgtcctgggctgcctagtggcgctccgcgcacgcgcaccttgggctttcgccgcagctgtagctgcagacccgggatgcggcgcgggccggcgctgtatgtttacccgcatcaattcctcctcacttcacacccggaatcgggccaagctactcagccagcggccgcgcagagccgaggccctcgtctggggacaaattcagtgc

SEQ ID NO: 13544 - DNA, 30 bp, Homo sapiens
  chrX:7895516-7895546
  hyper
cgcccgctaggccccgcctgctctatttaa

SEQ ID NO: 13545 - DNA, 190 bp, Homo sapiens
  chrX:8698867-8699057
  hyper
cagagctcgcacgctcgacagggctggtacaggcagcagctgcactcgctcgcgctgagtccggaacctgctctcgtgcgcccacccgcacccggagcctcgcgcaagtcccgcgggggtccgcgccacagggcagagtcccggcaacccgctggagccaagcgcgcggctcccggagcctcccacacaa

SEQ ID NO: 13546 - DNA, 651 bp, Homo sapiens
  chrX:8699110-8699761
  hyper
cggggtttgggggacggttcccccgggactcgttgaggagtatccgaatacggccccgccaaatcccctgtccccggcacttcttccctgacgctctacgctagtccagggcaagaccttgaatctttggggttccgaattgaggcgcgcacagccactcgcacccccaacacgcgcatacacgcaccctggaacacgacttggcacaagtaccctggctggggctccaagggtgggcagcgagctctgagccctcagagagtgaaaaccatctttcaaaagagacaaagtgtcggcccgcgggcacctgcggggctggggctcgaggtgaggtccccaggcgcagccggacgcgcctcccagactccctcccagtgccccggagcgcctgggactttgcgggagtcgccgcccgcccggagtctcgcgcactccaattcccgggaaaccgccacatccacacacccactcccagcatccacgactctccctccccagggaaatcgcctttggtttcctgctgggaaggagggagttggggcaagatgtctcgggcttctttttcttttcaggagccgggaagaggctggaaaggagagttccagcaccccgactgtaagatccacgcccaggggaagccaggatcagccg

SEQ ID NO: 13547 - DNA, 704 bp, Homo sapiens
  chrX:8699940-8700644
  hyper
cgctggacgctcccggcagacagcgactcgtccagccgccgcgcagcagccgcgccggggccggccgccaggcagccgctggaggccgccagccagaggcagagggtcaggaccgcgccgggcaccccgggcaccatggctgcgggtcgagggcgagggcgagggcgccgggcgcgggccgaggctccctgctccgcgccggggctgcactgctgaggaccaggcagacgccgcgactgagccggaaagttcaatccttcaactccggccggaccctcctcgccgacctccctcccagctcgccctcgaggggtggggtgagggggacaggaggccgcaccattggctggaaggcgtgtgagtgacaggggggccgggcgcagggcccatgggccggtctcgtcagctgcgagcccgggcgctccgggggagggcgacgccgagcggctttccacgccgcgcaggtctcgaggggcccagctcccacgcaggcgcctctcccgttcgcaccaaccgcttcctgcccctcccaccttccccctccgtccaggtaaacgtcggtgtgagcaggtccaggcctgccaggaggggtgctcccttcagcaggagggaagaggcctcaggacccccaggggcgtcccacctgcctggggattgaccccgcgcccctaagtggcttgctttctccccgacctcccctgggt

SEQ ID NO: 13548 - DNA, 31 bp, Homo sapiens
  chrX:9240652-9240683
  hyper
ttttttgttgctgttgcgtttttcgcaaatc

SEQ ID NO: 13549 - DNA, 791 bp, Homo sapiens
  chrX:9433630-9434421
  hyper
ggtcgccaactgtccccgcggcgctcggactggggtgcggcgcgctcccaggagcctgaacaataccccgaggtggccgctccccgaagtgccggcgcgccttgcggggagagacggaggtcggcggggggctcctttgttttggggagggggaagtggccggtaagtttagggaagcgctcggcttttcctccggtgcccctttgtctgccgattcaggggcttgctgggcaaacctgcgccaccgcgggctccggggaccggggtggagggcggtggcgggatttccccgctgttggggagaagagccccattcatacccgggacgcgggccggccctcccggacccgggtggaagcgcagcctcgcggagtggggcaagcggcgggcgaggtggcgcgggccccgtgtctgctcagtttctgacgcgcagaaactgtcaaggaagtcgggagccccagtcctccgcccatctccccggcctgagcgcacggctgggctgggggcacccttggcccgtcgagggtctgcagagcgccgcccggggagagcgcagacctgttgctgctcctgggctctgacggggcgggtggggtgggtctcgcagatcctgggccccggccttgctatccagggggaccttccctaacgatgggaccggtgctcggagtggagtatggggagtgcgccttcgggagtcggcgctggccggatatgtgacaactgtgggtcgctggaggcccgcctgcgctgggatagggcctggacttcacgtgcgtcgcctgtgttcc

SEQ ID NO: 13550 - DNA, 45 bp, Homo sapiens
  chrX:10023768-10023813
  hyper
ccccaccttccaaaagcgctgtcaaacctccgctgtctccctacc

SEQ ID NO: 13551 - DNA, 30 bp, Homo sapiens
  chrX:11948897-11948927
  hyper
aatctttaagattgatctgatatggtctgc

SEQ ID NO: 13552 - DNA, 165 bp, Homo sapiens
  chrX:13707276-13707441
  hyper
gctggagcgggagcctggctgcgctaccgcggctgcctcctgctgtgcaggtccccgaccctctctctgtcctcattgcgcccagacgggccggcccagagctcccgggtcgtctttcgtgtggccgcgaggtgagcgggactcgggactccttcgggaccgggc

SEQ ID NO: 13553 - DNA, 1000 bp, Homo sapiens
  chrX:13752356-13753356
  hyper
ctcccaaaacaaagaatcttccggctccaaaaggcaacagtgcagccgttaagaaaccctgggttagctgaatgacccagtgaaccgcgaaaccacagcccccgagagggcggacgtctgcaggtggaagggctgcgcggatgagccagcggagggctggcaggtccggcccggccaccccggggaggggtggaggtacaggaccaacatccgcgtcacgcaggggctacgaagtcctccagggactcaaaacacccgccccccgccgcacttgctccattccctacctgcagtgggaggccgacaacggaaacgcaatgtcagtttccgcggaagagacccgcgccccgaacctgtagccagaacgccgaagcagttctcgcgataccctgggatgtgctctcgcgatacgtaggcggagcttccggccggtgctgggcaaccaagctcatgcgccgtagctcttcagctcgggaaggctatatttagcaggtttccggaagttgccggactggctgtgaggcggtcctgcctcgctgccttcagtccctagtgtctgggtccccgccctccagccgcctttgagtcgtgcctgggtcctcgcccttgcctcagaaccgcgaagaaaggaagctcgcgtgtttgctagaaaacctagttgggagtgcgaggcagagaacgttcagcacctttgttcctcccgaaccctcgggacagaggcagggttctgagggcagggattccccctcgtcttggccccaccgcccgggctgggcactaaactcgggccgcggcggggcgagcgaggcgggctccggagggagctgacgcctgatgatggcgcaggtagacacacctgccccttctcgggcggaaataaagtcttgttttgtgttcgttaaactttcgccgctaggcctcttatggcttccccggaggccactggtctgttttcagacgttcacgttccctctgccccgcaggtaacctataaccattt

SEQ ID NO: 13554 - DNA, 881 bp, Homo sapiens
  chrX:13956175-13957056
  hyper
aggagaacagaagcacggcggggcggggcggggcaggactggactgggagctcgggcgacagggagagcgtcccgggaaacaggcaagaagcgactctctactggccccttaaaataaagcactagcccgggacgcgccgtctgttctctctgcaacccctcccgggtacccagctcttaggctcccgcgagccgcacgtgcgggggtgcagcctggccgcagccggagcggggaccaccccccccacaggatacaacagggaagcgcacctgggcgttccggacacctgcgccgcgcccctcccacctccagcgtcccggcttcgtcgcagaggtggccgaggaggcgccacctgagcgggggaggggcgggaccctcggaagggcgcgccctcccggggcgggggcgcgagaccgtggccgtggcgcgcagccagcgcgctcgcttacccatggctggagactggcgggaggggtgagggctgcggggcgttcgggctccccggggacgggcagagccggtggcacaagtttgcaggtctcgcgggcacgtgcgctgaccgggcttctgcgggctgcgctgcgctgcgcggggctggccgctggctcctagctcccggccggggtgggagcgcggcgcggctccgcctgcactgggggccggccgcgcggagaggggccctgacgtcagcgccgggggctttgtgcgcccggagctagggcccgattgggggcagcgggcgcgcggagtctgcaggcaaagctcgcggcttcctctgggacccccccgggcgagcgccgagggtcgcgggaaccggaaaagccagcgagggggatgggtagagaggggagtgggcttctaggatcgcggaggcggcgat

SEQ ID NO: 13555 - DNA, 431 bp, Homo sapiens
  chrX:15756256-15756687
  hyper
gactggcacagtttggttgggcgtgaccggggcaataagtacggacgtagtggggcgtggatctgccaggtgggggcgtggcctccattgaggggcgtggccctggtatgtggggcgtaacagggcacgagggggcgtagcttcgatggccggacgtgcaggctgcggatccccgtaggcgagcgagcggctaggttcgtgatctggagagacgctcaggtaaggacgggtggccgagaggagtggggggcgaccagggacaggccgatccagacagggccgtgattcttcccacgactctccgctctggcgcaccgggttccggagctaggagagctgttgatcctgcgagtattgtctgggtcccggcagggcgcccgggagtactgagtggggcctaatggggtgtcgaactcccccaccccagccct

SEQ ID NO: 13556 - DNA, 87 bp, Homo sapiens
  chrX:15808572-15808659
  hyper
ccgccctttcctgccagacctggaggggcggggcggtgccggcaagatggctgcgcccgagaagatgacgtttcccgagaaaccaag

SEQ ID NO: 13557 - DNA, 100 bp, Homo sapiens
  chrX:15809045-15809145
  hyper
taatcttccagccacaaaaagtacagggccgccctgaagaaggagaaacgaaagaaacgtcggcaggaacttgctcgactgagagactcaggtgatggac

SEQ ID NO: 13558 - DNA, 83 bp, Homo sapiens
  chrX:15817993-15818076
  hyper
ggactctcacagaaggaggaagaggaggacacttttattgaagaacaacaactagaagaagagaagctattggaaagagagag

SEQ ID NO: 13559 - DNA, 123 bp, Homo sapiens
  chrX:15821796-15821919
  hyper
cattatactgataggcaaagattacatgaggagtggttgctaagagagcagaaggcacaagaagaattcagaataaagaaggaaaaggaagaggcggctaaaaaacggcaagaagaacaagag

SEQ ID NO: 13560 - DNA, 88 bp, Homo sapiens
  chrX:15822232-15822320
  hyper
gagaaagttaaaggaacaatgggaagaacagcagaggaaagagagagaagaggaggagcagaaacgacaggagaagaaagaaaaagag

SEQ ID NO: 13561 - DNA, 40 bp, Homo sapiens
  chrX:15826354-15826394
  hyper
ggaagctttgcagaagatgctggatcaggctgaaaatgag

SEQ ID NO: 13562 - DNA, 123 bp, Homo sapiens
  chrX:15827321-15827444
  hyper
gttggaaaatggtaccacatggcaaaacccagaaccacccgtggatttcagagtaatggagaaggatcgagctaattgtcccttctacagtaaaacaggagcttgcagatttggagataggta

SEQ ID NO: 13563 - DNA, 215 bp, Homo sapiens
  chrX:15833798-15834013
  hyper
gatgttcacgtaaacataatttcccaacatccagtcctacccttcttattaagagcatgtttacgacgtttggaatggagcagtgcaggagggatgactatgaccctgacgcaagcctggagtacagcgaggaagaaacctaccaacagttcctagacttctatgaggatgtgttgcccgagttcaagaacgtggggaaagtgattcagttcaag

SEQ ID NO: 13564 - DNA, 57 bp, Homo sapiens
  chrX:15836708-15836765
  hyper
ggtcagctgcaatttggaacctcacctgaggggcaatgtatatgttcagtaccagtc

SEQ ID NO: 13565 - DNA, 111 bp, Homo sapiens
  chrX:15838328-15838439
  hyper
gggaagaagaatgccaagcagccctttctctgtttaacggacgatggtatgcaggacgacagctgcagtgtgaattctgccccgtgacccggtggaaaatggcgatttgtg

SEQ ID NO: 13566 - DNA, 536 bp, Homo sapiens
  chrX:15840847-15841383
  hyper
ttgcaggtttatttgaaatacaacaatgtccaagaggaaagcactgcaactttcttcatgtgttcagaaatcccaacaatgaattctgggaagctaatagagacatctacttgtctccagatcggactggctcctcctttgggaagaactccgaaaggagggagaggatgggccaccacgacgactactacagcaggctgcggggaaggagaaaccctagtccagaccactcctacaaaagaaatggggaatccgagaggaaaagtagtcgtcacagggggaagaaatctcacaaacgcacatcaaagagtcgggagaggcacaattcacgaagcagaggaagaaatagggaccgcagcagggaccgcagccggggccggggcagccggagccggagccggagccggagccgcaggagccgccgcagccggagccaaagttcctctaggtcccgaagtcgtggcaggaggaggtcgggtaatagagacagaactgttcagagtcccaaatccaaataaactagttttgttcttaaa

SEQ ID NO: 13567 - DNA, 30 bp, Homo sapiens
  chrX:15872201-15872231
  hyper
gtcctaacatgggacgaaacccggttgcaa

SEQ ID NO: 13568 - DNA, 201 bp, Homo sapiens
  chrX:16730329-16730530
  hyper
cggacaaaggagcccggccccacaagtgcaccggggctgggggtgcagggcggagaggccctggggacgagggatggcccgggcgccgaggccctgggggtctgggacaggcccagaagggaagttacctgcgcggtggtggtagcaccggggagggtggccggtgggcacggcgggctccaccccgcggctggcctggcg

SEQ ID NO: 13569 - DNA, 99 bp, Homo sapiens
  chrX:16730853-16730952
  hyper
gcacttcgagtgcgcgggtgaactccacgcttcccggggaaccccggcttcctggcaagccgagaccctcgctcgggtcctcccgtgcagatctcaccc

SEQ ID NO: 13570 - DNA, 303 bp, Homo sapiens
  chrX:16888149-16888452
  hyper
gggcctcttactctctttactcgccatcttgcgtcgggtcgttcgcccctcgccgccgcctcggactcctctcgttagccaagagcagcccgaccgctggcgctcctgcctttcccaagcgcgtcacactccccactgtcgaaagcccgggccccgtcttgctgcctgggtgctccccagacgccgcgtccttctttcctgcctcctccccgctcgcgggtaccgaggtctgaggcgctcttctctctctctccaaacttggaacgagacttttcaacccgcgcctcccagcccgcccaggca

SEQ ID NO: 13571 - DNA, 46 bp, Homo sapiens
  chrX:16965289-16965335
  hyper
tgtggggcagtgtgtgcgggggcggaggttgcgagtggggcgacag

SEQ ID NO: 13572 - DNA, 71 bp, Homo sapiens
  chrX:27999797-27999868
  hyper
tttatttgaaaggtcacgaagtgaatgcaaagaactctgatagtcttgccaccagacggcaacattttggc

SEQ ID NO: 13573 - DNA, 30 bp, Homo sapiens
  chrX:36854169-36854199
  hyper
tgcaaaagaaaaaaataggcctcagaacac

SEQ ID NO: 13574 - DNA, 31 bp, Homo sapiens
  chrX:37765683-37765714
  hyper
ctcccccattttcctccggtgtaattcttag

SEQ ID NO: 13575 - DNA, 345 bp, Homo sapiens
  chrX:39680218-39680563
  hyper
ggcgtataaattaaccgggggccgcagagtgaatacattgcacgcggtatttattatgcggccggacctccgaggggttctccggctcccggacgtggcaaatcttgtccggagcgccgctggccgcgctgccaagggctaggacgagaggacccgtggcggggggcggggggcttctcctccagtcctcgggagccccggggcagcccgcttacagcggcggcagcggggagggtttaggcgaggagagacgcggccccgggcgccgctcgggctaggggccgggcggggagggcggggcggtgggagcgggcggcgcgcccggccccttagcattccgccggc

SEQ ID NO: 13576 - DNA, 177 bp, Homo sapiens
  chrX:39680630-39680807
  hyper
cgcttttgtgctcgccgggcggtgggtgcggggaggcagttctaatagttgtcattagggccgggggaggcggggcgccgggggctgagggtgggagcgcgggggtgggggaggcccgccattccctcgctggctcgcttgttcgctggcggtcccaggcggcgcgcaggccgctgc

SEQ ID NO: 13577 - DNA, 30 bp, Homo sapiens
  chrX:39729507-39729537
  hyper
gcactggaagggatgagggccactgttcct

SEQ ID NO: 13578 - DNA, 1156 bp, Homo sapiens
  chrX:39910497-39911653
  hyper
cttcaattttctcctttcctcaacagttttattgccttttaagaaaatttttgtaaaatataaatacaaaggcagagaatttacttacaaagttaaaacacagatttcaaacataaacacacgattcagaaaattttagttttatgtacatttccaagcaacctcaacatattatgttagttttcaatattttacagggtacagaaaaaaatagctcaaagtcttctttaaataagagcataaaatgtttaaacatataaacaatccggtttgatgcgtgaaaactaatttcacagcttttaaattaggatataaaagtttcatacaattagttgttgtgtgtggatatggtttgaatttatattacacactactggattacatccaatagcatttacctggcccgagcaggtactctgtaaacaaaacaaagttatatcaccaagtgccttccccgaattcgctccctcaaaccaaccacacagttctgaccactctacagtcatggcctgtcatcagagctttgtatgaaattaagtcaaagtgtggagctccttttactcatttttttttctccttaaaaaagaaaagaaacaaatgttccaagtaaaaacaaacgtatcccaaagcatgtgtgcattgaaaagtaaagaaacattataacaacttcataaaaactgacttaaaagtttaaaaggaaaaaaacatgtttctaagtccttctgactggagtaatttctcttatataaagaagagatattttcatatgtaatagtgtcctttctttacagaaatagttgtattatgacacatatgcacaaggattaacactataacacactgtacatggtgggtccagcttgctcaccagtagttgtctgaggccagatcactggggtggagccactctacagaggagcccagcagagtctgaatttcgttcgtgaattccaccagatctaacagctccttactttcagggttgaaggcttccaggtctttggagcaagagaacaagagacttgcagaaacctgccgataaaattctgcctctgcaatggtgacaatttccacgtttggaaaattgcagcgaaatatgcgggaggacattttcaatttcttaaggacatccgaaagcagtagccagtttcgtggc

SEQ ID NO: 13579 - DNA, 158 bp, Homo sapiens
  chrX:39913137-39913295
  hyper
cccctgagccacagatacttggatgttataacacggtaagaggggggtctctgaaaattcaaattcaaacacatcgctataggcatcgtcatcatcatcctggtcttctggtcctggggggttggctaaaacatcatagccactttcatcatctggtt

SEQ ID NO: 13580 - DNA, 79 bp, Homo sapiens
  chrX:39913507-39913586
  hyper
ccacaaacagagctgccatagaagtcccaagtgccactggcgtcatcatcattgcgaccctggaggtcatttaaataat

SEQ ID NO: 13581 - DNA, 147 bp, Homo sapiens
  chrX:39914619-39914766
  hyper
cctgttaagaacttttccataagttcactgtgggtcattttcatgatggttctacctgagtacgtagccaaggtggggtcagcaccataagagagaagtagtcggacaatttccaagtgatcgttctcaacagcatcgtgcagaggc

SEQ ID NO: 13582 - DNA, 168 bp, Homo sapiens
  chrX:39916406-39916574
  hyper
cctggttccatcctgggcactacagttgacatcagcgccatattcaaggaggtgtcgcacaatgttgagccagcccctagcacaagcttcatgcagggcgcagtaacctgcgttgtcccgatgatttacatcacaaatcttgttctctaagcagtacaggaccacttc

SEQ ID NO: 13583 - DNA, 274 bp, Homo sapiens
  chrX:39921381-39921655
  hyper
agggacacacctcatagccaagcctggctgcccgctgcagaagggtctcgccagcgttcttattgacaataagtctccgtgcttccggcggcatagggcgagactgggtggtctcctgaggggaacttgagcatggcagctgtgtggactgggaggctggtagcagttgctgcaagcggtcgaagggctttggctcctgcttggctggtgacagatcatagtccgaactgggctccggccgctttctgaatctccggacagtcacctatcataa

SEQ ID NO: 13584 - DNA, 327 bp, Homo sapiens
  chrX:39921997-39922324
  hyper
ccttgccatcggcattctccacgtagtattcccctgtcagtggcaatccccgcctggactcctgagggatcaagtgtttggttttgcacagtctcttcccggatggcttctcgctgttgtcggtgtatttctgcagcagggaggcagcctggcaatcctcttcttcgtctgcacacagcacatctgtcttctggttttctttaattttctgctgtttggcaggcggcctggaggctggtgcgcagcttggctgagcctgctttttgccgcctgcactggtggatgaaagactcttcatgggcggagagccggagaacacaggcaagc

SEQ ID NO: 13585 - DNA, 346 bp, Homo sapiens
  chrX:39922859-39923205
  hyper
ccttgttcattgtcactgggtttaagagactcttccgaccagcttctgttgcctttggcctctgcccttttcctgccaggtttctcttcagtgatgttagtcccctgaggaatggcctcaggctgagtggcctgggtcacttccttcctgctttgccggccaggtttgccatctgctgccgacacctgctgctcccatcgttctctaaggtgcagcaagtggcgttgttttttaggatggagccctgttaattcaatgcacaccttcaggttggtcagctcactataatgtgggtcttctaagtggttagaggaactgtttgtcatttccctctcaggccagtcat

SEQ ID NO: 13586 - DNA, 265 bp, Homo sapiens
  chrX:39923587-39923852
  hyper
cctttagagactcgtcggcgtttggctttcagcagagggtcctctggcacctcctccgcagtggtctcagtgtggctgctgtcacctgagactttgcgtttcctgtccacccggagggtggggctgtgaggcatgtccgaggccacctggtctgcgggaggctcgctcacaggctgcctctccacaaagtacttctccacaggaagatctttgtcctctggggcttcaaagggatcacggtgcttgtttccaacactatactcgc

SEQ ID NO: 13587 - DNA, 188 bp, Homo sapiens
  chrX:39930224-39930412
  hyper
catctctcactttcgttctgttctgcaatggcctcctccagggtgaccgactttggctttttgtcctgatttcctttcaacctttcccagtcggctgggctgaatttgcacatctcggagtctttggttgctgggtggccaccttctctttctttcatctccaactctgagaagcgcatcattgcacg

SEQ ID NO: 13588 - DNA, 55 bp, Homo sapiens
  chrX:39930888-39930943
  hyper
cctcacagtaagcagcgggtagacataaaatactgtcctcttgtaatccttccat

SEQ ID NO: 13589 - DNA, 2833 bp, Homo sapiens
  chrX:39931600-39934433
  hyper
cctgcaatgcccgttgctcccggctgagctgactggaatctgcatacagttcggtagtgacacatttgaatcggtcacccacgtaacccgctgagttggcgattctctttgccagcttagatggcttcggtttcagaactttgccatcatttgattcagcctcatcagctccatctttggtataggtgggggtcacatccacacttggtggggcactgcccacacaaaatggtttgggatcctcttgggttttaccaaaagttacagcagggccatcgctccccagaggtggctccaggaatggagtcgagactggcaaccctaggttctctttgttggtacctgccagaacactgtccttgcttacggtgaagactggctgtttgaaagtataagtttcgtggaagtcactgatgcgccccaactcctctctcagggcgatgaaatcacggtgctgctgcagggccggctcaactgagggcttggggggctcagcgctctggccaacactctctgctgcaaagctgggtttggacacgtttgtgtcagttttagcatctggttcttctcggagaaggtctacgtagacaagcttgtcgcttttgacaacagtcttcccttgattccagttggggttcggctttaggttcttgtcggtggggacatctggatgtaacttggtgctgctagtttccaaaatctcggaaaaccgattccggagggttgggtcctcgtaacgggctctctcatgggaccgggatctcctctctggtttctcctctttagtaatctctatgggcgtgtgtggtatcaacatgggatgcaccatgcccaaccccagggcatcttggtaggtcacaaactctggacggccggtgggaagcccatagggcagcccaggctttggggcaaggtgcccaggaaacagactgccattgggtaacaaaactgggtgagggtagacaggtcctttgccatgtaaggagaggggacttacagcaatgccctcaggggctgggtaagggaggtaactcctggggtagggaattggtggggacctgaatgcctcatttggagacagaaatatagagcttggtggaaggccgttctcgtttgctttgaaactcggttctgggttgctggctttggcgcccttgctgctggtgctgctactgtgcttggcaggagtggccgggggctggcccacgtgctgaataacggatggtgtggtttctacagagctcctgctggttttggtgccatctgcattggcattgggggcgggtgatgcggaggctgggcggcctgcactcgacactgaccctgaaacgttagtgatgacagcatcggtgccgcccatgcgcgggcatgatgaactccgctgctgtggtatcgcccagtccaatgccttgtttttcagcgacatgcttttgccattgttctcttcgttaggacttggcccgggcaccacccaggatgagggagcagtgctgatgatttcagatctatagatagcacaaccatttcctggaggagatagtgtttctttcggaatctcacttccggagagcactaagccacttccagccctgctgtgaaccaggaccgtgggagccatctttttcatgtggtcagctttggaagcatctacatccaccactttagaagacaagtctagtggcttatctgtgacgtctttggtaacggtctgcttctccaacagaggaggtgagctgccatcttttctgtcttgaaccgctgtcttccgggcatgcccgggcactggctgggcaccttcgcccccttccggagccttgggatacttgccattggagagcctggccgcggggaactcgctgctaactgtcatgtatggctttgacagggcaactgaaggagaggtggagatcctggcatagtgcttgtggaactccgagtaggtgtctgcagcaggctgggtgggaaggtggactcggggtgacggccgaggcgaggggggcaacaggagagctgtgtcccccggcaggccactggtgaccgccttggcagagggaaccctgggctgcttactgttctggatgtgaggataggcgtgggaatcaacaggattcccagggctgacgcccatcttccacgggaggcttttgtctgcgcaatggacgagaggcgggatggctggggaggccgaaggtgtcgagagcctcatgggtgatgccaaggacgatgggatgtggggaccgacgtagtgaggtggcggcaggtagagaaagcgctccccattggtgcagactggagaatacagcggctgggccaagctgtaggactgctgaggtagcaaggccttgtacatgttcagtgaatacttatttggcgagtcgaggaaagggtagatggctggcgtggcaccctccatgtaaggattgacccagggcagccgcagataactagcaccattgatgttgagagggctctgtttgtcgctggcaggcctgtccaagcccagcgcttctgctgtggctacagcacttttttgtattccaggcggtgttttgtatatagcactgaagccatttgggggttttccagagacggcagaagcctccactgtctcgggtgtattcggtttgaactgcatctctggatttctttccgaagaaaacccaaggccacctagagtgcttgtggcagcctcccgacctttctctgagcccagtccacacaagctagaatagacgatgtttcccgggacccgcagcccttcccggatcaggccagtgcggtccatgctcagtgctgccaggccatcgatcctatgggccgtgctcgcatccac

SEQ ID NO: 13590 - DNA, 80 bp, Homo sapiens
  chrX:39935705-39935785
  hyper
ccacgttgtggttcaagggattctcttccctcagttccagtctggcttttgaagcgtcaccatcatttacaaggattttc

SEQ ID NO: 13591 - DNA, 127 bp, Homo sapiens
  chrX:39937095-39937222
  hyper
cctgtcttcgctcgccccacacatgcggaccctctcgctgttcatccagctgtgaacgttcccatacaggggggttgctgagagcatgtcgtcttctgggatggcagctttgcttcaagcgtctagt

SEQ ID NO: 13592 - DNA, 841 bp, Homo sapiens
  chrX:39953710-39954551
  hyper
cgggtcctctccagctccggccccccgcgctcccaccagcccggctgccggggcacagtcacagctccgcgcgctgggcagtcctatttttatcttgtctaatcctaaactgggcggggagcacaggcgtcgtgcttagagaacaagagataggcgcgggaggcggggaggagcagccaggcagcgacgcgagcgggagcgagttaaagacacagtggaggcgaccgcgggcaggaagaaagagcgggctgcgcgggcctcgaggcgccgcacgcaacgcgccgccccgcgaagttacactcgcttccccgccgtccctcgctaccggcccctccccacttcccagcggcgctccccgcagcctggacagcgaggccccggcctgtgtgggaggcggaggccaggacggccctgcaaagggctggagagaatcgctaatgagctgtgcagcccattgatccggagaacacttcctaattaactctcagtcacctactggtgacagcgcctcaaaggacagcgctggggccagccgagccccagccgcgacttgccggccgggcgcctgctgcccaaaacccgcgcgctcccctaaacaccccaaggcaattggtgtgcgtggcggtgtatacccgcacactgaaggccagcctcggattaaacctggatggcatattaatcatcgccttccccccccactccgctctacgcgctgaaaccctgcccaaaataaacacgaaaaccaacactgcaaaacccacaccagataacaggtcgagagaggagtgggcagggtcaaggaacgagcgtattccctaagtgtccacgtacaggaatcttt

SEQ ID NO: 13593 - DNA, 1562 bp, Homo sapiens
  chrX:39955157-39956719
  hyper
cgggaagggcccactcgagcgtgcgagcggcgggaagcccgccgggaccacgcgtgacttcggccgccctactccacacacggtgccccaaggctctctccgtaaacagcaggcgctcgtcaccgccgccgcgagcccccgagttggcggaggctctgcggcgcagccgcccgccggctccgagcgcgggccccgcggcgcctcgccctccccgccttggccgaggatcttgccccggtgcgcaagttcctcttcgcctacagcctccttgccacacgccctccgagtgggaccaacttcctccggccgcagactttcacacgcccatcagggctacccaccagactccccattgcccagcggagggcccaggtctcgcccgcccccgccctccctccacgacgctgcccccgcacaagcacattctacacccacccctgggggctcataacttaaaacctacgctgaacatcggggagggagaggagggggaaagcgggagggggatcgcagattataatcttaaaagaacatttacaaaacaaagcgtctgacctggctggcgggcgggccaagtcggaaccccttgctctgctcgatttcttagtagtttttttttttaatccacgtgattcgtgctttggggcaagccaagaaaaaacgggactcccctcccgagttgcgcggcagcggcggcaggtcgagctcggctcggcccgaggcactcgccacacaccctcgcgcacgcacacgccgacgttccacttggaggaacgaccggcccccggagaggcgagacgaggcggcggtggcggcggctgggggtttttacagttctttcccgagtcgaaaaagaaagcagacggcaacccgctgccctccccttcctgctcgcgagctaacgccgaacccagcttcccagcttccagcccacctcccccccctccgcccgactcgcggcgctcagcggcgaccgcgctcccgcgcacagacacacacaggctgcaaacttccactctgcgaactccctgctctcctcctggcccaccgggaggcgccaggcccccagccgcgccccctccctccctggtgcccacgcggggccgcttaggttggctgcattttaaataacatagctatgaaataaaaacgaaagcgagccaagcagccaaagggaagcgcgaggcaaaagcttcgcggggtacgctgcgggagggggccccgggagagggggccgactgcagccctcagcgcgcccgcccgcccacccgtccgcggtctcccgggggaaaggtgttccgggcactgacctgaaatccccggtgggggagtaggcagggagcctgcgatccggctctttgaagttttcccccaagcggactcgaggcggcgagaaggagcggggggcggttgggtgggtggagagagatatgaggggtggggggggttggcgacgttaacgagcggagaaggagccgggccggagaagcgcggcgagcagcaaagtttgcggtccccggctgcccgcagcccgctcgcggcgccgcgctcactcgactccc

SEQ ID NO: 13594 - DNA, 260 bp, Homo sapiens
  chrX:39957624-39957884
  hyper
tgcgcacgcccgacccgggcgcacgtcctgggcgagccggagaccgacttgggcggcggcggcggcgagggctgccggcagagccagagccgaagggatgggggcggcgggggcggctctcccagccgcgcgccgagactcccctcgctacccagaaggccagtggaggaccgcaattaccataaagcgcctcgcactccgctcagccaaagctgtcaaaccccagcggcagcagccgctgccgccgcctcttgccacca

SEQ ID NO: 13595 - DNA, 457 bp, Homo sapiens
  chrX:39958135-39958592
  hyper
ggaggcaccgggaggcgtgtggggggcggtcggcgagcggagatccgcctgtatttctcccggttctcgagcattttcacggtctgtacctctgatggttggaggggctgcccaggcccctcgccccggcgttgggagattatctcccgcgttttattttccttgacagggagcaacttttggcttacaccgttcgccccataaatttccactcggtaacgtcgtgctgatcggtgcttggcggcggcgtacagcctgcgcccgcagcagttcaattcaattgacacgtattgagcttctccagcgcacccggcgcggctctgggcgcggggggagggcgggggcaggcgggagggagggggaagcggagaagcgaggttccggcctccccggagcgcaaagcctcaagggcgagccgagaagccctagttggtgaagctggcgggaaggggtagga

SEQ ID NO: 13596 - DNA, 31 bp, Homo sapiens
  chrX:39959180-39959211
  hyper
tgcagaatggaatgcacgcttttttcttcct

SEQ ID NO: 13597 - DNA, 888 bp, Homo sapiens
  chrX:39963954-39964842
  hyper
ggttggggcctgccgcggacggattgtccctggggagctgaaaccgcccagcggggaaacccctcctctcgcccttccccgaaaagcttggccgcggtctaagctccgagcaagcgggtatccgctgacagccgggcctcacgtaaggcccacacgcgtcccattagtcagcccgagttcccctcgggcgagccgcctggcgcggccccaaggccgggctcaggcggggagagggtgcggggccgcagcgagctgcgggcggaggtgcgggctccgcggagcccggccaggctcggttccgcgttcctgggcccgcgggtaagctgagtcggcggggcaggccgctccctggctggcgccggggcgccaagctgcgcttcacgtgcccgccatatcagcagcagcggcggcggcggcgaggagggggtgctgggaggcgcgcggccgttcccgcggggtctccggaccccgcctccccgcccctccccgtgggggctgggccgagaccaccctgcggcccccatcccagcgcaagccgaaagcggcgctgccagacgcagagaggctcctggggcgccgttccgagagccgcgcggcggcagcagccaggggagggtgctcctcgcggccgccccgccgccgccgccgcagtcacggggaccggaagccctcgcgccgccccgagcggcctccgctggccccagggctgttccagacgagggctggccgcgcgtcacccctgatccctcctcgccccaggcgaccacccgggccctgcggtatcccggtgtaagccgagaggacccttcctgcggtccgatgagatgtccctgtccctctgctaccaccataagcacgcccccccgcaccgctcgcagctccgcagct

SEQ ID NO: 13598 - DNA, 30 bp, Homo sapiens
  chrX:39965256-39965286
  hyper
gggagtaggtcatggcggcaccggtactcc

SEQ ID NO: 13599 - DNA, 577 bp, Homo sapiens
  chrX:39965500-39966077
  hyper
gcgttgttttgccagcgggagccgagcgagtgcacagagaaaagcctccctactctaatgagagtgcacacagcgctgcagcgaggaggatgattacccggcgggcggggggcgcgggctcgggccgcgggcggcgtgtgcggcggccccgcgggcccggagtccccgcctgtctggctgctaatcgcacgctttctgctgttacggaggcaggcgggagccggcggccgagcccagcgccgacgactcggcgggtgacacggaaacatggcgcagcgcccctcccccgcccgcgctcccgcctcccgccctccccgcgctcccgcctcccgcctcgcacttcctcccgcccgcgcggcttttgcagttttaatgctctgctttcggcctggcaccattacgctagcagccgcttctccgcggccccgcgcgtctctttcccctttgttttcggggtctatagaaaacgtttgcttttgtcccgagctctcgttaaaccaaacttgtggtggcaacggaaggcggtgcaggcggggaggggtccggggattttggcagtagccggccagagcgtggt

SEQ ID NO: 13600 - DNA, 533 bp, Homo sapiens
  chrX:40005424-40005957
  hyper
cgctctccgcacggtagcctgatccatctcgtgggcgcggaggcggggcgcggggctccgctcccgcggaggcgcggagccggggctggggagcccggtgcctccccccacggccctgaggtcctccctgcgcccccactctgtttaacccccaggtggggagaggaccccgagactgcacacagcgcgcccggggccctgccggggcctgagcgggcgggggacagtgtccgggaggagggagggccgagaggctgatttaaaggttctcaccgggaagcgagcgaggcacagacctgagagccgccgcgcggtgaaatccgaggagctctcttggcgaggaggggctgtcagaggccatttatctctcgccagagtggaggctcagctcccacaccgcccgcgagtaacaatggcagcgatcagcagctctgcacgcgcttcagtgcatgaatggattgcggaagatgcctgcgtccgctccgctcaggaggctctaggagcgccccctccccgcccgccgcgcccgcccc

SEQ ID NO: 13601 - DNA, 361 bp, Homo sapiens
  chrX:40017660-40018021
  hyper
gcgcgggcgttcccgggctgccggggggcgctccctcccgaggcccccctccccgctgcgggccacgctgacccaggtcggggacgatggggcggccgtccctggtgaaagcgtggcctgtagtgtcgcccctcctcgaaacgctggagcggattttaatcctgagaaacgacctctggttcccggactcccgcgatggtcaacgtgttatcgcttctcccgcgcaccccagaactctgtccccagaggcaacctgccgaggcagctgggggtggggggcgaggcctacccaccgttcacagggcgctgttgaggccagagaggatttgagagttaccacggtttagggctcctgattgga

SEQ ID NO: 13602 - DNA, 229 bp, Homo sapiens
  chrX:40030831-40031060
  hyper
agagcggatggaaaccgaggcacgcagccctcgaccccggccaggcgtggagtaggggagcagggggtgccccgcgtgggcgcaccctaagaaaccagtgcggacatggcgagcgagaccagagcgcagttgtgtgtggtttttccccaggtttttattcttccagccctgtggaaaggaggagagccgcaacccggagagggagccggaaagaaacacttaatcaccg

SEQ ID NO: 13603 - DNA, 921 bp, Homo sapiens
  chrX:40031175-40032096
  hyper
cggcggccggctccggctcacagagcctctctcaacgccggcaagtgcagccgggccgcccagcccccaggccagcctggccccctctgggcctggggttggcgagggcagctgggcgtctgcgctgcccagcccagccgcggatccatggggtttcgcgagctgaaagtaaaggcttgagggagtggggacacccacaccgacccgcggcacgcaggggagtcaagctgcggccaatgcaagacgagcagggtagactactactagcggtggccggaggctcagccaccttcgcgggagaggggatttaccgccaccctcatccacgcgcaggccccaccgcccggtcctctcctctgatccccgggccattgcgaaacacggagcgaacaggtcctcgccagcagccgtcatttcccgggaagatgggaacccacaagcctgactgtgcttcctaaggatactagcgtgcgcgcagaccttggggggaaagagggcagcgcggtctccccgacccggactcttccctggcgcagcacacaaccgccacgggcttccgaagcgcccgagcggggaggaggaaggaaaagcggaggcccgggaggcgggctgcgcgcttggaagccgtgtgtgtttatgtgtctgcgcgcgcgccctggccggacgggtgttgaggggagagtgatcgtgagcaacccggaaccagcagtcccaacctggactgacgaactgggctctccagtcctgggccgtggggctccatgcctcgggctggcgggacaagcggcggggagcccggagcttcggagccgccgccgggcatctagccagctccgcgggagaagcccgggggcgcgtcgggagccaggggactggtgtgaactagccgcccccgcaggcggacgtttagctccggcaccc

SEQ ID NO: 13604 - DNA, 1127 bp, Homo sapiens
  chrX:40034218-40035345
  hyper
tctggtccctctgagaatccacgttttctagcccgagaaggggcaggcggccctcatggcgcctccttcggcggtttcctggcgaagcgcccatcctccccaagcaccaggaacggaggccgtccatattaatactcgcgggcagcctgttctgacctatactgtcattttttccatcggtcgggatcgggctgggggtggggtggggcgggggctctcctccgaggggctcagcacggatcgttgggttttccccggcgaacttaacacggaggcaaaaggggcagatggaaaccaggccccggctggccccgcgcgcgtaagcgcggcactcagcagctcgacgcaaagccagggctggattttcgcggcccgggcccggcggccgcccagcgcccgcgcgatcctctctccttcgggttgagcaaacgtggtcgcctaattccgcccgggagacagcagctgtgcggcgagagggggagaaaaaatatcgcaacttttccaacagaaagtgtgtgcgcacacgagaggtgaaggcccaccccgattctgtgcacgtatcgacacagcatctaatcagtgtcactgccaggaatacgcttccgcggcgggcgacaccgccgccctcgccaacctgcaggagggaggggggatgcaaatggcgtctcgcgtcgtcctagactccgcgcagcacccgctaccgcgactccaagcagacgttgcagcaaactggggtgcagcgtctggggacgcgaacgcgcaggcggcccgagcggtcgcagggaagaggaactagcaccactccccgctacgagaccgttccccgcccccacctccggaagagccgcccttactcgactggggtgaggggcgggaaactttgcaagaagactgttccgcgccttccccgcgtggcacctcagaagaacgtgggtgggtttcccgtccgaggccagaccacgctaccctacttttccaggtttcggacctgaacctcgtggactacgggagggagagtacatttcgggccactgcggggggcggagggacaccaaagacaggcgtcttcaagggttctggcagatggccaagtttgtgtcctttccctcccacgctagagtagcgca

SEQ ID NO: 13605 - DNA, 324 bp, Homo sapiens
  chrX:40036258-40036582
  hyper
ccttcgggccgaccagctccgtcttccactgactccagcattccgttcaaacccagcagccacggcttctaagatttcactccgctctgggctgggggggagggggcgagttctccgggagggggtgtctcagatcgaaagagccacttcacgctctttctcctcctccgaggtgagtttttagactatttggaggccttggggaaacgcgagcagccgcgtgcaaaggagcccccccgccttctccccgcacatgcagccttgtctagtgtgacccgatttccagggtcagcagcagagggcctggccagcttcggaaatacc

SEQ ID NO: 13606 - DNA, 30 bp, Homo sapiens
  chrX:40126558-40126588
  hyper
cctttggctggctccgggctaggctgggac

SEQ ID NO: 13607 - DNA, 428 bp, Homo sapiens
  chrX:41135194-41135622
  hyper
gggtgctgcgaggtgcgacaaggctctccctcgctgcaaccacggaaaaggcggatcagcctccattacaaaccgctgtaggaggggccagaagcttggcctggccagaccgggccgtcgttgaatccctgcatccatcttgcccaggttccctgctgagtcccccgctgggctgtgatcgttgcggatttaaacaccacactgtggaagcggagatggccccgcgtgcaccgctgaagtgaaggggctcgtggcaaatgatgcggggggacagcggccagagcagaccccggcggggtggcccgcccgggaggtggctgagggtccccggctgcggggtgaggggcgggaccgggaggcacaccctccgtgatcgccaccagaggccgcctggaacccgagtttcaacctcccggggatcctgtccc

SEQ ID NO: 13608 - DNA, 30 bp, Homo sapiens
  chrX:43379710-43379740
  hyper
aataaactcactccaacattcttatctctt

SEQ ID NO: 13609 - DNA, 30 bp, Homo sapiens
  chrX:44733191-44733221
  hyper
tttcatgaagatggcgccaggacgaaggcc

SEQ ID NO: 13610 - DNA, 38 bp, Homo sapiens
  chrX:54834567-54834605
  hyper
gggcagggtgtgcaaacgtaacacggaggaggatgtaa

SEQ ID NO: 13611 - DNA, 286 bp, Homo sapiens
  chrX:71525284-71525570
  hyper
tgtttgcggacagctcggctgccctcctcgccgcatcccagatggagccgcggaaccgggggcggccgggagcatcccttgcacggcgggcgcgtgcacccaggccaccggggccctgagcgtccgttcccgcaagtgctgtatcaggaactgatcttagagacaggatggacaggcaggaaggggcacggggtgtcggcctccgcggcgagtccgcactccggcgccggctgctgccactctcgcgcctgatcaacacttactgagcgcccgctgagcatccgac

SEQ ID NO: 13612 - DNA, 349 bp, Homo sapiens
  chrX:71525794-71526143
  hyper
ggagaggggtgtgcgcgtgggtgtgtgtgtgtgggcgtgtgtcgggggaggggagggctgaggtcgactgggcagtagaggcaagttgcccaaattcgctaacttccatcccgcaattccgctgaactcggcccgaaaagccccctcttgcctcaattccccgaagtaaatctgagctttgtgcagctccggagccagagcgtccagatgcggtccgggagattagcaaagtcggtggaagccaagctggagaaagcgcgggcgcagggagaaaaggtgctgccgtctccccgggagaagcgggcacccggccccgctggccggcaggggggcgcgctggcaagcgaac

SEQ ID NO: 13613 - DNA, 30 bp, Homo sapiens
  chrX:71526775-71526805
  hyper
cccctcaatttccacgtctttataaccggc

SEQ ID NO: 13614 - DNA, 515 bp, Homo sapiens
  chrX:73163982-73164497
  hyper
aggaaactgggggagggtccacggcaacggctgcggcacggcaacggctgcggcacggcaacggctggggcacggcaacggctggtgcatgttgccggcggaggcatttaggtagtgcacgacggctgggcgccgggcctgtttggctgtgacgcccacccccggctttcatccgcctatgccctagggctagtggaagacttaagatggcggcgtttgcacggagtgcaatcactgcgtccttacgggggttgcaaggcgtccgaagtatgagtccactaacaaaagtccagaaactcgccagttaatagtattgtggtgagtgatgagcctcacgttggctagagaagtggccgttagcgaggctacacactttgggatcgcgtggcctgagtcgggggagtaaccggcctgtattccatttttctctctccagtctcttcaaaatatcggagaataatttctttctcgctgatcgcctaacttctactgacgaagcttggaagttgcagaag

SEQ ID NO: 13615 - DNA, 30 bp, Homo sapiens
  chrX:80722921-80722951
  hyper
gccacagcacagttctggtgaagtttcagc

SEQ ID NO: 13616 - DNA, 30 bp, Homo sapiens
  chrX:87762080-87762110
  hyper
ggcctccattacaatagtcccagtacttac

SEQ ID NO: 13617 - DNA, 180 bp, Homo sapiens
  chrX:92928214-92928394
  hyper
ccagaatcactagtcgagctagccatctcctcttcggcaaccccatgggcgacaggttccgagaccattttaaaatctgcttctgccatcttgcaagcctacaaactctaccagggagaccgcgcgaccagagatgggcagaaaatgactcacggatgcttgagtggcggcggcggaggc

SEQ ID NO: 13618 - DNA, 299 bp, Homo sapiens
  chrX:92928507-92928806
  hyper
cggtggcggcaaggcctctcccggctgcagctagagtgccgagatgtaccgcagccgaatggcgcagtatgagaccccgagatctcttctcgttttagatcgcgagccccctccccttgcagtcagacctcccgttaatttcgttcccagtgtgcctttagttcgctcctcatttgctggtccaccttaattgacaaactgtacgcccaacgaacggccaaacgccactactcctggctccgcccaccttcccagacgccgctcgctggctgaggtgcgaccccttggaaggtgtcccc

SEQ ID NO: 13619 - DNA, 30 bp, Homo sapiens
  chrX:93928298-93928328
  hyper
tcaggcctgtgattgaagtggctgccacag

SEQ ID NO: 13620 - DNA, 31 bp, Homo sapiens
  chrX:96606843-96606874
  hyper
ttgaaaaatccataggcgtttgacaagcagg

SEQ ID NO: 13621 - DNA, 73 bp, Homo sapiens
  chrX:100475065-100475138
  hyper
agaggcagcccagccccggcctcccagcttacagctgccgcctgcttctcagacctgacggaatcagaaggta

SEQ ID NO: 13622 - DNA, 34 bp, Homo sapiens
  chrX:102941573-102941607
  hyper
agatcttcccagcagccgacgtgtgatcactgcc

SEQ ID NO: 13623 - DNA, 30 bp, Homo sapiens
  chrX:103731902-103731932
  hyper
gcagccactttacatacaccctgaatagat

SEQ ID NO: 13624 - DNA, 173 bp, Homo sapiens
  chrX:107003133-107003306
  hyper
ggcgggaggaaattcacggtcctgagtgtcttcaggagctcccaggccctgagggaagcctggagctcctggggcaagtgctgccctcgggatcttctgccgagaccgggccagcttcctaaactaactcccagactgaaggggagggccggatcctccgggagagcccagac

SEQ ID NO: 13625 - DNA, 31 bp, Homo sapiens
  chrX:118101022-118101053
  hyper
tgtgtccatcaacagacgaattaataaacaa

SEQ ID NO: 13626 - DNA, 21 bp, Homo sapiens
  chrX:118451726-118451747
  hyper
caaaataattttcactcgtgt

SEQ ID NO: 13627 - DNA, 30 bp, Homo sapiens
  chrX:120184126-120184156
  hyper
cacttgggctccctgtttggagtctggctg

SEQ ID NO: 13628 - DNA, 25 bp, Homo sapiens
  chrX:123094408-123094433
  hyper
agtcgccgaagagcgaacaccccaa

SEQ ID NO: 13629 - DNA, 224 bp, Homo sapiens
  chrX:123094492-123094716
  hyper
agaaaaaaaaccccgccggatccgaccgccactttcaaaaccccccaccgctctagaaccgcgggagcttccgtccctgagtagaattcgagggtgtaaagaagaggaaggggaaaaatatcttgtaccagcccaggggtgaagaagcccccggcctgagaaagaaggaggagtgggggaggcgaacagtctcgttgctgcctctgtgtacgctgaggggggag

SEQ ID NO: 13630 - DNA, 125 bp, Homo sapiens
  chrX:123095160-123095285
  hyper
catgggtggcccaaaatggagaacgcggagcagcgcaagatggaggctccgcttctctgtgtagcagtagatttaggttccttttctccggcaggctcctaagcctaggagagcccgaactggag

SEQ ID NO: 13631 - DNA, 152 bp, Homo sapiens
  chrX:123095554-123095706
  hyper
cctctcttcctcccttcctagagagggaacaacattcatgtgacgggcccctctgcttctcccccgccccatcatctccagcgcgtggtgggggaactgctggggaaggcgattggcatcgatctctccatcccttccgaggcccgacttcg

SEQ ID NO: 13632 - DNA, 66 bp, Homo sapiens
  chrX:123155215-123155281
  hyper
ggtggccaccgagtactaaattcacttgggaataaaagaaaaacataagaaaattataagagaaag

SEQ ID NO: 13633 - DNA, 142 bp, Homo sapiens
  chrX:123156379-123156521
  hyper
ggaattgtcttagaagaaagaaggcaagccaccattttacccacgtaaatatatgaatatatttctgacattgaggtgttccagaagatgataaagaaatgatagcagctccagaaataccaactgattttaatctactaca

SEQ ID NO: 13634 - DNA, 80 bp, Homo sapiens
  chrX:123159688-123159768
  hyper
gggagtcagaaacacatttttcttctgacacagattttgaagatatcgaaggaaaaaaccaaaagcaaggcaaaggcaaa

SEQ ID NO: 13635 - DNA, 166 bp, Homo sapiens
  chrX:123164809-123164975
  hyper
gacttgtaaaaaaggcaaaaagggcccagcagaaaagggcaaaggtggaaatggaggaggaaaacctccttctggtccaaaccgaatgaatggtcatcaccaacagaatggagtggaaaacatgatgttgtttgaagttgttaaaatgggcaagagtgctatgcag

SEQ ID NO: 13636 - DNA, 98 bp, Homo sapiens
  chrX:123171375-123171473
  hyper
gtcggtggtagatgattggatagaatcatacaagcatgaccgagatatagcacttcttgaccttatcaacttttttattcagtgttcaggctgtaaag

SEQ ID NO: 13637 - DNA, 78 bp, Homo sapiens
  chrX:123176417-123176495
  hyper
ggagttgtcacagcagaaatgtttagacatatgcagaactctgagataattcgaaaaatgactgaagaattcgatgag

SEQ ID NO: 13638 - DNA, 206 bp, Homo sapiens
  chrX:123179012-123179218
  hyper
ggatagtggagattatccacttaccatggctggtcctcagtggaagaagttcaaatccagtttttgtgaattcattggcgtgttagtacggcaatgtcaatatagtatcatatatgatgagtatatgatggatacagtcatttcacttcttacaggattgtctgactcacaagtcagagcatttcgacatacaagcaccctggcag

SEQ ID NO: 13639 - DNA, 153 bp, Homo sapiens
  chrX:123181202-123181355
  hyper
gctatgaagttgatgacagctttggtgaatgtggcactaaatcttagcattaatatggataatacacaaagacaatatgaagcagaacggaataaaatgattggaaaacgagccaatgagaggctagaactcctgctacaaaagcggaaagag

SEQ ID NO: 13640 - DNA, 75 bp, Homo sapiens
  chrX:123182853-123182928
  hyper
gcttcaggaaaatcaagatgaaatagaaaatatgatgaatgcaatatttaaaggagtgtttgtacatagataccg

SEQ ID NO: 13641 - DNA, 136 bp, Homo sapiens
  chrX:123184023-123184159
  hyper
tcccccattcagtgatgcgatagctgaaattcgagctatttgcattgaagagattggcatttggatgaagatgtatagtgatgcctttcttaatgacagttatttaaaatatgttggttggactatgcatgataag

SEQ ID NO: 13642 - DNA, 279 bp, Homo sapiens
  chrX:123184965-123185244
  hyper
tttagcaaggtgaagtaagactcaaatgtcttactgctctacaagggctttattataacaaagagcttaattccaaactggaactttttaccagtcggttcaaggttagtattacttaagaatttacaaataacttgtcatttgcaaacacttttctcttgctttccttttaaaaatattttaatttttttgtccttaggatagaattgtgtctatgacccttgacaaagaatatgatgttgcagtacaagcaataaaattactcactcttgttttaca

SEQ ID NO: 13643 - DNA, 109 bp, Homo sapiens
  chrX:123189976-123190085
  hyper
ggagtagtgaagaagttctcactgcagaagattgtgaaaatgtctatcatctggtttattcagctcaccggccagtagcagtagcagctggagaatttctctacaaaaa

SEQ ID NO: 13644 - DNA, 113 bp, Homo sapiens
  chrX:123191714-123191827
  hyper
ggctcttcagtcgtagagatccagaggaggatggaatgatgaaaagaagaggaagacaaggtccaaatgccaaccttgttaagacattggtttttttctttctagaaagtgag

SEQ ID NO: 13645 - DNA, 132 bp, Homo sapiens
  chrX:123195072-123195204
  hyper
gttacatgagcatgcagcataccttgtggatagcatgtgggactgtgctactgagctgctgaaagactgggaatgtatgaatagcttgttactggaagagccacttagtggagaggaaggtaaggatgttta

SEQ ID NO: 13646 - DNA, 105 bp, Homo sapiens
  chrX:123195619-123195724
  hyper
gcactaacagataggcaagagagtgctctgattgaaataatgctttgtaccattagacaagcggctgaatgtcatcctcccgtgggaagagggacaggaaaaagg

SEQ ID NO: 13647 - DNA, 307 bp, Homo sapiens
  chrX:123196748-123197055
  hyper
taggtgcttacagcaaaggagaagaagacacagttggatgataggacaaaaatcactgagctttttgccgtggcccttcctcagttattagcaaaagtaagtttgtgtcaatatcatagtgttactaagaaatgagttttttttccctaaatgcctcacagaatattataatgctttcttattgtgatatttttaacgtgatctttatatttcacagtactctgtagatgcagaaaaggtgactaacttgttgcagttgcctcagtactttgatttggaaatatataccactggacgattagaaaag

SEQ ID NO: 13648 - DNA, 214 bp, Homo sapiens
  chrX:123197687-123197901
  hyper
tattttgcagcatttggatgccttattgcgacagatccggaatattgtagagaagcacacagatacagatgttttggaagcatgttctaaaacttaccatgcactctgtaatgaagagttcacaatcttcaacagagtagatatttcaagaagtcaactgatagatgaattggcagataaatttaaccggcttcttgaagattttctgcaagag

SEQ ID NO: 13649 - DNA, 72 bp, Homo sapiens
  chrX:123199724-123199796
  hyper
gggtgaagaacctgatgaagatgatgcatatcaggtattgtcaacattgaagaggatcactgcttttcataa

SEQ ID NO: 13650 - DNA, 263 bp, Homo sapiens
  chrX:123200023-123200286
  hyper
gtgcccatgacctttcaaagtgggatttatttgcttgtaattacaaactcttgaaaactggaatcgaaaatggagacatgcctgagcaggtttttatttatttgctagttacacatttatctttgaaaagtgaagtcttgtgacttttaaattttaactgtatcctttgattctttttacagattgttattcacgcactgcagtgtactcactatgtaatcctttggcaacttgctaagataactgaaagcagctctacaaag

SEQ ID NO: 13651 - DNA, 94 bp, Homo sapiens
  chrX:123202412-123202506
  hyper
ggaggacttgctgcgtttaaagaaacaaatgagagtattttgtcagatatgtcaacattacctgaccaacgtgaatactactgttaaggaacag

SEQ ID NO: 13652 - DNA, 176 bp, Homo sapiens
  chrX:123204997-123205173
  hyper
ggccttcactattctgtgtgatattttgatgatcttcagccatcagattatgtcaggagggcgtgacatgttagagccattagtgtatacccctgattcttcattgcagtctgagttgctcagctttattttggatcatgtcttcattgaacaggatgatgataataatagtgcag

SEQ ID NO: 13653 - DNA, 141 bp, Homo sapiens
  chrX:123210180-123210321
  hyper
gatggtcagcaagaggatgaagccagtaaaattgaagctctgcacaagagaagaaatttacttgcagcattttgtaagctaattgtatatactgtggtggagatgaatacagctgcagatatcttcaaacagtatatgaag

SEQ ID NO: 13654 - DNA, 103 bp, Homo sapiens
  chrX:123211805-123211908
  hyper
gtattataatgactatggagatatcatcaaagaaacaatgagtaaaacaaggcagatagacaaaattcagtgtgctaagacccttattctcagtctgcaacag

SEQ ID NO: 13655 - DNA, 151 bp, Homo sapiens
  chrX:123215227-123215378
  hyper
agctttttaatgaaatgatacaagaaaatggctataattttgatagatcatcctctacatttagtggcataaaagaacttgctcgacgttttgctttaacttttggacttgatcagttgaaaacaagagaagccattgccatgctacacaa

SEQ ID NO: 13656 - DNA, 134 bp, Homo sapiens
  chrX:123217269-123217403
  hyper
gagatggcatagaatttgcttttaaagagcctaatccgcaaggggagagccatccacctttaaatttggcatttcttgatattctgagtgaattttcttctaaactacttcgacaagacaaaagaacagtgtat

SEQ ID NO: 13657 - DNA, 225 bp, Homo sapiens
  chrX:123220395-123220620
  hyper
ggtatgtttacttggaaaagttcatgacctttcagatgtcactccgaagagaggatgtgtggcttccactgatgtcttaccgaaattctttgctagctggtggtgatgatgacaccatgtcagtcattagtggaatcagcagccgggggtcaacagtacggagtaaaaaatcaaaaccatctacaggaaaacggaaagtggttgagggcatgcagctttcactca

SEQ ID NO: 13658 - DNA, 391 bp, Homo sapiens
  chrX:123224423-123224814
  hyper
gctgaagaaagtagtagtagtgacagtatgtggttaagcagagaacaaacactgcacacccctgttatgatgcagacaccacaactcacctccactattatgagagagcccaaaagattacggcctgaggatagcttcatgagtgtttatccaatgcagactgaacatcatcaaacacctcttgattataagtaagtacatttgatcattttctgtactataactttattaattacatagaaaaagttaagttaaaagaggaataaaattctccttgaagcacgcaggtaacatggatgttagctcaaagacaacaagaggaagcaaggcaacagcaggagagagcagcaatgagctatgttaaactgcgaactaatcttcagcatgccat

SEQ ID NO: 13659 - DNA, 128 bp, Homo sapiens
  chrX:123227866-123227994
  hyper
gtcggcgtggcacaagcctaatggaagatgatgaagagccaattgtggaagatgttatgatgtcctcagaagggaggattgaggatcttaatgagggaatggattttgacaccatggatatagatttg

SEQ ID NO: 13660 - DNA, 79 bp, Homo sapiens
  chrX:123229220-123229299
  hyper
gccaccatcaaagaacagacgagagagaacagaactgaagcctgatttctttgatccagcttcaattatggatgaatca

SEQ ID NO: 13661 - DNA, 2084 bp, Homo sapiens
  chrX:123234422-123236506
  hyper
ggttcttggagtgtcaatgttttaataccagtacacaattaaatctgtggtgaagtcattttctaagtggaagaggaaattttaaagtgtggtagatacagtgaaattctgtacagatttttctctaaggagaatatgacatgcttatgcttaccaagatcaagtgcattgaggggcagttttgtttgcctgaataaacgtaaaggacaagtaaacaatttgatgataagctacagtttttcttagaaagtaaatattttatttatgcgctgttagttggcttttgaatcgattatttcatgcttttttttaaaaaaaaaaaaaaacaaaataacaatctgaagaggcatttggtacagatatgaattctcttacatttatttactggttgtactaaataatgatgacctctgctggatttctgtttacatccagaaaacaatgttaaggatgtatttattcccctaccctgaagaaagtgtaggatagaattgtttttagcattctaaatttaaatgcttaaaacgtcaatcaacaaaactttgttttaaatattgtaattgtggagaaaagtaaacttataagcagaacttttacaattttttcatctaaaagtattttaagatatttttaaaatccaagagcttctctatacttttcagaaatatccagatgcagtgaactgccagaaggtaaccagtctcaaacatgcttatcccattatcaaccctgaaagtttgcttgtcctttaagataaaaatgtaatgttgtgatattccttccagtaatgccactgtattttgtctccaaataaaagaagcttattgtagtatgtttgcagaaaaattctaaacaaaaattatacagcttattagagtgtgggaatagggatctaaattttaaataaaattatatatatatataaattggtgctgattttataattgcgcagtttgtttagttttttcttacttttaaattccaacttaaaattatgaggtttcagaaatatattgaaagtttaacaatgtttaaaaatagaaaagcatgagtgttcatgctttaaaatgatttttaaatttgtattttatattgttttatctatctgtctttgcaagcagtcttcaggttaaagatacttctaacaggttacagtacatttcctctgtatgtaaattagatgggataatagaattcataacccataatattctttgaaagctaagctttaaacttcattttatgtcctttcacaaataaattagtttaaaacagaaagtggctacttgccattttgacatcaactcattttgcgaggcttaggcagctagacatcgtttaaaacaaaatattaacttatattacatgtgtatctatctattgtcagtcgtctctcagttcttgaggtatattattttaatcattccatgccttaatatgcttgcaatacaagaatatcttcagatgggtgaataccaaaaggctttcagtttttagtcagaaatcaagcattgggctgtggtagccaaaaaccataggttagctaaaaagatcatgatacaattattttattaagtcatggttaataacaaatgaatccagacttgtctaacagattttccatcaacaaatattgttatgtgcaaaagtattgcctatgttgttttacacaccactgcattaactagaactgctgagaggactgtatatatgattttaaacctaagttgattttttttctcactcttgaaaggagtacttctttgtgaaagcagttcttacagctttgttttcaaccagctaaaaatgttttatatattactctaacctgttgtcctccacattctattgtcctaattgtactgttttctgatttgtatttatgtcttgagacagtaactttttgaataaaaataaacctacagtatgttgtatgttttctcttgtactcaaagggggagggtggctataaatggtttgcaaatttatatctattatcacatcttttaatgtgtttggggaataatttatagagaataccatcagtttatatttttaataaatcatatgtatttacaatgaaa

SEQ ID NO: 13662 - DNA, 31 bp, Homo sapiens
  chrX:124338609-124338640
  hyper
ggtggggtggggggttcggatgagtatttgt

SEQ ID NO: 13663 - DNA, 21 bp, Homo sapiens
  chrX:127856750-127856771
  hyper
tttaaagctcatcatccggct

SEQ ID NO: 13664 - DNA, 137 bp, Homo sapiens
  chrX:129139162-129139299
  hyper
gggggagtggccacagcaggtcctatctggtggtgagtggctgtcatgatctctacagcaccgctctacagcggcgtgcacaactggaccagttctgaccggattcgcatgtgtggcatcaacgaggagaggtgagg

SEQ ID NO: 13665 - DNA, 92 bp, Homo sapiens
  chrX:129146552-129146644
  hyper
gaagagcacctctttctgatgaggagtcaacgacaggcgactgccagcactttggatctcaggagttttgtgtcagcagcagtttttccaag

SEQ ID NO: 13666 - DNA, 3265 bp, Homo sapiens
  chrX:129146924-129150189
  hyper
ggtggagctcacggcagttggaagtggcagcaatgcccggggggcagacccagatggcagtgctacagaaaaacttgggcacaagtcagaagacaagcctgacgatccccagccaaaaatggactacgctgggaacgtggcagaggctgagggcttcttggtgcccctgagcagcccaggagacgggctcaagcttcccgcatctgacagcgccgaggccagcaacagcagggccgactgctcctggactccactcaacacccaaatgagcaaacaggttgactgctcacccgccggagtaaaggctttggactctcggcaaggtgttggagagaagaatactttcattttggcaactctgggaactggagtccctgtggaggggaccctgcccctggttaccactaacttcagtcctctgccagcccctatctgtccccctgctcccggttcggcctctgtgccccactctgttccagatgcattccaggttcccctctccgtccctgccccagtcccccattcagggcttgttccagtccaagttgccacttcggttccagctccttcccctcccttagcacctgtcccggctctggctccagcgccaccgtcagtgcccacgctcatctctgactcgaaccccctttctgtttcggcctcagtcttggtgcctgtgccagcttctgctcccccttcaggcccggttcccttgtcggctccagctcctgccccgctttcagtcccagtttcagctcctcccttggctctcatccaggctcctgtgcccccttcagctccgaccttggttctcgctcccgtccccactccggttctggctcccatgccagcatccacgcctccagcggcccctgcccctccgtctgtgcccatgcccactccaaccccatcttccggcccaccttctacccccaccctcatccccgcctttgctcctacaccggtgcctgcacccaccccagcccccatctttactccagcccctacacccatgcctgctgccacgccagctgccattcccacctctgcacccatcccggcctccttcagtttgagtagagtgtgctttcctgcagctcaggcaccagctatgcaaaaagtccccctgtcctttcagccagggacagtgctgaccccgagccagccgctggtatatatcccgcctccaagctgtgggcagccactcagtgtggccacactgccaaccactctaggggtttcctccactcttacgctccctgtcctgccgtcctacctgcaggacaggtgtctcccaggcgtgctagcctcccccgagctccgttcttacccgtatgcattttctgtggcccggcctctgacttcggattccaagctggtatctctggaggtgaacaggctcccctgcacttccccatccggtagcaccaccacccagcctgcacccgatggggtccctgggcctttggcagatacctcccttgttactgcttctgccaaggtgcttccaactccacagcctctgctgccagcccccagtgggagctcagccccaccgcaccccgccaagatgcccagtggcaccgagcagcaaacagaagggacttccgttaccttctctcctcttaagtcaccgccacagctggaacgagagatggcctctccacctgagtgcagcgagatgccccttgatctgtcctccaagtccaaccgccagaagcttccattgccgaaccagcgcaagacaccccccatgcctgtgttgacccccgtgcacaccagcagcaaggccctcctctccacagtcctgtctaggtctcagcgcacaacccaggctgccggtggcaatgtcacctcctgcctgggctccacttcctcgccctttgtcatctttcccgagatcgtgaggaatggggacccgagcacctgggtgaagaactcaactgcactgatcagcaccattcctggcacctacgtgggagtggccaacccagtgcctgcatccctgctgctgaacaaagaccccaacctgggcctcaaccgtgacccccgccatctccccaagcaggagcccatctccatcattgatcaaggagagcctaagggcactggtgccacgtgtggcaaaaagggcagccaggctggtgctgagggacagccaagcacagtgaaacgatatactccagcccgcattgcccctgggctgccagggtgccaaaccaaggaactctctttgtggaaacccacggggccggcaaatatttatccccggtgttcagtcaatgggaaacctaccagcacccaggtcctgcctgttggctggtccccgtaccaccaggcgtctctgctttccattggcatttccagtgccgggcagctgacccccagtcagggggcgcccatcaggcccaccagcgttgtttcggagttttctggtgtgccatctctcagctccagcgaagccgtgcacggacttcctgaggggcaaccacggcctgggggctccttcgttccagagcaggaccctgttacaaagaacaaaacttgccggattgctgccaagccttatgaagaacaagtcaatcctgtcctcttgaccctcagccctcagactgggaccctggcactgtctgttcagcctagcggtggggacattcgaatgaatcaggggcctgaggaatcagagagccacctctgctctgacagcactcctaagatggaaggcccccagggggcttgtggcctgaagctggcaggagacacgaagcctaagaaccaagtgctggccacctacatgtcccatgagctggtcctggccaccccccagaacctgcctaagatgcctgagctgcctttgctacctcacgacagccaccccaaggaacttatattggacgtggttccgagcagcaggaggggctccagcacagagcgcccacagcttggaagccaggtggatctggggcgagtgaaaatggagaaggtggatggtgatgtggtcttcaatttagccacctgcttccgggctgatggcctcccagtggctccccagaggggccaagctgaagttcgggctaaggccgggcaggctcgagtgaaacaggaaagcgtaggggtctttgcttgcaagaacaagtggcagccagatgatgtgacggaatctctgccgcccaagaagatgaagtgcggcaaagagaaggacagtgaagagcagcagctccagccacaagccaaggccgtggtccggagttcccacagacccaag

SEQ ID NO: 13667 - DNA, 178 bp, Homo sapiens
  chrX:129154947-129155125
  hyper
acctctccacagtgccggaagctgcccagtgacccccaggaatccaccaagaaaagccccaggggggcttcagattcaggaaaagagcacaatggagtcaggggaaagcacaagcaccggaagccgacaaagccggagtcccagtctccaggaaaacgagccgacagccacgaggaag

SEQ ID NO: 13668 - DNA, 82 bp, Homo sapiens
  chrX:129156870-129156952
  hyper
ggttccttggaaaagaaagcaaagagcagtttccgtgactttattcctgtggttctgagcacccgcacgcgcagtcagtctg

SEQ ID NO: 13669 - DNA, 393 bp, Homo sapiens
  chrX:129158961-129159354
  hyper
caggaagcatctgtagctcctttgctggcatggcagacagtgacatgggaagccaggaagtcttccccacagaagaagaagaggaggtaacccccaccccagctaagcgtcgaaaggtgagaaagacccaacgggacacccagtatcgcagccaccatgcccaggacaagtctctgctgagccagggccgaaggcacctgtggcgagcccgagaaatgccctggaggacagaggctgcccggcaaatgtgggacaccaatgaggaggaggaggaagaagaggaggagggcctgctgaagaggaagaaacgaagacggcagaagagccgaaaatatcagactggggagtacctgacagagcaagaagacgagcagcggcggaaagggagagcag

SEQ ID NO: 13670 - DNA, 228 bp, Homo sapiens
  chrX:129162608-129162836
  hyper
gatttaaaggcccgtaagcagaagacttcctcctcccaaagtttggagcaccgcctcaggaacaggaaccttctcttgcccaacaaagtccaggggatctcggattcaccaaacggtttcctcccaaataacctggaagagccagcctgccttgaaaattcagaaaagccatcaggaaaacgaaagtgcaagaccaagcacatggcaaccgtctcagaagaggcaaag

SEQ ID NO: 13671 - DNA, 223 bp, Homo sapiens
  chrX:129168428-129168651
  hyper
gggcaaaggtcgttggagccagcagaagacacgatctcccaaatctcccaccccagtgaaacccacagaaccatgtacaccctctaagtcccgaagtgccagctcagaggaggcctcagagtcacctacagcccggcagatccccccagaggcacgtcggctcatagtgaacaaaaatgctggtgagaccctcctgcagagggcggcgcgtcttggctataag

SEQ ID NO: 13672 - DNA, 168 bp, Homo sapiens
  chrX:129171340-129171508
  hyper
ggatgttgttctctactgcctccagaaagacagtgaagatgtgaatcaccgtgacaatgctggctacacagccctgcatgaggcttgttcccggggctggaccgacatcctgaacatcctgctggagcacggggccaacgtgaactgcagtgcgcaggacggcacgag

SEQ ID NO: 13673 - DNA, 149 bp, Homo sapiens
  chrX:129173110-129173259
  hyper
ggccagttcatgatgcggtggtcaatgacaacctggagaccatctggctcctgctgtcctatggggccgatcccacactggctacctactcgggtcagacagccatgaagctggccagcagcgacaccatgaagcgctttctcagtggt

SEQ ID NO: 13674 - DNA, 79 bp, Homo sapiens
  chrX:129184690-129184769
  hyper
gatcacctctcggatcttcagggccgggcagagggtgatcccggtgtatcctgggatttttacagcagttctgtgttgg

SEQ ID NO: 13675 - DNA, 158 bp, Homo sapiens
  chrX:129185833-129185991
  hyper
gaggaaaaagacgggtttgcctgtgacctcctacataatcctcctgggagctcagatcaagaaggagacgatccgatggaggaggatgatttcatgtttgaactctcagacaagcctcttctcccttgctacaacctccaagtgtcagtgtcccgcgg

SEQ ID NO: 13676 - DNA, 2231 bp, Homo sapiens
  chrX:129189827-129192058
  hyper
ggccctgcaactggttcctcttttccgatgtcttgaagaggctgaagctttcctcgaggatctttcaggcccggttcccgcactttgaaatcaccaccatgcccaaggccgagttctacaggcaggtggcctccagtcagctgctgacccctgccgagaggcctggaggcttggacgacagatcccccccaggctcctctgagactgtggagctggtgcggtacgagccagacctacttcggctcctagggtccgaggtggaattccagtcttgcaacagttgaccgggaaaacagcccctcctcttctttctccttccgagttcgcccttcccccacctccttgtctttccccgaccgagcaccagactgcagaatgaggcaataatacggaccaacaagaagccgccttatcaatgccagcattagcgactggactgtttttgtttttttggttacaattagttctcatctccctgtcgtcgtcattgttatcgtggttgctgatgggggtggaaagttgaactccatgtctgaggacaagaggtcccgggggtggtgggaggtggcgccggggtcccttggactggcctccttgttcatgaccaagaccaaacctgggccctggatggccttggcctgtcccgaggagaaatgagaaaatcccagatctctgagcgccccccaactccattcccctgtgttcttctgtcttctgtagtatttattttattagtatttaatttgtattgtttcattggtttctgataagtctgtatcactgtgacgatttgagacaacttgttgtattgagggactttctgtacctccttttctttttctttgttgatgagctctgacaaagctattccctggtgtttttttcccccactggggagggggtgaggtggaatggggtgggggaacatggacttgtgactaacgaagctggttgctgctggcccagggctgggggcttgggggtaaatcctgaggctttggtgctcccccacccacccattcccgccctttgcagcagccccgctatcttgagattagtgttgacagggaggggaggattgtgaggtgaggggttaataagttactctaataaaggagcgtggagaagggatctgaggggtgagggtggcccccctcctcacgccttcttcactgcccccctcagagtgcacaatacgagtttgttcctgcctccactctcccaccccgttctggcctccctgtctcaagatactgagcctctcacctcccagccctcagccacccccatccctgccccttctgagactcacagcacccctttccttcctctcctcccacctcctccctcagcccctcattctccttgggaatctgcagagggctctgggactcactgccggatgtgaaatccaggcgtcagctgtttcctaggcaagggcaggaaagtggtctccagcccttgctccactcatgcctgggggcctggggctgagtggtatccctacctggcctccccctggcctctgggcctccagcgctgggtttgtcgagtgagagagagagaggagcttgggttgcttccctgtccccgccccctctgtggcattgtccctcccactcttatttttctaccaattgctatttttccgaacaatccttgtagagtatgtaccatccaaaggcaggagggcctcgccgtggccggctctggttggagatggtacagttttattgtacaggtgctaaaacaacaacaacaaaaaagaaaatggaaaaaaaaaagattaaaaaaaaaaggaaaaaaaaaaagccagtttgaggatgggacaatctgttctctagaggctcctgagccatgcgggagcattggtggttattttctttgtattgtgtttgttctttgttcctgggggggaagttctcggcccccttctgtaggactgctccccacccccaccatactgcccagttggttttgaacagttgttttccctttttaagaaaaaaaaatacatatatatatacatatatatatataaagttgaggggttttggactttaatttgttggttttgttggggttcctggtattgtgtagtttatttcatgttctgtttgcctttccttttttcgcatttgggtgtatattctggctgccctttatgtttcattttaagcaactggctgtggagtcaaaaacacttgcatactgaaaaacctgtgtcaggg

SEQ ID NO: 13677 - DNA, 52 bp, Homo sapiens
  chrX:130110129-130110181
  hyper
atatacaaacaggaaacgctgcgtgctatattcccgtcgagagtccaatata

SEQ ID NO: 13678 - DNA, 157 bp, Homo sapiens
  chrX:133507340-133507497
  hyper
taagggcgctccgcgagcccgtctctcctcgaatgaaaggaaacaacctccggcgacagagccccgctctcaggcactgctggagaaccgagaccgacttctttctctttaccctcattggcgcttctctcctgcagtccgcctctgggccctgccg

SEQ ID NO: 13679 - DNA, 185 bp, Homo sapiens
  chrX:133511600-133511785
  hyper
gcatttcttgagacttaaagtggcattctaaaggcaatttaaaaatcatgtcaagctcagttgaacagaaaaaagggcctacaagacagcgcaaatgtggcttttgtaagtcaaatagagacaaggaatgtggacagttactaatatctgaaaaccagaaggtggcagcgcaccataagtgcatg

SEQ ID NO: 13680 - DNA, 103 bp, Homo sapiens
  chrX:133512033-133512136
  hyper
gctcttttcatctgctttggtatcatcacactctgataatgaaagtcttggtggattttctattgaagatgtccaaaaggaaattaaaagaggcacgaagctg

SEQ ID NO: 13681 - DNA, 135 bp, Homo sapiens
  chrX:133527529-133527664
  hyper
gatgtgttctttgtgccattgtcctggagcaacaattggttgtgatgtgaaaacatgtcacaggacataccactaccactgtgcattgcatgataaagctcaaatacgagagaaaccttcacaaggaatttacat

SEQ ID NO: 13682 - DNA, 45 bp, Homo sapiens
  chrX:133527937-133527982
  hyper
gggtctattgccgaaaacacaagaaaactgcacataactccgaag

SEQ ID NO: 13683 - DNA, 480 bp, Homo sapiens
  chrX:133547516-133547996
  hyper
gcagctgatttagaagaaagttttaatgaacatgaactggagccctcatcacctaaaagtaaaaagaaaagtcgcaaaggaaggccaagaaaaactaattttaaagggctgtcagaagataccaggtccacatcctcccatggaacagatgaaatggaaagtagttcctatgtaagtaaaaaaaactgttggattcttacttttgttgcaccatgaatatttcatttaaactatctataggtaaagttcatcatttgaaatgttaagtaagcttgaaataccgatagcatattttcatgattttttttaagttcgttttttcttttacatttgcagagagataggtctccacacagaagcagccctagtgacaccaggcctaaatgtggattttgccatgtaggggaggaagaaaatgaagcacgaggaaaactgcatatatttaatgccaagaaggcagctgcccattataagtgcatg

SEQ ID NO: 13684 - DNA, 278 bp, Homo sapiens
  chrX:133549044-133549322
  hyper
gttgttttcttctggcacagtccagctcacaacaacatcaagagcagaatttggagactttgatattaaaactgtacttcaggagattaaacgaggaaaaagaatggtctgtagtttttatatttgttatgcaacattacacttgatttgctgctttaaatttagagtacatcccaaatttatccagtcatcagaaaatttaaagtagttcgtatgttaaagcaaagtatatatttgacttatttgtaatataataaaggatgctgatgttactgaaa

SEQ ID NO: 13685 - DNA, 135 bp, Homo sapiens
  chrX:133551197-133551332
  hyper
gaaatgtacactttgcagtcagcctggtgctactattggatgtgaaataaaagcctgtgttaagacttaccattaccactgtggagtacaagacaaagctaaatacattgaaaatatgtcacgaggaatttacaa

SEQ ID NO: 13686 - DNA, 131 bp, Homo sapiens
  chrX:133559229-133559360
  hyper
gactatactgtaaaaatcatagtggaaatgatgagagagatgaagaagatgaggaacgagagagtaaaagccgaggaaaagtagaaattgatcagcaacaactaactcagcagcaacttaatggaaactag

SEQ ID NO: 13687 - DNA, 3133 bp, Homo sapiens
  chrX:133559689-133562822
  hyper
ggttcatgggacagagttagaaaactgggaatgaataagacatccataactactattcttttttcactgttttctaaaatcaaaaagggtttgtaactttttactgcccaactcttagatccttcattgaactgcctaaaaatgtcttgtttgttttatgagccctcactagaaggctgagtttgacatgttgatattacgtagctatagtttgcagtttctgggaagcaattgaaacactattaaccctgtgtatagtgtcaacagttaaagcagacgaaacgaagtaagctatatttctggactgaacaaagctctgctgtttagagcatttaagtttgtttagtggatccatactcaaaggaaagcataagcaaattttcctttacaatgcaaacatgccactggtggcagcacatggtaatttgtggatttttttttcatactcaagtaatggaggctagaaatgaagagaaccttctttttctcttgactttgacagcacatgctaaaaatctcttccaagaagtatgctaaagcttttcatttggttcctgttaaagttgttctcactgaccagcatggactcaggcaactggtaatgataagctatgagctccagtgcttttgccaaaattctcttgacagcacacctcctctctttccatgttatacaaaggacttctggcaaaatgattgagtccttcaagtttaaactaacatttggcaacagcaaattaaacgtttttaagatgtaaagaaagggttaccgcttgctaaggacttcagacaccatgtccgaaacctgttcctctcaagtgccctgttgtgtggaacacttcacatattggcgcacagtacgtaaggaggtctcatgtgctgtaggagtaaaaaagtctttgcataaaacagtatttatttttacttttgtgaccactattttagaaactttatttaatattttaatgttttcagtcattgctttggttatctataaaataggcttttgtgccctacttttcttcttgtagggcttggtggtgttttatcgattgtcagaattgtttttgaaagcctaagaacccagctttttagaaaggattttcacactggcatttctaggtagtgatattttcttccacttacctgctgaagcacatttatgcatttctttatggcaaaaccaaataactttagttgtggtctgcctgatactaccatagcacctcagtaccaaggggagggattttgactagttgaattattaagccaccacaataaagcagatttttaaataagaaataataatgttaacttgactgtacattgagatattctgcagctgatagagcagcattttaaaaatgtaacaggtggaaaattacactgtgcttaatgactgatttttttttaaactgcgagtcccttaagatcacgtttgtcaagtgtgtattcacacatttacttaaatcaagggactcaatgcttgcttttattttaaccatcttttactatttttagaaggaaactagctttagtagtgggttgccctgtatgttttctctttttgctcttaatatgccattgggtttttgtgtgtatgtgattttcaaaattcatgacttgaagtgcaaggacagatctagatgtttgtttaccaagctatgtgacttctcccaaaggatctgtactttctttccttacaacagcttgaaaatcattattttaaaatccttaaatcactgtgtctagatcattttttacattgtgtgccatagacttacccatgggacaacagagctccttcatttttggacaactactgtaatcattttttttttaggaaaaatggaaggtgccgggggtaatcatggccagtcaataattatataaaggagttcaaatactatagctgtcagttgatgaatttgttatgtagtaaaatgtatgactttgtatgggtttcttcagccctttttctgccactagcaaccagaatagcactttaccttttggttggctagataagtggctgactacctgtttttctcactgtggtgtgattggctaaacaatctcgcattaaaaattcaaatgtaaattgaattcacatgaaaaatcatgtttggttgtaaacctccaatgttttgattctctaatcatgttttcgtcacatgctgagtaaaagtgccttacaatgtaaaaattgtacagtacttatgttcccaagtagcatcatcatcttctgggtagtaattacattgtggtattaatatttagaaaaatggacctcagcagtgtatttactgtacatctcttaagtccttaactgtagttttaataagcatgacattatttgataagtatataacatttacatcatttcaaaaaatactgccgttactgtcttttatgcatattttagcctgaaattttgaagcgtcttttttctttcttttttctttttttgttttgttttttgttattgatattaaacagtgtaatctttgcaagcgtatattgaagattattctggagcatttattgccttaccagaaatgttagtaggaaatgttctttagagtagaaagatagacttgagtttctatacttttaagaagagctctttgttcctgggggaggggggcagggggtgaattttactttcatctcaagttattaaaaacccacaactgaagtaaattttatttcaagaatcagcagttttagaatttcagatagtacttgctcagaagtacatgctactcaagatattaagagataacaagatctgtagatctgctattgaatcagaatctgtgtacttgaacaaatgtgtgaatctcaaatatctcaaagcaaaagaaaaagtgttctagagtgttgttgcttttttaaaaaaagcgctgaagttagaccaaggtatacagttttgttctaacagacatttaggttaattgtaaagataaggaatgcattatgggtcaaaaatcaaacattcctctcatgttatgtatattttgttcctgttatattggctttattttcaaaattgtagtttgtagtattagtttccttttattggtattcttgcatatactattcattcaataaatgacttatgactttcata

SEQ ID NO: 13688 - DNA, 31 bp, Homo sapiens
  chrX:133913512-133913543
  hyper
ctctcctagacattcacgggtctacagggta

SEQ ID NO: 13689 - DNA, 30 bp, Homo sapiens
  chrX:144475782-144475812
  hyper
aaagggcctccttccaccaggatctttgca

SEQ ID NO: 13690 - DNA, 192 bp, Homo sapiens
  chrY:2802950-2803142
  hyper
ttggctaggactggcgccgagaggcgataggtctcgggagagcctggcgcagggtgtgggagattaggaatcccaggtccaccggagatggcagggggtggcctggcccggtgcggggccgcttgcctgcacgcaaccaactaaggcggtggtgcgcaagtagtggtgacggcgggcgcgcggagaaaagga

SEQ ID NO: 13691 - DNA, 68 bp, Homo sapiens
  chrY:2804267-2804335
  hyper
gctctgtgcccttccgagagtctacagccacccgtttcagcaggtggcaattcgggcatctaggctca

SEQ ID NO: 13692 - DNA, 30 bp, Homo sapiens
  chrY:6777840-6777870
  hyper
ctgagcgtctaacgcgggaggaggagcaag

SEQ ID NO: 13693 - DNA, 84 bp, Homo sapiens
  chrY:6778626-6778710
  hyper
tgcatgctagcggccgctcccagtggtggtcaccgccagtgccaatcccttgcgccgccgtgcagtcccgccctctgtcgctgc

SEQ ID NO: 13694 - DNA, 30 bp, Homo sapiens
  chrY:6778924-6778954
  hyper
ggccgccgcacggccgggcctcacaggctg

SEQ ID NO: 13695 - DNA, 31 bp, Homo sapiens
  chrY:7180425-7180456
  hyper
ttcagtttagaatcatcgtcatcctggggag

SEQ ID NO: 13696 - DNA, 347 bp, Homo sapiens
  chrY:14532862-14533209
  hyper
gcacctctccctccccgcgcgctcccgcagcctctgccttgggcctgcgcctccctccccaagcctctcagctctacgtccccgcccccgtctgtcctccatactgaggcagcctccgtctccccgtgcccactgcgcctggaccacctgtactcctcagcactcggcgcctcggctcggcccacccacccgcaagcgccgctagcctatccctgcgccccgcacccctccccgcctttgcttttgggcaacctctctctgacctccagctcccagcgcctctcgccccacctctgcactccaaggccggcgcccctcccccagcccccagcctctgcctctgggtt

SEQ ID NO: 13697 - DNA, 447 bp, Homo sapiens
  chrY:14533221-14533668
  hyper
cgctgtacgccacccaccctcgagacctcctaggcgttcgggcagcctcagcgccccccggcccccagccgcgcccaggcctcctccactgcatacgatcccctgcaccccgctgcagcccccgcacctcttccggcgccctggctgcctctgcccaaagccggcgctgggggcccggagggcagcgattggcctctgtcctgaagcccggccccgcctccgcccagccctggtaggcgcgggtcagctcctcagccctgcagcccctgcccgcaagcccgcgcgcctcctggtgtccagccccagctaccaaggagagagacccaggaaccgccagtggctgcgctccacgccggcgcccagcccctcgcccaccgcggcccccttggcagttggcggtttctaggtttggacatttaacctttaattggccggccccaaagtaaa

SEQ ID NO: 13698 - DNA, 35 bp, Homo sapiens
  chrY:14774178-14774213
  hyper
ggagggtcgcaggtcgcggcgctggggatggtggg

SEQ ID NO: 13699 - DNA, 30 bp, Homo sapiens
  chrY:14774511-14774541
  hyper
ctggccgaaaaccgcgagaaagaaaagtga

SEQ ID NO: 13700 - DNA, 30 bp, Homo sapiens
  chrY:15017282-15017312
  hyper
gcccctgacgtattcgcagtagtgtcattg

SEQ ID NO: 13701 - DNA, 30 bp, Homo sapiens
  chrY:15591245-15591275
  hyper
gacttgctccttcccgagtccaagagcgac

SEQ ID NO: 13702 - DNA, 114 bp, Homo sapiens
  chrY:15591518-15591632
  hyper
agtgagcgacactgcgcaggatttcatggaaacaacaaatttccaagtcccacgacgatacccaaccttaatcgagtagttgaaaagacgccttcaatcgctgcttgagactgt

SEQ ID NO: 13703 - DNA, 30 bp, Homo sapiens
  chrY:15816346-15816376
  hyper
ggctggaatgcgagcgggcggtgggagggc

SEQ ID NO: 13704 - DNA, 52 bp, Homo sapiens
  chrY:15863329-15863381
  hyper
taggaggggcaggaagcggttggtgcggacggggaggcgactgcgtggggtc

SEQ ID NO: 13705 - DNA, 232 bp, Homo sapiens
  chrY:15863884-15864116
  hyper
ggttagtggagactcccgcccgccccgggttctttctggtgctgcggccgcggcgggagtgcacccgggcgcgagagtgcacccgggcgcgcgccgaccagcctaggcgcgaaaagttttcggccagcgcagcgagctgacctggcttctcctgggcgtggatcttacagtcggggtgcttaaatcgtgttttccagcctcctcccggctcccgatacgaaaaagaagcccg

SEQ ID NO: 13706 - DNA, 30 bp, Homo sapiens
  chrY:16636243-16636273
  hyper
ccgctccttcctcccgcaccatcccatctc

SEQ ID NO: 13707 - DNA, 30 bp, Homo sapiens
  chrY:16636682-16636712
  hyper
gcgctctctgcctgcggttttccaggaggc

SEQ ID NO: 13708 - DNA, 188 bp, Homo sapiens
  chrY:16636969-16637157
  hyper
agcgggagcgggagcgggggcgtcagggcaacccttgcaccccagaggcctgcctaggaccaccctgggaacaaatgtctcgctcggaaaacgaggtgaacccggaggatgtcctacgcatcatacccctccccttcttgagaaggctttttctttttttctttttttttcccggtttccttttctct

SEQ ID NO: 13709 - DNA, 62 bp, Homo sapiens
  chrY:21729022-21729084
  hyper
caggcataggttcccgaggccactttcggctctgtcggcctgaggccgagcccaggatttaa

SEQ ID NO: 13710 - DNA, 30 bp, Homo sapiens
  chrY:21729299-21729329
  hyper
agaagaggcagcggcggtggcgccaagacg

SEQ ID NO: 13711 - DNA, 30 bp, Homo sapiens
  chrY:21729540-21729570
  hyper
gtgctggtcaccaccgtctagggcttactt

SEQ ID NO: 13712 - DNA, 30 bp, Homo sapiens
  chrY:21906959-21906989
  hyper
ctgccaggacaaaccgccggcgatatccgt

SEQ ID NO: 13713 - DNA, 31 bp, Homo sapiens
  AC010098.8_29020-31687:1032-1063
  hyper
ttgccccccagccaccgcggctttttgcccc

SEQ ID NO: 13714 - DNA, 31 bp, Homo sapiens
  AC153808.1_1-20788:7948-7979
  hyper
ctctgaatattgagtacgaagtgctgcagac

SEQ ID NO: 13715 - DNA, 105 bp, Homo sapiens
  AC209420.3_23583-33864:1608-1713
  hyper
attcttgaaatgacatgacaaagtatacagatggagatagattcatggttgccaggggttcgggaagcaagaggcatatatgactgtatacgggtagcatgaagg

SEQ ID NO: 13716 - DNA, 265 bp, Homo sapiens
  AC211344.3_7702-13588:3922-4187
  hyper
acagaactgggacagtaaaggcgtcactgctgcaaccacagggcgccagcctcccgcatccctgagtgctggtgctggagatgccgcctccgccggccaagcgctgctgctgctgctgctgctgctgctcgcatgggccgtgcatgccgctttccgttccaagttgggcaggtgctgctgacagggaagctgagggcgtctgcctgcaccgccgttggcagcttctccaatgcaaggcagacccggcctcctaaggaggggtttc

SEQ ID NO: 13717 - DNA, 541 bp, Homo sapiens
  AC241851.2_88-34049:15062-15603
  hyper
gcttttggcccccggcgccgcggctttttgcggctttttgccgccgcgggtttttcctgccgcggcttcttgcccccaccgcccgggctttttgcgccgcggctttttgctgctatttgtccctgccaccgcggcgttttgcccccgcagccgcggctccttgccccctacgcggcttcctgcctccgccaccgtggctttttatcaccccagccgctttttgaaccccccgccgcgggtttttgccgccgcggcttcttgcccccctcgccgcggctttttacccccacagcggcggctttctgcccctgcctctgagggtttttgcggctttatgtccccgctgtcgtggctttttgccgccgcggcttttggccccctccgccgcggctttttgcggcttttggcacccaacgccgcggctttttggggcttttggtccccgccaccggggcttttttcccccaccgccgcaggtttttcccgcccctgctttttgcccccgccaccgcggcttcttacccccgccaccgcgactttt

SEQ ID NO: 13718 - DNA, 99 bp, Homo sapiens
  AC241851.2_88-34049:15842-15941
  hyper
ccttgcctagacgctggcgccccgggctctgctcctgggccgctgcagcctgcatagagcagcgctgcgctcggccgcgttgggagagaagaaggaggg

SEQ ID NO: 13719 - DNA, 200 bp, Homo sapiens
  AEKP01168736.1_1-4752:1588-1788
  hyper
ctggcattggaggggtgggaacgtggacggcggctgagcggggggcgcgtgcaggtcggagccggcaggtgaggagccagggtctaagctagggcccggggtccaaaggaaaggctttcagatctgagctccgcggctctggcggcggtggagctgggagcccgcggtggccggctggggacgggggcaggagcagaggg

SEQ ID NO: 13720 - DNA, 317 bp, Homo sapiens
  AEKP01168736.1_1-4752:1847-2164
  hyper
acctgggcgggctggccggcgcggctgcgctgaccggggcgctcagctttgtgctcctggcggccgccatcggcacggacttctggtatatcattgacaccgagcggctggagaggactggcccgggggcgcaggacctgctggggtccatcaatcgcagccagcccgagcctctgagctcccactccggcctctggcggacctgccggggtaagggtgcaccccgtggctgggagctgtggctgcgaacgccccctgcgcggtgccctgctcccttgggacctgttgcttggcgcgcactcctcccccaagtccct

SEQ ID NO: 13721 - DNA, 31 bp, Homo sapiens
  AEKP01218621.1_1-6359:538-569
  hyper
tccattcctttccactcgagtcctttccttt

SEQ ID NO: 13722 - DNA, 46 bp, Homo sapiens
  FP325318.4_87426-89530:1057-1103
  hyper
cggaggcaaaaagccgcggcgggcaaaaacccgaggcggcgggcgg

SEQ ID NO: 13723 - DNA, 127 bp, Homo sapiens
  JH636052.4:789298-789425
  hyper
ggcgacggctgccttccgctcgccgccccccggttttcccggctccgaccctatcctctaacccgtttcctgcttcagctgaccacattgttttcctggatgtgtcccgtgccgagcaggctttttc

SEQ ID NO: 13724 - DNA, 31 bp, Homo sapiens
  JH636052.4:790113-790144
  hyper
gggacacagctgggcgcgtccacacccccgc

SEQ ID NO: 13725 - DNA, 31 bp, Homo sapiens
  JH636052.4:3185459-3185490
  hyper
ggaagtttcgtgcgtgcgcccttcctatagc

SEQ ID NO: 13726 - DNA, 108 bp, Homo sapiens
  NW_001838402.2_289580-297926:6068-6176
  hyper
ggtgtcagtaaccaggcgctgcctccagcgccgccccgcccgccgccccgcccgccgcctgcgccaatccccgacgggcccgtcttccagccccgaagcggtcacctc

SEQ ID NO: 13727 - DNA, 30 bp, Homo sapiens; identical to SEQ ID NO: 1
  chr1:569477-569507
  hypo

SEQ ID NO: 13728 - DNA, 31 bp, Homo sapiens
  chr1:714260-714291
  hypo
cgccgcacataagccacgaggaggagcttta

SEQ ID NO: 13729 - DNA, 44 bp, Homo sapiens; identical to SEQ ID NO: 2
  chr1:859756-859800
  hypo

SEQ ID NO: 13730 - DNA, 150 bp, Homo sapiens
  chr1:872319-872469
  hypo
cgcgtgtgcgtgtgccggcatgtctgtgtctggggtcctgtggggtgcacgtgatgggggttgcccggcagctctcacccatggagtcaggacgtgttcgtgcacttccgggctcacaggctctacggggcctcacgtgtcctggacccg

SEQ ID NO: 13731 - DNA, 38 bp, Homo sapiens
  chr1:879360-879398
  hypo
tgcgggccccggagcgagaactcggcacaggagagcag

SEQ ID NO: 13732 - DNA, 30 bp, Homo sapiens
  chr1:892842-892872
  hypo
acaggccccccagccgcggtcttccctgga

SEQ ID NO: 13733 - DNA, 30 bp, Homo sapiens
  chr1:897293-897323
  hypo
actgcctgggtatccggggctttgccgatg

SEQ ID NO: 13734 - DNA, 416 bp, Homo sapiens
  chr1:898451-898867
  hypo
tccactcacgagtcccgtctccacctgccctccccaggcggcgggagcctgtttgccatccacggagactgtgaggcctacgacacgcgcaccgaccgctggcacgtggtggcctccatgtccacgcgccgggcccgggtgggagtggctgcggtggggaaccggctctatgctgtgggcgggtaagcctggaggctggacttgggtcgggtctggcacgtgcccgccaggccagtcttgacctgcagtggcttaattccgctagctatgatgggacctcagacctggctaccgtggagtcctacgaccccgtgactaacacgtggcagccggaggtgtccatgggcacaaggcgaagctgcctgggtgtggccgccttgcatggactcctgtactcggccggcggctatgacggg

SEQ ID NO: 13735 - DNA, 117 bp, Homo sapiens
  chr1:899236-899353
  hypo
gtcctggggccgggacgcctttctgtctctgctgagctgtggctgcggtcctggtgcccacagtgctgaacgctacgaccccctgaccggaacgtggacgtccgtcgctgccatgag

SEQ ID NO: 13736 - DNA, 326 bp, Homo sapiens
  chr1:899642-899968
  hypo
cctgacaccccaccctggagtcggggctgcggcagaggagggatgccagtggcgggtctgcgtccagcccacgccctcgcccccaggtgaacgtgtggtcgcccgtggcgtccatgctgagccgacgcagctcagcgggcgtggccgtgctggagggtgccctgtacgtggcagggggcaacgacggcaccagctgcctcaactcggtagagagatacagtccaaaggctggagcctgggaaagcgtggcgcccatgaatatccgcaggtccgcagtggggctgcggggaggggggcgcgggtccgcagtggggctgtgggagggg

SEQ ID NO: 13737 - DNA, 168 bp, Homo sapiens
  chr1:913605-913773
  hypo
gcccgccccgggaaccgcctgccccagatacatccatcatgggacatgtctgtcctaagatacatttgtgctggacacgtctaccctggacacgtcttcccgaaacccctctgtcatggacacgtcttcctgagaactggttgccccgggaaccgcctgccccgggaa

SEQ ID NO: 13738 - DNA, 56 bp, Homo sapiens
  chr1:914030-914086
  hypo
cacagggcaacggcggcgcagagccaaccccctgaacaacccgggtgcttggactg

SEQ ID NO: 13739 - DNA, 342 bp, Homo sapiens
  chr1:918283-918625
  hypo
caggacaaggcgtcccgccacgcagggccggcctgacttgagctttcacaagtggaatcgcaccctgcatccctttctgcatctgtgtcctcgggcccacgccgtgctctggagacagctgccatgagggccgcgggcgactgcccgggcgggtgaggctgtcctgtgtgaacgtgccacgcggctgtgccgtttcccgtgggtggcgatgtgggtcgtttccagtttgcagctaccacacacggtgcggctgtgaatatctgggaacattcctttcggcgaacctctcacatttccaggacgcttggggtcagcgtcagaaggtgccgccccgttccccag

SEQ ID NO: 13740 - DNA, 96 bp, Homo sapiens; identical to SEQ ID NO: 6
  chr1:935361-935457
  hypo

SEQ ID NO: 13741 - DNA, 31 bp, Homo sapiens; identical to SEQ ID NO: 7
  chr1:935826-935857
  hypo

SEQ ID NO: 13742 - DNA, 386 bp, Homo sapiens
  chr1:942307-942693
  hypo
agcctccctgagagtccagggcgccaagtcagccctgcacctggcccgggcctcggaccccgacggggctcacccacctgagatcaccctggctctgcgggaaggcaggaagctttggcatgatcctccacgggcgaggatcacgtagagacgtgtagagacgcgacgaagcacgaagacccgtgtttgacgggttgccaggtgcctacatcagagctcattaaattacacattaaatagatgcacgtgtgtgtgtcaagctcccctaattcaagttgtagaaaatcagactcagagttcttacactcgggggtgttttagcagctgcgcctcaagattctaaattcaaacgcacacggaataaaacatttcggtttatcgccagg

SEQ ID NO: 13743 - DNA, 320 bp, Homo sapiens; identical to SEQ ID NO: 9
  chr1:955516-955836
  hypo

SEQ ID NO: 13744 - DNA, 30 bp, Homo sapiens
  chr1:980097-980127
  hypo
tacgtccatccggtcgatgtatcacatcaa

SEQ ID NO: 13745 - DNA, 99 bp, Homo sapiens
  chr1:982386-982485
  hypo
cgaggtgctgccccctcgcctgggcagcaggtcagtgccgggggttatggtcttgggactcggccccctcaaacatgtgcgtgccggggaccccacgcc

SEQ ID NO: 13746 - DNA, 305 bp, Homo sapiens
  chr1:984138-984443
  hypo
ctccgtctcaaaaaaaaaaaaaaaaaaaaaagcagggggcggtttcagggataaaagtggggaatcctcggagcttttccagccggccctcccggtcgccctttgcagtgcttggcgcccctgtgccggccttcgagggccgctccttcctggccttccccactctccgcgcctaccacacgctgcgcctggcactggaattccgggcgctggagcctcaggggctgctgctgtacaatggcaacgcccggggcaaggacttcctggcattggcgctgctagatggccgcgtgcagctcaggtgg

SEQ ID NO: 13747 - DNA, 31 bp, Homo sapiens
  chr1:987798-987829
  hypo
gggacatgtagatatgcgtgtgtgactatgc

SEQ ID NO: 13748 - DNA, 137 bp, Homo sapiens
  chr1:988089-988226
  hypo
gtatatgagggagacacgcaggtgtgtgtccgagtgtgtgtgcatgggtccatgtgtgtatagtgtgtgcacatgggtccatgtatgtgtgtgtatatgagggagacacgcaggtgtgtgtccgagtgtgtgtccat

SEQ ID NO: 13749 - DNA, 170 bp, Homo sapiens
  chr1:990669-990839
  hypo
ccctcgctccgtcaggcgggactcgtgtcccagagaggaaggggctgctgaggtctgatggggcccttcctccgggtgaccccacagggcctttccaagcccccatttgagctgctccttcctgtgtgtgctctgggccctgcctcggcctcctgcgccaatactgtgac

SEQ ID NO: 13750 - DNA, 30 bp, Homo sapiens
  chr1:991552-991582
  hypo
ttgtggtgggagcacggacttggagctccc

SEQ ID NO: 13751 - DNA, 30 bp, Homo sapiens
  chr1:1018239-1018269
  hypo
cgccaagtgcgtggcgtggtctcggcctcc

SEQ ID NO: 13752 - DNA, 78 bp, Homo sapiens
  chr1:1019319-1019397
  hypo
cccagcaccactgaagcgatggctgctcaggagggcctggcggaggccggctgcgtctgtcctcgggtggagctggac

SEQ ID NO: 13753 - DNA, 30 bp, Homo sapiens
  chr1:1022515-1022545
  hypo
taccaggatgtggccgcccgggggtccctg

SEQ ID NO: 13754 - DNA, 31 bp, Homo sapiens
  chr1:1047358-1047389
  hypo
tgacatgcatggtagtcgctgcccacctacc

SEQ ID NO: 13755 - DNA, 538 bp, Homo sapiens
  chr1:1047749-1048287
  hypo
tccagtgaacacacggcgcacggtccctccctccagtgaacacaacgcacacgctccctccctccagtgaacacacagcgcatgctccctccttccagtgaacacacggcacatgctacctccctccagtgaacacacggcacatgctccctccctccagtgaacacaacgcgcacgctccctccctccagtgaacacacagcgcatgctccctccccccagtgaatacacggggcatgctccctccctccagtgaacacaccgggcatgctccctccctccagggaacacatggcgcatgctcccgcccaagtactagcaagatgctgcatgggtggacagcccaccctgaagaaggatcaggggagaaggggtgcaagaccccagaagcctgccaggctataaaaccccaagtcaaaaggtgaaaccgcacacctgatctctcacatcgcccgtctggccctcctccaagggtacttcctttccttcctgctctaaagcttcttcaacaactttcactcctgctctaaaacttgcc

SEQ ID NO: 13756 - DNA, 254 bp, Homo sapiens
  chr1:1062953-1063207
  hypo
ggacagagtggggctgagcagcggccacgggaagccaccggccacccagacccccgtcctccccgggtgctgccctgggcctaggtggccaggtctggggggccgataccacgggctacgcccagccccacccggctcctgtgtggtgtcaggggctctggcatgccggcaggccagtgctctcgtgagaggtgggtccccaagccggccccagcgaaactcagttaaaggacgagtctgcttttgggccttat

SEQ ID NO: 13757 - DNA, 164 bp, Homo sapiens
  chr1:1064885-1065049
  hypo
ggccgcctgtgaggcacagagcgaatggggcaccagcctgccctcggcctcagacacggagaggctcccacggcactgagccacgcatggccacgcgacagagggacagaatgccgtggccgtgtaggggagctgcactctgcgtggccctgggatgggaaaat

SEQ ID NO: 13758 - DNA, 244 bp, Homo sapiens
  chr1:1069738-1069982
  hypo
gtaacatccagttccccgagggaccagggggctgcctcaggggggaggggtctcctgcaggcctggcatagtgtggctgtccctacacccagaccctgcacacggccccgcgacacggggaggctgaggcctcgcagggccctgggtgtctccaccagctcctcggggtccgctgtcctgctgaggtgcccgcaggaccctcagtgggatgggcaccagcccttttcagcgttccgccgaacag

SEQ ID NO: 13759 - DNA, 30 bp, Homo sapiens
  chr1:1079156-1079186
  hypo
gagtggggtcccctcggccaggcgggaaag

SEQ ID NO: 13760 - DNA, 241 bp, Homo sapiens
  chr1:1095519-1095760
  hypo
cagacgttgctccaagcgtttcgtctgcgggtggagctttggaactgatggagaaggcagagtcctgaccaggggccgccatcagagcgcagggacggtcgggggggatgcgcagggaggagggaagggaaggaaggaggtgccaagccctccgctcagtggaggtcagtggaggtttgcttcctgctcacactgggcctgattgggtcggagggcacgcgggggccgctgtctgtcctcc

SEQ ID NO: 13761 - DNA, 87 bp, Homo sapiens
  chr1:1102374-1102461
  hypo
cccctgccctccggcgatgctgtcctcagtgccccaggaggacgaggccccccagctactgagcttcccagcgagtcccatgcaacc

SEQ ID NO: 13762 - DNA, 30 bp, Homo sapiens
  chr1:1115714-1115744
  hypo
cacaatgtgagtagcggccctgggcgcccg

SEQ ID NO: 13763 - DNA, 30 bp, Homo sapiens
  chr1:1145603-1145633
  hypo
gtcgcttagacgcccggggtgtcttccctg

SEQ ID NO: 13764 - DNA, 30 bp, Homo sapiens
  chr1:1145833-1145863
  hypo
agctcatctgaacacgccagcactcgcgca

SEQ ID NO: 13765 - DNA, 30 bp, Homo sapiens
  chr1:1146888-1146918
  hypo
gggctccagcctggcggggcccagcgtcca

SEQ ID NO: 13766 - DNA, 262 bp, Homo sapiens
  chr1:1151686-1151948
  hypo
atcctcccaccacctgcgctggccgtggctctgtgaatctcgtttgcctgggaaccagcccaggtgccaacccgccctctcggccccacaggggcccctgggcaggtgggctcagggcagaggccggtcacatgggcaccacagggcagactgaagaggacacactcccggcttccctgagctcccactgggagagccaggacacagcctgggcccccacacgccacagagcaggacccccaccagccgtcctaacacaccc

SEQ ID NO: 13767 - DNA, 30 bp, Homo sapiens
  chr1:1160698-1160728
  hypo
ttgcctctatgctccgctcaggggcagccg

SEQ ID NO: 13768 - DNA, 853 bp, Homo sapiens
  chr1:1168281-1169134
  hypo
ctacctgccctacgcgctgggcggcggctacgtgctctcggccgacctggtgcactacctgcgcctcagccgcgactacctgcgcgcctggcacagcgaggacgtgtctctgggcgcctggctggcgccggtggacgtccagcgggagcacgacccgcgcttcgacaccgaataccggtcccgcggctgcagcaaccagtacctggtgacgcacaagcagagcctggaggacatgctggagaagcacgcgacgctggcgcgcgagggccgcctgtgcaagcgcgaggtgcagctgcgcctgtcctacgtgtacgactggtccgcgccgccctcgcagtgctgccagagaagggagggcatcccctgagccgccgcggcccggccctccgggacacctgcttcacccggcggcgccttggggcaggtgccgagcgggcgcactacgcccgggccccaaggcccccgtcccgcagccacgcttgtggtcgctgcgtcccggtctgcgtttgggagacccctgggggttgccggggcagcgcgccgtgtccaggtggaggtgcccgttcctggacctcagcgagcctgagccgggcccggccgcacgctgacccccgtgctgtccccgaccggctcacggggctgggctccgatcttccgtgtctcttatcagtggcgtttctcacgtctgcgtctcagatctaacgtggtttcacatcaatccgctttcatgggattttggtctctgtccagtgacttcgtggtaaatgtaactcagtgtttgcttgcgacttatttataaatattgtaagtttgtgtcgatgagtgtaagttggcagtgcgcacgtctcggttt

SEQ ID NO: 13769 - DNA, 30 bp, Homo sapiens
  chr1:1170054-1170084
  hypo
gcccaggggctgcccgtcacagcggtgtcc

SEQ ID NO: 13770 - DNA, 131 bp, Homo sapiens
  chr1:1190122-1190253
  hypo
gccagaccagcacccgcggacgccagctccacccctgggccccgaggttcccacccgctgaggagccgggagctccgagaaacgcgccaggagctccaagaacgcaggagcagcccgcggtcggcagcaag

SEQ ID NO: 13771 - DNA, 30 bp, Homo sapiens
  chr1:1190543-1190573
  hypo
ggtgccctcagtggcgccttgggtctcggc

SEQ ID NO: 13772 - DNA, 31 bp, Homo sapiens
  chr1:1218648-1218679
  hypo
gctgggcggctggtcccgagagacactggat

SEQ ID NO: 13773 - DNA, 191 bp, Homo sapiens
  chr1:1221480-1221671
  hypo
accgcctcaagacgacgtcctgggggctgctgtccctgggagccctggtcgcgctctgctggcagctggggctcctctttgagcgtcactggcaccgcccggtcctcatggccgtctctgtgcactcggagcgcaagctgctcccgctggtcaccctgtgtgacgggaacccacgtcggtgagggccaggg

SEQ ID NO: 13774 - DNA, 30 bp, Homo sapiens
  chr1:1234829-1234859
  hypo
gtgactggtggacccgtccccaactcctgg

SEQ ID NO: 13775 - DNA, 334 bp, Homo sapiens
  chr1:1238315-1238649
  hypo
ccacctcctgtaggctgtcagcgaacctctgcagacattcctggaggagcagatgggaacccgtgctgagatggcaaatccgggcccaggtcacccagccacgccctctgagcccctgggcggtgcagacaccggcctgcttctggcctggacgccctcaaggggctgcctccctcggcctctcccccaaccccaccttgaggtcagaggtcagtcggcccctcaccgagatgacggtgtcgccctggcactgctgggacaggtcgcggacgccgctcacgaaaagcctgctggtgctgacgtaggccttaccggcttccaccatgccactgca

SEQ ID NO: 13776 - DNA, 30 bp, Homo sapiens
  chr1:1246399-1246429
  hypo
gtagccccagcccacggcttattcctcaag

SEQ ID NO: 13777 - DNA, 30 bp, Homo sapiens
  chr1:1247914-1247944
  hypo
gggccgctcccagccgcctgccccgagcac

SEQ ID NO: 13778 - DNA, 58 bp, Homo sapiens
  chr1:1253188-1253246
  hypo
ggaaaaaaagtcctttaagaacgaggataaagtaaatccatttgcaggcaaataaatt

SEQ ID NO: 13779 - DNA, 30 bp, Homo sapiens
  chr1:1254213-1254243
  hypo
tttcacctgtcactcgctgatttaaccttc

SEQ ID NO: 13780 - DNA, 664 bp, Homo sapiens
  chr1:1267014-1267678
  hypo
caggttctcctcaaacggcctgctctgggcactggccatgaaaatggccgtggaggagatcaacaacaagtcggatctgctgcccgggctgcgcctgggctacgacctctttgatacgtgctcggagcctgtggtggccatgaagcccagcctcatgttcctggccaaggcaggcagccgcgacatcgccgcctactgcaactacacgcagtaccagccccgtgtgctggctgtcatcgggccccactcgtcagagctcgccatggtcaccggcaagttcttcagcttcttcctcatgccccaggtgggcgccccccaccatcacccacccccacccagccctgcccgtgggagcccctgtgtcaggagatgcctcttggcccttgcaggtcagctacggtgctagcatggagctgctgagcgcccgggagaccttcccctccttcttccgcaccgtgcccagcgaccgtgtgcagctgacggccgccgcggagctgctgcaggagttcggctggaactgggtggccgccctgggcagcgacgacgagtacggccggcagggcctgagcatcttctcggccctggccgcggcacgcggcatctgcatcgcgcacgagggcctggtgccgctgccccgtgccgatgactcgcggctggggaaggt

SEQ ID NO: 13781 - DNA, 123 bp, Homo sapiens
  chr1:1267914-1268037
  hypo
cccagtacgtgaagacgcacctggccctggccaccgacccggccttctgctctgccctgggcgagagggagcagggtctggaggaggacgtggtgggccagcgctgcccgcagtgtgactgca

SEQ ID NO: 13782 - DNA, 30 bp, Homo sapiens
  chr1:1272383-1272413
  hypo
ggaccctggcttaccggcccaaggtccgct

SEQ ID NO: 13783 - DNA, 97 bp, Homo sapiens
  chr1:1273360-1273457
  hypo
actctgctgactcccggtgctgccgctgccatagctaaagcccgggtcctggtaggcaggcgggaagcagggtgggggtcccgggtactggtagggg

SEQ ID NO: 13784 - DNA, 296 bp, Homo sapiens
  chr1:1280836-1281132
  hypo
aggctggccaggcattgggggcgtacccacaacccggggtccccgcgcctctgtagcagcctccgctgaaactcacggcagctgccaggggcgcccctgccggcactgtgcccccaccttgggattccctgtgaggcctggctaacctgtgtgctgcccccacagacccgccccggggaggaatccactcagaggcagcgccctgggagccagcatggccacacaggatgcagagaaccctccagactcccagaggccacagccagctgccctagacgtggcgtggtcccgaatgc

SEQ ID NO: 13785 - DNA, 30 bp, Homo sapiens
  chr1:1377923-1377953
  hypo
acctgaggatttcacgctggctgcgtgcca

SEQ ID NO: 13786 - DNA, 31 bp, Homo sapiens
  chr1:1385741-1385772
  hypo
tggacactttagccatcgcctgactttctgt

SEQ ID NO: 13787 - DNA, 36 bp, Homo sapiens
  chr1:1389844-1389880
  hypo
atcacggtgcttgaggcgctgcggcaccccatccag

SEQ ID NO: 13788 - DNA, 39 bp, Homo sapiens
  chr1:1400494-1400533
  hypo
acatgaggtgatctgcccgcctcagcctcccaaagtgct

SEQ ID NO: 13789 - DNA, 88 bp, Homo sapiens
  chr1:1421577-1421665
  hypo
atgggccaccaggcaccgggaagacgctgtttgccaaggtgagagcgcctggctgaacaggtgggccaggggccgctggggtctcacc

SEQ ID NO: 13790 - DNA, 31 bp, Homo sapiens; identical to SEQ ID NO: 17
  chr1:1434134-1434165
  hypo

SEQ ID NO: 13791 - DNA, 55 bp, Homo sapiens
  chr1:1477083-1477138
  hypo
ggtcattcctaacacgccgcagcagggctctgtacagtccggcccggtggggagg

SEQ ID NO: 13792 - DNA, 210 bp, Homo sapiens
  chr1:1491936-1492146
  hypo
ttcattttgatagcgaatgcttttttggcaaagcacagaggctgcacaaacagaactcaggaacccctcgaaaaggtctcatggccatctctggagctgctgggcacccaactgtaaccgtggcctcaacacagagccacacaaggctcaggccagctctgggggggtccaccatggccttgcgactgcaggcaccgtgaaactactttg

SEQ ID NO: 13793 - DNA, 152 bp, Homo sapiens
  chr1:1492358-1492510
  hypo
gaaatatcttaaggccgtaatttacattttaggcatgaatgattttctaaaacccacgatcagagtttctctgggaatcggcgtctggcttaggaacacattcatttgtttgacaaataccttcccaaaactattttaaaacacagctgctg

SEQ ID NO: 13794 - DNA, 30 bp, Homo sapiens
  chr1:1494626-1494656
  hypo
gcagctaaactggacggtgtggaacgggcg

SEQ ID NO: 13795 - DNA, 30 bp, Homo sapiens
  chr1:1562382-1562412
  hypo
cggcacagctcaggcggccagtgggaggtg

SEQ ID NO: 13796 - DNA, 30 bp, Homo sapiens
  chr1:1563485-1563515
  hypo
aacatcgatgttaccgccaccaacagccag

SEQ ID NO: 13797 - DNA, 194 bp, Homo sapiens
  chr1:1647564-1647758
  hypo
tcaatcaaatcacacccgttcttacttccagatgcagtgaaaactcactccctcaggacagttctcttggtcagcctcgtccagcgttcactgtgctgtttccatgtctaccacttctgcaacaaatgtgacttctattgccaaattcttcttcattgctgtgacaggacacactaccacggccctttcataaa

SEQ ID NO: 13798 - DNA, 30 bp, Homo sapiens
  chr1:1693353-1693383
  hypo
ttccaagaaccccccgtcctggggccccag

SEQ ID NO: 13799 - DNA, 99 bp, Homo sapiens
  chr1:1729267-1729366
  hypo
ggagaccccacccaagggaggcgcacaggacacactgaaaggcaggcgggcaaatgccaagaagtcagccatgaccacgcccagtccctcactagtcct

SEQ ID NO: 13800 - DNA, 57 bp, Homo sapiens; identical to SEQ ID NO: 23
  chr1:1737899-1737956
  hypo

SEQ ID NO: 13801 - DNA, 30 bp, Homo sapiens; identical to SEQ ID NO: 24
  chr1:1747213-1747243
  hypo

SEQ ID NO: 13802 - DNA, 31 bp, Homo sapiens
  chr1:1795941-1795972
  hypo
ggccgacccatcctgccgattaccacctggc

SEQ ID NO: 13803 - DNA, 30 bp, Homo sapiens
  chr1:1848634-1848664
  hypo
gcagctgccgcagccgggggaggcctgccc

SEQ ID NO: 13804 - DNA, 186 bp, Homo sapiens
  chr1:1874727-1874913
  hypo
cgagcagactccaccgcagacacgccaacacacgcagctggctcccgggtcaccgcaggctgcacattcccggcccatgccgggcccacaggagtccgacagcaggaggacaggcgccgcgggagctgttcctacccaggtcaccggggagaggtggctgtgcctggggccggtgcccggggcctc

SEQ ID NO: 13805 - DNA, 30 bp, Homo sapiens
  chr1:1888267-1888297
  hypo
cacagggtgcccagcgtgaggcctgcacgt

SEQ ID NO: 13806 - DNA, 30 bp, Homo sapiens
  chr1:1953094-1953124
  hypo
gtgggtggccctcccgggctgccggcacct

SEQ ID NO: 13807 - DNA, 31 bp, Homo sapiens
  chr1:1979189-1979220
  hypo
gccccccaccttccctcgctgggactggggc

SEQ ID NO: 13808 - DNA, 703 bp, Homo sapiens; identical to SEQ ID NO: 28
  chr1:1981268-1981971
  hypo

SEQ ID NO: 13809 - DNA, 30 bp, Homo sapiens
  chr1:1992217-1992247
  hypo
ggtggttttggcagcgcagggcgagtgtga

SEQ ID NO: 13810 - DNA, 222 bp, Homo sapiens
  chr1:2013459-2013681
  hypo
catattaaagcaggcttgatccgggctgccgtggttccgatcgactccgaataggacaccacacagtcgtgccaagaaggcgcctaagtgtctttccacacggccatccgagggcggacgtggtcaggggtgctggacgcgtcagacgggttctttgcagcccttggcagcgtcgcccgctctgtcccgcctgttgtgtgcgccttttccctgctccagggc

SEQ ID NO: 13811 - DNA, 77 bp, Homo sapiens
  chr1:2013995-2014072
  hypo
gatttgtcactcagtcgatttccctggtgtaaatgctcccaccacggccgatttcaggctgccgaagtggaggggtt

SEQ ID NO: 13812 - DNA, 409 bp, Homo sapiens
  chr1:2016616-2017025
  hypo
tatttaaagggaagacaaagacgtagactgtacggctctctgaaacttcagcaacttttccgagacacgttgtaccatccgccctacctggcgtgggcgtgaagctggtagcacacagaaggtcccggagcaggagctggccccgagccagcagctttgtgccctgtgttaccggatcttcagaatgcgcctccagcctgttgaccatcttactgctcacctgggtccgcagcccgccagataccaggcttgactttactcctggcggggctagggccagaacccagactggttgctgcgcacggtgctttttgccaaacctcacatttgttggttgcgtttttcacaactcttgtcctctgaagatgcctgctcagagcccatgcagcgccacgctggaggggctgag

SEQ ID NO: 13813 - DNA, 30 bp, Homo sapiens
  chr1:2024578-2024608
  hypo
cctgagagacctggcgggagaggaggcaga

SEQ ID NO: 13814 - DNA, 404 bp, Homo sapiens
  chr1:2025754-2026158
  hypo
tgctgtgtggtgcccgtgggcagtggcggaggcagtggccccggctcgttgaaccttgggcactgcccattctgaggcgcccgctgtgcccggctcgttgaaccttgggcgctgcccgttctgaggcacccgctgtgcccggctcgttgaaccttgggcgctgcccgttctgaggcgccctctgtgcccggctcgttgaaccttgggcgctgcccgttctgaggcgccctctgtgcccggctcgatgaaccttgggcgctgcccgttctgaggcgcccgctgtgcccggctcgatgaaccttgggcgctgcccgttctgaggcgcccgctgtgcccggctcgttgaaccttgggcgctgcccgttctgaggcgcccgctgtgcccggctcgttgaaccttgggc

SEQ ID NO: 13815 - DNA, 202 bp, Homo sapiens
  chr1:2039529-2039731
  hypo
gaagtcaggtagcccagggcccgcactctcaatagaccttcagagaaaaggcatcgaggtaaatgccgcactcgagtacccgtgtgatctctgggtggggccatgatccttctgggcgctggtccaagcgcgtggtgaggccgtcctctcctgcagaaccccggcctcttcgcccctgcccgctcacctgttctgtcctgct

SEQ ID NO: 13816 - DNA, 54 bp, Homo sapiens
  chr1:2041086-2041140
  hypo
gggttgcggcagctcacgcccactgcagtgtccggaaggcggtgctaggtccac

SEQ ID NO: 13817 - DNA, 47 bp, Homo sapiens
  chr1:2065456-2065503
  hypo
ggggcacaggctgcacgaccccagcctggcctcgggcttgctgggag

SEQ ID NO: 13818 - DNA, 714 bp, Homo sapiens
  chr1:2065917-2066631
  hypo
gagcaaagtgggacacggtgttgaggaaggacaagaccagccgtctggttacaggcttggtgccgcctttctcataagaggcacagtccgcatgggctggactgtcaaatgcatgttataaagatgatgtttttggtaacttgcgaatggaaacgggtgcacggtcggtttggctctcctgccctgagatttattaggttaaaggaaactcgactggagagcccggggcctcgcgccgcttgcgtctggcgagttgttgaagtgaagtcagtggcgctctgcaccttagcctggcccaggctccactgtggcgtccactcttcctcctctgacagtcatgtgtaaatattgaggcccgtttgaactatccctgtgcggaaaaaaaggcctgtttttcacagggctgcctggggaggaggggggtggaaaggaaaacaggcaggggacagacggacccggcctgcgttggcctggggtgacttcacggctccactgtcagcaagcggccgtcccgtggtggatcctgtccgccctgcgaggacacctggctccatccacacctgggcctctgtctccagccgccgaggccgtgacaccatgaggatcatgtgaggaggggcagagagaggcctccgggaggccgtcattccagccctgccttccctgcctgggaggacgctgcggccgccaccacctggacgggagtggcctgtc

SEQ ID NO: 13819 - DNA, 31 bp, Homo sapiens
  chr1:2103459-2103490
  hypo
ggcactgcccccatgacggcatccccacccc

SEQ ID NO: 13820 - DNA, 31 bp, Homo sapiens
  chr1:2111393-2111424
  hypo
ggctgggtctgggcagcgggtgggagcagga

SEQ ID NO: 13821 - DNA, 90 bp, Homo sapiens
  chr1:2116558-2116648
  hypo
acgcttgcgccgagaccgcagagggaagcgtcagcgggcgctgctgggagcagaacagtccctcacacctgggcccgggcaggccagctt

SEQ ID NO: 13822 - DNA, 31 bp, Homo sapiens
  chr1:2116950-2116981
  hypo
acctgtggggacacaccgcaatcaagaattg

SEQ ID NO: 13823 - DNA, 34 bp, Homo sapiens
  chr1:2121713-2121747
  hypo
agaaggacgccgtcaccggcgtgcaggctgccaa

SEQ ID NO: 13824 - DNA, 198 bp, Homo sapiens
  chr1:2125160-2125358
  hypo
ggccctgcagggatcaggtgccgggcgctggggcagggacctggcgggggattccaggtgccctcctgccccgtgaagcagccggtaggaacggcccgggccccacaggtccggcggaaagggtgtccaggaaaaggtcttgggtccgacagtgaagacttcagtgggctccgggccgcacctgggctcctgcaacac

SEQ ID NO: 13825 - DNA, 381 bp, Homo sapiens
  chr1:2132533-2132914
  hypo
gcatcccctgtgcagccggctgtgaactgtgggctccaaccctgcttggtttgcttcaactttctgagtgacgtgcagaccttcacagaggagccgtggggtggctccatccaacgcctccctcgctgcccctgtgttggaaaataaggacagtgggtggcctgggccctgcgcatcctccagagggtcagggacacgcacggtgagcgacctctgtaggctcgaaggcacagcctggaaggactgggacacccgtgggcagggagcaagaaggcaccgccgggggcttaggtcttctttgttcatctggtagaattgctgacttttagagaaagggacctgaggctgggcacggtggctcacacctgtcaaatctcagca

SEQ ID NO: 13826 - DNA, 249 bp, Homo sapiens
  chr1:2141558-2141807
  hypo
tttgggggctctggagatgggcggctcacctgcctgcctcgtgcccagacctgcgagtgtgcctgcccgtgtcagacagaggcgagttgggacttcacacctgaaatcaagcgggagggtaggaatgtgagcctcgaaaccaccttctttctgtatcgtttctgggagtggcgatgtcggccagtgggacacctgctgagggtcctcttttcccatccgggtgctggcgggacagggggtggctgtgac

SEQ ID NO: 13827 - DNA, 30 bp, Homo sapiens
  chr1:2142519-2142549
  hypo
gcccttgggcaccacggcgggtgcctagca

SEQ ID NO: 13828 - DNA, 128 bp, Homo sapiens
  chr1:2167222-2167350
  hypo
accagatggactgagcacctgcgttggccatggcccggaggtggcgtggtggtgcctggcgcctgtggccctcagcatgtgtcctgccggccgcctagtaggccttcgcttgaagtgcttattccttt

SEQ ID NO: 13829 - DNA, 30 bp, Homo sapiens
  chr1:2170941-2170971
  hypo
ggtgtagccgttggcggcacctttgtacgg

SEQ ID NO: 13830 - DNA, 497 bp, Homo sapiens
  chr1:2190966-2191463
  hypo
ctgtgtagttattttttaaaacggctttttgaggcataattaacataagctgcgtatatttaaagatacagttagataacttttgatgtatgcaaacacatataaaacatgtataaaaccctcgctgccgtccagatgatgaacctgtccgtcacccagaagctctctcctacccacacccctttctccccaggctgcagcagtctgcttttgggcctgtagattcgttgccttccttagagctttgtctaaatgaaatcctacaatatgttcttcttttggtctggcttccttccctcagcgtcattattttgggctccttggatgcgtggcgtgtgctgggcagtgttcccctgcgtggatgtcgcgtttgttcctccatttgcccgttggagcgtgtggagtgtttccagttcttgactgtcacaaagaaagcggctgtgaacattcgggtacaagttgttgtcgggatacacggttttatttccctggataga

SEQ ID NO: 13831 - DNA, 30 bp, Homo sapiens
  chr1:2193726-2193756
  hypo
tggatgggagtggtcggagtggacaccctc

SEQ ID NO: 13832 - DNA, 44 bp, Homo sapiens
  chr1:2218616-2218660
  hypo
tggaccctgggccgtgcggggctccagggcgcctggagactgcc

SEQ ID NO: 13833 - DNA, 30 bp, Homo sapiens
  chr1:2228304-2228334
  hypo
ctcggctctacagacggttcagtccgggaa

SEQ ID NO: 13834 - DNA, 30 bp, Homo sapiens
  chr1:2237784-2237814
  hypo
gcagaagccaggcccgggaccacgttccgt

SEQ ID NO: 13835 - DNA, 30 bp, Homo sapiens
  chr1:2238030-2238060
  hypo
gtgaagctgcagcacgcggaggcggaccgg

SEQ ID NO: 13836 - DNA, 30 bp, Homo sapiens
  chr1:2239050-2239080
  hypo
ttcagttcggcaaacgtcgctcccttcatt

SEQ ID NO: 13837 - DNA, 30 bp, Homo sapiens
  chr1:2239631-2239661
  hypo
cgttctaacacccgcggcagctgcacgcgc

SEQ ID NO: 13838 - DNA, 30 bp, Homo sapiens
  chr1:2240176-2240206
  hypo
cccatccccagggccgccaggcttgctccg

SEQ ID NO: 13839 - DNA, 31 bp, Homo sapiens
  chr1:2241012-2241043
  hypo
aaaaatgctttcctgccggggggcaggggag

SEQ ID NO: 13840 - DNA, 30 bp, Homo sapiens
  chr1:2251555-2251585
  hypo
tgcactgctgtgaacgcagctcctctgtcc

SEQ ID NO: 13841 - DNA, 30 bp, Homo sapiens
  chr1:2252980-2253010
  hypo
cggggtggtcacgtcgcggatcatgagcac

SEQ ID NO: 13842 - DNA, 205 bp, Homo sapiens
  chr1:2254567-2254772
  hypo
tgggatggctgggacgcggtggaccggttgatggtgtgagggctgctgtgggaccacgggggacaccgcgtggcactccagccgctcccgtcaccaaggcctcactggctacagccccggccacacgggtgccgtccccacgaccagggtggctctgcttgttctcccgctgcgccagaggcagctccacggtggcatccagacc

SEQ ID NO: 13843 - DNA, 30 bp, Homo sapiens
  chr1:2258138-2258168
  hypo
ggccccagtaagtccgcaccaccccggcgc

SEQ ID NO: 13844 - DNA, 83 bp, Homo sapiens
  chr1:2259050-2259133
  hypo
ccagaggctgtggacggctgcgagtggcccgtgcggcttttagaagcacagacaggagatggggtggacgaggcggcacaggg

SEQ ID NO: 13845 - DNA, 120 bp, Homo sapiens
  chr1:2266123-2266243
  hypo
ctccgcggccaggtcgtcctgggattgaaacaatcctagtccaacgacacttaactcgaggacagtgcgagccctttggctgggaggcccaggctgggagcagacgccgacccctccgtt

SEQ ID NO: 13846 - DNA, 30 bp, Homo sapiens
  chr1:2267211-2267241
  hypo
gagggctggtgggacgggtccccagggcac

SEQ ID NO: 13847 - DNA, 31 bp, Homo sapiens
  chr1:2267946-2267977
  hypo
cccctggggtgcaggccgcctctggatctgc

SEQ ID NO: 13848 - DNA, 60 bp, Homo sapiens
  chr1:2269855-2269915
  hypo
caccgatggtttccacgtggactgcactggagctaacttggactgcgtcttttatcgaca

SEQ ID NO: 13849 - DNA, 30 bp, Homo sapiens
  chr1:2270533-2270563
  hypo
gaagaggaggccctccgggttggccaagac

SEQ ID NO: 13850 - DNA, 31 bp, Homo sapiens
  chr1:2270929-2270960
  hypo
agttgggggtcagcctcgttgcccctgcacc

SEQ ID NO: 13851 - DNA, 31 bp, Homo sapiens
  chr1:2273548-2273579
  hypo
gcaagataaaggtcaccgtacgacctcgggg

SEQ ID NO: 13852 - DNA, 30 bp, Homo sapiens
  chr1:2275957-2275987
  hypo
ccaggagcggggaccgcacagacggcagtt

SEQ ID NO: 13853 - DNA, 450 bp, Homo sapiens
  chr1:2276266-2276716
  hypo
cagcagcaaatgccaagtccccgaatgcagaattctgccagagggagcatgaccgtctctctgttggcacaaagcgagagcatcaaagacagcgtcagcccccgcgagggtccacgcatgctcacactctgcgctcatggatggccacacacaccctgaaaacggcgtcagcctccgggagggtccacgcgtgctcacagcactcatagatgaccatatgtgccccgaagacagtgtcagcctccaggagggtccacgcgtgctcacgctctacgctcatggatggccacatgtgccccgaagacaacgtcagcccccgcgagggtccacgtgtgctcacctgcgctcatggatggccacatgtgcccgcaccctcgcacaggcatgggcggtccccaggctgccacactcagggtctgtctgtgccccggcacctccaagccattcctt

SEQ ID NO: 13854 - DNA, 38 bp, Homo sapiens
  chr1:2283081-2283119
  hypo
tagaagcggaggggcccgaaacccgcttttcttcacgt

SEQ ID NO: 13855 - DNA, 30 bp, Homo sapiens
  chr1:2284164-2284194
  hypo
ctcggaagggacttcggcgggcaggtaccc

SEQ ID NO: 13856 - DNA, 55 bp, Homo sapiens
  chr1:2288356-2288411
  hypo
ggctggggggttctgccggagcacctgggcctcatctccacgaagaaacgtgagg

SEQ ID NO: 13857 - DNA, 141 bp, Homo sapiens
  chr1:2304249-2304390
  hypo
gagcactgtggaatcgaaccaagtggaccaccggggccacggagcatgcaagagacacaagtgggcggtgtggggctgttgggttttcctgcccgtggaatgttcccgcacgtcttcccgctggtcgggatttaggccctg

SEQ ID NO: 13858 - DNA, 39 bp, Homo sapiens
  chr1:2329737-2329776
  hypo
tagccctcacatctggcgttcagccgtctgactggaaaa

SEQ ID NO: 13859 - DNA, 202 bp, Homo sapiens
  chr1:2331317-2331519
  hypo
gaggttaccttttcccgtagccagagggttccacaggcagctcactgtggtgcacagagaccgccgggactctaatgccagcatcgggtcgggtcaggctttgggcggccttctctggtttctgaggagctgtgagctgaagtgttcctggtgcttcgtgctccactattggaagacttacgcagctcctgggcctgcctgg

SEQ ID NO: 13860 - DNA, 38 bp, Homo sapiens
  chr1:2331921-2331959
  hypo
gggttccacggtcagcgcatcctcggccccgccctgtt

SEQ ID NO: 13861 - DNA, 219 bp, Homo sapiens
  chr1:2334770-2334989
  hypo
tcaagtgtttctcacggatggaattctagtcagctgcaggcgggaagccaggcgggtggagcccatgggagcaagggcgagtggccggtccccgctgtgccaggtgggcaggcaggagcaaggcctgcgagggaggaacgggccgctccccgccagccgccttccccagcagccgcaggtggtgccagccactccacagagcccgagggatgatctagc

SEQ ID NO: 13862 - DNA, 250 bp, Homo sapiens
  chr1:2336019-2336269
  hypo
cccccgccctcctccgtctctggcaagctgaccttgactaacccaggaatacagggtcatcctcattcctaagtaagtcaaacagcaagacatggtttgcgcgggtctttgccggaagccggtcctgctggccaggtgttttacgtcagcagggaaatgtggcacacgccctcgaggcattttaacactgcgcttcaggaaatctcaagttccatcttgtgttagtaacgtacccacattttgctggagt

SEQ ID NO: 13863 - DNA, 30 bp, Homo sapiens
  chr1:2337319-2337349
  hypo
atgcccatccccatcggcatttcttttcct

SEQ ID NO: 13864 - DNA, 47 bp, Homo sapiens
  chr1:2341159-2341206
  hypo
ttctcagggcctttcccggctgcttgctctgccggtctggaaaatgc

SEQ ID NO: 13865 - DNA, 177 bp, Homo sapiens
  chr1:2359912-2360089
  hypo
tgcatggggtcctgcgtctggctcgcccggtgccgtgctgtggggcccacgccaacggctgacctcatggtcctccgtggcctcgcctaggcttgcggcagccgacgtggcgttgttgcctaattaggttggactgtgccagccccagcggagcccacgcccggcccttgcgccggc

SEQ ID NO: 13866 - DNA, 765 bp, Homo sapiens; identical to SEQ ID NO: 32
  chr1:2374845-2375610
  hypo

SEQ ID NO: 13867 - DNA, 30 bp, Homo sapiens
  chr1:2411363-2411393
  hypo
gccggcatcagcgacgaggacagcctggct

SEQ ID NO: 13868 - DNA, 23 bp, Homo sapiens
  chr1:2412420-2412443
  hypo
caggccctggggtctctgacacg

SEQ ID NO: 13869 - DNA, 36 bp, Homo sapiens
  chr1:2412562-2412598
  hypo
cctgacagctccgccgtgtccagcccctgccagctc

SEQ ID NO: 13870 - DNA, 30 bp, Homo sapiens
  chr1:2430042-2430072
  hypo
agcttcccaagccgcgcgactccatgctgg

SEQ ID NO: 13871 - DNA, 30 bp, Homo sapiens
  chr1:2440006-2440036
  hypo
acggtgctgcgtcccgtcagacatacctgt

SEQ ID NO: 13872 - DNA, 362 bp, Homo sapiens
  chr1:2450393-2450755
  hypo
aactcaggtggccacggtgccacaaaatgtaggctgcccagaatcagtcagaagggaggggtgctgggcttcttggcccccaccctccaggcctccctgggggtgctgcggtgtctaaccagcatgactgattgggaagatcctggggggtctgcgttagaggctggggagggcggcgcatccgttaccttggagaagaagttgatgctataggtgatggtgcgcatggtcacggggtggccccggataaagaagcctccaaagtacacgcggtccaggctgtgcagccgtgcgtggaggcaggccagctgcccaatgtcgttgctgatcatgtgcagcaggctcttcgccatgtcttcttt

SEQ ID NO: 13873 - DNA, 782 bp, Homo sapiens; identical to SEQ ID NO: 35
  chr1:2460746-2461528
  hypo

SEQ ID NO: 13874 - DNA, 144 bp, Homo sapiens; identical to SEQ ID NO: 36
  chr1:2461950-2462094
  hypo

SEQ ID NO: 13875 - DNA, 178 bp, Homo sapiens
  chr1:2463121-2463299
  hypo
tcggcagtgacccccggctctgagtgactcgcttggtgggcctagctccaggaggtcctcagcacaaggatggacggtccagggggcagccaggacagtgctgggacagcaggggaagacaggacttcaagccaatgcagggtggctctcccacaggccagccggacaccattgtgaa

SEQ ID NO: 13876 - DNA, 30 bp, Homo sapiens
  chr1:2471717-2471747
  hypo
gtgaggctggcacccgagaggccactgggg

SEQ ID NO: 13877 - DNA, 31 bp, Homo sapiens; identical to SEQ ID NO: 39
  chr1:2477831-2477862
  hypo

SEQ ID NO: 13878 - DNA, 177 bp, Homo sapiens
  chr1:2483771-2483948
  hypo
tgcaatgatgtaaacgcttagtattgtcctggaacctgcctccgaaaaggccgtgcgctcccgcctgggatcctgctgctcctccgccggccgccccgcacacgctccgctgcctctctgggctggctcagccgttgcatgttcctgcgtgtgcactgagacgtccaccctggcacg

SEQ ID NO: 13879 - DNA, 30 bp, Homo sapiens
  chr1:2522315-2522345
  hypo
ttggcatggttggccggggcgggacgtaca

SEQ ID NO: 13880 - DNA, 85 bp, Homo sapiens
  chr1:2537704-2537789
  hypo
ggagttctggtcgtcgttccagatgaagaggtcgatgaggacgcgcctgttgaactgtgagttcatcagcgccagctgccgctcc

SEQ ID NO: 13881 - DNA, 761 bp, Homo sapiens
  chr1:2716538-2717299
  hypo
aaccatgtggggagggagtggcgggggcagctttcaccctggctctgcaggggccatgccgtcctcctaccttggggttcgctgccggtgggatgggcctcgagggcccggctgcatgctgccaggcagtcctcaaacctgccgctgtggagcagagcttcaggtgacagggtgtcactccgggtgcccctggggtccagagccgccaggagtcgctggccaccggtctcctgctggccggcactgtgcccagcctccgggtgccccgagaggtagtcctggagggcactgagcagcgcggggaggtggggccgctggtgggtgcgaatgaaagctaccgtccggtcggcgctggaggcgaaggcctggagataggcggccacaccatccgctgcctgcaccccggacaggacccaggcgagggcgcgggtcagccgcagctccaggacttgctgtgcatgagagtccagcagggcgctgcagcgttgcaccacttcttcgtgacgcccgcgggccagcagacctgccagcaggtgcaggatggcggcggggtggtccgggcagagggcgccgaggaaggcagaggccagcgaccctgtcagggagaccactgccatgccgtcccagtggatggcggggatctggctgtccccgcggcaccaggactccagggtggccaccaccgccgccccccgagcctgggccagggcagtgcgcacactctgcagggctgagggggcgtggcagctgaatgcagccag

SEQ ID NO: 13882 - DNA, 30 bp, Homo sapiens
  chr1:2789881-2789911
  hypo
cctctgtcctagggcgattgttggcgtagg

SEQ ID NO: 13883 - DNA, 51 bp, Homo sapiens
  chr1:2833935-2833986
  hypo
ccctgaaataaataaataaggcgaaggtgcgcagctggagacagggcatgg

SEQ ID NO: 13884 - DNA, 30 bp, Homo sapiens
  chr1:2846821-2846851
  hypo
atgtgggcttcttccgtgggcaggcacaga

SEQ ID NO: 13885 - DNA, 31 bp, Homo sapiens
  chr1:2847353-2847384
  hypo
gctccagaagccagggcgtctgttatttatg

SEQ ID NO: 13886 - DNA, 547 bp, Homo sapiens
  chr1:2850531-2851078
  hypo
acacatggcctgcaccggccagccgggctctaacatgtcctcaactttcaggaaaccagagcctccgagtaagtatcagatgagttgctaatgttggaaaaaaagcgagaaacatgcttgggggctctgttttacggctgcacttgaagtcggaatctgcgatcgtaacccaatgctggcctcgccaacgtgttttcggtattgtcgggataattgaaagtccagacaaatttggctatcagggctccaggcagcggaatcccatggtggcccctggtgtgatgagctcgccgaggccgtctcaggtcctgcgcccaccacggtcttcgggagcagctgtcggctttgcaaaagccccaggactttccgggtggacatggggggcttggctttgtcaccgggacctcttgaaaggcagccggtcctgggcctctcatctggccccgcacccttcttggccaccgacgtggaaggcagggcgccctgtggggtgagcagggccatccgtgcctcggggtctgccctcggcttgtgtcacaggcagaat

SEQ ID NO: 13887 - DNA, 216 bp, Homo sapiens
  chr1:2918442-2918658
  hypo
acggcaccgtgtcatcgtcactggctcaagaaatagcctgcaaactaaaggacagcgcccaccttctcggacgtccacattctcggacgcccacattctcggacgcccacattctcgggggcgcccacattctcggacgcccacactctcggacgcccacactctcgggcgcccacactctcgggcacccacactctcgggcgcccacactcttgg

SEQ ID NO: 13888 - DNA, 30 bp, Homo sapiens
  chr1:2925725-2925755
  hypo
ctcctgtgggatgacggagctggaccagct

SEQ ID NO: 13889 - DNA, 688 bp, Homo sapiens
  chr1:2938659-2939347
  hypo
acctgtcggaccaggcggtgctggctctctacgcctctgcctgtgtcacgggcctggtggtggacagcggggatgcggtcacctgcactgtccccatctttgagggttactccctgccccacgcagtcaccaagctccacgtggcgggcagggacatcacggagctcctcatgcagctgctcctggccagcggccacaccttcccctgccagctggacaagggtctcgtggacgacatcaaaaagaagctgtgctacgtggccttggagcccgagaaggagctttcccggaggccggaggaggtcctgagggagtacaagctgcccgacgggaacatcatcagcctcggggacccgctgcaccaggcgcccgaggccctgttcgtgccccagcagctgggcagccagagccccgggctctcgaatatggtctccagcagcatcaccaagtgtgataccgacatccagaagatcctctttggggagattgtgctgtcggggggcactaccctgttccacgggctggatgaccggcttctcaaggagctggagcagctggcctccaaggacacccccatcaagatcacggctccccccgaccggtggttctccacctggattggagcctccatcgtcacctctctgagtagcttcaagcagatgtgggtcaccgccgcagacttcaagga

SEQ ID NO: 13890 - DNA, 616 bp, Homo sapiens; identical to SEQ ID NO: 44
  chr1:2984306-2984922
  hypo

SEQ ID NO: 13891 - DNA, 30 bp, Homo sapiens
  chr1:2999261-2999291
  hypo
aggcaccctgttgccgcagcaaggagaggt

SEQ ID NO: 13892 - DNA, 30 bp, Homo sapiens
  chr1:3052851-3052881
  hypo
gtctcggcgaggcacgccaggcactgagtc

SEQ ID NO: 13893 - DNA, 30 bp, Homo sapiens
  chr1:3101761-3101791
  hypo
atctggtatagtttcggctgcacacacaca

SEQ ID NO: 13894 - DNA, 30 bp, Homo sapiens
  chr1:3107275-3107305
  hypo
ccgccggtcgccgccgaagcccacctgcct

SEQ ID NO: 13895 - DNA, 30 bp, Homo sapiens
  chr1:3109634-3109664
  hypo
tgagtactgagcagacgcagcggccagacg

SEQ ID NO: 13896 - DNA, 588 bp, Homo sapiens
  chr1:3111097-3111685
  hypo
taatatcaaggctggactctgcggcaactggccactgtctccccaccacacgccaccgtctccccaccacacgccaccgtctccccaccacacgccaccgtctccccgccacacgccaccgtctccccgccacatgccaccgtctgatcgccacacgccatcgtctccccgccacacgccaccgtctccccgccacacgccaccgtctgatcgccacacattagggcttggtattctcagtcccacgttttatcatctaaacgccaaaactcgttcctggcctgccctttctctccaaggttcccagatgcacgctccactgcccacaccacccccacggttgagtgggctcggccccgggacgtggcctggctctgggcacctctgctgctccactctgcgtggagagttctgcgtgaggccaggaagctttgccgcgcttccccactcaggagcttctggatgtttctatggaggcctcacgtctaaaaccgtgagcgcaccggccagtggatgctctgaggagtgttcccgtggagccagcaccgggcagctcggcgaggcacacagcgtcgggatttggagaga

SEQ ID NO: 13897 - DNA, 228 bp, Homo sapiens
  chr1:3122847-3123075
  hypo
ccaccagtgggcctggacccacgcccttggggatgagcaagctctcgtgtatttgctgtgtgtgcaacacggggttcctctcggggcactggggatcccgaaagcgtgtctggtgcagaaggcgtgacctccaggcagctccgagacgggaagtgattggagtgtaggcgtgaggtcccggtgctggatagacgcacacgccttcacgcatcctcagaaagtgatgtt

SEQ ID NO: 13898 - DNA, 165 bp, Homo sapiens
  chr1:3124781-3124946
  hypo
gacaaggggacctcttcttcccgggatcttgttccgacctttgcttaaagcagtttccccactggctcggttcacgtgcgggcagcgattctctggccctgcactgtagggtgtttagtgtgcccgaggccaccccgagtgatgacgacgattgaaaatgtctcc

SEQ ID NO: 13899 - DNA, 746 bp, Homo sapiens
  chr1:3127974-3128720
  hypo
agcagtgtgaaaagccgtgggcttgatctagctggagatgcggccgtgggtggactcctaagaaaagactcaaggcagagtctcttggggcccgtcgggggctgcagcagattcgtgtcttgaaaacaggttgggtccagctccctctgctgtgaggtccctgcctcattgctgggacttttgtctcaaggccccggcctcgtccttggtcgtccagcccactggccgcagcagtgggggccggcgctggtggtcagtgctcgctcaccctgccctgcacagcccctaatgttggcacttcacggacaagccggcctgggtcctcagaggagaataaatgtgcacggaacagcacacggtggcccatggccttgcagcacgagcgtgtccatgcgtgtgcacgtgtgcatgcgtgtgcgtgcgcgtgcatccacgcctggcggcctgggcccggcgtgagtgtgtgggtgggagcgggtgtgtatccgcggctgctccattctgctgtaaaggctcgctgcagtgggcaacatggaggagacatgaaagaggggacaataaatagcttcctaccttgcctggataatgggcgagttctccgggtggattaatcctcgcgtcgtctttgggccgtcagtttgggagtgacagtaacaaggctcccggggaccctgctaatttgcactccattcaccggctcgtgaaaccgtcagggctgcggaaggactgcgcggcgcgggcctcca

SEQ ID NO: 13900 - DNA, 30 bp, Homo sapiens
  chr1:3129201-3129231
  hypo
ccggccccctcgctgcggtcctcccgctca

SEQ ID NO: 13901 - DNA, 190 bp, Homo sapiens
  chr1:3179304-3179494
  hypo
cacagaaaacatgagggtgtgcgagcatggggtcccagggacgacacctgcggggtgctgccacgatggtgctgggaggtgcggggtgcagtaatgacaacacacagacaacacgagggtgtgcgcgcatggggtcccagggaggacacctgcggtgtgctgccgcgacggtgctgggaggtgcaggtga

SEQ ID NO: 13902 - DNA, 30 bp, Homo sapiens
  chr1:3182918-3182948
  hypo
accagagaacaatgcgcgccggagcctttt

SEQ ID NO: 13903 - DNA, 297 bp, Homo sapiens
  chr1:3184583-3184880
  hypo
ggtgcagacctcaggggcctgcggaccacggctccccggccctcaaaccatgacccccgaatctaacagggtgcccgtttgcacacacgtgggagcgtacggtgagcaggtcctagacttcggctggcccactggtctcaggagaagggcccgacgctcctgctgcggttgcagtcgcccccggctcggcgcgcgtcagaccaggtgcgcgtggaagtgtgtttgtctccgctaatccacgggggaaggagaagggcagagtctttgtcaggctccgagcaattaggataattaaaa

SEQ ID NO: 13904 - DNA, 236 bp, Homo sapiens
  chr1:3195355-3195591
  hypo
tgctgctctgaccacagggaacgtcagaggggacggggcagcggaacaaagcacaaagcgtccctgcgtcctctcaacgtggcccagctcctgcagacactcagcgagccgtggcctctcccatcctcccacgcttccctccggccggccctggagatccgtggagccacacggtgccgagcgcggcgctggccgtgtgctccgtgtctgtcatcgtcagccctgtccacctttgg

SEQ ID NO: 13905 - DNA, 30 bp, Homo sapiens
  chr1:3229060-3229090
  hypo
ctgctggtgtctgacgttggcatcccctct

SEQ ID NO: 13906 - DNA, 31 bp, Homo sapiens
  chr1:3233990-3234021
  hypo
tcactaagcaggagtgcgggcgtgccgtcag

SEQ ID NO: 13907 - DNA, 30 bp, Homo sapiens
  chr1:3320797-3320827
  hypo
ccgagcagctgtgctcgggtcccctccgtg

SEQ ID NO: 13908 - DNA, 1207 bp, Homo sapiens
  chr1:3321123-3322330
  hypo
ctcacagcccggccacggcagagaggaggtgggcagggagacaccagcatgtgctctgatccctcggcagcgtggtgggggctccgaaggggcactgggaacaagctgtatggttggggtcccctcccgggcagagggcaggtagtcgggccccgcagtgagcctcgtcctctgcgcagcctggagcagcacatggtcatccacacggaggagcgcgagtacaaatgcgaccagtgtcccaaggccttcaactggaagtccaacctcatccgccaccagatgtcccacgacagcggcaaacgcttcgaatgtgaaaactgcgtgaaggtaacctgcggggcggccccgtctcagccccggggcagcaggaggctgcagacgggcgcccgcccccgtgctccctacaccccctggtccaaatgtagatggagtgcggcagagtgggtaggaggcccctgcggtggctcgggcccttccgtgtgactaggaaggaaaggaagtctcagggaagaccgtgtcccccaggtcagaaggatcagggccgagaccagaacccaggcccctccagagcgcggctcctgtcctcccgccggtgtggaaggaagaggctggcggggctgagccgagcctccaccccgagcccgccagggtctcagcaccacagctgaaaacgctttctgcagccctgtctcacgcagcctcagttcaggaattgttcttgaggaaagcagccggggaggctctgcggctcacttaaggccctgcagcgggtccttgctacacagagacctgtcccggcctgcttggtgcagactgcaacgtggcaagagagacaggcagggccctgccccccacagccggttggtccgccagccagaaccaggccaaggcgggtgtccaggcagggcacgcgccaacggcatccgtctccccaggtgttcacggaccccagcaaccttcagcggcacatccgctcgcagcacgtgggcgctcgggcccacgcctgccccgactgcgggaagaccttcgccacgtcctccggcctcaagcagcacaagcatatccacagcacggtgaagcctttcatatgtgagtggtcgcccagcctggccgcctgccctccgggtgcgcggatgccgtggcggtcgggccgaggtgggccatcccccaaggtctcccccgatccgaggggccccagtttgttcat

SEQ ID NO: 13909 - DNA, 525 bp, Homo sapiens; identical to SEQ ID NO: 48
  chr1:3325225-3325750
  hypo

SEQ ID NO: 13910 - DNA, 308 bp, Homo sapiens
  chr1:3327629-3327937
  hypo
ccacatgctcatgtgtgcacacgtgtgcacactcagacacgcacgcttgcagaatacacacacgcctgcccagacacggacacttacgcacacagacacacatgcacctgcctgtgtatttgtgtgtacgcacacacgcatgtatgcacagtacacacatatacacccatgcccacgcacatgcacccagacagactgcttccagccccagcctcgcccctccagcggctggctttcccagtaatttcatgtggcgttttcagcagggtttcccggtcatttcatgcgggtttgtcttggcttctgct

SEQ ID NO: 13911 - DNA, 426 bp, Homo sapiens
  chr1:3328527-3328953
  hypo
gaagctgaagaccaggagcagcgacatgtcggacggcagtgactttgaggacgtcaacaccaccacggggaccgacctggacacgaccacggggacgggctcggacctggacagcgacgtggacagcgaccctgacaaggacaagggcaagggcaagtccgccgagggccagcccaagtttgggggcggcttggcgcccccgggggccccgaacagcgtggccgaggtgcctgtcttctattcccagcactcattcttcccgccacccgacgagcagctgctgactgcaacgggcgccgccggggactccatcaaggccatcgcatccattgccgagaagtactttggccccggcttcatggggatgcaggagaagaagctgggctcgctcccctaccactcggcgttccccttccagttcctgcc

SEQ ID NO: 13912 - DNA, 30 bp, Homo sapiens
  chr1:3342292-3342322
  hypo
cacgagcacgagaacgcaccaggtgggcca

SEQ ID NO: 13913 - DNA, 30 bp, Homo sapiens
  chr1:3342563-3342593
  hypo
agggaggggtccagcgagaggccgccccct

SEQ ID NO: 13914 - DNA, 86 bp, Homo sapiens
  chr1:3351506-3351592
  hypo
tccgggccaccaagccgcacctgtgcctgagactccggatggacgacacagtcgtcacgtcgctcttcctgcgggttcttggcgag

SEQ ID NO: 13915 - DNA, 30 bp, Homo sapiens
  chr1:3352327-3352357
  hypo
cgtctctgtgggtgccgggtggtccaggct

SEQ ID NO: 13916 - DNA, 175 bp, Homo sapiens; identical to SEQ ID NO: 49
  chr1:3371087-3371262
  hypo

SEQ ID NO: 13917 - DNA, 103 bp, Homo sapiens
  chr1:3378248-3378351
  hypo
gtagccacaacagccccgcaaagtgcctggaaacagacctctgggcccggctcctggaggccgtgtcggctgggggctctgcacatctcggtcacacggggtc

SEQ ID NO: 13918 - DNA, 38 bp, Homo sapiens
  chr1:3379982-3380020
  hypo
tacttagcagggaggccgcccggcgggaccctaagctc

SEQ ID NO: 13919 - DNA, 31 bp, Homo sapiens
  chr1:3385657-3385688
  hypo
gctgtgcttccacctgcgccaggccctgacg

SEQ ID NO: 13920 - DNA, 273 bp, Homo sapiens
  chr1:3389565-3389838
  hypo
atgcatgtctgtgtgtgcacacgtggggcccgaccaccaggcccgtggcaccctcctcacccctccttgccttcaggttcttcgaggacctggagcagcggcacaaggcccaggtgctggtcgaggacatcagtgacatcctggaggagcacgctgagaagcacttccacccctacatcgcctactgctccaacgaggtctaccaacagcgcacgctgcagaagctgatgtgagtgggcggccccgaggcccgcagggtggctcaggagcatc

SEQ ID NO: 13921 - DNA, 31 bp, Homo sapiens
  chr1:3393384-3393415
  hypo
tgggggagggggctcccggggtgggtcaggg

SEQ ID NO: 13922 - DNA, 31 bp, Homo sapiens
  chr1:3393765-3393796
  hypo
aacagtcgctgaggagcgggagctggtgggc

SEQ ID NO: 13923 - DNA, 146 bp, Homo sapiens
  chr1:3408565-3408711
  hypo
acattcacacactgatgcacacgtaacacacaggcactggcacgcacaggtgcctgctgcctgtgcaggactgcgtgcgtggactggcacgcacaggtgcctgctgcccgtgcaggactgcgtgcgtggactggcacacactgggt

SEQ ID NO: 13924 - DNA, 30 bp, Homo sapiens
  chr1:3416399-3416429
  hypo
gcaggccccgctgacgtggtcacaggctgc

SEQ ID NO: 13925 - DNA, 30 bp, Homo sapiens
  chr1:3435872-3435902
  hypo
cctaccaggggcaccgtgtgctttagggag

SEQ ID NO: 13926 - DNA, 401 bp, Homo sapiens; identical to SEQ ID NO: 50
  chr1:3447572-3447973
  hypo

SEQ ID NO: 13927 - DNA, 31 bp, Homo sapiens
  chr1:3449030-3449061
  hypo
ccacctccagcactggcggtgagggtccaca

SEQ ID NO: 13928 - DNA, 448 bp, Homo sapiens
  chr1:3548558-3549006
  hypo
gtggaggcctcctgactcatgcgcggacctgcggctgctgcaggacaaaggcccagcgcctccaaggagcttctgtgagcacctcggctactgcagaaacgtgaaaggaggtgacgtgtcggaaacccccaacttcattttcttttccagtcgcttctacacctggggccacaggacacagtaaagggtgagacagcacctgcgtcagcacaactgaccgttccttgtcgccaggaagtagctgtcaggactaaatgccagcattcctatgccgattttcgggtttgctctgtcggtaacaggtttcagtgtctgtaaggagactgggacagaggcgatctcatctagaacaccaacaggaagaacacgccattgtcaccctttcgggaagtacgcacgcggctgagaggctgctgtgcctgcatcgggcatcgcgaacccagctcct

SEQ ID NO: 13929 - DNA, 445 bp, Homo sapiens
  chr1:3552660-3553105
  hypo
tgactgatgttcttaacgcacttaatttccttatatagaaattgacaaaatctcaacagctctatcctggaaatgcatgaaatccctgtagagctgctgctggggctgcaccgccacagatgccagcgtcagtgcctggccagcccccaagggcggcttggtctccccgcgcctgcactcgtgtgcacactctccccctcacctttccttgcctggccagcccccgagggcggcttggtctccccgcgcctgcactcgtgtgcacactctccccctcacctttccttgcctggccagcccccgaaggtggcttggtctccccgcacctgcactcatgtgcacactctccccctcacctttccttgcctggccaggctcactcctttagacccagctcagacaagtcccttccagagcactgcctggatcccgggttctgcactct

SEQ ID NO: 13930 - DNA, 31 bp, Homo sapiens
  chr1:3555533-3555564
  hypo
ccggaatattcaaatgcgtattttactgtgg

SEQ ID NO: 13931 - DNA, 30 bp, Homo sapiens
  chr1:3557185-3557215
  hypo
cggggtggagcgcccgaggctctgagcatc

SEQ ID NO: 13932 - DNA, 89 bp, Homo sapiens
  chr1:3562355-3562444
  hypo
aacattcccctccgcgctgagctcagcacggaggctgttgtgcggtacctacagcaggtgaatgggcggctgccgaccgccccgagcca

SEQ ID NO: 13933 - DNA, 97 bp, Homo sapiens; identical to SEQ ID NO: 55
  chr1:3567247-3567344
  hypo

SEQ ID NO: 13934 - DNA, 152 bp, Homo sapiens
  chr1:3576145-3576297
  hypo
agaatctaatatggggcgcacaatatggctttctactgaaatatatgttctttctacatcacccctctttctactaaaaataatctcagtaagattattattattattattatttttgagacagagttccactccgtcgctcaaggctagag

SEQ ID NO: 13935 - DNA, 520 bp, Homo sapiens
  chr1:3615330-3615850
  hypo
agtcatctgaagtcacctgggcgtgtggagggacatgcatctgcaaggcccccatgtggcgctaagcacagagtgggtgctgcagacgggctcagccgctgcgggcaggtgcaggcaggatagcagcggtggccctgggcctcgcagtcctgcagacacacgtctggggactgctcctgggggcgcgtttctccggtgtgaggtgtggaaagttccacatggccctggcacgggattgggcaaggcctcgcctcagccccgggtgagagcagagggtgctgtgggtgagagcacagggtgctgtgggtgagagcagagggtgctgtggatgagagcagagggtgctgtgtgcacattgtcgggagagggaggcttccccccagccgcatgtcgaatcttgttggcatttccattcgtttaatcacgggctccgggagatgctgtgggaagtaccggcaggacggaggtcttgccctggtgggatgggctctcttcctccgaagcccaggctgcttgtcag

SEQ ID NO: 13936 - DNA, 38 bp, Homo sapiens
  chr1:3622992-3623030
  hypo
gtaatagggacaatcacggtgcccgccgcaggcccggg

SEQ ID NO: 13937 - DNA, 31 bp, Homo sapiens
  chr1:3623383-3623414
  hypo
cctggcgggggagctgcgggtaggggcctaa

SEQ ID NO: 13938 - DNA, 31 bp, Homo sapiens
  chr1:3651452-3651483
  hypo
tccttccagctccttccggctccttccagct

SEQ ID NO: 13939 - DNA, 70 bp, Homo sapiens
  chr1:3655641-3655711
  hypo
gtgtctgaagagctctcgataggagtcctggtagcggctagcctgggtctgggagcgaagggacagggac

SEQ ID NO: 13940 - DNA, 13 bp, Homo sapiens
  chr1:3659629-3659642
  hypo
ctctttagggaag

SEQ ID NO: 13941 - DNA, 46 bp, Homo sapiens
  chr1:3659671-3659717
  hypo
cggcggtgatccagtggatcctccccagggcgtggctgacacaaac

SEQ ID NO: 13942 - DNA, 481 bp, Homo sapiens; identical to SEQ ID NO: 56
  chr1:3663486-3663967
  hypo

SEQ ID NO: 13943 - DNA, 378 bp, Homo sapiens
  chr1:3680131-3680509
  hypo
agctggagcaggggcaggtgtcggcagcctcacccaggctggcagagccctcccagctgccgcagtggcccggccctctccttctgtccctcactgcccctgcttgctcctgctcaccgcctctgcctctgtgcccaggagtgattgcgtctttacaacaacaagtggatttccaagaaacccagctgcgaaagatcaatacggaaaatgagacgctgcagaaggagctccgagagcggaggcagcagctacaagccatgaccgacaaggtggccgtgcgctcagtaccggcctccgctccatgagcatgggccccaggcttcattaacccccggcagctcggggcaggcgctgcccgtcccatctactgatggagac

SEQ ID NO: 13944 - DNA, 125 bp, Homo sapiens
  chr1:3684031-3684156
  hypo
agggtctgtcccagcagctggcggccgagcacccaggcctctgcccaccgcccaccgaggtagaaccggggtctgtgtacgctggggctcgggctggttctgccgtgtacaccagcatccacaca

SEQ ID NO: 13945 - DNA, 30 bp, Homo sapiens
  chr1:3686334-3686364
  hypo
ctttgctcacagctcgagaggttaaggaat

SEQ ID NO: 13946 - DNA, 30 bp, Homo sapiens
  chr1:3687093-3687123
  hypo
tgggagccgggcaccggctatggctctgtg

SEQ ID NO: 13947 - DNA, 187 bp, Homo sapiens
  chr1:3695642-3695829
  hypo
ctgagtgtgtgggcctcgtcctgtctggagtcccctccctcccacagtgggcgagacgggaaggcctggcggtgaccagacaagtgggtccaggtctcaaggcagcctggcccatgtcctgcaaggctctgaagagccacccagctgttagtctgcccactgcacagggccccgggcctctcaggtt

SEQ ID NO: 13948 - DNA, 153 bp, Homo sapiens
  chr1:3697564-3697717
  hypo
gggtgaaaatctaacggataattcagcattgccgcatagaaacctccgcaaaaccggccaaacaaacgcggacaggcggccctggcgtcagcgcacgacagtcacgtggggaggggcagtggccaggtcggccttggacgggtacaccacctt

SEQ ID NO: 13949 - DNA, 39 bp, Homo sapiens
  chr1:3731811-3731850
  hypo
tgacggcacagacgcgtaagaggcgtgcacggcggggag

SEQ ID NO: 13950 - DNA, 46 bp, Homo sapiens
  chr1:3746111-3746157
  hypo
acccactgtgtcctcacggctatcgttattccgtttgcagcctggg

SEQ ID NO: 13951 - DNA, 126 bp, Homo sapiens; identical to SEQ ID NO: 59
  chr1:3817968-3818094
  hypo

SEQ ID NO: 13952 - DNA, 27 bp, Homo sapiens
  chr1:3818732-3818759
  hypo
agccaccgcgctcggcacactgttctg

SEQ ID NO: 13953 - DNA, 30 bp, Homo sapiens
  chr1:4004031-4004061
  hypo
acacccgcacgtccccgagaccagcccggt

SEQ ID NO: 13954 - DNA, 30 bp, Homo sapiens
  chr1:4004393-4004423
  hypo
gcgggccctcgccggcggcattggcggaac

SEQ ID NO: 13955 - DNA, 24 bp, Homo sapiens
  chr1:4659496-4659520
  hypo
tccgtctcaaaaaaaaaagaaaaa

SEQ ID NO: 13956 - DNA, 112 bp, Homo sapiens; identical to SEQ ID NO: 61
  chr1:4715427-4715539
  hypo

SEQ ID NO: 13957 - DNA, 1019 bp, Homo sapiens; identical to SEQ ID NO: 62
  chr1:4715574-4716593
  hypo

SEQ ID NO: 13958 - DNA, 31 bp, Homo sapiens
  chr1:5922753-5922784
  hypo
gcatgggctgcctgaccggcccccaccatgt

SEQ ID NO: 13959 - DNA, 31 bp, Homo sapiens
  chr1:5923674-5923705
  hypo
aaggcacacttatttccgagactgagctgtc

SEQ ID NO: 13960 - DNA, 30 bp, Homo sapiens
  chr1:5927905-5927935
  hypo
agtcaggcagagcacggcgatgggcttgcc

SEQ ID NO: 13961 - DNA, 31 bp, Homo sapiens
  chr1:5928199-5928230
  hypo
actgccattattcctcgcgagtacagcacac

SEQ ID NO: 13962 - DNA, 31 bp, Homo sapiens
  chr1:5933171-5933202
  hypo
gccattcccaggcccacgccacccctgccct

SEQ ID NO: 13963 - DNA, 70 bp, Homo sapiens
  chr1:5935553-5935623
  hypo
ccctgcctgggcccagcgtccacaggagaggacatgcccccggcctgctgagtctcggtcacaccgggtc

SEQ ID NO: 13964 - DNA, 208 bp, Homo sapiens
  chr1:5940498-5940706
  hypo
gtcttcattctcctgccgtgtcagtggcagcctccgtttcctggtgacgaatgaaagcgtgtggcactcacagttcgctgcacatggattcttacttctggatctctgggtcgcaaggcgggctgcctcacaaactctaacctcggcctctcgatggccacattgatcaaggataggcctgtgtgcatttacacgtgcaaatgtctgg

SEQ ID NO: 13965 - DNA, 30 bp, Homo sapiens
  chr1:5940959-5940989
  hypo
gcgaggcagagcaccgccaacgaagctgtg

SEQ ID NO: 13966 - DNA, 467 bp, Homo sapiens
  chr1:5942315-5942782
  hypo
gccatctctcagtggcgcgcttacccagccatctctcagtggcgcgcttacccagccatctctcagtggcgcgcttacccagccatctctcagtgacgcgcttacccagccatctctcagtggtgcgcttacccagccatctctttccaggggaattaatttcgttcttgccaatgtcccagtagctgacaccccccgcctcttgttctttctccttgacctcgacgtcagcaccatgctgtgcagcaggacagccgtgctgacttccccctcggcccaggtccctgctacatccccataaagacgcagcctccatgtcgcccacatgccctacactgtgcttctgccttcgggctaccaaccgcctcctggcacctgcagcgtccactcagtcctcactccaagccagcttcctgggaacgagcacctagaacaagggctatttcggtcctctccctgttgctctc

SEQ ID NO: 13967 - DNA, 182 bp, Homo sapiens
  chr1:5943158-5943340
  hypo
cactacaaagaagccacgatcagggtcctcaaagacttcccagattcatgtgggaaaatggcagacaaacaagcaggctggggcgaggaagggacggcagcctgaaccagcccagcctgcctgtgccagggccagagctgcgggcaccagcactgatgttcacactccgggccacgctgccc

SEQ ID NO: 13968 - DNA, 44 bp, Homo sapiens
  chr1:5944298-5944342
  hypo
cagctggaccaaagcccgccaccgccaaccgtgtgaccccacag

SEQ ID NO: 13969 - DNA, 78 bp, Homo sapiens
  chr1:5950964-5951042
  hypo
gagtctccgtcccagacgtcaatctgcagggtctgcacggccaggtagcgggcaaagcagcgccgctcacctggcttc

SEQ ID NO: 13970 - DNA, 146 bp, Homo sapiens
  chr1:5958566-5958712
  hypo
ggcacgagccccccagcggctctgccgggcagacagccacgcctcagatgccgctctctgagtggatcttcctcctgatcgggacatggcaaaggcctgggaagctggaaccaaggcattctcccatctacgcgcattcactcaga

SEQ ID NO: 13971 - DNA, 30 bp, Homo sapiens
  chr1:5994331-5994361
  hypo
ggcaacagcgggtccgaccaggagccccag

SEQ ID NO: 13972 - DNA, 31 bp, Homo sapiens
  chr1:6005139-6005170
  hypo
aaaaagaataaagtatcgctaagacatcttg

SEQ ID NO: 13973 - DNA, 31 bp, Homo sapiens
  chr1:6013728-6013759
  hypo
ccagggacccagctcacggtctcgtgcaaag

SEQ ID NO: 13974 - DNA, 254 bp, Homo sapiens
  chr1:6046165-6046419
  hypo
tgtcagctaagagcaataacacgcatttgctaacagcacattttgttacctgcctaattaccggtccgtccagccacttgaggacacactggaatgccgtggattccttccaaggctggcgcgctctctgtgggtggggagggacaagcacgttttgggtgaagatcctgtgccagtcgttcatcctgcccgcctgagggtcccgtgggcttcccggatgatctgtgccagtcgtattcaaataaagagaagag

SEQ ID NO: 13975 - DNA, 149 bp, Homo sapiens
  chr1:6129707-6129856
  hypo
gggagcagccccatccagacccggctgagacgtgtgctccccaccccacacgcagcagccatgcttacaaagcgttcagcctggaggcgccctgtcccttcgcatcccttctcccgaggcctggcagcggatggcagaaccaataccat

SEQ ID NO: 13976 - DNA, 31 bp, Homo sapiens; identical to SEQ ID NO: 66
  chr1:6137275-6137306
  hypo

SEQ ID NO: 13977 - DNA, 321 bp, Homo sapiens
  chr1:6171633-6171954
  hypo
agagacacataaggaagaagccgggatgacagcggcggggagcgggcgacacagcaatgccgaggatttctagccaccgccagaagtgaggaagattgaggaagaacgaggaaggcttcccccggagctctcagagggctctccccgaggtccacggaggaacgggcaagtccctgcccagcccggcctggccaaggatacgtcacgatgcccgccagcagccagtagtcatggcgccggtgccagatgtcgtagattttcccagaggatacagcagcccgctcctcgttctgccacagcgtgtgcaactctgggaaacaa

SEQ ID NO: 13978 - DNA, 230 bp, Homo sapiens
  chr1:6280173-6280403
  hypo
ggtaatcatttgtcaagagtaaaacccagaagctctgacaggccataatttcagatcctttggcttgggcagttttgattttccccgtgtttgcatggcatgaagtcttcgtccttgtcacagtagcttgggatgactcccagtccacatggaaaacatcagggagtgacaatccagcaagaaatccctcgctagttccacacctacgcaccgagcgtcggtgtgccagg

SEQ ID NO: 13979 - DNA, 204 bp, Homo sapiens
  chr1:6281661-6281865
  hypo
cttacaaagcctgatcggctaacgcagcttcctggtttaggaacattttccccggtcgtatcaatcccccaggttggtaaatgaacagaagggatgaataaagcctactttttaggctcaaggagcagctcgtgaaggggtggcaggtgcgctgctgccttgttttctgtcctgctaagaggctcaccccgcgacctcttctgt

SEQ ID NO: 13980 - DNA, 101 bp, Homo sapiens
  chr1:6284829-6284930
  hypo
ctcgggggcagtggcgtgtggcctcggtcctccccaggtaactctggagggcgctgtggaatattgctgtgatttgccccttactcgtctttcacccatgt

SEQ ID NO: 13981 - DNA, 38 bp, Homo sapiens; identical to SEQ ID NO: 69
  chr1:6296162-6296200
  hypo

SEQ ID NO: 13982 - DNA, 127 bp, Homo sapiens
  chr1:6313907-6314034
  hypo
accacgatggtgggcacggtgaaggcgcggcggtcggcctggcgccccacctgcacggccagcgtctggaagagggcgatggctgtgcagatcacgcccatggccacgctgccgcccaccagcagca

SEQ ID NO: 13983 - DNA, 216 bp, Homo sapiens; identical to SEQ ID NO: 71
  chr1:6321177-6321393
  hypo

SEQ ID NO: 13984 - DNA, 30 bp, Homo sapiens
  chr1:6328812-6328842
  hypo
ctctgccagccacacgcagcagtggagcgg

SEQ ID NO: 13985 - DNA, 74 bp, Homo sapiens
  chr1:6333480-6333554
  hypo
tcccatcacaagactgactcccgctaaatgcaggcaaaaggaacagagagcacgacactggattctgagcctca

SEQ ID NO: 13986 - DNA, 404 bp, Homo sapiens
  chr1:6333774-6334178
  hypo
aaggaagccagtgtaagagcccgcacacgggcgcagcggtgcccatcccagggcgagtgcagaggctgcgcgcggccaccacacagtgcttccgcccactcttttgctagtgaaattctctgggagtaggtgcggcccctccctgccagcaggagcctgtggcaacggggtgtctaggatgtcgaggcagcagagaccctagggccctgccccgtgacaaaggccccacgtggggacctctttctctgtcctacatcctgggaccggacctctcttcttgtcctggtccggcctggacacggtcaggaatggccacctctgctcctgaggcttcttcgagaggaacggggcccatgcgaggaccccaggcccctctgcacaccgtgcctgggggtcaggcaggt

SEQ ID NO: 13987 - DNA, 39 bp, Homo sapiens
  chr1:6334535-6334574
  hypo
tgccacgctgtcctctcggctggcgcggggcttacccgg

SEQ ID NO: 13988 - DNA, 30 bp, Homo sapiens
  chr1:6338579-6338609
  hypo
gagcagcacagaggcggagagggatttttt

SEQ ID NO: 13989 - DNA, 31 bp, Homo sapiens
  chr1:6342819-6342850
  hypo
ggagctgtgtggtcagcgccagcaggcatta

SEQ ID NO: 13990 - DNA, 172 bp, Homo sapiens
  chr1:6345666-6345838
  hypo
tccctccaccaaatgtggaggcgggtgaggctggtcatgcatcagagagctgaagacagcgtgtccaggtggctctcgggagccctgaacctgacaggaaaggcagaggcagggcccgacaagcactgcctgcagacctggcgtgtcacacggaggtcaggatgcttcaggg

SEQ ID NO: 13991 - DNA, 44 bp, Homo sapiens
  chr1:6347168-6347212
  hypo
tgagagccaggagttccggcacaagtgcacggggaccaggtgca

SEQ ID NO: 13992 - DNA, 30 bp, Homo sapiens
  chr1:6363871-6363901
  hypo
aagtggttcccggacgtctgggagcatcat

SEQ ID NO: 13993 - DNA, 139 bp, Homo sapiens
  chr1:6382125-6382264
  hypo
gggccaagccacaggtcgtgcgaactggctgcaatgcaggatgtcggggcccccaggggctccttcccaaaagccttggcacttggaggggtctgttggttggctttgagatcgcgaccctgcacgccagctcccagag

SEQ ID NO: 13994 - DNA, 122 bp, Homo sapiens
  chr1:6405657-6405779
  hypo
aggcaattgacaaacgtcaagtgcgtggaccatgcccggcatccagtgagggcccagagagggtgcggtctcatcaccatgcccagccccggccgtcttctggctgacggcagctctgagga

SEQ ID NO: 13995 - DNA, 54 bp, Homo sapiens
  chr1:6409878-6409932
  hypo
cccccgtggacattgccggccacgttggcatcatctggccgcatgatcctaggg

SEQ ID NO: 13996 - DNA, 127 bp, Homo sapiens
  chr1:6446130-6446257
  hypo
atgagttccacctgggcggagttccacctgggcagagaggtcttggctcacaggcaccgggagagctggaaggctgcggggaagccgaggaaggccaacacaccgcacaacacggcaggtgcctggc

SEQ ID NO: 13997 - DNA, 30 bp, Homo sapiens; identical to SEQ ID NO: 74
  chr1:6485186-6485216
  hypo

SEQ ID NO: 13998 - DNA, 31 bp, Homo sapiens
  chr1:6486919-6486950
  hypo
cacacaggaggggcctcggtgttgtcctcag

SEQ ID NO: 13999 - DNA, 935 bp, Homo sapiens; identical to SEQ ID NO: 77
  chr1:6507794-6508729
  hypo

SEQ ID NO: 14000 - DNA, 43 bp, Homo sapiens
  chr1:6527867-6527910
  hypo
cagtccaggccactcacgaggcagtgagcgtggagttaagcag

SEQ ID NO: 14001 - DNA, 243 bp, Homo sapiens
  chr1:6528246-6528489
  hypo
gaggaggctggcctcggacttagacttgagcaggtggggcgggcagctcaacagctggacaggggtgcggcggcggagacggggcgagggtggaggggaaggaactcgtggggactctggggcccgaggcactagctctgccattgggcctggggccacaaagtcttgtaaggaggttggggagagggtgccgtaggcagagtccatggagcaggagcggccgtccaccggacccaggggcag

SEQ ID NO: 14002 - DNA, 31 bp, Homo sapiens
  chr1:6528938-6528969
  hypo
gtctgccctccccacccggactctgggggag

SEQ ID NO: 14003 - DNA, 192 bp, Homo sapiens
  chr1:6537438-6537630
  hypo
aacatttggaacaaaaggaaccgtaacatactcgggtttcattatttacagtcgacttgtccttatgacgccctagcacgtttccgacagttactgaaacactgacacaggagctctgggggccgagctgcggctcccgcctgtgctcaccttgtgggggaaggtcgaagcggacatgcccatcataatgca

SEQ ID NO: 14004 - DNA, 31 bp, Homo sapiens
  chr1:6547667-6547698
  hypo
ttgaaacagctgacaccgggccccaacttaa

SEQ ID NO: 14005 - DNA, 30 bp, Homo sapiens
  chr1:6639451-6639481
  hypo
cacggccagcgtctacgacggcaagtacct

SEQ ID NO: 14006 - DNA, 30 bp, Homo sapiens
  chr1:6648994-6649024
  hypo
tggagatccacgaccgggtagagaactaca

SEQ ID NO: 14007 - DNA, 26 bp, Homo sapiens
  chr1:6669384-6669410
  hypo
actccgtctcagaaaaacaaaaacaa

SEQ ID NO: 14008 - DNA, 20 bp, Homo sapiens
  chr1:6676110-6676130
  hypo
tggaatcttagctctgtcta

SEQ ID NO: 14009 - DNA, 21 bp, Homo sapiens
  chr1:6676369-6676390
  hypo
agccaccgcgcccggcgagtg

SEQ ID NO: 14010 - DNA, 247 bp, Homo sapiens
  chr1:6711962-6712209
  hypo
gctggctccccctacccctcccggcgcagccccccgccacctgcagagcaccgactgcggtccggtgtgccccccacccccgcatgcactgccgactccttttcattttcatcctgcgccaaatgtctcccaggtcactggggcggtcctcaggagcctgatgttaaagcccagccgcggttccacacccgcacagccttggaagtcacagctgagcctggctgccgtgtttactagtctgggtgac

SEQ ID NO: 14011 - DNA, 577 bp, Homo sapiens
  chr1:6713808-6714385
  hypo
cggctgggaatgaagcgctttcttttttaagtggctaattgcatcctttcataaataaagatgagaaaaaccctgggcagactctcattccagctgcttggtgtgctgtgcctcattaactcgagcccttgctgtactcggagaggtggttgtgtgctttacctcaatggactgggatatgtgcattttattaatttcaatctgcggaaagctactgccggacacatcttcatactcctcatcatagcgatcaaaaaggtcggtggcatctactccaacgctgatcgttccctggggcagaaaaacaagccgtcagcagaacgggtggtatttgtggaatgaaagacaatgctacacttcaacagccagctcgctttaattgaacaagtcatttgacttcagggttcactgggtttaggtaggacactccaccaggaagcccacaaagcatgaatgtcacagtccgaaccaaactgcagagcaccacagacgtccagagctagaaaacatcatttgaccaggagagccggtccgcatgtctgcagagcaatgacacgccaaagacaaaagtgttagt

SEQ ID NO: 14012 - DNA, 135 bp, Homo sapiens
  chr1:6738111-6738246
  hypo
gcacccttgaagaaatcgtctcccatcaaccccctgctccgcttgctcccgccccacacctgggttaaaaattactggttcggtccatccctcttccgttttacttgacaggttagggaacgaaggacaagtcag

SEQ ID NO: 14013 - DNA, 31 bp, Homo sapiens
  chr1:6845865-6845896
  hypo
gggggcgggctggggccggagggggcggggg

SEQ ID NO: 14014 - DNA, 84 bp, Homo sapiens
  chr1:6871009-6871093
  hypo
cgggagctttcagaggcggaagttttggaagtgcagttccagttgaaagttgggatagtcaggtggtgacgcttctcaggaggc

SEQ ID NO: 14015 - DNA, 31 bp, Homo sapiens
  chr1:7182591-7182622
  hypo
gagcaggcaggcacttcgggtgccgttctgt

SEQ ID NO: 14016 - DNA, 34 bp, Homo sapiens
  chr1:7407211-7407245
  hypo
tcctcggtggggagagcggcggatggttctcaga

SEQ ID NO: 14017 - DNA, 85 bp, Homo sapiens
  chr1:7550322-7550407
  hypo
agagatgcagttaggaatgtgcggtcactgccgcgggcatcgattgcccagaacacaacagtgagccctccataaagtcggaact

SEQ ID NO: 14018 - DNA, 14 bp, Homo sapiens
  chr1:7550706-7550720
  hypo
catctcaaaaaaaa

SEQ ID NO: 14019 - DNA, 30 bp, Homo sapiens
  chr1:7700563-7700593
  hypo
gtgggcgaaatggacgaaagaagagctcat

SEQ ID NO: 14020 - DNA, 1154 bp, Homo sapiens
  chr1:7723193-7724347
  hypo
tcaaaggggcgtgggacggcccccgggcttggggtacgtgtccaagggctgagagtctgtggcctgcctggggtaccgggcctggactttgccagggaccccagccgctgtggggcaggtccaccacggtcctagctctgactctcttttgtgtgtgcatgtgtgtgtgcacatgtgtgcctgcgtgtgcgtgcgcgtgttgtgttccgatctccgcaggagctggcggcagcgtgcatcacaagtgtaacagcgccaaacaccgcatcatctcgcccaaggtggagccacggacaggggggtacgggagccactcggaggtgcagcacaatgacgtgtcggagggcaagcacgagcacagccacagcaagggctccagccgtgagaagaggaacggcaaggtggccaagcccgtgctcctgcaccagagcagcaccgaggtctcctccaccaaccaggtggaagtccccgacaccacccagagctcccctgtgtccatcagcagcgggctcaacagcgacccggacatggtggacagcccggtggtcacaggtgtgtccggtatggcggtggcctctgtgatggggagcttgtcccagagcgccacggtgttcatgtcagaggtcaccaatgaggccgtgtacaccatgtcccccaccgctggccccaaccaccacctcctctcacctgacgcctctcagggcctcgtcctggccgtgagctctgatggccacaagttcgcctttcccaccacgggcagctcggagagcctgtccatgctgcccaccaacgtgtccgaagagctggtcctctccaccaccctcgacggtggccggaagattccagaaaccaccatgaactttgaccccgactgtttccttaataacccaaagcagggccagacgtacgggggtggaggcctgaaagccgagatggtcagctccaacatccggcactcgccacccggggagcggagcttcagctttaccaccgtcctcaccaaggagatcaagaccgaggacacctccttcgagcagcagatggccaaagaagcgtactcctcctccgcggcggctgtggcagccagctccctcaccctgaccgccggctccagcctcctgccgtcgggcggcggcctgagtcccagcaccacc

SEQ ID NO: 14021 - DNA, 124 bp, Homo sapiens; identical to SEQ ID NO: 84
  chr1:7843508-7843632
  hypo

SEQ ID NO: 14022 - DNA, 41 bp, Homo sapiens; identical to SEQ ID NO: 85
  chr1:7843652-7843693
  hypo

SEQ ID NO: 14023 - DNA, 178 bp, Homo sapiens; identical to SEQ ID NO: 86
  chr1:7844223-7844401
  hypo

SEQ ID NO: 14024 - DNA, 31 bp, Homo sapiens
  chr1:8005573-8005604
  hypo
ctgttgcctccaagaacggcagggagggtgt

SEQ ID NO: 14025 - DNA, 30 bp, Homo sapiens
  chr1:8035290-8035320
  hypo
gagtgaatgaggaacgcaaattggaaggga

SEQ ID NO: 14026 - DNA, 30 bp, Homo sapiens
  chr1:8044538-8044568
  hypo
gagggtgtgcgtgccgccacatgttgattg

SEQ ID NO: 14027 - DNA, 116 bp, Homo sapiens
  chr1:8044976-8045092
  hypo
cgtgtggaaaaagacggcctgattcttacaagccgggggcctgggaccagcttcgagtttgcgcttgcaattgttgaagccctgaatggcaaggaggtggcggctcaagtgaaggc

SEQ ID NO: 14028 - DNA, 140 bp, Homo sapiens; identical to SEQ ID NO: 88
  chr1:8086075-8086215
  hypo

SEQ ID NO: 14029 - DNA, 31 bp, Homo sapiens
  chr1:8135328-8135359
  hypo
tttttttgggtgggggcggacagtgtcttac

SEQ ID NO: 14030 - DNA, 19 bp, Homo sapiens
  chr1:8147825-8147844
  hypo
tccacgagcatttttatgg

SEQ ID NO: 14031 - DNA, 31 bp, Homo sapiens
  chr1:8204554-8204585
  hypo
gacgcagctgtgcaggcgcacacagaaggcg

SEQ ID NO: 14032 - DNA, 30 bp, Homo sapiens
  chr1:8213963-8213993
  hypo
cccatttcgcatgacgctagctgaactaga

SEQ ID NO: 14033 - DNA, 31 bp, Homo sapiens
  chr1:8385722-8385753
  hypo
atggtgagtttgcaggcggcttttccaccgg

SEQ ID NO: 14034 - DNA, 31 bp, Homo sapiens
  chr1:8394042-8394073
  hypo
aaagaggttttctaatcgctcaggttgaggg

SEQ ID NO: 14035 - DNA, 30 bp, Homo sapiens
  chr1:8442492-8442522
  hypo
gccacgtgcgcatgcgtgcgtgtgcatgag

SEQ ID NO: 14036 - DNA, 25 bp, Homo sapiens
  chr1:8474606-8474631
  hypo
ttccgtctctaaataaataaataac

SEQ ID NO: 14037 - DNA, 30 bp, Homo sapiens
  chr1:8524995-8525025
  hypo
aatcaatgaaagagcgggatcaggaaagca

SEQ ID NO: 14038 - DNA, 29 bp, Homo sapiens
  chr1:8540770-8540799
  hypo
caggcacgagccaccgcatccggcctaag

SEQ ID NO: 14039 - DNA, 30 bp, Homo sapiens
  chr1:8541178-8541208
  hypo
catttctttctgtttctgagacggggtctc

SEQ ID NO: 14040 - DNA, 30 bp, Homo sapiens
  chr1:8541447-8541477
  hypo
acatgcgtgacccaccgcacccggcccgat

SEQ ID NO: 14041 - DNA, 147 bp, Homo sapiens
  chr1:8746805-8746952
  hypo
tctcaaaaaaaaaataaaggtgtagtttgtgatgaagacaagtactctaggggaaaacagagcagagtaaggacaaagtagagccgagactgagggtcaaggtaggcctctcactgagactcgaaagcgggacggtgagctacagat

SEQ ID NO: 14042 - DNA, 241 bp, Homo sapiens
  chr1:8781129-8781370
  hypo
tagtatttctcaggtacccgataggtcatcttagaaggagcccaccttgaagacactgccctaggctggtaaaacttggacagttaacactgcattcctcagacaactgggagcactgcagaggtctgcttccccaagcccctgaacgacagcctgggacttccctgcaggcctgaacacaagatctcaggaaatggaagagttgaaccgaaagagtttttgtatttttccactcaagact

SEQ ID NO: 14043 - DNA, 30 bp, Homo sapiens
  chr1:8941154-8941184
  hypo
gaacaccatgctgggcgcggtggctcacgc

SEQ ID NO: 14044 - DNA, 30 bp, Homo sapiens
  chr1:9005040-9005070
  hypo
tggccctttgtgtccggcagcatggtagcc

SEQ ID NO: 14045 - DNA, 10 bp, Homo sapiens
  chr1:9028040-9028050
  hypo
ttgtgagaca

SEQ ID NO: 14046 - DNA, 151 bp, Homo sapiens
  chr1:9074711-9074862
  hypo
ctccctgcctggccaccgtcccacataccgcattgatgcccgacagctgctggccggccatgagcacgatgatggagaggagctgccagcgcagggaccgcagggcacagaggtgcagcacagacaggtggccctcggcgcgctcggcccg

SEQ ID NO: 14047 - DNA, 31 bp, Homo sapiens
  chr1:9084988-9085019
  hypo
ccggtcagctgctgcccggcccaccttgtgc

SEQ ID NO: 14048 - DNA, 44 bp, Homo sapiens
  chr1:9165614-9165658
  hypo
ctccagaccctgaggccgatgaagatgagcgggatgagcaccag

SEQ ID NO: 14049 - DNA, 20 bp, Homo sapiens
  chr1:9172517-9172537
  hypo
ttttctttttttgagacgga

SEQ ID NO: 14050 - DNA, 274 bp, Homo sapiens; identical to SEQ ID NO: 93
  chr1:9188943-9189217
  hypo

SEQ ID NO: 14051 - DNA, 53 bp, Homo sapiens
  chr1:9205247-9205300
  hypo
gagccctgtggaaggccgctgggcagagacagctcctccgttcacaggaccct

SEQ ID NO: 14052 - DNA, 31 bp, Homo sapiens; identical to SEQ ID NO: 94
  chr1:9352659-9352690
  hypo

SEQ ID NO: 14053 - DNA, 54 bp, Homo sapiens; identical to SEQ ID NO: 95
  chr1:9353032-9353086
  hypo

SEQ ID NO: 14054 - DNA, 31 bp, Homo sapiens; identical to SEQ ID NO: 96
  chr1:9353825-9353856
  hypo

SEQ ID NO: 14055 - DNA, 193 bp, Homo sapiens
  chr1:9384862-9385055
  hypo
gccaacactgggccagacagtcgtgtttgcgacaagtctgttcgcctggccgtggagccagcacggtcttgtcggatccagaccagacaaatgctttcttggaaaagcgagtggggtgggggagcagggacacccggcctggcgggctggtggatcggaggcgcctgtgagcgggtcagtactgggtaggcag

SEQ ID NO: 14056 - DNA, 88 bp, Homo sapiens
  chr1:9402459-9402547
  hypo
atagtggcagtcaggccccagcgtcaaccgtgggagagcacggaggatcccagtggcttgtcaattcgctgatagcagaaggtagggc

SEQ ID NO: 14057 - DNA, 207 bp, Homo sapiens
  chr1:9420475-9420682
  hypo
agacagacagggtattcgtctcctggagctgctgaacacattaccacaagcaggacagctgaaaacagcagaagcgctcaggaggccaggtgtctgcgatcaggatggtagcgggctcgactgcctccgagctctgagggggagcccgccccatgcctcccctcgcccctgggggctgccgggaatccttggcgtcccttggtctgt

SEQ ID NO: 14058 - DNA, 166 bp, Homo sapiens; identical to SEQ ID NO: 97
  chr1:9489049-9489215
  hypo

SEQ ID NO: 14059 - DNA, 6 bp, Homo sapiens
  chr1:9539438-9539444
  hypo
aaaaaa

SEQ ID NO: 14060 - DNA, 1 bp, Homo sapiens
  chr1:9579462-9579463
  hypo
c

SEQ ID NO: 14061 - DNA, 219 bp, Homo sapiens
  chr1:9655905-9656124
  hypo
ctggggtcttccaggccaacccgctctttccttggtccacaggatgaagccaacgcacacgatggtcaactgctggttctgcaaccaggatacgctggtgccctatgggaaccgcaactgctgggactgtccccactgcgagcagtacaacggcttccaggaggtgtgggtcacaggcaggcggacgggtgggcacgcgggggtggggatcttgagatt

SEQ ID NO: 14062 - DNA, 30 bp, Homo sapiens
  chr1:9656969-9656999
  hypo
cgtggtgagcagcgcgcccagcctgcgcga

SEQ ID NO: 14063 - DNA, 31 bp, Homo sapiens
  chr1:9658419-9658450
  hypo
tcaggatctgattccacgtctgacctgtaag

SEQ ID NO: 14064 - DNA, 62 bp, Homo sapiens
  chr1:9664319-9664381
  hypo
agagccagccctcgcgctggccaggatcctcctgccgagctgatgtcgctcctgccctctgc

SEQ ID NO: 14065 - DNA, 30 bp, Homo sapiens
  chr1:9664875-9664905
  hypo
tctctgtctcatgtcgtagaattgtggata

SEQ ID NO: 14066 - DNA, 30 bp, Homo sapiens
  chr1:9666887-9666917
  hypo
ggcagccttgcggtcgtggatgggtctctt

SEQ ID NO: 14067 - DNA, 133 bp, Homo sapiens
  chr1:9670773-9670906
  hypo
agcactcgcctcacaacggcagcctcttcaccatggagccgccccatgttccccggaagccgcccctgcaggacgtgaagcacgccctgggtacggccttctgaccaccccaaggggccgtgggagggcctct

SEQ ID NO: 14068 - DNA, 1090 bp, Homo sapiens; identical to SEQ ID NO: 100
  chr1:9711924-9713014
  hypo

SEQ ID NO: 14069 - DNA, 30 bp, Homo sapiens
  chr1:9751338-9751368
  hypo
gggggtggcattgacgcagatggcaagaaa

SEQ ID NO: 14070 - DNA, 30 bp, Homo sapiens
  chr1:9780743-9780773
  hypo
ggggggcatggagccggcgtggaaccagag

SEQ ID NO: 14071 - DNA, 30 bp, Homo sapiens
  chr1:9781253-9781283
  hypo
ttccccgattgccacgtaggctccttcgcc

SEQ ID NO: 14072 - DNA, 31 bp, Homo sapiens
  chr1:9785103-9785134
  hypo
tgtgtgtgcctcatgccgtcccaggacccag

SEQ ID NO: 14073 - DNA, 53 bp, Homo sapiens
  chr1:9795909-9795962
  hypo
atgagtggtgtgcagtcgagcgctcggtgttacctgcacgcctctgccactgt

SEQ ID NO: 14074 - DNA, 119 bp, Homo sapiens
  chr1:9867204-9867323
  hypo
ctgtgagaagccctgcagtaacgaaacctgtttaacgttaacagcgcttcccaagcttacatgaccgagacctcattgacctaacagcacctgtccacgtcacacacctagggagaccc

SEQ ID NO: 14075 - DNA, 31 bp, Homo sapiens
  chr1:9892079-9892110
  hypo
gaggatacagataaagcgtttagctcagcgt

SEQ ID NO: 14076 - DNA, 107 bp, Homo sapiens
  chr1:9930201-9930308
  hypo
ctggtgatctaggtcaggccccgcatgccagcctcaaagcacagcaaacgcagccgtcagcactctgctttcgggggcccgctcgcgtctggacatgccacaggttg

SEQ ID NO: 14077 - DNA, 32 bp, Homo sapiens
  chr1:10091952-10091984
  hypo
atatattttttgagatggagtcgcgctctgtc

SEQ ID NO: 14078 - DNA, 13 bp, Homo sapiens
  chr1:10096098-10096111
  hypo
gccgaggtagttt

SEQ ID NO: 14079 - DNA, 30 bp, Homo sapiens
  chr1:10112529-10112559
  hypo
atattgagcacccatcgtgccaggcactcc

SEQ ID NO: 14080 - DNA, 83 bp, Homo sapiens
  chr1:10150448-10150531
  hypo
aattataggcgtgagccaccatgcctggctgagacctgtgttttactctttgctctgtttctaacaggcgaggaggtcctaag

SEQ ID NO: 14081 - DNA, 65 bp, Homo sapiens
  chr1:10174922-10174987
  hypo
aaaaaaaagacacaataattaattgcctttgtttgttaagggatcccacacggacctgcccagcc

SEQ ID NO: 14082 - DNA, 36 bp, Homo sapiens
  chr1:10175247-10175283
  hypo
aggccaggctggtctcgaactcctgacctcaagtga

SEQ ID NO: 14083 - DNA, 17 bp, Homo sapiens
  chr1:10247333-10247350
  hypo
tatatacatatgttgca

SEQ ID NO: 14084 - DNA, 31 bp, Homo sapiens; identical to SEQ ID NO: 105
  chr1:10271340-10271371
  hypo

SEQ ID NO: 14085 - DNA, 31 bp, Homo sapiens
  chr1:10470524-10470555
  hypo
ggagtcctgatgtgagcgtcagttatacaac

SEQ ID NO: 14086 - DNA, 386 bp, Homo sapiens
  chr1:10495104-10495490
  hypo
gtggccgcccctctgcggagggagctgcagcgtgtccacggtggtaattgcttgcaggtgtacacagaatggcaggcaggggttttcatttgccgcatttgttccgagtaagacgcactccttggaaagtgggtgacttgctttcagctgctaaagcctcagcttttacaggtgatttatgctccgctcttcaattagtaccgcaggtaattgaaaacaattgcaccaaattgcttttatgaagcaatttgaatgacgaaggcctgaaagggcgaaagtgttctaatttgctgccacttggattcggtgccagcctctcccacaccccttacttttcaccttgttcccgttagctctttgtttctcgggtgcgtgttttgaatgaa

SEQ ID NO: 14087 - DNA, 30 bp, Homo sapiens
  chr1:10508583-10508613
  hypo
atttatccttactacgggtgatgcacacta

SEQ ID NO: 14088 - DNA, 9 bp, Homo sapiens
  chr1:10645944-10645953
  hypo
tccgtctca

SEQ ID NO: 14089 - DNA, 138 bp, Homo sapiens
  chr1:10653907-10654045
  hypo
atatcaaggtgctgccgtcgtaatttcatgccccaatgagaagagcaaggtcgaagcaaatgcttccatcggcatctgctaacacactaactcataaacaaggcccggctggatcaggtggcacggaataatacaggc

SEQ ID NO: 14090 - DNA, 30 bp, Homo sapiens
  chr1:10659136-10659166
  hypo
aactgagagaggttccggagaatctgaaat

SEQ ID NO: 14091 - DNA, 30 bp, Homo sapiens
  chr1:10676561-10676591
  hypo
gcacactgtgggggcgccttccggatagct

SEQ ID NO: 14092 - DNA, 407 bp, Homo sapiens
  chr1:10680889-10681296
  hypo
acacctcttgggacccggttcttctccctctgaactggtgcccccttcaaatcactgactgtatacaagcaccaagaagaatgtgacacgaacgccagagtcctcagatgaatgccctggctgtaatgagcagtaggcactgtcacatggccacccatggagggcctgtggcctgacgggagcgggagggcagctcggcagcccgccttagcgtgggcactcacacggagctgccacttgtagtttctacgaagctctgggctctccgctctgttttaaaaagaaaagaaacattgcaatatcagtcacaatggtaacaagagaatttctaaagcatctgctcagtttctcgaaattaaaaaaaaaaaaaaaaagaaatggtaaaaagccctcgactggctttataa

SEQ ID NO: 14093 - DNA, 30 bp, Homo sapiens
  chr1:10692420-10692450
  hypo
gcgtggaggagaaacggacagaaacctggg

SEQ ID NO: 14094 - DNA, 30 bp, Homo sapiens
  chr1:10692784-10692814
  hypo
ccatgcttggaggccgggggacagctgccc

SEQ ID NO: 14095 - DNA, 30 bp, Homo sapiens
  chr1:10699816-10699846
  hypo
ccaggttgtccacgcggtcgtggtgctgcg

SEQ ID NO: 14096 - DNA, 30 bp, Homo sapiens
  chr1:10703216-10703246
  hypo
ctgggaggggggcacgcggtcgaagttctt

SEQ ID NO: 14097 - DNA, 223 bp, Homo sapiens
  chr1:10703801-10704024
  hypo
aacaaacagagcaggcgggactgaaacagcatcatggggcaggtgagggcctgtccgctgccatggcgcccaggccggccaggtgtcttctgtcatcccccagctttgtttggccccaactatcgccaaaaacaccacaagttgagtaaataatagcaactgcagaataccctgacatctgtaaactgagcccagggacagcacaggccgcaagtgttgacgc

SEQ ID NO: 14098 - DNA, 148 bp, Homo sapiens
  chr1:10707900-10708048
  hypo
cgttctctagagaagtcgttgccaagggcgaggcgggcaggtgaggcactgacgctgggatctgaggcatctggggtatggtggaagccagctgcttccaggcgagcagggtgggggtggagggcacggaggccgggctgggagcggg

SEQ ID NO: 14099 - DNA, 86 bp, Homo sapiens
  chr1:10708371-10708457
  hypo
cagcgtcccctggttccgaacttggtctcctggcttgggcctaaccatgccttcctacttgtgcccttcctcggtccccagctcct

SEQ ID NO: 14100 - DNA, 66 bp, Homo sapiens
  chr1:10714452-10714518
  hypo
gcccccaccaggctcccgcttacctgcagtggaagtgcgtggtcttctgtccgtagaactggcagt

SEQ ID NO: 14101 - DNA, 30 bp, Homo sapiens
  chr1:10715870-10715900
  hypo
ctgccaggagacagcgccacgtgggcagga

SEQ ID NO: 14102 - DNA, 144 bp, Homo sapiens
  chr1:10716612-10716756
  hypo
cccccactgccgtccccgcctgccgacttctaagcgcctccatgctgtgctggtggcggagaggcggagcccatctggctgtggccgtacctggtagttacactcagggtcaaggcagtggtagtgctcgcggtactggtaggc

SEQ ID NO: 14103 - DNA, 31 bp, Homo sapiens
  chr1:10718958-10718989
  hypo
ccaacagggagggattcgaggtgggggcagg

SEQ ID NO: 14104 - DNA, 129 bp, Homo sapiens
  chr1:10719284-10719413
  hypo
tccccagccagggtggcgccttctcagccaaccacaggcctgcattcagcacccatggcagcaggtagagaaagcctgtcatgggcagatggggtgtgctgtcatgggcagtcccggtgtgcatgctag

SEQ ID NO: 14105 - DNA, 788 bp, Homo sapiens
  chr1:10719846-10720634
  hypo
caggaggctctggccctggcccgggggcgctgggggcactgggcacgctggcgaggggtgcgggagccaggctgggggtgggcggaaccttggcggggcctggcttctggatgccccggacgtcgtacttggaagggcgccccaccttgcctgtcttgaaggcgatggccccgcccatgtcggggctgccctccccgggtttgaagaggtgcaggtacttgacattctccaggtcgtacttggatggcttcttgtaggtgctcccgttctggggccgcagattctcgccggtcttcagtttttggatgaagaagtcgtacttggaggcccgggctaccaggttctgcatctggacactgctgtgcgacggcaggggcaggatggtggccttggtctccaggtgggccgtgctgctgggcagccgcaggccgggcagggtgcccaccacctccttgcccacccgctcctcggtcttggtgctgggggccggccaggagagctgctcgccagccttgagcttgcggatgtactcctcatacttagagaaccgcgcccgcttgctgagggtatcctcggaggtgggcagcatggaggaggtggctgcctccggggtggagcccgcgtgcagcttctcaaagctgatcttcctggccagctcgtcccgcgtgttctggtcatcatagccaaacatgccgaggaactcggtcatggtggaggccgcgtagtcccgcagcgaggaggcctctcctgcagaggaggatgggggcgcatcacctctgggagggagt

SEQ ID NO: 14106 - DNA, 31 bp, Homo sapiens
  chr1:10725221-10725252
  hypo
cttggagggctcctccgcgtggtcttcctca

SEQ ID NO: 14107 - DNA, 53 bp, Homo sapiens
  chr1:10725509-10725562
  hypo
ctccaccaccacctggcggctcagcttggcgcagatggcgttcagcttcaggc

SEQ ID NO: 14108 - DNA, 30 bp, Homo sapiens
  chr1:10758980-10759010
  hypo
acagcggaccggaccggaggcagccagctc

SEQ ID NO: 14109 - DNA, 31 bp, Homo sapiens
  chr1:10765348-10765379
  hypo
gaggggatcctactggcgggagggcatcttt

SEQ ID NO: 14110 - DNA, 27 bp, Homo sapiens
  chr1:10779263-10779290
  hypo
cgcacccggccccgtgcccctttcttg

SEQ ID NO: 14111 - DNA, 37 bp, Homo sapiens
  chr1:10780356-10780393
  hypo
tcattgtcatcatcatcgccatcgctaaacacttctc

SEQ ID NO: 14112 - DNA, 31 bp, Homo sapiens
  chr1:10815635-10815666
  hypo
cctcttccctggggcccgtgcatggcgagat

SEQ ID NO: 14113 - DNA, 58 bp, Homo sapiens
  chr1:10823335-10823393
  hypo
cttacagaaatcacaacgggctgagaaccaggagacgtgggtccgagtcccacttctg

SEQ ID NO: 14114 - DNA, 30 bp, Homo sapiens
  chr1:10833594-10833624
  hypo
gggtctcacgcaccccggggactgaacatg

SEQ ID NO: 14115 - DNA, 169 bp, Homo sapiens
  chr1:10838656-10838825
  hypo
tcccaactcccctctcgcggtctttcttcctgaatctgattcctaaaatgtcttccagtggacacgaggaggagagctcccatccaaactgttcccaggcaaacgtgtccttgctcttgatccgtgtggaattccaagtccccctggcagagagcggcttctgggactc

SEQ ID NO: 14116 - DNA, 1402 bp, Homo sapiens; identical to SEQ ID NO: 108
  chr1:10854430-10855832
  hypo

SEQ ID NO: 14117 - DNA, 555 bp, Homo sapiens; identical to SEQ ID NO: 109
  chr1:10856337-10856892
  hypo

SEQ ID NO: 14118 - DNA, 30 bp, Homo sapiens; identical to SEQ ID NO: 110
  chr1:10890877-10890907
  hypo

SEQ ID NO: 14119 - DNA, 212 bp, Homo sapiens
  chr1:10997238-10997450
  hypo
ttcagacatgggagaccggtgtcaggagccacaggtggccatagtcctggacagtacagttctagattggcaggttatgtctgggttggataaacccccagcttccagagcgtgcgcaggtgagagggtcccagccccctttctctcggcctagcagagcctcccctttccttccttgccagccttgcccagcctctcgcacacagccagga

SEQ ID NO: 14120 - DNA, 31 bp, Homo sapiens
  chr1:11046049-11046080
  hypo
tcctcctacacacacacgcacacacctataa

SEQ ID NO: 14121 - DNA, 20 bp, Homo sapiens
  chr1:11124906-11124926
  hypo
aactccgtctcaggaaaaaa

SEQ ID NO: 14122 - DNA, 31 bp, Homo sapiens
  chr1:11129009-11129040
  hypo
ctacagcagtggcccccgcacataaggaaat

SEQ ID NO: 14123 - DNA, 364 bp, Homo sapiens
  chr1:11130958-11131322
  hypo
cgacctgctgtcggacggagatggcctgttctgctgcagctttgcacgcctcctttgcctgttcccgggcagctgcaagggagagaacttgtctctggagttggtgaatccagcaaccaccctcccctccatctccatccccctccgacttggcctagccacaggggttgtcacggctgattcctcctccctctcaggtccccggtcccccatctctgcaggacaggctgcctcagagctcaggctcaggtgctctgcccaccttcagctacacgtgagctgatcctccccagccctgcctgctcctcttctgtgaacctaaatgctcagtggcctgtggacctgagggcgtttaacaggatcg

SEQ ID NO: 14124 - DNA, 233 bp, Homo sapiens
  chr1:11140984-11141217
  hypo
gaacattcaaaatcaacgggaatcaaaattgtgccctgggctctggaaaatgtttggctcttttcatgaatgtaaggagcaaacctaagaactagaacctggccagacacagagcccaagtgtcgcggtctgtgtgactgcggctgaggtgtaccttgaggcagatgtccctgctccgttgccacaccacctgcagctgcaccggctgcccgttgccgcgctcccacatctcc

SEQ ID NO: 14125 - DNA, 30 bp, Homo sapiens
  chr1:11166874-11166904
  hypo
tgcatctgctcagccgaggctgccagcgat

SEQ ID NO: 14126 - DNA, 77 bp, Homo sapiens
  chr1:11264688-11264765
  hypo
cagctccaggctcagccgtctcagccattccagccagtcatctttggagaccctcctggcagcgccccaggcctgtg

SEQ ID NO: 14127 - DNA, 205 bp, Homo sapiens
  chr1:11308056-11308261
  hypo
tgacgaggttttgttccgaagcccatgagatctttgcagtacttgtcgtgtaccagctgctgctgtgtgatttcttccatttcttctctcagacgctatatatatgaggaggaaaaaaatcatctttacttatgactggcattcaaactgggcactgtggattctacagacaattacatttgcctaatcccgaaacgcaactact

SEQ ID NO: 14128 - DNA, 55 bp, Homo sapiens
  chr1:11313591-11313646
  hypo
ctggaacacagtcccccggcctgctgcaaggtagctccttcgtgtcatgtggacc

SEQ ID NO: 14129 - DNA, 263 bp, Homo sapiens
  chr1:11315987-11316250
  hypo
gccaggtgattctctacgcagatgtgctttgctagtggtgggaatggagccatctccttaccctgtaccactgaggcttctgcatctccttcggctcacgctgggttgtgagaatcagacaggcacgaagggcggctacagctccctcacggatggcctgtttggggtcccacacggccacaaaaatgttgtcaaagaagggttgcacttgctggaagaagaaggtagggacgctgatggccagctcacggagaaccaggacc

SEQ ID NO: 14130 - DNA, 45 bp, Homo sapiens
  chr1:11323831-11323876
  hypo
tccaataaaatatgatgcattcgtttgggcgcggtggctcacacc

SEQ ID NO: 14131 - DNA, 1087 bp, Homo sapiens; identical to SEQ ID NO: 113
  chr1:11538908-11539995
  hypo

SEQ ID NO: 14132 - DNA, 139 bp, Homo sapiens; identical to SEQ ID NO: 114
  chr1:11540039-11540178
  hypo

SEQ ID NO: 14133 - DNA, 411 bp, Homo sapiens
  chr1:11596361-11596772
  hypo
gctctcctcttgcccccaggacgcccgaacgcagcgccagtggcgtacgctggaggccgtgcggcacgtgggcgtggccatcgtctccagtgccctcaccacggtcatcgccacagtgcccctcttcttctgcatcatcgccccatttgccaagttcggcaagattgtggcactcaacacgggcgtgtccatcctctacacgctgaccgtcagcaccgccctgctgggcatcatggcgcccagctctttcactcggacccggacttccttcctcaaggccctgggtgccgtgctgctggcaggggccctggggctgggtgcctgcctcgtgctcctgcagagcggctataagattcccctgcccgcaggggcctccctatagcccgggacgggctctggacacttgcacct

SEQ ID NO: 14134 - DNA, 30 bp, Homo sapiens
  chr1:11721234-11721264
  hypo
tttcagcacggcggcgtggacactcattac

SEQ ID NO: 14135 - DNA, 66 bp, Homo sapiens
  chr1:11809710-11809776
  hypo
gaggagtgcgtgggcccggggctgatgtccctctgcccaggttcctaagcacgtgctgcctgggga

SEQ ID NO: 14136 - DNA, 31 bp, Homo sapiens
  chr1:11810251-11810282
  hypo
ccagccacgctgcgcccggccctgccccggg

SEQ ID NO: 14137 - DNA, 90 bp, Homo sapiens
  chr1:11856145-11856235
  hypo
ggagatctgggaagaactcagcgaactcagcactccacccagagcccccagcctgtgcgaggacggtgcggtgagagtggggtggaggga

SEQ ID NO: 14138 - DNA, 277 bp, Homo sapiens
  chr1:11861093-11861370
  hypo
cctgcggatcctcagcgtggggcccaggaagaagtaaaggaccatttcaggaaccaagttcaggctaccaagtggcctccgggaaagccagaacccagagtgtaggggagtgctggctccacacctccccgcagcgccatgatgttcttcaggcccagctgcttagctttgtgcagatggcccgtgatctcctccaggcgctgacggcagcaggtcatgtgcaggatggtctccaggccacagtagttcacggcggtgctggcgatcatcatggagg

SEQ ID NO: 14139 - DNA, 21 bp, Homo sapiens
  chr1:11945505-11945526
  hypo
gtctgagtgtttaacaagcct

SEQ ID NO: 14140 - DNA, 144 bp, Homo sapiens
  chr1:12041764-12041908
  hypo
cagggctcctgcagggacctccgtggtgcctcaaacccgcacatggcggaatacgtgtgcacagtcaggattggtcccacacctctgcgtttttttccccagggcacttcctcacatgccagcgcaactccccaatacctcaat

SEQ ID NO: 14141 - DNA, 87 bp, Homo sapiens
  chr1:12078705-12078792
  hypo
ggcgccggccacctcgcccggctaatttttgtatttttaggtttactggcgtgagcaaccgcggccggccccaatactacactttct

SEQ ID NO: 14142 - DNA, 31 bp, Homo sapiens
  chr1:12089141-12089172
  hypo
caagctgcaggagtttcgggaaaccaacaag

SEQ ID NO: 14143 - DNA, 336 bp, Homo sapiens; identical to SEQ ID NO: 122
  chr1:12123217-12123553
  hypo

SEQ ID NO: 14144 - DNA, 96 bp, Homo sapiens; identical to SEQ ID NO: 123
  chr1:12123787-12123883
  hypo

SEQ ID NO: 14145 - DNA, 31 bp, Homo sapiens
  chr1:12188608-12188639
  hypo
ggatggtgaagtaattcgtttaaggccacgt

SEQ ID NO: 14146 - DNA, 31 bp, Homo sapiens
  chr1:12215980-12216011
  hypo
tgtatgtggaagaggccgggcacagtggctc

SEQ ID NO: 14147 - DNA, 29 bp, Homo sapiens
  chr1:12219287-12219316
  hypo
aatatctaattgaaggccgggcgaggtgg

SEQ ID NO: 14148 - DNA, 30 bp, Homo sapiens; identical to SEQ ID NO: 124
  chr1:12226897-12226927
  hypo

SEQ ID NO: 14149 - DNA, 694 bp, Homo sapiens; identical to SEQ ID NO: 125
  chr1:12227254-12227948
  hypo

SEQ ID NO: 14150 - DNA, 759 bp, Homo sapiens
  chr1:12251313-12252072
  hypo
caaagcctcttcacagccccacggggcaggcggtgggagaactgtgcccacgtgagggttgaggaggtggtgcgtgggagagtggtgcgcatgctcgtgctgcgaggagcaggactgcggggaggagcgaaactgctgggaagagcgggactgcggggaagagcgggacttcggggaggagcggcactgcggggaggagcaggactgcagggaggagcgggactgtggggaggagcgggacttcggggaggagcgggactgcgggggacgagcgcgactgcgggggacgagcaggactgcggagagtagcgggactgcggagagtagcgggactgcggagagtagcaggactgccggtcctgcccctggactctggccggtgttgtgtgtgccccatgctgaggcggtccgccagcctcctggagatccgctgtctgagagtgctgggctgtctgggagggcagcgtgggtgtggcggaggcaggcgtgaccgtttgccgccctctcgctgctctagaccaggtggaaactcaagcctgcactcgggaacagaaccgcatctgcacctgcaggcccggctggtactgcgcgctgagcaagcaggaggggtgccggctgtgcgcgccgctgcgcaagtgccgcccgggcttcggcgtggccagaccaggtacggggtggggctcaggtccttggggacgcccatgggcctctcctttgtagacatccttgcagtgtcacgggcatcaacccattaattag

SEQ ID NO: 14151 - DNA, 30 bp, Homo sapiens
  chr1:12304437-12304467
  hypo
tgttggaaagggaacgtaagaaagcactac

SEQ ID NO: 14152 - DNA, 30 bp, Homo sapiens
  chr1:12304747-12304777
  hypo
agtttctcatttctcgtgggctcagctgat

SEQ ID NO: 14153 - DNA, 203 bp, Homo sapiens
  chr1:12460132-12460335
  hypo
tttctgagcaacctgcgcattatgaggccccactcaagcgtaaaaatgaaaactgagccactggtctgtttttgtttttgctttgctacctttccatggccgtaggtggacaatcagctcattggtaccacgcagcccttcatgctctatgtgactcccctgagcaatgagaatgaggtcatcgagaccggcccagctgtgca

SEQ ID NO: 14154 - DNA, 30 bp, Homo sapiens
  chr1:12566045-12566075
  hypo
tgccagcaggagctcgactgccactccgtc

SEQ ID NO: 14155 - DNA, 153 bp, Homo sapiens
  chr1:12607961-12608114
  hypo
ctctcccctctgtggacgcaggcaccagcccagtgctcagcatgccacagccacccagtgccgtggagtgaagggacatcaggccactcgcagggccccagggcatcctcttgtgcccgcctgggtcacccttcaccccggccgagctccacg

SEQ ID NO: 14156 - DNA, 36 bp, Homo sapiens
  chr1:12629953-12629989
  hypo
tatcaaagacttgttcttattcggtctattttttgt

SEQ ID NO: 14157 - DNA, 96 bp, Homo sapiens
  chr1:12630199-12630295
  hypo
ctgaggaatcaggttcgatttgggtgtcacatcctctggggaagcgtcctgggctcaccttcaggcttctcctcgtacaaccggagttccgacgct

SEQ ID NO: 14158 - DNA, 31 bp, Homo sapiens
  chr1:12632581-12632612
  hypo
aaactctaaggggccccgtgactaacaagtt

SEQ ID NO: 14159 - DNA, 31 bp, Homo sapiens
  chr1:12635041-12635072
  hypo
tctatggctggaacatcgaagaggctcaatt

SEQ ID NO: 14160 - DNA, 174 bp, Homo sapiens
  chr1:12663578-12663752
  hypo
cttgaacctcagctggcgctgaggtccgcatggggaccgcggggcttggaggctggtagaagtggttgggggaggtgggacgcagacaggagaccgtgttccctaggaggctgtttcagtgtggacaagatcatcatacgcttcactcatcaaaatccccgaaaggctgctgaa

SEQ ID NO: 14161 - DNA, 192 bp, Homo sapiens
  chr1:12711250-12711442
  hypo
gttttgggacgatacccgtgaggctgttccagccgaaggcagcatcctccagaccccggcgaggcatcatcttctaccatggaggggccacagtatttgggagcctgggtaaggggcttccctgtggctttgtagaggaagggcctcatctgcatgcatagcctagctcatgcctcccgcaagaacccttct

SEQ ID NO: 14162 - DNA, 83 bp, Homo sapiens; identical to SEQ ID NO: 131
  chr1:13839685-13839768
  hypo

SEQ ID NO: 14163 - DNA, 30 bp, Homo sapiens
  chr1:13881446-13881476
  hypo
cggtcaggcctcggcggggcctacacgctt

SEQ ID NO: 14164 - DNA, 715 bp, Homo sapiens; identical to SEQ ID NO: 136
  chr1:14026481-14027196
  hypo

SEQ ID NO: 14165 - DNA, 31 bp, Homo sapiens
  chr1:14057683-14057714
  hypo
catgtcaggtagggagcgcaccataaaagca

SEQ ID NO: 14166 - DNA, 1 bp, Homo sapiens
  chr1:14084650-14084651
  hypo
a

SEQ ID NO: 14167 - DNA, 195 bp, Homo sapiens
  chr1:14121944-14122139
  hypo
agtttgtgctacctctcgtctgtggatctaggcgtgaggaggtagaagggagcccctggtcacgcccctgtgccgccttctagtggcatggcctttaagcagcaaagaatgtgacttgtaagcaccttgtctgctggacaagaagcaccagcagatttgaaggagctgaaaactgtgttgcgggtgaatggatgt

SEQ ID NO: 14168 - DNA, 26 bp, Homo sapiens
  chr1:14144189-14144215
  hypo
ccccattaaaaaatcccgagttcagc

SEQ ID NO: 14169 - DNA, 30 bp, Homo sapiens
  chr1:14149800-14149830
  hypo
ttctcgtgcgggcgcgtgagtggtcttcaa

SEQ ID NO: 14170 - DNA, 121 bp, Homo sapiens
  chr1:14746303-14746424
  hypo
ggttcggggtctcgctggtctcggaagtgaagccagacacctttgcggcgagtattacagctcgcacagacagtgagaccccaaagagcgagcaacaatgggatttattgcaaagagcgaa

SEQ ID NO: 14171 - DNA, 1325 bp, Homo sapiens; identical to SEQ ID NO: 139
  chr1:14925063-14926388
  hypo

SEQ ID NO: 14172 - DNA, 91 bp, Homo sapiens
  chr1:15107454-15107545
  hypo
ttacaggagcccagagggtgccgagtggagtgggggacactgaaggcaccgagagtaaataacattaaaaggcaagaaacttggccgggcg

SEQ ID NO: 14173 - DNA, 30 bp, Homo sapiens
  chr1:15110276-15110306
  hypo
acagaagggcatgggcgcacaagagacctg

SEQ ID NO: 14174 - DNA, 155 bp, Homo sapiens
  chr1:15129653-15129808
  hypo
agcctcccttcatctgcgcagtgtctgctgaggaaagtattggtgtccccattttacagaggaggaaactgaggcttagagaagtgaagcaagtcatcctcaggtacccaggtggggattagcggagggggattcagccccggatgtagctgacc

SEQ ID NO: 14175 - DNA, 188 bp, Homo sapiens
  chr1:15151514-15151702
  hypo
cgaggtgtgctcacagcgcatcccccttgctgaagccgggggttcacccacagccttctctgacttttcccactgccccaggcctaaacagggaatttcagagtctcgcaaaagctagcaaggactgccttttaagtcatgtccattcaaaggcctggaccatccctgaggccgcgaaggcacagaga

SEQ ID NO: 14176 - DNA, 338 bp, Homo sapiens
  chr1:15194447-15194785
  hypo
cagcattgcataggcaggcatcgcatatgcaggcattggatacacaggcatcacaaacgtgggcatcacacaggcatggcatcgcatagcatggcatcacatacgcacagcattgcatacacaggcatcacatacgcacggtatcacatacacaggcattgcatacacgggcatcacatagcacggcatcacatacgcagccatcgcataggcgggcatcgcataggcaggcatcaaatagcacgcatcacatacgcaggcatcgcatacgcaggcattgcaaacacatggcatcacatacgcacagccagggctgcgtctgaggccactggagggga

SEQ ID NO: 14177 - DNA, 262 bp, Homo sapiens
  chr1:15283869-15284131
  hypo
tgttgggtggatggagccattcgacagacgttaccgagtgcccgtgatgtgtcgcgcagtcactgtttccagcgctgaagacccaacagtgaaggagacgaggcaggatatgcgattgggccccgctctcggatcctgtgtccaccaagcacgccgctggggagcgagtgagcctccacgtcactacggggttttgtccgggttgcctgccgtgctgttgacgctggacaggagcggagccgttttaggtctcttgaggctg

SEQ ID NO: 14178 - DNA, 31 bp, Homo sapiens
  chr1:15304580-15304611
  hypo
ttctggtccaggcgaacgctccctccccgtg

SEQ ID NO: 14179 - DNA, 18 bp, Homo sapiens
  chr1:15357051-15357069
  hypo
tggtcatacatctttaga

SEQ ID NO: 14180 - DNA, 341 bp, Homo sapiens
  chr1:15374954-15375295
  hypo
tcaacttagaatgtcaaggcccgagcccacatgagcctaccgttgcccccgcaggagcctcccctccatggccagagccagcgttgatccttggttgttggtcctgggtcgttgatccttggtcgttggtcctgggtcgtcggtcctgggtcgctggtcctgggtcgtcggtcctgggtcgtcggtcctgggtcgtcggtcctgggtcgctggtcctgggtcgttggtcctgggtcgttgatccttggtcgttggtcctgggtcgttggtcatgggtcgtcgatcctgggtcgtcgatcctgggtcgtcgatcctgggtcgttgatccttggtcattggtc

SEQ ID NO: 14181 - DNA, 30 bp, Homo sapiens
  chr1:15375572-15375602
  hypo
tactccatggggtgacggctttgccgggag

SEQ ID NO: 14182 - DNA, 31 bp, Homo sapiens
  chr1:15403423-15403454
  hypo
cgcctcatttcaactacgccacaaactcaga

SEQ ID NO: 14183 - DNA, 31 bp, Homo sapiens
  chr1:15421285-15421316
  hypo
atatgacactccctcccgggggcaggtgctg

SEQ ID NO: 14184 - DNA, 80 bp, Homo sapiens
  chr1:15836359-15836439
  hypo
catcaaaagagttttcatttccgttagcaagaagttgactggccaccagcctaaaaggttatgagatgttttttcttttt

SEQ ID NO: 14185 - DNA, 156 bp, Homo sapiens
  chr1:15892451-15892607
  hypo
ccctcttcatcctcttcggcactgtcatcgttcaggctttcaggtaaatgtcctgtggcttctcggtgcaccaccatggttggtgttgacactttttttgtaaaactccttttttcttactttagcgactctaatgatgagcgagagtcaagccct

SEQ ID NO: 14186 - DNA, 105 bp, Homo sapiens
  chr1:15930725-15930830
  hypo
ttgcagtgagctgagatcacgccacttaaaagaaacgaaactttgctggtgaccatgtggtgatgaaactgagcgttttggagcgcagcaaggtgactccccatg

SEQ ID NO: 14187 - DNA, 30 bp, Homo sapiens
  chr1:16042821-16042851
  hypo
cacgccctgctgtacgggtaaggtggagga

SEQ ID NO: 14188 - DNA, 30 bp, Homo sapiens
  chr1:16053710-16053740
  hypo
accacggagagcagcgagcgctccgagccg

SEQ ID NO: 14189 - DNA, 30 bp, Homo sapiens
  chr1:16057148-16057178
  hypo
gctgcactacaaggcgggcacctcctacct

SEQ ID NO: 14190 - DNA, 31 bp, Homo sapiens
  chr1:16077928-16077959
  hypo
tcccaggccaagaagacggctcaacaagggc

SEQ ID NO: 14191 - DNA, 38 bp, Homo sapiens
  chr1:16101035-16101073
  hypo
gcctctcagaagaagacgaccctcgtgggttggggtgg

SEQ ID NO: 14192 - DNA, 27 bp, Homo sapiens
  chr1:16158191-16158218
  hypo
acaggcgttgagccactgcacccagcc

SEQ ID NO: 14193 - DNA, 27 bp, Homo sapiens
  chr1:16164912-16164939
  hypo
aatcagaagtcttggccggttttggtg

SEQ ID NO: 14194 - DNA, 21 bp, Homo sapiens
  chr1:16165178-16165199
  hypo
acagggcgacgggggggagac

SEQ ID NO: 14195 - DNA, 30 bp, Homo sapiens
  chr1:16258265-16258295
  hypo
gtgagaggatagaccgggaaaaactcaagc

SEQ ID NO: 14196 - DNA, 30 bp, Homo sapiens
  chr1:16260996-16261026
  hypo
ggccacaacaggcacggtgacaatggcagg

SEQ ID NO: 14197 - DNA, 30 bp, Homo sapiens
  chr1:16271161-16271191
  hypo
ccggggtaggaggccggcttggggcagtac

SEQ ID NO: 14198 - DNA, 30 bp, Homo sapiens
  chr1:16271747-16271777
  hypo
cacgtgaggggcgccggcaacatgtggaag

SEQ ID NO: 14199 - DNA, 692 bp, Homo sapiens
  chr1:16273063-16273755
  hypo
ctaggaaagggaggaacgcagcctctggaagtctacagcaaggcacctggcccatagtgggcatctgagggcttttatcttagcagctaagggaagtggaaggaggggctcaggagaacagacccgcaggagggtttaggagcctgcccgtgtgcaaaggcactgaaccaggcacggctcccgggtgctctgtaggggaaaggcaggcagagaggccaccctcagacctgaggctaacccttgccagcacccacaaccgaggcagggccagatgaggaaactgagacccagaaagtcagaggcagagcccacatcaaaagccaaggtctctggccatctgcttgggagcagctgccaataacctaccttctgtggccaaggcctccgcatttcccccagggctggtagccggctcagcaagtgacttgagggcatggcaggccgtgatgatgtcctgcatttggaggaaagtggccacggccagcacatcatccacgttctcagggctcaggctcagcttggccgtgtacataaactccagcacctgccccaggcctaccaaggacaggacagctgtcacagacccacctcaagatccggcaccggcagcctgccccaccactccactcagcagcaggacgcagggatttaggaacagctgagtggcaagcctgcatcgccccatctcctct

SEQ ID NO: 14200 - DNA, 43 bp, Homo sapiens
  chr1:16274646-16274689
  hypo
gctcatggcctgaagcctgtgcgggaggcctgttgcatcccac

SEQ ID NO: 14201 - DNA, 31 bp, Homo sapiens
  chr1:16274994-16275025
  hypo
gaagaaagccaaagggcgttggggttagcac

SEQ ID NO: 14202 - DNA, 220 bp, Homo sapiens
  chr1:16283815-16284035
  hypo
tgcaaaaaccctgaggcgggcatgactttggcacaggggccggtgtgtgtggagaggaggaggtgtgtggcacaggggccggtgtgtgtggagaggaggaggtgtgtggcacaggggccggtgtatctggagaggagcaggtgtgcatgagaatgacagcagcaggggctgagctcgcccagggtctcagggacacagcggactttggatttcttctaag

SEQ ID NO: 14203 - DNA, 31 bp, Homo sapiens
  chr1:16363231-16363262
  hypo
ggcctcgggccatggccgtgggctttgtgat

SEQ ID NO: 14204 - DNA, 149 bp, Homo sapiens
  chr1:16457639-16457788
  hypo
cacatgtgcacacatacggatgcacacacatgcatggacacacggatacacacgtacaccccactccttttttcatctctgcactctctgaatcagctcctggaacccagcacaaggcctggcacgcagtagatcctcaagaaatattt

SEQ ID NO: 14205 - DNA, 57 bp, Homo sapiens
  chr1:16458831-16458888
  hypo
aatggccaggcatccccgccccctacaacccacatccttacccgaaggaacttgtcc

SEQ ID NO: 14206 - DNA, 335 bp, Homo sapiens
  chr1:16464355-16464690
  hypo
ttgatgctgacactggcagtacggaagctgcggctggttaccaggcctgagacgccattgcgggcctccacggtgaaggtgtagttcatgtggggctccaggtcgctcactgtcacactggtgcgggtcagtccgtgaggaggctccgagtagcgcacactggcctcacacggcccgcattccccagactcgggccagcactgttcgcaggtgacgctgtagacaatgtcctcgcggcccccgctgtcctgagggggcgtccagcgcagctccaccttggcacccatgcccacggctgtgaggtagtgtggggcggaggggggtcctgcacagac

SEQ ID NO: 14207 - DNA, 31 bp, Homo sapiens
  chr1:16466962-16466993
  hypo
atacaggcactattagcgctggttccacttt

SEQ ID NO: 14208 - DNA, 608 bp, Homo sapiens
  chr1:16474920-16475528
  hypo
gcccaatgggcaccagccactcgccatccactgcacagtgcatacggggctcttcaccccccggtggcaccacggcatggtccacacaggtgccggccacagtggccagggaaggtgcatcagagccggcgatggtctcagggaagtgggccaggccctgcagcagctcggggcacttcttgtagtagacacggacggagagcagcgccacacaggcaccgatatcctggaaggccaggtagaagcctttgcgggtgagcggccccacggagcgctcctccacgttcagcttcacgtggcgtgcctcgaagtcgctgctgacggtgatctcatcgggcgcaatggtgtcaatcttggtgaacaggcgcttctggaagttggtgccgtagtccaggtccgactcggcatagtagaggttgaaagtctccttgcaggagctggcgccaccagggaagctgttgcagtcacgtacagtaaacttgagctcaatgaagatacgctcagcctctcctcggtacacccagttggtgcggagccagttgtcctggtcgccagacatcacgttgcacacggagtacatgtagatcggcatgtcattcatgatgttc

SEQ ID NO: 14209 - DNA, 451 bp, Homo sapiens; identical to SEQ ID NO: 152
  chr1:16481895-16482346
  hypo

SEQ ID NO: 14210 - DNA, 86 bp, Homo sapiens; identical to SEQ ID NO: 153
  chr1:16482709-16482795
  hypo

SEQ ID NO: 14211 - DNA, 30 bp, Homo sapiens
  chr1:16498071-16498101
  hypo
ttgagaatgtgcctcggggcccgtctgcag

SEQ ID NO: 14212 - DNA, 55 bp, Homo sapiens
  chr1:16567829-16567884
  hypo
ttcatttgcaggagccggcacaggcgcaggaaccatcaggcgagcaggagcagtt

SEQ ID NO: 14213 - DNA, 30 bp, Homo sapiens
  chr1:16574656-16574686
  hypo
gccttggccgagacacgtgaagtcccaccg

SEQ ID NO: 14214 - DNA, 31 bp, Homo sapiens
  chr1:16598342-16598373
  hypo
tcctctgtaggctgggcgcagtggctcacac

SEQ ID NO: 14215 - DNA, 31 bp, Homo sapiens
  chr1:16598718-16598749
  hypo
cagatgtccacagagacgcaaactataaggc

SEQ ID NO: 14216 - DNA, 33 bp, Homo sapiens
  chr1:16624056-16624089
  hypo
actaagaagtcaagtccaggccgggcgtggtgg

SEQ ID NO: 14217 - DNA, 21 bp, Homo sapiens
  chr1:16705889-16705910
  hypo
gccctgccttagggttcagtt

SEQ ID NO: 14218 - DNA, 31 bp, Homo sapiens
  chr1:16724423-16724454
  hypo
ggtcctgttttctggtcgtgtgatcccaggg

SEQ ID NO: 14219 - DNA, 30 bp, Homo sapiens
  chr1:16810662-16810692
  hypo
cggagggcgccagacgctccctccaggcct

SEQ ID NO: 14220 - DNA, 31 bp, Homo sapiens
  chr1:16828209-16828240
  hypo
gacccccaagacaacccgccagaaaagaatc

SEQ ID NO: 14221 - DNA, 36 bp, Homo sapiens
  chr1:16957468-16957504
  hypo
ctctgcggggcgaacggcctcggcccggcgaggagc

SEQ ID NO: 14222 - DNA, 31 bp, Homo sapiens
  chr1:17270868-17270899
  hypo
gtcctgggcctcctaccgtctggacccctcc

SEQ ID NO: 14223 - DNA, 31 bp, Homo sapiens
  chr1:17292159-17292190
  hypo
agatgtgtgggaggcccgtggcttctgcatc

SEQ ID NO: 14224 - DNA, 30 bp, Homo sapiens
  chr1:17312786-17312816
  hypo
gcttcttggaggcccgcttgggccggaggc

SEQ ID NO: 14225 - DNA, 30 bp, Homo sapiens
  chr1:17313569-17313599
  hypo
ccctagctgcacgccggtcaccaggaccat

SEQ ID NO: 14226 - DNA, 30 bp, Homo sapiens
  chr1:17330878-17330908
  hypo
ggaagaggtaataccgcagcacccgcttct

SEQ ID NO: 14227 - DNA, 30 bp, Homo sapiens
  chr1:17381965-17381995
  hypo
ttcattcataaatacgaatggagtggctac

SEQ ID NO: 14228 - DNA, 31 bp, Homo sapiens
  chr1:17546141-17546172
  hypo
cgagatgaggacagagcgatggtgtgcaaag

SEQ ID NO: 14229 - DNA, 209 bp, Homo sapiens; identical to SEQ ID NO: 158
  chr1:17591035-17591244
  hypo

SEQ ID NO: 14230 - DNA, 45 bp, Homo sapiens
  chr1:17734377-17734422
  hypo
ctctcttgggtccaggcgagaggagggttccgggaaaggcacctc

SEQ ID NO: 14231 - DNA, 506 bp, Homo sapiens
  chr1:17736188-17736694
  hypo
cgcgagcgatgtgctcgcccgagagtggatctgctgcggccagttggtgccatctgtcatcaagggtgaggacagccacccagcctggccagcaaccctgtgcactctctcctgcagaatgattgttacctctcaaacaaatcttagcgtgagacaccaggaaagccagctgagatggtaaacaagacaacccaaacagactgcgatgatcaaaatcatgaggagtgacataccactgggtacggacacgtccccgagctggcacagctgcccccactcacctgctctgagaaaatgccatccagagtctttacctcctgggctgcagtggaagacttgggcttgtggtccccgtagccctggcgaagcaaacaagatgttcgcaatcgaggatccatgtggctcagtccacaagtggggaatcacggcaacatttcctggcccccactaaccagaagccagtgatgatgccctctggcccatgacaagcccggccacccttgcac

SEQ ID NO: 14232 - DNA, 762 bp, Homo sapiens; identical to SEQ ID NO: 159
  chr1:17865939-17866701
  hypo

SEQ ID NO: 14233 - DNA, 31 bp, Homo sapiens
  chr1:17897918-17897949
  hypo
gagcatgggcactcctcggggaagtcttgta

SEQ ID NO: 14234 - DNA, 31 bp, Homo sapiens; identical to SEQ ID NO: 160
  chr1:17908286-17908317
  hypo

SEQ ID NO: 14235 - DNA, 31 bp, Homo sapiens
  chr1:17919149-17919180
  hypo
ggcaggtcagcaaggccggagtgggtccgca

SEQ ID NO: 14236 - DNA, 31 bp, Homo sapiens
  chr1:17934560-17934591
  hypo
ccaggcctaggactcacgtctgggtcccagg

SEQ ID NO: 14237 - DNA, 31 bp, Homo sapiens
  chr1:17949468-17949499
  hypo
ctcaccccgccctccccggcaggactaccgc

SEQ ID NO: 14238 - DNA, 30 bp, Homo sapiens
  chr1:17996866-17996896
  hypo
cgctcaccggggcccgtgtcaacaccgcgt

SEQ ID NO: 14239 - DNA, 31 bp, Homo sapiens
  chr1:17997212-17997243
  hypo
tatgctattggatctccgcaacgctgaggag

SEQ ID NO: 14240 - DNA, 57 bp, Homo sapiens
  chr1:18021387-18021444
  hypo
gttcccccaatgcatccgtatggcagccccactttacacaggcggaaactgaggctg

SEQ ID NO: 14241 - DNA, 147 bp, Homo sapiens
  chr1:18023544-18023691
  hypo
catcctcttgcagtaccgcctgcgctccaccgcacacctcccgggcccgctgctctccatgcgggagccggcgcctgctgatggcgcagctttggagcacagcgaggaggacggctccatttacgagatggccgacgaccccgacat

SEQ ID NO: 14242 - DNA, 30 bp, Homo sapiens; identical to SEQ ID NO: 162
  chr1:18434759-18434789
  hypo

SEQ ID NO: 14243 - DNA, 641 bp, Homo sapiens; identical to SEQ ID NO: 164
  chr1:18437043-18437684
  hypo

SEQ ID NO: 14244 - DNA, 30 bp, Homo sapiens
  chr1:18703389-18703419
  hypo
gagcgggttcccgccgagctcaatggctcc

SEQ ID NO: 14245 - DNA, 30 bp, Homo sapiens; identical to SEQ ID NO: 175
  chr1:19043558-19043588
  hypo

SEQ ID NO: 14246 - DNA, 30 bp, Homo sapiens
  chr1:19203984-19204014
  hypo
gagacgcgagcacgcggaacacttctggcc

SEQ ID NO: 14247 - DNA, 30 bp, Homo sapiens
  chr1:19204218-19204248
  hypo
cagcccagagcgggcggaggctcagagtga

SEQ ID NO: 14248 - DNA, 30 bp, Homo sapiens
  chr1:19205975-19206005
  hypo
caagtcggggatggcggctgggaacaggct

SEQ ID NO: 14249 - DNA, 184 bp, Homo sapiens
  chr1:19208682-19208866
  hypo
cactgagtgctcaccgggcgcggcggggcaagtacacacgggctctctcagcacatgtcctgggtcaggcatgtgcagcagccaggcacgtgggcgcctggccatgcaccgtgtttgtctgtgcacagatgcatgaggacgtccccatccatgtccctagtacacactccggcatcagcatcca

SEQ ID NO: 14250 - DNA, 144 bp, Homo sapiens
  chr1:19245954-19246098
  hypo
atctctactcagaccgagggaagcagaagtggggagggggcgggaggagggtgcctggtctccgatgcatccaatgcatccgtcatcctcatggtcaaacacagccagccaggattctaactagaagccgagccccggagcctc

SEQ ID NO: 14251 - DNA, 30 bp, Homo sapiens
  chr1:19419512-19419542
  hypo
accgtgaccctctccgagtgtcataaagaa

SEQ ID NO: 14252 - DNA, 30 bp, Homo sapiens
  chr1:19526914-19526944
  hypo
ggattctaaaatgacgtcctggtcaggcat

SEQ ID NO: 14253 - DNA, 305 bp, Homo sapiens; identical to SEQ ID NO: 178
  chr1:19639207-19639512
  hypo

SEQ ID NO: 14254 - DNA, 31 bp, Homo sapiens
  chr1:19664319-19664350
  hypo
gggaggctgcaacacccgtgtgcccatgggg

SEQ ID NO: 14255 - DNA, 136 bp, Homo sapiens
  chr1:19676641-19676777
  hypo
gtattacacctcccactgccacgtggcatcttctagcgcgacccgcagggcgtggccctaaggcatgggccccactcaccggcgctgaggccccgcagctcctgtgctgcagcccgagaggaaagggcctgggctt

SEQ ID NO: 14256 - DNA, 30 bp, Homo sapiens
  chr1:19680338-19680368
  hypo
ctggggagccttgacgccgtgtgcggctct

SEQ ID NO: 14257 - DNA, 31 bp, Homo sapiens
  chr1:19708690-19708721
  hypo
tctactggctcacagacgatagcatttcaag

SEQ ID NO: 14258 - DNA, 73 bp, Homo sapiens
  chr1:19721242-19721315
  hypo
aaaagtgagcaagccacgcaacatagatttgagataatggtacatacagcacatctggcggagtaacacagat

SEQ ID NO: 14259 - DNA, 30 bp, Homo sapiens
  chr1:19746549-19746579
  hypo
gtggctgcagatgtcgtgccccccagttgg

SEQ ID NO: 14260 - DNA, 30 bp, Homo sapiens
  chr1:19794320-19794350
  hypo
tgcttccccgacatcgtttccacaccagca

SEQ ID NO: 14261 - DNA, 19 bp, Homo sapiens
  chr1:19949422-19949441
  hypo
ttttttttttttgaaacgg

SEQ ID NO: 14262 - DNA, 31 bp, Homo sapiens
  chr1:19950670-19950701
  hypo
accatgttggccaggccgtggttctgctttt

SEQ ID NO: 14263 - DNA, 30 bp, Homo sapiens
  chr1:19983460-19983490
  hypo
cacgaggggctgagcgtctatgtgcagggc

SEQ ID NO: 14264 - DNA, 31 bp, Homo sapiens
  chr1:19984406-19984437
  hypo
agaaatgttagtgccccgcactgtgccccaa

SEQ ID NO: 14265 - DNA, 31 bp, Homo sapiens
  chr1:19984767-19984798
  hypo
tgcccagcactgtctgcgtctgctcttctgt

SEQ ID NO: 14266 - DNA, 208 bp, Homo sapiens
  chr1:20060817-20061025
  hypo
tctgccgagttgctgccgtgtgagtgtgtgcagatgcgtgtatgaatgtgtgcaggtgtgtgtgtgagtgtgcatatgtgcgcatgtgtgtgaactgtagggtgcccagcaccagtgcccccgggtcctccttggcaggatccactcagttactcattcactccacagtttaaagacctcaatctttccccagcgttgaaccagttgt

SEQ ID NO: 14267 - DNA, 84 bp, Homo sapiens
  chr1:20127455-20127539
  hypo
gcgcagccccaactagactttaaaagccctggaggtgggcgggtttaggctgccttgctctccgctgtgtgcccagccccaggg

SEQ ID NO: 14268 - DNA, 181 bp, Homo sapiens
  chr1:20230265-20230446
  hypo
gactgtccagctgggacgggagcttcagtacctctaagcgtgctgatgatcaaataaggcttgggaaccagagggaagttgtatgtaggtttcttcaagaccagcaccgtttttgtgcaaaagttcaccaggtgcgagtatagaggatcgttttctgttaagctcacggctctgaaaatca

SEQ ID NO: 14269 - DNA, 30 bp, Homo sapiens
  chr1:20397059-20397089
  hypo
cccagggggaggtgcgcaggcacagcctct

SEQ ID NO: 14270 - DNA, 29 bp, Homo sapiens
  chr1:20498543-20498572
  hypo
ccgcgcccggccaagaagccacttcttta

SEQ ID NO: 14271 - DNA, 200 bp, Homo sapiens
  chr1:20554749-20554949
  hypo
gtctaagattctaatccgggcgacatggttctagaaccattctctaccatctcctgttagcaggatgcaggcttctgcacccaaaactgagacatcaggatatggagatgtccgccagggctggagtccctgagaaacagatcctgagacggagacttgcatataggaaagttcattggcaagtgcgctccagatcacac

SEQ ID NO: 14272 - DNA, 31 bp, Homo sapiens
  chr1:20680363-20680394
  hypo
tccctcaccacccgcccgtctgagtccaaga

SEQ ID NO: 14273 - DNA, 31 bp, Homo sapiens
  chr1:20802147-20802178
  hypo
cacaagagcgagacttcgtctcaaaaaaaaa

SEQ ID NO: 14274 - DNA, 30 bp, Homo sapiens; identical to SEQ ID NO: 193
  chr1:20812806-20812836
  hypo

SEQ ID NO: 14275 - DNA, 483 bp, Homo sapiens; identical to SEQ ID NO: 195
  chr1:20878745-20879228
  hypo

SEQ ID NO: 14276 - DNA, 181 bp, Homo sapiens; identical to SEQ ID NO: 196
  chr1:20879255-20879436
  hypo

SEQ ID NO: 14277 - DNA, 1252 bp, Homo sapiens; identical to SEQ ID NO: 197
  chr1:20879462-20880714
  hypo

SEQ ID NO: 14278 - DNA, 35 bp, Homo sapiens
  chr1:20920112-20920147
  hypo
ctggaagtacagtggcgcgagcctagttcactgca

SEQ ID NO: 14279 - DNA, 31 bp, Homo sapiens; identical to SEQ ID NO: 198
  chr1:20959848-20959879
  hypo

SEQ ID NO: 14280 - DNA, 56 bp, Homo sapiens
  chr1:20977498-20977554
  hypo
acctttgcccctaacacgaggaactcgtttgaagggggcagcgtagcatgtctgat

SEQ ID NO: 14281 - DNA, 137 bp, Homo sapiens
  chr1:20983633-20983770
  hypo
ccaggtgcaaagtccccgaggggggtgggcacggtcaccagcaaggggcccagtgtggcttagctggagagaaaggagtgagcagcaggaggtaaggccgggtgaagtgagggcccaggctgcgcagggctctgcac

SEQ ID NO: 14282 - DNA, 31 bp, Homo sapiens
  chr1:21027557-21027588
  hypo
ggagcactgtgagtcacgatgggctttcctt

SEQ ID NO: 14283 - DNA, 30 bp, Homo sapiens
  chr1:21031297-21031327
  hypo
ctcgcccgtggccccggtcttggactgccg

SEQ ID NO: 14284 - DNA, 31 bp, Homo sapiens
  chr1:21048390-21048421
  hypo
ttcaggcggcccatgtcgaggggacagaaga

SEQ ID NO: 14285 - DNA, 30 bp, Homo sapiens
  chr1:21050511-21050541
  hypo
ggtccaggagcgcacgggcacgtgtcccag

SEQ ID NO: 14286 - DNA, 30 bp, Homo sapiens
  chr1:21062074-21062104
  hypo
cgctcaggattgcagcgtaaaacggccatc

SEQ ID NO: 14287 - DNA, 158 bp, Homo sapiens
  chr1:21062547-21062705
  hypo
atccacttttgacagcgcacactccatcccagtctccaacaccttcacatgttgagttatttcacctttgaacactatcattctgttctctcagatgtgtcctggcggccatccctgcaatttatcaacattgtcccccaaaaataggtgacctagaa

SEQ ID NO: 14288 - DNA, 38 bp, Homo sapiens
  chr1:21122638-21122676
  hypo
gggattacaggcgtgagccatcgcgcccggcctagaat

SEQ ID NO: 14289 - DNA, 333 bp, Homo sapiens; identical to SEQ ID NO: 201
  chr1:21563184-21563517
  hypo

SEQ ID NO: 14290 - DNA, 773 bp, Homo sapiens
  chr1:21573387-21574160
  hypo
gggatcctcctgcctctgtctcccaaaagtcccgcaattacgggcgttcatgcccggccacaggtgatatttgtatcaccattttatgaaggaggagaatgaacttaagaaaggttacgaaatttgcccaaggctacaaagctggtagtttgaaagaggctgggatttaaacctgtgcctgtaaccaggatgtcctgctgcctctcgtaaaagcccgcccaggtcccactctcctgagtcagactgtcatccccacccctgcccacctgcccaagaagagggctgtctgtgagaggcgtgccccaggccactgggggtcctcttaccatctgtcggtggtgttgatgagagtggagatctgctcaaggtattccttgtcatagaccacaataggctcggattcattgatctccacggggtagaagatggtgttgagaaaaggcaaccagttgatggcgggtgccaaggtctgcaagggaaaaggacagtgtgaccctgtggggctgctcctcctcacagcccagggctctaggacgggcttctacaggaagcaaaggaaagagcttgggcttggcgccatctgacagcgcaccgggcagagagtcaagcggagcctggcgggcttttgtcagagatgctgtaggtagaattctaaggagtccaacaccaaaatttaacctgaaatggaatgaggatgcaatgagaagatgcagcagctgccgctaccattcagcaagcgtctcctgtgtgccaggagccgtggcaaatgattg

SEQ ID NO: 14291 - DNA, 30 bp, Homo sapiens
  chr1:21586816-21586846
  hypo
cgttcatgcacgcacggtagtatacttgcg

SEQ ID NO: 14292 - DNA, 21 bp, Homo sapiens
  chr1:21636560-21636581
  hypo
tacaggcgtgagccactgtgc

SEQ ID NO: 14293 - DNA, 85 bp, Homo sapiens
  chr1:21889627-21889712
  hypo
ctgacagtgccggcaccgccaccgcctacctgtgtggggtgaaggccaatgagggcaccgtgggggtaagcgcagccactgagcg

SEQ ID NO: 14294 - DNA, 31 bp, Homo sapiens
  chr1:21924747-21924778
  hypo
tggacaatgacctgcccgctgtcctccaagt

SEQ ID NO: 14295 - DNA, 167 bp, Homo sapiens
  chr1:21944016-21944183
  hypo
actgtaccccactgggcgccccaggacaccctcccaactcagacctggagccgcttctgtcgtggctaaggggtatgaggggacaggccagagcctgtgtgggccccagggttctgctccagccctttccctcagccagacccagacagcgccgagacccaagtctc

SEQ ID NO: 14296 - DNA, 30 bp, Homo sapiens
  chr1:22001552-22001582
  hypo
cgcagagccatgcctcggcagctcgagaca

SEQ ID NO: 14297 - DNA, 212 bp, Homo sapiens
  chr1:22003570-22003782
  hypo
agacgaaacgagaatcgggctttaggtcataccctttacctgtttttccctgtaccaagtgagaagggtggcaatgcaaaaccattcaatacaagcatacgtttctttgcaactctgcctactatgggtgggagaggccccaagcccagggtttcaaagagtacaggagtggcctgtggatgcagattccgattcagcgggtctagggcctg

SEQ ID NO: 14298 - DNA, 30 bp, Homo sapiens
  chr1:22023401-22023431
  hypo
ggggtgagtgagaggcgcaggggagattct

SEQ ID NO: 14299 - DNA, 224 bp, Homo sapiens
  chr1:22023678-22023902
  hypo
atttgttcagggtgccgaccactggcgagacactgcctgaggatagtttagctctagccctgaatctacataggcaactgagtgattctaagattcacgagaaaaagttaagtgcacatgtgagttaaaaagaaaaaaaaaaaatgaaacccgatgaaacatttttctcagtctcgactgttgaaagaaaaggtcaggccaggcgtggtggctcatgcctgtaa

SEQ ID NO: 14300 - DNA, 194 bp, Homo sapiens
  chr1:22032530-22032724
  hypo
caacaaacagaatccacgatatcttaaaaaataccagagtcaaccaaatcagtaacaataaaggaaataaaacatattttgtttctacctaacaaatttccgccactcttctacaaagaactgagacacgatgtagaggacatccgtatcctagaacacaaaaatcacaaaacagtatccgtcaattcaccgcc

SEQ ID NO: 14301 - DNA, 85 bp, Homo sapiens
  chr1:22179017-22179102
  hypo
aagtgtgacgggaaggcggtggttactctgacaggtggagtcggcctgggcagggccctgcagccagctccggtgtgggccttct

SEQ ID NO: 14302 - DNA, 353 bp, Homo sapiens
  chr1:22198887-22199240
  hypo
agggggcgtcagcctgagcaccggggtgccttggtgggggatggggcacgggagggtgttaaggtgcggaatggggtcctgttgagatcaggactgcgagagaaataatgggggcatgtgagggtactgaggcggggatgagggtcgctgggctcagtgctcagatggacagtaacaggcagcaggtggcaacaccgcctggggctgggcagcacaggctctcaccaggtggcgtgtgtaggcagagctggcgcactgctgggtgatgcccatacagaagcagggcaggcagccgtctgggttgctggcactcaggtggaagtggtggggccggcagtggctgcaagtgaggc

SEQ ID NO: 14303 - DNA, 195 bp, Homo sapiens
  chr1:22202046-22202241
  hypo
ctgtgctgtactgcaccgcttagatggagcccctccccaagcccatgctggtcctcctgccccggctccagacacctgctctcagcgggctgctgggcgtaggatgctcggatcaggagggtgtcgatgcctgccagtgccatcagcaggtgctcccgtgtggctggctgcccatcgggccgctgccatgcttgc

SEQ ID NO: 14304 - DNA, 30 bp, Homo sapiens
  chr1:22247934-22247964
  hypo
cctaagactgtctccgggaccccaggtgca

SEQ ID NO: 14305 - DNA, 30 bp, Homo sapiens
  chr1:22282669-22282699
  hypo
tcccatcccccactcgccccattctccact

SEQ ID NO: 14306 - DNA, 158 bp, Homo sapiens
  chr1:22465798-22465956
  hypo
gccacacgcatgggctcgctctttcttcccaaccaccattgtgcaccatttgcatcagtgggctccattttacagatgagaaacccgaggctcggagaggttaataacctgtccaaggtcactcagctgggcagggcagagctcggttggatctcaaa

SEQ ID NO: 14307 - DNA, 116 bp, Homo sapiens
  chr1:22584533-22584649
  hypo
tggtctggcctggctctgctccgcaccgtgaatttttcattaatgtgcacaggtgacgccacggggcagccgcaggccaggtaggctcccacggcggcaaggcctgggctggacct

SEQ ID NO: 14308 - DNA, 150 bp, Homo sapiens
  chr1:22777704-22777854
  hypo
gtgcgggctggggacgcggctcaggtcgcctctccgcctcgcacgtgaatgtgttgttttggaaaaacgaagccttttgtgttcacttccttgccctcctttgaaacaaaatcctaatcctagagctgccggagcgagactgcggagctc

SEQ ID NO: 14309 - DNA, 30 bp, Homo sapiens
  chr1:22838399-22838429
  hypo
tccatttctactgccgcctaaaggtgcaca

SEQ ID NO: 14310 - DNA, 30 bp, Homo sapiens
  chr1:22903391-22903421
  hypo
gggcatgggtcagccggcagcggtgcttgg

SEQ ID NO: 14311 - DNA, 30 bp, Homo sapiens
  chr1:22927513-22927543
  hypo
attgtcagtgtcctcgatgcgctcatccgc

SEQ ID NO: 14312 - DNA, 30 bp, Homo sapiens
  chr1:22927910-22927940
  hypo
cacttcgctgcgggcggatactcctctctg

SEQ ID NO: 14313 - DNA, 520 bp, Homo sapiens; identical to SEQ ID NO: 210
  chr1:23037774-23038294
  hypo

SEQ ID NO: 14314 - DNA, 31 bp, Homo sapiens
  chr1:23063133-23063164
  hypo
gggcagcctccgcagcgcggcatgtttgcgc

SEQ ID NO: 14315 - DNA, 31 bp, Homo sapiens
  chr1:23063498-23063529
  hypo
ctgcgaatccagccatcggcgtgacgaggaa

SEQ ID NO: 14316 - DNA, 86 bp, Homo sapiens
  chr1:23091395-23091481
  hypo
gatggggtttcaccctcgccagtttgggttcctccaagcaggggctgcggttggggcagatgcacgggaggcgctcagagagggag

SEQ ID NO: 14317 - DNA, 115 bp, Homo sapiens
  chr1:23111173-23111288
  hypo
ataccattgcagccgacgagagcttctcccaggtggacctgggtggccgcgtcatgaaaatcaacaccgaggtgcggagcttcggacctgtgtcccgcagcggcttctacctggc

SEQ ID NO: 14318 - DNA, 31 bp, Homo sapiens
  chr1:23189581-23189612
  hypo
ctgtcccatcaacagccggaccacttctgaa

SEQ ID NO: 14319 - DNA, 183 bp, Homo sapiens
  chr1:23191505-23191688
  hypo
ccggggtgcctgcacccgctgcggggacaatgtacagtacgcaccacgccagctaggcctgaccgagccacgcatttacatcagtgacctgctggcccacacccagtacaccttcgagatccaggctgtgaacggcgttactgaccagagccccttctcgcctcagttcgcctctgtgaacat

SEQ ID NO: 14320 - DNA, 212 bp, Homo sapiens
  chr1:23201491-23201703
  hypo
agtctccacaagcagacgggctacaactctgcgttcctcaaactttcttagccacagaatacgcagtgccaccctagcaccagttgtcagcttttccttttttctgtcccataccactctctaagaggcccatcagaaagaatcaaaggcccactttctggaagttttatttgcagaaattcggttgtgagaattatcgtcaggtcatccag

SEQ ID NO: 14321 - DNA, 31 bp, Homo sapiens; identical to SEQ ID NO: 212
  chr1:23346339-23346370
  hypo

SEQ ID NO: 14322 - DNA, 189 bp, Homo sapiens
  chr1:23411431-23411620
  hypo
ctggcatcacagactcgcacagagtatacggaaacgagggagctttattggttacatattgtactgcagagccaacagagagcattcgcgccagaggatacatgcagacaggcagctccaatgatacacatgcacccaaggagccctgagccactgctttgccctggtttccagcgacaggttctggcc

SEQ ID NO: 14323 - DNA, 30 bp, Homo sapiens
  chr1:23418390-23418420
  hypo
ccctggtttggagacgggtttctgtttctc

SEQ ID NO: 14324 - DNA, 37 bp, Homo sapiens
  chr1:23440074-23440111
  hypo
aaaagaaaatatgctcaaggccggacacggtggctca

SEQ ID NO: 14325 - DNA, 51 bp, Homo sapiens
  chr1:23567824-23567875
  hypo
gtggctcacggatcacgaggtcaggagatcgagaccacggtgaaaccccgt

SEQ ID NO: 14326 - DNA, 31 bp, Homo sapiens
  chr1:23705731-23705762
  hypo
tctgtgagaggattttcgatctttccaagaa

SEQ ID NO: 14327 - DNA, 20 bp, Homo sapiens
  chr1:23714649-23714669
  hypo
aaggagggtggctgacgcga

SEQ ID NO: 14328 - DNA, 30 bp, Homo sapiens
  chr1:23762543-23762573
  hypo
ctcagagcatggaccgtgtctgcccagctg

SEQ ID NO: 14329 - DNA, 31 bp, Homo sapiens; identical to SEQ ID NO: 216
  chr1:23857852-23857883
  hypo

SEQ ID NO: 14330 - DNA, 30 bp, Homo sapiens; identical to SEQ ID NO: 217
  chr1:23865146-23865176
  hypo

SEQ ID NO: 14331 - DNA, 102 bp, Homo sapiens
  chr1:23954417-23954519
  hypo
cttccgcaatctcaccgtctccaccgttactacctgtgtccgaggcaccactgtttcttgcctggagttgtgtaagagcctctcagtgacgttccctgcttt

SEQ ID NO: 14332 - DNA, 144 bp, Homo sapiens
  chr1:23963132-23963276
  hypo
gaggcctggctggagtgggcacgaggtgtggctgaaaccaggggtgcttagcggggatagacggagctgcagcctcgcccttgagtgggttgtaccagtcatgtcactgagcactgacgctgcgctctgcatcctggagaaaat

SEQ ID NO: 14333 - DNA, 30 bp, Homo sapiens
  chr1:24086205-24086235
  hypo
cccctgggaacctgcgtgccacagccccgc

SEQ ID NO: 14334 - DNA, 1 bp, Homo sapiens
  chr1:24110736-24110737
  hypo
t

SEQ ID NO: 14335 - DNA, 46 bp, Homo sapiens
  chr1:24111036-24111082
  hypo
taaattacatgcattttgccccagctaatatcgaggcctcttctgt

SEQ ID NO: 14336 - DNA, 381 bp, Homo sapiens; identical to SEQ ID NO: 219
  chr1:24126328-24126709
  hypo

SEQ ID NO: 14337 - DNA, 30 bp, Homo sapiens; identical to SEQ ID NO: 220
  chr1:24377790-24377820
  hypo

SEQ ID NO: 14338 - DNA, 31 bp, Homo sapiens
  chr1:24424242-24424273
  hypo
aaggcccccagggaagcgggagtctccaggg

SEQ ID NO: 14339 - DNA, 149 bp, Homo sapiens
  chr1:24611924-24612073
  hypo
cagctgctccccaaacgcagctacaccccgacctccatcttgagagagaggagagcctgtggtgtacagcgtggccccagcaggcacctgtgctgatgggaaaacacacagacaggccaacgaatacacgtacgcgcacgcacgtacag

SEQ ID NO: 14340 - DNA, 30 bp, Homo sapiens
  chr1:24627473-24627503
  hypo
gccacttttggagtcgctgtgccttggcac

SEQ ID NO: 14341 - DNA, 33 bp, Homo sapiens
  chr1:24683005-24683038
  hypo
ggcgtgagccaccgtgtccggccacatttatct

SEQ ID NO: 14342 - DNA, 30 bp, Homo sapiens
  chr1:24701634-24701664
  hypo
atacatttgagagtgcgcgatgtgttcaga

SEQ ID NO: 14343 - DNA, 85 bp, Homo sapiens
  chr1:24706235-24706320
  hypo
cttggaaataaaatccgatgggatagtgtatgcattcgctgcagggtatttagaaatgatggtgtccaatcgggcgcactgtaag

SEQ ID NO: 14344 - DNA, 258 bp, Homo sapiens
  chr1:25070656-25070914
  hypo
caaaaagcggggctgcgtgtagcacctaggtgattctgatgcacactcaaatttgacaggtgagccggggggaagaaatgggtgtgggcagtggggaacaagatggacaacgacttggaagtccttagtggcctgcaggcactgagattgcagttcaagatcttgagctttgggagttgttactctccaagggctagctcagagcctgaaacacagtaaggtttcataaatatttgtgaatatgcgcccggcgcggtg

SEQ ID NO: 14345 - DNA, 40 bp, Homo sapiens
  chr1:25115717-25115757
  hypo
atagaaacaggctgggcgaggaggctcacgcctgtaatcc

SEQ ID NO: 14346 - DNA, 30 bp, Homo sapiens
  chr1:25229177-25229207
  hypo
ggtcagttccagctcgagacaaccccagga

SEQ ID NO: 14347 - DNA, 32 bp, Homo sapiens
  chr1:25230201-25230233
  hypo
gtcctgagccccaacacgtacttgagagggag

SEQ ID NO: 14348 - DNA, 30 bp, Homo sapiens; identical to SEQ ID NO: 224
  chr1:25255276-25255306
  hypo

SEQ ID NO: 14349 - DNA, 104 bp, Homo sapiens; identical to SEQ ID NO: 225
  chr1:25255506-25255610
  hypo

SEQ ID NO: 14350 - DNA, 903 bp, Homo sapiens; identical to SEQ ID NO: 226
  chr1:25255920-25256823
  hypo

SEQ ID NO: 14351 - DNA, 14 bp, Homo sapiens
  chr1:25257156-25257170
  hypo
gggcctgtgacttc

SEQ ID NO: 14352 - DNA, 134 bp, Homo sapiens
  chr1:25396319-25396453
  hypo
gtggctggcctaaactcgtctcttgaagggaagaatatcaaggaatttgggggcatagttttaaaccgccatcttcctttaggccttgctcaaatgtcaccttcccagagatgccttcccggacatgtctgttt

SEQ ID NO: 14353 - DNA, 30 bp, Homo sapiens
  chr1:25828413-25828443
  hypo
cccccaggtggaagcgcagacctgccgcaa

SEQ ID NO: 14354 - DNA, 30 bp, Homo sapiens
  chr1:25857404-25857434
  hypo
gtcctggtattctccgggtgttgacaatgg

SEQ ID NO: 14355 - DNA, 81 bp, Homo sapiens; identical to SEQ ID NO: 228
  chr1:25870705-25870786
  hypo

SEQ ID NO: 14356 - DNA, 159 bp, Homo sapiens
  chr1:25890393-25890552
  hypo
ggaccagacccagcccggtagtgcccaggcgcaggataggggatgaacaatgtcccttttgaacctgaggctgcatccccaacaggcttggctcccagcacagctgtctcctcacaatgcttggcctcttggcctgagcgtccacggctctgcccacca

SEQ ID NO: 14357 - DNA, 30 bp, Homo sapiens
  chr1:25912955-25912985
  hypo
atctctgcttcccacgtgcgtgtgcgtgtg

SEQ ID NO: 14358 - DNA, 30 bp, Homo sapiens
  chr1:25919275-25919305
  hypo
gtgagtgcggacagcgtcctagtccttcac

SEQ ID NO: 14359 - DNA, 30 bp, Homo sapiens
  chr1:26107502-26107532
  hypo
gctactacatcctccggccagaggtggtgg

SEQ ID NO: 14360 - DNA, 215 bp, Homo sapiens
  chr1:26121477-26121692
  hypo
aagccttctccccagccggggtccctccagggtgcctcatctcaggatggtgccaccagctacccaagctcaacccatggctgatgctggtctttcctcttgccgtccacttctgacccatccgcaaatcctgtctgtggctctgctacactcatatatcttgtccacgcctgcccaatccctgccatcttatgtctgggcgactgcattagcct

SEQ ID NO: 14361 - DNA, 31 bp, Homo sapiens
  chr1:26141989-26142020
  hypo
cctgggggcccccctccgccccacttgcctc

SEQ ID NO: 14362 - DNA, 30 bp, Homo sapiens
  chr1:26226634-26226664
  hypo
aatattctgattctcgtgtcatagctttta

SEQ ID NO: 14363 - DNA, 30 bp, Homo sapiens
  chr1:26376142-26376172
  hypo
ttggcctttcctggcgtgagtctgggcacc

SEQ ID NO: 14364 - DNA, 30 bp, Homo sapiens
  chr1:26467517-26467547
  hypo
gaaacttggagccaggccaggcgcggtggc

SEQ ID NO: 14365 - DNA, 7 bp, Homo sapiens
  chr1:26467786-26467793
  hypo
cgagact

SEQ ID NO: 14366 - DNA, 31 bp, Homo sapiens
  chr1:26502463-26502494
  hypo
tatgtaagaggaggggcgtcaaagaccaccc

SEQ ID NO: 14367 - DNA, 8 bp, Homo sapiens
  chr1:26634462-26634470
  hypo
atttacag

SEQ ID NO: 14368 - DNA, 30 bp, Homo sapiens
  chr1:26661671-26661701
  hypo
aaaactactggggtcgccgggcgcagtggc

SEQ ID NO: 14369 - DNA, 836 bp, Homo sapiens; identical to SEQ ID NO: 237
  chr1:26662523-26663359
  hypo

SEQ ID NO: 14370 - DNA, 30 bp, Homo sapiens
  chr1:26678084-26678114
  hypo
gttaaaggaggcggccgatcatgagatcag

SEQ ID NO: 14371 - DNA, 234 bp, Homo sapiens; identical to SEQ ID NO: 238
  chr1:26735162-26735396
  hypo

SEQ ID NO: 14372 - DNA, 30 bp, Homo sapiens; identical to SEQ ID NO: 240
  chr1:26737303-26737333
  hypo

SEQ ID NO: 14373 - DNA, 30 bp, Homo sapiens; identical to SEQ ID NO: 241
  chr1:26737696-26737726
  hypo

SEQ ID NO: 14374 - DNA, 31 bp, Homo sapiens
  chr1:26828980-26829011
  hypo
ctttgcaatgtcctcccgagaactttggtaa

SEQ ID NO: 14375 - DNA, 107 bp, Homo sapiens; identical to SEQ ID NO: 244
  chr1:26855979-26856086
  hypo

SEQ ID NO: 14376 - DNA, 22 bp, Homo sapiens
  chr1:27016539-27016561
  hypo
ggcctcccgtattgtttttaaa

SEQ ID NO: 14377 - DNA, 51 bp, Homo sapiens
  chr1:27056296-27056347
  hypo
gatgaccatgcagggccgggcgcagagtgccatgggcggcctctcttatac

SEQ ID NO: 14378 - DNA, 118 bp, Homo sapiens
  chr1:27057987-27058105
  hypo
cagcagccagcaccctcgacgctctcccagcaggctgcgtatcctcagccccagtctcagcagtcccagcaaactgcctattcccagcagcgcttccctccaccgcaggtaagatatc

SEQ ID NO: 14379 - DNA, 24 bp, Homo sapiens
  chr1:27062068-27062092
  hypo
cacctcacccggcctgaaatccag

SEQ ID NO: 14380 - DNA, 19 bp, Homo sapiens
  chr1:27171709-27171728
  hypo
ccagccctttacatattct

SEQ ID NO: 14381 - DNA, 543 bp, Homo sapiens
  chr1:27189735-27190278
  hypo
gctggcagagcaggccgaacgctatgaggacatggcagccttcatgaaaggcgccgtggagaagggcgaggagctctcctgcgaagagcgaaacctgctctcagtagcctataagaacgtggtgggcggccagagggctgcctggagggtgctgtccagtattgagcagaaaagcaacgaggagggctcggaggagaaggggcccgaggtgcgtgagtaccgggagaaggtggagactgagctccagggcgtgtgcgacaccgtgctgggcctgctggacagccacctcatcaaggaggccggggacgccgagagccgggtcttctacctgaagatgaagggtgactactaccgctacctggccgaggtggccaccggtgacgacaagaagcgcatcattgactcagcccggtcagcctaccaggaggccatggacatcagcaagaaggagatgccgcccaccaaccccatccgcctgggcctggccctgaacttttccgtcttccactacgagatcgccaacagccccgaggaggccatctc

SEQ ID NO: 14382 - DNA, 30 bp, Homo sapiens
  chr1:27220876-27220906
  hypo
cccattcctcaccccggtcatcgtcctaaa

SEQ ID NO: 14383 - DNA, 100 bp, Homo sapiens; identical to SEQ ID NO: 248
  chr1:27286514-27286614
  hypo

SEQ ID NO: 14384 - DNA, 30 bp, Homo sapiens
  chr1:27427049-27427079
  hypo
caggtccacagactcgggtgactgcgggga

SEQ ID NO: 14385 - DNA, 31 bp, Homo sapiens
  chr1:27427888-27427919
  hypo
tgcctgtgtgggcacccgtactggcccctca

SEQ ID NO: 14386 - DNA, 220 bp, Homo sapiens
  chr1:27628357-27628577
  hypo
cagcagagacaatagcgcagagcagtagaaatgcctcaggcttggaatgtggggcctcggttccaaatgcagctccaccacctgactgtgtggccttgaagaaagcacagcctctctacctacctgcacaaagagcacgaagccctgcccagctcccctcagtgtgctggagaatgaactgggccatcggagtgtggtctgtaaacgtgaacggtgagct

SEQ ID NO: 14387 - DNA, 80 bp, Homo sapiens; identical to SEQ ID NO: 251
  chr1:27719136-27719216
  hypo

SEQ ID NO: 14388 - DNA, 19 bp, Homo sapiens
  chr1:27782814-27782833
  hypo
agagcgagactctaaaaaa

SEQ ID NO: 14389 - DNA, 45 bp, Homo sapiens
  chr1:27798547-27798592
  hypo
aaaatggaaatcagggccaggcgcggtggcttatgcctgtaatcg

SEQ ID NO: 14390 - DNA, 17 bp, Homo sapiens
  chr1:27819646-27819663
  hypo
ttttttttttggagaca

SEQ ID NO: 14391 - DNA, 295 bp, Homo sapiens
  chr1:27875604-27875899
  hypo
ggctgttgccactgccataggcgaagctgcagtccttgctgttagcgcagtcctggcctgtaaagggcttagttggggcgaatacgctttgtccggccccatagccgccgtactggggcaggtaggtgttggcaggcgggtgggtggtaggtgagcgggccatggctgagggcgggggcaccagcttggggaaggtctcggctgcccggcagtctgaagcggctggagttagcccatagcttgctgctcgtcctggtgggaaggtctggcgcgcggacaggacaggctgaaagga

SEQ ID NO: 14392 - DNA, 49 bp, Homo sapiens; identical to SEQ ID NO: 256
  chr1:27902441-27902490
  hypo

SEQ ID NO: 14393 - DNA, 30 bp, Homo sapiens; identical to SEQ ID NO: 258
  chr1:27928820-27928850
  hypo

SEQ ID NO: 14394 - DNA, 129 bp, Homo sapiens
  chr1:27942072-27942201
  hypo
gtgcccggcttcagcgtcttcaccgccaccttagtgctgccgttccacgtgcctgctcggaggctgtcttgtcaggaccctctcccccgagcccaggccctcgtcccggcccccgggagctccgtaccc

SEQ ID NO: 14395 - DNA, 30 bp, Homo sapiens
  chr1:27994963-27994993
  hypo
cccacctcctccgacggccatgaaggtcag

SEQ ID NO: 14396 - DNA, 18 bp, Homo sapiens
  chr1:28148223-28148241
  hypo
aactttgaaacctatact

SEQ ID NO: 14397 - DNA, 30 bp, Homo sapiens
  chr1:28148836-28148866
  hypo
gtgattgcctccgatcgttctcccgctgag

SEQ ID NO: 14398 - DNA, 31 bp, Homo sapiens
  chr1:28364960-28364991
  hypo
aaaaaaaaaaaaaaaccgaacacagattgga

SEQ ID NO: 14399 - DNA, 30 bp, Homo sapiens
  chr1:28599959-28599989
  hypo
aggagatggagagccgctttgagctggaga

SEQ ID NO: 14400 - DNA, 92 bp, Homo sapiens
  chr1:28663348-28663440
  hypo
gtctcactgttgtccacgctggagtgcagtggcattgtgtttttaagaaacggtgtttcgggcagggcgcgttgctcacgcctgtaatccca

SEQ ID NO: 14401 - DNA, 28 bp, Homo sapiens
  chr1:28678501-28678529
  hypo
ttttttttttgagtctcgcactctagcc

SEQ ID NO: 14402 - DNA, 79 bp, Homo sapiens
  chr1:28727741-28727820
  hypo
aaaaaaagttttaaaacgcattttgaggctgagatacttggctacaacagggatatatgacctgctttacttttttttt

SEQ ID NO: 14403 - DNA, 31 bp, Homo sapiens
  chr1:28852334-28852365
  hypo
gggagagctagagaggcgaggttctcgggaa

SEQ ID NO: 14404 - DNA, 140 bp, Homo sapiens
  chr1:28853682-28853822
  hypo
tggcactcacatgccgggcaactgatgctcagagtaaccttcccacagcagccgcgatcttcagtgcatgtgtgtttttgtttttttgagacagtgtctgtctctttcgcccaggctaaagtacagtggcacaatctcag

SEQ ID NO: 14405 - DNA, 26 bp, Homo sapiens
  chr1:28854001-28854027
  hypo
gcctcgacttcccaaagtgctaggat

SEQ ID NO: 14406 - DNA, 44 bp, Homo sapiens
  chr1:28854228-28854272
  hypo
ttaaatacatgtggccaggcacgatggctcacgcctgtaatccc

SEQ ID NO: 14407 - DNA, 180 bp, Homo sapiens
  chr1:28857206-28857386
  hypo
ggcgccattggctgcccggggctgcgggttggggggccgcctttggcccacagagagccccgggcgcgcacctcccgcaaatgccgctgtccgctcttcctcccgcccctcctgcctctccactggatggtggagggaagagtccgtttctgcagtggatttgcccgggagctgaactta

SEQ ID NO: 14408 - DNA, 89 bp, Homo sapiens; identical to SEQ ID NO: 268
  chr1:28879901-28879990
  hypo

SEQ ID NO: 14409 - DNA, 35 bp, Homo sapiens
  chr1:28891700-28891735
  hypo
agtgttccacttcaggctgggcgtggtggctcatg

SEQ ID NO: 14410 - DNA, 36 bp, Homo sapiens
  chr1:29047653-29047689
  hypo
tttttttttttttttgtgaggcggagtctgactccg

SEQ ID NO: 14411 - DNA, 47 bp, Homo sapiens
  chr1:29116012-29116059
  hypo
gcatgaccatcaagaccgtgtggtctggccgacgcctgacacctctc

SEQ ID NO: 14412 - DNA, 8 bp, Homo sapiens
  chr1:29242869-29242877
  hypo
gggcacgg

SEQ ID NO: 14413 - DNA, 30 bp, Homo sapiens
  chr1:29422779-29422809
  hypo
gatgaccacctcgtcggagtctctgcaaag

SEQ ID NO: 14414 - DNA, 30 bp, Homo sapiens
  chr1:29446070-29446100
  hypo
acccgtcagggccccgtgacccatccccgt

SEQ ID NO: 14415 - DNA, 30 bp, Homo sapiens
  chr1:29462384-29462414
  hypo
tctgatcactgaggcgaaaccccctgcctg

SEQ ID NO: 14416 - DNA, 19 bp, Homo sapiens
  chr1:29465623-29465642
  hypo
gaggcactgcacccagccc

SEQ ID NO: 14417 - DNA, 32 bp, Homo sapiens
  chr1:29513700-29513732
  hypo
ggcacacacaggttaacgcaagagcttttctc

SEQ ID NO: 14418 - DNA, 31 bp, Homo sapiens
  chr1:29605992-29606023
  hypo
cagacccggcagtgaacgtgccaggcccacg

SEQ ID NO: 14419 - DNA, 31 bp, Homo sapiens
  chr1:29644272-29644303
  hypo
tcaccccgccgctggacgtggaggagtgcag

SEQ ID NO: 14420 - DNA, 31 bp, Homo sapiens
  chr1:29851221-29851252
  hypo
tgaggggcctgggctccgctctcctgcagga

SEQ ID NO: 14421 - DNA, 31 bp, Homo sapiens
  chr1:30338581-30338612
  hypo
aaaaatatgaacagcacgatgcgcaaaattt

SEQ ID NO: 14422 - DNA, 31 bp, Homo sapiens
  chr1:31189130-31189161
  hypo
agaccaggtcagtggccgagctgccaccacc

SEQ ID NO: 14423 - DNA, 31 bp, Homo sapiens; identical to SEQ ID NO: 274
  chr1:31192286-31192317
  hypo

SEQ ID NO: 14424 - DNA, 158 bp, Homo sapiens
  chr1:31194411-31194569
  hypo
gagaactcctgcttcacggtgctggcatagttgaccatgcccacccgggtggcattgggccccacgtccagcgactcgatgacctgggacaggaataccttcactttctcaaattcaacaggccgaacgctgcgagagctgtcgacaacaaacaccag

SEQ ID NO: 14425 - DNA, 89 bp, Homo sapiens
  chr1:31260792-31260881
  hypo
gcctttccccagagcacgggactcctgtgtccatgctcacttccaggagttcacgcagctgagtgacggcatctcgaaatccacaggcc

SEQ ID NO: 14426 - DNA, 31 bp, Homo sapiens
  chr1:31347130-31347161
  hypo
ccccaagcctcacctacgagcacctccttcc

SEQ ID NO: 14427 - DNA, 31 bp, Homo sapiens
  chr1:31439890-31439921
  hypo
cattacagggtagaaccgatatactgagaat

SEQ ID NO: 14428 - DNA, 65 bp, Homo sapiens
  chr1:31478715-31478780
  hypo
agacaggaatcgcccggggatgagctcaacacatactccaccatgctaacgcctagtcccccact

SEQ ID NO: 14429 - DNA, 31 bp, Homo sapiens
  chr1:31539597-31539628
  hypo
aatataaacatctgtacgagaagagatgcca

SEQ ID NO: 14430 - DNA, 17 bp, Homo sapiens
  chr1:31563198-31563215
  hypo
agcgagactttgtctca

SEQ ID NO: 14431 - DNA, 30 bp, Homo sapiens
  chr1:31567947-31567977
  hypo
tacgtcaaagaacccggtggcctggggagt

SEQ ID NO: 14432 - DNA, 4 bp, Homo sapiens
  chr1:31606305-31606309
  hypo
cact

SEQ ID NO: 14433 - DNA, 31 bp, Homo sapiens
  chr1:31632165-31632196
  hypo
acagctccatgtctctcgttatccctcaatt

SEQ ID NO: 14434 - DNA, 63 bp, Homo sapiens
  chr1:31639517-31639580
  hypo
cccacccaggagaggtcgctcctccctgtagcccctgcagccaccagccgtgctgttaacagg

SEQ ID NO: 14435 - DNA, 37 bp, Homo sapiens
  chr1:31732223-31732260
  hypo
gggattacaggcatgagccaccgcgtctggcaaaacc

SEQ ID NO: 14436 - DNA, 29 bp, Homo sapiens
  chr1:31871813-31871842
  hypo
gtacacatgtgagccgctgcgcccggcca

SEQ ID NO: 14437 - DNA, 197 bp, Homo sapiens
  chr1:32139296-32139493
  hypo
gcccactcaagagaggcggcgtgacttgtctaaggaaagtgggagcctggattggcgtgggcctgtcctaggccacagccagtgctctctccccaggcttcctggactatgggtgcaggtggtggctggggctctgggtcagcatgccccggggtgccatctgaccccttctccacactatgcgcactttctatttg

SEQ ID NO: 14438 - DNA, 30 bp, Homo sapiens
  chr1:32221963-32221993
  hypo
cacgaagttcttgtcgaagtgcaggaaggt

SEQ ID NO: 14439 - DNA, 30 bp, Homo sapiens
  chr1:32224968-32224998
  hypo
ggcaggatcctctgcggggtcttcctttgc

SEQ ID NO: 14440 - DNA, 18 bp, Homo sapiens
  chr1:32307624-32307642
  hypo
ttttttttttttgagacg

SEQ ID NO: 14441 - DNA, 28 bp, Homo sapiens
  chr1:32407274-32407302
  hypo
gagaaaggccaggcgcggtggctcacgc

SEQ ID NO: 14442 - DNA, 30 bp, Homo sapiens
  chr1:32527909-32527939
  hypo
aaaaagaattgctacgtactgaatgggatc

SEQ ID NO: 14443 - DNA, 30 bp, Homo sapiens
  chr1:32740743-32740773
  hypo
ccgcagccctcctgcggcccttgaccagct

SEQ ID NO: 14444 - DNA, 48 bp, Homo sapiens
  chr1:32751093-32751141
  hypo
ctttcacccatcaacccgtagggatgaccaacccggaggtgattcaga

SEQ ID NO: 14445 - DNA, 36 bp, Homo sapiens; identical to SEQ ID NO: 287
  chr1:32757651-32757687
  hypo

SEQ ID NO: 14446 - DNA, 30 bp, Homo sapiens
  chr1:32797638-32797668
  hypo
gctaaatcagcacccgcctgccctctcacc

SEQ ID NO: 14447 - DNA, 102 bp, Homo sapiens; identical to SEQ ID NO: 288
  chr1:32852879-32852981
  hypo

SEQ ID NO: 14448 - DNA, 30 bp, Homo sapiens
  chr1:32964475-32964505
  hypo
ccaccacgcccgaccgagaatagttttaag

SEQ ID NO: 14449 - DNA, 37 bp, Homo sapiens; identical to SEQ ID NO: 291
  chr1:33005605-33005642
  hypo

SEQ ID NO: 14450 - DNA, 30 bp, Homo sapiens
  chr1:33169835-33169865
  hypo
taccaagcaacaggcggcaagggtggcatt

SEQ ID NO: 14451 - DNA, 30 bp, Homo sapiens
  chr1:33210815-33210845
  hypo
cacctgagctctaacgacccagtctggaag

SEQ ID NO: 14452 - DNA, 30 bp, Homo sapiens
  chr1:33216935-33216965
  hypo
tatgcaagcgtcaccgttgctactacagct

SEQ ID NO: 14453 - DNA, 118 bp, Homo sapiens
  chr1:33235516-33235634
  hypo
gggctcctggtgcacgggatgccgtacgcatccccacagtggacggccgcccccgaggcacctcagggatgggggcccgggtgtccctgcaggcgctggaggcggaggcggaggctgg

SEQ ID NO: 14454 - DNA, 65 bp, Homo sapiens
  chr1:33237402-33237467
  hypo
ggtgcgcccctggtcacgccctcgctcctgcagatggtgcggctgcgctccgtgggtgctccagg

SEQ ID NO: 14455 - DNA, 165 bp, Homo sapiens
  chr1:33415195-33415360
  hypo
agacctgaagtgtgtttggtccgaactcgtaaagtctgggccctctgttgacgggccatatcgcatgtctgatttggatgccatatctgcttgcagtggtagcagaactcagtctggcaaccttccctctcacaagttagcttcgggcagctggcacagccatag

SEQ ID NO: 14456 - DNA, 79 bp, Homo sapiens
  chr1:33431247-33431326
  hypo
agaaaaaaatagcttacgattgaaatttatttattttttttcctgagacggttttgctctgtcacccaggttggagtgc

SEQ ID NO: 14457 - DNA, 38 bp, Homo sapiens
  chr1:33432069-33432107
  hypo
aaaaaggactgcctcgaaagtcccgcacatttttgcca

SEQ ID NO: 14458 - DNA, 140 bp, Homo sapiens
  chr1:33441466-33441606
  hypo
ggagagggagaggggtttttgttttatttttaaagaggtttttttttttgagcgggagggtttcaatagattctgccccgcaagcttcccagccacctttctcatacctacagctcatggtgtgtcgccctgccttaaac

SEQ ID NO: 14459 - DNA, 30 bp, Homo sapiens; identical to SEQ ID NO: 300
  chr1:33721354-33721384
  hypo

SEQ ID NO: 14460 - DNA, 35 bp, Homo sapiens; identical to SEQ ID NO: 301
  chr1:33721671-33721706
  hypo

SEQ ID NO: 14461 - DNA, 30 bp, Homo sapiens; identical to SEQ ID NO: 303
  chr1:33788139-33788169
  hypo

SEQ ID NO: 14462 - DNA, 30 bp, Homo sapiens
  chr1:33790359-33790389
  hypo
ccctgccctccaaccggccccatttctggg

SEQ ID NO: 14463 - DNA, 31 bp, Homo sapiens
  chr1:33790728-33790759
  hypo
ttagtcctcataaccacgccttgaggaaggc

SEQ ID NO: 14464 - DNA, 249 bp, Homo sapiens; identical to SEQ ID NO: 304
  chr1:33896563-33896812
  hypo

SEQ ID NO: 14465 - DNA, 30 bp, Homo sapiens
  chr1:33985096-33985126
  hypo
ggtggcggccaggccgggtggctatactgc

SEQ ID NO: 14466 - DNA, 21 bp, Homo sapiens
  chr1:34520320-34520341
  hypo
acagagcgagactctgtctct

SEQ ID NO: 14467 - DNA, 928 bp, Homo sapiens; identical to SEQ ID NO: 306
  chr1:34628985-34629913
  hypo

SEQ ID NO: 14468 - DNA, 141 bp, Homo sapiens; identical to SEQ ID NO: 307
  chr1:34630138-34630279
  hypo

SEQ ID NO: 14469 - DNA, 436 bp, Homo sapiens; identical to SEQ ID NO: 308
  chr1:34630502-34630938
  hypo

SEQ ID NO: 14470 - DNA, 31 bp, Homo sapiens; identical to SEQ ID NO: 310
  chr1:35208445-35208476
  hypo

SEQ ID NO: 14471 - DNA, 549 bp, Homo sapiens
  chr1:35226869-35227418
  hypo
tctgcagggcctgctgagtggcgtgaacaagtactccacagtgctgagccgcatctggctgtctgtggtgttcatctttcgtgtgctggtgtacgtggtggcagcggaggaggtgtgggacgatgagcagaaggactttgtctgcaacaccaagcagcccggctgccccaacgtctgctatgacgagttcttccccgtgtcccacgtgcgcctctgggccctacagctcatcctggtcacgtgcccctcactgctcgtggtcatgcacgtggcctaccgcgaggaacgcgagcgcaagcaccacctgaaacacgggcccaatgccccgtccctgtacgacaacctgagcaagaagcggggcggactgtggtggacgtacttgctgagcctcatcttcaaggccgccgtggatgctggcttcctctatatcttccaccgcctctacaaggattatgacatgccccgcgtggtggcctgctccgtggagccttgcccccacactgtggactgttacatctcccggcccacggagaagaaggtcttcaccta

SEQ ID NO: 14472 - DNA, 30 bp, Homo sapiens
  chr1:35245757-35245787
  hypo
attttcaagggccacgaccccagtgagtac

SEQ ID NO: 14473 - DNA, 30 bp, Homo sapiens
  chr1:35326103-35326133
  hypo
gcacatactaaacccggcagaccacactgt

SEQ ID NO: 14474 - DNA, 36 bp, Homo sapiens; identical to SEQ ID NO: 313
  chr1:35394629-35394665
  hypo

SEQ ID NO: 14475 - DNA, 943 bp, Homo sapiens; identical to SEQ ID NO: 314
  chr1:35395081-35396024
  hypo

SEQ ID NO: 14476 - DNA, 31 bp, Homo sapiens
  chr1:35479658-35479689
  hypo
gataatatttagtaaccggcttaatccatta

SEQ ID NO: 14477 - DNA, 41 bp, Homo sapiens
  chr1:35664815-35664856
  hypo
cagtgttctccccactcgccccgccccggctctttgcacag

SEQ ID NO: 14478 - DNA, 31 bp, Homo sapiens
  chr1:36056174-36056205
  hypo
aaagctgtgttccaggcgcagaggtacaccc

SEQ ID NO: 14479 - DNA, 30 bp, Homo sapiens
  chr1:36056552-36056582
  hypo
gcagtgagcacacacgtatgtgtgcgccac

SEQ ID NO: 14480 - DNA, 79 bp, Homo sapiens; identical to SEQ ID NO: 319
  chr1:36173594-36173673
  hypo

SEQ ID NO: 14481 - DNA, 117 bp, Homo sapiens
  chr1:36563455-36563572
  hypo
gtggctgggttgtagccgctgtggccattgtagagagtccggtcaaatttcacgggcatgcccgaggcggggaagggcgaggtgagcaccgcagtgaaggccggtgtggcatgggca

SEQ ID NO: 14482 - DNA, 31 bp, Homo sapiens
  chr1:36581068-36581099
  hypo
ccgccaaggagccaggcgaaatagttcacaa

SEQ ID NO: 14483 - DNA, 94 bp, Homo sapiens
  chr1:36641758-36641852
  hypo
gcccccacggtgaccggcttcgcctggccttctacccccagatcgcagcctgcagctgagcgcatgggagagcagcatcgtggatcgtctgatg

SEQ ID NO: 14484 - DNA, 30 bp, Homo sapiens
  chr1:36643728-36643758
  hypo
ggcaccttcgccggcgccctcgcccacccc

SEQ ID NO: 14485 - DNA, 30 bp, Homo sapiens
  chr1:36769743-36769773
  hypo
agattgtactaccgcgagaggcatccctgg

SEQ ID NO: 14486 - DNA, 38 bp, Homo sapiens
  chr1:36774206-36774244
  hypo
ttttggattctaataccggttgagtatcgcttatccaa

SEQ ID NO: 14487 - DNA, 18 bp, Homo sapiens
  chr1:36774733-36774751
  hypo
aattttccacttaaggcg

SEQ ID NO: 14488 - DNA, 187 bp, Homo sapiens
  chr1:36857025-36857212
  hypo
tctctctccccacttgcgagggtatggtgacgttcccacagcgaaggccttccctctgcacctgccctctggtttctctttccagcagtcactttgtggtgtcagtcagtcctcttaactccagttgtcagaggggccggaaaattcagaagttttctctgctaggaccctccgttctccctgaagg

SEQ ID NO: 14489 - DNA, 224 bp, Homo sapiens
  chr1:36881338-36881562
  hypo
actgtgcccggccataaacttgtttttcttaatatctgtgcaagtctagagacatgaaactcacagattgcctcatcatggagctgtcataccagagatctgcatcttgtttatttactgataggacagatacgtttgaaatcaccagcatcgctctgggataggtggagggaggaggctgcggctgcttctcggcacctcacggcccacctccaaggccctgg

SEQ ID NO: 14490 - DNA, 31 bp, Homo sapiens; identical to SEQ ID NO: 326
  chr1:36883607-36883638
  hypo

SEQ ID NO: 14491 - DNA, 867 bp, Homo sapiens; identical to SEQ ID NO: 327
  chr1:36931642-36932509
  hypo

SEQ ID NO: 14492 - DNA, 219 bp, Homo sapiens; identical to SEQ ID NO: 328
  chr1:36933229-36933448
  hypo

SEQ ID NO: 14493 - DNA, 126 bp, Homo sapiens; identical to SEQ ID NO: 329
  chr1:36937115-36937241
  hypo

SEQ ID NO: 14494 - DNA, 78 bp, Homo sapiens; identical to SEQ ID NO: 330
  chr1:36937668-36937746
  hypo

SEQ ID NO: 14495 - DNA, 30 bp, Homo sapiens; identical to SEQ ID NO: 331
  chr1:36938251-36938281
  hypo

SEQ ID NO: 14496 - DNA, 30 bp, Homo sapiens; identical to SEQ ID NO: 332
  chr1:36939051-36939081
  hypo

SEQ ID NO: 14497 - DNA, 30 bp, Homo sapiens; identical to SEQ ID NO: 333
  chr1:36939438-36939468
  hypo

SEQ ID NO: 14498 - DNA, 30 bp, Homo sapiens; identical to SEQ ID NO: 334
  chr1:36945020-36945050
  hypo

SEQ ID NO: 14499 - DNA, 151 bp, Homo sapiens
  chr1:36979462-36979613
  hypo
gtggtggtggcagcagcggcggtagagaagcagcaggaagaaatggaaagataatcctttacttccatcgaggagccaggacccttcctgtttctaagggtcagctttccctcggcactcagggagcgagtgtgtgcgtgtgcacacccat

SEQ ID NO: 14500 - DNA, 31 bp, Homo sapiens
  chr1:36984328-36984359
  hypo
acagagacaaggccctcgtgctgtggctcgg

SEQ ID NO: 14501 - DNA, 794 bp, Homo sapiens; identical to SEQ ID NO: 337
  chr1:37498888-37499682
  hypo

SEQ ID NO: 14502 - DNA, 231 bp, Homo sapiens; identical to SEQ ID NO: 338
  chr1:37500343-37500574
  hypo

SEQ ID NO: 14503 - DNA, 201 bp, Homo sapiens; identical to SEQ ID NO: 342
  chr1:37940668-37940869
  hypo

SEQ ID NO: 14504 - DNA, 38 bp, Homo sapiens
  chr1:38294271-38294309
  hypo
tggctgggaatgttctttttgaccggggtgctggttac

SEQ ID NO: 14505 - DNA, 31 bp, Homo sapiens
  chr1:38459550-38459581
  hypo
aaaaagtttgaaaaaacggaggctgggcatg

SEQ ID NO: 14506 - DNA, 114 bp, Homo sapiens
  chr1:38492992-38493106
  hypo
ggtgtgtggtgctgggctccccgctcaagttctcccagcgtgccagttcccggagccttatgtgcagggtgttggggaagggcgggctgaatcgtgggtgggagtcttggctca

SEQ ID NO: 14507 - DNA, 555 bp, Homo sapiens; identical to SEQ ID NO: 354
  chr1:38510178-38510733
  hypo

SEQ ID NO: 14508 - DNA, 1026 bp, Homo sapiens; identical to SEQ ID NO: 355
  chr1:38510773-38511799
  hypo

SEQ ID NO: 14509 - DNA, 231 bp, Homo sapiens; identical to SEQ ID NO: 356
  chr1:38511821-38512052
  hypo

SEQ ID NO: 14510 - DNA, 145 bp, Homo sapiens
  chr1:39174395-39174540
  hypo
gcagacagaccgaccgactggggtgtttcgtgaatgtgagaggtaagcgccgcggcctgcatttccagagctgcccttcgcctggttcgtggcgccttgtgacccctgccacctgcaagtcggtaaccgcgctgtgctcctgtgc

SEQ ID NO: 14511 - DNA, 34 bp, Homo sapiens
  chr1:39345383-39345417
  hypo
ctttgttctgttttttttgttcgtttgttttctg

SEQ ID NO: 14512 - DNA, 63 bp, Homo sapiens
  chr1:39345656-39345719
  hypo
gggattacaagcgtgagccaccgcgcccggctctgttaatacgatttgcaaaagcatcaacct

SEQ ID NO: 14513 - DNA, 106 bp, Homo sapiens
  chr1:39416851-39416957
  hypo
tcacagcacatgtcagcgtcatgaagtctctaaccttctaagaagtccttcaacaaacaagtctgttcaatgttgcttcacctagcacttcccaaacttgtctgac

SEQ ID NO: 14514 - DNA, 30 bp, Homo sapiens; identical to SEQ ID NO: 358
  chr1:39483421-39483451
  hypo

SEQ ID NO: 14515 - DNA, 32 bp, Homo sapiens
  chr1:39739271-39739303
  hypo
tctttttctttttttttgagacggagtcttgc

SEQ ID NO: 14516 - DNA, 32 bp, Homo sapiens
  chr1:39739542-39739574
  hypo
tgagccaccgcgcccagccttgtttcttttta

SEQ ID NO: 14517 - DNA, 246 bp, Homo sapiens; identical to SEQ ID NO: 361
  chr1:40105073-40105319
  hypo

SEQ ID NO: 14518 - DNA, 30 bp, Homo sapiens
  chr1:40346515-40346545
  hypo
acagctatgagtaacgagacataatagcta

SEQ ID NO: 14519 - DNA, 86 bp, Homo sapiens
  chr1:40349615-40349701
  hypo
acaggcatgcgccactgcgccagaccacctgccgtcttaaatggtagatggcaaccctatctaaatagatccgtccctattattct

SEQ ID NO: 14520 - DNA, 19 bp, Homo sapiens
  chr1:40350297-40350316
  hypo
actccgtcccaaacaaaac

SEQ ID NO: 14521 - DNA, 23 bp, Homo sapiens
  chr1:40357270-40357293
  hypo
cagattcctggccctgacctacg

SEQ ID NO: 14522 - DNA, 4 bp, Homo sapiens
  chr1:40409734-40409738
  hypo
ttga

SEQ ID NO: 14523 - DNA, 22 bp, Homo sapiens
  chr1:40685885-40685907
  hypo
cgagactctgtctcaaaaaaga

SEQ ID NO: 14524 - DNA, 30 bp, Homo sapiens
  chr1:40771120-40771150
  hypo
aatgaataaatgaacgaacaactctgcctg

SEQ ID NO: 14525 - DNA, 31 bp, Homo sapiens
  chr1:41236636-41236667
  hypo
ccccatgcctgggggccgagattctccagca

SEQ ID NO: 14526 - DNA, 30 bp, Homo sapiens
  chr1:41253451-41253481
  hypo
tggcccatcctgctcgctgagcccttatgg

SEQ ID NO: 14527 - DNA, 30 bp, Homo sapiens
  chr1:41271855-41271885
  hypo
cacccgaatctgcacggagctgctcagtgg

SEQ ID NO: 14528 - DNA, 31 bp, Homo sapiens
  chr1:41281552-41281583
  hypo
caggtctctctgaccccgagctgctgtcctt

SEQ ID NO: 14529 - DNA, 8 bp, Homo sapiens
  chr1:41448090-41448098
  hypo
ttattctg

SEQ ID NO: 14530 - DNA, 189 bp, Homo sapiens
  chr1:41486087-41486276
  hypo
tgctcccgcgccaccggcatctccagccgctccagggtgtctcgcagcaggcaggcaagcaccggcactgagaactgggggttcagatggcccacatagagagtgtgcgccgagggagcctcctcgaggtcagagtactccgtcagggactgctctgcgggtagctccggcagggactcctcaccccag

SEQ ID NO: 14531 - DNA, 30 bp, Homo sapiens
  chr1:41622015-41622045
  hypo
cactccactattaccgtataaatagtgttc

SEQ ID NO: 14532 - DNA, 30 bp, Homo sapiens
  chr1:41825183-41825213
  hypo
gggccgcagactggcgggaggcttgctcgg

SEQ ID NO: 14533 - DNA, 205 bp, Homo sapiens; identical to SEQ ID NO: 370
  chr1:41832017-41832222
  hypo

SEQ ID NO: 14534 - DNA, 31 bp, Homo sapiens
  chr1:41967579-41967610
  hypo
cacgggtaactagagacgccgggagcaggtg

SEQ ID NO: 14535 - DNA, 31 bp, Homo sapiens
  chr1:41976830-41976861
  hypo
cgggccaggatgtggccgtggaagtcatgga

SEQ ID NO: 14536 - DNA, 525 bp, Homo sapiens; identical to SEQ ID NO: 374
  chr1:41981636-41982161
  hypo

SEQ ID NO: 14537 - DNA, 36 bp, Homo sapiens
  chr1:42120783-42120819
  hypo
gtctgagctgtctgaccgagccgacccttccagctt

SEQ ID NO: 14538 - DNA, 31 bp, Homo sapiens
  chr1:42506900-42506931
  hypo
gccacgaggagcatagcggcctctgcaccac

SEQ ID NO: 14539 - DNA, 6 bp, Homo sapiens
  chr1:42802343-42802349
  hypo
tggagt

SEQ ID NO: 14540 - DNA, 9 bp, Homo sapiens
  chr1:42802588-42802597
  hypo
gcctgcaat

SEQ ID NO: 14541 - DNA, 1 bp, Homo sapiens
  chr1:42918351-42918352
  hypo
t

SEQ ID NO: 14542 - DNA, 30 bp, Homo sapiens
  chr1:43202508-43202538
  hypo
actgttgaagggatcgggggccgagtccta

SEQ ID NO: 14543 - DNA, 54 bp, Homo sapiens
  chr1:43203988-43204042
  hypo
agacaaagcagaggggcgctcagctctgctctggccccccgaggccactggggc

SEQ ID NO: 14544 - DNA, 89 bp, Homo sapiens
  chr1:43296452-43296541
  hypo
gccggcaagttccacgtggccctactagggggcacagccgagctgctctgccctctctccctctggcccgggacggtacccaaggaggt

SEQ ID NO: 14545 - DNA, 196 bp, Homo sapiens
  chr1:43310137-43310333
  hypo
tattggggcaggggggcggtggttattataaggaattggctcacgtgattatggaggcggttaaatcccaagatctgcaggataagtcagcaagatggagtcccatgagagctgatggtttagttccagtctgatggcagcaggcttgacgccaaggaagagatgatgtttaattcaagtccgaaggcaaggaaaa

SEQ ID NO: 14546 - DNA, 34 bp, Homo sapiens
  chr1:43353504-43353538
  hypo
gagcagaagatagtgacggcgtggatgccagagg

SEQ ID NO: 14547 - DNA, 32 bp, Homo sapiens
  chr1:43478270-43478302
  hypo
agtgagactccgtctcaaaaaaaaaaaaaaaa

SEQ ID NO: 14548 - DNA, 90 bp, Homo sapiens
  chr1:43521464-43521554
  hypo
cccagcctggatctgttttctttagggggagtggggttgggagtggggtggggagcacacgcaggtacagtcacacgcatgggaggctgt

SEQ ID NO: 14549 - DNA, 84 bp, Homo sapiens
  chr1:43533471-43533555
  hypo
ctcagtactggatcactacaacgccatccagaaactcccgtaaagaaccgaacatccaaatgcgagcacccagagagggtccca

SEQ ID NO: 14550 - DNA, 405 bp, Homo sapiens
  chr1:43534660-43535065
  hypo
atcactgacaacaagccggaggctctgccatgggcccgtcccagggtccccctgctcatggccttctgtctggttggttcagtgtggtggacccgaggaatgagttccgttaatctcctggaggacagatgtggggctgaaggagggagatggggtgagggtggaggcgccaggtggctggagaggggactggagggcaatgcatctgggaaatgactttccagaggtccctctgccctccccctgcagctggggacggagctggaaccccagaggccatgagggtgggctggggaaccatccaggatccagcctcaccctggcctcccaggaacaggatggggattgtcccgtgaattctatggaattaaaaaatggcaccttctcagcgggaagggagctcgg

SEQ ID NO: 14551 - DNA, 33 bp, Homo sapiens
  chr1:43702285-43702318
  hypo
aaaggcaatttccagccgggcgcagtggctcac

SEQ ID NO: 14552 - DNA, 30 bp, Homo sapiens
  chr1:43738644-43738674
  hypo
acagctgatgagctcggctgtgcaggacat

SEQ ID NO: 14553 - DNA, 31 bp, Homo sapiens
  chr1:43739132-43739163
  hypo
tgagtacacatgagtgcgtgtatgcccccag

SEQ ID NO: 14554 - DNA, 164 bp, Homo sapiens
  chr1:43754320-43754484
  hypo
cacaaatgctgagatgcgggagcacggctggcttgttcagctacaacaaggcggccgcttgatggagtgcagaaagaggggtgcagatccaagggtctacaccaggtgcatatcaggagctattcctgaggggcctcaccggatctctccgggagatgggaagc

SEQ ID NO: 14555 - DNA, 30 bp, Homo sapiens
  chr1:43783666-43783696
  hypo
ctacccttagctcccggcagctgctgcgtt

SEQ ID NO: 14556 - DNA, 31 bp, Homo sapiens
  chr1:43798209-43798240
  hypo
caaacttaaaacttaacgttgactggccggg

SEQ ID NO: 14557 - DNA, 44 bp, Homo sapiens; identical to SEQ ID NO: 382
  chr1:43803508-43803552
  hypo

SEQ ID NO: 14558 - DNA, 30 bp, Homo sapiens; identical to SEQ ID NO: 383
  chr1:43803852-43803882
  hypo

SEQ ID NO: 14559 - DNA, 30 bp, Homo sapiens; identical to SEQ ID NO: 384
  chr1:43804341-43804371
  hypo

SEQ ID NO: 14560 - DNA, 209 bp, Homo sapiens; identical to SEQ ID NO: 385
  chr1:43805019-43805228
  hypo

SEQ ID NO: 14561 - DNA, 104 bp, Homo sapiens; identical to SEQ ID NO: 386
  chr1:43814926-43815030
  hypo

SEQ ID NO: 14562 - DNA, 30 bp, Homo sapiens; identical to SEQ ID NO: 387
  chr1:43817944-43817974
  hypo

SEQ ID NO: 14563 - DNA, 269 bp, Homo sapiens; identical to SEQ ID NO: 388
  chr1:43818176-43818445
  hypo

SEQ ID NO: 14564 - DNA, 150 bp, Homo sapiens
  chr1:43842658-43842808
  hypo
aaggactggtggtcagtgtggcgggaagagaggcaagcatggcaccaaagagctccggttttgatctccagtgaattacacacagccacccacgaagaactgagcccgacctagcaagcacagacaagcgaggcaagaattcatcacaac

SEQ ID NO: 14565 - DNA, 30 bp, Homo sapiens
  chr1:43888256-43888286
  hypo
agcttcgtactagtcgagggctattcttat

SEQ ID NO: 14566 - DNA, 271 bp, Homo sapiens; identical to SEQ ID NO: 390
  chr1:43919256-43919527
  hypo

SEQ ID NO: 14567 - DNA, 119 bp, Homo sapiens; identical to SEQ ID NO: 391
  chr1:43919541-43919660
  hypo

SEQ ID NO: 14568 - DNA, 89 bp, Homo sapiens
  chr1:43969025-43969114
  hypo
agcaggtgagtagaaccgccccgccccccacgaccctctgatttcaggtgttgaggagctagtgtttcatgtagcggggggctgcccag

SEQ ID NO: 14569 - DNA, 30 bp, Homo sapiens
  chr1:43971524-43971554
  hypo
ccttgaggactgtcccggcatgttgctgca

SEQ ID NO: 14570 - DNA, 190 bp, Homo sapiens
  chr1:43987295-43987485
  hypo
gaaataaagagagtgccgtcgcagtgatggaaaactattttagatagggtggtcagctggtcagcaaaggcttatctgagagggtgacatttcagtggagacacgatagacccctcagatccccttccaccatttttggtgagggggtgagaggcagacgcagccccaccttcagcgtgccttgccttcc

SEQ ID NO: 14571 - DNA, 31 bp, Homo sapiens
  chr1:44016540-44016571
  hypo
aagttagagtgtatggcggaggttggcagaa

SEQ ID NO: 14572 - DNA, 82 bp, Homo sapiens
  chr1:44030117-44030199
  hypo
atgtctccacatgtgtgtttgcgtgtctctgtgtgcaccgcctctggatctgcttgcatgcgcctgtttccacaggtgctag

SEQ ID NO: 14573 - DNA, 31 bp, Homo sapiens
  chr1:44044917-44044948
  hypo
tgtgtgtgtgcacacacgggcacacttatct

SEQ ID NO: 14574 - DNA, 94 bp, Homo sapiens
  chr1:44063578-44063672
  hypo
ggtggatggcatcagccgtgagcactccagctgggacctggtgggcctggagaagtggacggagtaccgggtgtgggtgcgggcacacacagac

SEQ ID NO: 14575 - DNA, 139 bp, Homo sapiens
  chr1:44069554-44069693
  hypo
ccgaggacctgcccagcggcttcccccaaaacctgcatgtgacaggactgaccacgtctaccacagaactggcctgggacccgccagtgctggcggagaggaacgggcgcatcatcagctacaccgtggtgttccgaga

SEQ ID NO: 14576 - DNA, 30 bp, Homo sapiens
  chr1:44074439-44074469
  hypo
ttccgaagcacatgcgtctgcagaccacaa

SEQ ID NO: 14577 - DNA, 161 bp, Homo sapiens
  chr1:44084830-44084991
  hypo
cctgcaaccccctagacgcagggcccatggtggtgcactgcaggtgagagggtacagtgccacccagaggggtgggtggggtgggaggtgggggcgcctgtgcctcaagctgagcccgtgtcctgcagcgcgggcgtgggccgcaccggctgcttcatcgt

SEQ ID NO: 14578 - DNA, 109 bp, Homo sapiens
  chr1:44132656-44132765
  hypo
tttcccttatggttaccatgccggctttaaccatggttttaactgtgcggagtctaccaattttgctacccgtcggtggattgagtacggcaagcaagctgtgctggta

SEQ ID NO: 14579 - DNA, 30 bp, Homo sapiens
  chr1:44170374-44170404
  hypo
actatcacctgcaccgactaggctgaggtg

SEQ ID NO: 14580 - DNA, 187 bp, Homo sapiens
  chr1:44351046-44351233
  hypo
ccgggtccttctcacgcactcacacacaccctgctgaaacctgatcctgaggctgcctcgcgtgccggggtgctggcggggctggcgggctggggcctgtcttttggagcctgccccaccctcccctgctaccccctaggccagggcaagcaggtcaggcgtcccacacccccgctagtctgaccag

SEQ ID NO: 14581 - DNA, 49 bp, Homo sapiens; identical to SEQ ID NO: 393
  chr1:44444660-44444709
  hypo

SEQ ID NO: 14582 - DNA, 30 bp, Homo sapiens
  chr1:44461875-44461905
  hypo
ctgtctgccgctgccgcctcagctgctttg

SEQ ID NO: 14583 - DNA, 30 bp, Homo sapiens
  chr1:44463293-44463323
  hypo
gctggacctcgaagccgtcctcaggagagg

SEQ ID NO: 14584 - DNA, 32 bp, Homo sapiens
  chr1:44463863-44463895
  hypo
ggccgggggccggagcgcggtgagtgggaagg

SEQ ID NO: 14585 - DNA, 30 bp, Homo sapiens
  chr1:44497679-44497709
  hypo
ccctcctggaccaccggcttggtcagctct

SEQ ID NO: 14586 - DNA, 30 bp, Homo sapiens
  chr1:44584414-44584444
  hypo
ggcgcagggcgggacgggtggggcctgacc

SEQ ID NO: 14587 - DNA, 30 bp, Homo sapiens
  chr1:44718230-44718260
  hypo
ccgcgaaatggaatcgtgtataatcagcct

SEQ ID NO: 14588 - DNA, 410 bp, Homo sapiens
  chr1:44726912-44727322
  hypo
tggcagatctgagagcgtggcacgccccagcgggcagggcgcacagcgcggaggaaggcgcgagtcagtctggagtgctccccatttatcaagctcacgcaggccgccagccgagcgagtctttctatcattacacctctcaaaatccgattcataccactaatcctgccttcattctcccagattaataacatctctttcaaccttcacagtgtgataaatagacaaagagagaacaaaaggagagacagaagagagagaaagagctggagcaagtccccataatagagagagctgagaaagaggagagggaaaaaaggagagcgaacgagagcaggcagcggccagagactgcagctaccttagagagccgctctgaggagagctggcggctgcgccccgctatgcgc

SEQ ID NO: 14589 - DNA, 30 bp, Homo sapiens
  chr1:44786159-44786189
  hypo
acaggcttgcagaacgctggctgtgcagca

SEQ ID NO: 14590 - DNA, 249 bp, Homo sapiens; identical to SEQ ID NO: 396
  chr1:44872923-44873172
  hypo

SEQ ID NO: 14591 - DNA, 98 bp, Homo sapiens; identical to SEQ ID NO: 397
  chr1:44873509-44873607
  hypo

SEQ ID NO: 14592 - DNA, 85 bp, Homo sapiens; identical to SEQ ID NO: 398
  chr1:44883129-44883214
  hypo

SEQ ID NO: 14593 - DNA, 164 bp, Homo sapiens; identical to SEQ ID NO: 399
  chr1:44883751-44883915
  hypo

SEQ ID NO: 14594 - DNA, 30 bp, Homo sapiens
  chr1:45079951-45079981
  hypo
agcccaactgccctcgaggtaagccacctc

SEQ ID NO: 14595 - DNA, 356 bp, Homo sapiens
  chr1:45087573-45087929
  hypo
gtgtgtgagtgcacgcgcatgaatgtgcgagcacagatgtggcaagcgtagtgggggcagcaggcagggagggacaggaacagggatattaatgtttctgaagtggatctgatttgatacgtcttgttccattgtcagcatctgtttagcagggatttgtaatactttgtggctctggatcactcatgcttagcgcaggatgtggccttgcataccaattttgttattaaacacagtcctcgcctcccccacagcccatccatcacctcccaccccagcccccgcctgctctgagccgcccaccatatttcagggcccagctcccgcctgcctgccgcgcccgatgccggagggcc

SEQ ID NO: 14596 - DNA, 100 bp, Homo sapiens
  chr1:45101745-45101845
  hypo
gcatgagaacaacaaccgctttgaggagtatgagtggtgtggacagaagcggatacgggccaccactctcctggaaggtggcttccgaggtacaagcagc

SEQ ID NO: 14597 - DNA, 281 bp, Homo sapiens
  chr1:45106052-45106333
  hypo
ctttagttctctctgtcgcctgttgggaggggtgaggagaggtggcaaggagcaaggcaccttctgtcccccgtggcaactgatgggatttaatcgccttttggaacacaattgttaagctaggacagagggagtgcaggcagaaggagcaagtatcaatggttttaaacggcgtctgtctctctgcgtctctcctgacgtgaggcagtgaaacgcgttatcgaggaggcccggaaagtggctaagtgcgtttgacacacgccaactccctgcctccacac

SEQ ID NO: 14598 - DNA, 30 bp, Homo sapiens
  chr1:45106534-45106564
  hypo
gcccctggagggccccgagacgtttccttt

SEQ ID NO: 14599 - DNA, 211 bp, Homo sapiens
  chr1:45111997-45112208
  hypo
tgtcataaattcattccagcccgttgtggttgatcagtttatctcggccggggccgcgagtgctgctggcatgatgtatgggccgcggcgcagggcccggctgcccatgaatcaccgcagctgctccgtgtcagcgccggagcgggccgtatgggttctgcgcaaccagcttgtggtggggaggaatgacgtatggatgtttatttaataa

SEQ ID NO: 14600 - DNA, 46 bp, Homo sapiens
  chr1:45120344-45120390
  hypo
gacccggcgtgccaggcgtgcctccaccatgcgttctatgtctctg

SEQ ID NO: 14601 - DNA, 216 bp, Homo sapiens
  chr1:45268610-45268826
  hypo
tggccctgccctataggtacacgctgctctgcgggagccctccctttgagacggctgacctgaaggagacgtaccgctgcatcaagcaggttcactacacgctgcctgccagcctctcactgcctgcccggcagctcctggccgccatccttcgggcctcaccccgagaccgcccctctattgaccagatcctgcgccatgacttctttaccaagg

SEQ ID NO: 14602 - DNA, 34 bp, Homo sapiens
  chr1:45308281-45308315
  hypo
atgtacacacacctgtcgtcgggtggacacagag

SEQ ID NO: 14603 - DNA, 30 bp, Homo sapiens
  chr1:45454409-45454439
  hypo
agagctcctggcgtcggtggctgcatttgc

SEQ ID NO: 14604 - DNA, 121 bp, Homo sapiens
  chr1:45950718-45950839
  hypo
ttaattaaatcaaattaaattaaaaataaaaaataaagtctaaaagaatataaagagactattcaaagtgtttgggagagggcatggaaccaggttaataaagaacagagatggaagtaag

SEQ ID NO: 14605 - DNA, 84 bp, Homo sapiens
  chr1:46049071-46049155
  hypo
aagaggatgggatcagcggattgggccagccaaagggggcgggttcagagggaggagccagctgcctcccgctgcaagccccga

SEQ ID NO: 14606 - DNA, 31 bp, Homo sapiens
  chr1:46743579-46743610
  hypo
gccacttctctctgggcgagttgaaggagct

SEQ ID NO: 14607 - DNA, 90 bp, Homo sapiens
  chr1:46751245-46751335
  hypo
tcgccatcctccttctcgccagccacaataaaaacgaagtcatacaggtcttcagactctgcaccaggcccctgacgggtgcgagcaccc

SEQ ID NO: 14608 - DNA, 31 bp, Homo sapiens
  chr1:46752099-46752130
  hypo
cacatcaatggtcccacgtagaacatgggaa

SEQ ID NO: 14609 - DNA, 30 bp, Homo sapiens
  chr1:46871217-46871247
  hypo
gtcccagcatggcacgggctgacccattct

SEQ ID NO: 14610 - DNA, 359 bp, Homo sapiens; identical to SEQ ID NO: 408
  chr1:46913886-46914245
  hypo

SEQ ID NO: 14611 - DNA, 78 bp, Homo sapiens; identical to SEQ ID NO: 409
  chr1:46914285-46914363
  hypo

SEQ ID NO: 14612 - DNA, 244 bp, Homo sapiens
  chr1:46963444-46963688
  hypo
aaattaaagccatctatatggcgcctgtggcgggagatccgccgatctgcttgcttaatgaaatataaagattcttttaaccaatgtaagcacaattcgacagcttgtgaaacgcggccgcgccgtgatggatggctctcctggctcgccaggaattgcggggcggcaccttttaaatatataattgattctgtttggagtgtgcagtggactgagcccaggcagggcccggcctggggccaag

SEQ ID NO: 14613 - DNA, 30 bp, Homo sapiens
  chr1:47018057-47018087
  hypo
ggtgccttcccatccgctgaactgagcacc

SEQ ID NO: 14614 - DNA, 30 bp, Homo sapiens
  chr1:47035300-47035330
  hypo
cctggcccaggccacgggaggcacttcact

SEQ ID NO: 14615 - DNA, 319 bp, Homo sapiens
  chr1:47041012-47041331
  hypo
gactggaagcaattgcggctaataacactgaatactaggtgtgtgtcctggaggcaagcagcaaataattacttgccctccctcttgcccataaatcacggggcagtatttacattgcctggagaaaatggaaacatctgtcaaatggacttggggcctaacatgggcaccgctagaccctaactgctaagcgctgcttaatgaaacggccgcgttcctggccactgtagcacttgtggccttccccggtgagcactctctgtctgcccgagtatttcagtgctctgccaacaaggtcgtcttgtaactcagtagggaa

SEQ ID NO: 14616 - DNA, 30 bp, Homo sapiens
  chr1:47073123-47073153
  hypo
tcagactgagttcccggaaggcaaagaaaa

SEQ ID NO: 14617 - DNA, 201 bp, Homo sapiens; identical to SEQ ID NO: 418
  chr1:47078566-47078767
  hypo

SEQ ID NO: 14618 - DNA, 238 bp, Homo sapiens; identical to SEQ ID NO: 428
  chr1:47903679-47903917
  hypo

SEQ ID NO: 14619 - DNA, 30 bp, Homo sapiens; identical to SEQ ID NO: 429
  chr1:47910828-47910858
  hypo

SEQ ID NO: 14620 - DNA, 147 bp, Homo sapiens; identical to SEQ ID NO: 433
  chr1:48190743-48190890
  hypo

SEQ ID NO: 14621 - DNA, 282 bp, Homo sapiens; identical to SEQ ID NO: 434
  chr1:48190924-48191206
  hypo

SEQ ID NO: 14622 - DNA, 30 bp, Homo sapiens
  chr1:48270061-48270091
  hypo
catgtcgagttgatccgctctccttccctg

SEQ ID NO: 14623 - DNA, 470 bp, Homo sapiens
  chr1:48459791-48460261
  hypo
cctgctgggccaggtagaggtcgagcacgggcacaccacggaagcgcacgtccctctctgtgagcgagtttaccatgagcatcacccagacgggcctcttgcgctcccagttgcccgcgatggcattgaataggtagtcagcatagagccccttgccccgctgagcgggcgtcatccaggagggcatcatcaacttcacgtagtccaggtggcgcttcaagcgccagtaaagctcgtggggcagcacgtcctgcaggttttccccgtgcggcagcagctggcagctggccagggccgagatggtgtaggggtctgtaaggtccagctcaaagtagacacgggtgctagcctggaaggctgccttggagttgtccgggatgaagtcccagacgcgggtgtaggggacgtgaatagtgccaaacaggtaggccggaggatcacgccgaatcgtccacaggaaggagttcaag

SEQ ID NO: 14624 - DNA, 60 bp, Homo sapiens; identical to SEQ ID NO: 435
  chr1:48463405-48463465
  hypo

SEQ ID NO: 14625 - DNA, 31 bp, Homo sapiens
  chr1:48694609-48694640
  hypo
gtggcttcgagtggaacgtaaggaagctggc

SEQ ID NO: 14626 - DNA, 190 bp, Homo sapiens; identical to SEQ ID NO: 438
  chr1:49242344-49242534
  hypo

SEQ ID NO: 14627 - DNA, 670 bp, Homo sapiens; identical to SEQ ID NO: 442
  chr1:50798646-50799316
  hypo

SEQ ID NO: 14628 - DNA, 30 bp, Homo sapiens
  chr1:50919070-50919100
  hypo
gagtttagtccctaacgacatacaaaagac

SEQ ID NO: 14629 - DNA, 36 bp, Homo sapiens
  chr1:51424029-51424065
  hypo
aaaatggttatctgaacgttaatttgtaaaaataag

SEQ ID NO: 14630 - DNA, 310 bp, Homo sapiens
  chr1:51439563-51439873
  hypo
ggttatgaaacttggaaatcccgagattgccaggagactgctacttagaggtgctaatcccgatttgaaagaccgaactggtttcgctgtcattcatgatgcggccagagcaggtttcctggacactttacagactttgctggagtttcaagctgatgttaacatcgaggataatgaagggaacctgcccttgcacttggctgccaaagaaggccacctccgggtggtggagttcctggtgaagcacacggccagcaatgtggggcatcggaaccataagggggacaccgcctgtgatttggccaggctc

SEQ ID NO: 14631 - DNA, 168 bp, Homo sapiens
  chr1:51761760-51761928
  hypo
ccacttcgtcgtccccgaacggcttgtggtcctccttcccaaacatgctgaggtaggcggccttcatgtaaatgtaggtggcctgtgcgagacagagcaacagccaggtgtgagcagccctcctccagccccagccgggctggaatctgcagacggacctcacgtggc

SEQ ID NO: 14632 - DNA, 394 bp, Homo sapiens
  chr1:51763205-51763599
  hypo
acctcccgggtcacccttgtcctctccctttcccctgcccctgacgtggagacaccaagtcccggtgactttacctcccgtctcactctaggatcctgctggccttgccctacggctctcattatcggactgccaccatctccacaccgtctccctgttccaggctacccgggatgtctttctgctgtcctggtacacattgtctcctatctccctgctcccactcctgtcccctgcaagccatttcgcacactgacctttttaagtcagatcatgtcagttccttctggaaatctggttatattccatcacactcaggagacatctcctacaatttccttgacacctgcagcactccagccacacgacggcctcagggcggttcccaggacac

SEQ ID NO: 14633 - DNA, 31 bp, Homo sapiens
  chr1:51767451-51767482
  hypo
acccctctgcatcctccgaacctcccaacac

SEQ ID NO: 14634 - DNA, 21 bp, Homo sapiens
  chr1:51897402-51897423
  hypo
gttaccgcgcctggccagaaa

SEQ ID NO: 14635 - DNA, 45 bp, Homo sapiens
  chr1:52060512-52060557
  hypo
tgcctgccaggcaccgaactgcttacccccgtctttgaactcctc

SEQ ID NO: 14636 - DNA, 31 bp, Homo sapiens
  chr1:52082113-52082144
  hypo
gcatttgctattccttcgtcttggaaggctc

SEQ ID NO: 14637 - DNA, 39 bp, Homo sapiens
  chr1:52089595-52089634
  hypo
acttttttttttttgtcggagtctcgctctgtcacccag

SEQ ID NO: 14638 - DNA, 349 bp, Homo sapiens; identical to SEQ ID NO: 460
  chr1:52194940-52195289
  hypo

SEQ ID NO: 14639 - DNA, 39 bp, Homo sapiens
  chr1:52455124-52455163
  hypo
ggactcctgagtggccgagacaccgctagtgcgtggaca

SEQ ID NO: 14640 - DNA, 20 bp, Homo sapiens
  chr1:52559282-52559302
  hypo
cagagcgagactccatctcc

SEQ ID NO: 14641 - DNA, 16 bp, Homo sapiens
  chr1:52832710-52832726
  hypo
gcctgggcaacatggc

SEQ ID NO: 14642 - DNA, 105 bp, Homo sapiens
  chr1:53053489-53053594
  hypo
aactttccacactgtagaaggggaccagagccggttaccgctgcttgcttggctggccagcttttattcccccgccccgcccacgtcctgctgatttgtccattt

SEQ ID NO: 14643 - DNA, 30 bp, Homo sapiens; identical to SEQ ID NO: 463
  chr1:53068182-53068212
  hypo

SEQ ID NO: 14644 - DNA, 519 bp, Homo sapiens; identical to SEQ ID NO: 464
  chr1:53098744-53099263
  hypo

SEQ ID NO: 14645 - DNA, 12 bp, Homo sapiens
  chr1:53129422-53129434
  hypo
aactgcgtctaa

SEQ ID NO: 14646 - DNA, 126 bp, Homo sapiens
  chr1:53238153-53238279
  hypo
tctctcacgattacaccgatctgtgaaggagtaaggcccttcttggccagtttgtaaatctgctccttcacgtcgtcagatgtcaacttcaaccaagtggggaagctgcgtcgatagggtaaagcc

SEQ ID NO: 14647 - DNA, 214 bp, Homo sapiens; identical to SEQ ID NO: 465
  chr1:53308393-53308607
  hypo

SEQ ID NO: 14648 - DNA, 35 bp, Homo sapiens
  chr1:53479847-53479882
  hypo
attacaggcgtgagccaccgcgcccggccctgata

SEQ ID NO: 14649 - DNA, 31 bp, Homo sapiens
  chr1:53537412-53537443
  hypo
tggaagagagcaggcccgggccaggctagca

SEQ ID NO: 14650 - DNA, 31 bp, Homo sapiens
  chr1:53562234-53562265
  hypo
ctcacacactccacttcgatacactcacaca

SEQ ID NO: 14651 - DNA, 31 bp, Homo sapiens
  chr1:53859594-53859625
  hypo
cactcgagatgatgctcgcacaggtgccctg

SEQ ID NO: 14652 - DNA, 30 bp, Homo sapiens
  chr1:53905597-53905627
  hypo
aaggggtaaagagtcgccatgcactgttgc

SEQ ID NO: 14653 - DNA, 31 bp, Homo sapiens
  chr1:54060429-54060460
  hypo
aggccagagctgggttcgctgcccagaaggt

SEQ ID NO: 14654 - DNA, 183 bp, Homo sapiens; identical to SEQ ID NO: 473
  chr1:54204349-54204532
  hypo

SEQ ID NO: 14655 - DNA, 31 bp, Homo sapiens
  chr1:54260082-54260113
  hypo
gctgcagcaagcagcacgtgtctggttgggt

SEQ ID NO: 14656 - DNA, 190 bp, Homo sapiens
  chr1:54408755-54408945
  hypo
tttacacctcctggggcgtgaactggactcaacaaatgcacattttaagcaggaagactttggagagacaaggactttcgttcaaagtaaagattttaaatttctttcatccctgaaaacgtccaagaaaagtcggtaagagatcataatctatggaagaaggcaaagaaatctacgaaggaagccaaag

SEQ ID NO: 14657 - DNA, 31 bp, Homo sapiens
  chr1:54417838-54417869
  hypo
gcatgaacagggaagacgacactgcacggaa

SEQ ID NO: 14658 - DNA, 30 bp, Homo sapiens
  chr1:54474563-54474593
  hypo
ttcctgcccttgtgcgctaggatttgattt

SEQ ID NO: 14659 - DNA, 30 bp, Homo sapiens
  chr1:54583785-54583815
  hypo
atattccttgggcagcgggttggtaccatc

SEQ ID NO: 14660 - DNA, 31 bp, Homo sapiens
  chr1:54595917-54595948
  hypo
acatctgccacatagtcggtgcttaggaggt

SEQ ID NO: 14661 - DNA, 84 bp, Homo sapiens
  chr1:54602341-54602425
  hypo
cctgaggttgccgccgacctcctgggcggcacagctccggctgcccaggtagaccttggtccgctccagcggggccagcgcctg

SEQ ID NO: 14662 - DNA, 205 bp, Homo sapiens
  chr1:54605373-54605578
  hypo
tgcaaagcctccccttcgccctcagtggacccactcccacagcccagctgacctccgatgtaggccacagagaagcccctgcgggtggtgctgcggtctgtgtgcagcagaagcagaagctggttgtggcttgaggtcacgggtggtggcaggtggtgtccacaccaattccccagcaggggtgcctcctcgctggccccatcga

SEQ ID NO: 14663 - DNA, 51 bp, Homo sapiens
  chr1:54610115-54610166
  hypo
ggtccctaaggccccccgttgacctttctggtagcccgcagaaaagccatg

SEQ ID NO: 14664 - DNA, 31 bp, Homo sapiens
  chr1:54685802-54685833
  hypo
cagctggaggccactgcggggatcctggggc

SEQ ID NO: 14665 - DNA, 31 bp, Homo sapiens
  chr1:54725169-54725200
  hypo
gagacaggcctccattcgctcttccccaccc

SEQ ID NO: 14666 - DNA, 208 bp, Homo sapiens
  chr1:54746226-54746434
  hypo
ctcaaactcagctgccgacaggcttgaaagaacgagagatgttatgatcgagagtgtcatcataaaagttccttacagccctgcacgctgtacctctctaagatggcattccccagtctcaagttggcttaaatcacatgaaccgccgaggagaaggtagagacagaggaggcggcgcagagagggtggcagccgcgcccaacctggc

SEQ ID NO: 14667 - DNA, 30 bp, Homo sapiens
  chr1:54808674-54808704
  hypo
acactttgagaacccggccggttttcagga

SEQ ID NO: 14668 - DNA, 30 bp, Homo sapiens
  chr1:54818600-54818630
  hypo
caaaaaatgtgagccgacgccgggcccctc

SEQ ID NO: 14669 - DNA, 30 bp, Homo sapiens
  chr1:54819977-54820007
  hypo
gaccagcaatgacacggtacagtgaggcaa

SEQ ID NO: 14670 - DNA, 30 bp, Homo sapiens
  chr1:54839966-54839996
  hypo
gccctggttcctgccgctactcacaaggag

SEQ ID NO: 14671 - DNA, 30 bp, Homo sapiens
  chr1:54876220-54876250
  hypo
gtcctagaattgcacggggatacctctgat

SEQ ID NO: 14672 - DNA, 31 bp, Homo sapiens
  chr1:54961586-54961617
  hypo
ttcctcatctcacaaacgagtacttggcaaa

SEQ ID NO: 14673 - DNA, 156 bp, Homo sapiens
  chr1:55050845-55051001
  hypo
actgcctgccctgcagcgctccttcccttgagttgaggtgcgctggactgagcccatttcattccttttgttgcaccggtgttctccaacctacagcgctcacagcctggtagggtggggatgggggatagacaggtgacccgactgttccccagc

SEQ ID NO: 14674 - DNA, 73 bp, Homo sapiens
  chr1:55065737-55065810
  hypo
agttatgaggattcaatgagccgttactagtagaacgccagagaaaatgtccggtaaaggtcagccattgtgg

SEQ ID NO: 14675 - DNA, 190 bp, Homo sapiens
  chr1:55066932-55067122
  hypo
tcccctcagcatggaggtgggcgtgtgcgtggaggcctatcgccaggaggctgagacccaccggcgccacatcaacagtgcctttatgacctttgtggtcctggacgcagatgaccagccccagttgctgccctggattcggccccagcccggcgtaagtgggaccagcgccctgccccaccagcagctc

SEQ ID NO: 14676 - DNA, 73 bp, Homo sapiens
  chr1:55067376-55067449
  hypo
gtcagatgtgggttggaacctcgcctctactacattcaagtgatgccccctcgagctttcagtctccatttgt

SEQ ID NO: 14677 - DNA, 31 bp, Homo sapiens
  chr1:55144367-55144398
  hypo
caaaaatagggagatccggcctcactgagaa

SEQ ID NO: 14678 - DNA, 237 bp, Homo sapiens; identical to SEQ ID NO: 479
  chr1:55352447-55352684
  hypo

SEQ ID NO: 14679 - DNA, 521 bp, Homo sapiens; identical to SEQ ID NO: 481
  chr1:55462369-55462890
  hypo

SEQ ID NO: 14680 - DNA, 30 bp, Homo sapiens
  chr1:55474300-55474330
  hypo
agatgtttgtgctccgtagcttctagtctg

SEQ ID NO: 14681 - DNA, 199 bp, Homo sapiens
  chr1:55517830-55518029
  hypo
gtgaatatatttaaggcgctttcaccagtgcctgggatgtgctctgtagtttctgtgtgttaactataaggttgactttatgctcattccctcctctcccacaaatgtcgccttggaaagacggaggcagcctggtggaggtgtatctcctagacaccagcatacagagtgaccaccgggaaatcgagggcagggtcat

SEQ ID NO: 14682 - DNA, 31 bp, Homo sapiens
  chr1:55573225-55573256
  hypo
tatcattaaggccaggcgagctggctcacat

SEQ ID NO: 14683 - DNA, 31 bp, Homo sapiens
  chr1:55620212-55620243
  hypo
ctaaaaacattaacaacgtaagaaaagtaca

SEQ ID NO: 14684 - DNA, 30 bp, Homo sapiens
  chr1:56169493-56169523
  hypo
ggtggcccaaggagcgggcaggccatgggc

SEQ ID NO: 14685 - DNA, 126 bp, Homo sapiens; identical to SEQ ID NO: 483
  chr1:57044386-57044512
  hypo

SEQ ID NO: 14686 - DNA, 53 bp, Homo sapiens; identical to SEQ ID NO: 484
  chr1:57044989-57045042
  hypo

SEQ ID NO: 14687 - DNA, 30 bp, Homo sapiens; identical to SEQ ID NO: 485
  chr1:57111184-57111214
  hypo

SEQ ID NO: 14688 - DNA, 495 bp, Homo sapiens; identical to SEQ ID NO: 489
  chr1:58715359-58715854
  hypo

SEQ ID NO: 14689 - DNA, 70 bp, Homo sapiens; identical to SEQ ID NO: 490
  chr1:58715978-58716048
  hypo

SEQ ID NO: 14690 - DNA, 44 bp, Homo sapiens; identical to SEQ ID NO: 495
  chr1:59369442-59369486
  hypo

SEQ ID NO: 14691 - DNA, 31 bp, Homo sapiens
  chr1:59404584-59404615
  hypo
agcaagataacaaattcgaaaactgtgtagg

SEQ ID NO: 14692 - DNA, 110 bp, Homo sapiens; identical to SEQ ID NO: 496
  chr1:59762086-59762196
  hypo

SEQ ID NO: 14693 - DNA, 30 bp, Homo sapiens; identical to SEQ ID NO: 497
  chr1:59799495-59799525
  hypo

SEQ ID NO: 14694 - DNA, 205 bp, Homo sapiens
  chr1:60220991-60221196
  hypo
acgatatgccagatgccgagtttggcagtgaaaataattataacaattcctgctttaaggcgctcacagtctagttggggaggctgatctgttaacaaaaaaatatggtgccatgtcataaacgctatgatagacggaagcagaagttgctgttggagcacataactcaatataggtgggaggcaggcagcggggatgagtcaga

SEQ ID NO: 14695 - DNA, 71 bp, Homo sapiens; identical to SEQ ID NO: 498
  chr1:60280812-60280883
  hypo

SEQ ID NO: 14696 - DNA, 31 bp, Homo sapiens
  chr1:61445391-61445422
  hypo
tcaaagcagggatgttcggctatcaacatca

SEQ ID NO: 14697 - DNA, 30 bp, Homo sapiens; identical to SEQ ID NO: 500
  chr1:61508940-61508970
  hypo

SEQ ID NO: 14698 - DNA, 41 bp, Homo sapiens; identical to SEQ ID NO: 501
  chr1:61516033-61516074
  hypo

SEQ ID NO: 14699 - DNA, 37 bp, Homo sapiens
  chr1:61541525-61541562
  hypo
tttttttttgagacagagtctcgctctgtcaccaggc

SEQ ID NO: 14700 - DNA, 31 bp, Homo sapiens
  chr1:61543522-61543553
  hypo
tcttttttttttttttcgggatttgaaaaaa

SEQ ID NO: 14701 - DNA, 314 bp, Homo sapiens; identical to SEQ ID NO: 505
  chr1:61547870-61548184
  hypo

SEQ ID NO: 14702 - DNA, 30 bp, Homo sapiens; identical to SEQ ID NO: 506
  chr1:61548768-61548798
  hypo

SEQ ID NO: 14703 - DNA, 31 bp, Homo sapiens; identical to SEQ ID NO: 507
  chr1:61549048-61549079
  hypo

SEQ ID NO: 14704 - DNA, 30 bp, Homo sapiens; identical to SEQ ID NO: 508
  chr1:61549312-61549342
  hypo

SEQ ID NO: 14705 - DNA, 30 bp, Homo sapiens
  chr1:61554399-61554429
  hypo
ttcctgatggcctccgcgttatgccggatt

SEQ ID NO: 14706 - DNA, 113 bp, Homo sapiens
  chr1:61601623-61601736
  hypo
ttgaaaaaaatcagaaccctccgcttacgctcgcatacatgtagcttaaaatatatgttgcttattgaaagcattgtttaagttgaactcacgagatatactacatcatgtaa

SEQ ID NO: 14707 - DNA, 30 bp, Homo sapiens
  chr1:61848981-61849011
  hypo
ctccctgggaacggcgttcacacagcatca

SEQ ID NO: 14708 - DNA, 397 bp, Homo sapiens
  chr1:61913158-61913555
  hypo
aaagccgcgaaaccccgtcgccactgcattttccgcagcagagccatccactgcactgtctgggctccacccagaaaatccggcagtgccatcatgaccaaatagataggaactctggacaatttcatcgggtcattgtccccttaatctccacgctgcacctcagatctcaagcagcttccgtggcgcaggctcaatttaatggatagaatctatttttcatgaaaaagcaggaaataagctgtctctttcataaaaagatttacaaaatgtaatcattgttgaaatattccctttgaactgccgtgtccacgggggtctccggctcccagagtcgtgcttcattagaaccccgtcataagcggctccagaagggcaggtacgctggtggtgcccg

SEQ ID NO: 14709 - DNA, 30 bp, Homo sapiens
  chr1:62119987-62120017
  hypo
cccgcagacctgggcgccgaggctggcttg

SEQ ID NO: 14710 - DNA, 602 bp, Homo sapiens; identical to SEQ ID NO: 509
  chr1:62207659-62208261
  hypo

SEQ ID NO: 14711 - DNA, 519 bp, Homo sapiens; identical to SEQ ID NO: 510
  chr1:62208291-62208810
  hypo

SEQ ID NO: 14712 - DNA, 31 bp, Homo sapiens
  chr1:62285410-62285441
  hypo
aggcaatgcacagtagcgcttcaatgctgca

SEQ ID NO: 14713 - DNA, 30 bp, Homo sapiens
  chr1:62729379-62729409
  hypo
tatcaggacacctgcgtgtgtttaataggc

SEQ ID NO: 14714 - DNA, 31 bp, Homo sapiens; identical to SEQ ID NO: 512
  chr1:63153559-63153590
  hypo

SEQ ID NO: 14715 - DNA, 30 bp, Homo sapiens; identical to SEQ ID NO: 513
  chr1:63348082-63348112
  hypo

SEQ ID NO: 14716 - DNA, 558 bp, Homo sapiens; identical to SEQ ID NO: 514
  chr1:63539430-63539988
  hypo

SEQ ID NO: 14717 - DNA, 400 bp, Homo sapiens; identical to SEQ ID NO: 517
  chr1:63788366-63788766
  hypo

SEQ ID NO: 14718 - DNA, 577 bp, Homo sapiens; identical to SEQ ID NO: 518
  chr1:63788919-63789496
  hypo

SEQ ID NO: 14719 - DNA, 63 bp, Homo sapiens; identical to SEQ ID NO: 519
  chr1:63789728-63789791
  hypo

SEQ ID NO: 14720 - DNA, 63 bp, Homo sapiens; identical to SEQ ID NO: 520
  chr1:63789849-63789912
  hypo

SEQ ID NO: 14721 - DNA, 30 bp, Homo sapiens
  chr1:63832611-63832641
  hypo
cacagccgtccatgcgtgattggacagaag

SEQ ID NO: 14722 - DNA, 80 bp, Homo sapiens
  chr1:64383922-64384002
  hypo
ctgactatattccacccagcacgacgcactgaatgcttggtatgagcagcacatcatacgacaggaatctcacaacaaag

SEQ ID NO: 14723 - DNA, 410 bp, Homo sapiens; identical to SEQ ID NO: 531
  chr1:65210948-65211358
  hypo

SEQ ID NO: 14724 - DNA, 40 bp, Homo sapiens; identical to SEQ ID NO: 538
  chr1:65720328-65720368
  hypo

SEQ ID NO: 14725 - DNA, 31 bp, Homo sapiens; identical to SEQ ID NO: 540
  chr1:65886883-65886914
  hypo

SEQ ID NO: 14726 - DNA, 428 bp, Homo sapiens; identical to SEQ ID NO: 542
  chr1:66258671-66259099
  hypo

SEQ ID NO: 14727 - DNA, 30 bp, Homo sapiens; identical to SEQ ID NO: 545
  chr1:67773425-67773455
  hypo

SEQ ID NO: 14728 - DNA, 31 bp, Homo sapiens
  chr1:67797228-67797259
  hypo
aagcactcatttaggccggcatggtcgctca

SEQ ID NO: 14729 - DNA, 22 bp, Homo sapiens
  chr1:68958070-68958092
  hypo
ctttatagttttgttacgatcg

SEQ ID NO: 14730 - DNA, 30 bp, Homo sapiens
  chr1:70710374-70710404
  hypo
gaagcagatcgagacggcggtcacattcta

SEQ ID NO: 14731 - DNA, 31 bp, Homo sapiens
  chr1:71175455-71175486
  hypo
tataaaaacttacatgctggccggccgcggt

SEQ ID NO: 14732 - DNA, 35 bp, Homo sapiens
  chr1:72383169-72383204
  hypo
atgcaaatgtaaagagtaagtcggacgggtgcggt

SEQ ID NO: 14733 - DNA, 35 bp, Homo sapiens
  chr1:72383443-72383478
  hypo
cagagcgagactccgtcttaaaaaaaaaaaaaaaa

SEQ ID NO: 14734 - DNA, 42 bp, Homo sapiens
  chr1:73222392-73222434
  hypo
ttaaaaatttgacttcaaggccgggtgcggtggttcacgcct

SEQ ID NO: 14735 - DNA, 489 bp, Homo sapiens; identical to SEQ ID NO: 567
  chr1:75601917-75602406
  hypo

SEQ ID NO: 14736 - DNA, 31 bp, Homo sapiens
  chr1:76192235-76192266
  hypo
ggtggttaatagcatgcgctcttgatagtaa

SEQ ID NO: 14737 - DNA, 30 bp, Homo sapiens
  chr1:76840017-76840047
  hypo
tggaatacatcagacgctaaaatagtcctg

SEQ ID NO: 14738 - DNA, 163 bp, Homo sapiens
  chr1:78254758-78254921
  hypo
taatttctttcagcaacgtgtatatatatatatttttaaattgtagaagtctttcacatctttggttaattcctaagtattgtattcttttggataataatctaaatggaattgtggggggcggttgcttttttttttttttttttttctttgagacgaggtc

SEQ ID NO: 14739 - DNA, 69 bp, Homo sapiens; identical to SEQ ID NO: 578
  chr1:78354048-78354117
  hypo

SEQ ID NO: 14740 - DNA, 91 bp, Homo sapiens
  chr1:78458352-78458443
  hypo
ccaggttgagaatcagcgtataagttttattttaccatcagacaagcaaaaacaggttgacctttattctttttttttgagacagagtctc

SEQ ID NO: 14741 - DNA, 81 bp, Homo sapiens
  chr1:78463739-78463820
  hypo
tgagccaccgcaccggcctctgtttgactatctttaaagctcttaaaacgatctcatttcgttattaactttttattgttt

SEQ ID NO: 14742 - DNA, 814 bp, Homo sapiens; identical to SEQ ID NO: 580
  chr1:78511527-78512341
  hypo

SEQ ID NO: 14743 - DNA, 130 bp, Homo sapiens
  chr1:83243220-83243350
  hypo
gagacagtgagatggcgattgactagacagcgagagatggaaagagagagagacagcaatcgactaggcagtgagagatggtggctgcaacagtaaggagctgctaacactgcagcgttgtaacactagc

SEQ ID NO: 14744 - DNA, 983 bp, Homo sapiens; identical to SEQ ID NO: 588
  chr1:84543198-84544181
  hypo

SEQ ID NO: 14745 - DNA, 39 bp, Homo sapiens
  chr1:84944529-84944568
  hypo
agcctgggcattaaagcaaggctccgtctcaaaaagatg

SEQ ID NO: 14746 - DNA, 31 bp, Homo sapiens; identical to SEQ ID NO: 591
  chr1:85463079-85463110
  hypo

SEQ ID NO: 14747 - DNA, 51 bp, Homo sapiens; identical to SEQ ID NO: 594
  chr1:85667112-85667163
  hypo

SEQ ID NO: 14748 - DNA, 37 bp, Homo sapiens
  chr1:85725177-85725214
  hypo
cgcccgccgacttcgccggatccggggttctgcgact

SEQ ID NO: 14749 - DNA, 30 bp, Homo sapiens
  chr1:85743482-85743512
  hypo
ggtatttgaagctacgagagtagataaaaa

SEQ ID NO: 14750 - DNA, 620 bp, Homo sapiens; identical to SEQ ID NO: 597
  chr1:85930326-85930946
  hypo

SEQ ID NO: 14751 - DNA, 101 bp, Homo sapiens
  chr1:86860848-86860949
  hypo
tcagttgcacttaaaactccaagaacctcattcattcaaaaacacttgaaaccgtactatgcgttgcgtgatgaggaaactgtcttcgaaatagattttat

SEQ ID NO: 14752 - DNA, 30 bp, Homo sapiens; identical to SEQ ID NO: 602
  chr1:87793848-87793878
  hypo

SEQ ID NO: 14753 - DNA, 31 bp, Homo sapiens
  chr1:87797490-87797521
  hypo
gagaaaagtaaacaggcggctgctgccggcg

SEQ ID NO: 14754 - DNA, 30 bp, Homo sapiens; identical to SEQ ID NO: 603
  chr1:87907740-87907770
  hypo

SEQ ID NO: 14755 - DNA, 21 bp, Homo sapiens
  chr1:89347741-89347762
  hypo
cagaacgctgggaggtcgagg

SEQ ID NO: 14756 - DNA, 614 bp, Homo sapiens; identical to SEQ ID NO: 607
  chr1:90098723-90099337
  hypo

SEQ ID NO: 14757 - DNA, 768 bp, Homo sapiens; identical to SEQ ID NO: 611
  chr1:90308852-90309620
  hypo

SEQ ID NO: 14758 - DNA, 199 bp, Homo sapiens
  chr1:90448904-90449103
  hypo
cctgcagtcagtttcccgtattaacatcttacattagtatagtccagttgttacaattaatgaatgagtactgatgttattaataactgaagttcataacttatgcagttttttttattttctccctcatgtctttcttctagaatctcatcgcatccaggttatcacatttcatttcgttgccgcgtcttcttaggct

SEQ ID NO: 14759 - DNA, 30 bp, Homo sapiens
  chr1:90478708-90478738
  hypo
aggaagaaaagcggcgaattgaggctcggc

SEQ ID NO: 14760 - DNA, 360 bp, Homo sapiens; identical to SEQ ID NO: 617
  chr1:91183250-91183610
  hypo

SEQ ID NO: 14761 - DNA, 203 bp, Homo sapiens; identical to SEQ ID NO: 628
  chr1:91195143-91195346
  hypo

SEQ ID NO: 14762 - DNA, 30 bp, Homo sapiens
  chr1:91359518-91359548
  hypo
gcctcccgcccggccgccgccaacaggtca

SEQ ID NO: 14763 - DNA, 30 bp, Homo sapiens; identical to SEQ ID NO: 633
  chr1:91904864-91904894
  hypo

SEQ ID NO: 14764 - DNA, 1892 bp, Homo sapiens; identical to SEQ ID NO: 640
  chr1:92949853-92951745
  hypo

SEQ ID NO: 14765 - DNA, 664 bp, Homo sapiens; identical to SEQ ID NO: 641
  chr1:92951952-92952616
  hypo

SEQ ID NO: 14766 - DNA, 21 bp, Homo sapiens
  chr1:93226594-93226615
  hypo
acacagcgaggctccatctca

SEQ ID NO: 14767 - DNA, 330 bp, Homo sapiens; identical to SEQ ID NO: 642
  chr1:93250728-93251058
  hypo

SEQ ID NO: 14768 - DNA, 22 bp, Homo sapiens
  chr1:93542194-93542216
  hypo
ttttttcttttttcttcgagac

SEQ ID NO: 14769 - DNA, 31 bp, Homo sapiens
  chr1:93647179-93647210
  hypo
cttttttttttgagaccgagtctcactctgt

SEQ ID NO: 14770 - DNA, 31 bp, Homo sapiens; identical to SEQ ID NO: 645
  chr1:93913453-93913484
  hypo

SEQ ID NO: 14771 - DNA, 674 bp, Homo sapiens; identical to SEQ ID NO: 646
  chr1:93913791-93914465
  hypo

SEQ ID NO: 14772 - DNA, 190 bp, Homo sapiens
  chr1:94048271-94048461
  hypo
gttgagccaggcagagggagacgagggaaccttgaggaacggcaccttgcagggcttaggcgggggcttagggcacagttgactgtctgatcccctcagcgcctccccagccctggcgtctgaggagaccctccgaaccactgctgggctcagggcaggctcgcttcccgtcctgaacacaggtgagttt

SEQ ID NO: 14773 - DNA, 26 bp, Homo sapiens
  chr1:94343567-94343593
  hypo
aaaatcaaaatttggccgggcgcggt

SEQ ID NO: 14774 - DNA, 66 bp, Homo sapiens
  chr1:94354602-94354668
  hypo
acttttcacaatgaccgaataccgcagtagccacagcggcacccactcgtgcgcttgaatgtcagg

SEQ ID NO: 14775 - DNA, 126 bp, Homo sapiens
  chr1:94495947-94496073
  hypo
ctagtcttcttaggacaggggcgcgtaggcacttacggaagccacccttccttcaggcagcggttgccaaagcctggcttattcaggaggacgtctgcaagtaccgtgaactgctcactgcctggt

SEQ ID NO: 14776 - DNA, 31 bp, Homo sapiens
  chr1:94507307-94507338
  hypo
tcataaagaacacacacgtgcatactctcac

SEQ ID NO: 14777 - DNA, 103 bp, Homo sapiens
  chr1:94507710-94507813
  hypo
aggatgacaaaccctcagagaaaggcacggggcaacgctgtgtgagtagagcaagggggaaagctctggcttgaccacggggttgaaccgtgctgttacctct

SEQ ID NO: 14778 - DNA, 31 bp, Homo sapiens
  chr1:94546399-94546430
  hypo
atccttaatccagctgcgaaaaacaaaaaac

SEQ ID NO: 14779 - DNA, 611 bp, Homo sapiens; identical to SEQ ID NO: 650
  chr1:94702466-94703077
  hypo

SEQ ID NO: 14780 - DNA, 425 bp, Homo sapiens; identical to SEQ ID NO: 651
  chr1:94703103-94703528
  hypo

SEQ ID NO: 14781 - DNA, 26 bp, Homo sapiens
  chr1:94812326-94812352
  hypo
tgagactccatcgaaaaaaaaaaaaa

SEQ ID NO: 14782 - DNA, 554 bp, Homo sapiens; identical to SEQ ID NO: 654
  chr1:95006962-95007516
  hypo

SEQ ID NO: 14783 - DNA, 31 bp, Homo sapiens
  chr1:95314374-95314405
  hypo
aacaccagaacaaggccgtaacccatgctgt

SEQ ID NO: 14784 - DNA, 206 bp, Homo sapiens; identical to SEQ ID NO: 657
  chr1:95391394-95391600
  hypo

SEQ ID NO: 14785 - DNA, 34 bp, Homo sapiens
  chr1:97185220-97185254
  hypo
tcaatcaatatcgatcgagcgaatgtggggaata

SEQ ID NO: 14786 - DNA, 5 bp, Homo sapiens
  chr1:97185732-97185737
  hypo
ctttt

SEQ ID NO: 14787 - DNA, 20 bp, Homo sapiens
  chr1:98386546-98386566
  hypo
gccaagtgacagcagccgga

SEQ ID NO: 14788 - DNA, 419 bp, Homo sapiens; identical to SEQ ID NO: 668
  chr1:99127041-99127460
  hypo

SEQ ID NO: 14789 - DNA, 30 bp, Homo sapiens; identical to SEQ ID NO: 669
  chr1:99127692-99127722
  hypo

SEQ ID NO: 14790 - DNA, 169 bp, Homo sapiens
  chr1:99667087-99667256
  hypo
ggtgttcttgtgcatacgtctttgcaatatagctgactttactaaaaataataataataataataataatgtctgtgaccttaggactggataaagccaacgtgaacctcaagatggttaagccaatgaccttgacctctttaaccccaaccaacggagtacttgatcc

SEQ ID NO: 14791 - DNA, 42 bp, Homo sapiens; identical to SEQ ID NO: 674
  chr1:100437130-100437172
  hypo

SEQ ID NO: 14792 - DNA, 182 bp, Homo sapiens
  chr1:100500498-100500680
  hypo
aattcccttttgcttacgttagcgagtactagtttgttagccagtgttagtttctgttgatcctaaccaaaaaaccctaactgagatatcagtctcttagcgcaaagtttgtgaatacggtcatccctccatatgaggaggggagtgggaattggttgtgggacttccgtggatatccaaat

SEQ ID NO: 14793 - DNA, 150 bp, Homo sapiens
  chr1:100928354-100928504
  hypo
cagcacacccagtgacaacatcgtgcgaaggttcctgaacatctgtgagaacaccgaaggggccatcgccgttcactgcaaaggtgtgtgcaaggcctcggtggtggtggctgtgcttatcgaaggggcgggccaaggaagagcaaataa

SEQ ID NO: 14794 - DNA, 277 bp, Homo sapiens; identical to SEQ ID NO: 677
  chr1:101004539-101004816
  hypo

SEQ ID NO: 14795 - DNA, 915 bp, Homo sapiens; identical to SEQ ID NO: 678
  chr1:101004842-101005757
  hypo

SEQ ID NO: 14796 - DNA, 36 bp, Homo sapiens
  chr1:101675508-101675544
  hypo
gctgggattacagacgtgaaccatggtgcctggcct

SEQ ID NO: 14797 - DNA, 420 bp, Homo sapiens; identical to SEQ ID NO: 679
  chr1:101702424-101702844
  hypo

SEQ ID NO: 14798 - DNA, 1101 bp, Homo sapiens; identical to SEQ ID NO: 686
  chr1:107682706-107683807
  hypo

SEQ ID NO: 14799 - DNA, 30 bp, Homo sapiens; identical to SEQ ID NO: 687
  chr1:107684240-107684270
  hypo

SEQ ID NO: 14800 - DNA, 227 bp, Homo sapiens; identical to SEQ ID NO: 690
  chr1:108507148-108507375
  hypo

SEQ ID NO: 14801 - DNA, 112 bp, Homo sapiens; identical to SEQ ID NO: 691
  chr1:108507494-108507606
  hypo

SEQ ID NO: 14802 - DNA, 872 bp, Homo sapiens; identical to SEQ ID NO: 692
  chr1:108507657-108508529
  hypo

SEQ ID NO: 14803 - DNA, 38 bp, Homo sapiens; identical to SEQ ID NO: 693
  chr1:108508549-108508587
  hypo

SEQ ID NO: 14804 - DNA, 30 bp, Homo sapiens
  chr1:108735534-108735564
  hypo
ctgatcagaagccccggctcccactccagg

SEQ ID NO: 14805 - DNA, 656 bp, Homo sapiens; identical to SEQ ID NO: 695
  chr1:109203572-109204228
  hypo

SEQ ID NO: 14806 - DNA, 30 bp, Homo sapiens; identical to SEQ ID NO: 696
  chr1:109257153-109257183
  hypo

SEQ ID NO: 14807 - DNA, 31 bp, Homo sapiens; identical to SEQ ID NO: 697
  chr1:109420435-109420466
  hypo

SEQ ID NO: 14808 - DNA, 17 bp, Homo sapiens
  chr1:109423193-109423210
  hypo
tccgtctcaaaaaaaaa

SEQ ID NO: 14809 - DNA, 105 bp, Homo sapiens
  chr1:109609235-109609340
  hypo
gggcatggcagtggggcgttggaaaaacggcagactctttactgatattaccataggggaaaagacatgagagacagttctccaaatactttttttgtttgtttg

SEQ ID NO: 14810 - DNA, 31 bp, Homo sapiens
  chr1:109725167-109725198
  hypo
gatccaaacccatatccgtctagcttaaaat

SEQ ID NO: 14811 - DNA, 115 bp, Homo sapiens
  chr1:109772087-109772202
  hypo
tcctgaagtgtgacgcggagcggataaagttggaagcagagcggtttgagaacctccgagagattgggaaccttctgcacccttctgtacccatcagtaacgatgaggtaggtgg

SEQ ID NO: 14812 - DNA, 30 bp, Homo sapiens
  chr1:109772424-109772454
  hypo
gggctgctgtcctccgctgcatgttgcccg

SEQ ID NO: 14813 - DNA, 601 bp, Homo sapiens
  chr1:109795508-109796109
  hypo
tgggctagccgtggcccgggtcacagccactgaccccgatgaaggcaccaatgcccagattatgtaccagattgtggagggcaacatccctgaggtctttcagctggacatcttctccggggagctgacagccctggtagacttagactacgaggaccggcctgagtacgtcctggtcatccaggccacgtcagctcctctggtgagccgggctacagtccacgtccgcctccttgaccgcaatgacaacccaccagtgctgggcaactttgagatccttttcaacaactatgtcaccaatcgctcaagcagcttccctgggggtgccattggccgagtacctgcccatgaccctgatatctcagatagtctgacttacagctttgagcggggaaatgaactcagcctggtcctgctcaatgcctccacgggtgagctgaagctaagccgcgcactggacaacaaccggcctctggaggccatcatgagcgtgctggtgtcaggtaaggaagggcccaggtggcgctggggtgggggtagctcgcggggatggtctgggcagccactggaggtagggtgcgatccaggaagcagctacaga

SEQ ID NO: 14814 - DNA, 30 bp, Homo sapiens
  chr1:109801412-109801442
  hypo
gtgctgcccttcgacgacaacatctgcctg

SEQ ID NO: 14815 - DNA, 30 bp, Homo sapiens
  chr1:109801646-109801676
  hypo
cgctgccgcagccgcgagggcggctacacc

SEQ ID NO: 14816 - DNA, 30 bp, Homo sapiens
  chr1:109805569-109805599
  hypo
gccaacaatggcaccgtgcctggtatgggg

SEQ ID NO: 14817 - DNA, 68 bp, Homo sapiens
  chr1:109812119-109812187
  hypo
gggccctggacaaacccgtcacggtgcagttccgcctgctggagacagaggagcggaccaagcccatc

SEQ ID NO: 14818 - DNA, 30 bp, Homo sapiens
  chr1:109816186-109816216
  hypo
cccgcccaccgccccggcagagcctccagg

SEQ ID NO: 14819 - DNA, 287 bp, Homo sapiens; identical to SEQ ID NO: 700
  chr1:109940218-109940505
  hypo

SEQ ID NO: 14820 - DNA, 31 bp, Homo sapiens
  chr1:110027020-110027051
  hypo
tccagctttccctgtccgcaacagtcctcca

SEQ ID NO: 14821 - DNA, 31 bp, Homo sapiens
  chr1:110042318-110042349
  hypo
ccctaagccagctggccgctgtgctaaagcc

SEQ ID NO: 14822 - DNA, 31 bp, Homo sapiens; identical to SEQ ID NO: 702
  chr1:110052254-110052285
  hypo

SEQ ID NO: 14823 - DNA, 31 bp, Homo sapiens
  chr1:110061030-110061061
  hypo
aggtgattctttataccgccaactttaagca

SEQ ID NO: 14824 - DNA, 40 bp, Homo sapiens
  chr1:110085469-110085509
  hypo
cagctgcctggcctggcgctctgtacgcagacaaacctgc

SEQ ID NO: 14825 - DNA, 45 bp, Homo sapiens
  chr1:110085847-110085892
  hypo
caagacgcctgccctccgaaaatttgtcttcgtcttccacctctg

SEQ ID NO: 14826 - DNA, 103 bp, Homo sapiens
  chr1:110167961-110168064
  hypo
tgcccgatccctgccgggccccgccccctgcctcaagcacttcccgctcgacctgcgcacgtctatggatggcaaatgcaaggagatcgccgaggtatcacct

SEQ ID NO: 14827 - DNA, 271 bp, Homo sapiens
  chr1:110170705-110170976
  hypo
tggacacccacatccatgcctcgtcctgcatgaaccagaagcatctgctgcgcttcatcaagcgggcaatgaagcggcacctggaggagatcgtgcacgtggagcagggccgtgaacagacgctgcgggaggtctttgagagcatgaatctcacggcctacgacctgagtgtggacacgctggatgtgcatgcggtctgtgccagtggcgtgggctgtgggactgagtcagtcaggggaccaggagtcacgggtgacctgagccttcccat

SEQ ID NO: 14828 - DNA, 30 bp, Homo sapiens
  chr1:110196411-110196441
  hypo
cagaagtgcccaggcgcgttggctcacgcc

SEQ ID NO: 14829 - DNA, 31 bp, Homo sapiens
  chr1:110307261-110307292
  hypo
ctgcactccatggtatcgaaaaatctttctt

SEQ ID NO: 14830 - DNA, 38 bp, Homo sapiens
  chr1:110338323-110338361
  hypo
ttacaggcatgagccacagtgcccggcctggaaacagg

SEQ ID NO: 14831 - DNA, 31 bp, Homo sapiens
  chr1:110354911-110354942
  hypo
gtccctacatccggctcggcgccgtggctca

SEQ ID NO: 14832 - DNA, 141 bp, Homo sapiens; identical to SEQ ID NO: 704
  chr1:110453159-110453300
  hypo

SEQ ID NO: 14833 - DNA, 372 bp, Homo sapiens; identical to SEQ ID NO: 705
  chr1:110453530-110453902
  hypo

SEQ ID NO: 14834 - DNA, 30 bp, Homo sapiens
  chr1:110623923-110623953
  hypo
ttggaggattcgggcgctgtagtcagccag

SEQ ID NO: 14835 - DNA, 823 bp, Homo sapiens; identical to SEQ ID NO: 710
  chr1:110626790-110627613
  hypo

SEQ ID NO: 14836 - DNA, 529 bp, Homo sapiens; identical to SEQ ID NO: 712
  chr1:110692967-110693496
  hypo

SEQ ID NO: 14837 - DNA, 121 bp, Homo sapiens; identical to SEQ ID NO: 713
  chr1:110693736-110693857
  hypo

SEQ ID NO: 14838 - DNA, 384 bp, Homo sapiens; identical to SEQ ID NO: 714
  chr1:110753509-110753893
  hypo

SEQ ID NO: 14839 - DNA, 399 bp, Homo sapiens; identical to SEQ ID NO: 715
  chr1:110753957-110754356
  hypo

SEQ ID NO: 14840 - DNA, 30 bp, Homo sapiens
  chr1:110946979-110947009
  hypo
gaccagatccgatgccgacgtttgagcctt

SEQ ID NO: 14841 - DNA, 34 bp, Homo sapiens
  chr1:110947364-110947398
  hypo
tataaccttaaaatatcgtgattaggccgggtgt

SEQ ID NO: 14842 - DNA, 121 bp, Homo sapiens
  chr1:110947697-110947818
  hypo
ggcctcagggccagacaaaaatcctagcttaacgacttactagctgcatgacctcaggcaagttatttaacctctgtgtctcagtttctttttttattttttgagacagagtctcgctctt

SEQ ID NO: 14843 - DNA, 30 bp, Homo sapiens
  chr1:111022637-111022667
  hypo
cagcacccttccaccgtggaacagggccta

SEQ ID NO: 14844 - DNA, 991 bp, Homo sapiens; identical to SEQ ID NO: 716
  chr1:111149037-111150028
  hypo

SEQ ID NO: 14845 - DNA, 238 bp, Homo sapiens; identical to SEQ ID NO: 717
  chr1:111216734-111216972
  hypo

SEQ ID NO: 14846 - DNA, 697 bp, Homo sapiens; identical to SEQ ID NO: 718
  chr1:111217194-111217891
  hypo

SEQ ID NO: 14847 - DNA, 56 bp, Homo sapiens; identical to SEQ ID NO: 719
  chr1:111217923-111217979
  hypo

SEQ ID NO: 14848 - DNA, 151 bp, Homo sapiens
  chr1:112084791-112084942
  hypo
gataatcctttgaaggaagatcgtttagaccagcttaatgaaacagacatccttcgcgtactgacggaaacactggcggcacatattgaggccgtatttcaggatcagacctgccggttcgaacacacgcgacaagagcaaagaagttaaa

SEQ ID NO: 14849 - DNA, 29 bp, Homo sapiens
  chr1:112160643-112160672
  hypo
acagagcaagactccgcctcaaaaaaaaa

SEQ ID NO: 14850 - DNA, 31 bp, Homo sapiens
  chr1:112317424-112317455
  hypo
tggagaaaactactcccggggcctcttggaa

SEQ ID NO: 14851 - DNA, 958 bp, Homo sapiens
  chr1:112524447-112525405
  hypo
aaaacttgaagatcctgaagacgcggaagacccggagcgtgacgaaggcgccggacacgtcctcgttgttggtcatgaccagaccgatgtagtagggcatgatggccaccacgtcgatgatgctcatgacgctgcggatgaagcggtagcggctgggagccgcgaagagccgcaggaggtactccacggtgaagatcatgacgcacgccgtgtccaggcagaagaaggccaccgagtagcgctccccgcacggcagctccttgctgcccgggaccgtgccgcacggcaccgtctccaccacgttggtgatgaccgagacagcgatgaagaagccagtcacgtagtagaagaccagggccagcgtgctggtgtgggggttctcgaaggcccgccacatggtctggcggaagctgagcgagggcatggactcctggttgttctccgagtcgttgtcgtccatgagccgctcggcgttctccctcttgcggtccttgtactcctcgtagcagcagtccccgatgatctccgggaggatgccgtagaaggccagctcgtcgtcgtaggcagagatgcactcgtagcgcgggtagtgcagcttccccgtgcggtagaagttgagcacgcagcggaacacctcggggtcccggtcgaagaagtactccttggtgtcctcgttgaagaagaactccttctccgtgctgcccagcagggtgtccgggtagcgctccagcgtggtcctccaggtctggaacctccgcccactcacgttgaggacaatcagctcatcctgccgcttgttcttgtcggccggggccaggggcatggggcagttggccaccggcatccacccgatggccgcagcccgggcaaaaggcagccaggccgcaactccggccgccatggtgactccagctcttgggccggcagccgcgcggacgctaggcacaccagcttggag

SEQ ID NO: 14852 - DNA, 14 bp, Homo sapiens
  chr1:113051670-113051684
  hypo
gttcggcacgccgt

SEQ ID NO: 14853 - DNA, 206 bp, Homo sapiens
  chr1:113244293-113244499
  hypo
ccggttcgccatgtcccggccttcctcagaccgaacgggctcctgagaagacataagatgaggggtcaaaggaagctgttgactacatgaacctctcctgcctcacccataagtgtagcagctggaacaaatgcctccttctccagccctgacccagaaagcgcccaggccccagctaccctgggcagcttcgtggccagggatcc

SEQ ID NO: 14854 - DNA, 161 bp, Homo sapiens; identical to SEQ ID NO: 727
  chr1:113249255-113249416
  hypo

SEQ ID NO: 14855 - DNA, 30 bp, Homo sapiens
  chr1:113290950-113290980
  hypo
agctgcattatcggcgtggttgtgggccag

SEQ ID NO: 14856 - DNA, 30 bp, Homo sapiens; identical to SEQ ID NO: 731
  chr1:113498746-113498776
  hypo

SEQ ID NO: 14857 - DNA, 30 bp, Homo sapiens
  chr1:113749371-113749401
  hypo
attttgcctctttacggatgtaaggaagag

SEQ ID NO: 14858 - DNA, 31 bp, Homo sapiens
  chr1:113774557-113774588
  hypo
tgatgaggtttattgccggccaatacgctgg

SEQ ID NO: 14859 - DNA, 706 bp, Homo sapiens; identical to SEQ ID NO: 732
  chr1:113932572-113933278
  hypo

SEQ ID NO: 14860 - DNA, 767 bp, Homo sapiens; identical to SEQ ID NO: 733
  chr1:113933305-113934072
  hypo

SEQ ID NO: 14861 - DNA, 27 bp, Homo sapiens
  chr1:114223091-114223118
  hypo
acacagggccgggcgcggtggctcacg

SEQ ID NO: 14862 - DNA, 30 bp, Homo sapiens
  chr1:114298138-114298168
  hypo
aagcatacattaaggcgtggttaggtagat

SEQ ID NO: 14863 - DNA, 27 bp, Homo sapiens
  chr1:114299489-114299516
  hypo
acttaaaaccatactctaggccgggcg

SEQ ID NO: 14864 - DNA, 30 bp, Homo sapiens
  chr1:114505986-114506016
  hypo
acctgcctaatctacgtttcagggaagctg

SEQ ID NO: 14865 - DNA, 30 bp, Homo sapiens
  chr1:114522655-114522685
  hypo
ttcacaccttcatgcgcttagacctgccta

SEQ ID NO: 14866 - DNA, 224 bp, Homo sapiens; identical to SEQ ID NO: 736
  chr1:114695512-114695736
  hypo

SEQ ID NO: 14867 - DNA, 206 bp, Homo sapiens; identical to SEQ ID NO: 737
  chr1:114695799-114696005
  hypo

SEQ ID NO: 14868 - DNA, 31 bp, Homo sapiens; identical to SEQ ID NO: 741
  chr1:114697994-114698025
  hypo

SEQ ID NO: 14869 - DNA, 30 bp, Homo sapiens
  chr1:115049733-115049763
  hypo
gatctatcagagagcgacctggaggactac

SEQ ID NO: 14870 - DNA, 30 bp, Homo sapiens; identical to SEQ ID NO: 744
  chr1:115252199-115252229
  hypo

SEQ ID NO: 14871 - DNA, 72 bp, Homo sapiens; identical to SEQ ID NO: 745
  chr1:115256505-115256577
  hypo

SEQ ID NO: 14872 - DNA, 95 bp, Homo sapiens; identical to SEQ ID NO: 746
  chr1:115258667-115258762
  hypo

SEQ ID NO: 14873 - DNA, 648 bp, Homo sapiens; identical to SEQ ID NO: 750
  chr1:115880146-115880794
  hypo

SEQ ID NO: 14874 - DNA, 1112 bp, Homo sapiens; identical to SEQ ID NO: 752
  chr1:116184461-116185573
  hypo

SEQ ID NO: 14875 - DNA, 31 bp, Homo sapiens
  chr1:116206290-116206321
  hypo
tggggagagaccaccacggccatcacaggca

SEQ ID NO: 14876 - DNA, 327 bp, Homo sapiens
  chr1:116214043-116214370
  hypo
tccacttgggcaggccgggagcctcagactccagacttttcatggtgcgctccttcctgcttactcaggaggaaggcgaggcagtccagcatcctgggtggagtggaggtgtttcgagtccatatctaaatctttttcttagagcaccctaagcaggctgctgtctttgatccccatgcctctgctgtttatcttggtgtgattcatcactgtaatttaagacgtggagagagcaaagttcccatcccaggcaggggaggcgcagtgcaggttggactgtgtaaggaaatggcagcatggcgaggtttgtgccgcggcctacaagca

SEQ ID NO: 14877 - DNA, 101 bp, Homo sapiens
  chr1:116226507-116226608
  hypo
ctctgtttcccaccctcgtggtattaacactattctttcactgtcctttccccaaaggccccagtaacaatgccactggccagtcccgggccatgattgct

SEQ ID NO: 14878 - DNA, 1584 bp, Homo sapiens; identical to SEQ ID NO: 754
  chr1:116380294-116381878
  hypo

SEQ ID NO: 14879 - DNA, 31 bp, Homo sapiens
  chr1:116642573-116642604
  hypo
gccaggcatggaagtgcgctggtgagcccac

SEQ ID NO: 14880 - DNA, 20 bp, Homo sapiens
  chr1:117021628-117021648
  hypo
caacatggtgaaaccccgtc

SEQ ID NO: 14881 - DNA, 31 bp, Homo sapiens
  chr1:117055697-117055728
  hypo
agaagaaaagaccatgcgagggtattagatt

SEQ ID NO: 14882 - DNA, 204 bp, Homo sapiens
  chr1:117076614-117076818
  hypo
tctgcatcacctgatccgtgagcttttccgtcttacttgcatttttagcagcttccacgaaatctgaaggaaccccatctgaaaaactgttatctgccatctgaatgtttttatccccttgtctggtaaaccaagtcccgtgagtaactaggctaaggcactcaggccagtcctcggggagcacacgccgcccatctggctcgc

SEQ ID NO: 14883 - DNA, 30 bp, Homo sapiens
  chr1:117077101-117077131
  hypo
tgccagcccccactcgccgccctctacgcc

SEQ ID NO: 14884 - DNA, 112 bp, Homo sapiens
  chr1:117131434-117131546
  hypo
acctcggctctctggacggtgaggctgaacaggccccccgacacatgcctctcaaactggagcctggctctcaggccctcctcctcggcgtaagtaccgtattcaaaggcgg

SEQ ID NO: 14885 - DNA, 31 bp, Homo sapiens
  chr1:117157579-117157610
  hypo
caaggcttgggtcttacgggtctcctgctgg

SEQ ID NO: 14886 - DNA, 208 bp, Homo sapiens; identical to SEQ ID NO: 760
  chr1:117209939-117210147
  hypo

SEQ ID NO: 14887 - DNA, 30 bp, Homo sapiens
  chr1:117284787-117284817
  hypo
catcccgcagacctcgagttcatacagctc

SEQ ID NO: 14888 - DNA, 74 bp, Homo sapiens
  chr1:117297900-117297974
  hypo
ttgctgatgaatcggcgagctaagagtggggcgagaagaagaggctgactggagagcagcgggcctttcatcga

SEQ ID NO: 14889 - DNA, 31 bp, Homo sapiens
  chr1:117371752-117371783
  hypo
ttccctcaacactgaccgtttcccactctct

SEQ ID NO: 14890 - DNA, 36 bp, Homo sapiens
  chr1:117451188-117451224
  hypo
cctgatcgcaccactgcactccggcctgggtgacag

SEQ ID NO: 14891 - DNA, 31 bp, Homo sapiens
  chr1:117503935-117503966
  hypo
tgccgggtggtggacacgaagagtggggagg

SEQ ID NO: 14892 - DNA, 31 bp, Homo sapiens; identical to SEQ ID NO: 762
  chr1:117695844-117695875
  hypo

SEQ ID NO: 14893 - DNA, 31 bp, Homo sapiens
  chr1:117715857-117715888
  hypo
cagaaggaataaattccggacacaattgcag

SEQ ID NO: 14894 - DNA, 152 bp, Homo sapiens
  chr1:118147371-118147523
  hypo
tattgatgtcctatcgcattaaagttcctggatactcactctcctctccctcgctgggaaagacatatttgagaactcttcatagtctgacagacaggagaaccacacttatttcaggcagggttggaagagtagggcggaggagatgtaaa

SEQ ID NO: 14895 - DNA, 234 bp, Homo sapiens
  chr1:118163672-118163906
  hypo
cacagtaaacattattcgtcacagattttgcttgggatccataacctaggagtgctttgtaggatgatctagatagcctaggactttttaacgctgttcagaggcacttttgtcttcccctccacgagtactctgtagcgagcaatagagcgctcatccccagattggtcctgcagagcctgctgtgatcacatactcagcccgctgctttctgcctctcggccccaaccaaca

SEQ ID NO: 14896 - DNA, 229 bp, Homo sapiens
  chr1:118166361-118166590
  hypo
accttcaaaaccacttcgctgaagaagagagaagcaagtacgactacctcatgatccttcgcagggtggtgaacgagagcaccgtgtgtctcatggggcatgaacgcaggcagactctgaacctcatctccctcctggccttgcgtgtgctggcggaacaaaacatcatccccagtgccaccaacgtcacctgttactaccagccggccccttacgtcagtgatggcaa

SEQ ID NO: 14897 - DNA, 151 bp, Homo sapiens
  chr1:118172977-118173128
  hypo
tcagccttggaatgaagctcccgtcgttgccacccgggacctctagggttccagaagtacacttctaaacgagcggggattctttttctccttcactgtccgagtagtcgcctgggcgggatagtaatgcgcttggttgtaatctggggtt

SEQ ID NO: 14898 - DNA, 166 bp, Homo sapiens
  chr1:118173734-118173900
  hypo
accttttacttaggaagtttccgaaaatgggaaatgtccctaagggaaaggcatgagaagctggagtcgctgcctttctttcgggtgcttccctggaaaaaaggtatccgaggctatagtgttcgagagagagagagatggagacgggcagcaccacagcaacttt

SEQ ID NO: 14899 - DNA, 30 bp, Homo sapiens; identical to SEQ ID NO: 765
  chr1:119168297-119168327
  hypo

SEQ ID NO: 14900 - DNA, 30 bp, Homo sapiens
  chr1:120166011-120166041
  hypo
cgggtagggcttctcgcccgtgtgcaggcg

SEQ ID NO: 14901 - DNA, 40 bp, Homo sapiens
  chr1:120166426-120166466
  hypo
aggctatccagctccccgaggtccacggccatggggtggt

SEQ ID NO: 14902 - DNA, 293 bp, Homo sapiens; identical to SEQ ID NO: 780
  chr1:120190519-120190812
  hypo

SEQ ID NO: 14903 - DNA, 32 bp, Homo sapiens
  chr1:120321360-120321392
  hypo
atttatttttattttttgagacggagtctcgc

SEQ ID NO: 14904 - DNA, 30 bp, Homo sapiens; identical to SEQ ID NO: 782
  chr1:120336067-120336097
  hypo

SEQ ID NO: 14905 - DNA, 5 bp, Homo sapiens
  chr1:150283343-150283348
  hypo
ctcca

SEQ ID NO: 14906 - DNA, 30 bp, Homo sapiens
  chr1:150445752-150445782
  hypo
tgctaggggccctccgttctttgcaccaaa

SEQ ID NO: 14907 - DNA, 30 bp, Homo sapiens
  chr1:150486246-150486276
  hypo
actaaacagcttgacgtcactttgccatct

SEQ ID NO: 14908 - DNA, 30 bp, Homo sapiens
  chr1:150529746-150529776
  hypo
ggggtctccagctgcgtactggaaacgagt

SEQ ID NO: 14909 - DNA, 88 bp, Homo sapiens
  chr1:150579403-150579491
  hypo
ttttgtaaaatagggccgggcgccgtggctcaaccctgtgggcataagcctttgggaggctgaggcgggcagatcacttgaggtcagg

SEQ ID NO: 14910 - DNA, 44 bp, Homo sapiens
  chr1:150581802-150581846
  hypo
tgggattacaggcgtgagtcaacgtgcctggatgtaacagttct

SEQ ID NO: 14911 - DNA, 57 bp, Homo sapiens
  chr1:150633719-150633776
  hypo
taataaatgttatgtatattttaccacagtaagaatgttactcgttgatttacatat

SEQ ID NO: 14912 - DNA, 39 bp, Homo sapiens
  chr1:150643982-150644021
  hypo
aaaaaaagaggaaagaagggccgggcgcggtggctcacg

SEQ ID NO: 14913 - DNA, 30 bp, Homo sapiens
  chr1:150940916-150940946
  hypo
gcgttgggaggtgcccgcagccgagttttc

SEQ ID NO: 14914 - DNA, 403 bp, Homo sapiens
  chr1:150941387-150941790
  hypo
gcttacagctcaaagaagtatcgaacgatgaggaagagcaaggccaggggcagcgtgatatagagatctgaggctttggcgtagacacgtccatctcggtcttctagatcggcccaggtcaagttcacaggcagccacagacgttcccaccagaagtaatcatacaaggtctggagcatcctgagtgaggggcaaaggggagggcatcaagagggagtagctatggaggaagagatagatgaataaaagttttcaggatgtatcaaaaggagaagggggcagagagtcgaactctagatccctatcctggctatgtagccttgggcaaatcagtttcctcatctgtaatacggtggctttccagttttaacatttactgttaggccggccgtgatggctcatg

SEQ ID NO: 14915 - DNA, 30 bp, Homo sapiens
  chr1:150959365-150959395
  hypo
tctcctctcatgagcgtttgggggcagaaa

SEQ ID NO: 14916 - DNA, 38 bp, Homo sapiens
  chr1:151019714-151019752
  hypo
tgtgagccaccgcgctcggccagagctctgggttttaa

SEQ ID NO: 14917 - DNA, 27 bp, Homo sapiens
  chr1:151056645-151056672
  hypo
cctaaatgctgcaattgcaggcgtgag

SEQ ID NO: 14918 - DNA, 26 bp, Homo sapiens
  chr1:151098356-151098382
  hypo
gcgtgagccaccgagcccggccaaat

SEQ ID NO: 14919 - DNA, 30 bp, Homo sapiens
  chr1:151148216-151148246
  hypo
tatgtgagacacatcgacaatgtaaactat

SEQ ID NO: 14920 - DNA, 14 bp, Homo sapiens
  chr1:151170057-151170071
  hypo
aaacctgttttaat

SEQ ID NO: 14921 - DNA, 124 bp, Homo sapiens
  chr1:151252684-151252808
  hypo
gaaactctccgggtgcgccggggagtcctggttccggtgtcctgggactcctgggcagggtaacgaaaccacttttaaaaactttgccgggcccggtgggtcacatctgtaatcccagcacttt

SEQ ID NO: 14922 - DNA, 58 bp, Homo sapiens
  chr1:151338904-151338962
  hypo
acatataagtggctcccgtacagtcctggggtgggagtggggccggaggataggctca

SEQ ID NO: 14923 - DNA, 170 bp, Homo sapiens
  chr1:151339196-151339366
  hypo
ccagcctccacatcagcggggttgaagccatctcgtaagacattgggagctgcccactcagtgctgatcatgacattgtgtcgaggctggtaccagaagtcatagcccaacggtgcagcacccccaggtctctcccatgtccccttcacctcgaacgtctccccatccag

SEQ ID NO: 14924 - DNA, 9 bp, Homo sapiens
  chr1:151346994-151347003
  hypo
tcctgcctc

SEQ ID NO: 14925 - DNA, 12 bp, Homo sapiens
  chr1:151362759-151362771
  hypo
ccggccgctttc

SEQ ID NO: 14926 - DNA, 90 bp, Homo sapiens
  chr1:151378318-151378408
  hypo
ccccccttccaaagaacgtcctattttggtggccttctggaacaaggtctcctcatttacaggtagctgttgttcgcgctgggttagcac

SEQ ID NO: 14927 - DNA, 226 bp, Homo sapiens
  chr1:151481570-151481796
  hypo
gcttccttgaagaacagatgacgaaggcggtgactcagaggctcccacttatccttgtaattcgtgttcatggtgctgggtaaccacccaaattggtatttactacaaatatactaagtatcctaattgctaaggtgttatctaggggagtttaggcgcttccgcctttccaatatctgagtcaatttaatatcccacattaaaaaaaaaaatctccttacaaaca

SEQ ID NO: 14928 - DNA, 30 bp, Homo sapiens
  chr1:151557470-151557500
  hypo
ctcagacatgcagccgtcatcaacagcgtc

SEQ ID NO: 14929 - DNA, 105 bp, Homo sapiens
  chr1:151597622-151597727
  hypo
caaactttattgttattaatacgcgcttttgcccagtgttaaatttttggacgtaggtgctttaaaaatactggtgtaggccaggcgctgtggctgacgcctgta

SEQ ID NO: 14930 - DNA, 662 bp, Homo sapiens; identical to SEQ ID NO: 799
  chr1:151693823-151694485
  hypo

SEQ ID NO: 14931 - DNA, 197 bp, Homo sapiens
  chr1:151699288-151699485
  hypo
ggccaataaccatctgcggtccatcttttagctctgtttattgtatctccctctgccccttgaattcatggttaagcttactcaggacattgtggggctgcatatctcccaccattcgtgggccggccggcatgttcttcatctttgcctcttgcccctggcttgagatctggttcagtgaaaatgatcgttgaggc

SEQ ID NO: 14932 - DNA, 10 bp, Homo sapiens
  chr1:151826518-151826528
  hypo
tcacaggccg

SEQ ID NO: 14933 - DNA, 30 bp, Homo sapiens
  chr1:151827369-151827399
  hypo
gggagtgaggtgggcgcggcagtgaggctt

SEQ ID NO: 14934 - DNA, 149 bp, Homo sapiens
  chr1:151882271-151882420
  hypo
ccggaacccgcgcgccgactggaggctttgcggtcatccttcccacatgacccagggcgtacgcagtgctccgtgtccccaagtagttatccctcccccggaagactgaagtccctggggcgggtaggagcgcacgctaggagtagtat

SEQ ID NO: 14935 - DNA, 262 bp, Homo sapiens
  chr1:152733096-152733358
  hypo
gttgagattcctcccatcagacgccgctcccagagctgtggcccgcagccctcctggggcgcctcctgccctgagctgaggccacacgtagagccacgtccactcccaagcttctgtccaccacggcgtcttgaccagtgtccagagtcaccactgcagcgatgtccacctcctgctccacgtccacgtctgcgcccagaaccatgcataagtctagaaccacgcccgcgtcctctaccacgacaactttcagaaccttgtt

SEQ ID NO: 14936 - DNA, 33 bp, Homo sapiens
  chr1:153352634-153352667
  hypo
atctggtaacagggccaggtgcggtggctcacg

SEQ ID NO: 14937 - DNA, 31 bp, Homo sapiens
  chr1:153352906-153352937
  hypo
actccgtctcggaaaaaaaaaaaaatctggt

SEQ ID NO: 14938 - DNA, 30 bp, Homo sapiens
  chr1:153537354-153537384
  hypo
tctttttgcagcaacgcccacatgcacacc

SEQ ID NO: 14939 - DNA, 393 bp, Homo sapiens
  chr1:153540022-153540415
  hypo
aagcctggcagtgaggcgctccagactcggcctgctgctgcgtgtcccttaaacacaccggcacatgcaactagtgtggccaagaccctcggcttgcgctgacccctctgttcagaacgtgcccacacatgcccatgccctctatcctgctgaaatccaacccccccttcaaaggccactgcagggagccttcccagggcccaaccggattcagtgtctacctgttctgtcctgtacaaagcgccccttttgcccttttcgtgtgtacttagagaattctgattttgactgaatcacctgtgtacttgttttctctcagcctcacccccacatggtgagctcaccggtcttactcatttctgcatgaggtaagggtctcgcccacaccaggtg

SEQ ID NO: 14940 - DNA, 1390 bp, Homo sapiens; identical to SEQ ID NO: 807
  chr1:153651049-153652439
  hypo

SEQ ID NO: 14941 - DNA, 30 bp, Homo sapiens
  chr1:153662338-153662368
  hypo
cggctacacgcctgcgaggtagcccgcatg

SEQ ID NO: 14942 - DNA, 13 bp, Homo sapiens
  chr1:153669242-153669255
  hypo
tgcccggcccgac

SEQ ID NO: 14943 - DNA, 30 bp, Homo sapiens
  chr1:153914438-153914468
  hypo
gcacagcgatggcacgccggctgcgcacag

SEQ ID NO: 14944 - DNA, 177 bp, Homo sapiens; identical to SEQ ID NO: 808
  chr1:153936614-153936791
  hypo

SEQ ID NO: 14945 - DNA, 79 bp, Homo sapiens
  chr1:153937069-153937148
  hypo
cacaaggctccagaaacgaagcccagtaattccttaagtaaaagaggaatgtgaagacttcttaaggggccgggcgcgg

SEQ ID NO: 14946 - DNA, 181 bp, Homo sapiens
  chr1:153937387-153937568
  hypo
cctgggcaacaacagcgaaacttcgtctcaaaaaaaaaaattattcgtaattggtaacattaacaaggaattatgactgggggggtcaggaaacctggattctggtccaagttctacctttatagttgtcaaatatatatatttgtttatttatacacatacatatgtcatatatgattaa

SEQ ID NO: 14947 - DNA, 331 bp, Homo sapiens; identical to SEQ ID NO: 810
  chr1:153958646-153958977
  hypo

SEQ ID NO: 14948 - DNA, 27 bp, Homo sapiens
  chr1:153963224-153963251
  hypo
ttccgctttcgctcctttccggcggtg

SEQ ID NO: 14949 - DNA, 33 bp, Homo sapiens
  chr1:154115065-154115098
  hypo
gtatctaagaaaagttcggaggccagtgcggtg

SEQ ID NO: 14950 - DNA, 31 bp, Homo sapiens
  chr1:154116695-154116726
  hypo
aaaataaagttgtagtcgtattaaaggatta

SEQ ID NO: 14951 - DNA, 166 bp, Homo sapiens
  chr1:154179782-154179948
  hypo
ctctaagaactctggatacaacgggaacttggatggatacagtctgggcctgctgggccagatgttccgagggcggcccggcaagcagcctgtcttgcacattgcaactgactggcttaatctacggcaagagtccttcagctccgtcacagagtactctccaatg

SEQ ID NO: 14952 - DNA, 32 bp, Homo sapiens
  chr1:154243764-154243796
  hypo
tgaaggcaacatgtatcgtctggcagaactaa

SEQ ID NO: 14953 - DNA, 31 bp, Homo sapiens
  chr1:154243915-154243946
  hypo
acctgtaccccaaaaacgaaataaaaaaaca

SEQ ID NO: 14954 - DNA, 70 bp, Homo sapiens; identical to SEQ ID NO: 813
  chr1:154297821-154297891
  hypo

SEQ ID NO: 14955 - DNA, 54 bp, Homo sapiens; identical to SEQ ID NO: 814
  chr1:154298305-154298359
  hypo

SEQ ID NO: 14956 - DNA, 3 bp, Homo sapiens
  chr1:154343719-154343722
  hypo
aaa

SEQ ID NO: 14957 - DNA, 184 bp, Homo sapiens
  chr1:154402828-154403012
  hypo
gactagctccagggctggggccgaggggcccagccacgtgctcccctcaagggaggctgccctgtctgcgaggtcagtgcgccccaggatccccgcccgcctgctgacacctgcaatgctttcctttcagttccccccgaggagccccagctctcctgcttccggaagagccccctcagcaatg

SEQ ID NO: 14958 - DNA, 34 bp, Homo sapiens; identical to SEQ ID NO: 815
  chr1:154474743-154474777
  hypo

SEQ ID NO: 14959 - DNA, 80 bp, Homo sapiens; identical to SEQ ID NO: 816
  chr1:154474987-154475067
  hypo

SEQ ID NO: 14960 - DNA, 67 bp, Homo sapiens; identical to SEQ ID NO: 817
  chr1:154475371-154475438
  hypo

SEQ ID NO: 14961 - DNA, 30 bp, Homo sapiens
  chr1:154680598-154680628
  hypo
ctggcgcagggtgtcggcgatgagcagcgg

SEQ ID NO: 14962 - DNA, 30 bp, Homo sapiens
  chr1:154744743-154744773
  hypo
gaagaacttgtactcgccaggaatggggtg

SEQ ID NO: 14963 - DNA, 31 bp, Homo sapiens; identical to SEQ ID NO: 818
  chr1:154816590-154816621
  hypo

SEQ ID NO: 14964 - DNA, 242 bp, Homo sapiens
  chr1:154931247-154931489
  hypo
accagcgtcacccatcgttagcagccaccagctgccccatgccctcacggatgtagacagactggatctccttggtcttgaggcagagatcgcaggcccagacggcagaagcttcagtggtcagcagcccataggcgctctcagtcatgcctgtgcactcacggtggaaccatttctggcaggaggcctcacacagaatggcatcctggtcatcgttcacctcactccgacaggcaccacat

SEQ ID NO: 14965 - DNA, 47 bp, Homo sapiens
  chr1:154954397-154954444
  hypo
gattacaggcgtgagtcaccgcgcccggcctttttttctttttttca

SEQ ID NO: 14966 - DNA, 37 bp, Homo sapiens
  chr1:154987688-154987725
  hypo
cccctcccaccacctccgccaccgccacctcggcctg

SEQ ID NO: 14967 - DNA, 31 bp, Homo sapiens
  chr1:155013028-155013059
  hypo
cagatcaacaacacccgcgcagcttggcgca

SEQ ID NO: 14968 - DNA, 38 bp, Homo sapiens
  chr1:155082408-155082446
  hypo
aagtgtaggccaggcacggtggctcacgcctgtaatca

SEQ ID NO: 14969 - DNA, 291 bp, Homo sapiens; identical to SEQ ID NO: 826
  chr1:155099567-155099858
  hypo

SEQ ID NO: 14970 - DNA, 30 bp, Homo sapiens
  chr1:155149479-155149509
  hypo
ctctgccgggtgcggcgcacccacagcggg

SEQ ID NO: 14971 - DNA, 123 bp, Homo sapiens
  chr1:155149964-155150087
  hypo
gctatagctcaggagagtgctcgaaaaaccccatgcatagctcaaaaaaccccacgcgtagctcagatgctctcaggctcaggtgcctaccgaggatgtcacgcattcccagtgctagagtga

SEQ ID NO: 14972 - DNA, 138 bp, Homo sapiens
  chr1:155160919-155161057
  hypo
tggtagccctggcagaggtgccgttgtgcaccagagtagaagctgagcctgatgcagagcctgaggccgaggtgacattgtggactggaggggcggtggagcccaaggcgggcctgttgtccggggccgaggtgacac

SEQ ID NO: 14973 - DNA, 6 bp, Homo sapiens
  chr1:155162034-155162040
  hypo
ccacct

SEQ ID NO: 14974 - DNA, 717 bp, Homo sapiens; identical to SEQ ID NO: 829
  chr1:155164257-155164974
  hypo

SEQ ID NO: 14975 - DNA, 30 bp, Homo sapiens
  chr1:155317637-155317667
  hypo
aggcctttcgtagacgacaaacatctctcc

SEQ ID NO: 14976 - DNA, 184 bp, Homo sapiens
  chr1:155403642-155403826
  hypo
aaccctcttgcaggctcgaaagagaaagcgaaccagtatcgagaaccgagtgagaggcaacctggagaatttgttcctgcagtgcccgaaacccacactgcagcagatcagccacatcgcccagcagcttgggctcgagaaggatgtggtccgagtgtggttctgtaaccggtgccagaaaggc

SEQ ID NO: 14977 - DNA, 83 bp, Homo sapiens
  chr1:155466711-155466794
  hypo
caggtgtaagccaccccacccagccaattattagattttctattcggcgtcagtgattttccgtctgccagtccaccacaacc

SEQ ID NO: 14978 - DNA, 28 bp, Homo sapiens
  chr1:155489764-155489792
  hypo
accagtcgctgcagacagaagaaatgga

SEQ ID NO: 14979 - DNA, 243 bp, Homo sapiens; identical to SEQ ID NO: 833
  chr1:155830249-155830492
  hypo

SEQ ID NO: 14980 - DNA, 14 bp, Homo sapiens
  chr1:155893808-155893822
  hypo
taagatttgctttt

SEQ ID NO: 14981 - DNA, 33 bp, Homo sapiens
  chr1:156010522-156010555
  hypo
gtgagccaccgcgcccagccagtccacagaatt

SEQ ID NO: 14982 - DNA, 30 bp, Homo sapiens
  chr1:156030822-156030852
  hypo
tggagctgcttctcccgcttgcgggagccc

SEQ ID NO: 14983 - DNA, 37 bp, Homo sapiens
  chr1:156032531-156032568
  hypo
ccctgccacttacaagtattgcgggttggtcagccgg

SEQ ID NO: 14984 - DNA, 236 bp, Homo sapiens
  chr1:156047206-156047442
  hypo
ggcccaccaccagccccaccacgcggtagggcacccgcacacggatggtcacctggccgggcagagcaggagccacaccaaaggcggcgcctgacttgttgcgggaggcacggatcatggagaagtgctccgctgctgagatgatttcccgccgggctgtggccacgtcctcccgtcgccctgtcaccatgaacactggttcctcgcccctcaccggtgtcttgatgtaggtgttg

SEQ ID NO: 14985 - DNA, 30 bp, Homo sapiens
  chr1:156081253-156081283
  hypo
aaaaattctcaaaccgtccgttggacccaa

SEQ ID NO: 14986 - DNA, 30 bp, Homo sapiens; identical to SEQ ID NO: 838
  chr1:156084256-156084286
  hypo

SEQ ID NO: 14987 - DNA, 31 bp, Homo sapiens
  chr1:156085875-156085906
  hypo
tatgcccaggtctggccgcactcctcccttg

SEQ ID NO: 14988 - DNA, 98 bp, Homo sapiens
  chr1:156143322-156143420
  hypo
aagtggcaggtaaagttgtggcgggagcaggcggccagagtccaggacacatgtcgagctgggcagctgtgggtggcgggggggacagcacctgagct

SEQ ID NO: 14989 - DNA, 197 bp, Homo sapiens
  chr1:156179132-156179329
  hypo
gttagggaagcagagacggtcacatgagagagtattggagaggaagaagggagtgcggaggagggtgctgaaggaggtagggcggaagcgggggatgttcttagccatggctgggataccttgtgaaggtcatatcatataaagggaggtatgaacaaggagtgagtctgtcctgtattggccgaggggctgaggag

SEQ ID NO: 14990 - DNA, 30 bp, Homo sapiens
  chr1:156232286-156232316
  hypo
aaaggagaaagcagcgaaaccacaaggact

SEQ ID NO: 14991 - DNA, 31 bp, Homo sapiens
  chr1:156239868-156239899
  hypo
tcatgacattttgtgtcgtttcttaaaaaca

SEQ ID NO: 14992 - DNA, 30 bp, Homo sapiens
  chr1:156254134-156254164
  hypo
gggcagctccttcccggacggacggatgga

SEQ ID NO: 14993 - DNA, 350 bp, Homo sapiens
  chr1:156255349-156255699
  hypo
ggagctgcccgaagacgatgccaacctgctgcctgagaaagcggcccgtgccttcgtgcctattgacctacagtgcattgagcggcagccccaagaagaccttatcgtgcgctgtgaggcaggcgagggcgagtgccgaaccttcatgcccccccgggtcacccaccccgaccccactgagcgcaagtgggctgaggcagtggtgaggccgcctggctgttcctgtgggggctgcgggagctgtggagaccgtgagtggctaagggctgtggcctccgtgggagccgcactcattctcttcccttgcctactatacggggcatatgccttcctgccgtttgatgtcccac

SEQ ID NO: 14994 - DNA, 30 bp, Homo sapiens
  chr1:156256100-156256130
  hypo
tttggggagccacggcgggaggtggagatc

SEQ ID NO: 14995 - DNA, 85 bp, Homo sapiens
  chr1:156276622-156276707
  hypo
gaggtaccaataatagtaaggaagactatgacactacccaagtgcttaactattagagctgaaaacaaaacgaacctagactgag

SEQ ID NO: 14996 - DNA, 534 bp, Homo sapiens; identical to SEQ ID NO: 840
  chr1:156357993-156358527
  hypo

SEQ ID NO: 14997 - DNA, 105 bp, Homo sapiens
  chr1:156362432-156362537
  hypo
cccacctcccccacatcggacccagagtccaggcggctggagaggtgggggaagggccaggagtgccccagctgggggcttgggcttctccgccactgacaccag

SEQ ID NO: 14998 - DNA, 801 bp, Homo sapiens; identical to SEQ ID NO: 841
  chr1:156390086-156390887
  hypo

SEQ ID NO: 14999 - DNA, 64 bp, Homo sapiens; identical to SEQ ID NO: 842
  chr1:156391151-156391215
  hypo

SEQ ID NO: 15000 - DNA, 359 bp, Homo sapiens; identical to SEQ ID NO: 843
  chr1:156391242-156391601
  hypo

SEQ ID NO: 15001 - DNA, 30 bp, Homo sapiens; identical to SEQ ID NO: 844
  chr1:156406334-156406364
  hypo

SEQ ID NO: 15002 - DNA, 224 bp, Homo sapiens
  chr1:156432118-156432342
  hypo
ccatgcttcatggattttaggcgttcataggcctgtctctgccatcgtatatggcccctcacactccgcgttcgcctctgcagcacctgggctaggtacagagaagcagccacaccctgttcggaggaagccaagccggatctgctttcctccacagccgctccatctgccccagggcacggctgtgccaggtatgagggaggaggcagggttttttttttttt

SEQ ID NO: 15003 - DNA, 6 bp, Homo sapiens
  chr1:156432941-156432947
  hypo
aggcaa

SEQ ID NO: 15004 - DNA, 38 bp, Homo sapiens
  chr1:156441192-156441230
  hypo
ttacaggtgtgagccaccgcgcccggccagaatcaact

SEQ ID NO: 15005 - DNA, 213 bp, Homo sapiens
  chr1:156553585-156553798
  hypo
cagaaggagccagattctgtgcgagaacggctggtggccaagctggcagacaccgtgaggacgcgcttggcccaggtggggctggtccagactcacaccctggtgagatgacacctgagacaaggagatgggggtggagagaggttacccagagaaggggttggtggtaagcagagacgctgttccctgggatgctgcgcgcttggccgctca

SEQ ID NO: 15006 - DNA, 1435 bp, Homo sapiens; identical to SEQ ID NO: 848
  chr1:156593617-156595052
  hypo

SEQ ID NO: 15007 - DNA, 103 bp, Homo sapiens; identical to SEQ ID NO: 849
  chr1:156595080-156595183
  hypo

SEQ ID NO: 15008 - DNA, 40 bp, Homo sapiens
  chr1:156664564-156664604
  hypo
aggtgagatgggaggcggtgatgcagaaaggaggagagga

SEQ ID NO: 15009 - DNA, 30 bp, Homo sapiens; identical to SEQ ID NO: 855
  chr1:156676041-156676071
  hypo

SEQ ID NO: 15010 - DNA, 272 bp, Homo sapiens; identical to SEQ ID NO: 856
  chr1:156676359-156676631
  hypo

SEQ ID NO: 15011 - DNA, 31 bp, Homo sapiens
  chr1:156716807-156716838
  hypo
acctccccgcttgccccgtggcctctgggga

SEQ ID NO: 15012 - DNA, 130 bp, Homo sapiens
  chr1:156754045-156754175
  hypo
ttgtatttatagtagatgaaaaaggagtcatgcaagatgttggcgtgctgagactgagcaaaggcagtcctgttaccaggatagcttcctggaggaggtagactggctcagaaggcgcccccactgtaag

SEQ ID NO: 15013 - DNA, 240 bp, Homo sapiens; identical to SEQ ID NO: 862
  chr1:156897315-156897555
  hypo

SEQ ID NO: 15014 - DNA, 30 bp, Homo sapiens
  chr1:156905969-156905999
  hypo
aaaccccagtttctcgtagggcttgaaaag

SEQ ID NO: 15015 - DNA, 30 bp, Homo sapiens
  chr1:157039340-157039370
  hypo
ttccagcagcaatacgtaaagtgggatgga

SEQ ID NO: 15016 - DNA, 458 bp, Homo sapiens
  chr1:157895212-157895670
  hypo
atgctccaaggtgacgacaagaaacagggcgtgaggagggtaagaggccctatgggcactgtagtcttgtgatgggggaggtggtggcagcggcagcggtggcagagagctagaggagggtgagaaggtggacgcggggccatgtatcccgagctcttcaccagagcccagcacagctctgccggaagcacccctgcagggttagaccagcaggtgcgaggtgcgacgtgggaaagagtccagggccggcggggtgctatgaggcgaggacttcctgagccgaggaccgggtgggttgtgagttgcgaccagcctcgctgacggaccctactacctctttcagttccagtgtcgcgtcttctcctcagcttcattgctcctggcgccctggccttcattggccatgtggtggagcttcactgcgaagacaggagagcgtctgcacccattctgttttg

SEQ ID NO: 15017 - DNA, 506 bp, Homo sapiens; identical to SEQ ID NO: 867
  chr1:158150550-158151056
  hypo

SEQ ID NO: 15018 - DNA, 154 bp, Homo sapiens
  chr1:158237093-158237247
  hypo
tccttcatggctccttcatcccggtggtgcagaacgtgtgtgccaggtgcctgcggccgctgcacgtaagagccctggtgaagctaggctgcctggccactgccgctcctcccgcctgagctgctgagaccccgacaccatgtgttaaaagaac

SEQ ID NO: 15019 - DNA, 246 bp, Homo sapiens
  chr1:158669636-158669882
  hypo
aaagagtaggtggcagagaagcgtaggtacatgagagtcacactgccaaagaagagcgaaaagacaatgaagtgagagacacacgtggaaaatgctgtgcggcggcctccagctgaatgaatacgtagaattacagccacaataccatcgtaggacatgaagatgagcatcacagctgtaataatctccactgcatgaatgacatccactacctgaatcatgacgatggctcgtgtgtctgtgcag

SEQ ID NO: 15020 - DNA, 115 bp, Homo sapiens
  chr1:158710950-158711065
  hypo
tcaacagcataaatcaaaacacgtacggtgggtttatgtgcagatttgttacacggggattttgcgtgaagctgaggtttggagtacggatctcgtcactcaggtagtgagcata

SEQ ID NO: 15021 - DNA, 30 bp, Homo sapiens
  chr1:158736097-158736127
  hypo
ggctaaatacctatcgtaggccatagctgt

SEQ ID NO: 15022 - DNA, 34 bp, Homo sapiens
  chr1:158753869-158753903
  hypo
tgggcgacggagcgagactccctctaaaaaacaa

SEQ ID NO: 15023 - DNA, 29 bp, Homo sapiens
  chr1:158815317-158815346
  hypo
ccgcgcccggcctcctgctcaaagtttta

SEQ ID NO: 15024 - DNA, 23 bp, Homo sapiens
  chr1:158855869-158855892
  hypo
ggagtaaaagaataatgtagccg

SEQ ID NO: 15025 - DNA, 60 bp, Homo sapiens; identical to SEQ ID NO: 868
  chr1:159141702-159141762
  hypo

SEQ ID NO: 15026 - DNA, 40 bp, Homo sapiens
  chr1:159202103-159202143
  hypo
tgagccaccgcgcccagccgacatggtcttgtgtttacaa

SEQ ID NO: 15027 - DNA, 46 bp, Homo sapiens
  chr1:159229595-159229641
  hypo
attacaggcatgagccactgcgcccggccagatacttgtttttaat

SEQ ID NO: 15028 - DNA, 30 bp, Homo sapiens; identical to SEQ ID NO: 869
  chr1:159824902-159824932
  hypo

SEQ ID NO: 15029 - DNA, 132 bp, Homo sapiens
  chr1:159842757-159842889
  hypo
ttgatctcatcgatgcgctcacggcgtttctgggcctcctctttgaggcgccggccctcctcaaaggtggcaatccggttctgcacttccttctgctggttctcgcgcacctggcgccggagctcattggca

SEQ ID NO: 15030 - DNA, 102 bp, Homo sapiens
  chr1:159931576-159931678
  hypo
atgaggctacaaagacggactgcaggccgctcactgggggcgtatagacctgctgagtttataagttatgcactcaagaagtttacctttggccgggcgtgg

SEQ ID NO: 15031 - DNA, 14 bp, Homo sapiens
  chr1:159932144-159932158
  hypo
acctttggcccggg

SEQ ID NO: 15032 - DNA, 4 bp, Homo sapiens
  chr1:159932217-159932221
  hypo
tgaa

SEQ ID NO: 15033 - DNA, 23 bp, Homo sapiens
  chr1:160012719-160012742
  hypo
ccgtctcaaaaaaaaaaaaaagt

SEQ ID NO: 15034 - DNA, 30 bp, Homo sapiens
  chr1:160058299-160058329
  hypo
ggaagcaggcagagcggggaggtgcctgag

SEQ ID NO: 15035 - DNA, 61 bp, Homo sapiens
  chr1:160063719-160063780
  hypo
cacggccaagtctgaccggattcccaccacttcctgcagagttgaccgcccaactggtgcc

SEQ ID NO: 15036 - DNA, 30 bp, Homo sapiens; identical to SEQ ID NO: 877
  chr1:160093911-160093941
  hypo

SEQ ID NO: 15037 - DNA, 31 bp, Homo sapiens; identical to SEQ ID NO: 878
  chr1:160175619-160175650
  hypo

SEQ ID NO: 15038 - DNA, 25 bp, Homo sapiens
  chr1:160214686-160214711
  hypo
ccacgcccagcccaactaacttcaa

SEQ ID NO: 15039 - DNA, 148 bp, Homo sapiens
  chr1:160293180-160293328
  hypo
agtttcttagatatggcgataatgtaaccggttcactcaccattcatgcgccagatcttcacttgacgatcatctgccccagatacaataaggggcatagtggggtggaaggcagcccagtttactccacgatcgtgaccctgtagaa

SEQ ID NO: 15040 - DNA, 185 bp, Homo sapiens; identical to SEQ ID NO: 879
  chr1:160370193-160370378
  hypo

SEQ ID NO: 15041 - DNA, 189 bp, Homo sapiens; identical to SEQ ID NO: 881
  chr1:160526914-160527103
  hypo

SEQ ID NO: 15042 - DNA, 52 bp, Homo sapiens
  chr1:160693909-160693961
  hypo
taggtcctgtcctcctgaaaacgggtcaggactggccaggcgcagtggctca

SEQ ID NO: 15043 - DNA, 30 bp, Homo sapiens
  chr1:160771681-160771711
  hypo
cacgtgtgagcgtgcgggagggctaggccc

SEQ ID NO: 15044 - DNA, 30 bp, Homo sapiens
  chr1:160772122-160772152
  hypo
cgcgggaggccatccgggcctgctggctgc

SEQ ID NO: 15045 - DNA, 30 bp, Homo sapiens
  chr1:160924873-160924903
  hypo
tatctaatcagattcgtggataggtcacaa

SEQ ID NO: 15046 - DNA, 30 bp, Homo sapiens; identical to SEQ ID NO: 882
  chr1:160948028-160948058
  hypo

SEQ ID NO: 15047 - DNA, 24 bp, Homo sapiens
  chr1:160992337-160992361
  hypo
ttaatagtcttggccgggtgcgtg

SEQ ID NO: 15048 - DNA, 30 bp, Homo sapiens
  chr1:161004656-161004686
  hypo
ggatacctcaatggcgagtttgtggggggc

SEQ ID NO: 15049 - DNA, 13 bp, Homo sapiens
  chr1:161122835-161122848
  hypo
gtctccaaaaaaa

SEQ ID NO: 15050 - DNA, 183 bp, Homo sapiens
  chr1:161145674-161145857
  hypo
ctgaggttactgtagacatcacgagggtgagaatagtcaaatgtcggtccctgatctcggccaaatagggcactgagacttcggaagccccccagtgacaggtacatcatgacagccagctgggagcccacaagcagggccagcgtgcaaggccgctccagcagcctccgcaacatcctgggg

SEQ ID NO: 15051 - DNA, 241 bp, Homo sapiens
  chr1:161367366-161367607
  hypo
tcatagctatgttaaggcttagctgacatacaataaactgaacatacttaaaatgtacaagttttgacacgtgtatacacctgggaaattatcaccgcaattcgggtctgatttacacgttaggcacagttcatagggcctactttttttttttttttgagacagattctctctgttgcccagtctggatctccgctcactacaaccttcgcctctcaggctcaagcgagtctcaagcctc

SEQ ID NO: 15052 - DNA, 126 bp, Homo sapiens
  chr1:161367786-161367912
  hypo
ggccaaaaaatgttttattttaaattcaaaatgctgtaatggaggctgggtgcagtggctttttttactcagcatacttgagattcatgttgttgtatatgtgagcagttccgtcctttttttggc

SEQ ID NO: 15053 - DNA, 698 bp, Homo sapiens; identical to SEQ ID NO: 891
  chr1:161369560-161370258
  hypo

SEQ ID NO: 15054 - DNA, 40 bp, Homo sapiens; identical to SEQ ID NO: 892
  chr1:161410664-161410704
  hypo

SEQ ID NO: 15055 - DNA, 197 bp, Homo sapiens
  chr1:161450370-161450567
  hypo
tggtagaattcttgcctgccacgcaggaggcccaggtttgattcctggcccatgcagcacgccctcccattttggtgctgcagcagcaccaaggcgtagctgcgttcgcctctgccgcctccttacactcggggcacgtgagcttgtcctgcactggctgcgctcccacgcatgacgcccctctgccctttcttcca

SEQ ID NO: 15056 - DNA, 31 bp, Homo sapiens
  chr1:161466295-161466326
  hypo
ttttcttttttttttttgagacggagtctcg

SEQ ID NO: 15057 - DNA, 31 bp, Homo sapiens
  chr1:161466385-161466416
  hypo
ccgggttcacgactctcaggtattcttgata

SEQ ID NO: 15058 - DNA, 30 bp, Homo sapiens; identical to SEQ ID NO: 895
  chr1:161601157-161601187
  hypo

SEQ ID NO: 15059 - DNA, 24 bp, Homo sapiens
  chr1:161662015-161662039
  hypo
ttttgttttgtttttttgagacgg

SEQ ID NO: 15060 - DNA, 243 bp, Homo sapiens
  chr1:161953578-161953821
  hypo
cagcagcctggggacgatctgtgtgttggtgtgggtgtcgaaagcgtaggagatgttggcattccgctggttgtagctatccacggcatacagcaccccacagatgacgaagcagttgccgtagaaattcctccggagccccgtgcgccatgtggtctccttctgtgtgctcaggtccgcggcattgagcttgctcaggacaatgacctcctggctgaagccctcatcgtccagggccgggta

SEQ ID NO: 15061 - DNA, 782 bp, Homo sapiens; identical to SEQ ID NO: 898
  chr1:162039283-162040065
  hypo

SEQ ID NO: 15062 - DNA, 46 bp, Homo sapiens
  chr1:162116824-162116870
  hypo
ttgataaatacaaggccgggcgcggtggctcatgcctgtaatccta

SEQ ID NO: 15063 - DNA, 86 bp, Homo sapiens
  chr1:162335160-162335246
  hypo
cctgtcttctctgccgctgcctcttctctgcaggtacacttgctgaaggaccagttggctgctgaggctgcggcgcggctggaggc

SEQ ID NO: 15064 - DNA, 106 bp, Homo sapiens
  chr1:162343770-162343876
  hypo
gacagcaggctgtgcggggtgacctcagactggacagaaggctgtgactaactttattggcatctctctagagacataagtaggcttcaccgccaatttgcctaag

SEQ ID NO: 15065 - DNA, 30 bp, Homo sapiens
  chr1:162351042-162351072
  hypo
ttcattgggatcctcgtgcttcactggcac

SEQ ID NO: 15066 - DNA, 38 bp, Homo sapiens
  chr1:162426946-162426984
  hypo
cttctgctcttttttttgagacgggagtctcgctctgt

SEQ ID NO: 15067 - DNA, 37 bp, Homo sapiens
  chr1:162427223-162427260
  hypo
caggcgtgagccaccgcgcgcgcggccaggcttctgg

SEQ ID NO: 15068 - DNA, 31 bp, Homo sapiens; identical to SEQ ID NO: 902
  chr1:163378140-163378171
  hypo

SEQ ID NO: 15069 - DNA, 90 bp, Homo sapiens; identical to SEQ ID NO: 903
  chr1:163378350-163378440
  hypo

SEQ ID NO: 15070 - DNA, 46 bp, Homo sapiens
  chr1:163872822-163872868
  hypo
ttcaaaaatgagttggcttggcggggcgctgtagctcacgcctgta

SEQ ID NO: 15071 - DNA, 35 bp, Homo sapiens
  chr1:164518129-164518164
  hypo
gactagaaagtgcctggcatacgggcgcggtggct

SEQ ID NO: 15072 - DNA, 31 bp, Homo sapiens
  chr1:164550440-164550471
  hypo
atatccagcagctccccgaccgccatttttt

SEQ ID NO: 15073 - DNA, 25 bp, Homo sapiens
  chr1:164563531-164563556
  hypo
tacttttctttttttttgagacgga

SEQ ID NO: 15074 - DNA, 28 bp, Homo sapiens
  chr1:164570177-164570205
  hypo
aatagcagacacagggctgggcgcagtg

SEQ ID NO: 15075 - DNA, 31 bp, Homo sapiens
  chr1:164579428-164579459
  hypo
ccaaccacaatctccccgggaaagagatttg

SEQ ID NO: 15076 - DNA, 174 bp, Homo sapiens
  chr1:164604711-164604885
  hypo
cagcttagcccaactgtcactcgacaggcgtttgtcggacaaaatcaacactaatcaacatttattcgtctcttgcccttgggtctgaggcgcgcgcgggctgcgccattctcccgctcgtctcgccacgcttttcaccctccatccagcctcgccatatatcacccttcctcc

SEQ ID NO: 15077 - DNA, 53 bp, Homo sapiens
  chr1:164637939-164637992
  hypo
tgagcttggcactgccaggaccggctcctcgcgccaatgtggcagcagccaca

SEQ ID NO: 15078 - DNA, 26 bp, Homo sapiens
  chr1:164655944-164655970
  hypo
gtgatctttgggaggctgaggcgggc

SEQ ID NO: 15079 - DNA, 25 bp, Homo sapiens
  chr1:164656209-164656234
  hypo
aaacgaaaacaaaaacaaaaccaaa

SEQ ID NO: 15080 - DNA, 23 bp, Homo sapiens
  chr1:164680517-164680540
  hypo
tgaaacagagtcttgctctgtcg

SEQ ID NO: 15081 - DNA, 10 bp, Homo sapiens
  chr1:164730963-164730973
  hypo
gccaccgcgc

SEQ ID NO: 15082 - DNA, 20 bp, Homo sapiens
  chr1:164736212-164736232
  hypo
cctcagcctcccaaagtgct

SEQ ID NO: 15083 - DNA, 132 bp, Homo sapiens
  chr1:164753546-164753678
  hypo
cctcgcccaggcagccggcacccatccagaaaggcaggggcctatcgcccagcacattagctttctccctgccagctggcccagggaggcgcagcgtgccaagtggggaacgtgtgaatgggatccatgccc

SEQ ID NO: 15084 - DNA, 257 bp, Homo sapiens
  chr1:164761762-164762019
  hypo
cccacagacccccagctgatgcggctggacaacatgctgttagcggaaggcgtggcggggcctgagaagggcggagggtcggcggcagcggcggcagcggcggcggcttctggaggggcaggttcagacaactcagtggagcattcagattacagagccaaactctcacagatcagacaaatctaccatacggagctggagaaatacgagcaggtaaccagaaccacctggggctcggcacccaggccctttaggaa

SEQ ID NO: 15085 - DNA, 37 bp, Homo sapiens
  chr1:164765527-164765564
  hypo
agccaccgtgcctggcgctataaggtatttaagagct

SEQ ID NO: 15086 - DNA, 194 bp, Homo sapiens
  chr1:164790952-164791146
  hypo
gtagggcttatcttagctttacggtcacctagtttcttgtttctgtatcggtcatgccatcggcagcattctacccacaaaaaaagtggcgattgggcaggcttcatgcaggcagctggcgtctagggctgtcagacgcaatcagtgtttgcatggcacctgcggccacatgcgttcagctagaggagctgcta

SEQ ID NO: 15087 - DNA, 30 bp, Homo sapiens; identical to SEQ ID NO: 913
  chr1:165325818-165325848
  hypo

SEQ ID NO: 15088 - DNA, 730 bp, Homo sapiens; identical to SEQ ID NO: 918
  chr1:166134160-166134890
  hypo

SEQ ID NO: 15089 - DNA, 706 bp, Homo sapiens; identical to SEQ ID NO: 919
  chr1:166134933-166135639
  hypo

SEQ ID NO: 15090 - DNA, 17 bp, Homo sapiens
  chr1:166579268-166579285
  hypo
tgaagggggccagcccg

SEQ ID NO: 15091 - DNA, 30 bp, Homo sapiens
  chr1:166959015-166959045
  hypo
cgagaatggagggccgctcagggaaaggac

SEQ ID NO: 15092 - DNA, 30 bp, Homo sapiens
  chr1:167042607-167042637
  hypo
taaagtatccttaccgtatgagtgaggagg

SEQ ID NO: 15093 - DNA, 30 bp, Homo sapiens
  chr1:167063943-167063973
  hypo
ggtcttttgcccaccgggaccttcctagtc

SEQ ID NO: 15094 - DNA, 30 bp, Homo sapiens
  chr1:167088543-167088573
  hypo
gctgcgcatggcaccggcgtttacactggc

SEQ ID NO: 15095 - DNA, 280 bp, Homo sapiens
  chr1:167096196-167096476
  hypo
agctcagcaagggggaggactcggccttggctaagaagagacaacggaggctggagctgctggagagaagccggcagacgctggaggagagccagtctatggcaagctgggaggcggacagctccacggccagcgggagcattcccctgtctgcgttctggtctgcagacccctcagtcagcgctgatggggacacgacgtcagtactgagcacccagagccaccgctcccacctgtctcaggctgcaagcaacatagcggggtgttcaacctccaaccc

SEQ ID NO: 15096 - DNA, 238 bp, Homo sapiens; identical to SEQ ID NO: 925
  chr1:167190163-167190401
  hypo

SEQ ID NO: 15097 - DNA, 99 bp, Homo sapiens
  chr1:167221024-167221123
  hypo
tttcataatggataacgtaaaataattcagctcactgtattttttgtttcttcgttatatctttttttttttttttaaacagagcctcactgtgtcgcc

SEQ ID NO: 15098 - DNA, 260 bp, Homo sapiens
  chr1:167393531-167393791
  hypo
gtatcttccctaaggtcaggtcggggaaagaaagacttccagcttcttacctctgcgtgcatgggcacgtgtgcattgctcagtccgcaggaggtctcactccgcaggaaacgctctcctcccgcataagtctgtacttccatcccctcatctgtggtagtagtgaaggctaggtgagtaagcgtgggctgttctacccaccagaagtccaggagctgttgtatacctcatttctaactcgtgaccgagtgacttgcttt

SEQ ID NO: 15099 - DNA, 47 bp, Homo sapiens; identical to SEQ ID NO: 926
  chr1:167423948-167423995
  hypo

SEQ ID NO: 15100 - DNA, 162 bp, Homo sapiens
  chr1:167487338-167487500
  hypo
accctgggcctgcctcggttgctctcttgcttccttcttccttcctctcttatcactcgaaaaatctgtacctggaggagctgtgtattctagcagctggctctgaactgatgcccaactcggctgtgacggagcagatgccagcaccgggccggacccctc

SEQ ID NO: 15101 - DNA, 217 bp, Homo sapiens
  chr1:167524972-167525189
  hypo
acattaagcttggggtcggcggtttcatgaatttattgcccccgctgcccttccctgctccatgtaagggacattccttttgcttcttctaagatggcctgtctcattctctcacgggtgctcctgattctgctattctggaaactggtcaataagctcatagcacctggcctccattctttatgactttaagctttggtcacgtctttttggagca

SEQ ID NO: 15102 - DNA, 597 bp, Homo sapiens; identical to SEQ ID NO: 929
  chr1:167599248-167599845
  hypo

SEQ ID NO: 15103 - DNA, 81 bp, Homo sapiens
  chr1:167823387-167823468
  hypo
tctttagccgagtccagtgagtcccaggcaatgttaagttcgcttacaatctggaatatcggatccaataattcctggctc

SEQ ID NO: 15104 - DNA, 66 bp, Homo sapiens
  chr1:168058061-168058127
  hypo
cctcactccttgcgccggggcaccttccacgtatgcttcagctttcgacatcgcatgctcagagca

SEQ ID NO: 15105 - DNA, 241 bp, Homo sapiens
  chr1:168150754-168150995
  hypo
tccatataactttctgtgacaaattgccgattggtgcaaaagtaattgcggtttttaattgcaaaaccgcaattacttttgcaccaacataatacaatatataattatattatatataaagcagtcagcttcaaactggggcccccatgtaatttacttacagattctctaagcgatggctgtatacatggagagttttaagggaataaaattccatatctacgatctccttatgtattat

SEQ ID NO: 15106 - DNA, 37 bp, Homo sapiens
  chr1:168151294-168151331
  hypo
ccgtcccccaccctccgccaaaaaaaaaaaaatgcct

SEQ ID NO: 15107 - DNA, 33 bp, Homo sapiens
  chr1:168151563-168151596
  hypo
agaaatagggcattttcaggccgggcgcggtga

SEQ ID NO: 15108 - DNA, 27 bp, Homo sapiens
  chr1:168847750-168847777
  hypo
tggatttggccaggcacggtggttcat

SEQ ID NO: 15109 - DNA, 191 bp, Homo sapiens; identical to SEQ ID NO: 934
  chr1:169076134-169076325
  hypo

SEQ ID NO: 15110 - DNA, 29 bp, Homo sapiens
  chr1:169457177-169457206
  hypo
gagtactcgtctcaaaaaacaaaacaaca

SEQ ID NO: 15111 - DNA, 30 bp, Homo sapiens
  chr1:169838085-169838115
  hypo
tagtaaggtgcagagcgctggccgacattt

SEQ ID NO: 15112 - DNA, 31 bp, Homo sapiens
  chr1:170521417-170521448
  hypo
aggccatttcagcctgcggaggagagtgtga

SEQ ID NO: 15113 - DNA, 277 bp, Homo sapiens
  chr1:171554920-171555197
  hypo
tagaagaatggagatacggttgagggttgagtgtctcttaccgaaatgcttgggaccagaaatgtctcggatttcagattggtttttttttgtgtgtttgcgtatacataatgaggtgtcttggggcgaggggcctgtctaaacatgaaattcctttgtttcatacatactttatacatataacctgaaggtaattttaagcaacattttaaataactttgtgcatgaaacagaagttctgacctcacttcgactgatccgtcgcaggaggtcaggt

SEQ ID NO: 15114 - DNA, 30 bp, Homo sapiens
  chr1:171640208-171640238
  hypo
accgtggctctgctcgctgtgcagcagcct

SEQ ID NO: 15115 - DNA, 83 bp, Homo sapiens
  chr1:171707341-171707424
  hypo
gctcaagctattctgcttcagcgtcccaagtgcggcgattgcaggcatgagcaaccacgcccggatggtttttcttctattat

SEQ ID NO: 15116 - DNA, 202 bp, Homo sapiens; identical to SEQ ID NO: 950
  chr1:171810194-171810396
  hypo

SEQ ID NO: 15117 - DNA, 773 bp, Homo sapiens; identical to SEQ ID NO: 951
  chr1:171810513-171811286
  hypo

SEQ ID NO: 15118 - DNA, 238 bp, Homo sapiens; identical to SEQ ID NO: 952
  chr1:171811320-171811558
  hypo

SEQ ID NO: 15119 - DNA, 18 bp, Homo sapiens
  chr1:172448841-172448859
  hypo
cttttttaaaaactgcac

SEQ ID NO: 15120 - DNA, 78 bp, Homo sapiens
  chr1:172449158-172449236
  hypo
aaaactgcacccatgagtgttacctgaaacccctctgctcactctacactggcttttctccccgccctcagcatatcc

SEQ ID NO: 15121 - DNA, 17 bp, Homo sapiens
  chr1:172902935-172902952
  hypo
ctctatctcaaaaaaaa

SEQ ID NO: 15122 - DNA, 36 bp, Homo sapiens
  chr1:173714248-173714284
  hypo
ttgtatctcttgggaacgttttatggttttattcat

SEQ ID NO: 15123 - DNA, 37 bp, Homo sapiens
  chr1:173795056-173795093
  hypo
tgccttaaaaaaatccttcttcggccgggcgcggtgg

SEQ ID NO: 15124 - DNA, 31 bp, Homo sapiens; identical to SEQ ID NO: 957
  chr1:173991621-173991652
  hypo

SEQ ID NO: 15125 - DNA, 80 bp, Homo sapiens
  chr1:174166675-174166755
  hypo
cttgattctctgtttcttaagcgtagcacaatacgtctgatctcttgtttttaaaatatctgttatgcctggacaacatg

SEQ ID NO: 15126 - DNA, 20 bp, Homo sapiens
  chr1:174166934-174166954
  hypo
tctaaaaaaaaaaaatctgt

SEQ ID NO: 15127 - DNA, 30 bp, Homo sapiens; identical to SEQ ID NO: 959
  chr1:175091630-175091660
  hypo

SEQ ID NO: 15128 - DNA, 30 bp, Homo sapiens
  chr1:175355197-175355227
  hypo
tctcgttggtccctcggacggcactgactg

SEQ ID NO: 15129 - DNA, 260 bp, Homo sapiens
  chr1:175365709-175365969
  hypo
tgaggatgttgctaatgacagcgtagacgctgatgttgtaggtgagacctggctccagctccgtgatggtgacaccactccaatctccaggcacccgctgctggagctggaggccccccagggccgtcggctggtaagagatcacatattccgtcactgccatcggcccgtcccattccagctcaatggacctgtcgctgataccagccactcgcaagtcctctggaggggcaactaccgggaggcaatacacagatagc

SEQ ID NO: 15130 - DNA, 445 bp, Homo sapiens
  chr1:175372293-175372738
  hypo
cctggtagccctcttcacagacgcagagcccctcctcacattgtcctcgcccactgcaggcattcagacactgccgctggccgcagtcctcaccaacgtagccctcctcgcataaacaggtaccgttggcacatctccccttccccgaacagtccccagggcacctcagttccctgcagtcctcgccagtgtagggctcttcacagacacactccccgtccacgcagagcccccgggagctgcagtctgttgggcaccggagttcggaacagtcatccccgctgtactcgctgtcacagatgcactggccatccacacacaccccccggctggagcaacccagcgggcagtagggctccgagcaattcttgccaaaccagccttcgttgcagatgcagccacaggactcaaagctaaagttgccgtggccactgcagtgagggat

SEQ ID NO: 15131 - DNA, 334 bp, Homo sapiens
  chr1:175375119-175375453
  hypo
aaatccctgaactgaatccctcggggaagaactgcatttagatcttagagacatattaaccggcagctacagactaggacacttttttcctttgaccgtgtgaagagatgccggggttttgctgggagtgcgttttcgctggaagtgcattggtccttcttgttcactctccctctctgctcagccctctccttcccctcctgagaccacgctgcgagctcccggactctacctgtggcagcactttcttggcagcagttggcgttgcactggtctcgcagcaccgacacctccctctccagcatctcgatccggctcagcagctcctgcagca

SEQ ID NO: 15132 - DNA, 147 bp, Homo sapiens
  chr1:175957579-175957726
  hypo
ttaaaatttcttggcacgaaactcatcactactaattagaggcaatgcagtttgctggttaagaatgcaggctctggagccagactgagttagcacgttcatctgtcggccaggcgtggtggctcacgcttgtattccaagcaattt

SEQ ID NO: 15133 - DNA, 39 bp, Homo sapiens
  chr1:178007138-178007177
  hypo
cagcgccgcccagccccgggagagcggaagggcggcccg

SEQ ID NO: 15134 - DNA, 1204 bp, Homo sapiens; identical to SEQ ID NO: 965
  chr1:178062639-178063843
  hypo

SEQ ID NO: 15135 - DNA, 31 bp, Homo sapiens
  chr1:178228197-178228228
  hypo
agtagtttcttagggccgagggggatgggtg

SEQ ID NO: 15136 - DNA, 151 bp, Homo sapiens
  chr1:178271748-178271899
  hypo
cttaccaccacatacacgtatacaaattggcaagttgattctaaaattcatctcgaaatgccatagaccaagtatagccacagcagaagaaaacaaggtgagaagacttaattactagtattaagatctgtttaaaaagtataataggccg

SEQ ID NO: 15137 - DNA, 155 bp, Homo sapiens
  chr1:178531643-178531798
  hypo
cagccaccgcacccgacctctactttttagctataatgatttgcaagggcaaaaatttcacggtacaaggagctttcttttgaaacaatgagtaagctcttcacaagtaccaacatgtcgggaaccgtaaacccttgtcgcgggggaaaagctag

SEQ ID NO: 15138 - DNA, 31 bp, Homo sapiens; identical to SEQ ID NO: 966
  chr1:178694819-178694850
  hypo

SEQ ID NO: 15139 - DNA, 148 bp, Homo sapiens
  chr1:178928476-178928624
  hypo
tgagccaaataaggtcacagtcgcaggatcaacagcgcttcccagtctgcctccacccgctgttatgggacgcccacgtcaataccccattatcctcagagtcctcggggttgtgtcaatgcatgtcgggacagtactgtggtgcctg

SEQ ID NO: 15140 - DNA, 84 bp, Homo sapiens
  chr1:178988891-178988975
  hypo
tggccgagaccctttcttgtgcattgccatggtgaaaataccagcctggtattaccatttctttcaaagcgttgctaacatctc

SEQ ID NO: 15141 - DNA, 88 bp, Homo sapiens
  chr1:178994228-178994316
  hypo
gatggacacagtggcggctctgtataagtcagctgaaagcaaacaaagggaaggcagaatctttcattcacacgatttatccgcgccc

SEQ ID NO: 15142 - DNA, 31 bp, Homo sapiens; identical to SEQ ID NO: 967
  chr1:178995254-178995285
  hypo

SEQ ID NO: 15143 - DNA, 35 bp, Homo sapiens
  chr1:179046570-179046605
  hypo
cctgggcaacgagcgaaactctgtctcaaaaaaca

SEQ ID NO: 15144 - DNA, 30 bp, Homo sapiens
  chr1:179100485-179100515
  hypo
atcataaagtgcaacgaagagattagggtc

SEQ ID NO: 15145 - DNA, 44 bp, Homo sapiens
  chr1:179229271-179229315
  hypo
aagaatgttttgtcagccaggcgcggtggctcacgcctgtaatc

SEQ ID NO: 15146 - DNA, 30 bp, Homo sapiens; identical to SEQ ID NO: 968
  chr1:179545151-179545181
  hypo

SEQ ID NO: 15147 - DNA, 49 bp, Homo sapiens
  chr1:179782917-179782966
  hypo
actgctgcaagaagagcggaaccgaggttgcagacgaggaggaggagcg

SEQ ID NO: 15148 - DNA, 19 bp, Homo sapiens
  chr1:179868796-179868815
  hypo
tgagacagagtcttgctct

SEQ ID NO: 15149 - DNA, 19 bp, Homo sapiens
  chr1:179869054-179869073
  hypo
taggcgtgagccactgcac

SEQ ID NO: 15150 - DNA, 22 bp, Homo sapiens
  chr1:180050297-180050319
  hypo
cggcccactgtactgctttttg

SEQ ID NO: 15151 - DNA, 186 bp, Homo sapiens; identical to SEQ ID NO: 974
  chr1:180123500-180123686
  hypo

SEQ ID NO: 15152 - DNA, 890 bp, Homo sapiens; identical to SEQ ID NO: 975
  chr1:180123700-180124590
  hypo

SEQ ID NO: 15153 - DNA, 18 bp, Homo sapiens
  chr1:180265586-180265604
  hypo
cagagtttcactctgtcg

SEQ ID NO: 15154 - DNA, 97 bp, Homo sapiens
  chr1:180477769-180477866
  hypo
gcggtcgcaggccagcgtgagttccaggagggcatgggatctgtgggccctgcacttggagcggcagaccggaaacactggccccgggcagtgagcg

SEQ ID NO: 15155 - DNA, 82 bp, Homo sapiens
  chr1:180478105-180478187
  hypo
aagggctgaggagcccgcaggcacgcagcgctggactggttgaacagctccgcccgctgccctggcacgggatccaccaggc

SEQ ID NO: 15156 - DNA, 31 bp, Homo sapiens; identical to SEQ ID NO: 979
  chr1:180606644-180606675
  hypo

SEQ ID NO: 15157 - DNA, 30 bp, Homo sapiens
  chr1:180805729-180805759
  hypo
tcatccagtgcctgcgccgatatcgagaca

SEQ ID NO: 15158 - DNA, 516 bp, Homo sapiens; identical to SEQ ID NO: 980
  chr1:180881316-180881832
  hypo

SEQ ID NO: 15159 - DNA, 95 bp, Homo sapiens
  chr1:180885146-180885241
  hypo
tgatcaagagagcatcccctgctctgtctccaggttactttcatctggacaggactcaacgccaagacactttggggccccgggaggttgtgggg

SEQ ID NO: 15160 - DNA, 42 bp, Homo sapiens
  chr1:180891950-180891992
  hypo
ctgtctacctgcagataggatcgggccccacaggttgagggc

SEQ ID NO: 15161 - DNA, 102 bp, Homo sapiens
  chr1:180892051-180892153
  hypo
gcacttcggaccaaccagctataaatcggggttcccactgttccttccttgggtttaattttataggacggctcacagaacgcaaggaaacactttacttgc

SEQ ID NO: 15162 - DNA, 30 bp, Homo sapiens
  chr1:180896563-180896593
  hypo
tcgtgtgctctgctccgcttgcaattgacg

SEQ ID NO: 15163 - DNA, 62 bp, Homo sapiens
  chr1:180918553-180918615
  hypo
ggaatttgaaaggtttccagccgcggttgaggccggcgggcgggggttgggggcagggggcc

SEQ ID NO: 15164 - DNA, 152 bp, Homo sapiens
  chr1:181066371-181066523
  hypo
attatgttctacagctcctgccggtttctccccgcacccccctgcctcttcagaatgcattttgaaaggcgctcctagcctgcactgcagagagcagctgtaaagatgcggtgtgggggcgattctggtgcgtgggctggcccagctgtctg

SEQ ID NO: 15165 - DNA, 163 bp, Homo sapiens
  chr1:181765802-181765965
  hypo
ggccacaagtctgacactcaccgctcagggggcagggagcggggacgatcaaaagagcgaaagcatcttctctctcctgatgtctcccgctgcaattcagaagagcgagggacccaggctgactgggagtccccagagcgccgtcaatccaggtcacccagtg

SEQ ID NO: 15166 - DNA, 283 bp, Homo sapiens
  chr1:181767630-181767913
  hypo
gagcaacaatgcttgcctgaccgagtcttccaactctccgcacccccagcagagccaacatgcctccccacagcgctacatctccgagccctacttggccctgcacgaagactcccacgcctcagactgtggtgaggaggagacgctcactttcgaagcagccgtggctactagcctgggccgttccaacaccatcggctcagccccacccctgcggcatagctggcagatgcccaacgggcactatcggcggcggaggcgcggggggcctgggccaggcatg

SEQ ID NO: 15167 - DNA, 31 bp, Homo sapiens
  chr1:182183508-182183539
  hypo
acaatgcctactggtccgaccaaaatcaagg

SEQ ID NO: 15168 - DNA, 31 bp, Homo sapiens
  chr1:182292205-182292236
  hypo
attttattatttgagacggcgtctcactctg

SEQ ID NO: 15169 - DNA, 557 bp, Homo sapiens; identical to SEQ ID NO: 988
  chr1:182583782-182584339
  hypo

SEQ ID NO: 15170 - DNA, 217 bp, Homo sapiens; identical to SEQ ID NO: 989
  chr1:182584403-182584620
  hypo

SEQ ID NO: 15171 - DNA, 40 bp, Homo sapiens
  chr1:182767635-182767675
  hypo
tacaggcatgagcagctgcgccagccaagacttgctttcc

SEQ ID NO: 15172 - DNA, 191 bp, Homo sapiens
  chr1:182827757-182827948
  hypo
cttgagattttgcccccggtaagcataaagctgtttagttcacatttacgtagaactctccgtagacaagcaaatcatattttttgtttgtttttcttattttttaatagcctgaagatccttctgtgccagttgcactcaacattggcaaattggctcagttcgaaccatctcagcgacaaaaccaagtg

SEQ ID NO: 15173 - DNA, 30 bp, Homo sapiens
  chr1:182856876-182856906
  hypo
acaccgaatacttgccgtgtagtttgtttg

SEQ ID NO: 15174 - DNA, 287 bp, Homo sapiens; identical to SEQ ID NO: 990
  chr1:182992749-182993036
  hypo

SEQ ID NO: 15175 - DNA, 121 bp, Homo sapiens
  chr1:183129401-183129522
  hypo
tgaagcatgtgttcaccgggcaactatgaatggcttgactgggtggagccttcagtatctttttagttaagccttttagtctcaaaaatggaagaggcaaagctcaattcttaaagatcac

SEQ ID NO: 15176 - DNA, 31 bp, Homo sapiens
  chr1:183338871-183338902
  hypo
ctgtacccattaaacacgaactccccattcc

SEQ ID NO: 15177 - DNA, 37 bp, Homo sapiens
  chr1:183462994-183463031
  hypo
gtgagtcatagcacccggccactttactggttttctg

SEQ ID NO: 15178 - DNA, 30 bp, Homo sapiens
  chr1:183486872-183486902
  hypo
agaatcgagcaaatccgaatcggagtgaag

SEQ ID NO: 15179 - DNA, 213 bp, Homo sapiens; identical to SEQ ID NO: 996
  chr1:184005519-184005732
  hypo

SEQ ID NO: 15180 - DNA, 508 bp, Homo sapiens; identical to SEQ ID NO: 997
  chr1:184355380-184355888
  hypo

SEQ ID NO: 15181 - DNA, 279 bp, Homo sapiens; identical to SEQ ID NO: 998
  chr1:184355935-184356214
  hypo

SEQ ID NO: 15182 - DNA, 97 bp, Homo sapiens; identical to SEQ ID NO: 999
  chr1:184356590-184356687
  hypo

SEQ ID NO: 15183 - DNA, 107 bp, Homo sapiens
  chr1:184448572-184448679
  hypo
aatcttgtgaaatatgtgctacgcaaattttacatacttggaaactgaacacagagagacggacttgtccgaggttacccagctacgaagtgctagaatccagattg

SEQ ID NO: 15184 - DNA, 30 bp, Homo sapiens; identical to SEQ ID NO: 1000
  chr1:184464148-184464178
  hypo

SEQ ID NO: 15185 - DNA, 30 bp, Homo sapiens
  chr1:184591066-184591096
  hypo
tggttgagtgggtccgcacgaaatgcttga

SEQ ID NO: 15186 - DNA, 40 bp, Homo sapiens
  chr1:184721203-184721243
  hypo
agttacgtctcctgcccacgtgctatagaaactggattgt

SEQ ID NO: 15187 - DNA, 245 bp, Homo sapiens; identical to SEQ ID NO: 1001
  chr1:184722804-184723049
  hypo

SEQ ID NO: 15188 - DNA, 31 bp, Homo sapiens
  chr1:184774919-184774950
  hypo
actggagaaactgcagcggactgacagtcac

SEQ ID NO: 15189 - DNA, 30 bp, Homo sapiens
  chr1:185013774-185013804
  hypo
tgccttcagatttacggtctggtattgctg

SEQ ID NO: 15190 - DNA, 40 bp, Homo sapiens
  chr1:185024835-185024875
  hypo
agccgccgtgcctggcctgtagtttcgttttatatgagag

SEQ ID NO: 15191 - DNA, 17 bp, Homo sapiens
  chr1:185076315-185076332
  hypo
agcgagactccgtctca

SEQ ID NO: 15192 - DNA, 25 bp, Homo sapiens
  chr1:185335933-185335958
  hypo
gttttttttttttttttgagacgaa

SEQ ID NO: 15193 - DNA, 84 bp, Homo sapiens
  chr1:185336197-185336281
  hypo
caggcgtgagccaccgcgccaggcccagagaaggttaatgaatgctaaagtttgcgaaccaccgtttgataggctgaaaatggc

SEQ ID NO: 15194 - DNA, 30 bp, Homo sapiens; identical to SEQ ID NO: 1005
  chr1:185510393-185510423
  hypo

SEQ ID NO: 15195 - DNA, 49 bp, Homo sapiens
  chr1:186344812-186344861
  hypo
ggcgcccagaagggggcggggtggcgaccgcagtcgctttggctgaggc

SEQ ID NO: 15196 - DNA, 177 bp, Homo sapiens
  chr1:188612097-188612274
  hypo
aaaacttgcttgggttctctgcgaatacaagggccaggatcactgtggactcattgcaggttgtggactggttcgctggttctgaacttgctgctagttgtggactcgctgccggtgacaataccacattcttcattctagtaagtttcactttccgtatttgaaattttattttcc

SEQ ID NO: 15197 - DNA, 30 bp, Homo sapiens; identical to SEQ ID NO: 1009
  chr1:189649417-189649447
  hypo

SEQ ID NO: 15198 - DNA, 14 bp, Homo sapiens
  chr1:191673020-191673034
  hypo
gcgcccggccgatt

SEQ ID NO: 15199 - DNA, 30 bp, Homo sapiens
  chr1:192175260-192175290
  hypo
actaagaaaacttgatgaaaacgggttact

SEQ ID NO: 15200 - DNA, 30 bp, Homo sapiens
  chr1:192175529-192175559
  hypo
cagcccgccgcagcctcccaaagaggggtt

SEQ ID NO: 15201 - DNA, 35 bp, Homo sapiens
  chr1:192197324-192197359
  hypo
cgcacccggcccccggagagatacttcttaagatt

SEQ ID NO: 15202 - DNA, 30 bp, Homo sapiens
  chr1:193075625-193075655
  hypo
ctgcccgctgaccccgtacccagaggccgc

SEQ ID NO: 15203 - DNA, 366 bp, Homo sapiens
  chr1:193149421-193149787
  hypo
ttctaatgtagtttacggtggcgatacctgcctgccttttcttttgctgcgttggcacaggcattgtgcttattttgttgtaaatggttccagtattttatcagttcactaggctggaactgatgagaggtaattaggtggctgtatttacagctcgaataagagactcgccagtgattgaacacaaactcattgggagggggtacaggatcaattctcaacttggcaagacagatccctacatatacatcttccaagtgcaaacggcggatacctaaagaaactttaaaaatcttttctgccagatctccagaaaaaacataaccagttccagaacagaagacaggataacgctcacttgggtag

SEQ ID NO: 15204 - DNA, 96 bp, Homo sapiens
  chr1:197091609-197091705
  hypo
acagtttgagtagtacgctgacatatagcgtcaaatggcacatagcaaggatggtaatggtggatcaggtaacataacacacggccgtctgagaaa

SEQ ID NO: 15205 - DNA, 33 bp, Homo sapiens
  chr1:197116741-197116774
  hypo
gattacaggcctgagcggcgcccgaccctaggc

SEQ ID NO: 15206 - DNA, 39 bp, Homo sapiens
  chr1:197324918-197324957
  hypo
cgcaggctgagggagccgactccattctcggccagccca

SEQ ID NO: 15207 - DNA, 40 bp, Homo sapiens
  chr1:197418768-197418808
  hypo
tacaagcgtgagccaccacgcctggcccagaaaaatatta

SEQ ID NO: 15208 - DNA, 30 bp, Homo sapiens
  chr1:197704759-197704789
  hypo
gccgccatgaaggtcgagctatgcggtttc

SEQ ID NO: 15209 - DNA, 165 bp, Homo sapiens; identical to SEQ ID NO: 1017
  chr1:197886901-197887066
  hypo

SEQ ID NO: 15210 - DNA, 228 bp, Homo sapiens; identical to SEQ ID NO: 1018
  chr1:197887146-197887374
  hypo

SEQ ID NO: 15211 - DNA, 81 bp, Homo sapiens
  chr1:198124718-198124799
  hypo
atcaaggcctccttttgagatcgtgaacgttttcatttatttatttatttttttgagacggattttcgctctttcacccac

SEQ ID NO: 15212 - DNA, 30 bp, Homo sapiens
  chr1:198828045-198828075
  hypo
acagttcaacccaccgacagcaatgaatgt

SEQ ID NO: 15213 - DNA, 63 bp, Homo sapiens
  chr1:199636251-199636314
  hypo
gactttctctctgggcgtgagctagccttgttgcgagtgagccataggcgcaagccgtatgta

SEQ ID NO: 15214 - DNA, 30 bp, Homo sapiens; identical to SEQ ID NO: 1026
  chr1:200379460-200379490
  hypo

SEQ ID NO: 15215 - DNA, 284 bp, Homo sapiens; identical to SEQ ID NO: 1027
  chr1:200379702-200379986
  hypo

SEQ ID NO: 15216 - DNA, 93 bp, Homo sapiens
  chr1:200588799-200588892
  hypo
tgcctatagagaagattgaattgattggtgtcacgaggcagattattcccaagtaccacaggcagtaagtacgataagtactgtaaattaatt

SEQ ID NO: 15217 - DNA, 31 bp, Homo sapiens
  chr1:200589466-200589497
  hypo
tccaaaccaaaacatccggtgattctgttct

SEQ ID NO: 15218 - DNA, 31 bp, Homo sapiens
  chr1:200612480-200612511
  hypo
aaacaagtaggccaggcgtggtggctcatgc

SEQ ID NO: 15219 - DNA, 206 bp, Homo sapiens; identical to SEQ ID NO: 1028
  chr1:200708654-200708860
  hypo

SEQ ID NO: 15220 - DNA, 112 bp, Homo sapiens
  chr1:200942599-200942711
  hypo
tccaggctgctggggtcgagggtccgggggcatccctctgacctcactcctagggtgggccgctgtggggtaaccgccggacactccagaacttcaccgtcaggtcactggg

SEQ ID NO: 15221 - DNA, 45 bp, Homo sapiens
  chr1:200956141-200956186
  hypo
ggcagactgacggtgcgcgagaccctgtcccggtaataggggtct

SEQ ID NO: 15222 - DNA, 31 bp, Homo sapiens
  chr1:200964905-200964936
  hypo
atagtaaatgttcaaacgatggtaactgtta

SEQ ID NO: 15223 - DNA, 31 bp, Homo sapiens
  chr1:201036179-201036210
  hypo
acagacaagggcttctcgcctctgctcagga

SEQ ID NO: 15224 - DNA, 31 bp, Homo sapiens; identical to SEQ ID NO: 1029
  chr1:201050380-201050411
  hypo

SEQ ID NO: 15225 - DNA, 31 bp, Homo sapiens
  chr1:201058353-201058384
  hypo
agatggttctgcaggcgcgggcccagaccca

SEQ ID NO: 15226 - DNA, 31 bp, Homo sapiens
  chr1:201069412-201069443
  hypo
gctaaaggcaaggaggcgttgcctgctgtga

SEQ ID NO: 15227 - DNA, 222 bp, Homo sapiens; identical to SEQ ID NO: 1030
  chr1:201083308-201083530
  hypo

SEQ ID NO: 15228 - DNA, 197 bp, Homo sapiens
  chr1:201168315-201168512
  hypo
ttgctgggatcgtccacgccttagaggacagtggggagagcagggctctgggactccatcagtttctcaggaagaccatcaacatgtcttgcttctctccctgcttgtccacatcgactccttcctctcctccctggatgttgcagttggctttcggaagaatcggaagaggcacagggaaccgcaggaaggtaggc

SEQ ID NO: 15229 - DNA, 30 bp, Homo sapiens
  chr1:201181868-201181898
  hypo
tgatagacaagggacgagcaatgcttgggc

SEQ ID NO: 15230 - DNA, 281 bp, Homo sapiens
  chr1:201194900-201195181
  hypo
agccctgctgggtcccctccacgtgacctccctctgccgtctctcctgaagcatgcccgcaggcccctgggcccatccacctgcaggagaacgtgcctgggacggtgacggccgagtgggaaccctctcctgacgaggcccaggatgtcccgctgcactacgcggtgttcacacgctcctcagcgcacggtccctggcacgaggcagccgaccgcatccacaccaaccgcttcaccctcctgggcatcctccccggccacgaataccacttcagggtggtg

SEQ ID NO: 15231 - DNA, 209 bp, Homo sapiens
  chr1:201261830-201262039
  hypo
ccacagacagggtttccgatgggggagtctgaccatcgctttagagaaaaggagtgcatatccctcttaggaggctctcactggatcccactcaccttcatcccccaaggccatcacttaacaagagtgtgggccaggccacggagccatggcttgctcttcgtggagctcccagtatagctgagggaatgggacgcagggcagaatga

SEQ ID NO: 15232 - DNA, 42 bp, Homo sapiens
  chr1:201276066-201276108
  hypo
ggattacaggcatgagccaccgcacctggactacattttttt

SEQ ID NO: 15233 - DNA, 31 bp, Homo sapiens
  chr1:201355457-201355488
  hypo
ccaacctggagtgtgacgggtgggaggcggg

SEQ ID NO: 15234 - DNA, 31 bp, Homo sapiens
  chr1:201358467-201358498
  hypo
aaacccaggaccctcccgaggcaggctcctc

SEQ ID NO: 15235 - DNA, 31 bp, Homo sapiens
  chr1:201380508-201380539
  hypo
agacttgaggttggcccgcagatccatggac

SEQ ID NO: 15236 - DNA, 30 bp, Homo sapiens; identical to SEQ ID NO: 1034
  chr1:201449031-201449061
  hypo

SEQ ID NO: 15237 - DNA, 31 bp, Homo sapiens; identical to SEQ ID NO: 1036
  chr1:201507612-201507643
  hypo

SEQ ID NO: 15238 - DNA, 140 bp, Homo sapiens
  chr1:201797435-201797575
  hypo
agaggcgtgagccactgcgcctcgccacaccctgcatttttaacacctcactggagcgctcatcctctccacctgctccgctattcaggagcggctctgcaccgtaggccatttcccacgaccagctgctgacaaccata

SEQ ID NO: 15239 - DNA, 30 bp, Homo sapiens
  chr1:201864486-201864516
  hypo
acaagtgaggccagcgccttggcagctgct

SEQ ID NO: 15240 - DNA, 81 bp, Homo sapiens; identical to SEQ ID NO: 1039
  chr1:201977886-201977967
  hypo

SEQ ID NO: 15241 - DNA, 303 bp, Homo sapiens
  chr1:201982935-201983238
  hypo
tgatggaggctggccttgcagcgcccagaggcacccacctgtgggagttcatccgggacatcctcatccacccggagctcaacgagggcctcatgaagtgggagaatcggcatgaaggcgtcttcaagttcctgcgctccgaggctgtggcccaactatggggccaaaagaaaaagaacagcaacatgacctacgagaagctgagccgggccatgaggtgagctggcggccaggaccctcacgatacagccggacatggggacaggcgctcacactcccaccgccctctttctggctgccact

SEQ ID NO: 15242 - DNA, 38 bp, Homo sapiens
  chr1:201984008-201984046
  hypo
tacaggtgtgagccaccgtgcccagctccctggcctta

SEQ ID NO: 15243 - DNA, 77 bp, Homo sapiens
  chr1:201997742-201997819
  hypo
gacgcagaccagaaacgcactaccgacactgtagaggagcccctggatcttatcaggctaggcctagatgagctaat

SEQ ID NO: 15244 - DNA, 20 bp, Homo sapiens
  chr1:202033901-202033921
  hypo
agacaaaacaaaacatatgt

SEQ ID NO: 15245 - DNA, 30 bp, Homo sapiens
  chr1:202044090-202044120
  hypo
actaccgcacctggccgaaccagtgtcttt

SEQ ID NO: 15246 - DNA, 25 bp, Homo sapiens
  chr1:202051925-202051950
  hypo
agccaccgcccggcctgggaagact

SEQ ID NO: 15247 - DNA, 41 bp, Homo sapiens
  chr1:202097382-202097423
  hypo
tggcctacctctccaccgagctgacccgccagaccctggac

SEQ ID NO: 15248 - DNA, 85 bp, Homo sapiens
  chr1:202115846-202115931
  hypo
gggattacaggcatgagccaccacgccaggccagcaatacatttctgttgtttagaagccacatggtttacggtagtgtgaattg

SEQ ID NO: 15249 - DNA, 31 bp, Homo sapiens
  chr1:202127154-202127185
  hypo
acttgcccagggtgcccgtgagagaatggtt

SEQ ID NO: 15250 - DNA, 50 bp, Homo sapiens
  chr1:202287418-202287468
  hypo
ccgcagtgcagtgcagcgtctccgtctcctgtgtccgggcctatgggaag

SEQ ID NO: 15251 - DNA, 35 bp, Homo sapiens
  chr1:202287825-202287860
  hypo
ggcctcttccctgtcacgcccgaggccgtcaagtc

SEQ ID NO: 15252 - DNA, 31 bp, Homo sapiens
  chr1:202306342-202306373
  hypo
acaggcgtgagccaccgcgcccagccaacac

SEQ ID NO: 15253 - DNA, 31 bp, Homo sapiens
  chr1:202455900-202455931
  hypo
actccagcatgggcaacgaagtaagactcaa

SEQ ID NO: 15254 - DNA, 168 bp, Homo sapiens
  chr1:202933724-202933892
  hypo
ctcagtgtaatgcacctgtcccgccggcaatcattcccagtttcttcgccactcggggttctggtggagatttcttgttgggctgaatgttaaaatgccctgagaggtcaggtgaagagagcagtggaagaataaagtcaatacagcgaacttagaaaacaaatgcag

SEQ ID NO: 15255 - DNA, 30 bp, Homo sapiens
  chr1:202934507-202934537
  hypo
tgtaagtgagcaacccgcttggcccccgaa

SEQ ID NO: 15256 - DNA, 31 bp, Homo sapiens; identical to SEQ ID NO: 1046
  chr1:202935961-202935992
  hypo

SEQ ID NO: 15257 - DNA, 31 bp, Homo sapiens
  chr1:202995300-202995331
  hypo
ttgacaattacaaggccgagactaaggccaa

SEQ ID NO: 15258 - DNA, 31 bp, Homo sapiens
  chr1:203054705-203054736
  hypo
gtactggatggcactgcgcaggatctccacc

SEQ ID NO: 15259 - DNA, 31 bp, Homo sapiens
  chr1:203242259-203242290
  hypo
gacggaaaggagggagcgggagaatttctgc

SEQ ID NO: 15260 - DNA, 27 bp, Homo sapiens
  chr1:203298438-203298465
  hypo
tgggttaaaaaaaaggtgtggcgccgg

SEQ ID NO: 15261 - DNA, 88 bp, Homo sapiens
  chr1:203429558-203429646
  hypo
actgagatggctactaagtaacgtctacagtgtgggtatgctggacaaagggcggattcatatcgccagcaggatgaagcgggagagt

SEQ ID NO: 15262 - DNA, 31 bp, Homo sapiens; identical to SEQ ID NO: 1050
  chr1:203561334-203561365
  hypo

SEQ ID NO: 15263 - DNA, 102 bp, Homo sapiens
  chr1:203690590-203690692
  hypo
cagagaaagaaggtagcgtgagagcaagtgcacaggtcaggaataagcgcagcttcacctcccagtgcttgctgtgctcccgctacacggtgcattatgcta

SEQ ID NO: 15264 - DNA, 26 bp, Homo sapiens
  chr1:203759743-203759769
  hypo
gtctgtggaaaattcttcacacgtct

SEQ ID NO: 15265 - DNA, 31 bp, Homo sapiens
  chr1:204031964-204031995
  hypo
ccagtcacattggattcggacccactctcgt

SEQ ID NO: 15266 - DNA, 1004 bp, Homo sapiens; identical to SEQ ID NO: 1055
  chr1:204043133-204044137
  hypo

SEQ ID NO: 15267 - DNA, 31 bp, Homo sapiens
  chr1:204092697-204092728
  hypo
ctggtcaagtaggggacgtctctctgctggc

SEQ ID NO: 15268 - DNA, 79 bp, Homo sapiens
  chr1:204094089-204094168
  hypo
gggtgctgtgtgtatgcgtacgtgtgtgtgttatctgtgtatagctgagcctgcacgtgcgacccgactgtgtatggct

SEQ ID NO: 15269 - DNA, 31 bp, Homo sapiens
  chr1:204106497-204106528
  hypo
gcccaaggaggcggcccgagaaggcagcttc

SEQ ID NO: 15270 - DNA, 21 bp, Homo sapiens
  chr1:204122434-204122455
  hypo
atttgagacagaatttcgctc

SEQ ID NO: 15271 - DNA, 31 bp, Homo sapiens
  chr1:204125071-204125102
  hypo
tcttgagtatggaagacgtctcagcagacaa

SEQ ID NO: 15272 - DNA, 31 bp, Homo sapiens
  chr1:204187311-204187342
  hypo
caacatgcagaagccccgctgagcctgccag

SEQ ID NO: 15273 - DNA, 196 bp, Homo sapiens
  chr1:204199535-204199731
  hypo
attaccactttgtaggctggccggggactggggtcgggggccgggctggccgggagctgcaggctcctccgcttctccctcatggagccactctggtgccgccgcattcggtcaatctgctcctccacgctcatcttgaccttcccctcgccaggaaacacagcactcttggggcgttcctgctgccatgggaaaa

SEQ ID NO: 15274 - DNA, 59 bp, Homo sapiens
  chr1:204212335-204212394
  hypo
ggagactccagggggacgtaggctttggggaggggaggccgaggcgggccaggttcctg

SEQ ID NO: 15275 - DNA, 31 bp, Homo sapiens
  chr1:204217169-204217200
  hypo
ccgagccacactttcacggggctttttctgc

SEQ ID NO: 15276 - DNA, 425 bp, Homo sapiens
  chr1:204226523-204226948
  hypo
tcagcatagatgtcctcactgcgaggtggcagccgctcaaaacgggcactgggtgagcggacaggggagtaaatgcgggcacggctgtaggagccctggctgggtgagcggggcacagagtgggagcggggctgcagggacaggcggcgcagggagctagaggcggcatccagctcatcataatagactggctgccgggaggggcttgggatccagacggtggcatcctgccgcccgtagctggcgggctccttccactctcgcagctggtaggcagggccacccccattgcggaaggcatggcgcttgtcctccagggcccagggcgggctgatccgatcataggccggcatggaacagatgctctccggccgcactcctggcgggtagtactgataatcatcggggtactgggaggagtaggg

SEQ ID NO: 15277 - DNA, 100 bp, Homo sapiens
  chr1:204228471-204228571
  hypo
tttgtcagggttggtgcgtggtgggaaactccgccggtgtcccccagtctctccatcctgagacgggaaagctgtgctccctggccggcttggggagtgg

SEQ ID NO: 15278 - DNA, 31 bp, Homo sapiens
  chr1:204286091-204286122
  hypo
caatcacataatctaccgtgccatctgcagc

SEQ ID NO: 15279 - DNA, 109 bp, Homo sapiens; identical to SEQ ID NO: 1057
  chr1:204347118-204347227
  hypo

SEQ ID NO: 15280 - DNA, 31 bp, Homo sapiens
  chr1:204424455-204424486
  hypo
gttggggaaaggggaccggcaggggcggggt

SEQ ID NO: 15281 - DNA, 44 bp, Homo sapiens
  chr1:204486799-204486843
  hypo
gattacaggcgtgagccaccgtgcccggccgaaaaccacagttt

SEQ ID NO: 15282 - DNA, 44 bp, Homo sapiens
  chr1:204487137-204487181
  hypo
aatcagtgtcatagagcgagcttccagtcccagctacccaagag

SEQ ID NO: 15283 - DNA, 31 bp, Homo sapiens; identical to SEQ ID NO: 1059
  chr1:204487762-204487793
  hypo

SEQ ID NO: 15284 - DNA, 409 bp, Homo sapiens
  chr1:204531125-204531534
  hypo
aggaagggaaaagtgccgtagttaggaggaaacatgccaaggtcttgaggtgagaaaacagtggcatctgggaagaactagaaagtttagtgtcgctgaaagcatggacagagagagatgagtgaattgaattgcctgggcatcctgggaacgggaagacaccctgatggcagggaacccgcgcctgcgctttcggggtcaggtccaggtctgccccgccagggctgaagccagctcctggtggggctgcagtgaggcggaagaggtgggatgctgctgcctggcggtgctgcggcggcagacctccacgaggaggtcctgggctaccgcggggtacacaggcgggcggaaaagggggagcagagtcagggggcagttgggaagctcggagacaaaaggagggagggag

SEQ ID NO: 15285 - DNA, 257 bp, Homo sapiens
  chr1:204531593-204531850
  hypo
cccgaccctgcttagtttccgagatctggcgtgttcagggtggtatggccgtagacactaatggtggtgcctggctgcctcttcaagagcccggcccagccacgcccgcccgactccaggcgtcactgccaccccagggtcgtggggctcggactggggacccctgagctgctcgcctgcggtcggactgctctccccttctacgcccaagcaccgccggtctgccctgctgcgccttccaccggcctcccagagcc

SEQ ID NO: 15286 - DNA, 30 bp, Homo sapiens
  chr1:204536216-204536246
  hypo
gtgacagagtgagaccgtgtctcaaaaaaa

SEQ ID NO: 15287 - DNA, 30 bp, Homo sapiens
  chr1:204537923-204537953
  hypo
ttcctgtgccatctccggtcccttctggat

SEQ ID NO: 15288 - DNA, 31 bp, Homo sapiens
  chr1:204721232-204721263
  hypo
cgcagctacagacccacgcctcctgctgtat

SEQ ID NO: 15289 - DNA, 101 bp, Homo sapiens
  chr1:204913447-204913548
  hypo
ccaggcagccaccgccgccctgggtccatgcagccttcctcctctgcctcctcagtcttggcggagccatcgaaattcctatggatcgtgagtcctgcccc

SEQ ID NO: 15290 - DNA, 30 bp, Homo sapiens
  chr1:204948123-204948153
  hypo
gctgaccgacctggccgagaggagcgtgcg

SEQ ID NO: 15291 - DNA, 213 bp, Homo sapiens
  chr1:204948535-204948748
  hypo
gcatgaccattccaagtaccccggcagcgttaactcagccgtcctccggctgtccccgtatgtcaactaccagttccgtgtcattgccatcaacgaggttgggagcagccaccccagcctcccatccgagcgctaccgaaccagtggagcacgtgagtacccgagggctgccagagaaggctccggaaccccgcaccccaaactcacactgag

SEQ ID NO: 15292 - DNA, 30 bp, Homo sapiens
  chr1:204955114-204955144
  hypo
tgaccgcctccgtggcgtggtgtcccgcct

SEQ ID NO: 15293 - DNA, 314 bp, Homo sapiens
  chr1:204955352-204955666
  hypo
cgaggcctccaggagcggatgacctgcaagccgagccactacagccattcccagaccaccatcgccaaggtgacctgccctgcgaggaggttgtatctcaagagaagacctgtgaggtctgctgacataattccagacgggttatgcagactgatccccgagggcacggcgggcacctgggccaccccaccaccttccgaggcagaaggcagcacgtccatcctgactgcctggaaccatctgatttgtttgccagcacccaacaccttcacggttctccccccacgttctcaagaagccgtcactgaaatagt

SEQ ID NO: 15294 - DNA, 30 bp, Homo sapiens
  chr1:205038903-205038933
  hypo
gcagggacacatgccgcggaccctcgccca

SEQ ID NO: 15295 - DNA, 31 bp, Homo sapiens
  chr1:205042897-205042928
  hypo
ggaacccctccctctgcgccgcagctggacg

SEQ ID NO: 15296 - DNA, 21 bp, Homo sapiens
  chr1:205051221-205051242
  hypo
gccaccgcgcctggccagaaa

SEQ ID NO: 15297 - DNA, 30 bp, Homo sapiens
  chr1:205114619-205114649
  hypo
cagcagcagatgtgcgactcatctttgttt

SEQ ID NO: 15298 - DNA, 30 bp, Homo sapiens
  chr1:205156818-205156848
  hypo
cagctggcacttgacgttacaatcctggcc

SEQ ID NO: 15299 - DNA, 30 bp, Homo sapiens
  chr1:205159808-205159838
  hypo
ccatagtctcagctcgagcagtgagaagtc

SEQ ID NO: 15300 - DNA, 31 bp, Homo sapiens
  chr1:205250964-205250995
  hypo
ttcaaacctgtagaaacgttggcttgggcca

SEQ ID NO: 15301 - DNA, 33 bp, Homo sapiens
  chr1:205269966-205269999
  hypo
agccaccgcgccgtccccaaactccctttcaac

SEQ ID NO: 15302 - DNA, 61 bp, Homo sapiens
  chr1:205273576-205273637
  hypo
atcctccagggtggcccggcgggtggggttcaccatcaacagccaccggatcaggccacag

SEQ ID NO: 15303 - DNA, 30 bp, Homo sapiens; identical to SEQ ID NO: 1061
  chr1:205312680-205312710
  hypo

SEQ ID NO: 15304 - DNA, 365 bp, Homo sapiens; identical to SEQ ID NO: 1062
  chr1:205399769-205400134
  hypo

SEQ ID NO: 15305 - DNA, 141 bp, Homo sapiens; identical to SEQ ID NO: 1063
  chr1:205425929-205426070
  hypo

SEQ ID NO: 15306 - DNA, 30 bp, Homo sapiens
  chr1:205550654-205550684
  hypo
gttgggatctctcacgttagcccagactgg

SEQ ID NO: 15307 - DNA, 353 bp, Homo sapiens
  chr1:205631956-205632309
  hypo
ttaccttcatcatagtgtctccgggcctcggtgcccggctcagctctgggcacgccctggtacagcccctcgcccacgaaatccgtgtaaaacagcgtgaaggtcatgagtgccatccagctgcacagctcagccacgaagagccggcgcagggtgcggggcatgcggcagcacagctggtgcagccggggaagcagggcgcccaggttccggaaagccaagcgggcccggcatggacagcagtggggcgacaaggagggggccgacagcccttctgctggctcggtggggcccagcgctgcctcctcagccaccagcagtgtggctgctacgcaggtgaggaagatgagggt

SEQ ID NO: 15308 - DNA, 140 bp, Homo sapiens; identical to SEQ ID NO: 1065
  chr1:205721777-205721917
  hypo

SEQ ID NO: 15309 - DNA, 30 bp, Homo sapiens; identical to SEQ ID NO: 1066
  chr1:206955685-206955715
  hypo

SEQ ID NO: 15310 - DNA, 31 bp, Homo sapiens
  chr1:207063116-207063147
  hypo
accaattcttcattctcggtggacaccaaat

SEQ ID NO: 15311 - DNA, 116 bp, Homo sapiens
  chr1:207087069-207087185
  hypo
gtagtctgagcctccaatcagcggaggaacctaccactgtggacattcagggtgactttctgggtctttccccggtctgtgttcatgcccgctccgcaggcatagactccgctgtc

SEQ ID NO: 15312 - DNA, 190 bp, Homo sapiens
  chr1:207088567-207088757
  hypo
aatacatcccatgagagagatcgcatggggttccctggaaggagcaaacccgggcgcctgatgtaggctgttgcagggggtggcgtggtcggaggagggctttctggaataagtgacgtctgagttgtgacctgaaggaatgggtatggagtgcaactgagagcgtgacgatgctcatcatggaggcagg

SEQ ID NO: 15313 - DNA, 141 bp, Homo sapiens
  chr1:207182656-207182797
  hypo
aggagctgcccaggatcctctcgcagcttcccaccgctgtgccctcaccagccctctttagccatccgtacggaggtggcttcatcttcagcatattgtgcccgtgtctcaagcaagcgcgccttactcagtgccaccatt

SEQ ID NO: 15314 - DNA, 191 bp, Homo sapiens
  chr1:207195482-207195673
  hypo
gatacctgcaaaatctttccccgtgcccagggaggccgggcggggccgagaattacgtaagacactgggcgagatcttgtccaagaaggagccctttcccagagaagtgctggttttggggctggcatctttctcagttgaaaggtagctgctcagtcccacgcctgagcgctccagagtgttggacttga

SEQ ID NO: 15315 - DNA, 577 bp, Homo sapiens
  chr1:207200593-207201170
  hypo
cctaatgaaaatcggcggaaaaagtctcatttgcccagttgctctctaaggtcgtcccatcctattctctatagagccagggctgactcaggcagaaagcacccactggtgttgtgaatcactccccaacaatgaaagagaaggtgcagtgagccaggatgggtggcaggaaaggatagggcagggcagggcagggcaggtgtgcagagagcagaccaggttgcgggagggagagtattacgtacagatccagagcgggtggaggtgctgctcatcatgctgtcacagctgccgacacgggtcacgggttctgagccagtccccgctggccacagctccctctcgggcatcacccgaaacaaggtgcagggatggcaaagggggcttctagaggggaagcgaggggaagtgaacaatgtcccaagccgggcctgaaaagagaagaatcaaagccacacatgagccgaggcttcggcaaggctctgcccaggccctgggcggcatggcgggaaggacaccaagcaagcagagagctggaaggggggcatgaacagccactgcccgacacccccggcct

SEQ ID NO: 15316 - DNA, 93 bp, Homo sapiens
  chr1:207227536-207227629
  hypo
gtgcccggcctcactgtttgcaaaactgagtcctaccgttagattggagttaatttcctggtaatgtacttcgtctatacataacccacccca

SEQ ID NO: 15317 - DNA, 154 bp, Homo sapiens
  chr1:207478914-207479068
  hypo
tggaaacttagactccagttacgtatttgaaatagcgaaaacctttgtcaaacagcccttcaatccgatgcaaaaccattagtgctttgtgcgcacattgggcaactgtgatccttcaggattggctgctctcgagaaagaaaactccctatgg

SEQ ID NO: 15318 - DNA, 19 bp, Homo sapiens
  chr1:207575673-207575692
  hypo
tggagtgcgatgttgcgat

SEQ ID NO: 15319 - DNA, 30 bp, Homo sapiens
  chr1:207643127-207643157
  hypo
ttacacttgtgacccggacccagaggaagg

SEQ ID NO: 15320 - DNA, 412 bp, Homo sapiens; identical to SEQ ID NO: 1069
  chr1:207669375-207669787
  hypo

SEQ ID NO: 15321 - DNA, 201 bp, Homo sapiens; identical to SEQ ID NO: 1070
  chr1:207669828-207670029
  hypo

SEQ ID NO: 15322 - DNA, 30 bp, Homo sapiens
  chr1:207963084-207963114
  hypo
tgagggtgttaggccgggtttggtggctca

SEQ ID NO: 15323 - DNA, 30 bp, Homo sapiens
  chr1:207991582-207991612
  hypo
tcttctctctcggtcgcaagaaggtggggt

SEQ ID NO: 15324 - DNA, 31 bp, Homo sapiens; identical to SEQ ID NO: 1071
  chr1:207995366-207995397
  hypo

SEQ ID NO: 15325 - DNA, 572 bp, Homo sapiens; identical to SEQ ID NO: 1072
  chr1:208084083-208084655
  hypo

SEQ ID NO: 15326 - DNA, 283 bp, Homo sapiens
  chr1:208136458-208136741
  hypo
tgtttttcttctcatcggtgcctggctgagctctggaatcgtttcctgctctgagcctgaaacttcaagcagtaagaagacggtccacagcccggttactggggctctgcaaatgcgacgttcccagtggccctctcccaggctccgggcctccgggtagaggaacttctgtctgtaaaggatgaaggcgaccttgctcaggctgcagcgggatggagaaacgtgacccagcggaggggctttcggctgcgaggtgcgagaggcgacccgaggggtgaaagca

SEQ ID NO: 15327 - DNA, 194 bp, Homo sapiens
  chr1:208213004-208213198
  hypo
ctcgctcagggagtagcgggcctcgcccgtgatggcatcaatggggcccttctccatctgctgcttgatggcacagtatagcatgaagagtggctcccctgcgcactcctgtgggcacagacagggcaggaggtgtgggcacggcctcctcaggtttgtacgttttccctttcctctctcggagcgaggccagt

SEQ ID NO: 15328 - DNA, 31 bp, Homo sapiens
  chr1:208397335-208397366
  hypo
ggccccatcttttccccgtgggtggaatgct

SEQ ID NO: 15329 - DNA, 221 bp, Homo sapiens
  chr1:208404761-208404982
  hypo
gactcaagatccaacatgttccgcaccggatgaaggcacatgtgcacacagatgtgcctggtcacccgccctcccctccacacgcctgcgaaggtgtgagcacgtctgtctgctctcctcccagatgcattccatgcccttcggaaaaacctttcttctgatgtttggttctgagtgtgcaagggaccccactgtaatacgaacaagtatttgtgcaatga

SEQ ID NO: 15330 - DNA, 121 bp, Homo sapiens; identical to SEQ ID NO: 1073
  chr1:208416771-208416892
  hypo

SEQ ID NO: 15331 - DNA, 176 bp, Homo sapiens; identical to SEQ ID NO: 1074
  chr1:208417126-208417302
  hypo

SEQ ID NO: 15332 - DNA, 31 bp, Homo sapiens; identical to SEQ ID NO: 1076
  chr1:208418805-208418836
  hypo

SEQ ID NO: 15333 - DNA, 30 bp, Homo sapiens
  chr1:208837627-208837657
  hypo
ccatcatatgtggaacgtggcgctcgcata

SEQ ID NO: 15334 - DNA, 30 bp, Homo sapiens
  chr1:209346596-209346626
  hypo
agcttctgccatggcgacatcattggggtc

SEQ ID NO: 15335 - DNA, 102 bp, Homo sapiens
  chr1:209825650-209825752
  hypo
ccagagatacagtcctcctcccgcatccggcccgcaccaggcaggtaaagacaggtaacataccttgctgtgtgttctgccgttctttctccagatcgcctg

SEQ ID NO: 15336 - DNA, 121 bp, Homo sapiens
  chr1:210032047-210032168
  hypo
ggagctcctcggggaggcttgggcagcgcaggagcccacggcgggggtgggggaggcggctcaggcatggccagctgtaagttccgagtcctgccccgcgaggaggcagctgaggcccaag

SEQ ID NO: 15337 - DNA, 227 bp, Homo sapiens; identical to SEQ ID NO: 1079
  chr1:210110983-210111210
  hypo

SEQ ID NO: 15338 - DNA, 138 bp, Homo sapiens; identical to SEQ ID NO: 1080
  chr1:210111283-210111421
  hypo

SEQ ID NO: 15339 - DNA, 126 bp, Homo sapiens; identical to SEQ ID NO: 1081
  chr1:210111796-210111922
  hypo

SEQ ID NO: 15340 - DNA, 38 bp, Homo sapiens; identical to SEQ ID NO: 1082
  chr1:210112036-210112074
  hypo

SEQ ID NO: 15341 - DNA, 28 bp, Homo sapiens
  chr1:210439527-210439555
  hypo
gggcgcggtggctcacgcctgtaatccc

SEQ ID NO: 15342 - DNA, 308 bp, Homo sapiens; identical to SEQ ID NO: 1084
  chr1:210465688-210465996
  hypo

SEQ ID NO: 15343 - DNA, 47 bp, Homo sapiens
  chr1:210560010-210560057
  hypo
agtgtgcatctctccacgctcctcttggcctccgtggtcctttctgg

SEQ ID NO: 15344 - DNA, 535 bp, Homo sapiens
  chr1:210856747-210857282
  hypo
tctcaatattggtcattttggcgtttaaggccttgatgtcctccttcagctcgtgcctcacctccaggactgtggcctgcagcgtctgctcagggatggggtagaacgaatgcttgacctctgccaggatgggactccgatcctggggactcctggcctcacccacgttgtccaggcgcaagtcgctcttggtgatgccactgtcacacgagtctgtcttcttcagtgtggcctcgcctgacgcttttgtcctctcgggaagtgtctccatcgactcagccttggacaccttgttccagtcctcactcttcccgcaagcatctttgaagcgggcccagcttttgcgcttggcacaatcgcccccgccccccttggggcccaggcactcggaccctggcgcctgtagctttgcgtggtctggcaccccggaggtggaggctgcctggaaggatacgggcgtggcaggactctcacgcacggtgaccacgctggccttcacgaggctgtggttggcggaggcatgctctgtaaggac

SEQ ID NO: 15345 - DNA, 31 bp, Homo sapiens
  chr1:211969081-211969112
  hypo
ctccaatggagacacacggacatacaaacac

SEQ ID NO: 15346 - DNA, 275 bp, Homo sapiens; identical to SEQ ID NO: 1086
  chr1:212003415-212003690
  hypo

SEQ ID NO: 15347 - DNA, 130 bp, Homo sapiens; identical to SEQ ID NO: 1087
  chr1:212003920-212004050
  hypo

SEQ ID NO: 15348 - DNA, 34 bp, Homo sapiens
  chr1:212321600-212321634
  hypo
ggcgtgagccaccgaacccagcctacagtgtttc

SEQ ID NO: 15349 - DNA, 30 bp, Homo sapiens; identical to SEQ ID NO: 1088
  chr1:212395928-212395958
  hypo

SEQ ID NO: 15350 - DNA, 45 bp, Homo sapiens
  chr1:212456676-212456721
  hypo
aaagatgaaaaaaaaatgggccgggcgcggtggctcacgcctgta

SEQ ID NO: 15351 - DNA, 40 bp, Homo sapiens
  chr1:212555381-212555421
  hypo
tcttgttttttttttttgagacggtgtctcgctctgttgc

SEQ ID NO: 15352 - DNA, 9 bp, Homo sapiens
  chr1:212873750-212873759
  hypo
cgaagccgc

SEQ ID NO: 15353 - DNA, 259 bp, Homo sapiens; identical to SEQ ID NO: 1090
  chr1:212874023-212874282
  hypo

SEQ ID NO: 15354 - DNA, 31 bp, Homo sapiens
  chr1:212964371-212964402
  hypo
aattcctcattgtctgcggctgcattgtcca

SEQ ID NO: 15355 - DNA, 275 bp, Homo sapiens
  chr1:213029990-213030265
  hypo
ctccagatctcaagacggtgtctggcacataccattcaatacaagtttggtacctggaacccactgaatatgcatgtccagtaactattaactacatgtgttggtgcaagggagaaggtcgagcaaccggatctgctccatcatagcccgtctcagtcgcttcattcaagtcagcggggtgaggttgaggggattccaacttcacaagggcagatttctcatggactctctttctctggttgtactggaacactttctggcgttattcctctgct

SEQ ID NO: 15356 - DNA, 31 bp, Homo sapiens
  chr1:213346046-213346077
  hypo
taacagagatgcctgccgtggacttgaccag

SEQ ID NO: 15357 - DNA, 30 bp, Homo sapiens; identical to SEQ ID NO: 1094
  chr1:213529200-213529230
  hypo

SEQ ID NO: 15358 - DNA, 30 bp, Homo sapiens
  chr1:213562763-213562793
  hypo
gggcgacagggaagcgtggagtctgcgggc

SEQ ID NO: 15359 - DNA, 763 bp, Homo sapiens
  chr1:214556791-214557554
  hypo
ggccccgttgacagccggcgggtcagtccgagacatgctgatggccttggctggcccatgcctcagcaccctggctctggccatggcgggaggaaggctggcttggtcctgcctcagagccccattgctcacactcttccttggaccggggtactcaggcgggggcttgttggggatgcgggccagggccgcctgcagctgggcactgtactccatcttctcccggagcatggggatctggggcaccgattctggagcctcctcctcctcctcctcactctcgctgctgtggattagcatagtggcatcagagaaggtcttcttgtggtgatactgagggagctgggggacctcgtggctgcctgacccctcctcgggcggtccctgctcccggagcgtgttgcggcgagccatggggaggtggagcgacttgagcgtcatggcctccatgccccgcaccatgctgttcatcacctccaggctgtggcgcttgttcacagtgccgtggtgcttggtggccgtgaggggctcgctcacctcctggagagactgatgaaccaccggagagctgtcctcttggaaggtcttcaccgagagctgcaccttccgggtcaccaggtccgggctgctgccgctgacgtacttgtggcggtggctggccaggtctggggtgctggtggcaggtcgtggccgtgggtaggggggcggtggcctgaagagatagttcttaagcatgtgggccgtgctgtagttatggctgccc

SEQ ID NO: 15360 - DNA, 445 bp, Homo sapiens
  chr1:214637792-214638237
  hypo
aatgatggataagatcacagccgtgctaagaataacaggattcttataaacacatcgtcgcttaggccaaaaaacacaacagatgccaaaaaacagatggctggtcccttcggtgagttctccttcacatacccaacacgcatgcacgcgcacatgcgcacacagacacacccctcttacctctcgcagctccagcctctgggccacagcctccaggcattcttgccctgtgctttccaccgacagcgtgcactcgataacattgctgtccagcaggcgaatccgtgtgacaaagcagttcttgctcaggacgttgtagcgccgtgtccggcggagcttcagaccaaaaggcatggctatgtggtcctcggacgccgcccgcctatcctggcgcacacgcccctgagatggccttagcagtttcgtgactggaaaattacactat

SEQ ID NO: 15361 - DNA, 23 bp, Homo sapiens
  chr1:214736761-214736784
  hypo
aaattttttttttttttgagacg

SEQ ID NO: 15362 - DNA, 30 bp, Homo sapiens
  chr1:214788496-214788526
  hypo
attcggtctctgtaccgtaacttgaaagag

SEQ ID NO: 15363 - DNA, 210 bp, Homo sapiens
  chr1:214788822-214789032
  hypo
agcatactgatggctcgtgttttctctgggtggaaaagctgctgtagagaatgagagggagaactagggaattataaaaggacggaatagcatggagggcccagttgagattggagacagaatataagcaggcccaatctgcaaggttgtgtgataatttaaaaaatgtttccttttggctgggctaggtggctcatgcctgtaatccca

SEQ ID NO: 15364 - DNA, 172 bp, Homo sapiens
  chr1:214809711-214809883
  hypo
tatcaatcttgagatcggttggagctgccctttagttctgattgatatcttaattcgatagagtgtcagtttagcagcagggaagcaggatcaggacacggtagatgggagtataataactacaacaggttctgtcttattttaatgatgaaatgaacgcatatacatgaac

SEQ ID NO: 15365 - DNA, 31 bp, Homo sapiens
  chr1:215567332-215567363
  hypo
gaattggtgggttcttggtctcgctgacttc

SEQ ID NO: 15366 - DNA, 149 bp, Homo sapiens; identical to SEQ ID NO: 1114
  chr1:215740889-215741038
  hypo

SEQ ID NO: 15367 - DNA, 27 bp, Homo sapiens
  chr1:215744974-215745001
  hypo
tttttttttttttttccgagacggagt

SEQ ID NO: 15368 - DNA, 43 bp, Homo sapiens
  chr1:215745348-215745391
  hypo
ttttatggaacagtgcatacacggcttctgctgttactgacac

SEQ ID NO: 15369 - DNA, 42 bp, Homo sapiens
  chr1:215764970-215765012
  hypo
caggcgtgagccaccgcgcccggccagcagcctttctttcct

SEQ ID NO: 15370 - DNA, 219 bp, Homo sapiens; identical to SEQ ID NO: 1116
  chr1:216774193-216774412
  hypo

SEQ ID NO: 15371 - DNA, 31 bp, Homo sapiens
  chr1:218897274-218897305
  hypo
gagagagagcataccacgcataagaaaaagg

SEQ ID NO: 15372 - DNA, 600 bp, Homo sapiens; identical to SEQ ID NO: 1126
  chr1:219346992-219347592
  hypo

SEQ ID NO: 15373 - DNA, 167 bp, Homo sapiens; identical to SEQ ID NO: 1127
  chr1:220101043-220101210
  hypo

SEQ ID NO: 15374 - DNA, 242 bp, Homo sapiens; identical to SEQ ID NO: 1128
  chr1:220101370-220101612
  hypo

SEQ ID NO: 15375 - DNA, 129 bp, Homo sapiens; identical to SEQ ID NO: 1129
  chr1:220101674-220101803
  hypo

SEQ ID NO: 15376 - DNA, 234 bp, Homo sapiens; identical to SEQ ID NO: 1130
  chr1:220101864-220102098
  hypo

SEQ ID NO: 15377 - DNA, 39 bp, Homo sapiens
  chr1:220376259-220376298
  hypo
gggtaagagagggagactccgtctcgaaaacaacaaaag

SEQ ID NO: 15378 - DNA, 38 bp, Homo sapiens
  chr1:220426846-220426884
  hypo
ggtagagagtagggggcggtagtcgggggtggtgggag

SEQ ID NO: 15379 - DNA, 768 bp, Homo sapiens; identical to SEQ ID NO: 1133
  chr1:220701600-220702368
  hypo

SEQ ID NO: 15380 - DNA, 31 bp, Homo sapiens
  chr1:220881047-220881078
  hypo
cagggacaggtttgttcgctgctgaatcctc

SEQ ID NO: 15381 - DNA, 30 bp, Homo sapiens; identical to SEQ ID NO: 1135
  chr1:220921517-220921547
  hypo

SEQ ID NO: 15382 - DNA, 619 bp, Homo sapiens; identical to SEQ ID NO: 1137
  chr1:221052168-221052787
  hypo

SEQ ID NO: 15383 - DNA, 30 bp, Homo sapiens; identical to SEQ ID NO: 1139
  chr1:221118798-221118828
  hypo

SEQ ID NO: 15384 - DNA, 43 bp, Homo sapiens
  chr1:222222864-222222907
  hypo
ttagtgacaagggagtgtctacgactgccttctgggtgctttt

SEQ ID NO: 15385 - DNA, 83 bp, Homo sapiens
  chr1:222260738-222260821
  hypo
ggtatgggtgaactctgtgtgcgtttttcataatggagcctgaagcagtacagttagccctcggacagggagcaaatgacctc

SEQ ID NO: 15386 - DNA, 45 bp, Homo sapiens
  chr1:223003689-223003734
  hypo
tcctgacttctttcttccttccgtccttccttccaccttcctttt

SEQ ID NO: 15387 - DNA, 31 bp, Homo sapiens
  chr1:223195635-223195666
  hypo
gatgatgttcaaccatcgcagccaaggagca

SEQ ID NO: 15388 - DNA, 187 bp, Homo sapiens
  chr1:223211674-223211861
  hypo
gggtggccgaggctgcgcgtccacatctcatcattcctggactgttgagattggccattggtgactttacctcctgtctgcgctgtgccagcaaaggtggagcccacaccctggggtagaacagctcttgctcagggagggcccgctctgggcatggttgggctcggggcttcgttgggcccggggc

SEQ ID NO: 15389 - DNA, 20 bp, Homo sapiens
  chr1:223233055-223233075
  hypo
atttgagtcctccttgcggc

SEQ ID NO: 15390 - DNA, 30 bp, Homo sapiens
  chr1:223257526-223257556
  hypo
tcgtgcacagcaggcgcttggagcacgcct

SEQ ID NO: 15391 - DNA, 93 bp, Homo sapiens; identical to SEQ ID NO: 1143
  chr1:223307233-223307326
  hypo

SEQ ID NO: 15392 - DNA, 284 bp, Homo sapiens; identical to SEQ ID NO: 1144
  chr1:223538364-223538648
  hypo

SEQ ID NO: 15393 - DNA, 165 bp, Homo sapiens
  chr1:223813495-223813660
  hypo
cacaattttacctcttcgactccagtgacagagtacgcatgactcttaaccagcttctggctggtgatggcttcggcttcggctgcactggagacctgcgtagagaagaaagtccactcagtggctgaccctgacctctcaggggccggccgtagaatgctttcc

SEQ ID NO: 15394 - DNA, 30 bp, Homo sapiens
  chr1:223853130-223853160
  hypo
atgccttgagtttgcggagagcctggtcca

SEQ ID NO: 15395 - DNA, 30 bp, Homo sapiens
  chr1:223888416-223888446
  hypo
gttttccctgggaacgctttgtgcctatga

SEQ ID NO: 15396 - DNA, 46 bp, Homo sapiens
  chr1:223894487-223894533
  hypo
tctccagaacctggctaggcacggtggctcacatctgtaatctcag

SEQ ID NO: 15397 - DNA, 21 bp, Homo sapiens
  chr1:223899321-223899342
  hypo
tttatttttgatatggagttt

SEQ ID NO: 15398 - DNA, 21 bp, Homo sapiens
  chr1:223899581-223899602
  hypo
aactaccgcacccagccttat

SEQ ID NO: 15399 - DNA, 112 bp, Homo sapiens; identical to SEQ ID NO: 1146
  chr1:223899974-223900086
  hypo

SEQ ID NO: 15400 - DNA, 31 bp, Homo sapiens
  chr1:223907523-223907554
  hypo
gtgtgtgtgtgcgcgcgcgcgcgtataatgc

SEQ ID NO: 15401 - DNA, 63 bp, Homo sapiens; identical to SEQ ID NO: 1147
  chr1:223936689-223936752
  hypo

SEQ ID NO: 15402 - DNA, 69 bp, Homo sapiens; identical to SEQ ID NO: 1148
  chr1:223936995-223937064
  hypo

SEQ ID NO: 15403 - DNA, 18 bp, Homo sapiens
  chr1:223954365-223954383
  hypo
gaatgcaggcccatggcg

SEQ ID NO: 15404 - DNA, 85 bp, Homo sapiens
  chr1:224051423-224051508
  hypo
ccgcctagaagcattcgcagtggacagtggaggggccagacttgtcatactcctcctgcttgctgatccatatctgctggaaggt

SEQ ID NO: 15405 - DNA, 27 bp, Homo sapiens
  chr1:224242939-224242966
  hypo
agtggatgagccaggcgcggtggctca

SEQ ID NO: 15406 - DNA, 20 bp, Homo sapiens
  chr1:224251307-224251327
  hypo
cccagcccaataaagcattt

SEQ ID NO: 15407 - DNA, 30 bp, Homo sapiens
  chr1:224252071-224252101
  hypo
gaaggaaaagaaagcggatccagggttccc

SEQ ID NO: 15408 - DNA, 199 bp, Homo sapiens
  chr1:224300431-224300630
  hypo
cttagtctttgtcttttgtaacgttaacacttttgaataatttatgggcccgtcatctagcgatgtctacctcaaacgcaactcgtgctttttttgcatgaatactacattatgctgcgtccttttcagggtattatattaataggcatatgatattggctcctcctataactgtggcgttagtcttgatcatttggtt

SEQ ID NO: 15409 - DNA, 30 bp, Homo sapiens
  chr1:224327150-224327180
  hypo
ataaatacattttggccgagcacagtggct

SEQ ID NO: 15410 - DNA, 223 bp, Homo sapiens
  chr1:224345146-224345369
  hypo
aaacaaatggtgctggcgtgactgttctcaggcgtgaaatttctgagcttcgcaccaaagtgcaagaacagcaaaaacagcttcaagaccaggaccagaaactgctagagcagacccagatcataggtgaacaaaatgcacggttggcagagctagaacgcaaactacgagaagtaatggaaagtgctgtaggaaattcctcagggtccgggcagaatgagga

SEQ ID NO: 15411 - DNA, 91 bp, Homo sapiens
  chr1:224368627-224368718
  hypo
ctcagactacagacgtaagcctccgcacaccttttggactggtgtgccagttcacacatgcctgtgatagcaactgcgttctgaactgcag

SEQ ID NO: 15412 - DNA, 120 bp, Homo sapiens
  chr1:224386053-224386173
  hypo
gagggccagcatggccgaggcgcctggcagaggaggctctgagagcagaggggagacagagcagtgacacctggagtggaggcctgaaggctgatcagagcccagcgagggtcatgcctg

SEQ ID NO: 15413 - DNA, 29 bp, Homo sapiens
  chr1:224407011-224407040
  hypo
acagaggctggagtgcaatggcgcaatct

SEQ ID NO: 15414 - DNA, 29 bp, Homo sapiens
  chr1:224407159-224407188
  hypo
gggatttcgccatgttggctaggctggat

SEQ ID NO: 15415 - DNA, 29 bp, Homo sapiens
  chr1:224493969-224493998
  hypo
aaaaattttttttttttgagacggagtct

SEQ ID NO: 15416 - DNA, 35 bp, Homo sapiens; identical to SEQ ID NO: 1151
  chr1:224622765-224622800
  hypo

SEQ ID NO: 15417 - DNA, 251 bp, Homo sapiens; identical to SEQ ID NO: 1152
  chr1:224691179-224691430
  hypo

SEQ ID NO: 15418 - DNA, 491 bp, Homo sapiens; identical to SEQ ID NO: 1153
  chr1:224803804-224804295
  hypo

SEQ ID NO: 15419 - DNA, 291 bp, Homo sapiens; identical to SEQ ID NO: 1154
  chr1:224804395-224804686
  hypo

SEQ ID NO: 15420 - DNA, 92 bp, Homo sapiens
  chr1:225113073-225113165
  hypo
gacttctggtttacagaactgcgagcataacattttcttgttttaagaacaaatttgtggccaggcgccatggctcacgcctataatcccag

SEQ ID NO: 15421 - DNA, 509 bp, Homo sapiens; identical to SEQ ID NO: 1158
  chr1:225117199-225117708
  hypo

SEQ ID NO: 15422 - DNA, 21 bp, Homo sapiens
  chr1:225118300-225118321
  hypo
accatacttttttttttgaga

SEQ ID NO: 15423 - DNA, 13 bp, Homo sapiens
  chr1:225581811-225581824
  hypo
cgcccggccacag

SEQ ID NO: 15424 - DNA, 409 bp, Homo sapiens
  chr1:225597843-225598252
  hypo
tcacatggatggcctcgtcctcctctcaagcagccttggaggcaggccatgctcccctcactttgtgtgcaagaagccgaggctctgacaggtcactcacccactcaaagccatctgactccaaggcctcggctcttaaaattaattacctcattccagagagcatccaccacatagagaagctggaaactattaactaaaatcatggccaaggatggaacagcgcggtcctgtattttcatttcagccaaaagcatcaccaagttaataaccacctgaaacaaaaggggaaagtatatagcctcaaagcacctccccagagaccttagcactacaaaggcatgagtgagcttcacagctgagacacctggcagacgccaccgtaactcctacccgccaccaggaataa

SEQ ID NO: 15425 - DNA, 30 bp, Homo sapiens
  chr1:225598546-225598576
  hypo
aaaaactggtgaactcgactgaggcctgtg

SEQ ID NO: 15426 - DNA, 34 bp, Homo sapiens
  chr1:225608022-225608056
  hypo
aaacaactttgatctttcacgtaatcagactgaa

SEQ ID NO: 15427 - DNA, 605 bp, Homo sapiens; identical to SEQ ID NO: 1160
  chr1:225614687-225615292
  hypo

SEQ ID NO: 15428 - DNA, 98 bp, Homo sapiens
  chr1:225637319-225637417
  hypo
tagagcacaggagtctgcaagcggttgatttggtctcctctacccggcccctccctctctctggaccctgcaatgtcgaggtagagagtgttattccc

SEQ ID NO: 15429 - DNA, 31 bp, Homo sapiens
  chr1:225645397-225645428
  hypo
agttttgtaaatcatacgcctaagagacttg

SEQ ID NO: 15430 - DNA, 30 bp, Homo sapiens
  chr1:225651944-225651974
  hypo
ttgagggcacttcacgttccagggagagca

SEQ ID NO: 15431 - DNA, 30 bp, Homo sapiens
  chr1:225842738-225842768
  hypo
tagaagcagtgacccggagctatggcagag

SEQ ID NO: 15432 - DNA, 23 bp, Homo sapiens
  chr1:225988362-225988385
  hypo
cttctgagcgcccagcttaccca

SEQ ID NO: 15433 - DNA, 31 bp, Homo sapiens
  chr1:226053431-226053462
  hypo
ggagccactccatacacgtgtggcagggcca

SEQ ID NO: 15434 - DNA, 128 bp, Homo sapiens
  chr1:226062818-226062946
  hypo
gattcccctgaaggcaggccccgcaggccctgcaatcccccagcagagagcatgcatgcaggcagcaaggcaccacgagaacctgtgctcgggctggcttggcctccgtaagctgggacacctcagca

SEQ ID NO: 15435 - DNA, 263 bp, Homo sapiens
  chr1:226077114-226077377
  hypo
gtagaggtggggctctcgttctctgcaagaggctcagttcccccagctgctggtaagtggacctagagtcttgttccttgctgcaaccaaacaactgacaggaaccagaatggctcaggcaacgccagggctctaagggccaatccagtctgcagggatgagcatccgggcccgtgctcagagggtcccggggcctcatgagatcctgagctggtggtccccagttgtgaaaccagatttcccactgttctggggggaccttc

SEQ ID NO: 15436 - DNA, 148 bp, Homo sapiens
  chr1:226102815-226102963
  hypo
ggctgaggctgactctcggtgtttctttggagagcgttgcttagtaacagttgcaggggacacgcacagacagggggatgaaagaaggatgcaggagatgagggagggtgcatttgttttctagcatgccccacgagtgggagcagtg

SEQ ID NO: 15437 - DNA, 356 bp, Homo sapiens
  chr1:226109457-226109813
  hypo
gtgcccaagaggtgggcgccacccccagtccaagcctgcctgccagcccatcttgctgcctgggttcctagaaggctgagcgagcaaatgagggcctcacataggcaggcccgctgccactgagccccgtgacggcatcgatgaggtcctcttccacctcagtgcagaagcccacgctgctcatgagctgctccaggagctgcccatcctccaccagggcatgggtgcccgtggcgtacactgtagcgccttcctgcactaccacaggtgtgttggtcatgcagcgaatcactttgggggctggctggaatgccatcagcttctagggtgagggagagagccgaatgagtggccag

SEQ ID NO: 15438 - DNA, 227 bp, Homo sapiens
  chr1:226163117-226163344
  hypo
ataacacaaaaataaagacatggttgtatacacagacactgaaattcctctagcggaaaacaacagcaaatgattaaagataacgttgtttgttgaggacagaagtaataatgttatgggatattcagcaagactaaatgatttattcaccacctgtacagtgaaaactgaagctaaatctgagaattaaggaatcagaaagaacagggcgccgggcgcggtggctc

SEQ ID NO: 15439 - DNA, 31 bp, Homo sapiens
  chr1:226250006-226250037
  hypo
ccgccgcgcctccgcccgccttcccctcccc

SEQ ID NO: 15440 - DNA, 40 bp, Homo sapiens; identical to SEQ ID NO: 1165
  chr1:226297511-226297551
  hypo

SEQ ID NO: 15441 - DNA, 120 bp, Homo sapiens; identical to SEQ ID NO: 1166
  chr1:226411103-226411223
  hypo

SEQ ID NO: 15442 - DNA, 173 bp, Homo sapiens; identical to SEQ ID NO: 1167
  chr1:226411246-226411419
  hypo

SEQ ID NO: 15443 - DNA, 268 bp, Homo sapiens; identical to SEQ ID NO: 1168
  chr1:226411632-226411900
  hypo

SEQ ID NO: 15444 - DNA, 21 bp, Homo sapiens
  chr1:226643671-226643692
  hypo
cagctgcggtgtcttcatgga

SEQ ID NO: 15445 - DNA, 279 bp, Homo sapiens
  chr1:226789938-226790217
  hypo
tgctctggaaagcactgtgggcgcaggcaccagagcatcagagagtggggtggagatgagaacgcccacagagaggctgggatgctccggcaggctccaactggccttgctgtacccactgcccaccgcaaaggcacgccacgtctgctgggccgggccacaccgggccctgtctgggtgagcaggggctcaccaaggggacaggactgtggtagacccgtcctgtgggaccccacctgcctcaaaatctggtgccccgagtgtttactgtgtggtctc

SEQ ID NO: 15446 - DNA, 31 bp, Homo sapiens
  chr1:226822615-226822646
  hypo
gctgaagcccgggcctcgccctccccactgc

SEQ ID NO: 15447 - DNA, 209 bp, Homo sapiens
  chr1:226908274-226908483
  hypo
tacataaagtatttgacggaacatgcctggcacataataggcacttctgaaatcattgctgctattatttttattattattgtgcatcctaagactgtttagtattttttacagccgtaccacctgttaattcatattgaactggtagtaaaattataactcccagtgaatttcaaaagaaatattggccgggcgcggccgggcgtggt

SEQ ID NO: 15448 - DNA, 31 bp, Homo sapiens
  chr1:226911753-226911784
  hypo
acccctgttctgcacccggtacttgagctgc

SEQ ID NO: 15449 - DNA, 2083 bp, Homo sapiens; identical to SEQ ID NO: 1170
  chr1:226924900-226926983
  hypo

SEQ ID NO: 15450 - DNA, 30 bp, Homo sapiens
  chr1:227163981-227164011
  hypo
gggctgcgggactgcggggctgtgggactg

SEQ ID NO: 15451 - DNA, 122 bp, Homo sapiens
  chr1:227175822-227175944
  hypo
gtttctgaaatttgggattgccgagtagcagacccagtgggctccgggacaggatggagaggcctgggtggcgtccgtgaggctgcctggctagcagcggcgcccagcaccactgtcagatc

SEQ ID NO: 15452 - DNA, 31 bp, Homo sapiens
  chr1:227248037-227248068
  hypo
tgaaccatatctacttcggcaatttctaaca

SEQ ID NO: 15453 - DNA, 25 bp, Homo sapiens
  chr1:227318266-227318291
  hypo
aggggaggtgtaggtgcggtggctc

SEQ ID NO: 15454 - DNA, 45 bp, Homo sapiens
  chr1:227376421-227376466
  hypo
cagagcatttttagggcagtgaaattattccgcataatactatta

SEQ ID NO: 15455 - DNA, 120 bp, Homo sapiens
  chr1:227422354-227422474
  hypo
cctattctatccaccacgtgagcaccatttcaatatggctctcagctcccatgtgacggaggcagacagacattcccaagttcaaaatttgtaagcctcactacacgccttcctacaaag

SEQ ID NO: 15456 - DNA, 35 bp, Homo sapiens
  chr1:227463300-227463335
  hypo
cctctccccctccccacggtctcccactttccatg

SEQ ID NO: 15457 - DNA, 31 bp, Homo sapiens
  chr1:227545941-227545972
  hypo
atttaatgggactggccgggcgcagtgggtc

SEQ ID NO: 15458 - DNA, 211 bp, Homo sapiens
  chr1:227618269-227618480
  hypo
tactcaacaccagcatcggtgggcggtggaaaaaaagcctttgccatcactgccatttaggctgtgggtcgaagatatgctcatgcggtgttgaggaaagcagactttgaccacaccaagagggcaggagaactcactgaggatgaggtggaacgtgtgatcaccattatacaggatccatgccagtacaagatcccggactggttcttga

SEQ ID NO: 15459 - DNA, 206 bp, Homo sapiens; identical to SEQ ID NO: 1175
  chr1:227652538-227652744
  hypo

SEQ ID NO: 15460 - DNA, 34 bp, Homo sapiens
  chr1:227730784-227730818
  hypo
ctggactctccctaggcgtcggggttccttcctg

SEQ ID NO: 15461 - DNA, 30 bp, Homo sapiens
  chr1:227750842-227750872
  hypo
ggcgcaccggaatgcgcctcccctttccac

SEQ ID NO: 15462 - DNA, 205 bp, Homo sapiens
  chr1:227948692-227948897
  hypo
agcattatagctaatacgcatgcatgtatacatatgtacacatgtgtatcaatgcctatgtattgtgcatgtatgtgacatgtacgtccacactataatgcgtgtctatacgtacagcatgtaaagctgtattcttcaggattttaaatgccaggtgtctgttaaaagtaagagatatttgctaccctttcggtttctctaattt

SEQ ID NO: 15463 - DNA, 181 bp, Homo sapiens
  chr1:227962707-227962888
  hypo
tctgagcagcgaggccgccgtgctcattgcctcgacccaccgccgcgggggcgtcctgaggaggggggccctgcatctgcccccccggctagtgcacagaccaccttggcctccaggaatgcagcggaggggacttgggcgggccgcagggtggtctgcgagtgccgagtgtgacagatcg

SEQ ID NO: 15464 - DNA, 142 bp, Homo sapiens
  chr1:227963168-227963310
  hypo
tccggcgtcgcgaggcgagccagagcagacatgtcccatgggacacaagagccgatgtcccgcagagtttggaggccaaggccgtgcgtgcctctggagcactgtcttcccgggctgctggtggcagcgaacgcacaaggct

SEQ ID NO: 15465 - DNA, 30 bp, Homo sapiens
  chr1:228003923-228003953
  hypo
ggtgctgtcagctgcgcactgctttcacag

SEQ ID NO: 15466 - DNA, 166 bp, Homo sapiens
  chr1:228082123-228082289
  hypo
gactcagacacagggtgtccacgatgcaagcatccacgcacgtgcccatgccacatgcacacaaccatgaagggtgtccatacacaagccccggacacatggtgcttgcaggcatgcgcctgggacctttggttttcacgaacgcgtccatgctcttcacatggac

SEQ ID NO: 15467 - DNA, 366 bp, Homo sapiens
  chr1:228109225-228109591
  hypo
ttgcaggtgtagacctcctcacgctgcgtgcactgcctgcactccacatagcagcaccaacgcacctggcactggcagggccttgtcaccacccggctctgtgtgttatggccgcggccacagcagatgctctcgcagttcttctcacggtggcacctacggccagcggtgcccggggagaagcggccagccaggcagaagctaggcgagtcatccaggtgcaccagctctggagtgcggggcagcgggtcgctgccacctgcccccgaggcacggccccgtggtggggagatggcacctgcctcgccggcagcttcattggtggtgctgcccaccttgagtgccgtctcatacttgtgcttcaga

SEQ ID NO: 15468 - DNA, 30 bp, Homo sapiens
  chr1:228111960-228111990
  hypo
actgccaggcctcacggttctccaggtcgg

SEQ ID NO: 15469 - DNA, 306 bp, Homo sapiens
  chr1:228112929-228113235
  hypo
gggccttcctgagggccaggccggccacactcacctcgcttgagcaggctggcccggtagcggccctccagcgtgcagttccagcgctcaaagcggaactggaactggcactcgagcgcactcatgctcacggcctccaccagcgtctctgccacgcccgggtcccggcggcacatgcgccgctgcttccgctccagcttcagccggtcgcaggccttgtagtgcgcctgggcagccgcctctggctccagggtcagcgggaggatggtcaggggctcgctgcccgtcagcctgggcacagagagg

SEQ ID NO: 15470 - DNA, 30 bp, Homo sapiens
  chr1:228114206-228114236
  hypo
atcctgggactgaccgagcatgctctgcag

SEQ ID NO: 15471 - DNA, 630 bp, Homo sapiens; identical to SEQ ID NO: 1176
  chr1:228134673-228135303
  hypo

SEQ ID NO: 15472 - DNA, 388 bp, Homo sapiens; identical to SEQ ID NO: 1177
  chr1:228135362-228135750
  hypo

SEQ ID NO: 15473 - DNA, 237 bp, Homo sapiens; identical to SEQ ID NO: 1178
  chr1:228135899-228136136
  hypo

SEQ ID NO: 15474 - DNA, 30 bp, Homo sapiens; identical to SEQ ID NO: 1179
  chr1:228194901-228194931
  hypo

SEQ ID NO: 15475 - DNA, 1069 bp, Homo sapiens; identical to SEQ ID NO: 1180
  chr1:228195507-228196576
  hypo

SEQ ID NO: 15476 - DNA, 104 bp, Homo sapiens
  chr1:228281207-228281311
  hypo
aagctgtctgtgtgccgatgtcttgacacctgagacttcaggttcacccatcctggttctgccattccattgcagggtggcttccctcctttggggactcttaa

SEQ ID NO: 15477 - DNA, 267 bp, Homo sapiens
  chr1:228322364-228322631
  hypo
aaagacacatctcaattcctgcgtggcaggccaagaataaaataaaggagaacgcagcacaccattcccactggtcaagtggtcgaacccaacatccaagacccagccagcagccaagctcagcgcaacctcccgacctctgactctgactgcaacagggtgagcacatcgccctcgcacacggggccttttacattgtggatgatggagcggctcgcatcctccataaattccatgcacacctgcgaccactgtcctttagagccc

SEQ ID NO: 15478 - DNA, 30 bp, Homo sapiens
  chr1:228397962-228397992
  hypo
ggagggcctgggaacgttgccctggctcag

SEQ ID NO: 15479 - DNA, 30 bp, Homo sapiens
  chr1:228403112-228403142
  hypo
actcatgctatggtcgctctgtgtgttggc

SEQ ID NO: 15480 - DNA, 31 bp, Homo sapiens; identical to SEQ ID NO: 1182
  chr1:228444739-228444770
  hypo

SEQ ID NO: 15481 - DNA, 665 bp, Homo sapiens
  chr1:228461795-228462460
  hypo
tgtcccagagctggacaggggcgaagctggggctcaagtctggtctgttaagagcccggctgatgtcccctttgtgcccacagaggtggccgccaagttctgccggctgctggagcctgtgtgcggcgagctgggtggcacggtgacactggcctgcgagctaagcccagcgtgtgcagaggtggtgtggcgctgcggcaacacgcagcttcgggtgggcaagcgcttccagatggtggccgaggggcccgtgcgctcactcactgtgttggggctgcgcgcagaggacgcaggggagtacgtgtgtgagagccgtgatgaccacaccagtgcgcagctcaccgtcagtggtatgtaaggggtcgagtgtccctatccagggcagcctcctggaggaggcggcctttggtactcctgcagcgtaagggctctgccagtcctgtgcgcccgcctcttaagcagtgctcctgtctgcagtgccccgagtggtgaagtttatgtctgggctgagcaccgtggtcgcagaggagggcggcgaggccaccttccagtgcgtggtgtcccccagtgatgtggcagtcgtgtggttccgggacggtgccctgcttcagcccagcgagaagtttgccatatcacagagtggcgccagccacagcctgaccatc

SEQ ID NO: 15482 - DNA, 30 bp, Homo sapiens
  chr1:228465476-228465506
  hypo
ccggagagtcctggcggaagatgcaggaga

SEQ ID NO: 15483 - DNA, 30 bp, Homo sapiens
  chr1:228473689-228473719
  hypo
tctgtcctggggagcgtctgtcctggggag

SEQ ID NO: 15484 - DNA, 30 bp, Homo sapiens
  chr1:228473918-228473948
  hypo
gagctcaatgagatcgatgcccagcccggg

SEQ ID NO: 15485 - DNA, 30 bp, Homo sapiens
  chr1:228504746-228504776
  hypo
agagcttgcgagtgcgtgggtgaccatcct

SEQ ID NO: 15486 - DNA, 30 bp, Homo sapiens
  chr1:228509635-228509665
  hypo
ttcctgagtgcagacgagggccctgcagag

SEQ ID NO: 15487 - DNA, 30 bp, Homo sapiens
  chr1:228510971-228511001
  hypo
atgtggcagccggacgtgatcattgttccc

SEQ ID NO: 15488 - DNA, 31 bp, Homo sapiens
  chr1:228525868-228525899
  hypo
gggtcctcaggggtcccggaggcccctagca

SEQ ID NO: 15489 - DNA, 52 bp, Homo sapiens
  chr1:228528449-228528501
  hypo
acagacagaactgcgcgctgctggagcaggcctatgccgtggtgtctgccct

SEQ ID NO: 15490 - DNA, 626 bp, Homo sapiens
  chr1:228528721-228529347
  hypo
gggtggctgtggggcctgcaccgctgggcaatctggcccaccacaggctgaccgcagcccacaccctcccccagggccacttcatcgtgtgggagggtgcaccgggggcccgcatgccctggaagggccacaaccgtcacgtgttcctcttccgcaaccacctggtaatctgcaagccccggcgagactcccgcaccgataccgtcagctacgtgttccggaacatgatgaaggtctgcaggctctgggctgctgggcggggctccctgtccctcagcgccggggtggatgccagtggccacacctgcagccgctggtccagggtggcctgaatgtttcctcgtcgggtcccacatctgttgaggatggtcagcccgtgtccccctccctgtgctgacaccctcccccacccacagctgagcagcatcgacctgaacgaccaggtggagggggatgaccgcgccttcgaggtgtggcaggagcgggaggactcggtgcgcaagtacctgctgcaggcacggacagccattatcaagagctcgtgggtgaaggagatctgtggcatccagcagcgtctggccctgcctgtgtggcgtgagtgtccaccttcccgggggcccaggtgg

SEQ ID NO: 15491 - DNA, 204 bp, Homo sapiens
  chr1:228552501-228552705
  hypo
ccttcacaggcctgacgctcgttcactctgtccgatgcctctgcagagtgggcatgggttgtcctgctctggccatgaccccacccaccctgcctgtggcaggcatccgtcccactcgtccacctgcttgaagctcacgtgtacccgactcctacagccacctgccctgtctcccagcagccgtgcccccgagggtgccacagc

SEQ ID NO: 15492 - DNA, 103 bp, Homo sapiens
  chr1:228559068-228559171
  hypo
gtgccccggcacagcgtcatccgcagcctgttctaccaccaggcgggtgagagccctgagcacggggccctggccccggggagcaggcggcacccggcccggc

SEQ ID NO: 15493 - DNA, 30 bp, Homo sapiens
  chr1:228612803-228612833
  hypo
tctcgcgcatcagccgctggaagggcaact

SEQ ID NO: 15494 - DNA, 387 bp, Homo sapiens; identical to SEQ ID NO: 1186
  chr1:228644856-228645243
  hypo

SEQ ID NO: 15495 - DNA, 601 bp, Homo sapiens; identical to SEQ ID NO: 1187
  chr1:228645305-228645906
  hypo

SEQ ID NO: 15496 - DNA, 121 bp, Homo sapiens; identical to SEQ ID NO: 1188
  chr1:228646025-228646146
  hypo

SEQ ID NO: 15497 - DNA, 1154 bp, Homo sapiens; identical to SEQ ID NO: 1194
  chr1:228870816-228871970
  hypo

SEQ ID NO: 15498 - DNA, 224 bp, Homo sapiens
  chr1:228919236-228919460
  hypo
taagtgcttattacttcccaacgacggggagatgcacacaagcatctaatgtggtgggtggtactagatcgccatgattacctctgcagccacttttggacgctcgatgcagccacattagacactgaccgaggccactgcacacagaccgggtgctgggtattgcgggaaccaaggagcaagccagccagtcctggggctccgtcagcatctggtccactgga

SEQ ID NO: 15499 - DNA, 47 bp, Homo sapiens
  chr1:229073290-229073337
  hypo
gtcatctccggccctacgttctcaggtgtgaacggtggagtcagggg

SEQ ID NO: 15500 - DNA, 28 bp, Homo sapiens
  chr1:229104135-229104163
  hypo
tttttttttttttttttgagacggagtc

SEQ ID NO: 15501 - DNA, 37 bp, Homo sapiens
  chr1:229104402-229104439
  hypo
ggattacagacgtgagccaccgcgcccggccccacat

SEQ ID NO: 15502 - DNA, 30 bp, Homo sapiens
  chr1:229104640-229104670
  hypo
tcaaagctggctgcccgtgcctgtgagggt

SEQ ID NO: 15503 - DNA, 31 bp, Homo sapiens
  chr1:229116092-229116123
  hypo
agcaagtgatgaagggcgacccaggccatct

SEQ ID NO: 15504 - DNA, 30 bp, Homo sapiens
  chr1:229155651-229155681
  hypo
agcaaaaggaaagggcgacatggcccgctc

SEQ ID NO: 15505 - DNA, 65 bp, Homo sapiens
  chr1:229160201-229160266
  hypo
gcatgggctctggaggaccagcgcctctgactctctatggccccgggcaagtctccaggtctcca

SEQ ID NO: 15506 - DNA, 159 bp, Homo sapiens
  chr1:229202156-229202315
  hypo
tatgtgggaaggggtgcggagcttccatgccctccctaagcgccacgctccaagaacctccatgtgtccagctatggggaagttccccacaccctgtcctcttgggtttttatggaagcttcgtgacatcagcattcctttccccgctttacagggtgg

SEQ ID NO: 15507 - DNA, 31 bp, Homo sapiens
  chr1:229210259-229210290
  hypo
cttgtctgttcttttacggaggacatgctgt

SEQ ID NO: 15508 - DNA, 31 bp, Homo sapiens
  chr1:229252144-229252175
  hypo
tccctcagcagaggccgcgtatcacactgga

SEQ ID NO: 15509 - DNA, 117 bp, Homo sapiens
  chr1:229462408-229462525
  hypo
gatgcccgatgacaggcgcatggcccagctggccactctcaaagggaacacagaaccacaagggcccagagcgcacctcgtgcacaggagcggacgcacagacgttgtgagtcttct

SEQ ID NO: 15510 - DNA, 30 bp, Homo sapiens
  chr1:229606454-229606484
  hypo
cggctgacagcttttcggcatgctcacaga

SEQ ID NO: 15511 - DNA, 161 bp, Homo sapiens
  chr1:229645077-229645238
  hypo
gttggcttttccgtccgtgttgtacttccagcacttcccacttgcactccacattccgagaacttaaaaacccaaatctccctccagtgcccatgtccatgtttctctcacctggaatgcactccctgccttgttggtccagaaggcgcctaccttccgca

SEQ ID NO: 15512 - DNA, 36 bp, Homo sapiens
  chr1:229678577-229678613
  hypo
caaaaaaccccattatcgggtggggtgtggtggctc

SEQ ID NO: 15513 - DNA, 30 bp, Homo sapiens
  chr1:229764636-229764666
  hypo
tggtgtggagagcagcggtcatatccagtg

SEQ ID NO: 15514 - DNA, 201 bp, Homo sapiens
  chr1:230219679-230219880
  hypo
atggaggagctggagccgtggacaggcctgagctcatctccatcagcacccggatgttggcgtacatgcctgtgaaggtgagggtctgcacttccagcagccctccccctttgtatgtcactttggacacccgagatttccctgatttgcctggagcctctgtgtaatttttaatttgatcccctgcgtcccagtggactg

SEQ ID NO: 15515 - DNA, 220 bp, Homo sapiens; identical to SEQ ID NO: 1200
  chr1:230223229-230223449
  hypo

SEQ ID NO: 15516 - DNA, 308 bp, Homo sapiens
  chr1:230256220-230256528
  hypo
acctccacacatccctggagtcggctttggggaacactgtgttccatgtctaagtggagtcccgggcctctcccctccagtgtcgcctgtgccagctggacacgaagcagcagatcagtcatgaaaatggctgctcagctccgatctgcccttccttccgcaggactcagggacgcacagctccccagggctggtcacccaaacaacagcattcctttctcctcggcctctccccaggctgcttgggagagaaaacttccctcatcctcctccgcacacactaaatgccctgccggtatcttctttcc

SEQ ID NO: 15517 - DNA, 156 bp, Homo sapiens
  chr1:230266282-230266438
  hypo
gtttactagggagtcagccagcgtgagtcacgtggtatcaggaacaccgggccctggggaccgacccctgtgtctcccctaagtaggatgctcccatgcaggagcagaaggacaagcagcccggagctgctgcccggctgtgcccaaagtgggatt

SEQ ID NO: 15518 - DNA, 28 bp, Homo sapiens
  chr1:230284900-230284928
  hypo
tacaggcgtgagccactgagcctagcct

SEQ ID NO: 15519 - DNA, 219 bp, Homo sapiens
  chr1:230308316-230308535
  hypo
gcacagtgccctgcacgcatagattcgatcaatagtgcctaaggggcttgctcatcttccagccactgtacctcctcatccccacggcgcctttcctcctccactcccctgaccacttgcctttggcaactgagccaagaacacttcttatttttttcttatttggatcagagacagattatactgggaatattctattaacaacgaaacctatattta

SEQ ID NO: 15520 - DNA, 30 bp, Homo sapiens
  chr1:230393123-230393153
  hypo
cctgtaacagcgtttcggtcggtgacagta

SEQ ID NO: 15521 - DNA, 77 bp, Homo sapiens
  chr1:230393523-230393600
  hypo
agaagggaggtagagcgggaaattaatttagggtgatgcccaggagctttgttacacaactgcgctggcgtgctgcc

SEQ ID NO: 15522 - DNA, 31 bp, Homo sapiens
  chr1:230398380-230398411
  hypo
tgccttctgctagaaacgttccttatggaaa

SEQ ID NO: 15523 - DNA, 428 bp, Homo sapiens
  chr1:230404049-230404477
  hypo
tctggtctgtggatgacaaaacggacgaggtgcccacccaggttccgtactgtctgggtgttgggcctcttgtgatccctggccagcctcacctccgtgtttaatctctggagttcccactgtcactctgcagtgttctgatgatttatggaaggttggagaggtcactcctttctgtgtcagcgcctctgctggaaagcgacacaccttacgctacagcacattaaacagaagcgtgtgctcaggccccggccgagagagttcgtcatcagagtctcgggccccagcttcatcccctgtgcgtcaggctctgtgactggctcaccccccgccagcattgcaccttaattaccgcacagctagtaacacgagacagagtctgggccctgtggaggtggcaggtctacgggaaccaaagactttgtctg

SEQ ID NO: 15524 - DNA, 31 bp, Homo sapiens
  chr1:230414970-230415001
  hypo
aggtcctgaattcacacgaatctgtttgtac

SEQ ID NO: 15525 - DNA, 30 bp, Homo sapiens
  chr1:230417081-230417111
  hypo
ggagtaactccgcacgcttctgtctttcac

SEQ ID NO: 15526 - DNA, 31 bp, Homo sapiens
  chr1:230446596-230446627
  hypo
ttaattacatatttttcgttttaactctgtt

SEQ ID NO: 15527 - DNA, 119 bp, Homo sapiens
  chr1:230821540-230821659
  hypo
gtgctgagcaccagcccggcgggtccttgctgggacctcggattgcagtgctgccctttctctggggacagcgtgagtaacagacactcaggtaaaccagtcatcgcagtgtgaggagt

SEQ ID NO: 15528 - DNA, 31 bp, Homo sapiens
  chr1:230872266-230872297
  hypo
aaaaaaagaattatttcgaacacttttgttt

SEQ ID NO: 15529 - DNA, 198 bp, Homo sapiens
  chr1:230882794-230882992
  hypo
accaacctcccttccgactacaaaactctgccattctctgatgcaggagatgggactcaagaccacaccgtgcacttctccgtaaagccacctcctggaccagttgggtttcttgctccttttccttctgaagcaatcctctctctcccatgaggccccctgagcgcactaagcagaggtgccgcctctgagtggaat

SEQ ID NO: 15530 - DNA, 208 bp, Homo sapiens
  chr1:230898633-230898841
  hypo
gtttgcaggtgaggctcggcaggacccaaccctctcagggctcaagcggggttggaggtggttttcctgtcgtagcctagatgtgcccatctttgggagcagtggctacattcatgaccctttttctccctgggccatgaatctggcctttggaagagctgggaaggcaagcggaggggaattctggctgtgccgacagcacttagtg

SEQ ID NO: 15531 - DNA, 343 bp, Homo sapiens
  chr1:230979559-230979902
  hypo
gacagtggtctgggctcgctggcggcggtgccgttgctcggctcctggatggatagggcggagatactgaactccatctgactctagggtgggacatgagaaaggacagaaaaaagaaagagatcctgagaatcgaccgtcacaagtgtgccagctcacgcacccctcctcagcataaggacgcacaccagccacacacgagttgttgcccatgtgctggaactgtctgtcctgagtggtgggtatggtcaggactcccatcgcacacctgaaatgcatcagaagcttaaatgccaaggccgggtgacagagtgtgggtggtggtcccctcccaaatctcatg

SEQ ID NO: 15532 - DNA, 121 bp, Homo sapiens
  chr1:230980021-230980142
  hypo
tcctcatgagatctggtcgtttaaaagggtgtggcacctccccctgactctctccctcttgctcctgctctgccatgtgagatacctgctctcctccgccttccaccatgagccacagccc

SEQ ID NO: 15533 - DNA, 31 bp, Homo sapiens
  chr1:231012508-231012539
  hypo
acagaggtgacatatgcgaaggcccctccct

SEQ ID NO: 15534 - DNA, 35 bp, Homo sapiens
  chr1:231037830-231037865
  hypo
acttagaaaaaattggccaggcgccgtggctcacg

SEQ ID NO: 15535 - DNA, 500 bp, Homo sapiens
  chr1:231038104-231038604
  hypo
gcaataaagagagactctgtctcgggattaaaaaaaaaaaaaaaaaaaaaaaaaggaaagaaaaatgccagccgtagtaagtgcttaaaacacattagctcccgaagggccccaaaccctggagacagaagcatccggttgcaacccctcatccctcgagaggtggcagcaagccttatagggaagcccaagcccaagcccagtgtggcatagaatagagcagggggcccgcagggagcctccacaatggcaggagttctgcacgctcagtaccggtagcccagggctctggaggtagagaagtctgcggaccagccggaggaggccgaagaggcagcgcatgcgctgttggccagcggacccgagcgggcagaggtcaatcaacagtagacgctgtacccactgaggcttgctgccctagcacagggagcatgagctaaacctcagtgcggaggatctgggcaaaggcccgagggtggccaagacgcctggctcaggaa

SEQ ID NO: 15536 - DNA, 25 bp, Homo sapiens
  chr1:231104726-231104751
  hypo
gaaagcttagggggctgggtgcggt

SEQ ID NO: 15537 - DNA, 25 bp, Homo sapiens
  chr1:231104990-231105015
  hypo
aagcgacactccatctcaaaaaaag

SEQ ID NO: 15538 - DNA, 202 bp, Homo sapiens
  chr1:231122191-231122393
  hypo
agaaggtttttacactcgcaactcttctattttatcttctcagagtttccaaatgttatgcgtttgaattgtagccattccagtagtccccgttctctttggggtatatgttccaggacccacagtgagtgcctgaaaccacagatagtatggaacccaattaccatccatcggaacacgtttctgttcgtgccttccaccc

SEQ ID NO: 15539 - DNA, 41 bp, Homo sapiens
  chr1:231127689-231127730
  hypo
actactgctaccctccattccctccacggctgccacactgt

SEQ ID NO: 15540 - DNA, 1105 bp, Homo sapiens; identical to SEQ ID NO: 1207
  chr1:231297602-231298707
  hypo

SEQ ID NO: 15541 - DNA, 31 bp, Homo sapiens
  chr1:231367187-231367218
  hypo
tctcttccctcctacccgctccactgaagta

SEQ ID NO: 15542 - DNA, 32 bp, Homo sapiens
  chr1:231409277-231409309
  hypo
tgagccaccgcgcccagccagaaattttttaa

SEQ ID NO: 15543 - DNA, 146 bp, Homo sapiens
  chr1:231475673-231475819
  hypo
tagactgctgtgaattcgcctgtatgtatcgttaaaaaaagtcactttgccctcagtgaaagcttgaattatggggcaaacaataatgaacaccttatgttttttatagtgcttcatagtaaaaaaaaaaaaaacaaaaaaaaggc

SEQ ID NO: 15544 - DNA, 16 bp, Homo sapiens
  chr1:231476446-231476462
  hypo
ggcaggaggatctctt

SEQ ID NO: 15545 - DNA, 31 bp, Homo sapiens
  chr1:231476521-231476552
  hypo
caacaagagcgaaactctgtctcaaaaaaaa

SEQ ID NO: 15546 - DNA, 30 bp, Homo sapiens
  chr1:231663377-231663407
  hypo
aagcttacatgggaccggatcacagcgctg

SEQ ID NO: 15547 - DNA, 205 bp, Homo sapiens
  chr1:232192428-232192633
  hypo
ggcgtgagccaccgtgctcggccgactttgtcttttttaaggttgaatccccagcgcgtaaaacaatgtccggcatgtagacaatcaatcaacgcttgttaaatggaaaaaaattacttcagcaatggaagcgtggaagtaatgcccttacgtttgactgtgttttatctaatatcattgggccgactcaggaattcttgtgaag

SEQ ID NO: 15548 - DNA, 199 bp, Homo sapiens
  chr1:232566619-232566818
  hypo
aggtggggagctccagcggagacacaatctcagtctcctctagtgtgcacacaacctgcgactcaagagacacaaacccctttctcacctcattctggacactgcctcgctctcactgagcattagtgccatcaaaccagtgcgtggaaatgcataaaccctgggcttttgcattaaaactgtccgaatgggctccttt

SEQ ID NO: 15549 - DNA, 61 bp, Homo sapiens
  chr1:232649853-232649914
  hypo
taaggacaactaaggacgaggtcgttacttttcccatcaccctcatcggcatccaggttct

SEQ ID NO: 15550 - DNA, 425 bp, Homo sapiens; identical to SEQ ID NO: 1211
  chr1:232765595-232766020
  hypo

SEQ ID NO: 15551 - DNA, 45 bp, Homo sapiens
  chr1:232909164-232909209
  hypo
aaacggcagaacagcgcggcagagaaggagcgaaaagaaggaaca

SEQ ID NO: 15552 - DNA, 204 bp, Homo sapiens
  chr1:233085193-233085397
  hypo
ccaaggccactgccacgtcattcgttggccggaacacttgcagtggtaaagtgagacggagaagctatttaattctttgcaagaggagatctttatacactttggtgtgaaagtaaagagggaaaactgggcgtcctatgcatggctgaggacgggaagcctgcctacaccagtggttctcaaccctagcgcacttcaggaact

SEQ ID NO: 15553 - DNA, 30 bp, Homo sapiens; identical to SEQ ID NO: 1213
  chr1:233143151-233143181
  hypo

SEQ ID NO: 15554 - DNA, 33 bp, Homo sapiens
  chr1:233264702-233264735
  hypo
tgacagtgtgctggcagccctcgctcactcttg

SEQ ID NO: 15555 - DNA, 16 bp, Homo sapiens
  chr1:233465111-233465127
  hypo
tctatgggccaggcgc

SEQ ID NO: 15556 - DNA, 17 bp, Homo sapiens
  chr1:233465426-233465443
  hypo
aatatgattttattatt

SEQ ID NO: 15557 - DNA, 153 bp, Homo sapiens; identical to SEQ ID NO: 1216
  chr1:233749768-233749921
  hypo

SEQ ID NO: 15558 - DNA, 83 bp, Homo sapiens
  chr1:233799534-233799617
  hypo
acaagctggtaactacatttgcgaatcgcttttcagttggctttttttttgcgggggggtggggacagagtctcgctgtgtca

SEQ ID NO: 15559 - DNA, 125 bp, Homo sapiens; identical to SEQ ID NO: 1218
  chr1:234040355-234040480
  hypo

SEQ ID NO: 15560 - DNA, 212 bp, Homo sapiens; identical to SEQ ID NO: 1219
  chr1:234041148-234041360
  hypo

SEQ ID NO: 15561 - DNA, 28 bp, Homo sapiens
  chr1:234089753-234089781
  hypo
cttttttttttttttttgagacggagtc

SEQ ID NO: 15562 - DNA, 212 bp, Homo sapiens
  chr1:234541032-234541244
  hypo
gagataaggaaacaagcgcagagacctggagatgcttatgacactgcagcctgcttctgcaccgtgacaggtgcggggaaagagaggcagacatgggaaccaccgtgggggcttcacagacactgggtcctgcaccgctccctcaccccatccacgtcacttgcttgatactgagcttccatgtatgattttgtctgcggaataggagagtt

SEQ ID NO: 15563 - DNA, 162 bp, Homo sapiens
  chr1:234541508-234541670
  hypo
gcccagtccaagccctcgatgctccaggacggcagcatgaggatgtggaaggagaagctgacacagtatgggcactgccccctccctgtgggccctgctggaggagagtgagggcgatgaggttgacgagggctccttaccctgctccgtgcatgctttcca

SEQ ID NO: 15564 - DNA, 30 bp, Homo sapiens
  chr1:234617727-234617757
  hypo
cccggaatatttcccgcaacaccacttttc

SEQ ID NO: 15565 - DNA, 31 bp, Homo sapiens
  chr1:234621891-234621922
  hypo
gtccagcaggggcctccgagaagtcattttc

SEQ ID NO: 15566 - DNA, 31 bp, Homo sapiens
  chr1:234643572-234643603
  hypo
tcagctggggaggtgcgcgcagcctattttc

SEQ ID NO: 15567 - DNA, 182 bp, Homo sapiens
  chr1:234691149-234691331
  hypo
tgagatacacaacattcggtgggaggggaaagcctggatgtaagggtcaattataccgccttatggggaaaaaagtatccaactcggagtctggaatgggaatgacacacagctggagaccattttcatcaggtgacctaaggcacgctgctccagcttcatggtgacgtgattctgtgttg

SEQ ID NO: 15568 - DNA, 267 bp, Homo sapiens
  chr1:234724756-234725023
  hypo
aatgcctctctcactcgcccagagtgatactgaggccacaaaaagctctgctgttttttttttctcgtggtctttctcaattccaacgtggtacacaggtacctggcgtgtgtctgctcagacagtggatggcccttgttcaaagactgatgggaacacctagtgtacgaggtggcgccggggccgcccacaccaacaggccgtgtgctcccatctcactgtgcacgaggaaccggtgtgcttttcggccaggctgcatcaccctcc

SEQ ID NO: 15569 - DNA, 142 bp, Homo sapiens
  chr1:234795525-234795667
  hypo
aaggtccagctttgtaatagccggagtgtgaggatccctcgcactgatctgcccacaatgggccgccggcaggcccagagaccctcaagtctcatcctcagtggtctaccgagctgtgcacggccagcttccctgaattcac

SEQ ID NO: 15570 - DNA, 142 bp, Homo sapiens; identical to SEQ ID NO: 1223
  chr1:234828213-234828355
  hypo

SEQ ID NO: 15571 - DNA, 562 bp, Homo sapiens
  chr1:234844949-234845511
  hypo
aatgtgaactcattctaaactcgttgggacgtgaactggtgacgtgcctggagctaagatggctctggccctgtgtggagaatgggttgaaggaacacagacgcagcagcagaaccggtgagttttgcctcagggaaattcacattcaaggggacaatcatctcagtctgaagggtacccgggagtttgacaggtgaagagacctctttcaggcagagggaacaaaataagccacagtaagtatgcttggacctgcatagaagtagaaggaagatgaggggtgactgaaaggaagagcagtcaaagatgaggcggggaagcaagccgactgggtgtcaggagcaggctcagggacttgggcttggccggtgagcagtcaaggtgcacagagctgttcctgggtagcgcctctcatggtgccgctgactccaccggggtgaccgctgtgcccggggctgctggtcaggatgcaaaagcactttagagtgaaggtcacctcaggcaacaggcaaaacagacggggctgaagtgagcgcctttcgccacttgagccctgaagtgt

SEQ ID NO: 15572 - DNA, 121 bp, Homo sapiens
  chr1:234868846-234868967
  hypo
ttggtcctggggagggcgagggttccgacagtgggctccgccgaccatcactgccgcaagggatgctggtcacctgcctcagcaacacccctggtgtgcagttcaccggggagccccatcg

SEQ ID NO: 15573 - DNA, 11 bp, Homo sapiens
  chr1:234869962-234869973
  hypo
tattagatttt

SEQ ID NO: 15574 - DNA, 285 bp, Homo sapiens
  chr1:234871740-234872025
  hypo
taccccgggagcactcgatggatggtattgactggctgactcaggccccgtctgcccacatgagccattttgagcagctttaactaaaatgcggacagaatcagtgagagccaaataagcagtctggtcgattctcttccctcccaccctattccgaatgcctcctggaaactgctggtcctcctcgcccacggttctctccttcactaggggcccagagtctgcaaagcgcccatctcctctccagtgccgtttgcatcctcagagcagcgccgcaccttgaac

SEQ ID NO: 15575 - DNA, 100 bp, Homo sapiens
  chr1:234893899-234893999
  hypo
gggtggatccaaagttgctctggaaagtcaagtctcgaatgccccaggaacgtgaagccttcatagagccagcgaagggggtctgcgtccaggatgtgga

SEQ ID NO: 15576 - DNA, 30 bp, Homo sapiens
  chr1:234895759-234895789
  hypo
caagaacagggcaacggctaaaagatgaag

SEQ ID NO: 15577 - DNA, 115 bp, Homo sapiens
  chr1:234957530-234957645
  hypo
taaccgccaaccccagcgtctggttgtcactgtctggccgcagaaccagctttccctggctggacctgtcttcagagtcaggttgcttgccttgcagccccgcacccactcacat

SEQ ID NO: 15578 - DNA, 31 bp, Homo sapiens
  chr1:234962495-234962526
  hypo
atcatggttacagtgccgggcagtgctgctg

SEQ ID NO: 15579 - DNA, 31 bp, Homo sapiens
  chr1:235019853-235019884
  hypo
gcaggtgaaggggacccggagcaggtgggag

SEQ ID NO: 15580 - DNA, 46 bp, Homo sapiens
  chr1:235037116-235037162
  hypo
atttcattaatgctcacggaggtccctcagtcgcttgggatccagc

SEQ ID NO: 15581 - DNA, 80 bp, Homo sapiens
  chr1:235042106-235042186
  hypo
gccaccttgcccagccaataacttccaaactcttaccccagtgtccagcaccaggacggtggccacgtacatgcccccta

SEQ ID NO: 15582 - DNA, 148 bp, Homo sapiens
  chr1:235044522-235044670
  hypo
gggctgttaaacccaccgaatgcagacccaagtggggctggatgtgcacacacagtcccctgccactcgccgctgcctgctgggccttctccactgtggctgttacgtgtctcctcccagcaccctccgaggccgccttctcctatat

SEQ ID NO: 15583 - DNA, 77 bp, Homo sapiens
  chr1:235067967-235068044
  hypo
ccctccctccagggctcgcatgctattcctgactcctagcaacccaaaaggtacagccccagcggcaccatagacga

SEQ ID NO: 15584 - DNA, 178 bp, Homo sapiens
  chr1:235129829-235130007
  hypo
tgttcctgcagagtgacggtcacgcaagctgatctgaacctccactggcttctcagactcaaaccaagcacttctcttcctgggatcacgagttctattcagagtgggccctggaggccttcaaagctgggccccaggttctcacggtgaactaaactttctccgcaaacccccttgg

SEQ ID NO: 15585 - DNA, 21 bp, Homo sapiens
  chr1:235255587-235255608
  hypo
ttttgtttttttgagacggag

SEQ ID NO: 15586 - DNA, 11 bp, Homo sapiens
  chr1:235267080-235267091
  hypo
aaggaaaaaaa

SEQ ID NO: 15587 - DNA, 30 bp, Homo sapiens
  chr1:235293017-235293047
  hypo
ttgacaaggaaaatcgtgggcagaaagcag

SEQ ID NO: 15588 - DNA, 207 bp, Homo sapiens
  chr1:235317094-235317301
  hypo
aatatgagcaggataccgagctaaggattgcaacagttactatcacatgaacatgcagaagcaaagggcaggttttgcttcagtgatcgtcacacaacggaagaaactcaggacatcttcattctttaaacaacacatatttactatgcacaaggcaccatttcaggtgtcaagagacagaacgaggctgggtgcggttgctcatgc

SEQ ID NO: 15589 - DNA, 30 bp, Homo sapiens
  chr1:235410285-235410315
  hypo
acgaacaaaaagcctcggagtaagttatat

SEQ ID NO: 15590 - DNA, 21 bp, Homo sapiens
  chr1:235433310-235433331
  hypo
aacgccagccgggcgcggtgc

SEQ ID NO: 15591 - DNA, 20 bp, Homo sapiens
  chr1:235447655-235447675
  hypo
cagagcgagactccgtctct

SEQ ID NO: 15592 - DNA, 30 bp, Homo sapiens
  chr1:235486727-235486757
  hypo
aaaatttactgctacgtaataaaagacgtt

SEQ ID NO: 15593 - DNA, 96 bp, Homo sapiens
  chr1:235613515-235613611
  hypo
ccctgttatcttgcttgacatcgacaaggatcaccgcaccgttccttcagtttccacagttccgtcagttcccacggagaatactgaggagaagac

SEQ ID NO: 15594 - DNA, 148 bp, Homo sapiens
  chr1:235665689-235665837
  hypo
gtaacaaacttgcacgtcctgcacacgtatcccggaacttaaaaaaaaatcccatttattatctgaccagatatacagtactcattcaaagccaaagttaattaacataactagtattgatcttcttacctacgttattaccctgttc

SEQ ID NO: 15595 - DNA, 1100 bp, Homo sapiens; identical to SEQ ID NO: 1225
  chr1:235811919-235813019
  hypo

SEQ ID NO: 15596 - DNA, 31 bp, Homo sapiens
  chr1:235855353-235855384
  hypo
tgggcacagtggctcacgcatgtaatcccag

SEQ ID NO: 15597 - DNA, 30 bp, Homo sapiens
  chr1:235971843-235971873
  hypo
ttgagctgaagtaacgcttaggtgttgaca

SEQ ID NO: 15598 - DNA, 21 bp, Homo sapiens
  chr1:236093296-236093317
  hypo
ttttttttttttgagacggag

SEQ ID NO: 15599 - DNA, 31 bp, Homo sapiens
  chr1:236125189-236125220
  hypo
caggcacacgccaccacgcctggccagaagg

SEQ ID NO: 15600 - DNA, 30 bp, Homo sapiens
  chr1:236154186-236154216
  hypo
gggacatgaaggaacgcctttgcttctgtc

SEQ ID NO: 15601 - DNA, 536 bp, Homo sapiens
  chr1:236156642-236157178
  hypo
ctaccattacaggtaccgctgtggcaggccccactgggtatttacaccctacacgtgtgtgtgttgggtggggaaggagaaagaagagggtaagagaacagagagggtgaggaggagaggaagcacggggaggagcggggtaagtgagagggaagaagggtgcagcaggagcgggtggggctggagccagtggaacagttcaagctttaggtccagcagaagagcaaagagcgtgttcagcaattccggtcccccgaggtccttctcaggcacacgcccaagcacggcctgcacccacttacacgggggcgtcatcccgggcctggtcctggtgccctccacctcgcggccgtcgcgatccacgcaccagcagtagccggtgctgccgtggcactgggtgggcgcgtagtgcccgtgcgcatcgcactcaggaacgaacagccccggaggaatgggtcgctgtgggtctgtcgcccccgctgccccgagaatgtgttctcgctcgtgctggcaccgggttttctccacctctatca

SEQ ID NO: 15602 - DNA, 41 bp, Homo sapiens
  chr1:236189393-236189434
  hypo
gctcgggctcagtcaccgtgtactcccgggtggaggaggaa

SEQ ID NO: 15603 - DNA, 312 bp, Homo sapiens
  chr1:236192796-236193108
  hypo
cacgaggctagtggccggtctggggctggccctgggacacagctggggctcacctgaggtggagtagtggtacagctccgtgtagggctcaatgtgcacggaggagccgaacggaatctgcggcacgcggccctccagctccgtgtcgatggtcaggtgcccatgctcatcgatgccgctgaaccgctgcttaatgaccagattgcccgggtgccccacgaaggtcacctcagcctggcgagtgaactcaccccctgaaaaacaagatgagactgtcactttgctgactggggagcgcgcccttctgcccgc

SEQ ID NO: 15604 - DNA, 30 bp, Homo sapiens
  chr1:236193502-236193532
  hypo
atgggtgagttgctcgtggcaaaccattcc

SEQ ID NO: 15605 - DNA, 85 bp, Homo sapiens
  chr1:236194736-236194821
  hypo
tagcctctcctttcttaagacggccacactttatgtatttatatgccataacttttggaggggttaccagcgtgcagcctggatg

SEQ ID NO: 15606 - DNA, 269 bp, Homo sapiens
  chr1:236212015-236212284
  hypo
tgggcccttggtagggggccacggattcccaagtgacaaccaccgcgctactaggctggaaagagatctccgggaaccctctgtggacacactctgctgctcgctgagtgatggagggggataagtcttctcgataataaaccttccccaggccatcggtcgtgtccaagtccgccaggaaaggggcgactgcaccgaatgttggtgggaagagcccgggatgggattctttggccgggggttcactcgtagcaatgatgccatttgtg

SEQ ID NO: 15607 - DNA, 153 bp, Homo sapiens
  chr1:236274570-236274723
  hypo
cttcaccatcactccaggctccgagcagatccacgccaccattgagcgggacagctacgcacagattttgaggaatgtgggtggcatcgtcctggccaatgcttgtggcccctgcattggccgctgggacacgaaggacatcaagaaggggaa

SEQ ID NO: 15608 - DNA, 116 bp, Homo sapiens
  chr1:236339655-236339771
  hypo
actgcagccatgctggggtggcgggtcccctcctgcatgtccgactcgctcatctctccgatgcaagtactttgtccctcctccagggcacacacgttccttactgtggcaccttc

SEQ ID NO: 15609 - DNA, 80 bp, Homo sapiens; identical to SEQ ID NO: 1232
  chr1:236444827-236444907
  hypo

SEQ ID NO: 15610 - DNA, 451 bp, Homo sapiens; identical to SEQ ID NO: 1233
  chr1:236445120-236445571
  hypo

SEQ ID NO: 15611 - DNA, 121 bp, Homo sapiens
  chr1:236540754-236540875
  hypo
ccagcccttaacaaattaataatagttattttaaattcccattctgataattccaacattcctgccatatatatatgagtctgattctgatgcttgcccggtctcttcaaactgtattttt

SEQ ID NO: 15612 - DNA, 553 bp, Homo sapiens; identical to SEQ ID NO: 1235
  chr1:236558653-236559206
  hypo

SEQ ID NO: 15613 - DNA, 119 bp, Homo sapiens; identical to SEQ ID NO: 1236
  chr1:236559256-236559375
  hypo

SEQ ID NO: 15614 - DNA, 57 bp, Homo sapiens
  chr1:236561304-236561361
  hypo
tcccacactcttctcccgcctggtgttttcacaccattccaacgtaggttttcacac

SEQ ID NO: 15615 - DNA, 31 bp, Homo sapiens
  chr1:236903311-236903342
  hypo
gactccacatctcccacgagcaacttcttgg

SEQ ID NO: 15616 - DNA, 30 bp, Homo sapiens
  chr1:236908049-236908079
  hypo
gatcgcagccatcgcgcaggagctcaagta

SEQ ID NO: 15617 - DNA, 30 bp, Homo sapiens; identical to SEQ ID NO: 1237
  chr1:237093369-237093399
  hypo

SEQ ID NO: 15618 - DNA, 64 bp, Homo sapiens; identical to SEQ ID NO: 1238
  chr1:237205159-237205223
  hypo

SEQ ID NO: 15619 - DNA, 164 bp, Homo sapiens; identical to SEQ ID NO: 1239
  chr1:237206101-237206265
  hypo

SEQ ID NO: 15620 - DNA, 153 bp, Homo sapiens; identical to SEQ ID NO: 1240
  chr1:237206511-237206664
  hypo

SEQ ID NO: 15621 - DNA, 23 bp, Homo sapiens
  chr1:237699615-237699638
  hypo
aatcccagcactttgggaggccg

SEQ ID NO: 15622 - DNA, 46 bp, Homo sapiens
  chr1:238017557-238017603
  hypo
tgcaataatttcctacattgccgaaggaaattattctcccaaatac

SEQ ID NO: 15623 - DNA, 28 bp, Homo sapiens
  chr1:238296987-238297015
  hypo
acagagcgagactctgtctcaaaaaaaa

SEQ ID NO: 15624 - DNA, 83 bp, Homo sapiens
  chr1:239509032-239509115
  hypo
ctaaaaaaaaaaaaaaaacgcaactattcaattccgtcaagttgaggaatagaacaaatgtcgcccatttctggcattccaca

SEQ ID NO: 15625 - DNA, 17 bp, Homo sapiens
  chr1:239935451-239935468
  hypo
tttctttttttttcttt

SEQ ID NO: 15626 - DNA, 31 bp, Homo sapiens
  chr1:240216145-240216176
  hypo
gaaacatcgggcaggacgtggtgtctcatgc

SEQ ID NO: 15627 - DNA, 1220 bp, Homo sapiens; identical to SEQ ID NO: 1242
  chr1:240254938-240256158
  hypo

SEQ ID NO: 15628 - DNA, 42 bp, Homo sapiens
  chr1:240372832-240372874
  hypo
cgtgagccaccgggcacggccgcaaatcaaattcttaggtaa

SEQ ID NO: 15629 - DNA, 46 bp, Homo sapiens
  chr1:241271634-241271680
  hypo
gacaaaaattgatgcagaaaagaacgttggacagacaagtcaaaca

SEQ ID NO: 15630 - DNA, 151 bp, Homo sapiens
  chr1:241434338-241434489
  hypo
catcccttttaatttctgcacgggccctactttaagtatcgctgcagtggcgaaagcattcatcattgccgacctgtgtggaatgtgaacctgagtattttctattggcgggaacttacgtggctaaaacgtctcctttataatgtggagc

SEQ ID NO: 15631 - DNA, 540 bp, Homo sapiens; identical to SEQ ID NO: 1246
  chr1:241520264-241520804
  hypo

SEQ ID NO: 15632 - DNA, 85 bp, Homo sapiens
  chr1:241541311-241541396
  hypo
gtggaatgtatgcatttgatacgctaggcagcagctgataatgaattctgaatattgggattgtctcttttttttgacggagtct

SEQ ID NO: 15633 - DNA, 89 bp, Homo sapiens
  chr1:241559202-241559291
  hypo
ccagtcaagccctcagatgaccgtagtcaacatcggactacaattacccaagagacttcaggccaggtgcggtggctcacacctgtaat

SEQ ID NO: 15634 - DNA, 29 bp, Homo sapiens
  chr1:241559530-241559559
  hypo
gagactccgtctcaaaaaaaaaaaaaaaa

SEQ ID NO: 15635 - DNA, 744 bp, Homo sapiens; identical to SEQ ID NO: 1247
  chr1:241587110-241587854
  hypo

SEQ ID NO: 15636 - DNA, 184 bp, Homo sapiens
  chr1:241753208-241753392
  hypo
ttgtgtttggcattgcgatgagtgggaatgaagaataatactaagtcgcagtgagaaatagctgtatttgttcaaaagcgttctttaagactgtcattattgcagatgcgagcacatgtcaactcaagctggttcatttttcagaagaacatggagagatttcttcatgcgattatgccatcga

SEQ ID NO: 15637 - DNA, 596 bp, Homo sapiens; identical to SEQ ID NO: 1249
  chr1:242687003-242687599
  hypo

SEQ ID NO: 15638 - DNA, 423 bp, Homo sapiens; identical to SEQ ID NO: 1250
  chr1:242687610-242688033
  hypo

SEQ ID NO: 15639 - DNA, 163 bp, Homo sapiens; identical to SEQ ID NO: 1251
  chr1:242688080-242688243
  hypo

SEQ ID NO: 15640 - DNA, 419 bp, Homo sapiens; identical to SEQ ID NO: 1252
  chr1:242688277-242688696
  hypo

SEQ ID NO: 15641 - DNA, 196 bp, Homo sapiens
  chr1:242767787-242767983
  hypo
caaatcaaaacaccactctgtcgtgcacggtgacgtggaaagtttttgaagagggaatctctgccctacgcagttagcggctggggcttgaccacaatgcataatgagcgggcagcggctgagctgcagatgatgcctgctgctctggagtccacgctactgtccctcttttcccgggtaaagctggaagctgaac

SEQ ID NO: 15642 - DNA, 31 bp, Homo sapiens; identical to SEQ ID NO: 1253
  chr1:243418478-243418509
  hypo

SEQ ID NO: 15643 - DNA, 103 bp, Homo sapiens
  chr1:243479807-243479910
  hypo
ctccacaatagatgattgtcccgcacagatgccgtcctgccacgaaggctcttagcctttctggctgctccgcccgccgctcgccaagtgaggacagagggtc

SEQ ID NO: 15644 - DNA, 132 bp, Homo sapiens
  chr1:243566400-243566532
  hypo
ggtgatctgggctggacgttgccggttgcctcatgtggagcttcccacataatcctgataatatcattttattaatgagaaaacagaggcttagattgagatgaggttccgccttgacgtgacacagctagc

SEQ ID NO: 15645 - DNA, 645 bp, Homo sapiens
  chr1:243637570-243638215
  hypo
cacccatctcctcctctcaaccgtcatcccggtttaatcctctccttctgccaaagtccagaggccctgcgagcccccgtggagtcgcctgagccagatgctccgcacccagcctccccaagccccggccggctgccctccaggtgcgggctccaggccctctcgcgcggcttcgggactcggccgagcccgggcctagtatccagagtcgaagcagccgccgggaggtctgggtgggcagggaggccgagaggacggtgcaccgcccggcagcgctgagacctggccgcctaggccaccctgcccggcgagggagaggggtgtctcctgcctggagcgctccgcggtggcccgagagcaggtgctggcgtgcgggaggcgcacgtggagccctgcggtctgttccacctgcagaggcacaattgcccagcgtggggtggaaggcaggctgggagctcccgggacgcggcgtggcagcgcagggctcggctagatgcgctcctcctcggactggttgagtaagggaggaggctcgtcctgaacgtgcacagccgctcctaactccgtcaacggaatttcactcaactccgagactgaagcattttattggcagcatttagaatcggggaaaaatctaccttctgt

SEQ ID NO: 15646 - DNA, 40 bp, Homo sapiens
  chr1:243750609-243750649
  hypo
tccttaaaaaataaaaatatacgctgggtacagtggctca

SEQ ID NO: 15647 - DNA, 253 bp, Homo sapiens
  chr1:244142770-244143023
  hypo
gattcccagctgaacgggcctggctttttgggagaagtttccagcccgtagctgccttggccaggagtgtggggggtgggacggaaggtacccacgagggtggcgggtggggccatcggccaggagtgtgggggggtgggacggaaggtacccaggagggtggcgggaggggccatcggccaggagtgggggggtggtgggacggaaggtacccacgagggtggcgtgtggggccatcggccaggagtggggg

SEQ ID NO: 15648 - DNA, 217 bp, Homo sapiens
  chr1:244345253-244345470
  hypo
aaaatggtacccagcaaaagccggaactagcagcagcctacggtggcccaaccacgagcaggccaattgtccaactccaggatgctcggcaccagtccccaatctccaagccgccaggcctccccgggctcggtgtcagagcccatgctgctgtcgggagcagtcatgcgtgttacctcggcagctcaggcctcacggagctgtgccaatttacctt

SEQ ID NO: 15649 - DNA, 31 bp, Homo sapiens
  chr1:244455411-244455442
  hypo
ccagtaaatcaagacacgtacacagtattgt

SEQ ID NO: 15650 - DNA, 30 bp, Homo sapiens
  chr1:244534632-244534662
  hypo
aagtctgaagagtccgcacgtgctttcaca

SEQ ID NO: 15651 - DNA, 144 bp, Homo sapiens
  chr1:244641920-244642064
  hypo
gcacaagtagacagagcgatgtgggagaagccagatgaatatttattcatttttcaatccttatgatgtgaaacatatttgaatttgtctctttgagtctatgagtatttgccaatttcaagaacacaattcatgccgggcgcg

SEQ ID NO: 15652 - DNA, 704 bp, Homo sapiens; identical to SEQ ID NO: 1256
  chr1:244893239-244893943
  hypo

SEQ ID NO: 15653 - DNA, 20 bp, Homo sapiens
  chr1:244990926-244990946
  hypo
ttttttttttttgagacgga

SEQ ID NO: 15654 - DNA, 41 bp, Homo sapiens
  chr1:245032184-245032225
  hypo
ccggcctatatgcagttatcgtataccaattatacctccat

SEQ ID NO: 15655 - DNA, 182 bp, Homo sapiens
  chr1:245032511-245032693
  hypo
atacagagctgaagagaccagcgttcgtgtcttctgccctgtgaggacacagcaagaaggtgccctgggtggggaggcgggccctcaccagtcactgaggcgctgggcttcttagcttccagaactgcgaccaataagtgtctgttgtttataagctactcggcttatgatgtttgttagaa

SEQ ID NO: 15656 - DNA, 141 bp, Homo sapiens
  chr1:245135713-245135854
  hypo
taggtgtgtatccttgtagtccgtggacagcagcctggacatcactggctgccaccgacctaataatgaatcagtcttcattttaacatgtttgtaggtgatttgtatgtacattaactttcgagaaggccgggcgcggtg

SEQ ID NO: 15657 - DNA, 21 bp, Homo sapiens
  chr1:245136153-245136174
  hypo
gagaagcactcatgtgctgta

SEQ ID NO: 15658 - DNA, 306 bp, Homo sapiens
  chr1:245254414-245254720
  hypo
gagatgaggatgaaccgcgtgccttcaggacagggcggagacggaggaggaaaggagtgtggtgatcctcggaacatcagcagacaggctgttgatgataggaacacattgcagcggggaaggaggatggctgagatatgaaatacccttcaaggtggacgcatacccaggggcatgtcattcggtggcaggggccagcacggacatgcagcactgaggcgtgtgctagcgcccagtgcgtcgacccaggcacggacttgtttggagcatacaggacagctctgcgttaagacctgtaagccatta

SEQ ID NO: 15659 - DNA, 126 bp, Homo sapiens
  chr1:245281693-245281819
  hypo
ccctgcagctttcttcggagaactgggagaacaccatgtgtcaccttgtggagcattttaaaaacgagtgagaaacctttatcgggaagatactacgtgctgtaaaacaatgacagtaagccgggc

SEQ ID NO: 15660 - DNA, 30 bp, Homo sapiens
  chr1:245425171-245425201
  hypo
accatgcccggctcaacccttgtatttctt

SEQ ID NO: 15661 - DNA, 100 bp, Homo sapiens
  chr1:245497278-245497378
  hypo
cgacggagtgagactccgtgtcaaaaaaaaaaaaatctcctctacgagtggatgtcgggtgaggtgggctggggtgggcgatttatttggggcttagaag

SEQ ID NO: 15662 - DNA, 625 bp, Homo sapiens
  chr1:245499277-245499902
  hypo
gaaaggagggtcccacgcagggaaaggagagtcccacgcagggagagtcccacgcagggaaaggagggtcccacgcagggaaaggagagtcccacgcagggaaaggagggtcccacgcagggaaaggagggtcccacgcagggaaagaagagtcccacgcagggagagtcccatgcagggaaagaaggtcccacgcagggaaaggagagtcccacgcagggattgctgttccactctgcatagccgctgggctttctgctgcacggatgccatctagaagaagcaccatccactgttctcagaaagaagagagaggaaggagacaggagtgcgtagagtgagtgggccatcagaaaaaggactgctctggggatgcaggagacccgcttgtaggatttaggggcaccgtgcaagacaggggtcatggtatgcgggtgcctccgactggcggctgcgtggtggatctggccacttggtgaaggtcgcagtgaccttgatctgctctggggagggatgctgttttgcctttcttcacgcacgtggaatcaggactagctggactggcaggaaaaggttctctctggaataatggtttgcttctctgcaggctcgtgcggcggctcgt

SEQ ID NO: 15663 - DNA, 100 bp, Homo sapiens
  chr1:245525462-245525562
  hypo
tcacaccccatcaagcacaggcggatcaggagatgtaaaggtcagggagctggtaagcatcgacgaacaaaatcttcctgaggaagggccgggtgcggtg

SEQ ID NO: 15664 - DNA, 125 bp, Homo sapiens
  chr1:245530127-245530252
  hypo
ttctgtaggaccctgctttctcggctgtgattcacgacaaactccaggtccccaacaccatccggaaggcatggaacgaccgggacaaccgctgtgacatttgcgccactcacctgaaccagttg

SEQ ID NO: 15665 - DNA, 193 bp, Homo sapiens
  chr1:245576465-245576658
  hypo
ggccactgcttttagacggtgacagtgacacatacacgtaacgaagataatgaggcctttccactagcactgtagggttttcaaacatgttagatggatatttggaggttttctcaggaagaatcatgtatctttcacagtatcgcaagagaagaaataaattcctaagagtctaacacgcagatgtaagcca

SEQ ID NO: 15666 - DNA, 283 bp, Homo sapiens
  chr1:245582886-245583169
  hypo
cagctgatgacagagagtagccgggagggactaacagaagcagtgctgaaccgctacaatgcagacaagccttccgcctgcagtgtcccagcctcgcagggctcctgcgtggccagcgagacttccacaggcacatcggtggccgcctccttctttgcacggtaagagagctgttcagatccttggttctttccgatgagcccagctggttagcccctcacgtggactagctcagctgaaacactagaaagagtttggggccgttctgtgatgtcattcatta

SEQ ID NO: 15667 - DNA, 121 bp, Homo sapiens
  chr1:245627766-245627887
  hypo
gcgcgtgtgggggtgtgtgcccgtgggtgtgtgtgggcgtgtgcatgtgtggatgtgtggcaccatgtgtgtgggtgtgcgtgggtgtgttcctgtgtgggtgtgtgggtgtgtgtgcacg

SEQ ID NO: 15668 - DNA, 12 bp, Homo sapiens
  chr1:245628571-245628583
  hypo
gcccggacccat

SEQ ID NO: 15669 - DNA, 30 bp, Homo sapiens
  chr1:245755253-245755283
  hypo
ctccctccctccagcgcgcagtcccttgcc

SEQ ID NO: 15670 - DNA, 152 bp, Homo sapiens
  chr1:245764441-245764593
  hypo
taaaccctcagaggtagagtgcgtcccacactcgggctccttctactgggacactggcttccggatctccacggagaactgttcttaagttagaaggcaagcacagcggggacacggtgcaggacacctgcggacccagtgcccttgggatt

SEQ ID NO: 15671 - DNA, 238 bp, Homo sapiens
  chr1:245772637-245772875
  hypo
ttggctcttcaagctcataaacgaacgcaaggaaaagaccggcgcccgtttctcagtccgggtttccgccgtggaagtgtgggggaaggaggagaacctgcgggacctgctgtcggaggtggccacgggcagcctgcaggacggccagtccccgggcgtgtacctctgtgaggaccccatctgcggcacgcaggtgattgcttctgaagcctggctcgccccaaggtggctccctccc

SEQ ID NO: 15672 - DNA, 30 bp, Homo sapiens
  chr1:245836498-245836528
  hypo
cccagtccccgctgcgcgctgccatcttgg

SEQ ID NO: 15673 - DNA, 607 bp, Homo sapiens
  chr1:245848540-245849147
  hypo
gggcgcgcgggcatggcaccccgagtggcccacgtgcgggaggccaacgggggtggctgtcagtagcctgtgtcgtcaggggccttcaccacttgccgcgcacagctgggctcccggggaaactgccacggaaaggccaccacattaactgccgtctcactcacagtacacatccagctcgtccggcggggagagctcctgcgaagaaggccgcatgcgcaggcccacccagctgagacccttccacaccagggccacggtggaccctgacttccccatcgctcacctgtccagcgaccccgactactcctccagcagcgagcagtcctgcgacaccgtcatctacatcgggcccaacggcacggccctctctgacaaggagctcaccgacaacgagggccccccagactttgtccctatcgtgccagccctgcagaagacccggggcgacagccggcccgcagaggcaggagaggctgcagccggcaagtcagaaagggactgcctgaagtgcaacacgtttgccgagctgcaggagaggctggactgcatcgacggcagcgaggagcccagcagctttcctttcgaagaactgcctgctcagttt

SEQ ID NO: 15674 - DNA, 539 bp, Homo sapiens
  chr1:245849778-245850317
  hypo
agaaggagatcctgagcaccacgatggtgacggtgcagcagccactggagctgaacggtgaggacgagctggtgttcacgctggtggaggagctgaccatcagcggggtcctggacagcggccgccccaccagcatcatcagcttcaacagcgactgctctgcacgggccctggcctcgggctcgcggcccgtcagcatcatcagcagcatcagcgaggacctggagtgctactccagcacggcccccgtctccgaggtcagcatcacacagttcttgcccctcccgaagatgagcctggatgagaaggcccaggacgcagggagcagacgctcttccatcagctcctggctgagcgagatgagcgcgggcagtgagggtgagcagtcgtgccacagtttcatagcccagacgtgttttgggcacggggaggcaatggcagaacctgtggcctcggagtttgtcagcagcctccagaacaccgctgtggtgtgcagagagaagcccaaggccagccccgacaacttgctcatcctgtct

SEQ ID NO: 15675 - DNA, 30 bp, Homo sapiens
  chr1:245915279-245915309
  hypo
tggagcacatgcctcgtgttttattctctt

SEQ ID NO: 15676 - DNA, 327 bp, Homo sapiens
  chr1:245925928-245926255
  hypo
agggaatcctagtgttactcccgttggccacacgctgactttatttagagatcaagtaaaggcgctatggctagcattcggcgaaaatgagcactgtggaatctggcttttaagaatcccttcggcatttgtcatttctcttaggtccatgtgggcggctgccagtgttttgggatcagccggcccctggacacgccctgagcaaccctgacgcccgatccttccaccgtcactcttctgcacacaagggcatggcggcccagagggtcctgttaaagtgtcaagcgcttcctatgatacccgcacgccaggtctccatacaaccca

SEQ ID NO: 15677 - DNA, 152 bp, Homo sapiens
  chr1:245986592-245986744
  hypo
gctttcttgctctctgccacacgtgcgtgtgcacacacacacgcgcgctcgtgcttgctcgctctcgctctctctctctcttttctaaggctccaggcatccgtccctggagaagtgcaccttgggaaggcgatgaaatgaaagaagggcac

SEQ ID NO: 15678 - DNA, 128 bp, Homo sapiens
  chr1:246160275-246160403
  hypo
gcactgaggcgacgtcgctggtgcggaacaccatgacgtctgtgtctagggtatgcgcatatgctgcgtttttccgcaggtgcctcgcagtctgctctggctcttagggcttccgaactcagttcagg

SEQ ID NO: 15679 - DNA, 30 bp, Homo sapiens
  chr1:246310470-246310500
  hypo
aaacaacgctgccccggcaaaccctagggg

SEQ ID NO: 15680 - DNA, 224 bp, Homo sapiens
  chr1:246330192-246330416
  hypo
gtatcactacagaggaaaactcgatacccactgaaggcagctgctctcgggtgccccttcccacaagccctagcgaccatcaatctgcactccgtctctatggattcatctactttgaacatttcatacaaacggaatcacagagcatgtggcgtcttgtgtctggctcccttcattaagcataatgtattccgggttcacccgtgctggagcatgtatgggta

SEQ ID NO: 15681 - DNA, 25 bp, Homo sapiens
  chr1:246489785-246489810
  hypo
cttcaggaggccgggcgtggcagtt

SEQ ID NO: 15682 - DNA, 30 bp, Homo sapiens
  chr1:246582056-246582086
  hypo
gttctgctggccgacggcctcccagcgtgc

SEQ ID NO: 15683 - DNA, 12 bp, Homo sapiens
  chr1:246666986-246666998
  hypo
ggggacagcggc

SEQ ID NO: 15684 - DNA, 86 bp, Homo sapiens
  chr1:246783953-246784039
  hypo
cagtcgtgcatacacacgatgggctctgggaacactacagggaggacggcttcagtcgtggtgcatacacacgatgggctctggga

SEQ ID NO: 15685 - DNA, 31 bp, Homo sapiens
  chr1:246864972-246865003
  hypo
aactaaactgctcacacgtgtaatcccagca

SEQ ID NO: 15686 - DNA, 30 bp, Homo sapiens
  chr1:246886499-246886529
  hypo
cctctctccacacacgtatcacagacattt

SEQ ID NO: 15687 - DNA, 90 bp, Homo sapiens; identical to SEQ ID NO: 1259
  chr1:246887449-246887539
  hypo

SEQ ID NO: 15688 - DNA, 31 bp, Homo sapiens
  chr1:246913294-246913325
  hypo
ggttcaaacccattttcgctttagcttggtt

SEQ ID NO: 15689 - DNA, 295 bp, Homo sapiens
  chr1:246930880-246931175
  hypo
taatgggggaggcggcgtcccagtctgtgttgcagcagcattctcatcgggggtgcgcacaccatcgttactgtcgggcagtaactgccgcttgccttgccgcagtaggagggaaatctcaccttccttccacatactgtcttgagcctttgctaaattaaactgcactttttgctatttttgcctagtttttcgccaatctacactgattttggactgttacctaagttgaaaaataaaaggttgtcaatcgaatggtggtttaatgtttggacctgccgatgtatttgtatag

SEQ ID NO: 15690 - DNA, 100 bp, Homo sapiens
  chr1:247017213-247017313
  hypo
tttggcaaaaagaggacgacgaaaaaccactttacaggcttctcatcaaatacataaaagtagtatacaaactttattggatacaacaataaaatattaa

SEQ ID NO: 15691 - DNA, 94 bp, Homo sapiens
  chr1:247027353-247027447
  hypo
tttgctgaataaactccgaacactgagaaggccgggggacaggctgaacaaccaaatctagcagtctgtaatcagaatgcgcatttattgagtt

SEQ ID NO: 15692 - DNA, 30 bp, Homo sapiens
  chr1:247048743-247048773
  hypo
ttttattaacagatacgataaagactttat

SEQ ID NO: 15693 - DNA, 30 bp, Homo sapiens
  chr1:247090976-247091006
  hypo
aggcagagcaggaacgttctactggctttg

SEQ ID NO: 15694 - DNA, 31 bp, Homo sapiens
  chr1:247163508-247163539
  hypo
acacagaaatatactctaggccgggcgcggc

SEQ ID NO: 15695 - DNA, 333 bp, Homo sapiens; identical to SEQ ID NO: 1260
  chr1:247170847-247171180
  hypo

SEQ ID NO: 15696 - DNA, 31 bp, Homo sapiens
  chr1:247275934-247275965
  hypo
gtcaggggtgttttgacgattaaactggaca

SEQ ID NO: 15697 - DNA, 31 bp, Homo sapiens; identical to SEQ ID NO: 1263
  chr1:247278690-247278721
  hypo

SEQ ID NO: 15698 - DNA, 183 bp, Homo sapiens
  chr1:247348620-247348803
  hypo
gaaggtctgaggggcacgggatacaagggtacactgtggtcctgcaggaattcacccaccaattcatcttcagaagctactcccaaaggcttggagactgcctcagaggctggggctcggaggcggggcaggggtcaggcgtcaggccttagtgccttctgctggggtcggcgggtgttttct

SEQ ID NO: 15699 - DNA, 31 bp, Homo sapiens
  chr1:247482929-247482960
  hypo
tatatactatctaggccgggtgcagtggctc

SEQ ID NO: 15700 - DNA, 31 bp, Homo sapiens
  chr1:247501077-247501108
  hypo
gtcgctgggtcacagtcgggggaaggcaaga

SEQ ID NO: 15701 - DNA, 623 bp, Homo sapiens
  chr1:247587122-247587745
  hypo
cccctaacttcctgtctttgccgtagattaccgtaagaagtacagaaagtacgtgagaagcagattccagtgcattgaagacaggaatgcccgtctgggtgagagtgtgagcctcaacaaacgctacacacgactgcgtctcatcaaggagcaccggagccagcaggagagggagcaggagcttctggccatcggcaagaccaagacgtgtgagagccccgtgagtcccattaagatggagttgctgtttgaccccgatgatgagcattctgagcctgtgcacaccgtggtgttccagggggcggcagggattgggaaaacaatcctggccaggaagatgatgttggactgggcgtcggggacactctaccaagacaggtttgactatctgttctatatccactgtcgagaggtgagccttgtgacacagaggagcctgggggacctgatcatgagctgctgccccgacccaaacccacccatccacaagatcgtgagaaaaccctccagaatcctcttcctcatggacggcttcgatgagctgcaaggtgcctttgacgagcacataggaccgctctgcactgactggcagaaggccgagcggggagacattctcctgagca

SEQ ID NO: 15702 - DNA, 290 bp, Homo sapiens
  chr1:247614674-247614964
  hypo
ccagtatggtgtcattcacagcggtgtcagcacacgacagcttgatcacggccggcacctcacagaaaaagttgttcagcacctgccgcccgcagaatggcaattgcaccgtcaggaccacctgcacgaaggagttgccgaagccactgagccaggccagagccacgagctgctgacagagagcacggtgcatgagaacggcatagtgcaggggcttgcagatggccacgtagcggtccagggccatggcggccaggacgatgcactccgtgcatcccagccagtggaag

SEQ ID NO: 15703 - DNA, 30 bp, Homo sapiens
  chr1:247695313-247695343
  hypo
aggagcatggtgagcgtggagcccaccatg

SEQ ID NO: 15704 - DNA, 30 bp, Homo sapiens
  chr1:247978776-247978806
  hypo
tatcaaagaattggcgatagatttgggagc

SEQ ID NO: 15705 - DNA, 33 bp, Homo sapiens
  chr1:248000442-248000475
  hypo
caaaattatgtgtctcatggccgggcacggtgg

SEQ ID NO: 15706 - DNA, 139 bp, Homo sapiens; identical to SEQ ID NO: 1264
  chr1:248020309-248020448
  hypo

SEQ ID NO: 15707 - DNA, 115 bp, Homo sapiens; identical to SEQ ID NO: 1265
  chr1:248020515-248020630
  hypo

SEQ ID NO: 15708 - DNA, 304 bp, Homo sapiens; identical to SEQ ID NO: 1266
  chr1:248020956-248021260
  hypo

SEQ ID NO: 15709 - DNA, 307 bp, Homo sapiens
  chr1:248027959-248028266
  hypo
ctgctggaggccaagcactgacgatgtgatccacggtgtcacctcaggagaaagtggaaatgcagaggcagcgcttcagattggagtttgagaagcatcgtggctttctggcccaggaggagcaacggcagctgaggcggctggaggcggaggagcgagcgacgctgcagagactgcgggagagcaagagccggctggtccagcagagcaaggccctgaaggagctggcggatgagctgcaggagaggtgccagcgcccggccctgggtctgctggaggtgaggccgggtgccagaaaagcaggcag

SEQ ID NO: 15710 - DNA, 139 bp, Homo sapiens
  chr1:248074826-248074965
  hypo
tcttatattgttccttataaccgggggggacgggatgatattagtcccaatgtcgcagagggtgtacaccgcctctgtaatatccacgggggaaaaggatgatacaattcccactatcgaagggggtgtacccccctgt

SEQ ID NO: 15711 - DNA, 84 bp, Homo sapiens
  chr1:248099572-248099656
  hypo
gcttcttggtacaggagatcacgcgtaatgggatgagccgtagggtcttcaacatcaccaggcgctcttggttttcacaggtct

SEQ ID NO: 15712 - DNA, 30 bp, Homo sapiens
  chr1:248099865-248099895
  hypo
gtgctcgctgtagacggtgtttaactcaga

SEQ ID NO: 15713 - DNA, 339 bp, Homo sapiens
  chr1:249106192-249106531
  hypo
agactgacgtggtccgagaggcctcgcaagtgctccacggagtcgcacttctgcaggtctgaagccaccgtgcgcaggctcagcagactcagggtatcggtgtcgggggcggggccgggccccaggctgctgccctcctccagccccgcaccctcggccccctcaatcccgctgtctccgtcctccatgtcctcgggtcctgcctcggcccccacgggggaggagcgccgagggcccagggggtggggaggcagacccccgcggcgccgtgcgtgaatctgctcgctgatctgctccaggttacgaagggccacggagtagcgcgtcttggcctgagct

SEQ ID NO: 15714 - DNA, 175 bp, Homo sapiens
  chr1:249141904-249142079
  hypo
ccaccaggcgcgggcgcaccccttggggacaacctctgaccctgctgccccaccccaccgctgcgcgcagtgcccgcgagccttccgaagcggcgccgggctgcggagtcacgcgcgcatccacgtgtcccggagccccacgcgaccccgtgtctcagacgcccaccagtgtggc

SEQ ID NO: 15715 - DNA, 30 bp, Homo sapiens
  chr1:249142490-249142520
  hypo
cgctgcgaactgtgcggcaagcggttcacg

SEQ ID NO: 15716 - DNA, 235 bp, Homo sapiens; identical to SEQ ID NO: 1267
  chr1:249167653-249167888
  hypo

SEQ ID NO: 15717 - DNA, 39 bp, Homo sapiens
  chr1:249172379-249172418
  hypo
tctttttttttttttttgagacggagtctcgctctgtcg

SEQ ID NO: 15718 - DNA, 124 bp, Homo sapiens
  chr1:249212001-249212125
  hypo
gagatcatcgtgtgccgctggcacgatagcagcgtggtcaacatttgctccaatgctgtgggcatagagccagtgaggctgaccagtcgtcactctggagcagctaaaacgcggactcaggtcc

SEQ ID NO: 15719 - DNA, 138 bp, Homo sapiens
  chr1:249212376-249212514
  hypo
acatctcaagggaggcgaagcaggcggttggagactgagagccgcttcgatatgattgggcactggattatccatcaggacaagaggacccggtgtgccctctgccactcacagaccaacacccggtgtgagaagtgc

SEQ ID NO: 15720 - DNA, 193 bp, Homo sapiens
  chr1:249218263-249218456
  hypo
cagttccccaatgggacggcgtgtgggagccacaagtcactggcccctatagcgtgggagcagtgtgagccatctgcagtggcattgtctcctccagcagcagcgtccatccagaaatccatctcccaggtcttgctggaggtcattctgtgtgaagttgatggagttctttcttatgcgctttttttctaag

SEQ ID NO: 15721 - DNA, 28 bp, Homo sapiens
  chr2:99795-99823
  hypo
agactccgcctcaaaaaaaaaaaaagtt

SEQ ID NO: 15722 - DNA, 536 bp, Homo sapiens; identical to SEQ ID NO: 1272
  chr2:263890-264426
  hypo

SEQ ID NO: 15723 - DNA, 31 bp, Homo sapiens; identical to SEQ ID NO: 1273
  chr2:288831-288862
  hypo

SEQ ID NO: 15724 - DNA, 743 bp, Homo sapiens
  chr2:314482-315225
  hypo
acacagactcaaaatttggagcggatgaggggcaggagcagctcactgattgggccccgactttcccaggtgtctacactgctagagctacgctcacagctgcggacgtgcacgcgctgccagcaactgcaccgagcactcagcgcacacctgctcccacgcgccacgcactcgtgcaggtgccgggagctccgtcgtcagcagccagaggaaagccctgttctcgtggaacctccatcctagcgaggacagaatgaggacgcacaaatcaaatcgagtccacagcgtgtcaggtgacaacatgctgaggagaaacgcagagccagacgaggggcaggcagaagggcgggcgtttgtgacccgaggccgggcgcgggccccgccgcagggctgtgaggccgccgtgggactggttccaccgacactggaggccaggcgtgggccctccgtaaagtcccccgtgtgggattacgggacaggcggcggaaccccagtttaaccctgggtgtgtttgggcacgcagccatgccgactagaaggacctgagatggattcggttcgcggggaacggaggtgccctagctcccgttcacgaccgcatcttaaaaagcaaagtgagccagtttttcgcaaagatgatttcactggatttccgcgtttagcgtcacgatatgggggcctccgagcgcctctctgggcttccacacaatgggccacatcacgtttctgaccagagaaacaca

SEQ ID NO: 15725 - DNA, 271 bp, Homo sapiens
  chr2:318852-319123
  hypo
gtgtgtgtggttgtgtgtgtgcgggtgtgtgtgcacgggtgtgcatgtgtgcgggtgtgtgtgcgggcacgtgtgcaggcgtgcgtgcaggcgtgtgtgcaggcgtgtgtgcatgggtgtgtgtgcgtgtcgtgtgtggccctgtgtgtgcgggcgtgtgtgtgggcgtgtgtgtgtgggcgtgtgtgggcacgtgagtgtgggcatgtgtgtgcgggcatgtgagtgggcgtgtgagtgtgtctgtgtgtgcgcacaggcgtgtgtgcgg

SEQ ID NO: 15726 - DNA, 363 bp, Homo sapiens
  chr2:319182-319545
  hypo
tgggcgtgtgtgggcgtgtgtgtgtcgtgtgtgcacaggcatgtgtgcggccgtgtgtgtgtggacacgtgtgtgtgggtgtgtgcggaaacgtgtgggggcacgtgtgtgtgggcacgtgtgtgcctgggcacgtgtatgcgggtgtgtgtgtgtgggcgtgtgtgcggatgtgtgtgtgggtgtgtgtgggtgtgtgcgtgggtgtgtgcaggcgtgtgtgcaggcacgtgtgtgcgggtgtgtgggggtgtgtgcgcgggtgtgtgcaggcgtgtgtgcgggcacgtgtgtgtgtgggcgtgtgtgcaggcagaaagcaccaagatgtaaacagctggcgctcacttgtgcaccaccaaa

SEQ ID NO: 15727 - DNA, 298 bp, Homo sapiens
  chr2:364139-364437
  hypo
ctcccagctgatgatggaacccgacttacagtgttagagataaaagtgaacgggtttgaacggctggtctcctggctgatgattgaacccgacttagagtgttagagatgaaagtgaacgggtttgaacggctggtctcctggctgatgatggaacccgacttagagtgttatagatgaaagtgaacgggtttgaacggctggtctcccggttgatgatggaacccgacttacagtgttagagatgaaagtgaacgggtttgaacggctggtctcccggttgatgattgaacctgact

SEQ ID NO: 15728 - DNA, 20 bp, Homo sapiens
  chr2:426595-426615
  hypo
ggcacgcagggggctccgca

SEQ ID NO: 15729 - DNA, 30 bp, Homo sapiens
  chr2:503761-503791
  hypo
caccagatcccacccgccccaccggcctgc

SEQ ID NO: 15730 - DNA, 264 bp, Homo sapiens
  chr2:522157-522421
  hypo
tgatggcacagaaccagaacccgacagcatggaacctgacggtggcttggaacccaatggcagcatggaacccaacagcacggaaccggaactgacagcacagaacctgatgtctgctcggaacccaacggcagcatggaacccgaaagcacggaaccggaactgacagcacggaacctgatgtcggctcggaacccaacggcagcatggaacccaacagtacacaaccggaaccaacagtacggaaccagaactgacagcaca

SEQ ID NO: 15731 - DNA, 414 bp, Homo sapiens
  chr2:816915-817329
  hypo
cctccaaacacaaacagggaacgctgtgaggatgttgaaagggaaggggtggggtggagcacgtgtcttgagcctcccgctggtgcaccacagaggagagacaccgaaagacggtgaatcggatcgagtttgatgccgatggatgaaggtccctgtgcaggtgtcgcaagcccggcaaagacagaagacaaatgtcgagctctcccagcttctgcacggagccgttcagattcgggaattaatttaatcctctccacgactattagtggaaaatggtatcctcatcacataacgagacacattgaggcttcgggagcccagacacactttaacgggagtgaaggacaaagcctgggctcgaatctcaggctgtgtgcgccctcggctcactgcgttttcagcaccaggctctag

SEQ ID NO: 15732 - DNA, 203 bp, Homo sapiens
  chr2:817620-817823
  hypo
acagggagggaggggtggccccgtgacatgacggctccaaagcagatgcctggtggacccgcggagggagcggtgaccgggcgccaggtgcccacgtgtggctgtggctcagcggcctgcaggctgggcttggccctctgacagggatggggccgtcccccggtccgaccacctacacactcgctgcagagcagtgcctggtt

SEQ ID NO: 15733 - DNA, 194 bp, Homo sapiens
  chr2:875846-876040
  hypo
ttgtctgtttgggagatgctgcgaggccggtttcccgtcgggctgcaaacggcagagcacgcggccctgtcccgggcaggctcggctccaggtggaacccgggacacgtgtacgtcctcagtggggcctccgcattccacactcgagcacatttgaaccccggacacctttacgccctcagtggagcctccatg

SEQ ID NO: 15734 - DNA, 86 bp, Homo sapiens
  chr2:910391-910477
  hypo
caagatggaaggccccttccacgctctcccaatgactgggcaccacagggatgccggtgctgaccgtgatccaggaacccacatgc

SEQ ID NO: 15735 - DNA, 30 bp, Homo sapiens
  chr2:916486-916516
  hypo
tgccatgcctgatgccgggggcccgtctgg

SEQ ID NO: 15736 - DNA, 30 bp, Homo sapiens
  chr2:916872-916902
  hypo
ctcccactccgccatcgcggccttgcacgc

SEQ ID NO: 15737 - DNA, 30 bp, Homo sapiens
  chr2:923344-923374
  hypo
ggcaacaagcacccccgtgattccaatgca

SEQ ID NO: 15738 - DNA, 536 bp, Homo sapiens; identical to SEQ ID NO: 1280
  chr2:945681-946217
  hypo

SEQ ID NO: 15739 - DNA, 131 bp, Homo sapiens; identical to SEQ ID NO: 1281
  chr2:946435-946566
  hypo

SEQ ID NO: 15740 - DNA, 30 bp, Homo sapiens
  chr2:1266558-1266588
  hypo
gtaaccggaaggctcggtccagacgacgaa

SEQ ID NO: 15741 - DNA, 296 bp, Homo sapiens
  chr2:1311460-1311756
  hypo
tattagggtccctgcttctttcgtctggagtcgcatgaaaacatttaaagcacaaatctcgctttcaaccaacatggctgcgagtgcattggcaggtgttcacgggctccgcagcctgaagcccagagaccttccgggcagagcccaggagcagagaacccaacccgggcttcccctcagaagcggcacgtgctggtccgggccgccctccgcacaaaccaccggccgcgggtgggatgcgcttcagactgcagaccttctcgcaccgtgtgaccgatgtagtttttgtttgtttt

SEQ ID NO: 15742 - DNA, 31 bp, Homo sapiens
  chr2:1461907-1461938
  hypo
atggtatataagatagcgtgtggacacgtgt

SEQ ID NO: 15743 - DNA, 230 bp, Homo sapiens
  chr2:1482073-1482303
  hypo
aaggatgggctgtttgatatgcgagtcaccgtgtgtgtctgttgcaccaggccctgtggcggcctgggcatcgtgtctgcagtcctagccgggagcctgcagggaggtgcgcgtcagtcctgttctaaaggaggcactggagccttgtccgaggaggcacaggggctgtgtgtggcaccggctgcccccgggcaccatgcgcccctgccgctttctggccttcactgcac

SEQ ID NO: 15744 - DNA, 208 bp, Homo sapiens
  chr2:1488387-1488595
  hypo
catccccaggatcctgggacccgaggccttccagcagtacgtgggtccctatgaaggctatgactccaccgccaaccccactgtgtccaacgtgttctccacagccgccttccgcttcggccatgccacgatccacccgctggtgaggaggctggacgccagcttccaggagcaccccgacctgcccgggctgtggctgcaccaggct

SEQ ID NO: 15745 - DNA, 31 bp, Homo sapiens
  chr2:1501046-1501077
  hypo
gaggcacctttcaggccgcaaggcaagacag

SEQ ID NO: 15746 - DNA, 279 bp, Homo sapiens
  chr2:1543305-1543584
  hypo
gtcttccatgtacacctaggtcggagtccgcaagggtggggcggtgacggtgcactggactttgctggcggtgctggaatggctatgcggagggcgctgtggtgcggggactgcgctccccaggaggacctcgggagttgtttgtttgtaggtattacagtattgtctaacgttgccgcgttgacacagggtcacgggaagccacctccagggcctgtggtcctcttcaggcaggcggggcggggaatgctcaggaccggtgatgatggtgccatgcag

SEQ ID NO: 15747 - DNA, 297 bp, Homo sapiens
  chr2:1613966-1614263
  hypo
tgcagcctgtcacagctgagccgccacagctggacacccgccggcccctgcagtgcagcctgtcacagccgagccaccacagctggacacccgctggcccctgcagtacagcccgccacagccgagccgccacagctggacacccgctggcccctgcagtgcagccgccactgagcatcacaaccgcagttgtccaccgagatccaaaccccgcatggtcctacctgaggcttcaagtcacgcttcttcactcagccaaaggtctgtgcacgcgtcgttctggcccccagattctgc

SEQ ID NO: 15748 - DNA, 223 bp, Homo sapiens
  chr2:1647113-1647336
  hypo
acagacatggtgcccctggcacgcaccttcacagcagtcctgccacacccggaggtctaccctggggatctcgtcacagctgccgtagccgtgagggaactccgccaccctgaacacgtcgctctgcacccgggtgatgttgtccgcgttgtcgcataggatcctggccagcgacgtctgcttgatctgagtcagctgggccggggagaacaccccagggttc

SEQ ID NO: 15749 - DNA, 452 bp, Homo sapiens
  chr2:1653096-1653548
  hypo
tcagcatgtgggtgaactgctcgtcgggtgtgacggtctccgtcccgatcagggtggtggacaccaggcgcggcatgggaagggcgtgcccgttgtacagtcggtgggggttgatgccccgaggggtgttgaagccattctcgtacacggatttcagcaggcgctcgaaggcggtcagcgaggcgccccacatggggtgctgcaggttgttacaggtgccgtcgtgcgtccggtacttctggtggaagcacatgtccgagcagttgttcacgcgccggtgggcggtacagcccgacaggtttgcgatgaggttcaggtactgtggagacaccaggtcgttgtagtggtaacctgggacgtggagaaaagcaagacgcactcaattcccctggaggatgtgtgagggcccggtaccccttggcacctctgccgctgacatggggctatctacc

SEQ ID NO: 15750 - DNA, 289 bp, Homo sapiens
  chr2:1688941-1689230
  hypo
acaggccacactgagtctctgcggacacctgcagccggagggcccccaaacgcagaccatccctgccccttgccccgggacaggtctgtgctcagcactccgcgcacgaatgggaaacgtgagggaaggaaaaactggagcaggaagacaaggaaaaccgccgtgggcgagcatgacgggcgggcacctgacgcgcgggtcccgaggaaggccgaacccgacagaatccctggagcctcgtctctgccaggcagtgtgctgacagggcgcctgtggttttctggggtcc

SEQ ID NO: 15751 - DNA, 253 bp, Homo sapiens
  chr2:1709543-1709796
  hypo
gatgcagggtgcagctccccacgacctgggatgcaggtgcggctgcctatgacctgggacgcagggtgcagggcacggctgcccacgacctgggacgcgtggagtgtcaccagcccttttggagagtttcccgcgtggagtgtggggctacaaggagcagttctccgtccattacggcctcccccaggcactccaggccctgccgctcaggcatccatgtggcttggacaccgtcaaggctactggcttctct

SEQ ID NO: 15752 - DNA, 380 bp, Homo sapiens; identical to SEQ ID NO: 1283
  chr2:1747627-1748007
  hypo

SEQ ID NO: 15753 - DNA, 411 bp, Homo sapiens; identical to SEQ ID NO: 1284
  chr2:1748396-1748807
  hypo

SEQ ID NO: 15754 - DNA, 321 bp, Homo sapiens
  chr2:1771819-1772140
  hypo
tccagcatcccatccaatccacggccactcactccagaagcccgtccaatccgcaaccactcactctttccaaggccagcgctccgatgatgctgtagcctcagtcccggcctctgtcaaaggccctccagcccctgacgccaggccacctttgagctcctcttctaagcgccccctttagtatcttgcacacggctgtccccgtgtgagcagctggtgtgagtagagcgtagggagcttatttggcaatctcttcgatgatccttgtgcgtgtctaatgacctgtgtttggcacacgacgtaaatggaaacccagagaaa

SEQ ID NO: 15755 - DNA, 601 bp, Homo sapiens
  chr2:1846364-1846965
  hypo
ccttcctcccttggcctcctccgcccccgccccaccctctggctcctgacctgcctgcaggtcgctggggctctgaggccggcgtgggttgacctcacgtccacccctgcaccccactgaccgctgcacaactgcgcggatgccccaaaattagactcatcgtccacgtcaccaacccaaagccccagtccagcagaccgggtgcgtccttgctgagttttgcttccctcaggttccgttgatgtcacacccaaggcctctcctcgtctgtccagcttccgcttccaggcgcttccgcttccaggcgcttccgcttccaggcgcttccgcttccaggcgcttccgcttccaggcgcttccgcttccaggcgcgcggtgctagtaccggcccccgggctgggaacacctccaggccagcgctttagcatcatccgaggctctccgcttcctcagggggacccgagttcttccacgcgactcgtaggccccgccatcctcgctgggctctccctgcaacccttgccgccatccttcgggctggccgatgtccctgccttgtctgtggctcgttcccagctgcgtggcctctgcatcctgcaag

SEQ ID NO: 15756 - DNA, 310 bp, Homo sapiens
  chr2:1926246-1926556
  hypo
tcaggttccccttggtcatgtcgaacacctcttcagacctgtccgagttcacagaggtggtatcgtcgtcccgctcatgacacccatcctccttcgcacagctggcaaacactctcgaccgggggctcaactgctcctccagccgcatgaggttcagcatgtccgagtagtttctgtccggcgtccttccggggaagtcctcttctggccggacatgctgacggatgttcatgttctgctgcggattcctctcctgcgggttggtctcactgagcttcctggccaggtcgaagcactgattcctcaaaca

SEQ ID NO: 15757 - DNA, 168 bp, Homo sapiens
  chr2:1932937-1933105
  hypo
ggagaagtcactttcccagcccgggtggccttcagtcgggcacctctcctaggtgcggcgctgacctcggcgcccctcagctgccggcagcacaggacatggcctggctccgggatcagctattctcacttccagcacgagatccccgcacccctcctctgcctccct

SEQ ID NO: 15758 - DNA, 1110 bp, Homo sapiens
  chr2:2189142-2190252
  hypo
aactcaccacaaattgtgtggcgtgcaaactaatatattcacctgattggcctccacacgtgagggggacgcagccgggcctcctcgagtcccgcgttccttctgtgagggggacgcagccaggccttccgggccttcccgagtcccgcgttccttctgtgaggcggacgcagccgggcctcctcgagtcccgcgttccttccgtgagggggacgcagccaggccttccgggccttcccgagtcccgcgttccttctgtgaggcggacgcagccgggcctcccagacgcccgcgttccttacgtgagggggacgcagccgggccttccgggccttcccgagtcccgcgttccttacgtgaggcggacgcagccgggcctcccagacgcccgcgttccttacgtgagggggacgcagccgggccttccgggccttccgggccttcccgagtcccgcgttccttctgtgagggggacgcagccgggcctcccagacgcccgcgttccttacgtgagggggacgcagccgggccttccgggccttcccaagtcccgcgttccttctgtgaggcggacgcagccgggcctcccagacgtccgcgttccttccttgagggggacgcagccaggccttccgggccttcccgagtcccgcgttccttccgtgaggcggacgcagccgggcctcccagacgcccgcgttccttccgtgagggggacgcagccaggccttccgggccttccggagtcccgcgttccttccgtgagggggacgcagccgggcctcccagacgcccgcgttccttacgtgagggggacgcagccaggccttccgggccttcccgagtcccgcgttccttacgtgagggggacgcagccaggccttccgggccttcccgagtcccgcgttcctttcgtgagggggacgtagccgggcctccccgagttccgcggtcattatgtgagggggacgcagccgggccttcccgagtcctgcggtccttactggttaactgtagtcccgcactgttaatgtttttcgttttttgaagccaagatagcgtgctcaccgcaaaagaaatatggacctcgatgaacagataatagggaga

SEQ ID NO: 15759 - DNA, 398 bp, Homo sapiens
  chr2:2584792-2585190
  hypo
actgtgcatgtctgtagagggcggatgtccggggggtgcattgtgcatgtctgtcgagggcgtatgtccagggatgcactgtgcatgtctgtcgaggatgtatgtccaggaggtgcactgtgcatgtctgtcgagggcgtatgtccgggggtgcactgtgcatgtctctcgagggtgtatttccggggggtgcactgtgcatgtctgtcgagggtgtatgaccgggggtgcactgtgcatgtcatgtctgtcgaggttgtatgtctgggggtgcactgtgcatgtctttcgagggtgtatgtccgggggtgtactgtgcatgtcatgtctgtcgaggttgtatgtctgggggtgcactgtgcatgtctgtcgagggcgtatgtccagggggtacactg

SEQ ID NO: 15760 - DNA, 318 bp, Homo sapiens
  chr2:2673022-2673340
  hypo
ggctcaggccccttcatgcagcgaggagtcagggcccccgaatctctgggaggacgcatcctaggggatttcctccacggtgttggaattgaaggacttaatgacgtcccttcccatgcgcacagtgtcccaggcacgtgcctcagcctcacatgccggggcacagggctgccctgcgaggtgggaggaagacctaggtgaggacccggagccaagggctttcctgaccgtgaaattgcaggtgaggacctggagccgagggccggttctagctgctccaagcgcccgagggccaacgttggcagtggcctccaatgc

SEQ ID NO: 15761 - DNA, 291 bp, Homo sapiens
  chr2:2737133-2737424
  hypo
agatctcccataggatgaaagcgaggccccaagagactgcatcgcactttcagtgctgtaagcaagtgcgtagtttggatggaaagagaggaagactcaggaaccggcagctgagaaccaccgcacacgcgtgtgcgggcaccgcgccgccccctgctgagaaccaccgcacacgcgtgtgcaggcaccacgccggctgctgcgagtccagtctcgctcagtctcttgagccagctggaagcgtgtgtggcattgaggggtccacctcccgggtgtggaaactgggattta

SEQ ID NO: 15762 - DNA, 30 bp, Homo sapiens
  chr2:2799355-2799385
  hypo
accccgggatggtgcgggcggctcctgaca

SEQ ID NO: 15763 - DNA, 148 bp, Homo sapiens
  chr2:2849144-2849292
  hypo
atgcaagtcacacctatcagacgcatgacagagatgaagccagctggtcccgagcgtgcctatgcctgtccatgtctgtgctgcctcgctgcaggcatgcactctcctgccgtgcgctgaggtggacgctgcatggctgggacattct

SEQ ID NO: 15764 - DNA, 225 bp, Homo sapiens
  chr2:2854300-2854525
  hypo
agccatcctgccacagagatgcgccccagatgcgtcctggatggatcaagtcactgcgtgtcagggaacggctcctctgctgctcctgatgcctggccacccgtcccggtccacccctcgcgaggaaggccaggcctccgctcctctgcggagcctttcaggaacatgaggccgcctgtgtcagccatcagggtacccaccggcgctgctcatccacctgccacc

SEQ ID NO: 15765 - DNA, 220 bp, Homo sapiens
  chr2:2879706-2879926
  hypo
cacctagcaagggccccggtacaaaggacacctgtgtacataccccaaccagcaagaatccagcagggtggcaagggccggtgggcatggcccacaaagcggctgggtcctgggtacaggctgggtgtccccacgctgtctgtgccccttgctgtgctgaggtgggccagtgaagggcttgaggcagccagggcctttgctcttgcgtgtgtttcctcag

SEQ ID NO: 15766 - DNA, 31 bp, Homo sapiens
  chr2:3084233-3084264
  hypo
ccccaggtggcctcaccggggtgtgtgggac

SEQ ID NO: 15767 - DNA, 102 bp, Homo sapiens
  chr2:3173338-3173440
  hypo
agacgccaagccccctcggccagggctggcggcaggagggatggagtaagtgcctccacttaatagagccttgatcctatgcagtgccgatcccaacgtcct

SEQ ID NO: 15768 - DNA, 30 bp, Homo sapiens
  chr2:3174505-3174535
  hypo
atggcgcacacacacggggaccctctgcca

SEQ ID NO: 15769 - DNA, 32 bp, Homo sapiens
  chr2:3176170-3176202
  hypo
acctgcaaggggctccgcgctttctgaagggc

SEQ ID NO: 15770 - DNA, 30 bp, Homo sapiens
  chr2:3197981-3198011
  hypo
aggaaaagccactgcgtgctgcgggcacac

SEQ ID NO: 15771 - DNA, 30 bp, Homo sapiens
  chr2:3201759-3201789
  hypo
ctcacaagatttaccgaggggctttgctgg

SEQ ID NO: 15772 - DNA, 30 bp, Homo sapiens
  chr2:3207245-3207275
  hypo
ccaggccaggaggccgggacagcacagcac

SEQ ID NO: 15773 - DNA, 30 bp, Homo sapiens
  chr2:3215145-3215175
  hypo
tagaacccaccgaccgcccacaaagttccc

SEQ ID NO: 15774 - DNA, 131 bp, Homo sapiens
  chr2:3260561-3260692
  hypo
agctcatgaagcagcgactggccagggagccacgtgaatgacacaccacatgccggacacgggcgggcttgggcacgcagccccacaggcacaccacgcattcatgctttgtccacgggaggaagggattg

SEQ ID NO: 15775 - DNA, 30 bp, Homo sapiens
  chr2:3260965-3260995
  hypo
ttccgaggtgtggacggtggctcctgcaaa

SEQ ID NO: 15776 - DNA, 31 bp, Homo sapiens
  chr2:3272898-3272929
  hypo
tgcacatccaaaaatgcgtgtggtctgatca

SEQ ID NO: 15777 - DNA, 108 bp, Homo sapiens
  chr2:3280968-3281076
  hypo
ctgtctccacccacacggccccgcacctgtctccacccacgcggccccacacctgtctccacccacgcggccccacacctgtctccactcacacggctccacacgtgt

SEQ ID NO: 15778 - DNA, 30 bp, Homo sapiens
  chr2:3285033-3285063
  hypo
cctgccctccttctcggtgtccctccagga

SEQ ID NO: 15779 - DNA, 30 bp, Homo sapiens
  chr2:3285952-3285982
  hypo
tgctgggttggtgtcggcaaccatcaccag

SEQ ID NO: 15780 - DNA, 412 bp, Homo sapiens
  chr2:3290090-3290502
  hypo
ctgctcctgtgtaaacgtgtggccgtgacatggcctccgttcagctccaggtgtcaagtgccagattccaggaagccccaggagtgggcccagaaggagcagtgccaaggacccccgggggtggggccatcctaccaggcatgtcctgggcacatgggaagaccgagaggtgagggacacttggtgtccgtgacagggaaaggctgaggcatcaggcttcgggctgtgtctaccttggtgactctggaagcgttttcataagcacttgtcatatgtcatatgcagtgtgctccaggggagcaggggatctcacagtccagagtgccccgcagagcacccgagacagcggctggcagagcacaggcagcaatgccccagaggaacaagccagcccctgcgtccccacgtgctg

SEQ ID NO: 15781 - DNA, 30 bp, Homo sapiens
  chr2:3291386-3291416
  hypo
ggctccagaaagttcgttcaccacgctccg

SEQ ID NO: 15782 - DNA, 31 bp, Homo sapiens
  chr2:3303472-3303503
  hypo
aggttttgccaaatcacggaagacagacaac

SEQ ID NO: 15783 - DNA, 30 bp, Homo sapiens
  chr2:3313512-3313542
  hypo
cgacagatgcttcccgatgggagtgaaggt

SEQ ID NO: 15784 - DNA, 188 bp, Homo sapiens
  chr2:3321053-3321241
  hypo
gccccaggagcgcacgaggtgctgaccgagctgagggcctactgtgtgcctcgcacgcggggtggagcatggagccccaggagcgcacaaggtgctgaccgagctgagggcctactgtgtgcctcgcacgcagggtggagcacggagccctgggagcgcatgaggcactgaccgagctgagggcctac

SEQ ID NO: 15785 - DNA, 47 bp, Homo sapiens
  chr2:3347211-3347258
  hypo
agctaggcaggtctgcaaaggcggtcgccctgtgagcagtacttaaa

SEQ ID NO: 15786 - DNA, 31 bp, Homo sapiens
  chr2:3352469-3352500
  hypo
gtaacgatgcaggtaccgggcattttccagg

SEQ ID NO: 15787 - DNA, 23 bp, Homo sapiens
  chr2:3373014-3373037
  hypo
tcagggaggagccaagatggccg

SEQ ID NO: 15788 - DNA, 31 bp, Homo sapiens
  chr2:3382209-3382240
  hypo
atggggttatgaaagccggcaccgcaccact

SEQ ID NO: 15789 - DNA, 30 bp, Homo sapiens
  chr2:3391444-3391474
  hypo
cccccctcagctcgcgcctccggaggagca

SEQ ID NO: 15790 - DNA, 30 bp, Homo sapiens
  chr2:3391940-3391970
  hypo
cccagcttcggtggcgccagcgaggcctcg

SEQ ID NO: 15791 - DNA, 493 bp, Homo sapiens
  chr2:3418352-3418845
  hypo
tgctctgccgtgtgtcggcccgtttcctgaatcctcaggcatcagtgcctcacagagctgtgtgccagcagtgtcctcacagagctgtcaagcgtgtccatgccgtgccgcttgtgcctctgccccgcgagggacaccattccccgtcgttgacgtgcattcctcttgttcatcgtgcgagactccccacccctgtgccaccggtctcggtgtctcccacactggagtgtccgtatttcataaacacacgtatgtgtgcatgtatgtatttcttatggacatcacgtacgttggcccttcatatctacaggttccgcatccacagattccaccacccgcagttgggaaacacagtgaggtatgcacagcaacctttcagctgtggttggttgaatccacgcgtgtggaacctgcagatacggaggaccaaccaaggacttgagcagtcatggatttggtatcccaggagtcctggaaccggtccccggcagat

SEQ ID NO: 15792 - DNA, 35 bp, Homo sapiens
  chr2:3446896-3446931
  hypo
ttcttcctcttcttagcgcacgcaaagccaggcag

SEQ ID NO: 15793 - DNA, 113 bp, Homo sapiens
  chr2:3453098-3453211
  hypo
gacctgcatctgcccgcccagtcttgagttcagctccatccctccctgcagttccgcagcctccggcttccccacctcagcttggctgagagtttcacgttcatccaagtgct

SEQ ID NO: 15794 - DNA, 176 bp, Homo sapiens; identical to SEQ ID NO: 1285
  chr2:3465088-3465264
  hypo

SEQ ID NO: 15795 - DNA, 30 bp, Homo sapiens
  chr2:3467388-3467418
  hypo
cggttagggtgatgcggctggccacggcat

SEQ ID NO: 15796 - DNA, 57 bp, Homo sapiens
  chr2:3504355-3504412
  hypo
ctgtccaccaggatcgcaggcaggggccacggaggctgccacggaaggacagctgtc

SEQ ID NO: 15797 - DNA, 356 bp, Homo sapiens
  chr2:3582015-3582371
  hypo
ccctgaaccagggctgtagcacgccctgctcgccaagtcacaggtggtgggaacggttgagctgtgacacccttggggctctgcggttcctggtgtctctgagttttgggtgccaccacgttcccctcatccagacaccggtgcccaaggcagaagcgggttgcggcatgcccggcccaaccgccggctgagcgcggatcctgtggcaagcgtgggatctgggccggggtgcaagccgagcacagcccactgggccgaatgtgcagagtatcaccagcagtgatccttgggccgagtgaggccaggcaggggcgccagcggccatggaggtctccggctggtgaagtggcacagaa

SEQ ID NO: 15798 - DNA, 30 bp, Homo sapiens
  chr2:3593320-3593350
  hypo
aggcagcaagacagccgctggctcaagttc

SEQ ID NO: 15799 - DNA, 72 bp, Homo sapiens
  chr2:3593597-3593669
  hypo
tgatcctcaacagcacgctgtccattcttcatgcgtttacgcaatggatgtgatttacgaacattccatttt

SEQ ID NO: 15800 - DNA, 404 bp, Homo sapiens
  chr2:3675047-3675451
  hypo
tgggcatgatgatggagggcacgatgagcacgacgatggggtggatctgggcataataacggtagatcggggcatgatgatgctgggcatgacactgggcatgatgacggtctgcatctgggcatgatggctctgggcacaacgatgctgggcatgaagatgggacacgatgatggggtggatctgggcataatgactctgggcacgatgacgctgagcacagtgacgctgggcacgatgacggtggatctaggtatgacgatgctgggcatgatgatggtagatctaggtatgacgatgctgggcatgacaacagcgtgaatctgggcacgacgatgctgggcacaatgctgcacacgatgatgctgggcataacactgggcgtgatgacaaagtgggtctca

SEQ ID NO: 15801 - DNA, 161 bp, Homo sapiens
  chr2:3681409-3681570
  hypo
acagaacctcaggaccggtgcggtggagagctgggtacaggaggcccgaggaagacacatgtttcctgcgcagacagggcctgggacaacacgaaacagcagatgtgcattttcagggaatatcagcttttctgtaggaccctctgcgggaggccgagcag

SEQ ID NO: 15802 - DNA, 309 bp, Homo sapiens
  chr2:3714207-3714516
  hypo
gtggcacagcaaacagggcagcgcgcagtcagcatcacccagccttgatgagcacgccgcgatgctgctacgagctctgtgaagacgcgattttaattccagccagtcggtaggttgtgtgtctgtgtggcggtttagcaccgtttcaaattctgcattgcatggtgggggcgacggtggtgggtgagctctgcgtcgtaatcttttcggagctcttccagcacagtccagtcaaatcctctttgacgacaggcctgttccacacctgtgctgctcagcagggaggccgcaggtgcctagggagcacac

SEQ ID NO: 15803 - DNA, 31 bp, Homo sapiens
  chr2:4271695-4271726
  hypo
gctggtatcgtgagttcgtttctgagtgggt

SEQ ID NO: 15804 - DNA, 212 bp, Homo sapiens
  chr2:6402888-6403100
  hypo
tgtaaggacctgcatagaaggcgcggctcaggctgaagtagagcaggacgataacaaagtgaaagaggagaggcgaggagaggcgggaaggggcggagcacgtgtttcggatgggcgcatagaatggagacttccgggccatgtcaggccttttgcttttactgtgagtgaagccataggacgaccctgcacagagctgacgtgatccaata

SEQ ID NO: 15805 - DNA, 569 bp, Homo sapiens; identical to SEQ ID NO: 1300
  chr2:7005629-7006198
  hypo

SEQ ID NO: 15806 - DNA, 271 bp, Homo sapiens
  chr2:7073080-7073351
  hypo
agactattagtatacgatgcatgcaaacagagaggtgctttattgaagcgggacaagacctctattcatagtaaagtcaaacaaaccacgcatgtgaaaacctccacttatagcggctgcataagcttaactgcgcagagctatactgctttttgaaatactaacttgcaagttcagcaacagctaagaaaacaatcctagacttggaaattgaaagattggaagagaagtggagggattcctttggaaccctttacgtacgtatgtgtaa

SEQ ID NO: 15807 - DNA, 99 bp, Homo sapiens
  chr2:7109818-7109917
  hypo
atttgacctcaagtgacggattgcaggcaaaatacagtcagtcttcctttcatgcacaaaattgttacaaatctttttgtttgtttgtttgtttcagac

SEQ ID NO: 15808 - DNA, 299 bp, Homo sapiens
  chr2:7164397-7164696
  hypo
actcagtctgtgaagtggagccgatgcttccagcatagccagtgctcctgggtctcccgtgggatccgtttgtgcagagtcctcacggcgtttctcccacagtgctgctttcaaaatggaagaagatgacgcgcccatcaagcgctgccccaagtgcaaagtctacatcgagcgagacgaaggctgcgcgcagatgatgtgcaagaactgcaagcacgccttctgctggtactgcctggagtctctggacgtgagtacggccttcagcttcaccttgcggcatttagctttgaggttta

SEQ ID NO: 15809 - DNA, 96 bp, Homo sapiens
  chr2:7237059-7237155
  hypo
ctgccattttgcctcttagtgcgcatgtgttgagcccactcacctcacgccggaggagatctatctgaaagctgcgggcttcaggtgtttctatct

SEQ ID NO: 15810 - DNA, 257 bp, Homo sapiens; identical to SEQ ID NO: 1301
  chr2:7571219-7571476
  hypo

SEQ ID NO: 15811 - DNA, 86 bp, Homo sapiens; identical to SEQ ID NO: 1302
  chr2:7571576-7571662
  hypo

SEQ ID NO: 15812 - DNA, 183 bp, Homo sapiens
  chr2:7907357-7907540
  hypo
ttaccctgagaaagcgtagcctagtgcttctgaggaaccgcagacccctaggcaggagccaggagaagaccgccaagcacggcgaggccggccgtgctaccaaataaggcacctctcctgcagggagctgggacctaagggactcgcgctgggcacggggcaggcggcgcccatgtccccttc

SEQ ID NO: 15813 - DNA, 30 bp, Homo sapiens
  chr2:7909326-7909356
  hypo
tggttgggaggtagcgaggggaaaaagaga

SEQ ID NO: 15814 - DNA, 30 bp, Homo sapiens
  chr2:8234819-8234849
  hypo
attcagagccgcagcgtgtgcggacggaac

SEQ ID NO: 15815 - DNA, 30 bp, Homo sapiens
  chr2:8301444-8301474
  hypo
gtgcgccacaccctcgtctccaggccctgc

SEQ ID NO: 15816 - DNA, 30 bp, Homo sapiens
  chr2:8395180-8395210
  hypo
tggcacctggtggacgtgccttcataagca

SEQ ID NO: 15817 - DNA, 30 bp, Homo sapiens
  chr2:8406381-8406411
  hypo
gatgggaggatggacggatgtttcagaagg

SEQ ID NO: 15818 - DNA, 30 bp, Homo sapiens
  chr2:8448296-8448326
  hypo
gcactaaaggcccacgttgccttagaagaa

SEQ ID NO: 15819 - DNA, 121 bp, Homo sapiens
  chr2:8647531-8647652
  hypo
ctgctatcaccagaacgtacaggcgcacagcctctataggtcttctgctccattgatgaggcttctcatcaggtggaggccacctccagcaggtgccatcgttcttcgcccttattcactg

SEQ ID NO: 15820 - DNA, 35 bp, Homo sapiens
  chr2:8647955-8647990
  hypo
tcactccgcaagtgccgcaccgctttcacacatgt

SEQ ID NO: 15821 - DNA, 166 bp, Homo sapiens
  chr2:8691180-8691346
  hypo
gaatccaagtgccaaatcagacgagcacgtcttaaagatcatctgcgcgctcggctatgtaaagaaacacaagcgtatttgtatttcgctggtgtcaggccgaaaacttggcaccatccctcactcctccgctcccttgccatacgattccagtcagcccccaatt

SEQ ID NO: 15822 - DNA, 73 bp, Homo sapiens
  chr2:8736123-8736196
  hypo
tctgctgacatctgagcgaggcaggttcacaagcagccagcggcctcccacatccacccgtcgcaaaggcatc

SEQ ID NO: 15823 - DNA, 30 bp, Homo sapiens
  chr2:8768425-8768455
  hypo
gcagggcgtccctccgctgcaccctcatgg

SEQ ID NO: 15824 - DNA, 30 bp, Homo sapiens
  chr2:8781806-8781836
  hypo
accaccaggtcttccgggcgcgtcggaatc

SEQ ID NO: 15825 - DNA, 471 bp, Homo sapiens; identical to SEQ ID NO: 1303
  chr2:8818828-8819299
  hypo

SEQ ID NO: 15826 - DNA, 65 bp, Homo sapiens; identical to SEQ ID NO: 1304
  chr2:8821591-8821656
  hypo

SEQ ID NO: 15827 - DNA, 696 bp, Homo sapiens; identical to SEQ ID NO: 1305
  chr2:8821975-8822671
  hypo

SEQ ID NO: 15828 - DNA, 44 bp, Homo sapiens; identical to SEQ ID NO: 1307
  chr2:8825799-8825843
  hypo

SEQ ID NO: 15829 - DNA, 379 bp, Homo sapiens
  chr2:8834591-8834970
  hypo
ccttggagagctttgcgcaggagagtgatggaaccaaactatttagcagccacatttcttttaatgtttctcgtttataggttacacatttgttgttattattattgatttaataatactgtgtcaagataaagttgtcaaaatcacggcacccaaacttcacattataaaattttaatcacaacctgttttatcacaatcgctttgcagcaacggaaattattcgtagtaattattaagttggtgcaaaattatttgtggtttttgccatcacttttaatggcaaacgccgcaaataattttgcaccaacctaaatattataactaaggaaacgaatagaatggtgtgcatcagaggtacctccgccagtgcttaccc

SEQ ID NO: 15830 - DNA, 172 bp, Homo sapiens
  chr2:8854101-8854273
  hypo
agcatttccaatatgcgcgctgtgggtcatcttttggtccatgtttcagccaatcaccaaccagactgtgagaggctttccagcttgcttagctacagcatcaaatgcagaagctctgccagccggactcacaacgaactcagcctgctccggccttcggctcctcccagca

SEQ ID NO: 15831 - DNA, 148 bp, Homo sapiens
  chr2:8870323-8870471
  hypo
caatacccctgccatacagaacgctggatctcggtttactcagcctctccctgtagcgtcacaggctgtgcactcacctaggtgagcccctaagagcagggtttgcttctgcttcacctaacgccacgtcttccctcaaatgtgtggt

SEQ ID NO: 15832 - DNA, 31 bp, Homo sapiens
  chr2:8875261-8875292
  hypo
tgttggtcactaacaacgttctaaatgaagt

SEQ ID NO: 15833 - DNA, 139 bp, Homo sapiens
  chr2:8978179-8978318
  hypo
gaaaaggtccaaggatgattacgacgtgcgtaggttgcgaaccatcgaaaagcacccaccaatgtgtcaacctggcaactcaggaaaaagccaataaggagcctgacttcatcagaagttggtgcggggtggggacaat

SEQ ID NO: 15834 - DNA, 188 bp, Homo sapiens
  chr2:8983019-8983207
  hypo
aaaatccctgaggatacgcagcatgcaacttgttctttcttaggaatgttttggaaagcaatccagataacagcctggaaagaagttattggaaacaggctcggctgtagccacattttgatggaggaggaaaggagggtcggacgccaggtgtggcagggggcagatgatggcgggctggtgatgag

SEQ ID NO: 15835 - DNA, 167 bp, Homo sapiens
  chr2:9002473-9002640
  hypo
ttgtgagtgcctcctacctgccgggcacatagaaacgtgttttctcctcacaggaactgggcatggagcctagcccgtggtgagcgctcagcaaacatgcacgcagtacacacctcgcttctagtggaaaggacaatactgaccacgaccaaggaaagagggtctac

SEQ ID NO: 15836 - DNA, 390 bp, Homo sapiens
  chr2:9078567-9078957
  hypo
aaggtgccagtgcttccacaccgtgtttcatgctgccgtgtttcattccaccacgtttcatgccgccacattttatgctgccacgtttcatgccgccacgtttcatgccgccatctcatgccgctgtgtctcaggccacatttcatgccgtgtttcatgccaccgtgtttcatgctgccacgtttcatgccaccgtctcatgccactgtgtctcatgccaccacatttcatgccgtgtctcatgccaccatgtttcatgctgtcacgtttcatgctgccatgtttcatgccaccgttgtctcatgccgccacatttcatgccgtgtttcatgccaccgtgtttcatgctgccatgtttcatgcctccacgcctctgcctgtgctgtccac

SEQ ID NO: 15837 - DNA, 30 bp, Homo sapiens; identical to SEQ ID NO: 1309
  chr2:9143732-9143762
  hypo

SEQ ID NO: 15838 - DNA, 37 bp, Homo sapiens; identical to SEQ ID NO: 1310
  chr2:9144135-9144172
  hypo

SEQ ID NO: 15839 - DNA, 30 bp, Homo sapiens
  chr2:9193456-9193486
  hypo
tgacctgtttgtgccgcagtcagctatgag

SEQ ID NO: 15840 - DNA, 24 bp, Homo sapiens
  chr2:9217108-9217132
  hypo
tgcgccattccacttcagcctggg

SEQ ID NO: 15841 - DNA, 97 bp, Homo sapiens
  chr2:9218663-9218760
  hypo
ggggtttgagaagcacgcgaaagtgggtggtgcttacacgttactgaattgctggtagaatattgctgggacccagcctgggcaacatagcaagacc

SEQ ID NO: 15842 - DNA, 266 bp, Homo sapiens
  chr2:9245034-9245300
  hypo
gggcaacagagcgagactctgtctctaaataaataaataaaggaaaggggtacggagacaagcagcccaaccctatacatttgtccccagggtctctacaaagaggcaagctgggactgaaatctctcccgagtgtggaagacggacgggagcagcagccggacagcacagctcaaggccgagaggctcactgggtgactcgggccgctttggggtggctgtgagaagcgaagggaggctgactcggggtgtggtggggagtgaag

SEQ ID NO: 15843 - DNA, 30 bp, Homo sapiens
  chr2:9251134-9251164
  hypo
gctcagtgaagggccggggcagctgatgtg

SEQ ID NO: 15844 - DNA, 710 bp, Homo sapiens; identical to SEQ ID NO: 1312
  chr2:9346514-9347224
  hypo

SEQ ID NO: 15845 - DNA, 322 bp, Homo sapiens; identical to SEQ ID NO: 1313
  chr2:9347494-9347816
  hypo

SEQ ID NO: 15846 - DNA, 180 bp, Homo sapiens
  chr2:9352744-9352924
  hypo
cacgtttccaggcaccggtgccttcctttgtggagcatatacatgcattccaggcccgcactgtctgatgaggcagcctaagacaaatccagctctcagccgccacattgcaagtactcagtagccacacgtggctggtggctaccatattggctcagcaaccaccgggagagccatcac

SEQ ID NO: 15847 - DNA, 30 bp, Homo sapiens
  chr2:9402088-9402118
  hypo
catgtgcccctccccgtggggagtcagaaa

SEQ ID NO: 15848 - DNA, 31 bp, Homo sapiens
  chr2:9409364-9409395
  hypo
gagaggaattattttgcgggggggagggggc

SEQ ID NO: 15849 - DNA, 471 bp, Homo sapiens
  chr2:9455453-9455924
  hypo
tcctgagaaggagcagtgaggcgcagccaaggcagtggacgtgagaatggcatggagggaatgttggaagacgggtctgcgtatgtagggttaagacctggaatttgttgagaagcgtgccgcacggctgggtggcagcactggggtcagagatgactcttgggtgtcaagcaagtgaggagggtgggagagagggctttgtaggaaggaagagcattggaggaaggagagctggctgcatacttggggctgcctgcaagtagagggaaatgtggccctggaggcgggaactgtgacgggagtttcattcctcactcacctgtctggctgccaggactgtcaatgacagtggaaatctaggcgtgcttgctgtcgtaggttactcatcagcacggccttctgtttgtccttgttccttccagtcgttcctaagaccgcaccttaaactgcgcttttcagcatttaaaaatt

SEQ ID NO: 15850 - DNA, 139 bp, Homo sapiens
  chr2:9456807-9456946
  hypo
ttcctgactgaagtttcgcatcttgagttgactcgcatttgaactgctgtcacggagacttgcttgctcctcgtgtacctgttggttaggaggcttccattccacccaatttaatccatgcggacggtgtgtgtcccca

SEQ ID NO: 15851 - DNA, 6 bp, Homo sapiens
  chr2:9507598-9507604
  hypo
atctga

SEQ ID NO: 15852 - DNA, 181 bp, Homo sapiens
  chr2:9513161-9513342
  hypo
tgagggaacccactgagaccacgtatctcacacacaagtcagccagcaccgcagtgagctcagtgcacgggttagcgctgtgtggacggggagcatgtgccgggggacgttgaggcacccgccttaacctaggccctgtagagcgggcagaactggagccggagcaggagggaggcagtgt

SEQ ID NO: 15853 - DNA, 402 bp, Homo sapiens
  chr2:9609461-9609863
  hypo
gctatcctgggacccccggttaaacagccctattgtagaaggtgggtgttgctgaccagggacttgactacaatagttctgttggcggccctgttccctggggctctacaagaatagaaaacccgtgtggccctggactggccccgctctcccacgtgctgcagtcggggtgcagaatggaagttcacattgctgtggctggtcctcaggagccgtggggagggcagtctgcgggaggctgcggcccttccactggactttcactctggccttcttccctgtcctcctgacaccactcctcccgcctcccctccctctccctcacctcccacaaacacaccagaactattcaactctgaggaacaggagtatgagacagcttccattcggccaggaatggga

SEQ ID NO: 15854 - DNA, 31 bp, Homo sapiens
  chr2:9770735-9770766
  hypo
gcccgcttttgtctcccgcacacgcggccgc

SEQ ID NO: 15855 - DNA, 30 bp, Homo sapiens
  chr2:9772360-9772390
  hypo
cgctgctatgatcccgattccagcaggtct

SEQ ID NO: 15856 - DNA, 31 bp, Homo sapiens
  chr2:9865161-9865192
  hypo
cagtgcggccaggagtcgagggccaagctct

SEQ ID NO: 15857 - DNA, 500 bp, Homo sapiens
  chr2:9960363-9960863
  hypo
caaacctaagagggctgctaccgactcccaggatgaaatcacagatgaagtcacagaatcggaatgctggctttgggagagaccgccctgctccttcaggaagctgggggtgggggcgggagtgggggcggggagcaggtgcaggggaaggggtaagagctcagactctggacttagaaggatccgattgatgattccagatcccagtggcttcatgaacgtgggcgagttacacaacttctcggtctcctgcttttctccttagtaaaacaacccatgccccacggaggtgccgtaaagacagaacgactctgcagatagcgttaagcacgatgccagccaccttggaggcgcacagtacatacggctcatggcatttcagggagcggcaagccagttgctgccaacccgcccgatgactgtgtctaaggcggaatctggaagcctctctgagcctccgtctccctcactgtcccctcggggtgagggaggccactcta

SEQ ID NO: 15858 - DNA, 26 bp, Homo sapiens
  chr2:9977955-9977981
  hypo
ctgtgtagccgggcgcggtggctcac

SEQ ID NO: 15859 - DNA, 214 bp, Homo sapiens
  chr2:10110632-10110846
  hypo
ttgtgagcaggttgctcgcagagagatggaacttcgtctttttcttgatggcgtgatcttatctctgggtgtgccagagccaatttcaacatacttttgtctcttcccagttcagtccccgtccattttttcccttcagtgtgctgtctcagcctgtggagaaggggaaggggcagtcagagacaggacaaaatcagagcgccttgttccctgg

SEQ ID NO: 15860 - DNA, 301 bp, Homo sapiens
  chr2:10150734-10151035
  hypo
gggtcaggtggacaggcatgtgtatgggcaggtcaggtggccaggcgtgcgtatgggcgagtgaggtgggcaggcaagtgaggtgggcaggcgtgcatgtgggcgagtcaggtgggcaggcgtgggtgtgggcgagtctggacaggcgtgcatacgggcgggtcaggtgggcaggcgtttgtatgggcgggtcaggtgggcagacgtgtgtatggtcggtttaggtggacaggcttgagtatgggtgtgcgtatggacgagtcaggtggacaggcgtgcgtatgggagagtcaggtggaca

SEQ ID NO: 15861 - DNA, 121 bp, Homo sapiens
  chr2:10151094-10151215
  hypo
gattgcgtatgggagagtcaggtggacaggcgtgcgtatgggtgtgcgtatggacgagtcagctgggcaggcgtgcgtacaggcgggtcaggtgggcaggcgtttgtatgggcgggtcagg

SEQ ID NO: 15862 - DNA, 186 bp, Homo sapiens; identical to SEQ ID NO: 1316
  chr2:10151689-10151875
  hypo

SEQ ID NO: 15863 - DNA, 121 bp, Homo sapiens; identical to SEQ ID NO: 1317
  chr2:10151929-10152050
  hypo

SEQ ID NO: 15864 - DNA, 186 bp, Homo sapiens; identical to SEQ ID NO: 1318
  chr2:10152409-10152595
  hypo

SEQ ID NO: 15865 - DNA, 541 bp, Homo sapiens
  chr2:10152954-10153495
  hypo
caggcgtgtgtatgggcaggtcaggtggacaggactgaatatgggggggtcaggtgggcaggcgtgcgtatggtcgggtcatgtgggcaggcgtgcttatgggcaggtcaggtgggcaggtgtgcatgtgggagagtcaggtggacaggattgaatatgggcgggtcaggtgcgcagacatgcgtatggccgggtcacgtgggcaggcgtgcgtttgggcgggtcaggtgggcaggggtgcatatgggcgggtcaggtggacaggcgcacgtatgggtgagtaagatggacaggcatgtgtgtgggagagtcaggtgaacaggattgcttatgggctagtcaggtggacaggtgtgcgtatgggtgtgcctatgggagagtcaggtggacaggattgcgtatagccggatcaggtgggcaggcatgcgtatgagcgagtcaggtgggcagacatgcgtatgggcgggtcaggtggacaggcgtgtgtataggcaggtcaggtggacaggcgtgcatatgggtatgtgtatgggcgggtcag

SEQ ID NO: 15866 - DNA, 93 bp, Homo sapiens
  chr2:10153554-10153647
  hypo
tgggcaggcgtttgtatgggcgggtcaggtgggcaggagttcttatggtcgggtcaggtgggcaggcgtgcatatggtcggtttaggtggaca

SEQ ID NO: 15867 - DNA, 343 bp, Homo sapiens
  chr2:10153872-10154215
  hypo
aggcatgtgtatgggcgagtcaggtggacacgcgtgcgtatgggcaagtcaggtgggcaggcatgcgtatgggagagtcaggtggacagccctgcgtatgagcgagtcaggtggacaggattgcgtatgggcaagtcaggtggacaggcgtgcgtatgagtgagtcaggtggacaggattgcgtatgggagagtcaggtggacagccctgcgtatgagcgagtcaggtggacaggattgcttatgggcaagtcaggtggacaggcgtgcgtatgagcgagtcaggtggacaggattgcgtatgggagagtcaggtggacaggcgtgcatatgagcgagtcagg

SEQ ID NO: 15868 - DNA, 121 bp, Homo sapiens
  chr2:10154874-10154995
  hypo
gcatgcgtacgggcaggtcaggtgggcaggcgtgcatacgggcaggtcaggtgtgcaggtgtttgtatgggcgggtcaggtgggcaggcgttcgtatggtcaggtcaggtgggcaggtgtt

SEQ ID NO: 15869 - DNA, 241 bp, Homo sapiens
  chr2:10155174-10155415
  hypo
tgcgtatgggcgagttaggtggacaggcatgtgtatggacgagtcagatgggcaggtgtgcgtatgggtgtgcgtatgggcgagtcaggtggacaggattgcgtatgatcgggtcaggtgggcaggcatgtgtatgggcaggtcaggtggacaggattgaatatgggggggtcaggtgggcaggcgtgcgtatggtcgggtcatgtgggcaggcgtgcttatgggcgggtctggtggacag

SEQ ID NO: 15870 - DNA, 46 bp, Homo sapiens
  chr2:10155774-10155820
  hypo
agtgtgcgtatgggcgagtcaggtgggcagacgtgcatatgggtgt

SEQ ID NO: 15871 - DNA, 271 bp, Homo sapiens
  chr2:10156254-10156525
  hypo
atggctgtgcgtttgggcgagtcaggtgggcagacgtgcgtatgggcagtcaggtggacaggcgtgtgtatgggtgagtcaggtggaccactgtgtgtacgggcgagtcaggtggaccggcgtgcatatgggcaggtcaggtgggtaggcgtgtgtatggatgtgcatatgggcgggtcaggtggacaggtgtgtatatgggtgtacatgtgtgcacaggtgctactttactctgtgttcaacacgtgttcgtggacgtgctccaggccca

SEQ ID NO: 15872 - DNA, 31 bp, Homo sapiens
  chr2:10172772-10172803
  hypo
gtgggactggccaagccgctcagcctctctt

SEQ ID NO: 15873 - DNA, 199 bp, Homo sapiens; identical to SEQ ID NO: 1320
  chr2:10183603-10183802
  hypo

SEQ ID NO: 15874 - DNA, 355 bp, Homo sapiens; identical to SEQ ID NO: 1321
  chr2:10183814-10184169
  hypo

SEQ ID NO: 15875 - DNA, 30 bp, Homo sapiens
  chr2:10192464-10192494
  hypo
cggtgtgtgaccgacgtttcatgcgcagtg

SEQ ID NO: 15876 - DNA, 30 bp, Homo sapiens
  chr2:10238085-10238115
  hypo
tatgtgcgaggattgcgctctgcaattgtt

SEQ ID NO: 15877 - DNA, 38 bp, Homo sapiens
  chr2:10289568-10289606
  hypo
ttttgttgttgtttaattttcagcgaaaagtttgctgg

SEQ ID NO: 15878 - DNA, 151 bp, Homo sapiens
  chr2:10328930-10329081
  hypo
taggaagagggcgctgcggagagagtggtgtgtgtcttcctgtgtcctcctaggagcttctgtctgagaagtcagaagtcatgagttcccagtcctggccgcatttggaggctggatcattggagggaggcgccggcgccccatgtagctg

SEQ ID NO: 15879 - DNA, 61 bp, Homo sapiens
  chr2:10334909-10334970
  hypo
gtccttccctcccctgcgtcctcatctgtcactccttggtcacagccgccccctgactttc

SEQ ID NO: 15880 - DNA, 30 bp, Homo sapiens
  chr2:10395174-10395204
  hypo
tgctcttcgtgccccgtctccggggtgtcc

SEQ ID NO: 15881 - DNA, 245 bp, Homo sapiens
  chr2:10517931-10518176
  hypo
atccccagggtggtgagccaccgaggggggccaggcacgggggagggtattcaagggcggcaagccaccaaggggacggggcaggcacagggagggcatttcagagagtgcaaggaggcggcgaagatgctggttgagggcacgggtgaggcggggaggcgtttcgactttggactgaaggccttaattgaccaaggcggtaatttccagtcctgtgacctcacgacaggctggacattggagga

SEQ ID NO: 15882 - DNA, 140 bp, Homo sapiens
  chr2:10526101-10526241
  hypo
atgtgctggccttgggttttacggctgtctggcaattagaatattaatgtcgataacacagcaggacttgcgtgtgacaagctgagccacataacgtcacagtcgctcttgaacatctcggactttcacatgggccagcc

SEQ ID NO: 15883 - DNA, 31 bp, Homo sapiens
  chr2:10528985-10529016
  hypo
gctgagaccctcactccgagtaggatgttat

SEQ ID NO: 15884 - DNA, 114 bp, Homo sapiens
  chr2:10545012-10545126
  hypo
ccaggcagtgcagagattccaccgagcccaggccgcagcccccacctcccgccgggctgtgctcagtgtcaggaatcggctcccaagatggccgcctttcttgtaaagctgtgc

SEQ ID NO: 15885 - DNA, 30 bp, Homo sapiens
  chr2:10566934-10566964
  hypo
cagtcagttctgagcgagcggcccctggac

SEQ ID NO: 15886 - DNA, 661 bp, Homo sapiens; identical to SEQ ID NO: 1324
  chr2:10588855-10589516
  hypo

SEQ ID NO: 15887 - DNA, 153 bp, Homo sapiens
  chr2:10600736-10600889
  hypo
accagtcgttggagtcagccacgatgaacggcgtgcgggctgatgcgggagccacacaagcccgtatgcacagaaaagaatgacatccacagccgagacagcagcaatgagggcacatgggaaggatagggcgccacctggcccttcagagtc

SEQ ID NO: 15888 - DNA, 101 bp, Homo sapiens
  chr2:10601534-10601635
  hypo
tcactgtctaatacagcggccatgagccacgtgtagttcttgagcacttgaaatgtggccagggtgactaagaaactgaattaattgtatttctatttttt

SEQ ID NO: 15889 - DNA, 42 bp, Homo sapiens
  chr2:10615321-10615363
  hypo
gggacccagaggctcacggcggtcaggcggctcacccaaggc

SEQ ID NO: 15890 - DNA, 85 bp, Homo sapiens
  chr2:10615572-10615657
  hypo
ttctcagggctggccacgggggagggggggctgtgtgaggtccccagggaaccctacccccggcccagggcggggagggctgcac

SEQ ID NO: 15891 - DNA, 202 bp, Homo sapiens
  chr2:10634546-10634748
  hypo
cagggccttttccagacgtgggccatggaagtccagcagctggatcaaaaccccatgagctgagcctgcccctatggatcacaggtcacagacatgtcttcggaagccagtcggggaggccagggctggggcgggccaggaccaatccacaccagaggcacaacagcagttcccaaggaagagcagtcgagggcaagggcca

SEQ ID NO: 15892 - DNA, 31 bp, Homo sapiens
  chr2:10659326-10659357
  hypo
acacacaccagtgccccgctgcctccatgtt

SEQ ID NO: 15893 - DNA, 307 bp, Homo sapiens
  chr2:10666471-10666778
  hypo
tccggctccccgtcccgcctcctcccaccatgccccagaactagcaccccctgagcacttgcttgagccacggtgagatccagaacccggccggagccaggcttcggccaagccgcggccacgctgccatctgacaagcccggggcctgtcccaacaagactgaggcccgtgtggagacaactgcacagtcgtgaccggttgtcctgacagacctgctagcacctcccgaggctgggagggcgctaaggggagctggcctgcctgcccgcctgctgcgggcggcacctccggcgcctgagctcccag

SEQ ID NO: 15894 - DNA, 118 bp, Homo sapiens
  chr2:10732498-10732616
  hypo
aaaggggaagaaatcacgctccatttagggctgcctatgcctgtggcacagggagaagagcaccaggattcagacggacaccactaggtgtctgggaacgatgcgccatgtctcagga

SEQ ID NO: 15895 - DNA, 206 bp, Homo sapiens
  chr2:10742495-10742701
  hypo
gcagtttacgactgtcgaccatttcccatgatccaaacagagcctaagatacggccaaaggtcagtaaggaatagggattagcaaagcccggatactccaaaaatggaaaacccatttaaaaatgctatcaggtttctagtggaggtgacaatatcaatcattctagcattatgtcccacagtacaattaccgcagaggtcataat

SEQ ID NO: 15896 - DNA, 30 bp, Homo sapiens
  chr2:10917800-10917830
  hypo
gctgcggggcagaccgacagagagagagag

SEQ ID NO: 15897 - DNA, 31 bp, Homo sapiens
  chr2:10926512-10926543
  hypo
gccacagtctgccccccgccggcagaggctg

SEQ ID NO: 15898 - DNA, 30 bp, Homo sapiens
  chr2:10999966-10999996
  hypo
ttcttaagcagggccgtggggctgtcggta

SEQ ID NO: 15899 - DNA, 30 bp, Homo sapiens
  chr2:11053844-11053874
  hypo
actcaactccagcagcgggggcgagggcaa

SEQ ID NO: 15900 - DNA, 30 bp, Homo sapiens
  chr2:11166612-11166642
  hypo
tcctcccatccacatcggcaggtcacgggc

SEQ ID NO: 15901 - DNA, 31 bp, Homo sapiens
  chr2:11209932-11209963
  hypo
actggtccactgggcccgtgggcccgccctg

SEQ ID NO: 15902 - DNA, 31 bp, Homo sapiens
  chr2:11243180-11243211
  hypo
ggacagaggcctgggccgtgtctgtgaacag

SEQ ID NO: 15903 - DNA, 30 bp, Homo sapiens
  chr2:11397460-11397490
  hypo
cagtggcggcgtcacgatcagctgtcgggg

SEQ ID NO: 15904 - DNA, 24 bp, Homo sapiens
  chr2:11527872-11527896
  hypo
gtgagccaccgtgcccagccaacc

SEQ ID NO: 15905 - DNA, 31 bp, Homo sapiens
  chr2:11537161-11537192
  hypo
gggctcaataacacaccgagagctgcttttc

SEQ ID NO: 15906 - DNA, 31 bp, Homo sapiens
  chr2:11758939-11758970
  hypo
gcagtggacggtgccccggcccagccacatg

SEQ ID NO: 15907 - DNA, 217 bp, Homo sapiens
  chr2:12005881-12006098
  hypo
gggaaatggtgagtttcggagacaaacttgggacccactcagcagtggaggcggcagttcatcctaacatccttgctcttttatgtttctccagaaattgtgatcaaccagaatccagaacacgctgtgcttaatggagtgaactgcctgtgaagcgcaggtgtgaggggcggatgataagtgacagtgccggtgcccccagcgcccttttacctga

SEQ ID NO: 15908 - DNA, 110 bp, Homo sapiens
  chr2:12103261-12103371
  hypo
tgacccaaggaaagaatgtttcgcacatacctagcaaccagagcgaactcataaaacgttcattccaaggcaacaccattcatctttgcgtatctccctgtgactgctgc

SEQ ID NO: 15909 - DNA, 30 bp, Homo sapiens
  chr2:12694623-12694653
  hypo
aagaagggacacagcgggggttgctgaaga

SEQ ID NO: 15910 - DNA, 37 bp, Homo sapiens; identical to SEQ ID NO: 1329
  chr2:12858219-12858256
  hypo

SEQ ID NO: 15911 - DNA, 30 bp, Homo sapiens; identical to SEQ ID NO: 1330
  chr2:12858468-12858498
  hypo

SEQ ID NO: 15912 - DNA, 30 bp, Homo sapiens; identical to SEQ ID NO: 1331
  chr2:12897042-12897072
  hypo

SEQ ID NO: 15913 - DNA, 1632 bp, Homo sapiens; identical to SEQ ID NO: 1333
  chr2:14773808-14775440
  hypo

SEQ ID NO: 15914 - DNA, 38 bp, Homo sapiens
  chr2:14961327-14961365
  hypo
cgtgagccaccgcgcccggccaacagagacactcttaa

SEQ ID NO: 15915 - DNA, 31 bp, Homo sapiens
  chr2:15027588-15027619
  hypo
aagcctatgagaaatacgaggcagggagggc

SEQ ID NO: 15916 - DNA, 454 bp, Homo sapiens
  chr2:15307075-15307529
  hypo
ccatggagaacaatcggcagatacacatgttgcttctgggaacagcattcaactccagatgctttttctgctaaggagcagggccacaggtggccctcacacccagtgctgtgctgcgcggagggctgtactgaaggttctgaaggcctggtgagtccccctcacggccagaaggagagacccggcttcggcttcatggccggcctcccgcaggtgtctgcccagctcctctgcatcccagcgcccttgctggaggctagccaagaggtggtcaacaatacgtggatagaagggagtggagacacacttcaccagcagcttggcatccaggagcagggaaagaagttcttggtcacaattggaatcattcaccttcaagaaataagacaggcacagcgtgagggggtgtttgctttgttcgcctcccccttggatccctcgctctccactgggc

SEQ ID NO: 15917 - DNA, 30 bp, Homo sapiens
  chr2:15382063-15382093
  hypo
gtgcttttacttgccgtcttgtctcaagga

SEQ ID NO: 15918 - DNA, 18 bp, Homo sapiens
  chr2:15474599-15474617
  hypo
ccacgcctctcttctcct

SEQ ID NO: 15919 - DNA, 30 bp, Homo sapiens
  chr2:15475195-15475225
  hypo
cacgcctgtaatccccgcacttcgggaggt

SEQ ID NO: 15920 - DNA, 31 bp, Homo sapiens
  chr2:15910903-15910934
  hypo
agggcacagccacctccggaaggcgacaggt

SEQ ID NO: 15921 - DNA, 93 bp, Homo sapiens; identical to SEQ ID NO: 1334
  chr2:16079904-16079997
  hypo

SEQ ID NO: 15922 - DNA, 38 bp, Homo sapiens; identical to SEQ ID NO: 1335
  chr2:16080353-16080391
  hypo

SEQ ID NO: 15923 - DNA, 824 bp, Homo sapiens; identical to SEQ ID NO: 1337
  chr2:16081809-16082633
  hypo

SEQ ID NO: 15924 - DNA, 30 bp, Homo sapiens
  chr2:16124647-16124677
  hypo
cccgcctgcccggccgtgggagctgccagc

SEQ ID NO: 15925 - DNA, 43 bp, Homo sapiens
  chr2:16274078-16274121
  hypo
aaaaaaaaaaaaaaaaaaaaaaaaaaagcgaatgattatataa

SEQ ID NO: 15926 - DNA, 303 bp, Homo sapiens; identical to SEQ ID NO: 1340
  chr2:17720134-17720437
  hypo

SEQ ID NO: 15927 - DNA, 30 bp, Homo sapiens
  chr2:17830609-17830639
  hypo
ggaacctacctcgtcgccccgattccatcc

SEQ ID NO: 15928 - DNA, 30 bp, Homo sapiens
  chr2:19249122-19249152
  hypo
gccgtcatccttagcgtgacttgaaaagga

SEQ ID NO: 15929 - DNA, 69 bp, Homo sapiens; identical to SEQ ID NO: 1350
  chr2:20101401-20101470
  hypo

SEQ ID NO: 15930 - DNA, 30 bp, Homo sapiens
  chr2:20111763-20111793
  hypo
tcatctggctcaagcggccactctggtcct

SEQ ID NO: 15931 - DNA, 31 bp, Homo sapiens
  chr2:20247560-20247591
  hypo
ataaatgggaggttttcgtactacttcacta

SEQ ID NO: 15932 - DNA, 41 bp, Homo sapiens; identical to SEQ ID NO: 1353
  chr2:20424155-20424196
  hypo

SEQ ID NO: 15933 - DNA, 84 bp, Homo sapiens
  chr2:20456251-20456335
  hypo
actgtgtaaatcatccgctaatatttatcgggcggtaactaacatgactaattcagaattacacacttccgccttacttagtac

SEQ ID NO: 15934 - DNA, 30 bp, Homo sapiens
  chr2:20494232-20494262
  hypo
caccccccatggaacgccgtaatactgagg

SEQ ID NO: 15935 - DNA, 171 bp, Homo sapiens
  chr2:20574693-20574864
  hypo
tctagatggtgagacaagaaccggatgaaaagacagtcatttggcagcgaggagcaagcgacgggcctcatcctcactctcgcccggcttgtcctgggccctcctgcggccctaggaattgcctgagggacaaacaaagtggacaaagtcgctgacagacctgagttactg

SEQ ID NO: 15936 - DNA, 164 bp, Homo sapiens
  chr2:20594842-20595006
  hypo
cattgcccgttttctttctctgttgtcataggctaattaatttggaacagcttgtactgtgcttgatgcgactctcttaagaacagtaagtaacatacaagggttttttcttttatttttttcctataagaaagaataaaatcagtatacggtaagaacaaaat

SEQ ID NO: 15937 - DNA, 33 bp, Homo sapiens
  chr2:20642225-20642258
  hypo
gccaccgctcccggccaacttttccatttttaa

SEQ ID NO: 15938 - DNA, 361 bp, Homo sapiens; identical to SEQ ID NO: 1356
  chr2:20646412-20646773
  hypo

SEQ ID NO: 15939 - DNA, 270 bp, Homo sapiens; identical to SEQ ID NO: 1357
  chr2:20646843-20647113
  hypo

SEQ ID NO: 15940 - DNA, 140 bp, Homo sapiens
  chr2:20666558-20666698
  hypo
gctgaaaacaagcatctagaacggatccctgaaccggcttctgactcatcctcttcaaattacgctaagatttgtcaggcccctccttcatctttaggccaagtgttaaaatgccatgtgggccgggcgcggtggctcac

SEQ ID NO: 15941 - DNA, 108 bp, Homo sapiens
  chr2:20841277-20841385
  hypo
atatcaggagggtgatctcaccggctggcaggtcatcttcctgcaacaccgtgaatcatctgttctcagcaccaacctcattctcccgtgaaccagtgtggccttcgg

SEQ ID NO: 15942 - DNA, 1557 bp, Homo sapiens; identical to SEQ ID NO: 1359
  chr2:20865810-20867367
  hypo

SEQ ID NO: 15943 - DNA, 865 bp, Homo sapiens; identical to SEQ ID NO: 1360
  chr2:21022198-21023063
  hypo

SEQ ID NO: 15944 - DNA, 31 bp, Homo sapiens
  chr2:22237527-22237558
  hypo
acttgtagacctaagccgcttttaaaaaact

SEQ ID NO: 15945 - DNA, 221 bp, Homo sapiens
  chr2:23546893-23547114
  hypo
gggacccagatctgggacagtcgaggtggccaccagtcaccaggcgttctcaggattctctttcagtttgagaggccacccttatttggataaacatgcgtaccgaattcaagaggcactaataccacggtgcgatgaagtgaaaaggcaaacacgcggagtgccagatctcccaacacaaacatggtcccaagcctggcgcacctggattgggcttggga

SEQ ID NO: 15946 - DNA, 30 bp, Homo sapiens
  chr2:23607167-23607197
  hypo
attaggagagcggtcggggtggagaagact

SEQ ID NO: 15947 - DNA, 31 bp, Homo sapiens
  chr2:23725076-23725107
  hypo
cattctgtgctttttccgggatcgcttgcat

SEQ ID NO: 15948 - DNA, 356 bp, Homo sapiens
  chr2:23785003-23785359
  hypo
tccaccctgtcaccacaggtccgggctctgtttccctgtgagaagccgcctcggcccaccgagatgtcccggcaccatagccgcttcgaaagagattaccgggtgggctgggaccgccgcgaatggagcgtcaacgggacgcatgggaccaccagcatctgcagtgtcacctcgggggccggtggcggcacagccagcagcctcagcgtccggcccggcctcctgccgctgcccgtggtgccctcccggctgcccaccccggctacagctcctgctccctgcaccaccggcagcagcgaggccatcaccagcctcgtggccagctctgcgtctgcggtcaccaccaaggtaagatg

SEQ ID NO: 15949 - DNA, 215 bp, Homo sapiens
  chr2:23793021-23793236
  hypo
tgagaactgagcagagcgagtgggccaggcatctgtatgcactcagagactgctgtcacatgcctttcctattgatggcagcaaaaatctgcatgcctagcttcccctcctctgctttctgggaaaggtgggtgaatactttgtacccttctggcactgtgaaaaggagtcccgggagctggggaatggcgcgaggtgcacgtctcaatagcaga

SEQ ID NO: 15950 - DNA, 195 bp, Homo sapiens
  chr2:23842959-23843154
  hypo
aagatggagcgagcctcggtgagggggcccagtggacacacagaggccaggcttaggctgatgtgtggagattggacgcagcaaaccacatgagggtgctggcagagcatgaagtgccagcccaggggtggtgagagggggcaccaggaggccagcggggcccatcagggagttggcactcgatcccttcgacaa

SEQ ID NO: 15951 - DNA, 140 bp, Homo sapiens
  chr2:23893203-23893343
  hypo
tgggacctcatgagaccaggccgggtgcctcctcacaagctggggcacgactggactcgccgaccggtgtgatgggcaggggggtgtgctgggcaccgtgcctgctacacaggggcaccgaagcagtgttccacccttgg

SEQ ID NO: 15952 - DNA, 30 bp, Homo sapiens
  chr2:23913079-23913109
  hypo
gtagggaagagtctcgtgggaagggcattt

SEQ ID NO: 15953 - DNA, 31 bp, Homo sapiens
  chr2:24016852-24016883
  hypo
ataaaacaaaatttagcgagaaaagtggcac

SEQ ID NO: 15954 - DNA, 30 bp, Homo sapiens
  chr2:24049917-24049947
  hypo
ttactatttcacgcccgtttgaagatctga

SEQ ID NO: 15955 - DNA, 132 bp, Homo sapiens
  chr2:24060337-24060469
  hypo
acagccacaacttgggcggctgcagctgcacccagggagctcccatcccaccgactcaaaaggggtgggattcccacttgtccccagtttccaaaagctccgtggaatgtgcagccccggctacacctcccc

SEQ ID NO: 15956 - DNA, 30 bp, Homo sapiens
  chr2:24240231-24240261
  hypo
accgtgagtgcagccgtgggtttcgggttc

SEQ ID NO: 15957 - DNA, 31 bp, Homo sapiens
  chr2:24412760-24412791
  hypo
agggagccaggctgctcgggggacggactgg

SEQ ID NO: 15958 - DNA, 30 bp, Homo sapiens
  chr2:24426359-24426389
  hypo
aacagagcccccagcgtgcatggctttgtg

SEQ ID NO: 15959 - DNA, 215 bp, Homo sapiens
  chr2:24443621-24443836
  hypo
tctcaagcattatccggcaggcagagacagcatttggaggatgtgagagcttccgtcactatttgtgaattcacacatcaaaagtgatgccttgctttgactctgcgtggaggcagccctgagtctgatgcccaccatctctcatgagagacagcagataccccgagagctagccagcagcagcctcctcacctcgacgacgagctgaaggtcag

SEQ ID NO: 15960 - DNA, 30 bp, Homo sapiens
  chr2:24444076-24444106
  hypo
agagcagcatgcgtacgcggagagttggca

SEQ ID NO: 15961 - DNA, 329 bp, Homo sapiens
  chr2:24584024-24584353
  hypo
ctagtcacactccgccgagcagtaggaagactctgtccccatagagcatagcacgacgaagctaaactttcctccccacccctcgccaagggacaggcgaagctcctactcagaatttgtctcttttctcccctcccggttcctggtctcctcacaaaagaccagacttcaactcaagccgccaccgtatcccaaaaccccaaaggtttgcccttgacaagaagcttcttcaaggggaaaggctttcttttgattggggtgagggaggagttagtgtttcctaatgaacgtaaccaaatgtcggcctggcacagtggctcacgcttgta

SEQ ID NO: 15962 - DNA, 7 bp, Homo sapiens
  chr2:24584977-24584984
  hypo
accacgc

SEQ ID NO: 15963 - DNA, 29 bp, Homo sapiens
  chr2:24681768-24681797
  hypo
tgagccaccgcgcccggccccatctctga

SEQ ID NO: 15964 - DNA, 31 bp, Homo sapiens
  chr2:24763332-24763363
  hypo
ttttttttttttgagacggagtttcgctttt

SEQ ID NO: 15965 - DNA, 442 bp, Homo sapiens
  chr2:25044264-25044706
  hypo
cgtgaacctccccacccgaattgcctcagttgtcctgagcctcatgtctctcctggtggtgggccaggcccctgcatgggaagggagcctgctgcggggcaggccagctgggggtgctcacctatgcgcagcatgaagttattgaaggactggttgttgatgttggtgagcgtatccttcatggccagcgcgaagtcggccaggtcagccaggtgctgccagcgctctctctcggacttgtcttcctgtgccaggggaccgtggagaaagtgtcaggggccgctcactgcagcagcctgctctgctgccttccctggcagtgttctgggggtggattccctacacctagatgttcaaggccttacttttcctcccacaaaggagtcgcagccacgctagctctgacttgccactgtgacaaagttcacgtagcaggtctagg

SEQ ID NO: 15966 - DNA, 206 bp, Homo sapiens
  chr2:25047256-25047462
  hypo
ttcttggaccccaggaaatggcgtgccacgtgctcaggcaacatgttggtgaccaaggcctcgttccagcgtcgcatctcatagacacgttccttctggtcgtggacctcaatcttccacaagaaaagtgtccgtgccagtttttctacctacagacacagacaaggcgaggcatgtgctctaagctggccactggatagaaggat

SEQ ID NO: 15967 - DNA, 173 bp, Homo sapiens
  chr2:25057322-25057495
  hypo
aactcgtggccctccccggcccctccctcaccaggggtcgatgagtatctcgaccagggccgtgcagagcaggacgacgcaggagcagctgaaggcagccccactctgcttctccttctccaccgagtagcgggtttccatctcggggtccatgaaccgcatggacaagagga

SEQ ID NO: 15968 - DNA, 276 bp, Homo sapiens
  chr2:25075398-25075674
  hypo
gagaggaggggcccacgtggcaaagcccggcctcagagcaggcatgagtggccaccgtgtactcagaaagtactcaactgggctgagcgtgagaggcctgatgccaggacagccccggacctcgacagaggcctgctgctccccaacacccccagcagacgcctgcctgcctctccacggccaggagccgctgcccgaggacccgagctgccaacgcccgcggaaacttgggttgccctcgtcactgccacacagagtggccgagccggtgctggg

SEQ ID NO: 15969 - DNA, 41 bp, Homo sapiens; identical to SEQ ID NO: 1366
  chr2:25265093-25265134
  hypo

SEQ ID NO: 15970 - DNA, 56 bp, Homo sapiens
  chr2:25369950-25370006
  hypo
cactggtgcagctgagcgcctgtgaactgtctgttctccagcgcccggcccctgtt

SEQ ID NO: 15971 - DNA, 30 bp, Homo sapiens
  chr2:25383389-25383419
  hypo
agagcactcccaggcgtgggtaggcctcaa

SEQ ID NO: 15972 - DNA, 714 bp, Homo sapiens; identical to SEQ ID NO: 1367
  chr2:25391012-25391726
  hypo

SEQ ID NO: 15973 - DNA, 234 bp, Homo sapiens; identical to SEQ ID NO: 1368
  chr2:25439138-25439372
  hypo

SEQ ID NO: 15974 - DNA, 121 bp, Homo sapiens; identical to SEQ ID NO: 1369
  chr2:25440005-25440126
  hypo

SEQ ID NO: 15975 - DNA, 31 bp, Homo sapiens
  chr2:25444163-25444194
  hypo
acaaggtgaaaatggccgagttggggataca

SEQ ID NO: 15976 - DNA, 150 bp, Homo sapiens; identical to SEQ ID NO: 1370
  chr2:25457151-25457301
  hypo

SEQ ID NO: 15977 - DNA, 140 bp, Homo sapiens; identical to SEQ ID NO: 1371
  chr2:25458562-25458702
  hypo

SEQ ID NO: 15978 - DNA, 96 bp, Homo sapiens; identical to SEQ ID NO: 1372
  chr2:25459790-25459886
  hypo

SEQ ID NO: 15979 - DNA, 109 bp, Homo sapiens; identical to SEQ ID NO: 1373
  chr2:25461983-25462092
  hypo

SEQ ID NO: 15980 - DNA, 449 bp, Homo sapiens; identical to SEQ ID NO: 1374
  chr2:25463163-25463612
  hypo

SEQ ID NO: 15981 - DNA, 173 bp, Homo sapiens; identical to SEQ ID NO: 1375
  chr2:25464416-25464589
  hypo

SEQ ID NO: 15982 - DNA, 775 bp, Homo sapiens; identical to SEQ ID NO: 1376
  chr2:25466754-25467529
  hypo

SEQ ID NO: 15983 - DNA, 99 bp, Homo sapiens; identical to SEQ ID NO: 1377
  chr2:25468110-25468209
  hypo

SEQ ID NO: 15984 - DNA, 311 bp, Homo sapiens; identical to SEQ ID NO: 1378
  chr2:25468876-25469187
  hypo

SEQ ID NO: 15985 - DNA, 174 bp, Homo sapiens; identical to SEQ ID NO: 1379
  chr2:25469473-25469647
  hypo

SEQ ID NO: 15986 - DNA, 124 bp, Homo sapiens; identical to SEQ ID NO: 1380
  chr2:25469905-25470029
  hypo

SEQ ID NO: 15987 - DNA, 163 bp, Homo sapiens; identical to SEQ ID NO: 1381
  chr2:25470448-25470611
  hypo

SEQ ID NO: 15988 - DNA, 193 bp, Homo sapiens; identical to SEQ ID NO: 1382
  chr2:25470891-25471084
  hypo

SEQ ID NO: 15989 - DNA, 91 bp, Homo sapiens; identical to SEQ ID NO: 1383
  chr2:25497815-25497906
  hypo

SEQ ID NO: 15990 - DNA, 238 bp, Homo sapiens; identical to SEQ ID NO: 1384
  chr2:25505303-25505541
  hypo

SEQ ID NO: 15991 - DNA, 30 bp, Homo sapiens; identical to SEQ ID NO: 1385
  chr2:25522993-25523023
  hypo

SEQ ID NO: 15992 - DNA, 107 bp, Homo sapiens
  chr2:25536769-25536876
  hypo
cccgctgctcacctttcggtcctcctcccgctccgcagcagagctgctggtgtccccggggccgctggagggcatggcgggcatctgggcgccgggaggcaggctgg

SEQ ID NO: 15993 - DNA, 30 bp, Homo sapiens
  chr2:25600737-25600767
  hypo
gaagcctcagcccccggccagcagagcgca

SEQ ID NO: 15994 - DNA, 90 bp, Homo sapiens
  chr2:25627710-25627800
  hypo
tgaaactctgtctcaaaaactaaaaaataataggccacagataggaaaactacacaacccgtggaaaatccaactcgccaccattattat

SEQ ID NO: 15995 - DNA, 105 bp, Homo sapiens
  chr2:26027550-26027655
  hypo
agttggttttcctgttcgtaagtgaaaagttattgataagtaaaggtctcttctcagtgcaggaatttgaaattggcaagcttgaaggccgggcacggtggctca

SEQ ID NO: 15996 - DNA, 100 bp, Homo sapiens
  chr2:26153168-26153268
  hypo
gtacaatcagatgtttcgagagacagacacacctgcatcacttctattagagtatattgtgtttttgttgttgttttgagatggagtctcactctgtcac

SEQ ID NO: 15997 - DNA, 30 bp, Homo sapiens
  chr2:26204428-26204458
  hypo
tgaccccgcgcagctcgggctccacccagg

SEQ ID NO: 15998 - DNA, 30 bp, Homo sapiens
  chr2:26411690-26411720
  hypo
gcacacaggtgagtcgtgtacaagcctaac

SEQ ID NO: 15999 - DNA, 25 bp, Homo sapiens
  chr2:26493752-26493777
  hypo
ttttttttttttgagacggagtctc

SEQ ID NO: 16000 - DNA, 127 bp, Homo sapiens
  chr2:26524623-26524750
  hypo
tcatccaagccccggcgctaaggttgccagatattaaaaagccctttttttgtatgtgaataaacgaaagggaatggcagtcggagtcgtaactcagctgggctcttagcatcggccggtaacacac

SEQ ID NO: 16001 - DNA, 176 bp, Homo sapiens
  chr2:26534836-26535012
  hypo
cagccagcaggagagtcgagcctgcccagggcttccgggcttgggccagggtccacagagacctggtgtccatatctaggaccttgtctgtggcaatcaggagattctgcagcacccaaaagaaagatgaaccccgtctgctggcgcccacaggactgagccgggggcaatgagaa

SEQ ID NO: 16002 - DNA, 30 bp, Homo sapiens
  chr2:26542028-26542058
  hypo
atttacagaggaagcgctacagcctgtgac

SEQ ID NO: 16003 - DNA, 30 bp, Homo sapiens
  chr2:26590880-26590910
  hypo
ctgtatccccagtatcgtagacactcggta

SEQ ID NO: 16004 - DNA, 35 bp, Homo sapiens
  chr2:26706035-26706070
  hypo
tgtgtgagttggtatgcgtgcgtgtatgagtgggt

SEQ ID NO: 16005 - DNA, 31 bp, Homo sapiens; identical to SEQ ID NO: 1388
  chr2:26749880-26749911
  hypo

SEQ ID NO: 16006 - DNA, 95 bp, Homo sapiens
  chr2:26832823-26832918
  hypo
agggcagaccaggcagcggaagcttagaaaactgcctagaacattcgctcctctgcttctcgtgggagcaggctgggttccgcttggagtggcag

SEQ ID NO: 16007 - DNA, 251 bp, Homo sapiens
  chr2:26986219-26986470
  hypo
gccatgcggaaggcacggatttttggagactggagaacccaagcgcaaatccctaccccactgctcaccagcaggttcttaagcaaatcactctgcttcgctgaatttactgtcctcagctataaaatggtgtcctcggcaactggagctagatgccttcgccactttgctgaaagatatgaactgtgcccaaggtgggcggtatcagataggagccccgaagtggaaacgtccagcgtgggaatctcctc

SEQ ID NO: 16008 - DNA, 12 bp, Homo sapiens
  chr2:27007338-27007350
  hypo
gagacagagtct

SEQ ID NO: 16009 - DNA, 408 bp, Homo sapiens; identical to SEQ ID NO: 1392
  chr2:27071070-27071478
  hypo

SEQ ID NO: 16010 - DNA, 456 bp, Homo sapiens; identical to SEQ ID NO: 1393
  chr2:27072486-27072942
  hypo

SEQ ID NO: 16011 - DNA, 30 bp, Homo sapiens
  chr2:27247193-27247223
  hypo
gtggggggccgggccggcaggcctctatag

SEQ ID NO: 16012 - DNA, 30 bp, Homo sapiens
  chr2:27249334-27249364
  hypo
actggggagccaggcgaggggggcttgggg

SEQ ID NO: 16013 - DNA, 250 bp, Homo sapiens; identical to SEQ ID NO: 1395
  chr2:27308892-27309142
  hypo

SEQ ID NO: 16014 - DNA, 111 bp, Homo sapiens; identical to SEQ ID NO: 1396
  chr2:27309206-27309317
  hypo

SEQ ID NO: 16015 - DNA, 149 bp, Homo sapiens
  chr2:27433176-27433325
  hypo
tacattgatccaaacgctatggtctcgcatctctccagaaagagggcggccaaaagcaagagctagctgttgtttcactacaactataacatgccaaggcacaaacagcagattgtgggacccccccccctttttttttggagacggag

SEQ ID NO: 16016 - DNA, 30 bp, Homo sapiens; identical to SEQ ID NO: 1398
  chr2:27484927-27484957
  hypo

SEQ ID NO: 16017 - DNA, 30 bp, Homo sapiens
  chr2:27532710-27532740
  hypo
ggaggttgtctgaccgttccagggtcaagc

SEQ ID NO: 16018 - DNA, 30 bp, Homo sapiens
  chr2:27601632-27601662
  hypo
cgcttcaggtggctcgagtagtgggacacg

SEQ ID NO: 16019 - DNA, 58 bp, Homo sapiens
  chr2:27703954-27704012
  hypo
gatacagctgtggtgaactcccgctcctgagggtcacggctataatcaaaagtttgta

SEQ ID NO: 16020 - DNA, 30 bp, Homo sapiens
  chr2:27805319-27805349
  hypo
caaacaactctcctcgggaccacacataaa

SEQ ID NO: 16021 - DNA, 31 bp, Homo sapiens
  chr2:27902576-27902607
  hypo
aaagcaaggtgcagaacggtgtgtataacag

SEQ ID NO: 16022 - DNA, 175 bp, Homo sapiens
  chr2:28065674-28065849
  hypo
attctacttgtaccatttctgccagctacattgaagatttatattgcgggatatcggaaatgctactcatgtttttttttttaccctgtttgcaaggttttctaacattatcaagaaccacaagactgtgaatctcacagatggaagaaagaatattttacgacagaaagagtat

SEQ ID NO: 16023 - DNA, 30 bp, Homo sapiens
  chr2:28442524-28442554
  hypo
gaaaaaaaaaaaaccgggtagaggattaca

SEQ ID NO: 16024 - DNA, 18 bp, Homo sapiens
  chr2:28502826-28502844
  hypo
gcccggcagaggcttttt

SEQ ID NO: 16025 - DNA, 150 bp, Homo sapiens
  chr2:28586479-28586629
  hypo
gacccttctcagcctccgggatgtttccccagcagcccgtgggcttccatcctcagttgtgggccttccagtgggtgggcattcatcactgcagacagcacgcagaggagcccacccgctgggtccctggggcaccgcagcccctctccc

SEQ ID NO: 16026 - DNA, 19 bp, Homo sapiens
  chr2:28608277-28608296
  hypo
gtcttgaaaagcttaggtg

SEQ ID NO: 16027 - DNA, 30 bp, Homo sapiens
  chr2:28918637-28918667
  hypo
aatcattcttttaacgtgtgtttaggccat

SEQ ID NO: 16028 - DNA, 35 bp, Homo sapiens
  chr2:28919659-28919694
  hypo
aataaagtttggggagctgacgacagtacaagttg

SEQ ID NO: 16029 - DNA, 394 bp, Homo sapiens; identical to SEQ ID NO: 1401
  chr2:29033303-29033697
  hypo

SEQ ID NO: 16030 - DNA, 23 bp, Homo sapiens
  chr2:29091584-29091607
  hypo
aagcttcaaactagggctgggcg

SEQ ID NO: 16031 - DNA, 31 bp, Homo sapiens
  chr2:29225584-29225615
  hypo
ctcacgagttgagacccggtgctcaggaggt

SEQ ID NO: 16032 - DNA, 54 bp, Homo sapiens; identical to SEQ ID NO: 1402
  chr2:29337997-29338051
  hypo

SEQ ID NO: 16033 - DNA, 589 bp, Homo sapiens; identical to SEQ ID NO: 1403
  chr2:29338158-29338747
  hypo

SEQ ID NO: 16034 - DNA, 297 bp, Homo sapiens; identical to SEQ ID NO: 1404
  chr2:29338809-29339106
  hypo

SEQ ID NO: 16035 - DNA, 30 bp, Homo sapiens
  chr2:29470034-29470064
  hypo
tcccccggcctccgcggcagcgccttgtgg

SEQ ID NO: 16036 - DNA, 464 bp, Homo sapiens; identical to SEQ ID NO: 1408
  chr2:30144174-30144638
  hypo

SEQ ID NO: 16037 - DNA, 31 bp, Homo sapiens; identical to SEQ ID NO: 1409
  chr2:30369485-30369516
  hypo

SEQ ID NO: 16038 - DNA, 30 bp, Homo sapiens
  chr2:30379567-30379597
  hypo
tgcaaactgtgatacgatcctgaccaaccg

SEQ ID NO: 16039 - DNA, 18 bp, Homo sapiens
  chr2:30453635-30453653
  hypo
gcccccgctgcagaccgg

SEQ ID NO: 16040 - DNA, 91 bp, Homo sapiens; identical to SEQ ID NO: 1411
  chr2:30453784-30453875
  hypo

SEQ ID NO: 16041 - DNA, 523 bp, Homo sapiens; identical to SEQ ID NO: 1412
  chr2:30454077-30454600
  hypo

SEQ ID NO: 16042 - DNA, 30 bp, Homo sapiens
  chr2:30478236-30478266
  hypo
acagagcccagagtcggggtccgtgtcccc

SEQ ID NO: 16043 - DNA, 30 bp, Homo sapiens
  chr2:30482153-30482183
  hypo
gggaagccaatggtcgccggcaccccttgc

SEQ ID NO: 16044 - DNA, 30 bp, Homo sapiens
  chr2:30495316-30495346
  hypo
ccggttttgcccatcgtcattcccttgcag

SEQ ID NO: 16045 - DNA, 31 bp, Homo sapiens
  chr2:30521569-30521600
  hypo
aatgttttcatttctccggtagaaataccta

SEQ ID NO: 16046 - DNA, 267 bp, Homo sapiens
  chr2:30525797-30526064
  hypo
caaactggttagcacagcacacgggacccctcaaggccggcctcactgcagcctcatctccgcacggaccagccctgccctccaccctccaggccccaggtttctttccgctcctgcccactctctcgcctcagcacctgtgcatgagctgttcccttgtccagcccacactcccacccgatccctcccagctgactccaactcactccagctaccagcttgaacagcacttcttccaggaagcatttctcacgtctgggttagacg

SEQ ID NO: 16047 - DNA, 30 bp, Homo sapiens
  chr2:30581821-30581851
  hypo
catggagatgctgagcgtcaacacggtgga

SEQ ID NO: 16048 - DNA, 319 bp, Homo sapiens; identical to SEQ ID NO: 1413
  chr2:31360270-31360589
  hypo

SEQ ID NO: 16049 - DNA, 125 bp, Homo sapiens; identical to SEQ ID NO: 1414
  chr2:31360630-31360755
  hypo

SEQ ID NO: 16050 - DNA, 890 bp, Homo sapiens; identical to SEQ ID NO: 1415
  chr2:31360816-31361706
  hypo

SEQ ID NO: 16051 - DNA, 192 bp, Homo sapiens
  chr2:31477234-31477426
  hypo
cctctgggtcttcccagactacgtgccggtacaggcacgcctgtgtgggcgctcctgtgcctgggcagagcagccgagtcctgacgcccttcaaaaggccttgccaaccatctgctcgggccgctctttgccgttacttctgggaagcatctaatgtggcatttcttccccgttgtcagccaaactcttccc

SEQ ID NO: 16052 - DNA, 96 bp, Homo sapiens
  chr2:31550127-31550223
  hypo
cttggtacgttcttgcgctagaaaatttctattttgtagagagattgctatcgcacacttactacaaaggaccgacgttatcgtaatgaaacaact

SEQ ID NO: 16053 - DNA, 96 bp, Homo sapiens
  chr2:31551360-31551456
  hypo
ttccttttgagacagtcgctctctgttacctaggctgaagtgcagtggtctgatttgaggtgcactgcagcctcaaacacctgggctcaagaaatc

SEQ ID NO: 16054 - DNA, 232 bp, Homo sapiens
  chr2:32142424-32142656
  hypo
tggacactgtgctaggcggtggggtatacagtagagaacaaaatagatattgtccctgtcctcgttcggctcacagtacagtgagtagcccatcacaggaagacctttagcaggtaccacgtaacagtctgtcgagcataccataaaagagattcatgtaccttgcacaaggttgaaataaatgacctccaacattaaatacaagcctaaaattttacgattaattatagca

SEQ ID NO: 16055 - DNA, 121 bp, Homo sapiens
  chr2:32244331-32244452
  hypo
gtgactcactttttcatctactagctagatcagtgggactagtttttccatcaaagaaaaatttagacacacctgagaggtaatagggtattaagctaaaattagcctggcgtggtggtgc

SEQ ID NO: 16056 - DNA, 25 bp, Homo sapiens
  chr2:32290051-32290076
  hypo
aagcaaggatactacatctttcggg

SEQ ID NO: 16057 - DNA, 24 bp, Homo sapiens
  chr2:32290375-32290399
  hypo
cgcgcctggccttaagctaacatt

SEQ ID NO: 16058 - DNA, 121 bp, Homo sapiens
  chr2:32291346-32291467
  hypo
agctccattctttatcacctcttaagaacatccaggatcccttggggagaattaaaacggttgcaaagttttagaatagaggaacatgtttaagcgtagatcattttttgggccagtcatg

SEQ ID NO: 16059 - DNA, 121 bp, Homo sapiens
  chr2:32504349-32504470
  hypo
tttttattacacttcgtgcaccagttattttccagtgaccagacttactggctgctatgaaatcataaattatgtttacagaaatttcagtctgagaaagaacctagattttccttttttt

SEQ ID NO: 16060 - DNA, 29 bp, Homo sapiens
  chr2:32504769-32504798
  hypo
gcccggccgaaagaacctagattttccta

SEQ ID NO: 16061 - DNA, 27 bp, Homo sapiens
  chr2:32560117-32560144
  hypo
tgtactccaacccgggcgacagcgact

SEQ ID NO: 16062 - DNA, 31 bp, Homo sapiens
  chr2:32580137-32580168
  hypo
tatgagtcaccgcacccggccaagtattcct

SEQ ID NO: 16063 - DNA, 86 bp, Homo sapiens
  chr2:33281535-33281621
  hypo
tggaggtgatgagggatgatgcgcgtcttcttcttgtcccttcgtggttgcaaaaatgtgtccagatttggcgggttcttggtctc

SEQ ID NO: 16064 - DNA, 20 bp, Homo sapiens
  chr2:33374270-33374290
  hypo
gactccgtctcactcacaaa

SEQ ID NO: 16065 - DNA, 158 bp, Homo sapiens
  chr2:37076581-37076739
  hypo
gaagatgatgcattgcgtcatacaaagactttagccagtgcgtcagctccagcactggctatatagcatttggatgggtggaaagctacatcatgaatcgattcttcaaacttttttcgatgagctgtgaattcttggatacacgtcttactttctag

SEQ ID NO: 16066 - DNA, 39 bp, Homo sapiens
  chr2:37149991-37150030
  hypo
atgaaaataaccactccgggccgcacgcggtggctcacg

SEQ ID NO: 16067 - DNA, 88 bp, Homo sapiens
  chr2:37241580-37241668
  hypo
aggtgtgagccaccgtgcccagccagtattattttttatatcaatggtaagcatagattttattgtactcctacgtagaaaacaaaat

SEQ ID NO: 16068 - DNA, 23 bp, Homo sapiens
  chr2:37242101-37242124
  hypo
gcgagactttgtctcaaaagaaa

SEQ ID NO: 16069 - DNA, 30 bp, Homo sapiens
  chr2:37376052-37376082
  hypo
ttgattctgaagaccgccagagaagcaaac

SEQ ID NO: 16070 - DNA, 595 bp, Homo sapiens; identical to SEQ ID NO: 1424
  chr2:37898933-37899528
  hypo

SEQ ID NO: 16071 - DNA, 31 bp, Homo sapiens; identical to SEQ ID NO: 1426
  chr2:37980872-37980903
  hypo

SEQ ID NO: 16072 - DNA, 49 bp, Homo sapiens
  chr2:38157988-38158037
  hypo
tgcccagcctctggcacggtgggccttccgcctccgcctgacatgagga

SEQ ID NO: 16073 - DNA, 43 bp, Homo sapiens
  chr2:38489623-38489666
  hypo
ctttcctgctggactgagacccgcagaccacctgcatgcccac

SEQ ID NO: 16074 - DNA, 32 bp, Homo sapiens
  chr2:38551438-38551470
  hypo
agtgctacaataataagcgagatcctccctag

SEQ ID NO: 16075 - DNA, 31 bp, Homo sapiens
  chr2:38571500-38571531
  hypo
caacactttgggaggccgaggcaggcagatc

SEQ ID NO: 16076 - DNA, 85 bp, Homo sapiens
  chr2:38585485-38585570
  hypo
caaagttcaaaaaagtcgaggtacataaaacaatctctacttaaaaaaggaaaaagctatagaaattattttaaaatggctgggc

SEQ ID NO: 16077 - DNA, 32 bp, Homo sapiens
  chr2:38649875-38649907
  hypo
aagaaaaaaaaaacaaacgataaagcttgcaa

SEQ ID NO: 16078 - DNA, 30 bp, Homo sapiens
  chr2:39016314-39016344
  hypo
cggcgacacggtgacactccttttcaaaga

SEQ ID NO: 16079 - DNA, 21 bp, Homo sapiens
  chr2:39034198-39034219
  hypo
ttgttttgttttttttgagac

SEQ ID NO: 16080 - DNA, 220 bp, Homo sapiens
  chr2:39186666-39186886
  hypo
tgaaggtgtgccttggagcaccgcaggtggtgaggagggtcagggcttccacgcggggtgatgacagtccctggcccgcaggccatttcccagaagctcagacaataccttcgggcctccgctcgacggactgccttgtccactctccgcctgggaacgggggttcgtgggagcgccttagtggaagtttgtggagctcgggaggtggcatgcacaggcg

SEQ ID NO: 16081 - DNA, 30 bp, Homo sapiens
  chr2:39188240-39188270
  hypo
atatggaacacggtgcgccagcctactcca

SEQ ID NO: 16082 - DNA, 30 bp, Homo sapiens
  chr2:39675195-39675225
  hypo
gactgtactgaagaacgctaaggaagtaca

SEQ ID NO: 16083 - DNA, 939 bp, Homo sapiens; identical to SEQ ID NO: 1432
  chr2:39893063-39894002
  hypo

SEQ ID NO: 16084 - DNA, 30 bp, Homo sapiens
  chr2:39963839-39963869
  hypo
caagggcctgaacccggctgatggcagcaa

SEQ ID NO: 16085 - DNA, 699 bp, Homo sapiens; identical to SEQ ID NO: 1434
  chr2:40678905-40679604
  hypo

SEQ ID NO: 16086 - DNA, 30 bp, Homo sapiens; identical to SEQ ID NO: 1435
  chr2:40679688-40679718
  hypo

SEQ ID NO: 16087 - DNA, 166 bp, Homo sapiens
  chr2:41223818-41223984
  hypo
ctaaaaacaagttaatatactcgcaatatattactgcctacgttttaccatttatcctcatgaagtgatttacatccatcgtatcctctattgcagcgatcaccaacctttttggcgctggggaccaattttttggaacacaatttttccacggaccagggagctg

SEQ ID NO: 16088 - DNA, 30 bp, Homo sapiens; identical to SEQ ID NO: 1437
  chr2:42111963-42111993
  hypo

SEQ ID NO: 16089 - DNA, 314 bp, Homo sapiens; identical to SEQ ID NO: 1438
  chr2:42274595-42274909
  hypo

SEQ ID NO: 16090 - DNA, 478 bp, Homo sapiens; identical to SEQ ID NO: 1439
  chr2:42275208-42275686
  hypo

SEQ ID NO: 16091 - DNA, 30 bp, Homo sapiens
  chr2:42403428-42403458
  hypo
acttattattcgatgcgtggattattgcat

SEQ ID NO: 16092 - DNA, 436 bp, Homo sapiens; identical to SEQ ID NO: 1443
  chr2:42720772-42721208
  hypo

SEQ ID NO: 16093 - DNA, 44 bp, Homo sapiens
  chr2:43002055-43002099
  hypo
gagtggctaaatttcccgtccctccccaccaacacacacacaca

SEQ ID NO: 16094 - DNA, 64 bp, Homo sapiens
  chr2:43103598-43103662
  hypo
acatgccgattttgccgcagattaaaaccatctcctgcgctccctggatcgtaacacataacag

SEQ ID NO: 16095 - DNA, 36 bp, Homo sapiens
  chr2:43123918-43123954
  hypo
ccaaagtactgggattataggcgtgagccaccacgc

SEQ ID NO: 16096 - DNA, 76 bp, Homo sapiens
  chr2:43148272-43148348
  hypo
acgatgatttccacctcgatgggcagtctcactggccaggattgaggcttgggtcactctccgcatcccaggtaca

SEQ ID NO: 16097 - DNA, 102 bp, Homo sapiens
  chr2:43173212-43173314
  hypo
accccctgactgaggacgccagcctctgaccagtggctgaaacccgtcttctaggcattaatccagaagttagatgtaccatgaaccttctggtctttctta

SEQ ID NO: 16098 - DNA, 31 bp, Homo sapiens
  chr2:43198399-43198430
  hypo
gacggatgaggtaggacgggatggagagata

SEQ ID NO: 16099 - DNA, 222 bp, Homo sapiens
  chr2:43227352-43227574
  hypo
actttttttcccaagaaagctcggcagccagttctgccgtttttggccaggctcttggggaaggcggcctgtttgggcacatgggctcccacgtgcgcagaagcatcacctgccctccatgtgatgcgcacactcacagacccacatgcttacgtacttgcagactcgcccaggcacacgtgtatcgccacatgcagacacgcaagcatacacttgctgcac

SEQ ID NO: 16100 - DNA, 188 bp, Homo sapiens
  chr2:43248942-43249130
  hypo
gcacctcaaagttcccttcaccgcggaggctgctgggtttctccgcattttcccatccagccccgccgccgcctgccatccagccctcctcccaggcttgctgcagccggcccagctgcgagggggcccgaggacggcactgcacaaaggccccattctcagctggcgggggctgttatcagcccagc

SEQ ID NO: 16101 - DNA, 31 bp, Homo sapiens
  chr2:43271000-43271031
  hypo
cttcttcataaatgggcgtccccaggaaggc

SEQ ID NO: 16102 - DNA, 174 bp, Homo sapiens
  chr2:43299387-43299561
  hypo
tgatccaggtagcctccgtgtccggctgatgggctgagggaggacactagaatggccaggctcccgtggctggattccagcaagcctttcatagcgtcctctgccatgcaggcctggagggtgaagcagttcaggttgcaggctttgtgactcctcaggcgctgggccttgagg

SEQ ID NO: 16103 - DNA, 190 bp, Homo sapiens
  chr2:43373135-43373325
  hypo
tttgtggggggatgttcgggtaggaaaggggagtaattaattcactgtcgcctgaattaaccagtgactgattccatcagttcgatcaaccactgtttattgccatagattgtatgccaggtaccacgctaggggttggggcttcccaggcttgacatatactcaagggaggagccgcaggtgggagcag

SEQ ID NO: 16104 - DNA, 140 bp, Homo sapiens
  chr2:43408196-43408336
  hypo
aggtacaatggtgaacgacacagacccaatccctgccctgggagagtgaatcatctagcaacggagacaaatattcaatacacacccaacgcatagttagtgagtattgcagagagtgaagggtgcgatgggatcagatt

SEQ ID NO: 16105 - DNA, 707 bp, Homo sapiens; identical to SEQ ID NO: 1452
  chr2:43451138-43451845
  hypo

SEQ ID NO: 16106 - DNA, 968 bp, Homo sapiens; identical to SEQ ID NO: 1453
  chr2:43451891-43452859
  hypo

SEQ ID NO: 16107 - DNA, 30 bp, Homo sapiens
  chr2:43654115-43654145
  hypo
aagtaatcagaagacggcaaatgcctgaaa

SEQ ID NO: 16108 - DNA, 36 bp, Homo sapiens
  chr2:43820773-43820809
  hypo
tttttttttttttttttgagacggagtcttgctcct

SEQ ID NO: 16109 - DNA, 30 bp, Homo sapiens
  chr2:43996800-43996830
  hypo
tctttctttttttttttctgtcgcccagtc

SEQ ID NO: 16110 - DNA, 31 bp, Homo sapiens
  chr2:44079072-44079103
  hypo
aactcagcttgccttccgccagccctgggct

SEQ ID NO: 16111 - DNA, 34 bp, Homo sapiens
  chr2:44113282-44113316
  hypo
acgccactgctctacaggccgggcaacagagtga

SEQ ID NO: 16112 - DNA, 180 bp, Homo sapiens
  chr2:44126056-44126236
  hypo
atttgtctttaatcatttcagcgaaactcgctgccccatacctacccccgcaccacccgccgctccccgctacctcaattctaaagacatttctagtttgatctggcatctttaaaaccagtaacctaaaatctaccatccagtccttgtcctgcaaccgtgattcacactgaatgtaaa

SEQ ID NO: 16113 - DNA, 30 bp, Homo sapiens
  chr2:44224218-44224248
  hypo
caaaaaaaccacgtcgctgccttcacaggg

SEQ ID NO: 16114 - DNA, 17 bp, Homo sapiens
  chr2:44332906-44332923
  hypo
cccggaaagaaatatct

SEQ ID NO: 16115 - DNA, 30 bp, Homo sapiens
  chr2:44428921-44428951
  hypo
cattagcagtatctcgtgctctgggggact

SEQ ID NO: 16116 - DNA, 33 bp, Homo sapiens
  chr2:44439161-44439194
  hypo
tacaggcgtgaatcaccgcgcctggtttagtca

SEQ ID NO: 16117 - DNA, 34 bp, Homo sapiens
  chr2:44505287-44505321
  hypo
taagcagcctgtcaggccaggcgtggtggctcac

SEQ ID NO: 16118 - DNA, 30 bp, Homo sapiens
  chr2:44554116-44554146
  hypo
gtaggctggggtcagcgaactacacctgga

SEQ ID NO: 16119 - DNA, 30 bp, Homo sapiens
  chr2:44554377-44554407
  hypo
aaaagtagaaacaaacgaaaatcccctacc

SEQ ID NO: 16120 - DNA, 30 bp, Homo sapiens; identical to SEQ ID NO: 1456
  chr2:45150461-45150491
  hypo

SEQ ID NO: 16121 - DNA, 62 bp, Homo sapiens; identical to SEQ ID NO: 1471
  chr2:45240364-45240426
  hypo

SEQ ID NO: 16122 - DNA, 140 bp, Homo sapiens; identical to SEQ ID NO: 1472
  chr2:45240490-45240630
  hypo

SEQ ID NO: 16123 - DNA, 405 bp, Homo sapiens; identical to SEQ ID NO: 1473
  chr2:45240763-45241168
  hypo

SEQ ID NO: 16124 - DNA, 206 bp, Homo sapiens
  chr2:45927197-45927403
  hypo
cgagccacaagatgaacgggggcagttaactaaccaggccgcctggggttgaggatgaaatgggtacctgagttttccttttaagtagcagagggctaacatctgaggccctgccgggagccagggtctcggtggagaggtgagaacacacctgggagcaatatagagaggtcttttttctttgcagcactcgaagtctgatggca

SEQ ID NO: 16125 - DNA, 42 bp, Homo sapiens
  chr2:45940265-45940307
  hypo
gtaaatgatctgtagtcgctgtcacctcgaggctcttataaa

SEQ ID NO: 16126 - DNA, 23 bp, Homo sapiens
  chr2:45950744-45950767
  hypo
gttttgttttgttttttgagacg

SEQ ID NO: 16127 - DNA, 31 bp, Homo sapiens
  chr2:46143761-46143792
  hypo
tatttctttagccaatcgggaatcttgggtg

SEQ ID NO: 16128 - DNA, 30 bp, Homo sapiens
  chr2:46398833-46398863
  hypo
gaggttacaagagccgggtgttgaaggcat

SEQ ID NO: 16129 - DNA, 46 bp, Homo sapiens; identical to SEQ ID NO: 1476
  chr2:46524184-46524230
  hypo

SEQ ID NO: 16130 - DNA, 141 bp, Homo sapiens; identical to SEQ ID NO: 1477
  chr2:46524535-46524676
  hypo

SEQ ID NO: 16131 - DNA, 1476 bp, Homo sapiens; identical to SEQ ID NO: 1478
  chr2:46525029-46526505
  hypo

SEQ ID NO: 16132 - DNA, 30 bp, Homo sapiens
  chr2:46707663-46707693
  hypo
aaaggccaggctggcgacggacccaaaccc

SEQ ID NO: 16133 - DNA, 5 bp, Homo sapiens
  chr2:46834842-46834847
  hypo
ttttt

SEQ ID NO: 16134 - DNA, 31 bp, Homo sapiens
  chr2:47125492-47125523
  hypo
tggttttagatgggatcgtgtctgaaaacca

SEQ ID NO: 16135 - DNA, 82 bp, Homo sapiens; identical to SEQ ID NO: 1481
  chr2:47167905-47167987
  hypo

SEQ ID NO: 16136 - DNA, 31 bp, Homo sapiens
  chr2:47236538-47236569
  hypo
ctgagtgaccgcacaacgcctagcccagtac

SEQ ID NO: 16137 - DNA, 102 bp, Homo sapiens
  chr2:47247695-47247797
  hypo
gctggcagcttgagctcgcccacaaggtggctgtagggctgctctggtcagctgagtcgggcatggtgggcagacagcctctcccgccgtctccctccaggc

SEQ ID NO: 16138 - DNA, 173 bp, Homo sapiens
  chr2:47475843-47476016
  hypo
actagagctatacttccgcatccctggggccatcgcagactcattagagatcagaagatgttgtggaccctcttgtcagagaaatgcacatatgtacaaagattgtcgtatgtcatttctagggtttctggaacactctgaagcatctcgttagactgcggaatgagaagccc

SEQ ID NO: 16139 - DNA, 329 bp, Homo sapiens; identical to SEQ ID NO: 1483
  chr2:47596114-47596443
  hypo

SEQ ID NO: 16140 - DNA, 27 bp, Homo sapiens
  chr2:47596455-47596482
  hypo
cgctagtccttcggcgagcgagcacct

SEQ ID NO: 16141 - DNA, 343 bp, Homo sapiens; identical to SEQ ID NO: 1485
  chr2:47596505-47596848
  hypo

SEQ ID NO: 16142 - DNA, 181 bp, Homo sapiens
  chr2:47598299-47598480
  hypo
aaatggtgactggtatgttgcaccgttattcaaatgttagacatgtagtttgatttcagtttctcttaactgtggaataaacaacttggctgccgtctctctctctctcttttttttggaaacagtgtctccgtctgtcgttcagcctggagtgcagtggcacatttacatgtcactgcgt

SEQ ID NO: 16143 - DNA, 348 bp, Homo sapiens; identical to SEQ ID NO: 1486
  chr2:47748080-47748428
  hypo

SEQ ID NO: 16144 - DNA, 2182 bp, Homo sapiens; identical to SEQ ID NO: 1487
  chr2:47796744-47798926
  hypo

SEQ ID NO: 16145 - DNA, 39 bp, Homo sapiens
  chr2:47802076-47802115
  hypo
ttatcccaaggaggccgggtgcggtggctcatgcctgta

SEQ ID NO: 16146 - DNA, 30 bp, Homo sapiens
  chr2:47917826-47917856
  hypo
ggggcacacccgggcgagggccctgcacct

SEQ ID NO: 16147 - DNA, 30 bp, Homo sapiens
  chr2:47918382-47918412
  hypo
catggcgtgctctccgcgttcgccgccacc

SEQ ID NO: 16148 - DNA, 31 bp, Homo sapiens
  chr2:48112329-48112360
  hypo
cataaaaggaagtgatcgaatactgaagtca

SEQ ID NO: 16149 - DNA, 101 bp, Homo sapiens
  chr2:48539632-48539733
  hypo
gatgatacatctctgaagtatcgtccagctctcaaattctgtgatccttctacagttaaacaggactgcttagccacctgattttaaaatagatggacggc

SEQ ID NO: 16150 - DNA, 30 bp, Homo sapiens
  chr2:48925981-48926011
  hypo
atacattttttttttttgagacggagtctt

SEQ ID NO: 16151 - DNA, 29 bp, Homo sapiens
  chr2:48926250-48926279
  hypo
ctgcgcccggccatattttatacatttta

SEQ ID NO: 16152 - DNA, 92 bp, Homo sapiens
  chr2:49621662-49621754
  hypo
ctacacctcaataatcagaggcggtgaagatttccataaaggaaaataaaagtttaagattccaataaatcggccgggcccggtggccacgc

SEQ ID NO: 16153 - DNA, 37 bp, Homo sapiens
  chr2:54019054-54019091
  hypo
aaaaaaaaaaaaaagacggagcctcgctctttcgccc

SEQ ID NO: 16154 - DNA, 155 bp, Homo sapiens
  chr2:54097366-54097521
  hypo
ctcataattttatcatcgtctgtcgagtacgtaacatgttctttgctgcgttcattacactagcatatgaaatacatcataaaatgttttactggttgcactatttcctataaagcttatatgccacaatttcttttcttttcgttttttttttt

SEQ ID NO: 16155 - DNA, 17 bp, Homo sapiens
  chr2:54182795-54182812
  hypo
tgtctgcaatccaagca

SEQ ID NO: 16156 - DNA, 46 bp, Homo sapiens
  chr2:54312199-54312245
  hypo
caaataagtctctttgttcaacgtcgttttgttcagtgtgagaaaa

SEQ ID NO: 16157 - DNA, 30 bp, Homo sapiens
  chr2:54482460-54482490
  hypo
gtagcttaacatctcggcatcttggcctct

SEQ ID NO: 16158 - DNA, 241 bp, Homo sapiens
  chr2:55289045-55289286
  hypo
taaaaacccgagaccctagcaaggcaaacacacaaaaacggctggacgttgagagaagcacattggcggaggaacacacaagcggttggatttcgagaggacatcaagagcacgtcaagagcacgtcaagagcacacggacaggcactggcacgccggcaggtcattgaccggcagaacagagtttggccagggctgtcagagaagagtcgggccgccaagcagcccgacttccagcggaa

SEQ ID NO: 16159 - DNA, 30 bp, Homo sapiens
  chr2:55366425-55366455
  hypo
atgaagcatcattacgttgggcagtcattt

SEQ ID NO: 16160 - DNA, 30 bp, Homo sapiens
  chr2:55458436-55458466
  hypo
gaaatgccaaaacacgggagggcataggtc

SEQ ID NO: 16161 - DNA, 17 bp, Homo sapiens
  chr2:55492354-55492371
  hypo
gacgacaagaacaaaac

SEQ ID NO: 16162 - DNA, 85 bp, Homo sapiens
  chr2:55499045-55499130
  hypo
tacaaaggtgtgtaatcggtgttactgaatgatttaatgcaaactcctctcctggacatttttttttttttgagatggagtctca

SEQ ID NO: 16163 - DNA, 41 bp, Homo sapiens
  chr2:55669239-55669280
  hypo
gtagggtggagccaagatggccgaataggaacagctccggt

SEQ ID NO: 16164 - DNA, 30 bp, Homo sapiens
  chr2:57986782-57986812
  hypo
gcatgcataaaacggcgccaggcacctagg

SEQ ID NO: 16165 - DNA, 30 bp, Homo sapiens
  chr2:57987077-57987107
  hypo
gagtgagggaacgaccgagccagcaagagg

SEQ ID NO: 16166 - DNA, 30 bp, Homo sapiens
  chr2:57987333-57987363
  hypo
aaaaggggcagtccccgaatggcctccctc

SEQ ID NO: 16167 - DNA, 31 bp, Homo sapiens
  chr2:58097324-58097355
  hypo
cagtgaaaaaggcacacggaagatgaaacca

SEQ ID NO: 16168 - DNA, 30 bp, Homo sapiens; identical to SEQ ID NO: 1520
  chr2:58655448-58655478
  hypo

SEQ ID NO: 16169 - DNA, 102 bp, Homo sapiens; identical to SEQ ID NO: 1521
  chr2:58776939-58777041
  hypo

SEQ ID NO: 16170 - DNA, 147 bp, Homo sapiens
  chr2:60705870-60706017
  hypo
aggctgaatgaaggagcgctctggtgctgcgaggccaggcctcctcccatgacggcaagtccttctttcagaaaacaggcctctgcccggggcatgctgcagctgcttctctgcagtgcctcagcaccttcccgcctcccaggcaca

SEQ ID NO: 16171 - DNA, 53 bp, Homo sapiens
  chr2:60706424-60706477
  hypo
cctctgcgggcacagcggccacacaccacggtgggacccggagaccatttttt

SEQ ID NO: 16172 - DNA, 146 bp, Homo sapiens
  chr2:60706680-60706826
  hypo
gtagaaagccccctctgtcaccggcccacagatctcagctgccatcgcactcaaaccctgtcaggcggtggagagtgtggacggcaggctgacgcggtttcaaagaggccgaccaggcaagaaccgtcctgtactcctgccccagc

SEQ ID NO: 16173 - DNA, 786 bp, Homo sapiens; identical to SEQ ID NO: 1524
  chr2:60783807-60784593
  hypo

SEQ ID NO: 16174 - DNA, 105 bp, Homo sapiens
  chr2:61135143-61135248
  hypo
ccaaaaatatcacagttgttttccttacctgagatgccctgaaagccttctcagttctcttaagtctgagataacatcttcctaattatacggtatactcagcaa

SEQ ID NO: 16175 - DNA, 21 bp, Homo sapiens
  chr2:61142250-61142271
  hypo
ccaccacgcctggccagtttg

SEQ ID NO: 16176 - DNA, 30 bp, Homo sapiens
  chr2:61175261-61175291
  hypo
acagccaggggccttcggtgaaggacgcgc

SEQ ID NO: 16177 - DNA, 457 bp, Homo sapiens; identical to SEQ ID NO: 1532
  chr2:61175642-61176099
  hypo

SEQ ID NO: 16178 - DNA, 127 bp, Homo sapiens
  chr2:61304101-61304228
  hypo
aagattttacttgcccgcgagatcttttgatatcagaaatgaagtactttgctgaatatttatctatggatgcccagcgctgggaagaggtggacatttcagttcattgcgacgttcacattttcaa

SEQ ID NO: 16179 - DNA, 30 bp, Homo sapiens
  chr2:61389158-61389188
  hypo
tcagaagagggggacgaacaggcaacagcc

SEQ ID NO: 16180 - DNA, 140 bp, Homo sapiens
  chr2:61448895-61449035
  hypo
aaagcagcaggatcagcgaggggtacaaagtcaaccgggaaccacgtatgatagatttttctggatgtcaagagtattttggaaaagataattataaaaatattctctaaattgacaaacactgtaaatacttacgatgt

SEQ ID NO: 16181 - DNA, 41 bp, Homo sapiens
  chr2:61471723-61471764
  hypo
gggcgacacagcaagaatccgacttgggggcaaaaaaaaaa

SEQ ID NO: 16182 - DNA, 121 bp, Homo sapiens
  chr2:61505030-61505151
  hypo
cgctttcgcttggttctcattctttttttgcctgccgccatccacataagatgcgacttgctcggacttgcccggacttgccttccggcacgattgtgaggcctccccagccacatggaac

SEQ ID NO: 16183 - DNA, 36 bp, Homo sapiens
  chr2:61505210-61505246
  hypo
gagcagtgtaaaaacggactaatacacaatgtaaca

SEQ ID NO: 16184 - DNA, 30 bp, Homo sapiens
  chr2:61509378-61509408
  hypo
gcctgtgattacaggcgtgagccacagtgc

SEQ ID NO: 16185 - DNA, 33 bp, Homo sapiens
  chr2:61556156-61556189
  hypo
ttgtttgttttgtttttgagacggagtttcact

SEQ ID NO: 16186 - DNA, 30 bp, Homo sapiens
  chr2:61642178-61642208
  hypo
aagcggggtagcctccggtccttttgttac

SEQ ID NO: 16187 - DNA, 48 bp, Homo sapiens; identical to SEQ ID NO: 1533
  chr2:61991192-61991240
  hypo

SEQ ID NO: 16188 - DNA, 100 bp, Homo sapiens; identical to SEQ ID NO: 1534
  chr2:61991616-61991716
  hypo

SEQ ID NO: 16189 - DNA, 28 bp, Homo sapiens
  chr2:62107144-62107172
  hypo
gagccaccacgcccggcctctaccactc

SEQ ID NO: 16190 - DNA, 93 bp, Homo sapiens
  chr2:62116628-62116721
  hypo
agccaccgcgcccacccggaggtgccctcctttaactccggctggatctatccgcgaggtggggtgggcgccggaataactctctaagggata

SEQ ID NO: 16191 - DNA, 39 bp, Homo sapiens
  chr2:62146651-62146690
  hypo
ttgccatgtcgatcaggcttcatcgcgtttttttttttt

SEQ ID NO: 16192 - DNA, 31 bp, Homo sapiens
  chr2:62432139-62432170
  hypo
atcaatttagagatagcggaggctgggggag

SEQ ID NO: 16193 - DNA, 39 bp, Homo sapiens
  chr2:62497413-62497452
  hypo
taagacatagtgaataggagtcgggcgcggtggctcagg

SEQ ID NO: 16194 - DNA, 38 bp, Homo sapiens
  chr2:62497691-62497729
  hypo
cgacagagcgagactccgtctcaaaaaaaaaaagaaaa

SEQ ID NO: 16195 - DNA, 31 bp, Homo sapiens
  chr2:62679583-62679614
  hypo
ttggtcttgtgtgactcgtaactagaacgta

SEQ ID NO: 16196 - DNA, 30 bp, Homo sapiens
  chr2:62788798-62788828
  hypo
aagaaactcttttgcgtctccactgcacaa

SEQ ID NO: 16197 - DNA, 25 bp, Homo sapiens
  chr2:63118286-63118311
  hypo
gggcgacaaaaaaaaaaaaaaaagt

SEQ ID NO: 16198 - DNA, 65 bp, Homo sapiens
  chr2:63118821-63118886
  hypo
tattggctccattagcgctattatcattaaaggtgtgttagcatcctcttcgcagacttgcatat

SEQ ID NO: 16199 - DNA, 152 bp, Homo sapiens
  chr2:63123460-63123612
  hypo
atacaagtcagagaacgtaggcactgcctgggatgtaaaggatcttacggaccattgtaacaattttggcattaaatcatgcgtggtggaaagccagttaagttagtgtatgtatgtatttgttgagggaaaggcaacgtgatttgtaactt

SEQ ID NO: 16200 - DNA, 70 bp, Homo sapiens
  chr2:63192181-63192251
  hypo
cttgtgttcactggaacgttatgattagtttaattggtctttgtttgattttagccgcagaaactgtttg

SEQ ID NO: 16201 - DNA, 150 bp, Homo sapiens
  chr2:63272199-63272349
  hypo
gactggcagaagaccgaggcccagaagcgacgcgaacagcttctgctagatgagctggtggccctggtgaacaagcgcgatgcgctcgtcagggacctggacgcgcaggagaagcagtgagtgggcagtggggtcgggtcgaggctgggc

SEQ ID NO: 16202 - DNA, 191 bp, Homo sapiens
  chr2:64348215-64348406
  hypo
cccacttaggttacagcgaaataaatctgcgcaggtaggctgcttatatccaatgttgatacctgttcagtccaggaaacatacctgcaaaaatgatcggggcatattctagggtttgctgtttgatgatcctgccttgtcatgtgattccgggctgatgagattgctcaagaagccggacatgacaaatt

SEQ ID NO: 16203 - DNA, 134 bp, Homo sapiens
  chr2:64538767-64538901
  hypo
ttcagaatcagaatcaaaagacggtgtaattagaagctgcaagtggatacacatgagggcgtaatacctgccgtcacgcagctgagagcgctcggggcactctggaagaaagcgcaaattcaaagtaatattat

SEQ ID NO: 16204 - DNA, 183 bp, Homo sapiens; identical to SEQ ID NO: 1554
  chr2:64836249-64836432
  hypo

SEQ ID NO: 16205 - DNA, 162 bp, Homo sapiens; identical to SEQ ID NO: 1555
  chr2:64836470-64836632
  hypo

SEQ ID NO: 16206 - DNA, 86 bp, Homo sapiens; identical to SEQ ID NO: 1556
  chr2:64836746-64836832
  hypo

SEQ ID NO: 16207 - DNA, 30 bp, Homo sapiens; identical to SEQ ID NO: 1558
  chr2:65215479-65215509
  hypo

SEQ ID NO: 16208 - DNA, 30 bp, Homo sapiens
  chr2:65541295-65541325
  hypo
ggcatcggctgtcccgtaggagaggagaca

SEQ ID NO: 16209 - DNA, 38 bp, Homo sapiens
  chr2:65829502-65829540
  hypo
aacaagagtgaaactccgtctcaaaagaaaaaaaaaat

SEQ ID NO: 16210 - DNA, 93 bp, Homo sapiens
  chr2:66604302-66604395
  hypo
aaaagttactttacaaagatgcgtcagtctgaatgaaagaggcatatcatatcgttggttacatgtaccaaagaattatgttggccgagttgg

SEQ ID NO: 16211 - DNA, 31 bp, Homo sapiens; identical to SEQ ID NO: 1563
  chr2:66661598-66661629
  hypo

SEQ ID NO: 16212 - DNA, 31 bp, Homo sapiens
  chr2:66666250-66666281
  hypo
cgacatctaggcccctcgcaatactagctgc

SEQ ID NO: 16213 - DNA, 35 bp, Homo sapiens
  chr2:67625731-67625766
  hypo
tgctgggattacagccaccgcgcccggccacctta

SEQ ID NO: 16214 - DNA, 32 bp, Homo sapiens
  chr2:67626110-67626142
  hypo
aagtttgcgaagtgccgcgtggatttttatgt

SEQ ID NO: 16215 - DNA, 30 bp, Homo sapiens
  chr2:68251584-68251614
  hypo
gggatgccatgtaccggccaaggaggtgct

SEQ ID NO: 16216 - DNA, 39 bp, Homo sapiens
  chr2:68287483-68287522
  hypo
gtgagtcaggctgggcgcagtgactgacgcctgtaatcc

SEQ ID NO: 16217 - DNA, 38 bp, Homo sapiens
  chr2:68287761-68287799
  hypo
gagactccaaaagaaaagaggggcgagatggggtgggg

SEQ ID NO: 16218 - DNA, 80 bp, Homo sapiens
  chr2:68433261-68433341
  hypo
ttcaaatacgtgaaagaacagagagaaacttccaggtacatgcaggatcaaaatcaaagagaagtcgactgtgttataaa

SEQ ID NO: 16219 - DNA, 30 bp, Homo sapiens
  chr2:68544313-68544343
  hypo
cgttctccactcttcgttggggtcacacct

SEQ ID NO: 16220 - DNA, 192 bp, Homo sapiens; identical to SEQ ID NO: 1571
  chr2:68546324-68546516
  hypo

SEQ ID NO: 16221 - DNA, 804 bp, Homo sapiens; identical to SEQ ID NO: 1572
  chr2:68546552-68547356
  hypo

SEQ ID NO: 16222 - DNA, 297 bp, Homo sapiens
  chr2:68672581-68672878
  hypo
cgtgttgctgctaaacgtttccagggagttgcaaaagttaatccttatggatcggtgattgaaatacagtgacatccctgctgctctgcagtgtgcgcaaaggtcaaatcaaaataacaaacacgcacgacgtcttcgatcaccttcctgtaaaaccgggtttctagccggacccatgtcctcacagttcctgaatcaagttcaccgtctgtgcaagcgccacctgacagagctccctgcgacactgaaacgcgtttgggcacttcccacgtgggaaccactcgccacgggcacctc

SEQ ID NO: 16223 - DNA, 30 bp, Homo sapiens; identical to SEQ ID NO: 1574
  chr2:69220161-69220191
  hypo

SEQ ID NO: 16224 - DNA, 784 bp, Homo sapiens; identical to SEQ ID NO: 1575
  chr2:69240068-69240852
  hypo

SEQ ID NO: 16225 - DNA, 31 bp, Homo sapiens
  chr2:69520725-69520756
  hypo
attggagcgtggctgccgacacgtgactttt

SEQ ID NO: 16226 - DNA, 31 bp, Homo sapiens; identical to SEQ ID NO: 1577
  chr2:69614637-69614668
  hypo

SEQ ID NO: 16227 - DNA, 88 bp, Homo sapiens
  chr2:69997974-69998062
  hypo
acgttgggagggtgaggcagacgatcgcttgagcctaggcattcaaggccagcctaggcaatgcagcgaggccttgtctagaaaattt

SEQ ID NO: 16228 - DNA, 31 bp, Homo sapiens
  chr2:70020009-70020040
  hypo
ggggcttggttgcttccgtatgttcccaggt

SEQ ID NO: 16229 - DNA, 86 bp, Homo sapiens
  chr2:70166085-70166171
  hypo
gttctcacaaacaaaacggtacaatctatttttgtgcgatgttcttgggacctcgctgtgttctgctatctcgaggcacattctcc

SEQ ID NO: 16230 - DNA, 30 bp, Homo sapiens
  chr2:70186711-70186741
  hypo
agctgacctcccaccgccgggaccctgcct

SEQ ID NO: 16231 - DNA, 30 bp, Homo sapiens
  chr2:70188590-70188620
  hypo
tcagcagcaacccacgccaagaagagaaac

SEQ ID NO: 16232 - DNA, 30 bp, Homo sapiens
  chr2:70203494-70203524
  hypo
gaccgcagtcttcaccgcaacctcgaccct

SEQ ID NO: 16233 - DNA, 18 bp, Homo sapiens
  chr2:70204067-70204085
  hypo
aattccagcactttggga

SEQ ID NO: 16234 - DNA, 185 bp, Homo sapiens
  chr2:70224880-70225065
  hypo
tcctgactcagttgatctggccgggtcaagcatgtgtatttttgcaaaagtgccccaggtgattctgacacatactcctagttaagaaccacggttacggccgcctcttcctcatcgttattaataacaagagaaacaacaattgacattttttgtgcacttacgtgcactgcctcatgtaatct

SEQ ID NO: 16235 - DNA, 30 bp, Homo sapiens
  chr2:70329633-70329663
  hypo
cgcagggaccggcgcgggggtgagagcgcg

SEQ ID NO: 16236 - DNA, 167 bp, Homo sapiens; identical to SEQ ID NO: 1579
  chr2:70351403-70351570
  hypo

SEQ ID NO: 16237 - DNA, 296 bp, Homo sapiens; identical to SEQ ID NO: 1580
  chr2:70369035-70369331
  hypo

SEQ ID NO: 16238 - DNA, 31 bp, Homo sapiens; identical to SEQ ID NO: 1581
  chr2:70418190-70418221
  hypo

SEQ ID NO: 16239 - DNA, 35 bp, Homo sapiens
  chr2:70427550-70427585
  hypo
atagaaatcagaacttctggccgggcgcggtggct

SEQ ID NO: 16240 - DNA, 870 bp, Homo sapiens; identical to SEQ ID NO: 1587
  chr2:71503468-71504338
  hypo

SEQ ID NO: 16241 - DNA, 31 bp, Homo sapiens
  chr2:71615794-71615825
  hypo
acactgcaagggatcacgacggaacccccga

SEQ ID NO: 16242 - DNA, 152 bp, Homo sapiens
  chr2:71763614-71763766
  hypo
tgatctcttcatctccgctctccatgtgtgccgctctgactgcgggcgatgagctgtgcgtgtctctgcgtgtttgcgcatgtggatgtgagtgggtgcggttgtctcctgtgttgtggatgtgtctggcccgagtccgggtgagctgtgtc

SEQ ID NO: 16243 - DNA, 259 bp, Homo sapiens
  chr2:72359368-72359627
  hypo
ctcagcatggcctccgtctccggcaggatctcgttctggttggagtccaggccaaagaacttgacgctgaggccatccacggggtgcaggacggggaccaaggtgatgcgggggaaggtccgtgtggccagctcaaagcggctggtgctagccagctccaccgccagcaccttcaggaacagcttggccaggtgcttgcccaggcaggtccggacaccgccaccgaacgggaggtaatggaagcggccatccttgtcct

SEQ ID NO: 16244 - DNA, 31 bp, Homo sapiens
  chr2:72359995-72360026
  hypo
ggcgcacttctcccatcggactgaaagctcc

SEQ ID NO: 16245 - DNA, 12 bp, Homo sapiens
  chr2:72374677-72374689
  hypo
cccctggccggc

SEQ ID NO: 16246 - DNA, 101 bp, Homo sapiens; identical to SEQ ID NO: 1592
  chr2:72374713-72374814
  hypo

SEQ ID NO: 16247 - DNA, 36 bp, Homo sapiens; identical to SEQ ID NO: 1593
  chr2:72375676-72375712
  hypo

SEQ ID NO: 16248 - DNA, 710 bp, Homo sapiens; identical to SEQ ID NO: 1596
  chr2:73052643-73053353
  hypo

SEQ ID NO: 16249 - DNA, 97 bp, Homo sapiens; identical to SEQ ID NO: 1597
  chr2:73114405-73114502
  hypo

SEQ ID NO: 16250 - DNA, 1549 bp, Homo sapiens; identical to SEQ ID NO: 1600
  chr2:73142997-73144546
  hypo

SEQ ID NO: 16251 - DNA, 244 bp, Homo sapiens
  chr2:73302642-73302886
  hypo
ggaaggctatttgggggggcccggggggatctgcagcagcgtgggtgaggtctccatgatccgcaccagcagccggtcgatgtagctctccagctcctgcacatgctcgtcccgctggctcagctcccgctcccgctgcaggagcaggctgatgagctcatcgtgggtcaggtggtagtacttggccgactggtccagcacagctgagtcctgaggccggaccgaagacagtgagcagggcagc

SEQ ID NO: 16252 - DNA, 99 bp, Homo sapiens
  chr2:73440137-73440236
  hypo
tcccacgcatcaccacgcccggcaaatttttctattttttggagagacaaggtctcactacgttgcccagtctgttcttgagcccgggagctggaggct

SEQ ID NO: 16253 - DNA, 30 bp, Homo sapiens
  chr2:73478534-73478564
  hypo
acaagctgcgggctcggcatgcccaggtgg

SEQ ID NO: 16254 - DNA, 35 bp, Homo sapiens
  chr2:73493682-73493717
  hypo
cctgcagctgccgctcggcacggtcagcccgctca

SEQ ID NO: 16255 - DNA, 815 bp, Homo sapiens; identical to SEQ ID NO: 1617
  chr2:73520236-73521051
  hypo

SEQ ID NO: 16256 - DNA, 28 bp, Homo sapiens
  chr2:74004336-74004364
  hypo
ctcaagcgatacacccaccttgcctccc

SEQ ID NO: 16257 - DNA, 459 bp, Homo sapiens
  chr2:74152872-74153331
  hypo
tatccttaaaaaattcgattaaaaaaaaagttcttaatatataaacatgacctcagccatcctatatatacatcaacataagaaaaaggtcccgtgctttttatgggaacagcttcaagacaggtatcccagcccccggcccctccccagcccccttgcaatcagatccttgtcttctaaaacctgccacacctaagagcgctgcctgaaggccggtttggcctgttgactcctggttttgactgttggtgatttaagcgattggaactggaagcaccatttgacaacattttgtaaatcattacttctgaggttgttatgacgacggggtgtggcagtccggcttcacctgtggcagcagcttaggtccctgccctcctgcagagcacacttcaccgacagcaggactcaggttttatacaagtctctactcgccattgcttacgtccaagaacccag

SEQ ID NO: 16258 - DNA, 42 bp, Homo sapiens
  chr2:74193106-74193148
  hypo
tatttttattttttgagacagcgttgctctgtcgcccaggcc

SEQ ID NO: 16259 - DNA, 23 bp, Homo sapiens
  chr2:74219449-74219472
  hypo
gttttgtttgagatggagtctcg

SEQ ID NO: 16260 - DNA, 24 bp, Homo sapiens
  chr2:74323598-74323622
  hypo
gaaaagcaggtcaggccgggcgca

SEQ ID NO: 16261 - DNA, 253 bp, Homo sapiens
  chr2:74327558-74327811
  hypo
agccctccctcaaggtggagccgcagaaccacttcagctccttcaagtacagcggcaacgcggtggtggagagctactcggtgctgggcaactgccggccctccgacccttacagcatgaacagcgtgtactcctaccactcctactatgcacagcccagcctgacctccgtcaatggcttccactccaagtacgctctcccgtcttttagctactatggctttccatccagcaaccccgtcttcccctctca

SEQ ID NO: 16262 - DNA, 30 bp, Homo sapiens
  chr2:74329317-74329347
  hypo
gcgtacctcagcgtcgggcctggcccgagc

SEQ ID NO: 16263 - DNA, 105 bp, Homo sapiens
  chr2:74350581-74350686
  hypo
aaaaatacaaaaaactggacccggcctgtgggcggaaccgaccaagaaacacgccagccagggcaggggcgtgcaggagggattcggtaaccccagagaggagtg

SEQ ID NO: 16264 - DNA, 300 bp, Homo sapiens; identical to SEQ ID NO: 1621
  chr2:74405877-74406177
  hypo

SEQ ID NO: 16265 - DNA, 1012 bp, Homo sapiens; identical to SEQ ID NO: 1622
  chr2:74425451-74426463
  hypo

SEQ ID NO: 16266 - DNA, 212 bp, Homo sapiens
  chr2:74663401-74663613
  hypo
gggtccgagggccgcgggaaatcggaggagccagggcgccagcatagctgcaccgcctccagctgcagcgctcaggacgccggtgacatcagctcccaattgccgcgagagcaactgaggggtaccagggcgctggaggtccctccgggcacctggctgggcttggctcaaggcggtgcctccaccgagactccatcgcggcgggaccggac

SEQ ID NO: 16267 - DNA, 39 bp, Homo sapiens
  chr2:74672958-74672997
  hypo
cctcccagaattaactttagagatcgtaatttggcagcc

SEQ ID NO: 16268 - DNA, 495 bp, Homo sapiens; identical to SEQ ID NO: 1626
  chr2:74740879-74741374
  hypo

SEQ ID NO: 16269 - DNA, 124 bp, Homo sapiens; identical to SEQ ID NO: 1627
  chr2:74741720-74741844
  hypo

SEQ ID NO: 16270 - DNA, 278 bp, Homo sapiens; identical to SEQ ID NO: 1628
  chr2:74741872-74742150
  hypo

SEQ ID NO: 16271 - DNA, 323 bp, Homo sapiens; identical to SEQ ID NO: 1629
  chr2:74742324-74742647
  hypo

SEQ ID NO: 16272 - DNA, 107 bp, Homo sapiens
  chr2:74753266-74753373
  hypo
ttgcagctctaggacgtgtcaggacggcagtcagctccagacccacgtagtcaccaccaaccctgaccgtgtgaagtacaaaggtaaattccggctctacctcaggg

SEQ ID NO: 16273 - DNA, 232 bp, Homo sapiens
  chr2:74761646-74761878
  hypo
taccctctcacccatggcactcgtgccacacccaggagtggcgcccagccttgggcctgaagtcagctcgtcccaggttgtggatctgggaggagaatcggagcagacgccggtgaccatagggccagttggctgagcgggctgagctggccaggcagttctcttccgcagcacagtacaacatatgcaggggccggtcttcgatgtaggcggtctcctgcaccagtgctga

SEQ ID NO: 16274 - DNA, 37 bp, Homo sapiens; identical to SEQ ID NO: 1631
  chr2:74776039-74776076
  hypo

SEQ ID NO: 16275 - DNA, 222 bp, Homo sapiens; identical to SEQ ID NO: 1634
  chr2:74781865-74782087
  hypo

SEQ ID NO: 16276 - DNA, 247 bp, Homo sapiens; identical to SEQ ID NO: 1635
  chr2:74782218-74782465
  hypo

SEQ ID NO: 16277 - DNA, 31 bp, Homo sapiens
  chr2:74856914-74856945
  hypo
gtatataaggtatatacgaaaccagtgaatt

SEQ ID NO: 16278 - DNA, 30 bp, Homo sapiens
  chr2:75031627-75031657
  hypo
cgaaactccgtccaaaaaaaaaaaaaagac

SEQ ID NO: 16279 - DNA, 27 bp, Homo sapiens
  chr2:79367855-79367882
  hypo
caccgcgcccagccagaacattttcaa

SEQ ID NO: 16280 - DNA, 90 bp, Homo sapiens
  chr2:79933146-79933236
  hypo
atgccagaggcatggaagagccgaaggccttcgtgtggtcttactaaaaattagcatgtgtgggccaggtgcggtggcttatacctgtaa

SEQ ID NO: 16281 - DNA, 29 bp, Homo sapiens
  chr2:79933475-79933504
  hypo
gagactccgtctcaaaaaaaaaaaaaaaa

SEQ ID NO: 16282 - DNA, 30 bp, Homo sapiens; identical to SEQ ID NO: 1642
  chr2:85107432-85107462
  hypo

SEQ ID NO: 16283 - DNA, 31 bp, Homo sapiens; identical to SEQ ID NO: 1643
  chr2:85198256-85198287
  hypo

SEQ ID NO: 16284 - DNA, 38 bp, Homo sapiens
  chr2:85227243-85227281
  hypo
ttaaatataactaagacgatattgattttttttgagat

SEQ ID NO: 16285 - DNA, 102 bp, Homo sapiens
  chr2:85280286-85280388
  hypo
atgtctgaaacggagcgccagtccatggaaagcgagcgtgcagaccgcagcctgtttgtccaagagctccttctgtccactttagtgcgtgaagagagctca

SEQ ID NO: 16286 - DNA, 55 bp, Homo sapiens
  chr2:85290473-85290528
  hypo
cctccaatccctctgccgctcctccctctcagaggaaaggcggagtcctcaccac

SEQ ID NO: 16287 - DNA, 31 bp, Homo sapiens
  chr2:85292073-85292104
  hypo
aagtggccctgtgcatcgctgccgtgagtgg

SEQ ID NO: 16288 - DNA, 30 bp, Homo sapiens
  chr2:85293322-85293352
  hypo
aggcccaggctagccgtgtgacgttggagc

SEQ ID NO: 16289 - DNA, 73 bp, Homo sapiens
  chr2:85356721-85356794
  hypo
cacttaaaaatgtaaaaaaagcggccgggcgacgtggctcacacctgtaaaaccagcacttgggcggatcacc

SEQ ID NO: 16290 - DNA, 30 bp, Homo sapiens; identical to SEQ ID NO: 1646
  chr2:85361470-85361500
  hypo

SEQ ID NO: 16291 - DNA, 32 bp, Homo sapiens
  chr2:85498071-85498103
  hypo
agcctcccaaaatgctgcgattacaagtgtga

SEQ ID NO: 16292 - DNA, 30 bp, Homo sapiens
  chr2:85660775-85660805
  hypo
agacccctcctgcccgaggccctcagctgc

SEQ ID NO: 16293 - DNA, 11 bp, Homo sapiens
  chr2:85729138-85729149
  hypo
gccaatcacct

SEQ ID NO: 16294 - DNA, 88 bp, Homo sapiens
  chr2:85776392-85776480
  hypo
aggtaacactgctcacgcggtgtgttgcacatagcaaacacttgggaacagttagctattcatcgtggtacattaaattgcttttccc

SEQ ID NO: 16295 - DNA, 30 bp, Homo sapiens
  chr2:85819599-85819629
  hypo
ctgggagggttccacggcaggtggtataga

SEQ ID NO: 16296 - DNA, 96 bp, Homo sapiens; identical to SEQ ID NO: 1647
  chr2:85829303-85829399
  hypo

SEQ ID NO: 16297 - DNA, 91 bp, Homo sapiens
  chr2:85870243-85870334
  hypo
acacaaaatgattaaacgtagtatttctcttttgccgcatggacagttttggttcagtcatgaaatcttgagtataaagacttctccaaac

SEQ ID NO: 16298 - DNA, 81 bp, Homo sapiens
  chr2:85871980-85872061
  hypo
gaacaattttgtggtccgtttgtgtaggacagtttccttaacctcacagcctttgtctgattattccggctttattttaac

SEQ ID NO: 16299 - DNA, 158 bp, Homo sapiens
  chr2:85878687-85878845
  hypo
cctatcaaacattgtgcgtgcgtgcgtgcgtgtgtgtgtgtgtggtggtatgaggtacagccacctgtcttggagaggatattttgacataactctatactgttgacttccgagaaatgtctctgaggtggcaggcccctgaattgtttgtttgtttg

SEQ ID NO: 16300 - DNA, 38 bp, Homo sapiens
  chr2:85885943-85885981
  hypo
ccatactgcagcactttaaaggacggtgtctttttctt

SEQ ID NO: 16301 - DNA, 230 bp, Homo sapiens
  chr2:85890774-85891004
  hypo
cagtgggctcacttgggccagcgctgtcatccatggagcaccggaggacgaggcggcagaccagctggggcagcatgcggcccagcagcgtgtcgagcaggatgacggagtagcgctcagccaggcactggcagatgccgcccgccaccagaggtaccacgcggcacacctgggccactgccacagctagcgcaccctggggcgggggcggagagaggccagcatgggac

SEQ ID NO: 16302 - DNA, 30 bp, Homo sapiens
  chr2:85998053-85998083
  hypo
gaaggtctctgagacgtgggaagtcccctc

SEQ ID NO: 16303 - DNA, 33 bp, Homo sapiens
  chr2:86344874-86344907
  hypo
ctgcttgctcttgatccgcttctttttttgttt

SEQ ID NO: 16304 - DNA, 31 bp, Homo sapiens
  chr2:86345268-86345299
  hypo
tcttctgtttcagtgacgcttataatccatt

SEQ ID NO: 16305 - DNA, 30 bp, Homo sapiens
  chr2:86362920-86362950
  hypo
gctagtgacagagacgtatgacatttgcat

SEQ ID NO: 16306 - DNA, 30 bp, Homo sapiens
  chr2:86374888-86374918
  hypo
tgggcagctgcctgtcggcgaagctgggtt

SEQ ID NO: 16307 - DNA, 103 bp, Homo sapiens
  chr2:86425627-86425730
  hypo
agtgagctgtgatcgcaccactgcactcaagccttcgcaacagaccaagacctagtctcaaaaaaaaaaaaaagtgcgcaatgactcccgttgccaattcaaa

SEQ ID NO: 16308 - DNA, 31 bp, Homo sapiens; identical to SEQ ID NO: 1652
  chr2:86428203-86428234
  hypo

SEQ ID NO: 16309 - DNA, 90 bp, Homo sapiens
  chr2:86783933-86784023
  hypo
ggtcccctagcccgctttttcactggatacctgtgtctgagtgtattctttcatccgtcgtttggccaggatctgcgggtcggacccgga

SEQ ID NO: 16310 - DNA, 31 bp, Homo sapiens; identical to SEQ ID NO: 1655
  chr2:86850367-86850398
  hypo

SEQ ID NO: 16311 - DNA, 45 bp, Homo sapiens; identical to SEQ ID NO: 1656
  chr2:87017673-87017718
  hypo

SEQ ID NO: 16312 - DNA, 583 bp, Homo sapiens; identical to SEQ ID NO: 1657
  chr2:87017943-87018526
  hypo

SEQ ID NO: 16313 - DNA, 77 bp, Homo sapiens
  chr2:87569213-87569290
  hypo
cacactccctctccctcgagcctggaaggtgcactgggctcataggggtggaaacctctaccgcggcagaggcacag

SEQ ID NO: 16314 - DNA, 22 bp, Homo sapiens
  chr2:88328177-88328199
  hypo
ttttttcttgagatggcgtctc

SEQ ID NO: 16315 - DNA, 7 bp, Homo sapiens
  chr2:88366760-88366767
  hypo
caggcgt

SEQ ID NO: 16316 - DNA, 30 bp, Homo sapiens
  chr2:88367488-88367518
  hypo
gagcgggcttattccgcagtggtttttgac

SEQ ID NO: 16317 - DNA, 105 bp, Homo sapiens; identical to SEQ ID NO: 1660
  chr2:88751314-88751419
  hypo

SEQ ID NO: 16318 - DNA, 255 bp, Homo sapiens; identical to SEQ ID NO: 1661
  chr2:88751460-88751715
  hypo

SEQ ID NO: 16319 - DNA, 96 bp, Homo sapiens; identical to SEQ ID NO: 1662
  chr2:88752538-88752634
  hypo

SEQ ID NO: 16320 - DNA, 13 bp, Homo sapiens
  chr2:88908544-88908557
  hypo
cccggccttgatg

SEQ ID NO: 16321 - DNA, 25 bp, Homo sapiens
  chr2:88923517-88923542
  hypo
tttttttttgagacggagtttcgct

SEQ ID NO: 16322 - DNA, 294 bp, Homo sapiens; identical to SEQ ID NO: 1664
  chr2:89065128-89065422
  hypo

SEQ ID NO: 16323 - DNA, 40 bp, Homo sapiens
  chr2:89601944-89601984
  hypo
atagcagcacacaggccgagtgaggtagctcacgcctgta

SEQ ID NO: 16324 - DNA, 1400 bp, Homo sapiens; identical to SEQ ID NO: 1665
  chr2:95691036-95692436
  hypo

SEQ ID NO: 16325 - DNA, 134 bp, Homo sapiens
  chr2:95722587-95722721
  hypo
tgctgtccatggacccaggaacgtgcagtgcccggtcaggcgccaggagggacacggggccagtgctcaataaacacggccgcataagtgagcaggcccagcgccccagggccgctccagctgacctgtgctca

SEQ ID NO: 16326 - DNA, 197 bp, Homo sapiens
  chr2:95941662-95941859
  hypo
ctgctgcctgcccaggtggtgcggtacgaggcgggctacgtggtatgcgctgtgatcgcgggcctctacctgctgctggtgcccactgccgggctttgcttctgctgctgccgctgccaccggcgctgcgggggacgagtgaagacagagcacaaggcgctggcctgtgagcgcgcggccctcatggtcttcctgct

SEQ ID NO: 16327 - DNA, 30 bp, Homo sapiens
  chr2:95953891-95953921
  hypo
ttgaatatgggtgtgcgcctgtgggtccag

SEQ ID NO: 16328 - DNA, 31 bp, Homo sapiens
  chr2:96049659-96049690
  hypo
ggctccgagtccctggcgggaatctgctcaa

SEQ ID NO: 16329 - DNA, 31 bp, Homo sapiens
  chr2:96754441-96754472
  hypo
ctcaaaaaacattcagcgcagctttttctgt

SEQ ID NO: 16330 - DNA, 224 bp, Homo sapiens
  chr2:96821756-96821980
  hypo
cttctcatcagtttcacatcactttgcgggacaggaattacttgctattcccatttggcggatgaggaattttttccccaatgtcaaggcagaactgggactcccgcccatcctttcctcgttaaggcccctgggctctgtgcattagtcctgcctctccgatggtggtaaggtcctccaaggaagaggaggcctgacatgcccatggccgcactgccacccat

SEQ ID NO: 16331 - DNA, 31 bp, Homo sapiens
  chr2:96829030-96829061
  hypo
accacaccactcaggccgggggtttcctctg

SEQ ID NO: 16332 - DNA, 211 bp, Homo sapiens; identical to SEQ ID NO: 1667
  chr2:97171201-97171412
  hypo

SEQ ID NO: 16333 - DNA, 37 bp, Homo sapiens; identical to SEQ ID NO: 1669
  chr2:97175301-97175338
  hypo

SEQ ID NO: 16334 - DNA, 30 bp, Homo sapiens
  chr2:97192251-97192281
  hypo
gcacctgcaaagcccggctccctgcttcag

SEQ ID NO: 16335 - DNA, 216 bp, Homo sapiens; identical to SEQ ID NO: 1672
  chr2:97203343-97203559
  hypo

SEQ ID NO: 16336 - DNA, 31 bp, Homo sapiens; identical to SEQ ID NO: 1673
  chr2:97304170-97304201
  hypo

SEQ ID NO: 16337 - DNA, 149 bp, Homo sapiens
  chr2:97305375-97305524
  hypo
acagcaagactctgtctcaaaaaaaaaaaaaagataggtacagacatgcaaacactcgaaacattcagaaagccactcaaagctgtgttccacaaagatgagagggtaaactgagaagacggaaggcataggatcggggaagcagggtc

SEQ ID NO: 16338 - DNA, 30 bp, Homo sapiens
  chr2:97361058-97361088
  hypo
gatccctcacaggacggggaagcctgtcct

SEQ ID NO: 16339 - DNA, 30 bp, Homo sapiens
  chr2:97365975-97366005
  hypo
acccaggctgcggtcgggagggtaagagcc

SEQ ID NO: 16340 - DNA, 31 bp, Homo sapiens
  chr2:97370008-97370039
  hypo
tttctggaaacgctatcgcttcaaactcata

SEQ ID NO: 16341 - DNA, 31 bp, Homo sapiens; identical to SEQ ID NO: 1674
  chr2:97405566-97405597
  hypo

SEQ ID NO: 16342 - DNA, 714 bp, Homo sapiens
  chr2:97427386-97428100
  hypo
gcagaactgtggcaccgagaaggagaggcgctatgcccgcaagattgagcccatccggcgcaagggcaactaccttctctgctcgttgctcctagggaacgtgctggtcaacacctccctcacaatccttctagacaacctcatcgggtccggcctcatggcggtggcctcctccaccattggcattgtcatctttggggagatcctacctcaggccctgtgctcccgacatgggctggctgtgggtgccaacaccatccttctcaccaaattctttatgctactcaccttccccctcagttttcccattagcaagctcctggacttttttctgggccaggagattcgcactgtttacaaccgggagaagctgatggagatgttgaaggtgacggagccctataatgacctcgtgaaagaggagctcaatatgatccagggtgccctggaactacggaccaaaactgtagaggatatcatgacccagctccaggactgcttcatgatccgcagcgatgccatcctggacttcaacaccatgtcggagataatggaaagcggctatactcgcatcccggtgttcgaagacgagcagtccaatattgtagatattctctacgtcaaagacttggcctttgtggaccccgatgactgcacccccctcaagactatcactcgcttctataaccacccggtgcactttgtcttccatga

SEQ ID NO: 16343 - DNA, 30 bp, Homo sapiens
  chr2:97463243-97463273
  hypo
cggcagctgacaaccgaagccggaagcggg

SEQ ID NO: 16344 - DNA, 31 bp, Homo sapiens
  chr2:97465079-97465110
  hypo
gcctgcccttgagccccgcctgccccacgtg

SEQ ID NO: 16345 - DNA, 98 bp, Homo sapiens
  chr2:97479659-97479757
  hypo
tgaataataaaaaacacggagatgccccattggcctagtcacagctctgagtttacaatgcagaagagacactattaccatcttttaaaaatacacta

SEQ ID NO: 16346 - DNA, 136 bp, Homo sapiens; identical to SEQ ID NO: 1675
  chr2:97482885-97483021
  hypo

SEQ ID NO: 16347 - DNA, 179 bp, Homo sapiens
  chr2:97485584-97485763
  hypo
ctttcattttccaaaccgccagtgtcaggatcttcgctgccatggtcttgtctttcagatgcgatggatgagcttggtccagggtggttggggattccacttggggaagaataaaaaatgttcatgttcgttgggaaggagcgcagaggcaggatgtcccctggcgggggggcttgtgt

SEQ ID NO: 16348 - DNA, 30 bp, Homo sapiens
  chr2:97489046-97489076
  hypo
atgaggcctctctgcgccgaggtggccatt

SEQ ID NO: 16349 - DNA, 34 bp, Homo sapiens
  chr2:97511923-97511957
  hypo
cgtggcactggaggagcggcgttttgcaccccca

SEQ ID NO: 16350 - DNA, 30 bp, Homo sapiens
  chr2:97520074-97520104
  hypo
cagcgcagtgtagccggccgagtcgggctg

SEQ ID NO: 16351 - DNA, 30 bp, Homo sapiens
  chr2:97526598-97526628
  hypo
caccgggctggcaccgggcatgcccaggta

SEQ ID NO: 16352 - DNA, 84 bp, Homo sapiens; identical to SEQ ID NO: 1676
  chr2:97535804-97535888
  hypo

SEQ ID NO: 16353 - DNA, 436 bp, Homo sapiens
  chr2:97544649-97545085
  hypo
gtcgccttgctgacccgaggaggcagatggagagatgggagccgaaggttttggctgagcgtctgcacatctcgcctccatcctcattcctgccaactgcacactctcagcagtgaaaacaggacgcaggcctgctccatctggcccgagaacaatttgatcttgaggcacccctggactcttggtacccattcacttatgggatacgtgcttgctgtttagagaaaccgagccatggggagcatcccagggcgtgaggctccagaagggatgcagcctgccctggattcccaactgctgcccgcaggtgcgcccctccactcagagggccctgctgccttgtcctctcggctctctcttcatgtctaggatcaggaggtggcagatgaccagccccgaggacgagtaggggtgggagaggcgggctctagaaatg

SEQ ID NO: 16354 - DNA, 192 bp, Homo sapiens
  chr2:97545393-97545585
  hypo
aacggctaaggcccacgggtggtctgactccacaggctgaccaggtggccttgcacacggcaggcagagaagacacagtgggggaaaccgaggcgtgcctccaggagagctgccctggggtggggaagacccaacctctctgaagcccagctccctctgcctgccgggtccctgcagcggcctgtggacgcc

SEQ ID NO: 16355 - DNA, 159 bp, Homo sapiens
  chr2:97558026-97558185
  hypo
cagaggtgtaggggagcgcagcagagggggtctaaggtggtctcgggctgcagtgaaggcttctgagagctgcctgggactcgcctgcctctccactgccctggaccagtgcaccctacccctttggggctctgccgagctgcacggtgcctccatgtt

SEQ ID NO: 16356 - DNA, 29 bp, Homo sapiens
  chr2:97562880-97562909
  hypo
ggagtgagccacagcgcttggcccctttg

SEQ ID NO: 16357 - DNA, 19 bp, Homo sapiens
  chr2:97567214-97567233
  hypo
aggccgacctcttaatgcc

SEQ ID NO: 16358 - DNA, 30 bp, Homo sapiens
  chr2:97599772-97599802
  hypo
ttagtcatttcaaccgtgcattcactcagc

SEQ ID NO: 16359 - DNA, 31 bp, Homo sapiens
  chr2:97614532-97614563
  hypo
cctcaccaagtgtctgcgtctgataattggc

SEQ ID NO: 16360 - DNA, 737 bp, Homo sapiens
  chr2:97651750-97652487
  hypo
caccccaccaaggccggccgcgcagtggcctgtggagaggagggcccggctcacgtcggaacccgaaccacgcggggtcgcaggaacctgaaaagcgccagagtagcccggcggccgcaccggggctgacctgcaaggcctggaccagccaggagtcccagggaagtcgagtgctctctgagcgctaaccacgcgcccctgcggttcctcggcctcagtttccttacctgtaaaatggagccgctgatcctgcctcctgagttgtggagcgaggcccgcacctggaagccttggccacatagggcgggaagggcagggctccggggtgagggagggtggcgggaattcgcacggcctcagaggacggggccagctagccgggaaaggaagcaggagcaggctccccaggcggcgcagtgggaggaccccaagagttgcgtccctagatccagggccgccaacgtggaacctaaagatccagttctggggattgagttccgactccaaaccaagcggccagctcacagccgccgccgccgccagctggggagctcgccggccaagtgcgcaccctcttcctgttagccctccacgtgcgcgccctcttcctgctcgccctccacgtgcgcatccacgtgcgcgggaattggctggcggaagctcctgcccccaggcagtcctgggtcacgcgcacttgtagtagcttgcatttaccaagacagtgagacagtggcctg

SEQ ID NO: 16361 - DNA, 104 bp, Homo sapiens; identical to SEQ ID NO: 1677
  chr2:97779475-97779579
  hypo

SEQ ID NO: 16362 - DNA, 25 bp, Homo sapiens
  chr2:97825525-97825550
  hypo
atttttttttttgagacggagtctc

SEQ ID NO: 16363 - DNA, 31 bp, Homo sapiens
  chr2:97890111-97890142
  hypo
actaaagattaagcttcgttgaaacactttt

SEQ ID NO: 16364 - DNA, 31 bp, Homo sapiens
  chr2:98276216-98276247
  hypo
tccccattctcactgccggcacatcccccac

SEQ ID NO: 16365 - DNA, 110 bp, Homo sapiens
  chr2:98349522-98349632
  hypo
ctcagatggggtgccgggctctggggaggagaggagcctctctgctagctgcctgctccctgcagctggtggagtatctgaagctgaaggcggacgggctcatctactgc

SEQ ID NO: 16366 - DNA, 432 bp, Homo sapiens
  chr2:98408950-98409382
  hypo
tgatgtccgagtcctcggaactgtgcctcgcgctgctggcacgttctgggtgggaagggtgtgcgaggggggcgggagacagcctttcaggctgcggctcctggggctgaggcactggcggtggcagaggaggctgagggtgctgctccagcgggctgtgggcatggtgctggctgccgtgctggctctgctttgcccctttggactttctgcccgctgtatgaccttgagtcactgtgttcgaatctaagacaagggggcttgttttgttagcagactgtgaagaagctgcttgagcagaagtcctactagaggtacttgaactgtttttggctctgacgttttccacgtcagctgagtttctattgctgtgactgctgtgtgggtggaccgatgggccacactgcttatgactcccggcactgggtcggg

SEQ ID NO: 16367 - DNA, 30 bp, Homo sapiens
  chr2:99260668-99260698
  hypo
aaacaaagttgcttcggctaaactttctct

SEQ ID NO: 16368 - DNA, 198 bp, Homo sapiens
  chr2:99386852-99387050
  hypo
atctctgcttggtgacgtgcaggcttctcaatctccctgctcctccctccgcctcagtaaatgctggcccaggctgctcgcttgctcaagacacaaccccaagaggcgtccttgatgcttccttttccctcactccccatatccaacccatccatgagttctttcggttccaccttaaaaatacccctaggggccggg

SEQ ID NO: 16369 - DNA, 28 bp, Homo sapiens
  chr2:99796319-99796347
  hypo
cccggccggtagagtttgtagttctgac

SEQ ID NO: 16370 - DNA, 78 bp, Homo sapiens
  chr2:99798645-99798723
  hypo
gttttacagaagacagcgtaattgtttcagggtccaggagttacgtgcctaattattaacagtaacttttactttatt

SEQ ID NO: 16371 - DNA, 131 bp, Homo sapiens
  chr2:99799022-99799153
  hypo
aataaataagataaaataaacgtattctttgagtcaaacgtggtgacacacacctagctccaattactgggaaaattgaggattgcttgaggctgagttcaataccagaaacatagcgagactctgtctct

SEQ ID NO: 16372 - DNA, 30 bp, Homo sapiens
  chr2:99871723-99871753
  hypo
gcttttcttaccttcgtcctgtaccaatga

SEQ ID NO: 16373 - DNA, 31 bp, Homo sapiens
  chr2:100293283-100293314
  hypo
gacaggacagtaaacacgcctatcagcccca

SEQ ID NO: 16374 - DNA, 97 bp, Homo sapiens
  chr2:100618384-100618481
  hypo
acgttctaagcggacggaagctgcccatcgagcagacaggaggaagcgcagagcgtaaccatccgtgctgttgctatgccacgctgtcctgagggac

SEQ ID NO: 16375 - DNA, 30 bp, Homo sapiens; identical to SEQ ID NO: 1689
  chr2:100721829-100721859
  hypo

SEQ ID NO: 16376 - DNA, 30 bp, Homo sapiens
  chr2:100759830-100759860
  hypo
tggtttttgtcaggcggtctctcacactgg

SEQ ID NO: 16377 - DNA, 30 bp, Homo sapiens
  chr2:100760336-100760366
  hypo
tggcaaggagaaaacgtttctttatcttat

SEQ ID NO: 16378 - DNA, 44 bp, Homo sapiens
  chr2:101022687-101022731
  hypo
agagaattcccaactgcgagcctgagaggcgccctgctgcaagg

SEQ ID NO: 16379 - DNA, 41 bp, Homo sapiens; identical to SEQ ID NO: 1694
  chr2:101033591-101033632
  hypo

SEQ ID NO: 16380 - DNA, 512 bp, Homo sapiens; identical to SEQ ID NO: 1695
  chr2:101033731-101034243
  hypo

SEQ ID NO: 16381 - DNA, 198 bp, Homo sapiens
  chr2:101362899-101363097
  hypo
gcctaggtaagaggtgcggacaggctgagaacccagattttcaagccaggctgcctgggccttgccagcggtgcaccctgggcaagtacttagcatttctgtgcctctacatcctcatccacaaagcggggctaagatgagaagcacaggccttagaaaattcgctgatatgtatgaggccttcgatatgaattagct

SEQ ID NO: 16382 - DNA, 141 bp, Homo sapiens
  chr2:101520422-101520563
  hypo
ggcctgggagagtagaggctccggtgttgaggaagaacattcctggattgttacgtaatctttcacatctgtgcaccttcgctgtctcaaggagagtaaacgccctaagggaggaactgcggattacactcctttggggct

SEQ ID NO: 16383 - DNA, 145 bp, Homo sapiens
  chr2:101612185-101612330
  hypo
catctctggagtgcagcgcttgctgcagtggaaatgatcaggaatactgaccgtgtttctcttgcctccgaggttcttgggcacactctatagccatactggacaggaaccaggtgccccgtgtaggcatcgtcggtcggtttgc

SEQ ID NO: 16384 - DNA, 31 bp, Homo sapiens
  chr2:101649863-101649894
  hypo
ctttccggaaagggaccgagtacagcgcctt

SEQ ID NO: 16385 - DNA, 108 bp, Homo sapiens
  chr2:101696650-101696758
  hypo
aactccataatagaaaagaaacgtgaaccgcagcaccccgagcgtgaccgaaaacaagtgtaacaactcgcatcgcctgacctcagcgtggggacccagagaaaagca

SEQ ID NO: 16386 - DNA, 705 bp, Homo sapiens; identical to SEQ ID NO: 1701
  chr2:101767138-101767843
  hypo

SEQ ID NO: 16387 - DNA, 31 bp, Homo sapiens
  chr2:101772523-101772554
  hypo
caccgcacccgccccacgctgaatagtttaa

SEQ ID NO: 16388 - DNA, 30 bp, Homo sapiens
  chr2:101889653-101889683
  hypo
gccagtccagacaccgaggagccgaggaaa

SEQ ID NO: 16389 - DNA, 906 bp, Homo sapiens; identical to SEQ ID NO: 1702
  chr2:101924576-101925482
  hypo

SEQ ID NO: 16390 - DNA, 150 bp, Homo sapiens
  chr2:101970927-101971077
  hypo
ccatggggttgtggatcgcccctccagctcaacacttgccttcgtgttactctccctctactgcagaccaatgccttctagcctgtttccattgctgcaccagcctgcaccccagctccgagcctgcacttccggcggtccctgcatgga

SEQ ID NO: 16391 - DNA, 174 bp, Homo sapiens; identical to SEQ ID NO: 1705
  chr2:102313837-102314011
  hypo

SEQ ID NO: 16392 - DNA, 31 bp, Homo sapiens
  chr2:102347214-102347245
  hypo
tatgttgaatagtggccgggtgtggtggctc

SEQ ID NO: 16393 - DNA, 22 bp, Homo sapiens
  chr2:102356621-102356643
  hypo
ttttttttttttgagacggagt

SEQ ID NO: 16394 - DNA, 25 bp, Homo sapiens
  chr2:102377171-102377196
  hypo
aagaaaattgttggcccggcgcagt

SEQ ID NO: 16395 - DNA, 30 bp, Homo sapiens
  chr2:102381771-102381801
  hypo
aatggcaagatactcgtaactgtttttaga

SEQ ID NO: 16396 - DNA, 30 bp, Homo sapiens
  chr2:102427995-102428025
  hypo
ctcccaggtgttgacgccccttctctctgc

SEQ ID NO: 16397 - DNA, 31 bp, Homo sapiens
  chr2:102450133-102450164
  hypo
atgtttagtgagtacccgccattacaaaagt

SEQ ID NO: 16398 - DNA, 170 bp, Homo sapiens
  chr2:102636185-102636355
  hypo
agatgctggctattaccgctgtgtcctgacatttgcccatgaaggccagcaatacaacatcactaggagtattgagctacgcatcaagagtaagtacttgccattgaggcacctatctatcctggttcaataacaagcatgcagagaacaaatgacggtgcacgtagaat

SEQ ID NO: 16399 - DNA, 33 bp, Homo sapiens
  chr2:102640213-102640246
  hypo
aacacagagtttttggctgggcgtggtggctca

SEQ ID NO: 16400 - DNA, 31 bp, Homo sapiens
  chr2:102683511-102683542
  hypo
aagagtcagtctcacccgtcagaattcagtg

SEQ ID NO: 16401 - DNA, 46 bp, Homo sapiens
  chr2:102867170-102867216
  hypo
cggggaccctagggtccgctccttcgctgcccgagcacggtgcctg

SEQ ID NO: 16402 - DNA, 43 bp, Homo sapiens
  chr2:103130074-103130117
  hypo
gggcaaaactactgtaactaccgggccatttaaacttattggg

SEQ ID NO: 16403 - DNA, 177 bp, Homo sapiens; identical to SEQ ID NO: 1710
  chr2:105458974-105459151
  hypo

SEQ ID NO: 16404 - DNA, 565 bp, Homo sapiens; identical to SEQ ID NO: 1711
  chr2:105459902-105460467
  hypo

SEQ ID NO: 16405 - DNA, 250 bp, Homo sapiens; identical to SEQ ID NO: 1713
  chr2:105461163-105461413
  hypo

SEQ ID NO: 16406 - DNA, 112 bp, Homo sapiens; identical to SEQ ID NO: 1714
  chr2:105461555-105461667
  hypo

SEQ ID NO: 16407 - DNA, 204 bp, Homo sapiens; identical to SEQ ID NO: 1715
  chr2:105461699-105461903
  hypo

SEQ ID NO: 16408 - DNA, 1163 bp, Homo sapiens; identical to SEQ ID NO: 1718
  chr2:105468693-105469856
  hypo

SEQ ID NO: 16409 - DNA, 217 bp, Homo sapiens; identical to SEQ ID NO: 1720
  chr2:105471236-105471453
  hypo

SEQ ID NO: 16410 - DNA, 30 bp, Homo sapiens; identical to SEQ ID NO: 1725
  chr2:105478641-105478671
  hypo

SEQ ID NO: 16411 - DNA, 151 bp, Homo sapiens; identical to SEQ ID NO: 1726
  chr2:105478918-105479069
  hypo

SEQ ID NO: 16412 - DNA, 118 bp, Homo sapiens
  chr2:105528577-105528695
  hypo
tcccctccagggattcggagcagtgtgtttgattgccgtcactgcacagagcagtgccgagtttgttcgtgctggtcgggcaagcatcaagcacagaacctagcgcattgtgggtgct

SEQ ID NO: 16413 - DNA, 218 bp, Homo sapiens
  chr2:105697574-105697792
  hypo
ctgcctccaaacgccgccggtttgatctgtggtaatatttgtgaaggttccatatggacttgagccccctgcagtgctaagaaataatgtacaacgcttcatggtgcagacgcaaattttctctgaaaagggatgcaatgctgcgttttagctgtcggaggggatgatggagctgacgcgctaggcctgtcaacttgttacacggatgggttgcacgc

SEQ ID NO: 16414 - DNA, 31 bp, Homo sapiens
  chr2:105719461-105719492
  hypo
aagtaggtgtgagaaacgttgccactctcac

SEQ ID NO: 16415 - DNA, 30 bp, Homo sapiens
  chr2:105719903-105719933
  hypo
acagcggtcagggacgtcagtgatgaccaa

SEQ ID NO: 16416 - DNA, 30 bp, Homo sapiens; identical to SEQ ID NO: 1732
  chr2:105760875-105760905
  hypo

SEQ ID NO: 16417 - DNA, 199 bp, Homo sapiens
  chr2:105887867-105888066
  hypo
actgatcagtcagggacggtggctgtgagtgaacagagattgcacagcggatcgccacagaaagtcctaatgtaggtgcaggtacaagccagaactagtgtttgctggtttcatgaaataccaacccacacctgtgttctggctctactgctcgtgggctgtgtgacctgtggcaagcggggtaacctctctgggcttc

SEQ ID NO: 16418 - DNA, 31 bp, Homo sapiens
  chr2:105888487-105888518
  hypo
ctttatggagacaacacgtgtgttagatatg

SEQ ID NO: 16419 - DNA, 92 bp, Homo sapiens
  chr2:106064704-106064796
  hypo
acacccccatcatccacgcacccggttcctagcataaattccctctgttgaaattgtttgatgtagattctgtttccctatttagacctttt

SEQ ID NO: 16420 - DNA, 37 bp, Homo sapiens
  chr2:106081973-106082010
  hypo
acataaagaactggtgggggccgggtgcggtggctca

SEQ ID NO: 16421 - DNA, 30 bp, Homo sapiens
  chr2:106135399-106135429
  hypo
cacacaccgggggccgcagctccagctcag

SEQ ID NO: 16422 - DNA, 84 bp, Homo sapiens; identical to SEQ ID NO: 1733
  chr2:106362017-106362101
  hypo

SEQ ID NO: 16423 - DNA, 30 bp, Homo sapiens; identical to SEQ ID NO: 1734
  chr2:106685357-106685387
  hypo

SEQ ID NO: 16424 - DNA, 31 bp, Homo sapiens
  chr2:106718550-106718581
  hypo
tctgcgttttcctttacgacaaatgcgtatt

SEQ ID NO: 16425 - DNA, 241 bp, Homo sapiens
  chr2:106730105-106730346
  hypo
agtgggcttttacagtgtatacgtatctaatgtttgatccactgcagaacaaacgtgcactttctgggcacctgagggcagggagcctggggcgtgaggacctgggctctgcttctcactgcgcccatgtgtccgccgttcccgctccaccgctcactgcccaggcctgccactgactcggtcgcagcaagactgggaaagaagcagtactcacctgaccgcctcagtgttctaagactga

SEQ ID NO: 16426 - DNA, 153 bp, Homo sapiens
  chr2:106778554-106778707
  hypo
tctgacacagtaatgcaggcacgcggatcacctgacttgctgaccaacctgaaggacggaaccattccagaatgagtcacctgcaagcagcccgagaggcaaatgtttgccctttgccactattttcaaggcggtttcacaggttgacaagaa

SEQ ID NO: 16427 - DNA, 334 bp, Homo sapiens
  chr2:106959189-106959523
  hypo
acagcatacttcagtcgttccgtgtcagcctccacccctggtagcaccagagcctcccaggcgtccccgcagtccgagccagccttagcacccagcgctttcttgctgtcgcctggttgttcccgcggcggccgagctcagcacctctcacactccctgcctctcgaggactctgcttgttcctcatcacagcacggttgctctcgcacccaaggcggtgtccccccagcgcctcaccacgatcgcggcagagatctcctgcagggcgtccgggccttgggaaggcatcgccatctcccgcagcgccctcccggactagcgcagcaggctggca

SEQ ID NO: 16428 - DNA, 92 bp, Homo sapiens
  chr2:106959838-106959930
  hypo
agccgtggtccccacggaagcggtgagaacgcacctggccggctcagccacacggcacggtggcctaggccctgctgcgggctctggatcca

SEQ ID NO: 16429 - DNA, 638 bp, Homo sapiens
  chr2:107459357-107459995
  hypo
taatattaggaacacctggtgcggagaccccagcttgccccgtcagagatccagaggcgcgctcagaaagaaccggcccccagggacacactggctcaagacagggcgacctggtccccccgctgagacctacctatttcctcgcccaaggaagagttgaggattgcgcctgcagacatgacgacagcgcagctgcgcaggccgcgggggtgcagctggctcaggggcacggcgggcaccaggcgccgccagcccagcgcagaaaagggcgcctcggtgccgtccagcgtccgcacgcgcgcgcggctccgcagctggcacagcagctgtgccctgctcagcccggcctcccgcttcccgcggaagcgcaccccgtgcttgttggcggtcaggtaatccttcatcgccttctgcaggcgcgggttcagcattttggaagagacgttccccttccagagccggtacaggaaggccctggacatggaggagtacagcctgtcgccgtcgtcgccctcctccaacacgtggctccttctctgcctccggtgcctcttcttcacccgcctcctctggacctgtgcagccggaaaagccccctcccgtgggcctggctccccgggggaagggaatcccaatgt

SEQ ID NO: 16430 - DNA, 55 bp, Homo sapiens
  chr2:107460306-107460361
  hypo
gggagctgggtacaggctcagcggggttgctgtcggtgaagtagatgaaaatcag

SEQ ID NO: 16431 - DNA, 30 bp, Homo sapiens; identical to SEQ ID NO: 1739
  chr2:108160503-108160533
  hypo

SEQ ID NO: 16432 - DNA, 92 bp, Homo sapiens
  chr2:108160840-108160932
  hypo
gagacctggtgcactgagaggcggacgtgaaaccgagtggagatggaaggagacgcggtgcactgagaagcggatgtgaaactgagtggaga

SEQ ID NO: 16433 - DNA, 25 bp, Homo sapiens
  chr2:108420525-108420550
  hypo
atgcgtttccattccacttcatcct

SEQ ID NO: 16434 - DNA, 29 bp, Homo sapiens
  chr2:108917751-108917780
  hypo
ctctccccaaaggaggccaggcgcggtgg

SEQ ID NO: 16435 - DNA, 25 bp, Homo sapiens
  chr2:108918019-108918044
  hypo
gagcgagactccatctcaaaaaaaa

SEQ ID NO: 16436 - DNA, 24 bp, Homo sapiens
  chr2:109225029-109225053
  hypo
aattacaggcgtgagccaccgcgc

SEQ ID NO: 16437 - DNA, 38 bp, Homo sapiens
  chr2:109536233-109536271
  hypo
gcacctgccctctccccgcactacgaagctgcctcatg

SEQ ID NO: 16438 - DNA, 38 bp, Homo sapiens
  chr2:109556839-109556877
  hypo
tcctccatggccgagccggcccacgtgcctcctactct

SEQ ID NO: 16439 - DNA, 246 bp, Homo sapiens
  chr2:109559032-109559278
  hypo
tgccttcattttgtgagtctgcgctgagtgaggccgtgaggcgggcggttccgccacctgctttccacgccagaggcctttcaagacggcgggagccctgcggttccagcgcgttcctgttcccgcctctccttttaccacgaagccagcttcgctcccaggcaccaccctggccatctggactctcacgaaggttcgtgccctgagaacttcaggaggaggcgcgctaagaaaactcaacagcag

SEQ ID NO: 16440 - DNA, 30 bp, Homo sapiens; identical to SEQ ID NO: 1741
  chr2:109583297-109583327
  hypo

SEQ ID NO: 16441 - DNA, 164 bp, Homo sapiens; identical to SEQ ID NO: 1742
  chr2:109647977-109648141
  hypo

SEQ ID NO: 16442 - DNA, 192 bp, Homo sapiens
  chr2:110007878-110008070
  hypo
gggtcacccatgggctcgggccttcactctggcagggccggcggcctcacacaggtctccagcacactcctgcagtgctctagtgttgctcagcctctgtcaaactaacttcaaggggggaatctcctccagggtagaagcctctcccatagcaggtgtgtggccacggcttgtggccgggcagggagcatc

SEQ ID NO: 16443 - DNA, 41 bp, Homo sapiens
  chr2:110008966-110009007
  hypo
tcttctttttttttttggagacggagtctcgcactgttgcc

SEQ ID NO: 16444 - DNA, 41 bp, Homo sapiens
  chr2:110009246-110009287
  hypo
aggcgtcagccaccacgcacggccccctggcttcttactag

SEQ ID NO: 16445 - DNA, 234 bp, Homo sapiens
  chr2:110015189-110015423
  hypo
agtgcctttcagcggcgtgtggatggcaagaagaacaccaagaaacgccactccttcaccgcgctcagtgtgacgcacagatcctcccaggctgccagccacaggcattccatggaaattagtgctccagtgttgatcagctccagcgatccccgagccgcggccaggattggagaccttgctcatctgtcgtgcgctgctcccacccaggtaacatcccgcgggccagggcag

SEQ ID NO: 16446 - DNA, 30 bp, Homo sapiens
  chr2:110016463-110016493
  hypo
gcctcagagcaagggcgctgatctgcgggg

SEQ ID NO: 16447 - DNA, 30 bp, Homo sapiens
  chr2:110016728-110016758
  hypo
acatatgcactcccacgcacatgtgcactc

SEQ ID NO: 16448 - DNA, 143 bp, Homo sapiens
  chr2:110017050-110017193
  hypo
gaacttatatgcgtcccttccacatacacacccacacatacacccgtgcacacatgtagacatttatacatgcgcacacacacattggtggatacacacctgcacgcatatgtgtgcacacacacaaacgctggctctcatcg

SEQ ID NO: 16449 - DNA, 450 bp, Homo sapiens
  chr2:110021670-110022120
  hypo
catgccaggagcaaccgatgacacccctctttccgcaaacctgcttccccttctgtattccatctgttcctcaaggagtcaccactgtccttaggtgccctgagctaacactcttcgtcttcgctaatacccttcgtcttccccaacactgactccctgcccctgagttccctcctgagtcccttggaaggttctggggagccttcagactggcccttggttgcctctccagctcccggcagcactgtccattcccgtgagcctgtgcagatcttctccctgcgcaccacgctgctctggccctggtccatttctccccgaaactgccgtagctaatcccttcccacctgcccatgtcccttttgctgcccctcagcatggcattctacctaccaggcaacacacagacacatacctgtgcagaaggctcctgcccgcccttccagacca

SEQ ID NO: 16450 - DNA, 166 bp, Homo sapiens
  chr2:110028489-110028655
  hypo
ggttccttggctgagccctcccgagcctcctgacaccgagccctgtgggttgctttacgttggactcacgcagggcagtcggtggatgccggcacagatgggatggtgagccttcggccgccgtggtccacgatgcgtgtgctccgcacagtgtgcactctcagcc

SEQ ID NO: 16451 - DNA, 30 bp, Homo sapiens
  chr2:110036817-110036847
  hypo
gcagggtgggtagacgtcagagggacactc

SEQ ID NO: 16452 - DNA, 50 bp, Homo sapiens
  chr2:110256841-110256891
  hypo
ggttattgagtgccttcgccctgccaggcccatctcggtgctgctcagca

SEQ ID NO: 16453 - DNA, 195 bp, Homo sapiens
  chr2:110259062-110259257
  hypo
ctgtgctgtttccccaggtaccgcgtggtggtctcgtacccaccccagagtgaggcggagatcgagctgaaggaaggcgacatcgtctttgtgcacaagaagcgtgaggacggctggtacaaggggaccctgcagcggaacggccgcacaggcctcttcccgggcagcttcgtcgagagcttctgagaactggtg

SEQ ID NO: 16454 - DNA, 31 bp, Homo sapiens
  chr2:110266916-110266947
  hypo
aaaataccatgcactgcgtggctgaaacaac

SEQ ID NO: 16455 - DNA, 31 bp, Homo sapiens
  chr2:110267204-110267235
  hypo
tagtgtatccatcacccgaataacatacatg

SEQ ID NO: 16456 - DNA, 38 bp, Homo sapiens
  chr2:110352251-110352289
  hypo
ctcccaccacctcaccgtgatcctctgtgcgggcgcgt

SEQ ID NO: 16457 - DNA, 814 bp, Homo sapiens; identical to SEQ ID NO: 1747
  chr2:111490023-111490837
  hypo

SEQ ID NO: 16458 - DNA, 46 bp, Homo sapiens
  chr2:111935998-111936044
  hypo
tgggcagcaggctttgcgaacactctgggagcgccagctttaatgt

SEQ ID NO: 16459 - DNA, 31 bp, Homo sapiens; identical to SEQ ID NO: 1750
  chr2:112655268-112655299
  hypo

SEQ ID NO: 16460 - DNA, 34 bp, Homo sapiens
  chr2:112655539-112655573
  hypo
ggggaggtgagctcctcgccgccagggccgtgtc

SEQ ID NO: 16461 - DNA, 638 bp, Homo sapiens; identical to SEQ ID NO: 1751
  chr2:112656486-112657124
  hypo

SEQ ID NO: 16462 - DNA, 30 bp, Homo sapiens
  chr2:112786436-112786466
  hypo
tgtgaggagaggtgcggggagacattccaa

SEQ ID NO: 16463 - DNA, 30 bp, Homo sapiens
  chr2:112918537-112918567
  hypo
cgttagtaccaggacggttgggagggaagg

SEQ ID NO: 16464 - DNA, 30 bp, Homo sapiens
  chr2:112942790-112942820
  hypo
tgtgggcctgcagccggtgtgcccccaggg

SEQ ID NO: 16465 - DNA, 48 bp, Homo sapiens
  chr2:112945139-112945187
  hypo
ctcagcttcgggcaccgactgcgtggagcctcccgcctgttcccgccc

SEQ ID NO: 16466 - DNA, 167 bp, Homo sapiens
  chr2:113103032-113103199
  hypo
caccaccgcccgttttcgaatccatttggcacctccttcgcctaagaatttgcttttccaggcgtcccctttctgttccgtctctgtactgcactaacttcacctatacacaggtctgtatcctcctgttaaaaccactgaccaggactgccgcttctgggtgcgat

SEQ ID NO: 16467 - DNA, 30 bp, Homo sapiens
  chr2:113103401-113103431
  hypo
ggcagagcgcagctgcgcagcaatcttgct

SEQ ID NO: 16468 - DNA, 36 bp, Homo sapiens
  chr2:113168034-113168070
  hypo
gtgaactgtctatcaacggtgtttttaaaagattta

SEQ ID NO: 16469 - DNA, 189 bp, Homo sapiens
  chr2:113286634-113286823
  hypo
ctccttcccctctccccgggaacggcagggcactgggacctctggtcggtgcctcccacccactgcagccctagtgccttagctccatgcccggctgcagccccactgctctggactatggattggacgtcagagcatattggaggttgcctgtgtgttccccacccatcccttcggtaacactctgcc

SEQ ID NO: 16470 - DNA, 30 bp, Homo sapiens; identical to SEQ ID NO: 1753
  chr2:113469219-113469249
  hypo

SEQ ID NO: 16471 - DNA, 30 bp, Homo sapiens
  chr2:113494879-113494909
  hypo
taccgttttccataacggctgccccagtct

SEQ ID NO: 16472 - DNA, 32 bp, Homo sapiens
  chr2:113804065-113804097
  hypo
tgagccaccgcgcctgccctcttcagttttta

SEQ ID NO: 16473 - DNA, 30 bp, Homo sapiens
  chr2:113830176-113830206
  hypo
tggcctggggaacccgtgcagcccttggct

SEQ ID NO: 16474 - DNA, 179 bp, Homo sapiens
  chr2:113973340-113973519
  hypo
aaatgccggggcacgtcgaattgtctttctttcgcccgatacataaatggccttattttctgagcccgaaaaggggacccatggtttgaccatgggcagaatattggatgggtactagccaaggcctgttacatggggaacacatcccacagtcaacaaacacccgctctgagcagagg

SEQ ID NO: 16475 - DNA, 31 bp, Homo sapiens
  chr2:113975770-113975801
  hypo
atccccccaagttcctcggctattgcttctt

SEQ ID NO: 16476 - DNA, 22 bp, Homo sapiens
  chr2:114469910-114469932
  hypo
tttgagacggagtctcgctgtc

SEQ ID NO: 16477 - DNA, 14 bp, Homo sapiens
  chr2:114470171-114470185
  hypo
gtgagccaccacgc

SEQ ID NO: 16478 - DNA, 88 bp, Homo sapiens
  chr2:114515439-114515527
  hypo
cattttttaattgatcgaatcagtttcaaactatcagcatcaaacacctctaataagtcattcagaaacctattgtgcagagtaaaaa

SEQ ID NO: 16479 - DNA, 30 bp, Homo sapiens
  chr2:114736951-114736981
  hypo
accgcccccgcccccgtgatgccgagctga

SEQ ID NO: 16480 - DNA, 31 bp, Homo sapiens
  chr2:114737398-114737429
  hypo
cgcagcgcgccctggccgacccctggtggcc

SEQ ID NO: 16481 - DNA, 162 bp, Homo sapiens; identical to SEQ ID NO: 1756
  chr2:115918730-115918892
  hypo

SEQ ID NO: 16482 - DNA, 30 bp, Homo sapiens
  chr2:118942465-118942495
  hypo
agttggacaacggcacgcaggagaatacca

SEQ ID NO: 16483 - DNA, 72 bp, Homo sapiens; identical to SEQ ID NO: 1785
  chr2:119916524-119916596
  hypo

SEQ ID NO: 16484 - DNA, 31 bp, Homo sapiens
  chr2:119997107-119997138
  hypo
gctgtgggcacatactcgttcacccagggac

SEQ ID NO: 16485 - DNA, 575 bp, Homo sapiens
  chr2:120005201-120005776
  hypo
gcccactcctgtggcctgtgacgccgtctgactgccccacttttctcccgcaggtgcccatctgcggtgaccagccagaagccaagcgtgctgtctcggagatggcgctcgccatgggcttcatgcccgtggacatgggatccctggcgtcagcctgggaggtggaggccatgcccctgcgcctcctcccggcctggaaggtgcccaccctgctggccctggggctcttcgtctgcttctatgcctacaacttcgtccgggacgttctgcagccctatgtgcaggaaagccagaacaagttcttcaagctgcccgtgtccgtggtcaacaccacactgccgtgcgtggcctacgtgctgctgtcactcgtgtacttgcccggcgtgctggcggctgccctgcagctgcggcgcggcaccaagtaccagcgcttccccgactggctggaccactggctacagcaccgcaagcagatcgggctgctcagcttcttctgcgccgccctgcacgccctctacagcttctgcttgccgctgcgccgcgcccaccgctacgacctggtcaacctggcagtc

SEQ ID NO: 16486 - DNA, 151 bp, Homo sapiens
  chr2:120011807-120011958
  hypo
cctgggattctggggccggaaaaccgtgagacggagccatgcttaagggctgtatttctggttgactccttactctgctgatgtgactgttctgattggctgccccggggcagatatgtgaaagccccaggagccccggtcattggcacca

SEQ ID NO: 16487 - DNA, 244 bp, Homo sapiens
  chr2:120020671-120020915
  hypo
cacacgctcacctacggctggacccgcgccttcgaggagagccgctacaagttctacctgcctcccaccttcacgctcacgctgctggtgccctgcgtcgtcatcctggccaaagccctgtttctcctgccctgcatcagccgcagactcgccaggatccggagaggctgggagagggagagcaccatcaagttcacgctgcccacagaccacgccctggccgagaagacgagccacgtatgag

SEQ ID NO: 16488 - DNA, 30 bp, Homo sapiens
  chr2:120023906-120023936
  hypo
cactttgtgcttcacgagggctgcggcaca

SEQ ID NO: 16489 - DNA, 83 bp, Homo sapiens
  chr2:120069740-120069823
  hypo
ctgccatcctcacctggtcagcgacagagctgagcttccagctctggccagtccgacttctgagagaagcaagtatacttcct

SEQ ID NO: 16490 - DNA, 185 bp, Homo sapiens
  chr2:120247826-120248011
  hypo
ctgtccctgtcccttgcgcagtggccgagtgcatgggctaaagcacatttgcagcatccatgctgctgcctccgctgctcacaaaccctcatgttcctctgcttccagctgctcctgacaaatgagggccgggagtgctccaggctggctcctgggttctcttcccttcccgctcctgcactctc

SEQ ID NO: 16491 - DNA, 19 bp, Homo sapiens
  chr2:120315524-120315543
  hypo
actccgtctcaaaaaaaaa

SEQ ID NO: 16492 - DNA, 44 bp, Homo sapiens
  chr2:120754331-120754375
  hypo
agtaactcaattggccgggtgcggtggctcacacctgtaatccc

SEQ ID NO: 16493 - DNA, 129 bp, Homo sapiens; identical to SEQ ID NO: 1791
  chr2:120770808-120770937
  hypo

SEQ ID NO: 16494 - DNA, 199 bp, Homo sapiens; identical to SEQ ID NO: 1792
  chr2:120770966-120771165
  hypo

SEQ ID NO: 16495 - DNA, 40 bp, Homo sapiens
  chr2:120973476-120973516
  hypo
ttcaactctttatcggatgagaaggcgtaggaatcatgtc

SEQ ID NO: 16496 - DNA, 140 bp, Homo sapiens
  chr2:120973916-120974056
  hypo
gcaatctgcccttcagcgccaggggaatgcccgacagctaccttctcccccgtgaccgccgggctccgtatcctgggcgagccgcccggctccggatagcaggaaactggggagggctccggcctcgcctcgtcagcccc

SEQ ID NO: 16497 - DNA, 544 bp, Homo sapiens
  chr2:120979867-120980411
  hypo
cctcaaaagtgagcagaggcacgacaatcgttatccaactgatagccatggtcacgtgtgttctccgctgctcggcaaccacatccagggaccgcaggaacaggagggaccagacgatgtaatagaggacgaccaggcaaaggaacgacatgaggatccacaggggcacaaacaccaccagccacggccagtgaataatcctgtccagctttagggcgatgaagatgaactgcaggatgttgaccgagcacaggatctccagctccagcgacctatcgtgtcgaaagccccagacgcaggcagccacggacacgggggacacgaagaagagaggcatgaagaccagcagccagaagtgggtgcccctctccaccctgtcgcagaccaggacttcgaacatgagcagcagcaggtggatgcccacagcgatcagcatggctttgaactccacacaggcctctccctcggtgcggtagcgagggttgcgggcccaaacgcccgcgcccacggaggcgcctgcgacgactagaagcttccacagcca

SEQ ID NO: 16498 - DNA, 102 bp, Homo sapiens
  chr2:120982087-120982189
  hypo
gcggagtggccctcccgcaccctcacagcactgccccaggcgggcatgagcagggtgtccaggtgtcgggcggacagtcccagcccccgaggcgctctccac

SEQ ID NO: 16499 - DNA, 30 bp, Homo sapiens
  chr2:121035758-121035788
  hypo
gtaagagggcaaagcgaggagtaaagctaa

SEQ ID NO: 16500 - DNA, 285 bp, Homo sapiens
  chr2:121058174-121058459
  hypo
aggatgattcattgccacacacgtagctcaagtcggaatggggcctctggtcgtgtctgagaagcacagaaacctggctaagctgaggattcggcctcccacccaggttggtgaaggtgctgcggcctgggagcaggaacggagcccccagctgccaggagtgtgaagctgcttctccgcagtgcagcctccacaagccttctcaggtggcagtgaagaaggaccagatacctaaacagttttcaagttccggaatccttgggaaagttagtgtccatcaacttc

SEQ ID NO: 16501 - DNA, 265 bp, Homo sapiens
  chr2:121108589-121108854
  hypo
gccccagccatcagggctggccgtggacgtggcccctgcccactcacctgcccgcctgcccgcccgcccgcatagcacttgcagacctgcctgaacgcacatgacatagcacttgccgatctgcgtgtgtccagaagtggcccttggccgagcgccgaactcgctcgccctctagatgtccaagtgccacgtgaactatgcaatttaaagggttgacccacactagacgaaactggactcgtacgactctttttatattttttat

SEQ ID NO: 16502 - DNA, 31 bp, Homo sapiens
  chr2:121136846-121136877
  hypo
gtggctgtgggtcctgcggcaggctgcaggc

SEQ ID NO: 16503 - DNA, 30 bp, Homo sapiens
  chr2:121137649-121137679
  hypo
gctctgcaggagccccgcgtgcccgccacc

SEQ ID NO: 16504 - DNA, 31 bp, Homo sapiens
  chr2:121210914-121210945
  hypo
ttgaacttcctgtgagcgattctggatctta

SEQ ID NO: 16505 - DNA, 135 bp, Homo sapiens
  chr2:121243024-121243159
  hypo
acaatgagatgcccaacggagctcagcaagttaggggcagagcccatctcctgacctctcctgagctcttcctgcagcccccactgtccccaaggcttcttgtgccatgctttgagttctcgtgtttcttggtga

SEQ ID NO: 16506 - DNA, 40 bp, Homo sapiens
  chr2:121327690-121327730
  hypo
tgggtctccagagtggcgagaaagacgcccacctcctgct

SEQ ID NO: 16507 - DNA, 31 bp, Homo sapiens; identical to SEQ ID NO: 1800
  chr2:121438058-121438089
  hypo

SEQ ID NO: 16508 - DNA, 97 bp, Homo sapiens
  chr2:121542640-121542737
  hypo
ctggcctccttgagccggcgcatgtccaggctgcagcagaccacattattggatccgggtcccagacacctggcctgggctgcgatgaggtggctgc

SEQ ID NO: 16509 - DNA, 30 bp, Homo sapiens
  chr2:121570259-121570289
  hypo
gtcattcaggctgccggggagcccctttct

SEQ ID NO: 16510 - DNA, 140 bp, Homo sapiens
  chr2:121609722-121609862
  hypo
gaacccagatggcattcgcctgtgtggagggtgaacctgagcttggagtctttcaggagttggagagaggaggaggacaggttggagcacatggagtcatccctaccctgcccaggcctatggatcgcacagagacggat

SEQ ID NO: 16511 - DNA, 31 bp, Homo sapiens
  chr2:121688087-121688118
  hypo
ctctgacgagtccagccgagcccttcttgac

SEQ ID NO: 16512 - DNA, 31 bp, Homo sapiens
  chr2:121723280-121723311
  hypo
ggatgcccctgtttgccgtccaggatcccta

SEQ ID NO: 16513 - DNA, 45 bp, Homo sapiens
  chr2:121726278-121726323
  hypo
ctatcccacagtgtcccgtttctccagcccgcgggtgacgccccg

SEQ ID NO: 16514 - DNA, 367 bp, Homo sapiens
  chr2:121742085-121742452
  hypo
tacacagaccccagctctctccggaagcatgtgaaaacggtccacggcccagatgcccacgtcaccaagaagcagcgcaatgacgtgcacctccgcacaccgctgctcaaagagaatggggacagtgaggccggcacggagcctggcggcccagagagcaccgaggccagcagcaccagccaggccgtggaggactgcctgcacgtcagagccatcaagaccgagagctccggggtaagcggagctgggcagcccagccacgcaaggcgactccatagccgtgcccagggccaccccttgccacggttgcgggctctgccctaaggcccccctctaggggcacagcgatatccctcctctctccaac

SEQ ID NO: 16515 - DNA, 1126 bp, Homo sapiens
  chr2:121745648-121746774
  hypo
aaagcatgcatctcctgagtgcgctgtgttgcaagccctcttctcgggctccaggcccagtgcgatgactgagcacggtcaaagcaagcagccacccacccttgtcccggtgctgacccctctgctctcccgcaggctccatcctggaaaacttcagtggcagtgggggcggcgggcccgcggggctgctgccgaacccgcggctgtcggagctgtccgcgagcgaggtgaccatgctgagccagctgcaggagcgccgcgacagctccaccagcacggtcagctcggcctacaccgtgagccgccgctcctccggcatctccccctacttctccagccgccgctccagcgaggcctcgcccctgggcgccggccgcccgcacaacgcgagctccgctgactcctacgaccccatctccacggacgcgtcgcggcgctcgagcgaggccagccagtgcagcggcggctccgggctgctcaacctcacgccggcgcagcagtacagcctgcgggccaagtacgcggcagccactggcggccccccgcccactccgctgccgggcctggagcgcatgagcctgcggaccaggctggcgctgctggacgcgcccgagcgcacgctgcccgccggctgcccacgcccactggggccgcggcgtggcagcgacgggccgacctatggccacggccacgcgggggctgcgcccgccttcccccacgaggctccaggcggcggagccaggcgggccagcgaccctgtgcggcggcccgatgccctgtccctgccgcgggtgcagcgcttccacagcacccacaacgtgaaccccggcccgctgccgccctgtgccgacaggcgaggcctccgcctgcagagccacccgagcaccgacggcggcctggcccgcggcgcctactcgccccggccgcctagcatcagcgagaacgtggcgatggaggccgtggcggcaggagtggacggcgcggggcccgaggccgacctggggctgccggaggacgacctggtgcttccagacgacgtggtgcagtacatcaaggcgcacgccagtggcgctctggacgagggcaccgggcaggtgtatcccacggaaagcactggcttctctga

SEQ ID NO: 16516 - DNA, 31 bp, Homo sapiens
  chr2:121846109-121846140
  hypo
ccattttgtgaaagccgcgtcagtgtgccta

SEQ ID NO: 16517 - DNA, 43 bp, Homo sapiens
  chr2:121924777-121924820
  hypo
cattctcctgcctcggcctcccgagtttttctagttttttaag

SEQ ID NO: 16518 - DNA, 149 bp, Homo sapiens
  chr2:121976016-121976165
  hypo
tacaggatgaggggtgcggagctgaggatgttgttctctttgatgaaggcctgaaaacttcccctggcccctgctgcccacctcagggctcctcaggacgaagggcatgaggacaggttcccactctggcccttcgctgggggacatgg

SEQ ID NO: 16519 - DNA, 31 bp, Homo sapiens
  chr2:121982627-121982658
  hypo
tccagggtctatgagtcggtcagagggcttt

SEQ ID NO: 16520 - DNA, 31 bp, Homo sapiens
  chr2:122006602-122006633
  hypo
ccagctgctggtgctccgtatactgcagccg

SEQ ID NO: 16521 - DNA, 89 bp, Homo sapiens
  chr2:122102163-122102252
  hypo
cccaaagtgctgggattacaggtatgagccgtgcccagccttcatttattaacttcatttaagcaaaaggagagcgtgttcccataggc

SEQ ID NO: 16522 - DNA, 161 bp, Homo sapiens
  chr2:122104568-122104729
  hypo
gcagagcccaggtgtgcgtatcagcccaggtaacactatacataccttgctccctgtgagctgtgcaaggtgaggtttcaggtcttctccgattacggaataaattgccactaagcaaaacacgctggccttacgcacactactttcggtgttgtcataac

SEQ ID NO: 16523 - DNA, 30 bp, Homo sapiens
  chr2:122283865-122283895
  hypo
ttgtttaattctcccgtgtgctgtggcaga

SEQ ID NO: 16524 - DNA, 262 bp, Homo sapiens
  chr2:122305113-122305375
  hypo
caaccactactaaggtcccttcctctgctgcccccaaactggaaaaaaaacataaacactgagattgtcccagagctgcaatgggcagctcgggaatgccaagctgcgatctatagccagtactcaaggtggagagaaacccacgctttttgagaattgagagggaacacggctgcaactgtgaggaaatacgggggagccacacaaccaagcaagagtgtaccatgaccagtatgcctacgtgccacataccagatcacaa

SEQ ID NO: 16525 - DNA, 128 bp, Homo sapiens
  chr2:122312688-122312816
  hypo
aagaactccctggagagctcacgctgcacacaaacctcagcaggtctctctgcggcccatgaatcctctgcagttttcctggatgtgctgtgctctcgcatgctcccgtctgcagcactgtgtgttct

SEQ ID NO: 16526 - DNA, 31 bp, Homo sapiens
  chr2:122409687-122409718
  hypo
tatattgtttaaggtccgtgactaggcatag

SEQ ID NO: 16527 - DNA, 32 bp, Homo sapiens
  chr2:122497729-122497761
  hypo
aagatgaggtcatgaccgggcacggtggctca

SEQ ID NO: 16528 - DNA, 24 bp, Homo sapiens
  chr2:122523884-122523908
  hypo
tataaataagtcaggccgggcgtg

SEQ ID NO: 16529 - DNA, 72 bp, Homo sapiens; identical to SEQ ID NO: 1804
  chr2:127413655-127413727
  hypo

SEQ ID NO: 16530 - DNA, 30 bp, Homo sapiens; identical to SEQ ID NO: 1805
  chr2:127464270-127464300
  hypo

SEQ ID NO: 16531 - DNA, 164 bp, Homo sapiens
  chr2:127801122-127801286
  hypo
tctgagaccaggagcgggggccgtcgggtgagcattcccctggaacacgaaggagcaaacctgcccggctgcattccgccctcccgctgccctaggcccgctataggctggataaagtgaaccaagcaagggtcccagaaacgtcacacgtgaactcgcccatt

SEQ ID NO: 16532 - DNA, 30 bp, Homo sapiens
  chr2:127815118-127815148
  hypo
ttgacttccttggacggggtgtgtttggga

SEQ ID NO: 16533 - DNA, 31 bp, Homo sapiens
  chr2:127816629-127816660
  hypo
ccggccggctctggctcgtggttgactctga

SEQ ID NO: 16534 - DNA, 193 bp, Homo sapiens
  chr2:128127765-128127958
  hypo
tactgaataaatgcccgcagcgcaagcacaggcttgtcagggcctcagccgctgactctttatacaccctcctcagtgtctgtgggcggcccagtcccctagcccactctttcactggcttcctgtgtctgagttcatttgttcatctgttgttcagccagggtctgcgggtcggacccggaaggtagagccc

SEQ ID NO: 16535 - DNA, 234 bp, Homo sapiens
  chr2:128158416-128158650
  hypo
ggcccctctgctgctgggaaccgggcgcactcccgccagtcgcaggagctggctccacccgccccttctgatccagtgtcccgcagtcctgcccgcttcaccgccctcgcctagcccccgcgggtggtaaaagtccagcccggcggagcgcccctgcctccttccacgcccctggcctgccctgcgcagctacgcccagcccgcgtccatcccggaccatcctgttgaaggcag

SEQ ID NO: 16536 - DNA, 79 bp, Homo sapiens
  chr2:128273730-128273809
  hypo
tacagaaggcagcctaggcaacgtggcaaaactccatgtctacaacacaaaaattagctgggcgtgtggtgtatgcctg

SEQ ID NO: 16537 - DNA, 78 bp, Homo sapiens
  chr2:128273868-128273946
  hypo
gagatcgcgtcatggcactccagcctgggcgacagtgagactccgcaccccgcccccgcaatacacacacacaaaata

SEQ ID NO: 16538 - DNA, 30 bp, Homo sapiens
  chr2:128350733-128350763
  hypo
ggagagctggcggccgcagcggttccttct

SEQ ID NO: 16539 - DNA, 30 bp, Homo sapiens
  chr2:128403271-128403301
  hypo
tgtcctcaaagagtcgcctctcactccgtg

SEQ ID NO: 16540 - DNA, 106 bp, Homo sapiens; identical to SEQ ID NO: 1817
  chr2:128459398-128459504
  hypo

SEQ ID NO: 16541 - DNA, 33 bp, Homo sapiens
  chr2:128472922-128472955
  hypo
gctgggattacaggcatgcgccactgcacctgg

SEQ ID NO: 16542 - DNA, 25 bp, Homo sapiens
  chr2:128487353-128487378
  hypo
ccactgcacccggccaactattcat

SEQ ID NO: 16543 - DNA, 30 bp, Homo sapiens
  chr2:128549955-128549985
  hypo
cagggcaggtggctcacgcctataatccca

SEQ ID NO: 16544 - DNA, 195 bp, Homo sapiens
  chr2:128583682-128583877
  hypo
aggtgtgagccgctgcgcgtcaccaccaatccattttctccaggacctctctctgtgcagagagctcttctctttcacctattaaacttccactctgaacctcactctttgtatatccgcatcctagtgttctgtggctttagacaaggaacctcgagtatttacccaagacgatgatatcgtttcattggcagc

SEQ ID NO: 16545 - DNA, 76 bp, Homo sapiens
  chr2:128600143-128600219
  hypo
gtagctccacaccgacgctattcaaaatgggggctcaataaacatttgctagtaagtacgcagtgcaggccgggca

SEQ ID NO: 16546 - DNA, 24 bp, Homo sapiens
  chr2:128600518-128600542
  hypo
gccacacaacggaagggaggcata

SEQ ID NO: 16547 - DNA, 181 bp, Homo sapiens
  chr2:128616460-128616641
  hypo
aaaaaaaagcaaataaaaaatgatgctgttttcgacactggagaaaacaaaaggttgtacaataaggtaaataatcatagcttattagtcaacaatatcttagctcattagtcaacaatgtttagatggtcatattgtaaactctgttgatttaataaaaaatgaattgtgccgggcacgg

SEQ ID NO: 16548 - DNA, 42 bp, Homo sapiens
  chr2:128679950-128679992
  hypo
cagcaaaggtaaggcttgctacgtcgattttcttttttattt

SEQ ID NO: 16549 - DNA, 41 bp, Homo sapiens
  chr2:128680171-128680212
  hypo
tgttagccaggagttatgtcgattttcaaaataactggctg

SEQ ID NO: 16550 - DNA, 57 bp, Homo sapiens
  chr2:129027718-129027775
  hypo
actgcatgcagactgccgaggaagggacaggcagctgtcatccgcccagtgttttct

SEQ ID NO: 16551 - DNA, 30 bp, Homo sapiens
  chr2:129126360-129126390
  hypo
ctttaaggtggccacgagggagcaattgtc

SEQ ID NO: 16552 - DNA, 87 bp, Homo sapiens
  chr2:129250706-129250793
  hypo
ctgctcctgcccagagcgggtcctctgccgaaggaatttgcgctggcagctcccggagggtctggcccgcacgcggcagggcaataa

SEQ ID NO: 16553 - DNA, 30 bp, Homo sapiens
  chr2:129335826-129335856
  hypo
ggaatcttggataacggatgaagattgtgc

SEQ ID NO: 16554 - DNA, 159 bp, Homo sapiens
  chr2:129542647-129542806
  hypo
aatggctcttggactggctcacgaggacccagagcctcatcctgtgcagactgcacggccgcagcagctctctgggtggcatcccttcgctcagggcgacgaccttgctgtttccactgcgactagactcttacctccgctctaaggctgtgcaatcaa

SEQ ID NO: 16555 - DNA, 23 bp, Homo sapiens
  chr2:129660420-129660443
  hypo
tcagccgggtgcggtggttcacg

SEQ ID NO: 16556 - DNA, 95 bp, Homo sapiens
  chr2:130356760-130356855
  hypo
ttctttcttcctttatcggctttttttccttttcgcttttgtttgttttttagttttgggttttttttgtgtgcgtatatatatatttttttaac

SEQ ID NO: 16557 - DNA, 37 bp, Homo sapiens
  chr2:130670340-130670377
  hypo
gcaggagcggaggccccgacaccgcagaggagacttg

SEQ ID NO: 16558 - DNA, 139 bp, Homo sapiens
  chr2:130943150-130943289
  hypo
acagcaggaggggggtcggcagagccccacacgtgtgagctggggcagtgggagggcgtgggtgaggcagagcgctgtccaggtgctggtaggccgggggcgggaggaggcaggtgggggggcacggtcaagatgtatg

SEQ ID NO: 16559 - DNA, 89 bp, Homo sapiens
  chr2:131502559-131502648
  hypo
aggccagggcccagtccgctctccaggctgccaggagctgaggcttcatcccaaagggcatgaacctgaggatccgtctccagagaagc

SEQ ID NO: 16560 - DNA, 124 bp, Homo sapiens
  chr2:131639162-131639286
  hypo
cactaagagactacagctgtgcgtgagctgtttctgaggccatcctccgcagacgtacaaggttttgctatagtgaatgcttcgggagatgtaaggagggagcgctcactgtggctcagaagtg

SEQ ID NO: 16561 - DNA, 312 bp, Homo sapiens; identical to SEQ ID NO: 1821
  chr2:131720786-131721098
  hypo

SEQ ID NO: 16562 - DNA, 31 bp, Homo sapiens
  chr2:131813290-131813321
  hypo
ctgagttcacccaagccggtccaggcgcagg

SEQ ID NO: 16563 - DNA, 20 bp, Homo sapiens
  chr2:131823067-131823087
  hypo
aaagaaaagaaacgccgggc

SEQ ID NO: 16564 - DNA, 86 bp, Homo sapiens
  chr2:131878503-131878589
  hypo
taggtgaagagatggcgtttgtgaagagtggctggttgctgcgacagagtgagtacaggatgtgcggtctgcgatcggcattgccg

SEQ ID NO: 16565 - DNA, 30 bp, Homo sapiens
  chr2:132203188-132203218
  hypo
gcacgtgaggcggacgcaggcagagtggcc

SEQ ID NO: 16566 - DNA, 31 bp, Homo sapiens
  chr2:132270119-132270150
  hypo
aggaatctgtgagagccgggggagacgggct

SEQ ID NO: 16567 - DNA, 319 bp, Homo sapiens
  chr2:132301068-132301387
  hypo
gtgcgcgacctcagtacgtaaagcatgctgaggcggtgtcaggtcattttaggctcttcagtttcgcgtttggtatccggcatggctgccacctgtttctggctggagcctcggacactggctcactgcagttggtggtgtcgacagagcggtaggagggcggcgggcagcaggagcttctcctgctgggcaggaagacgagtagaagggagcggcaccgaggcatgctggaggctggagcctgagccaccccggctcgcctcgctgcggttggtggtgacctcggacactgcagctcggccagagtggtagaaatgtc

SEQ ID NO: 16568 - DNA, 30 bp, Homo sapiens
  chr2:132348690-132348720
  hypo
taacggcttgcacgcgcacgccgcccccgc

SEQ ID NO: 16569 - DNA, 534 bp, Homo sapiens
  chr2:132415329-132415863
  hypo
ggttcctgccttgctgcagtccggggagcagcgggcaggggtcctctcttgtcagagtctctggcgcgaggtgggggtggggtgggggttttcctatgcgatagcccacggggcggtgaggccaggtcctcgcgtgcctttgtccagggcgcaggggggcgagggtcttcggtggtggagtccgcggagcggcaggacaggggtcctccagtgccatattccagagcacggcggagtgggggacctgtcctgcagtggtccagggcatgcgggagtggtgggcctcctgtgccatagtccaacgcgcggcggggcgggggtcacctcgtcctgcagtcaccatgcacgagaccccggtcctgctgtgcctcagtccagtgcgcggtgggacggctgttctgctatgctgtagtgcaggacgcggtggggcagcagtaacccagagagcgccgtggcagggggtcctccagtgctggaatccagtgcatggcgggtcaggggtcttaccgtgccgaagtcagtggcaagggtcct

SEQ ID NO: 16570 - DNA, 58 bp, Homo sapiens
  chr2:132586594-132586652
  hypo
cgctcacggtattttccgaagtcctccgtgtaaaaagggcgggcggtggagtgggccc

SEQ ID NO: 16571 - DNA, 276 bp, Homo sapiens; identical to SEQ ID NO: 1828
  chr2:132767359-132767635
  hypo

SEQ ID NO: 16572 - DNA, 247 bp, Homo sapiens; identical to SEQ ID NO: 1829
  chr2:132767688-132767935
  hypo

SEQ ID NO: 16573 - DNA, 279 bp, Homo sapiens; identical to SEQ ID NO: 1830
  chr2:132795725-132796004
  hypo

SEQ ID NO: 16574 - DNA, 341 bp, Homo sapiens; identical to SEQ ID NO: 1831
  chr2:132796063-132796404
  hypo

SEQ ID NO: 16575 - DNA, 208 bp, Homo sapiens
  chr2:133175139-133175347
  hypo
tactgagtaccccctggtgaacgtgcccagccaccggggtctcacttgcaaccgctccagcacccgccaccacgagcagcccgagacctccaatatgtccatctgtaccaacctctccagccgctggaccgtgttccagtccagcatcttcggcgccttcgtggtctacctcgtggtcctgctctccgtagccttcatgtgctggaac

SEQ ID NO: 16576 - DNA, 20 bp, Homo sapiens
  chr2:135141291-135141311
  hypo
tttgagacagtctcactgtg

SEQ ID NO: 16577 - DNA, 20 bp, Homo sapiens
  chr2:135141550-135141570
  hypo
cttaagcatggtttttatgt

SEQ ID NO: 16578 - DNA, 1253 bp, Homo sapiens; identical to SEQ ID NO: 1838
  chr2:135475677-135476930
  hypo

SEQ ID NO: 16579 - DNA, 89 bp, Homo sapiens; identical to SEQ ID NO: 1839
  chr2:136288365-136288454
  hypo

SEQ ID NO: 16580 - DNA, 163 bp, Homo sapiens
  chr2:136785650-136785813
  hypo
aaaggatgctgagacagtacacgggggcgcttaaagcgctcctacttcccgactgcagtactaggagggtgtgggctacggtagaaagatggtataaaatctcacgggtagctaactgttgtaaccgtgggcatggtgggccgagggaagctcagtagtgggt

SEQ ID NO: 16581 - DNA, 2359 bp, Homo sapiens; identical to SEQ ID NO: 1840
  chr2:136873850-136876209
  hypo

SEQ ID NO: 16582 - DNA, 598 bp, Homo sapiens; identical to SEQ ID NO: 1841
  chr2:136876428-136877026
  hypo

SEQ ID NO: 16583 - DNA, 43 bp, Homo sapiens
  chr2:137195176-137195219
  hypo
ctgtgcaattccttcccgccatgctgcccgcatccctgttatc

SEQ ID NO: 16584 - DNA, 572 bp, Homo sapiens; identical to SEQ ID NO: 1842
  chr2:137522177-137522749
  hypo

SEQ ID NO: 16585 - DNA, 544 bp, Homo sapiens; identical to SEQ ID NO: 1843
  chr2:137522848-137523392
  hypo

SEQ ID NO: 16586 - DNA, 31 bp, Homo sapiens; identical to SEQ ID NO: 1845
  chr2:138436702-138436733
  hypo

SEQ ID NO: 16587 - DNA, 30 bp, Homo sapiens
  chr2:138940401-138940431
  hypo
tactctacaggtaacgtgtgccaaatacaa

SEQ ID NO: 16588 - DNA, 31 bp, Homo sapiens
  chr2:139274945-139274976
  hypo
cttttgaggattgaatcgtagcagattaatt

SEQ ID NO: 16589 - DNA, 30 bp, Homo sapiens
  chr2:139436925-139436955
  hypo
tgactcttcacctacgtggcagcgggggag

SEQ ID NO: 16590 - DNA, 19 bp, Homo sapiens
  chr2:143555049-143555068
  hypo
cttaaagaaagcagaactg

SEQ ID NO: 16591 - DNA, 30 bp, Homo sapiens
  chr2:144478076-144478106
  hypo
actgccctctatcgacgcagatgcacctgt

SEQ ID NO: 16592 - DNA, 229 bp, Homo sapiens; identical to SEQ ID NO: 1850
  chr2:144694285-144694514
  hypo

SEQ ID NO: 16593 - DNA, 736 bp, Homo sapiens; identical to SEQ ID NO: 1851
  chr2:144694553-144695289
  hypo

SEQ ID NO: 16594 - DNA, 34 bp, Homo sapiens; identical to SEQ ID NO: 1852
  chr2:145090079-145090113
  hypo

SEQ ID NO: 16595 - DNA, 30 bp, Homo sapiens
  chr2:145162474-145162504
  hypo
tggctgtgtcactgcgctgaaggtactcct

SEQ ID NO: 16596 - DNA, 27 bp, Homo sapiens
  chr2:145167761-145167788
  hypo
caccgcgcccagccataaaaaagaatg

SEQ ID NO: 16597 - DNA, 1183 bp, Homo sapiens; identical to SEQ ID NO: 1853
  chr2:145273327-145274510
  hypo

SEQ ID NO: 16598 - DNA, 1048 bp, Homo sapiens; identical to SEQ ID NO: 1854
  chr2:145274576-145275624
  hypo

SEQ ID NO: 16599 - DNA, 446 bp, Homo sapiens; identical to SEQ ID NO: 1857
  chr2:145281532-145281978
  hypo

SEQ ID NO: 16600 - DNA, 30 bp, Homo sapiens; identical to SEQ ID NO: 1859
  chr2:148389097-148389127
  hypo

SEQ ID NO: 16601 - DNA, 598 bp, Homo sapiens; identical to SEQ ID NO: 1860
  chr2:148601815-148602413
  hypo

SEQ ID NO: 16602 - DNA, 216 bp, Homo sapiens; identical to SEQ ID NO: 1861
  chr2:148602727-148602943
  hypo

SEQ ID NO: 16603 - DNA, 25 bp, Homo sapiens
  chr2:148912495-148912520
  hypo
tattcctattcggccatcttggctc

SEQ ID NO: 16604 - DNA, 38 bp, Homo sapiens
  chr2:149045674-149045712
  hypo
aaaagtgatttctggccgggcgcggtggctcacgcctg

SEQ ID NO: 16605 - DNA, 195 bp, Homo sapiens
  chr2:149227322-149227517
  hypo
attctggagctgttgccggcagtggcaacactgaaggacatagcactttaaacaccatgttccctcctactgccaacatgcttctcccaacaggtgaagggcaaagtggtcgagcagcactaagagataagctgatgtctcagcaaaaagacgcattgcggaaaagaaaacaaccacctacgacagtgttgagtt

SEQ ID NO: 16606 - DNA, 30 bp, Homo sapiens
  chr2:149286257-149286287
  hypo
acccaccaggcacctcggaaccagtcactg

SEQ ID NO: 16607 - DNA, 33 bp, Homo sapiens
  chr2:149436587-149436620
  hypo
agcctgggtgacagagtgcgaccctgtcactaa

SEQ ID NO: 16608 - DNA, 199 bp, Homo sapiens
  chr2:149525278-149525477
  hypo
aactctgcctcttgatcgtgcttccgattttcctaacattagctttgtcttcctatgcctcagacttcttttgtcccctggaatctaccccggggaatcgtagttaggaggaaggggtgatagattttatacacagaatttctgagactttgtgacacttcctgtgtatatcttagaataggtacgttatttgcaaagg

SEQ ID NO: 16609 - DNA, 30 bp, Homo sapiens; identical to SEQ ID NO: 1862
  chr2:149588676-149588706
  hypo

SEQ ID NO: 16610 - DNA, 273 bp, Homo sapiens; identical to SEQ ID NO: 1863
  chr2:149632584-149632857
  hypo

SEQ ID NO: 16611 - DNA, 1111 bp, Homo sapiens; identical to SEQ ID NO: 1864
  chr2:149632888-149633999
  hypo

SEQ ID NO: 16612 - DNA, 50 bp, Homo sapiens
  chr2:150131806-150131856
  hypo
aatacaggcatgagccaccacgcccggccgacaggcagaatttatgtgct

SEQ ID NO: 16613 - DNA, 30 bp, Homo sapiens; identical to SEQ ID NO: 1869
  chr2:150153324-150153354
  hypo

SEQ ID NO: 16614 - DNA, 31 bp, Homo sapiens
  chr2:152154197-152154228
  hypo
taagatggaaatgtggcggcaaggcagatct

SEQ ID NO: 16615 - DNA, 153 bp, Homo sapiens
  chr2:152295769-152295922
  hypo
catgccgtccaaacccgtgtcgttcaagggtcaactgtacttagtattgttgatttagaaaaaataaatttttacagctctctgtatagtcatctctaaaattacatgcttagaaatacacccttctagccgggcgcggtggctcatgcctgt

SEQ ID NO: 16616 - DNA, 25 bp, Homo sapiens
  chr2:152561379-152561404
  hypo
attcggccatcttggctcctcccca

SEQ ID NO: 16617 - DNA, 207 bp, Homo sapiens
  chr2:152642696-152642903
  hypo
tgattggtccattgaacgctgtatagttcacttgcgtttccattgagccaaggagggtaggaactcttgactgctttcaggccactggggctcctgcatttatatgcttgacagtcttacactgcgaggaaacagacaactaacaaatgcctctgaaactcatttcttatatgtctgaaatgaaacgagcaacgtaggtttaaattc

SEQ ID NO: 16618 - DNA, 30 bp, Homo sapiens; identical to SEQ ID NO: 1874
  chr2:152956019-152956049
  hypo

SEQ ID NO: 16619 - DNA, 30 bp, Homo sapiens
  chr2:153079603-153079633
  hypo
cataagtatactgacgagaagtgtacattc

SEQ ID NO: 16620 - DNA, 326 bp, Homo sapiens; identical to SEQ ID NO: 1875
  chr2:153192149-153192475
  hypo

SEQ ID NO: 16621 - DNA, 31 bp, Homo sapiens; identical to SEQ ID NO: 1876
  chr2:153573617-153573648
  hypo

SEQ ID NO: 16622 - DNA, 80 bp, Homo sapiens; identical to SEQ ID NO: 1883
  chr2:155553935-155554015
  hypo

SEQ ID NO: 16623 - DNA, 1096 bp, Homo sapiens; identical to SEQ ID NO: 1884
  chr2:155554076-155555172
  hypo

SEQ ID NO: 16624 - DNA, 204 bp, Homo sapiens; identical to SEQ ID NO: 1888
  chr2:157189364-157189568
  hypo

SEQ ID NO: 16625 - DNA, 159 bp, Homo sapiens; identical to SEQ ID NO: 1889
  chr2:157292365-157292524
  hypo

SEQ ID NO: 16626 - DNA, 30 bp, Homo sapiens
  chr2:158155295-158155325
  hypo
agtgagtggcacagcgtcccctcagactgc

SEQ ID NO: 16627 - DNA, 51 bp, Homo sapiens; identical to SEQ ID NO: 1890
  chr2:158485229-158485280
  hypo

SEQ ID NO: 16628 - DNA, 31 bp, Homo sapiens
  chr2:158901219-158901250
  hypo
gagatttgtacacaagcgtgggaacacagga

SEQ ID NO: 16629 - DNA, 31 bp, Homo sapiens; identical to SEQ ID NO: 1892
  chr2:159313053-159313084
  hypo

SEQ ID NO: 16630 - DNA, 565 bp, Homo sapiens; identical to SEQ ID NO: 1893
  chr2:159313328-159313893
  hypo

SEQ ID NO: 16631 - DNA, 654 bp, Homo sapiens; identical to SEQ ID NO: 1894
  chr2:159314143-159314797
  hypo

SEQ ID NO: 16632 - DNA, 31 bp, Homo sapiens
  chr2:159340499-159340530
  hypo
gtgagcataacaagaacgtgcacagttgcac

SEQ ID NO: 16633 - DNA, 158 bp, Homo sapiens
  chr2:159490659-159490817
  hypo
caacagctacctacgcggagccctacaggcctatacaataccgagtgcaagagtgcaattataacaggcttcagcatgcagtgccggctgatgatggcaccacaagatccccatcaatagacagcattcagaaggaccccaggcgagtaccagttagg

SEQ ID NO: 16634 - DNA, 154 bp, Homo sapiens
  chr2:159528147-159528301
  hypo
ctgctgtgtgccagacgctcttctctatgctgggcttgcagcagcagacaggtcgcatgacagccccacccgaggtagcttacgttccatgggtgaggtagacgcagacaaggtgccaaacgaacagaaacgcgtggagcgtggtgggtggtgc

SEQ ID NO: 16635 - DNA, 30 bp, Homo sapiens; identical to SEQ ID NO: 1895
  chr2:159660261-159660291
  hypo

SEQ ID NO: 16636 - DNA, 30 bp, Homo sapiens
  chr2:159946995-159947025
  hypo
aaaacagcctcgctcggcagggatcggggg

SEQ ID NO: 16637 - DNA, 30 bp, Homo sapiens
  chr2:159987935-159987965
  hypo
tactggatgtcacccgcgcccctgccttcc

SEQ ID NO: 16638 - DNA, 31 bp, Homo sapiens
  chr2:160086243-160086274
  hypo
tcaacgactccgagaacgaagaggacacccc

SEQ ID NO: 16639 - DNA, 30 bp, Homo sapiens
  chr2:160087162-160087192
  hypo
cagctggcactgtccggcaccagaggggct

SEQ ID NO: 16640 - DNA, 507 bp, Homo sapiens; identical to SEQ ID NO: 1898
  chr2:160142448-160142955
  hypo

SEQ ID NO: 16641 - DNA, 39 bp, Homo sapiens
  chr2:160632630-160632669
  hypo
tgggattacaggcgtgagccactgcgcccggcctgtgcc

SEQ ID NO: 16642 - DNA, 31 bp, Homo sapiens; identical to SEQ ID NO: 1900
  chr2:160654434-160654465
  hypo

SEQ ID NO: 16643 - DNA, 89 bp, Homo sapiens; identical to SEQ ID NO: 1901
  chr2:160760809-160760898
  hypo

SEQ ID NO: 16644 - DNA, 418 bp, Homo sapiens; identical to SEQ ID NO: 1902
  chr2:160760959-160761377
  hypo

SEQ ID NO: 16645 - DNA, 30 bp, Homo sapiens
  chr2:161113841-161113871
  hypo
aaatgcctcttggtcggaggctgtttgatc

SEQ ID NO: 16646 - DNA, 92 bp, Homo sapiens
  chr2:161127527-161127619
  hypo
taacacagccagatagagggccgcggacttcagcggcgagaagctacaacaaaaatagggtgaacaaaaacgaaggtgcccaggagcctgaa

SEQ ID NO: 16647 - DNA, 153 bp, Homo sapiens
  chr2:161128080-161128233
  hypo
agtgagggaaagaggagttctcgctcctccgtgaatgctgcacgggagcctccagtcgggaacagctgaacaggtagctctgaaagaggaccttggtcataaacgcatagataagattatcccgaggttctcgcccacatgcttccttaccac

SEQ ID NO: 16648 - DNA, 28 bp, Homo sapiens
  chr2:161226818-161226846
  hypo
aaatttttaaacccaagattacgttttt

SEQ ID NO: 16649 - DNA, 28 bp, Homo sapiens
  chr2:161226965-161226993
  hypo
aaaccccgtctctactaaagatacagac

SEQ ID NO: 16650 - DNA, 403 bp, Homo sapiens; identical to SEQ ID NO: 1904
  chr2:161263951-161264354
  hypo

SEQ ID NO: 16651 - DNA, 327 bp, Homo sapiens; identical to SEQ ID NO: 1905
  chr2:161264419-161264746
  hypo

SEQ ID NO: 16652 - DNA, 30 bp, Homo sapiens
  chr2:161986974-161987004
  hypo
ggggcaggaaggtggcgtgccaagcgaaga

SEQ ID NO: 16653 - DNA, 8 bp, Homo sapiens
  chr2:161987335-161987343
  hypo
agaaatca

SEQ ID NO: 16654 - DNA, 162 bp, Homo sapiens
  chr2:161989984-161990146
  hypo
gatcctttcacttgtttaatccgtgggtatctaggcatctcttcatgcgtagctcgagctctgagaactgcctctctgcccacacagccagaactttgtatgcatcaccactcttaactttgtcaatgagcagagttaaacgtttgcacgtctatctcttgc

SEQ ID NO: 16655 - DNA, 86 bp, Homo sapiens; identical to SEQ ID NO: 1910
  chr2:162275140-162275226
  hypo

SEQ ID NO: 16656 - DNA, 127 bp, Homo sapiens; identical to SEQ ID NO: 1911
  chr2:162275310-162275437
  hypo

SEQ ID NO: 16657 - DNA, 337 bp, Homo sapiens; identical to SEQ ID NO: 1912
  chr2:162275472-162275809
  hypo

SEQ ID NO: 16658 - DNA, 203 bp, Homo sapiens; identical to SEQ ID NO: 1916
  chr2:162930081-162930284
  hypo

SEQ ID NO: 16659 - DNA, 639 bp, Homo sapiens; identical to SEQ ID NO: 1917
  chr2:162930338-162930977
  hypo

SEQ ID NO: 16660 - DNA, 64 bp, Homo sapiens; identical to SEQ ID NO: 1919
  chr2:165477629-165477693
  hypo

SEQ ID NO: 16661 - DNA, 215 bp, Homo sapiens
  chr2:165637157-165637372
  hypo
tggacaagagctgcagcgctcctatttattccacaaccattccacttttgtgtgttttcagctttatgccttatttagaaaccaaataatgtttgccctgggtggtgctgccggagtatctgccgggctaagtggaaatccacaaggcagggtaggcgacagacagagtgtaaatgctgtgttttcatggagactgctgtcgccttgtgaggtct

SEQ ID NO: 16662 - DNA, 53 bp, Homo sapiens; identical to SEQ ID NO: 1920
  chr2:165697708-165697761
  hypo

SEQ ID NO: 16663 - DNA, 46 bp, Homo sapiens; identical to SEQ ID NO: 1921
  chr2:165697963-165698009
  hypo

SEQ ID NO: 16664 - DNA, 396 bp, Homo sapiens; identical to SEQ ID NO: 1922
  chr2:165698273-165698669
  hypo

SEQ ID NO: 16665 - DNA, 476 bp, Homo sapiens; identical to SEQ ID NO: 1924
  chr2:166649933-166650409
  hypo

SEQ ID NO: 16666 - DNA, 663 bp, Homo sapiens; identical to SEQ ID NO: 1925
  chr2:166650454-166651117
  hypo

SEQ ID NO: 16667 - DNA, 89 bp, Homo sapiens
  chr2:166790774-166790863
  hypo
ttatgacagtcaagagcgaaaaaaagagccaacaaaactgttataagagaaacacggagaactccgtctctactaaaaatacaaaaaat

SEQ ID NO: 16668 - DNA, 87 bp, Homo sapiens
  chr2:166894500-166894587
  hypo
gctgcatgccgaccacggcaaaaatgaagacgatgatggccaagacgagggttaaatttcccagagcccccacggaattgccgatga

SEQ ID NO: 16669 - DNA, 1336 bp, Homo sapiens; identical to SEQ ID NO: 1927
  chr2:168149385-168150721
  hypo

SEQ ID NO: 16670 - DNA, 31 bp, Homo sapiens
  chr2:168931676-168931707
  hypo
ctccactcccagtccccgtcttcggttttat

SEQ ID NO: 16671 - DNA, 190 bp, Homo sapiens
  chr2:169073166-169073356
  hypo
acgagtttttaggcaaagaaacgttgttataagccaccttcaaaagaagacattattcgtgtgctttcaactttctaaagccaaggctaatgccaccgccacacctcttaggcatggatgatctcatgaacagcagcggactttcatctcctgagaggtcttggtcaccggctctgtgccaggcactccc

SEQ ID NO: 16672 - DNA, 334 bp, Homo sapiens; identical to SEQ ID NO: 1929
  chr2:169312536-169312870
  hypo

SEQ ID NO: 16673 - DNA, 26 bp, Homo sapiens
  chr2:169337625-169337651
  hypo
gggacagttggccaggctggccgggc

SEQ ID NO: 16674 - DNA, 42 bp, Homo sapiens
  chr2:169436466-169436508
  hypo
cccttgataatcacaacgccacttttccgcccaagaaatata

SEQ ID NO: 16675 - DNA, 31 bp, Homo sapiens
  chr2:169453320-169453351
  hypo
tgtgaaccaccatgcccggctcccatccctt

SEQ ID NO: 16676 - DNA, 979 bp, Homo sapiens; identical to SEQ ID NO: 1932
  chr2:170218502-170219481
  hypo

SEQ ID NO: 16677 - DNA, 150 bp, Homo sapiens
  chr2:170282969-170283119
  hypo
gtggagtggcccagagccaggcgggagcgtcagtaccgcgcactgttaacagcggcccgacaaacccagcaaatgcagaattggccaggggatccccgaaagaaccaatccttccccagccctctcaccgaaagccacagcaggaaaaac

SEQ ID NO: 16678 - DNA, 78 bp, Homo sapiens
  chr2:170373533-170373611
  hypo
aaataaataaaagtaagtgctgaattgcaccagttcccactaatgaatttgaagaacgtgattttggataatgttctt

SEQ ID NO: 16679 - DNA, 31 bp, Homo sapiens; identical to SEQ ID NO: 1933
  chr2:170430429-170430460
  hypo

SEQ ID NO: 16680 - DNA, 158 bp, Homo sapiens
  chr2:170551728-170551886
  hypo
tctatcagatgttccacgtaataatgctggtaagtatggaataattaagaaaatatttgaagacagaaattagtttgtgcacatacagcgctggtaggtttttggaactataccttaaaaagtgtcaagaactgggggccaggcgcggtggctcacgc

SEQ ID NO: 16681 - DNA, 38 bp, Homo sapiens
  chr2:170552125-170552163
  hypo
cgacagagcgagactccgtctcaaaaaaaaaaaaagtt

SEQ ID NO: 16682 - DNA, 30 bp, Homo sapiens
  chr2:170569216-170569246
  hypo
gcatttctatagtaacgacacctgctccag

SEQ ID NO: 16683 - DNA, 131 bp, Homo sapiens
  chr2:170569599-170569730
  hypo
gcgatgggggcaccacgtgttctcccattagccagccccacccatcatagacactacgagtcagccagggggcaggcttgccatgggttttgcgacaccccctgtccaaagcctgccgtgttgcatcccac

SEQ ID NO: 16684 - DNA, 166 bp, Homo sapiens
  chr2:170584902-170585068
  hypo
aaacacttaacaatagtagttcgcttagtttcttgccttcttgtcataaaacttatgatttggcgtactcatctttctacgccttgatggactgtcatagttttacgtttggatcaacttccaatgtgttatcctttgcattttcgatgtggtgaaatatctccaa

SEQ ID NO: 16685 - DNA, 31 bp, Homo sapiens
  chr2:170620741-170620772
  hypo
gcaaaatagttgttagcgtcctccaaagatg

SEQ ID NO: 16686 - DNA, 23 bp, Homo sapiens
  chr2:170681882-170681905
  hypo
tggagaggcagggcgcggcggct

SEQ ID NO: 16687 - DNA, 241 bp, Homo sapiens
  chr2:170682144-170682385
  hypo
tgggagacagagcgagactccgtctcaaaaaaaaaaagacagtggaaatgaaaataaaagaataggtagtggtgtcaaatactggaaagaggtcgggcttcataaagtaggagcagaaattaagttgtagcagattgtggagcgaatggaaatttaggaagaagaaagagtaaatgtgaacaattaaacgtggccccggaagcggtggctcacccctgtgatcccaacattttgggaggcc

SEQ ID NO: 16688 - DNA, 28 bp, Homo sapiens
  chr2:170716502-170716530
  hypo
aggcgtgagccaccgcacctggtcttat

SEQ ID NO: 16689 - DNA, 30 bp, Homo sapiens; identical to SEQ ID NO: 1934
  chr2:171300632-171300662
  hypo

SEQ ID NO: 16690 - DNA, 38 bp, Homo sapiens
  chr2:171624030-171624068
  hypo
cgtgagccaccgcgtccggccctcaacaaatatttttg

SEQ ID NO: 16691 - DNA, 49 bp, Homo sapiens; identical to SEQ ID NO: 1939
  chr2:171627263-171627312
  hypo

SEQ ID NO: 16692 - DNA, 550 bp, Homo sapiens; identical to SEQ ID NO: 1940
  chr2:171627346-171627896
  hypo

SEQ ID NO: 16693 - DNA, 225 bp, Homo sapiens
  chr2:171730910-171731135
  hypo
tctgtctcaaaaaaaaaaaaaaaaaaggaatactagtgcagtggcctcaaggagctgggacaatgccagaccgaaagtcagcaaggaagcaaggacttcagacctaccgctgcgaggaactggattcggccagcaacctgaatgagcttggaggcacgtctcccagcgaagcctggcaatgggagcccggcctcgggagcatgcgcatctaggcagtgagtccag

SEQ ID NO: 16694 - DNA, 541 bp, Homo sapiens
  chr2:171822422-171822963
  hypo
gagagctgctgtcttccctcccgcccaccagcaacgcaccctccgaccctgccacaactactgcaaaggcagacgctgcctcctcactcactgtggatgtgacgccccccactgccaaggcccccaccaccgttgaggacagagtcggcgactccaccccagtcagcgagaagcctgtttctgcggctgtggatgccaatgcttctgagtcaccttaactttgaaccattctttggaattggcgtggtatatttaaccacgggagcgtgtctggaaacgcaaactatcattaatttcatactagtttgtaccgtatctgtaggcatcctgtaaataattccaaggggaaaactaaacgaggacgtgggttgtatcctgccaggttgagtggggctcacacgctagggtgagatgtcagaaagcgcttgtattttaaacaaccaaaaagaattgtaagggtggcttgctgccaggcttgcactgccgttcctgggggtgtgcatcttcgggaaaggtggtggcggggcgtccactaggtttc

SEQ ID NO: 16695 - DNA, 17 bp, Homo sapiens
  chr2:171860859-171860876
  hypo
atcggaaaaaaaaaagc

SEQ ID NO: 16696 - DNA, 22 bp, Homo sapiens
  chr2:172178477-172178499
  hypo
ttttttttttttgatacgcagt

SEQ ID NO: 16697 - DNA, 5 bp, Homo sapiens
  chr2:172188911-172188916
  hypo
tcccg

SEQ ID NO: 16698 - DNA, 15 bp, Homo sapiens
  chr2:172192620-172192635
  hypo
ttttgagacaaagtt

SEQ ID NO: 16699 - DNA, 30 bp, Homo sapiens; identical to SEQ ID NO: 1944
  chr2:172378954-172378984
  hypo

SEQ ID NO: 16700 - DNA, 30 bp, Homo sapiens; identical to SEQ ID NO: 1945
  chr2:172379694-172379724
  hypo

SEQ ID NO: 16701 - DNA, 62 bp, Homo sapiens
  chr2:173422679-173422741
  hypo
gcctcccaagcctagaactaccggcaagcaccaccacgcccggctattttttattttctgta

SEQ ID NO: 16702 - DNA, 101 bp, Homo sapiens
  chr2:173423967-173424068
  hypo
cccgaccagagtcttaaggtagtagcagtattctttttttggctgggggcaggtgggggcaatgtatttgggcttgtgccctgaatcgtggactccacaac

SEQ ID NO: 16703 - DNA, 280 bp, Homo sapiens; identical to SEQ ID NO: 1968
  chr2:173940455-173940735
  hypo

SEQ ID NO: 16704 - DNA, 218 bp, Homo sapiens; identical to SEQ ID NO: 1972
  chr2:174349950-174350168
  hypo

SEQ ID NO: 16705 - DNA, 30 bp, Homo sapiens
  chr2:174848652-174848682
  hypo
gcaaaacattcgttacgcgaaatcgcaccc

SEQ ID NO: 16706 - DNA, 85 bp, Homo sapiens
  chr2:174890779-174890864
  hypo
ggaggccgctcttccggggtcaccaacacggctcgttctgagcctagaggcccagggcacagtgtgagccggaatacggtgtagg

SEQ ID NO: 16707 - DNA, 30 bp, Homo sapiens
  chr2:174970629-174970659
  hypo
atattttccgtaaacggcaacaattaagct

SEQ ID NO: 16708 - DNA, 30 bp, Homo sapiens
  chr2:175110638-175110668
  hypo
tgaacacttaagttgcgtgtgtatagagtt

SEQ ID NO: 16709 - DNA, 519 bp, Homo sapiens; identical to SEQ ID NO: 1981
  chr2:175199921-175200440
  hypo

SEQ ID NO: 16710 - DNA, 143 bp, Homo sapiens; identical to SEQ ID NO: 1982
  chr2:175200709-175200852
  hypo

SEQ ID NO: 16711 - DNA, 266 bp, Homo sapiens; identical to SEQ ID NO: 1983
  chr2:175200916-175201182
  hypo

SEQ ID NO: 16712 - DNA, 182 bp, Homo sapiens; identical to SEQ ID NO: 1984
  chr2:175201359-175201541
  hypo

SEQ ID NO: 16713 - DNA, 53 bp, Homo sapiens; identical to SEQ ID NO: 1985
  chr2:175201775-175201828
  hypo

SEQ ID NO: 16714 - DNA, 23 bp, Homo sapiens
  chr2:175218487-175218510
  hypo
ccggctcaattaagagctttaaa

SEQ ID NO: 16715 - DNA, 13 bp, Homo sapiens
  chr2:175255417-175255430
  hypo
gtatcgtgggagg

SEQ ID NO: 16716 - DNA, 36 bp, Homo sapiens
  chr2:175384179-175384215
  hypo
caagaacgagacttcgtcttaaaaaaaaaaaaagat

SEQ ID NO: 16717 - DNA, 30 bp, Homo sapiens
  chr2:175436394-175436424
  hypo
ttgtcatacctgatcggcctggcgggtccc

SEQ ID NO: 16718 - DNA, 30 bp, Homo sapiens
  chr2:175661546-175661576
  hypo
aaacagacttacaccggctctgtgtgatgt

SEQ ID NO: 16719 - DNA, 31 bp, Homo sapiens
  chr2:175855047-175855078
  hypo
ggggggtgcgggggggcgggcaagatggaga

SEQ ID NO: 16720 - DNA, 237 bp, Homo sapiens
  chr2:175927665-175927902
  hypo
gctgcactctcctgctcgctctgccttcagggtcaccagcttaactctttccctctgggtgtaagcaagccgagctgtgtcctggctccctcttgccagtctgcaagacagacatctctggctttctctctctttctctgggcacgagcgcctgaacagtgtcagcagggcaattataccttttacagacaatagtagcgtaaagcccagtgatgaccttcccgtgttatgtacata

SEQ ID NO: 16721 - DNA, 18 bp, Homo sapiens
  chr2:176026497-176026515
  hypo
tttttttttgagacaccg

SEQ ID NO: 16722 - DNA, 33 bp, Homo sapiens
  chr2:176569573-176569606
  hypo
ctgttcctattcggccatcttggctcctctccc

SEQ ID NO: 16723 - DNA, 390 bp, Homo sapiens; identical to SEQ ID NO: 2003
  chr2:176944456-176944846
  hypo

SEQ ID NO: 16724 - DNA, 131 bp, Homo sapiens; identical to SEQ ID NO: 2004
  chr2:176945137-176945268
  hypo

SEQ ID NO: 16725 - DNA, 52 bp, Homo sapiens; identical to SEQ ID NO: 2009
  chr2:176957576-176957628
  hypo

SEQ ID NO: 16726 - DNA, 433 bp, Homo sapiens; identical to SEQ ID NO: 2010
  chr2:176957914-176958347
  hypo

SEQ ID NO: 16727 - DNA, 65 bp, Homo sapiens
  chr2:177013794-177013859
  hypo
gaaatgcaggtcacagcgtctaacaaatatgaaaatgtgtatattcaccccggtctccagccggc

SEQ ID NO: 16728 - DNA, 276 bp, Homo sapiens; identical to SEQ ID NO: 2039
  chr2:177042526-177042802
  hypo

SEQ ID NO: 16729 - DNA, 297 bp, Homo sapiens; identical to SEQ ID NO: 2041
  chr2:177043266-177043563
  hypo

SEQ ID NO: 16730 - DNA, 498 bp, Homo sapiens; identical to SEQ ID NO: 2042
  chr2:177052936-177053434
  hypo

SEQ ID NO: 16731 - DNA, 84 bp, Homo sapiens; identical to SEQ ID NO: 2043
  chr2:177053618-177053702
  hypo

SEQ ID NO: 16732 - DNA, 91 bp, Homo sapiens
  chr2:177178832-177178923
  hypo
tgtagagtctgttcccttactcgtgtcagaaaccatcatatttaaagggctgggtgcggtggtgactcacgcctctaatcccagcactttg

SEQ ID NO: 16733 - DNA, 986 bp, Homo sapiens; identical to SEQ ID NO: 2046
  chr2:177502149-177503135
  hypo

SEQ ID NO: 16734 - DNA, 30 bp, Homo sapiens
  chr2:178133682-178133712
  hypo
ctccatctcgaaaaataaataagtaaataa

SEQ ID NO: 16735 - DNA, 30 bp, Homo sapiens; identical to SEQ ID NO: 2047
  chr2:178257327-178257357
  hypo

SEQ ID NO: 16736 - DNA, 88 bp, Homo sapiens; identical to SEQ ID NO: 2048
  chr2:178257947-178258035
  hypo

SEQ ID NO: 16737 - DNA, 112 bp, Homo sapiens
  chr2:178973050-178973162
  hypo
ccctgggctgcaagcgcagccggacgcgcgcgaccagtgatcgccagccaatggcaagccgggacccggtcccactgctgattggcccccagatcccgtgggatctcacctc

SEQ ID NO: 16738 - DNA, 31 bp, Homo sapiens
  chr2:179012822-179012853
  hypo
gacttaaagctgggagcgatggctcacgcct

SEQ ID NO: 16739 - DNA, 31 bp, Homo sapiens
  chr2:179058447-179058478
  hypo
taatctgcacaccgaacgcaggccgggagtg

SEQ ID NO: 16740 - DNA, 33 bp, Homo sapiens
  chr2:179303694-179303727
  hypo
ccactgtgcctggccaaacgctggtaggttttg

SEQ ID NO: 16741 - DNA, 31 bp, Homo sapiens; identical to SEQ ID NO: 2054
  chr2:179316144-179316175
  hypo

SEQ ID NO: 16742 - DNA, 31 bp, Homo sapiens
  chr2:180027743-180027774
  hypo
aataattgttgtctaacgagattgatatatt

SEQ ID NO: 16743 - DNA, 86 bp, Homo sapiens; identical to SEQ ID NO: 2056
  chr2:180129610-180129696
  hypo

SEQ ID NO: 16744 - DNA, 202 bp, Homo sapiens
  chr2:180886650-180886852
  hypo
cctctctcaccctggatattacgaacaacctcgcggggggtggtggtccataatatccgggtggggggagaggctgatatcactccccacatcgcgagggaggggatgtacaccgcccgccgccacgcgaggtggttcgtaatatccagtgggggagagggtgatatcacacccacatcgcggggggtgggagggcatgtac

SEQ ID NO: 16745 - DNA, 30 bp, Homo sapiens; identical to SEQ ID NO: 2058
  chr2:181179266-181179296
  hypo

SEQ ID NO: 16746 - DNA, 31 bp, Homo sapiens; identical to SEQ ID NO: 2061
  chr2:181846233-181846264
  hypo

SEQ ID NO: 16747 - DNA, 441 bp, Homo sapiens; identical to SEQ ID NO: 2062
  chr2:182321396-182321837
  hypo

SEQ ID NO: 16748 - DNA, 153 bp, Homo sapiens; identical to SEQ ID NO: 2063
  chr2:182322038-182322191
  hypo

SEQ ID NO: 16749 - DNA, 650 bp, Homo sapiens; identical to SEQ ID NO: 2064
  chr2:182322399-182323049
  hypo

SEQ ID NO: 16750 - DNA, 31 bp, Homo sapiens; identical to SEQ ID NO: 2069
  chr2:182756672-182756703
  hypo

SEQ ID NO: 16751 - DNA, 31 bp, Homo sapiens
  chr2:183587686-183587717
  hypo
gtttttcatatattatcgttaaaaatttatt

SEQ ID NO: 16752 - DNA, 26 bp, Homo sapiens
  chr2:183865807-183865833
  hypo
gagacgctgtctcaaagaaagaaaaa

SEQ ID NO: 16753 - DNA, 60 bp, Homo sapiens; identical to SEQ ID NO: 2073
  chr2:183902341-183902401
  hypo

SEQ ID NO: 16754 - DNA, 567 bp, Homo sapiens; identical to SEQ ID NO: 2074
  chr2:183902442-183903009
  hypo

SEQ ID NO: 16755 - DNA, 389 bp, Homo sapiens; identical to SEQ ID NO: 2075
  chr2:183903037-183903426
  hypo

SEQ ID NO: 16756 - DNA, 30 bp, Homo sapiens; identical to SEQ ID NO: 2077
  chr2:184857322-184857352
  hypo

SEQ ID NO: 16757 - DNA, 1103 bp, Homo sapiens; identical to SEQ ID NO: 2078
  chr2:185462721-185463824
  hypo

SEQ ID NO: 16758 - DNA, 285 bp, Homo sapiens; identical to SEQ ID NO: 2079
  chr2:187454989-187455274
  hypo

SEQ ID NO: 16759 - DNA, 30 bp, Homo sapiens
  chr2:190409988-190410018
  hypo
agccgtgagctaccgcgactggccatgaat

SEQ ID NO: 16760 - DNA, 30 bp, Homo sapiens
  chr2:190703412-190703442
  hypo
ccagtaattctcagccgcagtatattaata

SEQ ID NO: 16761 - DNA, 98 bp, Homo sapiens
  chr2:190703659-190703757
  hypo
gttttgcatgtctttcgtaaaagctgagagtctctgagttggaggaatacaatcacttttttttttctttttttgagacagagtctctctctctgttg

SEQ ID NO: 16762 - DNA, 30 bp, Homo sapiens
  chr2:190704167-190704197
  hypo
ataaacccctttgcacgatgtgccaggtca

SEQ ID NO: 16763 - DNA, 194 bp, Homo sapiens; identical to SEQ ID NO: 2088
  chr2:191044999-191045193
  hypo

SEQ ID NO: 16764 - DNA, 642 bp, Homo sapiens; identical to SEQ ID NO: 2089
  chr2:191045258-191045900
  hypo

SEQ ID NO: 16765 - DNA, 26 bp, Homo sapiens
  chr2:191374476-191374502
  hypo
attttccagctgggtgcggtggctca

SEQ ID NO: 16766 - DNA, 40 bp, Homo sapiens; identical to SEQ ID NO: 2093
  chr2:191513081-191513121
  hypo

SEQ ID NO: 16767 - DNA, 30 bp, Homo sapiens; identical to SEQ ID NO: 2095
  chr2:191728884-191728914
  hypo

SEQ ID NO: 16768 - DNA, 17 bp, Homo sapiens
  chr2:191793066-191793083
  hypo
ttttttttttttgagac

SEQ ID NO: 16769 - DNA, 121 bp, Homo sapiens
  chr2:191794488-191794609
  hypo
cccggccttataactttatttataaacatgttgataaaaatttatctacaatatttttaatgttgaaattctatggtatgtatatatatatattttttttttcgagagggagtctcactct

SEQ ID NO: 16770 - DNA, 30 bp, Homo sapiens; identical to SEQ ID NO: 2101
  chr2:192109716-192109746
  hypo

SEQ ID NO: 16771 - DNA, 175 bp, Homo sapiens; identical to SEQ ID NO: 2102
  chr2:192110380-192110555
  hypo

SEQ ID NO: 16772 - DNA, 31 bp, Homo sapiens
  chr2:192342591-192342622
  hypo
caactagccttccccacgtgctatgtaaaca

SEQ ID NO: 16773 - DNA, 30 bp, Homo sapiens
  chr2:192746670-192746700
  hypo
agcattggcaccaccgccgctaccgccact

SEQ ID NO: 16774 - DNA, 343 bp, Homo sapiens; identical to SEQ ID NO: 2103
  chr2:193058974-193059317
  hypo

SEQ ID NO: 16775 - DNA, 204 bp, Homo sapiens; identical to SEQ ID NO: 2104
  chr2:193059344-193059548
  hypo

SEQ ID NO: 16776 - DNA, 1231 bp, Homo sapiens; identical to SEQ ID NO: 2105
  chr2:193059661-193060892
  hypo

SEQ ID NO: 16777 - DNA, 31 bp, Homo sapiens
  chr2:194333178-194333209
  hypo
ttcctggaagttctagcgagggcaagaaaaa

SEQ ID NO: 16778 - DNA, 45 bp, Homo sapiens
  chr2:196402552-196402597
  hypo
gaggagaaaggatcgcgtgggcccgggaggttgaggctgcagtga

SEQ ID NO: 16779 - DNA, 321 bp, Homo sapiens; identical to SEQ ID NO: 2106
  chr2:197035641-197035962
  hypo

SEQ ID NO: 16780 - DNA, 30 bp, Homo sapiens
  chr2:197094969-197094999
  hypo
cgaaggcagcctttgcggcttcctcccgct

SEQ ID NO: 16781 - DNA, 30 bp, Homo sapiens
  chr2:197095365-197095395
  hypo
gacacttttctccggcgatgcaggttaaac

SEQ ID NO: 16782 - DNA, 1258 bp, Homo sapiens; identical to SEQ ID NO: 2107
  chr2:197457191-197458449
  hypo

SEQ ID NO: 16783 - DNA, 30 bp, Homo sapiens; identical to SEQ ID NO: 2109
  chr2:198257066-198257096
  hypo

SEQ ID NO: 16784 - DNA, 122 bp, Homo sapiens; identical to SEQ ID NO: 2110
  chr2:198257785-198257907
  hypo

SEQ ID NO: 16785 - DNA, 30 bp, Homo sapiens; identical to SEQ ID NO: 2111
  chr2:198260933-198260963
  hypo

SEQ ID NO: 16786 - DNA, 107 bp, Homo sapiens; identical to SEQ ID NO: 2112
  chr2:198262739-198262846
  hypo

SEQ ID NO: 16787 - DNA, 149 bp, Homo sapiens; identical to SEQ ID NO: 2113
  chr2:198265014-198265163
  hypo

SEQ ID NO: 16788 - DNA, 179 bp, Homo sapiens; identical to SEQ ID NO: 2114
  chr2:198265428-198265607
  hypo

SEQ ID NO: 16789 - DNA, 30 bp, Homo sapiens; identical to SEQ ID NO: 2115
  chr2:198266164-198266194
  hypo

SEQ ID NO: 16790 - DNA, 371 bp, Homo sapiens; identical to SEQ ID NO: 2116
  chr2:198266478-198266849
  hypo

SEQ ID NO: 16791 - DNA, 433 bp, Homo sapiens; identical to SEQ ID NO: 2117
  chr2:198267317-198267750
  hypo

SEQ ID NO: 16792 - DNA, 71 bp, Homo sapiens; identical to SEQ ID NO: 2118
  chr2:198268365-198268436
  hypo

SEQ ID NO: 16793 - DNA, 94 bp, Homo sapiens; identical to SEQ ID NO: 2119
  chr2:198269811-198269905
  hypo

SEQ ID NO: 16794 - DNA, 30 bp, Homo sapiens; identical to SEQ ID NO: 2120
  chr2:198270121-198270151
  hypo

SEQ ID NO: 16795 - DNA, 82 bp, Homo sapiens; identical to SEQ ID NO: 2121
  chr2:198272717-198272799
  hypo

SEQ ID NO: 16796 - DNA, 148 bp, Homo sapiens; identical to SEQ ID NO: 2122
  chr2:198273116-198273264
  hypo

SEQ ID NO: 16797 - DNA, 30 bp, Homo sapiens; identical to SEQ ID NO: 2123
  chr2:198274673-198274703
  hypo

SEQ ID NO: 16798 - DNA, 105 bp, Homo sapiens
  chr2:198276037-198276142
  hypo
tacttatatactgcctcgtaagtattccacaggatgtgtaatgtactttatatatttgttttaaagttgggagctcttggccgggtgcggtggctcacacccgta

SEQ ID NO: 16799 - DNA, 30 bp, Homo sapiens; identical to SEQ ID NO: 2124
  chr2:198285175-198285205
  hypo

SEQ ID NO: 16800 - DNA, 38 bp, Homo sapiens
  chr2:198317067-198317105
  hypo
ttacaggcgtgagccaccgcgcccggcccattttctcc

SEQ ID NO: 16801 - DNA, 121 bp, Homo sapiens
  chr2:198456556-198456677
  hypo
ctgagtgtgggcccaccgagcccacgcccatctggaactcgccctggcttgcaagcactgtgcgcagaactggttcctgccccgtgcctctccctccacgcctctccctccacccctccct

SEQ ID NO: 16802 - DNA, 501 bp, Homo sapiens; identical to SEQ ID NO: 2125
  chr2:200320868-200321369
  hypo

SEQ ID NO: 16803 - DNA, 30 bp, Homo sapiens; identical to SEQ ID NO: 2126
  chr2:200322551-200322581
  hypo

SEQ ID NO: 16804 - DNA, 30 bp, Homo sapiens
  chr2:200959336-200959366
  hypo
tatataattcctatcgacatggaaaggggt

SEQ ID NO: 16805 - DNA, 93 bp, Homo sapiens; identical to SEQ ID NO: 2139
  chr2:201171225-201171318
  hypo

SEQ ID NO: 16806 - DNA, 688 bp, Homo sapiens; identical to SEQ ID NO: 2140
  chr2:201171650-201172338
  hypo

SEQ ID NO: 16807 - DNA, 31 bp, Homo sapiens; identical to SEQ ID NO: 2141
  chr2:201172568-201172599
  hypo

SEQ ID NO: 16808 - DNA, 30 bp, Homo sapiens
  chr2:201218933-201218963
  hypo
gtgttgatgttcctcgctctcatacaatga

SEQ ID NO: 16809 - DNA, 21 bp, Homo sapiens
  chr2:201330741-201330762
  hypo
gagactctgtctcaaaacaaa

SEQ ID NO: 16810 - DNA, 30 bp, Homo sapiens
  chr2:201354965-201354995
  hypo
tcagctttatcacccgctggggtgtaggct

SEQ ID NO: 16811 - DNA, 21 bp, Homo sapiens
  chr2:201389474-201389495
  hypo
ccaccgcgcccggctagcact

SEQ ID NO: 16812 - DNA, 31 bp, Homo sapiens
  chr2:201502745-201502776
  hypo
ttattccctgacctaacgggaggaaagccca

SEQ ID NO: 16813 - DNA, 135 bp, Homo sapiens
  chr2:201652445-201652580
  hypo
tgaccaatggctagtttctaacggccttcaccttcttcctacgccgcaaaccctaatacagtctccatccacggactcccctcctttacagcactgcgtctctcacatccccacgtctcattttccctccctgct

SEQ ID NO: 16814 - DNA, 31 bp, Homo sapiens
  chr2:201691288-201691319
  hypo
gcccaccaaccaagcccggctaaggtatttt

SEQ ID NO: 16815 - DNA, 31 bp, Homo sapiens
  chr2:201712541-201712572
  hypo
ttacagcaatctcattcgcagagttttacaa

SEQ ID NO: 16816 - DNA, 30 bp, Homo sapiens
  chr2:202004751-202004781
  hypo
ctgccgcgagaccccgcgacccgacataaa

SEQ ID NO: 16817 - DNA, 30 bp, Homo sapiens
  chr2:202848776-202848806
  hypo
tggtaattctttgccgttaaagttgtcact

SEQ ID NO: 16818 - DNA, 1043 bp, Homo sapiens; identical to SEQ ID NO: 2149
  chr2:202898960-202900003
  hypo

SEQ ID NO: 16819 - DNA, 35 bp, Homo sapiens
  chr2:203250364-203250399
  hypo
gcgtgagccaccacgcctggcaaaaaaaaaaaaaa

SEQ ID NO: 16820 - DNA, 163 bp, Homo sapiens
  chr2:203431924-203432087
  hypo
ctgaaacatggagatgcgtagctgtcatgctttttctgaatggacaggagaaacataagctacggagtattcacttctgaggatgcttttccggaaaaagaaaggctagaaaatactcgcacttcctcagaaccctctttcttgttaacgggtatcttttgtt

SEQ ID NO: 16821 - DNA, 149 bp, Homo sapiens
  chr2:203484418-203484567
  hypo
gaagatgaaaacgaacgcgtgggcagtaacaataacattgtacatctgatcatctcctagtagagtttctggttggtctagtcctgcttgaattaggaagcttaaggcggtgcctattatctccgctcttgcgccgaatagcaggtata

SEQ ID NO: 16822 - DNA, 33 bp, Homo sapiens
  chr2:203498544-203498577
  hypo
aaaaaggccttccaccaccgcgcaaagggaccc

SEQ ID NO: 16823 - DNA, 16 bp, Homo sapiens
  chr2:203880464-203880480
  hypo
gcgtgagccaccgcgc

SEQ ID NO: 16824 - DNA, 82 bp, Homo sapiens; identical to SEQ ID NO: 2152
  chr2:204399881-204399963
  hypo

SEQ ID NO: 16825 - DNA, 30 bp, Homo sapiens
  chr2:205130909-205130939
  hypo
cctgtagcaccgttcgcaacccaggcatcc

SEQ ID NO: 16826 - DNA, 24 bp, Homo sapiens
  chr2:205341736-205341760
  hypo
taggaaagtaacaggccgggcgcg

SEQ ID NO: 16827 - DNA, 35 bp, Homo sapiens
  chr2:205984486-205984521
  hypo
cagggagaaactccgtcttcaaaataaataaataa

SEQ ID NO: 16828 - DNA, 31 bp, Homo sapiens; identical to SEQ ID NO: 2155
  chr2:206166172-206166203
  hypo

SEQ ID NO: 16829 - DNA, 31 bp, Homo sapiens
  chr2:206166507-206166538
  hypo
agcgcacgcttttcctcgtcttcagccaaat

SEQ ID NO: 16830 - DNA, 31 bp, Homo sapiens
  chr2:206605354-206605385
  hypo
tccggctggagctcttcggctgccgggtcac

SEQ ID NO: 16831 - DNA, 125 bp, Homo sapiens
  chr2:206826988-206827113
  hypo
agtctctctgactgcacgacctggttgcagtggtccctgtacctatcacgatggtgctgaatatagtcttccttaccatgccttaccaagtgtcattgaataatatttttctgtttttgagacag

SEQ ID NO: 16832 - DNA, 147 bp, Homo sapiens
  chr2:206830586-206830733
  hypo
cttgctctccagagagaaccccggggccttgcaagtctcggcagatttccctgaccttgcgtgccaaggcagaaggtgagatggcaaacagatgcgcgcttccactgagagcgtgcatgtgtgtgcgtgtatgtgagtgcgtgcatg

SEQ ID NO: 16833 - DNA, 27 bp, Homo sapiens
  chr2:206830792-206830819
  hypo
gtgaccgctgctgtggtgggggaactg

SEQ ID NO: 16834 - DNA, 28 bp, Homo sapiens
  chr2:206889972-206890000
  hypo
cacgcatggtagctcacgcctgtaatcc

SEQ ID NO: 16835 - DNA, 149 bp, Homo sapiens
  chr2:206890497-206890646
  hypo
tgaggctgtagtgacccgtgattacgccactgaattccagcctgggcgacagactgagaccttgtctgaacgacaacaaaaagaatcagaatttgaactctatttccttaaagtaagataatgttttgaaatttttttttttggaaggc

SEQ ID NO: 16836 - DNA, 44 bp, Homo sapiens
  chr2:207021943-207021987
  hypo
ggattacagacgtgagtcaccgcgcctggcagacaaccaatttt

SEQ ID NO: 16837 - DNA, 30 bp, Homo sapiens; identical to SEQ ID NO: 2159
  chr2:207139333-207139363
  hypo

SEQ ID NO: 16838 - DNA, 126 bp, Homo sapiens; identical to SEQ ID NO: 2160
  chr2:207307547-207307673
  hypo

SEQ ID NO: 16839 - DNA, 1517 bp, Homo sapiens; identical to SEQ ID NO: 2161
  chr2:207307712-207309229
  hypo

SEQ ID NO: 16840 - DNA, 30 bp, Homo sapiens
  chr2:207395272-207395302
  hypo
gagcttgcagtgagccgagatcgcactact

SEQ ID NO: 16841 - DNA, 30 bp, Homo sapiens
  chr2:208331964-208331994
  hypo
tggaattagccaggcgtggtggtaggcact

SEQ ID NO: 16842 - DNA, 31 bp, Homo sapiens; identical to SEQ ID NO: 2164
  chr2:208395299-208395330
  hypo

SEQ ID NO: 16843 - DNA, 48 bp, Homo sapiens
  chr2:208410313-208410361
  hypo
ctgaaaatgctgtagtcgttactacgtagtaggcgcagaatatttgtt

SEQ ID NO: 16844 - DNA, 241 bp, Homo sapiens
  chr2:208574935-208575176
  hypo
tcccattttgcaggttttatagaagaaattgggacgcagaagttaagttacttccgcaagcttacatgactgctcagggtgagggtccctgatcatgatgatcagaaaataaaggtagaaatcaagcttagggaggaagtgacattgtgtgtatatatatatatttgtttatttatttttatttttatgttttatttttttgaaacggagcctaggtcgcccaggctggagtgcaatggcg

SEQ ID NO: 16845 - DNA, 156 bp, Homo sapiens
  chr2:208580709-208580865
  hypo
aagagatgctcctaagaacctagtaaacatttcagatagactcaaagtattttctactaccttgcctttatttaacggtatgtctaacataactgacggtagtatcagtaacacaaaataagatactaagatcttattgtccgattttattagtac

SEQ ID NO: 16846 - DNA, 24 bp, Homo sapiens
  chr2:208588311-208588335
  hypo
ttgctgggctgggcgcggtgactc

SEQ ID NO: 16847 - DNA, 30 bp, Homo sapiens
  chr2:208613160-208613190
  hypo
ttccaggctggcctcgtgtcggccgtgaag

SEQ ID NO: 16848 - DNA, 95 bp, Homo sapiens
  chr2:208622062-208622157
  hypo
agcctgagcgacagcatgagactgtgtctcaaaaaaacaaaaactaactgatcactgtgtcttgataagttgccgactaggataaaagatctaac

SEQ ID NO: 16849 - DNA, 31 bp, Homo sapiens
  chr2:208623136-208623167
  hypo
cctttctccctaactacgtttaagatagcta

SEQ ID NO: 16850 - DNA, 30 bp, Homo sapiens
  chr2:208688759-208688789
  hypo
actggattcgacctcgagcagacagctcta

SEQ ID NO: 16851 - DNA, 30 bp, Homo sapiens
  chr2:208692451-208692481
  hypo
atcggctctgcttacgtgattccccgcctc

SEQ ID NO: 16852 - DNA, 30 bp, Homo sapiens
  chr2:208798586-208798616
  hypo
acaaatccccaccacgttcagccatttttg

SEQ ID NO: 16853 - DNA, 31 bp, Homo sapiens
  chr2:208969265-208969296
  hypo
acagatctccagcccacgcctctttcttgag

SEQ ID NO: 16854 - DNA, 30 bp, Homo sapiens
  chr2:208975111-208975141
  hypo
gcctaaaaaaagatcgttaaggaggcctgt

SEQ ID NO: 16855 - DNA, 30 bp, Homo sapiens
  chr2:208994705-208994735
  hypo
ctggtatattctaacgctgtcctgtacata

SEQ ID NO: 16856 - DNA, 20 bp, Homo sapiens
  chr2:209038329-209038349
  hypo
gagagcgagactccatctca

SEQ ID NO: 16857 - DNA, 30 bp, Homo sapiens; identical to SEQ ID NO: 2168
  chr2:209101844-209101874
  hypo

SEQ ID NO: 16858 - DNA, 30 bp, Homo sapiens; identical to SEQ ID NO: 2169
  chr2:209103912-209103942
  hypo

SEQ ID NO: 16859 - DNA, 30 bp, Homo sapiens; identical to SEQ ID NO: 2170
  chr2:209104621-209104651
  hypo

SEQ ID NO: 16860 - DNA, 79 bp, Homo sapiens; identical to SEQ ID NO: 2171
  chr2:209108239-209108318
  hypo

SEQ ID NO: 16861 - DNA, 309 bp, Homo sapiens; identical to SEQ ID NO: 2172
  chr2:209113080-209113389
  hypo

SEQ ID NO: 16862 - DNA, 139 bp, Homo sapiens; identical to SEQ ID NO: 2173
  chr2:209118760-209118899
  hypo

SEQ ID NO: 16863 - DNA, 31 bp, Homo sapiens
  chr2:209137007-209137038
  hypo
taatagagaaagtagtcgtctttttttgtta

SEQ ID NO: 16864 - DNA, 732 bp, Homo sapiens
  chr2:209224957-209225689
  hypo
aacaggtaagaagagcgccccacttgttctcccgccttctgcgtgagcagcccctacggggtctcctactggtccctaggaactttcgccacacccggagcggcggcctccccgagcccctcggggccccttccctggcagctgggatgagggcagcgtgctcctcgcaggttacttggtcctgaggtcctccctcaggcgctgggcatgcctggggcgcagaaccgcagctctgggccagacccggctgagactgtgcttgtgcggcgagtggaggccgctcccggggccctgccgccctctcgctcgctcggggctctggagtctggcgggccgcaagccgcgctgccggctctacctggctttgtccatccagccacccaccaagcgccagggtaaaacagcacccggaagcagtcgtcgcctgctgccaccaggctgccttctgtggtgaaggtgggggccagggttgcaaggccctcctcttgttggcatcagccaggcacgcagtgctgtcgtggctgacccaggccgtgaggcacccgctgactgagaagccaacctgagcacccagccgcacctaccgctggcctcagacatcagcaccccaaagggtatgttggagtcccatggtggaggtgccggccgctcctccacgcacttgatgtataccgaggatcccatgcttgacgtcgcagggggcattagccaggagcacgttgctgggatgcc

SEQ ID NO: 16865 - DNA, 30 bp, Homo sapiens; identical to SEQ ID NO: 2174
  chr2:210051601-210051631
  hypo

SEQ ID NO: 16866 - DNA, 30 bp, Homo sapiens
  chr2:210673259-210673289
  hypo
aaaaaaaagtaaggcgggcccaggctgcta

SEQ ID NO: 16867 - DNA, 30 bp, Homo sapiens; identical to SEQ ID NO: 2182
  chr2:212452337-212452367
  hypo

SEQ ID NO: 16868 - DNA, 38 bp, Homo sapiens
  chr2:216196376-216196414
  hypo
tcatgggggtgagccattgtacccggctcatttttgtt

SEQ ID NO: 16869 - DNA, 19 bp, Homo sapiens
  chr2:216808583-216808602
  hypo
agagcgaaaggcttttgga

SEQ ID NO: 16870 - DNA, 31 bp, Homo sapiens
  chr2:216852246-216852277
  hypo
cgttagccaccatacccggcaacataagcaa

SEQ ID NO: 16871 - DNA, 132 bp, Homo sapiens
  chr2:216885425-216885557
  hypo
tggtaataacagctagcgatgcactgtttcaagcatggtgtgtgtatccaaggaggaccgccatctagaatggacagaaaggaccccacaaggaatagtcctgttgggccaaagccccgcaaaacacactac

SEQ ID NO: 16872 - DNA, 25 bp, Homo sapiens
  chr2:216949850-216949875
  hypo
gacaggtgcgcgctgccacgcctga

SEQ ID NO: 16873 - DNA, 42 bp, Homo sapiens; identical to SEQ ID NO: 2185
  chr2:217008384-217008426
  hypo

SEQ ID NO: 16874 - DNA, 30 bp, Homo sapiens; identical to SEQ ID NO: 2186
  chr2:217236025-217236055
  hypo

SEQ ID NO: 16875 - DNA, 57 bp, Homo sapiens
  chr2:217472020-217472077
  hypo
tagtgagatggattggcacagcgctacgccaggtgcgtgtggcctgtgctgctgggg

SEQ ID NO: 16876 - DNA, 17 bp, Homo sapiens
  chr2:217488116-217488133
  hypo
accgcgcccggccggaa

SEQ ID NO: 16877 - DNA, 31 bp, Homo sapiens
  chr2:217528923-217528954
  hypo
ttccagttctgacacacgtatttatatttgg

SEQ ID NO: 16878 - DNA, 581 bp, Homo sapiens; identical to SEQ ID NO: 2191
  chr2:217558851-217559432
  hypo

SEQ ID NO: 16879 - DNA, 222 bp, Homo sapiens
  chr2:217674465-217674687
  hypo
tgaacagctatgtgccagggacggcactgtgcgcatgtaacacatctcaaccaatctgctcaacgaccagcaggcatcgtacgaccccgtgttgcagacgaagaaactgaggcgcaaggaggttcctcggcttgtatgcctgggtgtcatgtatgagccaggccgtctaggtgagtatggcaggcagctccctgtgcccccgtcacacagagggtgtgtgtg

SEQ ID NO: 16880 - DNA, 202 bp, Homo sapiens
  chr2:217690997-217691199
  hypo
catgtcccgtcactccgccttcaaatctcacctccttcctgccatcagctcgcacctgtgctgtgcacctgcctcacaagggctctccttgagcccactctcaccgctctccatctgttcctcactcagtcgtcagggtgagctctttatcctttccttcattcaaaatctcccaatggcttctcgtcgcattgggaataaa

SEQ ID NO: 16881 - DNA, 30 bp, Homo sapiens
  chr2:217724851-217724881
  hypo
gctcagcaggtgggcggggctctactgtgc

SEQ ID NO: 16882 - DNA, 47 bp, Homo sapiens
  chr2:218676419-218676466
  hypo
aggtgcccacctgccacgctccagggctgatgcgcctccatgagaga

SEQ ID NO: 16883 - DNA, 31 bp, Homo sapiens
  chr2:218678425-218678456
  hypo
tgatggttggaggtggcgaagacaccttcat

SEQ ID NO: 16884 - DNA, 862 bp, Homo sapiens
  chr2:218682481-218683343
  hypo
tggacatgccgctggcgacaggcgaagacaccttcccattgatggtggcatagttggggaggctgcctgcccggtctcccactgacatccttcgcttctctggcaaggctggtgttgggctcccttgccggaaggctgcggagtctggtgacggggaggtggcagggctgctcaggccagggtagtaggcaggggagacagggaaggagggcgtggaaggagcctggtagccagaggcactgctctgccgggacagtgtgggtctccgatcctccggggtagaatagccaccataggccacatgccggtccaagcaggggctgccgggaaccacagatccagaccctccgaggtgacggcccaggctggggcttccagggctggctattgcattgctatgaagaccggaggccaggttgccttggtgagccccagggtgccggcccaggctgggactccccggggtggtggccactttgttgtggaggccagaaacctggtagacccctgctgggtgccgacacaggctggggctccccggggtggtcgctgcactgctctgggggctggagacagtgctaccatggaagccagtgcctggtggacccatcatctggtgatggctcaaactgggactgctgggggcagccatgctgggattgatggcccgccagccgaagccaggactagggggagtgttggtgcccactgttctgtggcgcgcctgagggctcccaggcaccgtgtggacgccagccacactgaactgagctcgagcctggctttccggagaggagctgaaatgctgaagtgagtagtcggggctgctgtagctactgcccacagtcgggagaggagaaga

SEQ ID NO: 16885 - DNA, 155 bp, Homo sapiens
  chr2:218686228-218686383
  hypo
gggcggaattgaatgcggcctgggaattataggtcactgggctccccacaggattcagcgcgcaggacatgtgccctcaatgcaccttgatgaactggtttgcaaggtaccgccatctgggtatgctttctgcctgtccacgccataggcaacag

SEQ ID NO: 16886 - DNA, 30 bp, Homo sapiens
  chr2:218686608-218686638
  hypo
tcggggtccagccaccgctgtccgtgccac

SEQ ID NO: 16887 - DNA, 31 bp, Homo sapiens
  chr2:218698051-218698082
  hypo
gcagatgagtgggcgacgctaaagccaggca

SEQ ID NO: 16888 - DNA, 50 bp, Homo sapiens
  chr2:218700731-218700781
  hypo
actcacctctttgggccgccctccaggattgagagcgatggtaagagcca

SEQ ID NO: 16889 - DNA, 30 bp, Homo sapiens
  chr2:218704292-218704322
  hypo
actcacacgcacactcgcacaccctgcaat

SEQ ID NO: 16890 - DNA, 30 bp, Homo sapiens
  chr2:218704571-218704601
  hypo
agaagcgaggggatccgggaggccacctgc

SEQ ID NO: 16891 - DNA, 812 bp, Homo sapiens
  chr2:218712945-218713757
  hypo
cggctgcttccccctcggaccggagctgggggcagctggggttcagcttccgaaaaggattgagagcggaacataccgctggggtcatgggcatagtgggaggtggtcactggctgtggccaggctgggtggggcccctccctctggtagccagctaaaccctcctgtgcagagtaggagggccgcatgggggccgtgtggccagcatgggcaggccccgcccggctggcagactcgtaggggtagcctcctccattgaccataggctccatggggtaggacttgtccagaccgttggtcagtggggacagggcctctgggtagcccccctcactggtgttggtgaccccgtccagagaagagagtgtgcccatgctgcccgcactgtgaccatcctggtttggcaattcatcgtccaggatgtctgtctcccgctcagatgctaacgccccaccattgacatgaacctgggctgggacaacgtggcgtccagaggagggcacagccgagccccctgctgggcgggacctgaggtgctgggtgtggtacatggcgccttgcttctctcgctctaagccaaagccactcagcaggcggtccagctcccgcttctcctggggactcaaggcagcagtggcactggaggccccggggacaggctcgtcggtcttgtcggtcttggtggaggctgtggagttgcccgagtcgctgctcacagaaagcgtgtgttccacgtggttgggggtggccgacagtgtaggacgtgtggcattaacagccccggtgctgccgtgcagggagtctttcttctt

SEQ ID NO: 16892 - DNA, 203 bp, Homo sapiens
  chr2:218757380-218757583
  hypo
caaggaaaagtggctccgaggagctggccgcatgggttgctcaggacagggcctgcctcccaaggctgccccaccagaacccctgatagagaagtggactctcctccctcccgccctctgtccacaggctcctgcctcagagccaggggccccttcccccgtcctcatcgcttctcattccctctgtgcgtatcccctcactc

SEQ ID NO: 16893 - DNA, 201 bp, Homo sapiens
  chr2:218765457-218765658
  hypo
acaaaaggaagaatcccgaatgctgaggagtgcaccccactgggctggtgccatccacactgagggcacactcaacagttactgaatcaatggaaacacacttcactttgatacactcgccaacacaagagaaaccccaggaggagaatacgactgccaccacaaaaggagcgatgagagtaatggcgcccctctgtcttg

SEQ ID NO: 16894 - DNA, 31 bp, Homo sapiens
  chr2:219209329-219209360
  hypo
aggcactcagccccaacgggaacccatccat

SEQ ID NO: 16895 - DNA, 66 bp, Homo sapiens
  chr2:219209596-219209662
  hypo
caggaggctctggggccggggccgggccccactggggatgatgactactcccgggcccagctcctg

SEQ ID NO: 16896 - DNA, 30 bp, Homo sapiens; identical to SEQ ID NO: 2193
  chr2:219232860-219232890
  hypo

SEQ ID NO: 16897 - DNA, 116 bp, Homo sapiens
  chr2:219256086-219256202
  hypo
tcgtccctgcagggcgtgatcctgggctgcctgttcggccccgcggccctctacatctgggccataggtctcctggcggctgggcagagctccaccatgacgggcacctacgcggg

SEQ ID NO: 16898 - DNA, 30 bp, Homo sapiens; identical to SEQ ID NO: 2194
  chr2:219263452-219263482
  hypo

SEQ ID NO: 16899 - DNA, 615 bp, Homo sapiens; identical to SEQ ID NO: 2195
  chr2:219263827-219264442
  hypo

SEQ ID NO: 16900 - DNA, 30 bp, Homo sapiens
  chr2:219268000-219268030
  hypo
gggcccggctgtttcgagagtcctgcgtct

SEQ ID NO: 16901 - DNA, 31 bp, Homo sapiens
  chr2:219294082-219294113
  hypo
aatgaattggcatccccgaagctgatggagg

SEQ ID NO: 16902 - DNA, 31 bp, Homo sapiens
  chr2:219509561-219509592
  hypo
cacagcctgcttgtggcggctctggtaactg

SEQ ID NO: 16903 - DNA, 45 bp, Homo sapiens
  chr2:219586060-219586105
  hypo
gggattacaggtgtgcgtcaccgcgcctggccagggaacaccaat

SEQ ID NO: 16904 - DNA, 887 bp, Homo sapiens; identical to SEQ ID NO: 2200
  chr2:219735800-219736687
  hypo

SEQ ID NO: 16905 - DNA, 749 bp, Homo sapiens; identical to SEQ ID NO: 2202
  chr2:219757350-219758099
  hypo

SEQ ID NO: 16906 - DNA, 30 bp, Homo sapiens; identical to SEQ ID NO: 2204
  chr2:219825285-219825315
  hypo

SEQ ID NO: 16907 - DNA, 1079 bp, Homo sapiens; identical to SEQ ID NO: 2206
  chr2:219845791-219846870
  hypo

SEQ ID NO: 16908 - DNA, 468 bp, Homo sapiens; identical to SEQ ID NO: 2207
  chr2:219846894-219847362
  hypo

SEQ ID NO: 16909 - DNA, 76 bp, Homo sapiens; identical to SEQ ID NO: 2210
  chr2:219857661-219857737
  hypo

SEQ ID NO: 16910 - DNA, 1056 bp, Homo sapiens; identical to SEQ ID NO: 2211
  chr2:219857780-219858836
  hypo

SEQ ID NO: 16911 - DNA, 643 bp, Homo sapiens; identical to SEQ ID NO: 2212
  chr2:219866437-219867080
  hypo

SEQ ID NO: 16912 - DNA, 31 bp, Homo sapiens
  chr2:219879556-219879587
  hypo
cacacacctgaaagtgcgcaacacacacccg

SEQ ID NO: 16913 - DNA, 178 bp, Homo sapiens
  chr2:219892663-219892841
  hypo
ccgtcgaagaagaactcggtcatgggggggatataagggtactgcggggccggcatgtcctccagatcctgcatggggaaagacaggtggatagggctcaactgccattcctcttgctgttgcccctcctgggtacactcctgtctagaaaggctacaccagtcgccctgactactaa

SEQ ID NO: 16914 - DNA, 42 bp, Homo sapiens
  chr2:220049819-220049861
  hypo
attacaggtgtgagccacggcgcccagcctcatgagggtcta

SEQ ID NO: 16915 - DNA, 333 bp, Homo sapiens
  chr2:220080602-220080935
  hypo
acaccaaggtgggagcggcagcttctcaggcggggtctgttctcttcctcccacgggcccctatccctgcttctccggctccaccctcccacatgccctttccactggggcggcacctgagcagccctgtgacactggatgtgccccgatccgcgatccgcagcacctcccctgtgcggcgccccaggtgccagcgcagtgagagctcgtgcaggtgggagaagatgagcagctccacccgccgagacgtgaactgctgcacccggatccacaggaaggtgcgcaggttgctcacgaagcctgcagggagccgggggacgcctcagtagggcc

SEQ ID NO: 16916 - DNA, 31 bp, Homo sapiens
  chr2:220149375-220149406
  hypo
gggcttggagctgagccgtcgcgagcagcag

SEQ ID NO: 16917 - DNA, 313 bp, Homo sapiens
  chr2:220150655-220150968
  hypo
acagcttgccgctgacgctctctcctgtcaccccgcccctgctctctccccagatgtgttctgagctggatgccgggttccagaatcgctgcacagttccaacaggacagcgccttcccccatgcgctgggaggggaccctccatttctccccctcacccatgctgagtgtagagccggggcctgggtggcgggtgggggccgggtgggaggtggcagtagtcttagcctgtgcactctcttccttgggtgtttggtgctggctcctggggactacaaatcccagagtgcggtgtgcccggcctcatttctga

SEQ ID NO: 16918 - DNA, 30 bp, Homo sapiens
  chr2:220151176-220151206
  hypo
ggcagggcagagccgcgcagcacctgggag

SEQ ID NO: 16919 - DNA, 30 bp, Homo sapiens; identical to SEQ ID NO: 2222
  chr2:220174186-220174216
  hypo

SEQ ID NO: 16920 - DNA, 750 bp, Homo sapiens; identical to SEQ ID NO: 2227
  chr2:220349054-220349804
  hypo

SEQ ID NO: 16921 - DNA, 30 bp, Homo sapiens
  chr2:220366828-220366858
  hypo
tggggaggcaggggcgccccgggagttggt

SEQ ID NO: 16922 - DNA, 84 bp, Homo sapiens
  chr2:220371684-220371768
  hypo
tccctaataaaccccgtgaaccttggagccagcacagactgtacttatgtctgggctgggggtgggggcggaagcggggcagct

SEQ ID NO: 16923 - DNA, 294 bp, Homo sapiens; identical to SEQ ID NO: 2232
  chr2:220378981-220379275
  hypo

SEQ ID NO: 16924 - DNA, 30 bp, Homo sapiens
  chr2:220405148-220405178
  hypo
tgtccccagaacatcggccacatcagcccg

SEQ ID NO: 16925 - DNA, 31 bp, Homo sapiens; identical to SEQ ID NO: 2233
  chr2:220408153-220408184
  hypo

SEQ ID NO: 16926 - DNA, 31 bp, Homo sapiens; identical to SEQ ID NO: 2234
  chr2:220408748-220408779
  hypo

SEQ ID NO: 16927 - DNA, 30 bp, Homo sapiens
  chr2:220421373-220421403
  hypo
ggaacgtggcatcatcgccctcgtggacag

SEQ ID NO: 16928 - DNA, 118 bp, Homo sapiens
  chr2:220422086-220422204
  hypo
gcggctgtcctggggcgcatcgcacaggtactccccagcgtccccgctccgtgccccctgcacccgcagcacctgcctggccccggcctgctccagctgcacccgcccctggcttgcc

SEQ ID NO: 16929 - DNA, 402 bp, Homo sapiens
  chr2:220427078-220427480
  hypo
tcagggctgtctctgtgaccccggggagctgggctgggcccacacctgtgacggtgacagtgaaggaggccgactcatcgtcaatttcacacaagtactcgccggagtcctcgagctggacagcgggcagcaccaggcggcggacagtgtcttccttctgcaggagcagcgcggggctctccaccacctcctctccatccttggtccagcgcacctctgcccagggccggcatagctcacaggtcagcaccacacgctccaggcgcacggctgccacatacaccttgccgctgggatacacgatccacgaggagacgtctggaggacagggacagccactgccgggcatgaggggtgtgccctgccgtcctccctgaccccgttgtgttccctacccctgga

SEQ ID NO: 16930 - DNA, 43 bp, Homo sapiens
  chr2:220431757-220431800
  hypo
atgatggtggagagatcgagggagaagacggcatcttccccgt

SEQ ID NO: 16931 - DNA, 338 bp, Homo sapiens
  chr2:220432723-220433061
  hypo
atctgagcacctgcctgcctccgcctcagcctcttccccacgggccagctgacctttgactgtgacgttggccacggtgcgcacccggccccgcatctcgcacaggtagataccatcatcgtctgccttcagcctgtggatgatgaggcgccggacagtgccctcttcgatctgctcgtacttgcggcagggcagcagccgctggtcctcacggaaccaggccgtggggatgcgggagttgggtactttacattccagcacggcaatcccgtgctcacggccctccacgtcctgcaggggccgtgtgaaccggaggcggggctctgtggagaggggag

SEQ ID NO: 16932 - DNA, 546 bp, Homo sapiens; identical to SEQ ID NO: 2237
  chr2:220435323-220435869
  hypo

SEQ ID NO: 16933 - DNA, 225 bp, Homo sapiens; identical to SEQ ID NO: 2238
  chr2:220436139-220436364
  hypo

SEQ ID NO: 16934 - DNA, 43 bp, Homo sapiens; identical to SEQ ID NO: 2239
  chr2:220492469-220492512
  hypo

SEQ ID NO: 16935 - DNA, 31 bp, Homo sapiens
  chr2:220497988-220498019
  hypo
cttccagccatcccaacgatgacaaggacag

SEQ ID NO: 16936 - DNA, 35 bp, Homo sapiens
  chr2:220499162-220499197
  hypo
agcctgcagcagccttcgtgcgtctgaatgaggct

SEQ ID NO: 16937 - DNA, 30 bp, Homo sapiens
  chr2:222034086-222034116
  hypo
ggtaagaataaaaatggaggccgggcgcgg

SEQ ID NO: 16938 - DNA, 2254 bp, Homo sapiens; identical to SEQ ID NO: 2242
  chr2:222435994-222438248
  hypo

SEQ ID NO: 16939 - DNA, 1852 bp, Homo sapiens; identical to SEQ ID NO: 2254
  chr2:223169485-223171337
  hypo

SEQ ID NO: 16940 - DNA, 144 bp, Homo sapiens
  chr2:223562590-223562734
  hypo
cagaatctttttttttttccttcaggtcagatgggtaatgtgccgatgttgtaacaaggttcagagggtggcacatttcacatgtgcccgtgagcacccaatcttcacgctcatgaactacagaaggaccgaattatcagactc

SEQ ID NO: 16941 - DNA, 31 bp, Homo sapiens
  chr2:223628807-223628838
  hypo
ggttctctgctaaactcggtaattttaacta

SEQ ID NO: 16942 - DNA, 201 bp, Homo sapiens
  chr2:224640635-224640836
  hypo
cagcagctccacgtaacgatgcacaatctctagcgtcaagagctcattgtcctgattttctattgcacagcaaaaatataaactagcataccttgaaatgaaaaataacaaaagcaaaatatgacaatacattaagcaacctggagacagtttttcccacgaatatgcagtcacctcctcccccgccgagcctctcctcat

SEQ ID NO: 16943 - DNA, 30 bp, Homo sapiens
  chr2:224698418-224698448
  hypo
gcactagcgagggccgccaattctttctta

SEQ ID NO: 16944 - DNA, 50 bp, Homo sapiens; identical to SEQ ID NO: 2264
  chr2:224809133-224809183
  hypo

SEQ ID NO: 16945 - DNA, 30 bp, Homo sapiens; identical to SEQ ID NO: 2265
  chr2:224904611-224904641
  hypo

SEQ ID NO: 16946 - DNA, 31 bp, Homo sapiens; identical to SEQ ID NO: 2266
  chr2:225381703-225381734
  hypo

SEQ ID NO: 16947 - DNA, 25 bp, Homo sapiens
  chr2:225394304-225394329
  hypo
cactgtactccgagactccctctca

SEQ ID NO: 16948 - DNA, 49 bp, Homo sapiens
  chr2:225692100-225692149
  hypo
ccactgaaaggggtcacggaaagcaaacctcaatcggggaagataaact

SEQ ID NO: 16949 - DNA, 30 bp, Homo sapiens
  chr2:225748121-225748151
  hypo
taggaaaaaatatccggaacgtaaatcaag

SEQ ID NO: 16950 - DNA, 375 bp, Homo sapiens; identical to SEQ ID NO: 2268
  chr2:225906403-225906778
  hypo

SEQ ID NO: 16951 - DNA, 571 bp, Homo sapiens; identical to SEQ ID NO: 2269
  chr2:225906790-225907361
  hypo

SEQ ID NO: 16952 - DNA, 114 bp, Homo sapiens; identical to SEQ ID NO: 2270
  chr2:225907439-225907553
  hypo

SEQ ID NO: 16953 - DNA, 199 bp, Homo sapiens
  chr2:227841930-227842129
  hypo
tttgtgtctccccttcggcaagctccccctccctttagttttgcatttaacacagtcttgccttcatgactgccgcctcctttttttctgtaaacacaaatatgaagtgtatttgctttgcttttcagccttgtctgccccactgagtgtccgaaatagccggctggaattcatgagaatgttacgtcttcagatgttt

SEQ ID NO: 16954 - DNA, 31 bp, Homo sapiens
  chr2:228010266-228010297
  hypo
gctgtggttagaacttcgggtcacaccattc

SEQ ID NO: 16955 - DNA, 91 bp, Homo sapiens
  chr2:228185365-228185456
  hypo
ggctgtgtgcagtgctcgcaggccagcacgcgttccgtgtgggtgcgggcttggcaggccccacgctcaaagtggccggccagcaccgctg

SEQ ID NO: 16956 - DNA, 76 bp, Homo sapiens
  chr2:228211999-228212075
  hypo
ggagctaatctttcctctgctcgtggcattttgtcgcttatccagtcttctactcgtagggcataccagcagatct

SEQ ID NO: 16957 - DNA, 30 bp, Homo sapiens
  chr2:228632792-228632822
  hypo
caggaggcaggaaacgaggaggccctggct

SEQ ID NO: 16958 - DNA, 38 bp, Homo sapiens
  chr2:228638406-228638444
  hypo
cgtgagccaccacgcccggcctaagtgttaagattatg

SEQ ID NO: 16959 - DNA, 31 bp, Homo sapiens
  chr2:230136329-230136360
  hypo
cctaaaataaggaaaccgtagccccgggggt

SEQ ID NO: 16960 - DNA, 30 bp, Homo sapiens
  chr2:230664082-230664112
  hypo
gaacatcacttaatcgactgtccatgggaa

SEQ ID NO: 16961 - DNA, 121 bp, Homo sapiens
  chr2:230743169-230743290
  hypo
aaaaagaaaacaaaacaaaaagaaatcacacgcaaagctgccctagtccaaagtccctatgcttaaccactaaatagtctgacatcaccatgatgtgcttttattctttacatttgacatt

SEQ ID NO: 16962 - DNA, 31 bp, Homo sapiens; identical to SEQ ID NO: 2279
  chr2:230786011-230786042
  hypo

SEQ ID NO: 16963 - DNA, 43 bp, Homo sapiens
  chr2:231530877-231530920
  hypo
gcttgggagccttacctgctccgagcttcagtttccttacttg

SEQ ID NO: 16964 - DNA, 161 bp, Homo sapiens
  chr2:231676878-231677039
  hypo
ggctgctcaaaagaaacgtagcctttcctagcactgggacctgaaaccggtttctctccttggcgttcttaaaggagagtcaagttacagtatcatgtagtggacagtcattgccgtggcattgcagtaaataaaatgctcaactccgatgcagttccctg

SEQ ID NO: 16965 - DNA, 237 bp, Homo sapiens; identical to SEQ ID NO: 2283
  chr2:231692870-231693107
  hypo

SEQ ID NO: 16966 - DNA, 32 bp, Homo sapiens
  chr2:231744874-231744906
  hypo
cggagtttcgctcttgtcgcccaggctccgat

SEQ ID NO: 16967 - DNA, 452 bp, Homo sapiens; identical to SEQ ID NO: 2284
  chr2:231902080-231902532
  hypo

SEQ ID NO: 16968 - DNA, 31 bp, Homo sapiens
  chr2:232054070-232054101
  hypo
gacggctgggcactgacgggccagggagcag

SEQ ID NO: 16969 - DNA, 141 bp, Homo sapiens
  chr2:232113117-232113258
  hypo
ctcaggtgtcttacaggcatccgatcatattactatcttgctcaacaccgttatcaccttagggtgaagtggttttcatctcttttaacgtgcaagtgccccttctcgttaaaaagctggcagggccggacgtggtggctt

SEQ ID NO: 16970 - DNA, 126 bp, Homo sapiens
  chr2:232247494-232247620
  hypo
cttcctgccagccacccgctcgtatacccagggctcccgttaaccttccagccctgactcctgcgggatgacagcccaagaagaagagggcacaggggttccacccagcgacgagagggtctaagc

SEQ ID NO: 16971 - DNA, 30 bp, Homo sapiens
  chr2:232333015-232333045
  hypo
gggccccagatcaacgtcatccccaacttc

SEQ ID NO: 16972 - DNA, 65 bp, Homo sapiens
  chr2:232458630-232458695
  hypo
ctcggggcccagcttgcgctcggtccccagcctggtgggaagcgtcagctcggccttctcctctg

SEQ ID NO: 16973 - DNA, 30 bp, Homo sapiens; identical to SEQ ID NO: 2288
  chr2:232479660-232479690
  hypo

SEQ ID NO: 16974 - DNA, 20 bp, Homo sapiens
  chr2:232522882-232522902
  hypo
ggaataaaggctgggcgcgg

SEQ ID NO: 16975 - DNA, 31 bp, Homo sapiens
  chr2:232528195-232528226
  hypo
acctgttggtgaggctcggggggcagaagac

SEQ ID NO: 16976 - DNA, 31 bp, Homo sapiens
  chr2:232553412-232553443
  hypo
gtgtttctggccctcccgagggcaggcaggg

SEQ ID NO: 16977 - DNA, 31 bp, Homo sapiens
  chr2:233197429-233197460
  hypo
cagagacgagaagggccgaggctggcaggcc

SEQ ID NO: 16978 - DNA, 30 bp, Homo sapiens
  chr2:233198575-233198605
  hypo
gctgcaggacccagcgcagttccggcacta

SEQ ID NO: 16979 - DNA, 67 bp, Homo sapiens; identical to SEQ ID NO: 2294
  chr2:233284996-233285063
  hypo

SEQ ID NO: 16980 - DNA, 205 bp, Homo sapiens; identical to SEQ ID NO: 2295
  chr2:233350334-233350539
  hypo

SEQ ID NO: 16981 - DNA, 435 bp, Homo sapiens; identical to SEQ ID NO: 2296
  chr2:233350843-233351278
  hypo

SEQ ID NO: 16982 - DNA, 277 bp, Homo sapiens; identical to SEQ ID NO: 2299
  chr2:233352174-233352451
  hypo

SEQ ID NO: 16983 - DNA, 7 bp, Homo sapiens
  chr2:233352506-233352513
  hypo
cgggcgt

SEQ ID NO: 16984 - DNA, 37 bp, Homo sapiens
  chr2:233355401-233355438
  hypo
ggaaggccggagccgccgtggccgccacagccgccac

SEQ ID NO: 16985 - DNA, 21 bp, Homo sapiens
  chr2:233440624-233440645
  hypo
ggggtgctttgctgggcgcag

SEQ ID NO: 16986 - DNA, 38 bp, Homo sapiens; identical to SEQ ID NO: 2303
  chr2:233498141-233498179
  hypo

SEQ ID NO: 16987 - DNA, 181 bp, Homo sapiens; identical to SEQ ID NO: 2304
  chr2:233498345-233498526
  hypo

SEQ ID NO: 16988 - DNA, 302 bp, Homo sapiens; identical to SEQ ID NO: 2305
  chr2:233498571-233498873
  hypo

SEQ ID NO: 16989 - DNA, 320 bp, Homo sapiens; identical to SEQ ID NO: 2306
  chr2:233498895-233499215
  hypo

SEQ ID NO: 16990 - DNA, 49 bp, Homo sapiens
  chr2:233714269-233714318
  hypo
ggaagcccagtaagcacgtgcacccatgggcgcacgcatacacacatgc

SEQ ID NO: 16991 - DNA, 31 bp, Homo sapiens
  chr2:233764978-233765009
  hypo
cacattcacacacacacgctctcagtcactc

SEQ ID NO: 16992 - DNA, 30 bp, Homo sapiens
  chr2:233896303-233896333
  hypo
cggggtgcccaggacgccggctctgacacg

SEQ ID NO: 16993 - DNA, 144 bp, Homo sapiens
  chr2:233945669-233945813
  hypo
gcagaaccactccctgcgtagttaggctggcattgctgccggctgcctcatcctcctgcccctgagtccactgcagcctctaaggcacatctgctgaaggctttccactggcctagggcgcccgcaggtttggcctggttctta

SEQ ID NO: 16994 - DNA, 186 bp, Homo sapiens
  chr2:234093874-234094060
  hypo
agaaatcaggaagaagcgtgtgctgccagttctgcccctctggtccctgcctccttctccaactgaggtgggcccaggcctggtgctagagcggcctttgtcactgagtccccaagctccagttcacccagcagggtcaaagcggttcgaaaaatgatgaggatttttgtgcgggtgtttttaata

SEQ ID NO: 16995 - DNA, 184 bp, Homo sapiens
  chr2:234206549-234206733
  hypo
ggattgtaccccatttcgcaaatggggaaatgtttaacagctcagcaagaagttatcctcgtcctagagtcctgggcccatctgcttcagcactgcctgccacaccaggcccacagggacaggcgtgacactaaggtgtgccttcaaaagtgaatgggctgtactcctccgcatggctttttct

SEQ ID NO: 16996 - DNA, 30 bp, Homo sapiens
  chr2:234216547-234216577
  hypo
ctcatctggcaagacggtaccagcttgctc

SEQ ID NO: 16997 - DNA, 30 bp, Homo sapiens
  chr2:234355770-234355800
  hypo
tccctcccccgccgcggtgcccacgtgcct

SEQ ID NO: 16998 - DNA, 30 bp, Homo sapiens
  chr2:234359917-234359947
  hypo
aggagcccaggaggcgccattgaggaggtg

SEQ ID NO: 16999 - DNA, 111 bp, Homo sapiens
  chr2:234369790-234369901
  hypo
cgccaggtgcgggttccgcctgtgagtccctcccagccggcagctgtgctgctccgccggtgcggggcctgcctgcattctccccccgtggccgcacgctggctggtgccc

SEQ ID NO: 17000 - DNA, 377 bp, Homo sapiens
  chr2:234372715-234373092
  hypo
gcagagccctggagcggacctcacccccctgggcctcgcgctgatcagcagtgcacactctccatttctctctccctccctccgcctggagcagcagctggatccgcctcagaaggagcagctggggagtgctcttgccgagatggaccgacagctcaggaggctggcagacaccccgtggctctgccagtccgcagagcccggcgacgaagaggtatgtggctcatagggctgtgcctgggtctcccggacatggtggctctcgcctgaagtgcctgtgttccttgtgacccgtgtggctctgggatcaagatcgtgtcgctccggcagcccctgaggggccttctccagacttcgctattaaaatgctctttaag

SEQ ID NO: 17001 - DNA, 83 bp, Homo sapiens
  chr2:234373346-234373429
  hypo
gtgaacagaaagactccagctcgtcgcaggtctgggagggacccgaggacgcagggcatagcggaccctggggtggagtcaca

SEQ ID NO: 17002 - DNA, 31 bp, Homo sapiens
  chr2:234389853-234389884
  hypo
ccttctccccagggcccgttgtttctgcttt

SEQ ID NO: 17003 - DNA, 30 bp, Homo sapiens; identical to SEQ ID NO: 2311
  chr2:234652586-234652616
  hypo

SEQ ID NO: 17004 - DNA, 30 bp, Homo sapiens
  chr2:235406525-235406555
  hypo
catttcgtccgcatcgactctgctgacatc

SEQ ID NO: 17005 - DNA, 90 bp, Homo sapiens
  chr2:235460413-235460503
  hypo
aatatttctataacaaataagaaaaaatggaattataacaacactgttggtttatagcatcgaatgaacaaaaatcggggtataaaggag

SEQ ID NO: 17006 - DNA, 31 bp, Homo sapiens
  chr2:235517160-235517191
  hypo
agcaaagactgcacctcgttaagctgcgggt

SEQ ID NO: 17007 - DNA, 31 bp, Homo sapiens
  chr2:235637559-235637590
  hypo
gaagaaagaagttggccgggggcggtggctc

SEQ ID NO: 17008 - DNA, 38 bp, Homo sapiens
  chr2:235815938-235815976
  hypo
actttcgggttgggtgcggtggctcatgcctgtaatcc

SEQ ID NO: 17009 - DNA, 31 bp, Homo sapiens
  chr2:235823641-235823672
  hypo
aggagaggcatggctgcgggactgcacaggc

SEQ ID NO: 17010 - DNA, 1359 bp, Homo sapiens; identical to SEQ ID NO: 2314
  chr2:235859959-235861318
  hypo

SEQ ID NO: 17011 - DNA, 29 bp, Homo sapiens
  chr2:235870196-235870225
  hypo
tgagccactgcgcccggcctccatgttgg

SEQ ID NO: 17012 - DNA, 31 bp, Homo sapiens
  chr2:235893743-235893774
  hypo
tggtgtgctgggatagcggagcacctgcaga

SEQ ID NO: 17013 - DNA, 56 bp, Homo sapiens
  chr2:235894217-235894273
  hypo
ggcattttgactctccgcgcacaggtatttttgaccctctgcgcacagatattttt

SEQ ID NO: 17014 - DNA, 31 bp, Homo sapiens
  chr2:235904049-235904080
  hypo
ttgccatacctggacccgctttaccatgtca

SEQ ID NO: 17015 - DNA, 144 bp, Homo sapiens
  chr2:235922809-235922953
  hypo
tagaggtgtaattacccgttgcctgccgacatcagcctgatccttcaggaatgtttggcgagcaggatcgggcgatgccggatactttgggctcttaggaaagtccactcagcgagcgtggaggctggccgagttttgtggtgg

SEQ ID NO: 17016 - DNA, 64 bp, Homo sapiens
  chr2:235931226-235931290
  hypo
attgaaatgttgaaagcgggtgaatcgagacattgacggcccatcccctcgttgtcagataagc

SEQ ID NO: 17017 - DNA, 112 bp, Homo sapiens
  chr2:235941253-235941365
  hypo
gtagggtggtctctcacgtggcggcaagaccccttcatccagctctacacgcaggctgtgcattcagagctacttggtcactgcttctggtagggggcgagggtgctgtgcc

SEQ ID NO: 17018 - DNA, 31 bp, Homo sapiens
  chr2:235951107-235951138
  hypo
gctgggcaaggtgagccgcctgatcttcccc

SEQ ID NO: 17019 - DNA, 31 bp, Homo sapiens
  chr2:235970776-235970807
  hypo
gaacggctttgctgtacgtggggagaggagg

SEQ ID NO: 17020 - DNA, 31 bp, Homo sapiens
  chr2:236008617-236008648
  hypo
ggtcaaagaacatggccgtgccaggctaacg

SEQ ID NO: 17021 - DNA, 200 bp, Homo sapiens
  chr2:236024874-236025074
  hypo
tcagtccccttccacccgcacacccccacctgatgctgctgtcatcgtgcctcatctggccacatctctcatctttggctctgcactcaaggtcatccataatgcgaagccacctctccagccatgccttagctcccacttttcctgaaagtgaagctctgcctctctcaccccgtggtccttcccgatgctcccatcct

SEQ ID NO: 17022 - DNA, 19 bp, Homo sapiens
  chr2:236211239-236211258
  hypo
aaaatgaagttcttggctg

SEQ ID NO: 17023 - DNA, 31 bp, Homo sapiens
  chr2:236229403-236229434
  hypo
aacctcacggtgactacggagggactgctct

SEQ ID NO: 17024 - DNA, 1940 bp, Homo sapiens; identical to SEQ ID NO: 2316
  chr2:236402217-236404157
  hypo

SEQ ID NO: 17025 - DNA, 21 bp, Homo sapiens
  chr2:236412780-236412801
  hypo
cagcctcgaactctctttttt

SEQ ID NO: 17026 - DNA, 138 bp, Homo sapiens
  chr2:236415970-236416108
  hypo
caagagtctggatggtgatggcgggggagcgctggtggaggagtcgggggcgtcccgctggactggggcacagctctgcagcagcagccggtgcggttttgccttgtaagtgacaccgttgcctgcaggcatctctga

SEQ ID NO: 17027 - DNA, 31 bp, Homo sapiens
  chr2:236456628-236456659
  hypo
gagaatgcaggtatagcggtgacagctacaa

SEQ ID NO: 17028 - DNA, 202 bp, Homo sapiens
  chr2:236459168-236459370
  hypo
ccccaccccacacctgcgactccagactcagagttgatgagggtctgcaggcgtcggtctgggagccacagacaggtgtgtttgccgcagaggtgccgagggcccagcaggactgtagcacaggatcagcaccatccacacctgaggcgtggggatctccgggcatgatgcggaatgtagtgacgatcgcaaatccttcctg

SEQ ID NO: 17029 - DNA, 31 bp, Homo sapiens
  chr2:236467580-236467611
  hypo
tttttagatagggtctcgctgtgtgtcctag

SEQ ID NO: 17030 - DNA, 108 bp, Homo sapiens
  chr2:236541701-236541809
  hypo
ttgcttgaacttctagcggcagaaagggggtgatccctttcttctccatcataagggtcatggcccacatccctgtaacaaaagacaggttaacgagagaaaagcatt

SEQ ID NO: 17031 - DNA, 31 bp, Homo sapiens
  chr2:236544007-236544038
  hypo
tctccttttctctgcccgtaggattgacttt

SEQ ID NO: 17032 - DNA, 24 bp, Homo sapiens
  chr2:236555500-236555524
  hypo
cgcgtgcggtggctcacgcctgta

SEQ ID NO: 17033 - DNA, 22 bp, Homo sapiens
  chr2:236566309-236566331
  hypo
gccaccgcgcccagcccagtgg

SEQ ID NO: 17034 - DNA, 31 bp, Homo sapiens
  chr2:236602309-236602340
  hypo
caacatagtgaggcctcgtctccaaaaaacc

SEQ ID NO: 17035 - DNA, 198 bp, Homo sapiens
  chr2:236603368-236603566
  hypo
tctcctgggcacctttcggggcaagtcctgctgtcactgcacagctcaccttgtatatgtggggtgctcttctcctctcctgaggagttatgggtgattaggaagcaaacgcgtctcagacttggagatcaaatgaagagaggctgtgtaagcaccaggatgcatggggggttccggcttcttcgcagtttcacctgg

SEQ ID NO: 17036 - DNA, 28 bp, Homo sapiens
  chr2:236612992-236613020
  hypo
ttagaaatgctgatttgaggccgggcgt

SEQ ID NO: 17037 - DNA, 147 bp, Homo sapiens
  chr2:236613259-236613406
  hypo
agcctggcaacagagcgagactccgtctcaaaaaagaaatgccgatttgaaggttctgatttccagagtcccggctgatgctcacctgttgctggctttgctaagcgtcccaggttagtctagggcgagcaggctctgagcaacaca

SEQ ID NO: 17038 - DNA, 107 bp, Homo sapiens
  chr2:236616177-236616284
  hypo
ggttgtgctcccccggcgtgtgacctggtgggacgtgctccccagcgtgtgacatggtgggttgtgctcccccggcgtgtgacttggtgggacgtgctccccagcat

SEQ ID NO: 17039 - DNA, 175 bp, Homo sapiens
  chr2:236617714-236617889
  hypo
tgcaccatcttcagtgaccttcggatgtgaaaatggcccattggaggcattttgacttggcctttacgtgagttatggtgtctgactttgtgtcctcctctttttcagatgccttcgtgaacagccaggaatggacgctgagtcgatctgtcccggagctcaaagtggtgagtgg

SEQ ID NO: 17040 - DNA, 140 bp, Homo sapiens
  chr2:236618369-236618509
  hypo
aattaaaatttttgtcttttacgaaccttaccctttcggtgaaattatgtagagcttcaaattggcacgtgtaaaaagtggtccatcgcagccaccctttccagccgctcccctctaccgtaggatggaaggaaggggca

SEQ ID NO: 17041 - DNA, 188 bp, Homo sapiens
  chr2:236619769-236619957
  hypo
ctgcactgcccagtgccgtcacggctggcgccatgtggctgttgagtgattgaaacgtggccagtcagtgccatcaaggagctgcattttaagtttgattctagttcatttaaattgaaatagccacacagggccagcggccaccctactgccagcattacagactaactgatcgtcaagtattgaac

SEQ ID NO: 17042 - DNA, 31 bp, Homo sapiens
  chr2:236622524-236622555
  hypo
tcacgtggaggaagacgcgagaggtctttct

SEQ ID NO: 17043 - DNA, 189 bp, Homo sapiens
  chr2:236624441-236624630
  hypo
ggtgcccaggagggagcggactccctgacttccagccactgggagtcggggatggcctccagctttctggcttgagaggctgggtgtgatgtggcctcagaagctgatgaggagactgggagagagaggcaaggtgtggacccatcgaggcgtgaataccgcataggtggcgtacggatgtatataaag

SEQ ID NO: 17044 - DNA, 193 bp, Homo sapiens
  chr2:236637397-236637590
  hypo
tacattgaaatgaaagcgtgcctagtggagcaagagcggggcggggaggaggggaagccagcctgcagcattgccctctagacactaagaagaagggagtaggtttaggttggatgaagaagggaggtttggagcctggacgagagcaggggttgtggaggaatggtcaaaacccaggcgtgatgtgaccaca

SEQ ID NO: 17045 - DNA, 31 bp, Homo sapiens
  chr2:236646339-236646370
  hypo
cgtcacggtcattccacgagagctgggtggt

SEQ ID NO: 17046 - DNA, 80 bp, Homo sapiens
  chr2:236647744-236647824
  hypo
tcaacttattactcctcgcctgctaggacatcatcccctttgcatctggggacactgagatggggcgaggtggggcaaga

SEQ ID NO: 17047 - DNA, 145 bp, Homo sapiens
  chr2:236648899-236649044
  hypo
ccaggcccctcatgcccgcaccccctcctcatggtcacctctgttcctgcagggtcccggtggtctcccgctaaccccgcgtggtctctaacgcctcctgtcagccgctgctctgctgtctccacccgtgcggaggtcccatcca

SEQ ID NO: 17048 - DNA, 275 bp, Homo sapiens
  chr2:236660556-236660831
  hypo
ctcctgctgcctctgtcgggagaatgtcctgtggggagtaaacctcatttcaagccgtgctggtgaacatgagtgagatgttagtgagacttggaagaactgtgcagggaggcccttagagctcttctgagaggtgcaccctaatggagcaaggtcactgtcggccgctgcgctgccgaggcccctgtgaatgttgaagtaaagcgtcgtagatgaagggtccccaggcccgtgcatgaggccagctgcctgttttcataaatagacttttcttc

SEQ ID NO: 17049 - DNA, 31 bp, Homo sapiens
  chr2:236664671-236664702
  hypo
ccctttgagcattacacgtgcaccttgggag

SEQ ID NO: 17050 - DNA, 26 bp, Homo sapiens
  chr2:236669005-236669031
  hypo
gagcgagactccgtctcaaaaaacaa

SEQ ID NO: 17051 - DNA, 202 bp, Homo sapiens
  chr2:236672624-236672826
  hypo
gatctgtgtgtggctgtgatccgtgcgtggctgtgacccgtgcgtggctttggcccgtgcgtggctccggcccgtgtgtggcggttgcccatgtgtggctgtgacatgtggaggcgaacttccacggcagaagtgccatgcttccgtaagctcttccgactggttggtaggcgcttttatcggcacatgagcaccttacaga

SEQ ID NO: 17052 - DNA, 30 bp, Homo sapiens
  chr2:236674242-236674272
  hypo
agcaatcgcttccccgctaaatgttcggca

SEQ ID NO: 17053 - DNA, 37 bp, Homo sapiens
  chr2:236675950-236675987
  hypo
ttggccaggcacctcacgttagcgtctgcagccttga

SEQ ID NO: 17054 - DNA, 31 bp, Homo sapiens
  chr2:236680141-236680172
  hypo
tcaactggagacatgccggtctctgccctgt

SEQ ID NO: 17055 - DNA, 303 bp, Homo sapiens
  chr2:236686063-236686366
  hypo
agaagaattacaggtgtgaagcgcccgtgtggggctgattcccacctgcctcctcgttatcagcaggcagccttgcgtctgcctctgggagcagaaaccgttgtttcaccagcaaattacgctggctgtactcgccatgtcctgttgccatagaggacgagtcacagctgtctcacctgcacccctccaatcgccttctcagaatccgacgctggtcctaagtgccttcagctgtcacctgagcacgttcaagcctcctgcccagcaccttcctagagcaccgccattggcataaggactagg

SEQ ID NO: 17056 - DNA, 31 bp, Homo sapiens
  chr2:236717069-236717100
  hypo
ttgaagcaaataggaacgcagccttagagag

SEQ ID NO: 17057 - DNA, 163 bp, Homo sapiens
  chr2:236722552-236722715
  hypo
ttaccctggagtcgggccactcagtggccggactctcctcctaccgcccccgggtgaattccacgtcacccacatcgttctgccattggtggcctgccagagtctgttggtgtgttcttctgccggtgtgcttctctcgacgcccagccgcctgtgtgtgtgc

SEQ ID NO: 17058 - DNA, 60 bp, Homo sapiens
  chr2:236727032-236727092
  hypo
tgttgcatccccttcccgccccatgccatctgtgctcaccatgaccgtcttttttttgtt

SEQ ID NO: 17059 - DNA, 20 bp, Homo sapiens
  chr2:236730154-236730174
  hypo
gtagccgggactacagggaa

SEQ ID NO: 17060 - DNA, 99 bp, Homo sapiens
  chr2:236733469-236733568
  hypo
tacccatcaaggtaaccggtgcattcacgggtttggataatttcaggaaaaggaaagcatgtttttatgtctcacgtttacaggcgcttttctgatttt

SEQ ID NO: 17061 - DNA, 189 bp, Homo sapiens
  chr2:236738718-236738907
  hypo
ggctggctgatggagtcgttctcatttgtgaagacactgtccagggctaaggcagtacttgccaaggcaaggccaccgtgatccgagactgggaggcccagaaaagatgcagacaaggtaggagtcggctctgtgtgacttccccatgacaccagtgggccaggctacagtcaccgtttgagtgcccgt

SEQ ID NO: 17062 - DNA, 193 bp, Homo sapiens
  chr2:236739766-236739959
  hypo
gttagggaatcacattcgagactttaactagattggtccagagtgcttcactcttcttctttaaaaaaaaaaaaaaaaaacagtaaacgttcttttttagagcagttttaggtcacggcaaagttgagcagaaggacacccacagcctccgccattgtcccccacagtctgttgcagccgatgagcctgcact

SEQ ID NO: 17063 - DNA, 189 bp, Homo sapiens
  chr2:236741688-236741877
  hypo
aagacctggagggggccggtgagccagggagcatggtagaagagacaagccggagagcagctggctctggaggggcactggcaggacccgagggtgcaggcagcaagcaggctgttgggtgctgcaggcgctctccattggagcagtgctgtggaagcaccgtcggcctgccgccgtgctgagtgatgc

SEQ ID NO: 17064 - DNA, 31 bp, Homo sapiens
  chr2:236743374-236743405
  hypo
caagagcgagagtctccgaagttagacaggc

SEQ ID NO: 17065 - DNA, 82 bp, Homo sapiens
  chr2:236750707-236750789
  hypo
gtggaggagggcctctcgttggaagcccaggctcactccatggctgcccctctccccagcctgctggcgttgggcttcctcc

SEQ ID NO: 17066 - DNA, 38 bp, Homo sapiens
  chr2:236751636-236751674
  hypo
ctggagttacaggcgttagctgccgtgcccggcccgtg

SEQ ID NO: 17067 - DNA, 31 bp, Homo sapiens
  chr2:236760073-236760104
  hypo
ttcacccgtccaccaacgcaccatgtgccgc

SEQ ID NO: 17068 - DNA, 158 bp, Homo sapiens
  chr2:236760925-236761083
  hypo
gagaagggcccgggcgtgcataatgcctattgtctgcgtctgcgtttgctttttaatgccagcgcccagcgagggagcagggccctcctagcgtgcgcggagggggcttggggtggaaaggggggggaaccccgaaacaggccgccttttgacaggcg

SEQ ID NO: 17069 - DNA, 31 bp, Homo sapiens
  chr2:236763010-236763041
  hypo
tccctctttttctccccgatagatgggacct

SEQ ID NO: 17070 - DNA, 95 bp, Homo sapiens
  chr2:236765665-236765760
  hypo
gtgatctccatggagacgcaggtggtgagcctgagatgctacactttagagcaggagtcatccactcccagatggcagcctggtaccagtctgtg

SEQ ID NO: 17071 - DNA, 28 bp, Homo sapiens
  chr2:236766059-236766087
  hypo
atcctttgacgagcgtccccaaggagac

SEQ ID NO: 17072 - DNA, 122 bp, Homo sapiens
  chr2:236796563-236796685
  hypo
agagatgagatagggccgtgcggcagcccatcaccggcagcgcttgctcgtggtggtgaggcctctcccttccggcacagacatttatcttctgtccacgtgtgtgccgctcacagtccacg

SEQ ID NO: 17073 - DNA, 56 bp, Homo sapiens
  chr2:236801895-236801951
  hypo
gtccatcataaggaagcgccgtgtctgtagcgtgggtgtagcgtgtctgtggcgca

SEQ ID NO: 17074 - DNA, 354 bp, Homo sapiens
  chr2:236839142-236839496
  hypo
tttgtatagggttgttcggtgcgagccatctgtggcatcgggtcccttcacattgctttgtcaggcaccatcaagattggcgtcccccttttattcctcccgaatagtttctgtctggcgcttccgtttgccatgcaggcaggacaggggctgctctcggtggtaaggtgcactatgtgccagcgtgtgggtcccatagactaactcgcgctggtttctgtggtctgcagtccgcggtggtgttcacctgacttgtttattcctagggaatgtcactagtgcatctgggtctcagatggcaagcggcatcagcctggtctccttcaacagccgacccgacggcatgcaccagcg

SEQ ID NO: 17075 - DNA, 31 bp, Homo sapiens
  chr2:236841397-236841428
  hypo
tttctgttgagctgtacgtatgtgcagtggg

SEQ ID NO: 17076 - DNA, 38 bp, Homo sapiens
  chr2:236842446-236842484
  hypo
ttacaggcatgagccaccgcgcccggcctttctaagga

SEQ ID NO: 17077 - DNA, 124 bp, Homo sapiens
  chr2:236847370-236847494
  hypo
attttgagaaagacatcggcacactgggaagcacatgaagcggagggccgagatggggagaggggcctgaaacccacaacacctagcgtggctgaaaacctgggagggccggaggaccctctca

SEQ ID NO: 17078 - DNA, 36 bp, Homo sapiens
  chr2:236853750-236853786
  hypo
ttttgtttttttgagacggagtctcgctcttttgcc

SEQ ID NO: 17079 - DNA, 36 bp, Homo sapiens
  chr2:236854025-236854061
  hypo
cagaagcatggttaacgcgtgcgctagcagaaaagt

SEQ ID NO: 17080 - DNA, 159 bp, Homo sapiens
  chr2:236857147-236857306
  hypo
aagttattttaaaatacgaatttcataacgagaacacaaattgagaggtgaacatttgagaatttccatggccgctttggcagtagggatgtttagtttgaaactttaatttaaaaagtgagtgcagtgagtctgtctttgtagcgctagagatgggtc

SEQ ID NO: 17081 - DNA, 41 bp, Homo sapiens
  chr2:236863815-236863856
  hypo
gggctggagctgccttcgagtctgtgcggttccagttcatg

SEQ ID NO: 17082 - DNA, 149 bp, Homo sapiens
  chr2:236870132-236870281
  hypo
ctggagtgaggccagccgtggacagcagtgcagagggacaggccctagggagttgtgctttaaagaagggcaggagtcaaatgtccagggtggaggtgtgcggccaagggagagttgtgttaaaaatgtgagatgacagggccgggcgt

SEQ ID NO: 17083 - DNA, 198 bp, Homo sapiens
  chr2:236872389-236872587
  hypo
gagtatatgctcagaacggtcaagcataactaaggcgatagtgaagagtaacaacacataggcttagaacacagagacatagagtggtggcctggaatagagagcctagcggtagacctaccacgcccctgtggaagcctgtcgtgtggacggcatagctaatgtgtgtgttctgagtgtcttcgaaatagcggtgta

SEQ ID NO: 17084 - DNA, 116 bp, Homo sapiens
  chr2:236877178-236877294
  hypo
cccctcccctcacgccaacagaaagaagcaccgaaggaagaaaagcactagcaacttcaaagccgacggcctgtccggcactgctgaaggtaagggttccgcggtgccccgggaga

SEQ ID NO: 17085 - DNA, 110 bp, Homo sapiens
  chr2:236881385-236881495
  hypo
gaagccgtagagtgttcgtgcctttcacagcacctcctacaagcccctgaagcccgtgccatgccactctgttggtggtccacaaacacaggaaacgaagctctagaggg

SEQ ID NO: 17086 - DNA, 67 bp, Homo sapiens
  chr2:236900766-236900833
  hypo
caggagtggttagaagcgcagcggaggagcctgtcttcctgggtccgagttgcgtggttaggagcgc

SEQ ID NO: 17087 - DNA, 44 bp, Homo sapiens
  chr2:236901512-236901556
  hypo
gttggcctctttccgtcgtgaaccatggacgtctctccttgacc

SEQ ID NO: 17088 - DNA, 172 bp, Homo sapiens
  chr2:236909410-236909582
  hypo
gggccactaaggggggcggagaagacccctgacagcaagaaggagccccacttgtgctgttctgtaaggagggtcttccaggcacagagagtggctgatgagaaagggcctgtgtggaaggaaccagggccaagcgagggaggcagatgccgcgtggcgtgaggagggtgag

SEQ ID NO: 17089 - DNA, 253 bp, Homo sapiens
  chr2:236949321-236949574
  hypo
cctgatgttatcagtgatgtgcgtttctcccggggtgcttacgccttgtatttgtgtcttcctccgtgcccagtcccggctgacgagccagagcgaggccatggccctgcagtcgatccggaacatgcgcgggaactcccactgtgtggactgcgagacccagagtaagtgtgtgcggtggtagcaggggctggcgctgtgtagctggagaccacatggtcccactaggcccgggttgcaggggactcacatc

SEQ ID NO: 17090 - DNA, 31 bp, Homo sapiens
  chr2:236951333-236951364
  hypo
cttgtgcatgtgagtgcggatggggggtggg

SEQ ID NO: 17091 - DNA, 69 bp, Homo sapiens
  chr2:236970590-236970659
  hypo
ggagcaaaggtgcaggcgtacaggaacgcatgctgggtggcgggggcctgggtgcgggccgagggctgg

SEQ ID NO: 17092 - DNA, 19 bp, Homo sapiens
  chr2:236981923-236981942
  hypo
ccaccgtgcctggcctata

SEQ ID NO: 17093 - DNA, 31 bp, Homo sapiens
  chr2:236989877-236989908
  hypo
acagtgggcaggaggccggggtcctgtcctg

SEQ ID NO: 17094 - DNA, 31 bp, Homo sapiens
  chr2:236991808-236991839
  hypo
aaaagaaaagaggcctcgccttccatttaga

SEQ ID NO: 17095 - DNA, 155 bp, Homo sapiens
  chr2:236996174-236996329
  hypo
tgcacactgcccatgacgggctacttggacggctcatgcccacctctgactagtttgatgttctgaatcaggccccttggttaagcgtgataacatgatcacctggtgttttaaagcttttctctgtttccatgtggtgccgtgaatagtctcat

SEQ ID NO: 17096 - DNA, 31 bp, Homo sapiens
  chr2:237007807-237007838
  hypo
tgcttggggccaggtgcggtggctcacgcct

SEQ ID NO: 17097 - DNA, 29 bp, Homo sapiens
  chr2:237013228-237013257
  hypo
gggttacaaagacaagcgtgcacaggcca

SEQ ID NO: 17098 - DNA, 21 bp, Homo sapiens
  chr2:237014529-237014550
  hypo
cgtgcccggcccctcttgtgc

SEQ ID NO: 17099 - DNA, 31 bp, Homo sapiens
  chr2:237015391-237015422
  hypo
tggggtctgcaggtctcgcaggagtaggtca

SEQ ID NO: 17100 - DNA, 30 bp, Homo sapiens
  chr2:237018248-237018278
  hypo
gtcggcagcagtgtcggtgttctagaccgg

SEQ ID NO: 17101 - DNA, 46 bp, Homo sapiens
  chr2:237020563-237020609
  hypo
ttttgattggagtcatcggcagtgttgtcacgcgactggtcttgct

SEQ ID NO: 17102 - DNA, 31 bp, Homo sapiens
  chr2:237022762-237022793
  hypo
ttagctcattagctaacggaggctgtgaacg

SEQ ID NO: 17103 - DNA, 165 bp, Homo sapiens
  chr2:237032440-237032605
  hypo
gttgtgtagctggccccgctgtccaagcacaagccacatgcaagggctgagagaaagcttccctgccccctccctccatcacatcccccatgatactaatgtgggctcccttacctccgcagtacggagtggacgtcacggcccgagatgcccacgggaacacag

SEQ ID NO: 17104 - DNA, 35 bp, Homo sapiens
  chr2:237032664-237032699
  hypo
ggctgccccgacgagcgcttcgtgctcatggccac

SEQ ID NO: 17105 - DNA, 31 bp, Homo sapiens
  chr2:237033037-237033068
  hypo
tgatgatagcacatggcgcaggacccttgtc

SEQ ID NO: 17106 - DNA, 31 bp, Homo sapiens
  chr2:237037748-237037779
  hypo
gcctttggcatcaatgcgtgcattctccacc

SEQ ID NO: 17107 - DNA, 823 bp, Homo sapiens; identical to SEQ ID NO: 2319
  chr2:237075812-237076635
  hypo

SEQ ID NO: 17108 - DNA, 176 bp, Homo sapiens; identical to SEQ ID NO: 2320
  chr2:237076656-237076832
  hypo

SEQ ID NO: 17109 - DNA, 200 bp, Homo sapiens
  chr2:237542534-237542734
  hypo
gtgagccggaggcaggagcaccgccttataatagcagctcccaactaacatgcagggcgacttcgggctggcctcccaatttctctggtcgatgtcctcagctctgaggtcggggctggcggggcggcggccgggtcgatgtcttcagctctgaggtcggggctagcggggcggcagccgagcactctttgtgctccaca

SEQ ID NO: 17110 - DNA, 31 bp, Homo sapiens
  chr2:237686475-237686506
  hypo
ggccagtgcttgtcctcgtgacacccctgag

SEQ ID NO: 17111 - DNA, 30 bp, Homo sapiens; identical to SEQ ID NO: 2326
  chr2:237714754-237714784
  hypo

SEQ ID NO: 17112 - DNA, 30 bp, Homo sapiens
  chr2:237973070-237973100
  hypo
gccgcagtaccgggcggagggcctgtctga

SEQ ID NO: 17113 - DNA, 30 bp, Homo sapiens
  chr2:238274430-238274460
  hypo
gttccggaacttctcgagcatctctggctg

SEQ ID NO: 17114 - DNA, 657 bp, Homo sapiens
  chr2:238280411-238281068
  hypo
gatctgctctgaggtcagggtcgtgatgggcgtcagcagtttctgctccaggctgggcagctcccggaaggtgctcaccgagaacacatattcggggctcagcgagatcttcaccagctcctcctggtctgcgttcctggcgatcgtgaaaggggccacgccaaactgcttgagctccaccgccgggtcgtccacctcatcgtcagactttccagacgagatgaggaccaggaactgcgggacgccctcttcaatgcggctccccaggggcctcttgaagatgttcctggacacgtactccagggcattgcccacgttgatctgccgccctcccttgggcctcagccgctgcaccgcgttctgcacttcatccttgctggaatgggcgttcagcaggaactccaccttggggtcatcgctgaactggatgacagccacccgggtggtgtcaaagcccacgtccaggtagtcaaccagcctctctatgagggtgcgaacgtactggaactcaggcccggcactttgggacccatcgatgagaaagaccacgtccctcttgccaccaacacctgcgaaacaaatgtgagcatggcttcaccttcatcgtcaccaaattcttagcgttcatgagccaccgcccagtttgtcatggattca

SEQ ID NO: 17115 - DNA, 536 bp, Homo sapiens
  chr2:238283028-238283564
  hypo
gaggatgcaaagagttccctgcgtacctgggctcggtagaggctgcaacaccggctgcagcctgctcagctcctcgcgggtgagctgggtcaccctctcagagatgacctgttggacggtccccagctggcgaaaggtgggaatggccacggcaaagtccgggatgaaggagatggtctgcatctctgtgatgtcagcgttcccgatgccaatgccaatgggcacagccccacccctcttcacgaccacggaggggttccgcacatcatccccagacctgtcggccgtgaggacgatcagcagctggggcacaccttctgttatcctgcttcccgcagagctgaccaggatgttcctcaggacaaactccagggcggccccggtgttgggggtcggccctcccagcagggtcagctggcggacagcgttgacgacgtcctgcttgttcatgtatgaattcaggtagaactcgggcctggtccggtcgctgtactgcaccacggccacgcggacccggtcctggcccacatccaggc

SEQ ID NO: 17116 - DNA, 31 bp, Homo sapiens
  chr2:238359553-238359584
  hypo
ggctggtggccaccaccgtgaacagggccgg

SEQ ID NO: 17117 - DNA, 50 bp, Homo sapiens; identical to SEQ ID NO: 2327
  chr2:238384222-238384272
  hypo

SEQ ID NO: 17118 - DNA, 30 bp, Homo sapiens
  chr2:238473832-238473862
  hypo
ttaacacctcattgcgcagaggagagaatg

SEQ ID NO: 17119 - DNA, 83 bp, Homo sapiens
  chr2:238492722-238492805
  hypo
aaggaactagggcctcgcgcctcattgtcggggcctccatccccctcacctgtaaaatacagaatgcccggcaccaccctgaa

SEQ ID NO: 17120 - DNA, 724 bp, Homo sapiens; identical to SEQ ID NO: 2329
  chr2:238536092-238536816
  hypo

SEQ ID NO: 17121 - DNA, 31 bp, Homo sapiens
  chr2:238550619-238550650
  hypo
atgactggagacacttcgcacacccatgaga

SEQ ID NO: 17122 - DNA, 30 bp, Homo sapiens
  chr2:238707008-238707038
  hypo
cgggagggaccacgcggcctgggaaacagt

SEQ ID NO: 17123 - DNA, 31 bp, Homo sapiens
  chr2:238785778-238785809
  hypo
ccgggctgcaggggcgcgcgggctggcggtg

SEQ ID NO: 17124 - DNA, 177 bp, Homo sapiens
  chr2:238786044-238786221
  hypo
agggagagggggcaagcggaggaggagtggaccacgtgggagctgtggaagatcctttctagaccccggaagggttcttcccccagtggggggggccgggatgaagacagaggagggagccagtagcaggtggacgtgaagagtgacggtgggaggaggccacgtcctcaataatct

SEQ ID NO: 17125 - DNA, 31 bp, Homo sapiens; identical to SEQ ID NO: 2330
  chr2:238791402-238791433
  hypo

SEQ ID NO: 17126 - DNA, 34 bp, Homo sapiens
  chr2:238793663-238793697
  hypo
acgctctgggtccacacgacgttgggcagggtgc

SEQ ID NO: 17127 - DNA, 31 bp, Homo sapiens
  chr2:238820427-238820458
  hypo
ggggcccaggctgcccgcgggtgcacccagg

SEQ ID NO: 17128 - DNA, 52 bp, Homo sapiens
  chr2:238822392-238822444
  hypo
ctaagtcagggaccaccggaggaggtagcccttgagccgccctggagcccgg

SEQ ID NO: 17129 - DNA, 40 bp, Homo sapiens; identical to SEQ ID NO: 2331
  chr2:238864944-238864984
  hypo

SEQ ID NO: 17130 - DNA, 14 bp, Homo sapiens
  chr2:238874441-238874455
  hypo
gcccggctgagttg

SEQ ID NO: 17131 - DNA, 52 bp, Homo sapiens; identical to SEQ ID NO: 2332
  chr2:238876149-238876201
  hypo

SEQ ID NO: 17132 - DNA, 1 bp, Homo sapiens
  chr2:238967038-238967039
  hypo
g

SEQ ID NO: 17133 - DNA, 40 bp, Homo sapiens
  chr2:239005247-239005287
  hypo
caagggagaaaggaagcgttttcttcggctcctgctgtga

SEQ ID NO: 17134 - DNA, 31 bp, Homo sapiens
  chr2:239011477-239011508
  hypo
cacctacctctgaccacggctcttctctttt

SEQ ID NO: 17135 - DNA, 110 bp, Homo sapiens
  chr2:239041689-239041799
  hypo
ctagggcccaaggggacggacactcaagaagatgtaaaattgggaggggtggtattggccattggggcaggcagggccgggaagggaagtagcaccggccgcagccccaa

SEQ ID NO: 17136 - DNA, 742 bp, Homo sapiens
  chr2:239049367-239050109
  hypo
actactgaggtcccctgggcacggcgtcatggtgcggaacgtggatgacctggatttccacctgccctcgcatgcccaggacatgctggatggcctgcagcgcctgcgctctcagcccaagctggccgacgtcacactgctggtgggcggccgggagctgccatgccaccgcggcctcctggcgctcagcagcccctacttccatgccatgtttgcgggtgacttcgccgagagcttctctgcgcgcgtggagctgcgggacgtggagcccgccgtggtgggacaactggtggacttcgtgtacacaggccggctgaccatcacgcagggcaacgtggaggcgctgacacgcacggctgcgcgcctgcacttcccctcggtgcagaaggtctgcggccgctacctgcagcagcaactggatgccgccaactgcctgggcatctgtgagttcggggagcagcaagggctgctgggcgtggctgccaaggcctgggccttcctgcgagagaactttgaggctgtggcacgtgaggacgagttcctgcagcttccccgagagcggctggtcacttgtctggccggcgacctgctgcaggtacagccggagcaaagccgactcgaggccctgatgcgctgggtgcgccatgacccgcaggcccgggccgcccacctgcccgagctgctcagcctagtgcacctggacgccgtgcccaggccctgcgtgcagcaactgctggcctca

SEQ ID NO: 17137 - DNA, 30 bp, Homo sapiens
  chr2:239056668-239056698
  hypo
tggggctcagggaccgaggatagaggacca

SEQ ID NO: 17138 - DNA, 513 bp, Homo sapiens
  chr2:239059357-239059870
  hypo
ctgtcctctctgccactcccccgaccctgctgagggcaccctcagccctgctctccagctcccgcccaccggacgctaacccgctgaccgtgcacaggtgcagtcacagcacagcctgcatgagaatggcgcgctggtgccactgggtgatgcgctgtacgtgacgggcggccgctggcagggcatggaaggtgactaccacgtggagatggaggcctacgacacggttcgggacacctggacccgccacggcgccctgccccggctctggctctaccacggggcctccaccgtcttcctggatgtctccaagtggacccagccctccggccccacccaggagcactaaaccagggccagggtccccggggaggagtccccacagcggcccctcatcagcctgtggaacggcccctttcattttcgcttatttgttcactcggagctaccattccttccaagctgcgctcaggccaccaggggtgatcagacggcatggcttggaggacacag

SEQ ID NO: 17139 - DNA, 175 bp, Homo sapiens
  chr2:239065003-239065178
  hypo
atgctccaactcatcacgcacctcttatttcacaccaactagaataggaggaaccctaacaagccaaacataaggccgtgaagatgtaacctgtccagtgggcaggagggcctctgcagccccacgccggctctgcccatgggctgcgtcctgggcaagccgcccacctctctgg

SEQ ID NO: 17140 - DNA, 219 bp, Homo sapiens
  chr2:239074293-239074512
  hypo
ccatctctgtgaatggcgtcctgtacctgcaggtgagtgcggcaggcttgggcatcgaggggcaccgcctgggcatggccacgggtggctgggtgcagaagggtgctgttagatgctcaggatcactgggtcgggtgcagcaccctcagactccaggcctgggagagggtccaggacatgccaagttctcactttggtctgggcgcagccaggcttcaa

SEQ ID NO: 17141 - DNA, 62 bp, Homo sapiens
  chr2:239082211-239082273
  hypo
gcacagaggtgacaccgcagcgcttgtactgcccgtccccaatggagcgtgacacctctagc

SEQ ID NO: 17142 - DNA, 110 bp, Homo sapiens
  chr2:239083095-239083205
  hypo
tgtgagagagcactccgcaaatgccacggctgcgcatgggcgtttaagatcaccacggggctcccaaatcatggaccaagcaagttcaggagatgcggtgcagatggctg

SEQ ID NO: 17143 - DNA, 30 bp, Homo sapiens
  chr2:239091668-239091698
  hypo
aagcggcaacggaacggaacacatggtcct

SEQ ID NO: 17144 - DNA, 31 bp, Homo sapiens
  chr2:239144284-239144315
  hypo
gatgagtcataacccacgagaagtgaagctg

SEQ ID NO: 17145 - DNA, 268 bp, Homo sapiens; identical to SEQ ID NO: 2335
  chr2:239148252-239148520
  hypo

SEQ ID NO: 17146 - DNA, 31 bp, Homo sapiens; identical to SEQ ID NO: 2336
  chr2:239148798-239148829
  hypo

SEQ ID NO: 17147 - DNA, 31 bp, Homo sapiens
  chr2:239167113-239167144
  hypo
actcggctggaaatgccggcatacctgatga

SEQ ID NO: 17148 - DNA, 31 bp, Homo sapiens
  chr2:239188970-239189001
  hypo
tggagaacagcagggccgactagacctcgcc

SEQ ID NO: 17149 - DNA, 56 bp, Homo sapiens
  chr2:239211885-239211941
  hypo
ctttgtcgtctccatgcgcccgctcaggactcctgagttctcgaaaactcaaaact

SEQ ID NO: 17150 - DNA, 17 bp, Homo sapiens
  chr2:239265428-239265445
  hypo
tttttttttgaggtaga

SEQ ID NO: 17151 - DNA, 30 bp, Homo sapiens
  chr2:239306154-239306184
  hypo
agatagagaagctccgcacgtccatccaga

SEQ ID NO: 17152 - DNA, 30 bp, Homo sapiens
  chr2:239333817-239333847
  hypo
gatgcaaaggctaccgacacgcagaacgct

SEQ ID NO: 17153 - DNA, 374 bp, Homo sapiens
  chr2:239800561-239800935
  hypo
caagctgtatttgtgcacctgcgcaaggcgggaccactgaaatttagccctggagttcgttcacggagccgctgaccacttatcccttcctcttcagcatgtgcttgccgctgagccatgcgggtgctgtgttctctgttatgtgccggtgtgtggactggaacccgcctgcagcagccactcccacctgccctcgggaccctgactgtacatgggctgagccaggcaaccaccggaagggtgagtccttccccaggactcagcgggtgagagactccggctcacctcacggcggaacgcagacacctgagagcccgcaagcctcaggacagagagaaacagaggtccaggtggaaatgcggaggcggcacgag

SEQ ID NO: 17154 - DNA, 329 bp, Homo sapiens
  chr2:239888393-239888722
  hypo
ctggtgagtggtcagccaggacgtggctccccgtccctccggtgaccaggtgggcactggctcctgatggttcgaagccccggtcagcccccgccatccctaaactagtgacttccacttgcgttctcccccagggtcttcggggcaccccacgggagagagcacctgcaaggaccataacacgtgaggctgtgctgagtcctacgacaggcaggaacttgtacttggcccccggcgacccgggcgatttgcgggtcttcctcttggtttaacgaaggctctagcccggttccggagcccaccaagacgctgaagccatcagttcttgg

SEQ ID NO: 17155 - DNA, 800 bp, Homo sapiens
  chr2:239969831-239970631
  hypo
gaggaagagagcgcacgggcagaaaccagagctgggagggcaagtaacgcagtctttatttacaccacaagataacacgttgcgtgatgtggtacagaatactggactccagtgaagtggaaagaaggtgaccgtcagaagaggatatcattggtcggtgaaaatccacccacacaaaacaagacaagaatgagaaaaccaaacacaaaacctccaactccactgagcaaaagaaagaaccatcgggcacgtccagacaatccaagagaaacggattaaattacagaggtgaatggtggccacggccagtgcgcagctcacggcgggcgcgaacaggcatcaggtaggttacagtgtcgttacaacttggttttctaccacattccgtaagaagctcttgggtgagtaaggttcaagccccctgtatagatagatagatagatagatagatagatagattatatatgtttgtcattctcatcaattggaaaatagcgcctccactatggagcacacacggcaaaaaaaacaaacaaaaactgttcgctttctttttctttcaatagcagacttttaatcaatgccagagacaaagtgaggccgagctaagaacacgctcagcttcgttacaatgaagaaatggtttcctttcgatgcaaagtataattgtaaaccacagtgctcgcacagttcacgactgcttaaagtgaaatcttagccatacatcacctaaaagtaattaaaaagtcaacacagctgtgcggaaaaggggactctttcgagtccgcccagttctcaat

SEQ ID NO: 17156 - DNA, 117 bp, Homo sapiens
  chr2:239974452-239974569
  hypo
ttcggcagctcggccgcctgttgccacaggctcctttcttccacggcgtcccttgcgggacccgccagagtgtgcttggcttccgcgtgtccgtgtgtctgcgcgtcgccggcgtct

SEQ ID NO: 17157 - DNA, 139 bp, Homo sapiens
  chr2:239999814-239999953
  hypo
atcttcatcgtcatcgtcatctccctacaagcccccacccccagcggctcagactttactcagcaacttcaaagccgcgtctggcaccgggactggtttgaattaaggttcccttttctcctacgagtctccgggcctg

SEQ ID NO: 17158 - DNA, 30 bp, Homo sapiens
  chr2:240003159-240003189
  hypo
catttctgcggacccgccgccctgtgttgt

SEQ ID NO: 17159 - DNA, 180 bp, Homo sapiens
  chr2:240015871-240016051
  hypo
ggaccatgatggcccggatctgctcggacgctccgcctcagcttctcatggccgccctcgctattgccacccctgcccaggctgcatcaaggaggtcaggggccaggggagaactcttttgttattgagaagtttgattgcaagacctgacccttcctgtgtggacggatgggcagatgc

SEQ ID NO: 17160 - DNA, 30 bp, Homo sapiens
  chr2:240036882-240036912
  hypo
tctgccccggcagccggtccaggtagggct

SEQ ID NO: 17161 - DNA, 41 bp, Homo sapiens
  chr2:240064715-240064756
  hypo
agctcagcactgatcacgccctgtcacgcatggctcctgga

SEQ ID NO: 17162 - DNA, 30 bp, Homo sapiens
  chr2:240066385-240066415
  hypo
cgtaatttcagattcggttcagaagctgca

SEQ ID NO: 17163 - DNA, 30 bp, Homo sapiens
  chr2:240067064-240067094
  hypo
tactgggcgtgggtcggtttctgtgaacag

SEQ ID NO: 17164 - DNA, 31 bp, Homo sapiens
  chr2:240077540-240077571
  hypo
gggatgaggcactgcccgccctcagcacctg

SEQ ID NO: 17165 - DNA, 31 bp, Homo sapiens
  chr2:240097929-240097960
  hypo
cccagccttccgtgcccgcacccctccctct

SEQ ID NO: 17166 - DNA, 459 bp, Homo sapiens
  chr2:240116629-240117088
  hypo
tctgtgtctccagctcggtgcgcgtctccctacggacatggaagagtgcgggtcccctgaggagcagggaggcgaggggccctgcagagcagccaccttctgctgagaaggagcctggactcactggcacagtgcagccagagggggcttcggtgggcaccgaggctggggagtcgggctcaccaatgcgcagaatgctgtcgctgttctcactacggcacctcctgcattttcactcattgtggggaagggatgttcacactgccttggtttaccggactgccacgtgaaactccactatctgctaaagtaagctaagagcagagcagagaaaatcaacagcagcacacgccgcctgcatcccatgcgcacctccggccacggccattgctcacctctgaagacaatgctgcatttatgttggattcaataacacaaatggagcgttcacagggcaag

SEQ ID NO: 17167 - DNA, 140 bp, Homo sapiens
  chr2:240117515-240117655
  hypo
gagtccaatgggagacggtcagtgtgctgtgaatgaattctcaatcacaaacagaaaaacctgttagtctctctctctcgctcttttaaaataaatgttcataaagaagcatactgattttccacgacatgcttaggtcc

SEQ ID NO: 17168 - DNA, 165 bp, Homo sapiens
  chr2:240167569-240167734
  hypo
atgtgttcaagcagacacacacgtctggttcacagctcagcgagcaggccctgagcgtctgggaacgtgagagtgagcaacgcagaggcctggccccggcccagcagaaccggcaacccacactggctgcctgcgtccagtcccgccatggggtctgcctggtgc

SEQ ID NO: 17169 - DNA, 248 bp, Homo sapiens
  chr2:240168810-240169058
  hypo
ctggagactagctctgcggtctgctcgtggataaccgcgctccctcgctgccgggccacccgcacagccgggcaaaccaaaaggcccactttttcatgctgtacccaccacttctgtttccccgcaggcatcctactttctaaactaacaccttttcactcccgagaattctaacaaatattatacaattcctacccgcatctaccctccacctggacgtagaacccgtgtgggaggcagtcctgcag

SEQ ID NO: 17170 - DNA, 30 bp, Homo sapiens
  chr2:240170921-240170951
  hypo
agacagaggagacacggctgcaggtccgaa

SEQ ID NO: 17171 - DNA, 132 bp, Homo sapiens
  chr2:240172541-240172673
  hypo
agagctgccagagatgggactcgggggcggttttccctcacccttggcgggatcctcccctctgcagacccggggaacctgcccacgtgtgttcacgtgcccccgccacacgcctggttcacctcgagacct

SEQ ID NO: 17172 - DNA, 180 bp, Homo sapiens
  chr2:240212303-240212483
  hypo
gcgcacaagcagtcacgtacacacatgtacgcacacacaaccacacatgcgcgcacgcatgcattcagttcgcacgcgcatgcacacacacgcacgcacacactcacatacgcactcacgtacgcacacacgcgcacgcactcacacacacaccacacacgctcccgtgtttagtgtgtt

SEQ ID NO: 17173 - DNA, 73 bp, Homo sapiens
  chr2:240212705-240212778
  hypo
acaaaaggaaagagccgttcagaaggcagcgcctgcctccacctgctggtgcgtgcccgggacagggaggacg

SEQ ID NO: 17174 - DNA, 30 bp, Homo sapiens
  chr2:240226677-240226707
  hypo
aataggacagtcccgcgctttcttccagcc

SEQ ID NO: 17175 - DNA, 274 bp, Homo sapiens
  chr2:240226908-240227182
  hypo
gcatggccatgaccaagcagtcggttttcatccaggttggtagtcaggtttctgaaagcgatggcagtcgcctcagggctgacacggggagtctgcttggcacaccttcaccctcgttacattttctggacaatggtagggaacattccttactccgctggcctgtcagcttggctaagcctggtgcaagtggctcgctgtgggtccgcggctccattacgggggagtctgggtcatctgtgagcccaacagcgccctgcaggcacagacagcc

SEQ ID NO: 17176 - DNA, 47 bp, Homo sapiens
  chr2:240234572-240234619
  hypo
ctgcagagggagaccgggagcctctgaagaccgctccagctctgcac

SEQ ID NO: 17177 - DNA, 31 bp, Homo sapiens
  chr2:240247259-240247290
  hypo
ataaaaaatattggtgcggatgtgaagaaat

SEQ ID NO: 17178 - DNA, 237 bp, Homo sapiens
  chr2:240270778-240271015
  hypo
ccagggagtgagggcggcacgggcacccacaccaggccacacaggagcagggcccccatgccagatgggcaggcaagggtgagccaggcaggcaagagtgagccgggtgggcagggcgaaggacagggccagctagcagaggacggcacgagagacacacggagggaggggaggtgcagccaggtaggccccgaacaccacgttgccaggactcggctcctcggctcaaggaaaagg

SEQ ID NO: 17179 - DNA, 30 bp, Homo sapiens
  chr2:240271278-240271308
  hypo
ccaggagggagggcacggttctgggcaagc

SEQ ID NO: 17180 - DNA, 194 bp, Homo sapiens
  chr2:240271629-240271823
  hypo
tgggtggcaataaggcgcacacaacccaactcacatgggcaggacaggcccgggcaggccggtgatcaaactgaaccgcagcggctgaaattcccacagaaaaggccaaacaaacccagcaccccgcggtttccagagctgagcctcaaagaacccggcctgaaaaggttagagacaagcggatggagaaatat

SEQ ID NO: 17181 - DNA, 31 bp, Homo sapiens; identical to SEQ ID NO: 2337
  chr2:240294440-240294471
  hypo

SEQ ID NO: 17182 - DNA, 44 bp, Homo sapiens
  chr2:240312831-240312875
  hypo
ccaccatcacgagccgggctctgcataccgggtagggacgctgg

SEQ ID NO: 17183 - DNA, 121 bp, Homo sapiens
  chr2:240361082-240361203
  hypo
ttaatctgcagctgcacgaggcgagatgctgagccaccgcaatccaaacccttcagaagatgaagctgtgtgtgcacaaaatcgcctccttattgcattgctctctcggaggctggatgtg

SEQ ID NO: 17184 - DNA, 143 bp, Homo sapiens; identical to SEQ ID NO: 2338
  chr2:240402417-240402560
  hypo

SEQ ID NO: 17185 - DNA, 260 bp, Homo sapiens
  chr2:240599652-240599912
  hypo
tacctgaggtcccaggaggcccgcttcagggcacccttctgacctgagacgggactcttgagtcccagccagcgtggccgatgcgcaatcccttggtcaaatgcccttcggtgggtcagcacctccggcccatcatgctgtgctggtcagtccccgtgggcgtattcttacccgttcagcctggcagctcttccgggtcccacaagagtctctgagcacagcggacgccccttcttcacgagctccacaccctgttctga

SEQ ID NO: 17186 - DNA, 35 bp, Homo sapiens
  chr2:240612327-240612362
  hypo
gccgaggagccggacgcagcgagagccaggcggag

SEQ ID NO: 17187 - DNA, 563 bp, Homo sapiens
  chr2:240658160-240658723
  hypo
tctccttggtgaggtcgcgtggaggcagtgatgtctgtcggtaccccaaggcctgtgtggaggcagcaaagtgtctgggggacggactggtttcccggctttgctcaagctccgatgcccacgggaggagggtaggaggcagtcgctggtctcggtaggacacgggatgccacgcatggctggttggccaatctgtgtttgggtcaacgcgcccctgtgtgctcggacctggaactgcacctttgtcgggcaccctgagataggaagggctcacaccctgacaggtgcgatcagtcagggcagggaggcgggcagcaggactggccactggccccgataggtgctggtgagctgggcagacactcggggtcttcctcccaccctccaccctgaggacaaggcaggacccccaggagcccccaacccaacgccccccaacccagcgcctcgcttcttccctctcccctccggcctccggaatgtggcgcccagcgacacagacaagcccatcctcaaaagcaccgggtctttcaaggcaggagctctgacgtcatcggagtcac

SEQ ID NO: 17188 - DNA, 224 bp, Homo sapiens
  chr2:240700323-240700547
  hypo
ccaggcagctccccagcctcccgccagcatcccctcggggcctgggaacagcactgcgagccggccgcacctgtgctggaaatcgccctcaggctgccgagtaattagttccacggttggatgcaggcccgtgctgtgacttgaagtcagtcggcgtggaacacatttcccatgtcgaggctgggcctgaccacccttctcacggtaaaggaggaagaaaattg

SEQ ID NO: 17189 - DNA, 207 bp, Homo sapiens
  chr2:240733614-240733821
  hypo
gtcaggagagcagagtgagtgcgaacgcttcgccttttgtgttatgcctttgtacctcctttcacgaggacaccaacagcaagttcctgtatgacacaccttctcggatgatggctgcaggtctgtcccgtcacggcacacacgcgggaatctgtagctgccccaatcctaaagtgtcccgtgttcgaggacagtcaggggcccttg

SEQ ID NO: 17190 - DNA, 106 bp, Homo sapiens
  chr2:240734676-240734782
  hypo
ccaccctgcccagctcactggggaaacgtctactggaggaacgtcaaccttagctttggacatcttggtcacgtttgcgccccacgccctggctacccattctcct

SEQ ID NO: 17191 - DNA, 139 bp, Homo sapiens
  chr2:240809617-240809756
  hypo
cacctgggacacctgtcactccgatggagaatcctggacacgcagcctcacctgggacacctgtcactccgatggagaatcctggacacgcagcctcacctgggacacctgtcactccgaaggagaatcctggacatgc

SEQ ID NO: 17192 - DNA, 30 bp, Homo sapiens
  chr2:240844757-240844787
  hypo
cccggctcaaagggcgtctaggttccaggg

SEQ ID NO: 17193 - DNA, 30 bp, Homo sapiens
  chr2:241069129-241069159
  hypo
aaaaacaactctcacgaaatgaattgcaag

SEQ ID NO: 17194 - DNA, 31 bp, Homo sapiens
  chr2:241073763-241073794
  hypo
gcgaaattgagcccatcgcctccactcagga

SEQ ID NO: 17195 - DNA, 31 bp, Homo sapiens
  chr2:241100736-241100767
  hypo
aggcttcttaggaggccggaccctcaggcac

SEQ ID NO: 17196 - DNA, 31 bp, Homo sapiens
  chr2:241157269-241157300
  hypo
aacaggtagcatgcaccgcctttccgcacct

SEQ ID NO: 17197 - DNA, 286 bp, Homo sapiens
  chr2:241286543-241286829
  hypo
tgcatccagaaccagagcccccgccgccagccctaccggggattcaggtgagtggccaagagcctggctggacttcacggggtatccagccgcggcacaggcagtcaggcccgccatgaagtggcacttggggcaacccgcagagcccagccaaagaaagcacgtgtttcggtgagaagcgagtgtggttgttctgcagggaaagaaaccctcccgggcgtgcagagcagatgagctcactgaacaattcgggggtgatttcagcgctaaactaacctgggctctc

SEQ ID NO: 17198 - DNA, 195 bp, Homo sapiens
  chr2:241328245-241328440
  hypo
atgacaggggttaaatcgggcagaggtggggttgggcaggagggagggggacggttgcaggagggaggggaccctgtgcaccacccaattctggcttgagcagctggtggcatgggacactccggaagactcctggggactccggggtcctgagaagcatccaggtgagatcctgggagccgctggtgggtgggg

SEQ ID NO: 17199 - DNA, 37 bp, Homo sapiens; identical to SEQ ID NO: 2339
  chr2:241374578-241374615
  hypo

SEQ ID NO: 17200 - DNA, 255 bp, Homo sapiens; identical to SEQ ID NO: 2340
  chr2:241375328-241375583
  hypo

SEQ ID NO: 17201 - DNA, 31 bp, Homo sapiens
  chr2:241384030-241384061
  hypo
aagtctgtggcctgtgcgcaccttcagacga

SEQ ID NO: 17202 - DNA, 145 bp, Homo sapiens; identical to SEQ ID NO: 2342
  chr2:241393217-241393362
  hypo

SEQ ID NO: 17203 - DNA, 30 bp, Homo sapiens
  chr2:241401855-241401885
  hypo
ctgggcaagcaggccgaggcgctgcggccc

SEQ ID NO: 17204 - DNA, 30 bp, Homo sapiens
  chr2:241405181-241405211
  hypo
agtgagtctgaggacgctgtgctgcccagg

SEQ ID NO: 17205 - DNA, 30 bp, Homo sapiens
  chr2:241407583-241407613
  hypo
gtgtttggggtgaacgtgcagcccctgcca

SEQ ID NO: 17206 - DNA, 30 bp, Homo sapiens
  chr2:241440208-241440238
  hypo
tcaaggctaggccacgcctcggggagccct

SEQ ID NO: 17207 - DNA, 30 bp, Homo sapiens
  chr2:241451552-241451582
  hypo
tgcctgactttgttcgagcctctccctgca

SEQ ID NO: 17208 - DNA, 30 bp, Homo sapiens
  chr2:241516339-241516369
  hypo
tgcagattgtggtccgcaacgactactatc

SEQ ID NO: 17209 - DNA, 30 bp, Homo sapiens
  chr2:241533679-241533709
  hypo
ggcagacatcatcacgggctcgggcagcag

SEQ ID NO: 17210 - DNA, 225 bp, Homo sapiens
  chr2:241542035-241542260
  hypo
gccaccagcttcctgtggcaccgctgccactcccgccaggctcctggggcaccgccaccactcccgccaggctcctggggcaccgccggccactcccgccaggctcctggggcaccgccgcccactccctccaggctcctggggcaccgccgccactcccgccaggctcctggggcaccgccgccactcctgccagcctcctgcggcacagctgccactccctat

SEQ ID NO: 17211 - DNA, 49 bp, Homo sapiens
  chr2:241543041-241543090
  hypo
actggactggacaggacgaccaccttgtgccaggcgccagctatctccc

SEQ ID NO: 17212 - DNA, 195 bp, Homo sapiens
  chr2:241544974-241545169
  hypo
cagagcttctggggtgagtgtcgagatcctgtgtcctgagagcggtagtcagggagagggctggtcggggcagggctgcccgggcaggacacaggatgcggccggccaggctggggccaaggtgttcagacctggactttgggctcgtgctttcttcatggttgcgccttgctcgctgtcccttggagtcttcat

SEQ ID NO: 17213 - DNA, 48 bp, Homo sapiens
  chr2:241555875-241555923
  hypo
cctgccaatctcctgtcgactgcgagtcagctccgatacttcaccaga

SEQ ID NO: 17214 - DNA, 31 bp, Homo sapiens
  chr2:241580623-241580654
  hypo
aacagtttagtttcttcgtgaaggttcttct

SEQ ID NO: 17215 - DNA, 31 bp, Homo sapiens
  chr2:241580866-241580897
  hypo
ccccgaagctcctacacgctcggtcggggcc

SEQ ID NO: 17216 - DNA, 30 bp, Homo sapiens
  chr2:241581262-241581292
  hypo
agctcctacacgctcggtcggggcccagtg

SEQ ID NO: 17217 - DNA, 41 bp, Homo sapiens
  chr2:241655277-241655318
  hypo
gatgtaactgctcccacgggccacggcgggagaggggctct

SEQ ID NO: 17218 - DNA, 31 bp, Homo sapiens
  chr2:241656740-241656771
  hypo
gatgggctgggcctgccggctgtcacgggag

SEQ ID NO: 17219 - DNA, 30 bp, Homo sapiens
  chr2:241664424-241664454
  hypo
cccctcctcccatccgctgcaggctggccc

SEQ ID NO: 17220 - DNA, 340 bp, Homo sapiens
  chr2:241689803-241690143
  hypo
caggggctccaatgccacacacggcctttggcccacacgcacctgagatggcctggacggccacgcggaggaagcccttcacctcgcccttctcgctgacgattgccacacggtgtaccaggggaacggggtacagcaggttgctcaggtacacgaaggccctggggagaagcagaggcggcggtcatgggccacccctccacgcatgttctgaacggcagcggtggcagcatggcctggctcacgacacaacatggagctgcaaagcagagggaagccgccggacaggacagccaaggccaggacagcaagagcgggcggggacaggcagggcaggcac

SEQ ID NO: 17221 - DNA, 800 bp, Homo sapiens
  chr2:241721414-241722214
  hypo
ccccgtggtggcgcccgccctgtctcacgcattcccacgctggctcactccgttcctgccggtccctcgaacgctttcacggctgcccacgcggttcctcacacagtccccagcgtcgccccaggcagcttcacacgtggcgcgctccgcggcacctccgactccacacgcgcccgcctccccctgtggccccgtcacgcctacggctgctcagagtccagcacgcctgtcacccgcttcctctcagggctccccagccctctccatgtccgaggggctcctccgcgcccctttcagctcctcccagggcccccacgccccccgggccacactttcccacctcggtgtctcccagcagcccccgccccaggccctgccgtgaggccgccccggacgccctccgtccccgcaggcacaggcaccgcacggggcctcccacacccgctttcttccttcccgggatccacccccacgtcccccatctcccagcgcactcactgcccgccccgcccctcaccacagggcgccaatgcagggcagacaccgccaccagcctcccgcacctgccccggggctgaaggaagccgcttaccttgttgggtccggagtcctgaaaaggaaaagacagagagaggctgaggcccggagcgaagctggcgcgggctgtgggggcggaagagcaggcggcccggctgcctcgccctggccatgactcaggctctaccaccccgtggtctcctagacagcagctcccccaggcagggtccctccagggccgcccttcccgggcccaggcctgg

SEQ ID NO: 17222 - DNA, 325 bp, Homo sapiens
  chr2:241724361-241724686
  hypo
agccactgcccttggtggcaccgcctgtgaggccactcactcaccttctccgtggtgatattggtctctgcgtcatggcgcttctgggtgaagatgatgttgaagacggcgtgggagcgactgctggtctcattcatgttggtggccgccacggtcctgaggagcagaaagccacgcacggttacccctcgtcctgtggccgggtgcgagatcgccggtggtgccagccctctgaaccaggtcatcggggggggcagttcccccagaccccaggggccgccctgctgggcctggcactgatggcgcctcctgccaggactccagc

SEQ ID NO: 17223 - DNA, 31 bp, Homo sapiens
  chr2:241750152-241750183
  hypo
gatgacactccaggagcgatcagcaccgaat

SEQ ID NO: 17224 - DNA, 31 bp, Homo sapiens
  chr2:241789957-241789988
  hypo
aggggccagagccctgcgtgagaaagcccca

SEQ ID NO: 17225 - DNA, 31 bp, Homo sapiens
  chr2:241838794-241838825
  hypo
aatgcctgcagtactccgggaaggagaccct

SEQ ID NO: 17226 - DNA, 30 bp, Homo sapiens
  chr2:241858433-241858463
  hypo
gacagtcctgggcccggggctgggcaaggt

SEQ ID NO: 17227 - DNA, 30 bp, Homo sapiens
  chr2:241864767-241864797
  hypo
ctctccgcgtcaccccgccccgcgaaaggc

SEQ ID NO: 17228 - DNA, 104 bp, Homo sapiens
  chr2:241865149-241865253
  hypo
cctctgtcaggtgaacgcgctcctgcgggagcagctggaacatatgaagaaggccaatgacgcgctgggccgggagctggccgggatgacgggcagcgtgcagc

SEQ ID NO: 17229 - DNA, 30 bp, Homo sapiens
  chr2:241865564-241865594
  hypo
ctctggtgtggaccacgctctttggagagg

SEQ ID NO: 17230 - DNA, 31 bp, Homo sapiens
  chr2:241872217-241872248
  hypo
tccccccatcaaggggcgtccccaccacaca

SEQ ID NO: 17231 - DNA, 298 bp, Homo sapiens
  chr2:241896819-241897117
  hypo
aacacaggccatggtgccaggcgcgggaggcagcccccttctctgcccattctgaacgggagcccttctcactgactgcacagaggcacgcgcaggccgcctgctggggggccggggcgtccaggcagcggggccttgggggacgctcggtgactcggagccgggatggagggcttgtgccccatccccagggcactgcgcagcgggagagggcgctgcaatgaggaggcggctgctggagtgtcgcttcacctcctcctgcctgatgccacaacccggactcctagtcccttcaagc

SEQ ID NO: 17232 - DNA, 31 bp, Homo sapiens
  chr2:241937929-241937960
  hypo
ctcccacggggcctggcgctttaagagacgc

SEQ ID NO: 17233 - DNA, 162 bp, Homo sapiens
  chr2:241989255-241989417
  hypo
ggacccctgcttcaacggaggctcctgcgatgcccatgacgactcctacacctgcgagtgcccgcgcgggttccacggcaagcactgcgagaaaggtatggcgggcaggggcgtccgggccggcgtcagcaccctggagagcgcccgcggtccgccgtcctg

SEQ ID NO: 17234 - DNA, 30 bp, Homo sapiens
  chr2:241991115-241991145
  hypo
cagcagcctggccccgttcatctgcctctc

SEQ ID NO: 17235 - DNA, 30 bp, Homo sapiens
  chr2:241992697-241992727
  hypo
gtctgccagccacacggtgtctggagtgag

SEQ ID NO: 17236 - DNA, 604 bp, Homo sapiens
  chr2:242004518-242005122
  hypo
gtgggcttgaaacacggtcacacattcaaaagtgtgaccctcctggaggtacgtggccagggacaaagaaggactctgccagcgatggctgtgtcaggcccaagagccagacccggctgagccgccgacgggagccaggcatgcatagctaacggctgaccagtcccctccccttgttttgacccaaaccctgaagagctcttcccaccgacggccctcaagatggagagagtggaggagagtggggtctctatctcctggaacccgcccaatggtccagccgccaggcagatgcttgatggctacgcggtcacctacgtctcctccgacggctcctaccgccgcacagactttgtggacaggacccgctcctcgcaccagctccaggccctggcggccggcagggcctacaacatctccgtcttctcagtgaagcgaaacagtaacaacaagaatgacatcagcaggcctgccgtgctgctggcccgcacgcgtgagtgtccccgagcctggccgtccctgcccagcccctgcccctcgagggcagcgctggccccggcacctgcagggcggctgtcatgccgtccaccctcctagttcttgc

SEQ ID NO: 17237 - DNA, 30 bp, Homo sapiens
  chr2:242009498-242009528
  hypo
tcctacacggtgcgcgacctgctgccggga

SEQ ID NO: 17238 - DNA, 332 bp, Homo sapiens
  chr2:242010982-242011314
  hypo
ctctgcagcccccagggatggcgctgacagacgctggcaccagggaggacaccaccctcgggtgctcaagaacagaccgcccccggcgcgcctgccggagctgcgcctgctcaatgaccacagcgcccccgagacccccacccagccccccaggtacatgccccacccatcggccccatcgcccgaggcggcgctcggactgtggtgaccctcccaccctctctgcaggttctcggagcttgtggacggcagaggaagagtgagcgccaggttcggtggctcacccagcaaagcagccaccgtgagatcacgtgagtgccagggcctcccca

SEQ ID NO: 17239 - DNA, 31 bp, Homo sapiens
  chr2:242072560-242072591
  hypo
ctctcaccaccccaggcgtcccaggtccaac

SEQ ID NO: 17240 - DNA, 31 bp, Homo sapiens
  chr2:242074733-242074764
  hypo
ccagaatgccaaaatccgagcaccctcaagt

SEQ ID NO: 17241 - DNA, 93 bp, Homo sapiens
  chr2:242076562-242076655
  hypo
aggggccgcctcaccggtggtcgcctcctcgctgctgggttgggatttcagctttaagctcagagggaaggtggtaccgtccctggctcttcc

SEQ ID NO: 17242 - DNA, 30 bp, Homo sapiens
  chr2:242143523-242143553
  hypo
ccggggcacagcatcggggcagagggacag

SEQ ID NO: 17243 - DNA, 30 bp, Homo sapiens
  chr2:242165215-242165245
  hypo
cggccggagcatggcggacagcacacacgg

SEQ ID NO: 17244 - DNA, 31 bp, Homo sapiens
  chr2:242167883-242167914
  hypo
ccggatggcctgtgggcggggtggaagtgcc

SEQ ID NO: 17245 - DNA, 360 bp, Homo sapiens
  chr2:242169866-242170226
  hypo
tgttcccagcagacagagggccgcagcacgtactgtgcgctcttgcatgaaattcccacccacagaggacgagctcgccaggcagctgtcaaggagatgccctcctaatggccaccgtggcagtgcagcctcacacaggccgtcgcctgcactgacccgtggtgtccatgaggacagttccactgccagccctggggttgtggcctcatcatcttgaggggaaggccatgccctgctctttcttctggccagccaggtgcccccggtgagagaggattctcacccactgtgcttccagccggctcaccttgaattcgtccatgattttgcgaatggctttgccgcgggcaccaatgatgc

SEQ ID NO: 17246 - DNA, 31 bp, Homo sapiens
  chr2:242182172-242182203
  hypo
ttggtggtgatgaacacgcaggcctagagcc

SEQ ID NO: 17247 - DNA, 139 bp, Homo sapiens
  chr2:242190664-242190803
  hypo
tgtcaggcctaaacaaacgctacagttaaccaaaaccaaaacaaaaccgtaaaagcaagtttatggtgtatgtgtggttcaagtagtgcgcaaaaaggtcactttgtgcctacagactctcgtcgctgtcacgtaaaat

SEQ ID NO: 17248 - DNA, 23 bp, Homo sapiens
  chr2:242259919-242259942
  hypo
cttttgcggccaagcacggtggc

SEQ ID NO: 17249 - DNA, 30 bp, Homo sapiens; identical to SEQ ID NO: 2351
  chr2:242269506-242269536
  hypo

SEQ ID NO: 17250 - DNA, 99 bp, Homo sapiens
  chr2:242350118-242350217
  hypo
acaggcgggagccatcgcccctggccaatttcttttttttattgttcacatcagagtgccttagtgtgttcagcacttcctttgcgctctcccatgtgt

SEQ ID NO: 17251 - DNA, 152 bp, Homo sapiens
  chr2:242350469-242350621
  hypo
aagagagacctgctggaagagcgtttgacctgtgctgacaccacagcggcccttctcacgtcccatctcctgcagtgtgagtatctccccgccagcggggagcattcactgaccatggcacagatatacccgcactcagaactacaattagt

SEQ ID NO: 17252 - DNA, 262 bp, Homo sapiens
  chr2:242353961-242354223
  hypo
ggggagctggtttgaacggcacagactgaggtgcctacccatacagatcttaccttaccccgtaagattgtgtggatttcgtgcacctcaccactcccagtgtgggggatctcttgtgtttgcaggggagtgccttttgtgtgcccgacagcatggcagtcatgagatatacagatgcgtttctacagatgagaatgtgtgcagtgtagcgggagcatagctcatacgctgtgagctgaaagaaggccgagggcaggctcaa

SEQ ID NO: 17253 - DNA, 30 bp, Homo sapiens
  chr2:242357707-242357737
  hypo
ccttctctgacacacgtgtgactgtcctcc

SEQ ID NO: 17254 - DNA, 30 bp, Homo sapiens
  chr2:242438805-242438835
  hypo
gctccgagagtagcacgttggcagctgctt

SEQ ID NO: 17255 - DNA, 30 bp, Homo sapiens
  chr2:242439074-242439104
  hypo
aatcccaacgacaagcgacttcgcccactg

SEQ ID NO: 17256 - DNA, 288 bp, Homo sapiens
  chr2:242439376-242439664
  hypo
agctggtttcctcagcgtacaaggaaaccgttacaagtagtatcttctggaaagggagcgagacaggactgctcagtttcagggtggccacaaggttctctatactccagaccctgggcaccactagccacttgcccctcacaggccccggcctctctaaggtcagtggggctcaggacgttacaagagccacatccacccccagcaggacctttgatgtctcggtggatcttgcgttcggagtgcagataatccaggcccttcagaatctcccgcaggatcgtggca

SEQ ID NO: 17257 - DNA, 30 bp, Homo sapiens
  chr2:242479645-242479675
  hypo
aggtggccctgggtcgtccgaccatcctgg

SEQ ID NO: 17258 - DNA, 253 bp, Homo sapiens
  chr2:242523901-242524154
  hypo
tcttgagcctgcagaggctcacggccacacccacttctgccgcagggactgtctgttgaggagccgaaccgttgaggcacagtagccaggccctcccgagggctccagaagctctaggtttacggggtcaccttcttgtaggtgacgtgaagatgctgagtcattggctgtgtcgtggttgccatggagaccgtctgctcaagtttgccttcagaattcagcctgaacttccgggtgatctgagcaggagaat

SEQ ID NO: 17259 - DNA, 403 bp, Homo sapiens
  chr2:242572244-242572647
  hypo
agaaatgctcaggggacgctggccaccttgcagagaaacccctcctaacgggaagggaacatgggtacgcgaggctccggtactgaccgcggctgggcgacagcaggctacttggataggggacgctcactctcctcagctcatccagcttctcctgtagcttccgcacctggctgtcggagcggctgaccctctgccgcaggctcttcagctcgccgttcttcttctccacctgctcccgcaggcagcacacctggctcttgttctgccgggaggagaagcagtaggagtgcagtgagtcgatgagcttgcaggcccctgacgccgacaggatgacctcgttgatggacatggggctggcgtcgctgtgctcgctctgcacggcttccgtggctggctttgg

SEQ ID NO: 17260 - DNA, 30 bp, Homo sapiens
  chr2:242585270-242585300
  hypo
ggagggccggagtgcgtttctctggacgga

SEQ ID NO: 17261 - DNA, 31 bp, Homo sapiens
  chr2:242608420-242608451
  hypo
cctacatttaaacacacgggcggcccctcca

SEQ ID NO: 17262 - DNA, 185 bp, Homo sapiens
  chr2:242610781-242610966
  hypo
cacatctggcctgccccgacgtcctgaacctgtccctaggtgagagctgccaagtccaggtggggtccctcggaggtacgatctgtgcccttgcttccccagtcctggcccccttggttttgaccattaaggtgtgtgtgagcctgagccgtgagcacttggcagtggttcgcctgtgagaccag

SEQ ID NO: 17263 - DNA, 30 bp, Homo sapiens
  chr2:242611927-242611957
  hypo
ccagagtgttctctcgacactgccagcccc

SEQ ID NO: 17264 - DNA, 53 bp, Homo sapiens
  chr2:242616804-242616857
  hypo
actgctatcccacctgcgttccgggaaacgaaaagctgcgtgaccagcatcat

SEQ ID NO: 17265 - DNA, 31 bp, Homo sapiens
  chr2:242617236-242617267
  hypo
atgcccagcgagaggccgcaccagaggacac

SEQ ID NO: 17266 - DNA, 702 bp, Homo sapiens
  chr2:242617755-242618457
  hypo
aggaccagacggaaacggcagcagctttgctgacacaactgtgccagccaccacggtgtcatcctgagccacttctccacgcttcctagtgtgcaattctgggattctcaccttccagttcaaagtcgtgtctttcatgagctggtggaaacaccggagcgcccgctcctggaaagccccgttctcatagcgctcatggccaaacgctccccgcttggcagcatccgccagctgtaactggaggaacaggaccaggtcgggtttgggaaggcccacgtctggctgtttacaccaatctagggaaaaattctgccaagaaagaacccaacagttaaagcttagtgtagtctaggtttttgtttcgaaagtcgtaaaaacaggaaaaaatgaggggacatttggtgaggtaccaagatgtgagactgtttatattgtggctcgtttaatttttagaacctcaaacgtgtcggtttctccagtgtcacctttgtttttcctttgtaaacagacaagtggacagaaaagtaggtagatagaacggctgccagtccccgccacccacagcccaggccccatggaggccctcccagcacagctacaggcctgctggccaggagcaaacagtctatgtacagaacccctggagacccccggcctagaacgcctgcagcacagagcagctgggtccggacacaggcacga

SEQ ID NO: 17267 - DNA, 30 bp, Homo sapiens
  chr2:242618744-242618774
  hypo
ctcccacagagcctgcggctctgtcagctg

SEQ ID NO: 17268 - DNA, 30 bp, Homo sapiens
  chr2:242637207-242637237
  hypo
gcacaaggcactgggcgtggtggctcacgc

SEQ ID NO: 17269 - DNA, 25 bp, Homo sapiens
  chr2:242637569-242637594
  hypo
atgtatcgggcccgccgtggtggct

SEQ ID NO: 17270 - DNA, 25 bp, Homo sapiens
  chr2:242637773-242637798
  hypo
ggcgtggatccgggaggtggagctt

SEQ ID NO: 17271 - DNA, 30 bp, Homo sapiens
  chr2:242665319-242665349
  hypo
aggcccgcagctcccggtcgaggggactcc

SEQ ID NO: 17272 - DNA, 160 bp, Homo sapiens
  chr2:242713967-242714127
  hypo
tggccctgggcttgcccgcccgcctgcagtgtcggctgaagagggtaacgtgcgtgcgccccggctgctcccggctgctcccggctgctccccggctgctccccgctgctcccggctgctccccggctgctccccggctgctccccgctgctcccggctg

SEQ ID NO: 17273 - DNA, 189 bp, Homo sapiens
  chr2:242735067-242735256
  hypo
gggtcttgggaagtccgcagaagtggcccaatggcagagcaggagctccgctctcagtgtggggcctcgtttgggtttgggaaaacatgtcctctctcacgaagacgtgggtgtctccagcgggaccctgatcccgcgtggggcgcatggccctctctgctctgcggcccctctcgctctcctctctgt

SEQ ID NO: 17274 - DNA, 30 bp, Homo sapiens
  chr2:242754581-242754611
  hypo
tgtgccgggctgtgcgtgctcacgctcggc

SEQ ID NO: 17275 - DNA, 762 bp, Homo sapiens
  chr2:242755672-242756434
  hypo
cagcagagcatgggggtccctcgtaccccttcacggacagtgctcttcgagcgggagaggacgggcctgacctaccgcgtgccctcgctgctccccgtgccccccgggcccaccctgctggcctttgtggagcagcggctcagccctgacgactcccacgcccaccgcctggtgctgaggaggggcacgctggccgggggctccgtgcgggtgagtgagtggccgggggctctgtgtgggtgtagtggccggatctgctggggctgcacaccccgggatggggcgggggtggcggcggcaggcagatgcccgaggtagagatgagcaaaccaggctcagcgatcctgggtgccctgcggggggctgtgcccaggtccctggacgtcctggtcagcggaacttcctcctctgggcagtggggtgccctgcacgtgctggggacagcagccctggcggagcaccggtccatgaacccctgccctgtgcacgatgctggcacgggcaccgtcttcctcttcttcatcgcggtgctgggccacacgcctgaggccgtgcagatcgccacgggaaggaacgccgcgcgcctctgctgtgtggccagccgtgacgccggcctctcgtggggcagcgcccgggacctcaccgaggaggccatcggtggtgccgtgcagggtaggcgggcagggtgccggtctgggtccctttgattggccacggtccacatggaagggagattccagcgggaaattgccattctgcccc

SEQ ID NO: 17276 - DNA, 30 bp, Homo sapiens
  chr2:242757210-242757240
  hypo
gggaggactcagggcggctgggatgagtcg

SEQ ID NO: 17277 - DNA, 411 bp, Homo sapiens
  chr2:242762673-242763084
  hypo
aggcagaggctgcagtgatgccgccaccagccacgggggctgctcagagctggaagaggctgaaggaccctgcgctggagccttcagagagggtgcgggcctgtcacccttggcttcagacggcctccagagccgcgagaggacgcatttgcattgcttcagcctccagtcggtgagatttgttgcggcagcctgggaagcagcacaccttcctgcctttgccgtctgtccgtccgtccgtctgtccacatgggcctcagaccccgggggatcctggccgtcactgcccggccatgtgcagcctcggcctgtgtcagacagacttgggctcgaggtccccaggagctccggtcgccgtggtggagcctctcgatgtctcgggctgtctgcggctggagcaccctctgagct

SEQ ID NO: 17278 - DNA, 2 bp, Homo sapiens
  chr2:242791133-242791135
  hypo
gt

SEQ ID NO: 17279 - DNA, 117 bp, Homo sapiens
  chr2:242794839-242794956
  hypo
acagaggtaggtgccgctgtcattgcgccgggccctgaccacgctcatgtggaagtcacgcccgttgggcagttgtgtgacacggaagcggcagtcctggccgggctggctgcggtc

SEQ ID NO: 17280 - DNA, 30 bp, Homo sapiens
  chr2:242821604-242821634
  hypo
agagctgcttcacccgcagctttggcgagg

SEQ ID NO: 17281 - DNA, 222 bp, Homo sapiens
  chr2:242832984-242833206
  hypo
caccaacagtccctgcggggacctttcccggacacccggccttctcggcggtgaggcaggtggcggcaccgacaggcccgggggggacctttcccggacacccagcctcctcggtggcgaggcaggtggcggcaccgacaggcccggcggggacctttcccggacacctggcctccttggcaaggcaggtggcggcaccaacaggcccgggggggacctttc

SEQ ID NO: 17282 - DNA, 195 bp, Homo sapiens
  chr2:242833632-242833827
  hypo
cgccaagcactgtggcgggcacaggcggagcctggcggcttcacgcccacaccggcagctcctccctcagcccctcgcccgccgctcccaagtccggcagttctggagcacgggaagctctctgggggttgctgggcagcaggacctggtctgagatgactgagtctgcccaggtcttcacgcgcctaactgagc

SEQ ID NO: 17283 - DNA, 30 bp, Homo sapiens
  chr2:242845217-242845247
  hypo
gttcctaactgaagcgctcgcccatgtccg

SEQ ID NO: 17284 - DNA, 160 bp, Homo sapiens
  chr2:242874826-242874986
  hypo
aggacggcgctgtgcggctctaggtggaatgcactgggctggccctgccggctatctcagccccgagacccacgaaggccctggccgtgctgtcctcacatcagcccggcccttttcgtccggcgtggagagttccagcctttacggttgtccagggccg

SEQ ID NO: 17285 - DNA, 30 bp, Homo sapiens
  chr2:242887923-242887953
  hypo
ggtcacccctgacccgttttacagacctca

SEQ ID NO: 17286 - DNA, 31 bp, Homo sapiens
  chr2:242895762-242895793
  hypo
tctgacccagggagcccgcagcaggcaggtc

SEQ ID NO: 17287 - DNA, 30 bp, Homo sapiens
  chr2:242945967-242945997
  hypo
actcacagtgtcctcggcactgccctccgt

SEQ ID NO: 17288 - DNA, 30 bp, Homo sapiens
  chr2:242997743-242997773
  hypo
gctctgggcctggtcgcccaagggctttgc

SEQ ID NO: 17289 - DNA, 210 bp, Homo sapiens
  chr3:3179062-3179272
  hypo
aaggagatgtttcagtcggctgggattcggatgataaacaacagaggagaaaagcacggaacaattactgccagggtgagtcaaaagtttgacaggtaattacattgcttttttggtaatttttaaaaacttaattttctctagttaaaagcaaataacgaaaagtctaataaaaaagtcagtctcttctatgcccgtcataaaccctgc

SEQ ID NO: 17290 - DNA, 166 bp, Homo sapiens
  chr3:3786389-3786555
  hypo
ttttctaacttcaaagggagccgatcctctgattactggtaagcagcattgagagcgtgagtctttgtgtctctgtggaaccaattatcggtaggcctggaaaattaaaaagttgaattatgttctcgtggatgcatattcagacggtaggcactagtgcagagaa

SEQ ID NO: 17291 - DNA, 1856 bp, Homo sapiens; identical to SEQ ID NO: 2366
  chr3:3840368-3842224
  hypo

SEQ ID NO: 17292 - DNA, 233 bp, Homo sapiens
  chr3:4347746-4347979
  hypo
agaatacaacaaacagaaaaacgcactctaccctcaaggtgtttacaactgtcacgattagcttcaatattcctgccgtgcgtgtgtgtgtgcgtttgagactattctataaatctgtttccaatcttgagtcatatttttctttgccatatccaagaacaatctgtaaaactatgtgcccgacgtatttttttaattaactcactttaagcgttaaattatttaaaaataaa

SEQ ID NO: 17293 - DNA, 67 bp, Homo sapiens
  chr3:4755960-4756027
  hypo
ctttggcctgggtgctgaggacgacaccacggtgagtgtggaggccgtttccctcctcccatccctg

SEQ ID NO: 17294 - DNA, 366 bp, Homo sapiens; identical to SEQ ID NO: 2367
  chr3:4910323-4910689
  hypo

SEQ ID NO: 17295 - DNA, 38 bp, Homo sapiens
  chr3:4993605-4993643
  hypo
tagctcttaggcactccgctcctttttttttcttttga

SEQ ID NO: 17296 - DNA, 172 bp, Homo sapiens; identical to SEQ ID NO: 2368
  chr3:5019060-5019232
  hypo

SEQ ID NO: 17297 - DNA, 31 bp, Homo sapiens; identical to SEQ ID NO: 2369
  chr3:5020396-5020427
  hypo

SEQ ID NO: 17298 - DNA, 85 bp, Homo sapiens
  chr3:6811741-6811826
  hypo
gaacccggtacctcagatggaaatgcagaaatcacccgtattcggccatcttggctcctcccccgtaagtatgcagtgtctttct

SEQ ID NO: 17299 - DNA, 31 bp, Homo sapiens; identical to SEQ ID NO: 2374
  chr3:8543387-8543418
  hypo

SEQ ID NO: 17300 - DNA, 44 bp, Homo sapiens
  chr3:8595737-8595781
  hypo
tatttttttagatacacggctctcactctctcacccaggctgga

SEQ ID NO: 17301 - DNA, 96 bp, Homo sapiens
  chr3:8595840-8595936
  hypo
ccgcctcaacctcccaagtaataaacctctttaactcttggtaacaaccagtgagagaggttggggttgtgatacccatttcgcagatgaggaccc

SEQ ID NO: 17302 - DNA, 11 bp, Homo sapiens
  chr3:8651966-8651977
  hypo
atgtctttact

SEQ ID NO: 17303 - DNA, 46 bp, Homo sapiens
  chr3:8669370-8669416
  hypo
gagatgcccctaccttcgcctgccggaccccgcgcacagctgacat

SEQ ID NO: 17304 - DNA, 30 bp, Homo sapiens
  chr3:9032616-9032646
  hypo
gctagtctaaggagcgggtacagtaaagcc

SEQ ID NO: 17305 - DNA, 31 bp, Homo sapiens
  chr3:9188566-9188597
  hypo
gcctctggagacctgacgcccagcggtggca

SEQ ID NO: 17306 - DNA, 155 bp, Homo sapiens
  chr3:9782959-9783114
  hypo
atcatcctctgatcttcgttttgcctctacagagagattctgaggataagaactgggcccttaaagaacagctcaagtcctggcagcggctccggcatgacttggagcgagctcggctgctcgtggaattgatccgcaagcgggaaaaactcaaa

SEQ ID NO: 17307 - DNA, 40 bp, Homo sapiens
  chr3:9793442-9793482
  hypo
ctggtctccaggtgtgcgactgctgcgacaagaccccatc

SEQ ID NO: 17308 - DNA, 31 bp, Homo sapiens; identical to SEQ ID NO: 2381
  chr3:9851988-9852019
  hypo

SEQ ID NO: 17309 - DNA, 218 bp, Homo sapiens
  chr3:9905322-9905540
  hypo
aacaattcctcagcctcgaccccagggagcggcccccactaaaccagctgacgtgggacccctgggtcaatgctggccaggagatgcggctgacatcaaagaccctgggcccctgggccccctacaaccctggtcacggtggccatgggattccaggcagcacacatctcagaatcagtatttcccccaccccacaaaaaatacatatatgggtcggg

SEQ ID NO: 17310 - DNA, 34 bp, Homo sapiens
  chr3:9947647-9947681
  hypo
cgacttactatcaggccggctcatgcctgtaatc

SEQ ID NO: 17311 - DNA, 731 bp, Homo sapiens; identical to SEQ ID NO: 2383
  chr3:9956953-9957684
  hypo

SEQ ID NO: 17312 - DNA, 31 bp, Homo sapiens
  chr3:9963223-9963254
  hypo
atttggattttgttttcgttttgtattttct

SEQ ID NO: 17313 - DNA, 31 bp, Homo sapiens
  chr3:9965746-9965777
  hypo
atgcctgtgcaaaggacgcagtgccatatca

SEQ ID NO: 17314 - DNA, 30 bp, Homo sapiens
  chr3:9971741-9971771
  hypo
tactgttggagacacgaggcccccaggaca

SEQ ID NO: 17315 - DNA, 30 bp, Homo sapiens
  chr3:9991607-9991637
  hypo
gttctccgggaacacgtcaaaggcctgggg

SEQ ID NO: 17316 - DNA, 75 bp, Homo sapiens
  chr3:10011410-10011485
  hypo
ctttgtttgtgtctgcgggcatggccatggctgctcccgtcatctgctcctgcatcattcgtgattggtcagcgg

SEQ ID NO: 17317 - DNA, 29 bp, Homo sapiens
  chr3:10061732-10061761
  hypo
aatgaaattctgaggtcggccaggcgtgg

SEQ ID NO: 17318 - DNA, 30 bp, Homo sapiens
  chr3:10131982-10132012
  hypo
tttgttgttttcttccgtgtgatgatggct

SEQ ID NO: 17319 - DNA, 27 bp, Homo sapiens
  chr3:10137566-10137593
  hypo
tttttttttttttttttgagacggagt

SEQ ID NO: 17320 - DNA, 27 bp, Homo sapiens
  chr3:10137652-10137679
  hypo
cctcccggctggacagtgaatgtttaa

SEQ ID NO: 17321 - DNA, 39 bp, Homo sapiens
  chr3:10182877-10182916
  hypo
gagatgcgccaccctcgaaccttgttacgacgtcggcac

SEQ ID NO: 17322 - DNA, 19 bp, Homo sapiens
  chr3:10183215-10183234
  hypo
cgggcgacagagtgagacc

SEQ ID NO: 17323 - DNA, 89 bp, Homo sapiens
  chr3:10212190-10212279
  hypo
tgttcctctctagcccatcaccgtgtttcatttccctcattccgcttcacagcctttgatgtcccctcgttcctgaattttttccacct

SEQ ID NO: 17324 - DNA, 30 bp, Homo sapiens
  chr3:10276368-10276398
  hypo
ctgcctgggccacgcgtgggtccacctcat

SEQ ID NO: 17325 - DNA, 30 bp, Homo sapiens
  chr3:10276657-10276687
  hypo
ggaacggctctgcccgcagtttataacaga

SEQ ID NO: 17326 - DNA, 30 bp, Homo sapiens
  chr3:10332155-10332185
  hypo
ctgagagctcatggcgagtcttttcatgag

SEQ ID NO: 17327 - DNA, 30 bp, Homo sapiens
  chr3:10353633-10353663
  hypo
aggggatggactcacggtgtgagcgttgtt

SEQ ID NO: 17328 - DNA, 42 bp, Homo sapiens
  chr3:10363447-10363489
  hypo
cacccgcctcactacggctctgggtgcgactggtcttatgat

SEQ ID NO: 17329 - DNA, 98 bp, Homo sapiens
  chr3:10638649-10638747
  hypo
acacacacaggcacacgcacacgcaggtgcacacgcacacaggcacacacgcacacaggcacacacccagacacacacaggtgcgcacacacacaggg

SEQ ID NO: 17330 - DNA, 100 bp, Homo sapiens
  chr3:10960022-10960122
  hypo
catgctctgttgcctgaacagcggcaccagcttcgtggctgggtttgccatcttctcagtcctgggttttatggcgtacgagcagggggtacccattgct

SEQ ID NO: 17331 - DNA, 31 bp, Homo sapiens
  chr3:11050501-11050532
  hypo
ccaatgatcagtttagcgtcaatgtatttag

SEQ ID NO: 17332 - DNA, 121 bp, Homo sapiens
  chr3:11133517-11133638
  hypo
ccaggcctggagcctccaccacggcctcaacctcactctctgccgcgtctcgggagcctgtgagcacccagtggaaggcgcagccgggactcgtgaagccggccccaaatgcattgggttc

SEQ ID NO: 17333 - DNA, 30 bp, Homo sapiens
  chr3:11203460-11203490
  hypo
gattctcacagcagcgggtttcaccaagcc

SEQ ID NO: 17334 - DNA, 216 bp, Homo sapiens
  chr3:11210147-11210363
  hypo
caatgtggaggcagtgagaagcgaacagcttccaggtctgtttcgaaggcaggactgagcataagggacatctctctgatgcgctcgccccagtcaccccggtggactcaggcactgccgccgcacaatgccacagttggttgcctcatctataacatgagcgtaatcgttgtgcctgcgtcctggggcaacagcgagcatgcagggccctagcag

SEQ ID NO: 17335 - DNA, 34 bp, Homo sapiens
  chr3:11300940-11300974
  hypo
acttgatcgtgggtgccgtcgtcatgcctatgaa

SEQ ID NO: 17336 - DNA, 30 bp, Homo sapiens
  chr3:11323545-11323575
  hypo
taaagtacttctcccgtttctcaggattct

SEQ ID NO: 17337 - DNA, 30 bp, Homo sapiens
  chr3:11530042-11530072
  hypo
ccaccatggccggacgggctccctaagcca

SEQ ID NO: 17338 - DNA, 286 bp, Homo sapiens
  chr3:11581142-11581428
  hypo
ttgtgaaactccccccgtcttaagctatattcgttttctcttatgaatttaaaaaataaaatctattgatgcgcatacaatcaaatatatgtaaaagtgcacatttctgagctttgagaaacgtactcgcttgtggaaccagcacagttcggcgacatcgagcaggtctgtctggcctgtcctgccctgcacagccgcctggaggttcacctgcatcattgcgtgtgtcagcgcttggtgcctttctgtcgctgagtagcgtctcgctgtgtgagtgtaccagaat

SEQ ID NO: 17339 - DNA, 30 bp, Homo sapiens
  chr3:11600085-11600115
  hypo
cgggctggcccctgcgagaggcggactcag

SEQ ID NO: 17340 - DNA, 39 bp, Homo sapiens
  chr3:11606284-11606323
  hypo
ccggggtcagtgtgggcgagaggccggctggcctgctgg

SEQ ID NO: 17341 - DNA, 30 bp, Homo sapiens
  chr3:11608499-11608529
  hypo
ccctgcggcccagtcggtgagctgctaagg

SEQ ID NO: 17342 - DNA, 30 bp, Homo sapiens
  chr3:11617571-11617601
  hypo
gctgagaacatgaccggtaaagcatctcac

SEQ ID NO: 17343 - DNA, 30 bp, Homo sapiens
  chr3:11655451-11655481
  hypo
ccaggagccggcgacgtcatctcagagcag

SEQ ID NO: 17344 - DNA, 136 bp, Homo sapiens
  chr3:11707750-11707886
  hypo
ctgtgctgcgggaaagcacatgcaaaggccccgaggcaggaggaggccagcgtgacttacaggtcatggaagagccacagttcttatctctgcatgagatgggaagctcctggagggcttccgaacagagcatggc

SEQ ID NO: 17345 - DNA, 82 bp, Homo sapiens
  chr3:12204373-12204455
  hypo
ctgactttccataatacgcataaaatgcaggtggcttataattccaattttggaaatattaatcccccacttaaagtttaca

SEQ ID NO: 17346 - DNA, 2 bp, Homo sapiens
  chr3:12503152-12503154
  hypo
ta

SEQ ID NO: 17347 - DNA, 28 bp, Homo sapiens
  chr3:12507119-12507147
  hypo
tagtaacgtgtttttctaccaaatagac

SEQ ID NO: 17348 - DNA, 83 bp, Homo sapiens
  chr3:12596440-12596523
  hypo
taaaatatttgaacataataacgttcagatcgtgaatgtattccataaagaatgagataagctgaattttaaaaataagtggc

SEQ ID NO: 17349 - DNA, 30 bp, Homo sapiens
  chr3:12596822-12596852
  hypo
aaaaaagacgtgtaatttttatgagcatga

SEQ ID NO: 17350 - DNA, 98 bp, Homo sapiens
  chr3:12605272-12605370
  hypo
caccacacccggccagaatcacctttctttttaagcttgattgtatggatagaccacatcttgtttatgcattcgtccattagcgcacgcttgagttg

SEQ ID NO: 17351 - DNA, 31 bp, Homo sapiens
  chr3:12660174-12660205
  hypo
caaaaccattgctgatcgtcttccaagctcc

SEQ ID NO: 17352 - DNA, 14 bp, Homo sapiens
  chr3:12821453-12821467
  hypo
ttttgagatggagt

SEQ ID NO: 17353 - DNA, 30 bp, Homo sapiens
  chr3:12940417-12940447
  hypo
cggagacaccagggcgcttccctgacagcc

SEQ ID NO: 17354 - DNA, 30 bp, Homo sapiens
  chr3:12940934-12940964
  hypo
tacaaagtatggcccgtgggtgactcgggc

SEQ ID NO: 17355 - DNA, 30 bp, Homo sapiens
  chr3:12949442-12949472
  hypo
attagagggttccgcgcaagttcattcatc

SEQ ID NO: 17356 - DNA, 30 bp, Homo sapiens
  chr3:12949834-12949864
  hypo
ggccaagctcttaccggcttccgagaggtc

SEQ ID NO: 17357 - DNA, 76 bp, Homo sapiens
  chr3:12956288-12956364
  hypo
gagcagggccaggtagcggacagggcagggcctcagaggacacaccggggtctgtttcaggcgcagggtctggggg

SEQ ID NO: 17358 - DNA, 30 bp, Homo sapiens
  chr3:12976952-12976982
  hypo
gaagaggttcaggccgatgcggtagtgcct

SEQ ID NO: 17359 - DNA, 247 bp, Homo sapiens
  chr3:12984699-12984946
  hypo
ctgagacccagtggtcccctccgcctcaccacctcctgtccctgcaatgtgcacacatttctctgacatctccaagcaccatgggggagcagtgcccctggtggggccatgcggggcgggctgacgagctcatcccgactcggaactcgcaagccttttcactgtgtgcagacgctggtttccgctgcaggtggcttctcagtgtaggacgagcagggaagggagcgagttatgtcacagtttccaa

SEQ ID NO: 17360 - DNA, 91 bp, Homo sapiens; identical to SEQ ID NO: 2397
  chr3:13008723-13008814
  hypo

SEQ ID NO: 17361 - DNA, 31 bp, Homo sapiens; identical to SEQ ID NO: 2398
  chr3:13008871-13008902
  hypo

SEQ ID NO: 17362 - DNA, 30 bp, Homo sapiens
  chr3:13083462-13083492
  hypo
cggggaccccgggccggtgcagcttccctg

SEQ ID NO: 17363 - DNA, 112 bp, Homo sapiens
  chr3:13083877-13083989
  hypo
ctccagctggaccacggtaacgtctccgcggagacacggagaggggctagtgggaggtggagaaccggctgcttcggcccgccctggtccctgccacggcggcccccactca

SEQ ID NO: 17364 - DNA, 31 bp, Homo sapiens; identical to SEQ ID NO: 2399
  chr3:13138221-13138252
  hypo

SEQ ID NO: 17365 - DNA, 95 bp, Homo sapiens
  chr3:13205533-13205628
  hypo
cacatggtttcatcaacgccgctcaccgccaggattcagacacacggacagaggtggatgaagcacatacctgacgctccgcgagctttctcctt

SEQ ID NO: 17366 - DNA, 639 bp, Homo sapiens; identical to SEQ ID NO: 2400
  chr3:13323366-13324005
  hypo

SEQ ID NO: 17367 - DNA, 113 bp, Homo sapiens; identical to SEQ ID NO: 2401
  chr3:13324234-13324347
  hypo

SEQ ID NO: 17368 - DNA, 254 bp, Homo sapiens; identical to SEQ ID NO: 2402
  chr3:13324419-13324673
  hypo

SEQ ID NO: 17369 - DNA, 199 bp, Homo sapiens; identical to SEQ ID NO: 2403
  chr3:13324740-13324939
  hypo

SEQ ID NO: 17370 - DNA, 824 bp, Homo sapiens
  chr3:13611724-13612548
  hypo
ggctgggcccctgcccgcgtgcgtgccggtgtgcaccgtgtctgtgtgtgcacacccagtactgacaggcttcctttctgattcccccagggtcttacaggagaggggaccgtcctgggctggcctggaccatggtgctgctctgggagcctgcaggagcctggcttgctctgggcctggccctggccctgggccccagcgtggccgcagctgcccctcggcaggactgcacgggcgtggagtgcccgccgctggagaactgcattgaggaggcgctggagccgggtgcctgctgtgccacgtgtgtgcagcagggctgcgcctgcgagggctaccagtactatgactgcctacagggtggcttcgtgcgcggccgcgtgcccgccggtcagtcctattttgtggacttcgggagcactgagtgctcctgcccaccaggcggcggcaagatcagctgccagttcatgctgtgcccggagctgccgcccaactgcatcgaggctgtagtggtggctgacagctgcccacagtgcggccaggtgggctgcgtccacgcgggccacaagtacgccgctggccacactgttcacctgccgccctgccgggcctgccactgccctgacgccggtggagagctcatctgctaccagctccccggttgccacgggaacttctcagatgccgaggagggtgaccccgagcgacactacgaagacccctacagctatgaccaggaggtggccgaggtggaagcagcaacagccctggggggtgaggtccaggcgggtgcagtccaggcaggcgcagggggccccccagctgct

SEQ ID NO: 17371 - DNA, 30 bp, Homo sapiens
  chr3:13679244-13679274
  hypo
gggctactttggcacgcgcaggctcaatgc

SEQ ID NO: 17372 - DNA, 30 bp, Homo sapiens
  chr3:13860189-13860219
  hypo
cttcgctccagccgcggagggacctgggct

SEQ ID NO: 17373 - DNA, 30 bp, Homo sapiens
  chr3:14164940-14164970
  hypo
gtcttatggctttacgacccagaggaggag

SEQ ID NO: 17374 - DNA, 31 bp, Homo sapiens
  chr3:14383985-14384016
  hypo
accctctgtgtgccagcgcccaggcccctgg

SEQ ID NO: 17375 - DNA, 266 bp, Homo sapiens
  chr3:14384851-14385117
  hypo
attacaaatttaaagccggcaaccaggagcattaaacacaaatggcaggctctgagtgcccagcctggcccaggcgtgcggccagcctcaccctgctcccacccgccttagggcccttgccatgctattccctctgcttggaacactctattcctgccctccttcctgattcactcccactcagacaccgcccctggggagcccaccgggatctttcagcccgtgtcacccctccagtgtcgtgtccctcacgtctgaagccccgt

SEQ ID NO: 17376 - DNA, 100 bp, Homo sapiens; identical to SEQ ID NO: 2410
  chr3:14444315-14444415
  hypo

SEQ ID NO: 17377 - DNA, 31 bp, Homo sapiens
  chr3:14510138-14510169
  hypo
gctccctctaagcagacgcattcatccatcc

SEQ ID NO: 17378 - DNA, 31 bp, Homo sapiens
  chr3:14510390-14510421
  hypo
cagtggcttagaatcacggactctgcacaga

SEQ ID NO: 17379 - DNA, 128 bp, Homo sapiens
  chr3:14514278-14514406
  hypo
gctgatcattgtctgggccatcgtaataagttgcaagtgcccaggagaagcctacgccacactcaggattctgtgctccctggagcgtgcgaggggctgggcattggctccctcccgtgctttataca

SEQ ID NO: 17380 - DNA, 30 bp, Homo sapiens
  chr3:14716480-14716510
  hypo
tgagattcctgctgcgtttagccatacatt

SEQ ID NO: 17381 - DNA, 30 bp, Homo sapiens
  chr3:14849230-14849260
  hypo
cactgtcattgctacgactgcctgctgtta

SEQ ID NO: 17382 - DNA, 30 bp, Homo sapiens; identical to SEQ ID NO: 2411
  chr3:14852312-14852342
  hypo

SEQ ID NO: 17383 - DNA, 39 bp, Homo sapiens
  chr3:14852684-14852723
  hypo
agaaagacgcccctttcgcaaaagcgacttcgtctggcc

SEQ ID NO: 17384 - DNA, 30 bp, Homo sapiens
  chr3:15105505-15105535
  hypo
atcagattcacctgcgcagagcaaatggct

SEQ ID NO: 17385 - DNA, 164 bp, Homo sapiens
  chr3:15116203-15116367
  hypo
atccatgcggcccgcggccttggcctgcctgatgaatgatgtgatgttgtggatctgctggaggagcgggtctgagtcctcactctgcccctgacctcctgacagtgggagccagccctcagcctttctcaagggggcagggcccctgcggagagatgccacct

SEQ ID NO: 17386 - DNA, 306 bp, Homo sapiens
  chr3:15123749-15124055
  hypo
aggaactacaaataattcaaacgaacaacttcccaaagcattctccagaatctgcaggagtgtacataacaaacagccaaatctgcctaagaaattagacccaagaccagacagcgcgaatcacctcgtagagcttcacgatgtcaggtgtgtgctccttctcatcaatctgctgctctctcttgagcagcgtgtccttgcagtgtgtacagcagcggatccggtcatcgtccttctcatccaggaccgagctgacactgctcatgctgctgatgctgcctcggcgggagccatggacactgttgg

SEQ ID NO: 17387 - DNA, 31 bp, Homo sapiens
  chr3:15317991-15318022
  hypo
aattggacggtctccccgccagcaatacatg

SEQ ID NO: 17388 - DNA, 46 bp, Homo sapiens
  chr3:15374561-15374607
  hypo
ccataccgaaacacagaggtgcggcggtcctacctgaatagccagg

SEQ ID NO: 17389 - DNA, 30 bp, Homo sapiens
  chr3:15540527-15540557
  hypo
ccccccaccgagaccgtccaaggggagcct

SEQ ID NO: 17390 - DNA, 30 bp, Homo sapiens
  chr3:15919490-15919520
  hypo
agcagtagcagcagcgggcggccgcgtggg

SEQ ID NO: 17391 - DNA, 30 bp, Homo sapiens
  chr3:16329435-16329465
  hypo
gacttcttcggaggtcggacttggcgggta

SEQ ID NO: 17392 - DNA, 30 bp, Homo sapiens
  chr3:16411652-16411682
  hypo
ctctaaccagttggcgtccaaaccgctcac

SEQ ID NO: 17393 - DNA, 216 bp, Homo sapiens
  chr3:16439261-16439477
  hypo
ataggtatttggtctcggtctctctccctctctctctctctttcttttttctttctttctctcaccttgaaaaatagagcggtatttggagaggaggaaaagccaggagaaagttctcaggtcattttgaagaatgccaagttaaaccaagcaagcaagttttgcacccgggacctcttcagagccttgactcttttaagaagcatcatgggccgg

SEQ ID NO: 17394 - DNA, 1156 bp, Homo sapiens; identical to SEQ ID NO: 2414
  chr3:16553682-16554838
  hypo

SEQ ID NO: 17395 - DNA, 270 bp, Homo sapiens; identical to SEQ ID NO: 2415
  chr3:16555196-16555466
  hypo

SEQ ID NO: 17396 - DNA, 35 bp, Homo sapiens; identical to SEQ ID NO: 2416
  chr3:16860035-16860070
  hypo

SEQ ID NO: 17397 - DNA, 30 bp, Homo sapiens; identical to SEQ ID NO: 2417
  chr3:16926144-16926174
  hypo

SEQ ID NO: 17398 - DNA, 25 bp, Homo sapiens
  chr3:17192867-17192892
  hypo
gagcgagaatcgtctcaaaaaaaaa

SEQ ID NO: 17399 - DNA, 31 bp, Homo sapiens; identical to SEQ ID NO: 2419
  chr3:17571374-17571405
  hypo

SEQ ID NO: 17400 - DNA, 31 bp, Homo sapiens
  chr3:17643205-17643236
  hypo
gtaggggaaaaccccacgttattattaacat

SEQ ID NO: 17401 - DNA, 153 bp, Homo sapiens
  chr3:18452750-18452903
  hypo
gatgtgtgtgtgtgcacgtgtgcacgcgcgagtatgtacgcccacatgtgtggtgaaagagggaaggtaaaaatgcgcaaatcagattaaaacctccatgaaatatttgacctaaacatttttagaaggaagacattacgctggtagaagtaa

SEQ ID NO: 17402 - DNA, 109 bp, Homo sapiens
  chr3:18462349-18462458
  hypo
ccgttctgctccaggcgggcaatcttggctggtggacccttcggatcactcacattgttagacatttctgaatgttctttcccctgagttgcctcgttcaaatgatcca

SEQ ID NO: 17403 - DNA, 393 bp, Homo sapiens; identical to SEQ ID NO: 2420
  chr3:18485350-18485743
  hypo

SEQ ID NO: 17404 - DNA, 139 bp, Homo sapiens
  chr3:19790878-19791017
  hypo
ggcagagccacaattacataacggtgctcaggcgcgggcagggttgctgcggggaagtccaaatctggagcctcccgggctagcagcagcaggggtagaggccgcacgtctgccagtcgggcagtaccctggggaattg

SEQ ID NO: 17405 - DNA, 30 bp, Homo sapiens
  chr3:20070418-20070448
  hypo
cgttagtgaacactgcgctaattcatgagg

SEQ ID NO: 17406 - DNA, 26 bp, Homo sapiens
  chr3:20070846-20070872
  hypo
cacacacctttttttttgagacggag

SEQ ID NO: 17407 - DNA, 98 bp, Homo sapiens
  chr3:20071111-20071209
  hypo
ggcgtgagcctccacacccggcttcacacatcttttttttttttagtgtttatgacatgaggagctctctagactatgcgacccggcataggattcct

SEQ ID NO: 17408 - DNA, 12 bp, Homo sapiens
  chr3:21313407-21313419
  hypo
gtgcggggccac

SEQ ID NO: 17409 - DNA, 30 bp, Homo sapiens; identical to SEQ ID NO: 2423
  chr3:22335323-22335353
  hypo

SEQ ID NO: 17410 - DNA, 30 bp, Homo sapiens
  chr3:23427945-23427975
  hypo
atagcagaaagtatccgtaaaggaataaga

SEQ ID NO: 17411 - DNA, 163 bp, Homo sapiens
  chr3:23750592-23750755
  hypo
tctatattgaacaagacgcaagaataacatattgagggtggttataaagaagcaaagtggaagttaaaaaagccatatgccgtaatatttttacctccctgatttcttccatttgaatcccatcatgaaaatatccaagtggtggccaggcacggtggctcac

SEQ ID NO: 17412 - DNA, 65 bp, Homo sapiens; identical to SEQ ID NO: 2429
  chr3:23986745-23986810
  hypo

SEQ ID NO: 17413 - DNA, 210 bp, Homo sapiens
  chr3:24161061-24161271
  hypo
ttcatggaggagcaacaagaacggcgttgctggcacagagcgaaggcctggcagtccaccccaggcctgcactgcacactgaagagctgtcgcccggggcacaggtgaggggcttcgctgggctgaggcatcaacaggtcaagcgcgtcattgaggaccgaggctctagaaaaagctctgaggcggcacgtggtgttttgagcagaatca

SEQ ID NO: 17414 - DNA, 170 bp, Homo sapiens
  chr3:24344849-24345019
  hypo
acttgctcttgcttctcggccgctacctgggctagcctgctgcaggaagagaatatgttgtggagtttttccaatgttctagtagaggccatcctcaatcagcccacagctagccagccccagacaccagacacgtgagcatgcccgattatcatcgcagagctgctgag

SEQ ID NO: 17415 - DNA, 32 bp, Homo sapiens
  chr3:24374242-24374274
  hypo
aaaggagataaaactcaaacacgggctgggcg

SEQ ID NO: 17416 - DNA, 196 bp, Homo sapiens
  chr3:24436869-24437065
  hypo
atctgtatctaaaatacgtaaaggactattataactcaataatgataaaacgaataatccaattggaaaataggcaaaggatctaaattagaagtttctccaaagatgataaacaagtgggcaaaaagcacataaaaagacgttcaacttgatttgcagtacacgcaaatcaaaactacagcgatataccatttca

SEQ ID NO: 17417 - DNA, 531 bp, Homo sapiens; identical to SEQ ID NO: 2430
  chr3:24536767-24537298
  hypo

SEQ ID NO: 17418 - DNA, 54 bp, Homo sapiens; identical to SEQ ID NO: 2431
  chr3:24563200-24563254
  hypo

SEQ ID NO: 17419 - DNA, 30 bp, Homo sapiens; identical to SEQ ID NO: 2432
  chr3:24563670-24563700
  hypo

SEQ ID NO: 17420 - DNA, 30 bp, Homo sapiens
  chr3:25728356-25728386
  hypo
gccgccgccagcaccggacccggagccgcc

SEQ ID NO: 17421 - DNA, 22 bp, Homo sapiens
  chr3:27487117-27487139
  hypo
tattgtaatggctgggcgcagc

SEQ ID NO: 17422 - DNA, 36 bp, Homo sapiens
  chr3:27564147-27564183
  hypo
caagagcaaaactccgtctcaaaagaaaaaaaaaaa

SEQ ID NO: 17423 - DNA, 38 bp, Homo sapiens
  chr3:27587340-27587378
  hypo
gcaaaattggagagagcgtctccctctgtcgcccaggc

SEQ ID NO: 17424 - DNA, 813 bp, Homo sapiens; identical to SEQ ID NO: 2449
  chr3:27763202-27764015
  hypo

SEQ ID NO: 17425 - DNA, 31 bp, Homo sapiens
  chr3:30574875-30574906
  hypo
aaatcaatgacgtggtcgcccatgtgcccac

SEQ ID NO: 17426 - DNA, 30 bp, Homo sapiens
  chr3:30713268-30713298
  hypo
ttcaacctgggaaaccggcaagacgcggaa

SEQ ID NO: 17427 - DNA, 30 bp, Homo sapiens
  chr3:30713672-30713702
  hypo
tacaggagtacctgacgcggcatgtcatca

SEQ ID NO: 17428 - DNA, 31 bp, Homo sapiens
  chr3:31398337-31398368
  hypo
gaggtccaagaggagtcggtgggcaggtaaa

SEQ ID NO: 17429 - DNA, 31 bp, Homo sapiens
  chr3:31717146-31717177
  hypo
aaactgcagggccaggcgcagtggctcacgc

SEQ ID NO: 17430 - DNA, 93 bp, Homo sapiens
  chr3:32151318-32151411
  hypo
tgaggacatggaagataagaccgaaggaattgccaagtggaatggagtaactgctctgttacactttaaatcgtgtttctttttttgtttgtt

SEQ ID NO: 17431 - DNA, 1029 bp, Homo sapiens; identical to SEQ ID NO: 2460
  chr3:32433046-32434075
  hypo

SEQ ID NO: 17432 - DNA, 35 bp, Homo sapiens; identical to SEQ ID NO: 2463
  chr3:32612741-32612776
  hypo

SEQ ID NO: 17433 - DNA, 30 bp, Homo sapiens; identical to SEQ ID NO: 2464
  chr3:32668904-32668934
  hypo

SEQ ID NO: 17434 - DNA, 31 bp, Homo sapiens
  chr3:33012352-33012383
  hypo
gaggttcatattaaatcggagagagaaaaag

SEQ ID NO: 17435 - DNA, 1076 bp, Homo sapiens; identical to SEQ ID NO: 2471
  chr3:33259727-33260803
  hypo

SEQ ID NO: 17436 - DNA, 30 bp, Homo sapiens
  chr3:33729785-33729815
  hypo
aagacacagacacacgccttctcgagatcg

SEQ ID NO: 17437 - DNA, 31 bp, Homo sapiens
  chr3:36778834-36778865
  hypo
aggtctcctccctgcacgtactccaggatca

SEQ ID NO: 17438 - DNA, 30 bp, Homo sapiens
  chr3:36868864-36868894
  hypo
gagactcatcagaacgtcagcctaagctag

SEQ ID NO: 17439 - DNA, 130 bp, Homo sapiens
  chr3:36984272-36984402
  hypo
actctgggagagcggcggaaacagaacctgcagttgccccataaagctggtcagtcggtcataaagtgaagttaacaatttatgacccgctttaaaaaaaaaaaaaaaacatagaatgggccggcgtggt

SEQ ID NO: 17440 - DNA, 42 bp, Homo sapiens
  chr3:36984641-36984683
  hypo
cattgcactccagcctgggtgacagagcgagaatccctctgg

SEQ ID NO: 17441 - DNA, 905 bp, Homo sapiens; identical to SEQ ID NO: 2476
  chr3:36985788-36986693
  hypo

SEQ ID NO: 17442 - DNA, 30 bp, Homo sapiens
  chr3:36987025-36987055
  hypo
tccacgctcaccgtcgtgtccatggagagt

SEQ ID NO: 17443 - DNA, 30 bp, Homo sapiens
  chr3:37017734-37017764
  hypo
gacacgcggctgggcggcgggaggaaacgc

SEQ ID NO: 17444 - DNA, 1401 bp, Homo sapiens; identical to SEQ ID NO: 2477
  chr3:37034012-37035413
  hypo

SEQ ID NO: 17445 - DNA, 26 bp, Homo sapiens
  chr3:37360899-37360925
  hypo
ttatgagagagagtctcgctctgttg

SEQ ID NO: 17446 - DNA, 942 bp, Homo sapiens; identical to SEQ ID NO: 2478
  chr3:37493187-37494129
  hypo

SEQ ID NO: 17447 - DNA, 30 bp, Homo sapiens; identical to SEQ ID NO: 2480
  chr3:37731246-37731276
  hypo

SEQ ID NO: 17448 - DNA, 163 bp, Homo sapiens
  chr3:38017264-38017427
  hypo
atcatgtgtttttcatcgtgggaactacgtgaaggacctgagtcgccttgggcgggagctgagcaaagtgatcattgttgacaattcccctgcctcatacatcttccatcctgagaatgcagtaagtggccccaaagaaagaaaatgtcgtgctccatctgag

SEQ ID NO: 17449 - DNA, 148 bp, Homo sapiens
  chr3:38030724-38030872
  hypo
agatctgggaggggcctgaggcgatgttaaatgtgagaccaaacgtgctgggagagatgtgacagacggaagatggagacttaggccggggcaaggttcgggggagttgggtcagggagacactggcgtttccatgctatttgcagcc

SEQ ID NO: 17450 - DNA, 194 bp, Homo sapiens
  chr3:38033755-38033949
  hypo
tcagtgtccttctacggggccaccactggtggacatcctgcttgtcacccaatgtcctcacgttttctgttgcttgagatcaccttttcatggccactatgtctgcctgtcactcatgtcattgtcacaccaacaggccatcaactgtggcaacagttcttggggcaattagggtgcacggacggctcccttct

SEQ ID NO: 17451 - DNA, 401 bp, Homo sapiens; identical to SEQ ID NO: 2484
  chr3:38080607-38081008
  hypo

SEQ ID NO: 17452 - DNA, 54 bp, Homo sapiens; identical to SEQ ID NO: 2485
  chr3:38081153-38081207
  hypo

SEQ ID NO: 17453 - DNA, 30 bp, Homo sapiens; identical to SEQ ID NO: 2486
  chr3:38180464-38180494
  hypo

SEQ ID NO: 17454 - DNA, 30 bp, Homo sapiens; identical to SEQ ID NO: 2487
  chr3:38182009-38182039
  hypo

SEQ ID NO: 17455 - DNA, 55 bp, Homo sapiens; identical to SEQ ID NO: 2488
  chr3:38182281-38182336
  hypo

SEQ ID NO: 17456 - DNA, 159 bp, Homo sapiens; identical to SEQ ID NO: 2489
  chr3:38182625-38182784
  hypo

SEQ ID NO: 17457 - DNA, 30 bp, Homo sapiens; identical to SEQ ID NO: 2490
  chr3:38495144-38495174
  hypo

SEQ ID NO: 17458 - DNA, 43 bp, Homo sapiens; identical to SEQ ID NO: 2491
  chr3:38495213-38495256
  hypo

SEQ ID NO: 17459 - DNA, 52 bp, Homo sapiens; identical to SEQ ID NO: 2492
  chr3:38495696-38495748
  hypo

SEQ ID NO: 17460 - DNA, 1210 bp, Homo sapiens; identical to SEQ ID NO: 2493
  chr3:38496020-38497230
  hypo

SEQ ID NO: 17461 - DNA, 43 bp, Homo sapiens; identical to SEQ ID NO: 2496
  chr3:39148466-39148509
  hypo

SEQ ID NO: 17462 - DNA, 30 bp, Homo sapiens
  chr3:39184202-39184232
  hypo
gctaaggaacatcacgcaaagaccgaaaag

SEQ ID NO: 17463 - DNA, 30 bp, Homo sapiens
  chr3:39184537-39184567
  hypo
cctggtcctcacaccggcacaggctccatt

SEQ ID NO: 17464 - DNA, 31 bp, Homo sapiens
  chr3:39229445-39229476
  hypo
ggtcagggcatggaggcggcccttgctgtcc

SEQ ID NO: 17465 - DNA, 30 bp, Homo sapiens
  chr3:39231892-39231922
  hypo
ttggccatagaacccgtctattccccagca

SEQ ID NO: 17466 - DNA, 107 bp, Homo sapiens
  chr3:39234909-39235016
  hypo
gagtcctttcttctcgactcttccctctgactcagggcccaggctttctgggaatggaggggaggggaagggcggcatgcagggagctgaccgtggggttatttctg

SEQ ID NO: 17467 - DNA, 69 bp, Homo sapiens
  chr3:40231757-40231826
  hypo
tgcatggagagctggacgtgaacttcaacccccagttggccagcagggagacctcggacagcagcgagc

SEQ ID NO: 17468 - DNA, 30 bp, Homo sapiens
  chr3:40429808-40429838
  hypo
ttaaatggtttttccggtttgtataatcca

SEQ ID NO: 17469 - DNA, 154 bp, Homo sapiens
  chr3:40510131-40510285
  hypo
gatagaacaaactcaccgtcttcataatactacgtcttcgatccaggagcatggtatatttccaactacttgggccgtcattcttttcaaaattaaaacaaaaaaacaaaaaaaaactgtatcttggcttattcctggtgattttttgtttgtt

SEQ ID NO: 17470 - DNA, 191 bp, Homo sapiens
  chr3:41119484-41119675
  hypo
gctacgggagagtgcccgcccaccagtgttcataccggagtttctaagcctggacagcggtccccacagtgggcctggacttggcagaggaaggtgacagcacggtggcctccaataacctggtctgacacgtgttcacacaagccatcttggagactcctagaagtaccttgagacgggatttttaaaag

SEQ ID NO: 17471 - DNA, 42 bp, Homo sapiens; identical to SEQ ID NO: 2502
  chr3:41266109-41266151
  hypo

SEQ ID NO: 17472 - DNA, 30 bp, Homo sapiens
  chr3:41288379-41288409
  hypo
ctggggccacagggcgggcttgtgctaagc

SEQ ID NO: 17473 - DNA, 148 bp, Homo sapiens
  chr3:41289146-41289294
  hypo
gccatgaccaggagaccgttccatgcattcctgctctgcgcatcaaagcccctgtgtgacagaaggaatgcgtttgaacttggcccacccctggctgagtctaggctagactagtggggccatgctgcgcccccgcacacagcaggcc

SEQ ID NO: 17474 - DNA, 30 bp, Homo sapiens
  chr3:42191032-42191062
  hypo
gaaatttatcgaagcggattattatgaact

SEQ ID NO: 17475 - DNA, 69 bp, Homo sapiens
  chr3:42577701-42577770
  hypo
tccatgctgacccgcgtcagcccaggtgcccgccgctcctccagcttccaagccgaagtctccctggtc

SEQ ID NO: 17476 - DNA, 40 bp, Homo sapiens
  chr3:42659547-42659587
  hypo
attagaacaaactggccgggtgcggtggctcaagcctgta

SEQ ID NO: 17477 - DNA, 30 bp, Homo sapiens
  chr3:42692913-42692943
  hypo
accaggcaacctaccggtttgcatgaggcc

SEQ ID NO: 17478 - DNA, 121 bp, Homo sapiens; identical to SEQ ID NO: 2507
  chr3:42696340-42696461
  hypo

SEQ ID NO: 17479 - DNA, 30 bp, Homo sapiens
  chr3:42701027-42701057
  hypo
aagaagctgggcggcggggtgggaagaggc

SEQ ID NO: 17480 - DNA, 685 bp, Homo sapiens; identical to SEQ ID NO: 2508
  chr3:42814331-42815016
  hypo

SEQ ID NO: 17481 - DNA, 23 bp, Homo sapiens
  chr3:42852211-42852234
  hypo
ccctttgttcaagtgcgctctca

SEQ ID NO: 17482 - DNA, 43 bp, Homo sapiens
  chr3:42906565-42906608
  hypo
gtgtgtggaactgccacgcagatttcggcgggcatgggaccat

SEQ ID NO: 17483 - DNA, 31 bp, Homo sapiens
  chr3:43075013-43075044
  hypo
cacgcctggcgctcttcgacttcctgttgca

SEQ ID NO: 17484 - DNA, 30 bp, Homo sapiens
  chr3:43121653-43121683
  hypo
gggcttgctcagcccggtccagatgggtga

SEQ ID NO: 17485 - DNA, 558 bp, Homo sapiens; identical to SEQ ID NO: 2515
  chr3:43147168-43147726
  hypo

SEQ ID NO: 17486 - DNA, 194 bp, Homo sapiens
  chr3:43655461-43655655
  hypo
gatgggagccacacagcgttcaacttagactagatacacagaaaaccccaaggtttccaatcttggatatgggaagaataactatgcgtgaaaaaaatagcaaagttggaaagaatgtctagtttaagggaacaataaagtgttccgcagagtatctggggacacgcatcaaaggtcaacgtttttgaacattt

SEQ ID NO: 17487 - DNA, 215 bp, Homo sapiens; identical to SEQ ID NO: 2516
  chr3:43663333-43663548
  hypo

SEQ ID NO: 17488 - DNA, 26 bp, Homo sapiens
  chr3:43735475-43735501
  hypo
ccttcctgctcctaaactaaacgata

SEQ ID NO: 17489 - DNA, 26 bp, Homo sapiens
  chr3:43735740-43735766
  hypo
actccgtctcaaaaaaaaaaaaaaaa

SEQ ID NO: 17490 - DNA, 2615 bp, Homo sapiens; identical to SEQ ID NO: 2520
  chr3:44036274-44038889
  hypo

SEQ ID NO: 17491 - DNA, 31 bp, Homo sapiens; identical to SEQ ID NO: 2524
  chr3:44379883-44379914
  hypo

SEQ ID NO: 17492 - DNA, 42 bp, Homo sapiens; identical to SEQ ID NO: 2526
  chr3:44518641-44518683
  hypo

SEQ ID NO: 17493 - DNA, 249 bp, Homo sapiens; identical to SEQ ID NO: 2532
  chr3:44803218-44803467
  hypo

SEQ ID NO: 17494 - DNA, 38 bp, Homo sapiens
  chr3:44808573-44808611
  hypo
ttacaggtgtgagccaccgtgcccggccaactttcttt

SEQ ID NO: 17495 - DNA, 211 bp, Homo sapiens
  chr3:44816760-44816971
  hypo
catcaaagtttttgtgcgaattcgtcctcctgcagaaagatctgggtcagctgatggagagcagaacttatgcttatctgtgctgtcctccacgagtctccggctgcactccaaccctgagcccaagaccttcacgtttgatcatgttgcagatgtggataccactcaggtaatgataattagaaacttaacttttttttttttttgaaaa

SEQ ID NO: 17496 - DNA, 24 bp, Homo sapiens
  chr3:44818860-44818884
  hypo
tttttatgtggagcatcgctggcc

SEQ ID NO: 17497 - DNA, 20 bp, Homo sapiens
  chr3:44821037-44821057
  hypo
tatttgtggctgggcacggt

SEQ ID NO: 17498 - DNA, 18 bp, Homo sapiens
  chr3:44825669-44825687
  hypo
tctttttgttttgagacg

SEQ ID NO: 17499 - DNA, 31 bp, Homo sapiens
  chr3:44834019-44834050
  hypo
agggttataacagctacgaattttttttttt

SEQ ID NO: 17500 - DNA, 19 bp, Homo sapiens
  chr3:44836158-44836177
  hypo
atgtacccctgttagccgg

SEQ ID NO: 17501 - DNA, 28 bp, Homo sapiens
  chr3:44876135-44876163
  hypo
tgggcactgtggctcacgcctgtaatct

SEQ ID NO: 17502 - DNA, 77 bp, Homo sapiens
  chr3:44882437-44882514
  hypo
ttacaggtgtgagccaccatgcccagccgtagctagaatattttttatgtacttgacatttacgtttaaaagaaatc

SEQ ID NO: 17503 - DNA, 24 bp, Homo sapiens
  chr3:44882895-44882919
  hypo
tgttttttttttgagacggagtct

SEQ ID NO: 17504 - DNA, 30 bp, Homo sapiens
  chr3:44888529-44888559
  hypo
aaatatttactgtctcgttcttgacagaag

SEQ ID NO: 17505 - DNA, 30 bp, Homo sapiens; identical to SEQ ID NO: 2533
  chr3:44931198-44931228
  hypo

SEQ ID NO: 17506 - DNA, 261 bp, Homo sapiens
  chr3:44945260-44945521
  hypo
agaacaacctcagtgggtccccggtgatgaagatgtctctggcaattttggcgtatttatctctaactaggtttgggggtggtccggggtggggcccgttcccaatttgcggcaggaatttccatgtgtggacggatgcctggatgaagcgaccggatctgcccaagggctacgacggctggcaggctgtggacgcaacgccgcaggagcgaagccagggtgagtgggtggcaggaaggcgctgggcatccatgctgctct

SEQ ID NO: 17507 - DNA, 31 bp, Homo sapiens
  chr3:44975282-44975313
  hypo
tctgagcaaagaacatcgtgaatgctgagaa

SEQ ID NO: 17508 - DNA, 30 bp, Homo sapiens
  chr3:45365530-45365560
  hypo
acaggcgtgagccaccgcacctggcctcca

SEQ ID NO: 17509 - DNA, 291 bp, Homo sapiens
  chr3:45719319-45719610
  hypo
ttttttttttgcccacgtgtttgcgctgtttttctctggagttctcaagagttggtgacttggaaggccgcttctgcaaggcaagtctcaggaacccatgcaggtacatcgcttgcacctgtttttagcttatttaatgacgggcttttgggaagagctgcccgcatactgagagacagcttcttataaacaaggagagtttttgtgtgtgcgagatctctaagccagcgtgggagggagcgcctcaggataagttattatattcatttcgttggtttctctcctgcccaa

SEQ ID NO: 17510 - DNA, 30 bp, Homo sapiens
  chr3:45761235-45761265
  hypo
ttaggtaggtcttccgtgcttcagttactg

SEQ ID NO: 17511 - DNA, 44 bp, Homo sapiens
  chr3:45968553-45968597
  hypo
caagcttgtccaacccgcggcccaggaaggctttgaatgcagcc

SEQ ID NO: 17512 - DNA, 43 bp, Homo sapiens
  chr3:45968716-45968759
  hypo
tcttccaacgaggcccagggaagccaaacgattggacaccctt

SEQ ID NO: 17513 - DNA, 30 bp, Homo sapiens
  chr3:46064701-46064731
  hypo
agaggacgcggctgcgtcgcgctcccctgc

SEQ ID NO: 17514 - DNA, 29 bp, Homo sapiens
  chr3:46549770-46549799
  hypo
aacagttcaagtttaacgtaggaaatgat

SEQ ID NO: 17515 - DNA, 30 bp, Homo sapiens
  chr3:46571401-46571431
  hypo
tatcttgcggcaggtcggtcaggttattgc

SEQ ID NO: 17516 - DNA, 30 bp, Homo sapiens
  chr3:46593985-46594015
  hypo
taggacatgaggcacgtaacagcgactttc

SEQ ID NO: 17517 - DNA, 31 bp, Homo sapiens
  chr3:46713299-46713330
  hypo
aggtatcagaagatatcgtggttgggggtgg

SEQ ID NO: 17518 - DNA, 30 bp, Homo sapiens; identical to SEQ ID NO: 2537
  chr3:46774362-46774392
  hypo

SEQ ID NO: 17519 - DNA, 30 bp, Homo sapiens
  chr3:46798225-46798255
  hypo
gtgcagcccagccccgccctgtccactccc

SEQ ID NO: 17520 - DNA, 31 bp, Homo sapiens
  chr3:46943651-46943682
  hypo
aggcggtgagtggccccgggaaggctgcagc

SEQ ID NO: 17521 - DNA, 179 bp, Homo sapiens
  chr3:46985693-46985872
  hypo
caaagtcacagaacccatcagcggtagctgcaagtctggatccaggtcgtcctgatgcctggccctcagtcttgccaaggagacgagagagaggctatcaagagtggaagagtggcgctgagtttctaaagagctctgattctacccgcctctcctgcgctccccacacagttcagacc

SEQ ID NO: 17522 - DNA, 29 bp, Homo sapiens
  chr3:46996119-46996148
  hypo
gaacaggtatttccaccgggcacggtggc

SEQ ID NO: 17523 - DNA, 39 bp, Homo sapiens
  chr3:47007697-47007736
  hypo
aaaagaaagaaagaaagaaagcgggctgggcacggtggc

SEQ ID NO: 17524 - DNA, 31 bp, Homo sapiens
  chr3:47052059-47052090
  hypo
gcaagggctaccaggtcgcacccacttggcc

SEQ ID NO: 17525 - DNA, 31 bp, Homo sapiens
  chr3:47087395-47087426
  hypo
gctgggactacaggtgcggagcaaaatatgt

SEQ ID NO: 17526 - DNA, 20 bp, Homo sapiens
  chr3:47147381-47147401
  hypo
gactccgtctccaaaaaaaa

SEQ ID NO: 17527 - DNA, 19 bp, Homo sapiens
  chr3:47411264-47411283
  hypo
agaacgggacgcaggccgg

SEQ ID NO: 17528 - DNA, 23 bp, Homo sapiens
  chr3:47555870-47555893
  hypo
ggccgacacggaattatatcttg

SEQ ID NO: 17529 - DNA, 30 bp, Homo sapiens
  chr3:47883008-47883038
  hypo
ctgctgcagcgcagcgtcctcacccctaca

SEQ ID NO: 17530 - DNA, 82 bp, Homo sapiens
  chr3:47889945-47890027
  hypo
ggctctgtcataggcggtggagttcctgtccaaggctgtggacagtccaaacatcaaggcagtggacgaggctgtgatcttg

SEQ ID NO: 17531 - DNA, 30 bp, Homo sapiens
  chr3:47890800-47890830
  hypo
ggcgtgctgatggccggcctctaccccaac

SEQ ID NO: 17532 - DNA, 30 bp, Homo sapiens
  chr3:47891121-47891151
  hypo
aggccacacggttacggagccgatggctga

SEQ ID NO: 17533 - DNA, 30 bp, Homo sapiens
  chr3:48078088-48078118
  hypo
ctccagactcttgacgaggctgttctttct

SEQ ID NO: 17534 - DNA, 30 bp, Homo sapiens
  chr3:48227759-48227789
  hypo
gttctcaataatgtttatcaccgggcgcgg

SEQ ID NO: 17535 - DNA, 169 bp, Homo sapiens
  chr3:48263633-48263802
  hypo
gcccagtggggacaaccgggacgttcatgggagtctcgaactcagagatacagactgggtggtgtctgcctattataactggtgtcctgggagagggcgtccccagggaaacccgaggccagggaagagaagcagcccaggaggtgaccccacacgctctcaatattaa

SEQ ID NO: 17536 - DNA, 33 bp, Homo sapiens
  chr3:48275731-48275764
  hypo
ccgcacccagccggaaatctgttttaaactgca

SEQ ID NO: 17537 - DNA, 31 bp, Homo sapiens
  chr3:48451212-48451243
  hypo
cggcactgtgcctgcacgagccccacaccac

SEQ ID NO: 17538 - DNA, 31 bp, Homo sapiens
  chr3:48459417-48459448
  hypo
gcccctgatggtgacacgggtgcctccgtct

SEQ ID NO: 17539 - DNA, 142 bp, Homo sapiens
  chr3:48474262-48474404
  hypo
ttgtggaggtccctctgctggcgggagtagctagacgcctgttctcgaatggcctcttggagactcacaggccccttctgcgcctccaggagtaaagccttcagctcctgtagtcgcacacggttcacataggtggagccag

SEQ ID NO: 17540 - DNA, 64 bp, Homo sapiens
  chr3:48563028-48563092
  hypo
tcctggtcccgcagggcgaactccagtggataattatcctgaatttcctcgtaggtcatttcct

SEQ ID NO: 17541 - DNA, 31 bp, Homo sapiens
  chr3:48604090-48604121
  hypo
acctgctcccctctctcgccaggagctccag

SEQ ID NO: 17542 - DNA, 31 bp, Homo sapiens
  chr3:48605091-48605122
  hypo
ttggcccccgtccacccgtggccccctcatt

SEQ ID NO: 17543 - DNA, 36 bp, Homo sapiens
  chr3:48607714-48607750
  hypo
cctggctccccacgctcgcctcggggcccaggcagc

SEQ ID NO: 17544 - DNA, 30 bp, Homo sapiens
  chr3:48677758-48677788
  hypo
cctctagtcgctcacggctcagttgccgcc

SEQ ID NO: 17545 - DNA, 31 bp, Homo sapiens
  chr3:48684050-48684081
  hypo
agattcacacagaacccggcaaggatggggc

SEQ ID NO: 17546 - DNA, 31 bp, Homo sapiens
  chr3:48685739-48685770
  hypo
agttccatattccttgcgagtgtggctgcat

SEQ ID NO: 17547 - DNA, 245 bp, Homo sapiens; identical to SEQ ID NO: 2545
  chr3:48693455-48693700
  hypo

SEQ ID NO: 17548 - DNA, 227 bp, Homo sapiens; identical to SEQ ID NO: 2546
  chr3:48693851-48694078
  hypo

SEQ ID NO: 17549 - DNA, 111 bp, Homo sapiens
  chr3:48698353-48698464
  hypo
ggtcagtggccgtgacgcgcagcacgactgtgtgggggcgcacatcctcgcgcacctgcgccacgtagcgcttctcgctgaactgaggagcattgtcgttctcgtctagca

SEQ ID NO: 17550 - DNA, 121 bp, Homo sapiens; identical to SEQ ID NO: 2547
  chr3:48698889-48699010
  hypo

SEQ ID NO: 17551 - DNA, 440 bp, Homo sapiens; identical to SEQ ID NO: 2548
  chr3:48699376-48699816
  hypo

SEQ ID NO: 17552 - DNA, 30 bp, Homo sapiens; identical to SEQ ID NO: 2549
  chr3:48700460-48700490
  hypo

SEQ ID NO: 17553 - DNA, 30 bp, Homo sapiens
  chr3:48731496-48731526
  hypo
gctgcaggggaatgcgtgctcagagagaga

SEQ ID NO: 17554 - DNA, 36 bp, Homo sapiens
  chr3:48733583-48733619
  hypo
gggattacaggtgtgagcgaccgcacccagccccat

SEQ ID NO: 17555 - DNA, 24 bp, Homo sapiens
  chr3:48923662-48923686
  hypo
atataatagtaatggccgggtgcg

SEQ ID NO: 17556 - DNA, 32 bp, Homo sapiens
  chr3:48986828-48986860
  hypo
cgtgcccagccgtgtttaacattttaagaaat

SEQ ID NO: 17557 - DNA, 86 bp, Homo sapiens
  chr3:49023683-49023769
  hypo
gtatgcaagtgattcacgtgctctagcttccaggagcttccaatccatggggaacatagaaggaattgatcactagtgaatgtttg

SEQ ID NO: 17558 - DNA, 25 bp, Homo sapiens
  chr3:49023828-49023853
  hypo
ctgctcactgcggcctccactcctg

SEQ ID NO: 17559 - DNA, 31 bp, Homo sapiens
  chr3:49034284-49034315
  hypo
actcagcttggggttccgaggcatgtgggca

SEQ ID NO: 17560 - DNA, 151 bp, Homo sapiens
  chr3:49035667-49035818
  hypo
tggcccaaggggaagcgtccacaatgcaggatggctggccaggggtagctgtagcaggccatgatgggctcgcagctggcctgcatggcctcgcacaggctgtaggaggggtagatgaccctttgggggaaagggtcgggggctgcaccgc

SEQ ID NO: 17561 - DNA, 30 bp, Homo sapiens
  chr3:49049559-49049589
  hypo
ctgtagcacctgaccgacgaatcagtgggc

SEQ ID NO: 17562 - DNA, 17 bp, Homo sapiens
  chr3:49075508-49075525
  hypo
ttttaaaacagagtctc

SEQ ID NO: 17563 - DNA, 43 bp, Homo sapiens
  chr3:49080007-49080050
  hypo
ggtttgtttttttttttgagacggagtcgcgctctgtcaccag

SEQ ID NO: 17564 - DNA, 181 bp, Homo sapiens
  chr3:49095130-49095311
  hypo
gagctgcttgcagctgcgagggactgggactctgcagagacggggtctgaatggagggggctgctgactgtggtgcctggccttggatctgcacctggacctggatgggttgctcagtaggctggtgaacggtgagttgtggggagagctgagccgagacctgttgcggagactgctgtac

SEQ ID NO: 17565 - DNA, 31 bp, Homo sapiens
  chr3:49145905-49145936
  hypo
cgttcaggggctgtccgcgtgggggccacct

SEQ ID NO: 17566 - DNA, 30 bp, Homo sapiens
  chr3:49211734-49211764
  hypo
tgtatgagccccgtcgggactgctggcttt

SEQ ID NO: 17567 - DNA, 32 bp, Homo sapiens
  chr3:49433705-49433737
  hypo
tttcaagaagtcagcccggggccaggcctggt

SEQ ID NO: 17568 - DNA, 37 bp, Homo sapiens
  chr3:49532335-49532372
  hypo
gattacaggtgtgagccaccggcgcttggctgcttgg

SEQ ID NO: 17569 - DNA, 182 bp, Homo sapiens
  chr3:49688340-49688522
  hypo
ccaggaaaagaagacccgagtccccactaaagctgagcccatgccgaagccacctccagagactaccccaacccctgcgactcctaaagtaaagagtggggtgaggagggctgaacctgccacccctgtcgtcaaggctgttccagaagcccccaagggtggggaggcggaggtcagtccca

SEQ ID NO: 17570 - DNA, 30 bp, Homo sapiens
  chr3:49690064-49690094
  hypo
cggcaccgctcccacgggcccctgctaccc

SEQ ID NO: 17571 - DNA, 30 bp, Homo sapiens
  chr3:49699743-49699773
  hypo
cccacagccgggtacgaccccccatgcgga

SEQ ID NO: 17572 - DNA, 31 bp, Homo sapiens
  chr3:49700336-49700367
  hypo
ctggtttgataagccccgggatgcccgctct

SEQ ID NO: 17573 - DNA, 30 bp, Homo sapiens
  chr3:49700590-49700620
  hypo
ccaaaccacacgctcgggacctgggtcgcc

SEQ ID NO: 17574 - DNA, 263 bp, Homo sapiens
  chr3:49720314-49720577
  hypo
cctgccagacctcagcgtgtgggctgagatgctggacaaatcgcccatcagatacatccctcaggtatgcagccccctccttgccctgtgtgctgcccatccatccagaatccagggcccagctcaacacagctccccactcttccccaaacacccaggtgaagacaccactgttactgatgttgggccaggaggaccggcgtgtgcccttcaagcagggcatggagtattaccgtgccctcaagacccggaatgtgcctgtt

SEQ ID NO: 17575 - DNA, 30 bp, Homo sapiens
  chr3:49720803-49720833
  hypo
gcctgtgccacacttcgctcttgaggagct

SEQ ID NO: 17576 - DNA, 30 bp, Homo sapiens
  chr3:49758379-49758409
  hypo
ctacacaggcacaacggacatccacatagc

SEQ ID NO: 17577 - DNA, 31 bp, Homo sapiens
  chr3:49781387-49781418
  hypo
gcaccactgcacaatgcgccacaattattac

SEQ ID NO: 17578 - DNA, 1060 bp, Homo sapiens
  chr3:49939688-49940748
  hypo
agaatgcttctttccgcctgcccccccaccgcgcccccagatcccctcagtgatggaagggaagcagcctgtgttcagccatgtgcatgcagctcacaagtaagggccccttctttcagcttaccgggttggggcaaaaactgggcgactggaagaagtcgaggcctcgccggaggcctggatggactggggattcacaacagcgctccacaccctcatcaattagtgtgtccagcaggtcaatggggaaggcacagacgacagagttggggcccacgccaggaccaccatccttgccagtcacaaagaccccaaatagtacttcctggccctcggcgatgctcagctcagtggcaagttgggcacccactggagcggagtgggccacccgcagcacagggtagggctgtccgccttctggggccccccggcgcctgcgttttggagcaaatctgcagtcgaggaccagctcccgatagtcacccaactctggctcagtggcgctaagccgtgccaggcgtgtgtgcagggcactaggatcatctgtcacgctggccggctgtacagtcaggaagtatacgaaggctcccgtgtggaagctgtgcacgtattcaatactgtaggagacaagatgcttgggcagcactgacaacgccacaaagcccggtgcgaatcccgaggcgtcagccttgagacgcctgatagacactgagcgtgggctgaagctggcagccacggctgcgtccagtgaggatgccacgtagaaataggaggcctggccttgctcaaccacagttacacgggtgcccaatgggctggccacacagtcggggcagtcatcgggccggttatggtgggctgagaagaggcaggctggcgctgccagatgcacggctgtcccttggggctctaggtcatgcaggaagcagcggccctgcaggctggagccacaactgaccagcgcaggcagcgcgggatccagcaccagcacctttgtgtctgtgtcaccgggagggccgtggggtcctgggccacaggctgcacacgtctggcagccagg

SEQ ID NO: 17579 - DNA, 227 bp, Homo sapiens
  chr3:49948217-49948444
  hypo
tagagcagctcctgcgccagctcttgtgccgactgccgcgtacgagccaccgccactagcaccagcgggctccggcgcacgaatactaccttgtagccatctgagagcgggacaggaaagaaggatgtcagcctcagcggcagctccctccgaaaaccgccttccagcgcagctcttcgctttccccatcctttcctcgctcagagctctgcgcacagtaggggttt

SEQ ID NO: 17580 - DNA, 39 bp, Homo sapiens; identical to SEQ ID NO: 2564
  chr3:50192965-50193004
  hypo

SEQ ID NO: 17581 - DNA, 31 bp, Homo sapiens
  chr3:50220857-50220888
  hypo
tgttccgaggctctgccgtgtgtgtctactc

SEQ ID NO: 17582 - DNA, 58 bp, Homo sapiens
  chr3:50224042-50224100
  hypo
aagccaacaagaatgccgtggagtctgtgcagtatggcgtggccggcagcgcagcctt

SEQ ID NO: 17583 - DNA, 31 bp, Homo sapiens
  chr3:50255894-50255925
  hypo
cctggctgtgccttgccgctgtggaggtgag

SEQ ID NO: 17584 - DNA, 104 bp, Homo sapiens; identical to SEQ ID NO: 2566
  chr3:50374390-50374494
  hypo

SEQ ID NO: 17585 - DNA, 116 bp, Homo sapiens; identical to SEQ ID NO: 2568
  chr3:50375444-50375560
  hypo

SEQ ID NO: 17586 - DNA, 31 bp, Homo sapiens
  chr3:51731021-51731052
  hypo
gaaggaagggctgtgtcgcagggccacagtt

SEQ ID NO: 17587 - DNA, 30 bp, Homo sapiens
  chr3:51996819-51996849
  hypo
cctcacctatccaacggaggtgacaccctg

SEQ ID NO: 17588 - DNA, 41 bp, Homo sapiens; identical to SEQ ID NO: 2574
  chr3:52001296-52001337
  hypo

SEQ ID NO: 17589 - DNA, 167 bp, Homo sapiens
  chr3:52088123-52088290
  hypo
tggtggagtccttggcgcagccgaggtagaggtagggcaggatctggacagggaaggctggttggctggatggcacagggctgccgtctgactcggtggcactgctgggcagctctcggtccgactcgccgtcggagcagtcagagctgatgcgcaggccccccagg

SEQ ID NO: 17590 - DNA, 31 bp, Homo sapiens
  chr3:52141679-52141710
  hypo
gggagatcaaggattccgataaagcccaagt

SEQ ID NO: 17591 - DNA, 31 bp, Homo sapiens
  chr3:52164141-52164172
  hypo
accaccacctctcacgcgttgcaaaatattt

SEQ ID NO: 17592 - DNA, 260 bp, Homo sapiens
  chr3:52257401-52257661
  hypo
gaggtttcccagcccacggaaccaactggcattcagccaggagagagaactgtccttcaacaccaggccttcaagacggctcaggtggctgaaggtatcgggatgtagctgggggaagtgacgagggcactccatgcaggggttgggagcgtggtcgcagcggcggcaatttccgcccacatcgagcacacgcagggcggtcagattggccaggtcctcaggcgccagtttgacgatgcggttgtaggacaacagcagat

SEQ ID NO: 17593 - DNA, 30 bp, Homo sapiens
  chr3:52269721-52269751
  hypo
agagatatagtccccggcttgctaacacgc

SEQ ID NO: 17594 - DNA, 18 bp, Homo sapiens
  chr3:52299043-52299061
  hypo
tcggccagccgggtgcgg

SEQ ID NO: 17595 - DNA, 30 bp, Homo sapiens
  chr3:52440356-52440386
  hypo
gccatcaggttgaagcggatgtcgtggtag

SEQ ID NO: 17596 - DNA, 31 bp, Homo sapiens
  chr3:52485958-52485989
  hypo
gcatcctcacaccaaacgccaggcttgtgta

SEQ ID NO: 17597 - DNA, 30 bp, Homo sapiens
  chr3:52517727-52517757
  hypo
ctggtgaattgtcccgtgccctgtgtatct

SEQ ID NO: 17598 - DNA, 30 bp, Homo sapiens
  chr3:52522576-52522606
  hypo
ccagggctcctttgcggatggccagcctgc

SEQ ID NO: 17599 - DNA, 30 bp, Homo sapiens
  chr3:52526505-52526535
  hypo
cacagccagcctgtcgtgtccagcctgacg

SEQ ID NO: 17600 - DNA, 30 bp, Homo sapiens
  chr3:52537788-52537818
  hypo
ccttctgcacctgccggccaggcctggtca

SEQ ID NO: 17601 - DNA, 31 bp, Homo sapiens
  chr3:52540199-52540230
  hypo
gctcatctccaagggtcggatcctcaccatg

SEQ ID NO: 17602 - DNA, 30 bp, Homo sapiens
  chr3:52552578-52552608
  hypo
cctttcaccatcttcgtgccgcacgcagat

SEQ ID NO: 17603 - DNA, 30 bp, Homo sapiens
  chr3:52553418-52553448
  hypo
gggtatgacaagcacgggcctgggagctgg

SEQ ID NO: 17604 - DNA, 30 bp, Homo sapiens
  chr3:52561332-52561362
  hypo
ccaagcgggtgatccggtcccactgaagtg

SEQ ID NO: 17605 - DNA, 30 bp, Homo sapiens
  chr3:52724029-52724059
  hypo
ggttgtaatccagacgttgagtctgtcctg

SEQ ID NO: 17606 - DNA, 492 bp, Homo sapiens
  chr3:52899902-52900394
  hypo
tgtgtgtgtgtaggggcggtggggggacacaaaccgtcacatgctttacacgttgtctaaccttcctgctctcacctactgtacacatggctccattttctttcattagaggctacatggcatcccacagtgtggctgtgccatctcatttactctatgagctgctgccgcgaatgtccctgccatgtgctacctctgcctgtgtgggcccatatctgaggggcagattcctagaggcacacttgctacatcaaaagctatgtgcggcttattctgtggcgccgctctccacagaggctgtgccaactcacactcccactaatagcacgagtacccattcccacattcttgccagcatggtgtactagcaaaccttctcactctgacaatttgatcgctgaagaggctgtctcagcacggctgcggcgtgcacccatcaggccacttgggtgccagggcacctgcggggcttgccaccgtctaccgccttga

SEQ ID NO: 17607 - DNA, 134 bp, Homo sapiens
  chr3:52900623-52900757
  hypo
cgactgctcacttaacgctatgttgtttggttttccacacgccactctcacttggcatgtggagggcggggaccaggcacccagctcgactgtcctcctcagagcccgatctgggctggcgctccacgtggacc

SEQ ID NO: 17608 - DNA, 31 bp, Homo sapiens
  chr3:53014728-53014759
  hypo
acaggtgcaaaaacctcgcattttgtgtgaa

SEQ ID NO: 17609 - DNA, 33 bp, Homo sapiens
  chr3:53032131-53032164
  hypo
aagaaaaaatgtagatcaggtcgggcacggtgg

SEQ ID NO: 17610 - DNA, 1092 bp, Homo sapiens
  chr3:53032403-53033495
  hypo
tctcaaaaaaaagaaaagaaaagaaaaaatgtagatcaataatattattttgctgacgcattggagaaagtaaaggctgggtgcagcttcaagctgaggaccacccaccatgcccccatcatggtggttcccctaggtgctgaagggcccagccatagctctcgccctcgcagggtccctccagggtctctgctgtttcctacctaggggtgactgcagccatggctaagaaagcgccagcgcccacccacctgggccaatggactggttctgctcgtgccacgctggttctgctcctcgccatctcggcagttcagaaagaaccccaacgagcttgtgatctcccgggtcctgtgggcgtatcaacagggggccagccctgtccctcaaccctggggagctggtgctgccgatcgacctgactggcccacaacgtcttcagctaccactgcaagggcctgcggggtgacggctgtgcagcgctgctcgcctagctgttgatcgcctggctgttgatgggctggcacccgcagagctgccctgccggccaccgaccaccatggagggagcattcagctggtgcgcgagctgggtactaaactggctctactgtgagccgccctcggcccctccatctcctcttaccccttgtcatccatgcgtaagccggggacgcccgaggacatgctcttcacccaaggcctgcgccggcgtctgctgatcaagggcccagtacaaaggccgtcatggagatccaggccttcgccaacagcggcctgttctggtgcaagggccagccgggcagcccaaggacctcacgactggctgctgggtcaaggcgttcccggggtgaaggtggataagcagaccaccaagggctcctggaaccctacgtgaaggaggccaagcacagccgtggacaccggcctgaaggctgggaaaggagccgacgccccacctcctctgaccaggcctgcggggaggagccacccacgcgccacagcaagtcctggacctggccctgcattccagggtggggcagggaggctggattctgagagagctgcttccggattgcgttggggtagtcaa

SEQ ID NO: 17611 - DNA, 73 bp, Homo sapiens
  chr3:53054079-53054152
  hypo
aaagatttttttttttcttgccgtggccagtgagtaccaagaaaaaaaaaagtaggccgggcgtgatgtaatc

SEQ ID NO: 17612 - DNA, 125 bp, Homo sapiens
  chr3:53132044-53132169
  hypo
gagtagaaagcatcagcgtgtcctacgcataactggggtacttcctgccttgtgaactcatgtctcagtcacacacacctaagtgcgtcctaggtcacagtgctccgtgtcgtttttactgtgaa

SEQ ID NO: 17613 - DNA, 227 bp, Homo sapiens; identical to SEQ ID NO: 2578
  chr3:53195773-53196000
  hypo

SEQ ID NO: 17614 - DNA, 30 bp, Homo sapiens
  chr3:53220696-53220726
  hypo
actctaccgtgccacgtacgtaagggccat

SEQ ID NO: 17615 - DNA, 112 bp, Homo sapiens
  chr3:53276151-53276263
  hypo
caaagcggtcattgtgcggattccgggggtcctgggacttgtagcgcatggtgtggaaaaagaggacagccatgatctctgcggcgctgcagcatgacgtggggtggctgtg

SEQ ID NO: 17616 - DNA, 31 bp, Homo sapiens
  chr3:53545544-53545575
  hypo
ttcgccgtgcttttgtcggggtcagaaatgc

SEQ ID NO: 17617 - DNA, 35 bp, Homo sapiens
  chr3:53842745-53842780
  hypo
tcccatcttcccccatcgcacggccctgcctctgc

SEQ ID NO: 17618 - DNA, 41 bp, Homo sapiens
  chr3:53857418-53857459
  hypo
gtggcctccaggaatgcgcagtgcagcgggtggttggtctt

SEQ ID NO: 17619 - DNA, 199 bp, Homo sapiens
  chr3:54237683-54237882
  hypo
ccagttctccttcaactccctcggccaaactccgtctcatcccgctggtcagtggcctgcctgtgtgctggcatctgtcggtgtgctgttctgccgacgtgcttcctcgatgtcctctcgctgtccggccgcttgtgtcttcttccgctgatgtgcctcttgacgtctggctgcctgcgtgtctgcttgctagggtctc

SEQ ID NO: 17620 - DNA, 30 bp, Homo sapiens; identical to SEQ ID NO: 2587
  chr3:55237864-55237894
  hypo

SEQ ID NO: 17621 - DNA, 23 bp, Homo sapiens
  chr3:55314345-55314368
  hypo
gttgacatctgttttatgtttcg

SEQ ID NO: 17622 - DNA, 30 bp, Homo sapiens; identical to SEQ ID NO: 2591
  chr3:55749866-55749896
  hypo

SEQ ID NO: 17623 - DNA, 28 bp, Homo sapiens
  chr3:55856928-55856956
  hypo
ccgcaccgagccccaagaatttttaata

SEQ ID NO: 17624 - DNA, 36 bp, Homo sapiens
  chr3:56093397-56093433
  hypo
tgagccaccgtgcccggccacatagagatatttata

SEQ ID NO: 17625 - DNA, 83 bp, Homo sapiens
  chr3:56691369-56691452
  hypo
aaaagtcaatataatcttatttcgtgtatcatctccctgggtgaaaagaaaacttccctggatttctacgtgccactgcaaaa

SEQ ID NO: 17626 - DNA, 391 bp, Homo sapiens
  chr3:56718074-56718465
  hypo
ccactgtttcttccactggaacgttcatcaacgttttcctatagtaaatgtatattaaagaaaaaataaacttgcggtcacattaaaaaatacacagcaggtcgtcgctctcccataaagggaacaacttcatagttaagagccctttacatagtggtttctaccttatcagtataaactatcacgggttatcgtgagtacagccaatatttactgagtgctttctacgtgctagacacggactggacaagtgatttacgtgcattgtctccatttaatcctcacagcaacagacatgaggtagatactagtttgcagaatttgaaagaagcgttgcaagacactggacaaattatggtaaccgaagatttgaaaccgggtctatttaact

SEQ ID NO: 17627 - DNA, 98 bp, Homo sapiens
  chr3:56882997-56883095
  hypo
cactgaggcatgttaatacacttgatgtaccagcggctttttaaagaggctgaactgaacactaattattatcagcaggtatccgctctttatttagt

SEQ ID NO: 17628 - DNA, 13 bp, Homo sapiens
  chr3:57101200-57101213
  hypo
caggcgcggtggc

SEQ ID NO: 17629 - DNA, 597 bp, Homo sapiens; identical to SEQ ID NO: 2594
  chr3:57112783-57113380
  hypo

SEQ ID NO: 17630 - DNA, 38 bp, Homo sapiens
  chr3:57131628-57131666
  hypo
cctgaagaggaggacacgctctccgtcagggaagacgt

SEQ ID NO: 17631 - DNA, 31 bp, Homo sapiens; identical to SEQ ID NO: 2596
  chr3:57261347-57261378
  hypo

SEQ ID NO: 17632 - DNA, 30 bp, Homo sapiens
  chr3:57505728-57505758
  hypo
gtcggccatggtagcgccgcggagccgatg

SEQ ID NO: 17633 - DNA, 31 bp, Homo sapiens
  chr3:57539554-57539585
  hypo
cttttttttttttttccgagacagagtcttg

SEQ ID NO: 17634 - DNA, 270 bp, Homo sapiens
  chr3:57679349-57679619
  hypo
ggcgacagagcgagattccgtctcaaaaaaataaaaataaaatatatgaacgcataatggtgacggtggctaacattgaacgcttactttgtgccagttgatatgccaagtacaagtgcgaatacttacaaatattaccttattgaatcttcacataatcgcaaataagtagactatttatttctttttacagataaggaaatggaggtcctggaggttacatgactagcccaacaagtatgacaactccgatatcggcttgcggttcac

SEQ ID NO: 17635 - DNA, 145 bp, Homo sapiens
  chr3:57679966-57680111
  hypo
acagaaaaatgagtaaaccagcgaggtgtcacgcctgtagtcccaggttcttgggaagctgaggccggctaagttcaaggaggatcgcttgagcaggagttccaggctgcagcgcgctatgatcgcgcctgcgaacagccattgc

SEQ ID NO: 17636 - DNA, 24 bp, Homo sapiens
  chr3:57680170-57680194
  hypo
cacggcagaacttaagcattttgc

SEQ ID NO: 17637 - DNA, 20 bp, Homo sapiens
  chr3:57905503-57905523
  hypo
aagagcgaaactccatctca

SEQ ID NO: 17638 - DNA, 94 bp, Homo sapiens
  chr3:57906366-57906460
  hypo
gaacctttctggtatacgttacctatggtatatctattttatattcaatccttgtctatcttccttctaaaaccttcagagatggcagaatagg

SEQ ID NO: 17639 - DNA, 30 bp, Homo sapiens
  chr3:58109086-58109116
  hypo
gacccctctaaagtcgtggcatcggggcca

SEQ ID NO: 17640 - DNA, 30 bp, Homo sapiens; identical to SEQ ID NO: 2600
  chr3:58474980-58475010
  hypo

SEQ ID NO: 17641 - DNA, 23 bp, Homo sapiens
  chr3:58484907-58484930
  hypo
gctgatctcgaactcctgacctc

SEQ ID NO: 17642 - DNA, 31 bp, Homo sapiens
  chr3:58554742-58554773
  hypo
atcccacctcaccagacgggcccaccacacc

SEQ ID NO: 17643 - DNA, 31 bp, Homo sapiens
  chr3:61332124-61332155
  hypo
ttgattttggacttctcgactcatgaaccat

SEQ ID NO: 17644 - DNA, 91 bp, Homo sapiens; identical to SEQ ID NO: 2603
  chr3:61656125-61656216
  hypo

SEQ ID NO: 17645 - DNA, 31 bp, Homo sapiens
  chr3:62022461-62022492
  hypo
caaatgctaggtaattcgtaccatcctctga

SEQ ID NO: 17646 - DNA, 31 bp, Homo sapiens
  chr3:63867446-63867477
  hypo
agccactgcacccagccgcttgattggagca

SEQ ID NO: 17647 - DNA, 30 bp, Homo sapiens; identical to SEQ ID NO: 2621
  chr3:64232467-64232497
  hypo

SEQ ID NO: 17648 - DNA, 338 bp, Homo sapiens
  chr3:64547142-64547480
  hypo
cattgtaaccgtgctcggtgacttctctggctttatagggaacagatgtgaggatagcaaggggcgcacacgtgaaatgcctggcaggtacccctttgtggctctacttacttcttgccattcctctgccctccaagtgtagaggggacaccgtgggccttggcagtcgcgttccgactccggtctggtgtatgggttgcactcggtctctctggctattttgtgtgttccgatctgacagcccacatgcctctgctgtacgcctcggccacaggacacagagcactaagaagacagagaacgtaagtgggagcttcggctcatttattttttggggg

SEQ ID NO: 17649 - DNA, 30 bp, Homo sapiens; identical to SEQ ID NO: 2624
  chr3:64673486-64673516
  hypo

SEQ ID NO: 17650 - DNA, 31 bp, Homo sapiens; identical to SEQ ID NO: 2625
  chr3:64673805-64673836
  hypo

SEQ ID NO: 17651 - DNA, 27 bp, Homo sapiens
  chr3:64950009-64950036
  hypo
ggactacatgtgcgagacaccatgccc

SEQ ID NO: 17652 - DNA, 76 bp, Homo sapiens
  chr3:65364905-65364981
  hypo
accctgggtaatttcacgttcagcactcaccaaaggtcgtgcctgcttcgggcctgctcaccgaggacacgatgac

SEQ ID NO: 17653 - DNA, 40 bp, Homo sapiens
  chr3:65435158-65435198
  hypo
acaatcaggggccaggcgtggtgtctcatgcctgtaatcc

SEQ ID NO: 17654 - DNA, 20 bp, Homo sapiens
  chr3:65722694-65722714
  hypo
ttttgagacggagtctcgct

SEQ ID NO: 17655 - DNA, 268 bp, Homo sapiens; identical to SEQ ID NO: 2628
  chr3:66024438-66024706
  hypo

SEQ ID NO: 17656 - DNA, 87 bp, Homo sapiens; identical to SEQ ID NO: 2629
  chr3:66024976-66025063
  hypo

SEQ ID NO: 17657 - DNA, 104 bp, Homo sapiens
  chr3:66053362-66053466
  hypo
atgattttcaggaaaaagaaccgggctataaaatgatttccaggtctgccctgagcacttgcgcaataaagagttagaaacggtgtgcaattggctgggcgcgg

SEQ ID NO: 17658 - DNA, 104 bp, Homo sapiens
  chr3:66053765-66053869
  hypo
tgtgcgattcaagtatcacttggatcgcaaatggtgcttctcaagtgtttgaaggtgattaaaagcactttgttttctaagccgtttaaatattccctttggaa

SEQ ID NO: 17659 - DNA, 31 bp, Homo sapiens
  chr3:66452458-66452489
  hypo
gcagggatggaggctgcgctcacatcagctc

SEQ ID NO: 17660 - DNA, 31 bp, Homo sapiens
  chr3:66463001-66463032
  hypo
ggaagggggctgggtccggctgaagtcttga

SEQ ID NO: 17661 - DNA, 197 bp, Homo sapiens
  chr3:66482907-66483104
  hypo
cttaccagtagctaggcgctggcttcgctcttaacatcttccctcatttaatcttcatgacaaccccagaggcggccactattaccgtccccattttacagatggggatgctaaggcacggaaaggtcaactcacttgctgaaggttacacagcagtaagcagtgcagttgggactggagcccggaacaggaatcca

SEQ ID NO: 17662 - DNA, 1079 bp, Homo sapiens; identical to SEQ ID NO: 2630
  chr3:66550297-66551376
  hypo

SEQ ID NO: 17663 - DNA, 305 bp, Homo sapiens; identical to SEQ ID NO: 2631
  chr3:66551597-66551902
  hypo

SEQ ID NO: 17664 - DNA, 30 bp, Homo sapiens; identical to SEQ ID NO: 2632
  chr3:66879269-66879299
  hypo

SEQ ID NO: 17665 - DNA, 251 bp, Homo sapiens; identical to SEQ ID NO: 2633
  chr3:67048414-67048665
  hypo

SEQ ID NO: 17666 - DNA, 159 bp, Homo sapiens; identical to SEQ ID NO: 2636
  chr3:69062097-69062256
  hypo

SEQ ID NO: 17667 - DNA, 24 bp, Homo sapiens
  chr3:69095216-69095240
  hypo
accactgcacgctagcctggacaa

SEQ ID NO: 17668 - DNA, 18 bp, Homo sapiens
  chr3:69309256-69309274
  hypo
acgtgctagcagccctcg

SEQ ID NO: 17669 - DNA, 77 bp, Homo sapiens
  chr3:69309453-69309530
  hypo
gttcgcgagttggcgagtcagcacgagttccgggtgggcgtgggctcggcagcctctgcacccggagcggctggtcg

SEQ ID NO: 17670 - DNA, 626 bp, Homo sapiens; identical to SEQ ID NO: 2637
  chr3:69434905-69435531
  hypo

SEQ ID NO: 17671 - DNA, 186 bp, Homo sapiens; identical to SEQ ID NO: 2638
  chr3:69590940-69591126
  hypo

SEQ ID NO: 17672 - DNA, 43 bp, Homo sapiens; identical to SEQ ID NO: 2639
  chr3:69591779-69591822
  hypo

SEQ ID NO: 17673 - DNA, 31 bp, Homo sapiens; identical to SEQ ID NO: 2641
  chr3:69788413-69788444
  hypo

SEQ ID NO: 17674 - DNA, 30 bp, Homo sapiens; identical to SEQ ID NO: 2642
  chr3:69789184-69789214
  hypo

SEQ ID NO: 17675 - DNA, 255 bp, Homo sapiens
  chr3:69937600-69937855
  hypo
agtacttctggctgtggagatcggtgccttaattagccacatgttctttttacctcctgggaaataagtacgggataaaattggggatcaagccgtagacgtacattgacttagcacacgccgctaagtaattcatcaaggaatgttggtaattagtcctgcctctttcaactcttggcttattttataaaaccggttgatttaaaataatgcctgctgatttattacccacacgtttcaagactggtacttggc

SEQ ID NO: 17676 - DNA, 253 bp, Homo sapiens
  chr3:71036210-71036463
  hypo
actatagattgtcaacgctcaattaattttcacacagtgactccaagcaaaatcaaataaaggcagtgtacctttaaattttacaaatcttaaaatcaagaagcaaagcactgtctccattttgaataatcagttaaagctactaggagaattttagaaacgtaagaggaatatgaccgttaaagagatcgatttattacaaggaaggaggtccaagacaaacttttaggttcagacacgatccttctgcttc

SEQ ID NO: 17677 - DNA, 271 bp, Homo sapiens
  chr3:71049501-71049772
  hypo
catgtgtgtttaagatgtgcacggtgaactctcagttattcttagtggtggagagaaaaaaggacaatgcaaaatgagaaataaacccacatataacttccattgcgacttgggaaaacacggttttgggtgcactgccttgccgtcttggtctcgctcgctctttctctcttcattcacattcattctctcaaactctctttccccaagcttgtcttcctagctccagtttaatcatatgagcaacgtcgaggacttacactgacaacag

SEQ ID NO: 17678 - DNA, 1019 bp, Homo sapiens; identical to SEQ ID NO: 2644
  chr3:71113815-71114834
  hypo

SEQ ID NO: 17679 - DNA, 12 bp, Homo sapiens
  chr3:71127280-71127292
  hypo
cctcctctgtat

SEQ ID NO: 17680 - DNA, 27 bp, Homo sapiens
  chr3:71148377-71148404
  hypo
taggttgcacacagtggctcacgccta

SEQ ID NO: 17681 - DNA, 31 bp, Homo sapiens
  chr3:71163676-71163707
  hypo
taagaaacacaagcaccgatagatgagtgac

SEQ ID NO: 17682 - DNA, 30 bp, Homo sapiens
  chr3:71357180-71357210
  hypo
ttgtgacaaaaatccgtatgcaagctttag

SEQ ID NO: 17683 - DNA, 153 bp, Homo sapiens
  chr3:71366444-71366597
  hypo
acattttgctggctgacatgacgccacgctgtcacttgatcaggtgtggagtaccacatggaatgaataaatacttatccacaaccgcatattaaatgggaattcgcacaggcgggctctggagacaaagacgtttctatacagaaatattaa

SEQ ID NO: 17684 - DNA, 113 bp, Homo sapiens
  chr3:71410824-71410937
  hypo
aagacagggctgtcagcctgtcgttccagtgagacgccggtctgctttcaccgctgctcaggactggatgctcaactaattattcagacagcgacattaatgagagccctcat

SEQ ID NO: 17685 - DNA, 30 bp, Homo sapiens
  chr3:71531004-71531034
  hypo
acaccttttctcactcgatgctattttcta

SEQ ID NO: 17686 - DNA, 31 bp, Homo sapiens
  chr3:71567986-71568017
  hypo
tttgatgaacttctaacgagatgccagacac

SEQ ID NO: 17687 - DNA, 238 bp, Homo sapiens; identical to SEQ ID NO: 2645
  chr3:71631263-71631501
  hypo

SEQ ID NO: 17688 - DNA, 110 bp, Homo sapiens; identical to SEQ ID NO: 2646
  chr3:71631789-71631899
  hypo

SEQ ID NO: 17689 - DNA, 230 bp, Homo sapiens; identical to SEQ ID NO: 2648
  chr3:71834625-71834855
  hypo

SEQ ID NO: 17690 - DNA, 30 bp, Homo sapiens
  chr3:71942837-71942867
  hypo
ttgcctgttctcagcgaggctaggagagag

SEQ ID NO: 17691 - DNA, 30 bp, Homo sapiens
  chr3:72769747-72769777
  hypo
ctcttcaattagcacgtgcaatttcaacac

SEQ ID NO: 17692 - DNA, 153 bp, Homo sapiens
  chr3:72877845-72877998
  hypo
aaaaaaaagagagagaaaagccgtgtggtataggtggggaaatgcaaacattcattattgctgtggtgtaaaacgtgagcagggagtggcaaaagtgaagctacagaggtaggcagggtcgggatcacagagaaattgcgatgacacacaaag

SEQ ID NO: 17693 - DNA, 31 bp, Homo sapiens
  chr3:72913684-72913715
  hypo
cttttagagataaccacgttaactaacatct

SEQ ID NO: 17694 - DNA, 28 bp, Homo sapiens
  chr3:73045502-73045530
  hypo
tcgcctcggcctccctcccaaagtgttg

SEQ ID NO: 17695 - DNA, 31 bp, Homo sapiens
  chr3:73045730-73045761
  hypo
tcaaagcctaggagtccgcctgcaaccctct

SEQ ID NO: 17696 - DNA, 31 bp, Homo sapiens
  chr3:73232504-73232535
  hypo
acaagcgtgcaccgaccggcgatggacttca

SEQ ID NO: 17697 - DNA, 30 bp, Homo sapiens; identical to SEQ ID NO: 2655
  chr3:74663492-74663522
  hypo

SEQ ID NO: 17698 - DNA, 31 bp, Homo sapiens; identical to SEQ ID NO: 2656
  chr3:74663813-74663844
  hypo

SEQ ID NO: 17699 - DNA, 30 bp, Homo sapiens; identical to SEQ ID NO: 2657
  chr3:75168992-75169022
  hypo

SEQ ID NO: 17700 - DNA, 31 bp, Homo sapiens
  chr3:82363227-82363258
  hypo
cttgccacatgctggacgttagaaaaagaag

SEQ ID NO: 17701 - DNA, 30 bp, Homo sapiens; identical to SEQ ID NO: 2663
  chr3:85617271-85617301
  hypo

SEQ ID NO: 17702 - DNA, 30 bp, Homo sapiens
  chr3:86061700-86061730
  hypo
gcgggcgaagatgccgaacttctgcgctgc

SEQ ID NO: 17703 - DNA, 37 bp, Homo sapiens
  chr3:87737839-87737876
  hypo
gtgagccaccgcgcccggccatgatttttttttaaaa

SEQ ID NO: 17704 - DNA, 23 bp, Homo sapiens
  chr3:88210213-88210236
  hypo
ttttttttttttgagacggagtc

SEQ ID NO: 17705 - DNA, 39 bp, Homo sapiens
  chr3:93697928-93697967
  hypo
ttatttatttttgagacggagtcttgctctgttgcccag

SEQ ID NO: 17706 - DNA, 39 bp, Homo sapiens
  chr3:93698206-93698245
  hypo
tgggattacaggcgtgagccaccgcgcccggccccaaat

SEQ ID NO: 17707 - DNA, 31 bp, Homo sapiens
  chr3:93707708-93707739
  hypo
gtttagctgacaagtgcgcagatctcctctt

SEQ ID NO: 17708 - DNA, 30 bp, Homo sapiens
  chr3:94656924-94656954
  hypo
acccctggtggcggcggtgttgagccggtg

SEQ ID NO: 17709 - DNA, 102 bp, Homo sapiens; identical to SEQ ID NO: 2672
  chr3:97690940-97691042
  hypo

SEQ ID NO: 17710 - DNA, 106 bp, Homo sapiens
  chr3:97744979-97745085
  hypo
agaaaacgaaaggaccgcaagattgtaaacagattaaggcagtgttctacaaagacaaaatgagcagaaaatacagggtgcaggctgagagcgcaccgggcagaat

SEQ ID NO: 17711 - DNA, 29 bp, Homo sapiens
  chr3:98618381-98618410
  hypo
ccgcgcccggtagactggccttttctaaa

SEQ ID NO: 17712 - DNA, 1128 bp, Homo sapiens; identical to SEQ ID NO: 2675
  chr3:98619781-98620909
  hypo

SEQ ID NO: 17713 - DNA, 450 bp, Homo sapiens; identical to SEQ ID NO: 2677
  chr3:99594871-99595321
  hypo

SEQ ID NO: 17714 - DNA, 31 bp, Homo sapiens
  chr3:99694509-99694540
  hypo
acacagaggaagagagcgttctgttttagac

SEQ ID NO: 17715 - DNA, 41 bp, Homo sapiens
  chr3:99944304-99944345
  hypo
gagcggctgctgggggcggcggggaccgaagagaagaagaa

SEQ ID NO: 17716 - DNA, 30 bp, Homo sapiens
  chr3:100270285-100270315
  hypo
ggcgaggaaagccccgtggtctccttcaaa

SEQ ID NO: 17717 - DNA, 30 bp, Homo sapiens; identical to SEQ ID NO: 2679
  chr3:100306083-100306113
  hypo

SEQ ID NO: 17718 - DNA, 30 bp, Homo sapiens
  chr3:100535428-100535458
  hypo
tgactgttacttcccgtcataggcatttct

SEQ ID NO: 17719 - DNA, 150 bp, Homo sapiens
  chr3:101157527-101157677
  hypo
taaattacacatcaataaagtcggtttcaacgaatgagtaaatagaaaacttgaattgtcctataagggcgtgaccagatggcttcactgatgaattcaactgaacatttaaaaaagaatgagtatcggtctttgccgccgcgccggcga

SEQ ID NO: 17720 - DNA, 90 bp, Homo sapiens
  chr3:101230980-101231070
  hypo
taactgtctctgcagaaaccaacggtaccatcagaaacagaaaaatgaaatgaaataattgattcattgggcgttcgtttgtgtactgga

SEQ ID NO: 17721 - DNA, 693 bp, Homo sapiens; identical to SEQ ID NO: 2680
  chr3:101231553-101232246
  hypo

SEQ ID NO: 17722 - DNA, 31 bp, Homo sapiens
  chr3:101406817-101406848
  hypo
tttttttttttttccttgagacggagtttcg

SEQ ID NO: 17723 - DNA, 16 bp, Homo sapiens
  chr3:101420460-101420476
  hypo
cagagcgagactctgt

SEQ ID NO: 17724 - DNA, 347 bp, Homo sapiens; identical to SEQ ID NO: 2685
  chr3:101497865-101498212
  hypo

SEQ ID NO: 17725 - DNA, 104 bp, Homo sapiens; identical to SEQ ID NO: 2686
  chr3:101498503-101498607
  hypo

SEQ ID NO: 17726 - DNA, 44 bp, Homo sapiens
  chr3:101575166-101575210
  hypo
tacaggcgtgagccaccgcgcccggccaagaagcccagatttta

SEQ ID NO: 17727 - DNA, 30 bp, Homo sapiens
  chr3:101589092-101589122
  hypo
taggatcacagatgacgggcaggggcttta

SEQ ID NO: 17728 - DNA, 21 bp, Homo sapiens
  chr3:105174273-105174294
  hypo
cgacaccgtctcaaaaaaaaa

SEQ ID NO: 17729 - DNA, 106 bp, Homo sapiens
  chr3:107530307-107530413
  hypo
cgccacttgggtgaacgcttctggggtgcgcttctgggactagtgatcagaacacaccatctttccctgaactgggacaaaactgtggaagcgatttcattaagag

SEQ ID NO: 17730 - DNA, 30 bp, Homo sapiens
  chr3:108836863-108836893
  hypo
gacgcagctgggcccgctgaagcgcagggt

SEQ ID NO: 17731 - DNA, 30 bp, Homo sapiens; identical to SEQ ID NO: 2692
  chr3:108976491-108976521
  hypo

SEQ ID NO: 17732 - DNA, 8 bp, Homo sapiens
  chr3:109035649-109035657
  hypo
gggcgcgg

SEQ ID NO: 17733 - DNA, 146 bp, Homo sapiens
  chr3:109061755-109061901
  hypo
cagcccaattcttgtccgttctcaggtccccctctcagagactacaatctgtacaaccataggggcagccctgtgtccctactttatttcaagtttgttaaacagattcagatgctttttaaaaaatccattttatggctgggcgc

SEQ ID NO: 17734 - DNA, 28 bp, Homo sapiens
  chr3:111281074-111281102
  hypo
cctccccgaataacaacttctttgaagt

SEQ ID NO: 17735 - DNA, 124 bp, Homo sapiens; identical to SEQ ID NO: 2694
  chr3:111393431-111393555
  hypo

SEQ ID NO: 17736 - DNA, 20 bp, Homo sapiens
  chr3:111469485-111469505
  hypo
aaatctaaaaataaaattcc

SEQ ID NO: 17737 - DNA, 22 bp, Homo sapiens
  chr3:112207083-112207105
  hypo
tttttttttgagacagagtctc

SEQ ID NO: 17738 - DNA, 35 bp, Homo sapiens
  chr3:112207344-112207379
  hypo
aggcgtgagccaccgcactgggcctagcccagtaa

SEQ ID NO: 17739 - DNA, 31 bp, Homo sapiens
  chr3:112539318-112539349
  hypo
tcaggctctagtgcagcggcgcaatctcggc

SEQ ID NO: 17740 - DNA, 39 bp, Homo sapiens
  chr3:112543789-112543828
  hypo
aaattgcatgtaaggccgggcacggtggctcacgcctgg

SEQ ID NO: 17741 - DNA, 750 bp, Homo sapiens; identical to SEQ ID NO: 2702
  chr3:112930655-112931405
  hypo

SEQ ID NO: 17742 - DNA, 30 bp, Homo sapiens
  chr3:113005188-113005218
  hypo
aagggtggactagccgcctaaacatagaaa

SEQ ID NO: 17743 - DNA, 573 bp, Homo sapiens; identical to SEQ ID NO: 2703
  chr3:113251173-113251746
  hypo

SEQ ID NO: 17744 - DNA, 62 bp, Homo sapiens
  chr3:113557397-113557459
  hypo
aggaatgagagcgaaactccgtctcaaaaaaaaaaaaaaaaagtttccgagcaattcacctt

SEQ ID NO: 17745 - DNA, 30 bp, Homo sapiens
  chr3:113957888-113957918
  hypo
ggtttgcatgcccccgtgacgagtggtctg

SEQ ID NO: 17746 - DNA, 231 bp, Homo sapiens
  chr3:114070277-114070508
  hypo
ggagtgccccgcggcgtgtcctggcccgagtcctggatccccgggaacacatcgcccacgttctgtgacacgatgcgcgtgcactcgtcgatgactgttttgatctgcaggatgctggcggccgtgaggatctgcagagcttccgactgcgagacccgtagcacgccgctgtacatgaagtcaatgagcttttgcactgactgcactgacaccaccgacgggatctcgatg

SEQ ID NO: 17747 - DNA, 323 bp, Homo sapiens; identical to SEQ ID NO: 2706
  chr3:115377667-115377990
  hypo

SEQ ID NO: 17748 - DNA, 30 bp, Homo sapiens; identical to SEQ ID NO: 2707
  chr3:115881799-115881829
  hypo

SEQ ID NO: 17749 - DNA, 39 bp, Homo sapiens
  chr3:119011021-119011060
  hypo
gcgtgaaccactgcgcccggcctgtaaattatttataag

SEQ ID NO: 17750 - DNA, 43 bp, Homo sapiens
  chr3:119517357-119517400
  hypo
ttctatgctccaaaaagtactcgggaggctgaggcaggagaat

SEQ ID NO: 17751 - DNA, 31 bp, Homo sapiens
  chr3:119687780-119687811
  hypo
aaacataataagcacccgcaaaaatgaaatg

SEQ ID NO: 17752 - DNA, 21 bp, Homo sapiens
  chr3:119755627-119755648
  hypo
agactccgactcaaaaaaaaa

SEQ ID NO: 17753 - DNA, 31 bp, Homo sapiens; identical to SEQ ID NO: 2716
  chr3:120068919-120068950
  hypo

SEQ ID NO: 17754 - DNA, 237 bp, Homo sapiens; identical to SEQ ID NO: 2719
  chr3:120626866-120627103
  hypo

SEQ ID NO: 17755 - DNA, 204 bp, Homo sapiens; identical to SEQ ID NO: 2720
  chr3:120627311-120627515
  hypo

SEQ ID NO: 17756 - DNA, 26 bp, Homo sapiens
  chr3:121215301-121215327
  hypo
atgagccaccgcgcccggcaatcagt

SEQ ID NO: 17757 - DNA, 30 bp, Homo sapiens
  chr3:121215804-121215834
  hypo
gtaagagatccttcacgtctactaggcgat

SEQ ID NO: 17758 - DNA, 213 bp, Homo sapiens
  chr3:121438458-121438671
  hypo
atgacagtcattctaccgagttttagcaacacacctgttgcatctctgtttccacatctgcctgggttactaactgaagaagctcatcttcatgaagacgaacttgtgtttcaaagcgggcatctttctctcggaccacctgctgcatggaactcaactgaagacacataccagagaaactatgcaagttacactccccgaatattgcacaaa

SEQ ID NO: 17759 - DNA, 95 bp, Homo sapiens
  chr3:121500623-121500718
  hypo
ttcagttcaactcggcgtgcatcagtgagttcttggagtcctcgccaaggagcaaatagtttctttttcttacggcacttcgctaggaatttaag

SEQ ID NO: 17760 - DNA, 21 bp, Homo sapiens
  chr3:121511496-121511517
  hypo
agactccgtctcaaaaaaaaa

SEQ ID NO: 17761 - DNA, 29 bp, Homo sapiens
  chr3:121563996-121564025
  hypo
gaaaaatgggatgggcgcggtggctcacc

SEQ ID NO: 17762 - DNA, 30 bp, Homo sapiens; identical to SEQ ID NO: 2722
  chr3:121634394-121634424
  hypo

SEQ ID NO: 17763 - DNA, 308 bp, Homo sapiens
  chr3:121637808-121638116
  hypo
ggctcgctcagcctgcgactggactgggcatgtagcgagcagcttctgtgttgggtgcggcatctagacaaggggaacacggtggcgcccaaaaactcggagatgctagcaattgcagagtcctaagaggtgttatagctcctgctcagggagtcccaaggtctgagcccccagaaatgttacagctgttcactcctgtagttcaacgagcaggagcatgttacaactctctcctgtagtctagcgagcgggagcgtgttacggctcttttattcccgctgcccatagcttggcgagctgcccagggg

SEQ ID NO: 17764 - DNA, 241 bp, Homo sapiens
  chr3:122003335-122003576
  hypo
ctttggcttgctggcgtgcatcttcttcaacaagatctacatcattctcttcaagccatcccgcaacaccatcgaggaggtgcgttgcagcaccgcagctcacgctttcaaggtggctgcccgggccacgctgcgccgcagcaacgtctcccgcaagcggtccagcagccttggaggctccacgggatccaccccctcctcctccatcagcagcaagagcaacagcgaagacccattccca

SEQ ID NO: 17765 - DNA, 77 bp, Homo sapiens
  chr3:122231235-122231312
  hypo
agttctgtgaagaaacttctacgagaaccactttataaagtaacataatgcggctgggcgcggtggctcatgcctgt

SEQ ID NO: 17766 - DNA, 181 bp, Homo sapiens
  chr3:122451546-122451727
  hypo
aaacaaaaaaccaaaacagagcaaaaaaaacacgctggtctcacccactacactgattttataataggtcactatctgcagtttgaaaaagtggtcaaaggagtagcaagcataaaaagtaaaatatctgcagtaaacgatgtctatttctgcaataggaatataccaaggtgggggtggt

SEQ ID NO: 17767 - DNA, 164 bp, Homo sapiens; identical to SEQ ID NO: 2728
  chr3:122514391-122514555
  hypo

SEQ ID NO: 17768 - DNA, 28 bp, Homo sapiens
  chr3:122573642-122573670
  hypo
aaatatgactcaaaggctgggcgcggtg

SEQ ID NO: 17769 - DNA, 30 bp, Homo sapiens
  chr3:122604764-122604794
  hypo
ggagaggagagagccgggcatgcagattct

SEQ ID NO: 17770 - DNA, 30 bp, Homo sapiens
  chr3:122629778-122629808
  hypo
actcctgggactgacgctggcagtgctggc

SEQ ID NO: 17771 - DNA, 70 bp, Homo sapiens; identical to SEQ ID NO: 2729
  chr3:122785819-122785889
  hypo

SEQ ID NO: 17772 - DNA, 31 bp, Homo sapiens
  chr3:123064299-123064330
  hypo
agcacctttgtccatgcggtgccagggacaa

SEQ ID NO: 17773 - DNA, 436 bp, Homo sapiens
  chr3:123166197-123166633
  hypo
ggagtccagctgaggcctgcccgccccgcaatccagtcccggtggccaggtcggcccctacctgcttcagcaggaactggtcctgggcgttggtgcgcagggcgatggccaggtggagggcggacaggagcaccccgctgagcactgcggcccgcatgcgcacgggcagcagcgtgtagatggtgtagatgaagaacacggtccaccagatgccctcagaggcgctgcgtggctgcggcagcagcaggcccaccacctggacggccagcaccacggcgatgagcgcatagcaggccaggcccatgtggtcctggtggaaggcggcgcggttgcaaagcacagccatgatgaggatcacgccgacggcggccgccagcacggccaggtagggcagctggagcgggggccgcgccgcgtggaaggccaacatgaccag

SEQ ID NO: 17774 - DNA, 84 bp, Homo sapiens; identical to SEQ ID NO: 2730
  chr3:123167958-123168042
  hypo

SEQ ID NO: 17775 - DNA, 30 bp, Homo sapiens
  chr3:123339402-123339432
  hypo
ggaactgatgtgtgcgttaatgtgactaaa

SEQ ID NO: 17776 - DNA, 30 bp, Homo sapiens
  chr3:123340799-123340829
  hypo
gcaggctcaggccacgtggcaacctttcat

SEQ ID NO: 17777 - DNA, 44 bp, Homo sapiens
  chr3:123667349-123667393
  hypo
gtgccgggattacaggcgtttagccacggcgctcggccataaac

SEQ ID NO: 17778 - DNA, 187 bp, Homo sapiens
  chr3:124103486-124103673
  hypo
atgaggcacctagctggtgcccgcctgcaggctgctcgcttgctgagaggcggcgtgccagctccgcgcaccgcgcctcagtgccagatcagggagctgtcagctcagcgcccacgcccctccgcttcagctccggggagccccagggtgggctgctggaaggcgcgactgcaacttgactttgcct

SEQ ID NO: 17779 - DNA, 14 bp, Homo sapiens
  chr3:124126632-124126646
  hypo
tttttattttttat

SEQ ID NO: 17780 - DNA, 209 bp, Homo sapiens
  chr3:124281714-124281923
  hypo
tggtcctccaggacttcagtgcgggccacagcagtgagctgaccatccaggtggggcagacggtagagctgctggagcggcccagcgagcggcctggttggtgtctggtccgtaccaccgaacggagcccgcccttggagggtctggtccccagcagcgccctgtgcatctcacactcccgaagcagcgtggagatggactgcttcttc

SEQ ID NO: 17781 - DNA, 31 bp, Homo sapiens
  chr3:124436153-124436184
  hypo
agtagctttctatatccgagacatcatggag

SEQ ID NO: 17782 - DNA, 99 bp, Homo sapiens
  chr3:124518757-124518856
  hypo
ctccacatctttctgccgtgggctgggaacgatttgagcctgcagataggataagagtggggactatgcctgcccgaagccacccgtggggccatcaag

SEQ ID NO: 17783 - DNA, 30 bp, Homo sapiens
  chr3:124609499-124609529
  hypo
cttggaaagttctgcgatcaaacctgcccc

SEQ ID NO: 17784 - DNA, 617 bp, Homo sapiens; identical to SEQ ID NO: 2736
  chr3:124773768-124774385
  hypo

SEQ ID NO: 17785 - DNA, 76 bp, Homo sapiens
  chr3:124885767-124885843
  hypo
cacatggggaggatgagcctccggacagtggtcccttggggaacaggacggggtcggtgaaggtacagcttaaact

SEQ ID NO: 17786 - DNA, 40 bp, Homo sapiens
  chr3:125026373-125026413
  hypo
tcctgacctcgtgatccgcccgcttcggcctcccaaacca

SEQ ID NO: 17787 - DNA, 27 bp, Homo sapiens
  chr3:125041099-125041126
  hypo
gacttcgtgatccaccagcctcagcct

SEQ ID NO: 17788 - DNA, 21 bp, Homo sapiens
  chr3:125042500-125042521
  hypo
ggccttataaagaacaattgc

SEQ ID NO: 17789 - DNA, 57 bp, Homo sapiens
  chr3:125078754-125078811
  hypo
tccaccagctgctaagtgcaccgccagcacaggcccgcccatgcagctggcacaact

SEQ ID NO: 17790 - DNA, 117 bp, Homo sapiens
  chr3:125261100-125261217
  hypo
atatttaaaaagttacgccaatgattaacacaaagcaaaagaagttaggttatggaaagcgatgctttttcttttctttcttttttttttgagatgcagttccgttcttgtggagtg

SEQ ID NO: 17791 - DNA, 31 bp, Homo sapiens; identical to SEQ ID NO: 2737
  chr3:125635404-125635435
  hypo

SEQ ID NO: 17792 - DNA, 31 bp, Homo sapiens
  chr3:125679194-125679225
  hypo
acagtgcccccacctgcgtgtgctgcctgtg

SEQ ID NO: 17793 - DNA, 31 bp, Homo sapiens
  chr3:125828922-125828953
  hypo
gcccaccttcatcttccgcacctcttctacc

SEQ ID NO: 17794 - DNA, 31 bp, Homo sapiens
  chr3:125846598-125846629
  hypo
acagtgagggtggacccggggctggggctct

SEQ ID NO: 17795 - DNA, 31 bp, Homo sapiens
  chr3:126218231-126218262
  hypo
ctttcttctccacatccgctcctgtgggcag

SEQ ID NO: 17796 - DNA, 31 bp, Homo sapiens
  chr3:126220860-126220891
  hypo
tggcagacaggttgctcgagacagttcctta

SEQ ID NO: 17797 - DNA, 153 bp, Homo sapiens
  chr3:126254314-126254467
  hypo
tcgctgtcctcagccgggagacacacagacagtatcgctgtcctcagccgggagacacacagacagcatccctgtcctcagccgggagacagacagacagacagcatcactttcctcagtcgggagacagccggacagcatcacttttctcag

SEQ ID NO: 17798 - DNA, 31 bp, Homo sapiens
  chr3:126258809-126258840
  hypo
acacaaatgccacacacgcatgacacacaca

SEQ ID NO: 17799 - DNA, 30 bp, Homo sapiens
  chr3:126261822-126261852
  hypo
tgtcctccccacctcgcccaccctggcaag

SEQ ID NO: 17800 - DNA, 30 bp, Homo sapiens
  chr3:126465979-126466009
  hypo
ttttctcttcatctcgtctcctttctccct

SEQ ID NO: 17801 - DNA, 61 bp, Homo sapiens
  chr3:126472158-126472219
  hypo
ttctgtgaagaagtcaaggttcggcagcaggagctgtgccgtccttttgcccacctggagg

SEQ ID NO: 17802 - DNA, 30 bp, Homo sapiens
  chr3:126577517-126577547
  hypo
gacacagccagaatgcggcaggcccactgt

SEQ ID NO: 17803 - DNA, 30 bp, Homo sapiens
  chr3:126577779-126577809
  hypo
ccgttgtctgtcccccgctgaggtttgagc

SEQ ID NO: 17804 - DNA, 143 bp, Homo sapiens
  chr3:126676247-126676390
  hypo
gtcttctgcaggccccgcagggtggagcccgtctgctcagggttgcaggcccagattctccactgctaccgagatcgcccgcatgaggtgctgctgtgctcggacctggtcaaggcataccagcgctgcgtgagcgccgccca

SEQ ID NO: 17805 - DNA, 187 bp, Homo sapiens
  chr3:126724819-126725006
  hypo
agctaggagggtctccgggcaagttgttcccctgtctggacttgccctgtgtgggagtcctgggcaagcagtcctggtgactcagccatgctgctcgtgcaggagaccagcgggtggtgaaactctacctaaagtccaaggagacagggaagaagtttgcgtctgtggacttcgtcttctacaactg

SEQ ID NO: 17806 - DNA, 30 bp, Homo sapiens
  chr3:126731016-126731046
  hypo
caggggctgggggccgtgagccggaatggg

SEQ ID NO: 17807 - DNA, 30 bp, Homo sapiens
  chr3:126755850-126755880
  hypo
gagagagcccggagcggcgtgccatctcgg

SEQ ID NO: 17808 - DNA, 30 bp, Homo sapiens
  chr3:126894216-126894246
  hypo
cacaagcacaatgagcgcctgaaacagcca

SEQ ID NO: 17809 - DNA, 80 bp, Homo sapiens
  chr3:127292369-127292449
  hypo
attgatggccttccagcgctcgctgtctgtgctgttgatgctgccagtgtggcagggcatggaagcgatgtcatccaggt

SEQ ID NO: 17810 - DNA, 30 bp, Homo sapiens
  chr3:127325833-127325863
  hypo
gcttggcccacacgacgtttttaggaattc

SEQ ID NO: 17811 - DNA, 203 bp, Homo sapiens
  chr3:127326109-127326312
  hypo
accatattcaggagacgctgccaaagcctctgatgttaaggtcttaggcacatgtaatgtgcctttgtacttgagcgtccctgtaaatgggctcatcgccatcgctgtggtggcgcccaggccccttgactgccttgctgctgtggctgttggctgtcctcttctcaccgctctgcagtgcagttctgcgaactgtcccagct

SEQ ID NO: 17812 - DNA, 460 bp, Homo sapiens; identical to SEQ ID NO: 2751
  chr3:127347870-127348330
  hypo

SEQ ID NO: 17813 - DNA, 30 bp, Homo sapiens
  chr3:127373504-127373534
  hypo
gctttagttacattcggtataaaaaatgaa

SEQ ID NO: 17814 - DNA, 89 bp, Homo sapiens
  chr3:127394869-127394958
  hypo
gtgaccccatccgccgggctctacgcgattacaagcaggtcacggcttcctgcaggaggcgggattactatgacgacttcttgcagcgg

SEQ ID NO: 17815 - DNA, 31 bp, Homo sapiens
  chr3:127395762-127395793
  hypo
atgacagctgaggtcccgcaggccctcatcc

SEQ ID NO: 17816 - DNA, 31 bp, Homo sapiens
  chr3:127401716-127401747
  hypo
gtgggaggtgggagcacgggagtgacagggg

SEQ ID NO: 17817 - DNA, 26 bp, Homo sapiens
  chr3:127512901-127512927
  hypo
cagccctccaggaggccgaggtgggc

SEQ ID NO: 17818 - DNA, 30 bp, Homo sapiens
  chr3:127534320-127534350
  hypo
taacacgcggtgctacgtctttgccatgac

SEQ ID NO: 17819 - DNA, 181 bp, Homo sapiens
  chr3:127534723-127534904
  hypo
gccaccctttccccaccctggcgcccaaggaccatgtagacgtcaataaggaagtatttgctgaatgaatcgctgctttggatcctgggagaggagagcaaggagccgtatggggtagccacagagctgcatgcgaggggcgctgagcaggagccaggccgtcctcacccctgcagagact

SEQ ID NO: 17820 - DNA, 225 bp, Homo sapiens; identical to SEQ ID NO: 2755
  chr3:127634094-127634319
  hypo

SEQ ID NO: 17821 - DNA, 31 bp, Homo sapiens
  chr3:127783728-127783759
  hypo
ttgaaggtgctatcatcgcacttttccatct

SEQ ID NO: 17822 - DNA, 761 bp, Homo sapiens; identical to SEQ ID NO: 2756
  chr3:127794362-127795123
  hypo

SEQ ID NO: 17823 - DNA, 27 bp, Homo sapiens
  chr3:127873581-127873608
  hypo
acgtccggcctgtaccaacattttctg

SEQ ID NO: 17824 - DNA, 30 bp, Homo sapiens
  chr3:127998756-127998786
  hypo
agctcagtgtccagcggtgggtctggttct

SEQ ID NO: 17825 - DNA, 30 bp, Homo sapiens
  chr3:128037666-128037696
  hypo
gcctggcttcgccaccgagggagcacttgg

SEQ ID NO: 17826 - DNA, 30 bp, Homo sapiens
  chr3:128038297-128038327
  hypo
tgtatattcatgggccgatttttatttgcg

SEQ ID NO: 17827 - DNA, 56 bp, Homo sapiens
  chr3:128070500-128070556
  hypo
aagagggacacacacacgtgtaatgacataattatatgcaccggcagccaagtcct

SEQ ID NO: 17828 - DNA, 30 bp, Homo sapiens
  chr3:128081072-128081102
  hypo
ggcaggctggatggcgggtgggacaacagc

SEQ ID NO: 17829 - DNA, 30 bp, Homo sapiens
  chr3:128118206-128118236
  hypo
ggggtgcatgagcccgtcgagtgcgcgctt

SEQ ID NO: 17830 - DNA, 31 bp, Homo sapiens
  chr3:128122245-128122276
  hypo
tgcacctccctgacagcgtaggtcctagcag

SEQ ID NO: 17831 - DNA, 30 bp, Homo sapiens
  chr3:128127093-128127123
  hypo
tctccctgagtgtccggtgacctcccccag

SEQ ID NO: 17832 - DNA, 30 bp, Homo sapiens
  chr3:128182026-128182056
  hypo
ttcttgatgtcctccggggaagcgctggcc

SEQ ID NO: 17833 - DNA, 58 bp, Homo sapiens; identical to SEQ ID NO: 2760
  chr3:128273993-128274051
  hypo

SEQ ID NO: 17834 - DNA, 346 bp, Homo sapiens; identical to SEQ ID NO: 2761
  chr3:128274308-128274654
  hypo

SEQ ID NO: 17835 - DNA, 40 bp, Homo sapiens
  chr3:128290741-128290781
  hypo
tacaggcgtgagccaccacgcccagcaattttattgttat

SEQ ID NO: 17836 - DNA, 183 bp, Homo sapiens; identical to SEQ ID NO: 2764
  chr3:128720163-128720346
  hypo

SEQ ID NO: 17837 - DNA, 115 bp, Homo sapiens; identical to SEQ ID NO: 2765
  chr3:128720418-128720533
  hypo

SEQ ID NO: 17838 - DNA, 699 bp, Homo sapiens; identical to SEQ ID NO: 2766
  chr3:128720566-128721265
  hypo

SEQ ID NO: 17839 - DNA, 227 bp, Homo sapiens
  chr3:128737540-128737767
  hypo
ctctcacctcttgttcccacacgccttcctgcccttcaggcagtccctccccggtgatttctctgtatcttcttgttgggatgtgttcttgcgaagtgagtctttcgggtctgtttgcaccccattggcggcgttgtggcacatgtctcactgtgcctctgactccccactcggcgctggagttcccaccccaaatgttgttctgcgagtgcatcttctggctgctt

SEQ ID NO: 17840 - DNA, 30 bp, Homo sapiens
  chr3:128766078-128766108
  hypo
actggctggtcctccgggcggttggctgca

SEQ ID NO: 17841 - DNA, 164 bp, Homo sapiens
  chr3:128785013-128785177
  hypo
ctcagactggctagaaatggactggaagtgagcggaaggtggaagctctgtcctggctcagctcggcctatgctgggagggtgactggtggtgtggaaagtccgctgggactcagcagcacctgggcctctaattgttagctttctaaccggctctggggctgc

SEQ ID NO: 17842 - DNA, 26 bp, Homo sapiens
  chr3:128791367-128791393
  hypo
ttttattttttttttttgagtcggag

SEQ ID NO: 17843 - DNA, 85 bp, Homo sapiens
  chr3:128791632-128791717
  hypo
tgggattacaggcgtgagccaccgcgcccaacctacaaaatgtatttagttaaaatctcctgtcgtctcctaggcagggggcaaa

SEQ ID NO: 17844 - DNA, 30 bp, Homo sapiens
  chr3:128889309-128889339
  hypo
caattgtgcattcccgtgcaaggtgccctg

SEQ ID NO: 17845 - DNA, 32 bp, Homo sapiens
  chr3:129008730-129008762
  hypo
tacataagaaaagagagtggccgggcacggtg

SEQ ID NO: 17846 - DNA, 24 bp, Homo sapiens
  chr3:129011640-129011664
  hypo
atttcaagtcgactaacaagaaga

SEQ ID NO: 17847 - DNA, 30 bp, Homo sapiens
  chr3:129120402-129120432
  hypo
aggaaggctgggtccggcaacacctggcta

SEQ ID NO: 17848 - DNA, 30 bp, Homo sapiens
  chr3:129221577-129221607
  hypo
ggacaaggctgagcgcgagcccctgctgct

SEQ ID NO: 17849 - DNA, 117 bp, Homo sapiens
  chr3:129221881-129221998
  hypo
tctgagccacagaatcgtggagggcctttccacttgtcccttcattcagtcattgagaaaatcgttactgacagccagctctgccagggtggtgacaggcaccggggatgttagtgt

SEQ ID NO: 17850 - DNA, 225 bp, Homo sapiens
  chr3:129290481-129290706
  hypo
ccagagagcctgggggaagggcggggtgccagtctcacctgacagggctgcggcggggactgatggccgtgatgaccgggttctgcatgtaccagaaggtgaggttgccgtgcacgcagccccgacgctcgaagcgcacacacacaggcaccggagccggcagggccccctcaggcatggtgcaggcgatgctggtatctgtgcgcctggggggagcagcaggtt

SEQ ID NO: 17851 - DNA, 1123 bp, Homo sapiens; identical to SEQ ID NO: 2768
  chr3:129324210-129325333
  hypo

SEQ ID NO: 17852 - DNA, 87 bp, Homo sapiens
  chr3:129372594-129372681
  hypo
ttgctattttttaactttatattatttaatttaaaagtctatattaccaagacctgattgtatattctgtatcgctcaattactaaa

SEQ ID NO: 17853 - DNA, 48 bp, Homo sapiens; identical to SEQ ID NO: 2770
  chr3:129693151-129693199
  hypo

SEQ ID NO: 17854 - DNA, 194 bp, Homo sapiens; identical to SEQ ID NO: 2771
  chr3:129693304-129693498
  hypo

SEQ ID NO: 17855 - DNA, 30 bp, Homo sapiens
  chr3:129983288-129983318
  hypo
ctcagggattcactcgggccttcctgaacc

SEQ ID NO: 17856 - DNA, 30 bp, Homo sapiens; identical to SEQ ID NO: 2773
  chr3:130132286-130132316
  hypo

SEQ ID NO: 17857 - DNA, 228 bp, Homo sapiens; identical to SEQ ID NO: 2774
  chr3:130235835-130236063
  hypo

SEQ ID NO: 17858 - DNA, 101 bp, Homo sapiens; identical to SEQ ID NO: 2775
  chr3:130236173-130236274
  hypo

SEQ ID NO: 17859 - DNA, 44 bp, Homo sapiens
  chr3:130237351-130237395
  hypo
aatttctccttttttttgagacggagtttctctcttgttgccgg

SEQ ID NO: 17860 - DNA, 65 bp, Homo sapiens
  chr3:131100367-131100432
  hypo
gccacacctctagccccgccccaccgcaggcccaacccagaggctgctttcggttaccctagggt

SEQ ID NO: 17861 - DNA, 152 bp, Homo sapiens
  chr3:132034533-132034685
  hypo
cagcctatttgcgcatgtttcctactgccggaagaaggaacagttctcccatataccacattccagggcatcctatgatcacataagaacacaatcctcctgccacaggtaagcgcaatgtaccaggaaacaggttgcgggtaaaccattgt

SEQ ID NO: 17862 - DNA, 31 bp, Homo sapiens
  chr3:132398974-132399005
  hypo
cctgtgaatagtaactcggccttaagagaac

SEQ ID NO: 17863 - DNA, 37 bp, Homo sapiens
  chr3:132399370-132399407
  hypo
tcaagttctaaaaaaagttcaacgtatttctttaaaa

SEQ ID NO: 17864 - DNA, 538 bp, Homo sapiens; identical to SEQ ID NO: 2778
  chr3:132756941-132757479
  hypo

SEQ ID NO: 17865 - DNA, 373 bp, Homo sapiens; identical to SEQ ID NO: 2779
  chr3:132757536-132757909
  hypo

SEQ ID NO: 17866 - DNA, 30 bp, Homo sapiens
  chr3:133265114-133265144
  hypo
tgtccggcccgggccgcgctcaccgacccg

SEQ ID NO: 17867 - DNA, 50 bp, Homo sapiens; identical to SEQ ID NO: 2780
  chr3:133276457-133276507
  hypo

SEQ ID NO: 17868 - DNA, 30 bp, Homo sapiens
  chr3:133520559-133520589
  hypo
acaaggggtgtgtgcgtgtgttttgggtgg

SEQ ID NO: 17869 - DNA, 109 bp, Homo sapiens
  chr3:133560512-133560621
  hypo
agagaaaagcacagaacggtcaaaatcaaaaggtctcatgcaaaggggcaaaagcctagcgaccacaggtggtggcataaccagcaagaggggacgctcatgtcaggtc

SEQ ID NO: 17870 - DNA, 30 bp, Homo sapiens
  chr3:133610700-133610730
  hypo
agaaactggcctgccgtcctcagctaggaa

SEQ ID NO: 17871 - DNA, 205 bp, Homo sapiens
  chr3:133648426-133648631
  hypo
tggtttaagtgtcccggtgagcaactgtgtccacctaggttcactacccacagtagagggttttagtgctcaaccatatctgctcttttcttctcctgagcacacagaatattctgttccgctcttgcggcagctaggctgggagcagagtgaagagcgttactttgggacaaagcattgcttagcagtgcgggatcttccagga

SEQ ID NO: 17872 - DNA, 30 bp, Homo sapiens; identical to SEQ ID NO: 2781
  chr3:133969906-133969936
  hypo

SEQ ID NO: 17873 - DNA, 24 bp, Homo sapiens
  chr3:134042382-134042406
  hypo
gactgcccagctgtgccgggtgca

SEQ ID NO: 17874 - DNA, 85 bp, Homo sapiens
  chr3:134080500-134080585
  hypo
cagctcctcttcggctcgagctgcccggccctgcgcattgcccagagcctgctccagcagctcggcacgccgccgctggtcctcg

SEQ ID NO: 17875 - DNA, 1049 bp, Homo sapiens; identical to SEQ ID NO: 2783
  chr3:134092502-134093551
  hypo

SEQ ID NO: 17876 - DNA, 128 bp, Homo sapiens; identical to SEQ ID NO: 2784
  chr3:134093626-134093754
  hypo

SEQ ID NO: 17877 - DNA, 31 bp, Homo sapiens
  chr3:134166665-134166696
  hypo
gaagaagggcacaaagcgggagccaggtccc

SEQ ID NO: 17878 - DNA, 30 bp, Homo sapiens
  chr3:134203393-134203423
  hypo
gctacttctgtcaccggtgagccaggtgag

SEQ ID NO: 17879 - DNA, 121 bp, Homo sapiens; identical to SEQ ID NO: 2786
  chr3:134369813-134369934
  hypo

SEQ ID NO: 17880 - DNA, 30 bp, Homo sapiens; identical to SEQ ID NO: 2788
  chr3:134592951-134592981
  hypo

SEQ ID NO: 17881 - DNA, 577 bp, Homo sapiens; identical to SEQ ID NO: 2790
  chr3:135684609-135685186
  hypo

SEQ ID NO: 17882 - DNA, 30 bp, Homo sapiens; identical to SEQ ID NO: 2791
  chr3:135685413-135685443
  hypo

SEQ ID NO: 17883 - DNA, 29 bp, Homo sapiens
  chr3:135866169-135866198
  hypo
cactccagcctaggcgacagagcaagacc

SEQ ID NO: 17884 - DNA, 117 bp, Homo sapiens
  chr3:135870036-135870153
  hypo
atgtgtactggcagctaaaaacgtcgttactggggaccctgtgacatttattacactggtgctggtactagcgttacgcacagcaatgctagtcacgttaatgcccaaagtgagcct

SEQ ID NO: 17885 - DNA, 38 bp, Homo sapiens
  chr3:136582611-136582649
  hypo
ctaaataaaatttgaaacctacgtgtaatgttttgttc

SEQ ID NO: 17886 - DNA, 121 bp, Homo sapiens
  chr3:136582948-136583069
  hypo
ataaataaaatgtgtatttatttttctaggcattatcctttgtccaggtttctgcagtgctttcaggtccatctaaataaaatttgaaacctacgtgtaatgttggccgggctcggtggct

SEQ ID NO: 17887 - DNA, 37 bp, Homo sapiens
  chr3:136583308-136583345
  hypo
aacagagcaagattccgtcacacacacacaaaaaaaa

SEQ ID NO: 17888 - DNA, 91 bp, Homo sapiens
  chr3:137717830-137717921
  hypo
acagctgttttcaactaccaggggctgtggcgctcctgtgtccgagagagctctggcttcaccgagtgccggggctacttcaccctgctgg

SEQ ID NO: 17889 - DNA, 196 bp, Homo sapiens
  chr3:137822426-137822622
  hypo
cagctcctgctgaccacgctgctgctggcccaggctggtctgcagccgtgcctccagctgggcaacactggcactcaggcaatcctggcagtgcagcaggtactcaatgatgagctgcgccaggcgcagcaccttgagcagtgccgggtccacaggctgcccacagcggctgcacacctcccggtccaagttgcag

SEQ ID NO: 17890 - DNA, 25 bp, Homo sapiens
  chr3:137890018-137890043
  hypo
atagcaaaatacaggccgggcgtgg

SEQ ID NO: 17891 - DNA, 32 bp, Homo sapiens
  chr3:137891418-137891450
  hypo
agaaccagaccttgtctcgaaaaataaaggga

SEQ ID NO: 17892 - DNA, 13 bp, Homo sapiens
  chr3:138000423-138000436
  hypo
ccccggcctaatt

SEQ ID NO: 17893 - DNA, 35 bp, Homo sapiens
  chr3:138001201-138001236
  hypo
cttgtaggctgggcacggtggctcatgcctgtaat

SEQ ID NO: 17894 - DNA, 30 bp, Homo sapiens; identical to SEQ ID NO: 2811
  chr3:138067038-138067068
  hypo

SEQ ID NO: 17895 - DNA, 345 bp, Homo sapiens; identical to SEQ ID NO: 2812
  chr3:138067293-138067638
  hypo

SEQ ID NO: 17896 - DNA, 157 bp, Homo sapiens
  chr3:138158967-138159124
  hypo
cataccccacaggaccccactcgctgcctttcatgcctgtccccatctaactgggtgcgcactggggctgccggcagaagcaagcaccaggggaaaaaggtgagccgttcacacaaagcgatgggcattctgaggcgcagagcagtggtccctggga

SEQ ID NO: 17897 - DNA, 27 bp, Homo sapiens
  chr3:138442408-138442435
  hypo
tcatgctttatacggttacatgtttta

SEQ ID NO: 17898 - DNA, 39 bp, Homo sapiens
  chr3:138577522-138577561
  hypo
aaaagatagaggcaaccgggcgcagtggctcatgcgtgt

SEQ ID NO: 17899 - DNA, 31 bp, Homo sapiens
  chr3:138634049-138634080
  hypo
tcgttttccccatccccgcaggggagaatag

SEQ ID NO: 17900 - DNA, 30 bp, Homo sapiens
  chr3:138647455-138647485
  hypo
acttttggcaggcccgggtcccaaagtcta

SEQ ID NO: 17901 - DNA, 15 bp, Homo sapiens
  chr3:138679565-138679580
  hypo
cgggcacagacgcgc

SEQ ID NO: 17902 - DNA, 31 bp, Homo sapiens
  chr3:138981443-138981474
  hypo
tctgtgatacacagttcggcttcgatgagac

SEQ ID NO: 17903 - DNA, 28 bp, Homo sapiens
  chr3:139077502-139077530
  hypo
atggagcgaaactctgtctcaaaagaaa

SEQ ID NO: 17904 - DNA, 151 bp, Homo sapiens; identical to SEQ ID NO: 2826
  chr3:139258159-139258310
  hypo

SEQ ID NO: 17905 - DNA, 122 bp, Homo sapiens; identical to SEQ ID NO: 2827
  chr3:139258715-139258837
  hypo

SEQ ID NO: 17906 - DNA, 63 bp, Homo sapiens
  chr3:139353010-139353073
  hypo
taaggaaggcgacccgggaaggttaagtgccgtcactgcagatgtaacgtgcaaatgctcatc

SEQ ID NO: 17907 - DNA, 1491 bp, Homo sapiens; identical to SEQ ID NO: 2828
  chr3:139653601-139655092
  hypo

SEQ ID NO: 17908 - DNA, 1394 bp, Homo sapiens; identical to SEQ ID NO: 2829
  chr3:140660222-140661616
  hypo

SEQ ID NO: 17909 - DNA, 30 bp, Homo sapiens
  chr3:140696571-140696601
  hypo
ctgttaaaagacttcgcctatgccatactg

SEQ ID NO: 17910 - DNA, 794 bp, Homo sapiens; identical to SEQ ID NO: 2830
  chr3:140769507-140770301
  hypo

SEQ ID NO: 17911 - DNA, 182 bp, Homo sapiens; identical to SEQ ID NO: 2831
  chr3:140770407-140770589
  hypo

SEQ ID NO: 17912 - DNA, 469 bp, Homo sapiens; identical to SEQ ID NO: 2832
  chr3:140770643-140771112
  hypo

SEQ ID NO: 17913 - DNA, 30 bp, Homo sapiens
  chr3:140784660-140784690
  hypo
cagatatgagtgtacgaattattactatta

SEQ ID NO: 17914 - DNA, 129 bp, Homo sapiens
  chr3:141086061-141086190
  hypo
ccagaaggcaacaaagacaagcgtggactctggctcccgccgaggtactctgtaccccgtggctctcggattttgcatctaccacatgccacaggcttgcgtccatccgacctccctagtttctcatcc

SEQ ID NO: 17915 - DNA, 30 bp, Homo sapiens
  chr3:141161861-141161891
  hypo
aggcagagcctgtccgcacacttgccgagc

SEQ ID NO: 17916 - DNA, 30 bp, Homo sapiens
  chr3:141166409-141166439
  hypo
gtgtgaacagaatccggaatgcagtttcag

SEQ ID NO: 17917 - DNA, 271 bp, Homo sapiens
  chr3:141174284-141174555
  hypo
gtaggaattcagggccgccattttcgtcgtctcttatcacgatgggaatcagcgttctctgctgctgctcctgctgaacacgacgacattccagccaccgggaactgctcgggactcagtatcattctcagacctaggcaggagcgttccgtgcttgccctcctccacaggtgccccgccgcacggggcaaagagtctgcagggccaacagggatgtgcccccgcaatgtccacgccatccccagagaccgcattctggtacccagaacct

SEQ ID NO: 17918 - DNA, 30 bp, Homo sapiens
  chr3:141319348-141319378
  hypo
ggtggccatgtcatcgtagtgctctgcctg

SEQ ID NO: 17919 - DNA, 31 bp, Homo sapiens
  chr3:141482042-141482073
  hypo
tcatgcttcaaatagccgttgatgaccctga

SEQ ID NO: 17920 - DNA, 39 bp, Homo sapiens
  chr3:141509676-141509715
  hypo
attacaggcgtaagccaccgcgcccggtcaacatgcact

SEQ ID NO: 17921 - DNA, 214 bp, Homo sapiens
  chr3:141622401-141622615
  hypo
aaacatgcatacacacacacacgcacgtgcacatttcataagttttattttcttttacaggtttgatcttgctcttctacctagttttttatgggttcctggctgcactcttctcattcacgatgtgggttatgcttcagactctcaacgatgaggttccaaaataccgtgaccagattcctagcccaggtaattatcttgcagttatgacttt

SEQ ID NO: 17922 - DNA, 18 bp, Homo sapiens
  chr3:141637292-141637310
  hypo
ttttttttttttgagacg

SEQ ID NO: 17923 - DNA, 406 bp, Homo sapiens
  chr3:141656808-141657214
  hypo
tttatgtgtagacaagtctcccggtgcgggcccagcaggcaggtgacagccgcccttgcgggagtcatccttaaccaagcagtttcagaaatgtttcttgagaaactgtttccggaagtcccggagcctgtgttgcccattgacaagccttgtcggtctcagaagacagactccgggggtctacatccagagacccggctgaggactgaagcccggggtttccaagcggctgccttctccgtcctgcagcagggtgcgagtcaaccgccctggctaagggagcaaggaacccccgccatgctgtgtcccctccccccattccccgaatgcccgtctgttcaaagagggtgagaggaggggggaataccaactgctccgaggaaaatgcagttcatcatatgcatct

SEQ ID NO: 17924 - DNA, 24 bp, Homo sapiens
  chr3:141790269-141790293
  hypo
gaatacacgcgtgagccaccgcac

SEQ ID NO: 17925 - DNA, 29 bp, Homo sapiens
  chr3:141863646-141863675
  hypo
actgggattataggcgtgagtcactgcac

SEQ ID NO: 17926 - DNA, 19 bp, Homo sapiens
  chr3:142103147-142103166
  hypo
aagcataaaagacaagttt

SEQ ID NO: 17927 - DNA, 103 bp, Homo sapiens
  chr3:142321773-142321876
  hypo
ccgcctcagcctcccaaagtgttgaggctgaggccacctctggccctcattctctcaacattcaaaagcttgtcacttcatccagttccgaattaacatttta

SEQ ID NO: 17928 - DNA, 175 bp, Homo sapiens
  chr3:142537598-142537773
  hypo
ttttaagactctcatcggcaaaaagccaaattcaactagtaaggtatttcagctacgctaacaccaggaagctggactgagtggttagatcagccatgtcccgctctgcagtgctgtaggtctgttgtggtttcaaatgcctgctatgaagaatgcaccgcgttaacgtgaaaga

SEQ ID NO: 17929 - DNA, 975 bp, Homo sapiens; identical to SEQ ID NO: 2839
  chr3:142682049-142683024
  hypo

SEQ ID NO: 17930 - DNA, 77 bp, Homo sapiens
  chr3:142683682-142683759
  hypo
gcttaaggccgggcgcggtggctcacgcctgtactcccagcacacagatcacgaggtcaagagatttgagaccatcc

SEQ ID NO: 17931 - DNA, 17 bp, Homo sapiens
  chr3:142718194-142718211
  hypo
gggcgcggtggctcacg

SEQ ID NO: 17932 - DNA, 34 bp, Homo sapiens
  chr3:142718450-142718484
  hypo
gacagagcgagacgtctcaaaacaaacaaaacaa

SEQ ID NO: 17933 - DNA, 26 bp, Homo sapiens
  chr3:142727638-142727664
  hypo
tctctgtcgcctaggcggtagtgcag

SEQ ID NO: 17934 - DNA, 39 bp, Homo sapiens
  chr3:142727843-142727882
  hypo
agtgctcggattacaggcgtgagccactgcacctggccc

SEQ ID NO: 17935 - DNA, 33 bp, Homo sapiens
  chr3:142728151-142728184
  hypo
agatggggccgggtgcggtcgctcatgtctgta

SEQ ID NO: 17936 - DNA, 36 bp, Homo sapiens
  chr3:142788518-142788554
  hypo
tgagctaccgcgtccggcaatccatcacaattttta

SEQ ID NO: 17937 - DNA, 522 bp, Homo sapiens; identical to SEQ ID NO: 2840
  chr3:142837796-142838318
  hypo

SEQ ID NO: 17938 - DNA, 167 bp, Homo sapiens; identical to SEQ ID NO: 2841
  chr3:142838479-142838646
  hypo

SEQ ID NO: 17939 - DNA, 196 bp, Homo sapiens; identical to SEQ ID NO: 2842
  chr3:142838876-142839072
  hypo

SEQ ID NO: 17940 - DNA, 321 bp, Homo sapiens; identical to SEQ ID NO: 2843
  chr3:142839204-142839525
  hypo

SEQ ID NO: 17941 - DNA, 126 bp, Homo sapiens; identical to SEQ ID NO: 2844
  chr3:142839562-142839688
  hypo

SEQ ID NO: 17942 - DNA, 118 bp, Homo sapiens; identical to SEQ ID NO: 2845
  chr3:142839783-142839901
  hypo

SEQ ID NO: 17943 - DNA, 183 bp, Homo sapiens; identical to SEQ ID NO: 2846
  chr3:142839944-142840127
  hypo

SEQ ID NO: 17944 - DNA, 26 bp, Homo sapiens
  chr3:142861655-142861681
  hypo
tgggagctgcccgccccatcttggga

SEQ ID NO: 17945 - DNA, 320 bp, Homo sapiens
  chr3:142895614-142895934
  hypo
cgtgtcccctgacaactccatcgaacactcggactatcgcagcaaacttgcccagatccgtcacatataccactcggaactggagaagtatgagcaggcatgtaatgagttcacgacccatgtcatgaacctgctgagggagcagagccgcaccaggcccgtggcccccaaagagatggaacgcatggtgagcatcatccatcgaaagttcagcgccatccagatgcagctgaagcagagcacctgcgaggctatgatgatgctgcgctcccgtttcctggatgccagacgaaagcgccgtaacttcagcagacaggcca

SEQ ID NO: 17946 - DNA, 31 bp, Homo sapiens
  chr3:142913605-142913636
  hypo
agtttgtgatttgagtcgggcagtatgattc

SEQ ID NO: 17947 - DNA, 11 bp, Homo sapiens
  chr3:142957647-142957658
  hypo
taatgaacatt

SEQ ID NO: 17948 - DNA, 99 bp, Homo sapiens
  chr3:143027448-143027547
  hypo
tggccacagagcattaaactaagcatggggcccttctgaatgggggtctctaggtaactgctcaagactcatgactgtgaagctcgccatggtgataat

SEQ ID NO: 17949 - DNA, 95 bp, Homo sapiens
  chr3:143316289-143316384
  hypo
aaggcaagggagaactggcctcgcaaccttgcgtgggggtggccaattcaagcagctgagacagagcggacagcgtaagaaaagctgctcaggag

SEQ ID NO: 17950 - DNA, 248 bp, Homo sapiens; identical to SEQ ID NO: 2848
  chr3:145878854-145879102
  hypo

SEQ ID NO: 17951 - DNA, 31 bp, Homo sapiens
  chr3:145969119-145969150
  hypo
gataaaagccagcccacggtcacttccaatc

SEQ ID NO: 17952 - DNA, 40 bp, Homo sapiens
  chr3:145970677-145970717
  hypo
ccccgactgagctggtctcggcatgttacctttgtttaaa

SEQ ID NO: 17953 - DNA, 30 bp, Homo sapiens
  chr3:148450845-148450875
  hypo
tataaccaactccccgaggatacaggggtc

SEQ ID NO: 17954 - DNA, 26 bp, Homo sapiens
  chr3:148523201-148523227
  hypo
taaaagacttcaaaggtgggccgggc

SEQ ID NO: 17955 - DNA, 30 bp, Homo sapiens
  chr3:148704508-148704538
  hypo
gctgtcggagttcccggccagggaagagaa

SEQ ID NO: 17956 - DNA, 177 bp, Homo sapiens; identical to SEQ ID NO: 2864
  chr3:148710030-148710207
  hypo

SEQ ID NO: 17957 - DNA, 34 bp, Homo sapiens
  chr3:148726131-148726165
  hypo
ccatgcaactcattcccgccgagtccacttactc

SEQ ID NO: 17958 - DNA, 59 bp, Homo sapiens
  chr3:148867080-148867139
  hypo
aggctatttgtttttgcggtcatagctattctcatctgtccttccggtcccactgcagg

SEQ ID NO: 17959 - DNA, 67 bp, Homo sapiens
  chr3:149096958-149097025
  hypo
taaatcagtggagttgggaagcgtggaaccacccacctgctcaggcggaggcaggcaaatcctcata

SEQ ID NO: 17960 - DNA, 25 bp, Homo sapiens
  chr3:149233986-149234011
  hypo
agccaccatgcgcctggccgattgg

SEQ ID NO: 17961 - DNA, 30 bp, Homo sapiens
  chr3:150187009-150187039
  hypo
cggcgtgagccaccgcgcccggccaacatg

SEQ ID NO: 17962 - DNA, 70 bp, Homo sapiens
  chr3:150237531-150237601
  hypo
gtcgaagcaccgttccgggacttgcagcatcagcttcacttgagaacctgttagagatgcacattctcgg

SEQ ID NO: 17963 - DNA, 103 bp, Homo sapiens
  chr3:150237900-150238003
  hypo
ctcctgacctcgtgatccgcccgcctcggcatcccaaagtgcactccaggttttaattacctctcgggtgattgtggtgcacgctcaagtttgagaacctcag

SEQ ID NO: 17964 - DNA, 53 bp, Homo sapiens; identical to SEQ ID NO: 2869
  chr3:150321029-150321082
  hypo

SEQ ID NO: 17965 - DNA, 30 bp, Homo sapiens
  chr3:150329443-150329473
  hypo
cttgctgaagctggcgttgcctgctgcccg

SEQ ID NO: 17966 - DNA, 30 bp, Homo sapiens
  chr3:150497416-150497446
  hypo
gttgaagacggcgtcgtggctcaggttgcc

SEQ ID NO: 17967 - DNA, 4 bp, Homo sapiens
  chr3:150670204-150670208
  hypo
cctg

SEQ ID NO: 17968 - DNA, 1870 bp, Homo sapiens; identical to SEQ ID NO: 2872
  chr3:150803025-150804895
  hypo

SEQ ID NO: 17969 - DNA, 252 bp, Homo sapiens; identical to SEQ ID NO: 2873
  chr3:150804936-150805188
  hypo

SEQ ID NO: 17970 - DNA, 30 bp, Homo sapiens
  chr3:150872693-150872723
  hypo
gacctagtatttgttcgtcttttcgcattg

SEQ ID NO: 17971 - DNA, 30 bp, Homo sapiens
  chr3:151056254-151056284
  hypo
tggtcttctggtagcgatcgatagttatca

SEQ ID NO: 17972 - DNA, 135 bp, Homo sapiens
  chr3:151112527-151112662
  hypo
gcgccatgatgcagccgccttctcttcatgcaatcacatcgcagcagcagttgatacagatgaagcttctgcagcagcagcagcaacagcgacttctcaggcaagcccagactcggcctttccaacaggtttgtc

SEQ ID NO: 17973 - DNA, 18 bp, Homo sapiens
  chr3:151869974-151869992
  hypo
taaaagatagcactgact

SEQ ID NO: 17974 - DNA, 18 bp, Homo sapiens
  chr3:151944526-151944544
  hypo
caggtgcagtggctcacg

SEQ ID NO: 17975 - DNA, 30 bp, Homo sapiens
  chr3:152877466-152877496
  hypo
ggataaagctgatcgcgaatgatccctctt

SEQ ID NO: 17976 - DNA, 150 bp, Homo sapiens
  chr3:152877716-152877866
  hypo
ggccatcagcctgaccggaagaggggcactgccagaggagagccagagggtggctgtgggcggaggtccctcttgggtttaagagccagtctgatcacacagcctctaaaatcaccctaagaaagaataacataccggaacattcatgtg

SEQ ID NO: 17977 - DNA, 46 bp, Homo sapiens
  chr3:153010522-153010568
  hypo
aaatatatttttaggggaggccgaggtgggcagatcatgagatcag

SEQ ID NO: 17978 - DNA, 46 bp, Homo sapiens
  chr3:153010747-153010793
  hypo
agtctgggcaacagagcgaggctgcgtctccaaaacaagaaaaaga

SEQ ID NO: 17979 - DNA, 30 bp, Homo sapiens
  chr3:153811970-153812000
  hypo
tctcagagctggaacgagacagtgaacagg

SEQ ID NO: 17980 - DNA, 30 bp, Homo sapiens
  chr3:155059288-155059318
  hypo
tttctgtttaaaaaagtaggccgggcacag

SEQ ID NO: 17981 - DNA, 39 bp, Homo sapiens
  chr3:155454997-155455036
  hypo
gtgacagagcaagcctccgtctcaaaaaaaaaaaaaaaa

SEQ ID NO: 17982 - DNA, 30 bp, Homo sapiens
  chr3:155524961-155524991
  hypo
aacagtgactaccccgggaaacggaaggta

SEQ ID NO: 17983 - DNA, 42 bp, Homo sapiens; identical to SEQ ID NO: 2887
  chr3:155722291-155722333
  hypo

SEQ ID NO: 17984 - DNA, 43 bp, Homo sapiens
  chr3:156002787-156002830
  hypo
ctttaaccaatttttttctgtcgtattttctttttatatatgt

SEQ ID NO: 17985 - DNA, 219 bp, Homo sapiens
  chr3:156543099-156543318
  hypo
tagtgccaaggaacaaggcactagtgttcagtacttcctggtgtcattaattagtagttatcaataagcagtttggtgtaccgatactgctctgcgtcatttaatcacttctctaaatctataggttcaattaattttctttgtatttacttaatcttattttattcaatagcaaaccagtctctttgcctgctacagagccatcgatgttttctttgg

SEQ ID NO: 17986 - DNA, 30 bp, Homo sapiens
  chr3:156636841-156636871
  hypo
aggttgttaaaatacgagagagaggtgcat

SEQ ID NO: 17987 - DNA, 168 bp, Homo sapiens; identical to SEQ ID NO: 2891
  chr3:156799360-156799528
  hypo

SEQ ID NO: 17988 - DNA, 43 bp, Homo sapiens
  chr3:157866878-157866921
  hypo
gtatgcttttatgtatttgctgtactttcggtttactacttta

SEQ ID NO: 17989 - DNA, 30 bp, Homo sapiens
  chr3:158441968-158441998
  hypo
cattttctgggtaccggcatatgtcgggca

SEQ ID NO: 17990 - DNA, 31 bp, Homo sapiens
  chr3:160115509-160115540
  hypo
tttttttttttttttttgagacgcagtttcg

SEQ ID NO: 17991 - DNA, 467 bp, Homo sapiens; identical to SEQ ID NO: 2916
  chr3:160167468-160167935
  hypo

SEQ ID NO: 17992 - DNA, 30 bp, Homo sapiens
  chr3:160170174-160170204
  hypo
gcaggcggcagcggcgtggccatgaagctg

SEQ ID NO: 17993 - DNA, 1478 bp, Homo sapiens; identical to SEQ ID NO: 2918
  chr3:160472595-160474073
  hypo

SEQ ID NO: 17994 - DNA, 39 bp, Homo sapiens
  chr3:160879848-160879887
  hypo
atcttctggccctccgcgtacatacgaggcagaagtctg

SEQ ID NO: 17995 - DNA, 31 bp, Homo sapiens
  chr3:162129671-162129702
  hypo
ctcctcccccgaatgcaaacacttcttaact

SEQ ID NO: 17996 - DNA, 146 bp, Homo sapiens
  chr3:168608962-168609108
  hypo
agcactaaattagctatgctgcgaaagcagatttggtgccaacgaagataattatatggacaatatttacaagaatgttttctgttagtgtggctttcaaataacatgaaagtacatgctcccgagccgggcgcggtgactcacgc

SEQ ID NO: 17997 - DNA, 32 bp, Homo sapiens
  chr3:169030444-169030476
  hypo
cgtgagccgccgtgcctggccaactccaattt

SEQ ID NO: 17998 - DNA, 7 bp, Homo sapiens
  chr3:169200090-169200097
  hypo
gttacag

SEQ ID NO: 17999 - DNA, 78 bp, Homo sapiens
  chr3:169200396-169200474
  hypo
cgggcgtgagccaccgcgcccggcaacccaccttctaacaagatgaagtcatgcatcgagaagtcagtgctcattgtc

SEQ ID NO: 18000 - DNA, 21 bp, Homo sapiens
  chr3:169243516-169243537
  hypo
taaaaggtggctggatgcagc

SEQ ID NO: 18001 - DNA, 862 bp, Homo sapiens; identical to SEQ ID NO: 2933
  chr3:169482210-169483072
  hypo

SEQ ID NO: 18002 - DNA, 30 bp, Homo sapiens; identical to SEQ ID NO: 2934
  chr3:169530022-169530052
  hypo

SEQ ID NO: 18003 - DNA, 564 bp, Homo sapiens
  chr3:169540029-169540593
  hypo
ctcctcctcccttgtcgttgtcagcttcctccacgccctgcgcgagctccggctctaccagaccgacctgaaggaaattcccgtcgtcatctttaaaaacctccaccatctcgagctgctcggactgaccggaaaccacctgaaatgtctgcccaaggaaatagtgaaccagaccaagctgagggagatctacctgaagcgaaaccagtttgaagttttcccccaggagctctgtgttctctacaccctggaaatcattgacctggacgagaacaaaataggtgccatcccagaagagatcggacacctgacggggctgcagaagttctatatggcttctaacaaccttcccgttctgcccgcgtccttgtgccagtgtagccaactgtcggtgctcgatttatcccacaacctcctccactccatcccgaagagcttcgccgagctcaggaagatgacggaaatcgggctgagcgggaaccgcctggagaaggtgccacgcctcatttgcaggtggacctcgctgcacctgctctacctgggaaacaccggcctgcacaggct

SEQ ID NO: 18004 - DNA, 48 bp, Homo sapiens; identical to SEQ ID NO: 2935
  chr3:169645351-169645399
  hypo

SEQ ID NO: 18005 - DNA, 146 bp, Homo sapiens
  chr3:169656678-169656824
  hypo
ccacagagaggcagaagagaacgggcagaagtacagaacagaaatggagaagctgaccacgactccatctcttctcattccagatttccagcgtgaagcaggcccaagctagggaaggtgagaagctttaaccttaaattttcgag

SEQ ID NO: 18006 - DNA, 18 bp, Homo sapiens
  chr3:169807405-169807423
  hypo
aaagttgctacactgtcg

SEQ ID NO: 18007 - DNA, 97 bp, Homo sapiens
  chr3:169896228-169896325
  hypo
aattttaaaagggcttgaggctgcaaatttggtatcttgctctctagtcttccaccacggaatgaggcaataagacggccctcgtgagatgccagct

SEQ ID NO: 18008 - DNA, 53 bp, Homo sapiens
  chr3:169915437-169915490
  hypo
tcatttggagttagctgctcccgtaataatccgtctatacttgtctaataata

SEQ ID NO: 18009 - DNA, 41 bp, Homo sapiens
  chr3:169980658-169980699
  hypo
aataaaaccttcttttgtggccgggcgcggtgactcacgcc

SEQ ID NO: 18010 - DNA, 31 bp, Homo sapiens
  chr3:169983366-169983397
  hypo
tttgctttgaattaatcgaaatagctctaaa

SEQ ID NO: 18011 - DNA, 31 bp, Homo sapiens
  chr3:170179926-170179957
  hypo
ctgtgtttggccctccgcggactttcctctg

SEQ ID NO: 18012 - DNA, 14 bp, Homo sapiens
  chr3:170555016-170555030
  hypo
ggtttctcttcttt

SEQ ID NO: 18013 - DNA, 150 bp, Homo sapiens; identical to SEQ ID NO: 2944
  chr3:170626965-170627115
  hypo

SEQ ID NO: 18014 - DNA, 18 bp, Homo sapiens
  chr3:171242760-171242778
  hypo
actctgatgccacagata

SEQ ID NO: 18015 - DNA, 31 bp, Homo sapiens
  chr3:171362913-171362944
  hypo
atggcttcctacaacacgttctgtcacattt

SEQ ID NO: 18016 - DNA, 164 bp, Homo sapiens
  chr3:171363248-171363412
  hypo
ttctcatagcctagatcgcaggggcaaaaagacacactggacccattacattttccaaaacagaagtcatcattatctacttagaaactctgagttttcagctgtaaaatgttaccctaggccctttaagaattctgagtggccggccgggcgtggtggctcat

SEQ ID NO: 18017 - DNA, 114 bp, Homo sapiens
  chr3:171493912-171494026
  hypo
aggaaaaggcaggaacccaaacgtgccttgaagctgccatctaagaagacactccttcctgggcctcagcactgcgccagtgctgcagcggacggtggtacctgtcaccccact

SEQ ID NO: 18018 - DNA, 46 bp, Homo sapiens
  chr3:171529765-171529811
  hypo
aataaaattatcaaggccaagcgcagtggctcacacctgtaatccc

SEQ ID NO: 18019 - DNA, 31 bp, Homo sapiens; identical to SEQ ID NO: 2948
  chr3:171758578-171758609
  hypo

SEQ ID NO: 18020 - DNA, 31 bp, Homo sapiens
  chr3:171926519-171926550
  hypo
gatcaggcagcaccaccggccaggatcctcc

SEQ ID NO: 18021 - DNA, 82 bp, Homo sapiens
  chr3:171965452-171965534
  hypo
attttattcataactcacacacggcttactacccacctgttaccggacctggagatatgccgcctcagttttttccccagca

SEQ ID NO: 18022 - DNA, 30 bp, Homo sapiens
  chr3:171976107-171976137
  hypo
tgtctttcagagttcgcagattgctttctg

SEQ ID NO: 18023 - DNA, 19 bp, Homo sapiens
  chr3:172032876-172032895
  hypo
gaatttacagccgggcgcg

SEQ ID NO: 18024 - DNA, 53 bp, Homo sapiens
  chr3:172033194-172033247
  hypo
tcattggcttttcagctgtggccttcagtttcgattttcacctgaaacaggtc

SEQ ID NO: 18025 - DNA, 25 bp, Homo sapiens
  chr3:172186701-172186726
  hypo
tacaggttaagaagaaacaggcgtg

SEQ ID NO: 18026 - DNA, 251 bp, Homo sapiens
  chr3:172341709-172341960
  hypo
ctaaggagaaggaagggtgttcggtaagagaacatggcgcatgtgcggaacacgaacagaaccgcggtaataagttccgggttggctagctgtaccacagcacgatgtgcagggacggccaggagaggatgctacagagcagcagctctcaaacttttcagtctcaggactttacaatcttaaacattattgaggacccttccccctcccccacgaagagcttttgtttatgtgggcttcatttattgatg

SEQ ID NO: 18027 - DNA, 21 bp, Homo sapiens
  chr3:172342379-172342400
  hypo
gaggctgtttgccaagattgt

SEQ ID NO: 18028 - DNA, 18 bp, Homo sapiens
  chr3:172342645-172342663
  hypo
tttttttttttgagacgg

SEQ ID NO: 18029 - DNA, 101 bp, Homo sapiens
  chr3:172355889-172355990
  hypo
tggacaaatgtttgtgaaatacgttgacaagtagtgaatgtggatctggtcattccggaattaccacattttgaaactaaatgcaataaaaaaactccctt

SEQ ID NO: 18030 - DNA, 18 bp, Homo sapiens
  chr3:172356109-172356127
  hypo
tgccatatagcagataaa

SEQ ID NO: 18031 - DNA, 81 bp, Homo sapiens
  chr3:172395701-172395782
  hypo
agcgagactccatctcaaaaaataaaaataaaaagcaagcaccagaactctcaaaagttcgactgatcctgacccactgct

SEQ ID NO: 18032 - DNA, 42 bp, Homo sapiens
  chr3:172425682-172425724
  hypo
ttcttaaacactgctaagaacgttcatctcccagagattcta

SEQ ID NO: 18033 - DNA, 38 bp, Homo sapiens
  chr3:172469919-172469957
  hypo
agttttttttttttttttagacggagtctacctcttgt

SEQ ID NO: 18034 - DNA, 23 bp, Homo sapiens
  chr3:172550528-172550551
  hypo
ccggcctatttctcaaattacag

SEQ ID NO: 18035 - DNA, 139 bp, Homo sapiens
  chr3:172727425-172727564
  hypo
gagcagactacagaccgcacctctgctgctgctcgccaggcaagtcccaccggcttgggcctccagtgtgcacacctgcctgtgttactggtcataggcagttgtccaggttcttggtgttttgaacaaagaattagag

SEQ ID NO: 18036 - DNA, 139 bp, Homo sapiens
  chr3:172727623-172727762
  hypo
ttcacagggcaggagccggctggagcaagcggctcaagagcctcagttacggaatttcttggggcttaaataccctttagacgtttccctttggtttactatatgcaaataaagttccgtgaccagtctgattggttgt

SEQ ID NO: 18037 - DNA, 8 bp, Homo sapiens
  chr3:173162802-173162810
  hypo
aatcccag

SEQ ID NO: 18038 - DNA, 82 bp, Homo sapiens
  chr3:173864874-173864956
  hypo
atagctgagattggcctcccccgtcatccccagttatagaaaaagcattctagttacggccggtattttttgttaatgccaa

SEQ ID NO: 18039 - DNA, 30 bp, Homo sapiens
  chr3:174095175-174095205
  hypo
tacccgggctgcggcgcgcccctcgccaag

SEQ ID NO: 18040 - DNA, 369 bp, Homo sapiens; identical to SEQ ID NO: 2960
  chr3:174158852-174159221
  hypo

SEQ ID NO: 18041 - DNA, 33 bp, Homo sapiens
  chr3:175307700-175307733
  hypo
atatatttaccaattcttggccgggtgtggtgg

SEQ ID NO: 18042 - DNA, 153 bp, Homo sapiens
  chr3:175338484-175338637
  hypo
tcttgttcttaccacctggaacgggtacatgttgccgctctcttcgtgcctgcacatgttgccgctcttttcgtgcctgcaatctggcaggttacaggttcttgtcctgtgaccaagagaaatgaggtatgcggacacaggatagcaaataag

SEQ ID NO: 18043 - DNA, 30 bp, Homo sapiens; identical to SEQ ID NO: 2961
  chr3:175414760-175414790
  hypo

SEQ ID NO: 18044 - DNA, 92 bp, Homo sapiens
  chr3:176545043-176545135
  hypo
cccctgaattttaaaagaggtcgccatatctttctgatgcattctctttttaaaaaaagagaatttttccgacgggtgtttttccaaagggc

SEQ ID NO: 18045 - DNA, 15 bp, Homo sapiens
  chr3:176849317-176849332
  hypo
agacagagtctcact

SEQ ID NO: 18046 - DNA, 35 bp, Homo sapiens
  chr3:176854101-176854136
  hypo
ccaggctggagtgcaaaagtacggatctcggctca

SEQ ID NO: 18047 - DNA, 18 bp, Homo sapiens
  chr3:176872485-176872503
  hypo
agaactttttaaaaagaa

SEQ ID NO: 18048 - DNA, 76 bp, Homo sapiens
  chr3:176890963-176891039
  hypo
aaactccatctcaaacaaaacaaaacaaaacaaaacaccatatttcttaattaccgtggtgattttaacatatgtc

SEQ ID NO: 18049 - DNA, 31 bp, Homo sapiens; identical to SEQ ID NO: 2962
  chr3:176915777-176915808
  hypo

SEQ ID NO: 18050 - DNA, 30 bp, Homo sapiens
  chr3:177158444-177158474
  hypo
gccttccctgatgctcgggacctggtgccc

SEQ ID NO: 18051 - DNA, 121 bp, Homo sapiens
  chr3:177238892-177239013
  hypo
acagagcgagactccgtctcaaaaaaaaaaaaagtccttgcaaaaacttgtctcagaaagggaaaaaaagtgagatacaaaggtagttagagcagcggtcgccaacctttttgacaccagg

SEQ ID NO: 18052 - DNA, 31 bp, Homo sapiens
  chr3:177299217-177299248
  hypo
tctattttaacccacacggaaatttcatatg

SEQ ID NO: 18053 - DNA, 20 bp, Homo sapiens
  chr3:177383082-177383102
  hypo
gagctgttcctattcggcca

SEQ ID NO: 18054 - DNA, 181 bp, Homo sapiens
  chr3:178860952-178861133
  hypo
tcctgacctcgtgatccacccacctcggcctcccaactaaatttttaaatcttgatataatccagagaaaaaagaaaaattacgtattgggggaaactatttgaatgaccacagatgagacctgaaaatagtcttttttatgttttttaaattaatttatttatttacttattggagacat

SEQ ID NO: 18055 - DNA, 30 bp, Homo sapiens; identical to SEQ ID NO: 2966
  chr3:178916861-178916891
  hypo

SEQ ID NO: 18056 - DNA, 30 bp, Homo sapiens; identical to SEQ ID NO: 2967
  chr3:178921538-178921568
  hypo

SEQ ID NO: 18057 - DNA, 39 bp, Homo sapiens; identical to SEQ ID NO: 2968
  chr3:178936067-178936106
  hypo

SEQ ID NO: 18058 - DNA, 30 bp, Homo sapiens; identical to SEQ ID NO: 2969
  chr3:178952070-178952100
  hypo

SEQ ID NO: 18059 - DNA, 41 bp, Homo sapiens; identical to SEQ ID NO: 2971
  chr3:179064153-179064194
  hypo

SEQ ID NO: 18060 - DNA, 1125 bp, Homo sapiens; identical to SEQ ID NO: 2972
  chr3:179168662-179169787
  hypo

SEQ ID NO: 18061 - DNA, 37 bp, Homo sapiens
  chr3:179203079-179203116
  hypo
gtgagccactgcgcccggcccatggcaactttataga

SEQ ID NO: 18062 - DNA, 21 bp, Homo sapiens
  chr3:179390182-179390203
  hypo
tttttttttgagacagtgtgt

SEQ ID NO: 18063 - DNA, 142 bp, Homo sapiens
  chr3:179391535-179391677
  hypo
ttttagataatgctttcctggcgggtgagacactcttagacttgggccgagttcacctagccctagacaagtgctacctaaagtgtgtcagctgactgggctgagagatgagtacaacactaagagtagtgtttcgagattt

SEQ ID NO: 18064 - DNA, 10 bp, Homo sapiens
  chr3:179391976-179391986
  hypo
ggcctgtttt

SEQ ID NO: 18065 - DNA, 114 bp, Homo sapiens
  chr3:179449495-179449609
  hypo
aattgtgtagtgcacagcttacgcatctgtgtttggcaccgtcctctcccgttgccacagatgccctgagtggaacgcgtgccccacttccccgccacctgctctggcttccta

SEQ ID NO: 18066 - DNA, 521 bp, Homo sapiens; identical to SEQ ID NO: 2973
  chr3:179754238-179754759
  hypo

SEQ ID NO: 18067 - DNA, 69 bp, Homo sapiens; identical to SEQ ID NO: 2974
  chr3:179754803-179754872
  hypo

SEQ ID NO: 18068 - DNA, 241 bp, Homo sapiens; identical to SEQ ID NO: 2975
  chr3:179755086-179755327
  hypo

SEQ ID NO: 18069 - DNA, 882 bp, Homo sapiens; identical to SEQ ID NO: 2976
  chr3:180397083-180397965
  hypo

SEQ ID NO: 18070 - DNA, 220 bp, Homo sapiens; identical to SEQ ID NO: 2985
  chr3:181430146-181430366
  hypo

SEQ ID NO: 18071 - DNA, 581 bp, Homo sapiens; identical to SEQ ID NO: 2986
  chr3:181430443-181431024
  hypo

SEQ ID NO: 18072 - DNA, 178 bp, Homo sapiens; identical to SEQ ID NO: 2993
  chr3:181444346-181444524
  hypo

SEQ ID NO: 18073 - DNA, 336 bp, Homo sapiens; identical to SEQ ID NO: 2994
  chr3:181444612-181444948
  hypo

SEQ ID NO: 18074 - DNA, 230 bp, Homo sapiens
  chr3:182314940-182315170
  hypo
aaatcaggtgtctttcggtcagtggaggaaacacccggaagcagtgaaacgcactgggcttattgcaacaaccccagctactgaaaatgccaccctctccacgacgaagcaccgccagtcccaaactccaatcagccgctgggctgggaggccgaaaaggcaagaagacacagagcggggttgaaatgaagaaggaactctttttcaacgagactcattacagtatgcaa

SEQ ID NO: 18075 - DNA, 212 bp, Homo sapiens; identical to SEQ ID NO: 2997
  chr3:182510947-182511159
  hypo

SEQ ID NO: 18076 - DNA, 171 bp, Homo sapiens; identical to SEQ ID NO: 2998
  chr3:182511622-182511793
  hypo

SEQ ID NO: 18077 - DNA, 31 bp, Homo sapiens
  chr3:182599428-182599459
  hypo
tgaattttatctttgccgattatttttcata

SEQ ID NO: 18078 - DNA, 35 bp, Homo sapiens
  chr3:182650848-182650883
  hypo
aaaaacaagtttgcaacgcatcaaaaagaatactt

SEQ ID NO: 18079 - DNA, 128 bp, Homo sapiens
  chr3:182656909-182657037
  hypo
catccaatcgatacacgagttgggatgcctaggtataactcacacacataaagtaaatacccgccaggatggctgcaataaaaaagacaagtattggcaaggatgtgcagacacggcagtccgcatgc

SEQ ID NO: 18080 - DNA, 30 bp, Homo sapiens
  chr3:182699399-182699429
  hypo
caagagcttacctacgtttcagaacaggac

SEQ ID NO: 18081 - DNA, 77 bp, Homo sapiens
  chr3:182778668-182778745
  hypo
catgtccctacaaaggacatgaactcatccttttttatggctgcgagcatctattaatattacgtaggaggctccca

SEQ ID NO: 18082 - DNA, 30 bp, Homo sapiens
  chr3:182788837-182788867
  hypo
ttcttagcttctctccgtgctgactctaac

SEQ ID NO: 18083 - DNA, 77 bp, Homo sapiens
  chr3:182800448-182800525
  hypo
agactgaagacaactggcaatcgagagaacgagtgtggccagggcggtggctcacgtcggtaacgccaacacgtagg

SEQ ID NO: 18084 - DNA, 2 bp, Homo sapiens
  chr3:182812820-182812822
  hypo
ca

SEQ ID NO: 18085 - DNA, 30 bp, Homo sapiens
  chr3:182813273-182813303
  hypo
agctgcattctcatccgagtccctccaatg

SEQ ID NO: 18086 - DNA, 46 bp, Homo sapiens
  chr3:182815988-182816034
  hypo
ttacaggcgtgagctaccgcgccccgccaacttccaacaactttct

SEQ ID NO: 18087 - DNA, 13 bp, Homo sapiens
  chr3:182833361-182833374
  hypo
aggtgcggtggcc

SEQ ID NO: 18088 - DNA, 38 bp, Homo sapiens
  chr3:182895950-182895988
  hypo
aagataattaaaaataaattccggctgggcgcggtggc

SEQ ID NO: 18089 - DNA, 16 bp, Homo sapiens
  chr3:182976757-182976773
  hypo
tgtttagtgcataatg

SEQ ID NO: 18090 - DNA, 30 bp, Homo sapiens
  chr3:182987886-182987916
  hypo
tatgatcgacgttccggaattagaaggacg

SEQ ID NO: 18091 - DNA, 31 bp, Homo sapiens
  chr3:183020691-183020722
  hypo
ctccctcctggctgggcgcggtggctcacac

SEQ ID NO: 18092 - DNA, 239 bp, Homo sapiens
  chr3:183035176-183035415
  hypo
cactcatccagggagaagccccgggaagatttccctgtactgcatgagtgaaagaacctgccaagctcccttttctcggcaggttctgacgtgcttttacgaatcatttaataggtgcctgaccttcaactcaggacagggtgccttccgtagtcctttttctcaaattcatccccaaataaaaagatgcactcctgagaaagtgaagcaataagtccgcttattagtctgccccaaaa

SEQ ID NO: 18093 - DNA, 739 bp, Homo sapiens; identical to SEQ ID NO: 3006
  chr3:183165108-183165847
  hypo

SEQ ID NO: 18094 - DNA, 55 bp, Homo sapiens
  chr3:183183349-183183404
  hypo
taccttttcttacttgtcctgcgtggcaaattcctactcatcaaaaaggtttttt

SEQ ID NO: 18095 - DNA, 34 bp, Homo sapiens
  chr3:183183703-183183737
  hypo
ctttcagtgttccgatgagttccctgatatgccc

SEQ ID NO: 18096 - DNA, 31 bp, Homo sapiens
  chr3:183199735-183199766
  hypo
gcttgcatctgaattgccacacgttctttta

SEQ ID NO: 18097 - DNA, 42 bp, Homo sapiens
  chr3:183209171-183209213
  hypo
attacaggcgtgagccgccacgcccagcaagagccaggtttt

SEQ ID NO: 18098 - DNA, 163 bp, Homo sapiens
  chr3:183217475-183217638
  hypo
acctccaggcggctgcgcctcagggggtccaggcaggtcacctctgccacaaaccgttcatccttcgtgcagccgccaatgatcatgaacacctcagactggaactcatgcatcctgggcttggtgcgttccgaaatgatctggaaatcgatgggggtacatg

SEQ ID NO: 18099 - DNA, 151 bp, Homo sapiens
  chr3:183275003-183275154
  hypo
aaacttgacatctaaaattaacggtcacaagtacagtcatgcccagcacaatgacatttcaatcgatgatggactgaatatacaattgtggtcccaaaagattataatggagcatataaagaaacctgacggccgggcgtggtggctcatg

SEQ ID NO: 18100 - DNA, 5 bp, Homo sapiens
  chr3:183356999-183357004
  hypo
tgggc

SEQ ID NO: 18101 - DNA, 172 bp, Homo sapiens
  chr3:183381134-183381306
  hypo
actgtttataatagtgcgtggtttgtttttagagttttaagaaaaaatctggagtatattttaatgtaatattattatattatttatgtacgctaataattattattttaggtccactggctattctgaggtgatagttgtcgttggaggatgtgagcgagttggaggattt

SEQ ID NO: 18102 - DNA, 149 bp, Homo sapiens
  chr3:183419812-183419961
  hypo
accttctccgcttaccgaaatgctcttcatccttcaagaatcaaattccgactcatccatgaagtgaactccagccttcgaaagctttttttccccctaactactacagaacagatgatatggaaacaatctgcatcaggccagccgcg

SEQ ID NO: 18103 - DNA, 221 bp, Homo sapiens
  chr3:183479751-183479972
  hypo
gtggagtcattctttacgtatcaagtttcatcaattcattaatccctgcaaacggagaagagtcagatattagcagctttataaaatgggatgtttatggatgtttattcagtgtcattatgtttgttgcaaggtgatcatcaaacaggaacctggtgaagcccctcacgtgcccgcaacaggagctgccagccagtcaccactcccgcagtatgtgactg

SEQ ID NO: 18104 - DNA, 56 bp, Homo sapiens
  chr3:183525221-183525277
  hypo
cctcatgaggcacgtcgtactctttctgagttgcacgtcagcgcgtaatcctcccc

SEQ ID NO: 18105 - DNA, 61 bp, Homo sapiens
  chr3:183525821-183525882
  hypo
ggatcaccctgcagcccgtggcactccacaggaacgtgtatgcgtccgtggtggaggacat

SEQ ID NO: 18106 - DNA, 31 bp, Homo sapiens; identical to SEQ ID NO: 3008
  chr3:183602889-183602920
  hypo

SEQ ID NO: 18107 - DNA, 31 bp, Homo sapiens
  chr3:183627257-183627288
  hypo
agagtgcctccagccccgttccccaggcaag

SEQ ID NO: 18108 - DNA, 31 bp, Homo sapiens
  chr3:183637698-183637729
  hypo
agaattgtttgatacacgaagagttttacaa

SEQ ID NO: 18109 - DNA, 67 bp, Homo sapiens
  chr3:183642827-183642894
  hypo
gccaggctgtgggaacgcctgaaacaacagggtaagaagtttggtgccgctgcgtgattgcaaaaaa

SEQ ID NO: 18110 - DNA, 338 bp, Homo sapiens
  chr3:183643315-183643653
  hypo
agccaaagttcctgaaggactcggtacctgtccctgggccagcaccataatcctatcggagcctagaaccgtgtgcaggcgatgggcaatggtcagcatggtacagtctgcaaatgcttctcggatggtctcttgaatcaataagtctgtctctgtgtccatggcagctgtggcttcatctaaaatcagaatctgccagagaagcagaggagaaagaaactcgattaaattcctttagcattctggttaatctagattttactaaaatgtatttcatttaagttttacactatctattgttttcttttctttcttttttttttttttttgagacggag

SEQ ID NO: 18111 - DNA, 18 bp, Homo sapiens
  chr3:183644369-183644387
  hypo
tttaatcaaatacttgcc

SEQ ID NO: 18112 - DNA, 199 bp, Homo sapiens
  chr3:183647990-183648189
  hypo
acaggcatgcaaatacaatcacgtcattatcacagaactctagtgagaggacagcaggccggcaccgcctcattcctgctatctgggcatctctcgatctcctgggagattctgacccgccttgctctccagcgcctcttgccctttgcacggcgtttttcccgcttggaacatgctcgcttctcactacccttggccc

SEQ ID NO: 18113 - DNA, 102 bp, Homo sapiens
  chr3:183670354-183670456
  hypo
gtggattcccccatgctattcttgtcgtgacagtgagttctcatgagatctgacagtttaaaagtgtttgacatgtcctcccgcacacgctgtcttgtctct

SEQ ID NO: 18114 - DNA, 41 bp, Homo sapiens; identical to SEQ ID NO: 3009
  chr3:183676017-183676058
  hypo

SEQ ID NO: 18115 - DNA, 13 bp, Homo sapiens
  chr3:183676472-183676485
  hypo
tcccccaggctgg

SEQ ID NO: 18116 - DNA, 41 bp, Homo sapiens
  chr3:183710272-183710313
  hypo
agaataaggtgagattttcatcgctttcaaagcatatacgc

SEQ ID NO: 18117 - DNA, 30 bp, Homo sapiens
  chr3:183713881-183713911
  hypo
accgtgtccggccagaagggttctataaac

SEQ ID NO: 18118 - DNA, 23 bp, Homo sapiens
  chr3:183716581-183716604
  hypo
aaacaatgactcagggccaggcg

SEQ ID NO: 18119 - DNA, 81 bp, Homo sapiens
  chr3:183728815-183728896
  hypo
caccgtgcccggcccaaactcattcttaatatctccccaatctccttttcttatgtccacgaataggtttaaatccttacc

SEQ ID NO: 18120 - DNA, 31 bp, Homo sapiens
  chr3:183806894-183806925
  hypo
cagcttttgggctgggcgcagtggctcaagc

SEQ ID NO: 18121 - DNA, 31 bp, Homo sapiens; identical to SEQ ID NO: 3010
  chr3:183851914-183851945
  hypo

SEQ ID NO: 18122 - DNA, 44 bp, Homo sapiens
  chr3:183872151-183872195
  hypo
tgtctgtctcgctatcgctatatctcatgcgatatgccttatac

SEQ ID NO: 18123 - DNA, 30 bp, Homo sapiens
  chr3:183886659-183886689
  hypo
atgtataatttccccgggggcgccaggatc

SEQ ID NO: 18124 - DNA, 136 bp, Homo sapiens
  chr3:183891939-183892075
  hypo
gctaaggagaacatcggctcgttcatgaaaagctgtagctgacctccgggaagagtgtacagtcatggacttatttgtgaaaaggtttagtttcttccaagtagtcgcctccttcctccccgctcctctccttggg

SEQ ID NO: 18125 - DNA, 30 bp, Homo sapiens
  chr3:183895700-183895730
  hypo
ttggcccttgcgggcgtttgtccattggct

SEQ ID NO: 18126 - DNA, 30 bp, Homo sapiens
  chr3:183898700-183898730
  hypo
gtatcaagtatcgtcggaatgagctcttcc

SEQ ID NO: 18127 - DNA, 30 bp, Homo sapiens
  chr3:184015448-184015478
  hypo
tttgattccgccgggcgcggtggctcacgc

SEQ ID NO: 18128 - DNA, 87 bp, Homo sapiens
  chr3:184026271-184026358
  hypo
ctggtggctgccatgcagccccgaatgctggttacgtttgatgaggagctgcggccattgccagtgtctgtccgtgtgggccaggtg

SEQ ID NO: 18129 - DNA, 30 bp, Homo sapiens
  chr3:184041990-184042020
  hypo
gaaagtgcccactacggaaaagccaacagt

SEQ ID NO: 18130 - DNA, 63 bp, Homo sapiens
  chr3:184042660-184042723
  hypo
ggcaggcagaggaacgaggacgcctgaaggaagagctggaagaggctcgggacatagcccggc

SEQ ID NO: 18131 - DNA, 30 bp, Homo sapiens
  chr3:184048817-184048847
  hypo
gcccgctcctgggacgagttcttatttatt

SEQ ID NO: 18132 - DNA, 17 bp, Homo sapiens
  chr3:184057547-184057564
  hypo
tgagaaggggggtttta

SEQ ID NO: 18133 - DNA, 164 bp, Homo sapiens
  chr3:184059510-184059674
  hypo
ggtgaatgttggagacacagtcgcgatgctgcccaagtcccggcgagccctaactatccaggagatcgctgcgctggccaggtcctccctgcatggtatgcagcccctcccatgtttctggccactttgtcctttctcctcccgtttgcacatccctttggaac

SEQ ID NO: 18134 - DNA, 43 bp, Homo sapiens
  chr3:184059995-184060038
  hypo
agacctcagcgagggcgaacaagaggctcgctttgcagcaggt

SEQ ID NO: 18135 - DNA, 31 bp, Homo sapiens
  chr3:184070999-184071030
  hypo
aatgacatttaggaagcgtttgtggcttttc

SEQ ID NO: 18136 - DNA, 146 bp, Homo sapiens
  chr3:184071558-184071704
  hypo
gtcctccacacgcacccggtactgcctgggggccgagagaggcgcttggtttgtggtcagcatggggagaggtgcccagagcattgccatcccagggccacaaggagggctccagagcccatccatggggacgggagctaaggacc

SEQ ID NO: 18137 - DNA, 80 bp, Homo sapiens
  chr3:184072026-184072106
  hypo
atctggcctgtgagctcgaacacgatcacagccgtggacactgtgtgtgtcaccgctcctgccagcgcagctgcccctgg

SEQ ID NO: 18138 - DNA, 71 bp, Homo sapiens; identical to SEQ ID NO: 3013
  chr3:184098371-184098442
  hypo

SEQ ID NO: 18139 - DNA, 31 bp, Homo sapiens
  chr3:184133972-184134003
  hypo
catggggcactgtgggcgtatcagtgagggg

SEQ ID NO: 18140 - DNA, 87 bp, Homo sapiens
  chr3:184186551-184186638
  hypo
tgtgtctctgaccctggtgcacgctgctctcccagggtcctctgtgtagcctcccggggacggagcggggagtgagcactggaattt

SEQ ID NO: 18141 - DNA, 219 bp, Homo sapiens
  chr3:184225974-184226193
  hypo
tggggcctttggtgggtgggacgcatcaacacacacagccgcagcagctgcacatagatcaacaggccatccgtgcctcgaacacctacatcaacggccaaggccttggccaccctgcccagctccgtgcaccgctagttgccttggtggatcacagccgctccacgctccacaggaagaatcccaaacccggtgaccggctgccccagcattccaagt

SEQ ID NO: 18142 - DNA, 172 bp, Homo sapiens
  chr3:184273716-184273888
  hypo
atgatgcagtggttctcgagacttcccttccccttccccccagagtcagaaccaccttgggggctttggaaacgcacccctgcccagggcctactgcagaccagtatctctgcgggtggcgtccttcttcctaaaaacctccccaggtgattccgtgcgtgtttagggctga

SEQ ID NO: 18143 - DNA, 944 bp, Homo sapiens; identical to SEQ ID NO: 3016
  chr3:184279131-184280075
  hypo

SEQ ID NO: 18144 - DNA, 94 bp, Homo sapiens
  chr3:184295555-184295649
  hypo
ctatgggcagtacagccgccctgccgagtttgagaccacaagtgagagaggttagtagccccctgcgcctgtccccatcgcggccctcactctc

SEQ ID NO: 18145 - DNA, 148 bp, Homo sapiens; identical to SEQ ID NO: 3017
  chr3:184319873-184320021
  hypo

SEQ ID NO: 18146 - DNA, 111 bp, Homo sapiens; identical to SEQ ID NO: 3018
  chr3:184321762-184321873
  hypo

SEQ ID NO: 18147 - DNA, 60 bp, Homo sapiens; identical to SEQ ID NO: 3019
  chr3:184322209-184322269
  hypo

SEQ ID NO: 18148 - DNA, 51 bp, Homo sapiens
  chr3:184340115-184340166
  hypo
gcaaaatttaaaagagatttgcgccgggcgcggtggctcactcctgtaatc

SEQ ID NO: 18149 - DNA, 31 bp, Homo sapiens
  chr3:184353658-184353689
  hypo
atgcgtggaggaggcacgaagccacctaaag

SEQ ID NO: 18150 - DNA, 31 bp, Homo sapiens
  chr3:184378703-184378734
  hypo
ggagcaggattctggccgcagaggctgggtg

SEQ ID NO: 18151 - DNA, 178 bp, Homo sapiens
  chr3:184459086-184459264
  hypo
gcctctttggtggaggaatcccggcaggccggcaagtcccaacaggccgatgttgggctgctgcaggcagacagtgagtcacctgggtccccgctgcttacaggacagagccagaataatgacaataataatagaggtccacggtgctgttattaacgcccacctttcctcccaggac

SEQ ID NO: 18152 - DNA, 327 bp, Homo sapiens
  chr3:184626081-184626408
  hypo
ctctcggtcctttgccggacttgcagcaggggcaccctgtcttcttggcctgctgcgctcagccccttgtgggagggagcacatgagcaagccagtgtgggatccggctggccactccaagtgctgacacaggaacaagctccatgtgaggcccgcggtcttgaggggaatgcagcagcacccagacaagggtgcccacgaccctgaagccccagatggggtgttagtgtgctaattagctcttttagttttaccatccatagcctgatggacggcagcatgttagcagctcggtcggcctctggccccattgtgtggggtggctgc

SEQ ID NO: 18153 - DNA, 100 bp, Homo sapiens
  chr3:184661514-184661614
  hypo
ctttttttgctcttgccgccaacacctgagttaataggattctcattcttgtatgtatagtttatgcatatttaatttaacatttacatgtatggccagg

SEQ ID NO: 18154 - DNA, 298 bp, Homo sapiens
  chr3:184784965-184785263
  hypo
gatcttctacactgccggaattttctcactgttaacaagttttgcaaaggtggtttcaaatggatgcgtctatatcacacctgaagatagttacagtcaatttccagcttcacggaattctcccctgcgcctttttcttccctttgagcctccaggattgctcaatcgttcccttgggcaagacactgggctggctgcggtgaacacaaaagggagccgtacacagccctgccctcaggcacctgccggctggggaaggacacgttcagcaggaaacgctcccatagctctttaagca

SEQ ID NO: 18155 - DNA, 210 bp, Homo sapiens
  chr3:184800671-184800881
  hypo
ggttgttggttggagcggggcggggtgggtagaaaatatcaacagcattggaaaaaaggatccaccagacaaaggtacaaaagctcggcgtgggtccgaggctgtggcttcctgtctggactctcacacagtcgtttctatcgtttcaatcacttccaggtcagactgcgagggggagagaagggtgcactcatccggttcccagctgct

SEQ ID NO: 18156 - DNA, 94 bp, Homo sapiens
  chr3:184833595-184833689
  hypo
acttctcattgtgacctcacacggcaaaaagagcgctaaagagatccctggagtcactttcataacggcactaatcccattcatgaggactcca

SEQ ID NO: 18157 - DNA, 1157 bp, Homo sapiens; identical to SEQ ID NO: 3020
  chr3:184870195-184871352
  hypo

SEQ ID NO: 18158 - DNA, 28 bp, Homo sapiens
  chr3:185001905-185001933
  hypo
gtgaaccactacgcgcggccactttcct

SEQ ID NO: 18159 - DNA, 143 bp, Homo sapiens
  chr3:185191404-185191547
  hypo
acataatcctctcttggaaaacgcccagagttctgagaaaacggaagaaaatgaattcagcggctgtaggtctgagtcatccctcggcacctctcatctcggcacccctccagcgctacctcgaaaaacaaggcctctgcaga

SEQ ID NO: 18160 - DNA, 30 bp, Homo sapiens
  chr3:185214820-185214850
  hypo
ccatgaaagtcactcgctgtgtcttctttt

SEQ ID NO: 18161 - DNA, 30 bp, Homo sapiens; identical to SEQ ID NO: 3021
  chr3:185233301-185233331
  hypo

SEQ ID NO: 18162 - DNA, 34 bp, Homo sapiens
  chr3:185266641-185266675
  hypo
ccaggcatggtggctcacacccgtaatcacagca

SEQ ID NO: 18163 - DNA, 84 bp, Homo sapiens
  chr3:185271297-185271381
  hypo
aattccctttctggcgagagtgcttgcaacactaactcaggcttctagtggtctgatgagcttaaaaatcaattaataagccgg

SEQ ID NO: 18164 - DNA, 327 bp, Homo sapiens
  chr3:185277678-185278005
  hypo
aaataaataagagctgccccccgccccgctcagctggaattgtctgagaacccatttcgtggcattcattgtaaactataagctctgcaagtggtgtccccgacatgatcgccttaaagttacgtgtgaaggaggagagctcatcaattttcggtgaatctccacctgaaaagaattcagaagatttaaagggagagattcctgactcctatcaggaggacacgacccacacgtaaaatatcaggtgttgagttatcatgggtcaggaaatgaccaaagaacagaaagttttttttgtttgtttgtttgttttgatatggagtctcg

SEQ ID NO: 18165 - DNA, 21 bp, Homo sapiens
  chr3:185278244-185278265
  hypo
ggcccagaaagtatttttaaa

SEQ ID NO: 18166 - DNA, 105 bp, Homo sapiens
  chr3:185303179-185303284
  hypo
actagaagtgtgacattggaattatagagggagagtaacgagactcattacttactagcccagggtaggagacattagtgggccgcaggtttcatccttaaattt

SEQ ID NO: 18167 - DNA, 131 bp, Homo sapiens
  chr3:185317866-185317997
  hypo
gagccactgcgcccagcccaaagatgatattactttgaagccttttatttcatttaaaaagttaatataaattgaatttcatcatctgtttggaatatttgtttagaattgtttaccgttaagattgacac

SEQ ID NO: 18168 - DNA, 81 bp, Homo sapiens
  chr3:185352336-185352417
  hypo
ataggggttcatagaaaataccgataaggtaaagaaagttaattctgcaaattcacaaccagagttaatacctcttaacat

SEQ ID NO: 18169 - DNA, 273 bp, Homo sapiens
  chr3:185360804-185361077
  hypo
agagcgagactctgtgtcaaaaaaaaaaaaacaaaaaaaacccactgttttagacataatgctattgtacacttaatacagtgtaaacataactcacatgcagtgagacactaaaacgtgtatgactcattttattgcaaagttcgctttactgtggtggtctggaactgaacctgcgacgttcctgaggtatgcctgcacttactagtgagcttcccgtggaggcgtgaagtgcctcttcccggaactgccgggcatattatcctccccctt

SEQ ID NO: 18170 - DNA, 30 bp, Homo sapiens
  chr3:185362648-185362678
  hypo
tgagtgtccttccgacgagatttccctctg

SEQ ID NO: 18171 - DNA, 275 bp, Homo sapiens
  chr3:185363068-185363343
  hypo
gcctgcagaagccctggggggcgggaggcggggctcggtggttctggcaaacctggctgaccttccccgcccctcctcggcccctggggttctcagggcctcggcagagtccctggccgcctccgcagacttctcattcctcagatggtctttggtttgctcccgatctggctggctgcgtttggtctcattctgtcaggtgttggaagggctacattcatccgttgttttgctggtgcctgtgggagcctcacttgctgcgctgtgaggcgact

SEQ ID NO: 18172 - DNA, 30 bp, Homo sapiens
  chr3:185363726-185363756
  hypo
ctacacttgggctcccgtgctgctcccgcc

SEQ ID NO: 18173 - DNA, 197 bp, Homo sapiens
  chr3:185365779-185365976
  hypo
ttgcctcctacattccagctccgcctaaagcgcagtgtgtgccctggagcgccgactgcattctggagacggggaatcctttgattccacaccgcttcgttctttcgtataaagctgactcattacatctagaacttggttttgaattccgtttaagagtttctatgtaaagagctttacaacagctgggtgtggtg

SEQ ID NO: 18174 - DNA, 31 bp, Homo sapiens
  chr3:185375183-185375214
  hypo
ctggatactgggagggcgagacaagaaagaa

SEQ ID NO: 18175 - DNA, 258 bp, Homo sapiens
  chr3:185407214-185407472
  hypo
gtggggaccaggatccgcagcgggaaatcaatctgtctggcctgagaagtgcccccaggggcgtggccttgctcccgggaagagtggtccccacgctgggctcgctgagggggcgaaggggagctcacctcttcatccgggatgtaggaaatcttgaaggagtagttctcaaactgatgcccgcttagcttctccatggctctgaaatgcagcaggacaggggagcttcgtcagaaaccaacatcaagaaagaccctc

SEQ ID NO: 18176 - DNA, 63 bp, Homo sapiens
  chr3:185445934-185445997
  hypo
agaggcaaagttactgctgcccgctttaccccaccctagagcgccctctgatccacactctca

SEQ ID NO: 18177 - DNA, 30 bp, Homo sapiens
  chr3:185457319-185457349
  hypo
tcactaccacctgccggaatgcagctgaat

SEQ ID NO: 18178 - DNA, 35 bp, Homo sapiens
  chr3:185551484-185551519
  hypo
tgcttaaaaaaaaaattaggccgggcacggtggct

SEQ ID NO: 18179 - DNA, 4 bp, Homo sapiens
  chr3:185551758-185551762
  hypo
tgga

SEQ ID NO: 18180 - DNA, 38 bp, Homo sapiens
  chr3:185630672-185630710
  hypo
taacagagcaagattccgtctcaaaaaaaaaaaaaaaa

SEQ ID NO: 18181 - DNA, 181 bp, Homo sapiens
  chr3:185643231-185643412
  hypo
aaaccagtttttcatcttacccgattcccaacatgacgcctgcgagtagacatgggagaatggctgtggctgtgccgtctacgataatctcgactgtaagacctgctacgtgatcgtctatgggagcgggagcgagaccgtgaccgggtataatgccttcgggagcttcttctggatctag

SEQ ID NO: 18182 - DNA, 81 bp, Homo sapiens
  chr3:185656907-185656988
  hypo
cggaccttaatacacaggaatcagacacaatctctattctaaagttacaaagtaatgtgctagaaccgttaaacacaatta

SEQ ID NO: 18183 - DNA, 35 bp, Homo sapiens
  chr3:185667604-185667639
  hypo
tctgagcccaagccaagccatcgcatcccccgtga

SEQ ID NO: 18184 - DNA, 21 bp, Homo sapiens
  chr3:185681299-185681320
  hypo
tcaaggaaaactgtgaaggcc

SEQ ID NO: 18185 - DNA, 625 bp, Homo sapiens; identical to SEQ ID NO: 3025
  chr3:185825548-185826173
  hypo

SEQ ID NO: 18186 - DNA, 473 bp, Homo sapiens; identical to SEQ ID NO: 3026
  chr3:185826424-185826897
  hypo

SEQ ID NO: 18187 - DNA, 300 bp, Homo sapiens; identical to SEQ ID NO: 3027
  chr3:185827120-185827420
  hypo

SEQ ID NO: 18188 - DNA, 1039 bp, Homo sapiens; identical to SEQ ID NO: 3028
  chr3:186078731-186079770
  hypo

SEQ ID NO: 18189 - DNA, 484 bp, Homo sapiens; identical to SEQ ID NO: 3029
  chr3:186079818-186080302
  hypo

SEQ ID NO: 18190 - DNA, 44 bp, Homo sapiens
  chr3:186142829-186142873
  hypo
cagtgctcggtcagtggtggccatggctgcgcaggaggaggcag

SEQ ID NO: 18191 - DNA, 37 bp, Homo sapiens
  chr3:186271904-186271941
  hypo
gggattataggcgtgagccaccgcgcccagccttaca

SEQ ID NO: 18192 - DNA, 31 bp, Homo sapiens
  chr3:186329021-186329052
  hypo
tttcttttttttgagtcggagtcccactccg

SEQ ID NO: 18193 - DNA, 30 bp, Homo sapiens
  chr3:186338548-186338578
  hypo
gcgcactacgacctgcgccacaccttcatg

SEQ ID NO: 18194 - DNA, 109 bp, Homo sapiens
  chr3:186409539-186409648
  hypo
gtgtccttcatcagacatgtacgatcatgaattgcgtgcaaccccatttgacctatccgctccatcctggtgggcgtgaacattctccgattgccaagcctccatgtaa

SEQ ID NO: 18195 - DNA, 100 bp, Homo sapiens
  chr3:186429028-186429128
  hypo
ctgtcttcttgatgacactgccggcagacgctgcccgggcctgtttcttttgttgttattgttttgagatggagtttccagctcgtcgcccagcctggag

SEQ ID NO: 18196 - DNA, 20 bp, Homo sapiens
  chr3:186495279-186495299
  hypo
atgaagggccgggtgcggtg

SEQ ID NO: 18197 - DNA, 48 bp, Homo sapiens; identical to SEQ ID NO: 3030
  chr3:186544978-186545026
  hypo

SEQ ID NO: 18198 - DNA, 168 bp, Homo sapiens
  chr3:186697395-186697563
  hypo
tggctgtagcatctgcgtaatagctgctcctaagaatgcaacgtgagctgaattcaaacatgaatttggagccagtacctgaatatgtgggttgttctatgccaccgggccccctgcctgtttaatttctccttcccctgctgccaaggcttccgagaagttgctgtg

SEQ ID NO: 18199 - DNA, 30 bp, Homo sapiens
  chr3:186731783-186731813
  hypo
ttcacacccaacagcggtcaagccgggcct

SEQ ID NO: 18200 - DNA, 203 bp, Homo sapiens
  chr3:186783727-186783930
  hypo
gagcccagaaagtaagcgacagaggtgggatttggttctaggtgtttgccaccagcactttaaatcaccaaagctttctggaagctccaacttttcttctcaagatactgaaagacaggtatctggatgggttggcagggcgggtgggaggtgggcgagatttccatcaacaacgggtctaaaaccagcgatggtgagctggg

SEQ ID NO: 18201 - DNA, 30 bp, Homo sapiens
  chr3:186795537-186795567
  hypo
ctgtgctcacacctcggctgcatgcaccct

SEQ ID NO: 18202 - DNA, 51 bp, Homo sapiens
  chr3:186938674-186938725
  hypo
ggaatccctcctcccacggccttcctccagtcccccgcgcccccacactgc

SEQ ID NO: 18203 - DNA, 30 bp, Homo sapiens
  chr3:186945828-186945858
  hypo
cattccagcttggccgagggtagagaagtg

SEQ ID NO: 18204 - DNA, 176 bp, Homo sapiens
  chr3:187443151-187443327
  hypo
ctctgctcacctgcccgctccgcttgcctgcccgctccacttgcctgcccactcctccgcttgcctgcccactcctccgctcgcctgcccgctccgctcgcctgcccgctccgctcgcctgcccactctgctcacctgtacaaatctggctccgcaggtttcgcatttgtagggct

SEQ ID NO: 18205 - DNA, 2730 bp, Homo sapiens; identical to SEQ ID NO: 3035
  chr3:187455430-187458160
  hypo

SEQ ID NO: 18206 - DNA, 133 bp, Homo sapiens; identical to SEQ ID NO: 3038
  chr3:187462604-187462737
  hypo

SEQ ID NO: 18207 - DNA, 30 bp, Homo sapiens
  chr3:188067316-188067346
  hypo
ctggagttacacagcgctgtctcatcaatc

SEQ ID NO: 18208 - DNA, 165 bp, Homo sapiens
  chr3:188070250-188070415
  hypo
ggagctgtgtgactggcgagccctcagttgccacttggaaacggttggaaactgtagatcaggcacagacattgaatgtttaggagcaagaagggcttgtgaatatcccgtactctcatttgatgtgtgaggacagtgaggcgcattatgcggaggtgacttgct

SEQ ID NO: 18209 - DNA, 95 bp, Homo sapiens
  chr3:188353740-188353835
  hypo
tacccaatgcctagcctagatcgttgaaaaggaaattgaaggatggtattcagattaagaaacagatccctggattatgtttaagaatttctggg

SEQ ID NO: 18210 - DNA, 94 bp, Homo sapiens
  chr3:189618731-189618825
  hypo
gaaacaccaggcagaaaataacgaatcctgtgagcgctttaactcatctgacatttgctctgtaattggaaacgctattatttttctgtgaaag

SEQ ID NO: 18211 - DNA, 28 bp, Homo sapiens
  chr3:189900046-189900074
  hypo
gcgcccagccggtcgtttatctcttgaa

SEQ ID NO: 18212 - DNA, 195 bp, Homo sapiens
  chr3:189900424-189900619
  hypo
agttattaatgttttcttttacgtttgaagaaatcgactcacagttaaagtggcttcgaggtcacagtaatatagagattcttgcccggagacaagaaagagcactgagttataatgccaaagtgaccagcatcgtgactttggaattataactcggtgctctgtcttgtctccggcacaagaagctctatatta

SEQ ID NO: 18213 - DNA, 586 bp, Homo sapiens; identical to SEQ ID NO: 3045
  chr3:192126786-192127372
  hypo

SEQ ID NO: 18214 - DNA, 174 bp, Homo sapiens; identical to SEQ ID NO: 3046
  chr3:192127556-192127730
  hypo

SEQ ID NO: 18215 - DNA, 243 bp, Homo sapiens; identical to SEQ ID NO: 3047
  chr3:192127936-192128179
  hypo

SEQ ID NO: 18216 - DNA, 286 bp, Homo sapiens; identical to SEQ ID NO: 3049
  chr3:192232532-192232818
  hypo

SEQ ID NO: 18217 - DNA, 102 bp, Homo sapiens; identical to SEQ ID NO: 3050
  chr3:192232849-192232951
  hypo

SEQ ID NO: 18218 - DNA, 255 bp, Homo sapiens; identical to SEQ ID NO: 3051
  chr3:192233094-192233349
  hypo

SEQ ID NO: 18219 - DNA, 155 bp, Homo sapiens; identical to SEQ ID NO: 3053
  chr3:192635621-192635776
  hypo

SEQ ID NO: 18220 - DNA, 28 bp, Homo sapiens
  chr3:193235270-193235298
  hypo
ttattttattttattttgagacggagtt

SEQ ID NO: 18221 - DNA, 88 bp, Homo sapiens
  chr3:193235537-193235625
  hypo
ctgggagccaccacgcccggcctacaaccgactgttttaaatgaatgcatttcaatggatttacctcgctgctcatccaatctggaca

SEQ ID NO: 18222 - DNA, 87 bp, Homo sapiens
  chr3:193312127-193312214
  hypo
ggtatagataatttatcgtgtttataaggaatggaatgcattcgttagtttgtttttgttttgttttgagacggagtcttgctctgt

SEQ ID NO: 18223 - DNA, 27 bp, Homo sapiens
  chr3:193312453-193312480
  hypo
accgtgagccaccgcgcccggcccaat

SEQ ID NO: 18224 - DNA, 176 bp, Homo sapiens
  chr3:193391747-193391923
  hypo
atttgctctgctgactccctacgcgaggtggcaacagctggcccttttactggagcttgtggggattagagagtcgggctcgcagcagcgtgctcggcctcttgcctctgttgactgttctttattgtttgatgcctgagcatctcccagacagcgagcaattgtttctggaaact

SEQ ID NO: 18225 - DNA, 175 bp, Homo sapiens
  chr3:193392606-193392781
  hypo
tcctagaaagattattgtactcggaatttggaactgaaaagtgtagaaaggggaagtgatgtgtttaaaactgtttgcggaggtggggctctgccatgtgtattttgacaaagctacacaggtgattcttgccatccccgattaccgtgtacccgcctgcccctgagctggcact

SEQ ID NO: 18226 - DNA, 328 bp, Homo sapiens
  chr3:193419689-193420017
  hypo
ccattgggcgccccccgttggtacgtttcgccagctgtgtactctatgattggctggccttttgatgtgcaggtactacaagttggtcacaaacttgtgtacaatgggcctgttctggttcatgtgaaaatcaacatccttttttgtgttaccgggtgacaggatgctacaatactattagcatttgcaaagagtgtgctctgtccaagggtgtaaccacaggtcgtgtgctgctcactttgtgtttctctattatgtgagagacacaaagaagctgagggctcgcaaaggcctgtcaaatcttgtaatgtggcgctcgacccccaaa

SEQ ID NO: 18227 - DNA, 80 bp, Homo sapiens
  chr3:193428485-193428565
  hypo
cagaggccgcggagccggaccgcagagtggaggccaggccggtgggcaggaggaggtgggaacaccgaaggccgccagga

SEQ ID NO: 18228 - DNA, 68 bp, Homo sapiens
  chr3:193428949-193429017
  hypo
ccagcccggattaggcgaggagggaattctccggaacatgtgtgcattgtttcgtggagggcagccag

SEQ ID NO: 18229 - DNA, 46 bp, Homo sapiens
  chr3:193438389-193438435
  hypo
tttttctttttcccttcgctcttattgcccaggctggagtgcaatg

SEQ ID NO: 18230 - DNA, 302 bp, Homo sapiens
  chr3:193455064-193455366
  hypo
tcaagactcctcccgcgctgttggcaggaatgtttctttcctgggtgtcaatacaagcccagggtcatttttcagcatttgccaatcgctgtaattgcacaggcccgagtggctctccagagaattcctgccgttcctcattctctcctcctggactgtgctctatagatgcaccccaggccatggatcatgtttttcacataacccgttaattactaaagaaaacaacccagctttcaacctgattagcccagattaatggccagcagcgggtttcacgcgcctgcacaatttatcactga

SEQ ID NO: 18231 - DNA, 147 bp, Homo sapiens
  chr3:193490234-193490381
  hypo
aatgtatgcagtgacattgagcggatgattctattctgaaaaattcctgcaccatttgtttctgtgcttgtctgagggccgggacacggtgttgggttttgttgcacgtgctctcttcacaggcccggagttaatgcaagccttgtt

SEQ ID NO: 18232 - DNA, 24 bp, Homo sapiens
  chr3:193503321-193503345
  hypo
cgggcgcggtggctcacgcctgta

SEQ ID NO: 18233 - DNA, 170 bp, Homo sapiens
  chr3:193505292-193505462
  hypo
cttctctcaaggcacacgggcggtgtggcagagcctgttccttgctgaccagtgtccattccccctttcttccttagtatcggattccagttttatctggagtggtgatgaggctacatttccagccctccttgcagcaaggatggccaacgagacgcaagcacaagtca

SEQ ID NO: 18234 - DNA, 153 bp, Homo sapiens
  chr3:193548631-193548784
  hypo
tctgatgaaagctgctgaaaccggcacggagcacacatgaaaaggacgaaagagaaggcgcaaggctgactgccaggtggcaggcgtgatgggacttgtctcccacttggggagatgaagacaaaaggcagcgtcatcccccagaatgagtga

SEQ ID NO: 18235 - DNA, 300 bp, Homo sapiens
  chr3:193586964-193587264
  hypo
gaaggatgcctgaaatgcctccgctgcagcttgctagaggccttctaattaacctgcgaagaaccgtctgcaggcccccagtccggtgttcactcgttcattcattcgctcttcactgggtgccctggcactccaagcctccagcgcacacccagccctaaccttgaccagggtgctgagcacgaggagccccaccctgagccaggcctggagaggcgcctttaagcgcaggtcctgcggctgctgacaggtcatcagagctgggaccaaagacccgccgggaggctggcagcctaggtc

SEQ ID NO: 18236 - DNA, 112 bp, Homo sapiens
  chr3:193588184-193588296
  hypo
agatctagaactcaggtgctacgctgtcggcctgctgttggtctgcggagctactatatagctgttgcgtgactcagggaacacctggggcgtgactgacaggtggagaagg

SEQ ID NO: 18237 - DNA, 148 bp, Homo sapiens
  chr3:193659934-193660082
  hypo
tgggctggaatttcagcgggtcttcaggggtgcacaggtaaagtcttggtggacgagcattctaggcaaaagccatgccggttcatggtgctgtgtacttcagactgtttagtagattccccgctacaaaaaatagtcctcggccggg

SEQ ID NO: 18238 - DNA, 31 bp, Homo sapiens
  chr3:193663524-193663555
  hypo
gctgctgtgagtggaccggagatgctgcacc

SEQ ID NO: 18239 - DNA, 170 bp, Homo sapiens
  chr3:193711553-193711723
  hypo
ctgccttgtgttttctcgagcatcgctgtaatctggtcttatgtgatgtttcaggcgtatcttgctgttgttcagggaaagcacgcctacggagcctcagataaacttctattttcttgccattagcactcaaaccaagttgttgacaccagtcccgctaagtgtcccga

SEQ ID NO: 18240 - DNA, 207 bp, Homo sapiens; identical to SEQ ID NO: 3056
  chr3:193721400-193721607
  hypo

SEQ ID NO: 18241 - DNA, 70 bp, Homo sapiens; identical to SEQ ID NO: 3058
  chr3:193852643-193852713
  hypo

SEQ ID NO: 18242 - DNA, 31 bp, Homo sapiens; identical to SEQ ID NO: 3059
  chr3:193853961-193853992
  hypo

SEQ ID NO: 18243 - DNA, 312 bp, Homo sapiens; identical to SEQ ID NO: 3062
  chr3:193858569-193858881
  hypo

SEQ ID NO: 18244 - DNA, 282 bp, Homo sapiens; identical to SEQ ID NO: 3063
  chr3:193858949-193859231
  hypo

SEQ ID NO: 18245 - DNA, 88 bp, Homo sapiens
  chr3:193922648-193922736
  hypo
tcattcttttcagtacgactagctcctgtgcgctgcagaagactcgggctgatctgaaagcgcctctcctattcgagactctcaggtt

SEQ ID NO: 18246 - DNA, 294 bp, Homo sapiens
  chr3:193970000-193970294
  hypo
tggcccatggatagccgcgcacctcagagtgagcagtgccagaagccaggtagattgggggtggagggctgggggagagacatgaggcaggaagcagttaggcaccaaagcaggagtttctagaccttcggtcaacaaaaattcaaggagcacctgcttgcgctaagtgctggaaatgcagtgatgcgtaaaacacagagcccgcttcgtggaacttagcatcaagagagaacacttgacatgcagacaggcaatgccagtgtcgtgggatgcgtgctccccaggaaatgggct

SEQ ID NO: 18247 - DNA, 31 bp, Homo sapiens
  chr3:194012830-194012861
  hypo
tgcacaagccgggaatcgcctggctaggggc

SEQ ID NO: 18248 - DNA, 141 bp, Homo sapiens
  chr3:194048814-194048955
  hypo
ttcaaacagctcacactcatgcgggtcactgtggcacggcgccctcacacgcgcatccgcagagcgcacctgtcccagcgtggccaagaccgcctctttcacccagggccctctgtggacgttagtctgctctgagtcacc

SEQ ID NO: 18249 - DNA, 72 bp, Homo sapiens
  chr3:194061793-194061865
  hypo
ctagggccctgctgcccgagcctcgatagacacggtgagccgcagagaaccgcagctcgacctcaggtccca

SEQ ID NO: 18250 - DNA, 164 bp, Homo sapiens
  chr3:194066804-194066968
  hypo
cagttcccaaagctcccgcacatacatcttgatcctcagcgcaaacctagaagtgcccagggcaggcagactggggctcccggagctacagtgactggcccaagggaacacaacacagaagcgaggggccagggccagtcctgacagcccgggctctgcaggga

SEQ ID NO: 18251 - DNA, 30 bp, Homo sapiens
  chr3:194080502-194080532
  hypo
gattgtcatacagccgcagctcacacagtt

SEQ ID NO: 18252 - DNA, 30 bp, Homo sapiens
  chr3:194171233-194171263
  hypo
ccaagtaccctctgacgaagcaggttaagt

SEQ ID NO: 18253 - DNA, 87 bp, Homo sapiens; identical to SEQ ID NO: 3064
  chr3:194208170-194208257
  hypo

SEQ ID NO: 18254 - DNA, 63 bp, Homo sapiens; identical to SEQ ID NO: 3065
  chr3:194208467-194208530
  hypo

SEQ ID NO: 18255 - DNA, 116 bp, Homo sapiens; identical to SEQ ID NO: 3066
  chr3:194278584-194278700
  hypo

SEQ ID NO: 18256 - DNA, 158 bp, Homo sapiens
  chr3:194301030-194301188
  hypo
ctggcgagaatctttctttactcctgttctttctcacccagctggctttgaaaaacttccaacctacagaaaagatgaaagaataacgaacatgtttatgctattcgcctagattaatccattgttcccgtttttccgtttgctttgtctctctccaa

SEQ ID NO: 18257 - DNA, 310 bp, Homo sapiens; identical to SEQ ID NO: 3067
  chr3:194353931-194354241
  hypo

SEQ ID NO: 18258 - DNA, 208 bp, Homo sapiens
  chr3:194365665-194365873
  hypo
ctagctcttcccatggcgccccagactaggatgaaatctctttcttcttttctcgtttgcattcccactcaagtattcttcagtatacggacatgatcatacttatggtgaatattttccaaaacaaaactcaagacataactggacagttacggtaatgccgggttagactgttaaagtcaggagagttcctcgactcctgtatgtg

SEQ ID NO: 18259 - DNA, 218 bp, Homo sapiens
  chr3:194374261-194374479
  hypo
gaacaggggacaagcaaagttcgacggagatggaaaggtgaacacagggaggagacaacgaaagcctttcagttcagtgccgtgacagacaaccatcgagggtggcgccctcctggaggggagaattggaccttcccttcactttttactttatatgtttctgtactatttgaactctgtacaaagaacatgtattacttttgtaatttaaaataact

SEQ ID NO: 18260 - DNA, 31 bp, Homo sapiens
  chr3:194431442-194431473
  hypo
ctggtggttgaggctgcgagacacaaaacct

SEQ ID NO: 18261 - DNA, 187 bp, Homo sapiens
  chr3:194596887-194597074
  hypo
attatggtgaactcttcgatcctatccttggactccggtgacatgggaaatcttcagttctttggttattcagggaggggtacagatgagatatgaggaacaccaggctgcggggactggagcagcctcaactattcacgcgtgggttagagagctgcctcccctccctccccgggccatggtgaga

SEQ ID NO: 18262 - DNA, 31 bp, Homo sapiens
  chr3:194670887-194670918
  hypo
cccgtgacacctgtcacggttgctgcttccc

SEQ ID NO: 18263 - DNA, 16 bp, Homo sapiens
  chr3:194706825-194706841
  hypo
cgcgcccggcctcaac

SEQ ID NO: 18264 - DNA, 31 bp, Homo sapiens
  chr3:194755642-194755673
  hypo
cacactgcctcctggccggggcctcagagaa

SEQ ID NO: 18265 - DNA, 64 bp, Homo sapiens
  chr3:194766333-194766397
  hypo
cttggcttcagagtgccgccaggagaccgccctccaccctcactccatgcgggggttggcctgg

SEQ ID NO: 18266 - DNA, 31 bp, Homo sapiens
  chr3:194790031-194790062
  hypo
tctgtttgtactttctcgaaaaatggaaggc

SEQ ID NO: 18267 - DNA, 45 bp, Homo sapiens
  chr3:194790325-194790370
  hypo
tcacaggacttccctgcggtgtctctctagcgggtcagacactgc

SEQ ID NO: 18268 - DNA, 31 bp, Homo sapiens
  chr3:194798290-194798321
  hypo
cccatagtgtcagtctcgttcccaaagctgt

SEQ ID NO: 18269 - DNA, 39 bp, Homo sapiens
  chr3:194799661-194799700
  hypo
ctctccatgaactttgcgaccagacgcactctgctccag

SEQ ID NO: 18270 - DNA, 31 bp, Homo sapiens
  chr3:194817220-194817251
  hypo
tgctgacaaacacacacgatacacacacaca

SEQ ID NO: 18271 - DNA, 30 bp, Homo sapiens
  chr3:194818098-194818128
  hypo
aaatgcgtatcaacacgtatctagcaccac

SEQ ID NO: 18272 - DNA, 342 bp, Homo sapiens
  chr3:194851568-194851910
  hypo
aagatcagcttgaggccagatcggaagaggtctttatgctgcaccaactgcggctttgtcccatacgctccgaaaaacaaggcagagctggacccaatggtgacaggatccccaagggtctgcttagcctgagacctgcaaacacaacaccattgccaagacctgcaaattctgcaagcaggaccattcaggtccctccttcaatgtatccctcgtgccctctacggcctattctcagaaatgggacccaaacagtgttctcccttgtgccggcctgctccattggccggttccttcccaagctgctgaggaagcagcctcgctttgtcacaggcatcctca

SEQ ID NO: 18273 - DNA, 167 bp, Homo sapiens
  chr3:194866033-194866200
  hypo
cattgatggggccctgcgagcatctctgtgaagccacatgaacgggcacatcactccacggtgactggcactgatggggccctgcgagcatctctgtgaagtcacatgaacgggcacctcactccacggtgactggcactgatggggccctgcgagcatctctgtga

SEQ ID NO: 18274 - DNA, 31 bp, Homo sapiens
  chr3:194866459-194866490
  hypo
acagacgcaaggacaccgcagacatccaggc

SEQ ID NO: 18275 - DNA, 23 bp, Homo sapiens
  chr3:194927203-194927226
  hypo
atagtactttccagccagttgcg

SEQ ID NO: 18276 - DNA, 103 bp, Homo sapiens
  chr3:194935162-194935265
  hypo
aaccagcccccacccccgtcaatcctcagaccacttctttctgaagcaagcaggggccacagggctaactatgggaaccagcatgcaccgtcagcccctttca

SEQ ID NO: 18277 - DNA, 80 bp, Homo sapiens; identical to SEQ ID NO: 3071
  chr3:194980431-194980511
  hypo

SEQ ID NO: 18278 - DNA, 31 bp, Homo sapiens
  chr3:195005356-195005387
  hypo
aactatatattaatctcgttaaaataaatgg

SEQ ID NO: 18279 - DNA, 188 bp, Homo sapiens
  chr3:195012970-195013158
  hypo
aatgtcattgtataaacgcatacccctaatacagcctgaataagtggtgtcgctttgttttcctctgaattggcccagttcacgtctgcaccatgagccaaagcctcagccattttaggaaggtttttttcatatgacgccctataaagctgaagtcctggattaagatgtttcgagtcaagaaacat

SEQ ID NO: 18280 - DNA, 81 bp, Homo sapiens
  chr3:195093139-195093220
  hypo
gaggctggacacagtgactcacgcctccgacctcagcacctgggagtcccggagacgatcactttagcacaagacctcagc

SEQ ID NO: 18281 - DNA, 21 bp, Homo sapiens
  chr3:195095450-195095471
  hypo
ttttcttttttgagacggagt

SEQ ID NO: 18282 - DNA, 20 bp, Homo sapiens
  chr3:195095530-195095550
  hypo
cctcccgggttcatgccatt

SEQ ID NO: 18283 - DNA, 30 bp, Homo sapiens
  chr3:195134226-195134256
  hypo
cagcactttgagaggctgaggcgggcatat

SEQ ID NO: 18284 - DNA, 91 bp, Homo sapiens
  chr3:195172993-195173084
  hypo
ccttcttgctggtggggactccgtggcgtccccaaggtagggcaagggatcacgtggtgagaggctgagcgtgctaatgcttgctcaggtt

SEQ ID NO: 18285 - DNA, 29 bp, Homo sapiens
  chr3:195183765-195183794
  hypo
gctggcattacaggcgtgagccaccgtgc

SEQ ID NO: 18286 - DNA, 71 bp, Homo sapiens
  chr3:195194542-195194613
  hypo
tataaacatacaaatgcctgccgtatcttgtctattctgtctctgtcttcgttttcttttttctttctttc

SEQ ID NO: 18287 - DNA, 156 bp, Homo sapiens
  chr3:195393195-195393351
  hypo
ggccttgatataaccacgtgagggtgatggcctttcccagccatggttcctcacctgtaaagggtgaggacagcagcacctgcctcggggtgagaaagcatggccctcattagtcggtagtggctgccgtcaggttcacagcgtacctctcccgat

SEQ ID NO: 18288 - DNA, 228 bp, Homo sapiens
  chr3:195419008-195419236
  hypo
cctcactggacagtgcagctacggaatgatgccatcaccggaaagttccatcagccagcaccgatgcagacctttgcaactgcccctcacgctggacagcacctgtttgatagattgtccactacgcagtgaaaagcctgggtgaaaagcggtatttggtagaagagcaaaaaggggaaaaaaattaaaagtagtaggtcattgtccgccaaactgaattctggcaga

SEQ ID NO: 18289 - DNA, 75 bp, Homo sapiens
  chr3:195536330-195536405
  hypo
tgccaaggccctggtcatgcccggtcagatgtgtgggtgccatctcccagccacgaccatctcctctcctggccc

SEQ ID NO: 18290 - DNA, 196 bp, Homo sapiens
  chr3:195539282-195539478
  hypo
gctcagtgcaggcgcgtggcagaccccagacgcgtggcagaccccagacgcgtggcagaccccagacgcgtggcagaacctcagtgcagatgcgtggcagaccccagacgcacggcagatcccagacacatggcagaccccagacccatggcagactccagacgcgtggcagaccccagacgcgtggcagactcca

SEQ ID NO: 18291 - DNA, 30 bp, Homo sapiens
  chr3:195545397-195545427
  hypo
gctcccagttagaccgctgctcccaggcgg

SEQ ID NO: 18292 - DNA, 231 bp, Homo sapiens
  chr3:195586971-195587202
  hypo
tcatgatccaggcctgcctcacgcgccaggatcacgagagccgcctctaacccacccccaaaacaacaaaaggatgcgctctggccttgccaacttcagtgcctgggacaagccggctcgtgcccgccgcctcggctgcagggccctccacctgcagcgctttcgtccctacctggcgttcaccgttctcacccatcacatcagcacaacgtgaccttgtggggagccacc

SEQ ID NO: 18293 - DNA, 31 bp, Homo sapiens
  chr3:195592095-195592126
  hypo
atcagtaagaaccacccgagacagtgacaga

SEQ ID NO: 18294 - DNA, 30 bp, Homo sapiens
  chr3:195595918-195595948
  hypo
tgagccctcatccccgcccctgtcacggca

SEQ ID NO: 18295 - DNA, 30 bp, Homo sapiens
  chr3:195596746-195596776
  hypo
gacgccggggcggacgggcctgctgcagac

SEQ ID NO: 18296 - DNA, 1835 bp, Homo sapiens; identical to SEQ ID NO: 3072
  chr3:195599578-195601413
  hypo

SEQ ID NO: 18297 - DNA, 238 bp, Homo sapiens
  chr3:195604151-195604389
  hypo
tgggcccaagggtgagggagccgggcctgggaaggctcggggtgtcggggccacagcggtgcaggtcacactccacacagccccccaggtctcctccacccacccccaagaggcacaggattgcaccgaaggccgcagactccaaaagctgcagtgcaggtggaagaggctccctgggaagcagccctagccccatccttgcctggcctgagtcaggagctgcgagcacaggggattt

SEQ ID NO: 18298 - DNA, 30 bp, Homo sapiens
  chr3:195605072-195605102
  hypo
cctgtgcccttcaagcgatcccagggcggg

SEQ ID NO: 18299 - DNA, 34 bp, Homo sapiens; identical to SEQ ID NO: 3074
  chr3:195636197-195636231
  hypo

SEQ ID NO: 18300 - DNA, 31 bp, Homo sapiens
  chr3:195637287-195637318
  hypo
catgtcccagcccaaacggaggcagccctgg

SEQ ID NO: 18301 - DNA, 27 bp, Homo sapiens
  chr3:195639185-195639212
  hypo
tatttttttgagatggagtttcgtgct

SEQ ID NO: 18302 - DNA, 33 bp, Homo sapiens
  chr3:195639599-195639632
  hypo
gaaaatatgagaatgtttggccgggtgcggtgg

SEQ ID NO: 18303 - DNA, 73 bp, Homo sapiens
  chr3:195648872-195648945
  hypo
gtttacatttaagatctgttgcggggcgagggggcgaagcgggggagagcatcgggacaaatagctaaggcat

SEQ ID NO: 18304 - DNA, 30 bp, Homo sapiens
  chr3:195709683-195709713
  hypo
cgcagaaagggaggcgccagacagcgctgc

SEQ ID NO: 18305 - DNA, 127 bp, Homo sapiens
  chr3:195751983-195752110
  hypo
taacacacacacacccatgcacgcatgagcgcacacacacgcgcacacacacgagcacacgcacgcgcaggcacacacatgcacacacacgcacacgcacacacacgtgcacacatacacccaatat

SEQ ID NO: 18306 - DNA, 24 bp, Homo sapiens
  chr3:195779138-195779162
  hypo
ccaaatttaagaatgccgatcaga

SEQ ID NO: 18307 - DNA, 185 bp, Homo sapiens; identical to SEQ ID NO: 3075
  chr3:195809081-195809266
  hypo

SEQ ID NO: 18308 - DNA, 29 bp, Homo sapiens
  chr3:195834904-195834933
  hypo
gccaccgcgcctgtcatctttttaacatt

SEQ ID NO: 18309 - DNA, 38 bp, Homo sapiens
  chr3:195866854-195866892
  hypo
gaccatcatttcttaacgagcatacattaaaatttcca

SEQ ID NO: 18310 - DNA, 36 bp, Homo sapiens
  chr3:195901886-195901922
  hypo
taactttggggacttgcggggaagggtgggaggggg

SEQ ID NO: 18311 - DNA, 30 bp, Homo sapiens
  chr3:195924623-195924653
  hypo
tctcaacaagaccccgccccgcagctcgtg

SEQ ID NO: 18312 - DNA, 45 bp, Homo sapiens
  chr3:195990770-195990815
  hypo
gggattacgggcatgagccactgcgcccagccaggatctggtttt

SEQ ID NO: 18313 - DNA, 25 bp, Homo sapiens
  chr3:196039617-196039642
  hypo
ccgcgcctggcccatagtatattct

SEQ ID NO: 18314 - DNA, 30 bp, Homo sapiens
  chr3:196046442-196046472
  hypo
tgggatattgtttttcgaatcgctgtcatg

SEQ ID NO: 18315 - DNA, 38 bp, Homo sapiens
  chr3:196046696-196046734
  hypo
ttttcattagttggccaggcacggtgactcgcacctgt

SEQ ID NO: 18316 - DNA, 361 bp, Homo sapiens
  chr3:196069870-196070231
  hypo
acaagacacttctttaagaaatcatgtacttgagataaacgggtctcgtaaggctagcgttgggactatctcttcatttccatgtggcgagcctcctagggcaacagaggcacggtcgctgccatgaaagcactgaagcttcacctctttgagacgtgttaataaccgcggagtgtggctctactggagatggagctacttgctgttactttgtcggtgatgctcctagggaggagcaaatgggagtctgaggacataaatgacgaacagggcctgggctgagaaaaccagtcatgccacaaaaggcttcctgaggctgaaagatttgggagacggccaggtgccagtgacccacacctgt

SEQ ID NO: 18317 - DNA, 25 bp, Homo sapiens
  chr3:196138387-196138412
  hypo
aaaactagcagatggccgagcacag

SEQ ID NO: 18318 - DNA, 54 bp, Homo sapiens
  chr3:196143888-196143942
  hypo
taaaataaatgtacacacaggcgcggcggctcacgcctgtaatcccagaacttt

SEQ ID NO: 18319 - DNA, 22 bp, Homo sapiens
  chr3:196144181-196144203
  hypo
cgaaaactaaataaataaatca

SEQ ID NO: 18320 - DNA, 243 bp, Homo sapiens
  chr3:196199258-196199501
  hypo
tactgatcagtaggcacgactcttcattttctgtctcacctgtgttgtttccatttgtctgtgtcacccctgatgtgggggcgcacccactttctgttctgccacaaggcataactgcagtttctttcgagtagggaactctggttttaggtcgctcgtgacttaagacacataactctttcccatgattgcttggtcttgttttgacgtttccttcatggtaccattcggcaccacaggcac

SEQ ID NO: 18321 - DNA, 42 bp, Homo sapiens
  chr3:196226393-196226435
  hypo
tggataaaaactaaaacagcccggacgcggtggctcacgctt

SEQ ID NO: 18322 - DNA, 55 bp, Homo sapiens
  chr3:196263348-196263403
  hypo
atgtttagaagagacggggttccccttttacctcgttgcactcctgagagcaaga

SEQ ID NO: 18323 - DNA, 878 bp, Homo sapiens
  chr3:196386775-196387653
  hypo
ctgcacagctgccacctggagcgcatcagccgcggcgccttccaggagcaaggtcacctgcgcagcctggtcctgggggacaactgcctctcagagaactacgaagagacggcagccgccctccacgccctgccgggcctgcggaggctggacttgtcaggaaacgccctgacggaggacatggcagccctcatgctccagaacctctcctcgctgcggtccgtgtccctggcggggaacaccatcatgcggctggacgactccgtcttcgagggcctggagcgtctccgggagctggatctgcagaggaactacatcttcgagatcgagggcggcgctttcgacggcctggctgagctgaggcacctcaacctggccttcaacaacctcccctgcatcgtggacttcgggctcacgcggctgcgggtcctcaacgtcagctacaacgtcctggagtggttcctcgcgaccgggggagaggctgccttcgagctggagacgctggacctgtctcacaaccagctgctgttcttcccgctgctgccccagtacagcaagttgcggaccctcctgctgcgcgacaacaacatgggcttctaccgggacctgtacaacacctcgtcgccgagggagatggtggcccagttcctcctcgtggacggcaacgtgaccaacatcaccaccgtcagcctctgggaagaattctcctccagcgacctcgcagatctccgcttcctggacatgagccagaaccagttccagtacctgccagacggcttcctgaggaaaatgccttccctctcccacctgaacctccaccagaattgcctgatgacgcttcacattcgggagcacgagccccccggagcgctcaccga

SEQ ID NO: 18324 - DNA, 31 bp, Homo sapiens
  chr3:196402160-196402191
  hypo
caaaatgttgtacttactggccgggcgcggt

SEQ ID NO: 18325 - DNA, 210 bp, Homo sapiens
  chr3:196402790-196403000
  hypo
gggatgacaggcgtgagccaccacctggccgagtttgcggttttcatcactcagtcacttgaggagctgtattcccggcgcgtggtatccaagatggcgaccgccacggcttctttgttaagccttaagcggtacctgggttttgatgttgtgaggtttgttcattctcagagggcattttaatgttgcgttactactatgttgccatgt

SEQ ID NO: 18326 - DNA, 30 bp, Homo sapiens
  chr3:196434188-196434218
  hypo
accgcacccggcatgattgtaagctcctta

SEQ ID NO: 18327 - DNA, 127 bp, Homo sapiens
  chr3:196434730-196434857
  hypo
gtaactcttgtgtcgcggattattctttaattgttcagcagctctggtgcaatctgggagagagaagaaaactatataccacatacgtaccacgtacatcatatacgccataaactactgcaacagc

SEQ ID NO: 18328 - DNA, 203 bp, Homo sapiens
  chr3:196530354-196530557
  hypo
caatcaaaggaaaagacgctggttgatagacatgttcatactagaaacacatttattgttagcgggacaagaggaggttgaactaaaaaatgtttaggtccactcaaaaaattgaaactcgcaagtgtgcagataatagaatatatgtattttaatatataaaacagataaatcatatacgaaagaagcgttagaactaaaag

SEQ ID NO: 18329 - DNA, 292 bp, Homo sapiens
  chr3:196723695-196723987
  hypo
cctgggtgctgccacctgagccgaacgcttttgtctctttgctctgctgtcctgaccatgcggtccttttccttgtgcttcttgctccattttccagcgatcctgtccactttccgggcaggaagagggagacgggctccggggcaatgggctgtgctagctgtttgttcctcctaaacagctgccctgaaacttctcaggtttcttcagccagaaccgagttgcctgggcacgcaggagtgagtatttgtacttgggcacgctgccacccgaacaaaactggagtctgcta

SEQ ID NO: 18330 - DNA, 30 bp, Homo sapiens
  chr3:196728455-196728485
  hypo
gaaccagtccaggtcgaagaagggcgcggg

SEQ ID NO: 18331 - DNA, 98 bp, Homo sapiens
  chr3:196752752-196752850
  hypo
agaggccatgtgggtgcgggcaagagaggccctgctccagagagggaggggctcagggagcaccttggaggaggtgacagttgcgctggactgtgatg

SEQ ID NO: 18332 - DNA, 439 bp, Homo sapiens
  chr3:196754451-196754890
  hypo
ctggcctgggcccggcgggaggcaagctggcctcgtggccagggagactcgggagatcctatcggccgggcctggcagggcgaggtcggctcctttcctggtgaatggggctgttgtgtgctccctcctgagtcacagccctcttgtctggcagggtggaagggagaggactcaccgcgatgagctggacgcagtggtcggcggaggtgccccggacgcagaggagggagggctggatgcccgcttcccggaaggcctcgctcatgttgccgcacttgtgctgctctgggtccgaggtggcgcaccaccgcacctccatgccaccgagcactgcgggcaggggaccgtgaggcccggctcccccgccctgcccagccccggcccaccatggagggtggctccagcagttctgtgtgagcccattcgcctggacagccag

SEQ ID NO: 18333 - DNA, 196 bp, Homo sapiens
  chr3:196766006-196766202
  hypo
aagcagtgaatgaataggctgcggtgagtgcatccacacaatggaatactgctcagcaatgaaaaccatgcattcctacccaatacattttgctaagccacaccccaaacgctacattacactccatacgacattccgggaaaggcaaaactacaggcactgcgaacagatcggcggttgtcacagactggggctg

SEQ ID NO: 18334 - DNA, 30 bp, Homo sapiens
  chr3:196767403-196767433
  hypo
cgcccggccgattgtgttttgtatacagca

SEQ ID NO: 18335 - DNA, 193 bp, Homo sapiens
  chr3:196817781-196817974
  hypo
cctgacatagagggatcgcttctggctagttcgaagagaacctgaccctgaactaatactactattcatcatctgctcccgtaaatcatgtattttagcttcaaaacgactgtattctgatggaagaaaaagagaaataaattgatatattttcaaaaaataagttatttgaagataacgtattaaatatgta

SEQ ID NO: 18336 - DNA, 31 bp, Homo sapiens
  chr3:197133968-197133999
  hypo
ttcacaacactcgctgcgcctgtaatttttg

SEQ ID NO: 18337 - DNA, 31 bp, Homo sapiens
  chr3:197152328-197152359
  hypo
gcctggcacaagtgggcgcccagcatgttca

SEQ ID NO: 18338 - DNA, 97 bp, Homo sapiens; identical to SEQ ID NO: 3081
  chr3:197222651-197222748
  hypo

SEQ ID NO: 18339 - DNA, 124 bp, Homo sapiens
  chr3:197241467-197241591
  hypo
gctgactgcagccctcccttgcgtctagaatgtccagtcctcacgtcacatctgcctggctcgagtctctgggcccatcatgacccagcctgccgtgtcccccggccttcagtctcacctcacc

SEQ ID NO: 18340 - DNA, 224 bp, Homo sapiens
  chr3:197243348-197243572
  hypo
ccaatgttctgaataaactcacggaggcatgcccgctggttgggtgacagcaactttcctgtaacatccccaagatcgcctccgcaccagtggcccctcagttctccttgggagtcacggctctctctcctcatcccatctcctgtctcgcttccacctgaatgtcccacgggtccctgactcaccctaaccacaaccaacacgtcaagtttccaagctgccca

SEQ ID NO: 18341 - DNA, 30 bp, Homo sapiens
  chr3:197246921-197246951
  hypo
actgcgggtcggaacgctctgggagggtgc

SEQ ID NO: 18342 - DNA, 212 bp, Homo sapiens
  chr3:197250415-197250627
  hypo
tactgctaaacaggagaaaggcgtcactcgctcggcaaacatttcttgggcccctatcgtgttccggcactgtgctaggaactggaggtcaagatcaatcattcagcccctgttcccagagtcgtgttctagggaaggagacaggtgagcacgtaagcgacacagtgactgtgtgctgtatggaacctggcgggaggtgggaggggcacagg

SEQ ID NO: 18343 - DNA, 165 bp, Homo sapiens
  chr3:197327054-197327219
  hypo
ctagtcataacctattttcagctggaaaccagaaaggctggttctatgtgcagatggcaatgctgaggtttagaggtaaaacacccacctgaagtgaatagaggctggactggaacccaggatggctcacctggaggcggcgctcccatacggcacccggcagcc

SEQ ID NO: 18344 - DNA, 30 bp, Homo sapiens
  chr3:197327810-197327840
  hypo
ggttacacacgagcgcgcgacatgtccaaa

SEQ ID NO: 18345 - DNA, 60 bp, Homo sapiens
  chr3:197330094-197330154
  hypo
agagggagagggactctcagataactttctaaaacctccgaagatcttttttcatgtgtg

SEQ ID NO: 18346 - DNA, 30 bp, Homo sapiens
  chr3:197330502-197330532
  hypo
gggggtctccaggggcgctgctgtggctgt

SEQ ID NO: 18347 - DNA, 31 bp, Homo sapiens
  chr3:197435285-197435316
  hypo
cgtaagccaccacacccggcctatatgtaaa

SEQ ID NO: 18348 - DNA, 31 bp, Homo sapiens
  chr3:197459517-197459548
  hypo
actggcatttaggaaacggagggaaagtgaa

SEQ ID NO: 18349 - DNA, 30 bp, Homo sapiens
  chr3:197537987-197538017
  hypo
ggtcttcagtgactgcgctgccgtctatgt

SEQ ID NO: 18350 - DNA, 46 bp, Homo sapiens
  chr3:197612488-197612534
  hypo
gaaaacgcgccccatctcgctccaccacaagcgcctttatatactc

SEQ ID NO: 18351 - DNA, 30 bp, Homo sapiens
  chr3:197616721-197616751
  hypo
acgtaatcacttcagcgatgctctcctgtc

SEQ ID NO: 18352 - DNA, 77 bp, Homo sapiens
  chr3:197663679-197663756
  hypo
tgggtctttcaggaaaagatacgagccacacactgagaatgaaaaggacatgaagcgggcaatttataagcaggttg

SEQ ID NO: 18353 - DNA, 121 bp, Homo sapiens
  chr3:197685683-197685804
  hypo
agtcaaaagtactcaagtcaccgttgccaaaggaggagtcctgtggtttacaggaaagggcttgcgtggctggtaacttgtccactacaccattgaaacagctttgcctcctggctgggcg

SEQ ID NO: 18354 - DNA, 184 bp, Homo sapiens
  chr3:197764837-197765021
  hypo
ttgcatcctcacagtccgtctgcctattgtcgttattgctggtcctgtcccttgcctcctcacagtctgtctgcctgttgtcgttattgatgctcctctcccttgcctcctcacagtccgtctgcctgttgtcattattgatggtcctctcccttgcatcctcacagtccgtctgcctgttgtc

SEQ ID NO: 18355 - DNA, 30 bp, Homo sapiens
  chr4:503260-503290
  hypo
tctgccctcgcggccgccggccttgctgtc

SEQ ID NO: 18356 - DNA, 441 bp, Homo sapiens
  chr4:512996-513437
  hypo
ttgtgtgcgtgcgtgcgtgtctgtgagccctactggatccaagccccagcaggcaaggattgcacctgcttgctcgccatgctgtgtctcccctggcacagcgcctggcacagtgcctggcacgtcgtccacgctccatggatatttgtttcgatgcatgcacaggtgcacccccatagctttgtgactctctgataggcggtggggtgtggacacaggcgtccccccatccagggtggtaggtgtagcaatgaaggatgccagccctggaaccagactgcctgagtttcatttgcagcttttacccactggcactgtggcccaggtgcgtgactcaccctctgtgtctcagttgcctcctctggataacagttctgatgctcatccctgcctcatagggtcattagggaggtgaaacgagcgagccgcctagtgttgctg

SEQ ID NO: 18357 - DNA, 56 bp, Homo sapiens
  chr4:513790-513846
  hypo
tcagggacctggtgccggcagcagtggggcgggcctgcaggcgtatgagttcatgc

SEQ ID NO: 18358 - DNA, 30 bp, Homo sapiens
  chr4:520188-520218
  hypo
ctgcaccaccgcatcgcggtcgggactccg

SEQ ID NO: 18359 - DNA, 135 bp, Homo sapiens
  chr4:616351-616486
  hypo
cacaggtgcatctcacaggtgcgtctcacagctatgtctcacaggtgtgcctcataggtgcgtctcacgtgtgtctcacgtgtgtctcacaggtgcgtctcaggtgcgtctcacgtgtgtctcacaggtgcatct

SEQ ID NO: 18360 - DNA, 30 bp, Homo sapiens
  chr4:617160-617190
  hypo
aggaacgcggtgctgcgggtggaagctgct

SEQ ID NO: 18361 - DNA, 440 bp, Homo sapiens
  chr4:619492-619932
  hypo
actgagccctgagaatgtggccgcggcctgcgaggacgggtgcccgccggactgcgacagcctccgggacctctgccaggtggaggagagcacggcgctgctggagctggtgcaggatatgcaggagagcatcaacatggagcgcgtggtcttcaaggtcctgcggcgcctctgcaccctcctgcaggccgaccgctgcagcctcttcatgtaccgccagcgcaacggcgtggccgagctggccaccaggcttttcagcgtgcagccggacagcgtcctggaggactgcctggtgccccccgactccgagatcgtcttcccactggacatcggggtcgtgggccacgtggctcagaccaaaaagatggtgaacgtcgaggacgtggccgaggtgggtctgtgcggagcctcagggaggcggctgtgtgcatctcttgcac

SEQ ID NO: 18362 - DNA, 707 bp, Homo sapiens
  chr4:628408-629115
  hypo
cgggctccaggcccacggtgcgacagcctctttagcctctttcctctcttgcggcagtgccctcacttcagctcatttgctgacgagctcactgactacaagacaaagaatatgctggccacacccatcatgaatggcaaagacgtcgtggcggtgatcatggcagtgaacaagctcaacggcccattcttcaccagcgaagacgaagatgtgagtgtggggggcacctgggcagccgcgcgtctgcctccctgcctgcctgcccgcccgcctgttctgtgctgcgcatccacctctttacctgcctgcccgcctgcccgtgtgttctctgctgcgtgtctgcctccttacctgcctgcccgcgtgttctgtgctgcgtgtctgcctccttacctgcctgcccgcgtgttctgtgctgcgcgtccacctccttacctgcctgcccgcctgcccgtgtgttctctgctgcgtgtctgcctccttacctgcctgcccgcgtgttctgtgctgcgtgtctgcctccttacctgcctgcccgcgtgttctgtgctgcgcgtccacctccttacctgcctgcccgcctgcccgcgtgttctgtgctgcgtgtccacctccttacctgcctgcccgcctgcctgcgtgttctgtgctgcgcgtctgcctccctgcctgcctccctgcccgcctgcccgcgtgttctgtgctgt

SEQ ID NO: 18363 - DNA, 293 bp, Homo sapiens
  chr4:651098-651391
  hypo
ccgggagcgctgagcgccagtgacactgccatcccctccagtccctgacacagttcctgggctggtcagtgatgaacaccgacacctacgacaagatgaacaagctggagaaccgcaaggacatcgcacaggacatggtcctttaccacgtgaagtgcgacagggacgagatccagctcatcctggtgcggcggggcaggacgtccaggggtcacccaggggtcacggctgtgtggcaggggcaggtcgtccaggggtcacccaggggtctcggctgtgtggtgggggcaggt

SEQ ID NO: 18364 - DNA, 237 bp, Homo sapiens
  chr4:655878-656115
  hypo
tacacgcttgccgccggagccctgtgtcctctcggctcccccaggtcctggtgcggttcctgttctccatcagcaaagggtaccggagaatcacctaccacaactggcgccacggcttcaacgtggcccagacgatgttcacgctgctcatggtacgtggctgccagaatcaccagggttgtgcaggccctcctggtaccaagggcagcactcaagcaccccgagggatgagatggg

SEQ ID NO: 18365 - DNA, 30 bp, Homo sapiens; identical to SEQ ID NO: 3086
  chr4:657827-657857
  hypo

SEQ ID NO: 18366 - DNA, 30 bp, Homo sapiens
  chr4:660390-660420
  hypo
attcgtgtacaaggcgagtggttcacgggt

SEQ ID NO: 18367 - DNA, 30 bp, Homo sapiens
  chr4:660942-660972
  hypo
ggcaggggtctgaccgtggggccctgtgtg

SEQ ID NO: 18368 - DNA, 255 bp, Homo sapiens
  chr4:679511-679766
  hypo
acgggaatcacacacgggcacaggaacacggacacacttgggatcaggaacacacagacgtgcatgcgcacacaccacacagaccaggcacgggcgtctcatgacccctcaccattaacggaatgtcctcacccttcttgaccagcacaggggacagcacattggccacaaggacgcccagagggttcgctgggtgggcggatgcacaaagtgtcagctcggctgtggcctggcttcatcgccagcccacaggca

SEQ ID NO: 18369 - DNA, 31 bp, Homo sapiens
  chr4:718960-718991
  hypo
ggttttgatgaggactcgtatttcagctcct

SEQ ID NO: 18370 - DNA, 101 bp, Homo sapiens
  chr4:722181-722282
  hypo
agtaatctggggatggcgtagagtgcgtggggggtggcgtgcacagcgtgttaagtgtcgtaagtaatctggggatggcgtagagcgcgttggggggcagc

SEQ ID NO: 18371 - DNA, 30 bp, Homo sapiens
  chr4:748931-748961
  hypo
cacggcgttgtgtgcgtggcacgtgttgtt

SEQ ID NO: 18372 - DNA, 523 bp, Homo sapiens
  chr4:756986-757509
  hypo
ttgcttttctgtgtagcgaaacagaaaagatggatggtagctggggacagagcaggccgaggaagtccttggattttcatgtggaggtgtagcgggaagctgccggacagtggggctgcagggggtggggaagaggttggccatttcccagcgcagggctggttcctccagggaagagtgtgaggtttgcgctgctgctgcgttaaccgtgcctctgagcccccaacccagccactcaggcaggtggggctgcttcaattcatgccttccccagggaggaatctgaagaactgtctacatgatcagggaaacgcaaggaaaactgcgtggcaccacgcgtaccccatagaagggccagaatcccaagcactgacaacacattcgggaaacgccgggagcgcaggttcattcctgtgggaagtggaacccgcaggccctgtggagaacagcttggcagctgctgacaacacgaaacacactctcggcaaaccacccagcagccacacctcgtcatttacccact

SEQ ID NO: 18373 - DNA, 217 bp, Homo sapiens
  chr4:757736-757953
  hypo
ccctctgaaaaggctgtaggccgtgcgactccagctctgcagcatggcgcactggaaaaggcagaaccatccggaggctgcaggggcttgaggagggtagtaggagtgggcgggcacagggctcctgggcggcgatgctgctgtttgtccacctgtggctgtgccaccagggcgacctgacatccgctctggactcggtggaggtgatgtcagtgca

SEQ ID NO: 18374 - DNA, 211 bp, Homo sapiens
  chr4:765528-765739
  hypo
cagcagagccaagcctcggcctctctgctcgctggtggttttgtttctcccatgcagttctgtgtgcataagacaaaaatcctgtgttagtcatgtgtgttagtacacctgtgaccgggtgaaagccaaacagtgtcccctgaaaggcagcagaggaacagaaaaacaagggggtttgctgtgatgagacccgcaccgtctgcgttcagga

SEQ ID NO: 18375 - DNA, 31 bp, Homo sapiens; identical to SEQ ID NO: 3089
  chr4:824547-824578
  hypo

SEQ ID NO: 18376 - DNA, 30 bp, Homo sapiens
  chr4:829738-829768
  hypo
tcatctgaacctgccggcccgtgtcggtgt

SEQ ID NO: 18377 - DNA, 30 bp, Homo sapiens
  chr4:854459-854489
  hypo
cacccaggccctggcgcacctcgcactgtg

SEQ ID NO: 18378 - DNA, 30 bp, Homo sapiens
  chr4:858799-858829
  hypo
tccttccttctctgcgcagagagggccctg

SEQ ID NO: 18379 - DNA, 30 bp, Homo sapiens
  chr4:860823-860853
  hypo
ctgagcagatcctccgggggcccctgggag

SEQ ID NO: 18380 - DNA, 31 bp, Homo sapiens
  chr4:881395-881426
  hypo
ggcactcgcgcgcatgcgtacacatgcatgc

SEQ ID NO: 18381 - DNA, 136 bp, Homo sapiens
  chr4:882582-882718
  hypo
cagcctggaacgagcgtgcggcaggtccagggctctggagcctcacactcacttagcgacggactggatgaccttggaggaggtgtccttgaggttggtgaagagccgctctgtcccaccccgcagaatgtccagg

SEQ ID NO: 18382 - DNA, 30 bp, Homo sapiens
  chr4:891956-891986
  hypo
ccacaagacagccccgtgaacttggcgtag

SEQ ID NO: 18383 - DNA, 30 bp, Homo sapiens
  chr4:899760-899790
  hypo
gccagggggcaagacgcccaagcgtcaccg

SEQ ID NO: 18384 - DNA, 30 bp, Homo sapiens
  chr4:903017-903047
  hypo
cccacggcgtgatgcgtgctcccgacaaat

SEQ ID NO: 18385 - DNA, 30 bp, Homo sapiens
  chr4:903299-903329
  hypo
ggggccgggagcggcgtgtcagggatggga

SEQ ID NO: 18386 - DNA, 209 bp, Homo sapiens
  chr4:905762-905971
  hypo
aggaggagctgcaggagagggcggggacaaaggcaggcacaccggccacacacacctgaccacagcgacaccaaagtccatcccgcgcgtggcaggaggaggcagggccctcagggggctgtgcgcagggaggctgcggcgtggctgtgtccacccgaacccacactcaggcagccggcgggctctccgagtgaacagagctaggagag

SEQ ID NO: 18387 - DNA, 30 bp, Homo sapiens
  chr4:920592-920622
  hypo
accctgcttacctgcgctccgcactgcccc

SEQ ID NO: 18388 - DNA, 30 bp, Homo sapiens
  chr4:943582-943612
  hypo
cagagaccctttcccgtggctgctttggaa

SEQ ID NO: 18389 - DNA, 35 bp, Homo sapiens
  chr4:949391-949426
  hypo
cccccactccgcccctcgggcgtccctgtcctgtc

SEQ ID NO: 18390 - DNA, 68 bp, Homo sapiens
  chr4:955890-955958
  hypo
tcccaggacccggccgccctcaccaggccccctgagctccccaacagctctgccggcaggcagagaca

SEQ ID NO: 18391 - DNA, 31 bp, Homo sapiens
  chr4:968830-968861
  hypo
tcatggcagtgaaccacggtgcaaactgcag

SEQ ID NO: 18392 - DNA, 33 bp, Homo sapiens
  chr4:982808-982841
  hypo
gggccccgtagtctcggcgcaggtcctgcagcg

SEQ ID NO: 18393 - DNA, 39 bp, Homo sapiens
  chr4:995246-995285
  hypo
cctctgcaggtaggtacggactggcgcatgtttccaagt

SEQ ID NO: 18394 - DNA, 74 bp, Homo sapiens; identical to SEQ ID NO: 3091
  chr4:996100-996174
  hypo

SEQ ID NO: 18395 - DNA, 31 bp, Homo sapiens; identical to SEQ ID NO: 3092
  chr4:1004428-1004459
  hypo

SEQ ID NO: 18396 - DNA, 251 bp, Homo sapiens
  chr4:1007047-1007298
  hypo
gggtgacgtgtgcccgcagactcatgcccgccatgttccaggatccgggcacagcgctggctgcccccatggctaggcgggacctgtggccaggccggccctttgggcgtgttgaccactcaggattgtccgcgctgtgtccaccagtcctgaggcttcgcacccctcccctgccgcccagcaagcgcgccgcatccaacctggccttatatgggcacgttcgggtgctgggtggcgggcggtgaccaggt

SEQ ID NO: 18397 - DNA, 30 bp, Homo sapiens
  chr4:1007642-1007672
  hypo
acccccttcgccttcgtcctcctcagctgc

SEQ ID NO: 18398 - DNA, 343 bp, Homo sapiens
  chr4:1008573-1008916
  hypo
tgcaaggtggggaatcgggccagccgccccgtttccatctcggggccccactcctggaagggaaaataaatcactgtccccttggggggagggagggagccgtgaacaaagtcgcctttggctgggcctggaaacgccgaccgcagactcctttatccattgtgcgggaatcaatgggcctccgggctccctttcagccgcaggccccgcgctgcggccctgtcaggggaaatgttggtttttccccagtcgtggcctccagcccctggcttgcccagccctggcttgcccagccctggctcaggaactgcggccgtgctgggagaggcgggctgtgcccgca

SEQ ID NO: 18399 - DNA, 30 bp, Homo sapiens
  chr4:1009793-1009823
  hypo
ctggggagctgcagcggacaggcccggtgc

SEQ ID NO: 18400 - DNA, 356 bp, Homo sapiens
  chr4:1016331-1016687
  hypo
acggggacacacctggggcccgagagtcagccagcccccggcagaaagccttccttcggtgccctgccccacctcagctggctgcacctctgccaccatcccccaggtatcctgtcccgttcctgtccccgtcaggctccagcctcggagccttcctcccagcggagggcggagggtggagggcgggagccgaaggcagtggtcccacagaagggctggggcccgaggccttggcagggtgtgccggccgtcggctgtgactttgaggctcgggtttcggagttcagaggagccgccgggatgcgtggcctttctgttctcttctgcgcctggggcccgggcgctgggcttggaca

SEQ ID NO: 18401 - DNA, 31 bp, Homo sapiens
  chr4:1032331-1032362
  hypo
acctgctcccagggtgcgtgtcagctcagat

SEQ ID NO: 18402 - DNA, 277 bp, Homo sapiens
  chr4:1093368-1093645
  hypo
cttttaaaagtcaagattgctcgcacaatccccaggaaaatcacaaacgaatgttttcttttcgtatttaatttttaaaaggggggtgtgtgcgccacaatggtacagtaacgaggatacatagttaaatctcacagcgtgactgaaggcctttgctgcgtctgacgtcatcatggcagagggcgtaaggaatggaggaaatcaaccctggtgcagagcaatcgagtccacaaggtccgacggcgcaagcggacacgggtacccctgtgcgggatcc

SEQ ID NO: 18403 - DNA, 30 bp, Homo sapiens
  chr4:1189022-1189052
  hypo
caatgtcccactcccgcatctcctgcggtc

SEQ ID NO: 18404 - DNA, 521 bp, Homo sapiens
  chr4:1204210-1204731
  hypo
ctgccactcacctccggagagggcagggagcagaggcctcagtcatgaggtggggctgtcctcggcgtgggcctcgagactgggagccactgcccatacccaagagacctctgcgagcactggggtgcagagccaggtaggagggggcaccccaccaaaggcagcagcccccccccgcttctttctgctttatatggggcagggagcaaggggaggttgacacttggcggatgacgcggcagggtctggacacttggggtggcaggataacccacctgcatgcagggaaaggcttgggatggaaacatcccgaggggacccgggttccccagcacccgctgcagcccctcctcgtactacctggacccgctgcagcccctcctcgcaccgcctggacccgctgcagccccttctcataaatgagttgggactctgctgatttgcatggaccacgcttccaaaagcagctctgagaaaccaggaggctgggattttgaagaggacgccggtaaacaggctca

SEQ ID NO: 18405 - DNA, 31 bp, Homo sapiens
  chr4:1204980-1205011
  hypo
tcccactggggcactgcgggcaggccgcctc

SEQ ID NO: 18406 - DNA, 30 bp, Homo sapiens
  chr4:1206135-1206165
  hypo
catggcgctggggacgataccttccacagc

SEQ ID NO: 18407 - DNA, 59 bp, Homo sapiens
  chr4:1209060-1209119
  hypo
tgctggggcagctagagtgggcgggtggcctctgacacgtgtgtacacacatgcacata

SEQ ID NO: 18408 - DNA, 136 bp, Homo sapiens
  chr4:1212169-1212305
  hypo
cgacagagcgagactaccttccacaaaaaaaaaaaaggcaacacattttcggacaaagaaaagcaaaaggaatcggtcactggtgagccacatttctaagacagtctttaggctacaggaacgtgacgcccgagga

SEQ ID NO: 18409 - DNA, 727 bp, Homo sapiens
  chr4:1214806-1215533
  hypo
tgaaaagtcaagccacggcctgagatattcgtaaacaagaaaaaacaaaaattttgaaattatgaaaatatccacaatgcatgtcgatctgacaagaacctgacgcagaccacgtgagggcttcgtaaccaacacgaaaaagacggccggaggtgctccgagtggccaagggcacaaagaggtgctcagcctcctcacttatcaggaaactataggttaaaattaaaatatcacaaaatacctgctggaagggctagaattacacagagtgctggcaaggatacgcggctgccggagcatgacgccgcgcccctgcctgaagaacagcgactccttccaggcgaaacaatgtcctgctctgggactcagaaattccactcctaggtacaaacccaagagacgtgagtctatgtgcacaaaaaagacgggcagaaatgtgttcacacaagttttgtttgtaatattagccaaaaacttacaaaatgcatcaccaagagtctggagaagcaaatcgtgctgtgttcacgtgatggaaccgttatcagaaactgctgggtcgtatgaaaacacaggtgagacccagaggcatcaccccgactgacgggaggcggacacagaaggctgcgtgcccgtgatcccacctcggcacagctggggaaggccctctgctctaggaagcgggacccgggtcctcgcagggtcgtcgcggggccgccacgggagaagg

SEQ ID NO: 18410 - DNA, 41 bp, Homo sapiens
  chr4:1216187-1216228
  hypo
acagacagaggggcccgcgccgagagcgagggaagcagctg

SEQ ID NO: 18411 - DNA, 30 bp, Homo sapiens
  chr4:1222626-1222656
  hypo
acacaagcacgtcggcggaggcaggcagac

SEQ ID NO: 18412 - DNA, 220 bp, Homo sapiens
  chr4:1222995-1223215
  hypo
aggaagtgccctaggccgaagaaccaggtgcagcactgggcacagggtggggatgtgtgtgcaccacctgcgcatccacccacacccaaacacatccacccgcacacgtccatcccacactcccgtgcatgacaacgcccacccacgggtgcagagatgctctgtgcgaacagccgtggctgaggacaccaggacatgcaggcctcgtccacatgggcat

SEQ ID NO: 18413 - DNA, 30 bp, Homo sapiens
  chr4:1224231-1224261
  hypo
aggggctgcgcatgcgagcggtgggcagag

SEQ ID NO: 18414 - DNA, 30 bp, Homo sapiens
  chr4:1224484-1224514
  hypo
tctgaaccgcggcacgtcacctcccgcaca

SEQ ID NO: 18415 - DNA, 345 bp, Homo sapiens
  chr4:1225419-1225764
  hypo
tacctttccagacctcgtgcacaggggtggcttactctgtgaaactgctgctcacatcaggtcaccatcagggcagatgtttctctacgacacgcagccacatgcaggcccagggtggggctgggctgaagaccgcaggtttcagatttccagagaaactgccaaagcaccatcgagaccggcacggccgtttctatcccacatgaagggccaggcccaggctccctcagcacggctggtgcagggctcagcgcaggccaggccaggggttaccggcggtgcctgctgcacctgtgagaacccaggaggcgcaccccggttctcatacaccgctctgtctgtacc

SEQ ID NO: 18416 - DNA, 141 bp, Homo sapiens; identical to SEQ ID NO: 3096
  chr4:1243420-1243561
  hypo

SEQ ID NO: 18417 - DNA, 30 bp, Homo sapiens
  chr4:1245191-1245221
  hypo
ccctccagggtcagcgtttggctgtttgtg

SEQ ID NO: 18418 - DNA, 30 bp, Homo sapiens
  chr4:1290586-1290616
  hypo
cccactgcctcgagacgctcccatcactcg

SEQ ID NO: 18419 - DNA, 151 bp, Homo sapiens
  chr4:1290867-1291018
  hypo
agatacgataccaggcgcaaaaccaaatgccgcatctcggccttggggccccagacgagccccagacctgccttactaagccacccttcccaagtcagttgacagcgatgtcccccggcacttgttcagtgacagccgagaactcggaggt

SEQ ID NO: 18420 - DNA, 531 bp, Homo sapiens
  chr4:1299050-1299581
  hypo
caagtggtccctgtggaaagccgctgcactaggtgagcccggccctggtgagggtgccttgtgagtggagcctgcttgtgctgctgtgccccgctgcttccaggcggcgcggccctccgtctgattgctggaggactcttcggtgtggacacaccgtggtttgtttacccatcctggtcaatggacaattggaactgtggtgaacaagcattcctgcacctgtatgtggatattgtatgtccatttttcttgggagtggaatggctgagtcatctggtaggtgtctttaccttttaaagaactaagcgctttttccagaaggatcatcagaactgctgccagcaagagtccaggtatcccggctccaccagcatgtggtggcggcctcttgacttggaactgttcttctgggtgccggggttctccagagaaacagagccagtggcacccacatgtgtgtgtgcgcacgcgtgtgtgggagtgtgcgtgcgtgcacgtgcgcacgcgtgcgtgtaaggagctgtgtcacaa

SEQ ID NO: 18421 - DNA, 162 bp, Homo sapiens
  chr4:1309533-1309695
  hypo
ccccacccccgtgtgcgtgtgtcccccctccagtgtgtgtgtgtgtccccctccccgtgtgcgtgtccccctccccccatgtgcatgtccccacccctgtgtgcgtgtgtccccttcccgtgtgtgtgcccccccccccccaatgtgcgtgtttctccccca

SEQ ID NO: 18422 - DNA, 104 bp, Homo sapiens
  chr4:1309944-1310048
  hypo
atctcaggcggggtgcgttttccgtgttttctgtggcaccctgtagaaacacgtggcacccttgccctctgtggctacagctgagcagacgctgggcggtgctg

SEQ ID NO: 18423 - DNA, 30 bp, Homo sapiens
  chr4:1310540-1310570
  hypo
cccagccttggaggcggcctcacattgtgc

SEQ ID NO: 18424 - DNA, 31 bp, Homo sapiens; identical to SEQ ID NO: 3097
  chr4:1310814-1310845
  hypo

SEQ ID NO: 18425 - DNA, 12 bp, Homo sapiens
  chr4:1317014-1317026
  hypo
gagccaccgtgc

SEQ ID NO: 18426 - DNA, 30 bp, Homo sapiens
  chr4:1317284-1317314
  hypo
ccgccaaaacaagcacgaagcaaagacggg

SEQ ID NO: 18427 - DNA, 30 bp, Homo sapiens
  chr4:1322318-1322348
  hypo
tggccctcagctcccgggcgagtgcccagc

SEQ ID NO: 18428 - DNA, 184 bp, Homo sapiens
  chr4:1323176-1323360
  hypo
tcataatgtctgagccgagctcagagctgtgccctctgcggcctcgtctgttgcaggggagcaggcaggtcccaggaagtgcgtgtccttcctcccgcaagcagacacgtgctgcctcgaagcctcagcagccagccgggcaggcatggcaaacaacaccccagtgtctcgggggcaggcgcag

SEQ ID NO: 18429 - DNA, 97 bp, Homo sapiens
  chr4:1323653-1323750
  hypo
cctgctgccagggtcccagcccgcaggagcttcccgtccacctctgaactcacggtccacatggcgctggagcgtcgggcaccatctacagggcttg

SEQ ID NO: 18430 - DNA, 47 bp, Homo sapiens
  chr4:1325022-1325069
  hypo
accctgcggggtcagccgtgtggactcacccccgactcccagtccct

SEQ ID NO: 18431 - DNA, 221 bp, Homo sapiens
  chr4:1330874-1331095
  hypo
tcctcccaccacagacagccccgagctcccgtgtgctgcacttgcgtggtgtctggatggtcggggtggggccgtgttgaggggcctcggatgcgtcgtgcagccttcactctgggaagtggcgcgcttcctctctcatcatctcagaggccgccatgggcattgatctaaaagcccgattttgatgtgttctggcagccggcagattaccattcagaata

SEQ ID NO: 18432 - DNA, 1382 bp, Homo sapiens; identical to SEQ ID NO: 3098
  chr4:1331725-1333107
  hypo

SEQ ID NO: 18433 - DNA, 30 bp, Homo sapiens
  chr4:1333554-1333584
  hypo
gtacgtgcatagtttcgatatcacatcgcg

SEQ ID NO: 18434 - DNA, 30 bp, Homo sapiens
  chr4:1334124-1334154
  hypo
gcgtcttgaggccccggcttgcagctgggt

SEQ ID NO: 18435 - DNA, 140 bp, Homo sapiens
  chr4:1336857-1336997
  hypo
atccctatttggggacggtattagtttgctcggctgccgtaacagaagaccacggactagcgggtttaaacaatggacatttatttcttcacggttctagaggagatgctggcagggttggctcccggtgaggcctctct

SEQ ID NO: 18436 - DNA, 204 bp, Homo sapiens
  chr4:1338682-1338886
  hypo
tggatactggcagaagcttcccggcagagggatccgctccccagaggccgtgtggcagcaagagcaggctggagaagtcaaccggtgggatgcagggggcagcaaacacaggccacgacaggttttgccttgccctgggatgggagccgtcggaggattttgtgtagaggaatcctgtgatccgaccttagactttcaaaggtc

SEQ ID NO: 18437 - DNA, 78 bp, Homo sapiens
  chr4:1339093-1339171
  hypo
gagtcagataattggtccaagcgaacagaaggatgcagggcaggcccaggcacggtggcccaggcacggtggctcacg

SEQ ID NO: 18438 - DNA, 34 bp, Homo sapiens
  chr4:1348026-1348060
  hypo
atagagctctgccctgcgccggacactgagggtg

SEQ ID NO: 18439 - DNA, 30 bp, Homo sapiens
  chr4:1368951-1368981
  hypo
atgttctggcagagcgtggcctgagctgct

SEQ ID NO: 18440 - DNA, 30 bp, Homo sapiens
  chr4:1374643-1374673
  hypo
agccaccgtgtcctcgctgtgcagtgccct

SEQ ID NO: 18441 - DNA, 30 bp, Homo sapiens
  chr4:1376361-1376391
  hypo
tgccggggctttttcgttgtgtttaaacaa

SEQ ID NO: 18442 - DNA, 30 bp, Homo sapiens
  chr4:1505443-1505473
  hypo
aggactcgatcacccggacaccccgggctc

SEQ ID NO: 18443 - DNA, 30 bp, Homo sapiens
  chr4:1556580-1556610
  hypo
atcctcaccagccccggcccagccttgctc

SEQ ID NO: 18444 - DNA, 30 bp, Homo sapiens
  chr4:1578588-1578618
  hypo
tctgtaaaatggggcgcagggcggcctcct

SEQ ID NO: 18445 - DNA, 30 bp, Homo sapiens
  chr4:1600813-1600843
  hypo
ccggagcgcagggccgtcggctccaacccc

SEQ ID NO: 18446 - DNA, 335 bp, Homo sapiens
  chr4:1616405-1616740
  hypo
cagcccaggggaggttcctgccgcctccggtcacaacagctccgtccgccaatcaatacccggccctgctttatgtgtggccctattcacagacaccgcactgagcgtgtatattgatcccttaacatcaagctcacagccagcggtgccacagctcccacccagaggcaggtcgccccacacgcatttctccacggggtgccccatggccgtcctatgctgacggacaccagatggcatttcagcaccgggcacaggggccgctttaaacagcaaaatcaccaaagggacacgagagcaaaaacatggcacacgcaaaccacaaaaaaggacat

SEQ ID NO: 18447 - DNA, 30 bp, Homo sapiens
  chr4:1621150-1621180
  hypo
tcccttgcccagctcggcgtctctggggtt

SEQ ID NO: 18448 - DNA, 30 bp, Homo sapiens
  chr4:1656721-1656751
  hypo
agtccaaggatgggcgtgtccacctggcgt

SEQ ID NO: 18449 - DNA, 36 bp, Homo sapiens
  chr4:1658907-1658943
  hypo
gggcccgcaccctacacgagccgtcctgctcacaga

SEQ ID NO: 18450 - DNA, 30 bp, Homo sapiens
  chr4:1684776-1684806
  hypo
ctgccagtacccagcgcacaaggaggactc

SEQ ID NO: 18451 - DNA, 333 bp, Homo sapiens
  chr4:1738684-1739017
  hypo
aggcagcactggctccgctcagcctgcagtgggtaatgaagcgtcaccgtgctctcccggaaggacaagcagccacgtgggatgggcaggtgagggaggggggcacggagcagcagagaggccgggcatgctggatgcgggtctgcgttttctaccactaccctgacttgagtggttttaaactaaaaagcaaagagcccggttagcttgtccacatggtcctctgtgtcctactcaacactgggagggcctagtgactgaggctgcctctgcttggtggcagcatgcacggtgcaaatgagactccctcaggacgtccgcgggaagccaagc

SEQ ID NO: 18452 - DNA, 347 bp, Homo sapiens
  chr4:1778328-1778675
  hypo
ggggccactcggctgcgagcccgccctgctgtcctcaacctcgaccctggcctcagggctcttgcaagctgtaccctgggcccgggtgatgcagggacctggccacagcccattcactgggtgtctctcagccccaccctcactggccactgtgcaggtggcctgggcctggctggccacgtgagcacagcactgcccgcgctaggatggcatccattattcacccacagcgctcgtccaggctgggctgggctcatgtctgctcacgggcatctgccactcctggagggcacatagcttgctgggccgggtgggcgacagagcctgcggtccgctccttgggcctc

SEQ ID NO: 18453 - DNA, 177 bp, Homo sapiens
  chr4:1781227-1781404
  hypo
atggagggttccctggcgtggggagaagggggcatccatggctgtaatgggtggtctgccaggcctgccacctcccctggcgagtggcaggaccccagacaggcccagcgatgggccgaggggcaggtcctgggcttccgagtgctcccagggaatgggggccggggctccaggcag

SEQ ID NO: 18454 - DNA, 65 bp, Homo sapiens
  chr4:1782945-1783010
  hypo
gccaagggcccaagggcggtaattctctctccccaggttctgcagtgtttttattttctgggcct

SEQ ID NO: 18455 - DNA, 59 bp, Homo sapiens
  chr4:1787675-1787734
  hypo
gggggaggcaggcaggcgtggcggggaagggaggcctcaggaggcgaagatgtctctat

SEQ ID NO: 18456 - DNA, 503 bp, Homo sapiens
  chr4:1791269-1791772
  hypo
tgcccacctccctgtcgggaaaggcggcagctgcctgcccggagtgctgtggggaacaggcggtgtggatctgagactgtgctgggaatgtcctctctgccgaaggcgcctctgccattttccgagtacctgcaagggagacgcaggagacgcgggtgtgagcggggccatgggcaacctgcggaggccctgcacccaggatgggcctccctcccaggcaccctctgccactcacccacgcaggccccagcaagccaggctgcccagctctgagtcaccgccagggctgggctgggccgggccgtcagccgcacgcgccgcttgtctcggcccctgcctcccatactcaccttcaggggggacccctgggtatgggcctcaggaggtgggtgggggtgcagggggagtgggtagggaggtgtaaaccggagtccagcagatgggaagttcctgtccggccggcacctgcttggagcctcctgcacatgcggaccctcaacagg

SEQ ID NO: 18457 - DNA, 9 bp, Homo sapiens
  chr4:1794946-1794955
  hypo
gggagcggg

SEQ ID NO: 18458 - DNA, 84 bp, Homo sapiens; identical to SEQ ID NO: 3103
  chr4:1794972-1795056
  hypo

SEQ ID NO: 18459 - DNA, 591 bp, Homo sapiens; identical to SEQ ID NO: 3104
  chr4:1795975-1796566
  hypo

SEQ ID NO: 18460 - DNA, 1047 bp, Homo sapiens
  chr4:1804645-1805692
  hypo
gatcagtgagagtgtggaggccgacgtgcgcctccgcctggccaatgtgtcggagcgggacgggggcgagtacctctgtcgagccaccaatttcataggcgtggccgagaaggccttttggctgagcgttcacgggccccgagcaggtaacgactctgtcccatgccggccggcacaagagctccagctccaaggccctggccgcgcgccctgcacgccccgcacgcccagccctgctcgctcccgccccggctcgcgctccactcggggccgcctcggcaaggctggcagctccagcctccacggtgaccgcccgcttcgagccctgtggcctgcgccgacccttcccgcacgcctgcgacccccacaggaggtgcccggtgcccaccgggccggctccgtgccgtctgtgagcacccctttgcgcctctctccacccctgcccgctgcctgctcgcttccgcagcctgtgtgtccctgtgtccatcctccacctgcacccgcccggctctgcgctaacccgcatgctgcctgcccgcctgccgctcacctgggacagaggactcgccggtggaggggcctggcttcgggctcagtaccggtgtaccaggcggagggccctcagccgcgtggcggtgaccaagttggcggtggctgaggagttggtggtggcggcgttttccttgcagcggctggatcctgccgtgtggactctgtgcggtgcccgcagggcggtgctggcgctcgcctatcgctctgctctctctttgtagacggcgggcgctaacaccaccgacaaggagctagaggttctctccttgcacaacgtcacctttgaggacgccggggagtacacctgcctggcgggcaattctattgggttttctcatcactctgcgtggctggtggtgctgccaggtaccggcttctgctgctgctgctgctccgcactgtctgggggacgctggctcgggacacgccaaagctgccaggacggacgggaatcctgtgacttacggccgtcccgcttcttgagccctcactcct

SEQ ID NO: 18461 - DNA, 30 bp, Homo sapiens
  chr4:1805920-1805950
  hypo
ctccagacaaggcgcgtgctgaggttctga

SEQ ID NO: 18462 - DNA, 30 bp, Homo sapiens
  chr4:1827241-1827271
  hypo
gtttcccttgagcccgtgccggcctggcac

SEQ ID NO: 18463 - DNA, 186 bp, Homo sapiens
  chr4:1828220-1828406
  hypo
caccttccccagctcccggtgctgcccgttcacagacgcgcttgtctccatgtctgctgctgtcacctggagtgctctctgaacaggatcatgcaggagtcacctctggggttccctgaggacccactgggggtgctatgggtgtgccgggttaggcctctcactgccatgcggcattctgcagca

SEQ ID NO: 18464 - DNA, 47 bp, Homo sapiens
  chr4:1835147-1835194
  hypo
gctgctgtctgctgggggagacgcccgggcccacaggctgctgcatg

SEQ ID NO: 18465 - DNA, 31 bp, Homo sapiens
  chr4:1840860-1840891
  hypo
agaatcttttcagaaccgtgaaggacagcag

SEQ ID NO: 18466 - DNA, 30 bp, Homo sapiens
  chr4:1844709-1844739
  hypo
ccccccgggtggcccgagctcacctaaaag

SEQ ID NO: 18467 - DNA, 31 bp, Homo sapiens
  chr4:1925938-1925969
  hypo
atgtgtgtacagccaccgtttcaggcatgtt

SEQ ID NO: 18468 - DNA, 286 bp, Homo sapiens
  chr4:1955050-1955336
  hypo
ggattcactcatgtttcgtgtgtaaagagagcaagacagatgttaagcgctgtgtggtaactcagtgtggaaaattttaccatgaggcttgtgtgaaaaaataccctctgactgtatttgagagccgaggtttccgctgccccctccacagctgtgtgagctgccatgcttccaacccttcaaacccaaggccgtcaaaaggtacaggtgcacctgcgcagccttgctgtgggttcagatgcaggccagacgcaggcccatgggcgcttgggaaggtgggctgttg

SEQ ID NO: 18469 - DNA, 185 bp, Homo sapiens
  chr4:1960154-1960339
  hypo
agcaagatggcggggcggcaggggagcttgccagttctgtgtttattccagtgagctcgagagccccagcaggaggaagtgcagccagggcagggctctgtgagagctccaggcccctcagggctgcctgcgctcagagctggtgcggcaagccgcatccccaggagcctcgtggccgttcctga

SEQ ID NO: 18470 - DNA, 70 bp, Homo sapiens
  chr4:1960865-1960935
  hypo
actaagcaatcaacacgctttttctctcttcatcttacaatggcctggctggatacgtgtcagctcttgt

SEQ ID NO: 18471 - DNA, 30 bp, Homo sapiens
  chr4:1976217-1976247
  hypo
ggcgtgagccactgcgcccagccagggtga

SEQ ID NO: 18472 - DNA, 30 bp, Homo sapiens
  chr4:1986571-1986601
  hypo
gggaaccacgctgggcgtggagggaaggta

SEQ ID NO: 18473 - DNA, 697 bp, Homo sapiens
  chr4:1993709-1994406
  hypo
ccactgggcctactcttccaccggtgcgcagatgcaagaaaacctgaagggtgagaagccggggccaccactgctcccgcagaaagcctgcgggtgggaaatcctggggatgaggggcgtagagcaggcaggtgcccggcacagcagagcgcaggagcagggtggagtcacctgccgcgggggtgtgtgcctgggcagcagggggtggggcctgggacctggggcagcacccgtgacagctgagctggtgcctagtcaccatctaggcagggacggctgcctctgggtctggacggcgctgggagttggcgctcgtggagcctggaggtggccccgggatctggagtgaggccagggccttggggaggccatgggcgacgtgcgtggaggaagcaggcgcaccccgtgctccctcaatacctgggaggccagatccatccacaccagggcctgcttcggccacataaaccccctcccacgaggaaacgcagagagccaggccatggcgtgcctgtgcctctgccatgcgcccactgggctgctcacagtgtgagacagctgggctggctggcgctgggggtgaacaacagcgccctgccctgtccagacgccggggctgaaaccccagccccaggccttcctgacacccactccctgcgtcaggcgccagagacccgtcctacgagggctgcggcca

SEQ ID NO: 18474 - DNA, 305 bp, Homo sapiens
  chr4:1994746-1995051
  hypo
gtggctgcaggaagcgctgcgcacacgctgcctctggcagccgcacagcccggctgtttccagccagtgcggcctctccacagcagccccagggaaaccctacgcctgccaagaggcaagcgcgcggcattttataaaaatggtaaggataaaaaaagtcggggatgttaatttaaaacaaaaaggaccactgttgtggagtcaatgttttctctccagaacgcgcatgttgaagcctggctcgctctactggggcttcttgtaggaaaacgcttggctttcccgggcgcggtagctcatgtctg

SEQ ID NO: 18475 - DNA, 95 bp, Homo sapiens
  chr4:1999768-1999863
  hypo
aagagggacatgactacggcaaggaaaacaaacgagcagaaaacgacaacagcatcaacaacaacaacaacaaccacaacaaaagcccccatcca

SEQ ID NO: 18476 - DNA, 30 bp, Homo sapiens
  chr4:2045677-2045707
  hypo
aatgcccagtggcacgcctgtgtcctgtct

SEQ ID NO: 18477 - DNA, 104 bp, Homo sapiens; identical to SEQ ID NO: 3111
  chr4:2061492-2061596
  hypo

SEQ ID NO: 18478 - DNA, 178 bp, Homo sapiens; identical to SEQ ID NO: 3112
  chr4:2061908-2062086
  hypo

SEQ ID NO: 18479 - DNA, 30 bp, Homo sapiens; identical to SEQ ID NO: 3113
  chr4:2062493-2062523
  hypo

SEQ ID NO: 18480 - DNA, 30 bp, Homo sapiens
  chr4:2065734-2065764
  hypo
ttcagacacatgggcgccagtgaccactac

SEQ ID NO: 18481 - DNA, 52 bp, Homo sapiens
  chr4:2066213-2066265
  hypo
tcccggggccaggctccggccccgcctgcggccccagcgccactgcctgtgg

SEQ ID NO: 18482 - DNA, 30 bp, Homo sapiens
  chr4:2252251-2252281
  hypo
aggagcagagggcacgggcctacgagaggg

SEQ ID NO: 18483 - DNA, 31 bp, Homo sapiens
  chr4:2387539-2387570
  hypo
ctccttgcttaagagccgcagacaggcgccc

SEQ ID NO: 18484 - DNA, 45 bp, Homo sapiens
  chr4:2427612-2427657
  hypo
ggccctgttcccccatcgtcaggatggcggcgttgaccccaggga

SEQ ID NO: 18485 - DNA, 139 bp, Homo sapiens
  chr4:2459751-2459890
  hypo
gcctccctgattccacgttcccaaagagccaggaggcaccgccgccctcttctgcactcccggcctgaggcgcccagccgtctccctgtgccatggtctgacgctgtggctgcgcggggagggccggtgtggacgcctc

SEQ ID NO: 18486 - DNA, 82 bp, Homo sapiens
  chr4:2524116-2524198
  hypo
agagcgagactccgtctcaaaaaaaaaaaaaaaaaaaaagttttggggctaatagccaaaaaatgagcgttctgtgtgtctc

SEQ ID NO: 18487 - DNA, 32 bp, Homo sapiens
  chr4:2559964-2559996
  hypo
catcgtgtttgacagagcgagactgcatctca

SEQ ID NO: 18488 - DNA, 25 bp, Homo sapiens
  chr4:2567775-2567800
  hypo
tgcttttttttttttttgagacgga

SEQ ID NO: 18489 - DNA, 31 bp, Homo sapiens
  chr4:2571129-2571160
  hypo
cccaaaggtagtttatcgaatcctatttatt

SEQ ID NO: 18490 - DNA, 79 bp, Homo sapiens
  chr4:2622585-2622664
  hypo
gtaattaacaagtagcgacaggtcagccacccagatccgtgaagtgaatgctaaagaatatggccggggcagatttagg

SEQ ID NO: 18491 - DNA, 30 bp, Homo sapiens
  chr4:2626241-2626271
  hypo
agaggcctctgccccggctgcttgatgcaa

SEQ ID NO: 18492 - DNA, 262 bp, Homo sapiens
  chr4:2626999-2627261
  hypo
tcttcttcactcctcgcttggtggctcccagccagaggccggcagtggtgggaggctcgctctgggtgcacagacgctgccttcagacaccgcatgctcgtgcgaggcctgcagtgagcgcaggtatgtgacgtgtgtgccacgttgctcacacctgtccacaatgacatgcagacctgcatattggagctggacggagaaactgggctaatgtgacagacagcaacaagagtaaggcagttgcttcgctattgagagaaag

SEQ ID NO: 18493 - DNA, 206 bp, Homo sapiens
  chr4:2639955-2640161
  hypo
tactcttctgttccccgggaactcctggagagcagcggactattgtagcaggaggtagtcttcgtgtcctcgtacctggcacagggcctgggcagcatgggcttggcatttcacctgcttattattacaagcacatttgtgggttccagcctggggctgggtatcagttacctggccctggtctcctgccacgtgcatttttcctg

SEQ ID NO: 18494 - DNA, 147 bp, Homo sapiens
  chr4:2640599-2640746
  hypo
tccctgtgagtgacccgactcaggagacgtggagtagccaagcatgatgaagtgcagcttccagagctggcggttgttgaagtcaggaacattcacccaaagatgtaacgtgatctgaacacaagtagtgtccgtgtagttgacaga

SEQ ID NO: 18495 - DNA, 30 bp, Homo sapiens
  chr4:2687532-2687562
  hypo
aaactcagtgtgtgcgcagtggaaagcagt

SEQ ID NO: 18496 - DNA, 598 bp, Homo sapiens
  chr4:2704072-2704670
  hypo
actttgtgtcatggttcgatgctccgggctcatctcgtgtcttctctctcccagccctgaaccagccatttctccaaggagccctcctctttcttcaacagtggtgttcagaaacccagacctggacactgccatatggcattgcttttaggccctctcagtcagcagagcaggaggagtgggggtgtgagcatgtgcacacgagcgcctgccacctacacacactaattgctatgtacaagccgtgagttcccacagatatcccagccccactcctgtgctacagtgagcgttctcccttccccgtccacctttgtaactccttagacagtaagaacctggaccccatcatccatggtgcctttactgacttgctgagtcctacaacacaggtaaagggttcagaagtccctgcccttacccgatggaaaactccgggcatgctttcggtatttgttcagttctttttgtctttagcctcagggtgtggtgattacactgaatttacaaatgacttaaattagttcttttcacctttagtacaattacgttattgattgaaaacacacctgattgcgtttttccatttgtgttccat

SEQ ID NO: 18497 - DNA, 29 bp, Homo sapiens
  chr4:2878139-2878168
  hypo
tagcttaggctgggtgcgtcggctcaagc

SEQ ID NO: 18498 - DNA, 196 bp, Homo sapiens
  chr4:2926276-2926472
  hypo
ctgactgttgctctcctgggccgtcgtcatcctgggagctaggcactcctcctaagaggacctcttcaccggtttttgtctcgttctagaccagccactgcattacgtagttgtgactgaaatttgagttgctgaattgtttttcagtgtcacaccgctatttactattcaggccgccacacacaccaggccctgc

SEQ ID NO: 18499 - DNA, 30 bp, Homo sapiens
  chr4:2926879-2926909
  hypo
tcagcaccttttcccggttgaggctgtatg

SEQ ID NO: 18500 - DNA, 153 bp, Homo sapiens
  chr4:2932896-2933049
  hypo
caggcaccactgcccttctcccgctcaggtggcttcggccgagggaagggggctcaccatagccagcgaccacggaggacaggcagggcaccacaacggcggcggctggtgggagacatcgaggaggtgcccgtcagcccaggggagggtgca

SEQ ID NO: 18501 - DNA, 31 bp, Homo sapiens
  chr4:2957243-2957274
  hypo
cctctagtcacctgcacgccacggcgccccc

SEQ ID NO: 18502 - DNA, 17 bp, Homo sapiens
  chr4:2961295-2961312
  hypo
ggcgacagacaaagact

SEQ ID NO: 18503 - DNA, 31 bp, Homo sapiens
  chr4:3103815-3103846
  hypo
tttaggaagagtgacccggtgaggacgtggg

SEQ ID NO: 18504 - DNA, 31 bp, Homo sapiens
  chr4:3208226-3208257
  hypo
agaacctccatgactccgagcacttaacgtg

SEQ ID NO: 18505 - DNA, 247 bp, Homo sapiens
  chr4:3216984-3217231
  hypo
cttaaaaatcattcacagagacgtgcaccgcggtgagtgtggactcctggaagcgcaccgtagctccgctgtgtcctgctgctcctccctagctgtcagggaggctgtagtccattgctttgccagctcttttgtttccgagtgaacaccttatccgtacacatgcggctgtctctgaccctacagaccagctgggatgccactgggggagcgctcccttccccccgcacttcccacactctgcagt

SEQ ID NO: 18506 - DNA, 30 bp, Homo sapiens
  chr4:3240606-3240636
  hypo
cctctccaacttcacgcagagggccccggt

SEQ ID NO: 18507 - DNA, 225 bp, Homo sapiens
  chr4:3245230-3245455
  hypo
ggagggagctgctcagaatgccgcatgacaactgaaggcaacctggaaggttcaggggccgctcttcccccatgtgcctgtcacgctctggtgcagtcaaaggaacgccttcccctcagttgtttctaagagcagagtctcccgctgcaatctgggtggtaactgccagccttggaggatcgtggccaacgtggacctgcctacggagggtgggctctgacccaa

SEQ ID NO: 18508 - DNA, 621 bp, Homo sapiens
  chr4:3252398-3253019
  hypo
gggcctggggctgccggagagcctgtcagcttccaggatgggagtggcctcactcagctgctccacctccgggtcaggcaggtgagcctggggcagagaggctgagagcacctgagccacttgtgggagaggccacccccactgcccccctcaggcgaggagccggcctccagcacagcagaagggaacccccagtccccagccctagtgggagtggggaagaggcccagcaaggccccggacagaccgccagcctgtgaggtctccgctttcagttgcgttgatttgattttttctgagccttgaaggaggggtccggggcctggccctgcccaaaggcccctaggcaggccccaaagccgggacctagggtgctgagcatgacggatgttgggtttgagcggctggcttgcgacgtgagggctgaggtgtgagcctgggtatcttcagaggttcggtggacacaggcagctgcccgcggccccactgttcccgtggcctcctagtcctgctcaggcacctggtgaggaagggacgcagagggcagtgggaggtggccacgactgttccagcaggctcccctctgactcaggaattcacgggcaccacctccctggctgg

SEQ ID NO: 18509 - DNA, 30 bp, Homo sapiens
  chr4:3292371-3292401
  hypo
gctgtgggtagggccgctgagccgctgcct

SEQ ID NO: 18510 - DNA, 30 bp, Homo sapiens
  chr4:3313621-3313651
  hypo
cgagtggggaccttcgtgtcacatcccatc

SEQ ID NO: 18511 - DNA, 31 bp, Homo sapiens
  chr4:3324702-3324733
  hypo
ggtgtactggagtacccgagagctacatctg

SEQ ID NO: 18512 - DNA, 199 bp, Homo sapiens
  chr4:3345082-3345281
  hypo
attgcccccttaaagacggggcgtgatccacagacatgggtaagtgtcattttgtgtggctcgtctatctgtgtttcttttgtaaagaacaatgaaaagattttattttttatagcagttttaggtttacagaaagtacagagagttcccttatgcccccacccacttgttaaaaatgcgccgtcgggatcattacgtc

SEQ ID NO: 18513 - DNA, 31 bp, Homo sapiens
  chr4:3363136-3363167
  hypo
gtgagtacttttttcccgcccttttgaatgg

SEQ ID NO: 18514 - DNA, 30 bp, Homo sapiens
  chr4:3363494-3363524
  hypo
gcagtcagaggggacgtctctgccttccag

SEQ ID NO: 18515 - DNA, 30 bp, Homo sapiens
  chr4:3399234-3399264
  hypo
gaggagcagtggaacgacgtgagaggggtc

SEQ ID NO: 18516 - DNA, 31 bp, Homo sapiens
  chr4:3413101-3413132
  hypo
ggtctgtgtgtgttctcgtgttaggcctgtc

SEQ ID NO: 18517 - DNA, 30 bp, Homo sapiens
  chr4:3413668-3413698
  hypo
gtgtgagccccagccgcaggcctctgaaac

SEQ ID NO: 18518 - DNA, 148 bp, Homo sapiens
  chr4:3415797-3415945
  hypo
gagttgacgggcgccgacctgaaggactgcgtcagcaacaacagcctgagcagcaatgccagcctccccagcgtgcagagctgccggcgcctgcgtgagaggagggtcgccagctgggccgtgtcctttgagcgcctgctgcaggacc

SEQ ID NO: 18519 - DNA, 90 bp, Homo sapiens
  chr4:3417356-3417446
  hypo
tgctttcgtctgctcgcaatgctcagagggcgctgctctcctgcactcccaccttgccaagaccaggtgtgtggcgacacacggcagtat

SEQ ID NO: 18520 - DNA, 30 bp, Homo sapiens
  chr4:3418055-3418085
  hypo
gtcccgaaccactgcgtgtctgtctgcaat

SEQ ID NO: 18521 - DNA, 118 bp, Homo sapiens
  chr4:3425160-3425278
  hypo
gtgctgtagttctgctcgtgagactgatctcctaatgagggctgacatgagttggtagtgaattttttcatcccccaccaggctggatcttgttccgattaaccggtcagtgggactc

SEQ ID NO: 18522 - DNA, 30 bp, Homo sapiens
  chr4:3426135-3426165
  hypo
tgaagcctcttccccgcgctgcaggctcca

SEQ ID NO: 18523 - DNA, 30 bp, Homo sapiens
  chr4:3439080-3439110
  hypo
ccatgtggggctggcggggtagagccgggc

SEQ ID NO: 18524 - DNA, 916 bp, Homo sapiens
  chr4:3446261-3447177
  hypo
caagggacaaggggtggaccccggccccgactccgctgtcgtggggcactgcgcggcccctggcccagctcctcggccctgcccccagcttgtctgagcagcccttgcctgaacgggggcacctgccacctgatcgtggccaccgggaccaccgtgtgtgcctgcccaccaggcttcgctggacggctctgcaacatcggtgagtgggtcagccccccggggtgccctggggcagtgccgggtggacccaccgtgggccggcctcactgcccctctgcccgcagagcctgatgagcgctgcttcttggggaacggcactgggtaccgtggcgtggccagcacctcagcctcgggcctcagctgcctggcctggaactccgatctgctctaccaggagctgcacgtggactccgtgggcgccgcggccctgctgggcctgggcccccatgcctactgccggtcagcaccacgccgctccaggccgccgcatgcggggcaggcaggatttgtcctggggagaggccccccggctccctaggacccaggcggggccagctccgtccagacaggccccggaacctctgcctgggaggctgcccgagggagggccactctcttcccactgctccaggtgcggggaaccgccctgctgggggttccgatgccccctccccatgccctcttcgaggggcagtgtgactccctgccagcccccacttatgcaccgcaggaatccggacaatgacgagaggccctggtgctacgtggtgaaggacagcgcgctctcctgggagtactgccgcctggaggcctgcggtgcgcggctggcggggggtgctgccttgggccccaccgaggtcacagcagttttccccgtgatcctcctagcccctccgcacacctggctactgcatct

SEQ ID NO: 18525 - DNA, 169 bp, Homo sapiens
  chr4:3447781-3447950
  hypo
agtccaactgtcaccggatctcctggcgaccctgcctgagccagcctccccggggcgccaggcctgcggcaggaggcacaagaagaggacgttcctgcggccacgtatcatcggcggctcctcctcgctgcccggctcgcacccctggctggccgccatctacatcggg

SEQ ID NO: 18526 - DNA, 50 bp, Homo sapiens
  chr4:3448499-3448549
  hypo
tggggagaccctgagacggagcagcctgggccagacgcccttccaccttc

SEQ ID NO: 18527 - DNA, 78 bp, Homo sapiens
  chr4:3449841-3449919
  hypo
ttgtgtcccacagacgtgagcggctactccagctccctgcgggaggccctggtccccctggtcgccgaccacaagtgc

SEQ ID NO: 18528 - DNA, 30 bp, Homo sapiens
  chr4:3451201-3451231
  hypo
tatttccaagaacccggcccacgctgcctg

SEQ ID NO: 18529 - DNA, 31 bp, Homo sapiens
  chr4:3453080-3453111
  hypo
cccgtcgtgctctgccgcgggaggctggcct

SEQ ID NO: 18530 - DNA, 329 bp, Homo sapiens
  chr4:3475058-3475387
  hypo
cggcctccccggggacgccaagggtgcgggcaggcggtgttggctggcgtccctgacggccacgctccttgcagactgcctgctgatgctggtctacaaggacaagtcggagcgtatcaagggcctgcgggagcgcagcagcctgacgctagaggacatctgcgggctggagcccggcctgccctacgagggcttggtccacacgctggccattgtctgcctgtcccaggccatcatgctgggctttgacagccacgaggccatgtgtgcgtgggatgcccggatccgctatgcgctcggcgagggtgagtgacgggggccggggccgg

SEQ ID NO: 18531 - DNA, 30 bp, Homo sapiens
  chr4:3478049-3478079
  hypo
ttgccccgcctgcccgcagtgcataggttc

SEQ ID NO: 18532 - DNA, 30 bp, Homo sapiens
  chr4:3480303-3480333
  hypo
acagaacccgcaaacgggggctggccccac

SEQ ID NO: 18533 - DNA, 96 bp, Homo sapiens
  chr4:3480575-3480671
  hypo
tagactcggccaagcggtggtgttctcaacgcagcactgagtgcaggccgtctggctggagggacggggagtctgcggcacgtgtgggcagcctgg

SEQ ID NO: 18534 - DNA, 30 bp, Homo sapiens
  chr4:3507190-3507220
  hypo
cacttcttccacaccgcgcagctgcctgtg

SEQ ID NO: 18535 - DNA, 30 bp, Homo sapiens
  chr4:3514694-3514724
  hypo
atgccttcagagttcgttgtgccgagctct

SEQ ID NO: 18536 - DNA, 31 bp, Homo sapiens
  chr4:3516337-3516368
  hypo
gccctggggttcaactcggacagggaagaca

SEQ ID NO: 18537 - DNA, 31 bp, Homo sapiens
  chr4:3529879-3529910
  hypo
tcaagttaaatgttaacgcatcaagttagaa

SEQ ID NO: 18538 - DNA, 103 bp, Homo sapiens
  chr4:3588427-3588530
  hypo
cagcaacaacaaggaacgcagctgcagcagcgggggccctgggcaggcggcctgccctcacttaggccaccatgtgcctgtcgaagtgcgtaggagcctggag

SEQ ID NO: 18539 - DNA, 30 bp, Homo sapiens
  chr4:3748326-3748356
  hypo
tgctctcagaaacacgcatgcgtgcgtcat

SEQ ID NO: 18540 - DNA, 31 bp, Homo sapiens
  chr4:3808368-3808399
  hypo
ccaatgaaacccattccgcatgccccatgat

SEQ ID NO: 18541 - DNA, 31 bp, Homo sapiens
  chr4:3810706-3810737
  hypo
gaccgtgggggtttttcgttctacatgtggg

SEQ ID NO: 18542 - DNA, 65 bp, Homo sapiens
  chr4:3944639-3944704
  hypo
gatgtggcagctgcagcgggcttggctttgtgaggaaccgggtgtgtccacgttgggggaacatc

SEQ ID NO: 18543 - DNA, 31 bp, Homo sapiens
  chr4:3951479-3951510
  hypo
cttgagcccaggagttcgaggacagcctggg

SEQ ID NO: 18544 - DNA, 22 bp, Homo sapiens
  chr4:4221402-4221424
  hypo
gacagagcgagactctgtctca

SEQ ID NO: 18545 - DNA, 37 bp, Homo sapiens
  chr4:4251227-4251264
  hypo
aaagagtgccagccgcgcgcggtggctcacgcctgta

SEQ ID NO: 18546 - DNA, 20 bp, Homo sapiens
  chr4:4288387-4288407
  hypo
tttgagaaaggagtctcgct

SEQ ID NO: 18547 - DNA, 30 bp, Homo sapiens; identical to SEQ ID NO: 3122
  chr4:4389100-4389130
  hypo

SEQ ID NO: 18548 - DNA, 31 bp, Homo sapiens
  chr4:4487688-4487719
  hypo
tgctctcttagaagtacgagtggtggatggt

SEQ ID NO: 18549 - DNA, 30 bp, Homo sapiens
  chr4:4668217-4668247
  hypo
cgccagttatctctcgctattgaagtttcc

SEQ ID NO: 18550 - DNA, 156 bp, Homo sapiens
  chr4:5024065-5024221
  hypo
acaagcccactaagaaacctacgcaggacagcctgacgtggctccccaccaggggctccctatgagacgccgcactggatacaggctggtggacccccgcacgtgtgttctgttctcaaatgtctccttcaccacgaatcacctgcatcctcccac

SEQ ID NO: 18551 - DNA, 121 bp, Homo sapiens; identical to SEQ ID NO: 3140
  chr4:5052435-5052556
  hypo

SEQ ID NO: 18552 - DNA, 876 bp, Homo sapiens; identical to SEQ ID NO: 3141
  chr4:5052845-5053721
  hypo

SEQ ID NO: 18553 - DNA, 31 bp, Homo sapiens
  chr4:5754867-5754898
  hypo
agtgtgcccatgatgccgggcacaggctgcc

SEQ ID NO: 18554 - DNA, 401 bp, Homo sapiens; identical to SEQ ID NO: 3146
  chr4:5889212-5889613
  hypo

SEQ ID NO: 18555 - DNA, 794 bp, Homo sapiens; identical to SEQ ID NO: 3147
  chr4:5889852-5890646
  hypo

SEQ ID NO: 18556 - DNA, 237 bp, Homo sapiens
  chr4:5970095-5970332
  hypo
ggtggagggcttaatactctgcggcatgggttatggctcagccgtcttctggtagtgaccggatcacaccagcactcctgggaggcttcggtaccaggcacaatgcctgctcctgaacggtgctcttagagcactttgctgtcaccctttcgacactgttgtgtcttcaagtaccctggactctcccaccccggtgcctgtgtccactcaggtcccgcagccttgagaccttcactc

SEQ ID NO: 18557 - DNA, 31 bp, Homo sapiens
  chr4:6022304-6022335
  hypo
ctgggtagggggcagacgcaacactgtccag

SEQ ID NO: 18558 - DNA, 441 bp, Homo sapiens; identical to SEQ ID NO: 3153
  chr4:6271572-6272013
  hypo

SEQ ID NO: 18559 - DNA, 30 bp, Homo sapiens
  chr4:6536899-6536929
  hypo
cgctgtcaggctggcgctgtgtcgggcgcc

SEQ ID NO: 18560 - DNA, 183 bp, Homo sapiens
  chr4:6586517-6586700
  hypo
gacaggagggagtaagcgtgccacatttggcttagatcaactgtgattcgtcccttgaggctgggcatggtgcaccctgaacagagggaaggttctgcgagtgaaaaaggggtgctgacttggcagccttcagcctgcccccaccggctgccctgtctggtgcgaggccgtaccctccagagc

SEQ ID NO: 18561 - DNA, 31 bp, Homo sapiens
  chr4:6588842-6588873
  hypo
acctcggctcccggatcgactacgacctgaa

SEQ ID NO: 18562 - DNA, 41 bp, Homo sapiens
  chr4:6590874-6590915
  hypo
ctttctccaacaggtacgtgcccttccgcagtgcctttggg

SEQ ID NO: 18563 - DNA, 192 bp, Homo sapiens
  chr4:6600600-6600792
  hypo
atcacagcagggcagccgtgggaccagcctctttgactgtgagttttcccacgtgtagagtgactgatcacatgccagtgtgcctgggactgaggggtttccaaactgggaagatcctggacaaatgaagacaggttggcggccctccgcccgcatgagacttttgtgtgcataggccgccaggtcccaccc

SEQ ID NO: 18564 - DNA, 12 bp, Homo sapiens
  chr4:6626826-6626838
  hypo
gactccgtctca

SEQ ID NO: 18565 - DNA, 114 bp, Homo sapiens
  chr4:6733364-6733478
  hypo
gctcagttatgtctgccgagttcagctggcgtgcaggcactgccacaggccccgagaaaagaacggggtgcagagcaggggctgctttcagggacccgccgtgctagtgaaggt

SEQ ID NO: 18566 - DNA, 14 bp, Homo sapiens
  chr4:6738168-6738182
  hypo
gaaaataaacaaac

SEQ ID NO: 18567 - DNA, 35 bp, Homo sapiens
  chr4:6786667-6786702
  hypo
tttttttttttttttttgagacggagtctcgctct

SEQ ID NO: 18568 - DNA, 35 bp, Homo sapiens
  chr4:6786941-6786976
  hypo
gcgtgagccaccgcgcctggctgattagatggatt

SEQ ID NO: 18569 - DNA, 30 bp, Homo sapiens
  chr4:6883828-6883858
  hypo
cgcatcttgtgagtcgcgtctgtgcatggc

SEQ ID NO: 18570 - DNA, 30 bp, Homo sapiens
  chr4:6902917-6902947
  hypo
ccggctgtgcggcgcggggctgggagccct

SEQ ID NO: 18571 - DNA, 30 bp, Homo sapiens
  chr4:6915960-6915990
  hypo
accctgaacaataaccgcagtttctgcctg

SEQ ID NO: 18572 - DNA, 25 bp, Homo sapiens
  chr4:6942920-6942945
  hypo
ttttttttttgagatgcggtctcac

SEQ ID NO: 18573 - DNA, 179 bp, Homo sapiens
  chr4:6950155-6950334
  hypo
attgttgtctagttttcggctgtatgggtatcccactctttgttctcccatgtgtggaggtttgatttgttcagggtccaatggttacaaataatgcccaccatggtgttctcacggatgtcactggcgtgtgcgtgcctggggggtgggacaggtgggtctcccgtgggtcccactcg

SEQ ID NO: 18574 - DNA, 31 bp, Homo sapiens
  chr4:6952006-6952037
  hypo
taggccttgctaacttcggttactaattcta

SEQ ID NO: 18575 - DNA, 74 bp, Homo sapiens
  chr4:7004174-7004248
  hypo
tttaaattaaaacctatggaccgtattgttttggattgggctaaaccgctgacgagtcagttacatgtttagac

SEQ ID NO: 18576 - DNA, 31 bp, Homo sapiens
  chr4:7033477-7033508
  hypo
ggtgctctgcactccacggcccttctcagcc

SEQ ID NO: 18577 - DNA, 109 bp, Homo sapiens
  chr4:7035496-7035605
  hypo
ctgttatctcctatgcgttctctgcaggccatggtgagaggacgggccacaggcgtgatggtggcagcagtcacagccacgccaggcgctgggccgagtgctgcctgtg

SEQ ID NO: 18578 - DNA, 47 bp, Homo sapiens
  chr4:7035947-7035994
  hypo
aaaaaaaaatatgagacgcagggaaggatgtgcgtagacgcggacag

SEQ ID NO: 18579 - DNA, 55 bp, Homo sapiens
  chr4:7047138-7047193
  hypo
tccacacaccataaccggagcgagctttggaagcacaaagcgcctcacaccggcc

SEQ ID NO: 18580 - DNA, 30 bp, Homo sapiens
  chr4:7047419-7047449
  hypo
ggtggcatatctgtgcgtatctcaggacat

SEQ ID NO: 18581 - DNA, 36 bp, Homo sapiens
  chr4:7167401-7167437
  hypo
cgcccttctgcaggaacgtcccgagtgtgaatctcg

SEQ ID NO: 18582 - DNA, 30 bp, Homo sapiens
  chr4:7251436-7251466
  hypo
ccctcgcacaaagcacgtggtggagctgga

SEQ ID NO: 18583 - DNA, 218 bp, Homo sapiens
  chr4:7432356-7432574
  hypo
gagatgctcctctgtgcggcgcagtcaccacctctgggaaatccatgctcaacatctgtcttgatttcccatccttgctgggatgggtctcccaaacttctaggcccagtagggccagctgctcttctcctgggctggtatctcctctcccacagctggacagttacagcaccctccgctgaaaagccttttccagcctgaacgcggcggctatggag

SEQ ID NO: 18584 - DNA, 30 bp, Homo sapiens
  chr4:7543512-7543542
  hypo
atgcagcacacggggcgtgtggacatgatg

SEQ ID NO: 18585 - DNA, 30 bp, Homo sapiens
  chr4:7741665-7741695
  hypo
tggcgggttggggccggcctgggcctcacc

SEQ ID NO: 18586 - DNA, 340 bp, Homo sapiens
  chr4:7758185-7758525
  hypo
ttggcttggtctgtgcaccatcgacccgagggccagaaggttggcttggtctgtgcacaattgacccgagggccagaaggtgggcttggtctgtgcaccatcgacccgagggccagaaggtgggcttggtctgtgcaccatcgacccgagggccagaaggtgggcttggtctgtgcacaatcgacctgagggcgagaaggttggcttggtctgtgcacaatcaggacggccctgagagcagagtggcggcagggctgtcatcccagtgccttcggggactgcgccgaggagccgggccgcatcccacgtggggtgactcgcacctgcccgtcggggccag

SEQ ID NO: 18587 - DNA, 31 bp, Homo sapiens
  chr4:7775800-7775831
  hypo
gccatgcgtaggtaagcggtgccaccccagg

SEQ ID NO: 18588 - DNA, 56 bp, Homo sapiens
  chr4:7789548-7789604
  hypo
gcgctgtggcttcctgcgctcggtcagtctcctgggtgccccggcactcccctggc

SEQ ID NO: 18589 - DNA, 307 bp, Homo sapiens
  chr4:7813250-7813557
  hypo
tgcccccaccacagccaaacacgctagggcggcagaacatacccctggtgtctcctgcctcgggccttgccctcccacactccaccctcccgcttaggtcctggtcctatagcgttagtgcccttctaagaagagacggcacaggcacagaagaaaggccgtgtgaaggcgcgggaggggagccgccttggaggaagacagccctcgctagacaccaaccctggcggcacccgggtcttggacttccagcctccagggccgtctaaatgcatgttgtttcagccacgcagtctgtggtattctgtta

SEQ ID NO: 18590 - DNA, 31 bp, Homo sapiens
  chr4:7828943-7828974
  hypo
gagtatccacaatctacgggaagtatcagag

SEQ ID NO: 18591 - DNA, 40 bp, Homo sapiens
  chr4:7967952-7967992
  hypo
ggaggccgctcccctgcggagggaccgtaaaattaaactc

SEQ ID NO: 18592 - DNA, 31 bp, Homo sapiens
  chr4:7984131-7984162
  hypo
caggagatgaaacccccgggctggatgctgg

SEQ ID NO: 18593 - DNA, 159 bp, Homo sapiens
  chr4:8001654-8001813
  hypo
cagaggtcaaagtcaccgctggacattcaaggccgggcaccttgtgggcagaggactgtggctcacacagcatccgggtctgctttgtggacacctgacccatgaaccactcacttgggcagttcccatccgctcctgggtgcacgggcaggaggcttg

SEQ ID NO: 18594 - DNA, 30 bp, Homo sapiens
  chr4:8011534-8011564
  hypo
taccccgcccacccccgcaggaagaagctt

SEQ ID NO: 18595 - DNA, 150 bp, Homo sapiens
  chr4:8012067-8012217
  hypo
ctgaacaattacacaaaaacccgtctccgtccccagcccgccacgaagacccaggcctcaggaaggacacgccgaggtgggcttcttacctgcagcgggcggcgggctcgggcccgtctgtcttttgccgtaccctgcctcctgcaccac

SEQ ID NO: 18596 - DNA, 262 bp, Homo sapiens
  chr4:8032212-8032474
  hypo
agtgatgagcaaaggaattcccggtctgggcccatggctcccctggcctgtcagagcacgtctcccaccccgaggtgtgctgtccctaacgcctgcctggtgcgccacctccatgcgctcaggccagccctcatgctaggttcctacctgcgcttcaccctgctccctttggcgactgtctaaccccagcccggggcgcactctctcgggccggctagtgccctgcctctctaccccgggcgtcctctgcacagccctgtcc

SEQ ID NO: 18597 - DNA, 31 bp, Homo sapiens
  chr4:8063598-8063629
  hypo
gtcattttgagcatcccgttttccctgtcct

SEQ ID NO: 18598 - DNA, 31 bp, Homo sapiens
  chr4:8153833-8153864
  hypo
gaccctcaccaagaagcgccatcatgatgcc

SEQ ID NO: 18599 - DNA, 18 bp, Homo sapiens
  chr4:8296287-8296305
  hypo
cttctatccgtccgtccg

SEQ ID NO: 18600 - DNA, 177 bp, Homo sapiens
  chr4:8372556-8372733
  hypo
cccacaggagcatctcagctccgcagaaatgcccatcaacccttggggcactcccgtgaggccctgtcctccctttacctcgccgtcggctctgccaatcggtgagtccagaacaaagtcaggaggagcgatcacgtctaccagggcaactgcatcgtctttcagctgttggaaaac

SEQ ID NO: 18601 - DNA, 112 bp, Homo sapiens
  chr4:8386731-8386843
  hypo
actgtggccccccacacgcagcagccccccaccgagggcaccatggcctggcccctgccaggtggcatggggtgaccgcattccctccccactgtctcgcagaaggaaaaca

SEQ ID NO: 18602 - DNA, 68 bp, Homo sapiens
  chr4:8389755-8389823
  hypo
ttgcgctcacctcccgtcattcacagcaggggaacgagatgcatgctcacatcgagatgagctcggca

SEQ ID NO: 18603 - DNA, 122 bp, Homo sapiens
  chr4:8396395-8396517
  hypo
aggtccaggaagagcgacttggagaaatggtctaaggcgtagacagctgccagatatggaagcaagcgccattgctagaacagacaagacacctgcgtgaacacatcgtggttcccatgaag

SEQ ID NO: 18604 - DNA, 30 bp, Homo sapiens
  chr4:8398808-8398838
  hypo
aggctccccagggacgctccaaagcgctgc

SEQ ID NO: 18605 - DNA, 31 bp, Homo sapiens
  chr4:8455227-8455258
  hypo
tcagttctggctcggacggccagtcatgtat

SEQ ID NO: 18606 - DNA, 52 bp, Homo sapiens
  chr4:8466254-8466306
  hypo
gagagacttggtcacgaagcaggttgtgctgctcctcgttgacgtttcgttg

SEQ ID NO: 18607 - DNA, 57 bp, Homo sapiens
  chr4:8473096-8473153
  hypo
gggacgtgggtcaccccgttccctccttgctcctctggacctcgtcccatgcgatgt

SEQ ID NO: 18608 - DNA, 31 bp, Homo sapiens
  chr4:8477856-8477887
  hypo
cctcacagtgatgaaccgtatttcataaaca

SEQ ID NO: 18609 - DNA, 31 bp, Homo sapiens
  chr4:8550061-8550092
  hypo
gtgcccaggtagctgccgctgcaacattatt

SEQ ID NO: 18610 - DNA, 31 bp, Homo sapiens; identical to SEQ ID NO: 3169
  chr4:8594321-8594352
  hypo

SEQ ID NO: 18611 - DNA, 31 bp, Homo sapiens; identical to SEQ ID NO: 3170
  chr4:8594372-8594403
  hypo

SEQ ID NO: 18612 - DNA, 30 bp, Homo sapiens
  chr4:8608471-8608501
  hypo
ctacaacgggtggacgagcgggaggcagaa

SEQ ID NO: 18613 - DNA, 132 bp, Homo sapiens; identical to SEQ ID NO: 3171
  chr4:8609442-8609574
  hypo

SEQ ID NO: 18614 - DNA, 52 bp, Homo sapiens
  chr4:8615875-8615927
  hypo
gcccctcagctgcaggaggggcgtctgtggcgagtacctgctgcactcacct

SEQ ID NO: 18615 - DNA, 270 bp, Homo sapiens
  chr4:8621149-8621419
  hypo
aagaactttattcatgggctgcggaggactgggccccacgacccactgggaggtgccagctctttgggggaggccacggagcccgacccgctccgggcgcgcaggcagccctcggccgacgggagtaagccctggtggtggtcctacttcacatcgctgagcacccacaggccacgctggctgctcaagtactagccccggccccagcacccgccaggatgtggagaccgaggcccatctccgcatcccgggctcctggctcttgatttt

SEQ ID NO: 18616 - DNA, 111 bp, Homo sapiens
  chr4:8647630-8647741
  hypo
caccctccagcagggtgccagcgagagctatttgacgcagatgtcggagtggaattttgcagtacgaaccctgactctgcctggccacgcggtgtggccagtgcttctgta

SEQ ID NO: 18617 - DNA, 331 bp, Homo sapiens
  chr4:8739497-8739828
  hypo
ccatggcagccccaggagatgcgtgccgtgggaataggaagcccagccctgtggccccgccagcatattccgcctcctccgtctcagccagagcccttcgggcccatccagactgcagttcaaacccaagcgtgtctccacctgaacctatgcccgccctcagcccagatgagttgggggctccaggctggcgagacagctgagcgtctgcctccctctgcacagtgcggtgatttcgccctgatggttaagtggagcgcttagctcctaattgctgtaatggtgctcggggagggccctcgtggtgggcggatcaggtgtgagcccagag

SEQ ID NO: 18618 - DNA, 31 bp, Homo sapiens
  chr4:8770251-8770282
  hypo
gccgtagagccatggccgtgtgcttcgtgac

SEQ ID NO: 18619 - DNA, 203 bp, Homo sapiens; identical to SEQ ID NO: 3174
  chr4:8863323-8863526
  hypo

SEQ ID NO: 18620 - DNA, 39 bp, Homo sapiens; identical to SEQ ID NO: 3175
  chr4:8863856-8863895
  hypo

SEQ ID NO: 18621 - DNA, 210 bp, Homo sapiens; identical to SEQ ID NO: 3185
  chr4:9684932-9685142
  hypo

SEQ ID NO: 18622 - DNA, 31 bp, Homo sapiens
  chr4:10077116-10077147
  hypo
aaagggtgcaatttaacgaaaagccaaactt

SEQ ID NO: 18623 - DNA, 63 bp, Homo sapiens
  chr4:10086435-10086498
  hypo
accaaggcccagcacgtcagcacctgagcacctaacgtgtgcagacacgtggcctgcaccccg

SEQ ID NO: 18624 - DNA, 349 bp, Homo sapiens
  chr4:10087760-10088109
  hypo
gaagccttactcacccgtgtacaatttctcaccatcccacttggaggcccactggagcatggtctcgacaagagccctcagctcccccaggcaacaacctcctcggccccatgctgtgcgtgccttcctttttatactcatcaccctgggctgtgagcccagcaaggaggcgctcccgattcccctctatcctcgaggccacgtctagtgaacctttatggttcagccttccccctctcagcagtgctgctgcccccactgccccggcacaaaggaaccgtgactctatgcatgagcgttgaggtgacctggtccgtaggagtcacacacacaacgttaacgaggcccc

SEQ ID NO: 18625 - DNA, 44 bp, Homo sapiens; identical to SEQ ID NO: 3186
  chr4:10089889-10089933
  hypo

SEQ ID NO: 18626 - DNA, 210 bp, Homo sapiens; identical to SEQ ID NO: 3187
  chr4:10090159-10090369
  hypo

SEQ ID NO: 18627 - DNA, 30 bp, Homo sapiens
  chr4:10145468-10145498
  hypo
gcatgcaggggacccgtgtgcagcgtcaga

SEQ ID NO: 18628 - DNA, 816 bp, Homo sapiens; identical to SEQ ID NO: 3188
  chr4:10458388-10459204
  hypo

SEQ ID NO: 18629 - DNA, 23 bp, Homo sapiens
  chr4:10500108-10500131
  hypo
ccgtctcaaaataaaataaaata

SEQ ID NO: 18630 - DNA, 30 bp, Homo sapiens
  chr4:13601191-13601221
  hypo
aaatggtcctatttcggggcactccttgcc

SEQ ID NO: 18631 - DNA, 30 bp, Homo sapiens; identical to SEQ ID NO: 3201
  chr4:13669550-13669580
  hypo

SEQ ID NO: 18632 - DNA, 139 bp, Homo sapiens; identical to SEQ ID NO: 3205
  chr4:16228990-16229129
  hypo

SEQ ID NO: 18633 - DNA, 124 bp, Homo sapiens
  chr4:17818028-17818152
  hypo
ccaggggttggggagcctgagagaatctgcttataggaatgatattttttgaagtttttaactctcatgagaaggccaagatggctctattgcgctgtagtgagaaaaccgacttgcgtttgaa

SEQ ID NO: 18634 - DNA, 30 bp, Homo sapiens; identical to SEQ ID NO: 3208
  chr4:18024246-18024276
  hypo

SEQ ID NO: 18635 - DNA, 54 bp, Homo sapiens
  chr4:19280789-19280843
  hypo
atgaagaagcccgcacgagttacacagccagagcaggagcgagagagggtggga

SEQ ID NO: 18636 - DNA, 26 bp, Homo sapiens
  chr4:22477019-22477045
  hypo
tcccaagtgggagttaagctacgaga

SEQ ID NO: 18637 - DNA, 26 bp, Homo sapiens
  chr4:22477344-22477370
  hypo
gtctcggaaaaaaaaataaataaata

SEQ ID NO: 18638 - DNA, 118 bp, Homo sapiens; identical to SEQ ID NO: 3218
  chr4:22517213-22517331
  hypo

SEQ ID NO: 18639 - DNA, 34 bp, Homo sapiens
  chr4:24422942-24422976
  hypo
tttttttttttaatggagtctcgctctgtcgccc

SEQ ID NO: 18640 - DNA, 34 bp, Homo sapiens
  chr4:24423215-24423249
  hypo
gagccaccgcgccgggccaacagtttacatttga

SEQ ID NO: 18641 - DNA, 31 bp, Homo sapiens; identical to SEQ ID NO: 3221
  chr4:24914463-24914494
  hypo

SEQ ID NO: 18642 - DNA, 30 bp, Homo sapiens
  chr4:25371673-25371703
  hypo
cagttgtcctctgacggtctagaatcactt

SEQ ID NO: 18643 - DNA, 31 bp, Homo sapiens
  chr4:25812477-25812508
  hypo
ctgcagttgggcaccccgagtagccccgcca

SEQ ID NO: 18644 - DNA, 30 bp, Homo sapiens
  chr4:25818925-25818955
  hypo
tatgcccaggactacgtggagttgcctccc

SEQ ID NO: 18645 - DNA, 101 bp, Homo sapiens; identical to SEQ ID NO: 3228
  chr4:25864189-25864290
  hypo

SEQ ID NO: 18646 - DNA, 210 bp, Homo sapiens
  chr4:26823269-26823479
  hypo
tccctgcacttgcctgcgaatgcaggtcctggcccagtggttcaatggtggggctgtcctgtaactgtgccagggagtcagaagccatggcggggctcaccgtggtcatgctggaagtccctgtccctgtctgctcatcacacacaggtcagcaggtacccgttctttatgtgtggcagacctctggtggccaggcggaccacttttctc

SEQ ID NO: 18647 - DNA, 30 bp, Homo sapiens
  chr4:26856609-26856639
  hypo
ttctcccttcttctcgcactgttccaaaac

SEQ ID NO: 18648 - DNA, 799 bp, Homo sapiens; identical to SEQ ID NO: 3234
  chr4:36245408-36246207
  hypo

SEQ ID NO: 18649 - DNA, 140 bp, Homo sapiens; identical to SEQ ID NO: 3235
  chr4:36246257-36246397
  hypo

SEQ ID NO: 18650 - DNA, 524 bp, Homo sapiens; identical to SEQ ID NO: 3236
  chr4:37245836-37246360
  hypo

SEQ ID NO: 18651 - DNA, 210 bp, Homo sapiens; identical to SEQ ID NO: 3237
  chr4:37246489-37246699
  hypo

SEQ ID NO: 18652 - DNA, 30 bp, Homo sapiens; identical to SEQ ID NO: 3241
  chr4:37526315-37526345
  hypo

SEQ ID NO: 18653 - DNA, 87 bp, Homo sapiens; identical to SEQ ID NO: 3242
  chr4:37688563-37688650
  hypo

SEQ ID NO: 18654 - DNA, 189 bp, Homo sapiens
  chr4:38278934-38279123
  hypo
ctaattacacttgcaacgatcctgttgcaacctcacattctgaggtaccaggggttagaagttcaacatacgaactttagaggtggtgggggggcggtacaattcaacctagagcaggagctctgtgtcactgcaaggcctatgtcatacaataacacgaaaatcttatgactgcgataaagagaaaaa

SEQ ID NO: 18655 - DNA, 137 bp, Homo sapiens
  chr4:38729966-38730103
  hypo
gttgaggaacaagggctggagcggtgtctccaaggtcacgaagctagtaagagtgggtatagatcgcagatgcagtggctggtcttaaccgttaagggagagctacgaagtcccacgtgtggacagtaagtactcag

SEQ ID NO: 18656 - DNA, 30 bp, Homo sapiens
  chr4:38825649-38825679
  hypo
gcggcggggacgagcggccaggaggcagct

SEQ ID NO: 18657 - DNA, 615 bp, Homo sapiens; identical to SEQ ID NO: 3248
  chr4:38868923-38869538
  hypo

SEQ ID NO: 18658 - DNA, 87 bp, Homo sapiens; identical to SEQ ID NO: 3250
  chr4:39183809-39183896
  hypo

SEQ ID NO: 18659 - DNA, 363 bp, Homo sapiens
  chr4:39447953-39448316
  hypo
cgagtctgtggcttcgtccccacagttcagcgatcctcatctgtacgtgtggaacgccactggcaacagactgttgcaccgagtggaaggggtgaggctgaaaacacgacccgctcaatgcacagattttgtaaacatcaaaaaacaacttgagatgttggcaagaatgaaagtcacccactaccggtttgctctggattgggcctcggtccttcccactggcaacctgtccgcggtgaaccgacaggccctgaggtactacaggtgcgtggtcagtgaggggctgaagcttggcatctccgcgatggtcaccctgtattatccgacccacgcccacctaggcctccccgagcctctgttgca

SEQ ID NO: 18660 - DNA, 30 bp, Homo sapiens
  chr4:39481995-39482025
  hypo
ggaggatgcgccgacgccccgagcgcccgg

SEQ ID NO: 18661 - DNA, 115 bp, Homo sapiens; identical to SEQ ID NO: 3252
  chr4:39529829-39529944
  hypo

SEQ ID NO: 18662 - DNA, 121 bp, Homo sapiens
  chr4:39623587-39623708
  hypo
caccgcactcggcctcattttctttcttaataatatggagaaatgatcacaacataatgttaaaagtatatttaaaagggcataaaaataaacatagcaaatgcacttttttgttttttgt

SEQ ID NO: 18663 - DNA, 98 bp, Homo sapiens
  chr4:39745201-39745299
  hypo
cgacagagcgagactccgtctcaaaaaaaaaaaaaaagaatataatgaaacctcttcagccagctttaataactatcagctcacggccatctgtgatc

SEQ ID NO: 18664 - DNA, 40 bp, Homo sapiens
  chr4:39761180-39761220
  hypo
ggcgtgagccactgtgcccggcccctggtttatttcttaa

SEQ ID NO: 18665 - DNA, 38 bp, Homo sapiens
  chr4:39913157-39913195
  hypo
aaatgcacatgttggccgggcgcggtggctcacacctg

SEQ ID NO: 18666 - DNA, 30 bp, Homo sapiens
  chr4:39937633-39937663
  hypo
aagacttctaattcgcgataaaaggaacct

SEQ ID NO: 18667 - DNA, 31 bp, Homo sapiens
  chr4:39953928-39953959
  hypo
ccacagagtgagactccgtctcaaaacaaaa

SEQ ID NO: 18668 - DNA, 39 bp, Homo sapiens
  chr4:39964134-39964173
  hypo
aagtaggcaggttgggcgcagtggatcatgcctgtaaac

SEQ ID NO: 18669 - DNA, 84 bp, Homo sapiens
  chr4:39972694-39972778
  hypo
tgttccattcttgaaaactgacgagaacaggaccaaacaccgctgaattcctttgtaattgcctttaagatgttttttgttttg

SEQ ID NO: 18670 - DNA, 105 bp, Homo sapiens
  chr4:40161796-40161901
  hypo
aaaaaactaaatgacacggactagcttaataagtgctaatggcaggaagtacattagtcaaaacatgtttttggcattgctacattagcccgccctatttaatat

SEQ ID NO: 18671 - DNA, 24 bp, Homo sapiens
  chr4:40394501-40394525
  hypo
agcgaaactccgtctcaaaaaaaa

SEQ ID NO: 18672 - DNA, 25 bp, Homo sapiens
  chr4:40492626-40492651
  hypo
attaaaaatacaaaaattagccggg

SEQ ID NO: 18673 - DNA, 31 bp, Homo sapiens
  chr4:40510717-40510748
  hypo
aatgggaggagaggcacgacgatactgagat

SEQ ID NO: 18674 - DNA, 101 bp, Homo sapiens
  chr4:40857393-40857494
  hypo
agctagaactaaacaacgtggcggctgttagaaaagtgtgtttctcacatctgcaaagtgagaatgataaaatgaggccaggcatggtggctcatgcctgt

SEQ ID NO: 18675 - DNA, 30 bp, Homo sapiens
  chr4:40888204-40888234
  hypo
ttatgttttggctgggcgcagtggcccacg

SEQ ID NO: 18676 - DNA, 30 bp, Homo sapiens
  chr4:40921156-40921186
  hypo
tggcaagtgctttacgtaaatgtgctccag

SEQ ID NO: 18677 - DNA, 31 bp, Homo sapiens
  chr4:40983417-40983448
  hypo
caagccagaattaattcgaatccagaatgat

SEQ ID NO: 18678 - DNA, 189 bp, Homo sapiens
  chr4:41012739-41012928
  hypo
tacttaaaaagactgacgtagaaaaatggactgatctacaaaatacgttcttacgtgaaaaaaagcaaagcattcataaaacaatctaattggagtaactttttcctggttttaactatttattgtggcaaattttaaacatacaaaattagagaatagaataatgaacccgcacgtacccataatgca

SEQ ID NO: 18679 - DNA, 31 bp, Homo sapiens
  chr4:41111870-41111901
  hypo
aatttgtcaaaggtcacggagctaaaaaatt

SEQ ID NO: 18680 - DNA, 31 bp, Homo sapiens; identical to SEQ ID NO: 3253
  chr4:41168397-41168428
  hypo

SEQ ID NO: 18681 - DNA, 139 bp, Homo sapiens; identical to SEQ ID NO: 3254
  chr4:41216264-41216403
  hypo

SEQ ID NO: 18682 - DNA, 316 bp, Homo sapiens; identical to SEQ ID NO: 3255
  chr4:41218382-41218698
  hypo

SEQ ID NO: 18683 - DNA, 788 bp, Homo sapiens; identical to SEQ ID NO: 3257
  chr4:41259085-41259873
  hypo

SEQ ID NO: 18684 - DNA, 171 bp, Homo sapiens; identical to SEQ ID NO: 3258
  chr4:41362780-41362951
  hypo

SEQ ID NO: 18685 - DNA, 30 bp, Homo sapiens; identical to SEQ ID NO: 3263
  chr4:41883864-41883894
  hypo

SEQ ID NO: 18686 - DNA, 15 bp, Homo sapiens
  chr4:41994124-41994139
  hypo
gctgaggtgggtgga

SEQ ID NO: 18687 - DNA, 450 bp, Homo sapiens; identical to SEQ ID NO: 3265
  chr4:42152961-42153411
  hypo

SEQ ID NO: 18688 - DNA, 41 bp, Homo sapiens; identical to SEQ ID NO: 3266
  chr4:42153591-42153632
  hypo

SEQ ID NO: 18689 - DNA, 1082 bp, Homo sapiens; identical to SEQ ID NO: 3267
  chr4:42153881-42154963
  hypo

SEQ ID NO: 18690 - DNA, 2234 bp, Homo sapiens; identical to SEQ ID NO: 3268
  chr4:42398823-42401057
  hypo

SEQ ID NO: 18691 - DNA, 30 bp, Homo sapiens
  chr4:42429057-42429087
  hypo
agtagttgcgttaacgctgggaacaacaac

SEQ ID NO: 18692 - DNA, 36 bp, Homo sapiens; identical to SEQ ID NO: 3270
  chr4:42659637-42659673
  hypo

SEQ ID NO: 18693 - DNA, 30 bp, Homo sapiens; identical to SEQ ID NO: 3271
  chr4:43770052-43770082
  hypo

SEQ ID NO: 18694 - DNA, 31 bp, Homo sapiens
  chr4:44520583-44520614
  hypo
agtcagccatcgcacccggcccagggagttt

SEQ ID NO: 18695 - DNA, 30 bp, Homo sapiens; identical to SEQ ID NO: 3276
  chr4:44833239-44833269
  hypo

SEQ ID NO: 18696 - DNA, 24 bp, Homo sapiens
  chr4:46067748-46067772
  hypo
tttttttttgagacagagtctcgc

SEQ ID NO: 18697 - DNA, 30 bp, Homo sapiens; identical to SEQ ID NO: 3282
  chr4:47569090-47569120
  hypo

SEQ ID NO: 18698 - DNA, 3 bp, Homo sapiens
  chr4:48016939-48016942
  hypo
agc

SEQ ID NO: 18699 - DNA, 22 bp, Homo sapiens
  chr4:48017181-48017203
  hypo
gagactccgtctcaaaaaaaac

SEQ ID NO: 18700 - DNA, 30 bp, Homo sapiens; identical to SEQ ID NO: 3284
  chr4:48226149-48226179
  hypo

SEQ ID NO: 18701 - DNA, 152 bp, Homo sapiens
  chr4:48572778-48572930
  hypo
agcgaaaagagattacgttctctaggatcattccagagttttaacaatgtgaatccaatactgacctgtgactaatgacaccagcatctgccagcagttcaaatattcgtaccagttgtactcgtaaaatgtctcgacgcctgcgccgtttc

SEQ ID NO: 18702 - DNA, 149 bp, Homo sapiens
  chr4:48678684-48678833
  hypo
ggcgtgagccactgcgcctggccaagtttcaatttctttaaagtgacagaagaaactgaaggtatccaagggcaaaatccttccaatcttgtatactttcctggcctatgtgaaattcaaatgcacatttttctcgggaattaatcttt

SEQ ID NO: 18703 - DNA, 137 bp, Homo sapiens
  chr4:48679319-48679456
  hypo
aagctagacttattctcggttgattctctcacaaacgtacaactgtcagtacagattacaatcttacctaaaatatcttaggaaaaaataacgattttttgtgtgtgtgtttttgtttttttttttgagacagagtc

SEQ ID NO: 18704 - DNA, 197 bp, Homo sapiens
  chr4:48679695-48679892
  hypo
gggattacaagcgtgagccaccgcgtcagcccgaaaaaataactttttaaatattgaattagtaattaaagaagttggaaacaactgattcaagtataaagctttgagattacatgccatttttttctctaaaagaatagctctttctttgcatctttttacatgaagtctctccatatcatcgagttctcctttca

SEQ ID NO: 18705 - DNA, 20 bp, Homo sapiens
  chr4:52759861-52759881
  hypo
acaggcgtaagccaccgtgc

SEQ ID NO: 18706 - DNA, 47 bp, Homo sapiens
  chr4:53230796-53230843
  hypo
ttatatattttgacttcatggcgctcgtattagagaaactaatctca

SEQ ID NO: 18707 - DNA, 30 bp, Homo sapiens
  chr4:53522806-53522836
  hypo
ccaggccctgtgcccgagtaatacaacaat

SEQ ID NO: 18708 - DNA, 44 bp, Homo sapiens
  chr4:53587808-53587852
  hypo
agcctgggcgacagagcgacaccgtcttaaaaaaaaaaaaaaga

SEQ ID NO: 18709 - DNA, 30 bp, Homo sapiens
  chr4:53744058-53744088
  hypo
cagcactccacatccggcccttgcctccac

SEQ ID NO: 18710 - DNA, 31 bp, Homo sapiens
  chr4:54357937-54357968
  hypo
ttaagtgctgaggatacgatacttttttttg

SEQ ID NO: 18711 - DNA, 31 bp, Homo sapiens
  chr4:54459311-54459342
  hypo
tcaggaaaaggtttcacgccactagtttgat

SEQ ID NO: 18712 - DNA, 71 bp, Homo sapiens
  chr4:54858182-54858253
  hypo
aaacaagttgggactcgcaggtaggagactatgacagagagtagacgaagttgatacgattacagaaaagc

SEQ ID NO: 18713 - DNA, 67 bp, Homo sapiens; identical to SEQ ID NO: 3296
  chr4:55524174-55524241
  hypo

SEQ ID NO: 18714 - DNA, 230 bp, Homo sapiens; identical to SEQ ID NO: 3297
  chr4:55561713-55561943
  hypo

SEQ ID NO: 18715 - DNA, 92 bp, Homo sapiens; identical to SEQ ID NO: 3298
  chr4:55564468-55564560
  hypo

SEQ ID NO: 18716 - DNA, 30 bp, Homo sapiens; identical to SEQ ID NO: 3299
  chr4:55565886-55565916
  hypo

SEQ ID NO: 18717 - DNA, 76 bp, Homo sapiens; identical to SEQ ID NO: 3300
  chr4:55569949-55570025
  hypo

SEQ ID NO: 18718 - DNA, 30 bp, Homo sapiens; identical to SEQ ID NO: 3301
  chr4:55573295-55573325
  hypo

SEQ ID NO: 18719 - DNA, 30 bp, Homo sapiens; identical to SEQ ID NO: 3302
  chr4:55589780-55589810
  hypo

SEQ ID NO: 18720 - DNA, 46 bp, Homo sapiens; identical to SEQ ID NO: 3303
  chr4:55592093-55592139
  hypo

SEQ ID NO: 18721 - DNA, 303 bp, Homo sapiens; identical to SEQ ID NO: 3304
  chr4:55593415-55593718
  hypo

SEQ ID NO: 18722 - DNA, 30 bp, Homo sapiens; identical to SEQ ID NO: 3305
  chr4:55594000-55594030
  hypo

SEQ ID NO: 18723 - DNA, 63 bp, Homo sapiens; identical to SEQ ID NO: 3306
  chr4:55595496-55595559
  hypo

SEQ ID NO: 18724 - DNA, 35 bp, Homo sapiens; identical to SEQ ID NO: 3307
  chr4:55598030-55598065
  hypo

SEQ ID NO: 18725 - DNA, 43 bp, Homo sapiens; identical to SEQ ID NO: 3308
  chr4:55599305-55599348
  hypo

SEQ ID NO: 18726 - DNA, 97 bp, Homo sapiens; identical to SEQ ID NO: 3309
  chr4:55602682-55602779
  hypo

SEQ ID NO: 18727 - DNA, 30 bp, Homo sapiens; identical to SEQ ID NO: 3310
  chr4:55604624-55604654
  hypo

SEQ ID NO: 18728 - DNA, 54 bp, Homo sapiens
  chr4:56222929-56222983
  hypo
gcaatggcgcgatcttggctcactgcaacctccgcctcctgggtagcctagagg

SEQ ID NO: 18729 - DNA, 35 bp, Homo sapiens; identical to SEQ ID NO: 3314
  chr4:56412389-56412424
  hypo

SEQ ID NO: 18730 - DNA, 30 bp, Homo sapiens
  chr4:56458607-56458637
  hypo
accattgaatcaaccgattgtttcagagac

SEQ ID NO: 18731 - DNA, 27 bp, Homo sapiens
  chr4:56785799-56785826
  hypo
ctttgggaggccaaggcgggcggctca

SEQ ID NO: 18732 - DNA, 87 bp, Homo sapiens
  chr4:56936375-56936462
  hypo
cctctcctctcctcccggttccacgccttctccacgttgtgctttgcctactctccttccacttcctctctccctatctgagtcctt

SEQ ID NO: 18733 - DNA, 21 bp, Homo sapiens
  chr4:56963539-56963560
  hypo
gagaatgtgacctgtcctcta

SEQ ID NO: 18734 - DNA, 20 bp, Homo sapiens
  chr4:56963619-56963639
  hypo
ggcctggttagtacttggat

SEQ ID NO: 18735 - DNA, 30 bp, Homo sapiens
  chr4:57051396-57051426
  hypo
acaggcgtgagccagcgcacccggccttca

SEQ ID NO: 18736 - DNA, 90 bp, Homo sapiens
  chr4:57082784-57082874
  hypo
aatgtagtatttggagagaagcggcatttaaaatcggcctttgcaaaaatatgaaaattattctgaagtagaaaatgtcaggccgggcgc

SEQ ID NO: 18737 - DNA, 30 bp, Homo sapiens
  chr4:57178036-57178066
  hypo
tctgtaggtacaggcgtggtgtcctacctt

SEQ ID NO: 18738 - DNA, 30 bp, Homo sapiens
  chr4:57180320-57180350
  hypo
aggaagagagaagacgccaagaagactact

SEQ ID NO: 18739 - DNA, 1249 bp, Homo sapiens
  chr4:57180918-57182167
  hypo
gcagctcagtgagcttctgaacgactttgaggagaggctcgaagaccaggaacgcctgaaacccgaaggacaaagagaacactccgaggagccaggtatttgcgaggagcagaacccagaggccgagcggcgaagagagcagcagggaaggagcggggatttccagggggccgatcgtcctgggcccgaggaaaagagagaagaaggggacacggagcctctcctgaaacaagaggggccggtggaagccgcgcagcctccggtggagaggaaagaagccgccgcccttgaacaaggccgcaaggtggaggagctgcggtggcaggaggtggacgagagacagaccatgccccggccctacacgttccaggtgtcctccggagggaagcagattctctttcccaaagtcaacctgagccccgtgacgcccgcaaaggacacggggctcaccgctgctccccaggaaccaaaggcccccaaagccagcccagtccagcacgccctaccgtcgtccctgagcgttccccacaccgccattctggtcacgggcgcgcagctctgtggcccggcagtcaacctgagccagatcaaggacaccgcgtgcaagtccctcctgggcttggaggagaagaagcacgcggaagccccagctggggagaaccctccccgaggccccggcgacgcgagggcgggcagcgggaaggctaagccccgccaggagtctcccagcagcgcgtccgcactcgcagaatgggcttccattcggtccagaatcctgaagaacgcagagagtgacccgcgcagcagcgagagggaccagttgaggcccggtgatgagtccactcccaggggccggtgtgattcccgcgggaaccaacggaagactccgccagtcaatgcaaagttctctattatgcctgcctggcagaaattttccgatggtggcacggagacctccaaacagagcacggaagctgaaagcatacgaaaaagacccatgctgggacccagcgaagagacagccccccagcctcctcctgctggtgttcgcgagctcgggaagggtccggagaagtcggagatgcaccgggagcccgcagacaccaccgagggatgcaaatttgccaaagacctcccgtctttccttgtcccaagccttccttaccctccgcagaaagtggtggcccacacagagttcacgacctcgtcggacagcgagactgcaaacgggatagcaaagccagaccct

SEQ ID NO: 18740 - DNA, 19 bp, Homo sapiens
  chr4:57274916-57274935
  hypo
ttcaaaaaaaaaaaaaaaa

SEQ ID NO: 18741 - DNA, 403 bp, Homo sapiens; identical to SEQ ID NO: 3318
  chr4:57396763-57397166
  hypo

SEQ ID NO: 18742 - DNA, 31 bp, Homo sapiens
  chr4:57400757-57400788
  hypo
attgatttatcgtccccgcttgaatatcaat

SEQ ID NO: 18743 - DNA, 158 bp, Homo sapiens; identical to SEQ ID NO: 3320
  chr4:57521505-57521663
  hypo

SEQ ID NO: 18744 - DNA, 682 bp, Homo sapiens; identical to SEQ ID NO: 3321
  chr4:57521700-57522382
  hypo

SEQ ID NO: 18745 - DNA, 304 bp, Homo sapiens; identical to SEQ ID NO: 3322
  chr4:57522419-57522723
  hypo

SEQ ID NO: 18746 - DNA, 434 bp, Homo sapiens; identical to SEQ ID NO: 3323
  chr4:57687589-57688023
  hypo

SEQ ID NO: 18747 - DNA, 44 bp, Homo sapiens
  chr4:57921950-57921994
  hypo
cttatctaaaatccctcgaacttgggagccgccctttgctcatt

SEQ ID NO: 18748 - DNA, 30 bp, Homo sapiens; identical to SEQ ID NO: 3326
  chr4:57944966-57944996
  hypo

SEQ ID NO: 18749 - DNA, 1016 bp, Homo sapiens; identical to SEQ ID NO: 3327
  chr4:57975913-57976929
  hypo

SEQ ID NO: 18750 - DNA, 233 bp, Homo sapiens; identical to SEQ ID NO: 3328
  chr4:57977131-57977364
  hypo

SEQ ID NO: 18751 - DNA, 16 bp, Homo sapiens
  chr4:66535574-66535590
  hypo
cgccttctggcacgcg

SEQ ID NO: 18752 - DNA, 617 bp, Homo sapiens; identical to SEQ ID NO: 3336
  chr4:66536013-66536630
  hypo

SEQ ID NO: 18753 - DNA, 30 bp, Homo sapiens
  chr4:68552347-68552377
  hypo
aaaagaattataaacgggcataaataaaat

SEQ ID NO: 18754 - DNA, 218 bp, Homo sapiens
  chr4:70647969-70648187
  hypo
gctgatgccctcaagtgtgaggagtgccacctcaactggtgccccgtgtgaggaaccatgtgaggaaccgtgtgaggaacgttaggggtctgcagaaacagactccccgcagatagagcccctcgtggggcaagctgcgaaggaagtgtgaagagcaatacctcaaccggtgccccttgtgaggaccgccgtgtgaggaaagccgtgtgaagagccgt

SEQ ID NO: 18755 - DNA, 17 bp, Homo sapiens
  chr4:71566848-71566865
  hypo
tgtttttttgagacaga

SEQ ID NO: 18756 - DNA, 76 bp, Homo sapiens
  chr4:71566924-71567000
  hypo
tgcctccccaggttcaagcgattctgctgcctcagtcttacaggcgtgagccaccgcacccagcccaccaaaggat

SEQ ID NO: 18757 - DNA, 17 bp, Homo sapiens
  chr4:71642213-71642230
  hypo
gggagcagtggctcacg

SEQ ID NO: 18758 - DNA, 17 bp, Homo sapiens
  chr4:71729528-71729545
  hypo
tacaaaaagtttagccg

SEQ ID NO: 18759 - DNA, 16 bp, Homo sapiens
  chr4:71729664-71729680
  hypo
gcgacagagtgagact

SEQ ID NO: 18760 - DNA, 730 bp, Homo sapiens; identical to SEQ ID NO: 3339
  chr4:71767777-71768507
  hypo

SEQ ID NO: 18761 - DNA, 150 bp, Homo sapiens
  chr4:71857968-71858118
  hypo
ctgagttgtctgggtttttggcgtgttgaacaaagaattgaacaaaacgtagaaacaaagcaacaaaagaagcaacgaaagacaaaacaacaaaagaacgaagtaacaaaagcacaaatttattgaagcgaaccaagtgcttcaagagtc

SEQ ID NO: 18762 - DNA, 53 bp, Homo sapiens; identical to SEQ ID NO: 3344
  chr4:74702696-74702749
  hypo

SEQ ID NO: 18763 - DNA, 30 bp, Homo sapiens; identical to SEQ ID NO: 3345
  chr4:74730215-74730245
  hypo

SEQ ID NO: 18764 - DNA, 210 bp, Homo sapiens
  chr4:75137754-75137964
  hypo
acaaaaattctggcatcgctttgatatcttcaatttgggcttgatttggatacaaaggtattggtaagtctacgtcgctatcgaaactagctatgaatagggcatcctaagggattttaagaaagagataaatcaggacatcatttaatctggcaactcccctttcagagtatcaaattaacaggtgtgggatcacggaggaggaaagac

SEQ ID NO: 18765 - DNA, 31 bp, Homo sapiens
  chr4:75241343-75241374
  hypo
cctgaccagcgattcttaaggttaacaggat

SEQ ID NO: 18766 - DNA, 35 bp, Homo sapiens
  chr4:75949440-75949475
  hypo
ctgggcggcagagcgagactctgtcaaaaaaaaaa

SEQ ID NO: 18767 - DNA, 145 bp, Homo sapiens
  chr4:76554709-76554854
  hypo
aaaggtaatacaaacgaaaaagaaacctggccaatgggcaaggtgttatttctggatggttctaaaagcaacaattttgataaaaatatttggagaatgctaattttttattttgtttaagacagattaaagggccgggagcggt

SEQ ID NO: 18768 - DNA, 31 bp, Homo sapiens
  chr4:76912744-76912775
  hypo
gaggaaaaaagagcaacgagggtcatataag

SEQ ID NO: 18769 - DNA, 38 bp, Homo sapiens
  chr4:76917506-76917544
  hypo
ttacaggcgtgagccaccgcacccggccttttattgta

SEQ ID NO: 18770 - DNA, 39 bp, Homo sapiens
  chr4:77156170-77156209
  hypo
taaacataaaaataaattggccggtcgcggtggctcaca

SEQ ID NO: 18771 - DNA, 786 bp, Homo sapiens; identical to SEQ ID NO: 3356
  chr4:77227425-77228211
  hypo

SEQ ID NO: 18772 - DNA, 37 bp, Homo sapiens
  chr4:77448699-77448736
  hypo
cactccagcctgtaacgtttcaggagtgctttttgtt

SEQ ID NO: 18773 - DNA, 31 bp, Homo sapiens
  chr4:78100428-78100459
  hypo
tccactatagctttgccgaagcacccaagac

SEQ ID NO: 18774 - DNA, 24 bp, Homo sapiens
  chr4:78727284-78727308
  hypo
aaaattaacttcaggccgggcaca

SEQ ID NO: 18775 - DNA, 102 bp, Homo sapiens
  chr4:79689604-79689706
  hypo
cttttctctgctcacacgcagtgtcgtggcagcaggcacagtcttgagatgcagaaggacagcggcgagcttgtggacctgtacatgcggcagaaagtctct

SEQ ID NO: 18776 - DNA, 93 bp, Homo sapiens
  chr4:79702946-79703039
  hypo
tttcagtgatacagatgctgccggttcaggaaccacgtcttgagtaccgagtaccactgatttcgagcgggcgaagaagactaagaagaaggt

SEQ ID NO: 18777 - DNA, 151 bp, Homo sapiens
  chr4:79828973-79829124
  hypo
ggaatgttacttggaggtgtccgtgagcaggcgtgaggtgtgaatgttgtggctgtgggtgggtatgcagctcgaggagtaatacgttaaacgtttcacagtcagggatgatgggaaatcttctggaaccgtacatattttattttcattt

SEQ ID NO: 18778 - DNA, 124 bp, Homo sapiens
  chr4:79832670-79832794
  hypo
caaaagtaatgggaagcggcatcatggcacgccaactagcacaaagaagactttgaagcctacctatcgcactccagagagggctcgcaggcacaaaaaagtgggccgccgagactctcaaagt

SEQ ID NO: 18779 - DNA, 46 bp, Homo sapiens; identical to SEQ ID NO: 3366
  chr4:81123857-81123903
  hypo

SEQ ID NO: 18780 - DNA, 610 bp, Homo sapiens; identical to SEQ ID NO: 3367
  chr4:81124121-81124731
  hypo

SEQ ID NO: 18781 - DNA, 408 bp, Homo sapiens
  chr4:81307564-81307972
  hypo
cttcatctcctccagccccagcgggtcaggcaagggggtcaccaccttgcgcccaccactgccgccacggcgcggggctgccctcttctcgcgggcggtggtggggggggggggtgccgccgggtttgcaggtccttttccttctgggggccgagacgacagcggtgatctttgaggtatttgtggcggaaaaagcccttggcacagccagcatagcggaacttgtagtagcccgtgtgggcgcgcaggtgctcggcgaggtgggcacggcggctgaaggacctgctgcacagggcgcatttgtggagcttcatgccggagtgggagaggacatgggccttcagcttgtccggccggttgaacaacttaccgcagcttgtgtgcgtcgataaagggcatttatatttc

SEQ ID NO: 18782 - DNA, 45 bp, Homo sapiens
  chr4:81605693-81605738
  hypo
ttacaggcgtgagccactgcgcccggcctgagatgactattttaa

SEQ ID NO: 18783 - DNA, 285 bp, Homo sapiens; identical to SEQ ID NO: 3377
  chr4:82135919-82136204
  hypo

SEQ ID NO: 18784 - DNA, 296 bp, Homo sapiens; identical to SEQ ID NO: 3378
  chr4:82136243-82136539
  hypo

SEQ ID NO: 18785 - DNA, 30 bp, Homo sapiens
  chr4:82350868-82350898
  hypo
gtagaagggcacgccggcagggcacaccga

SEQ ID NO: 18786 - DNA, 272 bp, Homo sapiens
  chr4:83323436-83323708
  hypo
tgcaaatgatctagacgcttgctggagttgacttgtttcatggtgagggctccttgaaacactggcaccaccaggtacttcaggtcggtggaagcaatctcttccaaatcttcatttcggctgaacaactcgagctgcgataacatttcggcagccttctcaaggagatccatccaggcccttgaacaccttctcctggactatccgggaatcggcaggttcagtcgctacttctacttcgtccagaatctgtttgccggtttccagcagct

SEQ ID NO: 18787 - DNA, 31 bp, Homo sapiens
  chr4:83496633-83496664
  hypo
ttttgctaaacttattcgttagttctggtat

SEQ ID NO: 18788 - DNA, 33 bp, Homo sapiens
  chr4:83700297-83700330
  hypo
gtgagtcactgcgatcagctgccaactagctaa

SEQ ID NO: 18789 - DNA, 46 bp, Homo sapiens
  chr4:83808871-83808917
  hypo
tacaaacatcactacttaaaacgtctaccaccacgaaacttcaaaa

SEQ ID NO: 18790 - DNA, 279 bp, Homo sapiens; identical to SEQ ID NO: 3389
  chr4:85503985-85504264
  hypo

SEQ ID NO: 18791 - DNA, 150 bp, Homo sapiens; identical to SEQ ID NO: 3390
  chr4:85886792-85886942
  hypo

SEQ ID NO: 18792 - DNA, 420 bp, Homo sapiens; identical to SEQ ID NO: 3391
  chr4:85887160-85887580
  hypo

SEQ ID NO: 18793 - DNA, 325 bp, Homo sapiens; identical to SEQ ID NO: 3392
  chr4:85888137-85888462
  hypo

SEQ ID NO: 18794 - DNA, 162 bp, Homo sapiens
  chr4:86167316-86167478
  hypo
cggtgctctacagaccgtgcctccctagggcgtgggtgtgcaggaacgccggacagggcagcggccggcactaccgtgccacgatttgcgcagagctgaagtagtccctgaccatcgaagaggtggcccccgccccgtcgggcctcacgaggacctgtggca

SEQ ID NO: 18795 - DNA, 161 bp, Homo sapiens
  chr4:86801947-86802108
  hypo
ctgcgattacaggaatgcataactttttaatgtggccttaacctttgcagtttgaggtacaatgcaaaactagtgcagacttctttttccttcttcacaaattcacaggtggaagactcattcttactgtagatgttagcaacctccgcacaccttttatt

SEQ ID NO: 18796 - DNA, 30 bp, Homo sapiens
  chr4:87797494-87797524
  hypo
agcgcagcgacggccggggccgggagcggg

SEQ ID NO: 18797 - DNA, 40 bp, Homo sapiens
  chr4:87922649-87922689
  hypo
gagccaccgcgcccggctcgtgcttttctttttcaagtgg

SEQ ID NO: 18798 - DNA, 30 bp, Homo sapiens
  chr4:87968907-87968937
  hypo
agatctgagatggacgactgattatagata

SEQ ID NO: 18799 - DNA, 144 bp, Homo sapiens
  chr4:87993063-87993207
  hypo
gaaaagattggagtttcgggtcaggagctctggattaaaggccaacgggaatcttttaaacttcttggttgtgtgtgtgtgtcggtgtgtgaagtcagaggcagacgatgagagaaataaattgagatggagagaaaataatat

SEQ ID NO: 18800 - DNA, 84 bp, Homo sapiens
  chr4:87993506-87993590
  hypo
tccgtctcaaaaaaaaaaaaaaaaaaaatttaaattcagaaggcattaagaggacatttattttttaaacgattttctccttgg

SEQ ID NO: 18801 - DNA, 30 bp, Homo sapiens
  chr4:88020841-88020871
  hypo
tgagccactgtgcccggcccccacatgctg

SEQ ID NO: 18802 - DNA, 79 bp, Homo sapiens
  chr4:88258990-88259069
  hypo
cagtttaaattcctcacgtgtaaatggaaaaattaacatctatccctcagtgttcttttgtggaatcaatgtgttacta

SEQ ID NO: 18803 - DNA, 140 bp, Homo sapiens
  chr4:88296897-88297037
  hypo
aataaaagtaaaactaatgtggcaaaatcagggactactacagagaattgtggaaaactgattacactattaagctggccacattttctatttatttctgtttattttctgttctgttgttcaatcgctctccattaggt

SEQ ID NO: 18804 - DNA, 183 bp, Homo sapiens
  chr4:88941047-88941230
  hypo
agtgactgtggacttgcgtttaacacaggacgggagaggcaaagagttcaattccaatttagaatttggtcaagttctcttctgcactctggtaaacattaattaaaaatcagcattatctgaccagccagttcatcgtcagtggtggtgattttcactatgagatacgcgtggcaacttgcc

SEQ ID NO: 18805 - DNA, 146 bp, Homo sapiens
  chr4:88957313-88957459
  hypo
gtatgtgaatgtgtgccggttcccttggggcgttcatttggatctttctgtgttccagtgacctacggcatgatgagctccaatgtgtactactacacccggatgatgtcacagctcttcctagacacccccgtgtccaaaacgga

SEQ ID NO: 18806 - DNA, 28 bp, Homo sapiens
  chr4:89292173-89292201
  hypo
tagagacggggttttgccatattggcca

SEQ ID NO: 18807 - DNA, 781 bp, Homo sapiens; identical to SEQ ID NO: 3402
  chr4:89377923-89378704
  hypo

SEQ ID NO: 18808 - DNA, 30 bp, Homo sapiens
  chr4:89660222-89660252
  hypo
cagccggtacctgtcgtatagtggcttcat

SEQ ID NO: 18809 - DNA, 181 bp, Homo sapiens
  chr4:91052007-91052188
  hypo
catgatcaacccgcctcggcctcctgtgctgggattacaggcgtgacccactgcgccctgcccacattctattcttgaatttaattgttaatatttacacatttaagaagacaaatctttagctttatgttgtctttttgtttgttagtttgttttttgagatggagtttcgttcttgtcg

SEQ ID NO: 18810 - DNA, 30 bp, Homo sapiens
  chr4:91640181-91640211
  hypo
ggctcctcaacttcctggccacggaccact

SEQ ID NO: 18811 - DNA, 149 bp, Homo sapiens
  chr4:91640270-91640419
  hypo
taagcttcagctgtgcttacagctgctccgcatcattgccattaccaactgagctccacctgcctttcagatcagctgcggcattagagacccttaggagcgctaaccctagtgtgaactgcgcatgcgaggtttgaatgctccttatg

SEQ ID NO: 18812 - DNA, 93 bp, Homo sapiens
  chr4:95127584-95127677
  hypo
taaaaaattaaaacaattgaacgtatgagaaacggtagaacgatggctaccagaggctgggaagggtagtgtggggcgggggaggaccccggt

SEQ ID NO: 18813 - DNA, 31 bp, Homo sapiens
  chr4:95257392-95257423
  hypo
cataaaaggttaaacacgaatcataaaaatc

SEQ ID NO: 18814 - DNA, 30 bp, Homo sapiens; identical to SEQ ID NO: 3418
  chr4:95293542-95293572
  hypo

SEQ ID NO: 18815 - DNA, 23 bp, Homo sapiens
  chr4:95461556-95461579
  hypo
ccgcacccagcctattattcttt

SEQ ID NO: 18816 - DNA, 32 bp, Homo sapiens
  chr4:95578062-95578094
  hypo
gtgtgagccactgcgcccggccccattatgtt

SEQ ID NO: 18817 - DNA, 30 bp, Homo sapiens
  chr4:99430509-99430539
  hypo
ctaataaatccaaacgggacttggacagat

SEQ ID NO: 18818 - DNA, 31 bp, Homo sapiens
  chr4:99835221-99835252
  hypo
aaaaaaaggccaggcacggtggctcacacct

SEQ ID NO: 18819 - DNA, 31 bp, Homo sapiens
  chr4:99836004-99836035
  hypo
aaagctgtacctgcaccggggcaaggagtaa

SEQ ID NO: 18820 - DNA, 30 bp, Homo sapiens
  chr4:99955879-99955909
  hypo
tatcacagattgtgcgtcaacagatgcaga

SEQ ID NO: 18821 - DNA, 267 bp, Homo sapiens
  chr4:100573889-100574156
  hypo
aagtaggggtaagccaggctccggaaggcccgggaggtcaggttacgcacctctttgtccgcatcgtccagttcgctcacggcactggaggctccgctggagtagtccaccagctccttcgcccggatggccccgcacctggtttgcaggcgagcaggtacagcaatgaatttctttgcatggtcctgagccactgctgcagccgggttttgcttcagcgaacttgaattgtgttcagcagctgtagagacgcggaggctcatgtcg

SEQ ID NO: 18822 - DNA, 30 bp, Homo sapiens
  chr4:100574508-100574538
  hypo
ggtagcagctgttgtcgtcgtcctcttcgg

SEQ ID NO: 18823 - DNA, 231 bp, Homo sapiens; identical to SEQ ID NO: 3423
  chr4:100867971-100868202
  hypo

SEQ ID NO: 18824 - DNA, 28 bp, Homo sapiens
  chr4:103350982-103351010
  hypo
gggagcctgaggcaggagaatcgcttga

SEQ ID NO: 18825 - DNA, 200 bp, Homo sapiens
  chr4:103421131-103421331
  hypo
gtgtgagccaccgcacccggctcacagaatttcttaaaaagtcattgtgttcagtctttatggatcctctaaattccagctgctcagcctcccggagctaaatgagatcacttaaaggtcgactgttggggcctccaaggtcgcctcggagactcacctcataggcaatcaaatggatcgctgggtttttgtgtgtgtgg

SEQ ID NO: 18826 - DNA, 43 bp, Homo sapiens
  chr4:103494438-103494481
  hypo
tgcgcaacaagaaagaaactccgtctcaaaaaaaaagaattat

SEQ ID NO: 18827 - DNA, 82 bp, Homo sapiens
  chr4:103806370-103806452
  hypo
agtttcagaatggcttcggttattgcctttccttggtgtactcgcacttcttggctaccttgcagttcgtccattcctcccg

SEQ ID NO: 18828 - DNA, 24 bp, Homo sapiens
  chr4:103929957-103929981
  hypo
tttttttttttttttttgagacgg

SEQ ID NO: 18829 - DNA, 30 bp, Homo sapiens
  chr4:103941523-103941553
  hypo
tccagtaatagaatccgcgcttcctataaa

SEQ ID NO: 18830 - DNA, 30 bp, Homo sapiens
  chr4:103941792-103941822
  hypo
tattggttttgttgacgttgttgagacagg

SEQ ID NO: 18831 - DNA, 30 bp, Homo sapiens; identical to SEQ ID NO: 3433
  chr4:104251138-104251168
  hypo

SEQ ID NO: 18832 - DNA, 29 bp, Homo sapiens
  chr4:104854538-104854567
  hypo
catttaaaaaaagatcagccccgggcgcg

SEQ ID NO: 18833 - DNA, 350 bp, Homo sapiens; identical to SEQ ID NO: 3434
  chr4:106067030-106067380
  hypo

SEQ ID NO: 18834 - DNA, 296 bp, Homo sapiens; identical to SEQ ID NO: 3435
  chr4:106067840-106068136
  hypo

SEQ ID NO: 18835 - DNA, 278 bp, Homo sapiens; identical to SEQ ID NO: 3436
  chr4:106068587-106068865
  hypo

SEQ ID NO: 18836 - DNA, 147 bp, Homo sapiens; identical to SEQ ID NO: 3437
  chr4:106111515-106111662
  hypo

SEQ ID NO: 18837 - DNA, 4462 bp, Homo sapiens; identical to SEQ ID NO: 3438
  chr4:106155052-106159514
  hypo

SEQ ID NO: 18838 - DNA, 241 bp, Homo sapiens; identical to SEQ ID NO: 3439
  chr4:106159633-106159874
  hypo

SEQ ID NO: 18839 - DNA, 181 bp, Homo sapiens; identical to SEQ ID NO: 3440
  chr4:106160113-106160294
  hypo

SEQ ID NO: 18840 - DNA, 121 bp, Homo sapiens; identical to SEQ ID NO: 3441
  chr4:106161133-106161254
  hypo

SEQ ID NO: 18841 - DNA, 2722 bp, Homo sapiens; identical to SEQ ID NO: 3442
  chr4:106161373-106164095
  hypo

SEQ ID NO: 18842 - DNA, 231 bp, Homo sapiens; identical to SEQ ID NO: 3443
  chr4:106164711-106164942
  hypo

SEQ ID NO: 18843 - DNA, 178 bp, Homo sapiens; identical to SEQ ID NO: 3444
  chr4:106180761-106180939
  hypo

SEQ ID NO: 18844 - DNA, 108 bp, Homo sapiens; identical to SEQ ID NO: 3445
  chr4:106182910-106183018
  hypo

SEQ ID NO: 18845 - DNA, 162 bp, Homo sapiens; identical to SEQ ID NO: 3446
  chr4:106190751-106190913
  hypo

SEQ ID NO: 18846 - DNA, 377 bp, Homo sapiens; identical to SEQ ID NO: 3447
  chr4:106193707-106194084
  hypo

SEQ ID NO: 18847 - DNA, 3102 bp, Homo sapiens; identical to SEQ ID NO: 3448
  chr4:106196197-106199299
  hypo

SEQ ID NO: 18848 - DNA, 1602 bp, Homo sapiens; identical to SEQ ID NO: 3449
  chr4:106199358-106200960
  hypo

SEQ ID NO: 18849 - DNA, 35 bp, Homo sapiens
  chr4:106335455-106335490
  hypo
gccacaggattcttcagctgtcgcttttccagctg

SEQ ID NO: 18850 - DNA, 146 bp, Homo sapiens
  chr4:106335549-106335695
  hypo
ccacccactcggcctggcaggctgcgctccgctcgtgctaagcctggatcccacgcatgccaagggcaagccaggtatggagtggcaaagggcaggcaactccgggcaccagcacaggcaccggctccctgcgaggctgcagctgg

SEQ ID NO: 18851 - DNA, 30 bp, Homo sapiens
  chr4:106336030-106336060
  hypo
actgacagtacagctcgcagaagatcagaa

SEQ ID NO: 18852 - DNA, 36 bp, Homo sapiens
  chr4:106631891-106631927
  hypo
atgttagccatttgcgctgtcgatcactgttaatta

SEQ ID NO: 18853 - DNA, 30 bp, Homo sapiens
  chr4:107219812-107219842
  hypo
aaaggtgaaagttctcgacttgataaggaa

SEQ ID NO: 18854 - DNA, 219 bp, Homo sapiens
  chr4:108132181-108132400
  hypo
gcaacagtagttgtttcgaggagtcgtgaggctgggacagttgtcgtctgctgggaagacagatgagtggccacaggctgcagcactggacatgaagccagtctgcacagtgctcagagcggacagcaccgatgcggccgcttgctgtttactccccagcttaaaccgtagcctcatcgcaacaatgtctgaatctgcccttcccgtctcctctgccaa

SEQ ID NO: 18855 - DNA, 44 bp, Homo sapiens
  chr4:108446494-108446538
  hypo
gcgcccagctgggaaatgaagcttttaagcgaagacttagagaa

SEQ ID NO: 18856 - DNA, 82 bp, Homo sapiens
  chr4:108975406-108975488
  hypo
ctacctcatcaggtgcgctgcgggatgtgggagacgtatgtgcagagccgggcgagtgcagggcagacgccctgaagcagcg

SEQ ID NO: 18857 - DNA, 169 bp, Homo sapiens
  chr4:109009507-109009676
  hypo
gaccctgttgaagtccaagtgcgcatgtgcatgcaaagaggaacgagccaccctgagagcaaatccatccttgaggtttgcgccctgagtgatgggaccagaaggcttggtgcaccagagctctctgtcctactcccaactcgtacccgtacacatcaggcagaaacag

SEQ ID NO: 18858 - DNA, 668 bp, Homo sapiens; identical to SEQ ID NO: 3461
  chr4:109093622-109094290
  hypo

SEQ ID NO: 18859 - DNA, 31 bp, Homo sapiens
  chr4:109295090-109295121
  hypo
cttgggagtgatgggacgaatatacccatgt

SEQ ID NO: 18860 - DNA, 31 bp, Homo sapiens
  chr4:109680328-109680359
  hypo
ctagcttgttgccaggcgcagtggctcacgc

SEQ ID NO: 18861 - DNA, 134 bp, Homo sapiens; identical to SEQ ID NO: 3471
  chr4:110651656-110651790
  hypo

SEQ ID NO: 18862 - DNA, 30 bp, Homo sapiens; identical to SEQ ID NO: 3472
  chr4:110686397-110686427
  hypo

SEQ ID NO: 18863 - DNA, 31 bp, Homo sapiens
  chr4:110974665-110974696
  hypo
gaaaaagaaagttggccgggtgtggtgactc

SEQ ID NO: 18864 - DNA, 15 bp, Homo sapiens
  chr4:111096270-111096285
  hypo
ggctcatgcctgtaa

SEQ ID NO: 18865 - DNA, 87 bp, Homo sapiens
  chr4:111097858-111097945
  hypo
tttaagcctctcaaggcgatcactctctttgtcattctttgtcattatttttgagatggagtttcattcttgttgcccaggctggag

SEQ ID NO: 18866 - DNA, 31 bp, Homo sapiens
  chr4:111109685-111109716
  hypo
ttcctgagttgtccatcgtgcaaaagatcat

SEQ ID NO: 18867 - DNA, 31 bp, Homo sapiens; identical to SEQ ID NO: 3473
  chr4:111117164-111117195
  hypo

SEQ ID NO: 18868 - DNA, 31 bp, Homo sapiens
  chr4:111147617-111147648
  hypo
aaacaaaaaaaagtgacgctaaatgtcaact

SEQ ID NO: 18869 - DNA, 31 bp, Homo sapiens
  chr4:111320333-111320364
  hypo
atgcaacaaagcagatcgccttcctccatgg

SEQ ID NO: 18870 - DNA, 37 bp, Homo sapiens
  chr4:111383531-111383568
  hypo
actcacactatctcttattaatcggtgctgctctgga

SEQ ID NO: 18871 - DNA, 578 bp, Homo sapiens
  chr4:111508743-111509321
  hypo
gcccttcccttgacttttaaccaggcttttggagaaagcgtggaatagtaaaaggccaaaacaatagcctccctttcccgggtgtggacacccttcccggtcctcaggagcctcagaggatcaccctctccgccccttcctctagggcctcgcttgggaacgcagcgaaggcgaggcccgaccctgcctgggacgccgcagccctggcccaccagtgctcccagcccgcctgttctcaggattccgtgcgtccagcgtcgggctagtgcctcctccaggtcagagcgccgttccctctaggatgcaggagcaagagatgtgcgcggaaaggtccccaggacgaggacgaagcctcaggcttctcaaaataaatggcgcacttggccttggagggaaaggaggaggcctccgggaaggtgtggaggagactggcagccttgacagcatcgaactgggttccgcccaccgagatttctgcctcgaggaccttgcggagcagccacaggcagcctcatgcgggtgcccagcgtgcgggacacgaggcttctgctcttggcggggtccagtgaaccccagga

SEQ ID NO: 18872 - DNA, 292 bp, Homo sapiens; identical to SEQ ID NO: 3483
  chr4:111543403-111543695
  hypo

SEQ ID NO: 18873 - DNA, 460 bp, Homo sapiens; identical to SEQ ID NO: 3484
  chr4:111543720-111544180
  hypo

SEQ ID NO: 18874 - DNA, 292 bp, Homo sapiens; identical to SEQ ID NO: 3485
  chr4:111544298-111544590
  hypo

SEQ ID NO: 18875 - DNA, 30 bp, Homo sapiens
  chr4:113199030-113199060
  hypo
tcatccatttctgtcggagaactgctttgg

SEQ ID NO: 18876 - DNA, 1396 bp, Homo sapiens; identical to SEQ ID NO: 3497
  chr4:113435423-113436819
  hypo

SEQ ID NO: 18877 - DNA, 406 bp, Homo sapiens; identical to SEQ ID NO: 3498
  chr4:113437616-113438022
  hypo

SEQ ID NO: 18878 - DNA, 146 bp, Homo sapiens; identical to SEQ ID NO: 3499
  chr4:113438440-113438586
  hypo

SEQ ID NO: 18879 - DNA, 43 bp, Homo sapiens
  chr4:113559150-113559193
  hypo
ctattaaaacattttgcgaggctgggcacggtggctcacgcct

SEQ ID NO: 18880 - DNA, 184 bp, Homo sapiens
  chr4:114417170-114417354
  hypo
ggtgctggatgggttatgaggcggagaggcattgcggcatacagcgacaggtcctgcaaactgtggctacagccacaaaccaaaggacggtcttcacatgtatacagtgtggaaagaactactgctacacatcactgactctaggcacacccacacccctggcgaggagtgcagtttgtactgt

SEQ ID NO: 18881 - DNA, 102 bp, Homo sapiens
  chr4:114528565-114528667
  hypo
cccaagcctgcaggtacgcattaagatggtctggagcaactgaggaaccgcaggagaggtgaaaatagccaggtcctgccttgactgatgacattccaccat

SEQ ID NO: 18882 - DNA, 30 bp, Homo sapiens; identical to SEQ ID NO: 3507
  chr4:115520916-115520946
  hypo

SEQ ID NO: 18883 - DNA, 30 bp, Homo sapiens
  chr4:117520537-117520567
  hypo
tcgcaggagaccaccgacacggacatggcc

SEQ ID NO: 18884 - DNA, 24 bp, Homo sapiens
  chr4:119275318-119275342
  hypo
tttaaataagccatctttagccgg

SEQ ID NO: 18885 - DNA, 11 bp, Homo sapiens
  chr4:119501590-119501601
  hypo
ctcccatagtg

SEQ ID NO: 18886 - DNA, 334 bp, Homo sapiens; identical to SEQ ID NO: 3515
  chr4:120549977-120550311
  hypo

SEQ ID NO: 18887 - DNA, 1050 bp, Homo sapiens; identical to SEQ ID NO: 3518
  chr4:121843150-121844200
  hypo

SEQ ID NO: 18888 - DNA, 18 bp, Homo sapiens
  chr4:122606040-122606058
  hypo
aaatatattttatggccg

SEQ ID NO: 18889 - DNA, 77 bp, Homo sapiens
  chr4:122615462-122615539
  hypo
gaagcttctaatgaacaattacgtagcctagttttgccttcatgacattcttactgctcagacgccgcacccaactt

SEQ ID NO: 18890 - DNA, 254 bp, Homo sapiens; identical to SEQ ID NO: 3524
  chr4:122686254-122686508
  hypo

SEQ ID NO: 18891 - DNA, 31 bp, Homo sapiens
  chr4:122854136-122854167
  hypo
gcgccggcccttctcccgcatcactgtcatg

SEQ ID NO: 18892 - DNA, 1437 bp, Homo sapiens; identical to SEQ ID NO: 3526
  chr4:122871369-122872806
  hypo

SEQ ID NO: 18893 - DNA, 35 bp, Homo sapiens
  chr4:122924454-122924489
  hypo
ggtcattgtccacaaccgtacggccttctttcggg

SEQ ID NO: 18894 - DNA, 30 bp, Homo sapiens
  chr4:123300365-123300395
  hypo
gctgtaggggggcacgggacagtaagggag

SEQ ID NO: 18895 - DNA, 30 bp, Homo sapiens
  chr4:123300625-123300655
  hypo
cgggggcgcaagcccgggtcctgcaggggc

SEQ ID NO: 18896 - DNA, 30 bp, Homo sapiens
  chr4:123664095-123664125
  hypo
agaatcagcctgtgcgaatagttctcattg

SEQ ID NO: 18897 - DNA, 970 bp, Homo sapiens; identical to SEQ ID NO: 3529
  chr4:123748070-123749040
  hypo

SEQ ID NO: 18898 - DNA, 108 bp, Homo sapiens
  chr4:124036405-124036513
  hypo
tctggggcagatcgcgggccccaaacccagttgtcgggagcgccaggctgaacagtcactccgacgtggggtggatcctggggttgcagcgtcggtggcccgggctga

SEQ ID NO: 18899 - DNA, 140 bp, Homo sapiens
  chr4:124106850-124106990
  hypo
gttcttatgattctcacgctctgattttctaaactaaaaatatgttcctgttccattgttatcaaaatgtaaaaatcagttaagtaccacaatatatgggggctttaaaaagttacttagaaaatatgcattgtacagtg

SEQ ID NO: 18900 - DNA, 1555 bp, Homo sapiens; identical to SEQ ID NO: 3530
  chr4:124317730-124319285
  hypo

SEQ ID NO: 18901 - DNA, 20 bp, Homo sapiens
  chr4:124335295-124335315
  hypo
cgggcgcggcagctcacgcc

SEQ ID NO: 18902 - DNA, 14 bp, Homo sapiens
  chr4:124335554-124335568
  hypo
tgcctcaaaaaaaa

SEQ ID NO: 18903 - DNA, 30 bp, Homo sapiens
  chr4:124468514-124468544
  hypo
ggcggcctgctgctgcgaaggcgcgaccac

SEQ ID NO: 18904 - DNA, 109 bp, Homo sapiens
  chr4:124468776-124468885
  hypo
gaggaaaaggcggagcgggttttatgggagctgctgcacaagtctgaacgcggaggctgcacacggggagggcaaagccgccctggcaggagcccgagctgcaggcctc

SEQ ID NO: 18905 - DNA, 40 bp, Homo sapiens
  chr4:124533355-124533395
  hypo
gattacaggcataagccacgacgcccggcagctcaatttc

SEQ ID NO: 18906 - DNA, 35 bp, Homo sapiens
  chr4:125038941-125038976
  hypo
cagagccagactccgtctcaaaacaaacaaacaaa

SEQ ID NO: 18907 - DNA, 31 bp, Homo sapiens; identical to SEQ ID NO: 3533
  chr4:125633303-125633334
  hypo

SEQ ID NO: 18908 - DNA, 75 bp, Homo sapiens; identical to SEQ ID NO: 3534
  chr4:125633811-125633886
  hypo

SEQ ID NO: 18909 - DNA, 50 bp, Homo sapiens; identical to SEQ ID NO: 3535
  chr4:125633890-125633940
  hypo

SEQ ID NO: 18910 - DNA, 30 bp, Homo sapiens; identical to SEQ ID NO: 3537
  chr4:126237971-126238001
  hypo

SEQ ID NO: 18911 - DNA, 138 bp, Homo sapiens; identical to SEQ ID NO: 3539
  chr4:128703234-128703372
  hypo

SEQ ID NO: 18912 - DNA, 33 bp, Homo sapiens
  chr4:128889076-128889109
  hypo
cacccctttcaaacaaacagccgggcgcggtgg

SEQ ID NO: 18913 - DNA, 32 bp, Homo sapiens
  chr4:128889348-128889380
  hypo
agcgagactccgtctcaaaaaataaacaaaca

SEQ ID NO: 18914 - DNA, 17 bp, Homo sapiens
  chr4:129396160-129396177
  hypo
aaaagaactaggagggc

SEQ ID NO: 18915 - DNA, 30 bp, Homo sapiens
  chr4:130168471-130168501
  hypo
cgcagcaagtgttcgcgacacaaccattta

SEQ ID NO: 18916 - DNA, 30 bp, Homo sapiens; identical to SEQ ID NO: 3551
  chr4:136732789-136732819
  hypo

SEQ ID NO: 18917 - DNA, 30 bp, Homo sapiens
  chr4:137849027-137849057
  hypo
acaggcgtgagctgccgtgcccagcccatt

SEQ ID NO: 18918 - DNA, 30 bp, Homo sapiens; identical to SEQ ID NO: 3552
  chr4:139814386-139814416
  hypo

SEQ ID NO: 18919 - DNA, 103 bp, Homo sapiens; identical to SEQ ID NO: 3553
  chr4:140097253-140097356
  hypo

SEQ ID NO: 18920 - DNA, 31 bp, Homo sapiens
  chr4:140134627-140134658
  hypo
ttagacacccagtacacgttggacattgaaa

SEQ ID NO: 18921 - DNA, 30 bp, Homo sapiens
  chr4:140225571-140225601
  hypo
agtgctcgcgcacgcgggtgcagtcatccc

SEQ ID NO: 18922 - DNA, 30 bp, Homo sapiens
  chr4:140357474-140357504
  hypo
caggagccagaccacgcgagcggccgcacc

SEQ ID NO: 18923 - DNA, 30 bp, Homo sapiens
  chr4:140619764-140619794
  hypo
agaggcggcgctggcgttggagagccaagt

SEQ ID NO: 18924 - DNA, 36 bp, Homo sapiens
  chr4:140641397-140641433
  hypo
gttctgtgccatcagccgtgacgttcgcatgctctg

SEQ ID NO: 18925 - DNA, 19 bp, Homo sapiens
  chr4:140751842-140751861
  hypo
caggcgtgagccactgcgc

SEQ ID NO: 18926 - DNA, 317 bp, Homo sapiens
  chr4:140754335-140754652
  hypo
gtcaacacacaaacacgcaagttagcccagcctctggcccgggaacccagagaggggctggggaagacagagaaagacagggggagggggccgcgtggaagcgcctagagcagtcggcaggtcacacacacgcggtgctcggcggcaaactcagtttacaaagagacatctgttccattactccaatgcattgtggctaattacatcctggcccgtctgtgaaatgacagccacttattctccagtgaaccgtaaaatctgtacatgttcgatttggggagtgggagagcagaggcgtggaggctagagtgggagga

SEQ ID NO: 18927 - DNA, 25 bp, Homo sapiens
  chr4:140865030-140865055
  hypo
ttttttttttttgagacggaatctt

SEQ ID NO: 18928 - DNA, 38 bp, Homo sapiens
  chr4:141014854-141014892
  hypo
tacaggcgtgagccaccgtgcccagccaagactcatgt

SEQ ID NO: 18929 - DNA, 386 bp, Homo sapiens; identical to SEQ ID NO: 3560
  chr4:141071934-141072320
  hypo

SEQ ID NO: 18930 - DNA, 175 bp, Homo sapiens; identical to SEQ ID NO: 3561
  chr4:141072547-141072722
  hypo

SEQ ID NO: 18931 - DNA, 42 bp, Homo sapiens; identical to SEQ ID NO: 3562
  chr4:141073274-141073316
  hypo

SEQ ID NO: 18932 - DNA, 36 bp, Homo sapiens; identical to SEQ ID NO: 3563
  chr4:141073590-141073626
  hypo

SEQ ID NO: 18933 - DNA, 384 bp, Homo sapiens; identical to SEQ ID NO: 3564
  chr4:141073988-141074372
  hypo

SEQ ID NO: 18934 - DNA, 512 bp, Homo sapiens; identical to SEQ ID NO: 3565
  chr4:141074879-141075391
  hypo

SEQ ID NO: 18935 - DNA, 102 bp, Homo sapiens
  chr4:141207749-141207851
  hypo
ctgtttggagcccagactgggcggcatgtgcagccgtgtgcccgcgccgttcctcacgtgcacatgggtggcttgagcgcataagcatgactgccaatatca

SEQ ID NO: 18936 - DNA, 47 bp, Homo sapiens
  chr4:141207918-141207965
  hypo
ctgtcaaggacgactgtgggagtcacgcagcctctaagctacttggg

SEQ ID NO: 18937 - DNA, 30 bp, Homo sapiens; identical to SEQ ID NO: 3569
  chr4:141348473-141348503
  hypo

SEQ ID NO: 18938 - DNA, 284 bp, Homo sapiens
  chr4:141564105-141564389
  hypo
ccttgtactggtgctggacctcggcccgccacattctgaagtccagttccaggacgtccatgtcctccacggaggacttcatggggtacatccgctcctccttcttgcgcatccagctgtacttattgtgggcttcagctcccgtgggagccgcaggttcttgagcgggtcccaccacgggcccatccagcacctccctcagcatgtggctgccggctgccagcaggctctccagtgagggccgagccaccagggcccgctccgcacctcccaccttcttgctc

SEQ ID NO: 18939 - DNA, 102 bp, Homo sapiens
  chr4:141564741-141564843
  hypo
gggccaggccttcctccggcgctgcctctgccgcaggaaccgccacaggcacctccactggctcctccttggcctccactagcgtctcgggtgtcagctgca

SEQ ID NO: 18940 - DNA, 95 bp, Homo sapiens
  chr4:141565181-141565276
  hypo
aggatgagcttgtcttcgggcgagagtgtcaggcgcttggtcccatcagctgggagcagcacatcaggggccaggccatccgcatcggcggccac

SEQ ID NO: 18941 - DNA, 31 bp, Homo sapiens; identical to SEQ ID NO: 3573
  chr4:141678190-141678221
  hypo

SEQ ID NO: 18942 - DNA, 1539 bp, Homo sapiens; identical to SEQ ID NO: 3574
  chr4:142053306-142054845
  hypo

SEQ ID NO: 18943 - DNA, 201 bp, Homo sapiens; identical to SEQ ID NO: 3576
  chr4:142557305-142557506
  hypo

SEQ ID NO: 18944 - DNA, 186 bp, Homo sapiens
  chr4:142677008-142677194
  hypo
ctaagtggatttgctgcgtggccagcaaatttccacaacaaatttactgtctataggtaacctgccattgagaacgctttgcaaaatgcgtaactacagcagagtttcagtatgacggaattttccacttttcaaggctaaattggccagagctcaggggggacagggttgcggagaaaggaggta

SEQ ID NO: 18945 - DNA, 197 bp, Homo sapiens
  chr4:143477971-143478168
  hypo
ttgcaggggaaagtatcgattgcagtttttatcatctaagctgatacctaggaaacctcgctatctcctcatatattcagtcaggagaatagaagacagaggtctggaagaggctttatcttctctttattagatacatcaaaaccgatacagcacaaagctgctcctcaaagctgccctgtcgtgaccaccggagg

SEQ ID NO: 18946 - DNA, 75 bp, Homo sapiens
  chr4:144141583-144141658
  hypo
atacagttggcagactcgtattttgatcctgagagagtccaaaatgcactggtcacgaaacgtctaatactatga

SEQ ID NO: 18947 - DNA, 437 bp, Homo sapiens; identical to SEQ ID NO: 3581
  chr4:144257017-144257454
  hypo

SEQ ID NO: 18948 - DNA, 154 bp, Homo sapiens; identical to SEQ ID NO: 3582
  chr4:144257972-144258126
  hypo

SEQ ID NO: 18949 - DNA, 301 bp, Homo sapiens; identical to SEQ ID NO: 3583
  chr4:144258374-144258675
  hypo

SEQ ID NO: 18950 - DNA, 31 bp, Homo sapiens; identical to SEQ ID NO: 3587
  chr4:146102129-146102160
  hypo

SEQ ID NO: 18951 - DNA, 281 bp, Homo sapiens; identical to SEQ ID NO: 3588
  chr4:146402905-146403186
  hypo

SEQ ID NO: 18952 - DNA, 283 bp, Homo sapiens; identical to SEQ ID NO: 3589
  chr4:146403604-146403887
  hypo

SEQ ID NO: 18953 - DNA, 28 bp, Homo sapiens
  chr4:146449669-146449697
  hypo
aggcgtgagctaccgcgcctgaccataa

SEQ ID NO: 18954 - DNA, 30 bp, Homo sapiens
  chr4:146559532-146559562
  hypo
tccttatctaatttcgtagtggttcaaact

SEQ ID NO: 18955 - DNA, 31 bp, Homo sapiens
  chr4:146853627-146853658
  hypo
tttttttttttttttttgagacggagtctcg

SEQ ID NO: 18956 - DNA, 41 bp, Homo sapiens
  chr4:146853897-146853938
  hypo
ttacaggcgtgagccaccgcgctcagcttgtattttaaacc

SEQ ID NO: 18957 - DNA, 34 bp, Homo sapiens; identical to SEQ ID NO: 3596
  chr4:147560267-147560301
  hypo

SEQ ID NO: 18958 - DNA, 30 bp, Homo sapiens; identical to SEQ ID NO: 3601
  chr4:147576532-147576562
  hypo

SEQ ID NO: 18959 - DNA, 34 bp, Homo sapiens; identical to SEQ ID NO: 3604
  chr4:148538934-148538968
  hypo

SEQ ID NO: 18960 - DNA, 20 bp, Homo sapiens
  chr4:148543379-148543399
  hypo
caccgcgcctggccgcagta

SEQ ID NO: 18961 - DNA, 100 bp, Homo sapiens
  chr4:148782278-148782378
  hypo
ggcgagccaggcacggagtggcgaggagttcgtgagtgagttcagggtcatccggccactgtgcacagccgggcatgccgactgtggtggggcaggcagc

SEQ ID NO: 18962 - DNA, 29 bp, Homo sapiens
  chr4:148835301-148835330
  hypo
caaaaaaagaaatccgctttattgaggta

SEQ ID NO: 18963 - DNA, 31 bp, Homo sapiens
  chr4:148985416-148985447
  hypo
ctgatgttcacttccacgttaatttctcttt

SEQ ID NO: 18964 - DNA, 31 bp, Homo sapiens
  chr4:149363505-149363536
  hypo
gcctgaagttggctcccgtctcccgggccca

SEQ ID NO: 18965 - DNA, 127 bp, Homo sapiens; identical to SEQ ID NO: 3607
  chr4:149364526-149364653
  hypo

SEQ ID NO: 18966 - DNA, 57 bp, Homo sapiens; identical to SEQ ID NO: 3609
  chr4:149366181-149366238
  hypo

SEQ ID NO: 18967 - DNA, 38 bp, Homo sapiens
  chr4:149905344-149905382
  hypo
aacagttctgggataccgatgggatgcagtatctgaag

SEQ ID NO: 18968 - DNA, 10 bp, Homo sapiens
  chr4:151029381-151029391
  hypo
cgggcgcagt

SEQ ID NO: 18969 - DNA, 30 bp, Homo sapiens
  chr4:151156988-151157018
  hypo
tgcatcccgctctccggtaagcagcatcat

SEQ ID NO: 18970 - DNA, 30 bp, Homo sapiens
  chr4:151177538-151177568
  hypo
gaaccggagcctggcgtgccggagcctggc

SEQ ID NO: 18971 - DNA, 123 bp, Homo sapiens
  chr4:151897749-151897872
  hypo
aaatacaagccttcaccgatcatcgccgcgacagaaacaacaaatttaacaaccatgtccacaaaaaagcaccttcataaaaaccaaaaataaggtgagcaatcacttcgtatcacagaaagg

SEQ ID NO: 18972 - DNA, 520 bp, Homo sapiens; identical to SEQ ID NO: 3614
  chr4:152330027-152330547
  hypo

SEQ ID NO: 18973 - DNA, 31 bp, Homo sapiens
  chr4:152594486-152594517
  hypo
tctgtctcatggccgccgaattaattgaggt

SEQ ID NO: 18974 - DNA, 30 bp, Homo sapiens
  chr4:153199808-153199838
  hypo
cagctccgcctctgcgttctttcccttcct

SEQ ID NO: 18975 - DNA, 30 bp, Homo sapiens; identical to SEQ ID NO: 3615
  chr4:153249370-153249400
  hypo

SEQ ID NO: 18976 - DNA, 87 bp, Homo sapiens
  chr4:153889784-153889871
  hypo
gcctgatgtatttgtttagggacagtgcttctgcgaggctcctgttgttcactgctcagtttgcacgattgcagtttactgtggtga

SEQ ID NO: 18977 - DNA, 30 bp, Homo sapiens
  chr4:153894777-153894807
  hypo
gagagacttggggacgaggtgggaggctga

SEQ ID NO: 18978 - DNA, 30 bp, Homo sapiens
  chr4:153896242-153896272
  hypo
caaacctcaggcctcggggggccaggagga

SEQ ID NO: 18979 - DNA, 30 bp, Homo sapiens
  chr4:153897301-153897331
  hypo
agagcagaggctgccgcgggggagcagcgg

SEQ ID NO: 18980 - DNA, 30 bp, Homo sapiens
  chr4:153897690-153897720
  hypo
gcagcactttgaggcgagccagcagtgccc

SEQ ID NO: 18981 - DNA, 30 bp, Homo sapiens
  chr4:153898094-153898124
  hypo
actactgtgacggccgcacctcccccatgc

SEQ ID NO: 18982 - DNA, 215 bp, Homo sapiens
  chr4:153943298-153943513
  hypo
tgggaaggtccaggcacctcacgaggtaggtccaggtgactgggacacgggagggctccagacagccgctatttgccacacggaaccaaagcatttcactgttttaacaagcggttcagctggtccggagtatccctgctggctctcagccctaaagtggcgtgagggctgggcacgtcgacagcacttgatccgctccttccctctggaaatgc

SEQ ID NO: 18983 - DNA, 30 bp, Homo sapiens
  chr4:153985896-153985926
  hypo
gaggcccagtcgcccggtctctcacgggga

SEQ ID NO: 18984 - DNA, 30 bp, Homo sapiens
  chr4:154036612-154036642
  hypo
ctcatcctgagggtccgcagctctcattgc

SEQ ID NO: 18985 - DNA, 30 bp, Homo sapiens
  chr4:154076805-154076835
  hypo
aatttatcatctgccgttcatggccccagc

SEQ ID NO: 18986 - DNA, 424 bp, Homo sapiens
  chr4:154216435-154216859
  hypo
agctcaccaggcctccggttttcccgcaggtcctccagtcgcagctggatactctgctccaggggcaggagagcattaagagctgcagcaacttcacagcgcaggccctcaaccatggcacggagaccgaggtcctactggtgaagaagcagatgagcgagaagctgaacgagctggccgaccaggacttccccttgcacccgcgggagaacgaccagctggatttcatcgtggaaaccgaggggctgaagaagtccatccacaacctcgggacgatcttaaccaccaacgccgttgcctcagagacagtggccacgggcgaggggctgcggcagaccatcatcgggcagcccatgtccgtcaccatcaccaccaaggacaaagacggtgagctgtgcaaaaccggcaacgcctacctcaccgc

SEQ ID NO: 18987 - DNA, 30 bp, Homo sapiens
  chr4:154217072-154217102
  hypo
taagtccccggggagcggccacgtcaagca

SEQ ID NO: 18988 - DNA, 97 bp, Homo sapiens
  chr4:154410568-154410665
  hypo
tgtatctgtaggagcacgtccaaggaaaattctttattttcacaagattgtgagcactggggagaagtatttttttcttgagacagagtctcactct

SEQ ID NO: 18989 - DNA, 21 bp, Homo sapiens
  chr4:154420588-154420609
  hypo
ttttttttttgagatgcgtct

SEQ ID NO: 18990 - DNA, 125 bp, Homo sapiens
  chr4:154421944-154422069
  hypo
acacgctcacacacgcgtgcatgcacacacacacaggcatgtgcacttttttcctagttgtgaaaatcgatggaatgactacatggcttagtctcctctttctccagagacgccgtttaatgatc

SEQ ID NO: 18991 - DNA, 4 bp, Homo sapiens
  chr4:154469458-154469462
  hypo
tttt

SEQ ID NO: 18992 - DNA, 144 bp, Homo sapiens
  chr4:154520338-154520482
  hypo
agctaaagcaggagcacgagaggggagaaggtgtcacacacttttaaacaaccagatctcacgacaactcactatcacagtgacagcattgcgggagtcgggggagggtgctaaaccatgagagaccaccgccatgatccattg

SEQ ID NO: 18993 - DNA, 30 bp, Homo sapiens; identical to SEQ ID NO: 3622
  chr4:154607110-154607140
  hypo

SEQ ID NO: 18994 - DNA, 31 bp, Homo sapiens
  chr4:154681753-154681784
  hypo
tgagaacaagctggaacgtttaggcaagcct

SEQ ID NO: 18995 - DNA, 35 bp, Homo sapiens; identical to SEQ ID NO: 3624
  chr4:154709575-154709610
  hypo

SEQ ID NO: 18996 - DNA, 686 bp, Homo sapiens; identical to SEQ ID NO: 3625
  chr4:154709758-154710444
  hypo

SEQ ID NO: 18997 - DNA, 30 bp, Homo sapiens; identical to SEQ ID NO: 3627
  chr4:154713554-154713584
  hypo

SEQ ID NO: 18998 - DNA, 30 bp, Homo sapiens; identical to SEQ ID NO: 3628
  chr4:154713895-154713925
  hypo

SEQ ID NO: 18999 - DNA, 30 bp, Homo sapiens; identical to SEQ ID NO: 3629
  chr4:154714151-154714181
  hypo

SEQ ID NO: 19000 - DNA, 427 bp, Homo sapiens; identical to SEQ ID NO: 3630
  chr4:155254166-155254593
  hypo

SEQ ID NO: 19001 - DNA, 259 bp, Homo sapiens; identical to SEQ ID NO: 3641
  chr4:156297474-156297733
  hypo

SEQ ID NO: 19002 - DNA, 193 bp, Homo sapiens; identical to SEQ ID NO: 3642
  chr4:156297941-156298134
  hypo

SEQ ID NO: 19003 - DNA, 299 bp, Homo sapiens; identical to SEQ ID NO: 3646
  chr4:157892474-157892773
  hypo

SEQ ID NO: 19004 - DNA, 463 bp, Homo sapiens; identical to SEQ ID NO: 3651
  chr4:159690052-159690515
  hypo

SEQ ID NO: 19005 - DNA, 20 bp, Homo sapiens
  chr4:160016975-160016995
  hypo
gactccgtctcaaaaaaaga

SEQ ID NO: 19006 - DNA, 30 bp, Homo sapiens; identical to SEQ ID NO: 3653
  chr4:163811945-163811975
  hypo

SEQ ID NO: 19007 - DNA, 30 bp, Homo sapiens
  chr4:164394883-164394913
  hypo
catctctcttttgtcggtttggcaaagcaa

SEQ ID NO: 19008 - DNA, 30 bp, Homo sapiens; identical to SEQ ID NO: 3660
  chr4:166513760-166513790
  hypo

SEQ ID NO: 19009 - DNA, 35 bp, Homo sapiens
  chr4:169198693-169198728
  hypo
aatgaaaattccaggccgggcgcagtggctcacac

SEQ ID NO: 19010 - DNA, 34 bp, Homo sapiens
  chr4:169358977-169359011
  hypo
cttcacttaaacccttcggctgactccatggggt

SEQ ID NO: 19011 - DNA, 164 bp, Homo sapiens
  chr4:169377151-169377315
  hypo
acagctttctgcctggcggctgtgttctttttacttactaagacacgatggtacattctcaaggatagtgaacatgaagtgacacagagaacacgctggatgtccgatccttctgaccataggtgctgaagcagaaatagagtctgatacgcctatcaaaaaag

SEQ ID NO: 19012 - DNA, 34 bp, Homo sapiens
  chr4:169562059-169562093
  hypo
tgaaaaatagagattccaggccgggcacggtggc

SEQ ID NO: 19013 - DNA, 186 bp, Homo sapiens
  chr4:170043183-170043369
  hypo
tgacctctgaggtttggacttcgtttaaatgaacacataagcagtaacagacgacacgctcacttacacactggggcgagtctgcggccgtaaatgtgcaatctggtcagtggatcctgccatgggcctcggtcccattccagcagcagcagcagcggcggtggcgcctggtggtgtggaggcaag

SEQ ID NO: 19014 - DNA, 215 bp, Homo sapiens
  chr4:170105280-170105495
  hypo
ctcagggcactcccaccggcaggcttactgtgaaccgacatcccctacttctgaaatccatttggtacggcaggagatctcttgcgggatgtctgcattttcagaagaaattatctactgactgctttggccaatgtgctttttcacctctaaattttaaggtgtttttagctttatcagcaataccagagcacatcacacgtgcacacatccaa

SEQ ID NO: 19015 - DNA, 24 bp, Homo sapiens
  chr4:170162086-170162110
  hypo
ttaaaactgcccaggccgggcgtg

SEQ ID NO: 19016 - DNA, 63 bp, Homo sapiens; identical to SEQ ID NO: 3668
  chr4:170192284-170192347
  hypo

SEQ ID NO: 19017 - DNA, 77 bp, Homo sapiens
  chr4:170566082-170566159
  hypo
tggaagctagaaaaggcgaggaaacagattctcccctgaagcctccaaaaggaacactgccctgctgacacaccttg

SEQ ID NO: 19018 - DNA, 76 bp, Homo sapiens
  chr4:170566218-170566294
  hypo
taagtttatggcagtgtgttacgataacagtaggaaacggacacggatatcttagtattatcgaaagtgttgtttt

SEQ ID NO: 19019 - DNA, 38 bp, Homo sapiens
  chr4:170612104-170612142
  hypo
acctaatgttctttgacgggttagttgttactttgctg

SEQ ID NO: 19020 - DNA, 216 bp, Homo sapiens
  chr4:170652115-170652331
  hypo
agaattaaatgatctgcgtgtgggtatgcactcgtgcacatgtgcacacatatcttacaggtaaagaaacagatgcaaaggtgttggaaagcttgcccgatcttacacactgggaagatgtgatttacaaccagtttggccccagaaacaggtcatatccgctacaccttattgcctctttgatcttcaggcaactatggtcgagtaagcactggt

SEQ ID NO: 19021 - DNA, 102 bp, Homo sapiens
  chr4:170865252-170865354
  hypo
tgtctgaggggtttcgtctgcggcttgtcctgctacaaaatgtggaaagtgggacaatcacgcccttgtgaaacaacaatcgcagcacttcagccttcctgg

SEQ ID NO: 19022 - DNA, 23 bp, Homo sapiens
  chr4:170903791-170903814
  hypo
tgttctggccaggcacggtggct

SEQ ID NO: 19023 - DNA, 31 bp, Homo sapiens
  chr4:171014687-171014718
  hypo
agcacgttgatgcacccgtctgtgatttgta

SEQ ID NO: 19024 - DNA, 1315 bp, Homo sapiens; identical to SEQ ID NO: 3678
  chr4:174089921-174091236
  hypo

SEQ ID NO: 19025 - DNA, 19 bp, Homo sapiens
  chr4:174189980-174189999
  hypo
cacccggacacttgtttac

SEQ ID NO: 19026 - DNA, 149 bp, Homo sapiens
  chr4:175940747-175940896
  hypo
tagcaacttgaggctgcaccccgggctgccactccaagagcggaggcagtgagagtacgcgtgtgcctcgcgccagtccacgctaggagagcactgggaccgagacccggcaccacctcccggtccgccctccagaactttgttgagga

SEQ ID NO: 19027 - DNA, 57 bp, Homo sapiens; identical to SEQ ID NO: 3704
  chr4:177240795-177240852
  hypo

SEQ ID NO: 19028 - DNA, 31 bp, Homo sapiens; identical to SEQ ID NO: 3713
  chr4:183796433-183796464
  hypo

SEQ ID NO: 19029 - DNA, 196 bp, Homo sapiens
  chr4:183809395-183809591
  hypo
gattcatataccctcacgatgaaatggctttagattcttccaacagttccgaaataaaagtcgagctagctaaaggtatctccagaacaattctggggcaccctgctctaaatgtgactcctgggcccagggttattttgccggcacctctgcagccagtaatccataactctagtcatcacggttccctgacaag

SEQ ID NO: 19030 - DNA, 31 bp, Homo sapiens
  chr4:183814349-183814380
  hypo
gctggagcactttcagcgtctatgattaatg

SEQ ID NO: 19031 - DNA, 30 bp, Homo sapiens
  chr4:183815698-183815728
  hypo
tacagcctttcacatcggtcgaatttttgt

SEQ ID NO: 19032 - DNA, 318 bp, Homo sapiens
  chr4:183815956-183816274
  hypo
gaaggcacctagagcggccaggacggccgaggtcaagtgccttccccaccctaagcgcagctccgcttcacggctccacaagaccctggggcatgaaagtgcccacctgagctggctcattggtgtgctgacacgcacacatggggaagttcaccgtggctgttaagagggctaggggattttaagagcaagagaatcaacaagtgacgaagctgagcgtgtccatcctgagggatctgctttaccacatcgtgctcagcccacatacgcacaaggaaaaacgccagcagccagactgggtctcgttctgttgcccag

SEQ ID NO: 19033 - DNA, 197 bp, Homo sapiens
  chr4:183824598-183824795
  hypo
gtgtgtgtgtgaaaataaagacgagaaacgggggtgatgtggagaaacccgccgcatgcgtggaaaatgtgtgggctctgttctgtttccaccctgtgcccagagaggagggctctgctagaagaaaatgacagcgcaaaggaattctaccaaggtctggggagaaagtggtgggtcactcacgtaaaaggcagccc

SEQ ID NO: 19034 - DNA, 2050 bp, Homo sapiens; identical to SEQ ID NO: 3714
  chr4:184019266-184021316
  hypo

SEQ ID NO: 19035 - DNA, 31 bp, Homo sapiens
  chr4:184160137-184160168
  hypo
gcactctaaaatattgcgcaacagaatgtgt

SEQ ID NO: 19036 - DNA, 44 bp, Homo sapiens
  chr4:184166140-184166184
  hypo
aaaggaggggctgagacgtgcggatcacgaggtcaggagttcaa

SEQ ID NO: 19037 - DNA, 31 bp, Homo sapiens
  chr4:184265808-184265839
  hypo
cccgcccagggcccatcgccccttgaggcct

SEQ ID NO: 19038 - DNA, 31 bp, Homo sapiens
  chr4:184289494-184289525
  hypo
aatgctatttgagcaccgatacgatgccgca

SEQ ID NO: 19039 - DNA, 30 bp, Homo sapiens
  chr4:184297616-184297646
  hypo
tcacataaaggccccgctcccccgaccccg

SEQ ID NO: 19040 - DNA, 29 bp, Homo sapiens
  chr4:184375704-184375733
  hypo
gcccggccgatcctgcttcttttatcccc

SEQ ID NO: 19041 - DNA, 19 bp, Homo sapiens
  chr4:184582527-184582546
  hypo
ttttttttttttgagacgg

SEQ ID NO: 19042 - DNA, 181 bp, Homo sapiens
  chr4:184667623-184667804
  hypo
cgataggaccaggcagggggccgtgcccgctggggaggcttgagttgtgcgggaacccactgcagggcgggagcgagctcgggcatggcaggctgcaggtcccgagctcttccccatgcagaggccgctgagaccgggtgagaattcaagcatggcacgggcccgccggcagtgctggggg

SEQ ID NO: 19043 - DNA, 326 bp, Homo sapiens
  chr4:184678228-184678554
  hypo
ctggggagagatgagcgcgggacagcagcccctctctgcagagcctcgaggcttctgtggccccgtggggtcagatgcgtggcatggcttgctggtcttgttcccatggcacagaagaaactacacttccttttgcccaaactcagccaccatggagcctactcctcagtctttcatttacttctagaatgctgacaggtgagaatgctacctccgggctgccaagccacaaagcgtgacagcccgctccctgggaaccacaaatatttggaatctgaagtggattgggaactaaaaatacaacaccttaagaaactacagtttgg

SEQ ID NO: 19044 - DNA, 38 bp, Homo sapiens
  chr4:185185201-185185239
  hypo
tccaaccctggcatgacgtcaaacgcagcagaagtgag

SEQ ID NO: 19045 - DNA, 17 bp, Homo sapiens
  chr4:185239349-185239366
  hypo
ggcgacagagtgagact

SEQ ID NO: 19046 - DNA, 125 bp, Homo sapiens
  chr4:185239991-185240116
  hypo
ttttagtcctgtgtatcgccttcccagcccctgcagccatctgaattggtgggaccatgctcctacagtgggcctcataggtccactccacagagcgctgggccagagctcgttctggtgccatt

SEQ ID NO: 19047 - DNA, 37 bp, Homo sapiens
  chr4:185241302-185241339
  hypo
ggagcacagcttttccgtcttctgtgtaggttcccca

SEQ ID NO: 19048 - DNA, 43 bp, Homo sapiens
  chr4:185344471-185344514
  hypo
aaggaaggcaggagagatgagcgctgcttgacttcagaaaagc

SEQ ID NO: 19049 - DNA, 157 bp, Homo sapiens
  chr4:185352798-185352955
  hypo
taggggtaggtatagtggtcacgagtagagagcaacagacgccagttctcctgacagcctgacgtgcagaagtgctgtgcgtggtccctggcgctgcagctgagcctgagcctggcaatatggaaacacgagaggcgtgtggaagtggccctgcctc

SEQ ID NO: 19050 - DNA, 221 bp, Homo sapiens
  chr4:185353276-185353497
  hypo
gcctgtgtgtgaagacacattcgatccacactgttcgcagattctgtatctgtgaatttgcctactcactgaaatatatccacaacccccaaatcaatactcagatgcgttggtggtcactcggggacatgtgctgaattcaagtcatctgatgcacgtgttcccagctgaggctggacaaggccacactctgccttcccgctcttgctctcctatggcag

SEQ ID NO: 19051 - DNA, 31 bp, Homo sapiens
  chr4:185354512-185354543
  hypo
tctcccatgctcctgccgtgtggtcattttg

SEQ ID NO: 19052 - DNA, 103 bp, Homo sapiens
  chr4:185386796-185386899
  hypo
aaatattttcccatcactaaacgctgctcgaaaacacgagctttataagctacctatagtctgtctggatgtgccgtaattcgttcaaatgtgtctctattgt

SEQ ID NO: 19053 - DNA, 31 bp, Homo sapiens
  chr4:185480838-185480869
  hypo
gcctgcacctcagaagcggttgctgctgctg

SEQ ID NO: 19054 - DNA, 43 bp, Homo sapiens; identical to SEQ ID NO: 3721
  chr4:185747693-185747736
  hypo

SEQ ID NO: 19055 - DNA, 70 bp, Homo sapiens
  chr4:185873078-185873148
  hypo
cgtggccatgcgtgttcgtgcctggtgtgtatggggtgggggacgcatggccatgcgtgttggctcctgg

SEQ ID NO: 19056 - DNA, 30 bp, Homo sapiens; identical to SEQ ID NO: 3723
  chr4:185939443-185939473
  hypo

SEQ ID NO: 19057 - DNA, 30 bp, Homo sapiens
  chr4:186044812-186044842
  hypo
ggcaaactatgatgcgtgtgtggagagggg

SEQ ID NO: 19058 - DNA, 69 bp, Homo sapiens; identical to SEQ ID NO: 3724
  chr4:186130482-186130551
  hypo

SEQ ID NO: 19059 - DNA, 96 bp, Homo sapiens
  chr4:186319409-186319505
  hypo
ccacacatttttattaatgaaaacggtatgaaaaagcaaactaaaagaactaatcaaaaataaaaagcttttgcagcttaccgaggaaaaaaacaa

SEQ ID NO: 19060 - DNA, 14 bp, Homo sapiens
  chr4:186347895-186347909
  hypo
tagtggcgggccgg

SEQ ID NO: 19061 - DNA, 137 bp, Homo sapiens
  chr4:186348208-186348345
  hypo
actccgtctcaaaaaaaaaaaaaaattaataagaaaaaagttaagtgatgggaaagttctaggcaagaatttcttccctccctcctccctggctcgcttgtgtgccgggagctgcgcagatgcggggataccgtgag

SEQ ID NO: 19062 - DNA, 40 bp, Homo sapiens
  chr4:186348625-186348665
  hypo
gtaaaaggccgggcgcggtggctcacgcctgaaatcccag

SEQ ID NO: 19063 - DNA, 31 bp, Homo sapiens; identical to SEQ ID NO: 3727
  chr4:187066081-187066112
  hypo

SEQ ID NO: 19064 - DNA, 178 bp, Homo sapiens
  chr4:187550653-187550831
  hypo
ttccataatgaaaagacgtatggatttggcacagcggaaatcactgccaattataaaacatgctttagagtttaagaagaagaaaactgcgcttcgtgggggcatatggaacaaagggatctgctggtccaagcagcacagggggccagggtcccaggcagagcggtcaaccacatgg

SEQ ID NO: 19065 - DNA, 241 bp, Homo sapiens; identical to SEQ ID NO: 3732
  chr4:187647885-187648126
  hypo

SEQ ID NO: 19066 - DNA, 31 bp, Homo sapiens; identical to SEQ ID NO: 3733
  chr4:187855389-187855420
  hypo

SEQ ID NO: 19067 - DNA, 31 bp, Homo sapiens
  chr4:188428284-188428315
  hypo
cagtgcagccagtaaccgcccatttatgtat

SEQ ID NO: 19068 - DNA, 31 bp, Homo sapiens
  chr4:188682666-188682697
  hypo
gaagagcagatgttcccgttcaaaggcagtc

SEQ ID NO: 19069 - DNA, 30 bp, Homo sapiens
  chr4:188858956-188858986
  hypo
gcccccgcgccacacggcccccacgcgcct

SEQ ID NO: 19070 - DNA, 6 bp, Homo sapiens
  chr4:189100359-189100365
  hypo
gggttc

SEQ ID NO: 19071 - DNA, 524 bp, Homo sapiens
  chr4:189552364-189552888
  hypo
ccaaatgctgcctctactccacgttcctacaccggttgacctcaccgtgatgcccaagtgctaattctactccacgttcctgcaccggttgacctcaccgcgatgcccaagtgctaattctactccacgttcctgcaccggttgacctcaccgcgatgcccgaattctacctctactccacgttcctgtacctgttgacctcaccgcgatgcccgaatgctacttctactccgtgttcctgcaccagttgacctcaccgcgatgcccgaatgctacctgtactccacgttcctacaccggttgacctcaccacgatgctggaatgctacctgtactccacgttcctgtaccggttgacctcaccacgatgccggaatgctacctgtactccacattcctgcaccggttgacctcaccgcgatgcccgagtgctacttctactccaagttttgtctccgtgtaaatatcgccatgtccccagaataatgtgtctcaactatttcgtggcttctgccctgagggac

SEQ ID NO: 19072 - DNA, 285 bp, Homo sapiens
  chr4:189956759-189957044
  hypo
gtctctttgagcagtgatggtcgccccattgcgtatagaggaaatggaggaaaacttggaagtaccgccttccatacaaagtcaaggatcgagaccttcctctccgcgttccagaatccctcaggaaatacgcgcgtgccttcgcatctagagcaagcgctgcaagaattcacagaacggccagaagttccccatcccgctggtggcactcactgcgttaggcgctcagcctccagtccgggccgctttggcttgaagacggccgttttccttcctgatacctgc

SEQ ID NO: 19073 - DNA, 225 bp, Homo sapiens
  chr4:190345361-190345586
  hypo
acactgcatggaacccctgtacgcatacacacacacacacacacactgcacggaactcctgtatgcatacgcacacgcactcacactgcacggaacccctgtacgcatatacacacaggcacacacgcactcacactgcacggaactcccgtatgcatatacacacaggcacacacgcactcacactgcatggaacccctgtacgcatatatacacacaggcaca

SEQ ID NO: 19074 - DNA, 744 bp, Homo sapiens
  chr4:190462466-190463210
  hypo
cctaagcaaaatgcaccaagccgaggcatcatacaacccgacttcaaaatgcaccaagccggaggcatcatataacccgacttcaacatgcaccaagccggaggcatcatataacccgacttcaaaatgcaccaagctgcaggcttcatataacccgacttcaacatgcaccaagctgcaggcatcatacaacccgacttcaaaatgcaccaagccggaggcatcatataacccgacttcaaaatgcaccatgccagaggcatcctatcactcgacttcaaaatgcaccaagccggaggcatcatgtaacccaacttcaacatgcaccaagccggaggcatcatataatccgacttcaaaatgcaccaagccgcaggcatcatacaacccgacggcaacatgcaccaagccgcaggcaccatataacccgacttcaaaatgcaccaagccagaggcatcatataacccgacatcaaaatgcaccaagccgcaggcatcatataacccgacatcaaaatgcaccaagccgcaggcatcatataacccgacgtcaaaatgcaataagccgcaggcaccatataacccgatgtcaaaatgcaccaagccgcaggcatcatacagtccgacttcaaaatgcaccaagccgcaggcatcatacagtccgacttcaaaatgcaccaagccgcaggcatcatacagtccgacttcaaaatgcaccaagccgcaggcatcatataacccaac

SEQ ID NO: 19075 - DNA, 325 bp, Homo sapiens
  chr5:139824-140149
  hypo
tgtcttcacgggggcgttcctggagtgggtgaaccgggagcggcgccatgtccccctgcaaacctgcttgctgacctcaggcttggccgtccaccgagccccgtggagcgacgtcactgaccctgtctttgtccccagccctggagccatcctgcagagctactccagctgcacaggtcctgagcggctgcccagcagcccctcagaggccccagtccccacccaagccacagcaggcccccatttccagggaagcgcctcttgccccgacaccctgacctcaccctgccgccgagggcatacgggcagcgaccagctcaggcac

SEQ ID NO: 19076 - DNA, 31 bp, Homo sapiens
  chr5:174970-175001
  hypo
tgaaggggctgagctccgtgactcgatctcc

SEQ ID NO: 19077 - DNA, 30 bp, Homo sapiens
  chr5:192635-192665
  hypo
gccatgaggctacacggcctccagcctctc

SEQ ID NO: 19078 - DNA, 123 bp, Homo sapiens
  chr5:233692-233815
  hypo
gtcgcgaaggacctggcgtctagagatgtggtgtctcggtccatgactctggagatccgagaaggaaggtgcgtgtgatttaccaccagcactgtctgagcgggcacacgggccggggttgct

SEQ ID NO: 19079 - DNA, 48 bp, Homo sapiens
  chr5:235347-235395
  hypo
agacagccatgatcttcgctggcgtggacgtcacgaaggagccgatcc

SEQ ID NO: 19080 - DNA, 31 bp, Homo sapiens
  chr5:236678-236709
  hypo
catgtgccctgagcatcgaagagtcatgcag

SEQ ID NO: 19081 - DNA, 31 bp, Homo sapiens
  chr5:286453-286484
  hypo
atgttgttttgagagccgtgcagctggagat

SEQ ID NO: 19082 - DNA, 30 bp, Homo sapiens; identical to SEQ ID NO: 3737
  chr5:368433-368463
  hypo

SEQ ID NO: 19083 - DNA, 152 bp, Homo sapiens; identical to SEQ ID NO: 3738
  chr5:373177-373329
  hypo

SEQ ID NO: 19084 - DNA, 258 bp, Homo sapiens; identical to SEQ ID NO: 3739
  chr5:374606-374864
  hypo

SEQ ID NO: 19085 - DNA, 30 bp, Homo sapiens
  chr5:427605-427635
  hypo
gttcgtgccacctgcgcatggggtggcaca

SEQ ID NO: 19086 - DNA, 240 bp, Homo sapiens
  chr5:454060-454300
  hypo
tgtaccaccaagccctgagcacgcggatgcaggacctcgcatcggaagacctggaagccaatgagatcgtgagcctcttgacgtgggtcttaaacacctacacaaggtaaagctaacctggcgcctgtgttggctcttaggtagaagccgtgtgtgagaggggcctgcagctgcttgctggagagccgacctcagggtgttgctctgggcaggtgctccgagcccacagccttggtttcc

SEQ ID NO: 19087 - DNA, 45 bp, Homo sapiens
  chr5:457005-457050
  hypo
ctgagatgatgaggaacgtggagctggccccggaagtggatgtcg

SEQ ID NO: 19088 - DNA, 86 bp, Homo sapiens
  chr5:462317-462403
  hypo
gaagagggtgtgtctccgagccagcccagcatggacgggattttagacgccatcgcgaaggagggctgcagcggtttgctggagga

SEQ ID NO: 19089 - DNA, 166 bp, Homo sapiens
  chr5:463462-463628
  hypo
aaaatgggcaaaagacatgaacggccacctcacattaaaagcaacaccagtgtcctcatcgtgaaactagacgcccgatcttatcctcgaagcaatgaatgctcaacaggacctgctgctcagcaggatggcaggagccggagacgtggatgctgttcaggcttgt

SEQ ID NO: 19090 - DNA, 163 bp, Homo sapiens
  chr5:465523-465686
  hypo
gcctgaccttgtggttggacacgaatgtccacagaggtagacgcgccggccccgccggcttcccgaggccgcccacagctccctgacggacgcttcccagtctgtcctgcgctgcgaggtgctggctgcctcccacggtctcgccctcaccccagacccctgg

SEQ ID NO: 19091 - DNA, 1275 bp, Homo sapiens; identical to SEQ ID NO: 3740
  chr5:472579-473854
  hypo

SEQ ID NO: 19092 - DNA, 81 bp, Homo sapiens
  chr5:476776-476857
  hypo
cattttctctcctgcgtggggaccagcgctgagccatacaggctccctcagggtggggtctcttgcgcgcccctcgccttc

SEQ ID NO: 19093 - DNA, 41 bp, Homo sapiens
  chr5:481006-481047
  hypo
actcttttttttattttgggacgaagtctcgctctgtcacc

SEQ ID NO: 19094 - DNA, 221 bp, Homo sapiens
  chr5:488383-488604
  hypo
ggcctcccacggctcgcccgctctggagcggtggctccgttgctcaccacggtgactgcgtcgttcagcagcgactccccgaagacgatgatgaacaggacctcgttgacatggacctcctcaaacacggccaggacggccaccgggtccacagccgccatgaggctgccaaacaggaggaagtccagcagcccaatctgcaggtcgcctggaagacaagc

SEQ ID NO: 19095 - DNA, 879 bp, Homo sapiens
  chr5:491299-492178
  hypo
tggtcaaagctgtagcatccccggcagcagcggcgggcatcagggctgcaccgcacctggcatgttgagaggcgccagccacgcgtggtctgggtccggggcgggaggcagtgcccgagagatgaagcatccaagaccaaaaccgcgcagcagttctggctccggctgtggctgcagcggtggccgagcggctccggcacacaggctgggagggacggtgcccgatacaccaggctctgcagtcctcctcctctccctgggacctggtggccggcgagtgtggacggacccctacctctgcccagtgccggaggaagagcggcagcccctggccacctgcagcccccaagccgagctgccgagatgggaactcctccccaagcagaacacgtgctgggacctggggacgcgcaggggactggccttggtcacgagggcctacggggctgccagccacgtttctcacctgacacttaccgcctggaggccagggtgcggcaccccgacctttctgagatgaggcagcgccgcccctcccggaccccaccctgatcccggccggggcaacagtggcgcagactcacccatgagcccactgaggaagacgccgtagagggacagcccggtggtggccgcgttccacacggtacccacgacggcgtacaacaggatggtccccaggttgccgaagaagaggcggttgggcatgaagtagccggcgtccagcacgatggggggcagcaggtagaagaagaagacggtgggcgtcagtgtgaaggacgcgatgtggtcggccgcccagacgatgccgcccagcaccaggcccagcacgatgagcagggcgctctcgggaaccacgctggtgaccttgtgggacag

SEQ ID NO: 19096 - DNA, 30 bp, Homo sapiens
  chr5:500550-500580
  hypo
acacacaccaagcacggagaggccaggcgg

SEQ ID NO: 19097 - DNA, 115 bp, Homo sapiens
  chr5:510162-510277
  hypo
gagacaggtgctgggctggaccggggagccgctggaggcctgggggcattggaagcaggaggatccgtgggtgcttgggcccctggcggagcgcggcagcttgttgggagctggg

SEQ ID NO: 19098 - DNA, 30 bp, Homo sapiens; identical to SEQ ID NO: 3741
  chr5:524254-524284
  hypo

SEQ ID NO: 19099 - DNA, 30 bp, Homo sapiens
  chr5:537334-537364
  hypo
gctgcacaggtgggcgatgctttgctccgg

SEQ ID NO: 19100 - DNA, 30 bp, Homo sapiens
  chr5:538687-538717
  hypo
ctgtgcctgcctgacgatgccgcctcagcc

SEQ ID NO: 19101 - DNA, 288 bp, Homo sapiens
  chr5:554303-554591
  hypo
aggaaaataaacgagccgttacctttcaccaaatcgcactgtattttattcatttagggtgtacacacctatctgctcttcaaaggaattttgggcagattgtaaaattacgctcaacatacagcaaggcgactataaatacaaaagcagcactgaggtgctggtgctgcgggtgggtcacgggataaaccaggcgtggggtctgggtcacgggatgacccgagggtgggtcacgggataaaccaggggtggggtctgggtcacaggatgacccgggggtgggtcacg

SEQ ID NO: 19102 - DNA, 162 bp, Homo sapiens
  chr5:554837-554999
  hypo
ttgggggctgggtcacgggatgaaccggggggtgggtcacgggatgaacggggggggggtgggtcacgggctaaaccggggttgggggtgggtcacgggatgaacggggttgggggctgggtcacgggatgaacggggggtgggtcacgggatgaacagggg

SEQ ID NO: 19103 - DNA, 319 bp, Homo sapiens
  chr5:600956-601275
  hypo
cccttctgacaaggtctgtggcgcccaccatggcgttagggccacagcctcctgccccatgtgccaggcccggctctgcccagctccctgcagctgcgccagtgtgtgctgtgactcgtgctcctggtttgtcatctgcctctcagtagacaccacggccttcaagctttctccgctccgtgaccagcagctgggacgggaccagcagtgcatgcggctctggattcatgtttgttgaatgactgactgaacggaggctcccttacagaagtgaacggcgcggccctccctgagttccggcctggctctggataccaag

SEQ ID NO: 19104 - DNA, 30 bp, Homo sapiens
  chr5:602422-602452
  hypo
ccccagtctgtggccgccgcagggcctcct

SEQ ID NO: 19105 - DNA, 17 bp, Homo sapiens
  chr5:613502-613519
  hypo
ttagacggagtctcact

SEQ ID NO: 19106 - DNA, 30 bp, Homo sapiens
  chr5:623489-623519
  hypo
tcatggaaaggccccggtggtggaggaggc

SEQ ID NO: 19107 - DNA, 30 bp, Homo sapiens
  chr5:634028-634058
  hypo
aaggggcgtgaggccgactctcgtggttcc

SEQ ID NO: 19108 - DNA, 31 bp, Homo sapiens
  chr5:638628-638659
  hypo
ggaagggaggcatggccggagctagaggcag

SEQ ID NO: 19109 - DNA, 31 bp, Homo sapiens
  chr5:638894-638925
  hypo
gcctggatgtgtcttccgcttccctgtctgg

SEQ ID NO: 19110 - DNA, 294 bp, Homo sapiens
  chr5:640323-640617
  hypo
ttcttcagttcccaccctgcccgtgtgtggacgcacagagcctgaggtggttttgtggcgccaacacccctttcccctctccctacctgtcgtctttttgaggcatcgtctgtgtgattcaaaacatactgagccgattttgtttacatttcatcctttaagcctaagtgctaatgtaatatttggttttcactcctagctcaggcaagacacatcttgtcatctgttgaagaattcacagcagctcaggacagctctgcgatggtgggtgaagatgtcggctccctggctctg

SEQ ID NO: 19111 - DNA, 30 bp, Homo sapiens
  chr5:646124-646154
  hypo
actcttgctcccatcggcggcctgtgtgga

SEQ ID NO: 19112 - DNA, 146 bp, Homo sapiens
  chr5:653037-653183
  hypo
aggtgagggccacaccgctggagaggacggaagtgccaagcagccgcttccctgttgttctgcagctccctggtcagcaccaatgaacacctgctgcaggagctgagccaggtgcgggcgcagcacagagccgaggtggagcagat

SEQ ID NO: 19113 - DNA, 96 bp, Homo sapiens
  chr5:667281-667377
  hypo
ctacccaactccaaagctcatcgaggcttgactgcaaagtggcagcgacgtgggcacgggcacgcggccagccccgcagcccagggggagtctggc

SEQ ID NO: 19114 - DNA, 361 bp, Homo sapiens; identical to SEQ ID NO: 3742
  chr5:676622-676983
  hypo

SEQ ID NO: 19115 - DNA, 30 bp, Homo sapiens; identical to SEQ ID NO: 3743
  chr5:677184-677214
  hypo

SEQ ID NO: 19116 - DNA, 585 bp, Homo sapiens
  chr5:677570-678155
  hypo
ctcataggccacctcccatgccgaaaccctacacacccacggggctgagaggagccagggctgccactcaggcctcggcaccgagaagtccggcaatgcccggacccctgctccctgggggcccagatggcacgttcaggctcccatgtcagggctgcttctgagaagggcggggtcttgaagcacaaccccctccactccccatggcccgctccccacagaacccacccaggggctcagggccgcagacccccgtaagtcaggtccctcggcccgtgagcccagcgcactcacttgatcttgctgaagacgatgtccacgtcagtgacggtcacgttcctgccgtcgatcacctggcagtccttgcacagcttcgaccagttcttgccgtgcatctccctcccggtggccctggcgtccccgtgcacggcaaagcgccggaaggcctcctccagggcactgagctcaggggatgcggctgccccctcaccagcaccctccgattccagcgacagcctcttggctgcccggtccttcgaggggtcccccggggacttggggggcgtcctgttggcagctttggca

SEQ ID NO: 19117 - DNA, 36 bp, Homo sapiens; identical to SEQ ID NO: 3744
  chr5:693797-693833
  hypo

SEQ ID NO: 19118 - DNA, 31 bp, Homo sapiens
  chr5:750567-750598
  hypo
ctcttacaagcacactcgtggctagatttgg

SEQ ID NO: 19119 - DNA, 30 bp, Homo sapiens
  chr5:853432-853462
  hypo
tcgggcacagaccccgcagaggacagcgag

SEQ ID NO: 19120 - DNA, 82 bp, Homo sapiens
  chr5:873760-873842
  hypo
ctcctggcccaccttgcttggcgccctgcaaatacacacgtcctttctatgacaaaacctcggcatgggtgtctgggtttac

SEQ ID NO: 19121 - DNA, 30 bp, Homo sapiens
  chr5:876061-876091
  hypo
cgtgcagagaagcacgcagatcctgacgag

SEQ ID NO: 19122 - DNA, 30 bp, Homo sapiens
  chr5:881622-881652
  hypo
tgccctgacggcaggcggctccagccctca

SEQ ID NO: 19123 - DNA, 251 bp, Homo sapiens
  chr5:881862-882113
  hypo
tggcctgagaagagccggacgtttgtgtgggggcagctccccaccgcggatccatgcaaagtctcagagcccacaggatggccagggccctgggggagaggcggaaggtcagctcaatgggacacggagttgatacgaagattaggagacaagtcctcacggcgcagatacaaaactgaaagggaagaagtgggcggaacccacggggcacgagggaactggaagtttccgtgtaaaaacagttttcaacc

SEQ ID NO: 19124 - DNA, 92 bp, Homo sapiens
  chr5:885338-885430
  hypo
ggggtgggaaatgcaacgcacgtggggagaccgccttaggggactgtcgtccgttgccaagcaacacactctggccacgcagcgcaccctgt

SEQ ID NO: 19125 - DNA, 38 bp, Homo sapiens
  chr5:886373-886411
  hypo
gcacagccttggctgccggcaggcgctgtgcaggggag

SEQ ID NO: 19126 - DNA, 397 bp, Homo sapiens
  chr5:887037-887434
  hypo
ccaccgccagagcgcggcaggtgccgcacctcccctttaccttctcctacgtgggatgcatgcagcctggctcacggcacagatctgggaagccactcaggatggccaaggaagacaaggatgtcccgtctggattcagtgaggcagtcacgcaaaacaagcccgcaatgctggctgccatccagcaagactgacacctgacacccaggcttaagatcaagagatgcggaactttccaccaaccctcaatgagatgttacagctaggtcatgagcagagagggcggccggggacgtctaccctagagcaaagggggcaacaccatgagggtggcgggtggatggagcacgtgttcactgtgaggctcccttcgggcacaagcgacggggggcagagc

SEQ ID NO: 19127 - DNA, 193 bp, Homo sapiens
  chr5:902317-902510
  hypo
ttgttgtcaatatcaccgggtagaatggggacacgggaattgagtggactcgagagtatgaaactgtagccaagtgttaaatagaagcttgaagggtacttggcttctttaagtcagttaagattgcgtgacaaagtgaccttaaaacacaatgttcttttaaagagcagacaggccccgcatactgccctca

SEQ ID NO: 19128 - DNA, 101 bp, Homo sapiens
  chr5:909582-909683
  hypo
gtctcaccacagagagcgtatctggcttcctgagaagcgctcgttttggggtcagctgcaggaatgtgtgccaagaccagctcggtcggggagaccctaac

SEQ ID NO: 19129 - DNA, 30 bp, Homo sapiens
  chr5:912368-912398
  hypo
gggacgtcagtgaccggctgtgtttacctg

SEQ ID NO: 19130 - DNA, 229 bp, Homo sapiens
  chr5:913179-913408
  hypo
ttgggggttggggaaaggagacggagctctgtggagctttgcctggagaatgccagtgatctgaagactgattctacagcagttttgctgccaaggagccccacgtgatagcagatcctgcgaggaagtcgtgtgtgttggaggtcctcacgcaccttcagtgtgggttccagccctcgcagtgtgacgtttatacacttgtacactcgtgctgtgaatccaggggctg

SEQ ID NO: 19131 - DNA, 140 bp, Homo sapiens
  chr5:919455-919595
  hypo
aaaagatagatgagtgataaacgtgccatttcatttacaccacttctgaaaccacacttgaattctggaggccgctggctcgtgcgtctcaggcaggcccactggatgtggtgggactcggcagtggcagggacttctca

SEQ ID NO: 19132 - DNA, 31 bp, Homo sapiens
  chr5:936463-936494
  hypo
ccatggtctgttgtcacgaggcctgtgccct

SEQ ID NO: 19133 - DNA, 31 bp, Homo sapiens
  chr5:962517-962548
  hypo
caggggccagggtctgcgggaatgagggggc

SEQ ID NO: 19134 - DNA, 31 bp, Homo sapiens
  chr5:1013562-1013593
  hypo
caggcacagagggaaccgaagggagttgcca

SEQ ID NO: 19135 - DNA, 240 bp, Homo sapiens
  chr5:1029656-1029896
  hypo
cagtgaaatcccccacaagtgcgctcagaatttttagaaacacggcacgggctgcgtttacattttcactgtattagctttatgcgtggagtgcgtgatgtgctgtttctcacttgacatgttcagcaaatcgtgggaaacacttaaaaatccttaaaaaatactccaccccgtccaacccgtcgcccgctgcctgtcctcaggagccaccgcacctccggctcctctgagttctggcac

SEQ ID NO: 19136 - DNA, 30 bp, Homo sapiens
  chr5:1031779-1031809
  hypo
tttttccccattttccgtaactggtctcgg

SEQ ID NO: 19137 - DNA, 192 bp, Homo sapiens
  chr5:1032281-1032473
  hypo
gaccccaaggaggggcctttccgggaggaccagtgtcccctacagggtgagtgcagctcccgcagccctccctccccaaactcacagacttcatcccgtaccaaggcaacgccgaaaaccacccttaaaacaaccccgtgtgcggagcgagggcacttcccaggcttagacgcactttgttcttaaaaagcc

SEQ ID NO: 19138 - DNA, 428 bp, Homo sapiens
  chr5:1033253-1033681
  hypo
gtggttgcagttgggggccaccgtgggctggtgagaggagggcacacccggctgtggctggccgggatagggcctccctcccctccgcaggggtcccaagatcgggctctcagctcaggcccgtctggacaggatcatggtgtggtgaggggagagcagcgagggtccccaatggcgggccacatcctccatgtgccctctgccagccccttcgcctcctcttgtccccctagtggcactccccgctgagaaagctgagggccgcgagcacccgggacaactcctcagcgcagatgacggagagagggcagcaaaccgcgagggcccgcgaggaccgggcgggcagcgcctcaacattgacgtgggtctctctccggcctcacttgcgggaacacgtccctggggccgggggctcagggacaggcatg

SEQ ID NO: 19139 - DNA, 383 bp, Homo sapiens
  chr5:1034277-1034660
  hypo
ccttccccctgtggagttgggcgtgttggcgtgggtaggaggcgaggtcccggcccccacgtccccccacaggcactccagtgcgatgtctcggtggaggaggacgaccgccaggagtggacgttcacgctctatgactttgacaactgcgggaaggtcaccagggaggtaggtgagcttgtgtttgcgtcaggtccacagtagtagacagacggggcagacagactgtgctggcctcgcgatacctcagggggcaggaggggacctgcctgctgcgaggtcctcatgccagctgggcttgcgtctccccagggcccagttcacgtgtgtttctgggccgagcctgcgccgcccatttctgcggctgtgcttcccacactgca

SEQ ID NO: 19140 - DNA, 521 bp, Homo sapiens
  chr5:1039233-1039754
  hypo
tgctggggagagggagaggctcgcgctgggtgcggctcagaacacggggacttgcacattcacggtcccaacactcacggggcgacttctgtgacatgtcagctttggagaaaggtgtgtcctgcaagggtcaggagacggttgcaggccagaaggacgtcccagtgacgtttcggagtcttgcagcctgcaggggtccatgtggttacccggaacaggaaccgtgggggtgctttccgggacccagggggcccgtgccaatgtttctgagtcttggagcctgcaggggtccacgtgtttaccctgaacaggaacatgcgggtgttttccggaatctggcgaggccgcgcggcagttttgcatttacattccttgttttgtttttaaggataaagcggtgctgggtggggtctgtgggaggggtttgagccatggcggaagatccctggtgaatggcttggatgtttgtcgcctccgagtctcatgctgagacgtgatccgtggtgctgggtggggtctgt

SEQ ID NO: 19141 - DNA, 30 bp, Homo sapiens
  chr5:1039999-1040029
  hypo
gtgaatatggcttggcgcccttgccgtggt

SEQ ID NO: 19142 - DNA, 79 bp, Homo sapiens
  chr5:1046856-1046935
  hypo
ttggttagtgtgtgaatgagtcggtgggttagtgtgtgaatgagttcgtgtgtgaatgggtgagttagtgtgaatgaat

SEQ ID NO: 19143 - DNA, 18 bp, Homo sapiens
  chr5:1046994-1047012
  hypo
tgggttagtgtgtaaatg

SEQ ID NO: 19144 - DNA, 260 bp, Homo sapiens
  chr5:1049742-1050002
  hypo
ccaggagtggacctgccggggaaggggcggctctgtctctcacactttcaggaaccacaggcccttcccgtgcagctacaaccctgcaagaggggtccgattccgcacgtcctccccgcgattctctggttttggctgtgaccatcacaggtgtgagttggcatctcacgagttagaacacgctgtccccactcatggcggactctctggtgcctccatccttatataaattaaattataaatcgaatggccgggcatgg

SEQ ID NO: 19145 - DNA, 30 bp, Homo sapiens
  chr5:1050398-1050428
  hypo
gctggtcagccctgacgctcctgctagaaa

SEQ ID NO: 19146 - DNA, 222 bp, Homo sapiens
  chr5:1051291-1051513
  hypo
aagctatctcttcagtgccaccgccgcctccatgcaaggcacaggccatggcaggggacgcccgggactcagccagacagacctgacaccaggcgccactgctgcctgaggacctcccacgtcgggtccgtgtcctccttccctggagcaccggggtggggatggcacgtgtgagccagctcagaggctgaactgtgtgccgtgctcctggggtggggtggg

SEQ ID NO: 19147 - DNA, 943 bp, Homo sapiens
  chr5:1052176-1053119
  hypo
ggcttcttgtgacctgcgagaagatctggccacgtccaggtcactccggtagcagcgtctgccctcagatgcaaggaaatcgtccagccacgccctgatttgctgagcctgttaaggctgaacaggagagccctaggtgacgggcctagaaacttccgtaggaagccccatgggcagcttgggcggcatcactgggggacaggtgtgtctgccgtctgtttccctgggccaagcccaggcccaggctgcccacgccgtcctccgtgcctgtcccagagtgccgtgatgctgttgggcattaggagtagatggtgatcacctcccggccgccacccctgaccaggaggactctgttcagcccctcggtcaggacttcaagaaactccatgtctgtggtcaacagagttaaggccacagctgatcttacctgagcgtgtgtagctgaaatcgtgataggagtgaggtttatcctctcctggttagctaagatttggtttgagaaacccagagccaaggtgaaaagagaggtggggattagagagaccccccaggcggggaggagcagggcaggggagagaggggccagtgctcgggaaagagagggagcaccgtggccacagggaggacgagcagagacagcgacacagcccacggtgctgaccccacccgacagggaaccccagccacgggactgggtcctcaccagcctacaggggacctgggccacggattccgatcaggacgcatggaggacatgccctcactggccccagttcttggtgccaacctggcagggatgtgccaggcgtcaccctgtctgtgccaatacgcccagatgcactgcggagttctccttccaaagcacaaattcccaaagctgcgaccaattgtggccttaaagccgagagctgggctcctcacctcccaccgttgtcggcgcagg

SEQ ID NO: 19148 - DNA, 1074 bp, Homo sapiens
  chr5:1053385-1054459
  hypo
acccacaaacccaggtcttagcgagaagccaccagggggtgcccgcacgctcagcaggcacactgcaagaaaggatacagttctcgtctccctgccggtttttgggaggacctggcatgttgagcaggaccagctgcgcatcctgggacttgttgaggacgacgccattgagcttcacagccgtgtgcatccgcctgacgttggactggtccctgcaggggaggtgggcacggtcagcgggcggcgggtgcaccccacgctccggacacgaggctgagctgagccctgatgagctgcattcacacgtgttggaaagggctgtgtgagtcaggatcaggcggattctctgaccctgaaggatgcagaagtggcggctccgagcgaaaggcgctgactgcagccagggcgggcgttcagcagcgggatgctttggcctccagggacctagaactcagcccactaaggctgccaagcttctaagggctacagtcacacaacacaaaccgcaagcgctttcctaactacatctacatctgcaaagcaggcagaacagtggaagccgtctgggtggcccatgtgcctgacgccttcaaggctgacacgcttctcttgacatctacatcatcgcccctaaaccccacgtcagacactgccaaacacagacccgtcaggctgggcacacatggcctcctctccgagggtcctgatacaactgggtccaaggggccggaagctcaggaaggaaaggcccagagtcccccacaccggcctgtgcagccgttgctgctgaagctcccaggcctgacaaggacagggtatgccgaggactcagctggaggcacaggccctcagtggccactactgggtcccctcctacggcccaccctgcccctgtctggccaagggctaaaggacaagcacttccaccgtgtggccgtccagcccccgccttccgtcctcacaacgcagctctgctccacgaccctccctgtctgctctctgaagctgctgtggccggtccatgtctcaaagcgtccctggcggcctgggcccggccacagccccacaggaggc

SEQ ID NO: 19149 - DNA, 61 bp, Homo sapiens
  chr5:1054676-1054737
  hypo
gacttgaaagtcggagcgggtctcaggccagctgcagccgtgcggtcgtgactgtggcccc

SEQ ID NO: 19150 - DNA, 358 bp, Homo sapiens
  chr5:1055412-1055770
  hypo
gacatgcacactaacgtacgtggacgtgcacacaggcaggtacacgtccaccggcaggtgcgctgacaggtacatgcgagcacgcacacaaacagacatccgttaagtgtgctcccggggacgtcacagtaagccacgcacatctcacgcccgcactgcccagaagaggtcagggccgacctccagatcttcggagggcttctcccagcccaaccccgagaaactgctgggccaagagagtcaatgccatcccagacgcacgccacacatgaatacaaagcccacgcgttgtccattctggcccaccttctcctgaccctacaggcctgtggggacctgcccccgccccgaccaaggg

SEQ ID NO: 19151 - DNA, 1965 bp, Homo sapiens
  chr5:1056092-1058057
  hypo
gaaaacatggcccaggcggttactggcgggggcaggcaggggacagagacggcatcgaggactcccagggagcaccctgggggtccgtccagggtacaccctcccacctgccccggagctcagacgcaggtagctcctgccgagggtccgaccacacagagaactgatctgcacccctctccgcctggaggctggacagctttaacatggaaggcattccaggtgggaacgcgactcagctagcgcctgacccagaaggacgtggatggactcactgacgggccctgcgaggcgcacgcctcccctccactccggagcggctcggacacctcccaggtctcagttcctgggcctcacttaggaagaggcttcaggcgtgtgctggagccaccgtgaacagaggggagcgaaggcaacaggaaactgacgtgggagccgcagcagctctgggtgagctctggctgtacgcggacgcacacaagccaccgtgcacggggcaggcacaggcctagaacacgcgcacagacacacgcaggccacacacacacaggcatgcagggcaaccgggcccggaaggcgacctggttgtagcgagtggacttacaggtttccccattctctatgcaggagaaaaaaacaagagtgtgttactgacttcaggagagagcaccaggctgttccagatcgcatggctgcccaggaggacgccgcctcatcccaccccacagggcccaggagcccccagcccttcctgagaacctggctttagggtctggctctgaccccgggtgagaggtgtctcttgcgctctcatctggaactcagaggctgcgtctgcagaaccaaacccacacccgcaaggaccctgtacagccctggtgttcgcagcccaaggccacaggtgggagccttggcgtagggcaggccctaaggcccgacagcagcctgaactacccacagggtgaaggccaggaattctgtgcccagcggcacaagcctcctcgcctccatggaacagacccatctgcctgctgcagtgaggcttgcctgagtaaagcaggcctggccgcagggctgacttcagggctggcccaggtaccaggaggactgctcgtcacccagctgtggggttaacatcaggacccaccctaggtcctacaaggacccctcagcgcttggcactagaaggacccctcagcgcttggcactagaaggacccctcagcacttggcacccaggtcttacaaggactcccggccttggcactagaaggatccctcagcgcccggccacagggctgaactcagggcccggccttggcaccaaaaggacccctcagtgcccactcaggcggctccctgttctctaacgggcccactggcctgcagggttgccccgaagctcttcagtggtcagggaagggactctgtcctcactgccgggccagcactgccaggatctgttccccccaggccacacgcacggacactcacggcttcatgctgaagaggtctttgaaaccagataggctggtgtctctgctcctgtacttctcagcgatcagcttctccctggtccaggtcatctgcaccttgtctggcgtaggcggcgcttgggtcctggctgccgccgcggtgtgggacgcggtgttcctgtcgtggatcagctgggcctggcgggcccgggacttggtgagaccagccggtctcaaaactcctctgggcgagagcgacccgggatgccaggccggaggtgagggcagctcacagaacctgaagggccctgtgtgcctgacccgggacccagcctggcgtcccacactggtcctgcgccgcccccgtgactgcctccctcctcccaggcttcccgaccaaacgctcaccccctcaccttcccgccctggccctgaactggaaaggccccatgaccccgtactgacaggaggtgacacgtgctggcagagtc

SEQ ID NO: 19152 - DNA, 347 bp, Homo sapiens
  chr5:1058826-1059173
  hypo
ccaggcctctactcattgtggcgcccggcccagcctaaatttcccatggccttgaacgtgaaaccagagcccaagggctgcccgctctcggcagagccagcgccgcccacctggcccgagggccaccgtgtaagtcactagagggtgtccacccagcgtctgcacagcagctcatccaaacccttctgcagagcggtgacacctccaacccccacctggcccaggaggggcccttcgagctcgagcttgctgttcccgctcccggtccctcctcggtcagcatttgctgactctccacactgaacttcccatgaagccatgggtggattcttgttcctagctggacc

SEQ ID NO: 19153 - DNA, 469 bp, Homo sapiens
  chr5:1059425-1059894
  hypo
gctgcttagtgattccggctgtcagcacatatggccccacacgcagacccgtgtactgcaggttcctgctgaggccaaggccccagggcaggcaaatcccctgcccctgcctccgccgtcactgcagtctcagaaaaccaacacctgcacctggtctgcagacacacgtgtgtgataccagcctggtgggacccacgaagaccccatgaggccgtgacctcacagagctgagcatcccgctaccaggtgacccccgtgctgtcctccagtgcgaagtgaccacaaagacacctgcccttggggtctcacagtggccatggggcccaggccagtataactcaggtggatacacccagacgtcctcagcagcctacagttacccacggagccaaagccgctgcagccaggcggccagcttccacgcacggaggctgcacaggtctgtgtcggggggtggggggtggggggg

SEQ ID NO: 19154 - DNA, 217 bp, Homo sapiens
  chr5:1060377-1060594
  hypo
aggagggtcccagaaaagactcggcgaagtcggctatacttctcagaaagcctggtgtctgtggccacggcccccacgtacctctcgctcctgctcgttcttggacagctgcatctgcttcagcatctgcgacctctgctccatcattagtgtcctctcgtaggtgaaagcagatatgtcgttttcaacctagaaagttcccaagcacgtagtaagc

SEQ ID NO: 19155 - DNA, 551 bp, Homo sapiens
  chr5:1060647-1061198
  hypo
cgagccgccctgagcggtgggaaaggccacgcgtcccgggccccacaggccccctctggctctcaggccccccgcccagtggccaggaaggtgtgagcgcacgatgggcagtcacgccgcacacacgctctgctcatgtccctccccgggaccctccgaccgggcacaagggcagctgtgagggcaaggccacagccacaaaccaacctggcacacacggctcagggcgaggcactgccccatggggctgcatgatccacgctcacaggtgtcattgtctatgctcaggggggcttggcaccatgggaaacccacccagaacacatggagaagccacagcacaacctcagcgcccgccatgcaggaccctgggtctcacccattgcacccaccgtgcgggacccctgcgcctcacccggaacatccacagtgtgggactgctgcgtctcacccactgcacctgccgtgcaggatccctgagtctcacccgccgcacccgccgtgcgggatccctgagtctcacccgccgcacccgccgcacctgccgcatc

SEQ ID NO: 19156 - DNA, 196 bp, Homo sapiens; identical to SEQ ID NO: 3747
  chr5:1061605-1061801
  hypo

SEQ ID NO: 19157 - DNA, 30 bp, Homo sapiens
  chr5:1062593-1062623
  hypo
caggcctgcagccctcggcctaggaaaggt

SEQ ID NO: 19158 - DNA, 841 bp, Homo sapiens
  chr5:1062886-1063727
  hypo
gcttcctgggggacagcgtgacagtctctatccagctttatgtcttcccagcacccacctccaggagtccaggcccctgaggacctgcaaaaccatgcgctggggtcacgggagccggaagaaaccaggactttgcgggttctgacttcaagaccagtgttgtcggcgtgatccaagtggggtcagaacccacaaagtcccgggaccgccagcaggaccggaggggaaggcacagccgtggatccgggtgggctggtagcgagcaggcatggttccatccagcacaaggggcccaccagatccccaggatccagagctccatgcttgggggccgggggcaagcgctccaatgccaggcctccgcccatcaaccccgtcctctccaggcgtgaaggacgggacgagtctctgtccaggccctgcctatagctgaccgagggcctgtctgtcccacgtgacagctgcagcctggcctcactgaccagtgcccctctccccgggtcccgactgctgatgtgtggtttccagccgtgggaaggtgagcccatctggggagagcacccaaaacgggaggtgctcagaggtgcacccaccatggcaacaccactgaggtgtgaggtcctggacggggtcccgggccgaggaggacacgggaccatggaggacacggagatgctgatgccggctctagggcaacacccacacccgtgttacacgaggtgtccacaagcaacacacggggctctgtgctttctgtgatgtcctggcgattccaaaaccaagcctccttgaccaccccgcaaggcctggcagcccccgccacaatcgccaccaccttctc

SEQ ID NO: 19159 - DNA, 354 bp, Homo sapiens; identical to SEQ ID NO: 3748
  chr5:1064041-1064395
  hypo

SEQ ID NO: 19160 - DNA, 1629 bp, Homo sapiens; identical to SEQ ID NO: 3749
  chr5:1064611-1066240
  hypo

SEQ ID NO: 19161 - DNA, 59 bp, Homo sapiens
  chr5:1066840-1066899
  hypo
tgggaggaagagactgcgtggaggcacaggcgcccagggtcgcccgggggcccaggagc

SEQ ID NO: 19162 - DNA, 95 bp, Homo sapiens
  chr5:1068168-1068263
  hypo
aacagagcacaagggcgcgcatgagcctccctggcgactgcatgagtcacgaagctgcacgcttcttagagaaatgtccatgctttacagccttg

SEQ ID NO: 19163 - DNA, 808 bp, Homo sapiens
  chr5:1068665-1069473
  hypo
ccaaaggcagccaagggaaggcggggcctgcggctggctccagccctcgcaaccaatgcagctaagtcacagccaaaggctcgctgagagcagcgggggcagggtgcgctcgtcctcccgtccgcaagagcgggctcctgtctgaggctgccccagaccccccagccgaagggctgtcggacggagaggatctgcctgtgagctccgttaacgtgagagtataagtgagcgcagctcttcccatggccgtgaagactgtggcagagcgtggcagggggtcccgtcatcccccagtcactgcaatccctgccctgtccctcgtgcgcacagacgcgccctcacacacctccagggaggccaggcagtgccaggattcttagaatccacgccagcagggcagttccaactccgggattcctcctaagagcattccagcatgggataaggaacacggaaagggacatatggggaccaggaccgtgaacatccccccgaaaaccacgatacctaaatccacgggttcacagtcaatagcagctaacgcctgaacccgtggtgagccatgacgccgccgtcagggaaagggaaggcccagagcatctcctgtcttccctgggaaggcgaacctgtgcaacagcctgagaaggtggccatccacgtggccaacgtggcgggagcggcgggggccattttttacctccatgggatcctggccctaggccacaccacctgaggctgctaccatccacgtgcccacagccctcttgagcagggttcccacccctaggctgaccggcccagacctgga

SEQ ID NO: 19164 - DNA, 333 bp, Homo sapiens
  chr5:1069708-1070041
  hypo
ggaggaggctcgaggcgcccacggcagccagccctgcctgggaatgaggtgcccttggcatgaaaatcacgcaggtgggcactcaaaagctccctgctttagcaagaaatacagaagtaactccaggtgacgtgacgtgacgtgacgtgatgggaccccacaggctttcatcgtgtcatcattccgtttctggatagtgtgaagcttcccataagaagtttgaaaatcagagaaatgaagacacaaagtctcagaccccgatgtcctggggcagccgactgcagcagcagggctcagagctggcaccagcatgctacacgcccggggcactca

SEQ ID NO: 19165 - DNA, 458 bp, Homo sapiens
  chr5:1073490-1073948
  hypo
catggcgggaggaggcggtcccagggttcgcccttggaaagctaatggccctcacacctcccaagcttcccggggtgcggctggtgctcccaggccttagcgcgctgctctgagctcaaagccaccgccacggctaaaacacagcagcgccacgcacagcaccgtgttgacacgctgcgatgaggacatgccagggcacgtttcctgtgcagctggggtgggaaagaggcctggcccccagaccccgcccggcccacctcctcggcccgctgagcctccatgtgcttgtccaggtacgtcccctccagcaccgagcccacgatggtcaggcccttgccggccttcagctgcgacgtgaaggacagcaggcgggggtgcttcacggcctgctccgcgtccaggttcagcatcaccagcacctggggcctgcagccagggtggggcggctgttaccacgg

SEQ ID NO: 19166 - DNA, 1897 bp, Homo sapiens
  chr5:1075711-1077608
  hypo
cactaggaaaacagtcactgacgcctgacgaccatggctgtactcaaccacctctgaggggtgacgtggctccctgggcccctgtgggagctgtcactccaaaacccagtacatagctccagctcccagcgtgcacacagcacctcggctgtgcatgcaacaaggggctgaagcgtccacccagcgcctgattcctggggaggggagttaagaagacccacagccctgatgggctacgccccaagcctgggaaggctgggctgaccacgggaggtacaaggcacatgcagacacctgggcatcctcgtaaccagaggccttcctcaggtgcagtctcatcagctgcgcaggggcttactccgcaaaggaacagtcaaggacgcgctggggtcttcaggcccagagcagctggccttgtagaggcacccagtgtcccagcctgtggggctcctgacgcctgtgctgagcggcctcaccagtggcagaggcacccagtgtcccagcctgtggggctcctcacgcccgtgctgagtggcctcaccagtggtagaacttgaagcgtggacgccagttgggggtacgtagcagggtctgcacggcgcaggccaggttcacgaacaggtagcacatgaggaagaacctgcagggacggccggccactgatacgggcccactgggcccccctgagcccccagtcactgccacctgggagaccacccttgtcactgtccctcccacctgcgccttgtctccccatgtctgtctctgcacgtgagctgactcagactgattccgaatcaggccccctcaggttccagccatcctgtgaccacctggtccatcaagagatgggccatcgtcccttccccagcagccgtctgtccagccacactgtccctggctgaccccagcgggcggctgcctggaggcctgtgtacttgtcttccccggcgcaactcccttcccggcaggatcctgactgcccacagctggccatgcctgtctactgcttgtcctgagcaggacctcccatccacactgccccacgctccaggcccatacacccatccccaggtccccgtcctgtgggggctcacatggagaggatcggggccacgctgtccagagaggcgatgaggatgccagtctcgcagatgaggactgtcagcagcagcgcccacgtgggctccccgttggccttcccgtggccaaacacctgcagggagaagggcaggaagatggggcagatgacaccacccttttaggagagaagctgcaggctggtcaggtctagcccagatgaatcttaaagacacagaccagcagaaacgcctttcacagtaggtccccgggacatcacgcggctggcctgggaagaagccctgacaaagggctgcagcccaggaggcttcagagctgtgcctacgcccggcttgcctgcaacctgtgtggccccagcctgcccccccgcctcagtttccccgaccacacaacacaggaccagcgtctccagggcactcgcggttccccagaccctgtggtgacctttctcatcaggccaccctcacctcccagaagctgaggcccacggggcctgtgtgcctgtccccttcctggacaccatgccctaggcccggctgggactgaagatgcaaccacacaaaggccctgcgggtcggcaccctgccgagggaccagcgacgggcaaggatggctctgccatccacgaccttcccacagctgcccctgggcccaggtagcaggaggagccacaatcggcagctctgggcacagcacacggacaggacccatgcgggcgtccgtgcaatcctcagagcagccacacacactggctgcaggtggctggtgacgccacctcccacgggctgaagagctc

SEQ ID NO: 19167 - DNA, 767 bp, Homo sapiens
  chr5:1077829-1078596
  hypo
ccatggggtccaagccgcgggcatgcgtcccacacacggcactgtgaggatcccgcaggggaggagagcccccgaccctgaccttccagggtccccccgacgagggtgcgggactcacctgcaggaaggggacgatgccgtcacgggcaatggcctgcagtaggcgcggtgcccccgtgaggctctgcaggccggcaccgcaggtggagaagaaggagccgatgacgatgacccagggggagggccaggccagcatgccgatgaccaggttcccctgcagggcctccccgaacctgcaggcaggcgggcaggcgggcgggcggctttcagaagtgagcctgagtcagacaaaatgtcttctcccacccagagcgaggggcccagtgcagtgggggcgactccttggaaagctgaggcccggcctccagtccccgttggctgaaacctccaccaggctctgcccagcatggccagaatgctctggagggtcttcagcgggggagggggtcctgctcacctcagggtcgctcttgggagcagggaagacccagcctggcatcagcttcagtcagggaccacccaggacccccggggccttggggctgccagacacgcacaccccatgaggatgcagggtcagtgatgacctgcctgggaccccactacttctccacttgccagcagggctgagggatctcccagggccaagcctcacccgtccacacccctgtggcctccccaggaagggcctgcgcccccagccgcat

SEQ ID NO: 19168 - DNA, 146 bp, Homo sapiens
  chr5:1078960-1079106
  hypo
gagatgcactggccagcgggccgcaggatccaggtgggcggggaccgttctgcatcccatcccatcccgggcacgtcctgtcccccgtgtcctcagcgcaccctcctggggctctgtccagcgccacagaacggggccctggggtg

SEQ ID NO: 19169 - DNA, 31 bp, Homo sapiens
  chr5:1079364-1079395
  hypo
ctcccagggaggatgacgtggtgagagcaca

SEQ ID NO: 19170 - DNA, 795 bp, Homo sapiens
  chr5:1079674-1080469
  hypo
ctgcccagaaagctggaaaggcggtctctggggagaccccgagcgtgagctgcagccgaggctgcagtccaagctccgccagcccacgctgcaatactgcggctgaggggatgcgggcccaggcacgcggatgagcacccacgtctactgctcccctggatccgaggacgagaaccgaccccgtcactgacccccacgccccccacacccagggcttctctggagcctgtgttaatcccatggccaagggtcagcccagagacggtgctgagcaatggctcacaggcccccaggacctaaggactttgggaatgagatcctagaacgactcagcccagccagccaggccagcagacgctgcgacccctcccgctgtggcaccaccttgctctagggagccacggccggggatgtttccacacaatcggctcctacaaagctctgggaagccgggtcggtgggggccacttcacgcctggctcggtcccatccaaggcgcagcctgaagcacccattgctcggggtggcctgggaggcagcagagcccacaatccagtgccgcggagacacccggagccacgcagaggctctgcccccacgccctccacccgcggctcagagacacccggagccacgcagaggctctacccccacgccctccacccgcggcgcggagacaccaggagccacgcagaggctctgcccccacgccctccacccacggcgcggagacaccaggagccacgcagaggctctgcccccacgccctccacccacggcgcggagcgcactcag

SEQ ID NO: 19171 - DNA, 94 bp, Homo sapiens
  chr5:1081413-1081507
  hypo
aaatacagacattaaccgggcgtggtaccgtgtgcctggggtcccggctgcccccctctacaaaaaatacagatattagccgggcgtggtactg

SEQ ID NO: 19172 - DNA, 1131 bp, Homo sapiens
  chr5:1083625-1084756
  hypo
agcttgctgaccatgacggaggctgtctccctgccacaccgtgtttggcttctatggctctgccaggggtgtgtacagggacccccaggctcatcagcagcagctgggaaggggctcggccaggcaggaggaattggggccctgagagtgactctaaggcgagagcagccaccagggccagcgcctgctgcccccgccaccccccagctccagctgcagccctgtgagcctcacccaggaagacaccactggccgcgcccgggatgccctggatttcggtgacgttgttctggatgaagtactcgtcacaggcggcgctgggctgggagccgttgcagaagaggccccagagcgcggaggtggctgagttgttgtggatgccgtaggccttgacgcaggcatcgaagctgcgccgtgacagcgtgcggttccccaggaggcagaccctgggcgggacagggaggcacggcacgtgtgctgccaccgaagtggcttttactgccccacccagctcccccaacgggcacccatggtgtcgcccgcgagtggctcctggcaccctgcacctcccaagacaggaaggccacagatcacgccagggaccgggcccaggccaggctgcagcaggaatgcaagggccagggatcacactggggaccggggactggggaccagggaccggggaccaggccaggctgcagcaggaacgctgtactgtacagccgtcccctcatccatggttcggccacccgtggtccaaacgtgctaaatgaagcgttctagacgtaaacaattcacacgttttccaccgcgcggtgccgagtagtgaggtggaacccagcaacctccccccgcgccagcacagccacgctgcagccgctccctccccgaggccctcggcggcgtcctggccgggtcagctgtcacaatctcagtgtctgagttcaagccaccctcgtgccacgtgccaacggccaagagcacaggagtgccgcccccgacgtataagccaggcctgtacgtggaaaacagtctacacagggccgtagcgtcaagcatcggcagggggtctcaggacgggtccccgagggggagggcagctgtgcttccctaaaacgggcttgtggggtt

SEQ ID NO: 19173 - DNA, 1284 bp, Homo sapiens
  chr5:1085199-1086483
  hypo
gcccacgggggttcccgccacggtcacacccagcccaccccttgcggggagctcggcgtcaaggatgatggacgagaggcgggcagagcccatgggacctggccccagccccacacccacccacggctcagaggccccgagactcacgggatgtccggggggtcgaaggcagacttgatgacgccggcatagatggccaggatggacagcacgacgcaggccaggaagaccagcgccagcttgttgacatacttgacgcccacgaagaccaccagggccatgagcacgagcgtgcacgtgccgtacacacgcatgttgtgcagcatggcggccgcctcgccacctgcagcctccgcctggaagatggccgcacccggggagatgtacgtctgtgggaacaaggccggtcgggaggccgtccccggacacaactccccagtgcccgtccctcccgcaagcccccagcgccacacaggggcctcctcccaacaggtgccggggccatcgggacgcatccgtgctggacggagcccgcgggggtcagcgcacaggcaagggacggagcccgcgggggtcagcgcacaggcgagggacggagcccgcgggggtcagcgcacaggcgagggacggagcccgcgggggtcagcgcacaggccatggacagccaggggcctgaacgtttcccaggaaccacccgggagccttagagtaaagcaacttcaggacccggggcatccgcatgtccgcactcaaaagaaacaccttctgctaagaggaatgtgactgctgcccagagagctcggcccaccccggctggacgtcctggacacacacagggtctgaccacgccggcggggggcaacctctgttctgcccagattcaagggaagggacggagacgtgagacagtgctgctcagctccctcaagaccaggacaggactggggtgcagcaggcatggagggcatggcacccacccccaccaaaggggatcctgggagtgcggcagccacggcacccggggcaggtggaaagatggagggacatggccaggggactcgggttgggacgggtgtgggtgcgaccccactgaaaggtttcagaaccttcttggccatgtggctctcttcaggaacccaggaggccaggaaccaggtctggcagcagagggaggggcagaaagactggggacaggggctcaggtgagcgtctctgaagccctgcagggacagcgggtttcagaacctcagcaggaaggacagcacccgtcggccagagaagggc

SEQ ID NO: 19174 - DNA, 31 bp, Homo sapiens
  chr5:1086827-1086858
  hypo
gtcgctgctgagtggacgctgcccagtggct

SEQ ID NO: 19175 - DNA, 229 bp, Homo sapiens
  chr5:1087126-1087355
  hypo
atcatgtagtaggacccgccagctgcggagacaaaggcggcagccgcgggtcaggggcgcacttggactcggacccgaggtgcggtctgcgctgccattcacgggcaaaggagggcctgtctctgcgaaggcagcgtgtagaccctcgtccacccgcaaagcagcacatggagacgcttccacggtgaactctcccctcccgaggctcggcacacgttccacaccaaga

SEQ ID NO: 19176 - DNA, 1683 bp, Homo sapiens
  chr5:1087613-1089296
  hypo
ctctccctgctctgagcagtgcgtgtggcatgtggaaggggtcctaatggacgcggccatcgtgaagcagagactggtcccttggctgcggagggagacccctggtgaaggccctcgtgctctcctgaggccggggaagtccgctgagcaccaagcgatgcccccgtggggatggggaccagctgcgtgaggacctggtgctgagcaagcccagccgttaacacgcgcagcacacatgcactcagaagcagacgtggcagcgtctccgttcactagttatttcgtatcgtaattcgtttattactaattaacagtatcatctcagtttactagttattacgtattgtaattaacttattactaattaatatcatctcggttcactagttatttagttattatgtattgtaattaacttattactaattaacaaggtcagggcagtgttttgtcttcaccttccctcgtgagatacaggttccaagaactcagcctatggcacacgctgggctacaggagccactggaatcgcccgtgcctccccctccccagcccgctgcctggtgggcactgcctaccctggcaagagacggtcaccacgcagcaaaatggggaagaaaaccaaacagccgtgacctcacggctcaaacgccagaggagccagtggagaacacgcagaaggcccggctgagacccccaggcagcccccggcccggcctcgccaagcggcctcctcgcggttgccgtgcggcaaaacacagactcctctaacaggactcagggccgcggctggcgggcaccccttacctgggaccacaccgttggtagcgatcgcactcatggaaatggcggtcagcattgtctgcaaaaagacaggcagccatctgaggagagttttccaacagcctgccggcatcgcaacactcccaagtcagggtctatgacccggctcccgccgaatgccagcccccaactccagggctctccatctcaatggagtggctaggaaacaggacctggaggctcccgggcaccaggcatgcgtgtcctggttcccaccccttcccctatgacagcgacccctgaaagtgcccaaggtccttccaaactggaggtgatgtcatcaaaacacagggtgtcccttcccttggaagcctcagcccccgggtgccgccccatgacacccaccactggctgagatgcctgtccgcagacacgggtaaatgaggtgccagcacgccagtcaacacgccagcactaaccccggacagtgtggcatctcatccccgcagctgcccggctctcgtggaggagacggcgctgaacgacgtctacacgggcgtctggggagggccctactgtccggctgccaccgcccgaaggcacaaccacagcggccaggggagacggcatctggggagagccctactgtccagctgccaccgcccgaaggcacagccacacctggccgggggagactcacacatgtgcagcacatggccacgatgaggaaggactccaggacaccagccacccccacgatccacgtcaggcgcaggaagaggatgacgcccaggatgttctgcaggcacggcaggtagacgccgatgaaggtgcccatgcgcggagcctgcgacagagcatagcgtgtcccaggggctcgtaccccacacccagagggag

SEQ ID NO: 19177 - DNA, 242 bp, Homo sapiens
  chr5:1090421-1090663
  hypo
taatgtaagagcagctcggagcgtgggaagccctggatctgagagcctgggggattcacttggttccctgagccctaggtgggaagcaacaggggagcgacttgcttctgacgggggccctggagaggagagggtgacggggctgggggccgctgctgggccctccaaatctgggtatgctttgttcttggtgcaaacgagagaagcggtggcggatggtggagaaccggctttgggacatt

SEQ ID NO: 19178 - DNA, 40 bp, Homo sapiens
  chr5:1091191-1091231
  hypo
ggccctggtccctccacgactgaaacgcaggcagcatcag

SEQ ID NO: 19179 - DNA, 38 bp, Homo sapiens
  chr5:1092773-1092811
  hypo
caagactgggggaggccgtcgcccggcttcagagcagg

SEQ ID NO: 19180 - DNA, 149 bp, Homo sapiens
  chr5:1094055-1094204
  hypo
aggagcccagaaggcaccagccgaggagcacgtcccagctcaagtgcgggactgggcccccgccacagccttcaggacagggaggccccagttccttccacgtggtgtccagtcctgtgggaggccccggcctgggggcccccaggggc

SEQ ID NO: 19181 - DNA, 310 bp, Homo sapiens
  chr5:1095720-1096030
  hypo
cggtcaaggcaggatgcgaggtggccggaggagggcaggccaagacctcatcactgcaccaaacaaccccagctgggagggtgggcattctctatgggacatttcagatgtgccagagcccactggcggccaccctggctggctgacaggcaccagccgcaggagtggtgggttccagccgtgccagcaaagagggcatcgccgtctgggggcaggcgggcagcacgtgctcccagtagggtgcctggggcggaaagcacagccttcagggtgtgcaggtccttggtgcgaccatgagtgactgcagatg

SEQ ID NO: 19182 - DNA, 383 bp, Homo sapiens; identical to SEQ ID NO: 3750
  chr5:1111380-1111763
  hypo

SEQ ID NO: 19183 - DNA, 185 bp, Homo sapiens; identical to SEQ ID NO: 3751
  chr5:1112190-1112375
  hypo

SEQ ID NO: 19184 - DNA, 368 bp, Homo sapiens
  chr5:1115141-1115509
  hypo
aagtatatttgtacatcgctgatgaaacacattggtgggtctcagtcgatcaccattagtgccctttccaagcatcggtgtccagctttgcccagggggcctcttcaaatgcaatctcgcatccttatgatgtgagcctggtcatctgcgatggcctcttggccgtgtgcagggcacagccaggggaaccctgggatttagtgcgaaagtgtagccgatggtggttacattctgtgtgtagattctcgaaacagtccctgctgcctgccaccctggggtggagtttctaatggattaggacggacacccaatgccagcttccaagccaggaggccgctcgtgcccacggcttggaatcagggctgtgg

SEQ ID NO: 19185 - DNA, 30 bp, Homo sapiens
  chr5:1115732-1115762
  hypo
ggcaggcagagtgtccgtggagagctccgt

SEQ ID NO: 19186 - DNA, 130 bp, Homo sapiens
  chr5:1116659-1116789
  hypo
tcagtcctgtaattcacggacactgagtcttcgctcaagttccctctggaagattccgtggatgagtccgacacactcttcccctcactcaggaggctccaggatttttagaccacgtgtgtggctttcc

SEQ ID NO: 19187 - DNA, 331 bp, Homo sapiens
  chr5:1120338-1120669
  hypo
acacttctctttctcagaagacgctctcaagggcaggggagcaagcccgggtgcagctgggtgggcacctgccgtccacagggcccccccaccggcagtgtccggatcacacgaagacggcttacagaccagcaaggaaacgctgaacccggaggacaagagggcaaagacttgaactaacatggaggagcacgtggagatgccacctcgccgggggacgcgcgccgtcggcagtgtgccggggacaccacggtgtgctggccagatgctcacagccgctgtacctccccacacaactggaggtccgtggaatgcacggccactgtggaaa

SEQ ID NO: 19188 - DNA, 30 bp, Homo sapiens
  chr5:1121008-1121038
  hypo
acggccacgcttcgacgcgaagggctcctg

SEQ ID NO: 19189 - DNA, 31 bp, Homo sapiens
  chr5:1122661-1122692
  hypo
cattcccacagctgtgcgtccaccttcacca

SEQ ID NO: 19190 - DNA, 31 bp, Homo sapiens
  chr5:1129555-1129586
  hypo
tccgggcttcccctagcgtaagggacagaac

SEQ ID NO: 19191 - DNA, 30 bp, Homo sapiens
  chr5:1177290-1177320
  hypo
cagcccacccacagcgtggctcccaccgcc

SEQ ID NO: 19192 - DNA, 30 bp, Homo sapiens
  chr5:1213637-1213667
  hypo
ctgacgctgaagggcgccaccaatggcatc

SEQ ID NO: 19193 - DNA, 288 bp, Homo sapiens
  chr5:1215722-1216010
  hypo
tttcatggtgtgcatgggctacggtttgtgcatatccatccatggacattttccacgttttggctgtcatgagtcatgctgacgtgagcctgtgtgtacgcgtttttgtggacgcatgctttcgttcttctgggtgtgcgcctaggagtggagttgctgcgtcatgctggcctctacatgcagtccttcgaggagctgtcaggctgttttccacggtggctgcaccactcacgttcccaccagcgtgcaggaagctccagtttccccgtatcctcaccaacacttgtt

SEQ ID NO: 19194 - DNA, 30 bp, Homo sapiens
  chr5:1217065-1217095
  hypo
tccattccggagctcgaggcagggagaggg

SEQ ID NO: 19195 - DNA, 30 bp, Homo sapiens
  chr5:1232530-1232560
  hypo
gatgagaggtggggcgggggcgggtccatg

SEQ ID NO: 19196 - DNA, 483 bp, Homo sapiens
  chr5:1232859-1233342
  hypo
ccacagggctgggctgtgtcacgctgtccttcctgatcagcctgtactacaacaccatcgtggcgtgggtgctgtggtacctcctcaactccttccagcacccgctgccctggagctcctgcccaccggacctcaacagaacaggtgagctgggcgccgcctgctgtgtgggtccgtgcacggccgagagaggcatgtgctgcagcgtgtccagcatcagagcagctgcgggtggcggatgctcaccgcggggggagggccggggaaccggttgctctgtgtgcacatgcacgcgcctcggtctccccaggagcacacgtgcagtccagttcttatgacctccacgctgtgctgtgcttccctgccaggtccggaccaccgaggtccccttgcagccatgtgcatggcgtggtcatgcgagggcactgctgttgttagatttaagacgttaggtcggacgccgtggctcacgcttgtcaaccc

SEQ ID NO: 19197 - DNA, 30 bp, Homo sapiens
  chr5:1253818-1253848
  hypo
ggcctggctgtgggcgggtggccatcagtc

SEQ ID NO: 19198 - DNA, 30 bp, Homo sapiens
  chr5:1264553-1264583
  hypo
atccagcagcaggccgcaccaggggaatag

SEQ ID NO: 19199 - DNA, 30 bp, Homo sapiens
  chr5:1272060-1272090
  hypo
actggagagaggccgcgcagtcaaacgtga

SEQ ID NO: 19200 - DNA, 30 bp, Homo sapiens
  chr5:1277209-1277239
  hypo
gaacactgtgggcacgtgggcatcaagaga

SEQ ID NO: 19201 - DNA, 229 bp, Homo sapiens; identical to SEQ ID NO: 3754
  chr5:1295213-1295442
  hypo

SEQ ID NO: 19202 - DNA, 30 bp, Homo sapiens
  chr5:1318533-1318563
  hypo
actcgttcactctgcgtttatccacaggat

SEQ ID NO: 19203 - DNA, 169 bp, Homo sapiens
  chr5:1326227-1326396
  hypo
cacctacttctgcctgccactcgggcagccctggagccagttttgggaccgctctgagagccgccacctcatggctaaatgcttggaaggcatcacccacggagctcaggacgggtgccagagccgggcacggcactgtgactcgtacctatggagggaccctgcctgt

SEQ ID NO: 19204 - DNA, 30 bp, Homo sapiens
  chr5:1331523-1331553
  hypo
gcgggaggacggggcgagggaaccaagaca

SEQ ID NO: 19205 - DNA, 31 bp, Homo sapiens
  chr5:1342378-1342409
  hypo
ggaagggcagcagccacgagggctccaggtg

SEQ ID NO: 19206 - DNA, 40 bp, Homo sapiens
  chr5:1381048-1381088
  hypo
gggctgcctcatgggacgccacatccgccagcaccctggt

SEQ ID NO: 19207 - DNA, 85 bp, Homo sapiens
  chr5:1381147-1381232
  hypo
aggcttaggcgtgttgtcacagcagcccgaatggactccagcagcagagcagccagggctgcacgtggtgcgtgaacacacccgc

SEQ ID NO: 19208 - DNA, 30 bp, Homo sapiens
  chr5:1468189-1468219
  hypo
gctcagggaagaaacgctgacgcctccagc

SEQ ID NO: 19209 - DNA, 30 bp, Homo sapiens
  chr5:1476593-1476623
  hypo
cactctgatgggcccggccgtggctgtgtt

SEQ ID NO: 19210 - DNA, 96 bp, Homo sapiens
  chr5:1490330-1490426
  hypo
tccctagattggaccccgccttccccctgtgggttgaactgcatcccctaaaagacaagctgaagtcctcactcctggtaccgggaatgggacctc

SEQ ID NO: 19211 - DNA, 31 bp, Homo sapiens
  chr5:1511331-1511362
  hypo
cttgcacctgggctcacggttggctctgcgg

SEQ ID NO: 19212 - DNA, 203 bp, Homo sapiens
  chr5:1517523-1517726
  hypo
tccaagcagtacagcacagggcgccttctcagacaagagcggtgagacggagtgggacagggagccacgttctccgctgcctgggccctcccagcactcaagggcgctctgcccctgcaggcacaggaggcaccgggcatgggccagacacccagcaagtgtggtagtcgagtcccgtgcccggctcctgaagcagggctcct

SEQ ID NO: 19213 - DNA, 209 bp, Homo sapiens
  chr5:1546877-1547086
  hypo
aggaccgtggagtctggagggcgcgcagctgtcctgagaccgggcctggcccacagcgggtgcttactcaatgctgatgtctcggcacgtgcgtcatgttccgttctggagttagtcgtctttcatgaacacgcgggaaattttggggtgggcaggggcccatcaccggatcaaggtagggtttgaccgatgtgactggttagctggaa

SEQ ID NO: 19214 - DNA, 145 bp, Homo sapiens
  chr5:1641261-1641406
  hypo
cggctgtggggctgcccgccgccctcctcctcccacgctaggctgcccgccgccctcctcctcccaccctaggctacctgacccatggagaccggcctgagacagacgcatccccgaacaccaggtgccccgtcttctaggccat

SEQ ID NO: 19215 - DNA, 135 bp, Homo sapiens
  chr5:1704596-1704731
  hypo
ctagatcctgggattgtgggccgatccggctccagccccgtgaaggtgcaatgcttgaaggtgcaatgcttgccgccaatccccactgcgcagagctgaccaggtggaggggacgaggccttgctggcacaggtg

SEQ ID NO: 19216 - DNA, 576 bp, Homo sapiens
  chr5:1729753-1730329
  hypo
cagatgtgagctgtaagattccgcggctgtgttagaggaggcgccggggcctgggtgcagaacgagtctccaagtgccgcgtgagcgagggtgggtggctggagctcccgggccagcccgggcggaggcgctgcctccagacccagcctgtgtgcagaggggctggcggagctcggacgccgggctcgctggcctttgccgatggacctcgggtgtgtccaggccgggcgagggccggcagctccagtgaggcgggacctcactctatctgtgttgtgcatcctgttcgagtttctgggtcccgatcttgagcaagccaactgacctctctgatgttggtttgctcagatgtaacgtgcggttgacagcgtctatgctggagcacgtggcggcttaagagcaataggtgaaaggggtatctcagaagacgccctcaggacacggggatgccataggcctcgggtggtggagggtgccccggctccgaagggctcctgagcctggcaggctggcacccgcgcgtgggctggggctcactctagctgttcccttggcgcttttatggatgttcacaga

SEQ ID NO: 19217 - DNA, 878 bp, Homo sapiens
  chr5:1746447-1747325
  hypo
gctgggccaaggagggcagttcgctccggggcacctgtcaggggccccacacggctgcttttaggccaggggtggcaaagacgctgctgccgcctgctctgggctcggctcccatggctgtgaaggaccctcgtcactccccgtcgcctgcctgggctgcccggggaccctcctgctgcgtcagcacagagcctggaaccgcggccaaggcaggaagctcccctgtgaaggcaccaagcacggcagacgccctcacatcgccggggcccgtttccctgtggacgggaagtgggaacgtgacgtggacgtgacgtgggaacgtaacgtgacgtgacgtgacgtgacgtggcatggcgcgaggacagcgcggcgggagcggcgcctcagatccagcagggagggagacgaaaggcggatggaagaggggcccccggaccccgcccctcgaggcttgtgtgccgccctggctgcggcgttctgggcgacgggaaacagagtcaggacacagaccagggagggccggggcagagccagggcacctgcgggcgaggacggctgggtgctgggtccccggcgtcagggcgcaatgccgcctgctgggcgtcaccctttcccagggctgctgggacacgtggccgcagctgcttggctcaccacagcggaagtcggtctctctcatcctggagtccgcgcggctgagggcgaggtgtccttccgggggccctgaggggctctgtccccggcctctcccctcggcgcccctgcccggccaagcattgcgccaagcccacccccacctcacgtggcggcctcctccccggcttggggacttctctctgtcacttgcaaaaacacgcgtccttggatttagggccctc

SEQ ID NO: 19218 - DNA, 328 bp, Homo sapiens
  chr5:1786633-1786961
  hypo
taaaaccaaatcatcatgtctcgaggctcttcctctgcgccattggcggccgtccattctacaaatgacctgcctgcttgcctaaatgcgtcctgacggggccgagggaaggccgcacccctcgtgtgagatgctgtggatgtgttctggagatttctgtggccgtgtcacgggcaggggcgtcccgcgtgcacctgcagctcttgcctttgtccgattcttctttcagcacagggggtgccggtttcaggtggagcccgtgctgcgtggcccttctgttttcaggtcacaccagtgtccacccagcgggtttctgggtttgatggct

SEQ ID NO: 19219 - DNA, 42 bp, Homo sapiens
  chr5:1808345-1808387
  hypo
tgtttgagacgcgggcggtgcgatgtgcgccatggctgctct

SEQ ID NO: 19220 - DNA, 186 bp, Homo sapiens
  chr5:1815266-1815452
  hypo
aaaaagaacacaggaccggagaaagagaccgtgggctgaagctgggatgtggaactggggtgcagggtgggagggaggctgccacagatcactcagggactcgggcggctgctgacctggggtgcagggagagggggaggccaccgacagtggagcactcagggactcaggcggctgctgggcttg

SEQ ID NO: 19221 - DNA, 1635 bp, Homo sapiens; identical to SEQ ID NO: 3760
  chr5:1874671-1876306
  hypo

SEQ ID NO: 19222 - DNA, 283 bp, Homo sapiens; identical to SEQ ID NO: 3761
  chr5:1876637-1876920
  hypo

SEQ ID NO: 19223 - DNA, 179 bp, Homo sapiens; identical to SEQ ID NO: 3766
  chr5:1882742-1882921
  hypo

SEQ ID NO: 19224 - DNA, 485 bp, Homo sapiens; identical to SEQ ID NO: 3767
  chr5:1883131-1883616
  hypo

SEQ ID NO: 19225 - DNA, 373 bp, Homo sapiens; identical to SEQ ID NO: 3768
  chr5:1883879-1884252
  hypo

SEQ ID NO: 19226 - DNA, 12 bp, Homo sapiens
  chr5:1886997-1887009
  hypo
cgcgccgtgtgg

SEQ ID NO: 19227 - DNA, 35 bp, Homo sapiens; identical to SEQ ID NO: 3770
  chr5:1887546-1887581
  hypo

SEQ ID NO: 19228 - DNA, 108 bp, Homo sapiens; identical to SEQ ID NO: 3771
  chr5:1887655-1887763
  hypo

SEQ ID NO: 19229 - DNA, 99 bp, Homo sapiens
  chr5:1910373-1910472
  hypo
gggatagagtcttgggccacacggctgctcatgtgccgacatgccatgtcacccaggtggggatccggtcattaccacggagtggtcttgggcctctgt

SEQ ID NO: 19230 - DNA, 162 bp, Homo sapiens
  chr5:1922981-1923143
  hypo
ggtctgggcaaccaggcatcacgaggcgccttctccttccactcggtggagcagggtctccagtgaatgcggcgtccacgcctgatcggggctcctgccagggcggccatgcctgctgctagagcctctgagaaaacagccgcctcctccccttcccatggc

SEQ ID NO: 19231 - DNA, 30 bp, Homo sapiens; identical to SEQ ID NO: 3772
  chr5:1930949-1930979
  hypo

SEQ ID NO: 19232 - DNA, 42 bp, Homo sapiens; identical to SEQ ID NO: 3773
  chr5:1931244-1931286
  hypo

SEQ ID NO: 19233 - DNA, 132 bp, Homo sapiens; identical to SEQ ID NO: 3774
  chr5:1931444-1931576
  hypo

SEQ ID NO: 19234 - DNA, 318 bp, Homo sapiens; identical to SEQ ID NO: 3775
  chr5:1931617-1931935
  hypo

SEQ ID NO: 19235 - DNA, 211 bp, Homo sapiens
  chr5:1951557-1951768
  hypo
cattgtctgctgtgcatgcatcgtctgctctgcgtgcgtgcgtcatctgctgtgcgtgtgtcatctgctgtgcgtgtgccatctgctgcgggtgcatcatctgctgtgcgtgcgtgtgccatctgtgcctgtgtgcatcgtctgctgtgtgtgtgttgtctgctgtgcatgcatgcgccgtctgctgtgcgtgcatgtgttgtctgttgtg

SEQ ID NO: 19236 - DNA, 327 bp, Homo sapiens; identical to SEQ ID NO: 3776
  chr5:2038535-2038862
  hypo

SEQ ID NO: 19237 - DNA, 31 bp, Homo sapiens
  chr5:2094834-2094865
  hypo
aggatcggggaggaggcggccaggccagccc

SEQ ID NO: 19238 - DNA, 192 bp, Homo sapiens
  chr5:2112033-2112225
  hypo
atttatttattttgcaaaagccgccttttgaaagccggagtgcagtgcggactggctgaggccggggcccaggcgcgcgcctccttcctgcaggcggcccggggcatcgatcgcgcggggcgtaatgaaccctaataacagctctatcaccgcccgcccgccaattggcccgggtgccctccaaattagcca

SEQ ID NO: 19239 - DNA, 30 bp, Homo sapiens
  chr5:2137065-2137095
  hypo
cagaggtgaccgggcgtgcgtgggtggaca

SEQ ID NO: 19240 - DNA, 166 bp, Homo sapiens
  chr5:2155743-2155909
  hypo
cacttatttgtggaagtgaaccgtgacaggtagacggaatcctccgcagtcctccccggagttgccgcgatccaccactgaacgcagggcctgcggagtccacactcccctgctttcgtcaggcgcacgctagaggtggggctacgtgtttgccctgcataggtat

SEQ ID NO: 19241 - DNA, 30 bp, Homo sapiens
  chr5:2180403-2180433
  hypo
ccccaccaccttcacggcaggagagctcca

SEQ ID NO: 19242 - DNA, 96 bp, Homo sapiens
  chr5:2225527-2225623
  hypo
aaaagtatccctgttaaaggacgcgtgttcatgtatgaaagaagtggcttgaaatggaagatcgttcttgttcccgtgtctataatttaacatctg

SEQ ID NO: 19243 - DNA, 214 bp, Homo sapiens
  chr5:2541475-2541689
  hypo
tcctgtgtgtgcctgtgtgcacgcatgcgtgtgcaggctctgctgtgtgtgtgtggtgtgtgcctgtgtgcacgcatgcatgtgcgggctctgctgtgcatgtctgtgtatcgtgtgactgcgtgcatgcttgcatgtgccgactctgatgtgcgtgtctatgtattgtattgtgtgccctgtgtgcatactcgcatgtggagactctgctgta

SEQ ID NO: 19244 - DNA, 30 bp, Homo sapiens
  chr5:2990181-2990211
  hypo
ccaacggggatgcgtcgttgccgtggatgc

SEQ ID NO: 19245 - DNA, 87 bp, Homo sapiens
  chr5:3221101-3221188
  hypo
cagaactgctccaggcaaatgcgtggcatcattcataaggaggcagcgtcttgcggtgctgagaccgagcccctggctgcttccaga

SEQ ID NO: 19246 - DNA, 359 bp, Homo sapiens
  chr5:3282931-3283290
  hypo
acaggcacagacatgcacaggcgcacacatgggcacagacacgcacaggcgcacacacgggcacagacacgcacaggtgcacacacgggcacagacacgcacaggcgcacacacatgaacacaggcacagacacgcacaggcggacacacaggcacagacacgcacaggcggacacacaggcacagacacacacaggcgcacacacatgaacacaggcacagacacccacaggtgcacacacaggcacagacatgcacaggcgcacacacgggcacagacacgcacaggtggacacacaggcacagacacacacaggcgcacacacgggcacagacacgcacaggtgcacacacaggca

SEQ ID NO: 19247 - DNA, 320 bp, Homo sapiens
  chr5:3324845-3325165
  hypo
aagagcaaagccaccgctccacgcctgcccggggaattggtggccgagcttatctgggaccactggtccacgcgatgccccgtgacgggccaggaagggttcaggcttggaaatgtcggacggggacgactctgggccttgctggttggtggagctgggagcagcttcattctcctctgactgtgtggacacagccctcaaggggagagggccgcatccctgttccccgccttcctcgccatgactggacgcagcggggcgccctgtccctgcctggagctcttccagctcagggccccatcagcgccaccaccttggac

SEQ ID NO: 19248 - DNA, 172 bp, Homo sapiens
  chr5:3326307-3326479
  hypo
gtggctctgctggagtccacccgcgccgcggcgggcgctgcgtcttaattcaatgttccggcttcagagcagccgtggaagccgggccctgaagtgtgtgcacatggtcgataaactgtaataaactttacgggttcggtaacgaggctgcgtgtataattcaattttttaa

SEQ ID NO: 19249 - DNA, 533 bp, Homo sapiens
  chr5:3535864-3536397
  hypo
accacactgacctgggcttgtcgagctctgcccgcaggcccctcgaggtctgggtttcggccccatggccgtggctgtgcttggaaggccccgggagcagccagggagcgcggtgcctgccctccacggcggccgcctgcggggaacagggcagcgtccagcaggcggaaggcgagtgaggcagagtgaagcacacagagccaaaccatatcaccgccaccccgtgtgactgaggtcagggcttgcctttgaggcccagggtcagctggggactagcaggagctctaatctcgcgctgcgtcagggcgggaactgcaagaggccgcccccggcaggccgcgcatgcgcactcccgcgcgcacgctcacccgcgctgacccggctacgctggacccaggtgcggggacccaggtgcgctggacccaggcgtgcgccaccgccacctcctgcgcctacaccccgagagcggccgccgccagcagtggcatccgggctgtcccaagtcatccttcgtctgtttcagtgtctttatg

SEQ ID NO: 19250 - DNA, 446 bp, Homo sapiens; identical to SEQ ID NO: 3792
  chr5:3591105-3591551
  hypo

SEQ ID NO: 19251 - DNA, 143 bp, Homo sapiens; identical to SEQ ID NO: 3796
  chr5:3595225-3595368
  hypo

SEQ ID NO: 19252 - DNA, 241 bp, Homo sapiens; identical to SEQ ID NO: 3797
  chr5:3595849-3596090
  hypo

SEQ ID NO: 19253 - DNA, 43 bp, Homo sapiens
  chr5:3628087-3628130
  hypo
ctacaccctagctgtccttcccgctcactggccatctacctcc

SEQ ID NO: 19254 - DNA, 314 bp, Homo sapiens
  chr5:3761631-3761945
  hypo
cctccctcctccctccatctccgtggcctttgcgtctctgtgtgggtgcacatgcgctccctccatctccgtggcctttgcgtctctgtgtgggtgcacatgcgctccctccatctccgtggcctttgcgtctctgtgtgggtgcacatgcgctccctccatctctgtggcctttgcgtctctgagcgggtgcacatgccctccctccatctctgtggcctttgcgtctctgagtgggtgcacatgcgctccctccatctctgtggcctttgcgtctctgagtgggtgcacacgttctttttctatcttgatgg

SEQ ID NO: 19255 - DNA, 30 bp, Homo sapiens
  chr5:3999796-3999826
  hypo
ggctcaaggtggaagcgctgagcaacaatg

SEQ ID NO: 19256 - DNA, 195 bp, Homo sapiens
  chr5:4144534-4144729
  hypo
tgtgtggcatgctctagtgtgcgcatggaatgctgactgcacagcttactacgtgtgttctgtgttccgtgctctcacatgcatgcggaattctgacggcacagcttactaagtgtgttcggtatgccacacacttgtgtgcatgcggaatgctgactgcatagcttactatacgtgttctgtgtgccccactct

SEQ ID NO: 19257 - DNA, 507 bp, Homo sapiens
  chr5:4581089-4581596
  hypo
gcacacacacacacacacacacggtcaggcacatgctcagcgacactcttgcacacagaaacacacgtggacagacacacgcacagcgacactcttggagagcacatacacatggacaggcacacgcacagtgacactcttgcacacacacacacgtggacagacacacgcacagcgacatcttgcacacgcggacacacacgtggacaggcacacacacagcgacgctcttggagagcacacatacatgtggacaggcacacgcacagtgacgctcttgcacacgcacacacacgtggacaggcacatgcacagcgacactcttgcacacacacacacgtggacaggcacacacacagcgacgctcttggagagcacatacatacatgtggacaggcacacgcacagcgacgctcttgcacacgcacacacacgtggacaggcacatgtttgcagcacggctcactctcaagtccacgcccacacgcacagaggcagcttcgtgaa

SEQ ID NO: 19258 - DNA, 170 bp, Homo sapiens; identical to SEQ ID NO: 3799
  chr5:5139753-5139923
  hypo

SEQ ID NO: 19259 - DNA, 424 bp, Homo sapiens; identical to SEQ ID NO: 3801
  chr5:5140031-5140455
  hypo

SEQ ID NO: 19260 - DNA, 132 bp, Homo sapiens; identical to SEQ ID NO: 3802
  chr5:5140527-5140659
  hypo

SEQ ID NO: 19261 - DNA, 49 bp, Homo sapiens; identical to SEQ ID NO: 3803
  chr5:5140708-5140757
  hypo

SEQ ID NO: 19262 - DNA, 142 bp, Homo sapiens; identical to SEQ ID NO: 3804
  chr5:5140849-5140991
  hypo

SEQ ID NO: 19263 - DNA, 30 bp, Homo sapiens
  chr5:5303549-5303579
  hypo
ccacctgcatggagcgccgggccctgggca

SEQ ID NO: 19264 - DNA, 30 bp, Homo sapiens
  chr5:5419057-5419087
  hypo
ctacaagaagcttctcgtgtgaccaactct

SEQ ID NO: 19265 - DNA, 881 bp, Homo sapiens; identical to SEQ ID NO: 3806
  chr5:6448768-6449649
  hypo

SEQ ID NO: 19266 - DNA, 30 bp, Homo sapiens
  chr5:6582527-6582557
  hypo
attaggttggagtccgaaggtgactgattt

SEQ ID NO: 19267 - DNA, 31 bp, Homo sapiens
  chr5:6625963-6625994
  hypo
atggctctagctacaccgtggcccaatcaga

SEQ ID NO: 19268 - DNA, 31 bp, Homo sapiens
  chr5:6675044-6675075
  hypo
acctctgatgacgtcccgtagacatggtgtc

SEQ ID NO: 19269 - DNA, 30 bp, Homo sapiens
  chr5:6756258-6756288
  hypo
gttggggccgggaccgctggcgcccgacgt

SEQ ID NO: 19270 - DNA, 31 bp, Homo sapiens
  chr5:6759010-6759041
  hypo
tctaccctgtgagatacgcagaggaccctgt

SEQ ID NO: 19271 - DNA, 25 bp, Homo sapiens
  chr5:6765598-6765623
  hypo
cccaaagtgccgtgtgccaccatac

SEQ ID NO: 19272 - DNA, 39 bp, Homo sapiens
  chr5:6846244-6846283
  hypo
cagtcccccctccccgccacccccgaggccttgggttcg

SEQ ID NO: 19273 - DNA, 37 bp, Homo sapiens
  chr5:7704692-7704729
  hypo
caaaacatgtggctagttggccgggcgcggtgggtca

SEQ ID NO: 19274 - DNA, 148 bp, Homo sapiens
  chr5:7825239-7825387
  hypo
cactgctgtgtcccataataacgctgctgtgtgccacgacaacgctgctgtgcgccacgacaacgctgctgtgcgccacgacaacgctgctgtgcgccacgacaacgctgctgtgtgacatgacaacgctgctgtgtgccatgacaat

SEQ ID NO: 19275 - DNA, 93 bp, Homo sapiens
  chr5:8649802-8649895
  hypo
tttcttgaaataaatttcctttcttgggatgcgccacataacactctcctgttttctttttatctccttcacgctttcttcaatttcacttac

SEQ ID NO: 19276 - DNA, 119 bp, Homo sapiens
  chr5:9066627-9066746
  hypo
gctttgcatgtgtatcggaatcgttgctcatagtggccgccgttgtcagagatgttgacaggtgtccagggtgtccagggcgtggtcttcttcagctcaggacacgggttggtgttgca

SEQ ID NO: 19277 - DNA, 30 bp, Homo sapiens
  chr5:9069767-9069797
  hypo
atgtaaggcgatcatcgctgtttctttgat

SEQ ID NO: 19278 - DNA, 256 bp, Homo sapiens
  chr5:9119014-9119270
  hypo
aggcagatccaaaactaaaaccgcggggaactcgacctggccggaatgagagtaagcgtgaggctggcggtgctggcagcagggtgggcacgtacctttcctcgcggttctgtcccacgcacacccggcccccgtgcctgggagtggggttgctgcaggagcgctgccgcacctggaagccgatcccacaggtagtgctgcagggagaccacgaggtccagggagtccagcctccgttcctgagggaagggaagca

SEQ ID NO: 19279 - DNA, 264 bp, Homo sapiens
  chr5:9122691-9122955
  hypo
taaatgatgtcccaaactcctcgagaatctgagtttaatacacagcagcacaactggcgtgttctgagcggcacacctggaacagttggcgatctccatgccagggccctcgcactgccagccaccacactgcggggccgggctgtcgcaggagcgggttcgacagaggcaggatcccacggcgctgccatctgtgtgcgtgcaaggcgtccacggagaccacacaccaaagtgcccatccacggtgagattcctggtctagga

SEQ ID NO: 19280 - DNA, 31 bp, Homo sapiens
  chr5:9458300-9458331
  hypo
gagccaccgcgcctggcccagcatctctcct

SEQ ID NO: 19281 - DNA, 86 bp, Homo sapiens
  chr5:9497475-9497561
  hypo
ttttcaaatatacagtccatacggttcagacacaatggactggggatagagacggctatagtgccgataatggagaaactagccag

SEQ ID NO: 19282 - DNA, 31 bp, Homo sapiens
  chr5:10296893-10296924
  hypo
gctgagtgttgccctccgcgtttggcaaagt

SEQ ID NO: 19283 - DNA, 49 bp, Homo sapiens
  chr5:10453753-10453802
  hypo
tcctgctccctgcatctatggcgggggcgtggcttgtggcaggtgtact

SEQ ID NO: 19284 - DNA, 107 bp, Homo sapiens
  chr5:10486100-10486207
  hypo
ccacccaggtggccagcgctggtggttccatctcagatggagctgggcatgactgggccaggcagatgtgtgggccttggccaagcctgggccggcccctgctctgg

SEQ ID NO: 19285 - DNA, 41 bp, Homo sapiens
  chr5:10548512-10548553
  hypo
agatagatacacacggcggtgcattgcgcttttgtttacaa

SEQ ID NO: 19286 - DNA, 179 bp, Homo sapiens; identical to SEQ ID NO: 3819
  chr5:10564479-10564658
  hypo

SEQ ID NO: 19287 - DNA, 427 bp, Homo sapiens; identical to SEQ ID NO: 3820
  chr5:10564800-10565227
  hypo

SEQ ID NO: 19288 - DNA, 489 bp, Homo sapiens; identical to SEQ ID NO: 3821
  chr5:10565262-10565751
  hypo

SEQ ID NO: 19289 - DNA, 34 bp, Homo sapiens
  chr5:10618608-10618642
  hypo
gtggccagagcaccgccgccgggcagcccgggct

SEQ ID NO: 19290 - DNA, 64 bp, Homo sapiens
  chr5:10702259-10702323
  hypo
tggaatttgttgtgtgcccagcgcctggcacatggtctggtgcgcacacatactcaacaaatgc

SEQ ID NO: 19291 - DNA, 19 bp, Homo sapiens
  chr5:10864368-10864387
  hypo
tttttgtttttgtttttga

SEQ ID NO: 19292 - DNA, 101 bp, Homo sapiens
  chr5:10936741-10936842
  hypo
aaaagtacctgcagggcatgacggcgtgttctcctctgaaggtctttaagaatagcatggattccgcctgggcgcggcagctcacgtcagtaatcccagca

SEQ ID NO: 19293 - DNA, 31 bp, Homo sapiens
  chr5:11069013-11069044
  hypo
gcgagactccgtctcaaaaataaaaacaaca

SEQ ID NO: 19294 - DNA, 19 bp, Homo sapiens
  chr5:11724147-11724166
  hypo
cagagcaaggcttcatttc

SEQ ID NO: 19295 - DNA, 401 bp, Homo sapiens
  chr5:12794951-12795352
  hypo
ctgtcccaccttctcctgtgacgcgtctccctgcggcagcgccgcgctgaggtgccacactgctggttccaacaccgcagccgccaccgccgccgccattttcgtggcggatgagggcccgtggctgcccttcatggctgctgtgccggcgaagaggcattctgacctccagggctgccgcaggcctcaccatgtccttggatgtgtgatgccctacggggacagccaggccgctgtggggccacccccgaaggccactggccactccgacgagcacccggcccagaccaagagccctgcaaacaaccgtcataggaagcggccaggccgcaaccaggctgtcgcagctcagaggcctccagggcggggtctgtttcctcggcctttgcagccatcttctc

SEQ ID NO: 19296 - DNA, 132 bp, Homo sapiens; identical to SEQ ID NO: 3831
  chr5:14143001-14143133
  hypo

SEQ ID NO: 19297 - DNA, 648 bp, Homo sapiens; identical to SEQ ID NO: 3832
  chr5:14143456-14144104
  hypo

SEQ ID NO: 19298 - DNA, 124 bp, Homo sapiens; identical to SEQ ID NO: 3833
  chr5:14144285-14144409
  hypo

SEQ ID NO: 19299 - DNA, 8 bp, Homo sapiens
  chr5:14152780-14152788
  hypo
cacgcttt

SEQ ID NO: 19300 - DNA, 182 bp, Homo sapiens
  chr5:14273914-14274096
  hypo
cttagaaaatctcacacgacaaccaccagaattaagaacgcattcttttttaactgtttattatggaacattttaacatcaaaaggaaagaaaatagtatagtgaatttgtacgaattcgttgcccacttcagcaacttgtttcatctatatttccacttagtcttccgttcactctggata

SEQ ID NO: 19301 - DNA, 31 bp, Homo sapiens
  chr5:14289049-14289080
  hypo
ggttaagatttcttgccgaggccaggcacag

SEQ ID NO: 19302 - DNA, 191 bp, Homo sapiens
  chr5:14303325-14303516
  hypo
gtggaggagattgagccgggattgggatggctgccgcaggaccgttgatgatcctggagatggagggtggcagtggaggagattgagccgggattgggatggctgccacaggaattgatgatcctggagatggagggtgtcagtggaggagattgagccgggattgggatggctgccgcaggaattgatga

SEQ ID NO: 19303 - DNA, 2 bp, Homo sapiens
  chr5:14317811-14317813
  hypo
tt

SEQ ID NO: 19304 - DNA, 72 bp, Homo sapiens
  chr5:14319945-14320017
  hypo
aaacatggttaattttggtttcgaggttaattttttcccctcttaataagcgggggccaattcataacttct

SEQ ID NO: 19305 - DNA, 106 bp, Homo sapiens
  chr5:14325451-14325557
  hypo
caccagcatgtgcttctggggaggcctcaggctgcttccactcagcatggaaggcaaaggggagccggagctgcgtgtacagaacacacggcgagagagaagcaag

SEQ ID NO: 19306 - DNA, 22 bp, Homo sapiens
  chr5:14327555-14327577
  hypo
agccaccgcgcctggccagaaa

SEQ ID NO: 19307 - DNA, 443 bp, Homo sapiens
  chr5:14328241-14328684
  hypo
accagttaaagtgcacgcccaatacgctagttaaaacaaagcactcaatacaccagttaaaacaacgcgctcaatacatgagttaaagtaatgtgcactcaatacgttaaaacaatgtgcaagttaaaacaatgcactacttaaaacaatgagctcaatacgctagttaaaacaatgtgctcaatacactagttaaaacaatgcactgaatacgcttgttaaaacaatgcactcgttaaagtaatgtgcactcaatgcactagttaaaacaatgcgcccaatatgctatttaaaacaatgtgctcaatacactagttagtgtgctcaatacgtgagttaaaacaatgcgctcaatacacgagttaaaataatgcgctcaatacgccagttaaaacaatggactcaatactctagttaaaataatgtaccgaatacattagtta

SEQ ID NO: 19308 - DNA, 207 bp, Homo sapiens
  chr5:14332906-14333113
  hypo
aacacctaccttcaccgagtcgctgtgatgagaatacatgtagaaatgcctgacacccagcaggcgcttgtggtgctgtctttgcctagaacagtacgatcattcagattattcagatcttttggtgaatactagccttgtgtttacgttttgggacaagagccactagaagccaaatgcgcctgcgactttgcccttcctgcagtc

SEQ ID NO: 19309 - DNA, 30 bp, Homo sapiens
  chr5:14333434-14333464
  hypo
cacatgttgcaggggcggtgagcttgtctc

SEQ ID NO: 19310 - DNA, 31 bp, Homo sapiens
  chr5:14338463-14338494
  hypo
cttccaggacccctcccgctcaacacagtat

SEQ ID NO: 19311 - DNA, 156 bp, Homo sapiens
  chr5:14349006-14349162
  hypo
catgtttgtgtgtgtacgcacgtgagcatgtgtttttcctgtatgtgtgtacacacgtgagcatgtgtgtttttcctgtgtgtatatgtgtgcgcacgcacatgagcatgtttttcttgtgtgtttatttatgtgtacgcacgtgagcatgtgttt

SEQ ID NO: 19312 - DNA, 31 bp, Homo sapiens
  chr5:14368814-14368845
  hypo
agaaaacacatcagagcgcgctgcaggtgca

SEQ ID NO: 19313 - DNA, 176 bp, Homo sapiens
  chr5:14378047-14378223
  hypo
aaatgaatggaatttcgcggttgttttaattgattgcaagcaccaacatacatcattttcttttttctctcagatatcttgaatgaactcttccaacgggagaacagggtattgcattactggaccatgaggaagagacggctggaccagtgtcagcagtacgtggtctttgagag

SEQ ID NO: 19314 - DNA, 103 bp, Homo sapiens
  chr5:14381248-14381351
  hypo
ggatccatgacaatggcgagttctacctttccacacacacctccacgggctccagtatacagcacacccaggagctcctgaaagagcacgaggagttccagat

SEQ ID NO: 19315 - DNA, 31 bp, Homo sapiens
  chr5:14390944-14390975
  hypo
atgaaagtttatcatgcgttgacttgttatg

SEQ ID NO: 19316 - DNA, 31 bp, Homo sapiens
  chr5:14409997-14410028
  hypo
attgcctctccagccccgctcctgggaggct

SEQ ID NO: 19317 - DNA, 196 bp, Homo sapiens
  chr5:14410237-14410433
  hypo
cgggtgtcttactccgttctggagacctgcatttgggattaaacggcgtatgagacttgccaataagtcagaatttggaatttggagaggacgtacccatgcggccttacaaacaagaaggtgcacgtttgctgcccacgtgtgcctgcgtttgtgtgtgctctgcttatgtgacgttttctcttagccatctccc

SEQ ID NO: 19318 - DNA, 30 bp, Homo sapiens
  chr5:14418155-14418185
  hypo
ggcagacacacacacgtgtaactccagctg

SEQ ID NO: 19319 - DNA, 133 bp, Homo sapiens
  chr5:14427741-14427874
  hypo
ctctacccacagggccgcggccttgtcctggattctcaccggggcagtcacgtcaggatggagaggtcccatgtcagccagttctttggtgggggtcatgtagtctgaaatgacctgccgatggtccaggctg

SEQ ID NO: 19320 - DNA, 62 bp, Homo sapiens
  chr5:14454375-14454437
  hypo
tcctgagcccccaccccgacactgctttacatgacaggcagtgttcacgtacacttagtctg

SEQ ID NO: 19321 - DNA, 39 bp, Homo sapiens
  chr5:14460455-14460494
  hypo
gaaagaggctgagggccgctcctccgagagccccaccag

SEQ ID NO: 19322 - DNA, 51 bp, Homo sapiens
  chr5:14461277-14461328
  hypo
gcagcggcaaggccgacgggcacgtgaagaagctggcgcacaagcacaaga

SEQ ID NO: 19323 - DNA, 188 bp, Homo sapiens
  chr5:14485222-14485410
  hypo
aaatttgctctgacatcgaggacgggtgacgtggtagagaccttcattttgcattcatctagtccaagtgtccggcaaacttggatccatgaaatcaaccaaattttagaaaaccagcgcaattttttaaatggtaatgtgtgttctgttactagatgtgtgctttctttcctcgtgtactcacttgt

SEQ ID NO: 19324 - DNA, 710 bp, Homo sapiens
  chr5:14487988-14488698
  hypo
cccaggaaaggcgccgcgaacgcctcggggtcgagcccagacgcccccgccaaggacgcgcgcgctagcctgggcaccctgccgcttgggaagccccgggccggggccgcttcgccgctgaactcgccgctctccagcgcggtcccttctctcggcaaggagcccttcccccccagcagccccctgcagaaggggggctccttctggagctccatccccgcctcccccgccagccgacccggctccttcaccttcccgggggacagcgactccctccagcggcagacaccccgccacgcggcccctggcaaggatactgaccgcatgagcacgtgctcctcggccagcgagcagtccgtgcagtccacccagagcaacggggtaagcgcgtcggggggcccgcgccctcccgcccccctgcctctgtcccgccagctctaaacgccaccgcggctgttctcactaactcggctgcccagcgctctccgccgcccgttgcggcctctacctgggaccaggctaaccctcctgcgggccggcccacggcgctactaactactccttgctttgttcgtgtcttctaataagagcaagccgatcattaaccttctcaacgcagcgtcttttggtttcttccatttccaaccagcagaatatcttcttggaactttcttttttaacctctgccttcctcacgcacctattttttg

SEQ ID NO: 19325 - DNA, 128 bp, Homo sapiens
  chr5:14489507-14489635
  hypo
tttcagttaggttggacgtgctaggtaggcaggtatgctaggcgggtgagcatagatttgagtccagtgtggggtggtggggagatgcagtcaacccagtgacgggctatacccgtcagcacttagtt

SEQ ID NO: 19326 - DNA, 123 bp, Homo sapiens
  chr5:14492803-14492926
  hypo
catgtttctggtgttccgagccgccactgaccagtgccccgcagctgagggctggattccaggctttgtcctgggccacaccagtgcagtcatcgtggagaacccggacgggactctcaagtg

SEQ ID NO: 19327 - DNA, 176 bp, Homo sapiens
  chr5:14493320-14493496
  hypo
caggaccagtagggagcgtgcggagatgttggcatagacacaggcacacctcaggttgttttgtgctttgctttaatgtgctttgaagacattgccttttttacacgagttttgtggcaaccctatgtcaagcaagtctctcggtgccatttgtccaacaacgtatgctcacactc

SEQ ID NO: 19328 - DNA, 366 bp, Homo sapiens
  chr5:14498424-14498790
  hypo
ggaaattcctccttcacggatggatttctttggctgccttcggcactccacttcttccgtgagagcccatttcacgcctgggtgtacagctcctcatcagcacttgagctcctgccttcccttgatcctgaaggaggaggccagcgctgatggccacgtgctcagcttttctgatgcgcagtgtgttcccatctgtgccgcagtgacctgggagaggccacgctgaagattgtgggcgtgaccacggaagatgacggcatctacacgtgcatcgctgtcaatgacatgggttcagcctcatcgtcggccagcctgagggtcctaggtaagcaccgtgcaacgaggattctacgtgacccagtgggg

SEQ ID NO: 19329 - DNA, 31 bp, Homo sapiens
  chr5:14504095-14504126
  hypo
agacgcacctttcaaacgtgcagggaaaggt

SEQ ID NO: 19330 - DNA, 31 bp, Homo sapiens
  chr5:14504531-14504562
  hypo
tcagaaaggaaccaagcgagcagtggccact

SEQ ID NO: 19331 - DNA, 115 bp, Homo sapiens
  chr5:14507311-14507426
  hypo
ggttctggaagctgtccggtacctgcacaactgcaggatagcacacctggacctaaaggttggtgaggccccgggcaggtgaaggggggtctgagcacaccggcttggccatgcg

SEQ ID NO: 19332 - DNA, 51 bp, Homo sapiens
  chr5:14508325-14508376
  hypo
tcctgcaggaggaccccgccaagcgtccctcggctgcgctggccctccagg

SEQ ID NO: 19333 - DNA, 40 bp, Homo sapiens
  chr5:14774553-14774593
  hypo
tttttttcctcaagacacagtcgcgctctgtcgcccagtc

SEQ ID NO: 19334 - DNA, 39 bp, Homo sapiens
  chr5:14774712-14774751
  hypo
atcattaagttactatacgtccttcagtcacctactgtt

SEQ ID NO: 19335 - DNA, 30 bp, Homo sapiens
  chr5:14849920-14849950
  hypo
ttgtcacggtcactcggatgtgcatcctca

SEQ ID NO: 19336 - DNA, 30 bp, Homo sapiens; identical to SEQ ID NO: 3838
  chr5:15499880-15499910
  hypo

SEQ ID NO: 19337 - DNA, 118 bp, Homo sapiens; identical to SEQ ID NO: 3839
  chr5:15500570-15500688
  hypo

SEQ ID NO: 19338 - DNA, 208 bp, Homo sapiens; identical to SEQ ID NO: 3840
  chr5:15500735-15500943
  hypo

SEQ ID NO: 19339 - DNA, 30 bp, Homo sapiens
  chr5:15928351-15928381
  hypo
ggcgagaccatcaacgtggaccgcgccctc

SEQ ID NO: 19340 - DNA, 43 bp, Homo sapiens
  chr5:16032774-16032817
  hypo
ttcatgtagcatctttattaccgcactctaaaccaccatctag

SEQ ID NO: 19341 - DNA, 162 bp, Homo sapiens; identical to SEQ ID NO: 3841
  chr5:16178990-16179152
  hypo

SEQ ID NO: 19342 - DNA, 140 bp, Homo sapiens; identical to SEQ ID NO: 3842
  chr5:16179266-16179406
  hypo

SEQ ID NO: 19343 - DNA, 385 bp, Homo sapiens
  chr5:16670786-16671171
  hypo
tgtccagcatctgctcctcctcgaccttctgccggaccacggatcctgtccggaagctccgcctcagggtcccctctaggaagctcgtccgcctcttctccagccgttcacaaggggtgaaggttttggttgactggctgatgcgggccttgagtctctgcagggaataaacctcttcgagaggtgggatggcagcgtgcagagtataatccccctgcagatactggagtcgcagggcagcaagaacctggaggttttcttccggggctggatggtggccatggataaccgcttcgtgggcctgaaaggagacagtcaacagctttccggtcaacgcactgccatgccatgggatgcccacgtcgcttgctccctcacttcatga

SEQ ID NO: 19344 - DNA, 5 bp, Homo sapiens
  chr5:16674320-16674325
  hypo
aatcc

SEQ ID NO: 19345 - DNA, 31 bp, Homo sapiens
  chr5:16679600-16679631
  hypo
cacaaatttaaccaagcgctagttttttggg

SEQ ID NO: 19346 - DNA, 312 bp, Homo sapiens
  chr5:16681934-16682246
  hypo
aggggagtctgttaagcagaccgaggaagcagggcaggcagtcacctctcacgatgaattcctggccctccactctggtgtcccctttggacctctgcagcagggttatccagtggtgcatctcctccggcgtgtcggcgttgcagtgcagcacccggttggccgtgatgatcacaaacgagttgggtctgagccacaagatgagaaggaaacaaagccccttagccctaccgtcagcatcacctctgtgtgaaccgagactcagtgccttcttcctggcttctgggtcacgggatatacactgctaggcta

SEQ ID NO: 19347 - DNA, 536 bp, Homo sapiens
  chr5:16701009-16701545
  hypo
tgcaacaggggtgggtgtgaccggccacccatttcactgggacacgccaggcaggtacttaccgaggactgcgccccctcagagctgaaccggtaggcacccgagctgttgtaggtccccacagagcagcggtagtcgggggaccactggctgccgtaggagttggagaaggtcacgctgctgccggaagtgatggcaccgtcctcatagtcatcctggtcgtagtcgtagtcgccgtctggggagggcaagtccccagcgttctggggcatgcagtaggtggactcgccgctggaggagttgtgtaggctcccggagtcctgcactgatggggcgagcagcaccgtgctgtccgcactggggctggtgggcaccaccgtgtcgttcatgtatgggtcctcctctgaagagtcatcgctggtccggatgccacttgttcgctggtctgagtggccgtgctcgctggggttgggggagtccttgaaggcgtcgtcgtcggcttcgaagccctcatcgacctcctcctctgggtaggg

SEQ ID NO: 19348 - DNA, 32 bp, Homo sapiens
  chr5:16729561-16729593
  hypo
attttttttttttttttgagacggagtctcac

SEQ ID NO: 19349 - DNA, 31 bp, Homo sapiens
  chr5:16729832-16729863
  hypo
gtgagccaccgcacccagcctaaagttttat

SEQ ID NO: 19350 - DNA, 312 bp, Homo sapiens
  chr5:16794679-16794991
  hypo
aggaggctggggttgggggtgcgcggagggactcctgggccatgggaaagtccgactggctgtgagccccgttacctgatgaggatgcactggttgtcgtggcgcttccacaggcagcggtagcactcgttggcgatggcgaagatgtgcgggggcagctcgcccaggtggcgccggctgtactgctccatggtggcaggctcgtacagcccggcgatgggctggtaggggttcacggaggccaggatggagccgatgtaggtctgcaagcacagagtgagacagggatgcgtcacttctaacccaggccac

SEQ ID NO: 19351 - DNA, 33 bp, Homo sapiens
  chr5:16816657-16816690
  hypo
tttgagatggagtcttgctgtcgcctggttgga

SEQ ID NO: 19352 - DNA, 1390 bp, Homo sapiens; identical to SEQ ID NO: 3848
  chr5:16935552-16936942
  hypo

SEQ ID NO: 19353 - DNA, 34 bp, Homo sapiens
  chr5:16952527-16952561
  hypo
agccaccgtgcccggccttgtatcacattcttta

SEQ ID NO: 19354 - DNA, 12 bp, Homo sapiens
  chr5:16969994-16970006
  hypo
atcctggccaac

SEQ ID NO: 19355 - DNA, 20 bp, Homo sapiens
  chr5:16970185-16970205
  hypo
tctcaaaaaaaattgactta

SEQ ID NO: 19356 - DNA, 33 bp, Homo sapiens
  chr5:17032023-17032056
  hypo
aaaggcaatggcggacccaaagagtgagcagca

SEQ ID NO: 19357 - DNA, 36 bp, Homo sapiens
  chr5:17161189-17161225
  hypo
acatgttatgaatgaaaagtccgggccaggcgcggt

SEQ ID NO: 19358 - DNA, 31 bp, Homo sapiens; identical to SEQ ID NO: 3851
  chr5:17217632-17217663
  hypo

SEQ ID NO: 19359 - DNA, 30 bp, Homo sapiens; identical to SEQ ID NO: 3852
  chr5:17218074-17218104
  hypo

SEQ ID NO: 19360 - DNA, 409 bp, Homo sapiens
  chr5:17275348-17275757
  hypo
gaagaagggctacaatgtgaacgacgagaaagccaaggagaaagacaagaaggccgagggcgcggcgacggaagaggaggggaccccgaaggagagtgagccccaggcggccgcagagcccgccgaggccaaggagggcaaggagaagcccgaccaggacgccgagggcaaggccgaggagaaggagggcgagaaggacgcggcggctgccaaggaggaggccccgaaggcggagcccgagaagacggagggcgcggcagaggccaaggctgagcccccgaaggcgcccgagcaggagcaggcggcccccggccccgctgcgggcggcgaggcccccaaagctgctgaggccgccgcggccccggccgagagcgcggcccctgccgccggggaggagcccagcaaggag

SEQ ID NO: 19361 - DNA, 379 bp, Homo sapiens
  chr5:17354379-17354758
  hypo
agttcttcaaagccacatcatcgcggtcaaagtagtaagacatggacaggtaaacgcaggaggcgtagagctccaggttgatctggcggttgatggcggcctttagtcctggtggtagtcctggcgcacctgtgaggtggacgcggtcgtcatggcggcgactaaggagaggcggctgcgttcgcggtggtgactgcgcagtgctggagcggcggcgggggccttggggcagtccgagggcgcggtgaggaggtgacggagggctggctatgggcagccggccggtgtgggggacgagcgccaggttctgtccaagcactgttgaagcaggaaaccccgacgactctcgtggaagaacgtccatctctctacttttaag

SEQ ID NO: 19362 - DNA, 160 bp, Homo sapiens
  chr5:17670363-17670523
  hypo
aggttggtgtcttcaaagaggcgcaccaggtaggccttgctgggctcctgcagggcgctagtggttgcgctctggaagcgcaggtccgggctgatggcctgggtgatctcgcgcaccaggcgctggaagtgcagcttgcgcaggagcagctgagtggact

SEQ ID NO: 19363 - DNA, 29 bp, Homo sapiens
  chr5:17779501-17779530
  hypo
tgggccgggcgcagtggctcacgcctgta

SEQ ID NO: 19364 - DNA, 77 bp, Homo sapiens; identical to SEQ ID NO: 3853
  chr5:17987027-17987104
  hypo

SEQ ID NO: 19365 - DNA, 17 bp, Homo sapiens
  chr5:17987223-17987240
  hypo
ctcgcctgccactcacc

SEQ ID NO: 19366 - DNA, 170 bp, Homo sapiens
  chr5:18482070-18482240
  hypo
aaagaatctattagttcgctagttgaaaaaaatcctgaaatataccgagcaaatgttgcagcagacaggacacataaatgtgggaaacataagaaagagccttgaggaaagagagcagcctgatgatcccaggctacgaacatggaggaagacgccgggtaaggtatctg

SEQ ID NO: 19367 - DNA, 30 bp, Homo sapiens
  chr5:24710956-24710986
  hypo
aaattacaactattacgttctgccttctat

SEQ ID NO: 19368 - DNA, 34 bp, Homo sapiens
  chr5:27121726-27121760
  hypo
gaggctgaggggggcagatcacgaggtcaggaga

SEQ ID NO: 19369 - DNA, 34 bp, Homo sapiens
  chr5:27121939-27121973
  hypo
tgggcgacagagcgaaactccaaaaaaaaaaaaa

SEQ ID NO: 19370 - DNA, 30 bp, Homo sapiens; identical to SEQ ID NO: 3856
  chr5:28974970-28975000
  hypo

SEQ ID NO: 19371 - DNA, 122 bp, Homo sapiens; identical to SEQ ID NO: 3857
  chr5:29296853-29296975
  hypo

SEQ ID NO: 19372 - DNA, 18 bp, Homo sapiens
  chr5:29297094-29297112
  hypo
gtcacctctcagggggac

SEQ ID NO: 19373 - DNA, 30 bp, Homo sapiens; identical to SEQ ID NO: 3858
  chr5:30298760-30298790
  hypo

SEQ ID NO: 19374 - DNA, 33 bp, Homo sapiens
  chr5:30864344-30864377
  hypo
gttgaaagagtgggaggaggccgggcgcggtgg

SEQ ID NO: 19375 - DNA, 31 bp, Homo sapiens
  chr5:31454672-31454703
  hypo
caacagaaaagaatcacgatcaaatcccatt

SEQ ID NO: 19376 - DNA, 32 bp, Homo sapiens
  chr5:31670493-31670525
  hypo
caaaatacttgtcttagtttgcgtttatttta

SEQ ID NO: 19377 - DNA, 31 bp, Homo sapiens
  chr5:31670824-31670855
  hypo
gccagtttgcgtttcttttaaagcagacctt

SEQ ID NO: 19378 - DNA, 32 bp, Homo sapiens
  chr5:31724693-31724725
  hypo
agtgaaattccgtctcaaaaaaaaaaaaaaaa

SEQ ID NO: 19379 - DNA, 31 bp, Homo sapiens
  chr5:31802727-31802758
  hypo
gtaaaagatgtacacatgagccgtgcgccgt

SEQ ID NO: 19380 - DNA, 1237 bp, Homo sapiens; identical to SEQ ID NO: 3861
  chr5:31854441-31855678
  hypo

SEQ ID NO: 19381 - DNA, 58 bp, Homo sapiens
  chr5:31908393-31908451
  hypo
gcagctccaagctccgggctcctagaaggcagcgccactggtcgtctccctttagctg

SEQ ID NO: 19382 - DNA, 26 bp, Homo sapiens
  chr5:32042021-32042047
  hypo
aaaaaaaaaaacatcaattgccgggc

SEQ ID NO: 19383 - DNA, 17 bp, Homo sapiens
  chr5:32156721-32156738
  hypo
ggcgggggggatggttt

SEQ ID NO: 19384 - DNA, 29 bp, Homo sapiens
  chr5:32282176-32282205
  hypo
ccacactgtactcaatcatcacgagcatc

SEQ ID NO: 19385 - DNA, 5 bp, Homo sapiens
  chr5:32314456-32314461
  hypo
ctggg

SEQ ID NO: 19386 - DNA, 38 bp, Homo sapiens
  chr5:32333127-32333165
  hypo
gggattacaggcgcgagccaccgcgcccagcctacacc

SEQ ID NO: 19387 - DNA, 19 bp, Homo sapiens
  chr5:32424370-32424389
  hypo
gggcgtggtggctcacgcc

SEQ ID NO: 19388 - DNA, 18 bp, Homo sapiens
  chr5:32424628-32424646
  hypo
ctccgtctcaaaaaaaaa

SEQ ID NO: 19389 - DNA, 31 bp, Homo sapiens
  chr5:32443798-32443829
  hypo
aaggtacccgagacaacgacacgttatctgg

SEQ ID NO: 19390 - DNA, 30 bp, Homo sapiens
  chr5:32445496-32445526
  hypo
caaagtccctgttcccgtggagtttacgtt

SEQ ID NO: 19391 - DNA, 34 bp, Homo sapiens
  chr5:32446097-32446131
  hypo
acattaaaaggaaatgctggccgggcgcggtggc

SEQ ID NO: 19392 - DNA, 374 bp, Homo sapiens; identical to SEQ ID NO: 3862
  chr5:32709849-32710223
  hypo

SEQ ID NO: 19393 - DNA, 1065 bp, Homo sapiens; identical to SEQ ID NO: 3865
  chr5:32711036-32712101
  hypo

SEQ ID NO: 19394 - DNA, 762 bp, Homo sapiens; identical to SEQ ID NO: 3866
  chr5:32712289-32713051
  hypo

SEQ ID NO: 19395 - DNA, 36 bp, Homo sapiens
  chr5:32764593-32764629
  hypo
tcttcaaaaaaagaatttggccgggcacggtggctc

SEQ ID NO: 19396 - DNA, 224 bp, Homo sapiens
  chr5:32782660-32782884
  hypo
cccaggggacaccactctcaccgcttcccacatcctgctctggcacgaccgctcttaatgctctcttgagagcaccatcagcgacttcaaatcttgacttgtgaagtccccagaacacaccatgaccatcagtgtggacaaccgaggaacgtgcccaatgtaccacgcttttctgaagcacttgctgtccttgccctggagacggtgatttgatgaaatgccca

SEQ ID NO: 19397 - DNA, 29 bp, Homo sapiens
  chr5:32836021-32836050
  hypo
tgcccggcggtaaatatttctcataaaag

SEQ ID NO: 19398 - DNA, 24 bp, Homo sapiens
  chr5:32841608-32841632
  hypo
ctcgcctggcctaaaatggaattt

SEQ ID NO: 19399 - DNA, 23 bp, Homo sapiens
  chr5:33006154-33006177
  hypo
aaaagaccattcttggccaggcg

SEQ ID NO: 19400 - DNA, 440 bp, Homo sapiens
  chr5:33162234-33162674
  hypo
ttggcttaagatttttttgggcggtttctctttccagccagcgccgagcgatgggcatctctcgggacaactggcaccagcgccgcaaaaccgggggcaagagaaagccctaccacaagaagcggaagtatgagttggagcgcccagctgccaacaccaagattggcccccgccgcatccacacagtccgtgtgcagggaagtaacaagaaataccgtgccctgaggttggacgtgggggaatttctcctggggctcagagtgttgtactcgtaaaacaaggatcatcgatgttgtctacaatgcatctaataatgagctggttcgtaccaagaccctggtgaagaattgcatcgtgctcatcgacagcacaccgtgccgacagtggtaagatgtcccactacgtgctgcccctgggccgcaagaagggagccaagctga

SEQ ID NO: 19401 - DNA, 42 bp, Homo sapiens
  chr5:33234416-33234458
  hypo
attacaggcgtgagctgacacgcctggctgaatttcttcttt

SEQ ID NO: 19402 - DNA, 39 bp, Homo sapiens
  chr5:33311278-33311317
  hypo
gagtcatcgcacccggccgagaaaagtttttatcctgag

SEQ ID NO: 19403 - DNA, 30 bp, Homo sapiens
  chr5:33502202-33502232
  hypo
cctgcctgcagggccgccgccaccacctgt

SEQ ID NO: 19404 - DNA, 78 bp, Homo sapiens
  chr5:33509453-33509531
  hypo
aatttcttgctttttttggttgttgttcgtttctttttttaaaggctgaatagtaccgtattctattgtatgtatgta

SEQ ID NO: 19405 - DNA, 527 bp, Homo sapiens; identical to SEQ ID NO: 3868
  chr5:33936184-33936711
  hypo

SEQ ID NO: 19406 - DNA, 131 bp, Homo sapiens
  chr5:33984544-33984675
  hypo
gcagaactctcttccgaacatggccatgctgtgcatgatgagtctgctggtgggtcttttaggcggctccacagagtcaaaggggccatcatcagctagggatttatagatgtggcggccagcctgcccac

SEQ ID NO: 19407 - DNA, 84 bp, Homo sapiens
  chr5:34551766-34551850
  hypo
cacttgttggattttaactccgagctctgagcatccacatcttcatcagccgaaagggacttgacccgtcggctggctcccagg

SEQ ID NO: 19408 - DNA, 2 bp, Homo sapiens
  chr5:34586743-34586745
  hypo
ca

SEQ ID NO: 19409 - DNA, 31 bp, Homo sapiens
  chr5:35044505-35044536
  hypo
tcggtatcatccgctccggacatgatctctc

SEQ ID NO: 19410 - DNA, 43 bp, Homo sapiens
  chr5:36240987-36241030
  hypo
gcttttaaaacaagctcgtagtgtccaacgaccacgttccagc

SEQ ID NO: 19411 - DNA, 30 bp, Homo sapiens
  chr5:36962813-36962843
  hypo
agtctgtagtgaacacgtacagacatgttt

SEQ ID NO: 19412 - DNA, 412 bp, Homo sapiens; identical to SEQ ID NO: 3884
  chr5:37839807-37840219
  hypo

SEQ ID NO: 19413 - DNA, 95 bp, Homo sapiens; identical to SEQ ID NO: 3885
  chr5:37840267-37840362
  hypo

SEQ ID NO: 19414 - DNA, 280 bp, Homo sapiens; identical to SEQ ID NO: 3886
  chr5:37840529-37840809
  hypo

SEQ ID NO: 19415 - DNA, 30 bp, Homo sapiens; identical to SEQ ID NO: 3892
  chr5:38353672-38353702
  hypo

SEQ ID NO: 19416 - DNA, 43 bp, Homo sapiens
  chr5:39053666-39053709
  hypo
taaataaatgtttattaaatccgcagaattagaaagcaagaat

SEQ ID NO: 19417 - DNA, 103 bp, Homo sapiens
  chr5:39209362-39209465
  hypo
aacaagctcctctatcgataatagaacagcagtgatcttttttatcccgattaacactgtttaaatatgtttttttttttttttgagacggagcctccctcta

SEQ ID NO: 19418 - DNA, 124 bp, Homo sapiens
  chr5:39740637-39740761
  hypo
aactcatgacgaacccgtgattcagtcgcggctacgcatgcaggcgtgtctgtacacatacttaccagccctgagacctggcgacagtggagcagcgctctagggaacccggccagcgggctga

SEQ ID NO: 19419 - DNA, 17 bp, Homo sapiens
  chr5:39787722-39787739
  hypo
taaacttaactacttaa

SEQ ID NO: 19420 - DNA, 224 bp, Homo sapiens
  chr5:39808821-39809045
  hypo
gatgcaagattgaccccgggtgaaaaagagacggagagaaggttgggtaaaaggattttagacttcagtgcagtctaaggaagatttgacaagtcccttgagggatcctcaagccaaagctgtccatcagcagtaccgtgttgtccaagaaggagtgctacagcattcctgttatactcagtcgctggccaggaacagtctgtgaaaaccgtggcttctgttct

SEQ ID NO: 19421 - DNA, 30 bp, Homo sapiens; identical to SEQ ID NO: 3900
  chr5:39851507-39851537
  hypo

SEQ ID NO: 19422 - DNA, 207 bp, Homo sapiens
  chr5:40066770-40066977
  hypo
tccaccttctgcaccaactaccggtccctgggctccgtccagccgcccagctaccgcgcccgaccgctaaccagcgcggccagcttctaggcaagcgccgggggctctggttcccggatctccgtgttccgctccaacagcttcctgggtggcttggggtccgggagtctggcggcagggatggccggggtctggcaggaatgggag

SEQ ID NO: 19423 - DNA, 507 bp, Homo sapiens; identical to SEQ ID NO: 3906
  chr5:41870188-41870695
  hypo

SEQ ID NO: 19424 - DNA, 40 bp, Homo sapiens
  chr5:41991876-41991916
  hypo
cttaagtatttatataccttccggccgggcacagtggctc

SEQ ID NO: 19425 - DNA, 40 bp, Homo sapiens
  chr5:41992155-41992195
  hypo
agcaacaggagcaaaaatcggtctcataaaaaaatatata

SEQ ID NO: 19426 - DNA, 772 bp, Homo sapiens; identical to SEQ ID NO: 3910
  chr5:42424336-42425108
  hypo

SEQ ID NO: 19427 - DNA, 37 bp, Homo sapiens
  chr5:42476008-42476045
  hypo
attttttttttttttttgagacggagtctcgctctgt

SEQ ID NO: 19428 - DNA, 32 bp, Homo sapiens
  chr5:42984042-42984074
  hypo
atgttttttgagatggagtctcggtctgtcgc

SEQ ID NO: 19429 - DNA, 31 bp, Homo sapiens
  chr5:42984313-42984344
  hypo
gagccaccacgcccagccaaaaaaattttta

SEQ ID NO: 19430 - DNA, 106 bp, Homo sapiens
  chr5:43147786-43147892
  hypo
tgctgggattacaggcgtgagccaccgcgcccggccagtttggaagtttaaaaaaaaaaaaaacagtttggaagttttttggttttatggccgggtgtggtggttt

SEQ ID NO: 19431 - DNA, 119 bp, Homo sapiens
  chr5:43233243-43233362
  hypo
ctggccaatgagatggagatgcggtcacgcatgattactgcttcacggctgccgaggcgatggtggagacaaggagagattgttgcttcttacagtgcgactcttaggtgattgatata

SEQ ID NO: 19432 - DNA, 247 bp, Homo sapiens; identical to SEQ ID NO: 3935
  chr5:43557518-43557765
  hypo

SEQ ID NO: 19433 - DNA, 80 bp, Homo sapiens
  chr5:45196606-45196686
  hypo
aaagtatttcttttcttatttcgctgaggaagacagcaaaggaaaaaaatgtagagatcgtgttttatataatgtagctt

SEQ ID NO: 19434 - DNA, 45 bp, Homo sapiens
  chr5:45225671-45225716
  hypo
ggagccactctctggactggccgaggacggagctggctccctctg

SEQ ID NO: 19435 - DNA, 379 bp, Homo sapiens; identical to SEQ ID NO: 3943
  chr5:49736598-49736977
  hypo

SEQ ID NO: 19436 - DNA, 222 bp, Homo sapiens; identical to SEQ ID NO: 3944
  chr5:49737098-49737320
  hypo

SEQ ID NO: 19437 - DNA, 34 bp, Homo sapiens
  chr5:49903304-49903338
  hypo
ccctctcttctcccctttcttcggtctccctcca

SEQ ID NO: 19438 - DNA, 18 bp, Homo sapiens
  chr5:52182856-52182874
  hypo
cctcggcctccctgaaat

SEQ ID NO: 19439 - DNA, 31 bp, Homo sapiens
  chr5:53593991-53594022
  hypo
cagtgtactaagttcccgcaccccattgtct

SEQ ID NO: 19440 - DNA, 72 bp, Homo sapiens
  chr5:54069141-54069213
  hypo
acctgattctttctttttttccggttttgttttttttttttgggttttttttttttttttttgagatggagt

SEQ ID NO: 19441 - DNA, 108 bp, Homo sapiens; identical to SEQ ID NO: 3959
  chr5:54469035-54469143
  hypo

SEQ ID NO: 19442 - DNA, 99 bp, Homo sapiens
  chr5:54665638-54665737
  hypo
tagccagtcactaacccgtgttatttctttttaccaatgagaattcctgacagcttttgtaatctagccgctcttctaattcatccctttttcttttct

SEQ ID NO: 19443 - DNA, 33 bp, Homo sapiens
  chr5:54734439-54734472
  hypo
tgtacataggccaggcgcggtggctcacgcctg

SEQ ID NO: 19444 - DNA, 30 bp, Homo sapiens
  chr5:55032937-55032967
  hypo
aagtggtggacccccgaaatcttacaggct

SEQ ID NO: 19445 - DNA, 34 bp, Homo sapiens
  chr5:55330820-55330854
  hypo
ttagaggcgtgagccaccgcgtctggcctctttc

SEQ ID NO: 19446 - DNA, 24 bp, Homo sapiens
  chr5:55335522-55335546
  hypo
tgcaacctccgcctccagggttca

SEQ ID NO: 19447 - DNA, 30 bp, Homo sapiens
  chr5:56718334-56718364
  hypo
gaggaggaccagggcgagcagcagccgcag

SEQ ID NO: 19448 - DNA, 51 bp, Homo sapiens; identical to SEQ ID NO: 3974
  chr5:57755844-57755895
  hypo

SEQ ID NO: 19449 - DNA, 31 bp, Homo sapiens; identical to SEQ ID NO: 3975
  chr5:57756573-57756604
  hypo

SEQ ID NO: 19450 - DNA, 31 bp, Homo sapiens; identical to SEQ ID NO: 3984
  chr5:60626140-60626171
  hypo

SEQ ID NO: 19451 - DNA, 35 bp, Homo sapiens
  chr5:60676648-60676683
  hypo
cgggcgaggtggctcacgcctatagtcccagcact

SEQ ID NO: 19452 - DNA, 31 bp, Homo sapiens
  chr5:60821801-60821832
  hypo
tggtaagtgaccaaaccggaaagacatttcc

SEQ ID NO: 19453 - DNA, 84 bp, Homo sapiens
  chr5:61690790-61690874
  hypo
gactgaagaggcagattgtgacgttcaatgtttccttgatttgacgggttaaaagatgtagactttttttttttttttgagacg

SEQ ID NO: 19454 - DNA, 22 bp, Homo sapiens
  chr5:61812121-61812143
  hypo
ttttttttttcctttttgagac

SEQ ID NO: 19455 - DNA, 31 bp, Homo sapiens
  chr5:61938738-61938769
  hypo
gcccagaatttatggacgtgggccttcaacg

SEQ ID NO: 19456 - DNA, 294 bp, Homo sapiens; identical to SEQ ID NO: 3987
  chr5:63461427-63461721
  hypo

SEQ ID NO: 19457 - DNA, 139 bp, Homo sapiens
  chr5:64339981-64340120
  hypo
ctaaggagacacaaaacgaaaacaactgctgcctcacagaagtttcaatactaaaataggtagcacatatctattaagtactcattcaacttatcatttttattttatttcatttttgagacagagtctcgccctgttg

SEQ ID NO: 19458 - DNA, 30 bp, Homo sapiens
  chr5:64395529-64395559
  hypo
gcagtactcactaccggccagttgcaatcc

SEQ ID NO: 19459 - DNA, 30 bp, Homo sapiens
  chr5:64446588-64446618
  hypo
catctggaactcatcgtaattgtcaacaaa

SEQ ID NO: 19460 - DNA, 42 bp, Homo sapiens
  chr5:65020926-65020968
  hypo
cggcagaagtggcactgtttcgcatttttgcaaaactaatgt

SEQ ID NO: 19461 - DNA, 35 bp, Homo sapiens
  chr5:65107356-65107391
  hypo
ttttcaggcaaggcacggtgactcacgcctgtaat

SEQ ID NO: 19462 - DNA, 78 bp, Homo sapiens
  chr5:65465906-65465984
  hypo
agacagaaagacagacgtagatctaagagcccacataaaaaacgctctaaatcaagggagagacggaagtcaaggagt

SEQ ID NO: 19463 - DNA, 206 bp, Homo sapiens
  chr5:65988336-65988542
  hypo
tgaaccagggctattccgcaagctgggcttccgtcctttgaatattcgaggcaataggtgttccaccatcagaacacttaagctagtctgttacttctgcagtggactcattaaatcattttgctaggggtcctaatatataaaacaaccaacttgtttgcatatcattcatcgccttttgattcccttaccgttctgcaatcatc

SEQ ID NO: 19464 - DNA, 80 bp, Homo sapiens
  chr5:66441341-66441421
  hypo
ccttaggcttgggacacgatcttctgagagctaagatcagatgtctcagacccctcctcagtgctcggccatgcagcaaa

SEQ ID NO: 19465 - DNA, 25 bp, Homo sapiens
  chr5:66911440-66911465
  hypo
cagctgcggtggctcacgcctgtaa

SEQ ID NO: 19466 - DNA, 163 bp, Homo sapiens
  chr5:66938603-66938766
  hypo
tgaattgattttaaaccgcaaaaatgaatcgttttattttgctaacagggaaatcatattacatagcctactccatgtaaagtagtttcggtttctgcaaaggaaaaagaacatgatcggatttagcaaaatggtgtattacatagggcgaaaatcagatcat

SEQ ID NO: 19467 - DNA, 175 bp, Homo sapiens
  chr5:67617619-67617794
  hypo
cttcctatgtgccagacgccgaactaaatgttttacaaggatagtctcagttaattctcagcacaccctatgagttgagtactatctgcgtcatccccactatattgatgttaaaactgactgaggcacacagagcgcatcagtaactttcttaaggtcacgaagttactaagtt

SEQ ID NO: 19468 - DNA, 24 bp, Homo sapiens
  chr5:67646893-67646917
  hypo
caccacgcccggcctgggctcagt

SEQ ID NO: 19469 - DNA, 138 bp, Homo sapiens
  chr5:67717788-67717926
  hypo
gaaaaccagtttacctgaagccgagcgtttatgtgggagagcggtagagcataacgtgtctgtaaggagtcctcatgtctgtgcgagctgggctgtgttctaggctgaggagtttgcgatgtgttctaagggcagagg

SEQ ID NO: 19470 - DNA, 38 bp, Homo sapiens
  chr5:67753208-67753246
  hypo
taaagataacttggccaggtgcggtggctcacatctgc

SEQ ID NO: 19471 - DNA, 37 bp, Homo sapiens
  chr5:67753365-67753402
  hypo
cttaaaaaaaataaccgagccaccaagtgatcctatc

SEQ ID NO: 19472 - DNA, 27 bp, Homo sapiens
  chr5:68133363-68133390
  hypo
agccaccgcgcccggccagaaatgggt

SEQ ID NO: 19473 - DNA, 30 bp, Homo sapiens
  chr5:68505721-68505751
  hypo
aagcatatccataacgtttacagttgtagt

SEQ ID NO: 19474 - DNA, 30 bp, Homo sapiens
  chr5:71780033-71780063
  hypo
gggcgcggtggctcacgcctgtaatcccag

SEQ ID NO: 19475 - DNA, 182 bp, Homo sapiens
  chr5:72388278-72388460
  hypo
gtcagaacaagtcattcgccctttctttacggttggagtatggcagccatagctccagactgtatgtgtttacatccacagctaggagggacagttccagtatgtctgtcttttttttgtacgaagagtaaaagtttttccagaagctcccagctcgtatctgtttacgttctgttggcctg

SEQ ID NO: 19476 - DNA, 40 bp, Homo sapiens; identical to SEQ ID NO: 4019
  chr5:72732869-72732909
  hypo

SEQ ID NO: 19477 - DNA, 659 bp, Homo sapiens; identical to SEQ ID NO: 4020
  chr5:72733012-72733671
  hypo

SEQ ID NO: 19478 - DNA, 2381 bp, Homo sapiens; identical to SEQ ID NO: 4021
  chr5:72742463-72744844
  hypo

SEQ ID NO: 19479 - DNA, 31 bp, Homo sapiens
  chr5:72806527-72806558
  hypo
gagtgggtagcaggttcgtcttccccttgac

SEQ ID NO: 19480 - DNA, 1069 bp, Homo sapiens; identical to SEQ ID NO: 4024
  chr5:72921497-72922566
  hypo

SEQ ID NO: 19481 - DNA, 195 bp, Homo sapiens
  chr5:73081112-73081307
  hypo
aaattaatggatcacacgagagtccttttttcgcagttctcaacctctcatagaaaccgtctgtgaaaggtactttgaaaatgttgttcttcctcaactctgtggcacctccctctctggatcttatgtcctccattttcactatcacctgggttcccgccatctgttagtccagtaatgcgcacaccagagaag

SEQ ID NO: 19482 - DNA, 41 bp, Homo sapiens
  chr5:73205692-73205733
  hypo
cccgcggtgctccttccgggtggccccgaggtatggacctt

SEQ ID NO: 19483 - DNA, 46 bp, Homo sapiens
  chr5:73247792-73247838
  hypo
aacacgacaaaagaaccgttagtttcgggccgagcacggtggctca

SEQ ID NO: 19484 - DNA, 179 bp, Homo sapiens
  chr5:73627933-73628112
  hypo
tgtttttctcattttacggatgagaaaactgggttcagggatgacaacccatgcaagtccacacaacaaagaatgatttctcccggctgtcacttcggtgctaaaatgctctgtagtttttctttctgccacagacacccaggagcttctcttcgctgtgttcccgtggcattggagtg

SEQ ID NO: 19485 - DNA, 20 bp, Homo sapiens
  chr5:73665501-73665521
  hypo
cgggcactgtggctcacgcc

SEQ ID NO: 19486 - DNA, 194 bp, Homo sapiens; identical to SEQ ID NO: 4025
  chr5:73843884-73844078
  hypo

SEQ ID NO: 19487 - DNA, 246 bp, Homo sapiens; identical to SEQ ID NO: 4026
  chr5:73935741-73935987
  hypo

SEQ ID NO: 19488 - DNA, 423 bp, Homo sapiens; identical to SEQ ID NO: 4027
  chr5:73936032-73936455
  hypo

SEQ ID NO: 19489 - DNA, 30 bp, Homo sapiens
  chr5:73980422-73980452
  hypo
gttgacagcgtgagcggcgacccggtgtcg

SEQ ID NO: 19490 - DNA, 204 bp, Homo sapiens; identical to SEQ ID NO: 4030
  chr5:74162515-74162719
  hypo

SEQ ID NO: 19491 - DNA, 538 bp, Homo sapiens; identical to SEQ ID NO: 4031
  chr5:74348356-74348894
  hypo

SEQ ID NO: 19492 - DNA, 1050 bp, Homo sapiens; identical to SEQ ID NO: 4032
  chr5:74348906-74349956
  hypo

SEQ ID NO: 19493 - DNA, 38 bp, Homo sapiens
  chr5:74652648-74652686
  hypo
acacacctgtggtcctcgctacacggtaggctggggca

SEQ ID NO: 19494 - DNA, 26 bp, Homo sapiens
  chr5:74826906-74826932
  hypo
caggcgtgagccactgcacccaaacc

SEQ ID NO: 19495 - DNA, 423 bp, Homo sapiens; identical to SEQ ID NO: 4034
  chr5:75379952-75380375
  hypo

SEQ ID NO: 19496 - DNA, 1768 bp, Homo sapiens; identical to SEQ ID NO: 4036
  chr5:75698445-75700213
  hypo

SEQ ID NO: 19497 - DNA, 30 bp, Homo sapiens
  chr5:75784942-75784972
  hypo
ctccctccgtgcctcgcagtggtagggttc

SEQ ID NO: 19498 - DNA, 52 bp, Homo sapiens
  chr5:76327361-76327413
  hypo
ttaagcagcttatttcgtttccaagatggtaggggcaaatgttaatacttaa

SEQ ID NO: 19499 - DNA, 38 bp, Homo sapiens
  chr5:76328104-76328142
  hypo
agaggtggctgggcgcggtggctcacgcctgtaatcct

SEQ ID NO: 19500 - DNA, 170 bp, Homo sapiens
  chr5:76372311-76372481
  hypo
ctgaagcaagggaaggatggccgaggggagacagagtgcacctggtattggttgaataatatgggcagtaaaaaagcgggctctgggactgccccgatgagggctagagatgatgcgggtctacagcagtcatggaaactagaggggacgtccctcacccacccttcaga

SEQ ID NO: 19501 - DNA, 47 bp, Homo sapiens
  chr5:76373686-76373733
  hypo
ggctcgccactcctcattctgcggcgcccgcacgctggggagcaggg

SEQ ID NO: 19502 - DNA, 30 bp, Homo sapiens; identical to SEQ ID NO: 4046
  chr5:76507085-76507115
  hypo

SEQ ID NO: 19503 - DNA, 19 bp, Homo sapiens
  chr5:77047288-77047307
  hypo
caccgcgccggccagcctg

SEQ ID NO: 19504 - DNA, 560 bp, Homo sapiens; identical to SEQ ID NO: 4056
  chr5:77268309-77268869
  hypo

SEQ ID NO: 19505 - DNA, 38 bp, Homo sapiens; identical to SEQ ID NO: 4057
  chr5:77269197-77269235
  hypo

SEQ ID NO: 19506 - DNA, 30 bp, Homo sapiens
  chr5:77511969-77511999
  hypo
aagttacatagcttgcggtaatttttatga

SEQ ID NO: 19507 - DNA, 5 bp, Homo sapiens
  chr5:77655480-77655485
  hypo
gggat

SEQ ID NO: 19508 - DNA, 31 bp, Homo sapiens
  chr5:77816709-77816740
  hypo
ctgaaaaatcactgaccgttcctttcttata

SEQ ID NO: 19509 - DNA, 30 bp, Homo sapiens
  chr5:77848663-77848693
  hypo
ttcaacaaagcgtcacgggctatacagaat

SEQ ID NO: 19510 - DNA, 31 bp, Homo sapiens
  chr5:77916703-77916734
  hypo
ttaaatgcacatatgccgtggctccagtgaa

SEQ ID NO: 19511 - DNA, 31 bp, Homo sapiens; identical to SEQ ID NO: 4058
  chr5:77944026-77944057
  hypo

SEQ ID NO: 19512 - DNA, 255 bp, Homo sapiens
  chr5:78105381-78105636
  hypo
agctccccaagtcagcggcacttcttgccttcagctgaagctgggagacccatcctacggtcaggctgagggccgccagagcctgcggccaggcctaacactaggcagagacgactctgcagctgtctgctcacactcactgccagtcacgcttcactccactttcctgctctgaaaatcacgtcctggcaacctgcccatcggacctggagccagccttgccctctccactgcgggcctgtaggcctggccttg

SEQ ID NO: 19513 - DNA, 4 bp, Homo sapiens
  chr5:78162671-78162675
  hypo
ggct

SEQ ID NO: 19514 - DNA, 140 bp, Homo sapiens
  chr5:78264450-78264590
  hypo
cgtgagccaccgcacccagcctggaaatattcttacattaggttttgccaggcattaaaaaaataaaaaatcaatccatatccctttttggtaataagggtctctgagagtacagcggtctccaacgtggatagtaaact

SEQ ID NO: 19515 - DNA, 51 bp, Homo sapiens
  chr5:78264836-78264887
  hypo
gtatcaaatcctcggcgggttggaaggcattctttccggtacattcccagg

SEQ ID NO: 19516 - DNA, 3 bp, Homo sapiens
  chr5:78469275-78469278
  hypo
gaa

SEQ ID NO: 19517 - DNA, 31 bp, Homo sapiens; identical to SEQ ID NO: 4064
  chr5:78810400-78810431
  hypo

SEQ ID NO: 19518 - DNA, 37 bp, Homo sapiens
  chr5:78881931-78881968
  hypo
gaccttaaaaatgatctaattcggccgggtgcggtgg

SEQ ID NO: 19519 - DNA, 37 bp, Homo sapiens
  chr5:78949954-78949991
  hypo
agagttaatgaaaaaggaggccgggcacggtggctca

SEQ ID NO: 19520 - DNA, 31 bp, Homo sapiens
  chr5:79086452-79086483
  hypo
gaagtcaggagggctgcggtggggtccgaga

SEQ ID NO: 19521 - DNA, 31 bp, Homo sapiens
  chr5:79498711-79498742
  hypo
ttcatcttgtgagccacggttgttgacatca

SEQ ID NO: 19522 - DNA, 30 bp, Homo sapiens
  chr5:79647599-79647629
  hypo
ttgtcctggaagtgcgcaatgaaggccttc

SEQ ID NO: 19523 - DNA, 20 bp, Homo sapiens
  chr5:79783234-79783254
  hypo
tatttgacagtctagctcta

SEQ ID NO: 19524 - DNA, 180 bp, Homo sapiens; identical to SEQ ID NO: 4068
  chr5:79865522-79865702
  hypo

SEQ ID NO: 19525 - DNA, 89 bp, Homo sapiens; identical to SEQ ID NO: 4069
  chr5:79865744-79865833
  hypo

SEQ ID NO: 19526 - DNA, 193 bp, Homo sapiens; identical to SEQ ID NO: 4070
  chr5:79866099-79866292
  hypo

SEQ ID NO: 19527 - DNA, 30 bp, Homo sapiens
  chr5:79911129-79911159
  hypo
gccagtgcttgcccgcggggctacagagga

SEQ ID NO: 19528 - DNA, 209 bp, Homo sapiens
  chr5:79911361-79911570
  hypo
agagtgactcaaggacggatctgagggctgggtcttgtgaacgcgggctgttgtcctgccctctcccagctctaacattgtgctgaaaagttaaaatacaaaacgccaaagctccccaatcccatcccacgcccctgcctgcgcagcctttcatgcattgaatgggcagcttcatgatgctgctgcgacaatagcgacaatagcggggg

SEQ ID NO: 19529 - DNA, 164 bp, Homo sapiens
  chr5:79986400-79986564
  hypo
gctgggattacagacgtgagccactgcacctagccatccagttcaattttaaaactactgttttatttttctcattaaactttaaccgttaagtgctccttattactaatgtgatcttaaacataaacagaaatgcagaaactgaagcacgtagcaatattcat

SEQ ID NO: 19530 - DNA, 81 bp, Homo sapiens
  chr5:80076658-80076739
  hypo
cctgggcaacagagcgtgactgtctcaaataaataaataaaaccttaaacagtaaaaattcagtgacgtccttcagggagc

SEQ ID NO: 19531 - DNA, 30 bp, Homo sapiens
  chr5:80550845-80550875
  hypo
tgtcttctcgggtgcgcactggccgcagca

SEQ ID NO: 19532 - DNA, 147 bp, Homo sapiens
  chr5:80652823-80652970
  hypo
taccttcttcctctcccgcctccctctaccttgcattttctctctagcaatactcttgtgttggtggcttcccagcacacagtgtgctggttcatgcctccgtgccttcaccctcactgctacgcaattcctcgccttcccaacttt

SEQ ID NO: 19533 - DNA, 30 bp, Homo sapiens
  chr5:81192371-81192401
  hypo
gtagtgcaaacatctcgaccatgtaattcc

SEQ ID NO: 19534 - DNA, 30 bp, Homo sapiens
  chr5:81570368-81570398
  hypo
tgcgccccgcctcgcggtcacaagggcccc

SEQ ID NO: 19535 - DNA, 41 bp, Homo sapiens; identical to SEQ ID NO: 4082
  chr5:87437222-87437263
  hypo

SEQ ID NO: 19536 - DNA, 255 bp, Homo sapiens; identical to SEQ ID NO: 4083
  chr5:87437270-87437525
  hypo

SEQ ID NO: 19537 - DNA, 30 bp, Homo sapiens
  chr5:90459826-90459856
  hypo
atgattaatacaaacgtgattgttgtattt

SEQ ID NO: 19538 - DNA, 31 bp, Homo sapiens; identical to SEQ ID NO: 4107
  chr5:92917347-92917378
  hypo

SEQ ID NO: 19539 - DNA, 69 bp, Homo sapiens
  chr5:93077321-93077390
  hypo
ttcagaacagccaccggccccctcaagccccgccccccagtgggcggagaaggcgttacaagccaaggg

SEQ ID NO: 19540 - DNA, 30 bp, Homo sapiens
  chr5:93414323-93414353
  hypo
caaatgcaaaattgcgtttggatcaaagtt

SEQ ID NO: 19541 - DNA, 39 bp, Homo sapiens
  chr5:94762452-94762491
  hypo
attaagaagcttgtcccaggccgggcgcggtggctcacg

SEQ ID NO: 19542 - DNA, 38 bp, Homo sapiens
  chr5:94762730-94762768
  hypo
cgatagagcaagactccgtctcaaaaaaaagaaaagaa

SEQ ID NO: 19543 - DNA, 31 bp, Homo sapiens
  chr5:94795583-94795614
  hypo
ctagtctttccataagcggtggctcacgctt

SEQ ID NO: 19544 - DNA, 1607 bp, Homo sapiens; identical to SEQ ID NO: 4115
  chr5:94955657-94957264
  hypo

SEQ ID NO: 19545 - DNA, 24 bp, Homo sapiens
  chr5:94981843-94981867
  hypo
ttttgagatggagtttcgctcgtg

SEQ ID NO: 19546 - DNA, 33 bp, Homo sapiens
  chr5:95290420-95290453
  hypo
ggcatgagccactgcgcccggccaatatcttgt

SEQ ID NO: 19547 - DNA, 134 bp, Homo sapiens
  chr5:96111421-96111555
  hypo
aaagagggtcccctctcggagctaagaccctcaggggaggccagcccgaggcatcccgcaagggaatcagggaagaacacctccacctactacctcctccgaccccagctccagctctccggctccccactgac

SEQ ID NO: 19548 - DNA, 204 bp, Homo sapiens
  chr5:96114495-96114699
  hypo
gggtaagagcagagagaagtgcgcaagatccagtgcatgtgctgagggaagaccggcaggacttgcgtagttagatgtctggggaagaaaggattcaggatgactcccgtattttatatgtccgtagtttgctctccattatgataacatctcgggctctttacttttcatgccctgcttcaggatcttcgcacctgatatttc

SEQ ID NO: 19549 - DNA, 30 bp, Homo sapiens
  chr5:96121167-96121197
  hypo
gctgcgggaccatgccgcggggacaaggca

SEQ ID NO: 19550 - DNA, 104 bp, Homo sapiens
  chr5:96121445-96121549
  hypo
cagctgctttcagaaataaaccgcgactttgtgcagcgtgtattacctgacgagctgaaatgcattgttaatgagactcgcccgatcattactgctgactgctg

SEQ ID NO: 19551 - DNA, 30 bp, Homo sapiens
  chr5:96141706-96141736
  hypo
cagttatgtctcaacgaggatgcagtgcat

SEQ ID NO: 19552 - DNA, 34 bp, Homo sapiens
  chr5:96173521-96173555
  hypo
tggtgaaagtggctctcagcgtgaaggggagctg

SEQ ID NO: 19553 - DNA, 86 bp, Homo sapiens
  chr5:96362697-96362783
  hypo
aggttacttagctcagcgtggctacagactatttcatagcaaccatttagctatgcatattgaaaaatacctctgtatggccgggc

SEQ ID NO: 19554 - DNA, 271 bp, Homo sapiens; identical to SEQ ID NO: 4119
  chr5:98109212-98109483
  hypo

SEQ ID NO: 19555 - DNA, 31 bp, Homo sapiens; identical to SEQ ID NO: 4120
  chr5:98109926-98109957
  hypo

SEQ ID NO: 19556 - DNA, 30 bp, Homo sapiens
  chr5:98239977-98240007
  hypo
atttgagcggggggccggtagcaacatttt

SEQ ID NO: 19557 - DNA, 77 bp, Homo sapiens
  chr5:98242968-98243045
  hypo
ttattgagttgttctttagtacgataaagaatatgcaaaaagagctgggagcggtggctcatgcctgtaatcccagc

SEQ ID NO: 19558 - DNA, 30 bp, Homo sapiens
  chr5:99583036-99583066
  hypo
acacatctgtgatatcgcagttgtgggtag

SEQ ID NO: 19559 - DNA, 937 bp, Homo sapiens; identical to SEQ ID NO: 4123
  chr5:100238182-100239119
  hypo

SEQ ID NO: 19560 - DNA, 1010 bp, Homo sapiens; identical to SEQ ID NO: 4124
  chr5:100239134-100240144
  hypo

SEQ ID NO: 19561 - DNA, 27 bp, Homo sapiens
  chr5:100377803-100377830
  hypo
agaaaaaagctgacttctggccgggcg

SEQ ID NO: 19562 - DNA, 26 bp, Homo sapiens
  chr5:100378069-100378095
  hypo
tgggcgaactgacataaaacatcaca

SEQ ID NO: 19563 - DNA, 30 bp, Homo sapiens; identical to SEQ ID NO: 4128
  chr5:102201406-102201436
  hypo

SEQ ID NO: 19564 - DNA, 30 bp, Homo sapiens
  chr5:102364820-102364850
  hypo
ctttccctttagcacgtttaaagttctgtg

SEQ ID NO: 19565 - DNA, 19 bp, Homo sapiens
  chr5:104382503-104382522
  hypo
cagacggctgcacatcagt

SEQ ID NO: 19566 - DNA, 2259 bp, Homo sapiens; identical to SEQ ID NO: 4129
  chr5:107005046-107007305
  hypo

SEQ ID NO: 19567 - DNA, 37 bp, Homo sapiens; identical to SEQ ID NO: 4130
  chr5:107008028-107008065
  hypo

SEQ ID NO: 19568 - DNA, 30 bp, Homo sapiens; identical to SEQ ID NO: 4132
  chr5:107141292-107141322
  hypo

SEQ ID NO: 19569 - DNA, 207 bp, Homo sapiens; identical to SEQ ID NO: 4133
  chr5:107359032-107359239
  hypo

SEQ ID NO: 19570 - DNA, 122 bp, Homo sapiens
  chr5:107703568-107703690
  hypo
tggaagtctaaacaaaggtcacgccagtacttgcaaaccaatgatgcggaaaggcaacgctcatccagtgacaaattggaaaatatctgtgaataaaaaacggtaccatataatatgtgcta

SEQ ID NO: 19571 - DNA, 39 bp, Homo sapiens
  chr5:108730037-108730076
  hypo
catgcccagccacatgctagttctcgacttggctggtgt

SEQ ID NO: 19572 - DNA, 30 bp, Homo sapiens
  chr5:108906276-108906306
  hypo
cgagataacgtctcaaaaaaaaaaaaaaaa

SEQ ID NO: 19573 - DNA, 30 bp, Homo sapiens; identical to SEQ ID NO: 4135
  chr5:109024882-109024912
  hypo

SEQ ID NO: 19574 - DNA, 30 bp, Homo sapiens
  chr5:109162075-109162105
  hypo
catatataaactggacgtaacctgtaaatc

SEQ ID NO: 19575 - DNA, 30 bp, Homo sapiens
  chr5:109162335-109162365
  hypo
cattgcctgaacactcgggttgtctcaatc

SEQ ID NO: 19576 - DNA, 58 bp, Homo sapiens; identical to SEQ ID NO: 4136
  chr5:110074797-110074855
  hypo

SEQ ID NO: 19577 - DNA, 31 bp, Homo sapiens; identical to SEQ ID NO: 4137
  chr5:110075104-110075135
  hypo

SEQ ID NO: 19578 - DNA, 570 bp, Homo sapiens; identical to SEQ ID NO: 4138
  chr5:110559548-110560118
  hypo

SEQ ID NO: 19579 - DNA, 381 bp, Homo sapiens; identical to SEQ ID NO: 4139
  chr5:110560138-110560519
  hypo

SEQ ID NO: 19580 - DNA, 20 bp, Homo sapiens
  chr5:110826285-110826305
  hypo
aactccgtcaaaaaaaaata

SEQ ID NO: 19581 - DNA, 766 bp, Homo sapiens; identical to SEQ ID NO: 4140
  chr5:110847624-110848390
  hypo

SEQ ID NO: 19582 - DNA, 123 bp, Homo sapiens
  chr5:111065739-111065862
  hypo
ctctaagtcaggcaggcgaggctacggaaaggaagagatttggtaagtaaattacagttttgtgattgctcccgctaccgtgactgcatgtccgtgagcgccagccaacgagacaatggtctc

SEQ ID NO: 19583 - DNA, 30 bp, Homo sapiens; identical to SEQ ID NO: 4142
  chr5:111093898-111093928
  hypo

SEQ ID NO: 19584 - DNA, 20 bp, Homo sapiens
  chr5:111160054-111160074
  hypo
gactccgtctcaaaaaataa

SEQ ID NO: 19585 - DNA, 30 bp, Homo sapiens
  chr5:112094580-112094610
  hypo
tgagtcaccgcacccagcctacctagagct

SEQ ID NO: 19586 - DNA, 30 bp, Homo sapiens; identical to SEQ ID NO: 4145
  chr5:112175624-112175654
  hypo

SEQ ID NO: 19587 - DNA, 31 bp, Homo sapiens
  chr5:112255823-112255854
  hypo
gactaagtgtctgtaccggactaacacagta

SEQ ID NO: 19588 - DNA, 31 bp, Homo sapiens; identical to SEQ ID NO: 4161
  chr5:114879309-114879340
  hypo

SEQ ID NO: 19589 - DNA, 201 bp, Homo sapiens
  chr5:115570378-115570579
  hypo
taatttacacacagatcgagttaggaacttccgaaaaaatagtactcgttctaaaaacatccaattggataatttcacttataagggtaaagagtactgattttaaaaggttctcagagtctgttttgtgaagagatcccttaaagtataatggtggcggagcacagggaagagctcacatgcagccgcaggagagctagg

SEQ ID NO: 19590 - DNA, 134 bp, Homo sapiens
  chr5:115783378-115783512
  hypo
cacagacgcagtagacggtgatgcccgagaagacggcccccatgacgaaagccaggatgactgcaatggccaagagggtgacgggaaccagctggtcgtggcctttgaggtaactttcccgaatcactcctgca

SEQ ID NO: 19591 - DNA, 30 bp, Homo sapiens
  chr5:118309318-118309348
  hypo
agcctccttgctcgcggcagcctccttgct

SEQ ID NO: 19592 - DNA, 31 bp, Homo sapiens
  chr5:118420252-118420283
  hypo
acagaaatggaaaaaacgatccttggctggg

SEQ ID NO: 19593 - DNA, 36 bp, Homo sapiens
  chr5:118461527-118461563
  hypo
ggaatacaggcgtgagccaccgcgcctggccaatat

SEQ ID NO: 19594 - DNA, 24 bp, Homo sapiens
  chr5:118717628-118717652
  hypo
aaaaaacaccgaacaaaaaacgga

SEQ ID NO: 19595 - DNA, 150 bp, Homo sapiens
  chr5:121187994-121188144
  hypo
aggtatttccttcaccagtcccgggaggagaccgagcacgcggagaagctgatgaggctgcagaaccagcgaggaggccggatccgcctgcaggacatcaagaagccggaacaggacgactgggaaagcgggctgcatgccatggagtgt

SEQ ID NO: 19596 - DNA, 30 bp, Homo sapiens
  chr5:121478913-121478943
  hypo
tggcctagcagctccgttcatgcacaactt

SEQ ID NO: 19597 - DNA, 359 bp, Homo sapiens; identical to SEQ ID NO: 4174
  chr5:121647808-121648167
  hypo

SEQ ID NO: 19598 - DNA, 31 bp, Homo sapiens
  chr5:122116620-122116651
  hypo
tttgaaaatttcattacgaattatctatgtt

SEQ ID NO: 19599 - DNA, 30 bp, Homo sapiens
  chr5:122152725-122152755
  hypo
aagagctgatttttcggcttgaataatgag

SEQ ID NO: 19600 - DNA, 254 bp, Homo sapiens; identical to SEQ ID NO: 4180
  chr5:122425701-122425955
  hypo

SEQ ID NO: 19601 - DNA, 656 bp, Homo sapiens; identical to SEQ ID NO: 4181
  chr5:122426004-122426660
  hypo

SEQ ID NO: 19602 - DNA, 134 bp, Homo sapiens; identical to SEQ ID NO: 4186
  chr5:124084168-124084302
  hypo

SEQ ID NO: 19603 - DNA, 417 bp, Homo sapiens; identical to SEQ ID NO: 4187
  chr5:124084645-124085062
  hypo

SEQ ID NO: 19604 - DNA, 40 bp, Homo sapiens
  chr5:125911665-125911705
  hypo
tggacaggcagggcgcggtggctcacgcctgtaatcccag

SEQ ID NO: 19605 - DNA, 31 bp, Homo sapiens
  chr5:126073558-126073589
  hypo
ccttttctttagaacccgatccaatagcgac

SEQ ID NO: 19606 - DNA, 30 bp, Homo sapiens
  chr5:126193455-126193485
  hypo
aaaaaaattcctaacgtcagcagtctttaa

SEQ ID NO: 19607 - DNA, 221 bp, Homo sapiens
  chr5:126250582-126250803
  hypo
attagagctaagttttcaggacgtgccccacttactgacctccactaacggcctgggtttgcgctcgactgcaaacctgaagtggcagagttcacagtagctggtgtttgaggatgacagccagtgctccaggcagctccgatgaattgtccccaaggtccctgtacattcacatggagagagcaagtcctcttggctgctgccctcgtggcagatcctgc

SEQ ID NO: 19608 - DNA, 31 bp, Homo sapiens
  chr5:126260014-126260045
  hypo
tgtgagaggcttaatacgtggggagcacagc

SEQ ID NO: 19609 - DNA, 20 bp, Homo sapiens
  chr5:126338839-126338859
  hypo
gaggtggaagcttggtaagt

SEQ ID NO: 19610 - DNA, 19 bp, Homo sapiens
  chr5:126339398-126339417
  hypo
gccagaggagtatacaacc

SEQ ID NO: 19611 - DNA, 174 bp, Homo sapiens; identical to SEQ ID NO: 4194
  chr5:127873552-127873726
  hypo

SEQ ID NO: 19612 - DNA, 1816 bp, Homo sapiens; identical to SEQ ID NO: 4199
  chr5:128795615-128797431
  hypo

SEQ ID NO: 19613 - DNA, 30 bp, Homo sapiens; identical to SEQ ID NO: 4200
  chr5:129196622-129196652
  hypo

SEQ ID NO: 19614 - DNA, 660 bp, Homo sapiens; identical to SEQ ID NO: 4201
  chr5:129240274-129240934
  hypo

SEQ ID NO: 19615 - DNA, 635 bp, Homo sapiens; identical to SEQ ID NO: 4202
  chr5:129240962-129241597
  hypo

SEQ ID NO: 19616 - DNA, 27 bp, Homo sapiens
  chr5:130530661-130530688
  hypo
gcaaaataaaattggccgggatcgctg

SEQ ID NO: 19617 - DNA, 98 bp, Homo sapiens
  chr5:130636509-130636607
  hypo
gcataaattgtgactatcacaagcaaagaaggatgaatggtcattctagttataatgtgcatattgcataataaaatagtttccgttttttagctatg

SEQ ID NO: 19618 - DNA, 66 bp, Homo sapiens
  chr5:130661705-130661771
  hypo
ttttcattactgttaacgtctgagtattttaaaattttcttaatgtttttacgttttaatctgagt

SEQ ID NO: 19619 - DNA, 43 bp, Homo sapiens
  chr5:130723957-130724000
  hypo
gattacagccatgagccaccacgcctggctgagtaacttttct

SEQ ID NO: 19620 - DNA, 56 bp, Homo sapiens; identical to SEQ ID NO: 4203
  chr5:130970374-130970430
  hypo

SEQ ID NO: 19621 - DNA, 31 bp, Homo sapiens
  chr5:131037382-131037413
  hypo
ttctaaaccattctaacgggtctacccacct

SEQ ID NO: 19622 - DNA, 161 bp, Homo sapiens; identical to SEQ ID NO: 4205
  chr5:131133234-131133395
  hypo

SEQ ID NO: 19623 - DNA, 108 bp, Homo sapiens; identical to SEQ ID NO: 4207
  chr5:131563715-131563823
  hypo

SEQ ID NO: 19624 - DNA, 30 bp, Homo sapiens
  chr5:131608231-131608261
  hypo
tgggatgctgcgtgcggcgcgacgacagga

SEQ ID NO: 19625 - DNA, 98 bp, Homo sapiens
  chr5:131609887-131609985
  hypo
cccaaggggtcagactgtgtgcgttgaggccctgagggcgccccaccgtagcgctgcgcaggtgtgcacgcacacacgctccctgcagccacacccaa

SEQ ID NO: 19626 - DNA, 30 bp, Homo sapiens
  chr5:131658146-131658176
  hypo
ctccacggaactcgcggaggccagcttcca

SEQ ID NO: 19627 - DNA, 30 bp, Homo sapiens
  chr5:131725310-131725340
  hypo
cctgggattctaggcgacttctggagcctg

SEQ ID NO: 19628 - DNA, 239 bp, Homo sapiens; identical to SEQ ID NO: 4211
  chr5:131831521-131831760
  hypo

SEQ ID NO: 19629 - DNA, 31 bp, Homo sapiens
  chr5:131982534-131982565
  hypo
gtaatggtctgcagcccgggggttggggacc

SEQ ID NO: 19630 - DNA, 160 bp, Homo sapiens
  chr5:132001669-132001829
  hypo
agaacgcaacgcagggcgaaggcggagcagggagatgagcgccaaggtgcctgcagagatgctggtggggagcgatggtgcttgtggtagtggaggactggagaggggcgtgtgtgtaagatgcatgtatacattatactgctatcgtatacattattta

SEQ ID NO: 19631 - DNA, 60 bp, Homo sapiens
  chr5:132095926-132095986
  hypo
agactgaggagggatgcgccacaggtgtccaagcagaaaccaccacggcttttggaatct

SEQ ID NO: 19632 - DNA, 30 bp, Homo sapiens
  chr5:132110953-132110983
  hypo
ggaccatctctggacgagcagggatggaag

SEQ ID NO: 19633 - DNA, 30 bp, Homo sapiens
  chr5:132167161-132167191
  hypo
gccaagaaatgctccgttcctgagaggggc

SEQ ID NO: 19634 - DNA, 30 bp, Homo sapiens
  chr5:132204383-132204413
  hypo
tatcagctataaaacggatgaggtgatctc

SEQ ID NO: 19635 - DNA, 39 bp, Homo sapiens
  chr5:132267349-132267388
  hypo
taaaagcaaagaacgcggccaggcgcggtgactcacacc

SEQ ID NO: 19636 - DNA, 31 bp, Homo sapiens
  chr5:132370349-132370380
  hypo
ggcaaatgttaagaagcgttggtaatatttc

SEQ ID NO: 19637 - DNA, 245 bp, Homo sapiens; identical to SEQ ID NO: 4214
  chr5:132387333-132387578
  hypo

SEQ ID NO: 19638 - DNA, 31 bp, Homo sapiens
  chr5:132448250-132448281
  hypo
ccaatggactcagcctcgtgtgatcctatta

SEQ ID NO: 19639 - DNA, 31 bp, Homo sapiens
  chr5:132584999-132585030
  hypo
taaactaaaactctcccgtcctgccactgtc

SEQ ID NO: 19640 - DNA, 31 bp, Homo sapiens
  chr5:132607917-132607948
  hypo
ctgaaaattaatgacacggccatttcttgaa

SEQ ID NO: 19641 - DNA, 93 bp, Homo sapiens
  chr5:133240404-133240497
  hypo
gggccacctcctatggggccctcagttccaggcacagagaaaaacacccgggaaagcctcgtgcctcactccagggaacggaccacgtggggg

SEQ ID NO: 19642 - DNA, 30 bp, Homo sapiens
  chr5:133456268-133456298
  hypo
ctgcttccctccgctcggaagtctcttccc

SEQ ID NO: 19643 - DNA, 91 bp, Homo sapiens
  chr5:133457287-133457378
  hypo
aaaaaatgcaaaaaaccctcatggccatcagcctgggaagccgtggccaccctgtgcgtgcccctcattcttgccacgatgccacaggtgt

SEQ ID NO: 19644 - DNA, 208 bp, Homo sapiens
  chr5:133459374-133459582
  hypo
cttggtgctggggcagcgctggttccagagcctgggagaagctgatgggcgcatgcagcatgttggcatcatggtagggcaaggcggtacccacccacagatggtgtgaattggacatggcggacaaaggcggggagagccagctgctggggcagggtggatgctaggaggcatggggatcatgggaggaactcgaacagagccaagg

SEQ ID NO: 19645 - DNA, 30 bp, Homo sapiens
  chr5:133461918-133461948
  hypo
gctggccaccgagtgcgtgcctggctgcag

SEQ ID NO: 19646 - DNA, 21 bp, Homo sapiens
  chr5:133462599-133462620
  hypo
aaagatcgtacaagccaagaa

SEQ ID NO: 19647 - DNA, 78 bp, Homo sapiens
  chr5:133464193-133464271
  hypo
tgagcgcttcatgaccgtggcggcctcagggcaggactgtcctcctagggctggtgcaggctgcgggacagaacacat

SEQ ID NO: 19648 - DNA, 30 bp, Homo sapiens
  chr5:133464829-133464859
  hypo
cactttcctcgtctgcgaagtctgtatgca

SEQ ID NO: 19649 - DNA, 208 bp, Homo sapiens
  chr5:133465709-133465917
  hypo
cacagggcatccagcacgctgtgggcagggagcttgcgggccgtcctttggagagcaccgtgtcctgggcagtggtgcctggagcgggggctagggataaaagggcatgagcaggggcgcctccagcctggctggcgcactcagccctactggagtatatctgcagagatggggtctgcgaaagcccacaaatcgaggcctggtccat

SEQ ID NO: 19650 - DNA, 111 bp, Homo sapiens
  chr5:133469214-133469325
  hypo
aggccctggagtgggacgttccactgggcgagggggacatgggtgccaggccctgtgctagacggtttcccctggctcctaccaccgggcgcaaagcgggctggggattga

SEQ ID NO: 19651 - DNA, 30 bp, Homo sapiens
  chr5:133533231-133533261
  hypo
cttgaccaacaatgtcgcttcagcatgcaa

SEQ ID NO: 19652 - DNA, 18 bp, Homo sapiens
  chr5:133682472-133682490
  hypo
caccgtgcccagccggga

SEQ ID NO: 19653 - DNA, 30 bp, Homo sapiens; identical to SEQ ID NO: 4216
  chr5:133784545-133784575
  hypo

SEQ ID NO: 19654 - DNA, 14 bp, Homo sapiens
  chr5:133819426-133819440
  hypo
cccgtctcgccctg

SEQ ID NO: 19655 - DNA, 103 bp, Homo sapiens
  chr5:133820038-133820141
  hypo
ttttgttttgttttgttttgttttttactgtgatggccagaaccgttagtataatgttaaataaaagtggtagtaatgatgccaggcgcggtggctcacggga

SEQ ID NO: 19656 - DNA, 31 bp, Homo sapiens
  chr5:133823804-133823835
  hypo
tgatctaagtgttttccgaagtggttgttcc

SEQ ID NO: 19657 - DNA, 903 bp, Homo sapiens; identical to SEQ ID NO: 4217
  chr5:133862722-133863625
  hypo

SEQ ID NO: 19658 - DNA, 241 bp, Homo sapiens
  chr5:133907491-133907732
  hypo
cttcagattcctgccacgaggctctgctctgcctcccccagcctggcctggcttggattcctcgttcccaggctctgccctgccgtgtgatcaactcccactcccactggctgcttgtgtgtccaagacgccttgctcagcacccccaagtgtgggtcggagccacctggtcctgtcagtagttggtcagcacctacctcccctgagaagaaaggggccccagcggcgttgctcacttgag

SEQ ID NO: 19659 - DNA, 39 bp, Homo sapiens
  chr5:133984528-133984567
  hypo
cgggcgttcgcggccccgccggcccgactctcaagcctc

SEQ ID NO: 19660 - DNA, 25 bp, Homo sapiens
  chr5:134085042-134085067
  hypo
ccgctgcacccggccaactataggt

SEQ ID NO: 19661 - DNA, 158 bp, Homo sapiens
  chr5:134278931-134279089
  hypo
agaaatccatggtgaccgaagcacttgtgacttcggagcagtgtgatctgattttgaagtggttttgaaaactggggacggtatacataaggtgcaaagatcacggaaacatgaattagcaagtggggcctcagtctaggttacgagtgctttaggac

SEQ ID NO: 19662 - DNA, 30 bp, Homo sapiens
  chr5:134303557-134303587
  hypo
gcaaggattcccttcgtggccccttctctg

SEQ ID NO: 19663 - DNA, 31 bp, Homo sapiens
  chr5:134343157-134343188
  hypo
gacctacctgtgaagacggggtcgacaagga

SEQ ID NO: 19664 - DNA, 30 bp, Homo sapiens; identical to SEQ ID NO: 4223
  chr5:134370267-134370297
  hypo

SEQ ID NO: 19665 - DNA, 117 bp, Homo sapiens
  chr5:134436702-134436819
  hypo
tgtaaaatcacttggccgggtctgtgggtgcagatttccatcattagcctgtcttcgctgtaggcctcgctttggtgcttttcccttggtccttctgcacagcggcactgacatctc

SEQ ID NO: 19666 - DNA, 187 bp, Homo sapiens
  chr5:134453699-134453886
  hypo
agcaagctttcagagtcgggttctgattttgcacccctgctgcgaccattttgtattcctatcttaaatgctggcagacaatctggctgacttgtgtccgagaagcagttggccgtgctgggattgtgaccccagtgtgtggtgtattaccccagtgaggagtagatggacccggcctgggacagga

SEQ ID NO: 19667 - DNA, 213 bp, Homo sapiens; identical to SEQ ID NO: 4226
  chr5:134463604-134463817
  hypo

SEQ ID NO: 19668 - DNA, 155 bp, Homo sapiens
  chr5:134513709-134513864
  hypo
atggggcctggcaccccgacactctgtaggggctcaggaccccatttgctgaggtgagaccacatttcctcaagaagtggcaggagtcactcagtgggcacgtcttcacccccatgttctagagtaaagcagtgatgccgcgcggtgatgccact

SEQ ID NO: 19669 - DNA, 31 bp, Homo sapiens
  chr5:134547962-134547993
  hypo
cttcctccagcctccacgcagtgtcctgcga

SEQ ID NO: 19670 - DNA, 87 bp, Homo sapiens
  chr5:134582970-134583057
  hypo
ggcgcctttctcctggcactgcgaagtgcaccggtggccttgccgtcttccctgggggcgtgggggagaaggagagcaaatgcctta

SEQ ID NO: 19671 - DNA, 29 bp, Homo sapiens
  chr5:134583072-134583101
  hypo
ctaggaacggctaggacctcccagggttt

SEQ ID NO: 19672 - DNA, 152 bp, Homo sapiens
  chr5:134608287-134608439
  hypo
gcctgcatgggagtggcggggaggccgagggccactccccagggaaagggctcctcagggctttcggcactctgagggctccataatgcaggtccctgtggtgatacgagaccagtgcctgactacagcgtaggttccggaaaagtaagggg

SEQ ID NO: 19673 - DNA, 30 bp, Homo sapiens
  chr5:134673487-134673517
  hypo
ttaatagagagcagacggttccaccggaat

SEQ ID NO: 19674 - DNA, 31 bp, Homo sapiens
  chr5:134785498-134785529
  hypo
gcgtcctgcccccgtccgagaagcagagggc

SEQ ID NO: 19675 - DNA, 30 bp, Homo sapiens
  chr5:135082181-135082211
  hypo
ctgtcgtgcatttccgccttgcaggtacaa

SEQ ID NO: 19676 - DNA, 357 bp, Homo sapiens
  chr5:135091245-135091602
  hypo
actatggtgttaatgaaatatcgctgtgatatttaccatatgtagcgtcaacgcactatggtattaatgaaatatcgctgtgatatttatcatatctaatgacaacgaactatagtattaattaaatattgctgtggtatttcttatatctagtgtcaacgcactatcttattaaggaaatatcgctgtgatatatatatatggtcatacgtagtgtcaatgcactatggtatgaatgaaatatcgctgcgacatttatctcatatctaatgtcaatgcagtgtagtattaatgaaatatcgctgtgatatttatcatatcatatttagtgtcaacgcactatgatagtaataaaat

SEQ ID NO: 19677 - DNA, 30 bp, Homo sapiens; identical to SEQ ID NO: 4237
  chr5:135335661-135335691
  hypo

SEQ ID NO: 19678 - DNA, 135 bp, Homo sapiens; identical to SEQ ID NO: 4239
  chr5:135468431-135468566
  hypo

SEQ ID NO: 19679 - DNA, 958 bp, Homo sapiens; identical to SEQ ID NO: 4240
  chr5:135528040-135528998
  hypo

SEQ ID NO: 19680 - DNA, 750 bp, Homo sapiens
  chr5:135692312-135693062
  hypo
tgttggctagtctggctaactcgttgctgagctccagggcggtgaggacagggtcttcgctggacagggacaagtaggcagcactcgccagtcctttgtaggcgttcatgcgcgagcgcgagtggctgaaggagtctttccgctgtttctcggtgcactcattgcacttgcagaagtagtcgtggggccgctcgatgcgggcgcccttgagcagcaggatgtgcacgatctcatactcctggcagtgcgccgccaggatgatgggcgtgatgtcgtgggagaagcgcgtgccgtcctcgtcgtaggcatagaagtcgtcgtcgcgcagctcctgttccagcgggctgagcgtcaggcgctggccctgcgcgaaggccgggtggttgaggatggcctccacgatgcgcacatagcccttgctgatggccagcagcagcgcgtcccccacccgtgccaggttctccttcttcagcagcagctccgtgacctctaggtgctcgttgcccacggccagctgcagagcgttctgccccatgtagtccacacagttgaagttaagggtcttggactcctccagcattttccggaccaccgggatgttgccatactcagccgagtccaggaagcgctcctcctcgggcgtcagactggtgcccttctcgttgaacatgtaggcgggaccccggatggcctggcgacggcccttctccctcagcgttgtgtgccggcgctgcatgtttttgaaggtgc

SEQ ID NO: 19681 - DNA, 35 bp, Homo sapiens
  chr5:135989644-135989679
  hypo
tattctcagctgggtgcggtggctcacgcctgtaa

SEQ ID NO: 19682 - DNA, 30 bp, Homo sapiens
  chr5:136157285-136157315
  hypo
aggcaagtgacgggacgtcagcactgcatc

SEQ ID NO: 19683 - DNA, 374 bp, Homo sapiens; identical to SEQ ID NO: 4242
  chr5:136834289-136834663
  hypo

SEQ ID NO: 19684 - DNA, 174 bp, Homo sapiens; identical to SEQ ID NO: 4243
  chr5:136834706-136834880
  hypo

SEQ ID NO: 19685 - DNA, 254 bp, Homo sapiens; identical to SEQ ID NO: 4244
  chr5:136834912-136835166
  hypo

SEQ ID NO: 19686 - DNA, 30 bp, Homo sapiens
  chr5:136983358-136983388
  hypo
gagcatgtcgaggtcgagccagaagacttg

SEQ ID NO: 19687 - DNA, 31 bp, Homo sapiens
  chr5:137403227-137403258
  hypo
taaggaaaatccaccacgcatgctcagtcct

SEQ ID NO: 19688 - DNA, 36 bp, Homo sapiens
  chr5:137470415-137470451
  hypo
cacttttttttttttttgagacggagtctcgctctg

SEQ ID NO: 19689 - DNA, 82 bp, Homo sapiens
  chr5:137529620-137529702
  hypo
tgggcaacaaaagcaaaactccgtctccaaaaaaaaaaaaaaggtagcgctctaagtttccgtctcacacaagaatcaaagc

SEQ ID NO: 19690 - DNA, 30 bp, Homo sapiens
  chr5:137606591-137606621
  hypo
tacgatgttacttccggtaggtactgaata

SEQ ID NO: 19691 - DNA, 16 bp, Homo sapiens
  chr5:137727474-137727490
  hypo
tgccatggggaatggc

SEQ ID NO: 19692 - DNA, 30 bp, Homo sapiens
  chr5:137773697-137773727
  hypo
ccccaggaccctctcgcagcccctctgttt

SEQ ID NO: 19693 - DNA, 467 bp, Homo sapiens
  chr5:137803074-137803541
  hypo
tcccagctcatcaaacccagccgcatgcgcaagtaccccaaccggcccagcaagacgcccccccacgaacgcccttacgcttgcccagtggagtcctgtgatcgccgcttctcccgctccgacgagctcacccgccacatccgcatccacacaggccagaagcccttccagtgccgcatctgcatgcgcaacttcagccgcagcgaccacctcaccacccacatccgcacccacacaggcgaaaagcccttcgcctgcgacatctgtggaagaaagtttgccaggagcgatgaacgcaagaggcataccaagatccacttgcggcagaaggacaagaaagcagacaaaagtgttgtggcctcttcggccacctcctctctctcttcctacccgtccccggttgctacctcttacccgtccccggttactacctcttatccatccccggccaccacctcatacccatc

SEQ ID NO: 19694 - DNA, 30 bp, Homo sapiens
  chr5:137840921-137840951
  hypo
ctggtaattgagtttcgtcgtcagagctat

SEQ ID NO: 19695 - DNA, 59 bp, Homo sapiens
  chr5:137865690-137865749
  hypo
ctgagcagctaaggttataggcgcaagcgaccgtgcccgcctgacccacaaggatctta

SEQ ID NO: 19696 - DNA, 150 bp, Homo sapiens
  chr5:137912555-137912705
  hypo
tgagccaccgcgcccaacccagttttagatttttaagaagaggaattaattgattcaacagatatgttttggcatgcctaccgtgtgtcagtcactctcccaggtggtaggaatacagcgaaagcaaaacacgaacgaatggctgatgac

SEQ ID NO: 19697 - DNA, 102 bp, Homo sapiens
  chr5:137945776-137945878
  hypo
aagctgggaaggttccagtggcgcgctcctgagaagcagtgggaagggccaaggttacgagttacccaggcatgggggcgaaccctggctccctcacttgct

SEQ ID NO: 19698 - DNA, 16 bp, Homo sapiens
  chr5:138052138-138052154
  hypo
gcgtgagctaccaccc

SEQ ID NO: 19699 - DNA, 80 bp, Homo sapiens; identical to SEQ ID NO: 4248
  chr5:138088595-138088675
  hypo

SEQ ID NO: 19700 - DNA, 31 bp, Homo sapiens; identical to SEQ ID NO: 4249
  chr5:138089858-138089889
  hypo

SEQ ID NO: 19701 - DNA, 93 bp, Homo sapiens
  chr5:138119911-138120004
  hypo
gttaggtttcttttccagtcggagaatttcaacaatgatgtaggttttttaggttattggatatcagctaaggtaaatcgagccctgctattt

SEQ ID NO: 19702 - DNA, 29 bp, Homo sapiens
  chr5:138122825-138122854
  hypo
ataagggctctgggctgggtgcgatggct

SEQ ID NO: 19703 - DNA, 29 bp, Homo sapiens
  chr5:138123093-138123122
  hypo
gagactccgtctccaaaaaaaaaaaaggt

SEQ ID NO: 19704 - DNA, 30 bp, Homo sapiens
  chr5:138280838-138280868
  hypo
cgctttccacaccccgggccagaccctggt

SEQ ID NO: 19705 - DNA, 31 bp, Homo sapiens
  chr5:138538952-138538983
  hypo
ctgagaggcagtgctacggcaggggtgtgaa

SEQ ID NO: 19706 - DNA, 32 bp, Homo sapiens
  chr5:138659302-138659334
  hypo
aatgtcggagtcaggcgggcccagtggctcac

SEQ ID NO: 19707 - DNA, 30 bp, Homo sapiens
  chr5:138895190-138895220
  hypo
taaatggggagaaacgtacttgaggtcagg

SEQ ID NO: 19708 - DNA, 30 bp, Homo sapiens
  chr5:138897028-138897058
  hypo
cccttcctcagaatcgcttgaacccgggag

SEQ ID NO: 19709 - DNA, 56 bp, Homo sapiens
  chr5:138928997-138929053
  hypo
ggggtcttggcggccccgcactccgagcggccggctggcgccgtgggcccaggaag

SEQ ID NO: 19710 - DNA, 887 bp, Homo sapiens; identical to SEQ ID NO: 4252
  chr5:139016855-139017742
  hypo

SEQ ID NO: 19711 - DNA, 65 bp, Homo sapiens; identical to SEQ ID NO: 4253
  chr5:139039950-139040015
  hypo

SEQ ID NO: 19712 - DNA, 52 bp, Homo sapiens
  chr5:139060688-139060740
  hypo
aggctgtggcaggtgccgaagccctcaatggccagtccgacttcccctacct

SEQ ID NO: 19713 - DNA, 288 bp, Homo sapiens; identical to SEQ ID NO: 4255
  chr5:139089042-139089330
  hypo

SEQ ID NO: 19714 - DNA, 30 bp, Homo sapiens
  chr5:139133700-139133730
  hypo
atgagccactgcgccggaccagagttgggt

SEQ ID NO: 19715 - DNA, 30 bp, Homo sapiens
  chr5:139142883-139142913
  hypo
ccagttgttcttcacgtcactctgaagcat

SEQ ID NO: 19716 - DNA, 222 bp, Homo sapiens; identical to SEQ ID NO: 4262
  chr5:139284309-139284531
  hypo

SEQ ID NO: 19717 - DNA, 31 bp, Homo sapiens
  chr5:139535849-139535880
  hypo
gtaataatagtaatgacgaatattcccggag

SEQ ID NO: 19718 - DNA, 30 bp, Homo sapiens; identical to SEQ ID NO: 4266
  chr5:139554500-139554530
  hypo

SEQ ID NO: 19719 - DNA, 38 bp, Homo sapiens
  chr5:139556365-139556403
  hypo
tagacctggcctggtgcggtggctcacacctgtaatcc

SEQ ID NO: 19720 - DNA, 30 bp, Homo sapiens
  chr5:139632449-139632479
  hypo
catgtgccctgagccgccagcctggatggg

SEQ ID NO: 19721 - DNA, 31 bp, Homo sapiens; identical to SEQ ID NO: 4268
  chr5:139726093-139726124
  hypo

SEQ ID NO: 19722 - DNA, 19 bp, Homo sapiens
  chr5:139922384-139922403
  hypo
ttaagacctttggggccgg

SEQ ID NO: 19723 - DNA, 33 bp, Homo sapiens
  chr5:140088249-140088282
  hypo
tcttttttgagacagtcgctctgttgcccaggc

SEQ ID NO: 19724 - DNA, 33 bp, Homo sapiens
  chr5:140088521-140088554
  hypo
gttagccaccgcgcccagcctctttcaggtctt

SEQ ID NO: 19725 - DNA, 35 bp, Homo sapiens
  chr5:141002377-141002412
  hypo
ttcagaaagttacttaagtctcgccgggggcggtg

SEQ ID NO: 19726 - DNA, 30 bp, Homo sapiens; identical to SEQ ID NO: 4283
  chr5:141030832-141030862
  hypo

SEQ ID NO: 19727 - DNA, 130 bp, Homo sapiens; identical to SEQ ID NO: 4284
  chr5:141031061-141031191
  hypo

SEQ ID NO: 19728 - DNA, 145 bp, Homo sapiens
  chr5:141051472-141051617
  hypo
cattactccagacactcgtgtccagcttcaggctctgcaccttggagatcccagaacccagggcccggtgctgacctgtgagggtgtgagggtgtgtgagggtgtgtgagggtgtgaggggcatgtggcacgggtaccctgagcc

SEQ ID NO: 19729 - DNA, 75 bp, Homo sapiens
  chr5:141052406-141052481
  hypo
gggtggttgggggggccgggggtggcccaggaggcgctgctccttcagacaggactgcagcgtggagcaccacat

SEQ ID NO: 19730 - DNA, 244 bp, Homo sapiens
  chr5:141248095-141248339
  hypo
tgggtcaccctgacagttatacggagggggcctctcacctggatgaccgagtggcctatggggctattctcagatagttcggcctcataggagggccgctcaaacttgggggcgttgtcattggtgtcaagcacggtgacacgcagcagggcactgctggcgcgtggggggctgccgccatcctgcaccttgatggtgaggtcataggagtcccagcgctcacggtccaggttgcccatcacaa

SEQ ID NO: 19731 - DNA, 31 bp, Homo sapiens
  chr5:141303243-141303274
  hypo
ccaaggacatcccccacggaagcctgggccc

SEQ ID NO: 19732 - DNA, 30 bp, Homo sapiens
  chr5:141576297-141576327
  hypo
atgagcctccgtgcccggcctcaccaaatg

SEQ ID NO: 19733 - DNA, 31 bp, Homo sapiens
  chr5:141639936-141639967
  hypo
cactgcgcctggcctccggtctcaatttaaa

SEQ ID NO: 19734 - DNA, 35 bp, Homo sapiens
  chr5:141674167-141674202
  hypo
tttaattttcaatacacggccgggcacggtggctc

SEQ ID NO: 19735 - DNA, 226 bp, Homo sapiens; identical to SEQ ID NO: 4289
  chr5:141704447-141704673
  hypo

SEQ ID NO: 19736 - DNA, 317 bp, Homo sapiens; identical to SEQ ID NO: 4291
  chr5:141736298-141736615
  hypo

SEQ ID NO: 19737 - DNA, 62 bp, Homo sapiens
  chr5:141788624-141788686
  hypo
tgaatggcaaggagggagaatcgctccagcgaagctggaacggccaagaagctgggatgtca

SEQ ID NO: 19738 - DNA, 34 bp, Homo sapiens
  chr5:141803863-141803897
  hypo
attataggtgtgagccaccgcgcctggctgccag

SEQ ID NO: 19739 - DNA, 151 bp, Homo sapiens
  chr5:141850812-141850963
  hypo
gtctgattattagcaacggtaacacacaaagaggagcggggttggggtgggcttgttggaaaagccttgaacctggagtcagagagacccaagtgttgaatcctgattgtgtaactctggtaagcctcagtttgtcatcttgaaaatggga

SEQ ID NO: 19740 - DNA, 31 bp, Homo sapiens; identical to SEQ ID NO: 4293
  chr5:142092798-142092829
  hypo

SEQ ID NO: 19741 - DNA, 30 bp, Homo sapiens
  chr5:142394060-142394090
  hypo
tgttgcctccagcacggtctcgctcaaagg

SEQ ID NO: 19742 - DNA, 189 bp, Homo sapiens
  chr5:142625551-142625740
  hypo
gccaagtctcagtgccccctccgcttcaggggcttagaccgccacttggaatgcgtgcattctggcaggtgcggtgcatgcaggggtcagacccctatggtttgatgagataagagcctcctgcacagaatctcattttttctccatctgcaccgccatttgggcctcgggcctcatgactcacacagt

SEQ ID NO: 19743 - DNA, 387 bp, Homo sapiens; identical to SEQ ID NO: 4294
  chr5:142781701-142782088
  hypo

SEQ ID NO: 19744 - DNA, 696 bp, Homo sapiens; identical to SEQ ID NO: 4296
  chr5:142784576-142785272
  hypo

SEQ ID NO: 19745 - DNA, 159 bp, Homo sapiens
  chr5:145379610-145379769
  hypo
gccattgcaggtgcctcgagcaaaggccttatgcaactacagagggcagaatcccggtgacctaaggtttaataagggagatatcatccttctccggagacagcttgatgagaattggtaccagggggaaatcaatggcatcagcgggaacttcccagc

SEQ ID NO: 19746 - DNA, 31 bp, Homo sapiens
  chr5:145438102-145438133
  hypo
gaagtcacgatgcagacgtggccttggctca

SEQ ID NO: 19747 - DNA, 31 bp, Homo sapiens
  chr5:145453475-145453506
  hypo
cattcgagttgagacccgaagactaagaggg

SEQ ID NO: 19748 - DNA, 30 bp, Homo sapiens; identical to SEQ ID NO: 4301
  chr5:145718476-145718506
  hypo

SEQ ID NO: 19749 - DNA, 180 bp, Homo sapiens
  chr5:147040614-147040794
  hypo
ggatcatattgctcagagcctcgtccacctgcttcttggccgttttcaggtccgcaatttcctgtaagagcttaaggcgctctgtgtcaaacagtttccgggcctcctcccgggcctcaatggtgagcgctgtccttactttgtcactgctgccgtcgcggagagcacagagagcagact

SEQ ID NO: 19750 - DNA, 32 bp, Homo sapiens
  chr5:147055596-147055628
  hypo
caaaaaagagagtgcctggaccgggtgcggtg

SEQ ID NO: 19751 - DNA, 44 bp, Homo sapiens
  chr5:147274325-147274369
  hypo
aaaaaaagggagggatcggccgggaatggtggctcacacctgta

SEQ ID NO: 19752 - DNA, 30 bp, Homo sapiens; identical to SEQ ID NO: 4310
  chr5:147534273-147534303
  hypo

SEQ ID NO: 19753 - DNA, 30 bp, Homo sapiens
  chr5:148638018-148638048
  hypo
tctctactgaagctcggtataatcctctct

SEQ ID NO: 19754 - DNA, 1056 bp, Homo sapiens; identical to SEQ ID NO: 4313
  chr5:148651040-148652096
  hypo

SEQ ID NO: 19755 - DNA, 31 bp, Homo sapiens
  chr5:148669501-148669532
  hypo
gacttaatttatgggccgggtgcggtggctc

SEQ ID NO: 19756 - DNA, 107 bp, Homo sapiens; identical to SEQ ID NO: 4314
  chr5:148724796-148724903
  hypo

SEQ ID NO: 19757 - DNA, 34 bp, Homo sapiens
  chr5:148868823-148868857
  hypo
aggcaccgcgcccgccctactcatcctttcagat

SEQ ID NO: 19758 - DNA, 23 bp, Homo sapiens
  chr5:148872634-148872657
  hypo
acctttttgttgttgttgagacg

SEQ ID NO: 19759 - DNA, 23 bp, Homo sapiens
  chr5:148976154-148976177
  hypo
accgcacccgggcccttgatact

SEQ ID NO: 19760 - DNA, 31 bp, Homo sapiens
  chr5:148980150-148980181
  hypo
tccccactgagtactccgtctgttcctctct

SEQ ID NO: 19761 - DNA, 42 bp, Homo sapiens
  chr5:148981577-148981619
  hypo
gagtggggaagtgacacggtttgatttatgtttttcttttct

SEQ ID NO: 19762 - DNA, 145 bp, Homo sapiens
  chr5:148989227-148989372
  hypo
ggcacatccagggcatcgttgaggcggtggtgtgagtagaacggccagtgagcactcgctcctaccccactgacccggttcaggagcagctatggtctcacccctttttcatgccattcgtgctgcttcacgagtgttgctctgt

SEQ ID NO: 19763 - DNA, 37 bp, Homo sapiens
  chr5:148999329-148999366
  hypo
catgggaaaaaacaaacgcactgctgggtgcagtggc

SEQ ID NO: 19764 - DNA, 31 bp, Homo sapiens
  chr5:149006875-149006906
  hypo
accaccccacagaagccggtgcagagacccg

SEQ ID NO: 19765 - DNA, 31 bp, Homo sapiens
  chr5:149189353-149189384
  hypo
aatgataagtgctaatcgagggaattccagc

SEQ ID NO: 19766 - DNA, 31 bp, Homo sapiens
  chr5:149270743-149270774
  hypo
taaaatgggctgggtgcggaggctggtgcct

SEQ ID NO: 19767 - DNA, 103 bp, Homo sapiens
  chr5:149323763-149323866
  hypo
tcctctgtgttggggacgttagcaatcttcttagagtgtgcgacatggcccacgatgcccatgtccaaagggaagacgatctcttggtcgggcatcaccaggc

SEQ ID NO: 19768 - DNA, 34 bp, Homo sapiens
  chr5:149375067-149375101
  hypo
gcaagaggatccggcgttccgccctcttcatcct

SEQ ID NO: 19769 - DNA, 95 bp, Homo sapiens
  chr5:149375679-149375774
  hypo
tgtcatcataaagagcgctcctcatccttttccgctggggtcccacggatgcctcccgcaccttttcttcaaatttggtgcgatcctttaagaat

SEQ ID NO: 19770 - DNA, 31 bp, Homo sapiens
  chr5:149501444-149501475
  hypo
gagggaacgtagttatcgtaaggggccatgt

SEQ ID NO: 19771 - DNA, 31 bp, Homo sapiens
  chr5:149581943-149581974
  hypo
ccctgggtgtgggcttcggggggctcctcac

SEQ ID NO: 19772 - DNA, 189 bp, Homo sapiens
  chr5:149725940-149726129
  hypo
ggagatttacttttctcggtaccctttgcatacctttacacgtttgcatcatgtgtatacatcatcttctccaaaaacaggtttcagtttttgaactacattctccactggaatccagtgctctggccgtgtgagcaggctgacctttcagaggtggtgatggtggggtgactcgcggtcagtaagtgg

SEQ ID NO: 19773 - DNA, 148 bp, Homo sapiens
  chr5:149800712-149800860
  hypo
ttttaaattgggtaggcggtttggggacggagatggaaaaaaaaattttttttaagtttgaaactgatgtaaagaggatggtgaagatctgctactcattttacagcaaatcttgtagaactatttgattcttgtttgcttgtttgag

SEQ ID NO: 19774 - DNA, 27 bp, Homo sapiens
  chr5:149814536-149814563
  hypo
agagaatgcagccaggcgcagtggctc

SEQ ID NO: 19775 - DNA, 31 bp, Homo sapiens
  chr5:149866413-149866444
  hypo
aagttctccctttgcacgcagctctttaacg

SEQ ID NO: 19776 - DNA, 31 bp, Homo sapiens
  chr5:149922920-149922951
  hypo
cccttcagggacaggtcgctggtctttgggc

SEQ ID NO: 19777 - DNA, 31 bp, Homo sapiens
  chr5:150028691-150028722
  hypo
gagacacataatgtcccgcagccccatggtg

SEQ ID NO: 19778 - DNA, 40 bp, Homo sapiens
  chr5:150066937-150066977
  hypo
ctgatggggctgggcacggtgactcatgcctataatctca

SEQ ID NO: 19779 - DNA, 30 bp, Homo sapiens; identical to SEQ ID NO: 4320
  chr5:150336249-150336279
  hypo

SEQ ID NO: 19780 - DNA, 30 bp, Homo sapiens; identical to SEQ ID NO: 4326
  chr5:150620960-150620990
  hypo

SEQ ID NO: 19781 - DNA, 31 bp, Homo sapiens
  chr5:150885248-150885279
  hypo
ataagagggcccagctcggctgaggcgcata

SEQ ID NO: 19782 - DNA, 392 bp, Homo sapiens; identical to SEQ ID NO: 4329
  chr5:151150297-151150689
  hypo

SEQ ID NO: 19783 - DNA, 23 bp, Homo sapiens
  chr5:153651012-153651035
  hypo
cgaaactccgtctcaaaaaataa

SEQ ID NO: 19784 - DNA, 39 bp, Homo sapiens
  chr5:153786062-153786101
  hypo
atttgttcagtgggccgggcgtggtggctcatgcctgta

SEQ ID NO: 19785 - DNA, 30 bp, Homo sapiens
  chr5:153798347-153798377
  hypo
gcttgcaacgcttacgtgttgatcccagtg

SEQ ID NO: 19786 - DNA, 16 bp, Homo sapiens
  chr5:153857284-153857300
  hypo
cgccggccaagacggc

SEQ ID NO: 19787 - DNA, 30 bp, Homo sapiens; identical to SEQ ID NO: 4337
  chr5:153857774-153857804
  hypo

SEQ ID NO: 19788 - DNA, 53 bp, Homo sapiens
  chr5:154071647-154071700
  hypo
agccctgctggtccctttcgaaggaaaccttcgctggctccctagtgccctgg

SEQ ID NO: 19789 - DNA, 30 bp, Homo sapiens
  chr5:154158985-154159015
  hypo
ctgtctcttaactccgtggcatagtaaatt

SEQ ID NO: 19790 - DNA, 30 bp, Homo sapiens
  chr5:154194743-154194773
  hypo
gctcgaatcagagccgtgcccaagatatcc

SEQ ID NO: 19791 - DNA, 35 bp, Homo sapiens
  chr5:154218387-154218422
  hypo
gccttgtgatccgccagcctcggcctcccaaagtg

SEQ ID NO: 19792 - DNA, 27 bp, Homo sapiens
  chr5:154318147-154318174
  hypo
gatatgcacaagaggccgggtgcggtg

SEQ ID NO: 19793 - DNA, 18 bp, Homo sapiens
  chr5:154929087-154929105
  hypo
gcccggatctcattattt

SEQ ID NO: 19794 - DNA, 4 bp, Homo sapiens
  chr5:156485323-156485327
  hypo
tagc

SEQ ID NO: 19795 - DNA, 103 bp, Homo sapiens
  chr5:156485566-156485669
  hypo
ctccgtctcaaaaaacaaaacaaaaaaaaagaaaagaaaaggaaactggaagcagagaaccagcgtggctcaatggcagcacgagagcaaatgccagccttcc

SEQ ID NO: 19796 - DNA, 30 bp, Homo sapiens; identical to SEQ ID NO: 4345
  chr5:156693942-156693972
  hypo

SEQ ID NO: 19797 - DNA, 248 bp, Homo sapiens; identical to SEQ ID NO: 4346
  chr5:156887212-156887460
  hypo

SEQ ID NO: 19798 - DNA, 254 bp, Homo sapiens
  chr5:156895562-156895816
  hypo
actgggactgaccttcgatcagactctccagggagagagcgtatggatcaagattttaaggaatgctggtctgggattctccagcttgttgcacacggaattattcgtctggaatggagatggtgcttctgcgccatgctagcctcttttctcccttcgtttcctagtggctgctggagaagttgccaactttggagcctacgcatttgcacctgcaacagtcgtcacgcctctgggagcgctgagtgtcctca

SEQ ID NO: 19799 - DNA, 956 bp, Homo sapiens; identical to SEQ ID NO: 4347
  chr5:157001781-157002737
  hypo

SEQ ID NO: 19800 - DNA, 650 bp, Homo sapiens; identical to SEQ ID NO: 4353
  chr5:158527353-158528003
  hypo

SEQ ID NO: 19801 - DNA, 25 bp, Homo sapiens
  chr5:158612931-158612956
  hypo
aagatctatgaaaagggcctccggc

SEQ ID NO: 19802 - DNA, 966 bp, Homo sapiens; identical to SEQ ID NO: 4355
  chr5:158635046-158636012
  hypo

SEQ ID NO: 19803 - DNA, 32 bp, Homo sapiens
  chr5:158884899-158884931
  hypo
acaaagggggatcaaacgtgaggtttaggcca

SEQ ID NO: 19804 - DNA, 30 bp, Homo sapiens
  chr5:159214703-159214733
  hypo
tcccaatctagaagcgtgctcaaataatta

SEQ ID NO: 19805 - DNA, 30 bp, Homo sapiens; identical to SEQ ID NO: 4356
  chr5:159343466-159343496
  hypo

SEQ ID NO: 19806 - DNA, 31 bp, Homo sapiens
  chr5:159459176-159459207
  hypo
tcacaagagcctaatccggcaatctgattga

SEQ ID NO: 19807 - DNA, 31 bp, Homo sapiens
  chr5:159497742-159497773
  hypo
acatacatctgagcttcggcaaaatgacaag

SEQ ID NO: 19808 - DNA, 31 bp, Homo sapiens
  chr5:159600447-159600478
  hypo
tcccacctcagctccccgctcacggctaata

SEQ ID NO: 19809 - DNA, 45 bp, Homo sapiens
  chr5:159669396-159669441
  hypo
aagaccttcccttcctcggtcacagaggagttacaaggataaagg

SEQ ID NO: 19810 - DNA, 184 bp, Homo sapiens
  chr5:159686735-159686919
  hypo
tgctccaacttggggacgtggtcttcccgatcctcgaacttacctgtcggggagcaggggaagcaggggttactggaagacatttacctgaacccaggaagctaacggcccaccttacagtgcctggacattgctggcaaagaagacagaaagcagacaggccagactgcggaggaataggagc

SEQ ID NO: 19811 - DNA, 275 bp, Homo sapiens
  chr5:159776320-159776595
  hypo
tggtggagcctgaggccacatcgtggttgccggtgttggcatcaaaggtccggatgcggtactggccgttgtgcaccaggccgatggccaggtgcttgttggccagcgtgatgtcgtaggtgaagtagtagatcccaggcacgccgcagacgaacttgccgctggaagcattgtagtggccaccctcgttcatcagaatcttgtcaaacttgatgggcagccgctcccgtgggtagctcttggtcactgccaccgagaaagctgacttggtatgg

SEQ ID NO: 19812 - DNA, 174 bp, Homo sapiens; identical to SEQ ID NO: 4360
  chr5:159826415-159826589
  hypo

SEQ ID NO: 19813 - DNA, 31 bp, Homo sapiens
  chr5:165055690-165055721
  hypo
tgttcatttttgcctacgtatttttctcaca

SEQ ID NO: 19814 - DNA, 31 bp, Homo sapiens
  chr5:165210728-165210759
  hypo
ccaattaagaaaataccggccaggcgcggtg

SEQ ID NO: 19815 - DNA, 31 bp, Homo sapiens
  chr5:166318065-166318096
  hypo
tcagtcttccatgtcacgcagacggtgggca

SEQ ID NO: 19816 - DNA, 104 bp, Homo sapiens
  chr5:166477137-166477241
  hypo
agggattcccaacccccgggctgcggactggtgttggtccatggcctcttacgaacagggctgcatggcaggaggtgagcagcaggtaagctagaattaccacc

SEQ ID NO: 19817 - DNA, 57 bp, Homo sapiens
  chr5:167652912-167652969
  hypo
atcacagctgtttctccgggcataatagggttttgactgtgacgaggggcctcagtg

SEQ ID NO: 19818 - DNA, 31 bp, Homo sapiens
  chr5:167671603-167671634
  hypo
cctggctgggcttcagcgtggggccatgagc

SEQ ID NO: 19819 - DNA, 224 bp, Homo sapiens; identical to SEQ ID NO: 4371
  chr5:167718507-167718731
  hypo

SEQ ID NO: 19820 - DNA, 378 bp, Homo sapiens; identical to SEQ ID NO: 4372
  chr5:167718951-167719329
  hypo

SEQ ID NO: 19821 - DNA, 43 bp, Homo sapiens
  chr5:167847700-167847743
  hypo
gggccacttggctgcccgtagcagtaaccgcacagtcttccac

SEQ ID NO: 19822 - DNA, 31 bp, Homo sapiens
  chr5:167853788-167853819
  hypo
agcccttgccctgctccggtctgcccgcagg

SEQ ID NO: 19823 - DNA, 31 bp, Homo sapiens
  chr5:167858405-167858436
  hypo
tcgatgtctgtaccaccgacaggagccatct

SEQ ID NO: 19824 - DNA, 45 bp, Homo sapiens
  chr5:167897878-167897923
  hypo
acccactgaactatcccgcccaccctgggacggtccccagtgcca

SEQ ID NO: 19825 - DNA, 238 bp, Homo sapiens
  chr5:168112660-168112898
  hypo
ccttccaagggcagggcagggcgggacacacctgcagggagatgttggcctggggtcggaccttggcggaggccagttccacgtaggagtctttgcccacgaagttgacagtgatgagcttctcgcatctggggccggcgaagcctggtgggcagcggcaggtgggctcctgctgcaccacgatgcactgggccccgttctggcactcgtactggtcgcatgggctggtctgcagtag

SEQ ID NO: 19826 - DNA, 43 bp, Homo sapiens
  chr5:168124522-168124565
  hypo
ctcactccatctatgagtgtgcgcttcagcttcagatctggaa

SEQ ID NO: 19827 - DNA, 84 bp, Homo sapiens
  chr5:168184344-168184428
  hypo
tttttatggccttgcacgcagccaagttccacatttgtgctactcccaggctcctgaaagtgtctgggtgtgcaacccctattt

SEQ ID NO: 19828 - DNA, 23 bp, Homo sapiens
  chr5:168184727-168184750
  hypo
ccgtgcccaacccaacccctgtt

SEQ ID NO: 19829 - DNA, 320 bp, Homo sapiens
  chr5:168189440-168189760
  hypo
actgagccaggaaggggtcaccgccaggagaccctgcccacgctggctccgggtgactggcgtgtggggaggagtagggagttcacgccgaggttggacttacaggtcggtgacatattcagggaggtggcttgggatgcggaccagcttctggttggagcagtccacaatcgtgccctcacagcgacacttctcggggcacacgaggtccatgaagcactcgctgctgaacctgctgcggtaatcctcggagcctgggaggggccaaagaggggacgtcagcgtcacccgagttccacgcacagccccaggttgtgggt

SEQ ID NO: 19830 - DNA, 346 bp, Homo sapiens
  chr5:168195070-168195416
  hypo
ggtctggcaggtggtgggctgcggtgctccagagcagaggagaggtgtccagcggtggtggcggcggtggcgggccatgctgcaggagagcacggtgctttccgcggtgcttgacagaaccatgttccgtttccatcgttccaccacatggttagatcaagcacaaaggaaagccccgcagcgactggtcagagtcaaggtcaggaagcagcgtcagagagaggacaggagcgctcagaggaagcagcgtggagaagcggaagccggagcaggcccccactgagcgtgattagtatcaggagtggggttccactggaacacttccgaagattgcagccctgctgcc

SEQ ID NO: 19831 - DNA, 306 bp, Homo sapiens
  chr5:168199737-168200043
  hypo
gctgcattctgagtcagaaagcggggcccagccccgtaacctgattacctgagcagcggaacttcttgctcttgatctggctgatgcgcttgttggcgagtcggcgcgggctgctgcagcgggccccgcttgtctcgatggggttgtcctggaggtagtcggccagccacttcaagtggcagtcgcacacaaatgggttttgggctaagtggctgcgagagggatggggccgttaatcaggagtgacccacggcgtcttgctccaccaccaccaccctgcctcgcgctgggccctggcaatccact

SEQ ID NO: 19832 - DNA, 30 bp, Homo sapiens
  chr5:168233452-168233482
  hypo
ttcgacgatgccctccggcaagttggcagg

SEQ ID NO: 19833 - DNA, 126 bp, Homo sapiens
  chr5:168244375-168244501
  hypo
agtgtgaactggccaactgtccgtcgctgtcgcagccaatccgagagccaggccaggtggcagtcgcagtacaggtggttggagtggaggcgcctgggagagggcgggacagagagaaggcatggt

SEQ ID NO: 19834 - DNA, 186 bp, Homo sapiens
  chr5:168284803-168284989
  hypo
tggtattaacttctaccaaagcgctccacggaaaaccaccgagcttaaaagccctcaacggtgtgcctatcaggtagagattcacgtaggagttcttaggcgggacaagactggctctccagcttctggatgcatacggggttagacacaaggtgtcgggccaccggggatccttctaccccatct

SEQ ID NO: 19835 - DNA, 796 bp, Homo sapiens; identical to SEQ ID NO: 4375
  chr5:169064009-169064805
  hypo

SEQ ID NO: 19836 - DNA, 30 bp, Homo sapiens
  chr5:169361336-169361366
  hypo
ttggtagttgtccccggagtggatcatagc

SEQ ID NO: 19837 - DNA, 175 bp, Homo sapiens
  chr5:169484555-169484730
  hypo
cccttgccacccctctgcccacggacagtccatgtggattgagagaacctccttcgtgactgcatacaagctgccggggatcctgcgctggtttgaggtggtgcacatgtcgcaggtgagtctgggacattcgtggcagggccacccttcctccgatgggcagggcacagccagt

SEQ ID NO: 19838 - DNA, 30 bp, Homo sapiens
  chr5:169532928-169532958
  hypo
caggcaggtggctccggccagcccagcccc

SEQ ID NO: 19839 - DNA, 31 bp, Homo sapiens
  chr5:169732124-169732155
  hypo
tttttgtatttttagtagagacggggcatac

SEQ ID NO: 19840 - DNA, 30 bp, Homo sapiens
  chr5:169805568-169805598
  hypo
gcaacagaagacagcgtggattggactgga

SEQ ID NO: 19841 - DNA, 25 bp, Homo sapiens
  chr5:169931353-169931378
  hypo
cgcggggagcggctagccctgagtc

SEQ ID NO: 19842 - DNA, 30 bp, Homo sapiens
  chr5:170678690-170678720
  hypo
tcagtgtgtgggtccgtggcggctcggggt

SEQ ID NO: 19843 - DNA, 31 bp, Homo sapiens
  chr5:170758643-170758674
  hypo
tgagcttatttgtacccgttgtggctgaccc

SEQ ID NO: 19844 - DNA, 30 bp, Homo sapiens; identical to SEQ ID NO: 4390
  chr5:170819918-170819948
  hypo

SEQ ID NO: 19845 - DNA, 30 bp, Homo sapiens; identical to SEQ ID NO: 4391
  chr5:170834697-170834727
  hypo

SEQ ID NO: 19846 - DNA, 30 bp, Homo sapiens; identical to SEQ ID NO: 4392
  chr5:170837529-170837559
  hypo

SEQ ID NO: 19847 - DNA, 30 bp, Homo sapiens; identical to SEQ ID NO: 4393
  chr5:170837858-170837888
  hypo

SEQ ID NO: 19848 - DNA, 85 bp, Homo sapiens
  chr5:170863091-170863176
  hypo
cccaggtgctggttgccgaggagaacgtggacttccgcatccacgtggagaaccagacgcgggctcgggacgatgtgagccgtaa

SEQ ID NO: 19849 - DNA, 30 bp, Homo sapiens
  chr5:170883646-170883676
  hypo
caagaaggggcggccgcggaagggccccaa

SEQ ID NO: 19850 - DNA, 30 bp, Homo sapiens
  chr5:170919700-170919730
  hypo
gaactcggcaccaccgcactggagcacgcg

SEQ ID NO: 19851 - DNA, 30 bp, Homo sapiens; identical to SEQ ID NO: 4396
  chr5:171022582-171022612
  hypo

SEQ ID NO: 19852 - DNA, 30 bp, Homo sapiens
  chr5:171382191-171382221
  hypo
ctactatcttccctccggctttttcgaaag

SEQ ID NO: 19853 - DNA, 277 bp, Homo sapiens
  chr5:171523261-171523538
  hypo
cccacatgccatcttacgttacctgcagcgtgggagtctgcaacctctgagctggcaataaattgcctgagccagagtcctggccttccctgcccctcccacaccagcagggccagctgagatcctgtcctcccagcccccgctaagccccactctccctggccttacggaggcggcatccacggcgtcctcctcttccccctcatcccggccgtcttcgatctcttccatcacctcggccttggcctcagccaccagctcccgcagagccttgtta

SEQ ID NO: 19854 - DNA, 40 bp, Homo sapiens
  chr5:171533430-171533470
  hypo
aagggaaaaagaggcacgaagggcccgggggggctcagaa

SEQ ID NO: 19855 - DNA, 30 bp, Homo sapiens
  chr5:171682601-171682631
  hypo
gcgcatgcagcaggcgctctccctgcgttc

SEQ ID NO: 19856 - DNA, 31 bp, Homo sapiens
  chr5:171724029-171724060
  hypo
acggcttcaggagtctcgaatcccacgggcg

SEQ ID NO: 19857 - DNA, 507 bp, Homo sapiens
  chr5:171766369-171766876
  hypo
ggctctggcctcctgctgtcccgggctggagggatgtgtttggctggcatcatcggcaaaatcacgcccggaggcttgggagtggggccccggagctgctccgtcctctgccgctcccgctcccgctccagcagctccccctccgacttgatgatggattctttccgcggagggaggctgggcttctcctccatgtcggggtctgagatctcctcgtagcctgctgacgcagacatgtctgaagatgccttcctcaggacatccttactgcccttccagtctttagaccatggcaaccccgagtccatgacaccatgcggtgcgtcaggcaggggccgggaggggcccgtggcttcgctgcccgtgttgttctccagcgctgctgcttcccccagccggagctgggtcacctcgtggggcaggggagccagaaagttgggtctcgacgcgttgctcgtcttcttgtacttgtcaatgaaggtggccggggcccacccttccttatct

SEQ ID NO: 19858 - DNA, 31 bp, Homo sapiens
  chr5:171769339-171769370
  hypo
ttttacgcatgcagaacggagcctcaggaga

SEQ ID NO: 19859 - DNA, 93 bp, Homo sapiens
  chr5:171777274-171777367
  hypo
ctgtgaggatgagggacgatgtgagacgccttgagcacagagctggcacacaggggccctgattatcaggagcttgggcgggtgtcactcact

SEQ ID NO: 19860 - DNA, 25 bp, Homo sapiens
  chr5:171818129-171818154
  hypo
ccaccacgcccggcttgcagcttcc

SEQ ID NO: 19861 - DNA, 189 bp, Homo sapiens
  chr5:171821591-171821780
  hypo
aggcgtttgacagccacgtcccggatgtggcttcgtctgaagagaatcttacctgcagaagatgagagcaaagacagtgttgtcagggaacagggacaagctctcagcaacctgagagggtgtggacatggcggttcctagggtaggtctgagtggtgccaaaattcctggctgcgatcaaggtacccc

SEQ ID NO: 19862 - DNA, 31 bp, Homo sapiens
  chr5:171858886-171858917
  hypo
gccgggcgcagtggctcgtaatcctagatca

SEQ ID NO: 19863 - DNA, 31 bp, Homo sapiens
  chr5:171863585-171863616
  hypo
aagccagggctaccatcgggaggtgctgaga

SEQ ID NO: 19864 - DNA, 151 bp, Homo sapiens
  chr5:171916859-171917010
  hypo
caggctctccctggagcgggccagctcagctggggcataggcacttgaggtggccaggccagtcacaagtccaccgtggagtggggtcagtcaatttccctgactgcctcaaggacagtgggcggcaaaagccctgcgcccctgaggcaac

SEQ ID NO: 19865 - DNA, 33 bp, Homo sapiens
  chr5:172062314-172062347
  hypo
ataaaagtgacttgctcggccgggtgctgtggc

SEQ ID NO: 19866 - DNA, 172 bp, Homo sapiens
  chr5:172074241-172074413
  hypo
gcagagagggaagagggagggcgccaggtcgcagcccgacaggtagcacacgctcacctgggcagtgtcgcggggtggtccgagcttctgcacacctgccctgcactaggccctttattccatcccattgaagccgtcatgagagccttgcgaggcagtcttctcatgtcac

SEQ ID NO: 19867 - DNA, 95 bp, Homo sapiens
  chr5:172097650-172097745
  hypo
cattcattcattcattcgctcactcattccttcacttcctagtttatttgctcattcattcattcactcattcactcattcgcacatgtattcat

SEQ ID NO: 19868 - DNA, 40 bp, Homo sapiens
  chr5:172105003-172105043
  hypo
atcctgggcccactaccgggcccctcgctttcagcccagg

SEQ ID NO: 19869 - DNA, 31 bp, Homo sapiens
  chr5:172113721-172113752
  hypo
cccgtgttctccccaccggagccggcaggca

SEQ ID NO: 19870 - DNA, 81 bp, Homo sapiens
  chr5:172114001-172114082
  hypo
gctgccagggagtccacgggcagcggccatctctccagtggtgggcaaggtgtgacagtcgtggagcgaggcccacagggc

SEQ ID NO: 19871 - DNA, 31 bp, Homo sapiens
  chr5:172234014-172234045
  hypo
ccacatttggaggaagcgagatgactacaca

SEQ ID NO: 19872 - DNA, 121 bp, Homo sapiens
  chr5:172235650-172235771
  hypo
gggttcatgccattctcctgcctcagccaccacgcccagcccctaaattctttttttatttgatttttgttttgttttgttttcttttcttttcccagatggggtatcgctgtgttgtcca

SEQ ID NO: 19873 - DNA, 200 bp, Homo sapiens
  chr5:172264178-172264378
  hypo
ctcttgcccttccctacggatacttctgattttcttactgcctgtagagcctggtgcaactgagttctgtgttttcctgtctgtgaaatgggaatgaggagagtactcaccgaagtagaacagttgagggatgaggcagtgcggaaagcatttagacacagagtaagcgcctcatccattttggccgccatatttatttg

SEQ ID NO: 19874 - DNA, 209 bp, Homo sapiens
  chr5:172346277-172346486
  hypo
tgcacagatgaacagacgtacacgcacacctcctcactgtgggccccccgcccccggggagatgcaaccacctgggctgaaaaaatatatgtaccccagatggtgaccaagaagggatcgtgcttattcaagcacctggagtgacaacccacgagacagccctgccaccaagccctcccacctcttggcaaacacgcccaagactgcag

SEQ ID NO: 19875 - DNA, 133 bp, Homo sapiens
  chr5:172367588-172367721
  hypo
tgccagttgggccagtatgaccgggatggtttttgcccaccaagaagtaccggatggcgatgacaccctcccattgcgtgctactcaaaacctgtcattcttggagagttgcgcagctcccttaactcaagtg

SEQ ID NO: 19876 - DNA, 447 bp, Homo sapiens; identical to SEQ ID NO: 4404
  chr5:172385501-172385948
  hypo

SEQ ID NO: 19877 - DNA, 35 bp, Homo sapiens
  chr5:172454587-172454622
  hypo
tatatatatgtttatacgtacgtgtgggtttttgt

SEQ ID NO: 19878 - DNA, 569 bp, Homo sapiens; identical to SEQ ID NO: 4410
  chr5:172665425-172665994
  hypo

SEQ ID NO: 19879 - DNA, 223 bp, Homo sapiens
  chr5:172744790-172745013
  hypo
gtccatagataagaaaatggacggcgtggaggaaagatttcgtggccaggcctttcatttcacctccggatatcagaatactcagactgttcgtcttcccactcgctgcttccggaaggtccctgagccccaaggcccccgactctgcctcgggcatgggcgtttgggtggctcttgctacctcgctcacccttggcacctcggccagtctccctactgctgg

SEQ ID NO: 19880 - DNA, 30 bp, Homo sapiens
  chr5:173180671-173180701
  hypo
gcccttgttaatggcgccatctcagatcag

SEQ ID NO: 19881 - DNA, 30 bp, Homo sapiens
  chr5:173415976-173416006
  hypo
cctaaccctgtcaccgcatccctagggggg

SEQ ID NO: 19882 - DNA, 5 bp, Homo sapiens
  chr5:174056517-174056522
  hypo
agaaa

SEQ ID NO: 19883 - DNA, 23 bp, Homo sapiens
  chr5:174921426-174921449
  hypo
gatcatctttatttgcgacagca

SEQ ID NO: 19884 - DNA, 30 bp, Homo sapiens
  chr5:174949926-174949956
  hypo
taactggcgttaaatcggcattttctacat

SEQ ID NO: 19885 - DNA, 63 bp, Homo sapiens; identical to SEQ ID NO: 4436
  chr5:175084695-175084758
  hypo

SEQ ID NO: 19886 - DNA, 350 bp, Homo sapiens; identical to SEQ ID NO: 4437
  chr5:175084964-175085314
  hypo

SEQ ID NO: 19887 - DNA, 68 bp, Homo sapiens; identical to SEQ ID NO: 4438
  chr5:175085524-175085592
  hypo

SEQ ID NO: 19888 - DNA, 225 bp, Homo sapiens
  chr5:175139713-175139938
  hypo
tgcagaagtcagtgccgtgtccctgacctcctcattcaaggtcacagagcacaaagtgcttctcacgtcctgagatgccactgggcaagctgctgcactggtctggcctgatcttggccctcaccaccggggccatttggggcattgccagagttctcgtgcatctggtgggcctggcaggactctcggggaaatagggccccaaagggacgcagtctggaccac

SEQ ID NO: 19889 - DNA, 787 bp, Homo sapiens; identical to SEQ ID NO: 4443
  chr5:175298494-175299281
  hypo

SEQ ID NO: 19890 - DNA, 30 bp, Homo sapiens; identical to SEQ ID NO: 4444
  chr5:175299783-175299813
  hypo

SEQ ID NO: 19891 - DNA, 234 bp, Homo sapiens
  chr5:175777487-175777721
  hypo
ctaagagctcgggagcgagactaactccacagcccccaactaactgagctggtaacttcaaaaccacagccacatttcaagccatgaacactgaaggttttgttttttcaaagttcctaagagcttacgtggagtgcttcggccactcgaaggtacttggtctcctcggtggtgaggcccttgtggggtgtgtagccagcatctctcagccctgcctgtcgctcaaaatgctga

SEQ ID NO: 19892 - DNA, 30 bp, Homo sapiens; identical to SEQ ID NO: 4446
  chr5:175792463-175792493
  hypo

SEQ ID NO: 19893 - DNA, 67 bp, Homo sapiens; identical to SEQ ID NO: 4447
  chr5:175792997-175793064
  hypo

SEQ ID NO: 19894 - DNA, 168 bp, Homo sapiens
  chr5:175831281-175831449
  hypo
ccaggtctcatggcccgccttcctctgggacgcacccccacacaccaccctcagctcgcctaggggctgggtcaggagtttgtgagaagcgtccggggctgcagagcacttttttccacagccctttggggcagcggagcggagcctctaattcgcattttacaaatg

SEQ ID NO: 19895 - DNA, 30 bp, Homo sapiens
  chr5:175831753-175831783
  hypo
ttgtgcagcaggtcccgggctccggtgaac

SEQ ID NO: 19896 - DNA, 30 bp, Homo sapiens
  chr5:175840779-175840809
  hypo
gccatccactgagccgccatccctcaacac

SEQ ID NO: 19897 - DNA, 37 bp, Homo sapiens
  chr5:175879332-175879369
  hypo
acaggcgtgagccaccggacctggccagcaggtaaca

SEQ ID NO: 19898 - DNA, 18 bp, Homo sapiens
  chr5:175971441-175971459
  hypo
ttctctctttcctttttt

SEQ ID NO: 19899 - DNA, 3 bp, Homo sapiens
  chr5:175971758-175971761
  hypo
gag

SEQ ID NO: 19900 - DNA, 175 bp, Homo sapiens
  chr5:176003261-176003436
  hypo
atgtggtgctgggtggcggtgctggtggtgcagggtgtgatggcggagaatgggggtgctgggtgctctctggaagcctgtgttggtaagcagtatcatcctctgggcgatccgtgtggggctgaatagaaggccatgctgagtggaggctgacgtagaacgtcagatgatgctg

SEQ ID NO: 19901 - DNA, 163 bp, Homo sapiens
  chr5:176012686-176012849
  hypo
acaggccagagaagaccgatcaggcattctgggtcaggagcagggaaggggactgagcatgggggaacacatgggagagaagctgcggggcatggggttgaggctgcggggcacggggttgaggctgcggggcacagggttgaggctgcggggcacggggttg

SEQ ID NO: 19902 - DNA, 77 bp, Homo sapiens
  chr5:176016152-176016229
  hypo
ccgaggccgacgtgttcgctgggagcattcagtaactgcgggcggccccgggagggaggttgcggggaggggcccga

SEQ ID NO: 19903 - DNA, 395 bp, Homo sapiens; identical to SEQ ID NO: 4456
  chr5:176056802-176057197
  hypo

SEQ ID NO: 19904 - DNA, 156 bp, Homo sapiens; identical to SEQ ID NO: 4457
  chr5:176057430-176057586
  hypo

SEQ ID NO: 19905 - DNA, 98 bp, Homo sapiens
  chr5:176066072-176066170
  hypo
attacaggcatgagccaccacagctggcctgggttttaaacaaagaagttacgtgaccagattaatattttaaatgatccccccgaggaacctggaga

SEQ ID NO: 19906 - DNA, 52 bp, Homo sapiens
  chr5:176077109-176077161
  hypo
cgaatccccggcatggcggcgatcagtgccggtgggtcgtggaggtgtttgc

SEQ ID NO: 19907 - DNA, 31 bp, Homo sapiens
  chr5:176087845-176087876
  hypo
agaacacccaggctggcgagctcctttatct

SEQ ID NO: 19908 - DNA, 171 bp, Homo sapiens
  chr5:176225692-176225863
  hypo
ccaggaattggttccaggactcggggagccgcgcggggcaggagccaggcccacagacagcaagcagcgttctgcttggctgatccacgatgtcggggctgcggcatctccgcttccgcccggagagtgacggcgtccgcaagctcatgcgaggggggttattttactaac

SEQ ID NO: 19909 - DNA, 31 bp, Homo sapiens
  chr5:176456647-176456678
  hypo
aagaggaccaagatggcgacttgagagagac

SEQ ID NO: 19910 - DNA, 32 bp, Homo sapiens
  chr5:176544344-176544376
  hypo
ccaagttgaaattacttgctccgctgggcgcg

SEQ ID NO: 19911 - DNA, 30 bp, Homo sapiens
  chr5:176558643-176558673
  hypo
gtcacacagggcaacgccaaaaatggcctt

SEQ ID NO: 19912 - DNA, 30 bp, Homo sapiens
  chr5:176558894-176558924
  hypo
gagaaggcgcttagcgccctagggaccagg

SEQ ID NO: 19913 - DNA, 98 bp, Homo sapiens
  chr5:176663883-176663981
  hypo
ggagtgcagagatgcacgaacacggttcactgcagccttgacctcctgggtttaagcaatgtttccgtctcagcctcctgagtagttgggaccaaagg

SEQ ID NO: 19914 - DNA, 77 bp, Homo sapiens
  chr5:176674063-176674140
  hypo
gtaaacttgtaaaaccggagagtacaatatcaagtcaacatatgatctgaaggaacatagatactgtcctataaaag

SEQ ID NO: 19915 - DNA, 163 bp, Homo sapiens
  chr5:176694902-176695065
  hypo
aatacatgttctctgtcgaaatttttttttcttttgtgtattttgtgaaaagtttttttttttttttttaaatgaaaagacagtaataatctcacaaggcaggcgcattgttaacatttcggcatatgtactcccagacgtaccaatacgcagttatgccccc

SEQ ID NO: 19916 - DNA, 30 bp, Homo sapiens
  chr5:176757376-176757406
  hypo
cgtggtgccgatgacgtgattgtagcagcc

SEQ ID NO: 19917 - DNA, 206 bp, Homo sapiens
  chr5:176764094-176764300
  hypo
gtgagctgggctgggaaccaacgcctggcccggcccactcaccagacaggtcgccggtgccggcggaggccccgaagtagtagccggtgggcaggcgcactcccgtgatgtcaatgcagttcttccactcgttcttgtcctccaggtcggtcatcacctgcagggcccagcacgctaagcacctcgcaggacagcagcctgccctc

SEQ ID NO: 19918 - DNA, 216 bp, Homo sapiens
  chr5:176795079-176795295
  hypo
caccagtggggaacaggcttccgcagaggatgggtgagggcggggggctgttcgcgttcatcgctccctcttcactagagctgggcgggactgcaaacgccgccttgcgccgagagtctcagggctccctcaactcctccgccagcctggaccttggcttcctagccttcgtcagcagcaaatctgaggtgagccgactgttggggaagacaagat

SEQ ID NO: 19919 - DNA, 31 bp, Homo sapiens
  chr5:176810601-176810632
  hypo
caaagatccagagacccgactcccatctatt

SEQ ID NO: 19920 - DNA, 30 bp, Homo sapiens
  chr5:176886297-176886327
  hypo
gagggcgggggagccgggtgagacaggatt

SEQ ID NO: 19921 - DNA, 30 bp, Homo sapiens
  chr5:176901646-176901676
  hypo
gaaaccgtccacagcgcttagaagcctttt

SEQ ID NO: 19922 - DNA, 30 bp, Homo sapiens
  chr5:176919219-176919249
  hypo
cgtggtgccaggaccgtgcagcagcccctg

SEQ ID NO: 19923 - DNA, 30 bp, Homo sapiens
  chr5:176931407-176931437
  hypo
tgcattttcctggacgtgggtggctcaggt

SEQ ID NO: 19924 - DNA, 30 bp, Homo sapiens
  chr5:176938851-176938881
  hypo
ggtctgcatagcctcgagtttggggcagtc

SEQ ID NO: 19925 - DNA, 30 bp, Homo sapiens
  chr5:176958368-176958398
  hypo
gctcatccacatctcggtggtccacggcgg

SEQ ID NO: 19926 - DNA, 155 bp, Homo sapiens
  chr5:176965873-176966028
  hypo
gcattcagggacccctgtcagcggttacctaccgccactgcatgttctcgacctgtctgcctttcatcttcctccatgctctttcggcaactctggcagacccacagaggcatctcgcctaggagattcttgacgagctttggcatgaagtcagg

SEQ ID NO: 19927 - DNA, 44 bp, Homo sapiens
  chr5:176976122-176976166
  hypo
cttgtgttaagcataccgcacttgttggaccctaacattaacca

SEQ ID NO: 19928 - DNA, 324 bp, Homo sapiens
  chr5:177031193-177031517
  hypo
ccggcggcctccctcggaagtgttccgtcttccacctgttcgtggcctgcctctcgctgggcttcttctccctactctggctgcagctcagctgctctggggacgtggcccgggcagtcaggggacaagggcaggagacctcgggccctccccgtgcctgccccccagagccgccccctgagcactgggaagaagacgcatcctggggcccccaccgcctggcagtgctggtgcccttccgcgaacgcttcgaggagctcctggtcttcgtgccccacatgcgccgcttcctgagcaggaagaagatccggcaccacatctacg

SEQ ID NO: 19929 - DNA, 103 bp, Homo sapiens
  chr5:177393301-177393404
  hypo
agctttctcaacaaggaatgccgtccccattactccacagcgtatatgtggagcctaaccgggtggactgcaaggcagttccgaccctcaccactcagggtta

SEQ ID NO: 19930 - DNA, 30 bp, Homo sapiens
  chr5:177482814-177482844
  hypo
cggaagggcaggcacgtggccataggtgag

SEQ ID NO: 19931 - DNA, 17 bp, Homo sapiens
  chr5:177508374-177508391
  hypo
tcaacaaaagtcttggc

SEQ ID NO: 19932 - DNA, 131 bp, Homo sapiens
  chr5:177548898-177549029
  hypo
acatggacatgtaccgccgcaaccaggcactggagcaggaactgcgggcactgcgggagccccccacaccctggagtccccggctcgagtcctccaagatctgaggccagcagagcgagctgacagcagca

SEQ ID NO: 19933 - DNA, 49 bp, Homo sapiens
  chr5:177637069-177637118
  hypo
tccatcctagctcctgcgtatgctaaatggtccacgggcccctgtgccc

SEQ ID NO: 19934 - DNA, 30 bp, Homo sapiens
  chr5:177650806-177650836
  hypo
ctctcctatgtctgcgcctccactccatct

SEQ ID NO: 19935 - DNA, 244 bp, Homo sapiens
  chr5:177653944-177654188
  hypo
aatacacacacacacacgccaccacaaagccaaaaaagaagaagtgatcatttttctaagtgctacgatggatgccctgggagagcgagccagagggggcatgtttatgggctgagctgcacccccccacccccaatttatgtgttgaacccctaatccccggtagctcgcaatggcccgtatgtgaatggatatggagataagagaggtgattacattaagatgaggccgtcagggggcccct

SEQ ID NO: 19936 - DNA, 298 bp, Homo sapiens
  chr5:177708330-177708628
  hypo
ttcacttgattaattccaaaccgtccatccgagtccttcatttcaaaattggtcccaggccgaggccccgtctcacagaccacatttcagcccagagctctcgcagtcccctggggccccggctgtcgctgctcccaggactgaggccggagatgaagtgcagtcaccgctccctcgactccagaggggcttgggcacggcgctccggggcccaggaggtgccgtgcgtgtggttttgggtgtgctcagagctgacctgtgacgcctgccagccctcgtttctgttagtcattcaggc

SEQ ID NO: 19937 - DNA, 31 bp, Homo sapiens
  chr5:177718240-177718271
  hypo
cagtcagcggccagcacgatttatacgtccc

SEQ ID NO: 19938 - DNA, 19 bp, Homo sapiens
  chr5:177739036-177739055
  hypo
aactggttcttatgagtcc

SEQ ID NO: 19939 - DNA, 31 bp, Homo sapiens
  chr5:177800879-177800910
  hypo
cagggcagtcagagctcgctttgaacatatc

SEQ ID NO: 19940 - DNA, 30 bp, Homo sapiens
  chr5:177875125-177875155
  hypo
ctgttagtgctagtcgcagtccgttttgtt

SEQ ID NO: 19941 - DNA, 30 bp, Homo sapiens
  chr5:178195541-178195571
  hypo
acttcgtgtggtgtcgccggccctcccgct

SEQ ID NO: 19942 - DNA, 31 bp, Homo sapiens
  chr5:178224674-178224705
  hypo
ccacatgccactcagacgctaccagaagcag

SEQ ID NO: 19943 - DNA, 31 bp, Homo sapiens; identical to SEQ ID NO: 4476
  chr5:178287117-178287148
  hypo

SEQ ID NO: 19944 - DNA, 179 bp, Homo sapiens; identical to SEQ ID NO: 4477
  chr5:178287401-178287580
  hypo

SEQ ID NO: 19945 - DNA, 167 bp, Homo sapiens
  chr5:178289145-178289312
  hypo
catttgttctctcactcgcacagtagcacaacaattacaattcttgttttacatgtgaggaaactgaggctcagaaaagttaagtaacctgagtacagtccaagtatgcctggctctgagttccgtcggaccacccagtcgtccctgtggtgcgtctttcagagtat

SEQ ID NO: 19946 - DNA, 31 bp, Homo sapiens
  chr5:178291936-178291967
  hypo
tgaatggggacaaactcgaaacagtgatata

SEQ ID NO: 19947 - DNA, 31 bp, Homo sapiens
  chr5:178293312-178293343
  hypo
tcagagaaacttgtaccgggatgtgatgctg

SEQ ID NO: 19948 - DNA, 46 bp, Homo sapiens
  chr5:178295549-178295595
  hypo
attccagtgaggaccacgtgggaaagacactcggtgctgtgagagt

SEQ ID NO: 19949 - DNA, 65 bp, Homo sapiens
  chr5:178295948-178296013
  hypo
agtgacagagcaagactccaactcaaaaaaaaaaaaaaaagaatggtgttcgtgaaggtccaaag

SEQ ID NO: 19950 - DNA, 31 bp, Homo sapiens
  chr5:178296294-178296325
  hypo
ctggggagagctttctcgtgatgatagcttg

SEQ ID NO: 19951 - DNA, 24 bp, Homo sapiens
  chr5:178320069-178320093
  hypo
aaaaacaaagctaggccgggcgca

SEQ ID NO: 19952 - DNA, 30 bp, Homo sapiens; identical to SEQ ID NO: 4478
  chr5:178382964-178382994
  hypo

SEQ ID NO: 19953 - DNA, 30 bp, Homo sapiens
  chr5:178416035-178416065
  hypo
catgctgtggagggcgtgggcaatggcgta

SEQ ID NO: 19954 - DNA, 215 bp, Homo sapiens; identical to SEQ ID NO: 4479
  chr5:178423618-178423833
  hypo

SEQ ID NO: 19955 - DNA, 31 bp, Homo sapiens
  chr5:178551593-178551624
  hypo
agtacagcactgaccacgtggcagccactgg

SEQ ID NO: 19956 - DNA, 30 bp, Homo sapiens
  chr5:178551978-178552008
  hypo
accagggcccggctcgccaacgaccagggc

SEQ ID NO: 19957 - DNA, 30 bp, Homo sapiens
  chr5:178564803-178564833
  hypo
ggcgtcgccgtgctcgaagtacaggtccca

SEQ ID NO: 19958 - DNA, 216 bp, Homo sapiens
  chr5:178576385-178576601
  hypo
ctgttgtgtaagccacccagtctgcggtatttctgttagagcagccgaagctgaggaagatggagtgtgagctgtcctggcaccgtggaaggctgcggccggggcagactctaagtcactggtggccgcaggaaccaggagccaggaggatggaaggagccacgcagtggtcctcctgtcccaactgggcaagacggtgcctaacctggaaatgga

SEQ ID NO: 19959 - DNA, 256 bp, Homo sapiens
  chr5:178585630-178585886
  hypo
cctgggctgggccaaggctcccggggccccttgcatggccaggggctcatttccagcttcacgcctctgtggccctgcatgggtgaggctcaccttgcatgccggaaggcccaaagtcctgccgtgtgaggaagatggcgtgatcgtggtattcatcgtggcccgtgtctggcttctgctggaggtaggcccagcggcagacattctccaggctctgagaggggttcccgatctcgatgaggctcatggactgcag

SEQ ID NO: 19960 - DNA, 266 bp, Homo sapiens; identical to SEQ ID NO: 4481
  chr5:178594123-178594389
  hypo

SEQ ID NO: 19961 - DNA, 30 bp, Homo sapiens
  chr5:178622065-178622095
  hypo
cttccctgaccagccgccccaggcaccctt

SEQ ID NO: 19962 - DNA, 30 bp, Homo sapiens
  chr5:178634616-178634646
  hypo
tccgcagcatgcctgcgtgccctccgcctc

SEQ ID NO: 19963 - DNA, 121 bp, Homo sapiens
  chr5:178652527-178652648
  hypo
ctaacaggcagacacaggcggctggacgtcgagaggagcgcatgaggggaggaacacacaggcggctggacgtcgagaggaacgcaccaacgagcaccagcacgctgcaggccaccgaccg

SEQ ID NO: 19964 - DNA, 83 bp, Homo sapiens
  chr5:178665325-178665408
  hypo
cagggactgctcctgggagaccgtgggagtcaccgcagctccctgctctgtggagcggccacgctagcagaaggaacagaggg

SEQ ID NO: 19965 - DNA, 31 bp, Homo sapiens
  chr5:178702394-178702425
  hypo
tctgtggctgaagaaccggcccccaaagtta

SEQ ID NO: 19966 - DNA, 201 bp, Homo sapiens; identical to SEQ ID NO: 4482
  chr5:178770703-178770904
  hypo

SEQ ID NO: 19967 - DNA, 432 bp, Homo sapiens; identical to SEQ ID NO: 4483
  chr5:178771198-178771630
  hypo

SEQ ID NO: 19968 - DNA, 136 bp, Homo sapiens; identical to SEQ ID NO: 4484
  chr5:178771723-178771859
  hypo

SEQ ID NO: 19969 - DNA, 438 bp, Homo sapiens; identical to SEQ ID NO: 4485
  chr5:178771967-178772405
  hypo

SEQ ID NO: 19970 - DNA, 122 bp, Homo sapiens; identical to SEQ ID NO: 4486
  chr5:178772607-178772729
  hypo

SEQ ID NO: 19971 - DNA, 25 bp, Homo sapiens
  chr5:178772778-178772803
  hypo
cggcgccggccgaacgtccccacct

SEQ ID NO: 19972 - DNA, 147 bp, Homo sapiens
  chr5:178854897-178855044
  hypo
cctgggacctgcagagcacagcgccttgtgtagtctcggccccaggccaaggctgcgcactttacagccttcagctcaccgaggtgctgcaccagctccgaggtcagtatcgccatcgcaggccgggcgcgggggctcacgcctgta

SEQ ID NO: 19973 - DNA, 30 bp, Homo sapiens
  chr5:178956058-178956088
  hypo
ccaaatggccacaccgcattggagagccaa

SEQ ID NO: 19974 - DNA, 163 bp, Homo sapiens
  chr5:179023532-179023695
  hypo
catttgcactcttgctggtgtcgcatccaggttgcagcactcggagcgggcgaggcagggggctgaggagcggagccacaagctgcagcaggagctgggcgggaggatcggcgccctgcagctgcagctctcccagctgcacgagcaatggtaggggccctgc

SEQ ID NO: 19975 - DNA, 47 bp, Homo sapiens
  chr5:179030601-179030648
  hypo
actcaccagaagcagacgtggaacagagctggcgtggagctggcttc

SEQ ID NO: 19976 - DNA, 44 bp, Homo sapiens
  chr5:179106626-179106670
  hypo
cttctaggcagagggaagagccgagcagggctttctttttcttt

SEQ ID NO: 19977 - DNA, 55 bp, Homo sapiens; identical to SEQ ID NO: 4490
  chr5:179234472-179234527
  hypo

SEQ ID NO: 19978 - DNA, 605 bp, Homo sapiens; identical to SEQ ID NO: 4491
  chr5:179245984-179246589
  hypo

SEQ ID NO: 19979 - DNA, 31 bp, Homo sapiens; identical to SEQ ID NO: 4492
  chr5:179279346-179279377
  hypo

SEQ ID NO: 19980 - DNA, 31 bp, Homo sapiens
  chr5:179293875-179293906
  hypo
caggtggcattatggtcggttttgcaagtgt

SEQ ID NO: 19981 - DNA, 181 bp, Homo sapiens
  chr5:179401179-179401360
  hypo
gtctctgtctctatggaccctcggctgcagtggagcctcagacatctgcagcggccggccccccgctttagctcctgaagtggcatggaaacatacgttcatccacgcggcaactccacttctgaaaacgtacttctaacgactacacactccgatggccgacctttaagaggtctaataa

SEQ ID NO: 19982 - DNA, 30 bp, Homo sapiens
  chr5:179401789-179401819
  hypo
gccagccaagagaacgaggccccgaggaag

SEQ ID NO: 19983 - DNA, 346 bp, Homo sapiens
  chr5:179402747-179403093
  hypo
acagtaccatagagggtgcagcgaaattccgtgaaccgtgccaaaaattctaacattcacaagcagaccacaaacacaaaccacttctatggtggcaggtgcagcgcagaaatggttcagatcaaccatggcctggaccttggtggcaggcgtggctttgcagcacgagaatcgggcgggaacttataattaaagcgcatatgcccggcctccacccgggatgcttctgaaagcctcccactgactctgatgcagtcaggtctggaaagcaatgaactaaattttaaaaagagggccagacgtcaggctcatgcctgtgatcccagcacttcaggatgctagggtg

SEQ ID NO: 19984 - DNA, 136 bp, Homo sapiens
  chr5:179473084-179473220
  hypo
ggcatctgaggccccacgagaatctgtgcgcggtggaccgcggcgcgtgcaggcccacagtgctgagggacccagcgcaccctccgcagctgctggcccaggtgctaagcccctcactgaccggggcaggtgcagg

SEQ ID NO: 19985 - DNA, 31 bp, Homo sapiens
  chr5:179482573-179482604
  hypo
gactctctcattcatccgtttgttttcagat

SEQ ID NO: 19986 - DNA, 1109 bp, Homo sapiens; identical to SEQ ID NO: 4495
  chr5:179498098-179499207
  hypo

SEQ ID NO: 19987 - DNA, 30 bp, Homo sapiens
  chr5:179643355-179643385
  hypo
atcaggcaccttggcgaacaggctggacac

SEQ ID NO: 19988 - DNA, 10 bp, Homo sapiens
  chr5:179725490-179725500
  hypo
cagcgctttg

SEQ ID NO: 19989 - DNA, 31 bp, Homo sapiens
  chr5:179726464-179726495
  hypo
aagtcagaatggccgtcgcctcttgggcata

SEQ ID NO: 19990 - DNA, 31 bp, Homo sapiens
  chr5:179773468-179773499
  hypo
caccccaccagggcctcggtgaccacggcaa

SEQ ID NO: 19991 - DNA, 665 bp, Homo sapiens; identical to SEQ ID NO: 4498
  chr5:179780035-179780700
  hypo

SEQ ID NO: 19992 - DNA, 498 bp, Homo sapiens; identical to SEQ ID NO: 4499
  chr5:179780801-179781299
  hypo

SEQ ID NO: 19993 - DNA, 31 bp, Homo sapiens
  chr5:179903411-179903442
  hypo
tgcttcacggtttggacgcatgacagtctgt

SEQ ID NO: 19994 - DNA, 370 bp, Homo sapiens; identical to SEQ ID NO: 4500
  chr5:180017761-180018131
  hypo

SEQ ID NO: 19995 - DNA, 266 bp, Homo sapiens; identical to SEQ ID NO: 4501
  chr5:180018484-180018750
  hypo

SEQ ID NO: 19996 - DNA, 24 bp, Homo sapiens
  chr5:180024540-180024564
  hypo
caccgcgcccggcctctcagctcc

SEQ ID NO: 19997 - DNA, 188 bp, Homo sapiens
  chr5:180036576-180036764
  hypo
ccatggggcccctctgcccagcgctcactgaccaggcccgggacccccgaacctgccaccgaggaggagccgtccttccactggggtttctgcgctgctgaggaggggaggcctcgtgtgggggtgacgagggcataggacagaaagcagctgtgagtcgtggcatcgcaggagggcccaaatgtgcc

SEQ ID NO: 19998 - DNA, 30 bp, Homo sapiens
  chr5:180047284-180047314
  hypo
cgtcttgatgtctgcgtgggccggctgcgg

SEQ ID NO: 19999 - DNA, 30 bp, Homo sapiens
  chr5:180057579-180057609
  hypo
ggccgtggtgccctcgatgcgtgccttgat

SEQ ID NO: 20000 - DNA, 215 bp, Homo sapiens; identical to SEQ ID NO: 4502
  chr5:180076053-180076268
  hypo

SEQ ID NO: 20001 - DNA, 378 bp, Homo sapiens
  chr5:180218706-180219084
  hypo
aaggtgacaataccccggtagccagctctcggaacccccgacttaaggtcatccatgacacccagagccttggcgaaagccttgaagctgtccctgcccgtatactgcacccgcacctcccccagctccttccggtcattggtcctcactttctccacctgcagctggggagcaccgtagacgcgggcgaggaaatctcggtcataggcctcccgctgcaggtaagacaggtccagctgggtgaagtgcacaaactgctggttcagcttgataaacttgaggtgctggtcaaagaactgcccgtggctcacacccttgcggccaaaggtcatcgttcttgagatctcagggcgtatgcaggcccgcccctgccgctgc

SEQ ID NO: 20002 - DNA, 31 bp, Homo sapiens
  chr5:180220014-180220045
  hypo
ctgccctgggcttgcccggctcccttgcccg

SEQ ID NO: 20003 - DNA, 47 bp, Homo sapiens
  chr5:180255233-180255280
  hypo
cgtgccctgccaaacctctggtggtaaggcttcgattactaaatgga

SEQ ID NO: 20004 - DNA, 30 bp, Homo sapiens
  chr5:180276703-180276733
  hypo
ggccttctcacactcgtcacacttaaaggg

SEQ ID NO: 20005 - DNA, 141 bp, Homo sapiens
  chr5:180326127-180326268
  hypo
tgacagctgtgtctcgatggagtagactctcagaacagcgcagtttgccctccgctcacgcagagcctctccgtggcttccgcaccttgagcattaggccagttctcctcttctctctaatccatccgtcacctctcctgt

SEQ ID NO: 20006 - DNA, 30 bp, Homo sapiens
  chr5:180326486-180326516
  hypo
tggggaaggatcaggcgctgtggaaacaat

SEQ ID NO: 20007 - DNA, 574 bp, Homo sapiens; identical to SEQ ID NO: 4504
  chr5:180479641-180480215
  hypo

SEQ ID NO: 20008 - DNA, 639 bp, Homo sapiens; identical to SEQ ID NO: 4505
  chr5:180480491-180481130
  hypo

SEQ ID NO: 20009 - DNA, 30 bp, Homo sapiens; identical to SEQ ID NO: 4506
  chr5:180527480-180527510
  hypo

SEQ ID NO: 20010 - DNA, 31 bp, Homo sapiens
  chr5:180621422-180621453
  hypo
ctccttatccaagcagcgtttgtactttggc

SEQ ID NO: 20011 - DNA, 105 bp, Homo sapiens
  chr5:180657109-180657214
  hypo
tggaaagactctggtgcggggctcaagccacttcccctcagctgtgagcgtgggagctctctagtcttgaggctcctacctttagagaatacacacagggccggc

SEQ ID NO: 20012 - DNA, 393 bp, Homo sapiens
  chr5:180661417-180661810
  hypo
ggtgggccctgggggttcctccgtgggcagcggggatgccagctcctcgcgccatcaccatcgccgccgccggctccacctgccccagcagcccctgctccagcgggaagtgtggtgcgtgggcaccaacggcaaacgctatcaggcccagagctccacagaacagacgctgctgagccccagtgagaaaccaaggcgctttggtgtgtacctggactatgaagctgggcgcctgggcttctacaacgcagagactctagcccacgtgcacaccttctcggctgccttcctgggcgagcgtgtctttcctttcttccgggtgctctccaagggcacccgcatcaagctctgcccttgattatcctgccacccgcaggggcccctctgtcagca

SEQ ID NO: 20013 - DNA, 30 bp, Homo sapiens
  chr5:180664007-180664037
  hypo
cgcaccaggttgtccgtgtagccagcaaac

SEQ ID NO: 20014 - DNA, 339 bp, Homo sapiens; identical to SEQ ID NO: 4509
  chr5:180673931-180674270
  hypo

SEQ ID NO: 20015 - DNA, 27 bp, Homo sapiens
  chr5:180681263-180681290
  hypo
tgggcaacagagcgagactctgtcaaa

SEQ ID NO: 20016 - DNA, 802 bp, Homo sapiens; identical to SEQ ID NO: 4510
  chr6:391097-391899
  hypo

SEQ ID NO: 20017 - DNA, 24 bp, Homo sapiens
  chr6:392409-392433
  hypo
gctctcccgggcctgctccggggt

SEQ ID NO: 20018 - DNA, 371 bp, Homo sapiens; identical to SEQ ID NO: 4512
  chr6:392587-392958
  hypo

SEQ ID NO: 20019 - DNA, 348 bp, Homo sapiens; identical to SEQ ID NO: 4513
  chr6:393124-393472
  hypo

SEQ ID NO: 20020 - DNA, 76 bp, Homo sapiens; identical to SEQ ID NO: 4514
  chr6:393764-393840
  hypo

SEQ ID NO: 20021 - DNA, 31 bp, Homo sapiens
  chr6:571736-571767
  hypo
gctcttggtgtagagtcggtctcctgcagag

SEQ ID NO: 20022 - DNA, 30 bp, Homo sapiens
  chr6:589259-589289
  hypo
gaccgtcgagcacccgcacggtgtctggaa

SEQ ID NO: 20023 - DNA, 504 bp, Homo sapiens; identical to SEQ ID NO: 4515
  chr6:710813-711317
  hypo

SEQ ID NO: 20024 - DNA, 30 bp, Homo sapiens
  chr6:736786-736816
  hypo
actgaacagtaacacggcacggggagcgtg

SEQ ID NO: 20025 - DNA, 31 bp, Homo sapiens
  chr6:782981-783012
  hypo
aatcagtcacttaacacggcaggtcctcaaa

SEQ ID NO: 20026 - DNA, 31 bp, Homo sapiens
  chr6:1001881-1001912
  hypo
cagctcccccctcacacggaaccttttgatg

SEQ ID NO: 20027 - DNA, 513 bp, Homo sapiens
  chr6:1080627-1081140
  hypo
tatcagcaactttccccacaacgctgatggatctggaaccacttctaaacccgctgcctgtttgcgaggagggcagaccactgacggtgggaaggatgcatttccccaagccacggaccacactgccgaggccctgactgtcctttcccggacccctgcctggcacgcctgggaaaggtttaccctgggggcgggggcaggttggcgccaggcagcttgcagaatgtgtgctcggaccccgggcatcgcgaagtgtgcgggccgtgggccccggctgcaccgccagcccctgcctggccaccccaccgcttacttgacctccaggaagcgcctgaaagaaagcgagctctgatatgtgcagctccagtgtgtttcaataagctgttttcaaagagtttgggtgcctcttcagactaagcccgttcgaaacctccatcttctttctagggttttcttcaacgggggcttagatgataaacggagacccctgttccctaccggttgaaactgtgt

SEQ ID NO: 20028 - DNA, 30 bp, Homo sapiens; identical to SEQ ID NO: 4524
  chr6:1379679-1379709
  hypo

SEQ ID NO: 20029 - DNA, 331 bp, Homo sapiens; identical to SEQ ID NO: 4530
  chr6:1390427-1390758
  hypo

SEQ ID NO: 20030 - DNA, 512 bp, Homo sapiens; identical to SEQ ID NO: 4531
  chr6:1390955-1391467
  hypo

SEQ ID NO: 20031 - DNA, 116 bp, Homo sapiens
  chr6:1523887-1524003
  hypo
ttctggatggctggtcctgggcgctcaccgggaatgaacgtgagccactctttcgcacacaggccactctgcgtcagccactctcgggctgccccgaagtgatgtcctggtggtcc

SEQ ID NO: 20032 - DNA, 493 bp, Homo sapiens; identical to SEQ ID NO: 4533
  chr6:1610744-1611237
  hypo

SEQ ID NO: 20033 - DNA, 30 bp, Homo sapiens; identical to SEQ ID NO: 4534
  chr6:1611697-1611727
  hypo

SEQ ID NO: 20034 - DNA, 16 bp, Homo sapiens
  chr6:1612300-1612316
  hypo
cgcacgtccggagctt

SEQ ID NO: 20035 - DNA, 30 bp, Homo sapiens
  chr6:1621792-1621822
  hypo
aaggagccatcttgcgcgcagcagcagcag

SEQ ID NO: 20036 - DNA, 328 bp, Homo sapiens
  chr6:1708417-1708745
  hypo
tgctcaccatccacagaaaagcgtgaaacaaaatgcggcatctgggtatatctcaaaggtagggaaggaaacaactcgaaggctgtaactttcccgacacttgagacgtcactcctttgcaaggcagcattcccagcaggcagcgaagcgtgtttggagaagctggagggcagatgaggagtggagggaaggcgggtagggggcttgcactcgaaaccacctctgaaggcgttgtcaatacagcaacagcaacgaggacaaacatgccacacggtgggtccaagtctgaactgcccggggctaagtcagtcaccgcacaatcgagtat

SEQ ID NO: 20037 - DNA, 282 bp, Homo sapiens
  chr6:1953248-1953530
  hypo
tgcccaaactttcctaatgatcgaaagactaaaatgagtcaacataagaaaaatatcctcatcgaaagacggaaatcttcaactgatctcctgcggaaagcaaagggctgctgggtatgagaggcaggcctgccaacagccggcagcacagaacaactttctccgtcacacccctgggtcagggctttctcctccaggacgtggaccctaggaagtctcacagaaaccgaggctgctgttcttagtgtaggaaatcaaagcggctaattctacactcatact

SEQ ID NO: 20038 - DNA, 30 bp, Homo sapiens
  chr6:2108949-2108979
  hypo
cccctcacagttcaacgatactgcccacct

SEQ ID NO: 20039 - DNA, 164 bp, Homo sapiens
  chr6:2127866-2128030
  hypo
gtgatagggcctgggccgcacaatgagtgggaaacgagccgagcgagggctcctggtccccagcccagggggcccagctggccgccccctcgtcctttccccaggcccctgggggactccaggagagacgtggtatctgagcaggcagacgtccgccaagccaa

SEQ ID NO: 20040 - DNA, 97 bp, Homo sapiens
  chr6:2233025-2233122
  hypo
catctcaggcctccagatgcccgcgaccttctccccttcagcctcttccataaccacactactcctttcctccatcggcttctcccctgactgcaca

SEQ ID NO: 20041 - DNA, 212 bp, Homo sapiens
  chr6:2559178-2559390
  hypo
gggggtgggggcatgggaggtcggcactccctccttcaggaatctctgagctcgcagaaccgtccagtgcgtgggtggtagagggatcagctgacggggaagtgcaagcgtgaaggcggccacccaagacttcaggtcactgctgacctcccgtcggggctcagatctcagcactgggagggcatctgctcgccctgccaaaacaaaccagc

SEQ ID NO: 20042 - DNA, 31 bp, Homo sapiens
  chr6:2803700-2803731
  hypo
gcctgcaggtgacagcgcgcgtggaaagtct

SEQ ID NO: 20043 - DNA, 34 bp, Homo sapiens
  chr6:2906981-2907015
  hypo
aaacaatacagtataacggctatttgtacagcat

SEQ ID NO: 20044 - DNA, 93 bp, Homo sapiens
  chr6:2907134-2907227
  hypo
ttgaggatccgcagagctcaatgttcgctaggatcctggaatcaatcagataccaagagacaactgtatttgctgaagcgtatttgttgaatg

SEQ ID NO: 20045 - DNA, 257 bp, Homo sapiens
  chr6:2920899-2921156
  hypo
gacggttgctgtagatgcgggcggcgagcatgtcaggacttcccctcctcctatccggtgactccttggaccacatcaacccagagcaacaagacccattgcccctgctacctggggcccgcatggcatgtctgagcaatgaccccatcctcgctgcccgctgcccagctggcggaccctgccaggttcttactgcgatggccactccccaaccaccacacccgcagcacctccacgctagtggctcctccccaccc

SEQ ID NO: 20046 - DNA, 7 bp, Homo sapiens
  chr6:2986009-2986016
  hypo
tttcatt

SEQ ID NO: 20047 - DNA, 9 bp, Homo sapiens
  chr6:2986765-2986774
  hypo
gcctcattc

SEQ ID NO: 20048 - DNA, 212 bp, Homo sapiens
  chr6:3115737-3115949
  hypo
gttaatgggcagagccaatgacgacacagaccagcaaagcagaaccgagactgtccgcacttggttcggaaacaaatactcacaccctaggttattgctggtaacggagacctccttccagctcccacagtcctgcttggtagattttctacttgttgctacaatcatcatctttgctttgggtctgtcacgtgaggttagggtttcaggaa

SEQ ID NO: 20049 - DNA, 31 bp, Homo sapiens
  chr6:3143423-3143454
  hypo
cccgggcaacaagagccgaaaccctctctga

SEQ ID NO: 20050 - DNA, 30 bp, Homo sapiens
  chr6:3150252-3150282
  hypo
ccaggtttggatggcgtcagaaggaatgcc

SEQ ID NO: 20051 - DNA, 58 bp, Homo sapiens; identical to SEQ ID NO: 4542
  chr6:3162904-3162962
  hypo

SEQ ID NO: 20052 - DNA, 41 bp, Homo sapiens
  chr6:3179683-3179724
  hypo
atcttaggaaccaatgaagcgtgtttttccagtagttggca

SEQ ID NO: 20053 - DNA, 31 bp, Homo sapiens
  chr6:3195389-3195420
  hypo
ggacaaggcccagggccggcatgactctggg

SEQ ID NO: 20054 - DNA, 30 bp, Homo sapiens
  chr6:3226274-3226304
  hypo
ctaagttggcacaccgcggatgttcttcat

SEQ ID NO: 20055 - DNA, 30 bp, Homo sapiens
  chr6:3263635-3263665
  hypo
ttgagacactaaaacgagcctttcgtgtga

SEQ ID NO: 20056 - DNA, 30 bp, Homo sapiens
  chr6:3272953-3272983
  hypo
tcccagagcaactgcgtctcgctgcccagg

SEQ ID NO: 20057 - DNA, 31 bp, Homo sapiens
  chr6:3281342-3281373
  hypo
gtggatagaaaagatccgccccagcacagcc

SEQ ID NO: 20058 - DNA, 261 bp, Homo sapiens
  chr6:3285281-3285542
  hypo
aggaagcacagcccacgcgcttgggactcacctgagtctgggtgctggctgtactttccaatcactggacccgcagacatgatcgcacccacacggacaagggccaagcaagcgagaagagagaagagagcacattaggtgtggagttagcctagcgtgttcccatgcgacttggttcaagcaaactcccttccgtgtctgggatggcgctggccgccggggcagtggaattcatactgcgctaaacaaagatctttttgt

SEQ ID NO: 20059 - DNA, 37 bp, Homo sapiens
  chr6:3289594-3289631
  hypo
gcaggttcaggaagggcggggccggctacaggcaggg

SEQ ID NO: 20060 - DNA, 77 bp, Homo sapiens
  chr6:3316814-3316891
  hypo
tcactggggagcttgtcgaactagcatcaaaattctgcacctactcttagagcagacgagcacgttgttttttaaga

SEQ ID NO: 20061 - DNA, 139 bp, Homo sapiens
  chr6:3333219-3333358
  hypo
aggttcaggtttttggaagagcgtatcgcagctggtgcctgtgcgtcacggtgctgccccgcaggaggtcacctactgggaatgacgctaccactgacccatggagcaaagcggcggcgcctcagcctcccatcctaga

SEQ ID NO: 20062 - DNA, 30 bp, Homo sapiens
  chr6:3386569-3386599
  hypo
ctcaggctggagagcgaaggagaagggaga

SEQ ID NO: 20063 - DNA, 30 bp, Homo sapiens
  chr6:3400399-3400429
  hypo
ccgcgccccgcccatgattgcattttaaaa

SEQ ID NO: 20064 - DNA, 102 bp, Homo sapiens
  chr6:3405618-3405720
  hypo
tgctgctactgggaaggcccacgtatctgaagatggggaaaccgggtggagacaaagagacgaccgagcacgtattcatgcgaaactttcccttcacccaaa

SEQ ID NO: 20065 - DNA, 882 bp, Homo sapiens; identical to SEQ ID NO: 4547
  chr6:3456047-3456929
  hypo

SEQ ID NO: 20066 - DNA, 655 bp, Homo sapiens; identical to SEQ ID NO: 4548
  chr6:3457581-3458236
  hypo

SEQ ID NO: 20067 - DNA, 21 bp, Homo sapiens
  chr6:3572937-3572958
  hypo
gccatgttgcccacaagtccc

SEQ ID NO: 20068 - DNA, 222 bp, Homo sapiens
  chr6:3579859-3580081
  hypo
ccctcactccgggccgcactgggcttctgtgattgggcggatcacgccggcctcatgttccttctcttgtccctctctacccctcatgaaattgtgctccttcagagcatacaggccgtcaggatgcggggtagggtcaagacttatcagactgagcgatgaacaccttggcttctccatcagaccccgtgagaaccacaatggacacgtgtcaggtagcag

SEQ ID NO: 20069 - DNA, 25 bp, Homo sapiens
  chr6:3612287-3612312
  hypo
acccggcctctcattttcatctgct

SEQ ID NO: 20070 - DNA, 143 bp, Homo sapiens
  chr6:3618162-3618305
  hypo
gacctcaaattccaaaggcaccgtgagagtctcaggactcagcctttccacccttgccggggtgactcgtggagggaatcgagcctaagtcttacggcacgttgtgcagtttgggccggggcggaggaccagggcccagctga

SEQ ID NO: 20071 - DNA, 31 bp, Homo sapiens
  chr6:3618581-3618612
  hypo
gtggaggcagtggttgcggtgagattcatag

SEQ ID NO: 20072 - DNA, 391 bp, Homo sapiens
  chr6:3646959-3647350
  hypo
ttcctggagtcctgtgcttcccgggtccaccagaattctgtgctcataagggcatcccgagcgccatgtgcgaagtgggtggccggggccggggacgtgcgtatcgctcaggtgctgctgtactgtcccaccaggcttacaaaaatctcagagacgcggttaggaagatttcaagacagcaacgacagagccttaaaccgagcacagggctcttccgggtgtggggtctcttgtgactgcgcaggtcatccatccaagaagccggccttgaattacagagaacaactgaaagaccgaagagaagccagttccgctctcaacagccacagggcggatgatgccttcccccagaaattcaccaacagtgcacgaggtgcccatgaagagagcc

SEQ ID NO: 20073 - DNA, 270 bp, Homo sapiens
  chr6:3724298-3724568
  hypo
ggtctgtcctcagggaagaggcgcctgcctcgtgctgggccctggggacagctgagagaggagtggtcacgagctcacagcctgaccgcagcagagatgacacacggacgcacaggaggctgcgagggaacaggaggctggagaagagccggcgaggcccgtggaggtcacggggggagacaccttctagcggggaagcctgcatgtgggtacgtgtttcattcgcgctctggcagatgagaagcatccgaacatgggggacttacatgg

SEQ ID NO: 20074 - DNA, 208 bp, Homo sapiens
  chr6:3725240-3725448
  hypo
ctgggacagaggccgcggcacaaagagccctagctgtgggtgggaaagctatggggggctcacggagacagagcagctctccaacttcatccagggaatgaaatctcttccccagaccagggctggatggaaacccaagggggaaccttgggcgtgccgaaaggttcaagccagtcgagggacagagccacagcgccacctcaaacag

SEQ ID NO: 20075 - DNA, 214 bp, Homo sapiens
  chr6:3725858-3726072
  hypo
cagggaggacagccacgcagggaggtgaagcctccagttccacaaagggtgtctgtgctcttggtcgctgtcaaccccccacccgacagccggtgccgtgtagaaacagatcgtccctgtgagacactggagctggaccatcgactccactgcactgcccgagattgaggagccagagaaaggcccggcaagcccaagtcggaactccctccag

SEQ ID NO: 20076 - DNA, 19 bp, Homo sapiens
  chr6:3758266-3758285
  hypo
gcctcctcggcctgggcgc

SEQ ID NO: 20077 - DNA, 31 bp, Homo sapiens
  chr6:3810823-3810854
  hypo
agtagctgaatcttgccgtatttcttacacc

SEQ ID NO: 20078 - DNA, 31 bp, Homo sapiens
  chr6:3821399-3821430
  hypo
ccataaatagggcatccgtagacctgagcag

SEQ ID NO: 20079 - DNA, 31 bp, Homo sapiens
  chr6:3931975-3932006
  hypo
cgtgagccaccatgcccggccaccatgatta

SEQ ID NO: 20080 - DNA, 19 bp, Homo sapiens
  chr6:4020057-4020076
  hypo
atttcatttatttatttga

SEQ ID NO: 20081 - DNA, 61 bp, Homo sapiens
  chr6:4020315-4020376
  hypo
caggcgtgagccaccgcgcccggccctaacatttcaaaacgtttggaattcaggcaacaag

SEQ ID NO: 20082 - DNA, 155 bp, Homo sapiens
  chr6:4061558-4061713
  hypo
aaaattggaagagaacgcgcttgatggatagagcgccttcagtgtactgtttcttattaactttactttttttaaatcaacttgctatagactttatatacattttgttaaatatagttcctagtgacatagaaacgatgcgtagttttcattta

SEQ ID NO: 20083 - DNA, 31 bp, Homo sapiens
  chr6:4165190-4165221
  hypo
tgccatcttccacccccgagggagggctggg

SEQ ID NO: 20084 - DNA, 12 bp, Homo sapiens
  chr6:4167007-4167019
  hypo
caggtgcggtgg

SEQ ID NO: 20085 - DNA, 188 bp, Homo sapiens
  chr6:4254743-4254931
  hypo
acatgagagctggcatcgaaggatacgtatgacttgactctagtacagggtttctcagtctcagcactactgactggggaccagatcactgttttactgtggggctgcccatacgtcgcagactcgggaccagatcactgttttactgtggggctgcccatacgtcgcagactcgggaccagatcact

SEQ ID NO: 20086 - DNA, 30 bp, Homo sapiens; identical to SEQ ID NO: 4550
  chr6:4415168-4415198
  hypo

SEQ ID NO: 20087 - DNA, 202 bp, Homo sapiens
  chr6:4494277-4494479
  hypo
ttatttctggcccatacgatcatcatgaccttggacaaatgaaacttcctgggcctcaagttccttgtatcagaaaggatggcattcagctgcgtacaacagaaaaccaaatcacagtggcttatccaagaaaagttcaatttttctcaaaactacagcgtcctgggctgatgcggcagccccaggacgacctcagcatctc

SEQ ID NO: 20088 - DNA, 36 bp, Homo sapiens
  chr6:4549976-4550012
  hypo
cctggccagtggtttccggggcgcactggggcttgc

SEQ ID NO: 20089 - DNA, 169 bp, Homo sapiens
  chr6:4559570-4559739
  hypo
catccatcacattcacatgctcgcacatgctcacttccactctcacactcatgctcactcacgcacactcacgttcacacgcacacacgcatattcacactctcgtgcactcacactcatgcacactcccattcatacacagttttgcgagtgtacttctggagtgctt

SEQ ID NO: 20090 - DNA, 687 bp, Homo sapiens; identical to SEQ ID NO: 4551
  chr6:4775126-4775813
  hypo

SEQ ID NO: 20091 - DNA, 61 bp, Homo sapiens; identical to SEQ ID NO: 4552
  chr6:4776209-4776270
  hypo

SEQ ID NO: 20092 - DNA, 90 bp, Homo sapiens
  chr6:4874017-4874107
  hypo
ttgtgaataggctccgagagcctggtttgaaaccgccaagtaggaacatcgcacaggggacaccttcacatgcgccgcagctgtgcagat

SEQ ID NO: 20093 - DNA, 30 bp, Homo sapiens
  chr6:4874587-4874617
  hypo
agtgtttctgttcagcgttggcgttagggt

SEQ ID NO: 20094 - DNA, 21 bp, Homo sapiens
  chr6:4886532-4886553
  hypo
gaacaacgagactgttttcca

SEQ ID NO: 20095 - DNA, 35 bp, Homo sapiens
  chr6:4889731-4889766
  hypo
caggcgtgagccaccgtgcccggcccacatttttt

SEQ ID NO: 20096 - DNA, 63 bp, Homo sapiens
  chr6:4905281-4905344
  hypo
tgctctacccctagcgtgatctgaactgctgaagtcagagaagtccacgttggataaacaaag

SEQ ID NO: 20097 - DNA, 199 bp, Homo sapiens
  chr6:4909051-4909250
  hypo
gctgtgccccttcatccataccgtggcacttcctcactggaggtcacctctcctgtgcatggtcacattctgcctgtctgttgagaggctccgttcttcgctgcgttctgcttacctggttaagccacaaaaggttctatgcttagactagacgtgggatttaaaagtttccatgttcgtgtacaggagtgtacaaaat

SEQ ID NO: 20098 - DNA, 31 bp, Homo sapiens
  chr6:4909754-4909785
  hypo
cttaagggtgtgtcttcgctttctggtgtac

SEQ ID NO: 20099 - DNA, 143 bp, Homo sapiens
  chr6:4910916-4911059
  hypo
agggaaaaggtgtctccgtgggcctggaaggattagtcgggtttttataaagcagcagtgttggaagcgatggtttggatagaaggcatgaagtgggtagtggagtgtttctgatggtttatacacctctagaccttacctga

SEQ ID NO: 20100 - DNA, 22 bp, Homo sapiens
  chr6:4911358-4911380
  hypo
cgaaaaaggatttttaaggcag

SEQ ID NO: 20101 - DNA, 507 bp, Homo sapiens; identical to SEQ ID NO: 4553
  chr6:4948975-4949482
  hypo

SEQ ID NO: 20102 - DNA, 31 bp, Homo sapiens; identical to SEQ ID NO: 4554
  chr6:4949502-4949533
  hypo

SEQ ID NO: 20103 - DNA, 30 bp, Homo sapiens
  chr6:4950293-4950323
  hypo
gcagagagaagggccgttctcggctggtat

SEQ ID NO: 20104 - DNA, 203 bp, Homo sapiens
  chr6:4950733-4950936
  hypo
gcgtttggatctgccgtgacaaggactatcagaaccactcacagtaaggtcgggtcgcgtttctaaatccactgtttatggaccgtcttttcactgagaagaagctcgtcagttcaggggtttctagaacttctccagactcttcaaaaactcatgactttctccaagttggtaatcccagcactttgggaggcccaggcggg

SEQ ID NO: 20105 - DNA, 6 bp, Homo sapiens
  chr6:4951175-4951181
  hypo
aaaaaa

SEQ ID NO: 20106 - DNA, 34 bp, Homo sapiens
  chr6:5003273-5003307
  hypo
caaccaatttagaaaatcagtcgcttcggccggg

SEQ ID NO: 20107 - DNA, 1080 bp, Homo sapiens; identical to SEQ ID NO: 4555
  chr6:5085248-5086328
  hypo

SEQ ID NO: 20108 - DNA, 31 bp, Homo sapiens
  chr6:5108331-5108362
  hypo
ctatgctctctaaaagcgactggaagacatg

SEQ ID NO: 20109 - DNA, 31 bp, Homo sapiens
  chr6:5109989-5110020
  hypo
gtgctgagctgggtgacgcctgcctgctggt

SEQ ID NO: 20110 - DNA, 224 bp, Homo sapiens
  chr6:5507939-5508163
  hypo
gcccacctctcagtggcctcccggctagtgggtcagactgcggacacgccatgatggcacacagagagaagaccggagggagcagagggacaagggagaagcagagagcaggggagaagaacttagaggtgtataagaatttgtttataagtgtgtagcctgttaaaacctgacgatccaaatgggatgggtggccagagcttatgccccgaggtaggagaagg

SEQ ID NO: 20111 - DNA, 30 bp, Homo sapiens
  chr6:5510785-5510815
  hypo
gtgccttttgagcgcgggagagggttgtga

SEQ ID NO: 20112 - DNA, 31 bp, Homo sapiens
  chr6:5684506-5684537
  hypo
cccactgacacgtccccggcccctcacctgg

SEQ ID NO: 20113 - DNA, 30 bp, Homo sapiens; identical to SEQ ID NO: 4561
  chr6:5999244-5999274
  hypo

SEQ ID NO: 20114 - DNA, 126 bp, Homo sapiens; identical to SEQ ID NO: 4562
  chr6:5999609-5999735
  hypo

SEQ ID NO: 20115 - DNA, 45 bp, Homo sapiens
  chr6:6199422-6199467
  hypo
tataagaacagtactattggtcgggcgcagtggctcacgcctgta

SEQ ID NO: 20116 - DNA, 27 bp, Homo sapiens
  chr6:6199706-6199733
  hypo
cagagcgagactccatctcagaaaaaa

SEQ ID NO: 20117 - DNA, 30 bp, Homo sapiens
  chr6:6328399-6328429
  hypo
agccaccgcgcccagccaatgccttccatt

SEQ ID NO: 20118 - DNA, 137 bp, Homo sapiens
  chr6:6780549-6780686
  hypo
aatcaggaggatgtgtacagtcgcaccccagatcgggtatttggacagcggacttacatgcgacaagaaagatgctgtgcccgctcagcgtacctggacctctttgtacagggctcgtttatccagcacactcaaca

SEQ ID NO: 20119 - DNA, 31 bp, Homo sapiens
  chr6:6898398-6898429
  hypo
gtgttgtttcagtggacgctctaatcagatg

SEQ ID NO: 20120 - DNA, 131 bp, Homo sapiens
  chr6:6901360-6901491
  hypo
ttttccaaacccacccaggagcgcaggctgtcactaggtctacaggtgtgctctgaaatcagacactatcaagaaattctatcgtgctaaaatgaacaaggagccgggacggcacaatccatcatttttta

SEQ ID NO: 20121 - DNA, 50 bp, Homo sapiens
  chr6:6971300-6971350
  hypo
gcctggatgctctgcgctgtgggcgctggctcatcgcccctctgattcac

SEQ ID NO: 20122 - DNA, 31 bp, Homo sapiens
  chr6:7040003-7040034
  hypo
acttctcttttttttacgaagaagggagagc

SEQ ID NO: 20123 - DNA, 197 bp, Homo sapiens
  chr6:7204198-7204395
  hypo
agtggtggtggctgcagtgtccggtgcatttcaccaggagcatcctgcgagccctgggagctgcctggctgacggcattcccacagcgagcctacagactgtgggtttacacttcatgccaggctgactttagatttttctaagggctggctttggaggtcagcacaggtgcttacgcattgtctaaccttcctcca

SEQ ID NO: 20124 - DNA, 30 bp, Homo sapiens
  chr6:7204765-7204795
  hypo
tggacaaaaaaaagcgagcaccaggtacgg

SEQ ID NO: 20125 - DNA, 30 bp, Homo sapiens
  chr6:7214465-7214495
  hypo
cacgtccagctagccgacctagaggatttt

SEQ ID NO: 20126 - DNA, 83 bp, Homo sapiens
  chr6:7230352-7230435
  hypo
acatctgcgactacatcgccgccgacaaggccgcgctcatccgccacctgcgcacgcacagtggggagcggccctacatttgc

SEQ ID NO: 20127 - DNA, 76 bp, Homo sapiens
  chr6:7237762-7237838
  hypo
ctgatggtttaagcgctcgcgttggggcttgcagaatgctgtaggtcctgagtgcgcaggtaactcactgtggtta

SEQ ID NO: 20128 - DNA, 30 bp, Homo sapiens
  chr6:7246885-7246915
  hypo
ggacgccgacggcgcggaagaggacgcgtc

SEQ ID NO: 20129 - DNA, 135 bp, Homo sapiens
  chr6:7269313-7269448
  hypo
gcacctggagactgcgaggcgcccgagctgcaggagcggcccgatgtcatcagtgcgtctccctcctcctgcgtctgaaagagcaaagggagacagtgacctcctgagaggcttccagacgccccgccaggcact

SEQ ID NO: 20130 - DNA, 33 bp, Homo sapiens
  chr6:7294620-7294653
  hypo
accatttatgaaaaatagggccgggcgtggtgg

SEQ ID NO: 20131 - DNA, 232 bp, Homo sapiens; identical to SEQ ID NO: 4571
  chr6:7541474-7541706
  hypo

SEQ ID NO: 20132 - DNA, 31 bp, Homo sapiens
  chr6:7583974-7584005
  hypo
atccctgaatgatccccgagatagtcagaaa

SEQ ID NO: 20133 - DNA, 1723 bp, Homo sapiens; identical to SEQ ID NO: 4574
  chr6:7726045-7727768
  hypo

SEQ ID NO: 20134 - DNA, 217 bp, Homo sapiens
  chr6:7882693-7882910
  hypo
agtaactgatttgacaagtatcgacacataaagttatggcatcagcattctcttactcaggcacggtcagaagtaacgctgctttcatcacggctaacctctcacactgagagaagtattcacagcaacagaagctccagcagcggccgtgaaggtatcttccagaggtgtgggtttttgcatttcaatctgctccatgctacggaccaacacagta

SEQ ID NO: 20135 - DNA, 463 bp, Homo sapiens
  chr6:7883308-7883771
  hypo
ctgtgggactgaactcctaaacgcagggtgcgggagctgggcaggagaggtgacctccaactgtgttcctaaagttcgtctttcgcttggctcaggacaaagcggtgtaacgagtcaaggtctctgcctccactgtgctcactgactttcttccctcctcggaaaagcaataacgtggggtagcctcgtaccttaaaacaaaaaagaaaaaagtttgcaaaccagcggtccagatcacatgcaaattgcttcctaaataaaaccagatacactcctaccgttgtggctggaaaaattctgtggctaatttttaaaggtgtatattccattaaaacaggagcagactactgtttagaaagcacagccgtggggctgtgtgttcacttctgaattcaaaatgacatcattaaagatcagcctcaaaggaacgactttaccctaaagcagacgctttcagtcttta

SEQ ID NO: 20136 - DNA, 31 bp, Homo sapiens
  chr6:7884500-7884531
  hypo
gagcagagtgagttatcgtggttgaggcaca

SEQ ID NO: 20137 - DNA, 204 bp, Homo sapiens
  chr6:7885607-7885811
  hypo
actatacagtcattcacggtaagtcttagaaccaaggttgtctggatctcacactacctgcaatccatttctgctctggtctccaagaccacgtggcatgcaggttcaggaaactgcgtagcatactgaatggctctaacagactctactggatttctctacaaaagaaatccgagtacttaaaagaaccgaggagcaaagcta

SEQ ID NO: 20138 - DNA, 356 bp, Homo sapiens
  chr6:7887533-7887889
  hypo
gtgcagacctcctgccgcagccccaggctcatggttggaactgccactggacactgccacctacacagccgaaagccttgaagatcaacaccttgaaaaccaagctcatccctttcctcgagctctggccccgcccctgtgctgggtaccatcctccaccagatatgcgggaatcagactcgcctcggaccctccctccctctccgcgctgcacagcggctggactccttatgctggctttctcctcctcgccatcgcacagtcacggctgcagcatgagggaacgcatcatctttaaaggcctaatagagcagcttcccacctccagcacacgtgcatgccggtcattttcctac

SEQ ID NO: 20139 - DNA, 891 bp, Homo sapiens
  chr6:7888465-7889356
  hypo
cagtcactggcctgatcgctgcggatgccctcttggctacaggtcttctaggggcctttacaacgggtaaaggaaaatgcccggagcaaggtcaggaatagaatcagggccccggggccagcagtcgagatttcatagcagaaacatgcccagcagagtcattctttaaaatgaatgaagcggaaaggaaggattctctagagatttttgacaccaaatattgtcttgggatttgtctcacatccatttcatgttttcaaaaggaaagcttttgtttgcattcgcccctgaaagcatgtgaaagtcgatgaaaaatacgtgttgaaaacgcaactggagccaaccatcagatgactgtgtccccaaactgtcattttgtccaaagcatttgaggaggcctctgagggtggggaggtggggggccgggggccacgggccacttatggggatcccgactccagcaggcacccaccttgtcagcctcgggctcagctgccagcaccggggcctctgagggcgtgacggtctccgtcgctccagtctctgtgcgctgcagctgcgactccacgtactccctcagtgactccaaatcccgctttcccttgtactgatccacctggccaagacacgggcacgcggctgagtgagtccactgaggtgttctgaatcacttaagccttcctgcaacccctgcttgcccgggtcagagctcccagatgtcttagcggtggtgcaaagtctgcatgttcatatttagacgggaatgtagagaggataactgaatgcctcggctttggtgagagaactgtacaggcccctcttccctccacggggttacacatcacagaagtctggggcagaggcctgccagcaagccgttgtgctgatggg

SEQ ID NO: 20140 - DNA, 70 bp, Homo sapiens
  chr6:7889725-7889795
  hypo
acctttttcccatctcggaaccagagaagagtgggatagccacgaacctggtttccggagcagagttcat

SEQ ID NO: 20141 - DNA, 218 bp, Homo sapiens
  chr6:7890516-7890734
  hypo
tcactatgtcagcaaacgggggtaaaaatactatttcaacacctaagacccgtcagagagcagctaaggtgcggaactgaagtacaagaggcctcagcccaaggtcgggagaggacaagcatttttaagggtccagtgtaacccagccacatgtgccagggatgaagggcttcagcgtggtcacctgggcttgtgtctgctcacgcctaggtctgcta

SEQ ID NO: 20142 - DNA, 272 bp, Homo sapiens
  chr6:7893705-7893977
  hypo
caccatggtacctacacgacacagctgtgtggcagtgacccacttagggaggcgctggctaggcctgccggagtcggtctgtcctgccggagtcggtccgtaacaggtgatttgggaaacacaccctgctcagagcccaagacaatcccagctgaaaatgcattcccgtagcggaaagcatgctagagttctgccgtcagggcgctggtatggatgaaataacttttagcaaaagtgggaaaaggctgaaggcctcacgataagttactgtg

SEQ ID NO: 20143 - DNA, 269 bp, Homo sapiens
  chr6:7911717-7911986
  hypo
aaatgaatgacagcacgcctgctatggctgaactcagcctgtggaatggcccgaaggcatccctgcccagcgactcataactcgcacctgcacacacaccttacagcagatggtaatcgaaagctccagccctaccccggggatctgaagctaaattagaatcaccgggttgctctccgggatcctgcctgctctttgattatcctcaatccaggaagccccaggtagttaactcctggcttggcaacaggggacgcgcccactgtctc

SEQ ID NO: 20144 - DNA, 203 bp, Homo sapiens
  chr6:7919988-7920191
  hypo
gcaaaggacttagagcgaatgaataagaaggcagtacagaatgagaacactggcttttacgaatgagaagggaagtcatcggagggttttcagaagaaacacgacaggatctggcttccaattatttctacagcatggctctgagagctgtagcgaggaatgcgaagggggcaaggatagaagggaggcgaccactccgggag

SEQ ID NO: 20145 - DNA, 46 bp, Homo sapiens
  chr6:7976901-7976947
  hypo
tgtgacagcagaggcacgcacaaaataggaccgcagtgtctcccct

SEQ ID NO: 20146 - DNA, 30 bp, Homo sapiens
  chr6:7986657-7986687
  hypo
tggcccgcagaacgcgggttctgtaaagac

SEQ ID NO: 20147 - DNA, 30 bp, Homo sapiens; identical to SEQ ID NO: 4578
  chr6:8825196-8825226
  hypo

SEQ ID NO: 20148 - DNA, 17 bp, Homo sapiens
  chr6:10075433-10075450
  hypo
agcgagtgctgctgggg

SEQ ID NO: 20149 - DNA, 493 bp, Homo sapiens
  chr6:10319601-10320094
  hypo
gagggatgtgggcaggttttccgtggggatagagggacgtgggggttttccgtggggatggagggatgtgggcaggttttcggtggggatggcgggacgtgggcagttttccgtggggatggcgggacgtgggcagttttccgtggggatggcgggacgtgggcggttttccatggagatgacgggacgtgggcggttttccttggggatggcgggacgtgggcggttttccgtggagatgacgggacgtgggcggttttccgtagggatggtgggacgtgggtgagttttccgtggggatggagggacgtggagtgttttccatggggatggaggaacgtgggcggttttccgtggggatggagggatgtggcgggttttccgtggggatggagggacgtgggcggttttccgtggggatggagggacgtgggcggggtttcgaggcattcagaaggtgttaagagaagacgaaggaaaaatgaatggtgga

SEQ ID NO: 20150 - DNA, 30 bp, Homo sapiens
  chr6:10494984-10495014
  hypo
aggtactgcggctccgaaccacagtgggta

SEQ ID NO: 20151 - DNA, 149 bp, Homo sapiens
  chr6:10538234-10538383
  hypo
gagagagtatcctaccgcacctcgttagcctgggaaaagaccaacattcaaaagtcaaaatatggtttctacttaaatgctcatggctttcacacatcataaggtaaaaaaaattataagttgaggccaggcgcagtggctcacgcatg

SEQ ID NO: 20152 - DNA, 42 bp, Homo sapiens
  chr6:10539695-10539737
  hypo
acagacgtgagccactgcgcccggccccgccatctctttaac

SEQ ID NO: 20153 - DNA, 32 bp, Homo sapiens
  chr6:10542885-10542917
  hypo
gttcatccgtgttatcgcgtgaatcagtactt

SEQ ID NO: 20154 - DNA, 85 bp, Homo sapiens
  chr6:10595774-10595859
  hypo
gctgggattacaggcgtgccactctgcccggccggttggttgggttgctttcttttcttaagccgtaccatgttccagaaaggac

SEQ ID NO: 20155 - DNA, 26 bp, Homo sapiens
  chr6:10693034-10693060
  hypo
gagtgagccaccgtgcccagccaaga

SEQ ID NO: 20156 - DNA, 52 bp, Homo sapiens
  chr6:10693343-10693395
  hypo
tcacaggcccaggcacgttccagctcacagcctgtttagcaaatcgggtatc

SEQ ID NO: 20157 - DNA, 25 bp, Homo sapiens
  chr6:10761165-10761190
  hypo
tgccgcacctgatcattcatgcatt

SEQ ID NO: 20158 - DNA, 1231 bp, Homo sapiens; identical to SEQ ID NO: 4618
  chr6:11043616-11044847
  hypo

SEQ ID NO: 20159 - DNA, 30 bp, Homo sapiens
  chr6:11191220-11191250
  hypo
tgccttcgagccaccggttctgcagctcct

SEQ ID NO: 20160 - DNA, 30 bp, Homo sapiens; identical to SEQ ID NO: 4620
  chr6:11392177-11392207
  hypo

SEQ ID NO: 20161 - DNA, 155 bp, Homo sapiens
  chr6:12287986-12288141
  hypo
aggcgcgcgcgcgcgcgcgcaggcacacgtcttgcaaattcaggattcaaagagacaggggcaccattatatttggcacggtggggcccttccaggtctgaaatcctgcattcttccttactatttactttccccgagctcgagaagggccaggt

SEQ ID NO: 20162 - DNA, 30 bp, Homo sapiens
  chr6:12288539-12288569
  hypo
gtgttgggggggaggcgctgcttggaacct

SEQ ID NO: 20163 - DNA, 43 bp, Homo sapiens
  chr6:13296736-13296779
  hypo
tccagcagctgggcagaaaaacggagacccactgggccaaaca

SEQ ID NO: 20164 - DNA, 18 bp, Homo sapiens
  chr6:13330102-13330120
  hypo
tgtgttaaaaagtgatcg

SEQ ID NO: 20165 - DNA, 136 bp, Homo sapiens
  chr6:13333028-13333164
  hypo
gtggcatatgtcttacgtacatgtgattatagacttccaatactgtcctggtatatagaaacctctggctacagccataggtttcctagtgcgtatggggtcatttaacaaataatgattccgttaaccactgata

SEQ ID NO: 20166 - DNA, 30 bp, Homo sapiens
  chr6:13350850-13350880
  hypo
gtggcagtggtgcacggtgacaggcttcag

SEQ ID NO: 20167 - DNA, 25 bp, Homo sapiens
  chr6:13397368-13397393
  hypo
tgtgggtgcccacagtggtctcgaa

SEQ ID NO: 20168 - DNA, 84 bp, Homo sapiens
  chr6:13397452-13397536
  hypo
aagccatggcgcccagcaagacagattcttaataaagtaaaacaaagccttactctaaagcccggcaattccactcctagaaat

SEQ ID NO: 20169 - DNA, 390 bp, Homo sapiens
  chr6:13456726-13457116
  hypo
tctcatgaatattgtcatgactacaggtgcaagcttattccactttcttttgcccattaaattcaggttaatttttgaactactcatcacggtcacctctaatcctttctagactaaagcaagaatctaaataaatatatagacagattagactgctctcttactgcaggtgattaaacctgaacagatgataggtcctgacatacagcctcctagggctgcaccatatagagtgggcggcctgcacgctgctcgtcttggccccgcacagatctgtcttgggagccaggaggtctgagcctcctgggaatgaaaaccttcctattcagacaatcacagggacattactgagtagaacagaaagttcacgtgagcttttcatataagaac

SEQ ID NO: 20170 - DNA, 147 bp, Homo sapiens; identical to SEQ ID NO: 4623
  chr6:13574017-13574164
  hypo

SEQ ID NO: 20171 - DNA, 38 bp, Homo sapiens
  chr6:13631318-13631356
  hypo
tgtgagccaccgcgcccggcctgatttgactttttaaa

SEQ ID NO: 20172 - DNA, 30 bp, Homo sapiens
  chr6:13639923-13639953
  hypo
ggcctcccaaacatcgtacttcactatctg

SEQ ID NO: 20173 - DNA, 19 bp, Homo sapiens
  chr6:13797646-13797665
  hypo
aaaacacacttaggccggg

SEQ ID NO: 20174 - DNA, 132 bp, Homo sapiens
  chr6:14002397-14002529
  hypo
taattggagctattcaagtaacggaaggtgttgccccgagaacagtgaggtcccatcactggacgtgttccacggagactgctgaaggtgagaggtgacagcgggctggcagccctggctcgctctcggcgc

SEQ ID NO: 20175 - DNA, 111 bp, Homo sapiens
  chr6:14203366-14203477
  hypo
tgtccacatggcaaatcattacgcaccaactcgtcactctccgacgctgcagtaaactgcctgcacttgccacctcttcgtctgcggcccggctcataagccttcttcttg

SEQ ID NO: 20176 - DNA, 129 bp, Homo sapiens; identical to SEQ ID NO: 4628
  chr6:14211102-14211231
  hypo

SEQ ID NO: 20177 - DNA, 341 bp, Homo sapiens
  chr6:14282556-14282897
  hypo
cctccataacaaaccgtggtctagacaggatctggctagaaattcccttattaccaccccggccagactccatttatcatcaccttgaacgtaatgctcgcgcaaaacctccaggcctctcccgttcacataacgaatcgagggaggcagagctcttacggcgctccagccagtgtctgcctgcttctggaaatacctcatcttccagaaaagcattcatttgtcaacagagggataatgctaaaaccttaaagacaaatcggccagaaggcagggatgggagaagcaggcagggtacagcccgggagagacggcagctttgcctcggtgcagttatttga

SEQ ID NO: 20178 - DNA, 30 bp, Homo sapiens
  chr6:14324620-14324650
  hypo
tccttaacggagtggcgagaaaggccacac

SEQ ID NO: 20179 - DNA, 11 bp, Homo sapiens
  chr6:14559525-14559536
  hypo
tgggtgcggtg

SEQ ID NO: 20180 - DNA, 18 bp, Homo sapiens
  chr6:14755745-14755763
  hypo
cgggcgcagtggctcacg

SEQ ID NO: 20181 - DNA, 18 bp, Homo sapiens
  chr6:14771956-14771974
  hypo
gtgaaaacagggcaaaga

SEQ ID NO: 20182 - DNA, 31 bp, Homo sapiens
  chr6:14813397-14813428
  hypo
cactgggtcagtttcccggaggttctggctt

SEQ ID NO: 20183 - DNA, 31 bp, Homo sapiens
  chr6:14847049-14847080
  hypo
agcagtgctttatgcacggttctcatttcat

SEQ ID NO: 20184 - DNA, 31 bp, Homo sapiens
  chr6:14940112-14940143
  hypo
gtactaggattacaggcgtgagccacaataa

SEQ ID NO: 20185 - DNA, 28 bp, Homo sapiens
  chr6:14966732-14966760
  hypo
taaaaatttgaaatttcgaggccaggtg

SEQ ID NO: 20186 - DNA, 88 bp, Homo sapiens
  chr6:14966819-14966907
  hypo
ggccaggagttcaagaccagcctaggaaatatagcgtcagagccattcagtgaccctatgtcgaatgggactgcgtaaaataaggctg

SEQ ID NO: 20187 - DNA, 31 bp, Homo sapiens
  chr6:15083857-15083888
  hypo
tgtgagccaccatgcccggccaactcttagg

SEQ ID NO: 20188 - DNA, 210 bp, Homo sapiens
  chr6:15227669-15227879
  hypo
ggatttatcatatttgcgacaggaaaaacattcggtttggcaggaaacaaatgatattacagggcccaaaggtgagtaattggccctaatgacttggaaataaatttgaattcgcattgggtaggctgtataaatatatactgtataactgaatgcctggtgctttggggggacaagcggggtgggagtggggggcgaggggaggggaga

SEQ ID NO: 20189 - DNA, 44 bp, Homo sapiens
  chr6:15282317-15282361
  hypo
agtgcaccatcatgctcgaccaatttctgtattttaagtagaga

SEQ ID NO: 20190 - DNA, 44 bp, Homo sapiens
  chr6:15282480-15282524
  hypo
ttttagagtaggaagaaattttttccttccgaaaaccttcagcc

SEQ ID NO: 20191 - DNA, 121 bp, Homo sapiens
  chr6:15283482-15283603
  hypo
acaggtgtgagccactgcgcccggccgttctggtatttattgaatatgtcgcaaatattgtctcctagtctgtcctttgtcctttaagtatttttttttttttttttgagatggagtctca

SEQ ID NO: 20192 - DNA, 30 bp, Homo sapiens
  chr6:15494999-15495029
  hypo
taagactcattacccgccatctggggacct

SEQ ID NO: 20193 - DNA, 30 bp, Homo sapiens
  chr6:15512642-15512672
  hypo
ccgcttgctgcccccgcatccctgtgagtg

SEQ ID NO: 20194 - DNA, 673 bp, Homo sapiens
  chr6:15513370-15514043
  hypo
gtgtctgcagggaggccggtgtggggtgcgtgtgtcccctctgctggtgagcatggcaggccgtcactaaaggtgcgggccgtctcccgtgtctggcagggatacagagctgcggcagcgcaggcagctgttcgaggctggcctccactcctccgcacgctatggcagccacgatggcagcagcacggtggcggacgggaagaaaaagcctcgaaagtggctgcagttggagacgtcagagaggaggtgtcagatctgccagcacctgtgctacctgtccatggtgagcccgcctggccctgccggcgccctcgcatgtagtgcttggcctgagagctccggggttgcccccagaagagggagggcgctctctgcccaggagacctgctgtgctcccatctctggagccggctgtgggacctcggcggagcttctggccgccggaggtggctgcctcacccacagtgaccaggccacacagaggctgtccctctgttctgcccacgcgtggccctccctcggtcctgcagtgcgtccttcctccctggggagcaggtggcctccctctccgccctactttgtcactccagcccccacgcactctgctcttacccattctttctgaggcagtgaggggcgggtttccagtactgggcagcgtctgccattccct

SEQ ID NO: 20195 - DNA, 42 bp, Homo sapiens
  chr6:15518529-15518571
  hypo
agcctgtttctgtagtcggatgtgtgacgtgaccagatcctg

SEQ ID NO: 20196 - DNA, 54 bp, Homo sapiens
  chr6:15523494-15523548
  hypo
tgtgaatcagaattgccgccaacagctgtggaatgtgcccgtcatgaaaggggg

SEQ ID NO: 20197 - DNA, 30 bp, Homo sapiens; identical to SEQ ID NO: 4629
  chr6:15810289-15810319
  hypo

SEQ ID NO: 20198 - DNA, 6 bp, Homo sapiens
  chr6:15891687-15891693
  hypo
cgggct

SEQ ID NO: 20199 - DNA, 32 bp, Homo sapiens
  chr6:15907073-15907105
  hypo
gactggaactgtaaccgccaaatgggttcacc

SEQ ID NO: 20200 - DNA, 140 bp, Homo sapiens
  chr6:16322046-16322186
  hypo
tggttttttgttaaccgacgctaataaatttttacaagggctgtgctgttctggaaagtataaaagtgaagcattaaaaaacggaaccctctcaagagattatctcctatgaagaatcatacgtggccgggcgccgtggc

SEQ ID NO: 20201 - DNA, 1220 bp, Homo sapiens; identical to SEQ ID NO: 4634
  chr6:17281128-17282348
  hypo

SEQ ID NO: 20202 - DNA, 25 bp, Homo sapiens
  chr6:17751570-17751595
  hypo
ccacggtgcccggccttgttgttgt

SEQ ID NO: 20203 - DNA, 43 bp, Homo sapiens
  chr6:17761881-17761924
  hypo
gggattacaggtgtgagccactgcgctccgctaaaaactcttt

SEQ ID NO: 20204 - DNA, 31 bp, Homo sapiens
  chr6:17779890-17779921
  hypo
tcctcttcaaactctgcgtgaaactctagta

SEQ ID NO: 20205 - DNA, 77 bp, Homo sapiens
  chr6:17788885-17788962
  hypo
agtttaagacttaagacgttacatcaagaatagagcccttggacctctgaaactttaccaacagtgtacccacattt

SEQ ID NO: 20206 - DNA, 96 bp, Homo sapiens
  chr6:17797154-17797250
  hypo
atcgtgaccttaaatccgtctcttctgttttatagaaaaccataaagaaccacagaatgttagatctggaaagaaaattgggaggtaatttaactc

SEQ ID NO: 20207 - DNA, 52 bp, Homo sapiens
  chr6:17800167-17800219
  hypo
tcactgtcctctcacccgacatgtcagctttttgactcggtgaatgatttcc

SEQ ID NO: 20208 - DNA, 155 bp, Homo sapiens
  chr6:17940481-17940636
  hypo
aacttcaatatgtatacggatgcttcaggaacactattaagcgcagattcttcgattctgtaaatccgtggtgggtcctgagcttctgcatttctaatgagctcccagggtgtgctaatgctgctgatccacaagggattcgagcatgcaaatta

SEQ ID NO: 20209 - DNA, 31 bp, Homo sapiens; identical to SEQ ID NO: 4637
  chr6:17987686-17987717
  hypo

SEQ ID NO: 20210 - DNA, 31 bp, Homo sapiens
  chr6:18044394-18044425
  hypo
tacaggtgggagccaccgctcccagccaaaa

SEQ ID NO: 20211 - DNA, 99 bp, Homo sapiens
  chr6:18250344-18250443
  hypo
ttatgttaagctccaacggctgttaatactttgtcatgataatattttaagttagatttgtaatttatttcatccctacaagcattaaaactgtcactg

SEQ ID NO: 20212 - DNA, 42 bp, Homo sapiens
  chr6:18259257-18259299
  hypo
ttgtttagtcacaaaaatctacggtgaggcgcggtggctcat

SEQ ID NO: 20213 - DNA, 1475 bp, Homo sapiens; identical to SEQ ID NO: 4639
  chr6:18263765-18265240
  hypo

SEQ ID NO: 20214 - DNA, 34 bp, Homo sapiens
  chr6:18275932-18275966
  hypo
agaatgccaggccaggcgcagtggctcatgccta

SEQ ID NO: 20215 - DNA, 583 bp, Homo sapiens; identical to SEQ ID NO: 4640
  chr6:18277377-18277960
  hypo

SEQ ID NO: 20216 - DNA, 77 bp, Homo sapiens; identical to SEQ ID NO: 4641
  chr6:18277979-18278056
  hypo

SEQ ID NO: 20217 - DNA, 246 bp, Homo sapiens
  chr6:18368667-18368913
  hypo
ggagatcagcgtcagcggcgtcttcagcgtgatcttccgggtcaggactgaggtcaggtccacctcatcagctatgaagtctatgaatcctgggagaatcgggacgtcgttgtaggtgaggccgtcagcgctggtgaagagctgctgtgggatgagcccgtcctcaggcacgtagccggtgcagcagttgctcagatagtccgccatgctgcgggagaccccgcgaccccacgtaaacacccgcgc

SEQ ID NO: 20218 - DNA, 30 bp, Homo sapiens
  chr6:18458453-18458483
  hypo
ccaccacacttgggcgatacagagggtttt

SEQ ID NO: 20219 - DNA, 80 bp, Homo sapiens
  chr6:19677097-19677177
  hypo
ttctttgtctactctgcgtgtgcatgtgtgatgagaccgttttccctgttttccttggtatgttcccagctatgccccgg

SEQ ID NO: 20220 - DNA, 43 bp, Homo sapiens
  chr6:19677236-19677279
  hypo
acccagccttcaagacacaagcagcggacgtacacccttaagt

SEQ ID NO: 20221 - DNA, 22 bp, Homo sapiens
  chr6:19779513-19779535
  hypo
gccactgcgctcagcctgtatt

SEQ ID NO: 20222 - DNA, 634 bp, Homo sapiens; identical to SEQ ID NO: 4649
  chr6:20212359-20212993
  hypo

SEQ ID NO: 20223 - DNA, 34 bp, Homo sapiens
  chr6:20640181-20640215
  hypo
gagccaccgcgccgaccattttcattggttttaa

SEQ ID NO: 20224 - DNA, 31 bp, Homo sapiens
  chr6:20687079-20687110
  hypo
aagttactctatatctcgttcactgagatct

SEQ ID NO: 20225 - DNA, 21 bp, Homo sapiens
  chr6:20878666-20878687
  hypo
aatctttaaagccaaccttag

SEQ ID NO: 20226 - DNA, 30 bp, Homo sapiens
  chr6:21277939-21277969
  hypo
ttgaaacacgacaacggtgaaatgagtcat

SEQ ID NO: 20227 - DNA, 31 bp, Homo sapiens
  chr6:21459015-21459046
  hypo
ttatcaggcctatggccgggagcggtggctc

SEQ ID NO: 20228 - DNA, 23 bp, Homo sapiens
  chr6:21470164-21470187
  hypo
ctgcgccccgcctaaaataataa

SEQ ID NO: 20229 - DNA, 94 bp, Homo sapiens
  chr6:21570591-21570685
  hypo
aatcattgccctctcccgccctcaagtgcactgattatctgtgccatgtggccactgctgggggatgggggagtggtggtcttggcaattcagg

SEQ ID NO: 20230 - DNA, 31 bp, Homo sapiens; identical to SEQ ID NO: 4652
  chr6:21588775-21588806
  hypo

SEQ ID NO: 20231 - DNA, 1132 bp, Homo sapiens; identical to SEQ ID NO: 4653
  chr6:21594474-21595606
  hypo

SEQ ID NO: 20232 - DNA, 31 bp, Homo sapiens
  chr6:21602480-21602511
  hypo
aagttcgaggggaagccgctgcttcagagac

SEQ ID NO: 20233 - DNA, 31 bp, Homo sapiens
  chr6:21636069-21636100
  hypo
actgagctggggggatcggatcacctgagcc

SEQ ID NO: 20234 - DNA, 31 bp, Homo sapiens
  chr6:21730829-21730860
  hypo
actgtcttccctcacccgattgccctgaact

SEQ ID NO: 20235 - DNA, 31 bp, Homo sapiens; identical to SEQ ID NO: 4656
  chr6:21783024-21783055
  hypo

SEQ ID NO: 20236 - DNA, 35 bp, Homo sapiens
  chr6:22037568-22037603
  hypo
taagttggccaggcgcggtggctcacgcctgtaat

SEQ ID NO: 20237 - DNA, 183 bp, Homo sapiens; identical to SEQ ID NO: 4657
  chr6:22146871-22147054
  hypo

SEQ ID NO: 20238 - DNA, 37 bp, Homo sapiens
  chr6:22331078-22331115
  hypo
atgagccactgtacccggcaagattttttaagaaaac

SEQ ID NO: 20239 - DNA, 255 bp, Homo sapiens
  chr6:22349412-22349667
  hypo
cctgacgagtgcttgcgcattgcgcatgccatttctttctgacaggaatcattccgccacaagcgaacgagcctgggctggccttgtggaagcctagccgaggcctcagaatatggatgagatcatctgagaccatccaccccaggaagccagcaaagtggctagaacccgccataccaccgcagaatcacgattgctgttctgagtcactacatttcaggtgacttgttgagcagcaaacgagctgacgaacct

SEQ ID NO: 20240 - DNA, 30 bp, Homo sapiens
  chr6:22570131-22570161
  hypo
gaggccgcagagggcgacgaggacaagccg

SEQ ID NO: 20241 - DNA, 30 bp, Homo sapiens
  chr6:24384144-24384174
  hypo
gacaaatggcaaaacgaatatcaggaattt

SEQ ID NO: 20242 - DNA, 162 bp, Homo sapiens
  chr6:24425298-24425460
  hypo
gtcatggtgttcttgtcggaatgtgaacatacagcaccctctagcattacgaatctcttaggatttttaagattgtatttgataatacttatatttcacagggcacacttttggcacacctcagagcacactgctgctattttgggtcgtatcactgtaaaa

SEQ ID NO: 20243 - DNA, 31 bp, Homo sapiens
  chr6:24433177-24433208
  hypo
aaaattaggtggcagacgacttggccccaac

SEQ ID NO: 20244 - DNA, 31 bp, Homo sapiens
  chr6:24434291-24434322
  hypo
cataagaaaatgttctcggtatattgttagg

SEQ ID NO: 20245 - DNA, 126 bp, Homo sapiens
  chr6:24523038-24523164
  hypo
tgatgcctttgtaaaagcattcgccgaggccatgaagaagaacctgcgcgtaggtaatggatttgaggaaggaactactcagggcccattaattaatgaaaaagcggtagaaaaggtaagtatatt

SEQ ID NO: 20246 - DNA, 162 bp, Homo sapiens
  chr6:24647203-24647365
  hypo
gctactcgtatttaccgaagagcctcagacaagttacctaatctagataaacctgtttcctcaattataaaatgaagataatagcattcatataggatgattctgggaatcaaataagataatgcacatttaaagagtaaaaaccagctgggtgcggtggct

SEQ ID NO: 20247 - DNA, 121 bp, Homo sapiens
  chr6:24662783-24662904
  hypo
ccaccattaccctctagtcctgtcgcatccccctcaccgagatggggatagtgatcaataaatactgagggaactcagagaccagtgcccatgcagatcctccgtatgctaagcgccggtc

SEQ ID NO: 20248 - DNA, 4 bp, Homo sapiens
  chr6:24781150-24781154
  hypo
gggt

SEQ ID NO: 20249 - DNA, 174 bp, Homo sapiens
  chr6:25153407-25153581
  hypo
cacggaaatccgaccgccaggctgcctcacacccctagtccgcctgctggaaagtgctgcagcgccggtcctgcccccagcggtgcagcgaggactcctgagcaccacccaggacttcggttacatttccgtcagccacatgggggaggtgggccccgcgcacgttaaagttca

SEQ ID NO: 20250 - DNA, 21 bp, Homo sapiens
  chr6:25506764-25506785
  hypo
gtctcaaacaaacaaacaaac

SEQ ID NO: 20251 - DNA, 692 bp, Homo sapiens
  chr6:25726966-25727658
  hypo
cgtgcctataaataccgcatctttcatcctccagttctgtttgtttacttggcgagacttggagctgaggtcatttggagctgtttaatactgaagagctgttgagcactggaaagtgctgtgtaaccctggaaaagaaccgtgtaacgctgcagaagtgtgtggtagctatgccggaggtgtcatctaaaggtgctaccatttccaagaagggctttaagaaagctgtcgttaagacccagaaaaaggaaggcaaaaagcgcaagaggacccgtaaggagagttattctatttacatctacaaagtgctaaagcaggtccatccggacactggcatctcttcgaaagctatgagcattatgaattccttcgtcactgatatctttgagcgtatagcgagcgaggcatcacgtttggctcactacagcaagcgctccaccatttcttccagagagattcagacagcagtgcgcttgctactgccgggagagctggctaaacatgctgtgtctgagggcaccaaggctgtcactaagtacaccagctccaagtaagcctgctaagtaaacgtcatttctaacccaaaggctcttttcagagccacttaaacatactgaaacagctgtgggcttcgtttttgtgtagtttctaaccgtaagggttttttttttttttgaggcggagtctcactc

SEQ ID NO: 20252 - DNA, 181 bp, Homo sapiens
  chr6:25727897-25728078
  hypo
agccactgcgaatatatccaaatcagctgtgggccgagggtagacgaactagttgcagcaagacaatccttgctaggcaccgtgactcgcctgtaatcccagcacttgcagaggtcgaggctggcggttcatgaggttaagagacggagaccatcttggccaacaaggtgaaactccgtct

SEQ ID NO: 20253 - DNA, 78 bp, Homo sapiens
  chr6:26025540-26025618
  hypo
cgggattacaggcgtgagccaccttgccgggcctatatttcttaagctctatgtttcgttctgaagcttgaagtgggt

SEQ ID NO: 20254 - DNA, 506 bp, Homo sapiens; identical to SEQ ID NO: 4661
  chr6:26027157-26027663
  hypo

SEQ ID NO: 20255 - DNA, 753 bp, Homo sapiens; identical to SEQ ID NO: 4672
  chr6:26188698-26189451
  hypo

SEQ ID NO: 20256 - DNA, 766 bp, Homo sapiens; identical to SEQ ID NO: 4677
  chr6:26199131-26199897
  hypo

SEQ ID NO: 20257 - DNA, 30 bp, Homo sapiens
  chr6:26225974-26226004
  hypo
ctccctcaggttttcgcctagggctgggcc

SEQ ID NO: 20258 - DNA, 30 bp, Homo sapiens
  chr6:26246955-26246985
  hypo
cggtgaccgtcttgcgcttggcgtgctccg

SEQ ID NO: 20259 - DNA, 24 bp, Homo sapiens
  chr6:26549651-26549675
  hypo
tgcttgtttgtttttttgagacgg

SEQ ID NO: 20260 - DNA, 66 bp, Homo sapiens
  chr6:26970367-26970433
  hypo
agggactcgccacccgcagccgtggagccgggccatgagcgcctgtgcggcgctgggtcgctgtcc

SEQ ID NO: 20261 - DNA, 1177 bp, Homo sapiens; identical to SEQ ID NO: 4725
  chr6:27218650-27219827
  hypo

SEQ ID NO: 20262 - DNA, 747 bp, Homo sapiens; identical to SEQ ID NO: 4727
  chr6:27280039-27280786
  hypo

SEQ ID NO: 20263 - DNA, 31 bp, Homo sapiens
  chr6:27408482-27408513
  hypo
tataaaagagaaggtgcaggccgggcacggt

SEQ ID NO: 20264 - DNA, 46 bp, Homo sapiens; identical to SEQ ID NO: 4729
  chr6:27440465-27440511
  hypo

SEQ ID NO: 20265 - DNA, 32 bp, Homo sapiens
  chr6:27441961-27441993
  hypo
taaggaaacccggagataatattcccatgttt

SEQ ID NO: 20266 - DNA, 75 bp, Homo sapiens; identical to SEQ ID NO: 4730
  chr6:27447498-27447573
  hypo

SEQ ID NO: 20267 - DNA, 17 bp, Homo sapiens
  chr6:27770798-27770815
  hypo
gccgggattataggcgc

SEQ ID NO: 20268 - DNA, 153 bp, Homo sapiens; identical to SEQ ID NO: 4750
  chr6:27805753-27805906
  hypo

SEQ ID NO: 20269 - DNA, 339 bp, Homo sapiens; identical to SEQ ID NO: 4751
  chr6:27805936-27806275
  hypo

SEQ ID NO: 20270 - DNA, 16 bp, Homo sapiens
  chr6:27806495-27806511
  hypo
gacaaaggcccagaag

SEQ ID NO: 20271 - DNA, 30 bp, Homo sapiens
  chr6:27830376-27830406
  hypo
ggcatgagccacagcgttggcctagcaata

SEQ ID NO: 20272 - DNA, 31 bp, Homo sapiens
  chr6:27846867-27846898
  hypo
ggtcaggccttgggtccgaagccacagctgg

SEQ ID NO: 20273 - DNA, 30 bp, Homo sapiens
  chr6:28226188-28226218
  hypo
tctgtctacaagatcgagtgggatgcttct

SEQ ID NO: 20274 - DNA, 156 bp, Homo sapiens
  chr6:28327738-28327894
  hypo
aggcagctggatgagccggcgccgcaggtagaaagaacaggtttagtatctgagcgctgtggcctgtttcctcctgaaatcccagatcagagtgaggggcattcctttaacatccaggagttcttcatctcttttttgtaccgtgaacctccttgg

SEQ ID NO: 20275 - DNA, 30 bp, Homo sapiens; identical to SEQ ID NO: 4772
  chr6:32612963-32612993
  hypo

SEQ ID NO: 20276 - DNA, 247 bp, Homo sapiens
  chr6:33609018-33609265
  hypo
cttacctgtgagggctgagaccgactgacagtcagacagacaggtcctgggcgtgttgggcagggtgggagcaggcagcaacacgctgggcctgctgccaccaagtctgcccgcgtggctgctcctctggggagagcttagctgggattgtcctcgcgggggatgctggaaggggagcgggatttaagacaatccggcggcatccttggctggctggctggcggccggggtccttgcccatcacttg

SEQ ID NO: 20277 - DNA, 30 bp, Homo sapiens
  chr6:33638398-33638428
  hypo
gagtgggtgtatctcggggaccttcatgcc

SEQ ID NO: 20278 - DNA, 30 bp, Homo sapiens
  chr6:33653491-33653521
  hypo
acgaggtgagcgaacgtgtgcagagcagtg

SEQ ID NO: 20279 - DNA, 100 bp, Homo sapiens
  chr6:33674233-33674333
  hypo
gaattagaaaccaaccctgcccggggcaatgtgtaagtgagagccagatctgcggagcacgggccgctgcacgagacccgaggtgggagttgggcacctg

SEQ ID NO: 20280 - DNA, 34 bp, Homo sapiens
  chr6:33694717-33694751
  hypo
gaggtctggggaagggcgccgctgcctgtggctg

SEQ ID NO: 20281 - DNA, 144 bp, Homo sapiens
  chr6:33748501-33748645
  hypo
ctgaatggtaatcatacgggggagaagggacagcatgtttctcctgaaagccgaaggcaagacgagcaaagtgaaccaagggagaagcaggtaacaggcacacctacagtgcagcagtcaggagtgagccgccccactgcacat

SEQ ID NO: 20282 - DNA, 84 bp, Homo sapiens
  chr6:33771000-33771084
  hypo
ttgcagcacccctggccgggctagccttgcctccccatgtgctctccctcggggtcaactttttcttttccttttcttttcttc

SEQ ID NO: 20283 - DNA, 30 bp, Homo sapiens
  chr6:33878451-33878481
  hypo
gggaggctgagggacgggcattgggcctgg

SEQ ID NO: 20284 - DNA, 108 bp, Homo sapiens
  chr6:33907852-33907960
  hypo
aagcacggaggcatctcgtggctgtaccctagagagattgccaatgttactcaagactccagagctgccctggttcctgttgatcctgagacccgttgtctagcttct

SEQ ID NO: 20285 - DNA, 31 bp, Homo sapiens
  chr6:33962223-33962254
  hypo
ctcgtctttacatagacgaggaggctcgagg

SEQ ID NO: 20286 - DNA, 36 bp, Homo sapiens
  chr6:33985260-33985296
  hypo
ccgccaagcccgcgagcgccgcgcggagccatggtt

SEQ ID NO: 20287 - DNA, 306 bp, Homo sapiens
  chr6:33995831-33996137
  hypo
gcccacctgctgcaaaaggagcggggcctggggcccgagagggcagaacggggccaggcactcacctggggcctcaaggttctcgcagagctcagacttggcctctccgttgggccggaagttgcccttctgcgtgaacttgttggacatggtggccgccgtaacgacggctttgaggctgcgcttgcgcttgggcacgttctgctccgggtggaagaggatgatgtagactttgggcatgtagagcattcccagggacaccgaggcgctcagactcaccgagaccgtcagcgtcgtcgtctggat

SEQ ID NO: 20288 - DNA, 105 bp, Homo sapiens
  chr6:34100883-34100988
  hypo
atccttctcgatgagcgcctgcacaaaggtcagcgactgctcgagggcatgggtgtccctggagcaggtgtccagaatgcgggcgcccagcgtgatgttaggcag

SEQ ID NO: 20289 - DNA, 1811 bp, Homo sapiens; identical to SEQ ID NO: 4775
  chr6:34111789-34113600
  hypo

SEQ ID NO: 20290 - DNA, 31 bp, Homo sapiens
  chr6:34165021-34165052
  hypo
gagatctggactaaagcgggttctgccacta

SEQ ID NO: 20291 - DNA, 46 bp, Homo sapiens
  chr6:34170820-34170866
  hypo
tccgcagccacagtttgggtggctgtagccccgcccaagagggcgg

SEQ ID NO: 20292 - DNA, 31 bp, Homo sapiens
  chr6:34191861-34191892
  hypo
aggcgggggcggggcccgggctggcgcggcg

SEQ ID NO: 20293 - DNA, 30 bp, Homo sapiens
  chr6:34194629-34194659
  hypo
gacactgcccatggcgagctccactgctct

SEQ ID NO: 20294 - DNA, 121 bp, Homo sapiens
  chr6:34219815-34219936
  hypo
tgggattacaggcgtgagccaccgcgcctggctaacatcttttaactacttaaagaaaaaactctcgatctagaatattggggaaaaaaaatctgtcaaaaacaagaaataaagatgtttt

SEQ ID NO: 20295 - DNA, 30 bp, Homo sapiens
  chr6:34231486-34231516
  hypo
tccgagggaaagagcgtagattcaaatata

SEQ ID NO: 20296 - DNA, 132 bp, Homo sapiens; identical to SEQ ID NO: 4778
  chr6:34359604-34359736
  hypo

SEQ ID NO: 20297 - DNA, 30 bp, Homo sapiens
  chr6:34392090-34392120
  hypo
actcttgtttctttcgaggtggtaaatggc

SEQ ID NO: 20298 - DNA, 88 bp, Homo sapiens; identical to SEQ ID NO: 4779
  chr6:34405048-34405136
  hypo

SEQ ID NO: 20299 - DNA, 162 bp, Homo sapiens
  chr6:34512068-34512230
  hypo
aggccctgctcgggcgtggcgggtggactgggactccagtcccgtctctcgagacccactgcccccgctgccgccttctccaagcctgtccgcgacaccgtgtcggggggcagcaggaggtggctgggggatacgctgctcagacccgggctggcgctgccc

SEQ ID NO: 20300 - DNA, 194 bp, Homo sapiens
  chr6:34518767-34518961
  hypo
aaactgaataaactgctttgccgggccctcccagctggggcagccagcattattcccacttgacggacaagggcgctgtgacctgctacggggcacctgtccatgcgtgagtgagcagggactcgaactcaagactcggctccaccctcctttctgctggtgctggcagacccggcatcttctagctcctaagg

SEQ ID NO: 20301 - DNA, 101 bp, Homo sapiens
  chr6:34683316-34683417
  hypo
ggccaagctctataactttcatgtacacaaaagtacattccagttctcaactcctcatctaaaaagacagtttggagaccaggacacggtgactgctttcc

SEQ ID NO: 20302 - DNA, 27 bp, Homo sapiens
  chr6:34714766-34714793
  hypo
agtgctaagtgctttattattcgtttt

SEQ ID NO: 20303 - DNA, 17 bp, Homo sapiens
  chr6:34785644-34785661
  hypo
tgggggggtggagtctc

SEQ ID NO: 20304 - DNA, 44 bp, Homo sapiens
  chr6:35033861-35033905
  hypo
acccttcctccctgttcgtcgtctgtcacgcgggccttcatttg

SEQ ID NO: 20305 - DNA, 117 bp, Homo sapiens
  chr6:35109383-35109500
  hypo
gtgtgccgcaggggcgcaggggccgcgctctttcctcacatgtgggagaagcggaggagccgccagggctggggccaggctctgcccactggggttccgcccgttgtcgccctccgc

SEQ ID NO: 20306 - DNA, 31 bp, Homo sapiens
  chr6:35150040-35150071
  hypo
ggagaatcagggcccacgtggcgggcgaggg

SEQ ID NO: 20307 - DNA, 31 bp, Homo sapiens
  chr6:35260503-35260534
  hypo
ggcgagctggaggccacggaggagagcgagc

SEQ ID NO: 20308 - DNA, 27 bp, Homo sapiens
  chr6:35271478-35271505
  hypo
aataaggtgatcaggccgggcagggta

SEQ ID NO: 20309 - DNA, 64 bp, Homo sapiens
  chr6:35374507-35374571
  hypo
caaccacttacttacacctcccgaaactgagaacagttttaccggttctggtgaaaaaaaccca

SEQ ID NO: 20310 - DNA, 61 bp, Homo sapiens
  chr6:35375029-35375090
  hypo
acagcctggtgtgcattgccccgtgtccactgacacccacgccacatgggtccaaaaacag

SEQ ID NO: 20311 - DNA, 30 bp, Homo sapiens
  chr6:35454306-35454336
  hypo
cctggaagctctgctcgatgtccgggctcc

SEQ ID NO: 20312 - DNA, 30 bp, Homo sapiens
  chr6:35529548-35529578
  hypo
ttgttattgttttgtcgggggctgtgttat

SEQ ID NO: 20313 - DNA, 26 bp, Homo sapiens
  chr6:35568030-35568056
  hypo
atatttttactgaattcgctgagggt

SEQ ID NO: 20314 - DNA, 26 bp, Homo sapiens
  chr6:35568175-35568201
  hypo
cagagtgagaccgtctcaaaaaaaaa

SEQ ID NO: 20315 - DNA, 30 bp, Homo sapiens
  chr6:35704807-35704837
  hypo
cagagttctggttccggaaggccccccaca

SEQ ID NO: 20316 - DNA, 23 bp, Homo sapiens
  chr6:35994810-35994833
  hypo
aacagccttctggccggaacctg

SEQ ID NO: 20317 - DNA, 22 bp, Homo sapiens
  chr6:36072474-36072496
  hypo
ttcttgtcgtcattctgttctg

SEQ ID NO: 20318 - DNA, 131 bp, Homo sapiens
  chr6:36165691-36165822
  hypo
gtggggaaggagaagatggagcggctttcatgaaagtgggcgccgcaccgcctgtctgcgctgtttggggtcggtgtggaggcagatgttctcacctcttctagggcctcggtgcctttggaggggtgggt

SEQ ID NO: 20319 - DNA, 162 bp, Homo sapiens
  chr6:36178139-36178301
  hypo
gacacaattttccaccgagcagctgtccgcctgcgggacctgggaggggccatcctacggcacgcccggcggcaggcagagaacatcggctatgaccccgagaggggcactcacctgcccgagtcacccaaattggaagacttttaccgcttctcctgggaa

SEQ ID NO: 20320 - DNA, 30 bp, Homo sapiens
  chr6:36198458-36198488
  hypo
gccagatgtatggccggcagcttccccctc

SEQ ID NO: 20321 - DNA, 145 bp, Homo sapiens
  chr6:36214656-36214801
  hypo
tcttaaatatgtcttcttgaacgccatcgccccatcccagactcaggaccagcctccccgcgctcactgctgtcactgctttccgcactccctgcggattttaggattttagctcccatctcgcgtcctctctccagctcctcct

SEQ ID NO: 20322 - DNA, 30 bp, Homo sapiens
  chr6:36238395-36238425
  hypo
gcaggtgctgtgatcgccgccctggccatc

SEQ ID NO: 20323 - DNA, 30 bp, Homo sapiens
  chr6:36392401-36392431
  hypo
cgagactccgtctcaaaaaaacaaaaacaa

SEQ ID NO: 20324 - DNA, 39 bp, Homo sapiens
  chr6:36406488-36406527
  hypo
gcgcccggcaggattagcgcaacaccatgttttaatgca

SEQ ID NO: 20325 - DNA, 103 bp, Homo sapiens
  chr6:36599662-36599765
  hypo
tagagagcagagaaccctacacgatgtctgcaggacggggctgttcccgcctcacccctgtcttatcaaacccccttactgggctttccagctttccaaacac

SEQ ID NO: 20326 - DNA, 30 bp, Homo sapiens
  chr6:36629624-36629654
  hypo
acttatatgtaccacgccaaacgaaatcac

SEQ ID NO: 20327 - DNA, 153 bp, Homo sapiens
  chr6:36713124-36713277
  hypo
ggccttgtgagtgcctggaggcggtggcagcggcactcacctggccacgtgggtgaccacgggggcaaagttggtggggccgtacagctgcacagtgcgcaggctgcggtggtaggcctccaggatgccgtcgatgccacagcatgaggggtt

SEQ ID NO: 20328 - DNA, 30 bp, Homo sapiens
  chr6:36831621-36831651
  hypo
ttcctttggcttccacgactccacattctc

SEQ ID NO: 20329 - DNA, 18 bp, Homo sapiens
  chr6:37011430-37011448
  hypo
gcccggccccagactcac

SEQ ID NO: 20330 - DNA, 30 bp, Homo sapiens
  chr6:37012625-37012655
  hypo
cagatcaaaaatggcggcagttggtgtgtt

SEQ ID NO: 20331 - DNA, 213 bp, Homo sapiens
  chr6:37023831-37024044
  hypo
acatcttctgagctgcggggtggaggcctggctgcccacctgcattccttactctgcgtacccatgatctcatcccggccctcagccacccacagggcaggaggctttgccccattgtgcagatgagacagccatgccctgccctgggatggtcatttggcctgggctcagggcactctagtgggccccaggctccggcggggtgagtggaat

SEQ ID NO: 20332 - DNA, 213 bp, Homo sapiens
  chr6:37024436-37024649
  hypo
ccttattgaggagtttcctggcgacaggcagtgacctgtcggctgcctgtgtgggaagccgcttggcgtggccctccccatctcattagtggtgattcacctggactcacctggctgtcagggacctgtcccactgcccgctggaaccagctcagcaggcaccctctgaggggcagagacctcgttccctcagctccccgtcctccatggtgt

SEQ ID NO: 20333 - DNA, 51 bp, Homo sapiens
  chr6:37033765-37033816
  hypo
taataaggaacaaaacaagattgatggaacctgcagcggcagcccatctag

SEQ ID NO: 20334 - DNA, 41 bp, Homo sapiens
  chr6:37100544-37100585
  hypo
agaaaagtagacctgccgggcgcggtggctcacgcctgcga

SEQ ID NO: 20335 - DNA, 163 bp, Homo sapiens
  chr6:37275431-37275594
  hypo
ttatcagaaaatattacgcaaggtattcttatgagtccggttcaacaacaacaacaacaaggacccgaatcaggtaaaccagaggctttggaaaatagaaaggccatctgcagctgaggcgttggagcctcttggtccggccggtcaggttgaatcatgctgg

SEQ ID NO: 20336 - DNA, 31 bp, Homo sapiens
  chr6:37352724-37352755
  hypo
caaggtcaggatgaggcgggagtgtccacat

SEQ ID NO: 20337 - DNA, 361 bp, Homo sapiens
  chr6:37358448-37358809
  hypo
gaagcagggagtccacggaagggaaatacaggctcctcatttatttatttctcttctttttctccaaagcaaagagattgttctgaagaccgtgctctaagggcatttgaaagactgccaggtagtgcgagcctgagatggtctggaggattctctctagccgtgactccgctgctctgaaggtcaactgagaagtcttgtgggacagagacttgagttaggaagccctcagtcacttgccttccacggtggccagccctgctgccatcattggctgaagcaccaccaggattcacggcacccaactgcttcagggtacttcgtagactctgcctcactacatgtcgaaagagttatttga

SEQ ID NO: 20338 - DNA, 188 bp, Homo sapiens
  chr6:37450649-37450837
  hypo
ctcttcctgcccccaccgtccaccctccgctagtcagaccatgacatttactcagcagacgggaacagctttgtgttctttattgcctctcccttgggctaagggagggaccagcaccatgtccttctggagacccggaaccccccagcaggccagggaggcaaggcctgggccgccaggaagccatg

SEQ ID NO: 20339 - DNA, 169 bp, Homo sapiens
  chr6:37461264-37461433
  hypo
aggttttagtctcctgacccccgtcaagtggcgcagagccagatgtaggctgccgcgagaaatcacctgcccaatggcgacctgtcgctctcgcctggcagcaggtgaggctcatttaatggtcagcggcccctgaacagtcctctgcgtgctgcgagcctttctccca

SEQ ID NO: 20340 - DNA, 309 bp, Homo sapiens; identical to SEQ ID NO: 4796
  chr6:37665398-37665707
  hypo

SEQ ID NO: 20341 - DNA, 103 bp, Homo sapiens
  chr6:37721652-37721755
  hypo
gggagcgggcaggggcgcgtggggggcctggccaaggagcgggcagaggcacgtggggggcctggccagggagcgggcaggggggcacgcgggcctggccagg

SEQ ID NO: 20342 - DNA, 36 bp, Homo sapiens
  chr6:37776699-37776735
  hypo
gattacaggcgtgagccaccgcgcctggcaatgaat

SEQ ID NO: 20343 - DNA, 112 bp, Homo sapiens
  chr6:38084361-38084473
  hypo
aatgaggcttcaccagtaaaacggccacgactacttgagaatacggaacggtccgaggaaaccagtcgatctaaacagaagagtcgacgtcggtgcttccagtgccaaacca

SEQ ID NO: 20344 - DNA, 30 bp, Homo sapiens
  chr6:38087590-38087620
  hypo
agcaatttgtaaggcgagttctgagccttc

SEQ ID NO: 20345 - DNA, 186 bp, Homo sapiens
  chr6:38118859-38119045
  hypo
tgctccacatgcgtatcggccgctctagagattgcctgggaagctggagggaatgggagacaccccggtgcagctgcgccctgagttctctgagcctggctcctggctccctgcagccctcccctccttgttcctgacccagagtgactttacctgtaccggctccctgctcgataggcctcttga

SEQ ID NO: 20346 - DNA, 83 bp, Homo sapiens
  chr6:38122001-38122084
  hypo
tcccgaagaggctgtgcgagcccttcccggccctccccagggccccccgccccctcctctgcctgctgcgtggaggcagccat

SEQ ID NO: 20347 - DNA, 64 bp, Homo sapiens
  chr6:38134383-38134447
  hypo
gagccctccacctccccgccgccctcacagcagagccctccacctcccccgcactcccatagca

SEQ ID NO: 20348 - DNA, 187 bp, Homo sapiens
  chr6:38646371-38646558
  hypo
ctccctcactgctgtgtgcatcggcacctgccctctcgcttgttcagatgtccttaccagtaaacaagggcagtgcaggagccttgtgcttgtgagaaactgagaaaaactggtagggccgaatgatctccccagccctctctccacgcccagggctagggaataacactatcggaagtgtctccta

SEQ ID NO: 20349 - DNA, 30 bp, Homo sapiens
  chr6:38803940-38803970
  hypo
ggggcttgtttgagcggatgaccttgtttt

SEQ ID NO: 20350 - DNA, 31 bp, Homo sapiens
  chr6:39127058-39127089
  hypo
ctgctagctgagatctcggagagaaggagga

SEQ ID NO: 20351 - DNA, 110 bp, Homo sapiens
  chr6:39158699-39158809
  hypo
tcattcatcagctgttcgtaaggcacagagagctcagactcagtgctggtgaaggtggactcggaggaggaggggaactcgcccatgttcaggggcgccttggcttcagc

SEQ ID NO: 20352 - DNA, 31 bp, Homo sapiens
  chr6:39162095-39162126
  hypo
cgtgatctgcgccttccgctgatggggagca

SEQ ID NO: 20353 - DNA, 30 bp, Homo sapiens
  chr6:39895345-39895375
  hypo
gggattgtccctctcgttgagaaatcagct

SEQ ID NO: 20354 - DNA, 413 bp, Homo sapiens; identical to SEQ ID NO: 4801
  chr6:39901999-39902412
  hypo

SEQ ID NO: 20355 - DNA, 407 bp, Homo sapiens; identical to SEQ ID NO: 4802
  chr6:40554479-40554886
  hypo

SEQ ID NO: 20356 - DNA, 31 bp, Homo sapiens; identical to SEQ ID NO: 4803
  chr6:40763876-40763907
  hypo

SEQ ID NO: 20357 - DNA, 31 bp, Homo sapiens
  chr6:41001876-41001907
  hypo
caggatcaaagacacccgctcctggcggccc

SEQ ID NO: 20358 - DNA, 489 bp, Homo sapiens; identical to SEQ ID NO: 4806
  chr6:41339069-41339558
  hypo

SEQ ID NO: 20359 - DNA, 199 bp, Homo sapiens; identical to SEQ ID NO: 4807
  chr6:41339601-41339800
  hypo

SEQ ID NO: 20360 - DNA, 30 bp, Homo sapiens
  chr6:41454616-41454646
  hypo
aaggtaatcggggtcgacacatagtaaata

SEQ ID NO: 20361 - DNA, 30 bp, Homo sapiens
  chr6:41511678-41511708
  hypo
ttcaaccttcttaacgaagctcttgcacca

SEQ ID NO: 20362 - DNA, 30 bp, Homo sapiens
  chr6:41519620-41519650
  hypo
cagcaggagggacccggagaaggggtggct

SEQ ID NO: 20363 - DNA, 30 bp, Homo sapiens
  chr6:41524751-41524781
  hypo
ctccatttcaagcccggcaaaagcaaggat

SEQ ID NO: 20364 - DNA, 30 bp, Homo sapiens
  chr6:41529917-41529947
  hypo
ttcagaaagcacttcggagtgcctgtcatg

SEQ ID NO: 20365 - DNA, 31 bp, Homo sapiens
  chr6:41619005-41619036
  hypo
ataggtaatcgccatacgatgtgataagtgc

SEQ ID NO: 20366 - DNA, 52 bp, Homo sapiens
  chr6:41773946-41773998
  hypo
ccaggttgcgcaggcccgtgacgcctggggccatggccggctggcgacgcag

SEQ ID NO: 20367 - DNA, 30 bp, Homo sapiens
  chr6:41774245-41774275
  hypo
aaccacagccgcagcgtcctggccagcagg

SEQ ID NO: 20368 - DNA, 42 bp, Homo sapiens
  chr6:41774485-41774527
  hypo
cacaggtaacagaacacgtagagatcccggacttccatggct

SEQ ID NO: 20369 - DNA, 201 bp, Homo sapiens
  chr6:41827195-41827396
  hypo
ccttctatgtgctctccgagcacgtgtgtactttcccttattcagcatctaccatgctgtactgtaattgtctgtctgcttgactgtgtcccaactataacaaacctgaagaagacatcgtgccgagaacagagcaggaacctaataaattttgttgaattaaagaccgagtgaataaacaaataacgttctacttcagtg

SEQ ID NO: 20370 - DNA, 30 bp, Homo sapiens
  chr6:42047779-42047809
  hypo
tcaggtttgtagtaacgtgaaactctccta

SEQ ID NO: 20371 - DNA, 30 bp, Homo sapiens
  chr6:42071204-42071234
  hypo
gagcagaaactcagcgcccaggtccttaat

SEQ ID NO: 20372 - DNA, 192 bp, Homo sapiens
  chr6:42074110-42074302
  hypo
ctccttctcaggcaggcgggggcccttcttgccctccttgctctgaggggccactgttgggcctggcctgtgactgaggaatcggtcctctctcctggagccacagagataggctgccagctcgttccgcagcttttccatctggctggggtccctccagtccacaggtgctgaagacgctgtgttctctgg

SEQ ID NO: 20373 - DNA, 30 bp, Homo sapiens
  chr6:42207495-42207525
  hypo
ttttcatctccactcggcaaactatgctta

SEQ ID NO: 20374 - DNA, 38 bp, Homo sapiens
  chr6:42773434-42773472
  hypo
tgtgctaaagaggacaaggaacgggccaggtgcggtgg

SEQ ID NO: 20375 - DNA, 31 bp, Homo sapiens
  chr6:42777803-42777834
  hypo
cgtgagccactatgcccggccaaatttttaa

SEQ ID NO: 20376 - DNA, 23 bp, Homo sapiens
  chr6:42905051-42905074
  hypo
aggatgaggccaggtgcggtggc

SEQ ID NO: 20377 - DNA, 22 bp, Homo sapiens
  chr6:42942139-42942161
  hypo
ctgatataccaagaggcgccta

SEQ ID NO: 20378 - DNA, 36 bp, Homo sapiens
  chr6:42951450-42951486
  hypo
gggattacaggcgtgagacaccgtgcctgcctggtt

SEQ ID NO: 20379 - DNA, 30 bp, Homo sapiens
  chr6:42997019-42997049
  hypo
gacagatttggccacggctggtttccgttc

SEQ ID NO: 20380 - DNA, 20 bp, Homo sapiens
  chr6:43050197-43050217
  hypo
gccaccgtgccctgctgcaa

SEQ ID NO: 20381 - DNA, 30 bp, Homo sapiens
  chr6:43057812-43057842
  hypo
acagcaattttaggcgagtctctacttggg

SEQ ID NO: 20382 - DNA, 267 bp, Homo sapiens
  chr6:43096726-43096993
  hypo
ccattgtcttcatcaagcagccgtcctcccaggatgcactgcaggggcgccgggcgctgcttcgctgtgaggttgaggctccgggcccggtacatgtgtactggctgctcgatggggcccctgtccaggacacggagcggcgtttcgcccagggcagcagcctgagctttgcagctgtggaccggctgcaggactctggcaccttccagtgtgtggctcgggatgatgtcactggagaagaagcccgcagtgccaacgcctccttca

SEQ ID NO: 20383 - DNA, 31 bp, Homo sapiens
  chr6:43113235-43113266
  hypo
tcagtggttggagcaccgtgaaaaccttgtc

SEQ ID NO: 20384 - DNA, 92 bp, Homo sapiens
  chr6:43119821-43119913
  hypo
tgatccacccgcctcggcctcccaaagtgagccaccgctcaaagacgtgagccactgcgcccagcccacccgccctcttctttaaccttcct

SEQ ID NO: 20385 - DNA, 31 bp, Homo sapiens
  chr6:43249394-43249425
  hypo
ggaggcaggatatccccggggcttctggtct

SEQ ID NO: 20386 - DNA, 30 bp, Homo sapiens
  chr6:43325213-43325243
  hypo
ctgtgtcatcataacggggtcttttggcct

SEQ ID NO: 20387 - DNA, 29 bp, Homo sapiens
  chr6:43338304-43338333
  hypo
tcttcacacgttttcgagctgttttctga

SEQ ID NO: 20388 - DNA, 320 bp, Homo sapiens
  chr6:43456969-43457289
  hypo
agagttgtttctgccgttgatgggagagcttcttgctctgttgctcgtgttgcttgttctgagaggggagaatagtccctgttgctcctctggggctggttccctgggaagtgccacccctggccaggcggcagtgtgcagcccgtgctgttgactggcccagctgtaggccaggcacacactgccccattgtactgtgctttccgacgcagcccttgtcatagcctctaatccttgggctgcttctctcccagcccctcagagcctgtgggaggtggtgggatggactctgctggcactggtgcgggatgggttgcagc

SEQ ID NO: 20389 - DNA, 99 bp, Homo sapiens; identical to SEQ ID NO: 4831
  chr6:43596712-43596811
  hypo

SEQ ID NO: 20390 - DNA, 31 bp, Homo sapiens
  chr6:43608107-43608138
  hypo
tggagaagattggtttcgacccaagctcaac

SEQ ID NO: 20391 - DNA, 75 bp, Homo sapiens
  chr6:43639571-43639646
  hypo
cgcaccctgttccagcgggggccttttttgtagatgggcttgacggagccaggagcccagcgcgtcaggtacctg

SEQ ID NO: 20392 - DNA, 60 bp, Homo sapiens
  chr6:43745060-43745120
  hypo
cagtaggagggacttacgttagattttggaaggacttgcctgattcggaagctccaaaga

SEQ ID NO: 20393 - DNA, 49 bp, Homo sapiens
  chr6:43745319-43745368
  hypo
tgcccctgatgcgatgcgggggctgctgcaatgacgagggcctggagtg

SEQ ID NO: 20394 - DNA, 338 bp, Homo sapiens
  chr6:43748285-43748623
  hypo
agacacgcctgtgtgcgcccgcgcatgcctccccagagaccacctgcctcctgacacttcctccgggaagcggccctgtgtggctttgctttggtcgttcccccatccctgcccaccttaccacttcttttactccccccaccgcccccgctctctctctgtctctgtttttttattttccagaaaatcagttcgaggaaagggaaaggggcaaaaacgaaagcgcaagaaatcccggtataagtcctggagcgtgtacgttggtgcccgctgctgtctaatgccctggagcctccctggcccccagtacaacctccgcctgccattccctgtaaccc

SEQ ID NO: 20395 - DNA, 36 bp, Homo sapiens
  chr6:43755592-43755628
  hypo
tcccaatcactgaccacgtgccgacccctacattgg

SEQ ID NO: 20396 - DNA, 31 bp, Homo sapiens
  chr6:43890965-43890996
  hypo
cactcagacacacaaacgtcccacactgcac

SEQ ID NO: 20397 - DNA, 166 bp, Homo sapiens
  chr6:43893234-43893400
  hypo
gagccactgcgtccggcctgtgtatctattaagcacctcctgtatacccagcacctgcaaagccttgggacacacaacagcaacccttcagggaagatcccaagccaggtgcctgtcttttgcctccttggatcagtgacgaagaggtcagcgtcactccatttct

SEQ ID NO: 20398 - DNA, 26 bp, Homo sapiens
  chr6:44086401-44086427
  hypo
atctcatttaaacctcatggccgggc

SEQ ID NO: 20399 - DNA, 174 bp, Homo sapiens; identical to SEQ ID NO: 4833
  chr6:44095870-44096044
  hypo

SEQ ID NO: 20400 - DNA, 215 bp, Homo sapiens
  chr6:44120363-44120578
  hypo
acgcctggatgatgtgcgtcttcacggtggtcatgacctacagtatcacctgccccatcatcgtgcccttcggtaggcaccgccgcgccgggacctgggccctgctcggggggacccaggacttcaccctctccactctaggaatgcaggccaccccgagtggacagggcccggctgggagaccggcccctcggggctcccgcccggtccctggc

SEQ ID NO: 20401 - DNA, 37 bp, Homo sapiens
  chr6:44166168-44166205
  hypo
tgggattacaggcgtgagccaccgtgcctggcctatc

SEQ ID NO: 20402 - DNA, 261 bp, Homo sapiens
  chr6:44222599-44222860
  hypo
agaaggatggcaaaggcctggcggagggtcatgatgatggtgaagacggcagccccaaactgcccaatggtgtaaaagatgaagagctggccacatgcggagcagatggagagtagcagggcatgggcagcaaactcactgtgtcgccccatgaagcgggttccctccagtagggccccctgttctagcagtgagcccactgtgaagaggcaggagaagaaattgaccccaaacatcatctgcaccgatgacatcttatag

SEQ ID NO: 20403 - DNA, 238 bp, Homo sapiens
  chr6:44227779-44228017
  hypo
ttcctcagtcaggtcctggggcgtctcatcctccacattccgcagcagggagtcagcacccgccttgcacagagtggatgagatgcccatgagaccccggccagctgccaggtgcaggggtgtgcacccgttcagcatgcgggcatctacctgggcaccagcctggagcaggaactgtaccaggccccgctcttgggtttccacagccaggtgcagcgctgtcttaccactggtgccc

SEQ ID NO: 20404 - DNA, 30 bp, Homo sapiens
  chr6:44438427-44438457
  hypo
acctgccttggcctccgaaaatgaataacg

SEQ ID NO: 20405 - DNA, 30 bp, Homo sapiens
  chr6:44696124-44696154
  hypo
ctagccctgccctccggaaagaacagccag

SEQ ID NO: 20406 - DNA, 361 bp, Homo sapiens; identical to SEQ ID NO: 4840
  chr6:45391029-45391390
  hypo

SEQ ID NO: 20407 - DNA, 30 bp, Homo sapiens
  chr6:45608782-45608812
  hypo
actcactttgtcggcggagggtcaggactg

SEQ ID NO: 20408 - DNA, 357 bp, Homo sapiens; identical to SEQ ID NO: 4842
  chr6:46097264-46097621
  hypo

SEQ ID NO: 20409 - DNA, 403 bp, Homo sapiens; identical to SEQ ID NO: 4843
  chr6:46097694-46098097
  hypo

SEQ ID NO: 20410 - DNA, 61 bp, Homo sapiens; identical to SEQ ID NO: 4846
  chr6:46816791-46816852
  hypo

SEQ ID NO: 20411 - DNA, 32 bp, Homo sapiens
  chr6:46951821-46951853
  hypo
ttgctgtttttgctgttgttacggagtcttgc

SEQ ID NO: 20412 - DNA, 318 bp, Homo sapiens
  chr6:47202311-47202629
  hypo
cagctacaactggactgtggacggggagggacgaatcccaggggctctttggggggtttaagtgcgtgtgtgaggtctgctgcgatgcccgtacctttggtaataaaggaaccgttcctgctcagcgcggaggagccgctggatgtagagtcacagcggagaaggggctccgactcatccacgaagaagcccttgttcttgtcctgtggggaaggctccaccgtcaggagagcggaattctcaagtttcgcgttggggctggggatggggctcgggctaagcgggctggggctcatcgggagagctagtttgtcagtt

SEQ ID NO: 20413 - DNA, 30 bp, Homo sapiens; identical to SEQ ID NO: 4848
  chr6:47413210-47413240
  hypo

SEQ ID NO: 20414 - DNA, 30 bp, Homo sapiens; identical to SEQ ID NO: 4849
  chr6:47655314-47655344
  hypo

SEQ ID NO: 20415 - DNA, 99 bp, Homo sapiens
  chr6:49708446-49708545
  hypo
aattctgcaacaacagaaaaacgcttgctctagtgctatgtgtcagcaaagtagcatcgaagaactgtaagacccatcctgtgtggggctggatgcggt

SEQ ID NO: 20416 - DNA, 30 bp, Homo sapiens
  chr6:49755175-49755205
  hypo
tacctggcttcaggcgagacttgggtaggt

SEQ ID NO: 20417 - DNA, 31 bp, Homo sapiens
  chr6:52161689-52161720
  hypo
ttaaccacagaatgaacgattgctgggcttt

SEQ ID NO: 20418 - DNA, 40 bp, Homo sapiens; identical to SEQ ID NO: 4865
  chr6:52226739-52226779
  hypo

SEQ ID NO: 20419 - DNA, 1040 bp, Homo sapiens; identical to SEQ ID NO: 4866
  chr6:52227004-52228044
  hypo

SEQ ID NO: 20420 - DNA, 239 bp, Homo sapiens
  chr6:52267966-52268205
  hypo
accctgtcctgagggcgcggcacggagtgcatgcgggccgctgccatgacgaccgccatcttggagcgcctgagcaccctgtcggtcagcgggcagcagctgcgccgcctgcccaagatcctggaggatgggcttcccaagatgccttgcactgtcccagaaacggatgtgccccagctcttccgggagccttacatccgcaccggctaccgccccacggggcacgagtggcgctacta

SEQ ID NO: 20421 - DNA, 297 bp, Homo sapiens
  chr6:52344288-52344585
  hypo
tgcatattagtatgtcgtttaaagaaagctcattagtttctgtcataaatgcatacctgtgaatttatcattggagggttaatactattttactcctgattgcgtgagagaacatcaccaagctaagtgtgttgctaccttctctccagtgtttggtcaccggttcatcatccttgatacagacgagtatgttttgaaatacatggagagcaacgctgcccagtattcaccagaagcactcgcgtcaattcagaaccatgtccgaaagcgagaagcgcctgctccagaagcagaaag

SEQ ID NO: 20422 - DNA, 25 bp, Homo sapiens
  chr6:52393651-52393676
  hypo
ctgctcacactgccttacaaacgtg

SEQ ID NO: 20423 - DNA, 24 bp, Homo sapiens
  chr6:52393975-52393999
  hypo
accgtgcccagccacaaatgtgta

SEQ ID NO: 20424 - DNA, 33 bp, Homo sapiens
  chr6:53052126-53052159
  hypo
attcctcccaagtttacttgtcgcaggtagaaa

SEQ ID NO: 20425 - DNA, 207 bp, Homo sapiens
  chr6:53111000-53111207
  hypo
aggacaacactagttacgagctggaagcacgtgaatcctttaagagcccgagcaaagggcaaaggtttagtatgggattgttggagtttctttctattatatattgtaccttcaccaatagaactaaaagtctaaaatcacactatttaaaaaccgagaatgtatcagcattaaccagattgatcctacaggcgctgcttgactttc

SEQ ID NO: 20426 - DNA, 1865 bp, Homo sapiens; identical to SEQ ID NO: 4871
  chr6:53212357-53214222
  hypo

SEQ ID NO: 20427 - DNA, 95 bp, Homo sapiens
  chr6:53385617-53385712
  hypo
aatatagaagtagcctccttccggcgttttcgcatgttggcctcaactgtattgaactcggacattgttcctccgtagggctgtcctggtgtccc

SEQ ID NO: 20428 - DNA, 406 bp, Homo sapiens; identical to SEQ ID NO: 4873
  chr6:53409552-53409958
  hypo

SEQ ID NO: 20429 - DNA, 30 bp, Homo sapiens; identical to SEQ ID NO: 4875
  chr6:54835453-54835483
  hypo

SEQ ID NO: 20430 - DNA, 20 bp, Homo sapiens
  chr6:55445498-55445518
  hypo
caccgcgcccagccggatgt

SEQ ID NO: 20431 - DNA, 1330 bp, Homo sapiens; identical to SEQ ID NO: 4880
  chr6:56818656-56819986
  hypo

SEQ ID NO: 20432 - DNA, 148 bp, Homo sapiens
  chr6:56894235-56894383
  hypo
tctgatcccgcccttcggtggaaaagttcagtctgaacgtttagcgagtgctgcctctaaagagagcaatcactacacttacggctgagactttgcgcttagtagttcagaggcccccaggcagactacagaccgtgacaaaaggtgt

SEQ ID NO: 20433 - DNA, 26 bp, Homo sapiens
  chr6:56972904-56972930
  hypo
gggattacaggcgtgagccacagtgc

SEQ ID NO: 20434 - DNA, 30 bp, Homo sapiens
  chr6:57042599-57042629
  hypo
agtagccacagtttgcgcaaaattgctgtt

SEQ ID NO: 20435 - DNA, 109 bp, Homo sapiens
  chr6:57096922-57097031
  hypo
aatgcaagacaaaacaagttccgcaaaacaaaacaagcgttccgttgttgtattaatgatggttatagacatcgagtttcagagccacgttgatgagtccagattctgg

SEQ ID NO: 20436 - DNA, 30 bp, Homo sapiens; identical to SEQ ID NO: 4886
  chr6:57943180-57943210
  hypo

SEQ ID NO: 20437 - DNA, 366 bp, Homo sapiens; identical to SEQ ID NO: 4888
  chr6:62995508-62995874
  hypo

SEQ ID NO: 20438 - DNA, 453 bp, Homo sapiens; identical to SEQ ID NO: 4889
  chr6:62996077-62996530
  hypo

SEQ ID NO: 20439 - DNA, 31 bp, Homo sapiens; identical to SEQ ID NO: 4890
  chr6:64283109-64283140
  hypo

SEQ ID NO: 20440 - DNA, 30 bp, Homo sapiens
  chr6:64289954-64289984
  hypo
ctcccagaaagcggcgtggagcttttaaca

SEQ ID NO: 20441 - DNA, 10 bp, Homo sapiens
  chr6:64354837-64354847
  hypo
tggagtgcag

SEQ ID NO: 20442 - DNA, 31 bp, Homo sapiens
  chr6:65212134-65212165
  hypo
gttttgttttgttttttttgccggagtctcc

SEQ ID NO: 20443 - DNA, 31 bp, Homo sapiens
  chr6:65212404-65212435
  hypo
gcgctcggccggaggctggtgtttttttaag

SEQ ID NO: 20444 - DNA, 831 bp, Homo sapiens; identical to SEQ ID NO: 4891
  chr6:69344503-69345334
  hypo

SEQ ID NO: 20445 - DNA, 30 bp, Homo sapiens; identical to SEQ ID NO: 4894
  chr6:69454973-69455003
  hypo

SEQ ID NO: 20446 - DNA, 30 bp, Homo sapiens
  chr6:70507772-70507802
  hypo
cactggtgcccagccgggataactggttgg

SEQ ID NO: 20447 - DNA, 21 bp, Homo sapiens
  chr6:71121844-71121865
  hypo
gtacaagccaggcacggtgtc

SEQ ID NO: 20448 - DNA, 12 bp, Homo sapiens
  chr6:71122104-71122116
  hypo
ctgggcgacgga

SEQ ID NO: 20449 - DNA, 87 bp, Homo sapiens; identical to SEQ ID NO: 4900
  chr6:71123137-71123224
  hypo

SEQ ID NO: 20450 - DNA, 61 bp, Homo sapiens; identical to SEQ ID NO: 4901
  chr6:71123642-71123703
  hypo

SEQ ID NO: 20451 - DNA, 154 bp, Homo sapiens; identical to SEQ ID NO: 4902
  chr6:71123746-71123900
  hypo

SEQ ID NO: 20452 - DNA, 20 bp, Homo sapiens
  chr6:71246929-71246949
  hypo
cctggccttgatttgccttt

SEQ ID NO: 20453 - DNA, 872 bp, Homo sapiens; identical to SEQ ID NO: 4903
  chr6:71665582-71666454
  hypo

SEQ ID NO: 20454 - DNA, 30 bp, Homo sapiens
  chr6:71874696-71874726
  hypo
tgggactcgccgctcgcacgcccttgggca

SEQ ID NO: 20455 - DNA, 256 bp, Homo sapiens; identical to SEQ ID NO: 4904
  chr6:72129593-72129849
  hypo

SEQ ID NO: 20456 - DNA, 118 bp, Homo sapiens; identical to SEQ ID NO: 4905
  chr6:72129926-72130044
  hypo

SEQ ID NO: 20457 - DNA, 308 bp, Homo sapiens; identical to SEQ ID NO: 4906
  chr6:72130190-72130498
  hypo

SEQ ID NO: 20458 - DNA, 230 bp, Homo sapiens
  chr6:72806768-72806998
  hypo
aacaaagtttgctgatgggtgcggtcatctctgctcctattgtcgcactaagttctgtgcgcgctgcggaggccgcgtgtctctacggtcaaacaacgtgagtattccatgaacataaggggcgttgtgaatgtggataaaaactattacgccttccaaacatgagaacacgtgcatcttagaaagcagacatgtgcataaacatacacgttaaaatgaacctccctcat

SEQ ID NO: 20459 - DNA, 1016 bp, Homo sapiens; identical to SEQ ID NO: 4911
  chr6:73330834-73331850
  hypo

SEQ ID NO: 20460 - DNA, 1236 bp, Homo sapiens; identical to SEQ ID NO: 4912
  chr6:73331875-73333111
  hypo

SEQ ID NO: 20461 - DNA, 150 bp, Homo sapiens; identical to SEQ ID NO: 4913
  chr6:73972993-73973143
  hypo

SEQ ID NO: 20462 - DNA, 797 bp, Homo sapiens; identical to SEQ ID NO: 4914
  chr6:74019413-74020210
  hypo

SEQ ID NO: 20463 - DNA, 58 bp, Homo sapiens
  chr6:74025142-74025200
  hypo
tggctccttcacaattcgccagagctgctaggaggagcggggacgtgggaacagatag

SEQ ID NO: 20464 - DNA, 164 bp, Homo sapiens; identical to SEQ ID NO: 4915
  chr6:74161334-74161498
  hypo

SEQ ID NO: 20465 - DNA, 113 bp, Homo sapiens; identical to SEQ ID NO: 4916
  chr6:74161684-74161797
  hypo

SEQ ID NO: 20466 - DNA, 145 bp, Homo sapiens; identical to SEQ ID NO: 4917
  chr6:74161830-74161975
  hypo

SEQ ID NO: 20467 - DNA, 87 bp, Homo sapiens; identical to SEQ ID NO: 4925
  chr6:76458863-76458950
  hypo

SEQ ID NO: 20468 - DNA, 4 bp, Homo sapiens
  chr6:80235970-80235974
  hypo
aatt

SEQ ID NO: 20469 - DNA, 990 bp, Homo sapiens; identical to SEQ ID NO: 4938
  chr6:80656579-80657569
  hypo

SEQ ID NO: 20470 - DNA, 30 bp, Homo sapiens; identical to SEQ ID NO: 4939
  chr6:81814308-81814338
  hypo

SEQ ID NO: 20471 - DNA, 30 bp, Homo sapiens; identical to SEQ ID NO: 4944
  chr6:82968453-82968483
  hypo

SEQ ID NO: 20472 - DNA, 145 bp, Homo sapiens; identical to SEQ ID NO: 4948
  chr6:84417918-84418063
  hypo

SEQ ID NO: 20473 - DNA, 528 bp, Homo sapiens; identical to SEQ ID NO: 4949
  chr6:84418260-84418788
  hypo

SEQ ID NO: 20474 - DNA, 86 bp, Homo sapiens
  chr6:84513478-84513564
  hypo
gctcctcctcctaagctgtaactctattcatttcttatatacgtggctggttctgggtcccttgcggtaaaatgatgtatctggtt

SEQ ID NO: 20475 - DNA, 30 bp, Homo sapiens
  chr6:84621443-84621473
  hypo
cttttacagccacacgcaatcttaaaaaga

SEQ ID NO: 20476 - DNA, 38 bp, Homo sapiens
  chr6:86302412-86302450
  hypo
attatagggatgtggccgggtgcggtggctcacgcctg

SEQ ID NO: 20477 - DNA, 78 bp, Homo sapiens
  chr6:86325373-86325451
  hypo
actttagggctgggagcggtcatgcctgtaatcccagctatgcgggaggctgagtgaagcaggtgaatcgcttgaacc

SEQ ID NO: 20478 - DNA, 18 bp, Homo sapiens
  chr6:86325510-86325528
  hypo
gagcgagactctgactca

SEQ ID NO: 20479 - DNA, 121 bp, Homo sapiens
  chr6:87890685-87890806
  hypo
cctagggcgagcatgcagacaggtaggtgcagagaccaggaggaagctttgggctcttggccccatggtaatgtctaggggtgagtgcctgcaaccccactgttacaaagctctttctttc

SEQ ID NO: 20480 - DNA, 32 bp, Homo sapiens
  chr6:88039270-88039302
  hypo
agtgctgggattgcaggcgtgagccaccctgc

SEQ ID NO: 20481 - DNA, 35 bp, Homo sapiens
  chr6:88280032-88280067
  hypo
ttttctaaaagctcctcgcacgactgttaatacat

SEQ ID NO: 20482 - DNA, 41 bp, Homo sapiens; identical to SEQ ID NO: 4973
  chr6:88875526-88875567
  hypo

SEQ ID NO: 20483 - DNA, 616 bp, Homo sapiens; identical to SEQ ID NO: 4974
  chr6:88875621-88876237
  hypo

SEQ ID NO: 20484 - DNA, 192 bp, Homo sapiens; identical to SEQ ID NO: 4975
  chr6:88876284-88876476
  hypo

SEQ ID NO: 20485 - DNA, 791 bp, Homo sapiens; identical to SEQ ID NO: 4976
  chr6:88876630-88877421
  hypo

SEQ ID NO: 20486 - DNA, 121 bp, Homo sapiens
  chr6:89376381-89376502
  hypo
cctccgggacaaaccttggatgtctgtagactgggagctgtatgtggacggaagcagcttcattaacccacagagagagatgtccgctggatatgcagtggtaaaccttggacactgttat

SEQ ID NO: 20487 - DNA, 30 bp, Homo sapiens; identical to SEQ ID NO: 4977
  chr6:89827897-89827927
  hypo

SEQ ID NO: 20488 - DNA, 36 bp, Homo sapiens
  chr6:89857376-89857412
  hypo
gatcagttgaggtctggagttcgagacccgcctggc

SEQ ID NO: 20489 - DNA, 121 bp, Homo sapiens
  chr6:89857591-89857712
  hypo
acagagcgaggcctcctcttaaaaaaaaaaagagcggcggcttcatgtcagagtttgagcactgtagaaccgccaaaaaaaagctaaactttgagaaatgtacactctttttttttttttt

SEQ ID NO: 20490 - DNA, 64 bp, Homo sapiens
  chr6:90052740-90052804
  hypo
gaagactgagagaggccgagatgtttatacaaaaagccttgagtagctacggagacccatcaaa

SEQ ID NO: 20491 - DNA, 796 bp, Homo sapiens; identical to SEQ ID NO: 4980
  chr6:90120944-90121740
  hypo

SEQ ID NO: 20492 - DNA, 1085 bp, Homo sapiens; identical to SEQ ID NO: 4983
  chr6:90142634-90143719
  hypo

SEQ ID NO: 20493 - DNA, 30 bp, Homo sapiens
  chr6:90367403-90367433
  hypo
atacagccgatattccggggtttgtcctgg

SEQ ID NO: 20494 - DNA, 91 bp, Homo sapiens
  chr6:90367695-90367786
  hypo
gacgaaattgctgaatgaggcatttttcagaatgtatccctgtctttaaaaaataactgttcagtcacgcgttgcttaaagaatgagatgt

SEQ ID NO: 20495 - DNA, 418 bp, Homo sapiens; identical to SEQ ID NO: 4984
  chr6:91004760-91005178
  hypo

SEQ ID NO: 20496 - DNA, 422 bp, Homo sapiens; identical to SEQ ID NO: 4985
  chr6:91005208-91005630
  hypo

SEQ ID NO: 20497 - DNA, 775 bp, Homo sapiens; identical to SEQ ID NO: 4986
  chr6:91005660-91006435
  hypo

SEQ ID NO: 20498 - DNA, 41 bp, Homo sapiens; identical to SEQ ID NO: 4987
  chr6:91321110-91321151
  hypo

SEQ ID NO: 20499 - DNA, 30 bp, Homo sapiens; identical to SEQ ID NO: 4993
  chr6:94807929-94807959
  hypo

SEQ ID NO: 20500 - DNA, 26 bp, Homo sapiens
  chr6:96026947-96026973
  hypo
gttaaaaaaaattctgcggcctggcg

SEQ ID NO: 20501 - DNA, 95 bp, Homo sapiens
  chr6:96085018-96085113
  hypo
ggtcaggctctgaggactacccgcctcttctccatgtttaccctgcagcatacagcgggggagagcggtgatgcggtaccagggttcagagtggc

SEQ ID NO: 20502 - DNA, 30 bp, Homo sapiens; identical to SEQ ID NO: 4998
  chr6:98405135-98405165
  hypo

SEQ ID NO: 20503 - DNA, 10 bp, Homo sapiens
  chr6:99396472-99396482
  hypo
ggagtctcgc

SEQ ID NO: 20504 - DNA, 67 bp, Homo sapiens; identical to SEQ ID NO: 5019
  chr6:99962858-99962925
  hypo

SEQ ID NO: 20505 - DNA, 136 bp, Homo sapiens; identical to SEQ ID NO: 5023
  chr6:100061560-100061696
  hypo

SEQ ID NO: 20506 - DNA, 725 bp, Homo sapiens; identical to SEQ ID NO: 5024
  chr6:100061988-100062713
  hypo

SEQ ID NO: 20507 - DNA, 31 bp, Homo sapiens
  chr6:100841437-100841468
  hypo
tcaggggcaaggctgcgcgagagccccacca

SEQ ID NO: 20508 - DNA, 30 bp, Homo sapiens; identical to SEQ ID NO: 5030
  chr6:100933169-100933199
  hypo

SEQ ID NO: 20509 - DNA, 30 bp, Homo sapiens; identical to SEQ ID NO: 5033
  chr6:101841503-101841533
  hypo

SEQ ID NO: 20510 - DNA, 128 bp, Homo sapiens; identical to SEQ ID NO: 5037
  chr6:105584191-105584319
  hypo

SEQ ID NO: 20511 - DNA, 1152 bp, Homo sapiens; identical to SEQ ID NO: 5038
  chr6:105584366-105585518
  hypo

SEQ ID NO: 20512 - DNA, 728 bp, Homo sapiens; identical to SEQ ID NO: 5039
  chr6:105627362-105628090
  hypo

SEQ ID NO: 20513 - DNA, 405 bp, Homo sapiens
  chr6:105750345-105750750
  hypo
cttctgcagcgggtacggccgctccttccgcggctgctgcttggtcttcaggttctcctcgtgcttgctgggccagtggcgcaggcgcatgttttctcaggccgcaggtccaggggcttgtacctcttgcccttgtagaatttcctgaggttttctttgtgtgagtctggttaattacggtgagaacacgggcaatggaattgtggatgacacggatcttagagagcttggagaccgcgccgcctgtcagtggcgatgcgcagctgggacagctccaccttcaggtcgtccagctgtttgagcagcaactctttctccttcccgtgaaggtcccgagacttgatcttagccattgctgcacaggccgcccccgccgcctgctccgagggctaaatactctctttt

SEQ ID NO: 20514 - DNA, 445 bp, Homo sapiens; identical to SEQ ID NO: 5042
  chr6:106534039-106534484
  hypo

SEQ ID NO: 20515 - DNA, 30 bp, Homo sapiens
  chr6:106553142-106553172
  hypo
caccgggactcctacgcttacttgaacgcg

SEQ ID NO: 20516 - DNA, 21 bp, Homo sapiens
  chr6:106731576-106731597
  hypo
cgcgcccgactagttcttagg

SEQ ID NO: 20517 - DNA, 1660 bp, Homo sapiens; identical to SEQ ID NO: 5045
  chr6:106959519-106961179
  hypo

SEQ ID NO: 20518 - DNA, 35 bp, Homo sapiens
  chr6:107010363-107010398
  hypo
tatactttaattttttttagacggggtcttgctct

SEQ ID NO: 20519 - DNA, 31 bp, Homo sapiens
  chr6:107132181-107132212
  hypo
tggatgactatgctccgcgggagagtccaga

SEQ ID NO: 20520 - DNA, 121 bp, Homo sapiens
  chr6:107562425-107562546
  hypo
ctgggcaacagagcgagactcggtaaaaaaaaaaaaaaaaaaaagtattagtaatataagtcatgtacattttcacagctttaaggagaattaggtaattgctctacaaacctcttcttct

SEQ ID NO: 20521 - DNA, 21 bp, Homo sapiens
  chr6:107562845-107562866
  hypo
ggctgctctacaaacttcttt

SEQ ID NO: 20522 - DNA, 31 bp, Homo sapiens
  chr6:107777106-107777137
  hypo
gcacatccaacaattacgctcttgtttttat

SEQ ID NO: 20523 - DNA, 318 bp, Homo sapiens; identical to SEQ ID NO: 5047
  chr6:107810191-107810509
  hypo

SEQ ID NO: 20524 - DNA, 17 bp, Homo sapiens
  chr6:108555477-108555494
  hypo
tgggtgcagtggctcac

SEQ ID NO: 20525 - DNA, 174 bp, Homo sapiens; identical to SEQ ID NO: 5064
  chr6:108882163-108882337
  hypo

SEQ ID NO: 20526 - DNA, 45 bp, Homo sapiens
  chr6:108984286-108984331
  hypo
gaggagttggccagcacggtggctcatgcctataatcctagcact

SEQ ID NO: 20527 - DNA, 31 bp, Homo sapiens
  chr6:108990718-108990749
  hypo
ctatgactatagtcttcggttatagtatgct

SEQ ID NO: 20528 - DNA, 30 bp, Homo sapiens
  chr6:109029003-109029033
  hypo
tggtttaaaaagtccgcaggtggcttctcc

SEQ ID NO: 20529 - DNA, 30 bp, Homo sapiens
  chr6:109053432-109053462
  hypo
tctgcagcttcgtccggtttccagtcaagc

SEQ ID NO: 20530 - DNA, 43 bp, Homo sapiens
  chr6:109057730-109057773
  hypo
tattcctgttaggaatattctcggcccggtgccgtggctcacg

SEQ ID NO: 20531 - DNA, 77 bp, Homo sapiens
  chr6:109058721-109058798
  hypo
tagtttataatcagttgtggtcgggccaagaaaattattgatattgggccgggcgcggtggctcacacctgtaatcc

SEQ ID NO: 20532 - DNA, 121 bp, Homo sapiens
  chr6:109059980-109060101
  hypo
agcgcgcagggaaggatggccgccccaccctaatcttataaggcaaatcaactttccccttagctggtgccatcttctctgctccttactgtacaggtggctggcaaagaagggacgatgg

SEQ ID NO: 20533 - DNA, 19 bp, Homo sapiens
  chr6:109643059-109643078
  hypo
gggcgtggtggctcacgcc

SEQ ID NO: 20534 - DNA, 430 bp, Homo sapiens; identical to SEQ ID NO: 5067
  chr6:109777176-109777606
  hypo

SEQ ID NO: 20535 - DNA, 144 bp, Homo sapiens
  chr6:109798004-109798148
  hypo
tggtcagagccttgctgcacacggtgcaggtgtacggccgctcgcctgtgtgcatcctggtgtggacctgtagcgagtgcttctgggcaaagccttttccacactcattacatttgaaaggtcgctcccctggaagaagagccc

SEQ ID NO: 20536 - DNA, 30 bp, Homo sapiens
  chr6:110104618-110104648
  hypo
tagagacgctctagcgcctccttctgtctt

SEQ ID NO: 20537 - DNA, 136 bp, Homo sapiens
  chr6:110768070-110768206
  hypo
ctcaccatggcaagaaaaaagcgagcagccatgaaggtgtaataatcaactgcaaacgccgctgctattccaaacaaaaacatgctactgcttgtggcccacaagaccacccggcgtcctagcctgaaaaataaga

SEQ ID NO: 20538 - DNA, 49 bp, Homo sapiens
  chr6:110843340-110843389
  hypo
aggcttttgtccacatcggtgaactccactttgccgattcctgtagtgc

SEQ ID NO: 20539 - DNA, 172 bp, Homo sapiens
  chr6:110872247-110872419
  hypo
cgccactgccctctcccggtccagtgcaagcttggacctggaccctgaatgagggaggtctatttctgggacactcctccactctcgctttccgctttgggaaatagttcctctagtgcgctgggctgagaggtaggacagagaaagggcagagggtcgtaaactaacaggg

SEQ ID NO: 20540 - DNA, 46 bp, Homo sapiens
  chr6:111085014-111085060
  hypo
aaactttgttcacagacgacgtaattgtctacgaagaaaatcccaa

SEQ ID NO: 20541 - DNA, 20 bp, Homo sapiens
  chr6:111190619-111190639
  hypo
ccaccgcgcccagcccatta

SEQ ID NO: 20542 - DNA, 31 bp, Homo sapiens
  chr6:111204757-111204788
  hypo
cagatgtctaaaacaacgagagaagggaatc

SEQ ID NO: 20543 - DNA, 555 bp, Homo sapiens; identical to SEQ ID NO: 5073
  chr6:111409007-111409562
  hypo

SEQ ID NO: 20544 - DNA, 196 bp, Homo sapiens
  chr6:111673960-111674156
  hypo
agaaaaatgtgctcctcgtggtcagagcttcactggcaaaactgaaccgaccacctgcgtccaatccagaaggagcctctttgtggctcctcttagaacctccatgttgtgaccaccatagagaaatgtttagctataaatatgaaaatttatttcgagtggaaaattgtgtgggagagagcggaactaattatag

SEQ ID NO: 20545 - DNA, 30 bp, Homo sapiens
  chr6:111751968-111751998
  hypo
caggagcagcttgaccgcatcgtgaaggaa

SEQ ID NO: 20546 - DNA, 30 bp, Homo sapiens
  chr6:111766138-111766168
  hypo
tatagtggccaaagcgaaggagatttatgg

SEQ ID NO: 20547 - DNA, 30 bp, Homo sapiens
  chr6:111846875-111846905
  hypo
atatttagccaggcgcggtggctcacgcct

SEQ ID NO: 20548 - DNA, 30 bp, Homo sapiens
  chr6:111872400-111872430
  hypo
caggctgctgcttgacgcgcagccctcagc

SEQ ID NO: 20549 - DNA, 30 bp, Homo sapiens
  chr6:111886828-111886858
  hypo
gcgtctctataatcacggggagaaggagga

SEQ ID NO: 20550 - DNA, 31 bp, Homo sapiens; identical to SEQ ID NO: 5077
  chr6:114180217-114180248
  hypo

SEQ ID NO: 20551 - DNA, 276 bp, Homo sapiens; identical to SEQ ID NO: 5086
  chr6:117591683-117591959
  hypo

SEQ ID NO: 20552 - DNA, 140 bp, Homo sapiens; identical to SEQ ID NO: 5087
  chr6:117803623-117803763
  hypo

SEQ ID NO: 20553 - DNA, 235 bp, Homo sapiens; identical to SEQ ID NO: 5088
  chr6:117804008-117804243
  hypo

SEQ ID NO: 20554 - DNA, 998 bp, Homo sapiens; identical to SEQ ID NO: 5090
  chr6:118228323-118229321
  hypo

SEQ ID NO: 20555 - DNA, 30 bp, Homo sapiens; identical to SEQ ID NO: 5093
  chr6:118971609-118971639
  hypo

SEQ ID NO: 20556 - DNA, 30 bp, Homo sapiens
  chr6:118983677-118983707
  hypo
agggaaaccgcatctcaaaagaaaaaaaaa

SEQ ID NO: 20557 - DNA, 29 bp, Homo sapiens
  chr6:119023870-119023899
  hypo
tggagttggccaggcacggcggctcacgc

SEQ ID NO: 20558 - DNA, 27 bp, Homo sapiens
  chr6:119254364-119254391
  hypo
taagaaacacttatttggggccgggcg

SEQ ID NO: 20559 - DNA, 33 bp, Homo sapiens
  chr6:119254690-119254723
  hypo
aacacttatttcgtttggaaagagattgaggac

SEQ ID NO: 20560 - DNA, 30 bp, Homo sapiens; identical to SEQ ID NO: 5096
  chr6:121506912-121506942
  hypo

SEQ ID NO: 20561 - DNA, 68 bp, Homo sapiens; identical to SEQ ID NO: 5100
  chr6:123110666-123110734
  hypo

SEQ ID NO: 20562 - DNA, 30 bp, Homo sapiens; identical to SEQ ID NO: 5103
  chr6:123366433-123366463
  hypo

SEQ ID NO: 20563 - DNA, 1119 bp, Homo sapiens; identical to SEQ ID NO: 5104
  chr6:124124162-124125281
  hypo

SEQ ID NO: 20564 - DNA, 774 bp, Homo sapiens; identical to SEQ ID NO: 5105
  chr6:125283600-125284374
  hypo

SEQ ID NO: 20565 - DNA, 152 bp, Homo sapiens
  chr6:126242091-126242243
  hypo
atcactgttgaagaggcaaagcgcaggaagagcacatgcagctactatgaagacgaggacgaagaggtgctgcctgtcctacggccccacagcgcgctcctggagaatatgcacatcgagcaggtgggctcgccctggccaccaagggtggg

SEQ ID NO: 20566 - DNA, 151 bp, Homo sapiens
  chr6:126426569-126426720
  hypo
tggcagtcagaagggacgtgggttgatcacgcaggaggtagctcaacatggtgcactggggaagaaccaagtacctggaagccagatgatgcggggtagaggcacagctcccccagttgttcggagacggaggcctcggtttcctcagagc

SEQ ID NO: 20567 - DNA, 1124 bp, Homo sapiens; identical to SEQ ID NO: 5108
  chr6:127439838-127440962
  hypo

SEQ ID NO: 20568 - DNA, 689 bp, Homo sapiens; identical to SEQ ID NO: 5109
  chr6:127441030-127441719
  hypo

SEQ ID NO: 20569 - DNA, 31 bp, Homo sapiens
  chr6:127536396-127536427
  hypo
agtactacttcccagccgttttctcaagcca

SEQ ID NO: 20570 - DNA, 30 bp, Homo sapiens
  chr6:127665866-127665896
  hypo
atagttttacgatacggagatgtgtatgat

SEQ ID NO: 20571 - DNA, 1040 bp, Homo sapiens; identical to SEQ ID NO: 5111
  chr6:127836709-127837749
  hypo

SEQ ID NO: 20572 - DNA, 436 bp, Homo sapiens
  chr6:128901509-128901945
  hypo
gatggaggacttggccaccagcgagggattcttggccttcttggcgtacagccgcagccgctcctcccgcagccgccttgcctccttgtcttcctccttattgtcgctgccaacagatcaatgtcatcgtcctcgttatcctctgcttcttggccggggtcgtagtaaggggggcgaggggaggggcgctccacttggcgcatgggagacacgtgctgtgtctgcgggactgtggaccatggccaggcgagctcttctctcttctccggcatgttcagccaggcctccaggttggagaccgcctgctgcagctcctgcaccacgccgcgcaggctctggttctccacttccaggctggcgatctggaggacgagctcgctgtggtcttccctggggccgagctctggcgggaggcgctggccacaggcccattcat

SEQ ID NO: 20573 - DNA, 30 bp, Homo sapiens
  chr6:130015070-130015100
  hypo
cagtcgacgtcaaggcggcacaaaattatt

SEQ ID NO: 20574 - DNA, 31 bp, Homo sapiens; identical to SEQ ID NO: 5118
  chr6:130342613-130342644
  hypo

SEQ ID NO: 20575 - DNA, 31 bp, Homo sapiens
  chr6:130454500-130454531
  hypo
ctcccacctccagtctcgttatctgggagat

SEQ ID NO: 20576 - DNA, 821 bp, Homo sapiens; identical to SEQ ID NO: 5119
  chr6:130686371-130687192
  hypo

SEQ ID NO: 20577 - DNA, 513 bp, Homo sapiens; identical to SEQ ID NO: 5120
  chr6:130687224-130687737
  hypo

SEQ ID NO: 20578 - DNA, 86 bp, Homo sapiens; identical to SEQ ID NO: 5121
  chr6:131383361-131383447
  hypo

SEQ ID NO: 20579 - DNA, 30 bp, Homo sapiens
  chr6:131455391-131455421
  hypo
gtgagccactgggcccggcctggtaaagct

SEQ ID NO: 20580 - DNA, 65 bp, Homo sapiens
  chr6:131455894-131455959
  hypo
tccatccctattctacgatgcattcaacataagcgaagtgttattattcacgaaaggcgctaatt

SEQ ID NO: 20581 - DNA, 30 bp, Homo sapiens
  chr6:132568035-132568065
  hypo
tgcatttacgtgtccgggaaggataggaca

SEQ ID NO: 20582 - DNA, 31 bp, Homo sapiens; identical to SEQ ID NO: 5125
  chr6:133134687-133134718
  hypo

SEQ ID NO: 20583 - DNA, 301 bp, Homo sapiens; identical to SEQ ID NO: 5127
  chr6:133561966-133562267
  hypo

SEQ ID NO: 20584 - DNA, 88 bp, Homo sapiens; identical to SEQ ID NO: 5128
  chr6:133562348-133562436
  hypo

SEQ ID NO: 20585 - DNA, 420 bp, Homo sapiens; identical to SEQ ID NO: 5129
  chr6:133562674-133563094
  hypo

SEQ ID NO: 20586 - DNA, 622 bp, Homo sapiens; identical to SEQ ID NO: 5130
  chr6:133563157-133563779
  hypo

SEQ ID NO: 20587 - DNA, 31 bp, Homo sapiens
  chr6:134067447-134067478
  hypo
gagccaccgcgcccagcctgcctggagctct

SEQ ID NO: 20588 - DNA, 83 bp, Homo sapiens
  chr6:134817632-134817715
  hypo
ctccgtctcaaaaaaaaaaaaaaaaaaaaagaaacagcagtggaggatgacccagcaaagggagctgccgtgcatagccatga

SEQ ID NO: 20589 - DNA, 45 bp, Homo sapiens; identical to SEQ ID NO: 5139
  chr6:135503607-135503652
  hypo

SEQ ID NO: 20590 - DNA, 30 bp, Homo sapiens
  chr6:135572009-135572039
  hypo
ttttctggagaatgcggggaggatactccc

SEQ ID NO: 20591 - DNA, 30 bp, Homo sapiens
  chr6:135572371-135572401
  hypo
tgtatgcaggacttacgttacttcgcacta

SEQ ID NO: 20592 - DNA, 30 bp, Homo sapiens
  chr6:136647689-136647719
  hypo
agatggaaacaaatcggagggtgcatagga

SEQ ID NO: 20593 - DNA, 30 bp, Homo sapiens
  chr6:136657114-136657144
  hypo
ggtcccactgttgtcgagagccttgaccaa

SEQ ID NO: 20594 - DNA, 207 bp, Homo sapiens
  chr6:136682757-136682964
  hypo
ggcatggccaagatggcggtccagcgagtgcatgagatccttccccagggtacagttgtgttcgtttgaagaacaattatattgacattcgtcttattaggcccagaagatgaccaattaaacaaactgtttctggaatactgcctggcaggcaatcatggggcatgtaaagatcccacctggctaccctccgagaggagttttatc

SEQ ID NO: 20595 - DNA, 503 bp, Homo sapiens; identical to SEQ ID NO: 5141
  chr6:136870741-136871244
  hypo

SEQ ID NO: 20596 - DNA, 126 bp, Homo sapiens
  chr6:136980867-136980993
  hypo
ggactgatagtttaacgtgtacagagttttaatttggaagataaaaaagttcgggaggtgaatagtggtgttggctgcgtaacagtgcgaatgttcttaatgccactgaagcgtgcacttcaaatg

SEQ ID NO: 20597 - DNA, 54 bp, Homo sapiens
  chr6:137144542-137144596
  hypo
tgtctcccgtcgcgcgcattggctcagcctgtggttaaagctgctcaggaggct

SEQ ID NO: 20598 - DNA, 31 bp, Homo sapiens
  chr6:137147698-137147729
  hypo
aggggacaagtttaaacgttagcatttctta

SEQ ID NO: 20599 - DNA, 1113 bp, Homo sapiens; identical to SEQ ID NO: 5144
  chr6:137242294-137243407
  hypo

SEQ ID NO: 20600 - DNA, 30 bp, Homo sapiens; identical to SEQ ID NO: 5145
  chr6:137244317-137244347
  hypo

SEQ ID NO: 20601 - DNA, 30 bp, Homo sapiens; identical to SEQ ID NO: 5147
  chr6:137421484-137421514
  hypo

SEQ ID NO: 20602 - DNA, 31 bp, Homo sapiens
  chr6:137491867-137491898
  hypo
agggcttacataccaccgggaaagggcctgc

SEQ ID NO: 20603 - DNA, 44 bp, Homo sapiens
  chr6:138055130-138055174
  hypo
gattacaggcatgagccactgtgcccggccgacacttctaaact

SEQ ID NO: 20604 - DNA, 41 bp, Homo sapiens; identical to SEQ ID NO: 5154
  chr6:138428546-138428587
  hypo

SEQ ID NO: 20605 - DNA, 267 bp, Homo sapiens; identical to SEQ ID NO: 5159
  chr6:138724515-138724782
  hypo

SEQ ID NO: 20606 - DNA, 30 bp, Homo sapiens
  chr6:138745518-138745548
  hypo
gcggcagaaggcggcgttcggctgcggccg

SEQ ID NO: 20607 - DNA, 30 bp, Homo sapiens
  chr6:138785343-138785373
  hypo
gagaggctgctggccgccagcttggccatc

SEQ ID NO: 20608 - DNA, 68 bp, Homo sapiens
  chr6:138883860-138883928
  hypo
gtgcctatataatcccttcaacgagaactttgtcttttctcggttacgacagcccctagatgacctgg

SEQ ID NO: 20609 - DNA, 278 bp, Homo sapiens; identical to SEQ ID NO: 5161
  chr6:139013400-139013678
  hypo

SEQ ID NO: 20610 - DNA, 31 bp, Homo sapiens; identical to SEQ ID NO: 5162
  chr6:139350568-139350599
  hypo

SEQ ID NO: 20611 - DNA, 30 bp, Homo sapiens
  chr6:139461634-139461664
  hypo
ctctatgcgcagtctcgtctttctctcatt

SEQ ID NO: 20612 - DNA, 244 bp, Homo sapiens; identical to SEQ ID NO: 5163
  chr6:139694963-139695207
  hypo

SEQ ID NO: 20613 - DNA, 34 bp, Homo sapiens
  chr6:139871209-139871243
  hypo
ttttttttttttttttgagatcgagtcttgctct

SEQ ID NO: 20614 - DNA, 213 bp, Homo sapiens
  chr6:140300531-140300744
  hypo
catgcagaaatattttttatgcgtgtatatttactgttaagtacacaatacgcctatgagaacaaccatagctaatagctttaagaactgtgcttggggcgaagggaaggaatgtgtggctggagacttagtttggcatgactgagaagcacccaagcggagtaaggacgggtgtgtcggctgcagccaggcggcagttctggtacttctcag

SEQ ID NO: 20615 - DNA, 30 bp, Homo sapiens; identical to SEQ ID NO: 5164
  chr6:141490782-141490812
  hypo

SEQ ID NO: 20616 - DNA, 66 bp, Homo sapiens
  chr6:143031707-143031773
  hypo
tcacttatttgaataacgccagttatcaatggtttcatcacgtgaatggcacggatcactctgcag

SEQ ID NO: 20617 - DNA, 31 bp, Homo sapiens; identical to SEQ ID NO: 5167
  chr6:143266116-143266147
  hypo

SEQ ID NO: 20618 - DNA, 30 bp, Homo sapiens
  chr6:143658588-143658618
  hypo
agagttaagcacttcgatgtagcagtttgg

SEQ ID NO: 20619 - DNA, 86 bp, Homo sapiens; identical to SEQ ID NO: 5170
  chr6:143999273-143999359
  hypo

SEQ ID NO: 20620 - DNA, 73 bp, Homo sapiens
  chr6:144330174-144330247
  hypo
aggcctataagcattacgtaaaaagattaagagaggtgtaaggagctcactacatgttcgggtttagaaagtc

SEQ ID NO: 20621 - DNA, 30 bp, Homo sapiens
  chr6:144508670-144508700
  hypo
cgcgctgggaaggacgcaccaaagccggga

SEQ ID NO: 20622 - DNA, 47 bp, Homo sapiens; identical to SEQ ID NO: 5173
  chr6:144537938-144537985
  hypo

SEQ ID NO: 20623 - DNA, 151 bp, Homo sapiens; identical to SEQ ID NO: 5174
  chr6:144606892-144607043
  hypo

SEQ ID NO: 20624 - DNA, 106 bp, Homo sapiens
  chr6:144608086-144608192
  hypo
agtgcagcggtcgccgcggccagagcgcgcggagctcgggggaggccggattccctaggtctgagccgaccctcccggccgcccggccgggcggcagcgaccgcat

SEQ ID NO: 20625 - DNA, 32 bp, Homo sapiens
  chr6:146011351-146011383
  hypo
agagctaacctcaggccgggcacggtggctca

SEQ ID NO: 20626 - DNA, 780 bp, Homo sapiens; identical to SEQ ID NO: 5176
  chr6:146136027-146136807
  hypo

SEQ ID NO: 20627 - DNA, 395 bp, Homo sapiens; identical to SEQ ID NO: 5178
  chr6:146864539-146864934
  hypo

SEQ ID NO: 20628 - DNA, 30 bp, Homo sapiens
  chr6:148200467-148200497
  hypo
gcccgtggactcctccgagagcagagatga

SEQ ID NO: 20629 - DNA, 30 bp, Homo sapiens
  chr6:148200970-148201000
  hypo
tagcttgttctaacccgtggcattggacac

SEQ ID NO: 20630 - DNA, 24 bp, Homo sapiens
  chr6:148648688-148648712
  hypo
gattacaggcgtgagccactgcgc

SEQ ID NO: 20631 - DNA, 30 bp, Homo sapiens
  chr6:149479234-149479264
  hypo
aagacgcacactctcgttcaactccttcag

SEQ ID NO: 20632 - DNA, 25 bp, Homo sapiens
  chr6:149851783-149851808
  hypo
gactccatctcggaaaaaaaaaaag

SEQ ID NO: 20633 - DNA, 387 bp, Homo sapiens
  chr6:149915184-149915571
  hypo
caggaggcctacatgccgccacttgtgctgccgccatgtctctagtgatccctgaaaagtcccagcatattttgccgagtagtcaacaccaacattgatgggtggcggaaaatggcctttgccatcactgccgttaagggtgtgggccgaagatatgctcatgtggtgttgaggaaagcagacactgacctcaccaagagggcgggagaactcactgaggatgaggtggaacatgtgatcaccattatgcagaatccacactagtacaagatgccagcctggttcttgaacagacagaaggatgtaaaggatggaaaatatagccaggtcctagccaatggtctggacaacaagctctgtgaagacctggagcgactgaaaaagatt

SEQ ID NO: 20634 - DNA, 85 bp, Homo sapiens
  chr6:150081970-150082055
  hypo
gcaagactccgtctcaaaaaacaaacaaaacaaaaagagcatgttctggaagttgtatccataatttctacgtatgttccattga

SEQ ID NO: 20635 - DNA, 120 bp, Homo sapiens; identical to SEQ ID NO: 5186
  chr6:150185521-150185641
  hypo

SEQ ID NO: 20636 - DNA, 40 bp, Homo sapiens
  chr6:150596882-150596922
  hypo
accctttcaacttcatcgatgcctatggcaatggcttgga

SEQ ID NO: 20637 - DNA, 151 bp, Homo sapiens
  chr6:150654326-150654477
  hypo
tgtgcatgagttgctagtgcacgagttgattgagttgatagtatgcaagttgatagtgtgcacgagttggtattgtgtgcaagttgatagtgtgcacgagttgatagttgcaggttgatagtgtgtgcacgagttaacagtgtgcaagttg

SEQ ID NO: 20638 - DNA, 767 bp, Homo sapiens; identical to SEQ ID NO: 5194
  chr6:150921276-150922043
  hypo

SEQ ID NO: 20639 - DNA, 30 bp, Homo sapiens
  chr6:151244579-151244609
  hypo
atctcatccagcaacgttggaatgcacaca

SEQ ID NO: 20640 - DNA, 30 bp, Homo sapiens
  chr6:151334995-151335025
  hypo
taaatccagtgactcgttggctttcagtga

SEQ ID NO: 20641 - DNA, 30 bp, Homo sapiens
  chr6:151346253-151346283
  hypo
catttcccagagtccggttaccctcaccgc

SEQ ID NO: 20642 - DNA, 23 bp, Homo sapiens
  chr6:151546993-151547016
  hypo
ccatcgtggatgagggcggtctt

SEQ ID NO: 20643 - DNA, 54 bp, Homo sapiens; identical to SEQ ID NO: 5195
  chr6:151561286-151561340
  hypo

SEQ ID NO: 20644 - DNA, 623 bp, Homo sapiens; identical to SEQ ID NO: 5196
  chr6:151561368-151561991
  hypo

SEQ ID NO: 20645 - DNA, 592 bp, Homo sapiens; identical to SEQ ID NO: 5197
  chr6:151562056-151562648
  hypo

SEQ ID NO: 20646 - DNA, 30 bp, Homo sapiens
  chr6:151671679-151671709
  hypo
aaaagacaaagagacggggacagacgggat

SEQ ID NO: 20647 - DNA, 31 bp, Homo sapiens
  chr6:151726417-151726448
  hypo
gagaattatttcatgacgggcaaattatggg

SEQ ID NO: 20648 - DNA, 755 bp, Homo sapiens; identical to SEQ ID NO: 5200
  chr6:152622775-152623530
  hypo

SEQ ID NO: 20649 - DNA, 30 bp, Homo sapiens; identical to SEQ ID NO: 5201
  chr6:152720395-152720425
  hypo

SEQ ID NO: 20650 - DNA, 194 bp, Homo sapiens; identical to SEQ ID NO: 5202
  chr6:152957586-152957780
  hypo

SEQ ID NO: 20651 - DNA, 537 bp, Homo sapiens; identical to SEQ ID NO: 5203
  chr6:152957815-152958352
  hypo

SEQ ID NO: 20652 - DNA, 31 bp, Homo sapiens
  chr6:153311586-153311617
  hypo
taatgcagtcatcttccgtggtaacaaggtg

SEQ ID NO: 20653 - DNA, 31 bp, Homo sapiens
  chr6:154764439-154764470
  hypo
atttggggccagataacgcttgtggggtggg

SEQ ID NO: 20654 - DNA, 11 bp, Homo sapiens
  chr6:154772650-154772661
  hypo
acactcgtgca

SEQ ID NO: 20655 - DNA, 22 bp, Homo sapiens
  chr6:154788906-154788928
  hypo
ttttgagatggagtctcgctct

SEQ ID NO: 20656 - DNA, 1264 bp, Homo sapiens; identical to SEQ ID NO: 5211
  chr6:154830734-154831998
  hypo

SEQ ID NO: 20657 - DNA, 31 bp, Homo sapiens
  chr6:154842781-154842812
  hypo
gactgcaacctgtgaacgaccctgagcagaa

SEQ ID NO: 20658 - DNA, 48 bp, Homo sapiens
  chr6:154894707-154894755
  hypo
gtagctgggattacaggcatgtgccatcgtgcccggcctcattagcta

SEQ ID NO: 20659 - DNA, 22 bp, Homo sapiens
  chr6:154922341-154922363
  hypo
aagactccgtctcaaaaaaaaa

SEQ ID NO: 20660 - DNA, 26 bp, Homo sapiens
  chr6:154970566-154970592
  hypo
gcattaccggccgggcgcggtggctc

SEQ ID NO: 20661 - DNA, 24 bp, Homo sapiens
  chr6:154970831-154970855
  hypo
gcgacacagcgacactccgtctaa

SEQ ID NO: 20662 - DNA, 42 bp, Homo sapiens
  chr6:155077848-155077890
  hypo
acattctgttgcattgaaatacgttctttaagctgggcgcgg

SEQ ID NO: 20663 - DNA, 175 bp, Homo sapiens
  chr6:155281566-155281741
  hypo
agggtgagcctaggtcacctccgtcccaccttccctgttcacgccatcacgttgctgtctccttcctcacagctctgtccaatcttttggcacctggccacccgctgttacttgacactctcactcatgccatctaatcgcttcactggattccgatctccaagagcacacagtc

SEQ ID NO: 20664 - DNA, 30 bp, Homo sapiens; identical to SEQ ID NO: 5212
  chr6:155316477-155316507
  hypo

SEQ ID NO: 20665 - DNA, 759 bp, Homo sapiens
  chr6:155568744-155569503
  hypo
agccaccgcacctggccacgcttcatggcttttaatgaattgtttgaaactcactttttaggccacctataacaatatttctcatgggtatgcatgaaatgtgtctttaaagtcagacattcctgcattttgagtcagtgttagtctttggggcgcagcctgcattccatcctcggaagctcccagcactccagggctctgtcagggctgtgaggcggaatcccacgctgacagctgggtgcctgacccactgatgtgttggggttttcattaaagaatggcattaggaggactatagaaatagatgatctataaatgttaaaagagaaatgaagaatttaattcaccccactgtgctcttctgaggtcttttatccatctgcttgtagctaaaactgacaaagccttcaaggcttttctggacgcccggaaccccaccaagcagcattcctccacgctggagtcctacctcatcaagccggttcagagagtgctcaagtacccgctgctgctcaaggagctggtgtccctgacggaccaggagagcgaggagcactaccacctgacgggtgaggcggcggcggcacctccgggcgagggcctgcacagggcggcgaggggctgccagccgtgccctgggcctgacagctcacctcttccccgcctagtggcacgtcctaagtcacttttcagttctgcgatggttaatcttaggtttcacgtgaatatgtgaaactagctaggcgtctgggcactcct

SEQ ID NO: 20666 - DNA, 33 bp, Homo sapiens
  chr6:156156135-156156168
  hypo
aagttctgggattacaggcgtgagccaccacgc

SEQ ID NO: 20667 - DNA, 23 bp, Homo sapiens
  chr6:156909901-156909924
  hypo
agatgaatgaatcttacggcagg

SEQ ID NO: 20668 - DNA, 30 bp, Homo sapiens
  chr6:156952430-156952460
  hypo
cggagcccggttcccgggctaggatgtgtc

SEQ ID NO: 20669 - DNA, 22 bp, Homo sapiens
  chr6:157040391-157040413
  hypo
tttttttttttttttccgagac

SEQ ID NO: 20670 - DNA, 87 bp, Homo sapiens
  chr6:157193702-157193789
  hypo
cctcagcctcccaaagtgctgagccacctcccaaggtgcgagccaccactcctggcctaacccatcggttttcagtctgtttggttt

SEQ ID NO: 20671 - DNA, 31 bp, Homo sapiens
  chr6:157319352-157319383
  hypo
ttttttttttggtgggcgggggtcagagttt

SEQ ID NO: 20672 - DNA, 204 bp, Homo sapiens
  chr6:157351859-157352063
  hypo
tatgttaacatcacaccgccttgaaattgtgtcttagagtactaagtttatcaaatgctttttgattgcatagatgtatttttcattgttaccaatatttattgggtccctgtatagagacaaggttttagttcatttccaatacattcagaggacggccgctgtactcagcagcacgaggctaccgtgcgtgttctttccact

SEQ ID NO: 20673 - DNA, 177 bp, Homo sapiens
  chr6:157430365-157430542
  hypo
gtgccctgaccttcacggggggcgaattggtgatgatctttaggacactaatttttttctttattatttgtaattcttttgagcaatatgcctgactatgaagcagtgggtctgacggagtcagagcggttagcctgatccagccggggtcccaggaccaccgccccagaggactat

SEQ ID NO: 20674 - DNA, 31 bp, Homo sapiens; identical to SEQ ID NO: 5214
  chr6:157446395-157446426
  hypo

SEQ ID NO: 20675 - DNA, 205 bp, Homo sapiens
  chr6:157477822-157478027
  hypo
gccagggggccaaggcgcgggagcctcaactccaaaatcccctggtggttctggtgtggaagccagctcaggtctgaggggggcctcagagataaccgccactgcagagcacggaggcagcatggagtgggaggtttgggaggcatgctccggacgcttcctccttatgcagtcttcctgagggacatcacgtgaggagcacaca

SEQ ID NO: 20676 - DNA, 269 bp, Homo sapiens
  chr6:157478285-157478554
  hypo
gtggctgtgctcactcggagatggctcaccgtgactcgcgcaccactgtctatgccacctgtcttcacttccagcttcatggctctgttaacatcccgcccccatagatacacacttacaccagatgtcctgggatcgtcacagcgagaaccagcattaaagcgcacccatcactaggcgtcattagcagcccagcccagcaacccccacggttctgagttacgaaaggcagggatctttggaattacgtgtgtgcaacaggagtggca

SEQ ID NO: 20677 - DNA, 159 bp, Homo sapiens
  chr6:157505953-157506112
  hypo
ccaccctacaggttcgacagctcgagctcccccgccctctttcggaaatcctcagatttgaactttagtaaaatgaagcctgggcttcgtttctaatgtcccctacccagcaagttctcacttctagggaatttaacaagctgtcgtggtaaggatcca

SEQ ID NO: 20678 - DNA, 30 bp, Homo sapiens
  chr6:157527549-157527579
  hypo
gaaaagagcagcatcgctctgactgccccg

SEQ ID NO: 20679 - DNA, 67 bp, Homo sapiens
  chr6:157548326-157548393
  hypo
gccattcatgcacacacgtgcatgcacacccacacgtgcatgcacacacacacgtggagactggggt

SEQ ID NO: 20680 - DNA, 30 bp, Homo sapiens
  chr6:157549833-157549863
  hypo
ccagcaccaactgcccgggtctgtgcatgg

SEQ ID NO: 20681 - DNA, 30 bp, Homo sapiens
  chr6:157550094-157550124
  hypo
gctctccgtgagcatcgcgccggcagccac

SEQ ID NO: 20682 - DNA, 59 bp, Homo sapiens; identical to SEQ ID NO: 5216
  chr6:157802883-157802942
  hypo

SEQ ID NO: 20683 - DNA, 30 bp, Homo sapiens
  chr6:157963687-157963717
  hypo
tggggaccctgctccgcaccagcttcagcg

SEQ ID NO: 20684 - DNA, 43 bp, Homo sapiens
  chr6:158018299-158018342
  hypo
catgggcctgtgagaccctctcgggctcactatgtatgtttta

SEQ ID NO: 20685 - DNA, 184 bp, Homo sapiens
  chr6:158024248-158024432
  hypo
atggagtggctgctatgtgcacgtagagggcaaagaaatttcacacaggttcgttccctgcccttaacgagttttccacgtagttatgaaaagataactaacatcataaagaagtacttgacaaggtcgtagcactcaggatggtcattttagaccaattcccgtaaaggggagaaatgagaga

SEQ ID NO: 20686 - DNA, 30 bp, Homo sapiens
  chr6:158093868-158093898
  hypo
gcctggcctgggcacgccctgcgccagcct

SEQ ID NO: 20687 - DNA, 31 bp, Homo sapiens
  chr6:158140715-158140746
  hypo
atgctcaaaggaaggacggtgtgaaggtgaa

SEQ ID NO: 20688 - DNA, 30 bp, Homo sapiens
  chr6:158239844-158239874
  hypo
gaaccttgagcaaacggttcctgttccagc

SEQ ID NO: 20689 - DNA, 36 bp, Homo sapiens; identical to SEQ ID NO: 5217
  chr6:158244129-158244165
  hypo

SEQ ID NO: 20690 - DNA, 200 bp, Homo sapiens
  chr6:158328732-158328932
  hypo
aggcaggtctgcctgtgtgggcgtctatacatggaagaagctgaggaaagccaccgcgtcttcaggaggcccagagaaagcagagactaactctttgctctaaaagtgcagtaaccttgcccactcatgaaacagagccccgtgaaattgggccttagccaagcacagttgctgctctcggcccactcactgagggaggt

SEQ ID NO: 20691 - DNA, 427 bp, Homo sapiens; identical to SEQ ID NO: 5218
  chr6:158402207-158402634
  hypo

SEQ ID NO: 20692 - DNA, 184 bp, Homo sapiens
  chr6:158488743-158488927
  hypo
tcccttcctgtgcacacgccatctgtgccctcctttctgcctccaagggcaggtggcagagtccaccattcagagccactggggctctctgtgtcggtggtagcctgggttgctgcttgtggtgcctccagaagccattcaggatgccctccggagcaggcccatcaacgcggagagtgcttag

SEQ ID NO: 20693 - DNA, 36 bp, Homo sapiens
  chr6:158593345-158593381
  hypo
ttcttttttttttttttgacacggagtcttgctctg

SEQ ID NO: 20694 - DNA, 42 bp, Homo sapiens
  chr6:158734070-158734112
  hypo
gctaactgggggagcgagaagggagacgagcaaaagaaacaa

SEQ ID NO: 20695 - DNA, 242 bp, Homo sapiens; identical to SEQ ID NO: 5221
  chr6:158957206-158957448
  hypo

SEQ ID NO: 20696 - DNA, 263 bp, Homo sapiens; identical to SEQ ID NO: 5222
  chr6:158957687-158957950
  hypo

SEQ ID NO: 20697 - DNA, 449 bp, Homo sapiens
  chr6:159045070-159045519
  hypo
ggcgtgagccactgtacccggcagaaaagctctttaaaacaatgtttttactcccagtctttggtttgtggctgacgcagtttgaggccctgtcactgtggttctggtcggctgctcttccttcccagtcaggtgtcggggagaaccagccatgtgggctctggaacagaccccagggcccacgtctgttgctgaaggagacaccggagagcagagccttctcggtgctaaacacgctggtctagtccagtccctttgctttacgtaaggtcccagctaaagtcacttaggtgcttttgagaaaaatgatcccgattcctgctgtgctgtcctgtgctctgagccttgactgtaagaggggagctctggcgctgagaggacaggaaaggggtggggggatggcgtgggccggagccatcgaggagcggggactgcgtctaaagacactg

SEQ ID NO: 20698 - DNA, 298 bp, Homo sapiens
  chr6:159049611-159049909
  hypo
acaggtcagctcctcgcgccctgttctccggaggcctcgtctctgctgagaggtgtctcagttggccccgctgcagccgtgggaaggggcagcctgtccctcctctgtacacaggaagcttggctcagtagttgccccaggtcaggtttcgggtggcagagcccggctccaaacccagagaggctggcgctctggagcgtgcccacgccacgctgctttccacccagaggggcaggtgctgtgaggtaaatgaggtgcggttgcctctccacaccgcggggctccaagcccctactgc

SEQ ID NO: 20699 - DNA, 30 bp, Homo sapiens
  chr6:159067669-159067699
  hypo
gtgttcggcctgagcgaggagacttgctgg

SEQ ID NO: 20700 - DNA, 216 bp, Homo sapiens
  chr6:159135763-159135979
  hypo
tcactgtgtttctgctcggcttctcttcatcatccccttttctgtagttgcatgcggatggtctcagtgctgcacttggctctgagacagtctctttatgtgactttaattagttgtccgtattcctcatgagccctgtgtcagctgtcacacgatgacaatggacatcaaagcactgctcttcagatgagcagaaacagtcgtctcatgcaatgg

SEQ ID NO: 20701 - DNA, 31 bp, Homo sapiens
  chr6:159177015-159177046
  hypo
ctgacctcatagggtgcgtgtgaaagctaaa

SEQ ID NO: 20702 - DNA, 31 bp, Homo sapiens
  chr6:159190328-159190359
  hypo
gtgcggaggtgtcccccgtgcagactcaccc

SEQ ID NO: 20703 - DNA, 30 bp, Homo sapiens
  chr6:159205681-159205711
  hypo
atcccacggtgttccgcatgccacacctgg

SEQ ID NO: 20704 - DNA, 64 bp, Homo sapiens
  chr6:159299253-159299317
  hypo
tcaatgtgaggatttacgttaatttggccaggagcagacctgtgtttaacgtttgctgtacctg

SEQ ID NO: 20705 - DNA, 121 bp, Homo sapiens
  chr6:159419498-159419619
  hypo
tcaaaaaaaaaaaaagaaaaaaaaaaaggcttatgttttgttttttttctttcctatgtatgtttgaatatttgcaactgttcatggatgtaaaaacacaaactgccgtccgggcgcggtg

SEQ ID NO: 20706 - DNA, 215 bp, Homo sapiens; identical to SEQ ID NO: 5223
  chr6:159589859-159590074
  hypo

SEQ ID NO: 20707 - DNA, 255 bp, Homo sapiens; identical to SEQ ID NO: 5224
  chr6:159590506-159590761
  hypo

SEQ ID NO: 20708 - DNA, 368 bp, Homo sapiens; identical to SEQ ID NO: 5225
  chr6:159590971-159591339
  hypo

SEQ ID NO: 20709 - DNA, 30 bp, Homo sapiens
  chr6:160220706-160220736
  hypo
aaggagtgagtgcacgagataatccctggg

SEQ ID NO: 20710 - DNA, 45 bp, Homo sapiens; identical to SEQ ID NO: 5228
  chr6:160389821-160389866
  hypo

SEQ ID NO: 20711 - DNA, 31 bp, Homo sapiens
  chr6:160425815-160425846
  hypo
caaaccaaagtggacccgcctgcctgtgcac

SEQ ID NO: 20712 - DNA, 30 bp, Homo sapiens
  chr6:160455507-160455537
  hypo
gtttcagcggatgagcgtcataaactttga

SEQ ID NO: 20713 - DNA, 138 bp, Homo sapiens
  chr6:160475954-160476092
  hypo
gcagtggcccagtggacgctgcgtcactcacctgcctggtctgctttgtcattggctaacactctttttcctgagagacacttcctttagagttgaagatctcggtgatcagggaatgaatgacgggcaggctgagct

SEQ ID NO: 20714 - DNA, 156 bp, Homo sapiens
  chr6:160491753-160491909
  hypo
gagttgggcattaactcgggcaagaccagctcgctgggtgtcagggtggctcgccccatgctctccagcggtgggcagcagtggtaggggagcttgggatggggggctccaggagcttcaggcctgccctcttgcctggagcggcagggaagtttc

SEQ ID NO: 20715 - DNA, 39 bp, Homo sapiens
  chr6:160512214-160512253
  hypo
gtgccctggtgctgagcgcatcgccgagaaggagcaggt

SEQ ID NO: 20716 - DNA, 30 bp, Homo sapiens
  chr6:160555558-160555588
  hypo
ggatgagcagagcccggggtttcccacatg

SEQ ID NO: 20717 - DNA, 469 bp, Homo sapiens
  chr6:160679356-160679825
  hypo
cctgagctcactctcttacctcggtgacgatggacgagccaggcgtctcgtacacccagccgtcccggcaggggcccagtggcaggcggctcctgttggtgtccaggctggccagggggtccacgcagtcgaaggtgctctggttccagtccacctcgtagcgcctacactgtcttggggaggcttcgcccgcaggtcctgggcccggcaccgtgtagttcagttcctctgcaggactccagccgcagcgcagactcagctcggccactccggggctccggcagcggtggtcaggggtgaagcccaggaagacgatgcccacgtagatgggcgcgaaggtagccgagagcagagccaagaggaaaaacatttgcttctggaaaaagtgaaactcccctccatgctccaggacatcgtccacggtggtgggcatgatcctgcaggcaggagggcccgaggctgcccgacg

SEQ ID NO: 20718 - DNA, 169 bp, Homo sapiens
  chr6:161522587-161522756
  hypo
caggtgctctcaggctcgggtgttggctatggagagatgaaaatggagccctccttccagactctagagctctaacagactccagaggacggtctccacagcagcgctgttcacttagggggctgattctggtgggtctgtcctgtgcgttttccgctgcccactagat

SEQ ID NO: 20719 - DNA, 30 bp, Homo sapiens
  chr6:161538160-161538190
  hypo
tcctccgtgtctcgcgcgactgagaaccgt

SEQ ID NO: 20720 - DNA, 31 bp, Homo sapiens
  chr6:161577268-161577299
  hypo
agcaagctactgccctcgggacaagcctgct

SEQ ID NO: 20721 - DNA, 31 bp, Homo sapiens
  chr6:161586464-161586495
  hypo
tgatttcagcagcccccgtatctgttctaca

SEQ ID NO: 20722 - DNA, 122 bp, Homo sapiens
  chr6:161637993-161638115
  hypo
actttcccctcacacgtggctctgattcacctttgctcacctgctgatgcggttctcatgttacacgtgttcttcaccttcaggctttcctgtccttgtcaatttccgtttaggtgttttat

SEQ ID NO: 20723 - DNA, 30 bp, Homo sapiens
  chr6:161687270-161687300
  hypo
attgagaaacacctcgccctcaaggaatgt

SEQ ID NO: 20724 - DNA, 30 bp, Homo sapiens
  chr6:162340097-162340127
  hypo
acacgaagagttttacgccatgttcacagt

SEQ ID NO: 20725 - DNA, 30 bp, Homo sapiens
  chr6:162792072-162792102
  hypo
caagtcaaagccagacgaagacagaaggcc

SEQ ID NO: 20726 - DNA, 30 bp, Homo sapiens
  chr6:163009862-163009892
  hypo
gtgagccaccgcgcccggcccagagctcat

SEQ ID NO: 20727 - DNA, 210 bp, Homo sapiens
  chr6:163591722-163591932
  hypo
gtctctatttgctgtcgattccacgcagtctatgcatctgggttattttcacttttccaaaaccaactctcagccgattcactgatcttctacagggttgctccagttcctacttcttttatcgcttagacctttctttttattccctccttcattctcccactccttttcatctgtagtctcttcttaccagtacgagtccgtgttact

SEQ ID NO: 20728 - DNA, 30 bp, Homo sapiens
  chr6:163661759-163661789
  hypo
acagccgactgtgccgtcctcaccctcggg

SEQ ID NO: 20729 - DNA, 1672 bp, Homo sapiens; identical to SEQ ID NO: 5238
  chr6:163836108-163837780
  hypo

SEQ ID NO: 20730 - DNA, 30 bp, Homo sapiens
  chr6:164067317-164067347
  hypo
gggcatcggagtcaccggcagacttgctga

SEQ ID NO: 20731 - DNA, 173 bp, Homo sapiens
  chr6:164441337-164441510
  hypo
tggttaacctgaagtgtattgcgaatatgagggctcatattcaagggtacggatgtgtctcagctgggcagggcactcgctaacccccagctggggcgggagcaggggtacctgcggcaccagaggtacgtggggcctggccccggctgcgcggcagcttctcctttgcaaac

SEQ ID NO: 20732 - DNA, 30 bp, Homo sapiens
  chr6:164758318-164758348
  hypo
gctgcagcaccccacgccgcgctctccacg

SEQ ID NO: 20733 - DNA, 584 bp, Homo sapiens; identical to SEQ ID NO: 5248
  chr6:166402066-166402650
  hypo

SEQ ID NO: 20734 - DNA, 151 bp, Homo sapiens; identical to SEQ ID NO: 5249
  chr6:166402752-166402903
  hypo

SEQ ID NO: 20735 - DNA, 2204 bp, Homo sapiens; identical to SEQ ID NO: 5252
  chr6:166580148-166582352
  hypo

SEQ ID NO: 20736 - DNA, 49 bp, Homo sapiens
  chr6:166748325-166748374
  hypo
aaccaaagggctgtctcgagaagattctcaaagacgaggtgcccaactg

SEQ ID NO: 20737 - DNA, 31 bp, Homo sapiens; identical to SEQ ID NO: 5254
  chr6:166822698-166822729
  hypo

SEQ ID NO: 20738 - DNA, 97 bp, Homo sapiens
  chr6:167051699-167051796
  hypo
aaggagcgcaagctcgcaatcactgtgcgcaaaatccacaagaccgctgaagtcaggagcacagcccgaaagccagccagccgcagactcggctgtg

SEQ ID NO: 20739 - DNA, 30 bp, Homo sapiens
  chr6:167136244-167136274
  hypo
ccctttttgagattcgtccttcagtctact

SEQ ID NO: 20740 - DNA, 103 bp, Homo sapiens
  chr6:167139234-167139337
  hypo
gcttcctcgggccagcgtggacgttcccgacctgccccacagcacagagactggctccaggtatgccgggcagggaggctcctggcggcgcaggcccagaggg

SEQ ID NO: 20741 - DNA, 5 bp, Homo sapiens
  chr6:167144474-167144479
  hypo
aatcc

SEQ ID NO: 20742 - DNA, 30 bp, Homo sapiens
  chr6:167152239-167152269
  hypo
aagatatcaatccacggagttgcaaaagaa

SEQ ID NO: 20743 - DNA, 304 bp, Homo sapiens; identical to SEQ ID NO: 5256
  chr6:167275710-167276014
  hypo

SEQ ID NO: 20744 - DNA, 66 bp, Homo sapiens
  chr6:167384338-167384404
  hypo
aaagtcccaccctgagcgcaggaacactccccctcagagccctgaggtgaccgctctgaggtgtcg

SEQ ID NO: 20745 - DNA, 197 bp, Homo sapiens
  chr6:167511714-167511911
  hypo
aaaagtgaagagattccgcttgcaagtttgattcagttcaataccttccctgatacctcctgttttacttttctcatatataattcttccgcctatacacaggaaatgcaacaatttttttccaccaagcctcttctaggtgcccagaccacccccgctaaccccagtgtgccctgcacaaacgtggggtcctgtgg

SEQ ID NO: 20746 - DNA, 31 bp, Homo sapiens
  chr6:167835094-167835125
  hypo
gctgttttccccccacgcggatcctcacctc

SEQ ID NO: 20747 - DNA, 546 bp, Homo sapiens
  chr6:167880206-167880752
  hypo
ccttcaccaactccatgagatcgtgacgtcgagacactgcgacacatttctcagccttcactgactccgtgtgaccatgtcattgagacgctgcgacacatttctcagccttcaccgggtccgtgtgaccatgacgtcgagacgctgggacacatttctcagccttcaccgggtccgtgtgaccgtgacatcgagacgctgggacacatttcttagccttcaccgagtctgtgtgaccatgacgtcaagacactgtgacacatttctcagccttcaccgggtccgtgtgaccgtgacgtcgagacgctgggacacatttctcagccttcaccgagtctatgtgaccatgatgtcgagatgctgtgacacatttctcagccttcaccgggtccgtgtgaccatgacgtcgagacgctgggacacatttctcagccttaaccgagtccgtgtagtccgtgtgaccatgatgtcgagacactgctacgcgtttctcagccttcaccgggtccgtgtgaccatgacgtcgagacacagtgacacatttct

SEQ ID NO: 20748 - DNA, 31 bp, Homo sapiens
  chr6:168054256-168054287
  hypo
gaagtgctaacctttacgtcccccaacagac

SEQ ID NO: 20749 - DNA, 30 bp, Homo sapiens
  chr6:168122740-168122770
  hypo
tagctctgggatgtcgtgcctggcctgtga

SEQ ID NO: 20750 - DNA, 37 bp, Homo sapiens
  chr6:168131200-168131237
  hypo
cacaggtttgtggctccgcttccgccactgaggatat

SEQ ID NO: 20751 - DNA, 31 bp, Homo sapiens
  chr6:168156340-168156371
  hypo
agaagcgggtgggactcgtcctggtagtggg

SEQ ID NO: 20752 - DNA, 70 bp, Homo sapiens; identical to SEQ ID NO: 5260
  chr6:168227398-168227468
  hypo

SEQ ID NO: 20753 - DNA, 34 bp, Homo sapiens; identical to SEQ ID NO: 5261
  chr6:168227909-168227943
  hypo

SEQ ID NO: 20754 - DNA, 85 bp, Homo sapiens; identical to SEQ ID NO: 5262
  chr6:168228221-168228306
  hypo

SEQ ID NO: 20755 - DNA, 30 bp, Homo sapiens
  chr6:168377437-168377467
  hypo
cggtccaggagctccgcaagttgcgggaga

SEQ ID NO: 20756 - DNA, 170 bp, Homo sapiens
  chr6:168378888-168379058
  hypo
tcggtgagaggctgcggccagcggtgctgtgagccgggcgggggtcagcgcgggcggccggggcgaggctgacagcacagcaggggccgagctcccccgggtcaggcgggaccaggaagggatcatccttcttttgagggcacggagccaccgtcggagggcctgtgaga

SEQ ID NO: 20757 - DNA, 8 bp, Homo sapiens
  chr6:168379288-168379296
  hypo
tttgaaga

SEQ ID NO: 20758 - DNA, 59 bp, Homo sapiens
  chr6:168387332-168387391
  hypo
gggcccctgtgaggtacgaggcctgtcattgactaaagcacagccgtgcagcccaggac

SEQ ID NO: 20759 - DNA, 92 bp, Homo sapiens
  chr6:168391460-168391552
  hypo
agcccctcttccaggacgttctgcctccccgcacctggccgggaccctcaggctcagccctggggatgcctccccgacggctcctgtggctc

SEQ ID NO: 20760 - DNA, 30 bp, Homo sapiens
  chr6:168421731-168421761
  hypo
aggactcacactacccgatttaaagactta

SEQ ID NO: 20761 - DNA, 31 bp, Homo sapiens
  chr6:168428446-168428477
  hypo
acgggttctctgtgtcgcgtctcttcagagc

SEQ ID NO: 20762 - DNA, 38 bp, Homo sapiens
  chr6:168434609-168434647
  hypo
ctataccatgctgggacgccattcggacgacggccctg

SEQ ID NO: 20763 - DNA, 164 bp, Homo sapiens
  chr6:168450761-168450925
  hypo
cggggtggcttccctgcgggggcggcctctgtgcagaggcctgaagggtccacagtggcaaagggggaatgacaaagtgtctgcctgtgccggaccgagtgatctgtactataattaccctgtgaggggcgcacgctgccgtcctagagcgtcacagacaccag

SEQ ID NO: 20764 - DNA, 31 bp, Homo sapiens
  chr6:168458121-168458152
  hypo
aatgcccaccctgcgccgcagtgcatggccg

SEQ ID NO: 20765 - DNA, 60 bp, Homo sapiens
  chr6:168463521-168463581
  hypo
gggggtgggggcaggacgaggggctctgtgaggctggagccccttcggtcacctggtaga

SEQ ID NO: 20766 - DNA, 30 bp, Homo sapiens
  chr6:168467839-168467869
  hypo
agcacagtccaccgcggtgcctgccctctc

SEQ ID NO: 20767 - DNA, 219 bp, Homo sapiens
  chr6:168529961-168530180
  hypo
taccttgggctgcactctaaccgccaccaagtgccacggcttcaacacggttcattaattgccagcgtgtgtgtggctggtctggccacagcggccggttttcgctcgaggtccttcatgtggttgccgtcagatggtcagatggcggccggggccggggctggggtcgctggacacttgacccagctggaggcctacggggaggccttggttggagtg

SEQ ID NO: 20768 - DNA, 30 bp, Homo sapiens
  chr6:168613293-168613323
  hypo
acacttgtgtggggcgggggcggggtctac

SEQ ID NO: 20769 - DNA, 30 bp, Homo sapiens
  chr6:168630192-168630222
  hypo
accggttcccaaaccgcctgggcctgagac

SEQ ID NO: 20770 - DNA, 216 bp, Homo sapiens
  chr6:168672616-168672832
  hypo
atcacccatctaaacaaagctcggaactgtctgcgccccaggacggggtcccagctggcccaggagaaatcgcactcacaggcccagcagagcccaacgccagcgctcagaatcccacagtgtctagacacgcacagcagcaacacggaagcggcacagggacagccccagcggtggcgacccagctccacaggcgtgtggcaaatgcaggcaggc

SEQ ID NO: 20771 - DNA, 31 bp, Homo sapiens
  chr6:168708313-168708344
  hypo
gcgccgccctcctcgtcgctgctgctggact

SEQ ID NO: 20772 - DNA, 461 bp, Homo sapiens
  chr6:168709571-168710032
  hypo
acagggggctctgtagagccacggcgtgcagggggctggggtacgggtacacctccctgccgccctgggacaccaggtcctgccgatacttggggtccggcacgtgcagcgggatatccaccccctggcagaggagcccgaggagctcggcgtccgcgctggctttctggagccccgtgtccgccggcagggctctgtcaagatcacctgggagcgagaaaaatgaacaaacacgtaactacggagacgatttagtgcactgttgatttcatttcatgcgtggcagctgggatggaaacgctgctcattcactgcttcgaggaactcctgggtcccatgggagacggcgactcacagtcactgaggtccgcgtgtagacacagggcgcggggcagacgggaatgcgtttaagacactgggcgcggggcagacgggaatgcgtttagacacagggtgcaggg

SEQ ID NO: 20773 - DNA, 30 bp, Homo sapiens
  chr6:168771624-168771654
  hypo
tggttccccgggagcggcagagcttgtgtc

SEQ ID NO: 20774 - DNA, 52 bp, Homo sapiens
  chr6:168814003-168814055
  hypo
gtgtacgtgagcggggcgggccctgcgggagcaagtacgcaggtgtggggtt

SEQ ID NO: 20775 - DNA, 301 bp, Homo sapiens
  chr6:168936431-168936732
  hypo
aggatgtcaggagagaggcagcgccgccgggggaagatgggagggagaccaatgcgcagtgacagtgatcctggggacacgtgaggaataacgcagcagtgatgcagcttcacggcacaggggcgccgccgggggaagatgggagggagacgcatgagcagtgacagggatcctggggacacgtgaggaataacgcagcagccatgcagcttcacggcacaggggcccggccgttctctctggattctggctcgaattttcacacgtgccaacctcactcggagggcctgatgggcccagg

SEQ ID NO: 20776 - DNA, 186 bp, Homo sapiens
  chr6:169106756-169106942
  hypo
atttattcatcaaacttgtaccggagccagagtcctcaacagatgaggagccaccggcgttttgctgtcccgtgtgttcttggttgacgggcgttttgctgtcctgcgtgttcttggttgctctgggcacctgtcgggagatgctgcccgttgactccgcaggacgcttcccttgggatgagttct

SEQ ID NO: 20777 - DNA, 633 bp, Homo sapiens
  chr6:169539420-169540053
  hypo
cattttcttggaagctgccagcgggcatctttggggctcaccgtggtgaatccagcacccttcgctgggtcagcctctctccgtgccccggccctccagatgcccagtgctccgcgtcccccacaagtgaggccgaggaggtcggcgccaggggaaccagggccggtgctgagcagctccggtggaggccgtcagtggacttgagttttaaaaaggctcctgcggcgtggtcctggccagcttctctgctgctccgtggaaaggcctccgggacagtggcctgagcttggccttgcagggctgggagccggcaacccgccctgggcacggacacgcccttcatccctgaccgccaggctccagccctgctggggacactcaaggcaggacgccgggtccccccgcatggcctttccgcggagctctccgccgccgaggacgcccaggcctgcttttcctgccacctctcctaggccgcgagcccgggcccctggaactcagccaccgagtcacctccggcaccggactcagctctgcgcccccggcccgcgctcaccgcggagggggaaggaaccactatggaggctgcactccaacgtcctcccgaattccgcagcttctgggcttgtcttg

SEQ ID NO: 20778 - DNA, 427 bp, Homo sapiens
  chr6:169567203-169567630
  hypo
tgagacagttccaaggagtggcggcccaaggcctcacactggacggaggctgagctccactgcggccccggcaggcgggcttcctaagagcagcgtggaatcccggggctctgcgcaccgtgcccggccccgggctccctgacgcgaggcaatgcctgggcacagcgtacggccaccggcaccttcactcctcacctgtgcacgcgagtgtgggggatgaagcgacatcggtgtgtggcgtctcagtgcagcgccggcacacacagccctaagcagatgcggagcagagatgacggtggagtcaccccgcgggtgcaaccccatcttagcaggagggccgggttttgggcagctcgggccttcagaaaaaggatcatgtcagcgtgcatgccacgctgcacgtcccgggagttaaatctaggaatag

SEQ ID NO: 20779 - DNA, 30 bp, Homo sapiens
  chr6:169586491-169586521
  hypo
gggttggtaaatttcgtgccggccaccatg

SEQ ID NO: 20780 - DNA, 241 bp, Homo sapiens
  chr6:169592277-169592518
  hypo
agataatcatggccccgtgtgatcctaggggaggcaatcatgacaccgtgtgatcccgggaagagataatcatgacaccgtgtgatcctggtgggagataatcatggccccgtgtgatcctgggggagataatcatggccccgtgtgatcctgggggagataatcacgacaccgtgtgatcctgggggagataatcacgacaccgtgtgatcctgggggagataatcatggccccgtgtga

SEQ ID NO: 20781 - DNA, 213 bp, Homo sapiens
  chr6:169592577-169592790
  hypo
tgtgatcctggggggagataatcacgacaccgtgtgatcctggggggagataatcacgacaccgtgtgatcctggggggagacaatcatggccccgtgtgatcctgggggagataatcatggccccgtgtgatccttggggtagataatgatgaccctgtgtaatcgttggggtagataatcatggccctgcgtaatcctagggtatataatc

SEQ ID NO: 20782 - DNA, 334 bp, Homo sapiens
  chr6:169634742-169635076
  hypo
ttttcatctagtttcccaaagcgtttgtgcttttcatcagaatggaagcccgggtttcagtgcccccgcttctacccctcactcacccacggggcagctcctcttgttgcacatctgacgctcctgcacatcccccacgcaggccttccctccgtactgaggctcagggctgttgcagacccgggtgcgctcccggatcccaccggcacaggtgacagtgcaggccgaccacggggaccaggggctccagcggccatcgactgcggggaaagccaaccagggggagctcagagcaagacccggggtggagaacgtgagttggctgagtgagagg

SEQ ID NO: 20783 - DNA, 416 bp, Homo sapiens
  chr6:169641782-169642198
  hypo
atacctgctgagatgggccagcggcggagctgcccatgccctatgacccccgcggcccctgcgtgagtacccaccactctcttgaggttctcgctgagctggttcacgaggacgtggagccccgagagctcctggaccatgtttcccagctcctcgcacgagcgttcgcacacctcgggcctcctctccgagctggggcccacgtactcggtggtgacatgcggacccaggcgcagcgtctctgtgttctcactgatggcgttgatctcagctgagggcaagcgtagaagggccgtgagcatcacagaggacggggccagcagcaggggctgggaacagagggaggatgacccgccctggctcccggagcggcctggtgctgggagacacaaggcggaggactgggccagcagcag

SEQ ID NO: 20784 - DNA, 746 bp, Homo sapiens
  chr6:169648463-169649209
  hypo
gctaagctctttcctccctcacggcggccacctccctgcagagcgtaccctgaagtgactctctctggcagagcctttggccacgtacatccggctcttttccgcctgcaggtgctcgtagaagggctcgtccagagcgaagctgtctatgaggtcgcagcccacgtgcaagctgtaggtctcgccagccacctgcacggtgacgttcttccactgcgagtcagccaggccgacgtcctccagggagaccacatgccgggtgccgtcaatccagtaggtgagatccagcgtgtccgcggggccgttggagacgatctcgaactgcctctgggagagaccggggccctccagagccaacagcgtgcccctggacttgccgtcctgcttgagctgggccgtgaggaagaagccctccttctgccgcatgatcttggtgatcttgctgaggtcatctgcgttcaccggtgggatgtagtcaaagcgcacgaagcggtaagccggcacgccggggtcgggcccgcggaactgcttggcgccaatggtcttgcggttgatgttgctgatactgaaaaggtcgaaggtcgtgtctttgtcctggtgaccagctgcaaagggaaccgcagtggagaagggtgacgtaggggaagagggcgaggttggcctgacccagggtgacaaaccagaacctcgcgtgtaaggaaattaacgaggcctcccaatatcccgcagcttctctccctttttta

SEQ ID NO: 20785 - DNA, 30 bp, Homo sapiens
  chr6:169902426-169902456
  hypo
gcgatgtggcgttccgtacacggacggtcc

SEQ ID NO: 20786 - DNA, 30 bp, Homo sapiens
  chr6:170028094-170028124
  hypo
taggggtgactcggcgccatggtctggaag

SEQ ID NO: 20787 - DNA, 179 bp, Homo sapiens
  chr6:170059399-170059578
  hypo
catagcagcgacatcgccctgtcactcctaaaacgtttttacacacaaaatcccgtttactcagccagtcgttacaggatcactctgaagaaagaagaaatcagaggcacgtctcatagacagggagggccgcgtctcaggactgaccttttgatccgcagtgcggttcctcagggcac

SEQ ID NO: 20788 - DNA, 37 bp, Homo sapiens
  chr6:170061017-170061054
  hypo
ccgcaggagtggggagcgtgggcgttgggccccacgt

SEQ ID NO: 20789 - DNA, 30 bp, Homo sapiens
  chr6:170065876-170065906
  hypo
cccaaaaggctgcccggtgagtccaccaca

SEQ ID NO: 20790 - DNA, 479 bp, Homo sapiens; identical to SEQ ID NO: 5269
  chr6:170124927-170125406
  hypo

SEQ ID NO: 20791 - DNA, 30 bp, Homo sapiens
  chr6:170201658-170201688
  hypo
ccgtgcacggttgtcgtcctcagcggcagg

SEQ ID NO: 20792 - DNA, 616 bp, Homo sapiens
  chr6:170339177-170339793
  hypo
gcggggcctcccagcccttcacgcagcgctgacggggcctctgcccaccggccaccctggtctcaagacggagcccacgtctcctgcttgggctggatgagtgacccttccctgcggccatgaacagggagctttaaacgtgttgaggttggaccctgcccagcccggctgaaccccactctgtaggaggcgcaggcatcagacgccggggacgtcatggtggaggagactacccgtgagcccggtgacgtcacggtggagaccacccgcgaggctggtgacgtcacagtgcaggagaccaccgcgaacctggtgacgtcacggtgggggagaccaccccgagccctgtgacgtcacggtggaggagaccaccctgagcctggtgacgtcacgggtggaggagaccgccccgagccctgtgacttcacggtggaggagaccaccctgagcccggtgacgtcacgggtggaggagaccgccccgagccctgtgacttcacggtggaggagtccaccccgagcctggtgacatcatggtggaggagaccgcccctgagcccgggtgcccctgatcccaggcactggatgggatccccgggggccatgttttaaaatca

SEQ ID NO: 20793 - DNA, 1067 bp, Homo sapiens
  chr6:170453832-170454899
  hypo
atccccttgagccacagagagcgacagtgaccttgagtgtggagagcagcggtgaccttgagcgggtggagagtggtggtgccctggctgcacgtggagaccggtggtgccgttaagccgtggagagctgcggtgaccttgaacgagtggagagcagcagtgcccttgagcatgcagcgaactgcagtgccctttagtacatggagaacggcggtgccctttagtacatggagaacggcagtgcccgtgagcacctggagaacggcggtgcccttgagcacgtggagaactgcagtgccctttagtacatggagaacggcggtgcccttgagcacctggagaacggcagtgcccgtgagcacctggagaacagcggtgcccttgagcacgtggagaacggcagtgccctttagtacatggagaacagcagtgcccgtgagcacctggagaacagcggtgccctttagtatatggagaacggcggtgcccttgagcatgcagcgaactgcagtgccctttagtacatggagaacggcagtgccctttagtacatggagaatggcagtgcccgtgagcacctggagaacggcggtgcccttgagcacgtggagaacggcagtgccctttagtacgtggagaacggcggtgccctttagtatatggagaacggcggtgcccttgagcatgcagcgaactgcagtgccctttagtacatggagaacggcagtgcccgtgagcacctggagaacggcagtgccctttagtacgtggagaacggcggtgccctttagtacatggagaacagcagtgcccgtgagcacctggagaacggcagtgcccttgagcatgtggagaacggcggtgccctttagtacgtggagaacgacggtgcccttgagcacgtggagaacggcggtgcccgtgagcacctggagaatggcggtgcccttgagcacgtggagaacggcggtgccctttagtacatggagaacggtggtgcccgtgagcacgtggagaacggcagtgcccttgagcactcggagaacggcagtgccctttagaggtga

SEQ ID NO: 20794 - DNA, 30 bp, Homo sapiens
  chr6:170474562-170474592
  hypo
tgtgcagtgccgcccgccatcctcctgcat

SEQ ID NO: 20795 - DNA, 204 bp, Homo sapiens
  chr6:170475363-170475567
  hypo
ccatctcctaggccagcgtgattcttctgagtgcagctgggtctcctcctgggagatccggtggctctagcagcgtgggtgctgggaacaggaccagcctcgccggcggacagtgtggacgcctgagggcaaaccctggaccactctctccccgggggactccgttcccgcctccagggagctgcgaacgctccttctgggaca

SEQ ID NO: 20796 - DNA, 30 bp, Homo sapiens
  chr6:170500952-170500982
  hypo
tcggcttaccttcccggctcatgcagcgat

SEQ ID NO: 20797 - DNA, 80 bp, Homo sapiens
  chr6:170531645-170531725
  hypo
ctcttccccagaagcgcagcacctgagcgtgtgacgtgcacatgtttgtgtggaaggcccgagacgccatccaaccccgt

SEQ ID NO: 20798 - DNA, 30 bp, Homo sapiens
  chr6:170545099-170545129
  hypo
aggccctcagcctgcggggactgacctggg

SEQ ID NO: 20799 - DNA, 171 bp, Homo sapiens
  chr6:170579425-170579596
  hypo
aaggggcctgagaggtgtatccgtgcacagagctccgcaccctgaaaccgctcagggcatggaccgcggtgacgtgccgcctccctcccagtgcccactgaagcgtcctgctcccttcttcgcacagatggcagtgtggggccaggggacgtgtggcatcatttgcccatg

SEQ ID NO: 20800 - DNA, 30 bp, Homo sapiens
  chr6:170700092-170700122
  hypo
gtttgcagagatctcggctcaccaaattcc

SEQ ID NO: 20801 - DNA, 30 bp, Homo sapiens
  chr6:170819916-170819946
  hypo
ctgctgcgcgttcacgccgtgtgagctgcg

SEQ ID NO: 20802 - DNA, 121 bp, Homo sapiens
  chr6:170894912-170895033
  hypo
tcctgcctcagcctcccgagcagctgggtagcagtatatttgtaatggtacataaaataatgtctgtttttaaataaacatttacattgtaaaccaaaagttaactctccatcaatttttt

SEQ ID NO: 20803 - DNA, 140 bp, Homo sapiens
  chr7:85449-85589
  hypo
aatatgggtgggtgtgtcctccgtgagtgtgtgcgtgagtgaatggtgtctgtgtgcaggtcctcaccatgggccgtgtctcgagcacatgtgcccctgcctcggtggaccgcacggccggctgggagacacagcccagg

SEQ ID NO: 20804 - DNA, 90 bp, Homo sapiens
  chr7:88326-88416
  hypo
ctggaggctccagcagcgtcccctgttccactcctagaggcccccacgttcagccagtgttcctggaccctccagcggctgccttcctag

SEQ ID NO: 20805 - DNA, 31 bp, Homo sapiens
  chr7:181307-181338
  hypo
tcgagtttcccctgcccgcagcccccataac

SEQ ID NO: 20806 - DNA, 172 bp, Homo sapiens; identical to SEQ ID NO: 5274
  chr7:193423-193595
  hypo

SEQ ID NO: 20807 - DNA, 30 bp, Homo sapiens
  chr7:207651-207681
  hypo
gcccgtgatgttgacgtgtgaccagtccct

SEQ ID NO: 20808 - DNA, 320 bp, Homo sapiens
  chr7:212481-212801
  hypo
agtaaaggactttgctctctgcgctcatcacggctcggtgagttcctagtacaacgtcgtgaattagagagcacagtgtttctcctccgaggtgctagatgtgcggtgagagggtgtaggtgaggggccggcggtgaggtgggggccagcctggggtgctgcacagcgtgtggggggcgggatcaccaggggaagttttagggtctccgtttctaatagtcgctgaaaagcacgtagccggcacatcaacccaagcgctcctgggtgcttttgctttagggttacgttaagatatttacgttctttttttaaagtcagct

SEQ ID NO: 20809 - DNA, 30 bp, Homo sapiens
  chr7:223624-223654
  hypo
gagccccgtggggacggcacctggtgcctg

SEQ ID NO: 20810 - DNA, 194 bp, Homo sapiens
  chr7:226344-226538
  hypo
gaaggtttgaaaacagatcaacgttaacagcgtgtctcctgcatgggctgactcagaggggcgtgccacaaggcctagtcaccctcacaagagtcccagcgcttaccagccaaggacgagggcccaaggctcagggaggagggagtcgctgtcccgcagccacacggccgcccggctgggcctctcaggtggcc

SEQ ID NO: 20811 - DNA, 671 bp, Homo sapiens
  chr7:287707-288378
  hypo
acacagagcccagcacccaggcgagccgtctgacaggtggagggggagggtgctccacgcagaggcgtggtcgggccttgggtcccgggtcggccctggcagacggcccacgtccctccacacctggtcacctcgcctcacaggacaatcaccacgtcctccgtcagcaagaaaagctctcgccctgcattctccatttaattaagcgagtgggagcctgtggtgtggttcagaaggagttccattaaaagtggctcctttaatttaattttgttttaaatttagccctggaatgagggcaggctttagctatgcaggcagttggtgctgtgtgcccatcagtgaggcatcgccagccccagtccctcaggggcctctcccacccccatcaccgtggggccaggcagagccaccggacctagggctgggtttattcggaggcagggacacagaggcccgctgagccgcacagagcacagaccctcccctgccccgttcttatttggaggcagggacacagaggcccgctgagccgcacagagcacagaccattccccgcccgtttcttgccaggatcctggacttccgccgggtccctcccgtggccggcaggatggtcaacatgaccaaggagatccgggacgtcacacgggacaagaagctctggagga

SEQ ID NO: 20812 - DNA, 259 bp, Homo sapiens
  chr7:290536-290795
  hypo
cttttttaaggggctgaaactcgcctccccaccctgggagtccagggcttcctaagcacgcctgagctccggccgctgtcagcccttgggtcgaccctgaccgcactgtccagccaccgcctcctgccccaccgtccacaggactgaccgcactgcagcccgccatgcacaccctggtgcccacggaggctgggctccgctccagtgatgcctggatgcccgactgcttcttatccacgtctttttacaatttttattg

SEQ ID NO: 20813 - DNA, 666 bp, Homo sapiens
  chr7:292735-293401
  hypo
gggcaattaggaccccagcaccgcacagctgtgtaggggccgggccgcagtcagagcccacatcttctaagccccaaacgctcacagaacacactcccctacttctcacgtaagttaccgtctgcacgttgcaaacgtcccagaggtgcacaggtcatccgtgcacagctttgcatttctgcaaggtgagcgcccccaggaccaggcccaggtcctcagcagctccggaagccactcagcccgacacagcctggacagaagggctttgccatcatccgcttcgccttttttcctgccacggtggcctgggctgggcagggcggtcctcaggactctctccagtgctgcgtccagcttaaatgcaggttgcaggagacacgtttccagcgatggacccagttcgggcacccagagccgctgccctaagtaacagtgtccgccgggcccgcagctgtccagggcacagctgtccaaggtggcagatggcagacgtccgccttgcaaaacgctcctcctgctgggtcagccccgacacagtcagcgaaaggaatggtgggagacgcttgagccgcagggtgaaggagccatcttcgtccttgccaggagccacactcttgcctgtctgcgctctccgggaggccaaccgtgatgccatttcctggtgac

SEQ ID NO: 20814 - DNA, 1289 bp, Homo sapiens
  chr7:293675-294964
  hypo
agctccaagccctcctaaccccgcccgggaggcccctttaatacccgatttggatctgcaaagagaaatggctgtgggcccgagaaatgcctttctcttttaacacgataccatctgaaaccggcttaggcgaggacgggaggctgttaacagcagacgaattttaagcctccagccaatgagcgctcagatgaagattttcctcctgaaatggagctcctgccccggtgggggctgcctcgtccgactgtgggctgccgactaatctgtatcagcacgagacaggattgcagctggtctttccttgatcgttcgttcttacaataatgacccagcgttggcagtggggtgagggggcgcgggaaggagggggcaggcaggtgatcggggcgttggaaccagaccagccgggacctgccgggtgcgtggggtgtggtgggggccaggtcggcctggcacccaccccgtttcctctccgaacctcagcttgttcagctaagaaagggcagccgggaccggccaccctcctgttcactccgctgggaagcgccctgccgaacctgccttctgatcccacggggagcctgccctgcagccaggagagacccctggaatcactcagcctggctgcataggaatgctgggactgggggagctgtgagtgaggttcggggctccggccccaacaaaaccacgttctcaccagttctacagccccaggctttccagagtttctccacaaacaaataaagcaagaaaaactagatttaatcagcaaataaatacaggaatagcgccgtcggccgggcctccagcatcagagcagtgaacccgcactgctagcgggcctggacagcgcttgcatttttctgattattctttctttattaaggtataattcatgtaccacaaaatttaccatttaaaagcgtacagttccgtggtttttagtatatccacaatggtgtgcaaccatcaccactgtctaaatccagaatgtcctgctgaccccaaaaaggagccccgtaccatgagcaggcggtcaccgttcctcaccccgcagccctcgacgagcagcgtcccacccccagtctatctggatttgcctgttctgggcgtttcatattaagagggtcatacgacgtgtggcctcctctgtctggcctccttcgcggagcacagggttctcgggttcagtgagggcttcattcctcttcttgtttcatttcgtttcgtgtcatcgcacggatggaccatgttcacctggcgtgtccactcctctcttgatg

SEQ ID NO: 20815 - DNA, 1142 bp, Homo sapiens
  chr7:295709-296851
  hypo
tgagaagcaccaggcagagcccggcccggccttgggggccgtgagaccacaggtgaggacgcagccctgtgcggccctggtaacccgcagcctgtccctccccagccaacaacatctgcttctacggcgagtgttcctactactgctccacggagcacgccctgtgcgggaagccagaccagatcgagggctcgctggcggccttcctgcccgacctgtccctggccaagaggaagacctggcggaacccttggcggcgttcctaccacaagcgcaagaaggccgagtgagtgcggggccggggggctggcgtccggccaccctacggcagagggagctgggcctgggcgggcatgggagggtcggcgcccacgggggtggcagagatgggtgcagagcctgctgtgcgatgctggcctgtgtgagatgaccgcttcctgatgagacggtggcagagggcgtccttactccagtatttccatgtgcttccctgacccgggccggcctgcccaccaggtccctcgaatcggggcctctcagcgtttgagctctgctctcgccccgtccctctcctcactcctgcgggagaaacggcccctgttctttccgccccacgttgtcctcgtgagtgtgtagtccaggtcctgtttccccacagagactctgcaaaaaacacggggcccagaggtgaaggcagctccaggtggggtcaccccgaggcagggcagagcggctccgtcccctcccacacccgtgctcccgctaatgcagcctcagcgccgcagcccgggcgggtccatctgcagacgccaaggtccctgccgcagtgtttctcttctgctcctcatggcacgcgccgggctccccagaatctggcctgggccccccgtctcacgctggctccccgcaggtgggaggtggaccctgactactgcgaggaggtgaagcagacaccgccctacgacagcagccaccgcatcctggacgtcatggacatgacgatcttcgacttcctcatgggtacgtcccgcaggggcacggggtccccgtgtcactcgccttgcgtggagcggatgcacgcagggctctgcagggcacactccgtggcacggcccggctgcggtcctgtggcctgtgaaggg

SEQ ID NO: 20816 - DNA, 675 bp, Homo sapiens
  chr7:298604-299279
  hypo
ctggaaggtttgggaagtattcgcacgacgagctctccatcctggtgccgctacagcagtgctgcaggtacagcccctgccggagccggctccagctccaccctcctccctactgcgcaggagacagaggaggccacagccttccccaccccaccccggccatcacatgggagagaaaaggccccgaattcaaccacagccctgaattcaacccacaccctcactcggcggcctggaggcgcagacctcacccgcccaccaccccaggcccatccagctcgagccccctcgggcctccactctgtgtccgtcctgccaccccagttacagagagagctcgaggccagggcagacgccagctgagacacagggaccctgctcccgcacgcagctgccggtctctgccactgccaccttctgcgggggttcagaccccctttcccccgtttcatggctggggacgcaggcttgcagggcaaacgctttgtacttctctaaggaggcatcacagcgcccgtgttgtgcggatgtgctgagctggggtcggtctcctgggtgagtgggccgccctcctcacctccccatcctcctgggtgagcgggccgccctcctcacctccccatcctcctgccgggcccctctgggaaatacaccggccaccacatcctgcaaggg

SEQ ID NO: 20817 - DNA, 156 bp, Homo sapiens
  chr7:299915-300071
  hypo
cactgagcacagagccgcctcggcgaggtagtgtccgccggccgctgcgctgcccgggacggagacagaggcgccggacctcccagcaagcgcatgcgcccgtcgtgaattcagtgaattcagaggcaggacgggatcatccggagtcgggagctg

SEQ ID NO: 20818 - DNA, 329 bp, Homo sapiens
  chr7:300400-300729
  hypo
cctttctccttcctggggcctcggctcctggagggctggagggtctcgtctgaggacgggaggaggctctcgctggacgtctggcctgtgcgctggtggacggatgcctacgtggttttggaggacccgatgaccaggcgtcctgcgagtccgcccgctggcctgcagcacccacctcggacttggctgtggacggttggtgcaagtgcatcctgcagggctggctgtgcgcagctgtgggctgacctttgcagagttttgtggaatagtttgcaatgtcataaaagtgcaataaaggtacagcagatgtgtgtcggcctcacggggcg

SEQ ID NO: 20819 - DNA, 30 bp, Homo sapiens
  chr7:300952-300982
  hypo
cgcgacccaaagctgcggcggccccgaggg

SEQ ID NO: 20820 - DNA, 140 bp, Homo sapiens
  chr7:328540-328680
  hypo
ctgggattacaggcgtgagtcaccgtgctggccgcgtttttagttttgacatccgattaaggggacaatacggagtcactgaagtgtgtttcagcttgagtgtgactcggatcccgagcgaggccaggcagccacagtgc

SEQ ID NO: 20821 - DNA, 35 bp, Homo sapiens
  chr7:339203-339238
  hypo
ctggtggactctgtgtcgaacgagtcacgttcagc

SEQ ID NO: 20822 - DNA, 292 bp, Homo sapiens
  chr7:345229-345521
  hypo
ggcagccactgtctttttcaacgctgtttgtacagagaaaggggtgcacagagccgtggacctgcagctcctggagcttcccggagctggtcctccagtagaggtgctggggatggggggacgcagccacggccttcatgcaccaacctggggtctccacgagcaaactctgtgttcaaggaggcactcggcctggggacgcggtgggaagagctatcggaggagcccctcggagctgcctcagcacagctgatgaaagcaatcagcgcccgcctgagctggatgtaaaggt

SEQ ID NO: 20823 - DNA, 206 bp, Homo sapiens
  chr7:380935-381141
  hypo
gtcctcagctaattacatctgcgaagaccctgtttccaaaggtcacattcgagggtttgggtgggcacgaattttgaggggataccgtccgatccggtgcagggactttccagccgcaggctctagggaaggctctgtgctaaaatgcatccccggttcacactgcagggcaggagtgtgcgggcggaaggagccatgctgttgag

SEQ ID NO: 20824 - DNA, 31 bp, Homo sapiens
  chr7:396925-396956
  hypo
gttgacagacagcgtccggagcaggctgctg

SEQ ID NO: 20825 - DNA, 119 bp, Homo sapiens
  chr7:414909-415028
  hypo
taggatgtctcacaaagggtacggggtccgtgtcggcacccacgccaccaccggaccagctgggagatcccgggctcagaggcagcctctgccccagcgtctcctgtgcagctggagac

SEQ ID NO: 20826 - DNA, 31 bp, Homo sapiens
  chr7:416864-416895
  hypo
catgagacccaggccccgaggtgcaagggtg

SEQ ID NO: 20827 - DNA, 221 bp, Homo sapiens
  chr7:418416-418637
  hypo
cattaatttatttttcattcacgaagaagcccgtggggtacaactgagttagagacacaggacgctgcgccggcggtgccagctcctgaacccggccacctgcagtcactcacacgtcctgggagctgacaagctcagccccactgcgtggcggcccagggccaagggtgtggaggctgccccgtctgcgcccatttcacgactgtgggactgctccacac

SEQ ID NO: 20828 - DNA, 147 bp, Homo sapiens
  chr7:429736-429883
  hypo
tggtcatgtctcagaacggtgagaagggacagaattcccttgataccctgtctttttccggagccacactagtgtgcttgtcagatgtgtggggcttagaatccttgcagtgggtcagccccgccctgacatcggcactgtcttagc

SEQ ID NO: 20829 - DNA, 457 bp, Homo sapiens
  chr7:469754-470211
  hypo
aagagaggcccatacactgcacgtcctggcgttaaataacaccgccccggctgatgccccgtggaactcgcagagtagcctccgtgctcccgccgtgacagacttcacaccagcctggacgttcagactcaaggttagaaatctcagcttcccgaggacacacagccatgcctcctgcctccctccatcgcctccggcttcactctcacgggaagggggcttcgggatgccgggcccgcactccgagtggccatgctgggtccgggtcctgcacagagcgcccttggctgcccccacaccaggcccagcaccgcaggcagaggacttggaagaggaagacacgtggtgctcgtgggacctttggggcaggagcctcgggaaccccagggccttgaggtactcaggatgggattgcgaaggcagctcaggcctcagcggggctggaggggaactacag

SEQ ID NO: 20830 - DNA, 118 bp, Homo sapiens
  chr7:479136-479254
  hypo
gtgctgcaggtgtgatggacacgcacaattggctaattgcaagtgctgcagatcacgagatgtggctgggcctcagctgcagctgaagatgaacgccgaggcttcctggagaaggatt

SEQ ID NO: 20831 - DNA, 159 bp, Homo sapiens
  chr7:480949-481108
  hypo
aggccgcagcacataacgaggtaggaagagccggagaaggcctggctggccctgggagacacgtccatctcactgctggttcataagcatgtgggcacccgggaagctggagcgtggcctgtgtgacgtgggcgcccaccaccacgatgaggccggttc

SEQ ID NO: 20832 - DNA, 36 bp, Homo sapiens
  chr7:485247-485283
  hypo
tggccccaccagccagcgccccgtcaccagcacccc

SEQ ID NO: 20833 - DNA, 455 bp, Homo sapiens
  chr7:503582-504037
  hypo
tctcatttcacagtttcccatcgagccaggtgcacagcagctgcggtgggcatggcgggcgcgggtcctggggaacaccctctgctggcgtccgcagcccgggagggagcgtgaagtggaggatctcggcaggcgtggctgtgtccaggcaggcgggtgctgccgcgtccccggctgcagggtcttggttccccggagccacaggacggcagggcttcacggctccccggaggctgggtcccagcgctggggaaggacaccgggccctgagggccaacgccaaacccagacgacgttcaaatccagctttccgagcaaggctcacaccaccaggaaagccgatacactttctaaactccacttctgagttgaatattcgaaataggctcttaaagcaaatgttggcccccacgtcagagtcaaccatgttcatcggatgcctccagccccaccaa

SEQ ID NO: 20834 - DNA, 31 bp, Homo sapiens
  chr7:526252-526283
  hypo
tgcctgcatgtgaatgcgtgtgaatgcatga

SEQ ID NO: 20835 - DNA, 251 bp, Homo sapiens
  chr7:531347-531598
  hypo
caccccagggagaacgggagcagcctcaaatgctgacggcgaagacccagggcccccagaagtgcgagggcctccttcagtgcccgctcggggccagggactctgccaagtgacctggtgtgcccagaaaggactcagcccccagcgctgggcagggcaaggtggcctgggaagtccttcagggagggcaggcagggacgcttcaagagcctggggtctagaggtctcatggtgccggccctcaccacagc

SEQ ID NO: 20836 - DNA, 31 bp, Homo sapiens
  chr7:532562-532593
  hypo
ggatcctggaacctcccggcattcatgtgtg

SEQ ID NO: 20837 - DNA, 76 bp, Homo sapiens
  chr7:545345-545421
  hypo
gcccagagtcacacagcgttgaatctccatccctagcctgcactccttctcacctctttcacggaaagaaagccta

SEQ ID NO: 20838 - DNA, 252 bp, Homo sapiens
  chr7:551452-551704
  hypo
acaaaatatcccccaaatggacgcgggggtggagccctggagccaggtgtgagtggggcggggcacacgggtgtggtgagggtgtcggggggcagccgccggacacagcacgcgcgtccccaccagttcagcagccggcgcaggagcacgatgcccacactgcgaattggaaattaggcgcgaccacgtttccggcaaggctcctggggacaggccccgacaagacagggcgcttaaggaatttatgatggc

SEQ ID NO: 20839 - DNA, 293 bp, Homo sapiens; identical to SEQ ID NO: 5277
  chr7:557697-557990
  hypo

SEQ ID NO: 20840 - DNA, 31 bp, Homo sapiens; identical to SEQ ID NO: 5278
  chr7:559434-559465
  hypo

SEQ ID NO: 20841 - DNA, 82 bp, Homo sapiens
  chr7:578809-578891
  hypo
tggaaggacccttccagctggcggggggctcccgtttggggacaagtgcctcagctacgccggtggagccttggtgaggaac

SEQ ID NO: 20842 - DNA, 30 bp, Homo sapiens
  chr7:601254-601284
  hypo
cccggctggccgagacggaactgatgtacg

SEQ ID NO: 20843 - DNA, 359 bp, Homo sapiens
  chr7:601503-601862
  hypo
gcccccgcctgcatgccagagtgaggcaggcctggccccgtgtgagacgagcctttccttctgcaaacccagttatcccctcggttgtctctgcagccaggcactgtccgtcccgggacctacgcagctgccatggaagctccggtgggtgctcccggcgcggccggggggtgggggtgacgagatgcctgtggctgcgccagcaaccacggttaggtgagaagcgtggaaggaaaggggcatgtggctgcccgggccttgccctcaatgcccttctgtggcccagttactcccggccatctgtgtgggagtctctgcaggttccggggaaccagggcgagcacaggccccaggctaca

SEQ ID NO: 20844 - DNA, 31 bp, Homo sapiens
  chr7:635125-635156
  hypo
gcaggtggggtgtgtgcggggagggcgtgga

SEQ ID NO: 20845 - DNA, 37 bp, Homo sapiens
  chr7:636568-636605
  hypo
ctgggcgctgcggccgagctgcgcctgggaaggagcc

SEQ ID NO: 20846 - DNA, 30 bp, Homo sapiens
  chr7:637207-637237
  hypo
agagagtacccacccgcgcgtgcagggata

SEQ ID NO: 20847 - DNA, 123 bp, Homo sapiens
  chr7:653115-653238
  hypo
gtctgaggaagcgtacgggatcagaaccagcagctccgttcacagccaaactcgccttcaaaaggcaaggagatggcgcgccaagctcagcccctgaaatcacacacgcggggttgaacgtga

SEQ ID NO: 20848 - DNA, 182 bp, Homo sapiens
  chr7:653563-653745
  hypo
gtgctgggaggtccccgcaggggcaagcagggctgccaccaagcgggtgggagacacccaaggactcgtccaccacccagggaaccggactgtgaggttcaggtcagcatggagggcgggaggcgtggcgcccacagaggggaggggagccaggcccagatgacagacgcctgcagactcca

SEQ ID NO: 20849 - DNA, 30 bp, Homo sapiens
  chr7:667614-667644
  hypo
ctgactgtcactcacggaacaaacacaggc

SEQ ID NO: 20850 - DNA, 30 bp, Homo sapiens
  chr7:671741-671771
  hypo
ccctcctgcgcacacgcaacagagcctggg

SEQ ID NO: 20851 - DNA, 27 bp, Homo sapiens
  chr7:675555-675582
  hypo
aaaagtaccagcaccgcgcccacacat

SEQ ID NO: 20852 - DNA, 30 bp, Homo sapiens
  chr7:768551-768581
  hypo
agccgtttcccagacgggccccaagtagtg

SEQ ID NO: 20853 - DNA, 30 bp, Homo sapiens
  chr7:778947-778977
  hypo
cgtcgtggcaggtgcggccgtggcaggtgt

SEQ ID NO: 20854 - DNA, 30 bp, Homo sapiens
  chr7:794470-794500
  hypo
attccagtcgtggtcgcggagctgtaactc

SEQ ID NO: 20855 - DNA, 30 bp, Homo sapiens
  chr7:799678-799708
  hypo
ggctcctccagctccgagggagacggggcc

SEQ ID NO: 20856 - DNA, 50 bp, Homo sapiens
  chr7:803319-803369
  hypo
attatcctggcaggcccggcctgtgtggttcttacgcgtgagggggatag

SEQ ID NO: 20857 - DNA, 676 bp, Homo sapiens
  chr7:808522-809198
  hypo
cagaaactgggtcagaagcagcgtggttctcgtggcagggcggcacttggcccaagactcgtgctctggcgggaggctcaagtcaggcgtcccagcagcttcggtgcaacgcctcctgcccggctgcgtggggaggccctccaagacaccagctggtctcaccgcgaggcctgacttcgagccagagcagcgagtacattgcgtctccgtgtggcaagggcaggtgcgggggtctcagtccactaccgagcagcctgctctgatgactggcggcgccagggagaaggctcacatcgcgaggtccccagcaacggctcaaggtgactcacagttgcttggataagccagtggacgctccctctacactggcccggggccagagcgcctccttctgcggccccaacccagtccccaccctgagccttcagctcctgggcctgcaggctgagcctggcaggagacgctgcagggactctcagagctgtccttgccctgtcattcatggagacttacagggaggcggggcggccctactgcagtggggaccccttggggcgtaggatgcacagtgcaggcgcccaagcctcgcgcccaccggagagcagccacggtgcaggagcttggccctgagtgtgggcggggtgagggctgcaacgctgagaagcagatattaaag

SEQ ID NO: 20858 - DNA, 31 bp, Homo sapiens
  chr7:810520-810551
  hypo
ccaagtctgaggtgggcgtgtgcagtgaccc

SEQ ID NO: 20859 - DNA, 246 bp, Homo sapiens
  chr7:818257-818503
  hypo
gccagcaggaggcctcggaggatcctgtccgggcccatagatgtttgctagcgggacaagcttgggtgagttgagcatctgactccgtccttcctcctgagacacgtgcagcgagggcacccactgtgcagcgagggctcccgccgtgcagtgagcataccccctgtgcagtgagggcacctgccgtgcagtgagcataccccccatgcagcaaaagcaccccccatgcagcgagggctcccgctg

SEQ ID NO: 20860 - DNA, 253 bp, Homo sapiens
  chr7:819400-819653
  hypo
tcaggggtcccaggtcgccaggagcaccttgcatgtggctcgggatgcacggagtctcccgtgaggtgtgggtttcttaggaccccagggcaggtgtcccatgggagtatgaactaaatgcctttgtggacgtttagacgtgaaatgtctgctctagactcacacacctgtctcgctccctccttccagaactcttaaaacgcctagatgacgtgtccaacgatgtgaggatggcagccgcctccaccttggt

SEQ ID NO: 20861 - DNA, 944 bp, Homo sapiens
  chr7:834224-835168
  hypo
ccagtctgcagtgcagggatccgggtccaggggatgtctctgagcccccaatcctttacggggccttttcctggggtccctgtgggctccatcccgggatgcaggacagagatgtgggatgcggaagggttccccgcagggatccaggtccgggggcaggaggagcccagagggtggcaccatcacgcaaaggcctccagaggcgtggcccgggacaagcacagcgccagccgcctgcgctgccagggcagggtccacacccacagactgtaacctggacccgggcagggcggggtccacacccacagactgtaacctggacccaggtggggtccacacccgcggactgtaacctggacctgggcagggcagggtccacacccgcggactgtaacctggacccgggcagggcggggtccacacccttggactgtaacctggacccgggcagggcggggtccgcacccgcggactgtaacctggacccgggcagggcggggtccgcacccgcggactctaacctggacccaggcagggcagggtccatccacacccacagaatctaacctggactggggcagggcctaaacccagggactctaacctggacccgggcaggggaagggtccacacccgcagactctaacctggaccagagcctgggagggtccacacccgcagaatctaacctggacctgggcagggcagggtccacacccacagagtctgtctaatctgcagaggacaagggtggggtctcccacagagccagcctgaggggtgggtgcacctgaggggtgggcgcacctgaggggtgggctcgtcgccctctgcctcatgctggcaggacccgagaggcctgggagtgctgggaactgagaaacagtcatcaccaattaaaagtcccgctgccttttattaacaccatgcgtcacccttctgta

SEQ ID NO: 20862 - DNA, 16 bp, Homo sapiens
  chr7:842534-842550
  hypo
aaagaaagaaaaaaag

SEQ ID NO: 20863 - DNA, 30 bp, Homo sapiens
  chr7:878052-878082
  hypo
tggattaaatctcacgtccgcgtagtgttg

SEQ ID NO: 20864 - DNA, 123 bp, Homo sapiens
  chr7:882989-883112
  hypo
ctgccattcagggaaacggggatgtgggagccgccgccgccaccgcgcacaacggcttctcctgcagcaactgcagcatgctgtccgagcgcaaggacgtgctcacggcgcaccccgcggccc

SEQ ID NO: 20865 - DNA, 31 bp, Homo sapiens
  chr7:897565-897596
  hypo
gtgagacagtggatgccgtacaagaaagagt

SEQ ID NO: 20866 - DNA, 54 bp, Homo sapiens
  chr7:899730-899784
  hypo
ataggacatttgtgtccgtctgctgttttactaggtggacgtgcaagtcagaga

SEQ ID NO: 20867 - DNA, 31 bp, Homo sapiens
  chr7:900163-900194
  hypo
cgtgcctgggcagtgccgtgtgtggaggggg

SEQ ID NO: 20868 - DNA, 37 bp, Homo sapiens
  chr7:902909-902946
  hypo
tggagtgccgccctcccgagctcgcccttgctgcccg

SEQ ID NO: 20869 - DNA, 30 bp, Homo sapiens
  chr7:906025-906055
  hypo
tgggtcttccgtcacgagagtggcagctgt

SEQ ID NO: 20870 - DNA, 378 bp, Homo sapiens
  chr7:907724-908102
  hypo
cagctggcatagaggagaagccggcgggtacgtgcccatcgttcaccatctcttctaaacacgaatgaaatgcgtgtgtcgtcctcacacactgaaggcaggctgcgtgcacggtctcctcctccgttgcgcacagcaacgtggctgcctgggcgcagcgtctgcaacttgtcagtcagtccctgtgtgtgcctggggacgctgtgctgcgaacagtgctctccggtcacatctgccctgcacctggaggtgggggtgcgatcgcaggccagaggcagatgtgtgcgcagcaggccgaccttgccaggctgtgcttctggggctgcaggctgcaccgtggccgggttaggttagaacgtgcattttcccagggcatca

SEQ ID NO: 20871 - DNA, 64 bp, Homo sapiens
  chr7:915323-915387
  hypo
cagggaaggaccgcaggtggcctttcaaagaggaggaacgcccctcagcgatcctaagaggttg

SEQ ID NO: 20872 - DNA, 265 bp, Homo sapiens
  chr7:920912-921177
  hypo
gtcaagacacagaagataccacggcactgtggggctctgcaaccaggcctcctcgcccccactcccaccccaccccaccccatccccggcacccgtgcatctgcgggctgcacttaggtgaggtggtgtttcctggagttttacgtatgtggaatcacagtgcgcactttctgtctaaccgcttgaattcattcaccacggaggctgggagactcctcctggagcgtccgcagttccttttatcgctgagtggttttccctgtgt

SEQ ID NO: 20873 - DNA, 30 bp, Homo sapiens
  chr7:924949-924979
  hypo
acgcctgctgctctcgcaggcaggggctct

SEQ ID NO: 20874 - DNA, 714 bp, Homo sapiens
  chr7:925626-926340
  hypo
agatgagcgggggagcgcggtggcgagggcacgtgggcgtggctcacggtctcctctctgtggcaggtacatgtcccagagcaagcacacggaggcccgggagctcatgtactcgggagccctgctcttcttcagccatggccaggtaagccgtcttgcttcctcctgcatccctttctgctccgggcaggcaagtggaggtgggaatgacctcccacctccactgatgggcaaccttgcgctgccctgggcctcggccactggggctgtgggtggcagaggggcccagagtcccccctggcttggctgctccactctcaagactggggctctgcgctgcgtttgtgcacgatggggctgagagggcgttgtgttggtataaacgtccccgtccattttcatgtgattctcggccaggagctctctttttcggcggcattgccaagggacgtggtgctcagaagagactcctcagcaccggccgcactctggcttctgctggaaacccagccttgtctttgctgtcctgaacaggtcagggctttgttcttgattcttgtgtgttgctttctcttgtagcaaaacagtgcagcagacttgtccatgctggtcctggagtccctggagaaggcggaagtggaggtggctgacgagctgctgggtgagcatccggcccttcaccccgggaccctgtgacagcggccccagtacgcc

SEQ ID NO: 20875 - DNA, 69 bp, Homo sapiens
  chr7:931094-931163
  hypo
ggccaggctccgggcgctgtctgctcctgcgtggtcccttccgccagctcgggcgctgtctgctcctgc

SEQ ID NO: 20876 - DNA, 196 bp, Homo sapiens
  chr7:943816-944012
  hypo
ggtgacctgcaggccgtgggggtggccgatcttggccggctggaaggtggcgttcaggtgctcgatcttcatcacggccttgggctccttggcctgagaaggggtggggtctaagcacctcacaggggccgtcgtccaagctcaagggagcaggaagggcagaccctgtgggtgctggcggcgcacctgctgtgct

SEQ ID NO: 20877 - DNA, 30 bp, Homo sapiens
  chr7:955104-955134
  hypo
tgggcttcagaggccggcaggcaaggccaa

SEQ ID NO: 20878 - DNA, 489 bp, Homo sapiens
  chr7:959703-960192
  hypo
gactgagccactgggccaaggcggcctccgacccagcacacgccgctctctggcccggaccctggacatctcaagaggctcatagggacccccggcagactcgagccgcccctctgggcacaagatcccggaagaaatgcagggtcagcctcctgcccgggacgcttctcactctgatattagtttattggtttcttgtgcgttcggcccccggagcatcaggcctcacgttctgcacaagcgttcccggtggacgggctggtgcctcccctctccttcccaccttggcctcagctgatgccccacagggctggggtacaggggttgagccaggcccccccaccccgagtcacacgcccctgggccctccccgaccctccccacctcgttggaccggatctgggaagtggccgcggcgccgccctccacccaccgtgctgccaccttgcaccccccgtgccgccctccacccgccgtgccgccctccac

SEQ ID NO: 20879 - DNA, 171 bp, Homo sapiens
  chr7:965966-966137
  hypo
accttcccagccccaccccagcgccccccgccccagaaccaaagcccggtggtggccagcagacacaggcggcacctcggggtctgggggacgcagctgcggctggcttctccccgaccctgtgggcggcacccaactccccaccctgccgggtcctcccggggccatctc

SEQ ID NO: 20880 - DNA, 288 bp, Homo sapiens
  chr7:986234-986522
  hypo
atggcgggaaccccacggtgaaggccatccccagtcctccctggacccaccctgtcccggagcccactctctggggcccccaccccgcgcccctccaggctcttcagggccctcgcacagggccgactcctctgcggcccatctggtctctcggctgtcaaaccctatttttggaactcgatagaggtggtggttgaacagcatggagaacgttctaaatgccactgaattttcactttgaaatgattaacctgaggccgggcggggcggctcacgcctgcaatctca

SEQ ID NO: 20881 - DNA, 31 bp, Homo sapiens
  chr7:986581-986612
  hypo
acatagtgagacaccgcgactccatccttat

SEQ ID NO: 20882 - DNA, 30 bp, Homo sapiens; identical to SEQ ID NO: 5283
  chr7:1001896-1001926
  hypo

SEQ ID NO: 20883 - DNA, 615 bp, Homo sapiens; identical to SEQ ID NO: 5284
  chr7:1007447-1008062
  hypo

SEQ ID NO: 20884 - DNA, 114 bp, Homo sapiens
  chr7:1026934-1027048
  hypo
gggacgagggatggcgctgccacccaagcggcccaccctttgccccaggccgggtgcaggaggagctagaccgcgtgctgggccctgggcggactccccggctggaggaccagc

SEQ ID NO: 20885 - DNA, 350 bp, Homo sapiens
  chr7:1029952-1030302
  hypo
gcagtgtgacagtggcgcgtgtgctgggggcggtgtggtcggcagtgtgacagtggcgcgtgtgctgggggcggtgtgatgggacacctgctgtctgagacggccctggcccccgtcccagcgctgaccatgcacgtgagcggcaggcggcccctcaccgagaagagaggataagccgtggcacattcccacctgcgccacgtgaagcggcgccccaaggccaggacgtggtggccgggacacacgggtgcacggcaggcctcacactcccaggtggggccgcagggtccctaagtcatgggtggggctgctgctacggaggctgctgcaaggacgagaaggggacggag

SEQ ID NO: 20886 - DNA, 30 bp, Homo sapiens
  chr7:1037328-1037358
  hypo
cctcatccagctcccgcatcagggcttccg

SEQ ID NO: 20887 - DNA, 166 bp, Homo sapiens
  chr7:1052678-1052844
  hypo
ggaatgggagcagcgcgggagggtggtggggccgccaggatcgggcgtggtaatgccgggacctgctgcttgctctgcttggcctgcacagtgtctggcccggagagcacaggtgagcaaggtaggacggctgtcacccacagacgagcagcggagaactttctct

SEQ ID NO: 20888 - DNA, 71 bp, Homo sapiens; identical to SEQ ID NO: 5285
  chr7:1069636-1069707
  hypo

SEQ ID NO: 20889 - DNA, 121 bp, Homo sapiens
  chr7:1071762-1071883
  hypo
tcccagacacaccacgccccagagaatgcagggtagatgggccccagatccagagaactgctcccggcccacggggctgccccaacacgtccctcgcactcggcccgcctgaaaataaagt

SEQ ID NO: 20890 - DNA, 133 bp, Homo sapiens
  chr7:1086193-1086326
  hypo
ccagtctggagagtagaataacgtttcgctccaatttgagatcccaaaatgagatgctgcccgggaccagaagtcagtttcttaggagcgtgctgtctacccaggagcctccgtgtgcaaacaaaataccccc

SEQ ID NO: 20891 - DNA, 39 bp, Homo sapiens
  chr7:1097389-1097428
  hypo
cccctgtgcacctgctcggccccccgagctcccggtggg

SEQ ID NO: 20892 - DNA, 45 bp, Homo sapiens
  chr7:1113682-1113727
  hypo
ccgtgacccccgaccccgacaccctgctgccgtgatgttccccca

SEQ ID NO: 20893 - DNA, 163 bp, Homo sapiens
  chr7:1115544-1115707
  hypo
tttattaaaaaaaaaaaccctcctgacctcaggtaggaacagcagagtctgagtcaccaaagcccggggctgccactctccagggcgccccactcccagctccagcggctgagtccaccaagccaggacaggcccaaggaccagagggcgaggtgattcacag

SEQ ID NO: 20894 - DNA, 179 bp, Homo sapiens
  chr7:1124307-1124486
  hypo
tgggatctcacagaaccgtgtagacccacgcacccccactgtacagatgggcactgaggctcaggaaggttagagacgttgcccggtatcacacagcacgtggggtgaggaagtggaacccgggctggagccggcaacgctgaaaaccagggttgtttggacggcgacatgcaactccc

SEQ ID NO: 20895 - DNA, 30 bp, Homo sapiens
  chr7:1132119-1132149
  hypo
ccggcggcagaaggcgctccgcatgatcct

SEQ ID NO: 20896 - DNA, 31 bp, Homo sapiens
  chr7:1142124-1142155
  hypo
tcacttccacaggggacggtcttgcttcttt

SEQ ID NO: 20897 - DNA, 31 bp, Homo sapiens; identical to SEQ ID NO: 5287
  chr7:1147466-1147497
  hypo

SEQ ID NO: 20898 - DNA, 82 bp, Homo sapiens
  chr7:1225089-1225171
  hypo
acctctcccctgcctcggtctcccgacctgccatgccctgaaaggatggcgcctctcagcgtggcgacgcggaccgagctgt

SEQ ID NO: 20899 - DNA, 30 bp, Homo sapiens
  chr7:1303423-1303453
  hypo
cacctccgcaggcagcgcgtcccccgcaca

SEQ ID NO: 20900 - DNA, 96 bp, Homo sapiens
  chr7:1308345-1308441
  hypo
ccctggccaccctggcccttccggctgccggctggggacgcgggcgtggtgcggcaggcctgccttgattgtgtcgatgggagatgattttcaagg

SEQ ID NO: 20901 - DNA, 30 bp, Homo sapiens
  chr7:1315851-1315881
  hypo
cctctgcccgctcccgcgcctcacctcgct

SEQ ID NO: 20902 - DNA, 305 bp, Homo sapiens
  chr7:1333574-1333879
  hypo
tacagtgggaaggatgctcctcgccgtcataaacccgcgtgcaccgcgtcactccccgggcgccgagttccgccggcctggcacgggctcacgggcacccttggcccccgaggggctgtgggaccccgggaccgggtgctcgctgagggacggcccttgtctgcggtcatccctcccctcctgagtggaaggtgatgccgtgggcccagggctggctgcgtctgccaggcatgccctgcattcaggcagaactcgagggaggactcatctccaaacagaagagcgggcagcaagtgccactcagg

SEQ ID NO: 20903 - DNA, 395 bp, Homo sapiens
  chr7:1347153-1347548
  hypo
tcaccccccaggagccatgaacgtctcctgcccccgccctggctccaccatgaactccgagcctgcaacagtgtgtccaccatcttatccagggacgtggcaagggtcaaaaccagtcgatggtgttcgatgggggcccgatgtgtgggttggaccctgatatcggaggcgccatgcctactgcttagcgaaccagcccttaaaaccaggactctcccatgtggggcgatgcagtgagacaagaggcaaccacgttgctgggggtgccgaagccaggccagcccttatggagagtgactcggcaacatgcactctgcgccatggaaatgctcagcacctctgacccagtgacgccgcctctgggatgctcttccgggggaaattatccacaatat

SEQ ID NO: 20904 - DNA, 232 bp, Homo sapiens
  chr7:1351443-1351675
  hypo
gccatgggctggggcagcagccgtagctgggcggtgtgggcagggggctggcaggcgccggccgcggctgtctcctccagggcctgctgttgtggcgtctggccgcggcccagcaccgccgtcatctgggctcagctctctctgtccgcggggctgtctccctggtggtgccggccccagagcgcatggccacagccagcctggtccacccgacattgaagcctccctgtca

SEQ ID NO: 20905 - DNA, 155 bp, Homo sapiens
  chr7:1370321-1370476
  hypo
tgaggtctggacaggcccttccgcccttccggatgccagtccccctgcttgtctgaccactggcccgcctgcccacggggcggctgagatgctggcgtgtgcgtgcgcatgtgcacgtgtgtttgtgtgcgcgtggggctttctgacagccgata

SEQ ID NO: 20906 - DNA, 12 bp, Homo sapiens
  chr7:1370977-1370989
  hypo
gattctgggagc

SEQ ID NO: 20907 - DNA, 211 bp, Homo sapiens; identical to SEQ ID NO: 5295
  chr7:1408559-1408770
  hypo

SEQ ID NO: 20908 - DNA, 12 bp, Homo sapiens
  chr7:1408874-1408886
  hypo
cgcggaccccgg

SEQ ID NO: 20909 - DNA, 140 bp, Homo sapiens
  chr7:1451099-1451239
  hypo
ctaattaagaagtgttctctgcgtatccggggtgttcgaacaattgtgcggcgccgacgatgcaagctgttgacctgcacagataaaccgtgcgtgcggaggaatcgggggcggcggacggggtggggggagtgtacatg

SEQ ID NO: 20910 - DNA, 358 bp, Homo sapiens
  chr7:1460651-1461009
  hypo
atgtgtgtgatgtgactgatacgtaacacgcatcccatgggcgtcccgtgccaggaattgagggggccacaccctactcaacgcgggggacagtctccgggctccgtggctcacggatggtggagcgtgtcatttcccgcatgtgacacagagtgcggactgtgcagaaggcggctctgtgcctcggaaggcagggtgcagaggcgtgcagcgctcaccacggggatgcggccggctcctgggacgggacctggaacgcggatgtggccggatgtttagtgggtgccgtgcacggtgtctgacacatcagatgtgatgtatacctcgcacgaaagacgttgtgttcatcaacaaatca

SEQ ID NO: 20911 - DNA, 588 bp, Homo sapiens
  chr7:1473772-1474360
  hypo
tccagcctgtaccgacgtctcctctgaggctcccaccagcccatctgtgccaggaagctatgaaagggcccaccttcgagggccaggccctgagagggtcggctcctgcccgaggccacagagcacgtccgtcctgcaggcaagagctgggaggcaggcgagaccccaggcaggtgcggggccgcccaggggcaccgaggcaaacacggaggcacgtaggagtccggggccatgtggtcggtttctttattgagaccacagacggtagcgcaggtccctgctgtccacatgccccttgtagggacaggaggcccttcccgagtccaagtccgaatgccgggtccgggccgagcccacggccccgagtacaagtccgggttccgggtccgggccaagcccatggccccgagtccaagtccggatgccaggtccgggccgagcccacggccctactggctactactgggaggggctgcttttgctttttggtgaccagatcttggacaagcggaacttggacttcttcctctggaggcctaggggacaggtggacagtgaggccgtgctcaacgccgcagccgcacagcc

SEQ ID NO: 20912 - DNA, 320 bp, Homo sapiens
  chr7:1475084-1475404
  hypo
cctggacaggagggcctgggccgaccacaccggtgacctgggacaggagggcctgggccgaccacacaggtgatgtgggacaggagggcctgggccgaccacaccagtgacctgggacagaagggcctcggccgacccatgccaaggccccgtcacgctcccagagggtctcatagaggtggacttcaggtgccgacccagaatgccatgtgctggacccctcatgagacgagacaggaaagctgtcggggacagtcacacagtccgtgcaggagccaggagacgcacgtggccttggaagttcaagttaaaaactaaga

SEQ ID NO: 20913 - DNA, 558 bp, Homo sapiens
  chr7:1476252-1476810
  hypo
ccagtcagcatagacaataaccgcctggtcagaaagttctacggggctggctgaccctgagggccgggagcatggaccaggcgacctggcctggctgggaggggcccccggcacctgcccctcaccggagccggtcctcgtccagcgagtccacgatgtcactgcggtcgttcacggtgctcacgtactgctccagcagctcctgctcccgccgccgctcctgcagtgacttcagagcctctgtggggatggctcgtcagcaggagccccccccaccactgccatgcccctcacaggacacaatgtccccaccacccaagcgccaggctcctcttttggaggaagaaggtggggtcttggggggatccggagcagaatgaatgagtgaataagtgaatgaaggaaggaacggccacgtcagagcccgtgtgctgggatccttccccatcatctcgcagaaacaccactcgctgcagagatatggacactgaggctcagggcgtcgctgtccctgcagcacagcaaggaaagggcagaggcagacggcctgggcctgtg

SEQ ID NO: 20914 - DNA, 1024 bp, Homo sapiens
  chr7:1477029-1478053
  hypo
actcaaacgtgggctcgcctggctccagggaaggtctcaccaccaggacagtcaggtggcctcacagagccggcccccagacatcctgggctccgcggcatccctggctggggccccttggctggcgcgcgggggacgcaccgggcttggccatgagccggcgcagctcgccctcgatgtccagctgctgctcctccagacgctgggccttggacctgccgcacagacacgcgtctgaggcctgactctgccgccctgtcccccgcctggcccgcccagcccgcaacgaggtcctggacctgccacacagacacgagtctgaggcctgactcgccgcccgtcccccgcctggcccacccagaccgcaacgaggtcctggacctgccgcacagacatgcatctgaggcctgactctgcgctcctgtcccccgcctggcctgcccagcccgcaacgaggtcctggccttcgaggaggggcccacggctgggctctcacttgtacatcagctctgactcctgtctcagcagaagctgcttctcgtgaatgagccagaaccagtccaccatgaggctatcctcagcgtcatctggggagaggagccagctggggcaggggggcccgccagagttcatggcccccagccccaggactgagggtgtctgtgggagtcgggctggcccagggccaggccgaggcgctcacctccctcggccgcccgcagtcgcttctccagctccacgccgcggagctccagggcgtccagccgcctctcgatgtcctgcagctgcctctgtatctcctccggggagaggtagtcggggtgcagctgggaacggaggggcggtgaggatgccggagggctgggcccctgcccggctccccaccactactcaccctgactggggaggtcaccgtctcgccaggcagagcagggacattggccggggacaagggtctccctggagaaggagcagggtgagcctctgggacctgggccaccaggcccaacgtgaccaggacaca

SEQ ID NO: 20915 - DNA, 44 bp, Homo sapiens
  chr7:1479426-1479470
  hypo
agcttctctggctgaccggagcgcctctccgcacaccccaggag

SEQ ID NO: 20916 - DNA, 30 bp, Homo sapiens
  chr7:1479903-1479933
  hypo
tacctgccgtggtgcgaagcagattccagg

SEQ ID NO: 20917 - DNA, 31 bp, Homo sapiens
  chr7:1483466-1483497
  hypo
tttctactgtgtaagccgcccagtgaggggg

SEQ ID NO: 20918 - DNA, 31 bp, Homo sapiens
  chr7:1484816-1484847
  hypo
tggcaggcgagttgcccgcagcaggctccca

SEQ ID NO: 20919 - DNA, 30 bp, Homo sapiens
  chr7:1490616-1490646
  hypo
cccaggtcacacagcggggagacagctgcc

SEQ ID NO: 20920 - DNA, 30 bp, Homo sapiens
  chr7:1491265-1491295
  hypo
ctggggctgcaagccgtgtcctgcctcacc

SEQ ID NO: 20921 - DNA, 293 bp, Homo sapiens
  chr7:1491649-1491942
  hypo
cctctctccttaggaagcccccgccccgtccgcctgcagccctgccgtccatcaatctgctgggatccttgggaaccctccaccgtttccagcttggaccccctcccaggtaacaggtttcagacggcaggaccacccgtctgcacaggcggagcttctgcacgccggacaagatggggcgcggactcctctccgtgtggacagatgacgaggagccccctccctgggctcagtggcagcgaaagcggtttccgtctgctcgggcctgggccgatgcctctgtctgcctgggc

SEQ ID NO: 20922 - DNA, 577 bp, Homo sapiens; identical to SEQ ID NO: 5297
  chr7:1498631-1499208
  hypo

SEQ ID NO: 20923 - DNA, 242 bp, Homo sapiens
  chr7:1519167-1519409
  hypo
gagggcctgcaggacacgcaccgtgatgcccggcacctcggggctgccctggacgacgcgggccagctcctggcccagggcctgctgcagggcgagggccacggggcggggactggagctctgccaccgagggtccgggctgagcgggaaaatctggaacggggaaggccagtgtcaggaggaagcggaggagaaggaggaggagcgcagcggagaggctaagcgcccggtgcagctccgtg

SEQ ID NO: 20924 - DNA, 30 bp, Homo sapiens
  chr7:1526364-1526394
  hypo
gcaggtcctgcaggcggcccagcagctgcc

SEQ ID NO: 20925 - DNA, 30 bp, Homo sapiens
  chr7:1533035-1533065
  hypo
ggcagagccacggacgaggcgcgagctgga

SEQ ID NO: 20926 - DNA, 524 bp, Homo sapiens
  chr7:1533907-1534431
  hypo
acctccaaagcctgaccggaaggccgcagtgaaggtgaacagagcgcccagggcacgaggtgggggcagggtgaactggcaggagccccaggcggggctggaggggagtgtagaccaagaacccacggggtcacccatggggcttgaagggggacagagctgtgaggccagccggctggggaaggacagtgtgcggctgtctggacagaagcaggggcagacggtgcatctgagactgcgtgaagggtggcgtgcccgtggacgccctggaagcaactggaaggcgggggtccgggggaggctgcggctggggcttggagtcacgtggacgcagacggcagctgaatccctacagtggcgctgggacgccagcatgggagtgggagaagggtggcacccaggattgtggaggaggagcaggatggtgctgtgaccatgggaacagccgcccaactcccactggcccttcctgccgcagccggcccggcaccccgcagccccgcccagcccggcacacaggagcc

SEQ ID NO: 20927 - DNA, 30 bp, Homo sapiens
  chr7:1534751-1534781
  hypo
gccctttacaaaatcgctgcagagaaatgc

SEQ ID NO: 20928 - DNA, 30 bp, Homo sapiens
  chr7:1535456-1535486
  hypo
cataatcaaacacccggactgccccaaaca

SEQ ID NO: 20929 - DNA, 69 bp, Homo sapiens
  chr7:1537960-1538029
  hypo
caccggcctccccagacgccacgtgcccctccagcccagagccccatattccggcgtggagggcaaggc

SEQ ID NO: 20930 - DNA, 31 bp, Homo sapiens
  chr7:1538765-1538796
  hypo
actcctccacgctctccgcgagctcttcgta

SEQ ID NO: 20931 - DNA, 31 bp, Homo sapiens
  chr7:1563389-1563420
  hypo
ggggccacctctcacacgccatgctcagggc

SEQ ID NO: 20932 - DNA, 30 bp, Homo sapiens
  chr7:1574398-1574428
  hypo
cggcagccccgatgcgtcctctcatctggg

SEQ ID NO: 20933 - DNA, 31 bp, Homo sapiens
  chr7:1575821-1575852
  hypo
agcggaaactcagacccgcccacccaggccc

SEQ ID NO: 20934 - DNA, 203 bp, Homo sapiens
  chr7:1578766-1578969
  hypo
cttgtccatgttttccagctacgagttccagggagctctgtcctggtgaccgtgcccgggttatgacgactaatcccaaaccgaataaggcattaaaggtaaggctggttccaagcaggccccgtctcaagcacaggcgtgggaaaggcccccggcccgacagcccctgctatcccagggccgtcctgagcctgtgatggagg

SEQ ID NO: 20935 - DNA, 56 bp, Homo sapiens
  chr7:1579573-1579629
  hypo
caggtcaagaaggaggcgggcgagaacgccccggtgctcagcgatgatgagctggt

SEQ ID NO: 20936 - DNA, 30 bp, Homo sapiens
  chr7:1582573-1582603
  hypo
ccgccgccctgccccgtccctgcggccacc

SEQ ID NO: 20937 - DNA, 201 bp, Homo sapiens
  chr7:1584164-1584365
  hypo
cacgctagtctccgtccctcccgctcacatgcgcccacgctccccctcgaggcaggttgagccccggcctggaccgccccacgctgccttccgtccacgcagagcgggctcggccctcagggctttccttcgagtcgtgttggaaagaagcagaagcagcctcacccgtggggcggaggcgtctgagggtcaggaggcagg

SEQ ID NO: 20938 - DNA, 30 bp, Homo sapiens
  chr7:1589280-1589310
  hypo
ctagcccagccggacgccaggcctgccttg

SEQ ID NO: 20939 - DNA, 49 bp, Homo sapiens
  chr7:1590469-1590518
  hypo
acagagtcgaagtagacgtagtactggtggtctccgaggaggaggaggc

SEQ ID NO: 20940 - DNA, 822 bp, Homo sapiens
  chr7:1598556-1599378
  hypo
ccagatgcgccagctcgggaaccgtggaccaagtgtactggtctggggatgtcaggagcagggcctggtccccagggaggggcagtcgggaggttgaccgctctgccacctgctcacagggctcgccggctgatcgaggcctcacccggtgctggtgtcacagcctctgcgcccggtcacaggaggcggcagggccggctgggcctgatttttctggcgggggcgggacactgaccaagcccattgcaggacagacctgtctgcccagatccaggcgacggggccctctgaccattgttcactgcgtccaggtgcccagagctgtggggaggctgagaagccgcccagccagtcccacaccctggccctggcacagccacctcctcctgctctcatgagaaacccggctgagggcccatgagctgttgcctggttccaggccggctgccctgctagtgcccaccccgaccccctgcctgcccgtctctctgcagatgcggacaggcatggtgtacccccctgcctgcctccttcactgctgggtggaactcggggcgcccaggagccgcctcctcagggctggctcatttgatgtcccaggctgagctgcacactagggggatgaggtgaccggtgggcacccatctcagacacccggcttcccaggtcccgcggccctcccctgggggccctggccagcagttcaccaaggcagcagccccgggtgtgagcagggggtgacagggatggggctccacatcctcccggctctgcttctgggattcccccggctcctgtccacgggcacggcctcctgagagc

SEQ ID NO: 20941 - DNA, 198 bp, Homo sapiens
  chr7:1607274-1607472
  hypo
gagtgggtgtctgggtgttcacgtgtcctgctgagcagcgcggggcggctgcctccaggtcaccacacctggcacacccggatcacctccctcagcgccttcagcccctccatgcttttgtccttcacggccacggcgaggaggactgctctgtttccagcttcttgagacacaaacgctaccaggttctttgcaaag

SEQ ID NO: 20942 - DNA, 265 bp, Homo sapiens
  chr7:1607755-1608020
  hypo
ggaaagagaagcctgcagaagcgagtgctgtcgaatctcacgtgtgatctccacagagcacagcacagccagccgcctgctcacgtaatgtaccatggcaggggaggcggctcgaatgacaaaactgctgcttctgcttgtctgctggataaaatgcctgcgggctggacaaagcatccactgagggcaagcagggcgccttgagacccacaaatgcccggaaaatgctatcgctgtaggggtatttgtccgccagatgccccat

SEQ ID NO: 20943 - DNA, 375 bp, Homo sapiens
  chr7:1615004-1615379
  hypo
ggagttttatgtgaactgaagtatttcgtttaacaccacacagtaaacacaaaggaaacccaccgttgctgggccgccttccatcatggcgcagaattgagagtcgagcacgtcgctttgttttctgccaaacttagccaagctccggtcttaaaatcttttcgttcctagcgtgaggctttctgtctttgttgcaaatattgaaacctgccacgtcacctcttgcactatttgtttagttctttaagaaatgaaaccttaatccatgtacaatttctaaaagcctttatttcaatattttaagaagttatttcccctggcaaagaagccgccctgttgcccggtgtggagctcgatgacaaagctcatcagcct

SEQ ID NO: 20944 - DNA, 77 bp, Homo sapiens
  chr7:1650397-1650474
  hypo
gggggtgggggcagcggggcggcgggggcaatggctctgagggtgggcgaggaccaagtgccgccaaggagcgataa

SEQ ID NO: 20945 - DNA, 30 bp, Homo sapiens
  chr7:1659705-1659735
  hypo
caccctggagcctccgacggggcggccacg

SEQ ID NO: 20946 - DNA, 161 bp, Homo sapiens
  chr7:1681116-1681277
  hypo
tcaccacccaggtctcggctcaaaatccctctcctgggagaggccattccggaaccccaggttcaagcacagtgctacccccttctcccgccccccagctctttccatcgcattgccatggttgacttacttcactgtctgaaatccgttcttccctcccc

SEQ ID NO: 20947 - DNA, 87 bp, Homo sapiens
  chr7:1689039-1689126
  hypo
gggtaaggtgtgcctggtgagcgctgtctgggctgaaggaggagtttgagaaggcggctttatgaagggaggtggccgggcgcggtg

SEQ ID NO: 20948 - DNA, 260 bp, Homo sapiens; identical to SEQ ID NO: 5301
  chr7:1704118-1704378
  hypo

SEQ ID NO: 20949 - DNA, 30 bp, Homo sapiens; identical to SEQ ID NO: 5302
  chr7:1705014-1705044
  hypo

SEQ ID NO: 20950 - DNA, 356 bp, Homo sapiens; identical to SEQ ID NO: 5303
  chr7:1706093-1706449
  hypo

SEQ ID NO: 20951 - DNA, 612 bp, Homo sapiens; identical to SEQ ID NO: 5304
  chr7:1708949-1709561
  hypo

SEQ ID NO: 20952 - DNA, 47 bp, Homo sapiens; identical to SEQ ID NO: 5305
  chr7:1709617-1709664
  hypo

SEQ ID NO: 20953 - DNA, 86 bp, Homo sapiens
  chr7:1718470-1718556
  hypo
cacagcagcgaaatcgggagtgtggggtgcgggcatcgcgtggacacgctgtgaactgggatttggagcacgggtgatgccagagt

SEQ ID NO: 20954 - DNA, 169 bp, Homo sapiens
  chr7:1775574-1775743
  hypo
tgcccaaggtcacacagcaggcgcacggcagagccaacaccatctcctggcccacgatggttctgtgtcccctgacgcagcaggtgcacaggcgggccccccacctgctcctagctgggccgggtcaccgtggcaggccttgcggctcgaggcccaactgccctgatat

SEQ ID NO: 20955 - DNA, 709 bp, Homo sapiens
  chr7:1783931-1784640
  hypo
tcttgcagcaggaacgtcggagcaggaggagtcagtggagccatcaggacacccaggcccatggggcaggaggcctcggtcaccacaggactggggcggaagacgagaggcggccggccgtgagggaggcgccctccctccccgcgcttacgtcgcgcggccatgcggtttgggacaggacacccctgagagtgcaggcacctccccctcccgcccctccatccctctgggggctggcgcctggccccccacctggtccccctgggcaggctgaattggggctccctgcagggcggtcccgatggccgggcgtgggtggggcgcgctgtgggtgtgcgtggcggccgccaccctgctgcacgctggcggcctggcccgcgcagactgctggctgatcgagggcgacaagggcttcgtgtggctggccatctgcagccagaaccaacccccctacgaggccatcccacagcagatcaacagcaccatcgtggacctgcggctcaacgagaaccgtatccgcagcgtgcagtacgcctcgctcagccgctttggcaacctcacgtacctcaacctcaccaagaacgagatcggctacatcgaggacggcgccttctcgggccagttcaacctgcaggtgctgcagctgggctacaaccggctgcgcaacctcacggagggcatgctgcgcggcctgggcaagctggagtac

SEQ ID NO: 20956 - DNA, 30 bp, Homo sapiens
  chr7:1847598-1847628
  hypo
tgacacggtgcacacgtgatgtctgtagct

SEQ ID NO: 20957 - DNA, 78 bp, Homo sapiens
  chr7:1855555-1855633
  hypo
ccgacgtaggtcccagcgtgtctgtcagtcatgctgctgccctgtggggctggagaggcaggacgtgcacccagcctg

SEQ ID NO: 20958 - DNA, 86 bp, Homo sapiens
  chr7:1855833-1855919
  hypo
gctgcatcttggaacccgaggggctggtggcctgcggggcagtcaagaaagagacaagacagcggtcagcccgacaggcctctccc

SEQ ID NO: 20959 - DNA, 290 bp, Homo sapiens
  chr7:1865908-1866198
  hypo
gcctggcccgtccgcgctctgaggagggagagagcaagcttctcgctgctggtgtattacctcggccgagggcctcctcctccaggctggccacaggacttgttacagcctatgcctgactcccccgctcatggcctcactccctcatggatgcccatggccggcccagccccaccctgcacaagccctccagctccaggcccagcccagctcagctccgcggagctcctggtccagaggtccaggtttgaccccaggacaccctgctgtgtgcacgaccctcagctccc

SEQ ID NO: 20960 - DNA, 31 bp, Homo sapiens
  chr7:1867561-1867592
  hypo
atgctgctggcagtgacgtttcgtggagcgc

SEQ ID NO: 20961 - DNA, 123 bp, Homo sapiens
  chr7:1885180-1885303
  hypo
gtccggctctggttcacggggaagagcgctgtttaggagacggacgtgctccacgcagacatgcgtccggctctggttcacggggaagagcgctgtttaggagacggacgtgctccacgcaga

SEQ ID NO: 20962 - DNA, 30 bp, Homo sapiens
  chr7:1897359-1897389
  hypo
caggggccgggggacgtcctggtcctgcta

SEQ ID NO: 20963 - DNA, 70 bp, Homo sapiens
  chr7:1913954-1914024
  hypo
ggacagagggggtgaccgtggcttgggatggtcagggaagcgtctcaggaggagacgttgcagcagcacc

SEQ ID NO: 20964 - DNA, 288 bp, Homo sapiens
  chr7:1931659-1931947
  hypo
cacccgccagccctgcgagctccgttcacggtgagcaccctacgcaggtgcaccgtcttccacccttcatacatcatgtttatggcaccttttccatatttaaacacgtacagacacgcagatgcttagcactgcgccacggtggtctactgcattcagcacagtcacgcactgcacacttttgcagcttggcagcagccggctaaaccatgcggcccaagggtgcgggaggctgcacggcccaggctcgtacaagtcattctaggaagttcccgcaaagacaacact

SEQ ID NO: 20965 - DNA, 235 bp, Homo sapiens
  chr7:1932168-1932403
  hypo
atctggtatcggaaacgctccattaagcatttcctttgagtgacagacccacaataaaaaaagctgtggattttggaacattcccgacttcaggttttcgaatcggggaggctggacctgtatacctttccccctcatccatatgacaaacccggtaggtcgacatcgccacatgtttgtgcagttccggaatctgtgccgtccacgcctctggccctgacgcccaccctgcagg

SEQ ID NO: 20966 - DNA, 31 bp, Homo sapiens
  chr7:1932816-1932847
  hypo
ctgcctttcccccaaacggcagcccaggcag

SEQ ID NO: 20967 - DNA, 30 bp, Homo sapiens
  chr7:1946432-1946462
  hypo
agctcctgcccctgcgcaagctacacagtc

SEQ ID NO: 20968 - DNA, 30 bp, Homo sapiens
  chr7:1950265-1950295
  hypo
ctccctagagctcacgagcatctgagatcg

SEQ ID NO: 20969 - DNA, 78 bp, Homo sapiens
  chr7:1950692-1950770
  hypo
ttcataactgcaggcgtgcctcatgtctaagtgctactcccacagttcccgctcctgggcggccgcctctccctccat

SEQ ID NO: 20970 - DNA, 192 bp, Homo sapiens
  chr7:1962361-1962553
  hypo
caccagccaggtctgcggtgagctgcacggtttctgcagatgctctttggcaaacttgggggttctcggcttctcctggtttgccgagtttccccatgaacgtgtgttgggcctcgctgactgcatttgtgcatccgttggtttggccatgtaatttttccttttggcgagctgacgcgatggattgtacca

SEQ ID NO: 20971 - DNA, 31 bp, Homo sapiens
  chr7:1963283-1963314
  hypo
tgaaggcggctgtggccgtgggactgactgc

SEQ ID NO: 20972 - DNA, 30 bp, Homo sapiens
  chr7:1969178-1969208
  hypo
cctgcctgaacttccgagcagggactcaga

SEQ ID NO: 20973 - DNA, 119 bp, Homo sapiens
  chr7:1995852-1995971
  hypo
ccagggccaccctggacgtccccccactaagggtgtaatcgcagggggtgtcagaagtggtggcagctggagggctgtctggaagtttccaacactccacaggccgaaccccagtggcc

SEQ ID NO: 20974 - DNA, 156 bp, Homo sapiens
  chr7:1997188-1997344
  hypo
accacggtcgttcacgacgcccaaagaaatgagaggcccaggcagtgcctcacccagaggctgccccgccctcacctgcagagctcgccgctccagctgtgcctccagcatcctcttttcctcctccagccgactccgctcgccttccagctcctc

SEQ ID NO: 20975 - DNA, 182 bp, Homo sapiens
  chr7:2006410-2006592
  hypo
ggtgaggaggaggaacgccgcaatcgtggcgtgctgggaggcgagggccgcgggccgcgctgcgtgcgcagggcagagctccttcaggaacacgagaggaataaagacggacccacccgagggaaaccgtgaggaatcgtagccacctgctctccaggagaggctgccggaaatccttcaga

SEQ ID NO: 20976 - DNA, 326 bp, Homo sapiens
  chr7:2024688-2025014
  hypo
actttatagtctgtgacggttcattccatgtgtccactggacaggacctggggtactcagatcaaaacactttctgggtgtgtctgggagggtttgtggatgagatcagcatttgaatcggggactcagcagacggccccgggcagcatgggtaggcctcctccaaccccttgaggccggaatgaaatgaaaactggaggaggcgaccgttcctcccttgcctgcctggtggcctgagcggggcagctcccgttttccgcccaggactggggctttcaccacaggctccgctggttctcaggcctgcagagcggactgggcacagc

SEQ ID NO: 20977 - DNA, 30 bp, Homo sapiens
  chr7:2027224-2027254
  hypo
gggaagagcaaatgcgaggatggtcccggg

SEQ ID NO: 20978 - DNA, 97 bp, Homo sapiens
  chr7:2040769-2040866
  hypo
ccggctcacagtcacgagctggcaagcaaggatgcccgacgggagcctcgacctgggctgcaggccctggggtccgtacaacgccgacagcagctct

SEQ ID NO: 20979 - DNA, 481 bp, Homo sapiens
  chr7:2041376-2041857
  hypo
ctggacagacccctcgtaggctctcacacctgctttgccccgacaccgtggcctcatgcggcaaacatgtcactggccccctgccacaaacacggtggtggggcccgaggggctgtgctccccgccggcgcatgccacctgtcactagtagagatgggactcaggctcctcacacacccttccccgctcaacgcagcttccgacgacagaagaggcagccatgcactggcgcctgcagcctaaaggcttatggggacaggcgtccctgcccagacccagggtccaggtgccctgaatcccagccactcccgcgtctgactcaccatgtctgctctttgtttctggcctcccagctcctccagggcctgcgacagctgagcctgcaagacaagacaggattcggcctgagactgtggtgggccaggccccatttctaggactgcagggaacacaacccccaccaccccgcagcctccactct

SEQ ID NO: 20980 - DNA, 30 bp, Homo sapiens
  chr7:2069775-2069805
  hypo
gagtgccccagaaacgcggaacccagagct

SEQ ID NO: 20981 - DNA, 30 bp, Homo sapiens
  chr7:2070211-2070241
  hypo
aggtggccggaccccgcaggagtggaacct

SEQ ID NO: 20982 - DNA, 36 bp, Homo sapiens
  chr7:2071760-2071796
  hypo
tgacccctcattcatgcgggacgcccggccccagtc

SEQ ID NO: 20983 - DNA, 492 bp, Homo sapiens
  chr7:2094593-2095085
  hypo
ggtcacagtagcaggaggagccgagcggtggggccgggactcagggacgacggcagggcccgaactccatctgtcctgtgttcacgtacacagtgcagagcttgtcacaaagggcgggggcagcagagacagaggaagcggggccaagcctccctccaggcactaggcaggcagcacagcgaggcggtgcgtgccacgacagcaccaggcagaggcacgccacaaaccctgacagaaagcagggagtgaatgagcacacgccaggacgtgtgtcctctcggaggcagacagtgaggacagcaggtaggcagtggtcttcagagggagctgggggtgagccaggcctagggccagtcagcagcatccacatcagctgtgtgacccggcccctgtggcccgcatcgtagggcacgatccaggcctctgccacccctgacagaactggcccggagcagcacaggagcgccaccagggaaccggtgagacatgggg

SEQ ID NO: 20984 - DNA, 48 bp, Homo sapiens
  chr7:2099513-2099561
  hypo
gacaacatgaaaactgcgtcgaatgttcaaatacgcagggcagaaagt

SEQ ID NO: 20985 - DNA, 30 bp, Homo sapiens
  chr7:2105370-2105400
  hypo
cgctggacacccagcgtcaactgctccccc

SEQ ID NO: 20986 - DNA, 180 bp, Homo sapiens
  chr7:2113766-2113946
  hypo
ggacggccacatgccgttccaggcagcagagatggcagcacggaacaccgcagccagcctgggctcgctgggcctccattctactggggtgggaatctcaagcaaagaagccacgcgtgtggcatgagcagagaatctcacggcgggtgcaggtactgaggtcaccgagagcagaaggaa

SEQ ID NO: 20987 - DNA, 30 bp, Homo sapiens
  chr7:2122327-2122357
  hypo
agcgatctctgtggcgtctctctttggaat

SEQ ID NO: 20988 - DNA, 30 bp, Homo sapiens
  chr7:2143492-2143522
  hypo
aaaggcaaggaatgcggggagaccaccagt

SEQ ID NO: 20989 - DNA, 30 bp, Homo sapiens
  chr7:2148950-2148980
  hypo
cacacaatcaggtgacgagaagcggctgca

SEQ ID NO: 20990 - DNA, 30 bp, Homo sapiens
  chr7:2158608-2158638
  hypo
ccaaaagctccacacgcccagctgcctggg

SEQ ID NO: 20991 - DNA, 30 bp, Homo sapiens
  chr7:2160734-2160764
  hypo
gctcccagggcaggcgccccgccacagcat

SEQ ID NO: 20992 - DNA, 164 bp, Homo sapiens
  chr7:2162502-2162666
  hypo
ggtggtgacggccgccgtccacccagcgcccctcccaggtgagcttccccgtcaccgtctgcccatcctgccctggtagagaagtgtattatcaaggcgaccggtacctcacctgcctcccttctgctgagtctggcttaaaaagcagcaggggagccgggcgc

SEQ ID NO: 20993 - DNA, 432 bp, Homo sapiens
  chr7:2162965-2163397
  hypo
agctcagccagctcagggactgagatgaaactgcacgctacagcttggagacattgcgggagggctcccagcaagcgaaactgggctggggtgcaggacggagagagggcgctggtgaggccctggtcctgtgtgtgagggcggctgacacccggtgggctctgtttgcgcttgagctggtgacggtagggtttccttccctgtcaagcaggagagcaccccagtccacccagggagcacccaggaggagccagccccgccaagggcacgcatgggaggcgtcaatccgctggagggcagcagccctcaagcgaggactcacggggacatgcgataccaggaagcgagtcggaggcaattaagcctgtttcagagtgcacttcgcaggcggcgctgaatcgatagatcctccggcggcgtggtgctgcaggt

SEQ ID NO: 20994 - DNA, 30 bp, Homo sapiens
  chr7:2169044-2169074
  hypo
cagcaggctcacggcggctcctgtccacac

SEQ ID NO: 20995 - DNA, 30 bp, Homo sapiens
  chr7:2191748-2191778
  hypo
aggcagaaggctggcgcctgaggcggatgg

SEQ ID NO: 20996 - DNA, 109 bp, Homo sapiens; identical to SEQ ID NO: 5307
  chr7:2195817-2195926
  hypo

SEQ ID NO: 20997 - DNA, 247 bp, Homo sapiens
  chr7:2196908-2197155
  hypo
cactccagcagtgcaggtcaccgtgatcaggaagcggtaatgatggaacaaatcacagcactcagagggctcctccccttcatgttaccatttgagctccccaccatgcaagtccacacctcacatgcgtaagaacccgcaaaaactaagagactgagaagagaaaagcagcacagcatgctcccgacacggaagacgctgcccatctgggaggagtgggagagccggtcccctacagtctctgctc

SEQ ID NO: 20998 - DNA, 532 bp, Homo sapiens
  chr7:2208424-2208956
  hypo
ctggagcagggggcagacacacggggcgtggggcccagaggccaccgggaggactcaggttttattccgagtgtgctaaggagccagggattgtggctgaagcgggaggaacacgctaaggagccagggatggcggctgaagcgggaggaacacgcgctcggacttgctgatgggctcttacgtgggcttttccccagctgaagaatgagttactaaatgtgttttaaaatgcaaaaatgtgtacccggtgcttgtcctggcgctgttcagaacaggaagaaccggaaacaacctgaatattcacaggaggcaaacgatccgtgacaggacaagcgtgggatggcctcctgtgtggcagaaaggacattcgggacctatgacgcaaacgcaggcggctacacattcgcctgcaggactgcaccttttaaagtccgcatgtagacagtgaaaatctacaaaggtaaaccggaatctcctaagagcgggtagggatgcgactggtgggattacgggggattggcagtcttcttt

SEQ ID NO: 20999 - DNA, 142 bp, Homo sapiens
  chr7:2212438-2212580
  hypo
ctggagccccagatgggctcccgtggggcgaagtcagaagtcagaggtgctcgaggctgccccatcagatggctcctgggagcgtgcacaccgcggtctgtgcgcacagaagaccccagacggtgccaggcaccctgcacac

SEQ ID NO: 21000 - DNA, 31 bp, Homo sapiens
  chr7:2214040-2214071
  hypo
ggtctttgatcacagacgttcatccactgga

SEQ ID NO: 21001 - DNA, 163 bp, Homo sapiens
  chr7:2222235-2222398
  hypo
tgacacaatggggtatgaccacgtgccatgtggtggaagggagcgctgatccgtgccacagggtagacgccccttgagaacgtgctgagaggaaagcgccagcacagaggccacctatggtgcgattccactgatacacaacgtccagaacaggtaaacccag

SEQ ID NO: 21002 - DNA, 532 bp, Homo sapiens
  chr7:2232945-2233477
  hypo
cgtcctggagagaaagcgtccccgcccagaggacggtccttgtcctagaacagcaaggccctccaactcttggtcctcaaagcccttccccgcctccgcacccagcaccacattgctgtgctgagtttcagcacagggaccgtgcgtcctgctctctgctgcatctcccagccagtatacaccacggtacgtcataagccctcaacaaatatttgttgaatggaacagacgtgatcacaatatgtgctcctgggaaccctcggctaccagaaaaaaaggcgagacagaaatgagcacttctcaaccctgggagcaaatttataagggttttatcccttcaaaattattaccaaggggtaacacggccgcgggtaactccagattcctccggaaaacctcactgtgcactgccaaggctccagccagagcaggtgctgagccgcgatccgggagacgccagtctcaccctaggctctcttccacaaccaccctcaggcaaggccacaccgtcgcccaactgtcccaaatctgg

SEQ ID NO: 21003 - DNA, 340 bp, Homo sapiens
  chr7:2237967-2238307
  hypo
catctcccaagagcccgcctttgcttctgccagccactcacgctctccacaggctgcagccaggtacacaccccccttcaagcaacaaaaccactgcctgagcacctggcctgctctaagcccagggctgagacaagggggagccagccacacacaacaccaggagcgctggcatcgccggagcaaggagcccgtgatggccgtccacccgggacagcaatcgcgctctgcggcacgaggctttcaacagaggcgagtgcttcctgggggtcaagagcatggaacacacacttcaggccccctctccaggctgcaggccaacaggcgtccatgagacaga

SEQ ID NO: 21004 - DNA, 275 bp, Homo sapiens
  chr7:2255762-2256037
  hypo
cggctgccccatcccccgcaacccctcaccgcaggtgcgcgctctcctcccgcagctgcttcagctcccgttccagcctagggagccgtaccagctcagacttcatgttcttcacaatcgctgcatcctgctcttgcagggacagcttctgctccagatcctgatggaggccagggacagagaagaagggaaaaatgagccacgaagagacctggagaaaatcacacgcacacggctaagagaaggaagccggtctgcaacggctatacacactg

SEQ ID NO: 21005 - DNA, 30 bp, Homo sapiens
  chr7:2259944-2259974
  hypo
tcatggaacccgcacgcgacagaaccgcca

SEQ ID NO: 21006 - DNA, 30 bp, Homo sapiens
  chr7:2261322-2261352
  hypo
cagaggcaattatccgacgccatcagatgc

SEQ ID NO: 21007 - DNA, 30 bp, Homo sapiens
  chr7:2262340-2262370
  hypo
gaagctgccggatgcgcgtcaggagctcct

SEQ ID NO: 21008 - DNA, 213 bp, Homo sapiens
  chr7:2263997-2264210
  hypo
cccacccaggccatgagcaaacgccccacctctcagggaaaacagctctcaaagcagcaacggagccaaccctgaggcagtggcccccaccccagcggtgcctcagtctcactgagcccacacaacgcacaccgcagtcaggatctgcaggccaggggcaagcaatccaaccagcatcacaccccggaagacgtgagctatttttctagggcc

SEQ ID NO: 21009 - DNA, 30 bp, Homo sapiens
  chr7:2264477-2264507
  hypo
agccgccattgagaccggcaccctttgcta

SEQ ID NO: 21010 - DNA, 661 bp, Homo sapiens
  chr7:2264961-2265622
  hypo
ttcttataacctggcaggtaccgtgcacagcccccttgcttcctggggctgtctgggccgaccctcgccccgcctgaacccacctcgtagttcctggcactggtgctggctgctctctccagctccactcgagccctcttgtgactcagctccatctgcattttctcccgctccacctggatgaggtgggacttcgaacggatctgctctgctctttcctccagctgagcaggtcgcacccaaagaaaaacagaatcctcagtgacggcatcaaaccaggtgagtgactcagtgcagcagacacactccctgaggacccattcccgcaggtcccgtgctaagtcttgatgtggcccagccactgggctccaggctggggaacaggggaggggcaggaaacgggaaggtgaaaaagcctgggaagaggaagacgtcttttgagatgacattaagcatattagtgaaggcaacggcctcgaatgccacccatttatttaccagccaacggctccgtgggtcggaagtccagacgtaggtggctgcattctctgaccagggtctcccagactaaaaatcaatgcagtcggccaggacatgttctcacgtggagctcagagatggagaatgaggtctccttcccgactggctgccagcccagtac

SEQ ID NO: 21011 - DNA, 20 bp, Homo sapiens
  chr7:2279837-2279857
  hypo
cagagcgagactctgtctca

SEQ ID NO: 21012 - DNA, 30 bp, Homo sapiens
  chr7:2290711-2290741
  hypo
gagtggcgcagagccgggtttcatctggaa

SEQ ID NO: 21013 - DNA, 195 bp, Homo sapiens
  chr7:2293742-2293937
  hypo
gagcaggtggctgggccggcaagtgcgtgacgggaggctgggaggagggctctaggtgcctcagagaaggaaatccacttaaaagggggctgtccctcctctaaagcctcagctggaatggaacacgcccccccacgcccccacctgtcctctgccagcccatccagcctcagtgccacacggtgcagaccccaa

SEQ ID NO: 21014 - DNA, 126 bp, Homo sapiens
  chr7:2294643-2294769
  hypo
aagaggttttagtgcggccgcagggagcaccacctcagcctcaggcgctagtgaggacacaggccgtcctccggcggggagcacggtggggtcagggtgctgtgtggtcccgcaaagaggcagctg

SEQ ID NO: 21015 - DNA, 99 bp, Homo sapiens
  chr7:2298363-2298462
  hypo
acgcagaagcaccacactcggcggtgggggcagcggtggacacaggctcctcttcggccctcacacaaggctctgtgcgggcagcacagccacagagag

SEQ ID NO: 21016 - DNA, 134 bp, Homo sapiens
  chr7:2300172-2300306
  hypo
acacagaccctactccgagtctcacgtgtcttgctgggatatggctaccttcagctcctaataggtctggggagagtataactggtgtaagtacaagcagacttaggaaaaacggtcctcgctgcccccgactg

SEQ ID NO: 21017 - DNA, 35 bp, Homo sapiens
  chr7:2300781-2300816
  hypo
ctttggctgggcacagaggctcgtgcctgtaatcc

SEQ ID NO: 21018 - DNA, 30 bp, Homo sapiens
  chr7:2303966-2303996
  hypo
cattgtcgatggcccgcgatgcgatccgct

SEQ ID NO: 21019 - DNA, 30 bp, Homo sapiens
  chr7:2316621-2316651
  hypo
ccatctgctcatgacgcttttcaaacaagc

SEQ ID NO: 21020 - DNA, 30 bp, Homo sapiens
  chr7:2349590-2349620
  hypo
catcgccaggtcaacgcggacaaacagcac

SEQ ID NO: 21021 - DNA, 30 bp, Homo sapiens
  chr7:2414933-2414963
  hypo
tggggaccccatgccgcagcacctctcagg

SEQ ID NO: 21022 - DNA, 30 bp, Homo sapiens
  chr7:2420324-2420354
  hypo
tggccggttttctccgcaggttgaacatgg

SEQ ID NO: 21023 - DNA, 30 bp, Homo sapiens
  chr7:2472799-2472829
  hypo
accaactggaagcgcgtgatgatcgtgctg

SEQ ID NO: 21024 - DNA, 338 bp, Homo sapiens
  chr7:2473779-2474117
  hypo
tgtggtttttctgagcgtgcgggcgccgggaggggatgctgaggctgatggagctgcctccagggctagggccactcaccggaggagggcggggcctgcacttgaagtcaggccgcacctgtctgtttttggaagggtagccgacaaatccttccagagggaaagttctttgtttaagtgttgtacttgaaaaggtcaatcttcagggcttcctgtttgaagtcaagtcagaggtaaaccggtcagttacagaagcaggatttctaggatttctaactccagctgttcccatactgtctagtttaaattatggctgttaaggccgggcgggtgactca

SEQ ID NO: 21025 - DNA, 30 bp, Homo sapiens
  chr7:2480819-2480849
  hypo
gcgatattggggtggcgtccaggcccgcct

SEQ ID NO: 21026 - DNA, 11 bp, Homo sapiens
  chr7:2500185-2500196
  hypo
ccaccacatag

SEQ ID NO: 21027 - DNA, 3 bp, Homo sapiens
  chr7:2500212-2500215
  hypo
gag

SEQ ID NO: 21028 - DNA, 176 bp, Homo sapiens
  chr7:2539249-2539425
  hypo
gaggacaggggtcaggcgagcctcgggggtgctagcttcttcccatgctgggatccctgctctgtctatccaggtgaccttcccctgccctacgctgtggcccacaagcctgacttgagccagctcatccacttaggaaatgcaacccctggccagagcacgtccacaatgaggac

SEQ ID NO: 21029 - DNA, 30 bp, Homo sapiens
  chr7:2557159-2557189
  hypo
tgggtcaaaggcaccgcagtcaggggtagc

SEQ ID NO: 21030 - DNA, 30 bp, Homo sapiens
  chr7:2565964-2565994
  hypo
gcccctcatccgcagcggcctcttccactc

SEQ ID NO: 21031 - DNA, 737 bp, Homo sapiens
  chr7:2566358-2567095
  hypo
caagggaggccagggcagggccgttgcctcactcagggctgtgtggccagcctggggcggggcccagggatgtcgggcccctcccggcatcactccgcccgctccccacaggtgacgctgagctacggtatgtttgaaaacaagcggaacgccgtccacgtgaaggggcccttctcggtggaggccgacccatccaggtaaggaaaccccggcccagatgggcttgcgtagggtggcctaggggcgtcagggggcctcgtggagctgcagcagggtctctctaagcggcatgactctacatagaggtgtcccccggagtcctgcttgctcggggtggggccgccagtgttgtgggactgcaaatgggagctcagcacctgcctgccacccacgcagaccagcccctgctctgttcccacaggttccgctccatccactgccacctgtacccggacacaccctggtgtccccgcactgccatcttctagtggccatggctgagacccaatccctgggcgcccctggtatccaaagggcccagggaccctgttgcgctgccctggcctcggcattcgaggctcccctagggccgtgcctgtgcgtgtgcgtgtgcgtgtgtgtgtgtgtgtactgcatgcccacccgggtagcaggctgctgggcagttctgctctgtggaggggcgggcaccagcgccacttatgtgcctctgctccgagggccagtgggctgcaggg

SEQ ID NO: 21032 - DNA, 30 bp, Homo sapiens
  chr7:2586666-2586696
  hypo
tggaggcttgcggccgtgggcaagctcaga

SEQ ID NO: 21033 - DNA, 302 bp, Homo sapiens
  chr7:2611214-2611516
  hypo
ggcagggagcatgcctctgggcggccgagcgtccctgaccccgcagaagctgtggctgggaaccgcaaagccaggtatgtggttgtcgcactggagacccttcctgcttgagagaagagttcgagaaatttcagggagtggtttgagatggagtttttaatattccttgtttgaattacattgtctttagttttctcgaagacatcaaatatacacatcgtagttttatgtcatgcataaatgtggtttcgccaagtggcgctttagcctcccttggtcccgtgtggtctctacatgggagt

SEQ ID NO: 21034 - DNA, 153 bp, Homo sapiens
  chr7:2612208-2612361
  hypo
ccctaaacatagaggcgtacttaaatttattcattgagtaaatgatattaggaacaaatactaataaataaataatgataaaaagtccaagtcgcaccaaagagaatcagcttgtttctgtgtttatgttcctgcctagtctcttttttttta

SEQ ID NO: 21035 - DNA, 30 bp, Homo sapiens
  chr7:2629285-2629315
  hypo
atgacttctgcctgcgccctggcttggcgg

SEQ ID NO: 21036 - DNA, 30 bp, Homo sapiens
  chr7:2632272-2632302
  hypo
tgccacggtctaggcggggcaggcccctgc

SEQ ID NO: 21037 - DNA, 30 bp, Homo sapiens
  chr7:2632756-2632786
  hypo
tgaggtatgtgacccgggtcagggctggag

SEQ ID NO: 21038 - DNA, 30 bp, Homo sapiens
  chr7:2650012-2650042
  hypo
ctccagctgcagctcggatggtggattttc

SEQ ID NO: 21039 - DNA, 31 bp, Homo sapiens
  chr7:2678377-2678408
  hypo
cgctgggagcctgggccgagtgtgctatggg

SEQ ID NO: 21040 - DNA, 437 bp, Homo sapiens
  chr7:2679694-2680131
  hypo
gcgtggctccaggacacgggccctatgtcttcgcttccctccctgctcagggcagacccgcagcagtgtccagccgaggagcgagcagccgtggctggaatggcagggtggtgggatcgtggccactgcctgtggctggggctggaggctgcatcgggccaaacttctcatcagagtccctgtgagcaccccccagtgggccagggcctcctcagcccagccacgcgccacggtagcccacaggttggtggcacagagcggcgtgtgggtccgtggcgcagggtagcggggtgggcagctgctcccaggcgtgtgcatgtagagcagccgcctgtgtgtgtgtggggggggacgtgtgttccataggccggccgtgacttgctgtgcaccctcccgagtggcatgcttcctcacacgctgccaggcccaggtcctgc

SEQ ID NO: 21041 - DNA, 30 bp, Homo sapiens
  chr7:2686829-2686859
  hypo
tagggccacctactcgctccgccacgccaa

SEQ ID NO: 21042 - DNA, 56 bp, Homo sapiens
  chr7:2695697-2695753
  hypo
ctgaccatctgcggtgcgtgccccccaggaccccctcctccgcgtccaggaggtgc

SEQ ID NO: 21043 - DNA, 131 bp, Homo sapiens
  chr7:2698086-2698217
  hypo
agtacatgtgagttgacgtgggcctagtggggccagcggacacgtcagctgcggctgagagcgcggatctgggctggggctagctcgaggcaaggggctggagaaggggcggcctccgggctgggcagccc

SEQ ID NO: 21044 - DNA, 122 bp, Homo sapiens
  chr7:2698494-2698616
  hypo
ctacccatgggccccccgacctgcagctgggactgcatggccagcaggcactcacagcctctctcccctcatgcctcaggagccagaacgctaatttccagaacccccgctgtgagaacacc

SEQ ID NO: 21045 - DNA, 30 bp, Homo sapiens
  chr7:2731759-2731789
  hypo
ggcgtcgggtgctccgaggccggctaagtg

SEQ ID NO: 21046 - DNA, 127 bp, Homo sapiens
  chr7:2742259-2742386
  hypo
ttcacccagcaggccggtgtctgcgagtgattcccggggagagggtcccaggcgggcaggggcgtcgcagggctgacggtgctgctctcccaccagacctgagcgaggagccggtgggaagctccct

SEQ ID NO: 21047 - DNA, 268 bp, Homo sapiens
  chr7:2751964-2752232
  hypo
gactctacacctggactcaggcggtggtggggacgtggcccagccaggaggcgggggagccgtcagtgtgggaggacaccccgcctgccagcgccgactcgggcatgtgctgtgagagtgactcggagcccggcaccagtgtgtcggagcccctcacccctgatgccgggagtcacaccttcgcctcggggccagaggaagggctgagctacctggcagcctcagaggctccgctgccacctgggggccctgcggaggccatcaagga

SEQ ID NO: 21048 - DNA, 31 bp, Homo sapiens
  chr7:2764249-2764280
  hypo
aactgcacctgtgtcccgctttggttcatgt

SEQ ID NO: 21049 - DNA, 79 bp, Homo sapiens
  chr7:2798450-2798529
  hypo
tggatatgagagggttatcaccgcatgtatcaacatgatgggtctctgctgggcgcggtggctcatgcctataatccca

SEQ ID NO: 21050 - DNA, 121 bp, Homo sapiens
  chr7:2804417-2804538
  hypo
cccagcgtgagccggcggaccctgaagggaacactgagactgaccacagctggacttgcgccgcctcgtcctcttagtgaatgaggtcctcagaggcttaagcacgcgttagttatccaaa

SEQ ID NO: 21051 - DNA, 38 bp, Homo sapiens
  chr7:2815343-2815381
  hypo
gcagagggccaggctccgaatcacgtcacaagtggaag

SEQ ID NO: 21052 - DNA, 31 bp, Homo sapiens
  chr7:2834425-2834456
  hypo
tgatcattacaacttacggtgatttagagct

SEQ ID NO: 21053 - DNA, 31 bp, Homo sapiens
  chr7:2864021-2864052
  hypo
ggctcctctgggtctgcggaggcctctgcac

SEQ ID NO: 21054 - DNA, 31 bp, Homo sapiens
  chr7:2873500-2873531
  hypo
ggctgcttcaaagttccgtacgtcctggcaa

SEQ ID NO: 21055 - DNA, 228 bp, Homo sapiens
  chr7:2931115-2931343
  hypo
cctccctcctctttacgtggacaccatcactggatttggggacacaccctaatcccgtatgacatcttaacctgattacattggtaaagaccctatttccggataaggctacagtcacggccactgcagacttgggcacatctttcacggggaggtagtccggtcagtccaagaaaaccatgcagcagctgagaagggagaaaatgcggaggccgaggcgggcctgag

SEQ ID NO: 21056 - DNA, 124 bp, Homo sapiens
  chr7:2935234-2935358
  hypo
tgtaccaagtaagccctgaggcggccgtgagaagccctcgaaagttcccctgttcattattatagttacttttagagacagggtctcactctgtggctcaggctggattgtaccatcacggatt

SEQ ID NO: 21057 - DNA, 30 bp, Homo sapiens
  chr7:2946304-2946334
  hypo
gcgctgctcctcgccgatcttgtccttgac

SEQ ID NO: 21058 - DNA, 30 bp, Homo sapiens
  chr7:2959106-2959136
  hypo
gacgtgcacaacatcgtcacacttcaggga

SEQ ID NO: 21059 - DNA, 30 bp, Homo sapiens
  chr7:2962830-2962860
  hypo
gcacgaagctccctcgcgcgttgcccccca

SEQ ID NO: 21060 - DNA, 30 bp, Homo sapiens
  chr7:2967958-2967988
  hypo
ggggctgtggggcccgggaacctgatttct

SEQ ID NO: 21061 - DNA, 47 bp, Homo sapiens
  chr7:2972450-2972497
  hypo
agacaagctctcctcccagggcggccgtgtaatatggctcatggcag

SEQ ID NO: 21062 - DNA, 287 bp, Homo sapiens
  chr7:2976622-2976909
  hypo
cagggcccacctggcttcaggcgtggggtcctgcccgtcccgccccacctggtccaggttgttgctgtccttggagaggcgccgcagcttgctctccaggttgacgatgcaggcctcccgccgcaccatctcgatcctcatctcgtcgttcttctcctccagctcgcggatctgcttcctgtacttgtccttttcgattaagcactgcgagtactgtgtctgagcttcatctcgggagtggaaggcctgccagggagaagcgggacgaaggctgctttgggggttgc

SEQ ID NO: 21063 - DNA, 283 bp, Homo sapiens
  chr7:3012962-3013245
  hypo
ccgattggaaactcacccagccggtggtgttggcatctttctgtgtcttccacgttcctctgggcagggacacacttcatatttccttgtgtaccctggcttagcaagtgtgttccataaatcggcatttcatatttatcaagtgagtggtgtccagtggctaaacgctggctttctttcgctcattacagcttcttcccttcagccgatcagacctctacctccccatgtgtggggagagctttcactgtgactgctttccggtgcctgctgttcccaccta

SEQ ID NO: 21064 - DNA, 274 bp, Homo sapiens
  chr7:3026287-3026561
  hypo
caaattcctcactcaaagtgtcgcccatcggccgcagcgtcagcaggtgcttcacctgccgcattttgagcctcacctcagcccttcggaacggagcctgcggtttaacaggctccccaggtgacgctcacacacactgataaacgccgctccaactcacccctccctgtgcgcagagacgtgggtccccgactcttggttcactccctgcctgacccctccccgtgcgcagagatgtgggtcaccgactgccggttcactccctgcctgagtc

SEQ ID NO: 21065 - DNA, 140 bp, Homo sapiens
  chr7:3049135-3049275
  hypo
tagacactggaggaaagccaacgccgtaagagaaacaaccaagcacggtcaaggaaagcgttcacagggccagcagaacaagccattagattgtgcgtgcttcatgtcctcagaaagacgcaagagagcattggctccac

SEQ ID NO: 21066 - DNA, 226 bp, Homo sapiens; identical to SEQ ID NO: 5313
  chr7:3083330-3083556
  hypo

SEQ ID NO: 21067 - DNA, 45 bp, Homo sapiens
  chr7:3179216-3179261
  hypo
tgtgagctatgagcaagacaccgtgctgggcacctgctttttttt

SEQ ID NO: 21068 - DNA, 122 bp, Homo sapiens; identical to SEQ ID NO: 5314
  chr7:3341286-3341408
  hypo

SEQ ID NO: 21069 - DNA, 468 bp, Homo sapiens; identical to SEQ ID NO: 5315
  chr7:3341569-3342037
  hypo

SEQ ID NO: 21070 - DNA, 183 bp, Homo sapiens
  chr7:3727108-3727291
  hypo
ccctcagctggtaacagatatcgaaccgcagtccatctgtaatgtgggacgctgcttcgcactgaaaaggtgtgaactgtcgatgcacacggcaacttggatgcatctccaagaaatggcggtgatgaaaaaaattcagtcccaagagatcgcatatggtacggctccatttatatggcattg

SEQ ID NO: 21071 - DNA, 158 bp, Homo sapiens
  chr7:3880278-3880436
  hypo
tcccaggtgatgctgatactgcggttcacggacaactctggtcacggactacgctgggtagcagagttctcgagttgtgctactcagaaggtttatggcagagctactcgcagtatgatccgagaatcgcgagcctcgcctgacttggattcacatta

SEQ ID NO: 21072 - DNA, 51 bp, Homo sapiens
  chr7:3991157-3991208
  hypo
tagcccttgagcagaatgcatcgtcaatgcgtgctgggagggagtagagtt

SEQ ID NO: 21073 - DNA, 64 bp, Homo sapiens
  chr7:4116726-4116790
  hypo
atctctcaccacctacaccatcgacgtggccgctgtgactgccgtgggcactggcctggtgact

SEQ ID NO: 21074 - DNA, 35 bp, Homo sapiens
  chr7:4141092-4141127
  hypo
ttttaaaactcaccgatctgtcaaaatagttcaag

SEQ ID NO: 21075 - DNA, 258 bp, Homo sapiens
  chr7:4152826-4153084
  hypo
cctcccttgagaaacagtcagcgcctttgtggtttcgttcttttccttcttacctttgctttgccgtgactctcatcagtggtttttcctttagatttcgaatgaagcaagtgaacattgttgggccgagcccctacagtccgtcttcccgggtcatccagaccctgcaggccccacccgacgtggctccaaccagcgtcacggtccgtactgccagtgagaccagcctgcggcttcgctgggtggtgagtgggggtg

SEQ ID NO: 21076 - DNA, 409 bp, Homo sapiens
  chr7:4153552-4153961
  hypo
cccccaggaacacctcctccacggagttggcctcacagggcaggcccatcccttacaacccgtgagggtggcagttctgagatgtcagctcatcgcgactcctcgttccttcctagcccctgccggattctcagtacaacgggaaccccgagtccgtgggctacaggattaagtactggcgctcagacctccagtcctcagcagtggcccaagtcgtcagtgaccggctggagagagaattcaccatcgaggagctggaggagtggatggaatacgagctgcagatgcaggccttcaacgccgtcggggctgggccgtggagcgaggtggtgcggggccggacgcgggagtcaggtgaggggaaggcgattcccatcctggagacaccgcattagagatggggctgagt

SEQ ID NO: 21077 - DNA, 157 bp, Homo sapiens
  chr7:4183392-4183549
  hypo
ggcacccatggggctccagcccgactctctcgtcactttctcgctggggacccatcttggagcttcacagcctcgtcctcatccttgtcttgtatgcttcctgacaggcctgcggcgagggtctggcatgggaagcgttgcagggatgcagcagggt

SEQ ID NO: 21078 - DNA, 239 bp, Homo sapiens
  chr7:4185349-4185588
  hypo
gcagggtaccagattgcctaccgcctggccagcagcagcccccacaccttcaccaccgtggaggtcggcgccacagtgaggcagttcacagccaccgacctggccccggagtccgcatacatcttcaggctgtccgccaagacgaggcagggctggggggagccactggaggccaccgtcatcaccaccgagaagagaggtaagaccttgggggacccgggggtactgcagatgttgtg

SEQ ID NO: 21079 - DNA, 144 bp, Homo sapiens
  chr7:4187951-4188095
  hypo
caattaaacaattattccttccgccgcggaacttctctgctgaaatcgatggggtgcagaggcacagcggcggcagatgatgggcactccaggccgggcctggccccaggcaccccgcgtcccgcatccaagctactgcacaca

SEQ ID NO: 21080 - DNA, 226 bp, Homo sapiens
  chr7:4214558-4214784
  hypo
catttcctggcacccaccaaacggtgtcacaaaaatactctttgccccttgacatcctcgtgccggggacagagtgaagaagcagctccagaacacgccgtgtggacggtgccctcccgctttctgccatccctgtggcaccagggctgcctacctcacgcgccaatgccagccgcggggccttccacgcacccagtgcgcggacggcagcagctcctatgctcct

SEQ ID NO: 21081 - DNA, 181 bp, Homo sapiens
  chr7:4219128-4219309
  hypo
agcaccaagggtcaagcccagcggattttttccggaatggtcaagcggtatttgcatacaaatgaggatgcgtggagagaggcatcaagagcatacggtatttctgcctctctttgcacgaaaatatgttcaaaggggtcactcagagccaccgaggtacggctcagctttccctcaggga

SEQ ID NO: 21082 - DNA, 136 bp, Homo sapiens
  chr7:4219643-4219779
  hypo
cacttgggcaggccctgagaccgaggcagacgtccagagaaaagagcttcagcaagcggtagggaagccaggggtggtgcgggaaactggggagtcgcgccagggccagccaagcggcaacaggactggatgccca

SEQ ID NO: 21083 - DNA, 30 bp, Homo sapiens
  chr7:4230870-4230900
  hypo
aggccctcccccgccgcggtcacatgggtg

SEQ ID NO: 21084 - DNA, 200 bp, Homo sapiens
  chr7:4247840-4248040
  hypo
ggtcagcatatcagccttcaacgccgccggagatggacctaagagtgacccccagcaggggcgcacccaccaggccggtaggaggaaggcgggtttcctttgggcaggcctccttggacacgtgttttgagagcgccagctcaggtcccctcacacagtggttcccggcccgcccaggcggaaggcaacaccttttgagt

SEQ ID NO: 21085 - DNA, 165 bp, Homo sapiens
  chr7:4254666-4254831
  hypo
ccacaaatgccagcagagcctcgggaccctggcgctcgcctgcctcccctgatggtattggccagaaccctggctcgccgagacactaaccccaggcctgtccgacaagccacatcccgtacccacatacgtcaaaagaagaacgtggaccaagagaggatggca

SEQ ID NO: 21086 - DNA, 161 bp, Homo sapiens
  chr7:4265022-4265183
  hypo
gagcactcttgtgtgggagagcggcctgtgggatggggcggtaccagccagacacgggtgcctgggctcagcctcttaacgctgtgaacacatctcagcattttccaggcagcgataaggcattggttctcaggcttgccgagagagcccttgactttctc

SEQ ID NO: 21087 - DNA, 160 bp, Homo sapiens
  chr7:4272901-4273061
  hypo
acatgtttgtgaaggacatcccgcggagcgccacatcctacaccctcagcctggataagctccggcaaggagtgacttacgagttccgggtggtggctgtgaatgaggcgggctacggggagcccagcaacccctccacggctgtgtcaggtaggccctc

SEQ ID NO: 21088 - DNA, 241 bp, Homo sapiens
  chr7:4273569-4273810
  hypo
cagaggtgtgagcatgagccacgtggtgtcccctccgcaacaaaatcattcgcaaggaaagcagagccccgatcccctgtgttagctgacgcatccttgccgaggagcatgtgtgattttggaggggcaagaaccaccccggcagctatgggggagcccacgagtgcctgacaagaggtcacgtcttcctgggacctcccagaaagccagcggaggggccggggatagtagctgctctggg

SEQ ID NO: 21089 - DNA, 55 bp, Homo sapiens
  chr7:4277571-4277626
  hypo
agccaggcacagtgcagcaaacgctctatgcctcgggacccagatgctgaccctg

SEQ ID NO: 21090 - DNA, 184 bp, Homo sapiens
  chr7:4285296-4285480
  hypo
cctcatcctaggtccccaccccggcctagccccggcggcctgcactactcagacgaggacatctgcaacaagtacaacggcgccgtgctgaccgagagcgtgagcctcaaggagaagtcggcagatgcatcagaatctgaggtcagtgtcggtgcctacttccgggcagtgaccatcagcccct

SEQ ID NO: 21091 - DNA, 209 bp, Homo sapiens
  chr7:4349560-4349769
  hypo
tttatcacagggaaaagacaccgattaaaatcagcatgcaggggcagagcccacgagggttccacacactgagcgtctgctgtcctctcctgtggagctgcggacagcgttacccctctgacaatgtgcgatcatacgcacaaaacacggtcagccaggaaggttcctccacaccagggcttccctgcggctccatcccataggcaggg

SEQ ID NO: 21092 - DNA, 74 bp, Homo sapiens
  chr7:4540650-4540724
  hypo
ctagtacctcctccagggctgcgcagagtagaaaggtagtggtgacctggcgcggtggctcaggcctgtaatcc

SEQ ID NO: 21093 - DNA, 30 bp, Homo sapiens
  chr7:4748935-4748965
  hypo
ggtcagcgtgaggccgcctactgtgcctcc

SEQ ID NO: 21094 - DNA, 30 bp, Homo sapiens
  chr7:4749191-4749221
  hypo
tgcacagttggcttcgcagcaggcctgtgt

SEQ ID NO: 21095 - DNA, 34 bp, Homo sapiens
  chr7:4751450-4751484
  hypo
agagagaaaagattgcggccggccggtgtcaagg

SEQ ID NO: 21096 - DNA, 30 bp, Homo sapiens
  chr7:4751824-4751854
  hypo
gggtgagacgttcgacgtgtcagacttcac

SEQ ID NO: 21097 - DNA, 96 bp, Homo sapiens
  chr7:4754303-4754399
  hypo
catcttaaggattttggcttacgtattttctaagtaggcgttacattcccgcggttcaaaactcaaaaggtatgcggttaaaaattttgttttggt

SEQ ID NO: 21098 - DNA, 30 bp, Homo sapiens
  chr7:4767391-4767421
  hypo
tgggaacccgcgcacggaggaaacacttta

SEQ ID NO: 21099 - DNA, 51 bp, Homo sapiens; identical to SEQ ID NO: 5316
  chr7:4770078-4770129
  hypo

SEQ ID NO: 21100 - DNA, 1121 bp, Homo sapiens
  chr7:4801820-4802941
  hypo
ccagccctttgcagctccttgcgacccaagcgagttcatccgcgccggtggtggtcacccgggtgtgcgaggtggggcccaaggagccagcagcagccgtcgcggccacggccaccaccaccccagccactgccaccaccgcctctgcctccgcctcttccactggagagcccgaggtcaaaaggtcccgggtggaggagcccagtggtgctgtaaccacaccggctggagtgatcgcagctgccggcccccaggggccaggcaccggggagtgaggtcacctgcaacgcgggggagtgggactcacccagcggcgaccccgaagctggacccggcagctcaggcggccgcacccacagacggaggagaacagcccgcggcggcctgtgggcatcggcggcacctggacacacccagccctttccatttgatcgcctgccttcccgtggtttaagacaaaaacacataaacaagttcagacaactgattgtatgattctgggaattctttgctttcctttccttctccctcggcaccacctcctctccccaggcctccctgtcgggcatggggaggaggttggagctcagcatcttgaggaatgtgtcaagacagcccctccgctccgcgctgcacggccagccgcctttgtccgggaggacagacagaaacgcagcaaggcacacaccaaggctgccggggaggcccgggcaccggacagatgcctgttgggaagccaggagctgccgagccacggaccacctaacagcctctccgcccggaacgtgacatagagagtgttggcattaactcggggggtgtccgatttcacttcagaccccaagtttttctttgtttgtttaaacatggaattcagacttcattgtacacctgagacagacacaaaagggatcatgtatttttgaggattttacctgttgacgtctgatgaccggccgtaggtccagggttcccgctgggtttaatcccctcgaagagtaaacctgccgctctgtctgataacttcaagtaagagcagcggcttcctgggttggcgttcgcggtggaaggttcctaggatgaaaggtgagcctggatccgccggccgcagacatcgcgct

SEQ ID NO: 21101 - DNA, 30 bp, Homo sapiens
  chr7:4804926-4804956
  hypo
agggttgcatgtcccggccacaaagccctc

SEQ ID NO: 21102 - DNA, 30 bp, Homo sapiens
  chr7:4805928-4805958
  hypo
tgggtgaaatgagacgctggtgtggggtcc

SEQ ID NO: 21103 - DNA, 30 bp, Homo sapiens
  chr7:4824491-4824521
  hypo
gcccgggagccacacgtcagcctgctgaga

SEQ ID NO: 21104 - DNA, 31 bp, Homo sapiens
  chr7:4825297-4825328
  hypo
acttcttcctgagccacggtgagcccagggt

SEQ ID NO: 21105 - DNA, 519 bp, Homo sapiens
  chr7:4855713-4856232
  hypo
tcacccctcagggacaccagacgctcagggagcaggaggccaaaaagggcagagccgcctccaggagctggcgagggaggcgccagcagccgtcatgtccaggaatgtgagcccccgacccctcaaccctgcacgaggccctcacccctgtcgaggagctggttgagaagcagtgtcccggagaagaagaagaggtaggcgagcatctgcgaggccacctcggggtgcacctgcagctgccgcaggaggtccagggctgcctggtacacagacaccacgcggcgcagctcctcgggcagttcgggggccgaggaccagctctcacggcgctccgtctggaatggcgggcactccaggagtgccgggaggcagatgtacagggactggcgggggcaagaggagaacagcaaccagcatttccaggagcgctggcggccgaacggggggcctgacccagcgagctccccacccacgcactgcttgcagggacccggcctcggtagcttcctgctggacagg

SEQ ID NO: 21106 - DNA, 164 bp, Homo sapiens
  chr7:4856448-4856612
  hypo
ggctcaccgcacccccgatgcaccccaagctggccagggccacagggggaccggcggcagcacctctggcacccgtgggtccagggtgacaacagggccatgtcccttgcgccccatgctggggcctcccccacctcatccctgaccctcgaaatactggcagg

SEQ ID NO: 21107 - DNA, 466 bp, Homo sapiens
  chr7:4856837-4857303
  hypo
cctgagtgcagaagcagagcccgtccgtgcaccttggagacatagtagacgcactgctggaaggcgtacagcaccacctcctccagcaccgccatggcctcctcgctggccgtcagcgtgcaggagaacagcgattccttcgagcctgccgggagacagccacgccaatggtcacaacgggcacagcgctcaggaacgcagcaactcagccagccgccagctctttccctggcgcgggcaccacccaacgcgcccatctggggtccagatgcgataaactggccgagggactctgggccctggctgggacgagcgcagcaaacctgccgccactcttacctggggaggggaatgccgggaggggcaggaggggtccagacacccaacatctcaatgcccagcccagcccagcccaagcgctcattcactcccacgttctggatacgttttctgttacaaccaactg

SEQ ID NO: 21108 - DNA, 30 bp, Homo sapiens
  chr7:4858252-4858282
  hypo
aggtggcccgacggcgcccacagcgagtgc

SEQ ID NO: 21109 - DNA, 35 bp, Homo sapiens
  chr7:4867283-4867318
  hypo
tccatcgcaaaaacgaacaaaaagaaataaataaa

SEQ ID NO: 21110 - DNA, 399 bp, Homo sapiens
  chr7:4874065-4874464
  hypo
gcctgtggggctggggggcagcgacaggcagggaaaggccgccctgcgctcagcagcacagcaccgtgggggtcagatagaggcgctcccgcctcccagccggggccagctccgggccccctcttcccccagaccggcacaggacccagaccgcccaccccagcacactgacccagacagtctcgcggatcagcctggctatcttgagcaggagctgcccgaatgtgcccggctggaagtgggtggccgagtgctggatgcagaggcacaggaggaaggcgggggtcagcttgtggtcgtcgccccccggctcgatcaacgtcatgatcctctgcagcagcgtgtcctccaggtggggctcaaactccaggagcagctgctggcgccggggcagggcgg

SEQ ID NO: 21111 - DNA, 30 bp, Homo sapiens
  chr7:4876213-4876243
  hypo
cctccgggcctgggcgtttatccctggaac

SEQ ID NO: 21112 - DNA, 201 bp, Homo sapiens
  chr7:4915209-4915410
  hypo
cacacagcagcaaccctggcccgtgctctgcagccccaaggtggccctgtcccactcgctttttgcccgctgcttggcagaggcaacgcatggtggaagaatgaccgaaattctgtgtctgacattgaagagcctttgttcccgtgcagaaaacatcccaccatgcgcctcctccctttcgggtttcctggcctcacagga

SEQ ID NO: 21113 - DNA, 197 bp, Homo sapiens
  chr7:4917354-4917551
  hypo
ttctcactgtccccaaacacccgaaagcaccgggcctgccaccgctgcccagcatcgccggcttggcccaccacgtcacacagcacgtactggccggcctgcctggggtccagggcgtaccgctccagcgcctccttcaccagctcacgggcgctggaggtgccggtggccaggacgctcttgtagtgggttcctgt

SEQ ID NO: 21114 - DNA, 78 bp, Homo sapiens
  chr7:4985612-4985690
  hypo
tcagcattcattcctatgtaacgcagctgcctgctcagagaagattcctctggagacgtacacctctctggggcaaaa

SEQ ID NO: 21115 - DNA, 138 bp, Homo sapiens
  chr7:4985869-4986007
  hypo
acgcacaccccaccccgtgcacacaatcccaggagcttcacagagtcgaaacaccatccccgcatcctaagaatagccatgctccaaacatggacggatcaatttgtttccctctgcggcctttctctgaaagaaatg

SEQ ID NO: 21116 - DNA, 81 bp, Homo sapiens
  chr7:5231040-5231121
  hypo
gagaaactgagccaagagaggcgttacggaccagtgccccaggagtctcagagctccagcgggtgggtcatcctcagggca

SEQ ID NO: 21117 - DNA, 43 bp, Homo sapiens
  chr7:5240135-5240178
  hypo
cagtcctccttgtgctcgtttgtgtgtgcgtaggttctgtgca

SEQ ID NO: 21118 - DNA, 30 bp, Homo sapiens
  chr7:5253001-5253031
  hypo
atttgaagtggtgtcgcactgcaggatggc

SEQ ID NO: 21119 - DNA, 52 bp, Homo sapiens
  chr7:5253972-5254024
  hypo
tcctgaggctccagcgaatcaagaccctcagacccccgggctgtccccaccc

SEQ ID NO: 21120 - DNA, 30 bp, Homo sapiens
  chr7:5262437-5262467
  hypo
taagatctgggcgtcggtcttgtcatggga

SEQ ID NO: 21121 - DNA, 30 bp, Homo sapiens
  chr7:5267979-5268009
  hypo
caggtcgggagcttcgctttcccaggtgaa

SEQ ID NO: 21122 - DNA, 30 bp, Homo sapiens
  chr7:5269146-5269176
  hypo
gctggctctgttgccgcagggcagccagtg

SEQ ID NO: 21123 - DNA, 515 bp, Homo sapiens
  chr7:5272773-5273288
  hypo
actgcagattcttggtcgagaagaatgaagaggatttctgtgtttgctgagcagccattgtggagggttacccgcctccactttcccgttgcccatttcactgccaccagctcctcttcctctgctcgaacctatgagtcccagcctcactggcggcctcagacatgctcaggagtgacggggacagagggaggccgctgagttgcccgttagaactcttactgctgcgccagtgacccaggtggagagggaccctgaaccaaacagaacgtgtgctaattttccgaactccaaactgtacactcatattcatttttaaattgtatttttccaaacttcaaaaaggacgatgagcgtgggggataggaaacaaaacctgtaaacgttgtgaatgggctcagtggactctgggaccaaaccttctgtaatctctaaaacaatgggaccaagagctggatggaacctggagtcaaaaagaactgcttcagtccccgctgtaccgcctgcctagctgt

SEQ ID NO: 21124 - DNA, 30 bp, Homo sapiens
  chr7:5273495-5273525
  hypo
tttgaataagccaggcgggagggaggtgac

SEQ ID NO: 21125 - DNA, 31 bp, Homo sapiens; identical to SEQ ID NO: 5323
  chr7:5329219-5329250
  hypo

SEQ ID NO: 21126 - DNA, 30 bp, Homo sapiens
  chr7:5334519-5334549
  hypo
gggatgctgcccaagcggtacacgcagggg

SEQ ID NO: 21127 - DNA, 99 bp, Homo sapiens
  chr7:5334868-5334967
  hypo
aagtctgcgtgtgcgcgtgtgttaggaggtgggccccgtccatggccgtgatgtcatgcacatcacaccatgcctacagcaccgcgctctccttgcagc

SEQ ID NO: 21128 - DNA, 111 bp, Homo sapiens
  chr7:5353277-5353388
  hypo
agctctgcaaatggctcgggtgctgggcagctggtgaaggcgggtggtgcgggactgggctgcggcggtgccgggcgcgccttgggggccttggctcgcttgtccacaggc

SEQ ID NO: 21129 - DNA, 239 bp, Homo sapiens
  chr7:5372544-5372783
  hypo
ccgcgggcgccaggcgtgggtgcggccagggagggtcccggctcccccagccccttcttgggccgcagcagccccgcaggcgaccgcttgcgcaccttgacctcgctctctgagtcggtgtactcgaactctgtgcctgaacgcgggaggagggcgtgctggtcacagcctcgtggggaccccttccctcccacccagccacatggacaccattcctccccggcgggacctccccgcca

SEQ ID NO: 21130 - DNA, 30 bp, Homo sapiens
  chr7:5390494-5390524
  hypo
aacggagccgctttcgtattgaatgacaga

SEQ ID NO: 21131 - DNA, 31 bp, Homo sapiens
  chr7:5391824-5391855
  hypo
ccagaacaaacaggtccgaatacctagtagg

SEQ ID NO: 21132 - DNA, 557 bp, Homo sapiens
  chr7:5428493-5429050
  hypo
tgcgccgcagcagccgcgcgccctcgtcctgccgggcagcctccttggcacccccgcgccccgcttcggccaccagcgcgggcagccccacgtccccggcgccgccgttgcacatggtcagtaccgacggctgcagcgccgcattcttggtcttggactcagccaggaagggcgacaggcgctcagccaggcgcgggggcccccggtcctggcggccctcggcgcgcgcctcctgggtcaggtccaccacgccccgtggccccgaggcctcctcgccccgggcgcgcgggtccttcttgccgaaaagcggaggcggctccccgccgcggcccgcccgctccttggctggaccgtcccgcgacgacgagcctttggccggggcgcccgaggagtggccgccgccaggggtccgggccgagggcgcgtgagagtgcagggagcccggagcccccgcggtgggcaggtagaaaccgtctgcggagaagggaacagcaggcagtgagcgagcgccacctcccctcccacccctgcctgggcggaggcggacccctgagagg

SEQ ID NO: 21133 - DNA, 31 bp, Homo sapiens
  chr7:5437033-5437064
  hypo
cccggatgccagccaacggctcctgcccacc

SEQ ID NO: 21134 - DNA, 83 bp, Homo sapiens
  chr7:5441355-5441438
  hypo
ttactaggtatgctacgagttattttttattcctagtcctatgctgcacatcggaggtactcaagtagtatttacggtaggaa

SEQ ID NO: 21135 - DNA, 109 bp, Homo sapiens
  chr7:5446784-5446893
  hypo
cacgtccttggcactgcggctgggctatcagacctgtggccaccgccgccgttctggaactcccatcggcgcagaaaagaggcaggtgagagtccgaggctgcagtctc

SEQ ID NO: 21136 - DNA, 82 bp, Homo sapiens
  chr7:5449225-5449307
  hypo
ataataataattaaatcgaaaggttagaagataccattaagaaaatattaagaaaatctcctagaaagaagaaactgcaaga

SEQ ID NO: 21137 - DNA, 36 bp, Homo sapiens
  chr7:5453844-5453880
  hypo
cgggattacaggcatgaaccccgtgcccagcctcac

SEQ ID NO: 21138 - DNA, 222 bp, Homo sapiens; identical to SEQ ID NO: 5325
  chr7:5462089-5462311
  hypo

SEQ ID NO: 21139 - DNA, 31 bp, Homo sapiens
  chr7:5480613-5480644
  hypo
agctgactgggggttgcgaggggcctgtggg

SEQ ID NO: 21140 - DNA, 31 bp, Homo sapiens
  chr7:5483111-5483142
  hypo
aagtgttgcctaccaccgaggctacaaaacc

SEQ ID NO: 21141 - DNA, 31 bp, Homo sapiens
  chr7:5491828-5491859
  hypo
cccatctgcactggagcgggtgggcacactt

SEQ ID NO: 21142 - DNA, 63 bp, Homo sapiens
  chr7:5521795-5521858
  hypo
aggctcagggggcacccgctccatgccagccacgaggatcagaggccccggaggccaaccctg

SEQ ID NO: 21143 - DNA, 257 bp, Homo sapiens; identical to SEQ ID NO: 5332
  chr7:5594637-5594894
  hypo

SEQ ID NO: 21144 - DNA, 18 bp, Homo sapiens
  chr7:5625736-5625754
  hypo
cagtgctcgggctgggcg

SEQ ID NO: 21145 - DNA, 920 bp, Homo sapiens; identical to SEQ ID NO: 5333
  chr7:5632265-5633185
  hypo

SEQ ID NO: 21146 - DNA, 30 bp, Homo sapiens; identical to SEQ ID NO: 5334
  chr7:5633474-5633504
  hypo

SEQ ID NO: 21147 - DNA, 293 bp, Homo sapiens
  chr7:5647832-5648125
  hypo
gggggaagccaggccaggggccgggggcatctctggggtcccaggtgagatgcgggtcgagggagccaggccacggttctccagactcgcgtggaggccacgagcgtcttctggaggagcgggcactgcgcggaccggcagactctggggcgctcaggctccccatctcctgaccttttcctaccttcagttccctcctgtcaggacaggttctggggctcgccggggcagggagccagggcagagggtgcagtttccgctcctgcctgagtcaccttcgctttctcagcgat

SEQ ID NO: 21148 - DNA, 30 bp, Homo sapiens
  chr7:5886707-5886737
  hypo
caggagcgaatccacgcggaggtcaccagt

SEQ ID NO: 21149 - DNA, 19 bp, Homo sapiens
  chr7:5897050-5897069
  hypo
agtctcaaaaggaccacgc

SEQ ID NO: 21150 - DNA, 24 bp, Homo sapiens
  chr7:5917879-5917903
  hypo
cactgcgcccggccagtagtcaaa

SEQ ID NO: 21151 - DNA, 6 bp, Homo sapiens
  chr7:5920650-5920656
  hypo
caaaat

SEQ ID NO: 21152 - DNA, 2 bp, Homo sapiens
  chr7:6059657-6059659
  hypo
aa

SEQ ID NO: 21153 - DNA, 31 bp, Homo sapiens
  chr7:6060732-6060763
  hypo
gagttaacaccaagggcgtcaaagtcgtcta

SEQ ID NO: 21154 - DNA, 152 bp, Homo sapiens
  chr7:6068149-6068301
  hypo
tgggattacaggcgtgagccactgcacccaaccctgtattgttatttaagactgcagaataagttgaatgaaagggcagaaagcaacaaatactaccttggcatcatactcagatccttccaactgttcgggtgaagcgtacagacaagtac

SEQ ID NO: 21155 - DNA, 54 bp, Homo sapiens
  chr7:6077025-6077079
  hypo
ctttcaatgatttcatcgcccccacttaccttcagatctcggtgcacaattccc

SEQ ID NO: 21156 - DNA, 101 bp, Homo sapiens
  chr7:6124620-6124721
  hypo
attacaggtgcgagccaccgcacccagccaaggactcttaagtgtaactgatccaccctacttttctccctggcatgaacgactgtgcccagccttgtttt

SEQ ID NO: 21157 - DNA, 28 bp, Homo sapiens
  chr7:6154602-6154630
  hypo
gagccactgtgcccggccctatatatat

SEQ ID NO: 21158 - DNA, 30 bp, Homo sapiens
  chr7:6188239-6188269
  hypo
ccctgttggtcctgtcggggcgaacagtag

SEQ ID NO: 21159 - DNA, 464 bp, Homo sapiens
  chr7:6188604-6189068
  hypo
taattcaggtatgtgaggagacgctgggaaggccacacgtgatctgttaactgactttcacgcctgcgcctccacgggggtgcagcagccatgggggaacctgcagcgagtctcactgcgtgaggagaatgtggagacgttgtggggcagtggtggggtcatggctgagtgagtggcggctgaagcagcccctactctccgcccacgtgaccgtctcctttgctccgaggcgagggtgattcctccttcctggcactctgcatcagcgagctcccaggaaacccaaccaggtagcaagtgtgtgactccatgccacaggtcctgctgatttcgatcagatctgggacagaacgagtttggtcggaggattgttttctgtgaaacatgtatgtcctgtttgttgatttattgccagaaaactagggcctgtggaaagtatgcgcgggtaggagggattgagaaaa

SEQ ID NO: 21160 - DNA, 30 bp, Homo sapiens
  chr7:6198831-6198861
  hypo
ctaacatcaggctgcgtgtgggttggatgg

SEQ ID NO: 21161 - DNA, 30 bp, Homo sapiens
  chr7:6203252-6203282
  hypo
gacaacctcccaggcgggcgtggagtttga

SEQ ID NO: 21162 - DNA, 30 bp, Homo sapiens
  chr7:6204506-6204536
  hypo
ggaggggccgcccgcggtgtctttctgctg

SEQ ID NO: 21163 - DNA, 30 bp, Homo sapiens
  chr7:6204759-6204789
  hypo
cggctttggcagcccggccctctggggttt

SEQ ID NO: 21164 - DNA, 20 bp, Homo sapiens
  chr7:6209131-6209151
  hypo
gcacccggctgataaaattt

SEQ ID NO: 21165 - DNA, 31 bp, Homo sapiens
  chr7:6229695-6229726
  hypo
aaaacatattagttaacgaaagagggtctca

SEQ ID NO: 21166 - DNA, 31 bp, Homo sapiens
  chr7:6260173-6260204
  hypo
gactgggagaaagtctcgaaacatcctgtct

SEQ ID NO: 21167 - DNA, 83 bp, Homo sapiens
  chr7:6308100-6308183
  hypo
tgctcttgtaacttaagatattttggagatctctccatgtcaactaagaaaagagcttcctcgttcctttctacaactttaca

SEQ ID NO: 21168 - DNA, 30 bp, Homo sapiens
  chr7:6370702-6370732
  hypo
catgatagtttgtccgagtcacctcctccg

SEQ ID NO: 21169 - DNA, 161 bp, Homo sapiens
  chr7:6432514-6432675
  hypo
ccttgtagggtgagatgagtacgtgtcacgcacgcataacagtcctgggcacatagcacacactgtggggccagccgctgtcagaattctcctgttcctcagtgtgcgggtgggtcggcctaaagagtgctgctttccacgttgtgcccaaatgagtggaa

SEQ ID NO: 21170 - DNA, 209 bp, Homo sapiens
  chr7:6443273-6443482
  hypo
atcactgtcttgccagattaccgacactgtcacttgaccaatactgaccctctttacctcgcccacgcggacacacgcctcctgtagtcgctttgcctattgatgttcctttgggtctgtgaggttctgtaaactgtgctagtgctgacgatgttctgtacaacttaactcactggcgagaatacagcgtgggacccttcagccactac

SEQ ID NO: 21171 - DNA, 503 bp, Homo sapiens
  chr7:6443688-6444191
  hypo
acagtcattttcaatgcgtgtctccacacaggagggacagggagtgccacctccaggggagaactgggtgagcccaaatacggcaggagtggaggtgacattcatgtttggacctgtcgaacagtggcgaagctctgagggagaagcgcctatcggggtgtgtgtgcacatcctggcccagagctaggggctgaagatggagatgttgggaccctagactggccctggaagagtagaggttggtgaaccacatgcccttaagatcctttccagaggctgagtgcgtggcttacgcctctaagcccgacgctttgggaggctgacacaggaggagcgcttaagcccaggagttctagaccagcctggacaagaaagagacctacccaaaaaaaaaatgcaagagcctgaacttgtactacataaaggttcatgttagaattcgttttcttaatattcctttttattgctttgaagattgtttttgagtttttgtttttttttta

SEQ ID NO: 21172 - DNA, 30 bp, Homo sapiens
  chr7:6448918-6448948
  hypo
tccacttactttcccgatcgggtttcgtct

SEQ ID NO: 21173 - DNA, 17 bp, Homo sapiens
  chr7:6483609-6483626
  hypo
ataggtgatcagacgcg

SEQ ID NO: 21174 - DNA, 89 bp, Homo sapiens
  chr7:6484555-6484644
  hypo
caacaaaacaaaatcatgagctaccacttcacattcactaggatggctataattaacaagtcatataataagagcgttgggcaattaga

SEQ ID NO: 21175 - DNA, 43 bp, Homo sapiens
  chr7:6500863-6500906
  hypo
tgtcctcctgggtgaccaaaacggtggtaacatagccaaggtt

SEQ ID NO: 21176 - DNA, 45 bp, Homo sapiens
  chr7:6524567-6524612
  hypo
aaaattaggtagaaaagtgaacgtctgaccgggcgcggtggctca

SEQ ID NO: 21177 - DNA, 181 bp, Homo sapiens
  chr7:6524911-6525092
  hypo
ttgaatatttctacgggatggggacgtcacaagaaattgcaaacaaaaaaagctgacaaacaggatctgctacataatttgcgggacggagtgcaaaacaaaaacgcacagttcgcagttcaaaaagcagggcgggggcgaggacctggtgcggtggctcatgcctgtagtcccaacactt

SEQ ID NO: 21178 - DNA, 42 bp, Homo sapiens
  chr7:6619098-6619140
  hypo
gggattacaggcatgagccaccacgctcggcctcagtatcca

SEQ ID NO: 21179 - DNA, 29 bp, Homo sapiens
  chr7:6643896-6643925
  hypo
ttcataccgatgcagttactaactagcaa

SEQ ID NO: 21180 - DNA, 333 bp, Homo sapiens
  chr7:6644209-6644542
  hypo
gggtcagtgagtggctcggcagccctgggggtgcacacagcctcagcctggcccagtggccgtgtcaggtccagcagcagagcgctgggcagcgctcgcaggctgagacagaaacatgcataactcgagtccagggttcagccggatgctggtccacagcctgcagaggaaccgcatccttgtgtgggggttggggactcccatccgtgccacactcactctgccaggttctgcaagggaggagccggggcagatgtctggatgggtacaaagcctgagggggcggaagggaacagtctctgggataagactgtcctgcgtgaggtgtcatga

SEQ ID NO: 21181 - DNA, 25 bp, Homo sapiens
  chr7:6645338-6645363
  hypo
ttcttttttgagacagagtctcgct

SEQ ID NO: 21182 - DNA, 204 bp, Homo sapiens
  chr7:6645602-6645806
  hypo
tacaggtgtgagccaccacgcctggcctacctcttagatttgtgacagtctctgtgttcaccgtgtttccaaatagactggaaacttcttgaagtgctttctatctccggcagggtgtgtacaggttcaaatcatcacatgaccgaaatttggcctctgcagtactctgcagtacctcctccttgggttcgttaatctcttgct

SEQ ID NO: 21183 - DNA, 1291 bp, Homo sapiens
  chr7:6647170-6648461
  hypo
tctgaatttcggggtcgtttgcaaggccagcttcctggggcttctgcttggaattcaggtagggcgcggtcattctcggctctgaggagactgtggccagctgttctgtgtgtcccagcgcagcagagagccgcagaggctgacgtggaggccacctgtgtgggctgcgcgcccgggagtgctacggccggagctccgtgggccacaggccccgtgcagagcccactcccacgcatcctcgcctgtggggtcctggctctgccactgcttctccgtgtccaccgcctggacccccgggtggtccgtgcctgtgtcggtgcctctcctgggcggggtgcggggggacggggtcagcctaccgtgcgcacctgcggagtccccggagcccgcccgcgctgacgcttatgcttgtgttcgcagcctcctccagctggtgatctcgggtcccgtgcagcagtcgcctcacgccgcgctccccccggggttctacccccacatccacacgcccccgctgggctacggggctgtcccggcccaccccgccgcccaccccgccctgcccacgcatcccggccacaccttcatctccggcgtgacctttcccttcaggcccatccgctaggctggcccgtgtgtgccttctgcgctctcgctggacgaagcctttcgagatggaaggggtggccggactcccagaagagaacctcggggaaggggtcgggcagcccctccccgccggcagaaccgtcttggtgtcacggagtccaggtgcttcccacccggtcgcattctttgacatgcagattggatggtggagggaagagtccagcctctgccgagagcctgctgcgtgcatttttaaaagatgccgatcctgggagcctctgttctctgcgcatttcagacacagcctgtgtggcgaggagtgtgacggcaggagccacgggtgcaagcccgtgtgtctggcctctttcctcgtgaagacgatgtgtccccgccagaaaaagtgggctccttctgcagccccgtgagctgagcccaggctgcgtagtgaccacaagcttatgtgcagcactgctcagggaggctgtcaggaattcccctcacctcggaaaggaacttctcagttttattgggggtgtctaaatttcctttcatatgttcaaataaatttttctaaacagtcatgtagactttatggaatgtatttttaacagcttcataaatattgcttccaactgcggtattttcttagcaatctctttttttttttttttttttttttttttat

SEQ ID NO: 21184 - DNA, 207 bp, Homo sapiens; identical to SEQ ID NO: 5338
  chr7:6654928-6655135
  hypo

SEQ ID NO: 21185 - DNA, 31 bp, Homo sapiens
  chr7:6682330-6682361
  hypo
gttggggacccaggagcgacttagccgtggt

SEQ ID NO: 21186 - DNA, 30 bp, Homo sapiens
  chr7:6682769-6682799
  hypo
ctgctgtttggaggcgtctgttggcagcgg

SEQ ID NO: 21187 - DNA, 31 bp, Homo sapiens
  chr7:6686318-6686349
  hypo
ctcccctgatgctccccgcctcccccagtgc

SEQ ID NO: 21188 - DNA, 31 bp, Homo sapiens
  chr7:6687041-6687072
  hypo
tgcctatggacttgggcgtgtcacccttgtc

SEQ ID NO: 21189 - DNA, 30 bp, Homo sapiens
  chr7:6689203-6689233
  hypo
gttcccgtggacttcgacagagcctggcct

SEQ ID NO: 21190 - DNA, 30 bp, Homo sapiens
  chr7:6693015-6693045
  hypo
ggcttccacttccccgtgcaccccaagtcc

SEQ ID NO: 21191 - DNA, 30 bp, Homo sapiens
  chr7:6693319-6693349
  hypo
agacgtttgggcgccgggccgcgctggcca

SEQ ID NO: 21192 - DNA, 30 bp, Homo sapiens
  chr7:6693823-6693853
  hypo
gcggcttcgcgcagcgctccaacctggcca

SEQ ID NO: 21193 - DNA, 30 bp, Homo sapiens
  chr7:6694963-6694993
  hypo
ccttattctcgagccgcctcctcttctcta

SEQ ID NO: 21194 - DNA, 30 bp, Homo sapiens; identical to SEQ ID NO: 5339
  chr7:7044631-7044661
  hypo

SEQ ID NO: 21195 - DNA, 37 bp, Homo sapiens
  chr7:7249347-7249384
  hypo
tattgtagaacctttcactcacgtccgtgtgaagaga

SEQ ID NO: 21196 - DNA, 210 bp, Homo sapiens
  chr7:7605223-7605433
  hypo
gaatcctctttcaccgtcattcacttggtcagtcaccaagctctgttcatcccgccttctaagtattccccagggcccccacttctctccatgcccactctccgtgccactggtaacctgcgtttctatcatccctcattctgatactctatccctccagctctctgcgcaaaaactgatcatactggccgggcacagtggctcatgcct

SEQ ID NO: 21197 - DNA, 405 bp, Homo sapiens; identical to SEQ ID NO: 5341
  chr7:7605663-7606068
  hypo

SEQ ID NO: 21198 - DNA, 101 bp, Homo sapiens
  chr7:7612730-7612831
  hypo
gctatatttgatcttcggaatacaagccaaaagatgttcgtaaatacaaaagctgttcagggtgtgacggtagacccatatttccacgatcgtgttgcttc

SEQ ID NO: 21199 - DNA, 180 bp, Homo sapiens
  chr7:7613123-7613303
  hypo
gttgtaactcccaaccgaacaatgtcagacttcactgtttttgaaaggatatctcttgcctggagcccaattacatctttaatgtgggcttgtggtcgtcatttatatgaatgtacggaagaagaaaatgataattctttagaaaaagatatagcaacgaagatgcgtcttcgggcttta

SEQ ID NO: 21200 - DNA, 32 bp, Homo sapiens
  chr7:7807036-7807068
  hypo
tgagccaccgcgcccagccagaaattaagctc

SEQ ID NO: 21201 - DNA, 31 bp, Homo sapiens
  chr7:7824632-7824663
  hypo
actgtgttggagatttcgtggcatgtgtagt

SEQ ID NO: 21202 - DNA, 30 bp, Homo sapiens
  chr7:8153354-8153384
  hypo
cacatagagatacacgaaaaccctttatac

SEQ ID NO: 21203 - DNA, 627 bp, Homo sapiens; identical to SEQ ID NO: 5353
  chr7:8483359-8483986
  hypo

SEQ ID NO: 21204 - DNA, 30 bp, Homo sapiens; identical to SEQ ID NO: 5354
  chr7:9580107-9580137
  hypo

SEQ ID NO: 21205 - DNA, 2 bp, Homo sapiens
  chr7:12750830-12750832
  hypo
ac

SEQ ID NO: 21206 - DNA, 21 bp, Homo sapiens
  chr7:12751553-12751574
  hypo
tacaggcgtgagccaccgcac

SEQ ID NO: 21207 - DNA, 10 bp, Homo sapiens
  chr7:12763982-12763992
  hypo
gccaccatgc

SEQ ID NO: 21208 - DNA, 31 bp, Homo sapiens
  chr7:12795791-12795822
  hypo
acttttatatagacagcgtctcttaccatac

SEQ ID NO: 21209 - DNA, 31 bp, Homo sapiens
  chr7:12971156-12971187
  hypo
tctcccagaatttccacgtgttgtgtgtcgg

SEQ ID NO: 21210 - DNA, 39 bp, Homo sapiens
  chr7:16370911-16370950
  hypo
ctgcacctggccagaaacgtgttttacaaggcataggat

SEQ ID NO: 21211 - DNA, 31 bp, Homo sapiens
  chr7:16436344-16436375
  hypo
tgtgatggaatacattcgtatgacatgactg

SEQ ID NO: 21212 - DNA, 30 bp, Homo sapiens
  chr7:16438113-16438143
  hypo
ctatatcattggcacgtgattggcataggt

SEQ ID NO: 21213 - DNA, 30 bp, Homo sapiens; identical to SEQ ID NO: 5367
  chr7:16793124-16793154
  hypo

SEQ ID NO: 21214 - DNA, 123 bp, Homo sapiens; identical to SEQ ID NO: 5368
  chr7:17338150-17338273
  hypo

SEQ ID NO: 21215 - DNA, 92 bp, Homo sapiens; identical to SEQ ID NO: 5369
  chr7:17338646-17338738
  hypo

SEQ ID NO: 21216 - DNA, 31 bp, Homo sapiens; identical to SEQ ID NO: 5370
  chr7:17339051-17339082
  hypo

SEQ ID NO: 21217 - DNA, 37 bp, Homo sapiens
  chr7:17413226-17413263
  hypo
tgctgggattacaggtgtgagccgccgcgcccaaccg

SEQ ID NO: 21218 - DNA, 31 bp, Homo sapiens
  chr7:17891210-17891241
  hypo
ataaatcagacatggccgtgaaataaagaga

SEQ ID NO: 21219 - DNA, 195 bp, Homo sapiens; identical to SEQ ID NO: 5372
  chr7:18125866-18126061
  hypo

SEQ ID NO: 21220 - DNA, 375 bp, Homo sapiens; identical to SEQ ID NO: 5373
  chr7:18126082-18126457
  hypo

SEQ ID NO: 21221 - DNA, 229 bp, Homo sapiens; identical to SEQ ID NO: 5374
  chr7:18126465-18126694
  hypo

SEQ ID NO: 21222 - DNA, 40 bp, Homo sapiens
  chr7:18927744-18927784
  hypo
agaaatgagctttcactgggccgggtgcggtggctcccgc

SEQ ID NO: 21223 - DNA, 442 bp, Homo sapiens; identical to SEQ ID NO: 5381
  chr7:19156303-19156745
  hypo

SEQ ID NO: 21224 - DNA, 511 bp, Homo sapiens; identical to SEQ ID NO: 5382
  chr7:19157055-19157566
  hypo

SEQ ID NO: 21225 - DNA, 31 bp, Homo sapiens
  chr7:20628396-20628427
  hypo
ggagccccagaatcatcgtcctcctccagcc

SEQ ID NO: 21226 - DNA, 31 bp, Homo sapiens
  chr7:20664637-20664668
  hypo
ttccatgaaggtcaatcggagttagaaatta

SEQ ID NO: 21227 - DNA, 30 bp, Homo sapiens; identical to SEQ ID NO: 5387
  chr7:20817515-20817545
  hypo

SEQ ID NO: 21228 - DNA, 126 bp, Homo sapiens; identical to SEQ ID NO: 5388
  chr7:20817830-20817956
  hypo

SEQ ID NO: 21229 - DNA, 30 bp, Homo sapiens; identical to SEQ ID NO: 5393
  chr7:20826113-20826143
  hypo

SEQ ID NO: 21230 - DNA, 171 bp, Homo sapiens; identical to SEQ ID NO: 5394
  chr7:20826493-20826664
  hypo

SEQ ID NO: 21231 - DNA, 18 bp, Homo sapiens
  chr7:20837608-20837626
  hypo
ggcacccggcgcaggtcg

SEQ ID NO: 21232 - DNA, 61 bp, Homo sapiens; identical to SEQ ID NO: 5400
  chr7:20837650-20837711
  hypo

SEQ ID NO: 21233 - DNA, 121 bp, Homo sapiens
  chr7:20855064-20855185
  hypo
actccgtctcaaaacaaacaaacaaaaaaaaagtatgagtcaaagatggtgtttggagaattacgtagaggctaagactattcaccttctagaacttacttgtttgtttcctccattggtt

SEQ ID NO: 21234 - DNA, 38 bp, Homo sapiens
  chr7:21409420-21409458
  hypo
aggattacaggcgtgagtcaccacgcctgggcttccaa

SEQ ID NO: 21235 - DNA, 38 bp, Homo sapiens
  chr7:21501379-21501417
  hypo
agagtgagccagggctgccagcacgctgtcacctctca

SEQ ID NO: 21236 - DNA, 30 bp, Homo sapiens; identical to SEQ ID NO: 5405
  chr7:21985262-21985292
  hypo

SEQ ID NO: 21237 - DNA, 31 bp, Homo sapiens; identical to SEQ ID NO: 5407
  chr7:22396516-22396547
  hypo

SEQ ID NO: 21238 - DNA, 30 bp, Homo sapiens
  chr7:22704301-22704331
  hypo
agcagatcattagacgaccaaaactgtcat

SEQ ID NO: 21239 - DNA, 1258 bp, Homo sapiens; identical to SEQ ID NO: 5409
  chr7:22893442-22894700
  hypo

SEQ ID NO: 21240 - DNA, 30 bp, Homo sapiens; identical to SEQ ID NO: 5410
  chr7:23053922-23053952
  hypo

SEQ ID NO: 21241 - DNA, 30 bp, Homo sapiens
  chr7:23211106-23211136
  hypo
ttccgagctgtatgccggtcacttcacctg

SEQ ID NO: 21242 - DNA, 105 bp, Homo sapiens
  chr7:23211636-23211741
  hypo
attattttaaagaagagatataaacaataattatagagagttactcttatgccaagtttcccttttgttgttgtccttactgttgtttggcgtctcttggtttaa

SEQ ID NO: 21243 - DNA, 2092 bp, Homo sapiens; identical to SEQ ID NO: 5413
  chr7:23507682-23509774
  hypo

SEQ ID NO: 21244 - DNA, 30 bp, Homo sapiens; identical to SEQ ID NO: 5416
  chr7:23510939-23510969
  hypo

SEQ ID NO: 21245 - DNA, 1061 bp, Homo sapiens; identical to SEQ ID NO: 5417
  chr7:23513301-23514362
  hypo

SEQ ID NO: 21246 - DNA, 41 bp, Homo sapiens
  chr7:23550216-23550257
  hypo
gattacaaggtgcgagccactgtgcccggcctgccatttta

SEQ ID NO: 21247 - DNA, 43 bp, Homo sapiens
  chr7:23556806-23556849
  hypo
aaaaatcacttggggccgggcacggtggctcatgcctgtaatc

SEQ ID NO: 21248 - DNA, 84 bp, Homo sapiens
  chr7:23578780-23578864
  hypo
gtgctggaattacaggcatgagctaccgcacccagccattttatagatttttaaagctgaggcggagagtagtaaagcaacttg

SEQ ID NO: 21249 - DNA, 297 bp, Homo sapiens
  chr7:23749617-23749914
  hypo
aagtcacagcttgaagccttgcgaaaggaactggccctagaccccaccccggcctataaatcaccagggcgcagcctcagtgcctgggggtcggcagcagccagcgtcaggcggctcccgcacgcttcttcctaggcggcaggccgtggctgccacgtgactcccgctaacaccggatgatggcgcagcgctgtgcacgcaggcgcagtgtggggcccttgcggtcgaagctcacgcggtaagccgctgcacgtgtgctacggcgggcggagggccgaaagtccagtatgtgggtcc

SEQ ID NO: 21250 - DNA, 64 bp, Homo sapiens
  chr7:24099294-24099358
  hypo
ctgagttcccagggggaggggcggctgccatcaccgcagctccgccattgacagagttggggag

SEQ ID NO: 21251 - DNA, 26 bp, Homo sapiens
  chr7:24323302-24323328
  hypo
ctcactccaacagcgcgcagttgtgc

SEQ ID NO: 21252 - DNA, 30 bp, Homo sapiens; identical to SEQ ID NO: 5421
  chr7:24323556-24323586
  hypo

SEQ ID NO: 21253 - DNA, 217 bp, Homo sapiens; identical to SEQ ID NO: 5422
  chr7:24323801-24324018
  hypo

SEQ ID NO: 21254 - DNA, 30 bp, Homo sapiens; identical to SEQ ID NO: 5423
  chr7:24796479-24796509
  hypo

SEQ ID NO: 21255 - DNA, 30 bp, Homo sapiens; identical to SEQ ID NO: 5424
  chr7:24797471-24797501
  hypo

SEQ ID NO: 21256 - DNA, 1201 bp, Homo sapiens; identical to SEQ ID NO: 5425
  chr7:25019059-25020260
  hypo

SEQ ID NO: 21257 - DNA, 30 bp, Homo sapiens; identical to SEQ ID NO: 5427
  chr7:25043520-25043550
  hypo

SEQ ID NO: 21258 - DNA, 34 bp, Homo sapiens
  chr7:25132699-25132733
  hypo
aaagcgatactccgtctcaaaaaaaaaaaaaaaa

SEQ ID NO: 21259 - DNA, 23 bp, Homo sapiens
  chr7:25133434-25133457
  hypo
gggcgcggtggctcacgcctgta

SEQ ID NO: 21260 - DNA, 79 bp, Homo sapiens
  chr7:25158786-25158865
  hypo
tgcattacatagctctcgcccccaacttggcaacatcttattggttttcagaatatactgatgacggattgccaaaaga

SEQ ID NO: 21261 - DNA, 30 bp, Homo sapiens
  chr7:25218726-25218756
  hypo
cataataaaatacacgaatacattaaaact

SEQ ID NO: 21262 - DNA, 507 bp, Homo sapiens; identical to SEQ ID NO: 5428
  chr7:25219593-25220100
  hypo

SEQ ID NO: 21263 - DNA, 532 bp, Homo sapiens; identical to SEQ ID NO: 5429
  chr7:25891898-25892430
  hypo

SEQ ID NO: 21264 - DNA, 31 bp, Homo sapiens
  chr7:25936760-25936791
  hypo
gctttcattctcctggcgtaagtgggttttt

SEQ ID NO: 21265 - DNA, 30 bp, Homo sapiens; identical to SEQ ID NO: 5435
  chr7:25989998-25990028
  hypo

SEQ ID NO: 21266 - DNA, 78 bp, Homo sapiens
  chr7:26217155-26217233
  hypo
gcagcgagccaagatcacggcagtagagtccaggctcagcaatggagggagaccgtcgaaaggagggaaggagggagg

SEQ ID NO: 21267 - DNA, 188 bp, Homo sapiens
  chr7:26283742-26283930
  hypo
ggtctcgactaatggtttctccgggagcccagttaacagggaaaaattcgcatggcctctcggtttcttcggtccgaaaatccaacgttggtccaagaaggctctggtgtgtgccaggcactcactgatcatctggtcttacggagacgcctctaagccatttgatcccgttccgggaacgaaaatgg

SEQ ID NO: 21268 - DNA, 37 bp, Homo sapiens
  chr7:26291674-26291711
  hypo
aatgaaaatgtaatatctggccgggcgcagtggctca

SEQ ID NO: 21269 - DNA, 18 bp, Homo sapiens
  chr7:26317524-26317542
  hypo
gatcgcaccactgcactc

SEQ ID NO: 21270 - DNA, 256 bp, Homo sapiens
  chr7:26439745-26440001
  hypo
ttcctcagcactcacaggcttcggagtaggggctcccggagtatgcattgacacgatgcgctgcaaatgatccgggcgtggggaagtccccgagtgtgcattgattccacacacggccacggctcctacagggcttttatggtgcagctcgccaatgatccgtgtgttaaagactccccaaatacacattgacacgatagactggagttgtttgggtctatcgtggcaatgatccggggataatggcagtgtctta

SEQ ID NO: 21271 - DNA, 88 bp, Homo sapiens
  chr7:27032267-27032355
  hypo
tgctgggattataggcgtgagccaccgccccccggccctgtccttaatcaacgattgttacacttgcgttgcctctgaaacaatgata

SEQ ID NO: 21272 - DNA, 22 bp, Homo sapiens
  chr7:27089486-27089508
  hypo
cggaagttattgaagaaatatt

SEQ ID NO: 21273 - DNA, 609 bp, Homo sapiens; identical to SEQ ID NO: 5441
  chr7:27135161-27135770
  hypo

SEQ ID NO: 21274 - DNA, 949 bp, Homo sapiens; identical to SEQ ID NO: 5442
  chr7:27135979-27136928
  hypo

SEQ ID NO: 21275 - DNA, 86 bp, Homo sapiens; identical to SEQ ID NO: 5444
  chr7:27191549-27191635
  hypo

SEQ ID NO: 21276 - DNA, 505 bp, Homo sapiens; identical to SEQ ID NO: 5453
  chr7:27212478-27212983
  hypo

SEQ ID NO: 21277 - DNA, 1073 bp, Homo sapiens; identical to SEQ ID NO: 5454
  chr7:27213188-27214261
  hypo

SEQ ID NO: 21278 - DNA, 1347 bp, Homo sapiens; identical to SEQ ID NO: 5457
  chr7:27223547-27224894
  hypo

SEQ ID NO: 21279 - DNA, 35 bp, Homo sapiens; identical to SEQ ID NO: 5471
  chr7:27278958-27278993
  hypo

SEQ ID NO: 21280 - DNA, 131 bp, Homo sapiens; identical to SEQ ID NO: 5472
  chr7:27279237-27279368
  hypo

SEQ ID NO: 21281 - DNA, 578 bp, Homo sapiens; identical to SEQ ID NO: 5473
  chr7:27279453-27280031
  hypo

SEQ ID NO: 21282 - DNA, 360 bp, Homo sapiens
  chr7:27531191-27531551
  hypo
ggagccatggggttggagtgccggctccagcagagttgtctgagcagcggcctgaggtgctgggtctgacatgattgttggccgtggaaggcctcgggccatcctgagctcagatcttggctgccggccgctagggcggctgcttctgcagcagggctagggtgtcccgcttctcaatggagcgcagctgctgctgctttgcccgcttgagcttggcagggtttcggatcacttggacgatctccaccttccgctcgttctccaggcggcatttcaggttctccgcccgacgctgtttcttctcctggcggcgcctctcctactcctcctccaggtgacgggcaaagtccttggccagct

SEQ ID NO: 21283 - DNA, 145 bp, Homo sapiens
  chr7:27686736-27686881
  hypo
gctttggaccattatgaaataaaataagggttacctgaaaataagcacgcgatatcacaacacccgatcactgaggcggctagtaagtgactaatgggccagggagtgtctgcagcatggagacgctggacaaagggatgattca

SEQ ID NO: 21284 - DNA, 168 bp, Homo sapiens
  chr7:27831633-27831801
  hypo
tgttttttaaaggagcaacttcgtaaagcagaggaacaggttcaggcaactcggcaagaagttgtctttctggctaaagaactcagtgatgctgtcaacgtacgagacagaacgatggcagacctgcatactgcacgcttggaaaacgagaaagtgaaaaagcagtta

SEQ ID NO: 21285 - DNA, 30 bp, Homo sapiens
  chr7:27882583-27882613
  hypo
cactggatcaaaagcgatcagcccgaggcg

SEQ ID NO: 21286 - DNA, 401 bp, Homo sapiens
  chr7:27907758-27908159
  hypo
actgtcagcactagtcgttactattttcactggttgaacagacacgtgagttcacacatgacaccatctattgggatgagtcacgttgcttgctcaacaactttaaggcctaggatcagtgacagaactccaggagcagcggggttaacacgggtgaccaatttctcctgcccactgtcactcacatggcccatgcctgctcctgcagatgccgttccccggtcctcaccgcaactccctgtggggttgactgccgcttgcttctcccgctcccatccccctctccagattcctccgcccctgcatgggccgcctcacgggggtttctcaccatccactctgaacaaggcgtggagttgcttgctccagcctggctggtcggctccccagctgccctgccc

SEQ ID NO: 21287 - DNA, 31 bp, Homo sapiens
  chr7:27914926-27914957
  hypo
cactttcctctttcctcggcacagctggaat

SEQ ID NO: 21288 - DNA, 106 bp, Homo sapiens
  chr7:28012335-28012441
  hypo
taaatcattatatatccgtatcatagtattttgcgttgctgttaaaaagaacgacttagatctatctctattgacctggaaggatgttacacgaaaaacaaaagat

SEQ ID NO: 21289 - DNA, 30 bp, Homo sapiens
  chr7:28109346-28109376
  hypo
tttagagtttggggcgcttttttctcctgg

SEQ ID NO: 21290 - DNA, 30 bp, Homo sapiens
  chr7:28230539-28230569
  hypo
ccatgagtatagtccgtaaatacgcctatg

SEQ ID NO: 21291 - DNA, 40 bp, Homo sapiens
  chr7:28989194-28989234
  hypo
tgggcgagagtgagacaccgtctcaaaaaaaaaaaaaaaa

SEQ ID NO: 21292 - DNA, 609 bp, Homo sapiens; identical to SEQ ID NO: 5488
  chr7:29185639-29186248
  hypo

SEQ ID NO: 21293 - DNA, 987 bp, Homo sapiens; identical to SEQ ID NO: 5489
  chr7:29234079-29235066
  hypo

SEQ ID NO: 21294 - DNA, 370 bp, Homo sapiens; identical to SEQ ID NO: 5493
  chr7:29724331-29724701
  hypo

SEQ ID NO: 21295 - DNA, 55 bp, Homo sapiens; identical to SEQ ID NO: 5494
  chr7:29725076-29725131
  hypo

SEQ ID NO: 21296 - DNA, 864 bp, Homo sapiens; identical to SEQ ID NO: 5496
  chr7:30028510-30029374
  hypo

SEQ ID NO: 21297 - DNA, 247 bp, Homo sapiens; identical to SEQ ID NO: 5498
  chr7:30067777-30068024
  hypo

SEQ ID NO: 21298 - DNA, 63 bp, Homo sapiens
  chr7:30341569-30341632
  hypo
tgaaccagttctgtccgcttcactccctggtgttcgcaaggcagttttcggaatcagaaactc

SEQ ID NO: 21299 - DNA, 31 bp, Homo sapiens
  chr7:30490902-30490933
  hypo
taggtctagggccagccgcttggggaagtga

SEQ ID NO: 21300 - DNA, 43 bp, Homo sapiens
  chr7:30516512-30516555
  hypo
ctgtactaagtaaacaattaacgggcacaaactgccactccag

SEQ ID NO: 21301 - DNA, 169 bp, Homo sapiens; identical to SEQ ID NO: 5499
  chr7:30517955-30518124
  hypo

SEQ ID NO: 21302 - DNA, 31 bp, Homo sapiens
  chr7:30656877-30656908
  hypo
aatccaaaacatcctacgtaagtggagtgct

SEQ ID NO: 21303 - DNA, 480 bp, Homo sapiens; identical to SEQ ID NO: 5500
  chr7:30721462-30721942
  hypo

SEQ ID NO: 21304 - DNA, 317 bp, Homo sapiens; identical to SEQ ID NO: 5501
  chr7:30722018-30722335
  hypo

SEQ ID NO: 21305 - DNA, 196 bp, Homo sapiens
  chr7:30817951-30818147
  hypo
atcttggtgaacatcaggaatcgtttgcttgtgctttatgagaacagcgggttttgatttaagatggtaaacagcgattcagctttcttccctcagggcttaaagaagacatgtgtgaccatggaccaggaacgcccacgctctgacctcagcataaacaacagaaatgatcttcgaaaggttttgcatcttgaat

SEQ ID NO: 21306 - DNA, 277 bp, Homo sapiens
  chr7:30857132-30857409
  hypo
atacagagtcactgatggaagcgaggaaggagtacagcaccgctgtccctggtgggcacctccagtgtttgctgtgtgcatacctggccaagaagtgcttgcaggtggggaggggctgggtctgaaaagcggaagcccgggttcccgaagttttgtggttcttatagcccctcaaagacaactccggcaaaagggaggctgagactaggggcaatgcgtctgttgccaggtgatgccagtcttacctagcatgtgcgtgtccatccacttcctatat

SEQ ID NO: 21307 - DNA, 51 bp, Homo sapiens
  chr7:30921726-30921777
  hypo
cagacagaaaaatgcccggacccctttccctggggacggcatttcacatca

SEQ ID NO: 21308 - DNA, 140 bp, Homo sapiens
  chr7:30944105-30944245
  hypo
tgcatgtatgcacatgcgtgtcctcacatgtgtatgttcaggcacacacatttgtatatgtgtgcacacatgtacgggtgtgaaacgtacatcgtgtgtgtgcagatgtgtgttgtccgcgtgcacgtgtgtgtgcaagt

SEQ ID NO: 21309 - DNA, 217 bp, Homo sapiens
  chr7:30972823-30973040
  hypo
tctgccctaaatcacacctcacgggctccacgcttgctcagcttcactatcagggacacacagagggacgggggtctggggacctttctcagaggctccggcatcccagcgaccagcgttaggtggggccactgtgacggtccacttgtaaaaggggtaggcctgaactcacccgaggggacctgctgcccctgccgctgccttgctgtgtgaccct

SEQ ID NO: 21310 - DNA, 463 bp, Homo sapiens; identical to SEQ ID NO: 5502
  chr7:31091703-31092166
  hypo

SEQ ID NO: 21311 - DNA, 457 bp, Homo sapiens; identical to SEQ ID NO: 5503
  chr7:31092241-31092698
  hypo

SEQ ID NO: 21312 - DNA, 77 bp, Homo sapiens; identical to SEQ ID NO: 5504
  chr7:31092713-31092790
  hypo

SEQ ID NO: 21313 - DNA, 30 bp, Homo sapiens; identical to SEQ ID NO: 5508
  chr7:31568350-31568380
  hypo

SEQ ID NO: 21314 - DNA, 18 bp, Homo sapiens
  chr7:31938752-31938770
  hypo
tttttttttttttttttg

SEQ ID NO: 21315 - DNA, 126 bp, Homo sapiens; identical to SEQ ID NO: 5511
  chr7:32338091-32338217
  hypo

SEQ ID NO: 21316 - DNA, 502 bp, Homo sapiens; identical to SEQ ID NO: 5512
  chr7:32338283-32338785
  hypo

SEQ ID NO: 21317 - DNA, 113 bp, Homo sapiens
  chr7:32631008-32631121
  hypo
ctgtggaaagttctttcggtcgtgggcaccactgcttctgctttgccctttgctgtaaagttagtgatgttcctcagctgacctctgaactcaaccaccgcccctttcccttc

SEQ ID NO: 21318 - DNA, 31 bp, Homo sapiens; identical to SEQ ID NO: 5516
  chr7:32768357-32768388
  hypo

SEQ ID NO: 21319 - DNA, 619 bp, Homo sapiens; identical to SEQ ID NO: 5517
  chr7:32982309-32982928
  hypo

SEQ ID NO: 21320 - DNA, 822 bp, Homo sapiens; identical to SEQ ID NO: 5518
  chr7:32996722-32997544
  hypo

SEQ ID NO: 21321 - DNA, 33 bp, Homo sapiens
  chr7:33026794-33026827
  hypo
ctgctttcctggcgatcggaatcttcatgtcag

SEQ ID NO: 21322 - DNA, 31 bp, Homo sapiens
  chr7:33139662-33139693
  hypo
cactctaagtctccctcgtgcacacacaccc

SEQ ID NO: 21323 - DNA, 361 bp, Homo sapiens; identical to SEQ ID NO: 5519
  chr7:33944587-33944948
  hypo

SEQ ID NO: 21324 - DNA, 43 bp, Homo sapiens
  chr7:34034216-34034259
  hypo
tagaccggagctgttcctattcggccatcttgtgtttggtatt

SEQ ID NO: 21325 - DNA, 98 bp, Homo sapiens
  chr7:34349351-34349449
  hypo
tgctgggattacaggcgtaagccaccgcgcccagccgaatgcgggagttttactgagtgatggaggtggctctcagcgtgataggtggggagccagaa

SEQ ID NO: 21326 - DNA, 33 bp, Homo sapiens
  chr7:35042665-35042698
  hypo
gccaccgtgcccggccagcaaccaacaatgttt

SEQ ID NO: 21327 - DNA, 38 bp, Homo sapiens
  chr7:35190134-35190172
  hypo
aacataatcttttttttgagacggggtcttgctctgtt

SEQ ID NO: 21328 - DNA, 37 bp, Homo sapiens
  chr7:35190411-35190448
  hypo
gtgagccaacgcgcccggccacataaaatcattttta

SEQ ID NO: 21329 - DNA, 13 bp, Homo sapiens
  chr7:35226509-35226522
  hypo
gtgcccgttgcca

SEQ ID NO: 21330 - DNA, 29 bp, Homo sapiens
  chr7:35844772-35844801
  hypo
tgagccatcacgcccggccaagtgtttgt

SEQ ID NO: 21331 - DNA, 290 bp, Homo sapiens
  chr7:36124377-36124667
  hypo
actgagcccatccacactggccgctggcggatggacaccgccatgctagatctgtgcggtcgcccggggagcaccgggccattcctaacaagcgtgcagtcgagatgcagacaggaaggccaagggagggagaagggggcttcagcacacggcagcgcgtggcccctgggcccgaccccttctccggcagcgcagcagtcctccaccttgtcttgctaattcccagccactgccccgcctcaggtcatcctcctggcggtcagagtgacctactcgactggcacttctgg

SEQ ID NO: 21332 - DNA, 749 bp, Homo sapiens; identical to SEQ ID NO: 5523
  chr7:36192381-36193130
  hypo

SEQ ID NO: 21333 - DNA, 70 bp, Homo sapiens
  chr7:36338989-36339059
  hypo
tggcgtgccaggcgcgtaccccaccaggtgggcaaagcagaaacctgcggggagcggagacgccttttat

SEQ ID NO: 21334 - DNA, 30 bp, Homo sapiens
  chr7:36585405-36585435
  hypo
tttcagggatgctgcgctgggatgttggca

SEQ ID NO: 21335 - DNA, 30 bp, Homo sapiens
  chr7:36672672-36672702
  hypo
ccaaggcactagcacgtgtctctaggaacc

SEQ ID NO: 21336 - DNA, 453 bp, Homo sapiens
  chr7:36894940-36895393
  hypo
tgaagcagtggagccgaggaacagaatcagggcggtgagcaagatgccagctaggggctgaaagttgccagggctagaggtgatgctgaagggaatgtggacccacagcttccctttaccaaaggacggttccaaggcgtgggtgtgttttcattcctctctcctgttagctaggtgttccagttttggaaggggcatgtctgggcccggccacttcagttacagtcatagacgaagtcatagttgctgggctccttgggaatcggcggaggtgcgtcagggatctggatgttttccaggtccaggaggcggagcttgatttccatgctgagcagggtgtccaggtcattccgcgtcaggtcgctcatcatgtccttcccgagtagcgcattcagtccatccgtccagatacagtactggcaggaagggaggcaacagcgatcattactggtg

SEQ ID NO: 21337 - DNA, 30 bp, Homo sapiens; identical to SEQ ID NO: 5526
  chr7:37078723-37078753
  hypo

SEQ ID NO: 21338 - DNA, 105 bp, Homo sapiens
  chr7:37250875-37250980
  hypo
aactattccgtaaagcgcaagaggaccacacgctcggaagagacatcagttatgtggctgaggtcaggcccggggaggctggagggagagcgcatactggagata

SEQ ID NO: 21339 - DNA, 30 bp, Homo sapiens
  chr7:37264571-37264601
  hypo
aaatggccaaggaccgctgcaggatcgaga

SEQ ID NO: 21340 - DNA, 30 bp, Homo sapiens
  chr7:37265720-37265750
  hypo
aggaggggtgggagacgcagataccaacac

SEQ ID NO: 21341 - DNA, 69 bp, Homo sapiens
  chr7:37299039-37299108
  hypo
atacaaaagccaaaagcgcaagactatctgcatattacagagtgggcatctcaacgacaggcttcaagg

SEQ ID NO: 21342 - DNA, 43 bp, Homo sapiens
  chr7:37458429-37458472
  hypo
tgcagtgaaggggcagtgaggcgagatggggatggtaagagtc

SEQ ID NO: 21343 - DNA, 81 bp, Homo sapiens; identical to SEQ ID NO: 5527
  chr7:37487183-37487264
  hypo

SEQ ID NO: 21344 - DNA, 130 bp, Homo sapiens; identical to SEQ ID NO: 5528
  chr7:37487323-37487453
  hypo

SEQ ID NO: 21345 - DNA, 210 bp, Homo sapiens; identical to SEQ ID NO: 5529
  chr7:37487755-37487965
  hypo

SEQ ID NO: 21346 - DNA, 1099 bp, Homo sapiens; identical to SEQ ID NO: 5530
  chr7:37487984-37489083
  hypo

SEQ ID NO: 21347 - DNA, 371 bp, Homo sapiens; identical to SEQ ID NO: 5532
  chr7:37960165-37960536
  hypo

SEQ ID NO: 21348 - DNA, 585 bp, Homo sapiens; identical to SEQ ID NO: 5533
  chr7:37960562-37961147
  hypo

SEQ ID NO: 21349 - DNA, 30 bp, Homo sapiens
  chr7:38469039-38469069
  hypo
cctgtctgtactagcgtcagggccccaagt

SEQ ID NO: 21350 - DNA, 30 bp, Homo sapiens
  chr7:39390643-39390673
  hypo
attctaatggaaccgcggtgggcaccagca

SEQ ID NO: 21351 - DNA, 799 bp, Homo sapiens; identical to SEQ ID NO: 5537
  chr7:39453505-39454304
  hypo

SEQ ID NO: 21352 - DNA, 31 bp, Homo sapiens
  chr7:39761549-39761580
  hypo
aattctgaagtggctacgttgtctgggttac

SEQ ID NO: 21353 - DNA, 107 bp, Homo sapiens
  chr7:40766264-40766371
  hypo
agggtgaaaggaaagctgaggcgccgcaaccgaattgccaggtctgttttgggagggcaccgacaatgggttggcttaccgccaccgtgaggacacacactgtacct

SEQ ID NO: 21354 - DNA, 37 bp, Homo sapiens
  chr7:41840522-41840559
  hypo
ttctgcttcaaaaatgctacccggggccgggtgcagt

SEQ ID NO: 21355 - DNA, 1366 bp, Homo sapiens
  chr7:42004851-42006217
  hypo
accacaggcaccgtcgagtgcaccaggggccactggctgcctgttgagacagttcccatactgcggggccttacagggctgttcatggaaggcgtttccactggtgccacttccggggctgttgtggagcatcaagtgctctgggccaccgtaggggttgctgttctccccgagggtctgatagcccccagcaggcccgctcctcaaggggttctgcgggtggacgaccatgccgttgcagaacccaaaggcgcgagtctgcggcacagcgggccgcggcccacacttgagcttggaggaggacaggtcggcgcttccggagctgacttcgttccactgaatgggcaggtcggttttgctgccctcggggcagggctgctcgagggcatggaactgctggccagcgtggctgtctggcagcccgggcgcgtcaaagtcaccgggcccgtggggcactttgctgtcgtccgggagggcgctggggaagtgctgctcgtaccctgcttggttctgggaatttaaatactgcaccacgtcgtccggcaggaaatcctcatcgttcaggttggcatcagcgtccatggtcagggactccagggtgacgttctcggtgatgctgggaggacagggggacgagtggaagtttcgggactggccgccctcgggccgcgtgtaattctgaagcacgagactgcgcttctccgcggacgtggccatcgccggggggttgcagctgctgaggctgctgaagcgcggcacacgaggcagggccaggccctcggagcctgtccgcaccgggtcgctggccctcctcacgccgtggcccggcgcatcgtgcggctgcaggtggcgccgcccgtagccgtgggctcccccgtcgctgcacctcctcggggcatgaactggaggcagggccacgccaggctcgagggcatccccgagcagcgccaggcgcgtcttcaggctcatcctctccatgttgggcaggggcgtcggcggcggccctcctgtggcagccgcgtacttggccttgaggcggtactgctgggcgggcgtgaggctgagcaggctgggcaggccgtcgctctggctggcttcgctggagcggcgcgaggcgtcggtggagatggggtcgtaggagtcggccacgctcacgttctgcggccggccctcggcctgtgacgcctcgctggagcggcggctggagaagcagggcgagatccctgaggagcggcggctgctcaggtaggccgagctgatggtgctggcgctgctgtcccttctgttgagcatgttcagcatagtgacgtccaccccagagaggtcgcttctgcccgggagaagcgtcatgggcccacccaagctg

SEQ ID NO: 21356 - DNA, 30 bp, Homo sapiens
  chr7:42007425-42007455
  hypo
ggtcagaggaagctcgagcccactgttgga

SEQ ID NO: 21357 - DNA, 32 bp, Homo sapiens
  chr7:42169384-42169416
  hypo
ggcgacagaccgagactccatctaaaaaacaa

SEQ ID NO: 21358 - DNA, 2021 bp, Homo sapiens; identical to SEQ ID NO: 5542
  chr7:42275801-42277822
  hypo

SEQ ID NO: 21359 - DNA, 30 bp, Homo sapiens; identical to SEQ ID NO: 5545
  chr7:43016820-43016850
  hypo

SEQ ID NO: 21360 - DNA, 171 bp, Homo sapiens; identical to SEQ ID NO: 5546
  chr7:43152036-43152207
  hypo

SEQ ID NO: 21361 - DNA, 786 bp, Homo sapiens; identical to SEQ ID NO: 5547
  chr7:43152413-43153199
  hypo

SEQ ID NO: 21362 - DNA, 381 bp, Homo sapiens; identical to SEQ ID NO: 5548
  chr7:43153229-43153610
  hypo

SEQ ID NO: 21363 - DNA, 30 bp, Homo sapiens; identical to SEQ ID NO: 5550
  chr7:43896240-43896270
  hypo

SEQ ID NO: 21364 - DNA, 21 bp, Homo sapiens
  chr7:44083439-44083460
  hypo
cgtgcccggcaggatttatat

SEQ ID NO: 21365 - DNA, 20 bp, Homo sapiens
  chr7:44089053-44089073
  hypo
cccagcccaaagttcttatg

SEQ ID NO: 21366 - DNA, 30 bp, Homo sapiens
  chr7:44150873-44150903
  hypo
ctgtctgtggctgacgggagtgtgtgcctg

SEQ ID NO: 21367 - DNA, 486 bp, Homo sapiens
  chr7:44153136-44153622
  hypo
agggtgggggcctgggaggggcgctctggggcagccggatcgttctccctccgcagccagtggtggtgattactggcgaatcttgaacccgggtgagtaccgcgtgacagcccacgcggagggctacaccccgagcgccaagacctgcaatgttgactatgacatcggggccactcagtgcaacttcatcctggctcgctccaactggaagcgcatccgggagatcatggccatgaacgggaaccggcctatcccacacatagacccatcgcgccctatgaccccccaacagcgacgcctgcagcagcgacgcctacaacaccgcctgcggcttcgggcacagatgcggctgcggcgcctcaacgccaccaccaccctaggcccccacactgtgcctcccacgctgccccctgcccctgccaccaccctgagcactaccatagagccctggggcctcataccgccaaccaccgctggctgggagga

SEQ ID NO: 21368 - DNA, 30 bp, Homo sapiens
  chr7:44154307-44154337
  hypo
tttatttacaatgccgacactgcagggaat

SEQ ID NO: 21369 - DNA, 30 bp, Homo sapiens
  chr7:44259032-44259062
  hypo
cagacacaaacatgcgacaggcaggccgtg

SEQ ID NO: 21370 - DNA, 31 bp, Homo sapiens
  chr7:44291703-44291734
  hypo
gcaagaagtcaaggccgcgcctgtggattgg

SEQ ID NO: 21371 - DNA, 31 bp, Homo sapiens
  chr7:44302563-44302594
  hypo
ggtggggacccatccccgctccctaccccag

SEQ ID NO: 21372 - DNA, 30 bp, Homo sapiens
  chr7:44517861-44517891
  hypo
actttgggccgggcgcggtggctcacgcct

SEQ ID NO: 21373 - DNA, 31 bp, Homo sapiens
  chr7:44582325-44582356
  hypo
cgggaactggtggggacgtgcccaagaaggt

SEQ ID NO: 21374 - DNA, 142 bp, Homo sapiens
  chr7:44611080-44611222
  hypo
tgtggcagacctggagcgcagtggaagctctccattgagcacacaggtggggatgctgaactgttccaagaacaggcgtagccggtaactccgttctagagtgttgacaaagagcagagacttgccccgaatcaatgacagc

SEQ ID NO: 21375 - DNA, 30 bp, Homo sapiens
  chr7:44612062-44612092
  hypo
ccagctccaagggccgctaattgtagtaac

SEQ ID NO: 21376 - DNA, 32 bp, Homo sapiens
  chr7:44740321-44740353
  hypo
aggaaggaggccgggcgaggtggctcacgcct

SEQ ID NO: 21377 - DNA, 92 bp, Homo sapiens
  chr7:44740652-44740744
  hypo
gacagcgagggagtgccctgctgccctgggataccgcgggggtgggagtatggggtggaggcttgcagctcggagtgtccccagcagtccaa

SEQ ID NO: 21378 - DNA, 217 bp, Homo sapiens
  chr7:44746821-44747038
  hypo
aggaacccacttccagcgggtgatcccagaagatggccctgcagctcagaacccagaaaatgtcaaaaggcttctcttctgcaccggcaaagtgtattatgacctcacccgggagcgcaaagcacgcgacatggtggggcaggtggccatcacaaggattgagcaggtgagggcaggtggtgccatcagggtgtccccccagcgggggtcagggctc

SEQ ID NO: 21379 - DNA, 30 bp, Homo sapiens
  chr7:44748195-44748225
  hypo
atctgctgttccttcgagggttccaggctg

SEQ ID NO: 21380 - DNA, 228 bp, Homo sapiens
  chr7:44835103-44835331
  hypo
tccgggctcaagcaatcctccccgcccagcctcctgagtagcgagcgcctcgacgcccagctaatttttatttttatttatttttttgtagagacggcgtctctctaagatgcccaggctggtggccggtgtcgaactcctaagatgaagcgatcctccccggccttggcctccgcgcctcctaaagcgccaggtatgagccaccgcgcctggcctacaagtgcattt

SEQ ID NO: 21381 - DNA, 507 bp, Homo sapiens; identical to SEQ ID NO: 5552
  chr7:44924271-44924778
  hypo

SEQ ID NO: 21382 - DNA, 30 bp, Homo sapiens
  chr7:45006456-45006486
  hypo
ttggagagggtctgcgccagcagcactgtg

SEQ ID NO: 21383 - DNA, 31 bp, Homo sapiens
  chr7:45015221-45015252
  hypo
gtggacttgagcagcacgtccttgaccctgt

SEQ ID NO: 21384 - DNA, 30 bp, Homo sapiens
  chr7:45046945-45046975
  hypo
gtggatctttgttagcgcgcttcgcactcc

SEQ ID NO: 21385 - DNA, 31 bp, Homo sapiens
  chr7:45091682-45091713
  hypo
acttgctgtcccacatcggaaaccacatgct

SEQ ID NO: 21386 - DNA, 31 bp, Homo sapiens
  chr7:45125844-45125875
  hypo
gaccctctgcacgctgcgtttgagggagaac

SEQ ID NO: 21387 - DNA, 30 bp, Homo sapiens
  chr7:45139765-45139795
  hypo
tatacacaagaggacgttctgtccctcaga

SEQ ID NO: 21388 - DNA, 215 bp, Homo sapiens
  chr7:45222824-45223039
  hypo
cctggcccagggcttcatcaccggcatccacaggcagttcttctccaactgcaccgtggacagggtccacttggaggaccccccagacgaggttctcatcccgctgatcgttatacccgtcgttctgactgtcgccatggctggcctggtggtgtggcgcagcaaacgcaccgacacgctgctgtgagggtcccggtgagatggagtgggtcaca

SEQ ID NO: 21389 - DNA, 154 bp, Homo sapiens
  chr7:45262244-45262398
  hypo
gagaacaactgaatttgccaccgcactgcgactcctgaacagcgaaaaccaaagatctgcggactcatgtactatgctagccgcctgcaccaatgactatcctttcaaaacaacgtgtgtaatcaccctcagcgtacttttaaaaatccctact

SEQ ID NO: 21390 - DNA, 267 bp, Homo sapiens; identical to SEQ ID NO: 5555
  chr7:45613546-45613813
  hypo

SEQ ID NO: 21391 - DNA, 712 bp, Homo sapiens; identical to SEQ ID NO: 5556
  chr7:45613857-45614569
  hypo

SEQ ID NO: 21392 - DNA, 424 bp, Homo sapiens; identical to SEQ ID NO: 5557
  chr7:45614580-45615004
  hypo

SEQ ID NO: 21393 - DNA, 34 bp, Homo sapiens
  chr7:45743035-45743069
  hypo
acctcctgccggcccacgtcgcccagcacttcct

SEQ ID NO: 21394 - DNA, 148 bp, Homo sapiens
  chr7:47088918-47089066
  hypo
ttcccagggcccagaaagccacgctgatggttccagaagttcttctattaggctctcggtcacaggcaaaaacaacagcaccatcttaagtcatgcaaagatgagcagaatgagtacttacgcaaccgcaagagcaggaccccaaaag

SEQ ID NO: 21395 - DNA, 96 bp, Homo sapiens; identical to SEQ ID NO: 5561
  chr7:47294095-47294191
  hypo

SEQ ID NO: 21396 - DNA, 43 bp, Homo sapiens
  chr7:47343334-47343377
  hypo
ctaaggccctctctgagctcacgctgcctgcctttcaagcccc

SEQ ID NO: 21397 - DNA, 297 bp, Homo sapiens
  chr7:47440317-47440614
  hypo
aatcaaccaaggaggttcaaccgcagctgcccacaagcacagggccgccagctccgcgcctcacctttgctggcattgtccagatcctccttcccaaacaccagcccgtagccctgcacagccccagtgtgaaactgcaggcggaaaatgacgtcacgggtggccgagcggtatttcttgtggtagcatttcacctgggttagagagacaaaacaaaacaaagtagctgcagcgggggacacacgttcccggcaaggaacacactccgcggaggccggcacagcagggcctcccctc

SEQ ID NO: 21398 - DNA, 220 bp, Homo sapiens
  chr7:47515353-47515573
  hypo
aaaagctgtggggccaccattcggaccactgttaggccgcagcatcatgaaaagatcctgcaaacctgcaactaccaaggacagactcgcatgcgcccttgttctgaccgtggtgcctccaagtctgcaaatgcgggatcacaggaatcatctactgtgtctgtcatcggtgccctcaccctcaggaagcaggggacacgctctggaactcatcagactg

SEQ ID NO: 21399 - DNA, 72 bp, Homo sapiens
  chr7:47581606-47581678
  hypo
gcaggttattaggaagcgtaaaggtctcagcttccatgcgtcgtgggatgggagactcgggagttatgtgca

SEQ ID NO: 21400 - DNA, 209 bp, Homo sapiens
  chr7:47605355-47605564
  hypo
tagttaacaccaacctcgctttccaatttcgcactctgctggatttcttaatcttaggcaaaaattcacattgggggttcagggagctaaaaggagttctcctaagtatgagaactgtaaatgcagcttattcctcacacgggcgctgggaggctttggaagagcaaccagccacagtctgatggcatgatatgcgtggattactgcaa

SEQ ID NO: 21401 - DNA, 39 bp, Homo sapiens
  chr7:47615109-47615148
  hypo
gcaaattaagaagcaaagatacggccgggcgcggtggct

SEQ ID NO: 21402 - DNA, 222 bp, Homo sapiens; identical to SEQ ID NO: 5564
  chr7:47621698-47621920
  hypo

SEQ ID NO: 21403 - DNA, 30 bp, Homo sapiens
  chr7:47679975-47680005
  hypo
accacagcccacagcgccagctgaggtggg

SEQ ID NO: 21404 - DNA, 18 bp, Homo sapiens
  chr7:47733260-47733278
  hypo
ttctgacatagagtctcg

SEQ ID NO: 21405 - DNA, 916 bp, Homo sapiens; identical to SEQ ID NO: 5565
  chr7:48075043-48075959
  hypo

SEQ ID NO: 21406 - DNA, 263 bp, Homo sapiens; identical to SEQ ID NO: 5566
  chr7:48127994-48128257
  hypo

SEQ ID NO: 21407 - DNA, 50 bp, Homo sapiens
  chr7:48964016-48964066
  hypo
ggctcctgcaccaccgcctcttttcgggctccgccggctcccgccgtccc

SEQ ID NO: 21408 - DNA, 54 bp, Homo sapiens
  chr7:49740606-49740660
  hypo
agctaaggaaggagctggcagcgctgcggcgacgcatccccagaggagcagcag

SEQ ID NO: 21409 - DNA, 196 bp, Homo sapiens; identical to SEQ ID NO: 5567
  chr7:49812821-49813017
  hypo

SEQ ID NO: 21410 - DNA, 283 bp, Homo sapiens; identical to SEQ ID NO: 5568
  chr7:49813809-49814092
  hypo

SEQ ID NO: 21411 - DNA, 629 bp, Homo sapiens; identical to SEQ ID NO: 5569
  chr7:49814121-49814750
  hypo

SEQ ID NO: 21412 - DNA, 133 bp, Homo sapiens; identical to SEQ ID NO: 5570
  chr7:49815116-49815249
  hypo

SEQ ID NO: 21413 - DNA, 116 bp, Homo sapiens; identical to SEQ ID NO: 5571
  chr7:49815656-49815772
  hypo

SEQ ID NO: 21414 - DNA, 15 bp, Homo sapiens
  chr7:50294116-50294131
  hypo
gatcaagaaaggatt

SEQ ID NO: 21415 - DNA, 181 bp, Homo sapiens
  chr7:50342134-50342315
  hypo
aacctgcccaaggtcacgcagtggaggagaggactagaaggtaaatcaatggacctttcactaccttccccttctctgggctgtagcagtgagttaactggctcagacttgcccagcggaatgcccttcaggacacactgagtactgtagtaagagctgcatatgcgctcagggagaatgt

SEQ ID NO: 21416 - DNA, 150 bp, Homo sapiens; identical to SEQ ID NO: 5572
  chr7:50343339-50343489
  hypo

SEQ ID NO: 21417 - DNA, 765 bp, Homo sapiens; identical to SEQ ID NO: 5573
  chr7:50343974-50344739
  hypo

SEQ ID NO: 21418 - DNA, 37 bp, Homo sapiens
  chr7:50365075-50365112
  hypo
ttttctatttataggccgggcgcagtggctcatgcct

SEQ ID NO: 21419 - DNA, 30 bp, Homo sapiens
  chr7:50447780-50447810
  hypo
catggcgtgggctgcgttcttgtgccccag

SEQ ID NO: 21420 - DNA, 104 bp, Homo sapiens
  chr7:50514845-50514949
  hypo
tttgcccatgcatactgaatgcgtaatatctgtgcacggtatgcatctgccttcggtccggtacatatgccagatgtaattgcgaagtaattcttctgccattc

SEQ ID NO: 21421 - DNA, 30 bp, Homo sapiens
  chr7:50533497-50533527
  hypo
gagtctaataagcacgatgccaacactaag

SEQ ID NO: 21422 - DNA, 424 bp, Homo sapiens
  chr7:50560480-50560904
  hypo
gctggtggctgaactgaaccccgagcgccggggaagagttgtccgggagagatgagcgcacagccgccaacttgctggcatcagctctgcagcgtctgcggcagcctcggggcatcagctctgcggcaggcactccacgtcccgaaaggctcaactccttctcaccaccgcactgactaagcaggttttcttcagccttaacatacgcactggttgtctggacctgagggcaggacgccgcattcattacactccttcttatcgtgtgtcaatatttgcctccaagattagggacccaaaatatttctggtccctgaccgcttcagtttcctcatctgtaaagagagcgtggcaatgtctgtgtccctcaacacagggctgtcgtgggggtccagagagctacgagaggttagggacttagaag

SEQ ID NO: 21423 - DNA, 30 bp, Homo sapiens
  chr7:50611869-50611899
  hypo
gataccaagcaagccgtgggtagggacacc

SEQ ID NO: 21424 - DNA, 31 bp, Homo sapiens
  chr7:50655023-50655054
  hypo
tacggcataatggatccgtgtgcccaggtgt

SEQ ID NO: 21425 - DNA, 30 bp, Homo sapiens
  chr7:50658403-50658433
  hypo
tcccagccgcccagcgcgaggccagcgagc

SEQ ID NO: 21426 - DNA, 104 bp, Homo sapiens
  chr7:50659742-50659846
  hypo
ggtggattatgcagcatccaccgctggccgatgacgggtgccaggtgtgtctcaaggaggctggcccacgtcaatctagaggcgaggccattcagcctgctgtt

SEQ ID NO: 21427 - DNA, 302 bp, Homo sapiens
  chr7:50660381-50660683
  hypo
tccagtttattttcaactttccgctggatcttccatgccctccccaatttggccgatgcagagggaggcgaccctgctgggttcacagcagcaaatcgtcgtttaagtccaacaaactagtcaatcttggtcggctggcaccgaacaaacccatctcgctctgggtccccaggtgcagaatcgatgtgtgttcttcaccaacgcacagaccgcttcttcactccagtgttcacttcctccagtcttcagccgagaggacatctgcggtcataaggccactcggatgcagtggtgcttgagtt

SEQ ID NO: 21428 - DNA, 31 bp, Homo sapiens
  chr7:50715973-50716004
  hypo
catgctgctgcaggcccggcaagcggaagac

SEQ ID NO: 21429 - DNA, 109 bp, Homo sapiens
  chr7:50720335-50720444
  hypo
ggattctgagacttccgctgcttgctaacaaccaagccctccgatcaaatacctgaaaatcttaatagcatgagattggtcaaagcagacaccacgcagacttcgctga

SEQ ID NO: 21430 - DNA, 30 bp, Homo sapiens
  chr7:50772852-50772882
  hypo
ttaggtctggtcaacgctgtgcttcacgga

SEQ ID NO: 21431 - DNA, 132 bp, Homo sapiens
  chr7:50935590-50935722
  hypo
gtgggctggggtggcagtggtcgcagggctttaggtcttgacacgatggggaaccgcggcagcagatgcagcaaaggcagtgaggccaaccgagtctctgggtctgcagccgggaagctcttgccttcttgg

SEQ ID NO: 21432 - DNA, 31 bp, Homo sapiens
  chr7:51083467-51083498
  hypo
cctaacacccaggcagcgtcctgcccccagg

SEQ ID NO: 21433 - DNA, 31 bp, Homo sapiens
  chr7:51087890-51087921
  hypo
gtctgtgccccattttcgcacctgtcaaagg

SEQ ID NO: 21434 - DNA, 31 bp, Homo sapiens
  chr7:51092891-51092922
  hypo
tgctgaacctggaggccgtccttggtgcaga

SEQ ID NO: 21435 - DNA, 145 bp, Homo sapiens
  chr7:51099004-51099149
  hypo
ttgcatctgtgccttgcgctacagcagtcccctgcacctggcacctggcaagaaggagtgaagccatctggaggccaagcatgtgcacgtggctggaggctggtccacctcacctcaacactgcacagcccggctgttccttggc

SEQ ID NO: 21436 - DNA, 31 bp, Homo sapiens
  chr7:51150748-51150779
  hypo
acatacgtttgggtatcgggtctgaggcctc

SEQ ID NO: 21437 - DNA, 31 bp, Homo sapiens
  chr7:51194780-51194811
  hypo
gctcaaggccgtgggacgtggagggccctgg

SEQ ID NO: 21438 - DNA, 30 bp, Homo sapiens; identical to SEQ ID NO: 5579
  chr7:51793410-51793440
  hypo

SEQ ID NO: 21439 - DNA, 513 bp, Homo sapiens
  chr7:55145917-55146430
  hypo
catgggacaggccctgggccccgcacacaccccaagccccgcgtcccgcgtcctcactgtcctgggacaccccccaccccaccccaccgccacagcccagagcggtgccaggaagccgcctcgacgcagccgtatcttgaggctccagccccatccccagggtaccacgccacgtagagacactatttttcacttcgtgtttgtcactcctaaagcatgtgtgctagctgcaccaaccctgggatgcctcggtgcatagggtttatgtgcgtcctcctccttccctctgagctggtcccccgtggggaactgctgcccagactgacctgcgtccttccgcacgtgcaggaaaatgtccacgtgcacttgtcagggtgggggccacacgggcaccaccactgatcatctgtgggatcgagttactgcccatgcagatcccacgtgcagggcccagtcgctttggtgagagagtggacgctgtggtgactccacggtctgtggctgtgctcagga

SEQ ID NO: 21440 - DNA, 51 bp, Homo sapiens
  chr7:55212335-55212386
  hypo
gctgctcagagcagccgcgcacatgcttgtgctgtgcgtgcctcctgtgag

SEQ ID NO: 21441 - DNA, 38 bp, Homo sapiens
  chr7:55323528-55323566
  hypo
tcctgtaagtggaccccgcttcccgggcctcagtggtc

SEQ ID NO: 21442 - DNA, 175 bp, Homo sapiens
  chr7:55506180-55506355
  hypo
aggaggctctttgaaatagaacggtaaccatgacaccaaagtcaacactcggagaaagtgaagaggctggcaggtgaataagtgtggacagggcgcctcacagagcaggacaggcaaaggccccggggaagcacttctcactcgctgcagaatcgcaggccttggagaaggcaca

SEQ ID NO: 21443 - DNA, 30 bp, Homo sapiens
  chr7:55545173-55545203
  hypo
gcctgtgccaaggccgtggctcctgtcgag

SEQ ID NO: 21444 - DNA, 30 bp, Homo sapiens
  chr7:55552597-55552627
  hypo
gacatgaatccagtacgcaccttctcctgc

SEQ ID NO: 21445 - DNA, 615 bp, Homo sapiens
  chr7:55553219-55553834
  hypo
ctttgggtggtgcagcacccacgtttttctatgagaggaggtcggaagtcactgtcgccctgtcctcatcccagagctgcaggccggggacagctgcctcataaccccggctgtcctgtggctgcactgtgacgccacacagggcccacacagggcgcccgcacacgggacgtgcacacagtacattcacagagcacttagtgacagacggcaggttggacgtgttaggcacagggacctcacgtggggctgcagacctcattgcaacaagggacctccagtcttgtttggcccacattttccctcatccgcccctcggaagggccggacgcagccatttcaaatattaatacatttagggagaaaagtgcaatggtagactcgggagacaagggatctgaaggaggctctgcttcccacggggagaggaatgcagccagcgaggcgggcgggggacctgtcagacccagagcttgcgtgagcaaatgtgagggagacccttggtacgtgcagtgtgtccctccagatgcaggcacccatgagtggaccacgacgggccagaggctccggctccacctcagccccatcactggcgaagcagaggacagtgggcaa

SEQ ID NO: 21446 - DNA, 224 bp, Homo sapiens
  chr7:55557172-55557396
  hypo
cattctcaactttctctccctcgcactcatgatggtcagtcactatagagttgtttgcgtgaaagctcacacgggtgctggagctgtgcatgcagcggtgactgagggcaggtgtccaggctgtgcagtgttttgagctcctgcaggcgcctcagcaggtgtgcagtaaatatgggccaagacagcaattcaggcaggtctgcgctccaggctgtgactgtagt

SEQ ID NO: 21447 - DNA, 43 bp, Homo sapiens
  chr7:55585936-55585979
  hypo
gtgctaggcagaggtggggaccgcacatgcagggaaagtgctt

SEQ ID NO: 21448 - DNA, 116 bp, Homo sapiens; identical to SEQ ID NO: 5587
  chr7:55593335-55593451
  hypo

SEQ ID NO: 21449 - DNA, 66 bp, Homo sapiens
  chr7:55619128-55619194
  hypo
agtgctccccaaagcatgcctcgaaagtcaattctcccatcagacgcaaataattaaatgcacaaa

SEQ ID NO: 21450 - DNA, 21 bp, Homo sapiens
  chr7:56018234-56018255
  hypo
aatcccagcactttgggaagc

SEQ ID NO: 21451 - DNA, 13 bp, Homo sapiens
  chr7:56018494-56018507
  hypo
aaagaaagaaacc

SEQ ID NO: 21452 - DNA, 24 bp, Homo sapiens
  chr7:56436533-56436557
  hypo
ctctctctgcgtgggatgtgccgg

SEQ ID NO: 21453 - DNA, 21 bp, Homo sapiens
  chr7:56443055-56443076
  hypo
agagtccgctgtgaggccgat

SEQ ID NO: 21454 - DNA, 469 bp, Homo sapiens
  chr7:57247597-57248066
  hypo
cacttctccttaaagccctggcgtcggttgtccaaatcggcagggaagctccagaggccacccagctccttgggctcccgcgacggactctccttggggtacagcatcccgccttgcagtgccagcacacagcaacagcggcccaaacgccgtgcaggccacacctgtccactaggtcacgctttccactccactgcttggccaccgtctgcagggctaagagcagtgcaggaggaggctgcggacaggtcgcatcaggtacctgagacgatccgcgccatctttgctgagggcgagtgccaggcctagaggggcgggatgggcctggcgctgcccagtggggcctgtggctggaaccccgggctaggcctttggggaagcgggaccctcactctcagccccagccaagaagggcaaggtcggttccccaccccagcacagtctggacgatccagggctgcaggccagg

SEQ ID NO: 21455 - DNA, 30 bp, Homo sapiens; identical to SEQ ID NO: 5590
  chr7:57351679-57351709
  hypo

SEQ ID NO: 21456 - DNA, 219 bp, Homo sapiens
  chr7:57706363-57706582
  hypo
aagaaagaaaagaaaaatgaccgtggagcggcggctgcgggagtagggcggcggcgggtgaagtgaagattgggagagaggcctcgtcaactctccccgaatccaggcctgaggctgggatctcgcgctgccgcccaggtgatccgcctgaggtttcttccttgtgaggtttcttcctggtggtcgaccctccgagaatcccaggctccggagaccatc

SEQ ID NO: 21457 - DNA, 278 bp, Homo sapiens
  chr7:57706641-57706919
  hypo
gctcctacttcgcaaagtctcagaaacccatccccgggcaacagtgtcaatcactacgaccaaagcggaggctcaggccttgcgcatgcgcactggcaaggccgactcccagcttgcttcggagagtcaggcctcagatcctttaaaaaatggcggcgatgcgcggccgggggtctggggcagcggtggcggtggcagcgcagtccgaggcggcgggtgggaagaggactacaagagggtactgcgggagacccaacggttggacccatagaggtcct

SEQ ID NO: 21458 - DNA, 69 bp, Homo sapiens
  chr7:57878612-57878681
  hypo
aggtgtcctttgattttccttcgagctcagggaaaggccacttgttccgcctttccactgggcacatgc

SEQ ID NO: 21459 - DNA, 36 bp, Homo sapiens
  chr7:63423513-63423549
  hypo
tttttttttttgagggagtctcgctctgtcgcccag

SEQ ID NO: 21460 - DNA, 35 bp, Homo sapiens
  chr7:63423788-63423823
  hypo
gagcccccgcacccggccacattgattattctttt

SEQ ID NO: 21461 - DNA, 160 bp, Homo sapiens
  chr7:63569122-63569282
  hypo
tcagatcatgaaaattattagcgttactgctgttagggaaataaatgagcctacgaatgaaatagtatctcatgcggtgtatgcaccgggataattggagtaatggcgaggcatactggataggctgcggaaatgctgcggggaaaaaagttaaattgac

SEQ ID NO: 21462 - DNA, 373 bp, Homo sapiens
  chr7:63652609-63652982
  hypo
aagaagctaaggtcccctccccgccttgggcacctcggcctgcgtcattgcgctctgcctggctgcggccgctgtggccaacacctccccggagctcctggagagcgaggcgaagaaagactcagccggcacaaggcaaaggttcagcgggttgagggttcaaggacacggaacgggtgcctgggtggaaagcggtcaccaggtgtgagtgtcaccgtggggccagtgcccagttttgctgcccccgcttcctgaagatcgcagctggagccacctgggcgcagcgtttgatgtggcacctgcagtggccaaagtgacacccaaccgtgaggacgctgcagggagtcggcacggagacatctgtcccctctgt

SEQ ID NO: 21463 - DNA, 45 bp, Homo sapiens
  chr7:63666705-63666750
  hypo
cacctcttacacagtccctaccgtgacacatgggaattacaattt

SEQ ID NO: 21464 - DNA, 45 bp, Homo sapiens
  chr7:63667109-63667154
  hypo
gcagcaaggaaggtcataaaatccgaaattttaaaataattgtca

SEQ ID NO: 21465 - DNA, 438 bp, Homo sapiens; identical to SEQ ID NO: 5594
  chr7:63767573-63768011
  hypo

SEQ ID NO: 21466 - DNA, 104 bp, Homo sapiens
  chr7:63864995-63865099
  hypo
ccgcgcccggccgaatttatttttctgtaacaccgccaggattcgatggtgcaagtcttgtagtccagagacatcttcctgacgctgctccccatcttgtgccc

SEQ ID NO: 21467 - DNA, 30 bp, Homo sapiens
  chr7:64146483-64146513
  hypo
agacctcctaaccgtcgaaaaaggtgggct

SEQ ID NO: 21468 - DNA, 160 bp, Homo sapiens
  chr7:64146761-64146921
  hypo
gctattaccaatcaatctatgcgacaaatgctactcctaactgcccctcaatgtcacccccaccccaagatctctctcccaattaggagtccatgccgccccaagtcccgctcgaagaatccctgagaaacatcaccccgtccacttcttttcttattaa

SEQ ID NO: 21469 - DNA, 479 bp, Homo sapiens
  chr7:64330405-64330884
  hypo
ctgacatccctgacagctgggcgcccgagccggcctcgcgaatgcacatacgccagttgcggggcaccaggcacgagtggtgagctgcggctgtcgtcacagtgaacgccaccgttgcctggccacgggtccctgcggcttggcaaaccagtagacttctgtggacgtgcatcgccgctggactctcacccgtcttctctgagagatccacgggatagtcccctgatcctagaattgggcagggccgacccagggtgaagaaacctcaagcggactcccagggctgcagatcgaaatccctaaggatcccaggggacccgcaggatgtgtcaggcatgcctaggcggtgtgggggtgagtctatttgatagttgccccccggtgatttctaggtaaaccctgcctgtgtttcccggggctgctctctccccggagggacttcctggtggagcagaaccgggttgcctcagaatgtgctg

SEQ ID NO: 21470 - DNA, 298 bp, Homo sapiens
  chr7:64332907-64333205
  hypo
gccaggtgccccagcctacctcgcgaatgcccatgctccagtcgcaggacacctggcggaagcggggagccctggctcgcatcacagtgaaggccacctttgcctggtgacgagtccctgcggcttggcggagcaggagacctctgtgaacatgcgtcggtgttggactcacacctgtcttcactggggaatccaccggatagtcccgcgttcctagaagtggtcagtgccgacccagcctgaagaaacgtcaagcggagccccggggatgcagcacgaaatcactaaggatttcaaa

SEQ ID NO: 21471 - DNA, 158 bp, Homo sapiens
  chr7:64345084-64345242
  hypo
gtattcccttctccctgggaccggattcttgcacacagactctttcgggaatggagtccaaagagaagttcccagcgcccacctcacattctcgaatcgccttttcctccagcgggacccgactaatgagacggcccgaggatgccctatggtagtta

SEQ ID NO: 21472 - DNA, 726 bp, Homo sapiens; identical to SEQ ID NO: 5596
  chr7:64349041-64349767
  hypo

SEQ ID NO: 21473 - DNA, 30 bp, Homo sapiens
  chr7:64373789-64373819
  hypo
atgtgttatttccagcgaagcgctgtgtaa

SEQ ID NO: 21474 - DNA, 30 bp, Homo sapiens
  chr7:64374109-64374139
  hypo
acttgtttaaaacaccgattcatggaccct

SEQ ID NO: 21475 - DNA, 144 bp, Homo sapiens
  chr7:64458252-64458396
  hypo
aaaaggctggtaaataaaagtcggttgcccccccttgaacctgcccctgttcatcataatagataggtccccgtgtttcacggaggggcatctgccacactctggtgtggccaggtcgaaggcggcctgcttgatcatcctgac

SEQ ID NO: 21476 - DNA, 30 bp, Homo sapiens; identical to SEQ ID NO: 5597
  chr7:64691764-64691794
  hypo

SEQ ID NO: 21477 - DNA, 30 bp, Homo sapiens
  chr7:64711253-64711283
  hypo
aggccagccctggacgcagaataggctcca

SEQ ID NO: 21478 - DNA, 43 bp, Homo sapiens
  chr7:64851807-64851850
  hypo
ttagtaatttttctctcgattattaagtatctgttttctttct

SEQ ID NO: 21479 - DNA, 148 bp, Homo sapiens; identical to SEQ ID NO: 5600
  chr7:64974033-64974181
  hypo

SEQ ID NO: 21480 - DNA, 709 bp, Homo sapiens; identical to SEQ ID NO: 5601
  chr7:64974273-64974982
  hypo

SEQ ID NO: 21481 - DNA, 88 bp, Homo sapiens; identical to SEQ ID NO: 5602
  chr7:65037618-65037706
  hypo

SEQ ID NO: 21482 - DNA, 31 bp, Homo sapiens
  chr7:65439501-65439532
  hypo
cagagactcacggcagcgccaggcccacgcc

SEQ ID NO: 21483 - DNA, 39 bp, Homo sapiens; identical to SEQ ID NO: 5604
  chr7:65541036-65541075
  hypo

SEQ ID NO: 21484 - DNA, 30 bp, Homo sapiens
  chr7:65610394-65610424
  hypo
atgcgagttgtcaacgctgtactttccctc

SEQ ID NO: 21485 - DNA, 148 bp, Homo sapiens
  chr7:65877890-65878038
  hypo
gggggggaaaaaaatacaccaagcgtgcaccacgcctggctaatttttgaaacttttctacagacggggttgcgtcacgttgcccagggcagtctcgaactccttagaccaagccatcctccccctcggcctcccaaagtgctgggat

SEQ ID NO: 21486 - DNA, 22 bp, Homo sapiens
  chr7:65879868-65879890
  hypo
cgacagagtgagacactgtgtc

SEQ ID NO: 21487 - DNA, 29 bp, Homo sapiens
  chr7:65937775-65937804
  hypo
ttttttttttttgagacggagtctcactc

SEQ ID NO: 21488 - DNA, 29 bp, Homo sapiens
  chr7:65938043-65938072
  hypo
caggcatgagccaccgtgccaggccctct

SEQ ID NO: 21489 - DNA, 30 bp, Homo sapiens
  chr7:65939697-65939727
  hypo
catggagcccagcgcggtgctccggctggc

SEQ ID NO: 21490 - DNA, 31 bp, Homo sapiens
  chr7:65969624-65969655
  hypo
ggaaaatatcagttcccgagtctccatgcgt

SEQ ID NO: 21491 - DNA, 30 bp, Homo sapiens
  chr7:66022059-66022089
  hypo
gaggtggcccggtgcgtgggggagttgctg

SEQ ID NO: 21492 - DNA, 138 bp, Homo sapiens; identical to SEQ ID NO: 5606
  chr7:66094048-66094186
  hypo

SEQ ID NO: 21493 - DNA, 30 bp, Homo sapiens
  chr7:66115943-66115973
  hypo
gacgtgtctgtgtcccgagcctcggcatgt

SEQ ID NO: 21494 - DNA, 84 bp, Homo sapiens
  chr7:66265898-66265982
  hypo
tgttccatgaatagtgggactcgataggagaggctgcccgttaagttacacagtgtgggtcacgttcttctagggcaggaggct

SEQ ID NO: 21495 - DNA, 141 bp, Homo sapiens
  chr7:66293248-66293389
  hypo
aggtgtgagccaccgcgcctggcttccacggtgttttctaacgccgcagcgaaacccatccgtgtgccacgtcaattccttagccgccatgccatgctgtcatctcagcctgagcttggcgtcaaccaaactctctggata

SEQ ID NO: 21496 - DNA, 30 bp, Homo sapiens
  chr7:66369061-66369091
  hypo
cccagctccttgctcgtggctgcgcccgcg

SEQ ID NO: 21497 - DNA, 30 bp, Homo sapiens
  chr7:66370315-66370345
  hypo
aacctcaccaggcccggctcctgtctcctt

SEQ ID NO: 21498 - DNA, 31 bp, Homo sapiens
  chr7:66412369-66412400
  hypo
ggcataaggacaccttcgggattttttgttg

SEQ ID NO: 21499 - DNA, 37 bp, Homo sapiens
  chr7:66626983-66627020
  hypo
tgggttaaaaacattctggaccgggcgcagtggctca

SEQ ID NO: 21500 - DNA, 79 bp, Homo sapiens
  chr7:66766507-66766586
  hypo
ttataggtgtgagccaccgcgcccggcccacttcagatatttattttcaggagggagcgcatttagatacagaccgaaa

SEQ ID NO: 21501 - DNA, 124 bp, Homo sapiens
  chr7:67006665-67006789
  hypo
cctttaagaatcctacaaggtcggtattattatcgccagtcccagttttacagatgaggaaacggaggcccagaaaaattaagtaatgtacccaaggttacccgggcagtaaatgatggtgtct

SEQ ID NO: 21502 - DNA, 33 bp, Homo sapiens
  chr7:67027847-67027880
  hypo
ctgagcccggccggaaataaacagttattgaat

SEQ ID NO: 21503 - DNA, 43 bp, Homo sapiens
  chr7:67103481-67103524
  hypo
ggctttaaaagagtgaactgtcgtgaagtttattctgatgcca

SEQ ID NO: 21504 - DNA, 38 bp, Homo sapiens
  chr7:67375656-67375694
  hypo
tgaaatagagtcttaccctgtcgcccaggctagagtgc

SEQ ID NO: 21505 - DNA, 15 bp, Homo sapiens
  chr7:67405993-67406008
  hypo
gtttgttttgagatg

SEQ ID NO: 21506 - DNA, 25 bp, Homo sapiens
  chr7:67408839-67408864
  hypo
tttttttgagacagagtctcacgcg

SEQ ID NO: 21507 - DNA, 45 bp, Homo sapiens
  chr7:67812979-67813024
  hypo
gtgttattattattattgagacggagtttcattcttgttgcccgg

SEQ ID NO: 21508 - DNA, 56 bp, Homo sapiens
  chr7:68185671-68185727
  hypo
agcccatttgtctttaggtgtcgattatcccaaacgtaagagcttaaaattctagt

SEQ ID NO: 21509 - DNA, 42 bp, Homo sapiens
  chr7:68418435-68418477
  hypo
ctggtaccagtaaagaaatatcgccttttttttttttttttt

SEQ ID NO: 21510 - DNA, 101 bp, Homo sapiens
  chr7:68418716-68418817
  hypo
gctgggattacaggcgtgagctgccgtgcccggccaataccgcctaatattttcttgggttattcatgctgcctttatccgacccttgctttttttttttc

SEQ ID NO: 21511 - DNA, 2540 bp, Homo sapiens; identical to SEQ ID NO: 5609
  chr7:69062231-69064771
  hypo

SEQ ID NO: 21512 - DNA, 348 bp, Homo sapiens; identical to SEQ ID NO: 5610
  chr7:69064833-69065181
  hypo

SEQ ID NO: 21513 - DNA, 81 bp, Homo sapiens
  chr7:69478665-69478746
  hypo
actttggagtttcctctctaccgttacttattcagcaggtttttgtttttgttttttgagacggagtctctctctgtcacc

SEQ ID NO: 21514 - DNA, 24 bp, Homo sapiens
  chr7:69521194-69521218
  hypo
tccggacctcaggcaatccatcct

SEQ ID NO: 21515 - DNA, 31 bp, Homo sapiens
  chr7:70234743-70234774
  hypo
gcggtgccttctgatacgcatattctacagt

SEQ ID NO: 21516 - DNA, 141 bp, Homo sapiens
  chr7:70255441-70255582
  hypo
agaacttgacattcaccggagagacccgctgggcagggacttcctgctaaggaacgacccgctccaccggctctcgactccccggctgtacgaagccgaccgctccttcagggaccgggagcctcacgactacagccacca

SEQ ID NO: 21517 - DNA, 18 bp, Homo sapiens
  chr7:70382504-70382522
  hypo
gcccgccttggcctgtgt

SEQ ID NO: 21518 - DNA, 31 bp, Homo sapiens
  chr7:70645461-70645492
  hypo
aaagaaggctccttcacgttgacctcctgct

SEQ ID NO: 21519 - DNA, 30 bp, Homo sapiens; identical to SEQ ID NO: 5614
  chr7:70734445-70734475
  hypo

SEQ ID NO: 21520 - DNA, 38 bp, Homo sapiens
  chr7:71119292-71119330
  hypo
agccactgcgcccggccggctggagggttttatgggag

SEQ ID NO: 21521 - DNA, 39 bp, Homo sapiens
  chr7:71287515-71287554
  hypo
agtcaccgtgcctggcccgcttctggttcttatggtttg

SEQ ID NO: 21522 - DNA, 36 bp, Homo sapiens
  chr7:71397498-71397534
  hypo
gactataagaagtatatgtgccgggcagggtggctc

SEQ ID NO: 21523 - DNA, 140 bp, Homo sapiens; identical to SEQ ID NO: 5617
  chr7:71802206-71802346
  hypo

SEQ ID NO: 21524 - DNA, 23 bp, Homo sapiens
  chr7:71845545-71845568
  hypo
tacctgggcggtgaccgtgtctg

SEQ ID NO: 21525 - DNA, 27 bp, Homo sapiens
  chr7:75977564-75977591
  hypo
caagagccttagacttcgttttttttt

SEQ ID NO: 21526 - DNA, 30 bp, Homo sapiens
  chr7:76246556-76246586
  hypo
atgggcacgagccaccgcaccaggcaattt

SEQ ID NO: 21527 - DNA, 31 bp, Homo sapiens
  chr7:76632094-76632125
  hypo
ctggtcctgggccccacggtagcctacacat

SEQ ID NO: 21528 - DNA, 43 bp, Homo sapiens
  chr7:77129871-77129914
  hypo
gattacaggcgtgagccaccgcggctggccccagaatgcaatt

SEQ ID NO: 21529 - DNA, 35 bp, Homo sapiens
  chr7:77184924-77184959
  hypo
ttaaaaaaatctctagcgtttcttaggccgggcac

SEQ ID NO: 21530 - DNA, 18 bp, Homo sapiens
  chr7:77296352-77296370
  hypo
ccccgtcagtcagtatat

SEQ ID NO: 21531 - DNA, 17 bp, Homo sapiens
  chr7:77309373-77309390
  hypo
ctggagtgcagtggtcc

SEQ ID NO: 21532 - DNA, 62 bp, Homo sapiens
  chr7:77309569-77309631
  hypo
gtgctgggattacaggcgtgagccatcgtgcccggccagacgatagatggattctttttttt

SEQ ID NO: 21533 - DNA, 23 bp, Homo sapiens
  chr7:77315451-77315474
  hypo
aaataaaagagtggttaggcccg

SEQ ID NO: 21534 - DNA, 121 bp, Homo sapiens
  chr7:77323832-77323953
  hypo
tccacccatcaccgcctcctaaagtcttgggattacatgcgtgagccacccaccactcttggccgaaaaaaaaaaaattcttaaaaatattcttaaaaaaatgagtaaataggcactgtcg

SEQ ID NO: 21535 - DNA, 241 bp, Homo sapiens
  chr7:77324192-77324433
  hypo
gagccaccgcgcccggccacattccttatcttttaagctaaaacccatctccccaaattgcttattttcgaagcaaaaatcaaagcacatgcttacaaaacatcgaacacgcagtgtgcttactaaacgctaaaatacagaaacctaaaaaaacaattcttgcttttcaaacatccataaataatcgccaacgaatttttcctggcaagtctacgttataataataataatattattatta

SEQ ID NO: 21536 - DNA, 102 bp, Homo sapiens
  chr7:77413232-77413334
  hypo
tgaacatgtgagaactcgatccttctgtacattttgaaattcagaacttacgcatctatgttgttagaatgttaaatctacacttttctgtaaagttcattg

SEQ ID NO: 21537 - DNA, 30 bp, Homo sapiens; identical to SEQ ID NO: 5631
  chr7:79083620-79083650
  hypo

SEQ ID NO: 21538 - DNA, 1 bp, Homo sapiens
  chr7:80019571-80019572
  hypo
c

SEQ ID NO: 21539 - DNA, 45 bp, Homo sapiens
  chr7:80168727-80168772
  hypo
agcaagaaggcttcttttggccgggcgcggtggctcacgcctgta

SEQ ID NO: 21540 - DNA, 20 bp, Homo sapiens
  chr7:80619356-80619376
  hypo
gatgccgtctcaataataat

SEQ ID NO: 21541 - DNA, 16 bp, Homo sapiens
  chr7:80716381-80716397
  hypo
gccatagatgaatttt

SEQ ID NO: 21542 - DNA, 37 bp, Homo sapiens
  chr7:80917899-80917936
  hypo
tttttttttttttttttgagacggagtctcactctcg

SEQ ID NO: 21543 - DNA, 37 bp, Homo sapiens
  chr7:80918175-80918212
  hypo
gtgagccaccgcgcccggactggtgtgcatgtcttat

SEQ ID NO: 21544 - DNA, 21 bp, Homo sapiens
  chr7:82010654-82010675
  hypo
gtccttgacagcaacaaagct

SEQ ID NO: 21545 - DNA, 613 bp, Homo sapiens
  chr7:86415570-86416183
  hypo
ccctaggtggcaaacctgctgcggctcttccagatccctcagatcagctacgcatccaccagcgccaaactcagtgataagtcgcgctatgattactttgccaggaccgtgccccccgacttctaccaggccaaagccatggctgagatcttgcgcttcttcaactggacctacgtgtccacagtagcctccgagggtgattacggggagacagggatcgaggccttcgagcaggaagcccgcctgcgcaacatctgcatcgctacggcggagaaggtgggccgctccaacatccgcaagtcctacgacagcgtgatccgagaactgttgcagaagcccaacgcgcgcgtcgtggtcctcttcatgcgcagcgacgactcgcgggagctcattgcagccgccagccgcgccaatgcctccttcacctgggtggccagcgacggctggggcgcgcaggagagcatcatcaagggcagcgagcatgtggcctacggcgccatcaccctggagctggcctcccagcctgtccgccagttcgaccgctacttccagagcctcaacccctacaacaaccaccgcaacccctggttccgggacttctgggagcaaaagt

SEQ ID NO: 21546 - DNA, 103 bp, Homo sapiens; identical to SEQ ID NO: 5646
  chr7:86849533-86849636
  hypo

SEQ ID NO: 21547 - DNA, 18 bp, Homo sapiens
  chr7:86959423-86959441
  hypo
ggacgagaagaatgtgca

SEQ ID NO: 21548 - DNA, 12 bp, Homo sapiens
  chr7:87254294-87254306
  hypo
gggcgcggcggc

SEQ ID NO: 21549 - DNA, 19 bp, Homo sapiens
  chr7:87254605-87254624
  hypo
ttacctcatcatttaagat

SEQ ID NO: 21550 - DNA, 987 bp, Homo sapiens; identical to SEQ ID NO: 5649
  chr7:87256906-87257893
  hypo

SEQ ID NO: 21551 - DNA, 497 bp, Homo sapiens; identical to SEQ ID NO: 5650
  chr7:87257922-87258419
  hypo

SEQ ID NO: 21552 - DNA, 372 bp, Homo sapiens; identical to SEQ ID NO: 5651
  chr7:87849419-87849791
  hypo

SEQ ID NO: 21553 - DNA, 481 bp, Homo sapiens; identical to SEQ ID NO: 5660
  chr7:90226143-90226624
  hypo

SEQ ID NO: 21554 - DNA, 23 bp, Homo sapiens
  chr7:90269563-90269586
  hypo
tcggccatcttggctcctccctc

SEQ ID NO: 21555 - DNA, 66 bp, Homo sapiens
  chr7:90635232-90635298
  hypo
cttaacagatggtgatgtgggcgactgtggtttaagatctgactcggttcataaagacacccagtc

SEQ ID NO: 21556 - DNA, 30 bp, Homo sapiens; identical to SEQ ID NO: 5662
  chr7:90895012-90895042
  hypo

SEQ ID NO: 21557 - DNA, 30 bp, Homo sapiens
  chr7:90916005-90916035
  hypo
gccttcatagatgccgcacagatgctgcac

SEQ ID NO: 21558 - DNA, 41 bp, Homo sapiens
  chr7:92075853-92075894
  hypo
ataacagccagctattcgattttctccgcattctctaatcg

SEQ ID NO: 21559 - DNA, 144 bp, Homo sapiens; identical to SEQ ID NO: 5665
  chr7:92219763-92219907
  hypo

SEQ ID NO: 21560 - DNA, 30 bp, Homo sapiens
  chr7:92370176-92370206
  hypo
cgtgcccaggtacacgtggcccctctgcaa

SEQ ID NO: 21561 - DNA, 1002 bp, Homo sapiens; identical to SEQ ID NO: 5666
  chr7:92462331-92463333
  hypo

SEQ ID NO: 21562 - DNA, 86 bp, Homo sapiens; identical to SEQ ID NO: 5667
  chr7:92463862-92463948
  hypo

SEQ ID NO: 21563 - DNA, 253 bp, Homo sapiens; identical to SEQ ID NO: 5668
  chr7:92466275-92466528
  hypo

SEQ ID NO: 21564 - DNA, 130 bp, Homo sapiens
  chr7:92939971-92940101
  hypo
ttgtacttttctgagcgcactctgttctctcttatctctgaccctattttatgccggcccttttttctgtgctgaccatatagcttttacttttcttttgaaccttatgctgccccgtaaccccaaatac

SEQ ID NO: 21565 - DNA, 29 bp, Homo sapiens
  chr7:93549240-93549269
  hypo
attaacaaaaaattagtcaggcgtggtag

SEQ ID NO: 21566 - DNA, 51 bp, Homo sapiens
  chr7:94293696-94293747
  hypo
gcccgcatgcgcctgacgcaggaagaaaaagaaagacgcagaaagctgaac

SEQ ID NO: 21567 - DNA, 386 bp, Homo sapiens; identical to SEQ ID NO: 5678
  chr7:95064192-95064578
  hypo

SEQ ID NO: 21568 - DNA, 352 bp, Homo sapiens; identical to SEQ ID NO: 5684
  chr7:96635619-96635971
  hypo

SEQ ID NO: 21569 - DNA, 340 bp, Homo sapiens; identical to SEQ ID NO: 5685
  chr7:96636033-96636373
  hypo

SEQ ID NO: 21570 - DNA, 30 bp, Homo sapiens; identical to SEQ ID NO: 5693
  chr7:97501893-97501923
  hypo

SEQ ID NO: 21571 - DNA, 30 bp, Homo sapiens
  chr7:97598477-97598507
  hypo
ggtcccaccatagtcgtgtgctgataaaaa

SEQ ID NO: 21572 - DNA, 19 bp, Homo sapiens
  chr7:97738491-97738510
  hypo
tttttattccattctttta

SEQ ID NO: 21573 - DNA, 30 bp, Homo sapiens
  chr7:97797622-97797652
  hypo
tggatgccagtgggcggggggaccagtggt

SEQ ID NO: 21574 - DNA, 152 bp, Homo sapiens
  chr7:97806160-97806312
  hypo
taataataatgatttactgaatgcttcccacatgccagctactttacaccaactcttaagtggtagtgctggttttcccgtctgtgttacaggtcaggagacgcaggcacagacaggtatactgacttgttcagggtcgtgcaactggaagc

SEQ ID NO: 21575 - DNA, 31 bp, Homo sapiens
  chr7:97832524-97832555
  hypo
tgcccactttggattccgggctgacctgagt

SEQ ID NO: 21576 - DNA, 210 bp, Homo sapiens
  chr7:97833193-97833403
  hypo
ggctccccctctccctcatcacgcagtgataaaaagggtggggttttattttttatttctaggtggtggctttgagtgggatgatgacttctccccagatccttttatgtcaaagacaacaagtaacctgctcagctccaagccttctctccaaacatccaagtacttttctccgccgccaccggcccggagcacggagcagagctggcc

SEQ ID NO: 21577 - DNA, 30 bp, Homo sapiens
  chr7:97841849-97841879
  hypo
cggctggagagcaacgagagggagcggcag

SEQ ID NO: 21578 - DNA, 30 bp, Homo sapiens
  chr7:97847039-97847069
  hypo
gtgaggctgcacgccggtgcgatgacacac

SEQ ID NO: 21579 - DNA, 30 bp, Homo sapiens
  chr7:97857477-97857507
  hypo
ggactctggctttccgtctgaagcacagat

SEQ ID NO: 21580 - DNA, 250 bp, Homo sapiens
  chr7:97869427-97869677
  hypo
acaaacaaaagaaaaaccctgtgagtaatcggaaatcggctggttttattggacttgccgctgataagatgcaaaagacaagcagtgactagaggatggggaggcgcttggttaatcaagggcttcaggaaattcgcttccgattcttcgaaatgttgcagcctattaggtgatacttgcagttgctgcatttgggtaccagcgtgtgggtggaagaggattttacggcacaaaacgtcctggagattgg

SEQ ID NO: 21581 - DNA, 36 bp, Homo sapiens
  chr7:98012254-98012290
  hypo
cctgaggtcaggagttcgagaccagcctgaccaaca

SEQ ID NO: 21582 - DNA, 191 bp, Homo sapiens; identical to SEQ ID NO: 5694
  chr7:98030419-98030610
  hypo

SEQ ID NO: 21583 - DNA, 344 bp, Homo sapiens
  chr7:98115910-98116254
  hypo
gggcccaggatgggcaagggccgatgaggagaagagacagagggaagatgcagggaagtagcgtttcagagcacaggctgccgtgtgtgtgagtgtgtgtgttggtgtgcatgcacgtctctgtgcacatgtgcgtgtgtcgtatgggggcgcacacgtgtatctgtgtgtgcatgcgtaggtacatgtatgtgtgcatgagcgtgtgtgtgcacatgtgtatctgtgggtgcgtgtgtatgtacatgtatgtgtgcataagcgtgtgtgtgcacacgtgtatctgtgggtgcatgcgtaggtacacatatgtgtgcatgagcgtgtgtgtgcacacatgtatc

SEQ ID NO: 21584 - DNA, 203 bp, Homo sapiens; identical to SEQ ID NO: 5696
  chr7:98246304-98246507
  hypo

SEQ ID NO: 21585 - DNA, 614 bp, Homo sapiens; identical to SEQ ID NO: 5697
  chr7:98246533-98247147
  hypo

SEQ ID NO: 21586 - DNA, 30 bp, Homo sapiens
  chr7:98602866-98602896
  hypo
tcacagagtcacggcgagaggagcgtgtgt

SEQ ID NO: 21587 - DNA, 173 bp, Homo sapiens
  chr7:98639737-98639910
  hypo
tacggggttgattgaagaatccggatttatttgcaacatgtaaatattgtccgtagaatactggaagagcccgtaataaggattcagcatttcatggcacagcaagtaaagccactccctgggagcaaacaacaaaaatgcatttgagacgcgctaaaatttctacatttttt

SEQ ID NO: 21588 - DNA, 44 bp, Homo sapiens
  chr7:98704237-98704281
  hypo
ctttaacaattccattgttgccgggagcagtggtgtatgcctgt

SEQ ID NO: 21589 - DNA, 163 bp, Homo sapiens
  chr7:98704340-98704503
  hypo
cctgggcaatatagcgagaccttgtctcttgaaaaaacagaaaagagaattccagtgccttctccgacctctttttttcccccttcagttggtttttcccaagtgatttaaggattgaatcaaagctaagcagctctttgcttgtttcgttagcagctcatga

SEQ ID NO: 21590 - DNA, 30 bp, Homo sapiens
  chr7:98805069-98805099
  hypo
ggagcatctaaggtcggcatattgactgga

SEQ ID NO: 21591 - DNA, 31 bp, Homo sapiens
  chr7:98821689-98821720
  hypo
atgtgcatgccaagaacgtctccatctccac

SEQ ID NO: 21592 - DNA, 31 bp, Homo sapiens
  chr7:98845138-98845169
  hypo
ggcctgaagggaactccgctgggggaagagg

SEQ ID NO: 21593 - DNA, 73 bp, Homo sapiens
  chr7:98870777-98870850
  hypo
agctctgaccccaacgtgagtctccctgccgcagaccacatgggcaatgctgggtctcgagaaggcactttgg

SEQ ID NO: 21594 - DNA, 31 bp, Homo sapiens
  chr7:98879534-98879565
  hypo
cctctccctgctgcctcgggaactaccgccc

SEQ ID NO: 21595 - DNA, 31 bp, Homo sapiens
  chr7:98881512-98881543
  hypo
gcaggaaaagaaaatccgggcggaggtggaa

SEQ ID NO: 21596 - DNA, 166 bp, Homo sapiens
  chr7:98955508-98955674
  hypo
tggtcacagccctctcggagctccggtgagcacaggcaaggagaaggtcctagcacaggtgtctgctgccaagtcatagtaacaggaagagctctaggagctaagagcagggagaagccactttaggcggaagtggcccgggaaagtggaccgtgggatcatgggg

SEQ ID NO: 21597 - DNA, 30 bp, Homo sapiens
  chr7:98956010-98956040
  hypo
tgtctcagagaacagcgtcgtggctgctgt

SEQ ID NO: 21598 - DNA, 147 bp, Homo sapiens
  chr7:98966331-98966478
  hypo
tttattttgccattttttaacacaggccatttctcatgtggggaggaaggcccactccagtcaccgcagccagaagccctcagtgctttatttcaacgctggggccttttgagtttgtgacgctccgtccttctctcactctacctt

SEQ ID NO: 21599 - DNA, 3 bp, Homo sapiens
  chr7:98966831-98966834
  hypo
tga

SEQ ID NO: 21600 - DNA, 30 bp, Homo sapiens
  chr7:98969184-98969214
  hypo
agtgactcaggcaccgggctctgtcatggg

SEQ ID NO: 21601 - DNA, 29 bp, Homo sapiens
  chr7:98971520-98971549
  hypo
ccaccgcgaccggccgaggtaaggttttc

SEQ ID NO: 21602 - DNA, 30 bp, Homo sapiens; identical to SEQ ID NO: 5700
  chr7:98971837-98971867
  hypo

SEQ ID NO: 21603 - DNA, 95 bp, Homo sapiens; identical to SEQ ID NO: 5701
  chr7:98972089-98972184
  hypo

SEQ ID NO: 21604 - DNA, 30 bp, Homo sapiens
  chr7:98985784-98985814
  hypo
ctgcccgctgcgtgcgctgggcccccaacg

SEQ ID NO: 21605 - DNA, 31 bp, Homo sapiens
  chr7:98994223-98994254
  hypo
cagggcacagggtgggcgagacacagcagag

SEQ ID NO: 21606 - DNA, 67 bp, Homo sapiens
  chr7:99020638-99020705
  hypo
caccaccacaccgggcgagagctcttctttctttcgcctattaaacttcagctcttaacctcttttt

SEQ ID NO: 21607 - DNA, 9 bp, Homo sapiens
  chr7:99020764-99020773
  hypo
tggctcaca

SEQ ID NO: 21608 - DNA, 30 bp, Homo sapiens
  chr7:99021092-99021122
  hypo
tgccacctgaggcagcgggaacaccaatcc

SEQ ID NO: 21609 - DNA, 31 bp, Homo sapiens; identical to SEQ ID NO: 5704
  chr7:99070937-99070968
  hypo

SEQ ID NO: 21610 - DNA, 33 bp, Homo sapiens
  chr7:99101318-99101351
  hypo
aaaaggagagcactgggaggtcgatgcgggcgc

SEQ ID NO: 21611 - DNA, 1038 bp, Homo sapiens; identical to SEQ ID NO: 5707
  chr7:99155931-99156969
  hypo

SEQ ID NO: 21612 - DNA, 30 bp, Homo sapiens
  chr7:99227355-99227385
  hypo
cggaggacgcacaccggggagaagccctac

SEQ ID NO: 21613 - DNA, 30 bp, Homo sapiens
  chr7:99236608-99236638
  hypo
gcgctgggagccgccgtcctgctgaggcac

SEQ ID NO: 21614 - DNA, 31 bp, Homo sapiens
  chr7:99538810-99538841
  hypo
cgtgagccaccatgcccggccaagccatcta

SEQ ID NO: 21615 - DNA, 31 bp, Homo sapiens
  chr7:99589185-99589216
  hypo
acttgggtccaaccaccgggtgctgcaaaca

SEQ ID NO: 21616 - DNA, 31 bp, Homo sapiens
  chr7:99611394-99611425
  hypo
agggtggagagattaccggtaattatttttc

SEQ ID NO: 21617 - DNA, 17 bp, Homo sapiens
  chr7:99649203-99649220
  hypo
cacggcgccgggccccc

SEQ ID NO: 21618 - DNA, 307 bp, Homo sapiens
  chr7:99691596-99691903
  hypo
ccacggacgctgtgcgtgccctgctggagcagcaagtacccacagtgcggtagcacggagaggaccactatctgcactgtcagcactttagccccggcagggctggagcgggaggtggggaggcggcaatgagagcacggtaaggagctacccctttaagggtcaaaacagatggccctccagcaatttgggcacttaccagagcagtggaaaggcgcaggatagccagcagggtccgggcagaagtataggtggcatccttactagcccaagcctctcgcctcatctccacgtatgctgctgtgat

SEQ ID NO: 21619 - DNA, 30 bp, Homo sapiens
  chr7:99707615-99707645
  hypo
gctcagcacagggccgtccagcacactgcg

SEQ ID NO: 21620 - DNA, 142 bp, Homo sapiens
  chr7:99723192-99723334
  hypo
agcacccagaatggccgctgtcttgttaagctcaagctccagcctgagcaacatagtgaaaccccaattctacacacacacacacacacaaagaagactgcagggctggtggtgcagcgcctgtagtcccagttactgcaga

SEQ ID NO: 21621 - DNA, 266 bp, Homo sapiens
  chr7:99839731-99839997
  hypo
ttcccagaggaaaatcggggggagggtgaatgcccggctttgttctgctaaccagctgcagctttttcatctgtttctcctgggttttcaatgggtctctcgtgttatttacatttcatttctcctgtctttagcaactagaagctgccctttcaagttttacttagaaaaaagcccttaattggttctgcaactggaagggcgatcctgaacaggagttattttgccttaagatagaaaataaggccgggtgcggtggctcatgc

SEQ ID NO: 21622 - DNA, 31 bp, Homo sapiens; identical to SEQ ID NO: 5713
  chr7:99869133-99869164
  hypo

SEQ ID NO: 21623 - DNA, 31 bp, Homo sapiens
  chr7:99939850-99939881
  hypo
gagccgtgacttcctgcgatcaggtcactca

SEQ ID NO: 21624 - DNA, 77 bp, Homo sapiens
  chr7:100024903-100024980
  hypo
tgtgcacaagctcagcaagcccgatttaaaacttttaacaagaaagaagaggcgggtggatcaccttaagtcaggag

SEQ ID NO: 21625 - DNA, 136 bp, Homo sapiens
  chr7:100025339-100025475
  hypo
ccccaattccaaatccacctgcaatccaaagggaagaagttttgcagagaagttcttcccatttgtggggcgctcccatttttcctctcttccctcaccccttattctctctcagggatagcggttcaagtcggtg

SEQ ID NO: 21626 - DNA, 129 bp, Homo sapiens
  chr7:100030627-100030756
  hypo
ggtgcatctgaactggggagacgagggcctgaagcgcatgtttcgccggatctaccggcacctacgccctgggggcatcctggtcctagagccccaaccctggtcgtcgtatggcaagagaaagactct

SEQ ID NO: 21627 - DNA, 278 bp, Homo sapiens
  chr7:100064565-100064843
  hypo
gtaagggaagggaggctcagacggagggcccattgggcgcagggggcccaagccgtgggacccccgaggagggcagctgagccagctgctccgggctggccagggcgcgcagcagcccattctcctgctccagcgcagcgttccgctccgccaattcccggatctgctccttcagcacctccacctcctcccggaccgcaaacatgaggtgggacttcaccaagtcctgggggccccgggacaggcacagcgtcaacggggtgggtgcctcatcccct

SEQ ID NO: 21628 - DNA, 31 bp, Homo sapiens
  chr7:100076281-100076312
  hypo
gctccccagcctggcccggccactcagagag

SEQ ID NO: 21629 - DNA, 158 bp, Homo sapiens
  chr7:100088161-100088319
  hypo
ctggaatggcagtgccgagggtccaggcaaggtggagcgtgaggacaggggccctgggacatcggggatcccagtgagaagccagggggcagagggactgctggccaggatccaccatggagaccgaggagggagccgcaccgcgctgcccattccct

SEQ ID NO: 21630 - DNA, 31 bp, Homo sapiens
  chr7:100116513-100116544
  hypo
tcacaataggaattggcgaatgggccagaca

SEQ ID NO: 21631 - DNA, 31 bp, Homo sapiens
  chr7:100160494-100160525
  hypo
accctttcacagctcccgccgcccagtcccc

SEQ ID NO: 21632 - DNA, 34 bp, Homo sapiens
  chr7:100170148-100170182
  hypo
cagacatgatggggggcggcggcagcagtttcag

SEQ ID NO: 21633 - DNA, 30 bp, Homo sapiens
  chr7:100198471-100198501
  hypo
agggctgaaggaggcgggggtggtgtaggg

SEQ ID NO: 21634 - DNA, 31 bp, Homo sapiens
  chr7:100212727-100212758
  hypo
cccagggctgcccatgcgaccctattctttc

SEQ ID NO: 21635 - DNA, 30 bp, Homo sapiens
  chr7:100218066-100218096
  hypo
atattgaaactccacgcccctttcaccaca

SEQ ID NO: 21636 - DNA, 30 bp, Homo sapiens
  chr7:100218602-100218632
  hypo
ggccccgggggtcccggagctgttggagcg

SEQ ID NO: 21637 - DNA, 30 bp, Homo sapiens
  chr7:100229850-100229880
  hypo
cccagaaaaaaacccgattcataagggcag

SEQ ID NO: 21638 - DNA, 30 bp, Homo sapiens
  chr7:100255028-100255058
  hypo
cacatgtgtacatacgttcacacacaggca

SEQ ID NO: 21639 - DNA, 30 bp, Homo sapiens
  chr7:100275848-100275878
  hypo
agctgtgggacgtgcgggattccatgtgcc

SEQ ID NO: 21640 - DNA, 30 bp, Homo sapiens
  chr7:100279780-100279810
  hypo
cccccaggcaggaacggatataatcgtgga

SEQ ID NO: 21641 - DNA, 30 bp, Homo sapiens
  chr7:100283197-100283227
  hypo
acactcccttaggccgagtccaccacttca

SEQ ID NO: 21642 - DNA, 31 bp, Homo sapiens
  chr7:100283961-100283992
  hypo
ttcaccacaccctcctcgatcccctcgcaaa

SEQ ID NO: 21643 - DNA, 31 bp, Homo sapiens
  chr7:100388724-100388755
  hypo
cgcttccccaggtgcacggcctggaagggat

SEQ ID NO: 21644 - DNA, 62 bp, Homo sapiens
  chr7:100405095-100405157
  hypo
gccaggtctcggtggacgtagctcatctcggcaaggtaccgcatgcccgaggcgatgccccg

SEQ ID NO: 21645 - DNA, 81 bp, Homo sapiens
  chr7:100407981-100408062
  hypo
aatcaagacattcaggcggacaagggacctaacccttcagtgtgtcagtgtcatcatgaggaactgctcaagatttagaga

SEQ ID NO: 21646 - DNA, 14 bp, Homo sapiens
  chr7:100410907-100410921
  hypo
cccaaacccctgtc

SEQ ID NO: 21647 - DNA, 45 bp, Homo sapiens
  chr7:100417051-100417096
  hypo
tgcccccaaagccttagcccctcacacttccggggtacccaactt

SEQ ID NO: 21648 - DNA, 285 bp, Homo sapiens
  chr7:100421274-100421559
  hypo
ggggttctccatccaggctggcgtgagggccgtggccgtgtccgcatcgctctcatagtagaagacggtgaaggtctccttgcaggagcgcccagcccgaggcagggacaggcactcgagcatggtgaagcgcagcgtggcgtacacgtggacggcgccccgccgtgggacccaacctgtgcgaagccagtgggcctggcccggggcacgctgcacgtcacacacttcgtaggtgcgcacgctgtgctgttcctcatccaggccgctcagttcctcccactgtgc

SEQ ID NO: 21649 - DNA, 408 bp, Homo sapiens; identical to SEQ ID NO: 5723
  chr7:100424501-100424909
  hypo

SEQ ID NO: 21650 - DNA, 123 bp, Homo sapiens
  chr7:100480481-100480604
  hypo
gagctgcgcggccccggccaggcagacaggccagggcactgctgtgcacaatgcagcggtttagctgaatgtgattgctcaggcagctagccagtcaggccccactgcggagtcccgcgtggg

SEQ ID NO: 21651 - DNA, 30 bp, Homo sapiens; identical to SEQ ID NO: 5725
  chr7:100609019-100609049
  hypo

SEQ ID NO: 21652 - DNA, 43 bp, Homo sapiens
  chr7:100838113-100838156
  hypo
ctggggatggtaccatttccccgtcctgttaagtgcccttgac

SEQ ID NO: 21653 - DNA, 31 bp, Homo sapiens
  chr7:100849484-100849515
  hypo
cccccaactcccaggacgggggccaggcccc

SEQ ID NO: 21654 - DNA, 30 bp, Homo sapiens
  chr7:100865917-100865947
  hypo
tggaccgggctgcccggcagcgtcgcatca

SEQ ID NO: 21655 - DNA, 30 bp, Homo sapiens
  chr7:100877568-100877598
  hypo
gtggagggcccctgcggtggccgccagctt

SEQ ID NO: 21656 - DNA, 30 bp, Homo sapiens
  chr7:100883537-100883567
  hypo
gggaaacgcgcacgcgtcatacacaccgca

SEQ ID NO: 21657 - DNA, 30 bp, Homo sapiens
  chr7:100921854-100921884
  hypo
agttatcggagatgcgaaaatcacagggga

SEQ ID NO: 21658 - DNA, 30 bp, Homo sapiens; identical to SEQ ID NO: 5736
  chr7:101006293-101006323
  hypo

SEQ ID NO: 21659 - DNA, 105 bp, Homo sapiens
  chr7:101131925-101132030
  hypo
ggattacaggcgtaagccaccgcgcccgaactttaaccagttttaagcgttcaattcagccgtgttaggtaccgtcacactgtcgtccagccatctccactgtcc

SEQ ID NO: 21660 - DNA, 78 bp, Homo sapiens
  chr7:101195309-101195387
  hypo
gaggcagtggtggagcctggatttgaaccagggagtgtcaagctcccaagccatgcctcctcccgtgcttgtctagtg

SEQ ID NO: 21661 - DNA, 259 bp, Homo sapiens
  chr7:101241780-101242039
  hypo
gaacaagaagtccattcaaggcgcagggccgggcgggcccactttcaggtgtatgatctcacctctcggaaactggcaagccgccggagggcctcgtcaaggctttgatgaccctgtgctgaggacgcaaatcctaggcctggccgacaccctgctccaaggaccaatgactgaggccagagagggtcccagatggagcctgggtaggggtgaaactgcacaggcggacgggcagagcgtccaccctggagaagagacc

SEQ ID NO: 21662 - DNA, 31 bp, Homo sapiens
  chr7:101270579-101270610
  hypo
aaaagaaaaggaattgcggagtgaggtcagg

SEQ ID NO: 21663 - DNA, 31 bp, Homo sapiens
  chr7:101382584-101382615
  hypo
agggcagaggcccccacgggtagggcagcag

SEQ ID NO: 21664 - DNA, 80 bp, Homo sapiens; identical to SEQ ID NO: 5741
  chr7:101457689-101457769
  hypo

SEQ ID NO: 21665 - DNA, 468 bp, Homo sapiens; identical to SEQ ID NO: 5742
  chr7:101458245-101458713
  hypo

SEQ ID NO: 21666 - DNA, 191 bp, Homo sapiens; identical to SEQ ID NO: 5743
  chr7:101459182-101459373
  hypo

SEQ ID NO: 21667 - DNA, 90 bp, Homo sapiens; identical to SEQ ID NO: 5744
  chr7:101460880-101460970
  hypo

SEQ ID NO: 21668 - DNA, 212 bp, Homo sapiens
  chr7:101475653-101475865
  hypo
gtggtcatcagtgtcccccaccgacatggcacatccagcgagcccactgtgtccccagcacctgcggtgcagggggctggcaccttcaggggcgggcttcgtgcagacgtccacccagtcagtccccacaggtttatcaaacacaagtggggcgacaggacccacacttcggcgttggacgtgactcacgcggggagttggcttggagttcc

SEQ ID NO: 21669 - DNA, 30 bp, Homo sapiens
  chr7:101476345-101476375
  hypo
ggaggagggtgcgttcgactgaacgtgaag

SEQ ID NO: 21670 - DNA, 153 bp, Homo sapiens
  chr7:101504315-101504468
  hypo
ggcccccaaagtgccgggtttataggctgagccactgcacccggcctgcactagttttttttgtctctagaaatctgcatctctgaatgtgttaggtcctgacctgctttagaacggatctcagccaccctgctccttcgaacccacatttct

SEQ ID NO: 21671 - DNA, 30 bp, Homo sapiens
  chr7:101512514-101512544
  hypo
agagccccggctggcgagaggagcatcact

SEQ ID NO: 21672 - DNA, 174 bp, Homo sapiens
  chr7:101536662-101536836
  hypo
aatctaggaaacaaaactgcacgtgaaagatttgccttgtagacggaaagttctggaaacatcagctccaggctgtggtgtgaagctgtcgggctgatttgcctggtaagaagcgcgtttggggcacggagggtcaccttgccccctgcgagcgttctttcatcatttgagcag

SEQ ID NO: 21673 - DNA, 112 bp, Homo sapiens; identical to SEQ ID NO: 5746
  chr7:101559393-101559505
  hypo

SEQ ID NO: 21674 - DNA, 147 bp, Homo sapiens
  chr7:101566808-101566955
  hypo
tgtctcctctaaaacagaccccgttgctctgggaggagagccgagctgcggctcaggggccgtcactggtcatttttgccctgatgtatttttgcctctacatttcttgatctctggaacgttaatcccaacgatgcctggtctgcg

SEQ ID NO: 21675 - DNA, 184 bp, Homo sapiens
  chr7:101583546-101583730
  hypo
taatgttcgcaaagctggtcagtttccaatctggtgtcaccagtggaaaaaagatgtaagtgttgttggcaagagaagctcacccagagacacgctccatgaagtccctgacccccgctgggggtgcctgtgatggagggtaggctgtggtgcctgcgggcgcgcacaggtgagatggaaggaa

SEQ ID NO: 21676 - DNA, 106 bp, Homo sapiens
  chr7:101596070-101596176
  hypo
tccccaccccttgcctctgcccgttgccttttccacccctgcactgggtgtgcataggtgcgcagggcacgtgtgtgtcctctgcggtcactgacttgattgtctg

SEQ ID NO: 21677 - DNA, 334 bp, Homo sapiens
  chr7:101603237-101603571
  hypo
ttaacaagactttaatgccatcgagatgcctcacattggcacggttgcgtaagaatcgcacggtcccatgaaatgaaattgagagagctttttccggcgcctggttggttggggcggcctccgttcggtgcttttttcatcctcgacccagtgaccaactgtgtttgccctgatgtttctttcaattccaccattccgaaatgtctccggaatctgtcgttttagcttttgcagcaaggttcgttgtgtttgtcttgcccgcttcaggtttctctaatgagattcacgtgtaaaggaggattggcaattaatcggatgactgattaattgtgag

SEQ ID NO: 21678 - DNA, 158 bp, Homo sapiens
  chr7:101616561-101616719
  hypo
cccacatcccatggctctgaccgcagctggactcatctcacactcacgttcatcacggctcccagaaggcacgtgtttttaatgagaggctcatttccaccactgccccccagccctccgcagcaagccagtgcaacgccaggacagtctgctgacag

SEQ ID NO: 21679 - DNA, 46 bp, Homo sapiens
  chr7:101624112-101624158
  hypo
ccgtgggactttctcccgaacacagcacctgcgcttcctgactcct

SEQ ID NO: 21680 - DNA, 155 bp, Homo sapiens
  chr7:101627639-101627794
  hypo
gtacccaccctgtaagattgtcgtgggacaatgtagataaaaacctcgatatacagcctagtacacaaaggacggtgtaaatattctcttccgtgcttcgtagatttcatttttgaacgctcagattgttctccggcaaaaaaaaaaaaaaaaaa

SEQ ID NO: 21681 - DNA, 31 bp, Homo sapiens
  chr7:101630647-101630678
  hypo
cacggtaatgggttggcgacagtgactcagc

SEQ ID NO: 21682 - DNA, 439 bp, Homo sapiens
  chr7:101649219-101649658
  hypo
gtcacgaggagcgagcggccgcgtggatgaggttggccagagaaactggtttgttttggaagccgatggaagatgcgcttggaaggctaaggctgccgaggttgaagtccgtcattctcagtgcagaccctagggaggaagtagcaggaccccagtggggctgcaggcattcagaaagagagctgcctggggtttcccttcagaacctccctccttttaacccgggagtaaagagaaaaagacccgcggggtccactggctcggaagtcggtctctttcagtttggagcctccagttggaaacctgccttttaatggccaggctgatggtctagttactctttgaacagggaagcctcgtcaggctctctgctgaccacgcctcagtgctccctcgaaggacaactctggaatgccagtttttatctcatctcggtaga

SEQ ID NO: 21683 - DNA, 146 bp, Homo sapiens
  chr7:101652559-101652705
  hypo
ctgtcatgacgctgaccgcacaaatgatggtgttaggatccctccacggatgtggccaggtgacacccctcacctaggccgcacagcaccctaatgtacacactgaagaaaggctgcgtggggctgcagagcggctcatttctaag

SEQ ID NO: 21684 - DNA, 49 bp, Homo sapiens; identical to SEQ ID NO: 5747
  chr7:101671376-101671425
  hypo

SEQ ID NO: 21685 - DNA, 32 bp, Homo sapiens
  chr7:101694627-101694659
  hypo
tgaaaaaaaaaaaaatagggccgggcgcagtg

SEQ ID NO: 21686 - DNA, 30 bp, Homo sapiens
  chr7:101712197-101712227
  hypo
agttgatgaacagacgtctacactagagga

SEQ ID NO: 21687 - DNA, 80 bp, Homo sapiens; identical to SEQ ID NO: 5748
  chr7:101713617-101713697
  hypo

SEQ ID NO: 21688 - DNA, 139 bp, Homo sapiens; identical to SEQ ID NO: 5749
  chr7:101740642-101740781
  hypo

SEQ ID NO: 21689 - DNA, 125 bp, Homo sapiens; identical to SEQ ID NO: 5750
  chr7:101747614-101747739
  hypo

SEQ ID NO: 21690 - DNA, 78 bp, Homo sapiens; identical to SEQ ID NO: 5751
  chr7:101754976-101755054
  hypo

SEQ ID NO: 21691 - DNA, 68 bp, Homo sapiens; identical to SEQ ID NO: 5752
  chr7:101758485-101758553
  hypo

SEQ ID NO: 21692 - DNA, 50 bp, Homo sapiens; identical to SEQ ID NO: 5753
  chr7:101801838-101801888
  hypo

SEQ ID NO: 21693 - DNA, 106 bp, Homo sapiens; identical to SEQ ID NO: 5754
  chr7:101813724-101813830
  hypo

SEQ ID NO: 21694 - DNA, 190 bp, Homo sapiens; identical to SEQ ID NO: 5755
  chr7:101821747-101821937
  hypo

SEQ ID NO: 21695 - DNA, 60 bp, Homo sapiens; identical to SEQ ID NO: 5756
  chr7:101833091-101833151
  hypo

SEQ ID NO: 21696 - DNA, 50 bp, Homo sapiens; identical to SEQ ID NO: 5757
  chr7:101837120-101837170
  hypo

SEQ ID NO: 21697 - DNA, 98 bp, Homo sapiens; identical to SEQ ID NO: 5758
  chr7:101838785-101838883
  hypo

SEQ ID NO: 21698 - DNA, 673 bp, Homo sapiens; identical to SEQ ID NO: 5759
  chr7:101839912-101840585
  hypo

SEQ ID NO: 21699 - DNA, 67 bp, Homo sapiens; identical to SEQ ID NO: 5760
  chr7:101842080-101842147
  hypo

SEQ ID NO: 21700 - DNA, 103 bp, Homo sapiens; identical to SEQ ID NO: 5761
  chr7:101843349-101843452
  hypo

SEQ ID NO: 21701 - DNA, 846 bp, Homo sapiens; identical to SEQ ID NO: 5762
  chr7:101844638-101845484
  hypo

SEQ ID NO: 21702 - DNA, 167 bp, Homo sapiens; identical to SEQ ID NO: 5763
  chr7:101847669-101847836
  hypo

SEQ ID NO: 21703 - DNA, 58 bp, Homo sapiens; identical to SEQ ID NO: 5764
  chr7:101848392-101848450
  hypo

SEQ ID NO: 21704 - DNA, 304 bp, Homo sapiens; identical to SEQ ID NO: 5765
  chr7:101870645-101870949
  hypo

SEQ ID NO: 21705 - DNA, 190 bp, Homo sapiens; identical to SEQ ID NO: 5766
  chr7:101877330-101877520
  hypo

SEQ ID NO: 21706 - DNA, 266 bp, Homo sapiens; identical to SEQ ID NO: 5767
  chr7:101882598-101882864
  hypo

SEQ ID NO: 21707 - DNA, 9823 bp, Homo sapiens; identical to SEQ ID NO: 5768
  chr7:101891690-101901513
  hypo

SEQ ID NO: 21708 - DNA, 129 bp, Homo sapiens; identical to SEQ ID NO: 5769
  chr7:101916635-101916764
  hypo

SEQ ID NO: 21709 - DNA, 68 bp, Homo sapiens; identical to SEQ ID NO: 5770
  chr7:101917513-101917581
  hypo

SEQ ID NO: 21710 - DNA, 114 bp, Homo sapiens; identical to SEQ ID NO: 5771
  chr7:101918516-101918630
  hypo

SEQ ID NO: 21711 - DNA, 118 bp, Homo sapiens; identical to SEQ ID NO: 5772
  chr7:101921218-101921336
  hypo

SEQ ID NO: 21712 - DNA, 85 bp, Homo sapiens; identical to SEQ ID NO: 5773
  chr7:101923327-101923412
  hypo

SEQ ID NO: 21713 - DNA, 58 bp, Homo sapiens; identical to SEQ ID NO: 5774
  chr7:101924094-101924152
  hypo

SEQ ID NO: 21714 - DNA, 82 bp, Homo sapiens; identical to SEQ ID NO: 5775
  chr7:101925130-101925212
  hypo

SEQ ID NO: 21715 - DNA, 66 bp, Homo sapiens; identical to SEQ ID NO: 5776
  chr7:101926002-101926068
  hypo

SEQ ID NO: 21716 - DNA, 939 bp, Homo sapiens; identical to SEQ ID NO: 5777
  chr7:101926311-101927250
  hypo

SEQ ID NO: 21717 - DNA, 45 bp, Homo sapiens
  chr7:102087716-102087761
  hypo
tggttccttggcctcggggtttcctgggtcggggacacggtgaag

SEQ ID NO: 21718 - DNA, 67 bp, Homo sapiens
  chr7:102088065-102088132
  hypo
caggagccaggacacacgtcagcccagcaggtgtggggggtgctgcagccctcggcagtggggtcag

SEQ ID NO: 21719 - DNA, 31 bp, Homo sapiens
  chr7:102093187-102093218
  hypo
ccattctgttttttgtcggccactgaggtag

SEQ ID NO: 21720 - DNA, 142 bp, Homo sapiens
  chr7:102782153-102782295
  hypo
atgcccatatgcctgcccttccggcaggccaaggtgtttttccggcatcaagcgggggaatggaccatcacaggcttgcggatgatcagcccatctttgatcagcttccggatctgctgacgggagttggcattggtgattt

SEQ ID NO: 21721 - DNA, 30 bp, Homo sapiens; identical to SEQ ID NO: 5779
  chr7:102921427-102921457
  hypo

SEQ ID NO: 21722 - DNA, 30 bp, Homo sapiens; identical to SEQ ID NO: 5780
  chr7:103086352-103086382
  hypo

SEQ ID NO: 21723 - DNA, 93 bp, Homo sapiens; identical to SEQ ID NO: 5781
  chr7:103629540-103629633
  hypo

SEQ ID NO: 21724 - DNA, 704 bp, Homo sapiens; identical to SEQ ID NO: 5782
  chr7:103630363-103631067
  hypo

SEQ ID NO: 21725 - DNA, 45 bp, Homo sapiens
  chr7:104629826-104629871
  hypo
cacctcctgcaggtgcggccgatcaggggccgggattggggacct

SEQ ID NO: 21726 - DNA, 85 bp, Homo sapiens
  chr7:104917804-104917889
  hypo
gagccactgcgcccggcccaacttggtatttttaagagacttctcgctgaaatgcaaaaggcccgcaaaggcttttctggctcag

SEQ ID NO: 21727 - DNA, 30 bp, Homo sapiens
  chr7:104941883-104941913
  hypo
ccgggcctctgggccgctgccctcgctttg

SEQ ID NO: 21728 - DNA, 38 bp, Homo sapiens
  chr7:105016767-105016805
  hypo
acacacacaaacacacacccctacggcattcttcatct

SEQ ID NO: 21729 - DNA, 21 bp, Homo sapiens
  chr7:105061906-105061927
  hypo
ttatttattatttttttgaga

SEQ ID NO: 21730 - DNA, 30 bp, Homo sapiens
  chr7:105278433-105278463
  hypo
aggaagtcacctggcggctgatgtgtcaca

SEQ ID NO: 21731 - DNA, 295 bp, Homo sapiens
  chr7:105279329-105279624
  hypo
gatgaaaggcaactgcgagggaatgctagagttaatccaggtgcaggtgggaggctcgattcggcccagacaaacagagccaccaagcagagagggccatcgccttgatcccaagaagcactagcagttcagcatgaaatacagggctttgggcgacccaatggcggccgccttgggtcagctgttcccctggccaccccggtgtggctggatcaggggcgcggcatatcatcctcccctccagggctgcctttcagggcgctgccgccgccgccgccgccgctgccgctgctcc

SEQ ID NO: 21732 - DNA, 30 bp, Homo sapiens
  chr7:105432638-105432668
  hypo
ctccaggcctttcccgttgagacttttcct

SEQ ID NO: 21733 - DNA, 30 bp, Homo sapiens
  chr7:105680140-105680170
  hypo
gccccttcagaacccggggcagctgaggga

SEQ ID NO: 21734 - DNA, 39 bp, Homo sapiens
  chr7:105722824-105722863
  hypo
ttgcttactcattaattttttcgaaggggtgaagcattt

SEQ ID NO: 21735 - DNA, 30 bp, Homo sapiens
  chr7:106435445-106435475
  hypo
tgccgctttctcacccggaggcacctgagc

SEQ ID NO: 21736 - DNA, 31 bp, Homo sapiens
  chr7:106507803-106507834
  hypo
ccaggactcaccggcccgactccaaagccca

SEQ ID NO: 21737 - DNA, 345 bp, Homo sapiens; identical to SEQ ID NO: 5790
  chr7:106508305-106508650
  hypo

SEQ ID NO: 21738 - DNA, 72 bp, Homo sapiens
  chr7:106622799-106622871
  hypo
cattgattattttcccacctgcgtcacagcatggctgctgtcttggaaagcgtaaactgctcatgagtggca

SEQ ID NO: 21739 - DNA, 17 bp, Homo sapiens
  chr7:106631395-106631412
  hypo
caaaaaaaaaaaaaaaa

SEQ ID NO: 21740 - DNA, 38 bp, Homo sapiens
  chr7:106675695-106675733
  hypo
gtgcccagccctcaatcgcctagttttctctgaactat

SEQ ID NO: 21741 - DNA, 827 bp, Homo sapiens; identical to SEQ ID NO: 5791
  chr7:106684837-106685664
  hypo

SEQ ID NO: 21742 - DNA, 24 bp, Homo sapiens
  chr7:106796950-106796974
  hypo
caaaacctcttcatttagggccgg

SEQ ID NO: 21743 - DNA, 24 bp, Homo sapiens
  chr7:106836728-106836752
  hypo
tttgagacggagtctcgctgtgtc

SEQ ID NO: 21744 - DNA, 38 bp, Homo sapiens
  chr7:106836991-106837029
  hypo
cgtgagccactgtgcccggccaggttgactttaaagta

SEQ ID NO: 21745 - DNA, 42 bp, Homo sapiens
  chr7:106837816-106837858
  hypo
tctttttttgtttgtttgaggcggagtctcactgtcatccag

SEQ ID NO: 21746 - DNA, 268 bp, Homo sapiens
  chr7:107483688-107483956
  hypo
gaggtgatttcagcagagacccgcaggtacaaggacaccacccaggcgaggagccagaaagagcagccgcagcaggtggagcgcatgggcagaggggcggtggtgggacacgcgactgtttgggattgagcgaggccacctaagcagattgcggtgagtgagcgcggaatgacgtcactgacctccaatcaactgtcacatgaaaataccaaaagcggcagtgttcctttagtcatgtggatcacgcggatccaaaatggtttttaca

SEQ ID NO: 21747 - DNA, 246 bp, Homo sapiens; identical to SEQ ID NO: 5795
  chr7:107531674-107531920
  hypo

SEQ ID NO: 21748 - DNA, 45 bp, Homo sapiens
  chr7:107633906-107633951
  hypo
gttcaatcatcacccccgttttaccttctgcgcctacacaagtaa

SEQ ID NO: 21749 - DNA, 349 bp, Homo sapiens; identical to SEQ ID NO: 5799
  chr7:108095228-108095577
  hypo

SEQ ID NO: 21750 - DNA, 613 bp, Homo sapiens; identical to SEQ ID NO: 5800
  chr7:108095780-108096393
  hypo

SEQ ID NO: 21751 - DNA, 28 bp, Homo sapiens
  chr7:108165222-108165250
  hypo
cctgggcgacagagagagactcccaaca

SEQ ID NO: 21752 - DNA, 31 bp, Homo sapiens
  chr7:108498633-108498664
  hypo
tatctccattaaatgccgatccacattctgt

SEQ ID NO: 21753 - DNA, 30 bp, Homo sapiens
  chr7:110585125-110585155
  hypo
ttctacaaaggcaacggtatgcaaaacgtt

SEQ ID NO: 21754 - DNA, 31 bp, Homo sapiens
  chr7:112149177-112149208
  hypo
gtgatcaggctctgtgcgggccctgtacaac

SEQ ID NO: 21755 - DNA, 30 bp, Homo sapiens; identical to SEQ ID NO: 5803
  chr7:112149590-112149620
  hypo

SEQ ID NO: 21756 - DNA, 289 bp, Homo sapiens; identical to SEQ ID NO: 5811
  chr7:113727321-113727610
  hypo

SEQ ID NO: 21757 - DNA, 3 bp, Homo sapiens
  chr7:113727622-113727625
  hypo
cgg

SEQ ID NO: 21758 - DNA, 62 bp, Homo sapiens; identical to SEQ ID NO: 5813
  chr7:113727753-113727815
  hypo

SEQ ID NO: 21759 - DNA, 293 bp, Homo sapiens; identical to SEQ ID NO: 5823
  chr7:116962853-116963146
  hypo

SEQ ID NO: 21760 - DNA, 187 bp, Homo sapiens; identical to SEQ ID NO: 5824
  chr7:116963330-116963517
  hypo

SEQ ID NO: 21761 - DNA, 31 bp, Homo sapiens
  chr7:121756493-121756524
  hypo
caccaaaagcactaagcgagactactccaaa

SEQ ID NO: 21762 - DNA, 199 bp, Homo sapiens; identical to SEQ ID NO: 5840
  chr7:121863465-121863664
  hypo

SEQ ID NO: 21763 - DNA, 30 bp, Homo sapiens; identical to SEQ ID NO: 5861
  chr7:122844521-122844551
  hypo

SEQ ID NO: 21764 - DNA, 53 bp, Homo sapiens; identical to SEQ ID NO: 5863
  chr7:123174597-123174650
  hypo

SEQ ID NO: 21765 - DNA, 2015 bp, Homo sapiens; identical to SEQ ID NO: 5867
  chr7:126891287-126893302
  hypo

SEQ ID NO: 21766 - DNA, 228 bp, Homo sapiens
  chr7:127371079-127371307
  hypo
ctggagaggcttgttttagaacgactggcatgcggaagcggtaggtggaggtctgggaggagctgcgtagccagggctccccttccagcctcccgtctcccttaggctctttctggcctgaggcatggtcgccatgggtgggggcactgcccgcccgattctggttggaccccctttcctctacttcataccgcagctgctgtgagcgagtgcactgtgctctgcaca

SEQ ID NO: 21767 - DNA, 111 bp, Homo sapiens
  chr7:127544830-127544941
  hypo
aagaaggaagtgcctatccaccgtgttgcagatatatctggggtgagtcgagtccctgaatcaagctgtgtggctcagaggctcaagagcgtgtctgcatatttgctgaag

SEQ ID NO: 21768 - DNA, 30 bp, Homo sapiens
  chr7:127670555-127670585
  hypo
gcagttctggggcccggctgaggcggcagc

SEQ ID NO: 21769 - DNA, 109 bp, Homo sapiens
  chr7:127673454-127673563
  hypo
tcctcaacccacccctctccccgtgtgatttctggcaggctcgcttgataaaccctcatcacctgcgcgtgggctgttgcttaagaacgaggaggtcccagatttctca

SEQ ID NO: 21770 - DNA, 30 bp, Homo sapiens
  chr7:127682564-127682594
  hypo
caaactggggatgtcgtcattcttctcaga

SEQ ID NO: 21771 - DNA, 288 bp, Homo sapiens
  chr7:127693922-127694210
  hypo
gctgagcttttccccgaccccaggcctgtggagtgcagcagtcaaagctttattgcccacacactggagccgctctgcaataaaagaaaataaaacaaggtaatgggaatggccggtacagggggcaggcccctggagaaatgggcctgctgctgcccatcttcccagcaccactgatcgccgctaaggccactgtcagtaagtcatcggcagtaccctgggtctcctttctggggctgagtgaatgacctgcatggtggtcagatggagtggcggtggcatgtacac

SEQ ID NO: 21772 - DNA, 437 bp, Homo sapiens; identical to SEQ ID NO: 5871
  chr7:127744130-127744567
  hypo

SEQ ID NO: 21773 - DNA, 30 bp, Homo sapiens
  chr7:128064475-128064505
  hypo
gtgagccaccgtgcccgaccataaagagtt

SEQ ID NO: 21774 - DNA, 27 bp, Homo sapiens
  chr7:128097001-128097028
  hypo
caccgcgcctggcctaagaaagtaaaa

SEQ ID NO: 21775 - DNA, 31 bp, Homo sapiens
  chr7:128098036-128098067
  hypo
gatctcgcccttaccccggggtctggtgtat

SEQ ID NO: 21776 - DNA, 25 bp, Homo sapiens
  chr7:128180584-128180609
  hypo
tgccggggccaaggaactctttttc

SEQ ID NO: 21777 - DNA, 548 bp, Homo sapiens; identical to SEQ ID NO: 5877
  chr7:128470508-128471056
  hypo

SEQ ID NO: 21778 - DNA, 30 bp, Homo sapiens
  chr7:128478655-128478685
  hypo
ggggccggcactggcgatgttgctgtggtg

SEQ ID NO: 21779 - DNA, 104 bp, Homo sapiens
  chr7:128484190-128484294
  hypo
ggaagcccaggctgtgcgctacatgcccccggaggaggggccctacaaggtggatatcacctacgatggtcacccggtgcctggcagcccgtttgctgtggagg

SEQ ID NO: 21780 - DNA, 31 bp, Homo sapiens
  chr7:128489609-128489640
  hypo
ccaacagccccttccacgtgctggtaagttc

SEQ ID NO: 21781 - DNA, 31 bp, Homo sapiens
  chr7:128587360-128587391
  hypo
ccgcccactctgcggccgcctactctgcagc

SEQ ID NO: 21782 - DNA, 38 bp, Homo sapiens
  chr7:128602131-128602169
  hypo
ggaattggccaggcgcggtggctcacacctgtaatccc

SEQ ID NO: 21783 - DNA, 33 bp, Homo sapiens
  chr7:128602408-128602441
  hypo
gagcgagactccgtctcaaaaaaaaaaaaaaaa

SEQ ID NO: 21784 - DNA, 95 bp, Homo sapiens
  chr7:129096501-129096596
  hypo
aatggtattgggacaccgactggccaaaaatcaagattctaagttactctgggtgtggtaggaaaaagcagtaaatgacccggctcatcctgccc

SEQ ID NO: 21785 - DNA, 70 bp, Homo sapiens
  chr7:129330294-129330364
  hypo
cagaacacgcccctgcgccacaggaggttaactcagaactgccgcctctcaccatcgacggaattccagt

SEQ ID NO: 21786 - DNA, 114 bp, Homo sapiens
  chr7:129414552-129414666
  hypo
atgattgctcagagcggagagacacaagcaaaaatgtgctagtgccaaaatcggccaagcagatggcactggtgcgggctctctggggacacactggacgaggggccttgcatc

SEQ ID NO: 21787 - DNA, 45 bp, Homo sapiens
  chr7:129435133-129435178
  hypo
agtccctcagcccacccgagctccttgacacgtttccaggaccat

SEQ ID NO: 21788 - DNA, 179 bp, Homo sapiens
  chr7:129470902-129471081
  hypo
ctcagatgagtggaaaacctgcgcatgacagggccggctcccccttctcaaagggcttcctcccactcatcccatccctaacagaatcgccgaggtgttcacgggccagagaaagcacaaacatggattcagaagtccaaagaaatgcagttcgttgcgcccaatcagagatagatgat

SEQ ID NO: 21789 - DNA, 297 bp, Homo sapiens
  chr7:129483350-129483647
  hypo
aatggataaaacacacactgccgctgccgcaaatttcacgaaggcacaagctccccatgtctctgggtcaaaatcgcataccatcgctggcagggaagctaaatccatggatcagagatgatcaccctcctccccaaagaatccctcacaagtgcaaagaagcatgctaagcaaaggacgttcagatgtttctgtggctattcacagagacggtgtgcttgttttcatgcagctccaccgcaggaggtaacccgcagacacctgcacacagcgaacggaaggctcctcctgccatat

SEQ ID NO: 21790 - DNA, 46 bp, Homo sapiens
  chr7:129689364-129689410
  hypo
atttgaatctcttcagaaattcgactttttttttttttgagatgga

SEQ ID NO: 21791 - DNA, 241 bp, Homo sapiens
  chr7:129689709-129689950
  hypo
agaaaaaacaattttgatatttctacctggagggacctttcatacccactccttccaaaaaaaaaagaaccaattagaaaattcgaatcaaagatcttcgggagatttcatgaaaaaaaaatcagggagaaaaaaactcagcaaagcaattctctcattttcagtggaaggcatttcaacagtgcctggggaattgctgaaagacaagcatttatttatttatttagagacggagtctcac

SEQ ID NO: 21792 - DNA, 148 bp, Homo sapiens
  chr7:129778854-129779002
  hypo
ttgttttttttttactttttccgccttcctaaagcagaaccttctgtagctctttcagtctagctcttcttcagaatatggcgagtctgagtctcttctgaccacataagacggggcgattcaaagcgtgcagctggagtatttgtat

SEQ ID NO: 21793 - DNA, 686 bp, Homo sapiens
  chr7:129782251-129782937
  hypo
gggtcccagaggggtggcctccgcccctcctgggggccgaggactgtcaccatgtcactacggcactctccagctgctgaccaaagccctcgctaaccgcagccctgccatactctgggtctttcctctggagcaaggtgaagagactgcagcgaggcgtggaattgggaagctcttctggttttattaaaaactcgttccaccacaggagtcagcctggccactcaggtgtggggcgggtctctcctcatttagctttcacctgcgtgcccagggataggagaaaaacggcacagagggaggttgtagggagtaagcatcctgccctggcaaagctgagtgaacgtgggtagcttcagcccagtgaagcagcagcagggacgcctgtggaaacctgggtggaggtgccttctgaccttggtttgtctgggccagggggcgaatgcttctggcagtggagcttccaggcccggaaaacccaggcctcttctcctcacgtgggccctcaggtgcttgtggactgcccggagacagaacagaactgagggtgggagggcctgcttttgcctgcagaacaccctgaaatgtcccatttacccagctctctccagggcccgcacagtccaaacttctctggcctcaactcctaccactgtgcctttgctcactctcgaccagccacggtg

SEQ ID NO: 21794 - DNA, 31 bp, Homo sapiens
  chr7:129794668-129794699
  hypo
cccccatgccgcagcccgtcgcctcctgctc

SEQ ID NO: 21795 - DNA, 204 bp, Homo sapiens
  chr7:129800275-129800479
  hypo
gaagcagagtgtcatacggaatttaattttgagatggaagccacgtaacaccttctcaaaccgccaggtttgcggcctggcagcttaggttcagatttccgtctgccaagtctttcccgagtcaggggactcctcaggctgtaccgtggatgacactcctccccactaggaacacaaggggcctttcttcggaggtggagctca

SEQ ID NO: 21796 - DNA, 242 bp, Homo sapiens
  chr7:129948128-129948370
  hypo
ccttggtggctttttcagaaccgattatggaggaagacgcggtcccgaaatcctggaagctcctgcattggtgctgacccaaatagaaactggaacgctagttttgcaggtaggcggtggggagacagttctcaaatcctgctgtccctgggctcgcctggtctaccagtgctctgagctggccgggacggagcgcgtttccactttggttccgttgctgcgtcactgagagactgaggagc

SEQ ID NO: 21797 - DNA, 30 bp, Homo sapiens
  chr7:130970110-130970140
  hypo
ggggcaatgagacacgggatgcgctcatac

SEQ ID NO: 21798 - DNA, 127 bp, Homo sapiens
  chr7:131041469-131041596
  hypo
gacagtattcttcatcgaggattacctggagcttaatggccactagggaatgtatccaaatcgtgtgcgccaaatatgttgccggtggcagatacccaagttaccccgattccgtatgggtctgcca

SEQ ID NO: 21799 - DNA, 84 bp, Homo sapiens
  chr7:131231113-131231197
  hypo
gtggaagactgcatttaaccacgttatgggctaaccacctagggggctgccaggatcggggtgcaggtggcttcagaaagcctg

SEQ ID NO: 21800 - DNA, 31 bp, Homo sapiens
  chr7:131329430-131329461
  hypo
cgcttagaacctggcccgatgcttctccatc

SEQ ID NO: 21801 - DNA, 250 bp, Homo sapiens
  chr7:131864447-131864697
  hypo
tccttgcactccagggccacacgggactccaggttgtccatctgcatctgcagccgcttcagcgtgaggtcactttcgcgggacttgcgtttataggcaatgagcacggccacgatgaaaatgatgaggaggccgccagccactgcgatgctgacgatggcgggcaggctgagcgggctgtccggggcaatgtacaccatccccggggagtactccatgccaccgacacgggcctgggggcacacagggc

SEQ ID NO: 21802 - DNA, 246 bp, Homo sapiens; identical to SEQ ID NO: 5894
  chr7:132261534-132261780
  hypo

SEQ ID NO: 21803 - DNA, 30 bp, Homo sapiens; identical to SEQ ID NO: 5895
  chr7:132262043-132262073
  hypo

SEQ ID NO: 21804 - DNA, 106 bp, Homo sapiens
  chr7:132527722-132527828
  hypo
ttttggtatccactggcgagtcctgcctgcagcaatgattactgtagtgttctgatggtacatagatttctttcgtttttgtttatttgttttaagatggaatctc

SEQ ID NO: 21805 - DNA, 46 bp, Homo sapiens
  chr7:132527947-132527993
  hypo
tccaccacacccagctaatttttgttgtgagcgcttggttcaaggt

SEQ ID NO: 21806 - DNA, 204 bp, Homo sapiens
  chr7:132637909-132638113
  hypo
agagtccttcactccacgtaactttccgcggccttactaagtgattataaccttctccaatgctgtgaatttaatatattggcaggaggtattgagatgtaatgaagactctgaaggtgccagccacagcatggagaaacagagcctgtcacctgtctaccttcggggaggctctatttctccccacaacgaggctcctatgtc

SEQ ID NO: 21807 - DNA, 30 bp, Homo sapiens
  chr7:132733565-132733595
  hypo
agagagcaagcacttcggggtgtgtgaaag

SEQ ID NO: 21808 - DNA, 93 bp, Homo sapiens
  chr7:133234085-133234178
  hypo
cttgaacacttagaggccattgtagggttattaattggtatattttcaaaattgttatgtctctgtgaattgggaagccggaggagagagaga

SEQ ID NO: 21809 - DNA, 31 bp, Homo sapiens
  chr7:133318547-133318578
  hypo
tcatttttttttcttacgtggtctcttggca

SEQ ID NO: 21810 - DNA, 562 bp, Homo sapiens; identical to SEQ ID NO: 5898
  chr7:134143024-134143586
  hypo

SEQ ID NO: 21811 - DNA, 439 bp, Homo sapiens; identical to SEQ ID NO: 5899
  chr7:134143700-134144139
  hypo

SEQ ID NO: 21812 - DNA, 30 bp, Homo sapiens
  chr7:134377948-134377978
  hypo
agacacttggcagcacgagcgaatgaagtg

SEQ ID NO: 21813 - DNA, 30 bp, Homo sapiens
  chr7:134378403-134378433
  hypo
ggttgcacatggcagcgagggagctgatgg

SEQ ID NO: 21814 - DNA, 178 bp, Homo sapiens
  chr7:134613458-134613636
  hypo
acgtggcaagtggcacgctcaagaggttgtctttgtaatgttgcagaatcgcctaccagaggaatgacgatgatgaagaggaggcagcccgggaacggcgccgccgagcccgacaggaacggctgcggcagaagcaggaggaagaatccttgggacaggtgaccgaccaggtggaggt

SEQ ID NO: 21815 - DNA, 35 bp, Homo sapiens
  chr7:134673396-134673431
  hypo
tcttgagccagagtttgagatcgctcttgttgctc

SEQ ID NO: 21816 - DNA, 185 bp, Homo sapiens
  chr7:134853336-134853521
  hypo
agtgggtgcctgtcctcgagggttaacccgctttgcctcccgcccacagcccctccaccttctaaaagctcaagagatgatcagactgaaacacccgcccatcttgctgttctgcctaggctggaagacctggcccaggtcatggaggcccctgctccacttgccagattcgcaggagtcttctg

SEQ ID NO: 21817 - DNA, 445 bp, Homo sapiens
  chr7:134880721-134881166
  hypo
agacaggctgaccagtccactggcagctccaaccgactcccatgactctactgccatgactgtggccctcgtccaagcccccattctccgccatctcctgctggccacacctccacgtgtactgcctgaaaatctgagcttcccagggtttccttggccccaggcccaacccacctgcagtgcatgatggatgagtggtgttccccgtactcctcctgtcccagcacaataaagggctgctcggggcggactcctccaccctcagggcctgccgaggatgcccgagtcagtggctccactggctccgtgtggagctctgggcagggctcagcctctgggccactggcttctggtttcttctctgcacactgtcacaagcagggtggggacaagtcagccaggaaagggtcccccacaccagggtgtacaccgcagggggtctagg

SEQ ID NO: 21818 - DNA, 30 bp, Homo sapiens
  chr7:134884375-134884405
  hypo
cagtccaggaggtgccgcttccacattttg

SEQ ID NO: 21819 - DNA, 43 bp, Homo sapiens
  chr7:134890760-134890803
  hypo
tgttgctcctctttcttcagtcggtggatttcagcttgcaatg

SEQ ID NO: 21820 - DNA, 22 bp, Homo sapiens
  chr7:134895079-134895101
  hypo
cgacagagtgagactttctgtc

SEQ ID NO: 21821 - DNA, 20 bp, Homo sapiens
  chr7:134898016-134898036
  hypo
tgacaataggccgggcgcgg

SEQ ID NO: 21822 - DNA, 40 bp, Homo sapiens
  chr7:134898275-134898315
  hypo
cagcctggtcgacagagcgagactccgtctcaaaaaaaaa

SEQ ID NO: 21823 - DNA, 478 bp, Homo sapiens
  chr7:134918398-134918876
  hypo
tctctctcctcccttttctgtcgccttcggacaacttgtaacactgtttcttccactgcccacacgcccattggcccgtcaccacgcatccccattggctgtggcggccagggacagggccgcgattggtccccacccctgtaacgaggtgccaggtctgttttctgacccagacaggaaccgcgatccccactccggcgcacgaagccgggtgactgctgtcccgggagtggggacgtcgcgtgcaccgttggcgagtaagtatcctttgaacgctcctctccagaaaggtgcccttgggcatatgagtgtttgtgtagacttgaaagaattcagtgcagcggagcctaacaggtgaacttttagcgcggggttcacaggagccttttgtatccgtcactgtggctacctacatttttgagagtgattctggatgatgatgatgatgatgatgatgattattattattatcattttg

SEQ ID NO: 21824 - DNA, 98 bp, Homo sapiens
  chr7:135360967-135361065
  hypo
aacttttagattcatttaataggtaaattgcatgtcacgggtttgtagcttattctttcagaaactcttgcattatctgtagacgtggacgtaaatat

SEQ ID NO: 21825 - DNA, 31 bp, Homo sapiens
  chr7:135495522-135495553
  hypo
gttagaactctcctatcgttttagagcagcg

SEQ ID NO: 21826 - DNA, 195 bp, Homo sapiens
  chr7:135611087-135611282
  hypo
actctaaaaaagtgctcgtagttgagtttgggaaatgcagatctccaagaaatgtggagcaacttagatgagcaatgaaaggatcagaggtttaaccacgactccattttcttcaagccccctgaagatcctgacgatctgggatgtgctggctacaccctgctccccgtcaaccaggagcgttactgaagttac

SEQ ID NO: 21827 - DNA, 97 bp, Homo sapiens
  chr7:136437908-136438005
  hypo
atacacatttgtgtacagttacgtgaatataacttttttatttatcaaatgtgaatacgtaagagtgagagtgagattgttgggtcgcatggtaagt

SEQ ID NO: 21828 - DNA, 30 bp, Homo sapiens
  chr7:137080295-137080325
  hypo
tgcgatctcgcccagcgggaggatgtttgc

SEQ ID NO: 21829 - DNA, 193 bp, Homo sapiens
  chr7:137564611-137564804
  hypo
tcccctcaggcattgcacttgcggcctgagaatatgaacgagagccctcgcctgccagtgctgctgcaggagacgagacgatccagcgagggctcccagggggcagagtgggcggagggctgctgtcgggggtgttcacaccagagaccccagtgcgagcaacggaggacacgggtcagtgctttgccaaata

SEQ ID NO: 21830 - DNA, 30 bp, Homo sapiens
  chr7:137624004-137624034
  hypo
acggagaattatcccgagggtagagacagt

SEQ ID NO: 21831 - DNA, 38 bp, Homo sapiens
  chr7:137637555-137637593
  hypo
tttgtttttgttttttttagacggggtctctctctctc

SEQ ID NO: 21832 - DNA, 38 bp, Homo sapiens
  chr7:137637832-137637870
  hypo
gatgaaaggcatgagccgctgtgcccagccagtttaag

SEQ ID NO: 21833 - DNA, 31 bp, Homo sapiens
  chr7:137664094-137664125
  hypo
taaagcacagcaagggcgggtcatcaggcca

SEQ ID NO: 21834 - DNA, 205 bp, Homo sapiens
  chr7:137670024-137670229
  hypo
caggactcagagaggttctctcgctcaacaatatgtacatcaactgcttgggaacagccaaggctagacgcagttcaggccaggggtcggaggaagaacgtggcttaaatgcctttgctgcagtgtatggacagcattccaaaggtgctctgccaggaagccccaggcctcgtggatggagagcgcttcagcttgtccctgacac

SEQ ID NO: 21835 - DNA, 30 bp, Homo sapiens
  chr7:137678214-137678244
  hypo
cacatttgcaaaaccgtttacaagaatcca

SEQ ID NO: 21836 - DNA, 195 bp, Homo sapiens
  chr7:137706783-137706978
  hypo
ctgccaccacagctaccgcagcctctgggagcctagaaaaggggaatgagaacagtgaatgactcagtcccctgatggcagtggtggtggttgtggccagggagacatgatgatgaggtgggggcgctgctgctgcgaggagcaggcaatgatgtggtgggggtgggggtggggccggggcggggtgttgggggg

SEQ ID NO: 21837 - DNA, 301 bp, Homo sapiens
  chr7:138042027-138042328
  hypo
agggtgcccggccaggtttttttttttaacaaaagaatcaaccgatgcctcacaagaaacaaacgcagcgcctgcttcagtaccagtccaaggagtggtcctgtttacctttttgcccctccctgcctccctgcctgtgtctgctttttttgcaaggaaaaaaaaaatcaagacaaatgaaggtgggagatccgccagctctgtacaaacgcaggcattagaggctggccagagcaggcgggagggcgagaaacaccctactttgcatctcattcatgatatgggttttttttttctttga

SEQ ID NO: 21838 - DNA, 40 bp, Homo sapiens
  chr7:138042567-138042607
  hypo
tacaagcatgagccatggcgcccagccattcatgatgtgg

SEQ ID NO: 21839 - DNA, 30 bp, Homo sapiens
  chr7:138247011-138247041
  hypo
aggtgaactgcgactcgccccatttgcgac

SEQ ID NO: 21840 - DNA, 142 bp, Homo sapiens; identical to SEQ ID NO: 5914
  chr7:138720771-138720913
  hypo

SEQ ID NO: 21841 - DNA, 34 bp, Homo sapiens
  chr7:138778535-138778569
  hypo
ggtggtctcttcacacggacgcgagtgaaaatta

SEQ ID NO: 21842 - DNA, 33 bp, Homo sapiens
  chr7:138845465-138845498
  hypo
gccactgcgcccggcccaagtcacttaactttt

SEQ ID NO: 21843 - DNA, 28 bp, Homo sapiens
  chr7:138909621-138909649
  hypo
tccctctccctctcccttcttcggtctc

SEQ ID NO: 21844 - DNA, 121 bp, Homo sapiens
  chr7:138974787-138974908
  hypo
cgccaccacacctggctaatttttgtattgtattaatggattaattattgtaattttgtatttttagtagagaccggggttagtagagaccaccatgttggtcaggctggtttcgaattcc

SEQ ID NO: 21845 - DNA, 16 bp, Homo sapiens
  chr7:138974967-138974983
  hypo
ccgtgccttgccaact

SEQ ID NO: 21846 - DNA, 271 bp, Homo sapiens; identical to SEQ ID NO: 5916
  chr7:139167555-139167826
  hypo

SEQ ID NO: 21847 - DNA, 499 bp, Homo sapiens; identical to SEQ ID NO: 5917
  chr7:139168114-139168613
  hypo

SEQ ID NO: 21848 - DNA, 92 bp, Homo sapiens
  chr7:139257982-139258074
  hypo
aggtgggcagcggcagcggctgcagccagatgcgggtgcacagtgccgtggctggggctgttgtgcgggaaggagtacggagcctgggccat

SEQ ID NO: 21849 - DNA, 31 bp, Homo sapiens
  chr7:139298886-139298917
  hypo
agttcagtgataccagcgctctcactggaag

SEQ ID NO: 21850 - DNA, 30 bp, Homo sapiens
  chr7:139412981-139413011
  hypo
gagggcccaggaaccgccagcaaaccagcc

SEQ ID NO: 21851 - DNA, 162 bp, Homo sapiens
  chr7:139690813-139690975
  hypo
gccaaaacaaattgccgcaattaacacgtgccactgccacgatctatgggctgaaacgtggctggaacgacgcagaagcagaaaccacagagagcgtgcgctccaataaaacggcactaaatggcacggctgtgatggaactcgtttcgattttgttccaaa

SEQ ID NO: 21852 - DNA, 347 bp, Homo sapiens
  chr7:139733610-139733957
  hypo
agagttttggtattccgtgatattcaaatactaaaatacatgagtttttattggtgtaattccatcattatttcattatttcaacatttaaaaaattcaagtctatgactcaatgattccacagaaaagacaaacggatgggttggcttcaagtctagactcgccttcagagtctgtcttctccagagaatcatcgcagatcacaacaggcagccttctaattatgcatcacgaagcttctacccacagggtaattcccactctggtccaactagtagaagacaaacgataacagagtgtgggagcacttcgttgtacaagccaacggtgcccgggtgctgtctgag

SEQ ID NO: 21853 - DNA, 96 bp, Homo sapiens; identical to SEQ ID NO: 5921
  chr7:139930044-139930140
  hypo

SEQ ID NO: 21854 - DNA, 30 bp, Homo sapiens
  chr7:139992438-139992468
  hypo
ccttgagcgggctccgcggctgcctggcgg

SEQ ID NO: 21855 - DNA, 138 bp, Homo sapiens
  chr7:140027064-140027202
  hypo
cgtgtggggaaggagcgctctctgccaccagtactttggtcacgactgttgcccctcgcagccccgccttcctggctccagaatggttgctctttattttataaccctattaacatcttcattcgtcattctaggaca

SEQ ID NO: 21856 - DNA, 161 bp, Homo sapiens
  chr7:140027766-140027927
  hypo
gcagacctgggtcagccgggcacgtgaaacagtcacacctccgctgactgtgcagacacagaattgggggagaaacaccaaggcagcagtttatcaagtggatggtgcaactcttagactcaaacagaagatgagggaaaaagagtaaagaggtgctgttt

SEQ ID NO: 21857 - DNA, 93 bp, Homo sapiens
  chr7:140063542-140063635
  hypo
aaaaaaaaaaaaaaaaaaaaaaagaaaggagcgggatgttagcggcctggaaagcagtccagcttggctggagcaaagcgatgaagcagagtg

SEQ ID NO: 21858 - DNA, 172 bp, Homo sapiens; identical to SEQ ID NO: 5922
  chr7:140098302-140098474
  hypo

SEQ ID NO: 21859 - DNA, 213 bp, Homo sapiens
  chr7:140156472-140156685
  hypo
tgcttagcactcctccacttgcgaatgcacttgagacagtaggtgtggttgcagttggagaggatcccgaagcggcgctcactggggttggctttctcatagaccacctccatgcagatcccacacaccatgtccttgctgcgctgcacggcaaatgagagctccatgtccttctcatgggcctcaatgcacgactagagaaggtggagagag

SEQ ID NO: 21860 - DNA, 30 bp, Homo sapiens
  chr7:140157040-140157070
  hypo
taagggtgacaggcacgtaaactctcttat

SEQ ID NO: 21861 - DNA, 31 bp, Homo sapiens
  chr7:140169421-140169452
  hypo
gcccatgtgggccaggcggggtggctcacgc

SEQ ID NO: 21862 - DNA, 48 bp, Homo sapiens
  chr7:140180256-140180304
  hypo
tttaaaaacctttgtactggccgggcgcggtggctcacgcctgtaatc

SEQ ID NO: 21863 - DNA, 239 bp, Homo sapiens
  chr7:140221652-140221891
  hypo
acctttggcatcctgccggcgcagctcccgctcctggatgaagccccgaaacatctgagtctccatgaagacctccaggaagtggcggaggctcttggaggagacagctttgcggaaggcctcccgctgcagggttctctcctcacgctcgcccgacgtcaggaacaaagagtagtgtcccacaatctccacgaagaagcggacaaaggcttcagacaccacctcgttcaaggggctgg

SEQ ID NO: 21864 - DNA, 31 bp, Homo sapiens
  chr7:140255213-140255244
  hypo
caggcatgagccaccccgccaccacaccggg

SEQ ID NO: 21865 - DNA, 33 bp, Homo sapiens
  chr7:140427686-140427719
  hypo
ctgggattacacgcatgagccaccatgcccggc

SEQ ID NO: 21866 - DNA, 30 bp, Homo sapiens; identical to SEQ ID NO: 5925
  chr7:140453121-140453151
  hypo

SEQ ID NO: 21867 - DNA, 31 bp, Homo sapiens
  chr7:140710388-140710419
  hypo
actgagacgagacatgcggaaggcatattct

SEQ ID NO: 21868 - DNA, 338 bp, Homo sapiens; identical to SEQ ID NO: 5927
  chr7:140772337-140772675
  hypo

SEQ ID NO: 21869 - DNA, 1710 bp, Homo sapiens; identical to SEQ ID NO: 5928
  chr7:140772716-140774426
  hypo

SEQ ID NO: 21870 - DNA, 30 bp, Homo sapiens
  chr7:141248787-141248817
  hypo
gtcttctctggcatcgtagatccttaacac

SEQ ID NO: 21871 - DNA, 775 bp, Homo sapiens; identical to SEQ ID NO: 5930
  chr7:142985428-142986203
  hypo

SEQ ID NO: 21872 - DNA, 30 bp, Homo sapiens
  chr7:143000922-143000952
  hypo
aggatcccctgggtgcgaggagagtgatgc

SEQ ID NO: 21873 - DNA, 37 bp, Homo sapiens
  chr7:143096712-143096749
  hypo
ttcctcaggttctcaccgcctccgttcttaccaacac

SEQ ID NO: 21874 - DNA, 80 bp, Homo sapiens
  chr7:143097072-143097152
  hypo
tccacattcagcttcacggagccagacacaaggtctcgaatggtgaagctctggtctgcagccaccgtggttacctgggt

SEQ ID NO: 21875 - DNA, 292 bp, Homo sapiens; identical to SEQ ID NO: 5938
  chr7:145813945-145814237
  hypo

SEQ ID NO: 21876 - DNA, 30 bp, Homo sapiens; identical to SEQ ID NO: 5939
  chr7:145815251-145815281
  hypo

SEQ ID NO: 21877 - DNA, 30 bp, Homo sapiens; identical to SEQ ID NO: 5940
  chr7:145864150-145864180
  hypo

SEQ ID NO: 21878 - DNA, 44 bp, Homo sapiens; identical to SEQ ID NO: 5941
  chr7:145982009-145982053
  hypo

SEQ ID NO: 21879 - DNA, 30 bp, Homo sapiens; identical to SEQ ID NO: 5942
  chr7:145984491-145984521
  hypo

SEQ ID NO: 21880 - DNA, 30 bp, Homo sapiens; identical to SEQ ID NO: 5943
  chr7:146072421-146072451
  hypo

SEQ ID NO: 21881 - DNA, 30 bp, Homo sapiens; identical to SEQ ID NO: 5944
  chr7:146415862-146415892
  hypo

SEQ ID NO: 21882 - DNA, 133 bp, Homo sapiens
  chr7:146425092-146425225
  hypo
gaaggggtccaatggctaaaccgacgatttcaactcacggtggcaaagagcatcacgagcatgctcaggaagcacgctgaggaggcgggcacccaaccgaacctgcagagacggaggacatctttctggggag

SEQ ID NO: 21883 - DNA, 30 bp, Homo sapiens; identical to SEQ ID NO: 5945
  chr7:147729233-147729263
  hypo

SEQ ID NO: 21884 - DNA, 609 bp, Homo sapiens; identical to SEQ ID NO: 5946
  chr7:148036473-148037082
  hypo

SEQ ID NO: 21885 - DNA, 31 bp, Homo sapiens
  chr7:148042016-148042047
  hypo
gcagcacagtccatgccgcgatttagccatg

SEQ ID NO: 21886 - DNA, 136 bp, Homo sapiens
  chr7:148079716-148079852
  hypo
ccccacagcaccctgcctcagcgccggggcaaaagaatctttgtgtgagcccagggagtcggcagggacatgaggggttgatgcggcacttgctcagagcaatcgcagtgctgccgctggaattatctttctcaca

SEQ ID NO: 21887 - DNA, 30 bp, Homo sapiens
  chr7:148142954-148142984
  hypo
ggaggcgctggagccggccatgtgcctgga

SEQ ID NO: 21888 - DNA, 31 bp, Homo sapiens
  chr7:148162309-148162340
  hypo
agcagggaggcctttgcgtgactctcctctg

SEQ ID NO: 21889 - DNA, 152 bp, Homo sapiens
  chr7:148448803-148448955
  hypo
aagtattgtaaatgtgcgttacacagtatattacagctgcggctatgtcagataccatcaaaaacaaatggcagagcaaatgtacatattacagtttgtataatttaaaaatgtagaacatggccagacgcggtggctcacgcctgtaatcc

SEQ ID NO: 21890 - DNA, 179 bp, Homo sapiens
  chr7:148480933-148481112
  hypo
aatgtctgcattcaacaatgacgctggctttgtggctgctcttgataaggtaggtgcgtgagggttgtgacttgcctgtagtatgtatggatggggcgtttgtctctaactatattccgtgtaacgcaggcttgtggtcgcttcataaacaacaacgcggttaccaagatggcccaatc

SEQ ID NO: 21891 - DNA, 30 bp, Homo sapiens
  chr7:148481435-148481465
  hypo
gagatcagacaagatcgggcacgttcagtt

SEQ ID NO: 21892 - DNA, 30 bp, Homo sapiens; identical to SEQ ID NO: 5947
  chr7:148506156-148506186
  hypo

SEQ ID NO: 21893 - DNA, 80 bp, Homo sapiens; identical to SEQ ID NO: 5948
  chr7:148506411-148506491
  hypo

SEQ ID NO: 21894 - DNA, 90 bp, Homo sapiens; identical to SEQ ID NO: 5949
  chr7:148507423-148507513
  hypo

SEQ ID NO: 21895 - DNA, 101 bp, Homo sapiens; identical to SEQ ID NO: 5950
  chr7:148508711-148508812
  hypo

SEQ ID NO: 21896 - DNA, 185 bp, Homo sapiens; identical to SEQ ID NO: 5951
  chr7:148511049-148511234
  hypo

SEQ ID NO: 21897 - DNA, 108 bp, Homo sapiens; identical to SEQ ID NO: 5952
  chr7:148512013-148512121
  hypo

SEQ ID NO: 21898 - DNA, 35 bp, Homo sapiens; identical to SEQ ID NO: 5953
  chr7:148513817-148513852
  hypo

SEQ ID NO: 21899 - DNA, 122 bp, Homo sapiens; identical to SEQ ID NO: 5954
  chr7:148514300-148514422
  hypo

SEQ ID NO: 21900 - DNA, 77 bp, Homo sapiens; identical to SEQ ID NO: 5955
  chr7:148515085-148515162
  hypo

SEQ ID NO: 21901 - DNA, 201 bp, Homo sapiens; identical to SEQ ID NO: 5956
  chr7:148523535-148523736
  hypo

SEQ ID NO: 21902 - DNA, 30 bp, Homo sapiens; identical to SEQ ID NO: 5957
  chr7:148525927-148525957
  hypo

SEQ ID NO: 21903 - DNA, 120 bp, Homo sapiens; identical to SEQ ID NO: 5958
  chr7:148526815-148526935
  hypo

SEQ ID NO: 21904 - DNA, 30 bp, Homo sapiens; identical to SEQ ID NO: 5959
  chr7:148543654-148543684
  hypo

SEQ ID NO: 21905 - DNA, 30 bp, Homo sapiens; identical to SEQ ID NO: 5960
  chr7:148544315-148544345
  hypo

SEQ ID NO: 21906 - DNA, 226 bp, Homo sapiens
  chr7:148703453-148703679
  hypo
acaggaagggttatcacgggctgggctgtgtggaactttccaccttcagcttgtgcggtcttcacgcaggaggtcctgagggctcacacttcacaacgactggagtccctcacagacatcgccctccaggggtgggcagagcaaggtcagccacctgcccaaggctgcgcagccagcaagtggtgggtgggcctgtgagcccaagggtttccgtggggatgggata

SEQ ID NO: 21907 - DNA, 31 bp, Homo sapiens
  chr7:148759940-148759971
  hypo
tgtgagccactgcacccggcccatatgtctc

SEQ ID NO: 21908 - DNA, 73 bp, Homo sapiens
  chr7:148846150-148846223
  hypo
ggccgggggctgaggcggaagaatcacttgagtccaggagttcgaggcagtccacaccgcgtctctaaaataa

SEQ ID NO: 21909 - DNA, 180 bp, Homo sapiens
  chr7:148851180-148851360
  hypo
gtggagatccacagccggcgactcctacacctggaaggtcggacagggacagcagagaagaaactagccagctgtgaaaagacagttaccgagcttgggaaccagctggagggcaagtgggccgtgctgggaaccctgctgcaggagtacgggctgctgcagaggcggctggagaacttg

SEQ ID NO: 21910 - DNA, 30 bp, Homo sapiens; identical to SEQ ID NO: 5963
  chr7:148857608-148857638
  hypo

SEQ ID NO: 21911 - DNA, 30 bp, Homo sapiens
  chr7:148879362-148879392
  hypo
ccatcccagagagacggaagcaggtgcgat

SEQ ID NO: 21912 - DNA, 30 bp, Homo sapiens
  chr7:148901702-148901732
  hypo
aaggagcttgccggcgcctacctgagatca

SEQ ID NO: 21913 - DNA, 30 bp, Homo sapiens
  chr7:148921395-148921425
  hypo
actcgggcctcatccgccaccagatgacgc

SEQ ID NO: 21914 - DNA, 2 bp, Homo sapiens
  chr7:148930602-148930604
  hypo
aa

SEQ ID NO: 21915 - DNA, 31 bp, Homo sapiens; identical to SEQ ID NO: 5965
  chr7:148936685-148936716
  hypo

SEQ ID NO: 21916 - DNA, 130 bp, Homo sapiens
  chr7:148984551-148984681
  hypo
gacgtctcccccattccggagaatcctgaccttcctgtatttgggaatggctctgggctgctctccttctggtggctgacttgcgaacttgtgtctggttgcaggactggcattgcggactgacctccag

SEQ ID NO: 21917 - DNA, 30 bp, Homo sapiens
  chr7:149128221-149128251
  hypo
ctccagggcagacgcgatggtctggggttc

SEQ ID NO: 21918 - DNA, 30 bp, Homo sapiens
  chr7:149171771-149171801
  hypo
gcgcttctcacactcggtgcaggggaaggg

SEQ ID NO: 21919 - DNA, 31 bp, Homo sapiens
  chr7:149315325-149315356
  hypo
caaaagtatctgtcctcggccatctttacat

SEQ ID NO: 21920 - DNA, 245 bp, Homo sapiens; identical to SEQ ID NO: 5970
  chr7:149411482-149411727
  hypo

SEQ ID NO: 21921 - DNA, 530 bp, Homo sapiens; identical to SEQ ID NO: 5971
  chr7:149411834-149412364
  hypo

SEQ ID NO: 21922 - DNA, 351 bp, Homo sapiens
  chr7:149420319-149420670
  hypo
tgttgctttgcattgacgccaggcatgatgcatggggtgggcttgggctctggacagcatggtggaggggccggggcacaggtcttggagtcagacccggagaggctcctgatgccttgagcctaggctgttcccactcacagggccgcagtgagcttagctgcagtaatgtacttactgtacaactccattttcctcaaatgtaagttctgttcaggaccccagagctgtctcaaacagtgaccctgacagcccacttccttcaatttgtcctcagagtgatgccacttgtctgcctgcagggcgaattccatggcttccctctttgccctgtccggttctggcaggtgt

SEQ ID NO: 21923 - DNA, 30 bp, Homo sapiens
  chr7:149462821-149462851
  hypo
tcttctggctgaagcgcttgccgcactccg

SEQ ID NO: 21924 - DNA, 31 bp, Homo sapiens
  chr7:149513356-149513387
  hypo
ggggcgctgcccagggcggggggatgggcag

SEQ ID NO: 21925 - DNA, 137 bp, Homo sapiens
  chr7:150006589-150006726
  hypo
agctgcaactgcttgcgcctgctgtaagacaaaccccagccatgccttcagcacacaaaaacttcagaacaaccaaaccacagcctccagctactcctttaaatcctcctcatggaccttgattcaagtgccgcaaa

SEQ ID NO: 21926 - DNA, 121 bp, Homo sapiens
  chr7:150006785-150006906
  hypo
ctgtgcgggaccccactggaaatcggactgtccaactaatatcacagccacttctagggcccctggagctctggatcaaagctctctggctgactgcttctcagatctcggctttgcggct

SEQ ID NO: 21927 - DNA, 30 bp, Homo sapiens
  chr7:150039391-150039421
  hypo
cgggtgtggcagaacggcatgatggaattc

SEQ ID NO: 21928 - DNA, 31 bp, Homo sapiens
  chr7:150049532-150049563
  hypo
taccagaatgtcttatcgttgaaattatttt

SEQ ID NO: 21929 - DNA, 1469 bp, Homo sapiens
  chr7:150068780-150070249
  hypo
gagagacgcttctggcgacgaaagcagcttcgagctcatctgcggcggtgccaccctcccgccccggaggcccggcccttcatatgcggcaactgtggccggagctttgcccagtgggaccagctagttgcccacaagcgggtgcacgtagctgaggccctggaggaggccgcagccaaggctctggggccccggcccaggggccgccccgcggtgaccgccccccggcccggtggagatgccgtcgaccgccccttccagtgtgcctgttgtggcaagcgcttccggcacaagcccaacttgatcgctcaccgccgcgtgcacacgggcgagcggccccaccagtgccccgagtgcgggaagcgctttaccaataagccctatctgacttcgcaccggcgcatccacaccggcgagaagccctacccgtgcaaagagtgcggccgccgcttccggcacaaacccaacctgctgtctcacagcaagattcacaagcgatccgaggggtcggcccaggccgcccccggcccggggagcccccagctgccagccggcccccaggagtccgcggccgagcccaccccggcggtacctctgaaaccggcccaggagccgccgccaggggccccgccagagcacccgcaggacccgatcgaagcccccccctccctctacagctgcgacgactgcggcaggagcttccggctggagcgcttcctgcgggcccaccagcggcagcacaccggggagcggcccttcacctgcgccgagtgcgggaagaacttcggcaagaagacgcacctggtggcgcactcgcgcgtgcactccggcgagcggcccttcgcctgcgaggagtgcggccgccgcttctcccagggcagccatctggcggcgcatcggcgcgaccacgcccccgatcggcccttcgtgtgtcccgactgcggcaaggccttccgccacaaaccctacctggcggcgcaccggcgcatccacaccggcgagaagccctacgtctgccccgactgcggcaaagccttcagccagaagtccaacctggtgtcgcaccggcgcatccacacgggcgagcggccctacgcctgtcccgactgcgaccgcagcttcagccagaagtccaacctcatcacccaccgcaagagccacatccgggacggcgccttctgctgtgccatctgtggccagaccttcgacgacgaggagagactcctggcccaccagaagaagcacgatgtctgagacggtgggcggggccgtgttggctgagagagggctggggtccttcgtggtgggagtcgcagtgggctgggggtgcctgcctagtgctggagtaggggacaatgggaatcctagaggggatggaagacgcggggagtgagctgggtgggccctgctagcgagagaggtcaaccccggtggccagggaacccacttccaagcgcagggacgccggc

SEQ ID NO: 21930 - DNA, 31 bp, Homo sapiens
  chr7:150087538-150087569
  hypo
gacacagcacagccaccggtctcagattggt

SEQ ID NO: 21931 - DNA, 128 bp, Homo sapiens
  chr7:150098342-150098470
  hypo
gagcttcaagtcgtccggtaaggcagtcggcctcattgagagggtttggtgtcccactgcccagtcccggggagctgcctgacggagggtagactgcagtgaccagaggcagccgctcagccatgcaa

SEQ ID NO: 21932 - DNA, 182 bp, Homo sapiens
  chr7:150100653-150100835
  hypo
cagtgttgatgtgctccgagtggaggcacgggtggggttggtcatcagcacctggggtgctggtgtcactgcatgagaactcaacatctgtcctatggactagtttctttgtcttcctagtattcccttcccgttgtctctgtttaaaatgccaatttccgtgggacgtggaactcctaaag

SEQ ID NO: 21933 - DNA, 30 bp, Homo sapiens
  chr7:150105071-150105101
  hypo
cagtgcgcgcagtgcggccgctgcttccgc

SEQ ID NO: 21934 - DNA, 54 bp, Homo sapiens
  chr7:150105547-150105601
  hypo
ccttctctggcccatccggcctagagcaggtgagacctgcggggctggccagag

SEQ ID NO: 21935 - DNA, 243 bp, Homo sapiens; identical to SEQ ID NO: 5975
  chr7:150497118-150497361
  hypo

SEQ ID NO: 21936 - DNA, 121 bp, Homo sapiens; identical to SEQ ID NO: 5976
  chr7:150497654-150497775
  hypo

SEQ ID NO: 21937 - DNA, 875 bp, Homo sapiens; identical to SEQ ID NO: 5978
  chr7:150671456-150672331
  hypo

SEQ ID NO: 21938 - DNA, 31 bp, Homo sapiens
  chr7:150699034-150699065
  hypo
gaaggcttttgatccccgggtagggctgagc

SEQ ID NO: 21939 - DNA, 646 bp, Homo sapiens; identical to SEQ ID NO: 5979
  chr7:150715666-150716312
  hypo

SEQ ID NO: 21940 - DNA, 30 bp, Homo sapiens
  chr7:150721503-150721533
  hypo
tcaccatcaggccacggcttctccagaaag

SEQ ID NO: 21941 - DNA, 30 bp, Homo sapiens
  chr7:150742444-150742474
  hypo
ccctgaggtgtggtcgctgccaagcatcag

SEQ ID NO: 21942 - DNA, 125 bp, Homo sapiens
  chr7:150753895-150754020
  hypo
aagggctcagccaggcaggtccgcctgacagacgtccagtgtcagcccccgcctcccccaagcggccacaccggcaaggagcacccgcctcccgcacacctgacgatgttcttgtgcttcagctc

SEQ ID NO: 21943 - DNA, 363 bp, Homo sapiens
  chr7:150758877-150759240
  hypo
tgtgctgtggctgccgctaagggccactctgaggcccttcatactccaggaggatccccagcagcgcagcctgcgcgtggtggctcctgccctcccagggctctcgatggtgatcaggcctctcccccatccaggttatgcctccgcctcgttgccctgaaagccgcagcgacagcgaaaagggctaagattcggccatgagcagcgcccctcggcgccccgccaagggcgcagattctttctgtacggtgagtgtggcccccaggtcgccagcccaaccttccctccctgggcagccttgggtgctccggccaagggtcctcgccaaccaggggtgtgagcgtgtgtgagtgtggagactgg

SEQ ID NO: 21944 - DNA, 36 bp, Homo sapiens
  chr7:150773441-150773477
  hypo
catgcctgtgtagccgccaccgagggacagccgagg

SEQ ID NO: 21945 - DNA, 49 bp, Homo sapiens
  chr7:150774754-150774803
  hypo
gggcacttgctgccttcggggaaggcggggaccccggtatcctgggagc

SEQ ID NO: 21946 - DNA, 30 bp, Homo sapiens
  chr7:150776459-150776489
  hypo
ggagcaggagcaagcgttcctgggcaaacg

SEQ ID NO: 21947 - DNA, 62 bp, Homo sapiens
  chr7:150776688-150776750
  hypo
ccacaggagggggccgtggccgagaccccaagagctggcccagacgacgaagcgccaccgag

SEQ ID NO: 21948 - DNA, 30 bp, Homo sapiens
  chr7:150777337-150777367
  hypo
gggttaagttaagcccgaggtcattaaccg

SEQ ID NO: 21949 - DNA, 88 bp, Homo sapiens; identical to SEQ ID NO: 5983
  chr7:150784081-150784169
  hypo

SEQ ID NO: 21950 - DNA, 44 bp, Homo sapiens; identical to SEQ ID NO: 5984
  chr7:150784694-150784738
  hypo

SEQ ID NO: 21951 - DNA, 30 bp, Homo sapiens; identical to SEQ ID NO: 5985
  chr7:150784985-150785015
  hypo

SEQ ID NO: 21952 - DNA, 43 bp, Homo sapiens
  chr7:150811422-150811465
  hypo
tttgaagaatgagaaatggcccgcttttctccaaaatggggcc

SEQ ID NO: 21953 - DNA, 30 bp, Homo sapiens
  chr7:150813003-150813033
  hypo
tcggggcagcgcgctcgcctccggttgccc

SEQ ID NO: 21954 - DNA, 168 bp, Homo sapiens
  chr7:150813846-150814014
  hypo
ctggccctgacggggcggctctgtcttccgcagactcgtttgtgaacagccaggagtggacgctgagccgctccgtaccggagcttaaagtggtgagtgtggcccatgggcagcaccggcggcctggagctgggggggcgaggctgggtgccgcgggcctgggccttg

SEQ ID NO: 21955 - DNA, 30 bp, Homo sapiens
  chr7:150814259-150814289
  hypo
tcccctgaaggtgagcgtcacaggcccagc

SEQ ID NO: 21956 - DNA, 214 bp, Homo sapiens
  chr7:150816998-150817212
  hypo
ggattcccggcacccgcctggtgcccgtcccgcccctgacccggagctgccctcagcagccctctttgtccttaggccacgaatggcggcggcagcgccttcagcgactactcgtcctcagtcccctccacccccagcatcagccagcgggagctgcgcatcgagaccatcgctgcctcctccacccccacacccatccgaaagcagtccaagc

SEQ ID NO: 21957 - DNA, 30 bp, Homo sapiens
  chr7:150819539-150819569
  hypo
cgtgctgaggtggacgcttggcctgtgtct

SEQ ID NO: 21958 - DNA, 30 bp, Homo sapiens
  chr7:150828568-150828598
  hypo
tgagcagccgccaccgccaccatgctcccc

SEQ ID NO: 21959 - DNA, 34 bp, Homo sapiens; identical to SEQ ID NO: 5987
  chr7:150869803-150869837
  hypo

SEQ ID NO: 21960 - DNA, 355 bp, Homo sapiens; identical to SEQ ID NO: 5988
  chr7:151038573-151038928
  hypo

SEQ ID NO: 21961 - DNA, 35 bp, Homo sapiens
  chr7:151074642-151074677
  hypo
cctgggaagggtgtcccgaccgcttcctctccagc

SEQ ID NO: 21962 - DNA, 30 bp, Homo sapiens
  chr7:151076990-151077020
  hypo
ccggcagcactgcccgcaggcagcactcaa

SEQ ID NO: 21963 - DNA, 235 bp, Homo sapiens; identical to SEQ ID NO: 5989
  chr7:151106753-151106988
  hypo

SEQ ID NO: 21964 - DNA, 238 bp, Homo sapiens; identical to SEQ ID NO: 5990
  chr7:151107395-151107633
  hypo

SEQ ID NO: 21965 - DNA, 30 bp, Homo sapiens
  chr7:151126442-151126472
  hypo
ccgctcatgggtcacgcctttggcttttac

SEQ ID NO: 21966 - DNA, 34 bp, Homo sapiens
  chr7:151134319-151134353
  hypo
aaccacccagcccaggcgtcgggggagggtcctc

SEQ ID NO: 21967 - DNA, 217 bp, Homo sapiens
  chr7:151165468-151165685
  hypo
caactgtcgctggcacggtgcccgcggccacaccgtaaacgctgcccagggaaaacacacaccgctcactgctgacctcacacccatgaccaggaacctggcgcagacacttggtgctgcctagccacccgcctgcatccctggatctgggcactccccagagaaagcatccacgccttgtcccttctcctcaaatgttccccgtgcttacgctcag

SEQ ID NO: 21968 - DNA, 37 bp, Homo sapiens
  chr7:151214438-151214475
  hypo
agcgaaactccgtctcggaaaaaaaaaaaaaaaaaaa

SEQ ID NO: 21969 - DNA, 5 bp, Homo sapiens
  chr7:151290073-151290078
  hypo
gataa

SEQ ID NO: 21970 - DNA, 206 bp, Homo sapiens
  chr7:151358666-151358872
  hypo
atatacctctgtctgtaatcacgctacgatgagcagctgacattcttactcaggacttagaataataatgctttagagtcctgcacgaagcctccaaaagagtggaaaaaatacacaacccttcgaaacaggtttactcaagcacggtgagagaggctgggcggtcattgattaacagggtatgcgttccttctcaaagagatggc

SEQ ID NO: 21971 - DNA, 82 bp, Homo sapiens
  chr7:151411458-151411540
  hypo
cccatccgcgccccgccgtgcctaggtggagaggcggcagggcttcccggagagccgtcctcccatccgcgacccgccgtcc

SEQ ID NO: 21972 - DNA, 30 bp, Homo sapiens
  chr7:151468781-151468811
  hypo
cttctggtctagcacgtgtttttcacgttt

SEQ ID NO: 21973 - DNA, 69 bp, Homo sapiens
  chr7:151506370-151506439
  hypo
cccctaccccgagacgggtgcagaatcagcagcggggatcatccagagactctcgcagtccacggcagg

SEQ ID NO: 21974 - DNA, 30 bp, Homo sapiens
  chr7:151542113-151542143
  hypo
ggcagcctccgccccgcacaagggtgctgg

SEQ ID NO: 21975 - DNA, 116 bp, Homo sapiens; identical to SEQ ID NO: 5992
  chr7:151573023-151573139
  hypo

SEQ ID NO: 21976 - DNA, 215 bp, Homo sapiens
  chr7:151624664-151624879
  hypo
catcacctgaggtctgcgtaaggagaaggtggagctgggactgcagtctggcttggccagggctactccagaagtagtgacaagcacagaggctcacccaggaaggtgctggggtgctgctgtccatccggtgacactggataacatttgattctgagcccgtgtcacctccctggaactgtcccgacatgcaggagtcacgataaaccatactg

SEQ ID NO: 21977 - DNA, 31 bp, Homo sapiens
  chr7:151712355-151712386
  hypo
ctggatctattccctccgttcccacctccag

SEQ ID NO: 21978 - DNA, 108 bp, Homo sapiens
  chr7:151720361-151720469
  hypo
ctggattaggtaccttgagagcgggttgttaataagtaacattgcccctttagccagtgcgcgcttcctcttccgattctctgccacgttatgatgtagcacaaagcc

SEQ ID NO: 21979 - DNA, 693 bp, Homo sapiens; identical to SEQ ID NO: 5993
  chr7:151722450-151723143
  hypo

SEQ ID NO: 21980 - DNA, 68 bp, Homo sapiens; identical to SEQ ID NO: 5994
  chr7:151723167-151723235
  hypo

SEQ ID NO: 21981 - DNA, 167 bp, Homo sapiens
  chr7:151791413-151791580
  hypo
tcagccacttaagaatgtgcccgtcaaggggtctgggccccacggaccatctccaaaaaaattctatccccgtttcactcgaggcccaagtcgagtgctcgagccacagttcaaagcaaacaaaattgacgatgtgatagacagtcgtgttgaagatccagaagaag

SEQ ID NO: 21982 - DNA, 184 bp, Homo sapiens
  chr7:151802390-151802574
  hypo
cataagaaatacaaagcgtgaggggttgattcgagggagaatgattggcgcggcccacgcgacaggtatcacttctcgttagctttgctctacaggtgttggatgacaagggctcgagcctcagcgcctgtcctgattctgcaaagtctatgaagagtagtgtttcaaacggacattgccagca

SEQ ID NO: 21983 - DNA, 232 bp, Homo sapiens
  chr7:151812624-151812856
  hypo
tatgggcggagctagcggctgctctccagaacactctttttatatgttaagactgactcacaaaccatagttactcgtatttgggtaaaacgaactaaataatgaaaatgaaaacaactgacagtatttgttgcaaatgacaaaattcaagccctcaagtgaaaattagaattttgaaaaacttacatttaccgccaggagcttgacagcttcctagtacttaaaaatttta

SEQ ID NO: 21984 - DNA, 31 bp, Homo sapiens
  chr7:151845095-151845126
  hypo
gcatgtgaacggcagacgttacctttaggtg

SEQ ID NO: 21985 - DNA, 115 bp, Homo sapiens
  chr7:151874696-151874811
  hypo
ccctggggaggtcgtcgcatggggtctgtgtgtctagggcccggaaagtctggccggggaatgaagtttccatgtctcagattagaagatgcctctacaacgctgccaggtggag

SEQ ID NO: 21986 - DNA, 361 bp, Homo sapiens
  chr7:152273142-152273503
  hypo
aaaaaaaggagaagaatcgtacttatgttcagctgcaatttactcagcagagtgattaatccattaattattccattcagtgaactattcgaaagcatttgcgagtgtttaccatatgctctcttattgttggagggtcggactattcgaaagcatttgcgagtgtttaccatacgccctcgtatcgttggagggtcggagcagccgggagttgggaggcctgtgatgaaagagatctgaacagctgcagagacacgtttgcaagtgggcctggggcccacctcaggactgggggccggtcgggcaccctgcctctcacccccaaacaacgcaattctttttttgtttttttgtttttttg

SEQ ID NO: 21987 - DNA, 27 bp, Homo sapiens
  chr7:152371410-152371437
  hypo
aaggttttggccgggcgcagtggctca

SEQ ID NO: 21988 - DNA, 30 bp, Homo sapiens
  chr7:152374302-152374332
  hypo
tggcctcttctctacgtagggctgcgggcc

SEQ ID NO: 21989 - DNA, 22 bp, Homo sapiens
  chr7:152374743-152374765
  hypo
cggagtagagacatattttttc

SEQ ID NO: 21990 - DNA, 30 bp, Homo sapiens
  chr7:152455689-152455719
  hypo
caagaatttacgatcgggcaagaagcagga

SEQ ID NO: 21991 - DNA, 43 bp, Homo sapiens
  chr7:152455924-152455967
  hypo
ttagaaaaatttaggccgtgttaggtataataattccaactaa

SEQ ID NO: 21992 - DNA, 30 bp, Homo sapiens
  chr7:152537574-152537604
  hypo
ccagcaccagacagcggggggagtgtgagg

SEQ ID NO: 21993 - DNA, 35 bp, Homo sapiens
  chr7:152543616-152543651
  hypo
gtgtagtgagccccagcgcccgggctgcagtctgt

SEQ ID NO: 21994 - DNA, 30 bp, Homo sapiens
  chr7:152551645-152551675
  hypo
ctgaacgcgtcgttcgatggtgtcacgttg

SEQ ID NO: 21995 - DNA, 174 bp, Homo sapiens
  chr7:152555645-152555819
  hypo
ggcaggcaggtgtagacggggtttctctgctgctaacatgagggaccacggactccaggtagggtgggagcagagggagatgagagattgggaggaatggaggcgtctgaggactggcggccctgggcttcaaggttaggaggttgtggtcctgaagaacgatactgattaaga

SEQ ID NO: 21996 - DNA, 40 bp, Homo sapiens
  chr7:152647710-152647750
  hypo
taaaacctccaagggggtgggcgtggtggctcatgcctgt

SEQ ID NO: 21997 - DNA, 191 bp, Homo sapiens
  chr7:154542177-154542368
  hypo
aacttagccaggcactgagtgcgtgggaaggcaaaacactcttttctcctcccacggcgggggcgctccctgggcgatgctcacggagagtgggagggcgtcccgcaccgggcagagctgaagggtggcgggggtcggcttcctcctctctgcctcttcccttccgccacgcttcctacccacaccagcca

SEQ ID NO: 21998 - DNA, 95 bp, Homo sapiens
  chr7:154926246-154926341
  hypo
tgcatcttgtttttctttttacgtaatagattgtgacactctttccgcatcagtacataagaatttcatctttggccgggcgcggtggctcacgc

SEQ ID NO: 21999 - DNA, 30 bp, Homo sapiens
  chr7:155017976-155018006
  hypo
cccttctcccatcacgggccatctccactg

SEQ ID NO: 22000 - DNA, 31 bp, Homo sapiens
  chr7:155105652-155105683
  hypo
gagggagagtttgcaccgtattaatcttgcc

SEQ ID NO: 22001 - DNA, 434 bp, Homo sapiens
  chr7:155130272-155130706
  hypo
acagagctgcaaaccaaggaacgccaagcaatgtggcaaggccagcagccgggagagaggcgcgtgcagggaggccagcggccgggacagaggcacatgtaggagggccggtggccaggacagagactcatttacggaggccagaggcgggcacagaggagcgtgcagggaggccagcggctgggacagaggcacatttacggaggccagaggcaggcacagaggcacgtgcagggaggccagcggccaagacagaggcgcatgcaggaaggccagcggccgggacagaggcacatttacggaggccagaggcaggcactaaggcgcgtacagggaggccagcggccgggacagaggcacgtgcagggaggccagcggccgggacagaggcacgtataccgcggtcagtggccgggacagaggcacatgcaggg

SEQ ID NO: 22002 - DNA, 464 bp, Homo sapiens; identical to SEQ ID NO: 6004
  chr7:155167174-155167638
  hypo

SEQ ID NO: 22003 - DNA, 644 bp, Homo sapiens; identical to SEQ ID NO: 6006
  chr7:155170270-155170914
  hypo

SEQ ID NO: 22004 - DNA, 31 bp, Homo sapiens; identical to SEQ ID NO: 6011
  chr7:155244946-155244977
  hypo

SEQ ID NO: 22005 - DNA, 575 bp, Homo sapiens; identical to SEQ ID NO: 6013
  chr7:155246904-155247479
  hypo

SEQ ID NO: 22006 - DNA, 383 bp, Homo sapiens; identical to SEQ ID NO: 6014
  chr7:155247650-155248033
  hypo

SEQ ID NO: 22007 - DNA, 55 bp, Homo sapiens; identical to SEQ ID NO: 6016
  chr7:155250323-155250378
  hypo

SEQ ID NO: 22008 - DNA, 233 bp, Homo sapiens; identical to SEQ ID NO: 6017
  chr7:155251025-155251258
  hypo

SEQ ID NO: 22009 - DNA, 203 bp, Homo sapiens; identical to SEQ ID NO: 6018
  chr7:155251346-155251549
  hypo

SEQ ID NO: 22010 - DNA, 193 bp, Homo sapiens; identical to SEQ ID NO: 6019
  chr7:155251661-155251854
  hypo

SEQ ID NO: 22011 - DNA, 112 bp, Homo sapiens; identical to SEQ ID NO: 6020
  chr7:155251890-155252002
  hypo

SEQ ID NO: 22012 - DNA, 503 bp, Homo sapiens; identical to SEQ ID NO: 6025
  chr7:155259119-155259622
  hypo

SEQ ID NO: 22013 - DNA, 124 bp, Homo sapiens; identical to SEQ ID NO: 6026
  chr7:155259833-155259957
  hypo

SEQ ID NO: 22014 - DNA, 852 bp, Homo sapiens; identical to SEQ ID NO: 6027
  chr7:155260038-155260890
  hypo

SEQ ID NO: 22015 - DNA, 30 bp, Homo sapiens
  chr7:155314777-155314807
  hypo
ccacacacacagctgcggcaccacgtggag

SEQ ID NO: 22016 - DNA, 31 bp, Homo sapiens
  chr7:155352343-155352374
  hypo
tctcactgtgtcctcccgtgatgggaggggc

SEQ ID NO: 22017 - DNA, 80 bp, Homo sapiens
  chr7:155352612-155352692
  hypo
ttggtcagagcagcctgggtccgtcagagcagcagcgggcaacccacagccccacagccggcaggtgcagggcctcccac

SEQ ID NO: 22018 - DNA, 30 bp, Homo sapiens
  chr7:155363313-155363343
  hypo
gcactccgggccagcgcaggccccagcagc

SEQ ID NO: 22019 - DNA, 183 bp, Homo sapiens
  chr7:155385398-155385581
  hypo
tggagtgcttttctcccgctcaattggaattccatcccacccatgacactggcctccctctctgcgggccctggttttccaaactgatagctcccttcctgccacccctacaacccacactacaagagaagctaccaggaacacgcttgcgctcaggtttgttaagaacgacttcactggttc

SEQ ID NO: 22020 - DNA, 31 bp, Homo sapiens
  chr7:155469875-155469906
  hypo
ttatatggtcacctaacggaaacttcatttt

SEQ ID NO: 22021 - DNA, 169 bp, Homo sapiens
  chr7:155502688-155502857
  hypo
ttagatggtctccttccgtcttctttaccctcgttcatctcacactgctgtgaatgatcattttcctaccaaagagatcattcgtgatcccttattatacgtgttgtctctgtggcatagtaatggatcatttacttggaatttagaagccctccgtaatttggcatca

SEQ ID NO: 22022 - DNA, 16 bp, Homo sapiens
  chr7:155520440-155520456
  hypo
ttgccaaaaaggtaac

SEQ ID NO: 22023 - DNA, 53 bp, Homo sapiens
  chr7:155530781-155530834
  hypo
tctttttctggaacagcgaagtccccctccaccaccaccgcctcctacccttc

SEQ ID NO: 22024 - DNA, 30 bp, Homo sapiens
  chr7:155532000-155532030
  hypo
atcttttcatgtcagcgagttggttttgat

SEQ ID NO: 22025 - DNA, 187 bp, Homo sapiens
  chr7:155532478-155532665
  hypo
cacagcaccagcctccgcaccagcccccgcaccagcccccgccccagcaccagcccccaccccagcacccaccacagcacccgccgcagcaccagcaccaccaccaccaccaccacctgtccgtcccgccccctcctttgatgccgatgtctcagccacagttccggcctcacgtacagaccgctca

SEQ ID NO: 22026 - DNA, 127 bp, Homo sapiens
  chr7:155559942-155560069
  hypo
ctgtaggctgacccagcgaagaagctacctgcttgttcagtccgatttctggcctccccgtcaggtgccacctgtggtgcccattgttgccattgccacgcaccgtgcgtcccgtggtgggatctgg

SEQ ID NO: 22027 - DNA, 30 bp, Homo sapiens
  chr7:155567826-155567856
  hypo
aggtctctccgggccgctgtcctgcgtaac

SEQ ID NO: 22028 - DNA, 30 bp, Homo sapiens
  chr7:155573830-155573860
  hypo
gctctggttgggggcgaagctgtgttgact

SEQ ID NO: 22029 - DNA, 165 bp, Homo sapiens; identical to SEQ ID NO: 6035
  chr7:155580761-155580926
  hypo

SEQ ID NO: 22030 - DNA, 741 bp, Homo sapiens
  chr7:155581227-155581968
  hypo
caaaaccacacccagcgaagtaacaaagcgacaatcggccttggtcctgcgagggcagggagggcagggagggcagggagggcagggagggcagggagggcagggtccactgcccagccggggatgcaaggacggccatggggctccagcacagggaccgggccccgcgggctttgagtgacgcggtaggccaggacgagccccatccacacttggacaatgagcaaccgcagccggccgcgcagcctgggggccgtctccctctccagcccccgtgtcctctggtccacgactggctcttgccctcattccgttggggctgagtcacagccagggaaagggctgaggcagagcaacgctgggtgaaccccgtcttcctgaggccacgtttgcaccgggaagagaacacagtgaaccccctgagcaccaacacgctcccacaccccccacgagcagcccagccctggggaggagcccgtccttctccctgcttgccacaccggccacgtccgtaaccctgcccagcatcccacccaggttgtgtgggtccccacgtggtcaccagcgtcctttcaggacaagagaaaactgagcaggaccagggcttccgcctgccgcattcatctgccccccttcggctgtgccaggtgccttcccatgtggcctcttgctcctcggcatccctgggggagggaaaggcaagtgtctccctgtttcatgcagccgcgcaggcctaaacgc

SEQ ID NO: 22031 - DNA, 54 bp, Homo sapiens
  chr7:155582297-155582351
  hypo
agagactggtgctgccgcatttgttcatcggtttgttttgttttgttttgtttt

SEQ ID NO: 22032 - DNA, 449 bp, Homo sapiens
  chr7:155624036-155624485
  hypo
ctcagggagggagagggaagccggtggagccgggcagaagcctgtggagctgggtagaggccggcgggtttcccagcagcggtcttctgcatcttctggctgagtcctccgctgtcaggagaccccggcctgggccaggaggtccgattctgggatgcgaacgtggtggggctgttgccatagataccgatgtggtcaccagcctgaaacccttgagccacggagagatcagacggtggtccccactcctcagcctggagcctggcagagacgctcaaggaagagggtgggctgaccgcgcacgcctctcctttcttcatatcctgcgcggctcgggcgctgtgcaggaggcctgtgctcagcgaggagagagacagagagtgcagtgggaggagcgcggggtcggggggctctgcttcccacggtgcgcctgggagcctctttgcctc

SEQ ID NO: 22033 - DNA, 470 bp, Homo sapiens
  chr7:155679094-155679564
  hypo
tgggtgagaaacatgggtaagcgtgtgcagacgtggagagggcgtggggtgagggacgcccacccctgtgggtgagaaaatgggcaagcatgcgcagacgtggagagggtgtgggggagcagaatgtggttttacgggtgcgatcacagggaggacagactggaatggaaggcttagcccggaggtggtcctgttcacctgagcgagagggcgtctgctggctcctttccctgacaaggccaactcggagggcaagctgggagcctggggtggggctggcggggtgaaggggctcagagggacgcctgcgttcttcatgatcttcccatccaagacttgctgcacgtcggcttcttccaggctccacatcacgggcagacccatgcagctccgctgagggcgtgcgcctggtatgggtgccctgccgccacgtacagctgagggaggccgtgggagcctccctggactca

SEQ ID NO: 22034 - DNA, 165 bp, Homo sapiens
  chr7:155828141-155828306
  hypo
acacactgatgtgtgcctccacggttcacccgcctgcatcacacactgatgtgtgcctccacggtgcacccgcctgcatcacgcactgatgtgtgcctccacggtgcaccgcctgcattacacactgatgtgtgcctccacggtgcacccgcctgcatcacgcac

SEQ ID NO: 22035 - DNA, 98 bp, Homo sapiens
  chr7:155828365-155828463
  hypo
acacccgcctgcatcacacactgatgtgtgcctccacggtgcacccgcctgcattacacactgatgtgtgcctccacggtgcacccgcctgcattaca

SEQ ID NO: 22036 - DNA, 187 bp, Homo sapiens
  chr7:155898219-155898406
  hypo
tggaaacctgaataagacctgcggggccacatggaggcgaggggaagtcagaagcagtgagggtggagccccgcggagcctgtaagtccctgtgagggctccggactttgtgccgttctccgcacccctcaggcccggtggagtgcgtgacccctacgccgggcccgcatcattttggctccacagc

SEQ ID NO: 22037 - DNA, 207 bp, Homo sapiens
  chr7:155900804-155901011
  hypo
gctgtcatcaacttcaacctgcggcgagacctcagccaacaccacatggagcggaggaacggcgagcaagtgcagcctgaaatcctgagcatgaaacaggatgcgtgtgtacaccggttgcagagcggcacctgaagctgtgctgacctgccctagcatagatgcccgtgaggcacagctgcaaccggggctgagtttgcagtcatc

SEQ ID NO: 22038 - DNA, 289 bp, Homo sapiens
  chr7:155913342-155913631
  hypo
gggagggagatacagagatggcgaggcgcttcttcacgtgtcccacctgctctgatctgctccccgggagatacagagatggcgaggcgcttcttcacgtgtcccacctgctctgatctgctccccgggagatgcagagatggcgaggcgcttcttcacgtgtcccacttgcactgttctgctccccggctgctcactctccccctgatgtgacgcgttgtcagacatgaccaaatgccacggttacttgggagacaacagcagaaacggggctggattcagaataaaa

SEQ ID NO: 22039 - DNA, 330 bp, Homo sapiens
  chr7:155916054-155916384
  hypo
agaagccaccccagaaggacccgccatctccctccgcctcccaggagtggtactgtggaaactgacggcctcaggagccatggcaaccaacctccgggtcacatccatccagatgtctcccacagggaaacgggtgtcacacggagcaccaggagagcatcaggtccctgtccgccgagctcacacgcagctgttgcgtggagaggggtccgcgtgttgcccgccgagctcacacgcagccgttgcgtggagaggggtccgcgtgttgtcctccgagctcacacgcagccgttgctcgtcagcgctgccgcctggctgcacacaccctct

SEQ ID NO: 22040 - DNA, 201 bp, Homo sapiens
  chr7:155920328-155920529
  hypo
caggtttggcctttaagattacgcactccgtgcaccctggggtagccaaccccccgaaggaaaacacgatggaagtcttcatccttagaacaggaggacaacgggctcgggttgaagcagctgacccggtgctgggaatgagtgagaggaggcgcggcacctgccccggcccgcatggacgcaggcacattagatgccaag

SEQ ID NO: 22041 - DNA, 287 bp, Homo sapiens
  chr7:155935865-155936152
  hypo
agagctgcatgattttcagagcgcaccttctagaattttatcattcaatggaccgacttgctcgcgaccacagacccggttagtggaagagcggatataaaatcccgagcatgctgggcctggccggcctccgtctgcgcttccgtgctcctctcctcattgcgtcgtcccgaggtgaccaccccgtgccctggctgccctgcggggatgtgagcggcaggccccggcagccctgcttgggtaccttgccttgcagtgaggacctcggaggctcaggaagggggctg

SEQ ID NO: 22042 - DNA, 23 bp, Homo sapiens
  chr7:155948644-155948667
  hypo
ggtgtagacgtagaacaagtggg

SEQ ID NO: 22043 - DNA, 151 bp, Homo sapiens
  chr7:156012927-156013078
  hypo
gagtgtgtgaacatggtgagccgcaggctgtgtgctgtctccagagcatgtgaatgcggtgagccgcaggctgtgtgctgtgtgtgtctccagagcgtgtgaacacagtgagcaggcattcggggtgagcgctctggggtgttgtgaagcc

SEQ ID NO: 22044 - DNA, 30 bp, Homo sapiens
  chr7:156371598-156371628
  hypo
gccgaggacatacccgcgctggccgccacg

SEQ ID NO: 22045 - DNA, 30 bp, Homo sapiens
  chr7:156436008-156436038
  hypo
cagtgttcctcttgcgttccagtttcttca

SEQ ID NO: 22046 - DNA, 121 bp, Homo sapiens
  chr7:156733809-156733930
  hypo
cgcgactgggtgacgaggcgcgattgggtgacgaggagcacgctgggtgaagaggtgtgcgctgggtgacgaggtgtcattgggtgacgaggcgcgaatgggtgacgaggcgcgattgggt

SEQ ID NO: 22047 - DNA, 38 bp, Homo sapiens
  chr7:156733989-156734027
  hypo
gaggcgcaaatgggtgacgaggcgcgattgggtgacga

SEQ ID NO: 22048 - DNA, 33 bp, Homo sapiens
  chr7:156734691-156734724
  hypo
cgcgaatgggtgacgaggcgcgattgggtgacg

SEQ ID NO: 22049 - DNA, 30 bp, Homo sapiens
  chr7:156761009-156761039
  hypo
ttagagatgccccccgccctgcccctccgg

SEQ ID NO: 22050 - DNA, 214 bp, Homo sapiens; identical to SEQ ID NO: 6051
  chr7:156802133-156802347
  hypo

SEQ ID NO: 22051 - DNA, 459 bp, Homo sapiens; identical to SEQ ID NO: 6052
  chr7:156802914-156803373
  hypo

SEQ ID NO: 22052 - DNA, 900 bp, Homo sapiens; identical to SEQ ID NO: 6056
  chr7:156812925-156813825
  hypo

SEQ ID NO: 22053 - DNA, 223 bp, Homo sapiens; identical to SEQ ID NO: 6057
  chr7:156813986-156814209
  hypo

SEQ ID NO: 22054 - DNA, 87 bp, Homo sapiens
  chr7:156937633-156937720
  hypo
gtatctacccttacagcgttatacagaagagtgtcattgccctagaaatcctcattgctggccaggtgtggtggctaatgcctgtaa

SEQ ID NO: 22055 - DNA, 31 bp, Homo sapiens
  chr7:156974992-156975023
  hypo
tcgttttaactgttggcgaaaattatttggg

SEQ ID NO: 22056 - DNA, 404 bp, Homo sapiens
  chr7:157052685-157053089
  hypo
gtcaatcatcgacgccgttatgttctggaagtaatgaataataaagacgtataaacttaaacgtgttagtgaataccatcactcaatgatatcagtagaaatgataatcttccaaattgttggagagaaaaaataaccatgcaaataaaacaggacaaacagaaccaactctgtttaccagatatggggggtgggggtgggaagtaacattcagaatcgtaaaatagaaaacatagaatgagagaagcctgaatgttacaacagtgagtgcggagaaactgacgtaatgaaagaaaaagactttgagacagggccaggaaaacgctgccgcctacaagcaacacacctaaacggagtgacccagaagggtttagtggcacgtccaggttcgtgtgtgaagaaat

SEQ ID NO: 22057 - DNA, 212 bp, Homo sapiens
  chr7:157084612-157084824
  hypo
gggccccgggctggcgtcacatagcacagcaatgccagcagcagcgcagtctcaggctctccccgccccgatgattctccactcccaacataagggtcatgtggtctggagggacctttggcccagctacaggggaccaactcagggagacccctccttggctccgtgtgggtcaagaaggaaaggatggattcctcgtgtccatgtagagg

SEQ ID NO: 22058 - DNA, 270 bp, Homo sapiens
  chr7:157085963-157086233
  hypo
gtctcaggccctccccgccctgatgagtctccgctcccaacacaagggccacgtggtctggagggaccttttgcccagctgcaggggccatctcagggagaccccgccttggaggacttgttctccggatctccagacgtttaggctgaaagtgcagagatttagaagtcggacagggagttggggagcagcgctgtgcacgttccactcacctgaacggcatcgtctgagtcgcgtttgataaaattcgtaggaggccactggtctggc

SEQ ID NO: 22059 - DNA, 31 bp, Homo sapiens
  chr7:157106445-157106476
  hypo
actgccccgagttgtacgtgccctaaagtga

SEQ ID NO: 22060 - DNA, 30 bp, Homo sapiens
  chr7:157110748-157110778
  hypo
gggacggtcagctggcgcatgggacctctg

SEQ ID NO: 22061 - DNA, 30 bp, Homo sapiens
  chr7:157162187-157162217
  hypo
gtgatgtctgagaccgggcgtcttcaacag

SEQ ID NO: 22062 - DNA, 31 bp, Homo sapiens
  chr7:157205930-157205961
  hypo
aggagtatcaagaacacgtaactgttaaaaa

SEQ ID NO: 22063 - DNA, 31 bp, Homo sapiens
  chr7:157221589-157221620
  hypo
gtggccacagctggggcggggggccagtttc

SEQ ID NO: 22064 - DNA, 30 bp, Homo sapiens
  chr7:157236078-157236108
  hypo
gccggacccccctccgctgtcttcaagggc

SEQ ID NO: 22065 - DNA, 31 bp, Homo sapiens
  chr7:157259720-157259751
  hypo
aggtcctgccacccagcggcacaaggctgcc

SEQ ID NO: 22066 - DNA, 30 bp, Homo sapiens
  chr7:157261148-157261178
  hypo
gttccccgcgggctcgtgcctcaacaggca

SEQ ID NO: 22067 - DNA, 312 bp, Homo sapiens
  chr7:157262706-157263018
  hypo
cacgccggcttctctcggcccaggtcactctcttcacactgtcatctgccagtcacttgcacactctgattcccaaggcgactctgctgcaggcacacgccctcagcaagacctggctgagtgccgtctgtgcccgtggatgcacgcgcagctctcctggggacactggccctggctccactccctggacagatctgtgcccggcactgggtctgctccctgcacagacccacacctggtgctggcgccactccccggacacacctgcccctggcgctggcctgggttgggtgtgtccgtgtgtccagcgct

SEQ ID NO: 22068 - DNA, 167 bp, Homo sapiens
  chr7:157263225-157263392
  hypo
ctgggttgggtgtgtccgtgtgtccggcgctggcctgggttgggtgtgtccgtgtgtccggcgctggcctgggttgggtgtgtccgtgtgtccggtgttggcctgtgttgggtgtgtccggcgctggcctgcattgggtgtgtctgtgtgtccggcgctggcctggg

SEQ ID NO: 22069 - DNA, 30 bp, Homo sapiens
  chr7:157263623-157263653
  hypo
gggacgggctcacacgcagcggcccaaagc

SEQ ID NO: 22070 - DNA, 30 bp, Homo sapiens
  chr7:157273376-157273406
  hypo
gtgcggggggtcctcgtcccctgagtagat

SEQ ID NO: 22071 - DNA, 30 bp, Homo sapiens
  chr7:157276391-157276421
  hypo
tctgcacgcaatggcgagggctcccggctc

SEQ ID NO: 22072 - DNA, 146 bp, Homo sapiens
  chr7:157334626-157334772
  hypo
ctgcctttggtagtgtggccacgcggcctcttagtgtacgtgttagaacctattattaaaggagtcaactgagcctggcggccacctcagggtgggacccggggagatgtgtctgcctgcgccccgtctctctcccctctgcactg

SEQ ID NO: 22073 - DNA, 351 bp, Homo sapiens
  chr7:157336679-157337030
  hypo
gaggtggagagagatggagagcggtggagagagacagagagaggtggagagagacggagagaggtggagagagacggagagaggtggagagagacggagagaggtgaagagaggcggagagaggtggagagagatggagagaggcggagagaggcggagagagacggagagaggtggagagagacggagagaggtggagagagatggagagctacggaaatgaacagtttcaatggcacgggaggccttgggagaagtgggctgcgggcctggagctgatgtgtgagcgtggactgcgctacgcgtgacagaatccgtgtctgtcactccggtgctgtgctgggttgggaa

SEQ ID NO: 22074 - DNA, 414 bp, Homo sapiens
  chr7:157340322-157340736
  hypo
tgcacagtcccagcttctccccgcgggacactgagtaaccacacagggaaaaatcatcacgcagccacgcagaagcctccagacacacacgcctcagtgggtgtagatgtgccgctccctcgtgagggacagtcctgccccctgccctgaccatgggggacgtgggacacgcctagacaagagacgttccacaaagagcaaggccgctggcgctctagaagacctcacagccgtgaagcgtcccggacagcagaggaaccatgatgcccctcgcgtggccgccctgggcgtgtcctgctccaggggaagctccctgggggggcgcgtagggcatcgctgggcctgttggtcagtggtttgcatcggtgctgacttcctgggtttggtcactgcgctgtggttatgtgaggtgtt

SEQ ID NO: 22075 - DNA, 162 bp, Homo sapiens
  chr7:157346266-157346428
  hypo
aagggaaggagaaagacttgccgggccatccccagacaacatggggagaaccgggcggaaatacaaaatgacacgggagcgtgcctccgagtcgcgctgagcccgagaccaaaactgaagagcggaggaaacggagttaacgcttaaaaagtgtgcagcacc

SEQ ID NO: 22076 - DNA, 220 bp, Homo sapiens
  chr7:157347571-157347791
  hypo
gctacttgaccaggtttaattcgagttgtccatgtcgggaatctacagggaagtgacgcaggctgccatcttgctcagcaccccagtgtggcgggcgccccagtgtggcgggcgtcccagtgtggtgagcaccggccaagtcagtttgggttgggctgcaccctcgtgcctgggacacccaggaagacccacctctctcgtgttagtggaccagggaggc

SEQ ID NO: 22077 - DNA, 30 bp, Homo sapiens
  chr7:157350852-157350882
  hypo
cgtgcacattggtgcgacgcggtgcccacc

SEQ ID NO: 22078 - DNA, 30 bp, Homo sapiens
  chr7:157353082-157353112
  hypo
tcatgctgtccacacgctcccaccaggcga

SEQ ID NO: 22079 - DNA, 487 bp, Homo sapiens
  chr7:157370439-157370926
  hypo
tctggttcatgagcacacagccgtgtgaaccatccacacgggcatgcggccctcgggggtgactcagcctccgtcccctgaacatggggtgcgctgagcctccctgcatgcggccctcgggggtggctcagcctccatcccctgaacatggggtgcgctgagcctccctgcatgcggccctggggggccctaacgaatcccattcggaggaggagcagggcccgtcctcgtccggctggtgggtcctgccctgggtggctctggtcggagtacctcatagatgtggtagagattggagccttcatccggccagtagtggtagcactgccggacgccgttctccgcgaggggtgtcagcatgacgatcaccacgcagccgctctcccacaccatctgcggacaaagaaggcccgtggccgcggtgtgactgtctcatcaccgcgtgacatgtgtaattactgcactcggaagcacagtccaaatttat

SEQ ID NO: 22080 - DNA, 240 bp, Homo sapiens
  chr7:157387163-157387403
  hypo
acctccctgcctggattctgccgcatgggtgacgcgtcgcttcccaccttcgtccccagctcgactctccttaggagctcctctctgccaggctcggggttggctggtgtgcccgacacgcggccggtgcctgtgctcctgcggtaactcacggccacgttccaggttccagaacccattcctattcagctttgtcacgtggctggtgaggggagacccgggggcagctggagaaggaag

SEQ ID NO: 22081 - DNA, 333 bp, Homo sapiens
  chr7:157396443-157396776
  hypo
tgctggatgttctacaagtcacggaacccaccgcccagcgtgagccgggacccacacggctcataaacagccccgctggtgaaggaacaggggagtggcgggagcccaatgggcagagtcggccctgtccaccgcagagacgctgagctgggtggggacgtgatttcccccgagaaccttcccacgtgatttgccgcgtccgtgccacccaagggaaagcctggggcccctgtcccggcagtgcacttacgatggggctagcgttgatgtagtctgagtggctgtggctgttctccgccttcagcaggacccgggagtggtcatctgcaagga

SEQ ID NO: 22082 - DNA, 30 bp, Homo sapiens
  chr7:157402514-157402544
  hypo
cagaacatatggagcgatttttcatagatg

SEQ ID NO: 22083 - DNA, 30 bp, Homo sapiens
  chr7:157403099-157403129
  hypo
tggagaggtggagccggtgtcttgctccta

SEQ ID NO: 22084 - DNA, 215 bp, Homo sapiens
  chr7:157408660-157408875
  hypo
ctgatccaggaagaagcacaccgtggcctggggcccctctggagggtaggtcttccaagtcacgggaaacagggcgcccaggagacggtgagcccggctgctgccaccccgaaggccaggctcgccccacactgtgagaccctccccacacgaagattctgtaagcggaatcggaaggaggatgtgagaaggacgggtagccatgccacaccagg

SEQ ID NO: 22085 - DNA, 194 bp, Homo sapiens
  chr7:157414206-157414400
  hypo
agggaaacacagggtcaggagcgcacctaggtggtgagcccagaccggcagatgcacaaaaggcagcggaggcctttgcactcgccgcgtgggccatgcccaccttgctcacgagcctgggccatggtgcgacgttgtgctacggtgcacaatgcatatcataccatgcaaccgttaagtgaaatatgtgcatt

SEQ ID NO: 22086 - DNA, 30 bp, Homo sapiens
  chr7:157448550-157448580
  hypo
gagcctctggccggcgccaccaggaaggct

SEQ ID NO: 22087 - DNA, 30 bp, Homo sapiens
  chr7:157448929-157448959
  hypo
ggtgcagccatcatcgcccagtccccgagg

SEQ ID NO: 22088 - DNA, 124 bp, Homo sapiens
  chr7:157449202-157449326
  hypo
cggtctggtggccgcgtggccatacgctggcggcacagctcctgcaggacagggggaggaagagcagggggttagtggcattggggacacccagcaggacgagggccacggcacccacgtggca

SEQ ID NO: 22089 - DNA, 30 bp, Homo sapiens
  chr7:157453775-157453805
  hypo
gacatcgcctcctccggcgggtggctcagt

SEQ ID NO: 22090 - DNA, 30 bp, Homo sapiens
  chr7:157461962-157461992
  hypo
gtccgtgatctaagccggggacgtcctcgg

SEQ ID NO: 22091 - DNA, 108 bp, Homo sapiens
  chr7:157464724-157464832
  hypo
gcagagggtgctgggagcagccggcccgaggacaccgctgactggggtacaggggccacgggtcgcacgtggggtgtcagctctgccgcctcacttggggttgatttg

SEQ ID NO: 22092 - DNA, 250 bp, Homo sapiens
  chr7:157467304-157467554
  hypo
taatgccattcaccacagaggcgcattctctctcgtgcccatcaaggcagaggctgagaagaaggtctgctttacagcaacggcctgaggaccctcggccccaaggtgaggccccgcgcaggtacctctgtacacgcctgtggagtcccaccctgtcgtgtgcacgaggctgtcacctggagattccggccctgccgggcgtctcctcccacgccgagctcctcctgccgggggggtctgcacagttctg

SEQ ID NO: 22093 - DNA, 43 bp, Homo sapiens; identical to SEQ ID NO: 6064
  chr7:157477445-157477488
  hypo

SEQ ID NO: 22094 - DNA, 109 bp, Homo sapiens; identical to SEQ ID NO: 6065
  chr7:157477710-157477819
  hypo

SEQ ID NO: 22095 - DNA, 326 bp, Homo sapiens
  chr7:157510157-157510483
  hypo
gctaagcctgcagtgagtgtccgagcctgcaattgaccgcggaagccagtgccctccctagttggcaacgttgttcagctgagctacagagaaagagctcggaggtctatggactccttcatggaaatcgctcccttgcgtctcctcatgtggacacagctccacgcctcacctctcaggccaggcagcggccaacccagcctcttcaccaggtatgggcaccggctgctccttgctgcaggaccgctggctggggtggccggggcacgcagcaggcacatcccgacctgcgggccagcacctgcgccccatccctgttacacctg

SEQ ID NO: 22096 - DNA, 247 bp, Homo sapiens
  chr7:157511384-157511631
  hypo
gccccagggtgagtctcagcacgtccaggcgtccgcggtgacactgcagccactctccatggccccggggtgagtctcagcacgtccaggcgtccgcggtgacactgcagccactcttggtttctcagctgccgcaatcggtccttccagtgtccgacctctggggccctcagacccccaaacccaccttgtcgctgtggcctctccgcctcctgcaggtggcagcgctactgtagcctgccatgcc

SEQ ID NO: 22097 - DNA, 369 bp, Homo sapiens
  chr7:157513067-157513436
  hypo
accttgtcactctggcttctccgcctcctgcagctcctgctctgtgtttgggaacgcgtgcggcccacaggacaaagccttgttgcacacccgggtcaagggcaaatcccagctgcacagccgggtgatccagcggccgaccctgcttccctgcgtaggaggcctgagccaaggacactgcggccccggctgcaccgatgcatgggtgtgcacgcggggaccgagggagtcacgtgaatcatgtggcttccacgagctacctcttcccacaccaggagcaggtgccctcgtctccatcaagcgctttctggggagaaactccttcaaggataacggcaaatggtgagcgtgcctcactctttataatag

SEQ ID NO: 22098 - DNA, 65 bp, Homo sapiens
  chr7:157527706-157527771
  hypo
gtgatgccaactgcagcaggacggttagtggtgccgctggcaccgagagcacctggcctggtgga

SEQ ID NO: 22099 - DNA, 30 bp, Homo sapiens
  chr7:157544565-157544595
  hypo
aggacagagaccaccgtgaacacatctccg

SEQ ID NO: 22100 - DNA, 343 bp, Homo sapiens
  chr7:157549922-157550265
  hypo
gggtgaaggctgagtctgcaccgtgcaggcagagaccgtcgaggaacccacagcagaagtggcccacggaggaggagcactgagccgcctcctatggcagcgacacagaagccaggcctggaaggcagagcgggagagcagagagacatgctccacgccgcaggcccagctcaccctccgactgaggcaggagtgctggagctctcggcggccggtggggacaaggaggaccccggcaggcgcgggcagggccggggcaactgggcaggaccccagggaactttggatacgggcagaggaaggtcttccagtcggggaaggcgggaggtgttaagatgcaagc

SEQ ID NO: 22101 - DNA, 156 bp, Homo sapiens
  chr7:157567208-157567364
  hypo
ggtaagccccccatctctgcacgcagttcataatctaggttgtgagaccacacaccggctcatgtgcacaagacagtgtgcgtggagggtgacagtgtcggcaaaagtgggctcagggctcagagctgtaactgcggttaaggggttaggaagctg

SEQ ID NO: 22102 - DNA, 30 bp, Homo sapiens
  chr7:157568258-157568288
  hypo
cgctgggaaggcttcgtcctcgggagccgg

SEQ ID NO: 22103 - DNA, 30 bp, Homo sapiens
  chr7:157579865-157579895
  hypo
cgggggtggctgcccgggactggctcttct

SEQ ID NO: 22104 - DNA, 30 bp, Homo sapiens
  chr7:157581824-157581854
  hypo
aaatcactgtcttccggcgggctggtcctc

SEQ ID NO: 22105 - DNA, 30 bp, Homo sapiens
  chr7:157584168-157584198
  hypo
gtcccgcctccacacgcctgcctggcgcca

SEQ ID NO: 22106 - DNA, 292 bp, Homo sapiens
  chr7:157589659-157589951
  hypo
acagcaaagagtgatctgcctcgagttccgactcgccgctcagacgaactcacggctcagctgggagaatcacacgggaggggcccatgaacgggcactggggccacagccggggattcaactgcaccgaaatcccagccctcaacacggcccacggctgtgtcatcccggatttatcactataaagcaaaaccaaaaacggacctcaggtttctctgcaatatgtaggatccgtgaaacctccaacgtgaaatgagaagtaggtagcctcgaatctgcacccaggcagccc

SEQ ID NO: 22107 - DNA, 456 bp, Homo sapiens
  chr7:157606210-157606666
  hypo
acaaaatgtggtgatcctactcgtataaaaaagaaagttcaaatgcgcagaagaaagatcagaggacaagatgcccacgaatgataagcgcctttgctgcctctgggcgggtccgggggagtcgcatttcttcctcactgcatcgctgtattttccagatgtccactgaggaatgagcattgctttttaattagcagctgccccgagtgctccagctgccctgcgtgtggctgtctacacagcacgcattccttaccccggtggttttcatctggaccctgagtcagaatggcctggagcgcgggtaaaacagctcggggccagccagagcttctgagccagggctgggcccaagaacgtgcatttgcgttgttccccaggtgatgctgctggtgaccccggggaccccgccgtgagagccccgacacaagtcgcggtttgtggtgctttggagga

SEQ ID NO: 22108 - DNA, 213 bp, Homo sapiens
  chr7:157607747-157607960
  hypo
tagtctttattctgggagcagcgcgggaggcagtggagacgtggaagcaggctccggctgctgggcctgcatgaccggtttccctgcagaagattctgcgcccttcagcctcaccgtcctcacctggcctgggtgctgctgtgggcaggcgctgggcacgctgggaagagcagggccagccgtttgcaggacgggaggctgaggctgtgtgca

SEQ ID NO: 22109 - DNA, 251 bp, Homo sapiens
  chr7:157621928-157622179
  hypo
aaaacaaaaaggcaagggtcccgtcttgctgcgagtgttggggcaggtgctatctgaacacggtggcgcaaaagagatgaggcctcgccactgatcaaacactcggctggtaagtagaagtccttaaaaaagacgaacatcaaacaggtcctcatctggggcgctctttttgtggggtcaccctgaccgtgaggccacagatgcgggcccgtgtgcaccgcaggccatacgtggggttaggtaagtttgaa

SEQ ID NO: 22110 - DNA, 285 bp, Homo sapiens
  chr7:157626045-157626330
  hypo
catcccatatgatggtaaactcgtccaggaagtgtgtgacgtggggggcgcccatccatcctgtatgatggtgaacttgtccaggagcgagatgtggccggtgcccatccatcccatatgatggtaaactcgtccaggaagtatgcgacgtggccggcgcccatccatcctgtatgacggtgaatttgtccaggagcgagatgtggccggtgcccatctatcccatatgattgtaaactcgttcaggaagtgtgtgacgtggccggagcccatccatcctgtatg

SEQ ID NO: 22111 - DNA, 30 bp, Homo sapiens
  chr7:157626571-157626601
  hypo
gacgtgggcagctggcgctgttggtctcca

SEQ ID NO: 22112 - DNA, 30 bp, Homo sapiens
  chr7:157633237-157633267
  hypo
gagtggagagggtacgggacgggagctgca

SEQ ID NO: 22113 - DNA, 245 bp, Homo sapiens
  chr7:157642942-157643187
  hypo
gatcccaggtctccaaatttccgacatggggtgcctcaggctcgcgtaagggatcccaggtctccgaatttccgacgtgggtgcctcaggctcgcgtaagggatcccaggtctccgaatttccatttccgacgtggggtgcctcaggctcgtgtaagggatcccaggtatccgaatttccgacgtggggtgcctcacgctcgcataagggatcccaggtctcccggggcctggtgtgtgcaccac

SEQ ID NO: 22114 - DNA, 30 bp, Homo sapiens
  chr7:157645736-157645766
  hypo
gatggtctctggggccgtcctctctccgcc

SEQ ID NO: 22115 - DNA, 95 bp, Homo sapiens
  chr7:157646589-157646684
  hypo
ggtccttatcaaaggcggagatgcggacacggggcagccacagggaacaccgcgtgaagacggagacggcacccacaagccgaggagagagatct

SEQ ID NO: 22116 - DNA, 30 bp, Homo sapiens
  chr7:157659419-157659449
  hypo
cagtgcctgtgccccgagatgcacggccac

SEQ ID NO: 22117 - DNA, 30 bp, Homo sapiens
  chr7:157666153-157666183
  hypo
ggccgggaggagaacgtaccgtcctcaagg

SEQ ID NO: 22118 - DNA, 281 bp, Homo sapiens
  chr7:157730032-157730313
  hypo
tgaaggtggatacagaatttccgtctaactgagcacgtggggactggagcaattcactgaagaaatgaaaggtgcgggaataggcaagcccttgatgtctggagcagatcgcatcagctactactaagccgctgttgtcaggcacagagaagacactcagcatcggatgagagaataaagccgtgtgcggtgtggcttcatgtctctcacaatagcgctcccgagtgcggccgctccacctttcccacccaggagaagccgcttaaaaagccaggcagggg

SEQ ID NO: 22119 - DNA, 30 bp, Homo sapiens; identical to SEQ ID NO: 6071
  chr7:157732029-157732059
  hypo

SEQ ID NO: 22120 - DNA, 269 bp, Homo sapiens
  chr7:157736785-157737054
  hypo
tcacttcaattacagacactccgagcccaggacaggctccagatgcccggccttcatgcagcaaacaccttcacagggaaggaaggcggaactctctttccttgccacagaaaaggattctaacggcatttgacaaagattgagcatggttcgtcgcgaacgccagcctgcccccacggtcatgtccagcttaaccaacacacggcccagcagtctcggtcagtggagcccaccacccaagcgggggcggtaccactcccaccactgac

SEQ ID NO: 22121 - DNA, 315 bp, Homo sapiens
  chr7:157738092-157738407
  hypo
cctactgctcctccatcctggcgtctgacaaatcaatgtatctttccccgtggatgtttctccaacccattcactcttctcccgctcagtgacctggcccctgaacctgccgttcccaactcagacaaagccgtctccaactcggacaatggcgcctccaactcgaacaatgccacctccaacttggacaatgtcgcctccacctcagacaatggcgcctccagcttggacgatgccgcctccaagtcagacgatgccgcctccagcttggacgatgccgcctccagcttggacgatgtcacctccaacttggat

SEQ ID NO: 22122 - DNA, 187 bp, Homo sapiens
  chr7:157744266-157744453
  hypo
actgcatcaacatctcaacaccgggtgaaaagggaaacgccttactaaacgatgttcccgtgatcagaatcacgggctaacgtccctccgcttccgcagtcttcaggcctcaggcactgccagtgacattagctgctgtgcgtccctcctgccggactgcaacaccgtctcaggatccacctcccac

SEQ ID NO: 22123 - DNA, 360 bp, Homo sapiens
  chr7:157794288-157794648
  hypo
caccatgcagacagacgcaggcagtgtagtagatggtaaaacggccgaaaaccatcagcagcctcaggaccgccctgtcatgatgccaactcccaatccgtgctgagagcccggcactgcctcagggagattagcaaacacttttcatctgtttatacacaaacagcaggcatgggcccgctggccttccaggaacatgagtctgcgtgactggctgttgtgccctcacccggaaccgtgccaggcaccgaggaggtgctcagtaaactatggggttgcatcgtatttgaggtcatccggaggcacccgctgctgcactgggactcctggagatcctcctccagccggaagctggccaag

SEQ ID NO: 22124 - DNA, 234 bp, Homo sapiens
  chr7:157795357-157795591
  hypo
aatgtccaggaatcctggggccggggcctgctccctggaagcagatctgaggacgtttcgggcaggtcagctgcagcgagagaaatggacttgccggggaggaactcccggctgcctcaaagctcagcaggtccacggagcaggagccacacaaggctcttcaacaagccccgtgaggtggggagctggcctggaccaccctggcgtggacacggctgggctggatctcatctg

SEQ ID NO: 22125 - DNA, 31 bp, Homo sapiens
  chr7:157845212-157845243
  hypo
ggatggtagaggggtgcggccgctgctttgc

SEQ ID NO: 22126 - DNA, 183 bp, Homo sapiens
  chr7:157847114-157847297
  hypo
acagagcaagagaggaagacacgaaggaaaaacacacatttaccggctgtttttgtctgtgagtcgagtctatgaaacatgccgtgagattattttctgcggttgattattcatgcaacgaacacgtcagaacaccttcaggtggcccatgggtgaggtctcgcaggtgcagcctcctctcca

SEQ ID NO: 22127 - DNA, 111 bp, Homo sapiens
  chr7:157849575-157849686
  hypo
gtgcagctgtgccacccacatcgggacgcgtgctccactcgtggcattccaggctcacaatgtcgcccttatccgatgatcagccacctcggatgtgtccatcaagctttt

SEQ ID NO: 22128 - DNA, 245 bp, Homo sapiens
  chr7:157860438-157860683
  hypo
ttccttcccagagcagcacaccgggtcaggccgggccgcgggcagcacaccgggtcgggtcaggctgggccgtgggcagcacactgggtcacgctgggccatgggcagcacactgggtcacgccgggccatgggcagcacaccagggcaggccgggtcatggtgtgcttagaatttggtgaggcggcagggtcggggcagacagggtggggtctgaggacagccgctgaggctcttcctgtgggg

SEQ ID NO: 22129 - DNA, 30 bp, Homo sapiens
  chr7:157885890-157885920
  hypo
tttcctgactctgccgctggaccgaccccc

SEQ ID NO: 22130 - DNA, 30 bp, Homo sapiens
  chr7:157890953-157890983
  hypo
gtgggcaggggacccgcaaaggatcctgcg

SEQ ID NO: 22131 - DNA, 265 bp, Homo sapiens
  chr7:157891373-157891638
  hypo
gtgaatggggttgcttgggctcggggactggaagaagaaggacgtttatctcgtgaacgcgggacgctccttatgggagaggagtgggagacatgaagcaaagcgtgaccaccgaggagctggggagaaagcgagaaagcaaggaagcagtgggggacggggaacggggccgcggggagggccggagaagatggtagaaggtgacagtgcggggtgcagcgttcctgggtccttgaggggagccgggcttctcagccttgaagac

SEQ ID NO: 22132 - DNA, 37 bp, Homo sapiens
  chr7:157916054-157916091
  hypo
atcctacagacaccacggtgaccgacgccatggtgac

SEQ ID NO: 22133 - DNA, 246 bp, Homo sapiens
  chr7:157916513-157916759
  hypo
caggagccgtgaacccgtgctgacccaggcagagctggttctctaatctgattggatctcagatcccgtgccgacccaggcggaacaggctctctaacctgatttgacctcagatcccgtgccgacccaggcggagctggttctctaatctgattcagcctcagatcccgtgccgacccaggcggagctggttctctaatctgattcgacctcagatcccgtgccgacatggaccaccaagttacc

SEQ ID NO: 22134 - DNA, 283 bp, Homo sapiens
  chr7:157919943-157920226
  hypo
tgctgacagaggctgctcatccgtgcacctgtgccctgcgtcctcctctgcgtgcaccctgcgtcctcctctgcttgcgccctgcatcctctgcacgtggcccgggctctgctccacctgagccccgttcatctctccacagtccaggagccacacactgcggctgccactccagagaccaggaaacccaagcacaggggcgtttgccacattctaggtctcggggctgccgtgggaccctgaccctggatgccggacttccgtgggtcaagggcccaggcca

SEQ ID NO: 22135 - DNA, 238 bp, Homo sapiens
  chr7:157934534-157934772
  hypo
gtagtttagcatgggatgaagcggacagagtcctttaaagtcaatctgtacacgaaatgtgtgacggacacgggcgttctgatcggagcgtgctgggcgttcactgccaccgatgtcccctgctggggtggccgagtgccccgctctggccgacgttgaggcctctgaattgttcggcagacagtggcggcttctttaccttcgggttgaagtgtccgtattaaccccacatttctga

SEQ ID NO: 22136 - DNA, 266 bp, Homo sapiens
  chr7:157949152-157949418
  hypo
gatgtcagagggttgggacttcggagctgcccacattcgctaaatgagctaagccgacatctgcagaaacgccctcgtaatgggaacagttacctcgaaaagttctagaaatgccggtggagagggcaggtgaacacacagctgcagtcagacgctcggcatgatcagacccaaagcaaaccaactgctgcatagaacgccctggggcttcgagcccccagttccagcctgtgacgcactcacccgtgggaaggggaaaggctccc

SEQ ID NO: 22137 - DNA, 147 bp, Homo sapiens
  chr7:157959847-157959994
  hypo
gctcatctggctggagctggccgagggtccgcggcaggaggtcctcgcggagctgggtccgggacccgggagggtaggtcagcgcagacgtgtgggccacataggtcaggatgctctcggagaagcggtcatcaccctgaaggaaag

SEQ ID NO: 22138 - DNA, 30 bp, Homo sapiens
  chr7:157981322-157981352
  hypo
aaggccgccacgctcgccccctgatgggga

SEQ ID NO: 22139 - DNA, 158 bp, Homo sapiens
  chr7:157987112-157987270
  hypo
cagggccctctgtgaacctgccgccctcagcaatgctcccaaatccccttcccgctgagagccatgctcagcgatgaccaatcacttcaggtccgacttgtgctgcagtggacggtccagacgccacaggccccggcgtcatgccccactgccagcac

SEQ ID NO: 22140 - DNA, 156 bp, Homo sapiens
  chr7:158037866-158038022
  hypo
gccatgccggaatccgtggtcatgctggaatccacggtcatgccggaacccatggccatgccggaatccgtggtcatgctggaatccacggtcatgccggaacccatggccatgccagaatccgtggtcatgccagaatccgtggtcatgccggaa

SEQ ID NO: 22141 - DNA, 504 bp, Homo sapiens
  chr7:158039846-158040350
  hypo
cctgcatctcactacacagagcgtggcccgtgggtggcaccccccagcatggccaggagcaccgaggcgcacgctgggctctgagacgccccctggccaagaggggtggaggaagggggcaggcgccaggatctggaaggagatttccaacccacgtggggtctcacaggagaaggccgtgatgggaggtggggaagtggggaggagggcgctcttgaccgtgtctgcgtgtctaagcaaaggatacaggggcgcaaagggaaggagtggccaggggtgcccgtcccaggtgtgctcttcttcacggcgcccctgcttccccaccacgcccatgtccacggctcgtgggcagctgggcactgggccactcagacaccgtcctaaacactccacacaggtaacttgctccctctccagccacacagcaaacacagcaaaggggacttgggtgtctgcggtttttttgtttgtttgtttttaagatggagtttcattcttgtggcc

SEQ ID NO: 22142 - DNA, 306 bp, Homo sapiens
  chr7:158072899-158073205
  hypo
ttcaagcacatctggttttcccgggcccaatcggaaagcaggtcctctccggcctgaagctgcgaagagaggcagcagccatgagaaggtggctaaccccgtcgggggccatggctgcctaggggaggccggcagagcctgcctgggggtcggtaaggacgctggctttggtctgacaccggcagggagggacagcgacgagggcaggagccgcggctctacctgggaacgcaggatcatctctactctgacggctcagcctctgcacacaaaccatccttctgcgtttaattggtcctctccagg

SEQ ID NO: 22143 - DNA, 30 bp, Homo sapiens
  chr7:158103478-158103508
  hypo
tgagccggacagagcgcaagtcccacggag

SEQ ID NO: 22144 - DNA, 30 bp, Homo sapiens
  chr7:158109477-158109507
  hypo
cagccgccgagcctcggcccacgcccgccc

SEQ ID NO: 22145 - DNA, 320 bp, Homo sapiens
  chr7:158113045-158113365
  hypo
gacaatcagactaacagtggccgtgccatttttcactcccagcagctgcgatggcacccccatcgcccatgtcctcaccacagtgacaatcagcctaacggtggccgtgccatttttcactccgagcagctgtgatggcgcccccatcgcccgcatcctcagcagcgccaggtggcgtccgtgttcccgcgtcctcggcagcgccgggtggcgtccgtgttcccacgtcctcggcagcgctgggtgacacttggaggcgtccatgttccagcgtttggctgctgtcataggtgtgtatcggtatctcatgattttttatc

SEQ ID NO: 22146 - DNA, 332 bp, Homo sapiens
  chr7:158216891-158217223
  hypo
gggaggcacctggcaccatcccgttctgttttcggtgcggcccgttcttcgggctttattaagcaactgcccacgtggaagaaaagcaataatgaagcaaggcgtcgtatcgattcccccagctgtaatggaattccgtcaaggagcaaagcgaggcgttttcagaaactctgcctgttaacgtttattgctcccaaagtctgattataacacactagctccgggggccgagtgaacatcacttcacacaaaaacagggacaacgtctgtgaccaccggagatgaatattagtgaaagaactgactctcccgattcctctattaacctgtct

SEQ ID NO: 22147 - DNA, 88 bp, Homo sapiens
  chr7:158235876-158235964
  hypo
ggcagaggcaggagcggaggctgcggaggacgctccaagcccatcttccgtggctcagcccagcggctcccgcggctccagggcagcg

SEQ ID NO: 22148 - DNA, 170 bp, Homo sapiens
  chr7:158240555-158240725
  hypo
agggttggaaatgacaagccacggtcttgccccaccccggctcctggccatgctacccagccacacggcacagggcaaatgccagcaggacacaggccctcagcccggcatcatcgtcagcccgaggatgctgggccaggccaggtgccgactcagcagggcagcaagag

SEQ ID NO: 22149 - DNA, 246 bp, Homo sapiens
  chr7:158271049-158271295
  hypo
cttgatcattctcctggcattcggtgctgtgcgtagggtgagcaatggacgccactggggaagagtgggaaaggaaggctcagcacgtcggtaacgaatgaggaggcagaggcccgctctgcgtctcaaagaacgggtgggatgcggagccgtgacaagggcatgggaaagaaagtggagtgggaataacgccaaaattaacctgataaggaagctgctttcaacgcatccctgagctggacccac

SEQ ID NO: 22150 - DNA, 317 bp, Homo sapiens
  chr7:158277562-158277879
  hypo
agaagaagctgcagttggagacgtgaaggctgtggctgtgacgccgccacggggagtcggctgcaggaggagcctccccaccatcagcgtggccggcggagtgagccacgagcgcaagggcacccctcccagccgctgttgctgtggccccggccgccagcgtcccgggagggcacctgcggagggaaggcagacaccctgcaacggcccgcaggcccgtgtcacctgggccaccgagcgcagggcttgtgggtcgtcacagcataattcagccttgagccacgagacacggagccgacaggtgtgtagctgagcca

SEQ ID NO: 22151 - DNA, 553 bp, Homo sapiens
  chr7:158281311-158281864
  hypo
tcctgaaaggccccaggagggcggcaccccaggccagcgccctgccctgcacctcagtcccccgccggcacccacgtctgtgcagagattagtgggtgcgaggggcctctgggcaggccccgccatcctcgctaggattaaatccgctcctgcccacagtctgaggacagatgcgcagggagctggggaaagagaaggcctcgctcagtgcgccccgggcccacacgcagcccctgacttggagaaaggcggctccgcccagcgcttttctgaggatactggagtttaaccctcccctgcgcgttcagagcgcacagcgcccagttcaccagcatgacaggcccgggtggcgtctgccctgggagatgccctctgcctgaccgcgctggagggaaggggctctgcaggacccgctgctcgccgtatttcataataactgccgtcctcatgggctttcagcccaacctgaaaacacagcgtttgcactgttttcttatccgcctgataagagaggaaaatcagtggcttaaaggacgaaaaacctggccgggcg

SEQ ID NO: 22152 - DNA, 570 bp, Homo sapiens
  chr7:158282720-158283290
  hypo
gctctgggctgagggtcaagccggcgtcatcacaggagactctctggccgcgggagcagcagcggggccggggcctccccttgaggcctcccctgggcccggcgcctcccctggaccgggtgctcaccgcacgcaccgcgtccctggaagcaaggctgccgggcgccggggagcggaggcttccagggaggtaacgagctccgcggggagcccggctgcgtgggaagcaaaccgtggcgtccgtggccacagacaagagacgcaggagagggtcgggagaggaaaggaggcagcggaggcagcagagacgaagacgggcaggaaaggccagcgcggctgggccaggccctggaggagacgcggggcagaggcagcgcctcagtccccacccaggaaggggctccagaagctccgcggtgcctgggtggccaggcgaccccaagccacgcatcccccgcggccgagcaggctggcaaaggttggcgttcggctccacgtccacgcctgtcttaaacacagagagatgggtccagaaagcaccaccccgctagggagcggctcccgcgaggg

SEQ ID NO: 22153 - DNA, 232 bp, Homo sapiens
  chr7:158331365-158331597
  hypo
cctttcccatgcactgcactacggacaccccagccactacctcatcccaaaagcaggcggcaccacggggcgggaagaggaactcaggtccgtgaacacctgcctcgtgcagggccctgactccagtgattctcgcagcctcgtaaccccaacaacaggccccggagctcagctttttattcccacttcacagatgagggaacgaagacacgacccacccaaactcacaggt

SEQ ID NO: 22154 - DNA, 763 bp, Homo sapiens
  chr7:158349366-158350129
  hypo
ctcagagaacactgcagctcccgcgcaggtcagacggctcccgggcaggtcaggcggctcccgggcaggtcaggcggctcccgagcaggttgctcccacgcaggtcgctcccacgcaggtcaggcggctcccgcgcaggtcgctcccacgcaggtcaggcagctcccgcgcaggtcagacagctcccgggcaggtcaggcggctcccgtgaaggtcagggggctcccgtgcaggtcgctcccacgcaggtcaggcggctcccgcgcaggtcactcccacgcaggtcaggtggctcccgcacaggtcaggcggctcccacgcaggtcgctcccacgcaggtcgctcccacgcaggtcagagggctcccgcgcaggtcactcccaggcaggtggctcccgcgcaggtcaggcggctcctgtgcaggtcgctcctgggcaggtcgctcccgcgcagggcaggcggctcccgggcagggcaggcggctcccacgcaggtcaggcggctcccgcgcaggtcaggcggctcccacgcaggtcgctcccacgcaggtcagagggctcccgtgcaggtcactcccaggcaggtggctcccgcgcaggtcaggcggctcctgtgcaggtcgctcctgggcaggtcgctcccgcgcagggcaggcggctcccgcgcaggtcagacggctcccacgcaggtcaggcggctcccacgcagtttaggcagctcccgcgcaggtcaggcagctcccgtgcaggttagacatcttttc

SEQ ID NO: 22155 - DNA, 31 bp, Homo sapiens
  chr7:158381341-158381372
  hypo
caggaccaccccctgccgggtccctgtcctg

SEQ ID NO: 22156 - DNA, 31 bp, Homo sapiens
  chr7:158451212-158451243
  hypo
atggcagtcctttccacgttcaaaaggaaaa

SEQ ID NO: 22157 - DNA, 281 bp, Homo sapiens
  chr7:158550058-158550339
  hypo
aaacactagtcccgacgctcgcctctcttttaagtagccacacccaaagtttccctcgtagatgcccttagggcagtggagccaggggagaaagcagagaacggtggattgtggtcaatgagagcaccaggagcaccacagacagtgagaggcagagccaaaggatcccagagctcgcgggacgccccttaatccagcgccaaaggatcccagagctcgcgggacgccccttaatccagagccaaaggatcctagagcccgcgggacgccccttaatcccg

SEQ ID NO: 22158 - DNA, 164 bp, Homo sapiens
  chr7:158556264-158556428
  hypo
tgtgagccaccgcacccagccagtaaattcttttaggacacttatttttttattgtcaagtcacacacacctcttgaggacgggaggtcactgaaacacctgccacacagtaacagtctaccgtgcttgtttctagggatcctggattgcgtctcaatagatca

SEQ ID NO: 22159 - DNA, 380 bp, Homo sapiens
  chr7:158564137-158564517
  hypo
gtgagattgaaacctgatcatcggagtcgcaggaatctgtccaagggtggcccttgcacacacaagttgggcggggacctagcgggaaaggcgactaagtccgcagactaaatgcttgtagctgcaggcacagcaagagactgcctgaaaacaagcccacgagggacacgcccaccctgcatgggtggggagctggcgagagagcccttatggtgcccaacaccggctccatctgaagtccctcagaagacacgccagctttccagctgccgagcaggaaacaagcacagctgtgtcccatgcacgagcggctgcagctagctcagagcaggcagtgggcgcccattgttggaagagtgaataaactgctttttgaaaat

SEQ ID NO: 22160 - DNA, 157 bp, Homo sapiens
  chr7:158570615-158570772
  hypo
gttcgcttcacagcacggacaggcttatttttcacagggctgccataaactttcaactagtaaaaacacagtatctacgaagcgcaataaagcaaagcacaataaagcgaggtgtgcctatgaacactttcatcttaaatgtcgcattcatatttta

SEQ ID NO: 22161 - DNA, 30 bp, Homo sapiens
  chr7:158571466-158571496
  hypo
cctacttttttatatcgtgtataaaggtgc

SEQ ID NO: 22162 - DNA, 35 bp, Homo sapiens
  chr7:158623833-158623868
  hypo
gacttgcataaacataagccacgtaaaaaattctg

SEQ ID NO: 22163 - DNA, 34 bp, Homo sapiens
  chr7:158624107-158624141
  hypo
agagcaagactacgtctcaagaaaaaaaaaaaaa

SEQ ID NO: 22164 - DNA, 30 bp, Homo sapiens
  chr7:158713060-158713090
  hypo
cgtgtggcctccgtcggggaacacgtgaag

SEQ ID NO: 22165 - DNA, 359 bp, Homo sapiens
  chr7:158766791-158767150
  hypo
cggcggtctggcctggcgtctggagctccgggagcgcctgtcctcccagggccgatgccagcgcccgccctccgcgttcccggcattgacagaatgtccaggcgcgcagggcccgtgggtggggcctgggcacccggccctgccctcgcgcaccctccagacccgccacttcttagatagagagcggccgcctccccgccctcctttcagccactcgctccgcgcagtcagctctgctgactcttccggaggattctggaaggttccagagggtgtgccgccgaggccctgcgagagggcgttccctggggagaacattccagagcaaggtaacatccataaacggaggctgaaacggc

SEQ ID NO: 22166 - DNA, 197 bp, Homo sapiens
  chr7:158792182-158792379
  hypo
tggtggtttatctgcgtggcctctgcagctctgtgtgctatgcgcgtctcgaggtggagagacttggtgtctgcattcctgggttcgtgctctatttccacgcacaggtggaagaaaaagaagggcgaggccgcacagtgctaagacgcaggctctgggatcacactacccggacccaatgcgcgaggctgcccctg

SEQ ID NO: 22167 - DNA, 154 bp, Homo sapiens; identical to SEQ ID NO: 6072
  chr7:158936493-158936647
  hypo

SEQ ID NO: 22168 - DNA, 154 bp, Homo sapiens; identical to SEQ ID NO: 6073
  chr7:158936936-158937090
  hypo

SEQ ID NO: 22169 - DNA, 99 bp, Homo sapiens; identical to SEQ ID NO: 6074
  chr7:158937202-158937301
  hypo

SEQ ID NO: 22170 - DNA, 111 bp, Homo sapiens; identical to SEQ ID NO: 6077
  chr8:495721-495832
  hypo

SEQ ID NO: 22171 - DNA, 306 bp, Homo sapiens
  chr8:591537-591843
  hypo
aaggtgtctctcattccacatcgaaagaccttttcacacagattattcaaattatagcttaatatttcttgattaattgtactgggaggaggtagtgtgtctgagcgtgatctaatcagtggagaacgcagcggccgtcacgcctgggtacgctggcagcggagctcctcccggaggacccctccccctccccgccgattcctctcctgtctgcgttttccaggctcatctcagatgccgccttgtctatgaagctctctttggttcctgcccagacctcatcagaatcaacgccccggctctgtg

SEQ ID NO: 22172 - DNA, 30 bp, Homo sapiens
  chr8:593179-593209
  hypo
cacattctgcctctcgttaaacattgcatg

SEQ ID NO: 22173 - DNA, 247 bp, Homo sapiens
  chr8:636769-637016
  hypo
gagagagagagagcgcgcacagcagggcgcccctcccctcctctaggaccaggcgagcttggacacagctgaatgtgtgaactctcatatcaataaatcagcgtgacaagaatgaaacactgctagctctgactctgtcaggcccttgagagggtgagatgcgaggaatgcggagcggggggcagccccatcacccacccacgagccactctggaaaggctaagagaagtcacgctaggactccttc

SEQ ID NO: 22174 - DNA, 30 bp, Homo sapiens
  chr8:644846-644876
  hypo
cagcgagagttccccgtcccatcatctcct

SEQ ID NO: 22175 - DNA, 31 bp, Homo sapiens
  chr8:650716-650747
  hypo
ggaggtcctgccccatcggatggcctcctcc

SEQ ID NO: 22176 - DNA, 128 bp, Homo sapiens; identical to SEQ ID NO: 6078
  chr8:687513-687641
  hypo

SEQ ID NO: 22177 - DNA, 138 bp, Homo sapiens; identical to SEQ ID NO: 6079
  chr8:687837-687975
  hypo

SEQ ID NO: 22178 - DNA, 86 bp, Homo sapiens
  chr8:833588-833674
  hypo
ttcgttacataggaacgcgtgtgccgcggcggttcgttacgtaggagcgcgggtgccgcggcggttcgttacgtaggtgcgcgtgt

SEQ ID NO: 22179 - DNA, 30 bp, Homo sapiens
  chr8:852059-852089
  hypo
cctggtgggtccaccgcagagggattgctc

SEQ ID NO: 22180 - DNA, 30 bp, Homo sapiens
  chr8:853998-854028
  hypo
acgcaggggacacacgcggtccaggccctg

SEQ ID NO: 22181 - DNA, 325 bp, Homo sapiens
  chr8:893355-893680
  hypo
ccagtgtgtatttttatgcaccggacactttggttttgactggccacgtttcatatgtgcggcacccgcgtgtctggtggctgctctgtgggaaagtagagctccggtgtgtggacgtcatgacgcggccatcccgccacaagcacagcaagaaccgctgtgtacaagatcatgtggaggaggtggcgtgtggacgtcgtgatgtggccatcccgccacaagcacagcgagaaccgctctgtacacgatcatgtggaggagctggcatgtggacgtcgtgatgtggccatcccgccacaagcacggcaagaaccactgtgtacaa

SEQ ID NO: 22182 - DNA, 30 bp, Homo sapiens
  chr8:923958-923988
  hypo
ccgggccactcggtcgccagaaaagatttt

SEQ ID NO: 22183 - DNA, 269 bp, Homo sapiens
  chr8:1047977-1048246
  hypo
gaggtttgtatgaaccccagccgcatggccttcgacatttctgcctcttctcttactacgttgactggttttgatctgaagagaaaactgccgtgagttatatttccttgcaacgcaattctgctctcagcaaacgttggcggcgccactggacacacgtccctccccaagagcacagccgggcatcccggccttggagctggactgagtcccggcgtcctctgcgtatgcgtcacagaaactcctccgcacaccagtttgtttccaaa

SEQ ID NO: 22184 - DNA, 30 bp, Homo sapiens
  chr8:1048750-1048780
  hypo
ccgcccacgggcgccgccacccacgccagg

SEQ ID NO: 22185 - DNA, 509 bp, Homo sapiens
  chr8:1132630-1133139
  hypo
cctgtccttctgtgacctctgcgtggtgagttgggcattgagctgccgtaggtcactgagtctgccctgccatcacgtctgcgctgccctgagacacggagctccagcacattctgcagagctcacactatcgagtccagcgcgcatgtgagaggcaggaagggagagtccacgggtcggcaactctgggcagtggcgcgtgggggacggactccgcagcctgtgggatcggcagcatccagtgaggtggagcggggctcaggggcactcaggatgcagtgagcgcacagccctgcggtggcatgggtgggagacgcgcaccatggagccggtggaaggtagacattcgagcgagctggggccagttcctggaagtgtgtcactgccagtgcggggaacgtgagatttactcacccagcagcgggacctactggagtgctttcggtaagagctgggatgacacaaatgcattcacgttcgattccctcgagatgccttgtgggtggggc

SEQ ID NO: 22186 - DNA, 609 bp, Homo sapiens
  chr8:1150804-1151413
  hypo
agaatggagagtggcagctttcgctttgttttccgttcccacatatcggtttggcatcgaacgatgcgtccgctgctggctcccgtgctcggtttctccacgccgcctccgggcggtgcgcgattcagctccaggagcgtgttgtgcacggcggggcgctgcgctcggccttagggaaagaaggcgcggctgtctccccggaccccaccgttagggacccacacctagaggtgagtgtggcgtgagcggccaggcgggtgccgagatgcccagagaccagcactggggaggctgctccccgtccccgaggcctggagccgtgggaggaagaggaggatgccacggagccctgtggaggctgaagccgctgcgtagggagccccttgtccatcagggttctcgagagacgcagaaccaggggtgcatgcacgcgtgtgattgtggaggctggcaggtcccaaccacagagccgaagtccccagcatccccgcgcaggtgtgaggccctcagcgaccctggaaccagcaggagctctgctcccgctcaggggccgtggggcagggggctcccccttcctcgggaagggacggccttctgttccctgcaggg

SEQ ID NO: 22187 - DNA, 30 bp, Homo sapiens
  chr8:1308214-1308244
  hypo
cgcctcttcatccccgtccactgaggaaat

SEQ ID NO: 22188 - DNA, 30 bp, Homo sapiens
  chr8:1441371-1441401
  hypo
gcagctctgagacgcgcctccatggatgga

SEQ ID NO: 22189 - DNA, 14 bp, Homo sapiens
  chr8:1444164-1444178
  hypo
gtggggcccccggc

SEQ ID NO: 22190 - DNA, 30 bp, Homo sapiens
  chr8:1471549-1471579
  hypo
tgccggcctcacgccggccgagccactgct

SEQ ID NO: 22191 - DNA, 30 bp, Homo sapiens
  chr8:1579165-1579195
  hypo
ctcggcgggaggtccgggtgtcccgagggt

SEQ ID NO: 22192 - DNA, 30 bp, Homo sapiens
  chr8:1592436-1592466
  hypo
ccgaccaagagcctcgtctcggctctgtgc

SEQ ID NO: 22193 - DNA, 30 bp, Homo sapiens
  chr8:1623363-1623393
  hypo
tggatccacggcggcggccgagagctccag

SEQ ID NO: 22194 - DNA, 31 bp, Homo sapiens
  chr8:1717584-1717615
  hypo
attctggggtctcttccggagagcagagggt

SEQ ID NO: 22195 - DNA, 236 bp, Homo sapiens
  chr8:1777140-1777376
  hypo
aaagagcattacataagctagcgtggtattcagtgcgtatctgagcggacacggacggggagtcctcgagctttggagaggaagcaggcggcagggcctccagcacacctggggggcggccaaccagcccggccaggccgagcgctccccgcctgcacagttgcactcatgtcgggcctgagctgagtcgtcccgacaggatacctgcgtgggccgtgtagacacaacccagggag

SEQ ID NO: 22196 - DNA, 31 bp, Homo sapiens
  chr8:1783329-1783360
  hypo
gcagggccatggaggccggaggagtggacga

SEQ ID NO: 22197 - DNA, 199 bp, Homo sapiens
  chr8:1796261-1796460
  hypo
tagcttgtagaataaatatttcgctaaagaaaacagaaaattgaagtgttctatgcgtcttcttttgcatcgtgcatattgtatttgtcgtcctctcttcagtatctctgtaaaaagaggtacgcggggtcctccgtcttagtcctcaggttaagtggctttgtacgcgccacacggcgtttcctacttgttgcaacat

SEQ ID NO: 22198 - DNA, 163 bp, Homo sapiens
  chr8:1797379-1797542
  hypo
aatgctgagaagggtgtggggcggctgcggggacacagacggcaaatgctgagaagggcgtagggcggccgtgtggacacagcaaatgccgaggagggcatggggcagccacgtggacacagacagcaaatgccgaggagggcatggggcggccacgtggaca

SEQ ID NO: 22199 - DNA, 262 bp, Homo sapiens
  chr8:1797601-1797863
  hypo
gaggagggcgtggggcggccacatggacacagacagcaaatgctgaggggggcgtggggcagccacgtggacacagggcaaatgctgaggagggcgtggggcggccacgtgggcatggacagcaaatgctgaggagggcgtggggccagctgcgtggacacagacggcaaatgctgaggagggcgtggggcagtcgtgtggacacagacggcaaatgctgaggagggcgtggggtggccacgtgggcatggatggcaaatgc

SEQ ID NO: 22200 - DNA, 31 bp, Homo sapiens
  chr8:1826000-1826031
  hypo
tgaggctggcgagtcccgtgttactgataga

SEQ ID NO: 22201 - DNA, 301 bp, Homo sapiens
  chr8:1830727-1831028
  hypo
ttaaaacaggcaaatgaaagtcgcaggtgggttctgccgccgtcccgttctcacatctccctctccgtcgcagatgcagaagctcgtgaaggccgcgaaggacggcaccaaggacgggctggagaggaccagggcagccgtgaagaggggccgctccttcatcaggaccaagtctctcatcgcacagggtccgtgcctgcaggtcttcttgcggggaggacacggggttggggggggcggccacatcttgtggggaggactcggggtggggggcggccgcgcaggctcccacagccttagg

SEQ ID NO: 22202 - DNA, 64 bp, Homo sapiens
  chr8:1878064-1878128
  hypo
tgctgggtgccttagacgaggccctccctggcccatcccgcctggtccccgcagccgctggggg

SEQ ID NO: 22203 - DNA, 34 bp, Homo sapiens
  chr8:1926962-1926996
  hypo
cacataaaaaaggctacggcgatccccaagtctc

SEQ ID NO: 22204 - DNA, 30 bp, Homo sapiens
  chr8:5908962-5908992
  hypo
acaggtgacccacggcgcgcagcctacagt

SEQ ID NO: 22205 - DNA, 39 bp, Homo sapiens
  chr8:6361544-6361583
  hypo
ttctataagcaggggccgggcgcagtggctcacgcctgt

SEQ ID NO: 22206 - DNA, 192 bp, Homo sapiens
  chr8:6414546-6414738
  hypo
cctaggaggggtgggcggggtcatatggtgttcactcacttacgctaatgaactgagaaataacgcacttctgcccaaattcatgttcattcacactcctctcagcagttttctgcagtcttcccagccccacggaaaattctgcttttgtcagaggaggggatatgcgtgctttcccgtgtttgctttacc

SEQ ID NO: 22207 - DNA, 30 bp, Homo sapiens
  chr8:6456167-6456197
  hypo
gaagcaaaacctctcgtgtgagccggcggg

SEQ ID NO: 22208 - DNA, 160 bp, Homo sapiens
  chr8:6465691-6465851
  hypo
gtcgcacggcctgcccggaccctgatgagctgagcacagtgaaaacaatgccaggcctcacctgcccgtgcttaccggctggtggcaggggggctgagcaggtgttgaggtgttcacaggtgagtaggagaggaaaggcagacgtcggcctaaaggcaat

SEQ ID NO: 22209 - DNA, 31 bp, Homo sapiens
  chr8:6594590-6594621
  hypo
gtctggttatgggctacgagaatagcctccc

SEQ ID NO: 22210 - DNA, 30 bp, Homo sapiens
  chr8:6630597-6630627
  hypo
aggagcagcgcctgcgttcatccacgctgg

SEQ ID NO: 22211 - DNA, 30 bp, Homo sapiens
  chr8:6630915-6630945
  hypo
ttcatcgccgcacacgccctaaaaatgtcc

SEQ ID NO: 22212 - DNA, 30 bp, Homo sapiens
  chr8:6633001-6633031
  hypo
tcgagaaacaccaccggctggaaatgtggc

SEQ ID NO: 22213 - DNA, 230 bp, Homo sapiens
  chr8:6636291-6636521
  hypo
atgtggactcactgctcgcaggccgccagcctgctagcccagtgtcccaagtcaaaagtcacagcgacatgccggaaagacagtttccacaggacgagtggaaaagggggcgtctcttctgcccatcgaagggtgcatccacctgtggtattaaaggatttacaactggcctcagaaacgctgccggagctgctccttggggtctgtccgatgggaagaggcccctcctg

SEQ ID NO: 22214 - DNA, 20 bp, Homo sapiens
  chr8:6636747-6636767
  hypo
gctacgaggctgaggcggga

SEQ ID NO: 22215 - DNA, 94 bp, Homo sapiens
  chr8:6707718-6707812
  hypo
accagagctgttcctattcggccatcttggctccacccgagaatgaatcttatctgcacagggagtgctttccgattgagcagctccattccta

SEQ ID NO: 22216 - DNA, 30 bp, Homo sapiens
  chr8:6756715-6756745
  hypo
ggggggagctctctcgaggatatctgggct

SEQ ID NO: 22217 - DNA, 354 bp, Homo sapiens
  chr8:8176388-8176742
  hypo
gggcgggggcgggcccggggccggcctggagggtgcagtgcaccagcagcaggttctccaggcacaggtcccggtggatgatcccgtgctccttcaggtgctccagcccgttgcagagttgcagaagcaggaagcacacgcgccgctcgtacgcctcgggctccgcctggtggctggccgccgagtcccgcacgaagtcggaggcggtctgatgtggcacctctcgggtgatgaccaccacgcagtcctgctcctgggcaggggggtgtgtgggcagggcaggcacagggtccttgggcgcgtcgggggagctgagcatgctggacggcaccgaggcgacgaagtggccgcagt

SEQ ID NO: 22218 - DNA, 31 bp, Homo sapiens
  chr8:8436500-8436531
  hypo
ccgtacccagcctggacgtttatattattgg

SEQ ID NO: 22219 - DNA, 215 bp, Homo sapiens
  chr8:8560672-8560887
  hypo
ggcctacaccaactcggtggacgtcctcgacggggaggggtgggagtcccaggacgctccctcgtgcagcacccacccctgcgacagctcgctgccctgcgactccgacctctagacgcttgtagagcctggggggcgccgggtggcaaaggactcacccccgcacaggcccgcctggcttcgagttggaacccggacacttgcccctcactggt

SEQ ID NO: 22220 - DNA, 40 bp, Homo sapiens
  chr8:8634036-8634076
  hypo
ctctgtataaagagagctatgcggccaggtgcagcggctc

SEQ ID NO: 22221 - DNA, 40 bp, Homo sapiens
  chr8:8634315-8634355
  hypo
ggagacagagcgagactccgtctcaaaaaaaaaaaaagag

SEQ ID NO: 22222 - DNA, 43 bp, Homo sapiens
  chr8:8639581-8639624
  hypo
ctttgaattctgcacaccccacggttctacctgccttgtcagg

SEQ ID NO: 22223 - DNA, 86 bp, Homo sapiens
  chr8:8639884-8639970
  hypo
cggataagagctcaggatttgggtgcgtgggctgaagcatgcgcattaagaggcaaaaggacggcgcttgactggtataggacctt

SEQ ID NO: 22224 - DNA, 167 bp, Homo sapiens
  chr8:8651863-8652030
  hypo
tgccagctatcctaaccgatccccccaaatctcccgcttccaatccactgtcaaccacccatgaatgggaccttccccggagcctggcccggcctccacatgagtttgtttttgtccatgtgttcatggatgtaaactgtgggtgcttaaggcggtgaaggtggggg

SEQ ID NO: 22225 - DNA, 130 bp, Homo sapiens
  chr8:8673404-8673534
  hypo
aaggaatacaagtgtccgttaaaaggtcggcacataaacaaattgtggcatattcgtacaatagactactatctaggaaggaaaaggaatgagccatggatatatacgccaacatcgatgacctgggaat

SEQ ID NO: 22226 - DNA, 140 bp, Homo sapiens
  chr8:8680436-8680576
  hypo
tcaggacaggaggtaccgacaggctggtggcgggaagggagggtaacagagccaggcatgggatcccgcacagaggacacagacagaagaccgggaaggagagacagagggacacaggacagtctcgaattctagtccat

SEQ ID NO: 22227 - DNA, 30 bp, Homo sapiens
  chr8:8680889-8680919
  hypo
ggacacggggccccgcgctccgatcctggt

SEQ ID NO: 22228 - DNA, 201 bp, Homo sapiens
  chr8:8681181-8681382
  hypo
acttccctaattctcccgtcttcagtctttgacacaggtaatgaacccacaggtcaccgagaagagcatcacctgcgaaatttcaagacccacggtggctgtgctccatctctgatgtagcacagaagatagtgggggctgagaaaagaaagaatctcgcctctcagagatgtgcctgtctccatgcgcttcaaagatctt

SEQ ID NO: 22229 - DNA, 31 bp, Homo sapiens
  chr8:8682667-8682698
  hypo
ttaaagaaaagggttgcggtttttttgtttt

SEQ ID NO: 22230 - DNA, 31 bp, Homo sapiens
  chr8:8687219-8687250
  hypo
ttgagaaaggagattgcgtggggtatcctca

SEQ ID NO: 22231 - DNA, 30 bp, Homo sapiens
  chr8:8689405-8689435
  hypo
gctaccgcccccagccgtcaattgattttt

SEQ ID NO: 22232 - DNA, 160 bp, Homo sapiens
  chr8:8690236-8690396
  hypo
caagcgttcctcccacttcagcctcctgactcgccgagactacaggcacatgccattactacatgctaagttttcacttttaattttttgtcgaggcgaggtctcttttagttgcccaggctaagaatttttacaaactattggtcgaattgtgtagtag

SEQ ID NO: 22233 - DNA, 175 bp, Homo sapiens
  chr8:8692862-8693037
  hypo
acactatcctgtcccacgggtcttgagcatctttctagatggtgggcatcccggagcagagttacgagatacccatcatgcagccgccatctcagtgactacaaggtatcacagctcacactcaggaaacaaatgttcattaattccctcattttcctcacgatgaagatgtttc

SEQ ID NO: 22234 - DNA, 106 bp, Homo sapiens
  chr8:8698609-8698715
  hypo
ctacctatgtaacatctccttcgcatattccttaagatattcttcatgtgctaaaaataccgatggcgggctgtacttcaagacttctttttgggtcgggcgtggt

SEQ ID NO: 22235 - DNA, 106 bp, Homo sapiens
  chr8:8709658-8709764
  hypo
gcaaggtataaatgtcattagcgtgagtacttaaaacataccacaatgtccaggtgcggtgactcacacctgtaatcacatttgggaagccgaggcgggcagatca

SEQ ID NO: 22236 - DNA, 44 bp, Homo sapiens
  chr8:8712642-8712686
  hypo
ttgttgagagaggtctcgccatgtcgcccaggctggtctcgaac

SEQ ID NO: 22237 - DNA, 31 bp, Homo sapiens
  chr8:8712745-8712776
  hypo
agccaccacactcagccgacatcctgtattt

SEQ ID NO: 22238 - DNA, 30 bp, Homo sapiens
  chr8:8725340-8725370
  hypo
acaggcgtgagccaccgtgcctggccataa

SEQ ID NO: 22239 - DNA, 1055 bp, Homo sapiens
  chr8:8748238-8749293
  hypo
tggctgggggtggaccgcgccatgggcggggagctttccccctccgccttgccctctccactggtccctaggagcagcttatgcagcagcaaagagggatccctctggaagaagacattgaggatgtcgatgaggcgggtgaggttgtggaagacgtgctccttgagagccggactgtcctcaaagtagagtagcttgccgctctcatgcaggtaggagagggcactctgcagtcggtcctcggtcagacccgcctgcaggcccaagcgcgccgagtcccaccagcttagccacagtcgctgggcctgaggtggctggaaatgcagttcctccagcacctgccaggatcgaggcagtactctgtgtaagttggggaagatctctcggtgctcagcaactgacagcaacttgtcccgaaggcgtcgtaagtggcgcgggtccctgcagctaacaggcaacacgggggagaggatctgcagccggtggttgagcaggtattgaaaatgggccttgcgccgtcgaaggttcttgtccgaaacgccatagtaggctgcgtgggggctggcagagcgcagctcgaagtcccgggccagtgcctcgtccaccaccttggccaagcggctcagtccctccgcgtcgtgcttctcctgcagggcgatctggcggtgaatgtccagacatttctcctccagctcacgctctccgcacaggtctgcgtgggtgcccacgatgcacaccaccgcgtggggcactctcgccccgacccgatgcaagaaggagcccacggtggtaggaaagtggcgaggctcataggtggccaagttgaccaccagcacgtatagggcccctggggacaggaagaagggctggatcacctcataactttcatccccagctaagtcatacacgatgaaccgcaggccccgggaggcatcggccgtccagctggtcacctcgatgcccttgctcacagggggaggtgacggtgggtagcacttctccttgtcccctcctcctgggcatccctccactctctcctcggtgaggcagtggcg

SEQ ID NO: 22240 - DNA, 80 bp, Homo sapiens; identical to SEQ ID NO: 6090
  chr8:8750283-8750363
  hypo

SEQ ID NO: 22241 - DNA, 31 bp, Homo sapiens; identical to SEQ ID NO: 6091
  chr8:8820809-8820840
  hypo

SEQ ID NO: 22242 - DNA, 33 bp, Homo sapiens
  chr8:8850262-8850295
  hypo
ataaagaatagtcagccgggcgtggtggctcac

SEQ ID NO: 22243 - DNA, 31 bp, Homo sapiens
  chr8:8851528-8851559
  hypo
ataataaacaaagacacgaccagatgtgagc

SEQ ID NO: 22244 - DNA, 30 bp, Homo sapiens
  chr8:8898498-8898528
  hypo
catacaaggtatagcgtaatgagaccgttt

SEQ ID NO: 22245 - DNA, 37 bp, Homo sapiens
  chr8:8922914-8922951
  hypo
ctgactgccagctgggcgcagtggctcacacctgtaa

SEQ ID NO: 22246 - DNA, 30 bp, Homo sapiens
  chr8:9525662-9525692
  hypo
tctaagaaataacagcgccaagcactatat

SEQ ID NO: 22247 - DNA, 30 bp, Homo sapiens
  chr8:9537307-9537337
  hypo
cacaagctggctaacgtcacggctccatca

SEQ ID NO: 22248 - DNA, 332 bp, Homo sapiens; identical to SEQ ID NO: 6093
  chr8:9760854-9761186
  hypo

SEQ ID NO: 22249 - DNA, 243 bp, Homo sapiens; identical to SEQ ID NO: 6094
  chr8:9763518-9763761
  hypo

SEQ ID NO: 22250 - DNA, 262 bp, Homo sapiens; identical to SEQ ID NO: 6095
  chr8:9763787-9764049
  hypo

SEQ ID NO: 22251 - DNA, 513 bp, Homo sapiens
  chr8:10261661-10262174
  hypo
tcggcccctggtccacgtggagaggtcacctcatttccccacaatgccgggaaagtgagacggtgctgctcctcctccacaaatagcaaggcagggaccttccccaggggcatctgggctcccacctccagagaagcgtccccctggaatctttcttttcctgacaacactagatgcctttctccccagccccgtgacaaacgacagtcaagcttgctgccagggaggcagggaagtgacgatcccgtcaccaccccccaaccctccgtggggaggggcaggcgggtgtgggatccatcacgcccgcccacgtggatggcttcaaagtgaacagttggcattcctgcggggtggccctcgctcctgcaataggccatcccgggcggccgctccctccctcacctacgatctgccgtcagcagctgcttctgacaggtgcgcgggctctccatggcagatggtgaccaaaatgggcttgctggcaggctgtgctgccgcgccgccctccctcgc

SEQ ID NO: 22252 - DNA, 30 bp, Homo sapiens; identical to SEQ ID NO: 6097
  chr8:10587290-10587320
  hypo

SEQ ID NO: 22253 - DNA, 27 bp, Homo sapiens
  chr8:10652911-10652938
  hypo
tctctctcccccacaccaagacggagt

SEQ ID NO: 22254 - DNA, 203 bp, Homo sapiens
  chr8:10683499-10683702
  hypo
cacaccacagtcaatgcgaagactccagcgctgtttcacagcaatgcagtcggagctgtccataaagcatgaagtcgctattggcccagagctaaaatgcttcaagcaactcaggacaaacacgtagatttcaataacaagtaaagaaatgcttaatcttaccttttgtgaatttcatatagtgaacacggtttttggagatt

SEQ ID NO: 22255 - DNA, 31 bp, Homo sapiens
  chr8:10695375-10695406
  hypo
ggcctgaggaggcctccgtacttgagtcctt

SEQ ID NO: 22256 - DNA, 895 bp, Homo sapiens; identical to SEQ ID NO: 6098
  chr8:10873135-10874030
  hypo

SEQ ID NO: 22257 - DNA, 30 bp, Homo sapiens; identical to SEQ ID NO: 6101
  chr8:11058675-11058705
  hypo

SEQ ID NO: 22258 - DNA, 895 bp, Homo sapiens; identical to SEQ ID NO: 6102
  chr8:11204526-11205421
  hypo

SEQ ID NO: 22259 - DNA, 240 bp, Homo sapiens; identical to SEQ ID NO: 6103
  chr8:11205445-11205685
  hypo

SEQ ID NO: 22260 - DNA, 30 bp, Homo sapiens
  chr8:11474041-11474071
  hypo
actccatagaaaaccgcagcctccaaatgc

SEQ ID NO: 22261 - DNA, 67 bp, Homo sapiens
  chr8:11612346-11612413
  hypo
acatcacacaggtgctcgataagttttttaaaaatggaattgatttctttctcgctgagttccaggg

SEQ ID NO: 22262 - DNA, 39 bp, Homo sapiens
  chr8:11706105-11706144
  hypo
agccgccagtgaacaccgctactgcggaaccaaggcgag

SEQ ID NO: 22263 - DNA, 193 bp, Homo sapiens
  chr8:11706540-11706733
  hypo
acagcctgactcacccgtccccacacatgctgccacagcatgtgagcaggtcctccgccgacacctccacgctgacgtgcgcattggtgtggatgcagatccggtcagagatggcttccacagccccgaaggcctgcaggaacgagccccaccgggtgaggctgccatgtccgggctgggccctctgcagcag

SEQ ID NO: 22264 - DNA, 162 bp, Homo sapiens; identical to SEQ ID NO: 6115
  chr8:11726003-11726165
  hypo

SEQ ID NO: 22265 - DNA, 30 bp, Homo sapiens
  chr8:11728543-11728573
  hypo
gaggccttgactcacgtgtgtaaaagctgt

SEQ ID NO: 22266 - DNA, 30 bp, Homo sapiens
  chr8:12623751-12623781
  hypo
cctggcaccagtatcgacctcagctggcac

SEQ ID NO: 22267 - DNA, 30 bp, Homo sapiens
  chr8:12869587-12869617
  hypo
cttggaccagctaacgtgccttggttgcgc

SEQ ID NO: 22268 - DNA, 30 bp, Homo sapiens
  chr8:12952489-12952519
  hypo
gtggggtacattcacgtggacgcagtgttt

SEQ ID NO: 22269 - DNA, 30 bp, Homo sapiens; identical to SEQ ID NO: 6119
  chr8:13624575-13624605
  hypo

SEQ ID NO: 22270 - DNA, 197 bp, Homo sapiens; identical to SEQ ID NO: 6124
  chr8:16884182-16884379
  hypo

SEQ ID NO: 22271 - DNA, 30 bp, Homo sapiens; identical to SEQ ID NO: 6125
  chr8:16885255-16885285
  hypo

SEQ ID NO: 22272 - DNA, 31 bp, Homo sapiens
  chr8:17453694-17453725
  hypo
acattcaatccaaggccgtccactgagcccc

SEQ ID NO: 22273 - DNA, 48 bp, Homo sapiens
  chr8:17910134-17910182
  hypo
gtcacagagcccggccattttcttaacgtgtttttataacctattttc

SEQ ID NO: 22274 - DNA, 31 bp, Homo sapiens
  chr8:18381902-18381933
  hypo
tgctctgtttcgtgtacgtgccaagtctcaa

SEQ ID NO: 22275 - DNA, 31 bp, Homo sapiens; identical to SEQ ID NO: 6130
  chr8:18870815-18870846
  hypo

SEQ ID NO: 22276 - DNA, 30 bp, Homo sapiens
  chr8:19034822-19034852
  hypo
atgtaggtggtccccgctggtatgatgcaa

SEQ ID NO: 22277 - DNA, 78 bp, Homo sapiens
  chr8:19068612-19068690
  hypo
gtgttagggggaggagcggctccaggacagaccatggacaccaaaatccaggaatgctcaagtccctcataagaaata

SEQ ID NO: 22278 - DNA, 30 bp, Homo sapiens
  chr8:19095146-19095176
  hypo
tcgacggaggtggccgccgtcaccctactg

SEQ ID NO: 22279 - DNA, 292 bp, Homo sapiens
  chr8:19690582-19690874
  hypo
gcttgctcgttgcttcgtgaaccctggaacggtattttttaaatttctttttttaacagcgatgcttttcccctccttgctattctatctttcttagggtcaatataaaaaggcgatagccagcctgcatcacttagcagctctccagggatccatttctcagccacagatcacagggcaggggaccctggagcatcagagggcgctcatccagctggcgacgtgccactttgcgctaggggagtacagagtgagtactgcacacatacatgcctgccgcaggtgcacgggg

SEQ ID NO: 22280 - DNA, 30 bp, Homo sapiens
  chr8:19706753-19706783
  hypo
ccaagtggaatcaacgcccgctcatagtgt

SEQ ID NO: 22281 - DNA, 786 bp, Homo sapiens; identical to SEQ ID NO: 6133
  chr8:19796822-19797608
  hypo

SEQ ID NO: 22282 - DNA, 412 bp, Homo sapiens; identical to SEQ ID NO: 6134
  chr8:19797677-19798089
  hypo

SEQ ID NO: 22283 - DNA, 30 bp, Homo sapiens
  chr8:20083596-20083626
  hypo
gaagcacagaatgtgcgctgaaccattgaa

SEQ ID NO: 22284 - DNA, 19 bp, Homo sapiens
  chr8:20084212-20084231
  hypo
ccaccgcgcccggcctgtt

SEQ ID NO: 22285 - DNA, 198 bp, Homo sapiens
  chr8:20110439-20110637
  hypo
ctgcaggtgcaggacctgctgcgcgcgctggctcttctgcgaggcctgcttgagcttgttgccgcctttgggctccgggccctccagctcgtccctgcagcgccgcggccgctcctcgtaggccaggctggaggcaagctccttctcctcaaagctgcgctgcagcttctggagggcgccctccctctccaacagctt

SEQ ID NO: 22286 - DNA, 30 bp, Homo sapiens
  chr8:21608178-21608208
  hypo
gcaggatggtttgccggcggcgctcagcgc

SEQ ID NO: 22287 - DNA, 61 bp, Homo sapiens; identical to SEQ ID NO: 6138
  chr8:21906371-21906432
  hypo

SEQ ID NO: 22288 - DNA, 31 bp, Homo sapiens
  chr8:21910413-21910444
  hypo
cactctagattctgcccggcttccacacttt

SEQ ID NO: 22289 - DNA, 31 bp, Homo sapiens
  chr8:21931502-21931533
  hypo
tgataaatgagagaatcggctaaaatagaat

SEQ ID NO: 22290 - DNA, 31 bp, Homo sapiens
  chr8:21940765-21940796
  hypo
tgggcacatgaagaggcgtgcagtcagaggg

SEQ ID NO: 22291 - DNA, 30 bp, Homo sapiens
  chr8:21960441-21960471
  hypo
agccagcaccagggcggtgggagactcctg

SEQ ID NO: 22292 - DNA, 30 bp, Homo sapiens
  chr8:21961418-21961448
  hypo
ccaccccacccggcccgaatctgtcttgac

SEQ ID NO: 22293 - DNA, 315 bp, Homo sapiens
  chr8:21961720-21962035
  hypo
ttggtgtggacggggcgcagatctccgtggatgaactgcgtctggactcttagattcataaaatattcgagggtttgggagtcacagaccctcccctctcctcagtgcactttggcatttgcacggtgtcttccccggacagcacagcaataaatggtgtgattgcgtggacaccgtggctctgttcttggccaagtttccccaccttctgcccaggactccactgctaattcgggcccatcttcctccccaaggaagacaaattctttttctagcgctgcagcagggaggtggggtgggcggtaaacagacagg

SEQ ID NO: 22294 - DNA, 31 bp, Homo sapiens
  chr8:21969268-21969299
  hypo
ggcagctgagggaggacgggaggctagatag

SEQ ID NO: 22295 - DNA, 30 bp, Homo sapiens
  chr8:21970258-21970288
  hypo
gtccctacctggtccggctgcattctcagg

SEQ ID NO: 22296 - DNA, 31 bp, Homo sapiens
  chr8:21978447-21978478
  hypo
caggatgttggtgatgcggtcatcctgcaga

SEQ ID NO: 22297 - DNA, 31 bp, Homo sapiens
  chr8:21981295-21981326
  hypo
gggctgtcctctgtcacggctggcccttggc

SEQ ID NO: 22298 - DNA, 30 bp, Homo sapiens
  chr8:22034756-22034786
  hypo
gcctgggcccgcagcgctgcccacagcctg

SEQ ID NO: 22299 - DNA, 31 bp, Homo sapiens
  chr8:22052975-22053006
  hypo
ggtggacgagtgctctcggcccaaccgcggg

SEQ ID NO: 22300 - DNA, 30 bp, Homo sapiens
  chr8:22064870-22064900
  hypo
aggtgttcgacgggcgagacgccaaggccc

SEQ ID NO: 22301 - DNA, 287 bp, Homo sapiens
  chr8:22079079-22079366
  hypo
gcaatgtccaggaggggcaggcggtcgcggcagaagcggtcccccagggagcctttgggcgccagcaccaggatggcgtagtggtaggccgtgtacatgcagtagaagtccgcaaagtagaggttggtgctgggattgaagaggcgctgagctgggatctggaagcgccagcggccgtagggggagtcctgcgggggctggcccgtgttgaactccgtgttgcagctgaagaagaccccgtggagcataccgctggtgggggagccgtggctgccactgttgtcctt

SEQ ID NO: 22302 - DNA, 30 bp, Homo sapiens
  chr8:22108208-22108238
  hypo
tgaccttcctgcagcgtggagatggcacat

SEQ ID NO: 22303 - DNA, 31 bp, Homo sapiens
  chr8:22396803-22396834
  hypo
ccccaattgagtctctcgcaataatcttctc

SEQ ID NO: 22304 - DNA, 31 bp, Homo sapiens
  chr8:22432576-22432607
  hypo
acagggaccagctctccgctttgcccccacg

SEQ ID NO: 22305 - DNA, 30 bp, Homo sapiens; identical to SEQ ID NO: 6145
  chr8:22437178-22437208
  hypo

SEQ ID NO: 22306 - DNA, 31 bp, Homo sapiens
  chr8:22471905-22471936
  hypo
ctgctgctctcttccccggggttggaggaat

SEQ ID NO: 22307 - DNA, 146 bp, Homo sapiens
  chr8:22485266-22485412
  hypo
cacatgtgaggaaacagcctccgaggccaggtgggggcaggtcagacagcccaccgagcatgccccgctccatggtcctgcaccacgctggcagctgccacacctggccgctgacctgagaacacgctgtggctttccactagact

SEQ ID NO: 22308 - DNA, 30 bp, Homo sapiens
  chr8:22564467-22564497
  hypo
gcccagctgacttacgccaatggtgtggag

SEQ ID NO: 22309 - DNA, 30 bp, Homo sapiens
  chr8:22786345-22786375
  hypo
gaatatgagatcatcgctgtaaagtacacg

SEQ ID NO: 22310 - DNA, 31 bp, Homo sapiens
  chr8:22854457-22854488
  hypo
agcagagtgggggtcccggggcagtcctggc

SEQ ID NO: 22311 - DNA, 31 bp, Homo sapiens; identical to SEQ ID NO: 6150
  chr8:22857229-22857260
  hypo

SEQ ID NO: 22312 - DNA, 31 bp, Homo sapiens
  chr8:22871287-22871318
  hypo
cgtgagccaccgtgcccggccagttgtttgt

SEQ ID NO: 22313 - DNA, 459 bp, Homo sapiens
  chr8:22874764-22875223
  hypo
aaaaccaggagtatttcgagaagcatcggtggccacctgtgtggtacctgaaggaggaagatcattaccagcgggcacggaaggagcgtgagaaggaggactacctccacctcaagcggcagcccaaacggcgttggctcttctggaacagtccatcctccccgtcttcctcggcagcctcctcctcatccccatcttcctcctcggctgtggtctgagatgctgccaccctcttctgaccctgctgctgttgtccccatccgccttcacccctctgctcttccgcatcaccccatccaccttacagggaccagggggcccacgtaaccaggacccagagggtggagctcttcttaccagccaccgtggctcagccagagaggagctgagccctgtggagcagaacgggaaccacctgcagaggtccccagacccaaagcaggacgggagacaactgct

SEQ ID NO: 22314 - DNA, 30 bp, Homo sapiens; identical to SEQ ID NO: 6151
  chr8:22925641-22925671
  hypo

SEQ ID NO: 22315 - DNA, 198 bp, Homo sapiens; identical to SEQ ID NO: 6152
  chr8:23020932-23021130
  hypo

SEQ ID NO: 22316 - DNA, 512 bp, Homo sapiens; identical to SEQ ID NO: 6153
  chr8:23021192-23021704
  hypo

SEQ ID NO: 22317 - DNA, 30 bp, Homo sapiens
  chr8:23118788-23118818
  hypo
gccaggaggtccgccggtgggggaaaggct

SEQ ID NO: 22318 - DNA, 30 bp, Homo sapiens
  chr8:23313423-23313453
  hypo
ttctccaagccagtcgattcttcctcagat

SEQ ID NO: 22319 - DNA, 130 bp, Homo sapiens; identical to SEQ ID NO: 6156
  chr8:23386070-23386200
  hypo

SEQ ID NO: 22320 - DNA, 59 bp, Homo sapiens
  chr8:23399686-23399745
  hypo
tattacctaggggcatcacaacgcattgcatttcgcccgtgtttgggatgatgctggtg

SEQ ID NO: 22321 - DNA, 240 bp, Homo sapiens
  chr8:23409902-23410142
  hypo
ctgaaaaatagaataggatttcgaccttgtggtaggtggaaaccggggttgtctttgtgctctcaggcatgtggctggcgtggggtagaagctctctatataatggttgagtgactggatgagcttcaaagctggtccctctggcttttcctgctaccccaggccacgtgcccagaaggaacgctgtcttacctgggaggtctttattgactgtttgacgcccttcccatcctatcccaa

SEQ ID NO: 22322 - DNA, 245 bp, Homo sapiens
  chr8:23423832-23424077
  hypo
cagccacctagccaacggtattttgaaagcgtttgtctggagttagaaagttctcttcttcaacacgtccctccccagggtgttcctccctgtgacccagccgcctcgacttcggcccgcttgctcacgaataaagaactcagagttgtgtgtgcaatgcacacccagacacacgcacgcacacacacgcgcgcgcacacacatgcttttttctgttcccctccgctttctgaagcctggggaga

SEQ ID NO: 22323 - DNA, 32 bp, Homo sapiens
  chr8:23424341-23424373
  hypo
ggctgacaaaggactcgcgcaacgcagaaggc

SEQ ID NO: 22324 - DNA, 126 bp, Homo sapiens
  chr8:23429102-23429228
  hypo
ccacgacccccctggacgtctgtaagacccttctgaacactcaggagaacgtggccctctcgctggccaacatcagcggccggctgtcgggtatggccaatgccttccggacggtgtaccagctca

SEQ ID NO: 22325 - DNA, 1003 bp, Homo sapiens; identical to SEQ ID NO: 6159
  chr8:23559665-23560668
  hypo

SEQ ID NO: 22326 - DNA, 49 bp, Homo sapiens; identical to SEQ ID NO: 6163
  chr8:23567533-23567582
  hypo

SEQ ID NO: 22327 - DNA, 16 bp, Homo sapiens
  chr8:23567657-23567673
  hypo
cgctggcgcccaggaa

SEQ ID NO: 22328 - DNA, 217 bp, Homo sapiens
  chr8:25105392-25105609
  hypo
acttcttcagttatggtgatccggatgctgtagtcctgcccgcaagaaaccgctcttcttaactgctaccataacatttttgctgcgtcagccgtagaactttttcatctcaaaggacgtcagtgcctgttctttaaaagtaagcgcatgtcaaggcgtgaaggggagggaggttgagaacacttgagcctgcaccgtgagcttactgagttcatta

SEQ ID NO: 22329 - DNA, 30 bp, Homo sapiens
  chr8:25266268-25266298
  hypo
tcagccttcctcaccgtgaaaatgttttgc

SEQ ID NO: 22330 - DNA, 34 bp, Homo sapiens
  chr8:25338916-25338950
  hypo
ttacaactggccgggcgtggtggcttatgcctgt

SEQ ID NO: 22331 - DNA, 171 bp, Homo sapiens
  chr8:25397039-25397210
  hypo
acaggtgggagaggagatggccggcccagttcaacagactgtgagcccggctggctgctgggcgtgtagcgatcactgaggacaggtcagcctggggatttggagcgcagctacctgcagtacctgttctaactccgtctgtgtcggagcgcccttctgttatcctcagtg

SEQ ID NO: 22332 - DNA, 158 bp, Homo sapiens; identical to SEQ ID NO: 6180
  chr8:25901684-25901842
  hypo

SEQ ID NO: 22333 - DNA, 53 bp, Homo sapiens
  chr8:26053987-26054040
  hypo
ggccccagcatgatcccgcttcctgcccaccctcctcccgccccatctccagc

SEQ ID NO: 22334 - DNA, 40 bp, Homo sapiens
  chr8:26230452-26230492
  hypo
gcatccagtcgggcgcggtggctcactcttgtaatcccaa

SEQ ID NO: 22335 - DNA, 41 bp, Homo sapiens
  chr8:26230731-26230772
  hypo
gccgactcaaacaaaaatgcgtccatgcactcttttccttt

SEQ ID NO: 22336 - DNA, 31 bp, Homo sapiens
  chr8:26242168-26242199
  hypo
tgtccaagttcacaaccggctgggagcaaag

SEQ ID NO: 22337 - DNA, 136 bp, Homo sapiens
  chr8:26267633-26267769
  hypo
actacccctttgctgtcgagccccgatatttaatgagtaaacaaactcatataaaaccagtttggccgggctggtgactggttttaagaaagtcagtgatgatttcacggtgtttggggagcggtacccacaaacc

SEQ ID NO: 22338 - DNA, 749 bp, Homo sapiens; identical to SEQ ID NO: 6190
  chr8:26371675-26372424
  hypo

SEQ ID NO: 22339 - DNA, 30 bp, Homo sapiens; identical to SEQ ID NO: 6192
  chr8:26436703-26436733
  hypo

SEQ ID NO: 22340 - DNA, 78 bp, Homo sapiens; identical to SEQ ID NO: 6196
  chr8:27168527-27168605
  hypo

SEQ ID NO: 22341 - DNA, 126 bp, Homo sapiens
  chr8:27337192-27337318
  hypo
cccaccaccctagaggaccaccggtcacttgcgcggccacccggtgtggctgcttctctgtcaccccgtcagcctccttgcaggtgaccttgcctttgattttccggtgaagcctccttttctcta

SEQ ID NO: 22342 - DNA, 30 bp, Homo sapiens
  chr8:27473407-27473437
  hypo
ccttgcttgcccaacgtccaggggccacta

SEQ ID NO: 22343 - DNA, 30 bp, Homo sapiens
  chr8:27516495-27516525
  hypo
ccaagactggagaggcggtcaagaacatcc

SEQ ID NO: 22344 - DNA, 130 bp, Homo sapiens
  chr8:27516811-27516941
  hypo
caagtacctggatgacgtgcggctctcctgcacgctgggcttccacacccatgccgaggagctctactacctgaacaagtctgtctccatcatgctgggcaccacagacctgctccgggagcgcttcagc

SEQ ID NO: 22345 - DNA, 17 bp, Homo sapiens
  chr8:27684304-27684321
  hypo
tccgtctcaaaaaaaaa

SEQ ID NO: 22346 - DNA, 31 bp, Homo sapiens
  chr8:27778322-27778353
  hypo
aaaacagaaaacaaaacgacaacaacaaaaa

SEQ ID NO: 22347 - DNA, 30 bp, Homo sapiens
  chr8:27779641-27779671
  hypo
aggtccgcttgcagcggagcctgcagcagc

SEQ ID NO: 22348 - DNA, 30 bp, Homo sapiens
  chr8:27845262-27845292
  hypo
ctaagcctgaacaccgggaccctctgctca

SEQ ID NO: 22349 - DNA, 30 bp, Homo sapiens
  chr8:27931221-27931251
  hypo
acatctctccttctacggaaagccgcctaa

SEQ ID NO: 22350 - DNA, 162 bp, Homo sapiens
  chr8:28206996-28207158
  hypo
ctgcaggggacttagacggagccgctatgcctggaagcctcacactgcctcagtggcatcactggcaatctgatttacagtgtgacaccgccctgcaggagataactcaagaccagcgcctgctaggtagagttcaaaatgacttcccgcttacttgagttg

SEQ ID NO: 22351 - DNA, 145 bp, Homo sapiens
  chr8:28207470-28207615
  hypo
caccgacctgtggccacgtgccccgtgcccaagggatggcctccagccctgggatgtgtgggagagccctcggccatacgaggccccagccgtgctgcccgcacactcaccggagagagagagcaggcggcggagggggcagcag

SEQ ID NO: 22352 - DNA, 31 bp, Homo sapiens
  chr8:28210633-28210664
  hypo
ccacacagacatcatccgctccagcctgggc

SEQ ID NO: 22353 - DNA, 65 bp, Homo sapiens; identical to SEQ ID NO: 6201
  chr8:28242820-28242885
  hypo

SEQ ID NO: 22354 - DNA, 56 bp, Homo sapiens; identical to SEQ ID NO: 6203
  chr8:28258794-28258850
  hypo

SEQ ID NO: 22355 - DNA, 30 bp, Homo sapiens
  chr8:28610786-28610816
  hypo
ggcgccacagaccccgggtctccttggctg

SEQ ID NO: 22356 - DNA, 28 bp, Homo sapiens
  chr8:28746007-28746035
  hypo
agcgagctgagaacgcgccactgcactt

SEQ ID NO: 22357 - DNA, 334 bp, Homo sapiens; identical to SEQ ID NO: 6205
  chr8:28748908-28749242
  hypo

SEQ ID NO: 22358 - DNA, 306 bp, Homo sapiens
  chr8:28938417-28938723
  hypo
cccgcactcgaatagcgtcttctaactccattctcttcaaatccactttccaaactacagctggagggagctttccgaaaaacaaaagtgaccatgtcccatgtcgctcgccaccttgcagctgccagggtttcccactgcagcagacagggaaacgctggcaggtcctgcatggtgtatttctgcggctcgatccgtccctcctgcaaacgctctactgattgattcattccacaaatacaatgacttggttactcttaatcactgtcagtgaaatctcttacagtcacacgtgagcatttaacc

SEQ ID NO: 22359 - DNA, 84 bp, Homo sapiens
  chr8:28950234-28950318
  hypo
cacagctgttttctcggtgctttttacctggtgtgcgaggggagacggccgcttgcccctcttctcatcgcggacgggaaagag

SEQ ID NO: 22360 - DNA, 28 bp, Homo sapiens
  chr8:29118150-29118178
  hypo
gagacagagtttcactcttgtcgcccag

SEQ ID NO: 22361 - DNA, 619 bp, Homo sapiens; identical to SEQ ID NO: 6209
  chr8:29206163-29206782
  hypo

SEQ ID NO: 22362 - DNA, 1264 bp, Homo sapiens; identical to SEQ ID NO: 6210
  chr8:29206997-29208261
  hypo

SEQ ID NO: 22363 - DNA, 94 bp, Homo sapiens
  chr8:29949230-29949324
  hypo
caggcacacacaaacacgcccacaacacagacacgcacgcacacaaacacacatgcacgcacaaacgcatacacagacacgcacacaaacgcac

SEQ ID NO: 22364 - DNA, 42 bp, Homo sapiens
  chr8:29951801-29951843
  hypo
gttgtcgtaaccgagcgagttatagagaaacaccacactttg

SEQ ID NO: 22365 - DNA, 100 bp, Homo sapiens
  chr8:29958254-29958354
  hypo
gcactcggctatcatttatttctttgctttagtctaggtcattggttaactatgcctattcaagaaagttgtttctattcactaacgtgagagcacctta

SEQ ID NO: 22366 - DNA, 31 bp, Homo sapiens
  chr8:29962164-29962195
  hypo
aagtgatattggagaacgtggcttggatctg

SEQ ID NO: 22367 - DNA, 297 bp, Homo sapiens; identical to SEQ ID NO: 6215
  chr8:30241764-30242061
  hypo

SEQ ID NO: 22368 - DNA, 1375 bp, Homo sapiens; identical to SEQ ID NO: 6216
  chr8:30242285-30243660
  hypo

SEQ ID NO: 22369 - DNA, 30 bp, Homo sapiens
  chr8:30408960-30408990
  hypo
ccagaacatctcaacgtgggcctcctcctg

SEQ ID NO: 22370 - DNA, 30 bp, Homo sapiens
  chr8:30437723-30437753
  hypo
cagagggcagaaagcggagcaggctaacag

SEQ ID NO: 22371 - DNA, 175 bp, Homo sapiens
  chr8:30561957-30562132
  hypo
caatgcttgtgctttcgtaaaatgggaagaataccacaaaagtacatgacactgaagttctacgctggagacggtgagaactcagactcttacttttggatttgctcttactggaatcctctgtacccaggccttcacttaggggctgctggcacgctttcgccagccatgatac

SEQ ID NO: 22372 - DNA, 510 bp, Homo sapiens; identical to SEQ ID NO: 6225
  chr8:33371776-33372286
  hypo

SEQ ID NO: 22373 - DNA, 31 bp, Homo sapiens
  chr8:33417651-33417682
  hypo
acctagccaggacctacgttttaacaagctc

SEQ ID NO: 22374 - DNA, 810 bp, Homo sapiens; identical to SEQ ID NO: 6226
  chr8:37553374-37554184
  hypo

SEQ ID NO: 22375 - DNA, 30 bp, Homo sapiens
  chr8:37652942-37652972
  hypo
gtcctgccccatcccggcagctctattaag

SEQ ID NO: 22376 - DNA, 502 bp, Homo sapiens; identical to SEQ ID NO: 6229
  chr8:37655488-37655990
  hypo

SEQ ID NO: 22377 - DNA, 71 bp, Homo sapiens; identical to SEQ ID NO: 6230
  chr8:37656049-37656120
  hypo

SEQ ID NO: 22378 - DNA, 126 bp, Homo sapiens
  chr8:37702470-37702596
  hypo
aggcgggaggacgccgggtagggcaggtccacatttgccaatttacaaaatcgggcaagggaacatgaaagccgatctgcaggctgcagcgactgccaagccaggaaagtcgcagcagtgatgacg

SEQ ID NO: 22379 - DNA, 19 bp, Homo sapiens
  chr8:37961843-37961862
  hypo
gactctgtctcaaacaaac

SEQ ID NO: 22380 - DNA, 94 bp, Homo sapiens
  chr8:38146028-38146122
  hypo
gaggccccagcctctccgctccgttttgatgatctctgcatcagggtatagtctctttgtaaagcactggttctgacaacgatctccagctggg

SEQ ID NO: 22381 - DNA, 105 bp, Homo sapiens
  chr8:38223413-38223518
  hypo
aaaaagatttaaattacggtttactcaagtattccatgtagtataaagtttaaatcttaaatgttatgtaaacataactgatccaaaatatactgaaatggaact

SEQ ID NO: 22382 - DNA, 850 bp, Homo sapiens; identical to SEQ ID NO: 6243
  chr8:38325442-38326292
  hypo

SEQ ID NO: 22383 - DNA, 18 bp, Homo sapiens
  chr8:38487422-38487440
  hypo
atttaaaaaaattggccg

SEQ ID NO: 22384 - DNA, 30 bp, Homo sapiens
  chr8:38643831-38643861
  hypo
aaacctaaagatgtcgccaggcctcttggc

SEQ ID NO: 22385 - DNA, 31 bp, Homo sapiens
  chr8:38644147-38644178
  hypo
acttgggaagcctccccgagtgcggtttggg

SEQ ID NO: 22386 - DNA, 30 bp, Homo sapiens
  chr8:38697061-38697091
  hypo
ctgctcttagagagcggtagccatccataa

SEQ ID NO: 22387 - DNA, 60 bp, Homo sapiens
  chr8:38786305-38786365
  hypo
aatggggagagtagctatcagcgtgtcgtgtgtccccgcgttagcatcagcaagtggacc

SEQ ID NO: 22388 - DNA, 34 bp, Homo sapiens
  chr8:38857789-38857823
  hypo
catgagccaccgcgccccagcctctctcacagtc

SEQ ID NO: 22389 - DNA, 31 bp, Homo sapiens
  chr8:40157533-40157564
  hypo
tttgctccactcccaacgcatgcacacagat

SEQ ID NO: 22390 - DNA, 413 bp, Homo sapiens; identical to SEQ ID NO: 6247
  chr8:41166266-41166679
  hypo

SEQ ID NO: 22391 - DNA, 243 bp, Homo sapiens; identical to SEQ ID NO: 6248
  chr8:41166745-41166988
  hypo

SEQ ID NO: 22392 - DNA, 128 bp, Homo sapiens; identical to SEQ ID NO: 6249
  chr8:41167025-41167153
  hypo

SEQ ID NO: 22393 - DNA, 27 bp, Homo sapiens
  chr8:41290491-41290518
  hypo
tgctccgcccaccaacgtgggtaggca

SEQ ID NO: 22394 - DNA, 87 bp, Homo sapiens
  chr8:41290577-41290664
  hypo
ccttctccctctctctgtctctctctctttccttgtgctgaaaaacatcgatctcaatctgcccttggacatcggtgctcctagttc

SEQ ID NO: 22395 - DNA, 64 bp, Homo sapiens
  chr8:41325382-41325446
  hypo
tctcacagtcaagatccgaattagatataagggcacagcaacaagagatcgcaggtccacagta

SEQ ID NO: 22396 - DNA, 30 bp, Homo sapiens
  chr8:41507690-41507720
  hypo
ccgggtcgggtactcgttcccagccttgga

SEQ ID NO: 22397 - DNA, 29 bp, Homo sapiens
  chr8:41581593-41581622
  hypo
ccgcgcccggcctaagacattttaaaacc

SEQ ID NO: 22398 - DNA, 182 bp, Homo sapiens
  chr8:41643316-41643498
  hypo
ccgtccattgctcctcggtgctttccagaccctttaaacaccctggcggagccttgctcggcccttctgggtccacttggtagccgagggtccgagctgacctcatgctttccgcactgtcgggcagcgttgtcatcagcggtactctccgcctgggaaccctcccgcgtctcttctccctg

SEQ ID NO: 22399 - DNA, 30 bp, Homo sapiens
  chr8:41668173-41668203
  hypo
ccagagcaacgtgccgccgaagcgtaatag

SEQ ID NO: 22400 - DNA, 30 bp, Homo sapiens
  chr8:41684885-41684915
  hypo
acccacacaggactgcgagcgtcttagact

SEQ ID NO: 22401 - DNA, 30 bp, Homo sapiens
  chr8:41707501-41707531
  hypo
cagagccctggcagcggctctcagacagtc

SEQ ID NO: 22402 - DNA, 133 bp, Homo sapiens; identical to SEQ ID NO: 6253
  chr8:41753619-41753752
  hypo

SEQ ID NO: 22403 - DNA, 1438 bp, Homo sapiens; identical to SEQ ID NO: 6254
  chr8:41753770-41755208
  hypo

SEQ ID NO: 22404 - DNA, 30 bp, Homo sapiens
  chr8:41828965-41828995
  hypo
cgaggcaaggtgcagcgactgcaaaggccc

SEQ ID NO: 22405 - DNA, 35 bp, Homo sapiens; identical to SEQ ID NO: 6255
  chr8:42040328-42040363
  hypo

SEQ ID NO: 22406 - DNA, 86 bp, Homo sapiens
  chr8:42134200-42134286
  hypo
gccctgaagcacttcccgtatgttttcttgtttttttttttttgagacagtctcactctcagctgagacaggtgcgatctcgggtc

SEQ ID NO: 22407 - DNA, 174 bp, Homo sapiens
  chr8:42147386-42147560
  hypo
tgtaggagcagtttggcagcacgatgaggacttgggatgtggcacgcacaaaaaactgaagttacacgcagttgtgccctcagggtctgagttctggtgctgtgagtggggctgggtgagcgccactgacccaggcattgcggttggccacccgtcctgggctctgtcttcctc

SEQ ID NO: 22408 - DNA, 30 bp, Homo sapiens
  chr8:42148250-42148280
  hypo
tcatgatcagagagccgggccagggctgca

SEQ ID NO: 22409 - DNA, 44 bp, Homo sapiens
  chr8:42255792-42255836
  hypo
ttgagctgtctcactccgttgcccaggctagggtgaagtggcat

SEQ ID NO: 22410 - DNA, 43 bp, Homo sapiens
  chr8:42256015-42256058
  hypo
gattacaggcatgagccactgcgcctggcagaactggttaaaa

SEQ ID NO: 22411 - DNA, 31 bp, Homo sapiens
  chr8:42287377-42287408
  hypo
cgctgtggctgggggccgggcacagtaaggg

SEQ ID NO: 22412 - DNA, 108 bp, Homo sapiens
  chr8:42294048-42294156
  hypo
cctgctcacagctccacggctcccctctcgaggcgaggccttccttcctgtgtccatcggccacgtgctctgcatccacgacctgcagaccggcgacctcctagcttg

SEQ ID NO: 22413 - DNA, 332 bp, Homo sapiens
  chr8:42333287-42333619
  hypo
atggaggatgagtcaggagcccgctgcatggcttaggcatgagatgaggcatccgggaccaggctgtggacggtggtgggtgggagggaatacgatgatttaagagaactgcagcggcaaaatccaacaggaccagatggtggattaaacatgggggtggagagaggatacatggtttatggaaccgaagtgaaaaataaccgagtgggtttttcttctcttttgcattgtttttagttttgctttttggggctaggatggggtctgaccacaggtgcgcttttgattgggtgaagtagccgggtttactgtgtcttttttttttttttttt

SEQ ID NO: 22414 - DNA, 23 bp, Homo sapiens
  chr8:42333918-42333941
  hypo
ccggtttactgtgtctcaatgga

SEQ ID NO: 22415 - DNA, 52 bp, Homo sapiens
  chr8:42749967-42750019
  hypo
attacaggcgcgagacaccgcgcctggccacgtatgtgtaatttctaaaggt

SEQ ID NO: 22416 - DNA, 30 bp, Homo sapiens
  chr8:43059848-43059878
  hypo
tgccccaccaggaacgttccgggctcttct

SEQ ID NO: 22417 - DNA, 30 bp, Homo sapiens
  chr8:48172268-48172298
  hypo
aagacagcaaggcccggcggaggtggcaat

SEQ ID NO: 22418 - DNA, 204 bp, Homo sapiens
  chr8:48348566-48348770
  hypo
tgttccttacctatttcgtagggttgttgtgaatcgagtatgagaatggccttgaaaatgccttgaagagctgatggcagtgacagtggctgccatccttgcatggccaggcacttcgtggtacatttgctgtgtttgcacctgtgattgtagtgctcttggggtagccgctactgtgtccatttaaaacggaggacactctta

SEQ ID NO: 22419 - DNA, 240 bp, Homo sapiens
  chr8:48396518-48396758
  hypo
gaaaattaccaagtacagcttcgtgttaaaaaaaaaaaaatgtcgatgcatctttatcaagttagcaaacgatttctatgattgtctatttccagagtaatttgattgaacgggttctcaggtttccatagctggggttgtaggagtattctccacaagcgaagatagaccaagtgcttgacacgtgacctcaccgaaagaagtcacttaataaagtgcggaatgagtgaagggaagttg

SEQ ID NO: 22420 - DNA, 164 bp, Homo sapiens
  chr8:48585839-48586003
  hypo
gttttatcctgctgggatatgcgtgtctaaacgtgtactgtcgcagagaatgcctcttattgttgttcttatcgtaatgttatcctgcagcttttctcagtatcgagcatccacacaaagcaaatatttctttcatgggaaacggtaaaaatgggaaaaggaca

SEQ ID NO: 22421 - DNA, 165 bp, Homo sapiens; identical to SEQ ID NO: 6258
  chr8:48649824-48649989
  hypo

SEQ ID NO: 22422 - DNA, 294 bp, Homo sapiens; identical to SEQ ID NO: 6259
  chr8:48650416-48650710
  hypo

SEQ ID NO: 22423 - DNA, 213 bp, Homo sapiens; identical to SEQ ID NO: 6260
  chr8:48650955-48651168
  hypo

SEQ ID NO: 22424 - DNA, 31 bp, Homo sapiens
  chr8:48683896-48683927
  hypo
tatttttttgagacagagtctcgctttgtcg

SEQ ID NO: 22425 - DNA, 181 bp, Homo sapiens
  chr8:48711777-48711958
  hypo
attctcttcctccttgcgcagctgttggtcacagaaatctgccagcgtcatgtaagcatcaatcaccccagctgcaggcccacagctccaggagggaggctgggcctcctcctcagccgcctgcacagcctcagagaggtgctggaatgctctctggtacagacccgcgatcacctggaat

SEQ ID NO: 22426 - DNA, 69 bp, Homo sapiens
  chr8:48744145-48744214
  hypo
gccacacttccacccgcggagagaactgggcgcactcctggacccccaccagagcgccatgagggctgc

SEQ ID NO: 22427 - DNA, 71 bp, Homo sapiens
  chr8:48744502-48744573
  hypo
aggcccagttactccccgccgcccagacacttggctctgctggttcattttcacctcgggtttcctcaaag

SEQ ID NO: 22428 - DNA, 30 bp, Homo sapiens
  chr8:48854953-48854983
  hypo
aagatgaggcccatcggctcagttttttgg

SEQ ID NO: 22429 - DNA, 170 bp, Homo sapiens
  chr8:49055452-49055622
  hypo
gcgtgggagaaggaagcgcaacctcatgatgcttttggatgcgggtaaaataaaccccaactcaggttgacttaaactgtagggaaactggtgatctattgccgacattctagaaataggtgagcagggtttgtttgtctgagacaccaccatgtcgccaaggccccagg

SEQ ID NO: 22430 - DNA, 249 bp, Homo sapiens
  chr8:49241525-49241774
  hypo
gaagggggcctctctctatcccggccgggtgcagattaccagttcctgggccccacccagccgggaaagcctgaggtccttgctcagtgactggactcacgggcttctccggtggtggagggcctggcccgggcgtaaatgtctgaggggcttactggacggcctgggagtgcagccactcagccccctcgggacaccgaggctggggattcgcagccctgcagggacgggctccttccctgagctctt

SEQ ID NO: 22431 - DNA, 356 bp, Homo sapiens
  chr8:49334893-49335249
  hypo
ggagggacctgccctgctggtcggagtctgctctgagacccagggaccgtgcgttctgcagggaagctggcgcatgcccttaggttctgcagctgtgtgggctgcgctgccttcgggggcacgtgacgccacgtgggaagtgctgtgaggctggtgcggagagcaaacctcctgcaactcttagcgagtaaatgggcacatccacactggagttgaacacaggggcgccggccacgggttcaggctagcccgggcgtctggcttccctgccaggatggctgcctcgttactgagatggaacacacaacacagccgcgtgggcagtgggaggctgcgaggttagcctggcaaagctg

SEQ ID NO: 22432 - DNA, 30 bp, Homo sapiens
  chr8:49339924-49339954
  hypo
ccttccttcaaacccgggccaagctccaaa

SEQ ID NO: 22433 - DNA, 530 bp, Homo sapiens
  chr8:49382241-49382771
  hypo
gtttatctcagctgaaatgtacgggaaaagtagacgtcaatcaggtggaaaagggcagagagagcaccgtccaggcagaagggagagcgtgagcaaggggcccgtgggactgagtgctgcgtgtcgccgcagaggggcatgaggacagtgctgggcacggcggctgtgggcagtgtgggccgacagaatccccaggccaggtcaggtgtcccggccatccatggagaacaaggagtcattacagaggctcggtggcacacggtgaaaatgaggttcttctgggaaattttaggctgcaggatgtgagtggcccacagcagggaaggtctggcaggcagcgagagcttccggactggaccccaagaaggaggtcaggctgggaacacagactcggaggttcccatccacagatggtaccgaggctactgtgtcgggtcagatcttccaggagaccggaggagggacgtggctgcgggaagcaagcccagagccgccagcccgggaccagcgggaggccagggagcaaggcc

SEQ ID NO: 22434 - DNA, 404 bp, Homo sapiens
  chr8:49390182-49390586
  hypo
aagcccagcatcccacaaggacggacactcactacagcccggtgcctgcggagtattccgaacgcgagatccaaggaaaccacgaaggctcctctgcgggctcccttgcccctctgcggttcagtcgggagacgctcaggcgctgacaacagcctccaggtgccgttccctgcgcatggccccatctttgcgggcagtgtccagtgggcttgtgctcacacctgcgctgggggctccacactagacggccctggactactgaaatagtggacagaagggtctcccgagaatgtccagggtgggcaggcagtgctggggagccagcgggaagggaagggagcctgaggcggagaaacgcccacgcgggagctgctagtgcagccgcaagagcaaggcctgggctg

SEQ ID NO: 22435 - DNA, 407 bp, Homo sapiens; identical to SEQ ID NO: 6267
  chr8:49468662-49469069
  hypo

SEQ ID NO: 22436 - DNA, 52 bp, Homo sapiens
  chr8:49496532-49496584
  hypo
tactaaaatccaacccaacaacgtgtaggacggccaagtgtataatatgcat

SEQ ID NO: 22437 - DNA, 30 bp, Homo sapiens
  chr8:49561741-49561771
  hypo
gagcagcctcatggcggagtagagaaatcc

SEQ ID NO: 22438 - DNA, 220 bp, Homo sapiens
  chr8:49571909-49572129
  hypo
ccttccctccaagaaatgaggcgtgggctgtggaacccattgcggctaatcgtaaacaggtgcatcttaaacataggatgccaacctgctccaacatgctgggcaccgggcttagctgcagctaattacgcgtgcgctctgaccgggcggcccacagcggctctgcaggctcagcggggcgagcgcaggaggcgcgggcccgacacgcgtgtttagacct

SEQ ID NO: 22439 - DNA, 30 bp, Homo sapiens
  chr8:49572373-49572403
  hypo
gatgacggatttgaacgagcgtgttgcctc

SEQ ID NO: 22440 - DNA, 219 bp, Homo sapiens
  chr8:49608989-49609208
  hypo
ttgtctccccagcttctccaccgcaccatgtgtctgggtctgtgattaccggaggcgactcgcaacaggcccagactcgcctgtgtgcatagcactaagggtaatgacaactcctctgtgtgtgcaggtgcctgttggagacgcagagctctgcagcagcaggtgagctgatgctgcaacctgctaaacgccgctcctgcggagcgccagggcccagag

SEQ ID NO: 22441 - DNA, 304 bp, Homo sapiens
  chr8:49747337-49747641
  hypo
tggcatgcatgtgcatagatgcgggtggcccctcatcaggagggatgaggagaggagccgtgggctcgcggaagagcagcgagggacactggcgcacagagcagagaggagcagtgagcaggcggcacccccgggcagggtaaaagggcacgaagaaaagcgaaggtgcgaggggaggaccgactggcagcaagcgtccgggaggggcaggcaaaggctctcctcgaagtgcctttacgcttaggtagaatttccatgcctccctcgcgctccaccctgctgcgtgaacattttcctggcctgc

SEQ ID NO: 22442 - DNA, 36 bp, Homo sapiens
  chr8:49797124-49797160
  hypo
gatacataagaaacagggggccgggtgcggagtctc

SEQ ID NO: 22443 - DNA, 246 bp, Homo sapiens
  chr8:49808675-49808921
  hypo
agactatgggagtgacccctgcggagctgacaagccaatgctggagaagtgcacgggcaggctcaggcgcagccactcaatgggcctgtctgtgtcgggggcaggggcacagagaggggcaggtgagtcgaagctgattgggtgaagaaaagacagtgaaaagacggtgagaccaaaggcacagagcgggtttcccgccccagctaccacgctggtctgcagagcggtaagtctaaactggggaga

SEQ ID NO: 22444 - DNA, 34 bp, Homo sapiens
  chr8:50015644-50015678
  hypo
gagcccatggcctgggtggggcgcgggaaggctc

SEQ ID NO: 22445 - DNA, 41 bp, Homo sapiens
  chr8:50071090-50071131
  hypo
aacagtactgctctatgtggccgagcgcagtggctcacgcc

SEQ ID NO: 22446 - DNA, 16 bp, Homo sapiens
  chr8:50377740-50377756
  hypo
aaaataaaacaaacaa

SEQ ID NO: 22447 - DNA, 28 bp, Homo sapiens
  chr8:51010216-51010244
  hypo
aaaaaacaaaaaacgaaactaaggagag

SEQ ID NO: 22448 - DNA, 35 bp, Homo sapiens
  chr8:53657304-53657339
  hypo
caccgcgcctggccgactaagaacaattctaaagg

SEQ ID NO: 22449 - DNA, 861 bp, Homo sapiens; identical to SEQ ID NO: 6277
  chr8:53853598-53854459
  hypo

SEQ ID NO: 22450 - DNA, 209 bp, Homo sapiens
  chr8:54154467-54154676
  hypo
agctcctcctctcagttgtcccggctgtggaatcatgcgcctctggacccctagaaggaacgttctagtgcattcagggttatgtgcagggtgagcgcttctcacgcccaacagcacctataagaaaatggcacctcgctaatgactggcgtgcactttcctagggcacaactacccggatgcctagcggtatatggatacttaaaatt

SEQ ID NO: 22451 - DNA, 432 bp, Homo sapiens; identical to SEQ ID NO: 6279
  chr8:54163694-54164126
  hypo

SEQ ID NO: 22452 - DNA, 30 bp, Homo sapiens
  chr8:54507324-54507354
  hypo
gtgtcgggaagccacgccccgtggctgtgc

SEQ ID NO: 22453 - DNA, 30 bp, Homo sapiens
  chr8:54640675-54640705
  hypo
acacaagccttctcacggtagccgcctgtt

SEQ ID NO: 22454 - DNA, 33 bp, Homo sapiens
  chr8:54647892-54647925
  hypo
taacgggctggcgtctgtagctgacttggtaca

SEQ ID NO: 22455 - DNA, 192 bp, Homo sapiens
  chr8:54750267-54750459
  hypo
ttttgaaatcactctcgcagttctgtgaagaattgctcctactgaggcagcaaggatagcagagacagacagcaggcaacaggcaataacaacagagcacatgcaaggggaacacaacatgcacgaggcaggaaccgcagacacaggatcgcactcagattcgaggcatcttttggacgtagagctggaaga

SEQ ID NO: 22456 - DNA, 2079 bp, Homo sapiens; identical to SEQ ID NO: 6284
  chr8:54792701-54794780
  hypo

SEQ ID NO: 22457 - DNA, 21 bp, Homo sapiens
  chr8:54869912-54869933
  hypo
ccacagcgctgggattacagg

SEQ ID NO: 22458 - DNA, 39 bp, Homo sapiens
  chr8:54956721-54956760
  hypo
gtattacaggtgtgagggagccaccgtgcccagccttcc

SEQ ID NO: 22459 - DNA, 691 bp, Homo sapiens; identical to SEQ ID NO: 6288
  chr8:55366951-55367642
  hypo

SEQ ID NO: 22460 - DNA, 203 bp, Homo sapiens; identical to SEQ ID NO: 6292
  chr8:55371172-55371375
  hypo

SEQ ID NO: 22461 - DNA, 285 bp, Homo sapiens; identical to SEQ ID NO: 6293
  chr8:55371439-55371724
  hypo

SEQ ID NO: 22462 - DNA, 74 bp, Homo sapiens; identical to SEQ ID NO: 6294
  chr8:55371993-55372067
  hypo

SEQ ID NO: 22463 - DNA, 168 bp, Homo sapiens; identical to SEQ ID NO: 6295
  chr8:55372416-55372584
  hypo

SEQ ID NO: 22464 - DNA, 257 bp, Homo sapiens; identical to SEQ ID NO: 6299
  chr8:56013635-56013892
  hypo

SEQ ID NO: 22465 - DNA, 173 bp, Homo sapiens; identical to SEQ ID NO: 6300
  chr8:56014011-56014184
  hypo

SEQ ID NO: 22466 - DNA, 367 bp, Homo sapiens; identical to SEQ ID NO: 6301
  chr8:56014376-56014743
  hypo

SEQ ID NO: 22467 - DNA, 18 bp, Homo sapiens
  chr8:56015034-56015052
  hypo
ggtgtggaggcatcatgg

SEQ ID NO: 22468 - DNA, 476 bp, Homo sapiens; identical to SEQ ID NO: 6303
  chr8:56015185-56015661
  hypo

SEQ ID NO: 22469 - DNA, 57 bp, Homo sapiens; identical to SEQ ID NO: 6304
  chr8:56015749-56015806
  hypo

SEQ ID NO: 22470 - DNA, 30 bp, Homo sapiens
  chr8:56361886-56361916
  hypo
aagttagggctggccgggcggtgcggggca

SEQ ID NO: 22471 - DNA, 252 bp, Homo sapiens
  chr8:56362504-56362756
  hypo
tgaggctcaaggtggagcccacgggttcctcctgcaggtacatacccagcgagcagcggtggtgaggtgcggtggacactaggagggagctaggggtgccacgtccatctggccgggcttcaaggcgccatgcagccttcacgcggtcccaggtgtccttccagcgcttagcgggtcggctcagctctgtctccaacctctgcaggcgtgagatggcgtcaggctgggctcgggggcagctgtggtagcagg

SEQ ID NO: 22472 - DNA, 368 bp, Homo sapiens
  chr8:56364011-56364379
  hypo
cttctcctgctccaggctactcgagtctgcctggaactggcctggagaaggtgcgttctgggccttaaagagtccgactacacctatgccgtacaggcccccagaatgcagcagtactgccttggaccgccggatgcgccagcagacaacggtgaagcggttctggcggtagcagtaggacacgcgctgcagggcgttgtcctggacactctggggcacgatcagcagccccgggtacctgcggtagatggcatgcatgcggttgaccagagaaatgcggaaggattcagacttggcccggctcaggcggctgctcagggggcccaggccaaggcactgatagtcgcggcagcaagccctttccacca

SEQ ID NO: 22473 - DNA, 30 bp, Homo sapiens
  chr8:56436574-56436604
  hypo
ccaccccatcatctcgcccaccacggattg

SEQ ID NO: 22474 - DNA, 38 bp, Homo sapiens
  chr8:56613553-56613591
  hypo
ttttaaaagagcctaacaggccggccgcggtggcttca

SEQ ID NO: 22475 - DNA, 978 bp, Homo sapiens; identical to SEQ ID NO: 6306
  chr8:56792219-56793197
  hypo

SEQ ID NO: 22476 - DNA, 31 bp, Homo sapiens
  chr8:56860458-56860489
  hypo
gattttccttttaagtcggtctgtgagcaca

SEQ ID NO: 22477 - DNA, 24 bp, Homo sapiens
  chr8:56983271-56983295
  hypo
agcgagactgtttccatttaaatt

SEQ ID NO: 22478 - DNA, 14 bp, Homo sapiens
  chr8:57360611-57360625
  hypo
ccgcggggctccgg

SEQ ID NO: 22479 - DNA, 33 bp, Homo sapiens; identical to SEQ ID NO: 6314
  chr8:57360769-57360802
  hypo

SEQ ID NO: 22480 - DNA, 30 bp, Homo sapiens
  chr8:57390746-57390776
  hypo
tcgcgggcgggggcacggtgaagcggctgt

SEQ ID NO: 22481 - DNA, 21 bp, Homo sapiens
  chr8:58044268-58044289
  hypo
tttttttttgagacagagtct

SEQ ID NO: 22482 - DNA, 81 bp, Homo sapiens
  chr8:58044528-58044609
  hypo
ggattacaggcgtgagccactgcgcccggcctgtttttttttacaaatctcaaagagctcgctttctgggataactgagaa

SEQ ID NO: 22483 - DNA, 30 bp, Homo sapiens
  chr8:58106079-58106109
  hypo
catgcgcagattctcgcctctcgcgggggc

SEQ ID NO: 22484 - DNA, 192 bp, Homo sapiens
  chr8:58122878-58123070
  hypo
ctgtcagaccgtgggcggggggcgttgcaggcacagtgcggttcctagtcttaggcatgctcacttgaggcgttcttcccctacctgtcgactgatctcagaggaaggagactgagctgctcagccctgccggtgtggctggcagggtgtcccgcattagcccatgtgcccgaggtggagtacaggactgga

SEQ ID NO: 22485 - DNA, 88 bp, Homo sapiens
  chr8:58991410-58991498
  hypo
atttttgcctttttaatatggtgcgtgctagatacttgagaaattgctcagaacaacaacaaccctcgtgcatttattttgcatgtta

SEQ ID NO: 22486 - DNA, 290 bp, Homo sapiens
  chr8:59059044-59059334
  hypo
tgcccggctgccaagcgcgcactgggcagccccacgctcaaagtgttcggcaaccacgccaagaccgagagcggcgtgcagagggagaacctgaagctggagatcctgaagaacatcatcaatagctccgagggctctagctcgggctcggggcacaagcacagctcccgcaactggccgccccaccggtcggaagccactgacctgcaccgtcactccttcgcggagtccctgaaggtctaccccacgcagggccgcaggagcccgcaggagggcggctcccacgtggg

SEQ ID NO: 22487 - DNA, 1508 bp, Homo sapiens; identical to SEQ ID NO: 6319
  chr8:60030268-60031776
  hypo

SEQ ID NO: 22488 - DNA, 237 bp, Homo sapiens
  chr8:60506002-60506239
  hypo
cacatcagtgtggtacggtagtcaccctttatccacagtttcagtttccatggtttgttacctgccatcaaccctgtgccgaaaatactaaacggaaaattccagaaataaacaatgcgtaagttttaacttgcctgcagttctgagtagtgtgatgaaatcttgggccgtcaggttccgtccctctcaggacatgaatcttccctttgtccagcagatccacgctgtaacagcttt

SEQ ID NO: 22489 - DNA, 30 bp, Homo sapiens; identical to SEQ ID NO: 6321
  chr8:60699763-60699793
  hypo

SEQ ID NO: 22490 - DNA, 32 bp, Homo sapiens
  chr8:61034761-61034793
  hypo
gccaccacgccgggctgagggaattaatttct

SEQ ID NO: 22491 - DNA, 17 bp, Homo sapiens
  chr8:61168437-61168454
  hypo
tgcaaggtgcttccaac

SEQ ID NO: 22492 - DNA, 966 bp, Homo sapiens; identical to SEQ ID NO: 6322
  chr8:61193291-61194257
  hypo

SEQ ID NO: 22493 - DNA, 21 bp, Homo sapiens
  chr8:61297073-61297094
  hypo
gcccaacctctttcttctttt

SEQ ID NO: 22494 - DNA, 613 bp, Homo sapiens; identical to SEQ ID NO: 6323
  chr8:61822312-61822925
  hypo

SEQ ID NO: 22495 - DNA, 31 bp, Homo sapiens; identical to SEQ ID NO: 6325
  chr8:62626392-62626423
  hypo

SEQ ID NO: 22496 - DNA, 31 bp, Homo sapiens; identical to SEQ ID NO: 6326
  chr8:62626692-62626723
  hypo

SEQ ID NO: 22497 - DNA, 145 bp, Homo sapiens; identical to SEQ ID NO: 6327
  chr8:62627198-62627343
  hypo

SEQ ID NO: 22498 - DNA, 129 bp, Homo sapiens; identical to SEQ ID NO: 6332
  chr8:65281673-65281802
  hypo

SEQ ID NO: 22499 - DNA, 179 bp, Homo sapiens; identical to SEQ ID NO: 6333
  chr8:65281825-65282004
  hypo

SEQ ID NO: 22500 - DNA, 1239 bp, Homo sapiens; identical to SEQ ID NO: 6340
  chr8:65492339-65493578
  hypo

SEQ ID NO: 22501 - DNA, 148 bp, Homo sapiens; identical to SEQ ID NO: 6341
  chr8:65493806-65493954
  hypo

SEQ ID NO: 22502 - DNA, 523 bp, Homo sapiens; identical to SEQ ID NO: 6342
  chr8:65494076-65494599
  hypo

SEQ ID NO: 22503 - DNA, 39 bp, Homo sapiens
  chr8:65757969-65758008
  hypo
cttttttttttttttttgagacggagtctcgcgctgtcg

SEQ ID NO: 22504 - DNA, 39 bp, Homo sapiens
  chr8:65758247-65758286
  hypo
gcgtgagccaccacacccggcccctattcttttttattc

SEQ ID NO: 22505 - DNA, 241 bp, Homo sapiens
  chr8:66548503-66548744
  hypo
taaataaataaataaatactaaatataatcatgcttctgccattattgagaaaagtaattcttcctgcacactgccattacagaatagatgactgctattaagaagcagggggtgtgttcacaaaaaaataattaccagtttcctaagcacctatggattataagccttagggaggtatttaaagattttaataatctgtattcccatattaaaatgtctaaacttggccgggcgtggtgg

SEQ ID NO: 22506 - DNA, 26 bp, Homo sapiens
  chr8:66560526-66560552
  hypo
caggcgtgagtcaccatgcctggccc

SEQ ID NO: 22507 - DNA, 1481 bp, Homo sapiens; identical to SEQ ID NO: 6343
  chr8:67024947-67026428
  hypo

SEQ ID NO: 22508 - DNA, 30 bp, Homo sapiens
  chr8:67371073-67371103
  hypo
aaatgcagagatttcgatggtgttttatgg

SEQ ID NO: 22509 - DNA, 288 bp, Homo sapiens; identical to SEQ ID NO: 6347
  chr8:67417574-67417862
  hypo

SEQ ID NO: 22510 - DNA, 30 bp, Homo sapiens
  chr8:67624596-67624626
  hypo
tctgttgggccccggcgctctggcccgcgc

SEQ ID NO: 22511 - DNA, 4 bp, Homo sapiens
  chr8:67873417-67873421
  hypo
gaac

SEQ ID NO: 22512 - DNA, 252 bp, Homo sapiens; identical to SEQ ID NO: 6352
  chr8:67873798-67874050
  hypo

SEQ ID NO: 22513 - DNA, 508 bp, Homo sapiens; identical to SEQ ID NO: 6353
  chr8:67874164-67874672
  hypo

SEQ ID NO: 22514 - DNA, 852 bp, Homo sapiens; identical to SEQ ID NO: 6354
  chr8:67874755-67875607
  hypo

SEQ ID NO: 22515 - DNA, 24 bp, Homo sapiens
  chr8:68858252-68858276
  hypo
tttttttgaggagtcttgctccgt

SEQ ID NO: 22516 - DNA, 473 bp, Homo sapiens; identical to SEQ ID NO: 6355
  chr8:68863997-68864470
  hypo

SEQ ID NO: 22517 - DNA, 361 bp, Homo sapiens; identical to SEQ ID NO: 6356
  chr8:68864545-68864906
  hypo

SEQ ID NO: 22518 - DNA, 60 bp, Homo sapiens; identical to SEQ ID NO: 6357
  chr8:68864942-68865002
  hypo

SEQ ID NO: 22519 - DNA, 263 bp, Homo sapiens; identical to SEQ ID NO: 6358
  chr8:69242803-69243066
  hypo

SEQ ID NO: 22520 - DNA, 618 bp, Homo sapiens; identical to SEQ ID NO: 6359
  chr8:69243284-69243902
  hypo

SEQ ID NO: 22521 - DNA, 30 bp, Homo sapiens
  chr8:70041812-70041842
  hypo
cctccgcgcctccgcgccacctcaactccc

SEQ ID NO: 22522 - DNA, 57 bp, Homo sapiens
  chr8:71017205-71017262
  hypo
aggcgtgagccaccgcgcccagatgatttggcttcttaatcacgcatccagaggtgc

SEQ ID NO: 22523 - DNA, 30 bp, Homo sapiens
  chr8:71308114-71308144
  hypo
gcattatattctcgtcgatgacaacaggtc

SEQ ID NO: 22524 - DNA, 270 bp, Homo sapiens
  chr8:71447611-71447881
  hypo
ctgctggtcccagatgaaacccgcgacacaggctgagtatttctgttcctttttgcccccgctctttcctgattaattatttctaaataatgcgttttaaccgatcaagcgttgccttttccaatactacctatgacctgcccctcccctattctaagcctataaaaagctcgtgacccagccacgaggggaggaaaaaaccatccgactaagggggtgggcgaccaccccccagagtcccttctccgctaattgctgttcccttgctca

SEQ ID NO: 22525 - DNA, 241 bp, Homo sapiens
  chr8:71447940-71448181
  hypo
ggcgtggtacaagagcttgggaactgccgaacgcgggtacaagagcttgggaaccgccgaacgtgggtacaagagcttgggaaccgccgaacgcggatagaagctataacacaggcgagctggggcatgccagcgtggctgagcagggcgcgggtggggcatcgctggccggaggtcccggtttgcaaagtgaccgagaagaaaaatcctgcatcaaaagttacagttgctgccgggagct

SEQ ID NO: 22526 - DNA, 82 bp, Homo sapiens; identical to SEQ ID NO: 6377
  chr8:72755732-72755814
  hypo

SEQ ID NO: 22527 - DNA, 364 bp, Homo sapiens; identical to SEQ ID NO: 6378
  chr8:72756655-72757019
  hypo

SEQ ID NO: 22528 - DNA, 94 bp, Homo sapiens; identical to SEQ ID NO: 6384
  chr8:73449621-73449715
  hypo

SEQ ID NO: 22529 - DNA, 176 bp, Homo sapiens; identical to SEQ ID NO: 6385
  chr8:73450026-73450202
  hypo

SEQ ID NO: 22530 - DNA, 43 bp, Homo sapiens
  chr8:73999612-73999655
  hypo
actgtgaagtgcttgggagagcgcctggtatggaggaaatgtg

SEQ ID NO: 22531 - DNA, 124 bp, Homo sapiens
  chr8:74004072-74004196
  hypo
cagaggcaggagggtgctccccgccactgggtatccggttgcccagggaatggcatagccccagaaaatgctgaggctcccacatgtcgggatccttcagctcgaaccctaatatctgtgtggc

SEQ ID NO: 22532 - DNA, 68 bp, Homo sapiens
  chr8:74361076-74361144
  hypo
aacgcaagtggacagccggtccctgccgtgggcgctaggggccagtgctcagcgcgggaatattccca

SEQ ID NO: 22533 - DNA, 30 bp, Homo sapiens
  chr8:74361383-74361413
  hypo
gggcaggggccgggcgagttaggccgcaag

SEQ ID NO: 22534 - DNA, 30 bp, Homo sapiens
  chr8:74363454-74363484
  hypo
cttgaacctacagccgtcagcttctttaat

SEQ ID NO: 22535 - DNA, 30 bp, Homo sapiens
  chr8:74372109-74372139
  hypo
aggagcaactcctatcgggcacggctcctt

SEQ ID NO: 22536 - DNA, 30 bp, Homo sapiens
  chr8:74385877-74385907
  hypo
gaaggagagagaaacggccagaggcttgga

SEQ ID NO: 22537 - DNA, 26 bp, Homo sapiens
  chr8:74568302-74568328
  hypo
tcaccgtgccaggccacataattttt

SEQ ID NO: 22538 - DNA, 31 bp, Homo sapiens
  chr8:74759372-74759403
  hypo
cagcctgggcgacagagtgagactctgtctc

SEQ ID NO: 22539 - DNA, 30 bp, Homo sapiens
  chr8:74759827-74759857
  hypo
tcatcaacggtaaaacgggtatattgcggc

SEQ ID NO: 22540 - DNA, 142 bp, Homo sapiens
  chr8:75737614-75737756
  hypo
tgaaagcacaattagattcagcggatatccccaaagccaggcggaagcgctacatttcgcagaatgacatgatcgccattcttgattatcataatcaagttcggggcaaagtgttcccaccggcagcaaatatggaatatat

SEQ ID NO: 22541 - DNA, 907 bp, Homo sapiens; identical to SEQ ID NO: 6390
  chr8:75896558-75897465
  hypo

SEQ ID NO: 22542 - DNA, 30 bp, Homo sapiens; identical to SEQ ID NO: 6395
  chr8:76386311-76386341
  hypo

SEQ ID NO: 22543 - DNA, 461 bp, Homo sapiens; identical to SEQ ID NO: 6400
  chr8:77590153-77590614
  hypo

SEQ ID NO: 22544 - DNA, 220 bp, Homo sapiens; identical to SEQ ID NO: 6410
  chr8:80525513-80525733
  hypo

SEQ ID NO: 22545 - DNA, 31 bp, Homo sapiens
  chr8:80673151-80673182
  hypo
gcctctccccaccccccgccccagagcagaa

SEQ ID NO: 22546 - DNA, 472 bp, Homo sapiens; identical to SEQ ID NO: 6413
  chr8:80803548-80804020
  hypo

SEQ ID NO: 22547 - DNA, 38 bp, Homo sapiens
  chr8:80998634-80998672
  hypo
agccaccgagcctgaccggaaggttctagtttttaaaa

SEQ ID NO: 22548 - DNA, 354 bp, Homo sapiens
  chr8:81213156-81213510
  hypo
gctctttgggaagtggagctccgatgatgtgcagatctggcacttgcttgcaggattacactgcagtgaaggagaagtatgccaagtacctgcctcacagtgcagagcggtatgccgccaaacgcttccgcaaagctcagtgccccatcgtggagtgcctcacttactccatgatgacgcacggccgcaacaaccgcaagaagctcatgatcatgcgcatcgtcaagcacgccttcgagatcatccagctgctcacaggcgacaaccctctgcaggtcctggtgaacgccatcatcaacagtggtccccgggaggactccacactcactgggcgagccaggatcgtgagacgac

SEQ ID NO: 22549 - DNA, 873 bp, Homo sapiens; identical to SEQ ID NO: 6415
  chr8:81397817-81398690
  hypo

SEQ ID NO: 22550 - DNA, 55 bp, Homo sapiens; identical to SEQ ID NO: 6418
  chr8:81490386-81490441
  hypo

SEQ ID NO: 22551 - DNA, 31 bp, Homo sapiens
  chr8:81549087-81549118
  hypo
tccatggaagtttgttcgctaacatgctatt

SEQ ID NO: 22552 - DNA, 100 bp, Homo sapiens; identical to SEQ ID NO: 6419
  chr8:81785240-81785340
  hypo

SEQ ID NO: 22553 - DNA, 404 bp, Homo sapiens; identical to SEQ ID NO: 6420
  chr8:81785543-81785947
  hypo

SEQ ID NO: 22554 - DNA, 40 bp, Homo sapiens; identical to SEQ ID NO: 6421
  chr8:81786601-81786641
  hypo

SEQ ID NO: 22555 - DNA, 1058 bp, Homo sapiens; identical to SEQ ID NO: 6422
  chr8:82192689-82193747
  hypo

SEQ ID NO: 22556 - DNA, 35 bp, Homo sapiens
  chr8:82680448-82680483
  hypo
tctgggaggagccaagatggccgaataggaagagc

SEQ ID NO: 22557 - DNA, 41 bp, Homo sapiens
  chr8:83135625-83135666
  hypo
tataatttaaaaaattaggcccggcgcggtggctcacgcct

SEQ ID NO: 22558 - DNA, 41 bp, Homo sapiens
  chr8:83135905-83135946
  hypo
gggcgaaagagctagactccgtctcaaaaagaaaaaaaaaa

SEQ ID NO: 22559 - DNA, 57 bp, Homo sapiens; identical to SEQ ID NO: 6430
  chr8:86132758-86132815
  hypo

SEQ ID NO: 22560 - DNA, 24 bp, Homo sapiens
  chr8:87402877-87402901
  hypo
gtccagcctcggctcagcatcaga

SEQ ID NO: 22561 - DNA, 90 bp, Homo sapiens; identical to SEQ ID NO: 6433
  chr8:87527031-87527121
  hypo

SEQ ID NO: 22562 - DNA, 30 bp, Homo sapiens; identical to SEQ ID NO: 6439
  chr8:89928884-89928914
  hypo

SEQ ID NO: 22563 - DNA, 96 bp, Homo sapiens
  chr8:90768481-90768577
  hypo
ctcttcacactgacgcgcgttaacagaatgaatggatagaaaagtcttctgagtactttttaagaaaaaagcttattggccgggcgcggtggctca

SEQ ID NO: 22564 - DNA, 94 bp, Homo sapiens
  chr8:90913503-90913597
  hypo
cctcaggtgatccgtccgcctcggccttccaaaaggaatttaggtactttaaaatgctgttatgtatgttaacggaaaagtaactacatgcttc

SEQ ID NO: 22565 - DNA, 522 bp, Homo sapiens; identical to SEQ ID NO: 6441
  chr8:91996986-91997508
  hypo

SEQ ID NO: 22566 - DNA, 486 bp, Homo sapiens; identical to SEQ ID NO: 6442
  chr8:91997527-91998013
  hypo

SEQ ID NO: 22567 - DNA, 33 bp, Homo sapiens
  chr8:92433535-92433568
  hypo
gtgagccaccgcgcccagcctaaaagttaagag

SEQ ID NO: 22568 - DNA, 77 bp, Homo sapiens
  chr8:94684135-94684212
  hypo
gcttaattacaaatatcagagcgatatatcaacagtgtgaaaacactgtgcataattaaaaatatcagagcgatatg

SEQ ID NO: 22569 - DNA, 121 bp, Homo sapiens
  chr8:94684331-94684452
  hypo
agtatcacagtgtgtaaacactgcacataattacaaatatcagcgatatgttgtcaatatcacagcgcgtaaacactgtgcgtaattacaaatatcagagtgatatattgtcaatatcaca

SEQ ID NO: 22570 - DNA, 158 bp, Homo sapiens
  chr8:94685461-94685619
  hypo
cgtcaatatcacagtgtgtaaacactgtgcataattacaaatttcagagcgagggagcgatgtatcaccaatatcaccgtgtgtaaacactacatgtaattacaaatatcagagcgatatgtcatcaatatcacaacgtgtaaacactgagtattata

SEQ ID NO: 22571 - DNA, 327 bp, Homo sapiens; identical to SEQ ID NO: 6450
  chr8:94713054-94713381
  hypo

SEQ ID NO: 22572 - DNA, 31 bp, Homo sapiens
  chr8:94747733-94747764
  hypo
tttcttaaatctctttcgtcaatactgaggg

SEQ ID NO: 22573 - DNA, 210 bp, Homo sapiens; identical to SEQ ID NO: 6451
  chr8:94929136-94929346
  hypo

SEQ ID NO: 22574 - DNA, 10 bp, Homo sapiens
  chr8:94929748-94929758
  hypo
gccgggcagg

SEQ ID NO: 22575 - DNA, 4 bp, Homo sapiens
  chr8:94929775-94929779
  hypo
cggg

SEQ ID NO: 22576 - DNA, 78 bp, Homo sapiens
  chr8:95556566-95556644
  hypo
cattaatattctgcagccacacgtatcaacattcacactaaataaagattatggccgggcgcagtggctcacacctgt

SEQ ID NO: 22577 - DNA, 29 bp, Homo sapiens
  chr8:95582100-95582129
  hypo
gagactccgtctcaaaaaaaaataaataa

SEQ ID NO: 22578 - DNA, 334 bp, Homo sapiens; identical to SEQ ID NO: 6459
  chr8:95654164-95654498
  hypo

SEQ ID NO: 22579 - DNA, 158 bp, Homo sapiens
  chr8:95865516-95865674
  hypo
gtgacggagcgagactctatctcaaaaatcaagaacaaaccaaaaatttttaagatgaacaagtatagcatgatagttatgataggggattctgggactaaccgcgtgcttaagcttgaatgccagcttcatacttaaatagccgtataatcttgaac

SEQ ID NO: 22580 - DNA, 63 bp, Homo sapiens
  chr8:95942752-95942815
  hypo
ttgtgcttgacttgccgagggtggcaatccctggtaagattttggcgacgaaggctatttctg

SEQ ID NO: 22581 - DNA, 31 bp, Homo sapiens
  chr8:96038394-96038425
  hypo
tcccttttaaaaattgtgggccggccgcggt

SEQ ID NO: 22582 - DNA, 31 bp, Homo sapiens
  chr8:96038664-96038695
  hypo
tagcctgggcgacagtctcaaaaacaacaaa

SEQ ID NO: 22583 - DNA, 41 bp, Homo sapiens
  chr8:96099107-96099148
  hypo
ggcgtgagccaccgcgccccggcccctcttgtctcttgagt

SEQ ID NO: 22584 - DNA, 30 bp, Homo sapiens
  chr8:96125685-96125715
  hypo
gtgaggtgcagagtacgcagagtctgaggg

SEQ ID NO: 22585 - DNA, 30 bp, Homo sapiens
  chr8:96145225-96145255
  hypo
tgttctccctacttcgcccccatccctagt

SEQ ID NO: 22586 - DNA, 138 bp, Homo sapiens; identical to SEQ ID NO: 6460
  chr8:96146147-96146285
  hypo

SEQ ID NO: 22587 - DNA, 30 bp, Homo sapiens
  chr8:96214064-96214094
  hypo
cagacctccactcgcgtcgccaaagcagat

SEQ ID NO: 22588 - DNA, 31 bp, Homo sapiens
  chr8:96232002-96232033
  hypo
ctgaagcagactgtcccgagcaggtaattta

SEQ ID NO: 22589 - DNA, 46 bp, Homo sapiens
  chr8:96465481-96465527
  hypo
attacaggcgtgagccaccgcgaccggccattttcctgcattttgc

SEQ ID NO: 22590 - DNA, 306 bp, Homo sapiens; identical to SEQ ID NO: 6472
  chr8:97172433-97172739
  hypo

SEQ ID NO: 22591 - DNA, 720 bp, Homo sapiens; identical to SEQ ID NO: 6473
  chr8:97172821-97173541
  hypo

SEQ ID NO: 22592 - DNA, 130 bp, Homo sapiens
  chr8:97339834-97339964
  hypo
tcccctggcctggtaagagagcgcacacggagcttgagattaatgcagaagcaaagatcccgggtgctggttaataagcttttccaggagcgtggttgtctgctcggccgtcattaatttgaatgctcat

SEQ ID NO: 22593 - DNA, 77 bp, Homo sapiens
  chr8:98307767-98307844
  hypo
tggcttccaggaatgtttcaccgatggctggcacttgcaagaaatcagggagatggggtcggaggaggagccaagat

SEQ ID NO: 22594 - DNA, 23 bp, Homo sapiens
  chr8:98616566-98616589
  hypo
tcccgctcccgctcccgctcccg

SEQ ID NO: 22595 - DNA, 37 bp, Homo sapiens
  chr8:98798631-98798668
  hypo
aacttaaaaaaaaaacaaggccgggtgtggtggctca

SEQ ID NO: 22596 - DNA, 36 bp, Homo sapiens
  chr8:98798907-98798943
  hypo
cagagcgagactcccgtctcagaaaaaaaaaaaaaa

SEQ ID NO: 22597 - DNA, 252 bp, Homo sapiens; identical to SEQ ID NO: 6483
  chr8:98881114-98881366
  hypo

SEQ ID NO: 22598 - DNA, 846 bp, Homo sapiens; identical to SEQ ID NO: 6486
  chr8:99438952-99439798
  hypo

SEQ ID NO: 22599 - DNA, 721 bp, Homo sapiens; identical to SEQ ID NO: 6490
  chr8:99953841-99954562
  hypo

SEQ ID NO: 22600 - DNA, 249 bp, Homo sapiens; identical to SEQ ID NO: 6491
  chr8:99954686-99954935
  hypo

SEQ ID NO: 22601 - DNA, 1086 bp, Homo sapiens; identical to SEQ ID NO: 6494
  chr8:99956680-99957766
  hypo

SEQ ID NO: 22602 - DNA, 28 bp, Homo sapiens
  chr8:100118364-100118392
  hypo
aaaacacatagctggccgggtgtggtgg

SEQ ID NO: 22603 - DNA, 53 bp, Homo sapiens
  chr8:100245265-100245318
  hypo
tgtgggaggcctcacttgctgcgctgtgaggcgactccctgagggtatttcta

SEQ ID NO: 22604 - DNA, 30 bp, Homo sapiens
  chr8:100286615-100286645
  hypo
gcgttttacaaggagcgttactgaaacaag

SEQ ID NO: 22605 - DNA, 175 bp, Homo sapiens
  chr8:100353991-100354166
  hypo
gggtcaaacccccaggcgtcccaccagagcccacgtggcactgggctgcacaggaggaaagaagatttaacgcaaaatagagaccatagtcaagaggcctcctccactagctgcaaggccaaaccgcagcctggcctggacagcgcagacacaaggctcccgactggggctggga

SEQ ID NO: 22606 - DNA, 30 bp, Homo sapiens
  chr8:100716056-100716086
  hypo
cactccttagatttcgacaaacgagcacac

SEQ ID NO: 22607 - DNA, 424 bp, Homo sapiens
  chr8:100796508-100796932
  hypo
atccatgttggctttcgtatcctttttctttcagaacaaatgccctgaggtagaggagttggtcttcagccattttgtgatctgtaatgacacacaggagacactgcggtttggccaggtggatactgatgaaaatattctgctggcgagtctccacagtcaccagtacagctggcgctctcacaaatccccacaggtatttgagaaacacccttacaaacagccattgttaaggttggggattcatttcttctgcacttgtgtgcctgtccagttatttccctttttaagtctccgaaggaaccacacagcgtagctacatctgacggaaacccaagagtgtttagagatgggagcacacgcttctcttggaatggagcattttcctgtttagcactggtgcttggggcgggggcagcagggt

SEQ ID NO: 22608 - DNA, 57 bp, Homo sapiens
  chr8:100851149-100851206
  hypo
aactaaatgccagtgcggctgtagcgccaaatgacagagggtcggagagagggctgg

SEQ ID NO: 22609 - DNA, 231 bp, Homo sapiens
  chr8:100882015-100882246
  hypo
taaaacttttattaccgaactgaaggttttaaaaccactaactcttagtctaatgactatgcgtcgtttgtaaacatttacaagccctcagaaagcacacatgctgtaccatctttggtgctggagagtctatgtaaaggcctatgtggctgctgctgggtgccctcatttggtgctggcaccagggagagcatgtcataaaccaggggccccaagcgtgctcataaatgt

SEQ ID NO: 22610 - DNA, 80 bp, Homo sapiens
  chr8:100900795-100900875
  hypo
cgtcttgaaaaaattaaaataaaaagaggcagaagcacaagtgctgggggccatcattacatgtacggttaatttggact

SEQ ID NO: 22611 - DNA, 30 bp, Homo sapiens
  chr8:101299821-101299851
  hypo
tcacttaatatcaagcgaatatcatgggga

SEQ ID NO: 22612 - DNA, 30 bp, Homo sapiens
  chr8:101300172-101300202
  hypo
ttatcttttttcctccgaaacagggagcct

SEQ ID NO: 22613 - DNA, 22 bp, Homo sapiens
  chr8:101308604-101308626
  hypo
ttacaggcgtaagccaccacga

SEQ ID NO: 22614 - DNA, 39 bp, Homo sapiens
  chr8:101726913-101726952
  hypo
gtgactgcactccagcccgggtgacagagcaagagtcaa

SEQ ID NO: 22615 - DNA, 40 bp, Homo sapiens
  chr8:101735882-101735922
  hypo
aaaaagaggataaaatgtgaccgggcgcggtggctcactc

SEQ ID NO: 22616 - DNA, 110 bp, Homo sapiens
  chr8:101744185-101744295
  hypo
aggtgtcagttgtttgcctgccgacgctctcatgtgaactaagagaatggaaccggacattcgtgaagtgctcagtaagcaaacaaaacgaagacttcttgtgagggaca

SEQ ID NO: 22617 - DNA, 24 bp, Homo sapiens
  chr8:101955919-101955943
  hypo
aagacactgtccaggccgggcgcg

SEQ ID NO: 22618 - DNA, 191 bp, Homo sapiens
  chr8:102039359-102039550
  hypo
cctgcagccaatgcctcggtcagccagtgcacctgtactgtctctcctcttgggatagggtccctctccatcaggtacaatatatgggaaatcgaggggtggcctttgtcccagctgtcttagtcaccgcattcttcaggtcactaaccgccccattggagagggttcacgcagctcacgtgtaaacggac

SEQ ID NO: 22619 - DNA, 197 bp, Homo sapiens
  chr8:102190374-102190571
  hypo
attgctctgtgtcatacgttttcttacgaataacagggcttatagtttcacttgagtaatttttccaccctcttaaactgcagtttaaggtcttgatgaggttaccaaatctctgacaagcatatattctttccagtcttcacagggcacgcttcggcccttgctaggagtccatcgttctgccataacatttgctc

SEQ ID NO: 22620 - DNA, 31 bp, Homo sapiens; identical to SEQ ID NO: 6510
  chr8:102217068-102217099
  hypo

SEQ ID NO: 22621 - DNA, 419 bp, Homo sapiens; identical to SEQ ID NO: 6513
  chr8:102505566-102505985
  hypo

SEQ ID NO: 22622 - DNA, 52 bp, Homo sapiens; identical to SEQ ID NO: 6514
  chr8:102506365-102506417
  hypo

SEQ ID NO: 22623 - DNA, 30 bp, Homo sapiens
  chr8:102570873-102570903
  hypo
ctgtgcactatccccggggagatggggaag

SEQ ID NO: 22624 - DNA, 30 bp, Homo sapiens; identical to SEQ ID NO: 6515
  chr8:102636867-102636897
  hypo

SEQ ID NO: 22625 - DNA, 30 bp, Homo sapiens
  chr8:102690271-102690301
  hypo
tcagcacacttccggcgaagacaagcgagg

SEQ ID NO: 22626 - DNA, 111 bp, Homo sapiens
  chr8:103572795-103572906
  hypo
gaaaggtatgtgtgtcggctgagcgggagaacaggtacgactgccttggatcgaaaaagtacagctacatgaacatctgcaaagagttcagcttgccgccctgtgtggatg

SEQ ID NO: 22627 - DNA, 18 bp, Homo sapiens
  chr8:103629531-103629549
  hypo
cgggtgcggtggctcacg

SEQ ID NO: 22628 - DNA, 34 bp, Homo sapiens
  chr8:103629848-103629882
  hypo
taaaggctttgctggatcacgtagacctaacaaa

SEQ ID NO: 22629 - DNA, 34 bp, Homo sapiens
  chr8:103878118-103878152
  hypo
tggttgcaaatgagattgaaacggtagattaggg

SEQ ID NO: 22630 - DNA, 31 bp, Homo sapiens
  chr8:103916555-103916586
  hypo
aaccactggatgggcccggtggctcacacct

SEQ ID NO: 22631 - DNA, 46 bp, Homo sapiens
  chr8:103932059-103932105
  hypo
tgtgataggaggggtacggtttcagcaagagcgaaggcttagaggt

SEQ ID NO: 22632 - DNA, 143 bp, Homo sapiens
  chr8:103943075-103943218
  hypo
cccggcctgagatgaacatttgaattggtagatggagtaaagcagactcccccttaccaatacgaatggatgttatccgatcagctaaggtctgaatagaacaaaaaggctgaccctcccacgagcaagagagaactcctcct

SEQ ID NO: 22633 - DNA, 121 bp, Homo sapiens
  chr8:104055448-104055569
  hypo
tgaagattctcatttctctacatccttgccagcacttgttattatttttattatttgtctttttgattatagccatcccagggggtatgagataatatctttgttttttttgttttttttg

SEQ ID NO: 22634 - DNA, 112 bp, Homo sapiens
  chr8:104086565-104086677
  hypo
tcagttgctgagcatgcgctatgaaccaggcgtgttaggcgctggggatttaatgcaagcagtcagatgggcacagtgcctacctaccttgatggggcgtgcagcctggtga

SEQ ID NO: 22635 - DNA, 2913 bp, Homo sapiens; identical to SEQ ID NO: 6520
  chr8:104511020-104513933
  hypo

SEQ ID NO: 22636 - DNA, 58 bp, Homo sapiens; identical to SEQ ID NO: 6525
  chr8:106331015-106331073
  hypo

SEQ ID NO: 22637 - DNA, 173 bp, Homo sapiens; identical to SEQ ID NO: 6526
  chr8:106331083-106331256
  hypo

SEQ ID NO: 22638 - DNA, 91 bp, Homo sapiens
  chr8:106453047-106453138
  hypo
ctgctatgctatcagtgcctccggtggctgaactcaaatcagaggccaagggacgggagcggtggctcacgcctgtaatcccagcaccatg

SEQ ID NO: 22639 - DNA, 30 bp, Homo sapiens; identical to SEQ ID NO: 6529
  chr8:106490682-106490712
  hypo

SEQ ID NO: 22640 - DNA, 24 bp, Homo sapiens
  chr8:106987623-106987647
  hypo
aaaatattagaacaggccaggcgc

SEQ ID NO: 22641 - DNA, 1732 bp, Homo sapiens; identical to SEQ ID NO: 6531
  chr8:107669365-107671097
  hypo

SEQ ID NO: 22642 - DNA, 43 bp, Homo sapiens
  chr8:108454320-108454363
  hypo
gctgggggagtcccatcacctcgtagatccagaggtcatgttt

SEQ ID NO: 22643 - DNA, 402 bp, Homo sapiens; identical to SEQ ID NO: 6536
  chr8:109799337-109799739
  hypo

SEQ ID NO: 22644 - DNA, 78 bp, Homo sapiens; identical to SEQ ID NO: 6537
  chr8:109799888-109799966
  hypo

SEQ ID NO: 22645 - DNA, 30 bp, Homo sapiens
  chr8:109800364-109800394
  hypo
agcacagtggtattcgttgaatgtatgaat

SEQ ID NO: 22646 - DNA, 26 bp, Homo sapiens
  chr8:110406105-110406131
  hypo
tcttaaaatcaactgtagggccgggc

SEQ ID NO: 22647 - DNA, 30 bp, Homo sapiens; identical to SEQ ID NO: 6539
  chr8:110704065-110704095
  hypo

SEQ ID NO: 22648 - DNA, 43 bp, Homo sapiens
  chr8:110767245-110767288
  hypo
gattacaggcgtgagccaccgcgcctggccttttatttctatt

SEQ ID NO: 22649 - DNA, 80 bp, Homo sapiens
  chr8:114691129-114691209
  hypo
caggcgtgagccactgcgcccggcctatttcattgtttttacttttttctaagtgttacgtattgaaccaatattacttg

SEQ ID NO: 22650 - DNA, 35 bp, Homo sapiens
  chr8:114888154-114888189
  hypo
ctttttaaaaagtgtctgttccgggcctggcgcgg

SEQ ID NO: 22651 - DNA, 35 bp, Homo sapiens
  chr8:116345685-116345720
  hypo
cagagcgagactccgtcccccaccaccccccccaa

SEQ ID NO: 22652 - DNA, 61 bp, Homo sapiens
  chr8:117336910-117336971
  hypo
aaataacatgtgattttagtgcggcagtattgaagccaacgtctcatgtaaagatttaggg

SEQ ID NO: 22653 - DNA, 10 bp, Homo sapiens
  chr8:117421318-117421328
  hypo
aaagcgtctt

SEQ ID NO: 22654 - DNA, 30 bp, Homo sapiens
  chr8:117667108-117667138
  hypo
cacttgccttatatcgaggaagtacaaagt

SEQ ID NO: 22655 - DNA, 1759 bp, Homo sapiens; identical to SEQ ID NO: 6554
  chr8:117858171-117859930
  hypo

SEQ ID NO: 22656 - DNA, 85 bp, Homo sapiens; identical to SEQ ID NO: 6555
  chr8:117861183-117861268
  hypo

SEQ ID NO: 22657 - DNA, 162 bp, Homo sapiens; identical to SEQ ID NO: 6556
  chr8:117862855-117863017
  hypo

SEQ ID NO: 22658 - DNA, 150 bp, Homo sapiens; identical to SEQ ID NO: 6557
  chr8:117864185-117864335
  hypo

SEQ ID NO: 22659 - DNA, 175 bp, Homo sapiens; identical to SEQ ID NO: 6558
  chr8:117864772-117864947
  hypo

SEQ ID NO: 22660 - DNA, 225 bp, Homo sapiens; identical to SEQ ID NO: 6559
  chr8:117866482-117866707
  hypo

SEQ ID NO: 22661 - DNA, 124 bp, Homo sapiens; identical to SEQ ID NO: 6560
  chr8:117868403-117868527
  hypo

SEQ ID NO: 22662 - DNA, 134 bp, Homo sapiens; identical to SEQ ID NO: 6561
  chr8:117868876-117869010
  hypo

SEQ ID NO: 22663 - DNA, 222 bp, Homo sapiens; identical to SEQ ID NO: 6562
  chr8:117869490-117869712
  hypo

SEQ ID NO: 22664 - DNA, 108 bp, Homo sapiens; identical to SEQ ID NO: 6563
  chr8:117870589-117870697
  hypo

SEQ ID NO: 22665 - DNA, 113 bp, Homo sapiens; identical to SEQ ID NO: 6564
  chr8:117874066-117874179
  hypo

SEQ ID NO: 22666 - DNA, 131 bp, Homo sapiens; identical to SEQ ID NO: 6565
  chr8:117875367-117875498
  hypo

SEQ ID NO: 22667 - DNA, 177 bp, Homo sapiens; identical to SEQ ID NO: 6566
  chr8:117878823-117879000
  hypo

SEQ ID NO: 22668 - DNA, 114 bp, Homo sapiens; identical to SEQ ID NO: 6567
  chr8:117886848-117886962
  hypo

SEQ ID NO: 22669 - DNA, 39 bp, Homo sapiens; identical to SEQ ID NO: 6568
  chr8:117887066-117887105
  hypo

SEQ ID NO: 22670 - DNA, 109 bp, Homo sapiens
  chr8:118531659-118531768
  hypo
cctggtttgttcagtacgctatcttcactcctagcacccagcacataataggtgctcagccaatatttgtcgaatggtaattaccgaagacctgcgaattactatgttt

SEQ ID NO: 22671 - DNA, 45 bp, Homo sapiens
  chr8:118532122-118532167
  hypo
ataaaatatcagacagtaggccgggcgcggtggcttatgcctgta

SEQ ID NO: 22672 - DNA, 25 bp, Homo sapiens
  chr8:119057046-119057071
  hypo
ggactacaggcgccccaccgcatgc

SEQ ID NO: 22673 - DNA, 31 bp, Homo sapiens
  chr8:119096829-119096860
  hypo
ccagagcccagctcctcgaaatgctgggtcc

SEQ ID NO: 22674 - DNA, 208 bp, Homo sapiens; identical to SEQ ID NO: 6570
  chr8:119123497-119123705
  hypo

SEQ ID NO: 22675 - DNA, 22 bp, Homo sapiens
  chr8:120844122-120844144
  hypo
tggtgcggtggctcacgcctgt

SEQ ID NO: 22676 - DNA, 209 bp, Homo sapiens
  chr8:120846158-120846367
  hypo
aaataaatagactacatagagatatatagactgtgtatatatatcatataatccatataaatgcagaaacatttattgaaagacatttcgaagccatcgtgtttgtatttcatgttcatgacaataaaacttgtaaacttcagtaacagttaaaccttctttaattatggattagccattaacatttttgaaacgtggaccatttaacc

SEQ ID NO: 22677 - DNA, 30 bp, Homo sapiens
  chr8:120846572-120846602
  hypo
gtttttttcccaaagcgcatgtctacgcca

SEQ ID NO: 22678 - DNA, 25 bp, Homo sapiens
  chr8:121464786-121464811
  hypo
atagccaggcacagtggctcacgcc

SEQ ID NO: 22679 - DNA, 30 bp, Homo sapiens; identical to SEQ ID NO: 6576
  chr8:121706824-121706854
  hypo

SEQ ID NO: 22680 - DNA, 31 bp, Homo sapiens; identical to SEQ ID NO: 6578
  chr8:121824597-121824628
  hypo

SEQ ID NO: 22681 - DNA, 5 bp, Homo sapiens
  chr8:123508180-123508185
  hypo
aaata

SEQ ID NO: 22682 - DNA, 34 bp, Homo sapiens
  chr8:123695512-123695546
  hypo
ggcggcaggccagttgcgccgaaggtggagtgag

SEQ ID NO: 22683 - DNA, 262 bp, Homo sapiens
  chr8:123830691-123830953
  hypo
catttgagagctgatcgatgctggacccgctccctcctccctctctgcctagtttctcgcccctcagattaggctctgtctgtggctagcttgaggggtggccatgaggcctaaatgagggcgtatctatatggagacagcacttggcctggggctctcccacattccctgttagtctctcacacaggcacaaaaccttgctttaaaaatgtgtcttacgatgaaacttggcatccaggacgcgccccgtgaggaatttgtt

SEQ ID NO: 22684 - DNA, 30 bp, Homo sapiens
  chr8:123838887-123838917
  hypo
ttgttcacagcgcacggcactgctctagcc

SEQ ID NO: 22685 - DNA, 102 bp, Homo sapiens
  chr8:123874761-123874863
  hypo
tgtgtgcagcaagctcccagccggtacgattgcacccttgaatagtaataccccaggtcaggtgtgcgaggggcctggcgcgtggtaagtactcagtcaaca

SEQ ID NO: 22686 - DNA, 298 bp, Homo sapiens
  chr8:123966039-123966337
  hypo
ccctcagaggccacctcagaccggtcagagggcagcagccgggacggccagggtagcgacgagaacgaggagtcgagcgttgtggattacgtggaggtgacggtcggggaggaggatgcgatctcagatagatcagatagctggagtcaggctgcggcagaaggtgtgtcggaactggctgaatcagactccgactgcgtccctgcagaggctggccaggcctagacaggtaattccacctgctcacccaggcagcaggggagaacgcagcttgctttcttttcgttgccagggttaa

SEQ ID NO: 22687 - DNA, 88 bp, Homo sapiens
  chr8:124014369-124014457
  hypo
ttgggaactcaacttgtctctcgcctcagcaccctcccagggtgcaccattaatcaggatcggccacgggtggagttagagcagtgac

SEQ ID NO: 22688 - DNA, 55 bp, Homo sapiens
  chr8:124186902-124186957
  hypo
ctattcacctaagtgctcattcggtgccttcgacgtgccagccccaaactgggat

SEQ ID NO: 22689 - DNA, 31 bp, Homo sapiens
  chr8:124195677-124195708
  hypo
cagataattggggcttcggatggaggggctt

SEQ ID NO: 22690 - DNA, 83 bp, Homo sapiens
  chr8:124254705-124254788
  hypo
tgaatgcgtactctccgtgcttccggacaagagacactaccaccaataacaaagaccggagtcattcacgcatttatgaaaga

SEQ ID NO: 22691 - DNA, 80 bp, Homo sapiens
  chr8:124255228-124255308
  hypo
accacacactgctacttttttgtattttcagtagagaggggttctttcatgttgaccaggttcagcgttctttcttcaac

SEQ ID NO: 22692 - DNA, 30 bp, Homo sapiens
  chr8:124255872-124255902
  hypo
aggattcctgggctcgggtgtttccagcct

SEQ ID NO: 22693 - DNA, 39 bp, Homo sapiens
  chr8:124288873-124288912
  hypo
gagccaccacacccggccgatgactaggttttgtgtgtg

SEQ ID NO: 22694 - DNA, 30 bp, Homo sapiens
  chr8:124373840-124373870
  hypo
ggaggaagatgaagtcgagtcactactgtg

SEQ ID NO: 22695 - DNA, 43 bp, Homo sapiens
  chr8:124412834-124412877
  hypo
gccagggcaccggctgcgtgcccgaggacgggctcaccacgca

SEQ ID NO: 22696 - DNA, 72 bp, Homo sapiens
  chr8:124532973-124533045
  hypo
aaaatccatcagttcacgttacttctttgcttaaaatcctcaaatggcttctccttgcgcttaggaaaaaac

SEQ ID NO: 22697 - DNA, 31 bp, Homo sapiens
  chr8:124553866-124553897
  hypo
tatcaggatcgacctccgcagccagatcagc

SEQ ID NO: 22698 - DNA, 30 bp, Homo sapiens
  chr8:124630593-124630623
  hypo
gagtgaagctgcttccgtacagccgctccc

SEQ ID NO: 22699 - DNA, 42 bp, Homo sapiens
  chr8:124804119-124804161
  hypo
aaaagaaattctctgccgggtgtggtggctcatgcctgtatt

SEQ ID NO: 22700 - DNA, 30 bp, Homo sapiens
  chr8:125266643-125266673
  hypo
gacaatacatttgacgatggatcaagttct

SEQ ID NO: 22701 - DNA, 31 bp, Homo sapiens
  chr8:125364993-125365024
  hypo
cagaagcctagaacagcgttttagagctcaa

SEQ ID NO: 22702 - DNA, 38 bp, Homo sapiens
  chr8:125411826-125411864
  hypo
aacaagagcgaaacttcgtttcaaaaatcaaaaacaga

SEQ ID NO: 22703 - DNA, 62 bp, Homo sapiens
  chr8:125498235-125498297
  hypo
attgagctgcttcctcgaaaaggtccctcgctgtggatggcacttatcgttctacagctaac

SEQ ID NO: 22704 - DNA, 70 bp, Homo sapiens
  chr8:125498531-125498601
  hypo
catgtatcgaatttacggattacagttattgatggaggacacatggaagaggattcgtttcccagacata

SEQ ID NO: 22705 - DNA, 23 bp, Homo sapiens
  chr8:125553086-125553109
  hypo
tctagagctgtagttcgaattgc

SEQ ID NO: 22706 - DNA, 93 bp, Homo sapiens
  chr8:125574050-125574143
  hypo
ccaagcaccccaggtgggacacgcactctcaagcactctcaaactatagccgtggctcttggctctgagtgcgtttaaaattgagtgtgtatc

SEQ ID NO: 22707 - DNA, 169 bp, Homo sapiens
  chr8:125580647-125580816
  hypo
gtacagaatcggccacgttcttcaatcaaagccttccggacagcctgcttttctgtttcttccaataagagatacttatcattgacatcttggagagcactgtccaactgaggctggatatcacctctccctgcaaaaaacagagacccaagcacggcttgctgaaata

SEQ ID NO: 22708 - DNA, 30 bp, Homo sapiens
  chr8:125590217-125590247
  hypo
gcataggctggatacggctgggggatgagc

SEQ ID NO: 22709 - DNA, 120 bp, Homo sapiens
  chr8:125673726-125673846
  hypo
aggtgaacacaaaaggagccccgcagctgggaagatacgtgtgaccatcagcttgaaaactggacaggccacagggtcaggtagtggagtcctagccacgccaaaggtgcagacactgct

SEQ ID NO: 22710 - DNA, 102 bp, Homo sapiens
  chr8:125680349-125680451
  hypo
ggctttcacctccaccgctgggctctaaaaccaagatgccaacaggcccggccagcaactgaggaggacacagcgcaagcggccacacgtgtgggctgtagg

SEQ ID NO: 22711 - DNA, 31 bp, Homo sapiens
  chr8:125680996-125681027
  hypo
ccattcttagctatatcgacaggatctcacc

SEQ ID NO: 22712 - DNA, 37 bp, Homo sapiens
  chr8:126007979-126008016
  hypo
aagtgttgtcaggaagccaaaacgagctaatatatga

SEQ ID NO: 22713 - DNA, 324 bp, Homo sapiens
  chr8:126044436-126044760
  hypo
gttttgtgacaagaagtcccacgtagtcctggttggtcttctgtaccttgtacactgctccaccgtggagcagataaactggccaatcagcgccaggaactgctcggtgtaccgggaatggaactgcttcagcagagtgagcagtcccaggacaagtggtggccaatcaaccgggtcggtcggttttcggcagaccattcctgcaagggaacaagttgcaacaccatatgaagtacttgccttcagcaacattcattaaataccaacgctgtgaaggtcaaaatgtttggggcccatattctcgctggcagatgatattttgga

SEQ ID NO: 22714 - DNA, 65 bp, Homo sapiens
  chr8:126238722-126238787
  hypo
tgtacccctcatatctgcagccgggatcagtcaagatctcattcgtgatgcttgggtgccttggg

SEQ ID NO: 22715 - DNA, 18 bp, Homo sapiens
  chr8:126371204-126371222
  hypo
aacagttgaaatgtcaga

SEQ ID NO: 22716 - DNA, 34 bp, Homo sapiens
  chr8:127464728-127464762
  hypo
tttttttgtttgtttgagactcgagtctcgctct

SEQ ID NO: 22717 - DNA, 45 bp, Homo sapiens
  chr8:127465001-127465046
  hypo
ttacaggcgtgagccaccgcacccggcctccaaagacccttttct

SEQ ID NO: 22718 - DNA, 31 bp, Homo sapiens; identical to SEQ ID NO: 6587
  chr8:127570026-127570057
  hypo

SEQ ID NO: 22719 - DNA, 737 bp, Homo sapiens; identical to SEQ ID NO: 6588
  chr8:127570150-127570887
  hypo

SEQ ID NO: 22720 - DNA, 19 bp, Homo sapiens
  chr8:128323798-128323817
  hypo
aataaaaagtaagaaaaat

SEQ ID NO: 22721 - DNA, 30 bp, Homo sapiens
  chr8:128810693-128810723
  hypo
cttttctgcagccacggagcagtcagagac

SEQ ID NO: 22722 - DNA, 30 bp, Homo sapiens
  chr8:128832066-128832096
  hypo
tttgccaagtaattcgccctcatcattaac

SEQ ID NO: 22723 - DNA, 781 bp, Homo sapiens
  chr8:128871968-128872749
  hypo
gagtcacctggggttgaatctcgggcctgctatttattgaacctgtcctagcctcaatcgccttatctgtaccatggggatgataccatctaggtcgaaggtagttgcaggagattctcatgcacggaggcccttggccgtcatttgtttctttgtctctacaagcagagaggctgagtcatacagatcctgaggggagatcactttctcttccctcctttcgtgtgtcatctccacctgggtgtggtgagccccaggaataatgctgtgacatcaagccccgtgaacacctcctttcacacggaccccgtgactggctgcggctgccagcggtgatgagaactgatgacactccagggctaccaggaacggtgtgtgtgcctctgggcagggccacttcctagaaccatggggctgctctgtgaagagaaccggctcccagtgagctccaggagacgaggagcaggtcctggtggcggaggtgctggcgcaggaggccggctcctggcagaatcggcttccagctctgggcactggggtgcggtgtgggaccagcaacaggctgctcctctgccaggaaccgccagaaccaaagtcttctcgaaggcatcttcagaaggcaagcacagggctgagcactccggagaggagcctttgggggaaaactttttctcggagcttcggagctcagggagtactatgggggagattcactaggttgatgctttgctgataggcagccctgtagagaagacaaggcagctgggcatggtggctcagg

SEQ ID NO: 22724 - DNA, 653 bp, Homo sapiens
  chr8:128888833-128889486
  hypo
gatattagcattacccgtacactcttcccatctcctggcccctccagttctgaagggatggggactaagtgggatctgtcctctaagcaggcggaggagggaaccatgtcagctcctaggtgcccccagagcacctgctgccagttttccacaactcctgtcctccgtggcgcttgggtgacagcagagcagagccgatgtgcctgctcctggtcatgggctgttcgtgctgtcatcgctttcatttgccccatccccccaatttggacttacccagaatccttgggcaagctagatggctgccaaagtttacttagcgagatgtgcctgcgtgacttgagtagagacctgcttctgagaaagtcagaagtgcattccaaagtcaggagcgtgacctccccggaagcccagctaatccaggttttaaagaggagttggaacaaaggtggtgcttatgggatgtatggagctgtgggatgtgggagaggacaggtttagcagagtggcgtggtggaaagtttcctctcgccgaggaggacaactccccagcgcctgagacagcgggagctcagagcgcctagaatgtgcccagattctaaagtgaagcaggctgtggtgtgatgatggcccccgaggggacttgcagtcttatg

SEQ ID NO: 22725 - DNA, 457 bp, Homo sapiens
  chr8:128893132-128893589
  hypo
ctgcgctcagctttccagtcatttcttaagcgatgttgagttcccaagcactgtgccggacacgcatgggttgctggaggctggcagaacccgaatgtcagtattcctgaagaatggctctaagcaatgtaccttgcagagctcaagcagggctctgctgcatcatgcccatgaaggtgcctgctggtagaaggctggttctatactggctgcttgcctcctccttgtggagacccacattgtgtctggcaaagtgcagaaggaaatcaagcccttaataacattagggaactggactgggttcggtttgcatctcccgagtctgactcgtgggagtaaccaccataatagcagcgctgtgctgttgagggtgactttgactatctgcttgtgttgtgagcccactgtgtgccggagcactctctatacattcagtcttgtccgcagatgaactcca

SEQ ID NO: 22726 - DNA, 42 bp, Homo sapiens
  chr8:128896286-128896328
  hypo
catgtcatatgtgtatcgatagcttgacgaatgttctcaaac

SEQ ID NO: 22727 - DNA, 30 bp, Homo sapiens
  chr8:128922506-128922536
  hypo
gaaaggtacagggtcgtggaaacatgcaca

SEQ ID NO: 22728 - DNA, 297 bp, Homo sapiens
  chr8:128931127-128931424
  hypo
gccctggaatacctccactgacggggcactcactaccactgaaagatggtgtgcagaattctaatgttcttcctctcgcggggtcgtgggggctttcttccagttctctgggttctgatcgttggggctgtcctgacacccttcttcagatgaccgctgtcaggttggtgaaggcagtgcgcgttgggccttccctccctagagatgtgattgcacgtcgggtaccaggagcctggccagccctcagcttctgctaaccagggagcagtgaagcccggtttacttttgttggcttgt

SEQ ID NO: 22729 - DNA, 149 bp, Homo sapiens
  chr8:128957471-128957620
  hypo
aacactgctgggaggaacatccgcacatgctttcttggtcacttatgtgagagctcatccaggatttataccctgaggcgacttcactgccgtggaggctaaggaacattttctgtttcataagacgcgatcacattgccctccagaac

SEQ ID NO: 22730 - DNA, 76 bp, Homo sapiens
  chr8:128958208-128958284
  hypo
ctaccagcctcgctgcgggttggaaaaaagaaagagttagtgtaacacatgtgaatgtgtacgaaggggtttagag

SEQ ID NO: 22731 - DNA, 30 bp, Homo sapiens
  chr8:128961226-128961256
  hypo
atagccgactttcatcggaggctcactgcg

SEQ ID NO: 22732 - DNA, 30 bp, Homo sapiens
  chr8:128962708-128962738
  hypo
caaccactgctccacgctgcctccactcct

SEQ ID NO: 22733 - DNA, 76 bp, Homo sapiens
  chr8:129069936-129070012
  hypo
tttgacatccatcatcgtttaaattccaggtcgtcatccttgtagaacgaggttcggatctcggcattaaatctcc

SEQ ID NO: 22734 - DNA, 31 bp, Homo sapiens
  chr8:129076175-129076206
  hypo
gtgtccttcaaaacatcgtgttgtaaatagt

SEQ ID NO: 22735 - DNA, 30 bp, Homo sapiens; identical to SEQ ID NO: 6589
  chr8:130647087-130647117
  hypo

SEQ ID NO: 22736 - DNA, 188 bp, Homo sapiens
  chr8:131064015-131064203
  hypo
tagttgtgacagctacgtgacagaagtgctgtccacacgacaacatgtaagcctcgtgcccctccaccctcttcttgccctgttcacatcaacgggcgcacaagtggacgtggtggaggtggaatgcggaaggtggaggacagaaaggggccgaaggcccacagtttgtaagccggggcaagtgccac

SEQ ID NO: 22737 - DNA, 31 bp, Homo sapiens; identical to SEQ ID NO: 6590
  chr8:131081757-131081788
  hypo

SEQ ID NO: 22738 - DNA, 339 bp, Homo sapiens
  chr8:131085737-131086076
  hypo
aagcagtccatgaccacggcctgtggtgctcaacatgctgaggtggaggagacgagaaagcagttaagggggtcgggaaggaactgacagtgcagcgagagtggacaggtagtgtccagaacacaagtacatagcgttccaggcaggggagaagcagtgactgtgccaagagctgcagacggccaaggaagacagggctgaagcttaaccgctggcccatcggcttgcagagggatggaaagagaggatggatggatcaatcttggctctgagcattaacagctgtgaacttcacacacagagacaatgcgatggtgtacacctcgtgatagaacacac

SEQ ID NO: 22739 - DNA, 30 bp, Homo sapiens
  chr8:131300212-131300242
  hypo
tctagtcacctccacgcacagtcaaccaag

SEQ ID NO: 22740 - DNA, 31 bp, Homo sapiens
  chr8:131412441-131412472
  hypo
acacactttccactacgcggacttcttagaa

SEQ ID NO: 22741 - DNA, 30 bp, Homo sapiens; identical to SEQ ID NO: 6591
  chr8:131455261-131455291
  hypo

SEQ ID NO: 22742 - DNA, 309 bp, Homo sapiens; identical to SEQ ID NO: 6592
  chr8:132051990-132052299
  hypo

SEQ ID NO: 22743 - DNA, 117 bp, Homo sapiens; identical to SEQ ID NO: 6593
  chr8:132052398-132052515
  hypo

SEQ ID NO: 22744 - DNA, 1994 bp, Homo sapiens; identical to SEQ ID NO: 6594
  chr8:132052589-132054583
  hypo

SEQ ID NO: 22745 - DNA, 10 bp, Homo sapiens
  chr8:133492100-133492110
  hypo
aaatgtgcac

SEQ ID NO: 22746 - DNA, 503 bp, Homo sapiens; identical to SEQ ID NO: 6598
  chr8:133492127-133492630
  hypo

SEQ ID NO: 22747 - DNA, 426 bp, Homo sapiens; identical to SEQ ID NO: 6599
  chr8:133492712-133493138
  hypo

SEQ ID NO: 22748 - DNA, 95 bp, Homo sapiens
  chr8:133686739-133686834
  hypo
gccatatggggagctcaaaaacgttgtcgatatcaaaatggttcatacaatataaataacttacccgcatcaccttgcagtttgttagtatattc

SEQ ID NO: 22749 - DNA, 30 bp, Homo sapiens
  chr8:134003881-134003911
  hypo
ccagcaagacatgccggttagcacaccctg

SEQ ID NO: 22750 - DNA, 30 bp, Homo sapiens
  chr8:134218264-134218294
  hypo
ggggcccgagctcccgggcttcttcactgc

SEQ ID NO: 22751 - DNA, 30 bp, Homo sapiens
  chr8:134224875-134224905
  hypo
ccagcggaaggattcgggcaattggtttaa

SEQ ID NO: 22752 - DNA, 31 bp, Homo sapiens
  chr8:134232708-134232739
  hypo
tgctgggagccatccccgggattggggcatg

SEQ ID NO: 22753 - DNA, 30 bp, Homo sapiens; identical to SEQ ID NO: 6601
  chr8:134232949-134232979
  hypo

SEQ ID NO: 22754 - DNA, 30 bp, Homo sapiens
  chr8:134251103-134251133
  hypo
gcagctgggcaggccgcctagcaggagacc

SEQ ID NO: 22755 - DNA, 143 bp, Homo sapiens
  chr8:134254199-134254342
  hypo
aggacagagcacttccaattccgacacatgccccgacccactgcacacggggaatgccatactcactgtatcccatgccctgcacgaagtacttgaaggcctcagcgagcttggccggctgcgagagacaaggagagaaaatg

SEQ ID NO: 22756 - DNA, 125 bp, Homo sapiens
  chr8:134278413-134278538
  hypo
gtcccccagacaatcagcctccgcggggccccaggcttctcagcacttgacccgcccgcaagcggcgcacactcaggcctcacgaggccacctcagctcagcacgctgcattgattttccaaaga

SEQ ID NO: 22757 - DNA, 31 bp, Homo sapiens
  chr8:134289833-134289864
  hypo
cagttctgaaaatggacgatagtgatggttg

SEQ ID NO: 22758 - DNA, 396 bp, Homo sapiens; identical to SEQ ID NO: 6602
  chr8:134308719-134309115
  hypo

SEQ ID NO: 22759 - DNA, 31 bp, Homo sapiens
  chr8:134330746-134330777
  hypo
gttccataggtacttccgcatacttacttgt

SEQ ID NO: 22760 - DNA, 206 bp, Homo sapiens
  chr8:134335638-134335844
  hypo
ctgcaggatgctggtgcagagcgctgttctgccaggtggcccagcccgacgggtgtctccctagcttctccgacagctttgccaccttgcacccacttgcccgcgtgctcagtcacgtcctcctcgtcggccgcgttccccaggcagctgtgtcagcctcccaaaatacaggcaagcctctggcctggggccggtgtctctggcct

SEQ ID NO: 22761 - DNA, 30 bp, Homo sapiens
  chr8:134467150-134467180
  hypo
taaataaaacagagcgggggctgaggaaag

SEQ ID NO: 22762 - DNA, 30 bp, Homo sapiens
  chr8:134470121-134470151
  hypo
accaggaaaaagtcacgcctcctcaaagca

SEQ ID NO: 22763 - DNA, 163 bp, Homo sapiens
  chr8:134478324-134478487
  hypo
ctggagcctctgtgggcggaggacagaaggtggtcaacctggctttgtggctccagcctcctggcagcagagcccctgagctacctgctgtcgtttactggggccctcctgttcacccttctctctgctgggcccccggagatggaggcggctcacacacaga

SEQ ID NO: 22764 - DNA, 30 bp, Homo sapiens
  chr8:134482028-134482058
  hypo
ggcagaaatgacctccgggctctgtgatgc

SEQ ID NO: 22765 - DNA, 32 bp, Homo sapiens
  chr8:134482374-134482406
  hypo
agtgctggccaggtgcggtggctcacgcctgt

SEQ ID NO: 22766 - DNA, 31 bp, Homo sapiens
  chr8:134507967-134507998
  hypo
tgttcctgtcctatatcgtaacccatagcat

SEQ ID NO: 22767 - DNA, 30 bp, Homo sapiens
  chr8:134519981-134520011
  hypo
gtagcaaattacgcccggtgaccctcggag

SEQ ID NO: 22768 - DNA, 31 bp, Homo sapiens; identical to SEQ ID NO: 6604
  chr8:134581318-134581349
  hypo

SEQ ID NO: 22769 - DNA, 30 bp, Homo sapiens
  chr8:135547977-135548007
  hypo
tcatctatctagtgcgcagagaacaaaagg

SEQ ID NO: 22770 - DNA, 31 bp, Homo sapiens
  chr8:135595330-135595361
  hypo
tgtgcccactgcccaccgagctcaccaccca

SEQ ID NO: 22771 - DNA, 31 bp, Homo sapiens; identical to SEQ ID NO: 6606
  chr8:135703767-135703798
  hypo

SEQ ID NO: 22772 - DNA, 117 bp, Homo sapiens
  chr8:135871436-135871553
  hypo
aggtgatggtcagtagcaccccggtgatgccgctggggggtccgatgttgggatccactggtgaggacgagagtcagtagaactgggttccggtccgtgtcacccacttgttatgtg

SEQ ID NO: 22773 - DNA, 30 bp, Homo sapiens; identical to SEQ ID NO: 6608
  chr8:136469758-136469788
  hypo

SEQ ID NO: 22774 - DNA, 28 bp, Homo sapiens
  chr8:138909174-138909202
  hypo
tttttttttttttttttgagacggagtc

SEQ ID NO: 22775 - DNA, 28 bp, Homo sapiens
  chr8:138909381-138909409
  hypo
tcttgacgtatatatgattatccccagt

SEQ ID NO: 22776 - DNA, 55 bp, Homo sapiens
  chr8:138910219-138910274
  hypo
cgcccggcaacatgcacctttaaatgaatatttcgttttattaatttatttcaat

SEQ ID NO: 22777 - DNA, 30 bp, Homo sapiens; identical to SEQ ID NO: 6609
  chr8:139301362-139301392
  hypo

SEQ ID NO: 22778 - DNA, 142 bp, Homo sapiens
  chr8:139889989-139890131
  hypo
cactttcacaaagacggcgccgcagcttgccccggatcttgtcgatggcattgaagtcggacacgtggaagacgtgggcggacttgggctctgaggcgatctcctccagctcctccttgagtgcctcgcccacgcccacggc

SEQ ID NO: 22779 - DNA, 491 bp, Homo sapiens
  chr8:140630646-140631137
  hypo
agtagtggggggcaagcttggcgctgaaggagttctgcggtgccaccgagcggccgccatagtcctgcgagcggtagcaggtgcaggagcacacagactgcaggtccgggacgtccgccttgtacctgggccggctgggccgcggctcctcagggatgtgaatgaccatgctgttgcggtttccggcgagggatgccctctcttcagcatcccgccgctcatcctcactgttcatggtcaagaacctgaggacgaccaggttgaggaaggccccgatgaccgtcagccccaccaggatatacataaagctaaaggccacgtagagcggcttcttctgcagggcacccttggtctgcagggccacgtagtccccgaacccaatggtagtcaacgtgatgaagcagtagtagtaggcgtggaagaagctccactcctcacactgggagaaggcggccgccccgatgcacagcgtccccatgcaggagaagaag

SEQ ID NO: 22780 - DNA, 530 bp, Homo sapiens; identical to SEQ ID NO: 6610
  chr8:140714564-140715094
  hypo

SEQ ID NO: 22781 - DNA, 368 bp, Homo sapiens; identical to SEQ ID NO: 6611
  chr8:140715219-140715587
  hypo

SEQ ID NO: 22782 - DNA, 322 bp, Homo sapiens; identical to SEQ ID NO: 6612
  chr8:140715699-140716021
  hypo

SEQ ID NO: 22783 - DNA, 349 bp, Homo sapiens; identical to SEQ ID NO: 6613
  chr8:140716339-140716688
  hypo

SEQ ID NO: 22784 - DNA, 30 bp, Homo sapiens
  chr8:140746563-140746593
  hypo
gagagaagtcagtgcgtggcttatgataag

SEQ ID NO: 22785 - DNA, 31 bp, Homo sapiens
  chr8:140758283-140758314
  hypo
gtgcaccttcactccacggctctgtgatcag

SEQ ID NO: 22786 - DNA, 105 bp, Homo sapiens
  chr8:140802180-140802285
  hypo
ctcccgtcccggtgcgtccctcccgacccaggggaaggacatttggtgtggatcatccttctcagtaatggggttatttggggcctggccgggctggggaacatg

SEQ ID NO: 22787 - DNA, 133 bp, Homo sapiens
  chr8:140834748-140834881
  hypo
tgacaccctattgtgcggttgaaaagagcacacccaggggccagacctcaagcaggtgctagagatggcctccctcaaggagaggagtctgacctgagagccaagagccgtaggatggcgggggggggctgcc

SEQ ID NO: 22788 - DNA, 141 bp, Homo sapiens
  chr8:140847595-140847736
  hypo
cctggcaggtcctccggggctccgctgctctgcgactctgcagcaagcatcctcgccgccgtccagccttccctcctgcgccccattgtgtcactgtgatggcgcgcacgttcgcccgtgctgtgcgtggatgcacggatg

SEQ ID NO: 22789 - DNA, 194 bp, Homo sapiens
  chr8:140937489-140937683
  hypo
caacagcactggaggccgaaactctaacagaaatatcgcctttctgcccaggaaaaggggtggagtctttgtaggctgcagagttgcatatggaggtgggggaatcttagaggcgagagagctagagaagtggaccctttcattctgcatagaaacctgcagaaatctcggattgatccctgagcaaaacagac

SEQ ID NO: 22790 - DNA, 30 bp, Homo sapiens
  chr8:140962579-140962609
  hypo
ttacttggcaaaccgcggagctcaggcttt

SEQ ID NO: 22791 - DNA, 233 bp, Homo sapiens
  chr8:140963129-140963362
  hypo
agtgaacaccggctccgaaggcctctttggtatgcaccaaaacacatggcatgcggcaagaggaggcgcggcagggagggagccgcacccgccttacagccaaacaaatgaactataaaagggtgaggtgagtcaaccgaggacaatgccctgccaaacagagtgcctcacctgctcacggcttggagtcagccagacccaggcgcgcacatccccaccgccacctccccacc

SEQ ID NO: 22792 - DNA, 31 bp, Homo sapiens
  chr8:141071377-141071408
  hypo
cattcccaaggctgcccggcagcctgttgtg

SEQ ID NO: 22793 - DNA, 288 bp, Homo sapiens
  chr8:141107702-141107990
  hypo
ctcctggccacagacgtgccacagtcggcaggataagaatgcccagctggatcttggggtgcacagccccagctgtgccgctgtccacagggtaagaacgcctgtctgggtgggtccttggtgcacaaccacaggcgcgctgcagtcggcagagtgaggagcctgcctgggtcctccatacgcagtcgcagctgtgccgctgctcccagggtcatgacgcctacccaggtccttagtgcgtggctacagacgtgccgcagtcctaccgggaaagatgccagctcatgt

SEQ ID NO: 22794 - DNA, 428 bp, Homo sapiens
  chr8:141147339-141147767
  hypo
agtcttcctgggagtcggtgctcctcactgggctgccagcgactccaaagcagagaccacatgctccagtgaccaccttggccccacacctggcactcaaggaggtctgcgtaattagtaagtgctggatctcatcatagagatgactgtccaagatcactcatcatagagatgagtgtccaaagtgctgtccaaagtccagatcactctggagcgggtagtgagctttccacggcagataacatggtggcgagcacgtcctgggtgcctaccgcagaccggccctgggcggcctcaccccacgctgcccactcactgtgacggtcggggtcaagccactgcggcaggatctcccacaccagccccaccccgcacctgctgaatcaggttttacattttaactagacgttccaccaatggtttacatt

SEQ ID NO: 22795 - DNA, 71 bp, Homo sapiens
  chr8:141159216-141159287
  hypo
ggcaggacaagcatccgcgtgcccctgcaggcatccgagatgtcaccctctgatctcgttccattgctctg

SEQ ID NO: 22796 - DNA, 133 bp, Homo sapiens
  chr8:141159883-141160016
  hypo
catctccttgaaaggtctgctcgccttgacgcagcacatgaagtacgagtgcgagcagtggagcctacatgaggtggctctctgtatatcatgcatacatacatgcatgtacgtatgtctaggtgttatgtaa

SEQ ID NO: 22797 - DNA, 30 bp, Homo sapiens
  chr8:141231523-141231553
  hypo
cacgtggcagatgccgtctgccataccaac

SEQ ID NO: 22798 - DNA, 214 bp, Homo sapiens
  chr8:141249552-141249766
  hypo
atgcagccaccaggcgctaggaacaaaaaacaagtaagactccggccctgcccgcgagatgagggtggtggagtgagaaggaccaaagtgcaggtgtgcttccctttgctcgggactcactggcacggaggccgcatccacctcctcacggccgtggaggggatgcgtgggaggcgcctggacacctacaccaacacaccgtgcactccgccag

SEQ ID NO: 22799 - DNA, 31 bp, Homo sapiens
  chr8:141268121-141268152
  hypo
caaacaggccagtgaccgctctcccagggct

SEQ ID NO: 22800 - DNA, 31 bp, Homo sapiens
  chr8:141268438-141268469
  hypo
aaactcctcacacacacggctgttgccatct

SEQ ID NO: 22801 - DNA, 37 bp, Homo sapiens
  chr8:141343756-141343793
  hypo
tgggattacaggcgtaagccaccgcgcctggccataa

SEQ ID NO: 22802 - DNA, 30 bp, Homo sapiens
  chr8:141362604-141362634
  hypo
cacactttcaagggcgaggtggagaggcca

SEQ ID NO: 22803 - DNA, 30 bp, Homo sapiens
  chr8:141458496-141458526
  hypo
atccactatgcgtgacgcactgcgtcacag

SEQ ID NO: 22804 - DNA, 251 bp, Homo sapiens
  chr8:141458750-141459001
  hypo
caggggcaggccactccctgccgacctggcaggtggccgccaagctgtgcacaccatacagcaacaccttatcagggatgactcccacagtgcctgctggctggacagcagtgtgcgctattcacgaggcacaggaggcgcagcagaaggcaacaaggtgaggtagaaaggccccgggcctcagagacagacctggtgcttatatcagctctgctgcttggtggctgcccgggtctctaaaccttgctgcc

SEQ ID NO: 22805 - DNA, 31 bp, Homo sapiens
  chr8:141535612-141535643
  hypo
ggacacttagctcttccggaatgaaagcacg

SEQ ID NO: 22806 - DNA, 30 bp, Homo sapiens
  chr8:141544358-141544388
  hypo
agagaagcatcccccgttagaaagattttg

SEQ ID NO: 22807 - DNA, 167 bp, Homo sapiens
  chr8:141566069-141566236
  hypo
tccaaattcacggacgtatggatctgtgttgaaacttgcacttcgcatctggcaaagggaaacaagaaaacgcacggagtgggtggaggcctcccatctctctagcagctgcgtccgttccaagcatcagaggtttctgtgccagggcaaccggactggattccaca

SEQ ID NO: 22808 - DNA, 30 bp, Homo sapiens
  chr8:141566717-141566747
  hypo
gcaggtgcgaaagacgtctacctgtgggac

SEQ ID NO: 22809 - DNA, 98 bp, Homo sapiens
  chr8:141568165-141568263
  hypo
ctctcaccccccactccggcctgcgtaccaaaccgtgctcttgccgtaatgatgggacacgcggactggcccagggaagggggcgtgggtcagggcca

SEQ ID NO: 22810 - DNA, 363 bp, Homo sapiens
  chr8:141588096-141588459
  hypo
tgaggggctacaatgcacacccgtggagtcggctggcagacaatcctggccaccactcaggcctccgccgcccagagagagcatccctggccaccggctcgcagcccccatgcctcggggcccagtgccgagggtgaggaggggccgatcttgtgtaaagcagagaaactggacctcgtggctgtggcagcaggatggcaccttgctgcctaattctaacacggggggtcccttccctcctcaaacacacatgaccacgtatttggcagttaattttctttctttgtaaaactgtgataaaatacagataacataaaattgaccatttcaactaagtgttcagttcagcggcattgagtgtgt

SEQ ID NO: 22811 - DNA, 162 bp, Homo sapiens
  chr8:141589814-141589976
  hypo
agactgagaaggagaacgggtgggtcagagggtacacgatgtttctgctttaatacctgcaatacccgcaccagactgtcttgtaaacaggcagggtccacctgcattcccgtgagtggctcatgcccagagtcacagagctctaggcgcaaggctgagtgt

SEQ ID NO: 22812 - DNA, 31 bp, Homo sapiens
  chr8:141594931-141594962
  hypo
cagtatatacatttgtcgaaattcttccagt

SEQ ID NO: 22813 - DNA, 443 bp, Homo sapiens
  chr8:141596787-141597230
  hypo
gacagccactcccctgaggaccgactgagcttctctctacgccacaccggagtagaacaaagcacttgccaacacgtggccctgttctcaggtggctccaaccacccagtgagacggctcccaggaaacgtctaggacagagcccgggaatctggccctgtggccaatctcgatttcagggtcgggcacgctcctctcggggaggagagtcactgtccttcggtgactcccagcttacaaggtgctcatgcagttacttaaccgagcctcacaaccataccacaaaggggcacaccgctggctgcaagaaggttttgggctggaacacgagctacttgcaggtgaagcaaagctgctgggccggctccaaaccaggcccctccaccgggcccccaagcagagtccaggcacagacgcagctcgagcccagggctcaggctgac

SEQ ID NO: 22814 - DNA, 473 bp, Homo sapiens
  chr8:141599858-141600331
  hypo
aggcaatggcacagcagccaccgagatccgtgccatcagcacgagccgcagaacaggacggagtgatggctcagtgagtacagaccagagagtagatgctatcaagctgtactctcctgctaaaatcaggacacgagggtgacaactcacctgttgtctacacaagcaagcctcccttatggccacccaagttgacgctaaacacagtcatggcagcttttttggtgaaatggacagagacggtctcagaatgtgtgctgggaatgcagtcggaacatctgctcctgtcagccggagtgcagacaactgtatgctgtctcccatgccaggcccgggccaccaatgagcccacggtgagccgaagtcaaagcctcacccagcccacgttcacagagacgcgtctggcccaggcgtcacagctgtgcagggatggctggagctgggtccccagctgatgcgttctaccccctccc

SEQ ID NO: 22815 - DNA, 30 bp, Homo sapiens
  chr8:141613365-141613395
  hypo
ctcaaagcggagtgcgtggtgcctccacac

SEQ ID NO: 22816 - DNA, 30 bp, Homo sapiens
  chr8:141636282-141636312
  hypo
gagctgtcggggtccggcgcacctgggtct

SEQ ID NO: 22817 - DNA, 82 bp, Homo sapiens; identical to SEQ ID NO: 6616
  chr8:141644413-141644495
  hypo

SEQ ID NO: 22818 - DNA, 31 bp, Homo sapiens
  chr8:141704909-141704940
  hypo
taaggaccataaagcacgtgtgctcataacc

SEQ ID NO: 22819 - DNA, 43 bp, Homo sapiens
  chr8:141738004-141738047
  hypo
agaaagacggccgggcgcggtggctcacacctgtaatcccagc

SEQ ID NO: 22820 - DNA, 31 bp, Homo sapiens
  chr8:141741418-141741449
  hypo
caaaaatgctagagtacgcattataagaaaa

SEQ ID NO: 22821 - DNA, 31 bp, Homo sapiens; identical to SEQ ID NO: 6618
  chr8:142010383-142010414
  hypo

SEQ ID NO: 22822 - DNA, 80 bp, Homo sapiens; identical to SEQ ID NO: 6619
  chr8:142010731-142010811
  hypo

SEQ ID NO: 22823 - DNA, 972 bp, Homo sapiens; identical to SEQ ID NO: 6620
  chr8:142011161-142012133
  hypo

SEQ ID NO: 22824 - DNA, 794 bp, Homo sapiens; identical to SEQ ID NO: 6621
  chr8:142138199-142138993
  hypo

SEQ ID NO: 22825 - DNA, 211 bp, Homo sapiens
  chr8:142157056-142157267
  hypo
tcagcagtaatgagctgcactcggcctttgaacataaggaatgcgtgcgtagcactcccagcgctgctccgggtctcctggcccgatgactctcggctccttcatctcgacgcacccgtgaggaaggtgactgagggttgccgctggcctgctcttccctcacccattccgtccatcactcagcctcgccggactaccttcagtgttcctt

SEQ ID NO: 22826 - DNA, 31 bp, Homo sapiens
  chr8:142161895-142161926
  hypo
tgatgggctgccatctcgaccacttcgaaga

SEQ ID NO: 22827 - DNA, 30 bp, Homo sapiens
  chr8:142178223-142178253
  hypo
gtgctttctggcccccgataactctctgct

SEQ ID NO: 22828 - DNA, 30 bp, Homo sapiens
  chr8:142178456-142178486
  hypo
agatcctggacaagccgcacgaggcctcga

SEQ ID NO: 22829 - DNA, 30 bp, Homo sapiens
  chr8:142187185-142187215
  hypo
ccacacccgcaggccggagttgggtgtttt

SEQ ID NO: 22830 - DNA, 35 bp, Homo sapiens
  chr8:142190006-142190041
  hypo
acgcaggaggtcgaggcgcccgcaggggctggcag

SEQ ID NO: 22831 - DNA, 242 bp, Homo sapiens
  chr8:142203889-142204131
  hypo
cagcacttttccagcacgcagtgcagtcttcttccccagaggcccctcggccattaggttctaagcccgagaagggtcctgtgcacctgccaggcggccctgaccctcaggcggcagaggccctgtccaggaaggacatagatttggaggcacacgcgtcaattctgggtagccgggcaaagccctggtgctcttgggaggggcttctttccctgctgacccctcccgtttctccctggcag

SEQ ID NO: 22832 - DNA, 31 bp, Homo sapiens
  chr8:142204676-142204707
  hypo
cgagtcacaggtgacccgtggccctcacgtc

SEQ ID NO: 22833 - DNA, 31 bp, Homo sapiens
  chr8:142205350-142205381
  hypo
gtgtggttgttggagccggagggagcgtgtc

SEQ ID NO: 22834 - DNA, 109 bp, Homo sapiens
  chr8:142221149-142221258
  hypo
aaggcatggagttccgacaggttccagcacgcatgtccccttcgcaagcgggggaggccctcgcacatccacacacccgaggtagccttgcggcgggacttgggaggca

SEQ ID NO: 22835 - DNA, 30 bp, Homo sapiens
  chr8:142222299-142222329
  hypo
gactctgtctccaccggtccctgcaggccc

SEQ ID NO: 22836 - DNA, 31 bp, Homo sapiens
  chr8:142226754-142226785
  hypo
ggttcctggtgagcctcgctgcaggacggaa

SEQ ID NO: 22837 - DNA, 31 bp, Homo sapiens
  chr8:142228045-142228076
  hypo
gagcttctccgtgagccgcaggtgggcagag

SEQ ID NO: 22838 - DNA, 512 bp, Homo sapiens
  chr8:142228299-142228811
  hypo
ctggaggtggtggccccgctctggttccggtgccggtgctgccgctgccgcttctgcatgtcgtacaggtcgctcatgctgcgcgacggcttgatcagcaccacggcgttggcgcgccggtagcggtagcagtgggacccaagcttgccgtagtaggagaaggtgctggaggcctgcctgcggaacgcgtgccgccgccgccgcatggagctcgacgtggccgagggcttcgtgtccaccctggtgtagccgccgagggcgtcttttgtgggggagccacttccgtttgggactttagcttcattcaagtgattatccagcaaggtctcgtcctccttggcggcttccttgaggaaggtggccaggcggggcagcttggtcttggcgagctcctggctggtgctgcggggggtggcggggtaggaggcgtcgtggaagatggagggctcgatgtcgtgcaggaacagcagctcgggctccaggtccagcgcggtgtccggcacgtgcaatgc

SEQ ID NO: 22839 - DNA, 30 bp, Homo sapiens
  chr8:142230989-142231019
  hypo
ggcgccagggcagccgcacccccacacgca

SEQ ID NO: 22840 - DNA, 938 bp, Homo sapiens
  chr8:142235201-142236139
  hypo
ctgaccagtgcgacacgcgacatcatcgtgggtcagcctccactgctgccgtcctccagcaacggtcgccttttcttttttaaaaaaaacatgtctaataacattgagttgtatcctagacactgtgaatgatgtgtcatagactacactgctatattcctctgagagtgttcatggttttatttaacacgagggtttgaaattcccgccccatctcctaactccacccgaactctgcctgtgggttcttcaagaaaggcagagtggagttaactatccaagtttcagccaccctgtgttgcgtcaacgaaggccaacagtcgggttaaaagcggtgccaagagagaaacccaggcattccctcttccagccatcaccttcctacttggtttctgccccaagcgctggctgggtgtcaggagggtggggaggacctgcaggtgcgacccagcccacctaatctagaggaggcgctgcgtgcacaggcctgtcccgcctttgtgctgccaaccctgggagccgggaagacgctgggtccggagcagccctggaccaggcagccgtccccagcccagaagggaggcttctcaccccgggagacaagaaggcacagggcactggggggaaccgctaggcccgggccaggccctcggctcccagtcctcctgtggaggctgcttctccacccttgtcccacaggcccctccagagcctggtgggacccggccccaggcctccctgggcacctccacccgccagcctcctcccctttgccctcagctctgactcctatagtccccacagctgccccagcctccgtgcggccccggccctggtctctcctgtgttgccagcccccagccctaggtcaggcctccccacgcctctctctgactcccactaactcacccctacatctggccggcctgccttgggac

SEQ ID NO: 22841 - DNA, 30 bp, Homo sapiens
  chr8:142236374-142236404
  hypo
gacacagagcccaccgtggcaccaccgccc

SEQ ID NO: 22842 - DNA, 416 bp, Homo sapiens
  chr8:142240385-142240801
  hypo
cccatctcaacaagggagggccgctcctgaagtccccgcccttccatcagaaagcctctcaggacagaaggcagagagggaagcggccgcaaagacccatgggtgccgagggttcccagcacggccaacagggccctgcacactcacaggacagtccttgtattggagacaaacagctgtgccggagaggggtcctgagacagcagctccggtggccacgtgaaggtctgaagccccaagcgtgcccagctccaggatggggtaagcagcgggggaggtagggccctggtggctggggggccgccaggagcagcgcccaggccagtgctgcctctgccgcccggccttgctgcccgagcgcacgctgtgtctggggacagtccggccgctgccccggcacctatacctgacactat

SEQ ID NO: 22843 - DNA, 31 bp, Homo sapiens
  chr8:142242138-142242169
  hypo
ccacacgccaagtgcccgactcaggctctgc

SEQ ID NO: 22844 - DNA, 31 bp, Homo sapiens
  chr8:142243947-142243978
  hypo
aggtccagcaggtctgcggctggacctgact

SEQ ID NO: 22845 - DNA, 31 bp, Homo sapiens
  chr8:142253705-142253736
  hypo
tgtgctccagcctgggcgacagagaccctgt

SEQ ID NO: 22846 - DNA, 31 bp, Homo sapiens
  chr8:142254341-142254372
  hypo
ctgtgcctcctccaagcgagcagctccagat

SEQ ID NO: 22847 - DNA, 143 bp, Homo sapiens
  chr8:142262364-142262507
  hypo
ggggactccctacagggtccccgctctgctgcccggtaatctggaagagacaccacatcttgcccatgcgagcctggtcatgccaacctgtgcgtctctgttaatttccgtgttttcacgcccacctgcgcgtctgtgaattt

SEQ ID NO: 22848 - DNA, 601 bp, Homo sapiens
  chr8:142262686-142263287
  hypo
tttccgtgttttcatgcccacctgtgcatctgtgaatttccgtgttttcatgcccacctgcgtctgtgaatttccgttttcacgcccacctgtgcgtctgtgaatttccgtgttttcacgcccacctgcgtgtctgtgaatttccgtgttttcatgcccacctgcgtctgtgaatttccgttttcacgcccacctgtgcgtctgtgaatttccgtgttttcacgcccacctgcgtgtctgtgaatttccgtgttttcatgcccacctgcccgtgtctgtgaatttctgttttcatatccacctgtgtgtctgtgaattttcgtgttttcatgcccacctgcgtgtctgtgaatttccgtgttttcacgcccacctgtgcgtgtccgcgaatttccgtgttttcacacccacctgtgcgtctgtgaatttccgtgttttcacacccacctgtgtctgtgaatttccgtgttttcacgcccacctgcgagtgtctgtgaatttccgtgttttcacgcccacctgcgagtgtctgtgaatttccgtgttttcacgcccacctgcaagtctatgaatttccgtgttttcatgcccacctgcgggt

SEQ ID NO: 22849 - DNA, 142 bp, Homo sapiens
  chr8:142263346-142263488
  hypo
cccacctgtgtgtctgtgaatttccgtgttttcatgcccacctgcgtgtgtctgtgaatttctgtgttttcatgcccacctgtgcgtctgtgattttccgtgttttcatgcccacctgtgcgtgcctgtgaatttccatgct

SEQ ID NO: 22850 - DNA, 324 bp, Homo sapiens
  chr8:142264101-142264425
  hypo
attggtgtgaccagagcggtttccatggcgtaacagaactccctgccaaacatcaccgccccgtgcatcacccacaggcgcatggggattcggtctatggacccctcgctgatggtctcgcagttctcggcctctgcgcctccggctttctgcgggtccggcaggggcacggataactcttgaacttgcatagattccgggtcggcattctgcggagccattttcattaccaccaaaaatatatgtatttatctatatattctatctatataaataatgctttcatatatctgtaatgataaattaagacgtcttctctttctg

SEQ ID NO: 22851 - DNA, 30 bp, Homo sapiens
  chr8:142277349-142277379
  hypo
cagctctgggaagccggcagaccacctgct

SEQ ID NO: 22852 - DNA, 31 bp, Homo sapiens
  chr8:142277816-142277847
  hypo
aaagatactccacactcgaggtcctcaaggg

SEQ ID NO: 22853 - DNA, 156 bp, Homo sapiens
  chr8:142280195-142280351
  hypo
gaccctgagggcacagcgcagttggactacctctgggtccagcacacacgcagcgcaggcacccagatggtctttaaaagaaacgaatccctaagtgctaaaggcagaggggccagtccaacccataattactccatcaataaagaaaaccagggg

SEQ ID NO: 22854 - DNA, 219 bp, Homo sapiens
  chr8:142290908-142291127
  hypo
tgcagagagcaggtccctgtccgggcacctcccgaaggactgtcttagcacgaccttgcttctcccaggggagggaaaggaaaagggcctcgtgaggtctccgcaagaccgggctgtgcgtcctacaccaggctgccttctcctgcacattttcctactcaaagacaacggagtccaggcatcctctcagcatcgcacgagttcccctggtgcagaaaa

SEQ ID NO: 22855 - DNA, 86 bp, Homo sapiens
  chr8:142292574-142292660
  hypo
ctccctccaggccgccgctcagggcacgccgcctccatcgctgccctctctccaggccaccactcagggcgcgctgcgctcagctc

SEQ ID NO: 22856 - DNA, 112 bp, Homo sapiens
  chr8:142295925-142296037
  hypo
cctaaagatgtgagatcgtgagttctagccatggtcccagtagggcaccctcaagacctctggaacctgtgtggtgcttctcacaacagaacagggccgggcacctccttga

SEQ ID NO: 22857 - DNA, 30 bp, Homo sapiens
  chr8:142302375-142302405
  hypo
gtgggctcaggccacgtggcacactgggcc

SEQ ID NO: 22858 - DNA, 32 bp, Homo sapiens
  chr8:142304054-142304086
  hypo
aaaaaaaaaaatcatccgcggtaaagatctac

SEQ ID NO: 22859 - DNA, 145 bp, Homo sapiens
  chr8:142305924-142306069
  hypo
gccagcagccctgcaccgcccaggatggtgcggagctcatctcgtaaggtcagaggctccctggctttggtgctggagcccttgcccctctggcacaaagggacaaggtgtccacagcccggggtcagcccgacaagaccaccat

SEQ ID NO: 22860 - DNA, 206 bp, Homo sapiens
  chr8:142312705-142312911
  hypo
caggcatgagccaccgcggcaggcgtaaagttattttacagaacacataagcaaaaatgttttcaggcctttgcttgacagcaatgtaactctaaaacattcctaattcattcatcactgacagtgaaaaagctgcctctacgatactcaggcagtccccctcgcctcgtgtctaacatgctcttaatatgcgatttcatctccag

SEQ ID NO: 22861 - DNA, 746 bp, Homo sapiens; identical to SEQ ID NO: 6624
  chr8:142317851-142318597
  hypo

SEQ ID NO: 22862 - DNA, 91 bp, Homo sapiens
  chr8:142349896-142349987
  hypo
tggccgccccccaccccgctgcacccccatattccactcacagaccttcttcctgctgaacacagctgggccctgacgcctctgtgccttg

SEQ ID NO: 22863 - DNA, 796 bp, Homo sapiens
  chr8:142367359-142368155
  hypo
cacacatgatgcggccggtaaacacgctgatgaccagcaggggcagcaggaactccaggacagtcagcgcaaagacacggcagcagggccggctgcctgtcacgcccagcaccgacagggtgacggcaccggcggccagccacacgaaggcgcacacggccctggcacaggcaggctggcggcagcggcgggagccttcgggccgcacgatggccaggtagcggtccacgcagatgcaggtgaggaagaggatggagcagtgcatgttgaggaagtaaccgaggacgtgcgggaaggcacagcgcaggcagcccctggcgccgtagtacacagcgaagcgcgtgggcagggacagccctaccagtagatcggtcaccaccaggttgatggtgtagatgactgagggtgtcttggcccgggtgcggcagcagaagacgtacagcgccagcccgttgagcaccagccctgccaggaagatggctccgtgcaccgccatcagcgccagccacaggcctgggaaggtgccatgcagctcctcgtccagccgggcaaacaggtggaacaggggcacctccagcccgctggcattggtccgcactgttgtcactgcggtggcattggggactgccccggccgagggccccgctggagacacagagggcatgacggcagccagcacaccccaggcctggaagcaaggagaccaggtcaccccaggcgccagcctggccttaagccctgccctgaggcccagaactcagctggcccgtctgcccctgcacgcccagcatccccc

SEQ ID NO: 22864 - DNA, 189 bp, Homo sapiens
  chr8:142374614-142374803
  hypo
ttctccctgtcccccacgcccacaggccagggctccctccaccccagtgcagagagagacgtcactggtgggcacagactgagctctgtggggaaggacacctgggccccatctgacccgactctgcctcagttccaccagctaagagccctcttgctgagactgcggctctaacggaaacaccagtgt

SEQ ID NO: 22865 - DNA, 36 bp, Homo sapiens; identical to SEQ ID NO: 6625
  chr8:142425764-142425800
  hypo

SEQ ID NO: 22866 - DNA, 30 bp, Homo sapiens
  chr8:142437113-142437143
  hypo
ttctgtgaggcccccggcagctgcgtggct

SEQ ID NO: 22867 - DNA, 30 bp, Homo sapiens
  chr8:142439265-142439295
  hypo
gtggctgagggctgcgccttccccagtgtg

SEQ ID NO: 22868 - DNA, 173 bp, Homo sapiens
  chr8:142537301-142537474
  hypo
ttttcttataatcaaacaccacgtctgtctgtgtctgttgatactgactgcggccacacacgaggcatgggaacaatggctgtgcggagctctgggccctctgtgcttgtgcacatgtttgctggtatccggtgcacgtgcatgcatgcttcgcacatgtgtagatgtgtgca

SEQ ID NO: 22869 - DNA, 39 bp, Homo sapiens
  chr8:142541545-142541584
  hypo
cgcccggccggcttggccgtctttatggttgtacagtgc

SEQ ID NO: 22870 - DNA, 191 bp, Homo sapiens
  chr8:142881148-142881339
  hypo
cagctgattggcaggggagtgcgctgggcaggccgtggttctcactcttcactgcggctggagggtctgggtgggaaggtgggtacagggagcaggcatgtcggactatgaatgcggagtgggaaacacagaacgactcgttgtggggagactagggatggacggggtccgctggtggagggctggaccag

SEQ ID NO: 22871 - DNA, 30 bp, Homo sapiens
  chr8:142984452-142984482
  hypo
gctctatcgcaggccgggcacgctttgctc

SEQ ID NO: 22872 - DNA, 327 bp, Homo sapiens
  chr8:143054763-143055090
  hypo
caagagactgtacttgcctcacgtgtgcctgggctcacggtgcctgcgctcacgggtgcctgccctcacggtgcctgcgttcacgggtgcctgccctcacgggtgcctgccctcacggtgcctgcgctcacgggtgcctgcgctcacggtgcctgggctcacggtgcctgcgctcacgggtgcctgcgctcacggtgcctgcgctcacgggtgcctgcgctcacggtgcctgggctcacggtgcctgcgctcacgggtgcctgccctcacgagcctgcgctcacgggtgcctgtgcttacaggtgcgcaccaccccccacaccctct

SEQ ID NO: 22873 - DNA, 30 bp, Homo sapiens
  chr8:143088690-143088720
  hypo
accaggccggctgcacggaccgcagggtgc

SEQ ID NO: 22874 - DNA, 30 bp, Homo sapiens
  chr8:143089030-143089060
  hypo
ggcttcccaggccttcgcagcccgtgtgaa

SEQ ID NO: 22875 - DNA, 30 bp, Homo sapiens
  chr8:143089303-143089333
  hypo
cacctggacacaccgcgcccactgcacaga

SEQ ID NO: 22876 - DNA, 411 bp, Homo sapiens
  chr8:143152591-143153002
  hypo
tgaagcacagagaagctcacccggctgacggagggcgaatcggggcggccaggctggaaagccgttaggtgacggggaatgcgttgaagaggtgcatctccccccccgaccccgggttaattctacctcggccagatgcctagagaaggtcaccgcagagtccacaatgacacacaacggcatcgatggaagcttaggtagcaaaactacgtatcagcaaaaaatggaaacccccagcatagccggcagtaggagagcgtggactagtcgaggtggggtggccacgtgttcgcgcagcggcccggggtccagcggctctgctgagggaagagcctcagattcaacagggaaaaaccggaacgcttcatgttgaaggggtaggctgaacacggcatgatgctgctcatctga

SEQ ID NO: 22877 - DNA, 406 bp, Homo sapiens
  chr8:143171101-143171507
  hypo
caggcccacaagcacaggcctcgggccagatcacacgacacccactcggaaactggagtcaacagagagccgcagctgctcgtaccgggcaagtctctgcggggtgggaccctgtcccaggacgcaggattggcgctgagctcgggatctctgtgtgcacctgcatcgctggtaggaggacgcccaggaaccaaggagtgaggcaggagcagcccccggcatcatcactcccagtgacccaggaagggatttgtgcttttttccctgcggctctgggcactgcagagttagaggtcctggtccccggggatggagggagggggtatatcagcgggcacagagcatgtccagtgacgcacaaaccacggctgccctctggtgcgtcgggttccttgtggggggatca

SEQ ID NO: 22878 - DNA, 283 bp, Homo sapiens
  chr8:143234554-143234837
  hypo
agcagcatggagagaagctggcgaggcatgcagaacccagccctggggcatggcgggacccgtgtctcaggagaaaccaggcgaaggcgaagggccggtggcaccagagcaagggctgagcagctgccgggctgtgagaaggcggatacgaatcccagcagggcaagcgggcgtctccttggccctcgctccaagaggcgcacaagaaatgaagccgctggcagcagaaggtgcaggaaagtggacagaccggagccttgtcgctcataatgccttgtgcctc

SEQ ID NO: 22879 - DNA, 137 bp, Homo sapiens
  chr8:143269992-143270129
  hypo
ggcacacacctgcacagcacacgcctatatgccacacgcctgcacatggcacacacctgtacacggcacactcctatatgccacacgcctgcacatgggacacacctgcacagcacgtgcctatatggcacatacct

SEQ ID NO: 22880 - DNA, 30 bp, Homo sapiens
  chr8:143333257-143333287
  hypo
atgtacctgccgcccgcgttctctgtctgc
